(19) United States
(12) Patent Application Publication
(10) Pub. No.: US 2008/0064029 A1
(43) Pub. Date: Mar. 13, 2008

(54) Methods and Nucleic Acids for Analyses of Colorectal Cell Proliferative Disorders

(75) Inventors: Cathy Lofton-Day, Brier, WA (US); Fabian Model, Seattle, WA (US); Andrew Sledziewski, Shoreline, WA (US); Tamas Rujan, Berlin (DE); Jorn Lewin, Berlin (DE); Jurgen Distler, Berlin (DE)

Correspondence Address: DAVIS WRIGHT TREMAINE, LLP/Seattle, 1201 Third Avenue, Suite 2200, SEATTLE, WA, 98101-3045, US

(73) Assignee: Epigenomics AG, Berlin (DE)

(21) Appl. No.: 10/562,383

(22) PCT Filed: Jun. 23, 2004
(86) PCT No.: PCT/US04/20336

§ 371 Date: Jun. 13, 2007

Related U.S. Application Data
(63) Continuation of application No. 10/603,138, filed on Jun. 23, 2003, now abandoned.
Application No. 10/603,138 is a continuation of application No. 10/602,494, filed on Jun. 23, 2003, now abandoned.

(30) Foreign Application Priority Data
Feb. 27, 2004 (EP) 04090072.2
May 6, 2004 (GB) 04090175.3

(51) Int. Cl. C12Q 1/68; C07H 21/00

(52) U.S. Cl. 435/6; 536/23.1

(57) ABSTRACT

The invention provides methods, nucleic acids and kits for detecting, or for detecting and distinguishing between or among colorectal cell proliferative disorders. The invention discloses genomic sequences the methylation patterns of which have utility for the improved detection of and differentiation between said class of disorders, thereby enabling the improved diagnosis and treatment of patients.

### CROSS-REFERENCE TO RELATED APPLICATIONS

[0001] This application claims the benefit of priority to: U.S. patent application Ser. No. 10/679,062, filed 3 Oct. 2003, which is a continuation-in-part of U.S. patent application Ser. No. 10/603,138, filed 23 Jun. 2003; to U.S. application Ser. No. 10/602,494, filed 23 Jun. 2003; to European Patent Application No. EP 04090175.3, filed 6 May 2004; and to European Patent Application No. EP 04090072.2, filed 27 Feb. 2004; all of which are incorporated herein by reference in their entirety.

### FIELD OF THE INVENTION

[0002] The present invention relates to genomic DNA sequences that exhibit altered CpG methylation patterns in disease states relative to normal. Particular embodiments provide methods, nucleic acids, nucleic acid arrays and kits useful for detecting, or for detecting and differentiating between or among colorectal cell proliferative disorders.

### SEQUENCE LISTING

[0003] A Sequence Listing, pursuant to 37 C.F.R. § 1.52(e)(5), has been provided on compact disc (1 of 1) as a 4.17 MB text file, entitled “Sequence Listing for 47675-75.txt,” and which is incorporated by reference herein in its entirety.

### BACKGROUND

[0004] The etiology of pathogenic states is known to involve modified methylation patterns of individual genes or of the genome. 5-methylcytosine, in the context of CpG dinucleotide sequences, is the most frequent covalently modified base in the DNA of eukaryotic cells, and plays a role in the regulation of transcription, genetic imprinting, and tumorigenesis. The identification and quantification of 5-methylcytosine sites in a specific specimen, or between or among a plurality of specimens, is thus of considerable interest, not only in research, but particularly for the molecular diagnoses of various diseases.

[0005] Correlation of aberrant DNA methylation with cancer. Aberrant DNA methylation within CpG ‘islands’ is characterized by hyper- or hypomethylation of CpG dinucleotide sequences leading to abrogation or overexpression of a broad spectrum of genes, and is among the earliest and most common alterations found in, and correlated with human malignancies. Additionally, abnormal methylation has been shown to occur in CpG-rich regulatory elements in intronic and coding parts of genes for certain tumors. In colon cancer, for example, aberrant DNA methylation constitutes one of the most prominent alterations and inactivates many tumor suppressor genes such as p14ARF, p161NK4a, THBS1, MINT2, and MINT31 and DNA mismatch repair genes such as hMLH1.

[0006] In contrast to the specific hypermethylation of tumor suppressor genes, an overall hypomethylation of DNA can be observed in tumor cells. This decrease in global methylation can be detected early, far before the development of frank tumor formation. A correlation between hypomethylation and increased gene expression has been determined for many oncogenes.

[0007] In the United States the annual incidence of colorectal cancer is approximately 150,000, with 56,600 individuals dying form colorectal cancer each year. The lifetime risk of colorectal cancer in the general population is about 5 to 6 percent. Despite intensive efforts in recent years in screening and early detection of colon cancer, until today most cases are diagnosed in an advanced stage with regional or distant metastasis. While the therapeutic options include surgery and adjuvant or palliative chemotherapy, most patients die from progression of their cancer within a few months. Identifying the molecular changes that underlie the development of colon cancer may help to develop new monitoring, screening, diagnostic and therapeutic options that could improve the overall poor prognosis of these patients.

[0008] The current guidelines for colorectal screening according to the American Cancer Society utilizes one of five different options for screening in average risk individuals 50 years of age or older. These options include 1) fecal occult blood test (FOBT) annually, 2) flexible sigmoidoscopy every five years, 3) annual FPBT plus flexible sigmoidoscopy every five years, 4) double contrast barium enema (DCBE) every five years or 5) colonoscopy every ten years. Even though these testing procedures are well accepted by the medical community, the implementation of widespread screening for colorectal cancer has not been realized. Patient compliance is a major factor for limited use due to the discomfort or inconvenience associated with the procedures. FOBT testing, although a non-invasive procedure, requires dietary and other restrictions 3-5 days prior to testing. Sensitivity levels for this test are also very low for colorectal adenocarcinoma with wide variability depending on the trial. Sensitivity measurements for detection of adenomas is even less since most adenomas do not bleed. In contrast, sensitivity for more invasive procedures such as sigmoidoscopy and colonoscopy are quite high because of direct visualization of the lumen of the colon. No randomized trials have evaluated the efficacy of these techniques, however, using data from case-control studies and data from the National Polyp Study (U.S.) it has been shown that removal of adenomatous polyps results in a 76-90% reduction in CRC incidence. Sigmoidoscopy has the limitation of only visualizing the left side of the colon leaving lesions in the right colon undetected. Both scoping procedures are expensive, require cathartic preparation and have increased risk of morbidity and mortality. Improved tests with increased sensitivity, specificity, ease of use and decreased costs are clearly needed before general widespread screening for colorectal cancer becomes routine.

[0009] Early colorectal cancer detection is generally based on the fecal occult blood test (FOBT) performed annually on asymptomatic individuals. Current recommendations adapted by several healthcare organizations, including the American Cancer Society, call for fecal occult blood testing beginning at age 50, repeated annually until such time as the patient would no longer benefit from screening. A positive FOBT leads to colonoscopic examination of the bowel; an expensive and invasive procedure, with a serious complication rate of one per 5,000 examinations. Only 12% of patients with heme positive stool are diagnosed with cancer or large polyps at the time of colonoscopy. A number of studies show that FOBT screening does not improve cancer-related mortality or overall survival. Compliance with occult blood testing has been poor; less than 20 percent of the population is offered or completes FOBT as recommended. If FOBT is properly done, the patient collects a fecal sample from three consecutive bowel movements. Samples are obtained while the patient adheres to dietary guidelines and avoids medications known to induce occult gastrointestinal bleeding. In reality, physicians frequently fail to instruct patients properly, patients frequently fail to adhere to protocol, and some patients find the task of collecting fecal samples difficult or unpleasant, hence compliance with annual occult blood testing is poor. If testing sensitivity and specificity can be improved over current methods, the frequency of testing could be reduced, collection of consecutive samples would be eliminated, dietary and medication schedule modifications would be eliminated, and patient compliance would be enhanced. Compounding the problem of compliance, the sensitivity and specificity of FOBT to detect colon cancer is poor. Poor test specificity leads to unnecessary colonoscopy, adding considerable expense to colon cancer screening.

[0010] Specificity of the FOBT has been calculated at best to be 96%, with a sensitivity of 43% (adenomas) and 50% (colorectal carcinoma). Sensitivity can be improved using an immunoassay FOBT such as that produced under the tradename ‘InSure™’, with an improved sensitivity of 77% (adenomas) and 88.9% (colorectal carcinoma.

[0011] Molecular disease markers offer several advantages over other types of markers, one advantage being that even samples of very small sizes and/or samples whose tissue architecture has not been maintained can be analyzed quite efficiently. Within the last decade a number of genes have been shown to be differentially expressed between normal and colon carcinomas. However, no single or combination of marker has been shown to be sufficient for the diagnosis of colon carcinomas. High-dimensional mRNA based approaches have recently been shown to be able to provide a better means to distinguish between different tumor types and benign and malignant lesions. However its application as a routine diagnostic tool in a clinical environment is impeded by the extreme instability of mRNA, the rapidly occurring expression changes following certain triggers (e.g., sample collection), and, most importantly, the large amount of mRNA needed for analysis (Lipshutz, R. J. et al., Nature Genetics 21:20-24, 1999; Bowtell, D. D. L. Nature genetics suppl. 21:25-32, 1999), which often cannot be obtained from a routine biopsy.

[0012] The use of biological markers to further improve sensitivity and specificity of FOBT has been suggested, examples of such tests include the PreGen-Plus™ stool analysis assay available from EXACT Sciences which has a sensitivity of 20% (adenoma) and 52% (colorectal carcinoma) and a specificity of 95% in both cases. This test assays for the presence of 23 DNA mutations associated with the development of colon neoplasms. The use of DNA methylation as colon cancer markers is known. For example Sabbioni et al. (Molecular Diagnosis 7:201-207, 2003) detected hypermethylation of a panel of genes consisting TPEF, HIC1, DAPK and MGMT in peripheral blood in 98% of colon carcinoma patients. However, this does provide a suitable basis for a commercially marketable test, as the specificity of such a test must also be sufficiently high.

[0013] The current model of colorectal pathogenesis favours a stepwise progression of adenomas, which includes the development of dysplasia and finally signs of invasive cancer. The molecular changes underlying this adenoma-carcinoma sequence include genetic and epigenetic alterations of tumor suppressor genes (APC, p53, DCC), the activation of oncogenes (K-ras) and the inactivation of DNA mismatch repair genes. Recently, further molecular changes and genetic defects have been revealed. Thus, activation of the Wnt signalling pathway not only includes mutations of the APC gene, but may also result from β-catenin mutations. Furthermore, alterations in the TGF-β signalling pathway together with its signal transducers SMAD4 and SMAD2 have been linked to the development of colon cancer.

[0014] Despite recent progress in the understanding of the pathogenesis of adenomas and carcinomas of the colon and their genetic and molecular changes, the genetic and epigenetic changes underlying the development of metastasis are less well understood. It is, however, generally well accepted that the process of invasion and proteolysis of the extracellular matrix, as well as infiltration of the vascular basement membrane involve adhesive proteins, such as members of the family of integrin receptors, the cadherins, the immunoglobulin superfamily, the laminin binding protein and the CD44 receptor. Apart from adhesion, the process of metastasis formation also includes the induction and regulation of angiogenesis (VEGF, bFGF), the induction of cell proliferation (EGF, HGF, IGF) and the activation of proteolytic enzymes (MMPs, TIMPs, uPAR), as well as the inhibition of apoptosis (Bcl-2, Bcl-X). More recently other groups have compared the genetic and molecular changes in metastatic lesions to the changes found in primary colorectal cancers. Thus, Kleeff et al. reported the loss of DOC-2, a candidate tumor suppressor gene, both in primary and metastatic colorectal cancer. Furthermore, Zauber et al. reported that in their series of 42 colorectal cancers Ki-ras mutations in the primary cancers were identical in all of the 42 paired primary and synchronous metastatic lesions. Similarly loss of heterozygosity at the APC locus was identical for 39 paired carcinomas and synchronous metastasis. The authors concluded that for Ki-ras and APC genes the genetic changes in metastasis are identical to the primary colorectal cancer. However, other groups have found genetic and molecular changes in metastatic colon cancers, that are not present in the primary cancers. Thus, the development of LOH of chromosome 3p in colorectal metastasis has been reported. In addition, using comparative genomic hybridization several alterations were found in liver metastasis that were unique to metastastic lesions (−9q, −11q, and −17q).

[0015] Apart from mutations aberrant methylation of CpG islands has been shown to lead to the transcriptional silencing of certain genes that have been previously linked to the pathogenesis of various cancers. CpG islands are short sequences which are rich in CpG dinucleotides and can usually be found in the 5′ region of approximately 50% of all human genes. Methylation of the cytosines in these islands leads to the loss of gene expression and has been reported in the inactivation of the X chromosome and genomic imprinting.

[0016] Recently several groups have also analysed the methylation of various genes in colorectal cancer and reported the transcriptional silencing by promoter methylation for p16INK4, p14ARF, p15INK4b, MGMT, hMLH1, GSTP1, DAPK, CDH1, TIMP-3 and APC among others. Thus apart from mutational inactivation of certain genes, the hypermethylation of these genes also contributes significantly to the pathogenesis of this disease.

[0017] In recent years several genes that are methylated in colon cancer have been identified by MS-APPCR. This group of genes, among others, includes TPEF/HPP1 which is frequently methylated in colon cancers and which was independently identified by two different groups using the MS-APPCR method (see, e.g., Young J, Biden K G, Simms L A, Huggard P, Karamatic R, Eyre H J, Sutherland G R, Herath N, Barker M, Anderson G J, Fitzpatrick D R, Ramm G A, Jass J R, Leggett B A. HPP1: a transmembrane protein-encoding gene commonly methylated in colorectal polyps and cancers. Proc Natl Acad Sci USA 98:265-270, 2001).

[0018] Multifactorial approach. Cancer diagnostics has traditionally relied upon the detection of single molecular markers (e.g., gene mutations, elevated PSA levels). Unfortunately, cancer is a disease state in which single markers have typically failed to detect or differentiate many forms of the disease. Thus, assays that recognize only a single marker have been shown to be of limited predictive value. A fundamental aspect of this invention is that methylation-based cancer diagnostics and the screening, diagnosis, and therapeutic monitoring of such diseases will provide significant improvements over the state-of-the-art that uses single marker analyses by the use of a selection of multiple markers. The multiplexed analytical approach is particularly well suited for cancer diagnostics since cancer is not a simple disease, this multi-factorial “panel” approach is consistent with the heterogeneous nature of cancer, both cytologically and clinically.

[0019] Key to the successful implementation of a panel approach to methylation based diagnostic tests is the design and development of optimized panels of markers that can characterize and distinguish disease states.

[0020] Development of medical tests. Two key evaluative measures of any medical screening or diagnostic test are its sensitivity and specificity, which measure how well the test performs to accurately detect all affected individuals without exception, and without falsely including individuals who do not have the target disease (predicitive value). Historically, many diagnostic tests have been criticized due to poor sensitivity and specificity.

[0021] A true positive (TP) result is where the test is positive and the condition is present. A false positive (FP) result is where the test is positive but the condition is not present. A true negative (TN) result is where the test is negative and the condition is not present. A false negative (IN) result is where the test is negative but the condition is not present. In this context: Sensitivity=TP/(TP+FN); Specificity=TN/(FP+TN); and Predictive value=TP/(TP+FP).

[0022] Sensitivity is a measure of a test's ability to correctly detect the target disease in an individual being tested. A test having poor sensitivity produces a high rate of false negatives, i.e., individuals who have the disease but are falsely identified as being free of that particular disease. The potential danger of a false negative is that the diseased individual will remain undiagnosed and untreated for some period of time, during which the disease may progress to a later stage wherein treatments, if any, may be less effective. An example of a test that has low sensitivity is a protein-based blood test for HIV. This type of test exhibits poor sensitivity because it fails to detect the presence of the virus until the disease is well established and the virus has invaded the bloodstream in substantial numbers. In contrast, an example of a test that has high sensitivity is viral-load detection using the polymerase chain reaction (PCR). High sensitivity is achieved because this type of test can detect very small quantities of the virus. High sensitivity is particularly important when the consequences of missing a diagnosis are high.

[0023] Specificity, on the other hand, is a measure of a test's ability to identify accurately patients who are free of the disease state. A test having poor specificity produces a high rate of false positives, i.e., individuals who are falsely identified as having the disease. A drawback of false positives is that they force patients to undergo unnecessary medical procedures treatments with their attendant risks, emotional and financial stresses, and which could have adverse effects on the patient's health. A feature of diseases which makes it difficult to develop diagnostic tests with high specificity is that disease mechanisms, particularly in cancer, often involve a plurality of genes and proteins. Additionally, certain proteins may be elevated for reasons unrelated to a disease state. In example of a test that has high specificity is a gene-based test that can detect a p53 mutation. Specificity is important when the cost or risk associated with further diagnostic procedures or further medical intervention are very high.

[0024] Pronounced need in the art. If colon cancer screening specificity can be increased, the problem of false positive test results leading to unnecessary colonoscopic examination would be reduced leading to cost savings and improved safety.

[0025] In view of the incidence of colon cancer and disadvantages associated with current colorectal cell proliferative disorder screening methods there is a substantial need in the art for improved methods for the early detection of colon cell proliferative disorders, in particular colon cancer, to be used in addition to or as a substitute for currently available tests.

### SUMMARY OF THE INVENTION

[0026] Various aspects of the present invention provide efficient and unique panels of genes, whereby methylation analysis of one or a combination of the members of the panel enables the detection of cell proliferative disorders of the prostate with a particularly high sensitivity, specificity and/or predictive value. The inventive colorectal cancer testing methods have particular utility for the screening of at-risk populations. The inventive methods have advantages over prior art methods (including the industry standard FOBT), because of improved sensitivity, specificity and likely patient compliance.

[0027] The present invention provides novel methods for detecting or distinguishing between colorectal cell proliferative disorders. Said methods are most preferably utilised for detecting or detecting and distinguishing between one or more of the following: colorectal carcinoma, colon adenoma, inflammatory colon tissue, grade 2 dysplasia colon adenomas less than 1 cm, grade 3 dysplasia colon adenomas larger than 1 cm, normal colon tissue, non-colon normal tissue, body fluids and non-colon cancer tissue.

[0028] In a further embodiment of the invention the method according to the invention may be used for the detection of aerodigestive cell proliferative disorders.

[0029] In one embodiment the invention provides a method for detecting and/or for detecting and distinguishing between or among colorectal cell proliferative disorders in a subject. Said method comprises the following steps: i) contacting genomic DNA isolated from blood plasma, blood serum, whole blood, isolated blood cells, cells isolated from the blood obtained from the subject with at least one reagent, or series of reagents that distinguishes between methylated and non-methylated CpG dinucleotides within at least one target region of the genomic DNA, wherein the nucleotide sequence of said target region comprises at least one CpG dinucleotide sequence; and ii) detecting, or detecting and distinguishing between or among colorectal cell proliferative disorders afforded with a sensitivity of greater than or equal to 80% and a specificity of greater than or equal to 80%.

[0030] Preferably, the sensitivity is from about 75% to about 96%, or from about 80% to about 90%, or from about 80% to about 85%. Preferably, the specificity is from about 75% to about 96%, or from about 80% to about 90%, or from about 80% to about 85%.

[0031] The method is novel as no methods currently exist that enable the detection of colon cancer by analysis of bodily fluids, with a sensitivity and specificity high enough for use in a commercially available and regulatory body approved assay. Current methods used to detect and diagnose colorectal cell proliferative disorders include colonoscopy, sigmoidoscopy, and fecal occult blood colon cancer. In comparison to these methods, the disclosed invention is much less invasive than colonoscopy, and as, if not more sensitive than sigmoidoscopy and FOBT. The development of a body fluid assay represents a clear technical advantage over current methods known in the art in that it is anticipated that patient compliance for a single body fluid based test will be higher than the triplicate analysis of stool currently recommended for FOBT.

[0032] A particular embodiment the method comprises the use of one or more genes or genomic sequences selected from the group consisting of: SEQ ID NOS:1-3, 14, 16, 21, 22, 23, 44-46, 48, 50, 59-64, COX7B, CST5, EYA3, FTH1, RNF4, SOX 21, RNF4, ALX 4, ONC2, NGFR, DLX-5, HVIAAT, BTF3 Homolog 1, ADCY9, BCL-5, BCOR, TAFII28, HOMEOBOX PROTEIN SIX6, GSK-3 BETA, ELK-L, HLA-F, TGFBR2, AR, RNF30 and DUX4 as markers for the differentiation, detection and distinguishing of colorectal cell proliferative disorders.

[0033] Said use of the gene may be enabled by means of any analysis of the expression of the gene, by means of mRNA expression analysis or protein expression analysis. However, in the most preferred embodiment of the invention, the detection, differentiation and distinguishing of colorectal cell proliferative disorders is enabled by means of analysis of the methylation status of one or more genes or genomic sequences selected from the group consisting of SEQ ID NOS:1-3, 14, 16, 21, 22, 23, 44-46, 48, 50, 59-64, COX7B, CST5, EYA3, FTH1, RNF4, SOX 21, RNF4, ALX 4, ONC2, NGFR, DLX-5, HVIAAT, BTF3 Homolog 1, ADCY9, BCL-5, BCOR, TAFII28, HOMEOBOX PROTEIN SIX6, GSK-3 BETA, ELK-L, ELA-F, TGFBR2, AR, RNF30, DUX4, and their promoter or regulatory elements.

[0034] The invention provides a method for the analysis of biological samples for features associated with the development of colorectal cell proliferative disorders, the method characterised in that at least one nucleic acid, or a fragment thereof, from the group consisting of SEQ ID NO:1 to SEQ ID NO:535 is/are contacted with a reagent or series of reagents capable of distinguishing between methylated and non methylated CpG dinucleotides within the genomic sequence, or sequences of interest.

[0035] The present invention provides a method for ascertaining genetic and/or epigenetic parameters of genomic DNA. The method has utility for the improved diagnosis, treatment and monitoring of colorectal cell proliferative disorders, more specifically by enabling the improved identification of and differentiation between subclasses of said disorder. The invention presents improvements over the state of the art in that it enables a highly specific classification of colorectal cell proliferative disorders, thereby allowing for improved and informed treatment of patients.

[0036] Preferably, the source of the test sample is selected from the group consisting of cells or cell lines, histological slides, biopsies, paraffin-embedded tissue, bodily fluids, ejaculate, stool, urine, blood, and combinations thereof. Preferably, the source is selected from the group consisting of stool, blood plasma, blood serum, whole blood, isolated blood cells, cells isolated from the blood obtained from the subject.

[0037] Specifically, the present invention provides a method for detecting colorectal cell proliferative disorders, comprising: obtaining a biological sample comprising genomic nucleic acid(s); contacting the nucleic acid(s), or a fragment thereof, with one reagent or a plurality of reagents sufficient for distinguishing between methylated and non methylated CpG dinucleotide sequences within a target sequence of the subject nucleic acid, wherein the target sequence comprises, or hybridizes under stringent conditions to, a sequence comprising at least 16 contiguous nucleotides of SEQ ID NOS:1 to 64, said contiguous nucleotides comprising at least one CpG dinucleotide sequence; and determining, based at least in part on said distinguishing, the methylation state of at least one target CpG dinucleotide sequence, or an average, or a value reflecting an average methylation state of a plurality of target CpG dinucleotide sequences. Preferably, distinguishing between methylated and non methylated CpG dinucleotide sequences within the target sequence comprises methylation state-dependent conversion or non-conversion of at least one such CpG dinucleotide sequence to the corresponding converted or non-converted dinucleotide sequence within a sequence selected from the group consisting of SEQ ID NOS:304 to SEQ ID NO:535 and SEQ ID NOS:65 to SEQ ID NO:88, and contiguous regions thereof corresponding to the target sequence.

[0038] Additional embodiments provide a method for the detection of colorectal cell proliferative disorders, comprising: obtaining a biological sample having subject genomic DNA; extracting the genomic DNA; treating the genomic DNA, or a fragment thereof, with one or more reagents to convert 5-position unmethylated cytosine bases to uracil or to another base that is detectably dissimilar to cytosine in terms of hybridization properties; contacting the treated genomic DNA, or the treated fragment thereof, with an amplification enzyme and at least two primers comprising, in each case a contiguous sequence at least 9 nucleotides in length that is complementary to, or hybridizes under moderately stringent or stringent conditions to a sequence selected from the group consisting SEQ ID NOS:304 to SEQ ID NO:535 and SEQ ID NOS:65 to SEQ ID NO:88, and complements thereof, wherein the treated DNA or the fragment thereof is either amplified to produce an amplificate, or is not amplified; and determining, based on a presence or absence of, or on a property of said amplificate, the methylation state of at least one CpG dinucleotide sequence selected from the group consisting of SEQ ID NOS:1 to SEQ ID NO:64, or an average, or a value reflecting an average methylation state of a plurality of CpG dinucleotide sequences thereof. Preferably, at least one such hybridizing nucleic acid molecule or peptide nucleic acid molecule is bound to a solid phase. Preferably, determining comprises use of at least one method selected from the group consisting of: hybridizing at least one nucleic acid molecule comprising a contiguous sequence at least 9 nucleotides in length that is complementary to, or hybridizes under moderately stringent or stringent conditions to a sequence selected from the group consisting of SEQ ID NOS:304 to SEQ ID NO:535 and SEQ ID NOS:65 to SEQ ID NO:88, and complements thereof; hybridizing at least one nucleic acid molecule, bound to a solid phase, comprising a contiguous sequence at least 9 nucleotides in length that is complementary to, or hybridizes under moderately stringent or stringent conditions to a sequence selected from the group consisting of SEQ ID NOS:304 to SEQ ID NO:535 and SEQ ID NOS:65 to SEQ ID NO:88, and complements thereof; hybridizing at least one nucleic acid molecule comprising a contiguous sequence at least 9 nucleotides in length that is complementary to, or hybridizes under moderately stringent or stringent conditions to a sequence selected from the group consisting of SEQ ID NOS:304 to SEQ ID NO:535 and SEQ ID NOS:65 to SEQ ID NO:88, and complements thereof, and extending at least one such hybridized nucleic acid molecule by at least one nucleotide base; and sequencing of the amplificate.

[0039] Further embodiments provide a method for the analysis of colorectal cell proliferative disorders, comprising: obtaining a biological sample having subject genomic DNA; extracting the genomic DNA; contacting the genomic DNA, or a fragment thereof, comprising one or more sequences selected from the group consisting of SEQ ID NOS:1 to SEQ ID NO:64 or a sequence that hybridizes under stringent conditions thereto, with one or more methylation-sensitive restriction enzymes, wherein the genomic DNA is either digested thereby to produce digestion fragments, or is not digested thereby; and determining, based on a presence or absence of, or on property of at least one such fragment, the methylation state of at least one CpG dinucleotide sequence of one or more sequences selected from the group consisting of SEQ ID NOS:1 to SEQ ID NO:64, or an average, or a value reflecting an average methylation state of a plurality of CpG dinucleotide sequences thereof. Preferably, the digested or undigested genomic DNA is amplified prior to said determining.

[0040] Additional embodiments provide novel genomic and chemically modified nucleic acid sequences, as well as oligonucleotides and/or PNA-oligomers for analysis of cytosine methylation patterns within sequences from the group consisting of SEQ ID NOS:1 to SEQ ID NO:64.

### BRIEF DESCRIPTION OF THE DRAWINGS

[0041] FIGS. 1, 5, 9, 13, 16, 20, 24, 28 and 32 show ranked matrices of data obtained according to EXAMPLES 1 and 2, and according to CpG methylation differences between the two classes of tissues, using a suitable algorithm. The figures are shown in greyscale, wherein the most significant CpG positions are at the bottom of the matrix with significance decreasing towards the top. Black indicates total methylation at a given CpG position, white represents no methylation at the particular position, with degrees of methylation represented in grey, from light (low proportion of methylation) to dark (high proportion of methylation). Each row represents one specific CpG position within a gene and each column shows the methylation profile for the different CpGs for one sample. The p-values for the individual CpG positions are shown on the right side. The p-values are the probabilities that the observed distribution occurred by chance in the data set.

[0042] FIGS. 2, 6, 10, 17, 21, 25, 29 and 33 show the uncorrected multivariate LogReg test results for each comparison. Each individual genomic region of interest is represented as a point, the dotted line represents the cut off point for the 25% false discovery rate.

[0043] FIGS. 3, 7, 11, 14, 18, 22, 26, 30 and 34 show ranked matrices of data, obtained according to EXAMPLES 1 and 2, of the accuracy of the genewise linear support vector machine cross validations between the two classes of tissues, for the best performing markers. The figures are shown in greyscale, wherein the most significant CpG positions are at the bottom of the matrix with significance decreasing towards the top. Black indicates total methylation at a given CpG position, white represents no methylation at the particular position, with degrees of methylation represented in grey, from light (low proportion of methylation) to dark (high proportion of methylation). Each row represents one specific CpG position within a gene and each column shows the methylation profile for the different CpGs for one sample. Accuracy values for each individual genomic region of interest are shown on the right side.

[0044] FIGS. 4, 8, 12, 15, 18, 23, 27, 31 and 35 show the accuracy of the genewise linear support vector machine cross validation for all genomic regions of each classification. The accuracy of each genomic region is represented as black squares, the specificity as unfilled diamonds, and the sensitivity as unfilled squares. The accuracy as measured on the X-axis shows the fraction of correctly classified samples.

[0045] FIG. 36 shows the level of methylation determined by different MSP MethyLight™ assays and HeavyMethyl™ MethyLight™ assays. The Y-axis shows the degree of methylation. Tumor samples are represented by white points, and normal colon tissue samples by black points. A significantly higher degree of methylation was observed in tumor samples than in healthy tissue samples.

[0046] FIG. 37 shows the Receiver Operating Characteristic curve (ROC curve) of the SEQ ID NO:35-MSP-MethylLight™-Assay for adenocarcinomas according to EXAMPLE 2. The AUC for the MSP-MethylLight™-Assay is: 0.94.

[0047] FIG. 38 shows the Receiver Operating Characteristic curve (ROC curve) of the SEQ ID NO:35-HM-MethylLight™-Assay for Adenocarcinoma according to EXAMPLE 3. The P AUC for the HM-MethylLight™-Assay is: 0.91.

[0048] FIG. 39 shows the level of methylation determined by a SEQ ID NO:35-HeavyMethyl™ MethyLight™ assay according to EXAMPLE 3, testing an additional set of colon samples (25 adenocarcinoma, 33 normals, and 13 adenomas). The Y-axis shows the degree of methylation within the region of the SEQ ID NO:35 gene investigated. Adenocarcinoma samples are represented by white squares, and normal colon tissue samples by black diamonds. A significantly higher degree of methylation was observed in tumor samples than in healthy tissue samples. The level of significance as measured using a t-test was 0.00424.

[0049] FIG. 40 shows the Receiver Operating Characteristic curve (ROC curve) of the SEQ ID NO:35-*HM-MethylLight™-Assay for Adenocarcinoma and Adenoma according to EXAMPLE 3 (additional sets of samples). The area under an ROC curve (AUC) is a measure for the accuracy of a diagnostic test. The AUC for the HM-MethylLight™-Assay is 0.81.

[0050] FIG. 41 shows the Receiver Operating Characteristic curve (ROC curve) of the SEQ ID NO:35-HM-MethylLight™-Assay for Adenocarcinoma only according to EXAMPLE 2 (additional sets of samples). The area under an ROC curve (AUC) is a measure for the accuracy of a diagnostic test. The AUC for the HM-Methyl-Light-Assay is: 0.844.

[0051] FIG. 42 shows the Receiver Operating Characteristic curve (ROC curve) of the SEQ ID NO:35-HM-MethylLight™-Assay for Adenenomas according to EXAMPLE 3 (additional sets of samples). The area under an ROC curve (AUC) is a measure for the accuracy of a diagnostic test. The AUC for the HM-MethylLight™-Assay is: 0.748.

[0052] FIG. 43 shows the level of methylation in different tumor and healthy tissues determined by a SEQ ID NO 35-HeavyMethyl™ MethyLight™ assay according to example 4. The Y-axis shows the degree of methylation within the region of the SEQ ID NO:35 gene investigated. Besides the colon cancer samples only one of the two breast cancer tissues were methylated.

[0053] FIG. 44 shows the level of methylation in different breast cancer tissues determined by a SEQ ID NO:35-HeavyMethyl™ MethyLight™ assay according to EXAMPLE 4. Only one was methylated.

[0054] FIG. 45 shows the level of methylation in serum samples determined by a SEQ ID NO:35-HeavyMethyl™ MethyLight™ assay according to EXAMPLE 4. The Y-axis shows the degree of methylation within the region of the SEQ ID NO:35 gene investigated.

[0055] FIG. 46 shows the ROC curve of the SEQ ID NO:34-MSP-Methyl-Light™-Assay according to EXAMPLE 9. The AUC is: 0.84.

[0056] FIG. 47 shows the ROC curve of the SEQ ID NO:29-MSP-Methyl-Light™-Assay according to EXAMPLE 10. The AUC is: 0.80.

[0057] FIG. 48 shows the regression plot of the percentage methylation within SEQ ID NO:35 calculated in each sample using the MSP and HeavyMethyl™ variants of the MethyLight™ assay.

[0058] FIG. 49 shows the ROC curve of the SEQ ID NO:29-MSP-MethylLight™-Assay according to EXAMPLE 8 (first sample set). The AUC is: 0.93.

[0059] FIG. 50 shows the ROC curve of the SEQ ID NO:29-MSP-MethylLight™-Assay according to EXAMPLE 8 (second sample set). The AUC is: 1.

[0060] FIG. 51 shows the ROC curve of the SEQ ID NO:39-MSP-MethylLight™-Assay according to EXAMPLE 9. The AUC is: 0.94.

[0061] FIGS. 52 to 59 show the amplification of stool samples according to example 10. The X-axis shows the cycle number of the polymerase chain reaction, the Y-axis shows the delta Rn, which is the fluorescence intensity over background, the horizontal line (A) represents the threshold level of the calibration curve (B), if the curve reaches above (A) methylation has been detected.

[0062] FIGS. 60 to 71 show the PCR amplification of samples according to example 11. Each individual sample is annotated on the x-axis as ‘n’ denoting normal, or ‘t’ denoting tumour. A bronchial tissue sample was accidentally analysed in some assays, these are annotated with an arrow, and are irrelevant in the context of the present invention. The Y-axis shows the level of methylation (‘methylation rate ’) in the sample. The methylation rate {methylated/(methylated+unmethylated) are shown for the fragments corresponding to the primer pairs in Table 4.

[0063] FIGS. 72 to 86 show the PCR amplification of samples according to assays 1 to 15 of example 14 respectively. The X-axis shows the cycle number of the polymerase chain reaction, the Y-axis shows the fluorescence intensity over background.

[0064] FIG. 72 shows the amplification curve of assay 1.

[0065] FIG. 73 shows the amplification curve of assay 2.

[0066] FIG. 74 shows the amplification curve of assay 3.

[0067] FIG. 75 shows the amplification curve of assay 4.

[0068] FIG. 76 shows the amplification curve of assay 5.

[0069] FIG. 77 shows the amplification curve of assay 6.

[0070] FIG. 78 shows the amplification curve of assay 7.

[0071] FIG. 79 shows the amplification curve of assay 8.

[0072] FIG. 80 shows the amplification curve of assay 9.

[0073] FIG. 81 shows the amplification curve of assay 10.

[0074] FIG. 82 shows the amplification curve of assay 11.

[0075] FIG. 83 shows the amplification curve of assay 12.

[0076] FIG. 84 shows the amplification curve of assay 13.

[0077] FIG. 85 shows the amplification curve of assay 14.

[0078] FIG. 86 shows the amplification curve of assay 15.

[0079] FIGS. 87 to 95 show the class prediction performance of quadratic SVMs to trained on the data set according to example 14. Circled points are the support vectors defining the borderline (white) between the lighter and darker shaded areas.

[0080] FIG. 87 shows an SVM trained using Assays 12 and 9.

[0081] FIG. 88 shows an SVM trained using Assays 12 and 11.

[0082] FIG. 89 shows an SVM trained using Assays 12 and 15.

[0083] FIG. 90 shows an SVM trained using Assays 7 and 6.

[0084] FIG. 91 shows an SVM trained using Assays 11 and 5.

[0085] FIG. 92 shows an SVM trained using Assays 7 and 5.

[0086] FIG. 93 shows an SVM trained using Assays 6 and 4.

[0087] FIG. 94 shows an SVM trained using Assays 12 and 7.

[0088] FIG. 95 shows an SVM trained using Assays 12 and 6.

[0089] FIG. 96 shows a ranked matrices of data obtained according to Examples 1 and 2: according to CpG methylation differences between the two classes of tissues, (aerodigestive cancer on the left and healthy aerodigestive tissues on the right) using an algorithm. The most significant CpG positions are at the bottom of the matrix with significance decreasing towards the top. Red indicates total methylation at a given CpG position, green represents no methylation at the particular position. Each row represents one specific CpG position within a gene and each column shows the methylation profile for the different CpGs for one sample.

### DETAILED DESCRIPTION OF THE INVENTION

### Definitions

[0090] The term “Observed/Expected Ratio” (“O/E Ratio”) refers to the frequency of CpG dinucleotides within a particular DNA sequence, and corresponds to the [number of CpG sites/(number of C bases×number of G bases)]×band length for each fragment.

[0091] The term “CpG island” refers to a contiguous region of genomic DNA that satisfies the criteria of (1) having a frequency of CpG dinucleotides corresponding to an “Observed/Expected Ratio”>0.6, and (2) having a “GC Content”>0.5. CpG islands are typically, but not always, between about 0.2 to about 1 kb, or to about 2 kb in length.

[0092] The term “methylation state” or “methylation status” refers to the presence or absence of 5-methylcytosine (“5-mCyt”) at one or a plurality of CpG dinucleotides within a DNA sequence. Methylation states at one or more particular CpG methylation sites (each having two CpG CpG dinucleotide sequences) within a DNA sequence include “unmethylated,” “fully-methylated” and “hemi-methylated.”

[0093] The term “hemi-methylation” or “hemimethylation” refers to the methylation state of a palindromic CpG methylation site, where only a single cytosine in one of the two CpG dinucleotide sequences of the palindromic CpG methylation site is methylated (e.g., 5′-CC^{M}GG-3′ (top strand): 3′-GGCC-5′ (bottom strand)).

[0094] The term ‘AUC’ as used herein is an abbreviation for the area under a curve. In particular it refers to the area under a Receiver Operating Characteristic (ROC) curve. The ROC curve is a plot of the true positive rate against the false positive rate for the different possible cutpoints of a diagnostic test. It shows the tradeoff between sensitivity and specificity depending on the selected cutpoint (any increase in sensitivity will be accompanied by a decrease in specificity). The area under an ROC curve (AUC) is a measure for the accuracy of a diagnostic test (the larger the area the better, optimum is 1, a random test would have a ROC curve lying on the diagonal with an area of 0.5; for reference: J. P. Egan. Signal Detection Theory and ROC Analysis, Academic Press, New York, 1975).

[0095] The term “hypermethylation” refers to the average methylation state corresponding to an increased presence of 5-mCyt at one or a plurality of CpG dinucleotides within a DNA sequence of a test DNA sample, relative to the amount of 5-mCyt found at corresponding CpG dinucleotides within a normal control DNA sample.

[0096] The term “hypomethylation” refers to the average methylation state corresponding to a decreased presence of 5-mCyt at one or a plurality of CpG dinucleotides within a DNA sequence of a test DNA sample, relative to the amount of 5-mCyt found at corresponding CpG dinucleotides within a normal control DNA sample.

[0097] The term “microarray” refers broadly to both “DNA microarrays,” and ‘DNA chip(s),’ as recognized in the art, encompasses all art-recognized solid supports, and encompasses all methods for affixing nucleic acid molecules thereto or synthesis of nucleic acids thereon.

[0098] “Genetic parameters” are mutations and polymorphisms of genes and sequences further required for their regulation. To be designated as mutations are, in particular, insertions, deletions, point mutations, inversions and polymorphisms and, particularly preferred, SNPs (single nucleotide polymorphisms).

[0099] “Epigenetic parameters” are, in particular, cytosine methylations. Further epigenetic parameters include, for example, the acetylation of histones which, however, cannot be directly analyzed using the described method but which, in turn, correlate with the DNA methylation.

[0100] The term “bisulfite reagent” refers to a reagent comprising bisulfite, disulfite, hydrogen sulfite or combinations thereof, useful as disclosed herein to distinguish between methylated and unmethylated CpG dinucleotide sequences.

[0101] The term “Methylation assay” refers to any assay for determining the methylation state of one or more CpG dinucleotide sequences within a sequence of DNA.

[0102] The term “MS.AP-PCR” (Methylation-Sensitive Arbitrarily-Primed Polymerase Chain Reaction) refers to the art-recognized technology that allows for a global scan of the genome using CG-rich primers to focus on the regions most likely to contain CpG dinucleotides, and described by Gonzalgo et al., Cancer Research 57:594-599, 1997.

[0103] The term “MethyLight™” refers to the art-recognized fluorescence-based real-time PCR technique described by Eads et al., Cancer Res. 59:2302-2306, 1999.

[0104] The term “HeavyMethyl™” assay, in the embodiment thereof implemented herein, refers to an assay, wherein methylation specific blocking probes (also referred to herein as blockers) covering CpG positions between, or covered by the amplification primers enable methylation-specific selective amplification of a nucleic acid sample.

[0105] The term “HeavyMethyl™ MethyLight™” assay, in the embodiment thereof implemented herein, refers to a HeavyMethyl™ MethyLight™ assay, which is a variation of the MethyLight™ assay, wherein the MethyLight™ assay is combined with methylation specific blocking probes covering CpG positions between the amplification primers.

[0106] The term “Ms-SNuPE” (Methylation-sensitive Single Nucleotide Primer Extension) refers to the art-recognized assay described by Gonzalgo & Jones, Nucleic Acids Res. 25:2529-2531, 1997.

[0107] The term “MSP” (Methylation-specific PCR) refers to the art-recognized methylation assay described by Herman et al. Proc. Natl. Acad. Sci. USA 93:9821-9826, 1996, and by U.S. Pat. No. 5,786,146.

[0108] The term “COBRA” (Combined Bisulfite Restriction Analysis) refers to the art-recognized methylation assay described by Xiong & Laird, Nucleic Acids Res. 25:2532-2534, 1997.

[0109] The term “MCA” (Methylated CpG Island Amplification) refers to the methylation assay described by Toyota et al., Cancer Res. 59:2307-12, 1999, and in WO 00/26401A1.

[0110] The term “hybridization” is to be understood as a bond of an oligonucleotide to a complementary sequence along the lines of the Watson-Crick base pairings in the sample DNA, forming a duplex structure.

[0111] “Stringent hybridization conditions,” as defined herein, involve hybridizing at 68° C. in 5×SSC/5×Denhardt's solution/1.0% SDS, and washing in 0.2×SSC/0.1% SDS at room temperature, or involve the art-recognized equivalent thereof (e.g., conditions in which a hybridization is carried out at 60° C. in 2.5×SSC buffer, followed by several washing steps at 37° C. in a low buffer concentration, and remains stable). Moderately stringent conditions, as defined herein, involve including washing in 3×SSC at 42° C., or the art-recognized equivalent thereof. The parameters of salt concentration and temperature can be varied to achieve the optimal level of identity between the probe and the target nucleic acid. Guidance regarding such conditions is available in the art, for example, by Sambrook et al., 1989, Molecular Cloning, A Laboratory Manual, Cold Spring Harbor Press, N.Y.; and Ausubel et al. (eds.), 1995, Current Protocols in Molecular Biology, (John Wiley & Sons, N.Y.) at Unit 2.10.

[0112] The terms “array SEQ ID NO,” “composite array SEQ ID NO,” or “composite array sequence” refer to a sequence, hypothetical or otherwise, consisting of a head-to-tail (5′ to 3′) linear composite of all individual contiguous sequences of a subject array (e.g., a head-to-tail composite of SEQ ID NOS:1-71, in that order).

[0113] The terms “array SEQ ID NO node,” “composite array SEQ ID NO node,” or “composite array sequence node” refer to a junction between any two individual contiguous sequences of the “array SEQ ID NO,” the “composite array SEQ ID NO,” or the “composite array sequence.”

[0114] In reference to composite array sequences, the phrase “contiguous nucleotides” refers to a contiguous sequence region of any individual contiguous sequence of the composite array, but does not include a region of the composite array sequence that includes a “node,” as defined herein above.

### Overview:

[0115] The present invention provides for molecular genetic markers that have novel utility for the analysis of methylation patterns associated with the development of colorectal cell proliferative disorders. Said markers may be used for detecting or distinguishing between colorectal cell proliferative disorders, thereby providing improved means for the classification and treatment of said disorders. In an alternative embodiment said molecular genetic markers may be used for the detection of aerodigestive cell proliferative disorders.

[0116] Bisulfite modification of DNA is an art-recognized tool used to assess CpG methylation status. 5-methylcytosine is the most frequent covalent base modification in the DNA of eukaryotic cells. It plays a role, for example, in the regulation of the transcription, in genetic imprinting, and in tumorigenesis. Therefore, the identification of 5-methylcytosine as a component of genetic information is of considerable interest. However, 5-methylcytosine positions cannot be identified by sequencing, because 5-methylcytosine has the same base pairing behavior as cytosine. Moreover, the epigenetic information carried by 5-methylcytosine is completely lost during, e.g., PCR amplification.

[0117] The most frequently used method for analyzing DNA for the presence of 5-methylcytosine is based upon the specific reaction of bisulfite with cytosine whereby, upon subsequent alkaline hydrolysis, cytosine is converted to uracil which corresponds to thymine in its base pairing behavior. Significantly, however, 5-methylcytosine remains unmodified under these conditions. Consequently, the original DNA is converted in such a manner that methylcytosine, which originally could not be distinguished from cytosine by its hybridization behavior, can now be detected as the only remaining cytosine using standard, art-recognized molecular biological techniques, for example, by amplification and hybridization, or by sequencing. All of these techniques are based on differential base pairing properties, which can now be fully exploited.

[0118] The prior art, in terms of sensitivity, is defined by a method comprising enclosing the DNA to be analyzed in an agarose matrix, thereby preventing the diffusion and renaturation of the DNA (bisulfite only reacts with single-stranded DNA), and replacing all precipitation and purification steps with fast dialysis (Olek A, et al., A modified and improved method for bisulfite based cytosine methylation analysis, Nucleic Acids Res. 24:5064-6, 1996). It is thus possible to analyze individual cells for methylation status, illustrating the utility and sensitivity of the method. An overview of art-recognized methods for detecting 5-methylcytosine is provided by Rein, T., et al., Nucleic Acids Res., 26:2255, 1998.

[0119] The bisulfite technique, barring few exceptions (e.g., Zeschnigk M, et al., Eur J Hum Genet. 5:94-98, 1997), is currently only used in research. In all instances, short, specific fragments of a known gene are amplified subsequent to a bisulfite treatment, and either completely sequenced (Olek & Walter, Nat. Genet. 1997 17:275-6, 1997), subjected to one or more primer extension reactions (Gonzalgo & Jones, Nucleic Acids Res., 25:2529-31, 1997; WO 95/00669; U.S. Pat. No. 6,251,594) to analyze individual cytosine positions, or treated by enzymatic digestion (Xiong & Laird, Nucleic Acids Res., 25:2532-4, 1997). Detection by hybridization has also been described in the art (Olek et al., WO 99/28498). Additionally, use of the bisulfite technique for methylation detection with respect to individual genes has been described (Grigg & Clark, Bioessays, 16:431-6, 1994; Zeschnigk M, et al., Hum Mol Genet., 6:387-95, 1997; Feil R, et al., Nucleic Acids Res., 22:695-, 1994; Martin V, et al., Gene, 157:261-4, 1995; WO 9746705 and WO 9515373).

[0120] The present invention provides for the use of the bisulfite technique, in combination with one or more methylation assays, for determination of the methylation status of CpG dinucleotide sequences within sequences from the group consisting of SEQ ID NOS:1 to SEQ ID NO:64. According to the present invention, determination of the methylation status of CpG dinucleotide sequences within sequences from the group consisting of SEQ ID NOS:1 to SEQ ID NO:64 has diagnostic and prognostic utility.

[0121] Methylation Assay Procedures. Various methylation assay procedures are known in the art, and can be used in conjunction with the present invention. These assays allow for determination of the methylation state of one or a plurality of CpG dinucleotides (e.g., CpG islands) within a DNA sequence. Such assays involve, among other techniques, DNA sequencing of bisulfite-treated DNA, PCR (for sequence-specific amplification), Southern blot analysis, and use of methylation-sensitive restriction enzymes.

[0122] For example, genomic sequencing has been simplified for analysis of DNA methylation patterns and 5-methylcytosine distribution by using bisulfite treatment (Frommer et al., Proc. Natl. Acad. Sci. USA 89:1827-1831, 1992). Additionally, restriction enzyme digestion of PCR products amplified from bisulfite-converted DNA is used, e.g., the method described by Sadri & Hornsby (Nucl. Acids Res. 24:5058-5059, 1996), or COBRA (Combined Bisulfite Restriction Analysis) (Xiong & Laird, Nucleic Acids Res. 25:2532-2534, 1997).

[0123] COBRA. COBRA™ analysis is a quantitative methylation assay useful for determining DNA methylation levels at specific gene loci in small amounts of genomic DNA (Xiong & Laird, Nucleic Acids Res. 25:2532-2534, 1997). Briefly, restriction enzyme digestion is used to reveal methylation-dependent sequence differences in PCR products of sodium bisulfite-treated DNA. Methylation-dependent sequence differences are first introduced into the genomic DNA by standard bisulfite treatment according to the procedure described by Frommer et al. (Proc. Natl. Acad. Sci. USA 89:1827-1831, 1992). PCR amplification of the bisulfite converted DNA is then performed using primers specific for the CpG islands of interest, followed by restriction endonuclease digestion, gel electrophoresis, and detection using specific, labeled hybridization probes. Methylation levels in the original DNA sample are represented by the relative amounts of digested and undigested PCR product in a linearly quantitative fashion across a wide spectrum of DNA methylation levels. In addition, this technique can be reliably applied to DNA obtained from microdissected paraffin-embedded tissue samples.

[0124] Typical reagents (e.g., as might be found in a typical COBRA™-based kit) for COBRA™ analysis may include, but are not limited to: PCR primers for specific gene (or bisulfite treated DNA sequence or CpG island); restriction enzyme and appropriate buffer; gene-hybridization oligo; control hybridization oligo; kinase labeling kit for oligo probe; and labeled nucleotides. Additionally, bisulfite conversion reagents may include: DNA denaturation buffer; sulfonation buffer; DNA recovery reagents or kits (e.g., precipitation, ultrafiltration, affinity column); desulfonation buffer; and DNA recovery components.

[0125] Preferably, assays such as “MethyLight™” (a fluorescence-based real-time PCR technique) (Eads et al., Cancer Res. 59:2302-2306, 1999), Ms-SNuPE™ (Methylation-sensitive Single Nucleotide Primer Extension) reactions (Gonzalgo & Jones, Nucleic Acids Res. 25:2529-2531, 1997), methylation-specific PCR (“MSP”; Herman et al., Proc. Natl. Acad. Sci. USA 93:9821-9826, 1996; U.S. Pat. No. 5,786,146), and methylated CpG island amplification (“MCA”; Toyota et al., Cancer Res. 59:2307-12, 1999) are used alone or in combination with other of these methods.

[0126] MethyLight™. The MethyLight™ assay is a high-throughput quantitative methylation assay that utilizes fluorescence-based real-time PCR (TaqMan™) technology that requires no further manipulations after the PCR step (Eads et al., Cancer Res. 59:2302-2306, 1999). Briefly, the MethyLight™ process begins with a mixed sample of genomic DNA that is converted, in a sodium bisulfite reaction, to a mixed pool of methylation-dependent sequence differences according to standard procedures (the bisulfite process converts unmethylated cytosine residues to uracil). Fluorescence-based PCR is then performed either in an “unbiased” (with primers that do not overlap known CpG methylation sites) PCR reaction, or in a “biased” (with PCR primers that overlap known CpG dinucleotides) reaction. Sequence discrimination can occur either at the level of the amplification process or at the level of the fluorescence detection process, or both.

[0127] The MethyLight™ assay may be used as a quantitative test for methylation patterns in the genomic DNA sample, wherein sequence discrimination occurs at the level of probe hybridization. In this quantitative version, the PCR reaction provides for unbiased amplification in the presence of a fluorescent probe that overlaps a particular putative methylation site. An unbiased control for the amount of input DNA is provided by a reaction in which neither the primers, nor the probe overlie any CpG dinucleotides. Alternatively, a qualitative test for genomic methylation is achieved by probing of the biased PCR pool with either control oligonucleotides that do not “cover” known methylation sites (a fluorescence-based version of the “MSP” technique), or with oligonucleotides covering potential methylation sites.

[0128] The MethyLight™ process can by used with a “TaqMan® ” probe in the amplification process. For example, double-stranded genomic DNA is treated with sodium bisulfite and subjected to one of two sets of PCR reactions using TaqMan® probes; e.g. with either biased primers and TaqMan® probe, or unbiased primers and TaqMan® probe. The TaqMan® probe is dual-labeled with fluorescent “reporter” and “quencher” molecules, and is designed to be specific for a relatively high GC content region so that it melts out at about 10° C. higher temperature in the PCR cycle than the forward or reverse primers. This allows the TaqMan® probe to remain fully hybridized during the PCR annealing/extension step. As the Taq polymerase enzymatically synthesizes a new strand during PCR, it will eventually reach the annealed TaqMan® probe. The Taq polymerase 5′ to 3′ endonuclease activity will then displace the TaqMan® probe by digesting it to release the fluorescent reporter molecule for quantitative detection of its now unquenched signal using a real-time fluorescent detection system.

[0129] Typical reagents (e.g., as might be found in a typical MethyLight™-based kit) for MethyLight™ analysis may include, but are not limited to: PCR primers for specific gene (or bisulfite treated DNA sequence or CpG island); TaqMan® probes; optimized PCR buffers and deoxynucleotides; and Taq polymerase.

[0130] Ms-SNuPE. The Ms-SNuPE™ technique is a quantitative method for assessing methylation differences at specific CpG sites based on bisulfite treatment of DNA, followed by single-nucleotide primer extension (Gonzalgo & Jones, Nucleic Acids Res. 25:2529-2531, 1997). Briefly, genomic DNA is reacted with sodium bisulfite to convert unmethylated cytosine to uracil while leaving 5-methylcytosine unchanged. Amplification of the desired target sequence is then performed using PCR primers specific for bisulfite-converted DNA, and the resulting product is isolated and used as a template for methylation analysis at the CpG site(s) of interest. Small amounts of DNA can be analyzed (e.g., microdissected pathology sections), and it avoids utilization of restriction enzymes for determining the methylation status at CpG sites.

[0131] Typical reagents (e.g., as might be found in a typical Ms-SNuPE™-based kit) for Ms-SNuPE™ analysis may include, but are not limited to: PCR primers for specific gene (or bisulfite treated DNA sequence or CpG island); optimized PCR buffers and deoxynucleotides; gel extraction kit; positive control primers; Ms-SNuPE™ primers for specific gene; reaction buffer (for the Ms-SNuPE reaction); and labelled nucleotides. Additionally, bisulfite conversion reagents may include: DNA denaturation buffer; sulfonation buffer; DNA recovery regents or kit (e.g., precipitation, ultrafiltration, affinity column); desulfonation buffer; and DNA recovery components.

[0132] MSP. MSP (methylation-specific PCR) allows for assessing the methylation status of virtually any group of CpG sites within a CpG island, independent of the use of methylation-sensitive restriction enzymes (Herman et al. Proc. Natl. Acad. Sci. USA 93:9821-9826, 1996; U.S. Pat. No. 5,786,146). Briefly, DNA is modified by sodium bisulfite converting all unmethylated, but not methylated cytosines to uracil, and subsequently amplified with primers specific for methylated versus unmethylated DNA. MSP requires only small quantities of DNA, is sensitive to 0.1% methylated alleles of a given CpG island locus, and can be performed on DNA extracted from paraffin-embedded samples. Typical reagents (e.g., as might be found in a typical MSP-based kit) for MSP analysis may include, but are not limited to: methylated and unmethylated PCR primers for specific gene (or bisulfite treated DNA sequence or CpG island), optimized PCR buffers and deoxynucleotides, and specific probes.

[0133] MCA. The MCA technique is a method that can be used to screen for altered methylation patterns in genomic DNA, and to isolate specific sequences associated with these changes (Toyota et al., Cancer Res. 59:2307-12, 1999). Briefly, restriction enzymes with different sensitivities to cytosine methylation in their recognition sites are used to digest genomic DNAs from primary tumors, cell lines, and normal tissues prior to arbitrarily primed PCR amplification. Fragments that show differential methylation are cloned and sequenced after resolving the PCR products on high-resolution polyacrylamide gels. The cloned fragments are then used as probes for Southern analysis to confirm differential methylation of these regions. Typical reagents (e.g., as might be found in a typical MCA-based kit) for MCA analysis may include, but are not limited to: PCR primers for arbitrary priming Genomic DNA; PCR buffers and nucleotides, restriction enzymes and appropriate buffers; gene-hybridization oligos or probes; control hybridization oligos or probes.

Genomic Sequences According to SEQ ID NO:1 to SEQ ID NO:64, and Non-Naturally Occurring Treated Variants Thereof According to SEQ ID NOS:304 to SEQ ID NOS:535 and SEQ ID NOS:65 to SEQ ID NO:88, were Determined to have Novel Utility for the Detection Classification and/or Treatment of Colorectral Cell Proliferative Disorders

[0134] In one embodiment the invention provides a method for detecting and/or for detecting and distinguishing between or among colon cell proliferative disorders in a subject. Said method comprises the following steps: i) contacting genomic DNA isolated from bodily fluids obtained from the subject with at least one reagent, or series of reagents that distinguishes between methylated and non-methylated CpG dinucleotides within at least one target region of the genomic DNA, wherein said contiguous nucleotides comprise at least one CpG dinucleotide sequence; and ii) detecting, or detecting and distinguishing between or among colon cell proliferative disorders afforded with a sensitivity of greater than or equal to 80% and a specificity of greater than or equal to 80%.

[0135] Preferably, the sensitivity is from about 75% to about 96%, or from about 80% to about 90%, or from about 80% to about 85%. Preferably, the specificity is from about 75% to about 96%, or from about 80% to about 90%, or from about 80% to about 85%.

[0136] Genomic DNA may be isolated by any means standard in the art, including the use of commercially available kits. Briefly, wherein the DNA of interest is encapsulated in by a cellular membrane the biological sample must be disrupted and lysed by enzymatic, chemical or mechanical means. The DNA solution may then be cleared of proteins and other contaminants, e.g., by digestion with proteinase K. The genomic DNA is then recovered from the solution. This may be carried out by means of a variety of methods including salting out, organic extraction or binding of the DNA to a solid phase support. The choice of method will be affected by several factors including time, expense and required quantity of DNA. Body fluids are the preferred source of the DNA; particularly preferred are blood plasma, blood serum, whole blood, isolated blood cells and cells isolated from the blood.

[0137] The genomic DNA sample is then treated in such a manner that cytosine bases which are unmethylated at the 5′-position are converted to uracil, thymine, or another base which is dissimilar to cytosine in terms of hybridization behavior. This will be understood as ‘treatment’ herein.

[0138] The above described treatment of genomic DNA is preferably carried out with bisulfite (hydrogen sulfite, disulfite) and subsequent alkaline hydrolysis which results in a conversion of non-methylated cytosine nucleobases to uracil or to another base which is dissimilar to cytosine in terms of base pairing behavior.

[0139] The treated DNA is then analysed in order to determine the methylation state of one or more target gene sequences (prior to the treatment) associated with the development of colorectal carcinoma. It is particularly preferred that the target region comprises, or hybridizes under stringent conditions to at least 16 contiguous nucleotides of at least one gene or sequence selected from the group consisting the genes and sequences as listed in Table 1. It is further preferred that the sequences of said genes in Table 3 as described in the accompanying sequence listing are analysed. The method of analysis may be selected from those known in the art, including those listed herein. Particularly preferred are MethyLight, MSP and the use of blocking oligonucleotides as will be described herein. It is further preferred that any oligonucleotides used in such analysis (including primers, blocking oligonucleotides and detection probes) should be reverse complementary, identical, or hybridize under stringent or highly stringent conditions to an at least 16-base-pair long segment of the base sequences of one or more of SEQ ID NO: (IDBISEQFIRST) to SEQ ID NO: and (IDBISEQLAST) and sequences complementary thereto.

[0140] Aberrant methylation, more preferably hypermethylation of one or more genes or genomic sequences taken from the group consisting of: SEQ ID NOS:1-3, 14, 16, 21, 22, 23, 44-46, 48, 50, 59-64, COX7B, CST5, EYA3, FTH1, RNF4, SOX 21, RNF4, ALX 4, ONC2, NGFR, DLX-5, HVIAAT, BTF3 Homolog 1, ADCY9, BCL-5, BCOR, TAFII28, HOMEOBOX PROTEIN SIX6, GSK-3 BETA, ELK-L, HLA-F, TGFBR2, AR, RNF30 and DUX4 are associated with the presence of colorectal carcinoma.

[0141] Analysis of one or a plurality of the sequences enables for the first time detecting, or detecting and distinguishing between or among colon cell proliferative disorders afforded with a sensitivity of greater than or equal to 80% and a specificity of greater than or equal to 80%. Sensitivity is calculated as: {detected colon neoplasia/all colon neoplasia); and specificity is calculated as (non-detected negatives/total negatives).

[0142] Preferably, the sensitivity is from about 75% to about 96%, or from about 80% to about 90%, or from about 80% to about 85%. Preferably, the specificity is from about 75% to about 96%, or from about 80% to about 90%, or from about 80% to about 85%.

[0143] Colon neoplasia can be defined as all colon malignancies or colon malignancies and large (>1 cm adenomas), or subsets thereof. Negatives can be defined as any disease other than colon malignancy and adenomas, or healthy individuals.

[0144] In one embodiment the method discloses the use of one or more genes or genomic sequences selected from the group consisting SEQ ID NOS:1-3, 14, 16, 21, 22, 23, 44-46, 48, 50, 59-64, COX7B, CST5, EYA3, FTH1, RNF4, SOX 21, RNF4, ALX 4, ONC2, NGFR, DLX-5, HVIAAT, BTF3 Homolog 1, ADCY9, BCL-5, BCOR, TAFII28, HOMEOBOX PROTEIN SIX6, GSK-3 BETA, ELK-L, HLA-F, TGFBR2, AR, RNF30 and DUX4 as markers for the differentiation, detection and distinguishing of colon cell proliferative disorders.

[0145] Said use of the gene may be enabled by means of any analysis of the expression of the gene, by means of mRNA expression analysis or protein expression analysis. However, in the most preferred embodiment of the invention, the detection, differentiation and distinguishing of colon cell proliferative disorders is enabled by means of analysis of the methylation status of one or more genes or genomic sequences selected from the group consisting SEQ ID NOS:1-3, 14, 16, 21, 22, 23, 44-46, 48, 50, 59-64, COX7B, CST5, EYA3, FTH1, RNF4, SOX 21, RNF4, ALX 4, ONC2, NGFR, DLX-5, HVIAAT, BTF3 Homolog 1, ADCY9, BCL-5, BCOR, TAFII28, HOMEOBOX PROTEIN SIX6, GSK-3 BETA, ELK-L, HLA-F, TGFBR2, AR, RNF30 and DUX4 and their promoter or regulatory elements. Methods for the methylation analysis of genes are described herein.

[0146] Aberrant levels of mRNA expression of the genes, genomic sequences or genes regulated by genomic sequences according to SEQ ID NOS: 1-3, 14, 16, 21, 22, 23, 44-46, 48, 50, 59-64, COX7B, CST5, EYA3, FTH1, RNF4, SOX 21, RNF4, ALX 4, ONC2, NGFR, DLX-5, HVIAAT, BTF3 Homolog 1, ADCY9, BCL-5, BCOR, TAFII28, HOMEOBOX PROTEIN SIX6, GSK-3 BETA, ELK-L, HLA-F, TGFBR2, AR, RNF30 and DUX4 according to Table 3 are associated with colorectal carcinoma.

[0147] Accordingly, increased or decreased levels of expression of said genes or sequences are associable with the development of colorectal carcinoma and other colorectal cell proliferative disorders.

[0148] To detect the presence of mRNA encoding a gene or genomic sequence in a detection system for colon cancer, a sample is obtained from a patient. The sample can be a tissue biopsy sample or a sample of blood, plasma, serum or the like. The sample may be treated to extract the nucleic acids contained therein. The resulting nucleic acid from the sample is subjected to gel electrophoresis or other separation techniques. Detection involves contacting the nucleic acids and in particular the mRNA of the sample with a DNA sequence serving as a probe to form hybrid duplexes. The stringency of hybridisation is determined by a number of factors during hybridisation and during the washing procedure, including temperature, ionic strength, length of time and concentration of formamide. These factors are outlined in, for example, Sambrook et al. (Molecular Cloning: A Laboratory Manual, 2d ed., 1989). Detection of the resulting duplex is usually accomplished by the use of labelled probes. Alternatively, the probe may be unlabeled, but may be detectable by specific binding with a ligand which is labelled, either directly or indirectly. Suitable labels and methods for labelling probes and ligands are known in the art, and include, for example, radioactive labels which may be incorporated by known methods (e.g., nick translation or kinasing), biotin, fluorescent groups, chemiluminescent groups (e.g., dioxetanes, particularly triggered dioxetanes), enzymes, antibodies, and the like.

[0149] In order to increase the sensitivity of the detection in a sample of mRNA transcribed from the gene or genomic sequence, the technique of reverse transcription/polymerisation chain reaction can be used to amplify cDNA transcribed from the mRNA. The method of reverse transcription/PCR is well known in the art (for example, see Watson and Fleming, supra).

[0150] The reverse transcription/PCR method can be performed as follows. Total cellular RNA is isolated by, for example, the standard guanidium isothiocyanate method and the total RNA is reverse transcribed. The reverse transcription method involves synthesis of DNA on a template of RNA using a reverse transcriptase enzyme and a 3′ end primer. Typically, the primer contains an oligo(dT) sequence. The cDNA thus produced is then amplified using the PCR method and EYA4 specific primers. (Belyavsky et al, Nucl Acid Res 17:2919-2932, 1989; Krug and Berger, Methods in Enzymology, Academic Press, N.Y., Vol. 152, pp. 316-325, 1987 which are incorporated by reference).

[0151] The present invention may also be described in certain embodiments as a kit for use in detecting a colon cancer disease state through testing of a biological sample. A representative kit may comprise one or more nucleic acid segments that selectively hybridise to the mRNA and a container for each of the one or more nucleic acid segments. In certain embodiments the nucleic acid segments may be combined in a single tube. In further embodiments, the nucleic acid segments may also include a pair of primers for amplifying the target mRNA. Such kits may also include any buffers, solutions, solvents, enzymes, nucleotides, or other components for hybridisation, amplification or detection reactions. Preferred kit components include reagents for reverse transcription-PCR, in situ hybridisation, Northern analysis and/or RPA

[0152] The present invention further provides for methods to detect the presence of the polypeptide encoded by said genes or gene sequences in a sample obtained from a patient.

[0153] Aberrant levels of polypeptide expression of the polypeptides encoded by the genes, genomic sequences or genes regulated by genomic sequences according to SEQ ID NOS:1-3, 14, 16, 21, 22, 23, 44-46, 48, 50, 59-64, COX7B, CST5, EYA3, FTH1, RNF4, SOX 21, RNF4, ALX 4, ONC2, NGFR, DLX-5, HVIAAT, BTF3 Homolog 1, ADCY9, BCL-5, BCOR, TAFII28, HOMEOBOX PROTEIN SIX6, GSK-3 BETA, ELK-L, HLA-F, TGFBR2, AR, RNF30 and DUX4 according to Table 3 are associated with colorectal carcinoma.

[0154] Accordingly over or under expression of said polypeptides are associable with the development of colorectal carcinoma and other colorectal cell proliferative disorders.

[0155] Any method known in the art for detecting proteins can be used. Such methods include, but are not limited to immunodiffusion, immunoelectrophoresis, immunochemical methods, binder-ligand assays, immunohistochemical techniques, agglutination and complement assays. (e.g., see Basic and Clinical Immunology, Sites and Terr, eds., Appleton & Lange, Norwalk, Conn. pp 217-262, 1991 which is incorporated by reference). Preferred are binder-ligand immunoassay methods including reacting antibodies with an epitope or epitopes and competitively displacing a labelled protein or derivative thereof.

[0156] Certain embodiments of the present invention comprise the use of antibodies specific to the polypeptide encoded by the genes or genomic sequences of the group consisting of SEQ ID NOS:1-3, 14, 16, 21, 22, 23, 44-46, 48, 50, 59-64, COX7B, CST5, EYA3, FTH1, RNF4, SOX 21, RNF4, ALX 4, ONC2, NGFR, DLX-5, HVIAAT, BTF3 Homolog 1, ADCY9, BCL-5, BCOR, TAFII28, HOMEOBOX PROTEIN SIX6, GSK-3 BETA, ELK-L, HLA-F, TGFBR2, AR, RNF30 and DUX4.

[0157] Such antibodies may be useful for diagnostic and prognostic applications in detecting the disease state, by comparing a patient's levels of colon disease marker expression to expression of the same markers in normal individuals. In certain embodiments production of monoclonal or polyclonal antibodies can be induced by the use of the coded polypeptide as antigene. Such antibodies may in turn be used to detect expressed proteins as markers for human disease states. The levels of such proteins present in the peripheral blood or tissue sample of a patient may be quantified by conventional methods. Antibody-protein binding may be detected and quantified by a variety of means known in the art, such as labelling with fluorescent or radioactive ligands. The invention further comprises kits for performing the above-mentioned procedures, wherein such kits contain antibodies specific for the investigated polypeptides.

[0158] Numerous competitive and non-competitive protein binding immunoassays are well known in the art. Antibodies employed in such assays may be unlabeled, for example as used in agglutination tests, or labelled for use a wide variety of assay methods. Labels that can be used include radionuclides, enzymes, fluorescers, chemiluminescers, enzyme substrates or co-factors, enzyme inhibitors, particles, dyes and the like for use in radioimmunoassay (RIA), enzyme immunoassays, e.g., enzyme-linked immunosorbent assay (ELISA), fluorescent immunoassays and the like. Polyclonal or monoclonal antibodies or epitopes thereof can be made for use in immunoassays by any of a number of methods known in the art.

[0159] One approach for preparing antibodies to a protein is the selection and preparation of an amino acid sequence of all or part of the protein, chemically synthesising the sequence and injecting it into an appropriate animal, usually a rabbit or a mouse (Milstein and Kohler Nature 256:495-497, 1975; Gulfre and Milstein, Methods in Enzymology: Immunochemical Techniques 73:1-46, Langone and Banatis eds., Academic Press, 1981 which are incorporated by reference). Methods for preparation of the polypeptides or epitopes thereof include, but are not limited to chemical synthesis, recombinant DNA techniques or isolation from biological samples.

[0160] In addition to the embodiments above wherein the methylation analysis of genes or genomic sequences selected from the group SEQ ID NOS:1-3, 14, 16, 21, 22, 23, 44-46, 48, 50, 59-64, COX7B, CST5, EYA3, FTH1, RNF4, SOX 21, RNF4, ALX 4, ONC2, NGFR, DLX-5, HVIAAT, BTF3 Homolog 1, ADCY9, BCL-5, BCOR, TAFII28, HOMEOBOX PROTEIN SIX6, GSK-3 BETA, ELK-L, HLA-F, TGFBR2, AR, RNF30 and DUX4 according to Table 3 are analysed, the invention presents two further panels of genes with novel utility for the detection of colorectal cancer.

[0161] In a first further embodiment the present invention is based upon the analysis of methylation levels within one or more genes or genomic sequences taken from the group consisting of SEQ ID NOS:1-3, 14, 16, 21, 22, 23, 44-46, 48, 50, 59-64, COX7B, CST5, EYA3, FTH1, RNF4, SOX 21, RNF4, ALX 4, ONC2, NGFR, DLX-5, HVIAAT, BTF3 Homolog 1, ADCY9, BCL-5, BCOR, TAFII28, HOMEOBOX PROTEIN SIX6, GSK-3 BETA, ELK-L, HLA-F, TGFBR2, AR, RNF30, DUX4, SMAD7, GTMBP, EYA4 and TCF1-ALPHA according to Table 3 and/or their regulatory sequences.

[0162] It is further preferred that the sequences of said genes or genomic sequences are as according to Table 3.

[0163] In a further embodiment the present invention is based upon the analysis of methylation levels within two or more genes or genomic sequences taken from the group consisting all genes and genomic sequences according to Table 3 and/or their regulatory sequences. It is further preferred that the sequences of said genes or genomic sequences are as according to SEQ ID NOS:1 to SEQ ID NO:64.

[0164] Particular embodiments of the present invention provide a novel application of the analysis of methylation levels and/or patterns within said sequences that enables a precise detection, characterisation and/or treatment of colorectal cell proliferative disorders. Early detection of colorectal cell proliferative disorders is directly linked with disease prognosis, and the disclosed method thereby enables the physician and patient to make better and more informed treatment decisions. The sequences of the group consisting SEQ ID NOS: 20, 41, 35, 3, 39, 33 & 27 have further utility for the detection of arodigestive cell proliferative disorders.

### Further Improvements

[0165] The present invention provides novel uses for genomic sequences selected from the group consisting of SEQ ID NOS:1 to SEQ ID NO:64. Additional embodiments provide modified variants of SEQ ID NOS:1 to SEQ ID NO:64, as well as oligonucleotides and/or PNA-oligomers for analysis of cytosine methylation patterns within SEQ ID NOS:1 to SEQ ID NO:64.

[0166] An objective of the invention comprises analysis of the methylation state of one or more CpG dinucleotides within at least one of the genomic sequences selected from the group consisting of SEQ ID NOS:1 to SEQ ID NO: 64 and sequences complementary thereto.

[0167] The disclosed invention provides treated nucleic acids, derived from genomic SEQ ID NOS:1 to SEQ ID NO:64, wherein the treatment is suitable to convert at least one unmethylated cytosine base of the genomic DNA sequence to uracil or another base that is detectably dissimilar to cytosine in terms of hybridization. The genomic sequences in question may comprise one, or more, consecutive or random methylated CpG positions. Said treatment preferably comprises use of a reagent selected from the group consisting of bisulfite, hydrogen sulfite, disulfite, and combinations thereof. In a preferred embodiment of the invention, the objective comprises analysis of a non-naturally occurring modified nucleic acid comprising a sequence of at least 16 contiguous nucleotide bases in length of a sequence selected from the group consisting of SEQ ID NOS:304 to SEQ ID NO:535 and SEQ ID NOS:65 to SEQ ID NO:88, wherein said sequence comprises at least one CpG, TpA or CpA dinucleotide and sequences complementary thereto. The sequences of SEQ ID NOS:304 to SEQ ID NO:535 and SEQ ID NOS:65 to SEQ ID NO:88 provide non-naturally occurring modified versions of the nucleic acid according to SEQ ID NOS:1 to SEQ ID NO:64, wherein the modification of each genomic sequence results in the synthesis of a nucleic acid having a sequence that is unique and distinct from said genomic sequence as follows. For each sense strand genomic DNA, e.g., SEQ ID NO:1, four converted versions are disclosed. A first version wherein “C”→“T,” but “CpG” remains “CpG” (i.e., corresponds to case where, for the genomic sequence, all “C” residues of CpG dinucleotide sequences are methylated and are thus not converted); a second version discloses the complement of the disclosed genomic DNA sequence (i.e. antisense strand), wherein “C”→“T,” but “CpG” remains “CpG” (i.e., corresponds to case where, for all “C” residues of CpG dinucleotide sequences are methylated and are thus not converted). The ‘upmethylated’ converted sequences of SEQ ID NOS:1 to SEQ ID NO:64 correspond to SEQ ID NOS:65 to 76 and SEQ ID NOS:304 to SEQ ID NO:419. A third chemically converted version of each genomic sequences is provided, wherein “C”→“T” for all “C” residues, including those of “CpG” dinucleotide sequences (i.e., corresponds to case where, for the genomic sequences, all “C” residues of CpG dinucleotide sequences are unmethylated); a final chemically converted version of each sequence, discloses the complement of the disclosed genomic DNA sequence (i.e. antisense strand), wherein “C”→“T” for all “C” residues, including those of “CpG” dinucleotide sequences (i.e., corresponds to case where, for the complement (antisense strand) of each genomic sequence, all “C” residues of CpG dinucleotide sequences are unmethylated). The ‘downmethylated’ converted sequences of SEQ ID NOS:1 to SEQ ID NO:64 correspond to SEQ ID NOS: 77 to 88 and SEQ ID NOS:420 to SEQ ID NO:535.

[0168] Significantly, heretofore, the nucleic acid sequences and molecules according SEQ ID NOS:1-7, 9-11, 14-23, 27, 31, 32, 40-42, 44-46, 48, 50-55 and 59-64 were not implicated in or connected with the detection, classification or treatment of colorectal cell proliferative disorders, or aerodigestive cell proliferative disorders.

[0169] In an alternative preferred embodiment, such analysis comprises the use of an oligonucleotide or oligomer for detecting the cytosine methylation state within genomic or treated (chemically modified) DNA, according to SEQ ID NOS:1 to SEQ ID NO:535. Said oligonucleotide or oligomer comprising a nucleic acid sequence having a length of at least nine (9) nucleotides which hybridizes, under moderately stringent or stringent conditions (as defined herein above), to a treated nucleic acid sequence according to SEQ ID NOS: 65 to SEQ ID NO: 88 and SEQ ID NOS:304 to SEQ ID NO:535 and/or sequences complementary thereto, or to a genomic sequence according to SEQ ID NOS: 1 to SEQ ID NO:64 and/or sequences complementary thereto.

[0170] Thus, the present invention includes nucleic acid molecules (e.g., oligonucleotides and peptide nucleic acid (PNA) molecules (PNA-oligomers)) that hybridize under moderately stringent and/or stringent hybridization conditions to all or a portion of the sequences SEQ ID NOS:1 to SEQ ID NO:535, or to the complements thereof. The hybridizing portion of the hybridizing nucleic acids is typically at least 9, 15, 20, 25, 30 or 35 nucleotides in length. However, longer molecules have inventive utility, and are thus within the scope of the present invention.

[0171] Preferably, the hybridizing portion of the inventive hybridizing nucleic acids is at least 95%, or at least 98%, or 100% identical to the sequence, or to a portion thereof of SEQ ID NOS:1 to SEQ ID NO:535, or to the complements thereof.

[0172] Hybridizing nucleic acids of the type described herein can be used, for example, as a primer (e.g., a PCR primer), or a diagnostic and/or prognostic probe or primer. Preferably, hybridization of the oligonucleotide probe to a nucleic acid sample is performed under stringent conditions and the probe is 100% identical to the target sequence. Nucleic acid duplex or hybrid stability is expressed as the melting temperature or Tm, which is the temperature at which a probe dissociates from a target DNA. This melting temperature is used to define the required stringency conditions.

[0173] For target sequences that are related and substantially identical to the corresponding sequence of SEQ ID NOS:1 to SEQ ID NO:64 (such as allelic variants and SNPs), rather than identical, it is useful to first establish the lowest temperature at which only homologous hybridization occurs with a particular concentration of salt (e.g., SSC or SSPE). Then, assuming that 1% mismatching results in a 1° C. decrease in the Tm, the temperature of the final wash in the hybridization reaction is reduced accordingly (for example, if sequences having >95% identity with the probe are sought, the final wash temperature is decreased by 5° C.). In practice, the change in Tm can be between 0.5° C. and 1.5° C. per 1% mismatch.

[0174] Examples of inventive oligonucleotides of length X (in nucleotides), as indicated by polynucleotide positions with reference to, e.g., SEQ ID NO:1, include those corresponding to sets (sense and antisense sets) of consecutively overlapping oligonucleotides of length X, where the oligonucleotides within each consecutively overlapping set (corresponding to a given X value) are defined as the finite set of Z oligonucleotides from nucleotide positions:

[0175] n to (n+(X−1));

[0176] where n=1, 2, 3, . . . (Y−(X−1));

[0177] where Y equals the length (nucleotides or base pairs) of SEQ ID NO:1 (2,280);

[0178] where X equals the common length (in nucleotides) of each oligonucleotide in the set (e.g., X=20 for a set of consecutively overlapping 20-mers); and

[0179] where the number (Z) of consecutively overlapping oligomers of length X for a given SEQ ID NO of length Y is equal to Y−(X−1). For example Z=2,280−19=2,261 for either sense or antisense sets of SEQ ID NO:1, where X=20.

[0180] Preferably, the set is limited to those oligomers that comprise at least one CpG, TpG or CpA dinucleotide.

[0181] Examples of inventive 20-mer oligonucleotides include the following set of 2,261 oligomers (and the antisense set complementary thereto), indicated by polynucleotide positions with reference to SEQ ID NO:1:

[0182] 1-20, 2-21, 3-22, 4-23, 5-24, . . . 2259-2278, 2260-2279 and 2261-2280.

[0183] Preferably, the set is limited to those oligomers that comprise at least one CpG, TpG or CpA dinucleotide.

[0184] Likewise, examples of inventive 25-mer oligonucleotides include the following set of 2,256 oligomers (and the antisense set complementary thereto), indicated by polynucleotide positions with reference to SEQ ID NO: 1:

[0185] 1-25, 2-26, 3-27, 4-28, 5-29, . . . 2254-2278, 2255-2279 and 2256-2280.

[0186] Preferably, the set is limited to those oligomers that comprise at least one CpG, TpG or CpA dinucleotide.

[0187] The present invention encompasses, for each of SEQ ID NOS:1 to SEQ ID NO:535 (sense and antisense), multiple consecutively overlapping sets of oligonucleotides or modified oligonucleotides of length X, where, e.g., X=9, 10, 17, 20, 22, 23, 25, 27, 30 or 35 nucleotides.

[0188] The oligonucleotides or oligomers according to the present invention constitute effective tools useful to ascertain genetic and epigenetic parameters of the genomic sequence corresponding to SEQ ID NOS:1 to SEQ ID NO:64. Preferred sets of such oligonucleotides or modified oligonucleotides of length X are those consecutively overlapping sets of oligomers corresponding to SEQ ID NOS:1 to SEQ ID NO:535 (and to the complements thereof). Preferably, said oligomers comprise at least one CpG, TpG or CpA dinucleotide.

[0189] Particularly preferred oligonucleotides or oligomers according to the present invention are those in which the cytosine of the CpG dinucleotide (or of the corresponding converted TpG or CpA dinucleotide) sequences is within the middle third of the oligonucleotide; that is, where the oligonucleotide is, for example, 13 bases in length, the CpG, TpG or CpA dinucleotide is positioned within the fifth to ninth nucleotide from the 5′-end.

[0190] The oligonucleotides of the invention can also be modified by chemically linking the oligonucleotide to one or more moieties or conjugates to enhance the activity, stability or detection of the oligonucleotide. Such moieties or conjugates include chromophores, fluorophors, lipids such as cholesterol, cholic acid, thioether, aliphatic chains, phospholipids, polyamines, polyethylene glycol (PEG), palmityl moieties, and others as disclosed in, for example, U.S. Pat. Nos. 5,514,758, 5,565,552, 5,567,810, 5,574, 142, 5,585,481, 5,587,371, 5,597,696 and 5,958,773. The probes may also exist in the form of a PNA (peptide nucleic acid) which has particularly preferred pairing properties. Thus, the oligonucleotide may include other appended groups such as peptides, and may include hybridization-triggered cleavage agents (Krol et al., BioTechniques 6:958-976, 1988) or intercalating agents (Zon, Pharm. Res. 5:539-549, 1988). To this end, the oligonucleotide may be conjugated to another molecule, e.g., a chromophore, fluorophor, peptide, hybridization-triggered cross-linking agent, transport agent, hybridization-triggered cleavage agent, etc.

[0191] The oligonucleotide may also comprise at least one art-recognized modified sugar and/or base moiety, or may comprise a modified backbone or non-natural internucleoside linkage.

[0192] The oligonucleotides or oligomers according to particular embodiments of the present invention are typically used in ‘sets,’ which contain at least one oligomer for analysis of each of the CpG dinucleotides of genomic sequences SEQ ID NOS:1 to SEQ ID NO:64 and sequences complementary thereto, or to the corresponding CpG, TpG or CpA dinucleotide within a sequence of the treated nucleic acids according to SEQ ID NOS:304 to SEQ ID NO:535 and sequences complementary thereto. However, it is anticipated that for economic or other factors it may be preferable to analyze a limited selection of the CpG dinucleotides within said sequences, and the content of the set of oligonucleotides is altered accordingly.

[0193] Therefore, in particular embodiments, the present invention provides a set of at least two (2) (oligonucleotides and/or PNA-oligomers) useful for detecting the cytosine methylation state in treated genomic DNA (SEQ ID NOS:304 to SEQ ID NO:535), or in genomic DNA (SEQ ID NOS:1 to SEQ ID NO:64 and sequences complementary thereto). These probes enable diagnosis, classification and/or therapy of genetic and epigenetic parameters of colorectal cell proliferative disorders. The set of oligomers may also be used for detecting single nucleotide polymorphisms (SNPs) in treated genomic DNA (SEQ ID NOS:304 to SEQ ID NO:535), or in genomic DNA (SEQ ID NOS:1 to SEQ ID NO:64 and sequences complementary thereto).

[0194] In preferred embodiments, at least one, and more preferably all members of a set of oligonucleotides is bound to a solid phase.

[0195] In further embodiments, the present invention provides a set of at least two (2) oligonucleotides that are used as ‘primer’ oligonucleotides for amplifying DNA sequences of one of SEQ ID NOS:1 to SEQ ID NO:535 and sequences complementary thereto, or segments thereof.

[0196] It is anticipated that the oligonucleotides may constitute all or part of an “array” or “DNA chip” (i.e., an arrangement of different oligonucleotides and/or PNA-oligomers bound to a solid phase). Such an array of different oligonucleotide- and/or PNA-oligomer sequences can be characterized, for example, in that it is arranged on the solid phase in the form of a rectangular or hexagonal lattice. The solid-phase surface may be composed of silicon, glass, polystyrene, aluminum, steel, iron, copper, nickel, silver, or gold. Nitrocellulose as well as plastics such as nylon, which can exist in the form of pellets or also as resin matrices, may also be used. An overview of the Prior Art in oligomer array manufacturing can be gathered from a special edition of Nature Genetics (Nature Genetics Supplement, Volume 21, January 1999, and from the literature cited therein). Fluorescently labeled probes are often used for the scanning of immobilized DNA arrays. The simple attachment of Cy3 and Cy5 dyes to the 5′-OH of the specific probe are particularly suitable for fluorescence labels. The detection of the fluorescence of the hybridized probes may be carried out, for example, via a confocal microscope. Cy3 and Cy5 dyes, besides many others, are commercially available.

[0197] It is also anticipated that the oligonucleotides, or particular sequences thereof, may constitute all or part of an “virtual array” wherein the oligonucleotides, or particular sequences thereof, are used, for example, as ‘specifiers’ as part of, or in combination with a diverse population of unique labeled probes to analyze a complex mixture of analytes. Such a method, for example is described in US 2003/0013091 (U.S. Ser. No. 09/898,743, published 16 Jan. 2003). In such methods, enough labels are generated so that each nucleic acid in the complex mixture (i.e., each analyte) can be uniquely bound by a unique label and thus detected (each label is directly counted, resulting in a digital read-out of each molecular species in the mixture).

[0198] It is particularly preferred that the oligomers according to the invention are utilised for at least one of: detection of; detection and differentiation between or among subclasses of; diagnosis of; prognosis of; treatment of; monitoring of; and treatment and monitoring of colorectal cell proliferative disorders. This is enabled by use of said sets for the detection or detection and differentiation of one or more of the following classes of tissues: colorectal carcinoma, colon adenoma, inflammatory colon tissue, grade 2 dysplasia colon adenomas less than 1 cm, grade 3 dysplasia colon adenomas larger than 1 cm, normal colon tissue, non-colon healthy tissue and non-colon cancer tissue.

[0199] Particularly preferred are those sets of oligomer that comprise at least two oligonucleotides selected from one of the following sets of oligonucleotides:

[0200] SEQ ID NOS:89-285, 14424-14453;

[0201] SEQ ID NOS:89-109, 113-223, 227-293, 14424-14453;

[0202] SEQ ID NOS:89-109, 113-161, 164-223, 227-285, 287-293, 14424-14453;

[0203] SEQ ID NOS:89, 90, 126-135, 147-151, 224-226, 253-256, 261-267, 283-285;

[0204] SEQ ID NOS:89-161, 164-293, 14424-14453;

[0205] SEQ ID NOS:89-109, 113-299, 14424-14453;

[0206] SEQ ID NOS:89-109, 113-293, 296-299, 14424-14453;

[0207] SEQ ID NOS:1-12, 15-20, 22, 25-36, 38-49, 51-58;

[0208] SEQ ID NOS:681-683, 683, 684, 684, 685, 685, 686, 686, 687, 687, 688, 688-691, 691, 692, 692-695, 695, 696, 696-699, 699, 700, 700-709, 709, 710, 710-725, 725, 726, 726, 727, 727, 728, 728-760, 760, 761, 761, 762, 762, 763, 763-777, 784, 784, 785, 785, 786, 786, 787, 787-802, 802, 803, 803-814, 814, 815, 815-832, 832, 833, 833-836, 836, 837, 837-872, 872, 873, 873-876, 876, 877, 877, 878, 878, 879, 879-882, 882, 883, 883-892, 892, 893, 893-896, 896, 897, 897-909, 909, 910, 910, 911, 911, 912, 912-915, 915, 916, 916-921, 921-925, 925, 926, 926-939, 939, 940, 940, 941, 941, 942, 942-944, 944-957, 957, 958, 958, 959, 959, 960, 960, 961, 961, 962, 962-971, 971, 972, 972, 973, 973, 974, 974, 975, 975, 976, 976-979, 979, 980, 980, 981, 981-988, 988, 989, 989-994, 994, 995, 995-998, 998, 999, 999, 1000, 1000, 1001, 1001, 1002, 1002, 1003, 1003, 1010-1016, 1016, 1017, 1017, 1018, 1018, 1019, 1019-1028, 1028, 1029, 1029-1034, 1034, 1035, 1035-1046, 1046, 1047, 1047-1058, 1058, 1059, 1059, 1060, 1060, 1061, 1061, 1062, 1062, 1063, 1063-1070, 1070, 1071, 1071, 1072, 1072, 1073, 1073, 1074, 1074, 1075, 1075-1078, 1078, 1079, 1079-1084, 1084, 1085, 1085, 1086, 1086, 1087, 1087-1092, 1092, 1093, 1093, 1094, 1094, 1095, 1095-1102, 1102, 1103, 1103-1114, 1114, 1115, 1115-1119, 1119, 1120, 1120-1141, 1141, 1142, 1142;

[0209] SEQ ID NOS:681-683, 683, 684, 684, 685, 685, 686, 686, 687, 687, 688, 688-691, 691, 692, 692-695, 695, 696, 696-699, 699, 700, 700-709, 709, 710, 710-725, 725, 726, 726, 727, 727, 728, 728-760, 760, 761, 761, 762, 762, 763, 763-777, 784, 784, 785, 785, 786, 786, 787, 787-802, 802, 803, 803-814, 814, 815, 815-832, 832, 833, 833-836, 836, 837, 837-872, 872, 873, 873-876, 876, 877, 877, 878, 878, 879, 879-882, 882, 883, 883-885, 890-892, 892, 893, 893-896, 896, 897, 897-909, 909, 910, 910, 911, 911, 912, 912-915, 915, 916, 916-921, 921-925, 925, 926, 926-939, 939, 940, 940, 941, 941, 942, 942-944, 944-957, 957, 958, 958, 959, 959, 960, 960, 961, 961, 962, 962-971, 971, 972, 972, 973, 973, 974, 974, 975, 975, 976, 976-979, 979, 980, 980, 981, 981-988, 988, 989, 989-994, 994, 995, 995-998, 998, 999, 999, 1000, 1000, 1001, 1001, 1002, 1002, 1003, 1003, 1010-1016, 1016, 1017, 1017, 1018, 1018, 1019, 1019-1028, 1028, 1029, 1029-1034, 1034, 1035, 1035-1046, 1046, 1047, 1047-1058, 1058, 1059, 1059, 1060, 1060, 1061, 1061, 1062, 1062, 1063, 1063-1070, 1070, 1071, 1071, 1072, 1072, 1073, 1073, 1074, 1074, 1075, 1075-1078, 1078, 1079, 1079-1084, 1084, 1085, 1085, 1086, 1086, 1087, 1087-1092, 1092, 1093, 1093, 1094, 1094, 1095, 1095-1102, 1102, 1103, 1103-1114, 1114, 1115, 1115-1119, 1119, 1120, 1120-1124, 1129-1141, 1141, 1142, 1142;

[0210] SEQ ID NOS:738-740, 810-814, 814, 815, 815-829, 854-865, 1004-1006, 1006, 1007, 1007-1009, 1062, 1062, 1063, 1063-1069, 1078, 1078, 1079, 1079-1084, 1084, 1085, 1085, 1086, 1086, 1087, 1087-1091, 1121-1124;

[0211] SEQ ID NOS:681-683, 683, 684, 684, 685, 685, 686, 686, 687, 687, 688, 688-691, 691, 692, 692-695, 695, 696, 696-699, 699, 700, 700-709, 709, 710, 710-725, 725, 726, 726, 727, 727, 728, 728-760, 760, 761, 761, 762, 762, 763, 763-784, 784, 785, 785, 786, 786, 787, 787-802, 802, 803, 803-814, 814, 815, 815-832, 832, 833, 833-836, 836, 837, 837-872, 872, 873, 873-876, 876, 877, 877, 878, 878, 879, 879-882, 882, 883, 883-892, 892, 893, 893-896, 896, 897,897-909, 909, 910, 910, 911, 911, 912, 912-915, 915, 916, 916-921, 921-925, 925, 926, 926-939, 939, 940, 940, 941, 941, 942, 942-944, 944-957, 957, 958, 958, 959, 959, 960, 960, 961, 961, 962, 962-971, 971, 972, 972, 973, 973, 974, 974, 975, 975, 976, 976-979, 979, 980, 980, 981, 981-988, 988, 989, 989-994, 994, 995, 995-998, 998, 999, 999, 1000, 1000, 1001, 1001, 1002, 1002, 1003, 1003-1006, 1006, 1007, 1007-1016, 1016, 1017, 1017, 1018, 1018, 1019, 1019-1028, 1028, 1029, 1029-1034, 1034, 1035, 1035-1046, 1046, 1047, 1047-1058, 1058, 1059, 1059, 1060, 1060, 1061, 1061, 1062, 1062, 1063, 1063-1070, 1070, 1071, 1071, 1072, 1072, 1073, 1073, 1074, 1074, 1075, 1075-1078, 1078, 1079, 1079-1084, 1084, 1085, 1085, 1086, 1086, 1087, 1087-1092, 1092, 1093, 1093, 1094, 1094, 1095, 1095-1102, 1102, 1103, 1103-1114, 1114, 1115, 1115-1119, 1119, 1120, 1120-1141, 1141, 1142, 1142-1145, 1145, 1146, 1146, 1147, 1147, 1148, 1148-1151, 1151, 1152, 1152-1154, 1154, 1155, 1155, 1156, 1156, 1157, 1157, 1158, 1158, 1159, 1159;

[0212] SEQ ID NOS:681-683, 683, 684, 684, 685, 685, 686, 686, 687, 687, 688, 688-691, 691, 692, 692-695, 695, 696, 696-699, 699, 700, 700-709, 709, 710, 710-725, 725, 726, 726, 727, 727, 728, 728-760, 760, 761, 761, 762, 762, 763, 763-784, 784, 785, 785, 786, 786, 787, 787-802, 802, 803, 803-814, 814, 815, 815-832, 832, 833, 833-836, 836, 837, 837-872, 872, 873, 873-876, 876, 877, 877, 878, 878, 879, 879-882, 882, 883, 883-885, 890-892, 892, 893, 893-896, 896, 897, 897-909, 909, 910, 910, 911, 911, 912, 912-915, 915, 916, 916-921, 921-925, 925, 926, 926-939, 939, 940, 940, 941, 941, 942, 942-944, 944-957, 957, 958, 958, 959, 959, 960, 960, 961, 961, 962, 962-971, 971, 972, 972, 973, 973, 974, 974, 975, 975, 976, 976-979, 979, 980, 980, 981, 981-988, 988, 989, 989-994, 994, 995, 995-998, 998, 999, 999, 1000, 1000, 1001, 1001, 1002, 1002, 1003, 1003-1006, 1006, 1007, 1007-1016, 1016, 1017, 1017, 1018, 1018, 1019, 1019-1028, 1028, 1029, 1029-1034, 1034, 1035, 1035-1046, 1046, 1047, 1047-1058, 1058, 1059, 1059, 1060, 1060, 1061, 1061, 1062, 1062, 1063, 1063-1070, 1070, 1071, 1071, 1072, 1072, 1073, 1073, 1074, 1074, 1075, 1075-1078, 1078, 1079, 1079-1084, 1084, 1085, 1085, 1086, 1086, 1087, 1087-1092, 1092, 1093, 1093, 1094, 1094, 1095, 1095-1102, 1102, 1103, 1103-1114, 1114, 1115, 1115-1119, 1119, 1120, 1120-1141, 1141, 1142, 1142;

[0213] SEQ ID NOS:681-683, 683, 684, 684, 685, 685, 686, 686, 687, 687, 688, 688-691, 691, 692, 692-695, 695, 696, 696-699, 699, 700, 700-709, 709, 710, 710-725, 725, 726, 726, 727, 727, 728, 728-760, 760, 761, 761, 762, 762, 763, 763-777, 784, 784, 785, 785, 786, 786, 787, 787-802, 802, 803, 803-814, 814, 815, 815-832, 832, 833, 833-836, 836, 837, 837-872, 872, 873, 873-876, 876, 877, 877, 878, 878, 879, 879-882, 882, 883, 883-892, 892, 893, 893-896, 896, 897, 897-909, 909, 910, 910, 911, 911, 912, 912-915, 915, 916, 916-921, 921-925, 925, 926, 926-939, 939, 940, 940, 941, 941, 942, 942-944, 944-957, 957, 958, 958, 959, 959, 960, 960, 961, 961, 962, 962-971, 971, 972, 972, 973, 973, 974, 974, 975, 975, 976, 976-979, 979, 980, 980, 981, 981-988, 988, 989, 989-994, 994, 995, 995-998, 998, 999, 999, 1000, 1000, 1001, 1001, 1002, 1002, 1003, 1003-1006, 1006, 1007, 1007-1016, 1016, 1017, 1017, 1018, 1018, 1019, 1019-1028, 1028, 1029, 1029-1034, 1034, 1035, 1035-1046, 1046, 1047, 1047-1058, 1058, 1059, 1059, 1060, 1060, 1061, 1061, 1062, 1062, 1063, 1063-1070, 1070, 1071, 1071, 1072, 1072, 1073, 1073, 1074, 1074, 1075, 1075-1078, 1078, 1079, 1079-1084, 1084, 1085, 1085, 1086, 1086, 1087, 1087-1092, 1092, 1093, 1093, 1094, 1094, 1095, 1095-1102, 1102, 1103, 1103-1114, 1114, 1115, 1115-1119, 1119, 1120, 1120-1141, 1141, 1142, 1142-1145, 1145, 1146, 1146, 1147, 1147, 1148, 1148-1151, 1151, 1152, 1152;

[0214] and SEQ ID NOS:681-683, 683, 684, 684, 685, 685, 686, 686, 687, 687, 688, 688-691, 691, 692, 692-695, 695, 696, 696-699, 699, 700, 700-709, 709, 710, 710-725, 725, 726, 726, 727, 727, 728, 728-760, 760, 761, 761, 762, 762, 763, 763-777, 784, 784, 785, 785, 786, 786, 787, 787-802, 802, 803, 803-814, 814, 815, 815-832, 832, 833, 833-836, 836, 837, 837-872, 872, 873, 873-876, 876, 877, 877, 878, 878, 879, 879-882, 882, 883, 883-892, 892, 893, 893-896, 896, 897, 897-909, 909, 910, 910, 911, 911, 912, 912-915, 915, 916, 916-921, 921-925, 925, 926, 926-939, 939, 940, 940, 941, 941, 942, 942-944, 944-957, 957, 958, 958, 959, 959, 960, 960, 961, 961, 962, 962-971, 971, 972, 972, 973, 973, 974, 974, 975, 975, 976, 976-979, 979, 980, 980, 981, 981-988, 988, 989, 989-994, 994, 995, 995-998, 998, 999, 999, 1000, 1000, 1001, 1001, 1002, 1002, 1003, 1003-1006, 1006, 1007, 1007-1016, 1016, 1017, 1017, 1018, 1018, 1019, 1019-1028, 1028, 1029, 1029-1034, 1034, 1035, 1035-1046, 1046, 1047, 1047-1058, 1058, 1059, 1059, 1060, 1060, 1061, 1061, 1062, 1062, 1063, 1063-1070, 1070, 1071, 1071, 1072, 1072, 1073, 1073, 1074, 1074, 1075, 1075-1078, 1078, 1079, 1079-1084, 1084, 1085, 1085, 1086, 1086, 1087, 1087-1092, 1092, 1093, 1093, 1094, 1094, 1095, 1095-1102, 1102, 1103, 1103-1114, 1114, 1115, 1115-1119, 1119, 1120, 1120-1141, 1141, 1142, 1142, 1145, 1145, 1146, 1146, 1147, 1147, 1148, 1148-1151, 1151, 1152, 1152.

[0215] In one embodiment of the method, at least one of colorectal carcinoma tissue or colon adenomas is distinguished from at least one tissue selected from the group consisting of inflammatory colon tissue and normal colon tissue. This is achieved by analysis of the methylation status of at least one target sequence comprising, or hybridizing under stringent conditions to at least 16 contiguous nucleotides of a sequence selected from the group consisting SEQ ID NOS:1-12, 15-20, 22, 25-36, 38-49, 51-58 and complements thereof. This is preferrably achieved by use of a set consisting of at least one oligonucleotide, and more preferably at least two selected from one of the groups consisting of, or by use of a set comprising of at least two oligonucleotides selected from one of the groups consisting of:

[0216] SEQ ID NOS:89-285 & 14424-14453; and

[0217] SEQ ID NOS:681-683, 683, 684, 684, 685, 685, 686, 686, 687, 687, 688, 688-691, 691, 692, 692-695, 695, 696, 696-699, 699, 700, 700-709, 709, 710, 710-725, 725, 726, 726, 727, 727, 728, 728-760, 760, 761, 761, 762, 762, 763, 763-784, 784, 785, 785, 786, 786, 787, 787-802, 802, 803, 803-814, 814, 815, 815-832, 832, 833, 833-836, 836, 837, 837-872, 872, 873, 873-876, 876, 877, 877, 878, 878, 879, 879-882, 882, 883, 883-892, 892, 893, 893-896, 896, 897, 897-909, 909, 910, 910, 911, 911, 912, 912-915, 915, 916, 916-921, 921-925, 925, 926, 926-939, 939, 940, 940, 941, 941, 942, 942-944, 944-957, 957, 958, 958, 959, 959, 960, 960, 961, 961, 962, 962-971, 971, 972, 972, 973, 973, 974, 974, 975, 975, 976, 976-979, 979, 980, 980, 981, 981-988, 988, 989, 989-994, 994, 995, 995-998, 998, 999, 999, 1000, 1000, 1001, 1001, 1002, 1002, 1003, 1003-1006, 1006, 1007, 1007-1016, 1016, 1017, 1017, 1018, 1018, 1019, 1019-1028, 1028, 1029, 1029-1034, 1034, 1035, 1035-1046, 1046, 1047, 1047-1058, 1058, 1059, 1059, 1060, 1060, 1061, 1061, 1062, 1062, 1063, 1063-1070, 1070, 1071, 1071, 1072, 1072, 1073, 1073, 1074, 1074, 1075, 1075-1078, 1078, 1079, 1079-1084, 1084, 1085, 1085, 1086, 1086, 1087, 1087-1092, 1092, 1093, 1093, 1094, 1094, 1095, 1095-1102, 1102, 1103, 1103-1114, 1114, 1115, 1115-1119, 1119, 1120, 1120-1124.

[0218] In one embodiment of the method, colorectal carcinoma is distinguished from at least one tissue selected from the group consisting of non-colon healthy tissue, peripheral blood lymphocytes and non-colon cancer. In one embodiment this is achieved by analysis of the methylation status of at least one target sequence comprising, or hybridizing under stringent conditions to at least 16 contiguous nucleotides of a sequence selected from the group consisting SEQ ID NOS:1-23, 26-36, 38-43, 45-49, 51-58. This is preferrably achieved by use of a set consisting of at least one oligonucleotide, and more preferably at least two oligonucleotides selected from one of the groups consisting of:

[0219] SEQ ID NOS:89-109, 113-223, 227-293, 14424-14453; and

[0220] SEQ ID NOS:681-683, 683, 684, 684, 685, 685, 686, 686, 687, 687, 688, 688-691, 691, 692, 692-695, 695, 696, 696-699, 699, 700, 700-709, 709, 710, 710-725, 725, 726, 726, 727, 727, 728, 728-760, 760, 761, 761, 762, 762, 763, 763-777, 784, 784, 785, 785, 786, 786, 787, 787-802, 802, 803, 803-814, 814, 815, 815-832, 832, 833, 833-836, 836, 837, 837-872, 872, 873, 873-876, 876, 877, 877, 878, 878, 879, 879-882, 882, 883, 883-892, 892, 893, 893-896, 896, 897, 897-909, 909, 910, 910, 911, 911, 912, 912-915, 915, 916, 916-921, 921-925, 925, 926, 926-939, 939, 940, 940, 941, 941, 942, 942-944, 944-957, 957, 958, 958, 959, 959, 960, 960, 961, 961, 962, 962-971, 971, 972, 972, 973, 973, 974, 974, 975, 975, 976, 976-979, 979, 980, 980, 981, 981-988, 988, 989, 989-994, 994, 995, 995-998, 998, 999, 999, 1000, 1000, 1001, 1001, 1002, 1002, 1003, 1003, 1010-1016, 1016, 1017, 1017, 1018, 1018, 1019, 1019-1028, 1028, 1029, 1029-1034, 1034, 1035, 1035-1046, 1046, 1047, 1047-1058, 1058, 1059, 1059, 1060, 1060, 1061, 1061, 1062, 1062, 1063, 1063-1070, 1070, 1071, 1071, 1072, 1072, 1073, 1073, 1074, 1074, 1075, 1075-1078, 1078, 1079, 1079-1084, 1084, 1085, 1085, 1086, 1086, 1087, 1087-1092, 1092, 1093, 1093, 1094, 1094, 1095, 1095-1102, 1102, 1103, 1103-1114, 1114, 1115, 1115-1119, 1119, 1120, 1120-1141, 1141, 1142, 1142.

[0221] In one embodiment of the method, colorectal carcinoma is distinguished from at least one tissue selected from the group consisting of inflammatory colon tissue, normal colon tissue, non-colon healthy tissue, peripheral blood lymphocytes, colon adenomas and non-colon cancer tissue. This is achieved by analysis of the methylation status of at least one target sequence comprising, or hybridizing under stringent conditions to at least 16 contiguous nucleotides of a sequence selected from the group consisting SEQ ID NO: 1-3, 5-13, 15-23, 26-36, 38-43, 45-49, 51-58 and complements thereof. This is preferably achieved by use of a set consisting of at least one oligonucleotide, and more preferably at least two by use of a set of oligomers comprising at least two oligonucleotides selected from one of the groups consisting of:

[0222] SEQ ID NOS:89-109, 113-161, 164-223, 227-285, 287-293, 14424-14453; and

[0223] SEQ ID NOS:681-683, 683, 684, 684, 685, 685, 686, 686, 687, 687, 688, 688-691, 691, 692, 692-695, 695, 696, 696-699, 699, 700, 700-709, 709, 710, 710-725, 725, 726, 726, 727, 727, 728, 728-760, 760, 761, 761, 762, 762, 763, 763-777, 784, 784, 785, 785, 786, 786, 787, 787-802, 802, 803, 803-814, 814, 815, 815-832, 832, 833, 833-836, 836, 837, 837-872, 872, 873, 873-876, 876, 877, 877, 878, 878, 879, 879-882, 882, 883, 883-885, 890-892, 892, 893, 893-896, 896, 897, 897-909, 909, 910, 910, 911, 911, 912, 912-915, 915, 916, 916-921, 921-925, 925, 926, 926-939, 939, 940, 940, 941, 941, 942, 942-944, 944-957, 957, 958, 958, 959, 959, 960, 960, 961, 961, 962, 962-971, 971, 972, 972, 973, 973, 974, 974, 975, 975, 976, 976-979, 979, 980, 980, 981, 981-988, 988, 989, 989-994, 994, 995, 995-998, 998, 999, 999, 1000, 1000, 1001, 1001, 1002, 1002, 1003, 1003, 1010-1016, 1016, 1017, 1017, 1018, 1018, 1019, 1019-1028, 1028, 1029, 1029-1034, 1034, 1035, 1035-1046, 1046, 1047, 1047-1058, 1058, 1059, 1059, 1060, 1060, 1061, 1061, 1062, 1062, 1063, 1063-1070, 1070, 1071, 1071, 1072, 1072, 1073, 1073, 1074, 1074, 1075, 1075-1078, 1078, 1079, 1079-1084, 1084, 1085, 1085, 1086, 1086, 1087, 1087-1092, 1092, 1093, 1093, 1094, 1094, 1095, 1095-1102, 1102, 1103, 1103-1114, 1114, 1115, 1115-1119, 1119, 1120, 1120-1124, 1129-1141, 1141, 1142, 1142.

[0224] In one embodiment of the method, the colorectal carcinoma is distinguished from colon adenomas. This is achieved by analysis of the methylation status of at least one target sequence comprising, or hybridizing under stringent conditions to at least 16 contiguous nucleotides of a sequence selected from the group consisting SEQ ID NO: 11, 25, 27, 38, 40, 45, 53 and complements thereof. This is preferrably achieved by use of a set consisting of at least one oligonucleotide, and more preferably at least two oligonucleotides selected from one of the groups consisting of:

[0225] SEQ ID NOS:89, 90, 126-135, 147-151, 224-226, 253-256, 261-267, 283-285; and

[0226] SEQ ID NOS:738-740, 810-814, 814, 815, 815-829, 854-865, 1004-1006, 1006, 1007, 1007-1009, 1062, 1062, 1063, 1063-1069, 1078, 1078, 1079, 1079-1084, 1084, 1085, 1085, 1086, 1086, 1087, 1087-1091, 1121-1124.

[0227] In one embodiment of the method, at least one of colorectal carcinoma tissue, or colon adenomas is distinguished from at least one tissue selected from the group consisting of inflammatory colon tissue and normal colon tissue. This is achieved by analysis of the methylation status of at least one target sequence comprising, or hybridizing under stringent conditions to at least 16 contiguous nucleotides of a sequence selected from the group consisting SEQ ID NO: 1-64 and complements thereof. This is preferably achieved by use of a set consisting of at least one oligonucleotide, and more preferably at least two oligomers comprising at least two oligonucleotides selected from one of the groups consisting of:

[0228] SEQ ID NOS: 89-303, 14424-14453; and

[0229] SEQ ID NOS:681-683, 683, 684, 684, 685, 685, 686, 686, 687, 687, 688, 688-691, 691, 692, 692-695, 695, 696, 696-699, 699, 700, 700-709, 709, 710, 710-725, 725, 726, 726, 727, 727, 728, 728-760, 760, 761, 761, 762, 762, 763, 763-784, 784, 785, 785, 786, 786, 787, 787-802, 802, 803, 803-814, 814, 815, 815-832, 832, 833, 833-836, 836, 837, 837-872, 872, 873, 873-876, 876, 877, 877, 878, 878, 879, 879-882, 882, 883, 883-892, 892, 893, 893-896, 896, 897, 897-909, 909, 910, 910, 911, 911, 912, 912-915, 915, 916, 916-921, 921-925, 925, 926, 926-939, 939, 940, 940, 941, 941, 942, 942-944, 944-957, 957, 958, 958, 959, 959, 960, 960, 961, 961, 962, 962-971, 971, 972, 972, 973, 973, 974, 974, 975, 975, 976, 976-979, 979, 980, 980, 981, 981-988, 988, 989, 989-994, 994, 995, 995-998, 998, 999, 999, 1000, 1000, 1001, 1001, 1002, 1002, 1003, 1003-1006, 1006, 1007, 1007-1016, 1016, 1017, 1017, 1018, 1018, 1019, 1019-1028, 1028, 1029, 1029-1034, 1034, 1035, 1035-1046, 1046, 1047, 1047-1058, 1058, 1059, 1059, 1060, 1060, 1061, 1061, 1062, 1062, 1063, 1063-1070, 1070, 1071, 1071, 1072, 1072, 1073, 1073, 1074, 1074, 1075, 1075-1078, 1078, 1079, 1079-1084, 1084, 1085, 1085, 1086, 1086, 1087, 1087-1092, 1092, 1093, 1093, 1094, 1094, 1095, 1095-1102, 1102, 1103, 1103-1114, 1114, 1115, 1115-1119, 1119, 1120, 1120-1141, 1141, 1142, 1142-1145, 1145, 1146, 1146, 1147, 1147, 1148, 1148-1151, 1151, 1152, 1152-1154, 1154, 1155, 1155, 1156, 1156, 1157, 1157, 1158, 1158, 1159, 1159.

[0230] In one embodiment of the method, colorectal carcinoma tissue is distinguished from at least one of inflammatory colon tissue and normal colon tissue. This is achieved by analysis of the methylation status of at least one target sequence comprising, or hybridizing under stringent conditions to at least 16 contiguous nucleotides of a sequence selected from the group consisting SEQ ID NOS: 1-3, 5-23, 25-36, 38-49, 51-58 and complements thereof. This is preferably achieved by use of a set consisting of at least one oligonucleotide, and more preferably at least two oligomers comprising at least two oligonucleotides selected from one of the groups consisting of:

[0231] SEQ ID NOS: 89-161, 164-293, 14424-14453; and

[0232] SEQ ID NOS:681-683, 683, 684, 684, 685, 685, 686, 686, 687, 687, 688, 688-691, 691, 692, 692-695, 695, 696, 696-699, 699, 700, 700-709, 709, 710, 710-725, 725, 726, 726, 727, 727, 728, 728-760, 760, 761, 761, 762, 762, 763, 763-784, 784, 785, 785, 786, 786, 787, 787-802, 802, 803, 803-814, 814, 815, 815-832, 832, 833, 833-836, 836, 837, 837-872, 872, 873, 873-876, 876, 877, 877, 878, 878, 879, 879-882, 882, 883, 883-885, 890-892, 892, 893, 893-896, 896, 897, 897-909, 909, 910, 910, 911, 911, 912, 912-915, 915, 916, 916-921, 921-925, 925, 926, 926-939, 939, 940, 940, 941, 941, 942, 942-944, 944-957, 957, 958, 958, 959, 959, 960, 960, 961, 961, 962, 962-971, 971, 972, 972, 973, 973, 974, 974, 975, 975, 976, 976-979, 979, 980, 980, 981, 981-988, 988, 989, 989-994, 994, 995, 995-998, 998, 999, 999, 1000, 1000, 1001, 1001, 1002, 1002, 1003, 1003-1006, 1006, 1007, 1007-1016, 1016, 1017, 1017, 1018, 1018, 1019, 1019-1028, 1028, 1029, 1029-1034, 1034, 1035, 1035-1046, 1046, 1047, 1047-1058, 1058, 1059, 1059, 1060, 1060, 1061, 1061, 1062, 1062, 1063, 1063-1070, 1070, 1071, 1071, 1072, 1072, 1073, 1073, 1074, 1074, 1075, 1075-1078, 1078, 1079, 1079-1084, 1084, 1085, 1085, 1086, 1086, 1087, 1087-1092, 1092, 1093, 1093, 1094, 1094, 1095, 1095-1102, 1102, 1103, 1103-1114, 1114, 1115, 1115-1119, 1119, 1120, 1120-1141, 1141, 1142, 1142.

[0233] In one embodiment of the method, at least one of colorectal carcinoma tissue, or colon adenomas is distinguished from at least one tissue selected from the group consisting of inflammatory colon tissue, normal colon tissue, non-colon healthy tissue, peripheral blood lymphocytes, and non-colon cancer tissue. This is achieved by analysis of the methylation status of at least one target sequence comprising, or hybridizing under stringent conditions to at least 16 contiguous nucleotides of a sequence selected from the group consisting SEQ ID NO: 1-36, 38-43, 45-58 and complements thereof. This is preferably achieved by use of a set consisting of at least one oligonucleotide, and more preferably at least two oligomers comprising at least two oligonucleotides selected from one of the groups consisting of:

[0234] SEQ ID NOS: 89-109, 113-299, 14424-14453; and

[0235] SEQ ID NOS:681-683, 683, 684, 684, 685, 685, 686, 686, 687, 687, 688, 688-691, 691, 692, 692-695, 695, 696, 696-699, 699, 700, 700-709, 709, 710, 710-725, 725, 726, 726, 727, 727, 728, 728-760, 760, 761, 761, 762, 762, 763, 763-777, 784, 784, 785, 785, 786, 786, 787, 787-802, 802, 803, 803-814, 814, 815, 815-832, 832, 833, 833-836, 836, 837, 837-872, 872, 873, 873-876, 876, 877, 877, 878, 878, 879, 879-882, 882, 883, 883-892, 892, 893, 893-896, 896, 897, 897-909, 909, 910, 910, 911, 911, 912, 912-915, 915, 916, 916-921, 921-925, 925, 926, 926-939, 939, 940, 940, 941, 941, 942, 942-944, 944-957, 957, 958, 958, 959, 959, 960, 960, 961, 961, 962, 962-971, 971, 972, 972, 973, 973, 974, 974, 975, 975, 976, 976-979, 979, 980, 980, 981, 981-988, 988, 989, 989-994, 994, 995, 995-998, 998, 999, 999, 1000, 1000, 1001, 1001, 1002, 1002, 1003, 1003-1006, 1006, 1007, 1007-1016, 1016, 1017, 1017, 1018, 1018, 1019, 1019-1028, 1028, 1029, 1029-1034, 1034, 1035, 1035-1046, 1046, 1047, 1047-1058, 1058, 1059, 1059, 1060, 1060, 1061, 1061, 1062, 1062, 1063, 1063-1070, 1070, 1071, 1071, 1072, 1072, 1073, 1073, 1074, 1074, 1075, 1075-1078, 1078, 1079, 1079-1084, 1084, 1085, 1085, 1086, 1086, 1087, 1087-1092, 1092, 1093, 1093, 1094, 1094, 1095, 1095-1102, 1102, 1103, 1103-1114, 1114, 1115, 1115-1119, 1119, 1120, 1120-1141, 1141, 1142, 1142-1145, 1145, 1146, 1146, 1147, 1147, 1148, 1148-1151, 1151, 1152, 1152.

[0236] In one embodiment of the method, tissues originating from the colon are distinguished from tissues of non-colon origin by use of a set of oligomers comprising at least two oligonucleotides selected from one of the groups consisting of:

[0237] SEQ ID NOS: 89-303, 14424-14453; and

[0238] SEQ ID NOS:681-683, 683, 684, 684, 685, 685, 686, 686, 687, 687, 688, 688-691, 691, 692, 692-695, 695, 696, 696-699, 699, 700, 700-709, 709, 710, 710-725, 725, 726, 726, 727, 727, 728, 728-760, 760, 761, 761, 762, 762, 763, 763-784, 784, 785, 785, 786, 786, 787, 787-802, 802, 803, 803-814, 814, 815, 815-832, 832, 833, 833-836, 836, 837, 837-872, 872, 873, 873-876, 876, 877, 877, 878, 878, 879, 879-882, 882, 883, 883-892, 892, 893, 893-896, 896, 897, 897-909, 909, 910, 910, 911, 911, 912, 912-915, 915, 916, 916-921, 921-925, 925, 926, 926-939, 939, 940, 940, 941, 941, 942, 942-944, 944-957, 957, 958, 958, 959, 959, 960, 960, 961, 961, 962, 962-971, 971, 972, 972, 973, 973, 974, 974, 975, 975, 976, 976-979, 979, 980, 980, 981, 981-988, 988, 989, 989-994, 994, 995, 995-998, 998, 999, 999, 1000, 1000, 1001, 1001, 1002, 1002, 1003, 1003-1006, 1006, 1007, 1007-1016, 1016, 1017, 1017, 1018, 1018, 1019, 1019-1028, 1028, 1029, 1029-1034, 1034, 1035, 1035-1046, 1046, 1047, 1047-1058, 1058, 1059, 1059, 1060, 1060, 1061, 1061, 1062, 1062, 1063, 1063-1070, 1070, 1071, 1071, 1072, 1072, 1073, 1073, 1074, 1074, 1075, 1075-1078, 1078, 1079, 1079-1084, 1084, 1085, 1085, 1086, 1086, 1087, 1087-1092, 1092, 1093, 1093, 1094, 1094, 1095, 1095-1102, 1102, 1103, 1103, 1114, 1114, 1115, 1115-1119, 1119, 1120, 1120-1141, 1141, 1142, 1142-1145, 1145, 1146, 1146, 1147, 1147, 1148, 1148-1151, 1151, 1152, 1152-1154, 1154, 1155, 1155, 1156, 1156, 1157, 1157, 1158, 1158, 1159, 1159.

[0239] In one embodiment of the method, cell proliferative disorders are distinguished from healthy tissues by use of a set of oligomers comprising at least two oligonucleotides selected from one of the groups consisting of:

[0240] SEQ ID NOS:89-109, 113-293, 296-299, 14424-14453; and

[0241] SEQ ID NOS:681-683, 683, 684, 684, 685, 685, 686, 686, 687, 687, 688, 688-691, 691, 692, 692-695, 695, 696, 696-699, 699, 700, 700-709, 709, 710, 710-725, 725, 726, 726, 727, 727, 728, 728-760, 760, 761, 761, 762, 762, 763, 763-777, 784, 784, 785, 785, 786, 786, 787, 787-802, 802, 803, 803-814, 814, 815, 815-832, 832, 833, 833-836, 836, 837, 837-872, 872, 873, 873-876, 876, 877, 877, 878, 878, 879, 879-882, 882, 883, 883-892, 892, 893, 893-896, 896, 897, 897-909, 909, 910, 910, 911, 911, 912, 912-915, 915, 916, 916-921, 921-925, 925, 926, 926-939, 939, 940, 940, 941, 941, 942, 942-944, 944-957, 957, 958, 958, 959, 959, 960, 960, 961, 961, 962, 962-971, 971, 972, 972, 973, 973, 974, 974, 975, 975, 976, 976-979, 979, 980, 980, 981, 981-988, 988, 989, 989-994, 994, 995, 995-998, 998, 999, 999, 1000, 1000, 1001, 1001, 1002, 1002, 1003, 1003-1006, 1006, 1007, 1007-1016, 1016, 1017, 1017, 1018, 1018, 1019, 1019-1028, 1028, 1029, 1029-1034, 1034, 1035, 1035-1046, 1046, 1047, 1047-1058, 1058, 1059, 1059, 1060, 1060, 1061, 1061, 1062, 1062, 1063, 1063-1070, 1070, 1071, 1071, 1072, 1072, 1073, 1073, 1074, 1074, 1075, 1075-1078, 1078, 1079, 1079-1084, 1084, 1085, 1085, 1086, 1086, 1087, 1087-1092, 1092, 1093, 1093, 1094, 1094, 1095, 1095-1102, 1102, 1103, 1103-1114, 1114, 1115, 1115-1119, 1119, 1120, 1120-1141, 1141, 1142, 1142, 1145, 1145, 1146, 1146, 1147, 1147, 1148, 1148-1151, 1151, 1152, 1152.

[0242] In a further embodiment of the method aerodigestive cell proliferative disorders of the group consisting lung, liver, pancreas, bile duct, stomach, and colon cancers are detected. This is achieved by analysis of the methylation status of at least This is achieved by analysis of the methylation status of at least one target sequence comprising, or hybridizing under stringent conditions to at least 16 contiguous nucleotides of a sequence selected from the group consisting SEQ ID NO: 20, 41, 35, 3, 39, 33 and complements thereof. The present invention further provides a method for ascertaining genetic and/or epigenetic parameters of the genomic sequences according to SEQ ID NOS:1 to SEQ ID NO:64 within a subject by analyzing cytosine methylation and single nucleotide polymorphisms. Said method comprising contacting a nucleic acid comprising one or more of SEQ ID NOS:1 to SEQ ID NO:64 in a biological sample obtained from said subject with at least one reagent or a series of reagents, wherein said reagent or series of reagents, distinguishes between methylated and non-methylated CpG dinucleotides within the target nucleic acid.

[0243] Preferably, said method comprises the following steps: In the first step, a sample of the tissue to be analysed is obtained. The source may be any suitable source, such as cell lines, histological slides, biopsies, paraffin-embedded tissue, bodily fluids, stool, colonic effluent, urine, blood plasma, blood serum, whole blood, isolated blood cells, cells isolated from the blood and all possible combinations thereof. It is preferred that said sources of DNA are stool or bodily fluids selected from the group consisting colonic effluent, urine, blood plasma, blood serum, whole blood, isolated blood cells, cells isolated from the blood.

[0244] The genomic DNA is then isolated from the sample. Genomic DNA may be isolated by any means standard in the art, including the use of commercially available kits. Briefly, wherein the DNA of interest is encapsulated in by a cellular membrane the biological sample must be disrupted and lysed by enzymatic, chemical or mechanical means. The DNA solution may then be cleared of proteins and other contaminants e.g. by digestion with proteinase K. The genomic DNA is then recovered from the solution. This may be carried out by means of a variety of methods including salting out, organic extraction or binding of the DNA to a solid phase support. The choice of method will be affected by several factors including time, expense and required quantity of DNA.

[0245] Once the nucleic acids have been extracted, the genomic double stranded DNA is used in the analysis.

[0246] In the second step of the method, the genomic DNA sample is treated in such a manner that cytosine bases which are unmethylated at the 5′-position are converted to uracil, thymine, or another base which is dissimilar to cytosine in terms of hybridization behavior. This will be understood as ‘pretreatment’ or ‘treatment’ herein.

[0247] The above-described treatment of genomic DNA is preferably carried out with bisulfite (hydrogen sulfite, disulfite) and subsequent alkaline hydrolysis which results in a conversion of non-methylated cytosine nucleobases to uracil or to another base which is dissimilar to cytosine in terms of base pairing behavior.

[0248] In the third step of the method, fragments of the treated DNA are amplified, using sets of primer oligonucleotides according to the present invention, and an amplification enzyme. The amplification of several DNA segments can be carried out simultaneously in one and the same reaction vessel. Typically, the amplification is carried out using a polymerase chain reaction (PCR). The set of primer oligonucleotides includes at least two oligonucleotides whose sequences are each reverse complementary, identical, or hybridize under stringent or highly stringent conditions to an at least 16-base-pair long segment of the base sequences of one of SEQ ID NOS:304 to SEQ ID NO:535 and sequences complementary thereto.

[0249] In an alternate embodiment of the method, the methylation status of preselected CpG positions within the nucleic acid sequences comprising one or more of SEQ ID NOS:1 to SEQ ID NO:64 may be detected by use of methylation-specific primer oligonucleotides. This technique (MSP) has been described in U.S. Pat. No. 6,265,171 to Herman. The use of methylation status specific primers for the amplification of bisulfite treated DNA allows the differentiation between methylated and unmethylated nucleic acids. MSP primers pairs contain at least one primer which hybridizes to a bisulfite treated CpG dinucleotide. Therefore, the sequence of said primers comprises at least one CpG dinucleotide. MSP primers specific for non-methylated DNA contain a “T” at the position of the C position in the CpG. Preferably, therefore, the base sequence of said primers is required to comprise a sequence having a length of at least 9 nucleotides which hybridizes to a treated nucleic acid sequence according to one of SEQ ID NOS:304 to SEQ ID NO:535 and sequences complementary thereto, wherein the base sequence of said oligomers comprises at least one CpG dinucleotide.

[0250] In a further preferred embodiment of the method, the MSP primers are selected from the group consisting SEQ ID NOS:2754, 2757, 2759, 2767, 2768, 2772, 2776, 2779, 2784, 2785, 2786, 2789, 2791, 2792, 2794, 2797, 2798, 2801, 2805, 2806, 2809, 2811, 2815, 2817, 2824, 2830, 2832, 2833, 2834, 2838, 2840, 2843, 2846, 2850, 2851, 2853, 2855, 2859, 2866, 2867, 2870, 2871, 2876, 2878, 2881, 2885, 2886, 2892, 2893, 2895, 2896, 2898, 2904, 2912, 2915, 2917, 2919, 2922, 2923, 2929, 2931, 2939, 2941, 2944, 2946, 2948, 2950, 2955, 2956, 2957, 2960, 2962, 2965, 2966, 2967, 2968, 2969, 2971, 2975, 2976, 2977, 2978, 2979, 2980, 2981, 2984, 2988, 2989, 2990, 2992, 2994, 2997, 2999, 3001, 3002, 3004, 3006, 3007, 3008, 3010, 3013, 3014, 3016, 3017, 3018, 3020, 3022, 3025, 2752, 2755, 2760, 2762, 2763, 2764, 2765, 2769, 2771, 2773, 2775, 2777, 2780, 2781, 2782, 2783, 2787, 2788, 2790, 2793, 2795, 2796, 2800, 2802, 2803, 2804, 2808, 2810, 2812, 2814, 2816, 2818, 2820, 2821, 2823, 2825, 2827, 2828, 2829, 2831, 2835, 2836, 2837, 2839, 2841, 2842, 2844, 2845, 2847, 2849, 2852, 2854, 2856, 2858, 2860, 2861, 2862, 2863, 2864, 2865, 2868, 2869, 2872, 2873, 2874, 2875, 2877, 2879, 2880, 2882, 2883, 2884, 2887, 2888, 2889, 2890, 2891, 2894, 2897, 2899, 2901, 2902, 2903, 2905, 2907, 2909, 2911, 2914, 2916, 2918, 2920, 2924, 2926, 2927, 2928, 2930, 2932, 2933, 2934, 2935, 2936, 2937, 2938, 2942, 2945, 2947, 2949, 2951, 2953, 2954, 2958, 2959, 2961, 2963, 2970, 2972, 2973, 2974, 2982, 2985, 2987, 2991, 2993, 2995, 2996, 2998, 3000, 3003, 3005, 3011, 3019, 3021, 3023, 3026, 3027, 3028, 3032, 3033, 3036, 3037, 3038, 3039, 3041, 3042, 3043, 3044, 3047, 3048, 3049, 3052, 3055, 3059, 3061, 3064, 3065, 3068, 3069, 3071, 3072, 3075, 3076, 3080, 3083, 3084, 3085, 3086, 3091, 3093, 3096, 3097, 3100, 3104, 3109, 3110, 3113, 3115, 3117, 3118, 3123, 3126, 3127, 3130, 3134, 3135, 3136, 3138, 3139, 3144, 3146, 3147, 3149, 3150, 3155, 3029, 3031, 3034, 3040, 3045, 3050, 3051, 3053, 3054, 3056, 3057, 3060, 3063, 3066, 3073, 3078, 3081, 3088, 3089, 3090, 3092, 3094, 3098, 3101, 3103, 3105, 3107, 3108, 3111, 3114, 3116, 3119, 3121, 3122, 3124, 3128, 3131, 3133, 3137, 3140, 3142, 3145, 3148, 3151, 3152, 3153, 3157, 3159, 3165, 3166, 3167, 3170, 3171, 3172, 3174, 3175, 3176, 3179, 3180, 3181, 3184, 3185, 3186, 3192, 3194, 3198, 3201, 3202, 3203, 3204, 3206, 3209, 3212, 3213, 3215, 3216, 3217, 3218, 3221, 3224, 3226, 3228, 3229, 3230, 3232, 3233, 3234, 3235, 3237, 3238, 3239, 3245, 3247, 3248, 3249, 3160, 3162, 3163, 3164, 3168, 3169, 3173, 3178, 3182, 3183, 3187, 3189, 3190, 3195, 3196, 3197, 3199, 3205, 3207, 3210, 3214, 3219, 3222, 3223, 3225, 3227, 3236, 3240, 3242, 3243, 3244, 3246, 3250, 3252, 3256, 3261, 3264, 3268, 3269, 3270, 3273, 3275, 3279, 3280, 3281, 3282, 3283, 3284, 3285, 3286, 3290, 3292, 3295, 3297, 3301, 3304, 3305, 3306, 3307, 3308, 3310, 3311, 3312, 3315, 3319, 3320, 3324, 3327, 3331, 3333, 3334, 3339, 3348, 3351, 3354, 3358, 3360, 3364, 3367, 3368, 3374, 3376, 3253, 3255, 3257, 3259, 3260, 3262, 3265, 3266, 3267, 3271, 3274, 3276, 3278, 3287, 3289, 3291, 3293, 3298, 3300, 3302, 3309, 3313, 3314, 3316, 3318, 3321, 3322, 3325, 3328, 3330, 3332, 3335, 3337, 3338, 3340, 3342, 3343, 3344, 3345, 3346, 3347, 3349, 3350, 3352, 3353, 3355, 3356, 3357, 3359, 3361, 3363, 3365, 3369, 3371, 3372, 3373, 3377, 3380, 3383, 3386, 3388, 3389, 3390, 3391, 3392, 3395, 3396, 3400, 3401, 3403, 3406, 3408, 3413, 3414, 3417, 3420, 3423, 3428, 3432, 3433, 3434, 3436, 3439, 3440, 3442, 3443, 3445, 3447, 3453, 3455, 3458, 3463, 3466, 3469, 3470, 3471, 3472, 3473, 3474, 3475, 3477, 3478, 3480, 3481, 3483, 3484, 3487, 3490, 3494, 3495, 3496, 3497, 3499, 3500, 3504, 3505, 3508, 3512, 3514, 3515, 3516, 3521, 3525, 3529, 3533, 3534, 3537, 3538, 3540, 3541, 3542, 3543, 3544, 3547, 3548, 3553, 3557, 3558, 3559, 3560, 3562, 3563, 3566, 3571, 3574, 3575, 3577, 3580, 3583, 3584, 3585, 3586, 3592, 3594, 3595, 3597, 3598, 3599, 3601, 3603, 3604, 3607, 3608, 3612, 3619, 3621, 3622, 3626, 3631, 3632, 3637, 3638, 3639, 3640, 3642, 3643, 3644, 3646, 3647, 3649, 3650, 3652, 3656, 3657, 3660, 3663, 3668, 3670, 3673, 3676, 3677, 3678, 3683, 3688, 3690, 3694, 3697, 3700, 3702, 3703, 3704, 3708, 3404, 3409, 3411, 3415, 3418, 3419, 3421, 3424, 3426, 3427, 3429, 3431, 3435, 3437, 3438, 3441, 3444, 3446, 3448, 3450, 3452, 3454, 3456, 3459, 3461, 3462, 3464, 3467, 3476, 3479, 3482, 3485, 3488, 3489, 3491, 3492, 3493, 3501, 3503, 3506, 3509, 3510, 3511, 3513, 3517, 3518, 3519, 3520, 3522, 3524, 3526, 3527, 3528, 3530, 3531, 3535, 3536, 3545, 3549, 3551, 3552, 3554, 3555, 3556, 3561, 3564, 3565, 3568, 3569, 3570, 3573, 3576, 3578, 3581, 3587, 3588, 3589, 3590, 3591, 3593, 3596, 3600, 3602, 3605, 3606, 3609, 3611, 3613, 3614, 3615, 3616, 3617, 3618, 3623, 3624, 3625, 3627, 3629, 3630, 3633, 3634, 3635, 3636, 3641, 3645, 3651, 3653, 3654, 3655, 3658, 3661, 3662, 3665, 3666, 3667, 3669, 3671, 3674, 3679, 3681, 3684, 3686, 3689, 3691, 3692, 3693, 3695, 3696, 3698, 3701, 3705, 3706, 3707, 3709, 3710, 3714, 3715, 3717, 3718, 3722, 3723, 3729, 3730, 3732, 3735, 3739, 3740, 3741, 3743, 3744, 3745, 3746, 3749, 3753, 3754, 3755, 3756, 3711, 3713, 3719, 3721, 3724, 3725, 3726, 3727, 3728, 3731, 3733, 3736, 3737, 3738, 3742, 3747, 3748, 3750, 3752, 3757, 3758, 3759, 3760, 3761, 3764, 3767, 3771, 3773, 3775, 3776, 3777, 3781, 3785, 3786, 3787, 3790, 3791, 3793, 3796, 3797, 3798, 3799, 3805, 3809, 3814, 3817, 3818, 3822, 3823, 3828, 3833, 3836, 3844, 3847, 3850, 3851, 3853, 3856, 3857, 3862, 3873, 3876, 3877, 3880, 3885, 3887, 3889, 3890, 3892, 3893, 3895, 3896, 3899, 3902, 3903, 3905, 3906, 3907, 3908, 3916, 3923, 3926, 3927, 3930, 3935, 3936, 3938, 3939, 3940, 3944, 3945, 3949, 3950, 3951, 3954, 3955, 3957, 3960, 3965, 3970, 3971, 3978, 3979, 3982, 3983, 3984, 3985, 3762, 3765, 3768, 3770, 3772, 3774, 3778, 3779, 3780, 3782, 3784, 3788, 3792, 3794, 3800, 3801, 3802, 3803, 3804, 3806, 3807, 3808, 3810, 3812, 3813, 3815, 3819, 3820, 3821, 3824, 3826, 3827, 3829, 3831, 3832, 3834, 3837, 3838, 3839, 3840, 3842, 3845, 3848, 3852, 3854, 3858, 3860, 3861, 3863, 3864, 3865, 3866, 3867, 3868, 3869, 3870, 3871, 3872, 3874, 3875, 3878, 3881, 3883, 3884, 3886, 3888, 3891, 3894, 3897, 3898, 3900, 3901, 3904, 3909, 3911, 3914, 3915, 3917, 3919, 3920, 3921, 3922, 3924, 3928, 3931, 3933, 3934, 3937, 3941, 3942, 3943, 3947, 3948, 3952, 3958, 3959, 3961, 3962, 3963, 3964, 3966, 3968, 3972, 3974, 3975, 3976, 3980, 3981, 3986, 3987, 3990, 3993, 3994, 3997, 4000, 4003, 4004, 4006, 4012, 4015, 4017, 4020, 4024, 4027, 4029, 4031, 4032, 4033, 4037, 4038, 4040, 4042, 4047, 4048, 4050, 4051, 4052, 4054, 4055, 4058, 4063, 4066, 4069, 4070, 4072, 4073, 4076, 4078, 4079, 4082, 4083, 4084, 4085, 4086, 4090, 4093, 4094, 4095, 4096, 4099, 4100, 4104, 4106, 4113, 4116, 4119, 4120, 4124, 4127, 4130, 4134, 4135, 4136, 4138, 4142, 4145, 4146, 4149, 4150, 4152, 4153, 4159, 4160, 4161, 4163, 4168, 4169, 4171, 4173, 4176, 4180, 4181, 4185, 4189, 4191, 4192, 4194, 4197, 4198, 4199, 4201, 4206, 4207, 4208, 4213, 4219, 4220, 4223, 4224, 4225, 4228, 4231, 4232, 4233, 4237, 4238, 4242, 4243, 4246, 4247, 4251, 4254, 4255, 4256, 4258, 3988, 3991, 3995, 3998, 4001, 4005, 4007, 4009, 4010, 4011, 4013, 4016, 4018, 4019, 4021, 4022, 4023, 4025, 4028, 4034, 4035, 4039, 4043, 4045, 4046, 4049, 4056, 4059, 4061, 4064, 4065, 4067, 4068, 4071, 4074, 4075, 4077, 4080, 4087, 4088, 4089, 4092, 4098, 4101, 4102, 4105, 4108, 4109, 4110, 4111, 4112, 4114, 4115, 4117, 4121, 4122, 4123, 4125, 4128, 4129, 4131, 4132, 4133, 4137, 4139, 4141, 4144, 4148, 4151, 4154, 4156, 4157, 4162, 4165, 4166, 4167, 4170, 4172, 4174, 4177, 4179, 4182, 4184, 4186, 4188, 4190, 4195, 4196, 4202, 4204, 4205, 4209, 4211, 4214, 4216, 4217, 4218, 4221, 4226, 4229, 4234, 4236, 4239, 4241, 4244, 4245, 4248, 4249, 4252, 4257, 4259, 4260, 4261, 4262, 4266, 4267, 4268, 4271, 4272, 4275, 4276, 4279, 4281, 4282, 4284, 4285, 4287, 4289, 4290, 4292, 4295, 4297, 4299, 4301, 4306, 4310, 4316, 4317, 4318, 4321, 4323, 4325, 4328, 4334, 4335, 4337, 4341, 4342, 4343, 4344, 4348, 4350, 4351, 4352, 4354, 4357, 4358, 4359, 4364, 4365, 4366, 4370, 4371, 4372, 4373, 4376, 4378, 4381, 4383, 4384, 4386, 4388, 4396, 4397, 4399, 4400, 4403, 4405, 4407, 4409, 4412, 4415, 4416, 4417, 4424, 4426, 4429, 4433, 4435, 4437, 4442, 4443, 4447, 4450, 4451, 4452, 4455, 4457, 4460, 4461, 4462, 4465, 4466, 4469, 4470, 4474, 4478, 4481, 4484, 4488, 4491, 4494, 4495, 4497, 4498, 4504, 4506, 4509, 4510, 4511, 4514, 4516, 4518, 4520, 4521, 4523, 4525, 4528, 4530, 4533, 4534, 4535, 4538, 4540, 4542, 4545, 4547, 4548, 4553, 4554, 4555, 4556, 4557, 4562, 4564, 4567, 4568, 4569, 4579, 4580, 4582, 4584, 4587, 4589, 4593, 4596, 4597, 4598, 4600, 4601, 4602, 4605, 4606, 4607, 4609, 4610, 4613, 4614, 4616, 4618, 4621, 4624, 4626, 4627, 4628, 4631, 4632, 4636, 4639, 4641, 4644, 4645, 4648, 4263, 4265, 4269, 4270, 4273, 4274, 4277, 4280, 4283, 4286, 4288, 4291, 4293, 4296, 4298, 4300, 4302, 4303, 4304, 4305, 4307, 4308, 4309, 4311, 4313, 4315, 4319, 4322, 4324, 4326, 4327, 4330, 4331, 4332, 4333, 4336, 4338, 4340, 4345, 4347, 4349, 4353, 4355, 4360, 4361, 4362, 4367, 4368, 4369, 4374, 4375, 4377, 4379, 4382, 4385, 4387, 4389, 4390, 4391, 4392, 4393, 4394, 4395, 4398, 4401, 4406, 4408, 4410, 4411, 4413, 4418, 4420, 4422, 4423, 4425, 4427, 4428, 4430, 4432, 4434, 4436, 4438, 4440, 4441, 4444, 4446, 4448, 4453, 4454, 4456, 4458, 4463, 4464, 4467, 4471, 4472, 4473, 4475, 4476, 4477, 4479, 4480, 4482, 4485, 4486, 4487, 4489, 4490, 4492, 4496, 4499, 4501, 4502, 4503, 4505, 4507, 4508, 4512, 4515, 4517, 4519, 4522, 4524, 4529, 4531, 4536, 4537, 4539, 4541, 4543, 4546, 4549, 4551, 4558, 4559, 4560, 4561, 4563, 4565, 4570, 4571, 4572, 4573, 4574, 4575, 4576, 4578, 4581, 4583, 4585, 4586, 4588, 4590, 4592, 4595, 4599, 4603, 4611, 4612, 4615, 4617, 4619, 4620, 4622, 4630, 4633, 4634, 4635, 4638, 4640, 4642, 4643, 4646, 4647, 4649, 4652, 4655, 4659, 4661, 4663, 4664, 4665, 4668, 4671, 4674, 4675, 4676, 4678, 4680, 4683, 4686, 4690, 4696, 4700, 4703, 4704, 4706, 4709, 4711, 4714, 4715, 4717, 4718, 4719, 4720, 4721, 4726, 4727, 4730, 4732, 4738, 4742, 4745, 4749, 4750, 4753, 4755, 4759, 4763, 4768, 4769, 4772, 4773, 4776, 4778, 4779, 4782, 4784, 4789, 4790, 4794, 4797, 4801, 4805, 4807, 4813, 4814, 4819, 4821, 4822, 4827, 4829, 4833, 4834, 4835, 4837, 4838, 4841, 4842, 4843, 4844, 4847, 4849, 4850, 4852, 4853, 4859, 4860, 4861, 4865, 4867, 4868, 4869, 4870, 4873, 4876, 4877, 4878, 4879, 4883, 4885, 4889, 4891, 4892, 4894, 4895, 4897, 4898, 4903, 4906, 4911, 4912, 4918, 4919, 4920, 4924, 4927, 4929, 4932, 4934, 4941, 4942, 4945, 4948, 4949, 4950, 4650, 4653, 4656, 4658, 4660, 4662, 4666, 4667, 4669, 4670, 4672, 4677, 4681, 4684, 4685, 4687, 4688, 4689, 4691, 4693, 4694, 4695, 4697, 4699, 4701, 4702, 4705, 4707, 4708, 4716, 4722, 4724, 4728, 4731, 4733, 4735, 4736, 4737, 4739, 4741, 4744, 4746, 4748, 4751, 4754, 4756, 4758, 4760, 4761, 4764, 4766, 4767, 4770, 4771, 4774, 4777, 4780, 4783, 4785, 4786, 4787, 4788, 4791, 4792, 4793, 4795, 4798, 4800, 4802, 4804, 4806, 4808, 4810, 4811, 4812, 4815, 4816, 4817, 4818, 4820, 4823, 4824, 4825, 4828, 4830, 4832, 4836, 4839, 4840, 4845, 4846, 4848, 4851, 4854, 4855, 4856, 4857, 4858, 4862, 4864, 4871, 4872, 4874, 4875, 4881, 4882, 4884, 4886, 4887, 4890, 4893, 4896, 4899, 4900, 4901, 4902, 4904, 4905, 4907, 4908, 4909, 4910, 4913, 4915, 4917, 4921, 4922, 4923, 4925, 4926, 4928, 4930, 4935, 4936, 4937, 4938, 4940, 4943, 4944, 4946, 4947, 4951, 4952, 4953, 4954, 4956, 4957, 4960, 4963, 4967, 4970, 4971, 4972, 4976, 4977, 4985, 4986, 4987, 4989, 4991, 4992, 4997, 4999, 5002, 5003, 5004, 5006, 5010, 5013, 5014, 5015, 5017, 5018, 5019, 5020, 5021, 5024, 5025, 5027, 5031, 5032, 5033, 5037, 5040, 5041, 5042, 5043, 4958, 4961, 4964, 4966, 4968, 4969, 4973, 4974, 4975, 4978, 4979, 4980, 4981, 4982, 4983, 4984, 4988, 4990, 4993, 4995, 4996, 4998, 5000, 5005, 5007, 5009, 5011, 5016, 5022, 5026, 5028, 5030, 5034, 5036, 5038, 5039, 5044, 5047, 5049, 5050, 5052, 5054, 5055, 5057, 5060, 5061, 5064, 5045, 5048, 5051, 5053, 5056, 5058, 5062, 5065, 5066, 5069, 5073, 5077, 5080, 5083, 5087, 5093, 5096, 5099, 5100, 5103, 5104, 5106, 5111, 5116, 5119, 5120, 5125, 5128, 5132, 5134, 5135, 5137, 5139, 5140, 5142, 5144, 5148, 5149, 5150, 5155, 5157, 5158, 5160, 5166, 5168, 5170, 5171, 5173, 5176, 5177, 5179, 5184, 5187, 5188, 5190, 5193, 5195, 5198, 5201, 5204, 5208, 5211, 5215, 5216, 5217, 5220, 5221, 5222, 5224, 5226, 5229, 5230, 5231, 5232, 5234, 5237, 5242, 5244, 5245, 5246, 5247, 5249, 5250, 5252, 5254, 5255, 5256, 5261, 5262, 5264, 5265, 5273, 5274, 5276, 5278, 5279, 5281, 5284, 5285, 5286, 5287, 5288, 5289, 5292, 5296, 5300, 5303, 5304, 5307, 5308, 5309, 5313, 5315, 5317, 5318, 5322, 5323, 5326, 5329, 5330, 5333, 5336, 5337, 5341, 5343, 5348, 5349, 5352, 5354, 5355, 5358, 5359, 5361, 5362, 5363, 5364, 5365, 5367, 5369, 5370, 5372, 5375, 5377, 5379, 5382, 5385, 5387, 5393, 5394, 5395, 5398, 5400, 5404, 5407, 5408, 5409, 5412, 5413, 5414, 5416, 5418, 5421, 5424, 5426, 5428, 5431, 5432, 5433, 5434, 5435, 5437, 5440, 5441, 5443, 5448, 5450, 5451, 5454, 5455, 5458, 5460, 5461, 5464, 5468, 5470, 5471, 5474, 5475, 5477, 5482, 5484, 5485, 5487, 5490, 5491, 5492, 5494, 5496, 5498, 5499, 5500, 5501, 5502, 5503, 5504, 5506, 5509, 5510, 5512, 5516, 5517, 5518, 5524, 5525, 5526, 5528, 5531, 5533, 5534, 5535, 5536, 5537, 5540, 5542, 5544, 5545, 5546, 5549, 5550, 5552, 5553, 5559, 5561, 5566, 5569, 5572, 5573, 5575, 5577, 5578, 5579, 5580, 5581, 5582, 5588, 5593, 5595, 5596, 5598, 5600, 5601, 5603, 5604, 5605, 5608, 5614, 5615, 5616, 5619, 5622, 5624, 5625, 5628, 5629, 5633, 5634, 5637, 5638, 5639, 5643, 5644, 5645, 5647, 5648, 5649, 5650, 5654, 5662, 5664, 5067, 5070, 5072, 5074, 5075, 5076, 5078, 5081, 5084, 5086, 5088, 5090, 5091, 5094, 5097, 5101, 5105, 5107, 5109, 5110, 5112, 5114, 5115, 5117, 5121, 5123, 5124, 5126, 5129, 5131, 5136, 5143, 5145, 5147, 5151, 5153, 5156, 5159, 5161, 5162, 5163, 5164, 5165, 5167, 5169, 5172, 5174, 5175, 5180, 5181, 5182, 5183, 5185, 5186, 5189, 5191, 5194, 5196, 5199, 5200, 5202, 5203, 5205, 5207, 5209, 5210, 5212, 5214, 5218, 5219, 5223, 5225, 5227, 5233, 5235, 5238, 5239, 5240, 5241, 5248, 5251, 5253, 5257, 5259, 5260, 5263, 5266, 5268, 5269, 5270, 5271, 5272, 5280, 5282, 5290, 5291, 5293, 5295, 5297, 5299, 5301, 5306, 5310, 5311, 5312, 5314, 5316, 5319, 5321, 5324, 5327, 5331, 5332, 5334, 5338, 5339, 5340, 5342, 5344, 5346, 5347, 5351, 5353, 5356, 5360, 5366, 5368, 5371, 5373, 5376, 5378, 5380, 5383, 5388, 5389, 5391, 5392, 5396, 5399, 5401, 5403, 5405, 5410, 5415, 5417, 5419, 5420, 5422, 5425, 5427, 5429, 5436, 5438, 5442, 5444, 5445, 5446, 5447, 5449, 5452, 5456, 5457, 5459, 5462, 5465, 5466, 5467, 5469, 5472, 5478, 5480, 5481, 5486, 5488, 5493, 5495, 5497, 5505, 5507, 5508, 5511, 5513, 5515, 5519, 5521, 5522, 5527, 5529, 5532, 5538, 5539, 5541, 5543, 5548, 5551, 5554, 5555, 5556, 5557, 5558, 5560, 5562, 5563, 5564, 5565, 5567, 5568, 5570, 5571, 5574, 5576, 5583, 5585, 5586, 5587, 5589, 5591, 5592, 5594, 5597, 5599, 5602, 5606, 5609, 5611, 5612, 5618, 5620, 5623, 5626, 5627, 5630, 5632, 5635, 5640, 5642, 5646, 5651, 5652, 5656, 5657, 5659, 5660, 5661, 5663, 5665, 5667, 5670, 5672, 5673, 5676, 5678, 5679, 5681, 5682, 5683, 5686, 5687, 5688, 5690, 5694, 5697, 5698, 5699, 5700, 5701, 5704, 5708, 5709, 5711, 5713, 5714, 5717, 5721, 5723, 5724, 5727, 5728, 5733, 5734, 5735, 5736, 5739, 5740, 5741, 5742, 5743, 5668, 5671, 5674, 5677, 5680, 5684, 5689, 5691, 5693, 5696, 5702, 5705, 5707, 5710, 5712, 5715, 5718, 5720, 5722, 5725, 5729, 5730, 5731, 5732, 5737, 5744, 5747, 5750, 5753, 5759, 5762, 5763, 5770, 5775, 5777, 5778, 5780, 5782, 5785, 5787, 5791, 5792, 5793, 5794, 5797, 5801, 5803, 5808, 5810, 5812, 5814, 5816, 5817, 5824, 5832, 5833, 5834, 5835, 5838, 5840, 5841, 5844, 5849, 5853, 5854, 5857, 5859, 5860, 5862, 5863, 5865, 5868, 5874, 5882, 5883, 5885, 5887, 5894, 5895, 5896, 5897, 5902, 5904, 5906, 5909, 5912, 5915, 5918, 5919, 5920, 5922, 5923, 5926, 5927, 5928, 5930, 5932, 5933, 5934, 5935, 5939, 5940, 5946, 5947, 5948, 5949, 5952, 5954, 5955, 5956, 5958, 5959, 5961, 5962, 5964, 5965, 5968, 5970, 5971, 5972, 5973, 5977, 5978, 5980, 5983, 5986, 5987, 5992, 5993, 5996, 5997, 6000, 6002, 6003, 6004, 6005, 6006, 6008, 6009, 6010, 6011, 6012, 6013, 6017, 6018, 6019, 6020, 6025, 6027, 6030, 6033, 6035, 6036, 6039, 6041, 6042, 6045, 6049, 6050, 6051, 6055, 6059, 6063, 6064, 6065, 6067, 6070, 6072, 6073, 6075, 6077, 6078, 6081, 5745, 5748, 5751, 5754, 5756, 5758, 5760, 5764, 5766, 5767, 5768, 5769, 5771, 5773, 5774, 5776, 5779, 5781, 5783, 5786, 5788, 5789, 5790, 5795, 5796, 5798, 5800, 5802, 5804, 5806, 5807, 5809, 5811, 5813, 5818, 5820, 5821, 5822, 5823, 5825, 5826, 5827, 5828, 5830, 5831, 5836, 5837, 5839, 5842, 5843, 5845, 5846, 5847, 5848, 5850, 5852, 5855, 5856, 5858, 5861, 5864, 5866, 5867, 5870, 5871, 5872, 5873, 5875, 5876, 5877, 5878, 5879, 5880, 5881, 5884, 5886, 5888, 5889, 5890, 5891, 5892, 5893, 5898, 5899, 5900, 5903, 5905, 5907, 5910, 5913, 5916, 5921, 5924, 5929, 5931, 5936, 5937, 5938, 5942, 5943, 5944, 5945, 5950, 5953, 5957, 5960, 5963, 5966, 5969, 5975, 5976, 5981, 5984, 5988, 5990, 5991, 5994, 5998, 5999, 6001, 6007, 6014, 6015, 6016, 6021, 6023, 6024, 6026, 6028, 6031, 6032, 6034, 6037, 6038, 6040, 6043, 6046, 6048, 6053, 6054, 6056, 6058, 6060, 6062, 6066, 6068, 6074, 6076, 6079, 6083, 6084, 6085, 6089, 6090, 6093, 6096, 6098, 6100, 6106, 6110, 6111, 6114, 6118, 6121, 6127, 6130, 6133, 6135, 6137, 6138, 6141, 6143, 6145, 6148, 6150, 6151, 6152, 6153, 6154, 6156, 6159, 6160, 6162, 6163, 6166, 6167, 6168, 6169, 6170, 6171, 6172, 6175, 6177, 6180, 6183, 6187, 6188, 6190, 6193, 6194, 6195, 6196, 6198, 6201, 6202, 6204, 6207, 6211, 6212, 6214, 6215, 6216, 6218, 6219, 6220, 6222, 6225, 6226, 6230, 6235, 6239, 6241, 6242, 6243, 6244, 6245, 6247, 6250, 6252, 6254, 6259, 6260, 6261, 6264, 6265, 6268, 6270, 6273, 6275, 6278, 6280, 6282, 6286, 6287, 6288, 6291, 6293, 6298, 6299, 6300, 6302, 6303, 6305, 6307, 6308, 6312, 6313, 6314, 6315, 6316, 6317, 6318, 6320, 6321, 6323, 6325, 6327, 6328, 6334, 6335, 6337, 6340, 6341, 6344, 6348, 6350, 6353, 6354, 6357, 6360, 6362, 6364, 6368, 6372, 6374, 6377, 6378, 6383, 6386, 6392, 6394, 6398, 6400, 6404, 6405, 6409, 6410, 6411, 6417, 6418, 6424, 6426, 6429, 6431, 6432, 6433, 6435, 6436, 6437, 6438, 6440, 6442, 6445, 6446, 6448, 6449, 6452, 6455, 6457, 6458, 6461, 6462, 6463, 6464, 6465, 6470, 6473, 6475, 6478, 6480, 6481, 6484, 6485, 6486, 6489, 6491, 6492, 6494, 6498, 6502, 6504, 6505, 6507, 6511, 6513, 6514, 6086, 6088, 6091, 6094, 6097, 6099, 6101, 6103, 6105, 6108, 6112, 6115, 6116, 6117, 6119, 6120, 6122, 6123, 6125, 6126, 6128, 6131, 6132, 6134, 6136, 6139, 6142, 6144, 6146, 6149, 6155, 6157, 6161, 6164, 6173, 6174, 6176, 6178, 6181, 6182, 6184, 6186, 6189, 6191, 6192, 6197, 6199, 6200, 6205, 6206, 6208, 6210, 6213, 6221, 6223, 6224, 6227, 6229, 6231, 6232, 6233, 6234, 6236, 6237, 6238, 6240, 6246, 6248, 6251, 6253, 6255, 6256, 6257, 6258, 6262, 6266, 6269, 6271, 6272, 6274, 6276, 6277, 6281, 6283, 6284, 6285, 6289, 6292, 6294, 6295, 6296, 6297, 6301, 6304, 6306, 6309, 6310, 6311, 6319, 6322, 6324, 6326, 6329, 6330, 6331, 6333, 6336, 6338, 6342, 6345, 6347, 6349, 6351, 635.5, 6356, 6358, 6359, 6361, 6365, 6367, 6369, 6371, 6373, 6375, 6376, 6379, 6381, 6382, 6384, 6387, 6388, 6389, 6390, 6393, 6395, 6397, 6399, 6401, 6402, 6403, 6406, 6407, 6412, 6413, 6414, 6415, 6416, 6419, 6420, 6421, 6422, 6423, 6425, 6427, 6428, 6434, 6441, 6443, 6444, 6447, 6450, 6451, 6453, 6459, 6460, 6466, 6467, 6468, 6469, 6471, 6472, 6474, 6476, 6479, 6482, 6487, 6490, 6493, 6496, 6497, 6499, 6500, 6501, 6503, 6506, 6508, 6510, 6512, 6515, 6518, 6521, 6522, 6523, 6524, 6528, 6532, 6535, 6539, 6549, 6560, 6561, 6564, 6566, 6567, 6570, 6573, 6576, 6577, 6578, 6579, 6583, 6584, 6585, 6586, 6587, 6590, 6591, 6594, 6596, 6597, 6603, 6605, 6608, 6609, 6610, 6611, 6612, 6615, 6625, 6630, 6632, 6633, 6634, 6638, 6639, 6642, 6643, 6644, 6647, 6650, 6655, 6657, 6658, 6659, 6661, 6663, 6664, 6665, 6669, 6671, 6674, 6677, 6678, 6679, 6680, 6681, 6682, 6686, 6687, 6688, 6689, 6690, 6691, 6693, 6695, 6696, 6697, 6699, 6701, 6703, 6704, 6705, 6706, 6707, 6708, 6710, 6711, 6712, 6713, 6717, 6718, 6720, 6721, 6722, 6725, 6727, 6732, 6734, 6735, 6739, 6741, 6745, 6748, 6751, 6755, 6759, 6762, 6764, 6767, 6770, 6772, 6773, 6774, 6777, 6778, 6782, 6785, 6786, 6787, 6790, 6791, 6794, 6795, 6796, 6798, 6800, 6802, 6803, 6806, 6811, 6814, 6815, 6818, 6824, 6829, 6834, 6835, 6842, 6516, 6519, 6525, 6526, 6527, 6529, 6531, 6533, 6536, 6537, 6538, 6540, 6541, 6542, 6543, 6544, 6545, 6546, 6547, 6548, 6550, 6551, 6552, 6553, 6554, 6556, 6558, 6562, 6563, 6565, 6568, 6571, 6572, 6575, 6580, 6582, 6588, 6589, 6592, 6595, 6598, 6599, 6600, 6601, 6602, 6604, 6606, 6607, 6613, 6614, 6617, 6618, 6619, 6620, 6621, 6623, 6624, 6627, 6628, 6629, 6631, 6635, 6640, 6641, 6645, 6646, 6649, 6651, 6652, 6653, 6656, 6660, 6662, 6666, 6668, 6670, 6672, 6675, 6676, 6683, 6685, 6692, 6694, 6698, 6700, 6702, 6709, 6714, 6715, 6716, 6719, 6723, 6726, 6728, 6730, 6731, 6736, 6738, 6740, 6742, 6744, 6746, 6747, 6749, 6752, 6754, 6756, 6757, 6758, 6760, 6761, 6765, 6769, 6775, 6779, 6781, 6783, 6784, 6789, 6792, 6797, 6799, 6801, 6804, 6805, 6807, 6809, 6810, 6812, 6816, 6817, 6819, 6821, 6822, 6825, 6827, 6828, 6830, 6831, 6832, 6833, 6836, 6837, 6838, 6839, 6840, 6841, 6843,

[0251] Detection: SEQ ID NOS:6517, 6520, 6530, 6534, 6555, 6557, 6559, 6569, 6574, 6581, 6593, 6616, 6622, 6626, 6636, 6637, 6648, 6654, 6667, 6673, 6684, 6724, 6729, 6733, 6737, 6743, 6750, 6753, 6763, 6766, 6768, 6771, 6776, 6780, 6788, 6793, 6808, 6813, 6820, 6823, 6826, 6844, 6848, 6850, 6852, 6854, 6857, 6859, 6861, 6862, 6865, 6868, 6870, 6871, 6872, 6874, 6875, 6876, 6880, 6883, 6886, 6887, 6888, 6890, 6891, 6894, 6896, 6897, 6898, 6899, 6900, 6901, 6902, 6904, 6905, 6906, 6910, 6912, 6917, 6920, 6845, 6847, 6849, 6851, 6853, 6855, 6858, 6860, 6863, 6866, 6869, 6873, 6877, 6879, 6881, 6882, 6884, 6889, 6892, 6893, 6895, 6907, 6908, 6909, 6911, 6913, 6915, 6916, 6918, 6921, 6924, 6927, 6928, 6933, 6935, 6937, 6939, 6940, 6943, 6946, 6947, 6948, 6949, 6951, 6953, 6954, 6955, 6959, 6961, 6964, 6965, 6968, 6969, 6972, 6973, 6976, 6979, 6980, 6922, 6925, 6929, 6930, 6931, 6932, 6934, 6936, 6942, 6944, 6945, 6950, 6952, 6956, 6957, 6958, 6960, 6962, 6963, 6966, 6967, 6970, 6971, 6974, 6975, 6977, 6981, 6983, 6986, 6992, 6995, 6998, 7002, 7006, 7013, 7017, 7022, 7024, 7027, 7030, 7032, 7036, 7037, 7040, 7050, 7052, 7055, 7056, 7058, 7059, 7060, 7064, 7067, 7072, 7074, 7076, 7077, 7084, 7085, 7086, 7087, 7088, 7089, 7090, 7091, 7096, 7097, 7100, 7102, 7109, 7110, 7113, 7114, 7115, 7118, 7121, 7123, 7124, 7131, 7133, 7135, 7136, 7138, 7139, 7140, 7144, 7146, 7148, 7149, 7158, 7159, 7160, 7163, 7165, 7166, 7168, 7172, 7175, 7178, 7180, 7181, 7183, 7185, 7186, 7187, 7192, 7194, 7199, 7202, 7203, 7204, 7205, 7207, 7208, 7213, 7214, 7216, 7220, 7221, 7227, 7228, 7230, 7233, 7235, 7237, 7239, 7243, 7245, 7246, 7248, 7249, 7251, 7255, 7256, 7260, 7263, 7264, 7265, 7266, 7268, 7269, 7272, 7276, 7277, 7278, 7279, 7280, 7281, 7283, 7284, 7287, 7291, 7295, 7299, 7302, 7303, 7306, 7309, 7310, 7311, 7314, 7315, 7320, 7321, 7324, 7325, 7329, 7331, 7332, 7334, 7336, 7339, 7340, 7341, 7344, 7350, 7353, 7355, 7358, 7360, 7362, 7372, 7374, 7375, 7378, 7381, 7385, 7387, 7390, 7391, 7392, 7394, 7397, 7401, 7402, 7405, 7410, 7413, 7415, 7416, 7417, 7420, 6984, 6987, 6989, 6990, 6991, 6993, 6996, 6999, 7001, 7003, 7005, 7007, 7009, 7010, 7011, 7012, 7014, 7016, 7018, 7020, 7023, 7025, 7026, 7028, 7029, 7031, 7033, 7034, 7035, 7038, 7039, 7041, 7042, 7043, 7044, 7045, 7046, 7047, 7048, 7049, 7051, 7053, 7054, 7057, 7061, 7062, 7063, 7065, 7066, 7068, 7070, 7071, 7073, 7075, 7078, 7080, 7081, 7082, 7083, 7092, 7093, 7094, 7095, 7098, 7101, 7103, 7105, 7106, 7107, 7108, 7111, 7112, 7116, 7119, 7122, 7125, 7126, 7127, 7128, 7129, 7130, 7132, 7134, 7137, 7141, 7142, 7143, 7147, 7150, 7152, 7154, 7155, 7156, 7157, 7161, 7167, 7170, 7171, 7173, 7174, 7176, 7177, 7179, 7182, 7184, 7188, 7189, 7190, 7191, 7193, 7195, 7196, 7197, 7198, 7200, 7206, 7210, 7211, 7212, 7215, 7217, 7218, 7219, 7222, 7223, 7224, 7225, 7226, 7229, 7231, 7232, 7236, 7240, 7241, 7242, 7244, 7247, 7250, 7253, 7254, 7257, 7258, 7259, 7261, 7262, 7267, 7270, 7271, 7273, 7274, 7275, 7282, 7285, 7289, 7290, 7292, 7293, 7294, 7296, 7297, 7298, 7301, 7304, 7307, 7308, 7312, 7316, 7317, 7318, 7319, 7322, 7326, 7328, 7330, 7333, 7335, 7337, 7342, 7345, 7347, 7348, 7349, 7351, 7354, 7356, 7357, 7359, 7361, 7363, 7364, 7365, 7366, 7367, 7368, 7369, 7370, 7371, 7373, 7376, 7379, 7382, 7383, 7384, 7386, 7388, 7389, 7393, 7395, 7398, 7400, 7403, 7404, 7407, 7408, 7409, 7411, 7419, 7421, 7422, 7425, 7427, 7435, 7438, 7439, 7440, 7442, 7444, 7448, 7449, 7456, 7459, 7462, 7463, 7465, 7466, 7467, 7470, 7471, 7474, 7476, 7477, 7480, 7481, 7485, 7486, 7489, 7490, 7493, 7496, 7500, 7503, 7508, 7512, 7518, 7519, 7520, 7522, 7524, 7525, 7527, 7528, 7529, 7532, 7540, 7542, 7543, 7545, 7549, 7552, 7554, 7423, 7426, 7428, 7430, 7431, 7432, 7433, 7434, 7436, 7445, 7446, 7447, 7450, 7451, 7452, 7453, 7454, 7455, 7457, 7460, 7464, 7468, 7472, 7475, 7478, 7479, 7482, 7483, 7484, 7487, 7488, 7492, 7494, 7495, 7497, 7498, 7499, 7501, 7505, 7506, 7507, 7509, 7510, 7511, 7513, 7515, 7516, 7517, 7521, 7523, 7526, 7530, 7533, 7534, 7535, 7536, 7537, 7538, 7539, 7541, 7544, 7546, 7547, 7548, 7550, 7555, 7558, 7559, 7560, 7565, 7566, 7567, 7570, 7571, 7573, 7574, 7575, 7576, 7577, 7578, 7579, 7580, 7581, 7582, 7585, 7586, 7587, 7588, 7589, 7590, 7596, 7597, 7598, 7600, 7603, 7606, 7609, 7610, 7615, 7618, 7620, 7621, 7623, 7627, 7629, 7633, 7635, 7636, 7643, 7647, 7651, 7655, 7661, 7666, 7672, 7674, 7676, 7677, 7682, 7683, 7685, 7687, 7689, 7690, 7691, 7694, 7699, 7701, 7702, 7704, 7707, 7709, 7711, 7712, 7713, 7714, 7716, 7718, 7720, 7726, 7728, 7729, 7733, 7734, 7735, 7736, 7738, 7740, 7741, 7744, 7746, 7747, 7748, 7749, 7750, 7751, 7752, 7753, 7754, 7755, 7756, 7758, 7556, 7561, 7563, 7568, 7583, 7584, 7591, 7593, 7594, 7595, 7599, 7601, 7604, 7607, 7608, 7611, 7613, 7614, 7616, 7617, 7619, 7622, 7624, 7626, 7628, 7631, 7637, 7638, 7639, 7640, 7641, 7642, 7644, 7645, 7646, 7649, 7650, 7652, 7654, 7656, 7657, 7658, 7659, 7660, 7662, 7663, 7665, 7667, 7669, 7670, 7671, 7673, 7675, 7678, 7679, 7680, 7681, 7684, 7686, 7688, 7692, 7695, 7697, 7698, 7700, 7703, 7705, 7708, 7710, 7715, 7717, 7719, 7721, 7722, 7723, 7724, 7725, 7727, 7730, 7731, 7732, 7737, 7739, 7742, 7743, 7745, 7757, 7759, 7760, 7761, 7764, 7770, 7774, 7775, 7778, 7782, 7786, 7788, 7795, 7797, 7799, 7805, 7807, 7809, 7810, 7811, 7815, 7817; 7819, 7820, 7822, 7823, 7824, 7828, 7832, 7834, 7837, 7839, 7843, 7845, 7851, 7852, 7857, 7860, 7863, 7865, 7868, 7874, 7881, 7885, 7889, 7892, 7894, 7896, 7900, 7902, 7904, 7907, 7909, 7910, 7913, 7917, 7922, 7925, 7926, 7928, 7933, 7934, 7937, 7941, 7945, 7946, 7948, 7950, 7951, 7952, 7953, 7954, 7955, 7956, 7957, 7963, 7964, 7968, 7971, 7972, 7973, 7976, 7979, 7980, 7981, 7982, 7983, 7985, 7986, 7987, 7988, 7991, 7762, 7765, 7767, 7768, 7771, 7773, 7776, 7779, 7781, 7783, 7784, 7785, 7789, 7791, 7792, 7793, 7794, 7796, 7798, 7800, 7802, 7803, 7808, 7812, 7813, 7814, 7816, 7818, 7821, 7825, 7827, 7829, 7830, 7833, 7835, 7836, 7838, 7840, 7841, 7842, 7844, 7846, 7847, 7848, 7849, 7853, 7854, 7855, 7856, 7858, 7861, 7864, 7866, 7869, 7870, 7871, 7872, 7873, 7875, 7877, 7878, 7879, 7880, 7882, 7884, 7886, 7888, 7890, 7897, 7899, 7903, 7905, 7912, 7914, 7916, 7918, 7919, 7920, 7921, 7923, 7929, 7931, 7932, 7936, 7938, 7939, 7940, 7942, 7943, 7944, 7947, 7949, 7958, 7960, 7962, 7965, 7967, 7969, 7970, 7974, 7977, 7989, 7990, 7992, 7995, 7996, 8000, 8003, 8006, 8007, 8010, 8012, 8015, 8016, 8018, 8019, 8026, 8027, 8030, 8034, 8035, 8038, 8039, 8043, 8044, 8046, 8049, 8050, 8052, 8053, 8055, 8056, 8062, 8064, 8066, 8067, 8068, 8069, 8070, 8071, 8074, 8076, 8077, 8078, 8079, 8080, 8081, 7993, 7997, 7999, 8001, 8004, 8005, 8008, 8009, 8011, 8013, 8017, 8020, 8021, 8022, 8023, 8024, 8025, 8028, 8031, 8033, 8036, 8040, 8042, 8047, 8051, 8054, 8057, 8059, 8060, 8061, 8065, 8072, 8073, 8075, 8082, 8083, 8084, 8085, 8087, 8088, 8089, 8090, 8093, 8095, 8098, 8100, 8101, 8102, 8104, 8107, 8110, 8111, 8114, 8115, 8116, 8118, 8122, 8124, 8126, 8127, 8129, 8132, 8134, 8136, 8138, 8142, 8143, 8144, 8146, 8151, 8157, 8160, 8163, 8165, 8168, 8169, 8170, 8173, 8174, 8175, 8176, 8178, 8181, 8185, 8187, 8188, 8189, 8190, 8191, 8193, 8194, 8200, 8203, 8206, 8208, 8209, 8212, 8214, 8216, 8217, 8220, 8222, 8224, 8228, 8230, 8091, 8094, 8096, 8099, 8103, 8105, 8108, 8112, 8113, 8117, 8119, 8121, 8123, 8125, 8128, 8130, 8131, 8133, 8135, 8137, 8139, 8145, 8147, 8148, 8149, 8150, 8152, 8153, 8154, 8155, 8156, 8158, 8161, 8164, 8166, 8167, 8171, 8177, 8179, 8180, 8182, 8183, 8184, 8186, 8192, 8195, 8197, 8198, 8199, 8201, 8202, 8204, 8207, 8210, 8213, 8218, 8221, 8223, 8225, 8227, 8229, 8231, 8232, 8235, 8236, 8237, 8238, 8244, 8245, 8247, 8250, 8251, 8253, 8254, 8255, 8256, 8258, 8259, 8260, 8263, 8267, 8269, 8270, 8273, 8274, 8277, 8280, 8281, 8289, 8292, 8293, 8294, 8295, 8296, 8297, 8298, 8301, 8305, 8306, 8310, 8311, 8312, 8315, 8317, 8318, 8322, 8323, 8324, 8327, 8328, 8329, 8330, 8333, 8336, 8339, 8340, 8347, 8349, 8350, 8352, 8353, 8356, 8359, 8360, 8366, 8369, 8370, 8372, 8374, 8376, 8377, 8379, 8381, 8382, 8383, 8233, 8239, 8240, 8242, 8243, 8246, 8248, 8252, 8257, 8261, 8264, 8266, 8268, 8271, 8275, 8278, 8282, 8284, 8285, 8286, 8287, 8288, 8291, 8299, 8302, 8303, 8304, 8307, 8309, 8313, 8314, 8316, 8319, 8321, 8325, 8326, 8331, 8332, 8334, 8335, 8337, 8341, 8342, 8343, 8344, 8345, 8346, 8348, 8351, 8354, 8357, 8361, 8362, 8363, 8364, 8365, 8367, 8371, 8373, 8375, 8378, 8384, 8387, 8390, 8391, 8397, 8398, 8401, 8402, 8405, 8406, 8409, 8414, 8418, 8419, 8422, 8425, 8428, 8431, 8432, 8433, 8435, 8437, 8440, 8444, 8449, 8452, 8454, 8455, 8457, 8462, 8464, 8466, 8468, 8469, 8472, 8475, 8476, 8478, 8479, 8481, 8484, 8487, 8488, 8490, 8493, 8496, 8497, 8498, 8501, 8505, 8508, 8511, 8513, 8515, 8517, 8518, 8519, 8521, 8522, 8523, 8526, 8528, 8530, 8531, 8532, 8534, 8536, 8541, 8544, 8547, 8551, 8554, 8556, 8558, 8560, 8562, 8563, 8566, 8567, 8568, 8570, 8571, 8574, 8575, 8576, 8577, 8580, 8581, 8585, 8588, 8591, 8594, 8601, 8602, 8603, 8608, 8609, 8613, 8614, 8617, 8618, 8619, 8620, 8623, 8624, 8628, 8629, 8630, 8633, 8634, 8635, 8636, 8638, 8643, 8645, 8648, 8654, 8657, 8658, 8659, 8660, 8661, 8662, 8666, 8670, 8672, 8674, 8676, 8681, 8683, 8686, 8688, 8689, 8691, 8692, 8693, 8695, 8696, 8700, 8701, 8702, 8703, 8704, 8705, 8709, 8716, 8717, 8719, 8722, 8725, 8727, 8728, 8729, 8732, 8733, 8734, 8735, 8736, 8385, 8388, 8392, 8394, 8395, 8399, 8403, 8407, 8410, 8411, 8412, 8413, 8415, 8416, 8420, 8423, 8424, 8426, 8429, 8434, 8436, 8438, 8442, 8445, 8446, 8447, 8448, 8450, 8451, 8456, 8458, 8460, 8461, 8463, 8465, 8467, 8470, 8473, 8474, 8477, 8480, 8482, 8485, 8486, 8489, 8491, 8492, 8494, 8499, 8500, 8502, 8503, 8504, 8506, 8510, 8512, 8514, 8516, 8520, 8524, 8527, 8529, 8533, 8535, 8537, 8539, 8542, 8545, 8546, 8548, 8550, 8552, 8555, 8557, 8564, 8565, 8569, 8572, 8578, 8582, 8583, 8586, 8587, 8589, 8592, 8595, 8596, 8597, 8598, 8599, 8600, 8604, 8606, 8607, 8610, 8612, 8615, 8616, 8621, 8625, 8627, 8631, 8632, 8637, 8639, 8640, 8641, 8642, 8644, 8646, 8647, 8649, 8650, 8651, 8652, 8653, 8655, 8663, 8665, 8667, 8668, 8669, 8671, 8673, 8675, 8677, 8678, 8679, 8680, 8682, 8684, 8685, 8687, 8690, 8694, 8697, 8698, 8699, 8706, 8707, 8708, 8710, 8711, 8712, 8713, 8714, 8715, 8718, 8720, 8723, 8726, 8730, 8737, 8738, 8741, 8744, 8747, 8750, 8751, 8753, 8754, 8755, 8756, 8759, 8760, 8762, 8763, 8766, 8767, 8768, 8769, 8770, 8772, 8775, 8776, 8777, 8779, 8782, 8783, 8784, 8785, 8786, 8787, 8788, 8789, 8790, 8793, 8794, 8796, 8798, 8799, 8801, 8803, 8804, 8806, 8807, 8809, 8812, 8813, 8815, 8820, 8823, 8826, 8829, 8830, 8832, 8835, 8836, 8837, 8842, 8845, 8846, 8847, 8851, 8853, 8856, 8857, 8859, 8861, 8866, 8739, 8878, 8879, 8880, 8884, 8891, 8893, 8895, 8898, 8900, 8901, 8909, 8912, 8739, 8742, 8745, 8748, 8749, 8752, 8757, 8758, 8761, 8764, 8771, 8773, 8778, 8780, 8791, 8797, 8800, 8802, 8805, 8808, 8810, 8814, 8816, 8818, 8819, 8821, 8824, 8827, 8828, 8831, 8833, 8838, 8840, 8841, 8755, 8843, 8844, 8848, 8850, 8852, 8854, 8855, 8863, 8864, 8865, 8867, 8868, 8869, 8870, 8871, 8872, 8873, 8874, 8876, 8877, 8881, 8882, 8883, 8885, 8887, 8888, 8889, 8890, 8892, 8894, 8896, 8897, 8899, 8902, 8785, 8903, 8904, 8905, 8906, 8907, 8908, 8911, 8913, 8917, 8920, 8923, 8924, 8929, 8931, 8934, 8935, 8936, 8914, 8916, 8918, 8921, 8925, 8927, 8928, 8930, 8932, 8933, 8937, 8980, 8984, 8988, 8989, 8998, 9001, 9002, 9005, 9007, 9008, 9012, 9013, 9016, 9019, 9020, 9022, 9023, 9025, 9028, 9029, 9032, 9033, 9034, 9035, 9037, 9038, 9044, 9046, 9047, 9048, 9049, 9054, 8981, 8983, 8985, 8987, 8990, 8992, 8993, 8994, 8995, 8997, 8999, 9003, 9004, 9006, 9009, 9010, 9011, 9014, 9017, 9018, 9021, 9024, 9026, 9030, 9036, 9039, 9041, 9042, 9043, 9045, 9050, 9051, 9052, 9053, 9055, 9058, 9060, 9063, 9066, 9067, 9068, 9069, 9070, 9071, 9074, 9075, 9077, 9078, 9079, 9080, 9082, 9084, 9088, 9089, 9090, 9099, 9103, 9104, 9105, 9107, 9111, 9056, 9061, 9064, 9072, 9081, 9083, 9085, 9086, 9087, 9091, 9092, 9093, 9094, 9095, 9096, 9097, 9098, 9100, 9102, 9106, 9108, 9109, 9110, 9112, 9113, 9116, 9118, 9125, 9126, 9128, 9129, 9130, 9136, 9141, 9143, 9148, 9150, 9153, 9157, 9158, 9159, 9163, 9164, 9165, 9167, 9168, 9171, 9173, 9177, 9180, 9181, 9182, 9183, 9185, 9187, 9188, 9189, 9191, 9192, 9193, 9194, 9197, 9198, 9200, 9206, 9207, 9208, 9209, 9211, 9216, 9218, 9219, 9220, 9221, 9222, 9223, 9226, 9228, 9229, 9230, 9231, 9232, 9233, 9234, 9237, 9238, 9240, 9243, 9246, 9248, 9253, 9256, 9257, 9260, 9263, 9264, 9266, 9269, 9271, 9279, 9280, 9281, 9282, 9283, 9284, 9290, 9114, 9119, 9121, 9122, 9123, 9124, 9127, 9131, 9133, 9134, 9135, 9137, 9138, 9139, 9140, 9142, 9144, 9146, 9147, 9149, 9151, 9152, 9154, 9155, 9156, 9160, 9162, 9166, 9169, 9172, 9174, 9175, 9176, 9178, 9184, 9186, 9190, 9195, 9199, 9201, 9202, 9203, 9204, 9205, 9212, 9214, 9215, 9217, 9224, 9227, 9235, 9239, 9241, 9244, 9247, 9249, 9251, 9252, 9254, 9258, 9261, 9265, 9267, 9270, 9273, 9274, 9275, 9276, 9277, 9278, 9285, 9286, 9287, 9288, 9289, 9291, 9292, 9295, 9297, 9300, 9302, 9303, 9304, 9307, 9308, 9310, 9311, 9313, 9319, 9321, 9323, 9324, 9328, 9333, 9334, 9337, 9338, 9339, 9342, 9344, 9348, 9351, 9352, 9354, 9355, 9357, 9360, 9367, 9371, 9374, 9377, 9379, 9383, 9384, 9385, 9388, 9389, 9390, 9393, 9394, 9398, 9401, 9402, 9406, 9408, 9409, 9410, 9413, 9415, 9416, 9417, 9418, 9419, 9421, 9422, 9425, 9429, 9433, 9434, 9435, 9436, 9437, 9439, 9440, 9446, 9452, 9453, 9454, 9455, 9457, 9458, 9459, 9462, 9466, 9467, 9468, 9470, 9474, 9479, 9482, 9487, 9488, 9489, 9492, 9495, 9497, 9499, 9500, 9504, 9505, 9508, 9513, 9514, 9519, 9522, 9523, 9524, 9526, 9528, 9532, 9533, 9534, 9535, 9537, 9538, 9541, 9542, 9543, 9545, 9546, 9548, 9293, 9296, 9298, 9301, 9305, 9309, 9312, 9314, 9316, 9317, 9318, 9320, 9322, 9325, 9326, 9327, 9329, 9331, 9332, 9335, 9336, 9340, 9345, 9347, 9349, 9353, 9356, 9358, 9361, 9363, 9364, 9365, 9368, 9370, 9372, 9375, 9376, 9378, 9380, 9382, 9386, 9391, 9395, 9397, 9399, 9400, 9403, 9405, 9407, 9411, 9412, 9414, 9420, 9423, 9424, 9426, 9428, 9430, 9431, 9432, 9438, 9441, 9443, 9444, 9445, 9447, 9448, 9449, 9450, 9451, 9456, 9460, 9461, 9464, 9465, 9469, 9471, 9473, 9475, 9477, 9478, 9480, 9483, 9485, 9490, 9493, 9494, 9496, 9498, 9501, 9502, 9503, 9506, 9509, 9511, 9512, 9515, 9516, 9517, 9518, 9520, 9521, 9525, 9527, 9529, 9530, 9536, 9539, 9544, 9547, 9549, 9550, 9551, 9555, 9556, 9557, 9559, 9560, 9563, 9564, 9565, 9566, 9569, 9570, 9573, 9577, 9578, 9579, 9580, 9585, 9586, 9587, 9588, 9591, 9593, 9596, 9552, 9554, 9558, 9561, 9567, 9571, 9574, 9576, 9581, 9583, 9584, 9589, 9592, 9594, 9595, 9598, 9602, 9604, 9605, 9608, 9612, 9613, 9614, 9617, 9618, 9621, 9622, 9625, 9626, 9627, 9632, 9633, 9638, 9640, 9643, 9644, 9645, 9646, 9651, 9654, 9656, 9657, 9658, 9661, 9662, 9665, 9666, 9667, 9668, 9672, 9673, 9675, 9676, 9677, 9680, 9683, 9686, 9688, 9691, 9694, 9698, 9699, 9702, 9705, 9707, 9710, 9711, 9715, 9719, 9720, 9722, 9723, 9726, 9729, 9732, 9733, 9735, 9737, 9738, 9741, 9744, 9745, 9746, 9747, 9748, 9749, 9750, 9754, 9755, 9756, 9758, 9759, 9768, 9771, 9772, 9776, 9777, 9781, 9782, 9784, 9787, 9789, 9790, 9792, 9796, 9797, 9800, 9805, 9806, 9812, 9815, 9818, 9821, 9823, 9825, 9827, 9831, 9832, 9835, 9837, 9839, 9841, 9842, 9844, 9845, 9851, 9853, 9854, 9855, 9857, 9860, 9862, 9863, 9865, 9871, 9873, 9875, 9878, 9879, 9599, 9601, 9603, 9606, 9607, 9609, 9611, 9615, 9619, 9623, 9624, 9628, 9630, 9631, 9634, 9635, 9637, 9639, 9641, 9647, 9649, 9650, 9652, 9653, 9659, 9660, 9663, 9664, 9670, 9671, 9679, 9682, 9684, 9687, 9690, 9692, 9693, 9695, 9697, 9700, 9701, 9703, 9706, 9708, 9712, 9713, 9714, 9716, 9717, 9718, 9721, 9724, 9727, 9730, 9734, 9739, 9742, 9751, 9753, 9757, 9760, 9761, 9762, 9763, 9764, 9765, 9766, 9767, 9769, 9773, 9775, 9778, 9780, 9783, 9786, 9788, 9791, 9793, 9794, 9795, 9798, 9801, 9803, 9804, 9807, 9808, 9809, 9810, 9811, 9813, 9816, 9817, 9819, 9820, 9822, 9826, 9828, 9830, 9833, 9836, 9838, 9840, 9843, 9846, 9847, 9848, 9849, 9850, 9852, 9856, 9858, 9859, 9861, 9864, 9866, 9867, 9868, 9869, 9870, 9872, 9876, 9877, 9880, 9881, 9882, 9886, 9890, 9891, 9894, 9900, 9902, 9904, 9908, 9911, 9912, 9915, 9917, 9919, 9923, 9925, 9928, 9935, 9936, 9940, 9943, 9949, 9953, 9954, 9956, 9957, 9958, 9962, 9963, 9964, 9968, 9969, 9975, 9978, 9981, 9988, 9989, 9990, 9991, 9992, 9995, 9997, 10011, 10012, 10014, 10017, 10018, 10031, 10032, 10033, 10034, 10035, 10037, 10041, 10042, 10046, 10050, 10054, 10058, 10059, 9883, 9885, 9887, 9889, 9892, 9893, 9895, 9896, 9897, 9898, 9899, 9901, 9903, 9905, 9907, 9909, 9913, 9914, 9916, 9918, 9920, 9921, 9922, 9924, 9926, 9929, 9931, 9932, 9933, 9934, 9937, 9938, 9939, 9941, 9942, 9944, 9945, 9946, 9947, 9948, 9950, 9952, 9955, 9959, 9960, 9961, 9966, 9967, 9970, 9972, 9973, 9974, 9976, 9979, 9980, 9982, 9983, 9984, 9985, 9986, 9987, 9993, 9994, 9996; 9998, 9999, 10000, 10001, 10002, 10003, 10004, 10005, 10006, 10007, 10008, 10009, 10010, 10013, 10015, 10016, 10019, 10020, 10021, 10022, 10023, 10025, 10026, 10027, 10028, 10030, 10036, 10038, 10040, 10043, 10044, 10045, 10047, 10048, 10049, 10051, 10053, 10055, 10056, 10057, 10060, 10061, 10064, 10067, 10068, 10070, 10071, 10072, 10074, 10079, 10081, 10083, 10088, 10091, 10095, 10096, 10097, 10101, 10103, 10105, 10106, 10109, 10110, 10111, 10113, 10116, 10118, 10120, 10122, 10125, 10126, 10127, 10131, 10134, 10137, 10138, 10144, 10147, 10149, 10151, 10152, 10155, 10156, 10159, 10160, 10169, 10172, 10174, 10175, 10178, 10181, 10186, 10188, 10189, 10190, 10191, 10192, 10196, 10199, 10203, 10204, 10210, 10211, 10216, 10218, 10221, 10224, 10225, 10226, 10229, 10230, 10231, 10232, 10234, 10239, 10241, 10244, 10252, 10253, 10257, 10258, 10259, 10261, 10266, 10272, 10276, 10062, 10065, 10069, 10075, 10077, 10078, 10080, 10082, 10084, 10086, 10087, 10089, 10090, 10092, 10093, 10094, 10098, 10099, 10100, 10102, 10104, 10107, 10112, 10114, 10117, 10119, 10121, 10123, 10124, 10129, 10130, 10132, 10133, 10135, 10139, 10140, 10141, 10142, 10143, 10145, 10148, 10150, 10153, 10154, 10157, 10161, 10163, 10164, 10165, 10166, 10167, 10170, 10173, 10176, 10177, 10179, 10182, 10183, 10184, 10187, 10193, 10194, 10195, 10197, 10198, 10200, 10201, 10202, 10205, 10206, 10207, 10209, 10212, 10213, 10214, 10215, 10219, 10220, 10222, 10223, 10227, 10228, 10233, 10235, 10236, 10237, 10240, 10242, 10243, 10245, 10247, 10248, 10249, 10251, 10254, 10255, 10256, 10260, 10262, 10263, 10264, 10265, 10267, 10268, 10269, 10270, 10271, 10273, 10274, 10275, 10277, 10278, 10279, 10282, 10285, 10287, 10291, 10292, 10297, 10299, 10301, 10304, 10306, 10308, 10310, 10314, 10317, 10318, 10320, 10322, 10327, 10329, 10330, 10333, 10335, 10336, 10337, 10340, 10342, 10348, 10350, 10351, 10354, 10358, 10359, 10360, 10362, 10366, 10369, 10372, 10373, 10374, 10376, 10378, 10383, 10385, 10391, 10398, 10403, 10407, 10410, 10413, 10415, 10419, 10422, 10425, 10427, 10428, 10429, 10430, 10432, 10433, 10434, 10437, 10438, 10439, 10442, 10443, 10445, 10446, 10447, 10448, 10452, 10453, 10454, 10455, 10456, 10460, 10463, 10466, 10467, 10469, 10470, 10473, 10475, 10477, 10480, 10484, 10488, 10490, 10494, 10495, 10497, 10501, 10502, 10503, 10507, 10508, 10510, 10517, 10518, 10520, 10522, 10524, 10525, 10528, 10529, 10533, 10536, 10537, 10540, 10541, 10545, 10547, 10551, 10553, 10556, 10559, 10560, 10563, 10564, 10565, 10568, 10571, 10574, 10576, 10579, 10581, 10583, 10588, 10589, 10590, 10592, 10593, 10596, 10597, 10601, 10602, 10603, 10605, 10607, 10609, 10610, 10612, 10613, 10617, 10618, 10621, 10624, 10627, 10630, 10632, 10634, 10637, 10638, 10639, 10640, 10641, 10643, 10645, 10647, 10653, 10655, 10657, 10659, 10661, 10662, 10663, 10664, 10665, 10666, 10667, 10668, 10669, 10672, 10673, 10674, 10675, 10280, 10283, 10286, 10288, 10290, 10293, 10295, 10298, 10300, 10302, 10305, 10307, 10309, 10311, 10312, 10313, 10315, 10319, 10321, 10323, 10325, 10326, 10328, 10331, 10338, 10341, 10343, 10344, 10345, 10346, 10347, 10349, 10352, 10355, 10356, 10357, 10361, 10363, 10365, 10367, 10370, 10375, 10377, 10379, 10380, 10381, 10382, 10384, 10386, 10387, 10388, 10390, 10392, 10394, 10395, 10399, 10401, 10402, 10404, 10406, 10408, 10411, 10412, 10414, 10416, 10417, 10418, 10420, 10423, 10426, 10431, 10435, 10440, 10444, 10449, 10451, 10457, 10459, 10461, 10462, 10464, 10465, 10468, 10471, 10476, 10478, 10481, 10483, 10485, 10487, 10489, 10491, 10492, 10493, 10498, 10499, 10500, 10504, 10506, 10509, 10511, 10513, 10514, 10515, 10516, 10519, 10521, 10523, 10526, 10530, 10531, 10532, 10534, 10535, 10538, 10539, 10542, 10543, 10544, 10546, 10548, 10550, 10552, 10554, 10557, 10558, 10561, 10566, 10569, 10572, 10573, 10577, 10578, 10580, 10582, 10584, 10586, 10594, 10598, 10600, 10604, 10606, 10611, 10614, 10616, 10619, 10622, 10625, 10626, 10628, 10631, 10633, 10635, 10642, 10644, 10646, 10648, 10649, 10650, 10651, 10652, 10654, 10656, 10658, 10660, 10670, 10671, 10676, 10678, 10684, 10679, 10681, 10682, 10683, 10685, 10687, 10688, 10689, 10690, 10691, 10693, 10696, 10699, 10703, 10704, 10709, 10711, 10712, 10713, 10720, 10721, 10722, 10724, 10725, 10726, 10728, 10729, 10734, 10740, 10742, 10743, 10744, 10745, 10746, 10748, 10749, 10751, 10754, 10758, 10759, 10760, 10764, 10768, 10769, 10772, 10775, 10780, 10781, 10783, 10786, 10791, 10796, 10801, 10808, 10817, 10818, 10819, 10821, 10823, 10826, 10827, 10829, 10830, 10834, 10843, 10844, 10847, 10848, 10849, 10853, 10856, 10858, 10866, 10869, 10872, 10874, 10877, 10878, 10879, 10882, 10884, 10885, 10889, 10892, 10893, 10896, 10900, 10901, 10903, 10905, 10907, 10909, 10910, 10911, 10914, 10916, 10919, 10926, 10930, 10932, 10933, 10934, 10938, 10941, 10942, 10943, 10944, 10946, 10947, 10953, 10955, 10956, 10958, 10959, 10962, 10967, 10968, 10972, 10975, 10977, 10978, 10981, 10984, 10985, 10988, 10992, 10995, 10997, 10999, 11000, 11001, 11006, 11009, 11013, 11016, 11020, 11025, 11033, 11036, 11040, 11041, 11042, 11043, 11045, 11046, 11048, 11052, 11055, 11060, 11061, 11062, 11064, 11065, 11067, 11070, 11071, 11072, 11078, 11079, 11081, 11085, 11093, 10694, 10697, 10700, 10702, 10705, 10707, 10710, 10714, 10716, 10717, 10718, 10719, 10723, 10727, 10730, 10732, 10733, 10735, 10737, 10738, 10739, 10741, 10747, 10750, 10752, 10755, 10757, 10761, 10762, 10763, 10765, 10767, 10770, 10773, 10776, 10778, 10779, 10782, 10784, 10788, 10789, 10790, 10792, 10793, 10794, 10798, 10799, 10800, 10802, 10804, 10805, 10806, 10807, 10809, 10811, 10812, 10813, 10814, 10815, 10816, 10820, 10822, 10824, 10831, 10833, 10835, 10837, 10838, 10839, 10840, 10841, 10842, 10845, 10846, 10850, 10851, 10854, 10857, 10859, 10860, 10861, 10862, 10863, 10864, 10865, 10868, 10870, 10871, 10873, 10875, 10880, 10881, 10883, 10886, 10888, 10890, 10894, 10897, 10899, 10902, 10904, 10906, 10908, 10912, 10915, 10917, 10920, 10922, 10924, 10925, 10927, 10928, 10929, 10931, 10935, 10937, 10939, 10945, 10948, 10950, 10951, 10952, 10954, 10957, 10960, 10963, 10965, 10966, 10969, 10970, 10971, 10973, 10976, 10979, 10980, 10982, 10986, 10987, 10989, 10991, 10993, 10996, 10998, 11002, 11004, 11005, 11007, 11010, 11012, 11014, 11015, 11017, 11019, 11021, 11022, 11023, 11026, 11027, 11028, 11029, 11030, 11031, 11032, 11034, 11037, 11039, 11044, 11047, 11049, 11050, 11051, 11053, 11054, 11056, 11058, 11059, 11063, 11066, 11068, 11069, 11073, 11074, 11075, 11076, 11077, 11080, 11082, 11083, 11084, 11086, 11087, 11088, 11089, 11090, 11091, 11092, 11094, 11376, 11381, 11382, 11383, 11384, 11387, 11397, 11401, 11405, 11408, 11414, 11418, 11421, 11422, 11424, 11427, 11429, 11430, 11377, 11379, 11380, 11385, 11386, 11388, 11390, 11391, 11392, 11394, 11395, 11396, 11398, 11399, 11400, 11402, 11403, 11404, 11406, 11409, 11410, 11411, 11412, 11415, 11416, 11417, 11419, 11423, 11425, 11428, 11431, 11432, 11433, 11434, 11438, 11442, 11443, 11447, 11449, 11450, 11452, 11456, 11459, 11463, 11464, 11467, 11468, 11472, 11477, 11480, 11481, 11482, 11483, 11484, 11488, 11489, 11493, 11498, 11502, 11504, 11505, 11506, 11507, 11508, 11509, 11512, 11513, 11514, 11517, 11520, 11522, 11523, 11524, 11526, 11528, 11532, 11534, 11435, 11439, 11444, 11445, 11446, 11448, 11451, 11453, 11457, 11458, 11460, 11461, 11462, 11465, 11466, 11469, 11473, 11474, 11475, 11476, 11478, 11479, 11485, 11486, 11487, 11490, 11494, 11497, 11499, 11500, 11501, 11503, 11510, 11511, 11515, 11518, 11519, 11521, 11525, 11527, 11529, 11535, 11539, 11540, 11541, 11548, 11550, 11551, 11552, 11555, 11556, 11557, 11560, 11561, 11562, 11568, 11569, 11571, 11572, 11573, 11577, 11536, 11542, 11545, 11546, 11547, 11549, 11553, 11554, 11563, 11566, 11570, 11574, 11578, 11585, 11586, 11590, 11591, 11592, 11595, 11596, 11597, 11600, 11579, 11582, 11587, 11593, 11594, 11598, 11601, 11602, 11606, 11607, 11608, 11609, 11616, 11618, 11622, 11626, 11628, 11632, 11633, 11603, 11610, 11613, 11614, 11615, 11617, 11619, 11623, 11627, 11629, 11634, 11635, 11640, 11641, 11642, 11643, 11647, 11648, 11654, 11655, 11656, 11657, 11658, 11636, 11639, 11644, 11645, 11646, 11649, 11652, 11653, 11659, 11663, 11664, 11665, 11666, 11670, 11671, 11672, 11673, 11677, 11681, 11687, 11690, 11694, 11696, 11697, 11701, 11705, 11709, 11713, 11719, 11723, 11729, 11733, 11739, 11744, 11745, 11748, 11749, 11751, 11755, 11759, 11763, 11770, 11772, 11774, 11776, 11778, 11782, 11785, 11660, 11667, 11674, 11675, 11676, 11678, 11682, 11685, 11686, 11688, 11689, 11691, 11692, 11693, 11695, 11698, 11699, 11700, 11702, 11706, 11710, 11716, 11720, 11724, 11725, 11727, 11728, 11730, 11731, 11732, 11734, 11735, 11736, 11737, 11738, 11740, 11743, 11746, 11747, 11750, 11752, 11756, 11761, 11762, 11764, 11765, 11767, 11768, 11769, 11773, 11775, 11777, 11779, 11783, 11784, 11786, 11790, 11791, 11792, 11787, 11793, 11796, 11800, 11802, 11803, 11805, 11810, 11818, 11819, 11823, 11824, 11827, 11828, 11829, 11833, 11836, 11837, 11839, 11840, 11847, 11850, 11852, 11857, 11860, 11864, 11866, 11797, 11801, 11804, 11806, 11809, 11811, 11814, 11815, 11817, 11820, 11825, 11830, 11835, 11841, 11844, 11845, 11846, 11848, 11851, 11853, 11856, 11858, 11861, 11862, 11863, 11865, 11867, 11871, 11876, 11878, 11882, 11888, 11891, 11894, 11868, 11872, 11875, 11877, 11879, 11883, 11886, 11887, 11889, 11890, 11892, 11893, 11895, 11898, 11902, 11903, 11904, 11908, 11909, 11911, 11912, 11913, 11914, 11915, 11917, 11918, 11922, 11926, 11927, 11930, 11932, 11933, 11937, 11941, 11942, 11946, 11947, 11948, 11949, 11950, 11951, 11952, 11955, 11959, 11968, 11972, 11976, 11978, 11979, 11980, 11981, 11986, 11988, 11989, 11991, 11992, 11995, 11997, 11998, 12001, 12002, 12004, 12005, 11899, 11905, 11910, 11916, 11919, 11923, 11924, 11925, 11928, 11929, 11931, 11934, 11938, 11943, 11953, 11954, 11956, 11960, 11963, 11964, 11967, 11969, 11973, 11977, 11982, 11985, 11987, 11990, 11993, 11994, 11996, 11999, 12000, 12003, 12006, 12011, 12015, 12016, 12017, 12021, 12022, 12023, 12024, 12025, 12026, 12027, 12031, 12034, 12042, 12043, 12045, 12049, 12050, 12051, 12054, 12062, 12063, 12064, 12066, 12067, 12068, 12070, 12072, 12076, 12082, 12085, 12086, 12089, 12090, 12093, 12094, 12095, 12096, 12097, 12098, 12101, 12103, 12107, 12108, 12111, 12112, 12114, 12118, 12119, 12120, 12128, 12007, 12010, 12012, 12020, 12028, 12032, 12033, 12035, 12038, 12039, 12044, 12046, 12052, 12055, 12056, 12057, 12058, 12059, 12060, 12061, 12065, 12069, 12071, 12073, 12077, 12080, 12081, 12084, 12087, 12088, 12091, 12099, 12100, 12102, 12104, 12109, 12110, 12113, 12115, 12121, 12122, 12123, 12124, 12125, 12127, 12129, 12130, 12135, 12136, 12141, 12144, 12147, 12148, 12149, 12153, 12159, 12160, 12131, 12134, 12137, 12138, 12139, 12140, 12142, 12143, 12145, 12146, 12150, 12154, 12157, 12158, 12161, 12162, 12163, 12164, 12168, 12171, 12176, 12181, 12187, 12190, 12194, 12196, 12197, 12199, 12201, 12202, 12209, 12213, 12216, 12220, 12221, 12223, 12225, 12226, 12231, 12233, 12239, 12243, 12244, 12250, 12254, 12256, 12257, 12259, 12266, 12270, 12271, 12272, 12274, 12276, 12277, 12278, 12280, 12284, 12285, 12288, 12289, 12290, 12291, 12295, 12296, 12302, 12308, 12313, 12317, 12321, 12322, 12323, 12324, 12325, 12327, 12328, 12330, 12331, 12332, 12336, 12337, 12339, 12343, 12346, 12349, 12353, 12354, 12355, 12359, 12361, 12363, 12367, 12369, 12370, 12372, 12376, 12377, 12379, 12380, 12381, 12382, 12383, 12385, 12389, 12393, 12398, 12400, 12402, 12403, 12406, 12408, 12409, 12410, 12412, 12415, 12417, 12419, 12422, 12424, 12429, 12430, 12432, 12433, 12435, 12436, 12437, 12441, 12445, 12448, 12449, 12454, 12458, 12459, 12460, 12165, 12169, 12170, 12172, 12175, 12177, 12180, 12182, 12185, 12186, 12188, 12191, 12195, 12198, 12200, 12203, 12206, 12207, 12208, 12210, 12214, 12217, 12222, 12224, 12227, 12228, 12229, 12230, 12232, 12234, 12237, 12238, 12240, 12241, 12242, 12245, 12248, 12249, 12251, 12255, 12258, 12260, 12262, 12263, 12264, 12265, 12267, 12268, 12269, 12273, 12279, 12281, 12286, 12287, 12292, 12297, 12300, 12303, 12306, 12307, 12309, 12312, 12314, 12318, 12326, 12333, 12338, 12340, 12341, 12342, 12345, 12347, 12348, 12352, 12356, 12360, 12362, 12364, 12371, 12373, 12378, 12386, 12390, 12394, 12397, 12401, 12404, 12405, 12411, 12413, 12418, 12420, 12423, 12425, 12428, 12438, 12439, 12440, 12442, 12443, 12446, 12450, 12453, 12455, 12461, 12465, 12467, 12468, 12472, 12474, 12477, 12480, 12484, 12486, 12488, 12489, 12490, 12493, 12495, 12499, 12501, 12504, 12506, 12462, 12469, 12475, 12478, 12481, 12483, 12485, 12487, 12492, 12494, 12496, 12497, 12498, 12500, 12502, 12505, 12507, 12511, 12517, 12520, 12522, 12523, 12524, 12528, 12530, 12534, 12535, 12536, 12537, 12541, 12542, 12547, 12550, 12551, 12552, 12554, 12555, 12560, 12564, 12565, 12569, 12571, 12574, 12579, 12581, 12586, 12590, 12592, 12593, 12594, 12596, 12600, 12601, 12602, 12604, 12610, 12613, 12614, 12615, 12616, 12620, 12626, 12630, 12508, 12512, 12515, 12518, 12521, 12525, 12529, 12531, 12538, 12543, 12546, 12548, 12549, 12553, 12556, 12559, 12561, 12566, 12570, 12572, 12573, 12575, 12578, 12582, 12585, 12587, 12595, 12597, 12599, 12603, 12605, 12608, 12609, 12611, 12617, 12618, 12621, 12624, 12625, 12627, 12631, 12636, 12637, 12638, 12639, 12643, 12647, 12648, 12652, 12654, 12660, 12664, 12666, 12670, 12672, 12675, 12677, 12680, 12686, 12691, 12692, 12695, 12699, 12700, 12701, 12703, 12705, 12709, 12710, 12714, 12715, 12716, 12718, 12719, 12720, 12724, 12725, 12728, 12732, 12738, 12739, 12743, 12744, 12745, 12747, 12748, 12752, 12757, 12763, 12764, 12766, 12767, 12768, 12771, 12776, 12777, 12781, 12785, 12787, 12788, 12791, 12792, 12796, 12797, 12800, 12804, 12808, 12813, 12815, 12816, 12817, 12822, 12825, 12828, 12831, 12833, 12834, 12837, 12839, 12841, 12842, 12632, 12635, 12640, 12641, 12644, 12649, 12653, 12655, 12658, 12661, 12662, 12663, 12665, 12667, 12671, 12673, 12678, 12679, 12681, 12682, 12683, 12684, 12685, 12687, 12688, 12689, 12690, 12693, 12694, 12696, 12702, 12704, 12706, 12712, 12713, 12717, 12721, 12726, 12729, 12730, 12731, 12733, 12736, 12737, 12740, 12746, 12749, 12750, 12751, 12753, 12754, 12755, 12756, 12758, 12760, 12761, 12762, 12765, 12769, 12770, 12772, 12775, 12778, 12782, 12786, 12789, 12790, 12793, 12794, 12795, 12798, 12799, 12801, 12805, 12809, 12812, 12814, 12818, 12821, 12823, 12824, 12826, 12827, 12832, 12835, 12836, 12838, 12840, 12843, 12844, 12845, 12849, 12850, 12854, 12857, 12862, 12866, 12867, 12868, 12870, 12872, 12880, 12881, 12884, 12885, 12889, 12890, 12892, 12896, 12898, 12899, 12903, 12907, 12910, 12913, 12919, 12920, 12921, 12923, 12928, 12932, 12938, 12942, 12945, 12948, 12950, 12951, 12953, 12959, 12846, 12851, 12855, 12858, 12861, 12863, 12869, 12871, 12873, 12876, 12877, 12878, 12879, 12882, 12883, 12886, 12887, 12888, 12891, 12893, 12894, 12895, 12900, 12901, 12902, 12904, 12908, 12909, 12911, 12912, 12914, 12917, 12918, 12924, 12927, 12929, 12933, 12936, 12937, 12939, 12943, 12949, 12954, 12957, 12958, 12960, 12961, 12965, 12969, 12975, 12977, 12962, 12966, 12967, 12968, 12970, 12971, 12972, 12973, 12974, 12976, 12978, 12981, 12982, 12986, 12989, 12991, 12992, 12993, 12995, 12999, 13001, 12983, 12987, 12996, 12997, 12998, 13000, 13002, 13005, 13009, 13013, 13017, 13019, 13025, 13029, 13030, 13032, 13033, 13034, 13037, 13040, 13042, 13043, 13644, 13048, 13049, 13051, 13052, 13053, 13057, 13062, 13064, 13065, 13066, 13067, 13072, 13073, 13076, 13078, 13082, 13083, 13085, 13087, 13088, 13089, 13092, 13096, 13100, 13101, 13102, 13105, 13108, 13109, 13110, 13114, 13117, 13118, 13124, 13129, 13131, 13132, 13138, 13144, 13146, 13147, 13148, 13152, 13156, 13159, 13164, 13167, 13168, 13170, 13171, 13172, 13173, 13174, 13184, 13185, 13006, 13010, 13014, 13018, 13020, 13021, 13022, 13023, 13024, 13026, 13031, 13035, 13036, 13038, 13039, 13041, 13045, 13050, 13054, 13058, 13061, 13063, 13068, 13069, 13070, 13071, 13074, 13075, 13077, 13079, 13084, 13086, 13090, 13091, 13093, 13097, 13104, 13107, 13111, 13115, 13119, 13121, 13122, 13123, 13125, 13126, 13127, 13128, 13130, 13133, 13137, 13139, 13142, 13143, 13145, 13149, 13153, 13157, 13158, 13160, 13163, 13165, 13166, 13169, 13175, 13176, 13177, 13178, 13179, 13180, 13181, 13182, 13183, 13186, 13189, 13190, 13191, 13195, 13196, 13197, 13199, 13200, 13204, 13206, 13192, 13198, 13201, 13207, 13212, 13213, 13226, 13228, 13231, 13235, 13240, 13245, 13247, 13248, 13250, 13254, 13256, 13258, 13264, 13265, 13268, 13269, 13273, 13274, 13277, 13279, 13280, 13281, 13286, 13208, 13211, 13214, 13217, 13220, 13222, 13224, 13225, 13227, 13229, 13232, 13233, 13234, 13237, 13239, 13241, 13242, 13244, 13246, 13249, 13251, 13255, 13257, 13259, 13262, 13263, 13266, 13267, 13270, 13275, 13276, 13282, 13285, 13641, 13645, 13646, 13649, 13650, 13652, 13653, 13654, 13655, 13658, 13659, 13642, 13647, 13648, 13656, 13660, 13661, 13664, 13669, 13670, 13671, 13672, 13673, 13675, 13676, 13677, 13681, 13683, 13685, 13687, 13689, 13691, 13693, 13696, 13665, 13668, 13674, 13678, 13682, 13684, 13686, 13688, 13690, 13692, 13694, 13695, 13697, 13701, 13702, 13703, 13709, 13713, 13714, 13715, 13719, 13721, 13722, 13726, 13728, 13732, 13735, 13740, 13698, 13704, 13705, 13706, 13707, 13708, 13710, 13716, 13717, 13718, 13720, 13723, 13724, 13725, 13727, 13729, 13733, 13734, 13736, 13739, 13741, 13744, 13745, 13749, 13751, 13752, 13753, 13754, 13758, 13762, 13765, 13766, 13768, 13772, 13773, 13774, 13777, 13778, 13779, 13783, 13785, 13790, 13791, 13797, 13802, 13803, 13805, 13806, 13807, 13809, 13812, 13814, 13816, 13817, 13818, 13819, 13820, 13823, 13824, 13826, 13828, 13746, 13755, 13759, 13763, 13764, 13767, 13769, 13775, 13776, 13780, 13784, 13786, 13788, 13789, 13792, 13795, 13796, 13798, 13800, 13804, 13808, 13813, 13815, 13821, 13822, 13829, 13832, 13837, 13841, 13844, 13845, 13846, 13849, 13854, 13855, 13856, 13857, 13861, 13865, 13869, 13871, 13875, 13879, 13880, 13833, 13836, 13838, 13843, 13847, 13850, 13853, 13858, 13862, 13866, 13870, 13872, 13876, 13881, 13882, 13883, 13889, 13894, 13902, 13903, 13910, 13911, 13914, 13915, 13916, 13928, 13929, 13930, 13931, 13935, 13936, 13937, 13944, 13947, 13948, 13950, 13960, 13961, 13962, 13964, 13965, 13966, 13968, 13970, 13971, 13972, 13976, 13978, 13884, 13887, 13890, 13893, 13895, 13898, 13900, 13904, 13905, 13906, 13907, 13908, 13909, 13912, 13913, 13917, 13920, 13921, 13922, 13923, 13924, 13925, 13926, 13932, 13938, 13941, 13942, 13943, 13945, 13946, 13949, 13953, 13954, 13956, 13957, 13958, 13959, 13963, 13967, 13969, 13974, 13975, 13977, 13980, 13981, 13988, 13989, 13990, 13992, 13994, 13995, 13999, 13982, 13985, 13986, 13987, 13991, 13993, 13996, 14000, 14001, 14002, 14003, 14004, 14009, 14014, 14017, 14020, 14024, 14026, 14029, 14035, 14036, 14040, 14043, 14045, 14051, 14057, 14058, 14059, 14063, 14065, 14066, 14067, 14068, 14069, 14070, 14071, 14073, 14074, 14078, 14079, 14080, 14081, 14082, 14083, 14084, 14085, 14087, 14094, 14095, 14100, 14108, 14109, 14113, 14114, 14118, 14120, 14121, 14122, 14130, 14133, 14138, 14141, 14142, 14143, 14147, 14005, 14008, 14010, 14013, 14015, 14018, 14021, 14025, 14027, 14028, 14030, 14033, 14034, 14037, 14038, 14039, 14041, 14042, 14044, 14046, 14049, 14050, 14052, 14055, 14056, 14060, 14064, 14072, 14077, 14086, 14088, 14089, 14090, 14091, 14092, 14093, 14096, 14097, 14098, 14099, 14101, 14102, 14103, 14104, 14105, 14106, 14107, 14110, 14115, 14123, 14126, 14127, 14132, 14134, 14135, 14136, 14137, 14139, 14140, 14144, 14145, 14148, 14151, 14155, 14157, 14161, 14166, 14171, 14175, 14183, 14187, 14190, 14192, 14194, 14195, 14196, 14200, 14201, 14152, 14156, 14158, 14162, 14165, 14167, 14170, 14172, 14176, 14179, 14180, 14182, 14184, 14185, 14186, 14188, 14189, 14191, 14193, 14197, 14198, 14199, 14202, 14203, 14204, 14210, 14211, 14216, 14217, 14223, 14226, 14228, 14229, 14230, 14233, 14235, 14239, 14241, 14243, 14244, 14250, 14254, 14255, 14256, 14257, 14260, 14261, 14262, 14267, 14268, 14269, 14273, 14274, 14277, 14281, 14284, 14286, 14289, 14292, 14293, 14297, 14299, 14301, 14304, 14305, 14306, 14312, 14316, 14320, 14322, 14324, 14328, 14329, 14331, 14337, 14342, 14344, 14346, 14347, 14349, 14350, 14353, 14356, 14361, 14363, 14364, 14365, 14366, 14205, 14208, 14212, 14215, 14218, 14221, 14224, 14225, 14227, 14231, 14236, 14240, 14242, 14245, 14246, 14247, 14251, 14263, 14266, 14270, 14278, 14282, 14283, 14285, 14287, 14290, 14291, 14294, 14298, 14300, 14302, 14303, 14307, 14310, 14313, 14317, 14323, 14325, 14327, 14330, 14334, 14338, 14340, 14341, 14345, 14348, 14351, 14352, 14354, 14355, 14357, 14358, 14359, 14360, 14367, 14368, 14372, 14373, 14375, 14386, 14369, 14374, 14376, 14379, 14380, 14381, 14382, 14383, 14384 and SEQ ID NO:14385.

[0252] A further preferred embodiment of the method comprises the use of blocker oligonucleotides. The use of such blocker oligonucleotides has been described by Yu et al., BioTechniques 23:714-720, 1997. Blocking probe oligonucleotides are hybridized to the bisulfite treated nucleic acid concurrently with the PCR primers. PCR amplification of the nucleic acid is terminated at the 5′ position of the blocking probe, such that amplification of a nucleic acid is suppressed where the complementary sequence to the blocking probe is present. The probes may be designed to hybridize to the bisulfite treated nucleic acid in a methylation status specific manner. For example, for detection of methylated nucleic acids within a population of unmethylated nucleic acids, suppression of the amplification of nucleic acids which are unmethylated at the position in question would be carried out by the use of blocking probes comprising a ‘CpA’ or ‘TpA’ at the position in question, as opposed to a ‘CpG’ if the suppression of amplification of methylated nucleic acids is desired.

[0253] For PCR methods using blocker oligonucleotides, efficient disruption of polymerase-mediated amplification requires that blocker oligonucleotides not be elongated by the polymerase. Preferably, this is achieved through the use of blockers that are 3′-deoxyoligonucleotides, or oligonucleotides derivitized at the 3′ position with other than a “free” hydroxyl group. For example, 3′-O-acetyl oligonucleotides are representative of a preferred class of blocker molecule.

[0254] Additionally, polymerase-mediated decomposition of the blocker oligonucleotides should be precluded. Preferably, such preclusion comprises either use of a polymerase lacking 5′-3′ exonuclease activity, or use of modified blocker oligonucleotides having, for example, thioate bridges at the 5′-terminii thereof that render the blocker molecule nuclease-resistant. Particular applications may not require such 5′ modifications of the blocker. For example, if the blocker- and primer-binding sites overlap, thereby precluding binding of the primer (e.g., with excess blocker), degradation of the blocker oligonucleotide will be substantially precluded. This is because the polymerase will not extend the primer toward, and through (in the 5′-3′ direction) the blocker—a process that normally results in degradation of the hybridized blocker oligonucleotide.

[0255] A particularly preferred blocker/PCR embodiment, for purposes of the present invention and as implemented herein, comprises the use of peptide nucleic acid (PNA) oligomers as blocking oligonucleotides. Such PNA blocker oligomers are ideally suited, because they are neither decomposed nor extended by the polymerase.

[0256] Preferably, therefore, the base sequence of said blocking oligonucleotides is required to comprise a sequence having a length of at least 9 nucleotides which hybridizes to a treated nucleic acid sequence according to one of SEQ ID NOS:304 to SEQ ID NO:535 and sequences complementary thereto, wherein the base sequence of said oligonucleotides comprises at least one CpG, TpG or CpA dinucleotide.

[0257] In a further preferred embodiment of the method, the blocking oligonucleotides are selected from the group consisting of SEQ ID NOS:2114, 2119, 2124, 2125, 2127, 2132, 2133, 2135, 2137, 2138, 2139, 2140, 2141, 2142, 2143, 2144, 2146, 2147, 2148, 2149, 2150, 2151, 2152, 2153, 2154, 2155, 2156, 2157, 2158, 2159, 2160, 2031, 2082, 2087, 2089, 2094, 2095, 2096, 2097, 2099, 2107, 1980, 2018, 2022, 2023, 2026, 1939, 1966, 1973, 1974, 1975, 1926, 1930, 1931, 1932, 1933, 1934, 1903, 1917, 1921, 1834, 1896, 1805, 1819, 1821, 1823, 1824, 1825, 1826, 1827, 1828, 1829, 1770, 1782, 1785, 1786, 1788, 1789, 1790, 1792, 1795, 1796, 1797, 1798, 1799, 1800, 1748, 1759, 1760, 1761, 1762, 1763, 1764, 1765, 1724, 1741, 1597, 1609, 1610, 1611, 1612, 1613, 1614, 1615, 1616, 1617, 1618, 1619, 1620, 1621, 1622, 1623, 1624, 1625, 1626, 1627, 1628, 1629, 1630, 1631, 1633, 1634, 1635, 1636, 1637, 1638, 1639, 1640, 1641, 1642, 1643, 1644, 1645, 1646, 1647, 1648, 1649, 1650, 1651, 1652, 1653, 1654, 1655, 1656, 1657, 1658, 1659, 1660, 1661, 1662, 1663, 1668, 1684, 1685, 1686, 1687, 1688, 1689, 1690, 1691, 1692, 1693, 1694, 1695, 1696, 1697, 1698, 1699, 1700, 1701, 1706, 1712, 1713, 1715, 1716, 1717, 1718, 1719, 1571, 1579, 1581, 1584, 1585, 1586, 1587, 1588, 1591, 1592, 1537, 1555, 1556, 1557, 1558, 1559, 1560, 1561, 1562, 1563, 1564, 1565, 1566, 1452, 1455, 1456, 1457, 1458, 1463, 1514, 1515, 1516, 1517, 1518, 1519, 1524, 1525, 1526, 1527, 1528, 1529, 1531, 1532, 1372, 1423, 1424, 1425, 1427, 1432, 1433, 1434, 1435, 1436, 1437, 1440, 1441, 1442, 1443, 1444, 1445, 1446, 1447, 1343, 1358, 1359, 1360, 1361, 1362, 1363, 1364, 1365, 1366, 1367, 1310, 1315, 1316, 1317, 1318, 1319, 1320, 1321, 1322, 1324, 1325, 1327, 1328, 1330, 1332, 1334, 1337, 1338, 1276, 1290, 1305, 1203, 1228, 1238, 1239, 1240, 1247, 1248, 1255, 1256, 1265, 1268, 1269, 1164, 1171, 1172, 1173, 1174, 1176, 1177, 1178, 1179, 1180, 1181, 1182, 1183, 1184, 1185, 1186, 1187, 1188, 1189, 1190, 1191, 1192, 1193, 1194, 1195, 1196, 1197, 1198, 2725, 2748, 2749, 2750, 2710, 2717, 2718, 2719, 2720, 2721, 2684, 2699, 2703, 2704, 2705, 2706, 2658, 2662, 2679, 2603, 2613, 2617, 2585, 2594, 2595, 2596, 2597, 2598, 2599, 2489, 2497, 2498, 2499, 2500, 2501, 2504, 2505, 2507, 2508, 2510, 2511, 2512, 2513, 2514, 2515, 2519, 2520, 2521, 2522, 2525, 2526, 2527, 2528, 2529, 2530, 2531, 2532, 2534, 2535, 2536, 2537, 2539, 2540, 2541, 2542, 2543, 2544, 2545, 2546, 2547, 2550, 2551, 2552, 2553, 2554, 2558, 2563, 2564, 2572, 2580, 2581, 2472, 2482, 2484, 2408, 2464, 2465, 2466, 2467, 2468, 2339, 2349, 2367, 2370, 2372, 2373, 2374, 2375, 2376, 2377, 2378, 2379, 2380, 2382, 2386, 2387, 2389, 2393, 2394, 2395, 2396, 2397, 2398, 2402, 2403, 2404, 2327, 2333, 2334, 2335, 2305, 2315, 2318, 2260, 2268, 2270, 2271, 2272, 2273, 2274, 2275, 2276, 2277, 2278, 2279, 2280, 2281, 2282, 2283, 2284, 2285, 2286, 2287, 2288, 2289, 2290, 2291, 2292, 2293, 2294, 2295, 2296, 2297, 2298, 2299, 2300, 2301, 2232, 2245, 2246, 2248, 2249, 2250, 2251, 2252, 2254, 2255, 2256, 2210, 2218, 2219, 2221, 2222, 2223, 2227, 2228, 2202, 2204, 2205, 2206, 2164, 2180, 2183, 2187, 2188, 2189, 2190, 2191, 2192, 2193, 2194, 2195, 2196, 2197 and 2198.

[0258] The fragments obtained by means of the amplification can carry a directly or indirectly detectable label. Preferred are labels in the form of fluorescence labels, radionuclides, or detachable molecule fragments having a typical mass which can be detected in a mass spectrometer. Where said labels are mass labels, it is preferred that the labeled amplificates have a single positive or negative net charge, allowing for better detectability in the mass spectrometer. The detection may be carried out and visualized by means of, e.g., matrix assisted laser desorption/ionization mass spectrometry (MALDI) or using electron spray mass spectrometry (ESI).

[0259] Matrix Assisted Laser Desorption/Ionization Mass Spectrometry (MALDI-TOF) is a very efficient development for the analysis of biomolecules (Karas & Hillenkamp, Anal Chem., 60:2299-301, 1988). An analyte is embedded in a light-absorbing matrix. The matrix is: evaporated by a short laser pulse thus transporting the analyte molecule into the vapour phase in an unfragmented manner. The analyte is ionized by collisions with matrix molecules. An applied voltage accelerates the ions into a field-free flight tube. Due to their different masses, the ions are accelerated at different rates. Smaller ions reach the detector sooner than bigger ones. MALDI-TOF spectrometry is well suited to the analysis of peptides and proteins. The analysis of nucleic acids is somewhat more difficult (Gut & Beck, Current Innovations and Future Trends, 1:147-57, 1995). The sensitivity with respect to nucleic acid analysis is approximately 100-times less than for peptides, and decreases disproportionally with increasing fragment size. Moreover, for nucleic acids having a multiply negatively charged backbone, the ionization process via the matrix is considerably less efficient. In MALDI-TOF spectrometry, the selection of the matrix plays an eminently important role. For desorption of peptides, several very efficient matrixes have been found which produce a very fine crystallisation. There are now several responsive matrixes for DNA, however, the difference in sensitivity between peptides and nucleic acids has not been reduced. This difference in sensitivity can be reduced, however, by chemically modifying the DNA in such a manner that it becomes more similar to a peptide. For example, phosphorothioate nucleic acids, in which the usual phosphates of the backbone are substituted with thiophosphates, can be converted into a charge-neutral DNA using simple alkylation chemistry (Gut & Beck, Nucleic Acids Res. 23: 1367-73, 1995). The coupling of a charge tag to this modified DNA results in an increase in MALDI-TOF sensitivity to the same level as that found for peptides. A further advantage of charge tagging is the increased stability of the analysis against impurities, which makes the detection of unmodified substrates considerably more difficult.

[0260] In the fourth step of the method, the amplificates obtained during the third step of the method are analysed in order to ascertain the methylation status of the CpG dinucleotides prior to the treatment.

[0261] In embodiments where the amplificates were obtained by means of MSP amplification, the presence or absence of an amplificate is in itself indicative of the methylation state of the CpG positions covered by the primer, according to the base sequences of said primer.

[0262] Amplificates obtained by means of both standard and methylation specific PCR may be further analyzed by means of hybridization-based methods such as, but not limited to, array technology and probe based technologies as well as by means of techniques such as sequencing and template directed extension.

[0263] In one embodiment of the method, the amplificates synthesised in step three are subsequently hybridized to an array or a set of oligonucleotides and/or PNA probes. In this context, the hybridization takes place in the following manner: the set of probes used during the hybridization is preferably composed of at least 2 oligonucleotides or PNA-oligomers; in the process, the amplificates serve as probes which hybridize to oligonucleotides previously bonded to a solid phase; the non-hybridized fragments are subsequently removed; said oligonucleotides contain at least one base sequence having a length of at least 9 nucleotides which is reverse complementary or identical to a segment of the base sequences specified in the present Sequence Listing; and the segment comprises at least one CpG, TpG or CpA dinucleotide.

[0264] In a preferred embodiment, said dinucleotide is present in the central third of the oligomer. For example, wherein the oligomer comprises one CpG dinucleotide, said dinucleotide is preferably the fifth to ninth nucleotide from the 5′-end of a 13-mer. One oligonucleotide exists for the analysis of each CpG dinucleotide within the sequence according to SEQ ID NOS:1 to SEQ ID NO:64, and the equivalent positions within SEQ ID NOS:304 to SEQ ID NO:535. Said oligonucleotides may also be present in the form of peptide nucleic acids. The non-hybridized amplificates are then removed. The hybridized amplificates are then detected. In this context, it is preferred that labels attached to the amplificates are identifiable at each position of the solid phase at which an oligonucleotide sequence is located.

[0265] In yet a further embodiment of the method, the genomic methylation status of the CpG positions may be ascertained by means of oligonucleotide probes that are hybridised to the bisulfite treated DNA concurrently with the PCR amplification primers (wherein said primers may either be methylation specific or standard).

[0266] A particularly preferred embodiment of this method is the use of fluorescence-based Real Time Quantitative PCR (Heid et al., Genome Res. 6:986-994, 1996; also see U.S. Pat. No. 6,331,393) employing a dual-labeled fluorescent oligonucleotide probe (TaqMan™ PCR, using an ABI Prism 7700 Sequence Detection System, Perkin Elmer Applied Biosystems, Foster City, Calif.). The TaqMan™ PCR reaction employs the use of a nonextendible interrogating oligonucleotide, called a TaqMan™ probe, which, in preferred embodiments, is designed to hybridize to a GpC-rich sequence located between the forward and reverse amplification primers. The TaqMan™ probe further comprises a fluorescent “reporter moiety” and a “quencher moiety” covalently bound to linker moieties (e.g., phosphoramidites) attached to the nucleotides of the TaqMan™ oligonucleotide. For analysis of methylation within nucleic acids subsequent to bisulfite treatment, it is required that the probe be methylation specific, as described in U.S. Pat. No. 6,331,393, (hereby incorporated by reference in its entirety) also known as the MethylLight™ assay. Variations on the TaqMan™ detection methodology that are also suitable for use with the described invention include the use of dual-probe technology (Lightcycler™ or fluorescent amplification primers (Sunrise™ technology). Both these techniques may be adapted in a manner suitable for use with bisulfite treated DNA, and moreover for methylation analysis within CpG dinucleotides.

[0267] A further suitable method for the use of probe oligonucleotides for the assessment of methylation by analysis of bisulfite treated nucleic acids In a further preferred embodiment of the method, the fifth step of the method comprises the use of template-directed oligonucleotide extension, such as MS-SNuPE as described by Gonzalgo & Jones, Nucleic Acids Res. 25:2529-2531, 1997.

[0268] In yet a further embodiment of the method, the fifth step of the method comprises sequencing and subsequent sequence analysis of the amplificate generated in the third step of the method (Sanger F., et al., Proc Natl Acad Sci USA 74:5463-5467, 1977).

### Best Mode

[0269] In the most preferred embodiment of the method the genomic nucleic acids are isolated and treated according to the first three steps of the method outlined above, namely:

[0270] a) obtaining, from a subject, a biological sample having subject genomic DNA;

[0271] b) extracting or otherwise isolating the genomic DNA;

[0272] c) treating the genomic DNA of b), or a fragment thereof, with one or more reagents to convert cytosine bases that are unmethylated in the 5-position thereof to uracil or to another base that is detectably dissimilar to cytosine in terms of hybridization properties; and wherein

[0273] d) amplifying subsequent to treatment in c) is carried out in a methylation specific manner, namely by use of methylation specific primers or blocking oligonucleotides, and further wherein

[0274] e) detecting of the amplificates is carried out by means of a real-time detection probe, as described above.

[0275] Preferably, where the subsequent amplification of d) is carried out by means of methylation specific primers, as described above, said methylation specific primers comprise a sequence having a length of at least 9 nucleotides which hybridizes to a treated nucleic acid sequence according to one of SEQ ID NOS:304 to SEQ ID NO:535 and sequences complementary thereto, wherein the base sequence of said oligomers comprises at least one CpG dinucleotide.

[0276] In a further preferred embodiment of the method, the MSP primers are selected from the group consisting of SEQ ID NOS:2754, 2757, 2759, 2767, 2768, 2772, 2776, 2779, 2784, 2785, 2786, 2789, 2791, 2792, 2794, 2797, 2798, 2801, 2805, 2806, 2809, 2811, 2815, 2817, 2824, 2830, 2832, 2833, 2834, 2838, 2840, 2843, 2846, 2850, 2851, 2853, 2855, 2859, 2866, 2867, 2870, 2871, 2876, 2878, 2881, 2885, 2886, 2892, 2893, 2895, 2896, 2898, 2904, 2912, 2915; 2917, 2919, 2922, 2923, 2929, 2931, 2939, 2941, 2944, 2946, 2948, 2950, 2955, 2956, 2957, 2960, 2962, 2965, 2966, 2967, 2968, 2969, 2971, 2975, 2976, 2977, 2978, 2979, 2980, 2981, 2984, 2988, 2989, 2990, 2992, 2994, 2997, 2999, 3001, 3002, 3004, 3006, 3007, 3008, 3010, 3013, 3014, 3616, 3017, 3018, 3020, 3022, 3025, 2752, 2755, 2760, 2762, 2763, 2764, 2765, 2769, 2771, 2773, 2775, 2777, 2780, 2781, 2782, 2783, 2787, 2788, 2790, 2793, 2795, 2796, 2800, 2802, 2803, 2804, 2808, 2810, 2812, 2814, 2816, 2818, 2820, 2821, 2823, 2825, 2827, 2828, 2829, 2831, 2835, 2836, 2837, 2839, 2841, 2842, 2844, 2845, 2847, 2849, 2852, 2854, 2856, 2858, 2860, 2861, 2862, 2863, 2864, 2865, 2868, 2869, 2872, 2873, 2874, 2875, 2877, 2879, 2880, 2882, 2883, 2884, 2887, 2888, 2889, 2890, 2891, 2894, 2897, 2899, 2901, 2902, 2903, 2905, 2907, 2909, 2911, 2914, 2916, 2918, 2920, 2924, 2926, 2927, 2928, 2930, 2932, 2933, 2934, 2935, 2936, 2937, 2938, 2942, 2945, 2947, 2949, 2951, 2953, 2954, 2958, 2959, 2961, 2963, 2970, 2972, 2973, 2974, 2982, 2985, 2987, 2991, 2993, 2995, 2996, 2998, 3000, 3003, 3005, 3011, 3019, 3021, 3023, 3026, 3027, 3028, 3032, 3033, 3036, 3037, 3038, 3039, 3041, 3042, 3043, 3044, 3047, 3048, 3049, 3052, 3055, 3059, 3061, 3064, 3065, 3068, 3069, 3071, 3072, 3075, 3076, 3080, 3083, 3084, 3085, 3086, 3091, 3093, 3096, 3097, 3100, 3104, 3109, 3110, 3113, 3115, 3117, 3118, 3123, 3126, 3127, 3130, 3134, 3135, 3136, 3138, 3139, 3144, 3146, 3147, 3149, 3150, 3155, 3029, 3031, 3034, 3040, 3045, 3050, 3051, 3053, 3054, 3056, 3057, 3060, 3063, 3066, 3073, 3078, 3081, 3088, 3089, 3090, 3092, 3094, 3098, 3101, 3103, 3105, 3107, 3108, 3111, 3114, 3116, 3119, 3121, 3122, 3124, 3128, 3131, 3133, 3137, 3140, 3142, 3145, 3148, 3151, 3152, 3153, 3157, 3159, 3165, 3166, 3167, 3170, 3171, 3172, 3174, 3175, 3176, 3179, 3180, 3181, 3184, 3185, 3186, 3192, 3194, 3198, 3201, 3202, 3203, 3204, 3206, 3209, 3212, 3213, 3215, 3216, 3217, 3218, 3221, 3224, 3226, 3228, 3229, 3230, 3232, 3233, 3234, 3235, 3237, 3238, 3239, 3245, 3247, 3248, 3249, 3160, 3162, 3163, 3164, 3168, 3169, 3173, 3178, 3182, 3183, 3187, 3189, 3190, 3195, 3196, 3197, 3199, 3205, 3207, 3210, 3214, 3219, 3222, 3223, 3225, 3227, 3236, 3240, 3242, 3243, 3244, 3246, 3250, 3252, 3256, 3261, 3264, 3268, 3269, 3270, 3273, 3275, 3279, 3280, 3281, 3282, 3283, 3284, 3285, 3286, 3290, 3292, 3295, 3297, 3301, 3304, 3305, 3306, 3307, 3308, 3310, 3311, 3312, 3315, 3319, 3320, 3324, 3327, 3331, 3333, 3334, 3339, 3348, 3351, 3354, 3358, 3360, 3364, 3367, 3368, 3374, 3376, 3253, 3255, 3257, 3259, 3260, 3262, 3265, 3266, 3267, 3271, 3274, 3276, 3278, 3287, 3289, 3291, 3293, 3298, 3300, 33302, 3309, 3313, 3314, 3316, 3318, 3321, 3322, 3325, 3328, 3330, 3332, 3335, 3337, 3338, 3340, 3342, 3343, 3344, 3345, 3346, 3347, 3349, 3350, 3352, 3353, 3355, 3356, 3357, 3359, 3361, 3363, 3365, 3369, 3371, 3372, 3373, 3377, 3380, 3383, 3386, 3388, 3389, 3390, 3391, 3392, 3395, 3396, 3400, 3401, 3403, 3406, 3408, 3413, 3414, 3417, 3420, 3423, 3428, 3432, 3433, 3434, 3436, 3439, 3440, 3442, 3443, 3445, 3447, 3453, 3455, 3458, 3463, 3466, 3469, 3470, 3471, 3472, 3473, 3474, 3475, 3477, 3478, 3480, 3481, 3483, 3484, 3487, 3490, 3494, 3495, 3496, 3497, 3499, 3500, 3504, 3505, 3508, 3512, 3514, 3515, 3516, 3521, 3525, 3529, 3533, 3534, 3537, 3538, 3540, 3541, 3542, 3543, 3544, 3547, 3548, 3553, 3557, 3558, 3559, 3560, 3562, 3563, 3566, 3571, 3574, 3575, 3577, 3580, 3583, 3584, 3585, 3586, 3592, 3594, 3595, 3597, 3598, 3599, 3601, 3603, 3604, 3607, 3608, 3612, 3619, 3621, 3622, 3626, 3631, 3632, 3637, 3638, 3639, 3640, 3642, 3643, 3644, 3646, 3647, 3649, 3650, 3652, 3656, 3657, 3660, 3663, 3668, 3670, 3673, 3676, 3677, 3678, 3683, 3688, 3690, 3694, 3697, 3700, 3702, 3703, 3704, 3708, 3404, 3409, 3411, 3415, 3418, 3419, 3421, 3424, 3426, 3427, 3429, 3431, 3435, 3437, 3438, 3441, 3444, 3446, 3448, 3450, 3452, 3454, 3456, 3459, 3461, 3462, 3464, 3467, 3476, 3479, 3482, 3485, 3488, 3489, 3491, 3492, 3493, 3501, 3503, 3506, 3509, 3510, 3511, 3513, 3517, 3518, 3519, 3520, 3522, 3524, 3526, 3527, 3528, 3530, 3531, 3535, 3536, 3545, 3549, 3551, 3552, 3554, 3555, 3556, 3561, 3564, 3565, 3568, 3569, 3570, 3573, 3576, 3578, 3581, 3587, 3588, 3589, 3590, 3591, 3593, 3596, 3600, 3602, 3605, 3606, 3609, 3611, 3613, 3614, 3615, 3616, 3617, 3618, 3623, 3624, 3625, 3627, 3629, 3630, 3633, 3634, 3635, 3636, 3641, 3645, 3651, 3653, 3654, 3655, 3658, 3661, 3662, 3665, 3666, 3667, 3669, 3671, 3674, 3679, 3681, 3684, 3686, 3689, 3691, 3692, 3693, 3695, 3696, 3698, 3701, 3705, 3706, 3707, 3709, 3710, 3714, 3715, 3717, 3718, 3722, 3723, 3729, 3730, 3732, 3735, 3739, 3740, 3741, 3743, 3744, 3745, 3746, 3749, 3753, 3754, 3755, 3756, 3711, 3713, 3719, 3721, 3724, 3725, 3726, 3727, 3728, 3731, 3733, 3736, 3737, 3738, 3742, 3747, 3748, 3750, 3752, 3757, 3758, 3759, 3760, 3761, 3764, 3767, 3771, 3773, 3775, 3776, 3777, 3781, 3785, 3786, 3787, 3790, 3791, 3793, 3796, 3797, 3798, 3799, 3805, 3809, 3814, 3817, 3818, 3822, 3823, 3828, 3833, 3836, 3844, 3847, 3850, 3851, 3853, 3856, 3857, 3862, 3873, 3876, 3877, 3880, 3885, 3887, 3889, 3890, 3892, 3893, 3895, 3896, 3899, 3902, 3903, 3905, 3906, 3907, 3908, 3916, 3923, 3926, 3927, 3930, 3935, 3936, 3938, 3939, 3940, 3944, 3945, 3949, 3950, 3951, 3954, 3955, 3957, 3960, 3965, 3970, 3971, 3978, 3979, 3982, 3983, 3984, 3985, 3762, 3765, 3768, 3770, 3772, 3774, 3778, 3779, 3780, 3782, 3784, 3788, 3792, 3794, 3800, 3801, 3802, 3803, 3804, 3806, 3807, 3808, 3810, 3812, 3813, 3815, 3819, 3820, 3821, 3824, 3826, 3827, 3829, 3831, 3832, 3834, 3837, 3838, 3839, 3840, 3842, 3845, 3848, 3852, 3854, 3858, 3860, 3861, 3863, 3864, 3865, 3866, 3867, 3868, 3869, 3870, 3871, 3872, 3874, 3875, 3878, 3881, 3883, 3884, 3886, 3888, 3891, 3894, 3897, 3898, 3900, 3901, 3904, 3909, 3911, 3914, 3915, 3917, 3919, 3920, 3921, 3922, 3924, 3928, 3931, 3933, 3934, 3937, 3941, 3942, 3943, 3947, 3948, 3952, 3958, 3959, 3961, 3962, 3963, 3964, 3966, 3968, 3972, 3974, 3975, 3976, 3980, 3981, 3986, 3987, 3990, 3993, 3994, 3997, 4000, 4003, 4004, 4006, 4012, 4015, 4017, 4020, 4024, 4027, 4029, 4031, 4032, 4033, 4037, 4038, 4040, 4042, 4047, 4048, 4050, 4051, 4052, 4054, 4055, 4058, 4063, 4066, 4069, 4070, 4072, 4073, 4076, 4078, 4079, 4082, 4083, 4084, 4085, 4086, 4090, 4093, 4094, 4095, 4096, 4099, 4100, 4104, 4106, 4113, 4116, 4119, 4120, 4124, 4127, 4130, 4134, 4135, 4136, 4138, 4142, 4145, 4146, 4149, 4150, 4152, 4153, 4159, 4160, 4161, 4163, 4168, 4169, 4171, 4173, 4176, 4180, 4181, 4185, 4189, 4191, 4192, 4194, 4197, 4198, 4199, 4201, 4206, 4207, 4208, 4213, 4219, 4220, 4223, 4224, 4225, 4228, 4231, 4232, 4233, 4237, 4238, 4242, 4243, 4246, 4247, 4251, 4254, 4255, 4256, 4258, 3988, 3991, 3995, 3998, 4001, 4005, 4007, 4009, 4010, 4011, 4013, 4016, 4018, 4019, 4021, 4022, 4023, 4025, 4028, 4034, 4035, 4039, 4043, 4045, 4046, 4049, 4056, 4059, 4061, 4064, 4065, 4067, 4068, 4071, 4074, 4075, 4077, 4080, 4087, 4088, 4089, 4092, 4098, 4101, 4102, 4105, 4108, 4109, 4110, 4111, 4112, 4114, 4115, 4117, 4121, 4122, 4123, 4125, 4128, 4129, 4131, 4132, 4133, 4137, 4139, 4141, 4144, 4148, 4151, 4154, 4156, 4157, 4162, 4165, 4166, 4167, 4170, 4172, 4174, 4177, 4179, 4182, 4184, 4186, 4188, 4190, 4195, 4196, 4202, 4204, 4205, 4209, 4211, 4214, 4216, 4217, 4218, 4221, 4226, 4229, 4234, 4236, 4239, 4241, 4244, 4245, 4248, 4249, 4252, 4257, 4259, 4260, 4261, 4262, 4266, 4267, 4268, 4271, 4272, 4275, 4276, 4279, 4281, 4282, 4284, 4285, 4287, 4289, 4290, 4292, 4295, 4297, 4299, 4301, 4306, 4310, 4316, 4317, 4318, 4321, 4323, 4325, 4328, 4334, 4335, 4337, 4341, 4342, 4343, 4344, 4348, 4350, 4351, 4352, 4354, 4357, 4358, 4359, 4364, 4365, 4366, 4370, 4371, 4372, 4373, 4376, 4378, 4381, 4383, 4384, 4386, 4388, 4396, 4397, 4399, 4400, 4403, 4405, 4407, 4409, 4412, 4415, 4416, 4417, 4424, 4426, 4429, 4433, 4435, 4437, 4442, 4443, 4447, 4450, 4451, 4452, 4455, 4457, 4460, 4461, 4462, 4465, 4466, 4463, 4470, 4474, 4478, 4481, 4484, 4488, 4491, 4494, 4495, 4497, 4498, 4504, 4506, 4509, 4510, 4511, 4514, 4516, 4518, 4520, 4521, 4523, 4525, 4528, 4530, 4533, 4534, 4535, 4538, 4540, 4542, 4545, 4547, 4548, 4553, 4554, 4555, 4556, 4557, 4562, 4564, 4567, 4568, 4569, 4579, 4580, 4582, 4584, 4587, 4589, 4593, 4596, 4597, 4598, 4600, 4601, 4602, 4605, 4606, 4607, 4609, 4610, 4613, 4614, 4616, 4618, 4621, 4624, 4626, 4627, 4628, 4631, 4632, 4636, 4639, 4641, 4644, 4645, 4648, 4263, 4265, 4269, 4270, 4273, 4274, 4277, 4280, 4283, 4286, 4288, 4291, 4293, 4296, 4298, 4300, 4302, 4303, 4304, 4305, 4307, 4308, 4309, 4311, 4313, 4315, 4319, 4322, 4324, 4326, 4327, 4330, 4331, 4332, 4333, 4336, 4338, 4340, 4345, 4347, 4349, 4353, 4355, 4360, 4361, 4362, 4367, 4368, 4369, 4374, 4375, 4377, 4379, 4382, 4385, 4387, 4389, 4390, 4391, 4392, 4393, 4394, 4395, 4398, 4401, 4406, 4408, 4410, 4411, 4413, 4418, 4420, 4422, 4423, 4425, 4427, 4428, 4430, 4432, 4434, 4436, 4438, 4440, 4441, 4444, 4446, 4448, 4453, 4454, 4456, 4458, 4463, 4464, 4467, 4471, 4472, 4473, 4475, 4476, 4477, 4479, 4480, 4482, 4485, 4486, 4487, 4489, 4490, 4492, 4496, 4499, 4501, 4502, 4503, 4505, 4507, 4508, 4512, 4515, 4517, 4519, 4522, 4524, 4529, 4531, 4536, 4537, 4539, 4541, 4543, 4546, 4549, 4551, 4558, 4559, 4560, 4561, 4563, 4565, 4570, 4571, 4572, 4573, 4574, 4575, 4576, 4578, 4581, 4583, 4585, 4586, 4588, 4590, 4592, 4595, 4599, 4603, 4611, 4612, 4615, 4617, 4619, 4620, 4622, 4630, 4633, 4634, 4635, 4638, 4640, 4642, 4643, 4646, 4647, 4649, 4652, 4655, 4659, 4661, 4663, 4664, 4665, 4668, 4671, 4674, 4675, 4676, 4678, 4680, 4683, 4686, 4690, 4696, 4700, 4703, 4704, 4706, 4709, 4711, 4714, 4715, 4717, 4718, 4719, 4720, 4721, 4726, 4727, 4730, 4732, 4738, 4742, 4745, 4749, 4750, 4753, 4755, 4759, 4763, 4768, 4769, 4772, 4773, 4776, 4778, 4779, 4782, 4784, 4789, 4790, 4794, 4797, 4801, 4805, 4807, 4813, 4814, 4819, 4821, 4822, 4827, 4829, 4833, 4834, 4835, 4837, 4838, 4841, 4842, 4843, 4844, 4847, 4849, 4850, 4852, 4853, 4859, 4860, 4861, 4865, 4867, 4868, 4869, 4870, 4873, 4876, 4877, 4878, 4879, 4883, 4885, 4889, 4891, 4892, 4894, 4895, 4897, 4898, 4903, 4906, 4911, 4912, 4918, 4919, 4920, 4924, 4927, 4929, 4932, 4934, 4941, 4942, 4945, 4948, 4949, 4950, 4650, 4653, 4656, 4658, 4660, 4662, 4666, 4667, 4669, 4670, 4672, 4677, 4681, 4684, 4685, 4687, 4688, 4689, 4691, 4693, 4694, 4695, 4697, 4699, 4701, 4702, 4705, 4707, 4708, 4716, 4722, 4724, 4728, 4731, 4733, 4735, 4736, 4737, 4739, 4741, 4744, 4746, 4748, 4751, 4754, 4756, 4758, 4760, 4761, 4764, 4766, 4767, 4770, 4771, 4774, 4777, 4780, 4783, 4785, 4786, 4787, 4788, 4791, 4792, 4793, 4795, 4798, 4800, 4802, 4804, 4806, 4808, 4810, 4811, 4812, 4815, 4816, 4817, 4818, 4820, 4823, 4824, 4825, 4828, 4830, 4832, 4836, 4839, 4840, 4845, 4846, 4848, 4851, 4854, 4855, 4856, 4857, 4858, 4862, 4864, 4871, 4872, 4874, 4875, 4881, 4882, 4884, 4886, 4887, 4890, 4893, 4896, 4899, 4900, 4901, 4902, 4904, 4905, 4907, 4908, 4909, 4910, 4913, 4915, 4917, 4921, 4922, 4923, 4925, 4926, 4928, 4930, 4935, 4936, 4937, 4938, 4940, 4943, 4944, 4946, 4947, 4951, 4952, 4953, 4954, 4956, 4957, 4960, 4963, 4967, 4970, 4971, 4972, 4976, 4977, 4985, 4986, 4987, 4989, 4991, 4992, 4997, 4999, 5002, 5003, 5004, 5006, 5010, 5013, 5014, 5015, 5017, 5018, 5019, 5020, 5021, 5024, 5025, 5027, 5031, 5032, 5033, 5037, 5040, 5041, 5042, 5043, 4958, 4961, 4964, 4966, 4968, 4969, 4973, 4974, 4975, 4978, 4979, 4980, 4981, 4982, 4983, 4984, 4988, 4990, 4993, 4995, 4996, 4998, 5000, 5005; 5007, 5009, 5011, 5016, 5022, 5026, 5028, 5030, 5034, 5036, 5038, 5039, 5044, 5047, 5049, 5050, 5052, 5054, 5055, 5057, 5060, 5061, 5064, 5045, 5048, 5051, 5053, 5056, 5058, 5062, 5065, 5066, 5069, 5073, 5077, 5080, 5083, 5087, 5093, 5096, 5099, 5100, 5103, 5104, 5106, 5111, 5116, 5119, 5120, 5125, 5128, 5132, 5134, 5135, 5137, 5139, 5140, 5142, 5144, 5148, 5149, 5150, 5155, 5157, 5158, 5160, 5166, 5168, 5170, 5171, 5173, 5176, 5177, 5179, 5184, 5187, 5188, 5190, 5193, 5195, 5198, 5201, 5204, 5208, 5211, 5215, 5216, 5217, 5220, 5221, 5222, 5224, 5226, 5229, 5230, 5231, 5232, 5234, 5237, 5242, 5244, 5245, 5246, 5247, 5249, 5250, 5252, 5254, 5255, 5256, 5261, 5262, 5264, 5265, 5273, 5274, 5276, 5278, 5279, 5281, 5284, 5285, 5286, 5287, 5288, 5289, 5292, 5296, 5300, 5303, 5304, 5307, 5308, 5309, 5313, 5315, 5317, 5318, 5322, 5323, 5326, 5329, 5330, 5333, 5336, 5337, 5341, 5343, 5348, 5349, 5352, 5354, 5355, 5358, 5359, 5361, 5362, 5363, 5364, 5365, 5367, 5369, 5370, 5372, 5375, 5377, 5379, 5382, 5385, 5387, 5393, 5394, 5395, 5398, 5400, 5404, 5407, 5408, 5409, 5412, 5413, 5414, 5416, 5418, 5421, 5424, 5426, 5428, 5431, 5432, 5433, 5434, 5435, 5437, 5440, 5441, 5443, 5448, 5450, 5451, 5454, 5455, 5458, 5460, 5461, 5464, 5468, 5470, 5471, 5474, 5475, 5477, 5482, 5484, 5485, 5487, 5490, 5491, 5492, 5494, 5496, 5498, 5499, 5500, 5501, 5502, 5503, 5504, 5506, 5509, 5510, 5512, 5516, 5517, 5518, 5524, 5525, 5526, 5528, 5531, 5533, 5534, 5535, 5536, 5537, 5540, 5542, 5544, 5545, 5546, 5549, 5550, 5552, 5553, 5559, 5561, 5566, 5569, 5572, 5573, 5575, 5577, 5578, 5579, 5580, 5581, 5582, 5588, 5593, 5595, 5596, 5598, 5600, 5601, 5603, 5604, 5605, 5608, 5614, 5615, 5616, 5619, 5622, 5624, 5625, 5628, 5629, 5633, 5634, 5637, 5638, 5639, 5643, 5644, 5645, 5647, 5648, 5649, 5650, 5654, 5662, 5664, 5067, 5070, 5072, 5074, 5075, 5076, 5078, 5081, 5084, 5086, 5088, 5090, 5091, 5094, 5097, 5101, 5105, 5107, 5109, 5110, 5112, 5114, 5115, 5117, 5121, 5123, 5124, 5126, 5129, 5131, 5136, 5143, 5145, 5147, 5151, 5153, 5156, 5159, 5161, 5162, 5163, 5164, 5165, 5167, 5169, 5172, 5174, 5175, 5180, 5181, 5182, 5183, 5185, 5186, 5189, 5191, 5194, 5196, 5199, 5200, 5202, 5203, 5205, 5207, 5209, 5210, 5212, 5214, 5218, 5219, 5223, 5225, 5227, 5233, 5235, 5238, 5239, 5240, 5241, 5248, 5251, 5253, 5257, 5259, 5260, 5263, 5266, 5268, 5269, 5270, 5271, 5272, 5280, 5282, 5290, 5291, 5293, 5295, 5297, 5299, 5301, 5306, 5310, 5311, 5312, 5314, 5316, 5319, 5321, 5324, 5327, 5331, 5332, 5334, 5338, 5339, 5340, 5342, 5344, 5346, 5347, 5351, 5353, 5356, 5360, 5366, 5368, 5371, 5373, 5376, 5378, 5380, 5383, 5388, 5389, 5391, 5392, 5396, 5399, 5401, 5403, 5405, 5410, 5415, 5417, 5419, 5420, 5422, 5425, 5427, 5429, 5436, 5438, 5442, 5444, 5445, 5446, 5447, 5449, 5452, 5456, 5457, 5459, 5462, 5465, 5466, 5467, 5469, 5472, 5478, 5480, 5481, 5486, 5488, 5493, 5495, 5497, 5505, 5507, 5508, 5511, 5513, 5515, 5519, 5521, 5522, 5527, 5529, 5532, 5538, 5539, 5541, 5543, 5548, 5551, 5554, 5555, 5556, 5557, 5558, 5560, 5562, 5563, 5564, 5565, 5567, 5568, 5570, 5571, 5574, 5576, 5583, 5585, 5586, 5587, 5589, 5591, 5592, 5594, 5597, 5599, 5602, 5606, 5609, 5611, 5612, 5618, 5620, 5623, 5626, 5627, 5630, 5632, 5635, 5640, 5642, 5646, 5651, 5652, 5656, 5657, 5659, 5660, 5661, 5663, 5665, 5667, 5670, 5672, 5673, 5676, 5678, 5679, 5681, 5682, 5683, 5686, 5687, 5688, 5690, 5694, 5697, 5698, 5699, 5700, 5701, 5704, 5708, 5709, 5711, 5713, 5714, 5717, 5721, 5723, 5724, 5727, 5728, 5733, 5734, 5735, 5736, 5739, 5740, 5741, 5742, 5743, 5668, 5671, 5674, 5677, 5680, 5684, 5689, 5691, 5693, 5696, 5702, 5705, 5707, 5710, 5712, 5715, 5718, 5720, 5722, 5725, 5729, 5730, 5731, 5732, 5737, 5744, 5747, 5750, 5753, 5759, 5762, 5763, 5770, 5775, 5777, 5778, 5780, 5782, 5785, 5787, 5791, 5792, 5793, 5794, 5797, 5801, 5803, 5808, 5810, 5812, 5814, 5816, 5817, 5824, 5832, 5833, 5834, 5835, 5838, 5840, 5841, 5844, 5849, 5853, 5854, 5857, 5859, 5860, 5862, 5863, 5865, 5868, 5874, 5882, 5883, 5885, 5887, 5894, 5895, 5896, 5897, 5902, 5904, 5906, 5909, 5912, 5915, 5918, 5919, 5920, 5922, 5923, 5926, 5927, 5928, 5930, 5932, 5933, 5934, 5935, 5939, 5940, 5946, 5947, 5948, 5949, 5952, 5954, 5955, 5956, 5958, 5959, 5961, 5962, 5964, 5965, 5968, 5970, 5971, 5972, 5973, 5977, 5978, 5980, 5983, 5986, 5987, 5992, 5993, 5996, 5997, 6000, 6002, 6003, 6004, 6005, 6006, 6008, 6009, 6010, 6011, 6012, 6013, 6017, 6018, 6019, 6020, 6025, 6027, 6030, 6033, 6035, 6036, 6039, 6041, 6042, 6045, 6049, 6050, 6051, 6055, 6059, 6063, 6064, 6065, 6067, 6070, 6072, 6073, 6075, 6077, 6078, 6081, 5745, 5748, 5751, 5754, 5756, 5758, 5760, 5764, 5766, 5767, 5768, 5769, 5771, 5773, 5774, 5776, 5779, 5781, 5783, 5786, 5788, 5789, 5790, 5795, 5796, 5798, 5800, 5802, 5804, 5806, 5807, 5809, 5811, 5813, 5818, 5820, 5821, 5822, 5823, 5825, 5826, 5827, 5828, 5830, 5831, 5836, 5837, 5839, 5842, 5843, 5845, 5846, 5847, 5848, 5850, 5852, 5855, 5856, 5858, 5861, 5864, 5866, 5867, 5870, 5871, 5872, 5873, 5875, 5876, 5877, 5878, 5879, 5880, 5881, 5884, 5886, 5888, 5889, 5890, 5891, 5892, 5893, 5898, 5899, 5900, 5903, 5905, 5907, 5910, 5913, 5916, 5921, 5924, 5929, 5931, 5936, 5937, 5938, 5942, 5943, 5944, 5945, 5950, 5953, 5957, 5960, 5963, 5966, 5969, 5975, 5976, 5981, 5984, 5988, 5990, 5991, 5994, 5998, 5999, 6001, 6007, 6014, 6015, 6016, 6021, 6023, 6024, 6026, 6028, 6031, 6032, 6034, 6037, 6038, 6040, 6043, 6046, 6048, 6053, 6054, 6056, 6058, 6060, 6062, 6066, 6068, 6074, 6076, 6079, 6083, 6084, 6085, 6089, 6090, 6093, 6096, 6098, 6100, 6106, 6110, 6111, 6114, 6118, 6121, 6127, 6130, 6133, 6135, 6137, 6138, 6141, 6143, 6145, 6148, 6150, 6151, 6152, 6153, 6154, 6156, 6159, 6160, 6162, 6163, 6166, 6167, 6168, 6169, 6170, 6171, 6172, 6175, 6177, 6180, 6183, 6187, 6188, 6190, 6193, 6194, 6195, 6196, 6198, 6201, 6202, 6204, 6207, 6211, 6212, 6214, 6215, 6216, 6218, 6219, 6220, 6222, 6225, 6226, 6230, 6235, 6239, 6241, 6242, 6243, 6244, 6245, 6247, 6250, 6252, 6254, 6259, 6260, 6261, 6264, 6265, 6268, 6270, 6273, 6275, 6278, 6280, 6282, 6286, 6287, 6288, 6291, 6293, 6298, 6299, 6300, 6302, 6303, 6305, 6307, 6308, 6312, 6313, 6314, 6315, 6316, 6317, 6318, 6320, 6321, 6323, 6325, 6327, 6328, 6334, 6335, 6337, 6340, 6341, 6344, 6348, 6350, 6353, 6354, 6357, 6360, 6362, 6364, 6368, 6372, 6374, 6377, 6378, 6383, 6386, 6392, 6394, 6398, 6400, 6404, 6405, 6409, 6410, 6411, 6417, 6418, 6424, 6426, 6429, 6431, 6432, 6433, 6435, 6436, 6437, 6438, 6440, 6442, 6445, 6446, 6448, 6449, 6452, 6455, 6457, 6458, 6461, 6462, 6463, 6464, 6465, 6470, 6473, 6475, 6478, 6480, 6481, 6484, 6485, 6486, 6489, 6491, 6492, 6494, 6498, 6502, 6504, 6505, 6507, 6511, 6513, 6514, 6086, 6088, 6091, 6094, 6097, 6099, 6101, 6103, 6105, 6108, 6112, 6115, 6116, 6117, 6119, 6120, 6122, 6123, 6125, 6126, 6128, 6131, 6132, 6134, 6136, 6139, 6142, 6144, 6146, 6149, 6155, 6157, 6161, 6164, 6173, 6174, 6176, 6178, 6181, 6182, 6184, 6186, 6189, 6191, 6192, 6197, 6199, 6200, 6205, 6206, 6208, 6210, 6213, 6221, 6223, 6224, 6227, 6229, 6231, 6232, 6233, 6234, 6236, 6237, 6238, 6240, 6246, 6248, 6251, 6253, 6255, 6256, 6257, 6258, 6262, 6266, 6269, 6271, 6272, 6274, 6276, 6277, 6281, 6283, 6284, 6285, 6289, 6292, 6294, 6295, 6296, 6297, 6301, 6304, 6306, 6309, 6310, 6311, 6319, 6322, 6324, 6326, 6329, 6330, 6331, 6333, 6336, 6338, 6342, 6345, 6347, 6349, 6351, 6355, 6356, 6358, 6359, 6361, 6365, 6367, 6369, 6371, 6373, 6375, 6376, 6379, 6381, 6382, 6384, 6387, 6388, 6389, 6390, 6393, 6395, 6397, 6399, 6401, 6402, 6403, 6406, 6407, 6412, 6413, 6414, 6415, 6416, 6419, 6420, 6421, 6422, 6423, 6425, 6427, 6428, 6434, 6441, 6443, 6444, 6447, 6450, 6451, 6453, 6459, 6460, 6466, 6467, 6468, 6469, 6471, 6472, 6474, 6476, 6479, 6482, 6487, 6490, 6493, 6496, 6497, 6499, 6500, 6501, 6503, 6506, 6508, 6510, 6512, 6515, 6518, 6521, 6522, 6523, 6524, 6528, 6532, 6535, 6539, 6549, 6560, 6561, 6564, 6566, 6567, 6570, 6573, 6576, 6577, 6578, 6579, 6583, 6584, 6585, 6586, 6587, 6590, 6591, 6594, 6596, 6597, 6603, 6605, 6608, 6609, 6610, 6611, 6612, 6615, 6625, 6630, 6632, 6633, 6634, 6638, 6639, 6642, 6643, 6644, 6647, 6650, 6655, 6657, 6658, 6659, 6661, 6663, 6664, 6665, 6669, 6671, 6674, 6677, 6678, 6679, 6680, 6681, 6682, 6686, 6687, 6688, 6689, 6690, 6691, 6693, 6695, 6696, 6697, 6699, 6701, 6703, 6704, 6705, 6706, 6707, 6708, 6710, 6711, 6712, 6713, 6717, 6718, 6720, 6721, 6722, 6725, 6727, 6732, 6734, 6735, 6739, 6741, 6745, 6748, 6751, 6755, 6759, 6762, 6764, 6767, 6770, 6772, 6773, 6774, 6777, 6778, 6782, 6785, 6786, 6787, 6790, 6791, 6794, 6795, 6796, 6798, 6800, 6802, 6803, 6806, 6811, 6814, 6815, 6818, 6824, 6829, 6834, 6835, 6842, 6516, 6519, 6525, 6526, 6527, 6529, 6531, 6533, 6536, 6537, 6538, 6540, 6541, 6542, 6543, 6544, 6545, 6546, 6547, 6548, 6550, 6551, 6552, 6553, 6554, 6556, 6558, 6562, 6563, 6565, 6568, 6571, 6572, 6575, 6580, 6582, 6588, 6589, 6592, 6595, 6598, 6599, 6600, 6601, 6602, 6604, 6606, 6607, 6613, 6614, 6617, 6618, 6619, 6620, 6621, 6623, 6624, 6627, 6628, 6629, 6631, 6635, 6640, 6641, 6645, 6646, 6649, 6651, 6652, 6653, 6656, 6660, 6662, 6666, 6668, 6670, 6672, 6675, 6676, 6683, 6685, 6692, 6694, 6698, 6700, 6702, 6709, 6714, 6715, 6716, 6719, 6723, 6726, 6728, 6730, 6731, 6736, 6738, 6740, 6742, 6744, 6746, 6747, 6749, 6752, 6754, 6756, 6757, 6758, 6760, 6761, 6765, 6769, 6775, 6779, 6781, 6783, 6784, 6789, 6792, 6797, 6799, 6801, 6804, 6805, 6807, 6809, 6810, 6812, 6816, 6817, 6819, 6821, 6822, 6825, 6827, 6828, 6830, 6831, 6832, 6833, 6836, 6837, 6838, 6839, 6840, 6841, 6843,

[0277] Detection: 6517, 6520, 6530, 6534, 6555, 6557, 6559, 6569, 6574, 6581, 6593, 6616, 6622, 6626, 6636, 6637, 6648, 6654, 6667, 6673, 6684, 6724, 6729, 6733, 6737, 6743, 6750, 6753, 6763, 6766, 6768, 6771, 6776, 6780, 6788, 6793, 6808, 6813, 6820, 6823, 6826, 6844, 6848, 6850, 6852, 6854, 6857, 6859, 6861, 6862, 6865, 6868, 6870, 6871, 6872, 6874, 6875, 6876, 6880, 6883, 6886, 6887, 6888, 6890, 6891, 6894, 6896, 6897, 6898, 6899, 6900, 6901, 6902, 6904, 6905, 6906, 6910, 6912, 6917, 6920, 6845, 6847, 6849, 6851, 6853, 6855, 6858, 6860, 6863, 6866, 6869, 6873, 6877, 6879, 6881, 6882, 6884, 6889, 6892, 6893, 6895, 6907, 6908, 6909, 6911, 6913, 6915, 6916, 6918, 6921, 6924, 6927, 6928, 6933, 6935, 6937, 6939, 6940, 6943, 6946, 6947, 6948, 6949, 6951, 6953, 6954, 6955, 6959, 6961, 6964, 6965, 6968, 6969, 6972, 6973, 6976, 6979, 6980, 6922, 6925, 6929, 6930, 6931, 6932, 6934, 6936, 6942, 6944, 6945, 6950, 6952, 6956, 6957, 6958, 6960, 6962, 6963, 6966, 6967, 6970, 6971, 6974, 6975, 6977, 6981, 6983, 6986, 6992, 6995, 6998, 7002, 7006, 7013, 7017, 7022, 7024, 7027, 7030, 7032, 7036, 7037, 7040, 7050, 7052, 7055, 7056, 7058, 7059, 7060, 7064, 7067, 7072, 7074, 7076, 7077, 7084, 7085, 7086, 7087, 7088, 7089, 7090, 7091, 7096, 7097, 7100, 7102, 7109, 7110, 7113, 7114, 7115, 7118, 7121, 7123, 7124, 7131, 7133, 7135, 7136, 7138, 7139, 7140, 7144, 7146, 7148, 7149, 7158, 7159, 7160, 7163, 7165, 7166, 7168, 7172, 7175, 7178, 7180, 7181, 7183, 7185, 7186, 7187, 7192, 7194, 7199, 7202, 7203, 7204, 7205, 7207, 7208, 7213, 7214, 7216, 7220, 7221, 7227, 7228, 7230, 7233, 7235, 7237, 7239, 7243, 7245, 7246, 7248, 7249, 7251, 7255, 7256, 7260, 7263, 7264, 7265, 7266, 7268, 7269, 7272, 7276, 7277, 7278, 7279, 7280, 7281, 7283, 7284, 7287, 7291, 7295, 7299, 7302, 7303, 7306, 7309, 7310, 7311, 7314, 7315, 7320, 7321, 7324, 7325, 7329, 7331, 7332, 7334, 7336, 7339, 7340, 7341, 7344, 7350, 7353, 7355, 7358, 7360, 7362, 7372, 7374, 7375, 7378, 7381, 7385, 7387, 7390, 7391, 7392, 7394, 7397, 7401, 7402, 7405, 7410, 7413, 7415, 7416, 7417, 7420, 6984, 6987, 6989, 6990, 6991, 6993, 6996, 6999, 7001, 7003, 7005, 7007, 7009, 7010, 7011, 7012, 7014, 7016, 7018, 7020, 7023, 7025, 7026, 7028, 7029, 7031, 7033, 7034, 7035, 7038, 7039, 7041, 7042, 7043, 7044, 7045, 7046, 7047, 7048, 7049, 7051, 7053, 7054, 7057, 7061, 7062, 7063, 7065, 7066, 7068, 7070, 7071, 7073, 7075, 7078, 7080, 7081, 7082, 7083, 7092, 7093, 7094, 7095, 7098, 7101, 7103, 7105, 7106, 7107, 7108, 7111, 7112, 7116, 7119, 7122, 7125, 7126, 7127, 7128, 7129, 7130, 732, 7134, 7137, 7141, 7142, 7143, 7147, 7150, 7152, 7154, 7155, 7156, 7157, 7161, 7167, 7170, 7171, 7173, 7174, 7176, 7177, 7179, 7182, 7184, 7188, 7189, 7190, 7191, 7193, 7195, 7196, 7197, 7198, 7200, 7206, 7210, 7211, 7212, 7215, 7217, 7218, 7219, 7222, 7223, 7224, 7225, 7226, 7229, 7231, 7232, 7236, 7240, 7241, 7242, 7244, 7247, 7250, 7253, 7254, 7257, 7258, 7259, 7261, 7262, 7267, 7270, 7271, 7273, 7274, 7275, 7282, 7285, 7289, 7290, 7292, 7293, 7294, 7296, 7297, 7298, 7301, 7304, 7307, 7308, 7312, 7316, 7317, 7318, 7319, 7322, 7326, 7328, 7330, 7333, 7335, 7337, 7342, 7345, 7347, 7348, 7349, 7351, 7354, 7356, 7357, 7359, 7361, 7363, 7364, 7365, 7366, 7367, 7368, 7369, 7370, 7371, 7373, 7376, 7379, 7382, 7383, 7384, 7386, 7388, 7389, 7393, 7395, 7398, 7400, 7403, 7404, 7407, 7408, 7409, 7411, 7419, 7421, 7422, 7425, 7427, 7435, 7438, 7439, 7440, 7442, 7444, 7448, 7449, 7456, 7459, 7462, 7463, 7465, 7466, 7467, 7470, 7471, 7474, 7476, 7477, 7480, 7481, 7485, 7486, 7489, 7490, 7493, 7496, 7500, 7503, 7508, 7512, 7518, 7519, 7520, 7522, 7524, 7525, 7527, 7528, 7529, 7532, 7540, 7542, 7543, 7545, 7549, 7552, 7554, 7423, 7426, 7428, 7430, 7431, 7432, 7433, 7434, 7436, 7445, 7446, 7447, 7450, 7451, 7452, 7453, 7454, 7455, 7457, 7460, 7464, 7468, 7472, 7475, 7478, 7479, 7482, 7483, 7484, 7487, 7488, 7492, 7494, 7495, 7497, 7498, 7499, 7501, 7505, 7506, 7507, 7509, 7510, 7511, 7513, 7515, 7516, 7517, 7521, 7523, 7526, 7530, 7533, 7534, 7535, 7536, 7537, 7538, 7539, 7541, 7544, 7546, 7547, 7548, 7550, 7555, 7558, 7559, 7560, 7565, 7566, 7567, 7570, 7571, 7573, 7574, 7575, 7576, 7577, 7578, 7579, 7580, 7581, 7582, 7585, 7586, 7587, 7588, 7589, 7590, 7596, 7597, 7598, 7600, 7603, 7606, 7609, 7610, 7615, 7618, 7620, 7621, 7623, 7627, 7629, 7633, 7635, 7636, 7643, 7647, 7651, 7655, 7661, 7666, 7672, 7674, 7676, 7677, 7682, 7683, 7685, 7687, 7689, 7690, 7691, 7694, 7699, 7701, 7702, 7704, 7707, 7709, 7711, 7712, 7713, 7714, 7716, 7718, 7720, 7726, 7728, 7729, 7733, 7734, 7735, 7736, 7738, 7740, 7741, 7744, 7746, 7747, 7748, 7749, 7750, 7751, 7752, 7753, 7754, 7755, 7756, 7758, 7556, 7561, 7563, 7568, 7583, 7584, 7591, 7593, 7594, 7595, 7599, 7601, 7604, 7607, 7608, 7611, 7613, 7614, 7616, 7617, 7619, 7622, 7624, 7626, 7628, 7631, 7637, 7638, 7639, 7640, 7641, 7642, 7644, 7645, 7646, 7649, 7650, 7652, 7654, 7656, 7657, 7658, 7659, 7660, 7662, 7663, 7665, 7667, 7669, 7670, 7671, 7673, 7675, 7678, 7679, 7680, 7681, 7684, 7686, 7688, 7692, 7695, 7697, 7698, 7700, 7703, 7705, 7708, 7710, 7715, 7717, 7719, 7721, 7722, 7723, 7724, 7725, 7727, 7730, 7731, 7732, 7737, 7739, 7742, 7743, 7745, 7757, 7759, 7760, 7761, 7764, 7770, 7774, 7775, 7778, 7782, 7786, 7788, 7795, 7797, 7799, 7805, 7807, 7809, 7810, 7811, 7815, 7817, 7819, 7820, 7822, 7823, 7824, 7828, 7832, 7834, 7837, 7839, 7843, 7845, 7851, 7852, 7857, 7860, 7863, 7865, 7868, 7874, 7881, 7885, 7889, 7892, 7894, 7896, 7900, 7902, 7904, 7907, 7909, 7910, 7913, 7917, 7922, 7925, 7926, 7928, 7933, 7934, 7937, 7941, 7945, 7946, 7948, 7950, 7951, 7952, 7953, 7954, 7955, 7956, 7957, 7963, 7964, 7968, 7971, 7972, 7973, 7976, 7979, 7980, 7981, 7982, 7983, 7985, 7986, 7987, 7988, 7991, 7762, 7765, 7767, 7768, 7771, 7773, 7776, 7779, 7781, 7783, 7784, 7785, 7789, 7791, 7792, 7793, 7794, 7796, 7798, 7800, 7802, 7803, 7808, 7812, 7813, 7814, 7816, 7818, 7821, 7825, 7827, 7829, 7830, 7833, 7835, 7836, 7838, 7840, 7841, 7842, 7844, 7846, 7847, 7848, 7849, 7853, 7854, 7855, 7856, 7858, 7861, 7864, 7866, 7869, 7870, 7871, 7872, 7873, 7875, 7877, 7878, 7879, 7880, 7882, 7884, 7886, 7888, 7890, 7897, 7899, 7903, 7905, 7912, 7914, 7916, 7918, 7919, 7920, 7921, 7923, 7929, 7931, 7932, 7936, 7938, 7939, 7940, 7942, 7943, 7944, 7947, 7949, 7958, 7960, 7962, 7965, 7967, 7969, 7970, 7974, 7977, 7989, 7990, 7992, 7995, 7996, 8000, 8003, 8006, 8007, 8010, 8012, 8015, 8016, 8018, 8019, 8026, 8027, 8030, 8034, 8035, 8038, 8039, 8043, 8044, 8046, 8049, 8050, 8052, 8053, 8055, 8056, 8062, 8064, 8066, 8067, 8068, 8069, 8070, 8071, 8074, 8076, 8077, 8078, 8079, 8080, 8081, 7993, 7997, 7999, 8001, 8004, 8005, 8008, 8009, 8011, 8013, 8017, 8020, 8021, 8022, 8023, 8024, 8025, 8028, 8031, 8033, 8036, 8040, 8042, 8047, 8051, 8054, 8057, 8059, 8060, 8061, 8065, 8072, 8073, 8075, 8082, 8083, 8084, 8085, 8087, 8088, 8089, 8090, 8093, 8095, 8098, 8100, 8101, 8102, 8104, 8107, 8110, 8111, 8114, 8115, 8116, 8118, 8122, 8124, 8126, 8127, 8129, 8132, 8134, 8136, 8138, 8142, 8143, 8144, 8146, 8151, 8157, 8160, 8163, 8165, 8168, 8169, 8170, 8173, 8174, 8175, 8176, 8178, 8181, 8185, 8187, 8188, 8189, 8190, 8191, 8193, 8194, 8200, 8203, 8206, 8208, 8209, 8212, 8214, 8216, 8217, 8220, 8222, 8224, 8228, 8230, 8091, 8094, 8096, 8099, 8103, 8105, 8108, 8112, 8113, 8117, 8119, 8121, 8123, 8125, 8128, 8130, 8131, 8133, 8135, 8137, 8139, 8145, 8147, 8148, 8149, 8150, 8152, 8153, 8154, 8155, 8156, 8158, 8161, 8164, 8166, 8167, 8171, 8177, 8179, 8180, 8182, 8183, 8184, 8186, 8192, 8195, 8197, 8198, 8199, 8201, 8202, 8204, 8207, 8210, 8213, 8218, 8221, 8223, 8225, 8227, 8229, 8231, 8232, 8235, 8236, 8237, 8238, 8244, 8245, 8247, 8250, 8251, 8253, 8254, 8255, 8256, 8258, 8259, 8260, 8263, 8267, 8269, 8270, 8273, 8274, 8277, 8280, 8281, 8289, 8292, 8293, 8294, 8295, 8296, 8297, 8298, 8301, 8305, 8306, 8310, 8311, 8312, 8315, 8317, 8318, 8322, 8323, 8324, 8327, 8328, 8329, 8330, 8333, 8336, 8339, 8340, 8347, 8349, 8350, 8352, 8353, 8356, 8359, 8360, 8366, 8369, 8370, 8372, 8374, 8376, 8377, 8379, 8381, 8382, 8383, 8233, 8239, 8240, 8242, 8243, 8246, 8248, 8252, 8257, 8261, 8264, 8266, 8268, 8271, 8275, 8278, 8282, 8284, 8285, 8286, 8287, 8288, 8291, 8299, 8302, 8303, 8304, 8307, 8309, 8313, 8314, 8316, 8319, 8321, 8325, 8326, 8331, 8332, 8334, 8335, 8337, 8341, 8342, 8343, 8344, 8345, 8346, 8348, 8351, 8354, 8357, 8361, 8362, 8363, 8364, 8365, 8367, 8371, 8373, 8375, 8378, 8384, 8387, 8390, 8391, 8397, 8398, 8401, 8402, 8405, 8406, 8409, 8414, 8418, 8419, 8422, 8425, 8428, 8431, 8432, 8433, 8435, 8437, 8440, 8444, 8449, 8452, 8454, 8455, 8457, 8462, 8464, 8466, 8468, 8469, 8472, 8475, 8476, 8478, 8479, 8481, 8484, 8487, 8488, 8490, 8493, 8496, 8497, 8498, 8501, 8505, 8508, 8511, 8513, 8515, 8517, 8518, 8519, 8521, 8522, 8523, 8526, 8528, 8530, 8531, 8532, 8534, 8536, 8541, 8544, 8547, 8551, 8554, 8556, 8558, 8560, 8562, 8563, 8566, 8567, 8568, 8570, 8571, 8574, 8575, 8576, 8577, 8580, 8581, 8585, 8588, 8591, 8594, 8601, 8602, 8603, 8608, 8609, 8613, 8614, 8617, 8618, 8619, 8620, 8623, 8624, 8628, 8629, 8630, 8633, 8634, 8635, 8636, 8638, 8643, 8645, 8648, 8654, 8657, 8658, 8659, 8660, 8661, 8662, 8666, 8670, 8672, 8674, 8676, 8681, 8683, 8686, 8688, 8689, 8691, 8692, 8693, 8695, 8696, 8700, 8701, 8702, 8703, 8704, 8705, 8709, 8716, 8717, 8719, 8722, 8725, 8727, 8728, 8729, 8732, 8733, 8734, 8735, 8736, 8385, 8388, 8392, 8394, 8395, 8399, 8403, 8407, 8410, 8411, 8412, 8413, 8415, 8416, 8420, 8423, 8424, 8426, 8429, 8434, 8436, 8438, 8442, 8445, 8446, 8447, 8448, 8450, 8451, 8456, 8458, 8460, 8461, 8463, 8465, 8467, 8470, 8473, 8474, 8477, 8480, 8482, 8485, 8486, 8489, 8491, 8492, 8494, 8499, 8500, 8502, 8503, 8504, 8506, 8510, 8512, 8514, 8516, 8520, 8524, 8527, 8529, 8533, 8535, 8537, 8539, 8542, 8545, 8546, 8548, 8550, 8552, 8555, 8557, 8564, 8565, 8569, 8572, 8578, 8582, 8583, 8586, 8587, 8589, 8592, 8595, 8596, 8597, 8598, 8599, 8600, 8604, 8606, 8607, 8610, 8612, 8615, 8616, 8621, 8625, 8627, 8631, 8632, 8637, 8639, 8640, 8641, 8642, 8644, 8646, 8647, 8649, 8650, 8651, 8652, 8653, 8655, 8663, 8665, 8667, 8668, 8669, 8671, 8673, 8675, 8677, 8678, 8679, 8680, 8682, 8684, 8685, 8687, 8690, 8694, 8697, 8698, 8699, 8706, 8707, 8708, 8710, 8711, 8712, 8713, 8714, 8715, 8718, 8720, 8723, 8726, 8730, 8737, 8738, 8741, 8744, 8747, 8750, 8751, 8753, 8754, 8755, 8756, 8759, 8760, 8762, 8763, 8766, 8767, 8768, 8769, 8770, 8772, 8775, 8776, 8777, 8779, 8782, 8783, 8784, 8785, 8786, 8787, 8788, 8789, 8790, 8793, 8794, 8796, 8798, 8799, 8801, 8803, 8804, 8806, 8807, 8809, 8812, 8813, 8815, 8820, 8823, 8826, 8829, 8830, 8832, 8835, 8836, 8837, 8842, 8845, 8846, 8847, 8851, 8853, 8856, 8857, 8859, 8861, 8866, 8739, 8878, 8879, 8880, 8884, 8891, 8893, 8895, 8898, 8900, 8901, 8909, 8912, 8739, 8742, 8745, 8748, 8749, 8752, 8757, 8758, 8761, 8764, 8771, 8773, 8778, 8780, 8791, 8797, 8800, 8802, 8805, 8808, 8810, 8814, 8816, 8818, 8819, 8821, 8824, 8827, 8828, 8831, 8833, 8838, 8840, 8841, 8755, 8843, 8844, 8848, 8850, 8852, 8854, 8855, 8863, 8864, 8865, 8867, 8868, 8869, 8870, 8871, 8872, 8873, 8874, 8876, 8877, 8881, 8882, 8883, 8885, 8887, 8888, 8889, 8890, 8892, 8894, 8896, 8897, 8899, 8902, 8785, 8903, 8904, 8905, 8906, 8907, 8908, 8911, 8913, 8917, 8920, 8923, 8924, 8929, 8931, 8934, 8935, 8936, 8914, 8916, 8918, 8921, 8925, 8927, 8928, 8930, 8932, 8933, 8937, 8980, 8984, 8988, 8989, 8998, 9001, 9002, 9005, 9007, 9008, 9012, 9013, 9016, 9019, 9020, 9022, 9023, 9025, 9028, 9029, 9032, 9033, 9034, 9035, 9037, 9038, 9044, 9046, 9047, 9048, 9049, 9054, 8981, 8983, 8985, 8987, 8990, 8992, 8993, 8994, 8995, 8997, 8999, 9003, 9004, 9006, 9009, 9010, 9011, 9014, 9017, 9018, 9021, 9024, 9026, 9030, 9036, 9039, 9041, 9042, 9043, 9045, 9050, 9051, 9052, 9053, 9055, 9058, 9060, 9063, 9066, 9067, 9068, 9069, 9070, 9071, 9074, 9075, 9077, 9078, 9079, 9080, 9082, 9084, 9088, 9089, 9090, 9099, 9103, 9104, 9105, 9107, 9111, 9056, 9061, 9064, 9072, 9081, 9083, 9085, 9086, 9087, 9091, 9092, 9093, 9094, 9095, 9096, 9097, 9098, 9100, 9102, 9106, 9108, 9109, 9110, 9112, 9113, 9116, 9118, 9125, 9126, 9128, 9129, 9130, 9136, 9141, 9143, 9148, 9150, 9153, 9157, 9158, 9159, 9163, 9164, 9165, 9167, 9168, 9171, 9173, 9177, 9180, 9181, 9182, 9183, 9185, 9187, 9188, 9189, 9191, 9192, 9193, 9194, 9197, 9198, 9200, 9206, 9207, 9208, 9209, 9211, 9216, 9218, 9219, 9220, 9221, 9222, 9223, 9226, 9228, 9229, 9230, 9231, 9232, 9233, 9234, 9237, 9238, 9240, 9243, 9246, 9248, 9253, 9256, 9257, 9260, 9263, 9264, 9266, 9269, 9271, 9279, 9280, 9281, 9282, 9283, 9284, 9290, 9114, 9119, 9121, 9122, 9123, 9124, 9127, 9131, 9133, 9134, 9135, 9137, 9138, 9139, 9140, 9142, 9144, 9146, 9147, 9149, 9151, 9152, 9154, 9155, 9156, 9160, 9162, 9166, 9169, 9172, 9174, 9175, 9176, 9178, 9184, 9186, 9190, 9195, 9199, 9201, 9202, 9203, 9204, 9205, 9212, 9214, 9215, 9217, 9224, 9227, 9235, 9239, 9241, 9244, 9247, 9249, 9251, 9252, 9254, 9258, 9261, 9265, 9267, 9270, 9273, 9274, 9275, 9276, 9277, 9278, 9285, 9286, 9287, 9288, 9289, 9291, 9292, 9295, 9297, 9300, 9302, 9303, 9304, 9307, 9308, 9310, 9311, 9313, 9319, 9321, 9323, 9324, 9328, 9333, 9334, 9337, 9338, 9339, 9342, 9344, 9348, 9351, 9352, 9354, 9355, 9357, 9360, 9367, 9371, 9374, 9377, 9379, 9383, 9384, 9385, 9388, 9389, 9390, 9393, 9394, 9398, 9401, 9402, 9406, 9408, 9409, 9410, 9413, 9415, 9416, 9417, 9418, 9419, 9421, 9422, 9425, 9429, 9433, 9434, 9435, 9436, 9437, 9439, 9440, 9446, 9452, 9453, 9454, 9455, 9457, 9458, 9459, 9462, 9466, 9467, 9468, 9470, 9474, 9479, 9482, 9487, 9488, 9489, 9492, 9495, 9497, 9499, 9500, 9504, 9505, 9508, 9513, 9514, 9519, 9522, 9523, 9524, 9526, 9528, 9532, 9533, 9534, 9535, 9537, 9538, 9541, 9542, 9543, 9545, 9546, 9548, 9293, 9296, 9298, 9301, 9305, 9309, 9312, 9314, 9316, 9317, 9318, 9320, 9322, 9325, 9326, 9327, 9329, 9331, 9332, 9335, 9336, 9340, 9345, 9347, 9349, 9353, 9356, 9358, 9361, 9363, 9364, 9365, 9368, 9370, 9372, 9375, 9376, 9378, 9380, 9382, 9386, 9391, 9395, 9397, 9399, 9400, 9403, 9405, 9407, 9411, 9412, 9414, 9420, 9423, 9424, 9426, 9428, 9430, 9431, 9432, 9438, 9441, 9443, 9444, 9445, 9447, 9448, 9449, 9450, 9451, 9456, 9460, 9461, 9464, 9465, 9469, 9471, 9473, 9475, 9477, 9478, 9480, 9483, 9485, 9490, 9493, 9494, 9496, 9498, 9501, 9502, 9503, 9506, 9509, 9511, 9512, 9515, 9516, 9517, 9518, 9520, 9521, 9525, 9527, 9529, 9530, 9536, 9539, 9544, 9547, 9549, 9550, 9551, 9555, 9556, 9557, 9559, 9560, 9563, 9564, 9565, 9566, 9569, 9570, 9573, 9577, 9578, 9579, 9580, 9585, 9586, 9587, 9588, 9591, 9593, 9596, 9552, 9554, 9558, 9561, 9567, 9571, 9574, 9576, 9581, 9583, 9584, 9589, 9592, 9594, 9595, 9598, 9602, 9604, 9605, 9608, 9612, 9613, 9614, 9617, 9618, 9621, 9622, 9625, 9626, 9627, 9632, 9633, 9638, 9640, 9643, 9644, 9645, 9646, 9651, 9654, 9656, 9657, 9658, 9661, 9662, 9665, 9666, 9667, 9668, 9672, 9673, 9675, 9676, 9677, 9680, 9683, 9686, 9688, 9691, 9694, 9698, 9699, 9702, 9705, 9707, 9710, 9711, 9715, 9719, 9720, 9722, 9723, 9726, 9729, 9732, 9733, 9735, 9737, 9738, 9741, 9744, 9745, 9746, 9747, 9748, 9749, 9750, 9754, 9755, 9756, 9758, 9759, 9768, 9771, 9772, 9776, 9777, 9781, 9782, 9784, 9787, 9789, 9790, 9792, 9796, 9797, 9800, 9805, 9806, 9812, 9815, 9818, 9821, 9823, 9825, 9827, 9831, 9832, 9835, 9837, 9839, 9841, 9842, 9844, 9845, 9851, 9853, 9854, 9855, 9857, 9860, 9862, 9863, 9865, 9871, 9873, 9875, 9878, 9879, 9599, 9601, 9603, 9606, 9607, 9609, 9611, 9615, 9619, 9623, 9624, 9628, 9630, 9631, 9634, 9635, 9637, 9639, 9641, 9647, 9649; 9650, 9652, 9653, 9659, 9660, 9663, 9664, 9670, 9671, 9679, 9682, 9684, 9687, 9690, 9692, 9693, 9695, 9697, 9700, 9701, 9703, 9706, 9708, 9712, 9713, 9714, 9716, 9717, 9718, 9721, 9724, 9727, 9730, 9734, 9739, 9742, 9751, 9753, 9757, 9760, 9761, 9762, 9763, 9764, 9765, 9766, 9767, 9769, 9773, 9775, 9778, 9780, 9783, 9786, 9788, 9791, 9793, 9794, 9795, 9798, 9801, 9803, 9804, 9807, 9808, 9809, 9810, 9811, 9813, 9816, 9817, 9819, 9820, 9822, 9826, 9828, 9830, 9833, 9836, 9838, 9840, 9843, 9846, 9847, 9848, 9849, 9850, 9852, 9856, 9858, 9859, 9861, 9864, 9866, 9867, 9868, 9869, 9870, 9872, 9876, 9877, 9880, 9881, 9882, 9886, 9890, 9891, 9894, 9900, 9902, 9904, 9908, 9911, 9912, 9915, 9917, 9919, 9923, 9925, 9928, 9935, 9936, 9940, 9943, 9949, 9953, 9954, 9956, 9957, 9958, 9962, 9963, 9964, 9968, 9969, 9975, 9978, 9981, 9988, 9989, 9990, 9991, 9992, 9995, 9997, 10011, 10012, 10014, 10017, 10018, 10031, 10032, 10033, 10034, 10035, 10037, 10041, 10042, 10046, 10050, 10054, 10058, 10059, 9883, 9885, 9887, 9889, 9892, 9893, 9895, 9896, 9897, 9898, 9899, 9901, 9903, 9905, 9907, 9909, 9913, 9914, 9916, 9918, 9920, 9921, 9922, 9924, 9926, 9929, 9931, 9932, 9933, 9934, 9937, 9938, 9939, 9941, 9942, 9944, 9945, 9946, 9947, 9948, 9950, 9952, 9955, 9959, 9960, 9961, 9966, 9967, 9970, 9972, 9973, 9974, 9976, 9979, 9980, 9982, 9983, 9984, 9985, 9986, 9987, 9993, 9994, 9996, 9998, 9999, 10000, 10001, 10002, 10003, 10004, 10005, 10006, 10007, 10008, 10009, 10010, 10013, 10015, 10016, 10019, 10020, 10021, 10022, 10023, 10025, 10026, 10027, 10028, 10030, 10036, 10038, 10040, 10043, 10044, 10045, 10047, 10048, 10049, 10051, 10053, 10055, 10056, 10057, 10060, 10061, 10064, 10067, 10068, 10070, 10071, 10072, 10074, 10079, 10081, 10083, 10088, 10091, 10095, 10096, 10097, 10101, 10103, 10105, 10106, 10109, 10110, 10111, 10113, 10116, 10118, 10120, 10122, 10125, 10126, 10127, 10131, 10134, 10137, 10138, 10144, 10147, 10149, 10151, 10152, 10155, 10156, 10159, 10160, 10169, 10172, 10174, 10175, 10178, 10181, 10186, 10188, 10189, 10190, 10191, 10192, 10196, 10199, 10203, 10204, 10210, 10211, 10216, 10218, 10221, 10224, 10225, 10226, 10229, 10230, 10231, 10232, 10234, 10239, 10241, 10244, 10252, 10253, 10257, 10258, 10259, 10261, 10266, 10272, 10276, 10062, 10065, 10069, 10075, 10077, 10078, 10080, 10082, 10084, 10086, 10087, 10089, 10090, 10092, 10093, 10094, 10098, 10099, 10100, 10102, 10104, 10107, 10112, 10114, 10117, 10119, 10121, 10123, 10124, 10129, 10130, 10132, 10133, 10135, 10139, 10140, 10141, 10142, 10143, 10145, 10148, 10150, 10153, 10154, 10157, 10161, 10163, 10164, 10165, 10166, 10167, 10170, 10173, 10176, 10177, 10179, 10182, 10183, 10184, 10187, 10193, 10194, 10195, 10197, 10198, 10200, 10201, 10202, 10205, 10206, 10207, 10209, 10212, 10213, 10214, 10215, 10219, 10220, 10222, 10223, 10227, 10228, 10233, 10235, 10236, 10237, 10240, 10242, 10243, 10245, 10247, 10248, 10249, 10251, 10254, 10255, 10256, 10260, 10262, 10263, 10264, 10265, 10267, 10268, 10269, 10270, 10271, 10273, 10274, 10275, 10277, 10278, 10279, 10282, 10285, 10287, 10291, 10292, 10297, 10299, 10301, 10304, 10306, 10308, 10310, 10314, 10317, 10318, 10320, 10322, 10327, 10329, 10330, 10333, 10335, 10336, 10337, 10340, 10342, 10348, 10350, 10351, 10354, 10358, 10359, 10360, 10362, 10366, 10369, 10372, 10373, 10374, 10376, 10378, 10383, 10385, 10391, 10398, 10403, 10407, 10410, 10413, 10415, 10419, 10422, 10425, 10427, 10428, 10429, 10430, 10432, 10433, 10434, 10437, 10438, 10439, 10442, 10443, 10445, 10446, 10447, 10448, 10452, 10453, 10454, 10455, 10456, 10460, 10463, 10466, 10467, 10469, 10470, 10473, 10475, 10477, 10480, 10484, 10488, 10490, 10494, 10495, 10497, 10501, 10502, 10503, 10507, 10508, 10510, 10517, 10518, 10520, 10522, 10524, 10525, 10528, 10529, 10533, 10536, 10537, 10540, 10541, 10545, 10547, 10551, 10553, 10556, 10559, 10560, 10563, 10564, 10565, 10568, 10571, 10574, 10576, 10579, 10581, 10583, 10588, 10589, 10590, 10592, 10593, 10596, 10597, 10601, 10602, 10603, 10605, 10607, 10609, 10610, 10612, 10613, 10617, 10618, 10621, 10624, 10627, 10630, 10632, 10634, 10637, 10638, 10639, 10640, 10641, 10643, 10645, 10647, 10653, 10655, 10657, 10659, 10661, 10662, 10663, 10664, 10665, 10666, 10667, 10668, 10669, 10672, 10673, 10674, 10675, 10280, 10283, 10286, 10288, 10290, 10293, 10295, 10298, 10300, 10302, 10305, 10307, 10309, 10311, 10312, 10313, 10315, 10319, 10321, 10323, 10325, 10326, 10328, 10331, 10338, 10341, 10343, 10344, 10345, 10346, 10347, 10349, 10352, 10355, 10356, 10357, 10361, 10363, 10365, 10367, 10370, 10375, 10377, 10379, 10380, 10381, 10382, 10384, 10386, 10387, 10388, 10390, 10392, 10394, 10395, 10399, 10401, 10402, 10404, 10406, 10408, 10411, 10412, 10414, 10416, 10417, 10418, 10420, 10423, 10426, 10431, 10435, 10440, 10444, 10449, 10451, 10457, 10459, 10461, 10462, 10464, 10465, 10468, 10471, 10476, 10478, 10481, 10483, 10485, 10487, 10489, 10491, 10492, 10493, 10498, 10499, 10500, 10504, 10506, 10509, 10511, 10513, 10514, 10515, 10516, 10519, 10521, 10523, 10526, 10530, 10531, 10532, 10534, 10535, 10538, 10539, 10542, 10543, 10544, 10546, 10548, 10550, 10552, 10554, 10557, 10558, 10561, 10566, 10569, 10572, 10573, 10577, 10578, 10580, 10582, 10584, 10586, 10594, 10598, 10600, 10604, 10606, 10611, 10614, 10616, 10619, 10622, 10625, 10626, 10628, 10631, 10633, 10635, 10642, 10644, 10646, 10648, 10649, 10650, 10651, 10652, 10654, 10656, 10658, 10660, 10670, 10671, 10676, 10678, 10684, 10679, 10681, 10682, 10683, 10685, 10687, 10688, 10689, 10690, 10691, 10693, 10696, 10699, 10703, 10704, 10709, 10711, 10712, 10713, 10720, 10721, 10722, 10724, 10725, 10726, 10728, 10729, 10734, 10740, 10742, 10743, 10744, 10745, 10746, 10748, 10749, 10751, 10754, 10758, 10759, 10760, 10764, 10768, 10769, 10772, 10775, 10780, 10781, 10783, 10786, 10791, 10796, 10801, 10808, 10817, 10818, 10819, 10821, 10823, 10826, 10827, 10829, 10830, 10834, 10843, 10844, 10847, 10848, 10849, 10853, 10856, 10858, 10866, 10869, 10872, 10874, 10877, 10878, 10879, 10882, 10884, 10885, 10889, 10892, 10893, 10896, 10900, 10901, 10903, 10905, 10907, 10909, 10910, 10911, 10914, 10916, 10919, 10926, 10930, 10932, 10933, 10934, 10938, 10941, 10942, 10943, 10944, 10946, 10947, 10953, 10955, 10956, 10958, 10959, 10962, 10967, 10968, 10972, 10975, 10977, 10978, 10981, 10984, 10985, 10988, 10992, 10995, 10997, 10999, 11000, 11001, 11006, 11009, 11013, 11016, 11020, 11025, 11033, 11036, 11040, 11041, 11042, 11043, 11045, 11046, 11048, 11052, 11055, 11060, 11061, 11062, 11064, 11065, 11067, 11070, 11071, 11072, 11078, 11079, 11081, 11085, 11093, 10694, 10697, 10700, 10702, 10705, 10707, 10710, 10714, 10716, 10717, 10718, 10719, 10723, 10727, 10730, 10732, 10733, 10735, 10737, 10738, 10739, 10741, 10747, 10750, 10752, 10755, 10757, 10761, 10762, 10763, 10765, 10767, 10770, 10773, 10776, 10778, 10779, 10782, 10784, 10788, 10789, 10790, 10792, 10793, 10794, 10798, 10799, 10800, 10802, 10804, 10805, 10806, 10807, 10809, 10811, 10812, 10813, 10814, 10815, 10816, 10820, 10822, 10824, 10831, 10833, 10835, 10837, 10838, 10839, 10840, 10841, 10842, 10845, 10846, 10850, 10851, 10854, 10857, 10859, 10860, 10861, 10862, 10863, 10864, 10865, 10868, 10870, 10871, 10873, 10875, 10880, 10881, 10883, 10886, 10888, 10890, 10894, 10897, 10899, 10902, 10904, 10906, 10908, 10912, 10915, 10917, 10920, 10922, 10924, 10925, 10927, 10928, 10929, 10931, 10935, 10937, 10939, 10945, 10948, 10950, 10951, 10952, 10954, 10957, 10960, 10963, 10965, 10966, 10969, 10970, 10971, 10973, 10976, 10979, 10980, 10982, 10986, 10987, 10989, 10991, 10993, 10996, 10998, 11002, 11004, 11005, 11007, 11010, 11012, 11014, 11015, 11017, 11019, 11021, 11022, 11023, 11026, 11027, 11028, 11029, 11030, 11031, 11032, 11034, 11037, 11039, 11044, 11047, 11049, 11050, 11051, 11053, 11054, 11056, 11058, 11059, 11063, 11066, 11068, 11069, 11073, 11074, 11075, 11076, 11077, 11080, 11082, 11083, 11084, 11086, 11087, 11088, 11089, 11090, 11091, 11092, 11094, 11376, 11381, 11382, 11383, 11384, 11387, 11397, 11401, 11405, 11408, 11414, 11418, 11421, 11422, 11424, 11427, 11429, 11430, 11377, 11379, 11380, 11385, 11386, 11388, 11390, 11391, 11392, 11394, 11395, 11396, 11398, 11399, 11400, 11402, 11403, 11404, 11406, 11409, 11410, 11411, 11412, 11415, 11416, 11417, 11419, 11423, 11425, 11428, 11431, 11432, 11433, 11434, 11438, 11442, 11443, 11447, 11449, 11450, 11452, 11456, 11459, 11463, 11464, 11467, 11468, 11472, 11477, 11480, 11481, 11482, 11483, 11484, 11488, 11489, 11493, 11498, 11502, 11504, 11505, 11506, 11507, 11508, 11509, 11512, 11513, 11514, 11517, 11520, 11522, 11523, 11524, 11526, 11528, 11532, 11534, 11435, 11439, 11444, 11445, 11446, 11448, 11451, 11453, 11457, 11458, 11460, 11461, 11462, 11465, 11466, 11469, 11473, 11474, 11475, 11476, 11478, 11479, 11485, 11486, 11487, 11490, 11494, 11497, 11499, 11500, 11501, 11503, 11510, 11511, 11515, 11518, 11519, 11521, 11525, 11527, 11529, 11535, 11539, 11540, 11541, 11548, 11550, 11551, 11552, 11555, 11556, 11557, 11560, 11561, 11562, 11568, 11569, 11571, 11572, 11573, 11577, 11536, 11542, 11545, 11546, 11547, 11549, 11553, 11554, 11563, 11566, 11570, 11574, 11578, 11585, 11586, 11590, 11591, 11592, 11595, 11596, 11597, 11600, 11579, 11582, 11587, 11593, 11594, 11598, 11601, 11602, 11606, 11607, 11608, 11609, 11616, 11618, 11622, 11626, 11628, 11632, 11633, 11603, 11610, 11613, 11614, 11615, 11617, 11619, 11623, 11627, 11629, 11634, 11635, 11640, 11641, 11642, 11643, 11647, 11648, 11654, 11655, 11656, 11657, 11658, 11636, 11639, 11644, 11645, 11646, 11649, 11652, 11653, 11659, 11663, 11664, 11665, 11666, 11670, 11671, 11672, 11673, 11677, 11681, 11687, 11690, 11694, 11696, 11697, 11701, 11705, 11709, 11713, 11719, 11723, 11729, 11733, 11739, 11744, 11745, 11748, 11749, 11751, 11755, 11759, 11763, 11770, 11772, 11774, 11776, 11778, 11782, 11785, 11660, 11667, 11674, 11675, 11676, 11678, 11682, 11685, 11686, 11688, 11689, 11691, 11692, 11693, 11695, 11698, 11699, 11700, 11702, 11706, 11710, 11716, 11720, 11724, 11725, 11727, 11728, 11730, 11731, 11732, 11734, 11735, 11736, 11737, 11738, 11740, 11743, 11746, 11747, 11750, 11752, 11756, 11761, 11762, 11764, 11765, 11767, 11768, 11769, 11773, 11775, 11777, 11779, 11783, 11784, 11786, 11790, 11791, 11792, 11787, 11793, 11796, 11800, 11802, 11803, 11805, 11810, 11818, 11819, 11823, 11824, 11827, 11828, 11829, 11833, 11836, 11837, 11839, 11840, 11847, 11850, 11852, 11857, 11860, 11864, 11866, 11797, 11801, 11804, 11806, 11809, 11811, 11814, 11815, 11817, 11820, 11825, 11830, 11835, 11841, 11844, 11845, 11846, 11848, 11851, 11853, 11856, 11858, 11861, 11862, 11863, 11865, 11867, 11871, 11876, 11878, 11882, 11888, 11891, 11894, 11868, 11872, 11875, 11877, 11879, 11883, 11886, 11887, 11889, 11890, 11892, 11893, 11895, 11898, 11902, 11903, 11904, 11908, 11909, 11911, 11912, 11913, 11914, 11915, 11917, 11918, 11922, 11926, 11927, 11930, 11932, 11933, 11937, 11941, 11942, 11946, 11947, 11948, 11949, 11950, 11951, 11952, 11955, 11959, 11968, 11972, 11976, 11978, 11979, 11980, 11981, 11986, 11988, 11989, 11991, 11992, 11995, 11997, 11998, 12001, 12002, 12004, 12005, 11899, 11905, 11910, 11916, 11919, 11923, 11924, 11925, 11928, 11929, 11931, 11934, 11938, 11943, 11953, 11954, 11956, 11960, 11963, 11964, 11967, 11969, 11973, 11977, 11982, 11985, 11987, 11990, 11993, 11994, 11996, 11999, 12000, 12003, 12006, 12011, 12015, 12016, 12017, 12021, 12022, 12023, 12024, 12025, 12026, 12027, 12031, 12034, 12042, 12043, 12045, 12049, 12050, 12051, 12054, 12062, 12063, 12064, 12066, 12067, 12068, 12070, 12072, 12076, 12082, 12085, 12086, 12089, 12090, 12093, 12094, 12095, 12096, 12097, 12098, 12101, 12103, 12107, 12108, 12111, 12112, 12114, 12118, 12119, 12120, 12128, 12007, 12010, 12012, 12020, 12028, 12032, 12033, 12035, 12038, 12039, 12044, 12046, 12052, 12055, 12056, 12057, 12058, 12059, 12060, 12061, 12065, 12069, 12071, 12073, 12077, 12080, 12081, 12084, 12087, 12088, 12091, 12099, 12100, 12102, 12104, 12109, 12110, 12113, 12115, 12121, 12122, 12123, 12124, 12125, 12127, 12129, 12130, 12135, 12136, 12141, 12144, 12147, 12148, 12149, 12153, 12159, 12160, 12131, 12134, 12137, 12138, 12139, 12140, 12142, 12143, 12145, 12146, 12150, 12154, 12157, 12158, 12161, 12162, 12163, 12164, 12168, 12171, 12176, 12181, 12187, 12190, 12194, 12196, 12197, 12199, 12201, 12202, 12209, 12213, 12216, 12220, 12221, 12223, 12225, 12226, 12231, 12233, 12239, 12243, 12244, 12250, 12254, 12256, 12257, 12259, 12266, 12270, 12271, 12272, 12274, 12276, 12277, 12278, 12280, 12284, 12285, 12288, 12289, 12290, 12291, 12295, 12296, 12302, 12308, 12313, 12317, 12321, 12322, 12323, 12324, 12325, 12327, 12328, 12330, 12331, 12332, 12336, 12337, 12339, 12343, 12346, 12349, 12353, 12354, 12355, 12359, 12361, 12363, 12367, 12369, 12370, 12372, 12376, 12377, 12379, 12380, 12381, 12382, 12383, 12385, 12389, 12393, 12398, 12400, 12402, 12403, 12406, 12408, 12409, 12410, 12412, 12415, 12417, 12419, 12422, 12424, 12429, 12430, 12432, 12433, 12435, 12436, 12437, 12441, 12445, 12448, 12449, 12454, 12458, 12459, 12460, 12165, 12169, 12170, 12172, 12175, 12177, 12180, 12182, 12185, 12186, 12188, 12191, 12195, 12198, 12200, 12203, 12206, 12207, 12208, 12210, 12214, 12217, 12222, 12224, 12227, 12228, 12229, 12230, 12232, 12234, 12237, 12238, 12240, 12241, 12242, 12245, 12248, 12249, 12251, 12255, 12258, 12260, 12262, 12263, 12264, 12265, 12267, 12268, 12269, 12273, 12279, 12281, 12286, 12287, 12292, 12297, 12300, 12303, 12306, 12307, 12309, 12312, 12314, 12318, 12326, 12333, 12338, 12340, 12341, 12342, 12345, 12347, 12348, 12352, 12356, 12360, 12362, 12364, 12371, 12373, 12378, 12386, 12390, 12394, 12397, 12401, 12404, 12405, 12411, 12413, 12418, 12420, 12423, 12425, 12428, 12438, 12439, 12440, 12442, 12443, 12446, 12450, 12453, 12455, 12461, 12465, 12467, 12468, 12472, 12474, 12477, 12480, 12484, 12486, 12488, 12489, 12490, 12493, 12495, 12499, 12501, 12504, 12506, 12462, 12469, 12475, 12478, 12481, 12483, 12485, 12487, 12492, 12494, 12496, 12497, 12498, 12500, 12502, 12505, 12507, 12511, 12517, 12520, 12522, 12523, 12524, 12528, 12530, 12534, 12535, 12536, 12537, 12541, 12542, 12547, 12550, 12551, 12552, 12554, 12555, 12560, 12564, 12565, 12569, 12571, 12574, 12579, 12581, 12586, 12590, 12592, 12593, 12594, 12596, 12600, 12601, 12602, 12604, 12610, 12613, 12614, 12615, 12616, 12620, 12626, 12630, 12508, 12512, 12515, 12518, 12521, 12525, 12529, 12531, 12538, 12543, 12546, 12548, 12549, 12553, 12556, 12559, 12561, 12566, 12570, 12572, 12573, 12575, 12578, 12582, 12585, 12587, 12595, 12597, 12599, 12603, 12605, 12608, 12609, 12611, 12617, 12618, 12621, 12624, 12625, 12627, 12631, 12636, 12637, 12638, 12639, 12643, 12647, 12648, 12652, 12654, 12660, 12664, 12666, 12670, 12672, 12675, 12677, 12680, 12686, 12691, 12692, 12695, 12699, 12700, 12701, 12703, 12705, 12709, 12710, 12714, 12715, 12716, 12718, 12719, 12720, 12724, 12725, 12728, 12732, 12738, 12739, 12743, 12744, 12745, 12747, 12748, 12752, 12757, 12763, 12764, 12766, 12767, 12768, 12771, 12776, 12777, 12781, 12785, 12787, 12788, 12791, 12792, 12796, 12797, 12800, 12804, 12808, 12813, 12815, 12816, 12817, 12822, 12825, 12828, 12831, 12833, 12834, 12837, 12839, 12841, 12842, 12632, 12635, 12640, 12641, 12644, 12649, 12653, 12655, 12658, 12661, 12662, 12663, 12665, 12667, 12671, 12673, 12678, 12679, 12681, 12682, 12683, 12684, 12685, 12687, 12688, 12689, 12690, 12693, 12694, 12696, 12702, 12704, 12706, 12712, 12713, 12717, 12721, 12726, 12729, 12730, 12731, 12733, 12736, 12737, 12740, 12746, 12749, 12750, 12751, 12753, 12754, 12755, 12756, 12758, 12760, 12761, 12762, 12765, 12769, 12770, 12772, 12775, 12778, 12782, 12786, 12789, 12790, 12793, 12794, 12795, 12798, 12799, 12801, 12805, 12809, 12812, 12814, 12818, 12821, 12823, 12824, 12826, 12827, 12832, 12835, 12836, 12838, 12840, 12843, 12844, 12845, 12849, 12850, 12854, 12857, 12862, 12866, 12867, 12868, 12870, 12872, 12880, 12881, 12884, 12885, 12889, 12890, 12892, 12896, 12898, 12899, 12903, 12907, 12910, 12913, 12919, 12920, 12921, 12923, 12928, 12932, 12938, 12942, 12945, 12948, 12950, 12951, 12953, 12959, 12846, 12851, 12855, 12858, 12861, 12863, 12869, 12871, 12873, 12876, 12877, 12878, 12879, 12882, 12883, 12886, 12887, 12888, 12891, 12893, 12894, 12895, 12900, 12901, 12902, 12904, 12908, 12909, 12911, 12912, 12914, 12917, 12918, 12924, 12927, 12929, 12933, 12936, 12937, 12939, 12943, 12949, 12954, 12957, 12958, 12960, 12961, 12965, 12969, 12975, 12977, 12962, 12966, 12967, 12968, 12970, 12971, 12972, 12973, 12974, 12976, 12978, 12981, 12982, 12986, 12989, 12991, 12992, 12993, 12995, 12999, 13001, 12983, 12987, 12996, 12997, 12998, 13000, 13002, 13005, 13009, 13013, 13017, 13019, 13025, 13029, 13030, 13032, 13033, 13034, 13037, 13040, 13042, 13043, 13044, 13048, 13049, 13051, 13052, 13053, 13057, 13062, 13064, 13065, 13066, 13067, 13072, 13073, 13076, 13078, 13082, 13083, 13085, 13087, 13088, 13089, 13092, 13096, 13100, 13101, 13102, 13105, 13108, 13109, 13110, 13114, 13117, 13118, 13124, 13129, 13131, 13132, 13138, 13144, 13146, 13147, 13148, 13152, 13156, 13159, 13164, 13167, 13168, 13170, 13171, 13172, 13173, 13174, 13184, 13185, 13006, 13010, 13014, 13018, 13020, 13021, 13022, 13023, 13024, 13026, 13031, 13035, 13036, 13038, 13039, 13041, 13045, 13050, 13054, 13058, 13061, 13063, 13068, 13069, 13070, 13071, 13074, 13075, 13077, 13079, 13084, 13086, 13090, 13091, 13093, 13097, 13104, 13107, 13111, 13115, 13119, 13121, 13122, 13123, 13125, 13126, 13127, 13128, 13130, 13133, 13137, 13139, 13142, 13143, 13145, 13149, 13153, 13157, 13158, 13160, 13163, 13165, 13166, 13169, 13175, 13176, 13177, 13178, 13179, 13180, 13181, 13182, 13183, 13186, 13189, 13190, 13191, 13195, 13196, 13197, 13199, 13200, 13204, 13206, 13192, 13198, 13201, 13207, 13212, 13213, 13226, 13228, 13231, 13235, 13240, 13245, 13247, 13248, 13250, 13254, 13256, 13258, 13264, 13265, 13268, 13269, 13273, 13274, 13277, 13279, 13280, 13281, 13286, 13208, 13211, 13214, 13217, 13220, 13222, 13224, 13225, 13227, 13229, 13232, 13233, 13234, 13237, 13239, 13241, 13242, 13244, 13246, 13249, 13251, 13255, 13257, 13259, 13262, 13263, 13266, 13267, 13270, 13275, 13276, 13282, 13285, 13641, 13645, 13646, 13649, 13650, 13652, 13653, 13654, 13655, 13658, 13659, 13642, 13647, 13648, 13656, 13660, 13661, 13664, 13669, 13670, 13671, 13672, 13673, 13675, 13676, 13677, 13681, 13683, 13685, 13687, 13689, 13691, 13693, 13696, 13665, 13668, 13674, 13678, 13682, 13684, 13686, 13688, 13690, 13692, 13694, 13695, 13697, 13701, 13702, 13703, 13709, 13713, 13714, 13715, 13719, 13721, 13722, 13726, 13728, 13732, 13735, 13740, 13698, 13704, 13705, 13706, 13707, 13708, 13710, 13716, 13717, 13718, 13720, 13723, 13724, 13725, 13727, 13729, 13733, 13734, 13736, 13739, 13741, 13744, 13745, 13749, 13751, 13752, 13753, 13754, 13758, 13762, 13765, 13766, 13768, 13772, 13773, 13774, 13777, 13778, 13779, 13783, 13785, 13790, 13791, 13797, 13802, 13803, 13805, 13806, 13807, 13809, 13812, 13814, 13816, 13817, 13818, 13819, 13820, 13823, 13824, 13826, 13828, 13746, 13755, 13759, 13763, 13764, 13767, 13769, 13775, 13776, 13780, 13784, 13786, 13788, 13789, 13792, 13795, 13796, 13798, 13800, 13804, 13808, 13813, 13815, 13821, 13822, 13829, 13832, 13837, 13841, 13844, 13845, 13846, 13849, 13854, 13855, 13856, 13857, 13861, 13865, 13869, 13871, 13875, 13879, 13880, 13833, 13836, 13838, 13843, 13847, 13850, 13853, 13858, 13862, 13866, 13870, 13872, 13876, 13881, 13882, 13883, 13889, 13894, 13902, 13903, 13910, 13911, 13914, 13915, 13916, 13928, 13929, 13930, 13931, 13935, 13936, 13937, 13944, 13947, 13948, 13950, 13960, 13961, 13962, 13964, 13965, 13966, 13968, 13970, 13971, 13972, 13976, 13978, 13884, 13887, 13890, 13893, 13895, 13898, 13900, 13904, 13905, 13906, 13907, 13908, 13909, 13912, 13913, 13917, 13920, 13921, 13922, 13923, 13924, 13925, 13926, 13932, 13938, 13941, 13942, 13943, 13945, 13946, 13949, 13953, 13954, 13956, 13957, 13958, 13959, 13963, 13967, 13969, 13974, 13975, 13977, 13980, 13981, 13988, 13989, 13990, 13992, 13994, 13995, 13999, 13982, 13985, 13986, 13987, 13991, 13993, 13996, 14000, 14001, 14002, 14003, 14004, 14009, 14014, 14017, 14020, 14024, 14026, 14029, 14035, 14036, 14040, 14043, 14045, 14051, 14057, 14058, 14059, 14063, 14065, 14066, 14067, 14068, 14069, 14070, 14071, 14073, 14074, 14078, 14079, 14080, 14081, 14082, 14083, 14084, 14085, 14087, 14094, 14095, 14100, 14108, 14109, 14113, 14114, 14118, 14120, 14121, 14122, 14130, 14133, 14138, 14141, 14142, 14143, 14147, 14005, 14008, 14010, 14013, 14015, 14018, 14021, 14025, 14027, 14028, 14030, 14033, 14034, 14037, 14038, 14039, 14041, 14042, 14044, 14046, 14049, 14050, 14052, 14055, 14056, 14060, 14064, 14072, 14077, 14086, 14088, 14089, 14090, 14091, 14092, 14093, 14096, 14097, 14098, 14099, 14101, 14102, 14103, 14104, 14105, 14106, 14107, 14110, 14115, 14123, 14126, 14127, 14132, 14134, 14135, 14136, 14137, 14139, 14140, 14144, 14145, 14148, 14151, 14155, 14157, 14161, 14166, 14171, 14175, 14183, 14187, 14190, 14192, 14194, 14195, 14196, 14200, 14201, 14152, 14156, 14158, 14162, 14165, 14167, 14170, 14172, 14176, 14179, 14180, 14182, 14184, 14185, 14186, 14188, 14189, 14191, 14193, 14197, 14198, 14199, 14202, 14203, 14204, 14210, 14211, 14216, 14217, 14223, 14226, 14228, 14229, 14230, 14233, 14235, 14239, 14241, 14243, 14244, 14250, 14254, 14255, 14256, 14257, 14260, 14261, 14262, 14267, 14268, 14269, 14273, 14274, 14277, 14281, 14284, 14286, 14289, 14292, 14293, 14297, 14299, 14301, 14304, 14305, 14306, 14312, 14316, 14320, 14322, 14324, 14328, 14329, 14331, 14337, 14342, 14344, 14346, 14347, 14349, 14350, 14353, 14356, 14361, 14363, 14364, 14365, 14366, 14205, 14208, 14212, 14215, 14218, 14221, 14224, 14225, 14227, 14231, 14236, 14240, 14242, 14245, 14246, 14247, 14251, 14263, 14266, 14270, 14278, 14282, 14283, 14285, 14287, 14290, 14291, 14294, 14298, 14300, 14302, 14303, 14307, 14310, 14313, 14317, 14323, 14325, 14327, 14330, 14334, 14338, 14340, 14341, 14345, 14348, 14351, 14352, 14354, 14355, 14357, 14358, 14359, 14360, 14367, 14368, 14372, 14373, 14375, 14386, 14369, 14374, 14376, 14379, 14380, 14381, 14382, 14383, 14384, and SEQ ID NO:14385.

[0278] Step e) of the method, namely the detection of the specific amplificates indicative of the methylation status of one or more CpG positions according to SEQ ID NOS:1 to SEQ ID NO:64 is carried out by means of real-time detection methods as described above, and wherein the sequence of said hybridization probes is selected from the group consisting of SEQ ID NOS:2753, 2756, 2758, 2761, 2766, 2770, 2774, 2778, 2799, 2807, 2813, 2819, 2822, 2826, 2848, 2857, 2900, 2906, 2908, 2910, 2913, 2921, 2925, 2940, 2943, 2952, 2964, 2983, 2986, 3009, 3012, 3015, 3024, 3030, 3035, 3046, 3058, 3062, 3067, 3070, 3074, 3077, 3079, 3082, 3087, 3095, 3099, 3102, 3106, 3112, 3120, 3125, 3129, 3132, 3141, 3143, 3154, 3156, 3158, 3161, 3177, 3188, 3191, 3193, 3200, 3208, 3211, 3220, 3231, 3241, 3251, 3254, 3258, 3263, 3272, 3277, 3288, 3294, 3296, 3299, 3303, 3317, 3323, 3326, 3329, 3336, 3341, 3362, 3366, 3370, 3375, 3379, 3382, 3387, 3394, 3398, 3405, 3407, 3410, 3412, 3416, 3422, 3425, 3430, 3449, 3451, 3457, 3460, 3465, 3468, 3486, 3498, 3502, 3507, 3523, 3532, 3539, 3546, 3550, 3567, 3572, 3579, 3582, 3610, 3620, 3628, 3648, 3659, 3664, 3672, 3675, 3680, 3682, 3685, 3687, 3699, 3712, 3716, 3720, 3734, 3751, 3763, 3766, 3769, 3783, 3789, 3795, 3811, 3816, 3825, 3830, 3835, 3841, 3843, 3846, 3849, 3855, 3859, 3879, 3882, 3910, 3912, 3913, 3918, 3925, 3929, 3932, 3946, 3953, 3956, 3967, 3969, 3973, 3977, 3989, 3992, 3996, 3999, 4002, 4008, 4014, 4026, 4030, 4036, 4041, 4044, 4053, 4057, 4060, 4062, 4081, 4091, 4097, 4103, 4107, 4118, 4126, 4140, 4143, 4147, 4155, 4158, 4164, 4175, 4178, 4183, 4187, 4193, 4200, 4203, 4210, 4212, 4215, 4222, 4227, 4230, 4235, 4240, 4250, 4253, 4264, 4278, 4294, 4312, 4314, 4320, 4329, 4339, 4346, 4356, 4363, 4380, 4402, 4404, 4414, 4419, 4421, 4431, 4439, 4445, 4449, 4459, 4468, 4483, 4493, 4500, 4513, 4526, 4527, 4532, 4544, 4550, 4552, 4566, 4577, 4591, 4594, 4604, 4608, 4623, 4625, 4629, 4637, 4651, 4654, 4657, 4673, 4679, 4682, 4692, 4698, 4710, 4712, 4713, 4723, 4725, 4729, 4734, 4740, 4743, 4747, 4752, 4757, 4762, 4765, 4775, 4781, 4796, 4799, 4803, 4809, 4826, 4831, 4863, 4866, 4880, 4888, 4914, 4916, 4931, 4933, 4939, 4955, 4959, 4962, 4965, 4994, 5001, 5008, 5012, 5023, 5029, 5035, 5046, 5059, 5063, 5068, 5071, 5079, 5082, 5085, 5089, 5092, 5095, 5098, 5102, 5108, 5113, 5118, 5122, 5127, 5130, 5133, 5138, 5141, 5146, 5152, 5154, 5178, 5192, 5197, 5206, 5213, 5228, 5236, 5243, 5258, 5267, 5275, 5277, 5283, 5294, 5298, 5302, 5305, 5320, 5325, 5328, 5335, 5345, 5350, 5357, 5374, 5381, 5384, 5386, 5390, 5397, 5402, 5406, 5411, 5423, 5430, 5439, 5453, 5463, 5473, 5476, 5479, 5483, 5489, 5514, 5520, 5523, 5530, 5547, 5584, 5590, 5607, 5610, 5613, 5617, 5621, 5631, 5636, 5641, 5653, 5655, 5658, 5666, 5669, 5675, 5685, 5692, 5695, 5703, 5706, 5716, 5719, 5726, 5738, 5746, 5749, 5752, 5755, 5757, 5761, 5765, 5772, 5784, 5799, 5805, 5815, 5819, 5829, 5851, 5869, 5901, 5908, 5911, 5914, 5917, 5925, 5941, 5951, 5967, 5974, 5979, 5982, 5985, 5989, 5995, 6022, 6029, 6044, 6047, 6052, 6057, 6061, 6069, 6071, 6080, 6082, 6087, 6092, 6095, 6102, 6104, 6107, 6109, 6113, 6124, 6129, 6140, 6147, 6158, 6165, 6179, 6185, 6203, 6209, 6217, 6228, 6249, 6263, 6267, 6279, 6290, 6332, 6339, 6343, 6346, 6352, 6363, 6366, 6370, 6380, 6385, 6391, 6396, 6408, 6430, 6439, 6454, 6456, 6477, 6483, 6488, 6495, 6509, 6517, 6520, 6530, 6534, 6555, 6557, 6559, 6569, 6574, 6581, 6593, 6616, 6622, 6626, 6636, 6637, 6648, 6654, 6667, 6673, 6684, 6724, 6729, 6733, 6737, 6743, 6750, 6753, 6763, 6766, 6768, 6771, 6776, 6780, 6788, 6793, 6808, 6813, 6820, 6823, 6826, 6846, 6856, 6864, 6867, 6878, 6885, 6903, 6914, 6919, 6923, 6926, 6938, 6941, 6978, 6982, 6985, 6988, 6994, 6997, 7000, 7004, 7008, 7015, 7019, 7021, 7069, 7079, 7099, 7104, 7117, 7120, 7145, 7151, 7153, 7162, 7164, 7169, 7201, 7209, 7234, 7238, 7252, 7286, 7288, 7300, 7305, 7313, 7323, 7327, 7338, 7343, 7346, 7352, 7377, 7380, 7396, 7399, 7406, 7412, 7414, 7418, 7424, 7429, 7437, 7441, 7443, 7458, 7461, 7469, 7473, 7491, 7502, 7504, 7514, 7531, 7551, 7553, 7557, 7562, 7564, 7569, 7572, 7592, 7602, 7605, 7612, 7625, 7630, 7632, 7634, 7648, 7653, 7664, 7668, 7693, 7696, 7706, 7763, 7766, 7769, 7772, 7777, 7780, 7787, 7790, 7801, 7804, 7806, 7826, 7831, 7850, 7859, 7862, 7867, 7876, 7883, 7887, 7891, 7893, 7895, 7898, 7901, 7906, 7908, 7911, 7915, 7924, 7927, 7930, 7935, 7959, 7961, 7966, 7975, 7978, 7984, 7994, 7998, 8002, 8014, 8029, 8032, 8037, 8041, 8045, 8048, 8058, 8063, 8086, 8092, 8097, 8106, 8109, 8120, 8140, 8141, 8159, 8162, 8172, 8196, 8205, 8211, 8215, 8219, 8226, 8234, 8241, 8249, 8262, 8265, 8272, 8276, 8279, 8283, 8290, 8300, 8308, 8320, 8338, 8355, 8358, 8368, 8380, 8386, 8389, 8393, 8396, 8400, 8404, 8408, 8417, 8421, 8427, 8430, 8439, 8441, 8443, 8453, 8459, 8471, 8483, 8495, 8507, 8509, 8525, 8538, 8540, 8543, 8549, 8553, 8559, 8561, 8573, 8579, 8584, 8590, 8593, 8605, 8611, 8622, 8626, 8656, 8664, 8721, 8724, 8731, 8740, 8743, 8746, 8765, 8774, 8781, 8792, 8795, 8811, 8817, 8822, 8825, 8834, 8839, 8849, 8858, 8860, 8862, 8875, 8886, 8910, 8915, 8919, 8922, 8926, 8940, 8947, 8956, 8959, 8973, 8982, 8986, 8991, 8996, 9000, 9015, 9027, 9031, 9040, 9057, 9059, 9062, 9065, 9073, 9076, 9101, 9115, 9117, 9120, 9132, 9145, 9161, 9170, 9179, 9196, 9210, 9213, 9225, 9236, 9242, 9245, 9250, 9255, 9259, 9262, 9268, 9272, 9294, 9299, 9306, 9315, 9330, 9341, 9343, 9346, 9350, 9359, 9362, 9366, 9369, 9373, 9381, 9387, 9392, 9396, 9404, 9427, 9442, 9463, 9472, 9476, 9481, 9484, 9486, 9491, 9507, 9510, 9531, 9540, 9553, 9562, 9568, 9572, 9575, 9582, 9590, 9597, 9600, 9610, 9616, 9620, 9629, 9636, 9642, 9648, 9655, 9669, 9674, 9678, 9681, 9685, 9689, 9696, 9704, 9709, 9725, 9728, 9731, 9736, 9740, 9743, 9752, 9770, 9774, 9779, 9785, 9799, 9802, 9814, 9824, 9829, 9834, 9874, 9884, 9888, 9906, 9910, 9927, 9930, 9951, 9965, 9971, 9977, 10024, 10029, 10039, 10052, 10063, 10066, 10073, 10076, 10085, 10108, 10115, 10128, 10136, 10146, 10158, 10162, 10168, 10171, 10180, 10185, 10208, 10217, 10238, 10246, 10250, 10281, 10284, 10289, 10294, 10296, 10303, 10316, 10324, 10332, 10334, 10339, 10353, 10364, 10368, 10371, 10389, 10393, 10396, 10397, 10400, 10405, 10409, 10421, 10424, 10436, 10441, 10450, 10458, 10472, 10474, 10479, 10482, 10486, 10496, 10505, 10512, 10527, 10549, 10555, 10562, 10567, 10570, 10575, 10585, 10587, 10591, 10595, 10599, 10608, 10615, 10620, 10623, 10629, 10636, 10677, 10680, 10686, 10692, 10695, 10698, 10701, 10706, 10708, 10715, 10731, 10736, 10753, 10756, 10766, 10771, 10774, 10777, 10785, 10787, 10795, 10797, 10803, 10810, 10825, 10828, 10832, 10836, 10852, 10855, 10867, 10876, 10887, 10891, 10895, 10898, 10913, 10918, 10921, 10923, 10936, 10940, 10949, 10961, 10964, 10974, 10983, 10990, 10994, 11003, 11008, 11011, 11018, 11024, 11035, 11038, 11057, 11095, 11378, 11389, 11393, 11407, 11413, 11420, 11426, 11436, 11440, 11454, 11470, 11491, 11495, 11530, 11437, 11441, 11455, 11471, 11492, 11496, 11516, 11531, 11533, 11537, 11543, 11558, 11564, 11575, 11538, 11544, 11559, 11565, 11567, 11576, 11580, 11583, 11588, 11581, 11584, 11589, 11599, 11634, 11604, 11611, 11620, 11624, 11630, 11605, 11612, 11621, 11625, 11631, 11637, 11650, 11638, 11651, 11661, 11668, 11679, 11683, 11703, 11707, 11711, 11714, 11717, 11721, 11726, 11741, 11753, 11757, 11766, 11771, 11780, 11662, 11669, 11680, 11684, 11704, 11708, 11712, 11715, 11718, 11722, 11742, 11754, 11758, 11760, 11781, 11788, 11794, 11789, 11795, 11798, 11807, 11812, 11816, 11821, 11831, 11842, 11854, 11799, 11808, 11813, 11822, 11826, 11832, 11834, 11838, 11843, 11849, 11855, 11859, 11869, 11873, 11880, 11884, 11896, 11870, 11874, 11881, 11885, 11897, 11900, 11906, 11920, 11935, 11939, 11944, 11957, 11961, 11965, 11970, 11974, 11983, 11901, 11907, 11921, 11936, 11940, 11945, 11958, 11962, 11966, 11971, 11975, 11984, 12008, 12013, 12018, 12029, 12036, 12040, 12047, 12074, 12078, 12083, 12105, 12116, 12009, 12014, 12019, 12030, 12037, 12041, 12048, 12053, 12075, 12079, 12036, 12092, 12106, 12117, 12126, 12132, 12151, 12155, 12133, 12152, 12156, 12166, 12173, 12178, 12183, 12189, 12192, 12204, 12211, 12218, 12235, 12246, 12252, 12282, 12293, 12298, 12301, 12304, 12310, 12315, 12319, 12334, 12350, 12357, 12365, 12374, 12387, 12391, 12395, 12416, 12426, 12444, 12451, 12456, 12167, 12174, 12179, 12184, 12193, 12205, 12212, 12215, 12219, 12236, 12247, 12253, 12261, 12275, 12283, 12294, 12299, 12305, 12311, 12316, 12320, 12329, 12335, 12344, 12351, 12358, 12366, 12368, 12375, 12384, 12388, 12392, 12396, 12399, 12407, 12414, 12421, 12427, 12431, 12434, 12447, 12452, 12457, 12463, 12470, 12473, 12482, 12464, 12466, 12471, 12476, 12479, 12491, 12503, 12509, 12513, 12516, 12514, 12532, 12539, 12544, 12557, 12562, 12567, 12576, 12583, 12588, 12591, 12606, 12612, 12622, 12628, 12510, 12514, 12519, 12526, 12527, 12533, 12540, 12545, 12558, 12563, 12568, 12577, 12580, 12584, 12589, 12598, 12607, 12619, 12623, 12629, 12633, 12642, 12645, 12650, 12656, 12668, 12674, 12676, 12697, 12707, 12722, 12734, 12741, 12759, 12773, 12779, 12783, 12802, 12806, 12810, 12819, 12829, 12634, 12646, 12651, 12657, 12659, 12669, 12698, 12708, 12711, 12723, 12707, 12727, 12735, 12742, 12774, 12780, 12784, 12803, 12807, 12811, 12820, 12830, 12847, 12852, 12859, 12864, 12874, 12905, 12915, 12925, 12930, 12934, 12940, 12944, 12946, 12955, 12848, 12853, 12856, 12860, 12865, 12875, 12897, 12906, 12916, 12922, 12926, 12931, 12935, 12941, 12930, 12947, 12952, 12956, 12963, 12979, 12964, 12980, 12984, 13003, 12985, 12988, 12990, 12994, 13004, 13007, 13011, 13015, 13027, 13046, 13055, 13059, 13080, 13094, 13098, 13112, 13120, 13134, 13140, 13150, 13154, 13161, 13187, 13008, 13012, 13016, 13028, 13047, 13056, 13060, 13081, 13095, 13099, 13103, 13106, 13113, 13116, 13135, 13136, 13141, 13151, 13155, 13162, 13188, 13193, 13202, 13194, 13203, 13205, 13209, 13215, 13218, 13236, 13252, 13260, 13271, 13283, 13210, 13216, 13219, 13221, 13223, 13230, 13238, 13243, 13253, 13261, 13272, 13278, 13284, 13643, 13644, 13651, 13657, 13662, 13663, 13666, 13679, 13667, 13680, 13699, 13711, 13730, 13737, 13742, 13700, 13712, 13731, 13738, 13743, 13747, 13756, 13760, 13781, 13793, 13801, 13810, 13830, 13748, 13750, 13757, 13761, 13770, 13771, 13782, 13787, 13794, 13799, 13811, 13825, 13827, 13831, 13834, 13839, 13851, 13859, 13863, 13867, 13873, 13877, 13835, 13840, 13842, 13848, 13852, 13860, 13864, 13868, 13874, 13878, 13885, 13886, 13891, 13896, 13901, 13918, 13927, 13933, 13939, 13951, 13886, 13888, 13892, 13897, 13899, 13901, 13919, 13934, 13940, 13952, 13955, 13973, 13979, 13983, 13997, 13984, 13998, 14006, 14011, 14019, 14022, 14031, 14047, 14053, 14061, 14075, 14111, 14116, 14124, 14149, 14007, 14012, 14016, 14023, 14032, 14048, 14054, 14062, 14076, 14112, 14117, 14119, 14125, 14128, 14129, 14131, 14146, 14150, 14153, 14159, 14163, 14168, 14173, 14177, 14154, 14160, 14164, 14169, 14174, 14178, 14181, 14206, 14213, 14219, 14237, 14248, 14252, 14258, 14264, 14271, 14275, 14279, 14295, 14308, 14311, 14314, 14318, 14332, 14335, 14339, 14343, 14207, 14209, 14214, 14220, 14222, 14232, 14234, 14238, 14249, 14253, 14259, 14265, 14272, 14276, 14280, 14288, 14296, 14309, 14315, 14319, 14321, 14326, 14333, 14336, 14362, 14370, 14377, 14371 and SEQ ID NO:14378.

[0279] For each genomic sequence listed, the following oligonucleotides as detailed in the sequence listing may be used for a combined MSP-RealTime analysis:

[0280] Taqman Real-time single probe detection assays:

### SEQ ID NO: 41

[0281] left Primer: 2751, 2754, 2757, 2759, 2767, 2768, 2772, 2776, 2779, 2784, 2785, 2786, 2789, 2791, 2792, 2794, 2797, 2798, 2801, 2805, 2806, 2809, 2811, 2815, 2817, 2824, 2830, 2832, 2833, 2834, 2838, 2840, 2843, 2846, 2850, 2851, 2853, 2855, 2859, 2866, 2867, 2870, 2871, 2876, 2878, 2881, 2885, 2886, 2892, 2893, 2895, 2896, 2898, 2904, 2912, 2915, 2917, 2919, 2922, 2923, 2929, 2931, 2939, 2941, 2944, 2946, 2948, 2950, 2955, 2956, 2957, 2960, 2962, 2965, 2966, 2967, 2968, 2969, 2971, 2975, 2976, 2977, 2978, 2979, 2980, 2981, 2984, 2988, 2989, 2990, 2992, 2994, 2997, 2999, 3001, 3002, 3004, 3006, 3007, 3008, 3010, 3013, 3014, 3016, 3017, 3018, 3020, 3022, 3025,

[0282] right Primer: 2752, 2755, 2760, 2762, 2763, 2764, 2765, 2769, 2771, 2773, 2775, 2777, 2780, 2781, 2782, 2783, 2787, 2788, 2790, 2793, 2795, 2796, 2800, 2802, 2803, 2804, 2808, 2810, 2812, 2814, 2816, 2818, 2820, 2821, 2823, 2825, 2827, 2828, 2829, 2831, 2835, 2836, 2837, 2839, 2841, 2842, 2844, 2845, 2847, 2849, 2852, 2854, 2856, 2858, 2860, 2861, 2862, 2863, 2864, 2865, 2868, 2869, 2872, 2873, 2874, 2875, 2877, 2879, 2880, 2882, 2883, 2884, 2887, 2888, 2889, 2890, 2891, 2894, 2897, 2899, 2901, 2902, 2903, 2905, 2907, 2909, 2911, 2914, 2916, 2918, 2920, 2924, 2926, 2927, 2928, 2930, 2932, 2933, 2934, 2935, 2936, 2937, 2938, 2942, 2945, 2947, 2949, 2951, 2953, 2954, 2958, 2959, 2961, 2963, 2970, 2972, 2973, 2974, 2982, 2985, 2987, 2991, 2993, 2995, 2996, 2998, 3000, 3003, 3005, 3011, 3019, 3021, 3023, 3026, 3027,

[0283] Detection: 2753, 2756, 2758, 2761, 2766, 2770, 2774, 2778, 2799, 2807, 2813, 2819, 2822, 2826, 2848, 2857, 2900, 2906, 2908, 2910, 2913, 2921, 2925, 2940, 2943, 2952, 2964, 2983, 2986, 3009, 3012, 3015, 3024,

### SEQ ID NO: 5

[0284] left Primer: 3028, 3032, 3033, 3036, 3037, 3038, 3039, 3041, 3042, 3043, 3044, 3047, 3048, 3049, 3052, 3055, 3059, 3061, 3064, 3065, 3068, 3069, 3071, 3072, 3075, 3076, 3080, 3083, 3084, 3085, 3086, 3091, 3093, 3096, 3097, 3100, 3104, 3109, 3110, 3113, 3115, 3117, 3118, 3123, 3126, 3127, 3130, 3134, 3135, 3136, 3138, 3139, 3144, 3146, 3147, 3149, 3150, 3155,

[0285] right Primer: 3029, 3031, 3034, 3040, 3045, 3050, 3051, 3053, 3054, 3056, 3057, 3060, 3063, 3066, 3073, 3078, 3081, 3088, 3089, 3090, 3092, 3094, 3098, 3101, 3103, 3105, 3107, 3108, 3111, 3114, 3116, 3119, 3121, 3122, 3124, 3128, 3131, 3133, 3137, 3140, 3142, 3145, 3148, 3151, 3152, 3153, 3157,

[0286] Detection: 3030, 3035, 3046, 3058, 3062, 3067, 3070, 3074, 3077, 3079, 3082, 3087, 3095, 3099, 3102, 3106, 3112, 3120, 3125, 3129, 3132, 3141, 3143, 3154, 3156, 3158,

### SEQ ID NO: 6

[0287] left Primer: 3159, 3165, 3166, 3167, 3170, 3171, 3172, 3174, 3175, 3176, 3179, 3180, 3181, 3184, 3185, 3186, 3192, 3194, 3198, 3201, 3202, 3203, 3204, 3206, 3209, 3212, 3213, 3215, 3216, 3217, 3218, 3221, 3224, 3226, 3228, 3229, 3230, 3232, 3233, 3234, 3235, 3237, 3238, 3239, 3245, 3247, 3248, 3249,

[0288] right Primer: 3160, 3162, 3163, 3164, 3168, 3169, 3173, 3178, 3182, 3183, 3187, 3189, 3190, 3195, 3196, 3197, 3199, 3205, 3207, 3210, 3214, 3219, 3222, 3223, 3225, 3227, 3236, 3240, 3242, 3243, 3244, 3246, 3250,

[0289] Detection: 3161, 3177, 3188, 3191, 3193, 3200, 3208, 3211, 3220, 3231, 3241, 3251,

### SEQ ID NO: 8

[0290] left Primer: 3252, 3256, 3261, 3264, 3268, 3269, 3270, 3273, 3275, 3279, 3280, 3281, 3282, 3283, 3284, 3285, 3286, 3290, 3292, 3295, 3297, 3301, 3304, 3305, 3306, 3307, 3308, 3310, 3311, 3312, 3315, 3319, 3320, 3324, 3327, 3331, 3333, 3334, 3339, 3348, 3351, 3354, 3358, 3360, 3364, 3367, 3368, 3374, 3376,

[0291] right Primer: 3253, 3255, 3257, 3259, 3260, 3262, 3265, 3266, 3267, 3271, 3274, 3276, 3278, 3287, 3289, 3291, 3293, 3298, 3300, 3302, 3309, 3313, 3314, 3316, 3318, 3321, 3322, 3325, 3328, 3330, 3332, 3335, 3337, 3338, 3340, 3342, 3343, 3344, 3345, 3346, 3347, 3349, 3350, 3352, 3353, 3355, 3356, 3357, 3359, 3361, 3363, 3365, 3369, 3371, 3372, 3373,

[0292] Detection: 3254, 3258, 3263, 3272, 3277, 3288, 3294, 3296, 3299, 3303, 3317, 3323, 3326, 3329, 3336, 3341, 3362, 3366, 3370, 3375,

### SEQ ID NO: 16

[0293] left Primer: 3377, 3380, 3383, 3386, 3388, 3389, 3390, 3391, 3392, 3395, 3396, 3400, 3401,

[0294] right Primer: 3378, 3381, 3384, 3385, 3393, 3397, 3399, 3402,

[0295] Detection: 3379, 3382, 3387, 3394, 3398,

### SEQ ID NO: 42

[0296] left Primer: 3403, 3406, 3408, 3413, 3414, 3417, 3420, 3423, 3428, 3432, 3433, 3434, 3436, 3439, 3440, 3442, 3443, 3445, 3447, 3453, 3455, 3458, 3463, 3466, 3469, 3470, 3471, 3472, 3473, 3474, 3475, 3477, 3478, 3480, 3481, 3483, 3484, 3487, 3490, 3494, 3495, 3496, 3497, 3499, 3500, 3504, 3505, 3508, 3512, 3514, 3515, 3516, 3521, 3525, 3529, 3533, 3534, 3537, 3538, 3540, 3541, 3542, 3543, 3544, 3547, 3548, 3553, 3557, 3558, 3559, 3560, 3562, 3563, 3566, 3571, 3574, 3575, 3577, 3580, 3583, 3584, 3585, 3586, 3592, 3594, 3595, 3597, 3598, 3599, 3601, 3603, 3604, 3607, 3608, 3612, 3619, 3621, 3622, 3626, 3631, 3632, 3637, 3638, 3639, 3640, 3642, 3643, 3644, 3646, 3647, 3649, 3650, 3652, 3656, 3657, 3660, 3663, 3668, 3670, 3673, 3676, 3677, 3678, 3683, 3688, 3690, 3694, 3697, 3700, 3702, 3703, 3704, 3708,

[0297] right Primer: 3404, 3409, 3411, 3415, 3418, 3419, 3421, 3424, 3426, 3427, 3429, 3431, 3435, 3437, 3438, 3441, 3444, 3446, 3448, 3450, 3452, 3454, 3456, 3459, 3461, 3462, 3464, 3467, 3476, 3479, 3482, 3485, 3488, 3489, 3491, 3492, 3493, 3501, 3503, 3506, 3509, 3510, 3511, 3513, 3517, 3518, 3519, 3520, 3522, 3524, 3526, 3527, 3528, 3530, 3531, 3535, 3536, 3545, 3549, 3551, 3552, 3554, 3555, 3556, 3561, 3564, 3565, 3568, 3569, 3570, 3573, 3576, 3578, 3581, 3587, 3588, 3589, 3590, 3591, 3593, 3596, 3600, 3602, 3605, 3606, 3609, 3611, 3613, 3614, 3615, 3616, 3617, 3618, 3623, 3624, 3625, 3627, 3629, 3630, 3633, 3634, 3635, 3636, 3641, 3645, 3651, 3653, 3654, 3655, 3658, 3661, 3662, 3665, 3666, 3667, 3669, 3671, 3674, 3679, 3681, 3684, 3686, 3689, 3691, 3692, 3693, 3695, 3696, 3698, 3701, 3705, 3706, 3707, 3709,

[0298] Detection: 3405, 3407, 3410, 3412, 3416, 3422, 3425, 3430, 3449, 3451, 3457, 3460, 3465, 3468, 3486, 3498, 3502, 3507, 3523, 3532, 3539, 3546, 3550, 3567, 3572, 3579, 3582, 3610, 3620, 3628, 3648, 3659, 3664, 3672, 3675, 3680, 3682, 3685, 3687, 3699,

### SEQ ID NO: 14

[0299] left Primer: 3710, 3714, 3715, 3717, 3718, 3722, 3723, 3729, 3730, 3732, 3735, 3739, 3740, 3741, 3743, 3744, 3745, 3746, 3749, 3753, 3754, 3755, 3756,

[0300] right Primer: 3711, 3713, 3719, 3721, 3724, 3725, 3726, 3727, 3728, 3731, 3733, 3736, 3737, 3738, 3742, 3747, 3748, 3750, 3752, 3757, 3758, 3759, 3760,

[0301] Detection: 3712, 3716, 3720, 3734, 3751,

### SEQ ID NO: 43

[0302] left Primer: 3761, 3764, 3767, 3771, 3773, 3775, 3776, 3777, 3781, 3785, 3786, 3787, 3790, 3791, 3793, 3796, 3797, 3798, 3799, 3805, 3809, 3814, 3817, 3818, 3822, 3823, 3828, 3833, 3836, 3844, 3847, 3850, 3851, 3853, 3856, 3857, 3862, 3873, 3876, 3877, 3880, 3885, 3887, 3889, 3890, 3892, 3893, 3895, 3896, 3899, 3902, 3903, 3905, 3906, 3907, 3908, 3916, 3923, 3926, 3927, 3930, 3935, 3936, 3938, 3939, 3940, 3944, 3945, 3949, 3950, 3951, 3954, 3955, 3957, 3960, 3965, 3970, 3971, 3978, 3979, 3982, 3983, 3984, 3985,

[0303] right Primer: 3762, 3765, 3768, 3770, 3772, 3774, 3778, 3779, 3780, 3782, 3784, 3788, 3792, 3794, 3800, 3801, 3802, 3803, 3804, 3806, 3807, 3808, 3810, 3812, 3813, 3815, 3819, 3820, 3821, 3824, 3826, 3827, 3829, 3831, 3832, 3834, 3837, 3838, 3839, 3840, 3842, 3845, 3848, 3852, 3854, 3858, 3860, 3861, 3863, 3864, 3865, 3866, 3867, 3868, 3869, 3870, 3871, 3872, 3874, 3875, 3878, 3881, 3883, 3884, 3886, 3888, 3891, 3894, 3897, 3898, 3900, 3901, 3904, 3909, 3911, 3914, 3915, 3917, 3919, 3920, 3921, 3922, 3924, 3928, 3931, 3933, 3934, 3937, 3941, 3942, 3943, 3947, 3948, 3952, 3958, 3959, 3961, 3962, 3963, 3964, 3966, 3968, 3972, 3974, 3975, 3976, 3980, 3981, 3986,

[0304] Detection: 3763, 3766, 3769, 3783, 3789, 3795, 3811, 3816, 3825, 3830, 3835, 3841, 3843, 3846, 3849, 3855, 3859, 3879, 3882, 3910, 3912, 3913, 3918, 3925, 3929, 3932, 3946, 3953, 3956, 3967, 3969, 3973, 3977,

### SEQ ID NO: 15

[0305] left Primer: 3987, 3990, 3993, 3994, 3997, 4000, 4003, 4004, 4006, 4012, 4015, 4017, 4020, 4024, 4027, 4029, 4031, 4032, 4033, 4037, 4038, 4040, 4042, 4047, 4048, 4050, 4051, 4052, 4054, 4055, 4058, 4063, 4066, 4069, 4070, 4072, 4073, 4076, 4078, 4079, 4082, 4083, 4084, 4085, 4086, 4090, 4093, 4094, 4095, 4096, 4099, 4100, 4104, 4106, 4113, 4116, 4119, 4120, 4124, 4127, 4130, 4134, 4135, 4136, 4138, 4142, 4145, 4146, 4149, 4150, 4152, 4153, 4159, 4160, 4161, 4163, 4168, 4169, 4171, 4173, 4176, 4180, 4181, 4185, 4189, 4191, 4192, 4194, 4197, 4198, 4199, 4201, 4206, 4207, 4208, 4213, 4219, 4220, 4223, 4224, 4225, 4228, 4231, 4232, 4233, 4237, 4238, 4242, 4243, 4246, 4247, 4251, 4254, 4255, 4256, 4258,

[0306] right Primer: 3988, 3991, 3995, 3998, 4001, 4005, 4007, 4009, 4010, 4011, 4013, 4016, 4018, 4019, 4021, 4022, 4023, 4025, 4028, 4034, 4035, 4039, 4043, 4045, 4046, 4049, 4056, 4059, 4061, 4064, 4065, 4067, 4068, 4071, 4074, 4075, 4077, 4080, 4087, 4088, 4089, 4092, 4098, 4101, 4102, 4105, 4108, 4109, 4110, 4111, 4112, 4114, 4115, 4117, 4121, 4122, 4123, 4125, 4128, 4129, 4131, 4132, 4133, 4137, 4139, 4141, 4144, 4148, 4151, 4154, 4156, 4157, 4162, 4165, 4166, 4167, 4170, 4172, 4174, 4177, 4179, 4182, 4184, 4186, 4188, 4190, 4195, 4196, 4202, 4204, 4205, 4209, 4211, 4214, 4216, 4217, 4218, 4221, 4226, 4229, 4234, 4236, 4239, 4241, 4244, 4245, 4248, 4249, 4252, 4257, 4259, 4260, 4261,

[0307] Detection: 3989, 3992, 3996, 3999, 4002, 4008, 4014, 4026, 4030, 4036, 4041, 4044, 4053, 4057, 4060, 4062, 4081, 4091, 4097, 4103, 4107, 4118, 4126, 4140, 4143, 4147, 4155, 4158, 4164, 4175, 4178, 4183, 4187, 4193, 4200, 4203, 4210, 4212, 4215, 4222, 4227, 4230, 4235, 4240, 4250, 4253,

### SEQ ID NO:4

[0308] left Primer: 4262, 4266, 4267, 4268, 4271, 4272, 4275, 4276, 4279, 4281, 4282, 4284, 4285, 4287, 4289, 4290, 4292, 4295, 4297, 4299, 4301, 4306, 4310, 4316, 4317, 4318, 4321, 4323, 4325, 4328, 4334, 4335, 4337, 4341, 4342, 4343, 4344, 4348, 4350, 4351, 4352, 4354, 4357, 4358, 4359, 4364, 4365, 4366, 4370, 4371, 4372, 4373, 4376, 4378, 4381, 4383, 4384, 4386, 4388, 4396, 4397, 4399, 4400, 4403, 4405, 4407, 4409, 4412, 4415, 4416, 4417, 4424, 4426, 4429, 4433, 4435, 4437, 4442, 4443, 4447, 4450, 4451, 4452, 4455, 4457, 4460, 4461, 4462, 4465, 4466, 4469, 4470, 4474, 4478, 4481, 4484, 4488, 4491, 4494, 4495, 4497, 4498, 4504, 4506, 4509, 4510, 4511, 4514, 4516, 4518, 4520, 4521, 4523, 4525, 4528, 4530, 4533, 4534, 4535, 4538, 4540, 4542, 4545, 4547, 4548, 4553, 4554, 4555, 4556, 4557, 4562, 4564, 4567, 4568, 4569, 4579, 4580, 4582, 4584, 4587, 4589, 4593, 4596, 4597, 4598, 4600, 4601, 4602, 4605, 4606, 4607, 4609, 4610, 4613, 4614, 4616, 4618, 4621, 4624, 4626, 4627, 4628, 4631, 4632, 4636, 4639, 4641, 4644, 4645, 4648,

[0309] right Primer: 4263, 4265, 4269, 4270, 4273, 4274, 4277, 4280, 4283, 4286, 4288, 4291, 4293, 4296, 4298, 4300, 4302, 4303, 4304, 4305, 4307, 4308, 4309, 4311, 4313, 4315, 4319, 4322, 4324, 4326, 4327, 4330, 4331, 4332, 4333, 4336, 4338, 4340, 4345, 4347, 4349, 4353, 4355, 4360, 4361, 4362, 4367, 4368, 4369, 4374, 4375, 4377, 4379, 4382, 4385, 4387, 4389, 4390, 4391, 4392, 4393, 4394, 4395, 4398, 4401, 4406, 4408, 4410, 4411, 4413, 4418, 4420, 4422, 4423, 4425, 4427, 4428, 4430, 4432, 4434, 4436, 4438, 4440, 4441, 4444, 4446, 4448, 4453, 4454, 4456, 4458, 4463, 4464, 4467, 4471, 4472, 4473, 4475, 4476, 4477, 4479, 4480, 4482, 4485, 4486, 4487, 4489, 4490, 4492, 4496, 4499, 4501, 4502, 4503, 4505, 4507, 4508, 4512, 4515, 4517, 4519, 4522, 4524, 4529, 4531, 4536, 4537, 4539, 4541, 4543, 4546, 4549, 4551, 4558, 4559, 4560, 4561, 4563, 4565, 4570, 4571, 4572, 4573, 4574, 4575, 4576, 4578, 4581, 4583, 4585, 4586, 4588, 4590, 4592, 4595, 4599, 4603, 4611, 4612, 4615, 4617, 4619, 4620, 4622, 4630, 4633, 4634, 4635, 4638, 4640, 4642, 4643, 4646, 4647,

[0310] Detection: 4264, 4278, 4294, 4312, 4314, 4320, 4329, 4339, 4346, 4356, 4363, 4380, 4402, 4404, 4414, 4419, 4421, 4431, 4439, 4445, 4449, 4459, 4468, 4483, 4493, 4500, 4513, 4526, 4527, 4532, 4544, 4550, 4552, 4566, 4577, 4591, 4594, 4604, 4608, 4623, 4625, 4629, 4637,

### SEQ ID NO: 7

[0311] left Primer: 4649, 4652, 4655, 4659, 4661, 4663, 4664, 4665, 4668, 4671, 4674, 4675, 4676, 4678, 4680, 4683, 4686, 4690, 4696, 4700, 4703, 4704, 4706, 4709, 4711, 4714, 4715, 4717, 4718, 4719, 4720, 4721, 4726, 4727, 4730, 4732, 4738, 4742, 4745, 4749, 4750, 4753, 4755, 4759, 4763, 4768, 4769, 4772, 4773, 4776, 4778, 4779, 4782, 4784, 4789, 4790, 4794, 4797, 4801, 4805, 4807, 4813, 4814, 4819, 4821, 4822, 4827, 4829, 4833, 4834, 4835, 4837, 4838, 4841, 4842, 4843, 4844, 4847, 4849, 4850, 4852, 4853, 4859, 4860, 4861, 4865, 4867, 4868, 4869, 4870, 4873, 4876, 4877, 4878, 4879, 4883, 4885, 4889, 4891, 4892, 4894, 4895, 4897, 4898, 4903, 4906, 4911, 4912, 4918, 4919, 4920, 4924, 4927, 4929, 4932, 4934, 4941, 4942, 4945, 4948, 4949, 4950,

[0312] right Primer: 4650, 4653, 4656, 4658, 4660, 4662, 4666, 4667, 4669, 4670, 4672, 4677, 4681, 4684, 4685, 4687, 4688, 4689, 4691, 4693, 4694, 4695, 4697, 4699, 4701, 4702, 4705, 4707, 4708, 4716, 4722, 4724, 4728, 4731, 4733, 4735, 4736, 4737, 4739, 4741, 4744, 4746, 4748, 4751, 4754, 4756, 4758, 4760, 4761, 4764, 4766, 4767, 4770, 4771, 4774, 4777, 4780, 4783, 4785, 4786, 4787, 4788, 4791, 4792, 4793, 4795, 4798, 4800, 4802, 4804, 4806, 4808, 4810, 4811, 4812, 4815, 4816, 4817, 4818, 4820, 4823, 4824, 4825, 4828, 4830, 4832, 4836, 4839, 4840, 4845, 4846, 4848, 4851, 4854, 4855, 4856, 4857, 4858, 4862, 4864, 4871, 4872, 4874, 4875, 4881, 4882, 4884, 4886, 4887, 4890, 4893, 4896, 4899, 4900, 4901, 4902, 4904, 4905, 4907, 4908, 4909, 4910, 4913, 4915, 4917, 4921, 4922, 4923, 4925, 4926, 4928, 4930, 4935, 4936, 4937, 4938, 4940, 4943, 4944, 4946, 4947, 4951, 4952,

[0313] Detection: 4651, 4654, 4657, 4673, 4679, 4682, 4692, 4698, 4710, 4712, 4713, 4723, 4725, 4729, 4734, 4740, 4743, 4747, 4752, 4757, 4762, 4765, 4775, 4781, 4796, 4799, 4803, 4809, 4826, 4831, 4863, 4866, 4880, 4888, 4914, 4916, 4931, 4933, 4939,

### SEQ ID NO: 44

[0314] left Primer: 4953,

[0315] right Primer: 4954, 4956,

[0316] Detection: 4955,

### SEQ ID NO:1

[0317] left Primer: 4957, 4960, 4963, 4967, 4970, 4971, 4972, 4976, 4977, 4985, 4986, 4987, 4989, 4991, 4992, 4997, 4999, 5002, 5003, 5004, 5006, 5010, 5013, 5014, 5015, 5017, 5018, 5019, 5020, 5021, 5024, 5025, 5027, 5031, 5032, 5033, 5037, 5040, 5041, 5042, 5043,

[0318] right Primer: 4958, 4961, 4964, 4966, 4968, 4969, 4973, 4974, 4975, 4978, 4979, 4980, 4981, 4982, 4983, 4984, 4988, 4990, 4993, 4995, 4996, 4998, 5000, 5005, 5007, 5009, 5011, 5016, 5022, 5026, 5028, 5030, 5034, 5036, 5038, 5039,

[0319] Detection: 4959, 4962, 4965, 4994, 5001, 5008, 5012, 5023, 5029, 5035,

### SEQ ID NO:2

[0320] left Primer: 5044, 5047, 5049, 5050, 5052, 5054, 5055, 5057, 5060, 5061, 5064,

[0321] right Primer: 5045, 5048, 5051, 5053, 5056, 5058, 5062, 5065,

[0322] Detection: 5046, 5059, 5063,

### SEQ ID NO: 45

[0323] left Primer: 5066, 5069, 5073, 5077, 5080, 5083, 5087, 5093, 5096, 5099, 5100, 5103, 5104, 5106, 5111, 5116, 5119, 5120, 5125, 5128, 5132, 5134, 5135, 5137, 5139, 5140, 5142, 5144, 5148, 5149, 5150, 5155, 5157, 5158, 5160, 5166, 5168, 5170, 5171, 5173, 5176, 5177, 5179, 5184, 5187, 5188, 5190, 5193, 5195, 5198, 5201, 5204, 5208, 5211, 5215, 5216, 5217, 5220, 5221, 5222, 5224, 5226, 5229, 5230, 5231, 5232, 5234, 5237, 5242, 5244, 5245, 5246, 5247, 5249, 5250, 5252, 5254, 5255, 5256, 5261, 5262, 5264, 5265, 5273, 5274, 5276, 5278, 5279, 5281, 5284, 5285, 5286, 5287, 5288, 5289, 5292, 5296, 5300, 5303, 5304, 5307, 5308, 5309, 5313, 5315, 5317, 5318, 5322, 5323, 5326, 5329, 5330, 5333, 5336, 5337, 5341, 5343, 5348, 5349, 5352, 5354, 5355, 5358, 5359, 5361, 5362, 5363, 5364, 5365, 5367, 5369, 5370, 5372, 5375, 5377, 5379, 5382, 5385, 5387, 5393, 5394, 5395, 5398, 5400, 5404, 5407, 5408, 5409, 5412, 5413, 5414, 5416, 5418, 5421, 5424, 5426, 5428, 5431, 5432, 5433, 5434, 5435, 5437, 5440, 5441, 5443, 5448, 5450, 5451, 5454, 5455, 5458, 5460, 5461, 5464, 5468, 5470, 5471, 5474, 5475, 5477, 5482, 5484, 5485, 5487, 5490, 5491, 5492, 5494, 5496, 5498, 5499, 5500, 5501, 5502, 5503, 5504, 5506, 5509, 5510, 5512, 5516, 5517, 5518, 5524, 5525, 5526, 5528, 5531, 5533, 5534, 5535, 5536, 5537, 5540, 5542, 5544, 5545, 5546, 5549, 5550, 5552, 5553, 5559, 5561, 5566, 5569, 5572, 5573, 5575, 5577, 5578, 5579, 5580, 5581, 5582, 5588, 5593, 5595, 5596, 5598, 5600, 5601, 5603, 5604, 5605, 5608, 5614, 5615, 5616, 5619, 5622, 5624, 5625, 5628, 5629, 5633, 5634, 5637, 5638, 5639, 5643, 5644, 5645, 5647, 5648, 5649, 5650, 5654, 5662, 5664,

[0324] right Primer: 5067, 5070, 5072, 5074, 5075, 5076, 5078, 5081, 5084, 5086, 5088, 5090, 5091, 5094, 5097, 5101, 5105, 5107, 5109, 5110, 5112, 5114, 5115, 5117, 5121, 5123, 5124, 5126, 5129, 5131, 5136, 5143, 5145, 5147, 5151, 5153, 5156, 5159, 5161, 5162, 5163, 5164, 5165, 5167, 5169, 5172, 5174, 5175, 5180, 5181, 5182, 5183, 5185, 5186, 5189, 5191, 5194, 5196, 5199, 5200, 5202, 5203, 5205, 5207, 5209, 5210, 5212, 5214, 5218, 5219, 5223, 5225, 5227, 5233, 5235, 5238, 5239, 5240, 5241, 5248, 5251, 5253, 5257, 5259, 5260, 5263, 5266, 5268, 5269, 5270, 5271, 5272, 5280, 5282, 5290, 5291, 5293, 5295, 5297, 5299, 5301, 5306, 5310, 5311, 5312, 5314, 5316, 5319, 5321, 5324, 5327, 5331, 5332, 5334, 5338, 5339, 5340, 5342, 5344, 5346, 5347, 5351, 5353, 5356, 5360, 5366, 5368, 5371, 5373, 5376, 5378, 5380, 5383, 5388, 5389, 5391, 5392, 5396, 5399, 5401, 5403, 5405, 5410, 5415, 5417, 5419, 5420, 5422, 5425, 5427, 5429, 5436, 5438, 5442, 5444, 5445, 5446, 5447, 5449, 5452, 5456, 5457, 5459, 5462, 5465, 5466, 5467, 5469, 5472, 5478, 5480, 5481, 5486, 5488, 5493, 5495, 5497, 5505, 5507, 5508, 5511, 5513, 5515, 5519, 5521, 5522, 5527, 5529, 5532, 5538, 5539, 5541, 5543, 5548, 5551, 5554, 5555, 5556, 5557, 5558, 5560, 5562, 5563, 5564, 5565, 5567, 5568, 5570, 5571, 5574, 5576, 5583, 5585, 5586, 5587, 5589, 5591, 5592, 5594, 5597, 5599, 5602, 5606, 5609, 5611, 5612, 5618, 5620, 5623, 5626, 5627, 5630, 5632, 5635, 5640, 5642, 5646, 5651, 5652, 5656, 5657, 5659, 5660, 5661, 5663, 5665,

[0325] Detection: 5068, 5071, 5079, 5082, 5085, 5089, 5092, 5095, 5098, 5102, 5108, 5113, 5118, 5122, 5127, 5130, 5133, 5138, 5141, 5146, 5152, 5154, 5178, 5192, 5197, 5206, 5213, 5228, 5236, 5243, 5258, 5267, 5275, 5277, 5283, 5294, 5298, 5302, 5305, 5320, 5325, 5328, 5335, 5345, 5350, 5357, 5374, 5381, 5384, 5386, 5390, 5397, 5402, 5406, 5411, 5423, 5430, 5439, 5453, 5463, 5473, 5476, 5479, 5483, 5489, 5514, 5520, 5523, 5530, 5547, 5584, 5590, 5607, 5610, 5613, 5617, 5621, 5631, 5636, 5641, 5653, 5655, 5658, 5666,

### SEQ ID NO: 9

[0326] left Primer: 5667, 5670, 5672, 5673, 5676, 5678, 5679, 5681, 5682, 5683, 5686, 5687, 5688, 5690, 5694, 5697, 5698, 5699, 5700, 5701, 5704, 5708, 5709, 5711, 5713, 5714, 5717, 5721, 5723, 5724, 5727, 5728, 5733, 5734, 5735, 5736, 5739, 5740, 5741, 5742, 5743,

[0327] right Primer: 5668, 5671, 5674, 5677, 5680, 5684, 5689, 5691, 5693, 5696, 5702, 5705, 5707, 5710, 5712, 5715, 5718, 5720, 5722, 5725, 5729, 5730, 5731, 5732, 5737,

[0328] Detection: 5669, 5675, 5685, 5692, 5695, 5703, 5706, 5716, 5719, 5726, 5738,

### SEQ ID NO: 46

[0329] left Primer: 5744, 5747, 5750, 5753, 5759, 5762, 5763, 5770, 5775, 5777, 5778, 5780, 5782, 5785, 5787, 5791, 5792, 5793, 5794, 5797, 5801, 5803, 5808, 5810, 5812, 5814, 5816, 5817, 5824, 5832, 5833, 5834, 5835, 5838, 5840, 5841, 5844, 5849, 5853, 5854, 5857, 5859, 5860, 5862, 5863, 5865, 5868, 5874, 5882, 5883, 5885, 5887, 5894, 5895, 5896, 5897, 5902, 5904, 5906, 5909, 5912, 5915, 5918, 5919, 5920, 5922, 5923, 5926, 5927, 5928, 5930, 5932, 5933, 5934, 5935, 5939, 5940, 5946, 5947, 5948, 5949, 5952, 5954, 5955, 5956, 5958, 5959, 5961, 5962, 5964, 5965, 5968, 5970, 5971, 5972, 5973, 5977, 5978, 5980, 5983, 5986, 5987, 5992, 5993, 5996, 5997, 6000, 6002, 6003, 6004, 6005, 6006, 6008, 6009, 6010, 6011, 6012, 6013, 6017, 6018, 6019, 6020, 6025, 6027, 6030, 6033, 6035, 6036, 6039, 6041, 6042, 6045, 6049, 6050, 6051, 6055, 6059, 6063, 6064, 6065, 6067, 6070, 6072, 6073, 6075, 6077, 6078, 6081,

[0330] right Primer: 5745, 5748, 5751, 5754, 5756, 5758, 5760, 5764, 5766, 5767, 5768, 5769, 5771, 5773, 5774, 5776, 5779, 5781, 5783, 5786, 5788, 5789, 5790, 5795, 5796, 5798, 5800, 5802, 5804, 5806, 5807, 5809, 5811, 5813, 5818, 5820, 5821, 5822, 5823, 5825, 5826, 5827, 5828, 5830, 5831, 5836, 5837, 5839, 5842, 5843, 5845, 5846, 5847, 5848, 5850, 5852, 5855, 5856, 5858, 5861, 5864, 5866, 5867, 5870, 5871, 5872, 5873, 5875, 5876, 5877, 5878, 5879, 5880, 5881, 5884, 5886, 5888, 5889, 5890, 5891, 5892, 5893, 5898, 5899, 5900, 5903, 5905, 5907, 5910, 5913, 5916, 5921, 5924, 5929, 5931, 5936, 5937, 5938, 5942, 5943, 5944, 5945, 5950, 5953, 5957, 5960, 5963, 5966, 5969, 5975, 5976, 5981, 5984, 5988, 5990, 5991, 5994, 5998, 5999, 6001, 6007, 6014, 6015, 6016, 6021, 6023, 6024, 6026, 6028, 6031, 6032, 6034, 6037, 6038, 6040, 6043, 6046, 6048, 6053, 6054, 6056, 6058, 6060, 6062, 6066, 6068, 6074, 6076, 6079, 6083, 6084,

[0331] Detection: 5746, 5749, 5752, 5755, 5757, 5761, 5765, 5772, 5784, 5799, 5805, 5815, 5819, 5829, 5851, 5869, 5901, 5908, 5911, 5914, 5917, 5925, 5941, 5951, 5967, 5974, 5979, 5982, 5985, 5989, 5995, 6022, 6029, 6044, 6047, 6052, 6057, 6061, 6069, 6071, 6080, 6082,

### SEQ ID NO: 10

[0332] left Primer: 6085, 6089, 6090, 6093, 6096, 6098, 6100, 6106, 6110, 6111, 6114, 6118, 6121, 6127, 6130, 6133, 6135, 6137, 6138, 6141, 6143, 6145, 6148, 6150, 6151, 6152, 6153, 6154, 6156, 6159, 6160, 6162, 6163, 6166, 6167, 6168, 6169, 6170, 6171, 6172, 6175, 6177, 6180, 6183, 6187, 6188, 6190, 6193, 6194, 6195, 6196, 6198, 6201, 6202, 6204, 6207, 6211, 6212, 6214, 6215, 6216, 6218, 6219, 6220, 6222, 6225, 6226, 6230, 6235, 6239, 6241, 6242, 6243, 6244, 6245, 6247, 6250, 6252, 6254, 6259, 6260, 6261, 6264, 6265, 6268, 6270, 6273, 6275, 6278, 6280, 6282, 6286, 6287, 6288, 6291, 6293, 6298, 6299, 6300, 6302, 6303, 6305, 6307, 6308, 6312, 6313, 6314, 6315, 6316, 6317, 6318, 6320, 6321, 6323, 6325, 6327, 6328, 6334, 6335, 6337, 6340, 6341, 6344, 6348, 6350, 6353, 6354, 6357, 6360, 6362, 6364, 6368, 6372, 6374, 6377, 6378, 6383, 6386, 6392, 6394, 6398, 6400, 6404, 6405, 6409, 6410, 6411, 6417, 6418, 6424, 6426, 6429, 6431, 6432, 6433, 6435, 6436, 6437, 6438, 6440, 6442, 6445, 6446, 6448, 6449, 6452, 6455, 6457, 6458, 6461, 6462, 6463, 6464, 6465, 6470, 6473, 6475, 6478, 6480, 6481, 6484, 6485, 6486, 6489, 6491, 6492, 6494, 6498, 6502, 6504, 6505, 6507, 6511, 6513, 6514,

[0333] right Primer: 6086, 6088, 6091, 6094, 6097, 6099, 6101, 6103, 6105, 6108, 6112, 6115, 6116, 6117, 6119, 6120, 6122, 6123, 6125, 6126, 6128, 6131, 6132, 6134, 6136, 6139, 6142, 6144, 6146, 6149, 6155, 6157, 6161, 6164, 6173, 6174, 6176, 6178, 6181, 6182, 6184, 6186, 6189, 6191, 6192, 6197, 6199, 6200, 6205, 6206, 6208, 6210, 6213, 6221, 6223, 6224, 6227, 6229, 6231, 6232, 6233, 6234, 6236, 6237, 6238, 6240, 6246, 6248, 6251, 6253, 6255, 6256, 6257, 6258, 6262, 6266, 6269, 6271, 6272, 6274, 6276, 6277, 6281, 6283, 6284, 6285, 6289, 6292, 6294, 6295, 6296, 6297, 6301, 6304, 6306, 6309, 6310, 6311, 6319, 6322, 6324, 6326, 6329, 6330, 6331, 6333, 6336, 6338, 6342, 6345, 6347, 6349, 6351, 6355, 6356, 6358, 6359, 6361, 6365, 6367, 6369, 6371, 6373, 6375, 6376, 6379, 6381, 6382, 6384, 6387, 6388, 6389, 6390, 6393, 6395, 6397, 6399, 6401, 6402, 6403, 6406, 6407, 6412, 6413, 6414, 6415, 6416, 6419, 6420, 6421, 6422, 6423, 6425, 6427, 6428, 6434, 6441, 6443, 6444, 6447, 6450, 6451, 6453, 6459, 6460, 6466, 6467, 6468, 6469, 6471, 6472, 6474, 6476, 6479, 6482, 6487, 6490, 6493, 6496, 6497, 6499, 6500, 6501, 6503, 6506, 6508, 6510, 6512,

[0334] Detection: 6087, 6092, 6095, 6102, 6104, 6107, 6109, 6113, 6124, 6129, 6140, 6147, 6158, 6165, 6179, 6185, 6203, 6209, 6217, 6228, 6249, 6263, 6267, 6279, 6290, 6332, 6339, 6343, 6346, 6352, 6363, 6366, 6370, 6380, 6385, 6391, 6396, 6408, 6430, 6439, 6454, 6456, 6477, 6483, 6488, 6495, 6509,

### SEQ ID NO: 11

[0335] left Primer: 6515, 6518, 6521, 6522, 6523, 6524, 6528, 6532, 6535, 6539, 6549, 6560, 6561, 6564, 6566, 6567, 6570, 6573, 6576, 6577, 6578, 6579, 6583, 6584, 6585, 6586, 6587, 6590, 6591, 6594, 6596, 6597, 6603, 6605, 6608, 6609, 6610, 6611, 6612, 6615, 6625, 6630, 6632, 6633, 6634, 6638, 6639, 6642, 6643, 6644, 6647, 6650, 6655, 6657, 6658, 6659, 6661, 6663, 6664, 6665, 6669, 6671, 6674, 6677, 6678, 6679, 6680, 6681, 6682, 6686, 6687, 6688, 6689, 6690, 6691, 6693, 6695, 6696, 6697, 6699, 6701, 6703, 6704, 6705, 6706, 6707, 6708, 6710, 6711, 6712, 6713, 6717, 6718, 6720, 6721, 6722, 6725, 6727, 6732, 6734, 6735, 6739, 6741, 6745, 6748, 6751, 6755, 6759, 6762, 6764, 6767, 6770, 6772, 6773, 6774, 6777, 6778, 6782, 6785, 6786, 6787, 6790, 6791, 6794, 6795, 6796, 6798, 6800, 6802, 6803, 6806, 6811, 6814, 6815, 6818, 6824, 6829, 6834, 6835, 6842,

[0336] right Primer: 6516, 6519, 6525, 6526, 6527, 6529, 6531, 6533, 6536, 6537, 6538, 6540, 6541, 6542, 6543, 6544, 6545, 6546, 6547, 6548, 6550, 6551, 6552, 6553, 6554, 6556, 6558, 6562, 6563, 6565, 6568, 6571, 6572, 6575, 6580, 6582, 6588, 6589, 6592, 6595, 6598, 6599, 6600, 6601, 6602, 6604, 6606, 6607, 6613, 6614, 6617, 6618, 6619, 6620, 6621, 6623, 6624, 6627, 6628, 6629, 6631, 6635, 6640, 6641, 6645, 6646, 6649, 6651, 6652, 6653, 6656, 6660, 6662, 6666, 6668, 6670, 6672, 6675, 6676, 6683, 6685, 6692, 6694, 6698, 6700, 6702, 6709, 6714, 6715, 6716, 6719, 6723, 6726, 6728, 6730, 6731, 6736, 6738, 6740, 6742, 6744, 6746, 6747, 6749, 6752, 6754, 6756, 6757, 6758, 6760, 6761, 6765, 6769, 6775, 6779, 6781, 6783, 6784, 6789, 6792, 6797, 6799, 6801, 6804, 6805, 6807, 6809, 6810, 6812, 6816, 6817, 6819, 6821, 6822, 6825, 6827, 6828, 6830, 6831, 6832, 6833, 6836, 6837, 6838, 6839, 6840, 6841, 6843,

[0337] Detection: 6517, 6520, 6530, 6534, 6555, 6557, 6559, 6569, 6574, 6581, 6593, 6616, 6622, 6626, 6636, 6637, 6648, 6654, 6667, 6673, 6684, 6724, 6729, 6733, 6737, 6743, 6750, 6753, 6763, 6766, 6768, 6771, 6776, 6780, 6788, 6793, 6808, 6813, 6820, 6823, 6826,

### SEQ ID NO: 12

[0338] left Primer: 6844, 6848, 6850, 6852, 6854, 6857, 6859, 6861, 6862, 6865, 6868, 6870, 6871, 6872, 6874, 6875, 6876, 6880, 6883, 6886, 6887, 6888, 6890, 6891, 6894, 6896, 6897, 6898, 6899, 6900, 6901, 6902, 6904, 6905, 6906, 6910, 6912, 6917, 6920,

[0339] right Primer: 6845, 6847, 6849, 6851, 6853, 6855, 6858, 6860, 6863, 6866, 6869, 6873, 6877, 6879, 6881, 6882, 6884, 6889, 6892, 6893, 6895, 6907, 6908, 6909, 6911, 6913, 6915, 6916, 6918,

[0340] Detection: 6846, 6856, 6864, 6867, 6878, 6885, 6903, 6914, 6919,

### SEQ ID NO: 13

[0341] left Primer: 6921, 6924, 6927, 6928, 6933, 6935, 6937, 6939, 6940, 6943, 6946, 6947, 6948, 6949, 6951, 6953, 6954, 6955, 6959, 6961, 6964, 6965, 6968, 6969, 6972, 6973, 6976, 6979, 6980,

[0342] right Primer: 6922, 6925, 6929, 6930, 6931, 6932, 6934, 6936, 6942, 6944, 6945, 6950, 6952, 6956, 6957, 6958, 6960, 6962, 6963, 6966, 6967, 6970, 6971, 6974, 6975, 6977, 6981,

[0343] Detection: 6923, 6926, 6938, 6941, 6978, 6982,

### SEQ ID NO:3

[0344] left Primer: 6983, 6986, 6992, 6995, 6998, 7002, 7006, 7013, 7017, 7022, 7024, 7027, 7030, 7032, 7036, 7037, 7040, 7050, 7052, 7055, 7056, 7058, 7059, 7060, 7064, 7067, 7072, 7074, 7076, 7077, 7084, 7085, 7086, 7087, 7088, 7089, 7090, 7091, 7096, 7097, 7100, 7102, 7109, 7110, 7113, 7114, 7115, 7118, 7121, 7123, 7124, 7131, 7133, 7135, 7136, 7138, 7139, 7140, 7144, 7146, 7148, 7149, 7158, 7159, 7160, 7163, 7165, 7166, 7168, 7172, 7175, 7178, 7180, 7181, 7183, 7185, 7186, 7187, 7192, 7194, 7199, 7202, 7203, 7204, 7205, 7207, 7208, 7213, 7214, 7216, 7220, 7221, 7227, 7228, 7230, 7233, 7235, 7237, 7239, 7243, 7245, 7246, 7248, 7249, 7251, 7255, 7256, 7260, 7263, 7264, 7265, 7266, 7268, 7269, 7272, 7276, 7277, 7278, 7279, 7280, 7281, 7283, 7284, 7287, 7291, 7295, 7299, 7302, 7303, 7306, 7309, 7310, 7311, 7314, 7315, 7320, 7321, 7324, 7325, 7329, 7331, 7332, 7334, 7336, 7339, 7340, 7341, 7344, 7350, 7353, 7355, 7358, 7360, 7362, 7372, 7374, 7375, 7378, 7381, 7385, 7387, 7390, 7391, 7392, 7394, 7397, 7401, 7402, 7405, 7410, 7413, 7415, 7416, 7417, 7420,

[0345] right Primer: 6984, 6987, 6989, 6990, 6991, 6993, 6996, 6999, 7001, 7003, 7005, 7007, 7009, 7010, 7011, 7012, 7014, 7016, 7018, 7020, 7023, 7025, 7026, 7028, 7029, 7031, 7033, 7034, 7035, 7038, 7039, 7041, 7042, 7043, 7044, 7045, 7046, 7047, 7048, 7049, 7051, 7053, 7054, 7057, 7061, 7062, 7063, 7065, 7066, 7068, 7070, 7071, 7073, 7075, 7078, 7080, 7081, 7082, 7083, 7092, 7093, 7094, 7095, 7098, 7101, 7103, 7105, 7106, 7107, 7108, 7111, 7112, 7116, 7119, 7122, 7125, 7126, 7127, 7128, 7129, 7130, 7132, 7134, 7137, 7141, 7142, 7143, 7147, 7150, 7152, 7154, 7155, 7156, 7157, 7161, 7167, 7170, 7171, 7173, 7174, 7176, 7177, 7179, 7182, 7184, 7188, 7189, 7190, 7191, 7193, 7195, 7196, 7197, 7198, 7200, 7206, 7210, 7211, 7212, 7215, 7217, 7218, 7219, 7222, 7223, 7224, 7225, 7226, 7229, 7231, 7232, 7236, 7240, 7241, 7242, 7244, 7247, 7250, 7253, 7254, 7257, 7258, 7259, 7261, 7262, 7267, 7270, 7271, 7273, 7274, 7275, 7282, 7285, 7289, 7290, 7292, 7293, 7294, 7296, 7297, 7298, 7301, 7304, 7307, 7308, 7312, 7316, 7317, 7318, 7319, 7322, 7326, 7328, 7330, 7333, 7335, 7337, 7342, 7345, 7347, 7348, 7349, 7351, 7354, 7356, 7357, 7359, 7361, 7363, 7364, 7365, 7366, 7367, 7368, 7369, 7370, 7371, 7373, 7376, 7379, 7382, 7383, 7384, 7386, 7388, 7389, 7393, 7395, 7398, 7400, 7403, 7404, 7407, 7408, 7409, 7411, 7419, 7421,

[0346] Detection: 6985, 6988, 6994, 6997, 7000, 7004, 7008, 7015, 7019, 7021, 7069, 7079, 7099, 7104, 7117, 7120, 7145, 7151, 7153, 7162, 7164, 7169, 7201, 7209, 7234, 7238, 7252, 7286, 7288, 7300, 7305, 7313, 7323, 7327, 7338, 7343, 7346, 7352, 7377, 7380, 7396, 7399, 7406, 7412, 7414, 7418,

### SEQ ID NO: 47

[0347] left Primer: 7422, 7425, 7427, 7435, 7438, 7439, 7440, 7442, 7444, 7448, 7449, 7456, 7459, 7462, 7463, 7465, 7466, 7467, 7470, 7471, 7474, 7476, 7477, 7480, 7481, 7485, 7486, 7489, 7490, 7493, 7496, 7500, 7503, 7508, 7512, 7518, 7519, 7520, 7522, 7524, 7525, 7527, 7528, 7529, 7532, 7540, 7542, 7543, 7545, 7549, 7552, 7554,

[0348] right Primer: 7423, 7426, 7428, 7430, 7431, 7432, 7433, 7434, 7436, 7445, 7446, 7447, 7450, 7451, 7452, 7453, 7454, 7455, 7457, 7460, 7464, 7468, 7472, 7475, 7478, 7479, 7482, 7483, 7484, 7487, 7488, 7492, 7494, 7495, 7497, 7498, 7499, 7501, 7505, 7506, 7507, 7509, 7510, 7511, 7513, 7515, 7516, 7517, 7521, 7523, 7526, 7530, 7533, 7534, 7535, 7536, 7537, 7538, 7539, 7541, 7544, 7546, 7547, 7548, 7550,

[0349] Detection: 7424, 7429, 7437, 7441, 7443, 7458, 7461, 7469, 7473, 7491, 7502, 7504, 7514, 7531, 7551, 7553,

### SEQ ID NO: 18

[0350] left Primer: 7555, 7558, 7559, 7560, 7565, 7566, 7567, 7570, 7571, 7573, 7574, 7575, 7576, 7577, 7578, 7579, 7580, 7581, 7582, 7585, 7586, 7587, 7588, 7589, 7590, 7596, 7597, 7598, 7600, 7603, 7606, 7609, 7610, 7615, 7618, 7620, 7621, 7623, 7627, 7629, 7633, 7635, 7636, 7643, 7647, 7651, 7655, 7661, 7666, 7672, 7674, 7676, 7677, 7682, 7683, 7685, 7687, 7689, 7690, 7691, 7694, 7699, 7701, 7702, 7704, 7707, 7709, 7711, 7712, 7713, 7714, 7716, 7718, 7720, 7726, 7728, 7729, 7733, 7734, 7735, 7736, 7738, 7740, 7741, 7744, 7746, 7747, 7748, 7749, 7750, 7751, 7752, 7753, 7754, 7755, 7756, 7758,

[0351] right Primer: 7556, 7561, 7563, 7568, 7583, 7584, 7591, 7593, 7594, 7595, 7599, 7601, 7604, 7607, 7608, 7611, 7613, 7614, 7616, 7617, 7619, 7622, 7624, 7626, 7628, 7631, 7637, 7638, 7639, 7640, 7641, 7642, 7644, 7645, 7646, 7649, 7650, 7652, 7654, 7656, 7657, 7658, 7659, 7660, 7662, 7663, 7665, 7667, 7669, 7670, 7671, 7673, 7675, 7678, 7679, 7680, 7681, 7684, 7686, 7688, 7692, 7695, 7697, 7698, 7700, 7703, 7705, 7708, 7710, 7715, 7717, 7719, 7721, 7722, 7723, 7724, 7725, 7727, 7730, 7731, 7732, 7737, 7739, 7742, 7743, 7745, 7757, 7759, 7760,

[0352] Detection: 7557, 7562, 7564, 7569, 7572, 7592, 7602, 7605, 7612, 7625, 7630, 7632, 7634, 7648, 7653, 7664, 7668, 7693, 7696, 7706,

### SEQ ID NO: 20

[0353] left Primer: 7761, 7764, 7770, 7774, 7775, 7778, 7782, 7786, 7788, 7795, 7797, 7799, 7805, 7807, 7809, 7810, 7811, 7815, 7817, 7819, 7820, 7822, 7823, 7824, 7828, 7832, 7834, 7837, 7839, 7843, 7845, 7851, 7852, 7857, 7860, 7863, 7865, 7868, 7874, 7881, 7885, 7889, 7892, 7894, 7896, 7900, 7902, 7904, 7907, 7909, 7910, 7913, 7917, 7922, 7925, 7926, 7928, 7933, 7934, 7937, 7941, 7945, 7946, 7948, 7950, 7951, 7952, 7953, 7954, 7955, 7956, 7957, 7963, 7964, 7968, 7971, 7972, 7973, 7976, 7979, 7980, 7981, 7982, 7983, 7985, 7986, 7987, 7988, 7991,

[0354] right Primer: 7762, 7765, 7767, 7768, 7771, 7773, 7776, 7779, 7781, 7783, 7784, 7785, 7789, 7791, 7792, 7793, 7794, 7796, 7798, 7800, 7802, 7803, 7808, 7812, 7813, 7814, 7816, 7818, 7821, 7825, 7827, 7829, 7830, 7833, 7835, 7836, 7838, 7840, 7841, 7842, 7844, 7846, 7847, 7848, 7849, 7853, 7854, 7855, 7856, 7858, 7861, 7864, 7866, 7869, 7870, 7871, 7872, 7873, 7875, 7877, 7878, 7879, 7880, 7882, 7884, 7886, 7888, 7890, 7897, 7899, 7903, 7905, 7912, 7914, 7916, 7918, 7919, 7920, 7921, 7923, 7929, 7931, 7932, 7936, 7938, 7939, 7940, 7942, 7943, 7944, 7947, 7949, 7958, 7960, 7962, 7965, 7967, 7969, 7970, 7974, 7977, 7989, 7990,

[0355] Detection: 7763, 7766, 7769, 7772, 7777, 7780, 7787, 7790, 7801, 7804, 7806, 7826, 7831, 7850, 7859, 7862, 7867, 7876, 7883, 7887, 7891, 7893, 7895, 7898, 7901, 7906, 7908, 7911, 7915, 7924, 7927, 7930, 7935, 7959, 7961, 7966, 7975, 7978, 7984,

### SEQ ID NO: 48

[0356] left Primer: 7992, 7995, 7996, 8000, 8003, 8006, 8007, 8010, 8012, 8015, 8016, 8018, 8019, 8026, 8027, 8030, 8034, 8035, 8038, 8039, 8043, 8044, 8046, 8049, 8050, 8052, 8053, 8055, 8056, 8062, 8064, 8066, 8067, 8068, 8069, 8070, 8071, 8074, 8076, 8077, 8078, 8079, 8080, 8081,

[0357] right Primer: 7993, 7997, 7999, 8001, 8004, 8005, 8008, 8009, 8011, 8013, 8017, 8020, 8021, 8022, 8023, 8024, 8025, 8028, 8031, 8033, 8036, 8040, 8042, 8047, 8051, 8054, 8057, 8059, 8060, 8061, 8065, 8072, 8073, 8075, 8082, 8083, 8084, 8085, 8087, 8088, 8089

[0358] Detection: 7994, 7998, 8002, 8014, 8029, 8032, 8037, 8041, 8045, 8048, 8058, 8063, 8086,

### SEQ ID NO: 50

[0359] left Primer: 8090, 8093, 8095, 8098, 8100, 8101, 8102, 8104, 8107, 8110, 8111, 8114, 8115, 8116, 8118, 8122, 8124, 8126, 8127, 8129, 8132, 8134, 8136, 8138, 8142, 8143, 8144, 8146, 8151, 8157, 8160, 8163, 8165, 8168, 8169, 8170, 8173, 8174, 8175, 8176, 8178, 8181, 8185, 8187, 8188, 8189, 8190, 8191, 8193, 8194, 8200, 8203, 8206, 8208, 8209, 8212, 8214, 8216, 8217, 8220, 8222, 8224, 8228, 8230,

[0360] right Primer: 8091, 8094, 8096, 8099, 8103, 8105, 8108, 8112, 8113, 8117, 8119, 8121, 8123, 8125, 8128, 8130, 8131, 8133, 8135, 8137, 8139, 8145, 8147, 8148, 8149, 8150, 8152, 8153, 8154, 8155, 8156, 8158, 8161, 8164, 8166, 8167, 8171, 8177, 8179, 8180, 8182, 8183, 8184, 8186, 8192, 8195, 8197, 8198, 8199, 8201, 8202, 8204, 8207, 8210, 8213, 8218, 8221, 8223, 8225, 8227, 8229, 8231,

[0361] Detection: 8092, 8097, 8106, 8109, 8120, 8140, 8141, 8159, 8162, 8172, 8196, 8205, 8211, 8215, 8219, 8226,

### SEQ ID NO:19

[0362] left Primer: 8232, 8235, 8236, 8237, 8238, 8244, 8245, 8247, 8250, 8251, 8253, 8254, 8255, 8256, 8258, 8259, 8260, 8263, 8267, 8269, 8270, 8273, 8274, 8277, 8280, 8281, 8289, 8292, 8293, 8294, 8295, 8296, 8297, 8298, 8301, 8305, 8306, 8310, 8311, 8312, 8315, 8317, 8318, 8322, 8323, 8324, 8327, 8328, 8329, 8330, 8333, 8336, 8339, 8340, 8347, 8349, 8350, 8352, 8353, 8356, 8359, 8360, 8366, 8369, 8370, 8372, 8374, 8376, 8377, 8379, 8381, 8382, 8383,

[0363] right Primer: 8233, 8239, 8240, 8242, 8243, 8246, 8248, 8252, 8257, 8261, 8264, 8266, 8268, 8271, 8275, 8278, 8282, 8284, 8285, 8286, 8287, 8288, 8291, 8299, 8302, 8303, 8304, 8307, 8309, 8313, 8314, 8316, 8319, 8321, 8325, 8326, 8331, 8332, 8334, 8335, 8337, 8341, 8342, 8343, 8344, 8345, 8346, 8348, 8351, 8354, 8357, 8361, 8362, 8363, 8364, 8365, 8367, 8371, 8373, 8375, 8378,

[0364] Detection: 8234, 8241, 8249, 8262, 8265, 8272, 8276, 8279, 8283, 8290, 8300, 8308, 8320, 8338, 8355, 8358, 8368, 8380,

### SEQ ID NO: 17

[0365] left Primer: 8384, 8387, 8390, 8391, 8397, 8398, 8401, 8402, 8405, 8406, 8409, 8414, 8418, 8419, 8422, 8425, 8428, 8431, 8432, 8433, 8435, 8437, 8440, 8444, 8449, 8452, 8454, 8455, 8457, 8462, 8464, 8466, 8468, 8469, 8472, 8475, 8476, 8478, 8479, 8481, 8484, 8487, 8488, 8490, 8493, 8496, 8497, 8498, 8501, 8505, 8508, 8511, 8513, 8515, 8517, 8518, 8519, 8521, 8522, 8523, 8526, 8528, 8530, 8531, 8532, 8534, 8536, 8541, 8544, 8547, 8551, 8554, 8556, 8558, 8560, 8562, 8563, 8566, 8567, 8568, 8570, 8571, 8574, 8575, 8576, 8577, 8580, 8581, 8585, 8588, 8591, 8594, 8601, 8602, 8603, 8608, 8609, 8613, 8614, 8617, 8618, 8619, 8620, 8623, 8624, 8628, 8629, 8630, 8633, 8634, 8635, 8636, 8638, 8643, 8645, 8648, 8654, 8657, 8658, 8659, 8660, 8661, 8662, 8666, 8670, 8672, 8674, 8676, 8681, 8683, 8686, 8688, 8689, 8691, 8692, 8693, 8695, 8696, 8700, 8701, 8702, 8703, 8704, 8705, 8709, 8716, 8717, 8719, 8722, 8725, 8727, 8728, 8729, 8732, 8733, 8734, 8735, 8736,

[0366] right Primer: 8385, 8388, 8392, 8394, 8395, 8399, 8403, 8407, 8410, 8411, 8412, 8413, 8415, 8416, 8420, 8423, 8424, 8426, 8429, 8434, 8436, 8438, 8442, 8445, 8446, 8447, 8448, 8450, 8451, 8456, 8458, 8460, 8461, 8463, 8465, 8467, 8470, 8473, 8474, 8477, 8480, 8482, 8485, 8486, 8489, 8491, 8492, 8494, 8499, 8500, 8502, 8503, 8504, 8506, 8510, 8512, 8514, 8516, 8520, 8524, 8527, 8529, 8533, 8535, 8537, 8539, 8542, 8545, 8546, 8548, 8550, 8552, 8555, 8557, 8564, 8565, 8569, 8572, 8578, 8582, 8583, 8586, 8587, 8589, 8592, 8595, 8596, 8597, 8598, 8599, 8600, 8604, 8606, 8607, 8610, 8612, 8615, 8616, 8621, 8625, 8627, 8631, 8632, 8637, 8639, 8640, 8641, 8642, 8644, 8646, 8647, 8649, 8650, 8651, 8652, 8653, 8655, 8663, 8665, 8667, 8668, 8669, 8671, 8673, 8675, 8677, 8678, 8679, 8680, 8682, 8684, 8685, 8687, 8690, 8694, 8697, 8698, 8699, 8706, 8707, 8708, 8710, 8711, 8712, 8713, 8714, 8715, 8718, 8720, 8723, 8726, 8730, 8737,

[0367] Detection: 8386, 8389, 8393, 8396, 8400, 8404, 8408, 8417, 8421, 8427, 8430, 8439, 8441, 8443, 8453, 8459, 8471, 8483, 8495, 8507, 8509, 8525, 8538, 8540, 8543, 8549, 8553, 8559, 8561, 8573, 8579, 8584, 8590, 8593, 8605, 8611, 8622, 8626, 8656, 8664, 8721, 8724, 8731,

### SEQ ID NO: 23

[0368] left Primer: 8738, 8741, 8744, 8747, 8750, 8751, 8753, 8754, 8755, 8756, 8759, 8760, 8762, 8763, 8766, 8767, 8768, 8769, 8770, 8772, 8775, 8776, 8777, 8779, 8782, 8783, 8784, 8785, 8786, 8787, 8788, 8789, 8790, 8793, 8794, 8796, 8798, 8799, 8801, 8803, 8804, 8806, 8807, 8809, 8812, 8813, 8815, 8820, 8823, 8826, 8829, 8830, 8832, 8835, 8836, 8837; 8842, 8845, 8846, 8847, 8851, 8853, 8856, 8857, 8859, 8861, 8866, 8739, 8878, 8879, 8880, 8884, 8891, 8893, 8895, 8898, 8900, 8901, 8909, 8912,

[0369] right Primer: 8739, 8742, 8745, 8748, 8749, 8752, 8757, 8758, 8761, 8764, 8771, 8773, 8778, 8780, 8791, 8797, 8800, 8802, 8805, 8808, 8810, 8814, 8816, 8818, 8819, 8821, 8824, 8827, 8828, 8831, 8833, 8838, 8840, 8841, 8755, 8843, 8844, 8848, 8850, 8852, 8854, 8855, 8863, 8864, 8865, 8867, 8868, 8869, 8870, 8871, 8872, 8873, 8874, 8876, 8877, 8881, 8882, 8883, 8885, 8887, 8888, 8889, 8890, 8892, 8894, 8896, 8897, 8899, 8902, 8785, 8903, 8904, 8905, 8906, 8907, 8908, 8911,

[0370] Detection: 8740, 8743, 8746, 8765, 8774, 8781, 8792, 8795, 8811, 8817, 8822, 8825, 8834, 8839, 8849, 8858, 8860, 8862, 8875, 8886, 8910,

### SEQ ID NO: 21

[0371] left Primer: 8913, 8917, 8920, 8923, 8924, 8929, 8931, 8934, 8935, 8936,

[0372] right Primer: 8914, 8916, 8918, 8921, 8925, 8927, 8928, 8930, 8932, 8933, 8937,

[0373] Detection: 8915, 8919, 8922, 8926,

### SEQ ID NO: 32

[0374] left Primer: 8938, 8944, 8945, 8948, 8952, 8953, 8954, 8957, 8958, 8961, 8962, 8965, 8967, 8969, 8970, 8971, 8972, 8977,

[0375] right Primer: 8939, 8941, 8942, 8943, 8946, 8949, 8950, 8951, 8955, 8960, 8963, 8964, 8966, 8968, 8974, 8975, 8976, 8978, 8979,

[0376] Detection: 8940, 8947, 8956, 8959, 8973,

### SEQ ID NO: 33

[0377] left Primer: 8980, 8984, 8988, 8989, 8998, 9001, 9002, 9005, 9007, 9008, 9012, 9013, 9016, 9019, 9020, 9022, 9023, 9025, 9028, 9029, 9032, 9033, 9034, 9035, 9037, 9038, 9044, 9046, 9047, 9048, 9049, 9054,

[0378] right Primer: 8981, 8983, 8985, 8987, 8990, 8992, 8993, 8994, 8995, 8997, 8999, 9003, 9004, 9006, 9009, 9010, 9011, 9014, 9017, 9018, 9021, 9024, 9026, 9030, 9036, 9039, 9041, 9042, 9043, 9045, 9050, 9051, 9052, 9053,

[0379] Detection: 8982, 8986, 8991, 8996, 9000, 9015, 9027, 9031, 9040,

### SEQ ID NO: 34

[0380] left Primer: 9055, 9058, 9060, 9063, 9066, 9067, 9068, 9069, 9070, 9071, 9074, 9075, 9077, 9078, 9079, 9080, 9082, 9084, 9088, 9089, 9090, 9099, 9103, 9104, 9105, 9107, 9111,

[0381] right Primer: 9056, 9061, 9064, 9072, 9081, 9083, 9085, 9086, 9087, 9091, 9092, 9093, 9094, 9095, 9096, 9097, 9098, 9100, 9102, 9106, 9108, 9109, 9110, 9112,

[0382] Detection: 9057, 9059, 9062, 9065, 9073, 9076, 9101,

### SEQ ID NO: 24

[0383] left Primer: 9113, 9116, 9118, 9125, 9126, 9128, 9129, 9130, 9136, 9141, 9143, 9148, 9150, 9153, 9157, 9158, 9159, 9163, 9164, 9165, 9167, 9168, 9171, 9173, 9177, 9180, 9181, 9182, 9183, 9185, 9187, 9188, 9189, 9191, 9192, 9193, 9194, 9197, 9198, 9200, 9206, 9207, 9208, 9209, 9211, 9216, 9218, 9219, 9220, 9221, 9222, 9223, 9226, 9228, 9229, 9230, 9231, 9232, 9233, 9234, 9237, 9238, 9240, 9243, 9246, 9248, 9253, 9256, 9257, 9260, 9263, 9264, 9266, 9269, 9271, 9279, 9280, 9281, 9282, 9283, 9284, 9290,

[0384] right Primer: 9114, 9119, 9121, 9122, 9123, 9124, 9127, 9131, 9133, 9134, 9135, 9137, 9138, 9139, 9140, 9142, 9144, 9146, 9147, 9149, 9151, 9152, 9154, 9155, 9156, 9160, 9162, 9166, 9169, 9172, 9174, 9175, 9176, 9178, 9184, 9186, 9190, 9195, 9199, 9201, 9202, 9203, 9204, 9205, 9212, 9214, 9215, 9217, 9224, 9227, 9235, 9239, 9241, 9244, 9247, 9249, 9251, 9252, 9254, 9258, 9261, 9265, 9267, 9270, 9273, 9274, 9275, 9276, 9277, 9278, 9285, 9286, 9287, 9288, 9289, 9291,

[0385] Detection: 9115, 9117, 9120, 9132, 9145, 9161, 9170, 9179, 9196, 9210, 9213, 9225, 9236, 9242, 9245, 9250, 9255, 9259, 9262, 9268, 9272,

### SEQ ID NO: 35

[0386] left Primer: 9292, 9295, 9297, 9300, 9302, 9303, 9304, 9307, 9308, 9310, 9311, 9313, 9319, 9321, 9323, 9324, 9328, 9333, 9334, 9337, 9338, 9339, 9342, 9344, 9348, 9351, 9352, 9354, 9355, 9357, 9360, 9367, 9371, 9374, 9377, 9379, 9383, 9384, 9385, 9388, 9389, 9390, 9393, 9394, 9398, 9401, 9402, 9406, 9408, 9409, 9410, 9413, 9415, 9416, 9417, 9418, 9419, 9421, 9422, 9425, 9429, 9433, 9434, 9435, 9436, 9437, 9439, 9440, 9446, 9452, 9453, 9454, 9455, 9457, 9458, 9459, 9462, 9466, 9467, 9468, 9470, 9474, 9479, 9482, 9487, 9488, 9489, 9492, 9495, 9497, 9499, 9500, 9504, 9505, 9508, 9513, 9514, 9519, 9522, 9523, 9524, 9526, 9528, 9532, 9533, 9534, 9535, 9537, 9538, 9541, 9542, 9543, 9545, 9546, 9548,

[0387] right Primer: 9293, 9296, 9298, 9301, 9305, 9309, 9312, 9314, 9316, 9317, 9318, 9320, 9322, 9325, 9326, 9327, 9329, 9331, 9332, 9335, 9336, 9340, 9345, 9347, 9349, 9353, 9356, 9358, 9361, 9363, 9364, 9365, 9368, 9370, 9372, 9375, 9376, 9378, 9380, 9382, 9386, 9391, 9395, 9397, 9399, 9400, 9403, 9405, 9407, 9411, 9412, 9414, 9420, 9423, 9424, 9426, 9428, 9430, 9431, 9432, 9438, 9441, 9443, 9444, 9445, 9447, 9448, 9449, 9450, 9451, 9456, 9460, 9461, 9464, 9465, 9469, 9471, 9473, 9475, 9477, 9478, 9480, 9483, 9485, 9490, 9493, 9494, 9496, 9498, 9501, 9502, 9503, 9506, 9509, 9511, 9512, 9515, 9516, 9517, 9518, 9520, 9521, 9525, 9527, 9529, 9530, 9536, 9539, 9544, 9547, 9549, 9550,

[0388] Detection: 9294, 9299, 9306, 9315, 9330, 9341, 9343, 9346, 9350, 9359, 9362, 9366, 9369, 9373, 9381, 9387, 9392, 9396, 9404, 9427, 9442, 9463, 9472, 9476, 9481, 9484, 9486, 9491, 9507, 9510, 9531, 9540,

### SEQ ID NO: 25

[0389] left Primer: 9551, 9555, 9556, 9557, 9559, 9560, 9563, 9564, 9565, 9566, 9569, 9570, 9573, 9577, 9578, 9579, 9580, 9585, 9586, 9587, 9588, 9591, 9593, 9596,

[0390] right Primer: 9552, 9554, 9558, 9561, 9567, 9571, 9574, 9576, 9581, 9583, 9584, 9589, 9592, 9594, 9595,

[0391] Detection: 9553, 9562, 9568, 9572, 9575, 9582, 9590, 9597,

### SEQ ID NO: 36

[0392] left Primer: 9598, 9602, 9604, 9605, 9608, 9612, 9613, 9614, 9617, 9618, 9621, 9622, 9625, 9626, 9627, 9632, 9633, 9638, 9640, 9643, 9644, 9645, 9646, 9651, 9654, 9656, 9657, 9658, 9661, 9662, 9665, 9666, 9667, 9668, 9672, 9673, 9675, 9676, 9677, 9680, 9683, 9686, 9688, 9691, 9694, 9698, 9699, 9702, 9705, 9707, 9710, 9711, 9715, 9719, 9720, 9722, 9723, 9726, 9729, 9732, 9733, 9735, 9737, 9738, 9741, 9744, 9745, 9746, 9747, 9748, 9749, 9750, 9754, 9755, 9756, 9758, 9759, 9768, 9771, 9772, 9776, 9777, 9781, 9782, 9784, 9787, 9789, 9790, 9792, 9796, 9797, 9800, 9805, 9806, 9812, 9815, 9818, 9821, 9823, 9825, 9827, 9831, 9832, 9835, 9837, 9839, 9841, 9842, 9844, 9845, 9851, 9853, 9854, 9855, 9857, 9860, 9862, 9863, 9865, 9871, 9873, 9875, 9878, 9879,

[0393] right Primer: 9599, 9601, 9603, 9606, 9607, 9609, 9611, 9615, 9619, 9623, 9624, 9628, 9630, 9631, 9634, 9635, 9637, 9639, 9641, 9647, 9649, 9650, 9652, 9653, 9659, 9660, 9663, 9664, 9670, 9671, 9679, 9682, 9684, 9687, 9690, 9692, 9693, 9695, 9697, 9700, 9701, 9703, 9706, 9708, 9712, 9713, 9714, 9716, 9717, 9718, 9721, 9724, 9727, 9730, 9734, 9739, 9742, 9751, 9753, 9757, 9760, 9761, 9762, 9763, 9764, 9765, 9766, 9767, 9769, 9773, 9775, 9778, 9780, 9783, 9786, 9788, 9791, 9793, 9794, 9795, 9798, 9801, 9803, 9804, 9807, 9808, 9809, 9810, 9811, 9813, 9816, 9817, 9819, 9820, 9822, 9826, 9828, 9830, 9833, 9836, 9838, 9840, 9843, 9846, 9847, 9848, 9849, 9850, 9852, 9856, 9858, 9859, 9861, 9864, 9866, 9867, 9868, 9869, 9870, 9872, 9876, 9877, 9880, 9881,

[0394] Detection: 9600, 9610, 9616, 9620, 9629, 9636, 9642, 9648, 9655, 9669, 9674, 9678, 9681, 9685, 9689, 9696, 9704, 9709, 9725, 9728, 9731, 9736, 9740, 9743, 9752, 9770, 9774, 9779, 9785, 9799, 9802, 9814, 9824, 9829, 9834, 9874,

### SEQ ID NO: 28

[0395] left Primer: 9882, 9886, 9890, 9891, 9894, 9900, 9902, 9904, 9908, 9911, 9912, 9915, 9917, 9919, 9923, 9925, 9928, 9935, 9936, 9940, 9943, 9949, 9953, 9954, 9956, 9957, 9958, 9962, 9963, 9964, 9968, 9969, 9975, 9978, 9981, 9988, 9989, 9990, 9991, 9992, 9995, 9997, 10011, 10012, 10014, 10017, 10018, 10031, 10032, 10033, 10034, 10035, 10037, 10041, 10042, 10046, 10050, 10054, 10058, 10059,

[0396] right Primer: 9883, 9885, 9887, 9889, 9892, 9893, 9895, 9896, 9897, 9898, 9899, 9901, 9903, 9905, 9907, 9909, 9913, 9914, 9916, 9918, 9920, 9921, 9922, 9924, 9926, 9929, 9931, 9932, 9933, 9934, 9937, 9938, 9939, 9941, 9942, 9944, 9945, 9946, 9947, 9948, 9950, 9952, 9955, 9959, 9960, 9961, 9966, 9967, 9970, 9972, 9973, 9974, 9976, 9979, 9980, 9982, 9983, 9984, 9985, 9986, 9987, 9993, 9994, 9996, 9998, 9999, 10000, 10001, 10002, 10003, 10004, 10005, 10006, 10007, 10008, 10009, 10010, 10013, 10015, 10016, 10019, 10020, 10021, 10022, 10023, 10025, 10026, 10027, 10028, 10030, 10036, 10038, 10040, 10043, 10044, 10045, 10047, 10048, 10049, 10051, 10053, 10055, 10056, 10057, 10060,

[0397] Detection: 9884, 9888, 9906, 9910, 9927, 9930, 9951, 9965, 9971, 9977, 10024, 10029, 10039, 10052,

### SEQ ID NO: 37

[0398] left Primer: 10061, 10064, 10067, 10068, 10070, 10071, 10072, 10074, 10079, 10081, 10083, 10088, 10091, 10095, 10096, 10097, 10101, 10103, 10105, 10106, 10109, 10110, 10111, 10113, 10116, 10118, 10120, 10122, 10125, 10126, 10127, 10131, 10134, 10137, 10138, 10144, 10147, 10149, 10151, 10152, 10155, 10156, 10159, 10160, 10169, 10172, 10174, 10175, 10178, 10181, 10186, 10188, 10189, 10190, 10191, 10192, 10196, 10199, 10203, 10204, 10210, 10211, 10216, 10218, 10221, 10224, 10225, 10226, 10229, 10230, 10231, 10232, 10234, 10239, 10241, 10244, 10252, 10253, 10257, 10258, 10259, 10261, 10266, 10272, 10276,

[0399] right Primer: 10062, 10065, 10069, 10075, 10077, 10078, 10080, 10082, 10084, 10086, 10087, 10089, 10090, 10092, 10093, 10094, 10098, 10099, 10100, 10102, 10104, 10107, 10112, 10114, 10117, 10119, 10121, 10123, 10124, 10129, 10130, 10132, 10133, 10135, 10139, 10140, 10141, 10142, 10143, 10145, 10148, 10150, 10153, 10154, 10157, 10161, 10163, 10164, 10165, 10166, 10167, 10170, 10173, 10176, 10177, 10179, 10182, 10183, 10184, 10187, 10193, 10194, 10195, 10197, 10198, 10200, 10201, 10202, 10205, 10206, 10207, 10209, 10212, 10213, 10214, 10215, 10219, 10220, 10222, 10223, 10227, 10228, 10233, 10235, 10236, 10237, 10240, 10242, 10243, 10245, 10247, 10248, 10249, 10251, 10254, 10255, 10256, 10260, 10262, 10263, 10264, 10265, 10267, 10268, 10269, 10270, 10271, 10273, 10274, 10275, 10277, 10278,

[0400] Detection: 10063, 10066, 10073, 10076, 10085, 10108, 10115, 10128, 10136, 10146, 10158, 10162, 10168, 10171, 10180, 10185, 10208, 10217, 10238, 10246, 10250,

### SEQ ID NO: 26

[0401] left Primer: 10279, 10282, 10285, 10287, 10291, 10292, 10297, 10299, 10301, 10304, 10306, 10308, 10310, 10314, 10317, 10318, 10320, 10322, 10327, 10329, 10330, 10333, 10335, 10336, 10337, 10340, 10342, 10348, 10350, 10351, 10354, 10358, 10359, 10360, 10362, 10366, 10369, 10372, 10373, 10374, 10376, 10378, 10383, 10385, 10391, 10398, 10403, 10407, 10410, 10413, 10415, 10419, 10422, 10425, 10427, 10428, 10429, 10430, 10432, 10433, 10434, 10437, 10438, 10439, 10442, 10443, 10445, 10446, 10447, 10448, 10452, 10453, 10454, 10455, 10456, 10460, 10463, 10466, 10467, 10469, 10470, 10473, 10475, 10477, 10480, 10484, 10488, 10490, 10494, 10495, 10497, 10501, 10502, 10503, 10507, 10508, 10510, 10517, 10518, 10520, 10522, 10524, 10525, 10528, 10529, 10533, 10536, 10537, 10540, 10541, 10545, 10547, 10551, 10553, 10556, 10559, 10560, 10563, 10564, 10565, 10568, 10571, 10574, 10576, 10579, 10581, 10583, 10588, 10589, 10590, 10592, 10593, 10596, 10597, 10601, 10602, 10603, 10605, 10607, 10609, 10610, 10612, 10613, 10617, 10618, 10621, 10624, 10627, 10630, 10632, 10634, 10637, 10638, 10639, 10640, 10641, 10643, 10645, 10647, 10653, 10655, 10657, 10659, 10661, 10662, 10663, 10664, 10665, 10666, 10667, 10668, 10669, 10672, 10673, 10674, 10675,

[0402] right Primer: 10280, 10283, 10286, 10288, 10290, 10293, 10295, 10298, 10300, 10302, 10305, 10307, 10309, 10311, 10312, 10313, 10315, 10319, 10321, 10323, 10325, 10326, 10328, 10331, 10338, 10341, 10343, 10344, 10345, 10346, 10347, 10349, 10352, 10355, 10356, 10357, 10361, 10363, 10365, 10367, 10370, 10375, 10377, 10379, 10380, 10381, 10382, 10384, 10386, 10387, 10388, 10390, 10392, 10394, 10395, 10399, 10401, 10402, 10404, 10406, 10408, 10411, 10412, 10414, 10416, 10417, 10418, 10420, 10423, 10426, 10431, 10435, 10440, 10444, 10449, 10451, 10457, 10459, 10461, 10462, 10464, 10465, 10468, 10471, 10476, 10478, 10481, 10483, 10485, 10487, 10489, 10491, 10492, 10493, 10498, 10499, 10500, 10504, 10506, 10509, 10511, 10513, 10514, 10515, 10516, 10519, 10521, 10523, 10526, 10530, 10531, 10532, 10534, 10535, 10538, 10539, 10542, 10543, 10544, 10546, 10548, 10550, 10552, 10554, 10557, 10558, 10561, 10566, 10569, 10572, 10573, 10577, 10578, 10580, 10582, 10584, 10586, 10594, 10598, 10600, 10604, 10606, 10611, 10614, 10616, 10619, 10622, 10625, 10626, 10628, 10631, 10633, 10635, 10642, 10644, 10646, 10648, 10649, 10650, 10651, 10652, 10654, 10656, 10658, 10660, 10670, 10671, 10676,

[0403] Detection: 10281, 10284, 10289, 10294, 10296, 10303, 10316, 10324, 10332, 10334, 10339, 10353, 10364, 10368, 10371, 10389, 10393, 10396, 10397, 10400, 10405, 10409, 10421, 10424, 10436, 10441, 10450, 10458, 10472, 10474, 10479, 10482, 10486, 10496, 10505, 10512, 10527, 10549, 10555, 10562, 10567, 10570, 10575, 10585, 10587, 10591, 10595, 10599, 10608, 10615, 10620, 10623, 10629, 10636, 10677,

### SEQ ID NO: 38

[0404] left Primer: 10678, 10684,

[0405] right Primer: 10679, 10681, 10682, 10683, 10685, 10687, 10688, 10689,

[0406] Detection: 10680, 10686,

### SEQ ID NO: 39

[0407] left Primer: 10690,

[0408] right Primer: 10691,

[0409] Detection: 10692,

### SEQ ID NO: 27

[0410] left Primer: 10693, 10696, 10699, 10703, 10704, 10709, 10711, 10712, 10713, 10720, 10721, 10722, 10724, 10725, 10726, 10728, 10729, 10734, 10740, 10742, 10743, 10744, 10745, 10746, 10748, 10749, 10751, 10754, 10758, 10759, 10760, 10764, 10768, 10769, 10772, 10775, 10780, 10781, 10783, 10786, 10791, 10796, 10801, 10808, 10817, 10818, 10819, 10821, 10823, 10826, 10827, 10829, 10830, 10834, 10843, 10844, 10847, 10848, 10849, 10853, 10856, 10858, 10866, 10869, 10872, 10874, 10877, 10878, 10879, 10882, 10884, 10885, 10889, 10892, 10893, 10896, 10900, 10901, 10903, 10905, 10907, 10909, 10910, 10911, 10914, 10916, 10919, 10926, 10930, 10932, 10933, 10934, 10938, 10941, 10942, 10943, 10944, 10946, 10947, 10953, 10955, 10956, 10958, 10959, 10962, 10967, 10968, 10972, 10975, 10977, 10978, 10981, 10984, 10985, 10988, 10992, 10995, 10997, 10999, 11000, 11001, 11006, 11009, 11013, 11016, 11020, 11025, 11033, 11036, 11040, 11041, 11042, 11043, 11045, 11046, 11048, 11052, 11055, 11060, 11061, 11062, 11064, 11065, 11067, 11070, 11071, 11072, 11078, 11079, 11081, 11085, 11093,

[0411] right Primer: 10694, 10697, 10700, 10702, 10705, 10707, 10710, 10714, 10716, 10717, 10718, 10719, 10723, 10727, 10730, 10732, 10733, 10735, 10737, 10738, 10739, 10741, 10747, 10750, 10752, 10755, 10757, 10761, 10762, 10763, 10765, 10767, 10770, 10773, 10776, 10778, 10779, 10782, 10784, 10788, 10789, 10790, 10792, 10793, 10794, 10798, 10799, 10800, 10802, 10804, 10805, 10806, 10807, 10809, 10811, 10812, 10813, 10814, 10815, 10816, 10820, 10822, 10824, 10831, 10833, 10835, 10837, 10838, 10839, 10840, 10841, 10842, 10845, 10846, 10850, 10851, 10854, 10857, 10859, 10860, 10861, 10862, 10863, 10864, 10865, 10868, 10870, 10871, 10873, 10875, 10880, 10881, 10883, 10886, 10888, 10890, 10894, 10897, 10899, 10902, 10904, 10906, 10908, 10912, 10915, 10917, 10920, 10922, 10924, 10925, 10927, 10928, 10929, 10931, 10935, 10937, 10939, 10945, 10948, 10950, 10951, 10952, 10954, 10957, 10960, 10963, 10965, 10966, 10969, 10970, 10971, 10973, 10976, 10979, 10980, 10982, 10986, 10987, 10989, 10991, 10993, 10996, 10998, 11002, 11004, 11005, 11007, 11010, 11012, 11014, 11015, 11017, 11019, 11021, 11022, 11023, 11026, 11027, 11028, 11029, 11030, 11031, 11032, 11034, 11037, 11039, 11044, 11047, 11049, 11050, 11051, 11053, 11054, 11056, 11058, 11059, 11063, 11066, 11068, 11069, 11073, 11074, 11075, 11076, 11077, 11080, 11082, 11083, 11084, 11086, 11087, 11088, 11089, 11090, 11091, 11092, 11094,

[0412] Detection: 10695, 10698, 10701, 10706, 10708, 10715, 10731, 10736, 10753, 10756, 10766, 10771, 10774, 10777, 10785, 10787, 10795, 10797, 10803, 10810, 10825, 10828, 10832, 10836, 10852, 10855, 10867, 10876, 10887, 10891, 10895, 10898, 10913, 10918, 10921, 10923, 10936, 10940, 10949, 10961, 10964, 10974, 10983, 10990, 10994, 11003, 11008, 11011, 11018, 11024, 11035, 11038, 11057, 11095,

### SEQ ID NO: 40

[0413] left Primer: 11376, 11381, 11382, 11383, 11384, 11387, 11397, 11401, 11405, 11408, 11414, 11418, 11421, 11422, 11424, 11427, 11429, 11430,

[0414] right Primer: 11377, 11379, 11380, 11385, 11386, 11388, 11390, 11391, 11392, 11394, 11395, 11396, 11398, 11399, 11400, 11402, 11403, 11404, 11406, 11409, 11410, 11411, 11412, 11415, 11416, 11417, 11419, 11423, 11425, 11428, 11431, 11432, 11433,

[0415] Detection: 11378, 11389, 11393, 11407, 11413, 11420, 11426,

### Light Cycler Dual Probe Assays:

### SEQ ID NO: 41

[0416] left Primer: 11434, 11438, 11442, 11443, 11447, 11449, 11450, 11452, 11456, 11459, 11463, 11464, 11467, 11468, 11472, 11477, 11480, 11481, 11482, 11483, 11484, 11488, 11489, 11493, 11498, 11502, 11504, 11505, 11506, 11507, 11508, 11509, 11512, 11513, 11514, 11517, 11520, 11522, 11523, 11524, 11526, 11528, 11532, 11534,

[0417] right Primer: 11435, 11439, 11444, 11445, 11446, 11448, 11451, 11453, 11457, 11458, 11460, 11461, 11462, 11465, 11466, 11469, 11473, 11474, 11475, 11476, 11478, 11479, 11485, 11486, 11487, 11490, 11494, 11497, 11499, 11500, 11501, 11503, 11510, 11511, 11515, 11518, 11519, 11521, 11525, 11527, 11529,

[0418] Detection: 11436, 11440, 11454, 11470, 11491, 11495, 11530,

[0419] Anchor: 11437, 11441, 11455, 11471, 11492, 11496, 11516, 11531, 11533,

### SEQ ID NO: 5

[0420] left Primer: 11535, 11539, 11540, 11541, 11548, 11550, 11551, 11552, 11555, 1155.6, 11557, 11560, 11561, 11562, 11568, 11569, 11571, 11572, 11573, 11577,

[0421] right Primer: 11536, 11542, 11545, 11546, 11547, 11549, 11553, 11554, 11563, 11566, 11570, 11574,

[0422] Detection: 11537, 11543, 11558, 11564, 11575,

[0423] Anchor: 11538, 11544, 11559, 11565, 11567, 11576,

### SEQ ID NO: 6

[0424] left Primer: 11578, 11585, 11586, 11590, 11591, 11592, 11595, 11596, 11597, 11600,

[0425] right Primer: 11579, 11582, 11587, 11593, 11594, 11598, 11601,

[0426] Detection: 11580, 11583, 11588,

[0427] Anchor: 11581, 11584, 11589, 11599,

### SEQ ID NO: 8

[0428] left Primer: 11602, 11606, 11607, 11608, 11609, 11616, 11618, 11622, 11626, 11628, 11632, 11633,

[0429] right Primer: 11603, 11610, 11613, 11614, 11615, 11617, 11619, 11623, 11627, 11629, 11634,

[0430] Detection: 11604, 11611, 11620, 11624, 11630,

[0431] Anchor: 11605, 11612, 11621, 11625, 11631,

### SEQ ID NO: 16

[0432] left Primer: 11635, 11640, 11641, 11642, 11643, 11647, 11648, 11654, 11655, 11656, 11657, 11658,

[0433] right Primer: 11636, 11639, 11644, 11645, 11646, 11649, 11652, 11653,

[0434] Detection: 11637, 11650,

[0435] Anchor: 11638, 11651,

132

### SEQ ID NO: 42

[0436] left Primer: 11659, 11663, 11664, 11665, 11666, 11670, 11671, 11672, 11673, 11677, 11681, 11687, 11690, 11694, 11696, 11697, 11701, 11705, 11709, 11713, 11719, 11723, 11729, 11733, 11739, 11744, 11745, 11748, 11749, 11751, 11755, 11759, 11763, 11770, 11772, 11774, 11776, 11778, 11782, 11785,

[0437] right Primer: 11660, 11667, 11674, 11675, 11676, 11678, 11682, 11685, 11686, 11688, 11689, 11691, 11692, 11693, 11695, 11698, 11699, 11700, 11702, 11706, 11710, 11716, 11720, 11724, 11725, 11727, 11728, 11730, 11731, 11732, 11734, 11735, 11736, 11737, 11738, 11740, 11743, 11746, 11747, 11750, 11752, 11756, 11761, 11762, 11764, 11765, 11767, 11768, 11769, 11773, 11775, 11777, 11779, 11783, 11784,

[0438] Detection: 11661, 11668, 11679, 11683, 11703, 11707, 11711, 11714, 11717, 11721, 11726, 11741, 11753, 11757, 11766, 11771, 11780,

[0439] Anchor: 11662, 11669, 11680, 11684, 11704, 11708, 11712, 11715, 11718, 11722, 11742, 11754, 11758, 11760, 11781,

### SEQ ID NO: 14

[0440] left Primer: 11786, 11790, 11791, 11792,

[0441] right Primer: 11787, 11793,

[0442] Detection: 11788, 11794,

[0443] Anchor: 11789, 11795,

### SEQ ID NO: 43

[0444] left Primer: 11796, 11800, 11802, 11803, 11805, 11810, 11818, 11819, 11823, 11824, 11827, 11828, 11829, 11833, 11836, 11837, 11839, 11840, 11847, 11850, 11852, 11857, 11860, 11864, 11866,

[0445] right Primer: 11797, 11801, 11804, 11806, 11809, 11811, 11814, 11815, 11817, 11820, 11825, 11830, 11835, 11841, 11844, 11845, 11846, 11848, 11851, 11853, 11856, 11858, 11861, 11862, 11863, 11865,

[0446] Detection: 11798, 11807, 11812, 11816, 11821, 11831, 11842, 11854,

[0447] Anchor: 11799, 11808, 11813, 11822, 11826, 11832, 11834, 11838, 11843, 11849, 11855, 11859,

### SEQ ID NO: 15

[0448] left Primer: 11867, 11871, 11876, 11878, 11882, 11888, 11891, 11894,

[0449] right Primer: 11868, 11872, 11875, 11877, 11879, 11883, 11886, 11887, 11889, 11890, 11892, 11893, 11895,

[0450] Detection: 11869, 11873, 11880, 11884, 11896,

[0451] Anchor: 11870, 11874, 11881, 11885, 11897,

### SEQ ID NO:4

[0452] left Primer: 11898, 11902, 11903, 11904, 11908, 11909, 11911, 11912, 11913, 11914, 11915, 11917, 11918, 11922, 11926, 11927, 11930, 11932, 11933, 11937, 11941, 11942, 11946, 11947, 11948, 11949, 11950, 11951, 11952, 11955, 11959, 11968, 11972, 11976, 11978, 11979, 11980, 11981, 11986, 11988, 11989, 11991, 11992, 11995, 11997, 11998, 12001, 12002, 12004, 12005,

[0453] right Primer: 11899, 11905, 11910, 11916, 11919, 11923, 11924, 11925, 11928, 11929, 11931, 11934, 11938, 11943, 11953, 11954, 11956, 11960, 11963, 11964, 11967, 11969, 11973, 11977, 11982, 11985, 11987, 11990, 11993, 11994, 11996, 11999, 12000, 12003,

[0454] Detection: 11900, 11906, 11920, 11935, 11939, 11944, 11957, 11961, 11965, 11970, 11974, 11983,

[0455] Anchor: 11901, 11907, 11921, 11936, 11940, 11945, 11958, 11962, 11966, 11971, 11975, 11984,

### SEQ ID NO: 7

[0456] left Primer: 12006, 12011, 12015, 12016, 12017, 12021, 12022, 12023, 12024, 12025, 12026, 12027, 12031, 12034, 12042, 12043, 12045, 12049, 12050, 12051, 12054, 12062, 12063, 12064, 12066, 12067, 12068, 12070, 12072, 12076, 12082, 12085, 12086, 12089, 12090, 12093, 12094, 12095, 12096, 12097, 12098, 12101, 12103, 12107, 12108, 12111, 12112, 12114, 12118, 12119, 12120, 12128,

[0457] right Primer: 12007, 12010, 12012, 12020, 12028, 12032, 12033, 12035, 12038, 12039, 12044, 12046, 12052, 12055, 12056, 12057, 12058, 12059, 12060, 12061, 12065, 12069, 12071, 12073, 12077, 12080, 12081, 12084, 12087, 12088, 12091, 12099, 12100, 12102, 12104, 12109, 12110, 12113, 12115, 12121, 12122, 12123, 12124, 12125, 12127, 12129,

[0458] Detection: 12008, 12013, 12018, 12029, 12036, 12040, 12047, 12074, 12078, 12083, 12105, 12116,

[0459] Anchor: 12009, 12014, 12019, 12030, 12037, 12041, 12048, 12053, 12075, 12079, 12036, 12092, 12106, 12117, 12126,

### SEQ ID NO:1

[0460] left Primer: 12130, 12135, 12136, 12141, 12144, 12147, 12148, 12149, 12153, 12159, 12160,

[0461] right Primer: 12131, 12134, 12137, 12138, 12139, 12140, 12142, 12143, 12145, 12146, 12150, 12154, 12157, 12158, 12161, 12162, 12163,

[0462] Detection: 12132, 12151, 12155,

[0463] Anchor: 12133, 12152, 12156,

### SEQ ID NO: 45

[0464] left Primer: 12164, 12168, 12171, 12176, 12181, 12187, 12190, 12194, 12196, 12197, 12199, 12201, 12202, 12209, 12213, 12216, 12220, 12221, 12223, 12225, 12226, 12231, 12233, 12239, 12243, 12244, 12250, 12254, 12256, 12257, 12259, 12266, 12270, 12271, 12272, 12274, 12276, 12277, 12278, 12280, 12284, 12285, 12288, 12289, 12290, 12291, 12295, 12296, 12302, 12308, 12313, 12317, 12321, 12322, 12323, 12324, 12325, 12327, 12328, 12330, 12331, 12332, 12336, 12337, 12339, 12343, 12346, 12349, 12353, 12354, 12355, 12359, 12361, 12363, 12367, 12369, 12370, 12372, 12376, 12377, 12379, 12380, 12381, 12382, 12383, 12385, 12389, 12393, 12398, 12400, 12402, 12403, 12406, 12408, 12409, 12410, 12412, 12415, 12417, 12419, 12422, 12424, 12429, 12430, 12432, 12433, 12435, 12436, 12437, 12441, 12445, 12448, 12449, 12454, 12458, 12459, 12460,

[0465] right Primer: 12165, 12169, 12170, 12172, 12175, 12177, 12180, 12182, 12185, 12186, 12188, 12191, 12195, 12198, 12200, 12203, 12206, 12207, 12208, 12210, 12214, 12217, 12222, 12224, 12227, 12228, 12229, 12230, 12232, 12234, 12237, 12238, 12240, 12241, 12242, 12245, 12248, 12249, 12251, 12255, 12258, 12260, 12262, 12263, 12264, 12265, 12267, 12268, 12269, 12273, 12279, 12281, 12286, 12287, 12292, 12297, 12300, 12303, 12306, 12307, 12309, 12312, 12314, 12318, 12326, 12333, 12338, 12340, 12341, 12342, 12345, 12347, 12348, 12352, 12356, 12360, 12362, 12364, 12371, 12373, 12378, 12386, 12390, 12394, 12397, 12401, 12404, 12405, 12411, 12413, 12418, 12420, 12423, 12425, 12428, 12438, 12439, 12440, 12442, 12443, 12446, 12450, 12453, 12455,

[0466] Detection: 12166, 12173, 12178, 12183, 12189, 12192, 12204, 12211, 12218, 12235, 12246, 12252, 12282, 12293, 12298, 12301, 12304, 12310, 12315, 12319, 12334, 12350, 12357, 12365, 12374, 12387, 12391, 12395, 12416, 12426, 12444, 12451, 12456,

[0467] Anchor: 12167, 12174, 12179, 12184, 12193, 12205, 12212, 12215, 12219, 12236, 12247, 12253, 12261, 12275, 12283, 12294, 12299, 12305, 12311, 12316, 12320, 12329, 12335, 12344, 12351, 12358, 12366, 12368, 12375, 12384, 12388, 12392, 12396, 12399, 12407, 12414, 12421, 12427, 12431, 12434, 12447, 12452, 12457,

### SEQ ID NO: 9

[0468] left Primer: 12461, 12465, 12467, 12468, 12472, 12474, 12477, 12480, 12484, 12486, 12488, 12489, 12490, 12493, 12495, 12499, 12501, 12504, 12506,

[0469] right Primer: 12462, 12469, 12475, 12478, 12481, 12483, 12485, 12487, 12492, 12494, 12496, 12497, 12498, 12500, 12502, 12505,

[0470] Detection: 12463, 12470, 12473, 12482,

[0471] Anchor: 12464, 12466, 12471, 12476, 12479, 12491, 12503,

### SEQ ID NO: 46

[0472] left Primer: 12507, 12511, 12517, 12520, 12522, 12523, 12524, 12528, 12530, 12534, 12535, 12536, 12537, 12541, 12542, 12547, 12550, 12551, 12552, 12554, 12555, 12560, 12564, 12565, 12569, 12571, 12574, 12579, 12581, 12586, 12590, 12592, 12593, 12594, 12596, 12600, 12601, 12602, 12604, 12610, 12613, 12614, 12615, 12616, 12620, 12626, 12630,

[0473] right Primer: 12508, 12512, 12515, 12518, 12521, 12525, 12529, 12531, 12538, 12543, 12546, 12548, 12549, 12553, 12556, 12559, 12561, 12566, 12570, 12572, 12573, 12575, 12578, 12582, 12585, 12587, 12595, 12597, 12599, 12603, 12605, 12608, 12609, 12611, 12617, 12618, 12621, 12624, 12625, 12627,

[0474] Detection: 12509, 12513, 12516, 12514, 12532, 12539, 12544, 12557, 12562, 12567, 12576, 12583, 12588, 12591, 12606, 12612, 12622, 12628,

[0475] Anchor: 12510, 12514, 12519, 12526, 12527, 12533, 12540, 12545, 12558, 12563, 12568, 12577, 12580, 12584, 12589, 12598, 12607, 12619, 12623, 12629,

### SEQ ID NO: 10

[0476] left Primer: 12631, 12636, 12637, 12638, 12639, 12643, 12647, 12648, 12652, 12654, 12660, 12664, 12666, 12670, 12672, 12675, 12677, 12680, 12686, 12691, 12692, 12695, 12699, 12700, 12701, 12703, 12705, 12709, 12710, 12714, 12715, 12716, 12718, 12719, 12720, 12724, 12725, 12728, 12732, 12738, 12739, 12743, 12744, 12745, 12747, 12748, 12752, 12757, 12763, 12764, 12766, 12767, 12768, 12771, 12776, 12777, 12781, 12785, 12787, 12788, 12791, 12792, 12796, 12797, 12800, 12804, 12808, 12813, 12815, 12816, 12817, 12822, 12825, 12828, 12831, 12833, 12834, 12837, 12839, 12841, 12842,

[0477] right Primer: 12632, 12635, 12640, 12641, 12644, 12649, 12653, 12655, 12658, 12661, 12662, 12663, 12665, 12667, 12671, 12673, 12678, 12679, 12681, 12682, 12683, 12684, 12685, 12687, 12688, 12689, 12690, 12693, 12694, 12696, 12702, 12704, 12706, 12712, 12713, 12717, 12721, 12726, 12729, 12730, 12731, 12733, 12736, 12737, 12740, 12746, 12749, 12750, 12751, 12753, 12754, 12755, 12756, 12758, 12760, 12761, 12762, 12765, 12769, 12770, 12772, 12775, 12778, 12782, 12786, 12789, 12790, 12793, 12794, 12795, 12798, 12799, 12801, 12805, 12809, 12812, 12814, 12818, 12821, 12823, 12824, 12826, 12827, 12832, 12835, 12836, 12838, 12840, 12843, 12844,

[0478] Detection: 12633, 12642, 12645, 12650, 12656, 12668, 12674, 12676, 12697, 12707, 12722, 12734, 12741, 12759, 12773, 12779, 12783, 12802, 12806, 12810, 12819, 12829,

[0479] Anchor: 12634, 12646, 12651, 12657, 12659, 12669, 12698, 12708, 12711, 12723, 12707, 12727, 12735, 12742, 12774, 12780, 12784, 12803, 12807, 12811, 12820, 12830,

### SEQ ID NO: 11

[0480] left Primer: 12845, 12849, 12850, 12854, 12857, 12862, 12866, 12867, 12868, 12870, 12872, 12880, 12881, 12884, 12885, 12889, 12890, 12892, 12896, 12898, 12899, 12903, 12907, 12910, 12913, 12919, 12920, 12921, 12923, 12928, 12932, 12938, 12942, 12945, 12948, 12950, 12951, 12953, 12959,

[0481] right Primer: 12846, 12851, 12855, 12858, 12861, 12863, 12869, 12871, 12873, 12876, 12877, 12878, 12879, 12882, 12883, 12886, 12887, 12888, 12891, 12893, 12894, 12895, 12900, 12901, 12902, 12904, 12908, 12909, 12911, 12912, 12914, 12917, 12918, 12924, 12927, 12929, 12933, 12936, 12937, 12939, 12943, 12949, 12954, 12957, 12958, 12960,

[0482] Detection: 12847, 12852, 12859, 12864, 12874, 12905, 12915, 12925, 12930, 12934, 12940, 12944, 12946, 12955,

[0483] Anchor: 12848, 12853, 12856, 12860, 12865, 12875, 12897, 12906, 12916, 12922, 12926, 12931, 12935, 12941, 12930, 12947, 12952, 12956,

### SEQ ID NO: 12

[0484] left Primer: 12961, 12965, 12969, 12975, 12977,

[0485] right Primer: 12962, 12966, 12967, 12968, 12970, 12971, 12972, 12973, 12974, 12976, 12978, 12981,

[0486] Detection: 12963, 12979,

[0487] Anchor: 12964, 12980,

### SEQ ID NO: 13

[0488] left Primer: 12982, 12986, 12989, 12991, 12992, 12993, 12995, 12999, 13001,

[0489] right Primer: 12983, 12987, 12996, 12997, 12998, 13000, 13002,

[0490] Detection: 12984, 13003,

[0491] Anchor: 12985, 12988, 12990, 12994, 13004,

### SEQ ID NO:3

[0492] left Primer: 13005, 13009, 13013, 13017, 13019, 13025, 13029, 13030, 13032, 13033, 13034, 13037, 13040, 13042, 13043, 13044, 13048, 13049, 13051, 13052, 13053, 13057, 13062, 13064, 13065, 13066, 13067, 13072, 13073, 13076, 13078, 13082, 13083, 13085, 13087, 13088, 13089, 13092, 13096, 13100, 13101, 13102, 13105, 13108, 13109, 13110, 13114, 13117, 13118, 13124, 13129, 13131, 13132, 13138, 13144, 13146, 13147, 13148, 13152, 13156, 13159, 13164, 13167, 13168, 13170, 13171, 13172, 13173, 13174, 13184, 13185,

[0493] right Primer: 13006, 13010, 13014, 13018, 13020, 13021, 13022, 13023, 13024, 13026, 13031, 13035, 13036, 13038, 13039, 13041, 13045, 13050, 13054, 13058, 13061, 13063, 13068, 13069, 13070, 13071, 13074, 13075, 13077, 13079, 13084, 13086, 13090, 13091, 13093, 13097, 13104, 13107, 13111, 13115, 13119, 13121, 13122, 13123, 13125, 13126, 13127, 13128, 13130, 13133, 13137, 13139, 13142, 13143, 13145, 13149, 13153, 13157, 13158, 13160, 13163, 13165, 13166, 13169, 13175, 13176, 13177, 13178, 13179, 13180, 13181, 13182, 13183, 13186, 13189, 13190,

[0494] Detection: 13007, 13011, 13015, 13027, 13046, 13055, 13059, 13080, 13094, 13098, 13112, 13120, 13134, 13140, 13150, 13154, 13161, 13187,

[0495] Anchor: 13008, 13012, 13016, 13028, 13047, 13056, 13060, 13081, 13095, 13099, 13103, 13106, 13113, 13116, 13135, 13136, 13141, 13151, 13155, 13162, 13188,

### SEQ ID NO: 47

[0496] left Primer: 13191, 13195, 13196, 13197, 13199, 13200, 13204, 13206,

[0497] right Primer: 13192, 13198, 13201,

[0498] Detection: 13193, 13202,

[0499] Anchor: 13194, 13203, 13205,

### SEQ ID NO: 18

[0500] left Primer: 13207, 13212, 13213, 13226, 13228, 13231, 13235, 13240, 13245, 13247, 13248, 13250, 13254, 13256, 13258, 13264, 13265, 13268, 13269, 13273, 13274, 13277, 13279, 13280, 13281, 13286,

[0501] right Primer: 13208, 13211, 13214, 13217, 13220, 13222, 13224, 13225, 13227, 13229, 13232, 13233, 13234, 13237, 13239, 13241, 13242, 13244, 13246, 13249, 13251, 13255, 13257, 13259, 13262, 13263, 13266, 13267, 13270, 13275, 13276, 13282, 13285,

[0502] Detection: 13209, 13215, 13218, 13236, 13252, 13260, 13271, 13283,

[0503] Anchor: 13210, 13216, 13219, 13221, 13223, 13230, 13238, 13243, 13253, 13261, 13272, 13278, 13284,

### SEQ ID NO: 32

[0504] left Primer: 13641, 13645, 13646, 13649, 13650, 13652, 13653, 13654, 13655, 13658, 13659,

[0505] right Primer: 13642, 13647, 13648, 13656,

[0506] Detection: 13643,

[0507] Anchor: 13644, 13651, 13657,

### SEQ ID NO: 33

[0508] left Primer: 13660,

[0509] right Primer: 13661,

[0510] Detection: 13662,

[0511] Anchor: 13663,

### SEQ ID NO: 34

[0512] left Primer: 13664, 13669, 13670, 13671, 13672, 13673, 13675, 13676, 13677, 13681, 13683, 13685, 13687, 13689, 13691, 13693, 13696,

[0513] right Primer: 13665, 13668, 13674, 13678, 13682, 13684, 13686, 13688, 13690, 13692, 13694, 13695,

[0514] Detection: 13666, 13679,

[0515] Anchor: 13667, 13680,

### SEQ ID NO: 24

[0516] left Primer: 13697, 13701, 13702, 13703, 13709, 13713, 13714, 13715, 13719, 13721, 13722, 13726, 13728, 13732, 13735, 13740,

[0517] right Primer: 13698, 13704, 13705, 13706, 13707, 13708, 13710, 13716, 13717, 13718, 13720, 13723, 13724, 13725, 13727, 13729, 13733, 13734, 13736, 13739, 13741, 13744,

[0518] Detection: 13699, 13711, 13730, 13737, 13742,

[0519] Anchor: 13700, 13712, 13731, 13738, 13743,

### SEQ ID NO: 35

[0520] left Primer: 13745, 13749, 13751, 13752, 13753, 13754, 13758, 13762, 13765, 13766, 13768, 13772, 13773, 13774, 13777, 13778, 13779, 13783, 13785, 13790, 13791, 13797, 13802, 13803, 13805, 13806, 13807, 13809, 13812, 13814, 13816, 13817, 13818, 13819, 13820, 13823, 13824, 13826, 13828,

[0521] right Primer: 13746, 13755, 13759, 13763, 13764, 13767, 13769, 13775, 13776, 13780, 13784, 13786, 13788, 13789, 13792, 13795, 13796, 13798, 13800, 13804, 13808, 13813, 13815, 13821, 13822, 13829,

[0522] Detection: 13747, 13756, 13760, 13781, 13793, 13801, 13810, 13830,

[0523] Anchor: 13748, 13750, 13757, 13761, 13770, 13771, 13782, 13787, 13794, 13799, 13811, 13825, 13827, 13831,

### SEQ ID NO: 36

[0524] left Primer: 13832, 13837, 13841, 13844, 13845, 13846, 13849, 13854, 13855, 13856, 13857, 13861, 13865, 13869, 13871, 13875, 13879, 13880,

[0525] right Primer: 13833, 13836, 13838, 13843, 13847, 13850, 13853, 13858, 13862, 13866, 13870, 13872, 13876, 13881, 13882,

[0526] Detection: 13834, 13839, 13851, 13859, 13863, 13867, 13873, 13877,

[0527] Anchor: 13835, 13840, 13842, 13848, 13852, 13860, 13864, 13868, 13874, 13878,

### SEQ ID NO: 28

[0528] left Primer: 13883, 13889, 13894, 13902, 13903, 13910, 13911, 13914, 13915, 13916, 13928, 13929, 13930, 13931, 13935, 13936, 13937, 13944, 13947, 13948, 13950, 13960, 13961, 13962, 13964, 13965, 13966, 13968, 13970, 13971, 13972, 13976, 13978,

[0529] right Primer: 13884, 13887, 13890, 13893, 13895, 13898, 13900, 13904, 13905, 13906, 13907, 13908, 13909, 13912, 13913, 13917, 13920, 13921, 13922, 13923, 13924, 13925, 13926, 13932, 13938, 13941, 13942, 13943, 13945, 13946, 13949, 13953, 13954, 13956, 13957, 13958, 13959, 13963, 13967, 13969, 13974, 13975, 13977, 13980,

[0530] Detection: 13885, 13886, 13891, 13896, 13901, 13918, 13927, 13933, 13939, 13951,

[0531] Anchor: 13886, 13888, 13892, 13897, 13899, 13901, 13919, 13934, 13940, 13952, 13955, 13973, 13979,

### SEQ ID NO: 37

[0532] left Primer: 13981, 13988, 13989, 13990, 13992, 13994, 13995, 13999,

[0533] right Primer: 13982, 13985, 13986, 13987, 13991, 13993, 13996, 14000, 14001, 14002, 14003,

[0534] Detection: 13983, 13997,

[0535] Anchor: 13984, 13998,

### SEQ ID NO: 26

[0536] left Primer: 14004, 14009, 14014, 14017, 14020, 14024, 14026, 14029, 14035, 14036, 14040, 14043, 14045, 14051, 14057, 14058, 14059, 14063, 14065, 14066, 14067, 14068, 14069, 14070, 14071, 14073, 14074, 14078, 14079, 14080, 14081, 14082, 14083, 14084, 14085, 14087, 14094, 14095, 14100, 14108, 14109, 14113, 14114, 14118, 14120, 14121, 14122, 14130, 14133, 14138, 14141, 14142, 14143, 14147,

[0537] right Primer: 14005, 14008, 14010, 14013, 14015, 14018, 14021, 14025, 14027, 14028, 14030, 14033, 14034, 14037, 14038, 14039, 14041, 14042, 14044, 14046, 14049, 14050, 14052, 14055, 14056, 14060, 14064, 14072, 14077, 14086, 14088, 14089, 14090, 14091, 14092, 14093, 14096, 14097, 14098, 14099, 14101, 14102, 14103, 14104, 14105, 14106, 14107, 14110, 14115, 14123, 14126, 14127, 14132, 14134, 14135, 14136, 14137, 14139, 14140, 14144, 14145, 14148,

[0538] Detection: 14006, 14011, 14019, 14022, 14031, 14047, 14053, 14061, 14075, 14111, 14116, 14124, 14149,

[0539] Anchor: 14007, 14012, 14016, 14023, 14032, 14048, 14054, 14062, 14076, 14112, 14117, 14119, 14125, 14128, 14129, 14131, 14146, 14150,

### SEQ ID NO: 27

[0540] left Primer: 14151, 14155, 14157, 14161, 14166, 14171, 14175, 14183, 14187, 14190, 14192, 14194, 14195, 14196, 14200, 14201,

[0541] right Primer: 14152, 14156, 14158, 14162, 14165, 14167, 14170, 14172, 14176, 14179, 14180, 14182, 14184, 14185, 14186, 14188, 14189, 14191, 14193, 14197, 14198, 14199, 14202, 14203,

[0542] Detection: 14153, 14159, 14163, 14168, 14173, 14177,

[0543] Anchor: 14154, 14160, 14164, 14169, 14174, 14178, 14181,

### SEQ ID NO: 31

[0544] left Primer: 14204, 14210, 14211, 14216, 14217, 14223, 14226, 14228, 14229, 14230, 14233, 14235, 14239, 14241, 14243, 14244, 14250, 14254, 14255, 14256, 14257, 14260, 14261, 14262, 14267, 14268, 14269, 14273, 14274, 14277, 14281, 14284, 14286, 14289, 14292, 14293, 14297, 14299, 14301, 14304, 14305, 14306, 14312, 14316, 14320, 14322, 14324, 14328, 14329, 14331, 14337, 14342, 14344, 14346, 14347, 14349, 14350, 14353, 14356, 14361, 14363, 14364, 14365, 14366,

[0545] right Primer: 14205, 14208, 14212, 14215, 14218, 14221, 14224, 14225, 14227, 14231, 14236, 14240, 14242, 14245, 14246, 14247, 14251, 14263, 14266, 14270, 14278, 14282, 14283, 14285, 14287, 14290, 14291, 14294, 14298, 14300, 14302, 14303, 14307, 14310, 14313, 14317, 14323, 14325, 14327, 14330, 14334, 14338, 14340, 14341, 14345, 14348, 14351, 14352, 14354, 14355, 14357, 14358, 14359, 14360, 14367,

[0546] Detection: 14206, 14213, 14219, 14237, 14248, 14252, 14258, 14264, 14271, 14275, 14279, 14295, 14308, 14311, 14314, 14318, 14332, 14335, 14339, 14343,

[0547] Anchor: 14207, 14209, 14214, 14220, 14222, 14232, 14234, 14238, 14249, 14253, 14259, 14265, 14272, 14276, 14280, 14288, 14296, 14309, 14315, 14319, 14321, 14326, 14333, 14336, 14362,

### SEQ ID NO: 40

[0548] left Primer: 14368, 14372, 14373, 14375, 14386,

[0549] right Primer: 14369, 14374, 14376, 14379, 14380, 14381, 14382, 14383, 14384, 14385,

[0550] Detection: 14370, 14377,

[0551] Anchor: 14371, 14378,

[0552] In an alternative most preferred embodiment of the method, the subsequent amplification of d) is carried out in the presence of blocking oligonucleotides, as described above. Said blocking oligonucleotides comprising a sequence having a length of at least 9 nucleotides which hybridizes to a treated nucleic acid sequence according to one of SEQ ID NOS:304 to SEQ ID NO:535 and sequences complementary thereto, wherein the base sequence of said oligomers comprises at least one CpG, TpG or CpA dinucleotide. Step e) of the method, namely the detection of the specific amplificates indicative of the methylation status of one or more CpG positions according to SEQ ID NOS:1 to SEQ ID NO:64 is carried out by means of real-time detection methods as described above.

[0553] In a further preferred embodiment of the method the sequence(s) of the blocking oligonucleotides are selected from the group consisting of SEQ ID NOS:2114, 2119, 2124, 2125, 2127, 2132, 2133, 2135, 2137, 2138, 2139, 2140, 2141, 2142, 2143, 2144, 2146, 2147, 2148, 2149, 2150, 2151, 2152, 2153, 2154, 2155, 2156, 2157, 2158, 2159, 2160, 2031, 2082, 2087, 2089, 2094, 2095, 2096, 2097, 2099, 2107, 1980, 2018, 2022, 2023, 2026, 1939, 1966, 1973, 1974, 1975, 1926, 1930, 1931, 1932, 1933, 1934, 1903, 1917, 1921, 1834, 1896, 1805, 1819, 1821, 1823, 1824, 1825, 1826, 1827, 1828, 1829, 1770, 1782, 1785, 1786, 1788, 1789, 1790, 1792, 1795, 1796, 1797, 1798, 1799, 1800, 1748, 1759, 1760, 1761, 1762, 1763, 1764, 1765, 1724, 1741, 1597, 1609, 1610, 1611, 1612, 1613, 1614, 1615, 1616, 1617, 1618, 1619, 1620, 1621, 1622, 1623, 1624, 1625, 1626, 1627, 1628, 1629, 1630, 1631, 1633, 1634, 1635, 1636, 1637, 1638, 1639, 1640, 1641, 1642, 1643, 1644, 1645, 1646, 1647, 1648, 1649, 1650, 1651, 1652, 1653, 1654, 1655, 1656, 1657, 1658, 1659, 1660, 1661, 1662, 1663, 1668, 1684, 1685, 1686, 1687, 1688, 1689, 1690, 1691, 1692, 1693, 1694, 1695, 1696, 1697, 1698, 1699, 1700, 1701, 1706, 1712, 1713, 1715, 1716, 1717, 1718, 1719, 1571, 1579, 1581, 1584, 1585, 1586, 1587, 1588, 1591, 1592, 1537, 1555, 1556, 1557, 1558, 1559, 1560, 1561, 1562, 1563, 1564, 1565, 1566, 1452, 1455, 1456, 1457, 1458, 1463, 1514, 1515, 1516, 1517, 1518, 1519, 1524, 1525, 1526, 1527, 1528, 1529, 1531, 1532, 1372, 1423, 1424, 1425, 1427, 1432, 1433, 1434, 1435, 1436, 1437, 1440, 1441, 1442, 1443, 1444, 1445, 1446, 1447, 1343, 1358, 1359, 1360, 1361, 1362, 1363, 1364, 1365, 1366, 1367, 1310, 1315, 1316, 1317, 1318, 1319, 1320, 1321, 1322, 1324, 1325, 1327, 1328, 1330, 1332, 1334, 1337, 1338, 1276, 1290, 1305, 1203, 1228, 1238, 1239, 1240, 1247, 1248, 1255, 1256, 1265, 1268, 1269, 1164, 1171, 1172, 1173, 1174, 1176, 1177, 1178, 1179, 1180, 1181, 1182, 1183, 1184, 1185, 1186, 1187, 1188, 1189, 1190, 1191, 1192, 1193, 1194, 1195, 1196, 1197, 1198, 2725, 2748, 2749, 2750, 2710, 2717, 2718, 2719, 2720, 2721, 2684, 2699, 2703, 2704, 2705, 2706, 2658, 2662, 2679, 2603, 2613, 2617, 2585, 2594, 2595, 2596, 2597, 2598, 2599, 2489, 2497, 2498, 2499, 2500, 2501, 2504, 2505, 2507, 2508, 2510, 2511, 2512, 2513, 2514, 2515, 2519, 2520, 2521, 2522, 2525, 2526, 2527, 2528, 2529, 2530, 2531, 2532, 2534, 2535, 2536, 2537, 2539, 2540, 2541, 2542, 2543, 2544, 2545, 2546, 2547, 2550, 2551, 2552, 2553, 2554, 2558, 2563, 2564, 2572, 2580, 2581, 2472, 2482, 2484, 2408, 2464, 2465, 2466, 2467, 2468, 2339, 2349, 2367, 2370, 2372, 2373, 2374, 2375, 2376, 2377, 2378, 2379, 2380, 2382, 2386, 2387, 2389, 2393, 2394, 2395, 2396, 2397, 2398, 2402, 2403, 2404, 2327, 2333, 2334, 2335, 2305, 2315, 2318, 2260, 2268, 2270, 2271, 2272, 2273, 2274, 2275, 2276, 2277, 2278, 2279, 2280, 2281, 2282, 2283, 2284, 2285, 2286, 2287, 2288, 2289, 2290, 2291, 2292, 2293, 2294, 2295, 2296, 2297, 2298, 2299, 2300, 2301, 2232, 2245, 2246, 2248, 2249, 2250, 2251, 2252, 2254, 2255, 2256, 2210, 2218, 2219, 2221, 2222, 2223, 2227, 2228, 2202, 2204, 2205, 2206, 2164, 2180, 2183, 2187, 2188, 2189, 2190, 2191, 2192, 2193, 2194, 2195, 2196, 2197 and 2198.

[0554] Step e) of the method, namely the detection of the specific amplificates indicative of the methylation status of one or more CpG positions according to SEQ ID NOS:1 to SEQ ID NO:64 is carried out by means of real-time detection methods as described above, and wherein the sequence of said hybridization probes is selected from the group consisting of SEQ ID NOS:1162, 1163, 1201, 1202, 1208, 1211, 1217, 1274, 1288, 1275, 1289, 1299, 1308, 1309, 1341, 1342, 1347, 1351, 1354, 1372, 1423, 1424, 1425, 1427, 1432, 1433, 1434, 1435, 1436, 1437, 1440, 1441, 1442, 1443, 1444, 1445, 1446, 1447, 1370, 1371, 1400, 1450, 1461, 1451, 1462, 1467, 1470, 1473, 1475, 1535, 1536, 1542, 1544, 1569, 1570, 1583, 1590, 1595, 1666, 1704, 1596, 1601, 1603, 1667, 1705, 1722, 1723, 1727, 1735, 1746, 1747, 1768, 1769, 1773, 1803, 1804, 1807, 1810, 1832, 1833, 1836, 1867, 1871, 1901, 1902, 1908, 1911, 1924, 1925, 1937, 1938, 1943, 1946, 1949, 1956, 1957, 1978, 1979, 1986, 1992, 1998, 2001, 2003, 2010, 2020, 2025, 2029, 2030, 2113, 2163, 2201, 2209, 2231, 2259, 2304, 2326, 2338, 2348, 2351, 2369, 2407, 2471, 2488, 2557, 2584, 2602, 2616, 2657, 2661, 2664, 2671, 2683, 2709 and SEQ ID NO: 2724.

[0555] For each genomic sequence listed, the following oligonucleotides as detailed in the sequence listing may be used for a combined Blocking oligonucleotide-RealTime analysis: Lightcycler dual probe detection assays:

### SEQ ID NO: 41

[0556] left Primer: 1161, 1165, 1166, 1167,

[0557] right Primer: 1160, 1168, 1169, 1170, 1175,

[0558] Blocker: 1164, 1171, 1172, 1173, 1174, 1176, 1177, 1178, 1179, 1180, 1181, 1182, 1183, 1184, 1185, 1186, 1187, 1188, 1189, 1190, 1191, 1192, 1193, 1194, 1195, 1196, 1197, 1198,

[0559] Detection: 1162,

[0560] Anchor: 1163,

### SEQ ID NO: 6

[0561] left Primer: 1200, 1204, 1205, 1206, 1207, 1209, 1210, 1212, 1213, 1214, 1215, 1216, 1218,

[0562] right Primer: 1199, 1219, 1220, 1221, 1222, 1223, 1224, 1225, 1226, 1227, 1229, 1230, 1231, 1232, 1233, 1234, 1235, 1236, 1237, 1241, 1242, 1243, 1244, 1245, 1246, 1249, 1250, 1251, 1252, 1253, 1254, 1257, 1258, 1259, 1260, 1261, 1262, 1263, 1264, 1266, 1267, 1270, 1271,

[0563] Blocker: 1203, 1228, 1238, 1239, 1240, 1247, 1248, 1255, 1256, 1265, 1268, 1269,

[0564] Detection: 1201,

[0565] Anchor: 1202, 1208, 1211, 1217,

### SEQ ID NO: 14

[0566] left Primer: 1273, 1277, 1278, 1279, 1280, 1281, 1282, 1283, 1287, 1291, 1292, 1293, 1294, 1295, 1296, 1297, 1298, 1300, 1301, 1302, 1303,

[0567] right Primer: 1272, 1284, 1285, 1286, 1304,

[0568] Blocker: 1276, 1290, 1305,

[0569] Detection: 1274, 1288,

[0570] Anchor: 1275, 1289, 1299,

### SEQ ID NO: 7

[0571] left Primer: 1307, 1311,

[0572] right Primer: 1306, 1312, 1313, 1314, 1323, 1326, 1329, 1331, 1333, 1335, 1336,

[0573] Blocker: 1310, 1315, 1316, 1317, 1318, 1319, 1320, 1321, 1322, 1324, 1325, 1327, 1328, 1330, 1332, 1334, 1337, 1338,

[0574] Detection: 1308,

[0575] Anchor: 1309,

### SEQ ID NO: 44

[0576] left Primer: 1340, 1344, 1345, 1346, 1348, 1349, 1350, 1352, 1353, 1355,

[0577] right Primer: 1339, 1356, 1357,

[0578] Blocker: 1343, 1358, 1359, 1360, 1361, 1362, 1363, 1364, 1365, 1366, 1367,

[0579] Detection: 1341,

[0580] Anchor: 1342, 1347, 1351, 1354,

### SEQ ID NO:1

[0581] left Primer: 1369, 1373, 1374, 1375, 1376, 1377, 1378, 1379, 1380, 1381, 1382, 1383, 1384, 1385, 1386, 1387, 1388, 1389, 1390, 1391, 1392, 1393, 1394, 1395, 1396, 1397, 1398, 1399, 1401, 1402, 1403, 1404, 1405, 1406, 1407, 1408, 1409, 1410, 1411, 1412, 1413, 1414, 1415, 1416, 1417, 1418, 1419, 1420, 1421,

[0582] right Primer: 1368, 1422, 1426, 1428, 1429, 1430, 1431, 1438, 1439,

[0583] Blocker: 1372, 1423, 1424, 1425, 1427, 1432, 1433, 1434, 1435, 1436, 1437, 1440, 1441, 1442, 1443, 1444, 1445, 1446, 1447,

[0584] Detection: 1370,

[0585] Anchor: 1371, 1400,

### SEQ ID NO: 9

[0586] left Primer: 1449, 1453, 1454, 1460, 1464, 1465, 1466, 1468, 1469, 1471, 1472, 1474, 1476, 1477, 1478, 1479, 1480, 1481, 1482, 1483, 1484, 1485, 1486, 1487, 1488, 1489, 1490, 1491, 1492, 1493, 1494, 1495, 1496, 1497, 1498, 1499, 1500, 1501, 1502, 1503, 1504, 1505, 1506, 1507, 1508, 1509, 1510,

[0587] right Primer: 1448, 1459, 1511, 1512, 1513, 1520, 1521, 1522, 1523, 1530,

[0588] Blocker: 1452, 1455, 1456, 1457, 1458, 1463, 1514, 1515, 1516, 1517, 1518, 1519, 1524, 1525, 1526, 1527, 1528, 1529, 1531, 1532,

[0589] Detection: 1450, 1461,

[0590] Anchor: 1451, 1462, 1467, 1470, 1473, 1475,

### SEQ ID NO: 46

[0591] left Primer: 1534, 1538, 1539, 1540, 1541, 1543, 1545, 1546, 1547, 1548, 1549, 1550, 1551, 1552, 1553, 1554,

[0592] right Primer: 1533,

[0593] Blocker: 1537, 1555, 1556, 1557, 1558, 1559, 1560, 1561, 1562, 1563, 1564, 1565, 1566,

[0594] Detection: 1535,

[0595] Anchor: 1536, 1542, 1544,

### SEQ ID NO:10

[0596] left Primer: 1568, 1572, 1573,

[0597] right Primer: 1567, 1574, 1575, 1576, 1577, 1578, 1580, 1582, 1589,

[0598] Blocker: 1571, 1579, 1581, 1584, 1585, 1586, 1587, 1588, 1591, 1592,

[0599] Detection: 1569,

[0600] Anchor: 1570, 1583, 1590,

### SEQ ID NO: 12

[0601] left Primer: 1594, 1598, 1599, 1600, 1602, 1604, 1605, 1606, 1607, 1665, 1669, 1670, 1671, 1672, 1673, 1674, 1675, 1676, 1677, 1678, 1679, 1680, 1681, 1682, 1703, 1707, 1708,

[0602] right Primer: 1593, 1608, 1632, 1664, 1683, 1702, 1709, 1710, 1711, 1714,

[0603] Blocker: 1597, 1609, 1610, 1611, 1612, 1613, 1614, 1615, 1616, 1617, 1618, 1619, 1620, 1621, 1622, 1623, 1624, 1625, 1626, 1627, 1628, 1629, 1630, 1631, 1633, 1634, 1635, 1636, 1637, 1638, 1639, 1640, 1641, 1642, 1643, 1644, 1645, 1646, 1647, 1648, 1649, 1650, 1651, 1652, 1653, 1654, 1655, 1656, 1657, 1658, 1659, 1660, 1661, 1662, 1663, 1668, 1684, 1685, 1686, 1687, 1688, 1689, 1690, 1691, 1692, 1693, 1694, 1695, 1696, 1697; 1698, 1699, 1700, 1701, 1706, 1712, 1713, 1715, 1716, 1717, 1718, 1719,

[0604] Detection: 1595, 1666, 1704,

[0605] Anchor: 1596, 1601, 1603, 1667, 1705,

### SEQ ID NO: 13

[0606] left Primer: 1721, 1725, 1726, 1728, 1729, 1730, 1731, 1732, 1733, 1734, 1736, 1737,

[0607] right Primer: 1720, 1738, 1739, 1740, 1742, 1743,

[0608] Blocker: 1724, 1741,

[0609] Detection: 1722,

[0610] Anchor: 1723, 1727, 1735,

### SEQ ID NO:3

[0611] left Primer: 1745, 1749, 1750, 1751, 1752, 1753, 1754, 1755, 1758,

[0612] right Primer: 1744, 1756, 1757,

[0613] Blocker: 1748, 1759, 1760, 1761, 1762, 1763, 1764, 1765,

[0614] Detection: 1746,

[0615] Anchor: 1747,

### SEQ ID NO: 18

[0616] left Primer: 1767, 1771, 1772, 1774, 1775, 1776, 1777, 1778,

[0617] right Primer: 1766, 1779, 1780, 1781, 1783, 1784, 1787, 1791, 1793, 1794,

[0618] Blocker: 1770, 1782, 1785, 1786, 1788, 1789, 1790, 1792, 1795, 1796, 1797, 1798, 1799, 1800,

[0619] Detection: 1768,

[0620] Anchor: 1769, 1773,

### SEQ ID NO: 17

[0621] left Primer: 1802, 1806, 1808, 1809, 1811, 1812, 1813, 1814,

[0622] right Primer: 1801, 1815, 1816, 1817, 1818, 1820, 1822,

[0623] Blocker: 1805, 1819, 1821, 1823, 1824, 1825, 1826, 1827, 1828, 1829,

[0624] Detection: 1803,

[0625] Anchor: 1804, 1807, 1810,

### SEQ ID NO:21

[0626] left Primer: 1831, 1835, 1837, 1838, 1839, 1840, 1841, 1842, 1843, 1844, 1845, 1846, 1847, 1848, 1849, 1850, 1851, 1852, 1853, 1854, 1855, 1856, 1857, 1858, 1859, 1860, 1861, 1862, 1863, 1864, 1865, 1866, 1868, 1869, 1870, 1872, 1873, 1874, 1875, 1876, 1877, 1878, 1879, 1880, 1881, 1882, 1883, 1884, 1887, 1889, 1890, 1891, 1895,

[0627] right Primer: 1830, 1885, 1886, 1888, 1892, 1893, 1894, 1897, 1898,

[0628] Blocker: 1834, 1896,

[0629] Detection: 1832,

[0630] Anchor: 1833, 1836, 1867, 1871,

### SEQ ID NO: 35

[0631] left Primer: 1900, 1904, 1905, 1906,

[0632] right Primer: 1899, 1907, 1909, 1910, 1912, 1913, 1914, 1915, 1916, 1918, 1919, 1920,

[0633] Blocker: 1903, 1917, 1921,

[0634] Detection: 1901,

[0635] Anchor: 1902, 1908, 1911,

### SEQ ID NO: 25

[0636] left Primer: 1923,

[0637] right Primer: 1922, 1927, 1928, 1929,

[0638] Blocker: 1926, 1930, 1931, 1932, 1933, 1934,

[0639] Detection: 1924,

[0640] Anchor: 1925,

### SEQ ID NO: 26

[0641] left Primer: 1936, 1940, 1941, 1942, 1944, 1945, 1947, 1948, 1950, 1951, 1952,

[0642] right Primer: 1935, 1953, 1954, 1955, 1958, 1959, 1960, 1961, 1962, 1963, 1964, 1965, 1967, 1968, 1969, 1970, 1971, 1972,

[0643] Blocker: 1939, 1966, 1973, 1974, 1975,

[0644] Detection: 1937,

[0645] Anchor: 1938, 1943, 1946, 1949, 1956, 1957,

### SEQ ID NO: 38

[0646] left Primer: 1977, 1981, 1982, 1983, 1984, 1985, 1987, 1988, 1989, 1990, 1991, 1993, 1994, 1995, 1996, 1997, 1999, 2000, 2002, 2004, 2005, 2006, 2007, 2008, 2009, 2011, 2012,

[0647] right Primer: 1976, 2013, 2014, 2015, 2016, 2017, 2019, 2021, 2024,

[0648] Blocker: 1980, 2018, 2022, 2023, 2026,

[0649] Detection: 1978,

[0650] Anchor: 1979, 1986, 1992, 1998, 2001, 2003, 2010, 2020, 2025,

### SEQ ID NO: 27

[0651] left Primer: 2028, 2032, 2033, 2034, 2035, 2036, 2037, 2038, 2039, 2040, 2041, 2042, 2043, 2044, 2045, 2046, 2047, 2048, 2049, 2050, 2051, 2052, 2053, 2054, 2055, 2056, 2057, 2058, 2059, 2060, 2061, 2062, 2063, 2064, 2065, 2066, 2067, 2068, 2069, 2070, 2071, 2072, 2073, 2074, 2075, 2076, 2077,

[0652] right Primer: 2027, 2078, 2079, 2080, 2081, 2083, 2084, 2085, 2086, 2088, 2090, 2091, 2092, 2093, 2098, 2100, 2101, 2102, 2103, 2104, 2105, 2106, 2108, 2109, 2110,

[0653] Blocker: 2031, 2082, 2087, 2089, 2094, 2095, 2096, 2097, 2099, 2107,

[0654] Detection: 2029,

[0655] Anchor: 2030,

### Taqman Real-Time Single Probe Detection Assays:

### SEQ ID NO: 41

[0656] left Primer: 2112, 2115, 2116, 2117,

[0657] right Primer: 2111, 2118, 2120, 2121, 2122, 2123, 2126, 2128, 2129, 2130, 2131, 2134, 2136, 2145,

[0658] Blocker: 2114, 2119, 2124, 2125, 2127, 2132, 2133, 2135, 2137, 2138, 2139, 2140, 2141, 2142, 2143, 2144, 2146, 2147, 2148, 2149, 2150, 2151, 2152, 2153, 2154, 2155, 2156, 2157, 2158, 2159, 2160,

[0659] Detection: 2113,

### SEQ ID NO: 6

[0660] left Primer: 2162, 2165, 2166, 2167, 2168, 2169, 2170, 2171, 2172, 2173,

[0661] right Primer: 2161, 2174, 2175, 2176, 2177, 2178, 2179, 2181, 2182, 2184, 2185, 2186,

[0662] Blocker: 2164, 2180, 2183, 2187, 2188, 2189, 2190, 2191, 2192, 2193, 2194, 2195, 2196, 2197, 2198,

[0663] Detection: 2163,

### SEQ ID NO: 8

[0664] left Primer: 2199, 2203,

[0665] right Primer: 2200,

[0666] Blocker: 2202, 2204, 2205, 2206,

[0667] Detection: 2201,

### SEQ ID NO: 14

[0668] left Primer: 2208, 2211, 2212, 2213, 2214,

[0669] right Primer: 2207, 2215, 2216, 2217, 2220, 2224, 2225, 2226,

[0670] Blocker: 2210, 2218, 2219, 2221, 2222, 2223, 2227, 2228,

[0671] Detection: 2209,

### SEQ ID NO: 9

[0672] left Primer: 2230, 2233, 2234, 2235, 2236, 2237, 2238, 2239, 2240, 2241, 2242, 2243, 2244,

[0673] right Primer: 2229, 2247, 2253,

[0674] Blocker: 2232, 2245, 2246, 2248, 2249, 2250, 2251, 2252, 2254, 2255, 2256,

[0675] Detection: 2231,

### SEQ ID NO: 46

[0676] left Primer: 2257, 2264, 2265, 2266, 2267, 2269,

[0677] right Primer: 2258, 2261, 2262, 2263,

[0678] Blocker: 2260, 2268, 2270, 2271, 2272, 2273, 2274, 2275, 2276, 2277, 2278, 2279, 2280, 2281, 2282, 2283, 2284, 2285, 2286, 2287, 2288, 2289, 2290, 2291, 2292, 2293, 2294, 2295, 2296, 2297, 2298, 2299, 2300, 2301,

[0679] Detection: 2259,

### SEQ ID NO: 13

[0680] left Primer: 2303, 2306, 2307, 2308, 2309, 2310, 2311, 2312, 2313,

[0681] right Primer: 2302, 2314, 2316, 2317, 2319, 2320, 2321, 2322, 2323,

[0682] Blocker: 2305, 2315, 2318,

[0683] Detection: 2304,

### SEQ ID NO: 18

[0684] left Primer: 2325, 2328, 2329, 2330,

[0685] right Primer: 2324, 2331, 2332,

[0686] Blocker: 2327, 2333, 2334, 2335,

[0687] Detection: 2326,

### SEQ ID NO: 20

[0688] left Primer: 2337, 2340, 2341, 2342, 2343, 2344, 2345, 2346, 2366, 2368, 2371, 2381, 2383, 2384, 2385, 2388, 2390, 2391, 2392, 2399, 2400, 2401,

[0689] right Primer: 2336, 2347, 2350, 2352, 2353, 2354, 2355, 2356, 2357, 2358, 2359, 2360, 2361, 2362, 2363, 2364, 2365,

[0690] Blocker: 2339, 2349, 2367, 2370, 2372, 2373, 2374, 2375, 2376, 2377, 2378, 2379, 2380, 2382, 2386, 2387, 2389, 2393, 2394, 2395, 2396, 2397, 2398, 2402, 2403, 2404,

[0691] Detection: 2338, 2348, 2351, 2369,

### SEQ ID NO: 48

[0692] left Primer: 2406, 2409, 2410, 2411, 2412, 2413, 2414, 2415, 2416, 2417, 2418, 2419, 2420, 2421, 2422, 2423, 2424, 2425, 2426, 2427, 2428, 2429, 2430, 2431, 2432, 2433, 2434, 2435, 2436, 2437, 2438, 2439, 2440, 2441, 2442, 2443, 2444, 2445, 2446, 2447, 2448, 2449, 2450, 2451, 2452, 2453, 2454, 2455, 2456, 2457, 2458, 2459, 2460, 2461, 2462, 2463,

[0693] right Primer: 2405,

[0694] Blocker: 2408, 2464, 2465, 2466, 2467, 2468,

[0695] Detection: 2407,

### SEQ ID NO: 22

[0696] left Primer: 2469, 2483, 2485,

[0697] right Primer: 2470, 2473, 2474, 2475, 2476, 2477, 2478, 2479, 2480, 2481,

[0698] Blocker: 2472, 2482, 2484,

[0699] Detection: 2471,

### SEQ ID NO: 19

[0700] left Primer: 2486, 2494, 2495, 2496, 2502, 2503, 2506, 2509, 2516, 2517, 2518, 2523, 2524, 2533, 2538, 2548, 2549, 2556,

[0701] right Primer: 2487, 2490, 2491, 2492, 2493, 2555, 2559, 2560, 2561, 2562, 2565, 2566, 2567, 2568, 2569, 2570, 2571, 2573, 2574, 2575, 2576, 2577, 2578, 2579,

[0702] Blocker: 2489, 2497, 2498, 2499, 2500, 2501, 2504, 2505, 2507, 2508, 2510, 2511, 2512, 2513, 2514, 2515, 2519, 2520, 2521, 2522, 2525, 2526, 2527, 2528, 2529, 2530, 2531, 2532, 2534, 2535, 2536, 2537, 2539, 2540, 2541, 2542, 2543, 2544, 2545, 2546, 2547, 2550, 2551, 2552, 2553, 2554, 2558, 2563, 2564, 2572, 2580, 2581,

[0703] Detection: 2488, 2557,

### SEQ ID NO: 17

[0704] left Primer: 2583, 2586, 2587, 2588, 2589, 2590, 2591,

[0705] right Primer: 2582, 2592, 2593,

[0706] Blocker: 2585, 2594, 2595, 2596, 2597, 2598, 2599,

[0707] Detection: 2584,

### SEQ ID NO:21

[0708] left Primer: 2600, 2612, 2615, 2618, 2619, 2620, 2621, 2622, 2623, 2624, 2625, 2626, 2627, 2628, 2629, 2630, 2631, 2632, 2633, 2634, 2635, 2636, 2637, 2638, 2639, 2640, 2641, 2642, 2643, 2644, 2645, 2646, 2647,

[0709] right Primer: 2601, 2604, 2605, 2606, 2607, 2608, 2609, 2610, 2611, 2614, 2648, 2649, 2650, 2651, 2652, 2653, 2654,

[0710] Blocker: 2603, 2613, 2617,

[0711] Detection: 2602, 2616,

### SEQ ID NO: 36

[0712] left Primer: 2655, 2659, 2676, 2677, 2678, 2680,

[0713] right Primer: 2656, 2660, 2663, 2665, 2666, 2667, 2668, 2669, 2670, 2672, 2673, 2674, 2675,

[0714] Blocker: 2658, 2662, 2679,

[0715] Detection: 2657, 2661, 2664, 2671,

### SEQ ID NO: 26

[0716] left Primer: 2682, 2685, 2686, 2687, 2688, 2689,

[0717] right Primer: 2681, 2690, 2691, 2692, 2693, 2694, 2695, 2696, 2697, 2698, 2700, 2701, 2702,

[0718] Blocker: 2684, 2699, 2703, 2704, 2705, 2706,

[0719] Detection: 2683,

### SEQ ID NO: 38

[0720] left Primer: 2708, 2711, 2712, 2713, 2714, 2715,

[0721] right Primer: 2707, 2716,

[0722] Blocker: 2710, 2717, 2718, 2719, 2720, 2721,

[0723] Detection: 2709,

### SEQ ID NO: 27

[0724] left Primer: 2723, 2726, 2727, 2728, 2729, 2730, 2731, 2732, 2733, 2734, 2735, 2736, 2737, 2738, 2739, 2740, 2741, 2742, 2743, 2745,

[0725] right Primer: 2722, 2744, 2746, 2747,

[0726] Blocker: 2725, 2748, 2749, 2750,

[0727] Detection: 2724,

[0728] Additional embodiments of the invention provide a method for the analysis of the methylation status of genomic DNA according to the invention (SEQ ID NOS:1 to SEQ ID NO:64, and complements thereof) without the need for pretreatment.

[0729] In the first step of such additional embodiments, the genomic DNA sample is isolated from tissue or cellular sources. Preferably, such sources include cell lines, histological slides, body fluids, or tissue embedded in paraffin. In the second step, the genomic DNA is extracted. Extraction may be by means that are standard to one skilled in the art, including but not limited to the use of detergent lysates, sonification and vortexing with glass beads. Once the nucleic acids have been extracted, the genomic double-stranded DNA is used in the analysis.

[0730] In a preferred embodiment, the DNA may be cleaved prior to the treatment, and this may be by any means standard in the state of the art, in particular with methylation-sensitive restriction endonucleases.

[0731] In the third step, the DNA is then digested with one or more methylation sensitive restriction enzymes. The digestion is carried out such that hydrolysis of the DNA at the restriction site is informative of the methylation status of a specific CpG dinucleotide.

[0732] In the fourth step, which is optional but a preferred embodiment, the restriction fragments are amplified. This is preferably carried out using a polymerase chain reaction, and said amplificates may carry suitable detectable labels as discussed above, namely fluorophore labels, radionuclides and mass labels.

[0733] In the fifth step the amplificates are detected. The detection may be by any means standard in the art, for example, but not limited to, gel electrophoresis analysis, hybridization analysis, incorporation of detectable tags within the PCR products, DNA array analysis, MALDI or ESI analysis.

[0734] Subsequent to the determination of the methylation state of the genomic nucleic acids the presence, absence or subclass of colorectal cell proliferative disorder is deduced based upon the methylation state of at least one CpG dinucleotide sequence of SEQ ID NOS:1 to SEQ ID NO:64, or an average, or a value reflecting an average methylation state of a plurality of CpG dinucleotide sequences of SEQ ID NOS:1 to SEQ ID NO:64. In an alternative embodiment the presence or absence of an aerodigestive cell proliferative disorder selected from the group consisting is deduced based upon the methylation state of at least one CpG dinucleotide sequence of SEQ ID NOS:20, 41, 35, 3, 39, 33, or an average, or a value reflecting an average methylation state of a plurality of CpG dinucleotide sequences of SEQ ID NOS:20, 41, 35, 3, 39, 33.

### Diagnostic Assays for Colorectal Cell Proliferative Disorders

[0735] The present invention enables diagnosis of events which are disadvantageous to patients or individuals in which important genetic and/or epigenetic parameters within one or more of SEQ ID NOS:1 to SEQ ID NO:64 may be used as markers. Said parameters obtained by means of the present invention may be compared to another set of genetic and/or epigenetic parameters, the differences serving as the basis for a diagnosis and/or prognosis of events which are disadvantageous to patients or individuals.

[0736] More specifically the present invention enables the screening of at-risk populations for the early detection of colorectal carcinomas. Furthermore, specific embodiments of the present invention enable the detection of aerodigestive cancers and thus are additionally suitable for this purpose. Further embodiments of the method may also be used as alternatives to cytological screening for the differentation of colorectal carcinomas from other colon cell proliferative disorders, e.g. colon polyps.

[0737] Specifically, the present invention provides for diagnostic cancer assays based on measurement of differential methylation of one or more CpG dinucleotide sequences of SEQ ID NOS:1 to SEQ ID NO:64, or of subregions thereof that comprise such a CpG dinucleotide sequence. Typically, such assays involve obtaining a tissue sample from a test tissue, performing an assay to measure the methylation status of at least one of one or more CpG dinucleotide sequences of SEQ ID NOS:1 to SEQ ID NO:64 derived from the tissue sample, relative to a control sample, or a known standard and making a diagnosis or prognosis based thereon.

[0738] In particular preferred embodiments, inventive oligomers are used to assess the CpG dinucleotide methylation status, such as those based on SEQ ID NOS:1 to SEQ ID NO:535, or arrays thereof, as well as in kits based thereon and useful for the diagnosis and/or prognosis of colorectal cell proliferative disorders.

### Kits

[0739] Moreover, an additional aspect of the present invention is a kit comprising, for example: a bisulfite-containing reagent; a set of primer oligonucleotides containing at least two oligonucleotides whose sequences in each case correspond, are complementary, or hybridize under stringent or highly stringent conditions to a 16-base long segment of the sequences SEQ ID NOs:1 to SEQ ID NO:535; oligonucleotides and/or PNA-oligomers; as well as instructions for carrying out and evaluating the described method. In a further preferred embodiment, said kit may further comprise standard reagents for performing a CpG position-specific methylation analysis, wherein said analysis comprises one or more of the following techniques: MS-SNuPE, MSP, MethyLight™, HeavyMethyl™, COBRA, and nucleic acid sequencing. However, a kit along the lines of the present invention can also contain only part of the aforementioned components.

[0740] While the present invention has been described with specificity in accordance with certain of its preferred embodiments, the following examples serve only to illustrate the invention and are not intended to limit the invention within the principles and scope of the broadest interpretations and equivalent configurations thereof.

### EXAMPLES

[0741] Samples were received either as frozen tissue or extracted genomic DNA. DNA samples were extracted using lysis buffer from Qiagen and the Roche magnetic separation kit for genomic DNA isolation. DNA samples were also extracted using Qiagen Genomic Tip-100 columns, as well as the MagnaPure device and Roche reagents. All samples were quantitated using spectrophotometric or fluorometric techniques and on agarose gels for a subset of samples.

### Bisulfite Treatment and mPCR

[0742] Total genomic DNA of all samples was bisulfite treated converting unmethylated cytosines to uracil. Methylated cytosines remained conserved. Bisulfite treatment was performed with minor modifications according to the protocol described in Olek et al. (1996). In order to avoid processing all samples with the same biological background together resulting in a potential process-bias in the data later on, the samples were randomly grouped into processing batches. For bisulfite treatment we created batches of 50 samples randomized for sex, diagnosis, and tissue. Per DNA sample two independent bisulfite reactions were performed. After bisulfitation 10 ng of each DNA sample was used in subsequent mPCR reactions containing 6-8 primer pairs.

[0743] Each reaction contained the following:

[0744] 0.4 mM each dNTPS

[0745] 1 Unit Taq Polymerase

[0746] 2.5 μl PCR buffer

[0747] 3.5 mM MgCl2

[0748] 80 nM Primerset (12-16 primers)

[0749] 11.25 ng DNA (bisulfite treated)

### Further details of the primers are shown in TABLE 1.

[0750] Forty cycles were carried out as follows: Denaturation at 95° C. for 15 min, followed by annealing at 55° C. for 45 sec., primer elongation at 65° C. for 2 min. A final elongation at 65° C. was carried out for 10 min.

### 1.1.2 Hybridization

[0751] All PCR products from each individual sample were then hybridised to glass slides carrying a pair of immobilised oligonucleotides for each CpG position under analysis. Each of these detection oligonucleotides was designed to hybridise to the bisulphite converted sequence around one CpG site which was either originally unmethylated (TG) or methylated (CG). See Table 2 for further details of all hybridisation oligonucleotides used (both informative and non-informative.) Hybridisation conditions were selected to allow the detection of the single nucleotide differences between the TG and CG variants.

[0752] 5 μl volume of each multiplex PCR product was diluted in 10×Ssarc buffer (10×Ssarc: 230 ml 20×SSC, 180 ml sodium lauroyl sarcosinate solution 20%, dilute to 1000 ml with dH2O). The reaction mixture was then hybridised to the detection oligonucleotides as follows. Denaturation at 95° C., cooling down to 10° C., hybridisation at 42° C. overnight followed by washing with 10×Ssarc and dH2O at 42° C.

[0753] Further details of the hybridisation oligonucleotides are shown in TABLE 2.

[0754] Fluorescent signals from each hybridised oligonucleotide were detected using genepix scanner and software. Ratios for the two signals (from the CG oligonucleotide and the TG oligonucleotide used to analyse each CpG position) were calculated based on comparison of intensity of the fluorescent signals.

[0755] The samples were processed in batches of 80 samples randomized for sex, diagnosis, tissue, and bisulphite batch For each bisulfite treated DNA sample 2 hybridizations were performed. This means that for each sample a total number of 4 chips were processed.

### Data Analysis Methods

### Analysis of the Chip Data:

[0756] From raw hybridization intensities to methylation ratios;

[0757] The log methylation ratio (log(CG/TG)) at each CpG position is determined according to a standardized preprocessing pipeline that includes the following steps:

[0758] For each spot the median background pixel intensity is subtracted from the median foreground pixel intensity (this gives a good estimate of background corrected hybridization intensities):

[0759] For both CG and TG detection oligonucleotides of each CpG position the background corrected median of the 4 redundant spot intensities is taken;

[0760] For each chip and each CpG position the log(CG/TG) ratio is calculated;

[0761] For each sample the median of log(CG/TG) intensities over the redundant chip repetitions is taken.

[0762] This ratio has the property that the hybridization noise has approximately constant variance over the full range of possible methylation rates (Huber et al., 2002).

### Principle Component Analysis

[0763] The principle component analysis (PCA) projects measurement vectors (e.g. chip data, methylation profiles on several CpGs etc.) onto a new coordinate system. The new coordinate axes are referred to as principal components. The first principal component spans the direction of the largest variance of the data. Subsequent components are ordered by decreasing variance and are orthogonal to each other. Different CpG positions contribute with different weights to the extension of the data cloud along different components. PCA is an unsupervised technique, i.e., it does not take into account the labels of the data points (for further details see e.g. Ripley (1996)).

[0764] PCA is typically used to project high dimensional data (in our case methylation-array data) onto lower dimensional subspaces in order to visualize or extract features with high variance from the data. In the present report we use 2 dimensional projections for statistical quality control of the data. We investigate the effect of different process parameters on the chip data and exclude that changing process parameters cause large alterations in the measurement values.

[0765] A robust version of PCA is used to detect single outlier chips and exclude them from further analysis (Model et al., 2002).

### Hypothesis Testing

[0766] The main task is to identify markers that show significant differences in the average degree of methylation between two classes. A significant difference is detected when the nullhypothesis that the average methylation of the two classes is identical can be rejected with p<0.05. Because we apply this test to a whole set of potential markers we have to correct the p-values for multiple testing. This was done by applying the False Discovery Rate (FDR) method (Dudoit et al., 2002).

[0767] For testing the null hypothesis that the methylation levels in the two classes are identical we used the likelihood ratio test for logistic regression models (Venables and Ripley, 2002). The logistic regression model for a single marker is a linear combination of methylation measurements from all CpG positions in the respective genomic region of interest (ROI). A significant p-value for a marker means that this ROI has some systematic correlation to the question of interest as given by the two classes. However, at least formally it makes no statement about the actual predictive power of the marker.

### Class Prediction by Supervised Learning

[0768] In order to give a reliable estimate of how well the CpG ensemble of a selected marker can differentiate between different tissue classes we can determine its prediction accuracy by classification. For that purpose we calculate a methylation profile based prediction function using a certain set of tissue samples with their class label. This step is called training and it exploits the prior knowledge represented by the data labels. The prediction accuracy of that function is then tested by cross-validation or on a set of independent samples. As a method of choice, we use the support vector machine (SVM) algorithm (Duda (2001), Christiannini (2000)) to learn the prediction function. If not stated otherwise, for this report the risk associated with false positive or false negative classifications are set to be equal relative to the respective class sizes. It follows that the learning algorithm obtains a class prediction function with the objective to optimize accuracy on an independent test sample set. Therefore sensitivity and specificity of the resulting classifier can be expected to be approximately equal.

### Estimating the Performance of the Tissue Class Prediction: Cross Validation

[0769] With limited sample size the cross-validation method provides an effective and reliable estimate for the prediction accuracy of a discriminator function and therefore in addition to the significance of the markers we provide cross-validation accuracy, sensitivity, and specificity estimates. For each classification task, the samples were partitioned into 5 groups of approximately equal size. Then the learning algorithm was trained on 4 of these 5 sample groups. The predictor obtained by this method was then tested on the remaining group of independent test samples. The number of correct positive and negative classifications was counted over 5 runs for the learning algorithm for all possible choices of the independent test group without using any knowledge obtained from the previous runs. This procedure was repeated on up to 10 random permutations of the sample set. Note that the above-described, cross-validation procedure evaluates accuracy, sensitivity and specificity using practically all possible combinations of training and independent test sets. It therefore gives a better estimate of the prediction performance than simply splitting the samples into one training sample set and one independent test set.

### Results

[0770] FIGS. 1, 5, 9, 13, 16, 20, 24, 28 and 32 show ranked matrices of data obtained according to Examples 1 and 2 according to CpG methylation differences between the two classes of tissues, using an algorithm. The figures are shown in greyscale, wherein the most significant CpG positions are at the bottom of the matrix with significance decreasing towards the top. Black indicates total methylation at a given CpG position, white represents no methylation at the particular position, with degrees of methylation represented in grey, from light (low proportion of methylation) to dark (high proportion of methylation). Each row represents one specific CpG position within a gene and each column shows the methylation profile for the different CpGs for one sample. On the right side p values for the individual CpG positions are shown. The p values are the probabilities that the observed distribution occurred by chance in the data set.

[0771] FIG. 96 shows a ranked matrices of data obtained according to Examples 1 and 2 according to CpG methylation differences between the two classes of tissues, (aerodigestive cancer on the left and healthy aerodigestive tissues on the right) using an algorithm. The most significant CpG positions are at the bottom of the matrix with significance decreasing towards the top. Red indicates total methylation at a given CpG position, green represents no methylation at the particular position. Each row represents one specific CpG position within a gene and each column shows the methylation profile for the different CpGs for one sample.

[0772] FIGS. 2, 6, 10, 17, 21, 25, 29 and 33 show the uncorrected multivariate LogReg test results for each comparison. Each individual genomic region of interest is represented as a point, the dotted line represents the cut off point for the 25% false discovery rate.

[0773] FIGS. 3, 7, 11, 14, 18, 22, 26, 30 and 34 show ranked matrices of data obtained according to Examples 1 and 2 of the accuracy of the genewise linear support vector machine cross validations between the two classes of tissues, for the best performing markers. The figures are shown in greyscale, wherein the most significant CpG positions are at the bottom of the matrix with significance decreasing towards the top. Black indicates total methylation at a given CpG position, white represents no methylation at the particular position, with degrees of methylation represented in grey, from light (low proportion of methylation) to dark (high proportion of methylation). Each row represents one specific CpG position within a gene and each column shows the methylation profile for the different CpGs for one sample. On the right side accuracy values for each individual genomic region of interest are shown.

[0774] FIGS. 4, 8, 12, 15, 18, 23, 27, 31 and 35 shows the accuracy of the genewise linear support vector machine cross validation for all genomic regions of each classification. The accuracy of each genomic region is represented as black squares, the specificity as unfilled diamonds, the sensitivity as unfilled squares. The accuracy as measured on the X-axis shows the fraction of correctly classified samples.

Colon Normal vs. Colorectal Cancer

[0775] In the first comparison 102 colorectal carcinoma samples were compared to 73 samples from normal colon, including colon polyps and colon inflammatory disorders.

[0776] FIG. 1 shows the multivariate test results of the top 12 performing markers using the conservative Bonferroni corrected LogReg test.

[0777] FIG. 2 shows the uncorrected multivariate LogReg test results for each comparison. Each individual genomic region of interest is represented as a point, the dotted line represents the cut off point for the 25% false discovery rate.

[0778] FIG. 3 shows the accuracy of the top 12 performing markers.

[0779] FIG. 4 shows the accuracy of the genewise linear support vector machine cross validation for all genomic regions of each classification.

[0780] The following genomic markers were evaluated as being significant:

### SEQ ID NOS:1-12, 15-20, 22, 25-36, 38-49, 51-58, and complements thereof.

[0781] Other Tissues vs. Colorectal Cancer

[0782] In this classification 73 colorectal carcinoma samples were compared to an ‘other tissue’ class consisting of 140 samples from non-colorectal carcinomas, peripheral blood lymphocytes and other normal tissues of non-colorectal origin. These markers therefore enable the detection of colorectal carcinoma cells in, for example, body fluids such as serum.

[0783] FIG. 5 shows the multivariate test results of the top 12 performing markers using the conservative Bonferroni corrected LogReg test.

[0784] FIG. 6 shows the uncorrected multivariate LogReg test results for each comparison. Each individual genomic region of interest is represented as a point, the dotted line represents the cut off point for the 25% false discovery rate.

[0785] FIG. 7 shows the accuracy of the top 12 performing markers.

[0786] FIG. 8 shows the accuracy of the genewise linear support vector machine cross validation for all genomic regions of each classification.

[0787] The following genomic markers were evaluated as being significant:

[0788] SEQ ID NOS:1-23, 26-36, 38-43, 45-49, 51-58 and complements thereof.

Colon Normal and Other Tissue vs. Colon Cancer

[0789] In this classification 73 colorectal carcinoma samples were compared to 242 colon normal and ‘other tissue’ samples. The colon normal class consisted of healthy colon, colon polyps and inflammatory disorder colon tissue samples, the ‘other tissues’ consisted of samples from non-colorectal carcinomas, peripheral blood lymphocytes and other normal tissues of non-colorectal origin.

[0790] FIG. 9 shows the multivariate test results of the top 12 performing markers using the conservative Bonferroni corrected LogReg test.

[0791] FIG. 10 shows the uncorrected multivariate LogReg test results for each comparison. Each individual genomic region of interest is represented as a point, the dotted line represents the cut off point for the 25% false discovery rate.

[0792] FIG. 11 shows the accuracy of the top 12 performing markers.

[0793] FIG. 12 shows the accuracy of the genewise linear support vector machine cross validation for all genomic regions of each classification.

[0794] The following genomic markers were evaluated as being significant:

[0795] SEQ ID NOS:1-3, 5-13, 15-23, 26-36, 38-43, 45-49, 51-58, and complements thereof.

Polyps vs. Colorectal Cancer

[0796] In this classification 73 colorectal carcinoma samples were compared to 51 colon polyp samples.

[0797] FIG. 13 shows the multivariate test results of the top performing markers using the conservative Bonferroni corrected LogReg test.

[0798] FIG. 14 shows the accuracy of the top 12 performing markers.

[0799] FIG. 15 shows the accuracy of the genewise linear support vector machine cross validation for all genomic regions of each classification.

[0800] The following genomic markers were evaluated as being significant:

[0801] SEQ ID NOS:11, 25, 27, 38, 40, 45, 53, and complements thereof.

Colon Normal vs. Colorectal Cell Proliferative Disorder

[0802] In this classification 124 colorectal cell proliferative disorder samples (consisting of colon polyps and colorectal carcinoma) were compared to 51 ‘normal colon’ samples consisting of both healthy colon samples and colon tissue of inflammatory disorders.

[0803] FIG. 16 shows the multivariate test results of the top 12 performing markers using the conservative Bonferroni corrected LogReg test.

[0804] FIG. 17 shows the uncorrected multivariate LogReg test results for each comparison. Each individual genomic region of interest is represented as a point, the dotted line represents the cut off point for the 25% false discovery rate.

[0805] FIG. 18 shows the accuracy of the top 12 performing markers.

[0806] FIG. 19 shows the accuracy of the genewise linear support vector machine cross validation for all genomic regions of each classification.

[0807] The following genomic markers were evaluated as being significant:

[0808] SEQ ID NOS:1-58, and complements thereof.

Colon Normal vs. Colorectal Cancer

[0809] In this classification 73 colorectal carcinoma samples were compared to 51 ‘normal colon’ samples consisting of both healthy colon samples and colon tissue of inflammatory disorders.

[0810] FIG. 20 shows the multivariate test results of the top 12 performing markers using the conservative Bonferroni corrected LogReg test.

[0811] FIG. 21 shows the uncorrected multivariate LogReg test results for each comparison. Each individual genomic region of interest is represented as a point, the dotted line represents the cut off point for the 25% false discovery rate.

[0812] FIG. 22 shows the accuracy of the top 12 performing markers.

[0813] FIG. 23 shows the accuracy of the genewise linear support vector machine cross validation for all genomic regions of each classification.

[0814] The following genomic markers were evaluated as being significant:

[0815] SEQ ID NOS:1-3, 5-23, 25-36, 38-49, 51-58, and complements thereof.

Colon Normal and Other Tissues vs. Colorectal Cell Proliferative Disorder

[0816] In this classification 124 colorectal cell proliferative disorder samples (consisting of colon polyps and colorectal carcinoma) were compared to a class consisting of ‘colon normal’ and ‘other tissue’ samples. The colon normal samples consisted of both healthy colon samples and colon tissue of inflammatory disorders, the ‘other tissue’ samples consisted of samples from non-colorectal carcinomas, peripheral blood lymphocytes and other normal tissues of non-colorectal origin.

[0817] FIG. 24 shows the multivariate test results of the top 12 performing markers using the conservative Bonferroni corrected LogReg test.

[0818] FIG. 25 shows the uncorrected multivariate LogReg test results for each comparison. Each individual genomic region of interest is represented as a point, the dotted line represents the cut off point for the 25% false discovery rate.

[0819] FIG. 26 shows the accuracy of the top 12 performing markers.

[0820] FIG. 27 shows the accuracy of the genewise linear support vector machine cross validation for all genomic regions of each classification.

[0821] The following genomic markers were evaluated as being significant:

[0822] SEQ ID NOS:1-36, 38-43, 45-58, and complements thereof.

Other Tissue vs. Colon Tissue

[0823] The following comparison was carried out in order to identify markers capable of discerning elevated levels of free floating colon DNA, especially in bodily fluids as a marker of tumor progression. In this classification the ‘colon tissue’ class consisted of samples from colorectal carcinoma, colon polyps, colon tissue of inflammatory disorders and healthy colon tissue. The ‘other tissue’ class consisted of samples from non-colorectal carcinomas, peripheral blood lymphocytes and other normal tissues of non-colorectal origin.

[0824] FIG. 28 shows the multivariate test results of the top 12 performing markers using the conservative Bonferroni corrected LogReg test.

[0825] FIG. 29 shows the uncorrected multivariate LogReg test results for each comparison. Each individual genomic region of interest is represented as a point, the dotted line represents the cut off point for the 25% false discovery rate.

[0826] FIG. 30 shows the accuracy of the top 12 performing markers.

[0827] FIG. 31 shows the accuracy of the genewise linear support vector machine cross validation for all genomic regions of each classification.

[0828] The following genomic markers were evaluated as being significant:

[0829] SEQ ID NOS:1-58, and complements thereof.

Normal Tissue vs. Cell Proliferative Disorder Tissue

[0830] In this classification the gene panel was assessed for its ability to accurately discriminate cell proliferative disorder samples from both colorectal carcinoma, colon polyps and non-colon origin cancers from ‘normal tissues’, namely healthy colon samples, colon tissue of inflammatory disorders, peripheral blood lymphocytes, other normal tissues of non-colorectal origin.

[0831] FIG. 32 shows the multivariate test results of the top 12 performing markers using the conservative Bonferroni corrected LogReg test.

[0832] FIG. 33 shows the uncorrected multivariate LogReg test results for each comparison. Each individual genomic region of interest is represented as a point, the dotted line represents the cut off point for the 25% false discovery rate.

[0833] FIG. 34 shows the accuracy of the top 12 performing markers.

[0834] FIG. 35 shows the accuracy of the genewise linear support vector machine cross validation for all genomic regions of each classification.

[0835] The following genomic markers were evaluated as being significant:

[0836] SEQ ID NOS:1-36, 38-43, 45-49, 51-58, and complements thereof.

Aerodigestive Cancer v. Healthy Aerodigestive Tissues

[0837] In this classification the term ‘aerodigestive’ describes a sample set of tissues consisting lung, liver, pancreas, bile duct, stomach, and colon. FIG. 96 shows a ranked matrices of data obtained according to Examples 1 and 2 according to CpG methylation differences between the two classes of tissues, (Cancerous tissues on the left of the matrix were compared to normal tissues on the right of the matrix.) using an algorithm. The most significant CpG positions are at the bottom of the matrix with significance decreasing towards the top. Red indicates total methylation at a given CpG position, green represents no methylation at the particular position. Each row represents one specific CpG position within a gene and each column shows the methylation profile for the different CpGs for one sample. The following genomic markers were considered significant SEQ ID NOS: 20, 41, 35, 3, 39 & 33.

[0838] The following examples describe the analysis of the methylation status of the genomic sequences SEQ ID NO:35, SEQ ID NO:34, SEQ ID NO:39, SEQ ID NO:29 in healthy and sick colorectal cell proliferative disorder samples. The initial link between said genes and colorectal cell proliferative disorders was initially carried by means of hybridisation analysis as described in EXAMPLE 1. The sequences were then selected from the larger set of genes analysed in said example, and the correlation between methylation status and colorectal cell proliferative disorder states was validated by analysis of samples using other methylation analysis techniques, namely the MSP-MethyLight™ and HeavyMethyl™ MethyLight™ assays. Please note that the term ‘MethyLight™’ is used to describe real time PCR analysis of bisulfite treated DNA using probes of both the Taqman™ (single probe) and Lightcycler™ (dual probe) technologies.

### Example 2

[0839] Analysis of methylation within colon cancer using an MSP-MethyLight assay (SEQ ID NO 35) DNA was extracted from 33 colon adenocarcinoma samples and 43 colon normal adjacent tissues using a Qiagen extraction kit. The DNA from each sample was treated using a bisulfite solution (hydrogen sulfite, disulfite) according to the agarose-bead method (Olek et al 1996). The treatment is such that all non methylated cytosines within the sample are converted to thymidine. Conversely, 5-methylated cytosines within the sample remain unmodified.

[0840] The methylation status was determined with a MSP-MethyLight assay designed for the CpG island of interest and a control fragment from the beta actin gene (Eads et al., 2001). The CpG island assay covers CpG sites in both the primers and the Taqman style probe, while the control gene does not. The control gene is used as a measure of total DNA concentration, and the CpG island assay (methylation assay) determines the methylation levels at that site.

[0841] Methods: The SEQ ID NO 35 gene CpG island assay was performed using the following primers and probes:

| | |
|---|---|
| Forward Primer: | |
| CGGAGGGTACGGAGATTACG; | (SEQ ID NO:14387) |
| Reverse Primer: | |
| CGACGACGCGCGAAA; | (SEQ ID NO:14388) |
| and | |
| Probe: | |
| CGAAACCCTAAATATCCCGAATAACGCCG. | (SEQ ID NO:14389) |

The corresponding control assay was performed using the following primers and probes:

| | |
|---|---|
| Primer: | |
| TGGTGATGGAGGAGGTTTAGTAAGT; | (SEQ ID NO:14390) |
| Primer: | |
| AACCAATAAAACCTACTCCTCCCTTAA; | (SEQ ID NO:14391) |
| and | |
| Probe: | |
| ACCACCACCCAACACACAATAACAAACACA | (SEQ ID NO:14392) |

The reactions were run in triplicate on each DNA sample with the following assay conditions: Reaction solution: (900 nM primers; 300 nM probe; 3.5 mM Magnesium Chloride; 1 unit of taq polymerase; 200 μM dNTPs; 7 μl of DNA, in a final reaction volume of 20 μl); Cycling conditions: (95° C. for 10 minutes; then 50 cycles of: 95° C. for 15 seconds; 60° C. for 1 minute).

[0842] The data was analysed using a PMR calculation previously described in the literature (Eads et al 2001). Results. The mean PMR for normal samples was 0.15, with a standard deviation of 0.18. The mean PMR for tumour samples was 17.98, with a standard deviation of 18.18. The overall difference in methylation levels between tumour and normal samples is significant in a t-test (p=0.00000312). The results are shown in FIG. 36. A Receiver Operating Characteristic curve (ROC curve) of the assay was also determined. A ROC is a plot of the true positive rate against the false positive rate for the different possible cutpoints of a diagnostic test. It shows the tradeoff between sensitivity and specificity depending on the selected cutpoint (any increase in sensitivity will be accompanied by a decrease in specificity). The area under an ROC curve (AUC) is a measure for the accuracy of a diagnostic test (the larger the area the better, optimum is 1, a random test would have a ROC curve lying on the diagonal with an area of 0.5; for reference: J. P. Egan. Signal Detection Theory and ROC Analysis, Academic Press, New York, 1975). The AUC for the MSP-MethylLight™-Assay is: 0.94 (FIG. 37).

### Example 3

[0843] Methylation of SEQ ID NO 35 within colon cancer was analysed using a HeavyMethyl MethyLight™ assay. The same DNA samples were also used to analyse methylation of the CpG island with a HeavyMethyl MethyLight™ (or HM MethyLight™) assay, also referred to as the HeavyMethyl™ assay. The methylation status was determined with a HM MethyLight™ assay designed for the CpG island of interest and the same control gene assay described above. The CpG island assay covers CpG sites in both the blockers and the Taqman™ style probe, while the control gene does not.

[0844] Methods. The CpG island assay (methylation assay) was performed using the following primers and probes:

| | |
|---|---|
| Forward Primer: | |
| GGTGATTGTTTATTGTTATGGTTTG | (SEQ ID NO:14393) |
| Reverse Primer: | |
| CCCCTCAACCTAAAAACTACAAC | (SEQ ID NO:14394) |
| Forward Blocker: | |
| GTTATGGTTTGTGATTTTGTGTGGG | (SEQ ID NO:14395) |
| Reverse Blocker: | |
| AAACTACAACCACTCAAATCAACCCA | (SEQ ID NO:14396) |
| Probe: | |
| AAAATTACGACGACGCCACCCGAAA | (SEQ ID NO:14397) |

The reactions were each run in triplicate on each DNA sample with the following assay conditions:

[0845] Reaction solution: (400 nM primers; 400 nM probe; 10 μM both blockers; 3.5 mM magnesium chloride; 1×ABI Taqman buffer; 1 unit of ABI TaqGold polymerase; 200 μM dNTPs; and 7 μl of DNA, in a final reaction volume of 20 μl);

[0846] Cycling conditions: (95° C. for 10 minutes); (95° C. for 15 seconds, 64° C. for 1 minute (2 cycles)); (95° C. for 15 seconds, 62° C. for 1 minute (2 cycles); (95° C. for 15 seconds, 60° C. for 1 minute (2 cycles)); and (95° C. for 15 seconds, 58° C. for 1 minute, 60° C. for 40 seconds (41 cycles)).

[0847] Results. The mean PMR for normal samples was 1.12 with a standard deviation of 1.45. The mean PMR for tumour samples was 38.23 with a standard deviation of 33.22. The overall difference in methylation levels between tumour and normal samples is significant in a t-test (p=0.000000326). The results are shown in FIG. 36.

[0848] A ROC curve of the assay was also determined. The AUC for the MSP-Methyl-Light-Assay is 0.91 (FIG. 38)

[0849] The assay was tested on an additional set of colon samples (25 adenocarcinoma, 33 normals, and 13 adenomas). The results showed a significant difference again (FIG. 39). The ROC are shown in FIG. 40-42.

[0850] The MSP and HeavyMethyl variants of the MethyLight assay were determined to be equivalent for the analysis of methylation in SEQ ID NO:35. FIG. 48 shows the regression plot of the percentage methylation detected in each sample using the two methods.

### Example 4

[0851] The SEQ ID NO:35-HeavyMethyl-MethyLight-assay was also tested against a panel of other tissues (FIG. 43). Besides the colon cancer samples only one of the two breast cancer tissues were methylated. However, on a panel of 21 additional breast tumours (different stages), only one was methylated (FIG. 44). So the marker is specific for colon tumour samples. All primers, probes, blockers and reaction conditions were identical to those used in the analysis of the colon cancer samples (Example 3).

### Example 5

[0852] Twelve of the colon tissues analysed by real-time PCR also had paired serum taken before surgery. We extracted DNA from 1 ml of that serum using a Qiagen UltraSens□ DNA extraction kit, bisulfite treated the DNA sample, and ran the SEQ ID NO:35-HeavyMethyl-MethyLight™-assay on those samples. The control gene did not amplify for three of the cancer serum samples and three of the normal serum samples, so we can conclude that the sample preparation did not work in these cases. In the other cases, there was evidence of higher methylation in the cancer samples than the normal samples (FIG. 45).

### Example 6

[0853] Analysis of methylation within colon cancer using a SEQ ID NO:34-MSP-MethyLight™ Assay. The colon cancer samples described in Example 2 were also analysed using a SEQ ID NO:34-MSP-MethyLight™ Assay with a Taqman® style probe. The sample preparation was carried out a described above (Example 1). The assay was performed using the following primers and probes:

| | |
|---|---|
| Forward Primer: | |
| TGGGATTAAGATTTTCGGTTAGTTTC | (SEQ ID NO:14398) |
| Reverse Primer: | |
| CACTACAACGCTACGCGACTAAA | (SEQ ID NO:14399) |
| Probe: | |
| TCGACGTTACCCAAACGAATCACATAAAAAAC | (SEQ ID NO:14400) |

### The corresponding control assay was performed as described above (EXAMPLE 2)

[0854] The reactions were run in triplicate on each DNA sample with the following assay conditions:

[0855] Reaction solution: (900 nM primers; 300 nM probe; 3.5 mM magnesium chloride; 1 units of taq polymerase; 200 μM dNTPs, 5 μM blocker; and 7 μl of DNA, in a final reaction volume of 20 μl);

[0856] Cycling conditions: 95° C. for 10 minutes; (95° C. for 15 seconds, 60° C. for 1 minute) 50 cycles

[0857] The data was analysed using a PMR calculation previously described in the literature (Eads et al 2001).

[0858] Results. The results are shown in FIG. 36. The mean PMR for normal samples was 3.93, with a standard deviation of 3.57. The mean PMR for tumour samples was 23.06, with a standard deviation of 20.23 The overall difference in methylation levels between tumour and normal samples is significant in a t-test (p=0.000003063). The ROC curve of the assay is shown in FIG. 46. The AUC is 0.84.

[0859] This was further confirmed using a SEQ ID NO:34-HeavyMethyl MethyLight™ assay, using dual Lightcycler™ probes.

[0860] Methods. The CpG island assay (methylation assay) was performed using the following primers and probes:

Forward Primer:

(SEQ ID NO:14401)

TGGATAGGAGTTGGGATTAAGATTTT
Reverse Primer:

(SEQ ID NO:14402)

CTTATTACAATTTAAAAAAAAAATTCACTACAA;
Blocker:

(SEQ ID NO:14403)

AAATTCACTACAACACTACACAACTAAATTCAACATTAC;
Probe:

(SEQ ID NO:14404)

TTTTCGTATTTTTTTTCGGGTTATTACGTTTT-Fluor;
Probe:

(SEQ ID NO:14405

LC640-ATGTGATTCGTTTGGGTAACGTCGA-Phos.

The reactions were each run in triplicate on each DNA sample with the following assay conditions:

[0861] Reaction conditions: 500 mM primers; 10 μM blocker; 250 nM probes; 4 mM Magnesium Chloride

[0862] Cycling profile: 95° C. denaturation for 10 minutes; 50 cycles: 95° C. 10 seconds, 57° C. 30 seconds, 72° C. 20 seconds

### Example 7

[0863] Analysis of methylation within colon cancer using a SEQ ID NO:29-MSP-MethyLight™ Assay. The colon cancer samples described in Example 2 were also analysed using a SEQ ID NO:29-MSP-MethyLight™ Assay with a Taqman® style probe. The sample preparation was carried out as described above (Example 2). The assay was performed using the following primers and probes:

| | |
|---|---|
| Forward Primer: | |
| TTTTTTTTTCGGACGTCGTTG | (SEQ ID NO:14406) |
| Reverse Primer: | |
| CCTCTACATACGCCGCGAAT | (SEQ ID NO:14407) |
| Probe: | |
| AATTACCGAAAACATCGACCGA | (SEQ ID NO:14408) |

The reactions were run in triplicate on each DNA sample with the following assay conditions:

[0864] Reaction solution: (900 nM primers; 300 nM probe; 3.5 mM magnesium chloride; 1 units of taq polymerase; 200 μM dNTPs, 5 μM blocker; and 7 μl of DNA, in a final reaction volume of 20 μl);

[0865] Cycling conditions: 95° C. for 10 minutes; (95° C. for 15 seconds, 60° C. for 1 minute) 50 cycles

[0866] The corresponding control assay was performed as described above (EXAMPLE 2).

[0867] The data was analysed using a PMR calculation previously described in the literature (Eads et al 2001).

[0868] Results. The results are shown in FIG. 36. The mean PMR for normal samples was 3.04, with a standard deviation of 4.21. The mean PMR for tumour samples was 21.38, with a standard deviation of 24.08 The overall difference in methylation levels between tumour and normal samples is significant in a t-test (p=0.0000101973). The ROC curve of the assay is shown in FIG. 47. The AUC is 0.80.

[0869] This was further confirmed using a SEQ ID NO:29-HeavyMethyl MethyLight™ assay (using dual labeled Lightcycler™ probes.

[0870] Methods. The CpG island assay (methylation assay) was performed using the following primers and probes:

| | |
|---|---|
| Forward Primer: | |
| GTAGGGTTATTGTTTGGGTTAATAAAT | (SEQ ID NO:14409) |
| Reverse Primer: | |
| TAAAAAAAAAAAAAAAACTCCTCTACATAC | (SEQ ID NO:14410) |
| Blocker: | |
| AACTCCTCTACATACACCACAAATAAATT | (SEQ ID NO:14411) |
| Probe: | |
| CGAAAACATCGACCGAACAACG-Fluor | (SEQ ID NO:14412) |
| Probe: | |
| LC640-GTCCGAAAAAAAAAAAACGAACTCC- | (SEQ ID NO:14413) |
| Phos | |

The reactions were each run in triplicate on each DNA sample with the following assay conditions:

[0871] Reaction conditions: Forward primer: 600 nM; Reverse primer: 30 nM; Blocker: 10 μM; Probes: 500 nM; Taq polymerase: 0.1 U/μl; dNTPs: 0.2 mM each; Magnesium Chloride: 4 mM: BSA: 0.25 mg/ml; Roche buffer with no MgCl₂: 1×

[0872] Cycling conditions: 95° C. denaturation for 10 minutes; 50 cycles: 95° C. for 10 seconds, 57° C. for 25 seconds, 72° C. for 10 seconds

### Example 8

[0873] Analysis of methylation within colon cancer using a SEQ ID NO:29-MSP-MethyLight™ Assay. An additional assay for SEQ ID NO:29 was tested on colon samples. The assay was tested on two sets of tissues, each with 12 colon a denocarcinomas and 12 normal adjacent tissue samples.

[0874] The sample preparation was carried out as described above (Example 2). The assay was performed using the following primers and probes:

| | |
|---|---|
| Forward Primer: | |
| GGACGTTTTTTATCGAAGGCG | (SEQ ID NO:14414) |
| Reverse Primer: | |
| GCCACCCAACCGCGA | (SEQ ID NO:14415) |
| Probe: | |
| ACCCGAAATCACGCGCGAAAAA | (SEQ ID NO:14416) |

[0875] The reactions were run in triplicate on each DNA sample with the following assay conditions:

[0876] Reaction solution: (900 nM primers; 300 nM probe; 3.5 mM magnesium chloride; 1 units of taq polymerase; 200 μM dNTPs, 5 μM blocker; and 7 μl of DNA, in a final reaction volume of 20 μl);

[0877] Cycling conditions: 95° C. for 10 minutes; (95° C. for 15 seconds, 60° C. for 1 minute) 50 cycles. The corresponding control assay was performed as described above (Example 2)

[0878] The data was analysed using a PMR calculation previously described in the literature (Eads et al 2001). In both cases, SEQ ID NO:29 was significantly more methylated in the cancer samples. The ROC curves of the assays are shown in FIGS. 49 and 50. The AUC are 0.93 and 1.

### Example 9

### Analysis of Methylation Within Colon Cancer Using a SEQ ID NO:39-MSP-MethyLight™ Assay

[0879] The colon cancer samples described in Example 2 were also analysed using a SEQ ID NO:39-MSP-MethyLight™ Assay. The sample preparation was carried out as described above (EXAMPLE 2). The assay was performed using the following primers and probes:

| | |
|---|---|
| Forward Primer: | |
| GACGGATTTTTTTTTAACGTTTTTTC | (SEQ ID NO:14417) |
| Reverse Primer: | |
| AAATAAAATACCACCTCCGCGA | (SEQ ID NO:14418) |
| Probe: | |
| GCTCCTCGCGAAATACTCACCCCG | (SEQ ID NO:14419) |

[0880] The reactions were run in triplicate on each DNA sample with the following assay conditions:

[0881] Reaction solution: (900 nM primers; 300 nM probe; 3.5 mM magnesium chloride; 1 units of taq polymerase; 200 μM dNTPs, 5 μM blocker; and 7 μl of DNA, in a final reaction volume of 2001);

[0882] Cycling conditions: 95° C. for 10 minutes; (95° C. for 15 seconds, 60° C. for 1 minute) 50 cycles.

[0883] The corresponding control assay was performed as described above (EXAMPLE 2).

[0884] The data was analysed using a PMR calculation previously described in the literature (Eads et al 2001).

[0885] Results. The results are shown in FIG. 36. The mean PMR for normal samples was 2.25, with a standard deviation of 2.42. The mean PMR for tumour samples was 25.67, with a standard deviation of 17.57 The overall difference in methylation levels between tumour and normal samples is significant in a t-test (p=0.00000000118). The ROC curve of the assay is shown in FIG. 52. The AUC is 0.94

[0886] This was further confirmed using a SEQ ID NO:39-HeavyMethyl MethyLight™ assay, using dual Lightcycler probes using Lightcycler style dual probe technology.

[0887] Methods. The CpG island assay (methylation assay) was performed using the following primers and probes:

Forward Primer:

(SEQ ID NO:14420)

GTTAGTTAGTTAATTTTTTAAATAGATTAGTAG
Reverse Primer:

(SEQ ID NO:14421)

CAAAAAAACAAATAAAATACCACCTCC
Blocker:

(SEQ ID NO:14422)

CCTCCACAAAACTCACTCCTCACAAAATAC
Probe: red640

(SEQ ID NO:14423)

TTTCGTTTTGTATGGTAGATACGGGGTGA-phosphate
Probe:

(SEQ ID NO:14424)

ATTAATGGTTTTATAAGACGGATTTTTTTTTAACGT-fluorescine

[0888] The reactions were each run in triplicate on each DNA sample with the following assay conditions:

[0889] Reaction conditions: Forward primer: 600 nM; Reverse primer: 300 nM; Blocker: 10 μM; Probes: 500 nM; Taq polymerase: 0.1 U/μl; dNTPs: 0.2 mM each; Magnesium Chloride: 4 mM; BSA: 0.25 mg/ml; Roche buffer with no MgCl₂: 1×

[0890] Cycling conditions: 95° C. denaturation for 10 minutes; 50 cycles: 95° C. for 10 seconds, 57° C. for 25 seconds, 72° C. for 10 seconds.

### Experiment 10: Stool Analysis of Methylation Markers

[0891] The following experiments were run in order to establish the feasibility of methylation markers (for the detection of colon cell proliferative disorders) from DNA derived from stool samples. Accordingly, a series of samples were prepared each comprising either stool only (control) or stool with the addition of a controlled amount of cells from the colon cancer cell line SW 620 (25,000 cell equivalent −0.15 ug) the prepared samples were then frozen. Three different stool samples were used. As a positive control a further sample was prepared comprising peripheral blood lymphocytes (PBLs) and a controlled amount of cells from the colon cancer cell line.

[0892] The samples were as follows:

### Class 1: Stool sample No. 1

### Class 2: Stool sample No. 1+0.15 ug

### Class 3: Stool sample No. 2

### Class 4: Stool sample No. 2+0.15 ug

### Class 5: Stool sample No. 3

### Class 6: Stool sample No. 3+0.15 ug

### Class 7. PBS+25,000 cell equivalents (0.15 ug)

### Class 8: H₂O

[0893] Multiple samples were prepared in each class. 300 ng of stool DNA was present in each sample. Each sample was then analysed for methylation using an MSP TaqMan assay for the gene EPHB65 as follows:

| | |
|---|---|
| Primer Forward: | |
| TTTTTTTTTCGGACGTCGTTG | (SEQ ID NO:14455) |
| Primer Reverse: | |
| CCTCTACATACGCCGCGAAT | (SEQ ID NO:14456) |
| Probe: | |
| AATTACCGAAAACATCGACCGA | (SEQ ID NO:14457) |

Cycling conditions were: The reaction conditions for TaqMan:

| | | | |
|---|---|---|---|
| Initial denaturation | 95° C. | 10 | min |
| Denaturation | 95° C. | 15 | sec |
| Annealing/Extension | 60° C. | 60 | sec |

### 50 Cycles

[0894] Amplification curves of the PCR reaction were according to FIGS. 52 to 58.

### Class 1: FIG. 52

### Class 2: FIG. 53

### Class 3: FIG. 54

### Class 4: FIG. 55

### Class 5: FIG. 56

### Class 6: Not applicable (see below)

### Class 7: FIG. 57

### Class 8: FIG. 58

[0895] The X-axis shows the cycle number of the polymerase chain reaction, the Y-axis shows the delta Rn, which is the fluorescence intensity over background, the horizontal line (A) represents the threshold level of the calibration curve (B), if the curve reaches above (A) methylation has been detected.

[0896] As can be seen, methylated colon cancer DNA could be detected in classes 2 & 5. Class 6 was not analysed as methylated DNA was detected in the stool sample (class 5).

[0897] In order to determine the absolute sensitivity of methylated DNA detection in stool samples stool sample No. 2 was spiked with varying amounts of SW 620 DNA. Five classes of samples were analysed using the MSP assays above:

[0898] Class B: 25,000 cell equivalents in 250 mg stool

[0899] Class C: 2,500 cell equivalents in 250 mg stool

[0900] Class D: 250 cell equivalents in 250 mg stool

[0901] Class E: 25 cell equivalents in 250 mg stool

[0902] Class F: 0 cell equivalents in 250 mg stool

[0903] The amplification curves can be seen in FIG. 59. The X-axis shows the cycle number of the polymerase chain reaction, the Y-axis shows the delta Rn, which is the fluorescence intensity over background, the horizontal line (A) represents the threshold level of the calibration curves (B-F), if the curves reach above (A) methylation has been detected. Curves B, C, D; E; & F are the amplification curves of classes B, C, D, E & F respectively. Thus it can be seen that methylated DNA can be detected in stool samples at levels of 25 cells per 250 mg stool.

### Example 11

### Real Time Analysis of Methylation Sensitive Restriction

[0904] DNA was prepared from ten colon tumor samples and ten normal adjacent tissue samples. DNA isolation was performed using standard methods known to the expert and quantified by UV measurement.

[0905] A digestion reaction was performed with the following reagents:

1 μg genomic DNA;

### 25 U enzyme (10 U/μl);

### Y+/Tango Buffer

### By incubation 37° C.

[0906] The following steps were performed for all samples in parallel. 1 μg of DNA was dissolved in 190 μl Y+/Tango Buffer (Fermentas) in 0.2 ml PCR tubes. 95 μl of the reaction solution (half of the overall volume) was pipetted into a clean PCR tube as a control. To the remaining reagent in the first tube 1.25 μl HpaII and 1.25 μl Hin6I restriction endunuclease (both from Fermentas) were added.

[0907] To the second tube 2.5 μl of a mixture of glycerol and water (v:v=1:1) was added. After incubating all 40 tubes at 37° C. in an Eppendorff Thermocycler for five hours. Then another aliquot of restriction enzyme, resp. water-glycerol mix, was added to each tube and the incubation was extended for ten hours. After this period of time the restriction enzymes were inactivated by heating at 65° C. for 10 minutes.

[0908] Subsequently, dilutions of each tube were assembled in 96well plates by transferring 20 μl from each tube into the plates and adding 80 μl water.

[0909] Finally, both the restriction product and the control of each sample were analyzed by Quantitative Real Time PCR. In this example 12 μl of a SybrGreen containing PCR mastermix containing one of the primers according to table 4 was pipetted into a 96well Taqman plate followed by 8 μl of the corresponding dilutions of restricted sample and blank (each in duplicate).

[0910] Real Time PCR was performed on a ABI 7700 instrument applying the following temperature profile: 15 minutes at 95° C.; 50 cycles of: 15 seconds at 95° C., 45 seconds at 65° C., 75 seconds at 72° C.; 15 seconds at 95° C. followed by 50° C. for one hour.

[0911] Using the described primers and conditions amplification is observed only for methylated copies of the analysed sequences (according to table 4) when methylation sensitive restriction has been performed prior to PCR, since unmethylated copies are digested during this step. The amount of methylated DNA after restriction is normalized against the total amount of DNA present before the restriction as obtained by Real Time quantitation of the blank of the same sample. The equation

ΔCt=Ct_{blank}−Ct_{restricted} 1

represents a measure for the relative amount of unmethylated DNA present in a DNA sample. A value of zero means that the DNA is completely methylated. A value of 0.5 corresponds to approximately 50% methylation in case of an optimised PCR reactions whereas larger values correspond to low methylation levels. The relative amount of methylated sequence present in a sample would be given by

M=E^{-ΔCt} (2)

[0912] where E is the PCR efficiency. The PCR efficiency is easily obtained by methods known to the expert.

TABLE 4

| | | | Results |
|---|---|---|---|
| Gene | Forward primer | Reverse Primer | Figure |
| SEQ ID | GACGGGGGTTCTGGACTTAC | CCAGTCCCTGGATGTTGCT | 60 |
| NO: 8 | (SEQ ID NO:14458) | (SEQ ID NO:14459) | |
| SEQ ID | GCTAAGCCGGAGTCACCAAG | CGCTGAGACCGAGAAGAAG | 61 |
| NO: 5 | (SEQ ID NO:14460) | (SEQ ID NO:14461) | |
| SEQ ID | GCCGACGAGACCAAGGAG | ATGAGCAGCGTGAAGACGA | 62 |
| NO: 10 | (SEQ ID NO:14462) | (SEQ ID NO:14463) | |
| SEQ ID | CGTGCCATCCCAAGAGTTT | ATGACCCTGGCTTTGGTGT | 63 |
| NO: 62 | (SEQ ID NO:14464) | (SEQ ID NO:14465) | |
| SEQ ID | CGCAGTAAGAGGCGACAAC | AAGGGGTCTACGGGCACT | 64 |
| NO: 12 | (SEQ ID NO:14466) | (SEQ ID NO:14467) | |
| SEQ ID | TCTGGAAGGAGGACGTGAA | AAGGGGTCTACGGGCACT | 65 |
| NO: 11 | (SEQ ID NO:14468) | (SEQ ID NO:14469) | |
| SEQ ID | GTTGAAGTCGCCCAGGAAC | AGTGGGGCACCGACGTAA | 66 |
| NO: 61 | (SEQ ID NO:14470) | (SEQ ID NO:14471) | |
| SEQ ID | CCATTTTACTTGGGGTGTGG | CTGGAGCTGTCAGGAGAAAAG | 67 |
| NO: 46 | (SEQ ID NO:14472) | (SEQ ID NO:14473) | |
| SEQ ID | GTCGCCCCCTACCCTTCT | CCCAAGACCTTAACCCAAGTC | 68 |
| NO: 64 | (SEQ ID NO:14474) | (SEQ ID NO:14475) | |
| SEQ ID | CTCCAAACGCGATACCCTCT | GTGACTCCTCCCCTTCCTTC | 69 |
| NO: 63 | (SEQ ID NO:14476) | (SEQ ID NO:14477) | |
| SEQ ID | GCCTTAACTGCTGGGGTCTT | GATGGAGATGGCTGAAGTGG | 70 |
| NO: 20 | (SEQ ID NO:14478) | (SEQ ID NO:14479) | |
| SEQ ID | GTCCATCGGTTTCGTCTCC | CCACCGTGTAGAAGTTGTCGT | 71 |
| NO: 45 | (SEQ ID NO:14480) | (SEQ ID NO:14481) | |

[0913] Results are shown in FIGS. 60-71. Each individual sample is annotated on the x-axis as ‘n’ denoting normal, or ‘t’ denoting tumour. A bronchial tissue sample was accidentally analysed in some assays, these are annotated with an arrow, and are irrelevant in the context of the present invention. The Y-axis shows the level of methylation (‘methylation rate’) in the sample. The methylation rate {methylated/(methylated+unmethylated) are shown for the fragments corresponding to the primer pairs in Table 4. Formula (2) above was used for the calculation assuming a PCR efficiency of E=2.

[0914] The data demonstrate that for several fragments the majority of the tumor samples show significantly higher methylation rates than the corresponding normal adjacent tissues.

### Example 12

### mRNA Expression Analysis

### 1. RNA Samples

[0915] Total RNA from normal colon (n=1) and colon cancer (adenocarcinoma; n=1) was obtained from Ambion (Huntingdon, United Kingdom). Each RNA sample was derived from a single donor. Total cellular RNA was prepared using the ToTALLY RNA Kit (Ambion, Huntingdon, United Kingdom) and Dnase-treatment was performed to minimize contamination. RNA integrity was assessed before and after 14 hours incubation at 37° C. on an Agilent Bioanalyzer (Agilent Technologies, Inc, Palo Alto, Calif.).

### 2. Microarray Experiments

[0916] Target preparation and labeling, microarray hybridization, washing, and scanning was performed according to the manufacturer's protocol (Affymetrix, Inc., Santa Clara, Calif.). Briefly, 10 μg of total RNA were reverse transcribed using a T7-linked oligo-dT primer, followed by second strand synthesis. Biotin-labeled cRNA targets were prepared from double stranded cDNA using T7 RNA polymerase and biotinylated ribonucleotides (UTP, CTP). Fragmentation was performed at 94° C. for 35 minutes. 15 μg of the fragmented biotinylated cRNA were mixed with MES buffer (2-(N-Morpholino)ethanesulfonic acid) containing 0.5 mg/ml acetylated bovine serum albumin and hybridised to Affymetrix GeneChip HG_U133A arrays (Santa Clara, Calif.) for 16 hours at 45° C. Microarrays were stained using streptavidin phycoerythrin conjugates (Molecular Probes, Inc., Eugene, Oreg.). For signal amplification biotinylated anti-streptavidin antibodies (Vector Laboratories, Burlingame, Calif.) were used.

[0917] Arrays were scanned on an Affymetrix GeneChip Scanner. The expression values for each probe set (representing a gene) were calculated from the raw data using Bioconductor R packages (http://www.bioconductor.org, see below).

### 3. Data Analysis

[0918] The raw expression data obtained from the Affymetrix scanner (the so called cel-files) were background corrected and normalized using the default settings of the RMA normalization procedure (Irizarry R A, Hobbs B, Collin F, Beazer-Barclay Y D, Antonellis K J, Scherf U, Speed T P: Exploration, normalization, and summaries of high density oligonucleotide array probe level data. Biostatistics. 2003 April; 4(2):249-64) as implemented in the Bioconductor R packages, release 1.4 (Gautier L, Cope L, Bolstad B M, Irizarry R A: affy—analysis of Affymetrix GeneChip data at the probe level. Bioinformatics. 2004 Feb. 12; 20(3):307-150). The raw data processing results in signal intensity values for each of the 22.293 probe sets available on the Affymetrix GeneChip HG_U133A chip.

[0919] To identify differentially expressed probe sets, the fold change of the normalized signal intensities between colon normal tissue and colon tumour tissue was calculated. Genes with a fold change bigger than 2 (or smaller than 0.5) were identified as differentially expressed. Differentially expressed genes are shown in Table 5, as can be seen hypermethylation does not correlate with underexpression in all cases.

TABLE 5

| | Gene | | | |
|---|---|---|---|---|
| | SEQ | | | |
| Affymetrix | ID | log-fold | fold- | up/down in |
| Probe ID | NO: | change | change | cancer |
| 208944_at | 37 | −1.0 | 2.0 | down |
| 209945_s_at | 27 | 1.2 | 2.3 | up |
| 214211_at | 54 | −1.3 | 2.5 | down |
| 203140_at | 16 | −1.8 | 3.4 | down |
| SEQ ID | 15 | −1.4 | 2.6 | down |
| NO: | | | | |
| 3497_at | | | | |

### Example 13

### TPEF(TMEFF2) Methylation Analysis in Serum Samples

[0920] In the following example 3 different sample sets of serum from colorectal cancer patients and healthy colon individuals were analysed using MSP assay ‘4’ and HM assay ‘6’ of the gene TMEFF2. Healthy colon was defined as being verified by colonoscopy as having no colon malignancy or polyps present. The assays were run on the LightCycler platform (Roche Diagnostics), using two different versions of the instrument for comparative purposes, namely versions ‘1.2’ and ‘2.0’. They are referred to below as ‘LC 1.2’ and ‘LC 2.0’ respectively.

### Sample Sets

### Sample Set One:

[0921] 30 colorectal cancers, 30 colonoscopy verified as no colon malignancy or polyps

### Sample Set Two:

[0922] 15 colorectal cancers, 15 colonoscopy verified as no colon malignancy or polyps

### Sample Set Three:

[0923] 30 colorectal cancers, 30 colonoscopy verified as no colon malignancy or polyps In each case approximately 1.8 mls of serum equivalent was analysed per PCR.

### Reaction Conditions

[0924] Assay ‘4’ was performed as below.

Forward primer: agggcgttttgttggcg (SEQ ID NO:14482)

### Reverse Primer: ctacaacctaaacgacgcgct (SEQ ID NO:14483)

### Taqman Probe: atcggcgttttagcgtgcggg (FAM/BHQ1 labelled) (SEQ ID NO: 14484)

### Lightcycler Program:

| | | |
|---|---|---|
| activation: | 95° 10 mins | |
| 3 cycles | 95° 15 secs (20°/sec) | |
| | 66° 45 secs (20°/sec) | detection |
| 3 cycles | 95° 15 secs (20°/sec) | |
| | 64° 45 secs (20°/sec) | detection |
| 50 cycles | 95° 15 secs (20°/sec) | |
| | 62° 45 secs (20°/sec) | detection |

### Results

### Assay ‘4’

### Sample Set One:

### AUC=0.95 [0.86, 0.99] (95% confidence intervals) LC 2.0

### Sample Set Two:

### AUC=0.65 [0.44, 0.80] LC 2.0

### AUC=0.57 [0.37, 0.75] LC 1.2

### Sample Set Three:

### AUC=0.83 [0.71, 0.92] LC 2.0

### AUC=0.83 [0.71, 0.92] LC 1.2

### Assay ‘6’

| | |
|---|---|
| Forward primer: | |
| aaaaaaaaaaaactcctctacatac | (SEQ ID NO:14485) |
| Reverse Primer: | |
| ggttattgtttgggttaataaatg | (SEQ ID NO:14486) |
| Blocker oligonucleotide: | |
| acatacaccacaaataaattaccaaaaacatc | (SEQ ID NO:14487) |
| aaccaa-pho | |
| Probes: | |
| ttttttttttcggacgtcgtt-fluo | (SEQ ID NO:14488) |
| and | |
| red640-tcggtcgatgttttcggtaa-pho | (SEQ ID NO:14489) |

LightCycler 1.2
program:

| | | | | | |
|---|---|---|---|---|---|
| activation: | 95° C. | 10 | min | | |
| 55 cycles: | 95° C. | 10 | sec | (20° C./s) | |
| | 56° C. | 30 | sec | (20° C./s) | detection |
| | 72° C. | 10 | sec | (20° C./s) | |

### Sample Set Two:

[0927] AUC=0.70 [0.51, 0.85] LC 2.0

### Sample Set Three:

[0928] AUC=0.69 [0.55, 0.80] LC 2.0

[0929] AUC=0.71 [0.53, 0.83] LC 1.2 (Some samples were lost, approximately 20 cancer serum samples, 20 healthy colon serum samples were analysed)

### Example 14

### MSP Analysis of the Genes According to Table 6 (Below)

[0930] In the following analysis the methylation status of a selection of the genes according to Table 3 were analysed by means of methylation specific amplification using the primers according to Table 6 (below).

[0931] The study was run on approximately 140 samples from colon, breast and liver carcinoma, normal tissue (peripheral blood lymphocytes, healthy colon and healthy tissue adjacent to colon carcinoma), colon polyps and other colon diseases. The positive class consisted of Colon Cancer and Colon polyps. The negative class was PBL (peripheral blood lymphocytes), Colon-Normal, Colon-NAT and Colon-Inflammatory. For AUC values in brackets (see table 7, below) Breast-Cancer and Liver-Cancer were also included in the negative class.

[0932] Genomic DNA was analyzed using the MSP technique after bisulfite conversion. Total genomic DNA of all samples was bisulfite treated converting unmethylated cytosines to uracil. Methylated cytosines remained conserved. Bisulfite treatment was performed with minor modifications according to the protocol described in Olek et al. (1996).

[0933] The sequence of interest was then amplified by means of methylation specific primers, the amplificate is then detected by means of methylation specific Taqman probes.

TABLE 6
Oligonucleotides for MSP Taqman.

| | | | | | |
|---|---|---|---|---|---|
| Assay | Gene/Genomic | Forward primer | | Reverse primer | Amplification |
| number | location | sequence | Probe | sequence | curve |

| | | | | | |
|---|---|---|---|---|---|
| 1 | Transcription | Acggcgttttgg | cgacttaataac | gtcatctaacaa | FIG. 72 |
| | factor BTF3 | ttcgt | gacgtacgcgaa | cgacctaactaacg | |
| | Homolog 1 | | ccc | | |
| 2 | RING FINGER | ctctaaaccgcg | cgcgtttgttcg | gggatgagaggtt | FIG. 73 |
| | PROTEIN 4 | aaaactccg | ggtttcggg | gttgacgttc | |
| 3 | TUMOR NECROSIS | agggcgttttgt | atcggcgtttta | ctacaacctaaac | FIG. 74 |
| | FACTOR RECEPTOR | tggcg | gcgtgcggg | gacgcgct | |
| | SUPERFAMILY | | | | |
| | MEMBER 16 | | | | |
| | PRECURSOR | | | | |
| 4 | Region of | gaggtttcggtt | acgtcacaaaaa | ctttactacaacg | FIG. 75 |
| | chromosome | cgaggttc | aaaaacccacgt | aaaacgccg | |
| | 14q31.1 | | aataataacgaa | | |
| 5 | Chondroitin | gattaaaaaatt | cgcggagtagag | tccgcttcgaaa | FIG. 76 |
| | sulfate pro- | tgtttttattcg | taggcgggcg | acctcga | |
| | teoglycan 2 | gtcg | | | |
| | (versican) | | | | |
| | (CPSG2) | | | | |
| 6 | EYA 4 | caaaatccgtcg | tcgggttggggt | acgtagttatag | FIG. 77 |
| | | acgataaaac | tcgtattcgg | gttttgatagtt | |
| | | | | ttaggga | |
| 7 | MOTHERS | gaacgcgaaaaa | tttcgtttttat | tttcgggattgt | FIG. 78 |
| | AGAINST DE- | attaacatctg | cgtggtgggtat | tgttggtgttt | |
| | CAPENTAPLEGIC | | gttcgtgttta | | |
| | HOMOLOG 7 | | | | |
| | (SMAD 7) | | | | |
| 8 | ENDOPLASMIN | catcaatatcct | taggtttagtcg | gagatggggaat | FIG. 79 |
| | PRECURSOR (94 | aatcataaccta | cgcgttcgcga | tttttgacgtc | |
| | KDA GLUCOSE- | ctatctatcg | | | |
| | REGULATED PROTEIN) | | | | |
| | (GRP94) (GP96 | | | | |
| | HOMOLOG) (TUMOR | | | | |
| | REJECTION | | | | |
| | ANTIGEN 1) | | | | |
| 9 | Region of | cttaaaataata | cgaaaaacgatc | tttgcggaaaga | FIG. 80 |
| | chromosome | acgcgaaatata | gaaatcccgact | cgtcgtt | |
| | 6q25.1 | acgct | ttc | | |
| 10 | B-CELL LYMPHOMA 6 | ccaaaaatacgc | ctaaaccactaa | cgttttttcgta | FIG. 81 |
| | PROTEIN (BCL-6) | gaccacg | tattcgacgtaa | ttcggaaagac | |
| | (ZINC FINGER PRO- | | ttctccgtatt | | |
| | TEIN 51) (LAZ-3 | | tac | | |
| | PROTEIN) (BCL-5) | | | | |
| 11 | HOMEOBOX PROTEIN | tacgtgtgaggg | ccaatcgaaact | ccaataaaaatt | FIG. 82 |
| | ARISTALESS-LIKE 4 | gttcgc | atccaaatacga | cgtaaaaaaaaa | |
| | | | taaccga | cg | |
| 12 | TRANSMEMBRANE | cggttagtcgga | cgaacgaaacaa | ccaaaataacca | FIG. 83 |
| | PROTEIN WITH EGF- | ggcgc | cctaaacgaaaa | atcgacccg | |
| | LIKE AND TWO | | ccccg | | |
| | FOLLISTATIN-LIKE | | | | |
| | DOMAINS 2 | | | | |
| 13 | Hypothetical | gggattaagatt | caaacgaatcac | aacgctacgcga | FIG. 84 |
| | protein-leucine | ttcggttagttt | ataaaaaacgta | ctaaattcga | |
| | rich repeat | cg | ataacccgaa | | |
| 14 | Candidate tumor | gggttagggtgg | cgtcggcgtggg | gactcccgcccc | FIG. 85 |
| | suppressor 8p22 | gtcgc | cgatgtc | aacg | |
| 15 | VESICULAR INHIB- | cggagggtacgg | cgaaaccctaaa | cgacgacgcgcg | FIG. 86 |
| | ITORY AMINO ACID | agattacg | tatcccgaataa | aaa | |
| | TRANSPORTER (GABA | | cgccg | | |
| | AND GLYCINE TRANS- | | | | |
| | PORTER) (VESICULAR | | | | |
| | GABA TRANSPORTER) | | | | |
| | (HVIAAT) | | | | |

[0934] Reaction Conditions for Taqman PCR Program:

### Denaturation at 95° C. for 10 minutes.

[0935] 50 cycles: Denaturation at 95° C. for 15 seconds.
[0936] Annealing at 62° C. for 1 minute. Except Assay15, which has an annealing temp of 60° C.

### Amplification curves for each assay are shown in FIGS. 72 to 86 (according to Table 6).

### The Technical Performance of a Series of Alternative Assays was Validated by Testing Each of the Following Using Sperm DNA as the Template:

### Gene SEQ ID NO: 34 (MSP Assay)

| | |
|---|---|
| Primers: | |
| cgtacgaacgcaacaaccg | (SEQ ID NO:14535) |
| & | |
| gttcggcgttgtttaggc | (SEQ ID NO:14536) |
| Probes: | |
| gcatcttccaacaccgtcccg | (SEQ ID NO:14537) |
| -fluo & | |
| LC640-ctccgcatccttccccgaa-p | (SEQ ID NO:14538) |
| (Lightcycler probes) | |

### Lightcycler Program:

| | | |
|---|---|---|
| | 95° 10 mins | |
| 55 cycles | 95° 15 secs (20°/sec) | |
| | 62° 45 secs (20°/sec) | detection |
| | 72° 15 secs (20°/sec) | |

### Gene SEQ ID NO: 28 (MSP Assay)

| | |
|---|---|
| Primers: | |
| ccgaacaaacgtaatacgcg | (SEQ ID NO: 14539) |
| & | |
| acggcgtgaaggagcg | (SEQ ID NO: 14540) |
| Probes: | |
| tacgcgcggtagtcgtgcgc | (SEQ ID NO: 14541) |
| (Taqman probe FAM/BHQ1 labelled) | |

### Lightcycler Program:

[0940] 95°10 mins
[0941] 55 cycles 95°15 secs (20°/sec)
[0942] 60°45 secs (20°/sec) detection

### Gene SEQ ID NO: 10 (MSP Assay)

| | |
|---|---|
| Primers: | |
| cgacaaaatcctcatcgcg | (SEQ ID NO: 14542) |
| & | |
| gtcgtttagcgttgggaagc | (SEQ ID NO: 14543) |
| Probes: | |
| tacgtacgagtttcgtacgcgtattatttcgt | (SEQ ID NO: 14544) |
| cg | |
| (Taqman probe FAM/BHQ1 labelled) | |

### Lightcycler Program:

| | | |
|---|---|---|
| | 95° 10 mins | |
| 55 cycles | 95° 15 secs (20°/sec) | |
| | 62° 45 secs (20°/sec) | detection |

### Gene SEQ ID NO: 9 (MSP Assay)

| | |
|---|---|
| Primers: | |
| acttaaaaatcgccgaatcg | (SEQ ID NO: 14545) |
| & | |
| agttttatagttaattagggtagttgtcgtcg | (SEQ ID NO: 14546) |
| Probes: | |
| tcctatcatcgctcacgaacg | (SEQ ID NO: 14547) |
| fluo & LC640- | |
| cgacaacgactatccttactattataa-p | (SEQ ID NO: 14548) |
| (Lightcycler probes) | |

### LC Program:

| | | |
|---|---|---|
| | 95° 10 mins | |
| 55 cycles | 95° 15 secs (20°/sec) | |
| | 60° 30 secs (20°/sec) | detection |
| | 72° 15 secs (20°/sec) | |

### Gene SEQ ID NO: 17 (HeavyMethyl™ Assay)

| | | | |
|---|---|---|---|
| primer: | | | |
| Ggtgttgtttattttagagagtt | | | |
| (SEQ ID NO: 14549) | | | |
| Cctaacccctatccttc | | | |
| (SEQ ID NO: 14550) | | | |
| blocker: | | | |
| ccttcaccaccttcccaacactacaa | | | |
| cac-pho | | | |
| (SEQ ID NO: 14551) | | | |
| probes: | | | |
| tcggcgtcggtcgttagg-fluo | | | |
| (SEQ ID NO: 14552) | | | |
| red640-cgcgggagtagttagatgc | | | |
| gtc-pho | | | |
| (SEQ ID NO: 14553) | | | |
| LightCycler program: | | | |
| activation: | 95° C. | 10 min | |
| 55 cycles | 95° C. | 10 sec | (20° C./s) |
| | 56° C. | 30 sec | (20° C./s) |
| | 72° C. | 10 sec | (20° C./s) |
| melting curve: | 95° C. | 10 sec | 20 |
| | 40° C. | 10 sec | 20 |
| | 70° C. | 0 sec | 0,1 |
| cooling: | 40° C. | 5 sec | |

### Gene SEQ ID NO: 7 (HeavyMethyl™ Assay)

| | | | | |
|---|---|---|---|---|
| Primer: | | | | |
| Tgagagagagagggttgaaa | | | | |
| (SEQ ID NO: 14554) | | | | |
| Tctaaataacaaaatacctccatt | | | | |
| (SEQ ID NO: 14555) | | | | |
| probes: | | | | |
| CGaccCGccaacCGac-fluo | | | | |
| (SEQ ID NO: 14556) | | | | |
| LCred640-CGcCGaaaCGCGctc-p | | | | |
| (SEQ ID NO: 14557) | | | | |
| blocker: | | | | |
| ccattaccaacacaacccaccaaccaa-p | | | | |
| (SEQ ID NO: 14558) | | | | |
| LightCycler program: | | | | |
| activation: | 95° C. | 10 min | | |
| 55 cycles: | 95° C. | 10 sec | (20° C./s) | |
| | 56° C. | 30 sec | (20° C./s) | detection |
| | 72° C. | 10 sec | (20° C./s) | |
| melting curve: | 95° C. | 10 sec | 20 | |
| | 40° C. | 10 sec | 20 | |
| | 70° C. | 0 sec | 0,1 | |
| cooling: | 40° C. | 5 sec | | |

### Gene SEQ ID NO: 8 (HeavyMethyl™ Assays)

| | | | | |
|---|---|---|---|---|
| primer: | | | | |
| Aaaaaaaaaaaactcctctacatac | | | | |
| (SEQ ID NO: 14559) | | | | |
| Ggttattgtttgggttaataaatg | | | | |
| (SEQ ID NO: 14560) | | | | |
| blocker: | | | | |
| acatacaccacaaataaattaccaaaaacatcaaccaa-pho | | | | |
| (SEQ ID NO: 14561) | | | | |
| probes: | | | | |
| ttttttttttcggacgtcgtt-fluo | | | | |
| (SEQ ID NO: 14562) | | | | |
| red640-tcggtcgatgttttcggtaa-pho | | | | |
| (SEQ ID NO: 14563) | | | | |
| LightCycler program: | | | | |
| activation: | 95° C. | 10 min | | |
| 55 cycles: | 95° C. | 10 sec | (20° C./s) | |
| | 56° C. | 30 sec | (20° C./s) | detection |
| | 72° C. | 10 sec | (20° C./s) | |
| melting curve: | 95° C. | 10 sec | 20 | |
| | 40° C. | 10 sec | 20 | |
| | 70° C. | 0 sec | 0,1 | |
| cooling: | 40° C. | 5 sec | | |
| primer: | | | | |
| Aaaaaaaaaaaactcctctacatac | | | | |
| (SEQ ID NO: 14564) | | | | |
| Ggttattgtttgggttaataaatg | | | | |
| (SEQ ID NO: 14565) | | | | |
| blocker: | | | | |
| ctctacataCAcCACAaataaattacCAaaaacatC-p | | | | |
| (SEQ ID NO: 14566) | | | | |
| probes: | | | | |
| CGCGaataaattacCGaaaacatc-fluo | | | | |
| (SEQ ID NO: 14567) | | | | |
| LCred640-accgaacaacgacgtcc-p | | | | |
| (SEQ ID NO: 14568) | | | | |
| LightCycler program: | | | | |
| activation: | 95° C. | 10 min | | |
| 55 cycles: | 95° C. | 10 sec | (20° C./s) | |
| | 56° C. | 30 sec | (20° C./s) | detection |
| | 72° C. | 10 sec | (20° C./s) | |
| melting curve: | 95° C. | 10 sec | 20 | |
| | 40° C. | 10 sec | 20 | |
| | 70° C. | 0 sec | 0,1 | |
| cooling: | 40° C. | 5 sec | | |
| primer: | | | | |
| gaggtgttagaggagtagtag | | | | |
| (SEQ ID NO: 14569) | | | | |
| Tccccctacaacctaaa | | | | |
| (SEQ ID NO: 14570) | | | | |
| blocker: | | | | |
| Acctaaacaacacactcccacacactaaaacaccaat | | | | |
| (SEQ ID NO: 14571) | | | | |
| probes: | | | | |
| Cgagtcggcgcggga-fluo | | | | |
| (SEQ ID NO: 14572) | | | | |
| Lcred640-agggcgttttgttggcgatc-p | | | | |
| (SEQ ID NO: 14573) | | | | |
| LightCycler program: | | | | |
| activation: | 95° C. | 10 min | | |
| 55 cycles: | 95° C. | 10 sec | (20° C./s) | |
| | 58° C. | 30 sec | (20° C./s) | detection |
| | 72° C. | 10 sec | (20° C./s) | |
| melting curve: | 95° C. | 10 sec | 20 | |
| | 40° C. | 10 sec | 20 | |
| | 70° C. | 0 sec | 0,1 | |
| cooling: | 40° C. | 5 sec | | |

### Gene SEQ ID NO: 9 (HeavyMethyl™ Assays)

| | | | | |
|---|---|---|---|---|
| Primer: | | | | |
| ctatccatatacctaactaattaataac | | | | |
| (SEQ ID NO: 14574) | | | | |
| gtaaagtttttaatttttattagtattagtat | | | | |
| (SEQ ID NO: 14575) | | | | |
| Blocker | | | | |
| ctaattaataacacttaaaacacaattataaacaccacca | | | | |
| tac-pho | | | | |
| (SEQ ID NO: 14576) | | | | |
| Probe: | | | | |
| Red640-atttagttaaagtttatgtcgattatagttacg | | | | |
| ttagttt-pho | | | | |
| (SEQ ID NO: 14577) | | | | |
| gtgaacggtttcgtcgggag-fluo | | | | |
| (SEQ ID NO: 14578) | | | | |
| LightCycler program: | | | | |
| activation: | 95° C. | 10 min | | |
| 55 cycles: | 95° C. | 10 sec | (20° C./s) | |
| | 56° C. | 30 sec | (20° C./s) | detection |
| | 72° C. | 10 sec | (20° C./s) | |
| melting curve: | 95° C. | 10 sec | 20 | |
| | 40° C. | 10 sec | 20 | |
| | 70° C. | 0 sec | 0,1 | |
| cooling: | 40° C. | 5 sec | | |
| Primer: | | | | |
| gttttattgtatgatgaattgga | | | | |
| (SEQ ID NO: 14579) | | | | |
| caccaaaaaaatattaaccac | | | | |
| (SEQ ID NO: 14580) | | | | |
| Blocker: | | | | |
| Ttaaccacaacacaaataaaaccaaacaaattatccata- | | | | |
| pho | | | | |
| (SEQ ID NO: 14581) | | | | |
| Probe: | | | | |
| Gttttttcgcgttcgtcgtttatttt-fluo | | | | |
| (SEQ ID NO: 14582) | | | | |
| Red640-ttgggtcgacgagattaaggagg-pho | | | | |
| (SEQ ID NO: 14583) | | | | |
| LightCycler program: | | | | |
| activation: | 95° C. | 10 min | | |
| 55 cycles: | 95° C. | 10 sec | (20° C./s) | |
| | 56° C. | 30 sec | (20° C./s) | detection |
| | 72° C. | 10 sec | (20° C./s) | |
| melting curve: | 95° C. | 10 sec | 20 | |
| | 40° C. | 10 sec | 20 | |
| | 70° C. | 0 sec | 0,1 | |
| cooling: | 40° C. | 5 sec | | |

### Gene SEQ ID NO: 5 (HeavyMethyl™ Assay)

| | | | | |
|---|---|---|---|---|
| primer: | | | | |
| Gagaggtttattaaggtaggg | | | | |
| (SEQ ID NO: 14584) | | | | |
| Ctactaccaaaaataaaaaattattaac | | | | |
| (SEQ ID NO: 14585) | | | | |
| blocker: | | | | |
| Aaaattattaacatccaacacatttatccaaacttcaaa | | | | |
| (SEQ ID NO: 14586) | | | | |
| probes: | | | | |
| gtttaggggtttgtagagaagttcga-fluo | | | | |
| (SEQ ID NO: 14587) | | | | |
| red640-tcggataaacgcgtcgg-pho | | | | |
| (SEQ ID NO: 14588) | | | | |
| LightCycler program: | | | | |
| activation: | 95° C. | 10 min | | |
| 55 cycles: | 95° C. | 10 sec | (20° C./s) | |
| | 56° C. | 30 sec | (20° C./s) | detection |
| | 72° C. | 10 sec | (20° C./s) | |
| melting curve: | 95° C. | 10 sec | 20 | |
| | 40° C. | 10 sec | 20 | |
| | 70° C. | 0 sec | 0,1 | |
| cooling: | 40° C. | 5 sec | | |

### Gene 6480 (HeavyMethyl™ Assay)

| | | | | |
|---|---|---|---|---|
| Primer: | | | | |
| gagttgagagaatttttaaatttt | | | | |
| (SEQ ID NO: 14589) | | | | |
| Tcttctaaaacaaaaaacacc | | | | |
| (SEQ ID NO: 14590) | | | | |
| Blocker: | | | | |
| Caccactacaatccaaacaacccaaa-pho | | | | |
| (SEQ ID NO: 14591) | | | | |
| Probes: | | | | |
| Ggacgtcgagcgttgggtat-fluo | | | | |
| (SEQ ID NO: 14592) | | | | |
| Red640aggacgcgtagttggacggt-pho | | | | |
| (SEQ ID NO: 14593) | | | | |
| LightCycler program: | | | | |
| activation: | 95° C. | 10 min | | |
| 55 cycles: | 95° C. | 10 sec | (20° C./s) | |
| | 56° C. | 30 sec | (20° C./s) | detection |
| | 72° C. | 10 sec | (20° C./s) | |
| melting curve: | 95° C. | 10 sec | 20 | |
| | 40° C. | 10 sec | 20 | |
| | 70° C. | 0 sec | 0,1 | |
| cooling: | 40° C. | 5 sec | | |

### Gene SEQ ID NO: 28 (HeavyMethyl™ Assay)

| Primer: | | | |
|---|---|---|---|
| Gaaggaagggaaagtttt | | | |
| (SEQ ID NO: 14594) | | | |
| Taaaaaaaacactaccctac | | | |
| (SEQ ID NO: 14595) | | | |
| Blocker: | | | |
| ctaccacaataaaaacccaaaacactccttcacacca-p | | | |
| (SEQ ID NO: 14596) | | | |
| Probe | | | |
| acccgaaacgctccttcacg-fluo | | | |
| (SEQ ID NO: 14597) | | | |
| red640-cgtaaacaaacgaaacgacgactacg-Pho | | | |
| (SEQ ID NO: 14598) | | | |
| LC program Roche: | | | |
| denat at 95° C. | | | |
| 95° C. | 10 min | | |
| 55 cycles: | | | |
| denat at 95° C. | 10 sec | (20° C./s) | |
| annealing 56° C. | 30 sec | (20° C./s) | detection |
| extension 72° C. | 10 sec | (20° C./s) | |
| melting | | | |
| 95° C. | 10 sec | 20 | |
| 35° C. | 20 sec | 20 | |
| 95° C. | 0 sec | 0,1 | |

### Gene SEQ ID NO: 1 (HeavyMethyl™ Assay)

| | | | | |
|---|---|---|---|---|
| oligos: | | | | |
| Primer: | | | | |
| Cacaaactatctataaaaaattaatctc | | | | |
| (SEQ ID NO: 14599) | | | | |
| Gattgttgttggtgtttgttatt | | | | |
| (SEQ ID NO: 14600) | | | | |
| Blocker: | | | | |
| ctcaaacacaaaaaaattaacatctcatctcttaaacca | | | | |
| ctttcaat-pho | | | | |
| (SEQ ID NO: 14601) | | | | |
| Probes: | | | | |
| TCgTCTCTTAAACCgCTTTCgA-fluo | | | | |
| (SEQ ID NO: 14602) | | | | |
| Red640-CCTCAAAATAAACACgAACATACCC-pho | | | | |
| (SEQ ID NO: 14603) | | | | |
| LightCycler program: | | | | |
| activation: | 95° C. | 10 min | | |
| 55 cycles: | 95° C. | 10 sec | (20° C./s) | |
| | 56° C. | 30 sec | (20° C./s) | detection |
| | 72° C. | 10 sec | (20° C./s) | |
| melting curve: | 95° C. | 10 sec | 20 | |
| | 40° C. | 10 sec | 20 | |
| | 70° C. | 0 sec | 0,1 | |
| cooling: | 40° C. | 5 sec | | |

### Gene SEQ ID NO: 34 (HeavyMethyl™ Assay)

| | | | | |
|---|---|---|---|---|
| Primer: | | | | |
| Atacaaaatacaaaaataccttct | | | | |
| (SEQ ID NO: 14604) | | | | |
| Atttggttttattttggttatg | | | | |
| (SEQ ID NO: 14605) | | | | |
| Blocker: | | | | |
| accttctcacaaatcaactaaaacacacacaacacc-pho | | | | |
| (SEQ ID NO: 14606) | | | | |
| Probes: | | | | |
| LCRed640-tggatttagggcgtcgcg-pho | | | | |
| (SEQ ID NO: 14607) | | | | |
| cgttcgtttattaagcggcga-fluo | | | | |
| (SEQ ID NO: 14608) | | | | |
| LightCycler program: | | | | |
| activation: | 95° C. | 10 min | | |
| 55 cycles: | 95° C. | 10 sec | (20° C./s) | |
| | 56° C. | 30 sec | (20° C./s) | detection |
| | 72° C. | 10 sec | (20° C./s) | |
| melting curve: | 95° C. | 10 sec | 20 | |
| | 40° C. | 10 sec | 20 | |
| | 70° C. | 0 sec | 0,1 | |
| cooling: | 40° C. | 5 sec | | |

### Results

### Sensitivity and Specificity Were Computed with SVM and 10 Fold Cross Validation

TABLE 7

| Gene/Genomic | | | |
|---|---|---|---|
| location | AUC | Sensitivity | Specificity |
| Transcription | 0.57 | 0.15 | 0.99 |
| factor BTF3 Homolog 1 | (0.56) | | |
| RING FINGER PROTEIN 4 | 0.54 | 0.91 | 0.09 |
| | (0.55) | | |
| TUMOR NECROSIS | 0.82 | 0.74 | 0.90 |
| FACTOR RECEPTOR | (0.82) | | |
| SUPERFAMILY MEMBER | | | |
| 16 PRECURSOR | | | |
| Region of | 0.83 | 0.69 | 0.94 |
| chromosome 14q31.1 | (0.84) | | |
| Chondroitin sulfate | 0.92 | 0.83 | 0.96 |
| proteoglycan 2 | (0.88) | | |
| (versican) (CPSG2) | | | |
| EYA 4 | 0.83 | 0.71 | 0.94 |
| | (0.84) | | |
| MOTHERS AGAINST | 0.54 | 0.25 | 0.91 |
| DECAPENTAPLEGIC | (0.52) | | |
| HOMOLOG 7 (SMAD 7) | | | |
| ENDOPLASMIN | 0.6 | 0.11 | 0.99 |
| PRECURSOR (94 KDA | (0.6) | | |
| GLUCOSE-REGULATED | | | |
| PROTEIN) (GRP94) | | | |
| (GP96 HOMOLOG) | | | |
| (TUMOR REJECTION | | | |
| ANTIGEN 1) | | | |
| Region of | 0.59 | 0.1 | 0.99 |
| chromosome 6q25.1 | (0.57) | | |
| B-CELL LYMPHOMA 6 | 0.62 | 0.11 | 0.98 |
| PROTEIN (BCL-6) | (0.62) | | |
| (ZINC FINGER | | | |
| PROTEIN 51) (LAZ-3 | | | |
| PROTEIN) (BCL-5) | | | |
| HOMEOBOX PROTEIN | 0.78 | 0.74 | 0.95 |
| ARISTALESS-LIKE 4 | (0.75) | | |
| TRANSMEMBRANE | 0.88 | 0.84 | 0.94 |
| PROTEIN WITH EGF- | (0.88) | | |
| LIKE AND TWO | | | |
| FOLLISTATIN-LIKE | | | |
| DOMAINS 2 | | | |
| Hypothetical | 0.73 | 0.79 | 0.38 |
| protein-leucine | (0.72) | | |
| rich repeat | | | |
| Candidate tumor | 0.79 | 0.64 | 0.76 |
| suppressor 8p22 | (0.84) | | |
| VESICULAR | 0.77 | 0.78 | 0.44 |
| INHIBITORY AMINO | (0.77) | | |
| ACID TRANSPORTER | | | |
| (GABA AND GLYCINE | | | |
| TRANSPORTER) | | | |
| (VESICULAR GABA | | | |
| TRANSPORTER) | | | |
| (HVIAAT) | | | |

### Sensitivity and specificity of multiple gene (panel) assays.

### Panel: Assay 9, Assay 12

### Sensitivity: 0.88421052631579

### Specificity: 0.972972972972973

### Panel: Assay 11, Assay 12

### Sensitivity: 0.88421052631579

### Specificity: 0.97027027027027

### Panel: Assay 12, Assay 15

### Sensitivity: 0.9

### Specificity: 0.95

### Panel: Assay 6, Assay 7

### Sensitivity: 0.87

### Specificity: 0.973333333333333

### Panel: Assay 5, Assay 11

### Sensitivity: 0.894736842105263

### Specificity: 0.941333333333333

### Panel: Assay 5, Assay 7

### Sensitivity: 0.894736842105263

### Specificity: 0.938666666666667

### Panel: Assay 4, Assay 6

### Sensitivity: 0.857894736842105

### Specificity: 0.971428571428571

### Panel: Assay 7, Assay 12

### Sensitivity: 0.905263 SEQ ID NO: 94737

### Specificity: 0.921621621621622

### Panel: Assay 6, Assay 12

### Sensitivity: 0.842105263 SEQ ID NO: 95

### Specificity: 0.978378378378378

### Panel: Assay 5, Assay 9

### Sensitivity: 0.842105263 SEQ ID NO: 95

### Specificity: 0.973333333333333

### Panel: Assay 3, Assay 15

### Sensitivity: 0.857142857142857

### Specificity: 0.953424657534247

### Panel: Assay 1, Assay 12

### Sensitivity: 0.842105263 SEQ ID NO: 95

### Specificity: 0.967567567567568

### Panel: Assay 5, Assay 15

### Sensitivity: 0.857142857142857

### Specificity: 0.945205479452055

### Panel: SEQ ID NO: 17.2, Assay 5

### Sensitivity: 0.81764705882353

### Specificity: 0.966233766233766

### Panel: Assay 3, Assay 12

### Sensitivity: 0.8

### Specificity: 0.983783783783784

### Panel: Assay 6, Assay 11

### Sensitivity: 0.83 SEQ ID NO: 947368421

### Specificity: 0.952

### Panel: Assay 5, Assay 12

### Sensitivity: 0.8105263 SEQ ID NO: 9474

### Specificity: 0.972972972972973

### Panel: Assay 3, Assay 11

### Sensitivity: 0.83 SEQ ID NO: 947368421

### Specificity: 0.949333333333333

### Panel: Assay 3, Assay 5

### Sensitivity: 0.823529411764706

### Specificity: 0.955844155844156

### Panel: Assay 3, SEQ ID NO: 17.2

### Sensitivity: 0.8

### Specificity: 0.974025974025974

### Class Prediction by Supervised Learning

[0957] In order to give a reliable estimate of how well the CpG ensemble of a selected marker set can differentiate between different tissue classes we determined its prediction accuracy by classification. For that purpose we calculated a methylation profile based prediction function. This step is called training and it exploits the prior knowledge represented by the data labels. The prediction accuracy of that function is then tested by cross-validation or on a set of independent samples. As a method of choice, we used the support vector machine (SVM) algorithm (Duda (2001), Christiannini (2000)) to learn the prediction function. If not stated otherwise, for this report the risk associated with false positive or false negative classifications are set to be equal relative to the respective class sizes. It follows that the learning algorithm obtains a class prediction function with the objective to optimize accuracy on an independent test sample set. Therefore sensitivity and specificity of the resulting classifier can be expected to be approximately equal. FIGS. 87 to 95 show the performance of quadratic SVMs trained on the full data set using the following assays.

### FIG. 87: Assays 12 and 9

### FIG. 88: Assays 12 and 11

### FIG. 89: Assays 12 and 15

### FIG. 90: Assays 7 and 6

### FIG. 91: Assays 11 and 5

### FIG. 92: Assays 7 and 5

### FIG. 93: Assays 6 and 4

### FIG. 94: Assays 12 and 7

### FIG. 95: Assays 12 and 6

### Example 15

### HeavyMethyl Analysis

[0958] In the following, methylation of the genes/genomic sequences according to Gene SEQ ID Nos: 7, 8 & 17 was analysed in 15 colorectal cancer samples (referred to as ‘colon’ in Table 7), and eight peripheral blood lymphocyte samples referred to as ‘PBL’ in Table 7).

[0959] Total genomic DNA of all samples was bisulfite treated converting unmethylated cytosines to uracil. Methylated cytosines remained conserved. Bisulfite treatment was performed with minor modifications according to the protocol described in Olek et al. (1996).

[0960] The sequence of interest was then amplified by means of primers specific for bisulfite treated DNA and a blocking oligonucleotide (in order to suppress amplification of non-methylated DNA). The 3′OH terminus of the blocking oligonucleotide was “capped” by a phosphate group to prevent polymerase from extending the primer during PCR reaction. The amplificate is then detected by means of methylation specific LightCycler™ probes, wherein one probe was labelled with 5′red640 and had a capped 3′OH terminus and the other was labelled with 3′Fluorescein.

| | |
|---|---|
| Genomic SEQ ID NO:8 | |
| Primers: | |
| aaaaaaaaaaaactcctctacatac | (SEQ ID NO: 14609) |
| & | |
| ggttattgtttgggttaataaatg | (SEQ ID NO: 14610) |
| Blocking oligonucleotide: | |
| acatacaccacaaataaattaccaaaaac | (SEQ ID NO: 14611 + |
| atcaaccaa | 14612) |
| Probes: | |
| ttttttttttcggacgtcgtt | (SEQ ID NO: 14613) |
| (Fluorescein) | |
| & | |
| tcggtcgatgttttcggtaa (red640) | (SEQ ID NO: 14614) |
| Genomic SEQ ID NO:7 | |
| Primers: | |
| ggtttgggatggttgt | (SEQ ID NO: 14615) |
| & | |
| tctaaataacaaaatacctccatt | (SEQ ID NO: 14616) |
| Blocking oligonucleotides: | |
| ccattaccaacacaacccaccaaccaa | (SEQ ID NO: 14617) |
| Probes: | |
| ggtcgcggtgagagagagag | (SEQ ID NO: 14618) |
| (Fluorescein) | |
| & | |
| tgaaattagagcgcgtttcgg (red640) | (SEQ ID NO: 14619) |
| Genomic SEQ ID NO: 17 | |
| Primers: | |
| ggtgttgtttattttagagagtt | (SEQ ID NO: 14620) |
| & | |
| cctaacccctatccttc | (SEQ ID NO: 14621) |
| Blocking oligonucleotides: | |
| ccttcaccaccttcccaacactacaacac | (SEQ ID NO: 14622) |
| Probes: | |
| tggggtttcggcgaagtaa | (SEQ ID NO: 14623) |
| (Fluorescein) | |
| & | |
| tttttcggcgtcggtcgt (red640) | (SEQ ID NO: 14624) |

[0961] The reactions were performed in a total volume of 20 μl using a LightCycler device (Roche Diagnostics). The real time PCR reaction mix contained 10 μl of template DNA, 2 μl of FastStart LightCycler reaction mix for hybridization probes (Roche Diagnostics, Penzberg),

TABLE 7:
Results of HeavyMethyl assays

| | | | | | Calculated |
|---|---|---|---|---|---|
| | | | | | Concentration |
| | | | | | DNA |
| | | | | | undiluted |
| | Crossing points | | Crossing points | | (pg/10 μl) |
| | Genomic SEQ ID | Genomic SEQ ID | Genomic SEQ ID NO: 4 | Genomic SEQ ID NO: 4 | |
| Tissue | NO: 3 | NO: 12 | (undiluted) | (diluted) | |
| Colon | 36.73 | 38.22 | 39.58 | | 5.855 |
| Colon | 33.1 | >51 | | | 386.9 |
| Colon | 39.8 | 42.84 | | | 57.5 |
| Colon | 39.74 | 38.75 | 32.54 | 33.89 | 482.6 |
| Colon | | >51 | | | 132.55 |
| Colon | | 38.82 | | | 29.955 |
| Colon | 32.08 | 33.9 | 33.43 | 35.43 | 816 |
| Colon | 37.03 | 36.91 | | | 284.35 |
| Colon | 38.07 | 46.54 | | | 0 |
| Colon | 35.22 | 37.81 | 36.8 | 37.03 | 298.35 |
| Colon | 33.66 | 36.19 | 33.23 | 34.01 | 1355 |
| Colon | 36.78 | 37.46 | 40.71 | | 879 |
| Colon | | 37.23 | | | 57.5 |
| Colon | | | | | 1669 |
| Colon | 34.88 | 34.71 | 34.21 | 34.49 | 880.5 |
| PBL | | | | | 716.5 |
| PBL | | | | | 796 |
| PBL | | | | | 584.5 |
| PBL | 38.55 | | | | 1813 |
| PBL | | | | | 5470 |
| PBL | | 49.04 | | | 761 |
| PBL | | | | | 625 |
| PBL | | 39.75 | | | 9835 |
| M 100 pg | 36.34 | 37.29 | 34.95 | 34.51 | 583.5 |
| M 100 pg | 36.06 | 37.86 | 34.64 | 34.09 | 428.3 |

| | |
|---|---|
| uMRoche 100 ng | 34.48 |
| uMPhi 100 ng | |
| water | |

### Bold type figures indicate those classified as positive because the amplification curves were flat.

### Example 15

### Serum Analysis of the Genes According to SEQ ID Nos: 7, 30, 28 & 8

[0962] The assays as described above in example 13 (MSP) & 14 (HeavyMethyl) were then applied to a set of serum samples consisting 32 colorectal carcinoma serum samples, and compared to a set consisting of 54 normal serum samples, 11 serum samples from benign colon lesions and 6 serum samples from inflammatory colon disease. 130 ul of serum was used per assay and the results were quantitatively reported as positive or negative.

TABLE 6

| Marker or | | |
|---|---|---|
| combination of | | |
| markers | Sensitivity | Specificity |
| SEQ ID NO: 8 | 25 | 92.9 |
| (HeavyMethyl) | | |
| SEQ ID NO: 8 (MSP) | 40.6 | 94.3 |
| SEQ ID NO: 30 (MSP) | 21.9 | 97.1 |
| SEQ ID NO: 28 (MSP) | 37.5 | 77.6 |
| SEQ ID NO: 7 (MSP) | 15.6 | 98.3 |
| SEQ ID NO: 8, 8 & 30 | 50 | 95.7 |
| SEQ ID NO: 8, 30 & | 59.4 | 78.9 |
| 28 | | |

### Further Tables

TABLE 1

| | | Amplifi- |
|---|---|---|
| | | cate |
| Gene: | Primer: | Length: |
| (SEQ ID NO: 16) | TTGGAGTTAAAGTATTTGGTAAGA | 442 |
| | (SEQ ID NO: 536) | |
| | AAAACCACCTTCAAACCC | |
| | (SEQ ID NO: 537) | |
| (SEQ ID NO: 4) | ATCCTCCACACTCTTCCTCTAT | 140 |
| | (SEQ ID NO: 538) | |
| | GAAATTAGGTTTGGTTTTGTTT | |
| | (SEQ ID NO: 539) | |
| (SEQ ID NO: 4) | GAGATTTTGGGAGGGGTAG | 486 |
| | (SEQ ID NO: 540) | |
| | AACTCTATCCTTTTCCCTCTTC | |
| | (SEQ ID NO: 541) | |
| (SEQ ID NO: 56) | TGTTGGTTGTTGTTGTTGTT | 319 |
| | (SEQ ID NO: 542) | |
| | CTTTCTACCCATCCCAAAA | |
| | (SEQ ID NO: 543) | |
| (SEQ ID NO: 27) | TAAGTGATAAAGGAAGGAAGGA | 243 |
| | (SEQ ID NO: 544) | |
| | CCTTCAAACCCCAAACAA | |
| | (SEQ ID NO: 545) | |
| (SEQ ID NO: 31) | TTGTTGTTTTTAGGGGTTTTGG | 947 |
| | (SEQ ID NO: 546) | |
| | TCCTTCCCATTCTCCAAATATC | |
| | (SEQ ID NO: 547) | |
| (SEQ ID NO: 32) | TCAACTACCATCAACTTCCTTA | 491 |
| | (SEQ ID NO: 548) | |
| | AATTTATTTTTAGTGTTGTAGTGGG | |
| | (SEQ ID NO: 549) | |
| (SEQ ID NO: 33) | GAAAGGAGAGGTTAAAGGTTG | 696 |
| | (SEQ ID NO: 550) | |
| | AACTCACTTAACTCCAATCCC | |
| | (SEQ ID NO: 551) | |
| (SEQ ID NO: 34) | GGATAGGAGTTGGGATTAAGAT | 414 |
| | (SEQ ID NO: 552) | |
| | AAATCTTTTTCAACACCAAAAT | |
| | (SEQ ID NO: 553) | |
| (SEQ ID NO: 24) | TCCAATAAACACAAACCTAAATC | 471 |
| | (SEQ ID NO: 554) | |
| | ATATGGGATTGATGGAAGATAG | |
| | (SEQ ID NO: 555) | |
| (SEQ ID NO: 35) | GGAAGAGGTGATTAAATGGAT | 226 |
| | (SEQ ID NO: 556) | |
| | CCCAAAAATCAAACAACAA | |
| | (SEQ ID NO: 557) | |
| (SEQ ID NO: 57) | ATTTGGGAAAGAGGGAAAG | 300 |
| | (SEQ ID NO: 558) | |
| | TAAAAACTCTAAACCCCATCC | |
| | (SEQ ID NO: 559) | |
| (SEQ ID NO: 25) | CCCTACCCACCAATATACC | 278 |
| | (SEQ ID NO: 560) | |
| | AGATTTGGGGAAGAAGTTGTA | |
| | (SEQ ID NO: 561) | |
| (SEQ ID NO: 36) | TAAAAGAAGGATTTTTGATTGG | 528 |
| | (SEQ ID NO: 562) | |
| | CATCTTATTTACCTCCCTCCC | |
| | (SEQ ID NO: 563) | |
| (SEQ ID NO: 28) | TTTTAGATTGAGGTTTTAGGGT | 497 |
| | (SEQ ID NO: 564) | |
| | ATCCATTCTACCTCCTTTTTCT | |
| | (SEQ ID NO: 565) | |
| (SEQ ID NO: 37) | GTAATTTGAAGAAAGTTGAGGG | 296 |
| | (SEQ ID NO: 566) | |
| | CCAACAACTAAACAAAACCTCT | |
| | (SEQ ID NO: 567) | |
| (SEQ ID NO: 26) | AGTAAATAGTGGGTGAGTTATGAA | 607 |
| | (SEQ ID NO: 568) | |
| | GAAAAACCTCTAAAAACTACTCTCC | |
| | (SEQ ID NO: 569) | |
| (SEQ ID NO: 38) | GTTAGTATGTTTGGGGGTAAAT | 435 |
| | (SEQ ID NO: 570) | |
| | ATAAATAACACCTTCCACCCTA | |
| | (SEQ ID NO: 571) | |
| (SEQ ID NO: 39) | TTTGTATTAGGTTGGAAGTGGT | 286 |
| | (SEQ ID NO: 572) | |
| | CCCAAATAAATCAACAACAACA | |
| | (SEQ ID NO: 573) | |
| (SEQ ID NO: 29) | TTGTTTGGGTTAATAAATGGA | 295 |
| | (SEQ ID NO: 574) | |
| | CTTCTCTCTTCTCCCCTCTC | |
| | (SEQ ID NO: 575) | |
| (SEQ ID NO: 40) | AATATAGGGAGGTTTAGGGTTT | 424 |
| | (SEQ ID NO: 576) | |
| | TAACCATACATTTCTCATCCAA | |
| | (SEQ ID NO: 577) | |
| (SEQ ID NO: 41) | TTTTGGGGAATATAGGGTTT | 425 |
| | (SEQ ID NO: 578) | |
| | TTCTCACATTTCTAACCACTTCT | |
| | (SEQ ID NO: 579) | |
| (SEQ ID NO: 5) | CTCCTCCTTCCAACAAAAA | 487 |
| | (SEQ ID NO: 580) | |
| | GTTTAGAGGTTTTGGGATGATT | |
| | (SEQ ID NO: 581) | |
| (SEQ ID NO: 5) | TGAATAGGGTGATATTTTAGTTAGG | 497 |
| | (SEQ ID NO: 582) | |
| | ATAAATCATCCCAAAACCTCTA | |
| | (SEQ ID NO: 583) | |
| (SEQ ID NO: 6) | ATTTGGTTATTGGTTGAAGGTA | 361 |
| | (SEQ ID NO: 584) | |
| | AATTTTTAATTTCTCAACACCTCT | |
| | (SEQ ID NO: 585) | |
| (SEQ ID NO: 6) | GAAGAGGTGTTGAGAAATTAAAA | 462 |
| | (SEQ ID NO: 586) | |
| | CCCACCCTAACTTACCATAAA | |
| | (SEQ ID NO: 587) | |
| (SEQ ID NO: 8) | CAATTCCCCTTATTTCTCTAAA | 339 |
| | (SEQ ID NO: 588) | |
| | AATTAGTTATGGTGTTGTGGGA | |
| | (SEQ ID NO: 589) | |
| (SEQ ID NO: 8) | TTCTATTAAAACCCAACTCCTC | 395 |
| | (SEQ ID NO: 590) | |
| | ATAAGGGGAATTGTTGTAGGTT | |
| | (SEQ ID NO: 591) | |
| (SEQ ID NO: 42) | TACCATTCTTTCCTAAACATCC | 148 |
| | (SEQ ID NO: 592) | |
| | GGGTTGGTGGAGAGGTAG | |
| | (SEQ ID NO: 593) | |
| (SEQ ID NO: 14) | GAAGATGAGAGGAGGTTGAGA | 500 |
| | (SEQ ID NO: 594) | |
| | CCACACCACCTACTACAAAAT | |
| | (SEQ ID NO: 595) | |
| (SEQ ID NO: 15) | AACAAACCTCCTCCAAATTC | 365 |
| | (SEQ ID NO: 596) | |
| | TGTTGGTAGGTATTGGTGATT | |
| | (SEQ ID NO: 597) | |
| (SEQ ID NO: 15) | TCCCCACTTAAAATAAACAAAT | 375 |
| | (SEQ ID NO: 598) | |
| | GTGAATTTGGAGGAGGTTT | |
| | (SEQ ID NO: 599) | |
| (SEQ ID NO: 7) | GGGGTTGATATTGTTTTTAGAG | 328 |
| | (SEQ ID NO: 600) | |
| | CCCCTCCTTCCTTAAATCT | |
| | (SEQ ID NO: 601) | |
| (SEQ ID NO: 44) | TTTTAGAAGGGGTTGGTTTAG | 343 |
| | (SEQ ID NO: 602) | |
| | ACTACCTAACTCTCCCCACAA | |
| | (SEQ ID NO: 603) | |
| (SEQ ID NO: 44) | TTGTGGGGAGAGTTAGGTAGT | 411 |
| | (SEQ ID NO: 604) | |
| | TAACCCAAATATCATAAAACCC | |
| | (SEQ ID NO: 605) | |
| (SEQ ID NO: 1) | AGATGGATATTTTGTTGGTGTT | 250 |
| | (SEQ ID NO: 606) | |
| | TACACAATTATACCTTTCAAACAAT | |
| | (SEQ ID NO: 607) | |
| (SEQ ID NO: 1) | CCATACAAATATCCTAAATAAAACC | 482 |
| | (SEQ ID NO: 608) | |
| | TTGTTGGAAGAATTGATAGTGTT | |
| | (SEQ ID NO: 609) | |
| (SEQ ID NO: 1) | AGGGAGTTAAGTAAGGGGTTAG | 442 |
| | (SEQ ID NO: 610) | |
| | AACACCAACAAAATATCCATCT | |
| | (SEQ ID NO: 611) | |
| (SEQ ID NO: 2) | TGGAATTTTAGGGTTAGTAGGG | 499 |
| | (SEQ ID NO: 612) | |
| | CAAATAAACCAAACCACTATCA | |
| | (SEQ ID NO: 613) | |
| (SEQ ID NO: 2) | TTGGGATTTTTAGGTGGTTT | 492 |
| | (SEQ ID NO: 614) | |
| | TTCACTTTCCCTACTAACCCTA | |
| | (SEQ ID NO: 615) | |
| (SEQ ID NO: 45) | TGGGTTATTTGGTGAGTATTGT | 461 |
| | (SEQ ID NO: 616) | |
| | CTTACCCCCACCCAACTA | |
| | (SEQ ID NO: 617) | |
| (SEQ ID NO: 46) | TTCACATTACATTAACCCATTTA | 452 |
| | (SEQ ID NO: 618) | |
| | TTGGAGTTGTTAGGAGAAAAGT | |
| | (SEQ ID NO: 619) | |
| (SEQ ID NO: 10) | CCTTCCTTAAAAACCTCAAAAC | 436 |
| | (SEQ ID NO: 620) | |
| | GTAAAGAATGGTAGAGGATAGGAT | |
| | (SEQ ID NO: 621) | |
| (SEQ ID NO: 10) | CTTACTACCCAACCTCTTTCAC | 444 |
| | (SEQ ID NO: 622) | |
| | TGGAAGGATAGAGAATTTTGTT | |
| | (SEQ ID NO: 623) | |
| (SEQ ID NO: 11) | ATCCCATCTCTCAACTCCTACT | 452 |
| | (SEQ ID NO: 624) | |
| | TGATTTATTTTGATGTGTGGTT | |
| | (SEQ ID NO: 625) | |
| (SEQ ID NO: 11) | TATTTAAGGATTTTGGAAGGAG | 349 |
| | (SEQ ID NO: 626) | |
| | TCATCTCATTTTATCTCTACAACC | |
| | (SEQ ID NO: 627) | |
| (SEQ ID NO: 13) | AACAAATTCCCAACACACC | 476 |
| | (SEQ ID NO: 628) | |
| | TTTTGGAAGATGGTTTATTTTT | |
| | (SEQ ID NO: 629) | |
| (SEQ ID NO: 13) | TTTTTAATATGGAGGTAAGGGA | 279 |
| | (SEQ ID NO: 630) | |
| | AAATTCCCAACACACCAAC | |
| | (SEQ ID NO: 631) | |
| (SEQ ID NO: 3) | CTTCTCCAAAATCAACCAACT | 254 |
| | (SEQ ID NO: 632) | |
| | TTTGTGTTATTAGTAGGTGAGAGG | |
| | (SEQ ID NO: 633) | |
| (SEQ ID NO: 3) | TTAGAAGTTGGAGGGTGAAAT | 450 |
| | (SEQ ID NO: 634) | |
| | CTTCCTACCTTAAACCCTTACC | |
| | (SEQ ID NO: 635) | |
| (SEQ ID NO: 18) | TCTAACTCCTCACAAATTCCTAA | 498 |
| | (SEQ ID NO: 636) | |
| | GTAGTGTAATAGGGAAAGGGG | |
| | (SEQ ID NO: 637) | |
| (SEQ ID NO: 48) | TAAAATTCCCTCTTACCCTAAA | 396 |
| | (SEQ ID NO: 638) | |
| | TAGTAAGGATTGTAGAAGGGGG | |
| | (SEQ ID NO: 639) | |
| (SEQ ID NO: 48) | TAGTAAGGATTGTAGAAGGGGG | |
| | (SEQ ID NO: 640) | |
| | CCTCAAACCCTAAAAATAACC | |
| | (SEQ ID NO: 641) | |
| (SEQ ID NO: 58) | GGAGAGGAGTGTTTGTAGAAGA | 369 |
| | (SEQ ID NO: 642) | |
| | CAATCTCCCCTAAATCCTAAT | |
| | (SEQ ID NO: 643) | |
| (SEQ ID NO: 22) | TAGTAGTTTGAAGAAGGGGAAG | 373 |
| | (SEQ ID NO: 644) | |
| | AAACATTCCTAAAATCACAAAAA | |
| | (SEQ ID NO: 645) | |
| (SEQ ID NO: 19) | TTTATTTGGGTATGATTAGGTTTT | 426 |
| | (SEQ ID NO: 646) | |
| | ACTAAAAACACCACCCCCT | |
| | (SEQ ID NO: 647) | |
| (SEQ ID NO: 19) | ACAAACCAAAATCTTACTTCCTA | 458 |
| | (SEQ ID NO: 648) | |
| | GAATGGAGGGGAAATGTTA | |
| | (SEQ ID NO: 649) | |
| (SEQ ID NO: 17) | AAAACTCCTCCCCTCTATAAAT | 492 |
| | (SEQ ID NO: 650) | |
| | TTGGAGAGATGTGTTGGTTAG | |
| | (SEQ ID NO: 651) | |
| (SEQ ID NO: 17) | AATCCTAACCAACACATCTCTC | 482 |
| | (SEQ ID NO: 652) | |
| | AGGGGATTTTAAGGTGATTAGT | |
| | (SEQ ID NO: 653) | |
| (SEQ ID NO: 23) | CTCCCCATCCATCTTATTTTA | 489 |
| | (SEQ ID NO: 654) | |
| | ATTGTTTGGGTGATAGTGAAGT | |
| | (SEQ ID NO: 655) | |
| (SEQ ID NO: 21) | TAAGTTTTTGGAGGAAGAGTTT | 370 |
| | (SEQ ID NO: 656) | |
| | AAAATACTCCCTATAATTCCCC | |
| | (SEQ ID NO: 657) | |
| (SEQ ID NO: 21) | TTTCTCTAACCAAACACCTAAAA | 398 |
| | (SEQ ID NO: 658) | |
| | AGAAATTAGTAGAGGAGGGAGG | |
| | (SEQ ID NO: 659) | |
| (SEQ ID NO: 43) | ATCTAATCCCTCTCCTAACTCC | 441 |
| | (SEQ ID NO: 660) | |
| | TTTGTTTTGGAATTTAGGTTTT | |
| | (SEQ ID NO: 661) | |
| (SEQ ID NO: 9) | TCCACAAAACTCTCCTACTAAAA | 186 |
| | (SEQ ID NO: 662) | |
| | GGAAGGTTGGGTAGATATAGG | |
| | (SEQ ID NO: 663) | |
| (SEQ ID NO: 12) | TTGGTAGAGTTGAAAGGAGATAG | 402 |
| | (SEQ ID NO: 664) | |
| | AAAAACATTCCCTAAAAATTCC | |
| | (SEQ ID NO: 665) | |
| (SEQ ID NO: 47) | ATAGAATGGTTAGGGGGTATTT | 484 |
| | (SEQ ID NO: 666) | |
| | TACAAATATCAACCTCTCTCCC | |
| | (SEQ ID NO: 667) | |
| (SEQ ID NO: 20) | GGTGGGGTATAATAGTAGGGAT | 448 |
| | (SEQ ID NO: 668) | |
| | CTTCCCCTCTTTCATTTTATTT | |
| | (SEQ ID NO: 669) | |
| (SEQ ID NO: 50) | GAGGAATTGGTATTGAAAGAAA | 426 |
| | (SEQ ID NO: 670) | |
| | CTAATCCACCCTCCATAAAAC | |
| | (SEQ ID NO: 671) | |
| (SEQ ID NO: 50) | CTCCAATTCTCCTCCCTATATC | 425 |
| | (SEQ ID NO: 672) | |
| | TAATTTTTGAGGTTGGGAAA | |
| | (SEQ ID NO: 673) | |

TABLE 2

| | | |
|---|---|---|
| No: | Gene | Oligo: |

| | | |
|---|---|---|
| 1 | (SEQ ID NO: 41) | TGGACGTAGGAAAGCGA |
| | | (SEQ ID NO: 681) |
| 2 | (SEQ ID NO: 41) | GATGTAGGAAAGTGAGA |
| | | (SEQ ID NO: 682) |
| 3 | (SEQ ID NO: 41) | ATTTACGGGAGTTTTATCGT |
| | | (SEQ ID NO: 683) |
| 4 | (SEQ ID NO: 41) | ATTTATGGGAGTTTTATTGT |
| | | (SEQ ID NO: 684) |
| 5 | (SEQ ID NO: 41) | ATTAGTTCGGGTCGCGT |
| | | (SEQ ID NO: 685) |
| 6 | (SEQ ID NO: 41) | ATTAGTTTGGGTTGTGT |
| | | (SEQ ID NO: 686) |
| 7 | (SEQ ID NO: 41) | TATACGAAAGGGAGGCGG |
| | | (SEQ ID NO: 687) |
| 8 | (SEQ ID NO: 41) | TATATGAAAGGGAGGTGG |
| | | (SEQ ID NO: 688) |
| 9 | (SEQ ID NO: 41) | GGCGTGTCGTTAGTTTTA |
| | | (SEQ ID NO: 689) |
| 10 | (SEQ ID NO: 41) | GGTGTGTTGTTAGTTTTATA |
| | | (SEQ ID NO: 690) |
| 11 | (SEQ ID NO: 41) | TTCGATTGACGTTAGCGA |
| | | (SEQ ID NO: 691) |
| 12 | (SEQ ID NO: 41) | TTTGATTGATGTTAGTGA |
| | | (SEQ ID NO: 692) |
| 13 | (SEQ ID NO: 41) | TTTCGAGTTTGACGGT |
| | | (SEQ ID NO: 693) |
| 14 | (SEQ ID NO: 41) | TTTTGAGTTTGATGGTT |
| | | (SEQ ID NO: 694) |
| 15 | (SEQ ID NO: 41) | TTCGGAGGGCGTATTT |
| | | (SEQ ID NO: 695) |
| 16 | (SEQ ID NO: 41) | TTTGGAGGGTGTATTT |
| | | (SEQ ID NO: 696) |
| 17 | (SEQ ID NO: 5) | GACGTCGGTACGTAGT |
| | | (SEQ ID NO: 697) |
| 18 | (SEQ ID NO: 5) | GATGTTGGTATGTAGTAG |
| | | (SEQ ID NO: 698) |
| 19 | (SEQ ID NO: 5) | TTCGGGGGAATTCGAGT |
| | | (SEQ ID NO: 699) |
| 20 | (SEQ ID NO: 5) | TTTGGGGGAATTTGAGT |
| | | (SEQ ID NO: 700) |
| 21 | (SEQ ID NO: 5) | TATTGCGAGGATTCGG |
| | | (SEQ ID NO: 701) |
| 22 | (SEQ ID NO: 5) | ATTGTGAGGATTTGGT |
| | | (SEQ ID NO: 702) |
| 23 | (SEQ ID NO: 5) | GTGCGTTCGTAGCGTA |
| | | (SEQ ID NO: 703) |
| 24 | (SEQ ID NO: 5) | TGTGTTTGTAGTGTAGG |
| | | (SEQ ID NO: 704) |
| 25 | (SEQ ID NO: 5) | GGACGTCGTTTGTTAG |
| | | (SEQ ID NO: 705) |
| 26 | (SEQ ID NO: 5) | GGATGTTGTTTGTTAGG |
| | | (SEQ ID NO: 706) |
| 27 | (SEQ ID NO: 5) | AGAGCGTCGTTTTGTA |
| | | (SEQ ID NO: 707) |
| 28 | (SEQ ID NO: 5) | AGAGTGTTGTTTTGTAT |
| | | (SEQ ID NO: 708) |
| 29 | (SEQ ID NO: 5) | TTTCGAGGGTAGGCGAG |
| | | (SEQ ID NO: 709) |
| 30 | (SEQ ID NO: 5) | TTTTGAGGGTAGGTGAG |
| | | (SEQ ID NO: 710) |
| 31 | (SEQ ID NO: 5) | TTTCGATTTTAATGCGAA |
| | | (SEQ ID NO: 711) |
| 32 | (SEQ ID NO: 5) | TTTGATTTTAATGTGAAGT |
| | | (SEQ ID NO: 712) |
| 33 | (SEQ ID NO: 5) | AGGAATTTCGTCGCGA |
| | | (SEQ ID NO: 713) |
| 34 | (SEQ ID NO: 5) | AGGAATTTTGTTGTGAT |
| | | (SEQ ID NO: 714) |
| 35 | (SEQ ID NO: 5) | TTTGAGTCGTACGCGT |
| | | (SEQ ID NO: 715) |
| 36 | (SEQ ID NO: 5) | TTTTGAGTTGTATGTGT |
| | | (SEQ ID NO: 716) |
| 37 | (SEQ ID NO: 6) | TACGTAGTTGCGCGTT |
| | | (SEQ ID NO: 717) |
| 38 | (SEQ ID NO: 51) | GTATGTAGTTGTGTGTT |
| | | (SEQ ID NO: 674) |
| 39 | (SEQ ID NO: 6) | AATCGGCGGTTAGGAT |
| | | (SEQ ID NO: 718) |
| 40 | (SEQ ID NO: 6) | GAATTGGTGGTTAGGA |
| | | (SEQ ID NO: 719) |
| 41 | (SEQ ID NO: 6) | TTTGATCGGGTTTGAG |
| | | (SEQ ID NO: 720) |
| 42 | (SEQ ID NO: 6) | TTTTGATTGGGTTTGAG |
| | | (SEQ ID NO: 721) |
| 43 | (SEQ ID NO: 51) | TTTGAGTATTCGTAGGAA |
| | | (SEQ ID NO: 675) |
| 44 | (SEQ ID NO: 6) | TGAGTATTTGTAGGAAGA |
| | | (SEQ ID NO: 722) |
| 45 | (SEQ ID NO: 6) | AGAGGCGCGGGTTATA |
| | | (SEQ ID NO: 723) |
| 46 | (SEQ ID NO: 6) | TAGAGGTGTGGGTTAT |
| | | (SEQ ID NO: 724) |
| 47 | (SEQ ID NO: 6) | TTAGCGGTTAAGTTGCGA |
| | | (SEQ ID NO: 725) |
| 48 | (SEQ ID NO: 6) | TTAGTGGTTAAGTTGTGA |
| | | (SEQ ID NO: 726) |
| 49 | (SEQ ID NO: 8) | TTCGTAGAAGAATACGCGTA |
| | | (SEQ ID NO: 727) |
| 50 | (SEQ ID NO: 8) | TTTGTAGAAGAATATGTGTA |
| | | (SEQ ID NO: 728) |
| 51 | (SEQ ID NO: 8) | AAACGTTTATCGGTTG |
| | | (SEQ ID NO: 729) |
| 52 | (SEQ ID NO: 8) | AATGTTTATTGGTTGGA |
| | | (SEQ ID NO: 730) |
| 53 | (SEQ ID NO: 8) | TATCGTAGTTCGTTCGG |
| | | (SEQ ID NO: 731) |
| 54 | (SEQ ID NO: 8) | ATTGTAGTTTGTTTGGT |
| | | (SEQ ID NO: 732) |
| 55 | (SEQ ID NO: 16) | TGGTCGGTATATTTCGA |
| | | (SEQ ID NO: 733) |
| 56 | (SEQ ID NO: 16) | TTGGTTGGTATATTTTGA |
| | | (SEQ ID NO: 734) |
| 57 | (SEQ ID NO: 16) | GGAGGTTTCGGTTCGA |
| | | (SEQ ID NO: 735) |
| 58 | (SEQ ID NO: 16) | TGGAGGTTTTGGTTTGA |
| | | (SEQ ID NO: 736) |
| 59 | (SEQ ID NO: 16) | TTAGCGGTAATAGCGG |
| | | (SEQ ID NO: 737) |
| 60 | (SEQ ID NO: 52) | TATTAGTGGTAATAGTGG |
| | | (SEQ ID NO: 676) |
| 61 | (SEQ ID NO: 42) | TGCGTAGTAGGCGGTT |
| | | (SEQ ID NO: 738) |
| 62 | (SEQ ID NO: 53) | TGTGTAGTAGGTGGTTT |
| | | (SEQ ID NO: 677) |
| 63 | (SEQ ID NO: 42) | TAGGCGGTTGTTCGTA |
| | | (SEQ ID NO: 739) |
| 64 | (SEQ ID NO: 42) | AGGTGGTTGTTTGTAA |
| | | (SEQ ID NO: 740) |
| 65 | (SEQ ID NO: 14) | TTGAAGTCGGTACGGT |
| | | (SEQ ID NO: 1125) |
| 66 | (SEQ ID NO: 14) | TGAAGTTGGTATGGTT |
| | | (SEQ ID NO: 1126) |
| 67 | (SEQ ID NO: 14) | TGGGACGCGGATATTT |
| | | (SEQ ID NO: 1127) |
| 68 | (SEQ ID NO: 14) | GTTGGGATGTGGATAT |
| | | (SEQ ID NO: 1128) |
| 69 | (SEQ ID NO: 43) | GTTCGGGTCGATTCGA |
| | | (SEQ ID NO: 741) |
| 70 | (SEQ ID NO: 43) | GGTTTGGGTTGATTTGA |
| | | (SEQ ID NO: 742) |
| 71 | (SEQ ID NO: 43) | TTCGGGATATATTCGATT |
| | | (SEQ ID NO: 743) |
| 72 | (SEQ ID NO: 43) | TTTTGGGATATATTTGATT |
| | | (SEQ ID NO: 744) |
| 73 | (SEQ ID NO: 43) | TATTCGAATTGTATTCGT |
| | | (SEQ ID NO: 745) |
| 74 | (SEQ ID NO: 43) | TTTGAATTGTATTTGTTTAT |
| | | (SEQ ID NO: 746) |
| 75 | (SEQ ID NO: 15) | TTAAGTTCGATTCGGT |
| | | (SEQ ID NO: 747) |
| 76 | (SEQ ID NO: 54) | AGTTTGATTTGGTGAAT |
| | | (SEQ ID NO: 678) |
| 77 | (SEQ ID NO: 15) | TAGTTGTTCGAGAGGG |
| | | (SEQ ID NO: 748) |
| 78 | (SEQ ID NO: 15) | AGTTGTTTGAGAGGGT |
| | | (SEQ ID NO: 749) |
| 79 | (SEQ ID NO: 15) | ATAGTATCGAGGTGAGT |
| | | (SEQ ID NO: 750) |
| 80 | (SEQ ID NO: 15) | ATAGTATTGAGGTGAGTT |
| | | (SEQ ID NO: 751) |
| 81 | (SEQ ID NO: 15) | TTCGGGATTCGATAAT |
| | | (SEQ ID NO: 752) |
| 82 | (SEQ ID NO: 15) | AGGTTTTGGGATTTGA |
| | | (SEQ ID NO: 753) |
| 83 | (SEQ ID NO: 15) | TTAGGACGCGGCGATA |
| | | (SEQ ID NO: 754) |
| 84 | (SEQ ID NO: 15) | AGGATGTGGTGATAGT |
| | | (SEQ ID NO: 755) |
| 85 | (SEQ ID NO: 15) | TTGTACGTTCGGTATT |
| | | (SEQ ID NO: 756) |
| 86 | (SEQ ID NO: 15) | TAAGTTGTATGTTTGGTA |
| | | (SEQ ID NO: 757) |
| 87 | (SEQ ID NO: 4) | GGCGTCGAGGTCGTAG |
| | | (SEQ ID NO: 758) |
| 88 | (SEQ ID NO: 4) | GGTGTTGAGGTTGTAGT |
| | | (SEQ ID NO: 759) |
| 89 | (SEQ ID NO: 4) | AGGGTTTCGATTTTCGG |
| | | (SEQ ID NO: 760) |
| 90 | (SEQ ID NO: 4) | AGGGTTTTGATTTTTGG |
| | | (SEQ ID NO: 761) |
| 91 | (SEQ ID NO: 4) | TGGAACGTGCGATTGT |
| | | (SEQ ID NO: 762) |
| 92 | (SEQ ID NO: 4) | TGGAATGTGTGATTGT |
| | | (SEQ ID NO: 763) |
| 93 | (SEQ ID NO: 4) | TTTTGGCGCGTTTATA |
| | | (SEQ ID NO: 764) |
| 94 | (SEQ ID NO: 4) | TTGGTGTGTTTATAGATA |
| | | (SEQ ID NO: 765) |
| 95 | (SEQ ID NO: 4) | AGATTTTTACGATTCGA |
| | | (SEQ ID NO: 766) |
| 96 | (SEQ ID NO: 4) | TTTTTATGATTTGAAATAGA |
| | | (SEQ ID NO: 767) |
| 97 | (SEQ ID NO: 4) | AGTATTTTCGCGTGTT |
| | | (SEQ ID NO: 768) |
| 98 | (SEQ ID NO: 4) | TAGTATTTTTGTGTGTTAA |
| | | (SEQ ID NO: 769) |
| 99 | (SEQ ID NO: 7) | TTCGTCGGCGGTAGAG |
| | | (SEQ ID NO: 770) |
| 100 | (SEQ ID NO: 7) | TAGAGTTTGTTGGTGG |
| | | (SEQ ID NO: 771) |
| 101 | (SEQ ID NO: 7) | GATCGCGGGTACGTTT |
| | | (SEQ ID NO: 772) |
| 102 | (SEQ ID NO: 7) | ATTGTGGGTATGTTTGT |
| | | (SEQ ID NO: 773) |
| 103 | (SEQ ID NO: 7) | TTAACGTCGTTGGTTA |
| | | (SEQ ID NO: 774) |
| 104 | (SEQ ID NO: 7) | TGATTAATGTTGTTGGT |
| | | (SEQ ID NO: 775) |
| 105 | (SEQ ID NO: 7) | TTCGCGCGAAGATTTA |
| | | (SEQ ID NO: 776) |
| 106 | (SEQ ID NO: 7) | GTTTTTGTGTGAAGATT |
| | | (SEQ ID NO: 777) |
| 107 | (SEQ ID NO: 44) | TTCGATATCGTGACGG |
| | | (SEQ ID NO: 778) |
| 108 | (SEQ ID NO: 44) | TTTTGATATTGTGATGGT |
| | | (SEQ ID NO: 779) |
| 109 | (SEQ ID NO: 44) | AGAATACGGTCGTAGA |
| | | (SEQ ID NO: 780) |
| 110 | (SEQ ID NO: 44) | TAGAATATGGTTGTAGATA |
| | | (SEQ ID NO: 781) |
| 111 | (SEQ ID NO: 44) | TATTTTTGCGTACGGG |
| | | (SEQ ID NO: 782) |
| 112 | (SEQ ID NO: 44) | ATTTTTGTGTATGGGTT |
| | | (SEQ ID NO: 783) |
| 113 | (SEQ ID NO: 1) | TTACGGTGAAGGCGGA |
| | | (SEQ ID NO: 784) |
| 114 | (SEQ ID NO: 1) | TTATGGTGAAGGTGGA |
| | | (SEQ ID NO: 785) |
| 115 | (SEQ ID NO: 1) | TTCGGGATTAATATCGAGAT |
| | | (SEQ ID NO: 786) |
| 116 | (SEQ ID NO: 1) | TTTGGGATTAATATTGAGAT |
| | | (SEQ ID NO: 787) |
| 117 | (SEQ ID NO: 1) | TTTCGGTTTTCGTTAAT |
| | | (SEQ ID NO:788) |
| 118 | (SEQ ID NO: 1) | TTTGGTTTTTGTTAATTTAG |
| | | (SEQ ID NO: 789) |
| 119 | (SEQ ID NO: 1) | TGTGCGAAGTTAACGT |
| | | (SEQ ID NO: 790) |
| 120 | (SEQ ID NO: 1) | TTGTGTGAAGTTAATGT |
| | | (SEQ ID NO: 791) |
| 121 | (SEQ ID NO: 1) | AAGTTTATCGGCGTTT |
| | | (SEQ ID NO: 792) |
| 122 | (SEQ ID NO: 1) | AGAAGTTTATTGGTGTTT |
| | | (SEQ ID NO: 793) |
| 123 | (SEQ ID NO: 1) | ATTTCGGAATTTAAGCGT |
| | | (SEQ ID NO: 794) |
| 124 | (SEQ ID NO: 1) | TTTGGAATTTAAGTGTTT |
| | | (SEQ ID NO: 795) |
| 125 | (SEQ ID NO: 1) | TTTTCGCGATTGGAGA |
| | | (SEQ ID NO: 796) |
| 126 | (SEQ ID NO: 1) | GTTTTTGTGATTGGAGA |
| | | (SEQ ID NO: 797) |
| 127 | (SEQ ID NO: 1) | ATTTACGCGTTTTAGG |
| | | (SEQ ID NO: 798) |
| 128 | (SEQ ID NO: 1) | ATGGAATTTATGTGTTTT |
| | | (SEQ ID NO: 799) |
| 129 | (SEQ ID NO: 1) | ATGTCGCGGTTTTATA |
| | | (SEQ ID NO: 800) |
| 130 | (SEQ ID NO: 1) | GGATGTTGTGGTTTTAT |
| | | (SEQ ID NO: 801) |
| 131 | (SEQ ID NO: 2) | AGACGGGGTTTACGAG |
| | | (SEQ ID NO: 802) |
| 132 | (SEQ ID NO: 2) | AGATGGGGTTTATGAG |
| | | (SEQ ID NO: 803) |
| 133 | (SEQ ID NO: 2) | TGTCGGTATTAGCGTT |
| | | (SEQ ID NO: 804) |
| 134 | (SEQ ID NO: 2) | GTGTTGGTATTAGTGTT |
| | | (SEQ ID NO: 805) |
| 135 | (SEQ ID NO: 2) | TGGTTTACGTTCGGTA |
| | | (SEQ ID NO: 806) |
| 136 | (SEQ ID NO: 2) | GGTTTATGTTTGGTAGT |
| | | (SEQ ID NO: 807) |
| 137 | (SEQ ID NO: 2) | TTCGTACGGTTAGGTT |
| | | (SEQ ID NO: 808) |
| 138 | (SEQ ID NO: 2) | AGTTTTGTATGGTTAGG |
| | | (SEQ ID NO: 809) |
| 139 | (SEQ ID NO: 45) | ATAGCGATTTCGGCGA |
| | | (SEQ ID NO: 810) |
| 140 | (SEQ ID NO: 45) | AGTGATTTTGGTGAGA |
| | | (SEQ ID NO: 811) |
| 141 | (SEQ ID NO: 45) | GGCGTTTTATTTACGAGA |
| | | (SEQ ID NO: 812) |
| 142 | (SEQ ID NO: 45) | GGGTGTTTTATTTATGAG |
| | | (SEQ ID NO: 813) |
| 143 | (SEQ ID NO: 45) | ATCGTGGACGGTAACGA |
| | | (SEQ ID NO: 814) |
| 144 | (SEQ ID NO: 45) | ATTGTGGATGGTAATGA |
| | | (SEQ ID NO: 815) |
| 145 | (SEQ ID NO: 45) | TTGAGATCGATTCGTT |
| | | (SEQ ID NO: 816) |
| 146 | (SEQ ID NO: 45) | TGAGATTGATTTGTTTAG |
| | | (SEQ ID NO: 817) |
| 147 | (SEQ ID NO: 45) | GGCGAGATTCGTACGT |
| | | (SEQ ID NO: 818) |
| 148 | (SEQ ID NO: 45) | GGTGAGATTTGTATGTT |
| | | (SEQ ID NO: 819) |
| 149 | (SEQ ID NO: 45) | TGACGTTCGTGGTGGA |
| | | (SEQ ID NO: 820) |
| 150 | (SEQ ID NO: 45) | GATGTTTGTGGTGGAG |
| | | (SEQ ID NO: 821) |
| 151 | (SEQ ID NO: 45) | GTGATCGATTACGGTA |
| | | (SEQ ID NO: 822) |
| 152 | (SEQ ID NO: 45) | AGGTGATTGATTATGGT |
| | | (SEQ ID NO: 823) |
| 153 | (SEQ ID NO: 45) | ATTATTCGTTCGGTGA |
| | | (SEQ ID NO: 824) |
| 154 | (SEQ ID NO: 45) | TATTATTTGTTTGGTGAG |
| | | (SEQ ID NO: 825) |
| 155 | (SEQ ID NO: 45) | TATCGTCGTTAAGTGT |
| | | (SEQ ID NO: 826) |
| 156 | (SEQ ID NO: 45) | TATTATTGTTGTTAAGTGT |
| | | (SEQ ID NO: 827) |
| 157 | (SEQ ID NO: 45) | TGTAAGCGCGAGAATA |
| | | (SEQ ID NO: 828) |
| 158 | (SEQ ID NO: 45) | AGTGTAAGTGTGAGAAT |
| | | (SEQ ID NO: 829) |
| 159 | (SEQ ID NO: 9) | TATAGCGGTTTACGGT |
| | | (SEQ ID NO: 830) |
| 160 | (SEQ ID NO: 9) | TAGTGGTTTATGGTAGT |
| | | (SEQ ID NO: 831) |
| 161 | (SEQ ID NO: 9) | AGGGCGATTAGGACGT |
| | | (SEQ ID NO: 832) |
| 162 | (SEQ ID NO: 9) | AGGGTGATTAGGATGT |
| | | (SEQ ID NO: 833) |
| 163 | (SEQ ID NO: 46) | TTCGTTAGAGTTCGTAG |
| | | (SEQ ID NO: 834) |
| 164 | (SEQ ID NO: 46) | TTTGTTAGAGTTTGTAGT |
| | | (SEQ ID NO: 835) |
| 165 | (SEQ ID NO: 46) | TGAGACGTTTGTCGGT |
| | | (SEQ ID NO: 836) |
| 166 | (SEQ ID NO: 46) | TGAGATGTTTGTTGGT |
| | | (SEQ ID NO: 837) |
| 167 | (SEQ ID NO: 46) | GAAAAGTTCGTCGGTT |
| | | (SEQ ID NO: 838) |
| 168 | (SEQ ID NO: 46) | AGAAAAGTTTGTTGGTT |
| | | (SEQ ID NO: 839) |
| 169 | (SEQ ID NO: 46) | ATGGCGTAGTCGCGAT |
| | | (SEQ ID NO: 840) |
| 170 | (SEQ ID NO: 46) | TGGTGTAGTTGTGATT |
| | | (SEQ ID NO: 841) |
| 171 | (SEQ ID NO: 10) | TTTTGACGTCGATGTA |
| | | (SEQ ID NO: 842) |
| 172 | (SEQ ID NO: 10) | TGATGTTGATGTAGAATT |
| | | (SEQ ID NO: 843) |
| 173 | (SEQ ID NO: 10) | TTGCGATGTGCGTTTA |
| | | (SEQ ID NO: 844) |
| 174 | (SEQ ID NO: 10) | TGTGATGTGTGTTTAGT |
| | | (SEQ ID NO: 845) |
| 175 | (SEQ ID NO: 10) | TGATTACGGCGCGGAT |
| | | (SEQ ID NO: 846) |
| 176 | (SEQ ID NO: 10) | ATTATGGTGTGGATGG |
| | | (SEQ ID NO: 847) |
| 177 | (SEQ ID NO: 10) | AGATGGCGACGTCGAA |
| | | (SEQ ID NO: 848) |
| 178 | (SEQ ID NO: 10) | ATGGTGATGTTGAAGA |
| | | (SEQ ID NO: 849) |
| 179 | (SEQ ID NO: 10) | TTTAAGCGCGGCGGTA |
| | | (SEQ ID NO: 850) |
| 180 | (SEQ ID NO: 10) | TTTTAAGTGTGGTGGTA |
| | | (SEQ ID NO: 851) |
| 181 | (SEQ ID NO: 10) | AGAAACGTAGACGCGA |
| | | (SEQ ID NO: 852) |
| 182 | (SEQ ID NO: 10) | AATGTAGATGTGATGGA |
| | | (SEQ ID NO: 853) |
| 183 | (SEQ ID NO: 11) | AGAGACGCGAAAAATT |
| | | (SEQ ID NO: 854) |
| 184 | (SEQ ID NO: 11) | TAGAGAGATGTGAAAAAT |
| | | (SEQ ID NO: 855) |
| 185 | (SEQ ID NO: 11) | AGACGAAAGAGTCGTT |
| | | (SEQ ID NO: 856) |
| 186 | (SEQ ID NO: 11) | AGAGATGAAAGAGTTGT |
| | | (SEQ ID NO: 857) |
| 187 | (SEQ ID NO: 11) | TTTTAGTTCGAGCGTA |
| | | (SEQ ID NO: 858) |
| 188 | (SEQ ID NO: 11) | TTAGTTTGAGTGTAGTTA |
| | | (SEQ ID NO: 859) |
| 189 | (SEQ ID NO: 11) | GACGTGAATTTTCGGAA |
| | | (SEQ ID NO: 860) |
| 190 | (SEQ ID NO: 11) | AGGATGTGAATTTTTGG |
| | | (SEQ ID NO: 861) |
| 191 | (SEQ ID NO: 11) | AATGCGTGGTCGTTTT |
| | | (SEQ ID NO: 862) |
| 192 | (SEQ ID NO: 11) | GAAATGTGTGGTTGTT |
| | | (SEQ ID NO: 863) |
| 193 | (SEQ ID NO: 11) | TTTCGTTTGCGGAATT |
| | | (SEQ ID NO: 864) |
| 194 | (SEQ ID NO: 11) | TTTTGTTTGTGGAATTG |
| | | (SEQ ID NO: 865) |
| 195 | (SEQ ID NO: 12) | TGTTCGACGTGATTTT |
| | | (SEQ ID NO: 866) |
| 196 | (SEQ ID NO: 12) | GTGTTTGATGTGATTTT |
| | | (SEQ ID NO: 867) |
| 197 | (SEQ ID NO: 12) | TAACGTTTTTTCGGGT |
| | | (SEQ ID NO: 868) |
| 198 | (SEQ ID NO: 12) | TTAATGTTTTTTTGGGTG |
| | | (SEQ ID NO: 869) |
| 199 | (SEQ ID NO: 12) | TGTTGATTCGGAAATGA |
| | | (SEQ ID NO: 870) |
| 200 | (SEQ ID NO: 12) | TTTGTTGATTTGGAAATG |
| | | (SEQ ID NO: 871) |
| 201 | (SEQ ID NO: 13) | TAAAGTTTCGAAGCGG |
| | | (SEQ ID NO: 1129) |
| 202 | (SEQ ID NO: 13) | AGTTTTGAAGTGGAGT |
| | | (SEQ ID NO: 1130) |
| 203 | (SEQ ID NO: 13) | AAGTCGGTAGTTATCGT |
| | | (SEQ ID NO: 1131) |
| 204 | (SEQ ID NO: 13) | AAGTTGGTAGTTATTGTT |
| | | (SEQ ID NO: 1132) |
| 205 | (SEQ ID NO: 3) | TTGGAGCGCGAGAAAG |
| | | (SEQ ID NO: 872) |
| 206 | (SEQ ID NO: 3) | TTGGAGTGTGAGAAAG |
| | | (SEQ ID NO: 873) |
| 207 | (SEQ ID NO: 3) | TACGTTATCGGTTCGT |
| | | (SEQ ID NO: 874) |
| 208 | (SEQ ID NO: 3) | TATGTTATTGGTTTGTATT |
| | | (SEQ ID NO: 875) |
| 209 | (SEQ ID NO: 3) | ATTAGGTTCGTGGGCGT |
| | | (SEQ ID NO: 876) |
| 210 | (SEQ ID NO: 3) | ATTAGGTTTGTGGGTGT |
| | | (SEQ ID NO: 877) |
| 211 | (SEQ ID NO: 3) | TGCGGTTTAGAAACGTAG |
| | | (SEQ ID NO: 878) |
| 212 | (SEQ ID NO: 3) | TGTGGTTTAGAAATGTAG |
| | | (SEQ ID NO: 879) |
| 213 | (SEQ ID NO: 3) | GAACGGGTTTCGTAGT |
| | | (SEQ ID NO: 880) |
| 214 | (SEQ ID NO: 3) | GGGAATGGGTTTTGTA |
| | | (SEQ ID NO: 881) |
| 215 | (SEQ ID NO: 3) | TTGCGATAGTCGGCGG |
| | | (SEQ ID NO: 882) |
| 216 | (SEQ ID NO: 3) | TTGTGATAGTTGGTGG |
| | | (SEQ ID NO: 883) |
| 217 | (SEQ ID NO: 3) | AAGAACGGACGTGTTT |
| | | (SEQ ID NO: 884) |
| 218 | (SEQ ID NO: 3) | AGGAAGAATGGATGTG |
| | | (SEQ ID NO: 885) |
| 219 | (SEQ ID NO: 47) | AAGTTTCGTTTGGGAG |
| | | (SEQ ID NO: 886) |
| 220 | (SEQ ID NO: 47) | AAAGTTTTGTTTGGGAG |
| | | (SEQ ID NO: 887) |
| 221 | (SEQ ID NO: 47) | TTGGAAGTCGAAGAGA |
| | | (SEQ ID NO: 888) |
| 222 | (SEQ ID NO: 47) | TTTGGAAGTTGAAGAGA |
| | | (SEQ ID NO: 889) |
| 223 | (SEQ ID NO: 18) | TATCGGGTTCGATTTT |
| | | (SEQ ID NO: 890) |
| 224 | (SEQ ID NO: 18) | GGTGTATTGGGTTTGA |
| | | (SEQ ID NO: 891) |
| 225 | (SEQ ID NO: 20) | TAGGGATTCGCGGAGG |
| | | (SEQ ID NO: 892) |
| 226 | (SEQ ID NO: 20) | TAGGGATTTGTGGAGG |
| | | (SEQ ID NO: 893) |
| 227 | (SEQ ID NO: 20) | TTGTCGAGTAATTTTCGT |
| | | (SEQ ID NO: 894) |
| 228 | (SEQ ID NO: 20) | TGTTGAGTAATTTTTGTT |
| | | (SEQ ID NO: 895) |
| 229 | (SEQ ID NO: 20) | TATTACGGGCGGAGGG |
| | | (SEQ ID NO: 896) |
| 230 | (SEQ ID NO: 20) | TATTATGGGTGGAGGG |
| | | (SEQ ID NO: 897) |
| 231 | (SEQ ID NO: 20) | GACGGTACGTTAGAGG |
| | | (SEQ ID NO: 898) |
| 232 | (SEQ ID NO: 20) | GATGGTATGTTAGAGGT |
| | | (SEQ ID NO: 899) |
| 233 | (SEQ ID NO: 20) | TTGGGCGTCGTTATTA |
| | | (SEQ ID NO: 900) |
| 234 | (SEQ ID NO: 20) | TGGGTGTTGTTATTAGT |
| | | (SEQ ID NO: 901) |
| 235 | (SEQ ID NO: 20) | TATTAGTTCGGTCGTT |
| | | (SEQ ID NO: 902) |
| 236 | (SEQ ID NO: 20) | AGTTTGGTTGTTAGTTT |
| | | (SEQ ID NO: 903) |
| 237 | (SEQ ID NO: 20) | TTATTACGTTTAGCGAT |
| | | (SEQ ID NO: 904) |
| 238 | (SEQ ID NO: 20) | TTTTTATTATGTTTAGTGATA |
| | | (SEQ ID NO: 905) |
| 239 | (SEQ ID NO: 20) | ATAGCGAGTGCGATAT |
| | | (SEQ ID NO: 906) |
| 240 | (SEQ ID NO: 48) | AGGGTCGTAGCGGTAG |
| | | (SEQ ID NO: 907) |
| 241 | (SEQ ID NO: 48) | GAGGGTTGTAGTGGTA |
| | | (SEQ ID NO: 908) |
| 242 | (SEQ ID NO: 50) | TTAGGTCGGACGTAAG |
| | | (SEQ ID NO: 1143) |
| 243 | (SEQ ID NO: 50) | GGTTAGGTTGGATGTA |
| | | (SEQ ID NO: 1144) |
| 244 | (SEQ ID NO: 22) | TAGACGTGGGGTTACGT |
| | | (SEQ ID NO: 909) |
| 245 | (SEQ ID NO: 22) | TAGATGTGGGGTTATGT |
| | | (SEQ ID NO: 910) |
| 246 | (SEQ ID NO: 22) | ATTTCGGGGTAGTATCGT |
| | | (SEQ ID NO: 911) |
| 247 | (SEQ ID NO: 22) | ATTTTGGGGTAGTATTGT |
| | | (SEQ ID NO: 912) |
| 248 | (SEQ ID NO: 19) | TACGCGCGTTTTAAAA |
| | | (SEQ ID NO: 913) |
| 249 | (SEQ ID NO: 19) | TTATGTGTGTTTTAAAATG |
| | | (SEQ ID NO: 914) |
| 250 | (SEQ ID NO: 19) | TACGATATCGTTATATAACGG |
| | | (SEQ ID NO: 915) |
| 251 | (SEQ ID NO: 19) | TATGATATTGTTATATAATGG |
| | | (SEQ ID NO: 916) |
| 252 | (SEQ ID NO: 19) | TATAGGTTCGCGGTTT |
| | | (SEQ ID NO: 917) |
| 253 | (SEQ ID NO: 19) | TATATAGGTTTGTGGTTT |
| | | (SEQ ID NO: 918) |
| 254 | (SEQ ID NO: 19) | TAGGTGCGCGTTATAT |
| | | (SEQ ID NO: 919) |
| 255 | (SEQ ID NO: 19) | ATGTAGGTGTGTGTTAT |
| | | (SEQ ID NO: 920) |
| 256 | (SEQ ID NO: 55) | TACGTTGTTTGGACGAAT |
| | | (SEQ ID NO: 679) |
| 257 | (SEQ ID NO: 19) | TATGTTGTTTGGATGAAT |
| | | (SEQ ID NO: 921) |
| 258 | (SEQ ID NO: 19) | AAGGAGCGTATTTCGG |
| | | (SEQ ID NO: 922) |
| 259 | (SEQ ID NO: 19) | AGGAGTGTATTTTGGG |
| | | (SEQ ID NO: 923) |
| 260 | (SEQ ID NO: 55) | GTCGGATTTCGGAAGT |
| | | (SEQ ID NO: 680) |
| 261 | (SEQ ID NO: 19) | GTTGGATTTTGGAAGTG |
| | | (SEQ ID NO: 924) |
| 262 | (SEQ ID NO: 19) | GAAGTGACGCGTTCGT |
| | | (SEQ ID NO: 925) |
| 263 | (SEQ ID NO: 19) | GAAGTGATGTGTTTGT |
| | | (SEQ ID NO: 926) |
| 264 | (SEQ ID NO: 19) | TGTTATCGTTGCGCGA |
| | | (SEQ ID NO: 927) |
| 265 | (SEQ ID NO: 19) | ATGTTATTGTTGTGTGA |
| | | (SEQ ID NO: 928) |
| 266 | (SEQ ID NO: 17) | TGAAAACGTTTTTCGT |
| | | (SEQ ID NO: 929) |
| 267 | (SEQ ID NO: 17) | AATGTTTTTTGTAAAGAAA |
| | | (SEQ ID NO: 930) |
| 268 | (SEQ ID NO: 17) | AGGATTTCGGCGTTAT |
| | | (SEQ ID NO: 931) |
| 269 | (SEQ ID NO: 17) | AAAGGATTTTGGTGTTA |
| | | (SEQ ID NO: 932) |
| 270 | (SEQ ID NO: 17) | ATTTATTCGTGCGTTT |
| | | (SEQ ID NO: 933) |
| 271 | (SEQ ID NO: 17) | TATTTGTGTGTTTAGGG |
| | | (SEQ ID NO: 934) |
| 272 | (SEQ ID NO: 17) | TTTCGGTGGTTTTCGAA |
| | | (SEQ ID NO: 935) |
| 273 | (SEQ ID NO: 17) | TTTGGTGGTTTTTGAAG |
| | | (SEQ ID NO: 936) |
| 274 | (SEQ ID NO: 17) | GGCGTACGGAATTTTA |
| | | (SEQ ID NO: 937) |
| 275 | (SEQ ID NO: 17) | GGGTGTATGGAATTTTA |
| | | (SEQ ID NO: 938) |
| 276 | (SEQ ID NO: 17) | TGGACGGAGGTTTCGT |
| | | (SEQ ID NO: 939) |
| 277 | (SEQ ID NO: 17) | TGGATGGAGGTTTTGT |
| | | (SEQ ID NO: 940) |
| 278 | (SEQ ID NO: 17) | TGCGGACGGGATAGTT |
| | | (SEQ ID NO: 941) |
| 279 | (SEQ ID NO: 17) | TGTGGATGGGATAGTT |
| | | (SEQ ID NO: 942) |
| 280 | (SEQ ID NO: 17) | TGATTAGTCGATTCGT |
| | | (SEQ ID NO: 943) |
| 281 | (SEQ ID NO: 17) | GATGTAGGGATGGAGA |
| | | (SEQ ID NO: 944) |
| 282 | (SEQ ID NO: 17) | TATCGTGGTTTTTTACGTAT |
| | | (SEQ ID NO: 945) |
| 283 | (SEQ ID NO: 17) | ATATTGTGGTTTTTTATGTA |
| | | (SEQ ID NO: 946) |
| 284 | (SEQ ID NO: 17) | TTTATTCGGTGTTCGA |
| | | (SEQ ID NO: 947) |
| 285 | (SEQ ID NO: 17) | TATTTGGTGTTTGAGAG |
| | | (SEQ ID NO: 948) |
| 286 | (SEQ ID NO: 23) | GAGGCGCGTTATTTTT |
| | | (SEQ ID NO: 1133) |
| 287 | (SEQ ID NO: 23) | GGGAGGTGTGTTATTTT |
| | | (SEQ ID NO: 1134) |
| 288 | (SEQ ID NO: 23) | AACGGTAGTTAGCGATA |
| | | (SEQ ID NO: 1135) |
| 289 | (SEQ ID NO: 23) | TGAATGGTAGTTAGTGA |
| | | (SEQ ID NO: 1136) |
| 290 | (SEQ ID NO: 23) | TTTTAACGTTCGCGGA |
| | | (SEQ ID NO: 1137) |
| 291 | (SEQ ID NO: 23) | AATGTTTGTGGAGGAT |
| | | (SEQ ID NO: 1138) |
| 292 | (SEQ ID NO: 21) | TTTTTCGCGTATATGTT |
| | | (SEQ ID NO: 1139) |
| 293 | (SEQ ID NO: 21) | TTTTTTGTGTATATGTTTAGG |
| | | (SEQ ID NO: 1140) |
| 294 | (SEQ ID NO: 21) | AAGGGCGGTAAGACGG |
| | | (SEQ ID NO: 1141) |
| 295 | (SEQ ID NO: 21) | AAGGGTGGTAAGATGG |
| | | (SEQ ID NO: 1142) |
| 296 | (SEQ ID NO: 32) | GGTTTCGTTTAATCGT |
| | | (SEQ ID NO: 949) |
| 297 | (SEQ ID NO: 32) | GGGTTTTGTTTAATTGTA |
| | | (SEQ ID NO: 950) |
| 298 | (SEQ ID NO: 32) | GATTCGTATTTCGTAGT |
| | | (SEQ ID NO: 951) |
| 299 | (SEQ ID NO: 32) | TTTGTATTTTGTAGTGGG |
| | | (SEQ ID NO: 952) |
| 300 | (SEQ ID NO: 32) | TTCGTATTTAGCGGAT |
| | | (SEQ ID NO: 953) |
| 301 | (SEQ ID NO: 32) | GGTTTGTATTTAGTGGA |
| | | (SEQ ID NO: 954) |
| 302 | (SEQ ID NO: 32) | TTAATCGGCGGGTTTT |
| | | (SEQ ID NO: 955) |
| 303 | (SEQ ID NO: 32) | AGTTAATTGGTGGGTT |
| | | (SEQ ID NO: 956) |
| 304 | (SEQ ID NO: 32) | TATTTTGGCGGGTTGTAT |
| | | (SEQ ID NO: 957) |
| 305 | (SEQ ID NO: 32) | TATTTTGGTGGGTTGTAT |
| | | (SEQ ID NO: 958) |
| 306 | (SEQ ID NO: 32) | AAGGTTATCGGTTTAAGA |
| | | (SEQ ID NO: 959) |
| 307 | (SEQ ID NO: 32) | AAGGTTATTGGTTTAAGA |
| | | (SEQ ID NO: 960) |
| 308 | (SEQ ID NO: 32) | GGGGGACGACGTTTTTGT |
| | | (SEQ ID NO: 961) |
| 309 | (SEQ ID NO: 32) | GGGGGATGATGTTTTTGT |
| | | (SEQ ID NO: 962) |
| 310 | (SEQ ID NO: 33) | TTACGGTTCGGTTATT |
| | | (SEQ ID NO: 963) |
| 311 | (SEQ ID NO: 33) | AGGTTTTATGGTTTGGT |
| | | (SEQ ID NO: 964) |
| 312 | (SEQ ID NO: 33) | GACGTCGCGGGGTTAG |
| | | (SEQ ID NO: 965) |
| 313 | (SEQ ID NO: 33) | TGATGTTGTGGGGTTA |
| | | (SEQ ID NO: 966) |
| 314 | (SEQ ID NO: 33) | AGGTATTTCGCGATAT |
| | | (SEQ ID NO: 967) |
| 315 | (SEQ ID NO: 33) | AGGTATTTTGTGATATTTT |
| | | (SEQ ID NO: 968) |
| 316 | (SEQ ID NO: 33) | GTTTTTCGATTTACGTT |
| | | (SEQ ID NO: 969) |
| 317 | (SEQ ID NO: 33) | TAGGTTTTTTGATTTATGT |
| | | (SEQ ID NO: 970) |
| 318 | (SEQ ID NO: 33) | GGTAGTTTCGATTATTTA |
| | | (SEQ ID NO: 971) |
| 319 | (SEQ ID NO: 33) | GGTAGTTTTGATTATTTA |
| | | (SEQ ID NO: 972) |
| 320 | (SEQ ID NO: 33) | TAGAGTACGGGGCGGG |
| | | (SEQ ID NO: 973) |
| 321 | (SEQ ID NO: 33) | TAGAGTATGGGGTGGG |
| | | (SEQ ID NO: 974) |
| 322 | (SEQ ID NO: 33) | TTGTTTAGCGGATTTTAG |
| | | (SEQ ID NO:975) |
| 323 | (SEQ ID NO: 33) | TTGTTTAGTGGATTTTAG |
| | | (SEQ ID NO: 976) |
| 324 | (SEQ ID NO: 33) | TAGGTTCGGTTCGTTAT |
| | | (SEQ ID NO: 977) |
| 325 | (SEQ ID NO: 33) | TAGGTTTGGTTTGTTATT |
| | | (SEQ ID NO: 978) |
| 326 | (SEQ ID NO: 33) | TGGTGGTACGTAGTTTGG |
| | | (SEQ ID NO: 979) |
| 327 | (SEQ ID NO: 33) | TTTGGCGTAGATCGGT |
| | | (SEQ ID NO: 980) |
| 328 | (SEQ ID NO: 33) | TTTGGTGTAGATTGGT |
| | | (SEQ ID NO: 981) |
| 329 | (SEQ ID NO: 33) | AGTGTTCGTCGTAGTT |
| | | (SEQ ID NO: 982) |
| 330 | (SEQ ID NO: 33) | TGAGTGTTTGTTGTAGT |
| | | (SEQ ID NO: 983) |
| 331 | (SEQ ID NO: 33) | GTGTTTAGCGCGGATT |
| | | (SEQ ID NO: 984) |
| 332 | (SEQ ID NO: 33) | GGTGTTTAGTGTGGATT |
| | | (SEQ ID NO: 985) |
| 333 | (SEQ ID NO: 34) | TTCGGTTAGTTTCGTAT |
| | | (SEQ ID NO: 986) |
| 334 | (SEQ ID NO: 34) | TTTTGGTTAGTTTTGTATT |
| | | (SEQ ID NO: 987) |
| 335 | (SEQ ID NO: 34) | GATTCGTTTGGGTAACGT |
| | | (SEQ ID NO: 988) |
| 336 | (SEQ ID NO: 34) | GATTTGTTTGGGTAATGT |
| | | (SEQ ID NO: 989) |
| 337 | (SEQ ID NO: 34) | GTCGAATTTAGTCGCGT |
| | | (SEQ ID NO: 990) |
| 338 | (SEQ ID NO: 34) | GTTGAATTTAGTTGTGTA |
| | | (SEQ ID NO: 991) |
| 339 | (SEQ ID NO: 34) | AATTCGCGAGTTTAGA |
| | | (SEQ ID NO: 992) |
| 340 | (SEQ ID NO: 34) | AAAAATTTGTGAGTTTAG |
| | | (SEQ ID NO: 993) |
| 341 | (SEQ ID NO: 24) | AGGGGTTGGATTAGGG |
| | | (SEQ ID NO: 1145) |
| 342 | (SEQ ID NO: 24) | AGGGGTTTGATTAGGG |
| | | (SEQ ID NO: 1146) |
| 343 | (SEQ ID NO: 24) | TTAGGTATACGAAAGAGTAT |
| | | (SEQ ID NO: 1147) |
| 344 | (SEQ ID NO: 24) | TTAGGTATATGAAAGAGTAT |
| | | (SEQ ID NO: 1148) |
| 345 | (SEQ ID NO: 24) | TGTCGTACGTTATGTT |
| | | (SEQ ID NO: 1149) |
| 346 | (SEQ ID NO: 24) | GGTGTTGTATGTTATGT |
| | | (SEQ ID NO: 1150) |
| 347 | (SEQ ID NO: 24) | TTGATTGGCGGACGAG |
| | | (SEQ ID NO: 1151) |
| 348 | (SEQ ID NO: 24) | TTGATTGGTGGATGAG |
| | | (SEQ ID NO: 1152) |
| 349 | (SEQ ID NO: 35) | TATATATACGTGTGGGTA |
| | | (SEQ ID NO: 994) |
| 350 | (SEQ ID NO: 35) | TATATATATGTGTGGGTA |
| | | (SEQ ID NO: 995) |
| 351 | (SEQ ID NO: 35) | TATGTAGTCGCGTAGT |
| | | (SEQ ID NO: 996) |
| 352 | (SEQ ID NO: 35) | TTTATGTAGTTGTGTAGT |
| | | (SEQ ID NO: 997) |
| 353 | (SEQ ID NO: 35) | AGTGTATGCGTAGAAGGT |
| | | (SEQ ID NO: 998) |
| 354 | (SEQ ID NO: 35) | AGTGTATGTGTAGAAGGT |
| | | (SEQ ID NO: 999) |
| 355 | (SEQ ID NO: 35) | TTTAGATACGAAATGTTA |
| | | (SEQ ID NO: 1000) |
| 356 | (SEQ ID NO: 35) | TTTAGATATGAAATGTTA |
| | | (SEQ ID NO: 1001) |
| 357 | (SEQ ID NO: 35) | AAGTAAGTCGTTGTTGTT |
| | | (SEQ ID NO: 1002) |
| 358 | (SEQ ID NO: 35) | AAGTAAGTTGTTGTTGTT |
| | | (SEQ ID NO: 1003) |
| 359 | (SEQ ID NO: 25) | TTTCGTCGGAGGAATT |
| | | (SEQ ID NO: 1004) |
| 360 | (SEQ ID NO: 25) | GTTTTGTTGGAGGAATT |
| | | (SEQ ID NO: 1005) |
| 361 | (SEQ ID NO: 25) | ATCGTTTTGTCGGACGG |
| | | (SEQ ID NO: 1006) |
| 362 | (SEQ ID NO: 25) | ATTGTTTTGTTGGATGG |
| | | (SEQ ID NO: 1007) |
| 363 | (SEQ ID NO: 25) | TGTCGCGATATATCGA |
| | | (SEQ ID NO: 1008) |
| 364 | (SEQ ID NO: 25) | TTTGTTGTGATATATTGAT |
| | | (SEQ ID NO: 1009) |
| 365 | (SEQ ID NO: 36) | AGCGTCGATTAATCGT |
| | | (SEQ ID NO: 1010) |
| 366 | (SEQ ID NO: 36) | TTAAGTGTTGATTAATTGT |
| | | (SEQ ID NO: 1011) |
| 367 | (SEQ ID NO: 36) | TTCGGTCGGGTTTAAA |
| | | (SEQ ID NO: 1012) |
| 368 | (SEQ ID NO: 36) | GTTTGGTTGGGTTTAAA |
| | | (SEQ ID NO: 1013) |
| 369 | (SEQ ID NO: 36) | TAATCGTTAGCGGCGG |
| | | (SEQ ID NO: 1014) |
| 370 | (SEQ ID NO: 36) | TTAATTGTTAGTGGTGG |
| | | (SEQ ID NO: 1015) |
| 371 | (SEQ ID NO: 36) | TTAACGGGTGGGTACGT |
| | | (SEQ ID NO: 1016) |
| 372 | (SEQ ID NO: 36) | TTAATGGGTGGGTATGT |
| | | (SEQ ID NO: 1017) |
| 373 | (SEQ ID NO: 36) | AGGTCGTTGGTATTCGT |
| | | (SEQ ID NO: 1018) |
| 374 | (SEQ ID NO: 36) | AGGTTGTTGGTATTTGT |
| | | (SEQ ID NO: 1019) |
| 375 | (SEQ ID NO: 36) | TTTTCGAGTTTTATCGA |
| | | (SEQ ID NO: 1020) |
| 376 | (SEQ ID NO: 36) | TTTGAGTTTTATTGAGGT |
| | | (SEQ ID NO: 1021) |
| 377 | (SEQ ID NO: 36) | ATAGTCGTGGTTTCGT |
| | | (SEQ ID NO: 1022) |
| 378 | (SEQ ID NO: 36) | ATAGTTGTGGTTTTGTT |
| | | (SEQ ID NO: 1023) |
| 379 | (SEQ ID NO: 36) | TGACGGGCGTTTTCGA |
| | | (SEQ ID NO: 1024) |
| 380 | (SEQ ID NO: 36) | GATGGGTGTTTTTGAG |
| | | (SEQ ID NO: 1025) |
| 381 | (SEQ ID NO: 36) | TAATGAGCGCGTTGTA |
| | | (SEQ ID NO: 1026) |
| 382 | (SEQ ID NO: 36) | ATGAGTGTGTTGTATTT |
| | | (SEQ ID NO: 1027) |
| 383 | (SEQ ID NO: 28) | TTGGTTCGGGAAAGGTAA |
| | | (SEQ ID NO: 1028) |
| 384 | (SEQ ID NO: 28) | TTGGTTTGGGAAAGGTAA |
| | | (SEQ ID NO: 1029) |
| 385 | (SEQ ID NO: 28) | TTTCGGTGAATCGGAT |
| | | (SEQ ID NO: 1030) |
| 386 | (SEQ ID NO: 28) | TTTTTGGTGAATTGGAT |
| | | (SEQ ID NO: 1031) |
| 387 | (SEQ ID NO: 28) | TTCGTAAAGTCGTTGT |
| | | (SEQ ID NO: 1032) |
| 388 | (SEQ ID NO: 28) | GGTTTTTTGTAAAGTTGT |
| | | (SEQ ID NO: 1033) |
| 389 | (SEQ ID NO: 28) | GTTTAGTTAGCGGGTTTT |
| | | (SEQ ID NO: 1034) |
| 390 | (SEQ ID NO: 28) | GTTTAGTTAGTGGGTTTT |
| | | (SEQ ID NO: 1035) |
| 391 | (SEQ ID NO: 28) | GGGCGCGTACGGTTAT |
| | | (SEQ ID NO: 1036) |
| 392 | (SEQ ID NO: 28) | AGTTGGGTGTGTATGG |
| | | (SEQ ID NO: 1037) |
| 393 | (SEQ ID NO: 28) | TTATCGCGCGTGGAGG |
| | | (SEQ ID NO: 1038) |
| 394 | (SEQ ID NO: 28) | TTATTGTGTGTGGAGGA |
| | | (SEQ ID NO:1039) |
| 395 | (SEQ ID NO: 37) | AAAACGTGGACGTTTT |
| | | (SEQ ID NO: 1153) |
| 396 | (SEQ ID NO: 37) | ATTTGGAGCGAGGAATTT |
| | | (SEQ ID NO: 1154) |
| 397 | (SEQ ID NO: 37) | ATTTGGAGTGAGGAATTT |
| | | (SEQ ID NO: 1155) |
| 398 | (SEQ ID NO: 37) | TTGAAAGTCGGTTAAAGT |
| | | (SEQ ID NO: 1156) |
| 399 | (SEQ ID NO: 37) | TTGAAAGTTGGTTAAAGT |
| | | (SEQ ID NO: 1157) |
| 400 | (SEQ ID NO: 37) | GGTAGTTACGAGAGAGTT |
| | | (SEQ ID NO: 1158) |
| 401 | (SEQ ID NO: 37) | GGTAGTTATGAGAGAGTT |
| | | (SEQ ID NO: 1159) |
| 402 | (SEQ ID NO: 26) | GGTGCGCGTAGAGAAT |
| | | (SEQ ID NO: 1040) |
| 403 | (SEQ ID NO: 26) | GGTGTGTGTAGAGAATA |
| | | (SEQ ID NO: 1041) |
| 404 | (SEQ ID NO: 26) | TAAGCGTATCGACGTT |
| | | (SEQ ID NO: 1042) |
| 405 | (SEQ ID NO: 26) | ATTTTAAGTGTATTGATGT |
| | | (SEQ ID NO: 1043) |
| 406 | (SEQ ID NO: 26) | AAATATCGAACGGGAT |
| | | (SEQ ID NO: 1044) |
| 407 | (SEQ ID NO: 26) | ATTGAATGGGATTTAGAG |
| | | (SEQ ID NO: 1045) |
| 408 | (SEQ ID NO: 26) | TTAGAGTTCGAGTTTATA |
| | | (SEQ ID NO: 1046) |
| 409 | (SEQ ID NO: 26) | TTAGAGTTTGAGTTTATA |
| | | (SEQ ID NO: 1047) |
| 410 | (SEQ ID NO: 26) | TTAGGCGCGGATTCGT |
| | | (SEQ ID NO: 1048) |
| 411 | (SEQ ID NO: 26) | TAGGTGTGGATTTGTT |
| | | (SEQ ID NO: 1049) |
| 412 | (SEQ ID NO: 26) | TTCGCGAAGTTACGGG |
| | | (SEQ ID NO: 1050) |
| 413 | (SEQ ID NO: 26) | TTTGTGAAGTTATGGGT |
| | | (SEQ ID NO: 1051) |
| 414 | (SEQ ID NO: 26) | TATCGGTTCGGAGTTA |
| | | (SEQ ID NO: 1052) |
| 415 | (SEQ ID NO: 26) | ATTGGTTTGGAGTTAGA |
| | | (SEQ ID NO: 1053) |
| 416 | (SEQ ID NO: 26) | AAGTAGCGTCGTTATT |
| | | (SEQ ID NO: 1054) |
| 417 | (SEQ ID NO: 26) | AAGTAGTGTTGTTATTGA |
| | | (SEQ ID NO: 1055) |
| 418 | (SEQ ID NO: 26) | GTCGTTCGGAATTCGT |
| | | (SEQ ID NO: 1056) |
| 419 | (SEQ ID NO: 26) | AGTTGTTTGGAATTTGT |
| | | (SEQ ID NO: 1057) |
| 420 | (SEQ ID NO: 26) | TACGTGGTCGAGGGTT |
| | | (SEQ ID NO: 1058) |
| 421 | (SEQ ID NO: 26) | TATGTGGTTGAGGGTT |
| | | (SEQ ID NO: 1059) |
| 422 | (SEQ ID NO: 26) | GGAAGTTTCGATGGTTTA |
| | | (SEQ ID NO: 1060) |
| 423 | (SEQ ID NO: 26) | GGAAGTTTTGATGGTTTA |
| | | (SEQ ID NO: 1061) |
| 424 | (SEQ ID NO: 38) | GGCGTTGGTATCGTTGA |
| | | (SEQ ID NO: 1062) |
| 425 | (SEQ ID NO: 38) | GGTGTTGGTATTGTTGA |
| | | (SEQ ID NO: 1063) |
| 426 | (SEQ ID NO: 38) | TTAAGACGCGTTTTTT |
| | | (SEQ ID NO: 1064) |
| 427 | (SEQ ID NO: 38) | AAGATGTGTTTTTTGGA |
| | | (SEQ ID NO: 1065) |
| 428 | (SEQ ID NO: 38) | TTTTGTCGCGGGAATT |
| | | (SEQ ID NO: 1066) |
| 429 | (SEQ ID NO: 38) | TTTTTGTTGTGGGAATT |
| | | (SEQ ID NO: 1067) |
| 430 | (SEQ ID NO: 38) | ATACGTAGATTCGGAG |
| | | (SEQ ID NO: 1068) |
| 431 | (SEQ ID NO: 38) | TATGTAGATTTGGAGGT |
| | | (SEQ ID NO: 1069) |
| 432 | (SEQ ID NO: 39) | GAAGTGGTCGTTAGTTTT |
| | | (SEQ ID NO: 1070) |
| 433 | (SEQ ID NO: 39) | GAAGTGGTTGTTAGTTTTT |
| | | (SEQ ID NO: 1071) |
| 434 | (SEQ ID NO: 39) | AAGGAATTCGTTTTGTAA |
| | | (SEQ ID NO: 1072) |
| 435 | (SEQ ID NO: 39) | AAGGAATTTGTTTTGTAA |
| | | (SEQ ID NO: 1073) |
| 436 | (SEQ ID NO: 39) | AATGTTTTCGTGATGTTG |
| | | (SEQ ID NO: 1074) |
| 437 | (SEQ ID NO: 39) | AATGTTTTTGTGATGTTG |
| | | (SEQ ID NO: 1075) |
| 438 | (SEQ ID NO: 39) | TAAAACGAGGGAGCGT |
| | | (SEQ ID NO: 1076) |
| 439 | (SEQ ID NO: 39) | AAAATGAGGGAGTGTT |
| | | (SEQ ID NO: 1077) |
| 440 | (SEQ ID NO: 27) | AGGAGTCGGTTTCGTA |
| | | (SEQ ID NO: 1078) |
| 441 | (SEQ ID NO: 27) | AGGAGTTGGTTTTGTA |
| | | (SEQ ID NO: 1079) |
| 442 | (SEQ ID NO: 27) | TAAAGCGCGGATATTT |
| | | (SEQ ID NO: 1080) |
| 443 | (SEQ ID NO: 27) | GGGTAAAGTGTGGATA |
| | | (SEQ ID NO: 1081) |
| 444 | (SEQ ID NO: 27) | TTTGAGCGGGTATCGA |
| | | (SEQ ID NO: 1082) |
| 445 | (SEQ ID NO: 27) | TGAGTGGGTATTGAGT |
| | | (SEQ ID NO: 1083) |
| 446 | (SEQ ID NO: 27) | TAGAGTCGAGGGGCGG |
| | | (SEQ ID NO: 1084) |
| 447 | (SEQ ID NO: 27) | TAGAGTTGAGGGGTGG |
| | | (SEQ ID NO: 1085) |
| 448 | (SEQ ID NO: 27) | TTTCGAGGGACGGAAG |
| | | (SEQ ID NO: 1086) |
| 449 | (SEQ ID NO: 27) | TTTTGAGGGATGGAAG |
| | | (SEQ ID NO: 1087) |
| 450 | (SEQ ID NO: 27) | TATGTTTTCGGCGAAT |
| | | (SEQ ID NO: 1088) |
| 451 | (SEQ ID NO: 27) | TTTTGGTGAATGGGGA |
| | | (SEQ ID NO: 1089) |
| 452 | (SEQ ID NO: 27) | ATAGTCGAGGAGTCGT |
| | | (SEQ ID NO: 1090) |
| 453 | (SEQ ID NO: 27) | AATAGTTGAGGAGTTGT |
| | | (SEQ ID NO: 1091) |
| 454 | (SEQ ID NO: 29) | ATTTGTTTCGATTAATTT |
| | | (SEQ ID NO: 1092) |
| 455 | (SEQ ID NO: 29) | ATTTGTTTTGATTAATTT |
| | | (SEQ ID NO: 1093) |
| 456 | (SEQ ID NO: 29) | AATTTGCGAACGTTTGGG |
| | | (SEQ ID NO: 1094) |
| 457 | (SEQ ID NO: 29) | AATTTGTGAATGTTTGGG |
| | | (SEQ ID NO: 1095) |
| 458 | (SEQ ID NO: 29) | GTCGATGTTTTCGGTA |
| | | (SEQ ID NO: 1096) |
| 459 | (SEQ ID NO: 29) | GGTTGATGTTTTTGGTA |
| | | (SEQ ID NO: 1097) |
| 460 | (SEQ ID NO: 31) | GAGTTTCGTTATATCGT |
| | | (SEQ ID NO: 1098) |
| 461 | (SEQ ID NO: 31) | GGAGTTTTGTTATATTGT |
| | | (SEQ ID NO: 1099) |
| 462 | (SEQ ID NO: 31) | TTTTTGCGGTTCGATA |
| | | (SEQ ID NO: 1100) |
| 463 | (SEQ ID NO: 31) | AATTTTTGTGGTTTGATA |
| | | (SEQ ID NO: 1101) |
| 464 | (SEQ ID NO: 31) | TACGTTAAGGTTAACGTATA |
| | | (SEQ ID NO: 1102) |
| 465 | (SEQ ID NO: 31) | TATGTTAAGGTTAATGTATA |
| | | (SEQ ID NO: 1103) |
| 466 | (SEQ ID NO: 31) | TGTTTCGTCGTTATAAT |
| | | (SEQ ID NO: 1104) |
| 467 | (SEQ ID NO: 31) | GTTTTGTTGTTATAATTAGA |
| | | (SEQ ID NO: 1105) |
| 468 | (SEQ ID NO: 31) | GGCGTAGGTTACGATT |
| | | (SEQ ID NO: 1106) |
| 469 | (SEQ ID NO: 31) | GGGGTGTAGGTTATGA |
| | | (SEQ ID NO: 1107) |
| 470 | (SEQ ID NO: 31) | ATTCGTTACGGATCGT |
| | | (SEQ ID NO: 1108) |
| 471 | (SEQ ID NO: 31) | TTTATTTGTTATGGATTGT |
| | | (SEQ ID NO: 1109) |
| 472 | (SEQ ID NO: 31) | AGTTTTCGGATTCGAA |
| | | (SEQ ID NO: 1110) |
| 473 | (SEQ ID NO: 31) | AGAGTTTTTGGATTTGA |
| | | (SEQ ID NO: 1111) |
| 474 | (SEQ ID NO: 31) | TATTTCGAGGTAGCGG |
| | | (SEQ ID NO: 1112) |
| 475 | (SEQ ID NO: 31) | TTTGAGGTAGTGGGAT |
| | | (SEQ ID NO: 1113) |
| 476 | (SEQ ID NO: 31) | GAGAGAAACGGTTTTTGT |
| | | (SEQ ID NO: 1114) |
| 477 | (SEQ ID NO: 31) | GAGAGAAATGGTTTTTGT |
| | | (SEQ ID NO: 1115) |
| 478 | (SEQ ID NO: 31) | GTTTGATGGATGTTTTT |
| | | (SEQ ID NO: 1116) |
| 479 | (SEQ ID NO: 31) | GTACGACGGTAAGGAT |
| | | (SEQ ID NO: 1117) |
| 480 | (SEQ ID NO: 31) | GTATGATGGTAAGGATTA |
| | | (SEQ ID NO: 1118) |
| 481 | (SEQ ID NO: 31) | AGTTGTTTCGTAGATATT |
| | | (SEQ ID NO: 1119) |
| 482 | (SEQ ID NO: 31) | AGTTGTTTTGTAGATATT |
| | | (SEQ ID NO: 1120) |
| 483 | (SEQ ID NO: 40) | AGTAAGCGGTTGTATAT |
| | | (SEQ ID NO: 1121) |
| 484 | (SEQ ID NO: 40) | AAAAGTAAGTGGTTGTAT |
| | | (SEQ ID NO: 1122) |
| 485 | (SEQ ID NO: 40) | AAATTGAGCGTTTATGT |
| | | (SEQ ID NO: 1123) |
| 486 | (SEQ ID NO: 40) | ATTGAGTGTTTATGTGTA |
| | | (SEQ ID NO: 1124) |

TABLE 3
Genes or genomic locus associated with genomic sequences according to SEQ ID NO
1-SEQ ID NO 64.

| Genomic | | | |
|---|---|---|---|
| SEQ ID | Bisulfite SEQ ID | Genbank Ref. ID | |
| NO: | Nos: | No:/contig | Description |
| 1 | 304, 305, 420 & | AL355481.12.1.122435 | Hypothetical protein-leucine rich repeat |
| | 421 | | (Vega gene ID |
| | | | OTTHUMG00013001328) |
| 2 | 306, 307, 422 & | AC027601.25.1.192732 | 5 azacytidine induced (Ensembl gene ID |
| | 423 | | 141577) |
| 3 | 308, 309, 424 & | AL831711.4.1.8801 | No known gene, close to ATP/GTP- |
| | 425 | | binding site motif A (P-loop) protein |
| 4 | 310, 311, 426 & | NM_002938 | RING FINGER PROTEIN 4; RNF4 |
| | 427 | | |
| 5 | 312, 313, 428 & | NM_021926 | HOMEOBOX PROTEIN ARISTALESS- |
| | 429 | | LIKE 4;. ALX 4 |
| 6 | 314, 315, 430 & | NM_004852 | ONE CUT DOMAIN FAMILY MEMBER |
| | 431 | | 2; ONC2 |
| 7 | 316, 317, 432 & | NM_002507 | TUMOR NECROSIS FACTOR |
| | 433 | | RECEPTOR SUPERFAMILY MEMBER |
| | | | 16 PRECURSOR (LOW-AFFINITY |
| | | | NERVE GROWTH FACTOR |
| | | | RECEPTOR) (NGF RECEPTOR) (GP80- |
| | | | LNGFR) (P75 ICD) (LOW AFFINITY |
| | | | NEUROTROPHIN RECEPTOR |
| | | | P75NTR). NGFR |
| 8 | 318, 319, 434 & | NM_016192 | TRANSMEMBRANE PROTEIN WITH |
| | 435 | | EGF-LIKE AND TWO FOLLISTATIN- |
| | | | LIKE DOMAINS 2; |
| | | | TRANSMEMBRANE PROTEIN TENB2; |
| | | | TOMOREGULIN; PUTATIVE |
| | | | TRANSMEMBRANE PROTEIN WITH |
| | | | EGF-LIKE AND TWO FOLLISTATIN- |
| | | | LIKE DOMAINS 2. |
| 9 | 320, 321, 436 & | NM_005221 | HOMEOBOX PROTEIN DLX-5 |
| | 437 | | |
| 10 | 322, 323, 438 & | NM_080552 | VESICULAR INHIBITORY AMINO |
| | 439 | | ACID TRANSPORTER (GABA AND |
| | | | GLYCINE TRANSPORTER) |
| | | | (VESICULAR GABA TRANSPORTER) |
| | | | (HVIAAT) |
| 11 | 324, 325, 440 & | NM_001208 | Transcription factor BTF3 Homolog 1 |
| | 441 | | |
| 12 | 326, 327, 442 & | NM_005904 | MOTHERS AGAINST |
| | 443 | | DECAPENTAPLEGIC HOMOLOG 7 |
| | | | (SMAD 7) (MOTHERS AGAINST DPP |
| | | | HOMOLOG 7) (SMAD7) (HSMAD7). |
| 13 | 328, 329, 444 & | NM_002146 | HOMEOBOX PROTEIN HOX-B3 (HOX- |
| | 445 | | 2G) (HOX-2.7) |
| 14 | 330, 331, 446 & | NM_025078 | Homo sapiens hypothetical protein |
| | 447 | | FLJ22378 |
| 15 | 332, 333, 448 & | NM_001116 | ADENYLATE CYCLASE, TYPE IX (EC |
| | 449 | | 4.6.1.1) (ATP PYROPHOSPHATE- |
| | | | LYASE) (ADENYLYL CYCLASE). |
| | | | ADCY9 |
| 16 | 334, 335, 450 & | NM_001706 | B-CELL LYMPHOMA 6 PROTEIN |
| | 451 | | (BCL-6) (ZINC FINGER PROTEIN 51) |
| | | | (LAZ-3 PROTEIN) (BCL-5). |
| 17 | 336, 337, 452 & | NM_014068 | SEEK1 PROTEIN |
| | 453 | | |
| 18 | 338, 339, 454 & | NM_017745 | BCL-6 INTERACTING COREPRESSOR |
| | 455 | | ISOFORM 1 BCOR |
| 19 | 340, 341, 456 & | NM_005643 | TRANSCRIPTION INITIATION |
| | 457 | | FACTOR TFIID 28 KDA SUBUNIT |
| | | | (TAFII-28) (TAFII28) (TFIID SUBUNIT |
| | | | P30-BETA) |
| 20 | 342, 343, 458 & | NM_007374 | HOMEOBOX PROTEIN SIX6 (SINE |
| | 459 | | OCULIS HOMEOBOX HOMOLOG 6) |
| | | | (OPTIC HOMEOBOX 2) |
| | | | (HOMEODOMAIN PROTEIN OPTX2). |
| 21 | 344, 345, 460 & | AP003500.2.1.161078 | Situated between Ensemble gene IDs |
| | 461 | | ENSESTG00002308609 and |
| | | | ENSESTG00002308691 |
| 22 | 346, 347, 462 & | AC092385.4.1.97218 | SPIR-2 PROTEIN (FRAGMENT) |
| | 463 | | |
| 23 | 348, 349, 464 & | AC007223.5.1.159520 | Situated within Ensemble EST ID |
| | 465 | | ENSESTG00001971415 |
| 24 | 350, 351, 466 & | NM_005229 | ETS-DOMAIN PROTEIN ELK-1 |
| | 467 | | |
| 25 | 352, 353, 468 & | NM_000179 | DNA MISMATCH REPAIR PROTEIN |
| | 469 | | MSH6 (MUTS-ALPHA 160 KDA |
| | | | SUBUNIT) (G/T MISMATCH BINDING |
| | | | PROTEIN) (GTBP) (GTMBP) (P160) |
| 26 | 354, 355, 470 & | NM_005427 | TUMOR PROTEIN P73 (P53-LIKE |
| | 471 | | TRANSCRIPTION FACTOR) (P53- |
| | | | RELATED PROTEIN). |
| 27 | 356, 357, 472 & | NM_002093 | GLYCOGEN SYNTHASE KINASE-3 |
| | 473 | | BETA (EC 2.7.1.37) (GSK-3 BETA). |
| 28 | 358, 359, 474 & | NM_006765 | N33 PROTEIN |
| | 475 | | |
| 29 | 360, 361, 476 & | NM_016192 | TRANSMEMBRANE PROTEIN WITH |
| | 477 | | EGF-LIKE AND TWO FOLLISTATIN- |
| | | | LIKE DOMAINS 2; |
| | | | TRANSMEMBRANE PROTEIN TENB2; |
| | | | TOMOREGULIN; PUTATIVE |
| | | | TRANSMEMBRANE PROTEIN WITH |
| | | | EGF-LIKE AND TWO FOLLISTATIN- |
| | | | LIKE DOMAINS 2. |
| 30 | 362, 363, 478 & | NM_004429 | EPHRIN-B1 PRECURSOR (EPH- |
| | 479 | | RELATED RECEPTOR TYROSINE |
| | | | KINASE LIGAND 2) (LERK-2) (ELK |
| | | | LIGAND) (ELK-L). |
| 31 | 364, 365, 480 & | NM_018950 | HLA-F gene for human leukocyte antigen F |
| | 481 | | |
| 32 | 366, 367, 482 & | NM_000038 | ADENOMATOUS POLYPOSIS COLI |
| | 483 | | PROTEIN (APC PROTEIN) |
| 33 | 368, 369, 484 & | NM_000610 | CD44 ANTIGEN PRECURSOR |
| | 485 | | (PHAGOCYTIC GLYCOPROTEIN I) |
| | | | (PGP-1) (HUTCH-I) |
| | | | (EXTRACELLULAR MATRIX |
| | | | RECEPTOR-III) (ECMR-III) (GP90 |
| | | | LYMPHOCYTE HOMING/ADHESION |
| | | | RECEPTOR) (HERMES ANTIGEN) |
| | | | (HYALURONATE RECEPTOR) |
| | | | (HEPARAN SULFATE |
| | | | PROTEOGLYCAN) (EPICAN) (CDW44) |
| 34 | 370, 371, 486 & | NM_004385 | VERSICAN CORE PROTEIN |
| | 487 | | PRECURSOR (LARGE FIBROBLAST |
| | | | PROTEOGLYCAN) (CHONDROITIN |
| | | | SULFATE PROTEOGLYCAN CORE |
| | | | PROTEIN 2) (PG-M) (GLIAL |
| | | | HYALURONATE-BINDING PROTEIN) |
| | | | (GHAP) CSPG2 |
| 35 | 372, 373, 488 & | | EYA 4 EnsEMBL ID ENSG00000112319 |
| | 489 | | |
| 36 | 374, 375, 490 & | NM_000455 | SERINE/THREONINE-PROTEIN |
| | 491 | | KINASE 11 (EC 2.7.1.—) |
| | | | (SERINE/THIREONINE-PROTEIN |
| | | | KINASE LKB1) |
| 37 | 376, 377, 492 & | NM_003242 | Transforming growth factor, beta receptor |
| | 493 | | II (TGFBR2) |
| 38 | 378, 379, 494 & | NM_001753 | CAVEOLIN-1; CAV 1 |
| | 495 | | |
| 39 | 380, 381, 496 & | NM_001257 | CADHERIN-13 PRECURSOR |
| | 497 | | (TRUNCATED-CADHERIN) (T- |
| | | | CADHERIN) (T-CAD) (HEART- |
| | | | CADHERIN) (H-CADHERIN) (P105) |
| 40 | 382, 383, 498 & | NM_000044 | ANDROGEN RECEPTOR |
| | 499 | | (DIHYDROTESTOSTERONE |
| | | | RECEPTOR) AR |
| 41 | 384, 385, 500 & | NM_032546 | RING FINGER PROTEIN 30, RNF 30, |
| | 501 | | |
| 42 | 386, 387, 502 & | NM_033178 | DOUBLE HOMEOBOX, 4; DOUBLE |
| | 503 | | HOMEOBOX PROTEIN 4. DUX4 |
| 43 | 388, 389, 504 & | NM_003573 | LATENT TRANSFORMING GROWTH |
| | 505 | | FACTOR BETA BINDING PROTEIN 4.; |
| | | | LTBP4 |
| 44 | 390, 391, 506 & | | CGI-20 PROTEIN |
| | 507 | | |
| 45 | 392, 393, 508 & | NM_014459 | PROTOCADHERIN 17; |
| | 509 | | PROTOCADHERIN 68.; PCDH 17 |
| 46 | 394, 395, 510 & | NM_005285 | PROBABLE G PROTEIN-COUPLED |
| | 511 | | RECEPTOR GPR7.; GPR7 |
| 47 | 396, 397, 512 & | NM_016269 | LYMPHOID ENHANCER BINDING |
| | 513 | | FACTOR 1 (LEF-1) (T CELL-SPECIFIC |
| | | | TRANSCRIPTION FACTOR 1-ALPHA) |
| | | | (TCF1-ALPHA) |
| 48 | 398, 399, 514 & | AC139426.2.1.188448 | Situated between EnsEMBL ID |
| | 515 | | ENSESTG00003302072 and EnsEMBL ID |
| | | | ENSESTG00003302068 |
| 49 | 400, 401, 516 & | NM_005904 | MOTHERS AGAINST |
| | 517 | | DECAPENTAPLEGIC HOMOLOG 7 |
| | | | (SMAD 7) (MOTHERS AGAINST DPP |
| | | | HOMOLOG 7) (SMAD7) (HSMAD7). |
| 50 | 402, 403, 518 & | AL512590.2.1.165432 | Homo sapiens mRNA for KIAA1529 |
| | 519 | | protein EnsEMBL ID ENSG00000029402 |
| 51 | 404, 405, 520 & | NM_001866 | COX7B |
| | 521 | | |
| 52 | 406, 407, 522 & | NM_001900 | CST5 |
| | 523 | | |
| 53 | 408, 409, 524 & | NM_001990 | EYES ABSENT HOMOLOG 3. EYA3 |
| | 525 | | |
| 54 | 410, 411, 526 & | NM_002032 | FERRITIN HEAVY CHAIN (FERRITIN |
| | 527 | | H SUBUNIT). FTH1. |
| 55 | 412, 413, 528 & | NM_002938 | RING FINGER PROTEIN 4.; RNF4 |
| | 529 | | |
| 56 | 414, 415, 530 & | | HPP1 EnsEMBL ID ENSG00000144339 |
| | 531 | | |
| 57 | 416, 417, 532 & | NM_000852 | GLUTATHIONE S-TRANSFERASE P |
| | 533 | | (EC 2.5.1.18) (GST CLASS-PI) (GSTP1- |
| | | | 1) |
| 58 | 418, 419, 534 & | NM_007084 | TRANSCRIPTION FACTOR SOX-21 |
| | 535 | | |
| 59 | 65, 66, 77 & 78 | NM_003299 | |
| 60 | 67, 68, 79 & 80 | NM_025218 | |
| 61 | 69, 70, 81 & 82 | NM_001374 | |
| 62 | 71, 72, 83 & 84 | NM_003714 | |
| 63 | 73, 74, 85 & 86 | NM_002196 | |
| 64 | 75, 76, 87 & 88 | NM_000484 | |

The application's sequence listing, which the Patent Office published only in electronic form, follows.

SEQUENCE LISTING (14624 sequences)

SEQ ID NO: 1 - DNA, 2280 bp, Homo Sapiens
accagcacagaattgctaccataggatcgcagcctaagcactagagtgacattaattggtcatgcttaactgcctcaaaatcattttttaaataattacactgatactataatagaaatcatgggtacttattttacattcagatggaaggcattattggatatgtattaaaaaaaagaccccctgaaaaaaataaaataaaataaaacatcaccatcaaaataaaagaacccaaaacaacccctaaaaacttccctcaacaaaatacattgttaactcataaaatggactgatgactagccatgcaaatgtcctaaataaaacctttacatttttttcacagttaacttatgctctgaactgcctaccgatcacaaataatggcgaaatggcactttctgattatactgtattttgtttatagaaagtttgatacgatggaacttatcaggtaagagggtgggtgctgtgaacgagatgccgtctccagtcgcgggggcgggcagagtccctggagcgcgtggattccatgcgagccatgcagcactttttgttttttgtcagaagtcaaagttacttatttacaatacattcatgccttcgtgcaactgcccatccctgcgtagccaacagggagccatcacggggctaatccacaggggaaaaatagatatctatctctctatatagatgtggatatatgtatatatgtatagaaccgcggcatccaaccccacaggccccggggccgagggcgagggcactgtcagttcttccagcagggtcgtgctgggctttctgtcaaaaggggctctcagcaaagagcgagctggctgcgctctcccagctctccacagtctgctctttgtttcaaggagggagctaagtaaggggtcaggccctttcggttgtgcgagctcacagttatttatctacttatgcccatccaggctgatggcgcggggatttgggtacacgcccctccagcccccggggtgcctgcggtggggaaggatgtatcgccttccctctgccctcccctattggggttggggtcttagtctgagagcgagtgagagccacagtcatacactctgtgggccccatctgcgttgtaaggcccattgtgccagtaggaagagtcacagactgtctgtagggaattaatctcggacgcggaggagttggcatctcgtctcttggaccgctttcggttcctcaggataaacacgagcatgcccaccacggtgaaggcggaggtgacaaacaccagcagcagtcccgggaccaacaccgagatggacaccctgctggtgtctaggtaggagttggagtgcgtcccggtctccgccaacccagtgctgtttttactgtgcgaagttaacgtgggcgagatcctagcgtacagctgagggcagatctcgtcattggagaggagcatgaaatcctttctaaagaagttcaccggcgtctcacacttgaggtcgctcatcagcacttcggaacccaagcgttctgcccactgcttgaaaggcacaattgtgcaggagcactcccaggggtttccgtggaggtctatctggatgatggaggttaactggtccagcacccctgccaccgggaggtacatgaagtaattgttgtgcaggctgagtttagagagcgagaccccagcgaacacgtccacaggcagggacctcagcaggttgttgttgagaatgaggatcctcagtttgggcatggcattgaaagtgcccgggaggatgagctggatagcgttgtactccacgttcaggtactctaggttttgcagccccgcgaatttctcccgggacagcgtgtccaggtaattgctatccatgtatagccacctgaggtccaaaaggttcttgaaagtgttgttctctacagtagcgatgttattgttgcccagatccaacagaatgaggttcttgtaatccacaaagtgcgattttcggatgctgtggatcttgttatctcgtaggaaaagctcctgcacgttagagagcttgggcttcaaatcagccaagctgctcacgttcctgttgttgcagttcatctttaaacccgaccctgggatgtggtcgcagctgcagcccccagggcagggtaaactgttagctaagggtttgttcctggagctacccgtcgctatcgctgctgtgggtctgattttgatctgccagttgcctgggatctttgtacctccgtttggagcagaccctggtgtggcatgatcctcttgcccatttgtcttga

SEQ ID NO: 2 - DNA, 2477 bp, Homo Sapiens
tggcacagacatggcccttaaagccaaaaaccatgatggagtgaaggacagctgtgctcagacctgcgtcctgtcctctggaggctgctgtggttctggggatgagtcggaggtgggcaggcagcggtctccggggcctgcagcagggaggccaccacctgcacagcagaacacagcaccattccacagggagcatcccggggcgggcagcaactctggaggcacccccgggaaggagccaggcatgggggaggcggaggcgaccccagaagcagaggagccgctggggagccacggccttctgggtgtggagctgtggaggatgagtgccacccctcccttccgggccttctactctgtagggatccctacgtccaggaccatttgattgtcaaggtctcggcaccctcgtcaggtcagctgggggccaaggcccctaactccgaggactggggccgccaacatgggcagcagcacaggaggccgagaggaggtccacaagggctgcacttccttcctggctgcagtccaccccccagagcagggcgggcgtggagccactctcaccagtattgttggccttgagggcctggtgggcagtgccgcctggtgtgggggacagctcctgagcaggctgccgcattcctggcactctggtctccctgggattctcaggtggcccacgctcggcagtgctcgccttctgggctctcagggctcgtttctgttgcagctcctgcagtgggagcatcgctgagcactgtccctgggagaggacgaccccaggctccacagccaagctgccctgaggctaagtgtcccggggcccagggagccccagcagcagccccgcacggtcaggcctgggccacggtgctgctcagtggtccctgcgcggtcagcacctgaatggctgctcgcctggcttggcgtgccttctcctcccgggccttcctcctggctgcctctttctgctggtgcaggtccaagagggtcccctcgcctgaccgctgccgctgctcctgccaaagaagccggtgccatgtggcgtttacatctggaagacggaatccagacccagaccagaggtttccccacaacgccctggagtcccctagagttcgtggaatctcagggccagcagggaaagtgaaaccccaccaggaccttgaacctgccatttctctgctctacagaggatgagccctacgtcgcaggtggccaacagttctggcgtgggggagacagctctgcccccacagaacgtcctcctgagactctccagcctgggatggacccagcaggcgtttcctgacacccaggccctgaggaccgccagtgaggaccaccctgactgtccgcggggacccagggtcaagaaggatgctgcacccagagacggggcccacgagcaatcctaggctttgattccacctgtcccagaaactcaaacccctgggattctgggccagaccccccgggggagcatggagtgactgagacgcccacactgacctcccgcttggcctgaagcaagtgctccaggcgggcagctcctgctccgcgccgctgcacctggtgccggtaccagcgctggatggtgacagtggcctggttcacctggtggataaacctgcccggagagcaggactcagggccaagacaggaccagcgccccggcaggacccagctggctgctggtggaaggtcgagccggggaagagagaagccggcggctgcactcaagtagcccttttcacaaggcaggaccagcccacctggaccattttcacatggcaggaccagccgcctggaccagctccactaaaacccaaaaccttcttcctgggaaggtgcccaggggagaggaaacgcctacccacgcaggcctgtgtggccttatttacaattgccaggaagtgggaagagttcaaatgcccatgacctggctacagcgtgaatactggatggcgggaccctacccacaggcaacaggcccgggactcaggccagtgcagaccacaggccgtggctccacagagagggtggtcggaacaggcagggctatgagggaacagactggtggctgctggcatctgggcggggaaggagctcgagggaagcctggtggtgctgggccgtttccttatcttggtctgctgtgtccacagacagcactatacaccctggtggaatctcatggaactgcacacttacaatgggcaccttctattgtatacaaattatactaagtaaaactgattaagcaaaaaaaaaaatgcttcaccttggctctcgggaccatgtgtggattctctcagcaaaggcactaacagagaacccagaacgtgtgagccctagctcgggagcagtctgccccgggcagaactggggggcttcaaggggttgcgggcttctggtcccccttccctcgtgccacccaccgcgtctacaggcctggtctccctagccctaac

SEQ ID NO: 3 - DNA, 3685 bp, Homo Sapiens
caagcctccttccccggcgcacaggcacgcagccacaggccaagctgcgacgcgagctccgcgcgcgggatctccgcaaaaggtccgcccgatgcgttgggcgggaatcgagcccgggtcaactgcttggaaggcaactatgctcaccactataccaccaacgccgcacggcgcgggcagccccgccgcgccggcccggggctcccaccagcgcgccgccgacgcccggggcaggccggccccgacgcccggtccgtccgcccgcccgcagctccgcgctgccgcggcctctccaaaggccgccccgcgccccaccggtgcaaggccagcgcggctgacccgttacgcccgcctgcctctgggggcgctctcgctcactcgccgcctcgggcccccagagcccttccccaacaggtgcccgggggggaaacggccggcgccggcagggtccccactcctacgcttcccaccgggcgcagggccccgtgtgtcgcagaaagcctcttccgacaaccactttgagccggcagctcgttgggcgccgtgcagggccagaggaggcctcccggctgccgctaccaagccgcggacgagaagaaaagacaggaggccaaggaggcccagaaggccaaagggccaggcaggccaggcccgagatggcaccctgcgactagctggagggcggaggaaggagaaggagggcccacaggctgggtccgaggcggcggcccaaaaagcacggctgcctccccgtcggggaatcgaaccccggtctcccgcgtgacaggcggggatactcaccactatactaacgaggacgacggcgacggtcgccgggacgccagaccccactccgaccgcggacgcctagccctgccttgatcccctcccccgacggcaggggccgggcgcgtgctcgccttccacccgccgcccgccgcccgccacccgccacacgccacccgtcacctgccacccgccccccgccaccgttggcacgacctaccccgacacccaacaaagcaccctgcgatcccgctgggacccggagccggagccggaccccgacaggtaccggagcggcgtggaacctccccgcgcgccctgcctgctgtctccaacgcggggatcgcgccggggcaggaggaggcgcgggcgaaacagtcaggccgctgctcctaggacgcggtgggcgcacgccctgcggggttcggcgagcggaggcgcgggggctggggcgtgcgccggcggcggccggcccgacgcggaccctttgggtccggggtggggacgcgggggcgtccacgccaacgccagccggctccgttcacttggcgcccgctccccccgcgcggtccgtcggttgcgcaccgaacccagacaggcgccggccaagggcgcaggcgttcgcgccgggtcccagccatgccagcggcgaagcgccccggcgcgccgtcaggatggccgagcggtctaaggcgctgcgttcaggtcgcagtctcccctggaggcgtgggttcgaatcccactcctgacaagccgaccttttggcccgcccgccggagggcaacgcccatggcaaccctggagcacctttggccgcttcctgccttgagcccttgcccgctctccagactccagcccccttgaagcaagcctccaaaacgccgccgcttctcaggcacgtccgttcttcctgcccacccgccggctgtcgcagaaacagcccaggaccatgcgccagcgcccgcgaccctctaccaattgcccttcggacagacgccctccccaccacctcacacgccctcttccctggccccacacacagcgagcgaccgcgaccaccttccacgctcttccctgcctatctcctccgcccgccttctcctcactcgcccaaacagacacagcccagattcttcccctattcctccttttccctccttcctcccaccggcctccgcccaccgcccaccgccttgaatcgccgctgcgctgcccagaggcgtcctggcctgaacagcccgcccggtttcaccctccaacttctgaccgctgagcagcagcgagcgactcgctcgtggagccgcacacacgtctcccaccagaggcacgccatccaacatcctgtcctttcctccgacccctcggaccccggccgcgcattccattctgccgacaccctagccaggtcgccgatcccacctcgctacctgtgctcccttcccgctaacacctgcctgccggcccacctgcagcccggacgcctgccggccagaggcagcgggaaccctgcacacagccgggcaggcgagtccaaacccggaaagacagcccaagaggaatcacgagcggaagccctagatccccgtcacccgcccacaaacgcctggccccgccgggaccagctctgcgccacagcgcatccccacgcgggaagccgcggcctgggccgtcccagccacacccagcgcgccttctccagggtcagccagctgcggctctgccgaagcgctcctccgctcctttctcgcgctccagcctccctaccagcccagggggccggaccccaagtgcgagccggtggcgtgggtcagagcgcaggagcgaggcgcccacggacctggtctgcgtttctgagccgcacgccacggctgcgagacccgttccccatcgccgcccccgctcgctgacacacccatcccgcctctcacctgctggtgacacaagtgagaaggctggccccacggtggtgaaaaaaaaaaacaccacacgaaagaaagaaagaaagaaagaaagaaagaaagaaagaaagaaagaaagaaagaaagacagaaagaaacaacaaaaacaaaacacaaaaactctgggtctgtgccggggatccgcgctcagcaaggcccgccacagcaaatctgcccacacgggcattcgggcgcgggccacggccggtccttcccctggagaccccggcgggcagtctctcgaccctgggcggcagagaaagcgcaagatgggacgagtcggcctctctccctccgctctccctccgcgccccgcctcaggtccctcgacgtgacgagagcctccccttctgctcgccccatcgggccagcctctcgtggacgctgcaataggacggaggcccacggcaggcggtgaccagtgaacggcggctggtggcgagttccgctgtgccagcttccgttggcgtttgccatcggtgcatgggtggttcagtggtagaattctcgcctgccacgcgggaggcccgggttcgattcccggcccatgcagcacgccctcccattttggtgctgcagcagcaccaaggcgtagctgcgctcgcctctgccgcctccttacactcggggcgcgcgagcgagtccggcaccggctgcgctcccacgcgcgacggccctctgccctttcttccgtgcctctctcgactgacttagggatgagcctaccccccgcacccacacaccttggtgacaacaacccctccagacacgagagcgcgccagacaccagaacttggcagcctcctggtcctgtttctcttcattgccctgccaccgcctctgcccgacgcatttcacttcacggaacaccgccaggcaccacgggcttgcagccactcgcaccaccccttctcttcacatttcaccgcctcgcctctctc

SEQ ID NO: 4 - DNA, 2407 bp, Homo Sapiens
taaggtctgggtattctcaggcagcagggacaaggtgggcttttttcctggttgctaaacccacgtcaaagtcgagctcagggactggagctcaagaaacccaccgcccattctccagtccgaccggggacctgcatgcacctctgccgtgctgccctgagtcctccaatcctccacactcttcctctgttatgtacacgtctccacccaggcctgcaaaagtcccagcttcctccaggggcagggacccgcacgccggcccagggcttggcacgcggggatgctgaaacagggccaggcctggtttccagccgatcgtcagagtcccaaggcccagcaaccttcctcacaaaggcctcgttaagaggcgaggaaacaagagccgggagaggggcgcggaacggcgggcgggacgaacgaccagctccgcgcctccggccagctgcgtcgagccaggggcaccgcggctgttgtgcggctggaaatctaggaatgggaaggttcggggcctgctcggctccggaggcagctggcgggtcgtccctggcggcgttggagcggtcagtggcagccgggcacgggcgaccgggtcgcccgggtcgccctcagaccgtgactcccgaaaaaccttgcgggcggggcgcgcccgcgccgtctcttgccggaaggtgcgagttagtgcgctcgattgtgggcgggggcggaaagaggcgcgttttaaagtggtaacagatggttttcttatccaataggattaaaaaatttgtccttacccggccgaccgcggaagtagagtaggcgggcggccaatggggacatgatggggggcggagccgaggcctccgaagcggaagtgggttgctgttgaggcggcggcatctttctcgaggagctctcctgggcggctgaagaaggagcttcttctccggagtgcgccggcggtggcgcctgcggacctaactagctccaggttaggccgagctttgcgggaaagcagcggtaagtcagggccttgcagatgcgaggtttaggcagcttcgcggcctacagaggcctcggcccgcgcctcttgggggagccgcgctgcgcggcttgacccagccgaggctttgcagcccgggacctcgagccagctctggtcgctcgcactgccgtccgcgcgggcgcaccgagcccggcttggcgcgggcaacagaagttaggaggtctgcgtctgggtctcggctcaccctggggggccgcggccatggggcttagttcctagcctaggaagggaaactgagactctgggaggggcaggaacgcccccaaggtcacttggaaagtcgggcaggatgtgctgttagggggaagacccgggcagggtttttgttccccgctgacgacgcctcctttgtgtgttcgcgccgccgccccgccatcgtggggcctgcgagtttgccggggtgcgtgggccgcgtggcggggccttttgtaggtcgggaggatctgagtacgggtgcgggcctgaccgtgggggcgccgaggtcgcagtctaaaacttagtagggcctcgatttccgggcgcgcttccgggccccggctggtggttggtggaacgtgcgactgtgaggcttgcggcccagccctgcaccgctcgggcccttcaccgctctggcgcgcctatagacaggtgtatgaagattctcacgacccgaaacagagttgctagtaaacaccgcttttccgcctttgatccatcggggaagagggaaaaggatagagcttgggcaagccgttttggtagggatttcagcttttgtctttcacttgtcagttcccatagacgttcacaaacttaataatcttcgttctgtttctgcaccaagttcttgagccagacgtagggtctcagctctggagcctggcttagactgtccaactgactggggagactgaggtccagaaaagtgaagtggtctgcccaaggtcacatagccagctatttggcagcagatgaggttaagtcctacctgcaagatttgggttttgaattcattgaccaggagttttgggaccactgtcaataaaagagacattgaagggaatcttttgttactttcttggtgatttgctttttaatggacaaggacatattgggttcagttttatctgtgagtttgaggtgaaatagaggcattcgagtagcaagatatattgctggcttttgtattgcctgaatttgagcttccaaaaatcttactttaacacatcgtttattgatcttttcttgaattactacctttgtaaggaccttttgtaaacattgtttttctaatcttcatgaaatcttaatgccatacgtaaactatttctttttatataatgtatgcacatctgtgctttgtacataaaatgagtaagattt

SEQ ID NO: 5 - DNA, 2229 bp, Homo Sapiens
tctttcctcggcgctggctggtgcgggttggggtcaggtggagaagccgctctttgttaaggtgacagaacgtgctgggggtgggggccggggccagggccggtgcaactagggggccgctgccctttcctggacacagtggaagcttcttccgcatcaccaaatttttgtcatcctttctgagggacctgcttccaggcagcacgcaagttgttgtcccgggtttactccgcacccctctactgggtgaggaaggagcatcttgaatggagatgggggtgtccccggtttatacatctgcagagaagaggtgtgccgggctgcacctctggaggccgcggtaactgatattagagaagaccccggttgcagctgggaaggctcactggctggaaagaggtgcctcctccttccagcaaagggccctgtttggaagggctgcttctcacctgtctagtggcaccacaggacggtcggcttccactcgaattcccccggacggtatcatcacatagccgggtcctcgcagtgttggtttcccaatccgatgactgtcacctcggtgaggacctgtgctgatggccggagaaccctgcgctgcgggcgcacatggccaggtggcgcctggcaggcgacgtccgggtgcaggacggcgctcttaccgccccaccccaaaccgttgcctgggcctaggtccttcggcttcctgaacaggggtttggggggctaaggacgctgaggctccgggggcaggaagttctctctggttaagcgttctctcttctctccggcatacactcccctacccacccacctcgcctaccctcggggcgagaggctcaccaaggcagggcgcgccccccccatgaatcatcccaaggcctctgagccgcgggggctccgggcaactatccccctcctctcctggcctcaggcaccccagtccaggggtctgcagagaagcccgaagcccggacaaacgcgccggacgtcaacaacctctcatccctggcagcagcaaaggccaatatatttccatttcttatttcagtttgccaccaaaacaaagctgcgcgcggctgagggcaggaaggcgctgagaccgagaagaagggacgtcccggagaaagtgcgcccagctgatcttagaaaccagagtcctccgggacttcgccgagattttctgtagggcgttttaatctgttttcctactgcgtgccggcgtcgcagcgcgtgcggctcagggcttggtgactccggcttagcccggcggtcgcggcgaggttcctggcgcagccgcttggaacttcgcattagaatcgggaccgcgcaaatgccctggctgaagtgtcaccctattcaagaaacactgctgtcaggaacaaaatggggtccccggtgctccgaagtatcttctgaaattttcttaaaacaacttacaaaaaatgtttttgctttaacgttttacaacgtttaaggaaacatgtaaatggtctgtttctttatcgagatggtcgtcctaactaacagtgtacacatacataacaattcttccaactttcctcctcagagctaagcacttcactatatgtaaattataataaagaaaagattgtgcaagatcatgcaagtcgattgacttaaaatattgagttttaatccaggccctctgtttttctatttaacaacttttgtgtttggaccagactggtgaagcaggctatggaaattaacaaagtaaaaaattaaaagcatcttccttcgccatccctccctccaaaattaaacaacagtcgccccttcctgagcaggcttcagtcccaggctcgagttttcctgcgatcaccccacagtcacccacagcagctgttgctgcttctgtcgggttttcgtttctgccttctttgggtcgtctcttgtatacaaaacacaccccagttctctaactaaattcaaatacgaccccggcagaatttacacatttcgtggtgcatggattgtgtcggtgcaggggaaataaataccctctggtatttaaccactgagtctaattcgaaaaatcgggactgggcccctaggcggcaccccaggggctccaacctggcccgcgcctccccagaccttggcgctgagagcgctgcttttgcgggtgggtggacggagaggtaacaatctgctttcaacaaaaacctgtcgccaccgaatcgaaagcgaaagggaagggagaag

SEQ ID NO: 6 - DNA, 6887 bp, Homo Sapiens
cgccgcccgtgggccgccggccggccgcagctcgctggcgacgagggcactacagttgctctgaccgcgtagattatgcatgtcccggcctcgggaatttaccatgcattagaatacattagcgcctgcattttaaaaggctaaactattggctcccagctagggactctcggtaagtggcttgttagtgacgagtgtttgtctatactggcacatagcggagtcttttgctcccggcttactcgcctccaggaaagctttggggtgaggcgaaggcgattgaagcaatgccccttcccccagatcgcagctgctcaggggggacacagcacggcatctttcaccgaatctctctcgctcgctcgcactccagcctccctctccccagcgacccccccaccttctcctccctccctctccttgacgtttgattccagtagcaaaggaggtaaaaaaggcaccgagccgtcagccaaacctgaaaagtgcggccccgccccctccacagccactggtagcttcccgtggaaggcccgcctcccggggcagctgcggcctcggagtggttgcgcttggcgcccgtcgggcgtggccccgccccaggtccgggagggtaggttggctgccccggcgagcggcagagcccttctggacagctcccgctcacccaaacagaagacgtcggcgccggagcgggctcggacatggcgaggctgcgagccggcccgagcggcggggcccggtgatccctccctccctccccgtcccctcccctctcccgcacgcacgccccgtccgcccccaccccgcccccaccccgggcgagcccgcccgcagcccggggcgcacacccgcacgcgcactcctctccactcactcccgcgcccgcccccactcccgcagccgagccccgccacgcgcgccttgcccgcccgccggccgcccccgccgcccccgccgcccccgggccctgatggactgaatgaaggctgcctacaccgcctatcgatgcctcaccaaagacctagaaggctgcgccatgaacccggagctgacaatggaaagtctgggcactttgcacgggccggccggcggcggcagtggcgggggcggcggcgggggcggcgggggcggcggcgggggcccgggccatgagcaggagctgctggccagccccagcccccaccacgcgggccgcggcgccgctggctcgctgcggggccctccgccgcctccaaccgcgcaccaggagctgggcacggcggcagcggcggcagcggcggcgtcgcgctcggccatggtcaccagcatggcctcgatcctggacggcggcgactaccggcccgagctctccatcccgctgcaccacgccatgagcatgtcctgcgactcgtctccgcctggcatgggcatgagcaacacctacaccacgctgacaccgctccagccgctgccacccatctccaccgtgtctgacaagttccaccaccctcacccgcaccaccatccgcaccaccaccaccaccaccaccaccagcgcctgtccggcaacgtcagcggcagcttcaccctcatgcgcgacgagcgcgggctcccggccatgaacaacctctacagtccctacaaggagatgcccggcatgagccagagcctgtccccgctggccgccacgccgctgggcaacgggctaggcggcctccacaacgcgcagcagagtctgcccaactacggtccgccgggccacgacaaaatgctcagccccaacttcgacgcgcaccacactgccatgctgacccgcggtgagcaacacctgtcccgcggcctgggcaccccacctgcggccatgatgtcgcacctgaacggcctgcaccacccgggccacactcagtctcacgggccggtgctggcacccagtcgcgagcggccaccctcgtcctcatcgggctcgcaggtggccacgtcgggccagctggaagaaatcaacaccaaagaggtggcccagcgcatcacagcggagctgaagcgctacagtatcccccaggcgatctttgcgcagagggtgctgtgccggtctcaggggactctctccgacctgctccggaatccaaaaccgtggagtaaactcaaatctggcagggagaccttccgcaggatgtggaagtggcttcaggagcccgagttccagcgcatgtccgccttacgcctggcaggtaaggccggggctagccaggggccaggctgctgggaagagggctccgggtccggtgcttgtggcccaagtctgcgcgccgagtcacttctcttgattctttccttctctttcctatacacgtcctctttcttctcgtttttatttcttcttccattttctctttctcttccgctcttcccctactttcccttctcccttttctttttctttcttactctctccttgtccctgagctttcattgaccgacccccccccatttcattcgccctcccctcaatgtgccaacctttgccctatttccgatcttcccaggtactgggaggcgggatgggggtgtgcgttttcctctaggagccctgtctttccaagacccacagaaaccaggacctgcccttattcaaaaccccatgcacttcaagtctcttttagacaacacatttcaattttccgggctgactagtctccctgtgcagaggcagttgagaggctttgctctgcagagggaaaagagctctctactctcccacccaccatataggcaaacttatttggtcattggctgaaggcacagccttgcccccgcggggaaccggcggccaggatacaacagcgctcctggagcccatctctggccttggcgttggcgcagggactttctgaccgggcttgaggggctcgggccagctccaatgtcactacctacagcgagggcagggtgtaaggttgagaaggtcacattcaccgctttgggaggacgtgggagaagagactgaggtggaaagcgctttgccttgctcaccggccgtccttgccccggtcccagcgtttgctgggatttgccaggatttgccggggctccgggagaccctgagcactcgcaggaagaggtgctgagaaattaaaaattcaggttagttaatgcatccctgccgccggctgcaggctccgcctttgcattaagcgggcgctgattgtgcgcgcctggcgaccgcggggaggactggcggcccgcgggaggggacgggtagaggcgcgggttacattgttctggagccggctcggctctttgtgcctcctctagcggccaagctgcgaggtacagccctctattgttctaggagcacagaaacctcctgtgtgggcggcgggtgcgcgagctagagggaaagatgcagtagttactgcgactggcacgcagttgcgcgcttttgtgcgcacggaccccgcgcggtgtgcgtggcgactgcgctgcccctaggagcaagccacgggcccagaggggcaaaatgtccaggtcccccgctgggaaggacacactataccctatggcaagccagggtgggcgacttcccatggatcgggtggaggggggtatctttcaggatcggcgggcggtctaggggaacaattcgtggtggcgatgatttgcatagcgcgggtcttgggatgcgcgcggttccgagccagcctcgcacagctcgcttccggagctgcgagctcaggtttccacccccgatcccccgggctttcctcgcaccgctgagcccagcttgtggggtgcactcgaccaacgcccgacagggctggggaatgtgacaggcagcaggttcacccgggcttggggagggggagtttccgctttgacagcattttcctttgccgtctgctggtggattcctattcccagtcggtaatcgccccgcagtgttgatctaagaaggtaaagaaaactaggtttccctgcaaagagcctcccccaaatcggcggactccggatactttgagtggatttagaaatttatgtaatctttctcctttagtttatttttcatcctctcctacagttttctctgatttgctgttggttcggggcaagataaagcagccagtagagagcgataataatagcggcgggaaatgaactggagactggctgacagttcttaacattttgtcatagatccccccgaatgtcccaggctgtctctggtgggttttagtacccgccggcttcttgggcaccggggaccagaaggaacttggcagctggtcttaggggtacagttaaaggcaggatgacagctattctcctgctcatctcagagcgctgccgccccctcatgccggtcgcgcaaagaacacagcttttaaaaaacacgtgccttctgcccatataggtctgaaagtgatgaggaaagtaatgcttcgcctattagcgagtttcagcttttaaaatgatcccaagcgttgctgagatgagaaagcgtggcatcccgggggtcctcagccccacccgcgcccatggtgcaagtctgcagggacaggcccgggacagcactgcccacgctgctagattttccgcagaggatcgctgaagctgccttcgtgggagacagaatgcctcctccagcgagtggaaaaggcctgctgaggaccccgctttgctcgagcattcaaatgtgtgtctgttttattaccctgggttgaaaagggacaagagctttagcctttttatctggccattttatcagcaactacaagtgtgttgagtggttattattacataggaggcttttcagtttggggtcagtagatcagtctcttcagacactgatgcagaagctgggactggtaagtaggtattatgtgctcggagcgctaggggacaggagcaaatggagaagaaaagcggaggctttctccgcccggagtatcgatcggaatccccgccggtacgccgcagagggccctcgccgttgggccccgggggtttaacaagcccagccgctccgcaggcggctcggccggactctcagaccggtgcctggaagacaccgtccctgcccccctcccgccaaacctgcctcttctctttctctcataggttataggttccctttctctctcattttggccccgcccccgggtcctgccaaacagccaagcaggccggggtttagggggctcagaatgaagaggtctgatttggccagcgccggcaaagctcacccttaggcgaggtcacaacagaggcaggtccttcctgcccagcctgccggtgtagtcacagccaagggtggcacttgaaaggaaaagggagaaaacttcggagaaatttagattgccccaacgttagatttcagagaaattgactccaaatgcacggattcgttcggaaagggcggctaagtggcaggtggttgcaaccccgcccggtcgggccttcgcagaggttccccaagaccagcccttgcagggcggttttcagcaacctgacaagaggcggccaagacaaatttctgcgggttcgagcacacactctcgggcgttgggccccagagacctctaaaccaagcacaaacaagaagggagtgagagaacccaggctagaacttgcacgggcatcccactgaggaaaagcgaggcctcggtggcaggcatgttttcttccgacgcccgaaaatcgagccgagcgcccgactacatttactgcagaggtttccgcctccagtgagcccggatcccccagcggcctgcccggagctggtctccagtccccgccgtagtccgacgcacggccctctcctggcagcaagctcccagcggccagtctgaagccaattctgttcaggcggccgagggcccttagccaacccaccatgatgtcgcctgggccacctgatgcccgcagcggcgggacacggcccgggcagtgcgcagtggctcctgctaggggcaccgcgtgcgtgcttgtctcccgctgcgccggggacgtccttgggtgacacgggccgctgggcacctcccaagccgaggaaacggacccccttcgcagagtctcgcgcccaccccccaacctcccacctcgtttctcgctgctagggctcccgactcagcccacctctcctggcggtttagttagggatcagagctggagaggctgaacgcaacccgtgccagtacggaacagacgatatgtttgcctgctagctgcttggatgaataattgaaaagttcgctgcagtctgtgcttcgtcaagtcccgggtgccgggagaacaccttcccaacacgcatcagggtgggcgggagcgggcagaggaggcgggacccgagggaggagagtgaacccgagcaggagaagcagcccaggcagccaggcgccctcgatgcgagaggctgggcatttatttttattccaggctttccactgtgtggttatgtcactttctcaaacaaatgtgtatatggagggagatcgatgctgataatgtttagaagattaaaagagcattaatgctggcaacaataacgtaaacgtgtggacccagatttcattgatctggaacttgatccggcgcgtttccagtaagcccgacggcgcgctcttcccagcagagcgctcaccagcgccacggccccgcggttttccagcggtgccgcttcgccagctctgcgcgggttctcccgtctgaccgcagctcctcccccgcgaggccccagcccgccttacttccccgaggttttctcctcctctcgcggggctctctgccctctgcaccccctcccccgacctctgcaccacccgcccctgtgcgcacacaccgctacttgcgcttccggcgatccgcctgggcggctgggtccgcgaagccaatgcgctgaacggtgcccg

SEQ ID NO: 7 - DNA, 3952 bp, Homo Sapiens
ggccgcagccggagaggaacaggaaccgcagtggggacgccctggtccccgggcccacagcatccgggacggacgcgcagtagcgcgggccgggaactgggtaccagggcgggatgggtgagaggctctaagggacaaggcagggagaagcgcagcggggtgcggggaaccgcacgccctccctttgcctctgcttcccaccccgaggcggcagggcgggcgggcgcggttccgggggtgggcgggctgggcggggcggaggcggggccgcagcactggcttcacccagcctctcccgcccgcagccagagcgagccgagccgcggccagctccggcgggcagggggggcgctggagcgcagcgcagcgcagccccatcagtccgcaaagcggaccgagctggaagtcgagcgctgccgcgggaggcgggcgatgggggcaggtgccaccggccgcgccatggacgggccgcgcctgctgctgttgctgcttctgggggtgagtgttagccggagggggcccgctccctttcccgggatcagaactccgagaagagccgggcgccgccaccaaggaaacagaacagagcattggggtcccagatactgagggtgggtggtgggaaaggacctctgatgccgggaccacgaaggagggtctagggttcccggagcgcagaggcgactctccagggtggagatgagggcaagaccggagcacggatgccggtcctcaggtaccgcagggggcggtgggggagctgggaggggtctttcaagagggggcatggggctctccgatgcccaggttcttcggaagaggacactcgaatgccgggatcccgaagggactttcccctcagcatctcggtctctggagagtcgtgggacagaaccaaggcgagagaaggagggggaactggacggggactagagatgagaggggcgagctgggctggggcggggagcccgggacgacgggatggaacaatggaggaggtcggagggactggaggcagaggggacccggcaaggacaatggggaccggccagacaatgggggggaggggcgtcggagggagaggttggggagcgggagagaggttgagaagtgggttagggagggcagaagaggggcgacggcgagggcggcagagagatggaagcagaaggaaaggagacagagcggggcgcggaccctgaagtggtcggggtcccgcctgcccgctgagggacagtgagacgagaagagagagcagaggcttggacatttccagcgcctgtccccgcgctcctgctcgcggcctctcccagtcccggaattggggctgcggatctaaggctgggaggggagtgcccacttcgccggggcgaacccgctcccggggttcccccacggccggcgggctcctccgacgcgcgtgttctcacggcttgaagcagcgcagcggatcgcgagggacggagcgggtgtgcccctacccgggctggcggtggctacgtctcggggtgcagagcgccggggcgcactaggcggggacccttcctggccgcgcgcagctctggctacgcaggcgggaggcggcaggcagggggcgctgcggggcgaggcaagtgcagtccgccgctgcctgcctgcgagtctggggctgcgcgccgctccccacctagctgcgcgacccgagcgccgcgcccaccgcgctccgtgggctcccgcgcctcgaagggtcgggatccggtctgagcctctcctggctctcggtgcaagccgctgggcacctaacgagacgggggcgcccggacgcctcggattctgtagcgcggtatcccgggccaccgactcggcaaaggtcggcgggtcctccgggtggtccgacgagattgtcagatgtggcctgctttatggccatgaaccgaatgccctggaaggtctggcaacggaggaggcgtcttcactctccccgccagcatctttcatcagagcactgcgccccaaattccggctttacagatacggagactgaggctctgagagtttaaacgacttggccaagatctcacagcaagttgggccagagtcgtggctagactccccgacctgattcccagctcggtactcccccaccttttcagggggcagccgctgtcccagctcggggtcacggctgcgtttcccagcagggcggggggggttgacactgtccccagagtccgtcggcggtagagcctgcgggtgaggtgggcagagattctgtccgggtgcgggccccagcccgaaagctcagccccagttccctggagctgtcaggacctgtggctgcgtccggggatttgggagcgaccgcgggcacgtctgctgactaacgccgctggttagagacgctgctcagacgcgggtgggcgagcgtagaccaggagagcggggaggagggaccggatcccagaggggcaacgacttgggctccgggtctgggcaagagcgagggtccccgcgcgaagacccaaggaaggaggggagctgggcgtggaggacctgggcgcttgggaaggtgtaccccgacaggaacctgccgtctgcagcccctgcggctcccgcctccgcctcggcgcgcggctgctcggtctgggatggctgtgcgcggtccgagtttcttcctgggccgcggtgagagagagagggctgaaaccagagcgcgtcccggcgggtcggctggcgggccgcgccggtaatggaggcactttgtcattcagacgtctgtaaccagagccgccgggctggctaatgcgcctaatagggatggaacgagggcagcaaatgggcgtgcgtgagcggccgggctgagctgggtggatggtggatggggaggcagctccgcgggggacgggcccctaccgcactgttccagcccagtctggctcaagcgcctcgcttcttccctgggggaccgcgtggggaggcgggaataatcgatgtgctgagttcctactaagtgccttgcacttccctggtagtttctcttgaattatttaatccttataaggtcctagcaaggtgaatttagttattcccacttcgcagttgaggaaacagaaccttctagactttcaggcccgagaccaggctcccccagtgagtcagtggtggcgtctttgttggaacccaggatgcttggcctgggatgttctctttcctacatatgccaggctccctcccgccccctaccttctagatcatggaaggagtcgtggctctgagagattaaatcgtgccctatgcctttggccccacacatttagatctgagccccttctccacacgcagaggccctgccccctctcaagtctctatgctacattatcttgggtaattagctcctttcctcccaactcctcccctatccaaagggagtgaggggtatgtgccagtgcctcccctgggtttgcatcgacctcaaaaggccctccaggtgtttgaaaatctctcccatcccatggcggtgaccacggccccattcacttaagagctctttgctgaagctgttggaatggccagggctgattatactgaaacattcgtatggtttcaaatactttcaactgtttcgctgtttctctcttttctctaattaaaaaaaatgaaaattcttaaaagtcaattcatctaaggatccttccaccttagttccttgtaagccttgaaatggccaaaacaaaaagattacaagcgttcttaaaaatgagatgaaatcattctgtcaaatgtgaaatgactaagtgtaacacatacaaatttcagggaaatttatctgtcatccctataaattaatccttttggatctgattttggagcaattagcctgaatgttagtcacccctccctacttggctaaactctcccctcctgcctggggtctccttaagatgagatgcttctttgataactaacatttatt

SEQ ID NO: 8 - DNA, 2820 bp, Homo Sapiens
cctaggggacaatacccaggcatgttaacggagtttaaaatgccaaggaaattacaccacaattctgcccagtatactacaggctgtcaaaccgaaatgctatgccagctaggagtgcagcaactcccatcctctggccctatttaattaggaagcttcagcagagcgaagcctgccaagcgttcgccgtcagaatctgaaggaacccgagcgagcaagaagagtgcctgacccactccacagaagcctgtccagaaatggaggagtcagcgcccactgaagtcggttccgccctcggctcgcctacatggagcctgaccagcctcagtcatgcccactccggcctgggagacccgcaaagtgttctttttctcaactcccctgtactaccttgaagcttagggaagcaaagagaggggcatatctggactgcaaaaccaatgtcttttgccgcctaggagagaagggaatgagagagagagagagatagatagatagagagagagagagagagagagagagagagagagagagagagagagaaattctattgaaacccagctcctctagaatctgtgtgacctggtcttcaacgggagaccagtgcgacctcatggcacctttgccaggaatcagcgattcccctgcagtcaccatttgatttattgctttctcgctcattctttctcataaagttatttcttcctcatcctagtaagacttttttctttaatgatgacaaagcttctgtttcagtgtttcccctaggattggtgctctttcaaaacagtgaacccagaaaaccatcccgtttaatatttctcaaaatcctcgcagctccaatgtaagcgcaagcatgcaaaggtttcctgctacacctgcactttctgcccatcccagaaccacccctcacccccgggcctgcaacagttccccttgtttctctggatagaggtgggtggtattaggggtctagggcagtaggaggtgaggggctgaggaggccgctagggtaggctggtctgtgctggatacgcgtgttcttctgcggagttaaagggtcggggacgggggttctggacttaccagagcaattccagccggtgggcgtttggcagtcacttaaggaggtagggaaagcagcgagcttcaccgggcgggctacgatgagtagcatgacgggcagcagcagcagccagcaaaagccctcgcaaagtgtccagctgctgcactgccgcggggactcccacagcaccatgactagttcgtgcaactctgcagcagcaaacggcttccgaggaacacaggatcgcgggggccgggcagcgggctactgagcatcccgcggacggcggcagcagaggcggcggcggtggcagtggcacccggcggggaagcagcagccaaacccgcgcatgatctcgagagtttcagcaacatccagggactgggctcagccccggagcgagagggtcgtccgctgagaagctgcgccggagacgcgggaagctgctgccataaggagggagctctgggaagccggaggacaggaggagacgggagtccaggggcagacgagtggagcccgaggaggcagggtggagggagagtcaaggcgccccgcagcccggcagccgcctctcgagctctgccgcccgcatccctctggcgtttgggaagcagcaggtcctcagcccgcccggggtcacgtgggaagaggcagtcgggctctgattggtggagcaggatgcaggtcccgggagggaggggtcgacgaggaggtgcaaggatgcaaggaggaggcggccgcggaagccacagatgggctcgctcgccaggcgctggcccgagtggggctaggcggggatggctcaaatgagaagctcgggcttcagggtgggctacccgcacactcatataccattcgcctcactctccgctccaggacgccccctaccgaaggcggggtccggactagcgcccctcttccgcgcgtgaccccgggccgcgagtgcgggccgcggctgggtggcgtctctccgagctggagatggtgggggcggaggtgtcagaggagcagcagcagcagggcagagaggggcgagtcggcgcgggagagggcgtcctgctggcgaccggcgctccagcgtgcgggagcgcgccgcctaggctgtagggggatgcaggctgggaatgtcgcggcggagaggccagggacgtttctctagggatttacaggaaagagggtgagaggcgatggtgttagaaccgctcttgccgacctggaagcaacagcagcatctcccacaagagcgtgcaaccccaaggctgctcgccgaggcagctcagccatcccggcaggcgctctccttccttctctcttctcccctctctcctcccaggccccccgcagctccgacccagcccaagcgttcgcaggtttgaatccctctcctcatcacccgctcctctccagcccgtagcctattagtgtgtccacctgggaggtgcggtcagatgtgtttggaaggtcagattggtcgggacaagtggtctgagagaaagagaaaggctcctctgcatacgccgcgggtgggttgccgggagcatcggccgggcagcggcgtccgggaaggggagagcgggctccatttgttggcccaggcagtgaccctgcgttccttactcgggtctttgccggatggccggtgacctggggcgacgagagaaggtctaactcggcaggagtctctggctctgcgcgtttctttcattctctccagcgggaagggcaaacggcatagcgggacccgccttccg

SEQ ID NO: 9 - DNA, 2265 bp, Homo Sapiens
cacccccacccagcgtgctcagggcacccgcaccgtgctagcttgtggcggctctcaaactaatcctgactgagtttttgaggcagccttctattcccactcgcaccaacccagcacgcttaccaaaattcccaagtaaccttctctttgttacgcaaacgccaggagctgcttgattctttcttctctccacccctatcccctttccagcctagccggcttcctggccgggcaagctgggaattcagcgactgaagggccttggaaggtgccggaggggagagacgctagttcgaacctccacagggctctcctactaaaaatccctaaaatgctggcccgagaaactctctttgttggagggtctgagtcctactcccttctgccgcgtgcgcccccactgccgtgaaccgctgtgacccccaatctaccaccccatctcgcgcccccagcgtcctagtcgccctgtatctgcccagccttccccctgtccatgtacctggctggttggtggcgcttgggacgcggttgtaggcgccgccgtactggtggtaggagctagcgtagctatagtcggcataagctttggctgggtagctcccggcggagccgttcacgccgtgatactgatactggtaggggttgagagctttgccataggaagccgaggtaggagagcagtagccgtgcggggctccccccgtagggctgtagtagtcagaatcggtagctgaagactcgggcaaagttggcgattcctgagacggatggtgcatagctgcggacgtctggaacggagcttggaagtcgccggatcggatgctggggacccttctgtcaaacactcctgtcatcgctcacgggcggcggcagcggctgtccttgctgttgtggcggcggcagctgccctagttggctgtggggctgctctggtctaagcagacatggctgtgggagcgagggaggaggaggaagaggaggaggagagaaggaggaggcggcggccgcggcgaggaggagactgggagtcgtgaagtctctgtctccggccggctgactgctggctgaggcgcagcacagccttggttaaatccttaattgcgcgcttacgcacagcggggtggatctggttctattggccagggcctcgggagcaacagtaacaccctaactcgtccaactagttttagcacaacaaagcattgcttaaaaagggggtggggggtactgagggggtgtgtgtgtttgtgtgtgtgcgcgcccgcgcgcttgtgtgtgtttttgcttgttgtggagtggggaggggtcttagtctatctgtttttagtaaattccaaagacatcgcagaagccacagcacaaggctctgtgatgtctggggacaatgtgttccaatcagaagcctcaaaagtgcacatgttttgggaatgaggtgggcgaccatctttccttgcttcccactaccccgcccccgtgggctgcaccaaaggcgagtgtagaattaaacactgatactgaaatagggagtcaaggtgcagggagtggggagcggggggatgtaggatggaggcaagaaggaagggaaacagcattttttttttttttagtggagtgttgggaagcaagttgtaacttacatgttttgaaaatttgctctttggggaaagaggcaacttcctttgcaggagatgagtatctcccggacgcgggctggacaggaatgcccaagaaggcacaatgtccattaagccggtgaatggcagggagagttcctgcagcccaaagtccttataatgacttttaaaaattactgtcttaaacacatataacttaaggaagcccaaatcctcgttgctggcttgcaaaaagagccaaacagctccacttctgtttaatattttcatctattttcaagacattggaataaaggctctttaactatgttcagtggccaaagactcccgcaaaggtgaatggatccatgtataacctgccatacctccaggaaagaatgggaaagtctcggaagtggggaaggagacaaggatcaaagcctttgcaaagtcagatgatgctcattgatttccccctcctggctccatgaatgtggcccagtctctccatttcccagacccgggtttctgtaccctctcccctttatttcctgctgcaaagacatcctacttagctcgtatgcaagggaagaaaggattcaagaatcattcagttgatacacgagatctaaactttgctcttcaggaggtg

SEQ ID NO: 10 - DNA, 5907 bp, Homo Sapiens
gccgtcggagcagggccccagcgcaccgcgagcctctgcttcctccgccttgcagcgccgcgagcccttctttcctccgcgcctggccccgtctgcgcccctctcggcgtgggcattcgcagacccgctaggaggctgacgagaggtgtcctcatagagtcctgccttcttccagacccccaaacgaaaagaaagagaaaagccaacctttcgcctccattctgcacgcatttggagagcggctggtggcgagcgatccgcacaatcgcttccctcgcggcgtccctggacgggcggagagaacccgggtgactgagcctgaggctgagcttccttgggagcgatccatgccagccacttctaccttcaagggggactcgcggccgggtttacgcgcgaaggatgggtgccagggaaactgacttatagacgacccgctccgcgagagactgacaactcagtcctgcgggctttcggggcgcccagaccagtccttagccagaggatctggggctgcacagctcccggaccctggagggggtggtccgggggtgggagactgcgagcatcagcccacgccggccccctcccaccctgcggcggcgaggtgggaagggccaggatgcgagcttagcacctcccctagaaatgcagcacttcgcccccccacctcccctgccctcggcgctccctctttcacgcgctccctcccgcctccttcccaagggcgcccttcttctgcccccagctcacgtctgaatccctcggcgccccctttctcttctcctagccccttcctcacgtcccctgcctccgggtatttcctctctccaatcccccacccccgcaccgcctgattccgaggggcgggagcgcattgggctgcgcacgggtgggggcgccgcgccagcttcgcgtagctgctctgacgccgctgccgccgccgccgccgccgccgccctccgcagcccagctcgcgccccgcggcagctccgcagtgcactagccaccaccgccgccgccgccgctccgccagacctgctgccagcttgcccggtccagccctgagagagcctcgaacgccagctgcgagggtcatgagccagagagccccggggcgccgcgcggagagcaagcggagatagcgactttgcgccccccagccctcgccttcttgcatcgcgttccccgcatcctcgggtccttctgtcctttccgctgtccccaccgccgccatggccaccttgctccgcagcaagctgtccaacgtggccacgtccgtgtccaacaagtcccaggccaagatgagcggcatgttcgccaggatgggttttcaggcggccacggatgaggaggcggtgggcttcgcgcattgcgacgacctcgactttgagcaccgccagggcctgcagatggacatcctgaaagccgagggagagccctgcggggacgagggcgctgaagcgcccgtcgagggagacatccattatcagcgaggcagcggagctcctctgccgccctccggctccaaggaccaggtgggaggtggtggcgaattcgggggccacgacaagcccaaaatcacggcgtgggaggcaggctggaacgtgaccaacgccatccaggtaagcgcgggattcccagttctgcctgtcctcccccctcccagctcagcgtgccgggctctgcccccgacagtcgcccggtgatctcggcctggagaccccctcctgtacccaggaatctccctttctccatccctcccagccctgcgcggggacctacgcccccaggcggtgttttccgccctaacccacgctccctcccaacggcaccagctgcaagaccgctaggctgaagttcggtctgagacacctgtccggagacactgcaaaagtgaaggaaatggggggagggagcaggaagcgatgagaaagaaagaaaatcaggattggagggcacggtttggtcttggactctggaacggattcacagctgcatttttgggaggaaagaagaaggggaaatcgctgaggtcggagtctcctccccccgcacacacgcatagacacgcacacgtatataggcaggcacaccacatgcccacagccccccttcccacgaacaaaggcgcaggcacaggcgcacacgacatgtatctatatatagaccacagtactatccccaaatgcacctgcgtacacccctacagctccacaaacaaaagcatatacctgcacataccaaacacacgaatattcgtttgaacatatgcacacacacatgcacagatgcatgcagacaggaaccagcctgctcccttgggtgcggccctgttggagacatacaggtatacacacacgaaagcacacacatgctcccacacaaacacatttagtccgcaataatccagcattacctgtgcacagactcgcccctctcgcccgaaatcccggctgcaccgcaaagaggcggccagctcctccccgtgtgaccctggcgaagccctctccagaggctaagaatggcccctgctctctaggccctctccccttattcctaaccccccactccccaccaggcggcgcaggactcctacatagggagcaggtttggagtcttggcaacgacctccgagctagcaggggctggcaggccgcagctttctgggccgaaggagacttcagctctaggcaaccccggtcccttacagcttggccccgcggcgtccctggagcgcactatcactggggccacggaaggcaggttttctgggagcagaggcctcccaggggttgttccatgtatcggggtaagcaggactccaccgggccccgaacaccagatggcccgacccaaggcgctttccgctccggggcccggcgagacggccttgctggatcacggacccggggctgctcccgccttcgctgtgccccgcgacttcccggggcgtctttcaaggctccgtttgataggccccaagggaggccagggcaggaggctggaggctcgtaggcctccgggaccctggatttcgttagctcttagtccccgtgtggattctaaaccctacagccctgtccgcctgaccctgaagcttctggttctagactcttgctcggttcggctttctggcctccctggcgccttcccgccaagctcctcctcctgcttgcctccccagcctccacttagtccccttccttaggtctcgccctcgcctcactctaactccagccttgtcctaagactctcaatttccagccctgcttcctcctccccgcgcgctgctccccaagcgtcttcacattgtctctgttcttgcctcccaggggctttgccccaccttcagcccctctccctctctaccctatttccttttcgcctcacaactgcagcctttaacgtttcctcctctggtctgagcctgagacgcccgagttttcctctttagctcccgtgccccattccagccccaccacaaatcccgtgcccactctttccactggcccaggcccagctcactacctttcttagagcccctttccgactacgctcccttctgtcccttctcatctcctcccccaactcctcattctgttcctgtccccagaaaccatcccgaagtatctcccttccctcctgtggcttctccctattctcagccctctcccaccctagccctctcgctatcaccagccattagcgcacctttccttctcagatccgtccatacatccctccctctccatctctggctcgacacccgggctcactattagttcccctacatccaccccgcagcctgctcttaacctctcctccccggcggctcagacccaattctcagtgtccttagcgcccccttcgggccacagcgttaagccacgccccccgggcccctcatccgttgccaagttcgctgagcgtccgcgtctggttgcctctccgccccacagggcatgttcgtgctgggcctaccctacgccatcctgcacggcggctacctggggttgtttctcatcatcttcgccgccgttgtgtgctgctacaccggcaagatcctcatcgcgtgcctgtacgaggagaatgaagacggcgaggtggtgcgcgtgcgggactcgtacgtggccatagccaacgcctgctgcgccccgcgcttcccaacgctgggcggccgagtggtgaacgtagcgcagatcatcgagctggtgatgacgtgcatcctgtacgtggtggtgagtggcaacctcatgtacaacagcttcccggggctgcccgtgtcgcagaagtcctggtccattatcgccacggccgtgctgctgccttgcgccttccttaagaacctcaaggccgtgtccaagttcagtctgctgtgcactctggcccacttcgtcatcaatatcctggtcatagcctactgtctatcgcgggcgcgcgactgggcctgggagaaggtcaagttctacatcgacgtcaagaagttccccatctccattggcatcatcgtgttcagctacacgtctcagatcttcctgccttcgctggagggcaatatgcagcagcccagcgagttccactgcatgatgaactggacgcacatcgcagcctgcgtgctcaagggcctcttcgcgctcgtcgcctacctcacctgggccgacgagaccaaggaggtcatcacggataacctgcccggctccatccgcgccgtggtcaacatctttctggtggccaaggcgctgttgtcctatcctctgccattctttgccgctgtcgaggtgctggagaagtcgctcttccaggaaggcagccgcgcctttttcccggcctgctacagcggcgacgggcgcctgaagtcctgggggctgacgctgcgctgcgcgctcgtcgtcttcacgctgctcatggccatttatgtgccgcacttcgcgctgctcatgggcctcaccggcagcctcacgggcgccggcctctgtttcttgctgcccagcctctttcacctgcgcctgctctggcgcaagctgctgtggcaccaagtcttcttcgacgtcgccatcttcgtcatcggcggcatctgcagcgtgtccggcttcgtgcactccctcgagggcctcatcgaagcctaccgaaccaacgcggaggactagggcgcaagggcgagcccccgccgcgcttctgcgctctctcccttctcccctcaccccgcccccaccagcccagtgcgccctgccgccgcgttgggaggccaagctttaaacatctctggttcctagtttctgattattcggggatgggggggatgggaggggacagggattcacgatccatcgcgtctgcgtttctgttgtcctttcttttccacaacaccctggttttggggggaggcggggtgcatttgcgggcagggttctctgtccttccaagtggggccccgacactttggttccagtcatcgagggggttgggaagggagggagagggggcgcagctcgcaggcgtggcaacttgaccttgggggaatatttcacatccatccagagctcggaatctacagcgtccagccatttccagcaagagcgcttcccattccggagacgtttcaaccctgcagcgggaaaggctgactgggaaatccattttgggtgggcaatttccttcaacgaagccggaaggcgagaagccgcggcggggccagcttgcctgccggttttcaggaatctaaactctcatcttgtgcaatttatcaggtgtggaactgttctactgtgcgtgtggtgtgctcgtggtgaataagatgaaatgtatatcagaaaaaaatctatctctaatttagagtgcggtacataattatatccgcaaataaagaagagacaaaggcttgcgcggcccggtgtcgggtttgtg

SEQ ID NO: 11 - DNA, 3049 bp, Homo Sapiens
tactcggtgtagctggtccagatcttgtcctcgctctggtcggtgctgctggcaaaggcgcaggtgcccgtggagctgcacgccaccatgtggaagcccgactcggacagcttgtcgaaggcctgctccaggaagttgaacttgaggtaatagcgcgaggtgtagcgctccgggggacggtcggggtcccggctttcgttcagggtgtccccaaacacctccttggccagcgacgtctttccgcaaacggtgatgcgcgccactcgccggaacttggcgtccgcctgcgcgtcccgcccgatggtgtaggagccgcggtagccgatggtgatgtagcccgagcgccggctgccgtccagcgactgggacggcgtgagcagcgggcccgccgcgcccccggacggactgcggctagccagctccagcgtgggcgacggcgccccggcagaggcgccctcctgctgttcgggctccgagtagccaagcggcagcagctcgtcacccagcgagccctccttgtgcaccccgcgccgcgagggcggcggccccgggccgggctgctggggcgccccgaggcggcgcacgagctctggcagctcgaagtactcggcctcgcgctgcagccggctgcgctcggggaagtagtcgggcagcacgagctgcaagtcccgcaggtaatccaggatgtagcggaagaggaagccgtcccggtccagaaagaagcggcctttgctgtcccgggccagctcctgcggctgctgctgcgtgaacatgcgccagagcagcgagtcgggcaccgacaccaccgtgcagcgccgggtcacgtacacctggccccccacgttcagctccacgatgtcggggaagagcggtggctccgcggaggacgacgaggagccactgccgcccccgccgccgcccccgttgggtaatccacgtgtgctgtccgccagagccatgacagagaggtggccgggccgggacagtggcaggaagccgcgctgcactcaggagctgcaaccgccttccccggagccccggaacccggacgctcgctcagccctgcgccccgccgccgccgccgccgccaccgccgccaccgccaccgccgccacctcctagagccgcgcggagccgagcggtgcgagcgcgccgctgtgcgcccccttgagttccagtgcgctccgcccgccttgcccgcgcgctccaggcgagtgccgggtcgcggcccgcgcgctgcttaagtagagccgcctgctctggtgccgtggcgcgcaggaggcgtgggcggcggcggagcctcgcttaccgggcgaggggaggtggggagcggggactcgatttgcatcttaaacgcggacgccacgcggggctgctggctccaccccggctcgcgagcgctgggggcgcccggactcccacccgctccccacccaccagccccgccccgtggtcccgcccaactttctccctcttccgaagaggacccgcccgagacttggcggcttcggaagacagctccttggagggacagtcaccgcgccccctcccctctcgccccagcccgcacccaaggactctggaaggaggacgtgaactttcggaagcctgtcgccccgggagtggaaatgcgtggccgcctccggccctcccgcctgcggaactgggcgcttccagcagtgcagctgcggcctgccatcgttggttgtcgtgtcactgaaagtagagagacgcgaaaaacctggagagacgaaagagccgccccagtccgagcgagccagattttgttcaagttgccttgcagccagcctggaaaataaataaataaacctagaaacaaaaagcaaacctcagtgtcccgcagtaggatgctttacgatagtttattttctggctgcagagacaaaatgagatgaagcttcaaatctgctcttaattgcaattccctcttcccgcagggccttcgaggcacttcacttcgaagtgaaggggtaagactccggaacgttcggtctccgggtcccattcagccttcgttgaatcgcgcccttagactcacaacagttgcagatctaacgtaatttttaaagccacctttggcgcctgcatgtttatccttccaaaagtccaggcgccccttctctcccgcatgcctcggtcactcttcggccctgtccaagttcccgtcagtctcagaaagggatatttatatatctgaaggcccttgtctggatcccatctctcaactcctgctgcctacacgtttgcttttccccctcggactgcagcccacagaaccgccccctccccctggaagctttccctggcttcccaggtgggtggggcctctggatggctccctacacactgtctgcgctgctcccagcacgttctgaaatgtcatatttatgagtgattatctgatcactgatttgggtatgaaaataagtaagagctcctgaatgctgcaaaaagagaagagtgcagaggagggtgtcaagaaatgattgggtcactgaatgtttcttgtgtacctgctattatttgcagggcaccagggagtgaggaatgcaaaggcgaataatctccaaagcgctttcagtgtagcccaataagcaaagggtcaggggtctgcgcagttatcacatcagtttgaagtatagaccacacatcaggataaatcaggcaagatctttgttcttgataaaatttatccttctgtgtaactacccagtgagcttcacagtctcctcacagataaatgtcatttttattttgaaatgtttatatctgctcaacaattaccgcgctcatgtcagtgtgctgaaatgagatcaacccccaaaccagttatcttaattgcaagtacagattttgatactgaatgtatttcaacattctttttttgttgttgttctgttctttgggataaataatagataacacaaaacttccaagtcccagtgcaggatttcgaggtggttgtgctactaggcgttatattagtgtcagagacctgacaaaaccagcctcttttctacaaatccaa

SEQ ID NO: 12 - DNA, 4721 bp, Homo Sapiens
acgtgaagcccagcacctccccaagcctttgcctacacacaaaaagccacgttctagaggctctatttctaacttaagataagcaggatattttaaaaatcatctactcaccagttggtttgagaaaatccatcgggtatctggagtaaggaggggggggagactctgaaattaaaaaagcaagagaaaataaaggcccagccatgagaagagagatagaaacttatgataacagaggcattcttttagcccaactgtttgtcttagctgtgggggttggaggcagggcccgaggcggtgattgccttgatatttagctgtcagataaacaaaagaggccgcctggcgccagcctcggcgctccgctcctccacgtctgcggccgcagccgccgcgctcggctggcccggctggaaaccaccggctcggccggagccgcgcacttcacagttcacagggcggggggcgaccatgccccctccccgtcctcggactccagacccagctcccagcaacctcggctccccgccccggcccgccccccaggcgtgcaattcacctctgcccccgccggtccgctcggcactcgcgcgggggacacggggctgcccattcctagcgcactcgggagatgcatcccaagcgtgctggggaacgtgggggatctgcgggcgcccggggtgaaccctcacatcacactctgtgtacagagacgtagagtaaaggaaggaatggagaaagctgagaggataaaaggaaaggagtttcagggtctcagccgagaagcccaggccccagcgcagtaagaggcgacaacgtcactgaggcgccggggccccactaatctacagacttatctgtgcggaaggaaggaaaaagtaggggacacccaacttctcctgcctgtttgttcctctgcaccctggggctggcagagttgaaaggagacagatacccagttcggccttccatccaactctctttgccccaaaactccaaaggtgcgcggccacgacagtatctgggccactggtgttcgacgtgattctccgtatttactaaaggagtaaatacggagaccttccagcctttatagcacgcctctcccagccttccttggcgggcctggaccaaatccaactcggccacacacctcaacgtctttccgggtgcggggaggcgtgacccccccacctccctctgcacccccttgttgatccggaaatgaaggcgtctaatttttaaccgcagactgcaggagcagtgcccgtagaccccttcggggcaacacaggagaaaacctggaagggaacccccagggaatgccctttgagtttccccttgtcccttctctactttcagcccccagtctcttcccaggagggtatgcacactctcccaggagggtatgcacactctcccaggagggtatgcacactccccctggagggatggctgcacaaacgcactgccctaggggcttttcttccagcactggcgctccggaaaatgttgggggtagggggacaacttctcacctagttcgcagagtcggctaaggtgatgggggttgcagcacaccagctcggggttgatcttcccgtaagattcacagcaacacagcctcttgacttccgaggaatgcctgagatccggccacctgaacactttgcacagcaggagggggagcgagtaggacgagggcggctgcgcaggctgcgcgccggcgggcgcccccgggcccagcctgcagtccaggcggccgggcagcaggaggcacgcggtgcgcgtcccgccgcgggactccacggcctggagcagcagctccagctgccgctccttcagtttcttgagcaccgagtgcgtgagcgccttcagatccgcctcggcgcccccggccgcgccggcgcccgcggctggcgggtggggatggtggtgacctttggcacctcgcaccgccttgcccaggcagcatccagccctgcccgggccgccgccaccggccccatgcgctcggctgtccgtcgccccttctccccgcagctcgcctcctcctccacctccccctgcgccctcctcctcgtcctcgccgccgggcgcacggctcctccagagacgccggacgagcgcagatcgtttggtcctgaacatgcggggcgaggaggcgaggagaaaagtcgtttgcctgctaaggagcgaacatgacctccgcacaccatgaagaagtcgggcgccgagttggggcagcaggcgcaggcgacagcagcagcagcaggggcccgggcaggagcggcggcggcccgaggggcgctccgtggcatgcgccagtctcccggaggccggggcgcgcgcgggggcccgggggcgcccgccggggatcgggggcctgcgctccggctgccccaccccgcgcggcccgcgccctgcgcggctctccggccccggcgcgccccggaggaacccggccgccgcttccctggggacggccgagcctgcccccgtcggcgcctccccaaaaagaggcccccccgcagtggctcccgaatgtcgggctcgccagcctcggcttcctacatggaaggtccgcgggggcaaaaaacgaaaggcgttcggctgggctgttggaagaaggaaaaagcctctttcccccttgctaagcaacttaatttgggggtggggagaagcaggcaattaaaaaaaaaaaagcaagcgatttatttttttcctctatatccttagtaaccggatctcctcgaattccgcgcacacgaagactcaggggagggggccgagtggacttcaccccgcatgagacgtctggcaaaataagaaggctctcgcaaaacctaacaaccaaatatgcaaagccccaaatgaaaaccaccacctcctcgaacctcagaggtctgggggcgtccggctggaactggggtttaaaaaaagaaaatgtttacaaagtataacaagatgtttgatgggtggaaaaatgtatccacgagttacatccccccgtttccttgcaaagccccgctggtcttcctctccttttcttctgccaaaaaaaaaaaaaaaaatcgtgtatttttttaatccacagaaagctttggctagaccgcttcaatcctgcgcatctgggtggtttaggggagtctctggtctttccccctgcgctcctgggggcccaggtcctcggcggggacttcctcgaggctggcgcgggcgcaggggcagaagatgctgcggcggcggctgagcccggcggggctgacagcgcgggggagggtggcgcggcggcggcggagggccccagacgggtcgcgcgttctcgccccccccgggcacaagctgcttgctagtgcaggggccgccgatgtcccttcccctggccgcggctggccgccgaggctccccgcatgggctgctcgcctcgacccagctgcggcggcaggaggccccggtgtcctctcggcgcctcctcctccgagactctcctcgtcgcgcccgggagcctccttgtccccggtccgccctctcctggcgctccggtccttctgccgccgccaggggctcgccgcgccgcactcaggggctcaggggccgggcgctcggcggctcggcgccgacggactggctctgtctcgggcagctctctcccgcgcggcgagcggaccgagcacggcgcccggctggctcggctggcgcggctcggggacaggatcttccgtgcgccgagcagcaagcgagtgtgcccggggctcaccgcctcccgcaaggcctcccgcccccgcccccttccctcccccttcctcccccttccctcccccgcccccagccgccgcagccgcgccgcctcctccccgcccccccgcaccccccctccggccctctgctcggctggttccactgcgcagtggcgcgcccggctccggcctcgtcacgtggccgtctagacaccctgtcgctttaaaaaaaaaaaaaaagcgattgtgtttcgcaaacaacagatcgggtttctaaaagctatttctccccccaaccccccgccaccgccaccccctcccgggtctgtagagggggtaccgatggaggggagagagataggtggggggcagagaagctcccagaatggattgagccccggccggagccatggagaaattggaaaagcagggagcaccgagcgggcttcgccgcgagttttggagctgagcgagcgggtcggtggcccgatttcgacccggctgggtttcgcggtggccatctcgcgcgcgctcgccctagcgcttcattcattggttttgttttaaaggccctggcggtggatcccttggccgcgcccgagggcaaggggaggagagcgctgtctcggtttaaaagacatttataccggactggaccgaggccctgggaagtgtgcgctgaggggaacagccgccgagggcggggaggcggcgtgaatatgacctcagcggcggccgcgcgctccctcccgccctctcagctccgggctccggtttctaggactgcctggagaagtgtgtcttgtgcacagctctggaatgcatttggccggctgacgagctgtgaggggcagcatcccggcgggagaaggggagcgggggtgggggctcgcctgcgcgccgcgggcaggtttcctcccgggcccggaagacctccgccacccgccaccctgcctcccggcgcgggaaggttacccagcg

SEQ ID NO: 13 - DNA, 2146 bp, Homo Sapiens
aggtttgtgcacccgggtagtccctggctgctgctgccaggctgcctcagccggtcgctgctgccgcggcgactggcgacaagctaccagccacctacgatggcccaaggaggcgaagaagagcaagcgatcaggacaccaaaacggttatcggaggcaggttcccagcacaccagccggccgagggccgagccccgcgggcggcagcaagttttgggagctggaggtaaccgaattaaaaggcgccttagaaactccgcttcgggactttgctcagcagggctccgggttggagggcgccgaggcctggcggacgggacagtgggaagagagaaaggtgctaaggggacccaagatctgggatccagaacaagagggggtggggaacaactctaccaagccaaacagatctatttcccttgcctccatgttggaaaaattcaggttccatatggctcctcgggagggagggagggagacggtggctgccggcttccccccagggtctcgctggagaagggagatgagccccccgcaagaaccccaccttgccaagcacaccccagggagagccaggagagtaacaatagctggggaagccccgagagaggggataggccatcttccaggacttaaaaaaattaatgggagaaagaaaaataacaagaaaggaagacagagaaaggttgagactttcttagcagccgcggagaaaattcagccctggatctggctgctgaaagaaaagagagagaggagaaaagaggagagaagcaggaagacagaggggagagagagagggagagagagagagagagagagagggagagagagggagggagggagggagggagagagagagtcgctgcgtggaaggaagcttaaagcttgtgaactcttcttgaaccgagattggagtcatatgggccataaatcattgagacatactctccgccattcacaaactgatagcctatttcagtccagcttaccttagccaccgacgaggggagaacaggcagacataatatatattcacatcgagccccagagcgagcggcaggcgacaaatctcccctccttgaaggcaaaggaaaaaaagaccactgtttaaagctgcgtcgccccccgcccccccgcccccgccccgcaaagccaccccggctggggagcccgaggggcagaccggccagaggagccgcgcggcgtccgcttcaattcactcggcttaggagcaggggtgcgcaggagggagggggtgggggagcgggaaaaaaaatagaagaccgaaaggtgccgggcggctcagctcgccagaatccagctccgggctccagcagggctaagccgccacagtgtggttgccctataagactggtacgccctactctccgtaacaatggcctctgcttttgcacagggaaaaaaaaccacacagacacacacacacactcactcacacacaagctcacacccccccacctctccccctttagcaagcttagatgcctgataaggagggaaggtgatggtggtgatggggaaggggggaaattttaaaatacccgcctccccaaaaaaagagtaagaagaaaagaaggagggtttttttttttttccttaaagaacaggtaaaaatttaaatctagattggagggacagggaggaagaggtgagcaaaggcaaggaagggcggtgaagttcacagctccccccataccccactagtgaactattatgctaatatgagaagtagtatttggaggctgagtcaaaggcaggcctggcccgggggtgagggtgccgggtgcccctctgcactcattcgcaattggaacaccaggacttttttagaaagtagttctgggtctccaaccctcacactctggctccctccttctgagtctccagccccggcttcttccctccactacaccctctctattcctcccaaatctccctccagtctccaggcccagtctctaaccaagggagagggaaagaccagaacttaaaaaaaaaacaaaaaaaaaacacccctccccctttttctttttgagaacagacaacaagcggtgagtgatgattttaaaaactctgaacatcttgcagggggaggagggttgagaaaagggtgacaaaagga

SEQ ID NO: 14 - DNA, 2427 bp, Homo Sapiens
tttcctggggtctgggtggggagccctttccagtaataaacatgagagggacagagaatgccagagagcttcctgttgggactgggatggctggagggcatcacagcactggtttcgaacactgaacggagaactgccatgcaacaagaacctgggcacatcagacccctgcaggcaccctcgggacccacagatcgcacactcgatgggcgctcgcaggacgtgaatggcatctcggtaacgccaagctccaccccagagccacagggtgcctttcaccaggctacggagcctcctgggccacactgctcagggacattctgcaggggaggaaattgctcttttttttttttcatgattcttgtatgaattctaattaagaaacattacattcagaattatagcactcacagtgatagttttcagaagactgtaacagcttctttgctacttaaggggtacagacggtgcagctgcttacctgaatgacttcttaaatgagtgactaccaccactctaattttcctagttgtagctctgttacaggttactgaccacaagtgttggcaaagaaactgttcttttaagcactttggcgctccctggagtgacggccattcccagcagctaaactgtatcatactcccactttaactctgtgactgtttcagtatttttaaaaatacaaatcgactctccaggaaaaaacaaaaaaacgaaaaaacttctcacttccttcaaatccctggtccaggctcacctgacctcctgcaagctgcccttcagggcaggtcccagccctacctgctgcgtctgcttctccaccccactccagctgagcaggcagagcctgtccttggaaacggcccggccacctgggagggaacaaacaggcactgcccagacccggagctgcaggcagggctcagcaggaccccaggcgggcacacaggggctcatctggagggacctgaggggcacaggctacagtcgggagagccccgggcaggcacacaggggctcatctggagggacctgaggggcacaggctacagtcaggagagcacagacaagaggcccccgaggccaccagggccgacttttactttatcctaaggatcagggacgcaaaaggattttaacaaagacggccacaccacctgctgcagaatgagtataaatgcccttcttagccttcgaggccggcactggcctcgctgacccctctaatcctgccacctgtgcagcaggcggcaacagggacaggcagacgacacagctggggccagaggacgacgcagagagacccacatcagagaccctcggggagtgacagagcccccgccccaaccccagtgagtgggacaggctgagtggggactgagcacgtctagggccagagtgggagggccagccgtgccggcttccaaagaggaccccgggaaacaaacaccctcccactcggcaaggacaaatcaagcaactgccgagacaggtgtccgcgtcccaacccaaggctgcccagacagacaagcgctcaccgccgcactgccctaacagctgctgagacacattcctgcagccgcctcagctagagccagggaggccctgggagaatggccttgcctgctctcagcctcctctcatcttcaggagccttttcccccctttaccctaactgacatctccgggcccctcatttgctcagagtctgctcagtggggcacccaacggtggacaggtgagagaggtgaggggctgggctgtcaccgcggccaagggagccatggccctccagcctgaacggcttctgcccgaaatcaggacacaaacacagcatcatacacagcagaaacagcccagaaaggccccagcccagatggcactggaataaacagttttccccaagtcactttaaaatgaaagttttgggctacctacttctaaagaggacttcaggacagttccaggagttcctccatgacacaccccatggagaatgcttggctgctgcgtttactcaatgtagccattgaacagaaactcaagagcgttgctctgccagcctgaaaccttcttcatgcttccagccatcagggtttcagccaggtcagaaacaacagaggcagtaggctcttccagaacagcagtgtgaggctctccacagaccctctccagcaacatcactgccagtggtgaacattacaaacagcacccacttaaagtccctaacgtgtcttagggacacacggcgaatggagaaacgcttatccaagaaaaccacctaagtggcagcaggaacagcaacttcgtgacacttgggccacaacctgcttccccatccccatgtgacaaaagctctactcccagcaggcaaccgagaagacaggctccctctcccccagtgccactgcagcagtggcgggc

SEQ ID NO: 15 - DNA, 3015 bp, Homo Sapiens
tctccttcttctcctggcagaactgctcgatggccttgatcatgcccaggcccatctcgatgcagcagtaggcatggtcggcccggggctcgggacagcccgccacgcagtagtaacagtctcccagggtgctgattttctcacacttggtctcctcacacaggcggtcgaagcgaccgaacagatcgttcaggagacccaccagggcgtgggcagacttgttggcactcatcttggtgaagcccacgatatctgcaaataaaatactgacttcttcgatctgctgcatcttaaaagggcggaaggctataggagctttttggatggaagactttttcttcctgttcttggggctcgaggtggcatgcctcttgacagaattctcactctcctcatctccctgcttcattaagtcatcggctatgattcttggcatcacggaatgaatcatcctctctttgagggctttttccacttccaggtccttcccgtgcataatggattgccccaccttgaggaaggtgctcctggacctcacctgggacatgacgaacaggtggaccccgatggcgtggatgcagccgtggagcagccccctgctcagcagctcccagtgcagggccccggctccgggcgaggggaagcaggcttcatcccggaaatggtagccaaaggtctcgaaaaggacagagtaggccacccccagacacaaactcaggtacaaaggtaagtgcatgacggtatagagcaaaaagagcacttcgatgcacatggagaagctccccacttgagataagcaagtatctgtgggccggctgtggccgtaaggttggagctgtcgccgcgtcctgagacaggcgtcaagacctggaactgcgcagccagggtcagggcgaacaccagcagggtgagagccagcgaggtccacgcgtaatgccgggcgtacagcttggtgaaggtaaacagaaagaagcccacacacaccaggaggaagcacagcgcgggggcgaccatgacgatcagtctggatctcatgtggaccgcaaaatagatgctccacagaaggcaggcgaagccgatgtagaagagcgcataccggaaccggcgctgggtctgcgggaagcagcgctccaggcaggcctcctccaggttcaccgagtcgaacttggggtcccaccagcggctggaggccctctcgaacagctggggcagcttcttctgcctgcgcagccggcctccgccgcccactcgccgggggacgcccccggagtccccagagctgctgcagctagaggagatgctgtatttgcagtgcttggggtggctgttggaggacagctgcttggggttgatcttgacgcgcacgctgttgctgtccccgctggagtcgcagctcacctcggtgctgtggtgatgcagcagctgctggtggggtggggaagccatgttgtcgagtcccggggcctgccccggccggggtcaccagtacctgccagcaaaacggggagagttagcggcgctcccacctaggcatgcacgcctagaggcccgggacctgctcctgtcctaaggggcggctccagcacgcgacctggacaggcaccatctgttcctgtggttcccggctcagcggtgctcccaccgcccccaccgcccccaccttcgaggcgcacgagaaccgctcgggacggacctagaacgcccgggggtccccgccgcgtggccgccgtggctccgggaccgctttgctcgctcgccttccgcgcctctcgccccgagggtggcctccgcgccgcgcggcttctcctcctcgcgcgctcgcctcctccagctgcggctccggagggaagttcagaccttgagcgctcccagccccgcgagccgcctgcgcacaaacaactccgctggcggcgcggagccctccatcctgcaggagccgcgctccgatgcgtcaaaggcggcgcgcggccggccccgggcccggaccccgacccggagcagcgagcttcggcgggcgcccccggctcgcgctccccggccgccccccgcgctccgggccggccctgcccgcggcggcgggcgctgggggtgggggcgccccgggctgcgagtgcgcggagcccgtcggcgcggcccgtctagtggggcctgcttccccccgagtgcgccgccgctcccgccgcggccgcagctgtcccgggaccgagcgcgtggaaccacggacgcgggcccctcgccgggcggcggtgcagacgctgccgcagagccgggctcccgcgacgccggccgggacgcccgcccgcccgcgcccacgccgggggccgcctccccgagctagagatgcggccgccgccgcgcccgccgccgtgtcccccgcggccgctgcctcatgtcggaagagctgccgccgccaccatctccggcccctgccccgcccgctgtcactgacagacgcgcgcccgcgccgcccctcgcccagccgcagcgcgcacgcgcggcccgcgctcgccgccaccgcctcctggccccggacacgcgcacgggccgcgcgccgccccgccttggtgcgcgcgctgggctggggctgcggggcggggcggggcggggcggggcgcgcgctcggctccgccccccgccccgggcggcgccgcttctaggcggcgggctgtggccgctgtccgcgctccgggcgctgtgggcccgccctccctcggcgtcccagaggccgcgcgccgcccggggtcccgaccctgcggagagacctgaaggcgcctgccgtggaagaagccgctggccgcaacgtttgggaaatcaaaatgttgccttcccactcggcacgcctttgggataaatcgaagtttccaaccgttggatttccctcccgggaggctccccttgctctgtaagcaatgaatgcgggccccggggcactcggcctgccctggacctgctcacggggcgaccttcacgggcctagcctccaaagctgggcccaccgacgaccacgttcccccg

SEQ ID NO: 16 - DNA, 3093 bp, Homo Sapiens
gtcactacatccggcagcggggtggcccctagctcctgctgcccccccgccctttctccccgcccgcccccggagctcagccgatttctgaggctccaactctacccactccctccccgggccgccgccgccgcgccttcccccattcttactccctcgaggagagccacaggttgcaaatccaaccaacctcgcaatctatttttgcaaaatcactcacaaagatctccctttcgcgcccgcgcccgctcctcccgcgccgggtcccctcagccacggccacaaagtgcccttctctcctcctgagtcttgcacataaggaacgcgggctggggctctgttcgtctttctcctcgcccaaggtaaggacctcgggaatctgaagcctggcgtccactacgctcaggcccgcagttccctttttacagagcttgcaccatgggaaaaaataaaataaaatttaggaaagggaggcaacagccattgggagccaacacagagtcacgcagcgcccaaaatacaaacaccgcagcggccagaaatcccgccacctttctcgttctcccaggctgtcctgtcgaggttccctgagtccccccgcacactgaaaggcatcgcaggtgcagtgcgcacccctttcccacccaccccaagaagccctgtcccgccatcagtctctctcctcgggatgagcagggagagcgcgcggaggttcccgactccctcgactacaaccaagaaagaataattttcaaagtgttcaacatccccgcccccaagctccccaaaacacaggggcagggaacaccaaaacactcggctctcattaggaagatcacggctctgaaaggaaatagtagacacgatacttcatctcatctggatttatgaccaaaaaaacaaaaacaaaaacccaaagagttcgcttgcattttttccttccaaatctcggttcggctcgaaggcagggaatctaaaagaccgaggccgatggaagagagccagcggggcgagcgagcgggcagcctccctttttgcctcccggagttacccagaaggacaggggaagggaaggaagaagaggcgaggaaaaagaggagggagggaagcggaggccaggagcgacggagcaaggaaagcagtttgcaagcgagaaaagagggaaaaaacacagccgcacgaatccagagagatcacaagccgtacgcaagcagcagcagaaagagcgagagcgcgagcgcgcgtcctctccgcgtctggggccagacagcccccagactagcccgaatcaccccccaagcactgtctcgtcctctctgctccggccgccccctaattcccctccttcctctcctccacctcctttccaaaaaccaaaacaacacaagggagggtggcaaaagcctccccaaaccggccgattcactcaaagacaacaataataataataaatacataacaatctatatcctatggtgggagagacgtgggactaatcttcggcatttattttaacacctgacagctagaataaataaatatatacatttatatcaatagatacacatagaaaacttggagccaaagcatttggcaagagcggaaaaaaaaagaattaaaaggtaaaataatgatcatgagcagcggcggcggcagcggcaccagcggcaacagcggcggcggcggcagtagcagcagcagcggcggcagcaacagcaataatcacctggtgtccggcctttcctagaaacttcttgcatcaccacttctaagaaccccagttctaagaatcaacagagctcaattctcggaatttgagcttcggactttaccactgctacgtggcaggggaggacttggtgtcagctctccgagatttttactgcccctggccaaccaaaagccctcaaagccacaagattttttcactggccggcatatttcgaggtcctcataagcagagcgtctcggatttggaggttccggttcgaggctcgaggggcctgaaggtggctctccctccccgggcccaagacgatggtatggcctgctccgccaccatcacgtgggctcctcctctgtgacgtcggcgccttcgctgtagcaaagctcggcctctggaattctgagaactaatttgctattcggtgacataagagggggagtgcgctttgctttcccggggtctggggctaattccttctttcttacccataaactcagcagatcgagctaaatgcacaaaagggagcgagaggtttgaaccactgggaaaagtatgttatatatatagtagggttagagaggcgagtaagagaaaaataaaataaaataaacatcacagctctttccaactagaatattaggcaccacgagaaaaatatttgccaagcagttttcggtgggttcatttgctttatttttatttaggacaggggtttttgctgttgttctgggtttttttctttctggtgtggtggcttgggatttttggtttctgtattttgatggtttatggatttttgcttctgattttttgccttttgcaagtttgtggtgttacgtaaatcacaggatcggcatcggttggatttttttgtacgtgccttttctttccctatctaatccctcaagcgttttaaagatgtattatttcaatactaatactattgaaagaagcttaaatttttggccatatgtaacaatcccagcccccactttttttttttttttttcctttggtgcaattttctttttcccccttggacttttgctgaagtgtgtctctcctgcacttcagagaaatgttcaaaggatttgttttggtttggtttgtttctttccaggacagcaagtggtgggtttaatctgttattgttgactcttgggaaatttcttgttgcaagaaacgtgtgtgtgggggggagggtgggggtggcggggtggtatgtgtgtgttttctacaaaattctgtgagccaaatacctgtttgtgttttgttttctcttaaggtcttgagatttttgttttcgaggctcgtttcaaggtcgttgtaaaaaaatctcttcagtctgtgtttaagagatcagccgg

SEQ ID NO: 17 - DNA, 2436 bp, Homo Sapiens
agttctggatgacaaggactaattgcccagggcgttggccgagaggaataggaagagcgccccgtggagcagggcgggcgagaagagccgggcggccgcggggtcctcgcgcatgctgggcaggaagaggaagagctgcagcacgaaggtcaccagggagatgcacaagaagtaggcgggggccaccacgttgagcagccgcagggccagcatcctcgattacattcctgcggggcccggggtgagaagaggactgactgactacggcgtccagggggcgccctcgcccgctcctccgtgccgcgcgtctggggcactgcacgcgactccacgcccccaaccccctgtcccgcggatttcccctccccagttccctaaccccggatcaggcaggccagagacccgagcccgcagcggcctcgggtctaggccccacctgggggtgagtgttgcctggggttttgagcgagctcggcgccttggcgcggcagagtctggcacaggagggagggactcgtttgcagtctttaggagttgtgagggtggggggcaccgggggataggactcctcccctctgtggatgtggaaacaagcccaggtttgggatttctggttcagacctccctaggaggagaaagggaaggatttggggtcgggggcaggagaatcagcggcacttgacctgctggaaatcctgcttcacactcccctttctccgtccctgcgtccccacccacacacacatcttgggcagcactcagggacctcaccaggttacccaaggctctttggaggtatgtgtgcgtgagggaccacgatgtgtgtgtgtgtgtccttgtctgtgactctgtacgtgtaatctgtgtgcgcttgagtatctgtatttgtgtatgtatatatctgcgtgtacagacacgcagcctctgctatctagctttaaaaaaatcaattgaaacaatcgatacactcacactcgctctcgggcaccgggtgaggtgggggcgcaaccagaatacctgtgtcagcgggtcctggccagcacatctctccaacgctggctgcccgggctatttctttgcgaagagcgttttcatttgaggcgaaattaaaatccccccttcgcgcccgcctcccgccctcctgctgagagaaacccaaacaaccctcatggcgccgaaatcctttccatgccgacaagcccgccctgggcgcacgagtggatgcttggccagcctttcctgggatcgaccccgccgccgtgctcagccctcaccacgtccccatcccaccccacgcctcacagccggggttcctggccagcttcggaagccaccgagaaataggattccgtgcgcccgagagaacttttccaggggctaaggaatcggccagccggaggcgcgagaaaagttctgggaaggcggttgcacctaggatgggtggatgccacggggcctccgtccaggctgtcccgtccgcacgggtcgactggtcaccttggaatcccctttgcaggtcccagcgccccccgggaacccgcagcctccgcggagagcgtgggcctctccctaccgctggggcgcagcgcagtgcacgcctgagggtggtcgccgggggctgggcacgcccccagtcctgcgccgccgggggctgcggcggtgctgcccaccccagagagccctcggcctggggctccggcgaagcaagtgccttcccggcgccggtcgccaggggggcgcgggagcagccagatgcgccgcagcgctgggaaggcggcgaaggacaggggctaggggagtgaggggcgctcggcaggcagcctcagccctggccctgcgcgggagaagggacagcagagaccgcccgtggggccccggggtgtagggagctgtccgttcagccctggcgcccgcctcgcccgcggcagagggcggcacagccggagccttggaaagaccggcagcgccggcagccgcgggcttctcggccactgcctcccggacgcacgggaagccgccccccgcgccgccgccgccgcactgccgccgtcgcagaggggtgaggaaatcaactcaccgagctctggtcgccgacaagaggagccccggacgccggctctcgccctgcccgaggctgcaaagttgtggactcggcccggctggctcgcagcctgcgcttcgcttcgggaactgggcaagtagcggggatgtggggaggagggagcgggcagctgctggcttcccacttgggcgccagcgagtaagggccaggaagcggcggggatggcagctgggcaccccccagccccgccacccctccctccgctcctgggggcggtgctctggccgccagtctcagcatcgtggacttgccccctcctcccctctcgattccccttgagcgggctggggcgccctgcctggtttcagcgcccg

SEQ ID NO: 18 - DNA, 17219 bp, Homo Sapiens
ttcactgcacaccatccatcctttaggctgctagcgtggccctcagtttccttcaagccaaagacacattatttccctgtgaataagtgtgtgaatgtggttgtgtggcccactcttctgtacccaagtcggtctcactcactcggcaggaaagtcttcgtcaggcattgaggagtgtttgtcattcagcctgtgtatctaagcatggatgtatgcatatgaatgctttttgtgtttccaagtgaccctcttcacacctttaaatgggctattgtctctggaacgcacttacagaaattctgccccagtttccagctcaacaaagtctgggatttttctctcagaatatcgctatacatctctgtatttgcatacccatgtttacattccccttggccagttctttatctcttatgtatctcttgttccatttgggcaacggagcccaagtgtcttgatttgtctcagcacatgtcattcaagcgcacatcttaatctgagcattcgtactacttccattctttttgctttgcctataatgtggctctttcccaggccagaccaatatgggtttgcagtttaaatgtaaacagaggatcccttaagatcacaaactcttaaagaaaggaagaggagggaggaggagactggaatgttagtaatgagttatttatgtatagggtaacccatccgcccatttcaagctgaagaaagaactagataaatgtctgcagaggtgtattaaaattttagaccaatttaatattagccatatatatacacacacaaacgatggatctcacaacacatcagtgtccagctcctctttggaggctgtctccttgcacatatctaactcctcacaagttcctggttaaaagtatgtctatttatatagagacaactcaaagaccgctttgctctcttcagtgcatacctgtacatgctggcggggcatttcaggctcaggtccttggtctgcagcagtcatagtcagaggccccacccgactacagctatgtgcagaccttcccgtccttgaacacccgcatgaattctctttgggaacattgagtctacgtctgtcttccaaactcagtttttaaagtgagggtgttcattgtgtgtgttcacagctccccgactgagaaatacctggtcaaactagatcatctagcagctgcgtttggtttgtggaagaatcgagcccgatgcaccaagatgtgaccgtgcacacataagagaaaggaaaaccctaggcccagactcacagctcctccccactgcgagctactctgcctccaggaatttccactaggctctttgcccccctttccctattacactaccccaccacggcctttaaagggttaagagaaacccccacggccttccctccacccagctcctgggcccggaggctagctcgctcactcgcagctcacagagtctgctgccatctccgcgcctcccccccctccagtccttcagccgggagggagcctgcatgcctgtctagaccgatctatcaccggcacaccaacaacacccgcgagagcgcggagaccctgcccaggtcccccggcccgcacggttcacggcggacagaacccggggagcgtgacggtgcctgcggggtgggggtagggggcccacaggcactggccgctccgagcgcaccacgggtcctctccagctccggccccccgcgctcccaccagcccggctgccggggcacagtcacagctccgcgcgctgggcagtcctatttttatcttgtctaatcctaaactgggcggggagcacaggcgtcgtgcttagagaacaagagataggcgcgggaggcggggaggagcagccaggcagcgacgcgagcgggagcgagttaaagacacagtggaggcgaccgcgggcaggaagaaagagcgggctgcgcgggcctcgaggcgccgcacgcaacgcgccgccccgcgaagttacactcgcttccccgccgtccctcgctaccggcccctccccacttcccagcggcgctccccgcagcctggacagcgaggccccggcctgtgtgggaggcggaggccaggacggccctgcaaagggctggagagaatcgctaatgagctgtgcagcccattgatccggagaacacttcctaattaactctcagtcacctactggtgacagcgcctcaaaggacagcgctggggccagccgagccccagccgcgacttgccggccgggcgcctgctgcccaaaacccgcgcgctcccctaaacaccccaaggcaattggtgtgcgtggcggtgtatacccgcacactgaaggccagcctcggattaaacctggatggcatattaatcatcgccttccccccccactccgctctacgcgctgaaaccctgcccaaaataaacacgaaaaccaacactgcaaaacccacaccagataacaggtcgagagaggagtgggcagggtcaaggaacgagcgtattccctaagtgtccacgtacaggaatctttgaggctgacaattaaaatgccttccacgcaagcaattctgttggcaaaaccgaacccaacacttcgtaaggattgatttcggcccgcggtgtccgtttccagtgccacaggaagtgtcagatggccagaaatacccaagtctgtctgcactcaccacccaccaccttctggggtgggccatttcctcctagtctttactcccaggccattttaaggatctttctccaaaagactacccctagaaccaaataccacactacccctcctctagcgtcttctcaaaacgaaaaaagggggggaaaacacagctaaaaccccgagctgtctagtctagacgcagcgaggctgtgcgaatacctatttgaagcgcgttggtttctttttaaggtttgtttctaaatacacataaccctcctccttccttcttcgctcttccattccccccacccccaccctccagacgccggcggcgcgcgccctggcgcgcgggcactcacagcctctagctggagatcgcggactttctggaaaagattcattaacagcaaattacgcctcgcccggccacggcctacacgctgccagactcgtccgtctccgggaccccgggaagggcccactcgagcgtgcgagcggcgggaagcccgccgggaccacgcgtgacttcggccgccctactccacacacggtgccccaaggctctctccgtaaacagcaggcgctcgtcaccgccgccgcgagcccccgagttggcggaggctctgcggcgcagccgcccgccggctccgagcgcgggccccgcggcgcctcgccctccccgccttggccgaggatcttgccccggtgcgcaagttcctcttcgcctacagcctccttgccacacgccctccgagtgggaccaacttcctccggccgcagactttcacacgcccatcagggctacccaccagactccccattgcccagcggagggcccaggtctcgcccgcccccgccctccctccacgacgctgcccccgcacaagcacattctacacccacccctgggggctcataacttaaaacctacgctgaacatcggggagggagaggagggggaaagcgggagggggatcgcagattataatcttaaaagaacatttacaaaacaaagcgtctgacctggctggcgggcgggccaagtcggaaccccttgctctgctcgatttcttagtagtttttttttttaatccacgtgattcgtgctttggggcaagccaagaaaaaacgggactcccctcccgagttgcgcggcagcggcggcaggtcgagctcggctcggcccgaggcactcgccacacaccctcgcgcacgcacacgccgacgttccacttggaggaacgaccggcccccggagaggcgagacgaggcggcggtggcggcggctgggggtttttacagttctttcccgagtcgaaaaagaaagcagacggcaacccgctgccctccccttcctgctcgcgagctaacgccgaacccagcttcccagcttccagcccacctcccccccctccgcccgactcgcggcgctcagcggcgaccgcgctcccgcgcacagacacacacaggctgcaaacttccactctgcgaactccctgctctcctcctggcccaccgggaggcgccaggcccccagccgcgccccctccctccctggtgcccacgcggggccgcttaggttggctgcattttaaataacatagctatgaaataaaaacgaaagcgagccaagcagccaaagggaagcgcgaggcaaaagcttcgcggggtacgctgcgggagggggccccgggagagggggccgactgcagccctcagcgcgcccgcccgcccacccgtccgcggtctcccgggggaaaggtgttccgggcactgacctgaaatccccggtgggggagtaggcagggagcctgcgatccggctctttgaagttttcccccaagcggactcgaggcggcgagaaggagcggggggcggttgggtgggtggagagagatatgaggggtggggggggttggcgacgttaacgagcggagaaggagccgggccggagaagcgcggcgagcagcaaagtttgcggtccccggctgcccgcagcccgctcgcggcgccgcgctcactcgactccctcgccgtctgctggcagccggctgccctcggggtcggccccgccgaggggtgggctctgggccgggtgggggcggggcggggcgggctcggggcctccgggcaggtggcgacagccccgtgcgatcctccgggctcccgcagctggactgggcttggccgagctcagcagctcccgcgctgccgccgccgcccgcgctcgggcaggagccccagcgccatgttgacggttcgccgcgagcgcccgctcgggctgggtgtgtgtgagtgtgtgtgagtgttggccaagtcgtccctgcgcggcgacagcgcggcttgggctctccgcccggcggctcgcgggctccccctccgccgccgccgcccgcctagctcccgctctcggtcgcggtctgggctcctgcgcgtctcccccgcagccgccgagctcggcccgcgttcagcgaggagcgcagctctgcctcaccttgccgctgggagcccaggctccgtctgccgccgcacgccgcgatcccaacgcgtcccccctccctggttccctcctcttcctcctccccctccctccgcccgtcctccctcccgcccgccctacctccctccctcccaacagccgcctcccctccccccgcaggcgcagcgctcgggcgacagccgcccgcccgccgccgcctccagctctcgcaagtttgagctccgccagtctccgctcaccctccgctgcggcgcctccgcggcggggtttcgggaggggtgattccccaggaaaggtttgcccgagtttccccggccgtcatcgatgcacggcccggcacgttttggcctctctggatccgaaccccggaccacttgggtggcgccccccctcctcgtcccccggcctcccctccccagctcgggccgagttggctgcgcacgcccgacccgggcgcacgtcctgggcgagccggagaccgacttgggcggcggcggcggcgagggctgccggcagagccagagccgaagggatgggggcggcgggggcggctctcccagccgcgcgccgagactcccctcgctacccagaaggccagtggaggaccgcaattaccataaagcgcctcgcactccgctcagccaaagctgtcaaaccccagcggcagcagccgctgccgccgcctcttgccaccagcgctgcgctctcccggcctcgtcccctccgagacccagcggagcgtggcctgtgtgctcccgtgctcacccccaccccagtttgccccttcctcccagaggagccctttcccatttcggtgttaaaagctacctgaaaacaccaccccaggcaacggtggccgttccgcctgaactccgcgcccgagttccccggacgtttcaattgtgtgggaattgtttggaggtgggggaaggggggagcagcccgtggaggcaccgggaggcgtgtggggggcggtcggcgagcggagatccgcctgtatttctcccggttctcgagcattttcacggtctgtacctctgatggttggaggggctgcccaggcccctcgccccggcgttgggagattatctcccgcgttttattttccttgacagggagcaacttttggcttacaccgttcgccccataaatttccactcggtaacgtcgtgctgatcggtgcttggcggcggcgtacagcctgcgcccgcagcagttcaattcaattgacacgtattgagcttctccagcgcacccggcgcggctctgggcgcggggggagggcgggggcaggcgggagggagggggaagcggagaagcgaggttccggcctccccggagcgcaaagcctcaagggcgagccgagaagccctagttggtgaagctggcgggaaggggtaggagtgggggagggggtattccggactaaccgcgcccagactgcgggcccggacttcgcggccaatggtgaccccattcggctgcccactagggtctttttatactgggaagggggtggggtgtctctttctgcctaaggacaagatggtgcaggctccatgaaacataaatctgaaatggaggtggcttgtaaatccacacggaaagtttttaaaatatcctggagtgtccccatgccaaaaataatcaaaagcatctcaagttgattactaagtcaaggtcaaggccaaaatcagctctagctagcagatattttcccttttaaaaattagactcactactgactgtgggactggtattaggtgcgattttattcattctgttttagttctcagcacatagttataaaaacagcccttctcaaagcagaagtgaaacatctctaccgtttgaaacccgaaacttcggcagaattaaatcttcatgctccagagctgcttataacaactgatgcaaaagacaggcgagcaagtgcccccgcgagcagtgcccagccaggctgggccgcgaacgcttccaggaccagcgcctgcagaatggaatgcacgcttttttcttcctggtctttctgggggtggatatctctgcaagccaacccacacatttttttaatctccggtaacaagcagaaagacacctggactattatgctgtaaaactattttttataaagacattttaggaccagacattaaaagttattagattgaacgcatgcgagttacagacacagctggagaaaaggcctctggttgtgtgttgtggcaacatttctttttgaagcgactccttttattcaaaacaagtcaaaaataaccgggaaggctgaagctgggtatttgtggggaaactctgaacgtggttccaggcgaggaggccgctctgctgctgcaggctggacgggagaactggcctgggccagtgtggagccgtgccaggctcttccggctcggttaggccgaaccgcagaggccctggcccggcgcccagccaccttctatcccctcccctcgtctccccaactctgcccccaggcacaggcttttctcggagttcgaagtcgcatgtaaacgtccagaacttttagaaaatccaggaaccgagctcggggcctgcagcctctcagagtcttacggcctcccggggctgctgacaaagaggcctgtttgtctaactttaaaagtcctagaattcgggaggctgagccaggagaatcgcttgaacccgggaggcggaggttgcggtgagccgagatcgcgccgttgcactccagcctgggcaacaagagcgaaactccgtctcaaaaaaaaaaaaagaaaagaaaaagaaaaaaaaaagtcctagagttaaaatgaacaggggtggtgggggtgctgtaaatgcgaaggggccgaggggagggctgactgggggagaaatttgatgctggagacaaacaggccagtaaattcgcctttgacgtaatttgcaacatcctcccccaccttttctagggatcttgcctccacggtaggctggtaggattaaagggtttctcctccatctcctagggatacatttttcaactccgtgggatttcaaaaatatcttattaagggagtcctaagaggcatgagtggtgggggggattcgtgactcactgggaattaaaatgtgggattttcccgaggcgctataaggcagagggggggaggggagattacacctattggcccggttagttccaattgttctggggaaaacaagcagaaagctgtcgaagggcaatcccatcttgtgtcctcacttaagaaggggctcagggagctggggatgccgcggggcctgcaatgggtgccggcggtttggcccttctcctgccccctcctctcctgccctcccacaagcccttcgggagctgacccgggggtcaggctgctatacccagcactcagcaaggggaggatttcaatgaaaacagaggaggaggagagagtgagcaaaggagtgcatgggaggggaggccgtgcagcccacggagaaataaagaaataggtgccgaaatgagaggtgctgcggatggagcagcgggggctgcccctccgccaccaatctcccttcccatggaagtgtctcctgattataacaaaccactcgacctcaggctaaccaggccctgcaactgggcaatcgagctggcccttctaggagcaggccttgagcctggctgcccttctcaaggcaggttgactctgcaagacccgctagggcctctcccacacacctccagctccaccctggcctaggggaaaggccaggcatcctgtgtttggggggaccctggccttctaaccttgtgtgcaagatttatttataacgtatactaggatccacatcataaagcttataacgtatgtgtaggcttccgatggtcctcctcggaggctgttctcagggcgatgacacttggtactggaacaggtgggactcggatgagtacagataatgtatttttacataatgtgaggtagcctttctttaaaaacacacccacacttatagtcttctggtcactttgtacaagaactctgggcttatccaatggcactttaaaaaacatccgctgccccatcctccaagcacaaggcacagctggcttcccctctgaaactcaaacgaggtaacaaacaggaggcgcatcctcctcccaggatttcactcatctggaaacatctaaaggtagctgcctcccagggcagaagactgctggacttaagggtcgccaggctgaacatgactgttctttcttcttcctagcctttggagggttattgggtgtttggggaaggaaggccctaagggcagcctctccgtggttcctagcaaccatcttggaatttctggtctgggctcgatttgggtcaggccctgagctccccgaacacaggcacgtgtgggtgaactggcatctacactacgggggcccgcagggtggttgggtgtcgaccaaatgggcataatacaggaggcttctgggaggctggccgcctcttgcgctcggcaagggcttaagagccctcgacgccgccgcgctgggccgggtgctcctgcagataaacccggacgccacgtcccgcctcggctgcttatttagcaaggcgccttctgcgcatattttacccggctgggggcagtgagtgggaaccgccgggagagggggcggggaaccaccaactactcgccttcggacccagtgtgccggcctccggccccagccattttgtatccagcttccctcctccactcccaccgggtccctgcgaagacgcaccaccccgaaccccttcgcggtaccactcccgaactggaggggtagagaaggctctgccagcccctcgcctgcagcaggaaggtgggtacggaccagcagaagggaaagcggtgctgatctgtctctaaatacctctgccctcccgcccccaacaaagtcggtcacagaggtgagtggcgcgggatggttgcctcgagaaggtcgcagccaggagcaaagctttggggctcacaacggactgggcattccaaacggtgtaatcttcggcacatttcacccgctcccattccaccttccgaaccactctgctctcggtgctcatcctcctctccatacctgcgttcccagcgcgttagcagccgcgcagcccccggccctgagtgcggggggtggggtgggggggctcagggtggtttgtgtggtgcggcctgacagaaccttctgtgtgcggcggagggaggaggctaatgcataatgcacagcgcctggaagcccggccattagcggcctgtcggtgacacagacaaacgactgagagggaggagatccagctcgctctggagtttaaatagaccagcgtggaggggaaacgccatgatttaaaagtgtgtgtttgcagacactcgcatatattttaatgatttccagcaggctatgtgtcctagccttgcatccccccctccccaaaaggaggatgtgtctagaggagggaggatgaaggcagagtgagaggcctcaacccagacccaccagcagcttttgagagatgaaggaggggagaagttcagaaagcgaggcctggggaagccacacgacccaaggccaagcccagattttgttcttaaaataataatttaaaaaaagagccacccagccttccaccctggactacaccctgtgttgtaccagaaaggcctgggggaaagaataaattctgccacccttgcttcccccgggagcccacatttttgaatcttccttttccactgacactccagagacctccttcctcccggtttaacacactagtgttttttagcaattaaggcgagaagggggtggggataaagataagccaatttttttttccgccatgcaagtgtgagagataagataacgctaagctggggcaaagcggctgcttacaacctccccttagcgattttgatcggtcacttcttatctcgcaaaaatgctcttttcgaaaactggatcaaaaaagaaaaagagaaaaagaaaagaaagaaagattttcatttggaagtgacatttaaaacccacctcccctccactgacaacccaccccccattggcggggctccccaggaaaagtcgcacctcgactgcaggatttcaggctttctcgcggggggcaggattactagtgcaattaggctgaataaaaccagggatgcgtgatgaggatttatcctgtatccaacccaagctcgcggctgggttttccttctcttagttactggtcgatgtttgtgtttcgccatcgcactcagtgccttcaaactaaacaggtagttatacttgggagggtcatataactatgtcaacatgaagtggttgttaatgcgaaataagaagaaactcttctgatatttataggcccctataaagggagagaaaggaaatcacactccctagaacccgaaagctcccagccgaaccggaccctcggggagttttagaaatccttctttccgcacaggaatttcgcgaaggggtttccggaagactttgtcgaggaaggttttggtatcagactccacgacctcagagcgccctgcaaattccccccggcccagtggctagccccagaatgcaaacctcaaggcgggcgccccagaccaagctgacctagcctctgcccacccccagctcacaaccccgaggctcccaccccctgcccccgaccgggtcggcaccgtggcgtccggcacatgccaagtctaccgtctccaagccaggctgcaagatccaaaggttggggcctgccgcggacggattgtccctggggagctgaaaccgcccagcggggaaacccctcctctcgcccttccccgaaaagcttggccgcggtctaagctccgagcaagcgggtatccgctgacagccgggcctcacgtaaggcccacacgcgtcccattagtcagcccgagttcccctcgggcgagccgcctggcgcggccccaaggccgggctcaggcggggagagggtgcggggccgcagcgagctgcgggcggaggtgcgggctccgcggagcccggccaggctcggttccgcgttcctgggcccgcgggtaagctgagtcggcggggcaggccgctccctggctggcgccggggcgccaagctgcgcttcacgtgcccgccatatcagcagcagcggcggcggcggcgaggagggggtgctgggaggcgcgcggccgttcccgcggggtctccggaccccgcctccccgcccctccccgtgggggctgggccgagaccaccctgcggcccccatcccagcgcaagccgaaagcggcgctgccagacgcagagaggctcctggggcgccgttccgagagccgcgcggcggcagcagccaggggagggtgctcctcgcggccgccccgccgccgccgccgcagtcacggggaccggaagccctcgcgccgccccgagcggcctccgctggccccagggctgttccagacgagggctggccgcgcgtcacccctgatccctcctcgccccaggcgaccacccgggccctgcggtatcccggtgtaagccgagaggacccttcctgcggtccgatgagatgtccctgtccctctgctaccaccataagcacgcccccccgcaccgctcgcagctccgcagctgggaccggaggggcgcggagccgccactccggccgggcaggaacacctgctcccaggccctgcagctgggcgcgtgctgctgtgagaggctgcctactgttgtgtgcagagatcgcggaggagaaaatagggctccgaagctcagggccaggagcagccaagcctcggccacccccatctcccacccactgcaggcgacagagcgcgaagccagagggcctgctgggggcccgggtctcctttcgaaggtcgaagggccgccacccctgggatccggcttctggcctgaagaggtcgttcataaaacagatggggcaaaacctgttttgggagccttcccagtgtccgcccccgctctccaaaccagacacactcatctccccctcagccctactctagcctccggcgggggacgggagtaggtcatggcggcaccggtactccacccgcccccctccacgtagggacgtagggtcggctgcggggctcggactttgccactccacctagggaagggccaatggacgctccccgtctcctccgtgtccggaggagatccggcggcggagctgacctgcaaggcttgccctgcctcacccaccccccacctccgtcccaccctccccgactctcctggcccagggcccggcccgggaaggcgttgttttgccagcgggagccgagcgagtgcacagagaaaagcctccctactctaatgagagtgcacacagcgctgcagcgaggaggatgattacccggcgggcggggggcgcgggctcgggccgcgggcggcgtgtgcggcggccccgcgggcccggagtccccgcctgtctggctgctaatcgcacgctttctgctgttacggaggcaggcgggagccggcggccgagcccagcgccgacgactcggcgggtgacacggaaacatggcgcagcgcccctcccccgcccgcgctcccgcctcccgccctccccgcgctcccgcctcccgcctcgcacttcctcccgcccgcgcggcttttgcagttttaatgctctgctttcggcctggcaccattacgctagcagccgcttctccgcggccccgcgcgtctctttcccctttgttttcggggtctatagaaaacgtttgcttttgtcccgagctctcgttaaaccaaacttgtggtggcaacggaaggcggtgcaggcggggaggggtccggggattttggcagtagccggccagagcgtggtggaaacttctctcgctgggttctccgctccctcccactccccctccccaacacagagccgccggcctcccgacgcttctcccttcgcccccgagaggccccagtgctccaggaaggtctgggccacagagactgtgaccaggggtgaagaactcagagtgcgtgtctgtgagccccgaggttttggcactcgatgaccttgctccctgcagccccgacttacctctttccctttggtcattcggggctttgtatcagtcggtgaagaaggggagggaagagaaagtgtttctttcgtgcgtgtggtttttattttaaggatttgttggaatctgtcacccccaactgcacagccccctcccgtataggatctagggcgaaagcggggaaacgtcggatttagggggaaagggtcgggtcagaaacctagccctggaggctggatcgtactctcctggcgggctcagccacacttggtcggcacgcggggcggggcgacccagcagagtgggggacgcaagggccaggtccctcggtccaggagacgccaaacgttccaaccttggagcgagagagcaggaacccccgcccccacccaagcgcgcgcgctccctagctcgacgcgcaagccgtggctctccgcgccagagctgctcaggcggcaattttttaagcctgcaattaagcgaggcgtcgccgtgtcctctgctagtgtcggtcctgtcagtcgcacatggccttggtgctccggtccgaggccccgcgattagtcacaggctcgcttcgctccttccctaatccgcctctgcaggcagcctggggacgcggccgacttggcggcgctggcagggagccactgcccgcggggcgggcctcctgaccagtgccagccccgctgcgcccgagccggcgcgggccctggggtgcgggtttggcgcccctcccctctcacagccccctggctggggtggcggcgcccctcctcctcccgcccctctcccgggcctgcgagatctatttgtgtggtgtcatttgcataaaaataggacaagtgtttctgtgcgttcatacgcgggaggcgaaatccttattgatgtgtctgtgtggagccttcgattgtcggagcggtttgatttagggtgtttgtgttgccttctacaagaaaggagagaaagtccttctcaactccttcggcggcctgggcccccagaagcatgtccctctgcgcggccggaatggtccaccacttgggccccaagcgcgccggatccacagcgagcaggttgagggccaggcgggaggcccattatgactcataaaatcgggcggcctaatcgccagctgccaacccatttacatgtggagcttcccaatgctcccttcgcccgggcccggcttcctgagggtttgccccgacacagctagagccgccaagtgggagctaatctagtggcctctccttcccgtcggcagcgtggcttcccttccccggcgacccccgctctcttggcctactgcgctgctcgccagcaactcctcagcttggacaaatagctgggagggcgccggccgcgcggagccagtaaatcaatcattaactcccaagcgaggcctggaccaggggagggagcggcggccagagccgagtccgcgaggcgagcgcaaagcctccaccggggttaggagccacccacgcgccaacgaaccgggtgcgtgaaggcgggtcccgccatggcctcccgggcccctccagaagcctccgcccgccgggcctttcaagcccgcaccttgcctggccaggcaggtcgcgttacagcgctgcccctgggagagcttgaacattaacgagtcgcctcgggcctcagcggcctgctctccacaggagagcgtcccgcgcttgggcaagctcctcggatccggccgggctcctcctggctcaggcttgctaaaccaaactgatcgcaccctgtatcgaccaatctccctgcggcaccctcttccctcagcccacggtggagccggcacgcagggggttaaaagccccggttcgctctggctcctcggctgcgaggagaaaacgctgatcaaagtgcttaaggggaaggtaacacatgcacattcggtcccgggtcgaaggaggccgactggagacggctcccgagccacccgcctcgacccgcttcccacactcccgggaacgcggcggcggcggcggccctggcccgcacgattcgctcggcggagcgctgcgctgctgggctgggagggcggcggggaggaggagagacgagggggcgggaggcgaacccgggctgcgcgccaagaggcccggagccgcagattagtcaccgctcggctctgcgctcccgggtgcgcccgggaaccgggagggcaggcgtcggccccgctcagccgggctccccggtcctcggcgcgggtgcccccacccccacccccgcgcgctcctggcgcggctggctcgactctcggggacccgcgcagccgagatccacttgtcaggtcaagggcaggacagaaactctgcaagcggagtcttgcttgcgaacaggaaatttctccttgatgaggtgctgcccctcccccacgccgggcttcaaaacaaaactccagagcgggcggccaggtacccagcctcgctcgccatggccggcgacctccgctcctcggccccggccccgggcggcggagccaagccaacagagccggcggacggactcggcgccggccccgcggagggcgccaggctgccaccctccggggcccggacggggtcggcgggggtgcggagccccggagcccccgcgcctccccaggttctacagccaccgagcggttttgcggagctgcccgaggccgccgggtcagcggctccccggagggcgtggggggcggggaggccgcgcggcgccgccgactcggcgaatcccgctgcgggagcccgggagggctgcgagctcggcctggcaaagttcctgtggaaactccatgttttgaaactcctgcggcgtcgcagaaggagggggagaggggagcgcgggaagcgcgcgggggcggtctgcacccgcctctccccgccggggagtgggttccgcggccccccgggcctcatgggaaagctggagggcggggacggccgggtccccgggcccg

SEQ ID NO: 19 - DNA, 2264 bp, Homo Sapiens
gaccagcctggccaacatggtaaaaccccgtctctactaaaaatacaaaaattagctgggcatggtggtgtgcgcctgtaatcctagctactcgggaggctgaagcaggagaatcgcgtgaacccaggaggcgcaggttgcagtgggccagagatcgcgccattgttctccagcccgggcgactctcaggttaaatcgtgttcgatataaaagtctatatcgatatagacttttcgatataaaagtctatctccctttgacaggtctgatcgaccctccttcctataaagacaaaagttgtcttaacatctaagaggaaccatattgcggtgaaaggggtgctacgaatcctgggttttagctcttgcactacgtctcagtgtgacattggatcccaatttcctcaccaccaaagccaacgggctattataactcccttagaagtagctttaatccctaaagacaagactaaaaatattaacagtgcttgagcctctggaaccgaaccagcactggagttttgtttggtcgtcccctctcttccccctcaagattaacgatctggagggaattctggtgagttcgagttctcgtaacttgttagggactaaccagaagcccggcgagcagccagtaacacaatctctgggtattccttcagcctcatcagtacatctcttcctacctcgccttcctccgctgcagcttctttcaagtccacatctgcgtctccgtcagtttcctctgggattccatcggtgtcggtagcccccgggtccccgggcacagcggccgtctcatccgactcccctgtctctccacctttgtcggagggcgactcgtgggcatcgtccatcacggataggattggaggggagaggagatcgcggagatgcctgaggcagaagctcggaaacccgagctgcacaggccaggatcttacttcctgtcgtcgcgcagcgatgacatcacccctaccgctctcctgaggggtcattttgaggcgcgcgtagaggactagaggactcattttaactttggtttggcgacagtgggaagcgggaaaattggacgtaaagagctcagactatggatcctcctcgctaggaaaccagcacttgtgaaggagcgcagttttgtttactaaataactttttccttttcgcctgtctaaaaatgcaatgtcagttaatcccttcgttaacccctcagagtaaagttgggggactgggagaaaactcagttccgttgtatggcggtgtcgtggaatgaggctccccgggactggtaaactttcaggcaaggactcaaccttgtatatttcaactggcccgaaaccgcgggcctgtgtgtacatagaattgctagcatttcccctccattccgcaagcaccttaacaacaaaaagtcatatagctcgagcagaatttatccaattcatttattcatccacaactattgactgcctacttcgatttagaaacagtgctagtaccagggaacaaaacacacatagtttctacccaattaaatgatttttttcagttcgccagtactgaagattgaggtttgtttttacaagtctgacacttttctatcagtttggttaatctcattaaaactaagaggaaagcctaaagagaggaaggtgtctcctttgaacgtttcactttaatgaactagttcacgtactgggaggatgaagtggtgaggatatttctgttttaaaattttcttctcttccctcattgagatacgagggggagggcgttttattcacctgggtatgactaggtccccgcacctattacatatttaatttatgcgtgctgaaagaatggacttggaaatgtaggtgcgcgttacatttatctctttgtttctacgctgcctggacgaattaccgtatttcctgtcccaggagctcccaaaacctttggggaaggagcgcacttcgggaggcgcgtacaggtgggcctgtttgtccctttccacctgcataatgggggcccacaaggcgctgtccccatgccccgagaggcgtgtctcggcacagcaaagtccacctgcgctggtccgcggagccccgcccagctaggtgagctagggggcggggcgcgggggcgcggtgacgcgtgacgccggatcccggaagtgacgcgctcgtggggaaaaggcagggagggggtggtgtccccagccggtttggggggtgcgttgcccggagacggaaagtttgggagcccgagcaggctcggctgcag

SEQ ID NO: 20 - DNA, 3104 bp, Homo Sapiens
gcgggcgctgtcgagcacggggaggtgctgaaatagtcctggcgtgctgattcaagctttgattggcagagccacccggtgactgacagggggtctccatggcgcccgcgccgccaatccgcccaccccaatagcggagccagctcgcctgccggcgtgcctgagccgagccgagcccgaaccccaagccgcggagccagcacctcctccagtcggggtcgtccgctcccggccgttgagccaccgccgccacccggtagtgtgtcccgctgccccaatccgcctcatcaacaagcgcctggcacactcagccaggcccgcgggcatctgctgcgtgtcccgctccgggctcagtgccctcgccgccgccggcactgcctcgatgttccagctgcccatcttgaatttcagcccccagcaagtggccggggtatgtgagaccctggaagagagcggcgatgtggagcgcctgggtcgcttcctctggtcgctgcccgtggcccctgcggcctgcgaggccctcaacaagaatgagtcggtgctacgcgcacgagccatcgtggcctttcacggtggcaactaccgcgagctctatcatatcctggaaaaccacaagttcaccaaggagtcgcacgccaagctgcaggcgctgtggcttgaagcacactaccaggaggctgagaagctgcgtggaagacccctgggacctgtggacaagtaccgagtaaggaagaagttcccgctgccgcgcaccatttgggacggcgaacagaagacacactgcttcaaggagcgcacgcggcacctgctacgcgagtggtacctgcaggatccataccctaaccccagcaaaaaacgtgagctcgcccaggcaaccggactgacccctacgcaggtgggcaactggttcaaaaaccgccgacaaagggaccgagcggctgcagccaagaacaggtcggtacctagaggcctccgcgctttgagcgcaccggggaggaggcgggtggaggcacctctggcgcccttacccagtccctggcgactccaattcagcaggagttgggagcgcggtctgtcttgggttaagagccctgcgttctgggctcctggccgggagttcccttgccggctctgcttccccacccgctggctccccacgcctgcgggcagctgcagcagctggtcccggtcaccaaaccaaggcttcactgggacggagaggggaagagaaataaaaaattaaaatcctacaaacagttagggaccccaagacccaaagctaattcttgtcagcctgggcacaggctcctactattaatcgaagcctggcttattagcaatgtgtcggtttcatgttaattatcattttcaaagcccaggtatatccctccctaatgctttgaaaacagttttcaatggacttttgagaaatgggaagtcgagttttcctcttcccatgcgctgcctgccactcttgtctcaaaacagcaaactagtccgtgggccgaggcttttcgtttcccggagtgtggatctcgattagccaaacattttgcggaagagcccggcctcatcccccaggcccaaatgctccttacaatcctttttgcctttaggtcgggccgacccgatccaacgcgatcgcgggagcacttgctcaggcgtaagccccaggcagacgcaccgttagaaatggtatcccatgtccctgggaccgatctgtccttgtcacccacacttcgtttatttcctgacagtcctgtaaatctcccaaaagtgcacaacaaacagggaggacactgcaagcccagtatataaaagacctgggagctgcggcgctgagaaagggcgcgaatcatggtggggcacaacagtagggacccgcggaggggcggccgcggactcctgcccgacctctgtcgccttgccgagtaatcctcgccttaactgctggggtcttcggaagaacctctagccgccgggctggagggacgcaggaggtggtgggggcgggcgacgggcggctgtgttacgagctgtgacccgtgttccctttcttccccgtagactccagcagcaggtcctgtcacagggttccgggcgggcactacgggcggagggcgacggcacgccagaggtgctgggcgtcgccaccagcccggccgccagtctatccagcaaggcggccacttcagccatctccatcacgtccagcgacagcgagtgcgacatctgagttgcccatccaggatgctcagaagcagattccagtgtaaaaacgagaaaaacaaaatgaaagaggggaagaagatgagagacctgcaaatccagcgccacagaagccaggtgaccagggacccgcgggctcgggttgccgtttcccgccccaccccgcggccggcctggcttcactggcgccctttggccgcgaccacgggaaccagcgtgaggcctgacccagcaccacgttcttcttgctttgctttttcctaaggattttgctgcaaagtctcttcggaacccgaactgcaagctgagcgcctgcccagattctcccatgggtatttcacgtcgaaaggacgctgttacatatgtataactttcgctttaaagtttttttttaacaaaacatatatatgctgtttatttacttatttaagagaccgccatggtaggtttctctgtagcttggggaacttgctgtttctaaacatgcaggctggtggtgatgggttctgtgtggagaagccaaacaataaaacaacctagtgggcaaccttcttaattaagggagctgctctcagattccttttcttcttattattattaatatcattcccttcaccaggcatgcagggacccttgagcaaatggtctccggaaggtcttacctatatatcttttgccttctttggtgcttcctggtatatgttttaaacaacctatggtaggtctataaccacctcccacgtcaaattacacgtatgtgcatatatgtatgtacctatacaaacatatgtatgtacctatacaaacatatgtatgtatgcatacacgtgatatatttaaggctagaaattggcaacatgtgagcgtcctctcta

SEQ ID NO: 21 - DNA, 2493 bp, Homo Sapiens
actggcatgactagagtagaaggagggcatcctaattcccagccttatccaccgctttgcaagaaccaggaaaatgaattcctgttggccataaaactagttgcaggtgatgtaacccatcctattcggcctcccatatttacagctatacaggaacaactctctgaaactcagtctcctcacccgtaaaatgggatggtaatacgtgcccctgggagccagcgagaattaaaagggataagatgcactggctcccaggggcaagcactagcagacaaggaatagggcagtcctcccttcacactccacagagaagaaatgtcctccaactctcccaggaggcagagcccagctctccttccaaacagccttggagttgcttggcctctccacttcttcaacgaagttgtgggcagaagacaaatgcagagttctcttgtacctgacaaggagagagaagcagaccctgtgtgagtctcttgctgttgacgttgatccacagggggtgcaggatgggactgaggcaggcccacctgcctggaaagcctgcctgtaccctgaccccatggggccctaacacacaccctcccagccacaggggctctgcagagctaagccagctgtcctatggaggtggggaccctcctcctgccctgccactctctctttctcctggagaggacaggcaggtgggcatggccacaggagaacttctcgaaggtgctaactggcccagagaaagaaaggtggcctggtagggagttgtctaccagagattgagagagcatgggagaagttgagagggaggaggaaagtgcacgccatcctgcgcgcagcctcgccttagggaaagcatgtgtgagaagtggtggtaggcggttgctagccttggaaacaaacaaacagccaaccaaaaggcttcggaaggaaggagtgtctaattaatcagccccgagggacaggtccgcactgcctgactgtgctcctcagcctggtttcaggccaccgagtccaagtttctgccacagttccagggccgaggctgtttccaaagagccctgtaattgttttccacctgtgtctcacccaaacaccaaggctggcgcaggtggacaccttcccacttttctccctccaggctgggccccagaaatcagtagaggagggaggaatcagtcagcgtggccatgcctgggaggagaggcccgtgtgggtctgtggggctaagaggcaaaggcgggtggcggatgtgggccagcgggagcctggaggggttgacaccgcctgctccaccgcaagcccctggaggaagagccccgctgtgcccgagagcgagcgcgggcaggtgtaactacccggggctggggctccgggggctccgcgcagcctccttccctcccagggacaccgcccagctgcgccccgcgccccgccgactgcgcgggccttgagacgctggtggctgcctcggggttggcctgctcctcgcgcacatgttcagggtcatccgcgctgcgcctctgcttcaggtgcttggctagagaaagggcggcaagacggggcagtgcgtgtgcgcgcgcgggcaagtgcatgtgagtgcacacttatgtgagcgcatgtgtgtctgcgcttgtgcgtgtccaggggaaccacagggagcaccctcattctaagcctccagaggactgcctgaagccgctagatagaaactcccctagaatgtaagctccgggggggagggagctttgtttgatggctgctgtattcccagtgcccattgaagtactggggacacattagatgcttaataaacagctgttgagttaatcaacggactctaggaatggaggcagaccggcccttctggaactggagaaaggacaaggccacatttcaccgtctcctctgttcttggtaccagccctggcgtccccggcaacgccaatccttctcacatccagcttgtgccaagttttcctccctgctcgtgtttacaccttctcccctttgtctctgtttcctgctggcccctgtgtgtaagcaccccagcagtcagagtgagaggaagacgaaagaagcagaattctggaaatagagagctaccagggtggcctcttccttctggaaggacacggaaagatggggtgagactggcgctcttcttcagctcctccctttgggaattgggactttgagcttcagtttcctcactttgaaatagcagctattccacctgcctcgcaggattgttgcaagaagtcaggcaggaggctgaaaagttctggagcacatgataggtgctacagaaacgttcgtttcgtctcctgactagcatccaacagtctgggagtgccccaggtgtggctgagggtggttatggtttgataaccaccaccagaacacccctccttttttcacaaaatgccttgaggagaatttaatggctgtcgaaaattaaggcaagcttcatttctaaaacattcaggagtcaat

SEQ ID NO: 22 - DNA, 2315 bp, Homo Sapiens
ctgtacctggcgtgaggtctcctggccacggacgttgttggcgtcacacctgtggcacctgaggtgaattgttcagatggaaacggcaccatcaggcaactggcaacagaagcctaaagccctgggtgcctcaggtcagaggaaggaaggaatgcaagggccccgctccccccaatgccaggagcgtgtgttcacagctttagacaggacaacccactgcaaatccaaagcagaaaacatggtccaactccatctctgtggcaccttcatagatggtgcccacctgccttggcagtgatgaccgacactgcgaacgctgtgctggcagtgtgtttaagggctttaactgaatcatctcgatggagctgaaatccagccccattttacagaagagaaaactgaggcttagagagatcaggtgtcaagttctatgccaagcacagggaagcaaaaacaggacacactcaacataaggtggccccaggaatcagtggccaggacacgggaggtgtgctgagcgcagatgggcagatgcaagctgaggtggcctgttggagggtcctggaccttccagaaaagaggacatcagctgctcagggagggaaggtttgagatggattctggctggtgtggatcagcccatggtgtgtttgcaggcagggacaccttgaacagacatgggctgaggggagtttgtgtggagcgtggccagtgaaggctgggctggccggcagggtccgctggtcatgggaggcctggcctgcagcagcagggcccatcaaagacatggggatggatggctgatggacaagatggctgatggacagcgttttagaaggtcgcaggcttgtttaggctgaggccagggagggttagggtcctcagggaaggagagtaagctaggggagcctcctgcatagaagacttcctacctgaggccgtcccctaggagttcagccaccccgtggagagcctggcgctgactgtggaagaggtgatggacgtgcgccgtgtgctggtgaaggccgagatggaaaagtttttgcagaacaaggagctcttcagcagtctgaagaaggggaaggtgaggctgcctagacgtggggctacgctcttgcccgctgggtcaggggcgggtgccgagagggccagttcccaggactgtttgctcatgatctggttgggagccctgagggggtagcagggacagggcgggaccccagggagctttggacaaagcggggctctaaccagtctctcctgacagatttgctgctgctgccgggccaagttcccgctgttctcgtggccgcccagctgtctcttctgcaagaggtgagccttccctttagctgtcagttcacaagggaaggaggaggcgagaaacctcggggcagtaccgcccacagaacttcctgtgattccaggaatgttctagcatgttcgatggctgatgagtccacaagatatggttagtacgaatgaggagttaaattttaaattgtatttaaattaaattaaatttaaatagctaagcaactcccagtttcagccaagatggggtaataggcatcttccacagccaagaacaaacaggatgtgaaacaatggttttcaagacagcaggcaacaaaaaggaaacacaacggggcaagcctgccatcaccacagtcattgcctggagagtttctaggtcatgagccacagctgccggactccccagatggaggaggtcaggctgagaatccagggagaccacagcagctcgagtccgccgtgtagaactccagaggagagggctgcgccgagaaagcctcagagaaggtccccctctctgaaggaaatgactgaaggctgcagaacatttatcctaaagcagagattggcagactatagccacgggccaaatctggtcctcggcctgttttgcaagtaaaatctcactggacacagccacacccatttattactcgctcagccacgcctaaaaggtttattctctggccctttacacaaaaaatttaccttcccttgttctaaagatctgaagggacggtgctcaggggcaggaatgagtaacatcggtttccaccggccacaggcagaaatgtcataattcacagggcactaactggaatgcacacaaaggactcgcctcactaacgtggagtaagtagcccaaagtgattgttgctctaggcctgactgatacatcataaaagcaagacctgaaaggatcaaactgttcacaagtatcttaactgattctgagaacaaagctcaagaataagaattttttaaacatcaacaaaaaa

SEQ ID NO: 23 - DNA, 2304 bp, Homo Sapiens
cgattctcttgcctcagcctcccgagtagctagaattacaggtgtgagatatgcacccagctaattttttgtgtcttttagtagaaacggggtttcaccatgttggccacgctggcctcgaactcctgacctcaagtgatccacccaccttcgcctcccaaagtgttgggatttcaggagtgatcccgcatgcccagccatcaataaatacttactaagtgcctactttgttcccaagagtgctgggaacttagcagtgaacaaaataaataccttccctcggggaccttgaactcaagtctagtcagggatcactctattaagagatcaagtcaacactcaattctcctacagactcagataggatagtattttaatttctcgttgatctgctccctcagaccctagaccatgggcactgcagatttttgcaccttttgtagaggcagggtttcaccactaccagagactttaccatcatttctatgtgaagggaaacagtgccctttcagtagacaacgttaaatcagccatcagacgtgggtcatggtgggtttgccgtgactgccacaaacacgcctcaccgaagtctgccaggggacgccataccctcccctagaaagtaagaaacagagaaaggctttctcctgccccggactgtctttctctcagctctaagaaatttctttacagctgttactttatcctggcctgtctcttgagtaagaaaactgctggaaagagtctgccattcactcagatcataatcagggagcctgctgtcactcaggaagggctttaaaaaattcttctgatttactgtgagtgcaaatctctgatattcctgcatctccccatccatcttattttgattttacacatagtgcgattttgaaaggaagcggtgtttttggagaggtagaaaaactctggaaaataaggcttatgacgttggccatcagcacggggctgctgtctgctgtgtgacatgctcaggggtgacgcgcctcccgaaagagacacttggtagagaaggcacgggcgcgaagcccggctgcgggagagctgggagcctgaatgtcgctggctgccgttcacagcaggctctctctgagcaccgtggggaggcagtgacacccgctggcctcgcagcgacactccggcagctgtcctgttttccagcctggacgtgataggtgtgtcttggaggacagtcagaggaagacaggcaagccatactggcctccctcgaggttataccctcgcttaggttaggttgcttctaacagacatcctccgcgggcgttgaggcagccagcttcactgtcacccagacaatttttctctcgctctgccaaccctgttcccctttcaagaatgtttaaactcttcattcaagcgatgagagggaaacacttgagctgcacactcaaggagatgtgggtttccattctggccttgcgatatattattggtgggaccgtgggtgagtcacttaacttctctagtcctcagttttcttatctgtaaagtgggctccagcatacggcttaactgaggtaacacacgttgttcatgtcagctgttgctttcatgccggctctgcctaggtctccccatggcaacaggataggagttctctgcctgtgcgtcagtttttcactagcgtgggaatgctgtgaggagggggcggaactcggtgtagcaagggtttctgtccgtatcttctattttttttttttttttttttttgagactgagtcttgctctgtcgctcaggctggagtgcagtggcgcgatctccgctcactgcaagctccgcttccagggttcacgccattctcctgcctcagcctcccaagtagctgggactacaggcgcccgccaccaagcccagctaattttttgtatttttagtagagacggggtttcaccgttttagccgggatggtctcgatctcctgacctcgtgatccgcccgcctcggcctcccaaagtgctgggattacaggcgtgactaccgcgcccggcccgtatcttctattaagaaccagcaaccacgggctgggcgtggtggctcacgcctgtaatcccagcacttagggaggccaaagtgggcggatcacgaggtcaggcgatccagaccatcctggataacacggtgaaaccccgtctctactaaaaatacaaaaaatttggcaggcgtggtggcgggcgcctgtagtcccagctactcgggaggctgagggaggagaatggcgtgaacctgggaggcggagcttgcagtgagccgagatggcacca

SEQ ID NO: 24 - DNA, 2470 bp, Homo Sapiens
gtggaacacatcctccatatagccacactactcaaaattcactgtctttaagtctttactcaaatgcttctccgtgaagccatccctgagccctctttaaaattgcagccccccactcctgtactccttattgtctctcatttttaatttttgttattgtagttagaaccatctgacacatagcttttattccattggttttttgttatgtctttctttacaagaatttgaagtccatcaggccgggagttttgtttgttgtgtttgctgctatctcccagtgcctaaaattgcctggcatacagtaggcatttaataatctttgaatcagtgaaaaccagatggtggcttggcatttccacataggaatgagccaggtggaaatcatccaggatataagtagatcttgaagtgataaggaagggtcatcataatcatgtggggcccattttgccctttcttgtttcttttctctaggctcagcaacagcctcaccaaggactccatgaatatcaaagcccatatccacatgttgctagaggtgagagcagctcaccccactaccagactctgtgtttagggtggtgacctgaagaaggaagagagcgaaagaagggaaggaccatctttccctctaaactggagtcaagggagggaggtcagagcaagcctgggggcgtaacccagacccagtctttgttcaatctcttctgtcctctttttcaggggcttagagaactacaaggcctgcagaatttcccagagaagcctcaccattgacttcttccccccatcctcagacattaaagagcctgaatgcctttgagtcacatggcccttctttttccccataaaccctgctagttgccacgggggcctgttcctagggcacaaagttactgagagacccagagatccagtctctctgtggaacctccaaaatgccccagcagtcctgcctccagcctgttgcctggcagtatttgccagttgaccttatgcactgccctctcttctgtcatcttggcaacctgggccccccacctcaccctttcttccattccttttcctagacgccaccctttgaattgccatagagaatgggccaattcatggtggaggtttgttcattcccacaacaatcaaagggccctaaggtttacgctttcacacacccaatcattccccaggtaccccaaattacacccaaaccctaactcagccctaccttgtcttagcccctgcttgtaagtgttccagcttccaatgggcacagacctggatcccgctctccctagtcgggcccctattctaggttgagtccagccaccgccaatcaatgcagagccaggttcctcccctttttaactctggccgcagttcaaccctgccctctgaaagcatttcgtttctgccactcaatgctctttcgtgtgcctgacagccatcctgccctcctacctccgctgtgttctaaattcgtctttacccagctctatggtcttgtctaaccgtagagctgccctgcccgcctacgcggagcccagtccgacccactcccgccggctgctacgcccatttctatacaagccctgcttccgctgagcagcatggcgtgcgacaccgcccccttggtgttttggcaggggtctagaagtccctcgtccgccaatcagagaaaaacagggccacccacccccgtccttgggggctgtcttccatcaatcccatgtaagccaatcagtgtgaggcagacccccgcccccccgacacaggccccgagccttttcagttgctcacagtccgtcagtccttgagccaatcggcgtggagcaccgtgaaggccgaacgcgcctcctcgggactccaggggccgtgagcgttccatcatttccccttacgccaatcacggcacagctctgtagggaagggcccgtcccccaacccctcgaggccttgcggccgattaatagcgctttggccaatcagcgagcggcgggacattgggctcctcctcctcgggcccacgtgagctgtagggaaacgcaggggcggcttctaggtgctgccgccgccaccgccaccaccacctccaccgccgcctcggaacccaggcctggggggcggtggggccgcgtatggagcccccgccccccggagctgccaacattgccaacgccaccgccacgctacacacaggtgagctctgggcctggagggtggagggcccagtccgtgaccccacgtatccttcccgcccccgcgcagaggatgtggcttggccggtggcctgctggtgttcgactccccgccgccaccaccacggctggtggacctgcgtgtggcattgctcaagcccttcgtcccttatagtggatctgaccgtggcctaacctccccctcccgttgtataatggatcggtctgcgtgcttatgtttttccccacgccaacttagggtggactcgtcc

SEQ ID NO: 25 - DNA, 2470 bp, Homo Sapiens
tccaaaaagctctgtaaaccaaaagtttgggggtaaactcatttggtagcaaattttgacctgaggctatttatagtctatattctgtattctttctacttagtatgaataagcatgtaagttttactgcatgtttgatttcagcatgttcccccagactctctgggggtgtttacgtatgccggtgggggaaagagaccaactctcaaatattatctcaaacagttggtttcactgtgcttgcttgggtagcacatataccaaaattggaatgacccctgcacagggatgaaatgcaaattcgtgaagcatactgtatttttcttagcacataccacctttggcaatattctttttttttttttgagagggagtcttgctctgtcgcccaggctggagtgcagaggcgcgatctcggctcactgcaagctccgcctcccgggttcacaccattctcctacctcagcctccccagtagctgggactacaggcgtgtgctaccacgccaggctaattttttgtatttttagtagaggcggggtttcactgtgttagccaggatggtctcgatctcctgacctcgtgatccgcccacctccgccccccccccgaagtgccgagtgctgggactacaggcgtgagccactgcgcccggcccccgccttttttttttagattgattttattacttgcctagcaaaggagaaccttctggcagaacagtctccaagaacaaggcaaacaactaattttacataggtttttaccaatgtacagctgttgattgtgactggtttccggcaatctggatttcacaatctggataaggggacaaacaattgtctgtcttccactatctttcttgaatttgaatagaacctttttattctcatagcctcttagctttctttcttttttttttgagacggagtttcgctcttgtcgcccaggctggagtgcagtggcgcgaccttggctcactgcaaacgctgcctcccaggttcaagttattctcctgcctcagcctcccaagtagctgggattacaggcgcatgccaccacgcccggctaatttttggatttttagtagagacgggggtttcaccatgttgactaggctggtcttcaacgcctgacctcaggtgatccgcccgcctcggcatcccaaagtgctgggattacaggcgtgagccactgcgcccggcctctcatagtctcttagctttctaaaatttgaaaaatcctgtaaagacacacctgggtcaaagggctcagataacggactgtggcccttaagtacttacgtcacaggttattgagaggatcgatttagttaccagatgtaaaatgctgggatcagtgcctggcaaaggaaaactttgtacagctgcaggctttcaccatacacaacagcatcgctaacgaatgctattacaatattcatttagcgtttaccaagtgcctactctatacaaatcttgagaatacaacgtgaaggtgaactgctgactaaagtttggtccctttcgctccgtctccttgcgaaaatgctctaacggcaggaggtcacgcgagcgctggacgcgtttctccccgcgagcccctttccgaggcctttcgggtccccccggttatccccgcccgggcggtgcgcgcccccgctgttcccgcttccgctccagagaggcagggctttccgagcctgctagccccgcggccgcaactaaccccgggtcggagtgttccggcccggccagccccgcggcgtgagggaaggggagctcagcagttccccgcgcggggcccaggcgtcggcggcagggcgggcccctcaccgccagcgtgccagccccgcccctacccaccagtgtgccagccccgcccttccccacgtcgccgcgcgcccgggggcggggcctggcgcgcaccgcccgcgcacggcgaggcgcctgttgattggccactggggcccgggttcctccggcggagcgcgcctccccccagatttcccgccagcaggagccgcgcggtagatgcggtgcttttaggagctccgtccgacagaacggttgggccttgccggctgtcggtatgtcgcgacagagcaccctgtacagcttcttccccaagtctccggcgctgagtgatgccaacaaggcctcggccagggcctcacgcgaaggcggccgtgccgccgctgcccccggggcctctccttccccaggcggggatgcggcctggagcgaggctgggcctgggcccaggcccttggcgcgctccgcgtcaccgcccaaggcgaagaacctcaacggagggctgcggagatcggtagcgcctgctgcccccaccaggtagcggggtgggggtggggtcgaaggcgggggcatagcggcggggcgcttggaacccggcgaggggaggctcgcacagggggttgggggggtgcacggcctggccctgggctcggagg

SEQ ID NO: 26 - DNA, 2470 bp, Homo Sapiens
atatattatatcgtgtatgtaatgtataagtatttatttcgtttgcttggggttttgtttgcttttgctgagtccgacccctctacctgccgcctggcccttgcctcacgctccagtgccactgagatcaaggagagaacgaatttgccgctgactgggcagagcgagcgcgtggatcgcggccaccgcccgttcatcacccgcgcgcatctgggctggcaccgggcgaagaatcgtgcgggtctgggacctgggggcccagagggagcgagctcctgcgcgggcgctcggtccgcaggtttcgcaggctcaggggcgtgcctcgttctcacccccactccggaccccggtcctcttccctagacagcggccccctccacccctggctcccgcaggccgctagtagtccgcgccaggccccgccggcgcctctagggccccccagatcgcgcagaccctgacatccccgcctggccctgggttctgggagctgagagccggccagggtcctgctcgtacctccgggcgcccagcctcgggtctgctccccgcggacgccccaacctccccggccgaatggatggtggtgcgcgcgcgtcctactccggcggtgccggccttttctgttgccaaaactagacccaaacctctgcatgggattcgtctttgggtccccaccccgtgcgcccagcaaacagtgggtgagccatgaagatgtgcgagtcagccggaccctccccgtcaggcgcggacccgctgcggccagagaacccagtctgcgccagcccggctcgctcgcgaagccacgggcttcactgacgcgactttccaagacgtgggggtcaccatgggcagaggacatcggttcggagccagatcacgggccccataagcatcagaccataagcagcgccgccactgagagccgctcggaactcgcccagcatgtcgggtcccctagccagggcctggtgtacgtggtcgagggccctggaagccccgatggcctaggaggagcaggcgggcggggcggcgggtgtcgctggccggtagagagcttcggcctgacctagcgcaggtctggtgcgcgcagagaacaactccaagcgcaccgacgcccgcgagctccttccaaacaccgaacgggatccagagcccgagcccacaggcggcggccgggggagggagcagggtgctggccgccgcccgggagtgttcgcgtcctgggtgacccctggaaggacgtggggcccaaactccggctggggttgggagagcagcccccagaggctctccgcgggatcctctgccgggcgggaccgtggctccacaggagaagtgggtggcaagccctgcttggcggaaagcagccgttcccctcctcctgggcctggggcggcgcccctcacccctgttccccgcccctcacccctgttccccgccggccacatcccctgccccttggattccaagcgccccgcgcgccgaggagcccagcgctagtggcggcggccaggagagacccgggtgtcaggaaagatgggccgtctgggggacagcagggagtccgggggaaacgcaggcgtcgggcacagagtcggcaccggcgtccccagctctgccgaagatcgcggtcgggtctggcccgcgggaggggccctggcgccggacctgcttcggccctgcgtgggcggcctcgccgggctctgcaggagcgacgcgcgccaaaaggcggcgggaaggaggcggggcagagcgcgcccgggaccccgacttggacgcggccagctggagaggcggagcgccgggaggagaccttggccccgccgcgactcggtggcccgcgctgccttcccgcgcgccgggctaaaaaggcgctaacgcccgcggccgcctactccccgcggcgcctcccctccccgcgcccatataacccgcctaggggccgggcagcccgccctgcctccccgcccgcgcacccgcccggaggctcgcgcgcccgcgaaggggacgcagcgaaaccggggcccgcgccaggccagccgggacggacgccgatgcccggggctgcgacggctgcaggtaggaggcccagggccggggggcggttcggctccgcgggcgggggctggagcgcagcgctgggcaggcacctgggctcgcagctccgaagctgggaggtgaggggagagcgatcggggacgagctgggacaaggcgacacaggggctccctcggagttggatcggcccctgggacttggcgctcgcgagaggctggagcggccagagtctagcctgcgaggagacgcgggtcctgccctcagcgccggccgcctttggcgccaaagacagccccgcaggggttccgggagggccctcctcctgctgtcccctctccaccccgggctccgagggccgttgggagggtaaccccgggaagaggccggggtgcggggcgcgggtgcaggt

SEQ ID NO: 27 - DNA, 2470 bp, Homo Sapiens
aaaattgaacatctgagaacactggacccacattcctgagggcaacaatctgctagagttgagcagctgttccttttagttatggcatggatattccaatttgccattttccctatcattccccattgtcttacacaaggccagtctcactcatttgctttacttgtctggcctctgtagccatttgaatctgcaaacactatctagacctttcctgtcttccatcaaagcttactttgttctgtcccaagtccttcatcagtgtttcaaagcaagagccaggtaatctgatcaaatataggtcctttaacatgtgctttctggagacagcatcttaacagaaagagatgactctgcaggtagaaattacaggcaccactggattacaatcaggatggcaactgtctgttctactttctctgttatcttgacgtagccatacctcactgttctaaagcagaccaaaggaactggttctatggtagaacaatggacgctggtcttatgtatgaaatcttctcaagctgcacttttatagatcaccctagttccaaaagatccaaagctaccacgggctcctctgacccccccatttcctcggaggcttcaggatatccggcctgacggcatttcccctcacctgctttcggggcccgttttgcgctgggcagttgcgcccaaggagcgcgcgcatccagcatgagctcatttctcatgggcgtttccagaggcccggccgggccgcgcacaccaagcgcagcaagcctctgtatcaatggcccccgcggctgggcggggcgcggccgcccaaaggcgctgcctttctggaagctttgttcccattttagcgtctgagagcttgcagccggctgggaaggcccccttggtccgtctggccctttcggggaagaggccaacactcggcacacgcgatccacggcagaggggagccttgggcgcgcagaattggctgcgccccgccgagagcctcctgtgggtggggagagcccctccacccctctgctcgcttgagcgctcagagcccagggccgccgaccgcagcactttccgatttgctgcaccgagggcccgcggtccctgtgtgcggtttccaccgttgttggaggcggccgcaggcgaaccgtcgggtcgtcagccacgacccgagtcaggcatctccccgctcctgggaccggggccgaaggccaatcacactgcagctaggtcttgcgattggacggcagtgagagccgattggccgccgccgcgagtttcgggctccctccctctcccttttgccccaactccagcgcctaagcttcaggccaatgagacagcgctttatagacgccctcccttcgctttcttctccccaccttggagagggaggggaagtcctgactggccagactgtcctcggaagcccccttctcttcaccaatcaccgaaggaggtacgctcccagcggagttttccagccaatcacaaagcggcggcggcgcccagccgtgcagtttcaccagcgtctctgggtttcaccgtcctcaactcttcaagcctcttcgtaagggccggcgactctgattggccactgttgccattgtcgaatgtctcctccagccagccaccgaacaaggcgaattcaccctttccgttcggctaccttcggcattttccgctctttgggcgtggcttcccagcgtcactttctaattggtttctcaggctgatcggctttttccgggaggagccgcaaacaaacgacgtccgtgattggctccgttcgggcttcggctcccagccgaagcgggcgagcgtggggctcggccggcgattcccagacgcctgttacgcgggcggcggggcgctgggcggtgtaaggctgggtgggggaggaaggaggtggaggacgagtaggaggggggaggaggagtggggaagtgcaaggcggctgcgcagacagcgctcctcacacagagcagctcctgacccgggcgaatgcgggcttgtgccgccgccgccgccgccgccgcccgggccaagtgacaaaggaaggaaggaagcgaggaggagccggccccgcagccgctgacagggctctgggctggggcaaagcgcggacacttcctgagcgggcaccgagcagagccgaggggcgggagggcggccgagctgttgccgcggacgggggagggggccccgagggacggaagcggttgccgggttcccatgtccccggcgaatggggaacagtcgaggagccgctgcctggggtctgaagggagctgcctccgccaccgccatggccgctggatccagccgccgcctgcagctgctcctggcgcaatgaggagaggagccgccgccaccgccaccgcccgcctctgactgactcgcgactccgccgccctctagttcgccgggcccctgccgtcagcccgccggatcccgcggcttgccggagctgcag

SEQ ID NO: 28 - DNA, 2470 bp, Homo Sapiens
ctttgtttttatgtttagtctattgaagcttgctctcaggccactggagctgagctttctgaacacttctggttcagagtgctgcagatttatgaattgttgtttgctgaaataaggtgtaaagtttattttgtctaaagtttttaacaggagtgataattcaggcaaaatgttcacataatagtgggaaatcaaaagcttgcgatacagaaaagtgatatatatttgtaaactcctttaacaaaggcatcgtagcataagcatgactgtagagccagactgtcaatgttcaaattttttctgggccttaatttctttatctgaaaatcgttaacagtggaacctagttgatagggttgttgtggagcaagcgttcttaatctggagtccatgaaatttcagcatctgtgaactttgtattgaaaaaatcgtaactttatgtctattaacctcacaacagtttcgtttctttgaattataaaggcaggcaacaaaccacagtagtattatcagtacctacaactttgtttcctacagaaattattttcatactcagtaagttgttgcagatatcttgaacaattatacgtatatattccttaagtattatatatataatatttttatattctgtatatatttttggagacagggttttgctctgtctcccaggctggagtgctgtagcatgatcggaactcactgtaacctcaaactcctgggctctagtgatccttccagcctcagtcttggaatagctaggactacaagtactccccaccatacccagctgttaatttttttttttttcgtaaagacaaggtctcactatcttgcccaggctgctctccaactcttggacacaagcctcctgcataggtctcccaaagcattgggtttacaggtgtgagccaccgtgcctggctaatactatgtatttaatttcatgcgtttagaaatatgtgctattttaagaaggcgtctacaggttttatcacattaccaaaggtgttcatggcacaagtgaagaaatctctagatactagagtaataaaaaccatgatgcattagaacggatcaggcccatatcaaacgttcaacatacagtctgctgctatggttctttttttttttttttttttttttttgagacagagtctcattctgtctcccaggctggagtgcagtggagtgatctcggctcactgcaacctctgcctcccgggtttatgccattctcctgcctcagcctcccaagtagaggaactgcaaggcgctccaccatgcccggctactttttgtatttttagtagaaatggggtttccccatgttacggcaggctggtcttgaactcctgacctcaggtgagccacctgcctcagcctcccaaagtgctgggattacaggcatgagccaccatgtccagtctgctatggttcttaaaatattcatagaatagaaattgaagtaagtctattcgtttttatattaaaagtagctagtacggtgctctgtacttatgcactccatggatgctgaatgagtcattgaatgaagtggagtctaggttgtgcctcaggccttccagtggggctggaaggaacagttgtgaagttgtggggcggcttctgtgcatcgggggactctggagttagatggtttcccagggctctgaaggagaagagctgtgttcctaataatgatctcaatgggaatagagattgctggggaccgcaggggccaggttgtcattccccaaagcttccccttcatcatccaagaaggcattcaggtctttctgtgctaggccccaggtaaagtgctggactacccagtaattgggttcagtagcaggatggcctcagattgaggtcccagggccaaaggaccactcctctcctcagcgctggtccgggaaaggcaagctccgggcgggagcgcacgccgcgcccccgaagcctggctccctcgccacgcccacttcctgcccccatcccgcgcctttccaggtcttctcccggtgaaccggatgctctgtcagtctcctcctctgcgtcctcggccgcggcccgggtccctcgcaaagccgctgccatcccggagggcccagccagcgggctcccggaggctggccgggcaggcgtggtgcgcggtaggagctgggcgcgcacggctaccgcgcgtggaggagacactgccctgccgcgatgggggcccggggcgctccttcacgccgtaggcaagcggggcggcggctgcggtacctgcccaccgggagctttcccttccttctcctgctgctgctgctctgcatccagctcgggggaggacagaagaaaaaggaggtagaatggatccccttggccttcccctgtgggcgggggcgggccagggtgggccgcgttgccaggcagccctgccgtgttgctaggcagcctggtcgccggcgtgggcgatgccggcgctggg

SEQ ID NO: 29 - DNA, 2470 bp, Homo Sapiens
agctgctctgtctagaagccgattttctgatgcctccaacgtctggtctaattgatctgttttaatggagtcttcgtcggtgaggagcgagatgccaccgactagaatgctgggatctgctgcttaattgccaggagtgagagacactgagattcagaaatctttggaggtgggaggggagagggacagtctcggacggaggcggagatgtaagataaagggatggatttcacacaggaaaaaaaaaaagatttcgttgaggcactgaggtgctgcacgatcacatctctcaaaggagaagttaaaaagcaaggaagtgggaggaggttggaggttaaagtacttaaaaggattactcgggtacaatttgtttttctgctggtgtctgcaaaggatagatagtcccgttttcaaagtatatgaatgcctcttttaagtgattgggaatggacactaattgcctgttaaatgttatcaaatgctctcctaaattcaggggacacagaaagaggggcacaaaaggagaatttaaatagaaaaagggaggatccggaggcttttgaaagcggggggagaagaaggaggagggataacagagaggaatagagaaggagagcggagagaagataaacaaaaacaaaaacaggaatcactgaataatcacacaccaaaaagaaagctcttccctatggggcatccaaaacactgagactgcaatagtgaccccggtcatggaagaaagatgttcctctccacccttgtccccgaaagctcttggtcccgttactggcgactaaaattccattaggctaaagagtgtgtctaactgcctgaagaatgcagcagacggaaggcgggtcccgctatgccgtttgcccttcccgctggagagaatgaaagaaacgcgcagagccagagactcctgccgagttagaccttctctcgtcgccccaggtcaccggccatccggcaaagacccgagtaaggaacgcagggtcactgcctgggccaacaaatggagcccgctctccccttcccggacgccgctgcccggccgatgctcccggcaacccacccgcggcgtatgcagaggagcctttctctttctctcagaccacttgtcccgaccaatctgaccttccaaacacatctgaccgcacctcccaggtggacacactaataggctacgggctggagaggagcgggtgatgaggagagggattcaaacctgcgaacgcttgggctgggtcggagctgcggggggcctgggaggagagaggggagaagagagaaggaaggagagcgcctgccgggatggctgagctgcctcggcgagcagccttggggttgcacgctcttgtgggagatgctgctgttgcttccaggtcggcaagagcggttctaacaccatcgcctctcaccctctttcctgtaaatccctagagaaacgtccctggcctctccgccgcgacattcccagcctgcatccccctacagcctaggcggcgcgctcccgcacgctggagcgccggtcgccagcaggacgccctctcccgcgccgactcgcccctctctgccctgctgctgctgctcctctgacacctccgcccccaccatctccagctcggagagacgccacccagccgcggcccgcactcgcggcccggggtcacgcgcggaagaggggcgctagtccggaccccgccttcggtagggggcgtcctggagcggagagtgaggcgaatggtatatgagtgtgcgggtagcccaccctgaagcccgagcttctcatttgagccatccccgcctagccccactcgggccagcgcctggcgagcgagcccatctgtggcttccgcggccgcctcctccttgcatccttgcacctcctcgtcgacccctccctcccgggacctgcatcctgctccaccaatcagagcccgactgcctcttcccacgtgaccccgggcgggctgaggacctgctgcttcccaaacgccagagggatgcgggcggcagagctcgagaggcggctgccgggctgcggggcgccttgactctccctccaccctgcctcctcgggctccactcgtctgcccctggactcccgtctcctcctgtcctccggcttcccagagctccctccttatggcagcagcttcccgcgtctccggcgcagcttctcagcggacgaccctctcgctccggggctgagcccagtccctggatgttgctgaaactctcgagatcatgcgcgggtttggctgctgcttccccgccgggtgccactgccaccgccgccgcctctgctgccgccgtccgcgggatgctcagtagcccgctgcccggcccccgcgatcctgtgttcctcggaagccgtttgctgctgcagagttgcacgaactagtcatggtgctgtgggagtccccgcggcagtgcagcagctggacactttgcgagggcttttgct

SEQ ID NO: 30 - DNA, 2470 bp, Homo Sapiens
acatttaaattgcatatttggcttgtaatatattacatatttaaaagaattactatttttctgaataccattaatactaataatagcatcacagtgactaagagtggacttaaataaaggctggcttgaaactcaggtctgccatttattagcaagcttctaaaaattctgagcccttagttttctcacatgtgaaatggagaaaataaatctgcaaaattaattaaatctgtccattcatatttttctctccagtgtatattaactggcattcctcgttaggccagaatgtgctctcaaccatgctccaaatccgctttgtgccaaccccactgccagaaccctttctaccttgagaaccagaaaaggaaacattatgcctggcaatgcctacaccctccaaaataaatctgcaggaaagaacacccagtaagtgatgagagcagcaacgactgcctttatcattttaaatttacaacaccaccttttctagagcctcttaagcattgtagataattccccactcattaaaaaataaattgtaaccataagtattcagggttgatactgcttttgaattagacagtgctcatatcagttgcataagaccaacctaaagtagaggatgaaatcttttttctgaacctttttcagaacgtaacttagtgaatatattaaaactaaactttctttgaatgggagtaatttctacggattaatctgtaatctcttagaccacacctaaggtaatgtagaggttgttgtatcataggctttgtgattagagaccactggatttgtctttggaaaagtcactcatgattctttgggctttggtttcctcatcttttataccggcttaataatgaccaccgtagagttgtcatggaagttaaatgaactcatgtaccataagtgaccaatacaatgattgacactcagtgatttatcaataaattaaaacatttattatcaatatgacagagaaggtgccgctaaaatagacaataggtttttggaagaggtgattaaatggatgcaaaatttatggattgtttattccgtctacctttgctgtgtcccctggttgtggcatacacacgtgtgggtataaaatcgtaaatcctatgtagtcgcgtagtgcatgcgcagaaggcttagacacgaaatgtcatttcagcaatgtgcctagagaagctctgacgccgccttggaagtaagtcgttgctgcctgacctttgggcgtctgggacggatgcctatacctgcacccagcagcactggaaggggcccaggcccttcgcagcacagcctatccccagaccgcttagtccttcataacatatatctccacggaaaagggtatttcctcccgtcagaaaaagcgccccagtctggtctgggttggtttttatttcacgttgttgcaagtaggcgaagtcccttctgtctcctcccttggggtaagtggaaaggagtccggcagggggcccgcagtggcctgcacaggggaactgggtagcgagagagttccaggcaattccgggggctgccccacagaagcaggtggggatcgacagtggctctccggcccagggaggagagcgcggtcgcgggtccctcccctcagcctggaggctgcagccgctcgagtcggcccgggtgggggcggggtgggggcggcgcggagggcacggagattacggcggcgccacccgggacatccagggccccgaggccctgggcggtccccacgcgagatcgcaaaccatgacaataggcagtcacccgaggtcaaataaaaacggagtgggtcccccgcgcgccgccgccccccgcgtccctggcggcctcccccgaggcccccggcggcctcacgagcccgcagtagccggtggcgacgtcgcccccgccccacctccctgcgcaagtgcgaggctgccggcagcgcggcgcacgctccggccgttcccggcttccgcgcaaaacttccatcctgtccacgtgaagttgtcgctgccttagagagggggaaagagctgcgggaaaagccggggagtgacgactgcggcggctgggcgcgctctctcattttcttttcttctcctttcccccctgtcgcagtccggagttttggctcctctcctttcctcctccccctcggagccggcttctccctccgccccgcttctcccccgcttgtgtacgctatttgttgtggggtggccgaaggggatgtcctgttttcaccagaggcacagcgcgaaggggaaacttcgacactggaaggaacgagaataaatacttaattacggacgcactgaaccgcggctgggacagacacttcgggaacccgaggcggaccgggcgacgaggtgagtgaccccttcttccaacccccgccccagggctcccgggggagcctgagttgagagaacccccaaactttccgggaaagtgcgcgaggctc

SEQ ID NO: 31 - DNA, 947 bp, Homo Sapiens
ctgctgctctcaggggccctggccctgaccgatacttgggcgggtgagtgcggggtccagagagaaacggcctctgtggggaggagtgaggggcccgcccggtgggggcgcaggactcagggagccgcgcccggaggagggtctggcgggtctcagcccctcctcgcccccaggctcccactccttgaggtatttcagcaccgctgtgtcgcggcccggccgcggggagccccgctacatcgccgtggagtacgtagacgacacgcaattcctgcggttcgacagcgacgccgcgattccgaggatggagccgcgggagccgtgggtggagcaagaggggccgcagtattgggagtggaccacagggtacgccaaggccaacgcacagactgaccgagtggccctgaggaacctgctccgccgctacaaccagagcgaggctggtgagtgaacccggccgggggcgcaggtcacgaccaccccccatccgccacggaccgcccgggtccctcagagtctccggatccgaaatctaccccgaggcagcgggacccgcccagaccctccacccgggagagtcccaggcgcctttacccaggttcattttcagtttaggccaaaatccccgcgggttgggcggggagggggcggggctagctgggcggggctgactgcggggaccggctagggtctcacaccctccagggaatgaatggctgcgacatggggcccgacggacgcctcctccgcgggtatcaccagcacgcgtacgacggcaaggattacatctccctgaacgaggacctgcgctcctggaccgcggcggacaccgtggctcagatcacccagcgcttctatgaggcagaggaatatgcagaggagttcaggacctacctggagggcgagtgcctggagttgctccgcagatacttggagaatgggaagga

SEQ ID NO: 32 - DNA, 3120 bp, Homo Sapiens
aactttaagtttaggccgggcacagtggctcacgcatgtaatcccagtacttggagggaccgaggtgggcggatcacaaggtcaggagattgagaccatcctggccagcatggtgaaaccccgtctctactaaaaatacaaaacttagctgggcatgatggcacgtgcctgtagtcccagctacttgggaggctgaggcaggagaatcgcttgaacccgggaggtggaggttgcagtgagcggagattgcaccactgcactcgcctggtgacagagcaagactctatctcaaaaaacaaacaaagaaaacttgaagtatagtatccttttaaattttaaatagataatagaaactggtttccccccatttaaaccagaatttaagtttaactttatatattcttgacagtttggattttgtccttcaacctcataaaattgggaatttaagcatcacctggttcgatttaaatgcaatgtagaatttgcattaaaatactacattaaagcctcagatttgtagtagctaacagcacttctatgtatgtgtcagggactgctctaaatacttcatatatattaactcctctattctgtacttctgttcccgttttatacagcaggaaattgaaacactgagaggttaagtaactaaagttacagagctagagtgacaggagtaaagcttcaactcaggcaacccagacttccagagttctgatctccactactaagctgctagcatagcttttctggtaactatttttaattcaaatataattcgagtgatctatctaacaagtcatcactctgacaactcagtgacttgtaatgtaaaattattcattgtaattcatttaatattattgtttctctgtgctgcaaaaatcatagcaatcgagatgtaatttattactctccctcccacctccggcatcttgtgctaatccttctgccctgcggacctcccccgactctttactatgcgtgtcaactgccatcaacttccttgcttgctggggactggggccgcgagggcatacccccgaggggtacggggctagggctaggcaggctgtgcggttgggcggggccctgtgccccactgcggagtgcgggtcgggaagcggagagagaagcagctgtgtaatccgctggatgcggaccagggcgctccccattcccgtcgggagcccgccgattggctgggtgtgggcgcacgtgaccgacatgtggctgtattggtgcagcccgccagggtgtcactggagacagaatggaggtgctgccggactcggaaatggggtaggtgctggagccaccatggccaggcttgctgcggggggaggggggaaggtggttttccctcgcactgtcttaaaccgatggcctttccttggcacagggtccactgcagcatgccaaacgaggaggcaggggcgtcgtccccccgccccccactgcagcactggagatggatttcctgtacttcggatccagggtttttgacagaagaggaagaagggggaggggtagaagtgttaaggggagtctgctgagaaaagctgtttttgaagccagaaggggtttttgtttttataatgccatttgacagagtggaataacagtatctaaggaaacgggtagaggacaacaaagaatggagcatattcatggcgaggagcaaaagctctaccccattgaaaggcttcttttcctccctggcgacaaggacacatgcattggtggccaaaagagagaggagacaaaaccgctgcagatggctgatgtgaatctagtggaaagagctactggggatgagagaaagaggaggaggcaggtactgcagagcgtgagtggtggtgttggttggtgaaatactggtcaccagtagtgtgcctgcttttgtaaaacatctaagtaaactccctgtgaacagggtggcaaacagataccagtgtctttgttagttacaaaatgcagtggtagtggctttttgcggacgactgcagcagtgctttttctccctctgttaggccgaaaagacaactgcagaggaataagaaaccttgcagcaaatgctggggtagaagcccatttacaagaagccatagtttataaatgcagcctgaacagcagaaaaaaaattactgttttttaaagtaggaataatgtcaggctatgaatgttttgtcattggaatgtattggacactttgattctacatcacgaaagtgatgctcaaattctttgatttaacataaatcctatacgaaatcttaataaattatgtatgaaacagtggatcttttcttttgttagtgaagcttttatgccattaattaggtcattcaagagcaaaccactttacaacgtaaattactttgtcaaaaattatggtgaacaaatttttgtaggcctaatatttaagacctatagttaagtaattttatatttctctttggttgcttttagataacactgaataaatatttaagatattaattcagtgtgcaaatattttaaattaaagcaacatggcttttcttctagatgtatttctgtttagtgagtactcatgagatatactcttgatataaagtgtttttcattgagcttttttttcctttacctaaatgtaaaagcctatctttatgcatacttatagtagccagcctgccacacctccccactccctgaacaaggatggcagtggctttgtaaagccctccagggtcagtgacagtgtctcttaaataatgtttatgtaatagaaagtcttaagatgacctattatattgtttcagtaatattttcaagataatgcggaattgggctggcttagataaataagactacataagtttttcactgataaatttaaatagttctttaaaaaattatttctgctttaagaattacttgatcatggatatcagggttaatagtacttaggagccgggcgtggtggcccatgcctgtaatacaagctaaacaggaggctgagggaagctgaggcaggaggatcacttgagccttggcgttcaagaccagcctgggcaaccaagcaagaccctatctcaaaaaaaagtacttagagtctcttttttaaaatctgat

SEQ ID NO: 33 - DNA, 2501 bp, Homo Sapiens
gtgttctagctcctgaatccatgctgttcgtcactacactgtactgcctgtggatgacttacttgtccctgtagtttcatctgaagaattcctcctccttttcctttgaggcctgcctcaaatatcacttcccctgtgaagactgcctggtgttctccaggagagagtgtgactcccttctctaggaatggtagcaccccaaacacacacattttgcagcatatttcaccttgcatggtaatggcctgcttgtgagttttattccgtaccagagggtgagggctctgaagatagcgccaggtcttatttacctcgataccccacaacactcattacatgtctgatgaatgaatgcatagggggatggctgggtgcatttctctcaacttttcaatttcttgaaataaataacaaaatcttaccttccctcagaagtcctggcatggttcctttcatcttgccacagccactgataatcactttcattttctgtgtaactcaccaggcaagaagtccatgcagatttacttttagtagttcacatgacaaataaatactgcgtttgatttccaaacattaaaccatagtatattatagatagatatagagttatcattcaaagtatgatatttcaatctcaaaaggcttcccctgaagaatattacaaactcttcctctctttaagatctgctgggtaggaaagatgggagaaaatgaattaatgtttacacagaaaggaggataatgggggcaaaaataatagatgaacgtatgggtggatgagagaatggataaaatgataggtggatatgttgatcttggacagatgggaaatgagtggatatatcaataaacagatatgtgggtggatgggtggagaagaggatggtggatggttgtggttttatgaagagatgtgaaaaaggaagtgtggaatgatggatgagaagttgtatgggaagatgaatagaagaataggtggttgaataaattaaaaggtgtgtggttggatgaatgaatgagtgggatgatagatggacctaagtggttagtggatggacaggaggatggatggatgtgagagccccagaaggacataaggaaagatgggtggatagatggatgggcggatggaaggatatttaggaggatgaatgagcatgtgtgtggagagaggtgcccattcacactggcttgaacacatgggttagctgagccaaatgccagccctatgacaggccatcagtagctttccctgagctgttctgccaagaagctaaaattcattcaagccatgtggacttgttattgaggggaaaaagaatgagctctccctctttccacttggaagattcaccaactccccacccctcactccccactgtgggcacggaggcactgcgccacccagggcaagacctcgccctctctccagctcctctcccaggatatccaacatcctgtgaaacccagagatcttgctccagccggattcagagaaatttagcgggaaaggagaggccaaaggctgaacccaatggtgcaaggttttacggttcggtcatcctctgtcctgacgccgcggggccagcgggagaagaaagccagtgcgtctctgggcgcaggggccagtggggctcggaggcacaggcaccccgcgacactccaggttccccgacccacgtccctggcagccccgattatttacagcctcagcagagcacggggcgggggcagaggggcccgcccgggagggctgctacttcttaaaacctctgcgggctgcttagtcacagccccccttgcttgggtgtgtccttcgctcgctccctccctccgtcttaggtcactgttttcaacctcgaataaaaactgcagccaacttccgaggcagcctcattgcccagcggaccccagcctctgccaggttcggtccgccatcctcgtcccgtcctccgccggcccctgccccgcgcccagggatcctccagctcctttcgcccgcgccctccgttcgctccggacaccatggacaagttttggtggcacgcagcctggggactctgcctcgtgccgctgagcctggcgcagatcggtgagtgcccgccgcagcctgggcagcaagatgggtgcggggtgctcagcgcggacccggcggcagcccctccggctgagtcggccctgggggactggagtcaagtgagctgtctgcgaagtgcattgggctccggaaagcagggctgggatttgcgctaaaccgttggagaatgtgtctgtggaagcaccatttggttgaaagaaaaagagaaagagaagaaagtttgttgggcaggctgccggcgcgcagttttgggcgaggtcgctagagctgcagcacatggcagaaagtaaccgttctcccggatgcgcacagtcgttgtctggactaacaggctcctgtgcccaagggctcgccaagccccaccgggctgtgtctaggcagggcagagctgggcggggca

SEQ ID NO: 34 - DNA, 2501 bp, Homo Sapiens
agatttactcaaatttaagaatgagaatacaaatccacatcttgaagtgtttcacagaaaggtctatcttaatgtctggagtatatatttcaatgaacattcattttattttatttctctccattcctgaatcaagcaatcttgaatctaaagttgctatgattagcactgaaaagaccactggactattaattgtgtgactttgggacagtaactttctgcaccttagtttgtttacatgttatacatgaaggttgaagtctgattctgctctgtgactatcattctaaacatctgatgaaatcaaatttcagtgtttggaatggtagtacaataaatttactaagaataaataattcactgcaaaaacacattgatttccaaatgatgtaactgacagttatattactgcagagggctgataaataacaaaagaaatgaaagatgcacatggtgagaactgaaattatcctgacaagtcttctacctgtttatcacttaaaatcaatgaccatgctgaatgcctacaaattacaaaatataaaagaaatcttataaatgcgcatgtacaggagtctaagttactaaaagttttaaagcataagtttaaaccaaactaatcaaagaagttgagaggaaaaattggctttcatctttaatcactactgttttgaggtcctatgtttaatataattttctaagtagaggcttcagagagaagagttgtgaggatactttcatatttgtgtagaaggaaaagtttgccatccattctagtatccctagtgttatactgatgtgcaccttggatttattttgttcctattgtataaactcatacttgacttcaaagaaaaggaaaatccaaagtccctcttttctaaggggacagaaatcctttgtgtcaactgtttgacccttttctctgtaaggtcctattggaaatcttttgtaacacaatgcaggggactcttccatgtgttgatgctgtttacacagtggggtgggcctgactgaagaaaaaaaatcgcatatacgcatgaaagattatggtcttatttccggaaagcatgaaaggtgattgatacttccaagaagtccctgttactcaggaaaattatcaaatattctactcagagatacttggaaagactgaaggaaaggaagaacgaagaaagcagaatctagacttatgtggggagagatttgtggcagaggaaaagtattctctttgaatccgacaagggatttgcctgggggaatttcctgtccagccttttattaccagggtcttttgaagccgggctccccattgggcagttccctgggagtgcagtggggaattcttacactttccctctaggtccccgaaggatctcgttttctcagtgtctctttcaggttggcaggagccttgagcctgacacttccctttgatgggacaggcaagctctgtgggcgcgtaaacacgctgtaaccaagttctttgctgattttacagttttgtgtgctcccgagaagaagtgatcgtactcaattgtctattgctggcctgccccctaagagcctgggggctcctttcccctaacccagaactagctgcacggggggcggggaaatgggggtggggaaggagtgggagggcagtggtttccgcgagcagagcgatgttactgagtgagtccctgaatggggagcgctgctgtccccaagccgattggtacttcttgtcaggaagaaacgccaagaggtgggagtgcctggggagggaggcaggcggtccctaccgcaggcgcggggagctgcctttccgcccctccgcctgctttccaagcctggactcttaggagtggctgaagctgcggagcgcttttggagcctgtgaatgaaccctcctcctctccctcctccttcttctcgctgagtctcctcctcggctctgacggtacagtgatataatgatgatgggtgtcacaacccgcatttgaacttgcaggcgagctgccccgagcctttctggggaagaactccaggcgtgcggacgcaacagccgagaacattaggtgttgtggacaggagctgggaccaagatcttcggccagccccgcatcctcccgcatcttccagcaccgtcccgcaccctccgcatccttccccgggccaccacgcttcctatgtgacccgcctgggcaacgccgaacccagtcgcgcagcgctgcagtgaattttccccccaaactgcaataagccgccttccaaggtaatcacgtttcttttgttccccccttaaaaaacaaaaacaaaaaacttatagaaaaaaacccgcgagcttagaaaaaagaagcaattggtagaaggctttaattaaggcaaagagctgtaaggcgaagttaagaaaatgtaggcacttaaaaaatgcaggtaactttcataagggcttttggggagaggcatacagagggaccttggtgttgaaaaagattcagacaaaagaaacccag

SEQ ID NO: 35 - DNA, 3000 bp, Homo Sapiens
acatttaaattgcatatttggcttgtaatatattacatatttaaaagaattactatttttctgaataccattaatactaataatagcatcacagtgactaagagtggacttaaataaaggctggcttgaaactcaggtctgccatttattagcaagcttctaaaaattctgagcccttagttttctcacatgtgaaatggagaaaataaatctgcaaaattaattaaatctgtccattcatatttttctctccagtgtatattaactggcattcctcgttaggccagaatgtgctctcaaccatgctccaaatccgctttgtgccaaccccactgccagaaccctttctaccttgagaaccagaaaaggaaacattatgcctggcaatgcctacaccctccaaaataaatctgcaggaaagaacacccagtaagtgatgagagcagcaacgactgcctttatcattttaaatttacaacaccaccttttctagagcctcttaagcattgtagataattccccactcattaaaaaataaattgtaaccataagtattcagggttgatactgcttttgaattagacagtgctcatatcagttgcataagaccaacctaaagtagaggatgaaatcttttttctgaacctttttcagaacgtaacttagtgaatatattaaaactaaactttctttgaatgggagtaatttctacggattaatctgtaatctcttagaccacacctaaggtaatgtagaggttgttgtatcataggctttgtgattagagaccactggatttgtctttggaaaagtcactcatgattctttgggctttggtttcctcatcttttataccggcttaataatgaccaccgtagagttgtcatggaagttaaatgaactcatgtaccataagtgaccaatacaatgattgacactcagtgatttatcaataaattaaaacatttattatcaatatgacagagaaggtgccgctaaaatagacaataggtttttggaagaggtgattaaatggatgcaaaatttatggattgtttattccgtctacctttgctgtgtcccctggttgtggcatacacacgtgtgggtataaaatcgtaaatcctatgtagtcgcgtagtgcatgcgcagaaggcttagacacgaaatgtcatttcagcaatgtgcctagagaagctctgacgccgccttggaagtaagtcgttgctgcctgacctttgggcgtctgggacggatgcctatacctgcacccagcagcactggaaggggcccaggcccttcgcagcacagcctatccccagaccgcttagtccttcataacatatatctccacggaaaagggtatttcctcccgtcagaaaaagcgccccagtctggtctgggttggtttttatttcacgttgttgcaagtaggcgaagtcccttctgtctcctcccttggggtaagtggaaaggagtccggcagggggcccgcagtggcctgcacaggggaactgggtagcgagagagttccaggcaattccgggggctgccccacagaagcaggtggggatcgacagtggctctccggcccagggaggagagcgcggtcgcgggtccctcccctcagcctggaggctgcagccgctcgagtcggcccgggtgggggcggggtgggggcggcgcggagggcacggagattacggcggcgccacccgggacatccagggccccgaggccctgggcggtccccacgcgagatcgcaaaccatgacaataggcagtcacccgaggtcaaataaaaacggagtgggtcccccgcgcgccgccgccccccgcgtccctggcggcctcccccgaggcccccggcggcctcacgagcccgcagtagccggtggcgacgtcgcccccgccccacctccctgcgcaagtgcgaggctgccggcagcgcggcgcacgctccggccgttcccggcttccgcgcaaaacttccatcctgtccacgtgaagttgtcgctgccttagagagggggaaagagctgcgggaaaagccggggagtgacgactgcggcggctgggcgcgctctctcattttcttttcttctcctttcccccctgtcgcagtccggagttttggctcctctcctttcctcctccccctcggagccggcttctccctccgccccgcttctcccccgcttgtgtacgctatttgttgtggggtggccgaaggggatgtcctgttttcaccagaggcacagcgcgaaggggaaacttcgacactggaaggaacgagaataaatacttaattacggacgcactgaaccgcggctgggacagacacttcgggaacccgaggcggaccgggcgacgaggtgagtgaccccttcttccaacccccgccccagggctcccgggggagcctgagttgagagaacccccaaactttccgggaaagtgcgcgaggctccgccggggacgccgagcgctgggtactgaggacgcgcagctggacggtgcgtgggcgcctgcgtccccggggggcgcttggaggccgggtgccccacgcctgagggcccgggccgctcggaccgcagcggtgctctctgccctagaagacgtccccaagccccaagggtcccttccgagcctgcctgtcccttccggggtcggcgcggagcctgcgcgtaacggagttcatccagcagtccagcgcgcggcttctacctgcaccccgcctccacctggcagaggcgcgagcatcggggtctcccccacatctttcttatgacgtgtattactttctgatgaccccctagatggtccaggcgcgaggatgctgacccagagtccttcggagggtcacaggcgcctgggctttcccggtgccgggtgcgtgtgtactttaaaggctcgcgttctaatctccaggcactgatcgggcttttcaactgcggcgatcccactttaatagtttttatgtggcgtggactgaatgtc

SEQ ID NO: 36 - DNA, 2501 bp, Homo Sapiens
gtcacttccatgtgtcctgcagttctctgaaggggcgtgggacctaccgatgccaattatccagcattatctccagattccaagaagttggggtgtgagccagcaatcagtacagaaaagagataccaaaataagtttgagttggggagtgttccttcaacttcagttttctggaagagatcttttttttttttttgagacagagtttcgctcttattgcccaagctggagtgcagtggcacgatctcggctcaccgcaacctcctcctcccgggttcaagcgattctcctccctcagccttctgagtagctgggattacagacatgcacctgtaatttctactaaaaatacaaaaattagccgggcgtggtggcgcacgcctgtaatctcagctactggggaggctgaggcaggagaatcgcttgaaaccaggaggcggagattgtaccaagatagtttgttccagctaaacaacctggcgctagtgcaggaaaaggtggaaggcacggggctagcacaggagggttcaatattttcaaccttatcaagccatattttggcaactcttgtttttcacgagaagcccccgctgggcttgtcccagcgctgtcctgaggcttcccccatgagttccgatagggcagaggccgccctgagcgtttctctttcccctggtccaagagtggctcaaaagaaggatttttgactggaattggccactttgtgttactttttgacccttgacctcgccccaaagggggatgcgggggaggggctctggtaggggtggccccgctccttccaggtccgcaagcccaggttcccgcccaccgggctcagcccaccctgcggccgttcagggaggccgttggcacccgtgacctacgacccccttcccgagccccaccgaggtcacagccgtggcctcgtctccccatgcctgcttcccgccccctgcccgtgacgggcgtctccgaggaccaatgagcgcgctgtatccacccctcgggcggggccaagcgccgaccaatcgccgctcgggcgcccggccgggtccaaacgctccaatcgtcagcggcggcggggcgggcagagggccggggatggcaggttcaaccaacgggtgggcacgtcgtcctcgcgaggaggcgtgccctgcggccgggcgtgcggtgtccgcggcggcgcagggagggggagggaggtaaacaagatggcggcggcgtgtcgggcgcggaagggggaggcggcccggggcgcccgcgagtgaggcgcggggcggcgaagggagcgcgggtggcggcacttgctgccgcggccttggatgggctgggcccccctcgccgctccgcctcctccacacgcgcggcggccgcggcgagggggacgcgccgcccggggcccggcaccttcgggaaccccccggcccggagcctgcggcctgcgccgcctcggccgccgggagccccgtggagcccccgccgccgcgccgccccgcggaccggacgctgagggcactcggggcggggcgcgcgctcgggcagacgtttgcggggaggggggcgcctgccgggccccggcgaccaccttgggggtcgcgggccggctcggggggcgcccagtgcgggccctcgcgggcgccgggcagcgaccagccctgagcggagctgttggccgcggcgggaggcctcccggacgcccccagccccccgaacgctcgcccgggccggcgggagtcggcgccccccgggaggtccgctcggtcgtccgcggcggagcgtttgctcctgggacaggcggtgggaccggggcgtcgccggagacgcccccagcgaagttgggctctccaggtgtgggggtcccggggggtagcgacgtcgcggacccggcctgtgggatgggcggcccggagaagactgcgctcggccgtgttcatacttgtccgtgggcctgaggtccccggaggatgacctagcactgaaaagccccggccggcctccccagggtccccgaggacgaagttgaccctgaccgggccgtctcccagttctgaggcccgggtcccactggaactcgcgtctgagccgccgtcccggacccccggtgcccgccggtccgcagaccctgcaccgggcttggactcgcagccgggactgacgtgtagaacaatcgtttctgttggaagaagggtttttcccttccttttggggtttttgttgccttttttttttcttttttctttgtaaaattttggagaagggaagtcggaacacaaggaaggaccgctcacccgcggactcagggctggcggcgggactccaggaccctgggtccagcatggaggtggtggacccgcagcagctgggcatgttcacggagggcgagctgatgtcggtgggtatggacacgttcatccaccgcatcgactccaccgaggtcatctaccagccgcgccgcaagcgggccaagctcatcggcaagtacctgatgggggacctgc

SEQ ID NO: 37 - DNA, 2501 bp, Homo Sapiens
ggaggatagaaatataaattaaagaatgacacaaataattataaagttacagctgttaaaagaaaagcatatggtgccaagagaacgtgtaatacaagatctactcatggaggtgagggaaagcttgcccatcaaagaagttatgattcaatccacgaagaccaggagttggctgggtgaagaaaaaaaggtcagaggaaggaagtccacactggggaaggctctaagcataaagggtaggaggattacagaggcatattcacgaaatttggagaaggctttcagtaagcaaggagaagccaaatgaaagtttacgggagagttggaggcttgaagacacgttcaaggatctggtttttatcttctctttatctcaagagcagtgggaagccattaaatgattttaatcagagggttggtataactagttttgtattttgaaaagctgaattcagctctcgtttgagaaactgagtgaaagagcccagaacggccgtggctgagggtgactcgtgggagactcctacacaagccatggcagtggcatgggctggtggcagaagagggaatagggagaagatttggaactcaatcttcctccattgacaaagtcactccagctttggcaaggcaattaattggtgggaaagaagatgcctagccctcctgatttcactgcactttctgcatcttcaacatgagtactgggaagtggcaaaacatccagaggcagcttgggtgctaggtggagcatgagttaaaattccaggatgaagcaaatgaacacttagaatgacaggaaagatttgggagttgggtttgggggagggctatttacctttattccctggagaccctggcacaaacccttgcctctgcaatcttcctctcaggtaaaggaattcattaaatgaattgctagaagatctactgaccagagggctgtacagaatcatatctttgagagtgggaagtaggttgatcacatagtttattatccaatcaggacatatctgaaagagaaagggggttctattaatatttaaactacaaaacatgtacaccaggaatgtcttgggcaaatctggttgccctagcaagaaaggaaatttgaaagtttatactgttctgctcccatgttaccccgtttgcacatgagagggtaagtattctctttcttcacctgcattaagggaataaaagcacaagcattcaggtgactcccaacccacttttaattttacagtttctgctatactctatacattctgaaaattacatttcccaccactatcacttcgtgataggtgatcatttacaattactcactgactcagtcccgggaagaggcggtgcaaaatgggacgctctatccaggtgctcattagaaatgcagaatctctgcctgcctcctagacctactgaattagaatctgcatttttaaataagatttccaggtgatcaatatgtacattaaaacttgagaaaaacctctagacttcgacctaaagaaaaacattttacaacttgacagtgtatgcacatacatacatgcatatagacacaactgaagcacaaatttaatgaagtagaatttaccgttactattttatttgggaaagaaatgtgctcgcgactcaatagattggagtattcactcctggatctcaacttgcaatttgaaaacgcatctctaaagcacctaggagcaatctgaagaaagctgaggggaggcggcagatgttctgatctactagggaaaacgtggacgttttctgttgttactttgtgaactgtgtgcacttagtcattcttgagtaaatacttggagcgaggaactcctgagtggtgtgggagggcggtgaggggcagctgaaagtcggccaaagctctcggaggggctggtctaggaaacatgattggcagctacgagagagctaggggctggacgtcgaggagagggagaaggctctcgggcggagagaggtcctgcccagctgttggcgaggagtttcctgtttcccccgcagcgctgagttgaagttgagtgagtcactcgcgcgcacggagcgacgacacccccgcgcgtgcacccgctcgggacaggagccggactcctgtgcagcttccctcggccgccgggggcctccccgcgcctcgccggcctccaggccccctcctggctggcgagcgggcgccacatctggcccgcacatctgcgctgccggcccggcgcggggtccggagagggcgcggcgcggaggcgcagccaggggtccgggaaggcgccgtccgctgcgctgggggctcggtctatgacgagcagcggggtctgccatgggtcgggggctgctcaggggcctgtggccgctgcacatcgtcctgtggacgcgtatcgccagcacgatcccaccgcacgttcagaagtcgggtgagtggtccccagcccgggctcggcggggcgccgggggtcttcctggggtccccgcctctccgctgc

SEQ ID NO: 38 - DNA, 1508 bp, Homo Sapiens
attctacaattataaacatttagtgtattttgcaaatatggcataacctgttggcataaaattccattgttccagaaaatatcggtaataaaattatagaaaagttaaagatcttcatttcttatttcgaagcgtttgggagacatttcagaaacggatgggaaatgttaaattctgcatgcctgcttatttttctttccacaccgactagatgtaaacgagtgtcaccaaaagtacaccacaggcacccacacagattccttccataagggatccacaaagtttagatgtgaaatgtaccctaaagggttcctagccgtctctcatccctccctctgtgaaacagggaagacacatgtgttttcaagggcagagatggaacttgggccaatgggccggggggtggggggaagttggaagggactgccttaggacatggcaggatagtggattgtttctgccgccttgttgcccataccggggctctctgcaggcgcgtcggctccctccccccctgctgagaagaagccctgccaaaacatccgcctcccccgggaacccccccgtgggttcaaagcgggaaaatgttgcctcaggtttaaaataatctgtccaagccccccagcgcgggagaaacgttcttactcgctctctgcccccgggggtgctccccgccctctgctgccagaaccttggggagtgcctagacccggggcagcacacgtccgggccaaccgcgagcagaacaaacctttggtgggcggccaggaagctccctcccagccaccgcccccctccagtgcctttttttccccccatacaatacaagatcttccttcctcagttcccttaaagcacagcccaaggaaacctcctcacagttttcatccagccacgggccagcatgtctgggggcaaatacgtagactcggaggtaggcatccgtgggggggcgccggctcgggcgtgcggggaagtgtccgcttctgctatctgcctctccaaatatcccgactgctgatctggccccccagccctctttccacttcggagcactcctctggcgttggcaccgctgaagaatgggcctgggcggggaggtgaagagaagccaggaatgttttatgttttcctaatggagagggggcctcgggagcccctgagctaggaggacacggaaaaggggattggggtcctgagattgggtctgttgggcccaagacgcgttttctggatgggtctaggatgctcccctgtcgcgggaaccccgcggtccggccctgcctgctgggggttcgaaaaagtggattgcagggtggaaggtgttatttacccgagtcctggggacagtccccgggactctccgccaagcgcccaaaacggcaggtccccaagcggcgcgcggtgtttttgcactttccaaaattcttgaaacatctcaaaaatccttctgcatcttggcgtctggcagggttttccaaaaaaagtaaacctccctcccaaatgca

SEQ ID NO: 39 - DNA, 286 bp, Homo Sapiens
tttgcactaggctggaagtggccgccagtcccccgtgcaattccattctctggaaaagtggaatcagctggcattgcccagcgtgatttgtgaggctgagccccaacagtccaaagaagcaaatgggatgccacctccgcggggctcgctcctcgcgaggtgctcaccccgtatctgccatgcaaaacgagggagcgttaggaaggaatccgtcttgtaaagccattggtcctggtcatcagcctctacccaatgctttcgtgatgctgctgctgatctatttggg

SEQ ID NO: 40 - DNA, 2501 bp, Homo Sapiens
tctatacacattatgtcttttaaatgacacactagccttctgagggtaacttatattggcaacagttttcagatgtggaaactgtgaagacaatgttggtgatgtggaagcaacataaactttggagtctttcagacccaggtttgaatgtcagactgctttttattcagagtaacttcagagcattatttctcaccttaattttttttcaggcctctttgtgtctatgtgtcctcttcactcctgtccattgttcattcagtgatttttgcaccttccttcactgttagtgtgtagacacatagttctcctggctctgagacctatgttaattccattctaccatcctgccagcccactcaattcctattgagcaatgctagttgaaagttgtggtgggattaaatgttgcaatgagtattcaaatgaggttgaagtatctacgcattctacttacatatggtgaggtatattcaaggaaggctgtagccattaaaatctcaggaaataatttttcacctcctcaggtgaaagggtcttcaggcctttgtgttctggaaggttcatttatagccatttcccaaatgacaatgcgattgatgagtctagagtctagctcaaatagcaatggactggaagactagtttaggttttactaatgtggaacatagaacaaattatgtccttgtttcagcctgttcatctgtgaaatagagcctatcatatccagtcttccttgcctttaggtttgagttaccttctttggtcaaggtaagtaaatgcctatgatgtttggctgtgcacaagataaagctacaacaaagctacaacccatcttttctctgtagaagactgcaaaaagcaaaagagacccaggcaaaaatctcggaatgacttttggaacagagagcctccccagaatcagaagtcaaaggaatttaaaacatagggaggcccagggtctctactgacataaaggaaagatgttttccttataggtttacgtttacattttctctctctttccattcccacttgcatctccacctttacacagggcttatgggacctcctccacaaaagagcagttgcagtaacccacatcatcctctacgcctggctgtccatcaagaggcgaaaagcagccctatataggttctatccttggatagttccagttgtaaagtttaaaatatgcgaaggcaacttggaaaagcaagcggctgcatacaaagcaaacgtttacagagctctggacaaaattgagcgcctatgtgtacatggcaagtgtttttagtgtttgtgtgtttacctgcttgtctgggtgattttgcctttgagagtctggatgagaaatgcatggttaaaggcaattccagacaggaagaaaggcagagaagagggtagaaatgacctctgattcttggggctgagggttcctagagcaaatggcacaatgccacgaggcccgatctatccctatgacggaatctaaggtttcagcaagtatctgctggcttggtcatggcttgctcctcagtttgtaggagactctcccactctcccatctgcgcgctcttatcagtcctgaaaagaacccctggcagccaggagcaggtattcctatcgtccttttcctccctccctcgcctccaccctgttggttttttagattgggctttggaaccaaatttggtgagtgctggcctccaggaaatctggagccctggcgcctaaaccttggtttaggaaagcaggagctattcaggaagcaggggtcctccagggctagagctagcctctcctgccctcgcccacgctgcgccagcacttgtttctccaaagccactaggcaggcgttagcgcgcggtgaggggaggggagaaaaggaaaggggaggggagggaaaaggaggtgggaaggcaaggaggccggcccggtgggggcgggacccgactcgcaaactgttgcatttgctctccacctcccagcgccccctccgagatcccggggagccagcttgctgggagagcgggacggtccggagcaagcccagaggcagaggaggcgacagagggaaaaagggccgagctagccgctccagtgctgtacaggagccgaagggacgcaccacgccagccccagcccggctccagcgacagccaacgcctcttgcagcgcggcggcttcgaagccgccgcccggagctgccctttcctcttcggtgaagtttttaaaagctgctaaagactcggaggaagcaaggaaagtgcctggtaggactgacggctgcctttgtcctcctcctctccaccccgcctccccccaccctgccttccccccctcccccgtcttctctcccgcagctgcctcagtcggctactctcagccaacccccctcaccacccttctccccacccgcccccccgcccccgtcggcccagcgctgccagcccgagtttgcagagaggtaactccctttggctgcgagcgggcgagct

SEQ ID NO: 41 - DNA, 2448 bp, Homo Sapiens
ctgccctgcctctacgacaaaagccaacgggtcttcagtacttttattaaaaaatagtcacgcagacagtgccctggtggctctgccccgcatcccaactctggggtgggggaaaggggtcaacgttttcgcagccccaaaccgggccatcacttgcccaccgagtcgaatatgatgcggttctgctcggcgcgctcccgctggctctgcgtccgcgccactccagcagggtccgcagcaggtgaaaggtgaggtcaatggacagagaagggttgtcccgccgcggccgctcgcctgccgtcccgagtcccaatcggccgggccccgcgcgggcgagaagcgtccgccagcagcaagaggagcgcgcgggccccgcaccctggttccgtgccccggggctccagcgcagactcgggtcctggacccggccgcctcggggctcctctggctgctcccagggcacagctgtaccaggagcagcagcgcggccagcagcgctgcgtcccgcctgcctcatggtgccgccggccctggacacacaggggcagcgcagggtgaggtgcgcctgggacagctgcaggcgccgctcccctccccgcgctcgcccggcgacccctccggccgccgcccaatgcccgcagcctgccctccagccccagccactgcgccagtgctgttccatcccttccacccagcctccctccccggaggagcgtggtggctgagctgagcggagtcctggtgcagggggaggctgggcggacgctctgagccactcacaggttgtcggcgagcgtctgtacggtccaagattgagctccagtctctgtccctcggggcaggctgaagacgccttggggaacacagggtctgtcccggcgtgtcgccagccttatatagtgccaggacagctccgactgacgtcagcgaagaacatgcactgattgtagaagcaatgacagccacagcttcgagtctgacggctggcgggccccggagggcgcacctccctacaccagccttcgtgcccctgggcgtagcgctggaagcagcactggacgcaggaaagcgagaagccggctggggcgtaaagactgctctgggacccacgggagtcccatcgccccgcttagaacagccagcaatgactagggccgtccccagaccagactagtccgggtcgcgtgttctgacacacgaaagggaggcgggaccgtgaggctgtccatggtgctgaccccgtcctctgcctctagaagtggccagaaatgtgagaacgctgtgccgctggaacccactgcctccctgcagctatcagttctgcaaatgcaggcatcaggagtccaccgctggcactcagccaacacagtgggacccactgagaggcagtctgccacaaccaaagtctcccagcattcttatctttttccagccccaggatccaaatttgtagggctgtctgacaggcaccatgtaacagagggtctctagcatccgagtgctttcagaccacaaatggctggcccatctgcttttgagtttgccaaagtagtttagcaaagttcagtttctctcctgggaatcatagcagcagtgtaactctgcccatgagcagcaaagaaatatgggttcaagtttctgctaactcctggtgtggacaggtcacctccctcctaccaacctcagggtcctcatttgtaagactgggcttggccaggcgcggtggctcacgcctgtaatcccaacactttgggaggccgaggcaggcggatcacgaggtcagtagtttgaaaccagcctggccaatatggcgaaaccccatctctactaaaaatacaaaaattagccgggcgtggcggtatgcgcctgtggtcccagctactcaggaggctgaggcaggagaactgcttgaacccaggaggcggaagctgcagtgaggcaagatcgcgccactgcactccagcctgggagacagagcaagaccctgtctcaaaaaaaaaaaaaaaaaaaaaaaaaaaaattgggcttggtggtctcttggcttctttccagctctagaaatgactccccaatagttttctgcttaaaaacttactcattaccactgcagattccggattacatatttaataacatatttactgaggcaccatataaagggttccgggagtctctaaagagctggagctacaagaagcctaggcagggttagagtaacaaatgtgtctatgaagagtggggatgagtggcatttgctgggatatgggtgtaaagttgataaggtcatgaaggttcaacagatatttatggagtgcctagtatgtggtgggaataagactattatcaagggctctaaagcagtcagtgtacattttagagtgaagaggggcattgcagggtgctagtcctcttaagctctgaccggcaacccaaccccgtggaaactgg

SEQ ID NO: 42 - DNA, 2344 bp, Homo Sapiens
gcctggcacactcaagactcccacggaggttcagttccacactcccctccaccctcccaggctggtttctccctgctgccgacgcgtgggagcccagagagcggcttcccgttcccgcgggatccctggagaggtccggagagccggcccccgaaacgcgcccccctcccccctcccccctctcccccttcctcttcgtctctccggccccaccaccaccaccgccaccacgccctcccccaccaccccccccaccccacaccaccaccaccaccaccaccaccaccaccccgccggccggccccaggcctcgacgccctgggtcccttccggggtggggcgggctgtcccaggggggctcaccgccattcatgaaggggtggagcctgcctgcccgtgggcctttacaagggcggctggctggctggctggctgtccgggcaggcctcctggctgcacctgccgcagtgcacagtccggctgaggtgcacgggagcccgccggcctctctctgcccgcgtccgtccgtgaaattgcggccggggctcaccgcgatggccctcccgacaccttcggacagcaccctccccgcggaagcccggggacgaggacggcgacggagactcgtttggaccccgagccaaagcgaggccctgcgagcctgctttgagcggaacccgtacccgggcatcgccaccagagaacggctggcccaggccatcggcattccggagcccagggtccagatttggtttcagaatgagaggtcacgccagctgaggcagcaccggcgggaatctcggccctggcccgggagacgcggcccgccagaaggccggcgaaagcggaccgccgtcaccggatcccagaccgccctgctcctccgagcctttgagaaggatcgctttccaggcatcgccgcccgggaggagctggccagagagacgggcctcccggagtccaggattcagatctggtttcagaatcgaagggccaggccccgggacagggtggcagggcgcccgcgcaggcaggcggcctgtgcagcgcggcccccggcgggggtcaccctgctccctcgtgggtcgccttcgcccacaccggcgcgtggggaacggggcttcccgcaccccacgtgccctgcgcgcctggggctctcccacagggggctttcgtgagccaggcagcgagggccgcccccgcgctgcagcccagccaggccgcgccggcagaggggatctcccaacctgccccggcgcgcggggatttcgcctacgccgccccggctcctccggacggggcgctctcccaccctcaggctcctcggtggcctccgcacccggggcaaaagccgggaggaccgggacccgcagcgcgacggcctgccgggcccctgcgcggtggcacagcctgggcccgctcaagcggggccgcagggccaaggggtgcttgcgccacccacgtcccaggggagtccgtggtggggctggggccggggtccccaggtcgccggggcggcgtgggaaccccaagccggggcagctccacctccccagcccgcgcccccggacgcctccgcgcggcaggggcagatgcaaggcatcccggcgccctcccaggcgctccaggagccggcgccctggtctgcactcccctgcggcctgctgctggatgagctcctggcgagcccggagtttctgcagcaggcgcaacctctcctagaaacggaggccccgggggagctggaggcctcggaagaggccgcctcgctggaagcacccctcagcgaggaagaataccgggctctgctggaggagctttaggacgcggggttgggacggggtcgggtggttcggggcagggcggtggcctctctttcgcggggaacgcctggctggctacggaggggcgtgtctccgccccgccccctccaccgggctgaccggcctgggattcctgccttctaggcctaggcccggtgagagactccacacagcggagaactgccattctttcctgggcatcccggggatcccagagccggcccaggtaccagcaggtgggccgcctactgcgcacgcgcgggtttgcgggcagccgcctgggctgtgggagcagcccgggcagagctctcctgcctctccaccagcccaccccgccgcctgaccgccccctccccacccccaccccccgcccccggaaaacgcgtcgtcccctgggctgggtggagacccccgtcccgcgaaacaccgggccccgcgcagcgtccgggcctgacaccgctccggcggctcgcctcctctgcgcccccgcgccaccgtcgcccgcccgcccgggcccctgc

SEQ ID NO: 43 - DNA, 2350 bp, Homo Sapiens
cagatgcactggtgagaccaggccctggctgtgaccttgggcctgcatcatgacccccgacccttgacccagatcacaactatgacctggccgtaacctcctgacctggacctcagtccctcagtccccagagcctgtgactcctgaccctgacctggaccacaactcttgaccctgaatgtgactcctgagacccaacttgacagtaacatttgaccctaaccatcacccttgatgatagtccctgcccataccctgatagcaattgtgaccctcatgactctggccctgaatgtgacctataactcctgaatttgactgtgacatttgaccctaatcataaccactaaccatagcactgaccataaccttgactgtgtgactcttggtcctatctctttcacagcccctgcctcttctcagaatcccttctctggaacctggttgggttcataatccctgaccctggcccctgacttgaggcagaattctggaccctgactataacttctgatcctaactggattcagattccagtcactaactctgacccatggctcagccgaatcccatccaatgatcctagtttataatacttgactggtcccttgccctagttgatttctgatccctgtctgatccctctcctgactccaaaatcctggcacaggtagttcctagaaacctagacccacaggacttgcaaccatggtccccggaacccgagaaccttggtcagccctacccacctctgccatagagccctcccccagcctccaactcatgagacttcccaccacctcccccagacaccctactccaaggggattggtcgggtgtgtcccgagactggaccctttctgaacacccccaccccccacagatgtggacgaatgcagttcgggtgcccctccctgtggtccccacggccactgcactaacaccgaaggctccttccgctgcagctgcgcgccaggctaccgggcgccgtcgggtcggcccgggccctgcgcaggtgagcagcatagggacccgccagagagtctgggagtagggcctgggttccagggcaaagccggctggaaaggtggaggcgggaccaaggcgctgtgggaggagcttagaaacctggcattggtgggggcggggttactgcgatgtgggcggagcttgtctgggaggccgggtcccgtgactccgcccaatctcccgcgtaccctagacgtgaacgagtgcctggagggcgatttctgcttccctcacggcgagtgcctcaacactgacggctcctttgcctgtacttgtgcccctggctaccgacccggaccccgcggagcctcttgcctcggttcgtacccgggctgatcctggccccggaaagggtgggcttagggcaggaaaaggcgggacggggagaagagggcgaaaaggggaaaacgagtttttagccggggtattccagcaggatcagggggcagctggtgggagtctcgaggcagtgagggggggcggggcgtggagatgaaagggccgagtctgggtatttggaccgtgattgtaaagaagctgttctaaacccgtcggggggcggtgtttgcagggagggaagtagcgtgaggcaggttggggaaggcgtgagaggcctaggagagccgaggggcggtggaggggtgtggcctagaatgttaggcggagcgggaggtgggccgggccttcggacgccctgtcccgcagacgttgacgagtgcagcgaggaggacctttgccagagcggcatctgtaccaacaccgacggctccttcgagtgcatctgtcctccgggacaccgcgctggcccggacctcgcctcctgcctcggtgagaggccccgccccggcctgatccctcctcccttcgactccccgactcgccgattggcctcccacctctgtctttcctcctccgcttctcccctccccttacctctttcccccgcctcctctcctagcctccccaactctcctctaccccaatcttctcctgccctctcctctgcttccccggcctcccccttctgactctcctctcccctctttgtatcccccatcttgcctccctgcttcccacatccgaccacccgacctctctcctcagacgtggacgaatgtcgcgagcgaggcccagccctgtgcgggtcgcagcgctgtgagaactctcccggctcctaccgctgtgtccgggactgcgatcctgggtaccacgcgggccccgagggcacctgtgacggtgagcctgcccccacccgccttcgctagcgcttgcaacgcggtgctggaggctgctcccttggggactgaggaggggcgccctg

SEQ ID NO: 44 - DNA, 2206 bp, Homo Sapiens
gggcattccctgggatggcaagtggcaccagcgctgtgagatggtttccttcctgccgtcaggcgtcaggaggcctgctcgggtctgcatgtgcctgggcttggcaggtggggaggcggcacccagggcagcccccgcattggaagctctaggaacttggatctaggctgaaggcctttgctctagagttccggattgctgagcttggaacagctcctcctagacacagtgtggcgcgggagcagctgcatgagggcccacgtactctgcacacatcagcagcccatccgaccttgtccctggtcatgcgaaacgcatgcccatccgacctccgaccttgttcctggtcatgcaggttccgcctgggctgtgacaggaggctcggcgccctcaggcacctggcaggctttcccgaccttctccctgagcgacaggaatgggaagtgagcaaatccaagtagaattaggaggctctcctcagaggagcctggcggaacccggtcctggctgtgtgccgagtggcggggcacccacagggagatgagccagtgcctatctcttgcctcagtctccccgtggtcgcctccttcctcagaaggggctggcccaggctggtgcctccgtggcccctggagcatacctgctgccgccttccctggcctctggcgacagcaggccttccgtactccacctgtcccccagccagcatggctccacacagaacacggccgcagacaaccctcctgtgtcctgcatagcgaactgccactctgcgtgggccccactgccaggttagggaggcaggagctgcccccaccccctgcccgggagctgtcgtctgtctttcggatgagtcaggaacaaatgcgtcaacactgggtggccgccctcgccactcctgcgcacgggccctgtggggagagccaggcagtgggtggcgtgggacaggtgatgcccatgcccagtactcaggagacctgcatggcagctcctaagatgggtacaagcgatcataaggagggatgtacgtgtctcatctccccacccaccacgggatcaggttgaggccgtccagggagtgcatgggagggctgcgctcggcgcatctgcagagatcccctgaagaggggccctggctgcctcccactggggtaggtgcgggcccaggtccccgacaccgtgacggtgctgtgggactttgatggacctcacccggggagcccaggcctgctccacggcaaggtggccacgcactgcctctgcagtcctgagcacaggctccatacgggacctgaggcctgggctccatgacacttgggctatgtgcttccctggtgcttccctcctggggatgaaatcacacccataggtaaaggtttgggagtggagggagacagcaggagacaaagcaaggggacgaggactctggcagccacaaaggcagcgggagggccctggaggctcctgttgggcagcgcagtcaggaaagggcccactaggtgggagaggcaggcgcctggtgagtgctgagatctgcaccacgagaagggctgggctcccaaggcatgcatggggcctgggagtggagggagtgtgagcgggtgttaggacggggtctggggcgagcgggtgttaggacgggcctgggagcggagggagtgcgagcgggtgttaggacggggtctgggagtggagggagcgcgagcgggtgttaggacggggcctgggagtggagggagcgagagcgggtgttaggacggggtctgggagtggagggagcgcgagcgggtgttaggacggggtctgggagtggagggagcgcgagcgggtgttaggacggggtctgggagtggagggagcgagagcgggtgtcaggacggggtctgggagtggagggagcgcgagcgggtgtcaggacggggtctgggagtggagggagcgcgagcgggtgttaggacggggtctgggagtggagggagcgcgagcgggtgttaggacggggtctgggagtggagggagcgcgagcgggtgttaggacgggtctgggagtggagggagcgcgagcgggtgttaggacgggtctgggagtggagggagcgcgagcgggtgttaggacgggtctgggagtggagggagcgcgagcgggtgttaggacggggtctgggagtggagggagcgcgagcgggtgttaggacggggtctggga

SEQ ID NO: 45 - DNA, 2233 bp, Homo Sapiens
ctgctggacgtggacgcagacagcgggctcctctacaccaagcagcgcatcgaccgcgagtccctgtgccgccacaatgccaagtgccagctgtccctcgaggtgttcgccaacgacaaggagatctgcatgatcaaggtagagatccaggacatcaacgacaacgcgccctccttctcctcggaccagatcgaaatggacatctcggagaacgctgctccgggcacccgcttccccctcaccagcgcacatgaccccgacgccggcgagaatgggctccgcacctacctgctcacgcgcgacgatcacggcctctttggactggacgttaagtcccgcggcgacggcaccaagttcccagaactggtcatccagaaggctctggaccgcgagcaacagaatcaccatacgctcgtgctgactgccctggacggtggcgagcctccacgttccgccaccgtacagatcaacgtgaaggtgattgactccaacgacaacagcccggtcttcgaggcgccatcctacttggtggaactgcccgagaacgctccgctgggtacagtggtcatcgatctgaacgccaccgacgccgatgaaggtcccaatggtgaagtgctctactctttcagcagctacgtgcctgaccgcgtgcgggagctcttctccatcgaccccaagaccggcctaatccgtgtgaagggcaatctggactatgaggaaaacgggatgctggagattgacgtgcaggcccgagacctggggcctaaccctatcccagcccactgcaaagtcacggtcaagctcatcgaccgcaacgacaatgcgccgtccatcggtttcgtctccgtgcgccagggggcgctgagcgaggccgcccctcccggcaccgtcatcgccctggtgcgggtcactgaccgggactctggcaagaacggacagctgcagtgtcgggtcctaggcggaggagggacgggcggcggcgggggcctgggcgggcccgggggttccgtccccttcaagcttgaggagaactacgacaacttctacacggtggtgactgaccgcccgctggaccgcgagacacaagacgagtacaacgtgaccatcgtggcgcgggacgggggctctcctcccctcaactccaccaagtcgttcgcgatcaagattctagacgagaacgacaacccgcctcggttcaccaaagggctctacgtgcttcaggtgcacgagaacaacatcccgggagagtacctgggctctgtgctcgcccaggatcccgacctgggccagaacggcaccgtatcctactctatcctgccctcgcacatcggcgacgtgtctatctacacctatgtgtctgtgaatcccacgaacggggccatctacgccctgcgctcctttaacttcgagcagaccaaggcttttgagttcaaggtgcttgctaaggactcgggggcgcccgcgcacttggagagcaacgccacggtgagggtgacagtgctagacgtgaatgacaacgcgccagtgatcgtgctccccacgctgcagaacgacaccgcggagctgcaggtgccgcgcaacgctggcctgggctatctggtgagcactgtgcgcgccctagacagcgacttcggcgagagcgggcgtctcacctacgagatcgtggacggcaacgacgaccacctgtttgagatcgacccgtccagcggcgagatccgcacgctgcaccctttctgggaggacgtgacgcccgtggtggagctggtggtgaaggtgaccgaccacggcaagcctaccctgtccgcagtggccaagctcatcatccgctcggtgagcggatcccttcccgagggggtaccacgggtgaatggcgagcagcaccactgggacatgtcgctgccgctcatcgtgactctgagcactatctccatcatcctcctagcggccatgatcaccatcgccgtcaagtgcaagcgcgagaacaaggagatccgcacttacaactgccgcatcgccgagtacagccacccgcagctgggtgggggcaagggcaagaagaagaagatcaacaaaaatgatatcatgctggtgcagagcgaagtggaggagaggaacgccatgaacgtcatgaacgtggtgagcagcccctccctggccacctcccccatgtacttcgactaccagacccgcctgcccctcagctcgccccggtcggaggtgatgtatctcaaac

SEQ ID NO: 46 - DNA, 2398 bp, Homo Sapiens
actgtatttctggccccacagtcttctactgccgactttaggtctctctggatctcaggcccccttctctaagatgcatcctagaggaccaaaaatacactttatttgggcttcgcctgcttttgtggaagggtagtttactagaggatataatctcgtgttttaatttgctctctctcctaaaggaaatgtggagaaaaaaaaaaagcagaaattggaaataaccaatatttagtttatttcattcgattcttaggggaactggtgaggagcctaagatgattttcccttcctagagaaagaatccaaagtccagggaaatagcgacaggggagttcaagactgcccctgctagtccttccttggctactctccgctgcgatcgcaggatagctctcattagcaggagaatcgggcaagtgtgtggataagtagagagtgtgttgaacaacttgtaacgttttatgaaatacgcattgtcatggttccctaaaaggctttgcggaagccgtttgtctttactaatcaagtctttacttacacaaaagtagaagtagaagtagttttagaaaacatactaacaatcttctatccccttgaagaccagagtagcagaaaacaggtgatttgcattataaaattgcactcactttttcctcctttcagatttcacattacattagcccatttgtgttacggtgtataaaaaatggaacaggcgcctccactgcattgttctcctttaaaaatagatcacttacaccctaactttgttttccttaaattcgattcttaacaggagagctttctattatttcagatggagtgaggttgcacgactgggatggaagaaaggaatcccttaaatttgggggaatttctgttctctgttccaagaccattttacttggggtgtgggggtgggcgcggcggtcagggcagtggaacgcagtcgcggctgcgccatccctgcacttccaggcgcgcgggagggaccggcggggacgcgagctgcggactctggcgaactcgggggaggcagacagggggaggcggacacccagccggcaggcgtctcagcctccccgcagccggcgggcttttctcctgacagctccaggaaaggcagaccccttccccagccagccaggtaaggtaaagactgctgttgagcttgctgttactgagggcgcacagaccctggggagaccgaagcttgccactgcgggattctgtggggtaacctgggtctacggaagtttcctgaaagaggggagaagggtttgcatttttcctatggaggattcttctctctctagcatttcgtttgatgtattcaactggtagaagtgagatttcaacaggtagcagagagcgctcacgtggaggaggtttggggcgccgcggcgccacccccacccctcctcgggaccgcgcctatttctaaagttacacgtcgacgaactaacctatgctttaaattcctctttccagccccgtgagtccgcggcgacattgggccgtggggtggctgggaacggtcccctcctccggaaaaaccagagaacggcttggagagctgaaacgagcgtccgcgagcaggtccgtgcagaaccgggcttcaggaccgctgagctccgtagggcgtccttgggggacgccaggtcgccggctcctctgccctcgttgagatggacaacgcctcgttctcggagccctggcccgccaacgcatcgggcccggacccggcgctgagctgctccaacgcgtcgactctggcgccgctgccggcgccgctggcggtggctgtaccagttgtctacgcggtgatctgcgccgtgggtctggcgggcaactccgccgtgctgtacgtgttgctgcgggcgccccgcatgaagaccgtcaccaacctgttcatcctcaacctggccatcgccgacgagctcttcacgctggtgctgcccatcaacatcgccgacttcctgctgcggcagtggcccttcggggagctcatgtgcaagctcatcgtggctatcgaccagtacaacaccttctccagcctctacttcctcaccgtcatgagcgccgaccgctacctggtggtgttggccactgcggagtcgcgccgggtggccggccgcacctacagcgccgcgcgcgcggtgagcctggccgtgtgggggatcgtcacactcgtcgtgctgcccttcgcagtcttcgcccggctagacgacgagcagggccggcgccagtgcgtgctagtctttccgcagcccgaggccttctggtggcgcgcgagccgcctctacacgctcgtgctgggcttcgccatccccgtgtccaccatctgtgtcctctataccaccctgctgtgccggctgcatgccatgcggctgga

SEQ ID NO: 47 - DNA, 2114 bp, Homo Sapiens
aaagttacagcagaagggaagctgaagtttgaaaacacattacattttgtcccttggttctcaaaccccctcagttaaaaatctaggcaaaattattatatccaatacagtaaccatctgtaaaacttcagaacagtaaacaaaggacataaagaaatgtatcttcatctcccttaaatcgaaaacaagcaaaacactacagaatcagattttgctccattatataggaattgtctggcaaagatccctctttttttcctaaaggtgaaatttcaggctgctgaacattgaatgggtaaagatttttacaatgctgtatctaagtgagcactaatgacttcacctactaataacgactacttcttgggaataagaatttactaggaagcaatttttaaaactttacaaaggatccaattggtccctacaacatggccagtagtcacatgtaaattctatctggaagattggggtgaaattaaggggttggtgaaggaatccaggaaaattaaaacattaaatccatttttaatagctgacaatgctatgcctcaagagaagaaaaagagtatattctgctacagtgtgtgagaaacccaatttttgtttttggatgatggtggtatgtcacttcccttaaagttaggcaccagtgtgagtagtgtcccagagaggtgaacgtgtagctgtgtcagacatttatagccccattcttaaaagacacatgggaaaacagtcaaaagtcctcccataactgcaccaatttgaccaataggaaaacaagtggaaaatgcagtttcaccaaagcagagtagaggttccttttcatcaaaccctcaggagggggaggggagaacacagaatggccagggggtactttctggaagccgaagagagattaaatgatgactcttacatcccccccgctgtttaagtgctgaaactaattcagatcccactttctccttcatgttaactctggattccccgagtaatttggagcctatgctccaggtttcctgaagattagaagctcaagaagatgggaatttttagaacaataactaggggaaactgtttacttgaagggccaagggtagggggctgcgtttggtattttactgagaccccgtccattgaaaacattgtttctaacgaaatcacccagcaccttgctctatttgcgtggctgttttccttacagtggtgtaacttgtgttagctgattgtctttaggattgttgtaaatcttctgatgagcagcacttagaaggggctttagtaaaaaccatgcgccccaaatttctaaagcttcgtttgggagagaggttgacatttgcacatgaagtctgtcttttggaaacagcaggaggacgcaggaggggcgaagtaaccccgggaagacgttcttccccctcccttacggattcagtgtagttcctggcataagcaattctgtcaccgggcggtcttttctaattcgtgtgggggctgatattaacataagcagccgcctcttcgggtgcgagtgggatcccaggtccgggatgtggtgggtgcggtgcgggagaggcacccgccgcccccttcactcggatgttagaggcaagttgttcgtgtgaactcgagcgaacgactggaggttggctgttgtaggttcactccttcaggatgtgggtttcagggggcgttttgatgtgatttaattccgaccgtgaaaacaattgctaggggctggctggattgctgttggtttttcccctcctggtggctttgcttggtttgggtttagtttgggaacaaacttgttttatatcaacacttccttctacatcgggcgccgtcgcctcaactgcgcgtggggggcgaggcgcccaccccgcacaagaacagaggagcgggggagaagagacggcctcgctgctcactgggtaagcggagcccagccccgctcgggagcgggcaggagagacagggtagtgacccccactcacaccagaaaacccctccccccggcgattttgctgccaactcgagtcggctacagacagtccagtgagtccttaattacaaggacgagagaaaagcacggtgcccctcgagtcctctccgcc

SEQ ID NO: 48 - DNA, 2382 bp, Homo Sapiens
aggccctggaggtggccactgtcggtccaggcacggcttcgctcgggactactggctgccctcgtggggtgccccgcctggggttccctcttaccctgggacgttccaggcgcgttcagcctgagctggtggagagggcgggggcgggggcggctggggtcccgaagtccaggtccctcttcccacttccccgccggccctgccgctgcggccctcgctcccgcgctcgctcgctctcgagtctctccctctctctcttctcttcctctctctctctctgcagtagtaacaacctgatcccgcttcccccacccgcctcttgagatgctcctcacatccgcctgcacacagcgcgtgcggcccctccgaaggcgatccccgcaaaccgcgacgcaggtcctccgccccaggcaatccccgctgcgggagaggccgcctcctggcgcccacgccccccttctgcagtccttactgccggccgagggggaaatgggcgacaggggaaggggaggtgtgtgcgggacggactaggctggggcagaggggtttaaactggcgcggtcctacagaagtttgaggagggcggggccggctccgagcccccggagccctacgggactcccccgattctactgaggagtccccgccagctccgtgcactcctgcaacactccccaccccacccgccagctccgagtttacagcctctcgggtccggggattggctgggggaggggacgggggggaggggaccccctggctgtagggaacggcgtgcgggcgggggtgggagggaaacgatttgcttcaggagatagggatgaaggttttcctgagtcaagggagggagaagagaggtggaacaaaaggcagatgctggaggggaaggggagctggggagctcgccccgagggctccggcagcccgcggtcccctgcctcagtctgtcccagagggtgaggtcaaggctggtgccagggctcttcaccggccacctggatcccacgcgcccagcacccacttctctccgcacgcccacttcatgcacctccccgcgcccttcccacggcttctctgcggcgagtcgcctttgcttccccgcaggtccccggtcccagcgctaaggcaccgcggcttctctcgccttctctccgcgttgaacccgggctctccgcggggagaaataggttgggggcgaggggttcccgagataattcaggacacctccccggggtctagccaggtaattccgacgcccatggatttccggattacagttcccaccgcgggctcagtcctactcttagtttatcccgcggtgagcgccaagccccaaaagtcggagtgtcaccgtttggtgaccccgcgtccgcccgcgcctcttaacctatggtcatctgtctgtcacagcgaacctttccctaggaaagaatctgccctctgcaaagaggatgtgtaatgctggaaagcccgcctttctccccatcagctggattctgagagttgggagagatgaccaatgaacaggctgagggtgtcacagccctgctactttgggatggggggtgcagtaggggagctacagtcttcccagaggccaggtcattctacccagctgcaccccatccccaacctttcagtgggcgacacctgcagggtgttgggactgggagaaacctcagataccttaaattccaaaccccattttccagatgaagatactgaggcccagagtgggtcagtgagttgcccaaggtcataggacaggtcagaatggaagctttccgactctccccggggcgctgggttcacagctccaccttgccaccccctgccccggaagtgagcactgaagtcacttaagagaggccagtgaccaaaggcagcgattcccaggtgcagaggctggggcagacgtgcccatgagcttgttcccccgcgcaccctcccccacctcgtccccattcctgtcttggttaccatgtgcctccatcatcctgagattcagagaggtgcagcggcttgtcgaaggtcacacagcacactgagtagggccctcgtttccactgcccagctgccccctcccattgcccacccgggcctctgcaagcttgccaggatccccgggagcctgcttcctccaatgcacagagccgtggcgcgtgtcaaagtgtgggaaagttcctgggagagggaaggggtagaaaatacagccgctcatctcaaccttggacggctgcggcaaggcaggggcgctcagaaaggcagccagtcctgcgcaccgccggtgcctccggcacaccccactctgcgccaggggctccccagggtcgcgcgagcatgttcttccagctcctcctcagcgaagcaggcgcggcgggg

SEQ ID NO: 49 - DNA, 2192 bp, Homo Sapiens
ccatataatttttaaaaagaaagaaacccctaaattacagatgtgcctggaaccagaacccagaaagcatctgggtagggaaaatagtttctagtgttcaaggccaaagccagtagggcctccttggatgggaaagagatatgagactgcaagtaattcctggacattacctatttgttattgtgttttcatcccttccctcagtcacctacacgttttctttttccagctaaaatgaatctaatctttgttacagtacttcaccttgttaataaaacccaggactgaagaatgagaataaaagggttttatactcaccatttcttaatttctgattctagtctggacagaacaatcactcattctagaaaattggcatagggagcatttattagcagttgtaacatatcactgccaaagggagggattctgtaaggcggcactgggtgtctcatatgtatgggaaacccgaggccacgttcagtgccaaccacaagcattttcatctctggccaggcaagccttgatccctgaattttgagctctcaacctcttttaaaatgagaaagagatggtttcttccagagtctttcagcttctaacttacaggcaaacactaccgtatgctgtcccccagcagagattggttttaaccaaggcaaataagttaggatggactttgttgaccgtgatggctcagtgctacatctcatatatcctaccacctttcagaacatttaatagtgctgctcctggcagccctggggttgtagtccttgtagagaggaggaactggcattgaaagaaatagttgagtttcactacgccacgtggggcgctcccattgctaagagcaatctcccctccctgggaagaaaagcgtgggcggggccggggcagtccctcccctccgcgttgccttggagaccatgggcgtccagctgcagttgtcgctggaccggccctggctgccttgagaggtgctttctgcaggcggggacgcggccaggccggacgcaaggcctccctccaatctaccgggctcagggggacggccaggggctgctcagtctacttggcgggctagggagggggatggcagaggctggttgggtcttctcagcacacagtaggcgcctaattagcgtgacctgaatcaggttactctctccctccaattctcctccctgtgtcccatggagggtggattagggtcccggatgcgaattctgcgccgcattagagttccagtcccaaccgacaccttgagcgccgttaacttttccccgaagagcatggcagagtgaagcacaagcaataatcctgtattattcgcgttcccagagtcccttcggatttgcgccatgcgcggcggggagaaccggcctcctgctcgagttcagagctcatctgaggttagtttcatcgtttcgttgaaagttaaaaccctaagtcgacgttccccagccgcctaccccccagcagagagtccttccccggggagtcctgccctggggtgccgcctcgaggccagacgtcgtcccgcctggacctgaacctgagtttgggacgggcgatttcccaacctcaggaattggaattgagacaccaaagcctagacgcgtttcctggacgacggcttcccggcaggggcatccagccagcggccaagatgtcgtcagtggggaaggtgacccaggttccgaatgggaaagcctaccagcagatcttccaggctgaggtaggagccgccctctgtcccgcttttctccatcccccttcccttgctttcttccaaacttccctccctcccagggcttccctactggaaattgaataaaacaagggctttgaaattactttgattttaaaaataattcttgcttgttcttaaatcgtaccaatacaaaattagaatgtcagttcttgaaaattagaaaacttaaattaaaattttaaatgtaaattactcagaaatagcctggatggaaccactgggtgacctctgtttttcccatgcataaaaacatgactaatttttgtatttaaaaaataggtttcattctgtactagtgttttgaaatctgctttttcttcataacagtatctcacagacccttttctatgcccgtgggcgcccatgtatttcaccatactgagcagctccccacttgttgacctaggactcccat

SEQ ID NO: 50 - DNA, 2192 bp, Homo Sapiens; identical to SEQ ID NO: 49

SEQ ID NO: 51 - DNA, 2244 bp, Homo Sapiens
  unsure (2126, 2128, 2131, 2132): unknown base
ttccattttctctttctcttccgctcttcccctactttcccttctcccttttctttttctttcttactctctccttgtccctgagctttcattgaccgacccccccccatttcattcgccctcccctcaatgtgccaacctttgccctatttccgatcttcccaggtactgggaggcgggatgggggtgtgcgttttcctctaggagccctgtctttccaagacccacagaaaccaggacctgcccttattcaaaaccccatgcacttcaagtctcttttagacaacacatttcaattttccgggctgactagtctccctgtgcagaggcagttgagaggctttgctctgcagagggaaaagagctctctactctcccacccaccatataggcaaacttatttggtcattggctgaaggcacagccttgcccccgcggggaaccggcggccaggatacaacagcgctcctggagcccatctctggccttggcgttggcgcagggactttctgaccgggcttgaggggctcgggccagctccaatgtcactacctacagcgagggcagggtgtaaggttgagaaggtcacattcaccgctttgggaggacgtgggagaagagactgaggtggaaagcgctttgccttgctcaccggccgtccttgccccggtcccagcgtttgctgggatttgccaggatttgccggggctccgggagaccctgagcactcgcaggaagaggtgctgagaaattaaaaattcaggttagttaatgcatccctgccgccggctgcaggctccgcctttgcattaagcgggcgctgattgtgcgcgcctggcgaccgcggggaggactggcggcccgcgggaggggacgggtagaggcgcgggttacattgttctggagccggctcggctctttgtgcctcctctagcggccaagctgcgaggtacagccctctattgttctaggagcacagaaacctcctgtgtgggcggcgggtgcgcgagctagagggaaagatgcagtagttactgcgactggcacgcagttgcgcgcttttgtgcgcacggaccccgcgcggtgtgcgtggcgactgcgctgcccctaggagcaagccacgggcccagaggggcaaaatgtccaggtcccccgctgggaaggacacactataccctatggcaagccagggtgggcgacttcccatggatcgggtggaggggggtatctttcaggatcggcgggcggtctaggggaacaattcgtggtggcgatgatttgcatagcgcgggtcttgggatgcgcgcggttccgagccagcctcgcacagctcgcttccggagctgcgagctcaggtttccacccccgatcccccgggctttcctcgcaccgctgagcccagcttgtggggtgcactcgaccaacgcccgacagggctggggaatgtgacaggcagcaggttcacccgggcttggggagggggagtttccgctttgacagcattttcctttgccgtctgctggtggattcctattcccagtcggtaatcgccccgcagtgttgatctaagaaggtaaagaaaactaggtttccctgcaaagagcctcccccaaatcggcggactccggatactttgagtggatttagaaatttatgtaatctttctcctttagtttatttttcatcctctcctacagttttctctgatttgctgttggttcggggcaagataaagcagccagtagagagcgataataatagcggcgggaaatgaactggagactggctgacagttcttaacattttgtcatagatccccccgaatgtcccaggctgtctctggtgggttttagtacccgccggcttcttgggcaccggggaccagaaggaacttggcagctggtcttaggggtacagttaaaggcaggatgacagctattctcctgctcatctcagagcgctgccgccccctcatgccggtcgcgcaaagaacacagcttttaaaaaacacgtgccttctgcccatataggtctgaaagtgatgaggaaagtaatgcttcgcctattagcgagtttcagcttttaaaatgatcccaagcgttgctgagatgagaaagcgtggcatncnccnngggggtcctcagccccacccgcgcccatggtgcaagtctgcagggacaggcccgggacagcactgcccacgctgctagattttccgcagaggatcgctgaagctgccttcgt

SEQ ID NO: 52 - DNA, 2420 bp, Homo Sapiens
tctctctcctcgggatgagcagggagagcgcgcggaggttcccgactccctcgactacaaccaagaaagaataattttcaaagtgttcaacatccccgcccccaagctccccaaaacacaggggcagggaacaccaaaacactcggctctcattaggaagatcacggctctgaaaggaaatagtagacacgatacttcatctcatctggatttatgaccaaaaaaacaaaaacaaaaacccaaagagttcgcttgcattttttccttccaaatctcggttcggctcgaaggcagggaatctaaaagaccgaggccgatggaagagagccagcggggcgagcgagcgggcagcctccctttttgcctcccggagttacccagaaggacaggggaagggaaggaagaagaggcgaggaaaaagaggagggagggaagcggaggccaggagcgacggagcaaggaaagcagtttgcaagcgagaaaagagggaaaaaacacagccgcacgaatccagagagatcacaagccgtacgcaagcagcagcagaaagagcgagagcgcgagcgcgcgtcctctccgcggtctggggccagacagcccccagactagcccgaatcaccccccaagcactgtctcgtcctctctgctccggccgccccctaattcccctccttcctctcctccacctcctttccaaaaaccaaaacaacacaagggagggtggcaaaagcctccccaaaccggccgattcactcaaagacaacaataataataataaatacataacaatctatatcctatggtgggagagacgtgggactaatcttcggcatttattttaacacctgacagctagaataaataaatatatacatttatatcaatagatacacatagaaaacttggagccaaagcatttggcaagagcggaaaaaaaaagaattaaaaggtaaaataatgatcatgagcagcggcggcggcagcggcaccagcggcaacagcggcggcggcggcagtagcagcagcagcggcggcagcaacagcaataatcacctggtgtccggcctttcctagaaacttcttgcatcaccacttctaagaaccccagttctaagaatcaacagagctcaattctcggaatttgagcttcggactttaccactgctacgtggcaggggaggacttggtgtcagctctccgagatttttactgcccctggccaaccaaaagccctcaaagccacaagattttttcactggccggcatatttcgaggtcctcataagcagagcgtctcggatttggaggttccggttcgaggctcgaggggcctgaaggtggctctccctccccgggcccaagacgatggtatggcctgctccgccaccatcacgtgggctcctcctctgtgacgtcggcgccttcgctgtagcaaagctcggcctctggaattctgagaactaatttgctattcggtgacataagagggggagtgcgctttgctttcccggggtctggggctaattccttctttcttacccataaactcagcagatcgagctaaatgcacaaaagggagcgagaggtttgaaccactgggaaaagtatgttatatatatagtagggttagagaggcgagtaagagaaaaataaaataaaataaacatcacagctctttccaactagaatattaggcaccacgagaaaaatatttgccaagcagttttcggtgggttcatttgctttatttttatttaggacaggggtttttgctgttgttctgggtttttttctttctggtgtggtggcttgggatttttggtttctgtattttgatggtttatggatttttgcttctgattttttgccttttgcaagtttgtggtgttacgtaaatcacaggatcggcatcggttggatttttttgtacgtgccttttctttccctatctaatccctcaagcgttttaaagatgtattatttcaatactaatactattgaaagaagcttaaatttttggccatatgtaacaatcccagcccccactttttttttttttttttcctttggtgcaattttctttttcccccttggacttttgctgaagtgtgtctctcctgcacttcagagaaatgttcaaaggatttgttttggtttggtttgtttctttccaggacagcaagtggtgggtttaatctgttattgttgactcttgggaaatttcttgttgcaagaaacgtgtgtgtgggggggagggtgggggtggcggggtggtatgtgtgtgttttctacaaaattctgtgagccaaatacctgtttgtgttttgttttctcttaaggtcttgagatttttgttttcgaggctcgtttcaaggtcgttgtaaaaaaatctcttcagtctgtgtttaagagatcagccgg

SEQ ID NO: 53 - DNA, 2344 bp, Homo Sapiens; identical to SEQ ID NO: 42

SEQ ID NO: 54 - DNA, 2366 bp, Homo Sapiens
tctccttcttctcctggcagaactgctcgatggccttgatcatgcccaggcccatctcgatgcagcagtaggcatggtcggcccggggctcgggacagcccgccacgcagtagtaacagtctcccagggtgctgattttctcacacttggtctcctcacacaggcggtcgaagcgaccgaacagatcgttcaggagacccaccagggcgtgggcagacttgttggcactcatcttggtgaagcccacgatatctgcaaataaaatactgacttcttcgatctgctgcatcttaaaagggcggaaggctataggagctttttggatggaagactttttcttcctgttcttggggctcgaggtggcatgcctcttgacagaattctcactctcctcatctccctgcttcattaagtcatcggctatgattcttggcatcacggaatgaatcatcctctctttgagggctttttccacttccaggtccttcccgtgcataatggattgccccaccttgaggaaggtgctcctggacctcacctgggacatgacgaacaggtggaccccgatggcgtggatgcagccgtggagcagccccctgctcagcagctcccagtgcagggccccggctccgggcgaggggaagcaggcttcatcccggaaatggtagccaaaggtctcgaaaaggacagagtaggccacccccagacacaaactcaggtacaaaggtaagtgcatgacggtatagagcaaaaagagcacttcgatgcacatggagaagctccccacttgagataagcaagtatctgtgggccgggctgtggccgtaaggttggagctgtcgccgcgtcctgagacaggcgtcaagacctggaactgcgcagccagggtcagggcgaacaccagcagggtgagagccagcgaggtccacgcgtaatgccgggcgtacagcttggtgaaggtaaacagaaagaagcccacacacaccaggaggaagcacagcgcgggggcgaccatgacgatcagtctggatctcatgtggaccgcaaaatagatgctccacagaaggcaggcgaagccgatgtagaagagcgcataccggaaccggcgctgggtctgcgggaagcagcgctccaggcaggcctcctccaggttcaccgagtcgaacttggggtcccaccagcggctggaggccctctcgaacagctggggcagcttcttctgcctgcgcagccggcctccgccgcccactcgccgggggacgcccccggagtccccagagctgctgcagctagaggagatgctgtatttgcagtgcttggggtggctgttggaggacagctgcttggggttgatcttgacgcgcacgctgttgctgtccccgctggagtcgcagctcacctcggtgctgtggtgatgcagcagctgctggtggggtggggaagccatgttgtcgagtcccggggcctgccccggccggggtcaccagtacctgccagcaaaacggggagagttagcggcgctcccacctaggcatgcacgcctagaggcccgggacctgctcctgtcctaaggggcggctccagcacgcgacctggacaggcaccatctgttcctgtggttcccggctcagcggtgctcccaccgcccccaccgcccccaccttcgaggcgcacgagaaccgctcgggacggacctagaacgcccgggggtccccgccgcgtggccgccgtggctccgggaccgctttgctcgctcgccttccgcgcctctcgccccgagggtggcctccgcgccgcgcggcttctcctcctcgcgcgctcgcctcctccagctgcggctccggagggaagttcagaccttgagcgctcccagccccgcgagccgcctgcgcacaaacaactccgctggcggcgcggagccctccatcctgcaggagccgcgctccgatgcgtcaaaggcggcgcgcggccggccccgggcccggaccccgacccggagcagcgagcttcggcgggcgcccccggctcgcgctccccggccgccccccgcgctccgggccggccctgcccgcggcggcgggcgctgggggtgggggcgccccgggctgcgagtgcgcggagcccgtcggcgcggcccgtctagtggggcctgcttccccccgagtgcgccgccgctcccgccgcggccgcagctgtcccgggaccgagcgcgtggaaccacggacgcgggcccctcgccgggcggcggtgcagacgctgccgcagagccgggctcccgcgacgccggccgggacgcccgcccgcccgcgcccacgccgggggccgcctccccgagctagagatgcggccgccgccgcgcccgccgc

SEQ ID NO: 55 - DNA, 2264 bp, Homo Sapiens; identical to SEQ ID NO: 19

SEQ ID NO: 56 - DNA, 1334 bp, Homo Sapiens
gggcgccttgactctccctccaccctgcctcctcgggctccactcgtctgcccctggactcccgtctcctcctgtcctccggcttcccagagctccctccttatggcagcagcttcccgcgtctccggcgcagcttctcagcggacgaccctctcgctccggggctgagcccagtccctggatgttgctgaaactctcgagatcatgcgcgggtttggctgctgcttccccgccgggtgccactgccaccgccgccgcctctgctgccgccgtccgcgggatgctcagtagcccgctgcccggcccccgcgatcctgtgttcctcggaagccgtttgctgctgcagagttgcacgaactagtcatggtgctgtgggagtccccgcggcagtgcagcagctggacactttgcgagggcttttgctggctgctgctgctgcccgtcatgctactcatcgtagcccgcccggtgaagctcgctgctttccctacctccttaagtgactgccaaacgcccaccggctggaattgctctggtaagtccagaacccccgtccccgaccctttaactccgcagaagaacacgcgtatccagcacagaccagcctaccctagcgcgcctcctcagcccctcacctcctactgccctagacccctaataccacccacctctatccagagaaacaaggggaactgttgcaggcccgggggtgaggggtggttctgggatgggcagaaagtgcaggtgtagcaggaaacctttgcatgcttgcgcttacattggagctgcgaggattttgagaaatattaaacgggatggttttctgggttcactgttttgaaagagcaccaatcctaggggaaacactgaaacagaagctttgtcatcattaaagaaaaaagtcttactaggatgaggaagaaataactttatgagaaagaatgagcgagaaagcaataaatcaaatggtgactgcaggggaatcgctgattcctggcaaaggtgccatgaggtcgcactggtctcccgttgaagaccaggtcacacagattctagaggagctgggtttcaatagaatttctctctctctctctctctctctctctctctatctctctctctctctcattcccttctctcctaggcggcaaaagacattggttttgcagtccagatatgcccctctctttgcttccctaagcttcaaggtagtacaggggagttgagaaaaagaacactttgcgggtctcccaggccggagtgggcatgactgaggctggtcaggctccatgtaggcgagccgagggcggaacccgacttcagtgggcgctgac

SEQ ID NO: 57 - DNA, 2501 bp, Homo Sapiens
tctttgaaaattgctaataaaaactcgctggttttacggctcagggggcatcacggaacctgcggacatgtgatgtctcccctggacacccggctttaaaatgtctctcttttgtactctttccctttatttctcaggccagccgacacttagggaaaataggaaaggacccacgtgaaatattgggggctgaatttcccccgataataagtctcttaaaaaagacttttaaatgaaatttctttgttttttaacttttatttctgttttgggggtacatgtgaaggtttgttacataagtaaactcgtgtcttcggtgtttgttgtacagaatatttcatcacccaggtattatgccgagtacccaatagttctcttttctgctcctctccttcctcccatcctgcaccctggagtcaaccacagtgtctgttgtttccttgtttgtgttataagttctcatcatttagctcccacttacaagtgagaacatccagtatttggatttctgttcctgcattagtttgctaaggataatagcctctagctccatccatgtcccacaaaagacatgatctagttctttttaatggctgcattaaatgaagttttaaagatacaacataaacaccaacctcttccccaccacaaaaatcccttgctgaatttgattacacttaaattaacgagttttgtttcatgaaagactccttggacaaacttgacagttgatggaataggagaagctgtctgtcatgtctaaagccaacaagagatcaatatctagaataaatggagatctgcaaatcaacagaaagtaggcagcaaagccaaagaaaatagcctaaggcacagccactaaaaggaacgtgatcatgtcctttgcagggacatgggtggagctggaagccgttagcctcagcaaactcacacaggaacagaaaaccagcgagaccgcatggtctcacttataagtgggagctgaacaatgagaacacatggtcacatggcggcgatcaacacacactggtgcctgttgagcggggtgctggggagggagagtaccaggaagaatagctaagggatactgggcttaatacctgggtgatgggatgatctgtacagcaaaccatcatggcgcacacacctatgtaacaaacctgcacatcctctacatgtaccccagaacttcaaataaaagttggacggccaggcgtggtggctcacgcctgtaatcccagcactcttgggaagccgaggcgtgcagatcacctaaggtcaggagttcgagaccagcccggccaacatggtgaaaccccgtctctactaaaaatacaaaaatcagccagatgtggcacgccacctataattccacctactcgggaggctgaagcagaattgcttgaacccgagagcggaggttgcagtgagccgccgagatcgcgccactgcactccagcctgggccacagcgtgagactacgtcataaaataaaataaaataacacaaaataaaataaaataaaataaaataaaataaaataaaataaaataaaataaaaaaataaaataaaataaaataaaataaaataaagcaatttcctttcctctaagcggcctccacccctctcccctgccctgtgaagcgggtgtgcaagctccgggatcgcagcggtcttagggaatttccccccgcgatgtcccggcgcgccagttcgctgcgcacacttcgctgcggtcctcttcctgctgtctgtttactccctaggccccgctgggacctgggaaagagggaaaggcttccccggccagctgcgcggcgactccggggactccagggcgcccctctgcggccgacgcccggggtgcagcggccgccggggctggggccggcgggagtccgcgggaccctccagaagagcggccggcgccgtgactcagcactggggcggagcggggcgggaccacccttataaggctcggaggccgcgaggcttcgctggagtttcgccgccgcagtcttcgccaccagtgagtacgcgcggcccgcgtccccggggatggggctcagagctcccagcatggggccaacccgcagcatcaggcccgggctcccggcaggctcctcgcccacctcgagacccgggacgggggcctaggggacccaggacgtccccagtgccgttagcggctttcagggggcccggagcgcctcggggagggatgggaccccgggggcggggagggggggcagactgcgctcaccgcgccttggcatcctcccccgggctccagcaaacttttctttgttcgctgcagtgccgccctacaccgtggtctatttcccagttcgaggtaggagcatgtgtctggcagggaagggaggcaggggctggggctgcagcccacagcccctcgcccacccggagagatccgaacccccttatccctccgtcgtgtggcttttaccccgggcctccttcctgttccccgcctctcccg

SEQ ID NO: 58 - DNA, 2327 bp, Homo Sapiens
ccccccaccccccccaccgccacccttgcctccgggccactgcccctctctgcaagctttgtccgctggactccgttgcccttgcgcggccgccccatcactcacgcttgactggaggaaataaaattggcgttggctttttaattccaagcttcgtgcttgattgggggaggggttatttaggtattttttttttcaaacagaagaaatttaggtactaattgtaaacaccccgttgctcttcttgaaagtatgtatcatattagccgaggccttggagacacacggcctattactcatttccagcctctaggcaaagaattctatggagatccaccagtaaaaccagatttcttaagggaaattaccaggacgtcttcagactctcttcaagggatattactggttgtcgattacacttgagcacactcttctctagcccacccctaccattttattttgggatcaccctaaggaaattagccatttgcagaaagcttgaaatcccgaaaggagaggcacaacctagggtaaaagagaccgagtgaagcttttcagattgattgtctccactggggccacttttcataaggtcgggagtggagaggagtgtctgcagaagagagactacctttaaaggggctctcccgaactcaggaggtgagggggacttcctagagttgtcaccacctgtaggtggatttgtcatcactatgtagtgtctcctggggagccagcctgttctccccagagtccccctcaggtactgtcccagagttcaggggagcctttagcgctttctccgtttgccctgagggtattgcatgtacaaaagctccttcacgcgcgcgcgcacacatagacatccagcgggtttggagtgtacccctgtttatttgtcaccacgtggtaaaccccagatttggaagtcatcactatgcgggcgcgcatcaggatccaggggagactgtgtggggttgggactgcgcacaaacacaggggccgcacggaagccttgcatattttaaagtgtaacctgagccttcgcggtttcagcttcacttaaaacatgcaaattcttgaaattgaaaaatctgaaaaacttccgaagagttctatctgaataaatccaaatccattgggagtcgctttgaggagacaaaacgcacagcgatttggggtgagggatatttgtggggaggcaggacgtgctggattgggtttccagggtcaaggtgtctctgggccttcgacgatagccttagcgcagagcagggaagtggcaccgctaggcagcaagctcagttgctctacttttgtgacccatgagccagtcctgaggctctggcttcagggcctagtttccatttatgccgcgtttttgagagtctaatactgtgtctggcacatggtaggtgctcactgaatagtcgtggtatgaatgaatgaacgaatgaatgaatgaatgaatgaatgaatataagtttaatgggggaaacccgggcctcctaataaaggtaggggctgggggatacctaggggcttccccaggaggatttcttttttcatcatcccacccctgggagaaaggtccacgcaggatggtcgcttcccccttgctgagagttttgccttcagcctatctgggccgctggaaaagaggagaagaataaacaagagacaagcaactactcccctaccggcgttccgtccttgtcctcactgccaaatccactccaaagccgaggatggtgagactgtgaagttgcaaagaaacacagagcccacccccttaaagaattacgatatatttaaagtttgcctctttcaggtttctctccttggctcctgcccctttcccctcccggctccttgtccttgactgaacctcatgggacagagaacctcctgtcccccacgaggcaaggcgcgaacccgcagagatctggggtgccctttggttccctgcgctgccctggaggcgtccatagaggcctttgccgccaaggacagcaattgttttattttcgatggttgctcgccaggcctgcgggtcgcgggcccacccagccgtcgaactttccagtcgttatcagcgctgctcctaacttaatggaataatgcaaattatagcctgcccagctgacacgtccctgcgaatgcgccggggctgagctctggccagccgctctctcgacgtcctggacggccggagggaatgaagctctgaattgtgacaaaagtggggggggggcaccccaaattctcaaagcaatgttcttttttttttcttttttcttaagcaattgagccttaccaaatgtcgg

SEQ ID NO: 59 - DNA, 2494 bp, Homo Sapiens
tttctatgaagttacaaagctgcaatcccgttctcatgtgcagcaccacaggttttgctttcaaatatctgcaggtgcatcctcctgcactcgttaaactaagggttttccttttctgtgctagacccgcttttacgaccacgctctccacctgattcacagaaagggttctacgaccgtcaggtcaccgccgcctttgtactttattggggagtcgaaggcctcagcgctgctcgcgatttccctaaggtggtcgggaaggtcccaaccacgttcttctgtaaaccagataaggaaggcctggggattccggccgcggaaaggcacagaggaggtgaacgctccggatgcccaagtgacgcacttgtaggcggattcggaaactcgtgctcttgagccggaggcggagcccccagactcagaccgaccccccagaaccgggcggccttgcccgaggcatgaaggctttctaggcccgcttctaaaagctgtgtacaatggagactcctggaataggcacatatctctactgtaatcagaacgagatgtaacatctaagacgcagggcagggctctggcaaagacacgctgggggaacgtgaaagaaagggccaaaactacgcagctggtcctcagagaccaaagactacgacccccagcattcaatgcagtgaacccctaggacgttgcatgccgggagctgtagtttctcaccaccgccacccccccgcccccccgccatctgaaagggttctaggggatttgcaacctctctcgtgtgtttcttctttccgagaagcgccgccacacgagaaagctggccgcgaaagtcgtgctggaatcacttccaacgaaaccccaggcatagatgggaaagggtgaagaacacgttgccatggctaccgtttccccggtcacggaataaacgctctctaggatccggaagtagttccgccgcgacctctctaaaaggatggatgtgttctctgcttacattcattggacgttttcccttagaggccaaggccgcccaggcaaaggggcggtcccacgtgtgaggggcccgcggagccatttgattggagaaaagctgcaaaccctgaccaatcggaaggagccacgcttcgggcatcggtcaccgcacctggacagctccgattggtggacttccgcccccctcacgaatcctcattgggtgccgtgggtgcgtggtgcggcgcgattggtgggttcatgtttcccgtcccccgcccgcgagaagtgggggtgaaaagcggcccgacctgcttggggtgtagtgggcggaccgcgcggctggaggtgtgaggatccgaacccaggggtggaggcggctcctgcgatcgaaggggacttgagactcaccggccgcacgccatgagggccctgtgggtgctgggcctctgctgcgtcctgctgaccttcggtgagtgattctggaggagcagacgtcccccctccacacacgcggccgcttctcgaaggtcctgggggcgttgaacgtgggaggggggatcccggggcctgcggtgggccaagggacgtcaccattcctcgaaagagggcaagggaattacgtttattctcttcttcctctggaaataaaaaaagagagcaacatcatctaactgccctacagatctaatagtatctcgcccggaggtctcagcgacctcggggtggggcctctctgaggctctggctcccccgggagctgtgcgagcccctcccccctccccgcccggaggactttttcggccaccgcaaccttcggccatcccagctttcccgtcccctaattccccagactccgactcctcgcaagcccgtgtcccttcttagatgctggcctcgggagcgtgaggcctggggccagcggaatggcagtgtcagcgtgtttgattcagttttgctggagttcggttcttaacatttctcccccttctcatgcctctgggctcaatttcagttcccctcgccagaggttgcataaatcctatttgcattctgacctgtgctaacgaaggccgaagttttggcttgatcagttgggaggccttggctcggcctgcgcgcaacacgtgtgggtgtagaagaggcctggtatcagtctgcttaacgttatttataaatgatcggagacacactgtttagaagtggtgactgcctccgtatttcaggatctactggagacctcagcatctgaacttaaatagatgttctgtcttggctttacctttggtatttaaaccagggaatgcactctttcatccccacctcccttagttaccaactgaattttgcaacccctacccttccctatttgatcatcctccttggagaagtgtgatgttgaagagtttgcccgtgttaaatcttcagggtcggtcagagctgacgatgaagttgatgtggatggtacagtagaagaggatctgggtaaaagtagagaaggatcaaggacggatgatgaagt

SEQ ID NO: 60 - DNA, 2497 bp, Homo Sapiens
tgaagactgtgtggagtgggaggtctgtgcctatttttctcattcattggggaatgggctgagtggctgggggcaaagtgggactcaggggctctgcccagtccttactgcaggctaagccctcccttgcggccaagagccactgggccctccacctccctctggcttctacccgcagatctagatggtttcatggtgactcagaggaggatgcactcgggcgtcccttttgaggatggctgcagggaccatccagggactgagccgaggtgcagatacagccacggatttgggtgttgttagacacagaagggtgtgtagcaaagtgagccccacgcatgcgtagactcttccctcggcttctgctctccatggaaacacaactgatcacatcatgattgatcacggtagccctctagggctttctttcttttctttttttttttttccagaagtcataaagggatatagaatatactcaaagaccacctcatgcttttagtggagaggcaaaaaaggttcgctccggaatggggaagcggctgcgccctggacggagaggggcggggacttcgcgactgcaggcggagggagggcgggtgtcgctggcgcaggcggtgacagggagacaccgccgccactgagtattcctatgcaagtttcttcatcttcctgtgcatcagtgtttacactggggtaatgataaatgctgtgttgaaaaattatttgatggggccatggaaggaacggaaggaacggcgtcctggcccgctcggggcccgcgcacgccgccaccaagccgcgggggcgggtcggaggggagagttgcgtcagccaggccgctgtcagatgacgagcccggggcgtgacggggtggagcatccccaaaaaagtgcatgcctaggatcccgcccagtgtatccctgcgcgcggcgggccgggctgggcagctttataaacagccgtggtgtgagcctcgaagggaaccatcagcgcctcctgtccacggagctccaggtctacaatggcagcggccgccagccccgcgttccttctgtgcctcccgcttctgcacctgctgtctggctggtcccgggcaggatgggtcggtgagttcggggatgtagcctaagcagggcgggggccaaacctgggaggttgtggactgcagcgggtttcagaggaggggaggcttctggaaggaccggcgcgatctccctgaacgaacatcgcggtctccccgaacgtcgcggtccctccgaacgtcgcggtctccccgaacatcgcggtgcccccgaacatcgctgtctccccgaacatcgcgatctccccgaacatcgtgatctccccagacatgcccagctgaaggcactcagttcccctcggtggctcctttccgccgggtccgcttcctgcggctgctgcttgcccctcaggccaggaggtttctggaaggaccggtgctgtctccccgaacatcgtggtctccccgaacatcgcggcctctccgaacatcgccctctctccgagcaacgcgatctccccgaacatcgcggtctccccgaaaatcgcgatctccccgaacattgccatctcaccgaacatcgcgatctcgccgaacatgcccggctgaaggcactcagttcccctccgcggctcctttccgccgggtctgattcctgcggctgctgcttgccccgcaggccaggaggcttctggtagcaccggcgcgatgcccccgaacatcgcgttctaccccaacatcgcgatccctccgaacatcgtgatcccccccgaacatcgccgtccccccgagtaacgcggtctccccgaacatcgcggtccccccgaacatcgcggtacccccgaacatcgccgtctccccgtacattgcgatcccccgaaacattgcgatctccccgaacatcgcgatctcgccgaacatgcccggctgaaggcactcagttcccctccgcggctcctttcctccgggtccgcttcctgcggctgctgcttgccccataggccaggaggcttctgggtggaccagcgcgatctccccgaatatcgcggtctacccgaacatcgcggcctccccgaacatcgcggtctccccgaacatcgcgatcccccagaacatcgcggcctccccgaacatcgcggtctccccgaacatcgcgatcccccagaacatcgcggtctacccgaacatcgcggcctccccgaacatcgcggtctccccgaacatcgcgatcccccagaacatcgcggtctccccgaacatcgctgtctccccgaacgtgcctggctgaaggcactcagttcccctccggggctcctttccgccgagtccgcttcctgcagctgctgctagcaccgcagtccagggggagtgtcaaagaaggctgaaaaggaattgcaggagggtggagggaccaaaaggctacagagggcaaggtagggcggggatccctggtgcagacccgcagccccactg

SEQ ID NO: 61 - DNA, 2455 bp, Homo Sapiens
ggaccctccattccggctgcagcttcccgcgcagtgagaaggcagcggtccctgagagcccagcagtgccctgggagcctgcagaacgcaggggcggattccgcgtcgcactggccgtcaaggggcggccgcggagggaaggggtgggtcggtgggtctgacagcgggtctgcgtaggcggcagcgtctgtccctcccagcctctcgctccgcgccatgggcgggccccgggctctgctggccgcactctgggcgctggaagccgccgggaccgccgcgcttcgcatcggagccttcaacattcagagcttcggtgacagcaaagtgtcggaccccgcttgcggcagcatcatcgcgaaggtggggcccgggccggggcggggcggcgtttaggggtgctgaccgcgctgacccccgcacccgccgctcctccccagatcctggctggctatgacctcgcgctggtgcaggaggtgcgagacccagacctcagcgccgtgtccgcgctcatggagcagatcaacaggtgtggtgggcagggcccctcgtcgcgaccccccgccgggatctcgccccggcgcggcgccccgaccctgagcgggcccctgtctccacagcgtgtccgagcacgagtacagctttgtgagcagccagcccctgggccgggaccagtacaaggagatgtacctgttcgtgtacaggtgaggggcgggccgcagggaggggcgcgcggggccgcaggtcgggggctcagcgggtcctccccatctcctaggaaagacgcggtgtcggtcgtggacacctacctgtacccagaccccgaggacgtcttcagccgcgagcccttcgtggtcaagttctcggcccccggcaccggtgagcgggccccgcccctcccctcccgccgagctctgacgcccccaccccttcccgcagcagcacagaacctggtgctgatcccgctgcacgcggcgccgcatcaagccgtggcggagatcgacgcgctctacgacgtgtacctggacgtgatcgacaagtggggcaccgacgtaagcccacccctcggtcccggggtccctgcaggcgcgccccgggggtctggttcatgagggcgggacctcgacggctcctgcggcggctcagacacggctccgcggcgcccgcaggacatgctgttcctgggcgacttcaacgccgactgcagctatgtgcgggcgcaggactgggccgccatccgtctgaggagcagtgaggtcttcaagtggctcatccctgacagcgccgacaccacggtgggcaactcagactgcgcctacgaccgcattgtggcctgtggcgcccgcctgcgccggagcctgaagccccagtcggccaccgtgcacgacttccaggaggaattcggcctggaccagactcaggcgagtgggccgtggggcggtgctggtcttgggtccccaccgcccgggcgcacgcaggcagcagggagggtccagcgcccaaggcagggccacctcagcttcctccctgcaccagggctcgtttccaaggaccctggagagcccggcccaccccatgtggagctctgggcaggcagggtaccttgcctttccctcaaagggccaatggtgacaccctctgccccggcccctgcccctgccccaccgcaggcagcagcaggggtgggcacccaggcctcaccggcccctcccatccctgtgggtggggtgcacttttcccctgaggttcactctgtccccacaggctcttgccatcagcgaccactttccagtggaggtgaccctcaagttccaccgatgactcgaggcctggctggggcatgccacctgcagaccctggctctgaggaatggcccaacagtggccccttcagggtggcagccacccttcagtgaggccccaaggcagagtcggctgggcgtggaccaggggccatggacacgtgatgtgctgctctgtacctccgttccccatctgtgggacgggctgcatccagcgacctcatggggtgttgtgagccccatgaggggtgcagggggcactgcccggcagatgtctgctcaataaatgagctgctcccggtcgggccccacagcttggctcccaggcctctgtccttcctcaggacccagcctcagctccttaggggcagccatggcctgggctgcccaccccatgtcctggtgggacgtggctgcccccggagcctgctggccccagaaggcagctcagggatgctccttgctcatcctctgtggaaactacaaacgctcccaggagcctgtactgtgagcacagctgggacagggatggcgccaacacaccagcctcctgggccctcggggctctcagaacagctctccccaggcccaccccgcagcccccattccagggccctgcaggggcccccaggcacttgtctgtctcaagagcccggt

SEQ ID NO: 62 - DNA, 2738 bp, Homo Sapiens
tgtattgttgagggtcaccgaccaccgagaatcaggttcagttctcagaggaagcgccagaggagggggagggtgggcgagggtctcggggtggtgggggtgccggccccagcatgtggaggcgacaggatccgtaagaccccacgcgccgccggggcaggaccgcacagggccgccattcactcacttggggcgtccctaatgggcactcgtgcattccagctcgtgcggtgagcgcacgcacgccgccgctgccgcgttcacacggccccccaaagtcgggggaggggtcgtggagcgaaggagctgtaggcagattttctttctctttccgagctgggaaaagggccagccccgtgccctgcacgcctggctctgctttgcagcttgccggtgagccaagagccggtagagcagaggaggcgcacggttcgggtcgtgtcaccatttcttggcttgctgacctggccaggagctggggatggcggcagcaccgcggaggtacgctttgcgctgccctcacgctcccttccgaaagcagtgcccccagggggaaagttcgcaatgccatttgtctcgccggcaaagttctgggatgtcgggcatcttttgaggagggggaagacgcggcacccttactgaggccggcaggccaggaagagaagttctccgggcgcagggcgcagcccagctccggggaccctctgggcctcccgcgtgccggccgggatgaagcgcgctttgcaccggacccgggattcgggggcgggggctggcgctggcagcgtcagacgctgcttcatttcccctcgaccctggggaggacagcaacaagtcctgccccagccatttcatcaccctgctagcacgtgcagattccgggccctcggagcccggcgcggacctcgccttgcctcgcgcttccctttgcacgtcccgtgccatcccaagagtttgcgtggccctgggtgggcgcctggctcccggcgaaacgcctggggcgcgccgcgtgggtgcacggtgtcctctcccagtagctcccggctgcgggggcacatgcacttacctgtattctgcagggacaggcggcctttctgctgggagctcctgtcttggggaccctcgggtgggttggtggcgtcggtcccccgcgccgggtcaaaggtggccaacaccaaagccagggtcatgaactggcccagccgctcggcacacatggttcttggtattaacctcccgtcgggagacctggatcctttgtgctcccctcttcctcctcctcctcttcctccttcgccgcttcccctcctcctcccactcttcctttttgctcgccttttccctcctcctcgcggccgcggctcggatagaggttacccagcgccctcccgtagctctccggagagcatgtgaccaggccgttagcagcgccgcgagtgcccggcaatggcagggatggtgcctcaaatatccctggaagctctggtgtcacttgaatgaaggagtcgagcaggtgttgtcccggcggctggaccaatccgagaccccggcccttttgacaacacggccgggaggcggggcctgcgctcaactactacaggaggaagccgagcgccgctgggagcgccggacaaagttgccgacctggcggcggccacgcgtttgcgtgcgtgtgtatgagtgtgtgtgagcgcggccggagatgcgtgcgcgtgtgcgggtgctccagggcaatggtcgaaaggactgtacaatataagagcgaatccaagctccagttgctgttaaagggggacggtgtgctctgggacagtgtccctggggcccctggctcgcgtcacacccacatcgggttgggaaagtttcctctttccgccgtttggaattcagtgagattcccagcccagaggacttgataaattgaagcagtttcctaggcacaatgatgctgtgggccaactgagcacacatgggaattcctggccttgtgacactttgcattaaaaagaaccccacgattgaagataggagcagaagcactagatacagtatttggtctgagcaactgccctatcttcccgctttggtgggccgtgcaacacctggagtgtcgtttctcgtctttcccctaatccagacgcattccaggctgggctgcagggatccaggtgacagtcaggacttgcatcatttccaggagggtggcagggaggcccaaggcagccctgagtcagcccgccgcggagcatcgcgtgcccggaggccagagcttgaaaggcaactttacgcgtctccaaacacactcctgcattttctcaaagcgctgctcgccaccccgctccgggttcccttttactctccagtcatccgatggaagtggtgagaacaaaaacaaagacaaaaaagctaaatccggggaagttatctccatctcctcccttttcttgttcggccccctccccaagaaccgccgggtcgggatagcccccggctactttctcacccggcccgtggagggaaggagaaagttgggcgccgcttggagcgcctcttcccctgctgtgtgtgtacgtgtgcacgctcacgtctcccccgcgccggggccggggacaggaactgctctcggtcccgtcaccccacggcgcagctcggggggctcgcagggctgggggagggcggggacacgagcgccgcgcccaagcgccccagggcacgcacccggcgttggcgcgcactcg

SEQ ID NO: 63 - DNA, 2401 bp, Homo Sapiens
gcggcaggcgaggcggggtgcaggtgtgagtggggtgggaggaaggggaaaggatcggggtcgccgcagcctttctggtcagtttcgctgggttttgtcagttccgtttgagaccgaggcgcacggactagcggccgccagcacctcacaggtggaggacacctcttgcgccccaaggtcaatgtcatcccgatgggtcccgtgccgtcctgactctccctgacctaattctttggttatgactttctcaccttctgggcttcgcctctgccagctttcgccgacgtcgcccttcccgccgcccgcccgggccttcctacccgctctcctccctccctggcccgacggtcccactgaggcaaaaacaaacagccctgagggcacttcaaggagcgtgcagtggccccgacggtactctcggggggataaaagaggtggccagccacgccgtcggcccccggccgaataatgggcgcgcagcagattgccagggggcacttgaaactcgaggggagggaaatacttgagcgcggtccctccccgcgaggacgcacgacgcagcctcgcggatcgtcccttgttcgctctctttcatgcactctccttttgtgtggaattatctaaacgggagatccctggcagctttatgctaatgcgccgaacaaaggcaacggcccgcgggcgggaggcccggaaggtgcctggggccgggccgggcggggtggcggccaggcgggctgcgcgtgtctctcgcgtgcccctgggactgacacaacaacccctcattcctgcaaatacaaagcctctcaccggctcgggtcgggcgcacccggcgcagggaggcgctggtccctccgggcggcgggcactgcagcggtaacgcacggttcctgccggttgtggctcgggggactgagggccgggagtgggggcttctgtgaagccagaagagaagtctgcagcagagtggtgatgaggggcgctgacacctcacccccaacgccgacgtctccaaacgcgataccctctgcggggtgagaatgcgggcccgcccggctcctcccgtgaggccagggcctcctgttctcctagacaccccaaggagccaactcctccgcagaagttccccgcttctgctcttatttccaagcttcgcgctttctacaaactccctgttgccttgactttgatttccagccgtggtgagggtcagagtgaaccccggcgcgctccccgacggcatccccgcacaccaggataggagaaattggagggcctggggcctcgggctccgcagtcgtcggaggaagaacccaccgcggggtccgcaagggaaagtgaagaggcccgggatttttccaaagcgctggccaggaccccgaaggaaggggaggagtcacctgaagccggggaaggccccttgggtgctctgccttggatccttatgttcactgactttcgcgaagcccccctggaggggggcaaatccgcgctgtttcccccaacttaacttcacgcggcccattctccgaatcgcgtgcgccaaggccggcgtcgggggcgcactgtgatggcgctttgctcttcccaggcgaagacaaatatctcgacccgatgtccccatgcatgcgggtgcacaggttctgagaaaatcacgcagaaggcggctgcgatccacggcccgggctgggctacacctgcttggaggtcgctggtgtgtgcgtgcgcgcgtgcgcagcctaactccttccagccccgggtggtgaaattagtttccaatactagtacctttcaagtttccatttattttgactgtacccgtctgaaagcagatttcatttacgctagcaagactggaagccacaaataaagaaaaagaaacggattcattgaatctcagtatctcagtagcgtttaatagattcccttggctaaattcagagccctgtttgaattcactcacgcaggagttgttttgttttttttgttggtagaggtgccggtttcccatccccacggcttatttacaattatgggtgttgttatttttaaaggattcacaaggtgactaactctctgttatctgttgaatggaaggagtgttacatatgcaagaccgaatggggcaggccgagcccccgccctatgctattctacaatccagatgggattcgtgattagaaaataaaattggccaaagctgtctcggaatccttttcccacttctaatttcatcagcactattaatcagagctcaaaagagcaaggaaataacatcagttacttttagatagaaatatgtttataaattttagataaactcattttaagatttctaacttttggggagactagcactcaccacagcatttttaaaactagggtgagacttttcaaaata

SEQ ID NO: 64 - DNA, 2476 bp, Homo Sapiens
aattactaggaggctgggggaaaagaggggaaaaacgggtaaggaaggttgcaaatgttaagatgccaaacaggaacccaaccgaagtccgaagtgaaatacagcctcctctggcccaactgtcatgcaaacaacttctaagcatcttcagatgtaaagaaaaacagtcattgtgcacaggcgttagctgaatgttcgagagttggatgaatggggaagacttgttatacacctagtggtgggtggatttcactaggctgcagcctccacacagcttttctttgctgcactgcagaggcgccatcttctccgtcttaatcttcactcaattcgatccttttatctgcaccctaaaaaaaagacccttcggaccctccccagcatcctgtgcccccaggggaactaaaccagagtccccagagctgccagggaagaggccgcgccttaatcagacaaacgcctccttggatgcacaggacagagcccgtgcctccccaccatccgccactgccctttccagacgcacatcccactctccgccttatttcctccccgccaaggactttacagcccagcacagaattaagcctcggaggtgatccgagggtgggaagcagaggggccccgaggctccgccagaagccccggcagcgtctctgccccctcccaggcggacgcgcagccccgggaagggagccgggcgggagcctcggtggcgcactgagactaacgcggctcggcccacggcgagggcggggtgtcgcggcttttgttcccgcggaccttctgcctctcagacagagcttagggtgcgagcgaactcccgggacgtccagacttggggaaggcgcggggtggctatgggtctccgacccctcccatttctcgcaagttacacaaaagggagacgcggacatgcacaaagtttgcctgtggaaggcggtgcgcgaccccgacgccggctcgggctagggtcgcacccaggctgccgccgccagcagccgcgaaaagaggttggagcaaggaagggggatgggggtgagagaggaaggtgaaacgaggcggagaacgcagggaaaagcgaggggctcctagcttcctgggctgtcccgactcctcctcctcctccccagggcccaagagaaaggaaagggcaacgattcaagagcgaaggactggctttagggacgctgcgttttcggttttccccacgtgctccttcccccttcccccctgtctgaatgtctctcgcctcccccgacccccgcttccaaggcagggactaagtcggggtctgggctcagggtcgccccctacccttctcgccccgggctggcgcggaaccagggagaccagcgcctcgcccgctccctctcagcgggccggagcgcgactccctggggcagggctgggccgaaagcggggatgcgctggacgtccgcaagcgggggcggagaggagaggggtcccattgacggacccccggcttctctgcattaaagacttgggttaaggtcttggggggtatcgcgtccccaccgtgcagcctccccccgccttccgaggcgcggcacccacctccagcgcccgagccgtccaggcggccagcaggagcagtgccaaaccgggcagcatcgcgaccctgcgcggggcaccgagtgcgctgctgtgcgagtgggatccgccgcgtccttgctctgcccgcgccgccaccgccgccgtctcccggggcccccgcgcacgctcctccgcgtgctctcgcctaccgctgccgaggaaactgacggagcccgagcgcggcggcggggctcagagccaggcgagtcagctgatccggcccaccccgctcggcacccgagagagacccctagcggcgccgccggggaactgcgcccgctcgcgccgggaggggccctcgcgccccgcgcccacaggtgcacgcgcccttggcgccgcctgcaccccacgcgccccctccgctccccggccgacggcccacctgggcttcgtgaacagtgggagggagagtctggggccaggagagggacggtgcaggatcagggaaaggtgagtcctaggacgctgaggctctagaaaagtcgagagcgctcctgctcgtccccgtgagcttgaatcatccgaccccgcaggcctcccgggggtgtcgtataaaggactgctgctagggtgcgtttttatccgcatttcgttttttctctcggtttggagaggtggggcaggcgtttctggaagagaatgagaacgagtgaagcttaaaggaaataggattttctttgcttgttgagacagcaaaacctcattttttaacccccaacgtcaaaagcaggcacgagcaacctggaatttctatctttagaacgaaccaaaggagcaaggcgcaggacctggcaaagaagcggccaacccatttacttcttcttgaaagcagggttctgggcttgggttttgtttcttt

SEQ ID NO: 65 - DNA, 2494 bp, Artificial Sequence
  chemically treated genomic DNA (Homo sapiens)
tttttatgaagttataaagttgtaatttcgtttttatgtgtagtattataggttttgtttttaaatatttgtaggtgtatttttttgtattcgttaaattaagggttttttttttttgtgttagattcgtttttacgattacgttttttatttgatttatagaaagggttttacgatcgttaggttatcgtcgtttttgtattttattggggagtcgaaggttttagcgttgttcgcgatttttttaaggtggtcgggaaggttttaattacgtttttttgtaaattagataaggaaggtttggggatttcggtcgcggaaaggtatagaggaggtgaacgtttcggatgtttaagtgacgtatttgtaggcggattcggaaattcgtgtttttgagtcggaggcggagtttttagatttagatcgattttttagaatcgggcggttttgttcgaggtatgaaggttttttaggttcgtttttaaaagttgtgtataatggagatttttggaataggtatatatttttattgtaattagaacgagatgtaatatttaagacgtagggtagggttttggtaaagatacgttgggggaacgtgaaagaaagggttaaaattacgtagttggtttttagagattaaagattacgatttttagtatttaatgtagtgaatttttaggacgttgtatgtcgggagttgtagttttttattatcgttattttttcgttttttcgttatttgaaagggttttaggggatttgtaatttttttcgtgtgtttttttttttcgagaagcgtcgttatacgagaaagttggtcgcgaaagtcgtgttggaattatttttaacgaaattttaggtatagatgggaaagggtgaagaatacgttgttatggttatcgttttttcggttacggaataaacgttttttaggattcggaagtagtttcgtcgcgatttttttaaaaggatggatgtgttttttgtttatatttattggacgtttttttttagaggttaaggtcgtttaggtaaaggggcggttttacgtgtgaggggttcgcggagttatttgattggagaaaagttgtaaattttgattaatcggaaggagttacgtttcgggtatcggttatcgtatttggatagtttcgattggtggattttcgttttttttacgaatttttattgggtgtcgtgggtgcgtggtgcggcgcgattggtgggtttatgtttttcgtttttcgttcgcgagaagtgggggtgaaaagcggttcgatttgtttggggtgtagtgggcggatcgcgcggttggaggtgtgaggattcgaatttaggggtggaggcggtttttgcgatcgaaggggatttgagatttatcggtcgtacgttatgagggttttgtgggtgttgggtttttgttgcgttttgttgattttcggtgagtgattttggaggagtagacgttttttttttatatacgcggtcgtttttcgaaggttttgggggcgttgaacgtgggaggggggatttcggggtttgcggtgggttaagggacgttattatttttcgaaagagggtaagggaattacgtttatttttttttttttttggaaataaaaaaagagagtaatattatttaattgttttatagatttaatagtatttcgttcggaggttttagcgatttcggggtggggtttttttgaggttttggttttttcgggagttgtgcgagtttttttttttttttcgttcggaggattttttcggttatcgtaattttcggttattttagttttttcgttttttaattttttagatttcgatttttcgtaagttcgtgtttttttttagatgttggtttcgggagcgtgaggtttggggttagcggaatggtagtgttagcgtgtttgatttagttttgttggagttcggtttttaatatttttttttttttttatgtttttgggtttaattttagtttttttcgttagaggttgtataaattttatttgtattttgatttgtgttaacgaaggtcgaagttttggtttgattagttgggaggttttggttcggtttgcgcgtaatacgtgtgggtgtagaagaggtttggtattagtttgtttaacgttatttataaatgatcggagatatattgtttagaagtggtgattgttttcgtattttaggatttattggagattttagtatttgaatttaaatagatgttttgttttggttttatttttggtatttaaattagggaatgtatttttttatttttattttttttagttattaattgaattttgtaatttttatttttttttatttgattattttttttggagaagtgtgatgttgaagagtttgttcgtgttaaatttttagggtcggttagagttgacgatgaagttgatgtggatggtatagtagaagaggatttgggtaaaagtagagaaggattaaggacggatgatgaagt

SEQ ID NO: 66 - DNA, 2494 bp, Artificial Sequence
  chemically treated genomic DNA (Homo sapiens)
attttattattcgtttttgatttttttttatttttatttagatttttttttattgtattatttatattaattttatcgttagttttgatcgattttgaagatttaatacgggtaaattttttaatattatatttttttaaggaggatgattaaatagggaagggtaggggttgtaaaatttagttggtaattaagggaggtggggatgaaagagtgtattttttggtttaaatattaaaggtaaagttaagatagaatatttatttaagtttagatgttgaggtttttagtagattttgaaatacggaggtagttattatttttaaatagtgtgttttcgattatttataaataacgttaagtagattgatattaggttttttttatatttatacgtgttgcgcgtaggtcgagttaaggttttttaattgattaagttaaaatttcggttttcgttagtataggttagaatgtaaataggatttatgtaatttttggcgaggggaattgaaattgagtttagaggtatgagaagggggagaaatgttaagaatcgaattttagtaaaattgaattaaatacgttgatattgttatttcgttggttttaggttttacgttttcgaggttagtatttaagaagggatacgggtttgcgaggagtcggagtttggggaattaggggacgggaaagttgggatggtcgaaggttgcggtggtcgaaaaagtttttcgggcggggaggggggaggggttcgtatagttttcgggggagttagagttttagagaggttttatttcgaggtcgttgagattttcgggcgagatattattagatttgtagggtagttagatgatgttgttttttttttttatttttagaggaagaagagaataaacgtaatttttttgttttttttcgaggaatggtgacgttttttggtttatcgtaggtttcgggatttttttttttacgtttaacgtttttaggattttcgagaagcggtcgcgtgtgtggaggggggacgtttgtttttttagaattatttatcgaaggttagtaggacgtagtagaggtttagtatttatagggtttttatggcgtgcggtcggtgagttttaagtttttttcgatcgtaggagtcgtttttatttttgggttcggatttttatatttttagtcgcgcggttcgtttattatattttaagtaggtcgggtcgttttttatttttatttttcgcgggcgggggacgggaaatatgaatttattaatcgcgtcgtattacgtatttacggtatttaatgaggattcgtgaggggggcggaagtttattaatcggagttgtttaggtgcggtgatcgatgttcgaagcgtggtttttttcgattggttagggtttgtagtttttttttaattaaatggtttcgcgggttttttatacgtgggatcgtttttttgtttgggcggttttggtttttaagggaaaacgtttaatgaatgtaagtagagaatatatttatttttttagagaggtcgcggcggaattattttcggattttagagagcgtttatttcgtgatcggggaaacggtagttatggtaacgtgttttttatttttttttatttatgtttggggtttcgttggaagtgattttagtacgattttcgcggttagttttttcgtgtggcggcgtttttcggaaagaagaaatatacgagagaggttgtaaattttttagaatttttttagatggcgggggggcgggggggtggcggtggtgagaaattatagttttcggtatgtaacgttttaggggtttattgtattgaatgttgggggtcgtagtttttggtttttgaggattagttgcgtagttttggtttttttttttacgtttttttagcgtgtttttgttagagttttgttttgcgttttagatgttatatttcgttttgattatagtagagatatgtgtttattttaggagtttttattgtatatagtttttagaagcgggtttagaaagtttttatgtttcgggtaaggtcgttcggttttggggggtcggtttgagtttgggggtttcgttttcggtttaagagtacgagttttcgaattcgtttataagtgcgttatttgggtattcggagcgtttattttttttgtgttttttcgcggtcggaatttttaggttttttttatttggtttatagaagaacgtggttgggattttttcgattattttagggaaatcgcgagtagcgttgaggttttcgattttttaataaagtataaaggcggcggtgatttgacggtcgtagaattttttttgtgaattaggtggagagcgtggtcgtaaaagcgggtttagtatagaaaaggaaaatttttagtttaacgagtgtaggaggatgtatttgtagatatttgaaagtaaaatttgtggtgttgtatatgagaacgggattgtagttttgtaattttatagaaa

SEQ ID NO: 67 - DNA, 2497 bp, Artificial Sequence
  chemically treated genomic DNA (Homo sapiens)
tgaagattgtgtggagtgggaggtttgtgtttattttttttatttattggggaatgggttgagtggttgggggtaaagtgggatttaggggttttgtttagtttttattgtaggttaagtttttttttgcggttaagagttattgggttttttatttttttttggtttttattcgtagatttagatggttttatggtgatttagaggaggatgtattcgggcgttttttttgaggatggttgtagggattatttagggattgagtcgaggtgtagatatagttacggatttgggtgttgttagatatagaagggtgtgtagtaaagtgagttttacgtatgcgtagatttttttttcggtttttgttttttatggaaatataattgattatattatgattgattacggtagttttttagggtttttttttttttttttttttttttttttagaagttataaagggatatagaatatatttaaagattattttatgtttttagtggagaggtaaaaaaggttcgtttcggaatggggaagcggttgcgttttggacggagaggggcggggatttcgcgattgtaggcggagggagggcgggtgtcgttggcgtaggcggtgatagggagatatcgtcgttattgagtatttttatgtaagtttttttatttttttgtgtattagtgtttatattggggtaatgataaatgttgtgttgaaaaattatttgatggggttatggaaggaacggaaggaacggcgttttggttcgttcggggttcgcgtacgtcgttattaagtcgcgggggcgggtcggaggggagagttgcgttagttaggtcgttgttagatgacgagttcggggcgtgacggggtggagtatttttaaaaaagtgtatgtttaggatttcgtttagtgtatttttgcgcgcggcgggtcgggttgggtagttttataaatagtcgtggtgtgagtttcgaagggaattattagcgttttttgtttacggagttttaggtttataatggtagcggtcgttagtttcgcgttttttttgtgtttttcgtttttgtatttgttgtttggttggtttcgggtaggatgggtcggtgagttcggggatgtagtttaagtagggcgggggttaaatttgggaggttgtggattgtagcgggttttagaggaggggaggtttttggaaggatcggcgcgatttttttgaacgaatatcgcggttttttcgaacgtcgcggttttttcgaacgtcgcggttttttcgaatatcgcggtgttttcgaatatcgttgttttttcgaatatcgcgattttttcgaatatcgtgatttttttagatatgtttagttgaaggtatttagtttttttcggtggttttttttcgtcgggttcgttttttgcggttgttgtttgttttttaggttaggaggtttttggaaggatcggtgttgttttttcgaatatcgtggttttttcgaatatcgcggttttttcgaatatcgtttttttttcgagtaacgcgattttttcgaatatcgcggttttttcgaaaatcgcgattttttcgaatattgttattttatcgaatatcgcgatttcgtcgaatatgttcggttgaaggtatttagttttttttcgcggttttttttcgtcgggtttgatttttgcggttgttgtttgtttcgtaggttaggaggtttttggtagtatcggcgcgatgttttcgaatatcgcgttttattttaatatcgcgattttttcgaatatcgtgatttttttcgaatatcgtcgttttttcgagtaacgcggttttttcgaatatcgcggttttttcgaatatcgcggtattttcgaatatcgtcgttttttcgtatattgcgatttttcgaaatattgcgattttttcgaatatcgcgatttcgtcgaatatgttcggttgaaggtatttagttttttttcgcggtttttttttttcgggttcgttttttgcggttgttgtttgttttataggttaggaggtttttgggtggattagcgcgattttttcgaatatcgcggtttattcgaatatcgcggttttttcgaatatcgcggttttttcgaatatcgcgattttttagaatatcgcggttttttcgaatatcgcggttttttcgaatatcgcgattttttagaatatcgcggtttattcgaatatcgcggttttttcgaatatcgcggttttttcgaatatcgcgattttttagaatatcgcggttttttcgaatatcgttgttttttcgaacgtgtttggttgaaggtatttagttttttttcggggttttttttcgtcgagttcgttttttgtagttgttgttagtatcgtagtttagggggagtgttaaagaaggttgaaaaggaattgtaggagggtggagggattaaaaggttatagagggtaaggtagggcggggatttttggtgtagattcgtagttttattg

SEQ ID NO: 68 - DNA, 2497 bp, Artificial Sequence
  chemically treated genomic DNA (Homo sapiens)
tagtggggttgcgggtttgtattagggattttcgttttattttgttttttgtagttttttggtttttttatttttttgtaatttttttttagttttttttgatattttttttggattgcggtgttagtagtagttgtaggaagcggattcggcggaaaggagtttcggaggggaattgagtgtttttagttaggtacgttcggggagatagcgatgttcggggagatcgcgatgttttgggggatcgcgatgttcggggagatcgcgatgttcggggaggtcgcgatgttcgggtagatcgcgatgttttgggggatcgcgatgttcggggagatcgcgatgttcggggaggtcgcgatgttttgggggatcgcgatgttcggggagatcgcgatgttcggggaggtcgcgatgttcgggtagatcgcgatattcggggagatcgcgttggtttatttagaagttttttggtttatggggtaagtagtagtcgtaggaagcggattcggaggaaaggagtcgcggaggggaattgagtgtttttagtcgggtatgttcggcgagatcgcgatgttcggggagatcgtaatgtttcgggggatcgtaatgtacggggagacggcgatgttcgggggtatcgcgatgttcggggggatcgcgatgttcggggagatcgcgttattcggggggacggcgatgttcgggggggattacgatgttcggagggatcgcgatgttggggtagaacgcgatgttcgggggtatcgcgtcggtgttattagaagttttttggtttgcggggtaagtagtagtcgtaggaattagattcggcggaaaggagtcgcggaggggaattgagtgtttttagtcgggtatgttcggcgagatcgcgatgttcggtgagatggtaatgttcggggagatcgcgattttcggggagatcgcgatgttcggggagatcgcgttgttcggagagagggcgatgttcggagaggtcgcgatgttcggggagattacgatgttcggggagatagtatcggtttttttagaaattttttggtttgaggggtaagtagtagtcgtaggaagcggattcggcggaaaggagttatcgaggggaattgagtgtttttagttgggtatgtttggggagattacgatgttcggggagatcgcgatgttcggggagatagcgatgttcgggggtatcgcgatgttcggggagatcgcgacgttcggagggatcgcgacgttcggggagatcgcgatgttcgtttagggagatcgcgtcggtttttttagaagtttttttttttttgaaattcgttgtagtttataattttttaggtttggttttcgttttgtttaggttatattttcgaatttatcgatttattttgttcgggattagttagatagtaggtgtagaagcgggaggtatagaaggaacgcggggttggcggtcgttgttattgtagatttggagtttcgtggataggaggcgttgatggtttttttcgaggtttatattacggttgtttataaagttgtttagttcggttcgtcgcgcgtagggatatattgggcgggattttaggtatgtatttttttggggatgttttatttcgttacgtttcgggttcgttatttgatagcggtttggttgacgtaattttttttttcgattcgttttcgcggtttggtggcggcgtgcgcgggtttcgagcgggttaggacgtcgtttttttcgttttttttatggttttattaaataattttttaatatagtatttattattattttagtgtaaatattgatgtataggaagatgaagaaatttgtataggaatatttagtggcggcggtgtttttttgttatcgtttgcgttagcgatattcgtttttttttcgtttgtagtcgcgaagttttcgttttttttcgtttagggcgtagtcgtttttttatttcggagcgaattttttttgtttttttattaaaagtatgaggtggtttttgagtatattttatatttttttatgatttttggaaaaaaaaaaaaagaaaagaaagaaagttttagagggttatcgtgattaattatgatgtgattagttgtgtttttatggagagtagaagtcgagggaagagtttacgtatgcgtggggtttattttgttatatatttttttgtgtttaataatatttaaattcgtggttgtatttgtatttcggtttagtttttggatggtttttgtagttatttttaaaagggacgttcgagtgtatttttttttgagttattatgaaattatttagatttgcgggtagaagttagagggaggtggagggtttagtggtttttggtcgtaagggagggtttagtttgtagtaaggattgggtagagtttttgagttttattttgtttttagttatttagtttattttttaatgaatgagaaaaataggtatagattttttattttatatagttttta

SEQ ID NO: 69 - DNA, 2455 bp, Artificial Sequence
  chemically treated genomic DNA (Homo sapiens)
ggattttttatttcggttgtagtttttcgcgtagtgagaaggtagcggtttttgagagtttagtagtgttttgggagtttgtagaacgtaggggcggatttcgcgtcgtattggtcgttaaggggcggtcgcggagggaaggggtgggtcggtgggtttgatagcgggtttgcgtaggcggtagcgtttgttttttttagtttttcgtttcgcgttatgggcgggtttcgggttttgttggtcgtattttgggcgttggaagtcgtcgggatcgtcgcgtttcgtatcggagtttttaatatttagagtttcggtgatagtaaagtgtcggatttcgtttgcggtagtattatcgcgaaggtggggttcgggtcggggcggggcggcgtttaggggtgttgatcgcgttgattttcgtattcgtcgtttttttttagattttggttggttatgatttcgcgttggtgtaggaggtgcgagatttagattttagcgtcgtgttcgcgtttatggagtagattaataggtgtggtgggtagggtttttcgtcgcgatttttcgtcgggatttcgtttcggcgcggcgtttcgattttgagcgggtttttgtttttatagcgtgttcgagtacgagtatagttttgtgagtagttagtttttgggtcgggattagtataaggagatgtatttgttcgtgtataggtgaggggcgggtcgtagggaggggcgcgcggggtcgtaggtcgggggtttagcgggttttttttattttttaggaaagacgcggtgtcggtcgtggatatttatttgtatttagatttcgaggacgtttttagtcgcgagtttttcgtggttaagttttcggttttcggtatcggtgagcgggtttcgttttttttttttcgtcgagttttgacgtttttattttttttcgtagtagtatagaatttggtgttgatttcgttgtacgcggcgtcgtattaagtcgtggcggagatcgacgcgttttacgacgtgtatttggacgtgatcgataagtggggtatcgacgtaagtttatttttcggtttcggggtttttgtaggcgcgtttcgggggtttggtttatgagggcgggatttcgacggtttttgcggcggtttagatacggtttcgcggcgttcgtaggatatgttgtttttgggcgattttaacgtcgattgtagttatgtgcgggcgtaggattgggtcgttattcgtttgaggagtagtgaggtttttaagtggtttatttttgatagcgtcgatattacggtgggtaatttagattgcgtttacgatcgtattgtggtttgtggcgttcgtttgcgtcggagtttgaagttttagtcggttatcgtgtacgatttttaggaggaattcggtttggattagatttaggcgagtgggtcgtggggcggtgttggttttgggtttttatcgttcgggcgtacgtaggtagtagggagggtttagcgtttaaggtagggttattttagttttttttttgtattagggttcgtttttaaggattttggagagttcggtttattttatgtggagttttgggtaggtagggtattttgttttttttttaaagggttaatggtgatattttttgtttcggtttttgtttttgttttatcgtaggtagtagtaggggtgggtatttaggttttatcggttttttttatttttgtgggtggggtgtattttttttttgaggtttattttgtttttataggtttttgttattagcgattattttttagtggaggtgatttttaagttttatcgatgattcgaggtttggttggggtatgttatttgtagattttggttttgaggaatggtttaatagtggtttttttagggtggtagttattttttagtgaggttttaaggtagagtcggttgggcgtggattaggggttatggatacgtgatgtgttgttttgtattttcgttttttatttgtgggacgggttgtatttagcgattttatggggtgttgtgagttttatgaggggtgtagggggtattgttcggtagatgtttgtttaataaatgagttgttttcggtcgggttttatagtttggtttttaggtttttgtttttttttaggatttagttttagttttttaggggtagttatggtttgggttgtttattttatgttttggtgggacgtggttgttttcggagtttgttggttttagaaggtagtttagggatgttttttgtttattttttgtggaaattataaacgtttttaggagtttgtattgtgagtatagttgggatagggatggcgttaatatattagttttttgggttttcggggtttttagaatagttttttttaggtttatttcgtagtttttattttagggttttgtaggggtttttaggtatttgtttgttttaagagttcggt

SEQ ID NO: 70 - DNA, 2455 bp, Artificial Sequence
  chemically treated genomic DNA (Homo sapiens)
atcgggtttttgagatagataagtgtttgggggtttttgtagggttttggaatgggggttgcggggtgggtttggggagagttgttttgagagtttcgagggtttaggaggttggtgtgttggcgttatttttgttttagttgtgtttatagtataggtttttgggagcgtttgtagtttttatagaggatgagtaaggagtatttttgagttgttttttggggttagtaggtttcgggggtagttacgttttattaggatatggggtgggtagtttaggttatggttgtttttaaggagttgaggttgggttttgaggaaggatagaggtttgggagttaagttgtggggttcgatcgggagtagtttatttattgagtagatatttgtcgggtagtgttttttgtattttttatggggtttataatattttatgaggtcgttggatgtagttcgttttatagatggggaacggaggtatagagtagtatattacgtgtttatggtttttggtttacgtttagtcgattttgttttggggttttattgaagggtggttgttattttgaaggggttattgttgggttattttttagagttagggtttgtaggtggtatgttttagttaggtttcgagttatcggtggaatttgagggttatttttattggaaagtggtcgttgatggtaagagtttgtggggatagagtgaattttaggggaaaagtgtattttatttatagggatgggaggggtcggtgaggtttgggtgtttatttttgttgttgtttgcggtggggtaggggtaggggtcggggtagagggtgttattattggttttttgagggaaaggtaaggtattttgtttgtttagagttttatatggggtgggtcgggttttttagggtttttggaaacgagttttggtgtagggaggaagttgaggtggttttgttttgggcgttggattttttttgttgtttgcgtgcgttcgggcggtggggatttaagattagtatcgttttacggtttattcgtttgagtttggtttaggtcgaattttttttggaagtcgtgtacggtggtcgattggggttttaggtttcggcgtaggcgggcgttataggttataatgcggtcgtaggcgtagtttgagttgtttatcgtggtgtcggcgttgttagggatgagttatttgaagattttattgttttttagacggatggcggtttagttttgcgttcgtatatagttgtagtcggcgttgaagtcgtttaggaatagtatgttttgcgggcgtcgcggagtcgtgtttgagtcgtcgtaggagtcgtcgaggtttcgtttttatgaattagattttcggggcgcgtttgtagggatttcgggatcgaggggtgggtttacgtcggtgttttatttgtcgattacgtttaggtatacgtcgtagagcgcgtcgattttcgttacggtttgatgcggcgtcgcgtgtagcgggattagtattaggttttgtgttgttgcgggaaggggtgggggcgttagagttcggcgggaggggaggggcggggttcgtttatcggtgtcgggggtcgagaatttgattacgaagggttcgcggttgaagacgttttcggggtttgggtataggtaggtgtttacgatcgatatcgcgttttttttaggagatggggaggattcgttgagttttcgatttgcggtttcgcgcgtttttttttgcggttcgttttttatttgtatacgaataggtatatttttttgtattggtttcggtttaggggttggttgtttataaagttgtattcgtgttcggatacgttgtggagataggggttcgtttagggtcggggcgtcgcgtcggggcgagatttcggcggggggtcgcgacgaggggttttgtttattatatttgttgatttgttttatgagcgcggatacggcgttgaggtttgggtttcgtattttttgtattagcgcgaggttatagttagttaggatttggggaggagcggcgggtgcgggggttagcgcggttagtatttttaaacgtcgtttcgtttcggttcgggttttattttcgcgatgatgttgtcgtaagcggggttcgatattttgttgttatcgaagttttgaatgttgaaggtttcgatgcgaagcgcggcggtttcggcggtttttagcgtttagagtgcggttagtagagttcggggttcgtttatggcgcggagcgagaggttgggagggatagacgttgtcgtttacgtagattcgttgttagatttatcgatttatttttttttttcgcggtcgttttttgacggttagtgcgacgcggaattcgtttttgcgttttgtaggtttttagggtattgttgggtttttagggatcgttgtttttttattgcgcgggaagttgtagtcggaatggagggttt

SEQ ID NO: 71 - DNA, 2738 bp, Artificial Sequence
  chemically treated genomic DNA (Homo sapiens)
tgtattgttgagggttatcgattatcgagaattaggtttagtttttagaggaagcgttagaggagggggagggtgggcgagggtttcggggtggtgggggtgtcggttttagtatgtggaggcgataggattcgtaagattttacgcgtcgtcggggtaggatcgtatagggtcgttatttatttatttggggcgtttttaatgggtattcgtgtattttagttcgtgcggtgagcgtacgtacgtcgtcgttgtcgcgtttatacggttttttaaagtcgggggaggggtcgtggagcgaaggagttgtaggtagatttttttttttttttcgagttgggaaaagggttagtttcgtgttttgtacgtttggttttgttttgtagtttgtcggtgagttaagagtcggtagagtagaggaggcgtacggttcgggtcgtgttattattttttggtttgttgatttggttaggagttggggatggcggtagtatcgcggaggtacgttttgcgttgtttttacgttttttttcgaaagtagtgtttttagggggaaagttcgtaatgttatttgtttcgtcggtaaagttttgggatgtcgggtattttttgaggagggggaagacgcggtatttttattgaggtcggtaggttaggaagagaagtttttcgggcgtagggcgtagtttagtttcggggattttttgggtttttcgcgtgtcggtcgggatgaagcgcgttttgtatcggattcgggattcgggggcgggggttggcgttggtagcgttagacgttgttttattttttttcgattttggggaggatagtaataagttttgttttagttattttattattttgttagtacgtgtagatttcgggttttcggagttcggcgcggatttcgttttgtttcgcgtttttttttgtacgtttcgtgttattttaagagtttgcgtggttttgggtgggcgtttggttttcggcgaaacgtttggggcgcgtcgcgtgggtgtacggtgtttttttttagtagttttcggttgcgggggtatatgtatttatttgtattttgtagggataggcggtttttttgttgggagtttttgttttggggattttcgggtgggttggtggcgtcggtttttcgcgtcgggttaaaggtggttaatattaaagttagggttatgaattggtttagtcgttcggtatatatggtttttggtattaatttttcgtcgggagatttggattttttgtgttttttttttttttttttttttttttttttttcgtcgtttttttttttttttttattttttttttttgttcgttttttttttttttttcgcggtcgcggttcggatagaggttatttagcgttttttcgtagtttttcggagagtatgtgattaggtcgttagtagcgtcgcgagtgttcggtaatggtagggatggtgttttaaatatttttggaagttttggtgttatttgaatgaaggagtcgagtaggtgttgtttcggcggttggattaattcgagatttcggtttttttgataatacggtcgggaggcggggtttgcgtttaattattataggaggaagtcgagcgtcgttgggagcgtcggataaagttgtcgatttggcggcggttacgcgtttgcgtgcgtgtgtatgagtgtgtgtgagcgcggtcggagatgcgtgcgcgtgtgcgggtgttttagggtaatggtcgaaaggattgtataatataagagcgaatttaagttttagttgttgttaaagggggacggtgtgttttgggatagtgtttttggggtttttggttcgcgttatatttatatcgggttgggaaagtttttttttttcgtcgtttggaatttagtgagatttttagtttagaggatttgataaattgaagtagttttttaggtataatgatgttgtgggttaattgagtatatatgggaatttttggttttgtgatattttgtattaaaaagaattttacgattgaagataggagtagaagtattagatatagtatttggtttgagtaattgttttattttttcgttttggtgggtcgtgtaatatttggagtgtcgtttttcgttttttttttaatttagacgtattttaggttgggttgtagggatttaggtgatagttaggatttgtattatttttaggagggtggtagggaggtttaaggtagttttgagttagttcgtcgcggagtatcgcgtgttcggaggttagagtttgaaaggtaattttacgcgtttttaaatatatttttgtatttttttaaagcgttgttcgttatttcgtttcgggtttttttttattttttagttattcgatggaagtggtgagaataaaaataaagataaaaaagttaaattcggggaagttatttttattttttttttttttttgttcggttttttttttaagaatcgtcgggtcgggatagttttcggttatttttttattcggttcgtggagggaaggagaaagttgggcgtcgtttggagcgtttttttttttgttgtgtgtgtacgtgtgtacgtttacgtttttttcgcgtcggggtcggggataggaattgttttcggtttcgttattttacggcgtagttcggggggttcgtagggttgggggagggcggggatacgagcgtcgcgtttaagcgttttagggtacgtattcggcgttggcgcgtattcg

SEQ ID NO: 72 - DNA, 2738 bp, Artificial Sequence
  chemically treated genomic DNA (Homo sapiens)
cgagtgcgcgttaacgtcgggtgcgtgttttggggcgtttgggcgcggcgttcgtgttttcgtttttttttagttttgcgagtttttcgagttgcgtcgtggggtgacgggatcgagagtagtttttgttttcggtttcggcgcgggggagacgtgagcgtgtatacgtatatatatagtaggggaagaggcgttttaagcggcgtttaattttttttttttttttacgggtcgggtgagaaagtagtcgggggttatttcgattcggcggtttttggggagggggtcgaataagaaaagggaggagatggagataattttttcggatttagtttttttgtttttgtttttgtttttattatttttatcggatgattggagagtaaaagggaattcggagcggggtggcgagtagcgttttgagaaaatgtaggagtgtgtttggagacgcgtaaagttgttttttaagttttggttttcgggtacgcgatgtttcgcggcgggttgatttagggttgttttgggtttttttgttatttttttggaaatgatgtaagttttgattgttatttggatttttgtagtttagtttggaatgcgtttggattaggggaaagacgagaaacgatattttaggtgttgtacggtttattaaagcgggaagatagggtagttgtttagattaaatattgtatttagtgtttttgtttttatttttaatcgtggggttttttttaatgtaaagtgttataaggttaggaatttttatgtgtgtttagttggtttatagtattattgtgtttaggaaattgttttaatttattaagttttttgggttgggaattttattgaattttaaacggcggaaagaggaaatttttttaattcgatgtgggtgtgacgcgagttaggggttttagggatattgttttagagtatatcgtttttttttaatagtaattggagtttggattcgtttttatattgtatagttttttcgattattgttttggagtattcgtatacgcgtacgtattttcggtcgcgtttatatatatttatatatacgtacgtaaacgcgtggtcgtcgttaggtcggtaattttgttcggcgtttttagcggcgttcggtttttttttgtagtagttgagcgtaggtttcgtttttcggtcgtgttgttaaaagggtcggggtttcggattggtttagtcgtcgggataatatttgttcgatttttttatttaagtgatattagagtttttagggatatttgaggtattatttttgttattgtcgggtattcgcggcgttgttaacggtttggttatatgtttttcggagagttacgggagggcgttgggtaatttttattcgagtcgcggtcgcgaggaggagggaaaaggcgagtaaaaaggaagagtgggaggaggaggggaagcggcgaaggaggaagaggaggaggaggaagaggggagtataaaggatttaggtttttcgacgggaggttaatattaagaattatgtgtgtcgagcggttgggttagtttatgattttggttttggtgttggttatttttgattcggcgcgggggatcgacgttattaatttattcgagggtttttaagataggagtttttagtagaaaggtcgtttgtttttgtagaatataggtaagtgtatgtgttttcgtagtcgggagttattgggagaggatatcgtgtatttacgcggcgcgttttaggcgtttcgtcgggagttaggcgtttatttagggttacgtaaatttttgggatggtacgggacgtgtaaagggaagcgcgaggtaaggcgaggttcgcgtcgggtttcgagggttcggaatttgtacgtgttagtagggtgatgaaatggttggggtaggatttgttgttgttttttttagggtcgaggggaaatgaagtagcgtttgacgttgttagcgttagttttcgttttcgaatttcgggttcggtgtaaagcgcgttttatttcggtcggtacgcgggaggtttagagggttttcggagttgggttgcgttttgcgttcggagaatttttttttttggtttgtcggttttagtaagggtgtcgcgttttttttttttttaaaagatgttcgatattttagaattttgtcggcgagataaatggtattgcgaattttttttttgggggtattgttttcggaagggagcgtgagggtagcgtaaagcgtattttcgcggtgttgtcgttatttttagtttttggttaggttagtaagttaagaaatggtgatacgattcgaatcgtgcgttttttttgttttatcggtttttggtttatcggtaagttgtaaagtagagttaggcgtgtagggtacggggttggttttttttttagttcggaaagagaaagaaaatttgtttatagttttttcgttttacgatttttttttcgattttggggggtcgtgtgaacgcggtagcggcggcgtgcgtgcgtttatcgtacgagttggaatgtacgagtgtttattagggacgttttaagtgagtgaatggcggttttgtgcggttttgtttcggcggcgcgtggggttttacggattttgtcgtttttatatgttggggtcggtatttttattatttcgagattttcgtttatttttttttttttttggcgttttttttgagaattgaatttgattttcggtggtcggtgatttttaataatata

SEQ ID NO: 73 - DNA, 2401 bp, Artificial Sequence
  chemically treated genomic DNA (Homo sapiens)
gcggtaggcgaggcggggtgtaggtgtgagtggggtgggaggaaggggaaaggatcggggtcgtcgtagtttttttggttagtttcgttgggttttgttagtttcgtttgagatcgaggcgtacggattagcggtcgttagtattttataggtggaggatattttttgcgttttaaggttaatgttatttcgatgggtttcgtgtcgttttgattttttttgatttaattttttggttatgatttttttattttttgggtttcgtttttgttagttttcgtcgacgtcgtttttttcgtcgttcgttcgggtttttttattcgtttttttttttttttggttcgacggttttattgaggtaaaaataaatagttttgagggtattttaaggagcgtgtagtggtttcgacggtattttcggggggataaaagaggtggttagttacgtcgtcggttttcggtcgaataatgggcgcgtagtagattgttagggggtatttgaaattcgaggggagggaaatatttgagcgcggttttttttcgcgaggacgtacgacgtagtttcgcggatcgttttttgttcgtttttttttatgtattttttttttgtgtggaattatttaaacgggagatttttggtagttttatgttaatgcgtcgaataaaggtaacggttcgcgggcgggaggttcggaaggtgtttggggtcgggtcgggcggggtggcggttaggcgggttgcgcgtgtttttcgcgtgtttttgggattgatataataattttttatttttgtaaatataaagttttttatcggttcgggtcgggcgtattcggcgtagggaggcgttggttttttcgggcggcgggtattgtagcggtaacgtacggtttttgtcggttgtggttcgggggattgagggtcgggagtgggggtttttgtgaagttagaagagaagtttgtagtagagtggtgatgaggggcgttgatattttatttttaacgtcgacgtttttaaacgcgatattttttgcggggtgagaatgcgggttcgttcggtttttttcgtgaggttagggttttttgtttttttagatattttaaggagttaattttttcgtagaagtttttcgtttttgtttttatttttaagtttcgcgttttttataaattttttgttgttttgattttgatttttagtcgtggtgagggttagagtgaatttcggcgcgtttttcgacggtattttcgtatattaggataggagaaattggagggtttggggtttcgggtttcgtagtcgtcggaggaagaatttatcgcggggttcgtaagggaaagtgaagaggttcgggatttttttaaagcgttggttaggatttcgaaggaaggggaggagttatttgaagtcggggaaggttttttgggtgttttgttttggatttttatgtttattgattttcgcgaagtttttttggaggggggtaaattcgcgttgttttttttaatttaattttacgcggtttatttttcgaatcgcgtgcgttaaggtcggcgtcgggggcgtattgtgatggcgttttgttttttttaggcgaagataaatatttcgattcgatgtttttatgtatgcgggtgtataggttttgagaaaattacgtagaaggcggttgcgatttacggttcgggttgggttatatttgtttggaggtcgttggtgtgtgcgtgcgcgcgtgcgtagtttaattttttttagtttcgggtggtgaaattagtttttaatattagtattttttaagtttttatttattttgattgtattcgtttgaaagtagattttatttacgttagtaagattggaagttataaataaagaaaaagaaacggatttattgaattttagtattttagtagcgtttaatagatttttttggttaaatttagagttttgtttgaatttatttacgtaggagttgttttgttttttttgttggtagaggtgtcggttttttatttttacggtttatttataattatgggtgttgttatttttaaaggatttataaggtgattaattttttgttatttgttgaatggaaggagtgttatatatgtaagatcgaatggggtaggtcgagttttcgttttatgttattttataatttagatgggattcgtgattagaaaataaaattggttaaagttgtttcggaattttttttttatttttaattttattagtattattaattagagtttaaaagagtaaggaaataatattagttatttttagatagaaatatgtttataaattttagataaatttattttaagatttttaatttttggggagattagtatttattatagtatttttaaaattagggtgagattttttaaaata

SEQ ID NO: 74 - DNA, 2401 bp, Artificial Sequence
  chemically treated genomic DNA (Homo sapiens)
tattttgaaaagttttattttagttttaaaaatgttgtggtgagtgttagtttttttaaaagttagaaattttaaaatgagtttatttaaaatttataaatatatttttatttaaaagtaattgatgttatttttttgtttttttgagttttgattaatagtgttgatgaaattagaagtgggaaaaggatttcgagatagttttggttaattttattttttaattacgaattttatttggattgtagaatagtatagggcgggggttcggtttgttttattcggttttgtatatgtaatattttttttatttaatagataatagagagttagttattttgtgaattttttaaaaataataatatttataattgtaaataagtcgtggggatgggaaatcggtatttttattaataaaaaaaataaaataatttttgcgtgagtgaatttaaatagggttttgaatttagttaagggaatttattaaacgttattgagatattgagatttaatgaattcgtttttttttttttatttgtggtttttagttttgttagcgtaaatgaaatttgtttttagacgggtatagttaaaataaatggaaatttgaaaggtattagtattggaaattaattttattattcggggttggaaggagttaggttgcgtacgcgcgtacgtatatattagcgatttttaagtaggtgtagtttagttcgggtcgtggatcgtagtcgttttttgcgtgatttttttagaatttgtgtattcgtatgtatggggatatcgggtcgagatatttgttttcgtttgggaagagtaaagcgttattatagtgcgttttcgacgtcggttttggcgtacgcgattcggagaatgggtcgcgtgaagttaagttgggggaaatagcgcggatttgtttttttttaggggggtttcgcgaaagttagtgaatataaggatttaaggtagagtatttaaggggtttttttcggttttaggtgatttttttttttttttcggggttttggttagcgttttggaaaaatttcgggtttttttatttttttttgcggatttcgcggtgggtttttttttcgacgattgcggagttcgaggttttaggttttttaattttttttattttggtgtgcggggatgtcgtcggggagcgcgtcggggtttattttgatttttattacggttggaaattaaagttaaggtaatagggagtttgtagaaagcgcgaagtttggaaataagagtagaagcggggaatttttgcggaggagttggttttttggggtgtttaggagaataggaggttttggttttacgggaggagtcgggcgggttcgtatttttatttcgtagagggtatcgcgtttggagacgtcggcgttgggggtgaggtgttagcgttttttattattattttgttgtagattttttttttggttttatagaagtttttattttcggtttttagtttttcgagttataatcggtaggaatcgtgcgttatcgttgtagtgttcgtcgttcggagggattagcgtttttttgcgtcgggtgcgttcgattcgagtcggtgagaggttttgtatttgtaggaatgaggggttgttgtgttagttttaggggtacgcgagagatacgcgtagttcgtttggtcgttatttcgttcggttcggttttaggtatttttcgggtttttcgttcgcgggtcgttgtttttgttcggcgtattagtataaagttgttagggatttttcgtttagataattttatataaaaggagagtgtatgaaagagagcgaataagggacgattcgcgaggttgcgtcgtgcgttttcgcggggagggatcgcgtttaagtattttttttttttcgagttttaagtgttttttggtaatttgttgcgcgtttattattcggtcgggggtcgacggcgtggttggttattttttttattttttcgagagtatcgtcggggttattgtacgttttttgaagtgtttttagggttgtttgtttttgttttagtgggatcgtcgggttagggagggaggagagcgggtaggaaggttcgggcgggcggcgggaagggcgacgtcggcgaaagttggtagaggcgaagtttagaaggtgagaaagttataattaaagaattaggttagggagagttaggacggtacgggatttatcgggatgatattgattttggggcgtaagaggtgttttttatttgtgaggtgttggcggtcgttagttcgtgcgtttcggttttaaacggaattgataaaatttagcgaaattgattagaaaggttgcggcgatttcgattttttttttttttttttattttatttatatttgtatttcgtttcgtttgtcgt

SEQ ID NO: 75 - DNA, 2476 bp, Artificial Sequence
  chemically treated genomic DNA (Homo sapiens)
aattattaggaggttgggggaaaagaggggaaaaacgggtaaggaaggttgtaaatgttaagatgttaaataggaatttaatcgaagttcgaagtgaaatatagttttttttggtttaattgttatgtaaataatttttaagtatttttagatgtaaagaaaaatagttattgtgtataggcgttagttgaatgttcgagagttggatgaatggggaagatttgttatatatttagtggtgggtggattttattaggttgtagtttttatatagtttttttttgttgtattgtagaggcgttatttttttcgttttaatttttatttaattcgatttttttatttgtattttaaaaaaaagatttttcggattttttttagtattttgtgtttttaggggaattaaattagagtttttagagttgttagggaagaggtcgcgttttaattagataaacgtttttttggatgtataggatagagttcgtgtttttttattattcgttattgttttttttagacgtatattttatttttcgttttatttttttttcgttaaggattttatagtttagtatagaattaagtttcggaggtgattcgagggtgggaagtagaggggtttcgaggtttcgttagaagtttcggtagcgtttttgtttttttttaggcggacgcgtagtttcgggaagggagtcgggcgggagtttcggtggcgtattgagattaacgcggttcggtttacggcgagggcggggtgtcgcggtttttgttttcgcggattttttgttttttagatagagtttagggtgcgagcgaattttcgggacgtttagatttggggaaggcgcggggtggttatgggttttcgattttttttatttttcgtaagttatataaaagggagacgcggatatgtataaagtttgtttgtggaaggcggtgcgcgatttcgacgtcggttcgggttagggtcgtatttaggttgtcgtcgttagtagtcgcgaaaagaggttggagtaaggaagggggatgggggtgagagaggaaggtgaaacgaggcggagaacgtagggaaaagcgaggggtttttagttttttgggttgtttcgattttttttttttttttttagggtttaagagaaaggaaagggtaacgatttaagagcgaaggattggttttagggacgttgcgttttcggttttttttacgtgttttttttttttttttttttgtttgaatgtttttcgtttttttcgattttcgtttttaaggtagggattaagtcggggtttgggtttagggtcgttttttatttttttcgtttcgggttggcgcggaattagggagattagcgtttcgttcgtttttttttagcgggtcggagcgcgattttttggggtagggttgggtcgaaagcggggatgcgttggacgttcgtaagcgggggcggagaggagaggggttttattgacggattttcggtttttttgtattaaagatttgggttaaggttttggggggtatcgcgtttttatcgtgtagttttttttcgtttttcgaggcgcggtatttatttttagcgttcgagtcgtttaggcggttagtaggagtagtgttaaatcgggtagtatcgcgattttgcgcggggtatcgagtgcgttgttgtgcgagtgggattcgtcgcgtttttgttttgttcgcgtcgttatcgtcgtcgtttttcggggttttcgcgtacgttttttcgcgtgttttcgtttatcgttgtcgaggaaattgacggagttcgagcgcggcggcggggtttagagttaggcgagttagttgattcggtttatttcgttcggtattcgagagagatttttagcggcgtcgtcggggaattgcgttcgttcgcgtcgggaggggttttcgcgtttcgcgtttataggtgtacgcgtttttggcgtcgtttgtattttacgcgtttttttcgtttttcggtcgacggtttatttgggtttcgtgaatagtgggagggagagtttggggttaggagagggacggtgtaggattagggaaaggtgagttttaggacgttgaggttttagaaaagtcgagagcgtttttgttcgttttcgtgagtttgaattattcgatttcgtaggtttttcgggggtgtcgtataaaggattgttgttagggtgcgtttttattcgtatttcgttttttttttcggtttggagaggtggggtaggcgtttttggaagagaatgagaacgagtgaagtttaaaggaaataggattttttttgtttgttgagatagtaaaattttattttttaatttttaacgttaaaagtaggtacgagtaatttggaatttttatttttagaacgaattaaaggagtaaggcgtaggatttggtaaagaagcggttaatttatttatttttttttgaaagtagggttttgggtttgggttttgttttttt

SEQ ID NO: 76 - DNA, 2476 bp, Artificial Sequence
  chemically treated genomic DNA (Homo sapiens)
aaagaaataaaatttaagtttagaattttgtttttaagaagaagtaaatgggttggtcgtttttttgttaggttttgcgttttgtttttttggttcgttttaaagatagaaattttaggttgttcgtgtttgtttttgacgttgggggttaaaaaatgaggttttgttgttttaataagtaaagaaaattttattttttttaagttttattcgtttttatttttttttagaaacgtttgttttatttttttaaatcgagagaaaaaacgaaatgcggataaaaacgtattttagtagtagttttttatacgatattttcgggaggtttgcggggtcggatgatttaagtttacggggacgagtaggagcgttttcgatttttttagagttttagcgttttaggatttatttttttttgattttgtatcgttttttttttggttttagatttttttttttattgtttacgaagtttaggtgggtcgtcggtcggggagcggagggggcgcgtggggtgtaggcggcgttaagggcgcgtgtatttgtgggcgcggggcgcgagggtttttttcggcgcgagcgggcgtagtttttcggcggcgtcgttaggggtttttttcgggtgtcgagcggggtgggtcggattagttgattcgtttggttttgagtttcgtcgtcgcgttcgggtttcgttagttttttcggtagcggtaggcgagagtacgcggaggagcgtgcgcgggggtttcgggagacggcggcggtggcggcgcgggtagagtaaggacgcggcggattttattcgtatagtagcgtattcggtgtttcgcgtagggtcgcgatgttgttcggtttggtattgtttttgttggtcgtttggacggttcgggcgttggaggtgggtgtcgcgtttcggaaggcggggggaggttgtacggtggggacgcgatattttttaagattttaatttaagtttttaatgtagagaagtcgggggttcgttaatgggatttttttttttttcgttttcgtttgcggacgtttagcgtattttcgttttcggtttagttttgttttagggagtcgcgtttcggttcgttgagagggagcgggcgaggcgttggtttttttggtttcgcgttagttcggggcgagaagggtagggggcgattttgagtttagatttcgatttagtttttgttttggaagcgggggtcgggggaggcgagagatatttagataggggggaagggggaaggagtacgtggggaaaatcgaaaacgtagcgtttttaaagttagtttttcgtttttgaatcgttgttttttttttttttttgggttttggggaggaggaggaggagtcgggatagtttaggaagttaggagtttttcgtttttttttgcgtttttcgtttcgttttattttttttttttatttttattttttttttttgttttaattttttttcgcggttgttggcggcggtagtttgggtgcgattttagttcgagtcggcgtcggggtcgcgtatcgttttttataggtaaattttgtgtatgttcgcgttttttttttgtgtaatttgcgagaaatgggaggggtcggagatttatagttatttcgcgttttttttaagtttggacgtttcgggagttcgttcgtattttaagttttgtttgagaggtagaaggttcgcgggaataaaagtcgcgatatttcgttttcgtcgtgggtcgagtcgcgttagttttagtgcgttatcgaggttttcgttcggtttttttttcggggttgcgcgttcgtttgggagggggtagagacgttgtcggggtttttggcggagtttcggggtttttttgttttttattttcggattattttcgaggtttaattttgtgttgggttgtaaagtttttggcggggaggaaataaggcggagagtgggatgtgcgtttggaaagggtagtggcggatggtggggaggtacgggttttgttttgtgtatttaaggaggcgtttgtttgattaaggcgcggttttttttttggtagttttggggattttggtttagtttttttgggggtataggatgttggggagggttcgaagggttttttttttagggtgtagataaaaggatcgaattgagtgaagattaagacggagaagatggcgtttttgtagtgtagtaaagaaaagttgtgtggaggttgtagtttagtgaaatttatttattattaggtgtataataagttttttttatttatttaattttcgaatatttagttaacgtttgtgtataatgattgtttttttttatatttgaagatgtttagaagttgtttgtatgatagttgggttagaggaggttgtattttatttcggatttcggttgggtttttgtttggtattttaatatttgtaattttttttattcgttttttttttttttttttttagttttttagtaatt

SEQ ID NO: 77 - DNA, 2494 bp, Artificial Sequence
  chemically treated genomic DNA (Homo sapiens)
tttttatgaagttataaagttgtaattttgtttttatgtgtagtattataggttttgtttttaaatatttgtaggtgtatttttttgtatttgttaaattaagggttttttttttttgtgttagatttgtttttatgattatgttttttatttgatttatagaaagggttttatgattgttaggttattgttgtttttgtattttattggggagttgaaggttttagtgttgtttgtgatttttttaaggtggttgggaaggttttaattatgtttttttgtaaattagataaggaaggtttggggattttggttgtggaaaggtatagaggaggtgaatgttttggatgtttaagtgatgtatttgtaggtggatttggaaatttgtgtttttgagttggaggtggagtttttagatttagattgattttttagaattgggtggttttgtttgaggtatgaaggttttttaggtttgtttttaaaagttgtgtataatggagatttttggaataggtatatatttttattgtaattagaatgagatgtaatatttaagatgtagggtagggttttggtaaagatatgttgggggaatgtgaaagaaagggttaaaattatgtagttggtttttagagattaaagattatgatttttagtatttaatgtagtgaatttttaggatgttgtatgttgggagttgtagttttttattattgttatttttttgtttttttgttatttgaaagggttttaggggatttgtaattttttttgtgtgttttttttttttgagaagtgttgttatatgagaaagttggttgtgaaagttgtgttggaattatttttaatgaaattttaggtatagatgggaaagggtgaagaatatgttgttatggttattgtttttttggttatggaataaatgttttttaggatttggaagtagttttgttgtgatttttttaaaaggatggatgtgttttttgtttatatttattggatgtttttttttagaggttaaggttgtttaggtaaaggggtggttttatgtgtgaggggtttgtggagttatttgattggagaaaagttgtaaattttgattaattggaaggagttatgttttgggtattggttattgtatttggatagttttgattggtggatttttgttttttttatgaatttttattgggtgttgtgggtgtgtggtgtggtgtgattggtgggtttatgttttttgttttttgtttgtgagaagtgggggtgaaaagtggtttgatttgtttggggtgtagtgggtggattgtgtggttggaggtgtgaggatttgaatttaggggtggaggtggtttttgtgattgaaggggatttgagatttattggttgtatgttatgagggttttgtgggtgttgggtttttgttgtgttttgttgatttttggtgagtgattttggaggagtagatgttttttttttatatatgtggttgttttttgaaggttttgggggtgttgaatgtgggaggggggattttggggtttgtggtgggttaagggatgttattattttttgaaagagggtaagggaattatgtttatttttttttttttttggaaataaaaaaagagagtaatattatttaattgttttatagatttaatagtattttgtttggaggttttagtgattttggggtggggtttttttgaggttttggtttttttgggagttgtgtgagttttttttttttttttgtttggaggatttttttggttattgtaatttttggttattttagtttttttgttttttaattttttagattttgattttttgtaagtttgtgtttttttttagatgttggttttgggagtgtgaggtttggggttagtggaatggtagtgttagtgtgtttgatttagttttgttggagtttggtttttaatatttttttttttttttatgtttttgggtttaattttagttttttttgttagaggttgtataaattttatttgtattttgatttgtgttaatgaaggttgaagttttggtttgattagttgggaggttttggtttggtttgtgtgtaatatgtgtgggtgtagaagaggtttggtattagtttgtttaatgttatttataaatgattggagatatattgtttagaagtggtgattgtttttgtattttaggatttattggagattttagtatttgaatttaaatagatgttttgttttggttttatttttggtatttaaattagggaatgtatttttttatttttattttttttagttattaattgaattttgtaatttttatttttttttatttgattattttttttggagaagtgtgatgttgaagagtttgtttgtgttaaatttttagggttggttagagttgatgatgaagttgatgtggatggtatagtagaagaggatttgggtaaaagtagagaaggattaaggatggatgatgaagt

SEQ ID NO: 78 - DNA, 2494 bp, Artificial Sequence
  chemically treated genomic DNA (Homo sapiens)
attttattatttgtttttgatttttttttatttttatttagatttttttttattgtattatttatattaattttattgttagttttgattgattttgaagatttaatatgggtaaattttttaatattatatttttttaaggaggatgattaaatagggaagggtaggggttgtaaaatttagttggtaattaagggaggtggggatgaaagagtgtattttttggtttaaatattaaaggtaaagttaagatagaatatttatttaagtttagatgttgaggtttttagtagattttgaaatatggaggtagttattatttttaaatagtgtgtttttgattatttataaataatgttaagtagattgatattaggttttttttatatttatatgtgttgtgtgtaggttgagttaaggttttttaattgattaagttaaaattttggtttttgttagtataggttagaatgtaaataggatttatgtaatttttggtgaggggaattgaaattgagtttagaggtatgagaagggggagaaatgttaagaattgaattttagtaaaattgaattaaatatgttgatattgttattttgttggttttaggttttatgtttttgaggttagtatttaagaagggatatgggtttgtgaggagttggagtttggggaattaggggatgggaaagttgggatggttgaaggttgtggtggttgaaaaagttttttgggtggggaggggggaggggtttgtatagtttttgggggagttagagttttagagaggttttattttgaggttgttgagatttttgggtgagatattattagatttgtagggtagttagatgatgttgttttttttttttatttttagaggaagaagagaataaatgtaatttttttgtttttttttgaggaatggtgatgttttttggtttattgtaggttttgggatttttttttttatgtttaatgtttttaggatttttgagaagtggttgtgtgtgtggaggggggatgtttgtttttttagaattatttattgaaggttagtaggatgtagtagaggtttagtatttatagggtttttatggtgtgtggttggtgagttttaagttttttttgattgtaggagttgtttttatttttgggtttggatttttatatttttagttgtgtggtttgtttattatattttaagtaggttgggttgttttttatttttattttttgtgggtgggggatgggaaatatgaatttattaattgtgttgtattatgtatttatggtatttaatgaggatttgtgaggggggtggaagtttattaattggagttgtttaggtgtggtgattgatgtttgaagtgtggttttttttgattggttagggtttgtagtttttttttaattaaatggttttgtgggttttttatatgtgggattgtttttttgtttgggtggttttggtttttaagggaaaatgtttaatgaatgtaagtagagaatatatttatttttttagagaggttgtggtggaattatttttggattttagagagtgtttattttgtgattggggaaatggtagttatggtaatgtgttttttatttttttttatttatgtttggggttttgttggaagtgattttagtatgatttttgtggttagtttttttgtgtggtggtgttttttggaaagaagaaatatatgagagaggttgtaaattttttagaatttttttagatggtgggggggtgggggggtggtggtggtgagaaattatagtttttggtatgtaatgttttaggggtttattgtattgaatgttgggggttgtagtttttggtttttgaggattagttgtgtagttttggtttttttttttatgtttttttagtgtgtttttgttagagttttgttttgtgttttagatgttatattttgttttgattatagtagagatatgtgtttattttaggagtttttattgtatatagtttttagaagtgggtttagaaagtttttatgttttgggtaaggttgtttggttttggggggttggtttgagtttgggggttttgtttttggtttaagagtatgagtttttgaatttgtttataagtgtgttatttgggtatttggagtgtttattttttttgtgtttttttgtggttggaatttttaggttttttttatttggtttatagaagaatgtggttgggatttttttgattattttagggaaattgtgagtagtgttgaggtttttgattttttaataaagtataaaggtggtggtgatttgatggttgtagaattttttttgtgaattaggtggagagtgtggttgtaaaagtgggtttagtatagaaaaggaaaatttttagtttaatgagtgtaggaggatgtatttgtagatatttgaaagtaaaatttgtggtgttgtatatgagaatgggattgtagttttgtaattttatagaaa

SEQ ID NO: 79 - DNA, 2497 bp, Artificial Sequence
  chemically treated genomic DNA (Homo sapiens)
tgaagattgtgtggagtgggaggtttgtgtttattttttttatttattggggaatgggttgagtggttgggggtaaagtgggatttaggggttttgtttagtttttattgtaggttaagtttttttttgtggttaagagttattgggttttttatttttttttggtttttatttgtagatttagatggttttatggtgatttagaggaggatgtatttgggtgttttttttgaggatggttgtagggattatttagggattgagttgaggtgtagatatagttatggatttgggtgttgttagatatagaagggtgtgtagtaaagtgagttttatgtatgtgtagattttttttttggtttttgttttttatggaaatataattgattatattatgattgattatggtagttttttagggtttttttttttttttttttttttttttttagaagttataaagggatatagaatatatttaaagattattttatgtttttagtggagaggtaaaaaaggtttgttttggaatggggaagtggttgtgttttggatggagaggggtggggattttgtgattgtaggtggagggagggtgggtgttgttggtgtaggtggtgatagggagatattgttgttattgagtatttttatgtaagtttttttatttttttgtgtattagtgtttatattggggtaatgataaatgttgtgttgaaaaattatttgatggggttatggaaggaatggaaggaatggtgttttggtttgtttggggtttgtgtatgttgttattaagttgtgggggtgggttggaggggagagttgtgttagttaggttgttgttagatgatgagtttggggtgtgatggggtggagtatttttaaaaaagtgtatgtttaggattttgtttagtgtatttttgtgtgtggtgggttgggttgggtagttttataaatagttgtggtgtgagttttgaagggaattattagtgttttttgtttatggagttttaggtttataatggtagtggttgttagttttgtgttttttttgtgttttttgtttttgtatttgttgtttggttggttttgggtaggatgggttggtgagtttggggatgtagtttaagtagggtgggggttaaatttgggaggttgtggattgtagtgggttttagaggaggggaggtttttggaaggattggtgtgatttttttgaatgaatattgtggtttttttgaatgttgtggtttttttgaatgttgtggtttttttgaatattgtggtgtttttgaatattgttgtttttttgaatattgtgatttttttgaatattgtgatttttttagatatgtttagttgaaggtatttagttttttttggtggtttttttttgttgggtttgttttttgtggttgttgtttgttttttaggttaggaggtttttggaaggattggtgttgtttttttgaatattgtggtttttttgaatattgtggtttttttgaatattgttttttttttgagtaatgtgatttttttgaatattgtggtttttttgaaaattgtgatttttttgaatattgttattttattgaatattgtgattttgttgaatatgtttggttgaaggtatttagtttttttttgtggtttttttttgttgggtttgatttttgtggttgttgtttgttttgtaggttaggaggtttttggtagtattggtgtgatgtttttgaatattgtgttttattttaatattgtgatttttttgaatattgtgattttttttgaatattgttgtttttttgagtaatgtggtttttttgaatattgtggtttttttgaatattgtggtatttttgaatattgttgtttttttgtatattgtgattttttgaaatattgtgatttttttgaatattgtgattttgttgaatatgtttggttgaaggtatttagtttttttttgtggttttttttttttgggtttgttttttgtggttgttgtttgttttataggttaggaggtttttgggtggattagtgtgatttttttgaatattgtggtttatttgaatattgtggtttttttgaatattgtggtttttttgaatattgtgattttttagaatattgtggtttttttgaatattgtggtttttttgaatattgtgattttttagaatattgtggtttatttgaatattgtggtttttttgaatattgtggtttttttgaatattgtgattttttagaatattgtggtttttttgaatattgttgtttttttgaatgtgtttggttgaaggtatttagtttttttttggggtttttttttgttgagtttgttttttgtagttgttgttagtattgtagtttagggggagtgttaaagaaggttgaaaaggaattgtaggagggtggagggattaaaaggttatagagggtaaggtagggtggggatttttggtgtagatttgtagttttattg

SEQ ID NO: 80 - DNA, 2497 bp, Artificial Sequence
  chemically treated genomic DNA (Homo sapiens)
tagtggggttgtgggtttgtattagggatttttgttttattttgttttttgtagttttttggtttttttatttttttgtaatttttttttagttttttttgatattttttttggattgtggtgttagtagtagttgtaggaagtggatttggtggaaaggagttttggaggggaattgagtgtttttagttaggtatgtttggggagatagtgatgtttggggagattgtgatgttttgggggattgtgatgtttggggagattgtgatgtttggggaggttgtgatgtttgggtagattgtgatgttttgggggattgtgatgtttggggagattgtgatgtttggggaggttgtgatgttttgggggattgtgatgtttggggagattgtgatgtttggggaggttgtgatgtttgggtagattgtgatatttggggagattgtgttggtttatttagaagttttttggtttatggggtaagtagtagttgtaggaagtggatttggaggaaaggagttgtggaggggaattgagtgtttttagttgggtatgtttggtgagattgtgatgtttggggagattgtaatgttttgggggattgtaatgtatggggagatggtgatgtttgggggtattgtgatgtttggggggattgtgatgtttggggagattgtgttatttggggggatggtgatgtttgggggggattatgatgtttggagggattgtgatgttggggtagaatgtgatgtttgggggtattgtgttggtgttattagaagttttttggtttgtggggtaagtagtagttgtaggaattagatttggtggaaaggagttgtggaggggaattgagtgtttttagttgggtatgtttggtgagattgtgatgtttggtgagatggtaatgtttggggagattgtgatttttggggagattgtgatgtttggggagattgtgttgtttggagagagggtgatgtttggagaggttgtgatgtttggggagattatgatgtttggggagatagtattggtttttttagaaattttttggtttgaggggtaagtagtagttgtaggaagtggatttggtggaaaggagttattgaggggaattgagtgtttttagttgggtatgtttggggagattatgatgtttggggagattgtgatgtttggggagatagtgatgtttgggggtattgtgatgtttggggagattgtgatgtttggagggattgtgatgtttggggagattgtgatgtttgtttagggagattgtgttggtttttttagaagtttttttttttttgaaatttgttgtagtttataattttttaggtttggtttttgttttgtttaggttatatttttgaatttattgatttattttgtttgggattagttagatagtaggtgtagaagtgggaggtatagaaggaatgtggggttggtggttgttgttattgtagatttggagttttgtggataggaggtgttgatggttttttttgaggtttatattatggttgtttataaagttgtttagtttggtttgttgtgtgtagggatatattgggtgggattttaggtatgtatttttttggggatgttttattttgttatgttttgggtttgttatttgatagtggtttggttgatgtaatttttttttttgatttgtttttgtggtttggtggtggtgtgtgtgggttttgagtgggttaggatgttgttttttttgttttttttatggttttattaaataattttttaatatagtatttattattattttagtgtaaatattgatgtataggaagatgaagaaatttgtataggaatatttagtggtggtggtgtttttttgttattgtttgtgttagtgatatttgttttttttttgtttgtagttgtgaagtttttgtttttttttgtttagggtgtagttgtttttttattttggagtgaattttttttgtttttttattaaaagtatgaggtggtttttgagtatattttatatttttttatgatttttggaaaaaaaaaaaaagaaaagaaagaaagttttagagggttattgtgattaattatgatgtgattagttgtgtttttatggagagtagaagttgagggaagagtttatgtatgtgtggggtttattttgttatatatttttttgtgtttaataatatttaaatttgtggttgtatttgtattttggtttagtttttggatggtttttgtagttatttttaaaagggatgtttgagtgtatttttttttgagttattatgaaattatttagatttgtgggtagaagttagagggaggtggagggtttagtggtttttggttgtaagggagggtttagtttgtagtaaggattgggtagagtttttgagttttattttgtttttagttatttagtttattttttaatgaatgagaaaaataggtatagattttttattttatatagttttta

SEQ ID NO: 81 - DNA, 2455 bp, Artificial Sequence
  chemically treated genomic DNA (Homo sapiens)
ggattttttattttggttgtagttttttgtgtagtgagaaggtagtggtttttgagagtttagtagtgttttgggagtttgtagaatgtaggggtggattttgtgttgtattggttgttaaggggtggttgtggagggaaggggtgggttggtgggtttgatagtgggtttgtgtaggtggtagtgtttgttttttttagttttttgttttgtgttatgggtgggttttgggttttgttggttgtattttgggtgttggaagttgttgggattgttgtgttttgtattggagtttttaatatttagagttttggtgatagtaaagtgttggattttgtttgtggtagtattattgtgaaggtggggtttgggttggggtggggtggtgtttaggggtgttgattgtgttgatttttgtatttgttgtttttttttagattttggttggttatgattttgtgttggtgtaggaggtgtgagatttagattttagtgttgtgtttgtgtttatggagtagattaataggtgtggtgggtagggttttttgttgtgattttttgttgggattttgttttggtgtggtgttttgattttgagtgggtttttgtttttatagtgtgtttgagtatgagtatagttttgtgagtagttagtttttgggttgggattagtataaggagatgtatttgtttgtgtataggtgaggggtgggttgtagggaggggtgtgtggggttgtaggttgggggtttagtgggttttttttattttttaggaaagatgtggtgttggttgtggatatttatttgtatttagattttgaggatgtttttagttgtgagttttttgtggttaagtttttggtttttggtattggtgagtgggttttgtttttttttttttgttgagttttgatgtttttatttttttttgtagtagtatagaatttggtgttgattttgttgtatgtggtgttgtattaagttgtggtggagattgatgtgttttatgatgtgtatttggatgtgattgataagtggggtattgatgtaagtttattttttggttttggggtttttgtaggtgtgttttgggggtttggtttatgagggtgggattttgatggtttttgtggtggtttagatatggttttgtggtgtttgtaggatatgttgtttttgggtgattttaatgttgattgtagttatgtgtgggtgtaggattgggttgttatttgtttgaggagtagtgaggtttttaagtggtttatttttgatagtgttgatattatggtgggtaatttagattgtgtttatgattgtattgtggtttgtggtgtttgtttgtgttggagtttgaagttttagttggttattgtgtatgatttttaggaggaatttggtttggattagatttaggtgagtgggttgtggggtggtgttggttttgggtttttattgtttgggtgtatgtaggtagtagggagggtttagtgtttaaggtagggttattttagttttttttttgtattagggtttgtttttaaggattttggagagtttggtttattttatgtggagttttgggtaggtagggtattttgttttttttttaaagggttaatggtgatattttttgttttggtttttgtttttgttttattgtaggtagtagtaggggtgggtatttaggttttattggttttttttatttttgtgggtggggtgtattttttttttgaggtttattttgtttttataggtttttgttattagtgattattttttagtggaggtgatttttaagttttattgatgatttgaggtttggttggggtatgttatttgtagattttggttttgaggaatggtttaatagtggtttttttagggtggtagttattttttagtgaggttttaaggtagagttggttgggtgtggattaggggttatggatatgtgatgtgttgttttgtatttttgttttttatttgtgggatgggttgtatttagtgattttatggggtgttgtgagttttatgaggggtgtagggggtattgtttggtagatgtttgtttaataaatgagttgtttttggttgggttttatagtttggtttttaggtttttgtttttttttaggatttagttttagttttttaggggtagttatggtttgggttgtttattttatgttttggtgggatgtggttgtttttggagtttgttggttttagaaggtagtttagggatgttttttgtttattttttgtggaaattataaatgtttttaggagtttgtattgtgagtatagttgggatagggatggtgttaatatattagttttttgggtttttggggtttttagaatagttttttttaggtttattttgtagtttttattttagggttttgtaggggtttttaggtatttgtttgttttaagagtttggt

SEQ ID NO: 82 - DNA, 2455 bp, Artificial Sequence
  chemically treated genomic DNA (Homo sapiens)
attgggtttttgagatagataagtgtttgggggtttttgtagggttttggaatgggggttgtggggtgggtttggggagagttgttttgagagttttgagggtttaggaggttggtgtgttggtgttatttttgttttagttgtgtttatagtataggtttttgggagtgtttgtagtttttatagaggatgagtaaggagtatttttgagttgttttttggggttagtaggttttgggggtagttatgttttattaggatatggggtgggtagtttaggttatggttgtttttaaggagttgaggttgggttttgaggaaggatagaggtttgggagttaagttgtggggtttgattgggagtagtttatttattgagtagatatttgttgggtagtgttttttgtattttttatggggtttataatattttatgaggttgttggatgtagtttgttttatagatggggaatggaggtatagagtagtatattatgtgtttatggtttttggtttatgtttagttgattttgttttggggttttattgaagggtggttgttattttgaaggggttattgttgggttattttttagagttagggtttgtaggtggtatgttttagttaggttttgagttattggtggaatttgagggttatttttattggaaagtggttgttgatggtaagagtttgtggggatagagtgaattttaggggaaaagtgtattttatttatagggatgggaggggttggtgaggtttgggtgtttatttttgttgttgtttgtggtggggtaggggtaggggttggggtagagggtgttattattggttttttgagggaaaggtaaggtattttgtttgtttagagttttatatggggtgggttgggttttttagggtttttggaaatgagttttggtgtagggaggaagttgaggtggttttgttttgggtgttggattttttttgttgtttgtgtgtgtttgggtggtggggatttaagattagtattgttttatggtttatttgtttgagtttggtttaggttgaattttttttggaagttgtgtatggtggttgattggggttttaggttttggtgtaggtgggtgttataggttataatgtggttgtaggtgtagtttgagttgtttattgtggtgttggtgttgttagggatgagttatttgaagattttattgttttttagatggatggtggtttagttttgtgtttgtatatagttgtagttggtgttgaagttgtttaggaatagtatgttttgtgggtgttgtggagttgtgtttgagttgttgtaggagttgttgaggttttgtttttatgaattagatttttggggtgtgtttgtagggattttgggattgaggggtgggtttatgttggtgttttatttgttgattatgtttaggtatatgttgtagagtgtgttgatttttgttatggtttgatgtggtgttgtgtgtagtgggattagtattaggttttgtgttgttgtgggaaggggtgggggtgttagagtttggtgggaggggaggggtggggtttgtttattggtgttgggggttgagaatttgattatgaagggtttgtggttgaagatgtttttggggtttgggtataggtaggtgtttatgattgatattgtgttttttttaggagatggggaggatttgttgagtttttgatttgtggttttgtgtgtttttttttgtggtttgttttttatttgtatatgaataggtatatttttttgtattggttttggtttaggggttggttgtttataaagttgtatttgtgtttggatatgttgtggagataggggtttgtttagggttggggtgttgtgttggggtgagattttggtggggggttgtgatgaggggttttgtttattatatttgttgatttgttttatgagtgtggatatggtgttgaggtttgggttttgtattttttgtattagtgtgaggttatagttagttaggatttggggaggagtggtgggtgtgggggttagtgtggttagtatttttaaatgttgttttgttttggtttgggttttatttttgtgatgatgttgttgtaagtggggtttgatattttgttgttattgaagttttgaatgttgaaggttttgatgtgaagtgtggtggttttggtggtttttagtgtttagagtgtggttagtagagtttggggtttgtttatggtgtggagtgagaggttgggagggatagatgttgttgtttatgtagatttgttgttagatttattgatttattttttttttttgtggttgttttttgatggttagtgtgatgtggaatttgtttttgtgttttgtaggtttttagggtattgttgggtttttagggattgttgtttttttattgtgtgggaagttgtagttggaatggagggttt

SEQ ID NO: 83 - DNA, 2738 bp, Artificial Sequence
  chemically treated genomic DNA (Homo sapiens)
tgtattgttgagggttattgattattgagaattaggtttagtttttagaggaagtgttagaggagggggagggtgggtgagggttttggggtggtgggggtgttggttttagtatgtggaggtgataggatttgtaagattttatgtgttgttggggtaggattgtatagggttgttatttatttatttggggtgtttttaatgggtatttgtgtattttagtttgtgtggtgagtgtatgtatgttgttgttgttgtgtttatatggttttttaaagttgggggaggggttgtggagtgaaggagttgtaggtagattttttttttttttttgagttgggaaaagggttagttttgtgttttgtatgtttggttttgttttgtagtttgttggtgagttaagagttggtagagtagaggaggtgtatggtttgggttgtgttattattttttggtttgttgatttggttaggagttggggatggtggtagtattgtggaggtatgttttgtgttgtttttatgtttttttttgaaagtagtgtttttagggggaaagtttgtaatgttatttgttttgttggtaaagttttgggatgttgggtattttttgaggagggggaagatgtggtatttttattgaggttggtaggttaggaagagaagttttttgggtgtagggtgtagtttagttttggggattttttgggttttttgtgtgttggttgggatgaagtgtgttttgtattggatttgggatttgggggtgggggttggtgttggtagtgttagatgttgttttatttttttttgattttggggaggatagtaataagttttgttttagttattttattattttgttagtatgtgtagattttgggtttttggagtttggtgtggattttgttttgttttgtgtttttttttgtatgttttgtgttattttaagagtttgtgtggttttgggtgggtgtttggtttttggtgaaatgtttggggtgtgttgtgtgggtgtatggtgtttttttttagtagtttttggttgtgggggtatatgtatttatttgtattttgtagggataggtggtttttttgttgggagtttttgttttggggatttttgggtgggttggtggtgttggttttttgtgttgggttaaaggtggttaatattaaagttagggttatgaattggtttagttgtttggtatatatggtttttggtattaattttttgttgggagatttggattttttgtgtttttttttttttttttttttttttttttttttgttgtttttttttttttttttattttttttttttgtttgtttttttttttttttttgtggttgtggtttggatagaggttatttagtgtttttttgtagttttttggagagtatgtgattaggttgttagtagtgttgtgagtgtttggtaatggtagggatggtgttttaaatatttttggaagttttggtgttatttgaatgaaggagttgagtaggtgttgttttggtggttggattaatttgagattttggtttttttgataatatggttgggaggtggggtttgtgtttaattattataggaggaagttgagtgttgttgggagtgttggataaagttgttgatttggtggtggttatgtgtttgtgtgtgtgtgtatgagtgtgtgtgagtgtggttggagatgtgtgtgtgtgtgtgggtgttttagggtaatggttgaaaggattgtataatataagagtgaatttaagttttagttgttgttaaagggggatggtgtgttttgggatagtgtttttggggtttttggtttgtgttatatttatattgggttgggaaagttttttttttttgttgtttggaatttagtgagatttttagtttagaggatttgataaattgaagtagttttttaggtataatgatgttgtgggttaattgagtatatatgggaatttttggttttgtgatattttgtattaaaaagaattttatgattgaagataggagtagaagtattagatatagtatttggtttgagtaattgttttatttttttgttttggtgggttgtgtaatatttggagtgttgttttttgttttttttttaatttagatgtattttaggttgggttgtagggatttaggtgatagttaggatttgtattatttttaggagggtggtagggaggtttaaggtagttttgagttagtttgttgtggagtattgtgtgtttggaggttagagtttgaaaggtaattttatgtgtttttaaatatatttttgtatttttttaaagtgttgtttgttattttgttttgggtttttttttattttttagttatttgatggaagtggtgagaataaaaataaagataaaaaagttaaatttggggaagttatttttattttttttttttttttgtttggttttttttttaagaattgttgggttgggatagtttttggttatttttttatttggtttgtggagggaaggagaaagttgggtgttgtttggagtgtttttttttttgttgtgtgtgtatgtgtgtatgtttatgttttttttgtgttggggttggggataggaattgtttttggttttgttattttatggtgtagtttggggggtttgtagggttgggggagggtggggatatgagtgttgtgtttaagtgttttagggtatgtatttggtgttggtgtgtatttg

SEQ ID NO: 84 - DNA, 2738 bp, Artificial Sequence
  chemically treated genomic DNA (Homo sapiens)
tgagtgtgtgttaatgttgggtgtgtgttttggggtgtttgggtgtggtgtttgtgtttttgtttttttttagttttgtgagttttttgagttgtgttgtggggtgatgggattgagagtagtttttgtttttggttttggtgtgggggagatgtgagtgtgtatatgtatatatatagtaggggaagaggtgttttaagtggtgtttaattttttttttttttttatgggttgggtgagaaagtagttgggggttattttgatttggtggtttttggggagggggttgaataagaaaagggaggagatggagataatttttttggatttagtttttttgtttttgtttttgtttttattatttttattggatgattggagagtaaaagggaatttggagtggggtggtgagtagtgttttgagaaaatgtaggagtgtgtttggagatgtgtaaagttgttttttaagttttggtttttgggtatgtgatgttttgtggtgggttgatttagggttgttttgggtttttttgttatttttttggaaatgatgtaagttttgattgttatttggatttttgtagtttagtttggaatgtgtttggattaggggaaagatgagaaatgatattttaggtgttgtatggtttattaaagtgggaagatagggtagttgtttagattaaatattgtatttagtgtttttgtttttatttttaattgtggggttttttttaatgtaaagtgttataaggttaggaatttttatgtgtgtttagttggtttatagtattattgtgtttaggaaattgttttaatttattaagttttttgggttgggaattttattgaattttaaatggtggaaagaggaaatttttttaatttgatgtgggtgtgatgtgagttaggggttttagggatattgttttagagtatattgtttttttttaatagtaattggagtttggatttgtttttatattgtatagtttttttgattattgttttggagtatttgtatatgtgtatgtatttttggttgtgtttatatatatttatatatatgtatgtaaatgtgtggttgttgttaggttggtaattttgtttggtgtttttagtggtgtttggtttttttttgtagtagttgagtgtaggttttgttttttggttgtgttgttaaaagggttggggttttggattggtttagttgttgggataatatttgtttgatttttttatttaagtgatattagagtttttagggatatttgaggtattatttttgttattgttgggtatttgtggtgttgttaatggtttggttatatgttttttggagagttatgggagggtgttgggtaatttttatttgagttgtggttgtgaggaggagggaaaaggtgagtaaaaaggaagagtgggaggaggaggggaagtggtgaaggaggaagaggaggaggaggaagaggggagtataaaggatttaggttttttgatgggaggttaatattaagaattatgtgtgttgagtggttgggttagtttatgattttggttttggtgttggttatttttgatttggtgtgggggattgatgttattaatttatttgagggtttttaagataggagtttttagtagaaaggttgtttgtttttgtagaatataggtaagtgtatgtgtttttgtagttgggagttattgggagaggatattgtgtatttatgtggtgtgttttaggtgttttgttgggagttaggtgtttatttagggttatgtaaatttttgggatggtatgggatgtgtaaagggaagtgtgaggtaaggtgaggtttgtgttgggttttgagggtttggaatttgtatgtgttagtagggtgatgaaatggttggggtaggatttgttgttgttttttttagggttgaggggaaatgaagtagtgtttgatgttgttagtgttagtttttgtttttgaattttgggtttggtgtaaagtgtgttttattttggttggtatgtgggaggtttagagggtttttggagttgggttgtgttttgtgtttggagaatttttttttttggtttgttggttttagtaagggtgttgtgttttttttttttttaaaagatgtttgatattttagaattttgttggtgagataaatggtattgtgaattttttttttgggggtattgtttttggaagggagtgtgagggtagtgtaaagtgtatttttgtggtgttgttgttatttttagtttttggttaggttagtaagttaagaaatggtgatatgatttgaattgtgtgttttttttgttttattggtttttggtttattggtaagttgtaaagtagagttaggtgtgtagggtatggggttggttttttttttagtttggaaagagaaagaaaatttgtttatagtttttttgttttatgattttttttttgattttggggggttgtgtgaatgtggtagtggtggtgtgtgtgtgtttattgtatgagttggaatgtatgagtgtttattagggatgttttaagtgagtgaatggtggttttgtgtggttttgttttggtggtgtgtggggttttatggattttgttgtttttatatgttggggttggtatttttattattttgagatttttgtttatttttttttttttttggtgttttttttgagaattgaatttgatttttggtggttggtgatttttaataatata

SEQ ID NO: 85 - DNA, 2401 bp, Artificial Sequence
  chemically treated genomic DNA (Homo sapiens)
gtggtaggtgaggtggggtgtaggtgtgagtggggtgggaggaaggggaaaggattggggttgttgtagtttttttggttagttttgttgggttttgttagttttgtttgagattgaggtgtatggattagtggttgttagtattttataggtggaggatattttttgtgttttaaggttaatgttattttgatgggttttgtgttgttttgattttttttgatttaattttttggttatgatttttttattttttgggttttgtttttgttagtttttgttgatgttgttttttttgttgtttgtttgggtttttttatttgtttttttttttttttggtttgatggttttattgaggtaaaaataaatagttttgagggtattttaaggagtgtgtagtggttttgatggtatttttggggggataaaagaggtggttagttatgttgttggtttttggttgaataatgggtgtgtagtagattgttagggggtatttgaaatttgaggggagggaaatatttgagtgtggtttttttttgtgaggatgtatgatgtagttttgtggattgttttttgtttgtttttttttatgtattttttttttgtgtggaattatttaaatgggagatttttggtagttttatgttaatgtgttgaataaaggtaatggtttgtgggtgggaggtttggaaggtgtttggggttgggttgggtggggtggtggttaggtgggttgtgtgtgttttttgtgtgtttttgggattgatataataattttttatttttgtaaatataaagttttttattggtttgggttgggtgtatttggtgtagggaggtgttggtttttttgggtggtgggtattgtagtggtaatgtatggtttttgttggttgtggtttgggggattgagggttgggagtgggggtttttgtgaagttagaagagaagtttgtagtagagtggtgatgaggggtgttgatattttatttttaatgttgatgtttttaaatgtgatattttttgtggggtgagaatgtgggtttgtttggttttttttgtgaggttagggttttttgtttttttagatattttaaggagttaatttttttgtagaagttttttgtttttgtttttatttttaagttttgtgttttttataaattttttgttgttttgattttgatttttagttgtggtgagggttagagtgaattttggtgtgttttttgatggtatttttgtatattaggataggagaaattggagggtttggggttttgggttttgtagttgttggaggaagaatttattgtggggtttgtaagggaaagtgaagaggtttgggatttttttaaagtgttggttaggattttgaaggaaggggaggagttatttgaagttggggaaggttttttgggtgttttgttttggatttttatgtttattgatttttgtgaagtttttttggaggggggtaaatttgtgttgttttttttaatttaattttatgtggtttattttttgaattgtgtgtgttaaggttggtgttgggggtgtattgtgatggtgttttgttttttttaggtgaagataaatattttgatttgatgtttttatgtatgtgggtgtataggttttgagaaaattatgtagaaggtggttgtgatttatggtttgggttgggttatatttgtttggaggttgttggtgtgtgtgtgtgtgtgtgtgtagtttaattttttttagttttgggtggtgaaattagtttttaatattagtattttttaagtttttatttattttgattgtatttgtttgaaagtagattttatttatgttagtaagattggaagttataaataaagaaaaagaaatggatttattgaattttagtattttagtagtgtttaatagatttttttggttaaatttagagttttgtttgaatttatttatgtaggagttgttttgttttttttgttggtagaggtgttggttttttatttttatggtttatttataattatgggtgttgttatttttaaaggatttataaggtgattaattttttgttatttgttgaatggaaggagtgttatatatgtaagattgaatggggtaggttgagtttttgttttatgttattttataatttagatgggatttgtgattagaaaataaaattggttaaagttgttttggaattttttttttatttttaattttattagtattattaattagagtttaaaagagtaaggaaataatattagttatttttagatagaaatatgtttataaattttagataaatttattttaagatttttaatttttggggagattagtatttattatagtatttttaaaattagggtgagattttttaaaata

SEQ ID NO: 86 - DNA, 2401 bp, Artificial Sequence
  chemically treated genomic DNA (Homo sapiens)
tattttgaaaagttttattttagttttaaaaatgttgtggtgagtgttagtttttttaaaagttagaaattttaaaatgagtttatttaaaatttataaatatatttttatttaaaagtaattgatgttatttttttgtttttttgagttttgattaatagtgttgatgaaattagaagtgggaaaaggattttgagatagttttggttaattttattttttaattatgaattttatttggattgtagaatagtatagggtgggggtttggtttgttttatttggttttgtatatgtaatattttttttatttaatagataatagagagttagttattttgtgaattttttaaaaataataatatttataattgtaaataagttgtggggatgggaaattggtatttttattaataaaaaaaataaaataatttttgtgtgagtgaatttaaatagggttttgaatttagttaagggaatttattaaatgttattgagatattgagatttaatgaatttgtttttttttttttatttgtggtttttagttttgttagtgtaaatgaaatttgtttttagatgggtatagttaaaataaatggaaatttgaaaggtattagtattggaaattaattttattatttggggttggaaggagttaggttgtgtatgtgtgtatgtatatattagtgatttttaagtaggtgtagtttagtttgggttgtggattgtagttgttttttgtgtgatttttttagaatttgtgtatttgtatgtatggggatattgggttgagatatttgtttttgtttgggaagagtaaagtgttattatagtgtgtttttgatgttggttttggtgtatgtgatttggagaatgggttgtgtgaagttaagttgggggaaatagtgtggatttgtttttttttaggggggttttgtgaaagttagtgaatataaggatttaaggtagagtatttaaggggttttttttggttttaggtgattttttttttttttttggggttttggttagtgttttggaaaaattttgggtttttttatttttttttgtggattttgtggtgggttttttttttgatgattgtggagtttgaggttttaggttttttaattttttttattttggtgtgtggggatgttgttggggagtgtgttggggtttattttgatttttattatggttggaaattaaagttaaggtaatagggagtttgtagaaagtgtgaagtttggaaataagagtagaagtggggaatttttgtggaggagttggttttttggggtgtttaggagaataggaggttttggttttatgggaggagttgggtgggtttgtatttttattttgtagagggtattgtgtttggagatgttggtgttgggggtgaggtgttagtgttttttattattattttgttgtagattttttttttggttttatagaagtttttatttttggtttttagttttttgagttataattggtaggaattgtgtgttattgttgtagtgtttgttgtttggagggattagtgtttttttgtgttgggtgtgtttgatttgagttggtgagaggttttgtatttgtaggaatgaggggttgttgtgttagttttaggggtatgtgagagatatgtgtagtttgtttggttgttattttgtttggtttggttttaggtattttttgggttttttgtttgtgggttgttgtttttgtttggtgtattagtataaagttgttagggattttttgtttagataattttatataaaaggagagtgtatgaaagagagtgaataagggatgatttgtgaggttgtgttgtgtgtttttgtggggagggattgtgtttaagtatttttttttttttgagttttaagtgttttttggtaatttgttgtgtgtttattatttggttgggggttgatggtgtggttggttattttttttatttttttgagagtattgttggggttattgtatgttttttgaagtgtttttagggttgtttgtttttgttttagtgggattgttgggttagggagggaggagagtgggtaggaaggtttgggtgggtggtgggaagggtgatgttggtgaaagttggtagaggtgaagtttagaaggtgagaaagttataattaaagaattaggttagggagagttaggatggtatgggatttattgggatgatattgattttggggtgtaagaggtgttttttatttgtgaggtgttggtggttgttagtttgtgtgttttggttttaaatggaattgataaaatttagtgaaattgattagaaaggttgtggtgattttgattttttttttttttttttattttatttatatttgtattttgttttgtttgttgt

SEQ ID NO: 87 - DNA, 2476 bp, Artificial Sequence
  chemically treated genomic DNA (Homo sapiens)
aattattaggaggttgggggaaaagaggggaaaaatgggtaaggaaggttgtaaatgttaagatgttaaataggaatttaattgaagtttgaagtgaaatatagttttttttggtttaattgttatgtaaataatttttaagtatttttagatgtaaagaaaaatagttattgtgtataggtgttagttgaatgtttgagagttggatgaatggggaagatttgttatatatttagtggtgggtggattttattaggttgtagtttttatatagtttttttttgttgtattgtagaggtgttattttttttgttttaatttttatttaatttgatttttttatttgtattttaaaaaaaagattttttggattttttttagtattttgtgtttttaggggaattaaattagagtttttagagttgttagggaagaggttgtgttttaattagataaatgtttttttggatgtataggatagagtttgtgtttttttattatttgttattgttttttttagatgtatattttattttttgttttattttttttttgttaaggattttatagtttagtatagaattaagttttggaggtgatttgagggtgggaagtagaggggttttgaggttttgttagaagttttggtagtgtttttgtttttttttaggtggatgtgtagttttgggaagggagttgggtgggagttttggtggtgtattgagattaatgtggtttggtttatggtgagggtggggtgttgtggtttttgtttttgtggattttttgttttttagatagagtttagggtgtgagtgaatttttgggatgtttagatttggggaaggtgtggggtggttatgggtttttgattttttttattttttgtaagttatataaaagggagatgtggatatgtataaagtttgtttgtggaaggtggtgtgtgattttgatgttggtttgggttagggttgtatttaggttgttgttgttagtagttgtgaaaagaggttggagtaaggaagggggatgggggtgagagaggaaggtgaaatgaggtggagaatgtagggaaaagtgaggggtttttagttttttgggttgttttgattttttttttttttttttagggtttaagagaaaggaaagggtaatgatttaagagtgaaggattggttttagggatgttgtgtttttggttttttttatgtgttttttttttttttttttttgtttgaatgttttttgttttttttgatttttgtttttaaggtagggattaagttggggtttgggtttagggttgttttttattttttttgttttgggttggtgtggaattagggagattagtgttttgtttgtttttttttagtgggttggagtgtgattttttggggtagggttgggttgaaagtggggatgtgttggatgtttgtaagtgggggtggagaggagaggggttttattgatggatttttggtttttttgtattaaagatttgggttaaggttttggggggtattgtgtttttattgtgtagtttttttttgttttttgaggtgtggtatttatttttagtgtttgagttgtttaggtggttagtaggagtagtgttaaattgggtagtattgtgattttgtgtggggtattgagtgtgttgttgtgtgagtgggatttgttgtgtttttgttttgtttgtgttgttattgttgttgttttttggggtttttgtgtatgtttttttgtgtgtttttgtttattgttgttgaggaaattgatggagtttgagtgtggtggtggggtttagagttaggtgagttagttgatttggtttattttgtttggtatttgagagagatttttagtggtgttgttggggaattgtgtttgtttgtgttgggaggggtttttgtgttttgtgtttataggtgtatgtgtttttggtgttgtttgtattttatgtgttttttttgttttttggttgatggtttatttgggttttgtgaatagtgggagggagagtttggggttaggagagggatggtgtaggattagggaaaggtgagttttaggatgttgaggttttagaaaagttgagagtgtttttgtttgtttttgtgagtttgaattatttgattttgtaggttttttgggggtgttgtataaaggattgttgttagggtgtgtttttatttgtattttgtttttttttttggtttggagaggtggggtaggtgtttttggaagagaatgagaatgagtgaagtttaaaggaaataggattttttttgtttgttgagatagtaaaattttattttttaatttttaatgttaaaagtaggtatgagtaatttggaatttttatttttagaatgaattaaaggagtaaggtgtaggatttggtaaagaagtggttaatttatttatttttttttgaaagtagggttttgggtttgggttttgttttttt

SEQ ID NO: 88 - DNA, 2476 bp, Artificial Sequence
  chemically treated genomic DNA (Homo sapiens)
aaagaaataaaatttaagtttagaattttgtttttaagaagaagtaaatgggttggttgtttttttgttaggttttgtgttttgtttttttggtttgttttaaagatagaaattttaggttgtttgtgtttgtttttgatgttgggggttaaaaaatgaggttttgttgttttaataagtaaagaaaattttattttttttaagttttatttgtttttatttttttttagaaatgtttgttttatttttttaaattgagagaaaaaatgaaatgtggataaaaatgtattttagtagtagttttttatatgatatttttgggaggtttgtggggttggatgatttaagtttatggggatgagtaggagtgtttttgatttttttagagttttagtgttttaggatttatttttttttgattttgtattgttttttttttggttttagatttttttttttattgtttatgaagtttaggtgggttgttggttggggagtggagggggtgtgtggggtgtaggtggtgttaagggtgtgtgtatttgtgggtgtggggtgtgagggttttttttggtgtgagtgggtgtagttttttggtggtgttgttaggggttttttttgggtgttgagtggggtgggttggattagttgatttgtttggttttgagttttgttgttgtgtttgggttttgttagtttttttggtagtggtaggtgagagtatgtggaggagtgtgtgtgggggttttgggagatggtggtggtggtggtgtgggtagagtaaggatgtggtggattttatttgtatagtagtgtatttggtgttttgtgtagggttgtgatgttgtttggtttggtattgtttttgttggttgtttggatggtttgggtgttggaggtgggtgttgtgttttggaaggtggggggaggttgtatggtggggatgtgatattttttaagattttaatttaagtttttaatgtagagaagttgggggtttgttaatgggattttttttttttttgtttttgtttgtggatgtttagtgtatttttgtttttggtttagttttgttttagggagttgtgttttggtttgttgagagggagtgggtgaggtgttggtttttttggttttgtgttagtttggggtgagaagggtagggggtgattttgagtttagattttgatttagtttttgttttggaagtgggggttgggggaggtgagagatatttagataggggggaagggggaaggagtatgtggggaaaattgaaaatgtagtgtttttaaagttagttttttgtttttgaattgttgttttttttttttttttgggttttggggaggaggaggaggagttgggatagtttaggaagttaggagttttttgtttttttttgtgttttttgttttgttttattttttttttttatttttattttttttttttgttttaatttttttttgtggttgttggtggtggtagtttgggtgtgattttagtttgagttggtgttggggttgtgtattgttttttataggtaaattttgtgtatgtttgtgttttttttttgtgtaatttgtgagaaatgggaggggttggagatttatagttattttgtgttttttttaagtttggatgttttgggagtttgtttgtattttaagttttgtttgagaggtagaaggtttgtgggaataaaagttgtgatattttgtttttgttgtgggttgagttgtgttagttttagtgtgttattgaggtttttgtttggttttttttttggggttgtgtgtttgtttgggagggggtagagatgttgttggggtttttggtggagttttggggtttttttgttttttatttttggattatttttgaggtttaattttgtgttgggttgtaaagtttttggtggggaggaaataaggtggagagtgggatgtgtgtttggaaagggtagtggtggatggtggggaggtatgggttttgttttgtgtatttaaggaggtgtttgtttgattaaggtgtggttttttttttggtagttttggggattttggtttagtttttttgggggtataggatgttggggagggtttgaagggttttttttttagggtgtagataaaaggattgaattgagtgaagattaagatggagaagatggtgtttttgtagtgtagtaaagaaaagttgtgtggaggttgtagtttagtgaaatttatttattattaggtgtataataagttttttttatttatttaatttttgaatatttagttaatgtttgtgtataatgattgtttttttttatatttgaagatgtttagaagttgtttgtatgatagttgggttagaggaggttgtattttattttggattttggttgggtttttgtttggtattttaatatttgtaattttttttatttgttttttttttttttttttttagttttttagtaatt

SEQ ID NO: 89 - DNA, 16 bp, Homo Sapiens
accaccaccaccacca

SEQ ID NO: 90 - DNA, 16 bp, Homo Sapiens
caccaccccccccacc

SEQ ID NO: 91 - DNA, 16 bp, Homo Sapiens
ctcggttcgtacccgg

SEQ ID NO: 92 - DNA, 18 bp, Homo Sapiens
gggggggcggggcgtgga

SEQ ID NO: 93 - DNA, 18 bp, Homo Sapiens
tttagccggggtattcca

SEQ ID NO: 94 - DNA, 16 bp, Homo Sapiens
gaagttcagaccttga

SEQ ID NO: 95 - DNA, 16 bp, Homo Sapiens
ctcgcgcgctcgcctc

SEQ ID NO: 96 - DNA, 17 bp, Homo Sapiens
ctgttcctgtggttccc

SEQ ID NO: 97 - DNA, 16 bp, Homo Sapiens
acctgctcctgtccta

SEQ ID NO: 98 - DNA, 16 bp, Homo Sapiens
tgcgccgccgctcccg

SEQ ID NO: 99 - DNA, 16 bp, Homo Sapiens
ccgcggcggcgggcgc

SEQ ID NO: 100 - DNA, 16 bp, Homo Sapiens
ggcgccgaggtcgcag

SEQ ID NO: 101 - DNA, 17 bp, Homo Sapiens
agggcctcgatttccgg

SEQ ID NO: 102 - DNA, 16 bp, Homo Sapiens
tggaacgtgcgactgt

SEQ ID NO: 103 - DNA, 16 bp, Homo Sapiens
ctctggcgcgcctata

SEQ ID NO: 104 - DNA, 17 bp, Homo Sapiens
agattctcacgacccga

SEQ ID NO: 105 - DNA, 16 bp, Homo Sapiens
ggacaaggacatattg

SEQ ID NO: 106 - DNA, 16 bp, Homo Sapiens
tccgtcggcggtagag

SEQ ID NO: 107 - DNA, 16 bp, Homo Sapiens
gaccgcgggcacgtct

SEQ ID NO: 108 - DNA, 16 bp, Homo Sapiens
ctaacgccgctggtta

SEQ ID NO: 109 - DNA, 16 bp, Homo Sapiens
cccgcgcgaagaccca

SEQ ID NO: 110 - DNA, 16 bp, Homo Sapiens
cccgacaccgtgacgg

SEQ ID NO: 111 - DNA, 16 bp, Homo Sapiens
agaacacggccgcaga

SEQ ID NO: 112 - DNA, 16 bp, Homo Sapiens
cactcctgcgcacggg

SEQ ID NO: 113 - DNA, 16 bp, Homo Sapiens
ccacggtgaaggcgga

SEQ ID NO: 114 - DNA, 20 bp, Homo Sapiens
cccgggaccaacaccgagat

SEQ ID NO: 115 - DNA, 17 bp, Homo Sapiens
tcccggtctccgccaac

SEQ ID NO: 116 - DNA, 16 bp, Homo Sapiens
tgtgcgaagttaacgt

SEQ ID NO: 117 - DNA, 16 bp, Homo Sapiens
aagttcaccggcgtct

SEQ ID NO: 118 - DNA, 18 bp, Homo Sapiens
acttcggaacccaagcgt

SEQ ID NO: 119 - DNA, 16 bp, Homo Sapiens
tactccacgttcaggt

SEQ ID NO: 120 - DNA, 16 bp, Homo Sapiens
cccgggaggatgagct

SEQ ID NO: 121 - DNA, 16 bp, Homo Sapiens
tcccaggggtttccgt

SEQ ID NO: 122 - DNA, 16 bp, Homo Sapiens
agacggggcccacgag

SEQ ID NO: 123 - DNA, 16 bp, Homo Sapiens
tgccggtaccagcgct

SEQ ID NO: 124 - DNA, 16 bp, Homo Sapiens
tggcccacgctcggca

SEQ ID NO: 125 - DNA, 16 bp, Homo Sapiens
cccgcacggtcaggcc

SEQ ID NO: 126 - DNA, 16 bp, Homo Sapiens
acagcgacttcggcga

SEQ ID NO: 127 - DNA, 18 bp, Homo Sapiens
ggcgtctcacctacgaga

SEQ ID NO: 128 - DNA, 17 bp, Homo Sapiens
atcgtggacggcaacga

SEQ ID NO: 129 - DNA, 16 bp, Homo Sapiens
ttgagatcgacccgtc

SEQ ID NO: 130 - DNA, 16 bp, Homo Sapiens
ggcgagatccgcacgc

SEQ ID NO: 131 - DNA, 16 bp, Homo Sapiens
tgacgcccgtggtgga

SEQ ID NO: 132 - DNA, 16 bp, Homo Sapiens
gtgaccgaccacggca

SEQ ID NO: 133 - DNA, 16 bp, Homo Sapiens
atcatccgctcggtga

SEQ ID NO: 134 - DNA, 16 bp, Homo Sapiens
catcgccgtcaagtgc

SEQ ID NO: 135 - DNA, 16 bp, Homo Sapiens
tgcaagcgcgagaaca

SEQ ID NO: 136 - DNA, 16 bp, Homo Sapiens
ctcgttgctggcttgc

SEQ ID NO: 137 - DNA, 16 bp, Homo Sapiens
ttttaaaaattactgt

SEQ ID NO: 138 - DNA, 17 bp, Homo Sapiens
gagagcgctcacgtgga

SEQ ID NO: 139 - DNA, 16 bp, Homo Sapiens
catttcgtttgatgta

SEQ ID NO: 140 - DNA, 16 bp, Homo Sapiens
cctatggaggattctt

SEQ ID NO: 141 - DNA, 16 bp, Homo Sapiens
ccgcgcctatttctaa

SEQ ID NO: 142 - DNA, 16 bp, Homo Sapiens
tgaaagccgagggaga

SEQ ID NO: 143 - DNA, 16 bp, Homo Sapiens
aggccaagatgagcgg

SEQ ID NO: 144 - DNA, 16 bp, Homo Sapiens
ccgcatcctcgggtcc

SEQ ID NO: 145 - DNA, 16 bp, Homo Sapiens
gcaccgcctgattccg

SEQ ID NO: 146 - DNA, 16 bp, Homo Sapiens
gcgagcatcagcccac

SEQ ID NO: 147 - DNA, 16 bp, Homo Sapiens
agagacgcgaaaaacc

SEQ ID NO: 148 - DNA, 16 bp, Homo Sapiens
agacgaaagagccgcc

SEQ ID NO: 149 - DNA, 17 bp, Homo Sapiens
gacgtgaactttcggaa

SEQ ID NO: 150 - DNA, 16 bp, Homo Sapiens
aatgcgtggccgcctc

SEQ ID NO: 151 - DNA, 16 bp, Homo Sapiens
tcccgcctgcggaact

SEQ ID NO: 152 - DNA, 16 bp, Homo Sapiens
tgttcgacgtgattct

SEQ ID NO: 153 - DNA, 16 bp, Homo Sapiens
caacgtctttccgggt

SEQ ID NO: 154 - DNA, 17 bp, Homo Sapiens
tgttgatccggaaatga

SEQ ID NO: 155 - DNA, 16 bp, Homo Sapiens
aggaggcgcgggcgaa

SEQ ID NO: 156 - DNA, 16 bp, Homo Sapiens
cccgcgcgccctgcct

SEQ ID NO: 157 - DNA, 17 bp, Homo Sapiens
ccggaccccgacaggta

SEQ ID NO: 158 - DNA, 18 bp, Homo Sapiens
tgggacccggagccggag

SEQ ID NO: 159 - DNA, 16 bp, Homo Sapiens
aacaaagcaccctgcg

SEQ ID NO: 160 - DNA, 16 bp, Homo Sapiens
caccgcccaccgcctt

SEQ ID NO: 161 - DNA, 16 bp, Homo Sapiens
ctgcgctgcccagagg

SEQ ID NO: 162 - DNA, 16 bp, Homo Sapiens
aagcttcgtttgggag

SEQ ID NO: 163 - DNA, 16 bp, Homo Sapiens
ctggaagccgaagaga

SEQ ID NO: 164 - DNA, 16 bp, Homo Sapiens
gatcgcaccctgtatc

SEQ ID NO: 165 - DNA, 16 bp, Homo Sapiens
tagggacccgcggagg

SEQ ID NO: 166 - DNA, 18 bp, Homo Sapiens
ttgccgagtaatcctcgc

SEQ ID NO: 167 - DNA, 16 bp, Homo Sapiens
cactacgggcggaggg

SEQ ID NO: 168 - DNA, 16 bp, Homo Sapiens
gacggcacgccagagg

SEQ ID NO: 169 - DNA, 16 bp, Homo Sapiens
ctgggcgtcgccacca

SEQ ID NO: 170 - DNA, 16 bp, Homo Sapiens
caccagcccggccgcc

SEQ ID NO: 171 - DNA, 17 bp, Homo Sapiens
ccatcacgtccagcgac

SEQ ID NO: 172 - DNA, 16 bp, Homo Sapiens
acagcgagtgcgacat

SEQ ID NO: 173 - DNA, 16 bp, Homo Sapiens
aaagtgtgggaaagtt

SEQ ID NO: 174 - DNA, 17 bp, Homo Sapiens
tagacgtggggctacgc

SEQ ID NO: 175 - DNA, 18 bp, Homo Sapiens
acctcggggcagtaccgc

SEQ ID NO: 176 - DNA, 16 bp, Homo Sapiens
atggcggtgtcgtgga

SEQ ID NO: 177 - DNA, 21 bp, Homo Sapiens
ttgaggcgcgcgtagaggact

SEQ ID NO: 178 - DNA, 16 bp, Homo Sapiens
aacccgagctgcacag

SEQ ID NO: 179 - DNA, 16 bp, Homo Sapiens
taggtgcgcgttacat

SEQ ID NO: 180 - DNA, 18 bp, Homo Sapiens
tacgctgcctggacgaat

SEQ ID NO: 181 - DNA, 16 bp, Homo Sapiens
aaggagcgcacttcgg

SEQ ID NO: 182 - DNA, 16 bp, Homo Sapiens
gccggatcccggaagt

SEQ ID NO: 183 - DNA, 16 bp, Homo Sapiens
gaagtgacgcgctcgt

SEQ ID NO: 184 - DNA, 16 bp, Homo Sapiens
caggcaaggactcaac

SEQ ID NO: 185 - DNA, 16 bp, Homo Sapiens
aggattccgtgcgccc

SEQ ID NO: 186 - DNA, 16 bp, Homo Sapiens
cgccgccgtgctcagc

SEQ ID NO: 187 - DNA, 16 bp, Homo Sapiens
acgagtggatgcttgg

SEQ ID NO: 188 - DNA, 17 bp, Homo Sapiens
gaggcgaaattaaaatc

SEQ ID NO: 189 - DNA, 16 bp, Homo Sapiens
cgaagagcgttttcat

SEQ ID NO: 190 - DNA, 16 bp, Homo Sapiens
cactcgctctcgggca

SEQ ID NO: 191 - DNA, 16 bp, Homo Sapiens
acaatcgatacactca

SEQ ID NO: 192 - DNA, 16 bp, Homo Sapiens
aaaaaatcaattgaaa

SEQ ID NO: 193 - DNA, 16 bp, Homo Sapiens
gtgccttcccggcgcc

SEQ ID NO: 194 - DNA, 20 bp, Homo Sapiens
gggctgggcacgcccccagt

SEQ ID NO: 195 - DNA, 16 bp, Homo Sapiens
gtggatgccacggggc

SEQ ID NO: 196 - DNA, 16 bp, Homo Sapiens
ccctctgttaggccga

SEQ ID NO: 197 - DNA, 17 bp, Homo Sapiens
cggacgactgcagcagt

SEQ ID NO: 198 - DNA, 16 bp, Homo Sapiens
cagtgtctttgttagt

SEQ ID NO: 199 - DNA, 16 bp, Homo Sapiens
tctaagtaaactccct

SEQ ID NO: 200 - DNA, 18 bp, Homo Sapiens
ggtggtgttggttggtga

SEQ ID NO: 201 - DNA, 18 bp, Homo Sapiens
acaaggacacatgcattg

SEQ ID NO: 202 - DNA, 18 bp, Homo Sapiens
attcatggcgaggagcaa

SEQ ID NO: 203 - DNA, 16 bp, Homo Sapiens
ttacggttcggtcatc

SEQ ID NO: 204 - DNA, 16 bp, Homo Sapiens
gacgccgcggggccag

SEQ ID NO: 205 - DNA, 16 bp, Homo Sapiens
aggcaccccgcgacac

SEQ ID NO: 206 - DNA, 17 bp, Homo Sapiens
gttccccgacccacgtc

SEQ ID NO: 207 - DNA, 18 bp, Homo Sapiens
ggcagccccgattattta

SEQ ID NO: 208 - DNA, 16 bp, Homo Sapiens
cagagcacggggcggg

SEQ ID NO: 209 - DNA, 18 bp, Homo Sapiens
ttgcccagcggaccccag

SEQ ID NO: 210 - DNA, 17 bp, Homo Sapiens
caggttcggtccgccat

SEQ ID NO: 211 - DNA, 18 bp, Homo Sapiens
tggtggcacgcagcctgg

SEQ ID NO: 212 - DNA, 16 bp, Homo Sapiens
cctggcgcagatcggt

SEQ ID NO: 213 - DNA, 16 bp, Homo Sapiens
agtgcccgccgcagcc

SEQ ID NO: 214 - DNA, 16 bp, Homo Sapiens
gtgctcagcgcggacc

SEQ ID NO: 215 - DNA, 17 bp, Homo Sapiens
ttcggccagccccgcat

SEQ ID NO: 216 - DNA, 18 bp, Homo Sapiens
gacccgcctgggcaacgc

SEQ ID NO: 217 - DNA, 17 bp, Homo Sapiens
gccgaacccagtcgcgc

SEQ ID NO: 218 - DNA, 16 bp, Homo Sapiens
aacccgcgagcttaga

SEQ ID NO: 219 - DNA, 18 bp, Homo Sapiens
catacacacgtgtgggta

SEQ ID NO: 220 - DNA, 16 bp, Homo Sapiens
tatgtagtcgcgtagt

SEQ ID NO: 221 - DNA, 18 bp, Homo Sapiens
agtgcatgcgcagaaggc

SEQ ID NO: 222 - DNA, 18 bp, Homo Sapiens
cttagacacgaaatgtca

SEQ ID NO: 223 - DNA, 18 bp, Homo Sapiens
aagtaagtcgttgctgcc

SEQ ID NO: 224 - DNA, 16 bp, Homo Sapiens
ggactacaggcgtgtg

SEQ ID NO: 225 - DNA, 17 bp, Homo Sapiens
gcagaggcgcgatctcg

SEQ ID NO: 226 - DNA, 16 bp, Homo Sapiens
agggagtcttgctctg

SEQ ID NO: 227 - DNA, 16 bp, Homo Sapiens
agcgccgaccaatcgc

SEQ ID NO: 228 - DNA, 16 bp, Homo Sapiens
cccggccgggtccaaa

SEQ ID NO: 229 - DNA, 16 bp, Homo Sapiens
caatcgtcagcggcgg

SEQ ID NO: 230 - DNA, 17 bp, Homo Sapiens
ccaacgggtgggcacgt

SEQ ID NO: 231 - DNA, 17 bp, Homo Sapiens
aggccgttggcacccgt

SEQ ID NO: 232 - DNA, 17 bp, Homo Sapiens
ttcccgagccccaccga

SEQ ID NO: 233 - DNA, 16 bp, Homo Sapiens
acagccgtggcctcgt

SEQ ID NO: 234 - DNA, 16 bp, Homo Sapiens
tgacgggcgtctccga

SEQ ID NO: 235 - DNA, 16 bp, Homo Sapiens
caatgagcgcgctgta

SEQ ID NO: 236 - DNA, 18 bp, Homo Sapiens
ctggtccgggaaaggcaa

SEQ ID NO: 237 - DNA, 16 bp, Homo Sapiens
tcccggtgaaccggat

SEQ ID NO: 238 - DNA, 16 bp, Homo Sapiens
ctcgcaaagccgctgc

SEQ ID NO: 239 - DNA, 18 bp, Homo Sapiens
gcccagccagcgggctcc

SEQ ID NO: 240 - DNA, 16 bp, Homo Sapiens
gggcgcgcacggctac

SEQ ID NO: 241 - DNA, 16 bp, Homo Sapiens
ctaccgcgcgtggagg

SEQ ID NO: 242 - DNA, 16 bp, Homo Sapiens
ggtgcgcgcagagaac

SEQ ID NO: 243 - DNA, 16 bp, Homo Sapiens
caagcgcaccgacgcc

SEQ ID NO: 244 - DNA, 16 bp, Homo Sapiens
aaacaccgaacgggat

SEQ ID NO: 245 - DNA, 18 bp, Homo Sapiens
ccagagcccgagcccaca

SEQ ID NO: 246 - DNA, 16 bp, Homo Sapiens
tcaggcgcggacccgc

SEQ ID NO: 247 - DNA, 16 bp, Homo Sapiens
ctcgcgaagccacggg

SEQ ID NO: 248 - DNA, 16 bp, Homo Sapiens
catcggttcggagcca

SEQ ID NO: 249 - DNA, 16 bp, Homo Sapiens
aagcagcgccgccact

SEQ ID NO: 250 - DNA, 16 bp, Homo Sapiens
gccgctcggaactcgc

SEQ ID NO: 251 - DNA, 16 bp, Homo Sapiens
tacgtggtcgagggcc

SEQ ID NO: 252 - DNA, 18 bp, Homo Sapiens
ggaagccccgatggccta

SEQ ID NO: 253 - DNA, 17 bp, Homo Sapiens
ggcgttggcaccgctga

SEQ ID NO: 254 - DNA, 16 bp, Homo Sapiens
ccaagacgcgttttct

SEQ ID NO: 255 - DNA, 16 bp, Homo Sapiens
ccctgtcgcgggaacc

SEQ ID NO: 256 - DNA, 16 bp, Homo Sapiens
atacgtagactcggag

SEQ ID NO: 257 - DNA, 18 bp, Homo Sapiens
gaagtggccgccagtccc

SEQ ID NO: 258 - DNA, 18 bp, Homo Sapiens
aaggaatccgtcttgtaa

SEQ ID NO: 259 - DNA, 18 bp, Homo Sapiens
aatgctttcgtgatgctg

SEQ ID NO: 260 - DNA, 16 bp, Homo Sapiens
caaaacgagggagcgt

SEQ ID NO: 261 - DNA, 16 bp, Homo Sapiens
aggagccggccccgca

SEQ ID NO: 262 - DNA, 16 bp, Homo Sapiens
caaagcgcggacactt

SEQ ID NO: 263 - DNA, 16 bp, Homo Sapiens
cctgagcgggcaccga

SEQ ID NO: 264 - DNA, 16 bp, Homo Sapiens
cagagccgaggggcgg

SEQ ID NO: 265 - DNA, 16 bp, Homo Sapiens
ccccgagggacggaag

SEQ ID NO: 266 - DNA, 16 bp, Homo Sapiens
catgtccccggcgaat

SEQ ID NO: 267 - DNA, 16 bp, Homo Sapiens
acagtcgaggagccgc

SEQ ID NO: 268 - DNA, 18 bp, Homo Sapiens
acttgtcccgaccaatct

SEQ ID NO: 269 - DNA, 18 bp, Homo Sapiens
aacctgcgaacgcttggg

SEQ ID NO: 270 - DNA, 16 bp, Homo Sapiens
gccgatgctcccggca

SEQ ID NO: 271 - DNA, 17 bp, Homo Sapiens
gagccccgctacatcgc

SEQ ID NO: 272 - DNA, 16 bp, Homo Sapiens
ttcctgcggttcgaca

SEQ ID NO: 273 - DNA, 20 bp, Homo Sapiens
tacgccaaggccaacgcaca

SEQ ID NO: 274 - DNA, 17 bp, Homo Sapiens
tgctccgccgctacaac

SEQ ID NO: 275 - DNA, 16 bp, Homo Sapiens
ggcgcaggtcacgacc

SEQ ID NO: 276 - DNA, 16 bp, Homo Sapiens
atccgccacggaccgc

SEQ ID NO: 277 - DNA, 16 bp, Homo Sapiens
agtctccggatccgaa

SEQ ID NO: 278 - DNA, 16 bp, Homo Sapiens
taccccgaggcagcgg

SEQ ID NO: 279 - DNA, 18 bp, Homo Sapiens
gagagaaacggcctctgt

SEQ ID NO: 280 - DNA, 16 bp, Homo Sapiens
cccgacggacgcctcc

SEQ ID NO: 281 - DNA, 16 bp, Homo Sapiens
gtacgacggcaaggat

SEQ ID NO: 282 - DNA, 18 bp, Homo Sapiens
agttgctccgcagatact

SEQ ID NO: 283 - DNA, 16 bp, Homo Sapiens
aagaggcgaaaagcag

SEQ ID NO: 284 - DNA, 17 bp, Homo Sapiens
agcaagcggctgcatac

SEQ ID NO: 285 - DNA, 17 bp, Homo Sapiens
aaattgagcgcctatgt

SEQ ID NO: 286 - DNA, 16 bp, Homo Sapiens
gcagggctcagcagga

SEQ ID NO: 287 - DNA, 16 bp, Homo Sapiens
accctcacactctggc

SEQ ID NO: 288 - DNA, 17 bp, Homo Sapiens
tggagggacagggagga

SEQ ID NO: 289 - DNA, 16 bp, Homo Sapiens
ctccgcgggcgttgag

SEQ ID NO: 290 - DNA, 17 bp, Homo Sapiens
gacagtcagaggaagac

SEQ ID NO: 291 - DNA, 16 bp, Homo Sapiens
caggggtgacgcgcct

SEQ ID NO: 292 - DNA, 17 bp, Homo Sapiens
ctcctcgcgcacatgtt

SEQ ID NO: 293 - DNA, 16 bp, Homo Sapiens
aagggcggcaagacgg

SEQ ID NO: 294 - DNA, 16 bp, Homo Sapiens
ccaggccggacgcaag

SEQ ID NO: 295 - DNA, 18 bp, Homo Sapiens
taggcgcctaattagcgt

SEQ ID NO: 296 - DNA, 16 bp, Homo Sapiens
cgctttcacacaccca

SEQ ID NO: 297 - DNA, 20 bp, Homo Sapiens
acctgggccccccacctcac

SEQ ID NO: 298 - DNA, 16 bp, Homo Sapiens
cccataaaccctgcta

SEQ ID NO: 299 - DNA, 16 bp, Homo Sapiens
cctcagacattaaaga

SEQ ID NO: 300 - DNA, 16 bp, Homo Sapiens
aaaacgtggacgtttt

SEQ ID NO: 301 - DNA, 18 bp, Homo Sapiens
acttggagcgaggaactc

SEQ ID NO: 302 - DNA, 18 bp, Homo Sapiens
ctgaaagtcggccaaagc

SEQ ID NO: 303 - DNA, 18 bp, Homo Sapiens
ggcagctacgagagagct

SEQ ID NO: 304 - DNA, 2280 bp, Artificial Sequence
  chemically treated genomic DNA (Homo sapiens)
attagtatagaattgttattataggatcgtagtttaagtattagagtgatattaattggttatgtttaattgttttaaaattattttttaaataattatattgatattataatagaaattatgggtatttattttatatttagatggaaggtattattggatatgtattaaaaaaaagattttttgaaaaaaataaaataaaataaaatattattattaaaataaaagaatttaaaataatttttaaaaattttttttaataaaatatattgttaatttataaaatggattgatgattagttatgtaaatgttttaaataaaatttttatattttttttatagttaatttatgttttgaattgtttatcgattataaataatggcgaaatggtattttttgattatattgtattttgtttatagaaagtttgatacgatggaatttattaggtaagagggtgggtgttgtgaacgagatgtcgtttttagtcgcgggggcgggtagagtttttggagcgcgtggattttatgcgagttatgtagtattttttgttttttgttagaagttaaagttatttatttataatatatttatgttttcgtgtaattgtttatttttgcgtagttaatagggagttattacggggttaatttataggggaaaaatagatatttatttttttatatagatgtggatatatgtatatatgtatagaatcgcggtatttaattttataggtttcggggtcgagggcgagggtattgttagtttttttagtagggtcgtgttgggttttttgttaaaaggggtttttagtaaagagcgagttggttgcgtttttttagttttttatagtttgttttttgttttaaggagggagttaagtaaggggttaggttttttcggttgtgcgagtttatagttatttatttatttatgtttatttaggttgatggcgcggggatttgggtatacgtttttttagttttcggggtgtttgcggtggggaaggatgtatcgttttttttttgtttttttttattggggttggggttttagtttgagagcgagtgagagttatagttatatattttgtgggttttatttgcgttgtaaggtttattgtgttagtaggaagagttatagattgtttgtagggaattaatttcggacgcggaggagttggtatttcgttttttggatcgttttcggttttttaggataaatacgagtatgtttattacggtgaaggcggaggtgataaatattagtagtagtttcgggattaatatcgagatggatattttgttggtgtttaggtaggagttggagtgcgtttcggttttcgttaatttagtgttgtttttattgtgcgaagttaacgtgggcgagattttagcgtatagttgagggtagatttcgttattggagaggagtatgaaattttttttaaagaagtttatcggcgttttatatttgaggtcgtttattagtatttcggaatttaagcgttttgtttattgtttgaaaggtataattgtgtaggagtatttttaggggttttcgtggaggtttatttggatgatggaggttaattggtttagtatttttgttatcgggaggtatatgaagtaattgttgtgtaggttgagtttagagagcgagattttagcgaatacgtttataggtagggattttagtaggttgttgttgagaatgaggatttttagtttgggtatggtattgaaagtgttcgggaggatgagttggatagcgttgtattttacgtttaggtattttaggttttgtagtttcgcgaatttttttcgggatagcgtgtttaggtaattgttatttatgtatagttatttgaggtttaaaaggtttttgaaagtgttgttttttatagtagcgatgttattgttgtttagatttaatagaatgaggtttttgtaatttataaagtgcgattttcggatgttgtggattttgttatttcgtaggaaaagtttttgtacgttagagagtttgggttttaaattagttaagttgtttacgtttttgttgttgtagtttatttttaaattcgattttgggatgtggtcgtagttgtagtttttagggtagggtaaattgttagttaagggtttgtttttggagttattcgtcgttatcgttgttgtgggtttgattttgatttgttagttgtttgggatttttgtattttcgtttggagtagattttggtgtggtatgatttttttgtttatttgttttga

SEQ ID NO: 305 - DNA, 2280 bp, Artificial Sequence
  chemically treated genomic DNA (Homo sapiens)
ttaagataaatgggtaagaggattatgttatattagggtttgttttaaacggaggtataaagattttaggtaattggtagattaaaattagatttatagtagcgatagcgacgggtagttttaggaataaatttttagttaatagtttattttgttttgggggttgtagttgcgattatattttagggtcgggtttaaagatgaattgtaataataggaacgtgagtagtttggttgatttgaagtttaagttttttaacgtgtaggagttttttttacgagataataagatttatagtattcgaaaatcgtattttgtggattataagaattttattttgttggatttgggtaataataatatcgttattgtagagaataatatttttaagaattttttggattttaggtggttatatatggatagtaattatttggatacgttgtttcgggagaaattcgcggggttgtaaaatttagagtatttgaacgtggagtataacgttatttagtttattttttcgggtatttttaatgttatgtttaaattgaggatttttatttttaataataatttgttgaggtttttgtttgtggacgtgttcgttggggtttcgttttttaaatttagtttgtataataattattttatgtatttttcggtggtaggggtgttggattagttaatttttattatttagatagatttttacggaaatttttgggagtgtttttgtataattgtgttttttaagtagtgggtagaacgtttgggtttcgaagtgttgatgagcgattttaagtgtgagacgtcggtgaatttttttagaaaggattttatgtttttttttaatgacgagatttgtttttagttgtacgttaggatttcgtttacgttaatttcgtatagtaaaaatagtattgggttggcggagatcgggacgtattttaatttttatttagatattagtagggtgtttatttcggtgttggtttcgggattgttgttggtgtttgttattttcgtttttatcgtggtgggtatgttcgtgtttattttgaggaatcgaaagcggtttaagagacgagatgttaattttttcgcgttcgagattaattttttatagatagtttgtgattttttttattggtataatgggttttataacgtagatggggtttatagagtgtatgattgtggtttttattcgtttttagattaagattttaattttaataggggagggtagagggaaggcgatatatttttttttatcgtaggtatttcgggggttggaggggcgtgtatttaaattttcgcgttattagtttggatgggtataagtagataaataattgtgagttcgtataatcgaaagggtttgattttttatttagttttttttttgaaataaagagtagattgtggagagttgggagagcgtagttagttcgttttttgttgagagttttttttgatagaaagtttagtacgattttgttggaagaattgatagtgttttcgttttcggtttcggggtttgtggggttggatgtcgcggttttatatatatatatatatatttatatttatatagagagatagatatttattttttttttgtggattagtttcgtgatggttttttgttggttacgtagggatgggtagttgtacgaaggtatgaatgtattgtaaataagtaattttgatttttgataaaaaataaaaagtgttgtatggttcgtatggaatttacgcgttttagggattttgttcgttttcgcgattggagacggtatttcgtttatagtatttatttttttatttgataagttttatcgtattaaattttttataaataaaatatagtataattagaaagtgttatttcgttattatttgtgatcggtaggtagtttagagtataagttaattgtgaaaaaaatgtaaaggttttatttaggatatttgtatggttagttattagtttattttatgagttaataatgtattttgttgagggaagtttttaggggttgttttgggtttttttattttgatggtgatgttttattttattttattttttttagggggttttttttttaatatatatttaataatgttttttatttgaatgtaaaataagtatttatgatttttattatagtattagtgtaattatttaaaaaatgattttgaggtagttaagtatgattaattaatgttattttagtgtttaggttgcgattttatggtagtaattttgtgttggt

SEQ ID NO: 306 - DNA, 2477 bp, Artificial Sequence
  chemically treated genomic DNA (Homo sapiens)
tggtatagatatggtttttaaagttaaaaattatgatggagtgaaggatagttgtgtttagatttgcgttttgttttttggaggttgttgtggttttggggatgagtcggaggtgggtaggtagcggttttcggggtttgtagtagggaggttattatttgtatagtagaatatagtattattttatagggagtatttcggggcgggtagtaattttggaggtattttcgggaaggagttaggtatgggggaggcggaggcgattttagaagtagaggagtcgttggggagttacggttttttgggtgtggagttgtggaggatgagtgttatttttttttttcgggttttttattttgtagggatttttacgtttaggattatttgattgttaaggtttcggtattttcgttaggttagttgggggttaaggtttttaatttcgaggattggggtcgttaatatgggtagtagtataggaggtcgagaggaggtttataagggttgtattttttttttggttgtagtttattttttagagtagggcgggcgtggagttatttttattagtattgttggttttgagggtttggtgggtagtgtcgtttggtgtgggggatagtttttgagtaggttgtcgtatttttggtattttggtttttttgggatttttaggtggtttacgttcggtagtgttcgttttttgggtttttagggttcgtttttgttgtagtttttgtagtgggagtatcgttgagtattgtttttgggagaggacgattttaggttttatagttaagttgttttgaggttaagtgtttcggggtttagggagttttagtagtagtttcgtacggttaggtttgggttacggtgttgtttagtggtttttgcgcggttagtatttgaatggttgttcgtttggtttggcgtgtttttttttttcgggttttttttttggttgtttttttttgttggtgtaggtttaagagggttttttcgtttgatcgttgtcgttgtttttgttaaagaagtcggtgttatgtggcgtttatatttggaagacggaatttagatttagattagaggtttttttataacgttttggagttttttagagttcgtggaattttagggttagtagggaaagtgaaattttattaggattttgaatttgttatttttttgttttatagaggatgagttttacgtcgtaggtggttaatagttttggcgtgggggagatagttttgtttttatagaacgtttttttgagattttttagtttgggatggatttagtaggcgttttttgatatttaggttttgaggatcgttagtgaggattattttgattgttcgcggggatttagggttaagaaggatgttgtatttagagacggggtttacgagtaattttaggttttgattttatttgttttagaaatttaaatttttgggattttgggttagatttttcgggggagtatggagtgattgagacgtttatattgatttttcgtttggtttgaagtaagtgttttaggcgggtagtttttgtttcgcgtcgttgtatttggtgtcggtattagcgttggatggtgatagtggtttggtttatttggtggataaatttgttcggagagtaggatttagggttaagataggattagcgtttcggtaggatttagttggttgttggtggaaggtcgagtcggggaagagagaagtcggcggttgtatttaagtagttttttttataaggtaggattagtttatttggattatttttatatggtaggattagtcgtttggattagttttattaaaatttaaaattttttttttgggaaggtgtttaggggagaggaaacgtttatttacgtaggtttgtgtggttttatttataattgttaggaagtgggaagagtttaaatgtttatgatttggttatagcgtgaatattggatggcgggattttatttataggtaataggttcgggatttaggttagtgtagattataggtcgtggttttatagagagggtggtcggaataggtagggttatgagggaatagattggtggttgttggtatttgggcggggaaggagttcgagggaagtttggtggtgttgggtcgtttttttattttggtttgttgtgtttatagatagtattatatattttggtggaattttatggaattgtatatttataatgggtattttttattgtatataaattatattaagtaaaattgattaagtaaaaaaaaaaatgttttattttggttttcgggattatgtgtggatttttttagtaaaggtattaatagagaatttagaacgtgtgagttttagttcgggagtagtttgtttcgggtagaattggggggttttaaggggttgcgggtttttggttttttttttttcgtgttatttatcgcgtttataggtttggtttttttagttttaat

SEQ ID NO: 307 - DNA, 2477 bp, Artificial Sequence
  chemically treated genomic DNA (Homo sapiens)
gttagggttagggagattaggtttgtagacgcggtgggtggtacgagggaagggggattagaagttcgtaattttttgaagttttttagttttgttcggggtagattgttttcgagttagggtttatacgttttgggttttttgttagtgtttttgttgagagaatttatatatggtttcgagagttaaggtgaagtatttttttttttgtttaattagttttatttagtataatttgtatataatagaaggtgtttattgtaagtgtgtagttttatgagattttattagggtgtatagtgttgtttgtggatatagtagattaagataaggaaacggtttagtattattaggtttttttcgagtttttttttcgtttagatgttagtagttattagtttgtttttttatagttttgtttgtttcgattattttttttgtggagttacggtttgtggtttgtattggtttgagtttcgggtttgttgtttgtgggtagggtttcgttatttagtatttacgttgtagttaggttatgggtatttgaattttttttattttttggtaattgtaaataaggttatataggtttgcgtgggtaggcgtttttttttttttgggtatttttttaggaagaaggttttgggttttagtggagttggtttaggcggttggttttgttatgtgaaaatggtttaggtgggttggttttgttttgtgaaaagggttatttgagtgtagtcgtcggtttttttttttttcggttcgattttttattagtagttagttgggttttgtcggggcgttggttttgttttggttttgagttttgtttttcgggtaggtttatttattaggtgaattaggttattgttattatttagcgttggtatcggtattaggtgtagcggcgcggagtaggagttgttcgtttggagtatttgttttaggttaagcgggaggttagtgtgggcgttttagttattttatgttttttcggggggtttggtttagaattttaggggtttgagtttttgggataggtggaattaaagtttaggattgttcgtgggtttcgtttttgggtgtagtattttttttgattttgggttttcgcggatagttagggtggtttttattggcggtttttagggtttgggtgttaggaaacgtttgttgggtttattttaggttggagagttttaggaggacgttttgtgggggtagagttgttttttttacgttagaattgttggttatttgcgacgtagggtttattttttgtagagtagagaaatggtaggtttaaggttttggtggggttttattttttttgttggttttgagattttacgaattttaggggattttagggcgttgtggggaaatttttggtttgggtttggatttcgttttttagatgtaaacgttatatggtatcggtttttttggtaggagtagcggtagcggttaggcgaggggatttttttggatttgtattagtagaaagaggtagttaggaggaaggttcgggaggagaaggtacgttaagttaggcgagtagttatttaggtgttgatcgcgtagggattattgagtagtatcgtggtttaggtttgatcgtgcggggttgttgttggggttttttgggtttcgggatatttagttttagggtagtttggttgtggagtttggggtcgtttttttttagggatagtgtttagcgatgtttttattgtaggagttgtaatagaaacgagttttgagagtttagaaggcgagtattgtcgagcgtgggttatttgagaattttagggagattagagtgttaggaatgcggtagtttgtttaggagttgttttttatattaggcggtattgtttattaggtttttaaggttaataatattggtgagagtggttttacgttcgttttgttttggggggtggattgtagttaggaaggaagtgtagtttttgtggattttttttcggttttttgtgttgttgtttatgttggcggttttagttttcggagttaggggttttggtttttagttgatttgacgagggtgtcgagattttgataattaaatggttttggacgtagggatttttatagagtagaaggttcggaagggaggggtggtatttattttttatagttttatatttagaaggtcgtggttttttagcggtttttttgtttttggggtcgttttcgttttttttatgtttggttttttttcgggggtgtttttagagttgttgttcgtttcgggatgttttttgtggaatggtgttgtgttttgttgtgtaggtggtggtttttttgttgtaggtttcggagatcgttgtttgtttattttcgatttatttttagaattatagtagtttttagaggataggacgtaggtttgagtatagttgttttttattttattatggtttttggttttaagggttatgtttgtgtta

SEQ ID NO: 308 - DNA, 3685 bp, Artificial Sequence
  chemically treated genomic DNA (Homo sapiens)
taagttttttttttcggcgtataggtacgtagttataggttaagttgcgacgcgagtttcgcgcgcgggattttcgtaaaaggttcgttcgatgcgttgggcgggaatcgagttcgggttaattgtttggaaggtaattatgtttattattatattattaacgtcgtacggcgcgggtagtttcgtcgcgtcggttcggggtttttattagcgcgtcgtcgacgttcggggtaggtcggtttcgacgttcggttcgttcgttcgttcgtagtttcgcgttgtcgcggtttttttaaaggtcgtttcgcgttttatcggtgtaaggttagcgcggttgattcgttacgttcgtttgtttttgggggcgttttcgtttattcgtcgtttcgggtttttagagtttttttttaataggtgttcgggggggaaacggtcggcgtcggtagggtttttatttttacgttttttatcgggcgtagggtttcgtgtgtcgtagaaagtttttttcgataattattttgagtcggtagttcgttgggcgtcgtgtagggttagaggaggtttttcggttgtcgttattaagtcgcggacgagaagaaaagataggaggttaaggaggtttagaaggttaaagggttaggtaggttaggttcgagatggtattttgcgattagttggagggcggaggaaggagaaggagggtttataggttgggttcgaggcggcggtttaaaaagtacggttgttttttcgtcggggaatcgaatttcggtttttcgcgtgataggcggggatatttattattatattaacgaggacgacggcgacggtcgtcgggacgttagattttatttcgatcgcggacgtttagttttgttttgattttttttttcgacggtaggggtcgggcgcgtgttcgttttttattcgtcgttcgtcgttcgttattcgttatacgttattcgttatttgttattcgtttttcgttatcgttggtacgatttatttcgatatttaataaagtattttgcgatttcgttgggattcggagtcggagtcggatttcgataggtatcggagcggcgtggaattttttcgcgcgttttgtttgttgtttttaacgcggggatcgcgtcggggtaggaggaggcgcgggcgaaatagttaggtcgttgtttttaggacgcggtgggcgtacgttttgcggggttcggcgagcggaggcgcgggggttggggcgtgcgtcggcggcggtcggttcgacgcggattttttgggttcggggtggggacgcgggggcgtttacgttaacgttagtcggtttcgtttatttggcgttcgtttttttcgcgcggttcgtcggttgcgtatcgaatttagataggcgtcggttaagggcgtaggcgttcgcgtcgggttttagttatgttagcggcgaagcgtttcggcgcgtcgttaggatggtcgagcggtttaaggcgttgcgtttaggtcgtagttttttttggaggcgtgggttcgaattttatttttgataagtcgattttttggttcgttcgtcggagggtaacgtttatggtaattttggagtatttttggtcgttttttgttttgagtttttgttcgttttttagattttagtttttttgaagtaagtttttaaaacgtcgtcgttttttaggtacgttcgttttttttgtttattcgtcggttgtcgtagaaatagtttaggattatgcgttagcgttcgcgattttttattaattgtttttcggatagacgttttttttattattttatacgtttttttttttggttttatatatagcgagcgatcgcgattattttttacgtttttttttgtttatttttttcgttcgttttttttttattcgtttaaatagatatagtttagattttttttttatttttttttttttttttttttttttatcggttttcgtttatcgtttatcgttttgaatcgtcgttgcgttgtttagaggcgttttggtttgaatagttcgttcggttttattttttaatttttgatcgttgagtagtagcgagcgattcgttcgtggagtcgtatatacgttttttattagaggtacgttatttaatattttgttttttttttcgatttttcggatttcggtcgcgtattttattttgtcgatattttagttaggtcgtcgattttatttcgttatttgtgtttttttttcgttaatatttgtttgtcggtttatttgtagttcggacgtttgtcggttagaggtagcgggaattttgtatatagtcgggtaggcgagtttaaattcggaaagatagtttaagaggaattacgagcggaagttttagattttcgttattcgtttataaacgtttggtttcgtcgggattagttttgcgttatagcgtatttttacgcgggaagtcgcggtttgggtcgttttagttatatttagcgcgttttttttagggttagttagttgcggttttgtcgaagcgttttttcgtttttttttcgcgttttagtttttttattagtttagggggtcggattttaagtgcgagtcggtggcgtgggttagagcgtaggagcgaggcgtttacggatttggtttgcgtttttgagtcgtacgttacggttgcgagattcgttttttatcgtcgttttcgttcgttgatatatttatttcgttttttatttgttggtgatataagtgagaaggttggttttacggtggtgaaaaaaaaaaatattatacgaaagaaagaaagaaagaaagaaagaaagaaagaaagaaagaaagaaagaaagaaagatagaaagaaataataaaaataaaatataaaaattttgggtttgtgtcggggattcgcgtttagtaaggttcgttatagtaaatttgtttatacgggtattcgggcgcgggttacggtcggttttttttttggagatttcggcgggtagtttttcgattttgggcggtagagaaagcgtaagatgggacgagtcggttttttttttttcgtttttttttcgcgtttcgttttaggtttttcgacgtgacgagagtttttttttttgttcgttttatcgggttagtttttcgtggacgttgtaataggacggaggtttacggtaggcggtgattagtgaacggcggttggtggcgagtttcgttgtgttagttttcgttggcgtttgttatcggtgtatgggtggtttagtggtagaattttcgtttgttacgcgggaggttcgggttcgattttcggtttatgtagtacgtttttttattttggtgttgtagtagtattaaggcgtagttgcgttcgtttttgtcgtttttttatattcggggcgcgcgagcgagttcggtatcggttgcgtttttacgcgcgacggttttttgttttttttttcgtgtttttttcgattgatttagggatgagtttatttttcgtatttatatattttggtgataataatttttttagatacgagagcgcgttagatattagaatttggtagttttttggttttgtttttttttattgttttgttatcgtttttgttcgacgtattttattttacggaatatcgttaggtattacgggtttgtagttattcgtattattttttttttttatattttatcgtttcgtttttttt

SEQ ID NO: 309 - DNA, 3685 bp, Artificial Sequence
  chemically treated genomic DNA (Homo sapiens)
gagagaggcgaggcggtgaaatgtgaagagaaggggtggtgcgagtggttgtaagttcgtggtgtttggcggtgtttcgtgaagtgaaatgcgtcgggtagaggcggtggtagggtaatgaagagaaataggattaggaggttgttaagttttggtgtttggcgcgttttcgtgtttggaggggttgttgttattaaggtgtgtgggtgcggggggtaggtttatttttaagttagtcgagagaggtacggaagaaagggtagagggtcgtcgcgcgtgggagcgtagtcggtgtcggattcgttcgcgcgtttcgagtgtaaggaggcggtagaggcgagcgtagttacgttttggtgttgttgtagtattaaaatgggagggcgtgttgtatgggtcgggaatcgaattcgggtttttcgcgtggtaggcgagaattttattattgaattatttatgtatcgatggtaaacgttaacggaagttggtatagcggaattcgttattagtcgtcgtttattggttatcgtttgtcgtgggttttcgttttattgtagcgtttacgagaggttggttcgatggggcgagtagaaggggaggttttcgttacgtcgagggatttgaggcggggcgcggagggagagcggagggagagaggtcgattcgttttattttgcgttttttttgtcgtttagggtcgagagattgttcgtcggggtttttaggggaaggatcggtcgtggttcgcgttcgaatgttcgtgtgggtagatttgttgtggcgggttttgttgagcgcggattttcggtatagatttagagtttttgtgttttgtttttgttgtttttttttgtttttttttttttttttttttttttttttttttttttttttttttttttttttttttcgtgtggtgttttttttttttattatcgtggggttagtttttttatttgtgttattagtaggtgagaggcgggatgggtgtgttagcgagcgggggcggcgatggggaacgggtttcgtagtcgtggcgtgcggtttagaaacgtagattaggttcgtgggcgtttcgtttttgcgttttgatttacgttatcggttcgtatttggggttcggttttttgggttggtagggaggttggagcgcgagaaaggagcggaggagcgtttcggtagagtcgtagttggttgattttggagaaggcgcgttgggtgtggttgggacggtttaggtcgcggtttttcgcgtggggatgcgttgtggcgtagagttggtttcggcggggttaggcgtttgtgggcgggtgacggggatttagggttttcgttcgtgattttttttgggttgttttttcgggtttggattcgtttgttcggttgtgtgtagggttttcgttgtttttggtcggtaggcgttcgggttgtaggtgggtcggtaggtaggtgttagcgggaagggagtataggtagcgaggtgggatcggcgatttggttagggtgtcggtagaatggaatgcgcggtcggggttcgaggggtcggaggaaaggataggatgttggatggcgtgtttttggtgggagacgtgtgtgcggttttacgagcgagtcgttcgttgttgtttagcggttagaagttggagggtgaaatcgggcgggttgtttaggttaggacgtttttgggtagcgtagcggcgatttaaggcggtgggcggtgggcggaggtcggtgggaggaaggagggaaaaggaggaataggggaagaatttgggttgtgtttgtttgggcgagtgaggagaaggcgggcggaggagataggtagggaagagcgtggaaggtggtcgcggtcgttcgttgtgtgtggggttagggaagagggcgtgtgaggtggtggggagggcgtttgttcgaagggtaattggtagagggtcgcgggcgttggcgtatggttttgggttgtttttgcgatagtcggcgggtgggtaggaagaacggacgtgtttgagaagcggcggcgttttggaggtttgttttaagggggttggagtttggagagcgggtaagggtttaaggtaggaagcggttaaaggtgttttagggttgttatgggcgttgtttttcggcgggcgggttaaaaggtcggtttgttaggagtgggattcgaatttacgtttttaggggagattgcgatttgaacgtagcgttttagatcgttcggttattttgacggcgcgtcggggcgtttcgtcgttggtatggttgggattcggcgcgaacgtttgcgtttttggtcggcgtttgtttgggttcggtgcgtaatcgacggatcgcgcggggggagcgggcgttaagtgaacggagtcggttggcgttggcgtggacgttttcgcgtttttatttcggatttaaagggttcgcgtcgggtcggtcgtcgtcggcgtacgttttagttttcgcgttttcgttcgtcgaatttcgtagggcgtgcgtttatcgcgttttaggagtagcggtttgattgtttcgttcgcgtttttttttgtttcggcgcgattttcgcgttggagatagtaggtagggcgcgcggggaggttttacgtcgtttcggtatttgtcggggttcggtttcggtttcgggttttagcgggatcgtagggtgttttgttgggtgtcggggtaggtcgtgttaacggtggcggggggcgggtggtaggtgacgggtggcgtgtggcgggtggcgggcggcgggcggcgggtggaaggcgagtacgcgttcggtttttgtcgtcgggggaggggattaaggtagggttaggcgttcgcggtcggagtggggtttggcgtttcggcgatcgtcgtcgtcgttttcgttagtatagtggtgagtattttcgtttgttacgcgggagatcggggttcgatttttcgacggggaggtagtcgtgttttttgggtcgtcgtttcggatttagtttgtgggttttttttttttttttttcgttttttagttagtcgtagggtgttatttcgggtttggtttgtttggttttttggttttttgggtttttttggttttttgtttttttttttcgttcgcggtttggtagcggtagtcgggaggttttttttggttttgtacggcgtttaacgagttgtcggtttaaagtggttgtcggaagaggttttttgcgatatacggggttttgcgttcggtgggaagcgtaggagtggggattttgtcggcgtcggtcgtttttttttcgggtatttgttggggaagggttttgggggttcgaggcggcgagtgagcgagagcgtttttagaggtaggcgggcgtaacgggttagtcgcgttggttttgtatcggtggggcgcggggcggtttttggagaggtcgcggtagcgcggagttgcgggcgggcggacggatcgggcgtcggggtcggtttgtttcgggcgtcggcggcgcgttggtgggagtttcgggtcggcgcggcggggttgttcgcgtcgtgcggcgttggtggtatagtggtgagtatagttgttttttaagtagttgattcgggttcgattttcgtttaacgtatcgggcggattttttgcggagatttcgcgcgcggagttcgcgtcgtagtttggtttgtggttgcgtgtttgtgcgtcggggaaggaggtttg

SEQ ID NO: 310 - DNA, 2407 bp, Artificial Sequence
  chemically treated genomic DNA (Homo sapiens)
taaggtttgggtatttttaggtagtagggataaggtgggttttttttttggttgttaaatttacgttaaagtcgagtttagggattggagtttaagaaatttatcgtttattttttagttcgatcggggatttgtatgtatttttgtcgtgttgttttgagttttttaattttttatattttttttttgttatgtatacgtttttatttaggtttgtaaaagttttagttttttttaggggtagggattcgtacgtcggtttagggtttggtacgcggggatgttgaaatagggttaggtttggtttttagtcgatcgttagagttttaaggtttagtaattttttttataaaggtttcgttaagaggcgaggaaataagagtcgggagaggggcgcggaacggcgggcgggacgaacgattagtttcgcgttttcggttagttgcgtcgagttaggggtatcgcggttgttgtgcggttggaaatttaggaatgggaaggttcggggtttgttcggtttcggaggtagttggcgggtcgtttttggcggcgttggagcggttagtggtagtcgggtacgggcgatcgggtcgttcgggtcgtttttagatcgtgattttcgaaaaattttgcgggcggggcgcgttcgcgtcgttttttgtcggaaggtgcgagttagtgcgttcgattgtgggcgggggcggaaagaggcgcgttttaaagtggtaatagatggtttttttatttaataggattaaaaaatttgtttttattcggtcgatcgcggaagtagagtaggcgggcggttaatggggatatgatggggggcggagtcgaggttttcgaagcggaagtgggttgttgttgaggcggcggtatttttttcgaggagtttttttgggcggttgaagaaggagtttttttttcggagtgcgtcggcggtggcgtttgcggatttaattagttttaggttaggtcgagttttgcgggaaagtagcggtaagttagggttttgtagatgcgaggtttaggtagtttcgcggtttatagaggtttcggttcgcgttttttgggggagtcgcgttgcgcggtttgatttagtcgaggttttgtagttcgggatttcgagttagttttggtcgttcgtattgtcgttcgcgcgggcgtatcgagttcggtttggcgcgggtaatagaagttaggaggtttgcgtttgggtttcggtttattttggggggtcgcggttatggggtttagtttttagtttaggaagggaaattgagattttgggaggggtaggaacgtttttaaggttatttggaaagtcgggtaggatgtgttgttagggggaagattcgggtagggtttttgtttttcgttgacgacgttttttttgtgtgttcgcgtcgtcgtttcgttatcgtggggtttgcgagtttgtcggggtgcgtgggtcgcgtggcggggttttttgtaggtcgggaggatttgagtacgggtgcgggtttgatcgtgggggcgtcgaggtcgtagtttaaaatttagtagggtttcgattttcgggcgcgttttcgggtttcggttggtggttggtggaacgtgcgattgtgaggtttgcggtttagttttgtatcgttcgggttttttatcgttttggcgcgtttatagataggtgtatgaagatttttacgattcgaaatagagttgttagtaaatatcgttttttcgtttttgatttatcggggaagagggaaaaggatagagtttgggtaagtcgttttggtagggattttagtttttgttttttatttgttagtttttatagacgtttataaatttaataattttcgttttgtttttgtattaagtttttgagttagacgtagggttttagttttggagtttggtttagattgtttaattgattggggagattgaggtttagaaaagtgaagtggtttgtttaaggttatatagttagttatttggtagtagatgaggttaagttttatttgtaagatttgggttttgaatttattgattaggagttttgggattattgttaataaaagagatattgaagggaattttttgttatttttttggtgatttgttttttaatggataaggatatattgggtttagttttatttgtgagtttgaggtgaaatagaggtattcgagtagtaagatatattgttggtttttgtattgtttgaatttgagtttttaaaaattttattttaatatatcgtttattgatttttttttgaattattatttttgtaaggattttttgtaaatattgtttttttaatttttatgaaattttaatgttatacgtaaattatttttttttatataatgtatgtatatttgtgttttgtatataaaatgagtaagattt

SEQ ID NO: 311 - DNA, 2407 bp, Artificial Sequence
  chemically treated genomic DNA (Homo sapiens)
aaattttatttattttatgtataaagtatagatgtgtatatattatataaaaagaaatagtttacgtatggtattaagattttatgaagattagaaaaataatgtttataaaaggtttttataaaggtagtaatttaagaaaagattaataaacgatgtgttaaagtaagatttttggaagtttaaatttaggtaatataaaagttagtaatatattttgttattcgaatgtttttattttattttaaatttatagataaaattgaatttaatatgtttttgtttattaaaaagtaaattattaagaaagtaataaaagattttttttaatgttttttttattgatagtggttttaaaatttttggttaatgaatttaaaatttaaattttgtaggtaggatttaattttatttgttgttaaatagttggttatgtgattttgggtagattattttatttttttggattttagtttttttagttagttggatagtttaagttaggttttagagttgagattttacgtttggtttaagaatttggtgtagaaatagaacgaagattattaagtttgtgaacgtttatgggaattgataagtgaaagataaaagttgaaatttttattaaaacggtttgtttaagttttatttttttttttttttttcgatggattaaaggcggaaaagcggtgtttattagtaattttgtttcgggtcgtgagaatttttatatatttgtttataggcgcgttagagcggtgaagggttcgagcggtgtagggttgggtcgtaagttttatagtcgtacgttttattaattattagtcggggttcggaagcgcgttcggaaatcgaggttttattaagttttagattgcgatttcggcgtttttacggttaggttcgtattcgtatttagattttttcgatttataaaaggtttcgttacgcggtttacgtatttcggtaaattcgtaggttttacgatggcggggcggcggcgcgaatatataaaggaggcgtcgttagcggggaataaaaattttgttcgggttttttttttaatagtatattttgttcgattttttaagtgattttgggggcgtttttgttttttttagagttttagtttttttttttaggttaggaattaagttttatggtcgcggttttttagggtgagtcgagatttagacgtagattttttaatttttgttgttcgcgttaagtcgggttcggtgcgttcgcgcggacggtagtgcgagcgattagagttggttcgaggtttcgggttgtaaagtttcggttgggttaagtcgcgtagcgcggtttttttaagaggcgcgggtcgaggtttttgtaggtcgcgaagttgtttaaatttcgtatttgtaaggttttgatttatcgttgttttttcgtaaagttcggtttaatttggagttagttaggttcgtaggcgttatcgtcggcgtatttcggagaagaagttttttttttagtcgtttaggagagtttttcgagaaagatgtcgtcgttttaatagtaatttattttcgtttcggaggtttcggtttcgttttttattatgtttttattggtcgttcgtttattttattttcgcggtcggtcgggtaaggataaattttttaattttattggataagaaaattatttgttattattttaaaacgcgttttttttcgttttcgtttataatcgagcgtattaattcgtatttttcggtaagagacggcgcgggcgcgtttcgttcgtaaggtttttcgggagttacggtttgagggcgattcgggcgattcggtcgttcgtgttcggttgttattgatcgttttaacgtcgttagggacgattcgttagttgttttcggagtcgagtaggtttcgaatttttttatttttagatttttagtcgtataatagtcgcggtgtttttggttcgacgtagttggtcggaggcgcggagttggtcgttcgtttcgttcgtcgtttcgcgtttttttttcggtttttgttttttcgttttttaacgaggtttttgtgaggaaggttgttgggttttgggattttgacgatcggttggaaattaggtttggttttgttttagtattttcgcgtgttaagttttgggtcggcgtgcgggtttttgtttttggaggaagttgggatttttgtaggtttgggtggagacgtgtatataatagaggaagagtgtggaggattggaggatttagggtagtacggtagaggtgtatgtaggttttcggtcggattggagaatgggcggtgggttttttgagttttagtttttgagttcgattttgacgtgggtttagtaattaggaaaaaagtttattttgtttttgttgtttgagaatatttagatttta

SEQ ID NO: 312 - DNA, 2229 bp, Artificial Sequence
  chemically treated genomic DNA (Homo sapiens)
ttttttttcggcgttggttggtgcgggttggggttaggtggagaagtcgttttttgttaaggtgatagaacgtgttgggggtgggggtcggggttagggtcggtgtaattagggggtcgttgtttttttttggatatagtggaagtttttttcgtattattaaatttttgttattttttttgagggatttgtttttaggtagtacgtaagttgttgtttcgggtttatttcgtatttttttattgggtgaggaaggagtattttgaatggagatgggggtgttttcggtttatatatttgtagagaagaggtgtgtcgggttgtatttttggaggtcgcggtaattgatattagagaagatttcggttgtagttgggaaggtttattggttggaaagaggtgttttttttttttagtaaagggttttgtttggaagggttgttttttatttgtttagtggtattataggacggtcggtttttattcgaattttttcggacggtattattatatagtcgggttttcgtagtgttggttttttaattcgatgattgttatttcggtgaggatttgtgttgatggtcggagaattttgcgttgcgggcgtatatggttaggtggcgtttggtaggcgacgttcgggtgtaggacggcgtttttatcgttttattttaaatcgttgtttgggtttaggtttttcggttttttgaataggggtttggggggttaaggacgttgaggtttcgggggtaggaagttttttttggttaagcgttttttttttttttcggtatatatttttttatttatttatttcgtttattttcggggcgagaggtttattaaggtagggcgcgttttttttatgaattattttaaggtttttgagtcgcgggggtttcgggtaattatttttttttttttttggttttaggtattttagtttaggggtttgtagagaagttcgaagttcggataaacgcgtcggacgttaataattttttatttttggtagtagtaaaggttaatatatttttattttttattttagtttgttattaaaataaagttgcgcgcggttgagggtaggaaggcgttgagatcgagaagaagggacgtttcggagaaagtgcgtttagttgattttagaaattagagtttttcgggatttcgtcgagattttttgtagggcgttttaatttgtttttttattgcgtgtcggcgtcgtagcgcgtgcggtttagggtttggtgatttcggtttagttcggcggtcgcggcgaggtttttggcgtagtcgtttggaatttcgtattagaatcgggatcgcgtaaatgttttggttgaagtgttattttatttaagaaatattgttgttaggaataaaatggggttttcggtgtttcgaagtattttttgaaatttttttaaaataatttataaaaaatgtttttgttttaacgttttataacgtttaaggaaatatgtaaatggtttgtttttttatcgagatggtcgttttaattaatagtgtatatatatataataatttttttaatttttttttttagagttaagtattttattatatgtaaattataataaagaaaagattgtgtaagattatgtaagtcgattgatttaaaatattgagttttaatttaggttttttgtttttttatttaataatttttgtgtttggattagattggtgaagtaggttatggaaattaataaagtaaaaaattaaaagtattttttttcgttatttttttttttaaaattaaataatagtcgtttttttttgagtaggttttagttttaggttcgagtttttttgcgattattttatagttatttatagtagttgttgttgtttttgtcgggttttcgtttttgttttttttgggtcgttttttgtatataaaatatattttagttttttaattaaatttaaatacgatttcggtagaatttatatatttcgtggtgtatggattgtgtcggtgtaggggaaataaatattttttggtatttaattattgagtttaattcgaaaaatcgggattgggtttttaggcggtattttaggggttttaatttggttcgcgtttttttagattttggcgttgagagcgttgtttttgcgggtgggtggacggagaggtaataatttgtttttaataaaaatttgtcgttatcgaatcgaaagcgaaagggaagggagaag

SEQ ID NO: 313 - DNA, 2229 bp, Artificial Sequence
  chemically treated genomic DNA (Homo sapiens)
ttttttttttttttttcgttttcgattcggtggcgataggtttttgttgaaagtagattgttattttttcgtttatttattcgtaaaagtagcgtttttagcgttaaggtttggggaggcgcgggttaggttggagtttttggggtgtcgtttaggggtttagtttcgatttttcgaattagatttagtggttaaatattagagggtatttattttttttgtatcgatataatttatgtattacgaaatgtgtaaattttgtcggggtcgtatttgaatttagttagagaattggggtgtgttttgtatataagagacgatttaaagaaggtagaaacgaaaattcgatagaagtagtaatagttgttgtgggtgattgtggggtgatcgtaggaaaattcgagtttgggattgaagtttgtttaggaaggggcgattgttgtttaattttggagggagggatggcgaaggaagatgtttttaattttttattttgttaatttttatagtttgttttattagtttggtttaaatataaaagttgttaaatagaaaaatagagggtttggattaaaatttaatattttaagttaatcgatttgtatgattttgtataattttttttttattataatttatatatagtgaagtgtttagttttgaggaggaaagttggaagaattgttatgtatgtgtatattgttagttaggacgattatttcgataaagaaatagattatttatatgtttttttaaacgttgtaaaacgttaaagtaaaaatattttttgtaagttgttttaagaaaattttagaagatatttcggagtatcggggattttattttgtttttgatagtagtgttttttgaatagggtgatattttagttagggtatttgcgcggtttcgattttaatgcgaagttttaagcggttgcgttaggaatttcgtcgcgatcgtcgggttaagtcggagttattaagttttgagtcgtacgcgttgcgacgtcggtacgtagtaggaaaatagattaaaacgttttatagaaaatttcggcgaagtttcggaggattttggtttttaagattagttgggcgtatttttttcgggacgtttttttttttcggttttagcgtttttttgtttttagtcgcgcgtagttttgttttggtggtaaattgaaataagaaatggaaatatattggtttttgttgttgttagggatgagaggttgttgacgttcggcgcgtttgttcgggtttcgggtttttttgtagatttttggattggggtgtttgaggttaggagaggagggggatagttgttcggagttttcgcggtttagaggttttgggatgatttatggggggggcgcgttttgttttggtgagtttttcgtttcgagggtaggcgaggtgggtgggtaggggagtgtatgtcggagagaagagagaacgtttaattagagagaattttttgttttcggagttttagcgtttttagttttttaaatttttgtttaggaagtcgaaggatttaggtttaggtaacggtttggggtggggcggtaagagcgtcgttttgtattcggacgtcgtttgttaggcgttatttggttatgtgcgttcgtagcgtagggtttttcggttattagtataggtttttatcgaggtgatagttatcggattgggaaattaatattgcgaggattcggttatgtgatgatatcgttcgggggaattcgagtggaagtcgatcgttttgtggtgttattagataggtgagaagtagtttttttaaatagggttttttgttggaaggaggaggtatttttttttagttagtgagtttttttagttgtaatcggggttttttttaatattagttatcgcggtttttagaggtgtagttcggtatattttttttttgtagatgtataaatcggggatatttttatttttatttaagatgttttttttttatttagtagaggggtgcggagtaaattcgggataataatttgcgtgttgtttggaagtaggttttttagaaaggatgataaaaatttggtgatgcggaagaagtttttattgtgtttaggaaagggtagcggttttttagttgtatcggttttggtttcggtttttatttttagtacgttttgttattttaataaagagcggtttttttatttgattttaattcgtattagttagcgtcgaggaaaga

SEQ ID NO: 314 - DNA, 6887 bp, Artificial Sequence
  chemically treated genomic DNA (Homo sapiens)
cgtcgttcgtgggtcgtcggtcggtcgtagttcgttggcgacgagggtattatagttgttttgatcgcgtagattatgtatgtttcggtttcgggaatttattatgtattagaatatattagcgtttgtattttaaaaggttaaattattggtttttagttagggattttcggtaagtggtttgttagtgacgagtgtttgtttatattggtatatagcggagttttttgttttcggtttattcgtttttaggaaagttttggggtgaggcgaaggcgattgaagtaatgtttttttttttagatcgtagttgtttaggggggatatagtacggtattttttatcgaatttttttcgttcgttcgtattttagtttttttttttttagcgatttttttatttttttttttttttttttttttgacgtttgattttagtagtaaaggaggtaaaaaaggtatcgagtcgttagttaaatttgaaaagtgcggtttcgttttttttatagttattggtagtttttcgtggaaggttcgtttttcggggtagttgcggtttcggagtggttgcgtttggcgttcgtcgggcgtggtttcgttttaggttcgggagggtaggttggttgtttcggcgagcggtagagtttttttggatagttttcgtttatttaaatagaagacgtcggcgtcggagcgggttcggatatggcgaggttgcgagtcggttcgagcggcggggttcggtgattttttttttttttttcgtttttttttttttttcgtacgtacgtttcgttcgtttttatttcgtttttatttcgggcgagttcgttcgtagttcggggcgtatattcgtacgcgtatttttttttatttattttcgcgttcgtttttattttcgtagtcgagtttcgttacgcgcgttttgttcgttcgtcggtcgttttcgtcgttttcgtcgttttcgggttttgatggattgaatgaaggttgtttatatcgtttatcgatgttttattaaagatttagaaggttgcgttatgaattcggagttgataatggaaagtttgggtattttgtacgggtcggtcggcggcggtagtggcgggggcggcggcgggggcggcgggggcggcggcgggggttcgggttatgagtaggagttgttggttagttttagtttttattacgcgggtcgcggcgtcgttggttcgttgcggggtttttcgtcgtttttaatcgcgtattaggagttgggtacggcggtagcggcggtagcggcggcgtcgcgttcggttatggttattagtatggtttcgattttggacggcggcgattatcggttcgagttttttatttcgttgtattacgttatgagtatgttttgcgattcgttttcgtttggtatgggtatgagtaatatttatattacgttgatatcgttttagtcgttgttatttatttttatcgtgtttgataagttttattatttttattcgtattattattcgtattattattattattattattattagcgtttgttcggtaacgttagcggtagttttatttttatgcgcgacgagcgcgggttttcggttatgaataatttttatagtttttataaggagatgttcggtatgagttagagtttgttttcgttggtcgttacgtcgttgggtaacgggttaggcggtttttataacgcgtagtagagtttgtttaattacggttcgtcgggttacgataaaatgtttagttttaatttcgacgcgtattatattgttatgttgattcgcggtgagtaatatttgtttcgcggtttgggtattttatttgcggttatgatgtcgtatttgaacggtttgtattattcgggttatatttagttttacgggtcggtgttggtatttagtcgcgagcggttattttcgtttttatcgggttcgtaggtggttacgtcgggttagttggaagaaattaatattaaagaggtggtttagcgtattatagcggagttgaagcgttatagtattttttaggcgatttttgcgtagagggtgttgtgtcggttttaggggatttttttcgatttgtttcggaatttaaaatcgtggagtaaatttaaatttggtagggagatttttcgtaggatgtggaagtggttttaggagttcgagttttagcgtatgttcgttttacgtttggtaggtaaggtcggggttagttaggggttaggttgttgggaagagggtttcgggttcggtgtttgtggtttaagtttgcgcgtcgagttattttttttgatttttttttttttttttttatatacgtttttttttttttcgtttttatttttttttttattttttttttttttttcgttttttttttatttttttttttttttttttttttttttttttattttttttttgtttttgagtttttattgatcgatttttttttattttattcgttttttttttaatgtgttaatttttgttttattttcgatttttttaggtattgggaggcgggatgggggtgtgcgtttttttttaggagttttgtttttttaagatttatagaaattaggatttgtttttatttaaaattttatgtattttaagttttttttagataatatattttaatttttcgggttgattagtttttttgtgtagaggtagttgagaggttttgttttgtagagggaaaagagttttttatttttttatttattatataggtaaatttatttggttattggttgaaggtatagttttgttttcgcggggaatcggcggttaggatataatagcgtttttggagtttatttttggttttggcgttggcgtagggattttttgatcgggtttgaggggttcgggttagttttaatgttattatttatagcgagggtagggtgtaaggttgagaaggttatatttatcgttttgggaggacgtgggagaagagattgaggtggaaagcgttttgttttgtttatcggtcgtttttgtttcggttttagcgtttgttgggatttgttaggatttgtcggggtttcgggagattttgagtattcgtaggaagaggtgttgagaaattaaaaatttaggttagttaatgtatttttgtcgtcggttgtaggtttcgtttttgtattaagcgggcgttgattgtgcgcgtttggcgatcgcggggaggattggcggttcgcgggaggggacgggtagaggcgcgggttatattgttttggagtcggttcggttttttgtgttttttttagcggttaagttgcgaggtatagttttttattgttttaggagtatagaaattttttgtgtgggcggcgggtgcgcgagttagagggaaagatgtagtagttattgcgattggtacgtagttgcgcgtttttgtgcgtacggatttcgcgcggtgtgcgtggcgattgcgttgtttttaggagtaagttacgggtttagaggggtaaaatgtttaggtttttcgttgggaaggatatattatattttatggtaagttagggtgggcgattttttatggatcgggtggaggggggtattttttaggatcggcgggcggtttaggggaataattcgtggtggcgatgatttgtatagcgcgggttttgggatgcgcgcggtttcgagttagtttcgtatagttcgttttcggagttgcgagtttaggtttttattttcgatttttcgggtttttttcgtatcgttgagtttagtttgtggggtgtattcgattaacgttcgatagggttggggaatgtgataggtagtaggtttattcgggtttggggagggggagttttcgttttgatagtatttttttttgtcgtttgttggtggatttttatttttagtcggtaatcgtttcgtagtgttgatttaagaaggtaaagaaaattaggtttttttgtaaagagttttttttaaatcggcggatttcggatattttgagtggatttagaaatttatgtaattttttttttttagtttattttttatttttttttatagttttttttgatttgttgttggttcggggtaagataaagtagttagtagagagcgataataatagcggcgggaaatgaattggagattggttgatagtttttaatattttgttatagattttttcgaatgttttaggttgtttttggtgggttttagtattcgtcggttttttgggtatcggggattagaaggaatttggtagttggttttaggggtatagttaaaggtaggatgatagttatttttttgtttattttagagcgttgtcgtttttttatgtcggtcgcgtaaagaatatagtttttaaaaaatacgtgttttttgtttatataggtttgaaagtgatgaggaaagtaatgtttcgtttattagcgagttttagtttttaaaatgattttaagcgttgttgagatgagaaagcgtggtatttcgggggtttttagttttattcgcgtttatggtgtaagtttgtagggataggttcgggatagtattgtttacgttgttagatttttcgtagaggatcgttgaagttgttttcgtgggagatagaatgttttttttagcgagtggaaaaggtttgttgaggatttcgttttgttcgagtatttaaatgtgtgtttgttttattattttgggttgaaaagggataagagttttagtttttttatttggttattttattagtaattataagtgtgttgagtggttattattatataggaggttttttagtttggggttagtagattagtttttttagatattgatgtagaagttgggattggtaagtaggtattatgtgttcggagcgttaggggataggagtaaatggagaagaaaagcggaggtttttttcgttcggagtatcgatcggaattttcgtcggtacgtcgtagagggttttcgtcgttgggtttcgggggtttaataagtttagtcgtttcgtaggcggttcggtcggatttttagatcggtgtttggaagatatcgtttttgtttttttttcgttaaatttgtttttttttttttttttataggttataggtttttttttttttttattttggtttcgttttcgggttttgttaaatagttaagtaggtcggggtttagggggtttagaatgaagaggtttgatttggttagcgtcggtaaagtttatttttaggcgaggttataatagaggtaggttttttttgtttagtttgtcggtgtagttatagttaagggtggtatttgaaaggaaaagggagaaaatttcggagaaatttagattgttttaacgttagattttagagaaattgattttaaatgtacggattcgttcggaaagggcggttaagtggtaggtggttgtaatttcgttcggtcgggttttcgtagaggttttttaagattagtttttgtagggcggtttttagtaatttgataagaggcggttaagataaatttttgcgggttcgagtatatattttcgggcgttgggttttagagatttttaaattaagtataaataagaagggagtgagagaatttaggttagaatttgtacgggtattttattgaggaaaagcgaggtttcggtggtaggtatgttttttttcgacgttcgaaaatcgagtcgagcgttcgattatatttattgtagaggttttcgtttttagtgagttcggattttttagcggtttgttcggagttggtttttagttttcgtcgtagttcgacgtacggtttttttttggtagtaagtttttagcggttagtttgaagttaattttgtttaggcggtcgagggtttttagttaatttattatgatgtcgtttgggttatttgatgttcgtagcggcgggatacggttcgggtagtgcgtagtggtttttgttaggggtatcgcgtgcgtgtttgtttttcgttgcgtcggggacgtttttgggtgatacgggtcgttgggtattttttaagtcgaggaaacggatttttttcgtagagtttcgcgtttattttttaattttttatttcgtttttcgttgttagggttttcgatttagtttattttttttggcggtttagttagggattagagttggagaggttgaacgtaattcgtgttagtacggaatagacgatatgtttgtttgttagttgtttggatgaataattgaaaagttcgttgtagtttgtgtttcgttaagtttcgggtgtcgggagaatatttttttaatacgtattagggtgggcgggagcgggtagaggaggcgggattcgagggaggagagtgaattcgagtaggagaagtagtttaggtagttaggcgttttcgatgcgagaggttgggtatttatttttattttaggttttttattgtgtggttatgttatttttttaaataaatgtgtatatggagggagatcgatgttgataatgtttagaagattaaaagagtattaatgttggtaataataacgtaaacgtgtggatttagattttattgatttggaatttgattcggcgcgtttttagtaagttcgacggcgcgttttttttagtagagcgtttattagcgttacggtttcgcggttttttagcggtgtcgtttcgttagttttgcgcgggttttttcgtttgatcgtagtttttttttcgcgaggttttagttcgttttattttttcgaggttttttttttttttcgcggggttttttgttttttgtattttttttttcgatttttgtattattcgtttttgtgcgtatatatcgttatttgcgttttcggcgattcgtttgggcggttgggttcgcgaagttaatgcgttgaacggtgttcg

SEQ ID NO: 315 - DNA, 6887 bp, Artificial Sequence
  chemically treated genomic DNA (Homo sapiens)
cgggtatcgtttagcgtattggtttcgcggatttagtcgtttaggcggatcgtcggaagcgtaagtagcggtgtgtgcgtataggggcgggtggtgtagaggtcgggggagggggtgtagagggtagagagtttcgcgagaggaggagaaaatttcggggaagtaaggcgggttggggtttcgcgggggaggagttgcggttagacgggagaattcgcgtagagttggcgaagcggtatcgttggaaaatcgcggggtcgtggcgttggtgagcgttttgttgggaagagcgcgtcgtcgggtttattggaaacgcgtcggattaagttttagattaatgaaatttgggtttatacgtttacgttattgttgttagtattaatgtttttttaattttttaaatattattagtatcgatttttttttatatatatatttgtttgagaaagtgatataattatatagtggaaagtttggaataaaaataaatgtttagtttttcgtatcgagggcgtttggttgtttgggttgttttttttgttcgggtttatttttttttttcgggtttcgttttttttgttcgttttcgtttattttgatgcgtgttgggaaggtgttttttcggtattcgggatttgacgaagtatagattgtagcgaattttttaattatttatttaagtagttagtaggtaaatatatcgtttgtttcgtattggtacgggttgcgtttagtttttttagttttgatttttaattaaatcgttaggagaggtgggttgagtcgggagttttagtagcgagaaacgaggtgggaggttggggggtgggcgcgagattttgcgaagggggttcgttttttcggtttgggaggtgtttagcggttcgtgttatttaaggacgttttcggcgtagcgggagataagtacgtacgcggtgtttttagtaggagttattgcgtattgttcgggtcgtgtttcgtcgttgcgggtattaggtggtttaggcgatattatggtgggttggttaagggttttcggtcgtttgaatagaattggttttagattggtcgttgggagtttgttgttaggagagggtcgtgcgtcggattacggcggggattggagattagtttcgggtaggtcgttgggggattcgggtttattggaggcggaaatttttgtagtaaatgtagtcgggcgttcggttcgattttcgggcgtcggaagaaaatatgtttgttatcgaggtttcgtttttttttagtgggatgttcgtgtaagttttagtttgggtttttttattttttttttgtttgtgtttggtttagaggtttttggggtttaacgttcgagagtgtgtgttcgaattcgtagaaatttgttttggtcgttttttgttaggttgttgaaaatcgttttgtaagggttggttttggggaatttttgcgaaggttcgatcgggcggggttgtaattatttgttatttagtcgtttttttcgaacgaattcgtgtatttggagttaatttttttgaaatttaacgttggggtaatttaaattttttcgaagtttttttttttttttttttaagtgttatttttggttgtgattatatcggtaggttgggtaggaaggatttgtttttgttgtgatttcgtttaagggtgagttttgtcggcgttggttaaattagatttttttattttgagttttttaaatttcggtttgtttggttgtttggtaggattcgggggcggggttaaaatgagagagaaagggaatttataatttatgagagaaagagaagaggtaggtttggcgggaggggggtagggacggtgttttttaggtatcggtttgagagttcggtcgagtcgtttgcggagcggttgggtttgttaaattttcggggtttaacggcgagggttttttgcggcgtatcggcggggatttcgatcgatatttcgggcggagaaagttttcgttttttttttttatttgtttttgttttttagcgtttcgagtatataatatttatttattagttttagtttttgtattagtgtttgaagagattgatttattgattttaaattgaaaagttttttatgtaataataattatttaatatatttgtagttgttgataaaatggttagataaaaaggttaaagtttttgtttttttttaatttagggtaataaaatagatatatatttgaatgttcgagtaaagcggggtttttagtaggttttttttattcgttggaggaggtattttgttttttacgaaggtagttttagcgattttttgcggaaaatttagtagcgtgggtagtgttgtttcgggtttgtttttgtagatttgtattatgggcgcgggtggggttgaggattttcgggatgttacgtttttttattttagtaacgtttgggattattttaaaagttgaaattcgttaataggcgaagtattattttttttattatttttagatttatatgggtagaaggtacgtgttttttaaaagttgtgttttttgcgcgatcggtatgagggggcggtagcgttttgagatgagtaggagaatagttgttattttgtttttaattgtatttttaagattagttgttaagttttttttggttttcggtgtttaagaagtcggcgggtattaaaatttattagagatagtttgggatattcggggggatttatgataaaatgttaagaattgttagttagtttttagtttatttttcgtcgttattattatcgttttttattggttgttttattttgtttcgaattaatagtaaattagagaaaattgtaggagaggatgaaaaataaattaaaggagaaagattatataaatttttaaatttatttaaagtattcggagttcgtcgatttgggggaggttttttgtagggaaatttagttttttttatttttttagattaatattgcggggcgattatcgattgggaataggaatttattagtagacggtaaaggaaaatgttgttaaagcggaaattttttttttttaagttcgggtgaatttgttgtttgttatattttttagttttgtcgggcgttggtcgagtgtattttataagttgggtttagcggtgcgaggaaagttcgggggatcgggggtggaaatttgagttcgtagtttcggaagcgagttgtgcgaggttggttcggaatcgcgcgtattttaagattcgcgttatgtaaattatcgttattacgaattgtttttttagatcgttcgtcgattttgaaagatatttttttttattcgatttatgggaagtcgtttattttggtttgttatagggtatagtgtgttttttttagcgggggatttggatattttgtttttttgggttcgtggtttgtttttaggggtagcgtagtcgttacgtatatcgcgcggggttcgtgcgtataaaagcgcgtaattgcgtgttagtcgtagtaattattgtatttttttttttagttcgcgtattcgtcgtttatataggaggtttttgtgtttttagaataatagagggttgtatttcgtagtttggtcgttagaggaggtataaagagtcgagtcggttttagaataatgtaattcgcgtttttattcgttttttttcgcgggtcgttagtttttttcgcggtcgttaggcgcgtataattagcgttcgtttaatgtaaaggcggagtttgtagtcggcggtagggatgtattaattaatttgaatttttaattttttagtatttttttttgcgagtgtttagggtttttcggagtttcggtaaattttggtaaattttagtaaacgttgggatcggggtaaggacggtcggtgagtaaggtaaagcgttttttattttagtttttttttttacgtttttttaaagcggtgaatgtgatttttttaattttatattttgttttcgttgtaggtagtgatattggagttggttcgagttttttaagttcggttagaaagtttttgcgttaacgttaaggttagagatgggttttaggagcgttgttgtattttggtcgtcggtttttcgcgggggtaaggttgtgtttttagttaatgattaaataagtttgtttatatggtgggtgggagagtagagagtttttttttttttgtagagtaaagttttttaattgtttttgtatagggagattagttagttcggaaaattgaaatgtgttgtttaaaagagatttgaagtgtatggggttttgaataagggtaggttttggtttttgtgggttttggaaagatagggtttttagaggaaaacgtatatttttatttcgttttttagtatttgggaagatcggaaatagggtaaaggttggtatattgaggggagggcgaatgaaatgggggggggtcggttaatgaaagtttagggataaggagagagtaagaaagaaaaagaaaagggagaagggaaagtaggggaagagcggaagagaaagagaaaatggaagaagaaataaaaacgagaagaaagaggacgtgtataggaaagagaaggaaagaattaagagaagtgattcggcgcgtagatttgggttataagtatcggattcggagttttttttttagtagtttggtttttggttagtttcggttttatttgttaggcgtaaggcggatatgcgttggaattcgggtttttgaagttatttttatattttgcggaaggtttttttgttagatttgagtttattttacggttttggatttcggagtaggtcggagagagttttttgagatcggtatagtattttttgcgtaaagatcgtttgggggatattgtagcgttttagtttcgttgtgatgcgttgggttatttttttggtgttgattttttttagttggttcgacgtggttatttgcgagttcgatgaggacgagggtggtcgttcgcgattgggtgttagtatcggttcgtgagattgagtgtggttcgggtggtgtaggtcgtttaggtgcgatattatggtcgtaggtggggtgtttaggtcgcgggataggtgttgtttatcgcgggttagtatggtagtgtggtgcgcgtcgaagttggggttgagtattttgtcgtggttcggcggatcgtagttgggtagattttgttgcgcgttgtggaggtcgtttagttcgttgtttagcggcgtggcggttagcggggataggttttggtttatgtcgggtatttttttgtagggattgtagaggttgtttatggtcgggagttcgcgttcgtcgcgtatgagggtgaagttgtcgttgacgttgtcggataggcgttggtggtggtggtggtggtggtggtgcggatggtggtgcgggtgagggtggtggaatttgttagatacggtggagatgggtggtagcggttggagcggtgttagcgtggtgtaggtgttgtttatgtttatgttaggcggagacgagtcgtaggatatgtttatggcgtggtgtagcgggatggagagttcgggtcggtagtcgtcgtcgtttaggatcgaggttatgttggtgattatggtcgagcgcgacgtcgtcgttgtcgtcgttgtcgtcgtgtttagtttttggtgcgcggttggaggcggcggagggtttcgtagcgagttagcggcgtcgcggttcgcgtggtgggggttggggttggttagtagtttttgtttatggttcgggttttcgtcgtcgttttcgtcgttttcgtcgtcgttttcgttattgtcgtcgtcggtcggttcgtgtaaagtgtttagattttttattgttagtttcgggtttatggcgtagttttttaggtttttggtgaggtatcgataggcggtgtaggtagtttttatttagtttattagggttcgggggcggcgggggcggcgggggcggtcggcgggcgggtaaggcgcgcgtggcggggttcggttgcgggagtgggggcgggcgcgggagtgagtggagaggagtgcgcgtgcgggtgtgcgtttcgggttgcgggcgggttcgttcggggtgggggcggggtgggggcggacggggcgtgcgtgcgggagaggggaggggacggggagggagggagggattatcgggtttcgtcgttcgggtcggttcgtagtttcgttatgttcgagttcgtttcggcgtcgacgttttttgtttgggtgagcgggagttgtttagaagggttttgtcgttcgtcggggtagttaatttattttttcggatttggggcggggttacgttcgacgggcgttaagcgtaattatttcgaggtcgtagttgtttcgggaggcgggttttttacgggaagttattagtggttgtggagggggcggggtcgtattttttaggtttggttgacggttcggtgttttttttattttttttgttattggaattaaacgttaaggagagggagggaggagaaggtgggggggtcgttggggagagggaggttggagtgcgagcgagcgagagagattcggtgaaagatgtcgtgttgtgttttttttgagtagttgcgatttgggggaaggggtattgttttaatcgttttcgttttattttaaagtttttttggaggcgagtaagtcgggagtaaaagatttcgttatgtgttagtatagataaatattcgttattaataagttatttatcgagagtttttagttgggagttaatagtttagttttttaaaatgtaggcgttaatgtattttaatgtatggtaaattttcgaggtcgggatatgtataatttacgcggttagagtaattgtagtgttttcgtcgttagcgagttgcggtcggtcggcggtttacgggcggcg

SEQ ID NO: 316 - DNA, 3952 bp, Artificial Sequence
  chemically treated genomic DNA (Homo sapiens)
ggtcgtagtcggagaggaataggaatcgtagtggggacgttttggttttcgggtttatagtattcgggacggacgcgtagtagcgcgggtcgggaattgggtattagggcgggatgggtgagaggttttaagggataaggtagggagaagcgtagcggggtgcggggaatcgtacgttttttttttgtttttgttttttatttcgaggcggtagggcgggcgggcgcggtttcgggggtgggcgggttgggcggggcggaggcggggtcgtagtattggttttatttagtttttttcgttcgtagttagagcgagtcgagtcgcggttagtttcggcgggtagggggggcgttggagcgtagcgtagcgtagttttattagttcgtaaagcggatcgagttggaagtcgagcgttgtcgcgggaggcgggcgatgggggtaggtgttatcggtcgcgttatggacgggtcgcgtttgttgttgttgttgtttttgggggtgagtgttagtcggagggggttcgttttttttttcgggattagaatttcgagaagagtcgggcgtcgttattaaggaaatagaatagagtattggggttttagatattgagggtgggtggtgggaaaggatttttgatgtcgggattacgaaggagggtttagggttttcggagcgtagaggcgattttttagggtggagatgagggtaagatcggagtacggatgtcggtttttaggtatcgtagggggcggtgggggagttgggaggggttttttaagagggggtatggggtttttcgatgtttaggtttttcggaagaggatattcgaatgtcgggatttcgaagggattttttttttagtatttcggtttttggagagtcgtgggatagaattaaggcgagagaaggagggggaattggacggggattagagatgagaggggcgagttgggttggggcggggagttcgggacgacgggatggaataatggaggaggtcggagggattggaggtagaggggattcggtaaggataatggggatcggttagataatgggggggaggggcgtcggagggagaggttggggagcgggagagaggttgagaagtgggttagggagggtagaagaggggcgacggcgagggcggtagagagatggaagtagaaggaaaggagatagagcggggcgcggattttgaagtggtcggggtttcgtttgttcgttgagggatagtgagacgagaagagagagtagaggtttggatatttttagcgtttgttttcgcgtttttgttcgcggttttttttagtttcggaattggggttgcggatttaaggttgggaggggagtgtttatttcgtcggggcgaattcgttttcggggtttttttacggtcggcgggttttttcgacgcgcgtgtttttacggtttgaagtagcgtagcggatcgcgagggacggagcgggtgtgtttttattcgggttggcggtggttacgtttcggggtgtagagcgtcggggcgtattaggcggggattttttttggtcgcgcgtagttttggttacgtaggcgggaggcggtaggtagggggcgttgcggggcgaggtaagtgtagttcgtcgttgtttgtttgcgagtttggggttgcgcgtcgttttttatttagttgcgcgattcgagcgtcgcgtttatcgcgtttcgtgggttttcgcgtttcgaagggtcgggattcggtttgagttttttttggttttcggtgtaagtcgttgggtatttaacgagacgggggcgttcggacgtttcggattttgtagcgcggtatttcgggttatcgattcggtaaaggtcggcgggtttttcgggtggttcgacgagattgttagatgtggtttgttttatggttatgaatcgaatgttttggaaggtttggtaacggaggaggcgtttttatttttttcgttagtattttttattagagtattgcgttttaaatttcggttttatagatacggagattgaggttttgagagtttaaacgatttggttaagattttatagtaagttgggttagagtcgtggttagatttttcgatttgatttttagttcggtatttttttatttttttagggggtagtcgttgttttagttcggggttacggttgcgttttttagtagggcggggggggttgatattgtttttagagttcgtcggcggtagagtttgcgggtgaggtgggtagagattttgttcgggtgcgggttttagttcgaaagtttagttttagttttttggagttgttaggatttgtggttgcgttcggggatttgggagcgatcgcgggtacgtttgttgattaacgtcgttggttagagacgttgtttagacgcgggtgggcgagcgtagattaggagagcggggaggagggatcggattttagaggggtaacgatttgggtttcgggtttgggtaagagcgagggttttcgcgcgaagatttaaggaaggaggggagttgggcgtggaggatttgggcgtttgggaaggtgtatttcgataggaatttgtcgtttgtagtttttgcggttttcgttttcgtttcggcgcgcggttgttcggtttgggatggttgtgcgcggttcgagtttttttttgggtcgcggtgagagagagagggttgaaattagagcgcgtttcggcgggtcggttggcgggtcgcgtcggtaatggaggtattttgttatttagacgtttgtaattagagtcgtcgggttggttaatgcgtttaatagggatggaacgagggtagtaaatgggcgtgcgtgagcggtcgggttgagttgggtggatggtggatggggaggtagtttcgcgggggacgggtttttatcgtattgttttagtttagtttggtttaagcgtttcgttttttttttgggggatcgcgtggggaggcgggaataatcgatgtgttgagtttttattaagtgttttgtatttttttggtagttttttttgaattatttaatttttataaggttttagtaaggtgaatttagttatttttatttcgtagttgaggaaatagaattttttagatttttaggttcgagattaggtttttttagtgagttagtggtggcgtttttgttggaatttaggatgtttggtttgggatgtttttttttttatatatgttaggttttttttcgttttttattttttagattatggaaggagtcgtggttttgagagattaaatcgtgttttatgtttttggttttatatatttagatttgagttttttttttatacgtagaggttttgtttttttttaagtttttatgttatattattttgggtaattagtttttttttttttaattttttttttatttaaagggagtgaggggtatgtgttagtgttttttttgggtttgtatcgattttaaaaggttttttaggtgtttgaaaattttttttattttatggcggtgattacggttttatttatttaagagttttttgttgaagttgttggaatggttagggttgattatattgaaatattcgtatggttttaaatatttttaattgtttcgttgttttttttttttttttaattaaaaaaaatgaaaatttttaaaagttaatttatttaaggatttttttattttagttttttgtaagttttgaaatggttaaaataaaaagattataagcgtttttaaaaatgagatgaaattattttgttaaatgtgaaatgattaagtgtaatatatataaattttagggaaatttatttgttatttttataaattaatttttttggatttgattttggagtaattagtttgaatgttagttatttttttttatttggttaaattttttttttttgtttggggtttttttaagatgagatgtttttttgataattaatatttatt

SEQ ID NO: 317 - DNA, 3952 bp, Artificial Sequence
  chemically treated genomic DNA (Homo sapiens)
aataaatgttagttattaaagaagtattttattttaaggagattttaggtaggaggggagagtttagttaagtagggaggggtgattaatatttaggttaattgttttaaaattagatttaaaaggattaatttatagggatgatagataaatttttttgaaatttgtatgtgttatatttagttattttatatttgatagaatgattttattttatttttaagaacgtttgtaatttttttgttttggttattttaaggtttataaggaattaaggtggaaggatttttagatgaattgatttttaagaatttttattttttttaattagagaaaagagagaaatagcgaaatagttgaaagtatttgaaattatacgaatgttttagtataattagttttggttattttaatagttttagtaaagagtttttaagtgaatggggtcgtggttatcgttatgggatgggagagatttttaaatatttggagggttttttgaggtcgatgtaaatttaggggaggtattggtatatattttttattttttttggataggggaggagttgggaggaaaggagttaattatttaagataatgtagtatagagatttgagagggggtagggtttttgcgtgtggagaaggggtttagatttaaatgtgtggggttaaaggtatagggtacgatttaattttttagagttacgattttttttatgatttagaaggtagggggcgggagggagtttggtatatgtaggaaagagaatattttaggttaagtattttgggttttaataaagacgttattattgatttattgggggagtttggtttcgggtttgaaagtttagaaggttttgtttttttaattgcgaagtgggaataattaaatttattttgttaggattttataaggattaaataatttaagagaaattattagggaagtgtaaggtatttagtaggaatttagtatatcgattattttcgtttttttacgcggttttttagggaagaagcgaggcgtttgagttagattgggttggaatagtgcggtaggggttcgtttttcgcggagttgtttttttatttattatttatttagtttagttcggtcgtttacgtacgtttatttgttgttttcgttttatttttattaggcgtattagttagttcggcggttttggttatagacgtttgaatgataaagtgtttttattatcggcgcggttcgttagtcgattcgtcgggacgcgttttggttttagtttttttttttttatcgcggtttaggaagaaattcggatcgcgtatagttattttagatcgagtagtcgcgcgtcgaggcggaggcgggagtcgtaggggttgtagacggtaggtttttgtcggggtatatttttttaagcgtttaggttttttacgtttagtttttttttttttttgggttttcgcgcggggattttcgtttttgtttagattcggagtttaagtcgttgtttttttgggattcggtttttttttttcgtttttttggtttacgttcgtttattcgcgtttgagtagcgtttttaattagcggcgttagttagtagacgtgttcgcggtcgtttttaaattttcggacgtagttataggttttgatagttttagggaattggggttgagttttcgggttggggttcgtattcggatagaatttttgtttattttattcgtaggttttatcgtcgacggattttggggatagtgttaatttttttcgttttgttgggaaacgtagtcgtgatttcgagttgggatagcggttgttttttgaaaaggtgggggagtatcgagttgggaattaggtcggggagtttagttacgattttggtttaatttgttgtgagattttggttaagtcgtttaaatttttagagttttagttttcgtatttgtaaagtcggaatttggggcgtagtgttttgatgaaagatgttggcggggagagtgaagacgtttttttcgttgttagattttttagggtattcggtttatggttataaagtaggttatatttgataatttcgtcggattattcggaggattcgtcgatttttgtcgagtcggtggttcgggatatcgcgttatagaattcgaggcgttcgggcgttttcgtttcgttaggtgtttagcggtttgtatcgagagttaggagaggtttagatcggatttcgatttttcgaggcgcgggagtttacggagcgcggtgggcgcggcgttcgggtcgcgtagttaggtggggagcggcgcgtagttttagattcgtaggtaggtagcggcggattgtatttgtttcgtttcgtagcgttttttgtttgtcgtttttcgtttgcgtagttagagttgcgcgcggttaggaagggttttcgtttagtgcgtttcggcgttttgtatttcgagacgtagttatcgttagttcgggtaggggtatattcgtttcgtttttcgcgattcgttgcgttgttttaagtcgtgagaatacgcgcgtcggaggagttcgtcggtcgtgggggaatttcgggagcgggttcgtttcggcgaagtgggtattttttttttagttttagattcgtagttttaatttcgggattgggagaggtcgcgagtaggagcgcggggataggcgttggaaatgtttaagtttttgtttttttttttcgttttattgttttttagcgggtaggcgggatttcgattattttagggttcgcgtttcgttttgttttttttttttttgtttttatttttttgtcgttttcgtcgtcgttttttttttgttttttttaatttattttttaatttttttttcgttttttaattttttttttcgacgttttttttttttattgtttggtcggtttttattgtttttgtcgggttttttttgtttttagttttttcgattttttttattgttttatttcgtcgtttcgggtttttcgttttagtttagttcgttttttttatttttagttttcgtttagttttttttttttttttcgttttggttttgttttacgattttttagagatcgagatgttgaggggaaagttttttcgggatttcggtattcgagtgttttttttcgaagaatttgggtatcggagagttttatgtttttttttgaaagattttttttagtttttttatcgttttttgcggtatttgaggatcggtattcgtgtttcggttttgtttttatttttattttggagagtcgtttttgcgtttcgggaattttagattttttttcgtggtttcggtattagaggtttttttttattatttatttttagtatttgggattttaatgttttgttttgtttttttggtggcggcgttcggtttttttcggagttttgatttcgggaaagggagcgggtttttttcggttaatatttatttttagaagtagtaatagtagtaggcgcggttcgtttatggcgcggtcggtggtatttgtttttatcgttcgtttttcgcggtagcgttcgatttttagttcggttcgttttgcggattgatggggttgcgttgcgttgcgttttagcgttttttttgttcgtcggagttggtcgcggttcggttcgttttggttgcgggcgggagaggttgggtgaagttagtgttgcggtttcgttttcgtttcgtttagttcgtttattttcggaatcgcgttcgttcgttttgtcgtttcggggtgggaagtagaggtaaagggagggcgtgcggtttttcgtatttcgttgcgtttttttttgttttgttttttagagttttttatttatttcgttttggtatttagttttcggttcgcgttattgcgcgttcgtttcggatgttgtgggttcggggattagggcgtttttattgcggtttttgttttttttcggttgcggtt

SEQ ID NO: 318 - DNA, 2820 bp, Artificial Sequence
  chemically treated genomic DNA (Homo sapiens)
tttaggggataatatttaggtatgttaacggagtttaaaatgttaaggaaattatattataattttgtttagtatattataggttgttaaatcgaaatgttatgttagttaggagtgtagtaatttttattttttggttttatttaattaggaagttttagtagagcgaagtttgttaagcgttcgtcgttagaatttgaaggaattcgagcgagtaagaagagtgtttgatttattttatagaagtttgtttagaaatggaggagttagcgtttattgaagtcggtttcgttttcggttcgtttatatggagtttgattagttttagttatgtttatttcggtttgggagattcgtaaagtgtttttttttttaatttttttgtattattttgaagtttagggaagtaaagagaggggtatatttggattgtaaaattaatgttttttgtcgtttaggagagaagggaatgagagagagagagagatagatagatagagagagagagagagagagagagagagagagagagagagagagagaaattttattgaaatttagtttttttagaatttgtgtgatttggtttttaacgggagattagtgcgattttatggtatttttgttaggaattagcgatttttttgtagttattatttgatttattgttttttcgtttatttttttttataaagttattttttttttattttagtaagatttttttttttaatgatgataaagtttttgttttagtgttttttttaggattggtgtttttttaaaatagtgaatttagaaaattatttcgtttaatattttttaaaattttcgtagttttaatgtaagcgtaagtatgtaaaggttttttgttatatttgtattttttgtttattttagaattattttttattttcgggtttgtaatagttttttttgtttttttggatagaggtgggtggtattaggggtttagggtagtaggaggtgaggggttgaggaggtcgttagggtaggttggtttgtgttggatacgcgtgtttttttgcggagttaaagggtcggggacgggggttttggatttattagagtaattttagtcggtgggcgtttggtagttatttaaggaggtagggaaagtagcgagttttatcgggcgggttacgatgagtagtatgacgggtagtagtagtagttagtaaaagttttcgtaaagtgtttagttgttgtattgtcgcggggatttttatagtattatgattagttcgtgtaattttgtagtagtaaacggttttcgaggaatataggatcgcgggggtcgggtagcgggttattgagtatttcgcggacggcggtagtagaggcggcggcggtggtagtggtattcggcggggaagtagtagttaaattcgcgtatgatttcgagagttttagtaatatttagggattgggtttagtttcggagcgagagggtcgttcgttgagaagttgcgtcggagacgcgggaagttgttgttataaggagggagttttgggaagtcggaggataggaggagacgggagtttaggggtagacgagtggagttcgaggaggtagggtggagggagagttaaggcgtttcgtagttcggtagtcgtttttcgagttttgtcgttcgtatttttttggcgtttgggaagtagtaggtttttagttcgttcggggttacgtgggaagaggtagtcgggttttgattggtggagtaggatgtaggtttcgggagggaggggtcgacgaggaggtgtaaggatgtaaggaggaggcggtcgcggaagttatagatgggttcgttcgttaggcgttggttcgagtggggttaggcggggatggtttaaatgagaagttcgggttttagggtgggttattcgtatatttatatattattcgttttatttttcgttttaggacgttttttatcgaaggcggggttcggattagcgtttttttttcgcgcgtgatttcgggtcgcgagtgcgggtcgcggttgggtggcgttttttcgagttggagatggtgggggcggaggtgttagaggagtagtagtagtagggtagagaggggcgagtcggcgcgggagagggcgttttgttggcgatcggcgttttagcgtgcgggagcgcgtcgtttaggttgtagggggatgtaggttgggaatgtcgcggcggagaggttagggacgtttttttagggatttataggaaagagggtgagaggcgatggtgttagaatcgtttttgtcgatttggaagtaatagtagtattttttataagagcgtgtaattttaaggttgttcgtcgaggtagtttagttatttcggtaggcgttttttttttttttttttttttttttttttttttttaggtttttcgtagtttcgatttagtttaagcgttcgtaggtttgaatttttttttttattattcgtttttttttagttcgtagtttattagtgtgtttatttgggaggtgcggttagatgtgtttggaaggttagattggtcgggataagtggtttgagagaaagagaaaggtttttttgtatacgtcgcgggtgggttgtcgggagtatcggtcgggtagcggcgttcgggaaggggagagcgggttttatttgttggtttaggtagtgattttgcgttttttattcgggtttttgtcggatggtcggtgatttggggcgacgagagaaggtttaattcggtaggagtttttggttttgcgcgttttttttattttttttagcgggaagggtaaacggtatagcgggattcgtttttcg

SEQ ID NO: 319 - DNA, 2820 bp, Artificial Sequence
  chemically treated genomic DNA (Homo sapiens)
cggaaggcgggtttcgttatgtcgtttgtttttttcgttggagagaatgaaagaaacgcgtagagttagagatttttgtcgagttagattttttttcgtcgttttaggttatcggttattcggtaaagattcgagtaaggaacgtagggttattgtttgggttaataaatggagttcgttttttttttttcggacgtcgttgttcggtcgatgttttcggtaatttattcgcggcgtatgtagaggagttttttttttttttttagattatttgtttcgattaatttgattttttaaatatatttgatcgtattttttaggtggatatattaataggttacgggttggagaggagcgggtgatgaggagagggatttaaatttgcgaacgtttgggttgggtcggagttgcggggggtttgggaggagagaggggagaagagagaaggaaggagagcgtttgtcgggatggttgagttgtttcggcgagtagttttggggttgtacgtttttgtgggagatgttgttgttgtttttaggtcggtaagagcggttttaatattatcgttttttatttttttttttgtaaatttttagagaaacgtttttggttttttcgtcgcgatatttttagtttgtatttttttatagtttaggcggcgcgttttcgtacgttggagcgtcggtcgttagtaggacgttttttttcgcgtcgattcgtttttttttgttttgttgttgttgtttttttgatattttcgtttttattatttttagttcggagagacgttatttagtcgcggttcgtattcgcggttcggggttacgcgcggaagaggggcgttagttcggatttcgttttcggtagggggcgttttggagcggagagtgaggcgaatggtatatgagtgtgcgggtagtttattttgaagttcgagttttttatttgagttattttcgtttagttttattcgggttagcgtttggcgagcgagtttatttgtggttttcgcggtcgttttttttttgtatttttgtattttttcgtcgatttttttttttcgggatttgtattttgttttattaattagagttcgattgtttttttttacgtgatttcgggcgggttgaggatttgttgttttttaaacgttagagggatgcgggcggtagagttcgagaggcggttgtcgggttgcggggcgttttgattttttttttattttgttttttcgggttttattcgtttgtttttggattttcgtttttttttgtttttcggttttttagagttttttttttatggtagtagtttttcgcgttttcggcgtagttttttagcggacgattttttcgtttcggggttgagtttagtttttggatgttgttgaaattttcgagattatgcgcgggtttggttgttgttttttcgtcgggtgttattgttatcgtcgtcgtttttgttgtcgtcgttcgcgggatgtttagtagttcgttgttcggttttcgcgattttgtgtttttcggaagtcgtttgttgttgtagagttgtacgaattagttatggtgttgtgggagttttcgcggtagtgtagtagttggatattttgcgagggtttttgttggttgttgttgttgttcgttatgttatttatcgtagttcgttcggtgaagttcgttgttttttttatttttttaagtgattgttaaacgtttatcggttggaattgttttggtaagtttagaattttcgttttcgattttttaatttcgtagaagaatacgcgtatttagtatagattagtttattttagcggtttttttagttttttattttttattgttttagatttttaatattatttatttttatttagagaaataaggggaattgttgtaggttcgggggtgaggggtggttttgggatgggtagaaagtgtaggtgtagtaggaaatttttgtatgtttgcgtttatattggagttgcgaggattttgagaaatattaaacgggatggttttttgggtttattgttttgaaagagtattaattttaggggaaatattgaaatagaagttttgttattattaaagaaaaaagttttattaggatgaggaagaaataattttatgagaaagaatgagcgagaaagtaataaattaaatggtgattgtaggggaatcgttgatttttggtaaaggtgttatgaggtcgtattggtttttcgttgaagattaggttatatagattttagaggagttgggttttaatagaatttttttttttttttttttttttttttttttttttttttttttttttttatttatttattttttttttttttttattttttttttttttaggcggtaaaagatattggttttgtagtttagatatgtttttttttttgtttttttaagttttaaggtagtataggggagttgagaaaaagaatattttgcgggttttttaggtcggagtgggtatgattgaggttggttaggttttatgtaggcgagtcgagggcggaatcgattttagtgggcgttgatttttttatttttggataggtttttgtggagtgggttaggtattttttttgttcgttcgggtttttttagattttgacggcgaacgtttggtaggtttcgttttgttgaagttttttaattaaatagggttagaggatgggagttgttgtatttttagttggtatagtatttcggtttgatagtttgtagtatattgggtagaattgtggtgtaatttttttggtattttaaatttcgttaatatgtttgggtattgttttttagg

SEQ ID NO: 320 - DNA, 2265 bp, Artificial Sequence
  chemically treated genomic DNA (Homo sapiens)
tatttttatttagcgtgtttagggtattcgtatcgtgttagtttgtggcggtttttaaattaattttgattgagtttttgaggtagttttttatttttattcgtattaatttagtacgtttattaaaatttttaagtaattttttttttgttacgtaaacgttaggagttgtttgatttttttttttttttatttttattttttttttagtttagtcggttttttggtcgggtaagttgggaatttagcgattgaagggttttggaaggtgtcggaggggagagacgttagttcgaatttttatagggtttttttattaaaaatttttaaaatgttggttcgagaaattttttttgttggagggtttgagttttatttttttttgtcgcgtgcgtttttattgtcgtgaatcgttgtgatttttaatttattattttatttcgcgtttttagcgttttagtcgttttgtatttgtttagttttttttttgtttatgtatttggttggttggtggcgtttgggacgcggttgtaggcgtcgtcgtattggtggtaggagttagcgtagttatagtcggtataagttttggttgggtagttttcggcggagtcgtttacgtcgtgatattgatattggtaggggttgagagttttgttataggaagtcgaggtaggagagtagtagtcgtgcggggtttttttcgtagggttgtagtagttagaatcggtagttgaagattcgggtaaagttggcgatttttgagacggatggtgtatagttgcggacgtttggaacggagtttggaagtcgtcggatcggatgttggggatttttttgttaaatatttttgttatcgtttacgggcggcggtagcggttgtttttgttgttgtggcggcggtagttgttttagttggttgtggggttgttttggtttaagtagatatggttgtgggagcgagggaggaggaggaagaggaggaggagagaaggaggaggcggcggtcgcggcgaggaggagattgggagtcgtgaagtttttgttttcggtcggttgattgttggttgaggcgtagtatagttttggttaaatttttaattgcgcgtttacgtatagcggggtggatttggttttattggttagggtttcgggagtaatagtaatattttaattcgtttaattagttttagtataataaagtattgtttaaaaagggggtggggggtattgagggggtgtgtgtgtttgtgtgtgtgcgcgttcgcgcgtttgtgtgtgtttttgtttgttgtggagtggggaggggttttagtttatttgtttttagtaaattttaaagatatcgtagaagttatagtataaggttttgtgatgtttggggataatgtgttttaattagaagttttaaaagtgtatatgttttgggaatgaggtgggcgattatttttttttgttttttattatttcgttttcgtgggttgtattaaaggcgagtgtagaattaaatattgatattgaaatagggagttaaggtgtagggagtggggagcggggggatgtaggatggaggtaagaaggaagggaaatagtattttttttttttttagtggagtgttgggaagtaagttgtaatttatatgttttgaaaatttgttttttggggaaagaggtaattttttttgtaggagatgagtatttttcggacgcgggttggataggaatgtttaagaaggtataatgtttattaagtcggtgaatggtagggagagtttttgtagtttaaagtttttataatgatttttaaaaattattgttttaaatatatataatttaaggaagtttaaattttcgttgttggtttgtaaaaagagttaaatagttttatttttgtttaatatttttatttatttttaagatattggaataaaggttttttaattatgtttagtggttaaagattttcgtaaaggtgaatggatttatgtataatttgttatatttttaggaaagaatgggaaagtttcggaagtggggaaggagataaggattaaagtttttgtaaagttagatgatgtttattgattttttttttttggttttatgaatgtggtttagtttttttattttttagattcgggtttttgtatttttttttttttattttttgttgtaaagatattttatttagttcgtatgtaagggaagaaaggatttaagaattatttagttgatatacgagatttaaattttgttttttaggaggtg

SEQ ID NO: 321 - DNA, 2265 bp, Artificial Sequence
  chemically treated genomic DNA (Homo sapiens)
tattttttgaagagtaaagtttagatttcgtgtattaattgaatgatttttgaattttttttttttttgtatacgagttaagtaggatgtttttgtagtaggaaataaaggggagagggtatagaaattcgggtttgggaaatggagagattgggttatatttatggagttaggagggggaaattaatgagtattatttgattttgtaaaggttttgatttttgtttttttttttattttcgagatttttttatttttttttggaggtatggtaggttatatatggatttatttatttttgcgggagtttttggttattgaatatagttaaagagtttttattttaatgttttgaaaatagatgaaaatattaaatagaagtggagttgtttggttttttttgtaagttagtaacgaggatttgggtttttttaagttatatgtgtttaagatagtaatttttaaaagttattataaggattttgggttgtaggaattttttttgttatttatcggtttaatggatattgtgtttttttgggtatttttgtttagttcgcgttcgggagatatttattttttgtaaaggaagttgtttttttttttaaagagtaaatttttaaaatatgtaagttataatttgttttttaatattttattaaaaaaaaaaaaaatgttgtttttttttttttttgtttttattttatattttttcgttttttattttttgtattttgattttttattttagtattagtgtttaattttatattcgtttttggtgtagtttacgggggcggggtagtgggaagtaaggaaagatggtcgtttattttatttttaaaatatgtgtatttttgaggtttttgattggaatatattgtttttagatattatagagttttgtgttgtggtttttgcgatgtttttggaatttattaaaaatagatagattaagatttttttttattttataataagtaaaaatatatataagcgcgcgggcgcgtatatatataaatatatatatttttttagtattttttattttttttttaagtaatgttttgttgtgttaaaattagttggacgagttagggtgttattgttgttttcgaggttttggttaatagaattagatttatttcgttgtgcgtaagcgcgtaattaaggatttaattaaggttgtgttgcgttttagttagtagttagtcggtcggagatagagattttacgatttttagtttttttttcgtcgcggtcgtcgtttttttttttttttttttttttttttttttttttttttcgtttttatagttatgtttgtttagattagagtagttttatagttaattagggtagttgtcgtcgttataatagtaaggatagtcgttgtcgtcgttcgtgagcgatgataggagtgtttgatagaagggtttttagtattcgattcggcgatttttaagtttcgttttagacgttcgtagttatgtattattcgttttaggaatcgttaattttgttcgagtttttagttatcgattttgattattatagttttacggggggagtttcgtacggttattgtttttttatttcggttttttatggtaaagtttttaatttttattagtattagtattacggcgtgaacggtttcgtcgggagttatttagttaaagtttatgtcgattatagttacgttagtttttattattagtacggcggcgtttataatcgcgttttaagcgttattaattagttaggtatatggatagggggaaggttgggtagatatagggcgattaggacgttgggggcgcgagatggggtggtagattgggggttatagcggtttacggtagtgggggcgtacgcggtagaagggagtaggatttagattttttaataaagagagtttttcgggttagtattttagggatttttagtaggagagttttgtggaggttcgaattagcgtttttttttttcggtattttttaaggttttttagtcgttgaatttttagtttgttcggttaggaagtcggttaggttggaaaggggataggggtggagagaagaaagaattaagtagtttttggcgtttgcgtaataaagagaaggttatttgggaattttggtaagcgtgttgggttggtgcgagtgggaatagaaggttgttttaaaaatttagttaggattagtttgagagtcgttataagttagtacggtgcgggtgttttgagtacgttgggtgggggtg

SEQ ID NO: 322 - DNA, 5907 bp, Artificial Sequence
  chemically treated genomic DNA (Homo sapiens)
gtcgtcggagtagggttttagcgtatcgcgagtttttgtttttttcgttttgtagcgtcgcgagtttttttttttttcgcgtttggtttcgtttgcgtttttttcggcgtgggtattcgtagattcgttaggaggttgacgagaggtgtttttatagagttttgtttttttttagatttttaaacgaaaagaaagagaaaagttaatttttcgtttttattttgtacgtatttggagagcggttggtggcgagcgattcgtataatcgtttttttcgcggcgtttttggacgggcggagagaattcgggtgattgagtttgaggttgagtttttttgggagcgatttatgttagttatttttatttttaagggggattcgcggtcgggtttacgcgcgaaggatgggtgttagggaaattgatttatagacgattcgtttcgcgagagattgataatttagttttgcgggttttcggggcgtttagattagtttttagttagaggatttggggttgtatagttttcggattttggagggggtggttcgggggtgggagattgcgagtattagtttacgtcggtttttttttattttgcggcggcgaggtgggaagggttaggatgcgagtttagtattttttttagaaatgtagtatttcgtttttttattttttttgttttcggcgtttttttttttacgcgttttttttcgttttttttttaagggcgttttttttttgtttttagtttacgtttgaatttttcggcgttttttttttttttttttagttttttttttacgttttttgttttcgggtattttttttttttaattttttattttcgtatcgtttgatttcgaggggcgggagcgtattgggttgcgtacgggtgggggcgtcgcgttagtttcgcgtagttgttttgacgtcgttgtcgtcgtcgtcgtcgtcgtcgtttttcgtagtttagttcgcgtttcgcggtagtttcgtagtgtattagttattatcgtcgtcgtcgtcgtttcgttagatttgttgttagtttgttcggtttagttttgagagagtttcgaacgttagttgcgagggttatgagttagagagtttcggggcgtcgcgcggagagtaagcggagatagcgattttgcgttttttagttttcgtttttttgtatcgcgtttttcgtattttcgggtttttttgtttttttcgttgtttttatcgtcgttatggttattttgtttcgtagtaagttgtttaacgtggttacgttcgtgtttaataagttttaggttaagatgagcggtatgttcgttaggatgggtttttaggcggttacggatgaggaggcggtgggtttcgcgtattgcgacgatttcgattttgagtatcgttagggtttgtagatggatattttgaaagtcgagggagagttttgcggggacgagggcgttgaagcgttcgtcgagggagatatttattattagcgaggtagcggagtttttttgtcgtttttcggttttaaggattaggtgggaggtggtggcgaattcgggggttacgataagtttaaaattacggcgtgggaggtaggttggaacgtgattaacgttatttaggtaagcgcgggatttttagttttgtttgttttttttttttttagtttagcgtgtcgggttttgttttcgatagtcgttcggtgatttcggtttggagatttttttttgtatttaggaatttttttttttttattttttttagttttgcgcggggatttacgtttttaggcggtgtttttcgttttaatttacgtttttttttaacggtattagttgtaagatcgttaggttgaagttcggtttgagatatttgttcggagatattgtaaaagtgaaggaaatggggggagggagtaggaagcgatgagaaagaaagaaaattaggattggagggtacggtttggttttggattttggaacggatttatagttgtatttttgggaggaaagaagaaggggaaatcgttgaggtcggagtttttttttttcgtatatacgtatagatacgtatacgtatataggtaggtatattatatgtttatagtttttttttttacgaataaaggcgtaggtataggcgtatacgatatgtatttatatatagattatagtattatttttaaatgtatttgcgtatatttttatagttttataaataaaagtatatatttgtatatattaaatatacgaatattcgtttgaatatatgtatatatatatgtatagatgtatgtagataggaattagtttgtttttttgggtgcggttttgttggagatatataggtatatatatacgaaagtatatatatgtttttatataaatatatttagttcgtaataatttagtattatttgtgtatagattcgtttttttcgttcgaaatttcggttgtatcgtaaagaggcggttagttttttttcgtgtgattttggcgaagttttttttagaggttaagaatggtttttgttttttaggttttttttttttatttttaattttttattttttattaggcggcgtaggatttttatatagggagtaggtttggagttttggtaacgattttcgagttagtaggggttggtaggtcgtagttttttgggtcgaaggagattttagttttaggtaatttcggttttttatagtttggtttcgcggcgtttttggagcgtattattattggggttacggaaggtaggttttttgggagtagaggttttttaggggttgttttatgtatcggggtaagtaggattttatcgggtttcgaatattagatggttcgatttaaggcgtttttcgtttcggggttcggcgagacggttttgttggattacggattcggggttgttttcgttttcgttgtgtttcgcgatttttcggggcgttttttaaggtttcgtttgataggttttaagggaggttagggtaggaggttggaggttcgtaggttttcgggattttggatttcgttagtttttagttttcgtgtggattttaaattttatagttttgttcgtttgattttgaagtttttggttttagatttttgttcggttcggttttttggtttttttggcgttttttcgttaagtttttttttttgtttgtttttttagtttttatttagtttttttttttaggtttcgttttcgttttattttaattttagttttgttttaagatttttaatttttagttttgttttttttttttcgcgcgttgttttttaagcgtttttatattgtttttgtttttgttttttaggggttttgttttatttttagtttttttttttttttattttatttttttttcgttttataattgtagtttttaacgtttttttttttggtttgagtttgagacgttcgagtttttttttttagttttcgtgttttattttagttttattataaatttcgtgtttattttttttattggtttaggtttagtttattattttttttagagttttttttcgattacgtttttttttgtttttttttatttttttttttaattttttattttgtttttgtttttagaaattatttcgaagtatttttttttttttttgtggtttttttttatttttagtttttttttattttagttttttcgttattattagttattagcgtattttttttttttagattcgtttatatatttttttttttttatttttggttcgatattcgggtttattattagtttttttatatttatttcgtagtttgtttttaatttttttttttcggcggtttagatttaatttttagtgtttttagcgtttttttcgggttatagcgttaagttacgtttttcgggttttttattcgttgttaagttcgttgagcgttcgcgtttggttgttttttcgttttatagggtatgttcgtgttgggtttattttacgttattttgtacggcggttatttggggttgttttttattattttcgtcgtcgttgtgtgttgttatatcggtaagatttttatcgcgtgtttgtacgaggagaatgaagacggcgaggtggtgcgcgtgcgggattcgtacgtggttatagttaacgtttgttgcgtttcgcgttttttaacgttgggcggtcgagtggtgaacgtagcgtagattatcgagttggtgatgacgtgtattttgtacgtggtggtgagtggtaattttatgtataatagtttttcggggttgttcgtgtcgtagaagttttggtttattatcgttacggtcgtgttgttgttttgcgttttttttaagaattttaaggtcgtgtttaagtttagtttgttgtgtattttggtttatttcgttattaatattttggttatagtttattgtttatcgcgggcgcgcgattgggtttgggagaaggttaagttttatatcgacgttaagaagttttttatttttattggtattatcgtgtttagttatacgttttagatttttttgttttcgttggagggtaatatgtagtagtttagcgagttttattgtatgatgaattggacgtatatcgtagtttgcgtgtttaagggttttttcgcgttcgtcgtttattttatttgggtcgacgagattaaggaggttattacggataatttgttcggttttattcgcgtcgtggttaatatttttttggtggttaaggcgttgttgttttattttttgttattttttgtcgttgtcgaggtgttggagaagtcgtttttttaggaaggtagtcgcgtttttttttcggtttgttatagcggcgacgggcgtttgaagttttgggggttgacgttgcgttgcgcgttcgtcgtttttacgttgtttatggttatttatgtgtcgtatttcgcgttgtttatgggttttatcggtagttttacgggcgtcggtttttgttttttgttgtttagttttttttatttgcgtttgttttggcgtaagttgttgtggtattaagtttttttcgacgtcgttattttcgttatcggcggtatttgtagcgtgttcggtttcgtgtattttttcgagggttttatcgaagtttatcgaattaacgcggaggattagggcgtaagggcgagttttcgtcgcgtttttgcgtttttttttttttttttttatttcgtttttattagtttagtgcgttttgtcgtcgcgttgggaggttaagttttaaatatttttggtttttagtttttgattattcggggatgggggggatgggaggggatagggatttacgatttatcgcgtttgcgtttttgttgtttttttttttttataatattttggttttggggggaggcggggtgtatttgcgggtagggttttttgtttttttaagtggggtttcgatattttggttttagttatcgagggggttgggaagggagggagagggggcgtagttcgtaggcgtggtaatttgattttgggggaatattttatatttatttagagttcggaatttatagcgtttagttatttttagtaagagcgttttttatttcggagacgttttaattttgtagcgggaaaggttgattgggaaatttattttgggtgggtaattttttttaacgaagtcggaaggcgagaagtcgcggcggggttagtttgtttgtcggtttttaggaatttaaatttttattttgtgtaatttattaggtgtggaattgttttattgtgcgtgtggtgtgttcgtggtgaataagatgaaatgtatattagaaaaaaatttatttttaatttagagtgcggtatataattatattcgtaaataaagaagagataaaggtttgcgcggttcggtgtcgggtttgtg

SEQ ID NO: 323 - DNA, 5907 bp, Artificial Sequence
  chemically treated genomic DNA (Homo sapiens)
tataaattcgatatcgggtcgcgtaagtttttgttttttttttatttgcggatataattatgtatcgtattttaaattagagatagatttttttttgatatatattttattttatttattacgagtatattatacgtatagtagaatagttttatatttgataaattgtataagatgagagtttagatttttgaaaatcggtaggtaagttggtttcgtcgcggtttttcgtttttcggtttcgttgaaggaaattgtttatttaaaatggattttttagttagtttttttcgttgtagggttgaaacgttttcggaatgggaagcgtttttgttggaaatggttggacgttgtagatttcgagttttggatggatgtgaaatatttttttaaggttaagttgttacgtttgcgagttgcgttttttttttttttttttttaattttttcgatgattggaattaaagtgtcggggttttatttggaaggatagagaattttgttcgtaaatgtatttcgtttttttttaaaattagggtgttgtggaaaagaaaggataatagaaacgtagacgcgatggatcgtgaatttttgtttttttttattttttttattttcgaataattagaaattaggaattagagatgtttaaagtttggttttttaacgcggcggtagggcgtattgggttggtgggggcggggtgaggggagaagggagagagcgtagaagcgcggcgggggttcgtttttgcgttttagtttttcgcgttggttcggtaggtttcgatgaggttttcgagggagtgtacgaagtcggatacgttgtagatgtcgtcgatgacgaagatggcgacgtcgaagaagatttggtgttatagtagtttgcgttagagtaggcgtaggtgaaagaggttgggtagtaagaaatagaggtcggcgttcgtgaggttgtcggtgaggtttatgagtagcgcgaagtgcggtatataaatggttatgagtagcgtgaagacgacgagcgcgtagcgtagcgttagtttttaggattttaggcgttcgtcgtcgttgtagtaggtcgggaaaaaggcgcggttgtttttttggaagagcgatttttttagtatttcgatagcggtaaagaatggtagaggataggataatagcgttttggttattagaaagatgttgattacggcgcggatggagtcgggtaggttattcgtgatgatttttttggtttcgtcggtttaggtgaggtaggcgacgagcgcgaagaggtttttgagtacgtaggttgcgatgtgcgtttagtttattatgtagtggaattcgttgggttgttgtatattgttttttagcgaaggtaggaagatttgagacgtgtagttgaatacgatgatgttaatggagatggggaattttttgacgtcgatgtagaatttgatttttttttaggtttagtcgcgcgttcgcgatagatagtaggttatgattaggatattgatgacgaagtgggttagagtgtatagtagattgaatttggatacggttttgaggtttttaaggaaggcgtaaggtagtagtacggtcgtggcgataatggattaggatttttgcgatacgggtagtttcgggaagttgttgtatatgaggttgttatttattattacgtataggatgtacgttattattagttcgatgatttgcgttacgtttattattcggtcgtttagcgttgggaagcgcggggcgtagtaggcgttggttatggttacgtacgagtttcgtacgcgtattatttcgtcgtttttatttttttcgtataggtacgcgatgaggattttgtcggtgtagtagtatataacggcggcgaagatgatgagaaataattttaggtagtcgtcgtgtaggatggcgtagggtaggtttagtacgaatatgttttgtggggcggagaggtaattagacgcggacgtttagcgaatttggtaacggatgaggggttcggggggcgtggtttaacgttgtggttcgaagggggcgttaaggatattgagaattgggtttgagtcgtcggggaggagaggttaagagtaggttgcggggtggatgtaggggaattaatagtgagttcgggtgtcgagttagagatggagagggagggatgtatggacggatttgagaaggaaaggtgcgttaatggttggtgatagcgagagggttagggtgggagagggttgagaatagggagaagttataggagggaagggagatatttcgggatggtttttggggataggaatagaatgaggagttgggggaggagatgagaagggatagaagggagcgtagtcggaaaggggttttaagaaaggtagtgagttgggtttgggttagtggaaagagtgggtacgggatttgtggtggggttggaatggggtacgggagttaaagaggaaaattcgggcgttttaggtttagattagaggaggaaacgttaaaggttgtagttgtgaggcgaaaaggaaatagggtagagagggagaggggttgaaggtggggtaaagtttttgggaggtaagaatagagataatgtgaagacgtttggggagtagcgcgcggggaggaggaagtagggttggaaattgagagttttaggataaggttggagttagagtgaggcgagggcgagatttaaggaaggggattaagtggaggttggggaggtaagtaggaggaggagtttggcgggaaggcgttagggaggttagaaagtcgaatcgagtaagagtttagaattagaagttttagggttaggcggatagggttgtagggtttagaatttatacggggattaagagttaacgaaatttagggtttcggaggtttacgagtttttagttttttgttttggttttttttggggtttattaaacggagttttgaaagacgtttcgggaagtcgcggggtatagcgaaggcgggagtagtttcgggttcgtgatttagtaaggtcgtttcgtcgggtttcggagcggaaagcgttttgggtcgggttatttggtgttcggggttcggtggagttttgtttatttcgatatatggaataatttttgggaggtttttgtttttagaaaatttgtttttcgtggttttagtgatagtgcgttttagggacgtcgcggggttaagttgtaagggatcggggttgtttagagttgaagtttttttcggtttagaaagttgcggtttgttagtttttgttagttcggaggtcgttgttaagattttaaatttgttttttatgtaggagttttgcgtcgtttggtggggagtggggggttaggaataaggggagagggtttagagagtaggggttatttttagtttttggagagggtttcgttagggttatacggggaggagttggtcgtttttttgcggtgtagtcgggatttcgggcgagaggggcgagtttgtgtataggtaatgttggattattgcggattaaatgtgtttgtgtgggagtatgtgtgtgttttcgtgtgtgtatatttgtatgtttttaatagggtcgtatttaagggagtaggttggtttttgtttgtatgtatttgtgtatgtgtgtgtgtatatgtttaaacgaatattcgtgtgtttggtatgtgtaggtatatgtttttgtttgtggagttgtaggggtgtacgtaggtgtatttggggatagtattgtggtttatatatagatatatgtcgtgtgcgtttgtgtttgcgtttttgttcgtgggaaggggggttgtgggtatgtggtgtgtttgtttatatacgtgtgcgtgtttatgcgtgtgtgcggggggaggagatttcgattttagcgattttttttttttttttttttttaaaaatgtagttgtgaattcgttttagagtttaagattaaatcgtgttttttaattttgatttttttttttttttatcgttttttgttttttttttttattttttttatttttgtagtgttttcggataggtgttttagatcgaattttagtttagcggttttgtagttggtgtcgttgggagggagcgtgggttagggcggaaaatatcgtttgggggcgtaggttttcgcgtagggttgggagggatggagaaagggagatttttgggtataggagggggtttttaggtcgagattatcgggcgattgtcgggggtagagttcggtacgttgagttgggaggggggaggataggtagaattgggaatttcgcgtttatttggatggcgttggttacgttttagtttgttttttacgtcgtgattttgggtttgtcgtggttttcgaattcgttattattttttatttggtttttggagtcggagggcggtagaggagtttcgttgtttcgttgataatggatgtttttttcgacgggcgttttagcgttttcgttttcgtagggttttttttcggtttttaggatgtttatttgtaggttttggcggtgtttaaagtcgaggtcgtcgtaatgcgcgaagtttatcgtttttttattcgtggtcgtttgaaaatttattttggcgaatatgtcgtttattttggtttgggatttgttggatacggacgtggttacgttggatagtttgttgcggagtaaggtggttatggcggcggtggggatagcggaaaggatagaaggattcgaggatgcggggaacgcgatgtaagaaggcgagggttggggggcgtaaagtcgttattttcgtttgtttttcgcgcggcgtttcggggttttttggtttatgattttcgtagttggcgttcgaggtttttttagggttggatcgggtaagttggtagtaggtttggcggagcggcggcggcggcggtggtggttagtgtattgcggagttgtcgcggggcgcgagttgggttgcggagggcggcggcggcggcggcggcggtagcggcgttagagtagttacgcgaagttggcgcggcgtttttattcgtgcgtagtttaatgcgttttcgtttttcggaattaggcggtgcgggggtgggggattggagagaggaaatattcggaggtaggggacgtgaggaaggggttaggagaagagaaagggggcgtcgagggatttagacgtgagttgggggtagaagaagggcgtttttgggaaggaggcgggagggagcgcgtgaaagagggagcgtcgagggtaggggaggtgggggggcgaagtgttgtatttttaggggaggtgttaagttcgtattttggttttttttatttcgtcgtcgtagggtgggagggggtcggcgtgggttgatgttcgtagttttttattttcggattattttttttagggttcgggagttgtgtagttttagattttttggttaaggattggtttgggcgtttcgaaagttcgtaggattgagttgttagtttttcgcggagcgggtcgtttataagttagtttttttggtatttatttttcgcgcgtaaattcggtcgcgagttttttttgaaggtagaagtggttggtatggatcgtttttaaggaagtttagttttaggtttagttattcgggtttttttcgttcgtttagggacgtcgcgagggaagcgattgtgcggatcgttcgttattagtcgttttttaaatgcgtgtagaatggaggcgaaaggttggttttttttttttttttcgtttgggggtttggaagaaggtaggattttatgaggatatttttcgttagttttttagcgggtttgcgaatgtttacgtcgagaggggcgtagacggggttaggcgcggaggaaagaagggttcgcggcgttgtaaggcggaggaagtagaggttcgcggtgcgttggggttttgtttcgacggt

SEQ ID NO: 324 - DNA, 3049 bp, Artificial Sequence
  chemically treated genomic DNA (Homo sapiens)
tattcggtgtagttggtttagattttgttttcgttttggtcggtgttgttggtaaaggcgtaggtgttcgtggagttgtacgttattatgtggaagttcgattcggatagtttgtcgaaggtttgttttaggaagttgaatttgaggtaatagcgcgaggtgtagcgtttcgggggacggtcggggtttcggttttcgtttagggtgtttttaaatatttttttggttagcgacgttttttcgtaaacggtgatgcgcgttattcgtcggaatttggcgttcgtttgcgcgtttcgttcgatggtgtaggagtcgcggtagtcgatggtgatgtagttcgagcgtcggttgtcgtttagcgattgggacggcgtgagtagcgggttcgtcgcgttttcggacggattgcggttagttagttttagcgtgggcgacggcgtttcggtagaggcgtttttttgttgttcgggtttcgagtagttaagcggtagtagttcgttatttagcgagttttttttgtgtatttcgcgtcgcgagggcggcggtttcgggtcgggttgttggggcgtttcgaggcggcgtacgagttttggtagttcgaagtattcggtttcgcgttgtagtcggttgcgttcggggaagtagtcgggtagtacgagttgtaagtttcgtaggtaatttaggatgtagcggaagaggaagtcgtttcggtttagaaagaagcggtttttgttgtttcgggttagtttttgcggttgttgttgcgtgaatatgcgttagagtagcgagtcgggtatcgatattatcgtgtagcgtcgggttacgtatatttggttttttacgtttagttttacgatgtcggggaagagcggtggtttcgcggaggacgacgaggagttattgtcgttttcgtcgtcgttttcgttgggtaatttacgtgtgttgttcgttagagttatgatagagaggtggtcgggtcgggatagtggtaggaagtcgcgttgtatttaggagttgtaatcgtttttttcggagtttcggaattcggacgttcgtttagttttgcgtttcgtcgtcgtcgtcgtcgttatcgtcgttatcgttatcgtcgttattttttagagtcgcgcggagtcgagcggtgcgagcgcgtcgttgtgcgtttttttgagttttagtgcgtttcgttcgttttgttcgcgcgttttaggcgagtgtcgggtcgcggttcgcgcgttgtttaagtagagtcgtttgttttggtgtcgtggcgcgtaggaggcgtgggcggcggcggagtttcgtttatcgggcgaggggaggtggggagcggggattcgatttgtattttaaacgcggacgttacgcggggttgttggttttatttcggttcgcgagcgttgggggcgttcggatttttattcgttttttatttattagtttcgtttcgtggtttcgtttaattttttttttttttcgaagaggattcgttcgagatttggcggtttcggaagatagttttttggagggatagttatcgcgtttttttttttttcgttttagttcgtatttaaggattttggaaggaggacgtgaattttcggaagtttgtcgtttcgggagtggaaatgcgtggtcgttttcggttttttcgtttgcggaattgggcgtttttagtagtgtagttgcggtttgttatcgttggttgtcgtgttattgaaagtagagagacgcgaaaaatttggagagacgaaagagtcgttttagttcgagcgagttagattttgtttaagttgttttgtagttagtttggaaaataaataaataaatttagaaataaaaagtaaattttagtgtttcgtagtaggatgttttacgatagtttattttttggttgtagagataaaatgagatgaagttttaaatttgtttttaattgtaatttttttttttcgtagggttttcgaggtattttatttcgaagtgaaggggtaagatttcggaacgttcggttttcgggttttatttagttttcgttgaatcgcgtttttagatttataatagttgtagatttaacgtaatttttaaagttatttttggcgtttgtatgtttatttttttaaaagtttaggcgttttttttttttcgtatgtttcggttatttttcggttttgtttaagttttcgttagttttagaaagggatatttatatatttgaaggtttttgtttggattttattttttaatttttgttgtttatacgtttgtttttttttttcggattgtagtttatagaatcgttttttttttttggaagttttttttggttttttaggtgggtggggtttttggatggttttttatatattgtttgcgttgtttttagtacgttttgaaatgttatatttatgagtgattatttgattattgatttgggtatgaaaataagtaagagtttttgaatgttgtaaaaagagaagagtgtagaggagggtgttaagaaatgattgggttattgaatgttttttgtgtatttgttattatttgtagggtattagggagtgaggaatgtaaaggcgaataatttttaaagcgtttttagtgtagtttaataagtaaagggttaggggtttgcgtagttattatattagtttgaagtatagattatatattaggataaattaggtaagatttttgtttttgataaaatttatttttttgtgtaattatttagtgagttttatagtttttttatagataaatgttatttttattttgaaatgtttatatttgtttaataattatcgcgtttatgttagtgtgttgaaatgagattaatttttaaattagttattttaattgtaagtatagattttgatattgaatgtattttaatattttttttttgttgttgttttgttttttgggataaataatagataatataaaatttttaagttttagtgtaggatttcgaggtggttgtgttattaggcgttatattagtgttagagatttgataaaattagttttttttttataaatttaa

SEQ ID NO: 325 - DNA, 3049 bp, Artificial Sequence
  chemically treated genomic DNA (Homo sapiens)
ttggatttgtagaaaagaggttggttttgttaggtttttgatattaatataacgtttagtagtataattatttcgaaattttgtattgggatttggaagttttgtgttatttattatttattttaaagaatagaataataataaaaaaagaatgttgaaatatatttagtattaaaatttgtatttgtaattaagataattggtttgggggttgattttattttagtatattgatatgagcgcggtaattgttgagtagatataaatattttaaaataaaaatgatatttatttgtgaggagattgtgaagtttattgggtagttatatagaaggataaattttattaagaataaagattttgtttgatttattttgatgtgtggtttatattttaaattgatgtgataattgcgtagatttttgattttttgtttattgggttatattgaaagcgttttggagattattcgtttttgtattttttattttttggtgttttgtaaataatagtaggtatataagaaatatttagtgatttaattattttttgatatttttttttgtatttttttttttttgtagtatttaggagtttttatttatttttatatttaaattagtgattagataattatttataaatatgatattttagaacgtgttgggagtagcgtagatagtgtgtagggagttatttagaggttttatttatttgggaagttagggaaagtttttagggggagggggcggttttgtgggttgtagttcgagggggaaaagtaaacgtgtaggtagtaggagttgagagatgggatttagataagggtttttagatatataaatatttttttttgagattgacgggaatttggatagggtcgaagagtgatcgaggtatgcgggagagaaggggcgtttggatttttggaaggataaatatgtaggcgttaaaggtggttttaaaaattacgttagatttgtaattgttgtgagtttaagggcgcgatttaacgaaggttgaatgggattcggagatcgaacgtttcggagttttatttttttatttcgaagtgaagtgtttcgaaggttttgcgggaagagggaattgtaattaagagtagatttgaagttttattttattttgtttttgtagttagaaaataaattatcgtaaagtattttattgcgggatattgaggtttgttttttgtttttaggtttatttatttattttttaggttggttgtaaggtaatttgaataaaatttggttcgttcggattggggcggttttttcgtttttttaggtttttcgcgtttttttatttttagtgatacgataattaacgatggtaggtcgtagttgtattgttggaagcgtttagtttcgtaggcgggagggtcggaggcggttacgtatttttattttcggggcgataggttttcgaaagtttacgttttttttttagagtttttgggtgcgggttggggcgagaggggagggggcgcggtgattgtttttttaaggagttgtttttcgaagtcgttaagtttcgggcgggtttttttcggaagagggagaaagttgggcgggattacggggcggggttggtgggtggggagcgggtgggagttcgggcgtttttagcgttcgcgagtcggggtggagttagtagtttcgcgtggcgttcgcgtttaagatgtaaatcgagttttcgttttttattttttttcgttcggtaagcgaggtttcgtcgtcgtttacgttttttgcgcgttacggtattagagtaggcggttttatttaagtagcgcgcgggtcgcgattcggtattcgtttggagcgcgcgggtaaggcgggcggagcgtattggaatttaagggggcgtatagcggcgcgttcgtatcgttcggtttcgcgcggttttaggaggtggcggcggtggcggtggcggcggtggcggcggcggcggcggcggggcgtagggttgagcgagcgttcgggtttcggggtttcggggaaggcggttgtagtttttgagtgtagcgcggttttttgttattgtttcggttcggttatttttttgttatggttttggcggatagtatacgtggattatttaacgggggcggcggcgggggcggtagtggtttttcgtcgtttttcgcggagttatcgttttttttcgatatcgtggagttgaacgtggggggttaggtgtacgtgattcggcgttgtacggtggtgtcggtgttcgattcgttgttttggcgtatgtttacgtagtagtagtcgtaggagttggttcgggatagtaaaggtcgtttttttttggatcgggacggttttttttttcgttatattttggattatttgcgggatttgtagttcgtgttgttcgattattttttcgagcgtagtcggttgtagcgcgaggtcgagtatttcgagttgttagagttcgtgcgtcgtttcggggcgttttagtagttcggttcggggtcgtcgttttcgcggcgcggggtgtataaggagggttcgttgggtgacgagttgttgtcgtttggttattcggagttcgaatagtaggagggcgtttttgtcggggcgtcgtcgtttacgttggagttggttagtcgtagttcgttcgggggcgcggcgggttcgttgtttacgtcgttttagtcgttggacggtagtcggcgttcgggttatattattatcggttatcgcggtttttatattatcgggcgggacgcgtaggcggacgttaagtttcggcgagtggcgcgtattatcgtttgcggaaagacgtcgttggttaaggaggtgtttggggatattttgaacgaaagtcgggatttcgatcgtttttcggagcgttatatttcgcgttattattttaagtttaattttttggagtaggttttcgataagttgttcgagtcgggtttttatatggtggcgtgtagttttacgggtatttgcgtttttgttagtagtatcgattagagcgaggataagatttggattagttatatcgagta

SEQ ID NO: 326 - DNA, 4721 bp, Artificial Sequence
  chemically treated genomic DNA (Homo sapiens)
acgtgaagtttagtatttttttaagtttttgtttatatataaaaagttacgttttagaggttttatttttaatttaagataagtaggatattttaaaaattatttatttattagttggtttgagaaaatttatcgggtatttggagtaaggaggggggggagattttgaaattaaaaaagtaagagaaaataaaggtttagttatgagaagagagatagaaatttatgataatagaggtatttttttagtttaattgtttgttttagttgtgggggttggaggtagggttcgaggcggtgattgttttgatatttagttgttagataaataaaagaggtcgtttggcgttagtttcggcgtttcgtttttttacgtttgcggtcgtagtcgtcgcgttcggttggttcggttggaaattatcggttcggtcggagtcgcgtattttatagtttatagggcggggggcgattatgtttttttttcgttttcggattttagatttagtttttagtaatttcggtttttcgtttcggttcgttttttaggcgtgtaatttatttttgttttcgtcggttcgttcggtattcgcgcgggggatacggggttgtttatttttagcgtattcgggagatgtattttaagcgtgttggggaacgtgggggatttgcgggcgttcggggtgaatttttatattatattttgtgtatagagacgtagagtaaaggaaggaatggagaaagttgagaggataaaaggaaaggagttttagggttttagtcgagaagtttaggttttagcgtagtaagaggcgataacgttattgaggcgtcggggttttattaatttatagatttatttgtgcggaaggaaggaaaaagtaggggatatttaattttttttgtttgtttgtttttttgtattttggggttggtagagttgaaaggagatagatatttagttcggttttttatttaattttttttgttttaaaattttaaaggtgcgcggttacgatagtatttgggttattggtgttcgacgtgatttttcgtatttattaaaggagtaaatacggagattttttagtttttatagtacgttttttttagttttttttggcgggtttggattaaatttaattcggttatatattttaacgttttttcgggtgcggggaggcgtgatttttttatttttttttgtatttttttgttgattcggaaatgaaggcgtttaatttttaatcgtagattgtaggagtagtgttcgtagattttttcggggtaatataggagaaaatttggaagggaatttttagggaatgttttttgagtttttttttgttttttttttatttttagtttttagtttttttttaggagggtatgtatatttttttaggagggtatgtatatttttttaggagggtatgtatattttttttggagggatggttgtataaacgtattgttttaggggttttttttttagtattggcgtttcggaaaatgttgggggtagggggataattttttatttagttcgtagagtcggttaaggtgatgggggttgtagtatattagttcggggttgattttttcgtaagatttatagtaatatagttttttgattttcgaggaatgtttgagattcggttatttgaatattttgtatagtaggagggggagcgagtaggacgagggcggttgcgtaggttgcgcgtcggcgggcgttttcgggtttagtttgtagtttaggcggtcgggtagtaggaggtacgcggtgcgcgtttcgtcgcgggattttacggtttggagtagtagttttagttgtcgtttttttagttttttgagtatcgagtgcgtgagcgtttttagattcgtttcggcgttttcggtcgcgtcggcgttcgcggttggcgggtggggatggtggtgatttttggtatttcgtatcgttttgtttaggtagtatttagttttgttcgggtcgtcgttatcggttttatgcgttcggttgttcgtcgtttttttttttcgtagttcgtttttttttttatttttttttgcgttttttttttcgttttcgtcgtcgggcgtacggtttttttagagacgtcggacgagcgtagatcgtttggttttgaatatgcggggcgaggaggcgaggagaaaagtcgtttgtttgttaaggagcgaatatgattttcgtatattatgaagaagtcgggcgtcgagttggggtagtaggcgtaggcgatagtagtagtagtaggggttcgggtaggagcggcggcggttcgaggggcgtttcgtggtatgcgttagtttttcggaggtcggggcgcgcgcgggggttcgggggcgttcgtcggggatcgggggtttgcgtttcggttgttttatttcgcgcggttcgcgttttgcgcggtttttcggtttcggcgcgtttcggaggaattcggtcgtcgtttttttggggacggtcgagtttgttttcgtcggcgtttttttaaaaagaggttttttcgtagtggttttcgaatgtcgggttcgttagtttcggttttttatatggaaggttcgcgggggtaaaaaacgaaaggcgttcggttgggttgttggaagaaggaaaaagttttttttttttttgttaagtaatttaatttgggggtggggagaagtaggtaattaaaaaaaaaaaagtaagcgatttattttttttttttatatttttagtaatcggattttttcgaatttcgcgtatacgaagatttaggggagggggtcgagtggattttatttcgtatgagacgtttggtaaaataagaaggttttcgtaaaatttaataattaaatatgtaaagttttaaatgaaaattattattttttcgaattttagaggtttgggggcgttcggttggaattggggtttaaaaaaagaaaatgtttataaagtataataagatgtttgatgggtggaaaaatgtatttacgagttatattttttcgtttttttgtaaagtttcgttggttttttttttttttttttttgttaaaaaaaaaaaaaaaaatcgtgtatttttttaatttatagaaagttttggttagatcgttttaattttgcgtatttgggtggtttaggggagtttttggtttttttttttgcgtttttgggggtttaggttttcggcggggattttttcgaggttggcgcgggcgtaggggtagaagatgttgcggcggcggttgagttcggcggggttgatagcgcgggggagggtggcgcggcggcggcggagggttttagacgggtcgcgcgttttcgtttttttcgggtataagttgtttgttagtgtaggggtcgtcgatgtttttttttttggtcgcggttggtcgtcgaggtttttcgtatgggttgttcgtttcgatttagttgcggcggtaggaggtttcggtgttttttcggcgttttttttttcgagatttttttcgtcgcgttcgggagtttttttgttttcggttcgtttttttttggcgtttcggtttttttgtcgtcgttaggggttcgtcgcgtcgtatttaggggtttaggggtcgggcgttcggcggttcggcgtcgacggattggttttgtttcgggtagttttttttcgcgcggcgagcggatcgagtacggcgttcggttggttcggttggcgcggttcggggataggatttttcgtgcgtcgagtagtaagcgagtgtgttcggggtttatcgtttttcgtaaggtttttcgttttcgttttttttttttttttttttttttttttttttttttcgtttttagtcgtcgtagtcgcgtcgtttttttttcgttttttcgtatttttttttcggttttttgttcggttggttttattgcgtagtggcgcgttcggtttcggtttcgttacgtggtcgtttagatattttgtcgttttaaaaaaaaaaaaaaagcgattgtgtttcgtaaataatagatcgggtttttaaaagttatttttttttttaatttttcgttatcgttattttttttcgggtttgtagagggggtatcgatggaggggagagagataggtggggggtagagaagtttttagaatggattgagtttcggtcggagttatggagaaattggaaaagtagggagtatcgagcgggtttcgtcgcgagttttggagttgagcgagcgggtcggtggttcgatttcgattcggttgggtttcgcggtggttatttcgcgcgcgttcgttttagcgttttatttattggttttgttttaaaggttttggcggtggattttttggtcgcgttcgagggtaaggggaggagagcgttgtttcggtttaaaagatatttatatcggattggatcgaggttttgggaagtgtgcgttgaggggaatagtcgtcgagggcggggaggcggcgtgaatatgattttagcggcggtcgcgcgttttttttcgtttttttagtttcgggtttcggtttttaggattgtttggagaagtgtgttttgtgtatagttttggaatgtatttggtcggttgacgagttgtgaggggtagtatttcggcgggagaaggggagcgggggtgggggttcgtttgcgcgtcgcgggtaggttttttttcgggttcggaagattttcgttattcgttattttgtttttcggcgcgggaaggttatttagcg

SEQ ID NO: 327 - DNA, 4721 bp, Artificial Sequence
  chemically treated genomic DNA (Homo sapiens)
cgttgggtaattttttcgcgtcgggaggtagggtggcgggtggcggaggtttttcgggttcgggaggaaatttgttcgcggcgcgtaggcgagtttttattttcgttttttttttttcgtcgggatgttgttttttatagttcgttagtcggttaaatgtattttagagttgtgtataagatatatttttttaggtagttttagaaatcggagttcggagttgagagggcgggagggagcgcgcggtcgtcgttgaggttatatttacgtcgttttttcgttttcggcggttgttttttttagcgtatattttttagggtttcggtttagttcggtataaatgttttttaaatcgagatagcgtttttttttttttgttttcgggcgcggttaagggatttatcgttagggtttttaaaataaaattaatgaatgaagcgttagggcgagcgcgcgcgagatggttatcgcgaaatttagtcgggtcgaaatcgggttatcgattcgttcgtttagttttaaaattcgcggcgaagttcgttcggtgttttttgtttttttaatttttttatggtttcggtcggggtttaatttattttgggagtttttttgttttttatttattttttttttttttatcggtattttttttatagattcgggagggggtggcggtggcggggggttggggggagaaatagtttttagaaattcgatttgttgtttgcgaaatataatcgttttttttttttttttaaagcgatagggtgtttagacggttacgtgacgaggtcggagtcgggcgcgttattgcgtagtggaattagtcgagtagagggtcggagggggggtgcgggggggcggggaggaggcggcgcggttgcggcggttgggggcgggggagggaagggggaggaagggggagggaagggggcgggggcgggaggttttgcgggaggcggtgagtttcgggtatattcgtttgttgttcggcgtacggaagattttgttttcgagtcgcgttagtcgagttagtcgggcgtcgtgttcggttcgttcgtcgcgcgggagagagttgttcgagatagagttagttcgtcggcgtcgagtcgtcgagcgttcggtttttgagtttttgagtgcggcgcggcgagtttttggcggcggtagaaggatcggagcgttaggagagggcggatcggggataaggaggttttcgggcgcgacgaggagagtttcggaggaggaggcgtcgagaggatatcggggttttttgtcgtcgtagttgggtcgaggcgagtagtttatgcggggagtttcggcggttagtcgcggttaggggaagggatatcggcggtttttgtattagtaagtagtttgtgttcggggggggcgagaacgcgcgattcgtttggggtttttcgtcgtcgtcgcgttattttttttcgcgttgttagtttcgtcgggtttagtcgtcgtcgtagtattttttgtttttgcgttcgcgttagtttcgaggaagttttcgtcgaggatttgggtttttaggagcgtagggggaaagattagagatttttttaaattatttagatgcgtaggattgaagcggtttagttaaagttttttgtggattaaaaaaatatacgatttttttttttttttttggtagaagaaaaggagaggaagattagcggggttttgtaaggaaacggggggatgtaattcgtggatatatttttttatttattaaatattttgttatattttgtaaatattttttttttttaaattttagttttagtcggacgtttttagatttttgaggttcgaggaggtggtggtttttatttggggttttgtatatttggttgttaggttttgcgagagtttttttattttgttagacgttttatgcggggtgaagtttattcggtttttttttttgagttttcgtgtgcgcggaattcgaggagattcggttattaaggatatagaggaaaaaaataaatcgtttgtttttttttttttaattgtttgtttttttttatttttaaattaagttgtttagtaagggggaaagaggtttttttttttttttaatagtttagtcgaacgtttttcgttttttgttttcgcggattttttatgtaggaagtcgaggttggcgagttcgatattcgggagttattgcgggggggtttttttttggggaggcgtcgacgggggtaggttcggtcgtttttagggaagcggcggtcgggttttttcggggcgcgtcggggtcggagagtcgcgtagggcgcgggtcgcgcggggtggggtagtcggagcgtaggttttcgattttcggcgggcgttttcgggttttcgcgcgcgtttcggttttcgggagattggcgtatgttacggagcgtttttcgggtcgtcgtcgtttttgttcgggtttttgttgttgttgttgtcgtttgcgtttgttgttttaattcggcgttcgatttttttatggtgtgcggaggttatgttcgttttttagtaggtaaacgattttttttttcgttttttcgtttcgtatgtttaggattaaacgatttgcgttcgttcggcgtttttggaggagtcgtgcgttcggcggcgaggacgaggaggagggcgtagggggaggtggaggaggaggcgagttgcggggagaaggggcgacggatagtcgagcgtatggggtcggtggcggcggttcgggtagggttggatgttgtttgggtaaggcggtgcgaggtgttaaaggttattattatttttattcgttagtcgcgggcgtcggcgcggtcgggggcgtcgaggcggatttgaaggcgtttacgtattcggtgtttaagaaattgaaggagcggtagttggagttgttgttttaggtcgtggagtttcgcggcgggacgcgtatcgcgtgttttttgttgttcggtcgtttggattgtaggttgggttcgggggcgttcgtcggcgcgtagtttgcgtagtcgttttcgttttattcgtttttttttttgttgtgtaaagtgtttaggtggtcggattttaggtatttttcggaagttaagaggttgtgttgttgtgaattttacgggaagattaatttcgagttggtgtgttgtaatttttattattttagtcgattttgcgaattaggtgagaagttgtttttttatttttaatatttttcggagcgttagtgttggaagaaaagtttttagggtagtgcgtttgtgtagttatttttttagggggagtgtgtatatttttttgggagagtgtgtatatttttttgggagagtgtgtatatttttttgggaagagattgggggttgaaagtagagaagggataaggggaaatttaaagggtattttttgggggtttttttttaggtttttttttgtgttgtttcgaaggggtttacgggtattgtttttgtagtttgcggttaaaaattagacgtttttattttcggattaataagggggtgtagagggaggtgggggggttacgttttttcgtattcggaaagacgttgaggtgtgtggtcgagttggatttggtttaggttcgttaaggaaggttgggagaggcgtgttataaaggttggaaggttttcgtatttatttttttagtaaatacggagaattacgtcgaatattagtggtttagatattgtcgtggtcgcgtatttttggagttttggggtaaagagagttggatggaaggtcgaattgggtatttgtttttttttaattttgttagttttagggtgtagaggaataaataggtaggagaagttgggtgttttttatttttttttttttttcgtatagataagtttgtagattagtggggtttcggcgttttagtgacgttgtcgttttttattgcgttggggtttgggtttttcggttgagattttgaaatttttttttttttatttttttagttttttttatttttttttttattttacgtttttgtatatagagtgtgatgtgagggtttatttcgggcgttcgtagattttttacgttttttagtacgtttgggatgtatttttcgagtgcgttaggaatgggtagtttcgtgtttttcgcgcgagtgtcgagcggatcggcgggggtagaggtgaattgtacgtttggggggcgggtcggggcggggagtcgaggttgttgggagttgggtttggagttcgaggacggggagggggtatggtcgtttttcgttttgtgaattgtgaagtgcgcggtttcggtcgagtcggtggtttttagtcgggttagtcgagcgcggcggttgcggtcgtagacgtggaggagcggagcgtcgaggttggcgttaggcggttttttttgtttatttgatagttaaatattaaggtaattatcgtttcgggttttgtttttaatttttatagttaagataaatagttgggttaaaagaatgtttttgttattataagtttttatttttttttttatggttgggtttttatttttttttgtttttttaattttagagttttttttttttttttattttagatattcgatggatttttttaaattaattggtgagtagatgatttttaaaatattttgtttattttaagttagaaatagagtttttagaacgtggttttttgtgtgtaggtaaaggtttggggaggtgttgggttttacgt

SEQ ID NO: 328 - DNA, 2146 bp, Artificial Sequence
  chemically treated genomic DNA (Homo sapiens)
aggtttgtgtattcgggtagtttttggttgttgttgttaggttgttttagtcggtcgttgttgtcgcggcgattggcgataagttattagttatttacgatggtttaaggaggcgaagaagagtaagcgattaggatattaaaacggttatcggaggtaggtttttagtatattagtcggtcgagggtcgagtttcgcgggcggtagtaagttttgggagttggaggtaatcgaattaaaaggcgttttagaaatttcgtttcgggattttgtttagtagggtttcgggttggagggcgtcgaggtttggcggacgggatagtgggaagagagaaaggtgttaaggggatttaagatttgggatttagaataagagggggtggggaataattttattaagttaaatagatttattttttttgtttttatgttggaaaaatttaggttttatatggtttttcgggagggagggagggagacggtggttgtcggtttttttttagggtttcgttggagaagggagatgagtttttcgtaagaattttattttgttaagtatattttagggagagttaggagagtaataatagttggggaagtttcgagagaggggataggttattttttaggatttaaaaaaattaatgggagaaagaaaaataataagaaaggaagatagagaaaggttgagatttttttagtagtcgcggagaaaatttagttttggatttggttgttgaaagaaaagagagagaggagaaaagaggagagaagtaggaagatagaggggagagagagagggagagagagagagagagagagagggagagagagggagggagggagggagggagagagagagtcgttgcgtggaaggaagtttaaagtttgtgaattttttttgaatcgagattggagttatatgggttataaattattgagatatatttttcgttatttataaattgatagtttattttagtttagtttattttagttatcgacgaggggagaataggtagatataatatatatttatatcgagttttagagcgagcggtaggcgataaattttttttttttgaaggtaaaggaaaaaaagattattgtttaaagttgcgtcgtttttcgttttttcgttttcgtttcgtaaagttatttcggttggggagttcgaggggtagatcggttagaggagtcgcgcggcgttcgttttaatttattcggtttaggagtaggggtgcgtaggagggagggggtgggggagcgggaaaaaaaatagaagatcgaaaggtgtcgggcggtttagttcgttagaatttagtttcgggttttagtagggttaagtcgttatagtgtggttgttttataagattggtacgttttatttttcgtaataatggtttttgtttttgtatagggaaaaaaaattatatagatatatatatatatttatttatatataagtttatatttttttatttttttttttttagtaagtttagatgtttgataaggagggaaggtgatggtggtgatggggaaggggggaaattttaaaatattcgtttttttaaaaaaagagtaagaagaaaagaaggagggtttttttttttttttttaaagaataggtaaaaatttaaatttagattggagggatagggaggaagaggtgagtaaaggtaaggaagggcggtgaagtttatagttttttttatattttattagtgaattattatgttaatatgagaagtagtatttggaggttgagttaaaggtaggtttggttcgggggtgagggtgtcgggtgtttttttgtatttattcgtaattggaatattaggatttttttagaaagtagttttgggtttttaatttttatattttggttttttttttttgagtttttagtttcggttttttttttttattatattttttttattttttttaaatttttttttagtttttaggtttagtttttaattaagggagagggaaagattagaatttaaaaaaaaaataaaaaaaaaatatttttttttttttttttttttgagaatagataataagcggtgagtgatgattttaaaaattttgaatattttgtagggggaggagggttgagaaaagggtgataaaagga

SEQ ID NO: 329 - DNA, 2146 bp, Artificial Sequence
  chemically treated genomic DNA (Homo sapiens)
tttttttgttattttttttttaatttttttttttttgtaagatgtttagagtttttaaaattattatttatcgtttgttgtttgtttttaaaaagaaaaagggggaggggtgttttttttttgttttttttttaagttttggttttttttttttttttggttagagattgggtttggagattggagggagatttgggaggaatagagagggtgtagtggagggaagaagtcggggttggagatttagaaggagggagttagagtgtgagggttggagatttagaattattttttaaaaaagttttggtgttttaattgcgaatgagtgtagaggggtattcggtatttttattttcgggttaggtttgtttttgatttagtttttaaatattattttttatattagtataatagtttattagtggggtatggggggagttgtgaattttatcgtttttttttgtttttgtttatttttttttttttgtttttttaatttagatttaaatttttatttgttttttaaggaaaaaaaaaaaaatttttttttttttttttttattttttttttggggaggcgggtattttaaaatttttttttttttttattattattattattttttttttttattaggtatttaagtttgttaaagggggagaggtgggggggtgtgagtttgtgtgtgagtgagtgtgtgtgtgtgtttgtgtggttttttttttttgtgtaaaagtagaggttattgttacggagagtagggcgtattagttttatagggtaattatattgtggcggtttagttttgttggagttcggagttggattttggcgagttgagtcgttcggtatttttcggttttttattttttttttcgtttttttatttttttttttttgcgtatttttgtttttaagtcgagtgaattgaagcggacgtcgcgcggtttttttggtcggtttgtttttcgggttttttagtcggggtggttttgcggggcgggggcgggggggcggggggcgacgtagttttaaatagtggttttttttttttttgtttttaaggaggggagatttgtcgtttgtcgttcgttttggggttcgatgtgaatatatattatgtttgtttgtttttttttcgtcggtggttaaggtaagttggattgaaataggttattagtttgtgaatggcggagagtatgttttaatgatttatggtttatatgattttaatttcggtttaagaagagtttataagttttaagtttttttttacgtagcgatttttttttttttttttttttttttttttttttttttttttttttttttttttttttttttttttttttttttttttttgtttttttgttttttttttttttttttttttttttttttttttttagtagttagatttagggttgaatttttttcgcggttgttaagaaagttttaatttttttttgttttttttttttgttattttttttttttttattaatttttttaagttttggaagatggtttattttttttttcggggtttttttagttattgttatttttttggttttttttggggtgtgtttggtaaggtggggtttttgcggggggtttattttttttttttagcgagattttggggggaagtcggtagttatcgtttttttttttttttttcgaggagttatatggaatttgaatttttttaatatggaggtaagggaaatagatttgtttggtttggtagagttgttttttatttttttttgttttggattttagattttgggtttttttagtatttttttttttttttattgtttcgttcgttaggtttcggcgttttttaattcggagttttgttgagtaaagtttcgaagcggagtttttaaggcgttttttaattcggttatttttagtttttaaaatttgttgtcgttcgcggggttcggttttcggtcggttggtgtgttgggaatttgttttcgataatcgttttggtgttttgatcgtttgttttttttcgtttttttgggttatcgtaggtggttggtagtttgtcgttagtcgtcgcggtagtagcgatcggttgaggtagtttggtagtagtagttagggattattcgggtgtataaattt

SEQ ID NO: 330 - DNA, 2427 bp, Artificial Sequence
  chemically treated genomic DNA (Homo sapiens)
ttttttggggtttgggtggggagttttttttagtaataaatatgagagggatagagaatgttagagagttttttgttgggattgggatggttggagggtattatagtattggtttcgaatattgaacggagaattgttatgtaataagaatttgggtatattagatttttgtaggtattttcgggatttatagatcgtatattcgatgggcgttcgtaggacgtgaatggtatttcggtaacgttaagttttattttagagttatagggtgttttttattaggttacggagttttttgggttatattgtttagggatattttgtaggggaggaaattgttttttttttttttttatgatttttgtatgaattttaattaagaaatattatatttagaattatagtatttatagtgatagtttttagaagattgtaatagtttttttgttatttaaggggtatagacggtgtagttgtttatttgaatgattttttaaatgagtgattattattattttaatttttttagttgtagttttgttataggttattgattataagtgttggtaaagaaattgtttttttaagtattttggcgttttttggagtgacggttatttttagtagttaaattgtattatatttttattttaattttgtgattgttttagtatttttaaaaatataaatcgattttttaggaaaaaataaaaaaacgaaaaaattttttattttttttaaatttttggtttaggtttatttgattttttgtaagttgttttttagggtaggttttagttttatttgttgcgtttgtttttttattttattttagttgagtaggtagagtttgtttttggaaacggttcggttatttgggagggaataaataggtattgtttagattcggagttgtaggtagggtttagtaggattttaggcgggtatataggggtttatttggagggatttgaggggtataggttatagtcgggagagtttcgggtaggtatataggggtttatttggagggatttgaggggtataggttatagttaggagagtatagataagaggttttcgaggttattagggtcgatttttattttattttaaggattagggacgtaaaaggattttaataaagacggttatattatttgttgtagaatgagtataaatgttttttttagttttcgaggtcggtattggtttcgttgatttttttaattttgttatttgtgtagtaggcggtaatagggataggtagacgatatagttggggttagaggacgacgtagagagatttatattagagattttcggggagtgatagagttttcgttttaattttagtgagtgggataggttgagtggggattgagtacgtttagggttagagtgggagggttagtcgtgtcggtttttaaagaggatttcgggaaataaatatttttttattcggtaaggataaattaagtaattgtcgagataggtgttcgcgttttaatttaaggttgtttagatagataagcgtttatcgtcgtattgttttaatagttgttgagatatatttttgtagtcgttttagttagagttagggaggttttgggagaatggttttgtttgtttttagtttttttttatttttaggagtttttttttttttttattttaattgatattttcgggttttttatttgtttagagtttgtttagtggggtatttaacggtggataggtgagagaggtgaggggttgggttgttatcgcggttaagggagttatggttttttagtttgaacggtttttgttcgaaattaggatataaatatagtattatatatagtagaaatagtttagaaaggttttagtttagatggtattggaataaatagttttttttaagttattttaaaatgaaagttttgggttatttatttttaaagaggattttaggatagttttaggagtttttttatgatatattttatggagaatgtttggttgttgcgtttatttaatgtagttattgaatagaaatttaagagcgttgttttgttagtttgaaattttttttatgtttttagttattagggttttagttaggttagaaataatagaggtagtaggtttttttagaatagtagtgtgaggttttttatagattttttttagtaatattattgttagtggtgaatattataaatagtatttatttaaagtttttaacgtgttttagggatatacggcgaatggagaaacgtttatttaagaaaattatttaagtggtagtaggaatagtaatttcgtgatatttgggttataatttgtttttttatttttatgtgataaaagttttatttttagtaggtaatcgagaagataggtttttttttttttagtgttattgtagtagtggcgggt

SEQ ID NO: 331 - DNA, 2427 bp, Artificial Sequence
  chemically treated genomic DNA (Homo sapiens)
gttcgttattgttgtagtggtattgggggagagggagtttgttttttcggttgtttgttgggagtagagtttttgttatatggggatggggaagtaggttgtggtttaagtgttacgaagttgttgtttttgttgttatttaggtggtttttttggataagcgtttttttattcgtcgtgtgtttttaagatacgttagggattttaagtgggtgttgtttgtaatgtttattattggtagtgatgttgttggagagggtttgtggagagttttatattgttgttttggaagagtttattgtttttgttgtttttgatttggttgaaattttgatggttggaagtatgaagaaggttttaggttggtagagtaacgtttttgagtttttgtttaatggttatattgagtaaacgtagtagttaagtattttttatggggtgtgttatggaggaatttttggaattgttttgaagttttttttagaagtaggtagtttaaaatttttattttaaagtgatttggggaaaattgtttattttagtgttatttgggttggggtttttttgggttgtttttgttgtgtatgatgttgtgtttgtgttttgatttcgggtagaagtcgtttaggttggagggttatggtttttttggtcgcggtgatagtttagttttttattttttttatttgtttatcgttgggtgttttattgagtagattttgagtaaatgaggggttcggagatgttagttagggtaaaggggggaaaaggtttttgaagatgagaggaggttgagagtaggtaaggttatttttttagggtttttttggttttagttgaggcggttgtaggaatgtgttttagtagttgttagggtagtgcggcggtgagcgtttgtttgtttgggtagttttgggttgggacgcggatatttgtttcggtagttgtttgatttgtttttgtcgagtgggagggtgtttgtttttcggggttttttttggaagtcggtacggttggtttttttattttggttttagacgtgtttagtttttatttagtttgttttatttattggggttggggcgggggttttgttatttttcgagggtttttgatgtgggtttttttgcgtcgttttttggttttagttgtgtcgtttgtttgtttttgttgtcgtttgttgtataggtggtaggattagaggggttagcgaggttagtgtcggtttcgaaggttaagaagggtatttatatttattttgtagtaggtggtgtggtcgtttttgttaaaatttttttgcgtttttgatttttaggataaagtaaaagtcggttttggtggtttcgggggttttttgtttgtgtttttttgattgtagtttgtgttttttaggtttttttagatgagtttttgtgtgtttgttcggggttttttcgattgtagtttgtgttttttaggtttttttagatgagtttttgtgtgttcgtttggggttttgttgagttttgtttgtagtttcgggtttgggtagtgtttgtttgtttttttttaggtggtcgggtcgtttttaaggataggttttgtttgtttagttggagtggggtggagaagtagacgtagtaggtagggttgggatttgttttgaagggtagtttgtaggaggttaggtgagtttggattagggatttgaaggaagtgagaagttttttcgtttttttgtttttttttggagagtcgatttgtatttttaaaaatattgaaatagttatagagttaaagtgggagtatgatatagtttagttgttgggaatggtcgttattttagggagcgttaaagtgtttaaaagaatagtttttttgttaatatttgtggttagtaatttgtaatagagttataattaggaaaattagagtggtggtagttatttatttaagaagttatttaggtaagtagttgtatcgtttgtattttttaagtagtaaagaagttgttatagttttttgaaaattattattgtgagtgttataattttgaatgtaatgttttttaattagaatttatataagaattatgaaaaaaaaaaaagagtaatttttttttttgtagaatgtttttgagtagtgtggtttaggaggtttcgtagtttggtgaaaggtattttgtggttttggggtggagtttggcgttatcgagatgttatttacgttttgcgagcgtttatcgagtgtgcgatttgtgggtttcgagggtgtttgtaggggtttgatgtgtttaggtttttgttgtatggtagtttttcgtttagtgttcgaaattagtgttgtgatgttttttagttattttagttttaataggaagttttttggtattttttgttttttttatgtttattattggaaagggttttttatttagattttaggaaa

SEQ ID NO: 332 - DNA, 3015 bp, Artificial Sequence
  chemically treated genomic DNA (Homo sapiens)
tttttttttttttttggtagaattgttcgatggttttgattatgtttaggtttatttcgatgtagtagtaggtatggtcggttcggggttcgggatagttcgttacgtagtagtaatagttttttagggtgttgatttttttatatttggtttttttatataggcggtcgaagcgatcgaatagatcgtttaggagatttattagggcgtgggtagatttgttggtatttattttggtgaagtttacgatatttgtaaataaaatattgattttttcgatttgttgtattttaaaagggcggaaggttataggagttttttggatggaagattttttttttttgtttttggggttcgaggtggtatgttttttgatagaatttttattttttttatttttttgttttattaagttatcggttatgatttttggtattacggaatgaattattttttttttgagggttttttttatttttaggtttttttcgtgtataatggattgttttattttgaggaaggtgtttttggattttatttgggatatgacgaataggtggatttcgatggcgtggatgtagtcgtggagtagttttttgtttagtagtttttagtgtagggtttcggtttcgggcgaggggaagtaggttttatttcggaaatggtagttaaaggtttcgaaaaggatagagtaggttatttttagatataaatttaggtataaaggtaagtgtatgacggtatagagtaaaaagagtatttcgatgtatatggagaagttttttatttgagataagtaagtatttgtgggtcggttgtggtcgtaaggttggagttgtcgtcgcgttttgagataggcgttaagatttggaattgcgtagttagggttagggcgaatattagtagggtgagagttagcgaggtttacgcgtaatgtcgggcgtatagtttggtgaaggtaaatagaaagaagtttatatatattaggaggaagtatagcgcgggggcgattatgacgattagtttggattttatgtggatcgtaaaatagatgttttatagaaggtaggcgaagtcgatgtagaagagcgtatatcggaatcggcgttgggtttgcgggaagtagcgttttaggtaggttttttttaggtttatcgagtcgaatttggggttttattagcggttggaggttttttcgaatagttggggtagttttttttgtttgcgtagtcggttttcgtcgtttattcgtcgggggacgttttcggagtttttagagttgttgtagttagaggagatgttgtatttgtagtgtttggggtggttgttggaggatagttgtttggggttgattttgacgcgtacgttgttgttgttttcgttggagtcgtagtttatttcggtgttgtggtgatgtagtagttgttggtggggtggggaagttatgttgtcgagtttcggggtttgtttcggtcggggttattagtatttgttagtaaaacggggagagttagcggcgtttttatttaggtatgtacgtttagaggttcgggatttgtttttgttttaaggggcggttttagtacgcgatttggataggtattatttgtttttgtggttttcggtttagcggtgtttttatcgtttttatcgtttttattttcgaggcgtacgagaatcgttcgggacggatttagaacgttcgggggttttcgtcgcgtggtcgtcgtggtttcgggatcgttttgttcgttcgtttttcgcgtttttcgtttcgagggtggttttcgcgtcgcgcggtttttttttttcgcgcgttcgttttttttagttgcggtttcggagggaagtttagattttgagcgtttttagtttcgcgagtcgtttgcgtataaataatttcgttggcggcgcggagttttttattttgtaggagtcgcgtttcgatgcgttaaaggcggcgcgcggtcggtttcgggttcggatttcgattcggagtagcgagtttcggcgggcgttttcggttcgcgtttttcggtcgtttttcgcgtttcgggtcggttttgttcgcggcggcgggcgttgggggtgggggcgtttcgggttgcgagtgcgcggagttcgtcggcgcggttcgtttagtggggtttgttttttttcgagtgcgtcgtcgttttcgtcgcggtcgtagttgtttcgggatcgagcgcgtggaattacggacgcgggtttttcgtcgggcggcggtgtagacgttgtcgtagagtcgggttttcgcgacgtcggtcgggacgttcgttcgttcgcgtttacgtcgggggtcgttttttcgagttagagatgcggtcgtcgtcgcgttcgtcgtcgtgtttttcgcggtcgttgttttatgtcggaagagttgtcgtcgttattattttcggtttttgtttcgttcgttgttattgatagacgcgcgttcgcgtcgtttttcgtttagtcgtagcgcgtacgcgcggttcgcgttcgtcgttatcgttttttggtttcggatacgcgtacgggtcgcgcgtcgtttcgttttggtgcgcgcgttgggttggggttgcggggcggggcggggcggggcggggcgcgcgttcggtttcgtttttcgtttcgggcggcgtcgtttttaggcggcgggttgtggtcgttgttcgcgtttcgggcgttgtgggttcgttttttttcggcgttttagaggtcgcgcgtcgttcggggtttcgattttgcggagagatttgaaggcgtttgtcgtggaagaagtcgttggtcgtaacgtttgggaaattaaaatgttgtttttttattcggtacgtttttgggataaatcgaagtttttaatcgttggatttttttttcgggaggttttttttgttttgtaagtaatgaatgcgggtttcggggtattcggtttgttttggatttgtttacggggcgatttttacgggtttagtttttaaagttgggtttatcgacgattacgttttttcg

SEQ ID NO: 333 - DNA, 3015 bp, Artificial Sequence
  chemically treated genomic DNA (Homo sapiens)
cgggggaacgtggtcgtcggtgggtttagttttggaggttaggttcgtgaaggtcgtttcgtgagtaggtttagggtaggtcgagtgtttcggggttcgtatttattgtttatagagtaaggggagtttttcgggagggaaatttaacggttggaaatttcgatttattttaaaggcgtgtcgagtgggaaggtaatattttgattttttaaacgttgcggttagcggttttttttacggtaggcgtttttaggttttttcgtagggtcgggatttcgggcggcgcgcggtttttgggacgtcgagggagggcgggtttatagcgttcggagcgcggatagcggttatagttcgtcgtttagaagcggcgtcgttcggggcggggggcggagtcgagcgcgcgtttcgtttcgtttcgtttcgtttcgtagttttagtttagcgcgcgtattaaggcggggcggcgcgcggttcgtgcgcgtgttcggggttaggaggcggtggcggcgagcgcgggtcgcgcgtgcgcgttgcggttgggcgaggggcggcgcgggcgcgcgtttgttagtgatagcgggcggggtaggggtcggagatggtggcggcggtagttttttcgatatgaggtagcggtcgcgggggatacggcggcgggcgcggcggcggtcgtatttttagttcggggaggcggttttcggcgtgggcgcgggcgggcgggcgtttcggtcggcgtcgcgggagttcggttttgcggtagcgtttgtatcgtcgttcggcgaggggttcgcgttcgtggttttacgcgttcggtttcgggatagttgcggtcgcggcgggagcggcggcgtattcggggggaagtaggttttattagacgggtcgcgtcgacgggtttcgcgtattcgtagttcggggcgtttttatttttagcgttcgtcgtcgcgggtagggtcggttcggagcgcggggggcggtcggggagcgcgagtcgggggcgttcgtcgaagttcgttgtttcgggtcggggttcgggttcggggtcggtcgcgcgtcgtttttgacgtatcggagcgcggtttttgtaggatggagggtttcgcgtcgttagcggagttgtttgtgcgtaggcggttcgcggggttgggagcgtttaaggtttgaattttttttcggagtcgtagttggaggaggcgagcgcgcgaggaggagaagtcgcgcggcgcggaggttattttcggggcgagaggcgcggaaggcgagcgagtaaagcggtttcggagttacggcggttacgcggcggggattttcgggcgttttaggttcgtttcgagcggttttcgtgcgtttcgaaggtgggggcggtgggggcggtgggagtatcgttgagtcgggaattataggaatagatggtgtttgtttaggtcgcgtgttggagtcgttttttaggataggagtaggtttcgggtttttaggcgtgtatgtttaggtgggagcgtcgttaatttttttcgttttgttggtaggtattggtgatttcggtcggggtaggtttcgggattcgataatatggtttttttattttattagtagttgttgtattattatagtatcgaggtgagttgcgattttagcggggatagtaatagcgtgcgcgttaagattaattttaagtagttgttttttaatagttattttaagtattgtaaatatagtattttttttagttgtagtagttttggggatttcgggggcgtttttcggcgagtgggcggcggaggtcggttgcgtaggtagaagaagttgttttagttgttcgagagggtttttagtcgttggtgggattttaagttcgattcggtgaatttggaggaggtttgtttggagcgttgtttttcgtagatttagcgtcggtttcggtatgcgtttttttatatcggtttcgtttgttttttgtggagtatttattttgcggtttatatgagatttagattgatcgttatggtcgttttcgcgttgtgtttttttttggtgtgtgtgggtttttttttgtttatttttattaagttgtacgttcggtattacgcgtggatttcgttggtttttattttgttggtgttcgttttgattttggttgcgtagttttaggttttgacgtttgttttaggacgcggcgatagttttaattttacggttatagtcggtttatagatatttgtttattttaagtggggagtttttttatgtgtatcgaagtgttttttttgttttatatcgttatgtatttatttttgtatttgagtttgtgtttgggggtggtttattttgtttttttcgagatttttggttattattttcgggatgaagtttgttttttttcgttcggagtcggggttttgtattgggagttgttgagtagggggttgttttacggttgtatttacgttatcggggtttatttgttcgttatgttttaggtgaggtttaggagtattttttttaaggtggggtaatttattatgtacgggaaggatttggaagtggaaaaagtttttaaagagaggatgatttatttcgtgatgttaagaattatagtcgatgatttaatgaagtagggagatgaggagagtgagaattttgttaagaggtatgttatttcgagttttaagaataggaagaaaaagttttttatttaaaaagtttttatagtttttcgtttttttaagatgtagtagatcgaagaagttagtattttatttgtagatatcgtgggttttattaagatgagtgttaataagtttgtttacgttttggtgggttttttgaacgatttgttcggtcgtttcgatcgtttgtgtgaggagattaagtgtgagaaaattagtattttgggagattgttattattgcgtggcgggttgtttcgagtttcgggtcgattatgtttattgttgtatcgagatgggtttgggtatgattaaggttatcgagtagttttgttaggagaagaaggaga

SEQ ID NO: 334 - DNA, 3093 bp, Artificial Sequence
  chemically treated genomic DNA (Homo sapiens)
gttattatattcggtagcggggtggtttttagtttttgttgttttttcgtttttttttttcgttcgttttcggagtttagtcgatttttgaggttttaattttatttatttttttttcgggtcgtcgtcgtcgcgtttttttttatttttattttttcgaggagagttataggttgtaaatttaattaatttcgtaatttatttttgtaaaattatttataaagatttttttttcgcgttcgcgttcgtttttttcgcgtcgggtttttttagttacggttataaagtgtttttttttttttttgagttttgtatataaggaacgcgggttggggttttgttcgttttttttttcgtttaaggtaaggatttcgggaatttgaagtttggcgtttattacgtttaggttcgtagttttttttttatagagtttgtattatgggaaaaaataaaataaaatttaggaaagggaggtaatagttattgggagttaatatagagttacgtagcgtttaaaatataaatatcgtagcggttagaaatttcgttatttttttcgtttttttaggttgttttgtcgaggttttttgagttttttcgtatattgaaaggtatcgtaggtgtagtgcgtattttttttttatttattttaagaagttttgtttcgttattagttttttttttcgggatgagtagggagagcgcgcggaggttttcgattttttcgattataattaagaaagaataatttttaaagtgtttaatattttcgtttttaagttttttaaaatataggggtagggaatattaaaatattcggtttttattaggaagattacggttttgaaaggaaatagtagatacgatattttattttatttggatttatgattaaaaaaataaaaataaaaatttaaagagttcgtttgtattttttttttttaaatttcggttcggttcgaaggtagggaatttaaaagatcgaggtcgatggaagagagttagcggggcgagcgagcgggtagtttttttttttgtttttcggagttatttagaaggataggggaagggaaggaagaagaggcgaggaaaaagaggagggagggaagcggaggttaggagcgacggagtaaggaaagtagtttgtaagcgagaaaagagggaaaaaatatagtcgtacgaatttagagagattataagtcgtacgtaagtagtagtagaaagagcgagagcgcgagcgcgcgtttttttcgcgtttggggttagatagtttttagattagttcgaattattttttaagtattgtttcgttttttttgtttcggtcgttttttaatttttttttttttttttttttattttttttttaaaaattaaaataatataagggagggtggtaaaagtttttttaaatcggtcgatttatttaaagataataataataataataaatatataataatttatattttatggtgggagagacgtgggattaattttcggtatttattttaatatttgatagttagaataaataaatatatatatttatattaatagatatatatagaaaatttggagttaaagtatttggtaagagcggaaaaaaaaagaattaaaaggtaaaataatgattatgagtagcggcggcggtagcggtattagcggtaatagcggcggcggcggtagtagtagtagtagcggcggtagtaatagtaataattatttggtgttcggttttttttagaaattttttgtattattatttttaagaattttagttttaagaattaatagagtttaattttcggaatttgagtttcggattttattattgttacgtggtaggggaggatttggtgttagtttttcgagatttttattgtttttggttaattaaaagtttttaaagttataagatttttttattggtcggtatatttcgaggtttttataagtagagcgtttcggatttggaggtttcggttcgaggttcgaggggtttgaaggtggtttttttttttcgggtttaagacgatggtatggtttgtttcgttattattacgtgggttttttttttgtgacgtcggcgttttcgttgtagtaaagttcggtttttggaattttgagaattaatttgttattcggtgatataagagggggagtgcgttttgttttttcggggtttggggttaatttttttttttttatttataaatttagtagatcgagttaaatgtataaaagggagcgagaggtttgaattattgggaaaagtatgttatatatatagtagggttagagaggcgagtaagagaaaaataaaataaaataaatattatagttttttttaattagaatattaggtattacgagaaaaatatttgttaagtagttttcggtgggtttatttgttttatttttatttaggataggggtttttgttgttgttttgggtttttttttttttggtgtggtggtttgggatttttggtttttgtattttgatggtttatggatttttgtttttgattttttgttttttgtaagtttgtggtgttacgtaaattataggatcggtatcggttggatttttttgtacgtgttttttttttttttatttaattttttaagcgttttaaagatgtattattttaatattaatattattgaaagaagtttaaatttttggttatatgtaataattttagtttttatttttttttttttttttttttttggtgtaatttttttttttttttttggatttttgttgaagtgtgttttttttgtattttagagaaatgtttaaaggatttgttttggtttggtttgtttttttttaggatagtaagtggtgggtttaatttgttattgttgatttttgggaaattttttgttgtaagaaacgtgtgtgtgggggggagggtgggggtggcggggtggtatgtgtgtgttttttataaaattttgtgagttaaatatttgtttgtgttttgtttttttttaaggttttgagatttttgttttcgaggttcgttttaaggtcgttgtaaaaaaatttttttagtttgtgtttaagagattagtcgg

SEQ ID NO: 335 - DNA, 3093 bp, Artificial Sequence
  chemically treated genomic DNA (Homo sapiens)
tcggttgattttttaaatatagattgaagagatttttttataacgattttgaaacgagtttcgaaaataaaaattttaagattttaagagaaaataaaatataaataggtatttggtttatagaattttgtagaaaatatatatatattatttcgttatttttatttttttttttatatatacgttttttgtaataagaaattttttaagagttaataataatagattaaatttattatttgttgttttggaaagaaataaattaaattaaaataaattttttgaatatttttttgaagtgtaggagagatatattttagtaaaagtttaagggggaaaaagaaaattgtattaaaggaaaaaaaaaaaaaaaaagtgggggttgggattgttatatatggttaaaaatttaagttttttttaatagtattagtattgaaataatatatttttaaaacgtttgagggattagatagggaaagaaaaggtacgtataaaaaaatttaatcgatgtcgattttgtgatttacgtaatattataaatttgtaaaaggtaaaaaattagaagtaaaaatttataaattattaaaatatagaaattaaaaattttaagttattatattagaaagaaaaaaatttagaataatagtaaaaatttttgttttaaataaaaataaagtaaatgaatttatcgaaaattgtttggtaaatatttttttcgtggtgtttaatattttagttggaaagagttgtgatgtttattttattttattttttttttattcgtttttttaattttattatatatataatatattttttttagtggtttaaatttttcgtttttttttgtgtatttagttcgatttgttgagtttatgggtaagaaagaaggaattagttttagatttcgggaaagtaaagcgtatttttttttttatgttatcgaatagtaaattagtttttagaattttagaggtcgagttttgttatagcgaaggcgtcgacgttatagaggaggagtttacgtgatggtggcggagtaggttatattatcgttttgggttcggggagggagagttatttttaggtttttcgagtttcgaatcggaatttttaaattcgagacgttttgtttatgaggatttcgaaatatgtcggttagtgaaaaaattttgtggttttgagggtttttggttggttaggggtagtaaaaatttcggagagttgatattaagtttttttttgttacgtagtagtggtaaagttcgaagtttaaatttcgagaattgagttttgttgatttttagaattggggtttttagaagtggtgatgtaagaagtttttaggaaaggtcggatattaggtgattattgttgttgttgtcgtcgttgttgttgttattgtcgtcgtcgtcgttgttgtcgttggtgtcgttgtcgtcgtcgttgtttatgattattattttattttttaatttttttttttttcgtttttgttaaatgttttggttttaagttttttatgtgtatttattgatataaatgtatatatttatttattttagttgttaggtgttaaaataaatgtcgaagattagttttacgttttttttattataggatatagattgttatgtatttattattattattgttgtttttgagtgaatcggtcggtttggggaggtttttgttatttttttttgtgttgttttggtttttggaaaggaggtggaggagaggaaggaggggaattagggggcggtcggagtagagaggacgagatagtgtttggggggtgattcgggttagtttgggggttgtttggttttagacgcggagaggacgcgcgttcgcgttttcgttttttttgttgttgtttgcgtacggtttgtgatttttttggattcgtgcggttgtgtttttttttttttttttcgtttgtaaattgttttttttgtttcgtcgtttttggttttcgtttttttttttttttttttttttcgtttttttttttttttttttttttgtttttttgggtaatttcgggaggtaaaaagggaggttgttcgttcgttcgtttcgttggtttttttttatcggtttcggttttttagattttttgttttcgagtcgaatcgagatttggaaggaaaaaatgtaagcgaattttttgggtttttgtttttgtttttttggttataaatttagatgagatgaagtatcgtgtttattatttttttttagagtcgtgatttttttaatgagagtcgagtgttttggtgttttttgtttttgtgttttggggagtttgggggcggggatgttgaatattttgaaaattatttttttttggttgtagtcgagggagtcgggaattttcgcgcgttttttttgtttatttcgaggagagagattgatggcgggatagggttttttggggtgggtgggaaaggggtgcgtattgtatttgcgatgttttttagtgtgcggggggatttagggaatttcgataggatagtttgggagaacgagaaaggtggcgggatttttggtcgttgcggtgtttgtattttgggcgttgcgtgattttgtgttggtttttaatggttgttgttttttttttttaaattttattttatttttttttatggtgtaagttttgtaaaaagggaattgcgggtttgagcgtagtggacgttaggttttagattttcgaggtttttattttgggcgaggagaaagacgaatagagttttagttcgcgttttttatgtgtaagatttaggaggagagaagggtattttgtggtcgtggttgaggggattcggcgcgggaggagcgggcgcgggcgcgaaagggagatttttgtgagtgattttgtaaaaatagattgcgaggttggttggatttgtaatttgtggtttttttcgagggagtaagaatgggggaaggcgcggcggcggcggttcggggagggagtgggtagagttggagttttagaaatcggttgagtttcgggggcgggcggggagaaagggcgggggggtagtaggagttaggggttatttcgttgtcggatgtagtgat

SEQ ID NO: 336 - DNA, 2436 bp, Artificial Sequence
  chemically treated genomic DNA (Homo sapiens)
agttttggatgataaggattaattgtttagggcgttggtcgagaggaataggaagagcgtttcgtggagtagggcgggcgagaagagtcgggcggtcgcggggttttcgcgtatgttgggtaggaagaggaagagttgtagtacgaaggttattagggagatgtataagaagtaggcgggggttattacgttgagtagtcgtagggttagtattttcgattatatttttgcggggttcggggtgagaagaggattgattgattacggcgtttagggggcgttttcgttcgttttttcgtgtcgcgcgtttggggtattgtacgcgattttacgtttttaattttttgtttcgcggattttttttttttagttttttaatttcggattaggtaggttagagattcgagttcgtagcggtttcgggtttaggttttatttgggggtgagtgttgtttggggttttgagcgagttcggcgttttggcgcggtagagtttggtataggagggagggattcgtttgtagtttttaggagttgtgagggtggggggtatcgggggataggattttttttttttgtggatgtggaaataagtttaggtttgggatttttggtttagatttttttaggaggagaaagggaaggatttggggtcgggggtaggagaattagcggtatttgatttgttggaaattttgttttatattttttttttttcgtttttgcgtttttatttatatatatattttgggtagtatttagggattttattaggttatttaaggttttttggaggtatgtgtgcgtgagggattacgatgtgtgtgtgtgtgtttttgtttgtgattttgtacgtgtaatttgtgtgcgtttgagtatttgtatttgtgtatgtatatatttgcgtgtatagatacgtagtttttgttatttagttttaaaaaaattaattgaaataatcgatatatttatattcgttttcgggtatcgggtgaggtgggggcgtaattagaatatttgtgttagcgggttttggttagtatatttttttaacgttggttgttcgggttatttttttgcgaagagcgtttttatttgaggcgaaattaaaatttttttttcgcgttcgtttttcgtttttttgttgagagaaatttaaataatttttatggcgtcgaaattttttttatgtcgataagttcgttttgggcgtacgagtggatgtttggttagttttttttgggatcgatttcgtcgtcgtgtttagtttttattacgtttttattttattttacgttttatagtcggggtttttggttagtttcggaagttatcgagaaataggatttcgtgcgttcgagagaatttttttaggggttaaggaatcggttagtcggaggcgcgagaaaagttttgggaaggcggttgtatttaggatgggtggatgttacggggttttcgtttaggttgtttcgttcgtacgggtcgattggttattttggaattttttttgtaggttttagcgtttttcgggaattcgtagttttcgcggagagcgtgggtttttttttatcgttggggcgtagcgtagtgtacgtttgagggtggtcgtcgggggttgggtacgtttttagttttgcgtcgtcgggggttgcggcggtgttgtttattttagagagttttcggtttggggtttcggcgaagtaagtgttttttcggcgtcggtcgttaggggggcgcgggagtagttagatgcgtcgtagcgttgggaaggcggcgaaggataggggttaggggagtgaggggcgttcggtaggtagttttagttttggttttgcgcgggagaagggatagtagagatcgttcgtggggtttcggggtgtagggagttgttcgtttagttttggcgttcgtttcgttcgcggtagagggcggtatagtcggagttttggaaagatcggtagcgtcggtagtcgcgggtttttcggttattgtttttcggacgtacgggaagtcgtttttcgcgtcgtcgtcgtcgtattgtcgtcgtcgtagaggggtgaggaaattaatttatcgagttttggtcgtcgataagaggagtttcggacgtcggttttcgttttgttcgaggttgtaaagttgtggattcggttcggttggttcgtagtttgcgtttcgtttcgggaattgggtaagtagcggggatgtggggaggagggagcgggtagttgttggttttttatttgggcgttagcgagtaagggttaggaagcggcggggatggtagttgggtattttttagtttcgttattttttttttcgtttttgggggcggtgttttggtcgttagttttagtatcgtggatttgttttttttttttttttcgattttttttgagcgggttggggcgttttgtttggttttagcgttcg

SEQ ID NO: 337 - DNA, 2436 bp, Artificial Sequence
  chemically treated genomic DNA (Homo sapiens)
cgggcgttgaaattaggtagggcgttttagttcgtttaaggggaatcgagaggggaggagggggtaagtttacgatgttgagattggcggttagagtatcgtttttaggagcggagggaggggtggcggggttggggggtgtttagttgttattttcgtcgttttttggtttttattcgttggcgtttaagtgggaagttagtagttgttcgtttttttttttttatattttcgttatttgtttagttttcgaagcgaagcgtaggttgcgagttagtcgggtcgagtttataattttgtagtttcgggtagggcgagagtcggcgttcggggttttttttgtcggcgattagagttcggtgagttgatttttttatttttttgcgacggcggtagtgcggcggcggcggcgcggggggcggtttttcgtgcgttcgggaggtagtggtcgagaagttcgcggttgtcggcgttgtcggtttttttaaggtttcggttgtgtcgttttttgtcgcgggcgaggcgggcgttagggttgaacggatagttttttatatttcggggttttacgggcggtttttgttgttttttttttcgcgtagggttagggttgaggttgtttgtcgagcgttttttatttttttagtttttgtttttcgtcgtttttttagcgttgcggcgtatttggttgttttcgcgtttttttggcgatcggcgtcgggaaggtatttgtttcgtcggagttttaggtcgagggttttttggggtgggtagtatcgtcgtagttttcggcggcgtaggattgggggcgtgtttagttttcggcgattatttttaggcgtgtattgcgttgcgttttagcggtagggagaggtttacgtttttcgcggaggttgcgggttttcggggggcgttgggatttgtaaaggggattttaaggtgattagtcgattcgtgcggacgggatagtttggacggaggtttcgtggtatttatttattttaggtgtaatcgtttttttagaatttttttcgcgttttcggttggtcgattttttagtttttggaaaagttttttcgggcgtacggaattttatttttcggtggttttcgaagttggttaggaatttcggttgtgaggcgtggggtgggatggggacgtggtgagggttgagtacggcggcggggtcgattttaggaaaggttggttaagtatttattcgtgcgtttagggcgggtttgtcggtatggaaaggatttcggcgttatgagggttgtttgggttttttttagtaggagggcgggaggcgggcgcgaaggggggattttaatttcgttttaaatgaaaacgtttttcgtaaagaaatagttcgggtagttagcgttggagagatgtgttggttaggattcgttgatataggtattttggttgcgtttttattttattcggtgttcgagagcgagtgtgagtgtatcgattgttttaattgatttttttaaagttagatagtagaggttgcgtgtttgtatacgtagatatatatatatataaatatagatatttaagcgtatatagattatacgtatagagttatagataaggatatatatatatatatcgtggttttttacgtatatatatttttaaagagttttgggtaatttggtgaggtttttgagtgttgtttaagatgtgtgtgtgggtggggacgtagggacggagaaaggggagtgtgaagtaggatttttagtaggttaagtgtcgttgatttttttgttttcgattttaaatttttttttttttttttttagggaggtttgaattagaaattttaaatttgggtttgtttttatatttatagaggggaggagttttatttttcggtgttttttatttttataatttttaaagattgtaaacgagttttttttttttgtgttagattttgtcgcgttaaggcgtcgagttcgtttaaaattttaggtaatatttatttttaggtggggtttagattcgaggtcgttgcgggttcgggtttttggtttgtttgattcggggttagggaattggggaggggaaattcgcgggatagggggttgggggcgtggagtcgcgtgtagtgttttagacgcgcggtacggaggagcgggcgagggcgttttttggacgtcgtagttagttagttttttttttatttcgggtttcgtaggaatgtaatcgaggatgttggttttgcggttgtttaacgtggtggttttcgtttattttttgtgtatttttttggtgattttcgtgttgtagttttttttttttttgtttagtatgcgcgaggatttcgcggtcgttcggtttttttcgttcgttttgttttacggggcgttttttttatttttttcggttaacgttttgggtaattagtttttgttatttagaatt

SEQ ID NO: 338 - DNA, 17219 bp, Artificial Sequence
  chemically treated genomic DNA (Homo sapiens)
tttattgtatattatttattttttaggttgttagcgtggtttttagttttttttaagttaaagatatattatttttttgtgaataagtgtgtgaatgtggttgtgtggtttatttttttgtatttaagtcggttttatttattcggtaggaaagttttcgttaggtattgaggagtgtttgttatttagtttgtgtatttaagtatggatgtatgtatatgaatgttttttgtgtttttaagtgattttttttatatttttaaatgggttattgtttttggaacgtatttatagaaattttgttttagtttttagtttaataaagtttgggattttttttttagaatatcgttatatatttttgtatttgtatatttatgtttatattttttttggttagttttttattttttatgtattttttgttttatttgggtaacggagtttaagtgttttgatttgttttagtatatgttatttaagcgtatattttaatttgagtattcgtattatttttattttttttgttttgtttataatgtggtttttttttaggttagattaatatgggtttgtagtttaaatgtaaatagaggattttttaagattataaatttttaaagaaaggaagaggagggaggaggagattggaatgttagtaatgagttatttatgtatagggtaatttattcgtttattttaagttgaagaaagaattagataaatgtttgtagaggtgtattaaaattttagattaatttaatattagttatatatatatatatataaacgatggattttataatatattagtgtttagtttttttttggaggttgtttttttgtatatatttaattttttataagtttttggttaaaagtatgtttatttatatagagataatttaaagatcgttttgttttttttagtgtatatttgtatatgttggcggggtattttaggtttaggtttttggtttgtagtagttatagttagaggttttattcgattatagttatgtgtagattttttcgtttttgaatattcgtatgaattttttttgggaatattgagtttacgtttgttttttaaatttagtttttaaagtgagggtgtttattgtgtgtgtttatagtttttcgattgagaaatatttggttaaattagattatttagtagttgcgtttggtttgtggaagaatcgagttcgatgtattaagatgtgatcgtgtatatataagagaaaggaaaattttaggtttagatttatagtttttttttattgcgagttattttgtttttaggaatttttattaggttttttgtttttttttttttattatattattttattacggtttttaaagggttaagagaaatttttacggttttttttttatttagtttttgggttcggaggttagttcgtttattcgtagtttatagagtttgttgttattttcgcgttttttttttttttagttttttagtcgggagggagtttgtatgtttgtttagatcgatttattatcggtatattaataatattcgcgagagcgcggagattttgtttaggtttttcggttcgtacggtttacggcggatagaattcggggagcgtgacggtgtttgcggggtgggggtagggggtttataggtattggtcgtttcgagcgtattacgggttttttttagtttcggtttttcgcgtttttattagttcggttgtcggggtatagttatagtttcgcgcgttgggtagttttatttttattttgtttaattttaaattgggcggggagtataggcgtcgtgtttagagaataagagataggcgcgggaggcggggaggagtagttaggtagcgacgcgagcgggagcgagttaaagatatagtggaggcgatcgcgggtaggaagaaagagcgggttgcgcgggtttcgaggcgtcgtacgtaacgcgtcgtttcgcgaagttatattcgttttttcgtcgtttttcgttatcggtttttttttattttttagcggcgtttttcgtagtttggatagcgaggtttcggtttgtgtgggaggcggaggttaggacggttttgtaaagggttggagagaatcgttaatgagttgtgtagtttattgattcggagaatattttttaattaatttttagttatttattggtgatagcgttttaaaggatagcgttggggttagtcgagttttagtcgcgatttgtcggtcgggcgtttgttgtttaaaattcgcgcgtttttttaaatattttaaggtaattggtgtgcgtggcggtgtatattcgtatattgaaggttagtttcggattaaatttggatggtatattaattatcgttttttttttttatttcgttttacgcgttgaaattttgtttaaaataaatacgaaaattaatattgtaaaatttatattagataataggtcgagagaggagtgggtagggttaaggaacgagcgtattttttaagtgtttacgtataggaatttttgaggttgataattaaaatgttttttacgtaagtaattttgttggtaaaatcgaatttaatatttcgtaaggattgatttcggttcgcggtgttcgtttttagtgttataggaagtgttagatggttagaaatatttaagtttgtttgtatttattatttattattttttggggtgggttatttttttttagtttttatttttaggttattttaaggatttttttttaaaagattatttttagaattaaatattatattattttttttttagcgtttttttaaaacgaaaaaagggggggaaaatatagttaaaatttcgagttgtttagtttagacgtagcgaggttgtgcgaatatttatttgaagcgcgttggtttttttttaaggtttgtttttaaatatatataattttttttttttttttttcgtttttttattttttttatttttattttttagacgtcggcggcgcgcgttttggcgcgcgggtatttatagtttttagttggagatcgcggattttttggaaaagatttattaatagtaaattacgtttcgttcggttacggtttatacgttgttagattcgttcgttttcgggatttcgggaagggtttattcgagcgtgcgagcggcgggaagttcgtcgggattacgcgtgatttcggtcgttttattttatatacggtgttttaaggtttttttcgtaaatagtaggcgttcgttatcgtcgtcgcgagttttcgagttggcggaggttttgcggcgtagtcgttcgtcggtttcgagcgcgggtttcgcggcgtttcgtttttttcgttttggtcgaggattttgtttcggtgcgtaagttttttttcgtttatagtttttttgttatacgtttttcgagtgggattaatttttttcggtcgtagatttttatacgtttattagggttatttattagattttttattgtttagcggagggtttaggtttcgttcgttttcgttttttttttacgacgttgttttcgtataagtatattttatatttatttttgggggtttataatttaaaatttacgttgaatatcggggagggagaggagggggaaagcgggagggggatcgtagattataattttaaaagaatatttataaaataaagcgtttgatttggttggcgggcgggttaagtcggaattttttgttttgttcgattttttagtagtttttttttttaatttacgtgattcgtgttttggggtaagttaagaaaaaacgggatttttttttcgagttgcgcggtagcggcggtaggtcgagttcggttcggttcgaggtattcgttatatattttcgcgtacgtatacgtcgacgttttatttggaggaacgatcggttttcggagaggcgagacgaggcggcggtggcggcggttgggggtttttatagttttttttcgagtcgaaaaagaaagtagacggtaattcgttgtttttttttttttgttcgcgagttaacgtcgaatttagttttttagtttttagtttatttttttttttttcgttcgattcgcggcgtttagcggcgatcgcgttttcgcgtatagatatatataggttgtaaatttttattttgcgaattttttgttttttttttggtttatcgggaggcgttaggtttttagtcgcgttttttttttttttggtgtttacgcggggtcgtttaggttggttgtattttaaataatatagttatgaaataaaaacgaaagcgagttaagtagttaaagggaagcgcgaggtaaaagtttcgcggggtacgttgcgggagggggtttcgggagagggggtcgattgtagtttttagcgcgttcgttcgtttattcgttcgcggtttttcgggggaaaggtgtttcgggtattgatttgaaattttcggtgggggagtaggtagggagtttgcgattcggttttttgaagtttttttttaagcggattcgaggcggcgagaaggagcggggggcggttgggtgggtggagagagatatgaggggtggggggggttggcgacgttaacgagcggagaaggagtcgggtcggagaagcgcggcgagtagtaaagtttgcggttttcggttgttcgtagttcgttcgcggcgtcgcgtttattcgattttttcgtcgtttgttggtagtcggttgttttcggggtcggtttcgtcgaggggtgggttttgggtcgggtgggggcggggcggggcgggttcggggttttcgggtaggtggcgatagtttcgtgcgatttttcgggttttcgtagttggattgggtttggtcgagtttagtagttttcgcgttgtcgtcgtcgttcgcgttcgggtaggagttttagcgttatgttgacggttcgtcgcgagcgttcgttcgggttgggtgtgtgtgagtgtgtgtgagtgttggttaagtcgtttttgcgcggcgatagcgcggtttgggtttttcgttcggcggttcgcgggtttttttttcgtcgtcgtcgttcgtttagttttcgttttcggtcgcggtttgggtttttgcgcgtttttttcgtagtcgtcgagttcggttcgcgtttagcgaggagcgtagttttgttttattttgtcgttgggagtttaggtttcgtttgtcgtcgtacgtcgcgattttaacgcgttttttttttttggtttttttttttttttttttttttttttttcgttcgttttttttttcgttcgttttattttttttttttttaatagtcgtttttttttttttcgtaggcgtagcgttcgggcgatagtcgttcgttcgtcgtcgtttttagttttcgtaagtttgagtttcgttagttttcgtttatttttcgttgcggcgttttcgcggcggggtttcgggaggggtgattttttaggaaaggtttgttcgagttttttcggtcgttatcgatgtacggttcggtacgttttggtttttttggattcgaatttcggattatttgggtggcgtttttttttttcgtttttcggttttttttttttagttcgggtcgagttggttgcgtacgttcgattcgggcgtacgttttgggcgagtcggagatcgatttgggcggcggcggcggcgagggttgtcggtagagttagagtcgaagggatgggggcggcgggggcggtttttttagtcgcgcgtcgagatttttttcgttatttagaaggttagtggaggatcgtaattattataaagcgtttcgtatttcgtttagttaaagttgttaaattttagcggtagtagtcgttgtcgtcgttttttgttattagcgttgcgttttttcggtttcgtttttttcgagatttagcggagcgtggtttgtgtgttttcgtgtttatttttattttagtttgttttttttttttagaggagtttttttttatttcggtgttaaaagttatttgaaaatattattttaggtaacggtggtcgtttcgtttgaatttcgcgttcgagtttttcggacgttttaattgtgtgggaattgtttggaggtgggggaaggggggagtagttcgtggaggtatcgggaggcgtgtggggggcggtcggcgagcggagattcgtttgtatttttttcggttttcgagtatttttacggtttgtatttttgatggttggaggggttgtttaggtttttcgtttcggcgttgggagattatttttcgcgttttattttttttgatagggagtaatttttggtttatatcgttcgttttataaatttttattcggtaacgtcgtgttgatcggtgtttggcggcggcgtatagtttgcgttcgtagtagtttaatttaattgatacgtattgagtttttttagcgtattcggcgcggttttgggcgcggggggagggcgggggtaggcgggagggagggggaagcggagaagcgaggtttcggttttttcggagcgtaaagttttaagggcgagtcgagaagttttagttggtgaagttggcgggaaggggtaggagtgggggagggggtatttcggattaatcgcgtttagattgcgggttcggatttcgcggttaatggtgattttattcggttgtttattagggtttttttatattgggaagggggtggggtgtttttttttgtttaaggataagatggtgtaggttttatgaaatataaatttgaaatggaggtggtttgtaaatttatacggaaagtttttaaaatattttggagtgtttttatgttaaaaataattaaaagtattttaagttgattattaagttaaggttaaggttaaaattagttttagttagtagatatttttttttttaaaaattagatttattattgattgtgggattggtattaggtgcgattttatttattttgttttagtttttagtatatagttataaaaatagttttttttaaagtagaagtgaaatatttttatcgtttgaaattcgaaatttcggtagaattaaatttttatgttttagagttgtttataataattgatgtaaaagataggcgagtaagtgttttcgcgagtagtgtttagttaggttgggtcgcgaacgtttttaggattagcgtttgtagaatggaatgtacgtttttttttttttggtttttttgggggtggatatttttgtaagttaatttatatatttttttaattttcggtaataagtagaaagatatttggattattatgttgtaaaattattttttataaagatattttaggattagatattaaaagttattagattgaacgtatgcgagttatagatatagttggagaaaaggtttttggttgtgtgttgtggtaatatttttttttgaagcgattttttttatttaaaataagttaaaaataatcgggaaggttgaagttgggtatttgtggggaaattttgaacgtggttttaggcgaggaggtcgttttgttgttgtaggttggacgggagaattggtttgggttagtgtggagtcgtgttaggttttttcggttcggttaggtcgaatcgtagaggttttggttcggcgtttagttattttttatttttttttttcgtttttttaattttgtttttaggtataggtttttttcggagttcgaagtcgtatgtaaacgtttagaatttttagaaaatttaggaatcgagttcggggtttgtagttttttagagttttacggtttttcggggttgttgataaagaggtttgtttgtttaattttaaaagttttagaattcgggaggttgagttaggagaatcgtttgaattcgggaggcggaggttgcggtgagtcgagatcgcgtcgttgtattttagtttgggtaataagagcgaaatttcgttttaaaaaaaaaaaaagaaaagaaaaagaaaaaaaaaagttttagagttaaaatgaataggggtggtgggggtgttgtaaatgcgaaggggtcgaggggagggttgattgggggagaaatttgatgttggagataaataggttagtaaattcgtttttgacgtaatttgtaatatttttttttattttttttagggattttgtttttacggtaggttggtaggattaaagggttttttttttattttttagggatatattttttaatttcgtgggattttaaaaatattttattaagggagttttaagaggtatgagtggtgggggggattcgtgatttattgggaattaaaatgtgggattttttcgaggcgttataaggtagagggggggaggggagattatatttattggttcggttagttttaattgttttggggaaaataagtagaaagttgtcgaagggtaattttattttgtgtttttatttaagaaggggtttagggagttggggatgtcgcggggtttgtaatgggtgtcggcggtttggttttttttttgttttttttttttttgtttttttataagtttttcgggagttgattcgggggttaggttgttatatttagtatttagtaaggggaggattttaatgaaaatagaggaggaggagagagtgagtaaaggagtgtatgggaggggaggtcgtgtagtttacggagaaataaagaaataggtgtcgaaatgagaggtgttgcggatggagtagcgggggttgttttttcgttattaatttttttttttatggaagtgttttttgattataataaattattcgattttaggttaattaggttttgtaattgggtaatcgagttggtttttttaggagtaggttttgagtttggttgttttttttaaggtaggttgattttgtaagattcgttagggttttttttatatatttttagttttattttggtttaggggaaaggttaggtattttgtgtttggggggattttggttttttaattttgtgtgtaagatttatttataacgtatattaggatttatattataaagtttataacgtatgtgtaggttttcgatggtttttttcggaggttgtttttagggcgatgatatttggtattggaataggtgggattcggatgagtatagataatgtatttttatataatgtgaggtagtttttttttaaaaatatatttatatttatagttttttggttattttgtataagaattttgggtttatttaatggtattttaaaaaatattcgttgttttattttttaagtataaggtatagttggttttttttttgaaatttaaacgaggtaataaataggaggcgtattttttttttaggattttatttatttggaaatatttaaaggtagttgttttttagggtagaagattgttggatttaagggtcgttaggttgaatatgattgtttttttttttttttagtttttggagggttattgggtgtttggggaaggaaggttttaagggtagttttttcgtggtttttagtaattattttggaatttttggtttgggttcgatttgggttaggttttgagtttttcgaatataggtacgtgtgggtgaattggtatttatattacgggggttcgtagggtggttgggtgtcgattaaatgggtataatataggaggtttttgggaggttggtcgttttttgcgttcggtaagggtttaagagttttcgacgtcgtcgcgttgggtcgggtgtttttgtagataaattcggacgttacgtttcgtttcggttgtttatttagtaaggcgttttttgcgtatattttattcggttgggggtagtgagtgggaatcgtcgggagagggggcggggaattattaattattcgttttcggatttagtgtgtcggttttcggttttagttattttgtatttagttttttttttttatttttatcgggtttttgcgaagacgtattatttcgaattttttcgcggtattattttcgaattggaggggtagagaaggttttgttagtttttcgtttgtagtaggaaggtgggtacggattagtagaagggaaagcggtgttgatttgtttttaaatatttttgttttttcgtttttaataaagtcggttatagaggtgagtggcgcgggatggttgtttcgagaaggtcgtagttaggagtaaagttttggggtttataacggattgggtattttaaacggtgtaattttcggtatattttattcgtttttattttatttttcgaattattttgttttcggtgtttatttttttttttatatttgcgtttttagcgcgttagtagtcgcgtagttttcggttttgagtgcggggggtggggtgggggggtttagggtggtttgtgtggtgcggtttgatagaattttttgtgtgcggcggagggaggaggttaatgtataatgtatagcgtttggaagttcggttattagcggtttgtcggtgatatagataaacgattgagagggaggagatttagttcgttttggagtttaaatagattagcgtggaggggaaacgttatgatttaaaagtgtgtgtttgtagatattcgtatatattttaatgatttttagtaggttatgtgttttagttttgtatttttttttttttaaaaggaggatgtgtttagaggagggaggatgaaggtagagtgagaggttttaatttagatttattagtagtttttgagagatgaaggaggggagaagtttagaaagcgaggtttggggaagttatacgatttaaggttaagtttagattttgtttttaaaataataatttaaaaaaagagttatttagttttttattttggattatattttgtgttgtattagaaaggtttgggggaaagaataaattttgttatttttgtttttttcgggagtttatatttttgaattttttttttttattgatattttagagattttttttttttcggtttaatatattagtgttttttagtaattaaggcgagaagggggtggggataaagataagttaattttttttttcgttatgtaagtgtgagagataagataacgttaagttggggtaaagcggttgtttataatttttttttagcgattttgatcggttattttttatttcgtaaaaatgtttttttcgaaaattggattaaaaaagaaaaagagaaaaagaaaagaaagaaagatttttatttggaagtgatatttaaaatttattttttttttattgataatttattttttattggcggggttttttaggaaaagtcgtatttcgattgtaggattttaggttttttcgcggggggtaggattattagtgtaattaggttgaataaaattagggatgcgtgatgaggatttattttgtatttaatttaagttcgcggttgggtttttttttttttagttattggtcgatgtttgtgtttcgttatcgtatttagtgtttttaaattaaataggtagttatatttgggagggttatataattatgttaatatgaagtggttgttaatgcgaaataagaagaaatttttttgatatttataggtttttataaagggagagaaaggaaattatattttttagaattcgaaagtttttagtcgaatcggattttcggggagttttagaaattttttttttcgtataggaatttcgcgaaggggttttcggaagattttgtcgaggaaggttttggtattagattttacgattttagagcgttttgtaaatttttttcggtttagtggttagttttagaatgtaaattttaaggcgggcgttttagattaagttgatttagtttttgtttatttttagtttataatttcgaggtttttattttttgttttcgatcgggtcggtatcgtggcgttcggtatatgttaagtttatcgtttttaagttaggttgtaagatttaaaggttggggtttgtcgcggacggattgtttttggggagttgaaatcgtttagcggggaaattttttttttcgttttttttcgaaaagtttggtcgcggtttaagtttcgagtaagcgggtattcgttgatagtcgggttttacgtaaggtttatacgcgttttattagttagttcgagtttttttcgggcgagtcgtttggcgcggttttaaggtcgggtttaggcggggagagggtgcggggtcgtagcgagttgcgggcggaggtgcgggtttcgcggagttcggttaggttcggtttcgcgtttttgggttcgcgggtaagttgagtcggcggggtaggtcgttttttggttggcgtcggggcgttaagttgcgttttacgtgttcgttatattagtagtagcggcggcggcggcgaggagggggtgttgggaggcgcgcggtcgttttcgcggggttttcggatttcgttttttcgttttttttcgtgggggttgggtcgagattattttgcggtttttattttagcgtaagtcgaaagcggcgttgttagacgtagagaggtttttggggcgtcgtttcgagagtcgcgcggcggtagtagttaggggagggtgtttttcgcggtcgtttcgtcgtcgtcgtcgtagttacggggatcggaagttttcgcgtcgtttcgagcggttttcgttggttttagggttgttttagacgagggttggtcgcgcgttatttttgattttttttcgttttaggcgattattcgggttttgcggtatttcggtgtaagtcgagaggattttttttgcggttcgatgagatgtttttgtttttttgttattattataagtacgttttttcgtatcgttcgtagtttcgtagttgggatcggaggggcgcggagtcgttatttcggtcgggtaggaatatttgtttttaggttttgtagttgggcgcgtgttgttgtgagaggttgtttattgttgtgtgtagagatcgcggaggagaaaatagggtttcgaagtttagggttaggagtagttaagtttcggttatttttattttttatttattgtaggcgatagagcgcgaagttagagggtttgttgggggttcgggttttttttcgaaggtcgaagggtcgttatttttgggattcggtttttggtttgaagaggtcgtttataaaatagatggggtaaaatttgttttgggagtttttttagtgttcgttttcgttttttaaattagatatatttattttttttttagttttattttagttttcggcgggggacgggagtaggttatggcggtatcggtattttattcgtttttttttacgtagggacgtagggtcggttgcggggttcggattttgttattttatttagggaagggttaatggacgtttttcgtttttttcgtgttcggaggagattcggcggcggagttgatttgtaaggtttgttttgttttatttattttttattttcgttttatttttttcgatttttttggtttagggttcggttcgggaaggcgttgttttgttagcgggagtcgagcgagtgtatagagaaaagtttttttattttaatgagagtgtatatagcgttgtagcgaggaggatgattattcggcgggcggggggcgcgggttcgggtcgcgggcggcgtgtgcggcggtttcgcgggttcggagttttcgtttgtttggttgttaatcgtacgttttttgttgttacggaggtaggcgggagtcggcggtcgagtttagcgtcgacgattcggcgggtgatacggaaatatggcgtagcgtttttttttcgttcgcgttttcgtttttcgtttttttcgcgttttcgtttttcgtttcgtattttttttcgttcgcgcggtttttgtagttttaatgttttgttttcggtttggtattattacgttagtagtcgttttttcgcggtttcgcgcgttttttttttttttgttttcggggtttatagaaaacgtttgtttttgtttcgagttttcgttaaattaaatttgtggtggtaacggaaggcggtgtaggcggggaggggttcggggattttggtagtagtcggttagagcgtggtggaaatttttttcgttgggtttttcgtttttttttattttttttttttaatatagagtcgtcggtttttcgacgttttttttttcgttttcgagaggttttagtgttttaggaaggtttgggttatagagattgtgattaggggtgaagaatttagagtgcgtgtttgtgagtttcgaggttttggtattcgatgattttgttttttgtagtttcgatttatttttttttttttggttattcggggttttgtattagtcggtgaagaaggggagggaagagaaagtgtttttttcgtgcgtgtggtttttattttaaggatttgttggaatttgttatttttaattgtatagttttttttcgtataggatttagggcgaaagcggggaaacgtcggatttagggggaaagggtcgggttagaaatttagttttggaggttggatcgtatttttttggcgggtttagttatatttggtcggtacgcggggcggggcgatttagtagagtgggggacgtaagggttaggtttttcggtttaggagacgttaaacgttttaattttggagcgagagagtaggaattttcgtttttatttaagcgcgcgcgttttttagttcgacgcgtaagtcgtggtttttcgcgttagagttgtttaggcggtaattttttaagtttgtaattaagcgaggcgtcgtcgtgttttttgttagtgtcggttttgttagtcgtatatggttttggtgtttcggttcgaggtttcgcgattagttataggttcgtttcgttttttttttaattcgtttttgtaggtagtttggggacgcggtcgatttggcggcgttggtagggagttattgttcgcggggcgggttttttgattagtgttagtttcgttgcgttcgagtcggcgcgggttttggggtgcgggtttggcgtttttttttttttatagttttttggttggggtggcggcgtttttttttttttcgtttttttttcgggtttgcgagatttatttgtgtggtgttatttgtataaaaataggataagtgtttttgtgcgtttatacgcgggaggcgaaatttttattgatgtgtttgtgtggagttttcgattgtcggagcggtttgatttagggtgtttgtgttgttttttataagaaaggagagaaagttttttttaattttttcggcggtttgggtttttagaagtatgtttttttgcgcggtcggaatggtttattatttgggttttaagcgcgtcggatttatagcgagtaggttgagggttaggcgggaggtttattatgatttataaaatcgggcggtttaatcgttagttgttaatttatttatatgtggagttttttaatgtttttttcgttcgggttcggttttttgagggtttgtttcgatatagttagagtcgttaagtgggagttaatttagtggtttttttttttcgtcggtagcgtggtttttttttttcggcgattttcgtttttttggtttattgcgttgttcgttagtaattttttagtttggataaatagttgggagggcgtcggtcgcgcggagttagtaaattaattattaatttttaagcgaggtttggattaggggagggagcggcggttagagtcgagttcgcgaggcgagcgtaaagtttttatcggggttaggagttatttacgcgttaacgaatcgggtgcgtgaaggcgggtttcgttatggtttttcgggtttttttagaagttttcgttcgtcgggttttttaagttcgtattttgtttggttaggtaggtcgcgttatagcgttgtttttgggagagtttgaatattaacgagtcgtttcgggttttagcggtttgttttttataggagagcgtttcgcgtttgggtaagtttttcggattcggtcgggttttttttggtttaggtttgttaaattaaattgatcgtattttgtatcgattaatttttttgcggtattttttttttttagtttacggtggagtcggtacgtagggggttaaaagtttcggttcgttttggtttttcggttgcgaggagaaaacgttgattaaagtgtttaaggggaaggtaatatatgtatattcggtttcgggtcgaaggaggtcgattggagacggttttcgagttattcgtttcgattcgttttttatattttcgggaacgcggcggcggcggcggttttggttcgtacgattcgttcggcggagcgttgcgttgttgggttgggagggcggcggggaggaggagagacgagggggcgggaggcgaattcgggttgcgcgttaagaggttcggagtcgtagattagttatcgttcggttttgcgttttcgggtgcgttcgggaatcgggagggtaggcgtcggtttcgtttagtcgggtttttcggttttcggcgcgggtgtttttatttttattttcgcgcgtttttggcgcggttggttcgattttcggggattcgcgtagtcgagatttatttgttaggttaagggtaggatagaaattttgtaagcggagttttgtttgcgaataggaaatttttttttgatgaggtgttgttttttttttacgtcgggttttaaaataaaattttagagcgggcggttaggtatttagtttcgttcgttatggtcggcgattttcgtttttcggtttcggtttcgggcggcggagttaagttaatagagtcggcggacggattcggcgtcggtttcgcggagggcgttaggttgttatttttcggggttcggacggggtcggcgggggtgcggagtttcggagttttcgcgtttttttaggttttatagttatcgagcggttttgcggagttgttcgaggtcgtcgggttagcggtttttcggagggcgtggggggcggggaggtcgcgcggcgtcgtcgattcggcgaatttcgttgcgggagttcgggagggttgcgagttcggtttggtaaagtttttgtggaaattttatgttttgaaatttttgcggcgtcgtagaaggagggggagaggggagcgcgggaagcgcgcgggggcggtttgtattcgttttttttcgtcggggagtgggtttcgcggtttttcgggttttatgggaaagttggagggcggggacggtcgggttttcgggttcg

SEQ ID NO: 339 - DNA, 17219 bp, Artificial Sequence
  chemically treated genomic DNA (Homo sapiens)
cgggttcggggattcggtcgttttcgttttttagtttttttatgaggttcggggggtcgcggaatttatttttcggcggggagaggcgggtgtagatcgttttcgcgcgtttttcgcgtttttttttttttttttttttgcgacgtcgtaggagttttaaaatatggagtttttataggaattttgttaggtcgagttcgtagttttttcgggttttcgtagcgggattcgtcgagtcggcggcgtcgcgcggttttttcgttttttacgtttttcggggagtcgttgattcggcggtttcgggtagtttcgtaaaatcgttcggtggttgtagaatttggggaggcgcgggggtttcggggtttcgtattttcgtcgatttcgttcgggtttcggagggtggtagtttggcgtttttcgcggggtcggcgtcgagttcgttcgtcggttttgttggtttggtttcgtcgttcggggtcggggtcgaggagcggaggtcgtcggttatggcgagcgaggttgggtatttggtcgttcgttttggagttttgttttgaagttcggcgtgggggaggggtagtattttattaaggagaaattttttgttcgtaagtaagatttcgtttgtagagtttttgttttgtttttgatttgataagtggatttcggttgcgcgggttttcgagagtcgagttagtcgcgttaggagcgcgcgggggtgggggtgggggtattcgcgtcgaggatcggggagttcggttgagcggggtcgacgtttgttttttcggttttcgggcgtattcgggagcgtagagtcgagcggtgattaatttgcggtttcgggttttttggcgcgtagttcgggttcgtttttcgttttttcgttttttttttttttcgtcgtttttttagtttagtagcgtagcgtttcgtcgagcgaatcgtgcgggttagggtcgtcgtcgtcgtcgcgttttcgggagtgtgggaagcgggtcgaggcgggtggttcgggagtcgtttttagtcggtttttttcgattcgggatcgaatgtgtatgtgttattttttttttaagtattttgattagcgtttttttttcgtagtcgaggagttagagcgaatcggggtttttaattttttgcgtgtcggttttatcgtgggttgagggaagagggtgtcgtagggagattggtcgatatagggtgcgattagtttggtttagtaagtttgagttaggaggagttcggtcggattcgaggagtttgtttaagcgcgggacgtttttttgtggagagtaggtcgttgaggttcgaggcgattcgttaatgtttaagtttttttaggggtagcgttgtaacgcgatttgtttggttaggtaaggtgcgggtttgaaaggttcggcgggcggaggtttttggaggggttcgggaggttatggcgggattcgtttttacgtattcggttcgttggcgcgtgggtggtttttaatttcggtggaggttttgcgttcgtttcgcggattcggttttggtcgtcgtttttttttttggtttaggtttcgtttgggagttaatgattgatttattggtttcgcgcggtcggcgtttttttagttatttgtttaagttgaggagttgttggcgagtagcgtagtaggttaagagagcgggggtcgtcggggaagggaagttacgttgtcgacgggaaggagaggttattagattagtttttatttggcggttttagttgtgtcggggtaaatttttaggaagtcgggttcgggcgaagggagtattgggaagttttatatgtaaatgggttggtagttggcgattaggtcgttcgattttatgagttataatgggtttttcgtttggtttttaatttgttcgttgtggattcggcgcgtttggggtttaagtggtggattatttcggtcgcgtagagggatatgtttttgggggtttaggtcgtcgaaggagttgagaaggattttttttttttttttgtagaaggtaatataaatattttaaattaaatcgtttcgataatcgaaggttttatatagatatattaataaggatttcgtttttcgcgtatgaacgtatagaaatatttgttttatttttatgtaaatgatattatataaatagatttcgtaggttcgggagaggggcgggaggaggaggggcgtcgttattttagttagggggttgtgagaggggaggggcgttaaattcgtattttagggttcgcgtcggttcgggcgtagcggggttggtattggttaggaggttcgtttcgcgggtagtggttttttgttagcgtcgttaagtcggtcgcgtttttaggttgtttgtagaggcggattagggaaggagcgaagcgagtttgtgattaatcgcggggtttcggatcggagtattaaggttatgtgcgattgataggatcgatattagtagaggatacggcgacgtttcgtttaattgtaggtttaaaaaattgtcgtttgagtagttttggcgcggagagttacggtttgcgcgtcgagttagggagcgcgcgcgtttgggtgggggcgggggtttttgttttttcgttttaaggttggaacgtttggcgttttttggatcgagggatttggtttttgcgttttttattttgttgggtcgtttcgtttcgcgtgtcgattaagtgtggttgagttcgttaggagagtacgatttagtttttagggttaggtttttgattcgattttttttttttaaattcgacgttttttcgttttcgttttagattttatacgggagggggttgtgtagttgggggtgatagattttaataaatttttaaaataaaaattatacgtacgaaagaaatatttttttttttttttttttttttatcgattgatataaagtttcgaatgattaaagggaaagaggtaagtcggggttgtagggagtaaggttatcgagtgttaaaatttcggggtttatagatacgtattttgagttttttatttttggttatagtttttgtggtttagatttttttggagtattggggtttttcgggggcgaagggagaagcgtcgggaggtcggcggttttgtgttggggagggggagtgggagggagcggagaatttagcgagagaagtttttattacgttttggtcggttattgttaaaattttcggattttttttcgtttgtatcgtttttcgttgttattataagtttggtttaacgagagttcgggataaaagtaaacgttttttatagatttcgaaaataaaggggaaagagacgcgcggggtcgcggagaagcggttgttagcgtaatggtgttaggtcgaaagtagagtattaaaattgtaaaagtcgcgcgggcgggaggaagtgcgaggcgggaggcgggagcgcggggagggcgggaggcgggagcgcgggcgggggaggggcgttgcgttatgttttcgtgttattcgtcgagtcgtcggcgttgggttcggtcgtcggttttcgtttgttttcgtaatagtagaaagcgtgcgattagtagttagataggcggggatttcgggttcgcggggtcgtcgtatacgtcgttcgcggttcgagttcgcgtttttcgttcgtcgggtaattatttttttcgttgtagcgttgtgtgtatttttattagagtagggaggtttttttttgtgtattcgttcggttttcgttggtaaaataacgttttttcgggtcgggttttgggttaggagagtcggggagggtgggacggaggtggggggtgggtgaggtagggtaagttttgtaggttagtttcgtcgtcggatttttttcggatacggaggagacggggagcgtttattggtttttttttaggtggagtggtaaagttcgagtttcgtagtcgattttacgtttttacgtggaggggggcgggtggagtatcggtgtcgttatgatttattttcgtttttcgtcggaggttagagtagggttgagggggagatgagtgtgtttggtttggagagcgggggcggatattgggaaggtttttaaaataggttttgttttatttgttttatgaacgatttttttaggttagaagtcggattttaggggtggcggtttttcgattttcgaaaggagattcgggtttttagtaggttttttggtttcgcgttttgtcgtttgtagtgggtgggagatgggggtggtcgaggtttggttgtttttggttttgagtttcggagttttattttttttttcgcgatttttgtatataatagtaggtagttttttatagtagtacgcgtttagttgtagggtttgggagtaggtgtttttgttcggtcggagtggcggtttcgcgttttttcggttttagttgcggagttgcgagcggtgcgggggggcgtgtttatggtggtagtagagggatagggatattttatcggatcgtaggaagggttttttcggtttatatcgggatatcgtagggttcgggtggtcgtttggggcgaggagggattaggggtgacgcgcggttagttttcgtttggaatagttttggggttagcggaggtcgttcggggcggcgcgagggttttcggttttcgtgattgcggcggcggcggcggggcggtcgcgaggagtatttttttttggttgttgtcgtcgcgcggttttcggaacggcgttttaggagtttttttgcgtttggtagcgtcgttttcggtttgcgttgggatgggggtcgtagggtggtttcggtttagtttttacggggaggggcggggaggcggggttcggagatttcgcgggaacggtcgcgcgttttttagtatttttttttcgtcgtcgtcgtcgttgttgttgatatggcgggtacgtgaagcgtagtttggcgtttcggcgttagttagggagcggtttgtttcgtcgatttagtttattcgcgggtttaggaacgcggaatcgagtttggtcgggtttcgcggagttcgtattttcgttcgtagttcgttgcggtttcgtatttttttttcgtttgagttcggttttggggtcgcgttaggcggttcgttcgaggggaattcgggttgattaatgggacgcgtgtgggttttacgtgaggttcggttgttagcggatattcgtttgttcggagtttagatcgcggttaagtttttcggggaagggcgagaggaggggttttttcgttgggcggttttagttttttagggataattcgttcgcggtaggttttaatttttggattttgtagtttggtttggagacggtagatttggtatgtgtcggacgttacggtgtcgattcggtcgggggtagggggtgggagtttcggggttgtgagttgggggtgggtagaggttaggttagtttggtttggggcgttcgttttgaggtttgtattttggggttagttattgggtcggggggaatttgtagggcgttttgaggtcgtggagtttgatattaaaatttttttcgataaagtttttcggaaattttttcgcgaaatttttgtgcggaaagaaggatttttaaaatttttcgagggttcggttcggttgggagttttcgggttttagggagtgtgattttttttttttttttttataggggtttataaatattagaagagtttttttttatttcgtattaataattattttatgttgatatagttatatgatttttttaagtataattatttgtttagtttgaaggtattgagtgcgatggcgaaatataaatatcgattagtaattaagagaaggaaaatttagtcgcgagtttgggttggatataggataaatttttattacgtatttttggttttatttagtttaattgtattagtaattttgtttttcgcgagaaagtttgaaattttgtagtcgaggtgcgattttttttggggagtttcgttaatggggggtgggttgttagtggaggggaggtgggttttaaatgttatttttaaatgaaaatttttttttttttttttttttttttttttttttttgatttagttttcgaaaagagtatttttgcgagataagaagtgatcgattaaaatcgttaaggggaggttgtaagtagtcgttttgttttagtttagcgttattttattttttatatttgtatggcggaaaaaaaaattggtttatttttatttttatttttttttcgttttaattgttaaaaaatattagtgtgttaaatcgggaggaaggaggtttttggagtgttagtggaaaaggaagatttaaaaatgtgggttttcgggggaagtaagggtggtagaatttatttttttttttaggtttttttggtataatatagggtgtagtttagggtggaaggttgggtggttttttttttaaattattattttaagaataaaatttgggtttggttttgggtcgtgtggtttttttaggtttcgttttttgaatttttttttttttttattttttaaaagttgttggtgggtttgggttgaggttttttattttgtttttatttttttttttttagatatattttttttttggggagggggggatgtaaggttaggatatatagtttgttggaaattattaaaatatatgcgagtgtttgtaaatatatatttttaaattatggcgttttttttttacgttggtttatttaaattttagagcgagttggatttttttttttttagtcgtttgtttgtgttatcgataggtcgttaatggtcgggtttttaggcgttgtgtattatgtattagtttttttttttcgtcgtatatagaaggttttgttaggtcgtattatataaattattttgagtttttttattttatttttcgtatttagggtcgggggttgcgcggttgttaacgcgttgggaacgtaggtatggagaggaggatgagtatcgagagtagagtggttcggaaggtggaatgggagcgggtgaaatgtgtcgaagattatatcgtttggaatgtttagttcgttgtgagttttaaagttttgtttttggttgcgattttttcgaggtaattatttcgcgttatttatttttgtgatcgattttgttgggggcgggagggtagaggtatttagagatagattagtatcgtttttttttttgttggttcgtatttatttttttgttgtaggcgaggggttggtagagttttttttatttttttagttcgggagtggtatcgcgaaggggttcggggtggtgcgttttcgtagggattcggtgggagtggaggagggaagttggatataaaatggttggggtcggaggtcggtatattgggttcgaaggcgagtagttggtggtttttcgttttttttttcggcggtttttatttattgtttttagtcgggtaaaatatgcgtagaaggcgttttgttaaataagtagtcgaggcgggacgtggcgttcgggtttatttgtaggagtattcggtttagcgcggcggcgtcgagggtttttaagtttttgtcgagcgtaagaggcggttagttttttagaagttttttgtattatgtttatttggtcgatatttaattattttgcgggttttcgtagtgtagatgttagtttatttatacgtgtttgtgttcggggagtttagggtttgatttaaatcgagtttagattagaaattttaagatggttgttaggaattacggagaggttgtttttagggttttttttttttaaatatttaataattttttaaaggttaggaagaagaaagaatagttatgtttagtttggcgatttttaagtttagtagttttttgttttgggaggtagttatttttagatgtttttagatgagtgaaattttgggaggaggatgcgttttttgtttgttatttcgtttgagttttagaggggaagttagttgtgttttgtgtttggaggatggggtagcggatgttttttaaagtgttattggataagtttagagtttttgtataaagtgattagaagattataagtgtgggtgtgtttttaaagaaaggttattttatattatgtaaaaatatattatttgtatttattcgagttttatttgttttagtattaagtgttatcgttttgagaatagttttcgaggaggattatcggaagtttatatatacgttataagttttatgatgtggattttagtatacgttataaataaattttgtatataaggttagaaggttagggtttttttaaatataggatgtttggttttttttttaggttagggtggagttggaggtgtgtgggagaggttttagcgggttttgtagagttaatttgttttgagaagggtagttaggtttaaggtttgtttttagaagggttagttcgattgtttagttgtagggtttggttagtttgaggtcgagtggtttgttataattaggagatatttttatgggaagggagattggtggcggaggggtagttttcgttgttttattcgtagtattttttatttcggtatttatttttttattttttcgtgggttgtacggtttttttttttatgtatttttttgtttatttttttttttttttttgtttttattgaaattttttttttgttgagtgttgggtatagtagtttgattttcgggttagttttcgaagggtttgtgggagggtaggagaggagggggtaggagaagggttaaatcgtcggtatttattgtaggtttcgcggtatttttagttttttgagtttttttttaagtgaggatataagatgggattgtttttcgatagttttttgtttgttttttttagaataattggaattaatcgggttaataggtgtaattttttttttttttttttgttttatagcgtttcgggaaaattttatattttaatttttagtgagttacgaattttttttattatttatgttttttaggatttttttaataagatatttttgaaattttacggagttgaaaaatgtatttttaggagatggaggagaaattttttaattttattagtttatcgtggaggtaagatttttagaaaaggtgggggaggatgttgtaaattacgttaaaggcgaatttattggtttgtttgtttttagtattaaattttttttttagttagtttttttttcggttttttcgtatttatagtatttttattatttttgtttattttaattttaggattttttttttttttttttttttttttttttttttttgagacggagtttcgtttttgttgtttaggttggagtgtaacggcgcgatttcggtttatcgtaattttcgtttttcgggtttaagcgatttttttggtttagtttttcgaattttaggatttttaaagttagataaataggtttttttgttagtagtttcgggaggtcgtaagattttgagaggttgtaggtttcgagttcggtttttggattttttaaaagttttggacgtttatatgcgatttcgaatttcgagaaaagtttgtgtttgggggtagagttggggagacgaggggaggggatagaaggtggttgggcgtcgggttagggtttttgcggttcggtttaatcgagtcggaagagtttggtacggttttatattggtttaggttagttttttcgtttagtttgtagtagtagagcggttttttcgtttggaattacgtttagagtttttttataaatatttagttttagttttttcggttatttttgatttgttttgaataaaaggagtcgttttaaaaagaaatgttgttataatatataattagaggttttttttttagttgtgtttgtaattcgtatgcgtttaatttaataatttttaatgtttggttttaaaatgtttttataaaaaatagttttatagtataatagtttaggtgtttttttgtttgttatcggagattaaaaaaatgtgtgggttggtttgtagagatatttatttttagaaagattaggaagaaaaaagcgtgtattttattttgtaggcgttggttttggaagcgttcgcggtttagtttggttgggtattgttcgcgggggtatttgttcgtttgttttttgtattagttgttataagtagttttggagtatgaagatttaattttgtcgaagtttcgggttttaaacggtagagatgttttatttttgttttgagaagggttgtttttataattatgtgttgagaattaaaatagaatgaataaaatcgtatttaatattagttttatagttagtagtgagtttaatttttaaaagggaaaatatttgttagttagagttgattttggttttgattttgatttagtaattaatttgagatgtttttgattatttttggtatggggatattttaggatattttaaaaatttttcgtgtggatttataagttatttttattttagatttatgttttatggagtttgtattattttgtttttaggtagaaagagatattttattttttttttagtataaaaagattttagtgggtagtcgaatggggttattattggtcgcgaagttcgggttcgtagtttgggcgcggttagttcggaatatttttttttttatttttattttttttcgttagttttattaattagggtttttcggttcgtttttgaggttttgcgtttcggggaggtcggaatttcgttttttcgtttttttttttttttcgtttgttttcgtttttttttcgcgtttagagtcgcgtcgggtgcgttggagaagtttaatacgtgttaattgaattgaattgttgcgggcgtaggttgtacgtcgtcgttaagtatcgattagtacgacgttatcgagtggaaatttatggggcgaacggtgtaagttaaaagttgttttttgttaaggaaaataaaacgcgggagataattttttaacgtcggggcgaggggtttgggtagtttttttaattattagaggtatagatcgtgaaaatgttcgagaatcgggagaaatataggcggattttcgttcgtcgatcgttttttatacgtttttcggtgtttttacgggttgtttttttttttttttatttttaaataatttttatataattgaaacgttcggggaattcgggcgcggagtttaggcggaacggttatcgttgtttggggtggtgtttttaggtagtttttaatatcgaaatgggaaagggtttttttgggaggaaggggtaaattggggtgggggtgagtacgggagtatataggttacgtttcgttgggtttcggaggggacgaggtcgggagagcgtagcgttggtggtaagaggcggcggtagcggttgttgtcgttggggtttgatagttttggttgagcggagtgcgaggcgttttatggtaattgcggttttttattggttttttgggtagcgaggggagtttcggcgcgcggttgggagagtcgttttcgtcgtttttattttttcggttttggttttgtcggtagttttcgtcgtcgtcgtcgtttaagtcggttttcggttcgtttaggacgtgcgttcgggtcgggcgtgcgtagttaattcggttcgagttggggaggggaggtcgggggacgaggagggggggcgttatttaagtggttcggggttcggatttagagaggttaaaacgtgtcgggtcgtgtatcgatgacggtcggggaaattcgggtaaattttttttggggaattatttttttcgaaatttcgtcgcggaggcgtcgtagcggagggtgagcggagattggcggagtttaaatttgcgagagttggaggcggcggcgggcgggcggttgtcgttcgagcgttgcgtttgcggggggaggggaggcggttgttgggagggagggaggtagggcgggcgggagggaggacgggcggagggagggggaggaggaagaggagggaattagggaggggggacgcgttgggatcgcggcgtgcggcggtagacggagtttgggtttttagcggtaaggtgaggtagagttgcgtttttcgttgaacgcgggtcgagttcggcggttgcgggggagacgcgtaggagtttagatcgcgatcgagagcgggagttaggcgggcggcggcggcggagggggagttcgcgagtcgtcgggcggagagtttaagtcgcgttgtcgtcgcgtagggacgatttggttaatatttatatatatttatatatatttagttcgagcgggcgttcgcggcgaatcgttaatatggcgttggggtttttgttcgagcgcgggcggcggcggtagcgcgggagttgttgagttcggttaagtttagtttagttgcgggagttcggaggatcgtacggggttgtcgttatttgttcggaggtttcgagttcgtttcgtttcgtttttattcggtttagagtttatttttcggcggggtcgatttcgagggtagtcggttgttagtagacggcgagggagtcgagtgagcgcggcgtcgcgagcgggttgcgggtagtcggggatcgtaaattttgttgttcgtcgcgttttttcggttcggtttttttttcgttcgttaacgtcgttaattttttttattttttatatttttttttatttatttaatcgtttttcgttttttttcgtcgtttcgagttcgtttgggggaaaattttaaagagtcggatcgtaggttttttgtttatttttttatcggggattttaggttagtgttcggaatatttttttttcgggagatcgcggacgggtgggcgggcgggcgcgttgagggttgtagtcggttttttttttcggggttttttttcgtagcgtatttcgcgaagtttttgtttcgcgtttttttttggttgtttggttcgttttcgtttttattttatagttatgttatttaaaatgtagttaatttaagcggtttcgcgtgggtattagggagggagggggcgcggttgggggtttggcgtttttcggtgggttaggaggagagtagggagttcgtagagtggaagtttgtagtttgtgtgtgtttgtgcgcgggagcgcggtcgtcgttgagcgtcgcgagtcgggcggaggggggggaggtgggttggaagttgggaagttgggttcggcgttagttcgcgagtaggaaggggagggtagcgggttgtcgtttgttttttttttcgattcgggaaagaattgtaaaaatttttagtcgtcgttatcgtcgtttcgtttcgttttttcgggggtcggtcgtttttttaagtggaacgtcggcgtgtgcgtgcgcgagggtgtgtggcgagtgtttcgggtcgagtcgagttcgatttgtcgtcgttgtcgcgtaattcgggaggggagtttcgtttttttttggtttgttttaaagtacgaattacgtggattaaaaaaaaaaattattaagaaatcgagtagagtaaggggtttcgatttggttcgttcgttagttaggttagacgttttgttttgtaaatgtttttttaagattataatttgcgatttttttttcgttttttttttttttttttttttcgatgtttagcgtaggttttaagttatgagtttttaggggtgggtgtagaatgtgtttgtgcgggggtagcgtcgtggagggagggcgggggcgggcgagatttgggtttttcgttgggtaatggggagtttggtgggtagttttgatgggcgtgtgaaagtttgcggtcggaggaagttggttttattcggagggcgtgtggtaaggaggttgtaggcgaagaggaatttgcgtatcggggtaagattttcggttaaggcggggagggcgaggcgtcgcggggttcgcgttcggagtcggcgggcggttgcgtcgtagagttttcgttaattcgggggttcgcggcggcggtgacgagcgtttgttgtttacggagagagttttggggtatcgtgtgtggagtagggcggtcgaagttacgcgtggtttcggcgggtttttcgtcgttcgtacgttcgagtgggtttttttcggggtttcggagacggacgagtttggtagcgtgtaggtcgtggtcgggcgaggcgtaatttgttgttaatgaattttttttagaaagttcgcgatttttagttagaggttgtgagtgttcgcgcgttagggcgcgcgtcgtcggcgtttggagggtgggggtggggggaatggaagagcgaagaaggaaggaggagggttatgtgtatttagaaataaattttaaaaagaaattaacgcgttttaaataggtattcgtatagtttcgttgcgtttagattagatagttcggggttttagttgtgtttttttttttttttttcgttttgagaagacgttagaggaggggtagtgtggtatttggttttaggggtagttttttggagaaagatttttaaaatggtttgggagtaaagattaggaggaaatggtttattttagaaggtggtgggtggtgagtgtagatagatttgggtatttttggttatttgatattttttgtggtattggaaacggatatcgcgggtcgaaattaatttttacgaagtgttgggttcggttttgttaatagaattgtttgcgtggaaggtattttaattgttagttttaaagatttttgtacgtggatatttagggaatacgttcgttttttgattttgtttatttttttttcgatttgttatttggtgtgggttttgtagtgttggttttcgtgtttattttgggtagggttttagcgcgtagagcggagtggggggggaaggcgatgattaatatgttatttaggtttaattcgaggttggtttttagtgtgcgggtatatatcgttacgtatattaattgttttggggtgtttaggggagcgcgcgggttttgggtagtaggcgttcggtcggtaagtcgcggttggggttcggttggttttagcgttgttttttgaggcgttgttattagtaggtgattgagagttaattaggaagtgtttttcggattaatgggttgtatagtttattagcgattttttttagttttttgtagggtcgttttggttttcgttttttatataggtcggggtttcgttgtttaggttgcggggagcgtcgttgggaagtggggaggggtcggtagcgagggacggcggggaagcgagtgtaatttcgcggggcggcgcgttgcgtgcggcgtttcgaggttcgcgtagttcgttttttttttttgttcgcggtcgtttttattgtgtttttaattcgttttcgttcgcgtcgttgtttggttgttttttttcgtttttcgcgtttattttttgttttttaagtacgacgtttgtgtttttcgtttagtttaggattagataagataaaaataggattgtttagcgcgcggagttgtgattgtgtttcggtagtcgggttggtgggagcgcggggggtcggagttggagaggattcgtggtgcgttcggagcggttagtgtttgtgggttttttatttttatttcgtaggtatcgttacgtttttcgggttttgttcgtcgtgaatcgtgcgggtcgggggatttgggtagggttttcgcgttttcgcgggtgttgttggtgtgtcggtgatagatcggtttagataggtatgtaggttttttttcggttgaaggattggaggggggggaggcgcggagatggtagtagattttgtgagttgcgagtgagcgagttagttttcgggtttaggagttgggtggagggaaggtcgtgggggttttttttaattttttaaaggtcgtggtggggtagtgtaatagggaaaggggggtaaagagtttagtggaaatttttggaggtagagtagttcgtagtggggaggagttgtgagtttgggtttagggttttttttttttttatgtgtgtacggttatattttggtgtatcgggttcgatttttttataaattaaacgtagttgttagatgatttagtttgattaggtattttttagtcggggagttgtgaatatatataatgaatatttttattttaaaaattgagtttggaagatagacgtagatttaatgtttttaaagagaatttatgcgggtgtttaaggacgggaaggtttgtatatagttgtagtcgggtggggtttttgattatgattgttgtagattaaggatttgagtttgaaatgtttcgttagtatgtataggtatgtattgaagagagtaaagcggtttttgagttgtttttatataaatagatatatttttaattaggaatttgtgaggagttagatatgtgtaaggagatagtttttaaagaggagttggatattgatgtgttgtgagatttatcgtttgtgtgtgtatatatatggttaatattaaattggtttaaaattttaatatatttttgtagatatttatttagttttttttttagtttgaaatgggcggatgggttattttatatataaataatttattattaatattttagttttttttttttttttttttttttttttaagagtttgtgattttaagggattttttgtttatatttaaattgtaaatttatattggtttggtttgggaaagagttatattataggtaaagtaaaaagaatggaagtagtacgaatgtttagattaagatgtgcgtttgaatgatatgtgttgagataaattaagatatttgggtttcgttgtttaaatggaataagagatatataagagataaagaattggttaaggggaatgtaaatatgggtatgtaaatatagagatgtatagcgatattttgagagaaaaattttagattttgttgagttggaaattggggtagaatttttgtaagtgcgttttagagataatagtttatttaaaggtgtgaagagggttatttggaaatataaaaagtatttatatgtatatatttatgtttagatatataggttgaatgataaatattttttaatgtttgacgaagatttttttgtcgagtgagtgagatcgatttgggtatagaagagtgggttatataattatatttatatatttatttatagggaaataatgtgtttttggtttgaaggaaattgagggttacgttagtagtttaaaggatggatggtgtgtagtgaa

SEQ ID NO: 340 - DNA, 2264 bp, Artificial Sequence
  chemically treated genomic DNA (Homo sapiens)
gattagtttggttaatatggtaaaatttcgtttttattaaaaatataaaaattagttgggtatggtggtgtgcgtttgtaattttagttattcgggaggttgaagtaggagaatcgcgtgaatttaggaggcgtaggttgtagtgggttagagatcgcgttattgttttttagttcgggcgatttttaggttaaatcgtgttcgatataaaagtttatatcgatatagatttttcgatataaaagtttatttttttttgataggtttgatcgatttttttttttataaagataaaagttgttttaatatttaagaggaattatattgcggtgaaaggggtgttacgaattttgggttttagtttttgtattacgttttagtgtgatattggattttaatttttttattattaaagttaacgggttattataatttttttagaagtagttttaatttttaaagataagattaaaaatattaatagtgtttgagtttttggaatcgaattagtattggagttttgtttggtcgttttttttttttttttttaagattaacgatttggagggaattttggtgagttcgagttttcgtaatttgttagggattaattagaagttcggcgagtagttagtaatataatttttgggtatttttttagttttattagtatatttttttttatttcgttttttttcgttgtagttttttttaagtttatatttgcgttttcgttagttttttttgggattttatcggtgtcggtagttttcgggttttcgggtatagcggtcgttttattcgatttttttgtttttttatttttgtcggagggcgattcgtgggtatcgtttattacggataggattggaggggagaggagatcgcggagatgtttgaggtagaagttcggaaattcgagttgtataggttaggattttattttttgtcgtcgcgtagcgatgatattatttttatcgtttttttgaggggttattttgaggcgcgcgtagaggattagaggatttattttaattttggtttggcgatagtgggaagcgggaaaattggacgtaaagagtttagattatggatttttttcgttaggaaattagtatttgtgaaggagcgtagttttgtttattaaataattttttttttttcgtttgtttaaaaatgtaatgttagttaattttttcgttaattttttagagtaaagttgggggattgggagaaaatttagtttcgttgtatggcggtgtcgtggaatgaggtttttcgggattggtaaatttttaggtaaggatttaattttgtatattttaattggttcgaaatcgcgggtttgtgtgtatatagaattgttagtattttttttttatttcgtaagtattttaataataaaaagttatatagttcgagtagaatttatttaatttatttatttatttataattattgattgtttatttcgatttagaaatagtgttagtattagggaataaaatatatatagtttttatttaattaaatgattttttttagttcgttagtattgaagattgaggtttgtttttataagtttgatatttttttattagtttggttaattttattaaaattaagaggaaagtttaaagagaggaaggtgttttttttgaacgttttattttaatgaattagtttacgtattgggaggatgaagtggtgaggatatttttgttttaaaatttttttttttttttttattgagatacgagggggagggcgttttatttatttgggtatgattaggttttcgtatttattatatatttaatttatgcgtgttgaaagaatggatttggaaatgtaggtgcgcgttatatttatttttttgtttttacgttgtttggacgaattatcgtattttttgttttaggagtttttaaaatttttggggaaggagcgtatttcgggaggcgcgtataggtgggtttgtttgtttttttttatttgtataatgggggtttataaggcgttgtttttatgtttcgagaggcgtgtttcggtatagtaaagtttatttgcgttggttcgcggagtttcgtttagttaggtgagttagggggcggggcgcgggggcgcggtgacgcgtgacgtcggatttcggaagtgacgcgttcgtggggaaaaggtagggagggggtggtgtttttagtcggtttggggggtgcgttgttcggagacggaaagtttgggagttcgagtaggttcggttgtag

SEQ ID NO: 341 - DNA, 2264 bp, Artificial Sequence
  chemically treated genomic DNA (Homo sapiens)
ttgtagtcgagtttgttcgggtttttaaatttttcgttttcgggtaacgtattttttaaatcggttggggatattattttttttttgttttttttttacgagcgcgttattttcgggattcggcgttacgcgttatcgcgttttcgcgtttcgttttttagtttatttagttgggcggggtttcgcggattagcgtaggtggattttgttgtgtcgagatacgtttttcggggtatggggatagcgttttgtgggtttttattatgtaggtggaaagggataaataggtttatttgtacgcgtttttcgaagtgcgttttttttttaaaggttttgggagtttttgggataggaaatacggtaattcgtttaggtagcgtagaaataaagagataaatgtaacgcgtatttatatttttaagtttatttttttagtacgtataaattaaatatgtaataggtgcggggatttagttatatttaggtgaataaaacgttttttttttcgtattttaatgagggaagagaagaaaattttaaaatagaaatatttttattattttatttttttagtacgtgaattagtttattaaagtgaaacgtttaaaggagatatttttttttttttaggttttttttttagttttaatgagattaattaaattgatagaaaagtgttagatttgtaaaaataaattttaatttttagtattggcgaattgaaaaaaattatttaattgggtagaaattatgtgtgttttgttttttggtattagtattgtttttaaatcgaagtaggtagttaatagttgtggatgaataaatgaattggataaattttgttcgagttatatgattttttgttgttaaggtgtttgcggaatggaggggaaatgttagtaattttatgtatatataggttcgcggtttcgggttagttgaaatatataaggttgagtttttgtttgaaagtttattagtttcggggagttttattttacgatatcgttatataacggaattgagtttttttttagttttttaattttattttgaggggttaacgaagggattaattgatattgtatttttagataggcgaaaaggaaaaagttatttagtaaataaaattgcgtttttttataagtgttggttttttagcgaggaggatttatagtttgagttttttacgtttaattttttcgttttttattgtcgttaaattaaagttaaaatgagttttttagttttttacgcgcgttttaaaatgattttttaggagagcggtaggggtgatgttatcgttgcgcgacgataggaagtaagattttggtttgtgtagttcgggttttcgagtttttgttttaggtattttcgcgatttttttttttttttaattttattcgtgatggacgatgtttacgagtcgtttttcgataaaggtggagagataggggagtcggatgagacggtcgttgtgttcggggattcgggggttatcgatatcgatggaattttagaggaaattgacggagacgtagatgtggatttgaaagaagttgtagcggaggaaggcgaggtaggaagagatgtattgatgaggttgaaggaatatttagagattgtgttattggttgttcgtcgggtttttggttagtttttaataagttacgagaattcgaatttattagaattttttttagatcgttaattttgagggggaagagaggggacgattaaataaaattttagtgttggttcggttttagaggtttaagtattgttaatatttttagttttgtttttagggattaaagttatttttaagggagttataatagttcgttggttttggtggtgaggaaattgggatttaatgttatattgagacgtagtgtaagagttaaaatttaggattcgtagtattttttttatcgtaatatggttttttttagatgttaagataatttttgtttttataggaaggagggtcgattagatttgttaaagggagatagatttttatatcgaaaagtttatatcgatatagatttttatatcgaatacgatttaatttgagagtcgttcgggttggagaataatggcgcgatttttggtttattgtaatttgcgttttttgggtttacgcgatttttttgttttagtttttcgagtagttaggattataggcgtatattattatgtttagttaatttttgtatttttagtagagacggggttttattatgttggttaggttggtt

SEQ ID NO: 342 - DNA, 3104 bp, Artificial Sequence
  chemically treated genomic DNA (Homo sapiens)
gcgggcgttgtcgagtacggggaggtgttgaaatagttttggcgtgttgatttaagttttgattggtagagttattcggtgattgatagggggtttttatggcgttcgcgtcgttaattcgtttattttaatagcggagttagttcgtttgtcggcgtgtttgagtcgagtcgagttcgaattttaagtcgcggagttagtattttttttagtcggggtcgttcgttttcggtcgttgagttatcgtcgttattcggtagtgtgtttcgttgttttaattcgttttattaataagcgtttggtatatttagttaggttcgcgggtatttgttgcgtgtttcgtttcgggtttagtgttttcgtcgtcgtcggtattgtttcgatgttttagttgtttattttgaattttagtttttagtaagtggtcggggtatgtgagattttggaagagagcggcgatgtggagcgtttgggtcgttttttttggtcgttgttcgtggtttttgcggtttgcgaggtttttaataagaatgagtcggtgttacgcgtacgagttatcgtggttttttacggtggtaattatcgcgagttttattatattttggaaaattataagtttattaaggagtcgtacgttaagttgtaggcgttgtggtttgaagtatattattaggaggttgagaagttgcgtggaagatttttgggatttgtggataagtatcgagtaaggaagaagttttcgttgtcgcgtattatttgggacggcgaatagaagatatattgttttaaggagcgtacgcggtatttgttacgcgagtggtatttgtaggatttatattttaattttagtaaaaaacgtgagttcgtttaggtaatcggattgatttttacgtaggtgggtaattggtttaaaaatcgtcgataaagggatcgagcggttgtagttaagaataggtcggtatttagaggttttcgcgttttgagcgtatcggggaggaggcgggtggaggtatttttggcgtttttatttagtttttggcgattttaatttagtaggagttgggagcgcggtttgttttgggttaagagttttgcgttttgggtttttggtcgggagtttttttgtcggttttgtttttttattcgttggttttttacgtttgcgggtagttgtagtagttggtttcggttattaaattaaggttttattgggacggagaggggaagagaaataaaaaattaaaattttataaatagttagggattttaagatttaaagttaatttttgttagtttgggtataggtttttattattaatcgaagtttggtttattagtaatgtgtcggttttatgttaattattatttttaaagtttaggtatatttttttttaatgttttgaaaatagtttttaatggatttttgagaaatgggaagtcgagtttttttttttttatgcgttgtttgttatttttgttttaaaatagtaaattagttcgtgggtcgaggtttttcgtttttcggagtgtggatttcgattagttaaatattttgcggaagagttcggttttattttttaggtttaaatgttttttataattttttttgtttttaggtcgggtcgattcgatttaacgcgatcgcgggagtatttgtttaggcgtaagttttaggtagacgtatcgttagaaatggtattttatgtttttgggatcgatttgtttttgttatttatatttcgtttattttttgatagttttgtaaattttttaaaagtgtataataaatagggaggatattgtaagtttagtatataaaagatttgggagttgcggcgttgagaaagggcgcgaattatggtggggtataatagtagggattcgcggaggggcggtcgcggatttttgttcgatttttgtcgttttgtcgagtaattttcgttttaattgttggggttttcggaagaatttttagtcgtcgggttggagggacgtaggaggtggtgggggcgggcgacgggcggttgtgttacgagttgtgattcgtgttttttttttttttcgtagattttagtagtaggttttgttatagggtttcgggcgggtattacgggcggagggcgacggtacgttagaggtgttgggcgtcgttattagttcggtcgttagtttatttagtaaggcggttattttagttatttttattacgtttagcgatagcgagtgcgatatttgagttgtttatttaggatgtttagaagtagattttagtgtaaaaacgagaaaaataaaatgaaagaggggaagaagatgagagatttgtaaatttagcgttatagaagttaggtgattagggattcgcgggttcgggttgtcgtttttcgttttatttcgcggtcggtttggttttattggcgttttttggtcgcgattacgggaattagcgtgaggtttgatttagtattacgttttttttgttttgtttttttttaaggattttgttgtaaagttttttcggaattcgaattgtaagttgagcgtttgtttagatttttttatgggtattttacgtcgaaaggacgttgttatatatgtataattttcgttttaaagtttttttttaataaaatatatatatgttgtttatttatttatttaagagatcgttatggtaggtttttttgtagtttggggaatttgttgtttttaaatatgtaggttggtggtgatgggttttgtgtggagaagttaaataataaaataatttagtgggtaatttttttaattaagggagttgtttttagattttttttttttttattattattaatattattttttttattaggtatgtagggatttttgagtaaatggttttcggaaggttttatttatatattttttgttttttttggtgttttttggtatatgttttaaataatttatggtaggtttataattattttttacgttaaattatacgtatgtgtatatatgtatgtatttatataaatatatgtatgtatttatataaatatatgtatgtatgtatatacgtgatatatttaaggttagaaattggtaatatgtgagcgtttttttta

SEQ ID NO: 343 - DNA, 3104 bp, Artificial Sequence
  chemically treated genomic DNA (Homo sapiens)
tagagaggacgtttatatgttgttaatttttagttttaaatatattacgtgtatgtatatatatatatgtttgtataggtatatatatatgtttgtataggtatatatatatatgtatatacgtgtaatttgacgtgggaggtggttatagatttattataggttgtttaaaatatatattaggaagtattaaagaaggtaaaagatatataggtaagatttttcggagattatttgtttaagggtttttgtatgtttggtgaagggaatgatattaataataataagaagaaaaggaatttgagagtagtttttttaattaagaaggttgtttattaggttgttttattgtttggtttttttatatagaatttattattattagtttgtatgtttagaaatagtaagttttttaagttatagagaaatttattatggcggttttttaaataagtaaataaatagtatatatatgttttgttaaaaaaaaattttaaagcgaaagttatatatatgtaatagcgttttttcgacgtgaaatatttatgggagaatttgggtaggcgtttagtttgtagttcgggtttcgaagagattttgtagtaaaatttttaggaaaaagtaaagtaagaagaacgtggtgttgggttaggttttacgttggttttcgtggtcgcggttaaagggcgttagtgaagttaggtcggtcgcggggtggggcgggaaacggtaattcgagttcgcgggtttttggttatttggtttttgtggcgttggatttgtaggttttttatttttttttttttttttattttgtttttttcgtttttatattggaatttgtttttgagtattttggatgggtaatttagatgtcgtattcgttgtcgttggacgtgatggagatggttgaagtggtcgttttgttggatagattggcggtcgggttggtggcgacgtttagtatttttggcgtgtcgtcgtttttcgttcgtagtgttcgttcggaattttgtgataggatttgttgttggagtttacggggaagaaagggaatacgggttatagttcgtaatatagtcgttcgtcgttcgtttttattattttttgcgtttttttagttcggcggttagaggttttttcgaagattttagtagttaaggcgaggattattcggtaaggcgatagaggtcgggtaggagttcgcggtcgttttttcgcgggtttttattgttgtgttttattatgattcgcgtttttttttagcgtcgtagtttttaggttttttatatattgggtttgtagtgttttttttgtttgttgtgtatttttgggagatttataggattgttaggaaataaacgaagtgtgggtgataaggatagatcggttttagggatatgggatattatttttaacggtgcgtttgtttggggtttacgtttgagtaagtgttttcgcgatcgcgttggatcgggtcggttcgatttaaaggtaaaaaggattgtaaggagtatttgggtttgggggatgaggtcgggttttttcgtaaaatgtttggttaatcgagatttatatttcgggaaacgaaaagtttcggtttacggattagtttgttgttttgagataagagtggtaggtagcgtatgggaagaggaaaattcgattttttattttttaaaagtttattgaaaattgtttttaaagtattagggagggatatatttgggttttgaaaatgataattaatatgaaatcgatatattgttaataagttaggtttcgattaatagtaggagtttgtgtttaggttgataagaattagttttgggttttggggtttttaattgtttgtaggattttaattttttattttttttttttttttcgttttagtgaagttttggtttggtgatcgggattagttgttgtagttgttcgtaggcgtggggagttagcgggtggggaagtagagtcggtaagggaattttcggttaggagtttagaacgtagggtttttaatttaagatagatcgcgtttttaatttttgttgaattggagtcgttagggattgggtaagggcgttagaggtgtttttattcgtttttttttcggtgcgtttaaagcgcggaggtttttaggtatcgatttgtttttggttgtagtcgttcggtttttttgtcggcggtttttgaattagttgtttatttgcgtaggggttagttcggttgtttgggcgagtttacgttttttgttggggttagggtatggattttgtaggtattattcgcgtagtaggtgtcgcgtgcgttttttgaagtagtgtgttttttgttcgtcgttttaaatggtgcgcggtagcgggaattttttttttattcggtatttgtttataggttttaggggttttttacgtagttttttagttttttggtagtgtgttttaagttatagcgtttgtagtttggcgtgcgattttttggtgaatttgtggttttttaggatatgatagagttcgcggtagttgttatcgtgaaaggttacgatggttcgtgcgcgtagtatcgatttatttttgttgagggtttcgtaggtcgtaggggttacgggtagcgattagaggaagcgatttaggcgttttatatcgtcgtttttttttagggttttatatatttcggttatttgttgggggttgaaatttaagatgggtagttggaatatcgaggtagtgtcggcggcggcgagggtattgagttcggagcgggatacgtagtagatgttcgcgggtttggttgagtgtgttaggcgtttgttgatgaggcggattggggtagcgggatatattatcgggtggcggcggtggtttaacggtcgggagcggacgatttcgattggaggaggtgttggtttcgcggtttggggttcgggttcggttcggtttaggtacgtcggtaggcgagttggtttcgttattggggtgggcggattggcggcgcgggcgttatggagattttttgttagttatcgggtggttttgttaattaaagtttgaattagtacgttaggattattttagtattttttcgtgttcgatagcgttcgt

SEQ ID NO: 344 - DNA, 2493 bp, Artificial Sequence
  chemically treated genomic DNA (Homo sapiens)
attggtatgattagagtagaaggagggtattttaatttttagttttatttatcgttttgtaagaattaggaaaatgaatttttgttggttataaaattagttgtaggtgatgtaatttattttattcggttttttatatttatagttatataggaataattttttgaaatttagtttttttattcgtaaaatgggatggtaatacgtgtttttgggagttagcgagaattaaaagggataagatgtattggtttttaggggtaagtattagtagataaggaatagggtagttttttttttatattttatagagaagaaatgttttttaatttttttaggaggtagagtttagttttttttttaaatagttttggagttgtttggtttttttatttttttaacgaagttgtgggtagaagataaatgtagagtttttttgtatttgataaggagagagaagtagattttgtgtgagttttttgttgttgacgttgatttatagggggtgtaggatgggattgaggtaggtttatttgtttggaaagtttgtttgtattttgattttatggggttttaatatatatttttttagttataggggttttgtagagttaagttagttgttttatggaggtggggattttttttttgttttgttatttttttttttttttggagaggataggtaggtgggtatggttataggagaatttttcgaaggtgttaattggtttagagaaagaaaggtggtttggtagggagttgtttattagagattgagagagtatgggagaagttgagagggaggaggaaagtgtacgttattttgcgcgtagtttcgttttagggaaagtatgtgtgagaagtggtggtaggcggttgttagttttggaaataaataaatagttaattaaaaggtttcggaaggaaggagtgtttaattaattagtttcgagggataggttcgtattgtttgattgtgttttttagtttggttttaggttatcgagtttaagtttttgttatagttttagggtcgaggttgtttttaaagagttttgtaattgttttttatttgtgttttatttaaatattaaggttggcgtaggtggatatttttttatttttttttttttaggttgggttttagaaattagtagaggagggaggaattagttagcgtggttatgtttgggaggagaggttcgtgtgggtttgtggggttaagaggtaaaggcgggtggcggatgtgggttagcgggagtttggaggggttgatatcgtttgttttatcgtaagtttttggaggaagagtttcgttgtgttcgagagcgagcgcgggtaggtgtaattattcggggttggggtttcgggggtttcgcgtagttttttttttttttagggatatcgtttagttgcgtttcgcgtttcgtcgattgcgcgggttttgagacgttggtggttgtttcggggttggtttgtttttcgcgtatatgtttagggttattcgcgttgcgtttttgttttaggtgtttggttagagaaagggcggtaagacggggtagtgcgtgtgcgcgcgcgggtaagtgtatgtgagtgtatatttatgtgagcgtatgtgtgtttgcgtttgtgcgtgtttaggggaattatagggagtatttttattttaagtttttagaggattgtttgaagtcgttagatagaaatttttttagaatgtaagtttcgggggggagggagttttgtttgatggttgttgtatttttagtgtttattgaagtattggggatatattagatgtttaataaatagttgttgagttaattaacggattttaggaatggaggtagatcggtttttttggaattggagaaaggataaggttatattttatcgttttttttgtttttggtattagttttggcgttttcggtaacgttaattttttttatatttagtttgtgttaagtttttttttttgttcgtgtttatatttttttttttttgtttttgttttttgttggtttttgtgtgtaagtattttagtagttagagtgagaggaagacgaaagaagtagaattttggaaatagagagttattagggtggttttttttttttggaaggatacggaaagatggggtgagattggcgtttttttttagtttttttttttgggaattgggattttgagttttagtttttttattttgaaatagtagttattttatttgtttcgtaggattgttgtaagaagttaggtaggaggttgaaaagttttggagtatatgataggtgttatagaaacgttcgtttcgttttttgattagtatttaatagtttgggagtgttttaggtgtggttgagggtggttatggtttgataattattattagaatattttttttttttttataaaatgttttgaggagaatttaatggttgtcgaaaattaaggtaagttttatttttaaaatatttaggagttaat

SEQ ID NO: 345 - DNA, 2493 bp, Artificial Sequence
  chemically treated genomic DNA (Homo sapiens)
attgatttttgaatgttttagaaatgaagtttgttttaattttcgatagttattaaattttttttaaggtattttgtgaaaaaaggaggggtgttttggtggtggttattaaattataattatttttagttatatttggggtatttttagattgttggatgttagttaggagacgaaacgaacgtttttgtagtatttattatgtgttttagaattttttagttttttgtttgattttttgtaataattttgcgaggtaggtggaatagttgttattttaaagtgaggaaattgaagtttaaagttttaatttttaaagggaggagttgaagaagagcgttagttttattttattttttcgtgtttttttagaaggaagaggttattttggtagttttttatttttagaattttgtttttttcgttttttttttattttgattgttggggtgtttatatataggggttagtaggaaatagagataaaggggagaaggtgtaaatacgagtagggaggaaaatttggtataagttggatgtgagaaggattggcgttgtcggggacgttagggttggtattaagaatagaggagacggtgaaatgtggttttgttttttttttagttttagaagggtcggtttgtttttatttttagagttcgttgattaatttaatagttgtttattaagtatttaatgtgtttttagtattttaatgggtattgggaatatagtagttattaaataaagttttttttttttcggagtttatattttaggggagtttttatttagcggttttaggtagttttttggaggtttagaatgagggtgttttttgtggtttttttggatacgtataagcgtagatatatatgcgtttatataagtgtgtatttatatgtatttgttcgcgcgcgtatacgtattgtttcgttttgtcgttttttttttagttaagtatttgaagtagaggcgtagcgcggatgattttgaatatgtgcgcgaggagtaggttaatttcgaggtagttattagcgttttaaggttcgcgtagtcggcggggcgcggggcgtagttgggcggtgtttttgggagggaaggaggttgcgcggagttttcggagttttagtttcgggtagttatatttgttcgcgttcgttttcgggtatagcggggttttttttttaggggtttgcggtggagtaggcggtgttaatttttttaggttttcgttggtttatattcgttattcgtttttgttttttagttttatagatttatacgggtttttttttttaggtatggttacgttgattgattttttttttttttattgatttttggggtttagtttggagggagaaaagtgggaaggtgtttatttgcgttagttttggtgtttgggtgagatataggtggaaaataattatagggttttttggaaatagtttcggttttggaattgtggtagaaatttggattcggtggtttgaaattaggttgaggagtatagttaggtagtgcggatttgtttttcggggttgattaattagatatttttttttttcgaagttttttggttggttgtttgtttgtttttaaggttagtaatcgtttattattattttttatatatgttttttttaaggcgaggttgcgcgtaggatggcgtgtatttttttttttttttttaattttttttatgtttttttaatttttggtagataattttttattaggttatttttttttttttgggttagttagtattttcgagaagtttttttgtggttatgtttatttgtttgttttttttaggagaaagagagagtggtagggtaggaggagggtttttatttttataggatagttggtttagttttgtagagtttttgtggttgggagggtgtgtgttagggttttatggggttagggtataggtaggttttttaggtaggtgggtttgttttagttttattttgtattttttgtggattaacgttaatagtaagagatttatatagggtttgtttttttttttttgttaggtataagagaattttgtatttgttttttgtttataatttcgttgaagaagtggagaggttaagtaattttaaggttgtttggaaggagagttgggttttgttttttgggagagttggaggatattttttttttgtggagtgtgaagggaggattgttttattttttgtttgttagtgtttgtttttgggagttagtgtattttattttttttaattttcgttggtttttaggggtacgtattattattttattttacgggtgaggagattgagttttagagagttgtttttgtatagttgtaaatatgggaggtcgaataggatgggttatattatttgtaattagttttatggttaataggaatttatttttttggtttttgtaaagcggtggataaggttgggaattaggatgttttttttttattttagttatgttagt

SEQ ID NO: 346 - DNA, 2315 bp, Artificial Sequence
  chemically treated genomic DNA (Homo sapiens)
ttgtatttggcgtgaggttttttggttacggacgttgttggcgttatatttgtggtatttgaggtgaattgtttagatggaaacggtattattaggtaattggtaatagaagtttaaagttttgggtgttttaggttagaggaaggaaggaatgtaagggtttcgttttttttaatgttaggagcgtgtgtttatagttttagataggataatttattgtaaatttaaagtagaaaatatggtttaattttatttttgtggtatttttatagatggtgtttatttgttttggtagtgatgatcgatattgcgaacgttgtgttggtagtgtgtttaagggttttaattgaattatttcgatggagttgaaatttagttttattttatagaagagaaaattgaggtttagagagattaggtgttaagttttatgttaagtatagggaagtaaaaataggatatatttaatataaggtggttttaggaattagtggttaggatacgggaggtgtgttgagcgtagatgggtagatgtaagttgaggtggtttgttggagggttttggattttttagaaaagaggatattagttgtttagggagggaaggtttgagatggattttggttggtgtggattagtttatggtgtgtttgtaggtagggatattttgaatagatatgggttgaggggagtttgtgtggagcgtggttagtgaaggttgggttggtcggtagggttcgttggttatgggaggtttggtttgtagtagtagggtttattaaagatatggggatggatggttgatggataagatggttgatggatagcgttttagaaggtcgtaggtttgtttaggttgaggttagggagggttagggtttttagggaaggagagtaagttaggggagttttttgtatagaagattttttatttgaggtcgttttttaggagtttagttatttcgtggagagtttggcgttgattgtggaagaggtgatggacgtgcgtcgtgtgttggtgaaggtcgagatggaaaagtttttgtagaataaggagttttttagtagtttgaagaaggggaaggtgaggttgtttagacgtggggttacgtttttgttcgttgggttaggggcgggtgtcgagagggttagtttttaggattgtttgtttatgatttggttgggagttttgagggggtagtagggatagggcgggattttagggagttttggataaagcggggttttaattagttttttttgatagatttgttgttgttgtcgggttaagttttcgttgttttcgtggtcgtttagttgttttttttgtaagaggtgagttttttttttagttgttagtttataagggaaggaggaggcgagaaatttcggggtagtatcgtttatagaattttttgtgattttaggaatgttttagtatgttcgatggttgatgagtttataagatatggttagtacgaatgaggagttaaattttaaattgtatttaaattaaattaaatttaaatagttaagtaatttttagttttagttaagatggggtaataggtattttttatagttaagaataaataggatgtgaaataatggtttttaagatagtaggtaataaaaaggaaatataacggggtaagtttgttattattatagttattgtttggagagtttttaggttatgagttatagttgtcggattttttagatggaggaggttaggttgagaatttagggagattatagtagttcgagttcgtcgtgtagaattttagaggagagggttgcgtcgagaaagttttagagaaggtttttttttttgaaggaaatgattgaaggttgtagaatatttattttaaagtagagattggtagattatagttacgggttaaatttggttttcggtttgttttgtaagtaaaattttattggatatagttatatttatttattattcgtttagttacgtttaaaaggtttattttttggttttttatataaaaaatttatttttttttgttttaaagatttgaagggacggtgtttaggggtaggaatgagtaatatcggtttttatcggttataggtagaaatgttataatttatagggtattaattggaatgtatataaaggattcgttttattaacgtggagtaagtagtttaaagtgattgttgttttaggtttgattgatatattataaaagtaagatttgaaaggattaaattgtttataagtattttaattgattttgagaataaagtttaagaataagaattttttaaatattaataaaaaa

SEQ ID NO: 347 - DNA, 2315 bp, Artificial Sequence
  chemically treated genomic DNA (Homo sapiens)
ttttttgttgatgtttaaaaaatttttatttttgagttttgtttttagaattagttaagatatttgtgaatagtttgatttttttaggttttgtttttatgatgtattagttaggtttagagtaataattattttgggttatttattttacgttagtgaggcgagttttttgtgtgtattttagttagtgttttgtgaattatgatatttttgtttgtggtcggtggaaatcgatgttatttatttttgtttttgagtatcgtttttttagatttttagaataagggaaggtaaattttttgtgtaaagggttagagaataaattttttaggcgtggttgagcgagtaataaatgggtgtggttgtgtttagtgagattttatttgtaaaataggtcgaggattagatttggttcgtggttatagtttgttaatttttgttttaggataaatgttttgtagtttttagttattttttttagagagggggattttttttgaggttttttcggcgtagtttttttttttggagttttatacggcggattcgagttgttgtggtttttttggatttttagtttgattttttttatttggggagttcggtagttgtggtttatgatttagaaattttttaggtaatgattgtggtgatggtaggtttgtttcgttgtgttttttttttgttgtttgttgttttgaaaattattgttttatattttgtttgtttttggttgtggaagatgtttattattttattttggttgaaattgggagttgtttagttatttaaatttaatttaatttaaatataatttaaaatttaattttttattcgtattaattatattttgtggatttattagttatcgaatatgttagaatatttttggaattataggaagttttgtgggcggtattgtttcgaggtttttcgtttttttttttttttgtgaattgatagttaaagggaaggtttattttttgtagaagagatagttgggcggttacgagaatagcgggaatttggttcggtagtagtagtaaatttgttaggagagattggttagagtttcgttttgtttaaagttttttggggtttcgttttgtttttgttatttttttagggtttttaattagattatgagtaaatagttttgggaattggttttttcggtattcgtttttgatttagcgggtaagagcgtagttttacgtttaggtagttttattttttttttttttagattgttgaagagttttttgttttgtaaaaatttttttatttcggtttttattagtatacggcgtacgtttattattttttttatagttagcgttaggttttttacggggtggttgaatttttaggggacggttttaggtaggaagttttttatgtaggaggtttttttagtttattttttttttttgaggattttaattttttttggttttagtttaaataagtttgcgattttttaaaacgttgtttattagttattttgtttattagttatttatttttatgtttttgatgggttttgttgttgtaggttaggttttttatgattagcggattttgtcggttagtttagtttttattggttacgttttatataaattttttttagtttatgtttgtttaaggtgtttttgtttgtaaatatattatgggttgatttatattagttagaatttattttaaattttttttttttgagtagttgatgtttttttttttggaaggtttaggattttttaataggttattttagtttgtatttgtttatttgcgtttagtatatttttcgtgttttggttattgatttttggggttattttatgttgagtgtgttttgtttttgtttttttgtgtttggtatagaatttgatatttgatttttttaagttttagtttttttttttgtaaaatggggttggattttagttttatcgagatgatttagttaaagtttttaaatatattgttagtatagcgttcgtagtgtcggttattattgttaaggtaggtgggtattatttatgaaggtgttatagagatggagttggattatgttttttgttttggatttgtagtgggttgttttgtttaaagttgtgaatatacgtttttggtattggggggagcggggtttttgtatttttttttttttttgatttgaggtatttagggttttaggtttttgttgttagttgtttgatggtgtcgtttttatttgaataatttattttaggtgttataggtgtgacgttaataacgttcgtggttaggagattttacgttaggtatag

SEQ ID NO: 348 - DNA, 2304 bp, Artificial Sequence
  chemically treated genomic DNA (Homo sapiens)
cgatttttttgttttagtttttcgagtagttagaattataggtgtgagatatgtatttagttaattttttgtgttttttagtagaaacggggttttattatgttggttacgttggtttcgaatttttgattttaagtgatttatttattttcgttttttaaagtgttgggattttaggagtgatttcgtatgtttagttattaataaatatttattaagtgtttattttgtttttaagagtgttgggaatttagtagtgaataaaataaatattttttttcggggattttgaatttaagtttagttagggattattttattaagagattaagttaatatttaatttttttatagatttagataggatagtattttaatttttcgttgatttgtttttttagattttagattatgggtattgtagatttttgtattttttgtagaggtagggttttattattattagagattttattattatttttatgtgaagggaaatagtgtttttttagtagataacgttaaattagttattagacgtgggttatggtgggtttgtcgtgattgttataaatacgttttatcgaagtttgttaggggacgttatatttttttttagaaagtaagaaatagagaaaggtttttttttgtttcggattgttttttttttagttttaagaaatttttttatagttgttattttattttggtttgttttttgagtaagaaaattgttggaaagagtttgttatttatttagattataattagggagtttgttgttatttaggaagggttttaaaaaatttttttgatttattgtgagtgtaaatttttgatatttttgtatttttttatttattttattttgattttatatatagtgcgattttgaaaggaagcggtgtttttggagaggtagaaaaattttggaaaataaggtttatgacgttggttattagtacggggttgttgtttgttgtgtgatatgtttaggggtgacgcgtttttcgaaagagatatttggtagagaaggtacgggcgcgaagttcggttgcgggagagttgggagtttgaatgtcgttggttgtcgtttatagtaggttttttttgagtatcgtggggaggtagtgatattcgttggtttcgtagcgatatttcggtagttgttttgttttttagtttggacgtgataggtgtgttttggaggatagttagaggaagataggtaagttatattggtttttttcgaggttatattttcgtttaggttaggttgtttttaatagatatttttcgcgggcgttgaggtagttagttttattgttatttagataatttttttttcgttttgttaattttgttttttttttaagaatgtttaaattttttatttaagcgatgagagggaaatatttgagttgtatatttaaggagatgtgggtttttattttggttttgcgatatattattggtgggatcgtgggtgagttatttaatttttttagtttttagtttttttatttgtaaagtgggttttagtatacggtttaattgaggtaatatacgttgtttatgttagttgttgtttttatgtcggttttgtttaggtttttttatggtaataggataggagttttttgtttgtgcgttagttttttattagcgtgggaatgttgtgaggagggggcggaattcggtgtagtaagggtttttgttcgtattttttattttttttttttttttttttttgagattgagttttgttttgtcgtttaggttggagtgtagtggcgcgattttcgtttattgtaagtttcgtttttagggtttacgttatttttttgttttagttttttaagtagttgggattataggcgttcgttattaagtttagttaattttttgtatttttagtagagacggggttttatcgttttagtcgggatggtttcgattttttgatttcgtgattcgttcgtttcggttttttaaagtgttgggattataggcgtgattatcgcgttcggttcgtattttttattaagaattagtaattacgggttgggcgtggtggtttacgtttgtaattttagtatttagggaggttaaagtgggcggattacgaggttaggcgatttagattattttggataatacggtgaaatttcgtttttattaaaaatataaaaaatttggtaggcgtggtggcgggcgtttgtagttttagttattcgggaggttgagggaggagaatggcgtgaatttgggaggcggagtttgtagtgagtcgagatggtatta

SEQ ID NO: 349 - DNA, 2304 bp, Artificial Sequence
  chemically treated genomic DNA (Homo sapiens)
tggtgttatttcggtttattgtaagtttcgttttttaggtttacgttattttttttttttagtttttcgagtagttgggattataggcgttcgttattacgtttgttaaattttttgtatttttagtagagacggggttttatcgtgttatttaggatggtttggatcgtttgatttcgtgattcgtttattttggtttttttaagtgttgggattataggcgtgagttattacgtttagttcgtggttgttggtttttaatagaagatacgggtcgggcgcggtagttacgtttgtaattttagtattttgggaggtcgaggcgggcggattacgaggttaggagatcgagattatttcggttaaaacggtgaaatttcgtttttattaaaaatataaaaaattagttgggtttggtggcgggcgtttgtagttttagttatttgggaggttgaggtaggagaatggcgtgaattttggaagcggagtttgtagtgagcggagatcgcgttattgtattttagtttgagcgatagagtaagatttagttttaaaaaaaaaaaaaaaaaaaaaatagaagatacggatagaaatttttgttatatcgagtttcgttttttttttatagtatttttacgttagtgaaaaattgacgtataggtagagaatttttattttgttgttatggggagatttaggtagagtcggtatgaaagtaatagttgatatgaataacgtgtgttattttagttaagtcgtatgttggagtttattttatagataagaaaattgaggattagagaagttaagtgatttatttacggttttattaataatatatcgtaaggttagaatggaaatttatatttttttgagtgtgtagtttaagtgttttttttttatcgtttgaatgaagagtttaaatatttttgaaaggggaatagggttggtagagcgagagaaaaattgtttgggtgatagtgaagttggttgttttaacgttcgcggaggatgtttgttagaagtaatttaatttaagcgagggtataatttcgagggaggttagtatggtttgtttgtttttttttgattgttttttaagatatatttattacgtttaggttggaaaataggatagttgtcggagtgtcgttgcgaggttagcgggtgttattgtttttttacggtgtttagagagagtttgttgtgaacggtagttagcgatatttaggtttttagttttttcgtagtcgggtttcgcgttcgtgttttttttattaagtgtttttttcgggaggcgcgttatttttgagtatgttatatagtagatagtagtttcgtgttgatggttaacgttataagttttattttttagagtttttttatttttttaaaaatatcgtttttttttaaaatcgtattatgtgtaaaattaaaataagatggatggggagatgtaggaatattagagatttgtatttatagtaaattagaagaattttttaaagttttttttgagtgatagtaggttttttgattatgatttgagtgaatggtagattttttttagtagtttttttatttaagagataggttaggataaagtaatagttgtaaagaaattttttagagttgagagaaagatagttcggggtaggagaaagtttttttttgttttttattttttaggggagggtatggcgttttttggtagatttcggtgaggcgtgtttgtggtagttacggtaaatttattatgatttacgtttgatggttgatttaacgttgtttattgaaagggtattgtttttttttatatagaaatgatggtaaagtttttggtagtggtgaaattttgtttttataaaaggtgtaaaaatttgtagtgtttatggtttagggtttgagggagtagattaacgagaaattaaaatattattttatttgagtttgtaggagaattgagtgttgatttgattttttaatagagtgatttttgattagatttgagtttaaggttttcgagggaaggtatttattttgtttattgttaagtttttagtatttttgggaataaagtaggtatttagtaagtatttattgatggttgggtatgcgggattatttttgaaattttaatattttgggaggcgaaggtgggtggattatttgaggttaggagttcgaggttagcgtggttaatatggtgaaatttcgtttttattaaaagatataaaaaattagttgggtgtatattttatatttgtaattttagttattcgggaggttgaggtaagagaatcg

SEQ ID NO: 350 - DNA, 2470 bp, Artificial Sequence
  chemically treated genomic DNA (Homo sapiens)
gtggaatatattttttatatagttatattatttaaaatttattgtttttaagtttttatttaaatgttttttcgtgaagttatttttgagttttttttaaaattgtagttttttatttttgtattttttattgttttttatttttaatttttgttattgtagttagaattatttgatatatagtttttattttattggttttttgttatgtttttttttataagaatttgaagtttattaggtcgggagttttgtttgttgtgtttgttgttattttttagtgtttaaaattgtttggtatatagtaggtatttaataatttttgaattagtgaaaattagatggtggtttggtatttttatataggaatgagttaggtggaaattatttaggatataagtagattttgaagtgataaggaagggttattataattatgtggggtttattttgtttttttttgttttttttttttaggtttagtaatagttttattaaggattttatgaatattaaagtttatatttatatgttgttagaggtgagagtagtttattttattattagattttgtgtttagggtggtgatttgaagaaggaagagagcgaaagaagggaaggattatttttttttttaaattggagttaagggagggaggttagagtaagtttgggggcgtaatttagatttagtttttgtttaattttttttgtttttttttttaggggtttagagaattataaggtttgtagaattttttagagaagttttattattgattttttttttttatttttagatattaaagagtttgaatgtttttgagttatatggtttttttttttttttataaattttgttagttgttacgggggtttgtttttagggtataaagttattgagagatttagagatttagtttttttgtggaatttttaaaatgttttagtagttttgtttttagtttgttgtttggtagtatttgttagttgattttatgtattgtttttttttttgttattttggtaatttgggttttttattttatttttttttttatttttttttttagacgttattttttgaattgttatagagaatgggttaatttatggtggaggtttgtttatttttataataattaaagggttttaaggtttacgtttttatatatttaattattttttaggtattttaaattatatttaaattttaatttagttttattttgttttagtttttgtttgtaagtgttttagtttttaatgggtatagatttggatttcgttttttttagtcgggtttttattttaggttgagtttagttatcgttaattaatgtagagttaggttttttttttttttaattttggtcgtagtttaattttgttttttgaaagtatttcgtttttgttatttaatgttttttcgtgtgtttgatagttattttgtttttttattttcgttgtgttttaaattcgtttttatttagttttatggttttgtttaatcgtagagttgttttgttcgtttacgcggagtttagttcgatttattttcgtcggttgttacgtttatttttatataagttttgttttcgttgagtagtatggcgtgcgatatcgtttttttggtgttttggtaggggtttagaagtttttcgttcgttaattagagaaaaatagggttatttattttcgtttttgggggttgttttttattaattttatgtaagttaattagtgtgaggtagattttcgttttttcgatataggtttcgagtttttttagttgtttatagttcgttagtttttgagttaatcggcgtggagtatcgtgaaggtcgaacgcgttttttcgggattttaggggtcgtgagcgttttattatttttttttacgttaattacggtatagttttgtagggaagggttcgttttttaatttttcgaggttttgcggtcgattaatagcgttttggttaattagcgagcggcgggatattgggtttttttttttcgggtttacgtgagttgtagggaaacgtaggggcggtttttaggtgttgtcgtcgttatcgttattattatttttatcgtcgtttcggaatttaggtttggggggcggtggggtcgcgtatggagttttcgtttttcggagttgttaatattgttaacgttatcgttacgttatatataggtgagttttgggtttggagggtggagggtttagttcgtgattttacgtatttttttcgttttcgcgtagaggatgtggtttggtcggtggtttgttggtgttcgatttttcgtcgttattattacggttggtggatttgcgtgtggtattgtttaagtttttcgttttttatagtggatttgatcgtggtttaatttttttttttcgttgtataatggatcggtttgcgtgtttatgtttttttttacgttaatttagggtggattcgttt

SEQ ID NO: 351 - DNA, 2470 bp, Artificial Sequence
  chemically treated genomic DNA (Homo sapiens)
ggacgagtttattttaagttggcgtggggaaaaatataagtacgtagatcgatttattatataacgggagggggaggttaggttacggttagatttattataagggacgaagggtttgagtaatgttatacgtaggtttattagtcgtggtggtggcggcggggagtcgaatattagtaggttatcggttaagttatattttttgcgcgggggcgggaaggatacgtggggttacggattgggttttttattttttaggtttagagtttatttgtgtgtagcgtggcggtggcgttggtaatgttggtagtttcggggggcgggggttttatacgcggttttatcgttttttaggtttgggtttcgaggcggcggtggaggtggtggtggcggtggcggcggtagtatttagaagtcgtttttgcgtttttttatagtttacgtgggttcgaggaggaggagtttaatgtttcgtcgttcgttgattggttaaagcgttattaatcggtcgtaaggtttcgaggggttgggggacgggtttttttttatagagttgtgtcgtgattggcgtaaggggaaatgatggaacgtttacggtttttggagtttcgaggaggcgcgttcggtttttacggtgttttacgtcgattggtttaaggattgacggattgtgagtaattgaaaaggttcggggtttgtgtcgggggggcgggggtttgttttatattgattggtttatatgggattgatggaagatagtttttaaggacgggggtgggtggttttgtttttttttgattggcggacgagggatttttagatttttgttaaaatattaagggggcggtgtcgtacgttatgttgtttagcggaagtagggtttgtatagaaatgggcgtagtagtcggcgggagtgggtcggattgggtttcgcgtaggcgggtagggtagttttacggttagataagattatagagttgggtaaagacgaatttagaatatagcggaggtaggagggtaggatggttgttaggtatacgaaagagtattgagtggtagaaacgaaatgtttttagagggtagggttgaattgcggttagagttaaaaaggggaggaatttggttttgtattgattggcggtggttggatttaatttagaataggggttcgattagggagagcgggatttaggtttgtgtttattggaagttggaatatttataagtaggggttaagataaggtagggttgagttagggtttgggtgtaatttggggtatttggggaatgattgggtgtgtgaaagcgtaaattttagggttttttgattgttgtgggaatgaataaatttttattatgaattggtttattttttatggtaatttaaagggtggcgtttaggaaaaggaatggaagaaagggtgaggtggggggtttaggttgttaagatgatagaagagagggtagtgtataaggttaattggtaaatattgttaggtaataggttggaggtaggattgttggggtattttggaggttttatagagagattggatttttgggttttttagtaattttgtgttttaggaataggttttcgtggtaattagtagggtttatggggaaaaagaagggttatgtgatttaaaggtatttaggttttttaatgtttgaggatggggggaagaagttaatggtgaggtttttttgggaaattttgtaggttttgtagttttttaagtttttgaaaaagaggatagaagagattgaataaagattgggtttgggttacgtttttaggtttgttttgattttttttttttgattttagtttagagggaaagatggttttttttttttttcgtttttttttttttttaggttattattttaaatatagagtttggtagtggggtgagttgtttttatttttagtaatatgtggatatgggttttgatatttatggagtttttggtgaggttgttgttgagtttagagaaaagaaataagaaagggtaaaatgggttttatatgattatgatgatttttttttattattttaagatttatttatattttggatgatttttatttggtttatttttatgtggaaatgttaagttattatttggtttttattgatttaaagattattaaatgtttattgtatgttaggtaattttaggtattgggagatagtagtaaatataataaataaaattttcggtttgatggattttaaatttttgtaaagaaagatataataaaaaattaatggaataaaagttatgtgttagatggttttaattataataataaaaattaaaaatgagagataataaggagtataggagtggggggttgtaattttaaagagggtttagggatggttttacggagaagtatttgagtaaagatttaaagatagtgaattttgagtagtgtggttatatggaggatgtgttttat

SEQ ID NO: 352 - DNA, 2470 bp, Artificial Sequence
  chemically treated genomic DNA (Homo sapiens)
tttaaaaagttttgtaaattaaaagtttgggggtaaatttatttggtagtaaattttgatttgaggttatttatagtttatattttgtattttttttatttagtatgaataagtatgtaagttttattgtatgtttgattttagtatgtttttttagattttttgggggtgtttacgtatgtcggtgggggaaagagattaatttttaaatattattttaaatagttggttttattgtgtttgtttgggtagtatatatattaaaattggaatgatttttgtatagggatgaaatgtaaattcgtgaagtatattgtattttttttagtatatattatttttggtaatattttttttttttttttgagagggagttttgttttgtcgtttaggttggagtgtagaggcgcgatttcggtttattgtaagtttcgtttttcgggtttatattatttttttattttagtttttttagtagttgggattataggcgtgtgttattacgttaggttaattttttgtatttttagtagaggcggggttttattgtgttagttaggatggtttcgattttttgatttcgtgattcgtttattttcgtttttttttcgaagtgtcgagtgttgggattataggcgtgagttattgcgttcggttttcgttttttttttttagattgattttattatttgtttagtaaaggagaattttttggtagaatagtttttaagaataaggtaaataattaattttatataggtttttattaatgtatagttgttgattgtgattggttttcggtaatttggattttataatttggataaggggataaataattgtttgttttttattattttttttgaatttgaatagaatttttttatttttatagttttttagtttttttttttttttttttgagacggagtttcgtttttgtcgtttaggttggagtgtagtggcgcgattttggtttattgtaaacgttgttttttaggtttaagttatttttttgttttagttttttaagtagttgggattataggcgtatgttattacgttcggttaatttttggatttttagtagagacgggggttttattatgttgattaggttggtttttaacgtttgattttaggtgattcgttcgtttcggtattttaaagtgttgggattataggcgtgagttattgcgttcggttttttatagttttttagttttttaaaatttgaaaaattttgtaaagatatatttgggttaaagggtttagataacggattgtggtttttaagtatttacgttataggttattgagaggatcgatttagttattagatgtaaaatgttgggattagtgtttggtaaaggaaaattttgtatagttgtaggtttttattatatataatagtatcgttaacgaatgttattataatatttatttagcgtttattaagtgtttattttatataaattttgagaatataacgtgaaggtgaattgttgattaaagtttggtttttttcgtttcgtttttttgcgaaaatgttttaacggtaggaggttacgcgagcgttggacgcgttttttttcgcgagttttttttcgaggtttttcgggttttttcggttattttcgttcgggcggtgcgcgttttcgttgttttcgttttcgttttagagaggtagggtttttcgagtttgttagtttcgcggtcgtaattaatttcgggtcggagtgtttcggttcggttagtttcgcggcgtgagggaaggggagtttagtagtttttcgcgcggggtttaggcgtcggcggtagggcgggttttttatcgttagcgtgttagtttcgtttttatttattagtgtgttagtttcgtttttttttacgtcgtcgcgcgttcgggggcggggtttggcgcgtatcgttcgcgtacggcgaggcgtttgttgattggttattggggttcgggttttttcggcggagcgcgtttttttttagatttttcgttagtaggagtcgcgcggtagatgcggtgtttttaggagtttcgttcgatagaacggttgggttttgtcggttgtcggtatgtcgcgatagagtattttgtatagttttttttttaagttttcggcgttgagtgatgttaataaggtttcggttagggttttacgcgaaggcggtcgtgtcgtcgttgttttcggggtttttttttttttaggcggggatgcggtttggagcgaggttgggtttgggtttaggtttttggcgcgtttcgcgttatcgtttaaggcgaagaattttaacggagggttgcggagatcggtagcgtttgttgtttttattaggtagcggggtgggggtggggtcgaaggcgggggtatagcggcggggcgtttggaattcggcgaggggaggttcgtatagggggttgggggggtgtacggtttggttttgggttcggagg

SEQ ID NO: 353 - DNA, 2470 bp, Artificial Sequence
  chemically treated genomic DNA (Homo sapiens)
ttttcgagtttagggttaggtcgtgtatttttttaattttttgtgcgagttttttttcgtcgggttttaagcgtttcgtcgttatgttttcgttttcgattttatttttatttcgttatttggtgggggtagtaggcgttatcgattttcgtagtttttcgttgaggtttttcgttttgggcggtgacgcggagcgcgttaagggtttgggtttaggtttagtttcgttttaggtcgtattttcgtttggggaaggagaggtttcgggggtagcggcggtacggtcgttttcgcgtgaggttttggtcgaggttttgttggtattatttagcgtcggagatttggggaagaagttgtatagggtgttttgtcgcgatatatcgatagtcggtaaggtttaatcgttttgtcggacggagtttttaaaagtatcgtatttatcgcgcggtttttgttggcgggaaatttggggggaggcgcgtttcgtcggaggaattcgggttttagtggttaattaataggcgtttcgtcgtgcgcgggcggtgcgcgttaggtttcgttttcgggcgcgcggcgacgtggggaagggcggggttggtatattggtgggtaggggcggggttggtacgttggcggtgaggggttcgttttgtcgtcgacgtttgggtttcgcgcggggaattgttgagtttttttttttttacgtcgcggggttggtcgggtcggaatatttcgattcggggttagttgcggtcgcggggttagtaggttcggaaagttttgtttttttggagcggaagcgggaatagcgggggcgcgtatcgttcgggcggggataatcggggggattcgaaaggtttcggaaaggggttcgcggggagaaacgcgtttagcgttcgcgtgattttttgtcgttagagtattttcgtaaggagacggagcgaaagggattaaattttagttagtagtttatttttacgttgtatttttaagatttgtatagagtaggtatttggtaaacgttaaatgaatattgtaatagtattcgttagcgatgttgttgtgtatggtgaaagtttgtagttgtataaagtttttttttgttaggtattgattttagtattttatatttggtaattaaatcgatttttttaataatttgtgacgtaagtatttaagggttatagttcgttatttgagttttttgatttaggtgtgtttttataggattttttaaattttagaaagttaagagattatgagaggtcgggcgtagtggtttacgtttgtaattttagtattttgggatgtcgaggcgggcggattatttgaggttaggcgttgaagattagtttagttaatatggtgaaattttcgtttttattaaaaatttaaaaattagtcgggcgtggtggtatgcgtttgtaattttagttatttgggaggttgaggtaggagaataatttgaatttgggaggtagcgtttgtagtgagttaaggtcgcgttattgtattttagtttgggcgataagagcgaaatttcgttttaaaaaaaaaagaaagaaagttaagaggttatgagaataaaaaggttttatttaaatttaagaaagatagtggaagatagataattgtttgtttttttatttagattgtgaaatttagattgtcggaaattagttataattaatagttgtatattggtaaaaatttatgtaaaattagttgtttgttttgtttttggagattgttttgttagaaggtttttttttgttaggtaagtaataaaattaatttaaaaaaaaaaggcgggggtcgggcgtagtggtttacgtttgtagttttagtattcggtatttcggggggggggcggaggtgggcggattacgaggttaggagatcgagattattttggttaatatagtgaaatttcgtttttattaaaaatataaaaaattagtttggcgtggtagtatacgtttgtagttttagttattggggaggttgaggtaggagaatggtgtgaattcgggaggcggagtttgtagtgagtcgagatcgcgtttttgtattttagtttgggcgatagagtaagatttttttttaaaaaaaaaaaaagaatattgttaaaggtggtatgtgttaagaaaaatatagtatgttttacgaatttgtattttatttttgtgtaggggttattttaattttggtatatgtgttatttaagtaagtatagtgaaattaattgtttgagataatatttgagagttggttttttttttttatcggtatacgtaaatatttttagagagtttgggggaatatgttgaaattaaatatgtagtaaaatttatatgtttatttatattaagtagaaagaatatagaatatagattataaatagttttaggttaaaatttgttattaaatgagtttatttttaaatttttggtttatagagttttttgga

SEQ ID NO: 354 - DNA, 2470 bp, Artificial Sequence
  chemically treated genomic DNA (Homo sapiens)
atatattatatcgtgtatgtaatgtataagtatttatttcgtttgtttggggttttgtttgtttttgttgagttcgatttttttatttgtcgtttggtttttgttttacgttttagtgttattgagattaaggagagaacgaatttgtcgttgattgggtagagcgagcgcgtggatcgcggttatcgttcgtttattattcgcgcgtatttgggttggtatcgggcgaagaatcgtgcgggtttgggatttgggggtttagagggagcgagtttttgcgcgggcgttcggttcgtaggtttcgtaggtttaggggcgtgtttcgtttttatttttatttcggatttcggtttttttttttagatagcggttttttttatttttggttttcgtaggtcgttagtagttcgcgttaggtttcgtcggcgtttttagggttttttagatcgcgtagattttgatattttcgtttggttttgggttttgggagttgagagtcggttagggttttgttcgtattttcgggcgtttagtttcgggtttgtttttcgcggacgttttaattttttcggtcgaatggatggtggtgcgcgcgcgttttatttcggcggtgtcggttttttttgttgttaaaattagatttaaatttttgtatgggattcgtttttgggtttttatttcgtgcgtttagtaaatagtgggtgagttatgaagatgtgcgagttagtcggatttttttcgttaggcgcggattcgttgcggttagagaatttagtttgcgttagttcggttcgttcgcgaagttacgggttttattgacgcgattttttaagacgtgggggttattatgggtagaggatatcggttcggagttagattacgggttttataagtattagattataagtagcgtcgttattgagagtcgttcggaattcgtttagtatgtcgggttttttagttagggtttggtgtacgtggtcgagggttttggaagtttcgatggtttaggaggagtaggcgggcggggcggcgggtgtcgttggtcggtagagagtttcggtttgatttagcgtaggtttggtgcgcgtagagaataattttaagcgtatcgacgttcgcgagttttttttaaatatcgaacgggatttagagttcgagtttataggcggcggtcgggggagggagtagggtgttggtcgtcgttcgggagtgttcgcgttttgggtgatttttggaaggacgtggggtttaaatttcggttggggttgggagagtagtttttagaggtttttcgcgggattttttgtcgggcgggatcgtggttttataggagaagtgggtggtaagttttgtttggcggaaagtagtcgtttttttttttttgggtttggggcggcgttttttatttttgtttttcgttttttatttttgtttttcgtcggttatattttttgttttttggattttaagcgtttcgcgcgtcgaggagtttagcgttagtggcggcggttaggagagattcgggtgttaggaaagatgggtcgtttgggggatagtagggagttcgggggaaacgtaggcgtcgggtatagagtcggtatcggcgtttttagttttgtcgaagatcgcggtcgggtttggttcgcgggaggggttttggcgtcggatttgtttcggttttgcgtgggcggtttcgtcgggttttgtaggagcgacgcgcgttaaaaggcggcgggaaggaggcggggtagagcgcgttcgggatttcgatttggacgcggttagttggagaggcggagcgtcgggaggagattttggtttcgtcgcgattcggtggttcgcgttgttttttcgcgcgtcgggttaaaaaggcgttaacgttcgcggtcgtttatttttcgcggcgtttttttttttcgcgtttatataattcgtttaggggtcgggtagttcgttttgttttttcgttcgcgtattcgttcggaggttcgcgcgttcgcgaaggggacgtagcgaaatcggggttcgcgttaggttagtcgggacggacgtcgatgttcggggttgcgacggttgtaggtaggaggtttagggtcggggggcggttcggtttcgcgggcgggggttggagcgtagcgttgggtaggtatttgggttcgtagtttcgaagttgggaggtgaggggagagcgatcggggacgagttgggataaggcgatataggggttttttcggagttggatcggtttttgggatttggcgttcgcgagaggttggagcggttagagtttagtttgcgaggagacgcgggttttgtttttagcgtcggtcgtttttggcgttaaagatagtttcgtaggggtttcgggagggttttttttttgttgttttttttttatttcgggtttcgagggtcgttgggagggtaatttcgggaagaggtcggggtgcggggcgcgggtgtaggt

SEQ ID NO: 355 - DNA, 2470 bp, Artificial Sequence
  chemically treated genomic DNA (Homo sapiens)
atttgtattcgcgtttcgtatttcggttttttttcggggttatttttttaacggttttcggagttcggggtggagaggggatagtaggaggagggttttttcggaatttttgcggggttgtttttggcgttaaaggcggtcggcgttgagggtaggattcgcgttttttcgtaggttagattttggtcgttttagtttttcgcgagcgttaagttttaggggtcgatttaatttcgagggagtttttgtgtcgttttgttttagttcgttttcgatcgttttttttttattttttagtttcggagttgcgagtttaggtgtttgtttagcgttgcgttttagttttcgttcgcggagtcgaatcgtttttcggttttgggttttttatttgtagtcgtcgtagtttcgggtatcggcgttcgtttcggttggtttggcgcgggtttcggtttcgttgcgtttttttcgcgggcgcgcgagttttcgggcgggtgcgcgggcggggaggtagggcgggttgttcggtttttaggcgggttatatgggcgcggggaggggaggcgtcgcggggagtaggcggtcgcgggcgttagcgtttttttagttcggcgcgcgggaaggtagcgcgggttatcgagtcgcggcggggttaaggttttttttcggcgtttcgtttttttagttggtcgcgtttaagtcggggtttcgggcgcgttttgtttcgtttttttttcgtcgttttttggcgcgcgtcgtttttgtagagttcggcgaggtcgtttacgtagggtcgaagtaggttcggcgttagggtttttttcgcgggttagattcgatcgcgattttcggtagagttggggacgtcggtgtcgattttgtgttcgacgtttgcgtttttttcggattttttgttgttttttagacggtttattttttttgatattcgggttttttttggtcgtcgttattagcgttgggtttttcggcgcgcggggcgtttggaatttaaggggtaggggatgtggtcggcggggaataggggtgaggggcggggaataggggtgaggggcgtcgttttaggtttaggaggaggggaacggttgtttttcgttaagtagggtttgttatttattttttttgtggagttacggtttcgttcggtagaggatttcgcggagagtttttgggggttgtttttttaattttagtcggagtttgggttttacgtttttttaggggttatttaggacgcgaatattttcgggcggcggttagtattttgttttttttttcggtcgtcgtttgtgggttcgggttttggatttcgttcggtgtttggaaggagttcgcgggcgtcggtgcgtttggagttgttttttgcgcgtattagatttgcgttaggttaggtcgaagttttttatcggttagcgatattcgtcgtttcgttcgtttgttttttttaggttatcggggtttttagggttttcgattacgtatattaggttttggttaggggattcgatatgttgggcgagtttcgagcggtttttagtggcggcgttgtttatggtttgatgtttatggggttcgtgatttggtttcgaatcgatgttttttgtttatggtgatttttacgttttggaaagtcgcgttagtgaagttcgtggtttcgcgagcgagtcgggttggcgtagattgggttttttggtcgtagcgggttcgcgtttgacggggagggttcggttgattcgtatatttttatggtttatttattgtttgttgggcgtacggggtggggatttaaagacgaattttatgtagaggtttgggtttagttttggtaatagaaaaggtcggtatcgtcggagtaggacgcgcgcgtattattatttattcggtcggggaggttggggcgttcgcggggagtagattcgaggttgggcgttcggaggtacgagtaggattttggtcggtttttagtttttagaatttagggttaggcggggatgttagggtttgcgcgatttggggggttttagaggcgtcggcggggtttggcgcggattattagcggtttgcgggagttaggggtggagggggtcgttgtttagggaagaggatcggggttcggagtgggggtgagaacgaggtacgtttttgagtttgcgaaatttgcggatcgagcgttcgcgtaggagttcgttttttttgggtttttaggttttagattcgtacgatttttcgttcggtgttagtttagatgcgcgcgggtgatgaacgggcggtggtcgcgatttacgcgttcgttttgtttagttagcggtaaattcgttttttttttgattttagtggtattggagcgtgaggtaagggttaggcggtaggtagaggggtcggatttagtaaaagtaaataaaattttaagtaaacgaaataaatatttatatattatatatacgatataatatat

SEQ ID NO: 356 - DNA, 2470 bp, Artificial Sequence
  chemically treated genomic DNA (Homo sapiens)
aaaattgaatatttgagaatattggatttatatttttgagggtaataatttgttagagttgagtagttgttttttttagttatggtatggatattttaatttgttattttttttattattttttattgttttatataaggttagttttatttatttgttttatttgtttggtttttgtagttatttgaatttgtaaatattatttagattttttttgttttttattaaagtttattttgttttgttttaagttttttattagtgttttaaagtaagagttaggtaatttgattaaatataggttttttaatatgtgttttttggagatagtattttaatagaaagagatgattttgtaggtagaaattataggtattattggattataattaggatggtaattgtttgttttattttttttgttattttgacgtagttatattttattgttttaaagtagattaaaggaattggttttatggtagaataatggacgttggttttatgtatgaaatttttttaagttgtatttttatagattattttagttttaaaagatttaaagttattacgggtttttttgatttttttattttttcggaggttttaggatattcggtttgacggtatttttttttatttgttttcggggttcgttttgcgttgggtagttgcgtttaaggagcgcgcgtatttagtatgagtttattttttatgggcgtttttagaggttcggtcgggtcgcgtatattaagcgtagtaagtttttgtattaatggttttcgcggttgggcggggcgcggtcgtttaaaggcgttgtttttttggaagttttgtttttattttagcgtttgagagtttgtagtcggttgggaaggtttttttggttcgtttggttttttcggggaagaggttaatattcggtatacgcgatttacggtagaggggagttttgggcgcgtagaattggttgcgtttcgtcgagagttttttgtgggtggggagagtttttttatttttttgttcgtttgagcgtttagagtttagggtcgtcgatcgtagtatttttcgatttgttgtatcgagggttcgcggtttttgtgtgcggtttttatcgttgttggaggcggtcgtaggcgaatcgtcgggtcgttagttacgattcgagttaggtattttttcgtttttgggatcggggtcgaaggttaattatattgtagttaggttttgcgattggacggtagtgagagtcgattggtcgtcgtcgcgagtttcgggtttttttttttttttttttgttttaattttagcgtttaagttttaggttaatgagatagcgttttatagacgtttttttttcgtttttttttttttattttggagagggaggggaagttttgattggttagattgttttcggaagtttttttttttttattaattatcgaaggaggtacgtttttagcggagttttttagttaattataaagcggcggcggcgtttagtcgtgtagttttattagcgtttttgggttttatcgtttttaattttttaagttttttcgtaagggtcggcgattttgattggttattgttgttattgtcgaatgttttttttagttagttatcgaataaggcgaatttatttttttcgttcggttattttcggtatttttcgttttttgggcgtggttttttagcgttattttttaattggttttttaggttgatcggtttttttcgggaggagtcgtaaataaacgacgttcgtgattggtttcgttcgggtttcggtttttagtcgaagcgggcgagcgtggggttcggtcggcgatttttagacgtttgttacgcgggcggcggggcgttgggcggtgtaaggttgggtgggggaggaaggaggtggaggacgagtaggaggggggaggaggagtggggaagtgtaaggcggttgcgtagatagcgttttttatatagagtagtttttgattcgggcgaatgcgggtttgtgtcgtcgtcgtcgtcgtcgtcgttcgggttaagtgataaaggaaggaaggaagcgaggaggagtcggtttcgtagtcgttgatagggttttgggttggggtaaagcgcggatattttttgagcgggtatcgagtagagtcgaggggcgggagggcggtcgagttgttgtcgcggacgggggagggggtttcgagggacggaagcggttgtcgggtttttatgttttcggcgaatggggaatagtcgaggagtcgttgtttggggtttgaagggagttgttttcgttatcgttatggtcgttggatttagtcgtcgtttgtagttgtttttggcgtaatgaggagaggagtcgtcgttatcgttatcgttcgtttttgattgattcgcgatttcgtcgttttttagttcgtcgggtttttgtcgttagttcgtcggatttcgcggtttgtcggagttgtag

SEQ ID NO: 357 - DNA, 2470 bp, Artificial Sequence
  chemically treated genomic DNA (Homo sapiens)
ttgtagtttcggtaagtcgcgggattcggcgggttgacggtaggggttcggcgaattagagggcggcggagtcgcgagttagttagaggcgggcggtggcggtggcggcggtttttttttttattgcgttaggagtagttgtaggcggcggttggatttagcggttatggcggtggcggaggtagttttttttagattttaggtagcggtttttcgattgttttttattcgtcggggatatgggaattcggtaatcgttttcgtttttcggggttttttttttcgttcgcggtaatagttcggtcgttttttcgtttttcggttttgttcggtgttcgtttaggaagtgttcgcgttttgttttagtttagagttttgttagcggttgcggggtcggttttttttcgttttttttttttttttgttatttggttcgggcggcggcggcggcggcggcggtataagttcgtattcgttcgggttaggagttgttttgtgtgaggagcgttgtttgcgtagtcgttttgtatttttttattttttttttttttttttattcgttttttatttttttttttttttatttagttttatatcgtttagcgtttcgtcgttcgcgtaataggcgtttgggaatcgtcggtcgagttttacgttcgttcgtttcggttgggagtcgaagttcgaacggagttaattacggacgtcgtttgtttgcggtttttttcggaaaaagtcgattagtttgagaaattaattagaaagtgacgttgggaagttacgtttaaagagcggaaaatgtcgaaggtagtcgaacggaaagggtgaattcgttttgttcggtggttggttggaggagatattcgataatggtaatagtggttaattagagtcgtcggtttttacgaagaggtttgaagagttgaggacggtgaaatttagagacgttggtgaaattgtacggttgggcgtcgtcgtcgttttgtgattggttggaaaatttcgttgggagcgtatttttttcggtgattggtgaagagaagggggttttcgaggatagtttggttagttaggattttttttttttttttaaggtggggagaagaaagcgaagggagggcgtttataaagcgttgttttattggtttgaagtttaggcgttggagttggggtaaaagggagagggagggagttcgaaattcgcggcggcggttaatcggtttttattgtcgtttaatcgtaagatttagttgtagtgtgattggttttcggtttcggttttaggagcggggagatgtttgattcgggtcgtggttgacgattcgacggttcgtttgcggtcgtttttaataacggtggaaatcgtatatagggatcgcgggttttcggtgtagtaaatcggaaagtgttgcggtcggcggttttgggttttgagcgtttaagcgagtagaggggtggaggggttttttttatttataggaggttttcggcggggcgtagttaattttgcgcgtttaaggtttttttttgtcgtggatcgcgtgtgtcgagtgttggtttttttttcgaaagggttagacggattaagggggtttttttagtcggttgtaagtttttagacgttaaaatgggaataaagtttttagaaaggtagcgtttttgggcggtcgcgtttcgtttagtcgcgggggttattgatatagaggtttgttgcgtttggtgtgcgcggttcggtcgggtttttggaaacgtttatgagaaatgagtttatgttggatgcgcgcgttttttgggcgtaattgtttagcgtaaaacgggtttcgaaagtaggtgaggggaaatgtcgttaggtcggatattttgaagttttcgaggaaatgggggggttagaggagttcgtggtagttttggattttttggaattagggtgatttataaaagtgtagtttgagaagattttatatataagattagcgtttattgttttattatagaattagtttttttggtttgttttagaatagtgaggtatggttacgttaagataatagagaaagtagaatagatagttgttattttgattgtaatttagtggtgtttgtaatttttatttgtagagttatttttttttgttaagatgttgtttttagaaagtatatgttaaaggatttatatttgattagattatttggtttttgttttgaaatattgatgaaggatttgggatagaataaagtaagttttgatggaagataggaaaggtttagatagtgtttgtagatttaaatggttatagaggttagataagtaaagtaaatgagtgagattggttttgtgtaagataatggggaatgatagggaaaatggtaaattggaatatttatgttataattaaaaggaatagttgtttaattttagtagattgttgtttttaggaatgtgggtttagtgtttttagatgtttaatttt

SEQ ID NO: 358 - DNA, 2470 bp, Artificial Sequence
  chemically treated genomic DNA (Homo sapiens)
ttttgtttttatgtttagtttattgaagtttgtttttaggttattggagttgagttttttgaatatttttggtttagagtgttgtagatttatgaattgttgtttgttgaaataaggtgtaaagtttattttgtttaaagtttttaataggagtgataatttaggtaaaatgtttatataatagtgggaaattaaaagtttgcgatatagaaaagtgatatatatttgtaaatttttttaataaaggtatcgtagtataagtatgattgtagagttagattgttaatgtttaaattttttttgggttttaatttttttatttgaaaatcgttaatagtggaatttagttgatagggttgttgtggagtaagcgtttttaatttggagtttatgaaattttagtatttgtgaattttgtattgaaaaaatcgtaattttatgtttattaattttataatagtttcgtttttttgaattataaaggtaggtaataaattatagtagtattattagtatttataattttgttttttatagaaattatttttatatttagtaagttgttgtagatattttgaataattatacgtatatattttttaagtattatatatataatatttttatattttgtatatatttttggagatagggttttgttttgttttttaggttggagtgttgtagtatgatcggaatttattgtaattttaaatttttgggttttagtgatttttttagttttagttttggaatagttaggattataagtattttttattatatttagttgttaatttttttttttttcgtaaagataaggttttattattttgtttaggttgttttttaatttttggatataagttttttgtataggttttttaaagtattgggtttataggtgtgagttatcgtgtttggttaatattatgtatttaattttatgcgtttagaaatatgtgttattttaagaaggcgtttataggttttattatattattaaaggtgtttatggtataagtgaagaaatttttagatattagagtaataaaaattatgatgtattagaacggattaggtttatattaaacgtttaatatatagtttgttgttatggttttttttttttttttttttttttttttgagatagagttttattttgttttttaggttggagtgtagtggagtgatttcggtttattgtaatttttgtttttcgggtttatgttatttttttgttttagttttttaagtagaggaattgtaaggcgttttattatgttcggttattttttgtatttttagtagaaatggggtttttttatgttacggtaggttggttttgaatttttgattttaggtgagttatttgttttagttttttaaagtgttgggattataggtatgagttattatgtttagtttgttatggtttttaaaatatttatagaatagaaattgaagtaagtttattcgtttttatattaaaagtagttagtacggtgttttgtatttatgtattttatggatgttgaatgagttattgaatgaagtggagtttaggttgtgttttaggttttttagtggggttggaaggaatagttgtgaagttgtggggcggtttttgtgtatcgggggattttggagttagatggttttttagggttttgaaggagaagagttgtgtttttaataatgattttaatgggaatagagattgttggggatcgtaggggttaggttgttattttttaaagttttttttttattatttaagaaggtatttaggtttttttgtgttaggttttaggtaaagtgttggattatttagtaattgggtttagtagtaggatggttttagattgaggttttagggttaaaggattatttttttttttagcgttggttcgggaaaggtaagtttcgggcgggagcgtacgtcgcgttttcgaagtttggttttttcgttacgtttattttttgtttttatttcgcgtttttttaggttttttttcggtgaatcggatgttttgttagtttttttttttgcgttttcggtcgcggttcgggtttttcgtaaagtcgttgttatttcggagggtttagttagcgggttttcggaggttggtcgggtaggcgtggtgcgcggtaggagttgggcgcgtacggttatcgcgcgtggaggagatattgttttgtcgcgatgggggttcggggcgtttttttacgtcgtaggtaagcggggcggcggttgcggtatttgtttatcgggagttttttttttttttttttgttgttgttgttttgtatttagttcgggggaggatagaagaaaaaggaggtagaatggatttttttggtttttttttgtgggcgggggcgggttagggtgggtcgcgttgttaggtagttttgtcgtgttgttaggtagtttggtcgtcggcgtgggcgatgtcggcgttggg

SEQ ID NO: 359 - DNA, 2470 bp, Artificial Sequence
  chemically treated genomic DNA (Homo sapiens)
tttagcgtcggtatcgtttacgtcggcgattaggttgtttagtaatacggtagggttgtttggtaacgcggtttattttggttcgttttcgtttataggggaaggttaaggggatttattttatttttttttttttttgttttttttcgagttggatgtagagtagtagtagtaggagaaggaagggaaagttttcggtgggtaggtatcgtagtcgtcgtttcgtttgtttacggcgtgaaggagcgtttcgggtttttatcgcggtagggtagtgttttttttacgcgcggtagtcgtgcgcgtttagtttttatcgcgtattacgtttgttcggttagttttcgggagttcgttggttgggtttttcgggatggtagcggttttgcgagggattcgggtcgcggtcgaggacgtagaggaggagattgatagagtattcggtttatcgggagaagatttggaaaggcgcgggatgggggtaggaagtgggcgtggcgagggagttaggtttcgggggcgcggcgtgcgttttcgttcggagtttgtttttttcggattagcgttgaggagaggagtggttttttggttttgggattttaatttgaggttattttgttattgaatttaattattgggtagtttagtattttatttggggtttagtatagaaagatttgaatgtttttttggatgatgaaggggaagttttggggaatgataatttggtttttgcggtttttagtaatttttatttttattgagattattattaggaatatagttttttttttttagagttttgggaaattatttaattttagagtttttcgatgtatagaagtcgttttataattttataattgttttttttagttttattggaaggtttgaggtataatttagattttattttatttaatgatttatttagtatttatggagtgtataagtatagagtatcgtattagttatttttaatataaaaacgaatagatttattttaatttttattttatgaatattttaagaattatagtagattggatatggtggtttatgtttgtaattttagtattttgggaggttgaggtaggtggtttatttgaggttaggagtttaagattagtttgtcgtaatatggggaaattttatttttattaaaaatataaaaagtagtcgggtatggtggagcgttttgtagtttttttatttgggaggttgaggtaggagaatggtataaattcgggaggtagaggttgtagtgagtcgagattattttattgtattttagtttgggagatagaatgagattttgttttaaaaaaaaaaaaaaaaaaaaaaaaagaattatagtagtagattgtatgttgaacgtttgatatgggtttgattcgttttaatgtattatggtttttattattttagtatttagagatttttttatttgtgttatgaatatttttggtaatgtgataaaatttgtagacgtttttttaaaatagtatatatttttaaacgtatgaaattaaatatatagtattagttaggtacggtggtttatatttgtaaatttaatgttttgggagatttatgtaggaggtttgtgtttaagagttggagagtagtttgggtaagatagtgagattttgtttttacgaaaaaaaaaaaaattaatagttgggtatggtggggagtatttgtagttttagttattttaagattgaggttggaaggattattagagtttaggagtttgaggttatagtgagtttcgattatgttatagtattttagtttgggagatagagtaaaattttgtttttaaaaatatatatagaatataaaaatattatatatataatatttaaggaatatatacgtataattgtttaagatatttgtaataatttattgagtatgaaaataatttttgtaggaaataaagttgtaggtattgataatattattgtggtttgttgtttgtttttataatttaaagaaacgaaattgttgtgaggttaatagatataaagttacgatttttttaatataaagtttatagatgttgaaattttatggattttagattaagaacgtttgttttataataattttattaattaggttttattgttaacgatttttagataaagaaattaaggtttagaaaaaatttgaatattgatagtttggttttatagttatgtttatgttacgatgtttttgttaaaggagtttataaatatatattatttttttgtatcgtaagtttttgattttttattattatgtgaatattttgtttgaattattatttttgttaaaaattttagataaaataaattttatattttattttagtaaataataatttataaatttgtagtattttgaattagaagtgtttagaaagtttagttttagtggtttgagagtaagttttaatagattaaatataaaaataaag

SEQ ID NO: 360 - DNA, 2470 bp, Artificial Sequence
  chemically treated genomic DNA (Homo sapiens)
agttgttttgtttagaagtcgattttttgatgtttttaacgtttggtttaattgatttgttttaatggagttttcgtcggtgaggagcgagatgttatcgattagaatgttgggatttgttgtttaattgttaggagtgagagatattgagatttagaaatttttggaggtgggaggggagagggatagtttcggacggaggcggagatgtaagataaagggatggattttatataggaaaaaaaaaaagatttcgttgaggtattgaggtgttgtacgattatattttttaaaggagaagttaaaaagtaaggaagtgggaggaggttggaggttaaagtatttaaaaggattattcgggtataatttgtttttttgttggtgtttgtaaaggatagatagtttcgtttttaaagtatatgaatgttttttttaagtgattgggaatggatattaattgtttgttaaatgttattaaatgtttttttaaatttaggggatatagaaagaggggtataaaaggagaatttaaatagaaaaagggaggattcggaggtttttgaaagcggggggagaagaaggaggagggataatagagaggaatagagaaggagagcggagagaagataaataaaaataaaaataggaattattgaataattatatattaaaaagaaagtttttttttatggggtatttaaaatattgagattgtaatagtgatttcggttatggaagaaagatgtttttttttatttttgttttcgaaagtttttggtttcgttattggcgattaaaattttattaggttaaagagtgtgtttaattgtttgaagaatgtagtagacggaaggcgggtttcgttatgtcgtttgtttttttcgttggagagaatgaaagaaacgcgtagagttagagatttttgtcgagttagattttttttcgtcgttttaggttatcggttattcggtaaagattcgagtaaggaacgtagggttattgtttgggttaataaatggagttcgttttttttttttcggacgtcgttgttcggtcgatgttttcggtaatttattcgcggcgtatgtagaggagttttttttttttttttagattatttgtttcgattaatttgattttttaaatatatttgatcgtattttttaggtggatatattaataggttacgggttggagaggagcgggtgatgaggagagggatttaaatttgcgaacgtttgggttgggtcggagttgcggggggtttgggaggagagaggggagaagagagaaggaaggagagcgtttgtcgggatggttgagttgtttcggcgagtagttttggggttgtacgtttttgtgggagatgttgttgttgtttttaggtcggtaagagcggttttaatattatcgttttttatttttttttttgtaaatttttagagaaacgtttttggttttttcgtcgcgatatttttagtttgtatttttttatagtttaggcggcgcgttttcgtacgttggagcgtcggtcgttagtaggacgttttttttcgcgtcgattcgtttttttttgttttgttgttgttgtttttttgatattttcgtttttattatttttagttcggagagacgttatttagtcgcggttcgtattcgcggttcggggttacgcgcggaagaggggcgttagttcggatttcgttttcggtagggggcgttttggagcggagagtgaggcgaatggtatatgagtgtgcgggtagtttattttgaagttcgagttttttatttgagttattttcgtttagttttattcgggttagcgtttggcgagcgagtttatttgtggttttcgcggtcgttttttttttgtatttttgtattttttcgtcgatttttttttttcgggatttgtattttgttttattaattagagttcgattgtttttttttacgtgatttcgggcgggttgaggatttgttgttttttaaacgttagagggatgcgggcggtagagttcgagaggcggttgtcgggttgcggggcgttttgattttttttttattttgttttttcgggttttattcgtttgtttttggattttcgtttttttttgtttttcggttttttagagttttttttttatggtagtagtttttcgcgttttcggcgtagttttttagcggacgattttttcgtttcggggttgagtttagtttttggatgttgttgaaattttcgagattatgcgcgggtttggttgttgttttttcgtcgggtgttattgttatcgtcgtcgtttttgttgtcgtcgttcgcgggatgtttagtagttcgttgttcggttttcgcgattttgtgtttttcggaagtcgtttgttgttgtagagttgtacgaattagttatggtgttgtgggagttttcgcggtagtgtagtagttggatattttgcgagggtttttgtt

SEQ ID NO: 361 - DNA, 2470 bp, Artificial Sequence
  chemically treated genomic DNA (Homo sapiens)
agtaaaagttttcgtaaagtgtttagttgttgtattgtcgcggggatttttatagtattatgattagttcgtgtaattttgtagtagtaaacggttttcgaggaatataggatcgcgggggtcgggtagcgggttattgagtatttcgcggacggcggtagtagaggcggcggcggtggtagtggtattcggcggggaagtagtagttaaattcgcgtatgatttcgagagttttagtaatatttagggattgggtttagtttcggagcgagagggtcgttcgttgagaagttgcgtcggagacgcgggaagttgttgttataaggagggagttttgggaagtcggaggataggaggagacgggagtttaggggtagacgagtggagttcgaggaggtagggtggagggagagttaaggcgtttcgtagttcggtagtcgtttttcgagttttgtcgttcgtatttttttggcgtttgggaagtagtaggtttttagttcgttcggggttacgtgggaagaggtagtcgggttttgattggtggagtaggatgtaggtttcgggagggaggggtcgacgaggaggtgtaaggatgtaaggaggaggcggtcgcggaagttatagatgggttcgttcgttaggcgttggttcgagtggggttaggcggggatggtttaaatgagaagttcgggttttagggtgggttattcgtatatttatatattattcgttttatttttcgttttaggacgttttttatcgaaggcggggttcggattagcgtttttttttcgcgcgtgatttcgggtcgcgagtgcgggtcgcggttgggtggcgttttttcgagttggagatggtgggggcggaggtgttagaggagtagtagtagtagggtagagaggggcgagtcggcgcgggagagggcgttttgttggcgatcggcgttttagcgtgcgggagcgcgtcgtttaggttgtagggggatgtaggttgggaatgtcgcggcggagaggttagggacgtttttttagggatttataggaaagagggtgagaggcgatggtgttagaatcgtttttgtcgatttggaagtaatagtagtattttttataagagcgtgtaattttaaggttgttcgtcgaggtagtttagttatttcggtaggcgttttttttttttttttttttttttttttttttttttaggtttttcgtagtttcgatttagtttaagcgttcgtaggtttgaatttttttttttattattcgtttttttttagttcgtagtttattagtgtgtttatttgggaggtgcggttagatgtgtttggaaggttagattggtcgggataagtggtttgagagaaagagaaaggtttttttgtatacgtcgcgggtgggttgtcgggagtatcggtcgggtagcggcgttcgggaaggggagagcgggttttatttgttggtttaggtagtgattttgcgttttttattcgggtttttgtcggatggtcggtgatttggggcgacgagagaaggtttaattcggtaggagtttttggttttgcgcgttttttttattttttttagcgggaagggtaaacggtatagcgggattcgtttttcgtttgttgtattttttaggtagttagatatattttttagtttaatggaattttagtcgttagtaacgggattaagagttttcggggataagggtggagaggaatattttttttttatgatcggggttattattgtagttttagtgttttggatgttttatagggaagagttttttttttggtgtgtgattatttagtgatttttgtttttgtttttgtttatttttttttcgttttttttttttatttttttttgttattttttttttttttttttttttcgtttttaaaagttttcggattttttttttttttatttaaattttttttttgtgtttttttttttgtgttttttgaatttaggagagtatttgataatatttaataggtaattagtgtttatttttaattatttaaaagaggtatttatatattttgaaaacgggattatttattttttgtagatattagtagaaaaataaattgtattcgagtaatttttttaagtattttaatttttaatttttttttatttttttgttttttaattttttttttgagagatgtgatcgtgtagtattttagtgttttaacgaaattttttttttttttttgtgtgaaatttatttttttattttatattttcgttttcgttcgagattgtttttttttttttttatttttaaagatttttgaattttagtgttttttatttttggtaattaagtagtagattttagtattttagtcggtggtatttcgttttttatcgacgaagattttattaaaatagattaattagattagacgttggaggtattagaaaatcggtttttagatagagtagtt

SEQ ID NO: 362 - DNA, 2470 bp, Artificial Sequence
  chemically treated genomic DNA (Homo sapiens)
atatttaaattgtatatttggtttgtaatatattatatatttaaaagaattattatttttttgaatattattaatattaataatagtattatagtgattaagagtggatttaaataaaggttggtttgaaatttaggtttgttatttattagtaagtttttaaaaattttgagtttttagtttttttatatgtgaaatggagaaaataaatttgtaaaattaattaaatttgtttatttatatttttttttttagtgtatattaattggtatttttcgttaggttagaatgtgtttttaattatgttttaaattcgttttgtgttaattttattgttagaattttttttattttgagaattagaaaaggaaatattatgtttggtaatgtttatattttttaaaataaatttgtaggaaagaatatttagtaagtgatgagagtagtaacgattgtttttattattttaaatttataatattattttttttagagttttttaagtattgtagataattttttatttattaaaaaataaattgtaattataagtatttagggttgatattgtttttgaattagatagtgtttatattagttgtataagattaatttaaagtagaggatgaaattttttttttgaattttttttagaacgtaatttagtgaatatattaaaattaaattttttttgaatgggagtaatttttacggattaatttgtaattttttagattatatttaaggtaatgtagaggttgttgtattataggttttgtgattagagattattggatttgtttttggaaaagttatttatgattttttgggttttggtttttttattttttatatcggtttaataatgattatcgtagagttgttatggaagttaaatgaatttatgtattataagtgattaatataatgattgatatttagtgatttattaataaattaaaatatttattattaatatgatagagaaggtgtcgttaaaatagataataggtttttggaagaggtgattaaatggatgtaaaatttatggattgtttatttcgtttatttttgttgtgttttttggttgtggtatatatacgtgtgggtataaaatcgtaaattttatgtagtcgcgtagtgtatgcgtagaaggtttagatacgaaatgttattttagtaatgtgtttagagaagttttgacgtcgttttggaagtaagtcgttgttgtttgatttttgggcgtttgggacggatgtttatatttgtatttagtagtattggaaggggtttaggtttttcgtagtatagtttatttttagatcgtttagttttttataatatatatttttacggaaaagggtattttttttcgttagaaaaagcgttttagtttggtttgggttggtttttattttacgttgttgtaagtaggcgaagttttttttgtttttttttttggggtaagtggaaaggagttcggtagggggttcgtagtggtttgtataggggaattgggtagcgagagagttttaggtaatttcgggggttgttttatagaagtaggtggggatcgatagtggtttttcggtttagggaggagagcgcggtcgcgggtttttttttttagtttggaggttgtagtcgttcgagtcggttcgggtgggggcggggtgggggcggcgcggagggtacggagattacggcggcgttattcgggatatttagggtttcgaggttttgggcggtttttacgcgagatcgtaaattatgataataggtagttattcgaggttaaataaaaacggagtgggtttttcgcgcgtcgtcgtttttcgcgtttttggcggtttttttcgaggttttcggcggttttacgagttcgtagtagtcggtggcgacgtcgttttcgttttatttttttgcgtaagtgcgaggttgtcggtagcgcggcgtacgtttcggtcgttttcggttttcgcgtaaaatttttattttgtttacgtgaagttgtcgttgttttagagagggggaaagagttgcgggaaaagtcggggagtgacgattgcggcggttgggcgcgtttttttattttttttttttttttttttttttttgtcgtagttcggagttttggttttttttttttttttttttttttcggagtcggttttttttttcgtttcgtttttttttcgtttgtgtacgttatttgttgtggggtggtcgaaggggatgttttgtttttattagaggtatagcgcgaaggggaaatttcgatattggaaggaacgagaataaatatttaattacggacgtattgaatcgcggttgggatagatatttcgggaattcgaggcggatcgggcgacgaggtgagtgatttttttttttaattttcgttttagggttttcgggggagtttgagttgagagaatttttaaatttttcgggaaagtgcgcgaggttt

SEQ ID NO: 363 - DNA, 2470 bp, Artificial Sequence
  chemically treated genomic DNA (Homo sapiens)
gagtttcgcgtattttttcggaaagtttgggggtttttttaatttaggttttttcgggagttttggggcgggggttggaagaaggggttatttatttcgtcgttcggttcgtttcgggttttcgaagtgtttgttttagtcgcggtttagtgcgttcgtaattaagtatttattttcgttttttttagtgtcgaagtttttttttcgcgttgtgtttttggtgaaaataggatatttttttcggttattttataataaatagcgtatataagcgggggagaagcggggcggagggagaagtcggtttcgagggggaggaggaaaggagaggagttaaaatttcggattgcgataggggggaaaggagaagaaaagaaaatgagagagcgcgtttagtcgtcgtagtcgttatttttcggtttttttcgtagttttttttttttttttaaggtagcgataattttacgtggataggatggaagttttgcgcggaagtcgggaacggtcggagcgtgcgtcgcgttgtcggtagtttcgtatttgcgtagggaggtggggcgggggcgacgtcgttatcggttattgcgggttcgtgaggtcgtcgggggtttcgggggaggtcgttagggacgcggggggcggcggcgcgcgggggatttatttcgtttttatttgatttcgggtgattgtttattgttatggtttgcgatttcgcgtggggatcgtttagggtttcggggttttggatgtttcgggtggcgtcgtcgtaattttcgtgtttttcgcgtcgtttttatttcgtttttattcgggtcgattcgagcggttgtagtttttaggttgaggggagggattcgcgatcgcgtttttttttttgggtcggagagttattgtcgatttttatttgtttttgtggggtagttttcggaattgtttggaattttttcgttatttagtttttttgtgtaggttattgcgggttttttgtcggatttttttttatttattttaagggaggagatagaagggatttcgtttatttgtaataacgtgaaataaaaattaatttagattagattggggcgttttttttgacgggaggaaatattttttttcgtggagatatatgttatgaaggattaagcggtttggggataggttgtgttgcgaagggtttgggttttttttagtgttgttgggtgtaggtataggtattcgttttagacgtttaaaggttaggtagtaacgatttatttttaaggcggcgttagagtttttttaggtatattgttgaaatgatatttcgtgtttaagttttttgcgtatgtattacgcgattatataggatttacgattttatatttatacgtgtgtatgttataattaggggatatagtaaaggtagacggaataaataatttataaattttgtatttatttaattattttttttaaaaatttattgtttattttagcggtattttttttgttatattgataataaatgttttaatttattgataaattattgagtgttaattattgtattggttatttatggtatatgagtttatttaatttttatgataattttacggtggttattattaagtcggtataaaagatgaggaaattaaagtttaaagaattatgagtgatttttttaaagataaatttagtggtttttaattataaagtttatgatataataatttttatattattttaggtgtggtttaagagattatagattaattcgtagaaattatttttatttaaagaaagtttagttttaatatatttattaagttacgttttgaaaaaggtttagaaaaaagattttattttttattttaggttggttttatgtaattgatatgagtattgtttaatttaaaagtagtattaattttgaatatttatggttataatttattttttaatgagtggggaattatttataatgtttaagaggttttagaaaaggtggtgttgtaaatttaaaatgataaaggtagtcgttgttgtttttattatttattgggtgtttttttttgtagatttattttggagggtgtaggtattgttaggtataatgtttttttttttggtttttaaggtagaaagggttttggtagtggggttggtataaagcggatttggagtatggttgagagtatattttggtttaacgaggaatgttagttaatatatattggagagaaaaatatgaatggatagatttaattaattttgtagatttattttttttattttatatgtgagaaaattaagggtttagaatttttagaagtttgttaataaatggtagatttgagttttaagttagtttttatttaagtttatttttagttattgtgatgttattattagtattaatggtatttagaaaaatagtaatttttttaaatatgtaatatattataagttaaatatgtaatttaaatgt

SEQ ID NO: 364 - DNA, 947 bp, Artificial Sequence
  chemically treated genomic DNA (Homo sapiens)
ttgttgtttttaggggttttggttttgatcgatatttgggcgggtgagtgcggggtttagagagaaacggtttttgtggggaggagtgaggggttcgttcggtgggggcgtaggatttagggagtcgcgttcggaggagggtttggcgggttttagttttttttcgtttttaggtttttattttttgaggtattttagtatcgttgtgtcgcggttcggtcgcggggagtttcgttatatcgtcgtggagtacgtagacgatacgtaatttttgcggttcgatagcgacgtcgcgatttcgaggatggagtcgcgggagtcgtgggtggagtaagaggggtcgtagtattgggagtggattatagggtacgttaaggttaacgtatagattgatcgagtggttttgaggaatttgtttcgtcgttataattagagcgaggttggtgagtgaattcggtcgggggcgtaggttacgattattttttattcgttacggatcgttcgggttttttagagttttcggattcgaaatttatttcgaggtagcgggattcgtttagattttttattcgggagagttttaggcgtttttatttaggtttatttttagtttaggttaaaattttcgcgggttgggcggggagggggcggggttagttgggcggggttgattgcggggatcggttagggttttatattttttagggaatgaatggttgcgatatggggttcgacggacgtttttttcgcgggtattattagtacgcgtacgacggtaaggattatatttttttgaacgaggatttgcgtttttggatcgcggcggatatcgtggtttagattatttagcgtttttatgaggtagaggaatatgtagaggagtttaggatttatttggagggcgagtgtttggagttgtttcgtagatatttggagaatgggaagga

SEQ ID NO: 365 - DNA, 947 bp, Artificial Sequence
  chemically treated genomic DNA (Homo sapiens)
ttttttttattttttaagtatttgcggagtaattttaggtattcgttttttaggtaggttttgaatttttttgtatatttttttgttttatagaagcgttgggtgatttgagttacggtgttcgtcgcggtttaggagcgtaggttttcgtttagggagatgtaatttttgtcgtcgtacgcgtgttggtgatattcgcggaggaggcgttcgtcgggttttatgtcgtagttatttattttttggagggtgtgagattttagtcggttttcgtagttagtttcgtttagttagtttcgtttttttttcgtttaattcgcggggattttggtttaaattgaaaatgaatttgggtaaaggcgtttgggattttttcgggtggagggtttgggcgggtttcgttgtttcggggtagatttcggattcggagattttgagggattcgggcggttcgtggcggatggggggtggtcgtgatttgcgttttcggtcgggtttatttattagtttcgttttggttgtagcggcggagtaggttttttagggttattcggttagtttgtgcgttggttttggcgtattttgtggtttatttttaatattgcggttttttttgttttatttacggttttcgcggttttattttcggaatcgcggcgtcgttgtcgaatcgtaggaattgcgtgtcgtttacgtattttacggcgatgtagcggggtttttcgcggtcgggtcgcgatatagcggtgttgaaatattttaaggagtgggagtttgggggcgaggaggggttgagattcgttagattttttttcgggcgcggttttttgagttttgcgtttttatcgggcgggttttttatttttttttatagaggtcgtttttttttggatttcgtatttattcgtttaagtatcggttagggttagggtttttgagagtagtag

SEQ ID NO: 366 - DNA, 3120 bp, Artificial Sequence
  chemically treated genomic DNA (Homo sapiens)
aattttaagtttaggtcgggtatagtggtttacgtatgtaattttagtatttggagggatcgaggtgggcggattataaggttaggagattgagattattttggttagtatggtgaaatttcgtttttattaaaaatataaaatttagttgggtatgatggtacgtgtttgtagttttagttatttgggaggttgaggtaggagaatcgtttgaattcgggaggtggaggttgtagtgagcggagattgtattattgtattcgtttggtgatagagtaagattttattttaaaaaataaataaagaaaatttgaagtatagtatttttttaaattttaaatagataatagaaattggtttttttttatttaaattagaatttaagtttaattttatatatttttgatagtttggattttgttttttaattttataaaattgggaatttaagtattatttggttcgatttaaatgtaatgtagaatttgtattaaaatattatattaaagttttagatttgtagtagttaatagtatttttatgtatgtgttagggattgttttaaatattttatatatattaatttttttattttgtatttttgttttcgttttatatagtaggaaattgaaatattgagaggttaagtaattaaagttatagagttagagtgataggagtaaagttttaatttaggtaatttagatttttagagttttgatttttattattaagttgttagtatagtttttttggtaattatttttaatttaaatataattcgagtgatttatttaataagttattattttgataatttagtgatttgtaatgtaaaattatttattgtaatttatttaatattattgtttttttgtgttgtaaaaattatagtaatcgagatgtaatttattatttttttttttattttcggtattttgtgttaatttttttgttttgcggatttttttcgattttttattatgcgtgttaattgttattaatttttttgtttgttggggattggggtcgcgagggtatattttcgaggggtacggggttagggttaggtaggttgtgcggttgggcggggttttgtgttttattgcggagtgcgggtcgggaagcggagagagaagtagttgtgtaattcgttggatgcggattagggcgttttttattttcgtcgggagttcgtcgattggttgggtgtgggcgtacgtgatcgatatgtggttgtattggtgtagttcgttagggtgttattggagatagaatggaggtgttgtcggattcggaaatggggtaggtgttggagttattatggttaggtttgttgcggggggaggggggaaggtggttttttttcgtattgttttaaatcgatggtttttttttggtatagggtttattgtagtatgttaaacgaggaggtaggggcgtcgttttttcgttttttattgtagtattggagatggattttttgtatttcggatttagggtttttgatagaagaggaagaagggggaggggtagaagtgttaaggggagtttgttgagaaaagttgtttttgaagttagaaggggtttttgtttttataatgttatttgatagagtggaataatagtatttaaggaaacgggtagaggataataaagaatggagtatatttatggcgaggagtaaaagttttattttattgaaaggtttttttttttttttggcgataaggatatatgtattggtggttaaaagagagaggagataaaatcgttgtagatggttgatgtgaatttagtggaaagagttattggggatgagagaaagaggaggaggtaggtattgtagagcgtgagtggtggtgttggttggtgaaatattggttattagtagtgtgtttgtttttgtaaaatatttaagtaaattttttgtgaatagggtggtaaatagatattagtgtttttgttagttataaaatgtagtggtagtggttttttgcggacgattgtagtagtgttttttttttttttgttaggtcgaaaagataattgtagaggaataagaaattttgtagtaaatgttggggtagaagtttatttataagaagttatagtttataaatgtagtttgaatagtagaaaaaaaattattgttttttaaagtaggaataatgttaggttatgaatgttttgttattggaatgtattggatattttgattttatattacgaaagtgatgtttaaattttttgatttaatataaattttatacgaaattttaataaattatgtatgaaatagtggatttttttttttgttagtgaagtttttatgttattaattaggttatttaagagtaaattattttataacgtaaattattttgttaaaaattatggtgaataaatttttgtaggtttaatatttaagatttatagttaagtaattttatatttttttttggttgtttttagataatattgaataaatatttaagatattaatttagtgtgtaaatattttaaattaaagtaatatggttttttttttagatgtatttttgtttagtgagtatttatgagatatatttttgatataaagtgttttttattgagttttttttttttttatttaaatgtaaaagtttatttttatgtatatttatagtagttagtttgttatatttttttattttttgaataaggatggtagtggttttgtaaagttttttagggttagtgatagtgttttttaaataatgtttatgtaatagaaagttttaagatgatttattatattgttttagtaatatttttaagataatgcggaattgggttggtttagataaataagattatataagttttttattgataaatttaaatagttttttaaaaaattatttttgttttaagaattatttgattatggatattagggttaatagtatttaggagtcgggcgtggtggtttatgtttgtaatataagttaaataggaggttgagggaagttgaggtaggaggattatttgagttttggcgtttaagattagtttgggtaattaagtaagattttattttaaaaaaaagtatttagagttttttttttaaaatttgat

SEQ ID NO: 367 - DNA, 3120 bp, Artificial Sequence
  chemically treated genomic DNA (Homo sapiens)
attagattttaaaaaagagattttaagtatttttttttgagatagggttttgtttggttgtttaggttggttttgaacgttaaggtttaagtgatttttttgttttagttttttttagttttttgtttagtttgtattataggtatgggttattacgttcggtttttaagtattattaattttgatatttatgattaagtaatttttaaagtagaaataattttttaaagaattatttaaatttattagtgaaaaatttatgtagttttatttatttaagttagtttaatttcgtattattttgaaaatattattgaaataatataataggttattttaagattttttattatataaatattatttaagagatattgttattgattttggagggttttataaagttattgttatttttgtttagggagtggggaggtgtggtaggttggttattataagtatgtataaagataggtttttatatttaggtaaaggaaaaaaaagtttaatgaaaaatattttatattaagagtatattttatgagtatttattaaatagaaatatatttagaagaaaagttatgttgttttaatttaaaatatttgtatattgaattaatattttaaatatttatttagtgttatttaaaagtaattaaagagaaatataaaattatttaattataggttttaaatattaggtttataaaaatttgtttattataatttttgataaagtaatttacgttgtaaagtggtttgtttttgaatgatttaattaatggtataaaagttttattaataaaagaaaagatttattgttttatatataatttattaagatttcgtataggatttatgttaaattaaagaatttgagtattattttcgtgatgtagaattaaagtgtttaatatattttaatgataaaatatttatagtttgatattatttttattttaaaaaatagtaattttttttttgttgtttaggttgtatttataaattatggttttttgtaaatgggtttttattttagtatttgttgtaaggttttttatttttttgtagttgttttttcggtttaatagagggagaaaaagtattgttgtagtcgttcgtaaaaagttattattattgtattttgtaattaataaagatattggtatttgtttgttattttgtttatagggagtttatttagatgttttataaaagtaggtatattattggtgattagtattttattaattaatattattatttacgttttgtagtatttgttttttttttttttttttatttttagtagttttttttattagatttatattagttatttgtagcggttttgtttttttttttttttggttattaatgtatgtgtttttgtcgttagggaggaaaagaagttttttaatggggtagagtttttgtttttcgttatgaatatgttttattttttgttgttttttattcgtttttttagatattgttattttattttgttaaatggtattataaaaataaaaattttttttggttttaaaaatagttttttttagtagattttttttaatatttttatttttttttttttttttttttttgttaaaaattttggattcgaagtataggaaatttatttttagtgttgtagtggggggcggggggacgacgtttttgttttttcgtttggtatgttgtagtggattttgtgttaaggaaaggttatcggtttaagatagtgcgagggaaaattattttttttttttttttcgtagtaagtttggttatggtggttttagtatttattttattttcgagttcggtagtatttttattttgtttttagtgatattttggcgggttgtattaatatagttatatgtcggttacgtgcgtttatatttagttaatcggcgggttttcgacgggaatggggagcgttttggttcgtatttagcggattatatagttgttttttttttcgtttttcgattcgtatttcgtagtggggtatagggtttcgtttaatcgtatagtttgtttagttttagtttcgtatttttcgggggtatgttttcgcggttttagtttttagtaagtaaggaagttgatggtagttgatacgtatagtaaagagtcgggggaggttcgtagggtagaaggattagtataagatgtcggaggtgggagggagagtaataaattatatttcgattgttatgatttttgtagtatagagaaataataatattaaatgaattataatgaataattttatattataagttattgagttgttagagtgatgatttgttagatagattattcgaattatatttgaattaaaaatagttattagaaaagttatgttagtagtttagtagtggagattagaattttggaagtttgggttgtttgagttgaagttttatttttgttattttagttttgtaattttagttatttaattttttagtgttttaattttttgttgtataaaacgggaatagaagtatagaatagaggagttaatatatatgaagtatttagagtagtttttgatatatatatagaagtgttgttagttattataaatttgaggttttaatgtagtattttaatgtaaattttatattgtatttaaatcgaattaggtgatgtttaaatttttaattttatgaggttgaaggataaaatttaaattgttaagaatatataaagttaaatttaaattttggtttaaatggggggaaattagtttttattatttatttaaaatttaaaaggatattatattttaagttttttttgtttgttttttgagatagagttttgttttgttattaggcgagtgtagtggtgtaattttcgtttattgtaatttttatttttcgggtttaagcgatttttttgttttagttttttaagtagttgggattataggtacgtgttattatgtttagttaagttttgtatttttagtagagacggggttttattatgttggttaggatggttttaattttttgattttgtgattcgtttatttcggtttttttaagtattgggattatatgcgtgagttattgtgttcggtttaaatttaaagtt

SEQ ID NO: 368 - DNA, 2501 bp, Artificial Sequence
  chemically treated genomic DNA (Homo sapiens)
gtgttttagtttttgaatttatgttgttcgttattatattgtattgtttgtggatgatttatttgtttttgtagttttatttgaagaatttttttttttttttttttgaggtttgttttaaatattattttttttgtgaagattgtttggtgttttttaggagagagtgtgatttttttttttaggaatggtagtattttaaatatatatattttgtagtatattttattttgtatggtaatggtttgtttgtgagttttatttcgtattagagggtgagggttttgaagatagcgttaggttttatttatttcgatattttataatatttattatatgtttgatgaatgaatgtatagggggatggttgggtgtattttttttaattttttaattttttgaaataaataataaaattttatttttttttagaagttttggtatggttttttttattttgttatagttattgataattatttttattttttgtgtaatttattaggtaagaagtttatgtagatttatttttagtagtttatatgataaataaatattgcgtttgatttttaaatattaaattatagtatattatagatagatatagagttattatttaaagtatgatattttaattttaaaaggttttttttgaagaatattataaattttttttttttttaagatttgttgggtaggaaagatgggagaaaatgaattaatgtttatatagaaaggaggataatgggggtaaaaataatagatgaacgtatgggtggatgagagaatggataaaatgataggtggatatgttgattttggatagatgggaaatgagtggatatattaataaatagatatgtgggtggatgggtggagaagaggatggtggatggttgtggttttatgaagagatgtgaaaaaggaagtgtggaatgatggatgagaagttgtatgggaagatgaatagaagaataggtggttgaataaattaaaaggtgtgtggttggatgaatgaatgagtgggatgatagatggatttaagtggttagtggatggataggaggatggatggatgtgagagttttagaaggatataaggaaagatgggtggatagatggatgggcggatggaaggatatttaggaggatgaatgagtatgtgtgtggagagaggtgtttatttatattggtttgaatatatgggttagttgagttaaatgttagttttatgataggttattagtagttttttttgagttgttttgttaagaagttaaaatttatttaagttatgtggatttgttattgaggggaaaaagaatgagttttttttttttttatttggaagatttattaattttttattttttattttttattgtgggtacggaggtattgcgttatttagggtaagatttcgttttttttttagttttttttttaggatatttaatattttgtgaaatttagagattttgttttagtcggatttagagaaatttagcgggaaaggagaggttaaaggttgaatttaatggtgtaaggttttacggttcggttattttttgttttgacgtcgcggggttagcgggagaagaaagttagtgcgtttttgggcgtaggggttagtggggttcggaggtataggtatttcgcgatattttaggtttttcgatttacgtttttggtagtttcgattatttatagttttagtagagtacggggcgggggtagaggggttcgttcgggagggttgttattttttaaaatttttgcgggttgtttagttatagttttttttgtttgggtgtgtttttcgttcgtttttttttttcgttttaggttattgtttttaatttcgaataaaaattgtagttaattttcgaggtagttttattgtttagcggattttagtttttgttaggttcggttcgttattttcgtttcgtttttcgtcggtttttgtttcgcgtttagggattttttagtttttttcgttcgcgtttttcgttcgtttcggatattatggataagttttggtggtacgtagtttggggattttgtttcgtgtcgttgagtttggcgtagatcggtgagtgttcgtcgtagtttgggtagtaagatgggtgcggggtgtttagcgcggattcggcggtagttttttcggttgagtcggttttgggggattggagttaagtgagttgtttgcgaagtgtattgggtttcggaaagtagggttgggatttgcgttaaatcgttggagaatgtgtttgtggaagtattatttggttgaaagaaaaagagaaagagaagaaagtttgttgggtaggttgtcggcgcgtagttttgggcgaggtcgttagagttgtagtatatggtagaaagtaatcgttttttcggatgcgtatagtcgttgtttggattaataggtttttgtgtttaagggttcgttaagttttatcgggttgtgtttaggtagggtagagttgggcggggta

SEQ ID NO: 369 - DNA, 2501 bp, Artificial Sequence
  chemically treated genomic DNA (Homo sapiens)
tgtttcgtttagttttgttttgtttagatatagttcggtggggtttggcgagtttttgggtataggagtttgttagtttagataacgattgtgcgtattcgggagaacggttattttttgttatgtgttgtagttttagcgatttcgtttaaaattgcgcgtcggtagtttgtttaataaattttttttttttttttttttttttttaattaaatggtgtttttatagatatattttttaacggtttagcgtaaattttagttttgtttttcggagtttaatgtatttcgtagatagtttatttgattttagttttttagggtcgatttagtcggaggggttgtcgtcgggttcgcgttgagtatttcgtatttattttgttgtttaggttgcggcgggtatttatcgatttgcgttaggtttagcggtacgaggtagagtttttaggttgcgtgttattaaaatttgtttatggtgttcggagcgaacggagggcgcgggcgaaaggagttggaggatttttgggcgcggggtaggggtcggcggaggacgggacgaggatggcggatcgaatttggtagaggttggggttcgttgggtaatgaggttgtttcggaagttggttgtagtttttattcgaggttgaaaatagtgatttaagacggagggagggagcgagcgaaggatatatttaagtaaggggggttgtgattaagtagttcgtagaggttttaagaagtagtagttttttcgggcgggtttttttgttttcgtttcgtgttttgttgaggttgtaaataatcggggttgttagggacgtgggtcggggaatttggagtgtcgcggggtgtttgtgttttcgagttttattggtttttgcgtttagagacgtattggtttttttttttcgttggtttcgcggcgttaggatagaggatgatcgaatcgtaaaattttgtattattgggtttagtttttggttttttttttttcgttaaatttttttgaattcggttggagtaagatttttgggttttataggatgttggatattttgggagaggagttggagagagggcgaggttttgttttgggtggcgtagtgttttcgtgtttatagtggggagtgaggggtggggagttggtgaattttttaagtggaaagagggagagtttattttttttttttttaataataagtttatatggtttgaatgaattttagttttttggtagaatagtttagggaaagttattgatggtttgttatagggttggtatttggtttagttaatttatgtgtttaagttagtgtgaatgggtatttttttttatatatatgtttatttatttttttaaatatttttttattcgtttatttatttatttatttatttttttttatgtttttttggggtttttatatttatttatttttttgtttatttattaattatttaggtttatttattattttatttatttatttatttaattatatattttttaatttatttaattatttatttttttatttatttttttatataattttttatttattattttatatttttttttttatatttttttataaaattataattatttattatttttttttttatttatttatttatatatttgtttattgatatatttatttattttttatttgtttaagattaatatatttatttattattttatttatttttttatttatttatacgtttatttattatttttgtttttattatttttttttttgtgtaaatattaatttatttttttttattttttttatttagtagattttaaagagaggaagagtttgtaatattttttaggggaagttttttgagattgaaatattatattttgaatgataattttatatttatttataatatattatggtttaatgtttggaaattaaacgtagtatttatttgttatgtgaattattaaaagtaaatttgtatggattttttgtttggtgagttatatagaaaatgaaagtgattattagtggttgtggtaagatgaaaggaattatgttaggatttttgagggaaggtaagattttgttatttattttaagaaattgaaaagttgagagaaatgtatttagttatttttttatgtatttatttattagatatgtaatgagtgttgtggggtatcgaggtaaataagatttggcgttatttttagagtttttattttttggtacggaataaaatttataagtaggttattattatgtaaggtgaaatatgttgtaaaatgtgtgtgtttggggtgttattatttttagagaagggagttatatttttttttggagaatattaggtagtttttataggggaagtgatatttgaggtaggttttaaaggaaaaggaggaggaattttttagatgaaattatagggataagtaagttatttataggtagtatagtgtagtgacgaatagtatggatttaggagttagaatat

SEQ ID NO: 370 - DNA, 2501 bp, Artificial Sequence
  chemically treated genomic DNA (Homo sapiens)
agatttatttaaatttaagaatgagaatataaatttatattttgaagtgttttatagaaaggtttattttaatgtttggagtatatattttaatgaatatttattttattttatttttttttatttttgaattaagtaattttgaatttaaagttgttatgattagtattgaaaagattattggattattaattgtgtgattttgggatagtaattttttgtattttagtttgtttatatgttatatatgaaggttgaagtttgattttgttttgtgattattattttaaatatttgatgaaattaaattttagtgtttggaatggtagtataataaatttattaagaataaataatttattgtaaaaatatattgatttttaaatgatgtaattgatagttatattattgtagagggttgataaataataaaagaaatgaaagatgtatatggtgagaattgaaattattttgataagttttttatttgtttattatttaaaattaatgattatgttgaatgtttataaattataaaatataaaagaaattttataaatgcgtatgtataggagtttaagttattaaaagttttaaagtataagtttaaattaaattaattaaagaagttgagaggaaaaattggtttttatttttaattattattgttttgaggttttatgtttaatataattttttaagtagaggttttagagagaagagttgtgaggatatttttatatttgtgtagaaggaaaagtttgttatttattttagtatttttagtgttatattgatgtgtattttggatttattttgtttttattgtataaatttatatttgattttaaagaaaaggaaaatttaaagttttttttttttaaggggatagaaattttttgtgttaattgtttgatttttttttttgtaaggttttattggaaattttttgtaatataatgtaggggatttttttatgtgttgatgttgtttatatagtggggtgggtttgattgaagaaaaaaaatcgtatatacgtatgaaagattatggttttattttcggaaagtatgaaaggtgattgatatttttaagaagtttttgttatttaggaaaattattaaatattttatttagagatatttggaaagattgaaggaaaggaagaacgaagaaagtagaatttagatttatgtggggagagatttgtggtagaggaaaagtattttttttgaattcgataagggatttgtttgggggaattttttgtttagttttttattattagggttttttgaagtcgggttttttattgggtagttttttgggagtgtagtggggaatttttatattttttttttaggttttcgaaggatttcgtttttttagtgttttttttaggttggtaggagttttgagtttgatatttttttttgatgggataggtaagttttgtgggcgcgtaaatacgttgtaattaagttttttgttgattttatagttttgtgtgttttcgagaagaagtgatcgtatttaattgtttattgttggtttgttttttaagagtttgggggttttttttttttaatttagaattagttgtacggggggcggggaaatgggggtggggaaggagtgggagggtagtggttttcgcgagtagagcgatgttattgagtgagtttttgaatggggagcgttgttgtttttaagtcgattggtattttttgttaggaagaaacgttaagaggtgggagtgtttggggagggaggtaggcggtttttatcgtaggcgcggggagttgttttttcgttttttcgtttgttttttaagtttggatttttaggagtggttgaagttgcggagcgtttttggagtttgtgaatgaattttttttttttttttttttttttttttcgttgagtttttttttcggttttgacggtatagtgatataatgatgatgggtgttataattcgtatttgaatttgtaggcgagttgtttcgagtttttttggggaagaattttaggcgtgcggacgtaatagtcgagaatattaggtgttgtggataggagttgggattaagattttcggttagtttcgtattttttcgtattttttagtatcgtttcgtatttttcgtattttttttcgggttattacgttttttatgtgattcgtttgggtaacgtcgaatttagtcgcgtagcgttgtagtgaattttttttttaaattgtaataagtcgttttttaaggtaattacgttttttttgttttttttttaaaaaataaaaataaaaaatttatagaaaaaaattcgcgagtttagaaaaaagaagtaattggtagaaggttttaattaaggtaaagagttgtaaggcgaagttaagaaaatgtaggtatttaaaaaatgtaggtaatttttataagggtttttggggagaggtatatagagggattttggtgttgaaaaagatttagataaaagaaatttag

SEQ ID NO: 371 - DNA, 2501 bp, Artificial Sequence
  chemically treated genomic DNA (Homo sapiens)
ttgggttttttttgtttgaattttttttaatattaaggtttttttgtatgtttttttttaaaagtttttatgaaagttatttgtattttttaagtgtttatatttttttaatttcgttttatagttttttgttttaattaaagttttttattaattgttttttttttttaagttcgcgggtttttttttataagttttttgtttttgttttttaaggggggaataaaagaaacgtgattattttggaaggcggtttattgtagtttggggggaaaatttattgtagcgttgcgcgattgggttcggcgttgtttaggcgggttatataggaagcgtggtggttcggggaaggatgcggagggtgcgggacggtgttggaagatgcgggaggatgcggggttggtcgaagattttggttttagtttttgtttataatatttaatgttttcggttgttgcgttcgtacgtttggagtttttttttagaaaggttcggggtagttcgtttgtaagtttaaatgcgggttgtgatatttattattattatattattgtatcgttagagtcgaggaggagatttagcgagaagaaggaggagggagaggaggagggtttatttataggttttaaaagcgtttcgtagttttagttatttttaagagtttaggtttggaaagtaggcggaggggcggaaaggtagtttttcgcgtttgcggtagggatcgtttgtttttttttttaggtatttttattttttggcgtttttttttgataagaagtattaatcggtttggggatagtagcgttttttatttagggatttatttagtaatatcgttttgttcgcggaaattattgtttttttattttttttttatttttattttttcgtttttcgtgtagttagttttgggttaggggaaaggagtttttaggtttttagggggtaggttagtaatagataattgagtacgattattttttttcgggagtatataaaattgtaaaattagtaaagaatttggttatagcgtgtttacgcgtttatagagtttgtttgttttattaaagggaagtgttaggtttaaggtttttgttaatttgaaagagatattgagaaaacgagatttttcggggatttagagggaaagtgtaagaattttttattgtatttttagggaattgtttaatggggagttcggttttaaaagattttggtaataaaaggttggataggaaatttttttaggtaaattttttgtcggatttaaagagaatattttttttttgttataaatttttttttatataagtttagattttgtttttttcgtttttttttttttttagtttttttaagtatttttgagtagaatatttgataatttttttgagtaatagggattttttggaagtattaattattttttatgtttttcggaaataagattataattttttatgcgtatatgcgattttttttttttagttaggtttattttattgtgtaaatagtattaatatatggaagagttttttgtattgtgttataaaagatttttaataggattttatagagaaaagggttaaatagttgatataaaggatttttgtttttttagaaaagagggattttggattttttttttttttgaagttaagtatgagtttatataataggaataaaataaatttaaggtgtatattagtataatattagggatattagaatggatggtaaatttttttttttatataaatatgaaagtatttttataatttttttttttgaagtttttatttagaaaattatattaaatataggattttaaaatagtagtgattaaagatgaaagttaatttttttttttaatttttttgattagtttggtttaaatttatgttttaaaatttttagtaatttagatttttgtatatgcgtatttataagattttttttatattttgtaatttgtaggtatttagtatggttattgattttaagtgataaataggtagaagatttgttaggataattttagtttttattatgtgtattttttattttttttgttatttattagttttttgtagtaatataattgttagttatattatttggaaattaatgtgtttttgtagtgaattatttatttttagtaaatttattgtattattattttaaatattgaaatttgattttattagatgtttagaatgatagttatagagtagaattagattttaatttttatgtataatatgtaaataaattaaggtgtagaaagttattgttttaaagttatataattaatagtttagtggtttttttagtgttaattatagtaattttagatttaagattgtttgatttaggaatggagagaaataaaataaaatgaatgtttattgaaatatatattttagatattaagatagatttttttgtgaaatattttaagatgtggatttgtatttttatttttaaatttgagtaaattt

SEQ ID NO: 372 - DNA, 3000 bp, Artificial Sequence
  chemically treated genomic DNA (Homo sapiens)
atatttaaattgtatatttggtttgtaatatattatatatttaaaagaattattatttttttgaatattattaatattaataatagtattatagtgattaagagtggatttaaataaaggttggtttgaaatttaggtttgttatttattagtaagtttttaaaaattttgagtttttagtttttttatatgtgaaatggagaaaataaatttgtaaaattaattaaatttgtttatttatatttttttttttagtgtatattaattggtatttttcgttaggttagaatgtgtttttaattatgttttaaattcgttttgtgttaattttattgttagaattttttttattttgagaattagaaaaggaaatattatgtttggtaatgtttatattttttaaaataaatttgtaggaaagaatatttagtaagtgatgagagtagtaacgattgtttttattattttaaatttataatattattttttttagagttttttaagtattgtagataattttttatttattaaaaaataaattgtaattataagtatttagggttgatattgtttttgaattagatagtgtttatattagttgtataagattaatttaaagtagaggatgaaattttttttttgaattttttttagaacgtaatttagtgaatatattaaaattaaattttttttgaatgggagtaatttttacggattaatttgtaattttttagattatatttaaggtaatgtagaggttgttgtattataggttttgtgattagagattattggatttgtttttggaaaagttatttatgattttttgggttttggtttttttattttttatatcggtttaataatgattatcgtagagttgttatggaagttaaatgaatttatgtattataagtgattaatataatgattgatatttagtgatttattaataaattaaaatatttattattaatatgatagagaaggtgtcgttaaaatagataataggtttttggaagaggtgattaaatggatgtaaaatttatggattgtttatttcgtttatttttgttgtgttttttggttgtggtatatatacgtgtgggtataaaatcgtaaattttatgtagtcgcgtagtgtatgcgtagaaggtttagatacgaaatgttattttagtaatgtgtttagagaagttttgacgtcgttttggaagtaagtcgttgttgtttgatttttgggcgtttgggacggatgtttatatttgtatttagtagtattggaaggggtttaggtttttcgtagtatagtttatttttagatcgtttagttttttataatatatatttttacggaaaagggtattttttttcgttagaaaaagcgttttagtttggtttgggttggtttttattttacgttgttgtaagtaggcgaagttttttttgtttttttttttggggtaagtggaaaggagttcggtagggggttcgtagtggtttgtataggggaattgggtagcgagagagttttaggtaatttcgggggttgttttatagaagtaggtggggatcgatagtggtttttcggtttagggaggagagcgcggtcgcgggtttttttttttagtttggaggttgtagtcgttcgagtcggttcgggtgggggcggggtgggggcggcgcggagggtacggagattacggcggcgttattcgggatatttagggtttcgaggttttgggcggtttttacgcgagatcgtaaattatgataataggtagttattcgaggttaaataaaaacggagtgggtttttcgcgcgtcgtcgtttttcgcgtttttggcggtttttttcgaggttttcggcggttttacgagttcgtagtagtcggtggcgacgtcgttttcgttttatttttttgcgtaagtgcgaggttgtcggtagcgcggcgtacgtttcggtcgttttcggttttcgcgtaaaatttttattttgtttacgtgaagttgtcgttgttttagagagggggaaagagttgcgggaaaagtcggggagtgacgattgcggcggttgggcgcgtttttttattttttttttttttttttttttttttgtcgtagttcggagttttggttttttttttttttttttttttttcggagtcggttttttttttcgtttcgtttttttttcgtttgtgtacgttatttgttgtggggtggtcgaaggggatgttttgtttttattagaggtatagcgcgaaggggaaatttcgatattggaaggaacgagaataaatatttaattacggacgtattgaatcgcggttgggatagatatttcgggaattcgaggcggatcgggcgacgaggtgagtgatttttttttttaattttcgttttagggttttcgggggagtttgagttgagagaatttttaaatttttcgggaaagtgcgcgaggtttcgtcggggacgtcgagcgttgggtattgaggacgcgtagttggacggtgcgtgggcgtttgcgttttcggggggcgtttggaggtcgggtgttttacgtttgagggttcgggtcgttcggatcgtagcggtgttttttgttttagaagacgtttttaagttttaagggtttttttcgagtttgtttgtttttttcggggtcggcgcggagtttgcgcgtaacggagtttatttagtagtttagcgcgcggtttttatttgtatttcgtttttatttggtagaggcgcgagtatcggggttttttttatattttttttatgacgtgtattattttttgatgattttttagatggtttaggcgcgaggatgttgatttagagtttttcggagggttataggcgtttgggttttttcggtgtcgggtgcgtgtgtattttaaaggttcgcgttttaatttttaggtattgatcgggttttttaattgcggcgattttattttaatagtttttatgtggcgtggattgaatgtt

SEQ ID NO: 373 - DNA, 3000 bp, Artificial Sequence
  chemically treated genomic DNA (Homo sapiens)
gatatttagtttacgttatataaaaattattaaagtgggatcgtcgtagttgaaaagttcgattagtgtttggagattagaacgcgagtttttaaagtatatacgtattcggtatcgggaaagtttaggcgtttgtgatttttcgaaggattttgggttagtattttcgcgtttggattatttagggggttattagaaagtaatatacgttataagaaagatgtgggggagatttcgatgttcgcgtttttgttaggtggaggcggggtgtaggtagaagtcgcgcgttggattgttggatgaatttcgttacgcgtaggtttcgcgtcgatttcggaagggataggtaggttcggaagggatttttggggtttggggacgttttttagggtagagagtatcgttgcggttcgagcggttcgggtttttaggcgtggggtattcggtttttaagcgtttttcggggacgtaggcgtttacgtatcgtttagttgcgcgtttttagtatttagcgttcggcgttttcggcggagtttcgcgtattttttcggaaagtttgggggtttttttaatttaggttttttcgggagttttggggcgggggttggaagaaggggttatttatttcgtcgttcggttcgtttcgggttttcgaagtgtttgttttagtcgcggtttagtgcgttcgtaattaagtatttattttcgttttttttagtgtcgaagtttttttttcgcgttgtgtttttggtgaaaataggatatttttttcggttattttataataaatagcgtatataagcgggggagaagcggggcggagggagaagtcggtttcgagggggaggaggaaaggagaggagttaaaatttcggattgcgataggggggaaaggagaagaaaagaaaatgagagagcgcgtttagtcgtcgtagtcgttatttttcggtttttttcgtagttttttttttttttttaaggtagcgataattttacgtggataggatggaagttttgcgcggaagtcgggaacggtcggagcgtgcgtcgcgttgtcggtagtttcgtatttgcgtagggaggtggggcgggggcgacgtcgttatcggttattgcgggttcgtgaggtcgtcgggggtttcgggggaggtcgttagggacgcggggggcggcggcgcgcgggggatttatttcgtttttatttgatttcgggtgattgtttattgttatggtttgcgatttcgcgtggggatcgtttagggtttcggggttttggatgtttcgggtggcgtcgtcgtaattttcgtgtttttcgcgtcgtttttatttcgtttttattcgggtcgattcgagcggttgtagtttttaggttgaggggagggattcgcgatcgcgtttttttttttgggtcggagagttattgtcgatttttatttgtttttgtggggtagttttcggaattgtttggaattttttcgttatttagtttttttgtgtaggttattgcgggttttttgtcggatttttttttatttattttaagggaggagatagaagggatttcgtttatttgtaataacgtgaaataaaaattaatttagattagattggggcgttttttttgacgggaggaaatattttttttcgtggagatatatgttatgaaggattaagcggtttggggataggttgtgttgcgaagggtttgggttttttttagtgttgttgggtgtaggtataggtattcgttttagacgtttaaaggttaggtagtaacgatttatttttaaggcggcgttagagtttttttaggtatattgttgaaatgatatttcgtgtttaagttttttgcgtatgtattacgcgattatataggatttacgattttatatttatacgtgtgtatgttataattaggggatatagtaaaggtagacggaataaataatttataaattttgtatttatttaattattttttttaaaaatttattgtttattttagcggtattttttttgttatattgataataaatgttttaatttattgataaattattgagtgttaattattgtattggttatttatggtatatgagtttatttaatttttatgataattttacggtggttattattaagtcggtataaaagatgaggaaattaaagtttaaagaattatgagtgatttttttaaagataaatttagtggtttttaattataaagtttatgatataataatttttatattattttaggtgtggtttaagagattatagattaattcgtagaaattatttttatttaaagaaagtttagttttaatatatttattaagttacgttttgaaaaaggtttagaaaaaagattttattttttattttaggttggttttatgtaattgatatgagtattgtttaatttaaaagtagtattaattttgaatatttatggttataatttattttttaatgagtggggaattatttataatgtttaagaggttttagaaaaggtggtgttgtaaatttaaaatgataaaggtagtcgttgttgtttttattatttattgggtgtttttttttgtagatttattttggagggtgtaggtattgttaggtataatgtttttttttttggtttttaaggtagaaagggttttggtagtggggttggtataaagcggatttggagtatggttgagagtatattttggtttaacgaggaatgttagttaatatatattggagagaaaaatatgaatggatagatttaattaattttgtagatttattttttttattttatatgtgagaaaattaagggtttagaatttttagaagtttgttaataaatggtagatttgagttttaagttagtttttatttaagtttatttttagttattgtgatgttattattagtattaatggtatttagaaaaatagtaatttttttaaatatgtaatatattataagttaaatatgtaatttaaatgt

SEQ ID NO: 374 - DNA, 2501 bp, Artificial Sequence
  chemically treated genomic DNA (Homo sapiens)
gttatttttatgtgttttgtagttttttgaaggggcgtgggatttatcgatgttaattatttagtattatttttagattttaagaagttggggtgtgagttagtaattagtatagaaaagagatattaaaataagtttgagttggggagtgtttttttaattttagttttttggaagagattttttttttttttttgagatagagtttcgtttttattgtttaagttggagtgtagtggtacgatttcggtttatcgtaatttttttttttcgggtttaagcgattttttttttttagttttttgagtagttgggattatagatatgtatttgtaatttttattaaaaatataaaaattagtcgggcgtggtggcgtacgtttgtaattttagttattggggaggttgaggtaggagaatcgtttgaaattaggaggcggagattgtattaagatagtttgttttagttaaataatttggcgttagtgtaggaaaaggtggaaggtacggggttagtataggagggtttaatatttttaattttattaagttatattttggtaatttttgttttttacgagaagttttcgttgggtttgttttagcgttgttttgaggttttttttatgagtttcgatagggtagaggtcgttttgagcgttttttttttttttggtttaagagtggtttaaaagaaggatttttgattggaattggttattttgtgttattttttgatttttgatttcgttttaaagggggatgcgggggaggggttttggtaggggtggtttcgttttttttaggttcgtaagtttaggttttcgtttatcgggtttagtttattttgcggtcgtttagggaggtcgttggtattcgtgatttacgatttttttttcgagttttatcgaggttatagtcgtggtttcgtttttttatgtttgtttttcgttttttgttcgtgacgggcgttttcgaggattaatgagcgcgttgtatttatttttcgggcggggttaagcgtcgattaatcgtcgttcgggcgttcggtcgggtttaaacgttttaatcgttagcggcggcggggcgggtagagggtcggggatggtaggtttaattaacgggtgggtacgtcgttttcgcgaggaggcgtgttttgcggtcgggcgtgcggtgttcgcggcggcgtagggagggggagggaggtaaataagatggcggcggcgtgtcgggcgcggaagggggaggcggttcggggcgttcgcgagtgaggcgcggggcggcgaagggagcgcgggtggcggtatttgttgtcgcggttttggatgggttgggtttttttcgtcgtttcgttttttttatacgcgcggcggtcgcggcgagggggacgcgtcgttcggggttcggtattttcgggaatttttcggttcggagtttgcggtttgcgtcgtttcggtcgtcgggagtttcgtggagttttcgtcgtcgcgtcgtttcgcggatcggacgttgagggtattcggggcggggcgcgcgttcgggtagacgtttgcggggaggggggcgtttgtcgggtttcggcgattattttgggggtcgcgggtcggttcggggggcgtttagtgcgggttttcgcgggcgtcgggtagcgattagttttgagcggagttgttggtcgcggcgggaggtttttcggacgtttttagtttttcgaacgttcgttcgggtcggcgggagtcggcgtttttcgggaggttcgttcggtcgttcgcggcggagcgtttgtttttgggataggcggtgggatcggggcgtcgtcggagacgtttttagcgaagttgggttttttaggtgtgggggtttcggggggtagcgacgtcgcggattcggtttgtgggatgggcggttcggagaagattgcgttcggtcgtgtttatatttgttcgtgggtttgaggttttcggaggatgatttagtattgaaaagtttcggtcggtttttttagggttttcgaggacgaagttgattttgatcgggtcgttttttagttttgaggttcgggttttattggaattcgcgtttgagtcgtcgtttcggattttcggtgttcgtcggttcgtagattttgtatcgggtttggattcgtagtcgggattgacgtgtagaataatcgtttttgttggaagaagggttttttttttttttttggggtttttgttgtttttttttttttttttttttttgtaaaattttggagaagggaagtcggaatataaggaaggatcgtttattcgcggatttagggttggcggcgggattttaggattttgggtttagtatggaggtggtggattcgtagtagttgggtatgtttacggagggcgagttgatgtcggtgggtatggatacgtttatttatcgtatcgattttatcgaggttatttattagtcgcgtcgtaagcgggttaagtttatcggtaagtatttgatgggggatttgt

SEQ ID NO: 375 - DNA, 2501 bp, Artificial Sequence
  chemically treated genomic DNA (Homo sapiens)
gtaggttttttattaggtatttgtcgatgagtttggttcgtttgcggcgcggttggtagatgatttcggtggagtcgatgcggtggatgaacgtgtttatatttatcgatattagttcgtttttcgtgaatatgtttagttgttgcgggtttattatttttatgttggatttagggttttggagtttcgtcgttagttttgagttcgcgggtgagcggtttttttttgtgtttcgattttttttttttaaaattttataaagaaaaaagaaaaaaaaaaggtaataaaaattttaaaaggaagggaaaaattttttttttaatagaaacgattgttttatacgttagtttcggttgcgagtttaagttcggtgtagggtttgcggatcggcgggtatcgggggttcgggacggcggtttagacgcgagttttagtgggattcgggttttagaattgggagacggttcggttagggttaatttcgttttcggggattttggggaggtcggtcggggttttttagtgttaggttatttttcggggattttaggtttacggataagtatgaatacggtcgagcgtagtttttttcgggtcgtttattttataggtcgggttcgcgacgtcgttatttttcgggatttttatatttggagagtttaatttcgttgggggcgttttcggcgacgtttcggttttatcgtttgttttaggagtaaacgtttcgtcgcggacgatcgagcggatttttcggggggcgtcgattttcgtcggttcgggcgagcgttcggggggttgggggcgttcgggaggtttttcgtcgcggttaatagtttcgtttagggttggtcgttgttcggcgttcgcgagggttcgtattgggcgtttttcgagtcggttcgcgatttttaaggtggtcgtcggggttcggtaggcgttttttttttcgtaaacgtttgttcgagcgcgcgtttcgtttcgagtgtttttagcgttcggttcgcggggcggcgcggcggcgggggttttacggggttttcggcggtcgaggcggcgtaggtcgtaggtttcgggtcggggggttttcgaaggtgtcgggtttcgggcggcgcgtttttttcgtcgcggtcgtcgcgcgtgtggaggaggcggagcggcgaggggggtttagtttatttaaggtcgcggtagtaagtgtcgttattcgcgtttttttcgtcgtttcgcgttttattcgcgggcgtttcgggtcgtttttttttttcgcgttcgatacgtcgtcgttattttgtttatttttttttttttttttgcgtcgtcgcggatatcgtacgttcggtcgtagggtacgttttttcgcgaggacgacgtgtttattcgttggttgaatttgttattttcggttttttgttcgtttcgtcgtcgttgacgattggagcgtttggattcggtcgggcgttcgagcggcgattggtcggcgtttggtttcgttcgaggggtggatatagcgcgtttattggttttcggagacgttcgttacgggtagggggcgggaagtaggtatggggagacgaggttacggttgtgatttcggtggggttcgggaagggggtcgtaggttacgggtgttaacggtttttttgaacggtcgtagggtgggttgagttcggtgggcgggaatttgggtttgcggatttggaaggagcggggttatttttattagagtttttttttcgtatttttttttggggcgaggttaagggttaaaaagtaatataaagtggttaattttagttaaaaattttttttttgagttatttttggattaggggaaagagaaacgtttagggcggtttttgttttatcggaatttatgggggaagttttaggatagcgttgggataagtttagcgggggtttttcgtgaaaaataagagttgttaaaatatggtttgataaggttgaaaatattgaatttttttgtgttagtttcgtgttttttatttttttttgtattagcgttaggttgtttagttggaataaattattttggtataattttcgttttttggttttaagcgatttttttgttttagtttttttagtagttgagattataggcgtgcgttattacgttcggttaatttttgtatttttagtagaaattataggtgtatgtttgtaattttagttatttagaaggttgagggaggagaatcgtttgaattcgggaggaggaggttgcggtgagtcgagatcgtgttattgtattttagtttgggtaataagagcgaaattttgttttaaaaaaaaaaaaaagattttttttagaaaattgaagttgaaggaatattttttaatttaaatttattttggtattttttttttgtattgattgttggtttatattttaattttttggaatttggagataatgttggataattggtatcggtaggttttacgtttttttagagaattgtaggatatatggaagtgat

SEQ ID NO: 376 - DNA, 2501 bp, Artificial Sequence
  chemically treated genomic DNA (Homo sapiens)
ggaggatagaaatataaattaaagaatgatataaataattataaagttatagttgttaaaagaaaagtatatggtgttaagagaacgtgtaatataagatttatttatggaggtgagggaaagtttgtttattaaagaagttatgatttaatttacgaagattaggagttggttgggtgaagaaaaaaaggttagaggaaggaagtttatattggggaaggttttaagtataaagggtaggaggattatagaggtatatttacgaaatttggagaaggtttttagtaagtaaggagaagttaaatgaaagtttacgggagagttggaggtttgaagatacgtttaaggatttggtttttattttttttttattttaagagtagtgggaagttattaaatgattttaattagagggttggtataattagttttgtattttgaaaagttgaatttagttttcgtttgagaaattgagtgaaagagtttagaacggtcgtggttgagggtgattcgtgggagatttttatataagttatggtagtggtatgggttggtggtagaagagggaatagggagaagatttggaatttaatttttttttattgataaagttattttagttttggtaaggtaattaattggtgggaaagaagatgtttagtttttttgattttattgtattttttgtatttttaatatgagtattgggaagtggtaaaatatttagaggtagtttgggtgttaggtggagtatgagttaaaattttaggatgaagtaaatgaatatttagaatgataggaaagatttgggagttgggtttgggggagggttatttatttttattttttggagattttggtataaatttttgtttttgtaattttttttttaggtaaaggaatttattaaatgaattgttagaagatttattgattagagggttgtatagaattatatttttgagagtgggaagtaggttgattatatagtttattatttaattaggatatatttgaaagagaaagggggttttattaatatttaaattataaaatatgtatattaggaatgttttgggtaaatttggttgttttagtaagaaaggaaatttgaaagtttatattgttttgtttttatgttatttcgtttgtatatgagagggtaagtattttttttttttatttgtattaagggaataaaagtataagtatttaggtgatttttaatttatttttaattttatagtttttgttatattttatatattttgaaaattatattttttattattattatttcgtgataggtgattatttataattatttattgatttagtttcgggaagaggcggtgtaaaatgggacgttttatttaggtgtttattagaaatgtagaatttttgtttgttttttagatttattgaattagaatttgtatttttaaataagatttttaggtgattaatatgtatattaaaatttgagaaaaatttttagatttcgatttaaagaaaaatattttataatttgatagtgtatgtatatatatatatgtatatagatataattgaagtataaatttaatgaagtagaatttatcgttattattttatttgggaaagaaatgtgttcgcgatttaatagattggagtatttatttttggattttaatttgtaatttgaaaacgtatttttaaagtatttaggagtaatttgaagaaagttgaggggaggcggtagatgttttgatttattagggaaaacgtggacgttttttgttgttattttgtgaattgtgtgtatttagttatttttgagtaaatatttggagcgaggaatttttgagtggtgtgggagggcggtgaggggtagttgaaagtcggttaaagttttcggaggggttggtttaggaaatatgattggtagttacgagagagttaggggttggacgtcgaggagagggagaaggttttcgggcggagagaggttttgtttagttgttggcgaggagttttttgtttttttcgtagcgttgagttgaagttgagtgagttattcgcgcgtacggagcgacgatattttcgcgcgtgtattcgttcgggataggagtcggatttttgtgtagtttttttcggtcgtcgggggttttttcgcgtttcgtcggtttttaggtttttttttggttggcgagcgggcgttatatttggttcgtatatttgcgttgtcggttcggcgcggggttcggagagggcgcggcgcggaggcgtagttaggggttcgggaaggcgtcgttcgttgcgttgggggttcggtttatgacgagtagcggggtttgttatgggtcgggggttgtttaggggtttgtggtcgttgtatatcgttttgtggacgcgtatcgttagtacgattttatcgtacgtttagaagtcgggtgagtggtttttagttcgggttcggcggggcgtcgggggtttttttggggttttcgttttttcgttgt

SEQ ID NO: 377 - DNA, 2501 bp, Artificial Sequence
  chemically treated genomic DNA (Homo sapiens)
gtagcggagaggcggggattttaggaagattttcggcgtttcgtcgagttcgggttggggattatttattcgatttttgaacgtgcggtgggatcgtgttggcgatacgcgtttataggacgatgtgtagcggttataggtttttgagtagttttcgatttatggtagatttcgttgttcgttatagatcgagtttttagcgtagcggacggcgttttttcggatttttggttgcgttttcgcgtcgcgtttttttcggatttcgcgtcgggtcggtagcgtagatgtgcgggttagatgtggcgttcgttcgttagttaggagggggtttggaggtcggcgaggcgcggggaggttttcggcggtcgagggaagttgtataggagttcggtttttgtttcgagcgggtgtacgcgcgggggtgtcgtcgtttcgtgcgcgcgagtgatttatttaattttaatttagcgttgcgggggaaataggaaatttttcgttaatagttgggtaggattttttttcgttcgagagtttttttttttttttcgacgtttagtttttagttttttcgtagttgttaattatgttttttagattagttttttcgagagttttggtcgatttttagttgttttttatcgtttttttatattatttaggagtttttcgttttaagtatttatttaagaatgattaagtgtatatagtttataaagtaataatagaaaacgtttacgttttttttagtagattagaatatttgtcgtttttttttagttttttttagattgtttttaggtgttttagagatgcgtttttaaattgtaagttgagatttaggagtgaatattttaatttattgagtcgcgagtatattttttttttaaataaaatagtaacggtaaattttattttattaaatttgtgttttagttgtgtttatatgtatgtatgtatgtgtatatattgttaagttgtaaaatgtttttttttaggtcgaagtttagaggttttttttaagttttaatgtatatattgattatttggaaattttatttaaaaatgtagattttaatttagtaggtttaggaggtaggtagagattttgtatttttaatgagtatttggatagagcgttttattttgtatcgttttttttcgggattgagttagtgagtaattgtaaatgattatttattacgaagtgatagtggtgggaaatgtaatttttagaatgtatagagtatagtagaaattgtaaaattaaaagtgggttgggagttatttgaatgtttgtgtttttatttttttaatgtaggtgaagaaagagaatatttatttttttatgtgtaaacggggtaatatgggagtagaatagtataaatttttaaatttttttttttgttagggtaattagatttgtttaagatatttttggtgtatatgttttgtagtttaaatattaatagaatttttttttttttttagatatgttttgattggataataaattatgtgattaatttattttttatttttaaagatatgattttgtatagttttttggttagtagattttttagtaatttatttaatgaatttttttatttgagaggaagattgtagaggtaagggtttgtgttagggtttttagggaataaaggtaaatagtttttttttaaatttaatttttaaattttttttgttattttaagtgtttatttgttttattttggaattttaatttatgttttatttagtatttaagttgtttttggatgttttgttattttttagtatttatgttgaagatgtagaaagtgtagtgaaattaggagggttaggtatttttttttttattaattaattgttttgttaaagttggagtgattttgttaatggaggaagattgagttttaaattttttttttatttttttttttgttattagtttatgttattgttatggtttgtgtaggagttttttacgagttatttttagttacggtcgttttgggtttttttatttagttttttaaacgagagttgaatttagttttttaaaatataaaattagttatattaattttttgattaaaattatttaatggttttttattgtttttgagataaagagaagataaaaattagatttttgaacgtgtttttaagtttttaattttttcgtaaatttttatttggtttttttttgtttattgaaagttttttttaaatttcgtgaatatgtttttgtaatttttttattttttatgtttagagttttttttagtgtggattttttttttttgatttttttttttttatttagttaatttttggttttcgtggattgaattataatttttttgatgggtaagtttttttttatttttatgagtagattttgtattatacgtttttttggtattatatgttttttttttaatagttgtaattttataattatttgtgttattttttaatttatatttttatttttt

SEQ ID NO: 378 - DNA, 1508 bp, Artificial Sequence
  chemically treated genomic DNA (Homo sapiens)
attttataattataaatatttagtgtattttgtaaatatggtataatttgttggtataaaattttattgttttagaaaatatcggtaataaaattatagaaaagttaaagatttttattttttatttcgaagcgtttgggagatattttagaaacggatgggaaatgttaaattttgtatgtttgtttatttttttttttatatcgattagatgtaaacgagtgttattaaaagtatattataggtatttatatagattttttttataagggatttataaagtttagatgtgaaatgtattttaaagggtttttagtcgttttttatttttttttttgtgaaatagggaagatatatgtgtttttaagggtagagatggaatttgggttaatgggtcggggggtggggggaagttggaagggattgttttaggatatggtaggatagtggattgtttttgtcgttttgttgtttatatcggggttttttgtaggcgcgtcggttttttttttttttgttgagaagaagttttgttaaaatattcgtttttttcgggaattttttcgtgggtttaaagcgggaaaatgttgttttaggtttaaaataatttgtttaagttttttagcgcgggagaaacgtttttattcgttttttgttttcgggggtgtttttcgttttttgttgttagaattttggggagtgtttagattcggggtagtatacgttcgggttaatcgcgagtagaataaatttttggtgggcggttaggaagtttttttttagttatcgtttttttttagtgtttttttttttttttatataatataagattttttttttttagtttttttaaagtatagtttaaggaaatttttttatagtttttatttagttacgggttagtatgtttgggggtaaatacgtagattcggaggtaggtattcgtgggggggcgtcggttcgggcgtgcggggaagtgttcgtttttgttatttgtttttttaaatatttcgattgttgatttggttttttagttttttttttatttcggagtatttttttggcgttggtatcgttgaagaatgggtttgggcggggaggtgaagagaagttaggaatgttttatgtttttttaatggagagggggtttcgggagtttttgagttaggaggatacggaaaaggggattggggttttgagattgggtttgttgggtttaagacgcgttttttggatgggtttaggatgtttttttgtcgcgggaatttcgcggttcggttttgtttgttgggggttcgaaaaagtggattgtagggtggaaggtgttatttattcgagttttggggatagttttcgggatttttcgttaagcgtttaaaacggtaggtttttaagcggcgcgcggtgtttttgtattttttaaaatttttgaaatattttaaaaatttttttgtattttggcgtttggtagggttttttaaaaaaagtaaattttttttttaaatgta

SEQ ID NO: 379 - DNA, 1508 bp, Artificial Sequence
  chemically treated genomic DNA (Homo sapiens)
tgtatttgggagggaggtttattttttttggaaaattttgttagacgttaagatgtagaaggatttttgagatgttttaagaattttggaaagtgtaaaaatatcgcgcgtcgtttggggatttgtcgttttgggcgtttggcggagagtttcggggattgtttttaggattcgggtaaataatattttttattttgtaatttattttttcgaatttttagtaggtagggtcggatcgcggggttttcgcgataggggagtattttagatttatttagaaaacgcgttttgggtttaatagatttaattttaggattttaattttttttttcgtgtttttttagtttaggggttttcgaggttttttttttattaggaaaatataaaatatttttggtttttttttattttttcgtttaggtttattttttagcggtgttaacgttagaggagtgtttcgaagtggaaagagggttggggggttagattagtagtcgggatatttggagaggtagatagtagaagcggatattttttcgtacgttcgagtcggcgtttttttacggatgtttattttcgagtttacgtatttgtttttagatatgttggttcgtggttggatgaaaattgtgaggaggtttttttgggttgtgttttaagggaattgaggaaggaagattttgtattgtatggggggaaaaaaaggtattggaggggggcggtggttgggagggagttttttggtcgtttattaaaggtttgttttgttcgcggttggttcggacgtgtgttgtttcgggtttaggtattttttaaggttttggtagtagagggcggggagtattttcgggggtagagagcgagtaagaacgtttttttcgcgttggggggtttggatagattattttaaatttgaggtaatattttttcgttttgaatttacgggggggttttcgggggaggcggatgttttggtagggtttttttttagtagggggggagggagtcgacgcgtttgtagagagtttcggtatgggtaataaggcggtagaaataatttattattttgttatgttttaaggtagttttttttaatttttttttatttttcggtttattggtttaagttttatttttgtttttgaaaatatatgtgttttttttgttttatagagggagggatgagagacggttaggaattttttagggtatattttatatttaaattttgtggattttttatggaaggaatttgtgtgggtgtttgtggtgtatttttggtgatattcgtttatatttagtcggtgtggaaagaaaaataagtaggtatgtagaatttaatattttttattcgtttttgaaatgttttttaaacgtttcgaaataagaaatgaagatttttaatttttttataattttattatcgatattttttggaataatggaattttatgttaataggttatgttatatttgtaaaatatattaaatgtttataattgtagaat

SEQ ID NO: 380 - DNA, 286 bp, Artificial Sequence
  chemically treated genomic DNA (Homo sapiens)
tttgtattaggttggaagtggtcgttagtttttcgtgtaattttattttttggaaaagtggaattagttggtattgtttagcgtgatttgtgaggttgagttttaatagtttaaagaagtaaatgggatgttattttcgcggggttcgtttttcgcgaggtgtttatttcgtatttgttatgtaaaacgagggagcgttaggaaggaattcgttttgtaaagttattggttttggttattagtttttatttaatgttttcgtgatgttgttgttgatttatttggg

SEQ ID NO: 381 - DNA, 286 bp, Artificial Sequence
  chemically treated genomic DNA (Homo sapiens)
tttaaatagattagtagtagtattacgaaagtattgggtagaggttgatgattaggattaatggttttataagacggatttttttttaacgttttttcgttttgtatggtagatacggggtgagtatttcgcgaggagcgagtttcgcggaggtggtattttatttgtttttttggattgttggggtttagttttataaattacgttgggtaatgttagttgattttatttttttagagaatggaattgtacgggggattggcggttatttttagtttagtgtaaa

SEQ ID NO: 382 - DNA, 2501 bp, Artificial Sequence
  chemically treated genomic DNA (Homo sapiens)
tttatatatattatgttttttaaatgatatattagttttttgagggtaatttatattggtaatagtttttagatgtggaaattgtgaagataatgttggtgatgtggaagtaatataaattttggagttttttagatttaggtttgaatgttagattgttttttatttagagtaattttagagtattattttttattttaatttttttttaggtttttttgtgtttatgtgttttttttatttttgtttattgtttatttagtgatttttgtatttttttttattgttagtgtgtagatatatagtttttttggttttgagatttatgttaattttattttattattttgttagtttatttaatttttattgagtaatgttagttgaaagttgtggtgggattaaatgttgtaatgagtatttaaatgaggttgaagtatttacgtattttatttatatatggtgaggtatatttaaggaaggttgtagttattaaaattttaggaaataattttttatttttttaggtgaaagggtttttaggtttttgtgttttggaaggtttatttatagttattttttaaatgataatgcgattgatgagtttagagtttagtttaaatagtaatggattggaagattagtttaggttttattaatgtggaatatagaataaattatgtttttgttttagtttgtttatttgtgaaatagagtttattatatttagttttttttgtttttaggtttgagttattttttttggttaaggtaagtaaatgtttatgatgtttggttgtgtataagataaagttataataaagttataatttattttttttttgtagaagattgtaaaaagtaaaagagatttaggtaaaaatttcggaatgatttttggaatagagagtttttttagaattagaagttaaaggaatttaaaatatagggaggtttagggtttttattgatataaaggaaagatgttttttttataggtttacgtttatattttttttttttttttatttttatttgtatttttatttttatatagggtttatgggattttttttataaaagagtagttgtagtaatttatattattttttacgtttggttgtttattaagaggcgaaaagtagttttatataggttttatttttggatagttttagttgtaaagtttaaaatatgcgaaggtaatttggaaaagtaagcggttgtatataaagtaaacgtttatagagttttggataaaattgagcgtttatgtgtatatggtaagtgtttttagtgtttgtgtgtttatttgtttgtttgggtgattttgtttttgagagtttggatgagaaatgtatggttaaaggtaattttagataggaagaaaggtagagaagagggtagaaatgatttttgatttttggggttgagggtttttagagtaaatggtataatgttacgaggttcgatttatttttatgacggaatttaaggttttagtaagtatttgttggtttggttatggtttgttttttagtttgtaggagatttttttatttttttatttgcgcgtttttattagttttgaaaagaatttttggtagttaggagtaggtatttttatcgttttttttttttttttttcgtttttattttgttggttttttagattgggttttggaattaaatttggtgagtgttggtttttaggaaatttggagttttggcgtttaaattttggtttaggaaagtaggagttatttaggaagtaggggttttttagggttagagttagttttttttgttttcgtttacgttgcgttagtatttgtttttttaaagttattaggtaggcgttagcgcgcggtgaggggaggggagaaaaggaaaggggaggggagggaaaaggaggtgggaaggtaaggaggtcggttcggtgggggcgggattcgattcgtaaattgttgtatttgttttttattttttagcgtttttttcgagatttcggggagttagtttgttgggagagcgggacggttcggagtaagtttagaggtagaggaggcgatagagggaaaaagggtcgagttagtcgttttagtgttgtataggagtcgaagggacgtattacgttagttttagttcggttttagcgatagttaacgttttttgtagcgcggcggtttcgaagtcgtcgttcggagttgttttttttttttcggtgaagtttttaaaagttgttaaagattcggaggaagtaaggaaagtgtttggtaggattgacggttgtttttgttttttttttttttatttcgtttttttttattttgttttttttttttttttcgttttttttttcgtagttgttttagtcggttatttttagttaattttttttattatttttttttttattcgttttttcgttttcgtcggtttagcgttgttagttcgagtttgtagagaggtaattttttttggttgcgagcgggcgagtt

SEQ ID NO: 383 - DNA, 2501 bp, Artificial Sequence
  chemically treated genomic DNA (Homo sapiens)
agttcgttcgttcgtagttaaagggagttatttttttgtaaattcgggttggtagcgttgggtcgacgggggcgggggggcgggtggggagaagggtggtgaggggggttggttgagagtagtcgattgaggtagttgcgggagagaagacgggggagggggggaaggtagggtggggggaggcggggtggagaggaggaggataaaggtagtcgttagttttattaggtattttttttgtttttttcgagtttttagtagtttttaaaaattttatcgaagaggaaagggtagtttcgggcggcggtttcgaagtcgtcgcgttgtaagaggcgttggttgtcgttggagtcgggttggggttggcgtggtgcgttttttcggtttttgtatagtattggagcggttagttcggttttttttttttttgtcgttttttttgtttttgggtttgtttcggatcgtttcgtttttttagtaagttggtttttcgggatttcggagggggcgttgggaggtggagagtaaatgtaatagtttgcgagtcgggtttcgtttttatcgggtcggtttttttgtttttttattttttttttttttttttttttttttttttttttttttttttttatcgcgcgttaacgtttgtttagtggttttggagaaataagtgttggcgtagcgtgggcgagggtaggagaggttagttttagttttggaggatttttgttttttgaatagtttttgtttttttaaattaaggtttaggcgttagggttttagattttttggaggttagtatttattaaatttggttttaaagtttaatttaaaaaattaatagggtggaggcgagggagggaggaaaaggacgataggaatatttgtttttggttgttaggggttttttttaggattgataagagcgcgtagatgggagagtgggagagttttttataaattgaggagtaagttatgattaagttagtagatatttgttgaaattttagatttcgttatagggatagatcgggtttcgtggtattgtgttatttgttttaggaatttttagttttaagaattagaggttatttttatttttttttttgtttttttttttgtttggaattgtttttaattatgtattttttatttagatttttaaaggtaaaattatttagataagtaggtaaatatataaatattaaaaatatttgttatgtatatataggcgtttaattttgtttagagttttgtaaacgtttgttttgtatgtagtcgtttgtttttttaagttgttttcgtatattttaaattttataattggaattatttaaggatagaatttatatagggttgtttttcgttttttgatggatagttaggcgtagaggatgatgtgggttattgtaattgtttttttgtggaggaggttttataagttttgtgtaaaggtggagatgtaagtgggaatggaaagagagagaaaatgtaaacgtaaatttataaggaaaatattttttttttatgttagtagagattttgggtttttttatgttttaaatttttttgatttttgattttggggaggttttttgttttaaaagttatttcgagatttttgtttgggttttttttgttttttgtagttttttatagagaaaagatgggttgtagttttgttgtagttttattttgtgtatagttaaatattataggtatttatttattttgattaaagaaggtaatttaaatttaaaggtaaggaagattggatatgataggttttattttatagatgaataggttgaaataaggatataatttgttttatgttttatattagtaaaatttaaattagttttttagtttattgttatttgagttagattttagatttattaatcgtattgttatttgggaaatggttataaatgaattttttagaatataaaggtttgaagatttttttatttgaggaggtgaaaaattattttttgagattttaatggttatagttttttttgaatatattttattatatgtaagtagaatgcgtagatattttaattttatttgaatatttattgtaatatttaattttattataatttttaattagtattgtttaataggaattgagtgggttggtaggatggtagaatggaattaatataggttttagagttaggagaattatgtgtttatatattaatagtgaaggaaggtgtaaaaattattgaatgaataatggataggagtgaagaggatatatagatataaagaggtttgaaaaaaaattaaggtgagaaataatgttttgaagttattttgaataaaaagtagtttgatatttaaatttgggtttgaaagattttaaagtttatgttgtttttatattattaatattgtttttatagtttttatatttgaaaattgttgttaatataagttatttttagaaggttagtgtgttatttaaaagatataatgtgtataga

SEQ ID NO: 384 - DNA, 2448 bp, Artificial Sequence
  chemically treated genomic DNA (Homo sapiens)
ttgttttgtttttacgataaaagttaacgggtttttagtatttttattaaaaaatagttacgtagatagtgttttggtggttttgtttcgtattttaattttggggtgggggaaaggggttaacgttttcgtagttttaaatcgggttattatttgtttatcgagtcgaatatgatgcggttttgttcggcgcgttttcgttggttttgcgttcgcgttattttagtagggttcgtagtaggtgaaaggtgaggttaatggatagagaagggttgtttcgtcgcggtcgttcgtttgtcgtttcgagttttaatcggtcgggtttcgcgcgggcgagaagcgttcgttagtagtaagaggagcgcgcgggtttcgtattttggtttcgtgtttcggggttttagcgtagattcgggttttggattcggtcgtttcggggtttttttggttgtttttagggtatagttgtattaggagtagtagcgcggttagtagcgttgcgtttcgtttgttttatggtgtcgtcggttttggatatataggggtagcgtagggtgaggtgcgtttgggatagttgtaggcgtcgttttttttttcgcgttcgttcggcgattttttcggtcgtcgtttaatgttcgtagtttgttttttagttttagttattgcgttagtgttgttttattttttttatttagttttttttttcggaggagcgtggtggttgagttgagcggagttttggtgtagggggaggttgggcggacgttttgagttatttataggttgtcggcgagcgtttgtacggtttaagattgagttttagtttttgtttttcggggtaggttgaagacgttttggggaatatagggtttgtttcggcgtgtcgttagttttatatagtgttaggatagtttcgattgacgttagcgaagaatatgtattgattgtagaagtaatgatagttatagtttcgagtttgacggttggcgggtttcggagggcgtatttttttatattagttttcgtgtttttgggcgtagcgttggaagtagtattggacgtaggaaagcgagaagtcggttggggcgtaaagattgttttgggatttacgggagttttatcgtttcgtttagaatagttagtaatgattagggtcgtttttagattagattagttcgggtcgcgtgttttgatatacgaaagggaggcgggatcgtgaggttgtttatggtgttgatttcgttttttgtttttagaagtggttagaaatgtgagaacgttgtgtcgttggaatttattgtttttttgtagttattagttttgtaaatgtaggtattaggagtttatcgttggtatttagttaatatagtgggatttattgagaggtagtttgttataattaaagttttttagtatttttatttttttttagttttaggatttaaatttgtagggttgtttgataggtattatgtaatagagggtttttagtattcgagtgtttttagattataaatggttggtttatttgtttttgagtttgttaaagtagtttagtaaagtttagttttttttttgggaattatagtagtagtgtaattttgtttatgagtagtaaagaaatatgggtttaagtttttgttaatttttggtgtggataggttattttttttttattaattttagggtttttatttgtaagattgggtttggttaggcgcggtggtttacgtttgtaattttaatattttgggaggtcgaggtaggcggattacgaggttagtagtttgaaattagtttggttaatatggcgaaattttatttttattaaaaatataaaaattagtcgggcgtggcggtatgcgtttgtggttttagttatttaggaggttgaggtaggagaattgtttgaatttaggaggcggaagttgtagtgaggtaagatcgcgttattgtattttagtttgggagatagagtaagattttgttttaaaaaaaaaaaaaaaaaaaaaaaaaaaaattgggtttggtggttttttggtttttttttagttttagaaatgattttttaatagttttttgtttaaaaatttatttattattattgtagatttcggattatatatttaataatatatttattgaggtattatataaagggtttcgggagtttttaaagagttggagttataagaagtttaggtagggttagagtaataaatgtgtttatgaagagtggggatgagtggtatttgttgggatatgggtgtaaagttgataaggttatgaaggtttaatagatatttatggagtgtttagtatgtggtgggaataagattattattaagggttttaaagtagttagtgtatattttagagtgaagaggggtattgtagggtgttagtttttttaagttttgatcggtaatttaatttcgtggaaattgg

SEQ ID NO: 385 - DNA, 2448 bp, Artificial Sequence
  chemically treated genomic DNA (Homo sapiens)
ttagtttttacggggttgggttgtcggttagagtttaagaggattagtattttgtaatgtttttttttattttaaaatgtatattgattgttttagagtttttgataatagttttatttttattatatattaggtattttataaatatttgttgaatttttatgattttattaattttatatttatattttagtaaatgttatttatttttattttttatagatatatttgttattttaattttgtttaggttttttgtagttttagttttttagagattttcggaattttttatatggtgttttagtaaatatgttattaaatatgtaattcggaatttgtagtggtaatgagtaagtttttaagtagaaaattattggggagttatttttagagttggaaagaagttaagagattattaagtttaatttttttttttttttttttttttttttttgagatagggttttgttttgttttttaggttggagtgtagtggcgcgattttgttttattgtagttttcgttttttgggtttaagtagtttttttgttttagttttttgagtagttgggattataggcgtatatcgttacgttcggttaatttttgtatttttagtagagatggggtttcgttatattggttaggttggttttaaattattgatttcgtgattcgtttgtttcggttttttaaagtgttgggattataggcgtgagttatcgcgtttggttaagtttagttttataaatgaggattttgaggttggtaggagggaggtgatttgtttatattaggagttagtagaaatttgaatttatatttttttgttgtttatgggtagagttatattgttgttatgatttttaggagagaaattgaattttgttaaattattttggtaaatttaaaagtagatgggttagttatttgtggtttgaaagtattcggatgttagagattttttgttatatggtgtttgttagatagttttataaatttggattttggggttggaaaaagataagaatgttgggagattttggttgtggtagattgttttttagtgggttttattgtgttggttgagtgttagcggtggatttttgatgtttgtatttgtagaattgatagttgtagggaggtagtgggttttagcggtatagcgtttttatatttttggttatttttagaggtagaggacggggttagtattatggatagttttacggtttcgtttttttttcgtgtgttagaatacgcgattcggattagtttggtttggggacggttttagttattgttggttgttttaagcggggcgatgggattttcgtgggttttagagtagtttttacgttttagtcggtttttcgtttttttgcgtttagtgttgtttttagcgttacgtttaggggtacgaaggttggtgtagggaggtgcgtttttcggggttcgttagtcgttagattcgaagttgtggttgttattgtttttataattagtgtatgtttttcgttgacgttagtcggagttgttttggtattatataaggttggcgatacgtcgggatagattttgtgttttttaaggcgtttttagtttgtttcgagggatagagattggagtttaattttggatcgtatagacgttcgtcgataatttgtgagtggtttagagcgttcgtttagtttttttttgtattaggatttcgtttagtttagttattacgttttttcggggagggaggttgggtggaagggatggaatagtattggcgtagtggttggggttggagggtaggttgcgggtattgggcggcggtcggaggggtcgtcgggcgagcgcggggaggggagcggcgtttgtagttgttttaggcgtattttattttgcgttgtttttgtgtgtttagggtcggcggtattatgaggtaggcgggacgtagcgttgttggtcgcgttgttgtttttggtatagttgtgttttgggagtagttagaggagtttcgaggcggtcgggtttaggattcgagtttgcgttggagtttcggggtacggaattagggtgcggggttcgcgcgttttttttgttgttggcggacgtttttcgttcgcgcggggttcggtcgattgggattcgggacggtaggcgagcggtcgcggcgggataatttttttttgtttattgattttattttttatttgttgcggattttgttggagtggcgcggacgtagagttagcgggagcgcgtcgagtagaatcgtattatattcgattcggtgggtaagtgatggttcggtttggggttgcgaaaacgttgattttttttttttattttagagttgggatgcggggtagagttattagggtattgtttgcgtgattattttttaataaaagtattgaagattcgttggtttttgtcgtagaggtagggtag

SEQ ID NO: 386 - DNA, 2344 bp, Artificial Sequence
  chemically treated genomic DNA (Homo sapiens)
gtttggtatatttaagatttttacggaggtttagttttatatttttttttatttttttaggttggtttttttttgttgtcgacgcgtgggagtttagagagcggtttttcgttttcgcgggatttttggagaggttcggagagtcggttttcgaaacgcgttttttttttttttttttttttttttttttttttttcgttttttcggttttattattattatcgttattacgtttttttttattattttttttattttatattattattattattattattattattatttcgtcggtcggttttaggtttcgacgttttgggtttttttcggggtggggcgggttgttttaggggggtttatcgttatttatgaaggggtggagtttgtttgttcgtgggtttttataagggcggttggttggttggttggttgttcgggtaggttttttggttgtatttgtcgtagtgtatagttcggttgaggtgtacgggagttcgtcggtttttttttgttcgcgttcgttcgtgaaattgcggtcggggtttatcgcgatggttttttcgatattttcggatagtatttttttcgcggaagttcggggacgaggacggcgacggagattcgtttggatttcgagttaaagcgaggttttgcgagtttgttttgagcggaattcgtattcgggtatcgttattagagaacggttggtttaggttatcggtatttcggagtttagggtttagatttggttttagaatgagaggttacgttagttgaggtagtatcggcgggaatttcggttttggttcgggagacgcggttcgttagaaggtcggcgaaagcggatcgtcgttatcggattttagatcgttttgttttttcgagtttttgagaaggatcgttttttaggtatcgtcgttcgggaggagttggttagagagacgggtttttcggagtttaggatttagatttggttttagaatcgaagggttaggtttcgggatagggtggtagggcgttcgcgtaggtaggcggtttgtgtagcgcggttttcggcgggggttattttgttttttcgtgggtcgttttcgtttatatcggcgcgtggggaacggggtttttcgtattttacgtgttttgcgcgtttggggtttttttatagggggttttcgtgagttaggtagcgagggtcgttttcgcgttgtagtttagttaggtcgcgtcggtagaggggattttttaatttgtttcggcgcgcggggatttcgtttacgtcgtttcggttttttcggacggggcgtttttttatttttaggtttttcggtggttttcgtattcggggtaaaagtcgggaggatcgggattcgtagcgcgacggtttgtcgggtttttgcgcggtggtatagtttgggttcgtttaagcggggtcgtagggttaaggggtgtttgcgttatttacgttttaggggagttcgtggtggggttggggtcggggtttttaggtcgtcggggcggcgtgggaattttaagtcggggtagttttatttttttagttcgcgttttcggacgttttcgcgcggtaggggtagatgtaaggtatttcggcgtttttttaggcgttttaggagtcggcgttttggtttgtatttttttgcggtttgttgttggatgagtttttggcgagttcggagtttttgtagtaggcgtaattttttttagaaacggaggtttcgggggagttggaggtttcggaagaggtcgtttcgttggaagtattttttagcgaggaagaatatcgggttttgttggaggagttttaggacgcggggttgggacggggtcgggtggttcggggtagggcggtggtttttttttcgcggggaacgtttggttggttacggaggggcgtgttttcgtttcgttttttttatcgggttgatcggtttgggatttttgttttttaggtttaggttcggtgagagattttatatagcggagaattgttatttttttttgggtatttcggggattttagagtcggtttaggtattagtaggtgggtcgtttattgcgtacgcgcgggtttgcgggtagtcgtttgggttgtgggagtagttcgggtagagtttttttgtttttttattagtttatttcgtcgtttgatcgttttttttttatttttatttttcgttttcggaaaacgcgtcgttttttgggttgggtggagattttcgtttcgcgaaatatcgggtttcgcgtagcgttcgggtttgatatcgtttcggcggttcgttttttttgcgttttcgcgttatcgtcgttcgttcgttcgggtttttgt

SEQ ID NO: 387 - DNA, 2344 bp, Artificial Sequence
  chemically treated genomic DNA (Homo sapiens)
gtaggggttcgggcgggcgggcgacggtggcgcgggggcgtagaggaggcgagtcgtcggagcggtgttaggttcggacgttgcgcggggttcggtgtttcgcgggacgggggtttttatttagtttaggggacgacgcgtttttcgggggcggggggtgggggtggggagggggcggttaggcggcggggtgggttggtggagaggtaggagagttttgttcgggttgtttttatagtttaggcggttgttcgtaaattcgcgcgtgcgtagtaggcggtttatttgttggtatttgggtcggttttgggattttcgggatgtttaggaaagaatggtagtttttcgttgtgtggagttttttatcgggtttaggtttagaaggtaggaattttaggtcggttagttcggtggagggggcggggcggagatacgttttttcgtagttagttaggcgtttttcgcgaaagagaggttatcgttttgtttcgaattattcgatttcgttttaatttcgcgttttaaagtttttttagtagagttcggtattttttttcgttgaggggtgtttttagcgaggcggtttttttcgaggtttttagttttttcggggttttcgtttttaggagaggttgcgtttgttgtagaaatttcgggttcgttaggagtttatttagtagtaggtcgtaggggagtgtagattagggcgtcggtttttggagcgtttgggagggcgtcgggatgttttgtatttgtttttgtcgcgcggaggcgttcgggggcgcgggttggggaggtggagttgtttcggtttggggtttttacgtcgtttcggcgatttggggatttcggttttagttttattacggatttttttgggacgtgggtggcgtaagtattttttggttttgcggtttcgtttgagcgggtttaggttgtgttatcgcgtaggggttcggtaggtcgtcgcgttgcgggtttcggttttttcggtttttgtttcgggtgcggaggttatcgaggagtttgagggtgggagagcgtttcgttcggaggagtcggggcggcgtaggcgaaattttcgcgcgtcggggtaggttgggagattttttttgtcggcgcggtttggttgggttgtagcgcgggggcggttttcgttgtttggtttacgaaagttttttgtgggagagttttaggcgcgtagggtacgtggggtgcgggaagtttcgttttttacgcgtcggtgtgggcgaaggcgatttacgagggagtagggtgattttcgtcgggggtcgcgttgtataggtcgtttgtttgcgcgggcgttttgttattttgtttcggggtttggtttttcgattttgaaattagatttgaattttggatttcgggaggttcgtttttttggttagtttttttcgggcggcgatgtttggaaagcgattttttttaaaggttcggaggagtagggcggtttgggattcggtgacggcggttcgttttcgtcggttttttggcgggtcgcgtttttcgggttagggtcgagattttcgtcggtgttgttttagttggcgtgattttttattttgaaattaaatttggattttgggtttcggaatgtcgatggtttgggttagtcgttttttggtggcgatgttcgggtacgggtttcgtttaaagtaggttcgtagggtttcgttttggttcggggtttaaacgagttttcgtcgtcgttttcgttttcgggttttcgcggggagggtgttgttcgaaggtgtcgggagggttatcgcggtgagtttcggtcgtaattttacggacggacgcgggtagagagaggtcggcgggttttcgtgtattttagtcggattgtgtattgcggtaggtgtagttaggaggtttgttcggatagttagttagttagttagtcgtttttgtaaaggtttacgggtaggtaggttttatttttttatgaatggcggtgagtttttttgggatagttcgttttatttcggaagggatttagggcgtcgaggtttggggtcggtcggcggggtggtggtggtggtggtggtggtggtggtgtggggtggggggggtggtgggggagggcgtggtggcggtggtggtggtggggtcggagagacgaagaggaagggggagaggggggaggggggaggggggcgcgtttcgggggtcggtttttcggatttttttagggatttcgcgggaacgggaagtcgttttttgggtttttacgcgtcggtagtagggagaaattagtttgggagggtggaggggagtgtggaattgaattttcgtgggagttttgagtgtgttaggt

SEQ ID NO: 388 - DNA, 2350 bp, Artificial Sequence
  chemically treated genomic DNA (Homo sapiens)
tagatgtattggtgagattaggttttggttgtgattttgggtttgtattatgattttcgatttttgatttagattataattatgatttggtcgtaattttttgatttggattttagttttttagtttttagagtttgtgatttttgattttgatttggattataatttttgattttgaatgtgatttttgagatttaatttgatagtaatatttgattttaattattatttttgatgatagtttttgtttatattttgatagtaattgtgatttttatgattttggttttgaatgtgatttataatttttgaatttgattgtgatatttgattttaattataattattaattatagtattgattataattttgattgtgtgatttttggttttattttttttatagtttttgtttttttttagaattttttttttggaatttggttgggtttataatttttgattttggtttttgatttgaggtagaattttggattttgattataatttttgattttaattggatttagattttagttattaattttgatttatggtttagtcgaattttatttaatgattttagtttataatatttgattggttttttgttttagttgatttttgatttttgtttgattttttttttgattttaaaattttggtataggtagtttttagaaatttagatttataggatttgtaattatggttttcggaattcgagaattttggttagttttatttatttttgttatagagtttttttttagtttttaatttatgagattttttattattttttttagatattttattttaaggggattggtcgggtgtgtttcgagattggattttttttgaatatttttattttttatagatgtggacgaatgtagttcgggtgtttttttttgtggtttttacggttattgtattaatatcgaaggtttttttcgttgtagttgcgcgttaggttatcgggcgtcgtcgggtcggttcgggttttgcgtaggtgagtagtatagggattcgttagagagtttgggagtagggtttgggttttagggtaaagtcggttggaaaggtggaggcgggattaaggcgttgtgggaggagtttagaaatttggtattggtgggggcggggttattgcgatgtgggcggagtttgtttgggaggtcgggtttcgtgatttcgtttaatttttcgcgtattttagacgtgaacgagtgtttggagggcgatttttgttttttttacggcgagtgttttaatattgacggtttttttgtttgtatttgtgtttttggttatcgattcggatttcgcggagttttttgtttcggttcgtattcgggttgattttggtttcggaaagggtgggtttagggtaggaaaaggcgggacggggagaagagggcgaaaaggggaaaacgagtttttagtcggggtattttagtaggattagggggtagttggtgggagtttcgaggtagtgagggggggcggggcgtggagatgaaagggtcgagtttgggtatttggatcgtgattgtaaagaagttgttttaaattcgtcggggggcggtgtttgtagggagggaagtagcgtgaggtaggttggggaaggcgtgagaggtttaggagagtcgaggggcggtggaggggtgtggtttagaatgttaggcggagcgggaggtgggtcgggttttcggacgttttgtttcgtagacgttgacgagtgtagcgaggaggatttttgttagagcggtatttgtattaatatcgacggttttttcgagtgtatttgtttttcgggatatcgcgttggttcggatttcgttttttgtttcggtgagaggtttcgtttcggtttgatttttttttttttcgatttttcgattcgtcgattggttttttatttttgttttttttttttcgttttttttttttttttatttttttttttcgtttttttttttagtttttttaatttttttttattttaatttttttttgtttttttttttgttttttcggttttttttttttgattttttttttttttttttgtattttttattttgtttttttgttttttatattcgattattcgatttttttttttagacgtggacgaatgtcgcgagcgaggtttagttttgtgcgggtcgtagcgttgtgagaattttttcggtttttatcgttgtgttcgggattgcgattttgggtattacgcgggtttcgagggtatttgtgacggtgagtttgtttttattcgttttcgttagcgtttgtaacgcggtgttggaggttgtttttttggggattgaggaggggcgttttg

SEQ ID NO: 389 - DNA, 2350 bp, Artificial Sequence
  chemically treated genomic DNA (Homo sapiens)
tagggcgtttttttttagtttttaagggagtagtttttagtatcgcgttgtaagcgttagcgaaggcgggtgggggtaggtttatcgttataggtgttttcggggttcgcgtggtatttaggatcgtagtttcggatatagcggtaggagtcgggagagtttttatagcgttgcgattcgtatagggttgggtttcgttcgcgatattcgtttacgtttgaggagagaggtcgggtggtcggatgtgggaagtagggaggtaagatgggggatataaagaggggagaggagagttagaagggggaggtcggggaagtagaggagagggtaggagaagattggggtagaggagagttggggaggttaggagaggaggcgggggaaagaggtaaggggaggggagaagcggaggaggaaagatagaggtgggaggttaatcggcgagtcggggagtcgaagggaggagggattaggtcggggcggggttttttatcgaggtaggaggcgaggttcgggttagcgcggtgtttcggaggatagatgtattcgaaggagtcgtcggtgttggtatagatgtcgttttggtaaaggtttttttcgttgtattcgttaacgtttgcgggatagggcgttcgaaggttcggtttatttttcgtttcgtttaatattttaggttatatttttttatcgtttttcggtttttttaggttttttacgttttttttaatttgttttacgttatttttttttttgtaaatatcgtttttcgacgggtttagaatagtttttttataattacggtttaaatatttagattcggtttttttatttttacgtttcgtttttttttattgtttcgagatttttattagttgttttttgattttgttggaatatttcggttaaaaattcgttttttttttttcgttttttttttttcgtttcgtttttttttgttttaagtttatttttttcggggttaggattagttcgggtacgaatcgaggtaagaggtttcgcggggttcgggtcggtagttaggggtataagtataggtaaaggagtcgttagtgttgaggtattcgtcgtgagggaagtagaaatcgttttttaggtattcgtttacgtttagggtacgcgggagattgggcggagttacgggattcggttttttagataagtttcgtttatatcgtagtaatttcgtttttattaatgttaggtttttaagttttttttatagcgttttggtttcgtttttatttttttagtcggttttgttttggaatttaggttttatttttagattttttggcgggtttttatgttgtttatttgcgtagggttcgggtcgattcgacggcgttcggtagtttggcgcgtagttgtagcggaaggagttttcggtgttagtgtagtggtcgtggggattatagggaggggtattcgaattgtattcgtttatatttgtggggggtgggggtgtttagaaagggtttagtttcgggatatattcgattaatttttttggagtagggtgtttgggggaggtggtgggaagttttatgagttggaggttgggggagggttttatggtagaggtgggtagggttgattaaggttttcgggtttcggggattatggttgtaagttttgtgggtttaggtttttaggaattatttgtgttaggattttggagttaggagagggattagatagggattagaaattaattagggtaagggattagttaagtattataaattaggattattggatgggattcggttgagttatgggttagagttagtgattggaatttgaatttagttaggattagaagttatagttagggtttagaattttgttttaagttaggggttagggttagggattatgaatttaattaggttttagagaagggattttgagaagaggtaggggttgtgaaagagataggattaagagttatatagttaaggttatggttagtgttatggttagtggttatgattagggttaaatgttatagttaaatttaggagttataggttatatttagggttagagttatgagggttataattgttattagggtatgggtagggattattattaagggtgatggttagggttaaatgttattgttaagttgggttttaggagttatatttagggttaagagttgtggtttaggttagggttaggagttataggttttggggattgagggattgaggtttaggttaggaggttacggttaggttatagttgtgatttgggttaagggtcgggggttatgatgtaggtttaaggttatagttagggtttggttttattagtgtatttg

SEQ ID NO: 390 - DNA, 2206 bp, Artificial Sequence
  chemically treated genomic DNA (Homo sapiens)
gggtattttttgggatggtaagtggtattagcgttgtgagatggttttttttttgtcgttaggcgttaggaggtttgttcgggtttgtatgtgtttgggtttggtaggtggggaggcggtatttagggtagttttcgtattggaagttttaggaatttggatttaggttgaaggtttttgttttagagtttcggattgttgagtttggaatagttttttttagatatagtgtggcgcgggagtagttgtatgagggtttacgtattttgtatatattagtagtttattcgattttgtttttggttatgcgaaacgtatgtttattcgattttcgattttgtttttggttatgtaggtttcgtttgggttgtgataggaggttcggcgtttttaggtatttggtaggttttttcgattttttttttgagcgataggaatgggaagtgagtaaatttaagtagaattaggaggttttttttagaggagtttggcggaattcggttttggttgtgtgtcgagtggcggggtatttatagggagatgagttagtgtttattttttgttttagttttttcgtggtcgtttttttttttagaaggggttggtttaggttggtgttttcgtggtttttggagtatatttgttgtcgttttttttggtttttggcgatagtaggtttttcgtattttatttgttttttagttagtatggttttatatagaatacggtcgtagataatttttttgtgttttgtatagcgaattgttattttgcgtgggttttattgttaggttagggaggtaggagttgtttttattttttgttcgggagttgtcgtttgtttttcggatgagttaggaataaatgcgttaatattgggtggtcgttttcgttatttttgcgtacgggttttgtggggagagttaggtagtgggtggcgtgggataggtgatgtttatgtttagtatttaggagatttgtatggtagtttttaagatgggtataagcgattataaggagggatgtacgtgttttatttttttatttattacgggattaggttgaggtcgtttagggagtgtatgggagggttgcgttcggcgtatttgtagagattttttgaagaggggttttggttgttttttattggggtaggtgcgggtttaggttttcgatatcgtgacggtgttgtgggattttgatggattttattcggggagtttaggtttgttttacggtaaggtggttacgtattgtttttgtagttttgagtataggttttatacgggatttgaggtttgggttttatgatatttgggttatgtgtttttttggtgttttttttttggggatgaaattatatttataggtaaaggtttgggagtggagggagatagtaggagataaagtaaggggacgaggattttggtagttataaaggtagcgggagggttttggaggtttttgttgggtagcgtagttaggaaagggtttattaggtgggagaggtaggcgtttggtgagtgttgagatttgtattacgagaagggttgggtttttaaggtatgtatggggtttgggagtggagggagtgtgagcgggtgttaggacggggtttggggcgagcgggtgttaggacgggtttgggagcggagggagtgcgagcgggtgttaggacggggtttgggagtggagggagcgcgagcgggtgttaggacggggtttgggagtggagggagcgagagcgggtgttaggacggggtttgggagtggagggagcgcgagcgggtgttaggacggggtttgggagtggagggagcgcgagcgggtgttaggacggggtttgggagtggagggagcgagagcgggtgttaggacggggtttgggagtggagggagcgcgagcgggtgttaggacggggtttgggagtggagggagcgcgagcgggtgttaggacggggtttgggagtggagggagcgcgagcgggtgttaggacggggtttgggagtggagggagcgcgagcgggtgttaggacgggtttgggagtggagggagcgcgagcgggtgttaggacgggtttgggagtggagggagcgcgagcgggtgttaggacgggtttgggagtggagggagcgcgagcgggtgttaggacggggtttgggagtggagggagcgcgagcgggtgttaggacggggtttggga

SEQ ID NO: 391 - DNA, 2206 bp, Artificial Sequence
  chemically treated genomic DNA (Homo sapiens)
ttttagatttcgttttaatattcgttcgcgttttttttatttttagatttcgttttaatattcgttcgcgttttttttatttttagattcgttttaatattcgttcgcgttttttttatttttagattcgttttaatattcgttcgcgttttttttatttttagattcgttttaatattcgttcgcgttttttttatttttagatttcgttttaatattcgttcgcgttttttttatttttagatttcgttttaatattcgttcgcgttttttttatttttagatttcgttttgatattcgttcgcgttttttttatttttagatttcgttttgatattcgttttcgttttttttatttttagatttcgttttaatattcgttcgcgttttttttatttttagatttcgttttaatattcgttcgcgttttttttatttttagatttcgttttaatattcgttttcgttttttttatttttaggtttcgttttaatattcgttcgcgttttttttatttttagatttcgttttaatattcgttcgtatttttttcgtttttaggttcgttttaatattcgttcgttttagatttcgttttaatattcgtttatattttttttatttttaggttttatgtatgttttgggagtttagtttttttcgtggtgtagattttagtatttattaggcgtttgttttttttatttagtgggtttttttttgattgcgttgtttaataggagtttttagggttttttcgttgtttttgtggttgttagagttttcgtttttttgttttgttttttgttgtttttttttatttttaaatttttatttatgggtgtgattttatttttaggagggaagtattagggaagtatatagtttaagtgttatggagtttaggttttaggtttcgtatggagtttgtgtttaggattgtagaggtagtgcgtggttattttgtcgtggagtaggtttgggtttttcgggtgaggtttattaaagttttatagtatcgttacggtgtcggggatttgggttcgtatttattttagtgggaggtagttagggtttttttttaggggatttttgtagatgcgtcgagcgtagtttttttatgtattttttggacggttttaatttgatttcgtggtgggtggggagatgagatacgtatatttttttttatgatcgtttgtatttattttaggagttgttatgtaggttttttgagtattgggtatgggtattatttgttttacgttatttattgtttggttttttttatagggttcgtgcgtaggagtggcgagggcggttatttagtgttgacgtatttgtttttgatttattcgaaagatagacgatagttttcgggtagggggtgggggtagtttttgtttttttaatttggtagtggggtttacgtagagtggtagttcgttatgtaggatataggagggttgtttgcggtcgtgttttgtgtggagttatgttggttgggggataggtggagtacggaaggtttgttgtcgttagaggttagggaaggcggtagtaggtatgttttaggggttacggaggtattagtttgggttagttttttttgaggaaggaggcgattacggggagattgaggtaagagataggtattggtttatttttttgtgggtgtttcgttattcggtatatagttaggatcgggtttcgttaggtttttttgaggagagttttttaattttatttggatttgtttattttttatttttgtcgtttagggagaaggtcgggaaagtttgttaggtgtttgagggcgtcgagttttttgttatagtttaggcggaatttgtatgattaggaataaggtcggaggtcggatgggtatgcgtttcgtatgattagggataaggtcggatgggttgttgatgtgtgtagagtacgtgggtttttatgtagttgttttcgcgttatattgtgtttaggaggagttgttttaagtttagtaattcggaattttagagtaaaggtttttagtttagatttaagtttttagagtttttaatgcgggggttgttttgggtgtcgtttttttatttgttaagtttaggtatatgtagattcgagtaggttttttgacgtttgacggtaggaaggaaattattttatagcgttggtgttatttgttattttagggaatgttt

SEQ ID NO: 392 - DNA, 2233 bp, Artificial Sequence
  chemically treated genomic DNA (Homo sapiens)
ttgttggacgtggacgtagatagcgggtttttttatattaagtagcgtatcgatcgcgagtttttgtgtcgttataatgttaagtgttagttgtttttcgaggtgttcgttaacgataaggagatttgtatgattaaggtagagatttaggatattaacgataacgcgtttttttttttttcggattagatcgaaatggatatttcggagaacgttgtttcgggtattcgttttttttttattagcgtatatgatttcgacgtcggcgagaatgggtttcgtatttatttgtttacgcgcgacgattacggtttttttggattggacgttaagtttcgcggcgacggtattaagtttttagaattggttatttagaaggttttggatcgcgagtaatagaattattatacgttcgtgttgattgttttggacggtggcgagtttttacgtttcgttatcgtatagattaacgtgaaggtgattgattttaacgataatagttcggttttcgaggcgttattttatttggtggaattgttcgagaacgtttcgttgggtatagtggttatcgatttgaacgttatcgacgtcgatgaaggttttaatggtgaagtgttttatttttttagtagttacgtgtttgatcgcgtgcgggagtttttttttatcgattttaagatcggtttaattcgtgtgaagggtaatttggattatgaggaaaacgggatgttggagattgacgtgtaggttcgagatttggggtttaattttattttagtttattgtaaagttacggttaagtttatcgatcgtaacgataatgcgtcgtttatcggtttcgttttcgtgcgttagggggcgttgagcgaggtcgtttttttcggtatcgttatcgttttggtgcgggttattgatcgggattttggtaagaacggatagttgtagtgtcgggttttaggcggaggagggacgggcggcggcgggggtttgggcgggttcgggggtttcgttttttttaagtttgaggagaattacgataatttttatacggtggtgattgatcgttcgttggatcgcgagatataagacgagtataacgtgattatcgtggcgcgggacgggggtttttttttttttaattttattaagtcgttcgcgattaagattttagacgagaacgataattcgtttcggtttattaaagggttttacgtgttttaggtgtacgagaataatatttcgggagagtatttgggttttgtgttcgtttaggatttcgatttgggttagaacggtatcgtattttattttattttgttttcgtatatcggcgacgtgtttatttatatttatgtgtttgtgaattttacgaacggggttatttacgttttgcgtttttttaatttcgagtagattaaggtttttgagtttaaggtgtttgttaaggattcgggggcgttcgcgtatttggagagtaacgttacggtgagggtgatagtgttagacgtgaatgataacgcgttagtgatcgtgttttttacgttgtagaacgatatcgcggagttgtaggtgtcgcgtaacgttggtttgggttatttggtgagtattgtgcgcgttttagatagcgatttcggcgagagcgggcgttttatttacgagatcgtggacggtaacgacgattatttgtttgagatcgattcgtttagcggcgagattcgtacgttgtattttttttgggaggacgtgacgttcgtggtggagttggtggtgaaggtgatcgattacggtaagtttattttgttcgtagtggttaagtttattattcgttcggtgagcggattttttttcgagggggtattacgggtgaatggcgagtagtattattgggatatgtcgttgtcgtttatcgtgattttgagtattatttttattatttttttagcggttatgattattatcgtcgttaagtgtaagcgcgagaataaggagattcgtatttataattgtcgtatcgtcgagtatagttattcgtagttgggtgggggtaagggtaagaagaagaagattaataaaaatgatattatgttggtgtagagcgaagtggaggagaggaacgttatgaacgttatgaacgtggtgagtagtttttttttggttattttttttatgtatttcgattattagattcgtttgttttttagttcgtttcggtcggaggtgatgtattttaaat

SEQ ID NO: 393 - DNA, 2233 bp, Artificial Sequence
  chemically treated genomic DNA (Homo sapiens)
gtttgagatatattattttcgatcggggcgagttgaggggtaggcgggtttggtagtcgaagtatatgggggaggtggttagggaggggttgtttattacgtttatgacgtttatggcgttttttttttttatttcgttttgtattagtatgatattatttttgttgatttttttttttttgtttttgtttttatttagttgcgggtggttgtattcggcgatgcggtagttgtaagtgcggatttttttgttttcgcgtttgtatttgacggcgatggtgattatggtcgttaggaggatgatggagatagtgtttagagttacgatgagcggtagcgatatgttttagtggtgttgttcgttatttattcgtggtattttttcgggaagggattcgtttatcgagcggatgatgagtttggttattgcggatagggtaggtttgtcgtggtcggttatttttattattagttttattacgggcgttacgtttttttagaaagggtgtagcgtgcggatttcgtcgttggacgggtcgattttaaataggtggtcgtcgttgtcgtttacgatttcgtaggtgagacgttcgttttcgtcgaagtcgttgtttagggcgcgtatagtgtttattagatagtttaggttagcgttgcgcggtatttgtagtttcgcggtgtcgttttgtagcgtggggagtacgattattggcgcgttgttatttacgtttagtattgttatttttatcgtggcgttgttttttaagtgcgcgggcgttttcgagtttttagtaagtattttgaatttaaaagttttggtttgttcgaagttaaaggagcgtagggcgtagatggtttcgttcgtgggatttatagatatataggtgtagatagatacgtcgtcgatgtgcgagggtaggatagagtaggatacggtgtcgttttggtttaggtcgggattttgggcgagtatagagtttaggtattttttcgggatgttgttttcgtgtatttgaagtacgtagagttttttggtgaatcgaggcgggttgtcgttttcgtttagaattttgatcgcgaacgatttggtggagttgaggggaggagagttttcgtttcgcgttacgatggttacgttgtattcgttttgtgtttcgcggtttagcgggcggttagttattatcgtgtagaagttgtcgtagttttttttaagtttgaaggggacggaattttcgggttcgtttaggttttcgtcgtcgttcgtttttttttcgtttaggattcgatattgtagttgttcgtttttgttagagtttcggttagtgattcgtattagggcgatgacggtgtcgggaggggcggtttcgtttagcgttttttggcgtacggagacgaaatcgatggacggcgtattgtcgttgcggtcgatgagtttgatcgtgattttgtagtgggttgggatagggttaggttttaggtttcgggtttgtacgttaatttttagtatttcgttttttttatagtttagattgttttttatacggattaggtcggttttggggtcgatggagaagagttttcgtacgcggttaggtacgtagttgttgaaagagtagagtattttattattgggatttttatcggcgtcggtggcgtttagatcgatgattattgtatttagcggagcgttttcgggtagttttattaagtaggatggcgtttcgaagatcgggttgttgtcgttggagttaattatttttacgttgatttgtacggtggcggaacgtggaggttcgttatcgtttagggtagttagtacgagcgtatggtgattttgttgttcgcggtttagagttttttggatgattagttttgggaatttggtgtcgtcgtcgcgggatttaacgtttagtttaaagaggtcgtgatcgtcgcgcgtgagtaggtaggtgcggagtttattttcgtcggcgtcggggttatgtgcgttggtgagggggaagcgggtgttcggagtagcgtttttcgagatgtttatttcgatttggttcgaggagaaggagggcgcgttgtcgttgatgttttggatttttattttgattatgtagatttttttgtcgttggcgaatatttcgagggatagttggtatttggtattgtggcggtatagggattcgcggtcgatgcgttgtttggtgtagaggagttcgttgtttgcgtttacgtttagtag

SEQ ID NO: 394 - DNA, 2398 bp, Artificial Sequence
  chemically treated genomic DNA (Homo sapiens)
attgtatttttggttttatagttttttattgtcgattttaggtttttttggattttaggtttttttttttaagatgtattttagaggattaaaaatatattttatttgggtttcgtttgtttttgtggaagggtagtttattagaggatataatttcgtgttttaatttgtttttttttttaaaggaaatgtggagaaaaaaaaaaagtagaaattggaaataattaatatttagtttattttattcgatttttaggggaattggtgaggagtttaagatgattttttttttttagagaaagaatttaaagtttagggaaatagcgataggggagtttaagattgtttttgttagtttttttttggttatttttcgttgcgatcgtaggatagtttttattagtaggagaatcgggtaagtgtgtggataagtagagagtgtgttgaataatttgtaacgttttatgaaatacgtattgttatggttttttaaaaggttttgcggaagtcgtttgtttttattaattaagtttttatttatataaaagtagaagtagaagtagttttagaaaatatattaataattttttatttttttgaagattagagtagtagaaaataggtgatttgtattataaaattgtatttatttttttttttttttagattttatattatattagtttatttgtgttacggtgtataaaaaatggaataggcgtttttattgtattgtttttttttaaaaatagattatttatattttaattttgttttttttaaattcgatttttaataggagagttttttattattttagatggagtgaggttgtacgattgggatggaagaaaggaattttttaaatttgggggaatttttgttttttgttttaagattattttatttggggtgtgggggtgggcgcggcggttagggtagtggaacgtagtcgcggttgcgttatttttgtatttttaggcgcgcgggagggatcggcggggacgcgagttgcggattttggcgaattcgggggaggtagatagggggaggcggatatttagtcggtaggcgttttagttttttcgtagtcggcgggttttttttttgatagttttaggaaaggtagattttttttttagttagttaggtaaggtaaagattgttgttgagtttgttgttattgagggcgtatagattttggggagatcgaagtttgttattgcgggattttgtggggtaatttgggtttacggaagttttttgaaagaggggagaagggtttgtattttttttatggaggatttttttttttttagtatttcgtttgatgtatttaattggtagaagtgagattttaataggtagtagagagcgtttacgtggaggaggtttggggcgtcgcggcgttatttttattttttttcgggatcgcgtttatttttaaagttatacgtcgacgaattaatttatgttttaaatttttttttttagtttcgtgagttcgcggcgatattgggtcgtggggtggttgggaacggttttttttttcggaaaaattagagaacggtttggagagttgaaacgagcgttcgcgagtaggttcgtgtagaatcgggttttaggatcgttgagtttcgtagggcgtttttgggggacgttaggtcgtcggtttttttgttttcgttgagatggataacgtttcgttttcggagttttggttcgttaacgtatcgggttcggattcggcgttgagttgttttaacgcgtcgattttggcgtcgttgtcggcgtcgttggcggtggttgtattagttgtttacgcggtgatttgcgtcgtgggtttggcgggtaatttcgtcgtgttgtacgtgttgttgcgggcgtttcgtatgaagatcgttattaatttgtttatttttaatttggttatcgtcgacgagttttttacgttggtgttgtttattaatatcgtcgattttttgttgcggtagtggtttttcggggagtttatgtgtaagtttatcgtggttatcgattagtataatattttttttagtttttatttttttatcgttatgagcgtcgatcgttatttggtggtgttggttattgcggagtcgcgtcgggtggtcggtcgtatttatagcgtcgcgcgcgcggtgagtttggtcgtgtgggggatcgttatattcgtcgtgttgtttttcgtagttttcgttcggttagacgacgagtagggtcggcgttagtgcgtgttagttttttcgtagttcgaggttttttggtggcgcgcgagtcgtttttatacgttcgtgttgggtttcgttattttcgtgtttattatttgtgttttttatattattttgttgtgtcggttgtatgttatgcggttgga

SEQ ID NO: 395 - DNA, 2398 bp, Artificial Sequence
  chemically treated genomic DNA (Homo sapiens)
tttagtcgtatggtatgtagtcggtatagtagggtggtatagaggatatagatggtggatacggggatggcgaagtttagtacgagcgtgtagaggcggttcgcgcgttattagaaggtttcgggttgcggaaagattagtacgtattggcgtcggttttgttcgtcgtttagtcgggcgaagattgcgaagggtagtacgacgagtgtgacgattttttatacggttaggtttatcgcgcgcgcggcgttgtaggtgcggtcggttattcggcgcgatttcgtagtggttaatattattaggtagcggtcggcgtttatgacggtgaggaagtagaggttggagaaggtgttgtattggtcgatagttacgatgagtttgtatatgagtttttcgaagggttattgtcgtagtaggaagtcggcgatgttgatgggtagtattagcgtgaagagttcgtcggcgatggttaggttgaggatgaataggttggtgacggtttttatgcggggcgttcgtagtaatacgtatagtacggcggagttgttcgttagatttacggcgtagattatcgcgtagataattggtatagttatcgttagcggcgtcggtagcggcgttagagtcgacgcgttggagtagtttagcgtcgggttcgggttcgatgcgttggcgggttagggtttcgagaacgaggcgttgtttattttaacgagggtagaggagtcggcgatttggcgttttttaaggacgttttacggagtttagcggttttgaagttcggttttgtacggatttgttcgcggacgttcgttttagttttttaagtcgttttttggttttttcggaggaggggatcgtttttagttattttacggtttaatgtcgtcgcggatttacggggttggaaagaggaatttaaagtataggttagttcgtcgacgtgtaattttagaaataggcgcggtttcgaggaggggtgggggtggcgtcgcggcgttttaaattttttttacgtgagcgttttttgttatttgttgaaattttatttttattagttgaatatattaaacgaaatgttagagagagaagaattttttataggaaaaatgtaaatttttttttttttttttaggaaattttcgtagatttaggttattttatagaatttcgtagtggtaagtttcggtttttttagggtttgtgcgtttttagtaatagtaagtttaatagtagtttttattttatttggttggttggggaaggggtttgttttttttggagttgttaggagaaaagttcgtcggttgcggggaggttgagacgtttgtcggttgggtgttcgtttttttttgtttgtttttttcgagttcgttagagttcgtagttcgcgttttcgtcggtttttttcgcgcgtttggaagtgtagggatggcgtagtcgcgattgcgttttattgttttgatcgtcgcgtttatttttatattttaagtaaaatggttttggaatagagaatagaaatttttttaaatttaagggattttttttttttattttagtcgtgtaattttattttatttgaaataatagaaagtttttttgttaagaatcgaatttaaggaaaataaagttagggtgtaagtgatttatttttaaaggagaataatgtagtggaggcgtttgttttattttttatatatcgtaatataaatgggttaatgtaatgtgaaatttgaaaggaggaaaaagtgagtgtaattttataatgtaaattatttgttttttgttattttggtttttaaggggatagaagattgttagtatgttttttaaaattatttttatttttatttttgtgtaagtaaagatttgattagtaaagataaacggttttcgtaaagttttttagggaattatgataatgcgtattttataaaacgttataagttgtttaatatattttttatttatttatatatttgttcgatttttttgttaatgagagttattttgcgatcgtagcggagagtagttaaggaaggattagtaggggtagttttgaatttttttgtcgttatttttttggattttggattttttttttaggaagggaaaattattttaggttttttattagtttttttaagaatcgaatgaaataaattaaatattggttatttttaatttttgttttttttttttttttatattttttttaggagagagagtaaattaaaatacgagattatattttttagtaaattatttttttataaaagtaggcgaagtttaaataaagtgtatttttggttttttaggatgtattttagagaagggggtttgagatttagagagatttaaagtcggtagtagaagattgtggggttagaaatatagt

SEQ ID NO: 396 - DNA, 2114 bp, Artificial Sequence
  chemically treated genomic DNA (Homo sapiens)
aaagttatagtagaagggaagttgaagtttgaaaatatattatattttgttttttggtttttaaatttttttagttaaaaatttaggtaaaattattatatttaatatagtaattatttgtaaaattttagaatagtaaataaaggatataaagaaatgtatttttattttttttaaatcgaaaataagtaaaatattatagaattagattttgttttattatataggaattgtttggtaaagattttttttttttttttaaaggtgaaattttaggttgttgaatattgaatgggtaaagatttttataatgttgtatttaagtgagtattaatgattttatttattaataacgattattttttgggaataagaatttattaggaagtaatttttaaaattttataaaggatttaattggtttttataatatggttagtagttatatgtaaattttatttggaagattggggtgaaattaaggggttggtgaaggaatttaggaaaattaaaatattaaatttatttttaatagttgataatgttatgttttaagagaagaaaaagagtatattttgttatagtgtgtgagaaatttaatttttgtttttggatgatggtggtatgttattttttttaaagttaggtattagtgtgagtagtgttttagagaggtgaacgtgtagttgtgttagatatttatagttttatttttaaaagatatatgggaaaatagttaaaagtttttttataattgtattaatttgattaataggaaaataagtggaaaatgtagttttattaaagtagagtagaggtttttttttattaaatttttaggagggggaggggagaatatagaatggttagggggtattttttggaagtcgaagagagattaaatgatgatttttatatttttttcgttgtttaagtgttgaaattaatttagattttatttttttttttatgttaattttggatttttcgagtaatttggagtttatgttttaggttttttgaagattagaagtttaagaagatgggaatttttagaataataattaggggaaattgtttatttgaagggttaagggtagggggttgcgtttggtattttattgagatttcgtttattgaaaatattgtttttaacgaaattatttagtattttgttttatttgcgtggttgttttttttatagtggtgtaatttgtgttagttgattgtttttaggattgttgtaaattttttgatgagtagtatttagaaggggttttagtaaaaattatgcgttttaaatttttaaagtttcgtttgggagagaggttgatatttgtatatgaagtttgttttttggaaatagtaggaggacgtaggaggggcgaagtaatttcgggaagacgttttttttttttttttacggatttagtgtagtttttggtataagtaattttgttatcgggcggttttttttaattcgtgtgggggttgatattaatataagtagtcgttttttcgggtgcgagtgggattttaggttcgggatgtggtgggtgcggtgcgggagaggtattcgtcgttttttttattcggatgttagaggtaagttgttcgtgtgaattcgagcgaacgattggaggttggttgttgtaggtttatttttttaggatgtgggttttagggggcgttttgatgtgatttaatttcgatcgtgaaaataattgttaggggttggttggattgttgttggtttttttttttttggtggttttgtttggtttgggtttagtttgggaataaatttgttttatattaatatttttttttatatcgggcgtcgtcgttttaattgcgcgtggggggcgaggcgtttatttcgtataagaatagaggagcgggggagaagagacggtttcgttgtttattgggtaagcggagtttagtttcgttcgggagcgggtaggagagatagggtagtgatttttatttatattagaaaattttttttttcggcgattttgttgttaattcgagtcggttatagatagtttagtgagtttttaattataaggacgagagaaaagtacggtgtttttcgagtttttttcgtt

SEQ ID NO: 397 - DNA, 2114 bp, Artificial Sequence
  chemically treated genomic DNA (Homo sapiens)
ggcggagaggattcgaggggtatcgtgtttttttttcgtttttgtaattaaggatttattggattgtttgtagtcgattcgagttggtagtaaaatcgtcggggggaggggttttttggtgtgagtgggggttattattttgttttttttgttcgttttcgagcggggttgggtttcgtttatttagtgagtagcgaggtcgttttttttttttcgtttttttgtttttgtgcggggtgggcgtttcgttttttacgcgtagttgaggcgacggcgttcgatgtagaaggaagtgttgatataaaataagtttgtttttaaattaaatttaaattaagtaaagttattaggaggggaaaaattaatagtaatttagttagtttttagtaattgtttttacggtcggaattaaattatattaaaacgttttttgaaatttatattttgaaggagtgaatttataatagttaatttttagtcgttcgttcgagtttatacgaataatttgtttttaatattcgagtgaagggggcggcgggtgtttttttcgtatcgtatttattatatttcggatttgggattttattcgtattcgaagaggcggttgtttatgttaatattagtttttatacgaattagaaaagatcgttcggtgatagaattgtttatgttaggaattatattgaattcgtaagggagggggaagaacgttttttcggggttatttcgttttttttgcgtttttttgttgtttttaaaagatagattttatgtgtaaatgttaattttttttttaaacgaagttttagaaatttggggcgtatggtttttattaaagttttttttaagtgttgtttattagaagatttataataattttaaagataattagttaatataagttatattattgtaaggaaaatagttacgtaaatagagtaaggtgttgggtgatttcgttagaaataatgtttttaatggacggggttttagtaaaatattaaacgtagttttttatttttggttttttaagtaaatagttttttttagttattgttttaaaaatttttatttttttgagtttttaatttttaggaaatttggagtataggttttaaattattcggggaatttagagttaatatgaaggagaaagtgggatttgaattagttttagtatttaaatagcgggggggatgtaagagttattatttaattttttttcggtttttagaaagtattttttggttattttgtgttttttttttttttttttgagggtttgatgaaaaggaatttttattttgttttggtgaaattgtattttttatttgtttttttattggttaaattggtgtagttatgggaggatttttgattgtttttttatgtgttttttaagaatggggttataaatgtttgatatagttatacgtttatttttttgggatattatttatattggtgtttaattttaagggaagtgatatattattattatttaaaaataaaaattgggttttttatatattgtagtagaatatattttttttttttttttgaggtatagtattgttagttattaaaaatggatttaatgttttaatttttttggatttttttattaattttttaattttattttaattttttagatagaatttatatgtgattattggttatgttgtagggattaattggattttttgtaaagttttaaaaattgttttttagtaaatttttatttttaagaagtagtcgttattagtaggtgaagttattagtgtttatttagatatagtattgtaaaaatttttatttatttaatgtttagtagtttgaaattttatttttaggaaaaaaagagggatttttgttagataatttttatataatggagtaaaatttgattttgtagtgttttgtttgttttcgatttaagggagatgaagatatatttttttatgttttttgtttattgttttgaagttttatagatggttattgtattggatataataattttgtttagatttttaattgagggggtttgagaattaagggataaaatgtaatgtgtttttaaattttagttttttttttgttgtaatttt

SEQ ID NO: 398 - DNA, 2382 bp, Artificial Sequence
  chemically treated genomic DNA (Homo sapiens)
aggttttggaggtggttattgtcggtttaggtacggtttcgttcgggattattggttgttttcgtggggtgtttcgtttggggtttttttttattttgggacgttttaggcgcgtttagtttgagttggtggagagggcgggggcgggggcggttggggtttcgaagtttaggtttttttttttattttttcgtcggttttgtcgttgcggttttcgttttcgcgttcgttcgttttcgagttttttttttttttttttttttttttttttttttttttgtagtagtaataatttgatttcgttttttttattcgttttttgagatgttttttatattcgtttgtatatagcgcgtgcggttttttcgaaggcgattttcgtaaatcgcgacgtaggtttttcgttttaggtaattttcgttgcgggagaggtcgttttttggcgtttacgttttttttttgtagtttttattgtcggtcgagggggaaatgggcgataggggaaggggaggtgtgtgcgggacggattaggttggggtagaggggtttaaattggcgcggttttatagaagtttgaggagggcggggtcggtttcgagttttcggagttttacgggattttttcgattttattgaggagttttcgttagtttcgtgtatttttgtaatattttttattttattcgttagtttcgagtttatagtttttcgggttcggggattggttgggggaggggacgggggggaggggattttttggttgtagggaacggcgtgcgggcgggggtgggagggaaacgatttgttttaggagatagggatgaaggtttttttgagttaagggagggagaagagaggtggaataaaaggtagatgttggaggggaaggggagttggggagttcgtttcgagggtttcggtagttcgcggttttttgttttagtttgttttagagggtgaggttaaggttggtgttagggttttttatcggttatttggattttacgcgtttagtatttattttttttcgtacgtttattttatgtattttttcgcgttttttttacggtttttttgcggcgagtcgtttttgttttttcgtaggttttcggttttagcgttaaggtatcgcggtttttttcgtttttttttcgcgttgaattcgggtttttcgcggggagaaataggttgggggcgaggggttttcgagataatttaggatattttttcggggtttagttaggtaatttcgacgtttatggattttcggattatagtttttatcgcgggtttagttttatttttagtttatttcgcggtgagcgttaagttttaaaagtcggagtgttatcgtttggtgatttcgcgttcgttcgcgttttttaatttatggttatttgtttgttatagcgaatttttttttaggaaagaatttgttttttgtaaagaggatgtgtaatgttggaaagttcgtttttttttttattagttggattttgagagttgggagagatgattaatgaataggttgagggtgttatagttttgttattttgggatggggggtgtagtaggggagttatagtttttttagaggttaggttattttatttagttgtattttatttttaattttttagtgggcgatatttgtagggtgttgggattgggagaaattttagatattttaaattttaaattttattttttagatgaagatattgaggtttagagtgggttagtgagttgtttaaggttataggataggttagaatggaagtttttcgatttttttcggggcgttgggtttatagttttattttgttattttttgtttcggaagtgagtattgaagttatttaagagaggttagtgattaaaggtagcgatttttaggtgtagaggttggggtagacgtgtttatgagtttgttttttcgcgtatttttttttatttcgtttttatttttgttttggttattatgtgtttttattattttgagatttagagaggtgtagcggtttgtcgaaggttatatagtatattgagtagggttttcgtttttattgtttagttgtttttttttattgtttattcgggtttttgtaagtttgttaggattttcgggagtttgttttttttaatgtatagagtcgtggcgcgtgttaaagtgtgggaaagtttttgggagagggaaggggtagaaaatatagtcgtttattttaattttggacggttgcggtaaggtaggggcgtttagaaaggtagttagttttgcgtatcgtcggtgttttcggtatattttattttgcgttaggggttttttagggtcgcgcgagtatgtttttttagtttttttttagcgaagtaggcgcggcgggg

SEQ ID NO: 399 - DNA, 2382 bp, Artificial Sequence
  chemically treated genomic DNA (Homo sapiens)
tttcgtcgcgtttgtttcgttgaggaggagttggaagaatatgttcgcgcgattttggggagtttttggcgtagagtggggtgtgtcggaggtatcggcggtgcgtaggattggttgtttttttgagcgtttttgttttgtcgtagtcgtttaaggttgagatgagcggttgtattttttatttttttttttttttaggaatttttttatattttgatacgcgttacggttttgtgtattggaggaagtaggttttcggggattttggtaagtttgtagaggttcgggtgggtaatgggagggggtagttgggtagtggaaacgagggttttatttagtgtgttgtgtgattttcgataagtcgttgtatttttttgaattttaggatgatggaggtatatggtaattaagataggaatggggacgaggtgggggagggtgcgcgggggaataagtttatgggtacgtttgttttagtttttgtatttgggaatcgttgtttttggttattggttttttttaagtgattttagtgtttattttcggggtagggggtggtaaggtggagttgtgaatttagcgtttcggggagagtcggaaagtttttattttgatttgttttatgattttgggtaatttattgatttattttgggttttagtatttttatttggaaaatggggtttggaatttaaggtatttgaggttttttttagttttaatattttgtaggtgtcgtttattgaaaggttggggatggggtgtagttgggtagaatgatttggtttttgggaagattgtagtttttttattgtattttttattttaaagtagtagggttgtgatatttttagtttgtttattggttattttttttaatttttagaatttagttgatggggagaaaggcgggttttttagtattatatattttttttgtagagggtagatttttttttagggaaaggttcgttgtgatagatagatgattataggttaagaggcgcgggcggacgcggggttattaaacggtgatatttcgatttttggggtttggcgtttatcgcgggataaattaagagtaggattgagttcgcggtgggaattgtaattcggaaatttatgggcgtcggaattatttggttagatttcggggaggtgttttgaattatttcgggaatttttcgtttttaatttattttttttcgcggagagttcgggtttaacgcggagagaaggcgagagaagtcgcggtgttttagcgttgggatcggggatttgcggggaagtaaaggcgattcgtcgtagagaagtcgtgggaagggcgcggggaggtgtatgaagtgggcgtgcggagagaagtgggtgttgggcgcgtgggatttaggtggtcggtgaagagttttggtattagttttgattttattttttgggatagattgaggtaggggatcgcgggttgtcggagttttcggggcgagttttttagtttttttttttttttagtatttgttttttgttttatttttttttttttttttttgatttaggaaaatttttatttttattttttgaagtaaatcgttttttttttattttcgttcgtacgtcgttttttatagttagggggttttttttttttcgtttttttttttagttaattttcggattcgagaggttgtaaattcggagttggcgggtggggtggggagtgttgtaggagtgtacggagttggcggggattttttagtagaatcgggggagtttcgtagggtttcgggggttcggagtcggtttcgttttttttaaatttttgtaggatcgcgttagtttaaatttttttgttttagtttagttcgtttcgtatatattttttttttttttgtcgtttatttttttttcggtcggtagtaaggattgtagaaggggggcgtgggcgttaggaggcggtttttttcgtagcggggattgtttggggcggaggatttgcgtcgcggtttgcggggatcgttttcggaggggtcgtacgcgttgtgtgtaggcggatgtgaggagtattttaagaggcgggtgggggaagcgggattaggttgttattattgtagagagagagagaggaagagaagagagagagggagagattcgagagcgagcgagcgcgggagcgagggtcgtagcggtagggtcggcggggaagtgggaagagggatttggatttcgggattttagtcgttttcgttttcgttttttttattagtttaggttgaacgcgtttggaacgttttagggtaagagggaattttaggcggggtattttacgagggtagttagtagtttcgagcgaagtcgtgtttggatcgatagtggttatttttagggttt

SEQ ID NO: 400 - DNA, 2192 bp, Artificial Sequence
  chemically treated genomic DNA (Homo sapiens)
ttatataatttttaaaaagaaagaaatttttaaattatagatgtgtttggaattagaatttagaaagtatttgggtagggaaaatagtttttagtgtttaaggttaaagttagtagggtttttttggatgggaaagagatatgagattgtaagtaatttttggatattatttatttgttattgtgtttttatttttttttttagttatttatacgttttttttttttagttaaaatgaatttaatttttgttatagtattttattttgttaataaaatttaggattgaagaatgagaataaaagggttttatatttattattttttaatttttgattttagtttggatagaataattatttattttagaaaattggtatagggagtatttattagtagttgtaatatattattgttaaagggagggattttgtaaggcggtattgggtgttttatatgtatgggaaattcgaggttacgtttagtgttaattataagtatttttatttttggttaggtaagttttgatttttgaattttgagtttttaattttttttaaaatgagaaagagatggttttttttagagttttttagtttttaatttataggtaaatattatcgtatgttgttttttagtagagattggttttaattaaggtaaataagttaggatggattttgttgatcgtgatggtttagtgttatattttatatattttattattttttagaatatttaatagtgttgtttttggtagttttggggttgtagtttttgtagagaggaggaattggtattgaaagaaatagttgagttttattacgttacgtggggcgtttttattgttaagagtaattttttttttttgggaagaaaagcgtgggcggggtcggggtagtttttttttttcgcgttgttttggagattatgggcgtttagttgtagttgtcgttggatcggttttggttgttttgagaggtgttttttgtaggcggggacgcggttaggtcggacgtaaggtttttttttaatttatcgggtttagggggacggttaggggttgtttagtttatttggcgggttagggagggggatggtagaggttggttgggtttttttagtatatagtaggcgtttaattagcgtgatttgaattaggttattttttttttttaatttttttttttgtgttttatggagggtggattagggtttcggatgcgaattttgcgtcgtattagagttttagttttaatcgatattttgagcgtcgttaattttttttcgaagagtatggtagagtgaagtataagtaataattttgtattattcgcgtttttagagttttttcggatttgcgttatgcgcggcggggagaatcggttttttgttcgagtttagagtttatttgaggttagttttatcgtttcgttgaaagttaaaattttaagtcgacgttttttagtcgtttattttttagtagagagttttttttcggggagttttgttttggggtgtcgtttcgaggttagacgtcgtttcgtttggatttgaatttgagtttgggacgggcgattttttaattttaggaattggaattgagatattaaagtttagacgcgttttttggacgacggtttttcggtaggggtatttagttagcggttaagatgtcgttagtggggaaggtgatttaggtttcgaatgggaaagtttattagtagattttttaggttgaggtaggagtcgttttttgtttcgtttttttttatttttttttttttgtttttttttaaattttttttttttttagggtttttttattggaaattgaataaaataagggttttgaaattattttgattttaaaaataatttttgtttgtttttaaatcgtattaatataaaattagaatgttagtttttgaaaattagaaaatttaaattaaaattttaaatgtaaattatttagaaatagtttggatggaattattgggtgatttttgttttttttatgtataaaaatatgattaatttttgtatttaaaaaataggttttattttgtattagtgttttgaaatttgttttttttttataatagtattttatagatttttttttatgttcgtgggcgtttatgtattttattatattgagtagttttttatttgttgatttaggatttttat

SEQ ID NO: 401 - DNA, 2192 bp, Artificial Sequence
  chemically treated genomic DNA (Homo sapiens)
atgggagttttaggttaataagtggggagttgtttagtatggtgaaatatatgggcgtttacgggtatagaaaagggtttgtgagatattgttatgaagaaaaagtagattttaaaatattagtatagaatgaaatttattttttaaatataaaaattagttatgtttttatgtatgggaaaaatagaggttatttagtggttttatttaggttatttttgagtaatttatatttaaaattttaatttaagttttttaatttttaagaattgatattttaattttgtattggtacgatttaagaataagtaagaattatttttaaaattaaagtaattttaaagtttttgttttatttaatttttagtagggaagttttgggagggagggaagtttggaagaaagtaagggaagggggatggagaaaagcgggatagagggcggtttttattttagtttggaagatttgttggtaggtttttttattcggaatttgggttattttttttattgacgatattttggtcgttggttggatgtttttgtcgggaagtcgtcgtttaggaaacgcgtttaggttttggtgttttaattttaatttttgaggttgggaaatcgttcgttttaaatttaggtttaggtttaggcgggacgacgtttggtttcgaggcggtattttagggtaggatttttcggggaaggattttttgttggggggtaggcggttggggaacgtcgatttagggttttaatttttaacgaaacgatgaaattaattttagatgagttttgaattcgagtaggaggtcggtttttttcgtcgcgtatggcgtaaattcgaagggattttgggaacgcgaataatataggattattgtttgtgttttattttgttatgtttttcggggaaaagttaacggcgtttaaggtgtcggttgggattggaattttaatgcggcgtagaattcgtattcgggattttaatttattttttatgggatatagggaggagaattggagggagagagtaatttgatttaggttacgttaattaggcgtttattgtgtgttgagaagatttaattagtttttgttatttttttttttagttcgttaagtagattgagtagtttttggtcgtttttttgagttcggtagattggagggaggttttgcgttcggtttggtcgcgttttcgtttgtagaaagtattttttaaggtagttagggtcggtttagcgataattgtagttggacgtttatggtttttaaggtaacgcggaggggagggattgtttcggtttcgtttacgtttttttttttagggaggggagattgtttttagtaatgggagcgttttacgtggcgtagtgaaatttaattattttttttaatgttagttttttttttttataaggattataattttagggttgttaggagtagtattattaaatgttttgaaaggtggtaggatatatgagatgtagtattgagttattacggttaataaagtttattttaatttatttgttttggttaaaattaatttttgttgggggatagtatacggtagtgtttgtttgtaagttagaagttgaaagattttggaagaaattattttttttttattttaaaagaggttgagagtttaaaatttagggattaaggtttgtttggttagagatgaaaatgtttgtggttggtattgaacgtggtttcgggttttttatatatatgagatatttagtgtcgttttatagaatttttttttttggtagtgatatgttataattgttaataaatgttttttatgttaattttttagaatgagtgattgttttgtttagattagaattagaaattaagaaatggtgagtataaaatttttttatttttattttttagttttgggttttattaataaggtgaagtattgtaataaagattagatttattttagttggaaaaagaaaacgtgtaggtgattgagggaagggatgaaaatataataataaataggtaatgtttaggaattatttgtagttttatattttttttttatttaaggaggttttattggttttggttttgaatattagaaattattttttttatttagatgttttttgggttttggttttaggtatatttgtaatttaggggtttttttttttttaaaaattatatgg

SEQ ID NO: 402 - DNA, 2192 bp, Artificial Sequence; identical to SEQ ID NO: 400
  chemically treated genomic DNA (Homo sapiens)

SEQ ID NO: 403 - DNA, 2192 bp, Artificial Sequence; identical to SEQ ID NO: 401
  chemically treated genomic DNA (Homo sapiens)

SEQ ID NO: 404 - DNA, 2244 bp, Artificial Sequence
  chemically treated genomic DNA (Homo sapiens)
  unsure (2126, 2128, 2131, 2132): unknown base
ttttattttttttttttttttcgttttttttttatttttttttttttttttttttttttttttttattttttttttgtttttgagtttttattgatcgatttttttttattttattcgttttttttttaatgtgttaatttttgttttattttcgatttttttaggtattgggaggcgggatgggggtgtgcgtttttttttaggagttttgtttttttaagatttatagaaattaggatttgtttttatttaaaattttatgtattttaagttttttttagataatatattttaatttttcgggttgattagtttttttgtgtagaggtagttgagaggttttgttttgtagagggaaaagagttttttatttttttatttattatataggtaaatttatttggttattggttgaaggtatagttttgttttcgcggggaatcggcggttaggatataatagcgtttttggagtttatttttggttttggcgttggcgtagggattttttgatcgggtttgaggggttcgggttagttttaatgttattatttatagcgagggtagggtgtaaggttgagaaggttatatttatcgttttgggaggacgtgggagaagagattgaggtggaaagcgttttgttttgtttatcggtcgtttttgtttcggttttagcgtttgttgggatttgttaggatttgtcggggtttcgggagattttgagtattcgtaggaagaggtgttgagaaattaaaaatttaggttagttaatgtatttttgtcgtcggttgtaggtttcgtttttgtattaagcgggcgttgattgtgcgcgtttggcgatcgcggggaggattggcggttcgcgggaggggacgggtagaggcgcgggttatattgttttggagtcggttcggttttttgtgttttttttagcggttaagttgcgaggtatagttttttattgttttaggagtatagaaattttttgtgtgggcggcgggtgcgcgagttagagggaaagatgtagtagttattgcgattggtacgtagttgcgcgtttttgtgcgtacggatttcgcgcggtgtgcgtggcgattgcgttgtttttaggagtaagttacgggtttagaggggtaaaatgtttaggtttttcgttgggaaggatatattatattttatggtaagttagggtgggcgattttttatggatcgggtggaggggggtattttttaggatcggcgggcggtttaggggaataattcgtggtggcgatgatttgtatagcgcgggttttgggatgcgcgcggtttcgagttagtttcgtatagttcgttttcggagttgcgagtttaggtttttattttcgatttttcgggtttttttcgtatcgttgagtttagtttgtggggtgtattcgattaacgttcgatagggttggggaatgtgataggtagtaggtttattcgggtttggggagggggagttttcgttttgatagtatttttttttgtcgtttgttggtggatttttatttttagtcggtaatcgtttcgtagtgttgatttaagaaggtaaagaaaattaggtttttttgtaaagagttttttttaaatcggcggatttcggatattttgagtggatttagaaatttatgtaattttttttttttagtttattttttatttttttttatagttttttttgatttgttgttggttcggggtaagataaagtagttagtagagagcgataataatagcggcgggaaatgaattggagattggttgatagtttttaatattttgttatagattttttcgaatgttttaggttgtttttggtgggttttagtattcgtcggttttttgggtatcggggattagaaggaatttggtagttggttttaggggtatagttaaaggtaggatgatagttatttttttgtttattttagagcgttgtcgtttttttatgtcggtcgcgtaaagaatatagtttttaaaaaatacgtgttttttgtttatataggtttgaaagtgatgaggaaagtaatgtttcgtttattagcgagttttagtttttaaaatgattttaagcgttgttgagatgagaaagcgtggtatntnttnngggggtttttagttttattcgcgtttatggtgtaagtttgtagggataggttcgggatagtattgtttacgttgttagatttttcgtagaggatcgttgaagttgttttcgt

SEQ ID NO: 405 - DNA, 2244 bp, Artificial Sequence
  chemically treated genomic DNA (Homo sapiens)
  unsure (113, 114, 117, 119): unknown base
acgaaggtagttttagcgattttttgcggaaaatttagtagcgtgggtagtgttgtttcgggtttgtttttgtagatttgtattatgggcgcgggtggggttgaggatttttnnggngnatgttacgtttttttattttagtaacgtttgggattattttaaaagttgaaattcgttaataggcgaagtattattttttttattatttttagatttatatgggtagaaggtacgtgttttttaaaagttgtgttttttgcgcgatcggtatgagggggcggtagcgttttgagatgagtaggagaatagttgttattttgtttttaattgtatttttaagattagttgttaagttttttttggttttcggtgtttaagaagtcggcgggtattaaaatttattagagatagtttgggatattcggggggatttatgataaaatgttaagaattgttagttagtttttagtttatttttcgtcgttattattatcgttttttattggttgttttattttgtttcgaattaatagtaaattagagaaaattgtaggagaggatgaaaaataaattaaaggagaaagattatataaatttttaaatttatttaaagtattcggagttcgtcgatttgggggaggttttttgtagggaaatttagttttttttatttttttagattaatattgcggggcgattatcgattgggaataggaatttattagtagacggtaaaggaaaatgttgttaaagcggaaattttttttttttaagttcgggtgaatttgttgtttgttatattttttagttttgtcgggcgttggtcgagtgtattttataagttgggtttagcggtgcgaggaaagttcgggggatcgggggtggaaatttgagttcgtagtttcggaagcgagttgtgcgaggttggttcggaatcgcgcgtattttaagattcgcgttatgtaaattatcgttattacgaattgtttttttagatcgttcgtcgattttgaaagatatttttttttattcgatttatgggaagtcgtttattttggtttgttatagggtatagtgtgttttttttagcgggggatttggatattttgtttttttgggttcgtggtttgtttttaggggtagcgtagtcgttacgtatatcgcgcggggttcgtgcgtataaaagcgcgtaattgcgtgttagtcgtagtaattattgtatttttttttttagttcgcgtattcgtcgtttatataggaggtttttgtgtttttagaataatagagggttgtatttcgtagtttggtcgttagaggaggtataaagagtcgagtcggttttagaataatgtaattcgcgtttttattcgttttttttcgcgggtcgttagtttttttcgcggtcgttaggcgcgtataattagcgttcgtttaatgtaaaggcggagtttgtagtcggcggtagggatgtattaattaatttgaatttttaattttttagtatttttttttgcgagtgtttagggtttttcggagtttcggtaaattttggtaaattttagtaaacgttgggatcggggtaaggacggtcggtgagtaaggtaaagcgttttttattttagtttttttttttacgtttttttaaagcggtgaatgtgatttttttaattttatattttgttttcgttgtaggtagtgatattggagttggttcgagttttttaagttcggttagaaagtttttgcgttaacgttaaggttagagatgggttttaggagcgttgttgtattttggtcgtcggtttttcgcgggggtaaggttgtgtttttagttaatgattaaataagtttgtttatatggtgggtgggagagtagagagtttttttttttttgtagagtaaagttttttaattgtttttgtatagggagattagttagttcggaaaattgaaatgtgttgtttaaaagagatttgaagtgtatggggttttgaataagggtaggttttggtttttgtgggttttggaaagatagggtttttagaggaaaacgtatatttttatttcgttttttagtatttgggaagatcggaaatagggtaaaggttggtatattgaggggagggcgaatgaaatgggggggggtcggttaatgaaagtttagggataaggagagagtaagaaagaaaaagaaaagggagaagggaaagtaggggaagagcggaagagaaagagaaaatggaa

SEQ ID NO: 406 - DNA, 2420 bp, Artificial Sequence
  chemically treated genomic DNA (Homo sapiens)
ttttttttttcgggatgagtagggagagcgcgcggaggttttcgattttttcgattataattaagaaagaataatttttaaagtgtttaatattttcgtttttaagttttttaaaatataggggtagggaatattaaaatattcggtttttattaggaagattacggttttgaaaggaaatagtagatacgatattttattttatttggatttatgattaaaaaaataaaaataaaaatttaaagagttcgtttgtattttttttttttaaatttcggttcggttcgaaggtagggaatttaaaagatcgaggtcgatggaagagagttagcggggcgagcgagcgggtagtttttttttttgtttttcggagttatttagaaggataggggaagggaaggaagaagaggcgaggaaaaagaggagggagggaagcggaggttaggagcgacggagtaaggaaagtagtttgtaagcgagaaaagagggaaaaaatatagtcgtacgaatttagagagattataagtcgtacgtaagtagtagtagaaagagcgagagcgcgagcgcgcgtttttttcgcggtttggggttagatagtttttagattagttcgaattattttttaagtattgtttcgttttttttgtttcggtcgttttttaatttttttttttttttttttttattttttttttaaaaattaaaataatataagggagggtggtaaaagtttttttaaatcggtcgatttatttaaagataataataataataataaatatataataatttatattttatggtgggagagacgtgggattaattttcggtatttattttaatatttgatagttagaataaataaatatatatatttatattaatagatatatatagaaaatttggagttaaagtatttggtaagagcggaaaaaaaaagaattaaaaggtaaaataatgattatgagtagcggcggcggtagcggtattagcggtaatagcggcggcggcggtagtagtagtagtagcggcggtagtaatagtaataattatttggtgttcggttttttttagaaattttttgtattattatttttaagaattttagttttaagaattaatagagtttaattttcggaatttgagtttcggattttattattgttacgtggtaggggaggatttggtgttagtttttcgagatttttattgtttttggttaattaaaagtttttaaagttataagatttttttattggtcggtatatttcgaggtttttataagtagagcgtttcggatttggaggtttcggttcgaggttcgaggggtttgaaggtggtttttttttttcgggtttaagacgatggtatggtttgtttcgttattattacgtgggttttttttttgtgacgtcggcgttttcgttgtagtaaagttcggtttttggaattttgagaattaatttgttattcggtgatataagagggggagtgcgttttgttttttcggggtttggggttaatttttttttttttatttataaatttagtagatcgagttaaatgtataaaagggagcgagaggtttgaattattgggaaaagtatgttatatatatagtagggttagagaggcgagtaagagaaaaataaaataaaataaatattatagttttttttaattagaatattaggtattacgagaaaaatatttgttaagtagttttcggtgggtttatttgttttatttttatttaggataggggtttttgttgttgttttgggtttttttttttttggtgtggtggtttgggatttttggtttttgtattttgatggtttatggatttttgtttttgattttttgttttttgtaagtttgtggtgttacgtaaattataggatcggtatcggttggatttttttgtacgtgttttttttttttttatttaattttttaagcgttttaaagatgtattattttaatattaatattattgaaagaagtttaaatttttggttatatgtaataattttagtttttatttttttttttttttttttttttggtgtaatttttttttttttttttggatttttgttgaagtgtgttttttttgtattttagagaaatgtttaaaggatttgttttggtttggtttgtttttttttaggatagtaagtggtgggtttaatttgttattgttgatttttgggaaattttttgttgtaagaaacgtgtgtgtgggggggagggtgggggtggcggggtggtatgtgtgtgttttttataaaattttgtgagttaaatatttgtttgtgttttgtttttttttaaggttttgagatttttgttttcgaggttcgttttaaggtcgttgtaaaaaaatttttttagtttgtgtttaagagattagtcgg

SEQ ID NO: 407 - DNA, 2420 bp, Artificial Sequence
  chemically treated genomic DNA (Homo sapiens)
tcggttgattttttaaatatagattgaagagatttttttataacgattttgaaacgagtttcgaaaataaaaattttaagattttaagagaaaataaaatataaataggtatttggtttatagaattttgtagaaaatatatatatattatttcgttatttttatttttttttttatatatacgttttttgtaataagaaattttttaagagttaataataatagattaaatttattatttgttgttttggaaagaaataaattaaattaaaataaattttttgaatatttttttgaagtgtaggagagatatattttagtaaaagtttaagggggaaaaagaaaattgtattaaaggaaaaaaaaaaaaaaaaagtgggggttgggattgttatatatggttaaaaatttaagttttttttaatagtattagtattgaaataatatatttttaaaacgtttgagggattagatagggaaagaaaaggtacgtataaaaaaatttaatcgatgtcgattttgtgatttacgtaatattataaatttgtaaaaggtaaaaaattagaagtaaaaatttataaattattaaaatatagaaattaaaaattttaagttattatattagaaagaaaaaaatttagaataatagtaaaaatttttgttttaaataaaaataaagtaaatgaatttatcgaaaattgtttggtaaatatttttttcgtggtgtttaatattttagttggaaagagttgtgatgtttattttattttattttttttttattcgtttttttaattttattatatatataatatattttttttagtggtttaaatttttcgtttttttttgtgtatttagttcgatttgttgagtttatgggtaagaaagaaggaattagttttagatttcgggaaagtaaagcgtatttttttttttatgttatcgaatagtaaattagtttttagaattttagaggtcgagttttgttatagcgaaggcgtcgacgttatagaggaggagtttacgtgatggtggcggagtaggttatattatcgttttgggttcggggagggagagttatttttaggtttttcgagtttcgaatcggaatttttaaattcgagacgttttgtttatgaggatttcgaaatatgtcggttagtgaaaaaattttgtggttttgagggtttttggttggttaggggtagtaaaaatttcggagagttgatattaagtttttttttgttacgtagtagtggtaaagttcgaagtttaaatttcgagaattgagttttgttgatttttagaattggggtttttagaagtggtgatgtaagaagtttttaggaaaggtcggatattaggtgattattgttgttgttgtcgtcgttgttgttgttattgtcgtcgtcgtcgttgttgtcgttggtgtcgttgtcgtcgtcgttgtttatgattattattttattttttaatttttttttttttcgtttttgttaaatgttttggttttaagttttttatgtgtatttattgatataaatgtatatatttatttattttagttgttaggtgttaaaataaatgtcgaagattagttttacgttttttttattataggatatagattgttatgtatttattattattattgttgtttttgagtgaatcggtcggtttggggaggtttttgttatttttttttgtgttgttttggtttttggaaaggaggtggaggagaggaaggaggggaattagggggcggtcggagtagagaggacgagatagtgtttggggggtgattcgggttagtttgggggttgtttggttttagatcgcggagaggacgcgcgttcgcgttttcgttttttttgttgttgtttgcgtacggtttgtgatttttttggattcgtgcggttgtgtttttttttttttttttcgtttgtaaattgttttttttgtttcgtcgtttttggttttcgtttttttttttttttttttttttcgtttttttttttttttttttttttgtttttttgggtaatttcgggaggtaaaaagggaggttgttcgttcgttcgtttcgttggtttttttttatcggtttcggttttttagattttttgttttcgagtcgaatcgagatttggaaggaaaaaatgtaagcgaattttttgggtttttgtttttgtttttttggttataaatttagatgagatgaagtatcgtgtttattatttttttttagagtcgtgatttttttaatgagagtcgagtgttttggtgttttttgtttttgtgttttggggagtttgggggcggggatgttgaatattttgaaaattatttttttttggttgtagtcgagggagtcgggaattttcgcgcgttttttttgtttatttcgaggagagaga

SEQ ID NO: 408 - DNA, 2344 bp, Artificial Sequence; identical to SEQ ID NO: 386
  chemically treated genomic DNA (Homo sapiens)

SEQ ID NO: 409 - DNA, 2344 bp, Artificial Sequence; identical to SEQ ID NO: 387
  chemically treated genomic DNA (Homo sapiens)

SEQ ID NO: 410 - DNA, 2366 bp, Artificial Sequence
  chemically treated genomic DNA (Homo sapiens)
tttttttttttttttggtagaattgttcgatggttttgattatgtttaggtttatttcgatgtagtagtaggtatggtcggttcggggttcgggatagttcgttacgtagtagtaatagttttttagggtgttgatttttttatatttggtttttttatataggcggtcgaagcgatcgaatagatcgtttaggagatttattagggcgtgggtagatttgttggtatttattttggtgaagtttacgatatttgtaaataaaatattgattttttcgatttgttgtattttaaaagggcggaaggttataggagttttttggatggaagattttttttttttgtttttggggttcgaggtggtatgttttttgatagaatttttattttttttatttttttgttttattaagttatcggttatgatttttggtattacggaatgaattattttttttttgagggttttttttatttttaggtttttttcgtgtataatggattgttttattttgaggaaggtgtttttggattttatttgggatatgacgaataggtggatttcgatggcgtggatgtagtcgtggagtagttttttgtttagtagtttttagtgtagggtttcggtttcgggcgaggggaagtaggttttatttcggaaatggtagttaaaggtttcgaaaaggatagagtaggttatttttagatataaatttaggtataaaggtaagtgtatgacggtatagagtaaaaagagtatttcgatgtatatggagaagttttttatttgagataagtaagtatttgtgggtcgggttgtggtcgtaaggttggagttgtcgtcgcgttttgagataggcgttaagatttggaattgcgtagttagggttagggcgaatattagtagggtgagagttagcgaggtttacgcgtaatgtcgggcgtatagtttggtgaaggtaaatagaaagaagtttatatatattaggaggaagtatagcgcgggggcgattatgacgattagtttggattttatgtggatcgtaaaatagatgttttatagaaggtaggcgaagtcgatgtagaagagcgtatatcggaatcggcgttgggtttgcgggaagtagcgttttaggtaggttttttttaggtttatcgagtcgaatttggggttttattagcggttggaggttttttcgaatagttggggtagttttttttgtttgcgtagtcggttttcgtcgtttattcgtcgggggacgttttcggagtttttagagttgttgtagttagaggagatgttgtatttgtagtgtttggggtggttgttggaggatagttgtttggggttgattttgacgcgtacgttgttgttgttttcgttggagtcgtagtttatttcggtgttgtggtgatgtagtagttgttggtggggtggggaagttatgttgtcgagtttcggggtttgtttcggtcggggttattagtatttgttagtaaaacggggagagttagcggcgtttttatttaggtatgtacgtttagaggttcgggatttgtttttgttttaaggggcggttttagtacgcgatttggataggtattatttgtttttgtggttttcggtttagcggtgtttttatcgtttttatcgtttttattttcgaggcgtacgagaatcgttcgggacggatttagaacgttcgggggttttcgtcgcgtggtcgtcgtggtttcgggatcgttttgttcgttcgtttttcgcgtttttcgtttcgagggtggttttcgcgtcgcgcggtttttttttttcgcgcgttcgttttttttagttgcggtttcggagggaagtttagattttgagcgtttttagtttcgcgagtcgtttgcgtataaataatttcgttggcggcgcggagttttttattttgtaggagtcgcgtttcgatgcgttaaaggcggcgcgcggtcggtttcgggttcggatttcgattcggagtagcgagtttcggcgggcgttttcggttcgcgtttttcggtcgtttttcgcgtttcgggtcggttttgttcgcggcggcgggcgttgggggtgggggcgtttcgggttgcgagtgcgcggagttcgtcggcgcggttcgtttagtggggtttgttttttttcgagtgcgtcgtcgttttcgtcgcggtcgtagttgtttcgggatcgagcgcgtggaattacggacgcgggtttttcgtcgggcggcggtgtagacgttgtcgtagagtcgggttttcgcgacgtcggtcgggacgttcgttcgttcgcgtttacgtcgggggtcgttttttcgagttagagatgcggtcgtcgtcgcgttcgtcgt

SEQ ID NO: 411 - DNA, 2366 bp, Artificial Sequence
  chemically treated genomic DNA (Homo sapiens)
gcggcgggcgcggcggcggtcgtatttttagttcggggaggcggttttcggcgtgggcgcgggcgggcgggcgtttcggtcggcgtcgcgggagttcggttttgcggtagcgtttgtatcgtcgttcggcgaggggttcgcgttcgtggttttacgcgttcggtttcgggatagttgcggtcgcggcgggagcggcggcgtattcggggggaagtaggttttattagacgggtcgcgtcgacgggtttcgcgtattcgtagttcggggcgtttttatttttagcgttcgtcgtcgcgggtagggtcggttcggagcgcggggggcggtcggggagcgcgagtcgggggcgttcgtcgaagttcgttgtttcgggtcggggttcgggttcggggtcggtcgcgcgtcgtttttgacgtatcggagcgcggtttttgtaggatggagggtttcgcgtcgttagcggagttgtttgtgcgtaggcggttcgcggggttgggagcgtttaaggtttgaattttttttcggagtcgtagttggaggaggcgagcgcgcgaggaggagaagtcgcgcggcgcggaggttattttcggggcgagaggcgcggaaggcgagcgagtaaagcggtttcggagttacggcggttacgcggcggggattttcgggcgttttaggttcgtttcgagcggttttcgtgcgtttcgaaggtgggggcggtgggggcggtgggagtatcgttgagtcgggaattataggaatagatggtgtttgtttaggtcgcgtgttggagtcgttttttaggataggagtaggtttcgggtttttaggcgtgtatgtttaggtgggagcgtcgttaatttttttcgttttgttggtaggtattggtgatttcggtcggggtaggtttcgggattcgataatatggtttttttattttattagtagttgttgtattattatagtatcgaggtgagttgcgattttagcggggatagtaatagcgtgcgcgttaagattaattttaagtagttgttttttaatagttattttaagtattgtaaatatagtattttttttagttgtagtagttttggggatttcgggggcgtttttcggcgagtgggcggcggaggtcggttgcgtaggtagaagaagttgttttagttgttcgagagggtttttagtcgttggtgggattttaagttcgattcggtgaatttggaggaggtttgtttggagcgttgtttttcgtagatttagcgtcggtttcggtatgcgtttttttatatcggtttcgtttgttttttgtggagtatttattttgcggtttatatgagatttagattgatcgttatggtcgttttcgcgttgtgtttttttttggtgtgtgtgggtttttttttgtttatttttattaagttgtacgttcggtattacgcgtggatttcgttggtttttattttgttggtgttcgttttgattttggttgcgtagttttaggttttgacgtttgttttaggacgcggcgatagttttaattttacggttatagttcggtttatagatatttgtttattttaagtggggagtttttttatgtgtatcgaagtgttttttttgttttatatcgttatgtatttatttttgtatttgagtttgtgtttgggggtggtttattttgtttttttcgagatttttggttattattttcgggatgaagtttgttttttttcgttcggagtcggggttttgtattgggagttgttgagtagggggttgttttacggttgtatttacgttatcggggtttatttgttcgttatgttttaggtgaggtttaggagtattttttttaaggtggggtaatttattatgtacgggaaggatttggaagtggaaaaagtttttaaagagaggatgatttatttcgtgatgttaagaattatagtcgatgatttaatgaagtagggagatgaggagagtgagaattttgttaagaggtatgttatttcgagttttaagaataggaagaaaaagttttttatttaaaaagtttttatagtttttcgtttttttaagatgtagtagatcgaagaagttagtattttatttgtagatatcgtgggttttattaagatgagtgttaataagtttgtttacgttttggtgggttttttgaacgatttgttcggtcgtttcgatcgtttgtgtgaggagattaagtgtgagaaaattagtattttgggagattgttattattgcgtggcgggttgtttcgagtttcgggtcgattatgtttattgttgtatcgagatgggtttgggtatgattaaggttatcgagtagttttgttaggagaagaaggaga

SEQ ID NO: 412 - DNA, 2264 bp, Artificial Sequence; identical to SEQ ID NO: 340
  chemically treated genomic DNA (Homo sapiens)

SEQ ID NO: 413 - DNA, 2264 bp, Artificial Sequence; identical to SEQ ID NO: 341
  chemically treated genomic DNA (Homo sapiens)

SEQ ID NO: 414 - DNA, 1334 bp, Artificial Sequence
  chemically treated genomic DNA (Homo sapiens)
gggcgttttgattttttttttattttgttttttcgggttttattcgtttgtttttggattttcgtttttttttgtttttcggttttttagagttttttttttatggtagtagtttttcgcgttttcggcgtagttttttagcggacgattttttcgtttcggggttgagtttagtttttggatgttgttgaaattttcgagattatgcgcgggtttggttgttgttttttcgtcgggtgttattgttatcgtcgtcgtttttgttgtcgtcgttcgcgggatgtttagtagttcgttgttcggttttcgcgattttgtgtttttcggaagtcgtttgttgttgtagagttgtacgaattagttatggtgttgtgggagttttcgcggtagtgtagtagttggatattttgcgagggtttttgttggttgttgttgttgttcgttatgttatttatcgtagttcgttcggtgaagttcgttgttttttttatttttttaagtgattgttaaacgtttatcggttggaattgttttggtaagtttagaattttcgttttcgattttttaatttcgtagaagaatacgcgtatttagtatagattagtttattttagcgcgtttttttagttttttattttttattgttttagatttttaatattatttatttttatttagagaaataaggggaattgttgtaggttcgggggtgaggggtggttttgggatgggtagaaagtgtaggtgtagtaggaaatttttgtatgtttgcgtttatattggagttgcgaggattttgagaaatattaaacgggatggttttttgggtttattgttttgaaagagtattaattttaggggaaatattgaaatagaagttttgttattattaaagaaaaaagttttattaggatgaggaagaaataattttatgagaaagaatgagcgagaaagtaataaattaaatggtgattgtaggggaatcgttgatttttggtaaaggtgttatgaggtcgtattggtttttcgttgaagattaggttatatagattttagaggagttgggttttaatagaatttttttttttttttttttttttttttttttttattttttttttttttttattttttttttttttaggcggtaaaagatattggttttgtagtttagatatgtttttttttttgtttttttaagttttaaggtagtataggggagttgagaaaaagaatattttgcgggttttttaggtcggagtgggtatgattgaggttggttaggttttatgtaggcgagtcgagggcggaattcgattttagtgggcgttgat

SEQ ID NO: 415 - DNA, 1334 bp, Artificial Sequence
  chemically treated genomic DNA (Homo sapiens)
gttagcgtttattgaagtcgggtttcgttttcggttcgtttatatggagtttgattagttttagttatgtttatttcggtttgggagattcgtaaagtgtttttttttttaatttttttgtattattttgaagtttagggaagtaaagagaggggtatatttggattgtaaaattaatgttttttgtcgtttaggagagaagggaatgagagagagagagagatagagagagagagagagagagagagagagagaaattttattgaaatttagtttttttagaatttgtgtgatttggtttttaacgggagattagtgcgattttatggtatttttgttaggaattagcgatttttttgtagttattatttgatttattgttttttcgtttatttttttttataaagttattttttttttattttagtaagatttttttttttaatgatgataaagtttttgttttagtgttttttttaggattggtgtttttttaaaatagtgaatttagaaaattatttcgtttaatattttttaaaattttcgtagttttaatgtaagcgtaagtatgtaaaggttttttgttatatttgtattttttgtttattttagaattattttttattttcgggtttgtaatagttttttttgtttttttggatagaggtgggtggtattaggggtttagggtagtaggaggtgaggggttgaggaggcgcgttagggtaggttggtttgtgttggatacgcgtgtttttttgcggagttaaagggtcggggacgggggttttggatttattagagtaattttagtcggtgggcgtttggtagttatttaaggaggtagggaaagtagcgagttttatcgggcgggttacgatgagtagtatgacgggtagtagtagtagttagtaaaagttttcgtaaagtgtttagttgttgtattgtcgcggggatttttatagtattatgattagttcgtgtaattttgtagtagtaaacggttttcgaggaatataggatcgcgggggtcgggtagcgggttattgagtatttcgcggacggcggtagtagaggcggcggcggtggtagtggtattcggcggggaagtagtagttaaattcgcgtatgatttcgagagttttagtaatatttagggattgggtttagtttcggagcgagagggtcgttcgttgagaagttgcgtcggagacgcgggaagttgttgttataaggagggagttttgggaagtcggaggataggaggagacgggagtttaggggtagacgagtggagttcgaggaggtagggtggagggagagttaaggcgttt

SEQ ID NO: 416 - DNA, 2501 bp, Artificial Sequence
  chemically treated genomic DNA (Homo sapiens)
tttttgaaaattgttaataaaaattcgttggttttacggtttagggggtattacggaatttgcggatatgtgatgttttttttggatattcggttttaaaatgttttttttttgtattttttttttttattttttaggttagtcgatatttagggaaaataggaaaggatttacgtgaaatattgggggttgaatttttttcgataataagttttttaaaaaagatttttaaatgaaatttttttgttttttaatttttatttttgttttgggggtatatgtgaaggtttgttatataagtaaattcgtgttttcggtgtttgttgtatagaatattttattatttaggtattatgtcgagtatttaatagtttttttttttgtttttttttttttttttattttgtattttggagttaattatagtgtttgttgtttttttgtttgtgttataagtttttattatttagtttttatttataagtgagaatatttagtatttggatttttgtttttgtattagtttgttaaggataatagtttttagttttatttatgttttataaaagatatgatttagttttttttaatggttgtattaaatgaagttttaaagatataatataaatattaattttttttttattataaaaattttttgttgaatttgattatatttaaattaacgagttttgttttatgaaagattttttggataaatttgatagttgatggaataggagaagttgtttgttatgtttaaagttaataagagattaatatttagaataaatggagatttgtaaattaatagaaagtaggtagtaaagttaaagaaaatagtttaaggtatagttattaaaaggaacgtgattatgttttttgtagggatatgggtggagttggaagtcgttagttttagtaaatttatataggaatagaaaattagcgagatcgtatggttttatttataagtgggagttgaataatgagaatatatggttatatggcggcgattaatatatattggtgtttgttgagcggggtgttggggagggagagtattaggaagaatagttaagggatattgggtttaatatttgggtgatgggatgatttgtatagtaaattattatggcgtatatatttatgtaataaatttgtatattttttatatgtattttagaattttaaataaaagttggacggttaggcgtggtggtttacgtttgtaattttagtatttttgggaagtcgaggcgtgtagattatttaaggttaggagttcgagattagttcggttaatatggtgaaatttcgtttttattaaaaatataaaaattagttagatgtggtacgttatttataattttatttattcgggaggttgaagtagaattgtttgaattcgagagcggaggttgtagtgagtcgtcgagatcgcgttattgtattttagtttgggttatagcgtgagattacgttataaaataaaataaaataatataaaataaaataaaataaaataaaataaaataaaataaaataaaataaaataaaaaaataaaataaaataaaataaaataaaataaagtaatttttttttttttaagcggtttttattttttttttttgttttgtgaagcgggtgtgtaagtttcgggatcgtagcggttttagggaattttttttcgcgatgtttcggcgcgttagttcgttgcgtatatttcgttgcggttttttttttgttgtttgtttattttttaggtttcgttgggatttgggaaagagggaaaggttttttcggttagttgcgcggcgatttcggggattttagggcgtttttttgcggtcgacgttcggggtgtagcggtcgtcggggttggggtcggcgggagttcgcgggattttttagaagagcggtcggcgtcgtgatttagtattggggcggagcggggcgggattatttttataaggttcggaggtcgcgaggtttcgttggagtttcgtcgtcgtagttttcgttattagtgagtacgcgcggttcgcgttttcggggatggggtttagagtttttagtatggggttaattcgtagtattaggttcgggttttcggtaggtttttcgtttatttcgagattcgggacgggggtttaggggatttaggacgtttttagtgtcgttagcggtttttagggggttcggagcgtttcggggagggatgggatttcgggggcggggagggggggtagattgcgtttatcgcgttttggtattttttttcgggttttagtaaatttttttttgttcgttgtagtgtcgttttatatcgtggtttattttttagttcgaggtaggagtatgtgtttggtagggaagggaggtaggggttggggttgtagtttatagtttttcgtttattcggagagattcgaatttttttattttttcgtcgtgtggtttttatttcgggttttttttttgtttttcgtttttttcg

SEQ ID NO: 417 - DNA, 2501 bp, Artificial Sequence
  chemically treated genomic DNA (Homo sapiens)
cgggagaggcggggaataggaaggaggttcggggtaaaagttatacgacggagggataagggggttcggattttttcgggtgggcgaggggttgtgggttgtagttttagtttttgttttttttttttgttagatatatgtttttatttcgaattgggaaatagattacggtgtagggcggtattgtagcgaataaagaaaagtttgttggagttcgggggaggatgttaaggcgcggtgagcgtagtttgtttttttttttcgttttcggggttttattttttttcgaggcgtttcgggttttttgaaagtcgttaacggtattggggacgttttgggttttttaggttttcgtttcgggtttcgaggtgggcgaggagtttgtcgggagttcgggtttgatgttgcgggttggttttatgttgggagttttgagttttattttcggggacgcgggtcgcgcgtatttattggtggcgaagattgcggcggcgaaattttagcgaagtttcgcggttttcgagttttataagggtggtttcgtttcgtttcgttttagtgttgagttacggcgtcggtcgtttttttggagggtttcgcggattttcgtcggttttagtttcggcggtcgttgtatttcgggcgtcggtcgtagaggggcgttttggagttttcggagtcgtcgcgtagttggtcggggaagttttttttttttttttaggttttagcggggtttagggagtaaatagatagtaggaagaggatcgtagcgaagtgtgcgtagcgaattggcgcgtcgggatatcgcggggggaaattttttaagatcgttgcgatttcggagtttgtatattcgttttatagggtaggggagaggggtggaggtcgtttagaggaaaggaaattgttttattttattttattttattttattttatttttttattttattttattttattttattttattttattttattttattttattttgtgttattttattttattttatgacgtagttttacgttgtggtttaggttggagtgtagtggcgcgatttcggcggtttattgtaattttcgttttcgggtttaagtaattttgttttagtttttcgagtaggtggaattataggtggcgtgttatatttggttgatttttgtatttttagtagagacggggttttattatgttggtcgggttggtttcgaatttttgattttaggtgatttgtacgtttcggttttttaagagtgttgggattataggcgtgagttattacgtttggtcgtttaatttttatttgaagttttggggtatatgtagaggatgtgtaggtttgttatataggtgtgtgcgttatgatggtttgttgtatagattattttattatttaggtattaagtttagtattttttagttattttttttggtattttttttttttagtatttcgtttaataggtattagtgtgtgttgatcgtcgttatgtgattatgtgtttttattgtttagtttttatttataagtgagattatgcggtttcgttggttttttgtttttgtgtgagtttgttgaggttaacggtttttagttttatttatgtttttgtaaaggatatgattacgttttttttagtggttgtgttttaggttattttttttggttttgttgtttattttttgttgatttgtagatttttatttattttagatattgattttttgttggttttagatatgatagatagttttttttattttattaattgttaagtttgtttaaggagttttttatgaaataaaattcgttaatttaagtgtaattaaatttagtaagggatttttgtggtggggaagaggttggtgtttatgttgtatttttaaaattttatttaatgtagttattaaaaagaattagattatgttttttgtgggatatggatggagttagaggttattatttttagtaaattaatgtaggaatagaaatttaaatattggatgtttttatttgtaagtgggagttaaatgatgagaatttataatataaataaggaaataatagatattgtggttgattttagggtgtaggatgggaggaaggagaggagtagaaaagagaattattgggtattcggtataatatttgggtgatgaaatattttgtataataaatatcgaagatacgagtttatttatgtaataaatttttatatgtatttttaaaatagaaataaaagttaaaaaataaagaaattttatttaaaagttttttttaagagatttattatcgggggaaatttagtttttaatattttacgtgggtttttttttattttttttaagtgtcggttggtttgagaaataaagggaaagagtataaaagagagatattttaaagtcgggtgtttaggggagatattatatgttcgtaggtttcgtgatgttttttgagtcgtaaaattagcgagtttttattagtaatttttaaaga

SEQ ID NO: 418 - DNA, 2327 bp, Artificial Sequence
  chemically treated genomic DNA (Homo sapiens)
ttttttattttttttatcgttatttttgttttcgggttattgtttttttttgtaagttttgttcgttggatttcgttgtttttgcgcggtcgttttattatttacgtttgattggaggaaataaaattggcgttggttttttaattttaagtttcgtgtttgattgggggaggggttatttaggtatttttttttttaaatagaagaaatttaggtattaattgtaaatatttcgttgttttttttgaaagtatgtattatattagtcgaggttttggagatatacggtttattatttatttttagtttttaggtaaagaattttatggagatttattagtaaaattagattttttaagggaaattattaggacgtttttagattttttttaagggatattattggttgtcgattatatttgagtatatttttttttagtttatttttattattttattttgggattattttaaggaaattagttatttgtagaaagtttgaaatttcgaaaggagaggtataatttagggtaaaagagatcgagtgaagttttttagattgattgtttttattggggttattttttataaggtcgggagtggagaggagtgtttgtagaagagagattatttttaaaggggttttttcgaatttaggaggtgagggggattttttagagttgttattatttgtaggtggatttgttattattatgtagtgttttttggggagttagtttgttttttttagagttttttttaggtattgttttagagtttaggggagtttttagcgtttttttcgtttgttttgagggtattgtatgtataaaagtttttttacgcgcgcgcgtatatatagatatttagcgggtttggagtgtatttttgtttatttgttattacgtggtaaattttagatttggaagttattattatgcgggcgcgtattaggatttaggggagattgtgtggggttgggattgcgtataaatataggggtcgtacggaagttttgtatattttaaagtgtaatttgagttttcgcggttttagttttatttaaaatatgtaaatttttgaaattgaaaaatttgaaaaattttcgaagagttttatttgaataaatttaaatttattgggagtcgttttgaggagataaaacgtatagcgatttggggtgagggatatttgtggggaggtaggacgtgttggattgggtttttagggttaaggtgtttttgggttttcgacgatagttttagcgtagagtagggaagtggtatcgttaggtagtaagtttagttgttttatttttgtgatttatgagttagttttgaggttttggttttagggtttagtttttatttatgtcgcgtttttgagagtttaatattgtgtttggtatatggtaggtgtttattgaatagtcgtggtatgaatgaatgaacgaatgaatgaatgaatgaatgaatgaatataagtttaatgggggaaattcgggttttttaataaaggtaggggttgggggatatttaggggtttttttaggaggatttttttttttattattttatttttgggagaaaggtttacgtaggatggtcgttttttttttgttgagagttttgtttttagtttatttgggtcgttggaaaagaggagaagaataaataagagataagtaattatttttttatcggcgtttcgtttttgtttttattgttaaatttattttaaagtcgaggatggtgagattgtgaagttgtaaagaaatatagagtttatttttttaaagaattacgatatatttaaagtttgttttttttaggtttttttttttggtttttgttttttttttttttcggttttttgtttttgattgaattttatgggatagagaattttttgttttttacgaggtaaggcgcgaattcgtagagatttggggtgttttttggttttttgcgttgttttggaggcgtttatagaggtttttgtcgttaaggatagtaattgttttattttcgatggttgttcgttaggtttgcgggtcgcgggtttatttagtcgtcgaattttttagtcgttattagcgttgtttttaatttaatggaataatgtaaattatagtttgtttagttgatacgtttttgcgaatgcgtcggggttgagttttggttagtcgttttttcgacgttttggacggtcggagggaatgaagttttgaattgtgataaaagtggggggggggtattttaaatttttaaagtaatgtttttttttttttttttttttttaagtaattgagttttattaaatgtcgg

SEQ ID NO: 419 - DNA, 2327 bp, Artificial Sequence
  chemically treated genomic DNA (Homo sapiens)
tcgatatttggtaaggtttaattgtttaagaaaaaagaaaaaaaaaagaatattgttttgagaatttggggtgttttttttttatttttgttataatttagagttttatttttttcggtcgtttaggacgtcgagagagcggttggttagagtttagtttcggcgtattcgtagggacgtgttagttgggtaggttataatttgtattattttattaagttaggagtagcgttgataacgattggaaagttcgacggttgggtgggttcgcgattcgtaggtttggcgagtaattatcgaaaataaaataattgttgtttttggcggtaaaggtttttatggacgtttttagggtagcgtagggaattaaagggtattttagatttttgcgggttcgcgttttgtttcgtgggggataggaggttttttgttttatgaggtttagttaaggataaggagtcgggaggggaaaggggtaggagttaaggagagaaatttgaaagaggtaaattttaaatatatcgtaattttttaagggggtgggttttgtgtttttttgtaattttatagttttattattttcggttttggagtggatttggtagtgaggataaggacggaacgtcggtaggggagtagttgtttgttttttgtttatttttttttttttttttagcggtttagataggttgaaggtaaaatttttagtaagggggaagcgattattttgcgtggattttttttttaggggtgggatgatgaaaaaagaaatttttttggggaagtttttaggtattttttagtttttatttttattaggaggttcgggttttttttattaaatttatatttatttatttatttatttatttattcgtttatttatttatattacgattatttagtgagtatttattatgtgttagatatagtattagatttttaaaaacgcggtataaatggaaattaggttttgaagttagagttttaggattggtttatgggttataaaagtagagtaattgagtttgttgtttagcggtgttatttttttgttttgcgttaaggttatcgtcgaaggtttagagatattttgattttggaaatttaatttagtacgttttgtttttttataaatattttttattttaaatcgttgtgcgttttgtttttttaaagcgatttttaatggatttggatttatttagatagaatttttcggaagttttttagattttttaattttaagaatttgtatgttttaagtgaagttgaaatcgcgaaggtttaggttatattttaaaatatgtaaggttttcgtgcggtttttgtgtttgtgcgtagttttaattttatatagttttttttggattttgatgcgcgttcgtatagtgatgatttttaaatttggggtttattacgtggtgataaataaataggggtatattttaaattcgttggatgtttatgtgtgcgcgcgcgcgtgaaggagtttttgtatatgtaatatttttagggtaaacggagaaagcgttaaaggtttttttgaattttgggatagtatttgagggggattttggggagaataggttggttttttaggagatattatatagtgatgataaatttatttataggtggtgataattttaggaagttttttttattttttgagttcgggagagtttttttaaaggtagttttttttttgtagatatttttttttattttcgattttatgaaaagtggttttagtggagataattaatttgaaaagttttattcggttttttttattttaggttgtgttttttttttcgggattttaagttttttgtaaatggttaatttttttagggtgattttaaaataaaatggtaggggtgggttagagaagagtgtgtttaagtgtaatcgataattagtaatattttttgaagagagtttgaagacgttttggtaattttttttaagaaatttggttttattggtggatttttatagaattttttgtttagaggttggaaatgagtaataggtcgtgtgtttttaaggtttcggttaatatgatatatatttttaagaagagtaacggggtgtttataattagtatttaaattttttttgtttgaaaaaaaaaatatttaaataattttttttttaattaagtacgaagtttggaattaaaaagttaacgttaattttattttttttagttaagcgtgagtgatggggcggtcgcgtaagggtaacggagtttagcggataaagtttgtagagaggggtagtggttcggaggtaagggtggcggtggggggggtgggggg

SEQ ID NO: 420 - DNA, 2280 bp, Artificial Sequence
  chemically treated genomic DNA (Homo sapiens)
attagtatagaattgttattataggattgtagtttaagtattagagtgatattaattggttatgtttaattgttttaaaattattttttaaataattatattgatattataatagaaattatgggtatttattttatatttagatggaaggtattattggatatgtattaaaaaaaagattttttgaaaaaaataaaataaaataaaatattattattaaaataaaagaatttaaaataatttttaaaaattttttttaataaaatatattgttaatttataaaatggattgatgattagttatgtaaatgttttaaataaaatttttatattttttttatagttaatttatgttttgaattgtttattgattataaataatggtgaaatggtattttttgattatattgtattttgtttatagaaagtttgatatgatggaatttattaggtaagagggtgggtgttgtgaatgagatgttgtttttagttgtgggggtgggtagagtttttggagtgtgtggattttatgtgagttatgtagtattttttgttttttgttagaagttaaagttatttatttataatatatttatgtttttgtgtaattgtttatttttgtgtagttaatagggagttattatggggttaatttataggggaaaaatagatatttatttttttatatagatgtggatatatgtatatatgtatagaattgtggtatttaattttataggttttggggttgagggtgagggtattgttagtttttttagtagggttgtgttgggttttttgttaaaaggggtttttagtaaagagtgagttggttgtgtttttttagttttttatagtttgttttttgttttaaggagggagttaagtaaggggttaggtttttttggttgtgtgagtttatagttatttatttatttatgtttatttaggttgatggtgtggggatttgggtatatgtttttttagtttttggggtgtttgtggtggggaaggatgtattgttttttttttgtttttttttattggggttggggttttagtttgagagtgagtgagagttatagttatatattttgtgggttttatttgtgttgtaaggtttattgtgttagtaggaagagttatagattgtttgtagggaattaattttggatgtggaggagttggtattttgttttttggattgtttttggttttttaggataaatatgagtatgtttattatggtgaaggtggaggtgataaatattagtagtagttttgggattaatattgagatggatattttgttggtgtttaggtaggagttggagtgtgttttggtttttgttaatttagtgttgtttttattgtgtgaagttaatgtgggtgagattttagtgtatagttgagggtagattttgttattggagaggagtatgaaattttttttaaagaagtttattggtgttttatatttgaggttgtttattagtattttggaatttaagtgttttgtttattgtttgaaaggtataattgtgtaggagtatttttaggggtttttgtggaggtttatttggatgatggaggttaattggtttagtatttttgttattgggaggtatatgaagtaattgttgtgtaggttgagtttagagagtgagattttagtgaatatgtttataggtagggattttagtaggttgttgttgagaatgaggatttttagtttgggtatggtattgaaagtgtttgggaggatgagttggatagtgttgtattttatgtttaggtattttaggttttgtagttttgtgaattttttttgggatagtgtgtttaggtaattgttatttatgtatagttatttgaggtttaaaaggtttttgaaagtgttgttttttatagtagtgatgttattgttgtttagatttaatagaatgaggtttttgtaatttataaagtgtgatttttggatgttgtggattttgttattttgtaggaaaagtttttgtatgttagagagtttgggttttaaattagttaagttgtttatgtttttgttgttgtagtttatttttaaatttgattttgggatgtggttgtagttgtagtttttagggtagggtaaattgttagttaagggtttgtttttggagttatttgttgttattgttgttgtgggtttgattttgatttgttagttgtttgggatttttgtatttttgtttggagtagattttggtgtggtatgatttttttgtttatttgttttga

SEQ ID NO: 421 - DNA, 2280 bp, Artificial Sequence
  chemically treated genomic DNA (Homo sapiens)
ttaagataaatgggtaagaggattatgttatattagggtttgttttaaatggaggtataaagattttaggtaattggtagattaaaattagatttatagtagtgatagtgatgggtagttttaggaataaatttttagttaatagtttattttgttttgggggttgtagttgtgattatattttagggttgggtttaaagatgaattgtaataataggaatgtgagtagtttggttgatttgaagtttaagttttttaatgtgtaggagttttttttatgagataataagatttatagtatttgaaaattgtattttgtggattataagaattttattttgttggatttgggtaataataatattgttattgtagagaataatatttttaagaattttttggattttaggtggttatatatggatagtaattatttggatatgttgttttgggagaaatttgtggggttgtaaaatttagagtatttgaatgtggagtataatgttatttagtttatttttttgggtatttttaatgttatgtttaaattgaggatttttatttttaataataatttgttgaggtttttgtttgtggatgtgtttgttggggttttgttttttaaatttagtttgtataataattattttatgtattttttggtggtaggggtgttggattagttaatttttattatttagatagatttttatggaaatttttgggagtgtttttgtataattgtgttttttaagtagtgggtagaatgtttgggttttgaagtgttgatgagtgattttaagtgtgagatgttggtgaatttttttagaaaggattttatgtttttttttaatgatgagatttgtttttagttgtatgttaggattttgtttatgttaattttgtatagtaaaaatagtattgggttggtggagattgggatgtattttaatttttatttagatattagtagggtgtttattttggtgttggttttgggattgttgttggtgtttgttatttttgtttttattgtggtgggtatgtttgtgtttattttgaggaattgaaagtggtttaagagatgagatgttaatttttttgtgtttgagattaattttttatagatagtttgtgattttttttattggtataatgggttttataatgtagatggggtttatagagtgtatgattgtggtttttatttgtttttagattaagattttaattttaataggggagggtagagggaaggtgatatatttttttttattgtaggtattttgggggttggaggggtgtgtatttaaatttttgtgttattagtttggatgggtataagtagataaataattgtgagtttgtataattgaaagggtttgattttttatttagttttttttttgaaataaagagtagattgtggagagttgggagagtgtagttagtttgttttttgttgagagttttttttgatagaaagtttagtatgattttgttggaagaattgatagtgtttttgtttttggttttggggtttgtggggttggatgttgtggttttatatatatatatatatatttatatttatatagagagatagatatttattttttttttgtggattagttttgtgatggttttttgttggttatgtagggatgggtagttgtatgaaggtatgaatgtattgtaaataagtaattttgatttttgataaaaaataaaaagtgttgtatggtttgtatggaatttatgtgttttagggattttgtttgtttttgtgattggagatggtattttgtttatagtatttatttttttatttgataagttttattgtattaaattttttataaataaaatatagtataattagaaagtgttattttgttattatttgtgattggtaggtagtttagagtataagttaattgtgaaaaaaatgtaaaggttttatttaggatatttgtatggttagttattagtttattttatgagttaataatgtattttgttgagggaagtttttaggggttgttttgggtttttttattttgatggtgatgttttattttattttattttttttagggggttttttttttaatatatatttaataatgttttttatttgaatgtaaaataagtatttatgatttttattatagtattagtgtaattatttaaaaaatgattttgaggtagttaagtatgattaattaatgttattttagtgtttaggttgtgattttatggtagtaattttgtgttggt

SEQ ID NO: 422 - DNA, 2477 bp, Artificial Sequence
  chemically treated genomic DNA (Homo sapiens)
tggtatagatatggtttttaaagttaaaaattatgatggagtgaaggatagttgtgtttagatttgtgttttgttttttggaggttgttgtggttttggggatgagttggaggtgggtaggtagtggtttttggggtttgtagtagggaggttattatttgtatagtagaatatagtattattttatagggagtattttggggtgggtagtaattttggaggtatttttgggaaggagttaggtatgggggaggtggaggtgattttagaagtagaggagttgttggggagttatggttttttgggtgtggagttgtggaggatgagtgttattttttttttttgggttttttattttgtagggatttttatgtttaggattatttgattgttaaggttttggtatttttgttaggttagttgggggttaaggtttttaattttgaggattggggttgttaatatgggtagtagtataggaggttgagaggaggtttataagggttgtattttttttttggttgtagtttattttttagagtagggtgggtgtggagttatttttattagtattgttggttttgagggtttggtgggtagtgttgtttggtgtgggggatagtttttgagtaggttgttgtatttttggtattttggtttttttgggatttttaggtggtttatgtttggtagtgtttgttttttgggtttttagggtttgtttttgttgtagtttttgtagtgggagtattgttgagtattgtttttgggagaggatgattttaggttttatagttaagttgttttgaggttaagtgttttggggtttagggagttttagtagtagttttgtatggttaggtttgggttatggtgttgtttagtggtttttgtgtggttagtatttgaatggttgtttgtttggtttggtgtgttttttttttttgggttttttttttggttgtttttttttgttggtgtaggtttaagagggtttttttgtttgattgttgttgttgtttttgttaaagaagttggtgttatgtggtgtttatatttggaagatggaatttagatttagattagaggtttttttataatgttttggagttttttagagtttgtggaattttagggttagtagggaaagtgaaattttattaggattttgaatttgttatttttttgttttatagaggatgagttttatgttgtaggtggttaatagttttggtgtgggggagatagttttgtttttatagaatgtttttttgagattttttagtttgggatggatttagtaggtgttttttgatatttaggttttgaggattgttagtgaggattattttgattgtttgtggggatttagggttaagaaggatgttgtatttagagatggggtttatgagtaattttaggttttgattttatttgttttagaaatttaaatttttgggattttgggttagattttttgggggagtatggagtgattgagatgtttatattgattttttgtttggtttgaagtaagtgttttaggtgggtagtttttgttttgtgttgttgtatttggtgttggtattagtgttggatggtgatagtggtttggtttatttggtggataaatttgtttggagagtaggatttagggttaagataggattagtgttttggtaggatttagttggttgttggtggaaggttgagttggggaagagagaagttggtggttgtatttaagtagttttttttataaggtaggattagtttatttggattatttttatatggtaggattagttgtttggattagttttattaaaatttaaaattttttttttgggaaggtgtttaggggagaggaaatgtttatttatgtaggtttgtgtggttttatttataattgttaggaagtgggaagagtttaaatgtttatgatttggttatagtgtgaatattggatggtgggattttatttataggtaataggtttgggatttaggttagtgtagattataggttgtggttttatagagagggtggttggaataggtagggttatgagggaatagattggtggttgttggtatttgggtggggaaggagtttgagggaagtttggtggtgttgggttgtttttttattttggtttgttgtgtttatagatagtattatatattttggtggaattttatggaattgtatatttataatgggtattttttattgtatataaattatattaagtaaaattgattaagtaaaaaaaaaaatgttttattttggtttttgggattatgtgtggatttttttagtaaaggtattaatagagaatttagaatgtgtgagttttagtttgggagtagtttgttttgggtagaattggggggttttaaggggttgtgggtttttggtttttttttttttgtgttatttattgtgtttataggtttggtttttttagttttaat

SEQ ID NO: 423 - DNA, 2477 bp, Artificial Sequence
  chemically treated genomic DNA (Homo sapiens)
gttagggttagggagattaggtttgtagatgtggtgggtggtatgagggaagggggattagaagtttgtaattttttgaagttttttagttttgtttggggtagattgtttttgagttagggtttatatgttttgggttttttgttagtgtttttgttgagagaatttatatatggttttgagagttaaggtgaagtatttttttttttgtttaattagttttatttagtataatttgtatataatagaaggtgtttattgtaagtgtgtagttttatgagattttattagggtgtatagtgttgtttgtggatatagtagattaagataaggaaatggtttagtattattaggttttttttgagttttttttttgtttagatgttagtagttattagtttgtttttttatagttttgtttgttttgattattttttttgtggagttatggtttgtggtttgtattggtttgagttttgggtttgttgtttgtgggtagggttttgttatttagtatttatgttgtagttaggttatgggtatttgaattttttttattttttggtaattgtaaataaggttatataggtttgtgtgggtaggtgtttttttttttttgggtatttttttaggaagaaggttttgggttttagtggagttggtttaggtggttggttttgttatgtgaaaatggtttaggtgggttggttttgttttgtgaaaagggttatttgagtgtagttgttggttttttttttttttggtttgattttttattagtagttagttgggttttgttggggtgttggttttgttttggttttgagttttgttttttgggtaggtttatttattaggtgaattaggttattgttattatttagtgttggtattggtattaggtgtagtggtgtggagtaggagttgtttgtttggagtatttgttttaggttaagtgggaggttagtgtgggtgttttagttattttatgtttttttggggggtttggtttagaattttaggggtttgagtttttgggataggtggaattaaagtttaggattgtttgtgggttttgtttttgggtgtagtattttttttgattttgggtttttgtggatagttagggtggtttttattggtggtttttagggtttgggtgttaggaaatgtttgttgggtttattttaggttggagagttttaggaggatgttttgtgggggtagagttgttttttttatgttagaattgttggttatttgtgatgtagggtttattttttgtagagtagagaaatggtaggtttaaggttttggtggggttttattttttttgttggttttgagattttatgaattttaggggattttagggtgttgtggggaaatttttggtttgggtttggattttgttttttagatgtaaatgttatatggtattggtttttttggtaggagtagtggtagtggttaggtgaggggatttttttggatttgtattagtagaaagaggtagttaggaggaaggtttgggaggagaaggtatgttaagttaggtgagtagttatttaggtgttgattgtgtagggattattgagtagtattgtggtttaggtttgattgtgtggggttgttgttggggttttttgggttttgggatatttagttttagggtagtttggttgtggagtttggggttgtttttttttagggatagtgtttagtgatgtttttattgtaggagttgtaatagaaatgagttttgagagtttagaaggtgagtattgttgagtgtgggttatttgagaattttagggagattagagtgttaggaatgtggtagtttgtttaggagttgttttttatattaggtggtattgtttattaggtttttaaggttaataatattggtgagagtggttttatgtttgttttgttttggggggtggattgtagttaggaaggaagtgtagtttttgtggatttttttttggttttttgtgttgttgtttatgttggtggttttagtttttggagttaggggttttggtttttagttgatttgatgagggtgttgagattttgataattaaatggttttggatgtagggatttttatagagtagaaggtttggaagggaggggtggtatttattttttatagttttatatttagaaggttgtggttttttagtggtttttttgtttttggggttgtttttgttttttttatgtttggtttttttttgggggtgtttttagagttgttgtttgttttgggatgttttttgtggaatggtgttgtgttttgttgtgtaggtggtggtttttttgttgtaggttttggagattgttgtttgtttatttttgatttatttttagaattatagtagtttttagaggataggatgtaggtttgagtatagttgttttttattttattatggtttttggttttaagggttatgtttgtgtta

SEQ ID NO: 424 - DNA, 3685 bp, Artificial Sequence
  chemically treated genomic DNA (Homo sapiens)
taagtttttttttttggtgtataggtatgtagttataggttaagttgtgatgtgagttttgtgtgtgggatttttgtaaaaggtttgtttgatgtgttgggtgggaattgagtttgggttaattgtttggaaggtaattatgtttattattatattattaatgttgtatggtgtgggtagttttgttgtgttggtttggggtttttattagtgtgttgttgatgtttggggtaggttggttttgatgtttggtttgtttgtttgtttgtagttttgtgttgttgtggtttttttaaaggttgttttgtgttttattggtgtaaggttagtgtggttgatttgttatgtttgtttgtttttgggggtgtttttgtttatttgttgttttgggtttttagagtttttttttaataggtgtttgggggggaaatggttggtgttggtagggtttttatttttatgttttttattgggtgtagggttttgtgtgttgtagaaagttttttttgataattattttgagttggtagtttgttgggtgttgtgtagggttagaggaggttttttggttgttgttattaagttgtggatgagaagaaaagataggaggttaaggaggtttagaaggttaaagggttaggtaggttaggtttgagatggtattttgtgattagttggagggtggaggaaggagaaggagggtttataggttgggtttgaggtggtggtttaaaaagtatggttgtttttttgttggggaattgaattttggttttttgtgtgataggtggggatatttattattatattaatgaggatgatggtgatggttgttgggatgttagattttattttgattgtggatgtttagttttgttttgatttttttttttgatggtaggggttgggtgtgtgtttgttttttatttgttgtttgttgtttgttatttgttatatgttatttgttatttgttatttgttttttgttattgttggtatgatttattttgatatttaataaagtattttgtgattttgttgggatttggagttggagttggattttgataggtattggagtggtgtggaatttttttgtgtgttttgtttgttgtttttaatgtggggattgtgttggggtaggaggaggtgtgggtgaaatagttaggttgttgtttttaggatgtggtgggtgtatgttttgtggggtttggtgagtggaggtgtgggggttggggtgtgtgttggtggtggttggtttgatgtggattttttgggtttggggtggggatgtgggggtgtttatgttaatgttagttggttttgtttatttggtgtttgttttttttgtgtggtttgttggttgtgtattgaatttagataggtgttggttaagggtgtaggtgtttgtgttgggttttagttatgttagtggtgaagtgttttggtgtgttgttaggatggttgagtggtttaaggtgttgtgtttaggttgtagttttttttggaggtgtgggtttgaattttatttttgataagttgattttttggtttgtttgttggagggtaatgtttatggtaattttggagtatttttggttgttttttgttttgagtttttgtttgttttttagattttagtttttttgaagtaagtttttaaaatgttgttgttttttaggtatgtttgttttttttgtttatttgttggttgttgtagaaatagtttaggattatgtgttagtgtttgtgattttttattaattgttttttggatagatgttttttttattattttatatgtttttttttttggttttatatatagtgagtgattgtgattattttttatgtttttttttgtttattttttttgtttgttttttttttatttgtttaaatagatatagtttagattttttttttatttttttttttttttttttttttttattggtttttgtttattgtttattgttttgaattgttgttgtgttgtttagaggtgttttggtttgaatagtttgtttggttttattttttaatttttgattgttgagtagtagtgagtgatttgtttgtggagttgtatatatgttttttattagaggtatgttatttaatattttgtttttttttttgattttttggattttggttgtgtattttattttgttgatattttagttaggttgttgattttattttgttatttgtgttttttttttgttaatatttgtttgttggtttatttgtagtttggatgtttgttggttagaggtagtgggaattttgtatatagttgggtaggtgagtttaaatttggaaagatagtttaagaggaattatgagtggaagttttagatttttgttatttgtttataaatgtttggttttgttgggattagttttgtgttatagtgtatttttatgtgggaagttgtggtttgggttgttttagttatatttagtgtgttttttttagggttagttagttgtggttttgttgaagtgtttttttgttttttttttgtgttttagtttttttattagtttagggggttggattttaagtgtgagttggtggtgtgggttagagtgtaggagtgaggtgtttatggatttggtttgtgtttttgagttgtatgttatggttgtgagatttgttttttattgttgtttttgtttgttgatatatttattttgttttttatttgttggtgatataagtgagaaggttggttttatggtggtgaaaaaaaaaaatattatatgaaagaaagaaagaaagaaagaaagaaagaaagaaagaaagaaagaaagaaagaaagatagaaagaaataataaaaataaaatataaaaattttgggtttgtgttggggatttgtgtttagtaaggtttgttatagtaaatttgtttatatgggtatttgggtgtgggttatggttggttttttttttggagattttggtgggtagttttttgattttgggtggtagagaaagtgtaagatgggatgagttggtttttttttttttgttttttttttgtgttttgttttaggttttttgatgtgatgagagtttttttttttgtttgttttattgggttagttttttgtggatgttgtaataggatggaggtttatggtaggtggtgattagtgaatggtggttggtggtgagttttgttgtgttagtttttgttggtgtttgttattggtgtatgggtggtttagtggtagaatttttgtttgttatgtgggaggtttgggtttgatttttggtttatgtagtatgtttttttattttggtgttgtagtagtattaaggtgtagttgtgtttgtttttgttgtttttttatatttggggtgtgtgagtgagtttggtattggttgtgtttttatgtgtgatggttttttgtttttttttttgtgttttttttgattgatttagggatgagtttattttttgtatttatatattttggtgataataatttttttagatatgagagtgtgttagatattagaatttggtagttttttggttttgtttttttttattgttttgttattgtttttgtttgatgtattttattttatggaatattgttaggtattatgggtttgtagttatttgtattattttttttttttatattttattgttttgtttttttt

SEQ ID NO: 425 - DNA, 3685 bp, Artificial Sequence
  chemically treated genomic DNA (Homo sapiens)
gagagaggtgaggtggtgaaatgtgaagagaaggggtggtgtgagtggttgtaagtttgtggtgtttggtggtgttttgtgaagtgaaatgtgttgggtagaggtggtggtagggtaatgaagagaaataggattaggaggttgttaagttttggtgtttggtgtgtttttgtgtttggaggggttgttgttattaaggtgtgtgggtgtggggggtaggtttatttttaagttagttgagagaggtatggaagaaagggtagagggttgttgtgtgtgggagtgtagttggtgttggatttgtttgtgtgttttgagtgtaaggaggtggtagaggtgagtgtagttatgttttggtgttgttgtagtattaaaatgggagggtgtgttgtatgggttgggaattgaatttgggttttttgtgtggtaggtgagaattttattattgaattatttatgtattgatggtaaatgttaatggaagttggtatagtggaatttgttattagttgttgtttattggttattgtttgttgtgggtttttgttttattgtagtgtttatgagaggttggtttgatggggtgagtagaaggggaggtttttgttatgttgagggatttgaggtggggtgtggagggagagtggagggagagaggttgatttgttttattttgtgttttttttgttgtttagggttgagagattgtttgttggggtttttaggggaaggattggttgtggtttgtgtttgaatgtttgtgtgggtagatttgttgtggtgggttttgttgagtgtggatttttggtatagatttagagtttttgtgttttgtttttgttgtttttttttgttttttttttttttttttttttttttttttttttttttttttttttttttttttttttgtgtggtgttttttttttttattattgtggggttagtttttttatttgtgttattagtaggtgagaggtgggatgggtgtgttagtgagtgggggtggtgatggggaatgggttttgtagttgtggtgtgtggtttagaaatgtagattaggtttgtgggtgttttgtttttgtgttttgatttatgttattggtttgtatttggggtttggttttttgggttggtagggaggttggagtgtgagaaaggagtggaggagtgttttggtagagttgtagttggttgattttggagaaggtgtgttgggtgtggttgggatggtttaggttgtggttttttgtgtggggatgtgttgtggtgtagagttggttttggtggggttaggtgtttgtgggtgggtgatggggatttagggtttttgtttgtgattttttttgggttgtttttttgggtttggatttgtttgtttggttgtgtgtagggtttttgttgtttttggttggtaggtgtttgggttgtaggtgggttggtaggtaggtgttagtgggaagggagtataggtagtgaggtgggattggtgatttggttagggtgttggtagaatggaatgtgtggttggggtttgaggggttggaggaaaggataggatgttggatggtgtgtttttggtgggagatgtgtgtgtggttttatgagtgagttgtttgttgttgtttagtggttagaagttggagggtgaaattgggtgggttgtttaggttaggatgtttttgggtagtgtagtggtgatttaaggtggtgggtggtgggtggaggttggtgggaggaaggagggaaaaggaggaataggggaagaatttgggttgtgtttgtttgggtgagtgaggagaaggtgggtggaggagataggtagggaagagtgtggaaggtggttgtggttgtttgttgtgtgtggggttagggaagagggtgtgtgaggtggtggggagggtgtttgtttgaagggtaattggtagagggttgtgggtgttggtgtatggttttgggttgtttttgtgatagttggtgggtgggtaggaagaatggatgtgtttgagaagtggtggtgttttggaggtttgttttaagggggttggagtttggagagtgggtaagggtttaaggtaggaagtggttaaaggtgttttagggttgttatgggtgttgttttttggtgggtgggttaaaaggttggtttgttaggagtgggatttgaatttatgtttttaggggagattgtgatttgaatgtagtgttttagattgtttggttattttgatggtgtgttggggtgttttgttgttggtatggttgggatttggtgtgaatgtttgtgtttttggttggtgtttgtttgggtttggtgtgtaattgatggattgtgtggggggagtgggtgttaagtgaatggagttggttggtgttggtgtggatgtttttgtgtttttattttggatttaaagggtttgtgttgggttggttgttgttggtgtatgttttagtttttgtgtttttgtttgttgaattttgtagggtgtgtgtttattgtgttttaggagtagtggtttgattgttttgtttgtgtttttttttgttttggtgtgatttttgtgttggagatagtaggtagggtgtgtggggaggttttatgttgttttggtatttgttggggtttggttttggttttgggttttagtgggattgtagggtgttttgttgggtgttggggtaggttgtgttaatggtggtggggggtgggtggtaggtgatgggtggtgtgtggtgggtggtgggtggtgggtggtgggtggaaggtgagtatgtgtttggtttttgttgttgggggaggggattaaggtagggttaggtgtttgtggttggagtggggtttggtgttttggtgattgttgttgttgtttttgttagtatagtggtgagtatttttgtttgttatgtgggagattggggtttgattttttgatggggaggtagttgtgttttttgggttgttgttttggatttagtttgtgggtttttttttttttttttttgttttttagttagttgtagggtgttattttgggtttggtttgtttggttttttggttttttgggtttttttggttttttgttttttttttttgtttgtggtttggtagtggtagttgggaggttttttttggttttgtatggtgtttaatgagttgttggtttaaagtggttgttggaagaggttttttgtgatatatggggttttgtgtttggtgggaagtgtaggagtggggattttgttggtgttggttgttttttttttgggtatttgttggggaagggttttgggggtttgaggtggtgagtgagtgagagtgtttttagaggtaggtgggtgtaatgggttagttgtgttggttttgtattggtggggtgtggggtggtttttggagaggttgtggtagtgtggagttgtgggtgggtggatggattgggtgttggggttggtttgttttgggtgttggtggtgtgttggtgggagttttgggttggtgtggtggggttgtttgtgttgtgtggtgttggtggtatagtggtgagtatagttgttttttaagtagttgatttgggtttgatttttgtttaatgtattgggtggattttttgtggagattttgtgtgtggagtttgtgttgtagtttggtttgtggttgtgtgtttgtgtgttggggaaggaggtttg

SEQ ID NO: 426 - DNA, 2407 bp, Artificial Sequence
  chemically treated genomic DNA (Homo sapiens)
taaggtttgggtatttttaggtagtagggataaggtgggttttttttttggttgttaaatttatgttaaagttgagtttagggattggagtttaagaaatttattgtttattttttagtttgattggggatttgtatgtatttttgttgtgttgttttgagttttttaattttttatattttttttttgttatgtatatgtttttatttaggtttgtaaaagttttagttttttttaggggtagggatttgtatgttggtttagggtttggtatgtggggatgttgaaatagggttaggtttggtttttagttgattgttagagttttaaggtttagtaattttttttataaaggttttgttaagaggtgaggaaataagagttgggagaggggtgtggaatggtgggtgggatgaatgattagttttgtgtttttggttagttgtgttgagttaggggtattgtggttgttgtgtggttggaaatttaggaatgggaaggtttggggtttgtttggttttggaggtagttggtgggttgtttttggtggtgttggagtggttagtggtagttgggtatgggtgattgggttgtttgggttgtttttagattgtgatttttgaaaaattttgtgggtggggtgtgtttgtgttgttttttgttggaaggtgtgagttagtgtgtttgattgtgggtgggggtggaaagaggtgtgttttaaagtggtaatagatggtttttttatttaataggattaaaaaatttgtttttatttggttgattgtggaagtagagtaggtgggtggttaatggggatatgatggggggtggagttgaggtttttgaagtggaagtgggttgttgttgaggtggtggtattttttttgaggagtttttttgggtggttgaagaaggagttttttttttggagtgtgttggtggtggtgtttgtggatttaattagttttaggttaggttgagttttgtgggaaagtagtggtaagttagggttttgtagatgtgaggtttaggtagttttgtggtttatagaggttttggtttgtgttttttgggggagttgtgttgtgtggtttgatttagttgaggttttgtagtttgggattttgagttagttttggttgtttgtattgttgtttgtgtgggtgtattgagtttggtttggtgtgggtaatagaagttaggaggtttgtgtttgggttttggtttattttggggggttgtggttatggggtttagtttttagtttaggaagggaaattgagattttgggaggggtaggaatgtttttaaggttatttggaaagttgggtaggatgtgttgttagggggaagatttgggtagggtttttgttttttgttgatgatgttttttttgtgtgtttgtgttgttgttttgttattgtggggtttgtgagtttgttggggtgtgtgggttgtgtggtggggttttttgtaggttgggaggatttgagtatgggtgtgggtttgattgtgggggtgttgaggttgtagtttaaaatttagtagggttttgatttttgggtgtgtttttgggttttggttggtggttggtggaatgtgtgattgtgaggtttgtggtttagttttgtattgtttgggttttttattgttttggtgtgtttatagataggtgtatgaagatttttatgatttgaaatagagttgttagtaaatattgtttttttgtttttgatttattggggaagagggaaaaggatagagtttgggtaagttgttttggtagggattttagtttttgttttttatttgttagtttttatagatgtttataaatttaataatttttgttttgtttttgtattaagtttttgagttagatgtagggttttagttttggagtttggtttagattgtttaattgattggggagattgaggtttagaaaagtgaagtggtttgtttaaggttatatagttagttatttggtagtagatgaggttaagttttatttgtaagatttgggttttgaatttattgattaggagttttgggattattgttaataaaagagatattgaagggaattttttgttatttttttggtgatttgttttttaatggataaggatatattgggtttagttttatttgtgagtttgaggtgaaatagaggtatttgagtagtaagatatattgttggtttttgtattgtttgaatttgagtttttaaaaattttattttaatatattgtttattgatttttttttgaattattatttttgtaaggattttttgtaaatattgtttttttaatttttatgaaattttaatgttatatgtaaattatttttttttatataatgtatgtatatttgtgttttgtatataaaatgagtaagattt

SEQ ID NO: 427 - DNA, 2407 bp, Artificial Sequence
  chemically treated genomic DNA (Homo sapiens)
aaattttatttattttatgtataaagtatagatgtgtatatattatataaaaagaaatagtttatgtatggtattaagattttatgaagattagaaaaataatgtttataaaaggtttttataaaggtagtaatttaagaaaagattaataaatgatgtgttaaagtaagatttttggaagtttaaatttaggtaatataaaagttagtaatatattttgttatttgaatgtttttattttattttaaatttatagataaaattgaatttaatatgtttttgtttattaaaaagtaaattattaagaaagtaataaaagattttttttaatgttttttttattgatagtggttttaaaatttttggttaatgaatttaaaatttaaattttgtaggtaggatttaattttatttgttgttaaatagttggttatgtgattttgggtagattattttatttttttggattttagtttttttagttagttggatagtttaagttaggttttagagttgagattttatgtttggtttaagaatttggtgtagaaatagaatgaagattattaagtttgtgaatgtttatgggaattgataagtgaaagataaaagttgaaatttttattaaaatggtttgtttaagttttattttttttttttttttttgatggattaaaggtggaaaagtggtgtttattagtaattttgttttgggttgtgagaatttttatatatttgtttataggtgtgttagagtggtgaagggtttgagtggtgtagggttgggttgtaagttttatagttgtatgttttattaattattagttggggtttggaagtgtgtttggaaattgaggttttattaagttttagattgtgattttggtgtttttatggttaggtttgtatttgtatttagatttttttgatttataaaaggttttgttatgtggtttatgtattttggtaaatttgtaggttttatgatggtggggtggtggtgtgaatatataaaggaggtgttgttagtggggaataaaaattttgtttgggttttttttttaatagtatattttgtttgattttttaagtgattttgggggtgtttttgttttttttagagttttagtttttttttttaggttaggaattaagttttatggttgtggttttttagggtgagttgagatttagatgtagattttttaatttttgttgtttgtgttaagttgggtttggtgtgtttgtgtggatggtagtgtgagtgattagagttggtttgaggttttgggttgtaaagttttggttgggttaagttgtgtagtgtggtttttttaagaggtgtgggttgaggtttttgtaggttgtgaagttgtttaaattttgtatttgtaaggttttgatttattgttgtttttttgtaaagtttggtttaatttggagttagttaggtttgtaggtgttattgttggtgtattttggagaagaagttttttttttagttgtttaggagagttttttgagaaagatgttgttgttttaatagtaatttatttttgttttggaggttttggttttgttttttattatgtttttattggttgtttgtttattttatttttgtggttggttgggtaaggataaattttttaattttattggataagaaaattatttgttattattttaaaatgtgtttttttttgtttttgtttataattgagtgtattaatttgtattttttggtaagagatggtgtgggtgtgttttgtttgtaaggttttttgggagttatggtttgagggtgatttgggtgatttggttgtttgtgtttggttgttattgattgttttaatgttgttagggatgatttgttagttgtttttggagttgagtaggttttgaatttttttatttttagatttttagttgtataatagttgtggtgtttttggtttgatgtagttggttggaggtgtggagttggttgtttgttttgtttgttgttttgtgttttttttttggtttttgtttttttgttttttaatgaggtttttgtgaggaaggttgttgggttttgggattttgatgattggttggaaattaggtttggttttgttttagtatttttgtgtgttaagttttgggttggtgtgtgggtttttgtttttggaggaagttgggatttttgtaggtttgggtggagatgtgtatataatagaggaagagtgtggaggattggaggatttagggtagtatggtagaggtgtatgtaggtttttggttggattggagaatgggtggtgggttttttgagttttagtttttgagtttgattttgatgtgggtttagtaattaggaaaaaagtttattttgtttttgttgtttgagaatatttagatttta

SEQ ID NO: 428 - DNA, 2229 bp, Artificial Sequence
  chemically treated genomic DNA (Homo sapiens)
tttttttttggtgttggttggtgtgggttggggttaggtggagaagttgttttttgttaaggtgatagaatgtgttgggggtgggggttggggttagggttggtgtaattagggggttgttgtttttttttggatatagtggaagttttttttgtattattaaatttttgttattttttttgagggatttgtttttaggtagtatgtaagttgttgttttgggtttattttgtatttttttattgggtgaggaaggagtattttgaatggagatgggggtgtttttggtttatatatttgtagagaagaggtgtgttgggttgtatttttggaggttgtggtaattgatattagagaagattttggttgtagttgggaaggtttattggttggaaagaggtgttttttttttttagtaaagggttttgtttggaagggttgttttttatttgtttagtggtattataggatggttggtttttatttgaatttttttggatggtattattatatagttgggtttttgtagtgttggttttttaatttgatgattgttattttggtgaggatttgtgttgatggttggagaattttgtgttgtgggtgtatatggttaggtggtgtttggtaggtgatgtttgggtgtaggatggtgtttttattgttttattttaaattgttgtttgggtttaggttttttggttttttgaataggggtttggggggttaaggatgttgaggttttgggggtaggaagttttttttggttaagtgtttttttttttttttggtatatatttttttatttatttattttgtttatttttggggtgagaggtttattaaggtagggtgtgttttttttatgaattattttaaggtttttgagttgtgggggttttgggtaattatttttttttttttttggttttaggtattttagtttaggggtttgtagagaagtttgaagtttggataaatgtgttggatgttaataattttttatttttggtagtagtaaaggttaatatatttttattttttattttagtttgttattaaaataaagttgtgtgtggttgagggtaggaaggtgttgagattgagaagaagggatgttttggagaaagtgtgtttagttgattttagaaattagagttttttgggattttgttgagattttttgtagggtgttttaatttgtttttttattgtgtgttggtgttgtagtgtgtgtggtttagggtttggtgattttggtttagtttggtggttgtggtgaggtttttggtgtagttgtttggaattttgtattagaattgggattgtgtaaatgttttggttgaagtgttattttatttaagaaatattgttgttaggaataaaatggggtttttggtgttttgaagtattttttgaaatttttttaaaataatttataaaaaatgtttttgttttaatgttttataatgtttaaggaaatatgtaaatggtttgtttttttattgagatggttgttttaattaatagtgtatatatatataataatttttttaatttttttttttagagttaagtattttattatatgtaaattataataaagaaaagattgtgtaagattatgtaagttgattgatttaaaatattgagttttaatttaggttttttgtttttttatttaataatttttgtgtttggattagattggtgaagtaggttatggaaattaataaagtaaaaaattaaaagtatttttttttgttatttttttttttaaaattaaataatagttgtttttttttgagtaggttttagttttaggtttgagtttttttgtgattattttatagttatttatagtagttgttgttgtttttgttgggtttttgtttttgttttttttgggttgttttttgtatataaaatatattttagttttttaattaaatttaaatatgattttggtagaatttatatattttgtggtgtatggattgtgttggtgtaggggaaataaatattttttggtatttaattattgagtttaatttgaaaaattgggattgggtttttaggtggtattttaggggttttaatttggtttgtgtttttttagattttggtgttgagagtgttgtttttgtgggtgggtggatggagaggtaataatttgtttttaataaaaatttgttgttattgaattgaaagtgaaagggaagggagaag

SEQ ID NO: 429 - DNA, 2229 bp, Artificial Sequence
  chemically treated genomic DNA (Homo sapiens)
tttttttttttttttttgtttttgatttggtggtgataggtttttgttgaaagtagattgttatttttttgtttatttatttgtaaaagtagtgtttttagtgttaaggtttggggaggtgtgggttaggttggagtttttggggtgttgtttaggggtttagttttgattttttgaattagatttagtggttaaatattagagggtatttattttttttgtattgatataatttatgtattatgaaatgtgtaaattttgttggggttgtatttgaatttagttagagaattggggtgtgttttgtatataagagatgatttaaagaaggtagaaatgaaaatttgatagaagtagtaatagttgttgtgggtgattgtggggtgattgtaggaaaatttgagtttgggattgaagtttgtttaggaaggggtgattgttgtttaattttggagggagggatggtgaaggaagatgtttttaattttttattttgttaatttttatagtttgttttattagtttggtttaaatataaaagttgttaaatagaaaaatagagggtttggattaaaatttaatattttaagttaattgatttgtatgattttgtataattttttttttattataatttatatatagtgaagtgtttagttttgaggaggaaagttggaagaattgttatgtatgtgtatattgttagttaggatgattattttgataaagaaatagattatttatatgtttttttaaatgttgtaaaatgttaaagtaaaaatattttttgtaagttgttttaagaaaattttagaagatattttggagtattggggattttattttgtttttgatagtagtgttttttgaatagggtgatattttagttagggtatttgtgtggttttgattttaatgtgaagttttaagtggttgtgttaggaattttgttgtgattgttgggttaagttggagttattaagttttgagttgtatgtgttgtgatgttggtatgtagtaggaaaatagattaaaatgttttatagaaaattttggtgaagttttggaggattttggtttttaagattagttgggtgtattttttttgggatgttttttttttttggttttagtgtttttttgtttttagttgtgtgtagttttgttttggtggtaaattgaaataagaaatggaaatatattggtttttgttgttgttagggatgagaggttgttgatgtttggtgtgtttgtttgggttttgggtttttttgtagatttttggattggggtgtttgaggttaggagaggagggggatagttgtttggagtttttgtggtttagaggttttgggatgatttatggggggggtgtgttttgttttggtgagttttttgttttgagggtaggtgaggtgggtgggtaggggagtgtatgttggagagaagagagaatgtttaattagagagaattttttgtttttggagttttagtgtttttagttttttaaatttttgtttaggaagttgaaggatttaggtttaggtaatggtttggggtggggtggtaagagtgttgttttgtatttggatgttgtttgttaggtgttatttggttatgtgtgtttgtagtgtagggttttttggttattagtataggtttttattgaggtgatagttattggattgggaaattaatattgtgaggatttggttatgtgatgatattgtttgggggaatttgagtggaagttgattgttttgtggtgttattagataggtgagaagtagtttttttaaatagggttttttgttggaaggaggaggtatttttttttagttagtgagtttttttagttgtaattggggttttttttaatattagttattgtggtttttagaggtgtagtttggtatattttttttttgtagatgtataaattggggatatttttatttttatttaagatgttttttttttatttagtagaggggtgtggagtaaatttgggataataatttgtgtgttgtttggaagtaggttttttagaaaggatgataaaaatttggtgatgtggaagaagtttttattgtgtttaggaaagggtagtggttttttagttgtattggttttggttttggtttttatttttagtatgttttgttattttaataaagagtggtttttttatttgattttaatttgtattagttagtgttgaggaaaga

SEQ ID NO: 430 - DNA, 6887 bp, Artificial Sequence
  chemically treated genomic DNA (Homo sapiens)
tgttgtttgtgggttgttggttggttgtagtttgttggtgatgagggtattatagttgttttgattgtgtagattatgtatgttttggttttgggaatttattatgtattagaatatattagtgtttgtattttaaaaggttaaattattggtttttagttagggatttttggtaagtggtttgttagtgatgagtgtttgtttatattggtatatagtggagttttttgtttttggtttatttgtttttaggaaagttttggggtgaggtgaaggtgattgaagtaatgtttttttttttagattgtagttgtttaggggggatatagtatggtattttttattgaattttttttgtttgtttgtattttagtttttttttttttagtgatttttttatttttttttttttttttttttttgatgtttgattttagtagtaaaggaggtaaaaaaggtattgagttgttagttaaatttgaaaagtgtggttttgttttttttatagttattggtagttttttgtggaaggtttgttttttggggtagttgtggttttggagtggttgtgtttggtgtttgttgggtgtggttttgttttaggtttgggagggtaggttggttgttttggtgagtggtagagtttttttggatagtttttgtttatttaaatagaagatgttggtgttggagtgggtttggatatggtgaggttgtgagttggtttgagtggtggggtttggtgatttttttttttttttttgttttttttttttttttgtatgtatgttttgtttgtttttattttgtttttattttgggtgagtttgtttgtagtttggggtgtatatttgtatgtgtatttttttttatttatttttgtgtttgtttttatttttgtagttgagttttgttatgtgtgttttgtttgtttgttggttgtttttgttgtttttgttgtttttgggttttgatggattgaatgaaggttgtttatattgtttattgatgttttattaaagatttagaaggttgtgttatgaatttggagttgataatggaaagtttgggtattttgtatgggttggttggtggtggtagtggtgggggtggtggtgggggtggtgggggtggtggtgggggtttgggttatgagtaggagttgttggttagttttagtttttattatgtgggttgtggtgttgttggtttgttgtggggttttttgttgtttttaattgtgtattaggagttgggtatggtggtagtggtggtagtggtggtgttgtgtttggttatggttattagtatggttttgattttggatggtggtgattattggtttgagttttttattttgttgtattatgttatgagtatgttttgtgatttgtttttgtttggtatgggtatgagtaatatttatattatgttgatattgttttagttgttgttatttatttttattgtgtttgataagttttattatttttatttgtattattatttgtattattattattattattattattagtgtttgtttggtaatgttagtggtagttttatttttatgtgtgatgagtgtgggtttttggttatgaataatttttatagtttttataaggagatgtttggtatgagttagagtttgtttttgttggttgttatgttgttgggtaatgggttaggtggtttttataatgtgtagtagagtttgtttaattatggtttgttgggttatgataaaatgtttagttttaattttgatgtgtattatattgttatgttgatttgtggtgagtaatatttgttttgtggtttgggtattttatttgtggttatgatgttgtatttgaatggtttgtattatttgggttatatttagttttatgggttggtgttggtatttagttgtgagtggttatttttgtttttattgggtttgtaggtggttatgttgggttagttggaagaaattaatattaaagaggtggtttagtgtattatagtggagttgaagtgttatagtattttttaggtgatttttgtgtagagggtgttgtgttggttttaggggattttttttgatttgttttggaatttaaaattgtggagtaaatttaaatttggtagggagattttttgtaggatgtggaagtggttttaggagtttgagttttagtgtatgtttgttttatgtttggtaggtaaggttggggttagttaggggttaggttgttgggaagagggttttgggtttggtgtttgtggtttaagtttgtgtgttgagttattttttttgatttttttttttttttttttatatatgttttttttttttttgtttttatttttttttttatttttttttttttttttgttttttttttatttttttttttttttttttttttttttttttattttttttttgtttttgagtttttattgattgatttttttttattttatttgttttttttttaatgtgttaatttttgttttatttttgatttttttaggtattgggaggtgggatgggggtgtgtgtttttttttaggagttttgtttttttaagatttatagaaattaggatttgtttttatttaaaattttatgtattttaagttttttttagataatatattttaattttttgggttgattagtttttttgtgtagaggtagttgagaggttttgttttgtagagggaaaagagttttttatttttttatttattatataggtaaatttatttggttattggttgaaggtatagttttgtttttgtggggaattggtggttaggatataatagtgtttttggagtttatttttggttttggtgttggtgtagggattttttgattgggtttgaggggtttgggttagttttaatgttattatttatagtgagggtagggtgtaaggttgagaaggttatatttattgttttgggaggatgtgggagaagagattgaggtggaaagtgttttgttttgtttattggttgtttttgttttggttttagtgtttgttgggatttgttaggatttgttggggttttgggagattttgagtatttgtaggaagaggtgttgagaaattaaaaatttaggttagttaatgtatttttgttgttggttgtaggttttgtttttgtattaagtgggtgttgattgtgtgtgtttggtgattgtggggaggattggtggtttgtgggaggggatgggtagaggtgtgggttatattgttttggagttggtttggttttttgtgttttttttagtggttaagttgtgaggtatagttttttattgttttaggagtatagaaattttttgtgtgggtggtgggtgtgtgagttagagggaaagatgtagtagttattgtgattggtatgtagttgtgtgtttttgtgtgtatggattttgtgtggtgtgtgtggtgattgtgttgtttttaggagtaagttatgggtttagaggggtaaaatgtttaggttttttgttgggaaggatatattatattttatggtaagttagggtgggtgattttttatggattgggtggaggggggtattttttaggattggtgggtggtttaggggaataatttgtggtggtgatgatttgtatagtgtgggttttgggatgtgtgtggttttgagttagttttgtatagtttgtttttggagttgtgagtttaggtttttatttttgattttttgggttttttttgtattgttgagtttagtttgtggggtgtatttgattaatgtttgatagggttggggaatgtgataggtagtaggtttatttgggtttggggagggggagtttttgttttgatagtatttttttttgttgtttgttggtggatttttatttttagttggtaattgttttgtagtgttgatttaagaaggtaaagaaaattaggtttttttgtaaagagttttttttaaattggtggattttggatattttgagtggatttagaaatttatgtaattttttttttttagtttattttttatttttttttatagttttttttgatttgttgttggtttggggtaagataaagtagttagtagagagtgataataatagtggtgggaaatgaattggagattggttgatagtttttaatattttgttatagatttttttgaatgttttaggttgtttttggtgggttttagtatttgttggttttttgggtattggggattagaaggaatttggtagttggttttaggggtatagttaaaggtaggatgatagttatttttttgtttattttagagtgttgttgtttttttatgttggttgtgtaaagaatatagtttttaaaaaatatgtgttttttgtttatataggtttgaaagtgatgaggaaagtaatgttttgtttattagtgagttttagtttttaaaatgattttaagtgttgttgagatgagaaagtgtggtattttgggggtttttagttttatttgtgtttatggtgtaagtttgtagggataggtttgggatagtattgtttatgttgttagattttttgtagaggattgttgaagttgtttttgtgggagatagaatgttttttttagtgagtggaaaaggtttgttgaggattttgttttgtttgagtatttaaatgtgtgtttgttttattattttgggttgaaaagggataagagttttagtttttttatttggttattttattagtaattataagtgtgttgagtggttattattatataggaggttttttagtttggggttagtagattagtttttttagatattgatgtagaagttgggattggtaagtaggtattatgtgtttggagtgttaggggataggagtaaatggagaagaaaagtggaggttttttttgtttggagtattgattggaatttttgttggtatgttgtagagggtttttgttgttgggttttgggggtttaataagtttagttgttttgtaggtggtttggttggatttttagattggtgtttggaagatattgtttttgttttttttttgttaaatttgtttttttttttttttttataggttataggtttttttttttttttattttggttttgtttttgggttttgttaaatagttaagtaggttggggtttagggggtttagaatgaagaggtttgatttggttagtgttggtaaagtttatttttaggtgaggttataatagaggtaggttttttttgtttagtttgttggtgtagttatagttaagggtggtatttgaaaggaaaagggagaaaattttggagaaatttagattgttttaatgttagattttagagaaattgattttaaatgtatggatttgtttggaaagggtggttaagtggtaggtggttgtaattttgtttggttgggtttttgtagaggttttttaagattagtttttgtagggtggtttttagtaatttgataagaggtggttaagataaatttttgtgggtttgagtatatatttttgggtgttgggttttagagatttttaaattaagtataaataagaagggagtgagagaatttaggttagaatttgtatgggtattttattgaggaaaagtgaggttttggtggtaggtatgtttttttttgatgtttgaaaattgagttgagtgtttgattatatttattgtagaggtttttgtttttagtgagtttggattttttagtggtttgtttggagttggtttttagtttttgttgtagtttgatgtatggtttttttttggtagtaagtttttagtggttagtttgaagttaattttgtttaggtggttgagggtttttagttaatttattatgatgttgtttgggttatttgatgtttgtagtggtgggatatggtttgggtagtgtgtagtggtttttgttaggggtattgtgtgtgtgtttgttttttgttgtgttggggatgtttttgggtgatatgggttgttgggtattttttaagttgaggaaatggattttttttgtagagttttgtgtttattttttaattttttattttgttttttgttgttagggtttttgatttagtttattttttttggtggtttagttagggattagagttggagaggttgaatgtaatttgtgttagtatggaatagatgatatgtttgtttgttagttgtttggatgaataattgaaaagtttgttgtagtttgtgttttgttaagttttgggtgttgggagaatatttttttaatatgtattagggtgggtgggagtgggtagaggaggtgggatttgagggaggagagtgaatttgagtaggagaagtagtttaggtagttaggtgtttttgatgtgagaggttgggtatttatttttattttaggttttttattgtgtggttatgttatttttttaaataaatgtgtatatggagggagattgatgttgataatgtttagaagattaaaagagtattaatgttggtaataataatgtaaatgtgtggatttagattttattgatttggaatttgatttggtgtgtttttagtaagtttgatggtgtgttttttttagtagagtgtttattagtgttatggttttgtggttttttagtggtgttgttttgttagttttgtgtgggtttttttgtttgattgtagttttttttttgtgaggttttagtttgttttatttttttgaggtttttttttttttttgtggggttttttgttttttgtatttttttttttgatttttgtattatttgtttttgtgtgtatatattgttatttgtgtttttggtgatttgtttgggtggttgggtttgtgaagttaatgtgttgaatggtgtttg

SEQ ID NO: 431 - DNA, 6887 bp, Artificial Sequence
  chemically treated genomic DNA (Homo sapiens)
tgggtattgtttagtgtattggttttgtggatttagttgtttaggtggattgttggaagtgtaagtagtggtgtgtgtgtataggggtgggtggtgtagaggttgggggagggggtgtagagggtagagagttttgtgagaggaggagaaaattttggggaagtaaggtgggttggggttttgtgggggaggagttgtggttagatgggagaatttgtgtagagttggtgaagtggtattgttggaaaattgtggggttgtggtgttggtgagtgttttgttgggaagagtgtgttgttgggtttattggaaatgtgttggattaagttttagattaatgaaatttgggtttatatgtttatgttattgttgttagtattaatgtttttttaattttttaaatattattagtattgatttttttttatatatatatttgtttgagaaagtgatataattatatagtggaaagtttggaataaaaataaatgtttagttttttgtattgagggtgtttggttgtttgggttgttttttttgtttgggtttattttttttttttgggttttgttttttttgtttgtttttgtttattttgatgtgtgttgggaaggtgtttttttggtatttgggatttgatgaagtatagattgtagtgaattttttaattatttatttaagtagttagtaggtaaatatattgtttgttttgtattggtatgggttgtgtttagtttttttagttttgatttttaattaaattgttaggagaggtgggttgagttgggagttttagtagtgagaaatgaggtgggaggttggggggtgggtgtgagattttgtgaagggggtttgtttttttggtttgggaggtgtttagtggtttgtgttatttaaggatgtttttggtgtagtgggagataagtatgtatgtggtgtttttagtaggagttattgtgtattgtttgggttgtgttttgttgttgtgggtattaggtggtttaggtgatattatggtgggttggttaagggtttttggttgtttgaatagaattggttttagattggttgttgggagtttgttgttaggagagggttgtgtgttggattatggtggggattggagattagttttgggtaggttgttgggggatttgggtttattggaggtggaaatttttgtagtaaatgtagttgggtgtttggtttgatttttgggtgttggaagaaaatatgtttgttattgaggttttgtttttttttagtgggatgtttgtgtaagttttagtttgggtttttttattttttttttgtttgtgtttggtttagaggtttttggggtttaatgtttgagagtgtgtgtttgaatttgtagaaatttgttttggttgttttttgttaggttgttgaaaattgttttgtaagggttggttttggggaatttttgtgaaggtttgattgggtggggttgtaattatttgttatttagttgttttttttgaatgaatttgtgtatttggagttaatttttttgaaatttaatgttggggtaatttaaatttttttgaagtttttttttttttttttttaagtgttatttttggttgtgattatattggtaggttgggtaggaaggatttgtttttgttgtgattttgtttaagggtgagttttgttggtgttggttaaattagatttttttattttgagttttttaaattttggtttgtttggttgtttggtaggatttgggggtggggttaaaatgagagagaaagggaatttataatttatgagagaaagagaagaggtaggtttggtgggaggggggtagggatggtgttttttaggtattggtttgagagtttggttgagttgtttgtggagtggttgggtttgttaaatttttggggtttaatggtgagggttttttgtggtgtattggtggggattttgattgatattttgggtggagaaagtttttgttttttttttttatttgtttttgttttttagtgttttgagtatataatatttatttattagttttagtttttgtattagtgtttgaagagattgatttattgattttaaattgaaaagttttttatgtaataataattatttaatatatttgtagttgttgataaaatggttagataaaaaggttaaagtttttgtttttttttaatttagggtaataaaatagatatatatttgaatgtttgagtaaagtggggtttttagtaggttttttttatttgttggaggaggtattttgttttttatgaaggtagttttagtgattttttgtggaaaatttagtagtgtgggtagtgttgttttgggtttgtttttgtagatttgtattatgggtgtgggtggggttgaggatttttgggatgttatgtttttttattttagtaatgtttgggattattttaaaagttgaaatttgttaataggtgaagtattattttttttattatttttagatttatatgggtagaaggtatgtgttttttaaaagttgtgttttttgtgtgattggtatgagggggtggtagtgttttgagatgagtaggagaatagttgttattttgtttttaattgtatttttaagattagttgttaagttttttttggtttttggtgtttaagaagttggtgggtattaaaatttattagagatagtttgggatatttggggggatttatgataaaatgttaagaattgttagttagtttttagtttattttttgttgttattattattgttttttattggttgttttattttgttttgaattaatagtaaattagagaaaattgtaggagaggatgaaaaataaattaaaggagaaagattatataaatttttaaatttatttaaagtatttggagtttgttgatttgggggaggttttttgtagggaaatttagttttttttatttttttagattaatattgtggggtgattattgattgggaataggaatttattagtagatggtaaaggaaaatgttgttaaagtggaaattttttttttttaagtttgggtgaatttgttgtttgttatattttttagttttgttgggtgttggttgagtgtattttataagttgggtttagtggtgtgaggaaagtttgggggattgggggtggaaatttgagtttgtagttttggaagtgagttgtgtgaggttggtttggaattgtgtgtattttaagatttgtgttatgtaaattattgttattatgaattgtttttttagattgtttgttgattttgaaagatatttttttttatttgatttatgggaagttgtttattttggtttgttatagggtatagtgtgttttttttagtgggggatttggatattttgtttttttgggtttgtggtttgtttttaggggtagtgtagttgttatgtatattgtgtggggtttgtgtgtataaaagtgtgtaattgtgtgttagttgtagtaattattgtatttttttttttagtttgtgtatttgttgtttatataggaggtttttgtgtttttagaataatagagggttgtattttgtagtttggttgttagaggaggtataaagagttgagttggttttagaataatgtaatttgtgtttttatttgtttttttttgtgggttgttagttttttttgtggttgttaggtgtgtataattagtgtttgtttaatgtaaaggtggagtttgtagttggtggtagggatgtattaattaatttgaatttttaattttttagtatttttttttgtgagtgtttagggttttttggagttttggtaaattttggtaaattttagtaaatgttgggattggggtaaggatggttggtgagtaaggtaaagtgttttttattttagtttttttttttatgtttttttaaagtggtgaatgtgatttttttaattttatattttgtttttgttgtaggtagtgatattggagttggtttgagttttttaagtttggttagaaagtttttgtgttaatgttaaggttagagatgggttttaggagtgttgttgtattttggttgttggttttttgtgggggtaaggttgtgtttttagttaatgattaaataagtttgtttatatggtgggtgggagagtagagagtttttttttttttgtagagtaaagttttttaattgtttttgtatagggagattagttagtttggaaaattgaaatgtgttgtttaaaagagatttgaagtgtatggggttttgaataagggtaggttttggtttttgtgggttttggaaagatagggtttttagaggaaaatgtatatttttattttgttttttagtatttgggaagattggaaatagggtaaaggttggtatattgaggggagggtgaatgaaatgggggggggttggttaatgaaagtttagggataaggagagagtaagaaagaaaaagaaaagggagaagggaaagtaggggaagagtggaagagaaagagaaaatggaagaagaaataaaaatgagaagaaagaggatgtgtataggaaagagaaggaaagaattaagagaagtgatttggtgtgtagatttgggttataagtattggatttggagttttttttttagtagtttggtttttggttagttttggttttatttgttaggtgtaaggtggatatgtgttggaatttgggtttttgaagttatttttatattttgtggaaggtttttttgttagatttgagtttattttatggttttggattttggagtaggttggagagagttttttgagattggtatagtattttttgtgtaaagattgtttgggggatattgtagtgttttagttttgttgtgatgtgttgggttatttttttggtgttgattttttttagttggtttgatgtggttatttgtgagtttgatgaggatgagggtggttgtttgtgattgggtgttagtattggtttgtgagattgagtgtggtttgggtggtgtaggttgtttaggtgtgatattatggttgtaggtggggtgtttaggttgtgggataggtgttgtttattgtgggttagtatggtagtgtggtgtgtgttgaagttggggttgagtattttgttgtggtttggtggattgtagttgggtagattttgttgtgtgttgtggaggttgtttagtttgttgtttagtggtgtggtggttagtggggataggttttggtttatgttgggtatttttttgtagggattgtagaggttgtttatggttgggagtttgtgtttgttgtgtatgagggtgaagttgttgttgatgttgttggataggtgttggtggtggtggtggtggtggtggtgtggatggtggtgtgggtgagggtggtggaatttgttagatatggtggagatgggtggtagtggttggagtggtgttagtgtggtgtaggtgttgtttatgtttatgttaggtggagatgagttgtaggatatgtttatggtgtggtgtagtgggatggagagtttgggttggtagttgttgttgtttaggattgaggttatgttggtgattatggttgagtgtgatgttgttgttgttgttgttgttgttgtgtttagtttttggtgtgtggttggaggtggtggagggttttgtagtgagttagtggtgttgtggtttgtgtggtgggggttggggttggttagtagtttttgtttatggtttgggtttttgttgttgtttttgttgtttttgttgttgtttttgttattgttgttgttggttggtttgtgtaaagtgtttagattttttattgttagttttgggtttatggtgtagttttttaggtttttggtgaggtattgataggtggtgtaggtagtttttatttagtttattagggtttgggggtggtgggggtggtgggggtggttggtgggtgggtaaggtgtgtgtggtggggtttggttgtgggagtgggggtgggtgtgggagtgagtggagaggagtgtgtgtgtgggtgtgtgttttgggttgtgggtgggtttgtttggggtgggggtggggtgggggtggatggggtgtgtgtgtgggagaggggaggggatggggagggagggagggattattgggttttgttgtttgggttggtttgtagttttgttatgtttgagtttgttttggtgttgatgttttttgtttgggtgagtgggagttgtttagaagggttttgttgtttgttggggtagttaatttatttttttggatttggggtggggttatgtttgatgggtgttaagtgtaattattttgaggttgtagttgttttgggaggtgggttttttatgggaagttattagtggttgtggagggggtggggttgtattttttaggtttggttgatggtttggtgttttttttattttttttgttattggaattaaatgttaaggagagggagggaggagaaggtgggggggttgttggggagagggaggttggagtgtgagtgagtgagagagatttggtgaaagatgttgtgttgtgttttttttgagtagttgtgatttgggggaaggggtattgttttaattgtttttgttttattttaaagtttttttggaggtgagtaagttgggagtaaaagattttgttatgtgttagtatagataaatatttgttattaataagttatttattgagagtttttagttgggagttaatagtttagttttttaaaatgtaggtgttaatgtattttaatgtatggtaaatttttgaggttgggatatgtataatttatgtggttagagtaattgtagtgtttttgttgttagtgagttgtggttggttggtggtttatgggtggtg

SEQ ID NO: 432 - DNA, 3952 bp, Artificial Sequence
  chemically treated genomic DNA (Homo sapiens)
ggttgtagttggagaggaataggaattgtagtggggatgttttggtttttgggtttatagtatttgggatggatgtgtagtagtgtgggttgggaattgggtattagggtgggatgggtgagaggttttaagggataaggtagggagaagtgtagtggggtgtggggaattgtatgttttttttttgtttttgttttttattttgaggtggtagggtgggtgggtgtggttttgggggtgggtgggttgggtggggtggaggtggggttgtagtattggttttatttagttttttttgtttgtagttagagtgagttgagttgtggttagttttggtgggtagggggggtgttggagtgtagtgtagtgtagttttattagtttgtaaagtggattgagttggaagttgagtgttgttgtgggaggtgggtgatgggggtaggtgttattggttgtgttatggatgggttgtgtttgttgttgttgttgtttttgggggtgagtgttagttggagggggtttgtttttttttttgggattagaattttgagaagagttgggtgttgttattaaggaaatagaatagagtattggggttttagatattgagggtgggtggtgggaaaggatttttgatgttgggattatgaaggagggtttagggtttttggagtgtagaggtgattttttagggtggagatgagggtaagattggagtatggatgttggtttttaggtattgtagggggtggtgggggagttgggaggggttttttaagagggggtatggggttttttgatgtttaggttttttggaagaggatatttgaatgttgggattttgaagggattttttttttagtattttggtttttggagagttgtgggatagaattaaggtgagagaaggagggggaattggatggggattagagatgagaggggtgagttgggttggggtggggagtttgggatgatgggatggaataatggaggaggttggagggattggaggtagaggggatttggtaaggataatggggattggttagataatgggggggaggggtgttggagggagaggttggggagtgggagagaggttgagaagtgggttagggagggtagaagaggggtgatggtgagggtggtagagagatggaagtagaaggaaaggagatagagtggggtgtggattttgaagtggttggggttttgtttgtttgttgagggatagtgagatgagaagagagagtagaggtttggatatttttagtgtttgtttttgtgtttttgtttgtggttttttttagttttggaattggggttgtggatttaaggttgggaggggagtgtttattttgttggggtgaatttgtttttggggtttttttatggttggtgggtttttttgatgtgtgtgtttttatggtttgaagtagtgtagtggattgtgagggatggagtgggtgtgtttttatttgggttggtggtggttatgttttggggtgtagagtgttggggtgtattaggtggggattttttttggttgtgtgtagttttggttatgtaggtgggaggtggtaggtagggggtgttgtggggtgaggtaagtgtagtttgttgttgtttgtttgtgagtttggggttgtgtgttgttttttatttagttgtgtgatttgagtgttgtgtttattgtgttttgtgggtttttgtgttttgaagggttgggatttggtttgagttttttttggtttttggtgtaagttgttgggtatttaatgagatgggggtgtttggatgttttggattttgtagtgtggtattttgggttattgatttggtaaaggttggtgggttttttgggtggtttgatgagattgttagatgtggtttgttttatggttatgaattgaatgttttggaaggtttggtaatggaggaggtgtttttattttttttgttagtattttttattagagtattgtgttttaaattttggttttatagatatggagattgaggttttgagagtttaaatgatttggttaagattttatagtaagttgggttagagttgtggttagattttttgatttgatttttagtttggtatttttttatttttttagggggtagttgttgttttagtttggggttatggttgtgttttttagtagggtggggggggttgatattgtttttagagtttgttggtggtagagtttgtgggtgaggtgggtagagattttgtttgggtgtgggttttagtttgaaagtttagttttagttttttggagttgttaggatttgtggttgtgtttggggatttgggagtgattgtgggtatgtttgttgattaatgttgttggttagagatgttgtttagatgtgggtgggtgagtgtagattaggagagtggggaggagggattggattttagaggggtaatgatttgggttttgggtttgggtaagagtgagggtttttgtgtgaagatttaaggaaggaggggagttgggtgtggaggatttgggtgtttgggaaggtgtattttgataggaatttgttgtttgtagtttttgtggtttttgtttttgttttggtgtgtggttgtttggtttgggatggttgtgtgtggtttgagtttttttttgggttgtggtgagagagagagggttgaaattagagtgtgttttggtgggttggttggtgggttgtgttggtaatggaggtattttgttatttagatgtttgtaattagagttgttgggttggttaatgtgtttaatagggatggaatgagggtagtaaatgggtgtgtgtgagtggttgggttgagttgggtggatggtggatggggaggtagttttgtgggggatgggtttttattgtattgttttagtttagtttggtttaagtgttttgttttttttttgggggattgtgtggggaggtgggaataattgatgtgttgagtttttattaagtgttttgtatttttttggtagttttttttgaattatttaatttttataaggttttagtaaggtgaatttagttatttttattttgtagttgaggaaatagaattttttagatttttaggtttgagattaggtttttttagtgagttagtggtggtgtttttgttggaatttaggatgtttggtttgggatgtttttttttttatatatgttaggtttttttttgttttttattttttagattatggaaggagttgtggttttgagagattaaattgtgttttatgtttttggttttatatatttagatttgagttttttttttatatgtagaggttttgtttttttttaagtttttatgttatattattttgggtaattagtttttttttttttaattttttttttatttaaagggagtgaggggtatgtgttagtgttttttttgggtttgtattgattttaaaaggttttttaggtgtttgaaaattttttttattttatggtggtgattatggttttatttatttaagagttttttgttgaagttgttggaatggttagggttgattatattgaaatatttgtatggttttaaatatttttaattgttttgttgttttttttttttttttaattaaaaaaaatgaaaatttttaaaagttaatttatttaaggatttttttattttagttttttgtaagttttgaaatggttaaaataaaaagattataagtgtttttaaaaatgagatgaaattattttgttaaatgtgaaatgattaagtgtaatatatataaattttagggaaatttatttgttatttttataaattaatttttttggatttgattttggagtaattagtttgaatgttagttatttttttttatttggttaaattttttttttttgtttggggtttttttaagatgagatgtttttttgataattaatatttatt

SEQ ID NO: 433 - DNA, 3952 bp, Artificial Sequence
  chemically treated genomic DNA (Homo sapiens)
aataaatgttagttattaaagaagtattttattttaaggagattttaggtaggaggggagagtttagttaagtagggaggggtgattaatatttaggttaattgttttaaaattagatttaaaaggattaatttatagggatgatagataaatttttttgaaatttgtatgtgttatatttagttattttatatttgatagaatgattttattttatttttaagaatgtttgtaatttttttgttttggttattttaaggtttataaggaattaaggtggaaggatttttagatgaattgatttttaagaatttttattttttttaattagagaaaagagagaaatagtgaaatagttgaaagtatttgaaattatatgaatgttttagtataattagttttggttattttaatagttttagtaaagagtttttaagtgaatggggttgtggttattgttatgggatgggagagatttttaaatatttggagggttttttgaggttgatgtaaatttaggggaggtattggtatatattttttattttttttggataggggaggagttgggaggaaaggagttaattatttaagataatgtagtatagagatttgagagggggtagggtttttgtgtgtggagaaggggtttagatttaaatgtgtggggttaaaggtatagggtatgatttaattttttagagttatgattttttttatgatttagaaggtagggggtgggagggagtttggtatatgtaggaaagagaatattttaggttaagtattttgggttttaataaagatgttattattgatttattgggggagtttggttttgggtttgaaagtttagaaggttttgtttttttaattgtgaagtgggaataattaaatttattttgttaggattttataaggattaaataatttaagagaaattattagggaagtgtaaggtatttagtaggaatttagtatattgattatttttgtttttttatgtggttttttagggaagaagtgaggtgtttgagttagattgggttggaatagtgtggtaggggtttgttttttgtggagttgtttttttatttattatttatttagtttagtttggttgtttatgtatgtttatttgttgtttttgttttatttttattaggtgtattagttagtttggtggttttggttatagatgtttgaatgataaagtgtttttattattggtgtggtttgttagttgatttgttgggatgtgttttggttttagtttttttttttttattgtggtttaggaagaaatttggattgtgtatagttattttagattgagtagttgtgtgttgaggtggaggtgggagttgtaggggttgtagatggtaggtttttgttggggtatatttttttaagtgtttaggttttttatgtttagtttttttttttttttgggtttttgtgtggggatttttgtttttgtttagatttggagtttaagttgttgtttttttgggatttggttttttttttttgtttttttggtttatgtttgtttatttgtgtttgagtagtgtttttaattagtggtgttagttagtagatgtgtttgtggttgtttttaaatttttggatgtagttataggttttgatagttttagggaattggggttgagtttttgggttggggtttgtatttggatagaatttttgtttattttatttgtaggttttattgttgatggattttggggatagtgttaattttttttgttttgttgggaaatgtagttgtgattttgagttgggatagtggttgttttttgaaaaggtgggggagtattgagttgggaattaggttggggagtttagttatgattttggtttaatttgttgtgagattttggttaagttgtttaaatttttagagttttagtttttgtatttgtaaagttggaatttggggtgtagtgttttgatgaaagatgttggtggggagagtgaagatgttttttttgttgttagattttttagggtatttggtttatggttataaagtaggttatatttgataattttgttggattatttggaggatttgttgatttttgttgagttggtggtttgggatattgtgttatagaatttgaggtgtttgggtgtttttgttttgttaggtgtttagtggtttgtattgagagttaggagaggtttagattggattttgattttttgaggtgtgggagtttatggagtgtggtgggtgtggtgtttgggttgtgtagttaggtggggagtggtgtgtagttttagatttgtaggtaggtagtggtggattgtatttgttttgttttgtagtgttttttgtttgttgttttttgtttgtgtagttagagttgtgtgtggttaggaagggtttttgtttagtgtgttttggtgttttgtattttgagatgtagttattgttagtttgggtaggggtatatttgttttgttttttgtgatttgttgtgttgttttaagttgtgagaatatgtgtgttggaggagtttgttggttgtgggggaattttgggagtgggtttgttttggtgaagtgggtattttttttttagttttagatttgtagttttaattttgggattgggagaggttgtgagtaggagtgtggggataggtgttggaaatgtttaagtttttgttttttttttttgttttattgttttttagtgggtaggtgggattttgattattttagggtttgtgttttgttttgttttttttttttttgtttttatttttttgttgtttttgttgttgttttttttttgttttttttaatttattttttaattttttttttgttttttaatttttttttttgatgttttttttttttattgtttggttggtttttattgtttttgttgggttttttttgtttttagtttttttgattttttttattgttttattttgttgttttgggttttttgttttagtttagtttgttttttttatttttagtttttgtttagtttttttttttttttttgttttggttttgttttatgattttttagagattgagatgttgaggggaaagtttttttgggattttggtatttgagtgtttttttttgaagaatttgggtattggagagttttatgtttttttttgaaagattttttttagtttttttattgttttttgtggtatttgaggattggtatttgtgttttggttttgtttttatttttattttggagagttgtttttgtgttttgggaattttagatttttttttgtggttttggtattagaggtttttttttattatttatttttagtatttgggattttaatgttttgttttgtttttttggtggtggtgtttggttttttttggagttttgattttgggaaagggagtgggttttttttggttaatatttatttttagaagtagtaatagtagtaggtgtggtttgtttatggtgtggttggtggtatttgtttttattgtttgttttttgtggtagtgtttgatttttagtttggtttgttttgtggattgatggggttgtgttgtgttgtgttttagtgttttttttgtttgttggagttggttgtggtttggtttgttttggttgtgggtgggagaggttgggtgaagttagtgttgtggttttgtttttgttttgtttagtttgtttatttttggaattgtgtttgtttgttttgttgttttggggtgggaagtagaggtaaagggagggtgtgtggttttttgtattttgttgtgtttttttttgttttgttttttagagttttttatttattttgttttggtatttagtttttggtttgtgttattgtgtgtttgttttggatgttgtgggtttggggattagggtgtttttattgtggtttttgtttttttttggttgtggtt

SEQ ID NO: 434 - DNA, 2820 bp, Artificial Sequence
  chemically treated genomic DNA (Homo sapiens)
tttaggggataatatttaggtatgttaatggagtttaaaatgttaaggaaattatattataattttgtttagtatattataggttgttaaattgaaatgttatgttagttaggagtgtagtaatttttattttttggttttatttaattaggaagttttagtagagtgaagtttgttaagtgtttgttgttagaatttgaaggaatttgagtgagtaagaagagtgtttgatttattttatagaagtttgtttagaaatggaggagttagtgtttattgaagttggttttgtttttggtttgtttatatggagtttgattagttttagttatgtttattttggtttgggagatttgtaaagtgtttttttttttaatttttttgtattattttgaagtttagggaagtaaagagaggggtatatttggattgtaaaattaatgttttttgttgtttaggagagaagggaatgagagagagagagagatagatagatagagagagagagagagagagagagagagagagagagagagagagagaaattttattgaaatttagtttttttagaatttgtgtgatttggtttttaatgggagattagtgtgattttatggtatttttgttaggaattagtgatttttttgtagttattatttgatttattgtttttttgtttatttttttttataaagttattttttttttattttagtaagatttttttttttaatgatgataaagtttttgttttagtgttttttttaggattggtgtttttttaaaatagtgaatttagaaaattattttgtttaatattttttaaaatttttgtagttttaatgtaagtgtaagtatgtaaaggttttttgttatatttgtattttttgtttattttagaattattttttatttttgggtttgtaatagttttttttgtttttttggatagaggtgggtggtattaggggtttagggtagtaggaggtgaggggttgaggaggttgttagggtaggttggtttgtgttggatatgtgtgtttttttgtggagttaaagggttggggatgggggttttggatttattagagtaattttagttggtgggtgtttggtagttatttaaggaggtagggaaagtagtgagttttattgggtgggttatgatgagtagtatgatgggtagtagtagtagttagtaaaagtttttgtaaagtgtttagttgttgtattgttgtggggatttttatagtattatgattagtttgtgtaattttgtagtagtaaatggtttttgaggaatataggattgtgggggttgggtagtgggttattgagtattttgtggatggtggtagtagaggtggtggtggtggtagtggtatttggtggggaagtagtagttaaatttgtgtatgattttgagagttttagtaatatttagggattgggtttagttttggagtgagagggttgtttgttgagaagttgtgttggagatgtgggaagttgttgttataaggagggagttttgggaagttggaggataggaggagatgggagtttaggggtagatgagtggagtttgaggaggtagggtggagggagagttaaggtgttttgtagtttggtagttgttttttgagttttgttgtttgtatttttttggtgtttgggaagtagtaggtttttagtttgtttggggttatgtgggaagaggtagttgggttttgattggtggagtaggatgtaggttttgggagggaggggttgatgaggaggtgtaaggatgtaaggaggaggtggttgtggaagttatagatgggtttgtttgttaggtgttggtttgagtggggttaggtggggatggtttaaatgagaagtttgggttttagggtgggttatttgtatatttatatattatttgttttattttttgttttaggatgttttttattgaaggtggggtttggattagtgttttttttttgtgtgtgattttgggttgtgagtgtgggttgtggttgggtggtgtttttttgagttggagatggtgggggtggaggtgttagaggagtagtagtagtagggtagagaggggtgagttggtgtgggagagggtgttttgttggtgattggtgttttagtgtgtgggagtgtgttgtttaggttgtagggggatgtaggttgggaatgttgtggtggagaggttagggatgtttttttagggatttataggaaagagggtgagaggtgatggtgttagaattgtttttgttgatttggaagtaatagtagtattttttataagagtgtgtaattttaaggttgtttgttgaggtagtttagttattttggtaggtgttttttttttttttttttttttttttttttttttttaggttttttgtagttttgatttagtttaagtgtttgtaggtttgaatttttttttttattatttgtttttttttagtttgtagtttattagtgtgtttatttgggaggtgtggttagatgtgtttggaaggttagattggttgggataagtggtttgagagaaagagaaaggtttttttgtatatgttgtgggtgggttgttgggagtattggttgggtagtggtgtttgggaaggggagagtgggttttatttgttggtttaggtagtgattttgtgttttttatttgggtttttgttggatggttggtgatttggggtgatgagagaaggtttaatttggtaggagtttttggttttgtgtgttttttttattttttttagtgggaagggtaaatggtatagtgggatttgttttttg

SEQ ID NO: 435 - DNA, 2820 bp, Artificial Sequence
  chemically treated genomic DNA (Homo sapiens)
tggaaggtgggttttgttatgttgtttgttttttttgttggagagaatgaaagaaatgtgtagagttagagatttttgttgagttagatttttttttgttgttttaggttattggttatttggtaaagatttgagtaaggaatgtagggttattgtttgggttaataaatggagtttgtttttttttttttggatgttgttgtttggttgatgtttttggtaatttatttgtggtgtatgtagaggagttttttttttttttttagattatttgttttgattaatttgattttttaaatatatttgattgtattttttaggtggatatattaataggttatgggttggagaggagtgggtgatgaggagagggatttaaatttgtgaatgtttgggttgggttggagttgtggggggtttgggaggagagaggggagaagagagaaggaaggagagtgtttgttgggatggttgagttgttttggtgagtagttttggggttgtatgtttttgtgggagatgttgttgttgtttttaggttggtaagagtggttttaatattattgttttttatttttttttttgtaaatttttagagaaatgtttttggtttttttgttgtgatatttttagtttgtatttttttatagtttaggtggtgtgtttttgtatgttggagtgttggttgttagtaggatgtttttttttgtgttgatttgtttttttttgttttgttgttgttgtttttttgatatttttgtttttattatttttagtttggagagatgttatttagttgtggtttgtatttgtggtttggggttatgtgtggaagaggggtgttagtttggattttgtttttggtagggggtgttttggagtggagagtgaggtgaatggtatatgagtgtgtgggtagtttattttgaagtttgagttttttatttgagttatttttgtttagttttatttgggttagtgtttggtgagtgagtttatttgtggtttttgtggttgttttttttttgtatttttgtatttttttgttgattttttttttttgggatttgtattttgttttattaattagagtttgattgtttttttttatgtgattttgggtgggttgaggatttgttgttttttaaatgttagagggatgtgggtggtagagtttgagaggtggttgttgggttgtggggtgttttgattttttttttattttgtttttttgggttttatttgtttgtttttggatttttgtttttttttgttttttggttttttagagttttttttttatggtagtagttttttgtgtttttggtgtagttttttagtggatgatttttttgttttggggttgagtttagtttttggatgttgttgaaatttttgagattatgtgtgggtttggttgttgtttttttgttgggtgttattgttattgttgttgtttttgttgttgttgtttgtgggatgtttagtagtttgttgtttggtttttgtgattttgtgttttttggaagttgtttgttgttgtagagttgtatgaattagttatggtgttgtgggagtttttgtggtagtgtagtagttggatattttgtgagggtttttgttggttgttgttgttgtttgttatgttatttattgtagtttgtttggtgaagtttgttgttttttttatttttttaagtgattgttaaatgtttattggttggaattgttttggtaagtttagaatttttgtttttgattttttaattttgtagaagaatatgtgtatttagtatagattagtttattttagtggtttttttagttttttattttttattgttttagatttttaatattatttatttttatttagagaaataaggggaattgttgtaggtttgggggtgaggggtggttttgggatgggtagaaagtgtaggtgtagtaggaaatttttgtatgtttgtgtttatattggagttgtgaggattttgagaaatattaaatgggatggttttttgggtttattgttttgaaagagtattaattttaggggaaatattgaaatagaagttttgttattattaaagaaaaaagttttattaggatgaggaagaaataattttatgagaaagaatgagtgagaaagtaataaattaaatggtgattgtaggggaattgttgatttttggtaaaggtgttatgaggttgtattggttttttgttgaagattaggttatatagattttagaggagttgggttttaatagaatttttttttttttttttttttttttttttttttttttttttttttttttatttatttattttttttttttttttattttttttttttttaggtggtaaaagatattggttttgtagtttagatatgtttttttttttgtttttttaagttttaaggtagtataggggagttgagaaaaagaatattttgtgggttttttaggttggagtgggtatgattgaggttggttaggttttatgtaggtgagttgagggtggaattgattttagtgggtgttgatttttttatttttggataggtttttgtggagtgggttaggtattttttttgtttgtttgggtttttttagattttgatggtgaatgtttggtaggttttgttttgttgaagttttttaattaaatagggttagaggatgggagttgttgtatttttagttggtatagtattttggtttgatagtttgtagtatattgggtagaattgtggtgtaatttttttggtattttaaattttgttaatatgtttgggtattgttttttagg

SEQ ID NO: 436 - DNA, 2265 bp, Artificial Sequence
  chemically treated genomic DNA (Homo sapiens)
tatttttatttagtgtgtttagggtatttgtattgtgttagtttgtggtggtttttaaattaattttgattgagtttttgaggtagttttttatttttatttgtattaatttagtatgtttattaaaatttttaagtaattttttttttgttatgtaaatgttaggagttgtttgatttttttttttttttatttttattttttttttagtttagttggttttttggttgggtaagttgggaatttagtgattgaagggttttggaaggtgttggaggggagagatgttagtttgaatttttatagggtttttttattaaaaatttttaaaatgttggtttgagaaattttttttgttggagggtttgagttttatttttttttgttgtgtgtgtttttattgttgtgaattgttgtgatttttaatttattattttattttgtgtttttagtgttttagttgttttgtatttgtttagttttttttttgtttatgtatttggttggttggtggtgtttgggatgtggttgtaggtgttgttgtattggtggtaggagttagtgtagttatagttggtataagttttggttgggtagtttttggtggagttgtttatgttgtgatattgatattggtaggggttgagagttttgttataggaagttgaggtaggagagtagtagttgtgtggggttttttttgtagggttgtagtagttagaattggtagttgaagatttgggtaaagttggtgatttttgagatggatggtgtatagttgtggatgtttggaatggagtttggaagttgttggattggatgttggggatttttttgttaaatatttttgttattgtttatgggtggtggtagtggttgtttttgttgttgtggtggtggtagttgttttagttggttgtggggttgttttggtttaagtagatatggttgtgggagtgagggaggaggaggaagaggaggaggagagaaggaggaggtggtggttgtggtgaggaggagattgggagttgtgaagtttttgtttttggttggttgattgttggttgaggtgtagtatagttttggttaaatttttaattgtgtgtttatgtatagtggggtggatttggttttattggttagggttttgggagtaatagtaatattttaatttgtttaattagttttagtataataaagtattgtttaaaaagggggtggggggtattgagggggtgtgtgtgtttgtgtgtgtgtgtgtttgtgtgtttgtgtgtgtttttgtttgttgtggagtggggaggggttttagtttatttgtttttagtaaattttaaagatattgtagaagttatagtataaggttttgtgatgtttggggataatgtgttttaattagaagttttaaaagtgtatatgttttgggaatgaggtgggtgattatttttttttgttttttattattttgtttttgtgggttgtattaaaggtgagtgtagaattaaatattgatattgaaatagggagttaaggtgtagggagtggggagtggggggatgtaggatggaggtaagaaggaagggaaatagtattttttttttttttagtggagtgttgggaagtaagttgtaatttatatgttttgaaaatttgttttttggggaaagaggtaattttttttgtaggagatgagtattttttggatgtgggttggataggaatgtttaagaaggtataatgtttattaagttggtgaatggtagggagagtttttgtagtttaaagtttttataatgatttttaaaaattattgttttaaatatatataatttaaggaagtttaaatttttgttgttggtttgtaaaaagagttaaatagttttatttttgtttaatatttttatttatttttaagatattggaataaaggttttttaattatgtttagtggttaaagatttttgtaaaggtgaatggatttatgtataatttgttatatttttaggaaagaatgggaaagttttggaagtggggaaggagataaggattaaagtttttgtaaagttagatgatgtttattgattttttttttttggttttatgaatgtggtttagtttttttattttttagatttgggtttttgtatttttttttttttattttttgttgtaaagatattttatttagtttgtatgtaagggaagaaaggatttaagaattatttagttgatatatgagatttaaattttgttttttaggaggtg

SEQ ID NO: 437 - DNA, 2265 bp, Artificial Sequence
  chemically treated genomic DNA (Homo sapiens)
tattttttgaagagtaaagtttagattttgtgtattaattgaatgatttttgaattttttttttttttgtatatgagttaagtaggatgtttttgtagtaggaaataaaggggagagggtatagaaatttgggtttgggaaatggagagattgggttatatttatggagttaggagggggaaattaatgagtattatttgattttgtaaaggttttgatttttgtttttttttttatttttgagatttttttatttttttttggaggtatggtaggttatatatggatttatttatttttgtgggagtttttggttattgaatatagttaaagagtttttattttaatgttttgaaaatagatgaaaatattaaatagaagtggagttgtttggttttttttgtaagttagtaatgaggatttgggtttttttaagttatatgtgtttaagatagtaatttttaaaagttattataaggattttgggttgtaggaattttttttgttatttattggtttaatggatattgtgtttttttgggtatttttgtttagtttgtgtttgggagatatttattttttgtaaaggaagttgtttttttttttaaagagtaaatttttaaaatatgtaagttataatttgttttttaatattttattaaaaaaaaaaaaaatgttgtttttttttttttttgtttttattttatatttttttgttttttattttttgtattttgattttttattttagtattagtgtttaattttatatttgtttttggtgtagtttatgggggtggggtagtgggaagtaaggaaagatggttgtttattttatttttaaaatatgtgtatttttgaggtttttgattggaatatattgtttttagatattatagagttttgtgttgtggtttttgtgatgtttttggaatttattaaaaatagatagattaagatttttttttattttataataagtaaaaatatatataagtgtgtgggtgtgtatatatataaatatatatatttttttagtattttttattttttttttaagtaatgttttgttgtgttaaaattagttggatgagttagggtgttattgttgtttttgaggttttggttaatagaattagatttattttgttgtgtgtaagtgtgtaattaaggatttaattaaggttgtgttgtgttttagttagtagttagttggttggagatagagattttatgatttttagttttttttttgttgtggttgttgttttttttttttttttttttttttttttttttttttttttgtttttatagttatgtttgtttagattagagtagttttatagttaattagggtagttgttgttgttataatagtaaggatagttgttgttgttgtttgtgagtgatgataggagtgtttgatagaagggtttttagtatttgatttggtgatttttaagttttgttttagatgtttgtagttatgtattatttgttttaggaattgttaattttgtttgagtttttagttattgattttgattattatagttttatggggggagttttgtatggttattgtttttttattttggttttttatggtaaagtttttaatttttattagtattagtattatggtgtgaatggttttgttgggagttatttagttaaagtttatgttgattatagttatgttagtttttattattagtatggtggtgtttataattgtgttttaagtgttattaattagttaggtatatggatagggggaaggttgggtagatatagggtgattaggatgttgggggtgtgagatggggtggtagattgggggttatagtggtttatggtagtgggggtgtatgtggtagaagggagtaggatttagattttttaataaagagagttttttgggttagtattttagggatttttagtaggagagttttgtggaggtttgaattagtgttttttttttttggtattttttaaggttttttagttgttgaatttttagtttgtttggttaggaagttggttaggttggaaaggggataggggtggagagaagaaagaattaagtagtttttggtgtttgtgtaataaagagaaggttatttgggaattttggtaagtgtgttgggttggtgtgagtgggaatagaaggttgttttaaaaatttagttaggattagtttgagagttgttataagttagtatggtgtgggtgttttgagtatgttgggtgggggtg

SEQ ID NO: 438 - DNA, 5907 bp, Artificial Sequence
  chemically treated genomic DNA (Homo sapiens)
gttgttggagtagggttttagtgtattgtgagtttttgttttttttgttttgtagtgttgtgagttttttttttttttgtgtttggttttgtttgtgttttttttggtgtgggtatttgtagatttgttaggaggttgatgagaggtgtttttatagagttttgtttttttttagatttttaaatgaaaagaaagagaaaagttaattttttgtttttattttgtatgtatttggagagtggttggtggtgagtgatttgtataattgttttttttgtggtgtttttggatgggtggagagaatttgggtgattgagtttgaggttgagtttttttgggagtgatttatgttagttatttttatttttaagggggatttgtggttgggtttatgtgtgaaggatgggtgttagggaaattgatttatagatgatttgttttgtgagagattgataatttagttttgtgggtttttggggtgtttagattagtttttagttagaggatttggggttgtatagtttttggattttggagggggtggtttgggggtgggagattgtgagtattagtttatgttggtttttttttattttgtggtggtgaggtgggaagggttaggatgtgagtttagtattttttttagaaatgtagtattttgtttttttattttttttgtttttggtgtttttttttttatgtgtttttttttgttttttttttaagggtgttttttttttgtttttagtttatgtttgaattttttggtgttttttttttttttttttagttttttttttatgttttttgtttttgggtattttttttttttaattttttatttttgtattgtttgattttgaggggtgggagtgtattgggttgtgtatgggtgggggtgttgtgttagttttgtgtagttgttttgatgttgttgttgttgttgttgttgttgttgttttttgtagtttagtttgtgttttgtggtagttttgtagtgtattagttattattgttgttgttgttgttttgttagatttgttgttagtttgtttggtttagttttgagagagttttgaatgttagttgtgagggttatgagttagagagttttggggtgttgtgtggagagtaagtggagatagtgattttgtgttttttagtttttgtttttttgtattgtgttttttgtatttttgggtttttttgttttttttgttgtttttattgttgttatggttattttgttttgtagtaagttgtttaatgtggttatgtttgtgtttaataagttttaggttaagatgagtggtatgtttgttaggatgggtttttaggtggttatggatgaggaggtggtgggttttgtgtattgtgatgattttgattttgagtattgttagggtttgtagatggatattttgaaagttgagggagagttttgtggggatgagggtgttgaagtgtttgttgagggagatatttattattagtgaggtagtggagtttttttgttgttttttggttttaaggattaggtgggaggtggtggtgaatttgggggttatgataagtttaaaattatggtgtgggaggtaggttggaatgtgattaatgttatttaggtaagtgtgggatttttagttttgtttgttttttttttttttagtttagtgtgttgggttttgtttttgatagttgtttggtgattttggtttggagatttttttttgtatttaggaatttttttttttttattttttttagttttgtgtggggatttatgtttttaggtggtgttttttgttttaatttatgtttttttttaatggtattagttgtaagattgttaggttgaagtttggtttgagatatttgtttggagatattgtaaaagtgaaggaaatggggggagggagtaggaagtgatgagaaagaaagaaaattaggattggagggtatggtttggttttggattttggaatggatttatagttgtatttttgggaggaaagaagaaggggaaattgttgaggttggagttttttttttttgtatatatgtatagatatgtatatgtatataggtaggtatattatatgtttatagtttttttttttatgaataaaggtgtaggtataggtgtatatgatatgtatttatatatagattatagtattatttttaaatgtatttgtgtatatttttatagttttataaataaaagtatatatttgtatatattaaatatatgaatatttgtttgaatatatgtatatatatatgtatagatgtatgtagataggaattagtttgtttttttgggtgtggttttgttggagatatataggtatatatatatgaaagtatatatatgtttttatataaatatatttagtttgtaataatttagtattatttgtgtatagatttgttttttttgtttgaaattttggttgtattgtaaagaggtggttagtttttttttgtgtgattttggtgaagttttttttagaggttaagaatggtttttgttttttaggttttttttttttatttttaattttttattttttattaggtggtgtaggatttttatatagggagtaggtttggagttttggtaatgatttttgagttagtaggggttggtaggttgtagttttttgggttgaaggagattttagttttaggtaattttggttttttatagtttggttttgtggtgtttttggagtgtattattattggggttatggaaggtaggttttttgggagtagaggttttttaggggttgttttatgtattggggtaagtaggattttattgggttttgaatattagatggtttgatttaaggtgttttttgttttggggtttggtgagatggttttgttggattatggatttggggttgtttttgtttttgttgtgttttgtgattttttggggtgttttttaaggttttgtttgataggttttaagggaggttagggtaggaggttggaggtttgtaggtttttgggattttggattttgttagtttttagtttttgtgtggattttaaattttatagttttgtttgtttgattttgaagtttttggttttagatttttgtttggtttggttttttggtttttttggtgtttttttgttaagtttttttttttgtttgtttttttagtttttatttagtttttttttttaggttttgtttttgttttattttaattttagttttgttttaagatttttaatttttagttttgtttttttttttttgtgtgttgttttttaagtgtttttatattgtttttgtttttgttttttaggggttttgttttatttttagtttttttttttttttattttattttttttttgttttataattgtagtttttaatgtttttttttttggtttgagtttgagatgtttgagtttttttttttagtttttgtgttttattttagttttattataaattttgtgtttattttttttattggtttaggtttagtttattattttttttagagtttttttttgattatgtttttttttgtttttttttatttttttttttaattttttattttgtttttgtttttagaaattattttgaagtatttttttttttttttgtggtttttttttatttttagtttttttttattttagtttttttgttattattagttattagtgtattttttttttttagatttgtttatatatttttttttttttatttttggtttgatatttgggtttattattagtttttttatatttattttgtagtttgtttttaattttttttttttggtggtttagatttaatttttagtgtttttagtgttttttttgggttatagtgttaagttatgttttttgggttttttatttgttgttaagtttgttgagtgtttgtgtttggttgtttttttgttttatagggtatgtttgtgttgggtttattttatgttattttgtatggtggttatttggggttgttttttattatttttgttgttgttgtgtgttgttatattggtaagatttttattgtgtgtttgtatgaggagaatgaagatggtgaggtggtgtgtgtgtgggatttgtatgtggttatagttaatgtttgttgtgttttgtgttttttaatgttgggtggttgagtggtgaatgtagtgtagattattgagttggtgatgatgtgtattttgtatgtggtggtgagtggtaattttatgtataatagttttttggggttgtttgtgttgtagaagttttggtttattattgttatggttgtgttgttgttttgtgttttttttaagaattttaaggttgtgtttaagtttagtttgttgtgtattttggtttattttgttattaatattttggttatagtttattgtttattgtgggtgtgtgattgggtttgggagaaggttaagttttatattgatgttaagaagttttttatttttattggtattattgtgtttagttatatgttttagatttttttgtttttgttggagggtaatatgtagtagtttagtgagttttattgtatgatgaattggatgtatattgtagtttgtgtgtttaagggtttttttgtgtttgttgtttattttatttgggttgatgagattaaggaggttattatggataatttgtttggttttatttgtgttgtggttaatatttttttggtggttaaggtgttgttgttttattttttgttattttttgttgttgttgaggtgttggagaagttgtttttttaggaaggtagttgtgttttttttttggtttgttatagtggtgatgggtgtttgaagttttgggggttgatgttgtgttgtgtgtttgttgtttttatgttgtttatggttatttatgtgttgtattttgtgttgtttatgggttttattggtagttttatgggtgttggtttttgttttttgttgtttagttttttttatttgtgtttgttttggtgtaagttgttgtggtattaagttttttttgatgttgttatttttgttattggtggtatttgtagtgtgtttggttttgtgtatttttttgagggttttattgaagtttattgaattaatgtggaggattagggtgtaagggtgagtttttgttgtgtttttgtgtttttttttttttttttttattttgtttttattagtttagtgtgttttgttgttgtgttgggaggttaagttttaaatatttttggtttttagtttttgattatttggggatgggggggatgggaggggatagggatttatgatttattgtgtttgtgtttttgttgtttttttttttttataatattttggttttggggggaggtggggtgtatttgtgggtagggttttttgtttttttaagtggggttttgatattttggttttagttattgagggggttgggaagggagggagagggggtgtagtttgtaggtgtggtaatttgattttgggggaatattttatatttatttagagtttggaatttatagtgtttagttatttttagtaagagtgttttttattttggagatgttttaattttgtagtgggaaaggttgattgggaaatttattttgggtgggtaattttttttaatgaagttggaaggtgagaagttgtggtggggttagtttgtttgttggtttttaggaatttaaatttttattttgtgtaatttattaggtgtggaattgttttattgtgtgtgtggtgtgtttgtggtgaataagatgaaatgtatattagaaaaaaatttatttttaatttagagtgtggtatataattatatttgtaaataaagaagagataaaggtttgtgtggtttggtgttgggtttgtg

SEQ ID NO: 439 - DNA, 5907 bp, Artificial Sequence
  chemically treated genomic DNA (Homo sapiens)
tataaatttgatattgggttgtgtaagtttttgttttttttttatttgtggatataattatgtattgtattttaaattagagatagatttttttttgatatatattttattttatttattatgagtatattatatgtatagtagaatagttttatatttgataaattgtataagatgagagtttagatttttgaaaattggtaggtaagttggttttgttgtggttttttgttttttggttttgttgaaggaaattgtttatttaaaatggattttttagttagttttttttgttgtagggttgaaatgtttttggaatgggaagtgtttttgttggaaatggttggatgttgtagattttgagttttggatggatgtgaaatatttttttaaggttaagttgttatgtttgtgagttgtgttttttttttttttttttttaatttttttgatgattggaattaaagtgttggggttttatttggaaggatagagaattttgtttgtaaatgtattttgtttttttttaaaattagggtgttgtggaaaagaaaggataatagaaatgtagatgtgatggattgtgaatttttgtttttttttattttttttatttttgaataattagaaattaggaattagagatgtttaaagtttggttttttaatgtggtggtagggtgtattgggttggtgggggtggggtgaggggagaagggagagagtgtagaagtgtggtgggggtttgtttttgtgttttagttttttgtgttggtttggtaggttttgatgaggtttttgagggagtgtatgaagttggatatgttgtagatgttgttgatgatgaagatggtgatgttgaagaagatttggtgttatagtagtttgtgttagagtaggtgtaggtgaaagaggttgggtagtaagaaatagaggttggtgtttgtgaggttgttggtgaggtttatgagtagtgtgaagtgtggtatataaatggttatgagtagtgtgaagatgatgagtgtgtagtgtagtgttagtttttaggattttaggtgtttgttgttgttgtagtaggttgggaaaaaggtgtggttgtttttttggaagagtgatttttttagtattttgatagtggtaaagaatggtagaggataggataatagtgttttggttattagaaagatgttgattatggtgtggatggagttgggtaggttatttgtgatgatttttttggttttgttggtttaggtgaggtaggtgatgagtgtgaagaggtttttgagtatgtaggttgtgatgtgtgtttagtttattatgtagtggaatttgttgggttgttgtatattgttttttagtgaaggtaggaagatttgagatgtgtagttgaatatgatgatgttaatggagatggggaattttttgatgttgatgtagaatttgatttttttttaggtttagttgtgtgtttgtgatagatagtaggttatgattaggatattgatgatgaagtgggttagagtgtatagtagattgaatttggatatggttttgaggtttttaaggaaggtgtaaggtagtagtatggttgtggtgataatggattaggatttttgtgatatgggtagttttgggaagttgttgtatatgaggttgttatttattattatgtataggatgtatgttattattagtttgatgatttgtgttatgtttattatttggttgtttagtgttgggaagtgtggggtgtagtaggtgttggttatggttatgtatgagttttgtatgtgtattattttgttgtttttattttttttgtataggtatgtgatgaggattttgttggtgtagtagtatataatggtggtgaagatgatgagaaataattttaggtagttgttgtgtaggatggtgtagggtaggtttagtatgaatatgttttgtggggtggagaggtaattagatgtggatgtttagtgaatttggtaatggatgaggggtttggggggtgtggtttaatgttgtggtttgaagggggtgttaaggatattgagaattgggtttgagttgttggggaggagaggttaagagtaggttgtggggtggatgtaggggaattaatagtgagtttgggtgttgagttagagatggagagggagggatgtatggatggatttgagaaggaaaggtgtgttaatggttggtgatagtgagagggttagggtgggagagggttgagaatagggagaagttataggagggaagggagatattttgggatggtttttggggataggaatagaatgaggagttgggggaggagatgagaagggatagaagggagtgtagttggaaaggggttttaagaaaggtagtgagttgggtttgggttagtggaaagagtgggtatgggatttgtggtggggttggaatggggtatgggagttaaagaggaaaatttgggtgttttaggtttagattagaggaggaaatgttaaaggttgtagttgtgaggtgaaaaggaaatagggtagagagggagaggggttgaaggtggggtaaagtttttgggaggtaagaatagagataatgtgaagatgtttggggagtagtgtgtggggaggaggaagtagggttggaaattgagagttttaggataaggttggagttagagtgaggtgagggtgagatttaaggaaggggattaagtggaggttggggaggtaagtaggaggaggagtttggtgggaaggtgttagggaggttagaaagttgaattgagtaagagtttagaattagaagttttagggttaggtggatagggttgtagggtttagaatttatatggggattaagagttaatgaaatttagggttttggaggtttatgagtttttagttttttgttttggttttttttggggtttattaaatggagttttgaaagatgttttgggaagttgtggggtatagtgaaggtgggagtagttttgggtttgtgatttagtaaggttgttttgttgggttttggagtggaaagtgttttgggttgggttatttggtgtttggggtttggtggagttttgtttattttgatatatggaataatttttgggaggtttttgtttttagaaaatttgttttttgtggttttagtgatagtgtgttttagggatgttgtggggttaagttgtaagggattggggttgtttagagttgaagttttttttggtttagaaagttgtggtttgttagtttttgttagtttggaggttgttgttaagattttaaatttgttttttatgtaggagttttgtgttgtttggtggggagtggggggttaggaataaggggagagggtttagagagtaggggttatttttagtttttggagagggttttgttagggttatatggggaggagttggttgtttttttgtggtgtagttgggattttgggtgagaggggtgagtttgtgtataggtaatgttggattattgtggattaaatgtgtttgtgtgggagtatgtgtgtgtttttgtgtgtgtatatttgtatgtttttaatagggttgtatttaagggagtaggttggtttttgtttgtatgtatttgtgtatgtgtgtgtgtatatgtttaaatgaatatttgtgtgtttggtatgtgtaggtatatgtttttgtttgtggagttgtaggggtgtatgtaggtgtatttggggatagtattgtggtttatatatagatatatgttgtgtgtgtttgtgtttgtgtttttgtttgtgggaaggggggttgtgggtatgtggtgtgtttgtttatatatgtgtgtgtgtttatgtgtgtgtgtggggggaggagattttgattttagtgattttttttttttttttttttttaaaaatgtagttgtgaatttgttttagagtttaagattaaattgtgttttttaattttgatttttttttttttttattgttttttgttttttttttttattttttttatttttgtagtgtttttggataggtgttttagattgaattttagtttagtggttttgtagttggtgttgttgggagggagtgtgggttagggtggaaaatattgtttgggggtgtaggtttttgtgtagggttgggagggatggagaaagggagatttttgggtataggagggggtttttaggttgagattattgggtgattgttgggggtagagtttggtatgttgagttgggaggggggaggataggtagaattgggaattttgtgtttatttggatggtgttggttatgttttagtttgttttttatgttgtgattttgggtttgttgtggtttttgaatttgttattattttttatttggtttttggagttggagggtggtagaggagttttgttgttttgttgataatggatgttttttttgatgggtgttttagtgtttttgtttttgtagggtttttttttggtttttaggatgtttatttgtaggttttggtggtgtttaaagttgaggttgttgtaatgtgtgaagtttattgtttttttatttgtggttgtttgaaaatttattttggtgaatatgttgtttattttggtttgggatttgttggatatggatgtggttatgttggatagtttgttgtggagtaaggtggttatggtggtggtggggatagtggaaaggatagaaggatttgaggatgtggggaatgtgatgtaagaaggtgagggttggggggtgtaaagttgttatttttgtttgttttttgtgtggtgttttggggttttttggtttatgatttttgtagttggtgtttgaggtttttttagggttggattgggtaagttggtagtaggtttggtggagtggtggtggtggtggtggtggttagtgtattgtggagttgttgtggggtgtgagttgggttgtggagggtggtggtggtggtggtggtggtagtggtgttagagtagttatgtgaagttggtgtggtgtttttatttgtgtgtagtttaatgtgtttttgttttttggaattaggtggtgtgggggtgggggattggagagaggaaatatttggaggtaggggatgtgaggaaggggttaggagaagagaaagggggtgttgagggatttagatgtgagttgggggtagaagaagggtgtttttgggaaggaggtgggagggagtgtgtgaaagagggagtgttgagggtaggggaggtgggggggtgaagtgttgtatttttaggggaggtgttaagtttgtattttggttttttttattttgttgttgtagggtgggagggggttggtgtgggttgatgtttgtagttttttatttttggattattttttttagggtttgggagttgtgtagttttagattttttggttaaggattggtttgggtgttttgaaagtttgtaggattgagttgttagttttttgtggagtgggttgtttataagttagtttttttggtatttattttttgtgtgtaaatttggttgtgagttttttttgaaggtagaagtggttggtatggattgtttttaaggaagtttagttttaggtttagttatttgggttttttttgtttgtttagggatgttgtgagggaagtgattgtgtggattgtttgttattagttgttttttaaatgtgtgtagaatggaggtgaaaggttggtttttttttttttttttgtttgggggtttggaagaaggtaggattttatgaggatattttttgttagttttttagtgggtttgtgaatgtttatgttgagaggggtgtagatggggttaggtgtggaggaaagaagggtttgtggtgttgtaaggtggaggaagtagaggtttgtggtgtgttggggttttgttttgatggt

SEQ ID NO: 440 - DNA, 3049 bp, Artificial Sequence
  chemically treated genomic DNA (Homo sapiens)
tatttggtgtagttggtttagattttgtttttgttttggttggtgttgttggtaaaggtgtaggtgtttgtggagttgtatgttattatgtggaagtttgatttggatagtttgttgaaggtttgttttaggaagttgaatttgaggtaatagtgtgaggtgtagtgttttgggggatggttggggttttggtttttgtttagggtgtttttaaatatttttttggttagtgatgtttttttgtaaatggtgatgtgtgttatttgttggaatttggtgtttgtttgtgtgttttgtttgatggtgtaggagttgtggtagttgatggtgatgtagtttgagtgttggttgttgtttagtgattgggatggtgtgagtagtgggtttgttgtgtttttggatggattgtggttagttagttttagtgtgggtgatggtgttttggtagaggtgtttttttgttgtttgggttttgagtagttaagtggtagtagtttgttatttagtgagttttttttgtgtattttgtgttgtgagggtggtggttttgggttgggttgttggggtgttttgaggtggtgtatgagttttggtagtttgaagtatttggttttgtgttgtagttggttgtgtttggggaagtagttgggtagtatgagttgtaagttttgtaggtaatttaggatgtagtggaagaggaagttgttttggtttagaaagaagtggtttttgttgttttgggttagtttttgtggttgttgttgtgtgaatatgtgttagagtagtgagttgggtattgatattattgtgtagtgttgggttatgtatatttggttttttatgtttagttttatgatgttggggaagagtggtggttttgtggaggatgatgaggagttattgttgtttttgttgttgtttttgttgggtaatttatgtgtgttgtttgttagagttatgatagagaggtggttgggttgggatagtggtaggaagttgtgttgtatttaggagttgtaattgttttttttggagttttggaatttggatgtttgtttagttttgtgttttgttgttgttgttgttgttattgttgttattgttattgttgttattttttagagttgtgtggagttgagtggtgtgagtgtgttgttgtgtgtttttttgagttttagtgtgttttgtttgttttgtttgtgtgttttaggtgagtgttgggttgtggtttgtgtgttgtttaagtagagttgtttgttttggtgttgtggtgtgtaggaggtgtgggtggtggtggagttttgtttattgggtgaggggaggtggggagtggggatttgatttgtattttaaatgtggatgttatgtggggttgttggttttattttggtttgtgagtgttgggggtgtttggatttttatttgttttttatttattagttttgttttgtggttttgtttaatttttttttttttttgaagaggatttgtttgagatttggtggttttggaagatagttttttggagggatagttattgtgttttttttttttttgttttagtttgtatttaaggattttggaaggaggatgtgaatttttggaagtttgttgttttgggagtggaaatgtgtggttgtttttggtttttttgtttgtggaattgggtgtttttagtagtgtagttgtggtttgttattgttggttgttgtgttattgaaagtagagagatgtgaaaaatttggagagatgaaagagttgttttagtttgagtgagttagattttgtttaagttgttttgtagttagtttggaaaataaataaataaatttagaaataaaaagtaaattttagtgttttgtagtaggatgttttatgatagtttattttttggttgtagagataaaatgagatgaagttttaaatttgtttttaattgtaattttttttttttgtagggtttttgaggtattttattttgaagtgaaggggtaagattttggaatgtttggtttttgggttttatttagtttttgttgaattgtgtttttagatttataatagttgtagatttaatgtaatttttaaagttatttttggtgtttgtatgtttatttttttaaaagtttaggtgtttttttttttttgtatgttttggttattttttggttttgtttaagtttttgttagttttagaaagggatatttatatatttgaaggtttttgtttggattttattttttaatttttgttgtttatatgtttgttttttttttttggattgtagtttatagaattgttttttttttttggaagttttttttggttttttaggtgggtggggtttttggatggttttttatatattgtttgtgttgtttttagtatgttttgaaatgttatatttatgagtgattatttgattattgatttgggtatgaaaataagtaagagtttttgaatgttgtaaaaagagaagagtgtagaggagggtgttaagaaatgattgggttattgaatgttttttgtgtatttgttattatttgtagggtattagggagtgaggaatgtaaaggtgaataatttttaaagtgtttttagtgtagtttaataagtaaagggttaggggtttgtgtagttattatattagtttgaagtatagattatatattaggataaattaggtaagatttttgtttttgataaaatttatttttttgtgtaattatttagtgagttttatagtttttttatagataaatgttatttttattttgaaatgtttatatttgtttaataattattgtgtttatgttagtgtgttgaaatgagattaatttttaaattagttattttaattgtaagtatagattttgatattgaatgtattttaatattttttttttgttgttgttttgttttttgggataaataatagataatataaaatttttaagttttagtgtaggattttgaggtggttgtgttattaggtgttatattagtgttagagatttgataaaattagttttttttttataaatttaa

SEQ ID NO: 441 - DNA, 3049 bp, Artificial Sequence
  chemically treated genomic DNA (Homo sapiens)
ttggatttgtagaaaagaggttggttttgttaggtttttgatattaatataatgtttagtagtataattattttgaaattttgtattgggatttggaagttttgtgttatttattatttattttaaagaatagaataataataaaaaaagaatgttgaaatatatttagtattaaaatttgtatttgtaattaagataattggtttgggggttgattttattttagtatattgatatgagtgtggtaattgttgagtagatataaatattttaaaataaaaatgatatttatttgtgaggagattgtgaagtttattgggtagttatatagaaggataaattttattaagaataaagattttgtttgatttattttgatgtgtggtttatattttaaattgatgtgataattgtgtagatttttgattttttgtttattgggttatattgaaagtgttttggagattatttgtttttgtattttttattttttggtgttttgtaaataatagtaggtatataagaaatatttagtgatttaattattttttgatatttttttttgtatttttttttttttgtagtatttaggagtttttatttatttttatatttaaattagtgattagataattatttataaatatgatattttagaatgtgttgggagtagtgtagatagtgtgtagggagttatttagaggttttatttatttgggaagttagggaaagtttttagggggagggggtggttttgtgggttgtagtttgagggggaaaagtaaatgtgtaggtagtaggagttgagagatgggatttagataagggtttttagatatataaatatttttttttgagattgatgggaatttggatagggttgaagagtgattgaggtatgtgggagagaaggggtgtttggatttttggaaggataaatatgtaggtgttaaaggtggttttaaaaattatgttagatttgtaattgttgtgagtttaagggtgtgatttaatgaaggttgaatgggatttggagattgaatgttttggagttttatttttttattttgaagtgaagtgttttgaaggttttgtgggaagagggaattgtaattaagagtagatttgaagttttattttattttgtttttgtagttagaaaataaattattgtaaagtattttattgtgggatattgaggtttgttttttgtttttaggtttatttatttattttttaggttggttgtaaggtaatttgaataaaatttggtttgtttggattggggtggtttttttgtttttttaggttttttgtgtttttttatttttagtgatatgataattaatgatggtaggttgtagttgtattgttggaagtgtttagttttgtaggtgggagggttggaggtggttatgtatttttatttttggggtgataggtttttgaaagtttatgttttttttttagagtttttgggtgtgggttggggtgagaggggagggggtgtggtgattgtttttttaaggagttgttttttgaagttgttaagttttgggtgggttttttttggaagagggagaaagttgggtgggattatggggtggggttggtgggtggggagtgggtgggagtttgggtgtttttagtgtttgtgagttggggtggagttagtagttttgtgtggtgtttgtgtttaagatgtaaattgagtttttgttttttatttttttttgtttggtaagtgaggttttgttgttgtttatgttttttgtgtgttatggtattagagtaggtggttttatttaagtagtgtgtgggttgtgatttggtatttgtttggagtgtgtgggtaaggtgggtggagtgtattggaatttaagggggtgtatagtggtgtgtttgtattgtttggttttgtgtggttttaggaggtggtggtggtggtggtggtggtggtggtggtggtggtggtggtggggtgtagggttgagtgagtgtttgggttttggggttttggggaaggtggttgtagtttttgagtgtagtgtggttttttgttattgttttggtttggttatttttttgttatggttttggtggatagtatatgtggattatttaatgggggtggtggtgggggtggtagtggttttttgttgttttttgtggagttattgtttttttttgatattgtggagttgaatgtggggggttaggtgtatgtgatttggtgttgtatggtggtgttggtgtttgatttgttgttttggtgtatgtttatgtagtagtagttgtaggagttggtttgggatagtaaaggttgtttttttttggattgggatggtttttttttttgttatattttggattatttgtgggatttgtagtttgtgttgtttgattatttttttgagtgtagttggttgtagtgtgaggttgagtattttgagttgttagagtttgtgtgttgttttggggtgttttagtagtttggtttggggttgttgtttttgtggtgtggggtgtataaggagggtttgttgggtgatgagttgttgttgtttggttatttggagtttgaatagtaggagggtgtttttgttggggtgttgttgtttatgttggagttggttagttgtagtttgtttgggggtgtggtgggtttgttgtttatgttgttttagttgttggatggtagttggtgtttgggttatattattattggttattgtggtttttatattattgggtgggatgtgtaggtggatgttaagttttggtgagtggtgtgtattattgtttgtggaaagatgttgttggttaaggaggtgtttggggatattttgaatgaaagttgggattttgattgttttttggagtgttatattttgtgttattattttaagtttaattttttggagtaggtttttgataagttgtttgagttgggtttttatatggtggtgtgtagttttatgggtatttgtgtttttgttagtagtattgattagagtgaggataagatttggattagttatattgagta

SEQ ID NO: 442 - DNA, 4721 bp, Artificial Sequence
  chemically treated genomic DNA (Homo sapiens)
atgtgaagtttagtatttttttaagtttttgtttatatataaaaagttatgttttagaggttttatttttaatttaagataagtaggatattttaaaaattatttatttattagttggtttgagaaaatttattgggtatttggagtaaggaggggggggagattttgaaattaaaaaagtaagagaaaataaaggtttagttatgagaagagagatagaaatttatgataatagaggtatttttttagtttaattgtttgttttagttgtgggggttggaggtagggtttgaggtggtgattgttttgatatttagttgttagataaataaaagaggttgtttggtgttagttttggtgttttgtttttttatgtttgtggttgtagttgttgtgtttggttggtttggttggaaattattggtttggttggagttgtgtattttatagtttatagggtggggggtgattatgttttttttttgtttttggattttagatttagtttttagtaattttggttttttgttttggtttgttttttaggtgtgtaatttatttttgtttttgttggtttgtttggtatttgtgtgggggatatggggttgtttatttttagtgtatttgggagatgtattttaagtgtgttggggaatgtgggggatttgtgggtgtttggggtgaatttttatattatattttgtgtatagagatgtagagtaaaggaaggaatggagaaagttgagaggataaaaggaaaggagttttagggttttagttgagaagtttaggttttagtgtagtaagaggtgataatgttattgaggtgttggggttttattaatttatagatttatttgtgtggaaggaaggaaaaagtaggggatatttaattttttttgtttgtttgtttttttgtattttggggttggtagagttgaaaggagatagatatttagtttggttttttatttaattttttttgttttaaaattttaaaggtgtgtggttatgatagtatttgggttattggtgtttgatgtgattttttgtatttattaaaggagtaaatatggagattttttagtttttatagtatgttttttttagttttttttggtgggtttggattaaatttaatttggttatatattttaatgtttttttgggtgtggggaggtgtgatttttttatttttttttgtatttttttgttgatttggaaatgaaggtgtttaatttttaattgtagattgtaggagtagtgtttgtagatttttttggggtaatataggagaaaatttggaagggaatttttagggaatgttttttgagtttttttttgttttttttttatttttagtttttagtttttttttaggagggtatgtatatttttttaggagggtatgtatatttttttaggagggtatgtatattttttttggagggatggttgtataaatgtattgttttaggggttttttttttagtattggtgttttggaaaatgttgggggtagggggataattttttatttagtttgtagagttggttaaggtgatgggggttgtagtatattagtttggggttgatttttttgtaagatttatagtaatatagttttttgatttttgaggaatgtttgagatttggttatttgaatattttgtatagtaggagggggagtgagtaggatgagggtggttgtgtaggttgtgtgttggtgggtgtttttgggtttagtttgtagtttaggtggttgggtagtaggaggtatgtggtgtgtgttttgttgtgggattttatggtttggagtagtagttttagttgttgtttttttagttttttgagtattgagtgtgtgagtgtttttagatttgttttggtgtttttggttgtgttggtgtttgtggttggtgggtggggatggtggtgatttttggtattttgtattgttttgtttaggtagtatttagttttgtttgggttgttgttattggttttatgtgtttggttgtttgttgttttttttttttgtagtttgtttttttttttatttttttttgtgtttttttttttgtttttgttgttgggtgtatggtttttttagagatgttggatgagtgtagattgtttggttttgaatatgtggggtgaggaggtgaggagaaaagttgtttgtttgttaaggagtgaatatgatttttgtatattatgaagaagttgggtgttgagttggggtagtaggtgtaggtgatagtagtagtagtaggggtttgggtaggagtggtggtggtttgaggggtgttttgtggtatgtgttagttttttggaggttggggtgtgtgtgggggtttgggggtgtttgttggggattgggggtttgtgttttggttgttttattttgtgtggtttgtgttttgtgtggttttttggttttggtgtgttttggaggaatttggttgttgtttttttggggatggttgagtttgtttttgttggtgtttttttaaaaagaggtttttttgtagtggtttttgaatgttgggtttgttagttttggttttttatatggaaggtttgtgggggtaaaaaatgaaaggtgtttggttgggttgttggaagaaggaaaaagttttttttttttttgttaagtaatttaatttgggggtggggagaagtaggtaattaaaaaaaaaaaagtaagtgatttattttttttttttatatttttagtaattggatttttttgaattttgtgtatatgaagatttaggggagggggttgagtggattttattttgtatgagatgtttggtaaaataagaaggtttttgtaaaatttaataattaaatatgtaaagttttaaatgaaaattattatttttttgaattttagaggtttgggggtgtttggttggaattggggtttaaaaaaagaaaatgtttataaagtataataagatgtttgatgggtggaaaaatgtatttatgagttatatttttttgtttttttgtaaagttttgttggttttttttttttttttttttgttaaaaaaaaaaaaaaaaattgtgtatttttttaatttatagaaagttttggttagattgttttaattttgtgtatttgggtggtttaggggagtttttggtttttttttttgtgtttttgggggtttaggtttttggtggggatttttttgaggttggtgtgggtgtaggggtagaagatgttgtggtggtggttgagtttggtggggttgatagtgtgggggagggtggtgtggtggtggtggagggttttagatgggttgtgtgtttttgttttttttgggtataagttgtttgttagtgtaggggttgttgatgtttttttttttggttgtggttggttgttgaggttttttgtatgggttgtttgttttgatttagttgtggtggtaggaggttttggtgtttttttggtgtttttttttttgagattttttttgttgtgtttgggagtttttttgtttttggtttgtttttttttggtgttttggtttttttgttgttgttaggggtttgttgtgttgtatttaggggtttaggggttgggtgtttggtggtttggtgttgatggattggttttgttttgggtagtttttttttgtgtggtgagtggattgagtatggtgtttggttggtttggttggtgtggtttggggataggattttttgtgtgttgagtagtaagtgagtgtgtttggggtttattgttttttgtaaggttttttgtttttgtttttttttttttttttttttttttttttttttttttgtttttagttgttgtagttgtgttgttttttttttgtttttttgtattttttttttggttttttgtttggttggttttattgtgtagtggtgtgtttggttttggttttgttatgtggttgtttagatattttgttgttttaaaaaaaaaaaaaaagtgattgtgttttgtaaataatagattgggtttttaaaagttatttttttttttaattttttgttattgttatttttttttgggtttgtagagggggtattgatggaggggagagagataggtggggggtagagaagtttttagaatggattgagttttggttggagttatggagaaattggaaaagtagggagtattgagtgggttttgttgtgagttttggagttgagtgagtgggttggtggtttgattttgatttggttgggttttgtggtggttattttgtgtgtgtttgttttagtgttttatttattggttttgttttaaaggttttggtggtggattttttggttgtgtttgagggtaaggggaggagagtgttgttttggtttaaaagatatttatattggattggattgaggttttgggaagtgtgtgttgaggggaatagttgttgagggtggggaggtggtgtgaatatgattttagtggtggttgtgtgtttttttttgtttttttagttttgggttttggtttttaggattgtttggagaagtgtgttttgtgtatagttttggaatgtatttggttggttgatgagttgtgaggggtagtattttggtgggagaaggggagtgggggtgggggtttgtttgtgtgttgtgggtaggtttttttttgggtttggaagatttttgttatttgttattttgttttttggtgtgggaaggttatttagtg

SEQ ID NO: 443 - DNA, 4721 bp, Artificial Sequence
  chemically treated genomic DNA (Homo sapiens)
tgttgggtaatttttttgtgttgggaggtagggtggtgggtggtggaggttttttgggtttgggaggaaatttgtttgtggtgtgtaggtgagtttttatttttgtttttttttttttgttgggatgttgttttttatagtttgttagttggttaaatgtattttagagttgtgtataagatatatttttttaggtagttttagaaattggagtttggagttgagagggtgggagggagtgtgtggttgttgttgaggttatatttatgttgtttttttgtttttggtggttgttttttttagtgtatattttttagggttttggtttagtttggtataaatgttttttaaattgagatagtgtttttttttttttgtttttgggtgtggttaagggatttattgttagggtttttaaaataaaattaatgaatgaagtgttagggtgagtgtgtgtgagatggttattgtgaaatttagttgggttgaaattgggttattgatttgtttgtttagttttaaaatttgtggtgaagtttgtttggtgttttttgtttttttaatttttttatggttttggttggggtttaatttattttgggagtttttttgttttttatttattttttttttttttattggtattttttttatagatttgggagggggtggtggtggtggggggttggggggagaaatagtttttagaaatttgatttgttgtttgtgaaatataattgttttttttttttttttaaagtgatagggtgtttagatggttatgtgatgaggttggagttgggtgtgttattgtgtagtggaattagttgagtagagggttggagggggggtgtgggggggtggggaggaggtggtgtggttgtggtggttgggggtgggggagggaagggggaggaagggggagggaagggggtgggggtgggaggttttgtgggaggtggtgagttttgggtatatttgtttgttgtttggtgtatggaagattttgtttttgagttgtgttagttgagttagttgggtgttgtgtttggtttgtttgttgtgtgggagagagttgtttgagatagagttagtttgttggtgttgagttgttgagtgtttggtttttgagtttttgagtgtggtgtggtgagtttttggtggtggtagaaggattggagtgttaggagagggtggattggggataaggaggtttttgggtgtgatgaggagagttttggaggaggaggtgttgagaggatattggggttttttgttgttgtagttgggttgaggtgagtagtttatgtggggagttttggtggttagttgtggttaggggaagggatattggtggtttttgtattagtaagtagtttgtgtttggggggggtgagaatgtgtgatttgtttggggttttttgttgttgttgtgttatttttttttgtgttgttagttttgttgggtttagttgttgttgtagtattttttgtttttgtgtttgtgttagttttgaggaagtttttgttgaggatttgggtttttaggagtgtagggggaaagattagagatttttttaaattatttagatgtgtaggattgaagtggtttagttaaagttttttgtggattaaaaaaatatatgatttttttttttttttttggtagaagaaaaggagaggaagattagtggggttttgtaaggaaatggggggatgtaatttgtggatatatttttttatttattaaatattttgttatattttgtaaatattttttttttttaaattttagttttagttggatgtttttagatttttgaggtttgaggaggtggtggtttttatttggggttttgtatatttggttgttaggttttgtgagagtttttttattttgttagatgttttatgtggggtgaagtttatttggtttttttttttgagtttttgtgtgtgtggaatttgaggagatttggttattaaggatatagaggaaaaaaataaattgtttgtttttttttttttaattgtttgtttttttttatttttaaattaagttgtttagtaagggggaaagaggtttttttttttttttaatagtttagttgaatgttttttgttttttgtttttgtggattttttatgtaggaagttgaggttggtgagtttgatatttgggagttattgtgggggggtttttttttggggaggtgttgatgggggtaggtttggttgtttttagggaagtggtggttgggtttttttggggtgtgttggggttggagagttgtgtagggtgtgggttgtgtggggtggggtagttggagtgtaggtttttgatttttggtgggtgtttttgggtttttgtgtgtgttttggtttttgggagattggtgtatgttatggagtgttttttgggttgttgttgtttttgtttgggtttttgttgttgttgttgttgtttgtgtttgttgttttaatttggtgtttgatttttttatggtgtgtggaggttatgtttgttttttagtaggtaaatgatttttttttttgtttttttgttttgtatgtttaggattaaatgatttgtgtttgtttggtgtttttggaggagttgtgtgtttggtggtgaggatgaggaggagggtgtagggggaggtggaggaggaggtgagttgtggggagaaggggtgatggatagttgagtgtatggggttggtggtggtggtttgggtagggttggatgttgtttgggtaaggtggtgtgaggtgttaaaggttattattatttttatttgttagttgtgggtgttggtgtggttgggggtgttgaggtggatttgaaggtgtttatgtatttggtgtttaagaaattgaaggagtggtagttggagttgttgttttaggttgtggagttttgtggtgggatgtgtattgtgtgttttttgttgtttggttgtttggattgtaggttgggtttgggggtgtttgttggtgtgtagtttgtgtagttgtttttgttttatttgtttttttttttgttgtgtaaagtgtttaggtggttggattttaggtattttttggaagttaagaggttgtgttgttgtgaattttatgggaagattaattttgagttggtgtgttgtaatttttattattttagttgattttgtgaattaggtgagaagttgtttttttatttttaatattttttggagtgttagtgttggaagaaaagtttttagggtagtgtgtttgtgtagttatttttttagggggagtgtgtatatttttttgggagagtgtgtatatttttttgggagagtgtgtatatttttttgggaagagattgggggttgaaagtagagaagggataaggggaaatttaaagggtattttttgggggtttttttttaggtttttttttgtgttgttttgaaggggtttatgggtattgtttttgtagtttgtggttaaaaattagatgtttttatttttggattaataagggggtgtagagggaggtgggggggttatgtttttttgtatttggaaagatgttgaggtgtgtggttgagttggatttggtttaggtttgttaaggaaggttgggagaggtgtgttataaaggttggaaggtttttgtatttatttttttagtaaatatggagaattatgttgaatattagtggtttagatattgttgtggttgtgtatttttggagttttggggtaaagagagttggatggaaggttgaattgggtatttgtttttttttaattttgttagttttagggtgtagaggaataaataggtaggagaagttgggtgttttttattttttttttttttttgtatagataagtttgtagattagtggggttttggtgttttagtgatgttgttgttttttattgtgttggggtttgggttttttggttgagattttgaaatttttttttttttatttttttagttttttttatttttttttttattttatgtttttgtatatagagtgtgatgtgagggtttattttgggtgtttgtagattttttatgttttttagtatgtttgggatgtattttttgagtgtgttaggaatgggtagttttgtgttttttgtgtgagtgttgagtggattggtgggggtagaggtgaattgtatgtttggggggtgggttggggtggggagttgaggttgttgggagttgggtttggagtttgaggatggggagggggtatggttgttttttgttttgtgaattgtgaagtgtgtggttttggttgagttggtggtttttagttgggttagttgagtgtggtggttgtggttgtagatgtggaggagtggagtgttgaggttggtgttaggtggttttttttgtttatttgatagttaaatattaaggtaattattgttttgggttttgtttttaatttttatagttaagataaatagttgggttaaaagaatgtttttgttattataagtttttatttttttttttatggttgggtttttatttttttttgtttttttaattttagagttttttttttttttttattttagatatttgatggatttttttaaattaattggtgagtagatgatttttaaaatattttgtttattttaagttagaaatagagtttttagaatgtggttttttgtgtgtaggtaaaggtttggggaggtgttgggttttatgt

SEQ ID NO: 444 - DNA, 2146 bp, Artificial Sequence
  chemically treated genomic DNA (Homo sapiens)
aggtttgtgtatttgggtagtttttggttgttgttgttaggttgttttagttggttgttgttgttgtggtgattggtgataagttattagttatttatgatggtttaaggaggtgaagaagagtaagtgattaggatattaaaatggttattggaggtaggtttttagtatattagttggttgagggttgagttttgtgggtggtagtaagttttgggagttggaggtaattgaattaaaaggtgttttagaaattttgttttgggattttgtttagtagggttttgggttggagggtgttgaggtttggtggatgggatagtgggaagagagaaaggtgttaaggggatttaagatttgggatttagaataagagggggtggggaataattttattaagttaaatagatttattttttttgtttttatgttggaaaaatttaggttttatatggttttttgggagggagggagggagatggtggttgttggtttttttttagggttttgttggagaagggagatgagttttttgtaagaattttattttgttaagtatattttagggagagttaggagagtaataatagttggggaagttttgagagaggggataggttattttttaggatttaaaaaaattaatgggagaaagaaaaataataagaaaggaagatagagaaaggttgagatttttttagtagttgtggagaaaatttagttttggatttggttgttgaaagaaaagagagagaggagaaaagaggagagaagtaggaagatagaggggagagagagagggagagagagagagagagagagagggagagagagggagggagggagggagggagagagagagttgttgtgtggaaggaagtttaaagtttgtgaattttttttgaattgagattggagttatatgggttataaattattgagatatattttttgttatttataaattgatagtttattttagtttagtttattttagttattgatgaggggagaataggtagatataatatatatttatattgagttttagagtgagtggtaggtgataaattttttttttttgaaggtaaaggaaaaaaagattattgtttaaagttgtgttgttttttgtttttttgtttttgttttgtaaagttattttggttggggagtttgaggggtagattggttagaggagttgtgtggtgtttgttttaatttatttggtttaggagtaggggtgtgtaggagggagggggtgggggagtgggaaaaaaaatagaagattgaaaggtgttgggtggtttagtttgttagaatttagttttgggttttagtagggttaagttgttatagtgtggttgttttataagattggtatgttttattttttgtaataatggtttttgtttttgtatagggaaaaaaaattatatagatatatatatatatttatttatatataagtttatatttttttatttttttttttttagtaagtttagatgtttgataaggagggaaggtgatggtggtgatggggaaggggggaaattttaaaatatttgtttttttaaaaaaagagtaagaagaaaagaaggagggtttttttttttttttttaaagaataggtaaaaatttaaatttagattggagggatagggaggaagaggtgagtaaaggtaaggaagggtggtgaagtttatagttttttttatattttattagtgaattattatgttaatatgagaagtagtatttggaggttgagttaaaggtaggtttggtttgggggtgagggtgttgggtgtttttttgtatttatttgtaattggaatattaggatttttttagaaagtagttttgggtttttaatttttatattttggttttttttttttgagtttttagttttggttttttttttttattatattttttttattttttttaaatttttttttagtttttaggtttagtttttaattaagggagagggaaagattagaatttaaaaaaaaaataaaaaaaaaatatttttttttttttttttttttgagaatagataataagtggtgagtgatgattttaaaaattttgaatattttgtagggggaggagggttgagaaaagggtgataaaagga

SEQ ID NO: 445 - DNA, 2146 bp, Artificial Sequence
  chemically treated genomic DNA (Homo sapiens)
tttttttgttattttttttttaatttttttttttttgtaagatgtttagagtttttaaaattattatttattgtttgttgtttgtttttaaaaagaaaaagggggaggggtgttttttttttgttttttttttaagttttggttttttttttttttttggttagagattgggtttggagattggagggagatttgggaggaatagagagggtgtagtggagggaagaagttggggttggagatttagaaggagggagttagagtgtgagggttggagatttagaattattttttaaaaaagttttggtgttttaattgtgaatgagtgtagaggggtatttggtatttttatttttgggttaggtttgtttttgatttagtttttaaatattattttttatattagtataatagtttattagtggggtatggggggagttgtgaattttattgtttttttttgtttttgtttatttttttttttttgtttttttaatttagatttaaatttttatttgttttttaaggaaaaaaaaaaaaatttttttttttttttttttattttttttttggggaggtgggtattttaaaatttttttttttttttattattattattattttttttttttattaggtatttaagtttgttaaagggggagaggtgggggggtgtgagtttgtgtgtgagtgagtgtgtgtgtgtgtttgtgtggttttttttttttgtgtaaaagtagaggttattgttatggagagtagggtgtattagttttatagggtaattatattgtggtggtttagttttgttggagtttggagttggattttggtgagttgagttgtttggtattttttggttttttatttttttttttgtttttttatttttttttttttgtgtatttttgtttttaagttgagtgaattgaagtggatgttgtgtggtttttttggttggtttgttttttgggttttttagttggggtggttttgtggggtgggggtgggggggtggggggtgatgtagttttaaatagtggttttttttttttttgtttttaaggaggggagatttgttgtttgttgtttgttttggggtttgatgtgaatatatattatgtttgtttgttttttttttgttggtggttaaggtaagttggattgaaataggttattagtttgtgaatggtggagagtatgttttaatgatttatggtttatatgattttaattttggtttaagaagagtttataagttttaagtttttttttatgtagtgatttttttttttttttttttttttttttttttttttttttttttttttttttttttttttttttttttttttttttttttgtttttttgttttttttttttttttttttttttttttttttttttagtagttagatttagggttgaattttttttgtggttgttaagaaagttttaatttttttttgttttttttttttgttattttttttttttttattaatttttttaagttttggaagatggtttatttttttttttggggtttttttagttattgttatttttttggttttttttggggtgtgtttggtaaggtggggtttttgtggggggtttattttttttttttagtgagattttggggggaagttggtagttattgttttttttttttttttttgaggagttatatggaatttgaatttttttaatatggaggtaagggaaatagatttgtttggtttggtagagttgttttttatttttttttgttttggattttagattttgggtttttttagtatttttttttttttttattgttttgtttgttaggttttggtgttttttaatttggagttttgttgagtaaagttttgaagtggagtttttaaggtgttttttaatttggttatttttagtttttaaaatttgttgttgtttgtggggtttggtttttggttggttggtgtgttgggaatttgtttttgataattgttttggtgttttgattgtttgtttttttttgtttttttgggttattgtaggtggttggtagtttgttgttagttgttgtggtagtagtgattggttgaggtagtttggtagtagtagttagggattatttgggtgtataaattt

SEQ ID NO: 446 - DNA, 2427 bp, Artificial Sequence
  chemically treated genomic DNA (Homo sapiens)
ttttttggggtttgggtggggagttttttttagtaataaatatgagagggatagagaatgttagagagttttttgttgggattgggatggttggagggtattatagtattggttttgaatattgaatggagaattgttatgtaataagaatttgggtatattagatttttgtaggtatttttgggatttatagattgtatatttgatgggtgtttgtaggatgtgaatggtattttggtaatgttaagttttattttagagttatagggtgttttttattaggttatggagttttttgggttatattgtttagggatattttgtaggggaggaaattgttttttttttttttttatgatttttgtatgaattttaattaagaaatattatatttagaattatagtatttatagtgatagtttttagaagattgtaatagtttttttgttatttaaggggtatagatggtgtagttgtttatttgaatgattttttaaatgagtgattattattattttaatttttttagttgtagttttgttataggttattgattataagtgttggtaaagaaattgtttttttaagtattttggtgttttttggagtgatggttatttttagtagttaaattgtattatatttttattttaattttgtgattgttttagtatttttaaaaatataaattgattttttaggaaaaaataaaaaaatgaaaaaattttttattttttttaaatttttggtttaggtttatttgattttttgtaagttgttttttagggtaggttttagttttatttgttgtgtttgtttttttattttattttagttgagtaggtagagtttgtttttggaaatggtttggttatttgggagggaataaataggtattgtttagatttggagttgtaggtagggtttagtaggattttaggtgggtatataggggtttatttggagggatttgaggggtataggttatagttgggagagttttgggtaggtatataggggtttatttggagggatttgaggggtataggttatagttaggagagtatagataagaggtttttgaggttattagggttgatttttattttattttaaggattagggatgtaaaaggattttaataaagatggttatattatttgttgtagaatgagtataaatgttttttttagtttttgaggttggtattggttttgttgatttttttaattttgttatttgtgtagtaggtggtaatagggataggtagatgatatagttggggttagaggatgatgtagagagatttatattagagatttttggggagtgatagagtttttgttttaattttagtgagtgggataggttgagtggggattgagtatgtttagggttagagtgggagggttagttgtgttggtttttaaagaggattttgggaaataaatatttttttatttggtaaggataaattaagtaattgttgagataggtgtttgtgttttaatttaaggttgtttagatagataagtgtttattgttgtattgttttaatagttgttgagatatatttttgtagttgttttagttagagttagggaggttttgggagaatggttttgtttgtttttagtttttttttatttttaggagtttttttttttttttattttaattgatatttttgggttttttatttgtttagagtttgtttagtggggtatttaatggtggataggtgagagaggtgaggggttgggttgttattgtggttaagggagttatggttttttagtttgaatggtttttgtttgaaattaggatataaatatagtattatatatagtagaaatagtttagaaaggttttagtttagatggtattggaataaatagttttttttaagttattttaaaatgaaagttttgggttatttatttttaaagaggattttaggatagttttaggagtttttttatgatatattttatggagaatgtttggttgttgtgtttatttaatgtagttattgaatagaaatttaagagtgttgttttgttagtttgaaattttttttatgtttttagttattagggttttagttaggttagaaataatagaggtagtaggtttttttagaatagtagtgtgaggttttttatagattttttttagtaatattattgttagtggtgaatattataaatagtatttatttaaagtttttaatgtgttttagggatatatggtgaatggagaaatgtttatttaagaaaattatttaagtggtagtaggaatagtaattttgtgatatttgggttataatttgtttttttatttttatgtgataaaagttttatttttagtaggtaattgagaagataggtttttttttttttagtgttattgtagtagtggtgggt

SEQ ID NO: 447 - DNA, 2427 bp, Artificial Sequence
  chemically treated genomic DNA (Homo sapiens)
gtttgttattgttgtagtggtattgggggagagggagtttgtttttttggttgtttgttgggagtagagtttttgttatatggggatggggaagtaggttgtggtttaagtgttatgaagttgttgtttttgttgttatttaggtggtttttttggataagtgtttttttatttgttgtgtgtttttaagatatgttagggattttaagtgggtgttgtttgtaatgtttattattggtagtgatgttgttggagagggtttgtggagagttttatattgttgttttggaagagtttattgtttttgttgtttttgatttggttgaaattttgatggttggaagtatgaagaaggttttaggttggtagagtaatgtttttgagtttttgtttaatggttatattgagtaaatgtagtagttaagtattttttatggggtgtgttatggaggaatttttggaattgttttgaagttttttttagaagtaggtagtttaaaatttttattttaaagtgatttggggaaaattgtttattttagtgttatttgggttggggtttttttgggttgtttttgttgtgtatgatgttgtgtttgtgttttgattttgggtagaagttgtttaggttggagggttatggtttttttggttgtggtgatagtttagttttttattttttttatttgtttattgttgggtgttttattgagtagattttgagtaaatgaggggtttggagatgttagttagggtaaaggggggaaaaggtttttgaagatgagaggaggttgagagtaggtaaggttatttttttagggtttttttggttttagttgaggtggttgtaggaatgtgttttagtagttgttagggtagtgtggtggtgagtgtttgtttgtttgggtagttttgggttgggatgtggatatttgttttggtagttgtttgatttgtttttgttgagtgggagggtgtttgttttttggggttttttttggaagttggtatggttggtttttttattttggttttagatgtgtttagtttttatttagtttgttttatttattggggttggggtgggggttttgttattttttgagggtttttgatgtgggtttttttgtgttgttttttggttttagttgtgttgtttgtttgtttttgttgttgtttgttgtataggtggtaggattagaggggttagtgaggttagtgttggttttgaaggttaagaagggtatttatatttattttgtagtaggtggtgtggttgtttttgttaaaatttttttgtgtttttgatttttaggataaagtaaaagttggttttggtggttttgggggttttttgtttgtgtttttttgattgtagtttgtgttttttaggtttttttagatgagtttttgtgtgtttgtttggggtttttttgattgtagtttgtgttttttaggtttttttagatgagtttttgtgtgtttgtttggggttttgttgagttttgtttgtagttttgggtttgggtagtgtttgtttgtttttttttaggtggttgggttgtttttaaggataggttttgtttgtttagttggagtggggtggagaagtagatgtagtaggtagggttgggatttgttttgaagggtagtttgtaggaggttaggtgagtttggattagggatttgaaggaagtgagaagtttttttgtttttttgtttttttttggagagttgatttgtatttttaaaaatattgaaatagttatagagttaaagtgggagtatgatatagtttagttgttgggaatggttgttattttagggagtgttaaagtgtttaaaagaatagtttttttgttaatatttgtggttagtaatttgtaatagagttataattaggaaaattagagtggtggtagttatttatttaagaagttatttaggtaagtagttgtattgtttgtattttttaagtagtaaagaagttgttatagttttttgaaaattattattgtgagtgttataattttgaatgtaatgttttttaattagaatttatataagaattatgaaaaaaaaaaaagagtaatttttttttttgtagaatgtttttgagtagtgtggtttaggaggttttgtagtttggtgaaaggtattttgtggttttggggtggagtttggtgttattgagatgttatttatgttttgtgagtgtttattgagtgtgtgatttgtgggttttgagggtgtttgtaggggtttgatgtgtttaggtttttgttgtatggtagttttttgtttagtgtttgaaattagtgttgtgatgttttttagttattttagttttaataggaagttttttggtattttttgttttttttatgtttattattggaaagggttttttatttagattttaggaaa

SEQ ID NO: 448 - DNA, 3015 bp, Artificial Sequence
  chemically treated genomic DNA (Homo sapiens)
tttttttttttttttggtagaattgtttgatggttttgattatgtttaggtttattttgatgtagtagtaggtatggttggtttggggtttgggatagtttgttatgtagtagtaatagttttttagggtgttgatttttttatatttggtttttttatataggtggttgaagtgattgaatagattgtttaggagatttattagggtgtgggtagatttgttggtatttattttggtgaagtttatgatatttgtaaataaaatattgatttttttgatttgttgtattttaaaagggtggaaggttataggagttttttggatggaagattttttttttttgtttttggggtttgaggtggtatgttttttgatagaatttttattttttttatttttttgttttattaagttattggttatgatttttggtattatggaatgaattattttttttttgagggttttttttatttttaggttttttttgtgtataatggattgttttattttgaggaaggtgtttttggattttatttgggatatgatgaataggtggattttgatggtgtggatgtagttgtggagtagttttttgtttagtagtttttagtgtagggttttggttttgggtgaggggaagtaggttttattttggaaatggtagttaaaggttttgaaaaggatagagtaggttatttttagatataaatttaggtataaaggtaagtgtatgatggtatagagtaaaaagagtattttgatgtatatggagaagttttttatttgagataagtaagtatttgtgggttggttgtggttgtaaggttggagttgttgttgtgttttgagataggtgttaagatttggaattgtgtagttagggttagggtgaatattagtagggtgagagttagtgaggtttatgtgtaatgttgggtgtatagtttggtgaaggtaaatagaaagaagtttatatatattaggaggaagtatagtgtgggggtgattatgatgattagtttggattttatgtggattgtaaaatagatgttttatagaaggtaggtgaagttgatgtagaagagtgtatattggaattggtgttgggtttgtgggaagtagtgttttaggtaggttttttttaggtttattgagttgaatttggggttttattagtggttggaggtttttttgaatagttggggtagttttttttgtttgtgtagttggtttttgttgtttatttgttgggggatgtttttggagtttttagagttgttgtagttagaggagatgttgtatttgtagtgtttggggtggttgttggaggatagttgtttggggttgattttgatgtgtatgttgttgttgtttttgttggagttgtagtttattttggtgttgtggtgatgtagtagttgttggtggggtggggaagttatgttgttgagttttggggtttgttttggttggggttattagtatttgttagtaaaatggggagagttagtggtgtttttatttaggtatgtatgtttagaggtttgggatttgtttttgttttaaggggtggttttagtatgtgatttggataggtattatttgtttttgtggtttttggtttagtggtgtttttattgtttttattgtttttatttttgaggtgtatgagaattgtttgggatggatttagaatgtttgggggtttttgttgtgtggttgttgtggttttgggattgttttgtttgtttgttttttgtgttttttgttttgagggtggtttttgtgttgtgtggttttttttttttgtgtgtttgttttttttagttgtggttttggagggaagtttagattttgagtgtttttagttttgtgagttgtttgtgtataaataattttgttggtggtgtggagttttttattttgtaggagttgtgttttgatgtgttaaaggtggtgtgtggttggttttgggtttggattttgatttggagtagtgagttttggtgggtgtttttggtttgtgttttttggttgttttttgtgttttgggttggttttgtttgtggtggtgggtgttgggggtgggggtgttttgggttgtgagtgtgtggagtttgttggtgtggtttgtttagtggggtttgtttttttttgagtgtgttgttgtttttgttgtggttgtagttgttttgggattgagtgtgtggaattatggatgtgggttttttgttgggtggtggtgtagatgttgttgtagagttgggtttttgtgatgttggttgggatgtttgtttgtttgtgtttatgttgggggttgtttttttgagttagagatgtggttgttgttgtgtttgttgttgtgttttttgtggttgttgttttatgttggaagagttgttgttgttattatttttggtttttgttttgtttgttgttattgatagatgtgtgtttgtgttgttttttgtttagttgtagtgtgtatgtgtggtttgtgtttgttgttattgttttttggttttggatatgtgtatgggttgtgtgttgttttgttttggtgtgtgtgttgggttggggttgtggggtggggtggggtggggtggggtgtgtgtttggttttgttttttgttttgggtggtgttgtttttaggtggtgggttgtggttgttgtttgtgttttgggtgttgtgggtttgtttttttttggtgttttagaggttgtgtgttgtttggggttttgattttgtggagagatttgaaggtgtttgttgtggaagaagttgttggttgtaatgtttgggaaattaaaatgttgtttttttatttggtatgtttttgggataaattgaagtttttaattgttggattttttttttgggaggttttttttgttttgtaagtaatgaatgtgggttttggggtatttggtttgttttggatttgtttatggggtgatttttatgggtttagtttttaaagttgggtttattgatgattatgtttttttg

SEQ ID NO: 449 - DNA, 3015 bp, Artificial Sequence
  chemically treated genomic DNA (Homo sapiens)
tgggggaatgtggttgttggtgggtttagttttggaggttaggtttgtgaaggttgttttgtgagtaggtttagggtaggttgagtgttttggggtttgtatttattgtttatagagtaaggggagttttttgggagggaaatttaatggttggaaattttgatttattttaaaggtgtgttgagtgggaaggtaatattttgattttttaaatgttgtggttagtggttttttttatggtaggtgtttttaggtttttttgtagggttgggattttgggtggtgtgtggtttttgggatgttgagggagggtgggtttatagtgtttggagtgtggatagtggttatagtttgttgtttagaagtggtgttgtttggggtggggggtggagttgagtgtgtgttttgttttgttttgttttgttttgtagttttagtttagtgtgtgtattaaggtggggtggtgtgtggtttgtgtgtgtgtttggggttaggaggtggtggtggtgagtgtgggttgtgtgtgtgtgttgtggttgggtgaggggtggtgtgggtgtgtgtttgttagtgatagtgggtggggtaggggttggagatggtggtggtggtagtttttttgatatgaggtagtggttgtgggggatatggtggtgggtgtggtggtggttgtatttttagtttggggaggtggtttttggtgtgggtgtgggtgggtgggtgttttggttggtgttgtgggagtttggttttgtggtagtgtttgtattgttgtttggtgaggggtttgtgtttgtggttttatgtgtttggttttgggatagttgtggttgtggtgggagtggtggtgtatttggggggaagtaggttttattagatgggttgtgttgatgggttttgtgtatttgtagtttggggtgtttttatttttagtgtttgttgttgtgggtagggttggtttggagtgtggggggtggttggggagtgtgagttgggggtgtttgttgaagtttgttgttttgggttggggtttgggtttggggttggttgtgtgttgtttttgatgtattggagtgtggtttttgtaggatggagggttttgtgttgttagtggagttgtttgtgtgtaggtggtttgtggggttgggagtgtttaaggtttgaatttttttttggagttgtagttggaggaggtgagtgtgtgaggaggagaagttgtgtggtgtggaggttatttttggggtgagaggtgtggaaggtgagtgagtaaagtggttttggagttatggtggttatgtggtggggatttttgggtgttttaggtttgttttgagtggtttttgtgtgttttgaaggtgggggtggtgggggtggtgggagtattgttgagttgggaattataggaatagatggtgtttgtttaggttgtgtgttggagttgttttttaggataggagtaggttttgggtttttaggtgtgtatgtttaggtgggagtgttgttaattttttttgttttgttggtaggtattggtgattttggttggggtaggttttgggatttgataatatggtttttttattttattagtagttgttgtattattatagtattgaggtgagttgtgattttagtggggatagtaatagtgtgtgtgttaagattaattttaagtagttgttttttaatagttattttaagtattgtaaatatagtattttttttagttgtagtagttttggggattttgggggtgttttttggtgagtgggtggtggaggttggttgtgtaggtagaagaagttgttttagttgtttgagagggtttttagttgttggtgggattttaagtttgatttggtgaatttggaggaggtttgtttggagtgttgttttttgtagatttagtgttggttttggtatgtgtttttttatattggttttgtttgttttttgtggagtatttattttgtggtttatatgagatttagattgattgttatggttgtttttgtgttgtgtttttttttggtgtgtgtgggtttttttttgtttatttttattaagttgtatgtttggtattatgtgtggattttgttggtttttattttgttggtgtttgttttgattttggttgtgtagttttaggttttgatgtttgttttaggatgtggtgatagttttaattttatggttatagttggtttatagatatttgtttattttaagtggggagtttttttatgtgtattgaagtgttttttttgttttatattgttatgtatttatttttgtatttgagtttgtgtttgggggtggtttattttgttttttttgagatttttggttattatttttgggatgaagtttgtttttttttgtttggagttggggttttgtattgggagttgttgagtagggggttgttttatggttgtatttatgttattggggtttatttgtttgttatgttttaggtgaggtttaggagtattttttttaaggtggggtaatttattatgtatgggaaggatttggaagtggaaaaagtttttaaagagaggatgatttattttgtgatgttaagaattatagttgatgatttaatgaagtagggagatgaggagagtgagaattttgttaagaggtatgttattttgagttttaagaataggaagaaaaagttttttatttaaaaagtttttatagttttttgtttttttaagatgtagtagattgaagaagttagtattttatttgtagatattgtgggttttattaagatgagtgttaataagtttgtttatgttttggtgggttttttgaatgatttgtttggttgttttgattgtttgtgtgaggagattaagtgtgagaaaattagtattttgggagattgttattattgtgtggtgggttgttttgagttttgggttgattatgtttattgttgtattgagatgggtttgggtatgattaaggttattgagtagttttgttaggagaagaaggaga

SEQ ID NO: 450 - DNA, 3093 bp, Artificial Sequence
  chemically treated genomic DNA (Homo sapiens)
gttattatatttggtagtggggtggtttttagtttttgttgtttttttgttttttttttttgtttgtttttggagtttagttgatttttgaggttttaattttatttattttttttttgggttgttgttgttgtgtttttttttatttttatttttttgaggagagttataggttgtaaatttaattaattttgtaatttatttttgtaaaattatttataaagattttttttttgtgtttgtgtttgttttttttgtgttgggtttttttagttatggttataaagtgtttttttttttttttgagttttgtatataaggaatgtgggttggggttttgtttgtttttttttttgtttaaggtaaggattttgggaatttgaagtttggtgtttattatgtttaggtttgtagttttttttttatagagtttgtattatgggaaaaaataaaataaaatttaggaaagggaggtaatagttattgggagttaatatagagttatgtagtgtttaaaatataaatattgtagtggttagaaattttgttattttttttgtttttttaggttgttttgttgaggttttttgagtttttttgtatattgaaaggtattgtaggtgtagtgtgtattttttttttatttattttaagaagttttgttttgttattagtttttttttttgggatgagtagggagagtgtgtggaggtttttgatttttttgattataattaagaaagaataatttttaaagtgtttaatatttttgtttttaagttttttaaaatataggggtagggaatattaaaatatttggtttttattaggaagattatggttttgaaaggaaatagtagatatgatattttattttatttggatttatgattaaaaaaataaaaataaaaatttaaagagtttgtttgtattttttttttttaaattttggtttggtttgaaggtagggaatttaaaagattgaggttgatggaagagagttagtggggtgagtgagtgggtagtttttttttttgttttttggagttatttagaaggataggggaagggaaggaagaagaggtgaggaaaaagaggagggagggaagtggaggttaggagtgatggagtaaggaaagtagtttgtaagtgagaaaagagggaaaaaatatagttgtatgaatttagagagattataagttgtatgtaagtagtagtagaaagagtgagagtgtgagtgtgtgttttttttgtgtttggggttagatagtttttagattagtttgaattattttttaagtattgttttgttttttttgttttggttgttttttaatttttttttttttttttttttattttttttttaaaaattaaaataatataagggagggtggtaaaagtttttttaaattggttgatttatttaaagataataataataataataaatatataataatttatattttatggtgggagagatgtgggattaatttttggtatttattttaatatttgatagttagaataaataaatatatatatttatattaatagatatatatagaaaatttggagttaaagtatttggtaagagtggaaaaaaaaagaattaaaaggtaaaataatgattatgagtagtggtggtggtagtggtattagtggtaatagtggtggtggtggtagtagtagtagtagtggtggtagtaatagtaataattatttggtgtttggttttttttagaaattttttgtattattatttttaagaattttagttttaagaattaatagagtttaatttttggaatttgagttttggattttattattgttatgtggtaggggaggatttggtgttagttttttgagatttttattgtttttggttaattaaaagtttttaaagttataagatttttttattggttggtatattttgaggtttttataagtagagtgttttggatttggaggttttggtttgaggtttgaggggtttgaaggtggttttttttttttgggtttaagatgatggtatggtttgttttgttattattatgtgggttttttttttgtgatgttggtgtttttgttgtagtaaagtttggtttttggaattttgagaattaatttgttatttggtgatataagagggggagtgtgttttgtttttttggggtttggggttaatttttttttttttatttataaatttagtagattgagttaaatgtataaaagggagtgagaggtttgaattattgggaaaagtatgttatatatatagtagggttagagaggtgagtaagagaaaaataaaataaaataaatattatagttttttttaattagaatattaggtattatgagaaaaatatttgttaagtagtttttggtgggtttatttgttttatttttatttaggataggggtttttgttgttgttttgggtttttttttttttggtgtggtggtttgggatttttggtttttgtattttgatggtttatggatttttgtttttgattttttgttttttgtaagtttgtggtgttatgtaaattataggattggtattggttggatttttttgtatgtgttttttttttttttatttaattttttaagtgttttaaagatgtattattttaatattaatattattgaaagaagtttaaatttttggttatatgtaataattttagtttttatttttttttttttttttttttttggtgtaatttttttttttttttttggatttttgttgaagtgtgttttttttgtattttagagaaatgtttaaaggatttgttttggtttggtttgtttttttttaggatagtaagtggtgggtttaatttgttattgttgatttttgggaaattttttgttgtaagaaatgtgtgtgtgggggggagggtgggggtggtggggtggtatgtgtgtgttttttataaaattttgtgagttaaatatttgtttgtgttttgtttttttttaaggttttgagatttttgtttttgaggtttgttttaaggttgttgtaaaaaaatttttttagtttgtgtttaagagattagttgg

SEQ ID NO: 451 - DNA, 3093 bp, Artificial Sequence
  chemically treated genomic DNA (Homo sapiens)
ttggttgattttttaaatatagattgaagagatttttttataatgattttgaaatgagttttgaaaataaaaattttaagattttaagagaaaataaaatataaataggtatttggtttatagaattttgtagaaaatatatatatattattttgttatttttatttttttttttatatatatgttttttgtaataagaaattttttaagagttaataataatagattaaatttattatttgttgttttggaaagaaataaattaaattaaaataaattttttgaatatttttttgaagtgtaggagagatatattttagtaaaagtttaagggggaaaaagaaaattgtattaaaggaaaaaaaaaaaaaaaaagtgggggttgggattgttatatatggttaaaaatttaagttttttttaatagtattagtattgaaataatatatttttaaaatgtttgagggattagatagggaaagaaaaggtatgtataaaaaaatttaattgatgttgattttgtgatttatgtaatattataaatttgtaaaaggtaaaaaattagaagtaaaaatttataaattattaaaatatagaaattaaaaattttaagttattatattagaaagaaaaaaatttagaataatagtaaaaatttttgttttaaataaaaataaagtaaatgaatttattgaaaattgtttggtaaatattttttttgtggtgtttaatattttagttggaaagagttgtgatgtttattttattttattttttttttatttgtttttttaattttattatatatataatatattttttttagtggtttaaattttttgtttttttttgtgtatttagtttgatttgttgagtttatgggtaagaaagaaggaattagttttagattttgggaaagtaaagtgtatttttttttttatgttattgaatagtaaattagtttttagaattttagaggttgagttttgttatagtgaaggtgttgatgttatagaggaggagtttatgtgatggtggtggagtaggttatattattgttttgggtttggggagggagagttatttttaggttttttgagttttgaattggaatttttaaatttgagatgttttgtttatgaggattttgaaatatgttggttagtgaaaaaattttgtggttttgagggtttttggttggttaggggtagtaaaaattttggagagttgatattaagtttttttttgttatgtagtagtggtaaagtttgaagtttaaattttgagaattgagttttgttgatttttagaattggggtttttagaagtggtgatgtaagaagtttttaggaaaggttggatattaggtgattattgttgttgttgttgttgttgttgttgttattgttgttgttgttgttgttgttgttggtgttgttgttgttgttgttgtttatgattattattttattttttaattttttttttttttgtttttgttaaatgttttggttttaagttttttatgtgtatttattgatataaatgtatatatttatttattttagttgttaggtgttaaaataaatgttgaagattagttttatgttttttttattataggatatagattgttatgtatttattattattattgttgtttttgagtgaattggttggtttggggaggtttttgttatttttttttgtgttgttttggtttttggaaaggaggtggaggagaggaaggaggggaattagggggtggttggagtagagaggatgagatagtgtttggggggtgatttgggttagtttgggggttgtttggttttagatgtggagaggatgtgtgtttgtgtttttgttttttttgttgttgtttgtgtatggtttgtgatttttttggatttgtgtggttgtgttttttttttttttttttgtttgtaaattgttttttttgttttgttgtttttggtttttgttttttttttttttttttttttttgtttttttttttttttttttttttgtttttttgggtaattttgggaggtaaaaagggaggttgtttgtttgtttgttttgttggtttttttttattggttttggttttttagattttttgtttttgagttgaattgagatttggaaggaaaaaatgtaagtgaattttttgggtttttgtttttgtttttttggttataaatttagatgagatgaagtattgtgtttattatttttttttagagttgtgatttttttaatgagagttgagtgttttggtgttttttgtttttgtgttttggggagtttgggggtggggatgttgaatattttgaaaattatttttttttggttgtagttgagggagttgggaatttttgtgtgttttttttgtttattttgaggagagagattgatggtgggatagggttttttggggtgggtgggaaaggggtgtgtattgtatttgtgatgttttttagtgtgtggggggatttagggaattttgataggatagtttgggagaatgagaaaggtggtgggatttttggttgttgtggtgtttgtattttgggtgttgtgtgattttgtgttggtttttaatggttgttgttttttttttttaaattttattttatttttttttatggtgtaagttttgtaaaaagggaattgtgggtttgagtgtagtggatgttaggttttagatttttgaggtttttattttgggtgaggagaaagatgaatagagttttagtttgtgttttttatgtgtaagatttaggaggagagaagggtattttgtggttgtggttgaggggatttggtgtgggaggagtgggtgtgggtgtgaaagggagatttttgtgagtgattttgtaaaaatagattgtgaggttggttggatttgtaatttgtggttttttttgagggagtaagaatgggggaaggtgtggtggtggtggtttggggagggagtgggtagagttggagttttagaaattggttgagttttgggggtgggtggggagaaagggtgggggggtagtaggagttaggggttattttgttgttggatgtagtgat

SEQ ID NO: 452 - DNA, 2436 bp, Artificial Sequence
  chemically treated genomic DNA (Homo sapiens)
agttttggatgataaggattaattgtttagggtgttggttgagaggaataggaagagtgttttgtggagtagggtgggtgagaagagttgggtggttgtggggtttttgtgtatgttgggtaggaagaggaagagttgtagtatgaaggttattagggagatgtataagaagtaggtgggggttattatgttgagtagttgtagggttagtatttttgattatatttttgtggggtttggggtgagaagaggattgattgattatggtgtttagggggtgtttttgtttgtttttttgtgttgtgtgtttggggtattgtatgtgattttatgtttttaattttttgttttgtggattttttttttttagttttttaattttggattaggtaggttagagatttgagtttgtagtggttttgggtttaggttttatttgggggtgagtgttgtttggggttttgagtgagtttggtgttttggtgtggtagagtttggtataggagggagggatttgtttgtagtttttaggagttgtgagggtggggggtattgggggataggattttttttttttgtggatgtggaaataagtttaggtttgggatttttggtttagatttttttaggaggagaaagggaaggatttggggttgggggtaggagaattagtggtatttgatttgttggaaattttgttttatatttttttttttttgtttttgtgtttttatttatatatatattttgggtagtatttagggattttattaggttatttaaggttttttggaggtatgtgtgtgtgagggattatgatgtgtgtgtgtgtgtttttgtttgtgattttgtatgtgtaatttgtgtgtgtttgagtatttgtatttgtgtatgtatatatttgtgtgtatagatatgtagtttttgttatttagttttaaaaaaattaattgaaataattgatatatttatatttgtttttgggtattgggtgaggtgggggtgtaattagaatatttgtgttagtgggttttggttagtatatttttttaatgttggttgtttgggttatttttttgtgaagagtgtttttatttgaggtgaaattaaaattttttttttgtgtttgttttttgtttttttgttgagagaaatttaaataatttttatggtgttgaaattttttttatgttgataagtttgttttgggtgtatgagtggatgtttggttagttttttttgggattgattttgttgttgtgtttagtttttattatgtttttattttattttatgttttatagttggggtttttggttagttttggaagttattgagaaataggattttgtgtgtttgagagaatttttttaggggttaaggaattggttagttggaggtgtgagaaaagttttgggaaggtggttgtatttaggatgggtggatgttatggggtttttgtttaggttgttttgtttgtatgggttgattggttattttggaattttttttgtaggttttagtgttttttgggaatttgtagtttttgtggagagtgtgggtttttttttattgttggggtgtagtgtagtgtatgtttgagggtggttgttgggggttgggtatgtttttagttttgtgttgttgggggttgtggtggtgttgtttattttagagagtttttggtttggggttttggtgaagtaagtgtttttttggtgttggttgttaggggggtgtgggagtagttagatgtgttgtagtgttgggaaggtggtgaaggataggggttaggggagtgaggggtgtttggtaggtagttttagttttggttttgtgtgggagaagggatagtagagattgtttgtggggttttggggtgtagggagttgtttgtttagttttggtgtttgttttgtttgtggtagagggtggtatagttggagttttggaaagattggtagtgttggtagttgtgggttttttggttattgttttttggatgtatgggaagttgttttttgtgttgttgttgttgtattgttgttgttgtagaggggtgaggaaattaatttattgagttttggttgttgataagaggagttttggatgttggtttttgttttgtttgaggttgtaaagttgtggatttggtttggttggtttgtagtttgtgttttgttttgggaattgggtaagtagtggggatgtggggaggagggagtgggtagttgttggttttttatttgggtgttagtgagtaagggttaggaagtggtggggatggtagttgggtattttttagttttgttatttttttttttgtttttgggggtggtgttttggttgttagttttagtattgtggatttgtttttttttttttttttgattttttttgagtgggttggggtgttttgtttggttttagtgtttg

SEQ ID NO: 453 - DNA, 2436 bp, Artificial Sequence
  chemically treated genomic DNA (Homo sapiens)
tgggtgttgaaattaggtagggtgttttagtttgtttaaggggaattgagaggggaggagggggtaagtttatgatgttgagattggtggttagagtattgtttttaggagtggagggaggggtggtggggttggggggtgtttagttgttatttttgttgttttttggtttttatttgttggtgtttaagtgggaagttagtagttgtttgtttttttttttttatatttttgttatttgtttagtttttgaagtgaagtgtaggttgtgagttagttgggttgagtttataattttgtagttttgggtagggtgagagttggtgtttggggttttttttgttggtgattagagtttggtgagttgatttttttatttttttgtgatggtggtagtgtggtggtggtggtgtggggggtggttttttgtgtgtttgggaggtagtggttgagaagtttgtggttgttggtgttgttggtttttttaaggttttggttgtgttgttttttgttgtgggtgaggtgggtgttagggttgaatggatagttttttatattttggggttttatgggtggtttttgttgtttttttttttgtgtagggttagggttgaggttgtttgttgagtgttttttatttttttagtttttgttttttgttgtttttttagtgttgtggtgtatttggttgtttttgtgtttttttggtgattggtgttgggaaggtatttgttttgttggagttttaggttgagggttttttggggtgggtagtattgttgtagtttttggtggtgtaggattgggggtgtgtttagtttttggtgattatttttaggtgtgtattgtgttgtgttttagtggtagggagaggtttatgttttttgtggaggttgtgggtttttggggggtgttgggatttgtaaaggggattttaaggtgattagttgatttgtgtggatgggatagtttggatggaggttttgtggtatttatttattttaggtgtaattgtttttttagaattttttttgtgtttttggttggttgattttttagtttttggaaaagtttttttgggtgtatggaattttattttttggtggtttttgaagttggttaggaattttggttgtgaggtgtggggtgggatggggatgtggtgagggttgagtatggtggtggggttgattttaggaaaggttggttaagtatttatttgtgtgtttagggtgggtttgttggtatggaaaggattttggtgttatgagggttgtttgggttttttttagtaggagggtgggaggtgggtgtgaaggggggattttaattttgttttaaatgaaaatgttttttgtaaagaaatagtttgggtagttagtgttggagagatgtgttggttaggatttgttgatataggtattttggttgtgtttttattttatttggtgtttgagagtgagtgtgagtgtattgattgttttaattgatttttttaaagttagatagtagaggttgtgtgtttgtatatgtagatatatatatatataaatatagatatttaagtgtatatagattatatgtatagagttatagataaggatatatatatatatattgtggttttttatgtatatatatttttaaagagttttgggtaatttggtgaggtttttgagtgttgtttaagatgtgtgtgtgggtggggatgtagggatggagaaaggggagtgtgaagtaggatttttagtaggttaagtgttgttgatttttttgtttttgattttaaatttttttttttttttttttagggaggtttgaattagaaattttaaatttgggtttgtttttatatttatagaggggaggagttttattttttggtgttttttatttttataatttttaaagattgtaaatgagttttttttttttgtgttagattttgttgtgttaaggtgttgagtttgtttaaaattttaggtaatatttatttttaggtggggtttagatttgaggttgttgtgggtttgggtttttggtttgtttgatttggggttagggaattggggaggggaaatttgtgggatagggggttgggggtgtggagttgtgtgtagtgttttagatgtgtggtatggaggagtgggtgagggtgttttttggatgttgtagttagttagttttttttttattttgggttttgtaggaatgtaattgaggatgttggttttgtggttgtttaatgtggtggtttttgtttattttttgtgtatttttttggtgatttttgtgttgtagttttttttttttttgtttagtatgtgtgaggattttgtggttgtttggttttttttgtttgttttgttttatggggtgttttttttattttttttggttaatgttttgggtaattagtttttgttatttagaatt

SEQ ID NO: 454 - DNA, 17219 bp, Artificial Sequence
  chemically treated genomic DNA (Homo sapiens)
tttattgtatattatttattttttaggttgttagtgtggtttttagttttttttaagttaaagatatattatttttttgtgaataagtgtgtgaatgtggttgtgtggtttatttttttgtatttaagttggttttatttatttggtaggaaagtttttgttaggtattgaggagtgtttgttatttagtttgtgtatttaagtatggatgtatgtatatgaatgttttttgtgtttttaagtgattttttttatatttttaaatgggttattgtttttggaatgtatttatagaaattttgttttagtttttagtttaataaagtttgggattttttttttagaatattgttatatatttttgtatttgtatatttatgtttatattttttttggttagttttttattttttatgtattttttgttttatttgggtaatggagtttaagtgttttgatttgttttagtatatgttatttaagtgtatattttaatttgagtatttgtattatttttattttttttgttttgtttataatgtggtttttttttaggttagattaatatgggtttgtagtttaaatgtaaatagaggattttttaagattataaatttttaaagaaaggaagaggagggaggaggagattggaatgttagtaatgagttatttatgtatagggtaatttatttgtttattttaagttgaagaaagaattagataaatgtttgtagaggtgtattaaaattttagattaatttaatattagttatatatatatatatataaatgatggattttataatatattagtgtttagtttttttttggaggttgtttttttgtatatatttaattttttataagtttttggttaaaagtatgtttatttatatagagataatttaaagattgttttgttttttttagtgtatatttgtatatgttggtggggtattttaggtttaggtttttggtttgtagtagttatagttagaggttttatttgattatagttatgtgtagatttttttgtttttgaatatttgtatgaattttttttgggaatattgagtttatgtttgttttttaaatttagtttttaaagtgagggtgtttattgtgtgtgtttatagttttttgattgagaaatatttggttaaattagattatttagtagttgtgtttggtttgtggaagaattgagtttgatgtattaagatgtgattgtgtatatataagagaaaggaaaattttaggtttagatttatagtttttttttattgtgagttattttgtttttaggaatttttattaggttttttgtttttttttttttattatattattttattatggtttttaaagggttaagagaaatttttatggttttttttttatttagtttttgggtttggaggttagtttgtttatttgtagtttatagagtttgttgttatttttgtgttttttttttttttagttttttagttgggagggagtttgtatgtttgtttagattgatttattattggtatattaataatatttgtgagagtgtggagattttgtttaggttttttggtttgtatggtttatggtggatagaatttggggagtgtgatggtgtttgtggggtgggggtagggggtttataggtattggttgttttgagtgtattatgggttttttttagttttggttttttgtgtttttattagtttggttgttggggtatagttatagttttgtgtgttgggtagttttatttttattttgtttaattttaaattgggtggggagtataggtgttgtgtttagagaataagagataggtgtgggaggtggggaggagtagttaggtagtgatgtgagtgggagtgagttaaagatatagtggaggtgattgtgggtaggaagaaagagtgggttgtgtgggttttgaggtgttgtatgtaatgtgttgttttgtgaagttatatttgtttttttgttgttttttgttattggtttttttttattttttagtggtgttttttgtagtttggatagtgaggttttggtttgtgtgggaggtggaggttaggatggttttgtaaagggttggagagaattgttaatgagttgtgtagtttattgatttggagaatattttttaattaatttttagttatttattggtgatagtgttttaaaggatagtgttggggttagttgagttttagttgtgatttgttggttgggtgtttgttgtttaaaatttgtgtgtttttttaaatattttaaggtaattggtgtgtgtggtggtgtatatttgtatattgaaggttagttttggattaaatttggatggtatattaattattgttttttttttttattttgttttatgtgttgaaattttgtttaaaataaatatgaaaattaatattgtaaaatttatattagataataggttgagagaggagtgggtagggttaaggaatgagtgtattttttaagtgtttatgtataggaatttttgaggttgataattaaaatgttttttatgtaagtaattttgttggtaaaattgaatttaatattttgtaaggattgattttggtttgtggtgtttgtttttagtgttataggaagtgttagatggttagaaatatttaagtttgtttgtatttattatttattattttttggggtgggttatttttttttagtttttatttttaggttattttaaggatttttttttaaaagattatttttagaattaaatattatattattttttttttagtgtttttttaaaatgaaaaaagggggggaaaatatagttaaaattttgagttgtttagtttagatgtagtgaggttgtgtgaatatttatttgaagtgtgttggtttttttttaaggtttgtttttaaatatatataatttttttttttttttttttgtttttttattttttttatttttattttttagatgttggtggtgtgtgttttggtgtgtgggtatttatagtttttagttggagattgtggattttttggaaaagatttattaatagtaaattatgttttgtttggttatggtttatatgttgttagatttgtttgtttttgggattttgggaagggtttatttgagtgtgtgagtggtgggaagtttgttgggattatgtgtgattttggttgttttattttatatatggtgttttaaggttttttttgtaaatagtaggtgtttgttattgttgttgtgagtttttgagttggtggaggttttgtggtgtagttgtttgttggttttgagtgtgggttttgtggtgttttgttttttttgttttggttgaggattttgttttggtgtgtaagtttttttttgtttatagtttttttgttatatgttttttgagtgggattaattttttttggttgtagatttttatatgtttattagggttatttattagattttttattgtttagtggagggtttaggttttgtttgtttttgttttttttttatgatgttgtttttgtataagtatattttatatttatttttgggggtttataatttaaaatttatgttgaatattggggagggagaggagggggaaagtgggagggggattgtagattataattttaaaagaatatttataaaataaagtgtttgatttggttggtgggtgggttaagttggaattttttgttttgtttgattttttagtagtttttttttttaatttatgtgatttgtgttttggggtaagttaagaaaaaatgggattttttttttgagttgtgtggtagtggtggtaggttgagtttggtttggtttgaggtatttgttatatatttttgtgtatgtatatgttgatgttttatttggaggaatgattggtttttggagaggtgagatgaggtggtggtggtggtggttgggggtttttatagtttttttttgagttgaaaaagaaagtagatggtaatttgttgtttttttttttttgtttgtgagttaatgttgaatttagttttttagtttttagtttattttttttttttttgtttgatttgtggtgtttagtggtgattgtgtttttgtgtatagatatatataggttgtaaatttttattttgtgaattttttgttttttttttggtttattgggaggtgttaggtttttagttgtgttttttttttttttggtgtttatgtggggttgtttaggttggttgtattttaaataatatagttatgaaataaaaatgaaagtgagttaagtagttaaagggaagtgtgaggtaaaagttttgtggggtatgttgtgggagggggttttgggagagggggttgattgtagtttttagtgtgtttgtttgtttatttgtttgtggttttttgggggaaaggtgttttgggtattgatttgaaatttttggtgggggagtaggtagggagtttgtgatttggttttttgaagtttttttttaagtggatttgaggtggtgagaaggagtggggggtggttgggtgggtggagagagatatgaggggtggggggggttggtgatgttaatgagtggagaaggagttgggttggagaagtgtggtgagtagtaaagtttgtggtttttggttgtttgtagtttgtttgtggtgttgtgtttatttgatttttttgttgtttgttggtagttggttgtttttggggttggttttgttgaggggtgggttttgggttgggtgggggtggggtggggtgggtttggggtttttgggtaggtggtgatagttttgtgtgattttttgggtttttgtagttggattgggtttggttgagtttagtagtttttgtgttgttgttgttgtttgtgtttgggtaggagttttagtgttatgttgatggtttgttgtgagtgtttgtttgggttgggtgtgtgtgagtgtgtgtgagtgttggttaagttgtttttgtgtggtgatagtgtggtttgggttttttgtttggtggtttgtgggttttttttttgttgttgttgtttgtttagtttttgtttttggttgtggtttgggtttttgtgtgttttttttgtagttgttgagtttggtttgtgtttagtgaggagtgtagttttgttttattttgttgttgggagtttaggttttgtttgttgttgtatgttgtgattttaatgtgttttttttttttggttttttttttttttttttttttttttttttgtttgtttttttttttgtttgttttattttttttttttttaatagttgttttttttttttttgtaggtgtagtgtttgggtgatagttgtttgtttgttgttgtttttagtttttgtaagtttgagttttgttagtttttgtttattttttgttgtggtgtttttgtggtggggttttgggaggggtgattttttaggaaaggtttgtttgagtttttttggttgttattgatgtatggtttggtatgttttggtttttttggatttgaattttggattatttgggtggtgttttttttttttgttttttggttttttttttttagtttgggttgagttggttgtgtatgtttgatttgggtgtatgttttgggtgagttggagattgatttgggtggtggtggtggtgagggttgttggtagagttagagttgaagggatgggggtggtgggggtggtttttttagttgtgtgttgagattttttttgttatttagaaggttagtggaggattgtaattattataaagtgttttgtattttgtttagttaaagttgttaaattttagtggtagtagttgttgttgttgttttttgttattagtgttgtgtttttttggttttgttttttttgagatttagtggagtgtggtttgtgtgtttttgtgtttatttttattttagtttgttttttttttttagaggagtttttttttattttggtgttaaaagttatttgaaaatattattttaggtaatggtggttgttttgtttgaattttgtgtttgagttttttggatgttttaattgtgtgggaattgtttggaggtgggggaaggggggagtagtttgtggaggtattgggaggtgtgtggggggtggttggtgagtggagatttgtttgtattttttttggtttttgagtatttttatggtttgtatttttgatggttggaggggttgtttaggttttttgttttggtgttgggagattattttttgtgttttattttttttgatagggagtaatttttggtttatattgtttgttttataaatttttatttggtaatgttgtgttgattggtgtttggtggtggtgtatagtttgtgtttgtagtagtttaatttaattgatatgtattgagtttttttagtgtatttggtgtggttttgggtgtggggggagggtgggggtaggtgggagggagggggaagtggagaagtgaggttttggtttttttggagtgtaaagttttaagggtgagttgagaagttttagttggtgaagttggtgggaaggggtaggagtgggggagggggtattttggattaattgtgtttagattgtgggtttggattttgtggttaatggtgattttatttggttgtttattagggtttttttatattgggaagggggtggggtgtttttttttgtttaaggataagatggtgtaggttttatgaaatataaatttgaaatggaggtggtttgtaaatttatatggaaagtttttaaaatattttggagtgtttttatgttaaaaataattaaaagtattttaagttgattattaagttaaggttaaggttaaaattagttttagttagtagatatttttttttttaaaaattagatttattattgattgtgggattggtattaggtgtgattttatttattttgttttagtttttagtatatagttataaaaatagttttttttaaagtagaagtgaaatatttttattgtttgaaatttgaaattttggtagaattaaatttttatgttttagagttgtttataataattgatgtaaaagataggtgagtaagtgtttttgtgagtagtgtttagttaggttgggttgtgaatgtttttaggattagtgtttgtagaatggaatgtatgtttttttttttttggtttttttgggggtggatatttttgtaagttaatttatatatttttttaatttttggtaataagtagaaagatatttggattattatgttgtaaaattattttttataaagatattttaggattagatattaaaagttattagattgaatgtatgtgagttatagatatagttggagaaaaggtttttggttgtgtgttgtggtaatatttttttttgaagtgattttttttatttaaaataagttaaaaataattgggaaggttgaagttgggtatttgtggggaaattttgaatgtggttttaggtgaggaggttgttttgttgttgtaggttggatgggagaattggtttgggttagtgtggagttgtgttaggtttttttggtttggttaggttgaattgtagaggttttggtttggtgtttagttattttttattttttttttttgtttttttaattttgtttttaggtataggttttttttggagtttgaagttgtatgtaaatgtttagaatttttagaaaatttaggaattgagtttggggtttgtagttttttagagttttatggttttttggggttgttgataaagaggtttgtttgtttaattttaaaagttttagaatttgggaggttgagttaggagaattgtttgaatttgggaggtggaggttgtggtgagttgagattgtgttgttgtattttagtttgggtaataagagtgaaattttgttttaaaaaaaaaaaaagaaaagaaaaagaaaaaaaaaagttttagagttaaaatgaataggggtggtgggggtgttgtaaatgtgaaggggttgaggggagggttgattgggggagaaatttgatgttggagataaataggttagtaaatttgtttttgatgtaatttgtaatatttttttttattttttttagggattttgtttttatggtaggttggtaggattaaagggttttttttttattttttagggatatattttttaattttgtgggattttaaaaatattttattaagggagttttaagaggtatgagtggtgggggggatttgtgatttattgggaattaaaatgtgggatttttttgaggtgttataaggtagagggggggaggggagattatatttattggtttggttagttttaattgttttggggaaaataagtagaaagttgttgaagggtaattttattttgtgtttttatttaagaaggggtttagggagttggggatgttgtggggtttgtaatgggtgttggtggtttggttttttttttgttttttttttttttgtttttttataagttttttgggagttgatttgggggttaggttgttatatttagtatttagtaaggggaggattttaatgaaaatagaggaggaggagagagtgagtaaaggagtgtatgggaggggaggttgtgtagtttatggagaaataaagaaataggtgttgaaatgagaggtgttgtggatggagtagtgggggttgtttttttgttattaatttttttttttatggaagtgttttttgattataataaattatttgattttaggttaattaggttttgtaattgggtaattgagttggtttttttaggagtaggttttgagtttggttgttttttttaaggtaggttgattttgtaagatttgttagggttttttttatatatttttagttttattttggtttaggggaaaggttaggtattttgtgtttggggggattttggttttttaattttgtgtgtaagatttatttataatgtatattaggatttatattataaagtttataatgtatgtgtaggtttttgatggttttttttggaggttgtttttagggtgatgatatttggtattggaataggtgggatttggatgagtatagataatgtatttttatataatgtgaggtagtttttttttaaaaatatatttatatttatagttttttggttattttgtataagaattttgggtttatttaatggtattttaaaaaatatttgttgttttattttttaagtataaggtatagttggttttttttttgaaatttaaatgaggtaataaataggaggtgtattttttttttaggattttatttatttggaaatatttaaaggtagttgttttttagggtagaagattgttggatttaagggttgttaggttgaatatgattgtttttttttttttttagtttttggagggttattgggtgtttggggaaggaaggttttaagggtagtttttttgtggtttttagtaattattttggaatttttggtttgggtttgatttgggttaggttttgagttttttgaatataggtatgtgtgggtgaattggtatttatattatgggggtttgtagggtggttgggtgttgattaaatgggtataatataggaggtttttgggaggttggttgttttttgtgtttggtaagggtttaagagtttttgatgttgttgtgttgggttgggtgtttttgtagataaatttggatgttatgttttgttttggttgtttatttagtaaggtgttttttgtgtatattttatttggttgggggtagtgagtgggaattgttgggagagggggtggggaattattaattatttgtttttggatttagtgtgttggtttttggttttagttattttgtatttagttttttttttttatttttattgggtttttgtgaagatgtattattttgaatttttttgtggtattatttttgaattggaggggtagagaaggttttgttagttttttgtttgtagtaggaaggtgggtatggattagtagaagggaaagtggtgttgatttgtttttaaatatttttgtttttttgtttttaataaagttggttatagaggtgagtggtgtgggatggttgttttgagaaggttgtagttaggagtaaagttttggggtttataatggattgggtattttaaatggtgtaatttttggtatattttatttgtttttattttattttttgaattattttgtttttggtgtttatttttttttttatatttgtgtttttagtgtgttagtagttgtgtagtttttggttttgagtgtggggggtggggtgggggggtttagggtggtttgtgtggtgtggtttgatagaattttttgtgtgtggtggagggaggaggttaatgtataatgtatagtgtttggaagtttggttattagtggtttgttggtgatatagataaatgattgagagggaggagatttagtttgttttggagtttaaatagattagtgtggaggggaaatgttatgatttaaaagtgtgtgtttgtagatatttgtatatattttaatgatttttagtaggttatgtgttttagttttgtatttttttttttttaaaaggaggatgtgtttagaggagggaggatgaaggtagagtgagaggttttaatttagatttattagtagtttttgagagatgaaggaggggagaagtttagaaagtgaggtttggggaagttatatgatttaaggttaagtttagattttgtttttaaaataataatttaaaaaaagagttatttagttttttattttggattatattttgtgttgtattagaaaggtttgggggaaagaataaattttgttatttttgttttttttgggagtttatatttttgaattttttttttttattgatattttagagatttttttttttttggtttaatatattagtgttttttagtaattaaggtgagaagggggtggggataaagataagttaatttttttttttgttatgtaagtgtgagagataagataatgttaagttggggtaaagtggttgtttataatttttttttagtgattttgattggttattttttattttgtaaaaatgttttttttgaaaattggattaaaaaagaaaaagagaaaaagaaaagaaagaaagatttttatttggaagtgatatttaaaatttattttttttttattgataatttattttttattggtggggttttttaggaaaagttgtattttgattgtaggattttaggtttttttgtggggggtaggattattagtgtaattaggttgaataaaattagggatgtgtgatgaggatttattttgtatttaatttaagtttgtggttgggtttttttttttttagttattggttgatgtttgtgttttgttattgtatttagtgtttttaaattaaataggtagttatatttgggagggttatataattatgttaatatgaagtggttgttaatgtgaaataagaagaaatttttttgatatttataggtttttataaagggagagaaaggaaattatattttttagaatttgaaagtttttagttgaattggatttttggggagttttagaaatttttttttttgtataggaattttgtgaaggggtttttggaagattttgttgaggaaggttttggtattagattttatgattttagagtgttttgtaaattttttttggtttagtggttagttttagaatgtaaattttaaggtgggtgttttagattaagttgatttagtttttgtttatttttagtttataattttgaggtttttattttttgtttttgattgggttggtattgtggtgtttggtatatgttaagtttattgtttttaagttaggttgtaagatttaaaggttggggtttgttgtggatggattgtttttggggagttgaaattgtttagtggggaaatttttttttttgtttttttttgaaaagtttggttgtggtttaagttttgagtaagtgggtatttgttgatagttgggttttatgtaaggtttatatgtgttttattagttagtttgagttttttttgggtgagttgtttggtgtggttttaaggttgggtttaggtggggagagggtgtggggttgtagtgagttgtgggtggaggtgtgggttttgtggagtttggttaggtttggttttgtgtttttgggtttgtgggtaagttgagttggtggggtaggttgttttttggttggtgttggggtgttaagttgtgttttatgtgtttgttatattagtagtagtggtggtggtggtgaggagggggtgttgggaggtgtgtggttgtttttgtggggtttttggattttgtttttttgtttttttttgtgggggttgggttgagattattttgtggtttttattttagtgtaagttgaaagtggtgttgttagatgtagagaggtttttggggtgttgttttgagagttgtgtggtggtagtagttaggggagggtgttttttgtggttgttttgttgttgttgttgtagttatggggattggaagtttttgtgttgttttgagtggtttttgttggttttagggttgttttagatgagggttggttgtgtgttatttttgatttttttttgttttaggtgattatttgggttttgtggtattttggtgtaagttgagaggattttttttgtggtttgatgagatgtttttgtttttttgttattattataagtatgtttttttgtattgtttgtagttttgtagttgggattggaggggtgtggagttgttattttggttgggtaggaatatttgtttttaggttttgtagttgggtgtgtgttgttgtgagaggttgtttattgttgtgtgtagagattgtggaggagaaaatagggttttgaagtttagggttaggagtagttaagttttggttatttttattttttatttattgtaggtgatagagtgtgaagttagagggtttgttgggggtttgggtttttttttgaaggttgaagggttgttatttttgggatttggtttttggtttgaagaggttgtttataaaatagatggggtaaaatttgttttgggagtttttttagtgtttgtttttgttttttaaattagatatatttattttttttttagttttattttagtttttggtgggggatgggagtaggttatggtggtattggtattttatttgtttttttttatgtagggatgtagggttggttgtggggtttggattttgttattttatttagggaagggttaatggatgttttttgttttttttgtgtttggaggagatttggtggtggagttgatttgtaaggtttgttttgttttatttattttttatttttgttttattttttttgatttttttggtttagggtttggtttgggaaggtgttgttttgttagtgggagttgagtgagtgtatagagaaaagtttttttattttaatgagagtgtatatagtgttgtagtgaggaggatgattatttggtgggtggggggtgtgggtttgggttgtgggtggtgtgtgtggtggttttgtgggtttggagtttttgtttgtttggttgttaattgtatgttttttgttgttatggaggtaggtgggagttggtggttgagtttagtgttgatgatttggtgggtgatatggaaatatggtgtagtgttttttttttgtttgtgtttttgttttttgttttttttgtgtttttgttttttgttttgtatttttttttgtttgtgtggtttttgtagttttaatgttttgtttttggtttggtattattatgttagtagttgtttttttgtggttttgtgtgttttttttttttttgtttttggggtttatagaaaatgtttgtttttgttttgagtttttgttaaattaaatttgtggtggtaatggaaggtggtgtaggtggggaggggtttggggattttggtagtagttggttagagtgtggtggaaattttttttgttgggttttttgtttttttttattttttttttttaatatagagttgttggttttttgatgtttttttttttgtttttgagaggttttagtgttttaggaaggtttgggttatagagattgtgattaggggtgaagaatttagagtgtgtgtttgtgagttttgaggttttggtatttgatgattttgttttttgtagttttgatttatttttttttttttggttatttggggttttgtattagttggtgaagaaggggagggaagagaaagtgttttttttgtgtgtgtggtttttattttaaggatttgttggaatttgttatttttaattgtatagtttttttttgtataggatttagggtgaaagtggggaaatgttggatttagggggaaagggttgggttagaaatttagttttggaggttggattgtatttttttggtgggtttagttatatttggttggtatgtggggtggggtgatttagtagagtgggggatgtaagggttaggttttttggtttaggagatgttaaatgttttaattttggagtgagagagtaggaatttttgtttttatttaagtgtgtgtgttttttagtttgatgtgtaagttgtggttttttgtgttagagttgtttaggtggtaattttttaagtttgtaattaagtgaggtgttgttgtgttttttgttagtgttggttttgttagttgtatatggttttggtgttttggtttgaggttttgtgattagttataggtttgttttgttttttttttaatttgtttttgtaggtagtttggggatgtggttgatttggtggtgttggtagggagttattgtttgtggggtgggttttttgattagtgttagttttgttgtgtttgagttggtgtgggttttggggtgtgggtttggtgtttttttttttttatagttttttggttggggtggtggtgttttttttttttttgttttttttttgggtttgtgagatttatttgtgtggtgttatttgtataaaaataggataagtgtttttgtgtgtttatatgtgggaggtgaaatttttattgatgtgtttgtgtggagtttttgattgttggagtggtttgatttagggtgtttgtgttgttttttataagaaaggagagaaagttttttttaatttttttggtggtttgggtttttagaagtatgtttttttgtgtggttggaatggtttattatttgggttttaagtgtgttggatttatagtgagtaggttgagggttaggtgggaggtttattatgatttataaaattgggtggtttaattgttagttgttaatttatttatatgtggagttttttaatgttttttttgtttgggtttggttttttgagggtttgttttgatatagttagagttgttaagtgggagttaatttagtggttttttttttttgttggtagtgtggttttttttttttggtgatttttgtttttttggtttattgtgttgtttgttagtaattttttagtttggataaatagttgggagggtgttggttgtgtggagttagtaaattaattattaatttttaagtgaggtttggattaggggagggagtggtggttagagttgagtttgtgaggtgagtgtaaagtttttattggggttaggagttatttatgtgttaatgaattgggtgtgtgaaggtgggttttgttatggttttttgggtttttttagaagtttttgtttgttgggttttttaagtttgtattttgtttggttaggtaggttgtgttatagtgttgtttttgggagagtttgaatattaatgagttgttttgggttttagtggtttgttttttataggagagtgttttgtgtttgggtaagttttttggatttggttgggttttttttggtttaggtttgttaaattaaattgattgtattttgtattgattaatttttttgtggtattttttttttttagtttatggtggagttggtatgtagggggttaaaagttttggtttgttttggttttttggttgtgaggagaaaatgttgattaaagtgtttaaggggaaggtaatatatgtatatttggttttgggttgaaggaggttgattggagatggtttttgagttatttgttttgatttgttttttatatttttgggaatgtggtggtggtggtggttttggtttgtatgatttgtttggtggagtgttgtgttgttgggttgggagggtggtggggaggaggagagatgagggggtgggaggtgaatttgggttgtgtgttaagaggtttggagttgtagattagttattgtttggttttgtgtttttgggtgtgtttgggaattgggagggtaggtgttggttttgtttagttgggttttttggtttttggtgtgggtgtttttatttttatttttgtgtgtttttggtgtggttggtttgatttttggggatttgtgtagttgagatttatttgttaggttaagggtaggatagaaattttgtaagtggagttttgtttgtgaataggaaatttttttttgatgaggtgttgttttttttttatgttgggttttaaaataaaattttagagtgggtggttaggtatttagttttgtttgttatggttggtgatttttgttttttggttttggttttgggtggtggagttaagttaatagagttggtggatggatttggtgttggttttgtggagggtgttaggttgttattttttggggtttggatggggttggtgggggtgtggagttttggagtttttgtgtttttttaggttttatagttattgagtggttttgtggagttgtttgaggttgttgggttagtggttttttggagggtgtggggggtggggaggttgtgtggtgttgttgatttggtgaattttgttgtgggagtttgggagggttgtgagtttggtttggtaaagtttttgtggaaattttatgttttgaaatttttgtggtgttgtagaaggagggggagaggggagtgtgggaagtgtgtgggggtggtttgtatttgtttttttttgttggggagtgggttttgtggttttttgggttttatgggaaagttggagggtggggatggttgggtttttgggtttg

SEQ ID NO: 455 - DNA, 17219 bp, Artificial Sequence
  chemically treated genomic DNA (Homo sapiens)
tgggtttggggatttggttgtttttgttttttagtttttttatgaggtttggggggttgtggaatttattttttggtggggagaggtgggtgtagattgtttttgtgtgttttttgtgtttttttttttttttttttttgtgatgttgtaggagttttaaaatatggagtttttataggaattttgttaggttgagtttgtagtttttttgggtttttgtagtgggatttgttgagttggtggtgttgtgtggtttttttgttttttatgttttttggggagttgttgatttggtggttttgggtagttttgtaaaattgtttggtggttgtagaatttggggaggtgtgggggttttggggttttgtatttttgttgattttgtttgggttttggagggtggtagtttggtgttttttgtggggttggtgttgagtttgtttgttggttttgttggtttggttttgttgtttggggttggggttgaggagtggaggttgttggttatggtgagtgaggttgggtatttggttgtttgttttggagttttgttttgaagtttggtgtgggggaggggtagtattttattaaggagaaattttttgtttgtaagtaagattttgtttgtagagtttttgttttgtttttgatttgataagtggattttggttgtgtgggtttttgagagttgagttagttgtgttaggagtgtgtgggggtgggggtgggggtatttgtgttgaggattggggagtttggttgagtggggttgatgtttgtttttttggtttttgggtgtatttgggagtgtagagttgagtggtgattaatttgtggttttgggttttttggtgtgtagtttgggtttgttttttgtttttttgtttttttttttttttgttgtttttttagtttagtagtgtagtgttttgttgagtgaattgtgtgggttagggttgttgttgttgttgtgtttttgggagtgtgggaagtgggttgaggtgggtggtttgggagttgtttttagttggttttttttgatttgggattgaatgtgtatgtgttattttttttttaagtattttgattagtgttttttttttgtagttgaggagttagagtgaattggggtttttaattttttgtgtgttggttttattgtgggttgagggaagagggtgttgtagggagattggttgatatagggtgtgattagtttggtttagtaagtttgagttaggaggagtttggttggatttgaggagtttgtttaagtgtgggatgtttttttgtggagagtaggttgttgaggtttgaggtgatttgttaatgtttaagtttttttaggggtagtgttgtaatgtgatttgtttggttaggtaaggtgtgggtttgaaaggtttggtgggtggaggtttttggaggggtttgggaggttatggtgggatttgtttttatgtatttggtttgttggtgtgtgggtggtttttaattttggtggaggttttgtgtttgttttgtggatttggttttggttgttgtttttttttttggtttaggttttgtttgggagttaatgattgatttattggttttgtgtggttggtgtttttttagttatttgtttaagttgaggagttgttggtgagtagtgtagtaggttaagagagtgggggttgttggggaagggaagttatgttgttgatgggaaggagaggttattagattagtttttatttggtggttttagttgtgttggggtaaatttttaggaagttgggtttgggtgaagggagtattgggaagttttatatgtaaatgggttggtagttggtgattaggttgtttgattttatgagttataatgggttttttgtttggtttttaatttgtttgttgtggatttggtgtgtttggggtttaagtggtggattattttggttgtgtagagggatatgtttttgggggtttaggttgttgaaggagttgagaaggattttttttttttttttgtagaaggtaatataaatattttaaattaaattgttttgataattgaaggttttatatagatatattaataaggattttgttttttgtgtatgaatgtatagaaatatttgttttatttttatgtaaatgatattatataaatagattttgtaggtttgggagaggggtgggaggaggaggggtgttgttattttagttagggggttgtgagaggggaggggtgttaaatttgtattttagggtttgtgttggtttgggtgtagtggggttggtattggttaggaggtttgttttgtgggtagtggttttttgttagtgttgttaagttggttgtgtttttaggttgtttgtagaggtggattagggaaggagtgaagtgagtttgtgattaattgtggggttttggattggagtattaaggttatgtgtgattgataggattgatattagtagaggatatggtgatgttttgtttaattgtaggtttaaaaaattgttgtttgagtagttttggtgtggagagttatggtttgtgtgttgagttagggagtgtgtgtgtttgggtgggggtgggggtttttgtttttttgttttaaggttggaatgtttggtgttttttggattgagggatttggtttttgtgttttttattttgttgggttgttttgttttgtgtgttgattaagtgtggttgagtttgttaggagagtatgatttagtttttagggttaggtttttgatttgattttttttttttaaatttgatgtttttttgtttttgttttagattttatatgggagggggttgtgtagttgggggtgatagattttaataaatttttaaaataaaaattatatgtatgaaagaaatatttttttttttttttttttttttattgattgatataaagttttgaatgattaaagggaaagaggtaagttggggttgtagggagtaaggttattgagtgttaaaattttggggtttatagatatgtattttgagttttttatttttggttatagtttttgtggtttagatttttttggagtattggggttttttgggggtgaagggagaagtgttgggaggttggtggttttgtgttggggagggggagtgggagggagtggagaatttagtgagagaagtttttattatgttttggttggttattgttaaaatttttggatttttttttgtttgtattgttttttgttgttattataagtttggtttaatgagagtttgggataaaagtaaatgttttttatagattttgaaaataaaggggaaagagatgtgtggggttgtggagaagtggttgttagtgtaatggtgttaggttgaaagtagagtattaaaattgtaaaagttgtgtgggtgggaggaagtgtgaggtgggaggtgggagtgtggggagggtgggaggtgggagtgtgggtgggggaggggtgttgtgttatgtttttgtgttatttgttgagttgttggtgttgggtttggttgttggtttttgtttgtttttgtaatagtagaaagtgtgtgattagtagttagataggtggggattttgggtttgtggggttgttgtatatgttgtttgtggtttgagtttgtgttttttgtttgttgggtaattattttttttgttgtagtgttgtgtgtatttttattagagtagggaggtttttttttgtgtatttgtttggtttttgttggtaaaataatgtttttttgggttgggttttgggttaggagagttggggagggtgggatggaggtggggggtgggtgaggtagggtaagttttgtaggttagttttgttgttggattttttttggatatggaggagatggggagtgtttattggtttttttttaggtggagtggtaaagtttgagttttgtagttgattttatgtttttatgtggaggggggtgggtggagtattggtgttgttatgatttatttttgttttttgttggaggttagagtagggttgagggggagatgagtgtgtttggtttggagagtgggggtggatattgggaaggtttttaaaataggttttgttttatttgttttatgaatgatttttttaggttagaagttggattttaggggtggtggttttttgatttttgaaaggagatttgggtttttagtaggttttttggttttgtgttttgttgtttgtagtgggtgggagatgggggtggttgaggtttggttgtttttggttttgagttttggagttttatttttttttttgtgatttttgtatataatagtaggtagttttttatagtagtatgtgtttagttgtagggtttgggagtaggtgtttttgtttggttggagtggtggttttgtgtttttttggttttagttgtggagttgtgagtggtgtgggggggtgtgtttatggtggtagtagagggatagggatattttattggattgtaggaagggtttttttggtttatattgggatattgtagggtttgggtggttgtttggggtgaggagggattaggggtgatgtgtggttagtttttgtttggaatagttttggggttagtggaggttgtttggggtggtgtgagggtttttggtttttgtgattgtggtggtggtggtggggtggttgtgaggagtatttttttttggttgttgttgttgtgtggtttttggaatggtgttttaggagtttttttgtgtttggtagtgttgtttttggtttgtgttgggatgggggttgtagggtggttttggtttagtttttatggggaggggtggggaggtggggtttggagattttgtgggaatggttgtgtgttttttagtattttttttttgttgttgttgttgttgttgttgatatggtgggtatgtgaagtgtagtttggtgttttggtgttagttagggagtggtttgttttgttgatttagtttatttgtgggtttaggaatgtggaattgagtttggttgggttttgtggagtttgtatttttgtttgtagtttgttgtggttttgtattttttttttgtttgagtttggttttggggttgtgttaggtggtttgtttgaggggaatttgggttgattaatgggatgtgtgtgggttttatgtgaggtttggttgttagtggatatttgtttgtttggagtttagattgtggttaagttttttggggaagggtgagaggaggggtttttttgttgggtggttttagttttttagggataatttgtttgtggtaggttttaatttttggattttgtagtttggtttggagatggtagatttggtatgtgttggatgttatggtgttgatttggttgggggtagggggtgggagttttggggttgtgagttgggggtgggtagaggttaggttagtttggtttggggtgtttgttttgaggtttgtattttggggttagttattgggttggggggaatttgtagggtgttttgaggttgtggagtttgatattaaaattttttttgataaagttttttggaaatttttttgtgaaatttttgtgtggaaagaaggatttttaaaattttttgagggtttggtttggttgggagtttttgggttttagggagtgtgattttttttttttttttttataggggtttataaatattagaagagtttttttttattttgtattaataattattttatgttgatatagttatatgatttttttaagtataattatttgtttagtttgaaggtattgagtgtgatggtgaaatataaatattgattagtaattaagagaaggaaaatttagttgtgagtttgggttggatataggataaatttttattatgtatttttggttttatttagtttaattgtattagtaattttgttttttgtgagaaagtttgaaattttgtagttgaggtgtgattttttttggggagttttgttaatggggggtgggttgttagtggaggggaggtgggttttaaatgttatttttaaatgaaaatttttttttttttttttttttttttttttttttttgatttagtttttgaaaagagtatttttgtgagataagaagtgattgattaaaattgttaaggggaggttgtaagtagttgttttgttttagtttagtgttattttattttttatatttgtatggtggaaaaaaaaattggtttatttttatttttattttttttttgttttaattgttaaaaaatattagtgtgttaaattgggaggaaggaggtttttggagtgttagtggaaaaggaagatttaaaaatgtgggtttttgggggaagtaagggtggtagaatttatttttttttttaggtttttttggtataatatagggtgtagtttagggtggaaggttgggtggttttttttttaaattattattttaagaataaaatttgggtttggttttgggttgtgtggtttttttaggttttgttttttgaatttttttttttttttattttttaaaagttgttggtgggtttgggttgaggttttttattttgtttttatttttttttttttagatatattttttttttggggagggggggatgtaaggttaggatatatagtttgttggaaattattaaaatatatgtgagtgtttgtaaatatatatttttaaattatggtgttttttttttatgttggtttatttaaattttagagtgagttggatttttttttttttagttgtttgtttgtgttattgataggttgttaatggttgggtttttaggtgttgtgtattatgtattagttttttttttttgttgtatatagaaggttttgttaggttgtattatataaattattttgagtttttttattttattttttgtatttagggttgggggttgtgtggttgttaatgtgttgggaatgtaggtatggagaggaggatgagtattgagagtagagtggtttggaaggtggaatgggagtgggtgaaatgtgttgaagattatattgtttggaatgtttagtttgttgtgagttttaaagttttgtttttggttgtgatttttttgaggtaattattttgtgttatttatttttgtgattgattttgttgggggtgggagggtagaggtatttagagatagattagtattgtttttttttttgttggtttgtatttatttttttgttgtaggtgaggggttggtagagttttttttatttttttagtttgggagtggtattgtgaaggggtttggggtggtgtgtttttgtagggatttggtgggagtggaggagggaagttggatataaaatggttggggttggaggttggtatattgggtttgaaggtgagtagttggtggttttttgtttttttttttggtggtttttatttattgtttttagttgggtaaaatatgtgtagaaggtgttttgttaaataagtagttgaggtgggatgtggtgtttgggtttatttgtaggagtatttggtttagtgtggtggtgttgagggtttttaagtttttgttgagtgtaagaggtggttagttttttagaagttttttgtattatgtttatttggttgatatttaattattttgtgggtttttgtagtgtagatgttagtttatttatatgtgtttgtgtttggggagtttagggtttgatttaaattgagtttagattagaaattttaagatggttgttaggaattatggagaggttgtttttagggttttttttttttaaatatttaataattttttaaaggttaggaagaagaaagaatagttatgtttagtttggtgatttttaagtttagtagttttttgttttgggaggtagttatttttagatgtttttagatgagtgaaattttgggaggaggatgtgttttttgtttgttattttgtttgagttttagaggggaagttagttgtgttttgtgtttggaggatggggtagtggatgttttttaaagtgttattggataagtttagagtttttgtataaagtgattagaagattataagtgtgggtgtgtttttaaagaaaggttattttatattatgtaaaaatatattatttgtatttatttgagttttatttgttttagtattaagtgttattgttttgagaatagtttttgaggaggattattggaagtttatatatatgttataagttttatgatgtggattttagtatatgttataaataaattttgtatataaggttagaaggttagggtttttttaaatataggatgtttggttttttttttaggttagggtggagttggaggtgtgtgggagaggttttagtgggttttgtagagttaatttgttttgagaagggtagttaggtttaaggtttgtttttagaagggttagtttgattgtttagttgtagggtttggttagtttgaggttgagtggtttgttataattaggagatatttttatgggaagggagattggtggtggaggggtagtttttgttgttttatttgtagtattttttattttggtatttatttttttatttttttgtgggttgtatggtttttttttttatgtatttttttgtttatttttttttttttttttgtttttattgaaattttttttttgttgagtgttgggtatagtagtttgatttttgggttagtttttgaagggtttgtgggagggtaggagaggagggggtaggagaagggttaaattgttggtatttattgtaggttttgtggtatttttagttttttgagtttttttttaagtgaggatataagatgggattgttttttgatagttttttgtttgttttttttagaataattggaattaattgggttaataggtgtaattttttttttttttttttgttttatagtgttttgggaaaattttatattttaatttttagtgagttatgaattttttttattatttatgttttttaggatttttttaataagatatttttgaaattttatggagttgaaaaatgtatttttaggagatggaggagaaattttttaattttattagtttattgtggaggtaagatttttagaaaaggtgggggaggatgttgtaaattatgttaaaggtgaatttattggtttgtttgtttttagtattaaattttttttttagttagttttttttttggtttttttgtatttatagtatttttattatttttgtttattttaattttaggattttttttttttttttttttttttttttttttttttgagatggagttttgtttttgttgtttaggttggagtgtaatggtgtgattttggtttattgtaatttttgttttttgggtttaagtgatttttttggtttagttttttgaattttaggatttttaaagttagataaataggtttttttgttagtagttttgggaggttgtaagattttgagaggttgtaggttttgagtttggtttttggattttttaaaagttttggatgtttatatgtgattttgaattttgagaaaagtttgtgtttgggggtagagttggggagatgaggggaggggatagaaggtggttgggtgttgggttagggtttttgtggtttggtttaattgagttggaagagtttggtatggttttatattggtttaggttagtttttttgtttagtttgtagtagtagagtggtttttttgtttggaattatgtttagagtttttttataaatatttagttttagtttttttggttatttttgatttgttttgaataaaaggagttgttttaaaaagaaatgttgttataatatataattagaggttttttttttagttgtgtttgtaatttgtatgtgtttaatttaataatttttaatgtttggttttaaaatgtttttataaaaaatagttttatagtataatagtttaggtgtttttttgtttgttattggagattaaaaaaatgtgtgggttggtttgtagagatatttatttttagaaagattaggaagaaaaaagtgtgtattttattttgtaggtgttggttttggaagtgtttgtggtttagtttggttgggtattgtttgtgggggtatttgtttgtttgttttttgtattagttgttataagtagttttggagtatgaagatttaattttgttgaagttttgggttttaaatggtagagatgttttatttttgttttgagaagggttgtttttataattatgtgttgagaattaaaatagaatgaataaaattgtatttaatattagttttatagttagtagtgagtttaatttttaaaagggaaaatatttgttagttagagttgattttggttttgattttgatttagtaattaatttgagatgtttttgattatttttggtatggggatattttaggatattttaaaaattttttgtgtggatttataagttatttttattttagatttatgttttatggagtttgtattattttgtttttaggtagaaagagatattttattttttttttagtataaaaagattttagtgggtagttgaatggggttattattggttgtgaagtttgggtttgtagtttgggtgtggttagtttggaatatttttttttttatttttatttttttttgttagttttattaattagggttttttggtttgtttttgaggttttgtgttttggggaggttggaattttgtttttttgttttttttttttttttgtttgtttttgttttttttttgtgtttagagttgtgttgggtgtgttggagaagtttaatatgtgttaattgaattgaattgttgtgggtgtaggttgtatgttgttgttaagtattgattagtatgatgttattgagtggaaatttatggggtgaatggtgtaagttaaaagttgttttttgttaaggaaaataaaatgtgggagataattttttaatgttggggtgaggggtttgggtagtttttttaattattagaggtatagattgtgaaaatgtttgagaattgggagaaatataggtggatttttgtttgttgattgttttttatatgttttttggtgtttttatgggttgtttttttttttttttatttttaaataatttttatataattgaaatgtttggggaatttgggtgtggagtttaggtggaatggttattgttgtttggggtggtgtttttaggtagtttttaatattgaaatgggaaagggtttttttgggaggaaggggtaaattggggtgggggtgagtatgggagtatataggttatgttttgttgggttttggaggggatgaggttgggagagtgtagtgttggtggtaagaggtggtggtagtggttgttgttgttggggtttgatagttttggttgagtggagtgtgaggtgttttatggtaattgtggttttttattggttttttgggtagtgaggggagttttggtgtgtggttgggagagttgtttttgttgtttttatttttttggttttggttttgttggtagtttttgttgttgttgttgtttaagttggtttttggtttgtttaggatgtgtgtttgggttgggtgtgtgtagttaatttggtttgagttggggaggggaggttgggggatgaggagggggggtgttatttaagtggtttggggtttggatttagagaggttaaaatgtgttgggttgtgtattgatgatggttggggaaatttgggtaaattttttttggggaattattttttttgaaattttgttgtggaggtgttgtagtggagggtgagtggagattggtggagtttaaatttgtgagagttggaggtggtggtgggtgggtggttgttgtttgagtgttgtgtttgtggggggaggggaggtggttgttgggagggagggaggtagggtgggtgggagggaggatgggtggagggagggggaggaggaagaggagggaattagggaggggggatgtgttgggattgtggtgtgtggtggtagatggagtttgggtttttagtggtaaggtgaggtagagttgtgttttttgttgaatgtgggttgagtttggtggttgtgggggagatgtgtaggagtttagattgtgattgagagtgggagttaggtgggtggtggtggtggagggggagtttgtgagttgttgggtggagagtttaagttgtgttgttgttgtgtagggatgatttggttaatatttatatatatttatatatatttagtttgagtgggtgtttgtggtgaattgttaatatggtgttggggtttttgtttgagtgtgggtggtggtggtagtgtgggagttgttgagtttggttaagtttagtttagttgtgggagtttggaggattgtatggggttgttgttatttgtttggaggttttgagtttgttttgttttgtttttatttggtttagagtttattttttggtggggttgattttgagggtagttggttgttagtagatggtgagggagttgagtgagtgtggtgttgtgagtgggttgtgggtagttggggattgtaaattttgttgtttgttgtgtttttttggtttggttttttttttgtttgttaatgttgttaattttttttattttttatatttttttttatttatttaattgttttttgtttttttttgttgttttgagtttgtttgggggaaaattttaaagagttggattgtaggttttttgtttatttttttattggggattttaggttagtgtttggaatattttttttttgggagattgtggatgggtgggtgggtgggtgtgttgagggttgtagttggtttttttttttggggtttttttttgtagtgtattttgtgaagtttttgttttgtgtttttttttggttgtttggtttgtttttgtttttattttatagttatgttatttaaaatgtagttaatttaagtggttttgtgtgggtattagggagggagggggtgtggttgggggtttggtgttttttggtgggttaggaggagagtagggagtttgtagagtggaagtttgtagtttgtgtgtgtttgtgtgtgggagtgtggttgttgttgagtgttgtgagttgggtggaggggggggaggtgggttggaagttgggaagttgggtttggtgttagtttgtgagtaggaaggggagggtagtgggttgttgtttgtttttttttttgatttgggaaagaattgtaaaaatttttagttgttgttattgttgttttgttttgtttttttgggggttggttgtttttttaagtggaatgttggtgtgtgtgtgtgtgagggtgtgtggtgagtgttttgggttgagttgagtttgatttgttgttgttgttgtgtaatttgggaggggagttttgtttttttttggtttgttttaaagtatgaattatgtggattaaaaaaaaaaattattaagaaattgagtagagtaaggggttttgatttggtttgtttgttagttaggttagatgttttgttttgtaaatgtttttttaagattataatttgtgattttttttttgtttttttttttttttttttttttgatgtttagtgtaggttttaagttatgagtttttaggggtgggtgtagaatgtgtttgtgtgggggtagtgttgtggagggagggtgggggtgggtgagatttgggttttttgttgggtaatggggagtttggtgggtagttttgatgggtgtgtgaaagtttgtggttggaggaagttggttttatttggagggtgtgtggtaaggaggttgtaggtgaagaggaatttgtgtattggggtaagatttttggttaaggtggggagggtgaggtgttgtggggtttgtgtttggagttggtgggtggttgtgttgtagagtttttgttaatttgggggtttgtggtggtggtgatgagtgtttgttgtttatggagagagttttggggtattgtgtgtggagtagggtggttgaagttatgtgtggttttggtgggttttttgttgtttgtatgtttgagtgggttttttttggggttttggagatggatgagtttggtagtgtgtaggttgtggttgggtgaggtgtaatttgttgttaatgaattttttttagaaagtttgtgatttttagttagaggttgtgagtgtttgtgtgttagggtgtgtgttgttggtgtttggagggtgggggtggggggaatggaagagtgaagaaggaaggaggagggttatgtgtatttagaaataaattttaaaaagaaattaatgtgttttaaataggtatttgtatagttttgttgtgtttagattagatagtttggggttttagttgtgttttttttttttttttttgttttgagaagatgttagaggaggggtagtgtggtatttggttttaggggtagttttttggagaaagatttttaaaatggtttgggagtaaagattaggaggaaatggtttattttagaaggtggtgggtggtgagtgtagatagatttgggtatttttggttatttgatattttttgtggtattggaaatggatattgtgggttgaaattaatttttatgaagtgttgggtttggttttgttaatagaattgtttgtgtggaaggtattttaattgttagttttaaagatttttgtatgtggatatttagggaatatgtttgttttttgattttgtttattttttttttgatttgttatttggtgtgggttttgtagtgttggtttttgtgtttattttgggtagggttttagtgtgtagagtggagtggggggggaaggtgatgattaatatgttatttaggtttaatttgaggttggtttttagtgtgtgggtatatattgttatgtatattaattgttttggggtgtttaggggagtgtgtgggttttgggtagtaggtgtttggttggtaagttgtggttggggtttggttggttttagtgttgttttttgaggtgttgttattagtaggtgattgagagttaattaggaagtgttttttggattaatgggttgtatagtttattagtgattttttttagttttttgtagggttgttttggtttttgttttttatataggttggggttttgttgtttaggttgtggggagtgttgttgggaagtggggaggggttggtagtgagggatggtggggaagtgagtgtaattttgtggggtggtgtgttgtgtgtggtgttttgaggtttgtgtagtttgttttttttttttgtttgtggttgtttttattgtgtttttaatttgtttttgtttgtgttgttgtttggttgtttttttttgttttttgtgtttattttttgttttttaagtatgatgtttgtgttttttgtttagtttaggattagataagataaaaataggattgtttagtgtgtggagttgtgattgtgttttggtagttgggttggtgggagtgtggggggttggagttggagaggatttgtggtgtgtttggagtggttagtgtttgtgggttttttatttttattttgtaggtattgttatgttttttgggttttgtttgttgtgaattgtgtgggttgggggatttgggtagggtttttgtgtttttgtgggtgttgttggtgtgttggtgatagattggtttagataggtatgtaggtttttttttggttgaaggattggaggggggggaggtgtggagatggtagtagattttgtgagttgtgagtgagtgagttagtttttgggtttaggagttgggtggagggaaggttgtgggggttttttttaattttttaaaggttgtggtggggtagtgtaatagggaaaggggggtaaagagtttagtggaaatttttggaggtagagtagtttgtagtggggaggagttgtgagtttgggtttagggttttttttttttttatgtgtgtatggttatattttggtgtattgggtttgatttttttataaattaaatgtagttgttagatgatttagtttgattaggtattttttagttggggagttgtgaatatatataatgaatatttttattttaaaaattgagtttggaagatagatgtagatttaatgtttttaaagagaatttatgtgggtgtttaaggatgggaaggtttgtatatagttgtagttgggtggggtttttgattatgattgttgtagattaaggatttgagtttgaaatgttttgttagtatgtataggtatgtattgaagagagtaaagtggtttttgagttgtttttatataaatagatatatttttaattaggaatttgtgaggagttagatatgtgtaaggagatagtttttaaagaggagttggatattgatgtgttgtgagatttattgtttgtgtgtgtatatatatggttaatattaaattggtttaaaattttaatatatttttgtagatatttatttagttttttttttagtttgaaatgggtggatgggttattttatatataaataatttattattaatattttagttttttttttttttttttttttttttttaagagtttgtgattttaagggattttttgtttatatttaaattgtaaatttatattggtttggtttgggaaagagttatattataggtaaagtaaaaagaatggaagtagtatgaatgtttagattaagatgtgtgtttgaatgatatgtgttgagataaattaagatatttgggttttgttgtttaaatggaataagagatatataagagataaagaattggttaaggggaatgtaaatatgggtatgtaaatatagagatgtatagtgatattttgagagaaaaattttagattttgttgagttggaaattggggtagaatttttgtaagtgtgttttagagataatagtttatttaaaggtgtgaagagggttatttggaaatataaaaagtatttatatgtatatatttatgtttagatatataggttgaatgataaatattttttaatgtttgatgaagatttttttgttgagtgagtgagattgatttgggtatagaagagtgggttatataattatatttatatatttatttatagggaaataatgtgtttttggtttgaaggaaattgagggttatgttagtagtttaaaggatggatggtgtgtagtgaa

SEQ ID NO: 456 - DNA, 2264 bp, Artificial Sequence
  chemically treated genomic DNA (Homo sapiens)
gattagtttggttaatatggtaaaattttgtttttattaaaaatataaaaattagttgggtatggtggtgtgtgtttgtaattttagttatttgggaggttgaagtaggagaattgtgtgaatttaggaggtgtaggttgtagtgggttagagattgtgttattgttttttagtttgggtgatttttaggttaaattgtgtttgatataaaagtttatattgatatagattttttgatataaaagtttatttttttttgataggtttgattgatttttttttttataaagataaaagttgttttaatatttaagaggaattatattgtggtgaaaggggtgttatgaattttgggttttagtttttgtattatgttttagtgtgatattggattttaatttttttattattaaagttaatgggttattataatttttttagaagtagttttaatttttaaagataagattaaaaatattaatagtgtttgagtttttggaattgaattagtattggagttttgtttggttgttttttttttttttttttaagattaatgatttggagggaattttggtgagtttgagtttttgtaatttgttagggattaattagaagtttggtgagtagttagtaatataatttttgggtatttttttagttttattagtatatttttttttattttgtttttttttgttgtagttttttttaagtttatatttgtgtttttgttagttttttttgggattttattggtgttggtagtttttgggtttttgggtatagtggttgttttatttgatttttttgtttttttatttttgttggagggtgatttgtgggtattgtttattatggataggattggaggggagaggagattgtggagatgtttgaggtagaagtttggaaatttgagttgtataggttaggattttattttttgttgttgtgtagtgatgatattatttttattgtttttttgaggggttattttgaggtgtgtgtagaggattagaggatttattttaattttggtttggtgatagtgggaagtgggaaaattggatgtaaagagtttagattatggattttttttgttaggaaattagtatttgtgaaggagtgtagttttgtttattaaataatttttttttttttgtttgtttaaaaatgtaatgttagttaatttttttgttaattttttagagtaaagttgggggattgggagaaaatttagttttgttgtatggtggtgttgtggaatgaggttttttgggattggtaaatttttaggtaaggatttaattttgtatattttaattggtttgaaattgtgggtttgtgtgtatatagaattgttagtattttttttttattttgtaagtattttaataataaaaagttatatagtttgagtagaatttatttaatttatttatttatttataattattgattgtttattttgatttagaaatagtgttagtattagggaataaaatatatatagtttttatttaattaaatgattttttttagtttgttagtattgaagattgaggtttgtttttataagtttgatatttttttattagtttggttaattttattaaaattaagaggaaagtttaaagagaggaaggtgttttttttgaatgttttattttaatgaattagtttatgtattgggaggatgaagtggtgaggatatttttgttttaaaatttttttttttttttttattgagatatgagggggagggtgttttatttatttgggtatgattaggtttttgtatttattatatatttaatttatgtgtgttgaaagaatggatttggaaatgtaggtgtgtgttatatttatttttttgtttttatgttgtttggatgaattattgtattttttgttttaggagtttttaaaatttttggggaaggagtgtattttgggaggtgtgtataggtgggtttgtttgtttttttttatttgtataatgggggtttataaggtgttgtttttatgttttgagaggtgtgttttggtatagtaaagtttatttgtgttggtttgtggagttttgtttagttaggtgagttagggggtggggtgtgggggtgtggtgatgtgtgatgttggattttggaagtgatgtgtttgtggggaaaaggtagggagggggtggtgtttttagttggtttggggggtgtgttgtttggagatggaaagtttgggagtttgagtaggtttggttgtag

SEQ ID NO: 457 - DNA, 2264 bp, Artificial Sequence
  chemically treated genomic DNA (Homo sapiens)
ttgtagttgagtttgtttgggtttttaaattttttgtttttgggtaatgtattttttaaattggttggggatattattttttttttgttttttttttatgagtgtgttatttttgggatttggtgttatgtgttattgtgtttttgtgttttgttttttagtttatttagttgggtggggttttgtggattagtgtaggtggattttgttgtgttgagatatgttttttggggtatggggatagtgttttgtgggtttttattatgtaggtggaaagggataaataggtttatttgtatgtgttttttgaagtgtgttttttttttaaaggttttgggagtttttgggataggaaatatggtaatttgtttaggtagtgtagaaataaagagataaatgtaatgtgtatttatatttttaagtttatttttttagtatgtataaattaaatatgtaataggtgtggggatttagttatatttaggtgaataaaatgtttttttttttgtattttaatgagggaagagaagaaaattttaaaatagaaatatttttattattttatttttttagtatgtgaattagtttattaaagtgaaatgtttaaaggagatatttttttttttttaggttttttttttagttttaatgagattaattaaattgatagaaaagtgttagatttgtaaaaataaattttaatttttagtattggtgaattgaaaaaaattatttaattgggtagaaattatgtgtgttttgttttttggtattagtattgtttttaaattgaagtaggtagttaatagttgtggatgaataaatgaattggataaattttgtttgagttatatgattttttgttgttaaggtgtttgtggaatggaggggaaatgttagtaattttatgtatatataggtttgtggttttgggttagttgaaatatataaggttgagtttttgtttgaaagtttattagttttggggagttttattttatgatattgttatataatggaattgagtttttttttagttttttaattttattttgaggggttaatgaagggattaattgatattgtatttttagataggtgaaaaggaaaaagttatttagtaaataaaattgtgtttttttataagtgttggttttttagtgaggaggatttatagtttgagttttttatgtttaatttttttgttttttattgttgttaaattaaagttaaaatgagttttttagttttttatgtgtgttttaaaatgattttttaggagagtggtaggggtgatgttattgttgtgtgatgataggaagtaagattttggtttgtgtagtttgggtttttgagtttttgttttaggtatttttgtgatttttttttttttttaattttatttgtgatggatgatgtttatgagttgttttttgataaaggtggagagataggggagttggatgagatggttgttgtgtttggggatttgggggttattgatattgatggaattttagaggaaattgatggagatgtagatgtggatttgaaagaagttgtagtggaggaaggtgaggtaggaagagatgtattgatgaggttgaaggaatatttagagattgtgttattggttgtttgttgggtttttggttagtttttaataagttatgagaatttgaatttattagaattttttttagattgttaattttgagggggaagagaggggatgattaaataaaattttagtgttggtttggttttagaggtttaagtattgttaatatttttagttttgtttttagggattaaagttatttttaagggagttataatagtttgttggttttggtggtgaggaaattgggatttaatgttatattgagatgtagtgtaagagttaaaatttaggatttgtagtattttttttattgtaatatggttttttttagatgttaagataatttttgtttttataggaaggagggttgattagatttgttaaagggagatagatttttatattgaaaagtttatattgatatagatttttatattgaatatgatttaatttgagagttgtttgggttggagaataatggtgtgatttttggtttattgtaatttgtgttttttgggtttatgtgatttttttgttttagttttttgagtagttaggattataggtgtatattattatgtttagttaatttttgtatttttagtagagatggggttttattatgttggttaggttggtt

SEQ ID NO: 458 - DNA, 3104 bp, Artificial Sequence
  chemically treated genomic DNA (Homo sapiens)
gtgggtgttgttgagtatggggaggtgttgaaatagttttggtgtgttgatttaagttttgattggtagagttatttggtgattgatagggggtttttatggtgtttgtgttgttaatttgtttattttaatagtggagttagtttgtttgttggtgtgtttgagttgagttgagtttgaattttaagttgtggagttagtattttttttagttggggttgtttgtttttggttgttgagttattgttgttatttggtagtgtgttttgttgttttaatttgttttattaataagtgtttggtatatttagttaggtttgtgggtatttgttgtgtgttttgttttgggtttagtgtttttgttgttgttggtattgttttgatgttttagttgtttattttgaattttagtttttagtaagtggttggggtatgtgagattttggaagagagtggtgatgtggagtgtttgggttgttttttttggttgttgtttgtggtttttgtggtttgtgaggtttttaataagaatgagttggtgttatgtgtatgagttattgtggttttttatggtggtaattattgtgagttttattatattttggaaaattataagtttattaaggagttgtatgttaagttgtaggtgttgtggtttgaagtatattattaggaggttgagaagttgtgtggaagatttttgggatttgtggataagtattgagtaaggaagaagtttttgttgttgtgtattatttgggatggtgaatagaagatatattgttttaaggagtgtatgtggtatttgttatgtgagtggtatttgtaggatttatattttaattttagtaaaaaatgtgagtttgtttaggtaattggattgatttttatgtaggtgggtaattggtttaaaaattgttgataaagggattgagtggttgtagttaagaataggttggtatttagaggtttttgtgttttgagtgtattggggaggaggtgggtggaggtatttttggtgtttttatttagtttttggtgattttaatttagtaggagttgggagtgtggtttgttttgggttaagagttttgtgttttgggtttttggttgggagtttttttgttggttttgtttttttatttgttggttttttatgtttgtgggtagttgtagtagttggttttggttattaaattaaggttttattgggatggagaggggaagagaaataaaaaattaaaattttataaatagttagggattttaagatttaaagttaatttttgttagtttgggtataggtttttattattaattgaagtttggtttattagtaatgtgttggttttatgttaattattatttttaaagtttaggtatatttttttttaatgttttgaaaatagtttttaatggatttttgagaaatgggaagttgagtttttttttttttatgtgttgtttgttatttttgttttaaaatagtaaattagtttgtgggttgaggttttttgttttttggagtgtggattttgattagttaaatattttgtggaagagtttggttttattttttaggtttaaatgttttttataattttttttgtttttaggttgggttgatttgatttaatgtgattgtgggagtatttgtttaggtgtaagttttaggtagatgtattgttagaaatggtattttatgtttttgggattgatttgtttttgttatttatattttgtttattttttgatagttttgtaaattttttaaaagtgtataataaatagggaggatattgtaagtttagtatataaaagatttgggagttgtggtgttgagaaagggtgtgaattatggtggggtataatagtagggatttgtggaggggtggttgtggatttttgtttgatttttgttgttttgttgagtaatttttgttttaattgttggggtttttggaagaatttttagttgttgggttggagggatgtaggaggtggtgggggtgggtgatgggtggttgtgttatgagttgtgatttgtgtttttttttttttttgtagattttagtagtaggttttgttatagggttttgggtgggtattatgggtggagggtgatggtatgttagaggtgttgggtgttgttattagtttggttgttagtttatttagtaaggtggttattttagttatttttattatgtttagtgatagtgagtgtgatatttgagttgtttatttaggatgtttagaagtagattttagtgtaaaaatgagaaaaataaaatgaaagaggggaagaagatgagagatttgtaaatttagtgttatagaagttaggtgattagggatttgtgggtttgggttgttgttttttgttttattttgtggttggtttggttttattggtgttttttggttgtgattatgggaattagtgtgaggtttgatttagtattatgttttttttgttttgtttttttttaaggattttgttgtaaagtttttttggaatttgaattgtaagttgagtgtttgtttagatttttttatgggtattttatgttgaaaggatgttgttatatatgtataatttttgttttaaagtttttttttaataaaatatatatatgttgtttatttatttatttaagagattgttatggtaggtttttttgtagtttggggaatttgttgtttttaaatatgtaggttggtggtgatgggttttgtgtggagaagttaaataataaaataatttagtgggtaatttttttaattaagggagttgtttttagattttttttttttttattattattaatattattttttttattaggtatgtagggatttttgagtaaatggtttttggaaggttttatttatatattttttgttttttttggtgttttttggtatatgttttaaataatttatggtaggtttataattattttttatgttaaattatatgtatgtgtatatatgtatgtatttatataaatatatgtatgtatttatataaatatatgtatgtatgtatatatgtgatatatttaaggttagaaattggtaatatgtgagtgtttttttta

SEQ ID NO: 459 - DNA, 3104 bp, Artificial Sequence
  chemically treated genomic DNA (Homo sapiens)
tagagaggatgtttatatgttgttaatttttagttttaaatatattatgtgtatgtatatatatatatgtttgtataggtatatatatatgtttgtataggtatatatatatatgtatatatgtgtaatttgatgtgggaggtggttatagatttattataggttgtttaaaatatatattaggaagtattaaagaaggtaaaagatatataggtaagattttttggagattatttgtttaagggtttttgtatgtttggtgaagggaatgatattaataataataagaagaaaaggaatttgagagtagtttttttaattaagaaggttgtttattaggttgttttattgtttggtttttttatatagaatttattattattagtttgtatgtttagaaatagtaagttttttaagttatagagaaatttattatggtggttttttaaataagtaaataaatagtatatatatgttttgttaaaaaaaaattttaaagtgaaagttatatatatgtaatagtgtttttttgatgtgaaatatttatgggagaatttgggtaggtgtttagtttgtagtttgggttttgaagagattttgtagtaaaatttttaggaaaaagtaaagtaagaagaatgtggtgttgggttaggttttatgttggtttttgtggttgtggttaaagggtgttagtgaagttaggttggttgtggggtggggtgggaaatggtaatttgagtttgtgggtttttggttatttggtttttgtggtgttggatttgtaggttttttatttttttttttttttttattttgttttttttgtttttatattggaatttgtttttgagtattttggatgggtaatttagatgttgtatttgttgttgttggatgtgatggagatggttgaagtggttgttttgttggatagattggtggttgggttggtggtgatgtttagtatttttggtgtgttgttgttttttgtttgtagtgtttgtttggaattttgtgataggatttgttgttggagtttatggggaagaaagggaatatgggttatagtttgtaatatagttgtttgttgtttgtttttattattttttgtgtttttttagtttggtggttagaggtttttttgaagattttagtagttaaggtgaggattatttggtaaggtgatagaggttgggtaggagtttgtggttgtttttttgtgggtttttattgttgtgttttattatgatttgtgtttttttttagtgttgtagtttttaggttttttatatattgggtttgtagtgttttttttgtttgttgtgtatttttgggagatttataggattgttaggaaataaatgaagtgtgggtgataaggatagattggttttagggatatgggatattatttttaatggtgtgtttgtttggggtttatgtttgagtaagtgtttttgtgattgtgttggattgggttggtttgatttaaaggtaaaaaggattgtaaggagtatttgggtttgggggatgaggttgggtttttttgtaaaatgtttggttaattgagatttatattttgggaaatgaaaagttttggtttatggattagtttgttgttttgagataagagtggtaggtagtgtatgggaagaggaaaatttgattttttattttttaaaagtttattgaaaattgtttttaaagtattagggagggatatatttgggttttgaaaatgataattaatatgaaattgatatattgttaataagttaggttttgattaatagtaggagtttgtgtttaggttgataagaattagttttgggttttggggtttttaattgtttgtaggattttaattttttatttttttttttttttttgttttagtgaagttttggtttggtgattgggattagttgttgtagttgtttgtaggtgtggggagttagtgggtggggaagtagagttggtaagggaatttttggttaggagtttagaatgtagggtttttaatttaagatagattgtgtttttaatttttgttgaattggagttgttagggattgggtaagggtgttagaggtgtttttatttgttttttttttggtgtgtttaaagtgtggaggtttttaggtattgatttgtttttggttgtagttgtttggtttttttgttggtggtttttgaattagttgtttatttgtgtaggggttagtttggttgtttgggtgagtttatgttttttgttggggttagggtatggattttgtaggtattatttgtgtagtaggtgttgtgtgtgttttttgaagtagtgtgttttttgtttgttgttttaaatggtgtgtggtagtgggaattttttttttatttggtatttgtttataggttttaggggttttttatgtagttttttagttttttggtagtgtgttttaagttatagtgtttgtagtttggtgtgtgattttttggtgaatttgtggttttttaggatatgatagagtttgtggtagttgttattgtgaaaggttatgatggtttgtgtgtgtagtattgatttatttttgttgagggttttgtaggttgtaggggttatgggtagtgattagaggaagtgatttaggtgttttatattgttgtttttttttagggttttatatattttggttatttgttgggggttgaaatttaagatgggtagttggaatattgaggtagtgttggtggtggtgagggtattgagtttggagtgggatatgtagtagatgtttgtgggtttggttgagtgtgttaggtgtttgttgatgaggtggattggggtagtgggatatattattgggtggtggtggtggtttaatggttgggagtggatgattttgattggaggaggtgttggttttgtggtttggggtttgggtttggtttggtttaggtatgttggtaggtgagttggttttgttattggggtgggtggattggtggtgtgggtgttatggagattttttgttagttattgggtggttttgttaattaaagtttgaattagtatgttaggattattttagtatttttttgtgtttgatagtgtttgt

SEQ ID NO: 460 - DNA, 2493 bp, Artificial Sequence
  chemically treated genomic DNA (Homo sapiens)
attggtatgattagagtagaaggagggtattttaatttttagttttatttattgttttgtaagaattaggaaaatgaatttttgttggttataaaattagttgtaggtgatgtaatttattttatttggttttttatatttatagttatataggaataattttttgaaatttagtttttttatttgtaaaatgggatggtaatatgtgtttttgggagttagtgagaattaaaagggataagatgtattggtttttaggggtaagtattagtagataaggaatagggtagttttttttttatattttatagagaagaaatgttttttaatttttttaggaggtagagtttagttttttttttaaatagttttggagttgtttggtttttttatttttttaatgaagttgtgggtagaagataaatgtagagtttttttgtatttgataaggagagagaagtagattttgtgtgagttttttgttgttgatgttgatttatagggggtgtaggatgggattgaggtaggtttatttgtttggaaagtttgtttgtattttgattttatggggttttaatatatatttttttagttataggggttttgtagagttaagttagttgttttatggaggtggggattttttttttgttttgttatttttttttttttttggagaggataggtaggtgggtatggttataggagaattttttgaaggtgttaattggtttagagaaagaaaggtggtttggtagggagttgtttattagagattgagagagtatgggagaagttgagagggaggaggaaagtgtatgttattttgtgtgtagttttgttttagggaaagtatgtgtgagaagtggtggtaggtggttgttagttttggaaataaataaatagttaattaaaaggttttggaaggaaggagtgtttaattaattagttttgagggataggtttgtattgtttgattgtgttttttagtttggttttaggttattgagtttaagtttttgttatagttttagggttgaggttgtttttaaagagttttgtaattgttttttatttgtgttttatttaaatattaaggttggtgtaggtggatatttttttatttttttttttttaggttgggttttagaaattagtagaggagggaggaattagttagtgtggttatgtttgggaggagaggtttgtgtgggtttgtggggttaagaggtaaaggtgggtggtggatgtgggttagtgggagtttggaggggttgatattgtttgttttattgtaagtttttggaggaagagttttgttgtgtttgagagtgagtgtgggtaggtgtaattatttggggttggggttttgggggttttgtgtagttttttttttttttagggatattgtttagttgtgttttgtgttttgttgattgtgtgggttttgagatgttggtggttgttttggggttggtttgttttttgtgtatatgtttagggttatttgtgttgtgtttttgttttaggtgtttggttagagaaagggtggtaagatggggtagtgtgtgtgtgtgtgtgggtaagtgtatgtgagtgtatatttatgtgagtgtatgtgtgtttgtgtttgtgtgtgtttaggggaattatagggagtatttttattttaagtttttagaggattgtttgaagttgttagatagaaatttttttagaatgtaagttttgggggggagggagttttgtttgatggttgttgtatttttagtgtttattgaagtattggggatatattagatgtttaataaatagttgttgagttaattaatggattttaggaatggaggtagattggtttttttggaattggagaaaggataaggttatattttattgttttttttgtttttggtattagttttggtgtttttggtaatgttaattttttttatatttagtttgtgttaagtttttttttttgtttgtgtttatatttttttttttttgtttttgttttttgttggtttttgtgtgtaagtattttagtagttagagtgagaggaagatgaaagaagtagaattttggaaatagagagttattagggtggttttttttttttggaaggatatggaaagatggggtgagattggtgtttttttttagtttttttttttgggaattgggattttgagttttagtttttttattttgaaatagtagttattttatttgttttgtaggattgttgtaagaagttaggtaggaggttgaaaagttttggagtatatgataggtgttatagaaatgtttgttttgttttttgattagtatttaatagtttgggagtgttttaggtgtggttgagggtggttatggtttgataattattattagaatattttttttttttttataaaatgttttgaggagaatttaatggttgttgaaaattaaggtaagttttatttttaaaatatttaggagttaat

SEQ ID NO: 461 - DNA, 2493 bp, Artificial Sequence
  chemically treated genomic DNA (Homo sapiens)
attgatttttgaatgttttagaaatgaagtttgttttaatttttgatagttattaaattttttttaaggtattttgtgaaaaaaggaggggtgttttggtggtggttattaaattataattatttttagttatatttggggtatttttagattgttggatgttagttaggagatgaaatgaatgtttttgtagtatttattatgtgttttagaattttttagttttttgtttgattttttgtaataattttgtgaggtaggtggaatagttgttattttaaagtgaggaaattgaagtttaaagttttaatttttaaagggaggagttgaagaagagtgttagttttattttatttttttgtgtttttttagaaggaagaggttattttggtagttttttatttttagaattttgttttttttgttttttttttattttgattgttggggtgtttatatataggggttagtaggaaatagagataaaggggagaaggtgtaaatatgagtagggaggaaaatttggtataagttggatgtgagaaggattggtgttgttggggatgttagggttggtattaagaatagaggagatggtgaaatgtggttttgttttttttttagttttagaagggttggtttgtttttatttttagagtttgttgattaatttaatagttgtttattaagtatttaatgtgtttttagtattttaatgggtattgggaatatagtagttattaaataaagtttttttttttttggagtttatattttaggggagtttttatttagtggttttaggtagttttttggaggtttagaatgagggtgttttttgtggtttttttggatatgtataagtgtagatatatatgtgtttatataagtgtgtatttatatgtatttgtttgtgtgtgtatatgtattgttttgttttgttgttttttttttagttaagtatttgaagtagaggtgtagtgtggatgattttgaatatgtgtgtgaggagtaggttaattttgaggtagttattagtgttttaaggtttgtgtagttggtggggtgtggggtgtagttgggtggtgtttttgggagggaaggaggttgtgtggagtttttggagttttagttttgggtagttatatttgtttgtgtttgtttttgggtatagtggggttttttttttaggggtttgtggtggagtaggtggtgttaatttttttaggtttttgttggtttatatttgttatttgtttttgttttttagttttatagatttatatgggtttttttttttaggtatggttatgttgattgattttttttttttttattgatttttggggtttagtttggagggagaaaagtgggaaggtgtttatttgtgttagttttggtgtttgggtgagatataggtggaaaataattatagggttttttggaaatagttttggttttggaattgtggtagaaatttggatttggtggtttgaaattaggttgaggagtatagttaggtagtgtggatttgttttttggggttgattaattagatattttttttttttgaagttttttggttggttgtttgtttgtttttaaggttagtaattgtttattattattttttatatatgttttttttaaggtgaggttgtgtgtaggatggtgtgtatttttttttttttttttaattttttttatgtttttttaatttttggtagataattttttattaggttatttttttttttttgggttagttagtatttttgagaagtttttttgtggttatgtttatttgtttgttttttttaggagaaagagagagtggtagggtaggaggagggtttttatttttataggatagttggtttagttttgtagagtttttgtggttgggagggtgtgtgttagggttttatggggttagggtataggtaggttttttaggtaggtgggtttgttttagttttattttgtattttttgtggattaatgttaatagtaagagatttatatagggtttgtttttttttttttgttaggtataagagaattttgtatttgttttttgtttataattttgttgaagaagtggagaggttaagtaattttaaggttgtttggaaggagagttgggttttgttttttgggagagttggaggatattttttttttgtggagtgtgaagggaggattgttttattttttgtttgttagtgtttgtttttgggagttagtgtattttattttttttaatttttgttggtttttaggggtatgtattattattttattttatgggtgaggagattgagttttagagagttgtttttgtatagttgtaaatatgggaggttgaataggatgggttatattatttgtaattagttttatggttaataggaatttatttttttggtttttgtaaagtggtggataaggttgggaattaggatgttttttttttattttagttatgttagt

SEQ ID NO: 462 - DNA, 2315 bp, Artificial Sequence
  chemically treated genomic DNA (Homo sapiens)
ttgtatttggtgtgaggttttttggttatggatgttgttggtgttatatttgtggtatttgaggtgaattgtttagatggaaatggtattattaggtaattggtaatagaagtttaaagttttgggtgttttaggttagaggaaggaaggaatgtaagggttttgttttttttaatgttaggagtgtgtgtttatagttttagataggataatttattgtaaatttaaagtagaaaatatggtttaattttatttttgtggtatttttatagatggtgtttatttgttttggtagtgatgattgatattgtgaatgttgtgttggtagtgtgtttaagggttttaattgaattattttgatggagttgaaatttagttttattttatagaagagaaaattgaggtttagagagattaggtgttaagttttatgttaagtatagggaagtaaaaataggatatatttaatataaggtggttttaggaattagtggttaggatatgggaggtgtgttgagtgtagatgggtagatgtaagttgaggtggtttgttggagggttttggattttttagaaaagaggatattagttgtttagggagggaaggtttgagatggattttggttggtgtggattagtttatggtgtgtttgtaggtagggatattttgaatagatatgggttgaggggagtttgtgtggagtgtggttagtgaaggttgggttggttggtagggtttgttggttatgggaggtttggtttgtagtagtagggtttattaaagatatggggatggatggttgatggataagatggttgatggatagtgttttagaaggttgtaggtttgtttaggttgaggttagggagggttagggtttttagggaaggagagtaagttaggggagttttttgtatagaagattttttatttgaggttgttttttaggagtttagttattttgtggagagtttggtgttgattgtggaagaggtgatggatgtgtgttgtgtgttggtgaaggttgagatggaaaagtttttgtagaataaggagttttttagtagtttgaagaaggggaaggtgaggttgtttagatgtggggttatgtttttgtttgttgggttaggggtgggtgttgagagggttagtttttaggattgtttgtttatgatttggttgggagttttgagggggtagtagggatagggtgggattttagggagttttggataaagtggggttttaattagttttttttgatagatttgttgttgttgttgggttaagtttttgttgtttttgtggttgtttagttgttttttttgtaagaggtgagttttttttttagttgttagtttataagggaaggaggaggtgagaaattttggggtagtattgtttatagaattttttgtgattttaggaatgttttagtatgtttgatggttgatgagtttataagatatggttagtatgaatgaggagttaaattttaaattgtatttaaattaaattaaatttaaatagttaagtaatttttagttttagttaagatggggtaataggtattttttatagttaagaataaataggatgtgaaataatggtttttaagatagtaggtaataaaaaggaaatataatggggtaagtttgttattattatagttattgtttggagagtttttaggttatgagttatagttgttggattttttagatggaggaggttaggttgagaatttagggagattatagtagtttgagtttgttgtgtagaattttagaggagagggttgtgttgagaaagttttagagaaggtttttttttttgaaggaaatgattgaaggttgtagaatatttattttaaagtagagattggtagattatagttatgggttaaatttggtttttggtttgttttgtaagtaaaattttattggatatagttatatttatttattatttgtttagttatgtttaaaaggtttattttttggttttttatataaaaaatttatttttttttgttttaaagatttgaagggatggtgtttaggggtaggaatgagtaatattggtttttattggttataggtagaaatgttataatttatagggtattaattggaatgtatataaaggatttgttttattaatgtggagtaagtagtttaaagtgattgttgttttaggtttgattgatatattataaaagtaagatttgaaaggattaaattgtttataagtattttaattgattttgagaataaagtttaagaataagaattttttaaatattaataaaaaa

SEQ ID NO: 463 - DNA, 2315 bp, Artificial Sequence
  chemically treated genomic DNA (Homo sapiens)
ttttttgttgatgtttaaaaaatttttatttttgagttttgtttttagaattagttaagatatttgtgaatagtttgatttttttaggttttgtttttatgatgtattagttaggtttagagtaataattattttgggttatttattttatgttagtgaggtgagttttttgtgtgtattttagttagtgttttgtgaattatgatatttttgtttgtggttggtggaaattgatgttatttatttttgtttttgagtattgtttttttagatttttagaataagggaaggtaaattttttgtgtaaagggttagagaataaattttttaggtgtggttgagtgagtaataaatgggtgtggttgtgtttagtgagattttatttgtaaaataggttgaggattagatttggtttgtggttatagtttgttaatttttgttttaggataaatgttttgtagtttttagttattttttttagagagggggattttttttgaggtttttttggtgtagtttttttttttggagttttatatggtggatttgagttgttgtggtttttttggatttttagtttgattttttttatttggggagtttggtagttgtggtttatgatttagaaattttttaggtaatgattgtggtgatggtaggtttgttttgttgtgttttttttttgttgtttgttgttttgaaaattattgttttatattttgtttgtttttggttgtggaagatgtttattattttattttggttgaaattgggagttgtttagttatttaaatttaatttaatttaaatataatttaaaatttaattttttatttgtattaattatattttgtggatttattagttattgaatatgttagaatatttttggaattataggaagttttgtgggtggtattgttttgaggttttttgtttttttttttttttgtgaattgatagttaaagggaaggtttattttttgtagaagagatagttgggtggttatgagaatagtgggaatttggtttggtagtagtagtaaatttgttaggagagattggttagagttttgttttgtttaaagttttttggggttttgttttgtttttgttatttttttagggtttttaattagattatgagtaaatagttttgggaattggtttttttggtatttgtttttgatttagtgggtaagagtgtagttttatgtttaggtagttttattttttttttttttagattgttgaagagttttttgttttgtaaaaatttttttattttggtttttattagtatatggtgtatgtttattattttttttatagttagtgttaggttttttatggggtggttgaatttttaggggatggttttaggtaggaagttttttatgtaggaggtttttttagtttattttttttttttgaggattttaattttttttggttttagtttaaataagtttgtgattttttaaaatgttgtttattagttattttgtttattagttatttatttttatgtttttgatgggttttgttgttgtaggttaggttttttatgattagtggattttgttggttagtttagtttttattggttatgttttatataaattttttttagtttatgtttgtttaaggtgtttttgtttgtaaatatattatgggttgatttatattagttagaatttattttaaattttttttttttgagtagttgatgtttttttttttggaaggtttaggattttttaataggttattttagtttgtatttgtttatttgtgtttagtatattttttgtgttttggttattgatttttggggttattttatgttgagtgtgttttgtttttgtttttttgtgtttggtatagaatttgatatttgatttttttaagttttagtttttttttttgtaaaatggggttggattttagttttattgagatgatttagttaaagtttttaaatatattgttagtatagtgtttgtagtgttggttattattgttaaggtaggtgggtattatttatgaaggtgttatagagatggagttggattatgttttttgttttggatttgtagtgggttgttttgtttaaagttgtgaatatatgtttttggtattggggggagtggggtttttgtatttttttttttttttgatttgaggtatttagggttttaggtttttgttgttagttgtttgatggtgttgtttttatttgaataatttattttaggtgttataggtgtgatgttaataatgtttgtggttaggagattttatgttaggtatag

SEQ ID NO: 464 - DNA, 2304 bp, Artificial Sequence
  chemically treated genomic DNA (Homo sapiens)
tgatttttttgttttagttttttgagtagttagaattataggtgtgagatatgtatttagttaattttttgtgttttttagtagaaatggggttttattatgttggttatgttggttttgaatttttgattttaagtgatttatttatttttgttttttaaagtgttgggattttaggagtgattttgtatgtttagttattaataaatatttattaagtgtttattttgtttttaagagtgttgggaatttagtagtgaataaaataaatatttttttttggggattttgaatttaagtttagttagggattattttattaagagattaagttaatatttaatttttttatagatttagataggatagtattttaattttttgttgatttgtttttttagattttagattatgggtattgtagatttttgtattttttgtagaggtagggttttattattattagagattttattattatttttatgtgaagggaaatagtgtttttttagtagataatgttaaattagttattagatgtgggttatggtgggtttgttgtgattgttataaatatgttttattgaagtttgttaggggatgttatatttttttttagaaagtaagaaatagagaaaggtttttttttgttttggattgttttttttttagttttaagaaatttttttatagttgttattttattttggtttgttttttgagtaagaaaattgttggaaagagtttgttatttatttagattataattagggagtttgttgttatttaggaagggttttaaaaaatttttttgatttattgtgagtgtaaatttttgatatttttgtatttttttatttattttattttgattttatatatagtgtgattttgaaaggaagtggtgtttttggagaggtagaaaaattttggaaaataaggtttatgatgttggttattagtatggggttgttgtttgttgtgtgatatgtttaggggtgatgtgttttttgaaagagatatttggtagagaaggtatgggtgtgaagtttggttgtgggagagttgggagtttgaatgttgttggttgttgtttatagtaggttttttttgagtattgtggggaggtagtgatatttgttggttttgtagtgatattttggtagttgttttgttttttagtttggatgtgataggtgtgttttggaggatagttagaggaagataggtaagttatattggttttttttgaggttatatttttgtttaggttaggttgtttttaatagatattttttgtgggtgttgaggtagttagttttattgttatttagataattttttttttgttttgttaattttgttttttttttaagaatgtttaaattttttatttaagtgatgagagggaaatatttgagttgtatatttaaggagatgtgggtttttattttggttttgtgatatattattggtgggattgtgggtgagttatttaatttttttagtttttagtttttttatttgtaaagtgggttttagtatatggtttaattgaggtaatatatgttgtttatgttagttgttgtttttatgttggttttgtttaggtttttttatggtaataggataggagttttttgtttgtgtgttagttttttattagtgtgggaatgttgtgaggagggggtggaatttggtgtagtaagggtttttgtttgtattttttattttttttttttttttttttttgagattgagttttgttttgttgtttaggttggagtgtagtggtgtgatttttgtttattgtaagttttgtttttagggtttatgttatttttttgttttagttttttaagtagttgggattataggtgtttgttattaagtttagttaattttttgtatttttagtagagatggggttttattgttttagttgggatggttttgattttttgattttgtgatttgtttgttttggttttttaaagtgttgggattataggtgtgattattgtgtttggtttgtattttttattaagaattagtaattatgggttgggtgtggtggtttatgtttgtaattttagtatttagggaggttaaagtgggtggattatgaggttaggtgatttagattattttggataatatggtgaaattttgtttttattaaaaatataaaaaatttggtaggtgtggtggtgggtgtttgtagttttagttatttgggaggttgagggaggagaatggtgtgaatttgggaggtggagtttgtagtgagttgagatggtatta

SEQ ID NO: 465 - DNA, 2304 bp, Artificial Sequence
  chemically treated genomic DNA (Homo sapiens)
tggtgttattttggtttattgtaagttttgttttttaggtttatgttattttttttttttagttttttgagtagttgggattataggtgtttgttattatgtttgttaaattttttgtatttttagtagagatggggttttattgtgttatttaggatggtttggattgtttgattttgtgatttgtttattttggtttttttaagtgttgggattataggtgtgagttattatgtttagtttgtggttgttggtttttaatagaagatatgggttgggtgtggtagttatgtttgtaattttagtattttgggaggttgaggtgggtggattatgaggttaggagattgagattattttggttaaaatggtgaaattttgtttttattaaaaatataaaaaattagttgggtttggtggtgggtgtttgtagttttagttatttgggaggttgaggtaggagaatggtgtgaattttggaagtggagtttgtagtgagtggagattgtgttattgtattttagtttgagtgatagagtaagatttagttttaaaaaaaaaaaaaaaaaaaaaatagaagatatggatagaaatttttgttatattgagttttgttttttttttatagtatttttatgttagtgaaaaattgatgtataggtagagaatttttattttgttgttatggggagatttaggtagagttggtatgaaagtaatagttgatatgaataatgtgtgttattttagttaagttgtatgttggagtttattttatagataagaaaattgaggattagagaagttaagtgatttatttatggttttattaataatatattgtaaggttagaatggaaatttatatttttttgagtgtgtagtttaagtgttttttttttattgtttgaatgaagagtttaaatatttttgaaaggggaatagggttggtagagtgagagaaaaattgtttgggtgatagtgaagttggttgttttaatgtttgtggaggatgtttgttagaagtaatttaatttaagtgagggtataattttgagggaggttagtatggtttgtttgtttttttttgattgttttttaagatatatttattatgtttaggttggaaaataggatagttgttggagtgttgttgtgaggttagtgggtgttattgtttttttatggtgtttagagagagtttgttgtgaatggtagttagtgatatttaggtttttagtttttttgtagttgggttttgtgtttgtgttttttttattaagtgttttttttgggaggtgtgttatttttgagtatgttatatagtagatagtagttttgtgttgatggttaatgttataagttttattttttagagtttttttatttttttaaaaatattgtttttttttaaaattgtattatgtgtaaaattaaaataagatggatggggagatgtaggaatattagagatttgtatttatagtaaattagaagaattttttaaagttttttttgagtgatagtaggttttttgattatgatttgagtgaatggtagattttttttagtagtttttttatttaagagataggttaggataaagtaatagttgtaaagaaattttttagagttgagagaaagatagtttggggtaggagaaagtttttttttgttttttattttttaggggagggtatggtgttttttggtagattttggtgaggtgtgtttgtggtagttatggtaaatttattatgatttatgtttgatggttgatttaatgttgtttattgaaagggtattgtttttttttatatagaaatgatggtaaagtttttggtagtggtgaaattttgtttttataaaaggtgtaaaaatttgtagtgtttatggtttagggtttgagggagtagattaatgagaaattaaaatattattttatttgagtttgtaggagaattgagtgttgatttgattttttaatagagtgatttttgattagatttgagtttaaggtttttgagggaaggtatttattttgtttattgttaagtttttagtatttttgggaataaagtaggtatttagtaagtatttattgatggttgggtatgtgggattatttttgaaattttaatattttgggaggtgaaggtgggtggattatttgaggttaggagtttgaggttagtgtggttaatatggtgaaattttgtttttattaaaagatataaaaaattagttgggtgtatattttatatttgtaattttagttatttgggaggttgaggtaagagaattg

SEQ ID NO: 466 - DNA, 2470 bp, Artificial Sequence
  chemically treated genomic DNA (Homo sapiens)
gtggaatatattttttatatagttatattatttaaaatttattgtttttaagtttttatttaaatgtttttttgtgaagttatttttgagttttttttaaaattgtagttttttatttttgtattttttattgttttttatttttaatttttgttattgtagttagaattatttgatatatagtttttattttattggttttttgttatgtttttttttataagaatttgaagtttattaggttgggagttttgtttgttgtgtttgttgttattttttagtgtttaaaattgtttggtatatagtaggtatttaataatttttgaattagtgaaaattagatggtggtttggtatttttatataggaatgagttaggtggaaattatttaggatataagtagattttgaagtgataaggaagggttattataattatgtggggtttattttgtttttttttgttttttttttttaggtttagtaatagttttattaaggattttatgaatattaaagtttatatttatatgttgttagaggtgagagtagtttattttattattagattttgtgtttagggtggtgatttgaagaaggaagagagtgaaagaagggaaggattatttttttttttaaattggagttaagggagggaggttagagtaagtttgggggtgtaatttagatttagtttttgtttaattttttttgtttttttttttaggggtttagagaattataaggtttgtagaattttttagagaagttttattattgattttttttttttatttttagatattaaagagtttgaatgtttttgagttatatggtttttttttttttttataaattttgttagttgttatgggggtttgtttttagggtataaagttattgagagatttagagatttagtttttttgtggaatttttaaaatgttttagtagttttgtttttagtttgttgtttggtagtatttgttagttgattttatgtattgtttttttttttgttattttggtaatttgggttttttattttatttttttttttatttttttttttagatgttattttttgaattgttatagagaatgggttaatttatggtggaggtttgtttatttttataataattaaagggttttaaggtttatgtttttatatatttaattattttttaggtattttaaattatatttaaattttaatttagttttattttgttttagtttttgtttgtaagtgttttagtttttaatgggtatagatttggattttgttttttttagttgggtttttattttaggttgagtttagttattgttaattaatgtagagttaggttttttttttttttaattttggttgtagtttaattttgttttttgaaagtattttgtttttgttatttaatgtttttttgtgtgtttgatagttattttgtttttttatttttgttgtgttttaaatttgtttttatttagttttatggttttgtttaattgtagagttgttttgtttgtttatgtggagtttagtttgatttatttttgttggttgttatgtttatttttatataagttttgtttttgttgagtagtatggtgtgtgatattgtttttttggtgttttggtaggggtttagaagttttttgtttgttaattagagaaaaatagggttatttatttttgtttttgggggttgttttttattaattttatgtaagttaattagtgtgaggtagatttttgtttttttgatataggttttgagtttttttagttgtttatagtttgttagtttttgagttaattggtgtggagtattgtgaaggttgaatgtgtttttttgggattttaggggttgtgagtgttttattatttttttttatgttaattatggtatagttttgtagggaagggtttgttttttaattttttgaggttttgtggttgattaatagtgttttggttaattagtgagtggtgggatattgggttttttttttttgggtttatgtgagttgtagggaaatgtaggggtggtttttaggtgttgttgttgttattgttattattatttttattgttgttttggaatttaggtttggggggtggtggggttgtgtatggagtttttgttttttggagttgttaatattgttaatgttattgttatgttatatataggtgagttttgggtttggagggtggagggtttagtttgtgattttatgtattttttttgtttttgtgtagaggatgtggtttggttggtggtttgttggtgtttgattttttgttgttattattatggttggtggatttgtgtgtggtattgtttaagttttttgttttttatagtggatttgattgtggtttaattttttttttttgttgtataatggattggtttgtgtgtttatgtttttttttatgttaatttagggtggatttgttt

SEQ ID NO: 467 - DNA, 2470 bp, Artificial Sequence
  chemically treated genomic DNA (Homo sapiens)
ggatgagtttattttaagttggtgtggggaaaaatataagtatgtagattgatttattatataatgggagggggaggttaggttatggttagatttattataagggatgaagggtttgagtaatgttatatgtaggtttattagttgtggtggtggtggtggggagttgaatattagtaggttattggttaagttatattttttgtgtgggggtgggaaggatatgtggggttatggattgggttttttattttttaggtttagagtttatttgtgtgtagtgtggtggtggtgttggtaatgttggtagttttggggggtgggggttttatatgtggttttattgttttttaggtttgggttttgaggtggtggtggaggtggtggtggtggtggtggtggtagtatttagaagttgtttttgtgtttttttatagtttatgtgggtttgaggaggaggagtttaatgttttgttgtttgttgattggttaaagtgttattaattggttgtaaggttttgaggggttgggggatgggtttttttttatagagttgtgttgtgattggtgtaaggggaaatgatggaatgtttatggtttttggagttttgaggaggtgtgtttggtttttatggtgttttatgttgattggtttaaggattgatggattgtgagtaattgaaaaggtttggggtttgtgttgggggggtgggggtttgttttatattgattggtttatatgggattgatggaagatagtttttaaggatgggggtgggtggttttgtttttttttgattggtggatgagggatttttagatttttgttaaaatattaagggggtggtgttgtatgttatgttgtttagtggaagtagggtttgtatagaaatgggtgtagtagttggtgggagtgggttggattgggttttgtgtaggtgggtagggtagttttatggttagataagattatagagttgggtaaagatgaatttagaatatagtggaggtaggagggtaggatggttgttaggtatatgaaagagtattgagtggtagaaatgaaatgtttttagagggtagggttgaattgtggttagagttaaaaaggggaggaatttggttttgtattgattggtggtggttggatttaatttagaataggggtttgattagggagagtgggatttaggtttgtgtttattggaagttggaatatttataagtaggggttaagataaggtagggttgagttagggtttgggtgtaatttggggtatttggggaatgattgggtgtgtgaaagtgtaaattttagggttttttgattgttgtgggaatgaataaatttttattatgaattggtttattttttatggtaatttaaagggtggtgtttaggaaaaggaatggaagaaagggtgaggtggggggtttaggttgttaagatgatagaagagagggtagtgtataaggttaattggtaaatattgttaggtaataggttggaggtaggattgttggggtattttggaggttttatagagagattggatttttgggttttttagtaattttgtgttttaggaataggtttttgtggtaattagtagggtttatggggaaaaagaagggttatgtgatttaaaggtatttaggttttttaatgtttgaggatggggggaagaagttaatggtgaggtttttttgggaaattttgtaggttttgtagttttttaagtttttgaaaaagaggatagaagagattgaataaagattgggtttgggttatgtttttaggtttgttttgattttttttttttgattttagtttagagggaaagatggtttttttttttttttgtttttttttttttttaggttattattttaaatatagagtttggtagtggggtgagttgtttttatttttagtaatatgtggatatgggttttgatatttatggagtttttggtgaggttgttgttgagtttagagaaaagaaataagaaagggtaaaatgggttttatatgattatgatgatttttttttattattttaagatttatttatattttggatgatttttatttggtttatttttatgtggaaatgttaagttattatttggtttttattgatttaaagattattaaatgtttattgtatgttaggtaattttaggtattgggagatagtagtaaatataataaataaaatttttggtttgatggattttaaatttttgtaaagaaagatataataaaaaattaatggaataaaagttatgtgttagatggttttaattataataataaaaattaaaaatgagagataataaggagtataggagtggggggttgtaattttaaagagggtttagggatggttttatggagaagtatttgagtaaagatttaaagatagtgaattttgagtagtgtggttatatggaggatgtgttttat

SEQ ID NO: 468 - DNA, 2470 bp, Artificial Sequence
  chemically treated genomic DNA (Homo sapiens)
tttaaaaagttttgtaaattaaaagtttgggggtaaatttatttggtagtaaattttgatttgaggttatttatagtttatattttgtattttttttatttagtatgaataagtatgtaagttttattgtatgtttgattttagtatgtttttttagattttttgggggtgtttatgtatgttggtgggggaaagagattaatttttaaatattattttaaatagttggttttattgtgtttgtttgggtagtatatatattaaaattggaatgatttttgtatagggatgaaatgtaaatttgtgaagtatattgtattttttttagtatatattatttttggtaatattttttttttttttttgagagggagttttgttttgttgtttaggttggagtgtagaggtgtgattttggtttattgtaagttttgttttttgggtttatattatttttttattttagtttttttagtagttgggattataggtgtgtgttattatgttaggttaattttttgtatttttagtagaggtggggttttattgtgttagttaggatggttttgattttttgattttgtgatttgtttatttttgttttttttttgaagtgttgagtgttgggattataggtgtgagttattgtgtttggtttttgttttttttttttagattgattttattatttgtttagtaaaggagaattttttggtagaatagtttttaagaataaggtaaataattaattttatataggtttttattaatgtatagttgttgattgtgattggtttttggtaatttggattttataatttggataaggggataaataattgtttgttttttattattttttttgaatttgaatagaatttttttatttttatagttttttagtttttttttttttttttttgagatggagttttgtttttgttgtttaggttggagtgtagtggtgtgattttggtttattgtaaatgttgttttttaggtttaagttatttttttgttttagttttttaagtagttgggattataggtgtatgttattatgtttggttaatttttggatttttagtagagatgggggttttattatgttgattaggttggtttttaatgtttgattttaggtgatttgtttgttttggtattttaaagtgttgggattataggtgtgagttattgtgtttggttttttatagttttttagttttttaaaatttgaaaaattttgtaaagatatatttgggttaaagggtttagataatggattgtggtttttaagtatttatgttataggttattgagaggattgatttagttattagatgtaaaatgttgggattagtgtttggtaaaggaaaattttgtatagttgtaggtttttattatatataatagtattgttaatgaatgttattataatatttatttagtgtttattaagtgtttattttatataaattttgagaatataatgtgaaggtgaattgttgattaaagtttggttttttttgttttgtttttttgtgaaaatgttttaatggtaggaggttatgtgagtgttggatgtgtttttttttgtgagtttttttttgaggttttttgggtttttttggttatttttgtttgggtggtgtgtgtttttgttgtttttgtttttgttttagagaggtagggttttttgagtttgttagttttgtggttgtaattaattttgggttggagtgttttggtttggttagttttgtggtgtgagggaaggggagtttagtagttttttgtgtggggtttaggtgttggtggtagggtgggttttttattgttagtgtgttagttttgtttttatttattagtgtgttagttttgtttttttttatgttgttgtgtgtttgggggtggggtttggtgtgtattgtttgtgtatggtgaggtgtttgttgattggttattggggtttgggtttttttggtggagtgtgtttttttttagattttttgttagtaggagttgtgtggtagatgtggtgtttttaggagttttgtttgatagaatggttgggttttgttggttgttggtatgttgtgatagagtattttgtatagttttttttttaagtttttggtgttgagtgatgttaataaggttttggttagggttttatgtgaaggtggttgtgttgttgttgtttttggggtttttttttttttaggtggggatgtggtttggagtgaggttgggtttgggtttaggtttttggtgtgttttgtgttattgtttaaggtgaagaattttaatggagggttgtggagattggtagtgtttgttgtttttattaggtagtggggtgggggtggggttgaaggtgggggtatagtggtggggtgtttggaatttggtgaggggaggtttgtatagggggttgggggggtgtatggtttggttttgggtttggagg

SEQ ID NO: 469 - DNA, 2470 bp, Artificial Sequence
  chemically treated genomic DNA (Homo sapiens)
tttttgagtttagggttaggttgtgtatttttttaattttttgtgtgagtttttttttgttgggttttaagtgttttgttgttatgtttttgtttttgattttatttttattttgttatttggtgggggtagtaggtgttattgatttttgtagttttttgttgaggttttttgttttgggtggtgatgtggagtgtgttaagggtttgggtttaggtttagttttgttttaggttgtatttttgtttggggaaggagaggttttgggggtagtggtggtatggttgtttttgtgtgaggttttggttgaggttttgttggtattatttagtgttggagatttggggaagaagttgtatagggtgttttgttgtgatatattgatagttggtaaggtttaattgttttgttggatggagtttttaaaagtattgtatttattgtgtggtttttgttggtgggaaatttggggggaggtgtgttttgttggaggaatttgggttttagtggttaattaataggtgttttgttgtgtgtgggtggtgtgtgttaggttttgtttttgggtgtgtggtgatgtggggaagggtggggttggtatattggtgggtaggggtggggttggtatgttggtggtgaggggtttgttttgttgttgatgtttgggttttgtgtggggaattgttgagtttttttttttttatgttgtggggttggttgggttggaatattttgatttggggttagttgtggttgtggggttagtaggtttggaaagttttgtttttttggagtggaagtgggaatagtgggggtgtgtattgtttgggtggggataattggggggatttgaaaggttttggaaaggggtttgtggggagaaatgtgtttagtgtttgtgtgattttttgttgttagagtatttttgtaaggagatggagtgaaagggattaaattttagttagtagtttatttttatgttgtatttttaagatttgtatagagtaggtatttggtaaatgttaaatgaatattgtaatagtatttgttagtgatgttgttgtgtatggtgaaagtttgtagttgtataaagtttttttttgttaggtattgattttagtattttatatttggtaattaaattgatttttttaataatttgtgatgtaagtatttaagggttatagtttgttatttgagttttttgatttaggtgtgtttttataggattttttaaattttagaaagttaagagattatgagaggttgggtgtagtggtttatgtttgtaattttagtattttgggatgttgaggtgggtggattatttgaggttaggtgttgaagattagtttagttaatatggtgaaatttttgtttttattaaaaatttaaaaattagttgggtgtggtggtatgtgtttgtaattttagttatttgggaggttgaggtaggagaataatttgaatttgggaggtagtgtttgtagtgagttaaggttgtgttattgtattttagtttgggtgataagagtgaaattttgttttaaaaaaaaaagaaagaaagttaagaggttatgagaataaaaaggttttatttaaatttaagaaagatagtggaagatagataattgtttgtttttttatttagattgtgaaatttagattgttggaaattagttataattaatagttgtatattggtaaaaatttatgtaaaattagttgtttgttttgtttttggagattgttttgttagaaggtttttttttgttaggtaagtaataaaattaatttaaaaaaaaaaggtgggggttgggtgtagtggtttatgtttgtagttttagtatttggtattttggggggggggtggaggtgggtggattatgaggttaggagattgagattattttggttaatatagtgaaattttgtttttattaaaaatataaaaaattagtttggtgtggtagtatatgtttgtagttttagttattggggaggttgaggtaggagaatggtgtgaatttgggaggtggagtttgtagtgagttgagattgtgtttttgtattttagtttgggtgatagagtaagatttttttttaaaaaaaaaaaaagaatattgttaaaggtggtatgtgttaagaaaaatatagtatgttttatgaatttgtattttatttttgtgtaggggttattttaattttggtatatgtgttatttaagtaagtatagtgaaattaattgtttgagataatatttgagagttggttttttttttttattggtatatgtaaatatttttagagagtttgggggaatatgttgaaattaaatatgtagtaaaatttatatgtttatttatattaagtagaaagaatatagaatatagattataaatagttttaggttaaaatttgttattaaatgagtttatttttaaatttttggtttatagagttttttgga

SEQ ID NO: 470 - DNA, 2470 bp, Artificial Sequence
  chemically treated genomic DNA (Homo sapiens)
atatattatattgtgtatgtaatgtataagtatttattttgtttgtttggggttttgtttgtttttgttgagtttgatttttttatttgttgtttggtttttgttttatgttttagtgttattgagattaaggagagaatgaatttgttgttgattgggtagagtgagtgtgtggattgtggttattgtttgtttattatttgtgtgtatttgggttggtattgggtgaagaattgtgtgggtttgggatttgggggtttagagggagtgagtttttgtgtgggtgtttggtttgtaggttttgtaggtttaggggtgtgttttgtttttatttttattttggattttggtttttttttttagatagtggttttttttatttttggtttttgtaggttgttagtagtttgtgttaggttttgttggtgtttttagggttttttagattgtgtagattttgatatttttgtttggttttgggttttgggagttgagagttggttagggttttgtttgtatttttgggtgtttagttttgggtttgttttttgtggatgttttaatttttttggttgaatggatggtggtgtgtgtgtgttttattttggtggtgttggttttttttgttgttaaaattagatttaaatttttgtatgggatttgtttttgggtttttattttgtgtgtttagtaaatagtgggtgagttatgaagatgtgtgagttagttggattttttttgttaggtgtggatttgttgtggttagagaatttagtttgtgttagtttggtttgtttgtgaagttatgggttttattgatgtgattttttaagatgtgggggttattatgggtagaggatattggtttggagttagattatgggttttataagtattagattataagtagtgttgttattgagagttgtttggaatttgtttagtatgttgggttttttagttagggtttggtgtatgtggttgagggttttggaagttttgatggtttaggaggagtaggtgggtggggtggtgggtgttgttggttggtagagagttttggtttgatttagtgtaggtttggtgtgtgtagagaataattttaagtgtattgatgtttgtgagttttttttaaatattgaatgggatttagagtttgagtttataggtggtggttgggggagggagtagggtgttggttgttgtttgggagtgtttgtgttttgggtgatttttggaaggatgtggggtttaaattttggttggggttgggagagtagtttttagaggttttttgtgggattttttgttgggtgggattgtggttttataggagaagtgggtggtaagttttgtttggtggaaagtagttgtttttttttttttgggtttggggtggtgttttttatttttgttttttgttttttatttttgttttttgttggttatattttttgttttttggattttaagtgttttgtgtgttgaggagtttagtgttagtggtggtggttaggagagatttgggtgttaggaaagatgggttgtttgggggatagtagggagtttgggggaaatgtaggtgttgggtatagagttggtattggtgtttttagttttgttgaagattgtggttgggtttggtttgtgggaggggttttggtgttggatttgttttggttttgtgtgggtggttttgttgggttttgtaggagtgatgtgtgttaaaaggtggtgggaaggaggtggggtagagtgtgtttgggattttgatttggatgtggttagttggagaggtggagtgttgggaggagattttggttttgttgtgatttggtggtttgtgttgtttttttgtgtgttgggttaaaaaggtgttaatgtttgtggttgtttattttttgtggtgttttttttttttgtgtttatataatttgtttaggggttgggtagtttgttttgtttttttgtttgtgtatttgtttggaggtttgtgtgtttgtgaaggggatgtagtgaaattggggtttgtgttaggttagttgggatggatgttgatgtttggggttgtgatggttgtaggtaggaggtttagggttggggggtggtttggttttgtgggtgggggttggagtgtagtgttgggtaggtatttgggtttgtagttttgaagttgggaggtgaggggagagtgattggggatgagttgggataaggtgatataggggtttttttggagttggattggtttttgggatttggtgtttgtgagaggttggagtggttagagtttagtttgtgaggagatgtgggttttgtttttagtgttggttgtttttggtgttaaagatagttttgtaggggttttgggagggttttttttttgttgttttttttttattttgggttttgagggttgttgggagggtaattttgggaagaggttggggtgtggggtgtgggtgtaggt

SEQ ID NO: 471 - DNA, 2470 bp, Artificial Sequence
  chemically treated genomic DNA (Homo sapiens)
atttgtatttgtgttttgtattttggtttttttttggggttatttttttaatggtttttggagtttggggtggagaggggatagtaggaggagggtttttttggaatttttgtggggttgtttttggtgttaaaggtggttggtgttgagggtaggatttgtgtttttttgtaggttagattttggttgttttagttttttgtgagtgttaagttttaggggttgatttaattttgagggagtttttgtgttgttttgttttagtttgtttttgattgttttttttttattttttagttttggagttgtgagtttaggtgtttgtttagtgttgtgttttagtttttgtttgtggagttgaattgttttttggttttgggttttttatttgtagttgttgtagttttgggtattggtgtttgttttggttggtttggtgtgggttttggttttgttgtgttttttttgtgggtgtgtgagtttttgggtgggtgtgtgggtggggaggtagggtgggttgtttggtttttaggtgggttatatgggtgtggggaggggaggtgttgtggggagtaggtggttgtgggtgttagtgtttttttagtttggtgtgtgggaaggtagtgtgggttattgagttgtggtggggttaaggtttttttttggtgttttgtttttttagttggttgtgtttaagttggggttttgggtgtgttttgttttgttttttttttgttgttttttggtgtgtgttgtttttgtagagtttggtgaggttgtttatgtagggttgaagtaggtttggtgttagggttttttttgtgggttagatttgattgtgatttttggtagagttggggatgttggtgttgattttgtgtttgatgtttgtgttttttttggattttttgttgttttttagatggtttattttttttgatatttgggttttttttggttgttgttattagtgttgggttttttggtgtgtggggtgtttggaatttaaggggtaggggatgtggttggtggggaataggggtgaggggtggggaataggggtgaggggtgttgttttaggtttaggaggaggggaatggttgttttttgttaagtagggtttgttatttattttttttgtggagttatggttttgtttggtagaggattttgtggagagtttttgggggttgtttttttaattttagttggagtttgggttttatgtttttttaggggttatttaggatgtgaatatttttgggtggtggttagtattttgtttttttttttggttgttgtttgtgggtttgggttttggattttgtttggtgtttggaaggagtttgtgggtgttggtgtgtttggagttgttttttgtgtgtattagatttgtgttaggttaggttgaagttttttattggttagtgatatttgttgttttgtttgtttgttttttttaggttattggggtttttagggtttttgattatgtatattaggttttggttaggggatttgatatgttgggtgagttttgagtggtttttagtggtggtgttgtttatggtttgatgtttatggggtttgtgatttggttttgaattgatgttttttgtttatggtgatttttatgttttggaaagttgtgttagtgaagtttgtggttttgtgagtgagttgggttggtgtagattgggttttttggttgtagtgggtttgtgtttgatggggagggtttggttgatttgtatatttttatggtttatttattgtttgttgggtgtatggggtggggatttaaagatgaattttatgtagaggtttgggtttagttttggtaatagaaaaggttggtattgttggagtaggatgtgtgtgtattattatttatttggttggggaggttggggtgtttgtggggagtagatttgaggttgggtgtttggaggtatgagtaggattttggttggtttttagtttttagaatttagggttaggtggggatgttagggtttgtgtgatttggggggttttagaggtgttggtggggtttggtgtggattattagtggtttgtgggagttaggggtggagggggttgttgtttagggaagaggattggggtttggagtgggggtgagaatgaggtatgtttttgagtttgtgaaatttgtggattgagtgtttgtgtaggagtttgttttttttgggtttttaggttttagatttgtatgattttttgtttggtgttagtttagatgtgtgtgggtgatgaatgggtggtggttgtgatttatgtgtttgttttgtttagttagtggtaaatttgttttttttttgattttagtggtattggagtgtgaggtaagggttaggtggtaggtagaggggttggatttagtaaaagtaaataaaattttaagtaaatgaaataaatatttatatattatatatatgatataatatat

SEQ ID NO: 472 - DNA, 2470 bp, Artificial Sequence
  chemically treated genomic DNA (Homo sapiens)
aaaattgaatatttgagaatattggatttatatttttgagggtaataatttgttagagttgagtagttgttttttttagttatggtatggatattttaatttgttattttttttattattttttattgttttatataaggttagttttatttatttgttttatttgtttggtttttgtagttatttgaatttgtaaatattatttagattttttttgttttttattaaagtttattttgttttgttttaagttttttattagtgttttaaagtaagagttaggtaatttgattaaatataggttttttaatatgtgttttttggagatagtattttaatagaaagagatgattttgtaggtagaaattataggtattattggattataattaggatggtaattgtttgttttattttttttgttattttgatgtagttatattttattgttttaaagtagattaaaggaattggttttatggtagaataatggatgttggttttatgtatgaaatttttttaagttgtatttttatagattattttagttttaaaagatttaaagttattatgggtttttttgatttttttatttttttggaggttttaggatatttggtttgatggtatttttttttatttgtttttggggtttgttttgtgttgggtagttgtgtttaaggagtgtgtgtatttagtatgagtttattttttatgggtgtttttagaggtttggttgggttgtgtatattaagtgtagtaagtttttgtattaatggtttttgtggttgggtggggtgtggttgtttaaaggtgttgtttttttggaagttttgtttttattttagtgtttgagagtttgtagttggttgggaaggtttttttggtttgtttggtttttttggggaagaggttaatatttggtatatgtgatttatggtagaggggagttttgggtgtgtagaattggttgtgttttgttgagagttttttgtgggtggggagagtttttttatttttttgtttgtttgagtgtttagagtttagggttgttgattgtagtattttttgatttgttgtattgagggtttgtggtttttgtgtgtggtttttattgttgttggaggtggttgtaggtgaattgttgggttgttagttatgatttgagttaggtatttttttgtttttgggattggggttgaaggttaattatattgtagttaggttttgtgattggatggtagtgagagttgattggttgttgttgtgagttttgggtttttttttttttttttttgttttaattttagtgtttaagttttaggttaatgagatagtgttttatagatgttttttttttgtttttttttttttattttggagagggaggggaagttttgattggttagattgtttttggaagtttttttttttttattaattattgaaggaggtatgtttttagtggagttttttagttaattataaagtggtggtggtgtttagttgtgtagttttattagtgtttttgggttttattgtttttaattttttaagtttttttgtaagggttggtgattttgattggttattgttgttattgttgaatgttttttttagttagttattgaataaggtgaatttattttttttgtttggttatttttggtattttttgttttttgggtgtggttttttagtgttattttttaattggttttttaggttgattggttttttttgggaggagttgtaaataaatgatgtttgtgattggttttgtttgggttttggtttttagttgaagtgggtgagtgtggggtttggttggtgatttttagatgtttgttatgtgggtggtggggtgttgggtggtgtaaggttgggtgggggaggaaggaggtggaggatgagtaggaggggggaggaggagtggggaagtgtaaggtggttgtgtagatagtgttttttatatagagtagtttttgatttgggtgaatgtgggtttgtgttgttgttgttgttgttgttgtttgggttaagtgataaaggaaggaaggaagtgaggaggagttggttttgtagttgttgatagggttttgggttggggtaaagtgtggatattttttgagtgggtattgagtagagttgaggggtgggagggtggttgagttgttgttgtggatgggggagggggttttgagggatggaagtggttgttgggtttttatgtttttggtgaatggggaatagttgaggagttgttgtttggggtttgaagggagttgtttttgttattgttatggttgttggatttagttgttgtttgtagttgtttttggtgtaatgaggagaggagttgttgttattgttattgtttgtttttgattgatttgtgattttgttgttttttagtttgttgggtttttgttgttagtttgttggattttgtggtttgttggagttgtag

SEQ ID NO: 473 - DNA, 2470 bp, Artificial Sequence
  chemically treated genomic DNA (Homo sapiens)
ttgtagttttggtaagttgtgggatttggtgggttgatggtaggggtttggtgaattagagggtggtggagttgtgagttagttagaggtgggtggtggtggtggtggtggtttttttttttattgtgttaggagtagttgtaggtggtggttggatttagtggttatggtggtggtggaggtagttttttttagattttaggtagtggttttttgattgttttttatttgttggggatatgggaatttggtaattgtttttgttttttggggtttttttttttgtttgtggtaatagtttggttgtttttttgttttttggttttgtttggtgtttgtttaggaagtgtttgtgttttgttttagtttagagttttgttagtggttgtggggttggtttttttttgttttttttttttttttgttatttggtttgggtggtggtggtggtggtggtggtataagtttgtatttgtttgggttaggagttgttttgtgtgaggagtgttgtttgtgtagttgttttgtatttttttattttttttttttttttttatttgttttttatttttttttttttttatttagttttatattgtttagtgttttgttgtttgtgtaataggtgtttgggaattgttggttgagttttatgtttgtttgttttggttgggagttgaagtttgaatggagttaattatggatgttgtttgtttgtggttttttttggaaaaagttgattagtttgagaaattaattagaaagtgatgttgggaagttatgtttaaagagtggaaaatgttgaaggtagttgaatggaaagggtgaatttgttttgtttggtggttggttggaggagatatttgataatggtaatagtggttaattagagttgttggtttttatgaagaggtttgaagagttgaggatggtgaaatttagagatgttggtgaaattgtatggttgggtgttgttgttgttttgtgattggttggaaaattttgttgggagtgtattttttttggtgattggtgaagagaagggggtttttgaggatagtttggttagttaggattttttttttttttttaaggtggggagaagaaagtgaagggagggtgtttataaagtgttgttttattggtttgaagtttaggtgttggagttggggtaaaagggagagggagggagtttgaaatttgtggtggtggttaattggtttttattgttgtttaattgtaagatttagttgtagtgtgattggtttttggttttggttttaggagtggggagatgtttgatttgggttgtggttgatgatttgatggtttgtttgtggttgtttttaataatggtggaaattgtatatagggattgtgggtttttggtgtagtaaattggaaagtgttgtggttggtggttttgggttttgagtgtttaagtgagtagaggggtggaggggttttttttatttataggaggtttttggtggggtgtagttaattttgtgtgtttaaggtttttttttgttgtggattgtgtgtgttgagtgttggttttttttttgaaagggttagatggattaagggggtttttttagttggttgtaagtttttagatgttaaaatgggaataaagtttttagaaaggtagtgtttttgggtggttgtgttttgtttagttgtgggggttattgatatagaggtttgttgtgtttggtgtgtgtggtttggttgggtttttggaaatgtttatgagaaatgagtttatgttggatgtgtgtgttttttgggtgtaattgtttagtgtaaaatgggttttgaaagtaggtgaggggaaatgttgttaggttggatattttgaagtttttgaggaaatgggggggttagaggagtttgtggtagttttggattttttggaattagggtgatttataaaagtgtagtttgagaagattttatatataagattagtgtttattgttttattatagaattagtttttttggtttgttttagaatagtgaggtatggttatgttaagataatagagaaagtagaatagatagttgttattttgattgtaatttagtggtgtttgtaatttttatttgtagagttatttttttttgttaagatgttgtttttagaaagtatatgttaaaggatttatatttgattagattatttggtttttgttttgaaatattgatgaaggatttgggatagaataaagtaagttttgatggaagataggaaaggtttagatagtgtttgtagatttaaatggttatagaggttagataagtaaagtaaatgagtgagattggttttgtgtaagataatggggaatgatagggaaaatggtaaattggaatatttatgttataattaaaaggaatagttgtttaattttagtagattgttgtttttaggaatgtgggtttagtgtttttagatgtttaatttt

SEQ ID NO: 474 - DNA, 2470 bp, Artificial Sequence
  chemically treated genomic DNA (Homo sapiens)
ttttgtttttatgtttagtttattgaagtttgtttttaggttattggagttgagttttttgaatatttttggtttagagtgttgtagatttatgaattgttgtttgttgaaataaggtgtaaagtttattttgtttaaagtttttaataggagtgataatttaggtaaaatgtttatataatagtgggaaattaaaagtttgtgatatagaaaagtgatatatatttgtaaatttttttaataaaggtattgtagtataagtatgattgtagagttagattgttaatgtttaaattttttttgggttttaatttttttatttgaaaattgttaatagtggaatttagttgatagggttgttgtggagtaagtgtttttaatttggagtttatgaaattttagtatttgtgaattttgtattgaaaaaattgtaattttatgtttattaattttataatagttttgtttttttgaattataaaggtaggtaataaattatagtagtattattagtatttataattttgttttttatagaaattatttttatatttagtaagttgttgtagatattttgaataattatatgtatatattttttaagtattatatatataatatttttatattttgtatatatttttggagatagggttttgttttgttttttaggttggagtgttgtagtatgattggaatttattgtaattttaaatttttgggttttagtgatttttttagttttagttttggaatagttaggattataagtattttttattatatttagttgttaattttttttttttttgtaaagataaggttttattattttgtttaggttgttttttaatttttggatataagttttttgtataggttttttaaagtattgggtttataggtgtgagttattgtgtttggttaatattatgtatttaattttatgtgtttagaaatatgtgttattttaagaaggtgtttataggttttattatattattaaaggtgtttatggtataagtgaagaaatttttagatattagagtaataaaaattatgatgtattagaatggattaggtttatattaaatgtttaatatatagtttgttgttatggttttttttttttttttttttttttttttgagatagagttttattttgttttttaggttggagtgtagtggagtgattttggtttattgtaatttttgttttttgggtttatgttatttttttgttttagttttttaagtagaggaattgtaaggtgttttattatgtttggttattttttgtatttttagtagaaatggggtttttttatgttatggtaggttggttttgaatttttgattttaggtgagttatttgttttagttttttaaagtgttgggattataggtatgagttattatgtttagtttgttatggtttttaaaatatttatagaatagaaattgaagtaagtttatttgtttttatattaaaagtagttagtatggtgttttgtatttatgtattttatggatgttgaatgagttattgaatgaagtggagtttaggttgtgttttaggttttttagtggggttggaaggaatagttgtgaagttgtggggtggtttttgtgtattgggggattttggagttagatggttttttagggttttgaaggagaagagttgtgtttttaataatgattttaatgggaatagagattgttggggattgtaggggttaggttgttattttttaaagttttttttttattatttaagaaggtatttaggtttttttgtgttaggttttaggtaaagtgttggattatttagtaattgggtttagtagtaggatggttttagattgaggttttagggttaaaggattatttttttttttagtgttggtttgggaaaggtaagttttgggtgggagtgtatgttgtgtttttgaagtttggtttttttgttatgtttattttttgtttttattttgtgtttttttaggtttttttttggtgaattggatgttttgttagtttttttttttgtgtttttggttgtggtttgggttttttgtaaagttgttgttattttggagggtttagttagtgggtttttggaggttggttgggtaggtgtggtgtgtggtaggagttgggtgtgtatggttattgtgtgtggaggagatattgttttgttgtgatgggggtttggggtgtttttttatgttgtaggtaagtggggtggtggttgtggtatttgtttattgggagttttttttttttttttttgttgttgttgttttgtatttagtttgggggaggatagaagaaaaaggaggtagaatggatttttttggtttttttttgtgggtgggggtgggttagggtgggttgtgttgttaggtagttttgttgtgttgttaggtagtttggttgttggtgtgggtgatgttggtgttggg

SEQ ID NO: 475 - DNA, 2470 bp, Artificial Sequence
  chemically treated genomic DNA (Homo sapiens)
tttagtgttggtattgtttatgttggtgattaggttgtttagtaatatggtagggttgtttggtaatgtggtttattttggtttgtttttgtttataggggaaggttaaggggatttattttatttttttttttttttgtttttttttgagttggatgtagagtagtagtagtaggagaaggaagggaaagtttttggtgggtaggtattgtagttgttgttttgtttgtttatggtgtgaaggagtgttttgggtttttattgtggtagggtagtgttttttttatgtgtggtagttgtgtgtgtttagtttttattgtgtattatgtttgtttggttagtttttgggagtttgttggttgggttttttgggatggtagtggttttgtgagggatttgggttgtggttgaggatgtagaggaggagattgatagagtatttggtttattgggagaagatttggaaaggtgtgggatgggggtaggaagtgggtgtggtgagggagttaggttttgggggtgtggtgtgtgtttttgtttggagtttgttttttttggattagtgttgaggagaggagtggttttttggttttgggattttaatttgaggttattttgttattgaatttaattattgggtagtttagtattttatttggggtttagtatagaaagatttgaatgtttttttggatgatgaaggggaagttttggggaatgataatttggtttttgtggtttttagtaatttttatttttattgagattattattaggaatatagttttttttttttagagttttgggaaattatttaattttagagttttttgatgtatagaagttgttttataattttataattgttttttttagttttattggaaggtttgaggtataatttagattttattttatttaatgatttatttagtatttatggagtgtataagtatagagtattgtattagttatttttaatataaaaatgaatagatttattttaatttttattttatgaatattttaagaattatagtagattggatatggtggtttatgtttgtaattttagtattttgggaggttgaggtaggtggtttatttgaggttaggagtttaagattagtttgttgtaatatggggaaattttatttttattaaaaatataaaaagtagttgggtatggtggagtgttttgtagtttttttatttgggaggttgaggtaggagaatggtataaatttgggaggtagaggttgtagtgagttgagattattttattgtattttagtttgggagatagaatgagattttgttttaaaaaaaaaaaaaaaaaaaaaaaaagaattatagtagtagattgtatgttgaatgtttgatatgggtttgatttgttttaatgtattatggtttttattattttagtatttagagatttttttatttgtgttatgaatatttttggtaatgtgataaaatttgtagatgtttttttaaaatagtatatatttttaaatgtatgaaattaaatatatagtattagttaggtatggtggtttatatttgtaaatttaatgttttgggagatttatgtaggaggtttgtgtttaagagttggagagtagtttgggtaagatagtgagattttgtttttatgaaaaaaaaaaaaattaatagttgggtatggtggggagtatttgtagttttagttattttaagattgaggttggaaggattattagagtttaggagtttgaggttatagtgagttttgattatgttatagtattttagtttgggagatagagtaaaattttgtttttaaaaatatatatagaatataaaaatattatatatataatatttaaggaatatatatgtataattgtttaagatatttgtaataatttattgagtatgaaaataatttttgtaggaaataaagttgtaggtattgataatattattgtggtttgttgtttgtttttataatttaaagaaatgaaattgttgtgaggttaatagatataaagttatgatttttttaatataaagtttatagatgttgaaattttatggattttagattaagaatgtttgttttataataattttattaattaggttttattgttaatgatttttagataaagaaattaaggtttagaaaaaatttgaatattgatagtttggttttatagttatgtttatgttatgatgtttttgttaaaggagtttataaatatatattatttttttgtattgtaagtttttgattttttattattatgtgaatattttgtttgaattattatttttgttaaaaattttagataaaataaattttatattttattttagtaaataataatttataaatttgtagtattttgaattagaagtgtttagaaagtttagttttagtggtttgagagtaagttttaatagattaaatataaaaataaag

SEQ ID NO: 476 - DNA, 2470 bp, Artificial Sequence
  chemically treated genomic DNA (Homo sapiens)
agttgttttgtttagaagttgattttttgatgtttttaatgtttggtttaattgatttgttttaatggagtttttgttggtgaggagtgagatgttattgattagaatgttgggatttgttgtttaattgttaggagtgagagatattgagatttagaaatttttggaggtgggaggggagagggatagttttggatggaggtggagatgtaagataaagggatggattttatataggaaaaaaaaaaagattttgttgaggtattgaggtgttgtatgattatattttttaaaggagaagttaaaaagtaaggaagtgggaggaggttggaggttaaagtatttaaaaggattatttgggtataatttgtttttttgttggtgtttgtaaaggatagatagttttgtttttaaagtatatgaatgttttttttaagtgattgggaatggatattaattgtttgttaaatgttattaaatgtttttttaaatttaggggatatagaaagaggggtataaaaggagaatttaaatagaaaaagggaggatttggaggtttttgaaagtggggggagaagaaggaggagggataatagagaggaatagagaaggagagtggagagaagataaataaaaataaaaataggaattattgaataattatatattaaaaagaaagtttttttttatggggtatttaaaatattgagattgtaatagtgattttggttatggaagaaagatgtttttttttatttttgtttttgaaagtttttggttttgttattggtgattaaaattttattaggttaaagagtgtgtttaattgtttgaagaatgtagtagatggaaggtgggttttgttatgttgtttgttttttttgttggagagaatgaaagaaatgtgtagagttagagatttttgttgagttagatttttttttgttgttttaggttattggttatttggtaaagatttgagtaaggaatgtagggttattgtttgggttaataaatggagtttgtttttttttttttggatgttgttgtttggttgatgtttttggtaatttatttgtggtgtatgtagaggagttttttttttttttttagattatttgttttgattaatttgattttttaaatatatttgattgtattttttaggtggatatattaataggttatgggttggagaggagtgggtgatgaggagagggatttaaatttgtgaatgtttgggttgggttggagttgtggggggtttgggaggagagaggggagaagagagaaggaaggagagtgtttgttgggatggttgagttgttttggtgagtagttttggggttgtatgtttttgtgggagatgttgttgttgtttttaggttggtaagagtggttttaatattattgttttttatttttttttttgtaaatttttagagaaatgtttttggtttttttgttgtgatatttttagtttgtatttttttatagtttaggtggtgtgtttttgtatgttggagtgttggttgttagtaggatgtttttttttgtgttgatttgtttttttttgttttgttgttgttgtttttttgatatttttgtttttattatttttagtttggagagatgttatttagttgtggtttgtatttgtggtttggggttatgtgtggaagaggggtgttagtttggattttgtttttggtagggggtgttttggagtggagagtgaggtgaatggtatatgagtgtgtgggtagtttattttgaagtttgagttttttatttgagttatttttgtttagttttatttgggttagtgtttggtgagtgagtttatttgtggtttttgtggttgttttttttttgtatttttgtatttttttgttgattttttttttttgggatttgtattttgttttattaattagagtttgattgtttttttttatgtgattttgggtgggttgaggatttgttgttttttaaatgttagagggatgtgggtggtagagtttgagaggtggttgttgggttgtggggtgttttgattttttttttattttgtttttttgggttttatttgtttgtttttggatttttgtttttttttgttttttggttttttagagttttttttttatggtagtagttttttgtgtttttggtgtagttttttagtggatgatttttttgttttggggttgagtttagtttttggatgttgttgaaatttttgagattatgtgtgggtttggttgttgtttttttgttgggtgttattgttattgttgttgtttttgttgttgttgtttgtgggatgtttagtagtttgttgtttggtttttgtgattttgtgttttttggaagttgtttgttgttgtagagttgtatgaattagttatggtgttgtgggagtttttgtggtagtgtagtagttggatattttgtgagggtttttgtt

SEQ ID NO: 477 - DNA, 2470 bp, Artificial Sequence
  chemically treated genomic DNA (Homo sapiens)
agtaaaagtttttgtaaagtgtttagttgttgtattgttgtggggatttttatagtattatgattagtttgtgtaattttgtagtagtaaatggtttttgaggaatataggattgtgggggttgggtagtgggttattgagtattttgtggatggtggtagtagaggtggtggtggtggtagtggtatttggtggggaagtagtagttaaatttgtgtatgattttgagagttttagtaatatttagggattgggtttagttttggagtgagagggttgtttgttgagaagttgtgttggagatgtgggaagttgttgttataaggagggagttttgggaagttggaggataggaggagatgggagtttaggggtagatgagtggagtttgaggaggtagggtggagggagagttaaggtgttttgtagtttggtagttgttttttgagttttgttgtttgtatttttttggtgtttgggaagtagtaggtttttagtttgtttggggttatgtgggaagaggtagttgggttttgattggtggagtaggatgtaggttttgggagggaggggttgatgaggaggtgtaaggatgtaaggaggaggtggttgtggaagttatagatgggtttgtttgttaggtgttggtttgagtggggttaggtggggatggtttaaatgagaagtttgggttttagggtgggttatttgtatatttatatattatttgttttattttttgttttaggatgttttttattgaaggtggggtttggattagtgttttttttttgtgtgtgattttgggttgtgagtgtgggttgtggttgggtggtgtttttttgagttggagatggtgggggtggaggtgttagaggagtagtagtagtagggtagagaggggtgagttggtgtgggagagggtgttttgttggtgattggtgttttagtgtgtgggagtgtgttgtttaggttgtagggggatgtaggttgggaatgttgtggtggagaggttagggatgtttttttagggatttataggaaagagggtgagaggtgatggtgttagaattgtttttgttgatttggaagtaatagtagtattttttataagagtgtgtaattttaaggttgtttgttgaggtagtttagttattttggtaggtgttttttttttttttttttttttttttttttttttttaggttttttgtagttttgatttagtttaagtgtttgtaggtttgaatttttttttttattatttgtttttttttagtttgtagtttattagtgtgtttatttgggaggtgtggttagatgtgtttggaaggttagattggttgggataagtggtttgagagaaagagaaaggtttttttgtatatgttgtgggtgggttgttgggagtattggttgggtagtggtgtttgggaaggggagagtgggttttatttgttggtttaggtagtgattttgtgttttttatttgggtttttgttggatggttggtgatttggggtgatgagagaaggtttaatttggtaggagtttttggttttgtgtgttttttttattttttttagtgggaagggtaaatggtatagtgggatttgttttttgtttgttgtattttttaggtagttagatatattttttagtttaatggaattttagttgttagtaatgggattaagagtttttggggataagggtggagaggaatattttttttttatgattggggttattattgtagttttagtgttttggatgttttatagggaagagttttttttttggtgtgtgattatttagtgatttttgtttttgtttttgtttattttttttttgttttttttttttatttttttttgttatttttttttttttttttttttttgtttttaaaagtttttggattttttttttttttatttaaattttttttttgtgtttttttttttgtgttttttgaatttaggagagtatttgataatatttaataggtaattagtgtttatttttaattatttaaaagaggtatttatatattttgaaaatgggattatttattttttgtagatattagtagaaaaataaattgtatttgagtaatttttttaagtattttaatttttaatttttttttatttttttgttttttaattttttttttgagagatgtgattgtgtagtattttagtgttttaatgaaattttttttttttttttgtgtgaaatttatttttttattttatatttttgtttttgtttgagattgtttttttttttttttatttttaaagatttttgaattttagtgttttttatttttggtaattaagtagtagattttagtattttagttggtggtattttgttttttattgatgaagattttattaaaatagattaattagattagatgttggaggtattagaaaattggtttttagatagagtagtt

SEQ ID NO: 478 - DNA, 2470 bp, Artificial Sequence
  chemically treated genomic DNA (Homo sapiens)
atatttaaattgtatatttggtttgtaatatattatatatttaaaagaattattatttttttgaatattattaatattaataatagtattatagtgattaagagtggatttaaataaaggttggtttgaaatttaggtttgttatttattagtaagtttttaaaaattttgagtttttagtttttttatatgtgaaatggagaaaataaatttgtaaaattaattaaatttgtttatttatatttttttttttagtgtatattaattggtattttttgttaggttagaatgtgtttttaattatgttttaaatttgttttgtgttaattttattgttagaattttttttattttgagaattagaaaaggaaatattatgtttggtaatgtttatattttttaaaataaatttgtaggaaagaatatttagtaagtgatgagagtagtaatgattgtttttattattttaaatttataatattattttttttagagttttttaagtattgtagataattttttatttattaaaaaataaattgtaattataagtatttagggttgatattgtttttgaattagatagtgtttatattagttgtataagattaatttaaagtagaggatgaaattttttttttgaattttttttagaatgtaatttagtgaatatattaaaattaaattttttttgaatgggagtaatttttatggattaatttgtaattttttagattatatttaaggtaatgtagaggttgttgtattataggttttgtgattagagattattggatttgtttttggaaaagttatttatgattttttgggttttggtttttttattttttatattggtttaataatgattattgtagagttgttatggaagttaaatgaatttatgtattataagtgattaatataatgattgatatttagtgatttattaataaattaaaatatttattattaatatgatagagaaggtgttgttaaaatagataataggtttttggaagaggtgattaaatggatgtaaaatttatggattgtttattttgtttatttttgttgtgttttttggttgtggtatatatatgtgtgggtataaaattgtaaattttatgtagttgtgtagtgtatgtgtagaaggtttagatatgaaatgttattttagtaatgtgtttagagaagttttgatgttgttttggaagtaagttgttgttgtttgatttttgggtgtttgggatggatgtttatatttgtatttagtagtattggaaggggtttaggttttttgtagtatagtttatttttagattgtttagttttttataatatatatttttatggaaaagggtatttttttttgttagaaaaagtgttttagtttggtttgggttggtttttattttatgttgttgtaagtaggtgaagttttttttgtttttttttttggggtaagtggaaaggagtttggtagggggtttgtagtggtttgtataggggaattgggtagtgagagagttttaggtaattttgggggttgttttatagaagtaggtggggattgatagtggttttttggtttagggaggagagtgtggttgtgggtttttttttttagtttggaggttgtagttgtttgagttggtttgggtgggggtggggtgggggtggtgtggagggtatggagattatggtggtgttatttgggatatttagggttttgaggttttgggtggtttttatgtgagattgtaaattatgataataggtagttatttgaggttaaataaaaatggagtgggttttttgtgtgttgttgttttttgtgtttttggtggttttttttgaggtttttggtggttttatgagtttgtagtagttggtggtgatgttgtttttgttttatttttttgtgtaagtgtgaggttgttggtagtgtggtgtatgttttggttgtttttggtttttgtgtaaaatttttattttgtttatgtgaagttgttgttgttttagagagggggaaagagttgtgggaaaagttggggagtgatgattgtggtggttgggtgtgtttttttattttttttttttttttttttttttttgttgtagtttggagttttggtttttttttttttttttttttttttggagttggtttttttttttgttttgttttttttttgtttgtgtatgttatttgttgtggggtggttgaaggggatgttttgtttttattagaggtatagtgtgaaggggaaattttgatattggaaggaatgagaataaatatttaattatggatgtattgaattgtggttgggatagatattttgggaatttgaggtggattgggtgatgaggtgagtgatttttttttttaatttttgttttagggtttttgggggagtttgagttgagagaatttttaaattttttgggaaagtgtgtgaggttt

SEQ ID NO: 479 - DNA, 2470 bp, Artificial Sequence
  chemically treated genomic DNA (Homo sapiens)
gagttttgtgtatttttttggaaagtttgggggtttttttaatttaggtttttttgggagttttggggtgggggttggaagaaggggttatttattttgttgtttggtttgttttgggtttttgaagtgtttgttttagttgtggtttagtgtgtttgtaattaagtatttatttttgttttttttagtgttgaagttttttttttgtgttgtgtttttggtgaaaataggatattttttttggttattttataataaatagtgtatataagtgggggagaagtggggtggagggagaagttggttttgagggggaggaggaaaggagaggagttaaaattttggattgtgataggggggaaaggagaagaaaagaaaatgagagagtgtgtttagttgttgtagttgttattttttggttttttttgtagttttttttttttttttaaggtagtgataattttatgtggataggatggaagttttgtgtggaagttgggaatggttggagtgtgtgttgtgttgttggtagttttgtatttgtgtagggaggtggggtgggggtgatgttgttattggttattgtgggtttgtgaggttgttgggggttttgggggaggttgttagggatgtggggggtggtggtgtgtgggggatttattttgtttttatttgattttgggtgattgtttattgttatggtttgtgattttgtgtggggattgtttagggttttggggttttggatgttttgggtggtgttgttgtaatttttgtgttttttgtgttgtttttattttgtttttatttgggttgatttgagtggttgtagtttttaggttgaggggagggatttgtgattgtgtttttttttttgggttggagagttattgttgatttttatttgtttttgtggggtagtttttggaattgtttggaatttttttgttatttagtttttttgtgtaggttattgtgggttttttgttggatttttttttatttattttaagggaggagatagaagggattttgtttatttgtaataatgtgaaataaaaattaatttagattagattggggtgttttttttgatgggaggaaatatttttttttgtggagatatatgttatgaaggattaagtggtttggggataggttgtgttgtgaagggtttgggttttttttagtgttgttgggtgtaggtataggtatttgttttagatgtttaaaggttaggtagtaatgatttatttttaaggtggtgttagagtttttttaggtatattgttgaaatgatattttgtgtttaagttttttgtgtatgtattatgtgattatataggatttatgattttatatttatatgtgtgtatgttataattaggggatatagtaaaggtagatggaataaataatttataaattttgtatttatttaattattttttttaaaaatttattgtttattttagtggtattttttttgttatattgataataaatgttttaatttattgataaattattgagtgttaattattgtattggttatttatggtatatgagtttatttaatttttatgataattttatggtggttattattaagttggtataaaagatgaggaaattaaagtttaaagaattatgagtgatttttttaaagataaatttagtggtttttaattataaagtttatgatataataatttttatattattttaggtgtggtttaagagattatagattaatttgtagaaattatttttatttaaagaaagtttagttttaatatatttattaagttatgttttgaaaaaggtttagaaaaaagattttattttttattttaggttggttttatgtaattgatatgagtattgtttaatttaaaagtagtattaattttgaatatttatggttataatttattttttaatgagtggggaattatttataatgtttaagaggttttagaaaaggtggtgttgtaaatttaaaatgataaaggtagttgttgttgtttttattatttattgggtgtttttttttgtagatttattttggagggtgtaggtattgttaggtataatgtttttttttttggtttttaaggtagaaagggttttggtagtggggttggtataaagtggatttggagtatggttgagagtatattttggtttaatgaggaatgttagttaatatatattggagagaaaaatatgaatggatagatttaattaattttgtagatttattttttttattttatatgtgagaaaattaagggtttagaatttttagaagtttgttaataaatggtagatttgagttttaagttagtttttatttaagtttatttttagttattgtgatgttattattagtattaatggtatttagaaaaatagtaatttttttaaatatgtaatatattataagttaaatatgtaatttaaatgt

SEQ ID NO: 480 - DNA, 947 bp, Artificial Sequence
  chemically treated genomic DNA (Homo sapiens)
ttgttgtttttaggggttttggttttgattgatatttgggtgggtgagtgtggggtttagagagaaatggtttttgtggggaggagtgaggggtttgtttggtgggggtgtaggatttagggagttgtgtttggaggagggtttggtgggttttagtttttttttgtttttaggtttttattttttgaggtattttagtattgttgtgttgtggtttggttgtggggagttttgttatattgttgtggagtatgtagatgatatgtaatttttgtggtttgatagtgatgttgtgattttgaggatggagttgtgggagttgtgggtggagtaagaggggttgtagtattgggagtggattatagggtatgttaaggttaatgtatagattgattgagtggttttgaggaatttgttttgttgttataattagagtgaggttggtgagtgaatttggttgggggtgtaggttatgattattttttatttgttatggattgtttgggttttttagagtttttggatttgaaatttattttgaggtagtgggatttgtttagattttttatttgggagagttttaggtgtttttatttaggtttatttttagtttaggttaaaatttttgtgggttgggtggggagggggtggggttagttgggtggggttgattgtggggattggttagggttttatattttttagggaatgaatggttgtgatatggggtttgatggatgttttttttgtgggtattattagtatgtgtatgatggtaaggattatatttttttgaatgaggatttgtgtttttggattgtggtggatattgtggtttagattatttagtgtttttatgaggtagaggaatatgtagaggagtttaggatttatttggagggtgagtgtttggagttgttttgtagatatttggagaatgggaagga

SEQ ID NO: 481 - DNA, 947 bp, Artificial Sequence
  chemically treated genomic DNA (Homo sapiens)
ttttttttattttttaagtatttgtggagtaattttaggtatttgttttttaggtaggttttgaatttttttgtatatttttttgttttatagaagtgttgggtgatttgagttatggtgtttgttgtggtttaggagtgtaggtttttgtttagggagatgtaatttttgttgttgtatgtgtgttggtgatatttgtggaggaggtgtttgttgggttttatgttgtagttatttattttttggagggtgtgagattttagttggtttttgtagttagttttgtttagttagttttgttttttttttgtttaatttgtggggattttggtttaaattgaaaatgaatttgggtaaaggtgtttgggatttttttgggtggagggtttgggtgggttttgttgttttggggtagattttggatttggagattttgagggatttgggtggtttgtggtggatggggggtggttgtgatttgtgtttttggttgggtttatttattagttttgttttggttgtagtggtggagtaggttttttagggttatttggttagtttgtgtgttggttttggtgtattttgtggtttatttttaatattgtggttttttttgttttatttatggtttttgtggttttatttttggaattgtggtgttgttgttgaattgtaggaattgtgtgttgtttatgtattttatggtgatgtagtggggttttttgtggttgggttgtgatatagtggtgttgaaatattttaaggagtgggagtttgggggtgaggaggggttgagatttgttagatttttttttgggtgtggttttttgagttttgtgtttttattgggtgggttttttatttttttttatagaggttgtttttttttggattttgtatttatttgtttaagtattggttagggttagggtttttgagagtagtag

SEQ ID NO: 482 - DNA, 3120 bp, Artificial Sequence
  chemically treated genomic DNA (Homo sapiens)
aattttaagtttaggttgggtatagtggtttatgtatgtaattttagtatttggagggattgaggtgggtggattataaggttaggagattgagattattttggttagtatggtgaaattttgtttttattaaaaatataaaatttagttgggtatgatggtatgtgtttgtagttttagttatttgggaggttgaggtaggagaattgtttgaatttgggaggtggaggttgtagtgagtggagattgtattattgtatttgtttggtgatagagtaagattttattttaaaaaataaataaagaaaatttgaagtatagtatttttttaaattttaaatagataatagaaattggtttttttttatttaaattagaatttaagtttaattttatatatttttgatagtttggattttgttttttaattttataaaattgggaatttaagtattatttggtttgatttaaatgtaatgtagaatttgtattaaaatattatattaaagttttagatttgtagtagttaatagtatttttatgtatgtgttagggattgttttaaatattttatatatattaatttttttattttgtatttttgtttttgttttatatagtaggaaattgaaatattgagaggttaagtaattaaagttatagagttagagtgataggagtaaagttttaatttaggtaatttagatttttagagttttgatttttattattaagttgttagtatagtttttttggtaattatttttaatttaaatataatttgagtgatttatttaataagttattattttgataatttagtgatttgtaatgtaaaattatttattgtaatttatttaatattattgtttttttgtgttgtaaaaattatagtaattgagatgtaatttattatttttttttttatttttggtattttgtgttaatttttttgttttgtggattttttttgattttttattatgtgtgttaattgttattaatttttttgtttgttggggattggggttgtgagggtatatttttgaggggtatggggttagggttaggtaggttgtgtggttgggtggggttttgtgttttattgtggagtgtgggttgggaagtggagagagaagtagttgtgtaatttgttggatgtggattagggtgttttttatttttgttgggagtttgttgattggttgggtgtgggtgtatgtgattgatatgtggttgtattggtgtagtttgttagggtgttattggagatagaatggaggtgttgttggatttggaaatggggtaggtgttggagttattatggttaggtttgttgtggggggaggggggaaggtggtttttttttgtattgttttaaattgatggtttttttttggtatagggtttattgtagtatgttaaatgaggaggtaggggtgttgtttttttgttttttattgtagtattggagatggattttttgtattttggatttagggtttttgatagaagaggaagaagggggaggggtagaagtgttaaggggagtttgttgagaaaagttgtttttgaagttagaaggggtttttgtttttataatgttatttgatagagtggaataatagtatttaaggaaatgggtagaggataataaagaatggagtatatttatggtgaggagtaaaagttttattttattgaaaggtttttttttttttttggtgataaggatatatgtattggtggttaaaagagagaggagataaaattgttgtagatggttgatgtgaatttagtggaaagagttattggggatgagagaaagaggaggaggtaggtattgtagagtgtgagtggtggtgttggttggtgaaatattggttattagtagtgtgtttgtttttgtaaaatatttaagtaaattttttgtgaatagggtggtaaatagatattagtgtttttgttagttataaaatgtagtggtagtggttttttgtggatgattgtagtagtgttttttttttttttgttaggttgaaaagataattgtagaggaataagaaattttgtagtaaatgttggggtagaagtttatttataagaagttatagtttataaatgtagtttgaatagtagaaaaaaaattattgttttttaaagtaggaataatgttaggttatgaatgttttgttattggaatgtattggatattttgattttatattatgaaagtgatgtttaaattttttgatttaatataaattttatatgaaattttaataaattatgtatgaaatagtggatttttttttttgttagtgaagtttttatgttattaattaggttatttaagagtaaattattttataatgtaaattattttgttaaaaattatggtgaataaatttttgtaggtttaatatttaagatttatagttaagtaattttatatttttttttggttgtttttagataatattgaataaatatttaagatattaatttagtgtgtaaatattttaaattaaagtaatatggttttttttttagatgtatttttgtttagtgagtatttatgagatatatttttgatataaagtgttttttattgagttttttttttttttatttaaatgtaaaagtttatttttatgtatatttatagtagttagtttgttatatttttttattttttgaataaggatggtagtggttttgtaaagttttttagggttagtgatagtgttttttaaataatgtttatgtaatagaaagttttaagatgatttattatattgttttagtaatatttttaagataatgtggaattgggttggtttagataaataagattatataagttttttattgataaatttaaatagttttttaaaaaattatttttgttttaagaattatttgattatggatattagggttaatagtatttaggagttgggtgtggtggtttatgtttgtaatataagttaaataggaggttgagggaagttgaggtaggaggattatttgagttttggtgtttaagattagtttgggtaattaagtaagattttattttaaaaaaaagtatttagagttttttttttaaaatttgat

SEQ ID NO: 483 - DNA, 3120 bp, Artificial Sequence
  chemically treated genomic DNA (Homo sapiens)
attagattttaaaaaagagattttaagtatttttttttgagatagggttttgtttggttgtttaggttggttttgaatgttaaggtttaagtgatttttttgttttagttttttttagttttttgtttagtttgtattataggtatgggttattatgtttggtttttaagtattattaattttgatatttatgattaagtaatttttaaagtagaaataattttttaaagaattatttaaatttattagtgaaaaatttatgtagttttatttatttaagttagtttaattttgtattattttgaaaatattattgaaataatataataggttattttaagattttttattatataaatattatttaagagatattgttattgattttggagggttttataaagttattgttatttttgtttagggagtggggaggtgtggtaggttggttattataagtatgtataaagataggtttttatatttaggtaaaggaaaaaaaagtttaatgaaaaatattttatattaagagtatattttatgagtatttattaaatagaaatatatttagaagaaaagttatgttgttttaatttaaaatatttgtatattgaattaatattttaaatatttatttagtgttatttaaaagtaattaaagagaaatataaaattatttaattataggttttaaatattaggtttataaaaatttgtttattataatttttgataaagtaatttatgttgtaaagtggtttgtttttgaatgatttaattaatggtataaaagttttattaataaaagaaaagatttattgttttatatataatttattaagattttgtataggatttatgttaaattaaagaatttgagtattatttttgtgatgtagaattaaagtgtttaatatattttaatgataaaatatttatagtttgatattatttttattttaaaaaatagtaattttttttttgttgtttaggttgtatttataaattatggttttttgtaaatgggtttttattttagtatttgttgtaaggttttttatttttttgtagttgtttttttggtttaatagagggagaaaaagtattgttgtagttgtttgtaaaaagttattattattgtattttgtaattaataaagatattggtatttgtttgttattttgtttatagggagtttatttagatgttttataaaagtaggtatattattggtgattagtattttattaattaatattattatttatgttttgtagtatttgttttttttttttttttttatttttagtagttttttttattagatttatattagttatttgtagtggttttgtttttttttttttttggttattaatgtatgtgtttttgttgttagggaggaaaagaagttttttaatggggtagagtttttgttttttgttatgaatatgttttattttttgttgttttttatttgtttttttagatattgttattttattttgttaaatggtattataaaaataaaaattttttttggttttaaaaatagttttttttagtagattttttttaatatttttatttttttttttttttttttttttgttaaaaattttggatttgaagtataggaaatttatttttagtgttgtagtggggggtggggggatgatgtttttgtttttttgtttggtatgttgtagtggattttgtgttaaggaaaggttattggtttaagatagtgtgagggaaaattatttttttttttttttttgtagtaagtttggttatggtggttttagtatttattttatttttgagtttggtagtatttttattttgtttttagtgatattttggtgggttgtattaatatagttatatgttggttatgtgtgtttatatttagttaattggtgggtttttgatgggaatggggagtgttttggtttgtatttagtggattatatagttgtttttttttttgttttttgatttgtattttgtagtggggtatagggttttgtttaattgtatagtttgtttagttttagttttgtattttttgggggtatgtttttgtggttttagtttttagtaagtaaggaagttgatggtagttgatatgtatagtaaagagttgggggaggtttgtagggtagaaggattagtataagatgttggaggtgggagggagagtaataaattatattttgattgttatgatttttgtagtatagagaaataataatattaaatgaattataatgaataattttatattataagttattgagttgttagagtgatgatttgttagatagattatttgaattatatttgaattaaaaatagttattagaaaagttatgttagtagtttagtagtggagattagaattttggaagtttgggttgtttgagttgaagttttatttttgttattttagttttgtaattttagttatttaattttttagtgttttaattttttgttgtataaaatgggaatagaagtatagaatagaggagttaatatatatgaagtatttagagtagtttttgatatatatatagaagtgttgttagttattataaatttgaggttttaatgtagtattttaatgtaaattttatattgtatttaaattgaattaggtgatgtttaaatttttaattttatgaggttgaaggataaaatttaaattgttaagaatatataaagttaaatttaaattttggtttaaatggggggaaattagtttttattatttatttaaaatttaaaaggatattatattttaagttttttttgtttgttttttgagatagagttttgttttgttattaggtgagtgtagtggtgtaatttttgtttattgtaatttttattttttgggtttaagtgatttttttgttttagttttttaagtagttgggattataggtatgtgttattatgtttagttaagttttgtatttttagtagagatggggttttattatgttggttaggatggttttaattttttgattttgtgatttgtttattttggtttttttaagtattgggattatatgtgtgagttattgtgtttggtttaaatttaaagtt

SEQ ID NO: 484 - DNA, 2501 bp, Artificial Sequence
  chemically treated genomic DNA (Homo sapiens)
gtgttttagtttttgaatttatgttgtttgttattatattgtattgtttgtggatgatttatttgtttttgtagttttatttgaagaatttttttttttttttttttgaggtttgttttaaatattattttttttgtgaagattgtttggtgttttttaggagagagtgtgatttttttttttaggaatggtagtattttaaatatatatattttgtagtatattttattttgtatggtaatggtttgtttgtgagttttattttgtattagagggtgagggttttgaagatagtgttaggttttatttattttgatattttataatatttattatatgtttgatgaatgaatgtatagggggatggttgggtgtattttttttaattttttaattttttgaaataaataataaaattttatttttttttagaagttttggtatggttttttttattttgttatagttattgataattatttttattttttgtgtaatttattaggtaagaagtttatgtagatttatttttagtagtttatatgataaataaatattgtgtttgatttttaaatattaaattatagtatattatagatagatatagagttattatttaaagtatgatattttaattttaaaaggttttttttgaagaatattataaattttttttttttttaagatttgttgggtaggaaagatgggagaaaatgaattaatgtttatatagaaaggaggataatgggggtaaaaataatagatgaatgtatgggtggatgagagaatggataaaatgataggtggatatgttgattttggatagatgggaaatgagtggatatattaataaatagatatgtgggtggatgggtggagaagaggatggtggatggttgtggttttatgaagagatgtgaaaaaggaagtgtggaatgatggatgagaagttgtatgggaagatgaatagaagaataggtggttgaataaattaaaaggtgtgtggttggatgaatgaatgagtgggatgatagatggatttaagtggttagtggatggataggaggatggatggatgtgagagttttagaaggatataaggaaagatgggtggatagatggatgggtggatggaaggatatttaggaggatgaatgagtatgtgtgtggagagaggtgtttatttatattggtttgaatatatgggttagttgagttaaatgttagttttatgataggttattagtagttttttttgagttgttttgttaagaagttaaaatttatttaagttatgtggatttgttattgaggggaaaaagaatgagttttttttttttttatttggaagatttattaattttttattttttattttttattgtgggtatggaggtattgtgttatttagggtaagattttgttttttttttagttttttttttaggatatttaatattttgtgaaatttagagattttgttttagttggatttagagaaatttagtgggaaaggagaggttaaaggttgaatttaatggtgtaaggttttatggtttggttattttttgttttgatgttgtggggttagtgggagaagaaagttagtgtgtttttgggtgtaggggttagtggggtttggaggtataggtattttgtgatattttaggttttttgatttatgtttttggtagttttgattatttatagttttagtagagtatggggtgggggtagaggggtttgtttgggagggttgttattttttaaaatttttgtgggttgtttagttatagttttttttgtttgggtgtgttttttgtttgttttttttttttgttttaggttattgtttttaattttgaataaaaattgtagttaatttttgaggtagttttattgtttagtggattttagtttttgttaggtttggtttgttatttttgttttgttttttgttggtttttgttttgtgtttagggattttttagttttttttgtttgtgttttttgtttgttttggatattatggataagttttggtggtatgtagtttggggattttgttttgtgttgttgagtttggtgtagattggtgagtgtttgttgtagtttgggtagtaagatgggtgtggggtgtttagtgtggatttggtggtagtttttttggttgagttggttttgggggattggagttaagtgagttgtttgtgaagtgtattgggttttggaaagtagggttgggatttgtgttaaattgttggagaatgtgtttgtggaagtattatttggttgaaagaaaaagagaaagagaagaaagtttgttgggtaggttgttggtgtgtagttttgggtgaggttgttagagttgtagtatatggtagaaagtaattgtttttttggatgtgtatagttgttgtttggattaataggtttttgtgtttaagggtttgttaagttttattgggttgtgtttaggtagggtagagttgggtggggta

SEQ ID NO: 485 - DNA, 2501 bp, Artificial Sequence
  chemically treated genomic DNA (Homo sapiens)
tgttttgtttagttttgttttgtttagatatagtttggtggggtttggtgagtttttgggtataggagtttgttagtttagataatgattgtgtgtatttgggagaatggttattttttgttatgtgttgtagttttagtgattttgtttaaaattgtgtgttggtagtttgtttaataaattttttttttttttttttttttttttaattaaatggtgtttttatagatatattttttaatggtttagtgtaaattttagttttgttttttggagtttaatgtattttgtagatagtttatttgattttagttttttagggttgatttagttggaggggttgttgttgggtttgtgttgagtattttgtatttattttgttgtttaggttgtggtgggtatttattgatttgtgttaggtttagtggtatgaggtagagtttttaggttgtgtgttattaaaatttgtttatggtgtttggagtgaatggagggtgtgggtgaaaggagttggaggatttttgggtgtggggtaggggttggtggaggatgggatgaggatggtggattgaatttggtagaggttggggtttgttgggtaatgaggttgttttggaagttggttgtagtttttatttgaggttgaaaatagtgatttaagatggagggagggagtgagtgaaggatatatttaagtaaggggggttgtgattaagtagtttgtagaggttttaagaagtagtagtttttttgggtgggtttttttgtttttgttttgtgttttgttgaggttgtaaataattggggttgttagggatgtgggttggggaatttggagtgttgtggggtgtttgtgtttttgagttttattggtttttgtgtttagagatgtattggttttttttttttgttggttttgtggtgttaggatagaggatgattgaattgtaaaattttgtattattgggtttagtttttggtttttttttttttgttaaatttttttgaatttggttggagtaagatttttgggttttataggatgttggatattttgggagaggagttggagagagggtgaggttttgttttgggtggtgtagtgtttttgtgtttatagtggggagtgaggggtggggagttggtgaattttttaagtggaaagagggagagtttattttttttttttttaataataagtttatatggtttgaatgaattttagttttttggtagaatagtttagggaaagttattgatggtttgttatagggttggtatttggtttagttaatttatgtgtttaagttagtgtgaatgggtatttttttttatatatatgtttatttatttttttaaatatttttttatttgtttatttatttatttatttatttttttttatgtttttttggggtttttatatttatttatttttttgtttatttattaattatttaggtttatttattattttatttatttatttatttaattatatattttttaatttatttaattatttatttttttatttatttttttatataattttttatttattattttatatttttttttttatatttttttataaaattataattatttattatttttttttttatttatttatttatatatttgtttattgatatatttatttattttttatttgtttaagattaatatatttatttattattttatttatttttttatttatttatatgtttatttattatttttgtttttattatttttttttttgtgtaaatattaatttatttttttttattttttttatttagtagattttaaagagaggaagagtttgtaatattttttaggggaagttttttgagattgaaatattatattttgaatgataattttatatttatttataatatattatggtttaatgtttggaaattaaatgtagtatttatttgttatgtgaattattaaaagtaaatttgtatggattttttgtttggtgagttatatagaaaatgaaagtgattattagtggttgtggtaagatgaaaggaattatgttaggatttttgagggaaggtaagattttgttatttattttaagaaattgaaaagttgagagaaatgtatttagttatttttttatgtatttatttattagatatgtaatgagtgttgtggggtattgaggtaaataagatttggtgttatttttagagtttttattttttggtatggaataaaatttataagtaggttattattatgtaaggtgaaatatgttgtaaaatgtgtgtgtttggggtgttattatttttagagaagggagttatatttttttttggagaatattaggtagtttttataggggaagtgatatttgaggtaggttttaaaggaaaaggaggaggaattttttagatgaaattatagggataagtaagttatttataggtagtatagtgtagtgatgaatagtatggatttaggagttagaatat

SEQ ID NO: 486 - DNA, 2501 bp, Artificial Sequence
  chemically treated genomic DNA (Homo sapiens)
agatttatttaaatttaagaatgagaatataaatttatattttgaagtgttttatagaaaggtttattttaatgtttggagtatatattttaatgaatatttattttattttatttttttttatttttgaattaagtaattttgaatttaaagttgttatgattagtattgaaaagattattggattattaattgtgtgattttgggatagtaattttttgtattttagtttgtttatatgttatatatgaaggttgaagtttgattttgttttgtgattattattttaaatatttgatgaaattaaattttagtgtttggaatggtagtataataaatttattaagaataaataatttattgtaaaaatatattgatttttaaatgatgtaattgatagttatattattgtagagggttgataaataataaaagaaatgaaagatgtatatggtgagaattgaaattattttgataagttttttatttgtttattatttaaaattaatgattatgttgaatgtttataaattataaaatataaaagaaattttataaatgtgtatgtataggagtttaagttattaaaagttttaaagtataagtttaaattaaattaattaaagaagttgagaggaaaaattggtttttatttttaattattattgttttgaggttttatgtttaatataattttttaagtagaggttttagagagaagagttgtgaggatatttttatatttgtgtagaaggaaaagtttgttatttattttagtatttttagtgttatattgatgtgtattttggatttattttgtttttattgtataaatttatatttgattttaaagaaaaggaaaatttaaagttttttttttttaaggggatagaaattttttgtgttaattgtttgatttttttttttgtaaggttttattggaaattttttgtaatataatgtaggggatttttttatgtgttgatgttgtttatatagtggggtgggtttgattgaagaaaaaaaattgtatatatgtatgaaagattatggttttatttttggaaagtatgaaaggtgattgatatttttaagaagtttttgttatttaggaaaattattaaatattttatttagagatatttggaaagattgaaggaaaggaagaatgaagaaagtagaatttagatttatgtggggagagatttgtggtagaggaaaagtattttttttgaatttgataagggatttgtttgggggaattttttgtttagttttttattattagggttttttgaagttgggttttttattgggtagttttttgggagtgtagtggggaatttttatattttttttttaggtttttgaaggattttgtttttttagtgttttttttaggttggtaggagttttgagtttgatatttttttttgatgggataggtaagttttgtgggtgtgtaaatatgttgtaattaagttttttgttgattttatagttttgtgtgtttttgagaagaagtgattgtatttaattgtttattgttggtttgttttttaagagtttgggggttttttttttttaatttagaattagttgtatggggggtggggaaatgggggtggggaaggagtgggagggtagtggtttttgtgagtagagtgatgttattgagtgagtttttgaatggggagtgttgttgtttttaagttgattggtattttttgttaggaagaaatgttaagaggtgggagtgtttggggagggaggtaggtggtttttattgtaggtgtggggagttgtttttttgtttttttgtttgttttttaagtttggatttttaggagtggttgaagttgtggagtgtttttggagtttgtgaatgaatttttttttttttttttttttttttttttgttgagttttttttttggttttgatggtatagtgatataatgatgatgggtgttataatttgtatttgaatttgtaggtgagttgttttgagtttttttggggaagaattttaggtgtgtggatgtaatagttgagaatattaggtgttgtggataggagttgggattaagatttttggttagttttgtatttttttgtattttttagtattgttttgtattttttgtatttttttttgggttattatgttttttatgtgatttgtttgggtaatgttgaatttagttgtgtagtgttgtagtgaattttttttttaaattgtaataagttgttttttaaggtaattatgttttttttgttttttttttaaaaaataaaaataaaaaatttatagaaaaaaatttgtgagtttagaaaaaagaagtaattggtagaaggttttaattaaggtaaagagttgtaaggtgaagttaagaaaatgtaggtatttaaaaaatgtaggtaatttttataagggtttttggggagaggtatatagagggattttggtgttgaaaaagatttagataaaagaaatttag

SEQ ID NO: 487 - DNA, 2501 bp, Artificial Sequence
  chemically treated genomic DNA (Homo sapiens)
ttgggttttttttgtttgaattttttttaatattaaggtttttttgtatgtttttttttaaaagtttttatgaaagttatttgtattttttaagtgtttatatttttttaattttgttttatagttttttgttttaattaaagttttttattaattgttttttttttttaagtttgtgggtttttttttataagttttttgtttttgttttttaaggggggaataaaagaaatgtgattattttggaaggtggtttattgtagtttggggggaaaatttattgtagtgttgtgtgattgggtttggtgttgtttaggtgggttatataggaagtgtggtggtttggggaaggatgtggagggtgtgggatggtgttggaagatgtgggaggatgtggggttggttgaagattttggttttagtttttgtttataatatttaatgtttttggttgttgtgtttgtatgtttggagtttttttttagaaaggtttggggtagtttgtttgtaagtttaaatgtgggttgtgatatttattattattatattattgtattgttagagttgaggaggagatttagtgagaagaaggaggagggagaggaggagggtttatttataggttttaaaagtgttttgtagttttagttatttttaagagtttaggtttggaaagtaggtggaggggtggaaaggtagttttttgtgtttgtggtagggattgtttgtttttttttttaggtatttttattttttggtgtttttttttgataagaagtattaattggtttggggatagtagtgttttttatttagggatttatttagtaatattgttttgtttgtggaaattattgtttttttattttttttttatttttatttttttgttttttgtgtagttagttttgggttaggggaaaggagtttttaggtttttagggggtaggttagtaatagataattgagtatgattatttttttttgggagtatataaaattgtaaaattagtaaagaatttggttatagtgtgtttatgtgtttatagagtttgtttgttttattaaagggaagtgttaggtttaaggtttttgttaatttgaaagagatattgagaaaatgagattttttggggatttagagggaaagtgtaagaattttttattgtatttttagggaattgtttaatggggagtttggttttaaaagattttggtaataaaaggttggataggaaatttttttaggtaaattttttgttggatttaaagagaatattttttttttgttataaatttttttttatataagtttagattttgttttttttgtttttttttttttttagtttttttaagtatttttgagtagaatatttgataatttttttgagtaatagggattttttggaagtattaattattttttatgttttttggaaataagattataattttttatgtgtatatgtgattttttttttttagttaggtttattttattgtgtaaatagtattaatatatggaagagttttttgtattgtgttataaaagatttttaataggattttatagagaaaagggttaaatagttgatataaaggatttttgtttttttagaaaagagggattttggattttttttttttttgaagttaagtatgagtttatataataggaataaaataaatttaaggtgtatattagtataatattagggatattagaatggatggtaaatttttttttttatataaatatgaaagtatttttataatttttttttttgaagtttttatttagaaaattatattaaatataggattttaaaatagtagtgattaaagatgaaagttaatttttttttttaatttttttgattagtttggtttaaatttatgttttaaaatttttagtaatttagatttttgtatatgtgtatttataagattttttttatattttgtaatttgtaggtatttagtatggttattgattttaagtgataaataggtagaagatttgttaggataattttagtttttattatgtgtattttttattttttttgttatttattagttttttgtagtaatataattgttagttatattatttggaaattaatgtgtttttgtagtgaattatttatttttagtaaatttattgtattattattttaaatattgaaatttgattttattagatgtttagaatgatagttatagagtagaattagattttaatttttatgtataatatgtaaataaattaaggtgtagaaagttattgttttaaagttatataattaatagtttagtggtttttttagtgttaattatagtaattttagatttaagattgtttgatttaggaatggagagaaataaaataaaatgaatgtttattgaaatatatattttagatattaagatagatttttttgtgaaatattttaagatgtggatttgtatttttatttttaaatttgagtaaattt

SEQ ID NO: 488 - DNA, 3000 bp, Artificial Sequence
  chemically treated genomic DNA (Homo sapiens)
atatttaaattgtatatttggtttgtaatatattatatatttaaaagaattattatttttttgaatattattaatattaataatagtattatagtgattaagagtggatttaaataaaggttggtttgaaatttaggtttgttatttattagtaagtttttaaaaattttgagtttttagtttttttatatgtgaaatggagaaaataaatttgtaaaattaattaaatttgtttatttatatttttttttttagtgtatattaattggtattttttgttaggttagaatgtgtttttaattatgttttaaatttgttttgtgttaattttattgttagaattttttttattttgagaattagaaaaggaaatattatgtttggtaatgtttatattttttaaaataaatttgtaggaaagaatatttagtaagtgatgagagtagtaatgattgtttttattattttaaatttataatattattttttttagagttttttaagtattgtagataattttttatttattaaaaaataaattgtaattataagtatttagggttgatattgtttttgaattagatagtgtttatattagttgtataagattaatttaaagtagaggatgaaattttttttttgaattttttttagaatgtaatttagtgaatatattaaaattaaattttttttgaatgggagtaatttttatggattaatttgtaattttttagattatatttaaggtaatgtagaggttgttgtattataggttttgtgattagagattattggatttgtttttggaaaagttatttatgattttttgggttttggtttttttattttttatattggtttaataatgattattgtagagttgttatggaagttaaatgaatttatgtattataagtgattaatataatgattgatatttagtgatttattaataaattaaaatatttattattaatatgatagagaaggtgttgttaaaatagataataggtttttggaagaggtgattaaatggatgtaaaatttatggattgtttattttgtttatttttgttgtgttttttggttgtggtatatatatgtgtgggtataaaattgtaaattttatgtagttgtgtagtgtatgtgtagaaggtttagatatgaaatgttattttagtaatgtgtttagagaagttttgatgttgttttggaagtaagttgttgttgtttgatttttgggtgtttgggatggatgtttatatttgtatttagtagtattggaaggggtttaggttttttgtagtatagtttatttttagattgtttagttttttataatatatatttttatggaaaagggtatttttttttgttagaaaaagtgttttagtttggtttgggttggtttttattttatgttgttgtaagtaggtgaagttttttttgtttttttttttggggtaagtggaaaggagtttggtagggggtttgtagtggtttgtataggggaattgggtagtgagagagttttaggtaattttgggggttgttttatagaagtaggtggggattgatagtggttttttggtttagggaggagagtgtggttgtgggtttttttttttagtttggaggttgtagttgtttgagttggtttgggtgggggtggggtgggggtggtgtggagggtatggagattatggtggtgttatttgggatatttagggttttgaggttttgggtggtttttatgtgagattgtaaattatgataataggtagttatttgaggttaaataaaaatggagtgggttttttgtgtgttgttgttttttgtgtttttggtggttttttttgaggtttttggtggttttatgagtttgtagtagttggtggtgatgttgtttttgttttatttttttgtgtaagtgtgaggttgttggtagtgtggtgtatgttttggttgtttttggtttttgtgtaaaatttttattttgtttatgtgaagttgttgttgttttagagagggggaaagagttgtgggaaaagttggggagtgatgattgtggtggttgggtgtgtttttttattttttttttttttttttttttttttgttgtagtttggagttttggtttttttttttttttttttttttttggagttggtttttttttttgttttgttttttttttgtttgtgtatgttatttgttgtggggtggttgaaggggatgttttgtttttattagaggtatagtgtgaaggggaaattttgatattggaaggaatgagaataaatatttaattatggatgtattgaattgtggttgggatagatattttgggaatttgaggtggattgggtgatgaggtgagtgatttttttttttaatttttgttttagggtttttgggggagtttgagttgagagaatttttaaattttttgggaaagtgtgtgaggttttgttggggatgttgagtgttgggtattgaggatgtgtagttggatggtgtgtgggtgtttgtgtttttggggggtgtttggaggttgggtgttttatgtttgagggtttgggttgtttggattgtagtggtgttttttgttttagaagatgtttttaagttttaagggttttttttgagtttgtttgttttttttggggttggtgtggagtttgtgtgtaatggagtttatttagtagtttagtgtgtggtttttatttgtattttgtttttatttggtagaggtgtgagtattggggttttttttatattttttttatgatgtgtattattttttgatgattttttagatggtttaggtgtgaggatgttgatttagagttttttggagggttataggtgtttgggtttttttggtgttgggtgtgtgtgtattttaaaggtttgtgttttaatttttaggtattgattgggttttttaattgtggtgattttattttaatagtttttatgtggtgtggattgaatgtt

SEQ ID NO: 489 - DNA, 3000 bp, Artificial Sequence
  chemically treated genomic DNA (Homo sapiens)
gatatttagtttatgttatataaaaattattaaagtgggattgttgtagttgaaaagtttgattagtgtttggagattagaatgtgagtttttaaagtatatatgtatttggtattgggaaagtttaggtgtttgtgattttttgaaggattttgggttagtatttttgtgtttggattatttagggggttattagaaagtaatatatgttataagaaagatgtgggggagattttgatgtttgtgtttttgttaggtggaggtggggtgtaggtagaagttgtgtgttggattgttggatgaattttgttatgtgtaggttttgtgttgattttggaagggataggtaggtttggaagggatttttggggtttggggatgttttttagggtagagagtattgttgtggtttgagtggtttgggtttttaggtgtggggtatttggtttttaagtgttttttggggatgtaggtgtttatgtattgtttagttgtgtgtttttagtatttagtgtttggtgtttttggtggagttttgtgtatttttttggaaagtttgggggtttttttaatttaggtttttttgggagttttggggtgggggttggaagaaggggttatttattttgttgtttggtttgttttgggtttttgaagtgtttgttttagttgtggtttagtgtgtttgtaattaagtatttatttttgttttttttagtgttgaagttttttttttgtgttgtgtttttggtgaaaataggatattttttttggttattttataataaatagtgtatataagtgggggagaagtggggtggagggagaagttggttttgagggggaggaggaaaggagaggagttaaaattttggattgtgataggggggaaaggagaagaaaagaaaatgagagagtgtgtttagttgttgtagttgttattttttggttttttttgtagttttttttttttttttaaggtagtgataattttatgtggataggatggaagttttgtgtggaagttgggaatggttggagtgtgtgttgtgttgttggtagttttgtatttgtgtagggaggtggggtgggggtgatgttgttattggttattgtgggtttgtgaggttgttgggggttttgggggaggttgttagggatgtggggggtggtggtgtgtgggggatttattttgtttttatttgattttgggtgattgtttattgttatggtttgtgattttgtgtggggattgtttagggttttggggttttggatgttttgggtggtgttgttgtaatttttgtgttttttgtgttgtttttattttgtttttatttgggttgatttgagtggttgtagtttttaggttgaggggagggatttgtgattgtgtttttttttttgggttggagagttattgttgatttttatttgtttttgtggggtagtttttggaattgtttggaatttttttgttatttagtttttttgtgtaggttattgtgggttttttgttggatttttttttatttattttaagggaggagatagaagggattttgtttatttgtaataatgtgaaataaaaattaatttagattagattggggtgttttttttgatgggaggaaatatttttttttgtggagatatatgttatgaaggattaagtggtttggggataggttgtgttgtgaagggtttgggttttttttagtgttgttgggtgtaggtataggtatttgttttagatgtttaaaggttaggtagtaatgatttatttttaaggtggtgttagagtttttttaggtatattgttgaaatgatattttgtgtttaagttttttgtgtatgtattatgtgattatataggatttatgattttatatttatatgtgtgtatgttataattaggggatatagtaaaggtagatggaataaataatttataaattttgtatttatttaattattttttttaaaaatttattgtttattttagtggtattttttttgttatattgataataaatgttttaatttattgataaattattgagtgttaattattgtattggttatttatggtatatgagtttatttaatttttatgataattttatggtggttattattaagttggtataaaagatgaggaaattaaagtttaaagaattatgagtgatttttttaaagataaatttagtggtttttaattataaagtttatgatataataatttttatattattttaggtgtggtttaagagattatagattaatttgtagaaattatttttatttaaagaaagtttagttttaatatatttattaagttatgttttgaaaaaggtttagaaaaaagattttattttttattttaggttggttttatgtaattgatatgagtattgtttaatttaaaagtagtattaattttgaatatttatggttataatttattttttaatgagtggggaattatttataatgtttaagaggttttagaaaaggtggtgttgtaaatttaaaatgataaaggtagttgttgttgtttttattatttattgggtgtttttttttgtagatttattttggagggtgtaggtattgttaggtataatgtttttttttttggtttttaaggtagaaagggttttggtagtggggttggtataaagtggatttggagtatggttgagagtatattttggtttaatgaggaatgttagttaatatatattggagagaaaaatatgaatggatagatttaattaattttgtagatttattttttttattttatatgtgagaaaattaagggtttagaatttttagaagtttgttaataaatggtagatttgagttttaagttagtttttatttaagtttatttttagttattgtgatgttattattagtattaatggtatttagaaaaatagtaatttttttaaatatgtaatatattataagttaaatatgtaatttaaatgt

SEQ ID NO: 490 - DNA, 2501 bp, Artificial Sequence
  chemically treated genomic DNA (Homo sapiens)
gttatttttatgtgttttgtagttttttgaaggggtgtgggatttattgatgttaattatttagtattatttttagattttaagaagttggggtgtgagttagtaattagtatagaaaagagatattaaaataagtttgagttggggagtgtttttttaattttagttttttggaagagattttttttttttttttgagatagagttttgtttttattgtttaagttggagtgtagtggtatgattttggtttattgtaattttttttttttgggtttaagtgattttttttttttagttttttgagtagttgggattatagatatgtatttgtaatttttattaaaaatataaaaattagttgggtgtggtggtgtatgtttgtaattttagttattggggaggttgaggtaggagaattgtttgaaattaggaggtggagattgtattaagatagtttgttttagttaaataatttggtgttagtgtaggaaaaggtggaaggtatggggttagtataggagggtttaatatttttaattttattaagttatattttggtaatttttgttttttatgagaagtttttgttgggtttgttttagtgttgttttgaggttttttttatgagttttgatagggtagaggttgttttgagtgttttttttttttttggtttaagagtggtttaaaagaaggatttttgattggaattggttattttgtgttattttttgatttttgattttgttttaaagggggatgtgggggaggggttttggtaggggtggttttgttttttttaggtttgtaagtttaggtttttgtttattgggtttagtttattttgtggttgtttagggaggttgttggtatttgtgatttatgattttttttttgagttttattgaggttatagttgtggttttgtttttttatgtttgttttttgttttttgtttgtgatgggtgtttttgaggattaatgagtgtgttgtatttattttttgggtggggttaagtgttgattaattgttgtttgggtgtttggttgggtttaaatgttttaattgttagtggtggtggggtgggtagagggttggggatggtaggtttaattaatgggtgggtatgttgtttttgtgaggaggtgtgttttgtggttgggtgtgtggtgtttgtggtggtgtagggagggggagggaggtaaataagatggtggtggtgtgttgggtgtggaagggggaggtggtttggggtgtttgtgagtgaggtgtggggtggtgaagggagtgtgggtggtggtatttgttgttgtggttttggatgggttgggttttttttgttgttttgttttttttatatgtgtggtggttgtggtgagggggatgtgttgtttggggtttggtatttttgggaattttttggtttggagtttgtggtttgtgttgttttggttgttgggagttttgtggagtttttgttgttgtgttgttttgtggattggatgttgagggtatttggggtggggtgtgtgtttgggtagatgtttgtggggaggggggtgtttgttgggttttggtgattattttgggggttgtgggttggtttggggggtgtttagtgtgggtttttgtgggtgttgggtagtgattagttttgagtggagttgttggttgtggtgggaggttttttggatgtttttagttttttgaatgtttgtttgggttggtgggagttggtgttttttgggaggtttgtttggttgtttgtggtggagtgtttgtttttgggataggtggtgggattggggtgttgttggagatgtttttagtgaagttgggttttttaggtgtgggggttttggggggtagtgatgttgtggatttggtttgtgggatgggtggtttggagaagattgtgtttggttgtgtttatatttgtttgtgggtttgaggtttttggaggatgatttagtattgaaaagttttggttggtttttttagggtttttgaggatgaagttgattttgattgggttgttttttagttttgaggtttgggttttattggaatttgtgtttgagttgttgttttggatttttggtgtttgttggtttgtagattttgtattgggtttggatttgtagttgggattgatgtgtagaataattgtttttgttggaagaagggttttttttttttttttggggtttttgttgtttttttttttttttttttttttgtaaaattttggagaagggaagttggaatataaggaaggattgtttatttgtggatttagggttggtggtgggattttaggattttgggtttagtatggaggtggtggatttgtagtagttgggtatgtttatggagggtgagttgatgttggtgggtatggatatgtttatttattgtattgattttattgaggttatttattagttgtgttgtaagtgggttaagtttattggtaagtatttgatgggggatttgt

SEQ ID NO: 491 - DNA, 2501 bp, Artificial Sequence
  chemically treated genomic DNA (Homo sapiens)
gtaggttttttattaggtatttgttgatgagtttggtttgtttgtggtgtggttggtagatgattttggtggagttgatgtggtggatgaatgtgtttatatttattgatattagtttgttttttgtgaatatgtttagttgttgtgggtttattatttttatgttggatttagggttttggagttttgttgttagttttgagtttgtgggtgagtggtttttttttgtgttttgattttttttttttaaaattttataaagaaaaaagaaaaaaaaaaggtaataaaaattttaaaaggaagggaaaaattttttttttaatagaaatgattgttttatatgttagttttggttgtgagtttaagtttggtgtagggtttgtggattggtgggtattgggggtttgggatggtggtttagatgtgagttttagtgggatttgggttttagaattgggagatggtttggttagggttaattttgtttttggggattttggggaggttggttggggttttttagtgttaggttattttttggggattttaggtttatggataagtatgaatatggttgagtgtagttttttttgggttgtttattttataggttgggtttgtgatgttgttattttttgggatttttatatttggagagtttaattttgttgggggtgtttttggtgatgttttggttttattgtttgttttaggagtaaatgttttgttgtggatgattgagtggattttttggggggtgttgatttttgttggtttgggtgagtgtttggggggttgggggtgtttgggaggttttttgttgtggttaatagttttgtttagggttggttgttgtttggtgtttgtgagggtttgtattgggtgttttttgagttggtttgtgatttttaaggtggttgttggggtttggtaggtgtttttttttttgtaaatgtttgtttgagtgtgtgttttgttttgagtgtttttagtgtttggtttgtggggtggtgtggtggtgggggttttatggggtttttggtggttgaggtggtgtaggttgtaggttttgggttggggggtttttgaaggtgttgggttttgggtggtgtgttttttttgttgtggttgttgtgtgtgtggaggaggtggagtggtgaggggggtttagtttatttaaggttgtggtagtaagtgttgttatttgtgttttttttgttgttttgtgttttatttgtgggtgttttgggttgttttttttttttgtgtttgatatgttgttgttattttgtttatttttttttttttttttgtgttgttgtggatattgtatgtttggttgtagggtatgtttttttgtgaggatgatgtgtttatttgttggttgaatttgttatttttggttttttgtttgttttgttgttgttgatgattggagtgtttggatttggttgggtgtttgagtggtgattggttggtgtttggttttgtttgaggggtggatatagtgtgtttattggtttttggagatgtttgttatgggtagggggtgggaagtaggtatggggagatgaggttatggttgtgattttggtggggtttgggaagggggttgtaggttatgggtgttaatggtttttttgaatggttgtagggtgggttgagtttggtgggtgggaatttgggtttgtggatttggaaggagtggggttatttttattagagttttttttttgtatttttttttggggtgaggttaagggttaaaaagtaatataaagtggttaattttagttaaaaattttttttttgagttatttttggattaggggaaagagaaatgtttagggtggtttttgttttattggaatttatgggggaagttttaggatagtgttgggataagtttagtgggggttttttgtgaaaaataagagttgttaaaatatggtttgataaggttgaaaatattgaatttttttgtgttagttttgtgttttttatttttttttgtattagtgttaggttgtttagttggaataaattattttggtataatttttgttttttggttttaagtgatttttttgttttagtttttttagtagttgagattataggtgtgtgttattatgtttggttaatttttgtatttttagtagaaattataggtgtatgtttgtaattttagttatttagaaggttgagggaggagaattgtttgaatttgggaggaggaggttgtggtgagttgagattgtgttattgtattttagtttgggtaataagagtgaaattttgttttaaaaaaaaaaaaaagattttttttagaaaattgaagttgaaggaatattttttaatttaaatttattttggtattttttttttgtattgattgttggtttatattttaattttttggaatttggagataatgttggataattggtattggtaggttttatgtttttttagagaattgtaggatatatggaagtgat

SEQ ID NO: 492 - DNA, 2501 bp, Artificial Sequence
  chemically treated genomic DNA (Homo sapiens)
ggaggatagaaatataaattaaagaatgatataaataattataaagttatagttgttaaaagaaaagtatatggtgttaagagaatgtgtaatataagatttatttatggaggtgagggaaagtttgtttattaaagaagttatgatttaatttatgaagattaggagttggttgggtgaagaaaaaaaggttagaggaaggaagtttatattggggaaggttttaagtataaagggtaggaggattatagaggtatatttatgaaatttggagaaggtttttagtaagtaaggagaagttaaatgaaagtttatgggagagttggaggtttgaagatatgtttaaggatttggtttttattttttttttattttaagagtagtgggaagttattaaatgattttaattagagggttggtataattagttttgtattttgaaaagttgaatttagtttttgtttgagaaattgagtgaaagagtttagaatggttgtggttgagggtgatttgtgggagatttttatataagttatggtagtggtatgggttggtggtagaagagggaatagggagaagatttggaatttaatttttttttattgataaagttattttagttttggtaaggtaattaattggtgggaaagaagatgtttagtttttttgattttattgtattttttgtatttttaatatgagtattgggaagtggtaaaatatttagaggtagtttgggtgttaggtggagtatgagttaaaattttaggatgaagtaaatgaatatttagaatgataggaaagatttgggagttgggtttgggggagggttatttatttttattttttggagattttggtataaatttttgtttttgtaattttttttttaggtaaaggaatttattaaatgaattgttagaagatttattgattagagggttgtatagaattatatttttgagagtgggaagtaggttgattatatagtttattatttaattaggatatatttgaaagagaaagggggttttattaatatttaaattataaaatatgtatattaggaatgttttgggtaaatttggttgttttagtaagaaaggaaatttgaaagtttatattgttttgtttttatgttattttgtttgtatatgagagggtaagtattttttttttttatttgtattaagggaataaaagtataagtatttaggtgatttttaatttatttttaattttatagtttttgttatattttatatattttgaaaattatattttttattattattattttgtgataggtgattatttataattatttattgatttagttttgggaagaggtggtgtaaaatgggatgttttatttaggtgtttattagaaatgtagaatttttgtttgttttttagatttattgaattagaatttgtatttttaaataagatttttaggtgattaatatgtatattaaaatttgagaaaaatttttagattttgatttaaagaaaaatattttataatttgatagtgtatgtatatatatatatgtatatagatataattgaagtataaatttaatgaagtagaatttattgttattattttatttgggaaagaaatgtgtttgtgatttaatagattggagtatttatttttggattttaatttgtaatttgaaaatgtatttttaaagtatttaggagtaatttgaagaaagttgaggggaggtggtagatgttttgatttattagggaaaatgtggatgttttttgttgttattttgtgaattgtgtgtatttagttatttttgagtaaatatttggagtgaggaatttttgagtggtgtgggagggtggtgaggggtagttgaaagttggttaaagtttttggaggggttggtttaggaaatatgattggtagttatgagagagttaggggttggatgttgaggagagggagaaggtttttgggtggagagaggttttgtttagttgttggtgaggagttttttgttttttttgtagtgttgagttgaagttgagtgagttatttgtgtgtatggagtgatgatatttttgtgtgtgtatttgtttgggataggagttggatttttgtgtagttttttttggttgttgggggtttttttgtgttttgttggtttttaggtttttttttggttggtgagtgggtgttatatttggtttgtatatttgtgttgttggtttggtgtggggtttggagagggtgtggtgtggaggtgtagttaggggtttgggaaggtgttgtttgttgtgttgggggtttggtttatgatgagtagtggggtttgttatgggttgggggttgtttaggggtttgtggttgttgtatattgttttgtggatgtgtattgttagtatgattttattgtatgtttagaagttgggtgagtggtttttagtttgggtttggtggggtgttgggggtttttttggggtttttgtttttttgttgt

SEQ ID NO: 493 - DNA, 2501 bp, Artificial Sequence
  chemically treated genomic DNA (Homo sapiens)
gtagtggagaggtggggattttaggaagatttttggtgttttgttgagtttgggttggggattatttatttgatttttgaatgtgtggtgggattgtgttggtgatatgtgtttataggatgatgtgtagtggttataggtttttgagtagtttttgatttatggtagattttgttgtttgttatagattgagtttttagtgtagtggatggtgtttttttggatttttggttgtgtttttgtgttgtgttttttttggattttgtgttgggttggtagtgtagatgtgtgggttagatgtggtgtttgtttgttagttaggagggggtttggaggttggtgaggtgtggggaggtttttggtggttgagggaagttgtataggagtttggtttttgttttgagtgggtgtatgtgtgggggtgttgttgttttgtgtgtgtgagtgatttatttaattttaatttagtgttgtgggggaaataggaaattttttgttaatagttgggtaggatttttttttgtttgagagttttttttttttttttgatgtttagtttttagtttttttgtagttgttaattatgttttttagattagtttttttgagagttttggttgatttttagttgttttttattgtttttttatattatttaggagttttttgttttaagtatttatttaagaatgattaagtgtatatagtttataaagtaataatagaaaatgtttatgttttttttagtagattagaatatttgttgtttttttttagttttttttagattgtttttaggtgttttagagatgtgtttttaaattgtaagttgagatttaggagtgaatattttaatttattgagttgtgagtatattttttttttaaataaaatagtaatggtaaattttattttattaaatttgtgttttagttgtgtttatatgtatgtatgtatgtgtatatattgttaagttgtaaaatgtttttttttaggttgaagtttagaggttttttttaagttttaatgtatatattgattatttggaaattttatttaaaaatgtagattttaatttagtaggtttaggaggtaggtagagattttgtatttttaatgagtatttggatagagtgttttattttgtattgtttttttttgggattgagttagtgagtaattgtaaatgattatttattatgaagtgatagtggtgggaaatgtaatttttagaatgtatagagtatagtagaaattgtaaaattaaaagtgggttgggagttatttgaatgtttgtgtttttatttttttaatgtaggtgaagaaagagaatatttatttttttatgtgtaaatggggtaatatgggagtagaatagtataaatttttaaatttttttttttgttagggtaattagatttgtttaagatatttttggtgtatatgttttgtagtttaaatattaatagaatttttttttttttttagatatgttttgattggataataaattatgtgattaatttattttttatttttaaagatatgattttgtatagttttttggttagtagattttttagtaatttatttaatgaatttttttatttgagaggaagattgtagaggtaagggtttgtgttagggtttttagggaataaaggtaaatagtttttttttaaatttaatttttaaattttttttgttattttaagtgtttatttgttttattttggaattttaatttatgttttatttagtatttaagttgtttttggatgttttgttattttttagtatttatgttgaagatgtagaaagtgtagtgaaattaggagggttaggtatttttttttttattaattaattgttttgttaaagttggagtgattttgttaatggaggaagattgagttttaaattttttttttatttttttttttgttattagtttatgttattgttatggtttgtgtaggagttttttatgagttatttttagttatggttgttttgggtttttttatttagttttttaaatgagagttgaatttagttttttaaaatataaaattagttatattaattttttgattaaaattatttaatggttttttattgtttttgagataaagagaagataaaaattagatttttgaatgtgtttttaagtttttaatttttttgtaaatttttatttggtttttttttgtttattgaaagttttttttaaattttgtgaatatgtttttgtaatttttttattttttatgtttagagttttttttagtgtggattttttttttttgatttttttttttttatttagttaatttttggtttttgtggattgaattataatttttttgatgggtaagtttttttttatttttatgagtagattttgtattatatgtttttttggtattatatgttttttttttaatagttgtaattttataattatttgtgttattttttaatttatatttttatttttt

SEQ ID NO: 494 - DNA, 1508 bp, Artificial Sequence
  chemically treated genomic DNA (Homo sapiens)
attttataattataaatatttagtgtattttgtaaatatggtataatttgttggtataaaattttattgttttagaaaatattggtaataaaattatagaaaagttaaagatttttattttttattttgaagtgtttgggagatattttagaaatggatgggaaatgttaaattttgtatgtttgtttatttttttttttatattgattagatgtaaatgagtgttattaaaagtatattataggtatttatatagattttttttataagggatttataaagtttagatgtgaaatgtattttaaagggtttttagttgttttttatttttttttttgtgaaatagggaagatatatgtgtttttaagggtagagatggaatttgggttaatgggttggggggtggggggaagttggaagggattgttttaggatatggtaggatagtggattgtttttgttgttttgttgtttatattggggttttttgtaggtgtgttggttttttttttttttgttgagaagaagttttgttaaaatatttgttttttttgggaatttttttgtgggtttaaagtgggaaaatgttgttttaggtttaaaataatttgtttaagttttttagtgtgggagaaatgtttttatttgttttttgtttttgggggtgttttttgttttttgttgttagaattttggggagtgtttagatttggggtagtatatgtttgggttaattgtgagtagaataaatttttggtgggtggttaggaagtttttttttagttattgtttttttttagtgtttttttttttttttatataatataagattttttttttttagtttttttaaagtatagtttaaggaaatttttttatagtttttatttagttatgggttagtatgtttgggggtaaatatgtagatttggaggtaggtatttgtgggggggtgttggtttgggtgtgtggggaagtgtttgtttttgttatttgtttttttaaatattttgattgttgatttggttttttagttttttttttattttggagtatttttttggtgttggtattgttgaagaatgggtttgggtggggaggtgaagagaagttaggaatgttttatgtttttttaatggagagggggttttgggagtttttgagttaggaggatatggaaaaggggattggggttttgagattgggtttgttgggtttaagatgtgttttttggatgggtttaggatgtttttttgttgtgggaattttgtggtttggttttgtttgttgggggtttgaaaaagtggattgtagggtggaaggtgttatttatttgagttttggggatagtttttgggattttttgttaagtgtttaaaatggtaggtttttaagtggtgtgtggtgtttttgtattttttaaaatttttgaaatattttaaaaatttttttgtattttggtgtttggtagggttttttaaaaaaagtaaattttttttttaaatgta

SEQ ID NO: 495 - DNA, 1508 bp, Artificial Sequence
  chemically treated genomic DNA (Homo sapiens)
tgtatttgggagggaggtttattttttttggaaaattttgttagatgttaagatgtagaaggatttttgagatgttttaagaattttggaaagtgtaaaaatattgtgtgttgtttggggatttgttgttttgggtgtttggtggagagttttggggattgtttttaggatttgggtaaataatattttttattttgtaatttatttttttgaatttttagtaggtagggttggattgtggggtttttgtgataggggagtattttagatttatttagaaaatgtgttttgggtttaatagatttaattttaggattttaatttttttttttgtgtttttttagtttaggggtttttgaggttttttttttattaggaaaatataaaatatttttggtttttttttatttttttgtttaggtttattttttagtggtgttaatgttagaggagtgttttgaagtggaaagagggttggggggttagattagtagttgggatatttggagaggtagatagtagaagtggatatttttttgtatgtttgagttggtgtttttttatggatgtttatttttgagtttatgtatttgtttttagatatgttggtttgtggttggatgaaaattgtgaggaggtttttttgggttgtgttttaagggaattgaggaaggaagattttgtattgtatggggggaaaaaaaggtattggaggggggtggtggttgggagggagttttttggttgtttattaaaggtttgttttgtttgtggttggtttggatgtgtgttgttttgggtttaggtattttttaaggttttggtagtagagggtggggagtatttttgggggtagagagtgagtaagaatgttttttttgtgttggggggtttggatagattattttaaatttgaggtaatatttttttgttttgaatttatgggggggtttttgggggaggtggatgttttggtagggtttttttttagtagggggggagggagttgatgtgtttgtagagagttttggtatgggtaataaggtggtagaaataatttattattttgttatgttttaaggtagttttttttaatttttttttattttttggtttattggtttaagttttatttttgtttttgaaaatatatgtgttttttttgttttatagagggagggatgagagatggttaggaattttttagggtatattttatatttaaattttgtggattttttatggaaggaatttgtgtgggtgtttgtggtgtatttttggtgatatttgtttatatttagttggtgtggaaagaaaaataagtaggtatgtagaatttaatattttttatttgtttttgaaatgttttttaaatgttttgaaataagaaatgaagatttttaatttttttataattttattattgatattttttggaataatggaattttatgttaataggttatgttatatttgtaaaatatattaaatgtttataattgtagaat

SEQ ID NO: 496 - DNA, 286 bp, Artificial Sequence
  chemically treated genomic DNA (Homo sapiens)
tttgtattaggttggaagtggttgttagttttttgtgtaattttattttttggaaaagtggaattagttggtattgtttagtgtgatttgtgaggttgagttttaatagtttaaagaagtaaatgggatgttatttttgtggggtttgttttttgtgaggtgtttattttgtatttgttatgtaaaatgagggagtgttaggaaggaatttgttttgtaaagttattggttttggttattagtttttatttaatgtttttgtgatgttgttgttgatttatttggg

SEQ ID NO: 497 - DNA, 286 bp, Artificial Sequence
  chemically treated genomic DNA (Homo sapiens)
tttaaatagattagtagtagtattatgaaagtattgggtagaggttgatgattaggattaatggttttataagatggatttttttttaatgtttttttgttttgtatggtagatatggggtgagtattttgtgaggagtgagttttgtggaggtggtattttatttgtttttttggattgttggggtttagttttataaattatgttgggtaatgttagttgattttatttttttagagaatggaattgtatgggggattggtggttatttttagtttagtgtaaa

SEQ ID NO: 498 - DNA, 2501 bp, Artificial Sequence
  chemically treated genomic DNA (Homo sapiens)
tttatatatattatgttttttaaatgatatattagttttttgagggtaatttatattggtaatagtttttagatgtggaaattgtgaagataatgttggtgatgtggaagtaatataaattttggagttttttagatttaggtttgaatgttagattgttttttatttagagtaattttagagtattattttttattttaatttttttttaggtttttttgtgtttatgtgttttttttatttttgtttattgtttatttagtgatttttgtatttttttttattgttagtgtgtagatatatagtttttttggttttgagatttatgttaattttattttattattttgttagtttatttaatttttattgagtaatgttagttgaaagttgtggtgggattaaatgttgtaatgagtatttaaatgaggttgaagtatttatgtattttatttatatatggtgaggtatatttaaggaaggttgtagttattaaaattttaggaaataattttttatttttttaggtgaaagggtttttaggtttttgtgttttggaaggtttatttatagttattttttaaatgataatgtgattgatgagtttagagtttagtttaaatagtaatggattggaagattagtttaggttttattaatgtggaatatagaataaattatgtttttgttttagtttgtttatttgtgaaatagagtttattatatttagttttttttgtttttaggtttgagttattttttttggttaaggtaagtaaatgtttatgatgtttggttgtgtataagataaagttataataaagttataatttattttttttttgtagaagattgtaaaaagtaaaagagatttaggtaaaaattttggaatgatttttggaatagagagtttttttagaattagaagttaaaggaatttaaaatatagggaggtttagggtttttattgatataaaggaaagatgttttttttataggtttatgtttatattttttttttttttttatttttatttgtatttttatttttatatagggtttatgggattttttttataaaagagtagttgtagtaatttatattattttttatgtttggttgtttattaagaggtgaaaagtagttttatataggttttatttttggatagttttagttgtaaagtttaaaatatgtgaaggtaatttggaaaagtaagtggttgtatataaagtaaatgtttatagagttttggataaaattgagtgtttatgtgtatatggtaagtgtttttagtgtttgtgtgtttatttgtttgtttgggtgattttgtttttgagagtttggatgagaaatgtatggttaaaggtaattttagataggaagaaaggtagagaagagggtagaaatgatttttgatttttggggttgagggtttttagagtaaatggtataatgttatgaggtttgatttatttttatgatggaatttaaggttttagtaagtatttgttggtttggttatggtttgttttttagtttgtaggagatttttttatttttttatttgtgtgtttttattagttttgaaaagaatttttggtagttaggagtaggtatttttattgtttttttttttttttttttgtttttattttgttggttttttagattgggttttggaattaaatttggtgagtgttggtttttaggaaatttggagttttggtgtttaaattttggtttaggaaagtaggagttatttaggaagtaggggttttttagggttagagttagttttttttgtttttgtttatgttgtgttagtatttgtttttttaaagttattaggtaggtgttagtgtgtggtgaggggaggggagaaaaggaaaggggaggggagggaaaaggaggtgggaaggtaaggaggttggtttggtgggggtgggatttgatttgtaaattgttgtatttgttttttattttttagtgttttttttgagattttggggagttagtttgttgggagagtgggatggtttggagtaagtttagaggtagaggaggtgatagagggaaaaagggttgagttagttgttttagtgttgtataggagttgaagggatgtattatgttagttttagtttggttttagtgatagttaatgttttttgtagtgtggtggttttgaagttgttgtttggagttgtttttttttttttggtgaagtttttaaaagttgttaaagatttggaggaagtaaggaaagtgtttggtaggattgatggttgtttttgttttttttttttttattttgtttttttttattttgtttttttttttttttttgtttttttttttgtagttgttttagttggttatttttagttaattttttttattatttttttttttatttgtttttttgtttttgttggtttagtgttgttagtttgagtttgtagagaggtaattttttttggttgtgagtgggtgagtt

SEQ ID NO: 499 - DNA, 2501 bp, Artificial Sequence
  chemically treated genomic DNA (Homo sapiens)
agtttgtttgtttgtagttaaagggagttatttttttgtaaatttgggttggtagtgttgggttgatgggggtgggggggtgggtggggagaagggtggtgaggggggttggttgagagtagttgattgaggtagttgtgggagagaagatgggggagggggggaaggtagggtggggggaggtggggtggagaggaggaggataaaggtagttgttagttttattaggtattttttttgttttttttgagtttttagtagtttttaaaaattttattgaagaggaaagggtagttttgggtggtggttttgaagttgttgtgttgtaagaggtgttggttgttgttggagttgggttggggttggtgtggtgtgtttttttggtttttgtatagtattggagtggttagtttggttttttttttttttgttgttttttttgtttttgggtttgttttggattgttttgtttttttagtaagttggttttttgggattttggagggggtgttgggaggtggagagtaaatgtaatagtttgtgagttgggttttgtttttattgggttggtttttttgtttttttattttttttttttttttttttttttttttttttttttttttttttattgtgtgttaatgtttgtttagtggttttggagaaataagtgttggtgtagtgtgggtgagggtaggagaggttagttttagttttggaggatttttgttttttgaatagtttttgtttttttaaattaaggtttaggtgttagggttttagattttttggaggttagtatttattaaatttggttttaaagtttaatttaaaaaattaatagggtggaggtgagggagggaggaaaaggatgataggaatatttgtttttggttgttaggggttttttttaggattgataagagtgtgtagatgggagagtgggagagttttttataaattgaggagtaagttatgattaagttagtagatatttgttgaaattttagattttgttatagggatagattgggttttgtggtattgtgttatttgttttaggaatttttagttttaagaattagaggttatttttatttttttttttgtttttttttttgtttggaattgtttttaattatgtattttttatttagatttttaaaggtaaaattatttagataagtaggtaaatatataaatattaaaaatatttgttatgtatatataggtgtttaattttgtttagagttttgtaaatgtttgttttgtatgtagttgtttgtttttttaagttgtttttgtatattttaaattttataattggaattatttaaggatagaatttatatagggttgttttttgttttttgatggatagttaggtgtagaggatgatgtgggttattgtaattgtttttttgtggaggaggttttataagttttgtgtaaaggtggagatgtaagtgggaatggaaagagagagaaaatgtaaatgtaaatttataaggaaaatattttttttttatgttagtagagattttgggtttttttatgttttaaatttttttgatttttgattttggggaggttttttgttttaaaagttattttgagatttttgtttgggttttttttgttttttgtagttttttatagagaaaagatgggttgtagttttgttgtagttttattttgtgtatagttaaatattataggtatttatttattttgattaaagaaggtaatttaaatttaaaggtaaggaagattggatatgataggttttattttatagatgaataggttgaaataaggatataatttgttttatgttttatattagtaaaatttaaattagttttttagtttattgttatttgagttagattttagatttattaattgtattgttatttgggaaatggttataaatgaattttttagaatataaaggtttgaagatttttttatttgaggaggtgaaaaattattttttgagattttaatggttatagttttttttgaatatattttattatatgtaagtagaatgtgtagatattttaattttatttgaatatttattgtaatatttaattttattataatttttaattagtattgtttaataggaattgagtgggttggtaggatggtagaatggaattaatataggttttagagttaggagaattatgtgtttatatattaatagtgaaggaaggtgtaaaaattattgaatgaataatggataggagtgaagaggatatatagatataaagaggtttgaaaaaaaattaaggtgagaaataatgttttgaagttattttgaataaaaagtagtttgatatttaaatttgggtttgaaagattttaaagtttatgttgtttttatattattaatattgtttttatagtttttatatttgaaaattgttgttaatataagttatttttagaaggttagtgtgttatttaaaagatataatgtgtataga

SEQ ID NO: 500 - DNA, 2448 bp, Artificial Sequence
  chemically treated genomic DNA (Homo sapiens)
ttgttttgtttttatgataaaagttaatgggtttttagtatttttattaaaaaatagttatgtagatagtgttttggtggttttgttttgtattttaattttggggtgggggaaaggggttaatgtttttgtagttttaaattgggttattatttgtttattgagttgaatatgatgtggttttgtttggtgtgtttttgttggttttgtgtttgtgttattttagtagggtttgtagtaggtgaaaggtgaggttaatggatagagaagggttgttttgttgtggttgtttgtttgttgttttgagttttaattggttgggttttgtgtgggtgagaagtgtttgttagtagtaagaggagtgtgtgggttttgtattttggttttgtgttttggggttttagtgtagatttgggttttggatttggttgttttggggtttttttggttgtttttagggtatagttgtattaggagtagtagtgtggttagtagtgttgtgttttgtttgttttatggtgttgttggttttggatatataggggtagtgtagggtgaggtgtgtttgggatagttgtaggtgttgtttttttttttgtgtttgtttggtgatttttttggttgttgtttaatgtttgtagtttgttttttagttttagttattgtgttagtgttgttttattttttttatttagtttttttttttggaggagtgtggtggttgagttgagtggagttttggtgtagggggaggttgggtggatgttttgagttatttataggttgttggtgagtgtttgtatggtttaagattgagttttagtttttgttttttggggtaggttgaagatgttttggggaatatagggtttgttttggtgtgttgttagttttatatagtgttaggatagttttgattgatgttagtgaagaatatgtattgattgtagaagtaatgatagttatagttttgagtttgatggttggtgggttttggagggtgtatttttttatattagtttttgtgtttttgggtgtagtgttggaagtagtattggatgtaggaaagtgagaagttggttggggtgtaaagattgttttgggatttatgggagttttattgttttgtttagaatagttagtaatgattagggttgtttttagattagattagtttgggttgtgtgttttgatatatgaaagggaggtgggattgtgaggttgtttatggtgttgattttgttttttgtttttagaagtggttagaaatgtgagaatgttgtgttgttggaatttattgtttttttgtagttattagttttgtaaatgtaggtattaggagtttattgttggtatttagttaatatagtgggatttattgagaggtagtttgttataattaaagttttttagtatttttatttttttttagttttaggatttaaatttgtagggttgtttgataggtattatgtaatagagggtttttagtatttgagtgtttttagattataaatggttggtttatttgtttttgagtttgttaaagtagtttagtaaagtttagttttttttttgggaattatagtagtagtgtaattttgtttatgagtagtaaagaaatatgggtttaagtttttgttaatttttggtgtggataggttattttttttttattaattttagggtttttatttgtaagattgggtttggttaggtgtggtggtttatgtttgtaattttaatattttgggaggttgaggtaggtggattatgaggttagtagtttgaaattagtttggttaatatggtgaaattttatttttattaaaaatataaaaattagttgggtgtggtggtatgtgtttgtggttttagttatttaggaggttgaggtaggagaattgtttgaatttaggaggtggaagttgtagtgaggtaagattgtgttattgtattttagtttgggagatagagtaagattttgttttaaaaaaaaaaaaaaaaaaaaaaaaaaaaattgggtttggtggttttttggtttttttttagttttagaaatgattttttaatagttttttgtttaaaaatttatttattattattgtagattttggattatatatttaataatatatttattgaggtattatataaagggttttgggagtttttaaagagttggagttataagaagtttaggtagggttagagtaataaatgtgtttatgaagagtggggatgagtggtatttgttgggatatgggtgtaaagttgataaggttatgaaggtttaatagatatttatggagtgtttagtatgtggtgggaataagattattattaagggttttaaagtagttagtgtatattttagagtgaagaggggtattgtagggtgttagtttttttaagttttgattggtaatttaattttgtggaaattgg

SEQ ID NO: 501 - DNA, 2448 bp, Artificial Sequence
  chemically treated genomic DNA (Homo sapiens)
ttagtttttatggggttgggttgttggttagagtttaagaggattagtattttgtaatgtttttttttattttaaaatgtatattgattgttttagagtttttgataatagttttatttttattatatattaggtattttataaatatttgttgaatttttatgattttattaattttatatttatattttagtaaatgttatttatttttattttttatagatatatttgttattttaattttgtttaggttttttgtagttttagttttttagagatttttggaattttttatatggtgttttagtaaatatgttattaaatatgtaatttggaatttgtagtggtaatgagtaagtttttaagtagaaaattattggggagttatttttagagttggaaagaagttaagagattattaagtttaatttttttttttttttttttttttttttttgagatagggttttgttttgttttttaggttggagtgtagtggtgtgattttgttttattgtagtttttgttttttgggtttaagtagtttttttgttttagttttttgagtagttgggattataggtgtatattgttatgtttggttaatttttgtatttttagtagagatggggttttgttatattggttaggttggttttaaattattgattttgtgatttgtttgttttggttttttaaagtgttgggattataggtgtgagttattgtgtttggttaagtttagttttataaatgaggattttgaggttggtaggagggaggtgatttgtttatattaggagttagtagaaatttgaatttatatttttttgttgtttatgggtagagttatattgttgttatgatttttaggagagaaattgaattttgttaaattattttggtaaatttaaaagtagatgggttagttatttgtggtttgaaagtatttggatgttagagattttttgttatatggtgtttgttagatagttttataaatttggattttggggttggaaaaagataagaatgttgggagattttggttgtggtagattgttttttagtgggttttattgtgttggttgagtgttagtggtggatttttgatgtttgtatttgtagaattgatagttgtagggaggtagtgggttttagtggtatagtgtttttatatttttggttatttttagaggtagaggatggggttagtattatggatagttttatggttttgttttttttttgtgtgttagaatatgtgatttggattagtttggtttggggatggttttagttattgttggttgttttaagtggggtgatgggatttttgtgggttttagagtagtttttatgttttagttggttttttgtttttttgtgtttagtgttgtttttagtgttatgtttaggggtatgaaggttggtgtagggaggtgtgttttttggggtttgttagttgttagatttgaagttgtggttgttattgtttttataattagtgtatgttttttgttgatgttagttggagttgttttggtattatataaggttggtgatatgttgggatagattttgtgttttttaaggtgtttttagtttgttttgagggatagagattggagtttaattttggattgtatagatgtttgttgataatttgtgagtggtttagagtgtttgtttagtttttttttgtattaggattttgtttagtttagttattatgtttttttggggagggaggttgggtggaagggatggaatagtattggtgtagtggttggggttggagggtaggttgtgggtattgggtggtggttggaggggttgttgggtgagtgtggggaggggagtggtgtttgtagttgttttaggtgtattttattttgtgttgtttttgtgtgtttagggttggtggtattatgaggtaggtgggatgtagtgttgttggttgtgttgttgtttttggtatagttgtgttttgggagtagttagaggagttttgaggtggttgggtttaggatttgagtttgtgttggagttttggggtatggaattagggtgtggggtttgtgtgttttttttgttgttggtggatgttttttgtttgtgtggggtttggttgattgggatttgggatggtaggtgagtggttgtggtgggataatttttttttgtttattgattttattttttatttgttgtggattttgttggagtggtgtggatgtagagttagtgggagtgtgttgagtagaattgtattatatttgatttggtgggtaagtgatggtttggtttggggttgtgaaaatgttgattttttttttttattttagagttgggatgtggggtagagttattagggtattgtttgtgtgattattttttaataaaagtattgaagatttgttggtttttgttgtagaggtagggtag

SEQ ID NO: 502 - DNA, 2344 bp, Artificial Sequence
  chemically treated genomic DNA (Homo sapiens)
gtttggtatatttaagatttttatggaggtttagttttatatttttttttatttttttaggttggtttttttttgttgttgatgtgtgggagtttagagagtggttttttgtttttgtgggatttttggagaggtttggagagttggtttttgaaatgtgtttttttttttttttttttttttttttttttttttttgtttttttggttttattattattattgttattatgtttttttttattattttttttattttatattattattattattattattattattattttgttggttggttttaggttttgatgttttgggttttttttggggtggggtgggttgttttaggggggtttattgttatttatgaaggggtggagtttgtttgtttgtgggtttttataagggtggttggttggttggttggttgtttgggtaggttttttggttgtatttgttgtagtgtatagtttggttgaggtgtatgggagtttgttggtttttttttgtttgtgtttgtttgtgaaattgtggttggggtttattgtgatggtttttttgatatttttggatagtattttttttgtggaagtttggggatgaggatggtgatggagatttgtttggattttgagttaaagtgaggttttgtgagtttgttttgagtggaatttgtatttgggtattgttattagagaatggttggtttaggttattggtattttggagtttagggtttagatttggttttagaatgagaggttatgttagttgaggtagtattggtgggaattttggttttggtttgggagatgtggtttgttagaaggttggtgaaagtggattgttgttattggattttagattgttttgtttttttgagtttttgagaaggattgttttttaggtattgttgtttgggaggagttggttagagagatgggttttttggagtttaggatttagatttggttttagaattgaagggttaggttttgggatagggtggtagggtgtttgtgtaggtaggtggtttgtgtagtgtggtttttggtgggggttattttgtttttttgtgggttgtttttgtttatattggtgtgtggggaatggggttttttgtattttatgtgttttgtgtgtttggggtttttttatagggggtttttgtgagttaggtagtgagggttgtttttgtgttgtagtttagttaggttgtgttggtagaggggattttttaatttgttttggtgtgtggggattttgtttatgttgttttggtttttttggatggggtgtttttttatttttaggttttttggtggtttttgtatttggggtaaaagttgggaggattgggatttgtagtgtgatggtttgttgggtttttgtgtggtggtatagtttgggtttgtttaagtggggttgtagggttaaggggtgtttgtgttatttatgttttaggggagtttgtggtggggttggggttggggtttttaggttgttggggtggtgtgggaattttaagttggggtagttttatttttttagtttgtgtttttggatgtttttgtgtggtaggggtagatgtaaggtattttggtgtttttttaggtgttttaggagttggtgttttggtttgtatttttttgtggtttgttgttggatgagtttttggtgagtttggagtttttgtagtaggtgtaattttttttagaaatggaggttttgggggagttggaggttttggaagaggttgttttgttggaagtattttttagtgaggaagaatattgggttttgttggaggagttttaggatgtggggttgggatggggttgggtggtttggggtagggtggtggttttttttttgtggggaatgtttggttggttatggaggggtgtgtttttgttttgttttttttattgggttgattggtttgggatttttgttttttaggtttaggtttggtgagagattttatatagtggagaattgttatttttttttgggtattttggggattttagagttggtttaggtattagtaggtgggttgtttattgtgtatgtgtgggtttgtgggtagttgtttgggttgtgggagtagtttgggtagagtttttttgtttttttattagtttattttgttgtttgattgttttttttttatttttattttttgtttttggaaaatgtgttgttttttgggttgggtggagatttttgttttgtgaaatattgggttttgtgtagtgtttgggtttgatattgttttggtggtttgttttttttgtgtttttgtgttattgttgtttgtttgtttgggtttttgt

SEQ ID NO: 503 - DNA, 2344 bp, Artificial Sequence
  chemically treated genomic DNA (Homo sapiens)
gtaggggtttgggtgggtgggtgatggtggtgtgggggtgtagaggaggtgagttgttggagtggtgttaggtttggatgttgtgtggggtttggtgttttgtgggatgggggtttttatttagtttaggggatgatgtgttttttgggggtggggggtgggggtggggagggggtggttaggtggtggggtgggttggtggagaggtaggagagttttgtttgggttgtttttatagtttaggtggttgtttgtaaatttgtgtgtgtgtagtaggtggtttatttgttggtatttgggttggttttgggatttttgggatgtttaggaaagaatggtagttttttgttgtgtggagttttttattgggtttaggtttagaaggtaggaattttaggttggttagtttggtggagggggtggggtggagatatgtttttttgtagttagttaggtgttttttgtgaaagagaggttattgttttgttttgaattatttgattttgttttaattttgtgttttaaagtttttttagtagagtttggtatttttttttgttgaggggtgtttttagtgaggtggttttttttgaggtttttagtttttttggggtttttgtttttaggagaggttgtgtttgttgtagaaattttgggtttgttaggagtttatttagtagtaggttgtaggggagtgtagattagggtgttggtttttggagtgtttgggagggtgttgggatgttttgtatttgtttttgttgtgtggaggtgtttgggggtgtgggttggggaggtggagttgttttggtttggggtttttatgttgttttggtgatttggggattttggttttagttttattatggatttttttgggatgtgggtggtgtaagtattttttggttttgtggttttgtttgagtgggtttaggttgtgttattgtgtaggggtttggtaggttgttgtgttgtgggttttggtttttttggtttttgttttgggtgtggaggttattgaggagtttgagggtgggagagtgttttgtttggaggagttggggtggtgtaggtgaaatttttgtgtgttggggtaggttgggagattttttttgttggtgtggtttggttgggttgtagtgtgggggtggtttttgttgtttggtttatgaaagttttttgtgggagagttttaggtgtgtagggtatgtggggtgtgggaagttttgttttttatgtgttggtgtgggtgaaggtgatttatgagggagtagggtgatttttgttgggggttgtgttgtataggttgtttgtttgtgtgggtgttttgttattttgttttggggtttggttttttgattttgaaattagatttgaattttggattttgggaggtttgtttttttggttagttttttttgggtggtgatgtttggaaagtgattttttttaaaggtttggaggagtagggtggtttgggatttggtgatggtggtttgtttttgttggttttttggtgggttgtgttttttgggttagggttgagatttttgttggtgttgttttagttggtgtgattttttattttgaaattaaatttggattttgggttttggaatgttgatggtttgggttagttgttttttggtggtgatgtttgggtatgggttttgtttaaagtaggtttgtagggttttgttttggtttggggtttaaatgagtttttgttgttgtttttgtttttgggtttttgtggggagggtgttgtttgaaggtgttgggagggttattgtggtgagttttggttgtaattttatggatggatgtgggtagagagaggttggtgggtttttgtgtattttagttggattgtgtattgtggtaggtgtagttaggaggtttgtttggatagttagttagttagttagttgtttttgtaaaggtttatgggtaggtaggttttatttttttatgaatggtggtgagtttttttgggatagtttgttttattttggaagggatttagggtgttgaggtttggggttggttggtggggtggtggtggtggtggtggtggtggtggtgtggggtggggggggtggtgggggagggtgtggtggtggtggtggtggtggggttggagagatgaagaggaagggggagaggggggaggggggaggggggtgtgttttgggggttggttttttggatttttttagggattttgtgggaatgggaagttgttttttgggtttttatgtgttggtagtagggagaaattagtttgggagggtggaggggagtgtggaattgaatttttgtgggagttttgagtgtgttaggt

SEQ ID NO: 504 - DNA, 2350 bp, Artificial Sequence
  chemically treated genomic DNA (Homo sapiens)
tagatgtattggtgagattaggttttggttgtgattttgggtttgtattatgatttttgatttttgatttagattataattatgatttggttgtaattttttgatttggattttagttttttagtttttagagtttgtgatttttgattttgatttggattataatttttgattttgaatgtgatttttgagatttaatttgatagtaatatttgattttaattattatttttgatgatagtttttgtttatattttgatagtaattgtgatttttatgattttggttttgaatgtgatttataatttttgaatttgattgtgatatttgattttaattataattattaattatagtattgattataattttgattgtgtgatttttggttttattttttttatagtttttgtttttttttagaattttttttttggaatttggttgggtttataatttttgattttggtttttgatttgaggtagaattttggattttgattataatttttgattttaattggatttagattttagttattaattttgatttatggtttagttgaattttatttaatgattttagtttataatatttgattggttttttgttttagttgatttttgatttttgtttgattttttttttgattttaaaattttggtataggtagtttttagaaatttagatttataggatttgtaattatggtttttggaatttgagaattttggttagttttatttatttttgttatagagtttttttttagtttttaatttatgagattttttattattttttttagatattttattttaaggggattggttgggtgtgttttgagattggattttttttgaatatttttattttttatagatgtggatgaatgtagtttgggtgtttttttttgtggtttttatggttattgtattaatattgaaggttttttttgttgtagttgtgtgttaggttattgggtgttgttgggttggtttgggttttgtgtaggtgagtagtatagggatttgttagagagtttgggagtagggtttgggttttagggtaaagttggttggaaaggtggaggtgggattaaggtgttgtgggaggagtttagaaatttggtattggtgggggtggggttattgtgatgtgggtggagtttgtttgggaggttgggttttgtgattttgtttaattttttgtgtattttagatgtgaatgagtgtttggagggtgatttttgttttttttatggtgagtgttttaatattgatggtttttttgtttgtatttgtgtttttggttattgatttggattttgtggagttttttgttttggtttgtatttgggttgattttggttttggaaagggtgggtttagggtaggaaaaggtgggatggggagaagagggtgaaaaggggaaaatgagtttttagttggggtattttagtaggattagggggtagttggtgggagttttgaggtagtgagggggggtggggtgtggagatgaaagggttgagtttgggtatttggattgtgattgtaaagaagttgttttaaatttgttggggggtggtgtttgtagggagggaagtagtgtgaggtaggttggggaaggtgtgagaggtttaggagagttgaggggtggtggaggggtgtggtttagaatgttaggtggagtgggaggtgggttgggtttttggatgttttgttttgtagatgttgatgagtgtagtgaggaggatttttgttagagtggtatttgtattaatattgatggtttttttgagtgtatttgttttttgggatattgtgttggtttggattttgttttttgttttggtgagaggttttgttttggtttgattttttttttttttgattttttgatttgttgattggttttttatttttgtttttttttttttgttttttttttttttttattttttttttttgtttttttttttagtttttttaatttttttttattttaatttttttttgtttttttttttgtttttttggttttttttttttgattttttttttttttttttgtattttttattttgtttttttgttttttatatttgattatttgatttttttttttagatgtggatgaatgttgtgagtgaggtttagttttgtgtgggttgtagtgttgtgagaatttttttggtttttattgttgtgtttgggattgtgattttgggtattatgtgggttttgagggtatttgtgatggtgagtttgtttttatttgtttttgttagtgtttgtaatgtggtgttggaggttgtttttttggggattgaggaggggtgttttg

SEQ ID NO: 505 - DNA, 2350 bp, Artificial Sequence
  chemically treated genomic DNA (Homo sapiens)
tagggtgtttttttttagtttttaagggagtagtttttagtattgtgttgtaagtgttagtgaaggtgggtgggggtaggtttattgttataggtgtttttggggtttgtgtggtatttaggattgtagttttggatatagtggtaggagttgggagagtttttatagtgttgtgatttgtatagggttgggttttgtttgtgatatttgtttatgtttgaggagagaggttgggtggttggatgtgggaagtagggaggtaagatgggggatataaagaggggagaggagagttagaagggggaggttggggaagtagaggagagggtaggagaagattggggtagaggagagttggggaggttaggagaggaggtgggggaaagaggtaaggggaggggagaagtggaggaggaaagatagaggtgggaggttaattggtgagttggggagttgaagggaggagggattaggttggggtggggttttttattgaggtaggaggtgaggtttgggttagtgtggtgttttggaggatagatgtatttgaaggagttgttggtgttggtatagatgttgttttggtaaaggttttttttgttgtatttgttaatgtttgtgggatagggtgtttgaaggtttggtttattttttgttttgtttaatattttaggttatatttttttattgttttttggtttttttaggttttttatgttttttttaatttgttttatgttatttttttttttgtaaatattgttttttgatgggtttagaatagtttttttataattatggtttaaatatttagatttggtttttttatttttatgttttgtttttttttattgttttgagatttttattagttgttttttgattttgttggaatattttggttaaaaatttgtttttttttttttgtttttttttttttgttttgtttttttttgttttaagtttattttttttggggttaggattagtttgggtatgaattgaggtaagaggttttgtggggtttgggttggtagttaggggtataagtataggtaaaggagttgttagtgttgaggtatttgttgtgagggaagtagaaattgttttttaggtatttgtttatgtttagggtatgtgggagattgggtggagttatgggatttggttttttagataagttttgtttatattgtagtaattttgtttttattaatgttaggtttttaagttttttttatagtgttttggttttgtttttatttttttagttggttttgttttggaatttaggttttatttttagattttttggtgggtttttatgttgtttatttgtgtagggtttgggttgatttgatggtgtttggtagtttggtgtgtagttgtagtggaaggagtttttggtgttagtgtagtggttgtggggattatagggaggggtatttgaattgtatttgtttatatttgtggggggtgggggtgtttagaaagggtttagttttgggatatatttgattaatttttttggagtagggtgtttgggggaggtggtgggaagttttatgagttggaggttgggggagggttttatggtagaggtgggtagggttgattaaggtttttgggttttggggattatggttgtaagttttgtgggtttaggtttttaggaattatttgtgttaggattttggagttaggagagggattagatagggattagaaattaattagggtaagggattagttaagtattataaattaggattattggatgggatttggttgagttatgggttagagttagtgattggaatttgaatttagttaggattagaagttatagttagggtttagaattttgttttaagttaggggttagggttagggattatgaatttaattaggttttagagaagggattttgagaagaggtaggggttgtgaaagagataggattaagagttatatagttaaggttatggttagtgttatggttagtggttatgattagggttaaatgttatagttaaatttaggagttataggttatatttagggttagagttatgagggttataattgttattagggtatgggtagggattattattaagggtgatggttagggttaaatgttattgttaagttgggttttaggagttatatttagggttaagagttgtggtttaggttagggttaggagttataggttttggggattgagggattgaggtttaggttaggaggttatggttaggttatagttgtgatttgggttaagggttgggggttatgatgtaggtttaaggttatagttagggtttggttttattagtgtatttg

SEQ ID NO: 506 - DNA, 2206 bp, Artificial Sequence
  chemically treated genomic DNA (Homo sapiens)
gggtattttttgggatggtaagtggtattagtgttgtgagatggttttttttttgttgttaggtgttaggaggtttgtttgggtttgtatgtgtttgggtttggtaggtggggaggtggtatttagggtagtttttgtattggaagttttaggaatttggatttaggttgaaggtttttgttttagagttttggattgttgagtttggaatagttttttttagatatagtgtggtgtgggagtagttgtatgagggtttatgtattttgtatatattagtagtttatttgattttgtttttggttatgtgaaatgtatgtttatttgatttttgattttgtttttggttatgtaggttttgtttgggttgtgataggaggtttggtgtttttaggtatttggtaggtttttttgattttttttttgagtgataggaatgggaagtgagtaaatttaagtagaattaggaggttttttttagaggagtttggtggaatttggttttggttgtgtgttgagtggtggggtatttatagggagatgagttagtgtttattttttgttttagtttttttgtggttgtttttttttttagaaggggttggtttaggttggtgtttttgtggtttttggagtatatttgttgttgttttttttggtttttggtgatagtaggttttttgtattttatttgttttttagttagtatggttttatatagaatatggttgtagataatttttttgtgttttgtatagtgaattgttattttgtgtgggttttattgttaggttagggaggtaggagttgtttttattttttgtttgggagttgttgtttgttttttggatgagttaggaataaatgtgttaatattgggtggttgtttttgttatttttgtgtatgggttttgtggggagagttaggtagtgggtggtgtgggataggtgatgtttatgtttagtatttaggagatttgtatggtagtttttaagatgggtataagtgattataaggagggatgtatgtgttttatttttttatttattatgggattaggttgaggttgtttagggagtgtatgggagggttgtgtttggtgtatttgtagagattttttgaagaggggttttggttgttttttattggggtaggtgtgggtttaggtttttgatattgtgatggtgttgtgggattttgatggattttatttggggagtttaggtttgttttatggtaaggtggttatgtattgtttttgtagttttgagtataggttttatatgggatttgaggtttgggttttatgatatttgggttatgtgtttttttggtgttttttttttggggatgaaattatatttataggtaaaggtttgggagtggagggagatagtaggagataaagtaaggggatgaggattttggtagttataaaggtagtgggagggttttggaggtttttgttgggtagtgtagttaggaaagggtttattaggtgggagaggtaggtgtttggtgagtgttgagatttgtattatgagaagggttgggtttttaaggtatgtatggggtttgggagtggagggagtgtgagtgggtgttaggatggggtttggggtgagtgggtgttaggatgggtttgggagtggagggagtgtgagtgggtgttaggatggggtttgggagtggagggagtgtgagtgggtgttaggatggggtttgggagtggagggagtgagagtgggtgttaggatggggtttgggagtggagggagtgtgagtgggtgttaggatggggtttgggagtggagggagtgtgagtgggtgttaggatggggtttgggagtggagggagtgagagtgggtgttaggatggggtttgggagtggagggagtgtgagtgggtgttaggatggggtttgggagtggagggagtgtgagtgggtgttaggatggggtttgggagtggagggagtgtgagtgggtgttaggatggggtttgggagtggagggagtgtgagtgggtgttaggatgggtttgggagtggagggagtgtgagtgggtgttaggatgggtttgggagtggagggagtgtgagtgggtgttaggatgggtttgggagtggagggagtgtgagtgggtgttaggatggggtttgggagtggagggagtgtgagtgggtgttaggatggggtttggga

SEQ ID NO: 507 - DNA, 2206 bp, Artificial Sequence
  chemically treated genomic DNA (Homo sapiens)
ttttagattttgttttaatatttgtttgtgttttttttatttttagattttgttttaatatttgtttgtgttttttttatttttagatttgttttaatatttgtttgtgttttttttatttttagatttgttttaatatttgtttgtgttttttttatttttagatttgttttaatatttgtttgtgttttttttatttttagattttgttttaatatttgtttgtgttttttttatttttagattttgttttaatatttgtttgtgttttttttatttttagattttgttttgatatttgtttgtgttttttttatttttagattttgttttgatatttgtttttgttttttttatttttagattttgttttaatatttgtttgtgttttttttatttttagattttgttttaatatttgtttgtgttttttttatttttagattttgttttaatatttgtttttgttttttttatttttaggttttgttttaatatttgtttgtgttttttttatttttagattttgttttaatatttgtttgtattttttttgtttttaggtttgttttaatatttgtttgttttagattttgttttaatatttgtttatattttttttatttttaggttttatgtatgttttgggagtttagttttttttgtggtgtagattttagtatttattaggtgtttgttttttttatttagtgggtttttttttgattgtgttgtttaataggagtttttagggtttttttgttgtttttgtggttgttagagtttttgtttttttgttttgttttttgttgtttttttttatttttaaatttttatttatgggtgtgattttatttttaggagggaagtattagggaagtatatagtttaagtgttatggagtttaggttttaggttttgtatggagtttgtgtttaggattgtagaggtagtgtgtggttattttgttgtggagtaggtttgggttttttgggtgaggtttattaaagttttatagtattgttatggtgttggggatttgggtttgtatttattttagtgggaggtagttagggtttttttttaggggatttttgtagatgtgttgagtgtagtttttttatgtattttttggatggttttaatttgattttgtggtgggtggggagatgagatatgtatatttttttttatgattgtttgtatttattttaggagttgttatgtaggttttttgagtattgggtatgggtattatttgttttatgttatttattgtttggttttttttatagggtttgtgtgtaggagtggtgagggtggttatttagtgttgatgtatttgtttttgatttatttgaaagatagatgatagtttttgggtagggggtgggggtagtttttgtttttttaatttggtagtggggtttatgtagagtggtagtttgttatgtaggatataggagggttgtttgtggttgtgttttgtgtggagttatgttggttgggggataggtggagtatggaaggtttgttgttgttagaggttagggaaggtggtagtaggtatgttttaggggttatggaggtattagtttgggttagttttttttgaggaaggaggtgattatggggagattgaggtaagagataggtattggtttatttttttgtgggtgttttgttatttggtatatagttaggattgggttttgttaggtttttttgaggagagttttttaattttatttggatttgtttattttttatttttgttgtttagggagaaggttgggaaagtttgttaggtgtttgagggtgttgagttttttgttatagtttaggtggaatttgtatgattaggaataaggttggaggttggatgggtatgtgttttgtatgattagggataaggttggatgggttgttgatgtgtgtagagtatgtgggtttttatgtagttgtttttgtgttatattgtgtttaggaggagttgttttaagtttagtaatttggaattttagagtaaaggtttttagtttagatttaagtttttagagtttttaatgtgggggttgttttgggtgttgtttttttatttgttaagtttaggtatatgtagatttgagtaggttttttgatgtttgatggtaggaaggaaattattttatagtgttggtgttatttgttattttagggaatgttt

SEQ ID NO: 508 - DNA, 2233 bp, Artificial Sequence
  chemically treated genomic DNA (Homo sapiens)
ttgttggatgtggatgtagatagtgggtttttttatattaagtagtgtattgattgtgagtttttgtgttgttataatgttaagtgttagttgttttttgaggtgtttgttaatgataaggagatttgtatgattaaggtagagatttaggatattaatgataatgtgttttttttttttttggattagattgaaatggatattttggagaatgttgttttgggtatttgttttttttttattagtgtatatgattttgatgttggtgagaatgggttttgtatttatttgtttatgtgtgatgattatggtttttttggattggatgttaagttttgtggtgatggtattaagtttttagaattggttatttagaaggttttggattgtgagtaatagaattattatatgtttgtgttgattgttttggatggtggtgagtttttatgttttgttattgtatagattaatgtgaaggtgattgattttaatgataatagtttggtttttgaggtgttattttatttggtggaattgtttgagaatgttttgttgggtatagtggttattgatttgaatgttattgatgttgatgaaggttttaatggtgaagtgttttatttttttagtagttatgtgtttgattgtgtgtgggagtttttttttattgattttaagattggtttaatttgtgtgaagggtaatttggattatgaggaaaatgggatgttggagattgatgtgtaggtttgagatttggggtttaattttattttagtttattgtaaagttatggttaagtttattgattgtaatgataatgtgttgtttattggttttgtttttgtgtgttagggggtgttgagtgaggttgttttttttggtattgttattgttttggtgtgggttattgattgggattttggtaagaatggatagttgtagtgttgggttttaggtggaggagggatgggtggtggtgggggtttgggtgggtttgggggttttgttttttttaagtttgaggagaattatgataatttttatatggtggtgattgattgtttgttggattgtgagatataagatgagtataatgtgattattgtggtgtgggatgggggtttttttttttttaattttattaagttgtttgtgattaagattttagatgagaatgataatttgttttggtttattaaagggttttatgtgttttaggtgtatgagaataatattttgggagagtatttgggttttgtgtttgtttaggattttgatttgggttagaatggtattgtattttattttattttgtttttgtatattggtgatgtgtttatttatatttatgtgtttgtgaattttatgaatggggttatttatgttttgtgtttttttaattttgagtagattaaggtttttgagtttaaggtgtttgttaaggatttgggggtgtttgtgtatttggagagtaatgttatggtgagggtgatagtgttagatgtgaatgataatgtgttagtgattgtgttttttatgttgtagaatgatattgtggagttgtaggtgttgtgtaatgttggtttgggttatttggtgagtattgtgtgtgttttagatagtgattttggtgagagtgggtgttttatttatgagattgtggatggtaatgatgattatttgtttgagattgatttgtttagtggtgagatttgtatgttgtattttttttgggaggatgtgatgtttgtggtggagttggtggtgaaggtgattgattatggtaagtttattttgtttgtagtggttaagtttattatttgtttggtgagtggatttttttttgagggggtattatgggtgaatggtgagtagtattattgggatatgttgttgttgtttattgtgattttgagtattatttttattatttttttagtggttatgattattattgttgttaagtgtaagtgtgagaataaggagatttgtatttataattgttgtattgttgagtatagttatttgtagttgggtgggggtaagggtaagaagaagaagattaataaaaatgatattatgttggtgtagagtgaagtggaggagaggaatgttatgaatgttatgaatgtggtgagtagtttttttttggttattttttttatgtattttgattattagatttgtttgttttttagtttgttttggttggaggtgatgtattttaaat

SEQ ID NO: 509 - DNA, 2233 bp, Artificial Sequence
  chemically treated genomic DNA (Homo sapiens)
gtttgagatatattatttttgattggggtgagttgaggggtaggtgggtttggtagttgaagtatatgggggaggtggttagggaggggttgtttattatgtttatgatgtttatggtgttttttttttttattttgttttgtattagtatgatattatttttgttgatttttttttttttgtttttgtttttatttagttgtgggtggttgtatttggtgatgtggtagttgtaagtgtggatttttttgtttttgtgtttgtatttgatggtgatggtgattatggttgttaggaggatgatggagatagtgtttagagttatgatgagtggtagtgatatgttttagtggtgttgtttgttatttatttgtggtatttttttgggaagggatttgtttattgagtggatgatgagtttggttattgtggatagggtaggtttgttgtggttggttatttttattattagttttattatgggtgttatgtttttttagaaagggtgtagtgtgtggattttgttgttggatgggttgattttaaataggtggttgttgttgttgtttatgattttgtaggtgagatgtttgtttttgttgaagttgttgtttagggtgtgtatagtgtttattagatagtttaggttagtgttgtgtggtatttgtagttttgtggtgttgttttgtagtgtggggagtatgattattggtgtgttgttatttatgtttagtattgttatttttattgtggtgttgttttttaagtgtgtgggtgtttttgagtttttagtaagtattttgaatttaaaagttttggtttgtttgaagttaaaggagtgtagggtgtagatggttttgtttgtgggatttatagatatataggtgtagatagatatgttgttgatgtgtgagggtaggatagagtaggatatggtgttgttttggtttaggttgggattttgggtgagtatagagtttaggtatttttttgggatgttgtttttgtgtatttgaagtatgtagagttttttggtgaattgaggtgggttgttgtttttgtttagaattttgattgtgaatgatttggtggagttgaggggaggagagtttttgttttgtgttatgatggttatgttgtatttgttttgtgttttgtggtttagtgggtggttagttattattgtgtagaagttgttgtagttttttttaagtttgaaggggatggaatttttgggtttgtttaggtttttgttgttgtttgttttttttttgtttaggatttgatattgtagttgtttgtttttgttagagttttggttagtgatttgtattagggtgatgatggtgttgggaggggtggttttgtttagtgttttttggtgtatggagatgaaattgatggatggtgtattgttgttgtggttgatgagtttgattgtgattttgtagtgggttgggatagggttaggttttaggttttgggtttgtatgttaatttttagtattttgttttttttatagtttagattgttttttatatggattaggttggttttggggttgatggagaagagtttttgtatgtggttaggtatgtagttgttgaaagagtagagtattttattattgggatttttattggtgttggtggtgtttagattgatgattattgtatttagtggagtgtttttgggtagttttattaagtaggatggtgttttgaagattgggttgttgttgttggagttaattatttttatgttgatttgtatggtggtggaatgtggaggtttgttattgtttagggtagttagtatgagtgtatggtgattttgttgtttgtggtttagagttttttggatgattagttttgggaatttggtgttgttgttgtgggatttaatgtttagtttaaagaggttgtgattgttgtgtgtgagtaggtaggtgtggagtttatttttgttggtgttggggttatgtgtgttggtgagggggaagtgggtgtttggagtagtgttttttgagatgtttattttgatttggtttgaggagaaggagggtgtgttgttgttgatgttttggatttttattttgattatgtagatttttttgttgttggtgaatattttgagggatagttggtatttggtattgtggtggtatagggatttgtggttgatgtgttgtttggtgtagaggagtttgttgtttgtgtttatgtttagtag

SEQ ID NO: 510 - DNA, 2398 bp, Artificial Sequence
  chemically treated genomic DNA (Homo sapiens)
attgtatttttggttttatagttttttattgttgattttaggtttttttggattttaggtttttttttttaagatgtattttagaggattaaaaatatattttatttgggttttgtttgtttttgtggaagggtagtttattagaggatataattttgtgttttaatttgtttttttttttaaaggaaatgtggagaaaaaaaaaaagtagaaattggaaataattaatatttagtttattttatttgatttttaggggaattggtgaggagtttaagatgattttttttttttagagaaagaatttaaagtttagggaaatagtgataggggagtttaagattgtttttgttagtttttttttggttattttttgttgtgattgtaggatagtttttattagtaggagaattgggtaagtgtgtggataagtagagagtgtgttgaataatttgtaatgttttatgaaatatgtattgttatggttttttaaaaggttttgtggaagttgtttgtttttattaattaagtttttatttatataaaagtagaagtagaagtagttttagaaaatatattaataattttttatttttttgaagattagagtagtagaaaataggtgatttgtattataaaattgtatttatttttttttttttttagattttatattatattagtttatttgtgttatggtgtataaaaaatggaataggtgtttttattgtattgtttttttttaaaaatagattatttatattttaattttgttttttttaaatttgatttttaataggagagttttttattattttagatggagtgaggttgtatgattgggatggaagaaaggaattttttaaatttgggggaatttttgttttttgttttaagattattttatttggggtgtgggggtgggtgtggtggttagggtagtggaatgtagttgtggttgtgttatttttgtatttttaggtgtgtgggagggattggtggggatgtgagttgtggattttggtgaatttgggggaggtagatagggggaggtggatatttagttggtaggtgttttagtttttttgtagttggtgggttttttttttgatagttttaggaaaggtagattttttttttagttagttaggtaaggtaaagattgttgttgagtttgttgttattgagggtgtatagattttggggagattgaagtttgttattgtgggattttgtggggtaatttgggtttatggaagttttttgaaagaggggagaagggtttgtattttttttatggaggatttttttttttttagtattttgtttgatgtatttaattggtagaagtgagattttaataggtagtagagagtgtttatgtggaggaggtttggggtgttgtggtgttatttttatttttttttgggattgtgtttatttttaaagttatatgttgatgaattaatttatgttttaaatttttttttttagttttgtgagtttgtggtgatattgggttgtggggtggttgggaatggtttttttttttggaaaaattagagaatggtttggagagttgaaatgagtgtttgtgagtaggtttgtgtagaattgggttttaggattgttgagttttgtagggtgtttttgggggatgttaggttgttggtttttttgtttttgttgagatggataatgttttgtttttggagttttggtttgttaatgtattgggtttggatttggtgttgagttgttttaatgtgttgattttggtgttgttgttggtgttgttggtggtggttgtattagttgtttatgtggtgatttgtgttgtgggtttggtgggtaattttgttgtgttgtatgtgttgttgtgggtgttttgtatgaagattgttattaatttgtttatttttaatttggttattgttgatgagttttttatgttggtgttgtttattaatattgttgattttttgttgtggtagtggttttttggggagtttatgtgtaagtttattgtggttattgattagtataatattttttttagtttttatttttttattgttatgagtgttgattgttatttggtggtgttggttattgtggagttgtgttgggtggttggttgtatttatagtgttgtgtgtgtggtgagtttggttgtgtgggggattgttatatttgttgtgttgttttttgtagtttttgtttggttagatgatgagtagggttggtgttagtgtgtgttagtttttttgtagtttgaggttttttggtggtgtgtgagttgtttttatatgtttgtgttgggttttgttatttttgtgtttattatttgtgttttttatattattttgttgtgttggttgtatgttatgtggttgga

SEQ ID NO: 511 - DNA, 2398 bp, Artificial Sequence
  chemically treated genomic DNA (Homo sapiens)
tttagttgtatggtatgtagttggtatagtagggtggtatagaggatatagatggtggatatggggatggtgaagtttagtatgagtgtgtagaggtggtttgtgtgttattagaaggttttgggttgtggaaagattagtatgtattggtgttggttttgtttgttgtttagttgggtgaagattgtgaagggtagtatgatgagtgtgatgattttttatatggttaggtttattgtgtgtgtggtgttgtaggtgtggttggttatttggtgtgattttgtagtggttaatattattaggtagtggttggtgtttatgatggtgaggaagtagaggttggagaaggtgttgtattggttgatagttatgatgagtttgtatatgagttttttgaagggttattgttgtagtaggaagttggtgatgttgatgggtagtattagtgtgaagagtttgttggtgatggttaggttgaggatgaataggttggtgatggtttttatgtggggtgtttgtagtaatatgtatagtatggtggagttgtttgttagatttatggtgtagattattgtgtagataattggtatagttattgttagtggtgttggtagtggtgttagagttgatgtgttggagtagtttagtgttgggtttgggtttgatgtgttggtgggttagggttttgagaatgaggtgttgtttattttaatgagggtagaggagttggtgatttggtgttttttaaggatgttttatggagtttagtggttttgaagtttggttttgtatggatttgtttgtggatgtttgttttagttttttaagttgttttttggtttttttggaggaggggattgtttttagttattttatggtttaatgttgttgtggatttatggggttggaaagaggaatttaaagtataggttagtttgttgatgtgtaattttagaaataggtgtggttttgaggaggggtgggggtggtgttgtggtgttttaaattttttttatgtgagtgttttttgttatttgttgaaattttatttttattagttgaatatattaaatgaaatgttagagagagaagaattttttataggaaaaatgtaaatttttttttttttttttaggaaatttttgtagatttaggttattttatagaattttgtagtggtaagttttggtttttttagggtttgtgtgtttttagtaatagtaagtttaatagtagtttttattttatttggttggttggggaaggggtttgttttttttggagttgttaggagaaaagtttgttggttgtggggaggttgagatgtttgttggttgggtgtttgtttttttttgtttgttttttttgagtttgttagagtttgtagtttgtgtttttgttggttttttttgtgtgtttggaagtgtagggatggtgtagttgtgattgtgttttattgttttgattgttgtgtttatttttatattttaagtaaaatggttttggaatagagaatagaaatttttttaaatttaagggattttttttttttattttagttgtgtaattttattttatttgaaataatagaaagtttttttgttaagaattgaatttaaggaaaataaagttagggtgtaagtgatttatttttaaaggagaataatgtagtggaggtgtttgttttattttttatatattgtaatataaatgggttaatgtaatgtgaaatttgaaaggaggaaaaagtgagtgtaattttataatgtaaattatttgttttttgttattttggtttttaaggggatagaagattgttagtatgttttttaaaattatttttatttttatttttgtgtaagtaaagatttgattagtaaagataaatggtttttgtaaagttttttagggaattatgataatgtgtattttataaaatgttataagttgtttaatatattttttatttatttatatatttgtttgatttttttgttaatgagagttattttgtgattgtagtggagagtagttaaggaaggattagtaggggtagttttgaatttttttgttgttatttttttggattttggattttttttttaggaagggaaaattattttaggttttttattagtttttttaagaattgaatgaaataaattaaatattggttatttttaatttttgttttttttttttttttatattttttttaggagagagagtaaattaaaatatgagattatattttttagtaaattatttttttataaaagtaggtgaagtttaaataaagtgtatttttggttttttaggatgtattttagagaagggggtttgagatttagagagatttaaagttggtagtagaagattgtggggttagaaatatagt

SEQ ID NO: 512 - DNA, 2114 bp, Artificial Sequence
  chemically treated genomic DNA (Homo sapiens)
aaagttatagtagaagggaagttgaagtttgaaaatatattatattttgttttttggtttttaaatttttttagttaaaaatttaggtaaaattattatatttaatatagtaattatttgtaaaattttagaatagtaaataaaggatataaagaaatgtatttttattttttttaaattgaaaataagtaaaatattatagaattagattttgttttattatataggaattgtttggtaaagattttttttttttttttaaaggtgaaattttaggttgttgaatattgaatgggtaaagatttttataatgttgtatttaagtgagtattaatgattttatttattaataatgattattttttgggaataagaatttattaggaagtaatttttaaaattttataaaggatttaattggtttttataatatggttagtagttatatgtaaattttatttggaagattggggtgaaattaaggggttggtgaaggaatttaggaaaattaaaatattaaatttatttttaatagttgataatgttatgttttaagagaagaaaaagagtatattttgttatagtgtgtgagaaatttaatttttgtttttggatgatggtggtatgttattttttttaaagttaggtattagtgtgagtagtgttttagagaggtgaatgtgtagttgtgttagatatttatagttttatttttaaaagatatatgggaaaatagttaaaagtttttttataattgtattaatttgattaataggaaaataagtggaaaatgtagttttattaaagtagagtagaggtttttttttattaaatttttaggagggggaggggagaatatagaatggttagggggtattttttggaagttgaagagagattaaatgatgatttttatattttttttgttgtttaagtgttgaaattaatttagattttatttttttttttatgttaattttggattttttgagtaatttggagtttatgttttaggttttttgaagattagaagtttaagaagatgggaatttttagaataataattaggggaaattgtttatttgaagggttaagggtagggggttgtgtttggtattttattgagattttgtttattgaaaatattgtttttaatgaaattatttagtattttgttttatttgtgtggttgttttttttatagtggtgtaatttgtgttagttgattgtttttaggattgttgtaaattttttgatgagtagtatttagaaggggttttagtaaaaattatgtgttttaaatttttaaagttttgtttgggagagaggttgatatttgtatatgaagtttgttttttggaaatagtaggaggatgtaggaggggtgaagtaattttgggaagatgttttttttttttttttatggatttagtgtagtttttggtataagtaattttgttattgggtggttttttttaatttgtgtgggggttgatattaatataagtagttgtttttttgggtgtgagtgggattttaggtttgggatgtggtgggtgtggtgtgggagaggtatttgttgttttttttatttggatgttagaggtaagttgtttgtgtgaatttgagtgaatgattggaggttggttgttgtaggtttatttttttaggatgtgggttttagggggtgttttgatgtgatttaattttgattgtgaaaataattgttaggggttggttggattgttgttggtttttttttttttggtggttttgtttggtttgggtttagtttgggaataaatttgttttatattaatatttttttttatattgggtgttgttgttttaattgtgtgtggggggtgaggtgtttattttgtataagaatagaggagtgggggagaagagatggttttgttgtttattgggtaagtggagtttagttttgtttgggagtgggtaggagagatagggtagtgatttttatttatattagaaaatttttttttttggtgattttgttgttaatttgagttggttatagatagtttagtgagtttttaattataaggatgagagaaaagtatggtgttttttgagttttttttgtt

SEQ ID NO: 513 - DNA, 2114 bp, Artificial Sequence
  chemically treated genomic DNA (Homo sapiens)
ggtggagaggatttgaggggtattgtgttttttttttgtttttgtaattaaggatttattggattgtttgtagttgatttgagttggtagtaaaattgttggggggaggggttttttggtgtgagtgggggttattattttgttttttttgtttgtttttgagtggggttgggttttgtttatttagtgagtagtgaggttgtttttttttttttgtttttttgtttttgtgtggggtgggtgttttgttttttatgtgtagttgaggtgatggtgtttgatgtagaaggaagtgttgatataaaataagtttgtttttaaattaaatttaaattaagtaaagttattaggaggggaaaaattaatagtaatttagttagtttttagtaattgtttttatggttggaattaaattatattaaaatgttttttgaaatttatattttgaaggagtgaatttataatagttaatttttagttgtttgtttgagtttatatgaataatttgtttttaatatttgagtgaagggggtggtgggtgttttttttgtattgtatttattatattttggatttgggattttatttgtatttgaagaggtggttgtttatgttaatattagtttttatatgaattagaaaagattgtttggtgatagaattgtttatgttaggaattatattgaatttgtaagggagggggaagaatgtttttttggggttattttgttttttttgtgtttttttgttgtttttaaaagatagattttatgtgtaaatgttaattttttttttaaatgaagttttagaaatttggggtgtatggtttttattaaagttttttttaagtgttgtttattagaagatttataataattttaaagataattagttaatataagttatattattgtaaggaaaatagttatgtaaatagagtaaggtgttgggtgattttgttagaaataatgtttttaatggatggggttttagtaaaatattaaatgtagttttttatttttggttttttaagtaaatagttttttttagttattgttttaaaaatttttatttttttgagtttttaatttttaggaaatttggagtataggttttaaattatttggggaatttagagttaatatgaaggagaaagtgggatttgaattagttttagtatttaaatagtgggggggatgtaagagttattatttaatttttttttggtttttagaaagtattttttggttattttgtgttttttttttttttttttgagggtttgatgaaaaggaatttttattttgttttggtgaaattgtattttttatttgtttttttattggttaaattggtgtagttatgggaggatttttgattgtttttttatgtgttttttaagaatggggttataaatgtttgatatagttatatgtttatttttttgggatattatttatattggtgtttaattttaagggaagtgatatattattattatttaaaaataaaaattgggttttttatatattgtagtagaatatattttttttttttttttgaggtatagtattgttagttattaaaaatggatttaatgttttaatttttttggatttttttattaattttttaattttattttaattttttagatagaatttatatgtgattattggttatgttgtagggattaattggattttttgtaaagttttaaaaattgttttttagtaaatttttatttttaagaagtagttgttattagtaggtgaagttattagtgtttatttagatatagtattgtaaaaatttttatttatttaatgtttagtagtttgaaattttatttttaggaaaaaaagagggatttttgttagataatttttatataatggagtaaaatttgattttgtagtgttttgtttgtttttgatttaagggagatgaagatatatttttttatgttttttgtttattgttttgaagttttatagatggttattgtattggatataataattttgtttagatttttaattgagggggtttgagaattaagggataaaatgtaatgtgtttttaaattttagttttttttttgttgtaatttt

SEQ ID NO: 514 - DNA, 2382 bp, Artificial Sequence
  chemically treated genomic DNA (Homo sapiens)
aggttttggaggtggttattgttggtttaggtatggttttgtttgggattattggttgtttttgtggggtgttttgtttggggtttttttttattttgggatgttttaggtgtgtttagtttgagttggtggagagggtgggggtgggggtggttggggttttgaagtttaggtttttttttttatttttttgttggttttgttgttgtggtttttgtttttgtgtttgtttgtttttgagttttttttttttttttttttttttttttttttttttttgtagtagtaataatttgattttgttttttttatttgttttttgagatgttttttatatttgtttgtatatagtgtgtgtggtttttttgaaggtgatttttgtaaattgtgatgtaggttttttgttttaggtaatttttgttgtgggagaggttgttttttggtgtttatgttttttttttgtagtttttattgttggttgagggggaaatgggtgataggggaaggggaggtgtgtgtgggatggattaggttggggtagaggggtttaaattggtgtggttttatagaagtttgaggagggtggggttggttttgagtttttggagttttatgggatttttttgattttattgaggagtttttgttagttttgtgtatttttgtaatattttttattttatttgttagttttgagtttatagttttttgggtttggggattggttgggggaggggatgggggggaggggattttttggttgtagggaatggtgtgtgggtgggggtgggagggaaatgatttgttttaggagatagggatgaaggtttttttgagttaagggagggagaagagaggtggaataaaaggtagatgttggaggggaaggggagttggggagtttgttttgagggttttggtagtttgtggttttttgttttagtttgttttagagggtgaggttaaggttggtgttagggttttttattggttatttggattttatgtgtttagtatttatttttttttgtatgtttattttatgtatttttttgtgttttttttatggtttttttgtggtgagttgtttttgtttttttgtaggtttttggttttagtgttaaggtattgtggttttttttgttttttttttgtgttgaatttgggttttttgtggggagaaataggttgggggtgaggggtttttgagataatttaggatatttttttggggtttagttaggtaattttgatgtttatggatttttggattatagtttttattgtgggtttagttttatttttagtttattttgtggtgagtgttaagttttaaaagttggagtgttattgtttggtgattttgtgtttgtttgtgttttttaatttatggttatttgtttgttatagtgaatttttttttaggaaagaatttgttttttgtaaagaggatgtgtaatgttggaaagtttgtttttttttttattagttggattttgagagttgggagagatgattaatgaataggttgagggtgttatagttttgttattttgggatggggggtgtagtaggggagttatagtttttttagaggttaggttattttatttagttgtattttatttttaattttttagtgggtgatatttgtagggtgttgggattgggagaaattttagatattttaaattttaaattttattttttagatgaagatattgaggtttagagtgggttagtgagttgtttaaggttataggataggttagaatggaagttttttgattttttttggggtgttgggtttatagttttattttgttattttttgttttggaagtgagtattgaagttatttaagagaggttagtgattaaaggtagtgatttttaggtgtagaggttggggtagatgtgtttatgagtttgtttttttgtgtatttttttttattttgtttttatttttgttttggttattatgtgtttttattattttgagatttagagaggtgtagtggtttgttgaaggttatatagtatattgagtagggtttttgtttttattgtttagttgtttttttttattgtttatttgggtttttgtaagtttgttaggatttttgggagtttgttttttttaatgtatagagttgtggtgtgtgttaaagtgtgggaaagtttttgggagagggaaggggtagaaaatatagttgtttattttaattttggatggttgtggtaaggtaggggtgtttagaaaggtagttagttttgtgtattgttggtgtttttggtatattttattttgtgttaggggttttttagggttgtgtgagtatgtttttttagtttttttttagtgaagtaggtgtggtgggg

SEQ ID NO: 515 - DNA, 2382 bp, Artificial Sequence
  chemically treated genomic DNA (Homo sapiens)
ttttgttgtgtttgttttgttgaggaggagttggaagaatatgtttgtgtgattttggggagtttttggtgtagagtggggtgtgttggaggtattggtggtgtgtaggattggttgtttttttgagtgtttttgttttgttgtagttgtttaaggttgagatgagtggttgtattttttatttttttttttttttaggaatttttttatattttgatatgtgttatggttttgtgtattggaggaagtaggtttttggggattttggtaagtttgtagaggtttgggtgggtaatgggagggggtagttgggtagtggaaatgagggttttatttagtgtgttgtgtgatttttgataagttgttgtatttttttgaattttaggatgatggaggtatatggtaattaagataggaatggggatgaggtgggggagggtgtgtgggggaataagtttatgggtatgtttgttttagtttttgtatttgggaattgttgtttttggttattggttttttttaagtgattttagtgtttatttttggggtagggggtggtaaggtggagttgtgaatttagtgttttggggagagttggaaagtttttattttgatttgttttatgattttgggtaatttattgatttattttgggttttagtatttttatttggaaaatggggtttggaatttaaggtatttgaggttttttttagttttaatattttgtaggtgttgtttattgaaaggttggggatggggtgtagttgggtagaatgatttggtttttgggaagattgtagtttttttattgtattttttattttaaagtagtagggttgtgatatttttagtttgtttattggttattttttttaatttttagaatttagttgatggggagaaaggtgggttttttagtattatatattttttttgtagagggtagatttttttttagggaaaggtttgttgtgatagatagatgattataggttaagaggtgtgggtggatgtggggttattaaatggtgatattttgatttttggggtttggtgtttattgtgggataaattaagagtaggattgagtttgtggtgggaattgtaatttggaaatttatgggtgttggaattatttggttagattttggggaggtgttttgaattattttgggaattttttgtttttaatttatttttttttgtggagagtttgggtttaatgtggagagaaggtgagagaagttgtggtgttttagtgttgggattggggatttgtggggaagtaaaggtgatttgttgtagagaagttgtgggaagggtgtggggaggtgtatgaagtgggtgtgtggagagaagtgggtgttgggtgtgtgggatttaggtggttggtgaagagttttggtattagttttgattttattttttgggatagattgaggtaggggattgtgggttgttggagtttttggggtgagttttttagtttttttttttttttagtatttgttttttgttttatttttttttttttttttttgatttaggaaaatttttatttttattttttgaagtaaattgttttttttttatttttgtttgtatgttgttttttatagttagggggtttttttttttttgtttttttttttagttaatttttggatttgagaggttgtaaatttggagttggtgggtggggtggggagtgttgtaggagtgtatggagttggtggggattttttagtagaattgggggagttttgtagggttttgggggtttggagttggttttgttttttttaaatttttgtaggattgtgttagtttaaatttttttgttttagtttagtttgttttgtatatattttttttttttttgttgtttattttttttttggttggtagtaaggattgtagaaggggggtgtgggtgttaggaggtggttttttttgtagtggggattgtttggggtggaggatttgtgttgtggtttgtggggattgtttttggaggggttgtatgtgttgtgtgtaggtggatgtgaggagtattttaagaggtgggtgggggaagtgggattaggttgttattattgtagagagagagagaggaagagaagagagagagggagagatttgagagtgagtgagtgtgggagtgagggttgtagtggtagggttggtggggaagtgggaagagggatttggattttgggattttagttgtttttgtttttgttttttttattagtttaggttgaatgtgtttggaatgttttagggtaagagggaattttaggtggggtattttatgagggtagttagtagttttgagtgaagttgtgtttggattgatagtggttatttttagggttt

SEQ ID NO: 516 - DNA, 2192 bp, Artificial Sequence
  chemically treated genomic DNA (Homo sapiens)
ttatataatttttaaaaagaaagaaatttttaaattatagatgtgtttggaattagaatttagaaagtatttgggtagggaaaatagtttttagtgtttaaggttaaagttagtagggtttttttggatgggaaagagatatgagattgtaagtaatttttggatattatttatttgttattgtgtttttatttttttttttagttatttatatgttttttttttttagttaaaatgaatttaatttttgttatagtattttattttgttaataaaatttaggattgaagaatgagaataaaagggttttatatttattattttttaatttttgattttagtttggatagaataattatttattttagaaaattggtatagggagtatttattagtagttgtaatatattattgttaaagggagggattttgtaaggtggtattgggtgttttatatgtatgggaaatttgaggttatgtttagtgttaattataagtatttttatttttggttaggtaagttttgatttttgaattttgagtttttaattttttttaaaatgagaaagagatggttttttttagagttttttagtttttaatttataggtaaatattattgtatgttgttttttagtagagattggttttaattaaggtaaataagttaggatggattttgttgattgtgatggtttagtgttatattttatatattttattattttttagaatatttaatagtgttgtttttggtagttttggggttgtagtttttgtagagaggaggaattggtattgaaagaaatagttgagttttattatgttatgtggggtgtttttattgttaagagtaattttttttttttgggaagaaaagtgtgggtggggttggggtagttttttttttttgtgttgttttggagattatgggtgtttagttgtagttgttgttggattggttttggttgttttgagaggtgttttttgtaggtggggatgtggttaggttggatgtaaggtttttttttaatttattgggtttagggggatggttaggggttgtttagtttatttggtgggttagggagggggatggtagaggttggttgggtttttttagtatatagtaggtgtttaattagtgtgatttgaattaggttattttttttttttaatttttttttttgtgttttatggagggtggattagggttttggatgtgaattttgtgttgtattagagttttagttttaattgatattttgagtgttgttaatttttttttgaagagtatggtagagtgaagtataagtaataattttgtattatttgtgtttttagagtttttttggatttgtgttatgtgtggtggggagaattggttttttgtttgagtttagagtttatttgaggttagttttattgttttgttgaaagttaaaattttaagttgatgttttttagttgtttattttttagtagagagtttttttttggggagttttgttttggggtgttgttttgaggttagatgttgttttgtttggatttgaatttgagtttgggatgggtgattttttaattttaggaattggaattgagatattaaagtttagatgtgttttttggatgatggttttttggtaggggtatttagttagtggttaagatgttgttagtggggaaggtgatttaggttttgaatgggaaagtttattagtagattttttaggttgaggtaggagttgttttttgttttgtttttttttatttttttttttttgtttttttttaaattttttttttttttagggtttttttattggaaattgaataaaataagggttttgaaattattttgattttaaaaataatttttgtttgtttttaaattgtattaatataaaattagaatgttagtttttgaaaattagaaaatttaaattaaaattttaaatgtaaattatttagaaatagtttggatggaattattgggtgatttttgttttttttatgtataaaaatatgattaatttttgtatttaaaaaataggttttattttgtattagtgttttgaaatttgttttttttttataatagtattttatagatttttttttatgtttgtgggtgtttatgtattttattatattgagtagttttttatttgttgatttaggatttttat

SEQ ID NO: 517 - DNA, 2192 bp, Artificial Sequence
  chemically treated genomic DNA (Homo sapiens)
atgggagttttaggttaataagtggggagttgtttagtatggtgaaatatatgggtgtttatgggtatagaaaagggtttgtgagatattgttatgaagaaaaagtagattttaaaatattagtatagaatgaaatttattttttaaatataaaaattagttatgtttttatgtatgggaaaaatagaggttatttagtggttttatttaggttatttttgagtaatttatatttaaaattttaatttaagttttttaatttttaagaattgatattttaattttgtattggtatgatttaagaataagtaagaattatttttaaaattaaagtaattttaaagtttttgttttatttaatttttagtagggaagttttgggagggagggaagtttggaagaaagtaagggaagggggatggagaaaagtgggatagagggtggtttttattttagtttggaagatttgttggtaggtttttttatttggaatttgggttattttttttattgatgatattttggttgttggttggatgtttttgttgggaagttgttgtttaggaaatgtgtttaggttttggtgttttaattttaatttttgaggttgggaaattgtttgttttaaatttaggtttaggtttaggtgggatgatgtttggttttgaggtggtattttagggtaggattttttggggaaggattttttgttggggggtaggtggttggggaatgttgatttagggttttaatttttaatgaaatgatgaaattaattttagatgagttttgaatttgagtaggaggttggttttttttgttgtgtatggtgtaaatttgaagggattttgggaatgtgaataatataggattattgtttgtgttttattttgttatgttttttggggaaaagttaatggtgtttaaggtgttggttgggattggaattttaatgtggtgtagaatttgtatttgggattttaatttattttttatgggatatagggaggagaattggagggagagagtaatttgatttaggttatgttaattaggtgtttattgtgtgttgagaagatttaattagtttttgttatttttttttttagtttgttaagtagattgagtagtttttggttgtttttttgagtttggtagattggagggaggttttgtgtttggtttggttgtgtttttgtttgtagaaagtattttttaaggtagttagggttggtttagtgataattgtagttggatgtttatggtttttaaggtaatgtggaggggagggattgttttggttttgtttatgtttttttttttagggaggggagattgtttttagtaatgggagtgttttatgtggtgtagtgaaatttaattattttttttaatgttagttttttttttttataaggattataattttagggttgttaggagtagtattattaaatgttttgaaaggtggtaggatatatgagatgtagtattgagttattatggttaataaagtttattttaatttatttgttttggttaaaattaatttttgttgggggatagtatatggtagtgtttgtttgtaagttagaagttgaaagattttggaagaaattattttttttttattttaaaagaggttgagagtttaaaatttagggattaaggtttgtttggttagagatgaaaatgtttgtggttggtattgaatgtggttttgggttttttatatatatgagatatttagtgttgttttatagaatttttttttttggtagtgatatgttataattgttaataaatgttttttatgttaattttttagaatgagtgattgttttgtttagattagaattagaaattaagaaatggtgagtataaaatttttttatttttattttttagttttgggttttattaataaggtgaagtattgtaataaagattagatttattttagttggaaaaagaaaatgtgtaggtgattgagggaagggatgaaaatataataataaataggtaatgtttaggaattatttgtagttttatattttttttttatttaaggaggttttattggttttggttttgaatattagaaattattttttttatttagatgttttttgggttttggttttaggtatatttgtaatttaggggtttttttttttttaaaaattatatgg

SEQ ID NO: 518 - DNA, 2192 bp, Artificial Sequence; identical to SEQ ID NO: 516
  chemically treated genomic DNA (Homo sapiens)

SEQ ID NO: 519 - DNA, 2192 bp, Artificial Sequence; identical to SEQ ID NO: 517
  chemically treated genomic DNA (Homo sapiens)

SEQ ID NO: 520 - DNA, 2244 bp, Artificial Sequence
  chemically treated genomic DNA (Homo sapiens)
  unsure (2126, 2128, 2131, 2132): unknown base
ttttatttttttttttttttttgttttttttttatttttttttttttttttttttttttttttttattttttttttgtttttgagtttttattgattgatttttttttattttatttgttttttttttaatgtgttaatttttgttttatttttgatttttttaggtattgggaggtgggatgggggtgtgtgtttttttttaggagttttgtttttttaagatttatagaaattaggatttgtttttatttaaaattttatgtattttaagttttttttagataatatattttaattttttgggttgattagtttttttgtgtagaggtagttgagaggttttgttttgtagagggaaaagagttttttatttttttatttattatataggtaaatttatttggttattggttgaaggtatagttttgtttttgtggggaattggtggttaggatataatagtgtttttggagtttatttttggttttggtgttggtgtagggattttttgattgggtttgaggggtttgggttagttttaatgttattatttatagtgagggtagggtgtaaggttgagaaggttatatttattgttttgggaggatgtgggagaagagattgaggtggaaagtgttttgttttgtttattggttgtttttgttttggttttagtgtttgttgggatttgttaggatttgttggggttttgggagattttgagtatttgtaggaagaggtgttgagaaattaaaaatttaggttagttaatgtatttttgttgttggttgtaggttttgtttttgtattaagtgggtgttgattgtgtgtgtttggtgattgtggggaggattggtggtttgtgggaggggatgggtagaggtgtgggttatattgttttggagttggtttggttttttgtgttttttttagtggttaagttgtgaggtatagttttttattgttttaggagtatagaaattttttgtgtgggtggtgggtgtgtgagttagagggaaagatgtagtagttattgtgattggtatgtagttgtgtgtttttgtgtgtatggattttgtgtggtgtgtgtggtgattgtgttgtttttaggagtaagttatgggtttagaggggtaaaatgtttaggttttttgttgggaaggatatattatattttatggtaagttagggtgggtgattttttatggattgggtggaggggggtattttttaggattggtgggtggtttaggggaataatttgtggtggtgatgatttgtatagtgtgggttttgggatgtgtgtggttttgagttagttttgtatagtttgtttttggagttgtgagtttaggtttttatttttgattttttgggttttttttgtattgttgagtttagtttgtggggtgtatttgattaatgtttgatagggttggggaatgtgataggtagtaggtttatttgggtttggggagggggagtttttgttttgatagtatttttttttgttgtttgttggtggatttttatttttagttggtaattgttttgtagtgttgatttaagaaggtaaagaaaattaggtttttttgtaaagagttttttttaaattggtggattttggatattttgagtggatttagaaatttatgtaattttttttttttagtttattttttatttttttttatagttttttttgatttgttgttggtttggggtaagataaagtagttagtagagagtgataataatagtggtgggaaatgaattggagattggttgatagtttttaatattttgttatagatttttttgaatgttttaggttgtttttggtgggttttagtatttgttggttttttgggtattggggattagaaggaatttggtagttggttttaggggtatagttaaaggtaggatgatagttatttttttgtttattttagagtgttgttgtttttttatgttggttgtgtaaagaatatagtttttaaaaaatatgtgttttttgtttatataggtttgaaagtgatgaggaaagtaatgttttgtttattagtgagttttagtttttaaaatgattttaagtgttgttgagatgagaaagtgtggtatntnttnngggggtttttagttttatttgtgtttatggtgtaagtttgtagggataggtttgggatagtattgtttatgttgttagattttttgtagaggattgttgaagttgtttttgt

SEQ ID NO: 521 - DNA, 2244 bp, Artificial Sequence
  chemically treated genomic DNA (Homo sapiens)
  unsure (113, 114, 117, 119): unknown base
atgaaggtagttttagtgattttttgtggaaaatttagtagtgtgggtagtgttgttttgggtttgtttttgtagatttgtattatgggtgtgggtggggttgaggatttttnnggngnatgttatgtttttttattttagtaatgtttgggattattttaaaagttgaaatttgttaataggtgaagtattattttttttattatttttagatttatatgggtagaaggtatgtgttttttaaaagttgtgttttttgtgtgattggtatgagggggtggtagtgttttgagatgagtaggagaatagttgttattttgtttttaattgtatttttaagattagttgttaagttttttttggtttttggtgtttaagaagttggtgggtattaaaatttattagagatagtttgggatatttggggggatttatgataaaatgttaagaattgttagttagtttttagtttattttttgttgttattattattgttttttattggttgttttattttgttttgaattaatagtaaattagagaaaattgtaggagaggatgaaaaataaattaaaggagaaagattatataaatttttaaatttatttaaagtatttggagtttgttgatttgggggaggttttttgtagggaaatttagttttttttatttttttagattaatattgtggggtgattattgattgggaataggaatttattagtagatggtaaaggaaaatgttgttaaagtggaaattttttttttttaagtttgggtgaatttgttgtttgttatattttttagttttgttgggtgttggttgagtgtattttataagttgggtttagtggtgtgaggaaagtttgggggattgggggtggaaatttgagtttgtagttttggaagtgagttgtgtgaggttggtttggaattgtgtgtattttaagatttgtgttatgtaaattattgttattatgaattgtttttttagattgtttgttgattttgaaagatatttttttttatttgatttatgggaagttgtttattttggtttgttatagggtatagtgtgttttttttagtgggggatttggatattttgtttttttgggtttgtggtttgtttttaggggtagtgtagttgttatgtatattgtgtggggtttgtgtgtataaaagtgtgtaattgtgtgttagttgtagtaattattgtatttttttttttagtttgtgtatttgttgtttatataggaggtttttgtgtttttagaataatagagggttgtattttgtagtttggttgttagaggaggtataaagagttgagttggttttagaataatgtaatttgtgtttttatttgtttttttttgtgggttgttagttttttttgtggttgttaggtgtgtataattagtgtttgtttaatgtaaaggtggagtttgtagttggtggtagggatgtattaattaatttgaatttttaattttttagtatttttttttgtgagtgtttagggttttttggagttttggtaaattttggtaaattttagtaaatgttgggattggggtaaggatggttggtgagtaaggtaaagtgttttttattttagtttttttttttatgtttttttaaagtggtgaatgtgatttttttaattttatattttgtttttgttgtaggtagtgatattggagttggtttgagttttttaagtttggttagaaagtttttgtgttaatgttaaggttagagatgggttttaggagtgttgttgtattttggttgttggttttttgtgggggtaaggttgtgtttttagttaatgattaaataagtttgtttatatggtgggtgggagagtagagagtttttttttttttgtagagtaaagttttttaattgtttttgtatagggagattagttagtttggaaaattgaaatgtgttgtttaaaagagatttgaagtgtatggggttttgaataagggtaggttttggtttttgtgggttttggaaagatagggtttttagaggaaaatgtatatttttattttgttttttagtatttgggaagattggaaatagggtaaaggttggtatattgaggggagggtgaatgaaatgggggggggttggttaatgaaagtttagggataaggagagagtaagaaagaaaaagaaaagggagaagggaaagtaggggaagagtggaagagaaagagaaaatggaa

SEQ ID NO: 522 - DNA, 2420 bp, Artificial Sequence
  chemically treated genomic DNA (Homo sapiens)
tttttttttttgggatgagtagggagagtgtgtggaggtttttgatttttttgattataattaagaaagaataatttttaaagtgtttaatatttttgtttttaagttttttaaaatataggggtagggaatattaaaatatttggtttttattaggaagattatggttttgaaaggaaatagtagatatgatattttattttatttggatttatgattaaaaaaataaaaataaaaatttaaagagtttgtttgtattttttttttttaaattttggtttggtttgaaggtagggaatttaaaagattgaggttgatggaagagagttagtggggtgagtgagtgggtagtttttttttttgttttttggagttatttagaaggataggggaagggaaggaagaagaggtgaggaaaaagaggagggagggaagtggaggttaggagtgatggagtaaggaaagtagtttgtaagtgagaaaagagggaaaaaatatagttgtatgaatttagagagattataagttgtatgtaagtagtagtagaaagagtgagagtgtgagtgtgtgttttttttgtggtttggggttagatagtttttagattagtttgaattattttttaagtattgttttgttttttttgttttggttgttttttaatttttttttttttttttttttattttttttttaaaaattaaaataatataagggagggtggtaaaagtttttttaaattggttgatttatttaaagataataataataataataaatatataataatttatattttatggtgggagagatgtgggattaatttttggtatttattttaatatttgatagttagaataaataaatatatatatttatattaatagatatatatagaaaatttggagttaaagtatttggtaagagtggaaaaaaaaagaattaaaaggtaaaataatgattatgagtagtggtggtggtagtggtattagtggtaatagtggtggtggtggtagtagtagtagtagtggtggtagtaatagtaataattatttggtgtttggttttttttagaaattttttgtattattatttttaagaattttagttttaagaattaatagagtttaatttttggaatttgagttttggattttattattgttatgtggtaggggaggatttggtgttagttttttgagatttttattgtttttggttaattaaaagtttttaaagttataagatttttttattggttggtatattttgaggtttttataagtagagtgttttggatttggaggttttggtttgaggtttgaggggtttgaaggtggttttttttttttgggtttaagatgatggtatggtttgttttgttattattatgtgggttttttttttgtgatgttggtgtttttgttgtagtaaagtttggtttttggaattttgagaattaatttgttatttggtgatataagagggggagtgtgttttgtttttttggggtttggggttaatttttttttttttatttataaatttagtagattgagttaaatgtataaaagggagtgagaggtttgaattattgggaaaagtatgttatatatatagtagggttagagaggtgagtaagagaaaaataaaataaaataaatattatagttttttttaattagaatattaggtattatgagaaaaatatttgttaagtagtttttggtgggtttatttgttttatttttatttaggataggggtttttgttgttgttttgggtttttttttttttggtgtggtggtttgggatttttggtttttgtattttgatggtttatggatttttgtttttgattttttgttttttgtaagtttgtggtgttatgtaaattataggattggtattggttggatttttttgtatgtgttttttttttttttatttaattttttaagtgttttaaagatgtattattttaatattaatattattgaaagaagtttaaatttttggttatatgtaataattttagtttttatttttttttttttttttttttttggtgtaatttttttttttttttttggatttttgttgaagtgtgttttttttgtattttagagaaatgtttaaaggatttgttttggtttggtttgtttttttttaggatagtaagtggtgggtttaatttgttattgttgatttttgggaaattttttgttgtaagaaatgtgtgtgtgggggggagggtgggggtggtggggtggtatgtgtgtgttttttataaaattttgtgagttaaatatttgtttgtgttttgtttttttttaaggttttgagatttttgtttttgaggtttgttttaaggttgttgtaaaaaaatttttttagtttgtgtttaagagattagttgg

SEQ ID NO: 523 - DNA, 2420 bp, Artificial Sequence
  chemically treated genomic DNA (Homo sapiens)
ttggttgattttttaaatatagattgaagagatttttttataatgattttgaaatgagttttgaaaataaaaattttaagattttaagagaaaataaaatataaataggtatttggtttatagaattttgtagaaaatatatatatattattttgttatttttatttttttttttatatatatgttttttgtaataagaaattttttaagagttaataataatagattaaatttattatttgttgttttggaaagaaataaattaaattaaaataaattttttgaatatttttttgaagtgtaggagagatatattttagtaaaagtttaagggggaaaaagaaaattgtattaaaggaaaaaaaaaaaaaaaaagtgggggttgggattgttatatatggttaaaaatttaagttttttttaatagtattagtattgaaataatatatttttaaaatgtttgagggattagatagggaaagaaaaggtatgtataaaaaaatttaattgatgttgattttgtgatttatgtaatattataaatttgtaaaaggtaaaaaattagaagtaaaaatttataaattattaaaatatagaaattaaaaattttaagttattatattagaaagaaaaaaatttagaataatagtaaaaatttttgttttaaataaaaataaagtaaatgaatttattgaaaattgtttggtaaatattttttttgtggtgtttaatattttagttggaaagagttgtgatgtttattttattttattttttttttatttgtttttttaattttattatatatataatatattttttttagtggtttaaattttttgtttttttttgtgtatttagtttgatttgttgagtttatgggtaagaaagaaggaattagttttagattttgggaaagtaaagtgtatttttttttttatgttattgaatagtaaattagtttttagaattttagaggttgagttttgttatagtgaaggtgttgatgttatagaggaggagtttatgtgatggtggtggagtaggttatattattgttttgggtttggggagggagagttatttttaggttttttgagttttgaattggaatttttaaatttgagatgttttgtttatgaggattttgaaatatgttggttagtgaaaaaattttgtggttttgagggtttttggttggttaggggtagtaaaaattttggagagttgatattaagtttttttttgttatgtagtagtggtaaagtttgaagtttaaattttgagaattgagttttgttgatttttagaattggggtttttagaagtggtgatgtaagaagtttttaggaaaggttggatattaggtgattattgttgttgttgttgttgttgttgttgttattgttgttgttgttgttgttgttgttggtgttgttgttgttgttgttgtttatgattattattttattttttaattttttttttttttgtttttgttaaatgttttggttttaagttttttatgtgtatttattgatataaatgtatatatttatttattttagttgttaggtgttaaaataaatgttgaagattagttttatgttttttttattataggatatagattgttatgtatttattattattattgttgtttttgagtgaattggttggtttggggaggtttttgttatttttttttgtgttgttttggtttttggaaaggaggtggaggagaggaaggaggggaattagggggtggttggagtagagaggatgagatagtgtttggggggtgatttgggttagtttgggggttgtttggttttagattgtggagaggatgtgtgtttgtgtttttgttttttttgttgttgtttgtgtatggtttgtgatttttttggatttgtgtggttgtgttttttttttttttttttgtttgtaaattgttttttttgttttgttgtttttggtttttgttttttttttttttttttttttttgtttttttttttttttttttttttgtttttttgggtaattttgggaggtaaaaagggaggttgtttgtttgtttgttttgttggtttttttttattggttttggttttttagattttttgtttttgagttgaattgagatttggaaggaaaaaatgtaagtgaattttttgggtttttgtttttgtttttttggttataaatttagatgagatgaagtattgtgtttattatttttttttagagttgtgatttttttaatgagagttgagtgttttggtgttttttgtttttgtgttttggggagtttgggggtggggatgttgaatattttgaaaattatttttttttggttgtagttgagggagttgggaatttttgtgtgttttttttgtttattttgaggagagaga

SEQ ID NO: 524 - DNA, 2344 bp, Artificial Sequence; identical to SEQ ID NO: 502
  chemically treated genomic DNA (Homo sapiens)

SEQ ID NO: 525 - DNA, 2344 bp, Artificial Sequence; identical to SEQ ID NO: 503
  chemically treated genomic DNA (Homo sapiens)

SEQ ID NO: 526 - DNA, 2366 bp, Artificial Sequence
  chemically treated genomic DNA (Homo sapiens)
tttttttttttttttggtagaattgtttgatggttttgattatgtttaggtttattttgatgtagtagtaggtatggttggtttggggtttgggatagtttgttatgtagtagtaatagttttttagggtgttgatttttttatatttggtttttttatataggtggttgaagtgattgaatagattgtttaggagatttattagggtgtgggtagatttgttggtatttattttggtgaagtttatgatatttgtaaataaaatattgatttttttgatttgttgtattttaaaagggtggaaggttataggagttttttggatggaagattttttttttttgtttttggggtttgaggtggtatgttttttgatagaatttttattttttttatttttttgttttattaagttattggttatgatttttggtattatggaatgaattattttttttttgagggttttttttatttttaggttttttttgtgtataatggattgttttattttgaggaaggtgtttttggattttatttgggatatgatgaataggtggattttgatggtgtggatgtagttgtggagtagttttttgtttagtagtttttagtgtagggttttggttttgggtgaggggaagtaggttttattttggaaatggtagttaaaggttttgaaaaggatagagtaggttatttttagatataaatttaggtataaaggtaagtgtatgatggtatagagtaaaaagagtattttgatgtatatggagaagttttttatttgagataagtaagtatttgtgggttgggttgtggttgtaaggttggagttgttgttgtgttttgagataggtgttaagatttggaattgtgtagttagggttagggtgaatattagtagggtgagagttagtgaggtttatgtgtaatgttgggtgtatagtttggtgaaggtaaatagaaagaagtttatatatattaggaggaagtatagtgtgggggtgattatgatgattagtttggattttatgtggattgtaaaatagatgttttatagaaggtaggtgaagttgatgtagaagagtgtatattggaattggtgttgggtttgtgggaagtagtgttttaggtaggttttttttaggtttattgagttgaatttggggttttattagtggttggaggtttttttgaatagttggggtagttttttttgtttgtgtagttggtttttgttgtttatttgttgggggatgtttttggagtttttagagttgttgtagttagaggagatgttgtatttgtagtgtttggggtggttgttggaggatagttgtttggggttgattttgatgtgtatgttgttgttgtttttgttggagttgtagtttattttggtgttgtggtgatgtagtagttgttggtggggtggggaagttatgttgttgagttttggggtttgttttggttggggttattagtatttgttagtaaaatggggagagttagtggtgtttttatttaggtatgtatgtttagaggtttgggatttgtttttgttttaaggggtggttttagtatgtgatttggataggtattatttgtttttgtggtttttggtttagtggtgtttttattgtttttattgtttttatttttgaggtgtatgagaattgtttgggatggatttagaatgtttgggggtttttgttgtgtggttgttgtggttttgggattgttttgtttgtttgttttttgtgttttttgttttgagggtggtttttgtgttgtgtggttttttttttttgtgtgtttgttttttttagttgtggttttggagggaagtttagattttgagtgtttttagttttgtgagttgtttgtgtataaataattttgttggtggtgtggagttttttattttgtaggagttgtgttttgatgtgttaaaggtggtgtgtggttggttttgggtttggattttgatttggagtagtgagttttggtgggtgtttttggtttgtgttttttggttgttttttgtgttttgggttggttttgtttgtggtggtgggtgttgggggtgggggtgttttgggttgtgagtgtgtggagtttgttggtgtggtttgtttagtggggtttgtttttttttgagtgtgttgttgtttttgttgtggttgtagttgttttgggattgagtgtgtggaattatggatgtgggttttttgttgggtggtggtgtagatgttgttgtagagttgggtttttgtgatgttggttgggatgtttgtttgtttgtgtttatgttgggggttgtttttttgagttagagatgtggttgttgttgtgtttgttgt

SEQ ID NO: 527 - DNA, 2366 bp, Artificial Sequence
  chemically treated genomic DNA (Homo sapiens)
gtggtgggtgtggtggtggttgtatttttagtttggggaggtggtttttggtgtgggtgtgggtgggtgggtgttttggttggtgttgtgggagtttggttttgtggtagtgtttgtattgttgtttggtgaggggtttgtgtttgtggttttatgtgtttggttttgggatagttgtggttgtggtgggagtggtggtgtatttggggggaagtaggttttattagatgggttgtgttgatgggttttgtgtatttgtagtttggggtgtttttatttttagtgtttgttgttgtgggtagggttggtttggagtgtggggggtggttggggagtgtgagttgggggtgtttgttgaagtttgttgttttgggttggggtttgggtttggggttggttgtgtgttgtttttgatgtattggagtgtggtttttgtaggatggagggttttgtgttgttagtggagttgtttgtgtgtaggtggtttgtggggttgggagtgtttaaggtttgaatttttttttggagttgtagttggaggaggtgagtgtgtgaggaggagaagttgtgtggtgtggaggttatttttggggtgagaggtgtggaaggtgagtgagtaaagtggttttggagttatggtggttatgtggtggggatttttgggtgttttaggtttgttttgagtggtttttgtgtgttttgaaggtgggggtggtgggggtggtgggagtattgttgagttgggaattataggaatagatggtgtttgtttaggttgtgtgttggagttgttttttaggataggagtaggttttgggtttttaggtgtgtatgtttaggtgggagtgttgttaattttttttgttttgttggtaggtattggtgattttggttggggtaggttttgggatttgataatatggtttttttattttattagtagttgttgtattattatagtattgaggtgagttgtgattttagtggggatagtaatagtgtgtgtgttaagattaattttaagtagttgttttttaatagttattttaagtattgtaaatatagtattttttttagttgtagtagttttggggattttgggggtgttttttggtgagtgggtggtggaggttggttgtgtaggtagaagaagttgttttagttgtttgagagggtttttagttgttggtgggattttaagtttgatttggtgaatttggaggaggtttgtttggagtgttgttttttgtagatttagtgttggttttggtatgtgtttttttatattggttttgtttgttttttgtggagtatttattttgtggtttatatgagatttagattgattgttatggttgtttttgtgttgtgtttttttttggtgtgtgtgggtttttttttgtttatttttattaagttgtatgtttggtattatgtgtggattttgttggtttttattttgttggtgtttgttttgattttggttgtgtagttttaggttttgatgtttgttttaggatgtggtgatagttttaattttatggttatagtttggtttatagatatttgtttattttaagtggggagtttttttatgtgtattgaagtgttttttttgttttatattgttatgtatttatttttgtatttgagtttgtgtttgggggtggtttattttgttttttttgagatttttggttattatttttgggatgaagtttgtttttttttgtttggagttggggttttgtattgggagttgttgagtagggggttgttttatggttgtatttatgttattggggtttatttgtttgttatgttttaggtgaggtttaggagtattttttttaaggtggggtaatttattatgtatgggaaggatttggaagtggaaaaagtttttaaagagaggatgatttattttgtgatgttaagaattatagttgatgatttaatgaagtagggagatgaggagagtgagaattttgttaagaggtatgttattttgagttttaagaataggaagaaaaagttttttatttaaaaagtttttatagttttttgtttttttaagatgtagtagattgaagaagttagtattttatttgtagatattgtgggttttattaagatgagtgttaataagtttgtttatgttttggtgggttttttgaatgatttgtttggttgttttgattgtttgtgtgaggagattaagtgtgagaaaattagtattttgggagattgttattattgtgtggtgggttgttttgagttttgggttgattatgtttattgttgtattgagatgggtttgggtatgattaaggttattgagtagttttgttaggagaagaaggaga

SEQ ID NO: 528 - DNA, 2264 bp, Artificial Sequence; identical to SEQ ID NO: 456
  chemically treated genomic DNA (Homo sapiens)

SEQ ID NO: 529 - DNA, 2264 bp, Artificial Sequence; identical to SEQ ID NO: 457
  chemically treated genomic DNA (Homo sapiens)

SEQ ID NO: 530 - DNA, 1334 bp, Artificial Sequence
  chemically treated genomic DNA (Homo sapiens)
gggtgttttgattttttttttattttgtttttttgggttttatttgtttgtttttggatttttgtttttttttgttttttggttttttagagttttttttttatggtagtagttttttgtgtttttggtgtagttttttagtggatgatttttttgttttggggttgagtttagtttttggatgttgttgaaatttttgagattatgtgtgggtttggttgttgtttttttgttgggtgttattgttattgttgttgtttttgttgttgttgtttgtgggatgtttagtagtttgttgtttggtttttgtgattttgtgttttttggaagttgtttgttgttgtagagttgtatgaattagttatggtgttgtgggagtttttgtggtagtgtagtagttggatattttgtgagggtttttgttggttgttgttgttgtttgttatgttatttattgtagtttgtttggtgaagtttgttgttttttttatttttttaagtgattgttaaatgtttattggttggaattgttttggtaagtttagaatttttgtttttgattttttaattttgtagaagaatatgtgtatttagtatagattagtttattttagtgtgtttttttagttttttattttttattgttttagatttttaatattatttatttttatttagagaaataaggggaattgttgtaggtttgggggtgaggggtggttttgggatgggtagaaagtgtaggtgtagtaggaaatttttgtatgtttgtgtttatattggagttgtgaggattttgagaaatattaaatgggatggttttttgggtttattgttttgaaagagtattaattttaggggaaatattgaaatagaagttttgttattattaaagaaaaaagttttattaggatgaggaagaaataattttatgagaaagaatgagtgagaaagtaataaattaaatggtgattgtaggggaattgttgatttttggtaaaggtgttatgaggttgtattggttttttgttgaagattaggttatatagattttagaggagttgggttttaatagaatttttttttttttttttttttttttttttttttattttttttttttttttattttttttttttttaggtggtaaaagatattggttttgtagtttagatatgtttttttttttgtttttttaagttttaaggtagtataggggagttgagaaaaagaatattttgtgggttttttaggttggagtgggtatgattgaggttggttaggttttatgtaggtgagttgagggtggaatttgattttagtgggtgttgat

SEQ ID NO: 531 - DNA, 1334 bp, Artificial Sequence
  chemically treated genomic DNA (Homo sapiens)
gttagtgtttattgaagttgggttttgtttttggtttgtttatatggagtttgattagttttagttatgtttattttggtttgggagatttgtaaagtgtttttttttttaatttttttgtattattttgaagtttagggaagtaaagagaggggtatatttggattgtaaaattaatgttttttgttgtttaggagagaagggaatgagagagagagagagatagagagagagagagagagagagagagagagaaattttattgaaatttagtttttttagaatttgtgtgatttggtttttaatgggagattagtgtgattttatggtatttttgttaggaattagtgatttttttgtagttattatttgatttattgtttttttgtttatttttttttataaagttattttttttttattttagtaagatttttttttttaatgatgataaagtttttgttttagtgttttttttaggattggtgtttttttaaaatagtgaatttagaaaattattttgtttaatattttttaaaatttttgtagttttaatgtaagtgtaagtatgtaaaggttttttgttatatttgtattttttgtttattttagaattattttttatttttgggtttgtaatagttttttttgtttttttggatagaggtgggtggtattaggggtttagggtagtaggaggtgaggggttgaggaggtgtgttagggtaggttggtttgtgttggatatgtgtgtttttttgtggagttaaagggttggggatgggggttttggatttattagagtaattttagttggtgggtgtttggtagttatttaaggaggtagggaaagtagtgagttttattgggtgggttatgatgagtagtatgatgggtagtagtagtagttagtaaaagtttttgtaaagtgtttagttgttgtattgttgtggggatttttatagtattatgattagtttgtgtaattttgtagtagtaaatggtttttgaggaatataggattgtgggggttgggtagtgggttattgagtattttgtggatggtggtagtagaggtggtggtggtggtagtggtatttggtggggaagtagtagttaaatttgtgtatgattttgagagttttagtaatatttagggattgggtttagttttggagtgagagggttgtttgttgagaagttgtgttggagatgtgggaagttgttgttataaggagggagttttgggaagttggaggataggaggagatgggagtttaggggtagatgagtggagtttgaggaggtagggtggagggagagttaaggtgttt

SEQ ID NO: 532 - DNA, 2501 bp, Artificial Sequence
  chemically treated genomic DNA (Homo sapiens)
tttttgaaaattgttaataaaaatttgttggttttatggtttagggggtattatggaatttgtggatatgtgatgttttttttggatatttggttttaaaatgttttttttttgtattttttttttttattttttaggttagttgatatttagggaaaataggaaaggatttatgtgaaatattgggggttgaattttttttgataataagttttttaaaaaagatttttaaatgaaatttttttgttttttaatttttatttttgttttgggggtatatgtgaaggtttgttatataagtaaatttgtgtttttggtgtttgttgtatagaatattttattatttaggtattatgttgagtatttaatagtttttttttttgtttttttttttttttttattttgtattttggagttaattatagtgtttgttgtttttttgtttgtgttataagtttttattatttagtttttatttataagtgagaatatttagtatttggatttttgtttttgtattagtttgttaaggataatagtttttagttttatttatgttttataaaagatatgatttagttttttttaatggttgtattaaatgaagttttaaagatataatataaatattaattttttttttattataaaaattttttgttgaatttgattatatttaaattaatgagttttgttttatgaaagattttttggataaatttgatagttgatggaataggagaagttgtttgttatgtttaaagttaataagagattaatatttagaataaatggagatttgtaaattaatagaaagtaggtagtaaagttaaagaaaatagtttaaggtatagttattaaaaggaatgtgattatgttttttgtagggatatgggtggagttggaagttgttagttttagtaaatttatataggaatagaaaattagtgagattgtatggttttatttataagtgggagttgaataatgagaatatatggttatatggtggtgattaatatatattggtgtttgttgagtggggtgttggggagggagagtattaggaagaatagttaagggatattgggtttaatatttgggtgatgggatgatttgtatagtaaattattatggtgtatatatttatgtaataaatttgtatattttttatatgtattttagaattttaaataaaagttggatggttaggtgtggtggtttatgtttgtaattttagtatttttgggaagttgaggtgtgtagattatttaaggttaggagtttgagattagtttggttaatatggtgaaattttgtttttattaaaaatataaaaattagttagatgtggtatgttatttataattttatttatttgggaggttgaagtagaattgtttgaatttgagagtggaggttgtagtgagttgttgagattgtgttattgtattttagtttgggttatagtgtgagattatgttataaaataaaataaaataatataaaataaaataaaataaaataaaataaaataaaataaaataaaataaaataaaaaaataaaataaaataaaataaaataaaataaagtaatttttttttttttaagtggtttttattttttttttttgttttgtgaagtgggtgtgtaagttttgggattgtagtggttttagggaatttttttttgtgatgttttggtgtgttagtttgttgtgtatattttgttgtggttttttttttgttgtttgtttattttttaggttttgttgggatttgggaaagagggaaaggtttttttggttagttgtgtggtgattttggggattttagggtgtttttttgtggttgatgtttggggtgtagtggttgttggggttggggttggtgggagtttgtgggattttttagaagagtggttggtgttgtgatttagtattggggtggagtggggtgggattatttttataaggtttggaggttgtgaggttttgttggagttttgttgttgtagtttttgttattagtgagtatgtgtggtttgtgtttttggggatggggtttagagtttttagtatggggttaatttgtagtattaggtttgggtttttggtaggttttttgtttattttgagatttgggatgggggtttaggggatttaggatgtttttagtgttgttagtggtttttagggggtttggagtgttttggggagggatgggattttgggggtggggagggggggtagattgtgtttattgtgttttggtatttttttttgggttttagtaaatttttttttgtttgttgtagtgttgttttatattgtggtttattttttagtttgaggtaggagtatgtgtttggtagggaagggaggtaggggttggggttgtagtttatagttttttgtttatttggagagatttgaatttttttatttttttgttgtgtggtttttattttgggttttttttttgttttttgttttttttg

SEQ ID NO: 533 - DNA, 2501 bp, Artificial Sequence
  chemically treated genomic DNA (Homo sapiens)
tgggagaggtggggaataggaaggaggtttggggtaaaagttatatgatggagggataagggggtttggatttttttgggtgggtgaggggttgtgggttgtagttttagtttttgttttttttttttgttagatatatgtttttattttgaattgggaaatagattatggtgtagggtggtattgtagtgaataaagaaaagtttgttggagtttgggggaggatgttaaggtgtggtgagtgtagtttgttttttttttttgtttttggggttttatttttttttgaggtgttttgggttttttgaaagttgttaatggtattggggatgttttgggttttttaggtttttgttttgggttttgaggtgggtgaggagtttgttgggagtttgggtttgatgttgtgggttggttttatgttgggagttttgagttttatttttggggatgtgggttgtgtgtatttattggtggtgaagattgtggtggtgaaattttagtgaagttttgtggtttttgagttttataagggtggttttgttttgttttgttttagtgttgagttatggtgttggttgtttttttggagggttttgtggatttttgttggttttagttttggtggttgttgtattttgggtgttggttgtagaggggtgttttggagtttttggagttgttgtgtagttggttggggaagttttttttttttttttaggttttagtggggtttagggagtaaatagatagtaggaagaggattgtagtgaagtgtgtgtagtgaattggtgtgttgggatattgtggggggaaattttttaagattgttgtgattttggagtttgtatatttgttttatagggtaggggagaggggtggaggttgtttagaggaaaggaaattgttttattttattttattttattttattttatttttttattttattttattttattttattttattttattttattttattttattttgtgttattttattttattttatgatgtagttttatgttgtggtttaggttggagtgtagtggtgtgattttggtggtttattgtaatttttgtttttgggtttaagtaattttgttttagttttttgagtaggtggaattataggtggtgtgttatatttggttgatttttgtatttttagtagagatggggttttattatgttggttgggttggttttgaatttttgattttaggtgatttgtatgttttggttttttaagagtgttgggattataggtgtgagttattatgtttggttgtttaatttttatttgaagttttggggtatatgtagaggatgtgtaggtttgttatataggtgtgtgtgttatgatggtttgttgtatagattattttattatttaggtattaagtttagtattttttagttattttttttggtattttttttttttagtattttgtttaataggtattagtgtgtgttgattgttgttatgtgattatgtgtttttattgtttagtttttatttataagtgagattatgtggttttgttggttttttgtttttgtgtgagtttgttgaggttaatggtttttagttttatttatgtttttgtaaaggatatgattatgttttttttagtggttgtgttttaggttattttttttggttttgttgtttattttttgttgatttgtagatttttatttattttagatattgattttttgttggttttagatatgatagatagttttttttattttattaattgttaagtttgtttaaggagttttttatgaaataaaatttgttaatttaagtgtaattaaatttagtaagggatttttgtggtggggaagaggttggtgtttatgttgtatttttaaaattttatttaatgtagttattaaaaagaattagattatgttttttgtgggatatggatggagttagaggttattatttttagtaaattaatgtaggaatagaaatttaaatattggatgtttttatttgtaagtgggagttaaatgatgagaatttataatataaataaggaaataatagatattgtggttgattttagggtgtaggatgggaggaaggagaggagtagaaaagagaattattgggtatttggtataatatttgggtgatgaaatattttgtataataaatattgaagatatgagtttatttatgtaataaatttttatatgtatttttaaaatagaaataaaagttaaaaaataaagaaattttatttaaaagttttttttaagagatttattattgggggaaatttagtttttaatattttatgtgggtttttttttattttttttaagtgttggttggtttgagaaataaagggaaagagtataaaagagagatattttaaagttgggtgtttaggggagatattatatgtttgtaggttttgtgatgttttttgagttgtaaaattagtgagtttttattagtaatttttaaaga

SEQ ID NO: 534 - DNA, 2327 bp, Artificial Sequence
  chemically treated genomic DNA (Homo sapiens)
ttttttattttttttattgttatttttgtttttgggttattgtttttttttgtaagttttgtttgttggattttgttgtttttgtgtggttgttttattatttatgtttgattggaggaaataaaattggtgttggttttttaattttaagttttgtgtttgattgggggaggggttatttaggtatttttttttttaaatagaagaaatttaggtattaattgtaaatattttgttgttttttttgaaagtatgtattatattagttgaggttttggagatatatggtttattatttatttttagtttttaggtaaagaattttatggagatttattagtaaaattagattttttaagggaaattattaggatgtttttagattttttttaagggatattattggttgttgattatatttgagtatatttttttttagtttatttttattattttattttgggattattttaaggaaattagttatttgtagaaagtttgaaattttgaaaggagaggtataatttagggtaaaagagattgagtgaagttttttagattgattgtttttattggggttattttttataaggttgggagtggagaggagtgtttgtagaagagagattatttttaaaggggtttttttgaatttaggaggtgagggggattttttagagttgttattatttgtaggtggatttgttattattatgtagtgttttttggggagttagtttgttttttttagagttttttttaggtattgttttagagtttaggggagtttttagtgttttttttgtttgttttgagggtattgtatgtataaaagtttttttatgtgtgtgtgtatatatagatatttagtgggtttggagtgtatttttgtttatttgttattatgtggtaaattttagatttggaagttattattatgtgggtgtgtattaggatttaggggagattgtgtggggttgggattgtgtataaatataggggttgtatggaagttttgtatattttaaagtgtaatttgagtttttgtggttttagttttatttaaaatatgtaaatttttgaaattgaaaaatttgaaaaatttttgaagagttttatttgaataaatttaaatttattgggagttgttttgaggagataaaatgtatagtgatttggggtgagggatatttgtggggaggtaggatgtgttggattgggtttttagggttaaggtgtttttgggtttttgatgatagttttagtgtagagtagggaagtggtattgttaggtagtaagtttagttgttttatttttgtgatttatgagttagttttgaggttttggttttagggtttagtttttatttatgttgtgtttttgagagtttaatattgtgtttggtatatggtaggtgtttattgaatagttgtggtatgaatgaatgaatgaatgaatgaatgaatgaatgaatgaatataagtttaatgggggaaatttgggttttttaataaaggtaggggttgggggatatttaggggtttttttaggaggatttttttttttattattttatttttgggagaaaggtttatgtaggatggttgttttttttttgttgagagttttgtttttagtttatttgggttgttggaaaagaggagaagaataaataagagataagtaattatttttttattggtgttttgtttttgtttttattgttaaatttattttaaagttgaggatggtgagattgtgaagttgtaaagaaatatagagtttatttttttaaagaattatgatatatttaaagtttgttttttttaggtttttttttttggtttttgtttttttttttttttggttttttgtttttgattgaattttatgggatagagaattttttgttttttatgaggtaaggtgtgaatttgtagagatttggggtgttttttggttttttgtgttgttttggaggtgtttatagaggtttttgttgttaaggatagtaattgttttatttttgatggttgtttgttaggtttgtgggttgtgggtttatttagttgttgaattttttagttgttattagtgttgtttttaatttaatggaataatgtaaattatagtttgtttagttgatatgtttttgtgaatgtgttggggttgagttttggttagttgtttttttgatgttttggatggttggagggaatgaagttttgaattgtgataaaagtggggggggggtattttaaatttttaaagtaatgtttttttttttttttttttttttaagtaattgagttttattaaatgttgg

SEQ ID NO: 535 - DNA, 2327 bp, Artificial Sequence
  chemically treated genomic DNA (Homo sapiens)
ttgatatttggtaaggtttaattgtttaagaaaaaagaaaaaaaaaagaatattgttttgagaatttggggtgttttttttttatttttgttataatttagagttttattttttttggttgtttaggatgttgagagagtggttggttagagtttagttttggtgtatttgtagggatgtgttagttgggtaggttataatttgtattattttattaagttaggagtagtgttgataatgattggaaagtttgatggttgggtgggtttgtgatttgtaggtttggtgagtaattattgaaaataaaataattgttgtttttggtggtaaaggtttttatggatgtttttagggtagtgtagggaattaaagggtattttagatttttgtgggtttgtgttttgttttgtgggggataggaggttttttgttttatgaggtttagttaaggataaggagttgggaggggaaaggggtaggagttaaggagagaaatttgaaagaggtaaattttaaatatattgtaattttttaagggggtgggttttgtgtttttttgtaattttatagttttattatttttggttttggagtggatttggtagtgaggataaggatggaatgttggtaggggagtagttgtttgttttttgtttatttttttttttttttttagtggtttagataggttgaaggtaaaatttttagtaagggggaagtgattattttgtgtggattttttttttaggggtgggatgatgaaaaaagaaatttttttggggaagtttttaggtattttttagtttttatttttattaggaggtttgggttttttttattaaatttatatttatttatttatttatttatttatttgtttatttatttatattatgattatttagtgagtatttattatgtgttagatatagtattagatttttaaaaatgtggtataaatggaaattaggttttgaagttagagttttaggattggtttatgggttataaaagtagagtaattgagtttgttgtttagtggtgttatttttttgttttgtgttaaggttattgttgaaggtttagagatattttgattttggaaatttaatttagtatgttttgtttttttataaatattttttattttaaattgttgtgtgttttgtttttttaaagtgatttttaatggatttggatttatttagatagaattttttggaagttttttagattttttaattttaagaatttgtatgttttaagtgaagttgaaattgtgaaggtttaggttatattttaaaatatgtaaggtttttgtgtggtttttgtgtttgtgtgtagttttaattttatatagttttttttggattttgatgtgtgtttgtatagtgatgatttttaaatttggggtttattatgtggtgataaataaataggggtatattttaaatttgttggatgtttatgtgtgtgtgtgtgtgtgaaggagtttttgtatatgtaatatttttagggtaaatggagaaagtgttaaaggtttttttgaattttgggatagtatttgagggggattttggggagaataggttggttttttaggagatattatatagtgatgataaatttatttataggtggtgataattttaggaagttttttttattttttgagtttgggagagtttttttaaaggtagttttttttttgtagatatttttttttatttttgattttatgaaaagtggttttagtggagataattaatttgaaaagttttatttggttttttttattttaggttgtgtttttttttttgggattttaagttttttgtaaatggttaatttttttagggtgattttaaaataaaatggtaggggtgggttagagaagagtgtgtttaagtgtaattgataattagtaatattttttgaagagagtttgaagatgttttggtaattttttttaagaaatttggttttattggtggatttttatagaattttttgtttagaggttggaaatgagtaataggttgtgtgtttttaaggttttggttaatatgatatatatttttaagaagagtaatggggtgtttataattagtatttaaattttttttgtttgaaaaaaaaaatatttaaataattttttttttaattaagtatgaagtttggaattaaaaagttaatgttaattttattttttttagttaagtgtgagtgatggggtggttgtgtaagggtaatggagtttagtggataaagtttgtagagaggggtagtggtttggaggtaagggtggtggtggggggggtgggggg

SEQ ID NO: 536 - DNA, 24 bp, Artificial Sequence
  Detection primer for
ttggagttaaagtatttggtaaga

SEQ ID NO: 537 - DNA, 18 bp, Artificial Sequence
  Detection primer for
aaaaccaccttcaaaccc

SEQ ID NO: 538 - DNA, 22 bp, Artificial Sequence
  Detection primer for
atcctccacactcttcctctat

SEQ ID NO: 539 - DNA, 22 bp, Artificial Sequence
  Detection primer for
gaaattaggtttggttttgttt

SEQ ID NO: 540 - DNA, 19 bp, Artificial Sequence
  Detection primer for
gagattttgggaggggtag

SEQ ID NO: 541 - DNA, 22 bp, Artificial Sequence
  Detection primer for
aactctatccttttccctcttc

SEQ ID NO: 542 - DNA, 20 bp, Artificial Sequence
  Detection primer for
tgttggttgttgttgttgtt

SEQ ID NO: 543 - DNA, 19 bp, Artificial Sequence
  Detection primer for
ctttctacccatcccaaaa

SEQ ID NO: 544 - DNA, 22 bp, Artificial Sequence
  Detection primer for
taagtgataaaggaaggaagga

SEQ ID NO: 545 - DNA, 18 bp, Artificial Sequence
  Detection primer for
ccttcaaaccccaaacaa

SEQ ID NO: 546 - DNA, 22 bp, Artificial Sequence
  Detection primer for
ttgttgtttttaggggttttgg

SEQ ID NO: 547 - DNA, 22 bp, Artificial Sequence
  Detection primer for
tccttcccattctccaaatatc

SEQ ID NO: 548 - DNA, 22 bp, Artificial Sequence
  Detection primer for
tcaactaccatcaacttcctta

SEQ ID NO: 549 - DNA, 25 bp, Artificial Sequence
  Detection primer for
aatttatttttagtgttgtagtggg

SEQ ID NO: 550 - DNA, 21 bp, Artificial Sequence
  Detection primer for
gaaaggagaggttaaaggttg

SEQ ID NO: 551 - DNA, 21 bp, Artificial Sequence
  Detection primer for
aactcacttaactccaatccc

SEQ ID NO: 552 - DNA, 22 bp, Artificial Sequence
  Detection primer for
ggataggagttgggattaagat

SEQ ID NO: 553 - DNA, 22 bp, Artificial Sequence
  Detection primer for
aaatctttttcaacaccaaaat

SEQ ID NO: 554 - DNA, 23 bp, Artificial Sequence
  Detection primer for
tccaataaacacaaacctaaatc

SEQ ID NO: 555 - DNA, 22 bp, Artificial Sequence
  Detection primer for
atatgggattgatggaagatag

SEQ ID NO: 556 - DNA, 21 bp, Artificial Sequence
  Detection primer for
ggaagaggtgattaaatggat

SEQ ID NO: 557 - DNA, 19 bp, Artificial Sequence
  Detection primer for
cccaaaaatcaaacaacaa

SEQ ID NO: 558 - DNA, 19 bp, Artificial Sequence
  Detection primer for
atttgggaaagagggaaag

SEQ ID NO: 559 - DNA, 21 bp, Artificial Sequence
  Detection primer for
taaaaactctaaaccccatcc

SEQ ID NO: 560 - DNA, 19 bp, Artificial Sequence
  Detection primer for
ccctacccaccaatatacc

SEQ ID NO: 561 - DNA, 21 bp, Artificial Sequence
  Detection primer for
agatttggggaagaagttgta

SEQ ID NO: 562 - DNA, 22 bp, Artificial Sequence
  Detection primer for
taaaagaaggatttttgattgg

SEQ ID NO: 563 - DNA, 21 bp, Artificial Sequence
  Detection primer for
catcttatttacctccctccc

SEQ ID NO: 564 - DNA, 22 bp, Artificial Sequence
  Detection primer for
ttttagattgaggttttagggt

SEQ ID NO: 565 - DNA, 22 bp, Artificial Sequence
  Detection primer for
atccattctacctcctttttct

SEQ ID NO: 566 - DNA, 22 bp, Artificial Sequence
  Detection primer for
gtaatttgaagaaagttgaggg

SEQ ID NO: 567 - DNA, 22 bp, Artificial Sequence
  Detection primer for
ccaacaactaaacaaaacctct

SEQ ID NO: 568 - DNA, 24 bp, Artificial Sequence
  Detection primer for
agtaaatagtgggtgagttatgaa

SEQ ID NO: 569 - DNA, 25 bp, Artificial Sequence
  Detection primer for
gaaaaacctctaaaaactactctcc

SEQ ID NO: 570 - DNA, 22 bp, Artificial Sequence
  Detection primer for
gttagtatgtttgggggtaaat

SEQ ID NO: 571 - DNA, 22 bp, Artificial Sequence
  Detection primer for
ataaataacaccttccacccta

SEQ ID NO: 572 - DNA, 22 bp, Artificial Sequence
  Detection primer for
tttgtattaggttggaagtggt

SEQ ID NO: 573 - DNA, 22 bp, Artificial Sequence
  Detection primer for
cccaaataaatcaacaacaaca

SEQ ID NO: 574 - DNA, 21 bp, Artificial Sequence
  Detection primer for
ttgtttgggttaataaatgga

SEQ ID NO: 575 - DNA, 20 bp, Artificial Sequence
  Detection primer for
cttctctcttctcccctctc

SEQ ID NO: 576 - DNA, 22 bp, Artificial Sequence
  Detection primer for
aatatagggaggtttagggttt

SEQ ID NO: 577 - DNA, 22 bp, Artificial Sequence
  Detection primer for
taaccatacatttctcatccaa

SEQ ID NO: 578 - DNA, 20 bp, Artificial Sequence
  Detection primer for
ttttggggaatatagggttt

SEQ ID NO: 579 - DNA, 23 bp, Artificial Sequence
  Detection primer for
ttctcacatttctaaccacttct

SEQ ID NO: 580 - DNA, 19 bp, Artificial Sequence
  Detection primer for
ctcctccttccaacaaaaa

SEQ ID NO: 581 - DNA, 22 bp, Artificial Sequence
  Detection primer for
gtttagaggttttgggatgatt

SEQ ID NO: 582 - DNA, 25 bp, Artificial Sequence
  Detection primer for
tgaatagggtgatattttagttagg

SEQ ID NO: 583 - DNA, 22 bp, Artificial Sequence
  Detection primer for
ataaatcatcccaaaacctcta

SEQ ID NO: 584 - DNA, 22 bp, Artificial Sequence
  Detection primer for
atttggttattggttgaaggta

SEQ ID NO: 585 - DNA, 24 bp, Artificial Sequence
  Detection primer for
aatttttaatttctcaacacctct

SEQ ID NO: 586 - DNA, 23 bp, Artificial Sequence
  Detection primer for
gaagaggtgttgagaaattaaaa

SEQ ID NO: 587 - DNA, 21 bp, Artificial Sequence
  Detection primer for
cccaccctaacttaccataaa

SEQ ID NO: 588 - DNA, 22 bp, Artificial Sequence
  Detection primer for
caattccccttatttctctaaa

SEQ ID NO: 589 - DNA, 22 bp, Artificial Sequence
  Detection primer for
aattagttatggtgttgtggga

SEQ ID NO: 590 - DNA, 22 bp, Artificial Sequence
  Detection primer for
ttctattaaaacccaactcctc

SEQ ID NO: 591 - DNA, 22 bp, Artificial Sequence
  Detection primer for
ataaggggaattgttgtaggtt

SEQ ID NO: 592 - DNA, 22 bp, Artificial Sequence
  Detection primer for
taccattctttcctaaacatcc

SEQ ID NO: 593 - DNA, 18 bp, Artificial Sequence
  Detection primer for
gggttggtggagaggtag

SEQ ID NO: 594 - DNA, 21 bp, Artificial Sequence
  Detection primer for
gaagatgagaggaggttgaga

SEQ ID NO: 595 - DNA, 21 bp, Artificial Sequence
  Detection primer for
ccacaccacctactacaaaat

SEQ ID NO: 596 - DNA, 20 bp, Artificial Sequence
  Detection primer for
aacaaacctcctccaaattc

SEQ ID NO: 597 - DNA, 21 bp, Artificial Sequence
  Detection primer for
tgttggtaggtattggtgatt

SEQ ID NO: 598 - DNA, 22 bp, Artificial Sequence
  Detection primer for
tccccacttaaaataaacaaat

SEQ ID NO: 599 - DNA, 19 bp, Artificial Sequence
  Detection primer for
gtgaatttggaggaggttt

SEQ ID NO: 600 - DNA, 22 bp, Artificial Sequence
  Detection primer for
ggggttgatattgtttttagag

SEQ ID NO: 601 - DNA, 19 bp, Artificial Sequence
  Detection primer for
cccctccttccttaaatct

SEQ ID NO: 602 - DNA, 21 bp, Artificial Sequence
  Detection primer for
ttttagaaggggttggtttag

SEQ ID NO: 603 - DNA, 21 bp, Artificial Sequence
  Detection primer for
actacctaactctccccacaa

SEQ ID NO: 604 - DNA, 21 bp, Artificial Sequence
  Detection primer for
ttgtggggagagttaggtagt

SEQ ID NO: 605 - DNA, 22 bp, Artificial Sequence
  Detection primer for
taacccaaatatcataaaaccc

SEQ ID NO: 606 - DNA, 22 bp, Artificial Sequence
  Detection primer for
agatggatattttgttggtgtt

SEQ ID NO: 607 - DNA, 25 bp, Artificial Sequence
  Detection primer for
tacacaattatacctttcaaacaat

SEQ ID NO: 608 - DNA, 25 bp, Artificial Sequence
  Detection primer for
ccatacaaatatcctaaataaaacc

SEQ ID NO: 609 - DNA, 23 bp, Artificial Sequence
  Detection primer for
ttgttggaagaattgatagtgtt

SEQ ID NO: 610 - DNA, 22 bp, Artificial Sequence
  Detection primer for
agggagttaagtaaggggttag

SEQ ID NO: 611 - DNA, 22 bp, Artificial Sequence
  Detection primer for
aacaccaacaaaatatccatct

SEQ ID NO: 612 - DNA, 22 bp, Artificial Sequence
  Detection primer for
tggaattttagggttagtaggg

SEQ ID NO: 613 - DNA, 22 bp, Artificial Sequence
  Detection primer for
caaataaaccaaaccactatca

SEQ ID NO: 614 - DNA, 20 bp, Artificial Sequence
  Detection primer for
ttgggatttttaggtggttt

SEQ ID NO: 615 - DNA, 22 bp, Artificial Sequence
  Detection primer for
ttcactttccctactaacccta

SEQ ID NO: 616 - DNA, 22 bp, Artificial Sequence
  Detection primer for
tgggttatttggtgagtattgt

SEQ ID NO: 617 - DNA, 18 bp, Artificial Sequence
  Detection primer for
cttacccccacccaacta

SEQ ID NO: 618 - DNA, 23 bp, Artificial Sequence
  Detection primer for
ttcacattacattaacccattta

SEQ ID NO: 619 - DNA, 22 bp, Artificial Sequence
  Detection primer for
ttggagttgttaggagaaaagt

SEQ ID NO: 620 - DNA, 22 bp, Artificial Sequence
  Detection primer for
ccttccttaaaaacctcaaaac

SEQ ID NO: 621 - DNA, 24 bp, Artificial Sequence
  Detection primer for
gtaaagaatggtagaggataggat

SEQ ID NO: 622 - DNA, 22 bp, Artificial Sequence
  Detection primer for
cttactacccaacctctttcac

SEQ ID NO: 623 - DNA, 22 bp, Artificial Sequence
  Detection primer for
tggaaggatagagaattttgtt

SEQ ID NO: 624 - DNA, 22 bp, Artificial Sequence
  Detection primer for
atcccatctctcaactcctact

SEQ ID NO: 625 - DNA, 22 bp, Artificial Sequence
  Detection primer for
tgatttattttgatgtgtggtt

SEQ ID NO: 626 - DNA, 22 bp, Artificial Sequence
  Detection primer for
tatttaaggattttggaaggag

SEQ ID NO: 627 - DNA, 24 bp, Artificial Sequence
  Detection primer for
tcatctcattttatctctacaacc

SEQ ID NO: 628 - DNA, 19 bp, Artificial Sequence
  Detection primer for
aacaaattcccaacacacc

SEQ ID NO: 629 - DNA, 22 bp, Artificial Sequence
  Detection primer for
ttttggaagatggtttattttt

SEQ ID NO: 630 - DNA, 22 bp, Artificial Sequence
  Detection primer for
tttttaatatggaggtaaggga

SEQ ID NO: 631 - DNA, 19 bp, Artificial Sequence
  Detection primer for
aaattcccaacacaccaac

SEQ ID NO: 632 - DNA, 21 bp, Artificial Sequence
  Detection primer for
cttctccaaaatcaaccaact

SEQ ID NO: 633 - DNA, 24 bp, Artificial Sequence
  Detection primer for
tttgtgttattagtaggtgagagg

SEQ ID NO: 634 - DNA, 21 bp, Artificial Sequence
  Detection primer for
ttagaagttggagggtgaaat

SEQ ID NO: 635 - DNA, 22 bp, Artificial Sequence
  Detection primer for
cttcctaccttaaacccttacc

SEQ ID NO: 636 - DNA, 23 bp, Artificial Sequence
  Detection primer for
tctaactcctcacaaattcctaa

SEQ ID NO: 637 - DNA, 21 bp, Artificial Sequence
  Detection primer for
gtagtgtaatagggaaagggg

SEQ ID NO: 638 - DNA, 22 bp, Artificial Sequence
  Detection primer for
taaaattccctcttaccctaaa

SEQ ID NO: 639 - DNA, 22 bp, Artificial Sequence
  Detection primer for
tagtaaggattgtagaaggggg

SEQ ID NO: 640 - DNA, 22 bp, Artificial Sequence
  Detection primer for
tagtaaggattgtagaaggggg

SEQ ID NO: 641 - DNA, 21 bp, Artificial Sequence
  Detection primer for
cctcaaaccctaaaaataacc

SEQ ID NO: 642 - DNA, 22 bp, Artificial Sequence
  Detection primer for
ggagaggagtgtttgtagaaga

SEQ ID NO: 643 - DNA, 21 bp, Artificial Sequence
  Detection primer for
caatctcccctaaatcctaat

SEQ ID NO: 644 - DNA, 22 bp, Artificial Sequence
  Detection primer for
tagtagtttgaagaaggggaag

SEQ ID NO: 645 - DNA, 23 bp, Artificial Sequence
  Detection primer for
aaacattcctaaaatcacaaaaa

SEQ ID NO: 646 - DNA, 24 bp, Artificial Sequence
  Detection primer for
tttatttgggtatgattaggtttt

SEQ ID NO: 647 - DNA, 19 bp, Artificial Sequence
  Detection primer for
actaaaaacaccaccccct

SEQ ID NO: 648 - DNA, 23 bp, Artificial Sequence
  Detection primer for
acaaaccaaaatcttacttccta

SEQ ID NO: 649 - DNA, 19 bp, Artificial Sequence
  Detection primer for
gaatggaggggaaatgtta

SEQ ID NO: 650 - DNA, 22 bp, Artificial Sequence
  Detection primer for
aaaactcctcccctctataaat

SEQ ID NO: 651 - DNA, 21 bp, Artificial Sequence
  Detection primer for
ttggagagatgtgttggttag

SEQ ID NO: 652 - DNA, 22 bp, Artificial Sequence
  Detection primer for
aatcctaaccaacacatctctc

SEQ ID NO: 653 - DNA, 22 bp, Artificial Sequence
  Detection primer for
aggggattttaaggtgattagt

SEQ ID NO: 654 - DNA, 21 bp, Artificial Sequence
  Detection primer for
ctccccatccatcttatttta

SEQ ID NO: 655 - DNA, 22 bp, Artificial Sequence
  Detection primer for
attgtttgggtgatagtgaagt

SEQ ID NO: 656 - DNA, 22 bp, Artificial Sequence
  Detection primer for
taagtttttggaggaagagttt

SEQ ID NO: 657 - DNA, 22 bp, Artificial Sequence
  Detection primer for
aaaatactccctataattcccc

SEQ ID NO: 658 - DNA, 23 bp, Artificial Sequence
  Detection primer for
tttctctaaccaaacacctaaaa

SEQ ID NO: 659 - DNA, 22 bp, Artificial Sequence
  Detection primer for
agaaattagtagaggagggagg

SEQ ID NO: 660 - DNA, 22 bp, Artificial Sequence
  Detection primer for
atctaatccctctcctaactcc

SEQ ID NO: 661 - DNA, 22 bp, Artificial Sequence
  Detection primer for
tttgttttggaatttaggtttt

SEQ ID NO: 662 - DNA, 23 bp, Artificial Sequence
  Detection primer for
tccacaaaactctcctactaaaa

SEQ ID NO: 663 - DNA, 21 bp, Artificial Sequence
  Detection primer for
ggaaggttgggtagatatagg

SEQ ID NO: 664 - DNA, 23 bp, Artificial Sequence
  Detection primer for
ttggtagagttgaaaggagatag

SEQ ID NO: 665 - DNA, 22 bp, Artificial Sequence
  Detection primer for
aaaaacattccctaaaaattcc

SEQ ID NO: 666 - DNA, 22 bp, Artificial Sequence
  Detection primer for
atagaatggttagggggtattt

SEQ ID NO: 667 - DNA, 22 bp, Artificial Sequence
  Detection primer for
tacaaatatcaacctctctccc

SEQ ID NO: 668 - DNA, 22 bp, Artificial Sequence
  Detection primer for
ggtggggtataatagtagggat

SEQ ID NO: 669 - DNA, 22 bp, Artificial Sequence
  Detection primer for
cttcccctctttcattttattt

SEQ ID NO: 670 - DNA, 22 bp, Artificial Sequence
  Detection primer for
gaggaattggtattgaaagaaa

SEQ ID NO: 671 - DNA, 21 bp, Artificial Sequence
  Detection primer for
ctaatccaccctccataaaac

SEQ ID NO: 672 - DNA, 22 bp, Artificial Sequence
  Detection primer for
ctccaattctcctccctatatc

SEQ ID NO: 673 - DNA, 20 bp, Artificial Sequence
  Detection primer for
taatttttgaggttgggaaa

SEQ ID NO: 674 - DNA, 17 bp, Artificial Sequence
  chemically treated genomic DNA (Homo sapiens)
gtatgtagttgtgtgtt

SEQ ID NO: 675 - DNA, 18 bp, Artificial Sequence
  chemically treated genomic DNA (Homo sapiens)
tttgagtattcgtaggaa

SEQ ID NO: 676 - DNA, 18 bp, Artificial Sequence
  chemically treated genomic DNA (Homo sapiens)
tattagtggtaatagtgg

SEQ ID NO: 677 - DNA, 17 bp, Artificial Sequence
  chemically treated genomic DNA (Homo sapiens)
tgtgtagtaggtggttt

SEQ ID NO: 678 - DNA, 17 bp, Artificial Sequence
  chemically treated genomic DNA (Homo sapiens)
agtttgatttggtgaat

SEQ ID NO: 679 - DNA, 18 bp, Artificial Sequence
  chemically treated genomic DNA (Homo sapiens)
tacgttgtttggacgaat

SEQ ID NO: 680 - DNA, 16 bp, Artificial Sequence
  chemically treated genomic DNA (Homo sapiens)
gtcggatttcggaagt

SEQ ID NO: 681 - DNA, 17 bp, Artificial Sequence
  chemically treated genomic DNA (Homo sapiens)
tggacgtaggaaagcga

SEQ ID NO: 682 - DNA, 17 bp, Artificial Sequence
  chemically treated genomic DNA (Homo sapiens)
gatgtaggaaagtgaga

SEQ ID NO: 683 - DNA, 20 bp, Artificial Sequence
  chemically treated genomic DNA (Homo sapiens)
atttacgggagttttatcgt

SEQ ID NO: 684 - DNA, 20 bp, Artificial Sequence
  chemically treated genomic DNA (Homo sapiens)
atttatgggagttttattgt

SEQ ID NO: 685 - DNA, 17 bp, Artificial Sequence
  chemically treated genomic DNA (Homo sapiens)
attagttcgggtcgcgt

SEQ ID NO: 686 - DNA, 17 bp, Artificial Sequence
  chemically treated genomic DNA (Homo sapiens)
attagtttgggttgtgt

SEQ ID NO: 687 - DNA, 18 bp, Artificial Sequence
  chemically treated genomic DNA (Homo sapiens)
tatacgaaagggaggcgg

SEQ ID NO: 688 - DNA, 18 bp, Artificial Sequence
  chemically treated genomic DNA (Homo sapiens)
tatatgaaagggaggtgg

SEQ ID NO: 689 - DNA, 18 bp, Artificial Sequence
  chemically treated genomic DNA (Homo sapiens)
ggcgtgtcgttagtttta

SEQ ID NO: 690 - DNA, 20 bp, Artificial Sequence
  chemically treated genomic DNA (Homo sapiens)
ggtgtgttgttagttttata

SEQ ID NO: 691 - DNA, 18 bp, Artificial Sequence
  chemically treated genomic DNA (Homo sapiens)
ttcgattgacgttagcga

SEQ ID NO: 692 - DNA, 18 bp, Artificial Sequence
  chemically treated genomic DNA (Homo sapiens)
tttgattgatgttagtga

SEQ ID NO: 693 - DNA, 16 bp, Artificial Sequence
  chemically treated genomic DNA (Homo sapiens)
tttcgagtttgacggt

SEQ ID NO: 694 - DNA, 17 bp, Artificial Sequence
  chemically treated genomic DNA (Homo sapiens)
ttttgagtttgatggtt

SEQ ID NO: 695 - DNA, 16 bp, Artificial Sequence
  chemically treated genomic DNA (Homo sapiens)
ttcggagggcgtattt

SEQ ID NO: 696 - DNA, 16 bp, Artificial Sequence
  chemically treated genomic DNA (Homo sapiens)
tttggagggtgtattt

SEQ ID NO: 697 - DNA, 16 bp, Artificial Sequence
  chemically treated genomic DNA (Homo sapiens)
gacgtcggtacgtagt

SEQ ID NO: 698 - DNA, 18 bp, Artificial Sequence
  chemically treated genomic DNA (Homo sapiens)
gatgttggtatgtagtag

SEQ ID NO: 699 - DNA, 17 bp, Artificial Sequence
  chemically treated genomic DNA (Homo sapiens)
ttcgggggaattcgagt

SEQ ID NO: 700 - DNA, 17 bp, Artificial Sequence
  chemically treated genomic DNA (Homo sapiens)
tttgggggaatttgagt

SEQ ID NO: 701 - DNA, 16 bp, Artificial Sequence
  chemically treated genomic DNA (Homo sapiens)
tattgcgaggattcgg

SEQ ID NO: 702 - DNA, 16 bp, Artificial Sequence
  chemically treated genomic DNA (Homo sapiens)
attgtgaggatttggt

SEQ ID NO: 703 - DNA, 16 bp, Artificial Sequence
  chemically treated genomic DNA (Homo sapiens)
gtgcgttcgtagcgta

SEQ ID NO: 704 - DNA, 17 bp, Artificial Sequence
  chemically treated genomic DNA (Homo sapiens)
tgtgtttgtagtgtagg

SEQ ID NO: 705 - DNA, 16 bp, Artificial Sequence
  chemically treated genomic DNA (Homo sapiens)
ggacgtcgtttgttag

SEQ ID NO: 706 - DNA, 17 bp, Artificial Sequence
  chemically treated genomic DNA (Homo sapiens)
ggatgttgtttgttagg

SEQ ID NO: 707 - DNA, 16 bp, Artificial Sequence
  chemically treated genomic DNA (Homo sapiens)
agagcgtcgttttgta

SEQ ID NO: 708 - DNA, 17 bp, Artificial Sequence
  chemically treated genomic DNA (Homo sapiens)
agagtgttgttttgtat

SEQ ID NO: 709 - DNA, 17 bp, Artificial Sequence
  chemically treated genomic DNA (Homo sapiens)
tttcgagggtaggcgag

SEQ ID NO: 710 - DNA, 17 bp, Artificial Sequence
  chemically treated genomic DNA (Homo sapiens)
ttttgagggtaggtgag

SEQ ID NO: 711 - DNA, 18 bp, Artificial Sequence
  chemically treated genomic DNA (Homo sapiens)
tttcgattttaatgcgaa

SEQ ID NO: 712 - DNA, 19 bp, Artificial Sequence
  chemically treated genomic DNA (Homo sapiens)
tttgattttaatgtgaagt

SEQ ID NO: 713 - DNA, 16 bp, Artificial Sequence
  chemically treated genomic DNA (Homo sapiens)
aggaatttcgtcgcga

SEQ ID NO: 714 - DNA, 17 bp, Artificial Sequence
  chemically treated genomic DNA (Homo sapiens)
aggaattttgttgtgat

SEQ ID NO: 715 - DNA, 16 bp, Artificial Sequence
  chemically treated genomic DNA (Homo sapiens)
tttgagtcgtacgcgt

SEQ ID NO: 716 - DNA, 17 bp, Artificial Sequence
  chemically treated genomic DNA (Homo sapiens)
ttttgagttgtatgtgt

SEQ ID NO: 717 - DNA, 16 bp, Artificial Sequence
  chemically treated genomic DNA (Homo sapiens)
tacgtagttgcgcgtt

SEQ ID NO: 718 - DNA, 16 bp, Artificial Sequence
  chemically treated genomic DNA (Homo sapiens)
aatcggcggttaggat

SEQ ID NO: 719 - DNA, 16 bp, Artificial Sequence
  chemically treated genomic DNA (Homo sapiens)
gaattggtggttagga

SEQ ID NO: 720 - DNA, 16 bp, Artificial Sequence
  chemically treated genomic DNA (Homo sapiens)
tttgatcgggtttgag

SEQ ID NO: 721 - DNA, 17 bp, Artificial Sequence
  chemically treated genomic DNA (Homo sapiens)
ttttgattgggtttgag

SEQ ID NO: 722 - DNA, 18 bp, Artificial Sequence
  chemically treated genomic DNA (Homo sapiens)
tgagtatttgtaggaaga

SEQ ID NO: 723 - DNA, 16 bp, Artificial Sequence
  chemically treated genomic DNA (Homo sapiens)
agaggcgcgggttata

SEQ ID NO: 724 - DNA, 16 bp, Artificial Sequence
  chemically treated genomic DNA (Homo sapiens)
tagaggtgtgggttat

SEQ ID NO: 725 - DNA, 18 bp, Artificial Sequence
  chemically treated genomic DNA (Homo sapiens)
ttagcggttaagttgcga

SEQ ID NO: 726 - DNA, 18 bp, Artificial Sequence
  chemically treated genomic DNA (Homo sapiens)
ttagtggttaagttgtga

SEQ ID NO: 727 - DNA, 20 bp, Artificial Sequence
  chemically treated genomic DNA (Homo sapiens)
ttcgtagaagaatacgcgta

SEQ ID NO: 728 - DNA, 20 bp, Artificial Sequence
  chemically treated genomic DNA (Homo sapiens)
tttgtagaagaatatgtgta

SEQ ID NO: 729 - DNA, 16 bp, Artificial Sequence
  chemically treated genomic DNA (Homo sapiens)
aaacgtttatcggttg

SEQ ID NO: 730 - DNA, 17 bp, Artificial Sequence
  chemically treated genomic DNA (Homo sapiens)
aatgtttattggttgga

SEQ ID NO: 731 - DNA, 17 bp, Artificial Sequence
  chemically treated genomic DNA (Homo sapiens)
tatcgtagttcgttcgg

SEQ ID NO: 732 - DNA, 17 bp, Artificial Sequence
  chemically treated genomic DNA (Homo sapiens)
attgtagtttgtttggt

SEQ ID NO: 733 - DNA, 17 bp, Artificial Sequence
  chemically treated genomic DNA (Homo sapiens)
tggtcggtatatttcga

SEQ ID NO: 734 - DNA, 18 bp, Artificial Sequence
  chemically treated genomic DNA (Homo sapiens)
ttggttggtatattttga

SEQ ID NO: 735 - DNA, 16 bp, Artificial Sequence
  chemically treated genomic DNA (Homo sapiens)
ggaggtttcggttcga

SEQ ID NO: 736 - DNA, 17 bp, Artificial Sequence
  chemically treated genomic DNA (Homo sapiens)
tggaggttttggtttga

SEQ ID NO: 737 - DNA, 16 bp, Artificial Sequence
  chemically treated genomic DNA (Homo sapiens)
ttagcggtaatagcgg

SEQ ID NO: 738 - DNA, 16 bp, Artificial Sequence
  chemically treated genomic DNA (Homo sapiens)
tgcgtagtaggcggtt

SEQ ID NO: 739 - DNA, 16 bp, Artificial Sequence
  chemically treated genomic DNA (Homo sapiens)
taggcggttgttcgta

SEQ ID NO: 740 - DNA, 16 bp, Artificial Sequence
  chemically treated genomic DNA (Homo sapiens)
aggtggttgtttgtaa

SEQ ID NO: 741 - DNA, 16 bp, Artificial Sequence
  chemically treated genomic DNA (Homo sapiens)
gttcgggtcgattcga

SEQ ID NO: 742 - DNA, 17 bp, Artificial Sequence
  chemically treated genomic DNA (Homo sapiens)
ggtttgggttgatttga

SEQ ID NO: 743 - DNA, 18 bp, Artificial Sequence
  chemically treated genomic DNA (Homo sapiens)
ttcgggatatattcgatt

SEQ ID NO: 744 - DNA, 19 bp, Artificial Sequence
  chemically treated genomic DNA (Homo sapiens)
ttttgggatatatttgatt

SEQ ID NO: 745 - DNA, 18 bp, Artificial Sequence
  chemically treated genomic DNA (Homo sapiens)
tattcgaattgtattcgt

SEQ ID NO: 746 - DNA, 20 bp, Artificial Sequence
  chemically treated genomic DNA (Homo sapiens)
tttgaattgtatttgtttat

SEQ ID NO: 747 - DNA, 16 bp, Artificial Sequence
  chemically treated genomic DNA (Homo sapiens)
ttaagttcgattcggt

SEQ ID NO: 748 - DNA, 16 bp, Artificial Sequence
  chemically treated genomic DNA (Homo sapiens)
tagttgttcgagaggg

SEQ ID NO: 749 - DNA, 16 bp, Artificial Sequence
  chemically treated genomic DNA (Homo sapiens)
agttgtttgagagggt

SEQ ID NO: 750 - DNA, 17 bp, Artificial Sequence
  chemically treated genomic DNA (Homo sapiens)
atagtatcgaggtgagt

SEQ ID NO: 751 - DNA, 18 bp, Artificial Sequence
  chemically treated genomic DNA (Homo sapiens)
atagtattgaggtgagtt

SEQ ID NO: 752 - DNA, 16 bp, Artificial Sequence
  chemically treated genomic DNA (Homo sapiens)
ttcgggattcgataat

SEQ ID NO: 753 - DNA, 16 bp, Artificial Sequence
  chemically treated genomic DNA (Homo sapiens)
aggttttgggatttga

SEQ ID NO: 754 - DNA, 16 bp, Artificial Sequence
  chemically treated genomic DNA (Homo sapiens)
ttaggacgcggcgata

SEQ ID NO: 755 - DNA, 16 bp, Artificial Sequence
  chemically treated genomic DNA (Homo sapiens)
aggatgtggtgatagt

SEQ ID NO: 756 - DNA, 16 bp, Artificial Sequence
  chemically treated genomic DNA (Homo sapiens)
ttgtacgttcggtatt

SEQ ID NO: 757 - DNA, 18 bp, Artificial Sequence
  chemically treated genomic DNA (Homo sapiens)
taagttgtatgtttggta

SEQ ID NO: 758 - DNA, 16 bp, Artificial Sequence
  chemically treated genomic DNA (Homo sapiens)
ggcgtcgaggtcgtag

SEQ ID NO: 759 - DNA, 17 bp, Artificial Sequence
  chemically treated genomic DNA (Homo sapiens)
ggtgttgaggttgtagt

SEQ ID NO: 760 - DNA, 17 bp, Artificial Sequence
  chemically treated genomic DNA (Homo sapiens)
agggtttcgattttcgg

SEQ ID NO: 761 - DNA, 17 bp, Artificial Sequence
  chemically treated genomic DNA (Homo sapiens)
agggttttgatttttgg

SEQ ID NO: 762 - DNA, 16 bp, Artificial Sequence
  chemically treated genomic DNA (Homo sapiens)
tggaacgtgcgattgt

SEQ ID NO: 763 - DNA, 16 bp, Artificial Sequence
  chemically treated genomic DNA (Homo sapiens)
tggaatgtgtgattgt

SEQ ID NO: 764 - DNA, 16 bp, Artificial Sequence
  chemically treated genomic DNA (Homo sapiens)
ttttggcgcgtttata

SEQ ID NO: 765 - DNA, 18 bp, Artificial Sequence
  chemically treated genomic DNA (Homo sapiens)
ttggtgtgtttatagata

SEQ ID NO: 766 - DNA, 17 bp, Artificial Sequence
  chemically treated genomic DNA (Homo sapiens)
agatttttacgattcga

SEQ ID NO: 767 - DNA, 20 bp, Artificial Sequence
  chemically treated genomic DNA (Homo sapiens)
tttttatgatttgaaataga

SEQ ID NO: 768 - DNA, 16 bp, Artificial Sequence
  chemically treated genomic DNA (Homo sapiens)
agtattttcgcgtgtt

SEQ ID NO: 769 - DNA, 19 bp, Artificial Sequence
  chemically treated genomic DNA (Homo sapiens)
tagtatttttgtgtgttaa

SEQ ID NO: 770 - DNA, 16 bp, Artificial Sequence
  chemically treated genomic DNA (Homo sapiens)
ttcgtcggcggtagag

SEQ ID NO: 771 - DNA, 16 bp, Artificial Sequence
  chemically treated genomic DNA (Homo sapiens)
tagagtttgttggtgg

SEQ ID NO: 772 - DNA, 16 bp, Artificial Sequence
  chemically treated genomic DNA (Homo sapiens)
gatcgcgggtacgttt

SEQ ID NO: 773 - DNA, 17 bp, Artificial Sequence
  chemically treated genomic DNA (Homo sapiens)
attgtgggtatgtttgt

SEQ ID NO: 774 - DNA, 16 bp, Artificial Sequence
  chemically treated genomic DNA (Homo sapiens)
ttaacgtcgttggtta

SEQ ID NO: 775 - DNA, 17 bp, Artificial Sequence
  chemically treated genomic DNA (Homo sapiens)
tgattaatgttgttggt

SEQ ID NO: 776 - DNA, 16 bp, Artificial Sequence
  chemically treated genomic DNA (Homo sapiens)
ttcgcgcgaagattta

SEQ ID NO: 777 - DNA, 17 bp, Artificial Sequence
  chemically treated genomic DNA (Homo sapiens)
gtttttgtgtgaagatt

SEQ ID NO: 778 - DNA, 16 bp, Artificial Sequence
  chemically treated genomic DNA (Homo sapiens)
ttcgatatcgtgacgg

SEQ ID NO: 779 - DNA, 18 bp, Artificial Sequence
  chemically treated genomic DNA (Homo sapiens)
ttttgatattgtgatggt

SEQ ID NO: 780 - DNA, 16 bp, Artificial Sequence
  chemically treated genomic DNA (Homo sapiens)
agaatacggtcgtaga

SEQ ID NO: 781 - DNA, 19 bp, Artificial Sequence
  chemically treated genomic DNA (Homo sapiens)
tagaatatggttgtagata

SEQ ID NO: 782 - DNA, 16 bp, Artificial Sequence
  chemically treated genomic DNA (Homo sapiens)
tatttttgcgtacggg

SEQ ID NO: 783 - DNA, 17 bp, Artificial Sequence
  chemically treated genomic DNA (Homo sapiens)
atttttgtgtatgggtt

SEQ ID NO: 784 - DNA, 16 bp, Artificial Sequence
  chemically treated genomic DNA (Homo sapiens)
ttacggtgaaggcgga

SEQ ID NO: 785 - DNA, 16 bp, Artificial Sequence
  chemically treated genomic DNA (Homo sapiens)
ttatggtgaaggtgga

SEQ ID NO: 786 - DNA, 20 bp, Artificial Sequence
  chemically treated genomic DNA (Homo sapiens)
ttcgggattaatatcgagat

SEQ ID NO: 787 - DNA, 20 bp, Artificial Sequence
  chemically treated genomic DNA (Homo sapiens)
tttgggattaatattgagat

SEQ ID NO: 788 - DNA, 17 bp, Artificial Sequence
  chemically treated genomic DNA (Homo sapiens)
tttcggttttcgttaat

SEQ ID NO: 789 - DNA, 20 bp, Artificial Sequence
  chemically treated genomic DNA (Homo sapiens)
tttggtttttgttaatttag

SEQ ID NO: 790 - DNA, 16 bp, Artificial Sequence
  chemically treated genomic DNA (Homo sapiens)
tgtgcgaagttaacgt

SEQ ID NO: 791 - DNA, 17 bp, Artificial Sequence
  chemically treated genomic DNA (Homo sapiens)
ttgtgtgaagttaatgt

SEQ ID NO: 792 - DNA, 16 bp, Artificial Sequence
  chemically treated genomic DNA (Homo sapiens)
aagtttatcggcgttt

SEQ ID NO: 793 - DNA, 18 bp, Artificial Sequence
  chemically treated genomic DNA (Homo sapiens)
agaagtttattggtgttt

SEQ ID NO: 794 - DNA, 18 bp, Artificial Sequence
  chemically treated genomic DNA (Homo sapiens)
atttcggaatttaagcgt

SEQ ID NO: 795 - DNA, 18 bp, Artificial Sequence
  chemically treated genomic DNA (Homo sapiens)
tttggaatttaagtgttt

SEQ ID NO: 796 - DNA, 16 bp, Artificial Sequence
  chemically treated genomic DNA (Homo sapiens)
ttttcgcgattggaga

SEQ ID NO: 797 - DNA, 17 bp, Artificial Sequence
  chemically treated genomic DNA (Homo sapiens)
gtttttgtgattggaga

SEQ ID NO: 798 - DNA, 16 bp, Artificial Sequence
  chemically treated genomic DNA (Homo sapiens)
atttacgcgttttagg

SEQ ID NO: 799 - DNA, 18 bp, Artificial Sequence
  chemically treated genomic DNA (Homo sapiens)
atggaatttatgtgtttt

SEQ ID NO: 800 - DNA, 16 bp, Artificial Sequence
  chemically treated genomic DNA (Homo sapiens)
atgtcgcggttttata

SEQ ID NO: 801 - DNA, 17 bp, Artificial Sequence
  chemically treated genomic DNA (Homo sapiens)
ggatgttgtggttttat

SEQ ID NO: 802 - DNA, 16 bp, Artificial Sequence
  chemically treated genomic DNA (Homo sapiens)
agacggggtttacgag

SEQ ID NO: 803 - DNA, 16 bp, Artificial Sequence
  chemically treated genomic DNA (Homo sapiens)
agatggggtttatgag

SEQ ID NO: 804 - DNA, 16 bp, Artificial Sequence
  chemically treated genomic DNA (Homo sapiens)
tgtcggtattagcgtt

SEQ ID NO: 805 - DNA, 17 bp, Artificial Sequence
  chemically treated genomic DNA (Homo sapiens)
gtgttggtattagtgtt

SEQ ID NO: 806 - DNA, 16 bp, Artificial Sequence
  chemically treated genomic DNA (Homo sapiens)
tggtttacgttcggta

SEQ ID NO: 807 - DNA, 17 bp, Artificial Sequence
  chemically treated genomic DNA (Homo sapiens)
ggtttatgtttggtagt

SEQ ID NO: 808 - DNA, 16 bp, Artificial Sequence
  chemically treated genomic DNA (Homo sapiens)
ttcgtacggttaggtt

SEQ ID NO: 809 - DNA, 17 bp, Artificial Sequence
  chemically treated genomic DNA (Homo sapiens)
agttttgtatggttagg

SEQ ID NO: 810 - DNA, 16 bp, Artificial Sequence
  chemically treated genomic DNA (Homo sapiens)
atagcgatttcggcga

SEQ ID NO: 811 - DNA, 16 bp, Artificial Sequence
  chemically treated genomic DNA (Homo sapiens)
agtgattttggtgaga

SEQ ID NO: 812 - DNA, 18 bp, Artificial Sequence
  chemically treated genomic DNA (Homo sapiens)
ggcgttttatttacgaga

SEQ ID NO: 813 - DNA, 18 bp, Artificial Sequence
  chemically treated genomic DNA (Homo sapiens)
gggtgttttatttatgag

SEQ ID NO: 814 - DNA, 17 bp, Artificial Sequence
  chemically treated genomic DNA (Homo sapiens)
atcgtggacggtaacga

SEQ ID NO: 815 - DNA, 17 bp, Artificial Sequence
  chemically treated genomic DNA (Homo sapiens)
attgtggatggtaatga

SEQ ID NO: 816 - DNA, 16 bp, Artificial Sequence
  chemically treated genomic DNA (Homo sapiens)
ttgagatcgattcgtt

SEQ ID NO: 817 - DNA, 18 bp, Artificial Sequence
  chemically treated genomic DNA (Homo sapiens)
tgagattgatttgtttag

SEQ ID NO: 818 - DNA, 16 bp, Artificial Sequence
  chemically treated genomic DNA (Homo sapiens)
ggcgagattcgtacgt

SEQ ID NO: 819 - DNA, 17 bp, Artificial Sequence
  chemically treated genomic DNA (Homo sapiens)
ggtgagatttgtatgtt

SEQ ID NO: 820 - DNA, 16 bp, Artificial Sequence
  chemically treated genomic DNA (Homo sapiens)
tgacgttcgtggtgga

SEQ ID NO: 821 - DNA, 16 bp, Artificial Sequence
  chemically treated genomic DNA (Homo sapiens)
gatgtttgtggtggag

SEQ ID NO: 822 - DNA, 16 bp, Artificial Sequence
  chemically treated genomic DNA (Homo sapiens)
gtgatcgattacggta

SEQ ID NO: 823 - DNA, 17 bp, Artificial Sequence
  chemically treated genomic DNA (Homo sapiens)
aggtgattgattatggt

SEQ ID NO: 824 - DNA, 16 bp, Artificial Sequence
  chemically treated genomic DNA (Homo sapiens)
attattcgttcggtga

SEQ ID NO: 825 - DNA, 18 bp, Artificial Sequence
  chemically treated genomic DNA (Homo sapiens)
tattatttgtttggtgag

SEQ ID NO: 826 - DNA, 16 bp, Artificial Sequence
  chemically treated genomic DNA (Homo sapiens)
tatcgtcgttaagtgt

SEQ ID NO: 827 - DNA, 19 bp, Artificial Sequence
  chemically treated genomic DNA (Homo sapiens)
tattattgttgttaagtgt

SEQ ID NO: 828 - DNA, 16 bp, Artificial Sequence
  chemically treated genomic DNA (Homo sapiens)
tgtaagcgcgagaata

SEQ ID NO: 829 - DNA, 17 bp, Artificial Sequence
  chemically treated genomic DNA (Homo sapiens)
agtgtaagtgtgagaat

SEQ ID NO: 830 - DNA, 16 bp, Artificial Sequence
  chemically treated genomic DNA (Homo sapiens)
tatagcggtttacggt

SEQ ID NO: 831 - DNA, 17 bp, Artificial Sequence
  chemically treated genomic DNA (Homo sapiens)
tagtggtttatggtagt

SEQ ID NO: 832 - DNA, 16 bp, Artificial Sequence
  chemically treated genomic DNA (Homo sapiens)
agggcgattaggacgt

SEQ ID NO: 833 - DNA, 16 bp, Artificial Sequence
  chemically treated genomic DNA (Homo sapiens)
agggtgattaggatgt

SEQ ID NO: 834 - DNA, 17 bp, Artificial Sequence
  chemically treated genomic DNA (Homo sapiens)
ttcgttagagttcgtag

SEQ ID NO: 835 - DNA, 18 bp, Artificial Sequence
  chemically treated genomic DNA (Homo sapiens)
tttgttagagtttgtagt

SEQ ID NO: 836 - DNA, 16 bp, Artificial Sequence
  chemically treated genomic DNA (Homo sapiens)
tgagacgtttgtcggt

SEQ ID NO: 837 - DNA, 16 bp, Artificial Sequence
  chemically treated genomic DNA (Homo sapiens)
tgagatgtttgttggt

SEQ ID NO: 838 - DNA, 16 bp, Artificial Sequence
  chemically treated genomic DNA (Homo sapiens)
gaaaagttcgtcggtt

SEQ ID NO: 839 - DNA, 17 bp, Artificial Sequence
  chemically treated genomic DNA (Homo sapiens)
agaaaagtttgttggtt

SEQ ID NO: 840 - DNA, 16 bp, Artificial Sequence
  chemically treated genomic DNA (Homo sapiens)
atggcgtagtcgcgat

SEQ ID NO: 841 - DNA, 16 bp, Artificial Sequence
  chemically treated genomic DNA (Homo sapiens)
tggtgtagttgtgatt

SEQ ID NO: 842 - DNA, 16 bp, Artificial Sequence
  chemically treated genomic DNA (Homo sapiens)
ttttgacgtcgatgta

SEQ ID NO: 843 - DNA, 18 bp, Artificial Sequence
  chemically treated genomic DNA (Homo sapiens)
tgatgttgatgtagaatt

SEQ ID NO: 844 - DNA, 16 bp, Artificial Sequence
  chemically treated genomic DNA (Homo sapiens)
ttgcgatgtgcgttta

SEQ ID NO: 845 - DNA, 17 bp, Artificial Sequence
  chemically treated genomic DNA (Homo sapiens)
tgtgatgtgtgtttagt

SEQ ID NO: 846 - DNA, 16 bp, Artificial Sequence
  chemically treated genomic DNA (Homo sapiens)
tgattacggcgcggat

SEQ ID NO: 847 - DNA, 16 bp, Artificial Sequence
  chemically treated genomic DNA (Homo sapiens)
attatggtgtggatgg

SEQ ID NO: 848 - DNA, 16 bp, Artificial Sequence
  chemically treated genomic DNA (Homo sapiens)
agatggcgacgtcgaa

SEQ ID NO: 849 - DNA, 16 bp, Artificial Sequence
  chemically treated genomic DNA (Homo sapiens)
atggtgatgttgaaga

SEQ ID NO: 850 - DNA, 16 bp, Artificial Sequence
  chemically treated genomic DNA (Homo sapiens)
tttaagcgcggcggta

SEQ ID NO: 851 - DNA, 17 bp, Artificial Sequence
  chemically treated genomic DNA (Homo sapiens)
ttttaagtgtggtggta

SEQ ID NO: 852 - DNA, 16 bp, Artificial Sequence
  chemically treated genomic DNA (Homo sapiens)
agaaacgtagacgcga

SEQ ID NO: 853 - DNA, 17 bp, Artificial Sequence
  chemically treated genomic DNA (Homo sapiens)
aatgtagatgtgatgga

SEQ ID NO: 854 - DNA, 16 bp, Artificial Sequence
  chemically treated genomic DNA (Homo sapiens)
agagacgcgaaaaatt

SEQ ID NO: 855 - DNA, 18 bp, Artificial Sequence
  chemically treated genomic DNA (Homo sapiens)
tagagagatgtgaaaaat

SEQ ID NO: 856 - DNA, 16 bp, Artificial Sequence
  chemically treated genomic DNA (Homo sapiens)
agacgaaagagtcgtt

SEQ ID NO: 857 - DNA, 17 bp, Artificial Sequence
  chemically treated genomic DNA (Homo sapiens)
agagatgaaagagttgt

SEQ ID NO: 858 - DNA, 16 bp, Artificial Sequence
  chemically treated genomic DNA (Homo sapiens)
ttttagttcgagcgta

SEQ ID NO: 859 - DNA, 18 bp, Artificial Sequence
  chemically treated genomic DNA (Homo sapiens)
ttagtttgagtgtagtta

SEQ ID NO: 860 - DNA, 17 bp, Artificial Sequence
  chemically treated genomic DNA (Homo sapiens)
gacgtgaattttcggaa

SEQ ID NO: 861 - DNA, 17 bp, Artificial Sequence
  chemically treated genomic DNA (Homo sapiens)
aggatgtgaatttttgg

SEQ ID NO: 862 - DNA, 16 bp, Artificial Sequence
  chemically treated genomic DNA (Homo sapiens)
aatgcgtggtcgtttt

SEQ ID NO: 863 - DNA, 16 bp, Artificial Sequence
  chemically treated genomic DNA (Homo sapiens)
gaaatgtgtggttgtt

SEQ ID NO: 864 - DNA, 16 bp, Artificial Sequence
  chemically treated genomic DNA (Homo sapiens)
tttcgtttgcggaatt

SEQ ID NO: 865 - DNA, 17 bp, Artificial Sequence
  chemically treated genomic DNA (Homo sapiens)
ttttgtttgtggaattg

SEQ ID NO: 866 - DNA, 16 bp, Artificial Sequence
  chemically treated genomic DNA (Homo sapiens)
tgttcgacgtgatttt

SEQ ID NO: 867 - DNA, 17 bp, Artificial Sequence
  chemically treated genomic DNA (Homo sapiens)
gtgtttgatgtgatttt

SEQ ID NO: 868 - DNA, 16 bp, Artificial Sequence
  chemically treated genomic DNA (Homo sapiens)
taacgttttttcgggt

SEQ ID NO: 869 - DNA, 18 bp, Artificial Sequence
  chemically treated genomic DNA (Homo sapiens)
ttaatgtttttttgggtg

SEQ ID NO: 870 - DNA, 17 bp, Artificial Sequence
  chemically treated genomic DNA (Homo sapiens)
tgttgattcggaaatga

SEQ ID NO: 871 - DNA, 18 bp, Artificial Sequence
  chemically treated genomic DNA (Homo sapiens)
tttgttgatttggaaatg

SEQ ID NO: 872 - DNA, 16 bp, Artificial Sequence
  chemically treated genomic DNA (Homo sapiens)
ttggagcgcgagaaag

SEQ ID NO: 873 - DNA, 16 bp, Artificial Sequence
  chemically treated genomic DNA (Homo sapiens)
ttggagtgtgagaaag

SEQ ID NO: 874 - DNA, 16 bp, Artificial Sequence
  chemically treated genomic DNA (Homo sapiens)
tacgttatcggttcgt

SEQ ID NO: 875 - DNA, 19 bp, Artificial Sequence
  chemically treated genomic DNA (Homo sapiens)
tatgttattggtttgtatt

SEQ ID NO: 876 - DNA, 17 bp, Artificial Sequence
  chemically treated genomic DNA (Homo sapiens)
attaggttcgtgggcgt

SEQ ID NO: 877 - DNA, 17 bp, Artificial Sequence
  chemically treated genomic DNA (Homo sapiens)
attaggtttgtgggtgt

SEQ ID NO: 878 - DNA, 18 bp, Artificial Sequence
  chemically treated genomic DNA (Homo sapiens)
tgcggtttagaaacgtag

SEQ ID NO: 879 - DNA, 18 bp, Artificial Sequence
  chemically treated genomic DNA (Homo sapiens)
tgtggtttagaaatgtag

SEQ ID NO: 880 - DNA, 16 bp, Artificial Sequence
  chemically treated genomic DNA (Homo sapiens)
gaacgggtttcgtagt

SEQ ID NO: 881 - DNA, 16 bp, Artificial Sequence
  chemically treated genomic DNA (Homo sapiens)
gggaatgggttttgta

SEQ ID NO: 882 - DNA, 16 bp, Artificial Sequence
  chemically treated genomic DNA (Homo sapiens)
ttgcgatagtcggcgg

SEQ ID NO: 883 - DNA, 16 bp, Artificial Sequence
  chemically treated genomic DNA (Homo sapiens)
ttgtgatagttggtgg

SEQ ID NO: 884 - DNA, 16 bp, Artificial Sequence
  chemically treated genomic DNA (Homo sapiens)
aagaacggacgtgttt

SEQ ID NO: 885 - DNA, 16 bp, Artificial Sequence
  chemically treated genomic DNA (Homo sapiens)
aggaagaatggatgtg

SEQ ID NO: 886 - DNA, 16 bp, Artificial Sequence
  chemically treated genomic DNA (Homo sapiens)
aagtttcgtttgggag

SEQ ID NO: 887 - DNA, 17 bp, Artificial Sequence
  chemically treated genomic DNA (Homo sapiens)
aaagttttgtttgggag

SEQ ID NO: 888 - DNA, 16 bp, Artificial Sequence
  chemically treated genomic DNA (Homo sapiens)
ttggaagtcgaagaga

SEQ ID NO: 889 - DNA, 17 bp, Artificial Sequence
  chemically treated genomic DNA (Homo sapiens)
tttggaagttgaagaga

SEQ ID NO: 890 - DNA, 16 bp, Artificial Sequence
  chemically treated genomic DNA (Homo sapiens)
tatcgggttcgatttt

SEQ ID NO: 891 - DNA, 16 bp, Artificial Sequence
  chemically treated genomic DNA (Homo sapiens)
ggtgtattgggtttga

SEQ ID NO: 892 - DNA, 16 bp, Artificial Sequence
  chemically treated genomic DNA (Homo sapiens)
tagggattcgcggagg

SEQ ID NO: 893 - DNA, 16 bp, Artificial Sequence
  chemically treated genomic DNA (Homo sapiens)
tagggatttgtggagg

SEQ ID NO: 894 - DNA, 18 bp, Artificial Sequence
  chemically treated genomic DNA (Homo sapiens)
ttgtcgagtaattttcgt

SEQ ID NO: 895 - DNA, 18 bp, Artificial Sequence
  chemically treated genomic DNA (Homo sapiens)
tgttgagtaatttttgtt

SEQ ID NO: 896 - DNA, 16 bp, Artificial Sequence
  chemically treated genomic DNA (Homo sapiens)
tattacgggcggaggg

SEQ ID NO: 897 - DNA, 16 bp, Artificial Sequence
  chemically treated genomic DNA (Homo sapiens)
tattatgggtggaggg

SEQ ID NO: 898 - DNA, 16 bp, Artificial Sequence
  chemically treated genomic DNA (Homo sapiens)
gacggtacgttagagg

SEQ ID NO: 899 - DNA, 17 bp, Artificial Sequence
  chemically treated genomic DNA (Homo sapiens)
gatggtatgttagaggt

SEQ ID NO: 900 - DNA, 16 bp, Artificial Sequence
  chemically treated genomic DNA (Homo sapiens)
ttgggcgtcgttatta

SEQ ID NO: 901 - DNA, 17 bp, Artificial Sequence
  chemically treated genomic DNA (Homo sapiens)
tgggtgttgttattagt

SEQ ID NO: 902 - DNA, 16 bp, Artificial Sequence
  chemically treated genomic DNA (Homo sapiens)
tattagttcggtcgtt

SEQ ID NO: 903 - DNA, 17 bp, Artificial Sequence
  chemically treated genomic DNA (Homo sapiens)
agtttggttgttagttt

SEQ ID NO: 904 - DNA, 17 bp, Artificial Sequence
  chemically treated genomic DNA (Homo sapiens)
ttattacgtttagcgat

SEQ ID NO: 905 - DNA, 21 bp, Artificial Sequence
  chemically treated genomic DNA (Homo sapiens)
tttttattatgtttagtgata

SEQ ID NO: 906 - DNA, 16 bp, Artificial Sequence
  chemically treated genomic DNA (Homo sapiens)
atagcgagtgcgatat

SEQ ID NO: 907 - DNA, 16 bp, Artificial Sequence
  chemically treated genomic DNA (Homo sapiens)
agggtcgtagcggtag

SEQ ID NO: 908 - DNA, 16 bp, Artificial Sequence
  chemically treated genomic DNA (Homo sapiens)
gagggttgtagtggta

SEQ ID NO: 909 - DNA, 17 bp, Artificial Sequence
  chemically treated genomic DNA (Homo sapiens)
tagacgtggggttacgt

SEQ ID NO: 910 - DNA, 17 bp, Artificial Sequence
  chemically treated genomic DNA (Homo sapiens)
tagatgtggggttatgt

SEQ ID NO: 911 - DNA, 18 bp, Artificial Sequence
  chemically treated genomic DNA (Homo sapiens)
atttcggggtagtatcgt

SEQ ID NO: 912 - DNA, 18 bp, Artificial Sequence
  chemically treated genomic DNA (Homo sapiens)
attttggggtagtattgt

SEQ ID NO: 913 - DNA, 16 bp, Artificial Sequence
  chemically treated genomic DNA (Homo sapiens)
tacgcgcgttttaaaa

SEQ ID NO: 914 - DNA, 19 bp, Artificial Sequence
  chemically treated genomic DNA (Homo sapiens)
ttatgtgtgttttaaaatg

SEQ ID NO: 915 - DNA, 21 bp, Artificial Sequence
  chemically treated genomic DNA (Homo sapiens)
tacgatatcgttatataacgg

SEQ ID NO: 916 - DNA, 21 bp, Artificial Sequence
  chemically treated genomic DNA (Homo sapiens)
tatgatattgttatataatgg

SEQ ID NO: 917 - DNA, 16 bp, Artificial Sequence
  chemically treated genomic DNA (Homo sapiens)
tataggttcgcggttt

SEQ ID NO: 918 - DNA, 18 bp, Artificial Sequence
  chemically treated genomic DNA (Homo sapiens)
tatataggtttgtggttt

SEQ ID NO: 919 - DNA, 16 bp, Artificial Sequence
  chemically treated genomic DNA (Homo sapiens)
taggtgcgcgttatat

SEQ ID NO: 920 - DNA, 17 bp, Artificial Sequence
  chemically treated genomic DNA (Homo sapiens)
atgtaggtgtgtgttat

SEQ ID NO: 921 - DNA, 18 bp, Artificial Sequence
  chemically treated genomic DNA (Homo sapiens)
tatgttgtttggatgaat

SEQ ID NO: 922 - DNA, 16 bp, Artificial Sequence
  chemically treated genomic DNA (Homo sapiens)
aaggagcgtatttcgg

SEQ ID NO: 923 - DNA, 16 bp, Artificial Sequence
  chemically treated genomic DNA (Homo sapiens)
aggagtgtattttggg

SEQ ID NO: 924 - DNA, 17 bp, Artificial Sequence
  chemically treated genomic DNA (Homo sapiens)
gttggattttggaagtg

SEQ ID NO: 925 - DNA, 16 bp, Artificial Sequence
  chemically treated genomic DNA (Homo sapiens)
gaagtgacgcgttcgt

SEQ ID NO: 926 - DNA, 16 bp, Artificial Sequence
  chemically treated genomic DNA (Homo sapiens)
gaagtgatgtgtttgt

SEQ ID NO: 927 - DNA, 16 bp, Artificial Sequence
  chemically treated genomic DNA (Homo sapiens)
tgttatcgttgcgcga

SEQ ID NO: 928 - DNA, 17 bp, Artificial Sequence
  chemically treated genomic DNA (Homo sapiens)
atgttattgttgtgtga

SEQ ID NO: 929 - DNA, 16 bp, Artificial Sequence
  chemically treated genomic DNA (Homo sapiens)
tgaaaacgtttttcgt

SEQ ID NO: 930 - DNA, 19 bp, Artificial Sequence
  chemically treated genomic DNA (Homo sapiens)
aatgttttttgtaaagaaa

SEQ ID NO: 931 - DNA, 16 bp, Artificial Sequence
  chemically treated genomic DNA (Homo sapiens)
aggatttcggcgttat

SEQ ID NO: 932 - DNA, 17 bp, Artificial Sequence
  chemically treated genomic DNA (Homo sapiens)
aaaggattttggtgtta

SEQ ID NO: 933 - DNA, 16 bp, Artificial Sequence
  chemically treated genomic DNA (Homo sapiens)
atttattcgtgcgttt

SEQ ID NO: 934 - DNA, 17 bp, Artificial Sequence
  chemically treated genomic DNA (Homo sapiens)
tatttgtgtgtttaggg

SEQ ID NO: 935 - DNA, 17 bp, Artificial Sequence
  chemically treated genomic DNA (Homo sapiens)
tttcggtggttttcgaa

SEQ ID NO: 936 - DNA, 17 bp, Artificial Sequence
  chemically treated genomic DNA (Homo sapiens)
tttggtggtttttgaag

SEQ ID NO: 937 - DNA, 16 bp, Artificial Sequence
  chemically treated genomic DNA (Homo sapiens)
ggcgtacggaatttta

SEQ ID NO: 938 - DNA, 17 bp, Artificial Sequence
  chemically treated genomic DNA (Homo sapiens)
gggtgtatggaatttta

SEQ ID NO: 939 - DNA, 16 bp, Artificial Sequence
  chemically treated genomic DNA (Homo sapiens)
tggacggaggtttcgt

SEQ ID NO: 940 - DNA, 16 bp, Artificial Sequence
  chemically treated genomic DNA (Homo sapiens)
tggatggaggttttgt

SEQ ID NO: 941 - DNA, 16 bp, Artificial Sequence
  chemically treated genomic DNA (Homo sapiens)
tgcggacgggatagtt

SEQ ID NO: 942 - DNA, 16 bp, Artificial Sequence
  chemically treated genomic DNA (Homo sapiens)
tgtggatgggatagtt

SEQ ID NO: 943 - DNA, 16 bp, Artificial Sequence
  chemically treated genomic DNA (Homo sapiens)
tgattagtcgattcgt

SEQ ID NO: 944 - DNA, 16 bp, Artificial Sequence
  chemically treated genomic DNA (Homo sapiens)
gatgtagggatggaga

SEQ ID NO: 945 - DNA, 20 bp, Artificial Sequence
  chemically treated genomic DNA (Homo sapiens)
tatcgtggttttttacgtat

SEQ ID NO: 946 - DNA, 20 bp, Artificial Sequence
  chemically treated genomic DNA (Homo sapiens)
atattgtggttttttatgta

SEQ ID NO: 947 - DNA, 16 bp, Artificial Sequence
  chemically treated genomic DNA (Homo sapiens)
tttattcggtgttcga

SEQ ID NO: 948 - DNA, 17 bp, Artificial Sequence
  chemically treated genomic DNA (Homo sapiens)
tatttggtgtttgagag

SEQ ID NO: 949 - DNA, 16 bp, Artificial Sequence
  chemically treated genomic DNA (Homo sapiens)
ggtttcgtttaatcgt

SEQ ID NO: 950 - DNA, 18 bp, Artificial Sequence
  chemically treated genomic DNA (Homo sapiens)
gggttttgtttaattgta

SEQ ID NO: 951 - DNA, 17 bp, Artificial Sequence
  chemically treated genomic DNA (Homo sapiens)
gattcgtatttcgtagt

SEQ ID NO: 952 - DNA, 18 bp, Artificial Sequence
  chemically treated genomic DNA (Homo sapiens)
tttgtattttgtagtggg

SEQ ID NO: 953 - DNA, 16 bp, Artificial Sequence
  chemically treated genomic DNA (Homo sapiens)
ttcgtatttagcggat

SEQ ID NO: 954 - DNA, 17 bp, Artificial Sequence
  chemically treated genomic DNA (Homo sapiens)
ggtttgtatttagtgga

SEQ ID NO: 955 - DNA, 16 bp, Artificial Sequence
  chemically treated genomic DNA (Homo sapiens)
ttaatcggcgggtttt

SEQ ID NO: 956 - DNA, 16 bp, Artificial Sequence
  chemically treated genomic DNA (Homo sapiens)
agttaattggtgggtt

SEQ ID NO: 957 - DNA, 18 bp, Artificial Sequence
  chemically treated genomic DNA (Homo sapiens)
tattttggcgggttgtat

SEQ ID NO: 958 - DNA, 18 bp, Artificial Sequence
  chemically treated genomic DNA (Homo sapiens)
tattttggtgggttgtat

SEQ ID NO: 959 - DNA, 18 bp, Artificial Sequence
  chemically treated genomic DNA (Homo sapiens)
aaggttatcggtttaaga

SEQ ID NO: 960 - DNA, 18 bp, Artificial Sequence
  chemically treated genomic DNA (Homo sapiens)
aaggttattggtttaaga

SEQ ID NO: 961 - DNA, 18 bp, Artificial Sequence
  chemically treated genomic DNA (Homo sapiens)
gggggacgacgtttttgt

SEQ ID NO: 962 - DNA, 18 bp, Artificial Sequence
  chemically treated genomic DNA (Homo sapiens)
gggggatgatgtttttgt

SEQ ID NO: 963 - DNA, 16 bp, Artificial Sequence
  chemically treated genomic DNA (Homo sapiens)
ttacggttcggttatt

SEQ ID NO: 964 - DNA, 17 bp, Artificial Sequence
  chemically treated genomic DNA (Homo sapiens)
aggttttatggtttggt

SEQ ID NO: 965 - DNA, 16 bp, Artificial Sequence
  chemically treated genomic DNA (Homo sapiens)
gacgtcgcggggttag

SEQ ID NO: 966 - DNA, 16 bp, Artificial Sequence
  chemically treated genomic DNA (Homo sapiens)
tgatgttgtggggtta

SEQ ID NO: 967 - DNA, 16 bp, Artificial Sequence
  chemically treated genomic DNA (Homo sapiens)
aggtatttcgcgatat

SEQ ID NO: 968 - DNA, 19 bp, Artificial Sequence
  chemically treated genomic DNA (Homo sapiens)
aggtattttgtgatatttt

SEQ ID NO: 969 - DNA, 17 bp, Artificial Sequence
  chemically treated genomic DNA (Homo sapiens)
gtttttcgatttacgtt

SEQ ID NO: 970 - DNA, 19 bp, Artificial Sequence
  chemically treated genomic DNA (Homo sapiens)
taggttttttgatttatgt

SEQ ID NO: 971 - DNA, 18 bp, Artificial Sequence
  chemically treated genomic DNA (Homo sapiens)
ggtagtttcgattattta

SEQ ID NO: 972 - DNA, 18 bp, Artificial Sequence
  chemically treated genomic DNA (Homo sapiens)
ggtagttttgattattta

SEQ ID NO: 973 - DNA, 16 bp, Artificial Sequence
  chemically treated genomic DNA (Homo sapiens)
tagagtacggggcggg

SEQ ID NO: 974 - DNA, 16 bp, Artificial Sequence
  chemically treated genomic DNA (Homo sapiens)
tagagtatggggtggg

SEQ ID NO: 975 - DNA, 18 bp, Artificial Sequence
  chemically treated genomic DNA (Homo sapiens)
ttgtttagcggattttag

SEQ ID NO: 976 - DNA, 18 bp, Artificial Sequence
  chemically treated genomic DNA (Homo sapiens)
ttgtttagtggattttag

SEQ ID NO: 977 - DNA, 17 bp, Artificial Sequence
  chemically treated genomic DNA (Homo sapiens)
taggttcggttcgttat

SEQ ID NO: 978 - DNA, 18 bp, Artificial Sequence
  chemically treated genomic DNA (Homo sapiens)
taggtttggtttgttatt

SEQ ID NO: 979 - DNA, 18 bp, Artificial Sequence
  chemically treated genomic DNA (Homo sapiens)
tggtggtacgtagtttgg

SEQ ID NO: 980 - DNA, 16 bp, Artificial Sequence
  chemically treated genomic DNA (Homo sapiens)
tttggcgtagatcggt

SEQ ID NO: 981 - DNA, 16 bp, Artificial Sequence
  chemically treated genomic DNA (Homo sapiens)
tttggtgtagattggt

SEQ ID NO: 982 - DNA, 16 bp, Artificial Sequence
  chemically treated genomic DNA (Homo sapiens)
agtgttcgtcgtagtt

SEQ ID NO: 983 - DNA, 17 bp, Artificial Sequence
  chemically treated genomic DNA (Homo sapiens)
tgagtgtttgttgtagt

SEQ ID NO: 984 - DNA, 16 bp, Artificial Sequence
  chemically treated genomic DNA (Homo sapiens)
gtgtttagcgcggatt

SEQ ID NO: 985 - DNA, 17 bp, Artificial Sequence
  chemically treated genomic DNA (Homo sapiens)
ggtgtttagtgtggatt

SEQ ID NO: 986 - DNA, 17 bp, Artificial Sequence
  chemically treated genomic DNA (Homo sapiens)
ttcggttagtttcgtat

SEQ ID NO: 987 - DNA, 19 bp, Artificial Sequence
  chemically treated genomic DNA (Homo sapiens)
ttttggttagttttgtatt

SEQ ID NO: 988 - DNA, 18 bp, Artificial Sequence
  chemically treated genomic DNA (Homo sapiens)
gattcgtttgggtaacgt

SEQ ID NO: 989 - DNA, 18 bp, Artificial Sequence
  chemically treated genomic DNA (Homo sapiens)
gatttgtttgggtaatgt

SEQ ID NO: 990 - DNA, 17 bp, Artificial Sequence
  chemically treated genomic DNA (Homo sapiens)
gtcgaatttagtcgcgt

SEQ ID NO: 991 - DNA, 18 bp, Artificial Sequence
  chemically treated genomic DNA (Homo sapiens)
gttgaatttagttgtgta

SEQ ID NO: 992 - DNA, 16 bp, Artificial Sequence
  chemically treated genomic DNA (Homo sapiens)
aattcgcgagtttaga

SEQ ID NO: 993 - DNA, 18 bp, Artificial Sequence
  chemically treated genomic DNA (Homo sapiens)
aaaaatttgtgagtttag

SEQ ID NO: 994 - DNA, 18 bp, Artificial Sequence
  chemically treated genomic DNA (Homo sapiens)
tatatatacgtgtgggta

SEQ ID NO: 995 - DNA, 18 bp, Artificial Sequence
  chemically treated genomic DNA (Homo sapiens)
tatatatatgtgtgggta

SEQ ID NO: 996 - DNA, 16 bp, Artificial Sequence
  chemically treated genomic DNA (Homo sapiens)
tatgtagtcgcgtagt

SEQ ID NO: 997 - DNA, 18 bp, Artificial Sequence
  chemically treated genomic DNA (Homo sapiens)
tttatgtagttgtgtagt

SEQ ID NO: 998 - DNA, 18 bp, Artificial Sequence
  chemically treated genomic DNA (Homo sapiens)
agtgtatgcgtagaaggt

SEQ ID NO: 999 - DNA, 18 bp, Artificial Sequence
  chemically treated genomic DNA (Homo sapiens)
agtgtatgtgtagaaggt

SEQ ID NO: 1000 - DNA, 18 bp, Artificial Sequence
  chemically treated genomic DNA (Homo sapiens)
tttagatacgaaatgtta

SEQ ID NO: 1001 - DNA, 18 bp, Artificial Sequence
  chemically treated genomic DNA (Homo sapiens)
tttagatatgaaatgtta

SEQ ID NO: 1002 - DNA, 18 bp, Artificial Sequence
  chemically treated genomic DNA (Homo sapiens)
aagtaagtcgttgttgtt

SEQ ID NO: 1003 - DNA, 18 bp, Artificial Sequence
  chemically treated genomic DNA (Homo sapiens)
aagtaagttgttgttgtt

SEQ ID NO: 1004 - DNA, 16 bp, Artificial Sequence
  chemically treated genomic DNA (Homo sapiens)
tttcgtcggaggaatt

SEQ ID NO: 1005 - DNA, 17 bp, Artificial Sequence
  chemically treated genomic DNA (Homo sapiens)
gttttgttggaggaatt

SEQ ID NO: 1006 - DNA, 17 bp, Artificial Sequence
  chemically treated genomic DNA (Homo sapiens)
atcgttttgtcggacgg

SEQ ID NO: 1007 - DNA, 17 bp, Artificial Sequence
  chemically treated genomic DNA (Homo sapiens)
attgttttgttggatgg

SEQ ID NO: 1008 - DNA, 16 bp, Artificial Sequence
  chemically treated genomic DNA (Homo sapiens)
tgtcgcgatatatcga

SEQ ID NO: 1009 - DNA, 19 bp, Artificial Sequence
  chemically treated genomic DNA (Homo sapiens)
tttgttgtgatatattgat

SEQ ID NO: 1010 - DNA, 16 bp, Artificial Sequence
  chemically treated genomic DNA (Homo sapiens)
agcgtcgattaatcgt

SEQ ID NO: 1011 - DNA, 19 bp, Artificial Sequence
  chemically treated genomic DNA (Homo sapiens)
ttaagtgttgattaattgt

SEQ ID NO: 1012 - DNA, 16 bp, Artificial Sequence
  chemically treated genomic DNA (Homo sapiens)
ttcggtcgggtttaaa

SEQ ID NO: 1013 - DNA, 17 bp, Artificial Sequence
  chemically treated genomic DNA (Homo sapiens)
gtttggttgggtttaaa

SEQ ID NO: 1014 - DNA, 16 bp, Artificial Sequence
  chemically treated genomic DNA (Homo sapiens)
taatcgttagcggcgg

SEQ ID NO: 1015 - DNA, 17 bp, Artificial Sequence
  chemically treated genomic DNA (Homo sapiens)
ttaattgttagtggtgg

SEQ ID NO: 1016 - DNA, 17 bp, Artificial Sequence
  chemically treated genomic DNA (Homo sapiens)
ttaacgggtgggtacgt

SEQ ID NO: 1017 - DNA, 17 bp, Artificial Sequence
  chemically treated genomic DNA (Homo sapiens)
ttaatgggtgggtatgt

SEQ ID NO: 1018 - DNA, 17 bp, Artificial Sequence
  chemically treated genomic DNA (Homo sapiens)
aggtcgttggtattcgt

SEQ ID NO: 1019 - DNA, 17 bp, Artificial Sequence
  chemically treated genomic DNA (Homo sapiens)
aggttgttggtatttgt

SEQ ID NO: 1020 - DNA, 17 bp, Artificial Sequence
  chemically treated genomic DNA (Homo sapiens)
ttttcgagttttatcga

SEQ ID NO: 1021 - DNA, 18 bp, Artificial Sequence
  chemically treated genomic DNA (Homo sapiens)
tttgagttttattgaggt

SEQ ID NO: 1022 - DNA, 16 bp, Artificial Sequence
  chemically treated genomic DNA (Homo sapiens)
atagtcgtggtttcgt

SEQ ID NO: 1023 - DNA, 17 bp, Artificial Sequence
  chemically treated genomic DNA (Homo sapiens)
atagttgtggttttgtt

SEQ ID NO: 1024 - DNA, 16 bp, Artificial Sequence
  chemically treated genomic DNA (Homo sapiens)
tgacgggcgttttcga

SEQ ID NO: 1025 - DNA, 16 bp, Artificial Sequence
  chemically treated genomic DNA (Homo sapiens)
gatgggtgtttttgag

SEQ ID NO: 1026 - DNA, 16 bp, Artificial Sequence
  chemically treated genomic DNA (Homo sapiens)
taatgagcgcgttgta

SEQ ID NO: 1027 - DNA, 17 bp, Artificial Sequence
  chemically treated genomic DNA (Homo sapiens)
atgagtgtgttgtattt

SEQ ID NO: 1028 - DNA, 18 bp, Artificial Sequence
  chemically treated genomic DNA (Homo sapiens)
ttggttcgggaaaggtaa

SEQ ID NO: 1029 - DNA, 18 bp, Artificial Sequence
  chemically treated genomic DNA (Homo sapiens)
ttggtttgggaaaggtaa

SEQ ID NO: 1030 - DNA, 16 bp, Artificial Sequence
  chemically treated genomic DNA (Homo sapiens)
tttcggtgaatcggat

SEQ ID NO: 1031 - DNA, 17 bp, Artificial Sequence
  chemically treated genomic DNA (Homo sapiens)
tttttggtgaattggat

SEQ ID NO: 1032 - DNA, 16 bp, Artificial Sequence
  chemically treated genomic DNA (Homo sapiens)
ttcgtaaagtcgttgt

SEQ ID NO: 1033 - DNA, 18 bp, Artificial Sequence
  chemically treated genomic DNA (Homo sapiens)
ggttttttgtaaagttgt

SEQ ID NO: 1034 - DNA, 18 bp, Artificial Sequence
  chemically treated genomic DNA (Homo sapiens)
gtttagttagcgggtttt

SEQ ID NO: 1035 - DNA, 18 bp, Artificial Sequence
  chemically treated genomic DNA (Homo sapiens)
gtttagttagtgggtttt

SEQ ID NO: 1036 - DNA, 16 bp, Artificial Sequence
  chemically treated genomic DNA (Homo sapiens)
gggcgcgtacggttat

SEQ ID NO: 1037 - DNA, 16 bp, Artificial Sequence
  chemically treated genomic DNA (Homo sapiens)
agttgggtgtgtatgg

SEQ ID NO: 1038 - DNA, 16 bp, Artificial Sequence
  chemically treated genomic DNA (Homo sapiens)
ttatcgcgcgtggagg

SEQ ID NO: 1039 - DNA, 17 bp, Artificial Sequence
  chemically treated genomic DNA (Homo sapiens)
ttattgtgtgtggagga

SEQ ID NO: 1040 - DNA, 16 bp, Artificial Sequence
  chemically treated genomic DNA (Homo sapiens)
ggtgcgcgtagagaat

SEQ ID NO: 1041 - DNA, 17 bp, Artificial Sequence
  chemically treated genomic DNA (Homo sapiens)
ggtgtgtgtagagaata

SEQ ID NO: 1042 - DNA, 16 bp, Artificial Sequence
  chemically treated genomic DNA (Homo sapiens)
taagcgtatcgacgtt

SEQ ID NO: 1043 - DNA, 19 bp, Artificial Sequence
  chemically treated genomic DNA (Homo sapiens)
attttaagtgtattgatgt

SEQ ID NO: 1044 - DNA, 16 bp, Artificial Sequence
  chemically treated genomic DNA (Homo sapiens)
aaatatcgaacgggat

SEQ ID NO: 1045 - DNA, 18 bp, Artificial Sequence
  chemically treated genomic DNA (Homo sapiens)
attgaatgggatttagag

SEQ ID NO: 1046 - DNA, 18 bp, Artificial Sequence
  chemically treated genomic DNA (Homo sapiens)
ttagagttcgagtttata

SEQ ID NO: 1047 - DNA, 18 bp, Artificial Sequence
  chemically treated genomic DNA (Homo sapiens)
ttagagtttgagtttata

SEQ ID NO: 1048 - DNA, 16 bp, Artificial Sequence
  chemically treated genomic DNA (Homo sapiens)
ttaggcgcggattcgt

SEQ ID NO: 1049 - DNA, 16 bp, Artificial Sequence
  chemically treated genomic DNA (Homo sapiens)
taggtgtggatttgtt

SEQ ID NO: 1050 - DNA, 16 bp, Artificial Sequence
  chemically treated genomic DNA (Homo sapiens)
ttcgcgaagttacggg

SEQ ID NO: 1051 - DNA, 17 bp, Artificial Sequence
  chemically treated genomic DNA (Homo sapiens)
tttgtgaagttatgggt

SEQ ID NO: 1052 - DNA, 16 bp, Artificial Sequence
  chemically treated genomic DNA (Homo sapiens)
tatcggttcggagtta

SEQ ID NO: 1053 - DNA, 17 bp, Artificial Sequence
  chemically treated genomic DNA (Homo sapiens)
attggtttggagttaga

SEQ ID NO: 1054 - DNA, 16 bp, Artificial Sequence
  chemically treated genomic DNA (Homo sapiens)
aagtagcgtcgttatt

SEQ ID NO: 1055 - DNA, 18 bp, Artificial Sequence
  chemically treated genomic DNA (Homo sapiens)
aagtagtgttgttattga

SEQ ID NO: 1056 - DNA, 16 bp, Artificial Sequence
  chemically treated genomic DNA (Homo sapiens)
gtcgttcggaattcgt

SEQ ID NO: 1057 - DNA, 17 bp, Artificial Sequence
  chemically treated genomic DNA (Homo sapiens)
agttgtttggaatttgt

SEQ ID NO: 1058 - DNA, 16 bp, Artificial Sequence
  chemically treated genomic DNA (Homo sapiens)
tacgtggtcgagggtt

SEQ ID NO: 1059 - DNA, 16 bp, Artificial Sequence
  chemically treated genomic DNA (Homo sapiens)
tatgtggttgagggtt

SEQ ID NO: 1060 - DNA, 18 bp, Artificial Sequence
  chemically treated genomic DNA (Homo sapiens)
ggaagtttcgatggttta

SEQ ID NO: 1061 - DNA, 18 bp, Artificial Sequence
  chemically treated genomic DNA (Homo sapiens)
ggaagttttgatggttta

SEQ ID NO: 1062 - DNA, 17 bp, Artificial Sequence
  chemically treated genomic DNA (Homo sapiens)
ggcgttggtatcgttga

SEQ ID NO: 1063 - DNA, 17 bp, Artificial Sequence
  chemically treated genomic DNA (Homo sapiens)
ggtgttggtattgttga

SEQ ID NO: 1064 - DNA, 16 bp, Artificial Sequence
  chemically treated genomic DNA (Homo sapiens)
ttaagacgcgtttttt

SEQ ID NO: 1065 - DNA, 17 bp, Artificial Sequence
  chemically treated genomic DNA (Homo sapiens)
aagatgtgttttttgga

SEQ ID NO: 1066 - DNA, 16 bp, Artificial Sequence
  chemically treated genomic DNA (Homo sapiens)
ttttgtcgcgggaatt

SEQ ID NO: 1067 - DNA, 17 bp, Artificial Sequence
  chemically treated genomic DNA (Homo sapiens)
tttttgttgtgggaatt

SEQ ID NO: 1068 - DNA, 16 bp, Artificial Sequence
  chemically treated genomic DNA (Homo sapiens)
atacgtagattcggag

SEQ ID NO: 1069 - DNA, 17 bp, Artificial Sequence
  chemically treated genomic DNA (Homo sapiens)
tatgtagatttggaggt

SEQ ID NO: 1070 - DNA, 18 bp, Artificial Sequence
  chemically treated genomic DNA (Homo sapiens)
gaagtggtcgttagtttt

SEQ ID NO: 1071 - DNA, 19 bp, Artificial Sequence
  chemically treated genomic DNA (Homo sapiens)
gaagtggttgttagttttt

SEQ ID NO: 1072 - DNA, 18 bp, Artificial Sequence
  chemically treated genomic DNA (Homo sapiens)
aaggaattcgttttgtaa

SEQ ID NO: 1073 - DNA, 18 bp, Artificial Sequence
  chemically treated genomic DNA (Homo sapiens)
aaggaatttgttttgtaa

SEQ ID NO: 1074 - DNA, 18 bp, Artificial Sequence
  chemically treated genomic DNA (Homo sapiens)
aatgttttcgtgatgttg

SEQ ID NO: 1075 - DNA, 18 bp, Artificial Sequence
  chemically treated genomic DNA (Homo sapiens)
aatgtttttgtgatgttg

SEQ ID NO: 1076 - DNA, 16 bp, Artificial Sequence
  chemically treated genomic DNA (Homo sapiens)
taaaacgagggagcgt

SEQ ID NO: 1077 - DNA, 16 bp, Artificial Sequence
  chemically treated genomic DNA (Homo sapiens)
aaaatgagggagtgtt

SEQ ID NO: 1078 - DNA, 16 bp, Artificial Sequence
  chemically treated genomic DNA (Homo sapiens)
aggagtcggtttcgta

SEQ ID NO: 1079 - DNA, 16 bp, Artificial Sequence
  chemically treated genomic DNA (Homo sapiens)
aggagttggttttgta

SEQ ID NO: 1080 - DNA, 16 bp, Artificial Sequence
  chemically treated genomic DNA (Homo sapiens)
taaagcgcggatattt

SEQ ID NO: 1081 - DNA, 16 bp, Artificial Sequence
  chemically treated genomic DNA (Homo sapiens)
gggtaaagtgtggata

SEQ ID NO: 1082 - DNA, 16 bp, Artificial Sequence
  chemically treated genomic DNA (Homo sapiens)
tttgagcgggtatcga

SEQ ID NO: 1083 - DNA, 16 bp, Artificial Sequence
  chemically treated genomic DNA (Homo sapiens)
tgagtgggtattgagt

SEQ ID NO: 1084 - DNA, 16 bp, Artificial Sequence
  chemically treated genomic DNA (Homo sapiens)
tagagtcgaggggcgg

SEQ ID NO: 1085 - DNA, 16 bp, Artificial Sequence
  chemically treated genomic DNA (Homo sapiens)
tagagttgaggggtgg

SEQ ID NO: 1086 - DNA, 16 bp, Artificial Sequence
  chemically treated genomic DNA (Homo sapiens)
tttcgagggacggaag

SEQ ID NO: 1087 - DNA, 16 bp, Artificial Sequence
  chemically treated genomic DNA (Homo sapiens)
ttttgagggatggaag

SEQ ID NO: 1088 - DNA, 16 bp, Artificial Sequence
  chemically treated genomic DNA (Homo sapiens)
tatgttttcggcgaat

SEQ ID NO: 1089 - DNA, 16 bp, Artificial Sequence
  chemically treated genomic DNA (Homo sapiens)
ttttggtgaatgggga

SEQ ID NO: 1090 - DNA, 16 bp, Artificial Sequence
  chemically treated genomic DNA (Homo sapiens)
atagtcgaggagtcgt

SEQ ID NO: 1091 - DNA, 17 bp, Artificial Sequence
  chemically treated genomic DNA (Homo sapiens)
aatagttgaggagttgt

SEQ ID NO: 1092 - DNA, 18 bp, Artificial Sequence
  chemically treated genomic DNA (Homo sapiens)
atttgtttcgattaattt

SEQ ID NO: 1093 - DNA, 18 bp, Artificial Sequence
  chemically treated genomic DNA (Homo sapiens)
atttgttttgattaattt

SEQ ID NO: 1094 - DNA, 18 bp, Artificial Sequence
  chemically treated genomic DNA (Homo sapiens)
aatttgcgaacgtttggg

SEQ ID NO: 1095 - DNA, 18 bp, Artificial Sequence
  chemically treated genomic DNA (Homo sapiens)
aatttgtgaatgtttggg

SEQ ID NO: 1096 - DNA, 16 bp, Artificial Sequence
  chemically treated genomic DNA (Homo sapiens)
gtcgatgttttcggta

SEQ ID NO: 1097 - DNA, 17 bp, Artificial Sequence
  chemically treated genomic DNA (Homo sapiens)
ggttgatgtttttggta

SEQ ID NO: 1098 - DNA, 17 bp, Artificial Sequence
  chemically treated genomic DNA (Homo sapiens)
gagtttcgttatatcgt

SEQ ID NO: 1099 - DNA, 18 bp, Artificial Sequence
  chemically treated genomic DNA (Homo sapiens)
ggagttttgttatattgt

SEQ ID NO: 1100 - DNA, 16 bp, Artificial Sequence
  chemically treated genomic DNA (Homo sapiens)
tttttgcggttcgata

SEQ ID NO: 1101 - DNA, 18 bp, Artificial Sequence
  chemically treated genomic DNA (Homo sapiens)
aatttttgtggtttgata

SEQ ID NO: 1102 - DNA, 20 bp, Artificial Sequence
  chemically treated genomic DNA (Homo sapiens)
tacgttaaggttaacgtata

SEQ ID NO: 1103 - DNA, 20 bp, Artificial Sequence
  chemically treated genomic DNA (Homo sapiens)
tatgttaaggttaatgtata

SEQ ID NO: 1104 - DNA, 17 bp, Artificial Sequence
  chemically treated genomic DNA (Homo sapiens)
tgtttcgtcgttataat

SEQ ID NO: 1105 - DNA, 20 bp, Artificial Sequence
  chemically treated genomic DNA (Homo sapiens)
gttttgttgttataattaga

SEQ ID NO: 1106 - DNA, 16 bp, Artificial Sequence
  chemically treated genomic DNA (Homo sapiens)
ggcgtaggttacgatt

SEQ ID NO: 1107 - DNA, 16 bp, Artificial Sequence
  chemically treated genomic DNA (Homo sapiens)
ggggtgtaggttatga

SEQ ID NO: 1108 - DNA, 16 bp, Artificial Sequence
  chemically treated genomic DNA (Homo sapiens)
attcgttacggatcgt

SEQ ID NO: 1109 - DNA, 19 bp, Artificial Sequence
  chemically treated genomic DNA (Homo sapiens)
tttatttgttatggattgt

SEQ ID NO: 1110 - DNA, 16 bp, Artificial Sequence
  chemically treated genomic DNA (Homo sapiens)
agttttcggattcgaa

SEQ ID NO: 1111 - DNA, 17 bp, Artificial Sequence
  chemically treated genomic DNA (Homo sapiens)
agagtttttggatttga

SEQ ID NO: 1112 - DNA, 16 bp, Artificial Sequence
  chemically treated genomic DNA (Homo sapiens)
tatttcgaggtagcgg

SEQ ID NO: 1113 - DNA, 16 bp, Artificial Sequence
  chemically treated genomic DNA (Homo sapiens)
tttgaggtagtgggat

SEQ ID NO: 1114 - DNA, 18 bp, Artificial Sequence
  chemically treated genomic DNA (Homo sapiens)
gagagaaacggtttttgt

SEQ ID NO: 1115 - DNA, 18 bp, Artificial Sequence
  chemically treated genomic DNA (Homo sapiens)
gagagaaatggtttttgt

SEQ ID NO: 1116 - DNA, 17 bp, Artificial Sequence
  chemically treated genomic DNA (Homo sapiens)
gtttgatggatgttttt

SEQ ID NO: 1117 - DNA, 16 bp, Artificial Sequence
  chemically treated genomic DNA (Homo sapiens)
gtacgacggtaaggat

SEQ ID NO: 1118 - DNA, 18 bp, Artificial Sequence
  chemically treated genomic DNA (Homo sapiens)
gtatgatggtaaggatta

SEQ ID NO: 1119 - DNA, 18 bp, Artificial Sequence
  chemically treated genomic DNA (Homo sapiens)
agttgtttcgtagatatt

SEQ ID NO: 1120 - DNA, 18 bp, Artificial Sequence
  chemically treated genomic DNA (Homo sapiens)
agttgttttgtagatatt

SEQ ID NO: 1121 - DNA, 17 bp, Artificial Sequence
  chemically treated genomic DNA (Homo sapiens)
agtaagcggttgtatat

SEQ ID NO: 1122 - DNA, 18 bp, Artificial Sequence
  chemically treated genomic DNA (Homo sapiens)
aaaagtaagtggttgtat

SEQ ID NO: 1123 - DNA, 17 bp, Artificial Sequence
  chemically treated genomic DNA (Homo sapiens)
aaattgagcgtttatgt

SEQ ID NO: 1124 - DNA, 18 bp, Artificial Sequence
  chemically treated genomic DNA (Homo sapiens)
attgagtgtttatgtgta

SEQ ID NO: 1125 - DNA, 16 bp, Artificial Sequence
  chemically treated genomic DNA (Homo sapiens)
ttgaagtcggtacggt

SEQ ID NO: 1126 - DNA, 16 bp, Artificial Sequence
  chemically treated genomic DNA (Homo sapiens)
tgaagttggtatggtt

SEQ ID NO: 1127 - DNA, 16 bp, Artificial Sequence
  chemically treated genomic DNA (Homo sapiens)
tgggacgcggatattt

SEQ ID NO: 1128 - DNA, 16 bp, Artificial Sequence
  chemically treated genomic DNA (Homo sapiens)
gttgggatgtggatat

SEQ ID NO: 1129 - DNA, 16 bp, Artificial Sequence
  chemically treated genomic DNA (Homo sapiens)
taaagtttcgaagcgg

SEQ ID NO: 1130 - DNA, 16 bp, Artificial Sequence
  chemically treated genomic DNA (Homo sapiens)
agttttgaagtggagt

SEQ ID NO: 1131 - DNA, 17 bp, Artificial Sequence
  chemically treated genomic DNA (Homo sapiens)
aagtcggtagttatcgt

SEQ ID NO: 1132 - DNA, 18 bp, Artificial Sequence
  chemically treated genomic DNA (Homo sapiens)
aagttggtagttattgtt

SEQ ID NO: 1133 - DNA, 16 bp, Artificial Sequence
  chemically treated genomic DNA (Homo sapiens)
gaggcgcgttattttt

SEQ ID NO: 1134 - DNA, 17 bp, Artificial Sequence
  chemically treated genomic DNA (Homo sapiens)
gggaggtgtgttatttt

SEQ ID NO: 1135 - DNA, 17 bp, Artificial Sequence
  chemically treated genomic DNA (Homo sapiens)
aacggtagttagcgata

SEQ ID NO: 1136 - DNA, 17 bp, Artificial Sequence
  chemically treated genomic DNA (Homo sapiens)
tgaatggtagttagtga

SEQ ID NO: 1137 - DNA, 16 bp, Artificial Sequence
  chemically treated genomic DNA (Homo sapiens)
ttttaacgttcgcgga

SEQ ID NO: 1138 - DNA, 16 bp, Artificial Sequence
  chemically treated genomic DNA (Homo sapiens)
aatgtttgtggaggat

SEQ ID NO: 1139 - DNA, 17 bp, Artificial Sequence
  chemically treated genomic DNA (Homo sapiens)
tttttcgcgtatatgtt

SEQ ID NO: 1140 - DNA, 21 bp, Artificial Sequence
  chemically treated genomic DNA (Homo sapiens)
ttttttgtgtatatgtttagg

SEQ ID NO: 1141 - DNA, 16 bp, Artificial Sequence
  chemically treated genomic DNA (Homo sapiens)
aagggcggtaagacgg

SEQ ID NO: 1142 - DNA, 16 bp, Artificial Sequence
  chemically treated genomic DNA (Homo sapiens)
aagggtggtaagatgg

SEQ ID NO: 1143 - DNA, 16 bp, Artificial Sequence
  chemically treated genomic DNA (Homo sapiens)
ttaggtcggacgtaag

SEQ ID NO: 1144 - DNA, 16 bp, Artificial Sequence
  chemically treated genomic DNA (Homo sapiens)
ggttaggttggatgta

SEQ ID NO: 1145 - DNA, 16 bp, Artificial Sequence
  chemically treated genomic DNA (Homo sapiens)
aggggttcgattaggg

SEQ ID NO: 1146 - DNA, 16 bp, Artificial Sequence
  chemically treated genomic DNA (Homo sapiens)
aggggtttgattaggg

SEQ ID NO: 1147 - DNA, 20 bp, Artificial Sequence
  chemically treated genomic DNA (Homo sapiens)
ttaggtatacgaaagagtat

SEQ ID NO: 1148 - DNA, 20 bp, Artificial Sequence
  chemically treated genomic DNA (Homo sapiens)
ttaggtatatgaaagagtat

SEQ ID NO: 1149 - DNA, 16 bp, Artificial Sequence
  chemically treated genomic DNA (Homo sapiens)
tgtcgtacgttatgtt

SEQ ID NO: 1150 - DNA, 17 bp, Artificial Sequence
  chemically treated genomic DNA (Homo sapiens)
ggtgttgtatgttatgt

SEQ ID NO: 1151 - DNA, 16 bp, Artificial Sequence
  chemically treated genomic DNA (Homo sapiens)
ttgattggcggacgag

SEQ ID NO: 1152 - DNA, 16 bp, Artificial Sequence
  chemically treated genomic DNA (Homo sapiens)
ttgattggtggatgag

SEQ ID NO: 1153 - DNA, 16 bp, Artificial Sequence
  chemically treated genomic DNA (Homo sapiens)
aaaacgtggacgtttt

SEQ ID NO: 1154 - DNA, 18 bp, Artificial Sequence
  chemically treated genomic DNA (Homo sapiens)
atttggagcgaggaattt

SEQ ID NO: 1155 - DNA, 18 bp, Artificial Sequence
  chemically treated genomic DNA (Homo sapiens)
atttggagtgaggaattt

SEQ ID NO: 1156 - DNA, 18 bp, Artificial Sequence
  chemically treated genomic DNA (Homo sapiens)
ttgaaagtcggttaaagt

SEQ ID NO: 1157 - DNA, 18 bp, Artificial Sequence
  chemically treated genomic DNA (Homo sapiens)
ttgaaagttggttaaagt

SEQ ID NO: 1158 - DNA, 18 bp, Artificial Sequence
  chemically treated genomic DNA (Homo sapiens)
ggtagttacgagagagtt

SEQ ID NO: 1159 - DNA, 18 bp, Artificial Sequence
  chemically treated genomic DNA (Homo sapiens)
ggtagttatgagagagtt

SEQ ID NO: 1160 - DNA, 22 bp, Artificial Sequence
  bisulfite treated nucleic acid for analysis of methylation status of SEQ ID NO: 41
gagattggagtttaattttgga

SEQ ID NO: 1161 - DNA, 17 bp, Artificial Sequence
  bisulfite treated nucleic acid for analysis of methylation status of SEQ ID NO: 41
catcccttccacccaac

SEQ ID NO: 1162 - DNA, 19 bp, Artificial Sequence
  bisulfite treated nucleic acid for analysis of methylation status of SEQ ID NO: 41
ggatcgtatagacgttcgt

SEQ ID NO: 1163 - DNA, 17 bp, Artificial Sequence
  bisulfite treated nucleic acid for analysis of methylation status of SEQ ID NO: 41
aggttgggtggaaggga

SEQ ID NO: 1164 - DNA, 25 bp, Artificial Sequence
  bisulfite treated nucleic acid for analysis of methylation status of SEQ ID NO: 41
aattttggattgtatagatgtttgt

SEQ ID NO: 1165 - DNA, 15 bp, Artificial Sequence
  bisulfite treated nucleic acid for analysis of methylation status of SEQ ID NO: 41
cccttccacccaacc

SEQ ID NO: 1166 - DNA, 16 bp, Artificial Sequence
  bisulfite treated nucleic acid for analysis of methylation status of SEQ ID NO: 41
atcccttccacccaac

SEQ ID NO: 1167 - DNA, 16 bp, Artificial Sequence
  bisulfite treated nucleic acid for analysis of methylation status of SEQ ID NO: 41
tcccttccacccaacc

SEQ ID NO: 1168 - DNA, 22 bp, Artificial Sequence
  bisulfite treated nucleic acid for analysis of methylation status of SEQ ID NO: 41
agagattggagtttaattttgg

SEQ ID NO: 1169 - DNA, 22 bp, Artificial Sequence
  bisulfite treated nucleic acid for analysis of methylation status of SEQ ID NO: 41
agattggagtttaattttggat

SEQ ID NO: 1170 - DNA, 23 bp, Artificial Sequence
  bisulfite treated nucleic acid for analysis of methylation status of SEQ ID NO: 41
tagagattggagtttaattttgg

SEQ ID NO: 1171 - DNA, 26 bp, Artificial Sequence
  bisulfite treated nucleic acid for analysis of methylation status of SEQ ID NO: 41
taattttggattgtatagatgtttgt

SEQ ID NO: 1172 - DNA, 27 bp, Artificial Sequence
  bisulfite treated nucleic acid for analysis of methylation status of SEQ ID NO: 41
ttaattttggattgtatagatgtttgt

SEQ ID NO: 1173 - DNA, 28 bp, Artificial Sequence
  bisulfite treated nucleic acid for analysis of methylation status of SEQ ID NO: 41
tttaattttggattgtatagatgtttgt

SEQ ID NO: 1174 - DNA, 24 bp, Artificial Sequence
  bisulfite treated nucleic acid for analysis of methylation status of SEQ ID NO: 41
ttggattgtatagatgtttgttga

SEQ ID NO: 1175 - DNA, 23 bp, Artificial Sequence
  bisulfite treated nucleic acid for analysis of methylation status of SEQ ID NO: 41
gagattggagtttaattttggat

SEQ ID NO: 1176 - DNA, 25 bp, Artificial Sequence
  bisulfite treated nucleic acid for analysis of methylation status of SEQ ID NO: 41
tttggattgtatagatgtttgttga

SEQ ID NO: 1177 - DNA, 25 bp, Artificial Sequence
  bisulfite treated nucleic acid for analysis of methylation status of SEQ ID NO: 41
ttggattgtatagatgtttgttgat

SEQ ID NO: 1178 - DNA, 26 bp, Artificial Sequence
  bisulfite treated nucleic acid for analysis of methylation status of SEQ ID NO: 41
ttggattgtatagatgtttgttgata

SEQ ID NO: 1179 - DNA, 26 bp, Artificial Sequence
  bisulfite treated nucleic acid for analysis of methylation status of SEQ ID NO: 41
tttggattgtatagatgtttgttgat

SEQ ID NO: 1180 - DNA, 26 bp, Artificial Sequence
  bisulfite treated nucleic acid for analysis of methylation status of SEQ ID NO: 41
ttttggattgtatagatgtttgttga

SEQ ID NO: 1181 - DNA, 27 bp, Artificial Sequence
  bisulfite treated nucleic acid for analysis of methylation status of SEQ ID NO: 41
tttggattgtatagatgtttgttgata

SEQ ID NO: 1182 - DNA, 27 bp, Artificial Sequence
  bisulfite treated nucleic acid for analysis of methylation status of SEQ ID NO: 41
ttggattgtatagatgtttgttgataa

SEQ ID NO: 1183 - DNA, 27 bp, Artificial Sequence
  bisulfite treated nucleic acid for analysis of methylation status of SEQ ID NO: 41
attttggattgtatagatgtttgttga

SEQ ID NO: 1184 - DNA, 28 bp, Artificial Sequence
  bisulfite treated nucleic acid for analysis of methylation status of SEQ ID NO: 41
tttggattgtatagatgtttgttgataa

SEQ ID NO: 1185 - DNA, 28 bp, Artificial Sequence
  bisulfite treated nucleic acid for analysis of methylation status of SEQ ID NO: 41
aattttggattgtatagatgtttgttga

SEQ ID NO: 1186 - DNA, 28 bp, Artificial Sequence
  bisulfite treated nucleic acid for analysis of methylation status of SEQ ID NO: 41
ttggattgtatagatgtttgttgataat

SEQ ID NO: 1187 - DNA, 29 bp, Artificial Sequence
  bisulfite treated nucleic acid for analysis of methylation status of SEQ ID NO: 41
aattttggattgtatagatgtttgttgat

SEQ ID NO: 1188 - DNA, 29 bp, Artificial Sequence
  bisulfite treated nucleic acid for analysis of methylation status of SEQ ID NO: 41
ttttggattgtatagatgtttgttgataa

SEQ ID NO: 1189 - DNA, 29 bp, Artificial Sequence
  bisulfite treated nucleic acid for analysis of methylation status of SEQ ID NO: 41
taattttggattgtatagatgtttgttga

SEQ ID NO: 1190 - DNA, 29 bp, Artificial Sequence
  bisulfite treated nucleic acid for analysis of methylation status of SEQ ID NO: 41
ttggattgtatagatgtttgttgataatt

SEQ ID NO: 1191 - DNA, 29 bp, Artificial Sequence
  bisulfite treated nucleic acid for analysis of methylation status of SEQ ID NO: 41
tttggattgtatagatgtttgttgataat

SEQ ID NO: 1192 - DNA, 30 bp, Artificial Sequence
  bisulfite treated nucleic acid for analysis of methylation status of SEQ ID NO: 41
aattttggattgtatagatgtttgttgata

SEQ ID NO: 1193 - DNA, 30 bp, Artificial Sequence
  nucleic acid for analysis of methylation status of SEQ ID NO: 41
taattttggattgtatagatgtttgttgat

SEQ ID NO: 1194 - DNA, 30 bp, Artificial Sequence
  bisulfite treated nucleic acid for analysis of methylation status of SEQ ID NO: 41
ttggattgtatagatgtttgttgataattt

SEQ ID NO: 1195 - DNA, 30 bp, Artificial Sequence
  bisulfite treated nucleic acid for analysis of methylation status of SEQ ID NO: 41
ttaattttggattgtatagatgtttgttga

SEQ ID NO: 1196 - DNA, 30 bp, Artificial Sequence
  bisulfite treated nucleic acid for analysis of methylation status of SEQ ID NO: 41
tttggattgtatagatgtttgttgataatt

SEQ ID NO: 1197 - DNA, 30 bp, Artificial Sequence
  bisulfite treated nucleic acid for analysis of methylation status of SEQ ID NO: 41
ttttggattgtatagatgtttgttgataat

SEQ ID NO: 1198 - DNA, 30 bp, Artificial Sequence
  bisulfite treated nucleic acid for analysis of methylation status of SEQ ID NO: 41
attttggattgtatagatgtttgttgataa

SEQ ID NO: 1199 - DNA, 26 bp, Artificial Sequence
  bisulfite treated nucleic acid for analysis of methylation status of SEQ ID NO: 6
ttctttaccttcttaaatcaacacta

SEQ ID NO: 1200 - DNA, 22 bp, Artificial Sequence
  bisulfite treated nucleic acid for analysis of methylation status of SEQ ID NO: 6
tggggaatgtgataggtagtag

SEQ ID NO: 1201 - DNA, 17 bp, Artificial Sequence
  bisulfite treated nucleic acid for analysis of methylation status of SEQ ID NO: 6
acgaaacgattaccgac

SEQ ID NO: 1202 - DNA, 19 bp, Artificial Sequence
  bisulfite treated nucleic acid for analysis of methylation status of SEQ ID NO: 6
taaacctactacctatcac

SEQ ID NO: 1203 - DNA, 23 bp, Artificial Sequence
  bisulfite treated nucleic acid for analysis of methylation status of SEQ ID NO: 6
acactacaaaacaattaccaact

SEQ ID NO: 1204 - DNA, 23 bp, Artificial Sequence
  bisulfite treated nucleic acid for analysis of methylation status of SEQ ID NO: 6
gggaatgtgataggtagtaggtt

SEQ ID NO: 1205 - DNA, 22 bp, Artificial Sequence
  bisulfite treated nucleic acid for analysis of methylation status of SEQ ID NO: 6
ggggaatgtgataggtagtagg

SEQ ID NO: 1206 - DNA, 22 bp, Artificial Sequence
  bisulfite treated nucleic acid for analysis of methylation status of SEQ ID NO: 6
gttggggaatgtgataggtagt

SEQ ID NO: 1207 - DNA, 20 bp, Artificial Sequence
  bisulfite treated nucleic acid for analysis of methylation status of SEQ ID NO: 6
ttggggaatgtgataggtag

SEQ ID NO: 1208 - DNA, 18 bp, Artificial Sequence
  bisulfite treated nucleic acid for analysis of methylation status of SEQ ID NO: 6
actacctatcacattccc

SEQ ID NO: 1209 - DNA, 22 bp, Artificial Sequence
  bisulfite treated nucleic acid for analysis of methylation status of SEQ ID NO: 6
ggaatgtgataggtagtaggtt

SEQ ID NO: 1210 - DNA, 22 bp, Artificial Sequence
  bisulfite treated nucleic acid for analysis of methylation status of SEQ ID NO: 6
atagggttggggaatgtgatag

SEQ ID NO: 1211 - DNA, 17 bp, Artificial Sequence
  bisulfite treated nucleic acid for analysis of methylation status of SEQ ID NO: 6
cctatcacattccccaa

SEQ ID NO: 1212 - DNA, 22 bp, Artificial Sequence
  bisulfite treated nucleic acid for analysis of methylation status of SEQ ID NO: 6
ggttggggaatgtgataggtag

SEQ ID NO: 1213 - DNA, 20 bp, Artificial Sequence
  bisulfite treated nucleic acid for analysis of methylation status of SEQ ID NO: 6
tagggttggggaatgtgata

SEQ ID NO: 1214 - DNA, 18 bp, Artificial Sequence
  bisulfite treated nucleic acid for analysis of methylation status of SEQ ID NO: 6
gggttggggaatgtgata

SEQ ID NO: 1215 - DNA, 19 bp, Artificial Sequence
  bisulfite treated nucleic acid for analysis of methylation status of SEQ ID NO: 6
agggttggggaatgtgata

SEQ ID NO: 1216 - DNA, 25 bp, Artificial Sequence
  bisulfite treated nucleic acid for analysis of methylation status of SEQ ID NO: 6
gaatgtgataggtagtaggtttatt

SEQ ID NO: 1217 - DNA, 21 bp, Artificial Sequence
  bisulfite treated nucleic acid for analysis of methylation status of SEQ ID NO: 6
aataaaaatccaccaacaaac

SEQ ID NO: 1218 - DNA, 24 bp, Artificial Sequence
  bisulfite treated nucleic acid for analysis of methylation status of SEQ ID NO: 6
aatgtgataggtagtaggtttatt

SEQ ID NO: 1219 - DNA, 25 bp, Artificial Sequence
  bisulfite treated nucleic acid for analysis of methylation status of SEQ ID NO: 6
tctttaccttcttaaatcaacacta

SEQ ID NO: 1220 - DNA, 24 bp, Artificial Sequence
  bisulfite treated nucleic acid for analysis of methylation status of SEQ ID NO: 6
ctttaccttcttaaatcaacacta

SEQ ID NO: 1221 - DNA, 23 bp, Artificial Sequence
  bisulfite treated nucleic acid for analysis of methylation status of SEQ ID NO: 6
tttaccttcttaaatcaacacta

SEQ ID NO: 1222 - DNA, 27 bp, Artificial Sequence
  bisulfite treated nucleic acid for analysis of methylation status of SEQ ID NO: 6
tttctttaccttcttaaatcaacacta

SEQ ID NO: 1223 - DNA, 28 bp, Artificial Sequence
  bisulfite treated nucleic acid for analysis of methylation status of SEQ ID NO: 6
ttttctttaccttcttaaatcaacacta

SEQ ID NO: 1224 - DNA, 29 bp, Artificial Sequence
  bisulfite treated nucleic acid for analysis of methylation status of SEQ ID NO: 6
attttctttaccttcttaaatcaacacta

SEQ ID NO: 1225 - DNA, 30 bp, Artificial Sequence
  bisulfite treated nucleic acid for analysis of methylation status of SEQ ID NO: 6
aattttctttaccttcttaaatcaacacta

SEQ ID NO: 1226 - DNA, 31 bp, Artificial Sequence
  bisulfite treated nucleic acid for analysis of methylation status of SEQ ID NO: 6
taattttctttaccttcttaaatcaacacta

SEQ ID NO: 1227 - DNA, 25 bp, Artificial Sequence
  bisulfite treated nucleic acid for analysis of methylation status of SEQ ID NO: 6
ttctttaccttcttaaatcaacact

SEQ ID NO: 1228 - DNA, 24 bp, Artificial Sequence
  bisulfite treated nucleic acid for analysis of methylation status of SEQ ID NO: 6
aacactacaaaacaattaccaact

SEQ ID NO: 1229 - DNA, 24 bp, Artificial Sequence
  bisulfite treated nucleic acid for analysis of methylation status of SEQ ID NO: 6
tctttaccttcttaaatcaacact

SEQ ID NO: 1230 - DNA, 23 bp, Artificial Sequence
  bisulfite treated nucleic acid for analysis of methylation status of SEQ ID NO: 6
ctttaccttcttaaatcaacact

SEQ ID NO: 1231 - DNA, 22 bp, Artificial Sequence
  bisulfite treated nucleic acid for analysis of methylation status of SEQ ID NO: 6
tttaccttcttaaatcaacact

SEQ ID NO: 1232 - DNA, 26 bp, Artificial Sequence
  bisulfite treated nucleic acid for analysis of methylation status of SEQ ID NO: 6
tttctttaccttcttaaatcaacact

SEQ ID NO: 1233 - DNA, 27 bp, Artificial Sequence
  bisulfite treated nucleic acid for analysis of methylation status of SEQ ID NO: 6
ttttctttaccttcttaaatcaacact

SEQ ID NO: 1234 - DNA, 28 bp, Artificial Sequence
  bisulfite treated nucleic acid for analysis of methylation status of SEQ ID NO: 6
attttctttaccttcttaaatcaacact

SEQ ID NO: 1235 - DNA, 29 bp, Artificial Sequence
  bisulfite treated nucleic acid for analysis of methylation status of SEQ ID NO: 6
aattttctttaccttcttaaatcaacact

SEQ ID NO: 1236 - DNA, 30 bp, Artificial Sequence
  bisulfite treated nucleic acid for analysis of methylation status of SEQ ID NO: 6
taattttctttaccttcttaaatcaacact

SEQ ID NO: 1237 - DNA, 31 bp, Artificial Sequence
  nucleic acid for analysis of methylation status of SEQ ID NO: 6
ctaattttctttaccttcttaaatcaacact

SEQ ID NO: 1238 - DNA, 24 bp, Artificial Sequence
  bisulfite treated nucleic acid for analysis of methylation status of SEQ ID NO: 6
acactacaaaacaattaccaacta

SEQ ID NO: 1239 - DNA, 25 bp, Artificial Sequence
  bisulfite treated nucleic acid for analysis of methylation status of SEQ ID NO: 6
acactacaaaacaattaccaactaa

SEQ ID NO: 1240 - DNA, 25 bp, Artificial Sequence
  bisulfite treated nucleic acid for analysis of methylation status of SEQ ID NO: 6
tcaacactacaaaacaattaccaac

SEQ ID NO: 1241 - DNA, 25 bp, Artificial Sequence
  bisulfite treated nucleic acid for analysis of methylation status of SEQ ID NO: 6
tttctttaccttcttaaatcaacac

SEQ ID NO: 1242 - DNA, 26 bp, Artificial Sequence
  bisulfite treated nucleic acid for analysis of methylation status of SEQ ID NO: 6
ttttctttaccttcttaaatcaacac

SEQ ID NO: 1243 - DNA, 27 bp, Artificial Sequence
  bisulfite treated nucleic acid for analysis of methylation status of SEQ ID NO: 6
attttctttaccttcttaaatcaacac

SEQ ID NO: 1244 - DNA, 28 bp, Artificial Sequence
  bisulfite treated nucleic acid for analysis of methylation status of SEQ ID NO: 6
aattttctttaccttcttaaatcaacac

SEQ ID NO: 1245 - DNA, 29 bp, Artificial Sequence
  bisulfite treated nucleic acid for analysis of methylation status of SEQ ID NO: 6
taattttctttaccttcttaaatcaacac

SEQ ID NO: 1246 - DNA, 30 bp, Artificial Sequence
  bisulfite treated nucleic acid for analysis of methylation status of SEQ ID NO: 6
ctaattttctttaccttcttaaatcaacac

SEQ ID NO: 1247 - DNA, 26 bp, Artificial Sequence
  bisulfite treated nucleic acid for analysis of methylation status of SEQ ID NO: 6
tcaacactacaaaacaattaccaact

SEQ ID NO: 1248 - DNA, 26 bp, Artificial Sequence
  bisulfite treated nucleic acid for analysis of methylation status of SEQ ID NO: 6
atcaacactacaaaacaattaccaac

SEQ ID NO: 1249 - DNA, 24 bp, Artificial Sequence
  bisulfite treated nucleic acid for analysis of methylation status of SEQ ID NO: 6
ttttctttaccttcttaaatcaac

SEQ ID NO: 1250 - DNA, 25 bp, Artificial Sequence
  bisulfite treated nucleic acid for analysis of methylation status of SEQ ID NO: 6
attttctttaccttcttaaatcaac

SEQ ID NO: 1251 - DNA, 26 bp, Artificial Sequence
  bisulfite treated nucleic acid for analysis of methylation status of SEQ ID NO: 6
aattttctttaccttcttaaatcaac

SEQ ID NO: 1252 - DNA, 27 bp, Artificial Sequence
  bisulfite treated nucleic acid for analysis of methylation status of SEQ ID NO: 6
taattttctttaccttcttaaatcaac

SEQ ID NO: 1253 - DNA, 28 bp, Artificial Sequence
  bisulfite treated nucleic acid for analysis of methylation status of SEQ ID NO: 6
ctaattttctttaccttcttaaatcaac

SEQ ID NO: 1254 - DNA, 29 bp, Artificial Sequence
  bisulfite treated nucleic acid for analysis of methylation status of SEQ ID NO: 6
cctaattttctttaccttcttaaatcaac

SEQ ID NO: 1255 - DNA, 27 bp, Artificial Sequence
  bisulfite treated nucleic acid for analysis of methylation status of SEQ ID NO: 6
atcaacactacaaaacaattaccaact

SEQ ID NO: 1256 - DNA, 32 bp, Artificial Sequence
  bisulfite treated nucleic acid for analysis of methylation status of SEQ ID NO: 6
tcttaaatcaacactacaaaacaattaccaac

SEQ ID NO: 1257 - DNA, 24 bp, Artificial Sequence
  bisulfite treated nucleic acid for analysis of methylation status of SEQ ID NO: 6
aattttctttaccttcttaaatca

SEQ ID NO: 1258 - DNA, 23 bp, Artificial Sequence
  bisulfite treated nucleic acid for analysis of methylation status of SEQ ID NO: 6
tttctttaccttcttaaatcaac

SEQ ID NO: 1259 - DNA, 26 bp, Artificial Sequence
  bisulfite treated nucleic acid for analysis of methylation status of SEQ ID NO: 6
cctaattttctttaccttcttaaatc

SEQ ID NO: 1260 - DNA, 22 bp, Artificial Sequence
  bisulfite treated nucleic acid for analysis of methylation status of SEQ ID NO: 6
ttctttaccttcttaaatcaac

SEQ ID NO: 1261 - DNA, 25 bp, Artificial Sequence
  bisulfite treated nucleic acid for analysis of methylation status of SEQ ID NO: 6
taattttctttaccttcttaaatca

SEQ ID NO: 1262 - DNA, 26 bp, Artificial Sequence
  bisulfite treated nucleic acid for analysis of methylation status of SEQ ID NO: 6
ctaattttctttaccttcttaaatca

SEQ ID NO: 1263 - DNA, 26 bp, Artificial Sequence
  bisulfite treated nucleic acid for analysis of methylation status of SEQ ID NO: 6
acctaattttctttaccttcttaaat

SEQ ID NO: 1264 - DNA, 24 bp, Artificial Sequence
  bisulfite treated nucleic acid for analysis of methylation status of SEQ ID NO: 6
ttctttaccttcttaaatcaacac

SEQ ID NO: 1265 - DNA, 33 bp, Artificial Sequence
  bisulfite treated nucleic acid for analysis of methylation status of SEQ ID NO: 6
ttaaatcaacactacaaaacaattaccaactaa

SEQ ID NO: 1266 - DNA, 23 bp, Artificial Sequence
  bisulfite treated nucleic acid for analysis of methylation status of SEQ ID NO: 6
tctttaccttcttaaatcaacac

SEQ ID NO: 1267 - DNA, 22 bp, Artificial Sequence
  bisulfite treated nucleic acid for analysis of methylation status of SEQ ID NO: 6
ctttaccttcttaaatcaacac

SEQ ID NO: 1268 - DNA, 33 bp, Artificial Sequence
  bisulfite treated nucleic acid for analysis of methylation status of SEQ ID NO: 6
cttaaatcaacactacaaaacaattaccaacta

SEQ ID NO: 1269 - DNA, 33 bp, Artificial Sequence
  bisulfite treated nucleic acid for analysis of methylation status of SEQ ID NO: 6
ttcttaaatcaacactacaaaacaattaccaac

SEQ ID NO: 1270 - DNA, 22 bp, Artificial Sequence
  bisulfite treated nucleic acid for analysis of methylation status of SEQ ID NO: 6
ttttctttaccttcttaaatca

SEQ ID NO: 1271 - DNA, 23 bp, Artificial Sequence
  bisulfite treated nucleic acid for analysis of methylation status of SEQ ID NO: 6
attttctttaccttcttaaatca

SEQ ID NO: 1272 - DNA, 21 bp, Artificial Sequence
  bisulfite treated nucleic acid for analysis of methylation status of SEQ ID NO: 14
acacccacttaaaatccctaa

SEQ ID NO: 1273 - DNA, 21 bp, Artificial Sequence
  bisulfite treated nucleic acid for analysis of methylation status of SEQ ID NO: 14
gttatatggggatggggaagt

SEQ ID NO: 1274 - DNA, 21 bp, Artificial Sequence
  bisulfite treated nucleic acid for analysis of methylation status of SEQ ID NO: 14
acgacgaataaaaaaacgctt

SEQ ID NO: 1275 - DNA, 16 bp, Artificial Sequence
  bisulfite treated nucleic acid for analysis of methylation status of SEQ ID NO: 14
cacaacctacttcccc

SEQ ID NO: 1276 - DNA, 33 bp, Artificial Sequence
  bisulfite treated nucleic acid for analysis of methylation status of SEQ ID NO: 14
ccctaacatatcttaaaaacacacaacaaataa

SEQ ID NO: 1277 - DNA, 20 bp, Artificial Sequence
  bisulfite treated nucleic acid for analysis of methylation status of SEQ ID NO: 14
tttttgttatatggggatgg

SEQ ID NO: 1278 - DNA, 19 bp, Artificial Sequence
  bisulfite treated nucleic acid for analysis of methylation status of SEQ ID NO: 14
tagtggtattgggggagag

SEQ ID NO: 1279 - DNA, 22 bp, Artificial Sequence
  bisulfite treated nucleic acid for analysis of methylation status of SEQ ID NO: 14
ttatatggggatggggaagtag

SEQ ID NO: 1280 - DNA, 19 bp, Artificial Sequence
  bisulfite treated nucleic acid for analysis of methylation status of SEQ ID NO: 14
tttgttatatggggatggg

SEQ ID NO: 1281 - DNA, 20 bp, Artificial Sequence
  bisulfite treated nucleic acid for analysis of methylation status of SEQ ID NO: 14
ttttgttatatggggatggg

SEQ ID NO: 1282 - DNA, 17 bp, Artificial Sequence
  bisulfite treated nucleic acid for analysis of methylation status of SEQ ID NO: 14
tggggatggggaagtag

SEQ ID NO: 1283 - DNA, 21 bp, Artificial Sequence
  bisulfite treated nucleic acid for analysis of methylation status of SEQ ID NO: 14
gtttttgttatatggggatgg

SEQ ID NO: 1284 - DNA, 22 bp, Artificial Sequence
  bisulfite treated nucleic acid for analysis of methylation status of SEQ ID NO: 14
aacacccacttaaaatccctaa

SEQ ID NO: 1285 - DNA, 20 bp, Artificial Sequence
  bisulfite treated nucleic acid for analysis of methylation status of SEQ ID NO: 14
cacccacttaaaatccctaa

SEQ ID NO: 1286 - DNA, 26 bp, Artificial Sequence
  bisulfite treated nucleic acid for analysis of methylation status of SEQ ID NO: 14
aatttaaggttgtttagatagataag

SEQ ID NO: 1287 - DNA, 22 bp, Artificial Sequence
  bisulfite treated nucleic acid for analysis of methylation status of SEQ ID NO: 14
accccactaaacaaactctaaa

SEQ ID NO: 1288 - DNA, 18 bp, Artificial Sequence
  bisulfite treated nucleic acid for analysis of methylation status of SEQ ID NO: 14
aagcgtttatcgtcgtat

SEQ ID NO: 1289 - DNA, 17 bp, Artificial Sequence
  bisulfite treated nucleic acid for analysis of methylation status of SEQ ID NO: 14
gttagagttagggaggt

SEQ ID NO: 1290 - DNA, 27 bp, Artificial Sequence
  bisulfite treated nucleic acid for analysis of methylation status of SEQ ID NO: 14
gatagataagtgtttattgttgtattg

SEQ ID NO: 1291 - DNA, 23 bp, Artificial Sequence
  bisulfite treated nucleic acid for analysis of methylation status of SEQ ID NO: 14
taccccactaaacaaactctaaa

SEQ ID NO: 1292 - DNA, 23 bp, Artificial Sequence
  bisulfite treated nucleic acid for analysis of methylation status of SEQ ID NO: 14
ataccccactaaacaaactctaa

SEQ ID NO: 1293 - DNA, 23 bp, Artificial Sequence
  bisulfite treated nucleic acid for analysis of methylation status of SEQ ID NO: 14
aataccccactaaacaaactcta

SEQ ID NO: 1294 - DNA, 21 bp, Artificial Sequence
  bisulfite treated nucleic acid for analysis of methylation status of SEQ ID NO: 14
ccccactaaacaaactctaaa

SEQ ID NO: 1295 - DNA, 22 bp, Artificial Sequence
  bisulfite treated nucleic acid for analysis of methylation status of SEQ ID NO: 14
ttaaataccccactaaacaaac

SEQ ID NO: 1296 - DNA, 24 bp, Artificial Sequence
  bisulfite treated nucleic acid for analysis of methylation status of SEQ ID NO: 14
aaataccccactaaacaaactcta

SEQ ID NO: 1297 - DNA, 22 bp, Artificial Sequence
  bisulfite treated nucleic acid for analysis of methylation status of SEQ ID NO: 14
taaataccccactaaacaaact

SEQ ID NO: 1298 - DNA, 19 bp, Artificial Sequence
  bisulfite treated nucleic acid for analysis of methylation status of SEQ ID NO: 14
cacctctctcacctatcca

SEQ ID NO: 1299 - DNA, 16 bp, Artificial Sequence
  bisulfite treated nucleic acid for analysis of methylation status of SEQ ID NO: 14
ggtggataggtgagag

SEQ ID NO: 1300 - DNA, 19 bp, Artificial Sequence
  bisulfite treated nucleic acid for analysis of methylation status of SEQ ID NO: 14
acctctctcacctatccac

SEQ ID NO: 1301 - DNA, 19 bp, Artificial Sequence
  bisulfite treated nucleic acid for analysis of methylation status of SEQ ID NO: 14
aacaaaaccattctcccaa

SEQ ID NO: 1302 - DNA, 19 bp, Artificial Sequence
  bisulfite treated nucleic acid for analysis of methylation status of SEQ ID NO: 14
acaaaaccattctcccaaa

SEQ ID NO: 1303 - DNA, 18 bp, Artificial Sequence
  bisulfite treated nucleic acid for analysis of methylation status of SEQ ID NO: 14
caaaaccattctcccaaa

SEQ ID NO: 1304 - DNA, 25 bp, Artificial Sequence
  bisulfite treated nucleic acid for analysis of methylation status of SEQ ID NO: 14
atttaaggttgtttagatagataag

SEQ ID NO: 1305 - DNA, 27 bp, Artificial Sequence
  bisulfite treated nucleic acid for analysis of methylation status of SEQ ID NO: 14
agatagataagtgtttattgttgtatt

SEQ ID NO: 1306 - DNA, 24 bp, Artificial Sequence
  bisulfite treated nucleic acid for analysis of methylation status of SEQ ID NO: 7
tctaaataacaaaatacctccatt

SEQ ID NO: 1307 - DNA, 21 bp, Artificial Sequence
  bisulfite treated nucleic acid for analysis of methylation status of SEQ ID NO: 7
gagagagagggttgaaattag

SEQ ID NO: 1308 - DNA, 16 bp, Artificial Sequence
  bisulfite treated nucleic acid for analysis of methylation status of SEQ ID NO: 7
ccattaccgacgcgac

SEQ ID NO: 1309 - DNA, 19 bp, Artificial Sequence
  bisulfite treated nucleic acid for analysis of methylation status of SEQ ID NO: 7
ctctaatttcaaccctctc

SEQ ID NO: 1310 - DNA, 20 bp, Artificial Sequence
  bisulfite treated nucleic acid for analysis of methylation status of SEQ ID NO: 7
cctccattaccaacacaacc

SEQ ID NO: 1311 - DNA, 20 bp, Artificial Sequence
  bisulfite treated nucleic acid for analysis of methylation status of SEQ ID NO: 7
agagagagggttgaaattag

SEQ ID NO: 1312 - DNA, 23 bp, Artificial Sequence
  bisulfite treated nucleic acid for analysis of methylation status of SEQ ID NO: 7
ctaaataacaaaatacctccatt

SEQ ID NO: 1313 - DNA, 23 bp, Artificial Sequence
  bisulfite treated nucleic acid for analysis of methylation status of SEQ ID NO: 7
aaataacaaaatacctccattac

SEQ ID NO: 1314 - DNA, 22 bp, Artificial Sequence
  bisulfite treated nucleic acid for analysis of methylation status of SEQ ID NO: 7
taaataacaaaatacctccatt

SEQ ID NO: 1315 - DNA, 20 bp, Artificial Sequence
  bisulfite treated nucleic acid for analysis of methylation status of SEQ ID NO: 7
acctccattaccaacacaac

SEQ ID NO: 1316 - DNA, 20 bp, Artificial Sequence
  bisulfite treated nucleic acid for analysis of methylation status of SEQ ID NO: 7
ctccattaccaacacaaccc

SEQ ID NO: 1317 - DNA, 21 bp, Artificial Sequence
  bisulfite treated nucleic acid for analysis of methylation status of SEQ ID NO: 7
tacctccattaccaacacaac

SEQ ID NO: 1318 - DNA, 21 bp, Artificial Sequence
  bisulfite treated nucleic acid for analysis of methylation status of SEQ ID NO: 7
cctccattaccaacacaaccc

SEQ ID NO: 1319 - DNA, 21 bp, Artificial Sequence
  bisulfite treated nucleic acid for analysis of methylation status of SEQ ID NO: 7
acctccattaccaacacaacc

SEQ ID NO: 1320 - DNA, 22 bp, Artificial Sequence
  bisulfite treated nucleic acid for analysis of methylation status of SEQ ID NO: 7
acctccattaccaacacaaccc

SEQ ID NO: 1321 - DNA, 22 bp, Artificial Sequence
  bisulfite treated nucleic acid for analysis of methylation status of SEQ ID NO: 7
tacctccattaccaacacaacc

SEQ ID NO: 1322 - DNA, 23 bp, Artificial Sequence
  bisulfite treated nucleic acid for analysis of methylation status of SEQ ID NO: 7
atacctccattaccaacacaacc

SEQ ID NO: 1323 - DNA, 22 bp, Artificial Sequence
  bisulfite treated nucleic acid for analysis of methylation status of SEQ ID NO: 7
aaataacaaaatacctccatta

SEQ ID NO: 1324 - DNA, 23 bp, Artificial Sequence
  bisulfite treated nucleic acid for analysis of methylation status of SEQ ID NO: 7
tacctccattaccaacacaaccc

SEQ ID NO: 1325 - DNA, 24 bp, Artificial Sequence
  bisulfite treated nucleic acid for analysis of methylation status of SEQ ID NO: 7
aatacctccattaccaacacaacc

SEQ ID NO: 1326 - DNA, 21 bp, Artificial Sequence
  bisulfite treated nucleic acid for analysis of methylation status of SEQ ID NO: 7
aaataacaaaatacctccatt

SEQ ID NO: 1327 - DNA, 24 bp, Artificial Sequence
  bisulfite treated nucleic acid for analysis of methylation status of SEQ ID NO: 7
atacctccattaccaacacaaccc

SEQ ID NO: 1328 - DNA, 25 bp, Artificial Sequence
  bisulfite treated nucleic acid for analysis of methylation status of SEQ ID NO: 7
aatacctccattaccaacacaaccc

SEQ ID NO: 1329 - DNA, 22 bp, Artificial Sequence
  bisulfite treated nucleic acid for analysis of methylation status of SEQ ID NO: 7
tctaaataacaaaatacctcca

SEQ ID NO: 1330 - DNA, 26 bp, Artificial Sequence
  bisulfite treated nucleic acid for analysis of methylation status of SEQ ID NO: 7
aaatacctccattaccaacacaaccc

SEQ ID NO: 1331 - DNA, 22 bp, Artificial Sequence
  bisulfite treated nucleic acid for analysis of methylation status of SEQ ID NO: 7
ctaaataacaaaatacctccat

SEQ ID NO: 1332 - DNA, 27 bp, Artificial Sequence
  bisulfite treated nucleic acid for analysis of methylation status of SEQ ID NO: 7
aaaatacctccattaccaacacaaccc

SEQ ID NO: 1333 - DNA, 25 bp, Artificial Sequence
  bisulfite treated nucleic acid for analysis of methylation status of SEQ ID NO: 7
tctaaataacaaaatacctccatta

SEQ ID NO: 1334 - DNA, 21 bp, Artificial Sequence
  bisulfite treated nucleic acid for analysis of methylation status of SEQ ID NO: 7
ccattaccaacacaacccacc

SEQ ID NO: 1335 - DNA, 24 bp, Artificial Sequence
  bisulfite treated nucleic acid for analysis of methylation status of SEQ ID NO: 7
ctaaataacaaaatacctccatta

SEQ ID NO: 1336 - DNA, 24 bp, Artificial Sequence
  bisulfite treated nucleic acid for analysis of methylation status of SEQ ID NO: 7
taaataacaaaatacctccattac

SEQ ID NO: 1337 - DNA, 22 bp, Artificial Sequence
  bisulfite treated nucleic acid for analysis of methylation status of SEQ ID NO: 7
tccattaccaacacaacccacc

SEQ ID NO: 1338 - DNA, 23 bp, Artificial Sequence
  bisulfite treated nucleic acid for analysis of methylation status of SEQ ID NO: 7
ctccattaccaacacaacccacc

SEQ ID NO: 1339 - DNA, 21 bp, Artificial Sequence
  bisulfite treated nucleic acid for analysis of methylation status of SEQ ID NO: 44
tttttaggggatttttgtaga

SEQ ID NO: 1340 - DNA, 21 bp, Artificial Sequence
  bisulfite treated nucleic acid for analysis of methylation status of SEQ ID NO: 44
tacccatacccaatactcaaa

SEQ ID NO: 1341 - DNA, 16 bp, Artificial Sequence
  bisulfite treated nucleic acid for analysis of methylation status of SEQ ID NO: 44
agatgcgtcgagcgta

SEQ ID NO: 1342 - DNA, 17 bp, Artificial Sequence
  bisulfite treated nucleic acid for analysis of methylation status of SEQ ID NO: 44
ggtggggagatgagata

SEQ ID NO: 1343 - DNA, 22 bp, Artificial Sequence
  bisulfite treated nucleic acid for analysis of methylation status of SEQ ID NO: 44
tgtagatgtgttgagtgtagtt

SEQ ID NO: 1344 - DNA, 21 bp, Artificial Sequence
  bisulfite treated nucleic acid for analysis of methylation status of SEQ ID NO: 44
acccatacccaatactcaaaa

SEQ ID NO: 1345 - DNA, 20 bp, Artificial Sequence
  bisulfite treated nucleic acid for analysis of methylation status of SEQ ID NO: 44
cccatacccaatactcaaaa

SEQ ID NO: 1346 - DNA, 18 bp, Artificial Sequence
  bisulfite treated nucleic acid for analysis of methylation status of SEQ ID NO: 44
tatctcatctccccaccc

SEQ ID NO: 1347 - DNA, 17 bp, Artificial Sequence
  bisulfite treated nucleic acid for analysis of methylation status of SEQ ID NO: 44
tgggtggggagatgaga

SEQ ID NO: 1348 - DNA, 17 bp, Artificial Sequence
  bisulfite treated nucleic acid for analysis of methylation status of SEQ ID NO: 44
atctcatctccccaccc

SEQ ID NO: 1349 - DNA, 20 bp, Artificial Sequence
  bisulfite treated nucleic acid for analysis of methylation status of SEQ ID NO: 44
ccatacccaatactcaaaaa

SEQ ID NO: 1350 - DNA, 17 bp, Artificial Sequence
  bisulfite treated nucleic acid for analysis of methylation status of SEQ ID NO: 44
ctcatctccccacccac

SEQ ID NO: 1351 - DNA, 19 bp, Artificial Sequence
  nucleic acid for analysis of methylation status of SEQ ID NO: 44
aatttgatttcgtggtggg

SEQ ID NO: 1352 - DNA, 21 bp, Artificial Sequence
  bisulfite treated nucleic acid for analysis of methylation status of SEQ ID NO: 44
aaaacaaataatacccatacc

SEQ ID NO: 1353 - DNA, 15 bp, Artificial Sequence
  bisulfite treated nucleic acid for analysis of methylation status of SEQ ID NO: 44
tcatctccccaccca

SEQ ID NO: 1354 - DNA, 18 bp, Artificial Sequence
  bisulfite treated nucleic acid for analysis of methylation status of SEQ ID NO: 44
gtgggtggggagatgaga

SEQ ID NO: 1355 - DNA, 18 bp, Artificial Sequence
  bisulfite treated nucleic acid for analysis of methylation status of SEQ ID NO: 44
tctcatctccccacccac

SEQ ID NO: 1356 - DNA, 20 bp, Artificial Sequence
  bisulfite treated nucleic acid for analysis of methylation status of SEQ ID NO: 44
ttttaggggatttttgtaga

SEQ ID NO: 1357 - DNA, 19 bp, Artificial Sequence
  bisulfite treated nucleic acid for analysis of methylation status of SEQ ID NO: 44
tttaggggatttttgtaga

SEQ ID NO: 1358 - DNA, 22 bp, Artificial Sequence
  bisulfite treated nucleic acid for analysis of methylation status of SEQ ID NO: 44
ttgtagatgtgttgagtgtagt

SEQ ID NO: 1359 - DNA, 23 bp, Artificial Sequence
  bisulfite treated nucleic acid for analysis of methylation status of SEQ ID NO: 44
tttgtagatgtgttgagtgtagt

SEQ ID NO: 1360 - DNA, 23 bp, Artificial Sequence
  bisulfite treated nucleic acid for analysis of methylation status of SEQ ID NO: 44
ttttgtagatgtgttgagtgtag

SEQ ID NO: 1361 - DNA, 23 bp, Artificial Sequence
  bisulfite treated nucleic acid for analysis of methylation status of SEQ ID NO: 44
tttttgtagatgtgttgagtgta

SEQ ID NO: 1362 - DNA, 23 bp, Artificial Sequence
  bisulfite treated nucleic acid for analysis of methylation status of SEQ ID NO: 44
atttttgtagatgtgttgagtgt

SEQ ID NO: 1363 - DNA, 23 bp, Artificial Sequence
  bisulfite treated nucleic acid for analysis of methylation status of SEQ ID NO: 44
tgtagatgtgttgagtgtagttt

SEQ ID NO: 1364 - DNA, 24 bp, Artificial Sequence
  bisulfite treated nucleic acid for analysis of methylation status of SEQ ID NO: 44
atttttgtagatgtgttgagtgta

SEQ ID NO: 1365 - DNA, 24 bp, Artificial Sequence
  bisulfite treated nucleic acid for analysis of methylation status of SEQ ID NO: 44
gatttttgtagatgtgttgagtgt

SEQ ID NO: 1366 - DNA, 25 bp, Artificial Sequence
  bisulfite treated nucleic acid for analysis of methylation status of SEQ ID NO: 44
gatttttgtagatgtgttgagtgta

SEQ ID NO: 1367 - DNA, 25 bp, Artificial Sequence
  bisulfite treated nucleic acid for analysis of methylation status of SEQ ID NO: 44
atttttgtagatgtgttgagtgtag

SEQ ID NO: 1368 - DNA, 23 bp, Artificial Sequence
  bisulfite treated nucleic acid for analysis of methylation status of SEQ ID NO: 1
cctactaaaatccctacctataa

SEQ ID NO: 1369 - DNA, 22 bp, Artificial Sequence
  bisulfite treated nucleic acid for analysis of methylation status of SEQ ID NO: 1
atgatggaggttaattggttta

SEQ ID NO: 1370 - DNA, 22 bp, Artificial Sequence
  bisulfite treated nucleic acid for analysis of methylation status of SEQ ID NO: 1
acgtattcgctaaaatctcgct

SEQ ID NO: 1371 - DNA, 19 bp, Artificial Sequence
  bisulfite treated nucleic acid for analysis of methylation status of SEQ ID NO: 1
taaactcaacctacacaac

SEQ ID NO: 1372 - DNA, 28 bp, Artificial Sequence
  bisulfite treated nucleic acid for analysis of methylation status of SEQ ID NO: 1
ctataaacatattcactaaaatctcact

SEQ ID NO: 1373 - DNA, 22 bp, Artificial Sequence
  bisulfite treated nucleic acid for analysis of methylation status of SEQ ID NO: 1
gatggaggttaattggtttagt

SEQ ID NO: 1374 - DNA, 21 bp, Artificial Sequence
  bisulfite treated nucleic acid for analysis of methylation status of SEQ ID NO: 1
tgatggaggttaattggttta

SEQ ID NO: 1375 - DNA, 22 bp, Artificial Sequence
  bisulfite treated nucleic acid for analysis of methylation status of SEQ ID NO: 1
gatgatggaggttaattggttt

SEQ ID NO: 1376 - DNA, 21 bp, Artificial Sequence
  bisulfite treated nucleic acid for analysis of methylation status of SEQ ID NO: 1
atttggatgatggaggttaat

SEQ ID NO: 1377 - DNA, 22 bp, Artificial Sequence
  bisulfite treated nucleic acid for analysis of methylation status of SEQ ID NO: 1
taggagtatttttaggggtttt

SEQ ID NO: 1378 - DNA, 20 bp, Artificial Sequence
  bisulfite treated nucleic acid for analysis of methylation status of SEQ ID NO: 1
gtttatttggatgatggagg

SEQ ID NO: 1379 - DNA, 24 bp, Artificial Sequence
  bisulfite treated nucleic acid for analysis of methylation status of SEQ ID NO: 1
tggaggttaattggtttagtattt

SEQ ID NO: 1380 - DNA, 20 bp, Artificial Sequence
  bisulfite treated nucleic acid for analysis of methylation status of SEQ ID NO: 1
tttggatgatggaggttaat

SEQ ID NO: 1381 - DNA, 22 bp, Artificial Sequence
  bisulfite treated nucleic acid for analysis of methylation status of SEQ ID NO: 1
tgaagtaattgttgtgtaggtt

SEQ ID NO: 1382 - DNA, 21 bp, Artificial Sequence
  bisulfite treated nucleic acid for analysis of methylation status of SEQ ID NO: 1
atggaggttaattggtttagt

SEQ ID NO: 1383 - DNA, 22 bp, Artificial Sequence
  bisulfite treated nucleic acid for analysis of methylation status of SEQ ID NO: 1
tttgtttattgtttgaaaggta

SEQ ID NO: 1384 - DNA, 24 bp, Artificial Sequence
  bisulfite treated nucleic acid for analysis of methylation status of SEQ ID NO: 1
ggaggttaattggtttagtatttt

SEQ ID NO: 1385 - DNA, 20 bp, Artificial Sequence
  bisulfite treated nucleic acid for analysis of methylation status of SEQ ID NO: 1
tggatgatggaggttaattg

SEQ ID NO: 1386 - DNA, 23 bp, Artificial Sequence
  bisulfite treated nucleic acid for analysis of methylation status of SEQ ID NO: 1
atgaagtaattgttgtgtaggtt

SEQ ID NO: 1387 - DNA, 21 bp, Artificial Sequence
  bisulfite treated nucleic acid for analysis of methylation status of SEQ ID NO: 1
aggagtatttttaggggtttt

SEQ ID NO: 1388 - DNA, 22 bp, Artificial Sequence
  bisulfite treated nucleic acid for analysis of methylation status of SEQ ID NO: 1
tatttggatgatggaggttaat

SEQ ID NO: 1389 - DNA, 22 bp, Artificial Sequence
  bisulfite treated nucleic acid for analysis of methylation status of SEQ ID NO: 1
aattgttgtgtaggttgagttt

SEQ ID NO: 1390 - DNA, 21 bp, Artificial Sequence
  bisulfite treated nucleic acid for analysis of methylation status of SEQ ID NO: 1
ttggatgatggaggttaattg

SEQ ID NO: 1391 - DNA, 23 bp, Artificial Sequence
  nucleic acid for analysis of methylation status of SEQ ID NO: 1
ggaggtatatgaagtaattgttg

SEQ ID NO: 1392 - DNA, 24 bp, Artificial Sequence
  bisulfite treated nucleic acid for analysis of methylation status of SEQ ID NO: 1
gaagtaattgttgtgtaggttgag

SEQ ID NO: 1393 - DNA, 22 bp, Artificial Sequence
  bisulfite treated nucleic acid for analysis of methylation status of SEQ ID NO: 1
ttgtttattgtttgaaaggtat

SEQ ID NO: 1394 - DNA, 24 bp, Artificial Sequence
  bisulfite treated nucleic acid for analysis of methylation status of SEQ ID NO: 1
tatgaagtaattgttgtgtaggtt

SEQ ID NO: 1395 - DNA, 21 bp, Artificial Sequence
  bisulfite treated nucleic acid for analysis of methylation status of SEQ ID NO: 1
ggtttatttggatgatggagg

SEQ ID NO: 1396 - DNA, 22 bp, Artificial Sequence
  bisulfite treated nucleic acid for analysis of methylation status of SEQ ID NO: 1
ggatgatggaggttaattggtt

SEQ ID NO: 1397 - DNA, 23 bp, Artificial Sequence
  bisulfite treated nucleic acid for analysis of methylation status of SEQ ID NO: 1
taattgttgtgtaggttgagttt

SEQ ID NO: 1398 - DNA, 24 bp, Artificial Sequence
  bisulfite treated nucleic acid for analysis of methylation status of SEQ ID NO: 1
gtaattgttgtgtaggttgagttt

SEQ ID NO: 1399 - DNA, 22 bp, Artificial Sequence
  bisulfite treated nucleic acid for analysis of methylation status of SEQ ID NO: 1
ttgttgtgtaggttgagtttag

SEQ ID NO: 1400 - DNA, 19 bp, Artificial Sequence
  bisulfite treated nucleic acid for analysis of methylation status of SEQ ID NO: 1
tctaaactcaacctacaca

SEQ ID NO: 1401 - DNA, 19 bp, Artificial Sequence
  bisulfite treated nucleic acid for analysis of methylation status of SEQ ID NO: 1
tttatttggatgatggagg

SEQ ID NO: 1402 - DNA, 24 bp, Artificial Sequence
  bisulfite treated nucleic acid for analysis of methylation status of SEQ ID NO: 1
gaggtatatgaagtaattgttgtg

SEQ ID NO: 1403 - DNA, 24 bp, Artificial Sequence
  bisulfite treated nucleic acid for analysis of methylation status of SEQ ID NO: 1
agtaattgttgtgtaggttgagtt

SEQ ID NO: 1404 - DNA, 24 bp, Artificial Sequence
  bisulfite treated nucleic acid for analysis of methylation status of SEQ ID NO: 1
aagtaattgttgtgtaggttgagt

SEQ ID NO: 1405 - DNA, 23 bp, Artificial Sequence
  bisulfite treated nucleic acid for analysis of methylation status of SEQ ID NO: 1
attgttgtgtaggttgagtttag

SEQ ID NO: 1406 - DNA, 21 bp, Artificial Sequence
  bisulfite treated nucleic acid for analysis of methylation status of SEQ ID NO: 1
aggtttatttggatgatggag

SEQ ID NO: 1407 - DNA, 21 bp, Artificial Sequence
  bisulfite treated nucleic acid for analysis of methylation status of SEQ ID NO: 1
ttatttggatgatggaggtta

SEQ ID NO: 1408 - DNA, 23 bp, Artificial Sequence
  bisulfite treated nucleic acid for analysis of methylation status of SEQ ID NO: 1
gaggttaattggtttagtatttt

SEQ ID NO: 1409 - DNA, 20 bp, Artificial Sequence
  bisulfite treated nucleic acid for analysis of methylation status of SEQ ID NO: 1
ggagtatttttaggggtttt

SEQ ID NO: 1410 - DNA, 25 bp, Artificial Sequence
  bisulfite treated nucleic acid for analysis of methylation status of SEQ ID NO: 1
atatgaagtaattgttgtgtaggtt

SEQ ID NO: 1411 - DNA, 25 bp, Artificial Sequence
  bisulfite treated nucleic acid for analysis of methylation status of SEQ ID NO: 1
aggtatatgaagtaattgttgtgta

SEQ ID NO: 1412 - DNA, 21 bp, Artificial Sequence
  bisulfite treated nucleic acid for analysis of methylation status of SEQ ID NO: 1
gaggtttatttggatgatgga

SEQ ID NO: 1413 - DNA, 20 bp, Artificial Sequence
  bisulfite treated nucleic acid for analysis of methylation status of SEQ ID NO: 1
ggaggtttatttggatgatg

SEQ ID NO: 1414 - DNA, 24 bp, Artificial Sequence
  bisulfite treated nucleic acid for analysis of methylation status of SEQ ID NO: 1
ggtatatgaagtaattgttgtgta

SEQ ID NO: 1415 - DNA, 26 bp, Artificial Sequence
  bisulfite treated nucleic acid for analysis of methylation status of SEQ ID NO: 1
tatatgaagtaattgttgtgtaggtt

SEQ ID NO: 1416 - DNA, 26 bp, Artificial Sequence
  bisulfite treated nucleic acid for analysis of methylation status of SEQ ID NO: 1
gtatatgaagtaattgttgtgtaggt

SEQ ID NO: 1417 - DNA, 21 bp, Artificial Sequence
  bisulfite treated nucleic acid for analysis of methylation status of SEQ ID NO: 1
tggaggtttatttggatgatg

SEQ ID NO: 1418 - DNA, 22 bp, Artificial Sequence
  bisulfite treated nucleic acid for analysis of methylation status of SEQ ID NO: 1
gtaggagtatttttaggggttt

SEQ ID NO: 1419 - DNA, 21 bp, Artificial Sequence
  bisulfite treated nucleic acid for analysis of methylation status of SEQ ID NO: 1
tgttgtgtaggttgagtttag

SEQ ID NO: 1420 - DNA, 24 bp, Artificial Sequence
  bisulfite treated nucleic acid for analysis of methylation status of SEQ ID NO: 1
tgtaggagtatttttaggggtttt

SEQ ID NO: 1421 - DNA, 26 bp, Artificial Sequence
  bisulfite treated nucleic acid for analysis of methylation status of SEQ ID NO: 1
tgtttattgtttgaaaggtataattg

SEQ ID NO: 1422 - DNA, 26 bp, Artificial Sequence
  bisulfite treated nucleic acid for analysis of methylation status of SEQ ID NO: 1
caacctactaaaatccctacctataa

SEQ ID NO: 1423 - DNA, 29 bp, Artificial Sequence
  bisulfite treated nucleic acid for analysis of methylation status of SEQ ID NO: 1
ctataaacatattcactaaaatctcactc

SEQ ID NO: 1424 - DNA, 29 bp, Artificial Sequence
  bisulfite treated nucleic acid for analysis of methylation status of SEQ ID NO: 1
cctataaacatattcactaaaatctcact

SEQ ID NO: 1425 - DNA, 30 bp, Artificial Sequence
  bisulfite treated nucleic acid for analysis of methylation status of SEQ ID NO: 1
cctataaacatattcactaaaatctcactc

SEQ ID NO: 1426 - DNA, 22 bp, Artificial Sequence
  bisulfite treated nucleic acid for analysis of methylation status of SEQ ID NO: 1
acctactaaaatccctacctat

SEQ ID NO: 1427 - DNA, 30 bp, Artificial Sequence
  bisulfite treated nucleic acid for analysis of methylation status of SEQ ID NO: 1
acctataaacatattcactaaaatctcact

SEQ ID NO: 1428 - DNA, 23 bp, Artificial Sequence
  bisulfite treated nucleic acid for analysis of methylation status of SEQ ID NO: 1
aacctactaaaatccctacctat

SEQ ID NO: 1429 - DNA, 24 bp, Artificial Sequence
  bisulfite treated nucleic acid for analysis of methylation status of SEQ ID NO: 1
caacctactaaaatccctacctat

SEQ ID NO: 1430 - DNA, 25 bp, Artificial Sequence
  bisulfite treated nucleic acid for analysis of methylation status of SEQ ID NO: 1
acaacctactaaaatccctacctat

SEQ ID NO: 1431 - DNA, 26 bp, Artificial Sequence
  bisulfite treated nucleic acid for analysis of methylation status of SEQ ID NO: 1
aacaacctactaaaatccctacctat

SEQ ID NO: 1432 - DNA, 30 bp, Artificial Sequence
  bisulfite treated nucleic acid for analysis of methylation status of SEQ ID NO: 1
ctataaacatattcactaaaatctcactct

SEQ ID NO: 1433 - DNA, 31 bp, Artificial Sequence
  bisulfite treated nucleic acid for analysis of methylation status of SEQ ID NO: 1
tacctataaacatattcactaaaatctcact

SEQ ID NO: 1434 - DNA, 31 bp, Artificial Sequence
  bisulfite treated nucleic acid for analysis of methylation status of SEQ ID NO: 1
acctataaacatattcactaaaatctcactc

SEQ ID NO: 1435 - DNA, 31 bp, Artificial Sequence
  bisulfite treated nucleic acid for analysis of methylation status of SEQ ID NO: 1
cctataaacatattcactaaaatctcactct

SEQ ID NO: 1436 - DNA, 32 bp, Artificial Sequence
  bisulfite treated nucleic acid for analysis of methylation status of SEQ ID NO: 1
acctataaacatattcactaaaatctcactct

SEQ ID NO: 1437 - DNA, 32 bp, Artificial Sequence
  bisulfite treated nucleic acid for analysis of methylation status of SEQ ID NO: 1
ctacctataaacatattcactaaaatctcact

SEQ ID NO: 1438 - DNA, 22 bp, Artificial Sequence
  bisulfite treated nucleic acid for analysis of methylation status of SEQ ID NO: 1
caacctactaaaatccctacct

SEQ ID NO: 1439 - DNA, 23 bp, Artificial Sequence
  bisulfite treated nucleic acid for analysis of methylation status of SEQ ID NO: 1
acaacctactaaaatccctacct

SEQ ID NO: 1440 - DNA, 32 bp, Artificial Sequence
  bisulfite treated nucleic acid for analysis of methylation status of SEQ ID NO: 1
tacctataaacatattcactaaaatctcactc

SEQ ID NO: 1441 - DNA, 33 bp, Artificial Sequence
  bisulfite treated nucleic acid for analysis of methylation status of SEQ ID NO: 1
acctataaacatattcactaaaatctcactctc

SEQ ID NO: 1442 - DNA, 33 bp, Artificial Sequence
  bisulfite treated nucleic acid for analysis of methylation status of SEQ ID NO: 1
cctacctataaacatattcactaaaatctcact

SEQ ID NO: 1443 - DNA, 33 bp, Artificial Sequence
  bisulfite treated nucleic acid for analysis of methylation status of SEQ ID NO: 1
tacctataaacatattcactaaaatctcactct

SEQ ID NO: 1444 - DNA, 33 bp, Artificial Sequence
  bisulfite treated nucleic acid for analysis of methylation status of SEQ ID NO: 1
cctataaacatattcactaaaatctcactctct

SEQ ID NO: 1445 - DNA, 33 bp, Artificial Sequence
  bisulfite treated nucleic acid for analysis of methylation status of SEQ ID NO: 1
ctacctataaacatattcactaaaatctcactc

SEQ ID NO: 1446 - DNA, 33 bp, Artificial Sequence
  bisulfite treated nucleic acid for analysis of methylation status of SEQ ID NO: 1
ctataaacatattcactaaaatctcactctcta

SEQ ID NO: 1447 - DNA, 34 bp, Artificial Sequence
  bisulfite treated nucleic acid for analysis of methylation status of SEQ ID NO: 1
ctataaacatattcactaaaatctcactctctaa

SEQ ID NO: 1448 - DNA, 17 bp, Artificial Sequence
  bisulfite treated nucleic acid for analysis of methylation status of SEQ ID NO: 9
actcccaatctcctcct

SEQ ID NO: 1449 - DNA, 23 bp, Artificial Sequence
  bisulfite treated nucleic acid for analysis of methylation status of SEQ ID NO: 9
gggttgttttggtttaagtagat

SEQ ID NO: 1450 - DNA, 16 bp, Artificial Sequence
  bisulfite treated nucleic acid for analysis of methylation status of SEQ ID NO: 9
cctcctcgccgcgacc

SEQ ID NO: 1451 - DNA, 17 bp, Artificial Sequence
  bisulfite treated nucleic acid for analysis of methylation status of SEQ ID NO: 9
cccacaaccatatctac

SEQ ID NO: 1452 - DNA, 19 bp, Artificial Sequence
  bisulfite treated nucleic acid for analysis of methylation status of SEQ ID NO: 9
atctcctcctcaccacaac

SEQ ID NO: 1453 - DNA, 21 bp, Artificial Sequence
  bisulfite treated nucleic acid for analysis of methylation status of SEQ ID NO: 9
ggggttgttttggtttaagta

SEQ ID NO: 1454 - DNA, 22 bp, Artificial Sequence
  bisulfite treated nucleic acid for analysis of methylation status of SEQ ID NO: 9
ggttgttttggtttaagtagat

SEQ ID NO: 1455 - DNA, 20 bp, Artificial Sequence
  bisulfite treated nucleic acid for analysis of methylation status of SEQ ID NO: 9
aatctcctcctcaccacaac

SEQ ID NO: 1456 - DNA, 21 bp, Artificial Sequence
  bisulfite treated nucleic acid for analysis of methylation status of SEQ ID NO: 9
aatctcctcctcaccacaacc

SEQ ID NO: 1457 - DNA, 21 bp, Artificial Sequence
  bisulfite treated nucleic acid for analysis of methylation status of SEQ ID NO: 9
caatctcctcctcaccacaac

SEQ ID NO: 1458 - DNA, 22 bp, Artificial Sequence
  bisulfite treated nucleic acid for analysis of methylation status of SEQ ID NO: 9
caatctcctcctcaccacaacc

SEQ ID NO: 1459 - DNA, 22 bp, Artificial Sequence
  bisulfite treated nucleic acid for analysis of methylation status of SEQ ID NO: 9
accttcttaaacattcctatcc

SEQ ID NO: 1460 - DNA, 20 bp, Artificial Sequence
  bisulfite treated nucleic acid for analysis of methylation status of SEQ ID NO: 9
ttggggaaagaggtaatttt

SEQ ID NO: 1461 - DNA, 16 bp, Artificial Sequence
  bisulfite treated nucleic acid for analysis of methylation status of SEQ ID NO: 9
caacccgcgtccgaaa

SEQ ID NO: 1462 - DNA, 19 bp, Artificial Sequence
  bisulfite treated nucleic acid for analysis of methylation status of SEQ ID NO: 9
aaaaattacctctttcccc

SEQ ID NO: 1463 - DNA, 21 bp, Artificial Sequence
  bisulfite treated nucleic acid for analysis of methylation status of SEQ ID NO: 9
cctatccaacccacatccaaa

SEQ ID NO: 1464 - DNA, 21 bp, Artificial Sequence
  bisulfite treated nucleic acid for analysis of methylation status of SEQ ID NO: 9
tttggggaaagaggtaatttt

SEQ ID NO: 1465 - DNA, 22 bp, Artificial Sequence
  bisulfite treated nucleic acid for analysis of methylation status of SEQ ID NO: 9
ttttggggaaagaggtaatttt

SEQ ID NO: 1466 - DNA, 22 bp, Artificial Sequence
  bisulfite treated nucleic acid for analysis of methylation status of SEQ ID NO: 9
ggtaagaaggaagggaaatagt

SEQ ID NO: 1467 - DNA, 16 bp, Artificial Sequence
  bisulfite treated nucleic acid for analysis of methylation status of SEQ ID NO: 9
cttcccaacactccac

SEQ ID NO: 1468 - DNA, 21 bp, Artificial Sequence
  bisulfite treated nucleic acid for analysis of methylation status of SEQ ID NO: 9
gagttaaggtgtagggagtgg

SEQ ID NO: 1469 - DNA, 20 bp, Artificial Sequence
  bisulfite treated nucleic acid for analysis of methylation status of SEQ ID NO: 9
tttttggggaaagaggtaat

SEQ ID NO: 1470 - DNA, 19 bp, Artificial Sequence
  bisulfite treated nucleic acid for analysis of methylation status of SEQ ID NO: 9
aaaattacctctttcccca

SEQ ID NO: 1471 - DNA, 19 bp, Artificial Sequence
  bisulfite treated nucleic acid for analysis of methylation status of SEQ ID NO: 9
tggggaaagaggtaatttt

SEQ ID NO: 1472 - DNA, 22 bp, Artificial Sequence
  bisulfite treated nucleic acid for analysis of methylation status of SEQ ID NO: 9
tagtggagtgttgggaagtaag

SEQ ID NO: 1473 - DNA, 18 bp, Artificial Sequence
  bisulfite treated nucleic acid for analysis of methylation status of SEQ ID NO: 9
cctctttccccaaaaaac

SEQ ID NO: 1474 - DNA, 21 bp, Artificial Sequence
  bisulfite treated nucleic acid for analysis of methylation status of SEQ ID NO: 9
ttagtggagtgttgggaagta

SEQ ID NO: 1475 - DNA, 17 bp, Artificial Sequence
  bisulfite treated nucleic acid for analysis of methylation status of SEQ ID NO: 9
cttacttcccaacactc

SEQ ID NO: 1476 - DNA, 21 bp, Artificial Sequence
  bisulfite treated nucleic acid for analysis of methylation status of SEQ ID NO: 9
ggagttaaggtgtagggagtg

SEQ ID NO: 1477 - DNA, 23 bp, Artificial Sequence
  bisulfite treated nucleic acid for analysis of methylation status of SEQ ID NO: 9
gagtgttgggaagtaagttgtaa

SEQ ID NO: 1478 - DNA, 21 bp, Artificial Sequence
  bisulfite treated nucleic acid for analysis of methylation status of SEQ ID NO: 9
taggatggaggtaagaaggaa

SEQ ID NO: 1479 - DNA, 22 bp, Artificial Sequence
  bisulfite treated nucleic acid for analysis of methylation status of SEQ ID NO: 9
agtgttgggaagtaagttgtaa

SEQ ID NO: 1480 - DNA, 21 bp, Artificial Sequence
  bisulfite treated nucleic acid for analysis of methylation status of SEQ ID NO: 9
gtggagtgttgggaagtaagt

SEQ ID NO: 1481 - DNA, 22 bp, Artificial Sequence
  bisulfite treated nucleic acid for analysis of methylation status of SEQ ID NO: 9
agtggagtgttgggaagtaagt

SEQ ID NO: 1482 - DNA, 23 bp, Artificial Sequence
  bisulfite treated nucleic acid for analysis of methylation status of SEQ ID NO: 9
aggtaagaaggaagggaaatagt

SEQ ID NO: 1483 - DNA, 19 bp, Artificial Sequence
  bisulfite treated nucleic acid for analysis of methylation status of SEQ ID NO: 9
ttaaggtgtagggagtggg

SEQ ID NO: 1484 - DNA, 20 bp, Artificial Sequence
  bisulfite treated nucleic acid for analysis of methylation status of SEQ ID NO: 9
gttaaggtgtagggagtggg

SEQ ID NO: 1485 - DNA, 21 bp, Artificial Sequence
  bisulfite treated nucleic acid for analysis of methylation status of SEQ ID NO: 9
agttaaggtgtagggagtggg

SEQ ID NO: 1486 - DNA, 22 bp, Artificial Sequence
  bisulfite treated nucleic acid for analysis of methylation status of SEQ ID NO: 9
ggagtgttgggaagtaagttgt

SEQ ID NO: 1487 - DNA, 22 bp, Artificial Sequence
  bisulfite treated nucleic acid for analysis of methylation status of SEQ ID NO: 9
gtgttgggaagtaagttgtaat

SEQ ID NO: 1488 - DNA, 20 bp, Artificial Sequence
  bisulfite treated nucleic acid for analysis of methylation status of SEQ ID NO: 9
tggagtgttgggaagtaagt

SEQ ID NO: 1489 - DNA, 20 bp, Artificial Sequence
  bisulfite treated nucleic acid for analysis of methylation status of SEQ ID NO: 9
gatggaggtaagaaggaagg

SEQ ID NO: 1490 - DNA, 20 bp, Artificial Sequence
  bisulfite treated nucleic acid for analysis of methylation status of SEQ ID NO: 9
ggatggaggtaagaaggaag

SEQ ID NO: 1491 - DNA, 20 bp, Artificial Sequence
  bisulfite treated nucleic acid for analysis of methylation status of SEQ ID NO: 9
aggatggaggtaagaaggaa

SEQ ID NO: 1492 - DNA, 22 bp, Artificial Sequence
  bisulfite treated nucleic acid for analysis of methylation status of SEQ ID NO: 9
tttagtggagtgttgggaagta

SEQ ID NO: 1493 - DNA, 20 bp, Artificial Sequence
  bisulfite treated nucleic acid for analysis of methylation status of SEQ ID NO: 9
atggaggtaagaaggaaggg

SEQ ID NO: 1494 - DNA, 21 bp, Artificial Sequence
  bisulfite treated nucleic acid for analysis of methylation status of SEQ ID NO: 9
tgttgggaagtaagttgtaat

SEQ ID NO: 1495 - DNA, 19 bp, Artificial Sequence
  bisulfite treated nucleic acid for analysis of methylation status of SEQ ID NO: 9
taaggtgtagggagtgggg

SEQ ID NO: 1496 - DNA, 17 bp, Artificial Sequence
  bisulfite treated nucleic acid for analysis of methylation status of SEQ ID NO: 9
aggtgtagggagtgggg

SEQ ID NO: 1497 - DNA, 21 bp, Artificial Sequence
  bisulfite treated nucleic acid for analysis of methylation status of SEQ ID NO: 9
gggagttaaggtgtagggagt

SEQ ID NO: 1498 - DNA, 19 bp, Artificial Sequence
  bisulfite treated nucleic acid for analysis of methylation status of SEQ ID NO: 9
tggaggtaagaaggaaggg

SEQ ID NO: 1499 - DNA, 21 bp, Artificial Sequence
  bisulfite treated nucleic acid for analysis of methylation status of SEQ ID NO: 9
gtaagaaggaagggaaatagt

SEQ ID NO: 1500 - DNA, 18 bp, Artificial Sequence
  bisulfite treated nucleic acid for analysis of methylation status of SEQ ID NO: 9
ggggaaagaggtaatttt

SEQ ID NO: 1501 - DNA, 23 bp, Artificial Sequence
  bisulfite treated nucleic acid for analysis of methylation status of SEQ ID NO: 9
ttttagtggagtgttgggaagta

SEQ ID NO: 1502 - DNA, 18 bp, Artificial Sequence
  bisulfite treated nucleic acid for analysis of methylation status of SEQ ID NO: 9
aaggtgtagggagtgggg

SEQ ID NO: 1503 - DNA, 17 bp, Artificial Sequence
  bisulfite treated nucleic acid for analysis of methylation status of SEQ ID NO: 9
gggggatgtaggatgga

SEQ ID NO: 1504 - DNA, 18 bp, Artificial Sequence
  bisulfite treated nucleic acid for analysis of methylation status of SEQ ID NO: 9
ggggatgtaggatggagg

SEQ ID NO: 1505 - DNA, 17 bp, Artificial Sequence
  bisulfite treated nucleic acid for analysis of methylation status of SEQ ID NO: 9
gggatgtaggatggagg

SEQ ID NO: 1506 - DNA, 20 bp, Artificial Sequence
  bisulfite treated nucleic acid for analysis of methylation status of SEQ ID NO: 9
agggagttaaggtgtaggga

SEQ ID NO: 1507 - DNA, 21 bp, Artificial Sequence
  bisulfite treated nucleic acid for analysis of methylation status of SEQ ID NO: 9
tgaaatagggagttaaggtgt

SEQ ID NO: 1508 - DNA, 20 bp, Artificial Sequence
  bisulfite treated nucleic acid for analysis of methylation status of SEQ ID NO: 9
taagaaggaagggaaatagt

SEQ ID NO: 1509 - DNA, 24 bp, Artificial Sequence
  bisulfite treated nucleic acid for analysis of methylation status of SEQ ID NO: 9
tttttagtggagtgttgggaagta

SEQ ID NO: 1510 - DNA, 21 bp, Artificial Sequence
  bisulfite treated nucleic acid for analysis of methylation status of SEQ ID NO: 9
tagggagttaaggtgtaggga

SEQ ID NO: 1511 - DNA, 23 bp, Artificial Sequence
  bisulfite treated nucleic acid for analysis of methylation status of SEQ ID NO: 9
taccttcttaaacattcctatcc

SEQ ID NO: 1512 - DNA, 24 bp, Artificial Sequence
  bisulfite treated nucleic acid for analysis of methylation status of SEQ ID NO: 9
ataccttcttaaacattcctatcc

SEQ ID NO: 1513 - DNA, 25 bp, Artificial Sequence
  bisulfite treated nucleic acid for analysis of methylation status of SEQ ID NO: 9
tataccttcttaaacattcctatcc

SEQ ID NO: 1514 - DNA, 21 bp, Artificial Sequence
  bisulfite treated nucleic acid for analysis of methylation status of SEQ ID NO: 9
ctatccaacccacatccaaaa

SEQ ID NO: 1515 - DNA, 22 bp, Artificial Sequence
  bisulfite treated nucleic acid for analysis of methylation status of SEQ ID NO: 9
tcctatccaacccacatccaaa

SEQ ID NO: 1516 - DNA, 22 bp, Artificial Sequence
  bisulfite treated nucleic acid for analysis of methylation status of SEQ ID NO: 9
cctatccaacccacatccaaaa

SEQ ID NO: 1517 - DNA, 23 bp, Artificial Sequence
  bisulfite treated nucleic acid for analysis of methylation status of SEQ ID NO: 9
tcctatccaacccacatccaaaa

SEQ ID NO: 1518 - DNA, 23 bp, Artificial Sequence
  bisulfite treated nucleic acid for analysis of methylation status of SEQ ID NO: 9
ttcctatccaacccacatccaaa

SEQ ID NO: 1519 - DNA, 24 bp, Artificial Sequence
  bisulfite treated nucleic acid for analysis of methylation status of SEQ ID NO: 9
attcctatccaacccacatccaaa

SEQ ID NO: 1520 - DNA, 24 bp, Artificial Sequence
  bisulfite treated nucleic acid for analysis of methylation status of SEQ ID NO: 9
cattataccttcttaaacattcct

SEQ ID NO: 1521 - DNA, 25 bp, Artificial Sequence
  bisulfite treated nucleic acid for analysis of methylation status of SEQ ID NO: 9
acattataccttcttaaacattcct

SEQ ID NO: 1522 - DNA, 26 bp, Artificial Sequence
  bisulfite treated nucleic acid for analysis of methylation status of SEQ ID NO: 9
aacattataccttcttaaacattcct

SEQ ID NO: 1523 - DNA, 25 bp, Artificial Sequence
  bisulfite treated nucleic acid for analysis of methylation status of SEQ ID NO: 9
accttcttaaacattcctatccaac

SEQ ID NO: 1524 - DNA, 24 bp, Artificial Sequence
  bisulfite treated nucleic acid for analysis of methylation status of SEQ ID NO: 9
tccaacccacatccaaaaaatact

SEQ ID NO: 1525 - DNA, 24 bp, Artificial Sequence
  bisulfite treated nucleic acid for analysis of methylation status of SEQ ID NO: 9
ttcctatccaacccacatccaaaa

SEQ ID NO: 1526 - DNA, 25 bp, Artificial Sequence
  bisulfite treated nucleic acid for analysis of methylation status of SEQ ID NO: 9
ttcctatccaacccacatccaaaaa

SEQ ID NO: 1527 - DNA, 25 bp, Artificial Sequence
  bisulfite treated nucleic acid for analysis of methylation status of SEQ ID NO: 9
tccaacccacatccaaaaaatactc

SEQ ID NO: 1528 - DNA, 25 bp, Artificial Sequence
  bisulfite treated nucleic acid for analysis of methylation status of SEQ ID NO: 9
attcctatccaacccacatccaaaa

SEQ ID NO: 1529 - DNA, 26 bp, Artificial Sequence
  bisulfite treated nucleic acid for analysis of methylation status of SEQ ID NO: 9
cattcctatccaacccacatccaaaa

SEQ ID NO: 1530 - DNA, 25 bp, Artificial Sequence
  bisulfite treated nucleic acid for analysis of methylation status of SEQ ID NO: 9
aacattataccttcttaaacattcc

SEQ ID NO: 1531 - DNA, 26 bp, Artificial Sequence
  bisulfite treated nucleic acid for analysis of methylation status of SEQ ID NO: 9
tccaacccacatccaaaaaatactca

SEQ ID NO: 1532 - DNA, 26 bp, Artificial Sequence
  bisulfite treated nucleic acid for analysis of methylation status of SEQ ID NO: 9
attcctatccaacccacatccaaaaa

SEQ ID NO: 1533 - DNA, 17 bp, Artificial Sequence
  bisulfite treated nucleic acid for analysis of methylation status of SEQ ID NO: 46
tggaagtgtagggatgg

SEQ ID NO: 1534 - DNA, 22 bp, Artificial Sequence
  bisulfite treated nucleic acid for analysis of methylation status of SEQ ID NO: 46
acaccctaactttattttcctt

SEQ ID NO: 1535 - DNA, 16 bp, Artificial Sequence
  bisulfite treated nucleic acid for analysis of methylation status of SEQ ID NO: 46
ggcgtagtcgcgattg

SEQ ID NO: 1536 - DNA, 20 bp, Artificial Sequence
  bisulfite treated nucleic acid for analysis of methylation status of SEQ ID NO: 46
ggttttggaatagagaatag

SEQ ID NO: 1537 - DNA, 23 bp, Artificial Sequence
  bisulfite treated nucleic acid for analysis of methylation status of SEQ ID NO: 46
ggatggtgtagttgtgattgtgt

SEQ ID NO: 1538 - DNA, 24 bp, Artificial Sequence
  bisulfite treated nucleic acid for analysis of methylation status of SEQ ID NO: 46
ttacaccctaactttattttcctt

SEQ ID NO: 1539 - DNA, 23 bp, Artificial Sequence
  bisulfite treated nucleic acid for analysis of methylation status of SEQ ID NO: 46
tacaccctaactttattttcctt

SEQ ID NO: 1540 - DNA, 21 bp, Artificial Sequence
  bisulfite treated nucleic acid for analysis of methylation status of SEQ ID NO: 46
caccctaactttattttcctt

SEQ ID NO: 1541 - DNA, 22 bp, Artificial Sequence
  bisulfite treated nucleic acid for analysis of methylation status of SEQ ID NO: 46
aaatcacttacaccctaacttt

SEQ ID NO: 1542 - DNA, 19 bp, Artificial Sequence
  bisulfite treated nucleic acid for analysis of methylation status of SEQ ID NO: 46
taaagttagggtgtaagtg

SEQ ID NO: 1543 - DNA, 24 bp, Artificial Sequence
  bisulfite treated nucleic acid for analysis of methylation status of SEQ ID NO: 46
tctattccaaaaccattttactta

SEQ ID NO: 1544 - DNA, 24 bp, Artificial Sequence
  bisulfite treated nucleic acid for analysis of methylation status of SEQ ID NO: 46
tttaagtaaaatggttttggaata

SEQ ID NO: 1545 - DNA, 25 bp, Artificial Sequence
  bisulfite treated nucleic acid for analysis of methylation status of SEQ ID NO: 46
cttacaccctaactttattttcctt

SEQ ID NO: 1546 - DNA, 25 bp, Artificial Sequence
  bisulfite treated nucleic acid for analysis of methylation status of SEQ ID NO: 46
ctctattccaaaaccattttactta

SEQ ID NO: 1547 - DNA, 23 bp, Artificial Sequence
  bisulfite treated nucleic acid for analysis of methylation status of SEQ ID NO: 46
ctattccaaaaccattttactta

SEQ ID NO: 1548 - DNA, 22 bp, Artificial Sequence
  bisulfite treated nucleic acid for analysis of methylation status of SEQ ID NO: 46
tattccaaaaccattttactta

SEQ ID NO: 1549 - DNA, 21 bp, Artificial Sequence
  bisulfite treated nucleic acid for analysis of methylation status of SEQ ID NO: 46
attccaaaaccattttactta

SEQ ID NO: 1550 - DNA, 26 bp, Artificial Sequence
  bisulfite treated nucleic acid for analysis of methylation status of SEQ ID NO: 46
tctctattccaaaaccattttactta

SEQ ID NO: 1551 - DNA, 20 bp, Artificial Sequence
  bisulfite treated nucleic acid for analysis of methylation status of SEQ ID NO: 46
ttccaaaaccattttactta

SEQ ID NO: 1552 - DNA, 27 bp, Artificial Sequence
  bisulfite treated nucleic acid for analysis of methylation status of SEQ ID NO: 46
ttctctattccaaaaccattttactta

SEQ ID NO: 1553 - DNA, 28 bp, Artificial Sequence
  bisulfite treated nucleic acid for analysis of methylation status of SEQ ID NO: 46
attctctattccaaaaccattttactta

SEQ ID NO: 1554 - DNA, 29 bp, Artificial Sequence
  bisulfite treated nucleic acid for analysis of methylation status of SEQ ID NO: 46
tattctctattccaaaaccattttactta

SEQ ID NO: 1555 - DNA, 20 bp, Artificial Sequence
  bisulfite treated nucleic acid for analysis of methylation status of SEQ ID NO: 46
agggatggtgtagttgtgat

SEQ ID NO: 1556 - DNA, 20 bp, Artificial Sequence
  bisulfite treated nucleic acid for analysis of methylation status of SEQ ID NO: 46
tagggatggtgtagttgtga

SEQ ID NO: 1557 - DNA, 21 bp, Artificial Sequence
  bisulfite treated nucleic acid for analysis of methylation status of SEQ ID NO: 46
agggatggtgtagttgtgatt

SEQ ID NO: 1558 - DNA, 21 bp, Artificial Sequence
  bisulfite treated nucleic acid for analysis of methylation status of SEQ ID NO: 46
tagggatggtgtagttgtgat

SEQ ID NO: 1559 - DNA, 21 bp, Artificial Sequence
  bisulfite treated nucleic acid for analysis of methylation status of SEQ ID NO: 46
gggatggtgtagttgtgattg

SEQ ID NO: 1560 - DNA, 21 bp, Artificial Sequence
  bisulfite treated nucleic acid for analysis of methylation status of SEQ ID NO: 46
gtagggatggtgtagttgtga

SEQ ID NO: 1561 - DNA, 22 bp, Artificial Sequence
  bisulfite treated nucleic acid for analysis of methylation status of SEQ ID NO: 46
tagggatggtgtagttgtgatt

SEQ ID NO: 1562 - DNA, 22 bp, Artificial Sequence
  bisulfite treated nucleic acid for analysis of methylation status of SEQ ID NO: 46
agggatggtgtagttgtgattg

SEQ ID NO: 1563 - DNA, 22 bp, Artificial Sequence
  bisulfite treated nucleic acid for analysis of methylation status of SEQ ID NO: 46
gtagggatggtgtagttgtgat

SEQ ID NO: 1564 - DNA, 22 bp, Artificial Sequence
  bisulfite treated nucleic acid for analysis of methylation status of SEQ ID NO: 46
tgtagggatggtgtagttgtga

SEQ ID NO: 1565 - DNA, 23 bp, Artificial Sequence
  bisulfite treated nucleic acid for analysis of methylation status of SEQ ID NO: 46
gtagggatggtgtagttgtgatt

SEQ ID NO: 1566 - DNA, 23 bp, Artificial Sequence
  bisulfite treated nucleic acid for analysis of methylation status of SEQ ID NO: 46
tagggatggtgtagttgtgattg

SEQ ID NO: 1567 - DNA, 22 bp, Artificial Sequence
  bisulfite treated nucleic acid for analysis of methylation status of SEQ ID NO: 10
gtgttgtggaaaagaaaggata

SEQ ID NO: 1568 - DNA, 24 bp, Artificial Sequence
  bisulfite treated nucleic acid for analysis of methylation status of SEQ ID NO: 10
aaacatctctaattcctaatttct

SEQ ID NO: 1569 - DNA, 16 bp, Artificial Sequence
  bisulfite treated nucleic acid for analysis of methylation status of SEQ ID NO: 10
gacgcgatggatcgtg

SEQ ID NO: 1570 - DNA, 21 bp, Artificial Sequence
  bisulfite treated nucleic acid for analysis of methylation status of SEQ ID NO: 10
tgtggaaaagaaaggataata

SEQ ID NO: 1571 - DNA, 25 bp, Artificial Sequence
  bisulfite treated nucleic acid for analysis of methylation status of SEQ ID NO: 10
aggataatagaaatgtagatgtgat

SEQ ID NO: 1572 - DNA, 23 bp, Artificial Sequence
  bisulfite treated nucleic acid for analysis of methylation status of SEQ ID NO: 10
aacatctctaattcctaatttct

SEQ ID NO: 1573 - DNA, 25 bp, Artificial Sequence
  bisulfite treated nucleic acid for analysis of methylation status of SEQ ID NO: 10
taaacatctctaattcctaatttct

SEQ ID NO: 1574 - DNA, 21 bp, Artificial Sequence
  bisulfite treated nucleic acid for analysis of methylation status of SEQ ID NO: 10
tgttgtggaaaagaaaggata

SEQ ID NO: 1575 - DNA, 21 bp, Artificial Sequence
  bisulfite treated nucleic acid for analysis of methylation status of SEQ ID NO: 10
gttgtggaaaagaaaggataa

SEQ ID NO: 1576 - DNA, 20 bp, Artificial Sequence
  bisulfite treated nucleic acid for analysis of methylation status of SEQ ID NO: 10
ttgtggaaaagaaaggataa

SEQ ID NO: 1577 - DNA, 23 bp, Artificial Sequence
  bisulfite treated nucleic acid for analysis of methylation status of SEQ ID NO: 10
ggtgttgtggaaaagaaaggata

SEQ ID NO: 1578 - DNA, 22 bp, Artificial Sequence
  bisulfite treated nucleic acid for analysis of methylation status of SEQ ID NO: 10
tgttgtggaaaagaaaggataa

SEQ ID NO: 1579 - DNA, 25 bp, Artificial Sequence
  bisulfite treated nucleic acid for analysis of methylation status of SEQ ID NO: 10
ggataatagaaatgtagatgtgatg

SEQ ID NO: 1580 - DNA, 23 bp, Artificial Sequence
  bisulfite treated nucleic acid for analysis of methylation status of SEQ ID NO: 10
gtgttgtggaaaagaaaggataa

SEQ ID NO: 1581 - DNA, 25 bp, Artificial Sequence
  bisulfite treated nucleic acid for analysis of methylation status of SEQ ID NO: 10
aaggataatagaaatgtagatgtga

SEQ ID NO: 1582 - DNA, 22 bp, Artificial Sequence
  bisulfite treated nucleic acid for analysis of methylation status of SEQ ID NO: 10
ggtgttgtggaaaagaaaggat

SEQ ID NO: 1583 - DNA, 20 bp, Artificial Sequence
  bisulfite treated nucleic acid for analysis of methylation status of SEQ ID NO: 10
gttgtggaaaagaaaggata

SEQ ID NO: 1584 - DNA, 26 bp, Artificial Sequence
  bisulfite treated nucleic acid for analysis of methylation status of SEQ ID NO: 10
aaaggataatagaaatgtagatgtga

SEQ ID NO: 1585 - DNA, 26 bp, Artificial Sequence
  bisulfite treated nucleic acid for analysis of methylation status of SEQ ID NO: 10
ggataatagaaatgtagatgtgatgg

SEQ ID NO: 1586 - DNA, 26 bp, Artificial Sequence
  bisulfite treated nucleic acid for analysis of methylation status of SEQ ID NO: 10
aaggataatagaaatgtagatgtgat

SEQ ID NO: 1587 - DNA, 26 bp, Artificial Sequence
  bisulfite treated nucleic acid for analysis of methylation status of SEQ ID NO: 10
aggataatagaaatgtagatgtgatg

SEQ ID NO: 1588 - DNA, 27 bp, Artificial Sequence
  bisulfite treated nucleic acid for analysis of methylation status of SEQ ID NO: 10
gaaaggataatagaaatgtagatgtga

SEQ ID NO: 1589 - DNA, 20 bp, Artificial Sequence
  bisulfite treated nucleic acid for analysis of methylation status of SEQ ID NO: 10
ggtgttgtggaaaagaaagg

SEQ ID NO: 1590 - DNA, 19 bp, Artificial Sequence
  bisulfite treated nucleic acid for analysis of methylation status of SEQ ID NO: 10
gttgtggaaaagaaaggat

SEQ ID NO: 1591 - DNA, 27 bp, Artificial Sequence
  bisulfite treated nucleic acid for analysis of methylation status of SEQ ID NO: 10
aaaggataatagaaatgtagatgtgat

SEQ ID NO: 1592 - DNA, 27 bp, Artificial Sequence
  bisulfite treated nucleic acid for analysis of methylation status of SEQ ID NO: 10
aaggataatagaaatgtagatgtgatg

SEQ ID NO: 1593 - DNA, 21 bp, Artificial Sequence
  bisulfite treated nucleic acid for analysis of methylation status of SEQ ID NO: 12
aacaccaataacccaaatact

SEQ ID NO: 1594 - DNA, 22 bp, Artificial Sequence
  bisulfite treated nucleic acid for analysis of methylation status of SEQ ID NO: 12
gaaggaaaaagtaggggatatt

SEQ ID NO: 1595 - DNA, 16 bp, Artificial Sequence
  bisulfite treated nucleic acid for analysis of methylation status of SEQ ID NO: 12
tatcgtaaccgcgcac

SEQ ID NO: 1596 - DNA, 17 bp, Artificial Sequence
  bisulfite treated nucleic acid for analysis of methylation status of SEQ ID NO: 12
tcaactctaccaacccc

SEQ ID NO: 1597 - DNA, 23 bp, Artificial Sequence
  bisulfite treated nucleic acid for analysis of methylation status of SEQ ID NO: 12
ccaaatactatcataaccacaca

SEQ ID NO: 1598 - DNA, 22 bp, Artificial Sequence
  bisulfite treated nucleic acid for analysis of methylation status of SEQ ID NO: 12
aaggaaaaagtaggggatattt

SEQ ID NO: 1599 - DNA, 21 bp, Artificial Sequence
  bisulfite treated nucleic acid for analysis of methylation status of SEQ ID NO: 12
ggaaggaaaaagtaggggata

SEQ ID NO: 1600 - DNA, 22 bp, Artificial Sequence
  bisulfite treated nucleic acid for analysis of methylation status of SEQ ID NO: 12
gttggtagagttgaaaggagat

SEQ ID NO: 1601 - DNA, 19 bp, Artificial Sequence
  bisulfite treated nucleic acid for analysis of methylation status of SEQ ID NO: 12
ctatctcctttcaactcta

SEQ ID NO: 1602 - DNA, 23 bp, Artificial Sequence
  bisulfite treated nucleic acid for analysis of methylation status of SEQ ID NO: 12
ttggtagagttgaaaggagatag

SEQ ID NO: 1603 - DNA, 19 bp, Artificial Sequence
  bisulfite treated nucleic acid for analysis of methylation status of SEQ ID NO: 12
atctatctcctttcaactc

SEQ ID NO: 1604 - DNA, 22 bp, Artificial Sequence
  bisulfite treated nucleic acid for analysis of methylation status of SEQ ID NO: 12
tggtagagttgaaaggagatag

SEQ ID NO: 1605 - DNA, 23 bp, Artificial Sequence
  bisulfite treated nucleic acid for analysis of methylation status of SEQ ID NO: 12
ggttggtagagttgaaaggagat

SEQ ID NO: 1606 - DNA, 25 bp, Artificial Sequence
  bisulfite treated nucleic acid for analysis of methylation status of SEQ ID NO: 12
aggaaggaaaaagtaggggatattt

SEQ ID NO: 1607 - DNA, 21 bp, Artificial Sequence
  bisulfite treated nucleic acid for analysis of methylation status of SEQ ID NO: 12
ggtagagttgaaaggagatag

SEQ ID NO: 1608 - DNA, 20 bp, Artificial Sequence
  bisulfite treated nucleic acid for analysis of methylation status of SEQ ID NO: 12
acaccaataacccaaatact

SEQ ID NO: 1609 - DNA, 23 bp, Artificial Sequence
  bisulfite treated nucleic acid for analysis of methylation status of SEQ ID NO: 12
aatactatcataaccacacacct

SEQ ID NO: 1610 - DNA, 23 bp, Artificial Sequence
  bisulfite treated nucleic acid for analysis of methylation status of SEQ ID NO: 12
aaatactatcataaccacacacc

SEQ ID NO: 1611 - DNA, 24 bp, Artificial Sequence
  bisulfite treated nucleic acid for analysis of methylation status of SEQ ID NO: 12
ccaaatactatcataaccacacac

SEQ ID NO: 1612 - DNA, 24 bp, Artificial Sequence
  bisulfite treated nucleic acid for analysis of methylation status of SEQ ID NO: 12
aaatactatcataaccacacacct

SEQ ID NO: 1613 - DNA, 24 bp, Artificial Sequence
  bisulfite treated nucleic acid for analysis of methylation status of SEQ ID NO: 12
cccaaatactatcataaccacaca

SEQ ID NO: 1614 - DNA, 24 bp, Artificial Sequence
  bisulfite treated nucleic acid for analysis of methylation status of SEQ ID NO: 12
caaatactatcataaccacacacc

SEQ ID NO: 1615 - DNA, 24 bp, Artificial Sequence
  bisulfite treated nucleic acid for analysis of methylation status of SEQ ID NO: 12
aatactatcataaccacacacctt

SEQ ID NO: 1616 - DNA, 25 bp, Artificial Sequence
  bisulfite treated nucleic acid for analysis of methylation status of SEQ ID NO: 12
ccaaatactatcataaccacacacc

SEQ ID NO: 1617 - DNA, 25 bp, Artificial Sequence
  bisulfite treated nucleic acid for analysis of methylation status of SEQ ID NO: 12
acccaaatactatcataaccacaca

SEQ ID NO: 1618 - DNA, 25 bp, Artificial Sequence
  bisulfite treated nucleic acid for analysis of methylation status of SEQ ID NO: 12
aaatactatcataaccacacacctt

SEQ ID NO: 1619 - DNA, 25 bp, Artificial Sequence
  bisulfite treated nucleic acid for analysis of methylation status of SEQ ID NO: 12
cccaaatactatcataaccacacac

SEQ ID NO: 1620 - DNA, 25 bp, Artificial Sequence
  bisulfite treated nucleic acid for analysis of methylation status of SEQ ID NO: 12
caaatactatcataaccacacacct

SEQ ID NO: 1621 - DNA, 25 bp, Artificial Sequence
  bisulfite treated nucleic acid for analysis of methylation status of SEQ ID NO: 12
aatactatcataaccacacaccttt

SEQ ID NO: 1622 - DNA, 26 bp, Artificial Sequence
  bisulfite treated nucleic acid for analysis of methylation status of SEQ ID NO: 12
acccaaatactatcataaccacacac

SEQ ID NO: 1623 - DNA, 26 bp, Artificial Sequence
  bisulfite treated nucleic acid for analysis of methylation status of SEQ ID NO: 12
caaatactatcataaccacacacctt

SEQ ID NO: 1624 - DNA, 26 bp, Artificial Sequence
  bisulfite treated nucleic acid for analysis of methylation status of SEQ ID NO: 12
aaatactatcataaccacacaccttt

SEQ ID NO: 1625 - DNA, 26 bp, Artificial Sequence
  bisulfite treated nucleic acid for analysis of methylation status of SEQ ID NO: 12
ccaaatactatcataaccacacacct

SEQ ID NO: 1626 - DNA, 26 bp, Artificial Sequence
  bisulfite treated nucleic acid for analysis of methylation status of SEQ ID NO: 12
aatactatcataaccacacaccttta

SEQ ID NO: 1627 - DNA, 26 bp, Artificial Sequence
  bisulfite treated nucleic acid for analysis of methylation status of SEQ ID NO: 12
cccaaatactatcataaccacacacc

SEQ ID NO: 1628 - DNA, 26 bp, Artificial Sequence
  bisulfite treated nucleic acid for analysis of methylation status of SEQ ID NO: 12
aacccaaatactatcataaccacaca

SEQ ID NO: 1629 - DNA, 27 bp, Artificial Sequence
  bisulfite treated nucleic acid for analysis of methylation status of SEQ ID NO: 12
caaatactatcataaccacacaccttt

SEQ ID NO: 1630 - DNA, 27 bp, Artificial Sequence
  bisulfite treated nucleic acid for analysis of methylation status of SEQ ID NO: 12
cccaaatactatcataaccacacacct

SEQ ID NO: 1631 - DNA, 27 bp, Artificial Sequence
  bisulfite treated nucleic acid for analysis of methylation status of SEQ ID NO: 12
aaatactatcataaccacacaccttta

SEQ ID NO: 1632 - DNA, 20 bp, Artificial Sequence
  bisulfite treated nucleic acid for analysis of methylation status of SEQ ID NO: 12
aacaccaataacccaaatac

SEQ ID NO: 1633 - DNA, 27 bp, Artificial Sequence
  bisulfite treated nucleic acid for analysis of methylation status of SEQ ID NO: 12
taacccaaatactatcataaccacaca

SEQ ID NO: 1634 - DNA, 27 bp, Artificial Sequence
  bisulfite treated nucleic acid for analysis of methylation status of SEQ ID NO: 12
acccaaatactatcataaccacacacc

SEQ ID NO: 1635 - DNA, 27 bp, Artificial Sequence
  bisulfite treated nucleic acid for analysis of methylation status of SEQ ID NO: 12
aatactatcataaccacacacctttaa

SEQ ID NO: 1636 - DNA, 27 bp, Artificial Sequence
  bisulfite treated nucleic acid for analysis of methylation status of SEQ ID NO: 12
aacccaaatactatcataaccacacac

SEQ ID NO: 1637 - DNA, 27 bp, Artificial Sequence
  bisulfite treated nucleic acid for analysis of methylation status of SEQ ID NO: 12
ccaaatactatcataaccacacacctt

SEQ ID NO: 1638 - DNA, 28 bp, Artificial Sequence
  bisulfite treated nucleic acid for analysis of methylation status of SEQ ID NO: 12
aaatactatcataaccacacacctttaa

SEQ ID NO: 1639 - DNA, 28 bp, Artificial Sequence
  bisulfite treated nucleic acid for analysis of methylation status of SEQ ID NO: 12
cccaaatactatcataaccacacacctt

SEQ ID NO: 1640 - DNA, 28 bp, Artificial Sequence
  bisulfite treated nucleic acid for analysis of methylation status of SEQ ID NO: 12
ccaaatactatcataaccacacaccttt

SEQ ID NO: 1641 - DNA, 28 bp, Artificial Sequence
  bisulfite treated nucleic acid for analysis of methylation status of SEQ ID NO: 12
acccaaatactatcataaccacacacct

SEQ ID NO: 1642 - DNA, 28 bp, Artificial Sequence
  bisulfite treated nucleic acid for analysis of methylation status of SEQ ID NO: 12
caaatactatcataaccacacaccttta

SEQ ID NO: 1643 - DNA, 28 bp, Artificial Sequence
  bisulfite treated nucleic acid for analysis of methylation status of SEQ ID NO: 12
aatactatcataaccacacacctttaaa

SEQ ID NO: 1644 - DNA, 29 bp, Artificial Sequence
  bisulfite treated nucleic acid for analysis of methylation status of SEQ ID NO: 12
cccaaatactatcataaccacacaccttt

SEQ ID NO: 1645 - DNA, 29 bp, Artificial Sequence
  bisulfite treated nucleic acid for analysis of methylation status of SEQ ID NO: 12
aaatactatcataaccacacacctttaaa

SEQ ID NO: 1646 - DNA, 29 bp, Artificial Sequence
  bisulfite treated nucleic acid for analysis of methylation status of SEQ ID NO: 12
aatactatcataaccacacacctttaaaa

SEQ ID NO: 1647 - DNA, 29 bp, Artificial Sequence
  bisulfite treated nucleic acid for analysis of methylation status of SEQ ID NO: 12
ccaaatactatcataaccacacaccttta

SEQ ID NO: 1648 - DNA, 29 bp, Artificial Sequence
  bisulfite treated nucleic acid for analysis of methylation status of SEQ ID NO: 12
caaatactatcataaccacacacctttaa

SEQ ID NO: 1649 - DNA, 30 bp, Artificial Sequence
  bisulfite treated nucleic acid for analysis of methylation status of SEQ ID NO: 12
caaatactatcataaccacacacctttaaa

SEQ ID NO: 1650 - DNA, 30 bp, Artificial Sequence
  bisulfite treated nucleic acid for analysis of methylation status of SEQ ID NO: 12
aaatactatcataaccacacacctttaaaa

SEQ ID NO: 1651 - DNA, 30 bp, Artificial Sequence
  bisulfite treated nucleic acid for analysis of methylation status of SEQ ID NO: 12
cccaaatactatcataaccacacaccttta

SEQ ID NO: 1652 - DNA, 30 bp, Artificial Sequence
  bisulfite treated nucleic acid for analysis of methylation status of SEQ ID NO: 12
aatactatcataaccacacacctttaaaat

SEQ ID NO: 1653 - DNA, 30 bp, Artificial Sequence
  bisulfite treated nucleic acid for analysis of methylation status of SEQ ID NO: 12
ccaaatactatcataaccacacacctttaa

SEQ ID NO: 1654 - DNA, 31 bp, Artificial Sequence
  bisulfite treated nucleic acid for analysis of methylation status of SEQ ID NO: 12
aaatactatcataaccacacacctttaaaat

SEQ ID NO: 1655 - DNA, 31 bp, Artificial Sequence
  bisulfite treated nucleic acid for analysis of methylation status of SEQ ID NO: 12
aatactatcataaccacacacctttaaaatt

SEQ ID NO: 1656 - DNA, 31 bp, Artificial Sequence
  bisulfite treated nucleic acid for analysis of methylation status of SEQ ID NO: 12
ccaaatactatcataaccacacacctttaaa

SEQ ID NO: 1657 - DNA, 31 bp, Artificial Sequence
  bisulfite treated nucleic acid for analysis of methylation status of SEQ ID NO: 12
caaatactatcataaccacacacctttaaaa

SEQ ID NO: 1658 - DNA, 32 bp, Artificial Sequence
  bisulfite treated nucleic acid for analysis of methylation status of SEQ ID NO: 12
caaatactatcataaccacacacctttaaaat

SEQ ID NO: 1659 - DNA, 32 bp, Artificial Sequence
  bisulfite treated nucleic acid for analysis of methylation status of SEQ ID NO: 12
aatactatcataaccacacacctttaaaattt

SEQ ID NO: 1660 - DNA, 32 bp, Artificial Sequence
  bisulfite treated nucleic acid for analysis of methylation status of SEQ ID NO: 12
aaatactatcataaccacacacctttaaaatt

SEQ ID NO: 1661 - DNA, 33 bp, Artificial Sequence
  bisulfite treated nucleic acid for analysis of methylation status of SEQ ID NO: 12
aatactatcataaccacacacctttaaaatttt

SEQ ID NO: 1662 - DNA, 33 bp, Artificial Sequence
  nucleic acid for analysis of methylation status of SEQ ID NO: 12
aaatactatcataaccacacacctttaaaattt

SEQ ID NO: 1663 - DNA, 34 bp, Artificial Sequence
  bisulfite treated nucleic acid for analysis of methylation status of SEQ ID NO: 12
aatactatcataaccacacacctttaaaatttta

SEQ ID NO: 1664 - DNA, 24 bp, Artificial Sequence
  bisulfite treated nucleic acid for analysis of methylation status of SEQ ID NO: 12
acaactaaatatcaaaacaatcac

SEQ ID NO: 1665 - DNA, 20 bp, Artificial Sequence
  bisulfite treated nucleic acid for analysis of methylation status of SEQ ID NO: 12
gtatttggagtaaggagggg

SEQ ID NO: 1666 - DNA, 16 bp, Artificial Sequence
  bisulfite treated nucleic acid for analysis of methylation status of SEQ ID NO: 12
atcaccgcctcgcgac

SEQ ID NO: 1667 - DNA, 17 bp, Artificial Sequence
  bisulfite treated nucleic acid for analysis of methylation status of SEQ ID NO: 12
tccaacccccacaacta

SEQ ID NO: 1668 - DNA, 19 bp, Artificial Sequence
  bisulfite treated nucleic acid for analysis of methylation status of SEQ ID NO: 12
caatcaccacctcacaacc

SEQ ID NO: 1669 - DNA, 20 bp, Artificial Sequence
  bisulfite treated nucleic acid for analysis of methylation status of SEQ ID NO: 12
ggtatttggagtaaggaggg

SEQ ID NO: 1670 - DNA, 18 bp, Artificial Sequence
  bisulfite treated nucleic acid for analysis of methylation status of SEQ ID NO: 12
atttggagtaaggagggg

SEQ ID NO: 1671 - DNA, 20 bp, Artificial Sequence
  bisulfite treated nucleic acid for analysis of methylation status of SEQ ID NO: 12
tatttggagtaaggaggggg

SEQ ID NO: 1672 - DNA, 25 bp, Artificial Sequence
  bisulfite treated nucleic acid for analysis of methylation status of SEQ ID NO: 12
aaaggtttagttatgagaagagaga

SEQ ID NO: 1673 - DNA, 23 bp, Artificial Sequence
  bisulfite treated nucleic acid for analysis of methylation status of SEQ ID NO: 12
aaaagtaagagaaaataaaggtt

SEQ ID NO: 1674 - DNA, 24 bp, Artificial Sequence
  bisulfite treated nucleic acid for analysis of methylation status of SEQ ID NO: 12
aaggtttagttatgagaagagaga

SEQ ID NO: 1675 - DNA, 17 bp, Artificial Sequence
  bisulfite treated nucleic acid for analysis of methylation status of SEQ ID NO: 12
ttggagtaaggaggggg

SEQ ID NO: 1676 - DNA, 23 bp, Artificial Sequence
  bisulfite treated nucleic acid for analysis of methylation status of SEQ ID NO: 12
aggtttagttatgagaagagaga

SEQ ID NO: 1677 - DNA, 26 bp, Artificial Sequence
  bisulfite treated nucleic acid for analysis of methylation status of SEQ ID NO: 12
ggtttagttatgagaagagagataga

SEQ ID NO: 1678 - DNA, 17 bp, Artificial Sequence
  bisulfite treated nucleic acid for analysis of methylation status of SEQ ID NO: 12
tttggagtaaggagggg

SEQ ID NO: 1679 - DNA, 25 bp, Artificial Sequence
  bisulfite treated nucleic acid for analysis of methylation status of SEQ ID NO: 12
tagttatgagaagagagatagaaat

SEQ ID NO: 1680 - DNA, 27 bp, Artificial Sequence
  bisulfite treated nucleic acid for analysis of methylation status of SEQ ID NO: 12
tttagttatgagaagagagatagaaat

SEQ ID NO: 1681 - DNA, 28 bp, Artificial Sequence
  nucleic acid for analysis of methylation status of SEQ ID NO: 12
gtttagttatgagaagagagatagaaat

SEQ ID NO: 1682 - DNA, 26 bp, Artificial Sequence
  bisulfite treated nucleic acid for analysis of methylation status of SEQ ID NO: 12
ttagttatgagaagagagatagaaat

SEQ ID NO: 1683 - DNA, 23 bp, Artificial Sequence
  bisulfite treated nucleic acid for analysis of methylation status of SEQ ID NO: 12
caactaaatatcaaaacaatcac

SEQ ID NO: 1684 - DNA, 19 bp, Artificial Sequence
  bisulfite treated nucleic acid for analysis of methylation status of SEQ ID NO: 12
aatcaccacctcacaaccc

SEQ ID NO: 1685 - DNA, 20 bp, Artificial Sequence
  bisulfite treated nucleic acid for analysis of methylation status of SEQ ID NO: 12
aatcaccacctcacaaccct

SEQ ID NO: 1686 - DNA, 20 bp, Artificial Sequence
  bisulfite treated nucleic acid for analysis of methylation status of SEQ ID NO: 12
caatcaccacctcacaaccc

SEQ ID NO: 1687 - DNA, 21 bp, Artificial Sequence
  bisulfite treated nucleic acid for analysis of methylation status of SEQ ID NO: 12
acaatcaccacctcacaaccc

SEQ ID NO: 1688 - DNA, 21 bp, Artificial Sequence
  bisulfite treated nucleic acid for analysis of methylation status of SEQ ID NO: 12
caatcaccacctcacaaccct

SEQ ID NO: 1689 - DNA, 21 bp, Artificial Sequence
  bisulfite treated nucleic acid for analysis of methylation status of SEQ ID NO: 12
aaacaatcaccacctcacaac

SEQ ID NO: 1690 - DNA, 21 bp, Artificial Sequence
  bisulfite treated nucleic acid for analysis of methylation status of SEQ ID NO: 12
aatcaccacctcacaacccta

SEQ ID NO: 1691 - DNA, 22 bp, Artificial Sequence
  bisulfite treated nucleic acid for analysis of methylation status of SEQ ID NO: 12
caatcaccacctcacaacccta

SEQ ID NO: 1692 - DNA, 22 bp, Artificial Sequence
  bisulfite treated nucleic acid for analysis of methylation status of SEQ ID NO: 12
aatcaccacctcacaaccctac

SEQ ID NO: 1693 - DNA, 22 bp, Artificial Sequence
  bisulfite treated nucleic acid for analysis of methylation status of SEQ ID NO: 12
acaatcaccacctcacaaccct

SEQ ID NO: 1694 - DNA, 23 bp, Artificial Sequence
  bisulfite treated nucleic acid for analysis of methylation status of SEQ ID NO: 12
aatcaccacctcacaaccctacc

SEQ ID NO: 1695 - DNA, 23 bp, Artificial Sequence
  bisulfite treated nucleic acid for analysis of methylation status of SEQ ID NO: 12
caatcaccacctcacaaccctac

SEQ ID NO: 1696 - DNA, 23 bp, Artificial Sequence
  bisulfite treated nucleic acid for analysis of methylation status of SEQ ID NO: 12
acaatcaccacctcacaacccta

SEQ ID NO: 1697 - DNA, 24 bp, Artificial Sequence
  bisulfite treated nucleic acid for analysis of methylation status of SEQ ID NO: 12
acaatcaccacctcacaaccctac

SEQ ID NO: 1698 - DNA, 24 bp, Artificial Sequence
  bisulfite treated nucleic acid for analysis of methylation status of SEQ ID NO: 12
aatcaccacctcacaaccctacct

SEQ ID NO: 1699 - DNA, 24 bp, Artificial Sequence
  bisulfite treated nucleic acid for analysis of methylation status of SEQ ID NO: 12
caatcaccacctcacaaccctacc

SEQ ID NO: 1700 - DNA, 25 bp, Artificial Sequence
  bisulfite treated nucleic acid for analysis of methylation status of SEQ ID NO: 12
aaacaatcaccacctcacaacccta

SEQ ID NO: 1701 - DNA, 25 bp, Artificial Sequence
  bisulfite treated nucleic acid for analysis of methylation status of SEQ ID NO: 12
aacaatcaccacctcacaaccctac

SEQ ID NO: 1702 - DNA, 22 bp, Artificial Sequence
  bisulfite treated nucleic acid for analysis of methylation status of SEQ ID NO: 12
agtgtgatgtgagggtttattt

SEQ ID NO: 1703 - DNA, 18 bp, Artificial Sequence
  bisulfite treated nucleic acid for analysis of methylation status of SEQ ID NO: 12
acaattcacctctacccc

SEQ ID NO: 1704 - DNA, 16 bp, Artificial Sequence
  bisulfite treated nucleic acid for analysis of methylation status of SEQ ID NO: 12
tgtttttcgcgcgagt

SEQ ID NO: 1705 - DNA, 16 bp, Artificial Sequence
  bisulfite treated nucleic acid for analysis of methylation status of SEQ ID NO: 12
gggggtagaggtgaat

SEQ ID NO: 1706 - DNA, 23 bp, Artificial Sequence
  bisulfite treated nucleic acid for analysis of methylation status of SEQ ID NO: 12
ggtttattttgggtgtttgtaga

SEQ ID NO: 1707 - DNA, 19 bp, Artificial Sequence
  bisulfite treated nucleic acid for analysis of methylation status of SEQ ID NO: 12
tacaattcacctctacccc

SEQ ID NO: 1708 - DNA, 17 bp, Artificial Sequence
  bisulfite treated nucleic acid for analysis of methylation status of SEQ ID NO: 12
caattcacctctacccc

SEQ ID NO: 1709 - DNA, 21 bp, Artificial Sequence
  bisulfite treated nucleic acid for analysis of methylation status of SEQ ID NO: 12
gtgtgatgtgagggtttattt

SEQ ID NO: 1710 - DNA, 20 bp, Artificial Sequence
  bisulfite treated nucleic acid for analysis of methylation status of SEQ ID NO: 12
tgtgatgtgagggtttattt

SEQ ID NO: 1711 - DNA, 21 bp, Artificial Sequence
  bisulfite treated nucleic acid for analysis of methylation status of SEQ ID NO: 12
gagtgtgatgtgagggtttat

SEQ ID NO: 1712 - DNA, 24 bp, Artificial Sequence
  bisulfite treated nucleic acid for analysis of methylation status of SEQ ID NO: 12
ggtttattttgggtgtttgtagat

SEQ ID NO: 1713 - DNA, 24 bp, Artificial Sequence
  bisulfite treated nucleic acid for analysis of methylation status of SEQ ID NO: 12
tttattttgggtgtttgtagattt

SEQ ID NO: 1714 - DNA, 23 bp, Artificial Sequence
  bisulfite treated nucleic acid for analysis of methylation status of SEQ ID NO: 12
gagtgtgatgtgagggtttattt

SEQ ID NO: 1715 - DNA, 24 bp, Artificial Sequence
  bisulfite treated nucleic acid for analysis of methylation status of SEQ ID NO: 12
gtttattttgggtgtttgtagatt

SEQ ID NO: 1716 - DNA, 24 bp, Artificial Sequence
  bisulfite treated nucleic acid for analysis of methylation status of SEQ ID NO: 12
ttattttgggtgtttgtagatttt

SEQ ID NO: 1717 - DNA, 25 bp, Artificial Sequence
  bisulfite treated nucleic acid for analysis of methylation status of SEQ ID NO: 12
tttattttgggtgtttgtagatttt

SEQ ID NO: 1718 - DNA, 25 bp, Artificial Sequence
  bisulfite treated nucleic acid for analysis of methylation status of SEQ ID NO: 12
gtttattttgggtgtttgtagattt

SEQ ID NO: 1719 - DNA, 25 bp, Artificial Sequence
  bisulfite treated nucleic acid for analysis of methylation status of SEQ ID NO: 12
ggtttattttgggtgtttgtagatt

SEQ ID NO: 1720 - DNA, 21 bp, Artificial Sequence
  bisulfite treated nucleic acid for analysis of methylation status of SEQ ID NO: 13
ctttctctcttcccactatcc

SEQ ID NO: 1721 - DNA, 22 bp, Artificial Sequence
  bisulfite treated nucleic acid for analysis of methylation status of SEQ ID NO: 13
tagtaagttttgggagttggag

SEQ ID NO: 1722 - DNA, 19 bp, Artificial Sequence
  bisulfite treated nucleic acid for analysis of methylation status of SEQ ID NO: 13
ccgtccgccaaacctcgac

SEQ ID NO: 1723 - DNA, 17 bp, Artificial Sequence
  bisulfite treated nucleic acid for analysis of methylation status of SEQ ID NO: 13
attacctccaactccca

SEQ ID NO: 1724 - DNA, 24 bp, Artificial Sequence
  bisulfite treated nucleic acid for analysis of methylation status of SEQ ID NO: 13
ctatcccatccaccaaacctcaac

SEQ ID NO: 1725 - DNA, 21 bp, Artificial Sequence
  bisulfite treated nucleic acid for analysis of methylation status of SEQ ID NO: 13
agtaagttttgggagttggag

SEQ ID NO: 1726 - DNA, 21 bp, Artificial Sequence
  bisulfite treated nucleic acid for analysis of methylation status of SEQ ID NO: 13
gttttgggagttggaggtaat

SEQ ID NO: 1727 - DNA, 19 bp, Artificial Sequence
  bisulfite treated nucleic acid for analysis of methylation status of SEQ ID NO: 13
accctactaaacaaaatcc

SEQ ID NO: 1728 - DNA, 20 bp, Artificial Sequence
  bisulfite treated nucleic acid for analysis of methylation status of SEQ ID NO: 13
ttttgggagttggaggtaat

SEQ ID NO: 1729 - DNA, 19 bp, Artificial Sequence
  bisulfite treated nucleic acid for analysis of methylation status of SEQ ID NO: 13
tttgggagttggaggtaat

SEQ ID NO: 1730 - DNA, 22 bp, Artificial Sequence
  bisulfite treated nucleic acid for analysis of methylation status of SEQ ID NO: 13
agttttgggagttggaggtaat

SEQ ID NO: 1731 - DNA, 23 bp, Artificial Sequence
  bisulfite treated nucleic acid for analysis of methylation status of SEQ ID NO: 13
gtagtaagttttgggagttggag

SEQ ID NO: 1732 - DNA, 22 bp, Artificial Sequence
  bisulfite treated nucleic acid for analysis of methylation status of SEQ ID NO: 13
taagttttgggagttggaggta

SEQ ID NO: 1733 - DNA, 20 bp, Artificial Sequence
  bisulfite treated nucleic acid for analysis of methylation status of SEQ ID NO: 13
gtaagttttgggagttggag

SEQ ID NO: 1734 - DNA, 21 bp, Artificial Sequence
  bisulfite treated nucleic acid for analysis of methylation status of SEQ ID NO: 13
ggattttgtttagtagggttt

SEQ ID NO: 1735 - DNA, 16 bp, Artificial Sequence
  bisulfite treated nucleic acid for analysis of methylation status of SEQ ID NO: 13
ccctccaacccgaaac

SEQ ID NO: 1736 - DNA, 21 bp, Artificial Sequence
  bisulfite treated nucleic acid for analysis of methylation status of SEQ ID NO: 13
aagttttgggagttggaggta

SEQ ID NO: 1737 - DNA, 18 bp, Artificial Sequence
  bisulfite treated nucleic acid for analysis of methylation status of SEQ ID NO: 13
ttgggagttggaggtaat

SEQ ID NO: 1738 - DNA, 22 bp, Artificial Sequence
  bisulfite treated nucleic acid for analysis of methylation status of SEQ ID NO: 13
cctttctctcttcccactatcc

SEQ ID NO: 1739 - DNA, 20 bp, Artificial Sequence
  bisulfite treated nucleic acid for analysis of methylation status of SEQ ID NO: 13
tttctctcttcccactatcc

SEQ ID NO: 1740 - DNA, 22 bp, Artificial Sequence
  bisulfite treated nucleic acid for analysis of methylation status of SEQ ID NO: 13
acctttctctcttcccactatc

SEQ ID NO: 1741 - DNA, 25 bp, Artificial Sequence
  bisulfite treated nucleic acid for analysis of methylation status of SEQ ID NO: 13
actatcccatccaccaaacctcaac

SEQ ID NO: 1742 - DNA, 21 bp, Artificial Sequence
  bisulfite treated nucleic acid for analysis of methylation status of SEQ ID NO: 13
cctttctctcttcccactatc

SEQ ID NO: 1743 - DNA, 23 bp, Artificial Sequence
  bisulfite treated nucleic acid for analysis of methylation status of SEQ ID NO: 13
cacctttctctcttcccactatc

SEQ ID NO: 1744 - DNA, 20 bp, Artificial Sequence
  bisulfite treated nucleic acid for analysis of methylation status of SEQ ID NO: 3
aagggtaattggtagagggt

SEQ ID NO: 1745 - DNA, 18 bp, Artificial Sequence
  bisulfite treated nucleic acid for analysis of methylation status of SEQ ID NO: 3
tccaacccccttaaaaca

SEQ ID NO: 1746 - DNA, 16 bp, Artificial Sequence
  bisulfite treated nucleic acid for analysis of methylation status of SEQ ID NO: 3
agggtcgcgggcgttg

SEQ ID NO: 1747 - DNA, 16 bp, Artificial Sequence
  bisulfite treated nucleic acid for analysis of methylation status of SEQ ID NO: 3
gggtgggtaggaagaa

SEQ ID NO: 1748 - DNA, 18 bp, Artificial Sequence
  bisulfite treated nucleic acid for analysis of methylation status of SEQ ID NO: 3
agagggttgtgggtgttg

SEQ ID NO: 1749 - DNA, 20 bp, Artificial Sequence
  bisulfite treated nucleic acid for analysis of methylation status of SEQ ID NO: 3
actccaacccccttaaaaca

SEQ ID NO: 1750 - DNA, 18 bp, Artificial Sequence
  bisulfite treated nucleic acid for analysis of methylation status of SEQ ID NO: 3
caacccccttaaaacaaa

SEQ ID NO: 1751 - DNA, 19 bp, Artificial Sequence
  bisulfite treated nucleic acid for analysis of methylation status of SEQ ID NO: 3
ccaacccccttaaaacaaa

SEQ ID NO: 1752 - DNA, 19 bp, Artificial Sequence
  bisulfite treated nucleic acid for analysis of methylation status of SEQ ID NO: 3
ctccaacccccttaaaaca

SEQ ID NO: 1753 - DNA, 21 bp, Artificial Sequence
  bisulfite treated nucleic acid for analysis of methylation status of SEQ ID NO: 3
aactccaacccccttaaaaca

SEQ ID NO: 1754 - DNA, 21 bp, Artificial Sequence
  bisulfite treated nucleic acid for analysis of methylation status of SEQ ID NO: 3
aaactccaacccccttaaaac

SEQ ID NO: 1755 - DNA, 18 bp, Artificial Sequence
  nucleic acid for analysis of methylation status of SEQ ID NO: 3
aacccccttaaaacaaac

SEQ ID NO: 1756 - DNA, 19 bp, Artificial Sequence
  bisulfite treated nucleic acid for analysis of methylation status of SEQ ID NO: 3
agggtaattggtagagggt

SEQ ID NO: 1757 - DNA, 18 bp, Artificial Sequence
  bisulfite treated nucleic acid for analysis of methylation status of SEQ ID NO: 3
gggtaattggtagagggt

SEQ ID NO: 1758 - DNA, 19 bp, Artificial Sequence
  bisulfite treated nucleic acid for analysis of methylation status of SEQ ID NO: 3
aatcccactcctaacaaac

SEQ ID NO: 1759 - DNA, 19 bp, Artificial Sequence
  bisulfite treated nucleic acid for analysis of methylation status of SEQ ID NO: 3
ggtagagggttgtgggtgt

SEQ ID NO: 1760 - DNA, 19 bp, Artificial Sequence
  bisulfite treated nucleic acid for analysis of methylation status of SEQ ID NO: 3
tagagggttgtgggtgttg

SEQ ID NO: 1761 - DNA, 19 bp, Artificial Sequence
  bisulfite treated nucleic acid for analysis of methylation status of SEQ ID NO: 3
gtagagggttgtgggtgtt

SEQ ID NO: 1762 - DNA, 20 bp, Artificial Sequence
  bisulfite treated nucleic acid for analysis of methylation status of SEQ ID NO: 3
tggtagagggttgtgggtgt

SEQ ID NO: 1763 - DNA, 20 bp, Artificial Sequence
  bisulfite treated nucleic acid for analysis of methylation status of SEQ ID NO: 3
gtagagggttgtgggtgttg

SEQ ID NO: 1764 - DNA, 20 bp, Artificial Sequence
  bisulfite treated nucleic acid for analysis of methylation status of SEQ ID NO: 3
tagagggttgtgggtgttgg

SEQ ID NO: 1765 - DNA, 20 bp, Artificial Sequence
  bisulfite treated nucleic acid for analysis of methylation status of SEQ ID NO: 3
ggtagagggttgtgggtgtt

SEQ ID NO: 1766 - DNA, 16 bp, Artificial Sequence
  bisulfite treated nucleic acid for analysis of methylation status of SEQ ID NO: 18
tggggtgtttagggga

SEQ ID NO: 1767 - DNA, 25 bp, Artificial Sequence
  bisulfite treated nucleic acid for analysis of methylation status of SEQ ID NO: 18
aattaactctcaatcacctactaat

SEQ ID NO: 1768 - DNA, 16 bp, Artificial Sequence
  bisulfite treated nucleic acid for analysis of methylation status of SEQ ID NO: 18
ggtcggtaagtcgcgg

SEQ ID NO: 1769 - DNA, 20 bp, Artificial Sequence
  bisulfite treated nucleic acid for analysis of methylation status of SEQ ID NO: 18
gttattagtaggtgattgag

SEQ ID NO: 1770 - DNA, 17 bp, Artificial Sequence
  bisulfite treated nucleic acid for analysis of methylation status of SEQ ID NO: 18
aggggagtgtgtgggtt

SEQ ID NO: 1771 - DNA, 24 bp, Artificial Sequence
  bisulfite treated nucleic acid for analysis of methylation status of SEQ ID NO: 18
attaactctcaatcacctactaat

SEQ ID NO: 1772 - DNA, 26 bp, Artificial Sequence
  bisulfite treated nucleic acid for analysis of methylation status of SEQ ID NO: 18
aactctcaatcacctactaataacaa

SEQ ID NO: 1773 - DNA, 21 bp, Artificial Sequence
  bisulfite treated nucleic acid for analysis of methylation status of SEQ ID NO: 18
gttgttattagtaggtgattg

SEQ ID NO: 1774 - DNA, 23 bp, Artificial Sequence
  bisulfite treated nucleic acid for analysis of methylation status of SEQ ID NO: 18
tctcaatcacctactaataacaa

SEQ ID NO: 1775 - DNA, 24 bp, Artificial Sequence
  bisulfite treated nucleic acid for analysis of methylation status of SEQ ID NO: 18
ctctcaatcacctactaataacaa

SEQ ID NO: 1776 - DNA, 25 bp, Artificial Sequence
  bisulfite treated nucleic acid for analysis of methylation status of SEQ ID NO: 18
actctcaatcacctactaataacaa

SEQ ID NO: 1777 - DNA, 27 bp, Artificial Sequence
  bisulfite treated nucleic acid for analysis of methylation status of SEQ ID NO: 18
taactctcaatcacctactaataacaa

SEQ ID NO: 1778 - DNA, 25 bp, Artificial Sequence
  bisulfite treated nucleic acid for analysis of methylation status of SEQ ID NO: 18
ttaactctcaatcacctactaataa

SEQ ID NO: 1779 - DNA, 18 bp, Artificial Sequence
  bisulfite treated nucleic acid for analysis of methylation status of SEQ ID NO: 18
ttggggtgtttaggggag

SEQ ID NO: 1780 - DNA, 16 bp, Artificial Sequence
  bisulfite treated nucleic acid for analysis of methylation status of SEQ ID NO: 18
ggggtgtttaggggag

SEQ ID NO: 1781 - DNA, 19 bp, Artificial Sequence
  bisulfite treated nucleic acid for analysis of methylation status of SEQ ID NO: 18
tttggggtgtttaggggag

SEQ ID NO: 1782 - DNA, 18 bp, Artificial Sequence
  bisulfite treated nucleic acid for analysis of methylation status of SEQ ID NO: 18
ttaggggagtgtgtgggt

SEQ ID NO: 1783 - DNA, 17 bp, Artificial Sequence
  bisulfite treated nucleic acid for analysis of methylation status of SEQ ID NO: 18
ttttggggtgtttaggg

SEQ ID NO: 1784 - DNA, 17 bp, Artificial Sequence
  bisulfite treated nucleic acid for analysis of methylation status of SEQ ID NO: 18
tttggggtgtttagggg

SEQ ID NO: 1785 - DNA, 18 bp, Artificial Sequence
  bisulfite treated nucleic acid for analysis of methylation status of SEQ ID NO: 18
aggggagtgtgtgggttt

SEQ ID NO: 1786 - DNA, 18 bp, Artificial Sequence
  bisulfite treated nucleic acid for analysis of methylation status of SEQ ID NO: 18
taggggagtgtgtgggtt

SEQ ID NO: 1787 - DNA, 18 bp, Artificial Sequence
  bisulfite treated nucleic acid for analysis of methylation status of SEQ ID NO: 18
ttttggggtgtttagggg

SEQ ID NO: 1788 - DNA, 19 bp, Artificial Sequence
  bisulfite treated nucleic acid for analysis of methylation status of SEQ ID NO: 18
taggggagtgtgtgggttt

SEQ ID NO: 1789 - DNA, 19 bp, Artificial Sequence
  bisulfite treated nucleic acid for analysis of methylation status of SEQ ID NO: 18
aggggagtgtgtgggtttt

SEQ ID NO: 1790 - DNA, 19 bp, Artificial Sequence
  bisulfite treated nucleic acid for analysis of methylation status of SEQ ID NO: 18
ttaggggagtgtgtgggtt

SEQ ID NO: 1791 - DNA, 22 bp, Artificial Sequence
  bisulfite treated nucleic acid for analysis of methylation status of SEQ ID NO: 18
taattgttttggggtgtttagg

SEQ ID NO: 1792 - DNA, 19 bp, Artificial Sequence
  bisulfite treated nucleic acid for analysis of methylation status of SEQ ID NO: 18
tttaggggagtgtgtgggt

SEQ ID NO: 1793 - DNA, 21 bp, Artificial Sequence
  bisulfite treated nucleic acid for analysis of methylation status of SEQ ID NO: 18
aattgttttggggtgtttagg

SEQ ID NO: 1794 - DNA, 23 bp, Artificial Sequence
  bisulfite treated nucleic acid for analysis of methylation status of SEQ ID NO: 18
ttaattgttttggggtgtttagg

SEQ ID NO: 1795 - DNA, 20 bp, Artificial Sequence
  bisulfite treated nucleic acid for analysis of methylation status of SEQ ID NO: 18
gtttaggggagtgtgtgggt

SEQ ID NO: 1796 - DNA, 20 bp, Artificial Sequence
  bisulfite treated nucleic acid for analysis of methylation status of SEQ ID NO: 18
ttaggggagtgtgtgggttt

SEQ ID NO: 1797 - DNA, 20 bp, Artificial Sequence
  bisulfite treated nucleic acid for analysis of methylation status of SEQ ID NO: 18
taggggagtgtgtgggtttt

SEQ ID NO: 1798 - DNA, 20 bp, Artificial Sequence
  bisulfite treated nucleic acid for analysis of methylation status of SEQ ID NO: 18
tttaggggagtgtgtgggtt

SEQ ID NO: 1799 - DNA, 21 bp, Artificial Sequence
  bisulfite treated nucleic acid for analysis of methylation status of SEQ ID NO: 18
tttaggggagtgtgtgggttt

SEQ ID NO: 1800 - DNA, 21 bp, Artificial Sequence
  bisulfite treated nucleic acid for analysis of methylation status of SEQ ID NO: 18
ttaggggagtgtgtgggtttt

SEQ ID NO: 1801 - DNA, 22 bp, Artificial Sequence
  bisulfite treated nucleic acid for analysis of methylation status of SEQ ID NO: 17
atttttaggtggggtttagatt

SEQ ID NO: 1802 - DNA, 17 bp, Artificial Sequence
  bisulfite treated nucleic acid for analysis of methylation status of SEQ ID NO: 17
tccccaattccctaacc

SEQ ID NO: 1803 - DNA, 18 bp, Artificial Sequence
  bisulfite treated nucleic acid for analysis of methylation status of SEQ ID NO: 17
aggtcgttgcgggttcgg

SEQ ID NO: 1804 - DNA, 18 bp, Artificial Sequence
  bisulfite treated nucleic acid for analysis of methylation status of SEQ ID NO: 17
gggttagggaattgggga

SEQ ID NO: 1805 - DNA, 21 bp, Artificial Sequence
  bisulfite treated nucleic acid for analysis of methylation status of SEQ ID NO: 17
tagatttgaggttgttgtggg

SEQ ID NO: 1806 - DNA, 17 bp, Artificial Sequence
  bisulfite treated nucleic acid for analysis of methylation status of SEQ ID NO: 17
cctccccaattccctaa

SEQ ID NO: 1807 - DNA, 17 bp, Artificial Sequence
  bisulfite treated nucleic acid for analysis of methylation status of SEQ ID NO: 17
gttagggaattggggag

SEQ ID NO: 1808 - DNA, 18 bp, Artificial Sequence
  nucleic acid for analysis of methylation status of SEQ ID NO: 17
ctccccaattccctaacc

SEQ ID NO: 1809 - DNA, 17 bp, Artificial Sequence
  bisulfite treated nucleic acid for analysis of methylation status of SEQ ID NO: 17
aatttcccctccccaat

SEQ ID NO: 1810 - DNA, 16 bp, Artificial Sequence
  bisulfite treated nucleic acid for analysis of methylation status of SEQ ID NO: 17
tagggaattggggagg

SEQ ID NO: 1811 - DNA, 18 bp, Artificial Sequence
  bisulfite treated nucleic acid for analysis of methylation status of SEQ ID NO: 17
atttcccctccccaattc

SEQ ID NO: 1812 - DNA, 16 bp, Artificial Sequence
  bisulfite treated nucleic acid for analysis of methylation status of SEQ ID NO: 17
ccccaattccctaacc

SEQ ID NO: 1813 - DNA, 17 bp, Artificial Sequence
  bisulfite treated nucleic acid for analysis of methylation status of SEQ ID NO: 17
tttcccctccccaattc

SEQ ID NO: 1814 - DNA, 17 bp, Artificial Sequence
  bisulfite treated nucleic acid for analysis of methylation status of SEQ ID NO: 17
ccctccccaattcccta

SEQ ID NO: 1815 - DNA, 23 bp, Artificial Sequence
  bisulfite treated nucleic acid for analysis of methylation status of SEQ ID NO: 17
tatttttaggtggggtttagatt

SEQ ID NO: 1816 - DNA, 21 bp, Artificial Sequence
  bisulfite treated nucleic acid for analysis of methylation status of SEQ ID NO: 17
tttttaggtggggtttagatt

SEQ ID NO: 1817 - DNA, 20 bp, Artificial Sequence
  bisulfite treated nucleic acid for analysis of methylation status of SEQ ID NO: 17
ttttaggtggggtttagatt

SEQ ID NO: 1818 - DNA, 19 bp, Artificial Sequence
  bisulfite treated nucleic acid for analysis of methylation status of SEQ ID NO: 17
tttaggtggggtttagatt

SEQ ID NO: 1819 - DNA, 22 bp, Artificial Sequence
  bisulfite treated nucleic acid for analysis of methylation status of SEQ ID NO: 17
ttagatttgaggttgttgtggg

SEQ ID NO: 1820 - DNA, 23 bp, Artificial Sequence
  bisulfite treated nucleic acid for analysis of methylation status of SEQ ID NO: 17
ttatttttaggtggggtttagat

SEQ ID NO: 1821 - DNA, 22 bp, Artificial Sequence
  bisulfite treated nucleic acid for analysis of methylation status of SEQ ID NO: 17
tttagatttgaggttgttgtgg

SEQ ID NO: 1822 - DNA, 22 bp, Artificial Sequence
  bisulfite treated nucleic acid for analysis of methylation status of SEQ ID NO: 17
ttatttttaggtggggtttaga

SEQ ID NO: 1823 - DNA, 22 bp, Artificial Sequence
  bisulfite treated nucleic acid for analysis of methylation status of SEQ ID NO: 17
tagatttgaggttgttgtgggt

SEQ ID NO: 1824 - DNA, 23 bp, Artificial Sequence
  bisulfite treated nucleic acid for analysis of methylation status of SEQ ID NO: 17
gtttagatttgaggttgttgtgg

SEQ ID NO: 1825 - DNA, 23 bp, Artificial Sequence
  bisulfite treated nucleic acid for analysis of methylation status of SEQ ID NO: 17
tagatttgaggttgttgtgggtt

SEQ ID NO: 1826 - DNA, 23 bp, Artificial Sequence
  bisulfite treated nucleic acid for analysis of methylation status of SEQ ID NO: 17
tttagatttgaggttgttgtggg

SEQ ID NO: 1827 - DNA, 23 bp, Artificial Sequence
  bisulfite treated nucleic acid for analysis of methylation status of SEQ ID NO: 17
ttagatttgaggttgttgtgggt

SEQ ID NO: 1828 - DNA, 24 bp, Artificial Sequence
  bisulfite treated nucleic acid for analysis of methylation status of SEQ ID NO: 17
gtttagatttgaggttgttgtggg

SEQ ID NO: 1829 - DNA, 24 bp, Artificial Sequence
  bisulfite treated nucleic acid for analysis of methylation status of SEQ ID NO: 17
ggtttagatttgaggttgttgtgg

SEQ ID NO: 1830 - DNA, 22 bp, Artificial Sequence
  bisulfite treated nucleic acid for analysis of methylation status of SEQ ID NO: 21
acttctcacacatactttccct

SEQ ID NO: 1831 - DNA, 22 bp, Artificial Sequence
  bisulfite treated nucleic acid for analysis of methylation status of SEQ ID NO: 21
gtttggtagggagttgtttatt

SEQ ID NO: 1832 - DNA, 16 bp, Artificial Sequence
  bisulfite treated nucleic acid for analysis of methylation status of SEQ ID NO: 21
acgaaactacgcgcaa

SEQ ID NO: 1833 - DNA, 17 bp, Artificial Sequence
  bisulfite treated nucleic acid for analysis of methylation status of SEQ ID NO: 21
caacttctcccatactc

SEQ ID NO: 1834 - DNA, 25 bp, Artificial Sequence
  bisulfite treated nucleic acid for analysis of methylation status of SEQ ID NO: 21
tttccctaaaacaaaactacacaca

SEQ ID NO: 1835 - DNA, 22 bp, Artificial Sequence
  bisulfite treated nucleic acid for analysis of methylation status of SEQ ID NO: 21
aattggtttagagaaagaaagg

SEQ ID NO: 1836 - DNA, 16 bp, Artificial Sequence
  bisulfite treated nucleic acid for analysis of methylation status of SEQ ID NO: 21
tccctaccaaaccacc

SEQ ID NO: 1837 - DNA, 23 bp, Artificial Sequence
  bisulfite treated nucleic acid for analysis of methylation status of SEQ ID NO: 21
tttggtagggagttgtttattag

SEQ ID NO: 1838 - DNA, 23 bp, Artificial Sequence
  bisulfite treated nucleic acid for analysis of methylation status of SEQ ID NO: 21
gggagttgtttattagagattga

SEQ ID NO: 1839 - DNA, 22 bp, Artificial Sequence
  bisulfite treated nucleic acid for analysis of methylation status of SEQ ID NO: 21
ggtttggtagggagttgtttat

SEQ ID NO: 1840 - DNA, 22 bp, Artificial Sequence
  bisulfite treated nucleic acid for analysis of methylation status of SEQ ID NO: 21
ttggtagggagttgtttattag

SEQ ID NO: 1841 - DNA, 23 bp, Artificial Sequence
  bisulfite treated nucleic acid for analysis of methylation status of SEQ ID NO: 21
taattggtttagagaaagaaagg

SEQ ID NO: 1842 - DNA, 22 bp, Artificial Sequence
  bisulfite treated nucleic acid for analysis of methylation status of SEQ ID NO: 21
gtgggtatggttataggagaat

SEQ ID NO: 1843 - DNA, 24 bp, Artificial Sequence
  bisulfite treated nucleic acid for analysis of methylation status of SEQ ID NO: 21
agggagttgtttattagagattga

SEQ ID NO: 1844 - DNA, 22 bp, Artificial Sequence
  bisulfite treated nucleic acid for analysis of methylation status of SEQ ID NO: 21
attggtttagagaaagaaaggt

SEQ ID NO: 1845 - DNA, 23 bp, Artificial Sequence
  bisulfite treated nucleic acid for analysis of methylation status of SEQ ID NO: 21
tggtagggagttgtttattagag

SEQ ID NO: 1846 - DNA, 24 bp, Artificial Sequence
  bisulfite treated nucleic acid for analysis of methylation status of SEQ ID NO: 21
ggagttgtttattagagattgaga

SEQ ID NO: 1847 - DNA, 22 bp, Artificial Sequence
  bisulfite treated nucleic acid for analysis of methylation status of SEQ ID NO: 21
ggtgggtatggttataggagaa

SEQ ID NO: 1848 - DNA, 24 bp, Artificial Sequence
  bisulfite treated nucleic acid for analysis of methylation status of SEQ ID NO: 21
ttaattggtttagagaaagaaagg

SEQ ID NO: 1849 - DNA, 25 bp, Artificial Sequence
  bisulfite treated nucleic acid for analysis of methylation status of SEQ ID NO: 21
ggtagggagttgtttattagagatt

SEQ ID NO: 1850 - DNA, 25 bp, Artificial Sequence
  bisulfite treated nucleic acid for analysis of methylation status of SEQ ID NO: 21
tagggagttgtttattagagattga

SEQ ID NO: 1851 - DNA, 22 bp, Artificial Sequence
  bisulfite treated nucleic acid for analysis of methylation status of SEQ ID NO: 21
tggtttggtagggagttgttta

SEQ ID NO: 1852 - DNA, 22 bp, Artificial Sequence
  bisulfite treated nucleic acid for analysis of methylation status of SEQ ID NO: 21
gataggtaggtgggtatggtta

SEQ ID NO: 1853 - DNA, 21 bp, Artificial Sequence
  bisulfite treated nucleic acid for analysis of methylation status of SEQ ID NO: 21
ttggtttagagaaagaaaggt

SEQ ID NO: 1854 - DNA, 21 bp, Artificial Sequence
  bisulfite treated nucleic acid for analysis of methylation status of SEQ ID NO: 21
tgggtatggttataggagaat

SEQ ID NO: 1855 - DNA, 21 bp, Artificial Sequence
  bisulfite treated nucleic acid for analysis of methylation status of SEQ ID NO: 21
gtggtttggtagggagttgtt

SEQ ID NO: 1856 - DNA, 20 bp, Artificial Sequence
  bisulfite treated nucleic acid for analysis of methylation status of SEQ ID NO: 21
aaagaaaggtggtttggtag

SEQ ID NO: 1857 - DNA, 18 bp, Artificial Sequence
  bisulfite treated nucleic acid for analysis of methylation status of SEQ ID NO: 21
tatggaggtggggatttt

SEQ ID NO: 1858 - DNA, 18 bp, Artificial Sequence
  bisulfite treated nucleic acid for analysis of methylation status of SEQ ID NO: 21
ttatggaggtggggattt

SEQ ID NO: 1859 - DNA, 18 bp, Artificial Sequence
  bisulfite treated nucleic acid for analysis of methylation status of SEQ ID NO: 21
tttatggaggtggggatt

SEQ ID NO: 1860 - DNA, 18 bp, Artificial Sequence
  bisulfite treated nucleic acid for analysis of methylation status of SEQ ID NO: 21
ttttatggaggtggggat

SEQ ID NO: 1861 - DNA, 19 bp, Artificial Sequence
  bisulfite treated nucleic acid for analysis of methylation status of SEQ ID NO: 21
gttttatggaggtggggat

SEQ ID NO: 1862 - DNA, 24 bp, Artificial Sequence
  bisulfite treated nucleic acid for analysis of methylation status of SEQ ID NO: 21
gtagggagttgtttattagagatt

SEQ ID NO: 1863 - DNA, 22 bp, Artificial Sequence
  bisulfite treated nucleic acid for analysis of methylation status of SEQ ID NO: 21
aggtaggtgggtatggttatag

SEQ ID NO: 1864 - DNA, 24 bp, Artificial Sequence
  bisulfite treated nucleic acid for analysis of methylation status of SEQ ID NO: 21
gttaattggtttagagaaagaaag

SEQ ID NO: 1865 - DNA, 18 bp, Artificial Sequence
  bisulfite treated nucleic acid for analysis of methylation status of SEQ ID NO: 21
aaaggtggtttggtaggg

SEQ ID NO: 1866 - DNA, 18 bp, Artificial Sequence
  bisulfite treated nucleic acid for analysis of methylation status of SEQ ID NO: 21
aggtggtttggtagggag

SEQ ID NO: 1867 - DNA, 17 bp, Artificial Sequence
  bisulfite treated nucleic acid for analysis of methylation status of SEQ ID NO: 21
acaactccctaccaaac

SEQ ID NO: 1868 - DNA, 20 bp, Artificial Sequence
  bisulfite treated nucleic acid for analysis of methylation status of SEQ ID NO: 21
gagaggataggtaggtgggt

SEQ ID NO: 1869 - DNA, 20 bp, Artificial Sequence
  bisulfite treated nucleic acid for analysis of methylation status of SEQ ID NO: 21
agaggataggtaggtgggta

SEQ ID NO: 1870 - DNA, 18 bp, Artificial Sequence
  bisulfite treated nucleic acid for analysis of methylation status of SEQ ID NO: 21
aaggtggtttggtaggga

SEQ ID NO: 1871 - DNA, 16 bp, Artificial Sequence
  bisulfite treated nucleic acid for analysis of methylation status of SEQ ID NO: 21
ctccctaccaaaccac

SEQ ID NO: 1872 - DNA, 19 bp, Artificial Sequence
  nucleic acid for analysis of methylation status of SEQ ID NO: 21
ggtggtttggtagggagtt

SEQ ID NO: 1873 - DNA, 19 bp, Artificial Sequence
  bisulfite treated nucleic acid for analysis of methylation status of SEQ ID NO: 21
gttgttttatggaggtggg

SEQ ID NO: 1874 - DNA, 17 bp, Artificial Sequence
  bisulfite treated nucleic acid for analysis of methylation status of SEQ ID NO: 21
atggaggtggggatttt

SEQ ID NO: 1875 - DNA, 22 bp, Artificial Sequence
  bisulfite treated nucleic acid for analysis of methylation status of SEQ ID NO: 21
ataggtaggtgggtatggttat

SEQ ID NO: 1876 - DNA, 20 bp, Artificial Sequence
  bisulfite treated nucleic acid for analysis of methylation status of SEQ ID NO: 21
agttgttttatggaggtggg

SEQ ID NO: 1877 - DNA, 23 bp, Artificial Sequence
  bisulfite treated nucleic acid for analysis of methylation status of SEQ ID NO: 21
taggtaggtgggtatggttatag

SEQ ID NO: 1878 - DNA, 21 bp, Artificial Sequence
  bisulfite treated nucleic acid for analysis of methylation status of SEQ ID NO: 21
ggataggtaggtgggtatggt

SEQ ID NO: 1879 - DNA, 22 bp, Artificial Sequence
  bisulfite treated nucleic acid for analysis of methylation status of SEQ ID NO: 21
aggataggtaggtgggtatggt

SEQ ID NO: 1880 - DNA, 20 bp, Artificial Sequence
  bisulfite treated nucleic acid for analysis of methylation status of SEQ ID NO: 21
gaggataggtaggtgggtat

SEQ ID NO: 1881 - DNA, 24 bp, Artificial Sequence
  bisulfite treated nucleic acid for analysis of methylation status of SEQ ID NO: 21
tgttaattggtttagagaaagaaa

SEQ ID NO: 1882 - DNA, 23 bp, Artificial Sequence
  bisulfite treated nucleic acid for analysis of methylation status of SEQ ID NO: 21
gagttgtttattagagattgaga

SEQ ID NO: 1883 - DNA, 20 bp, Artificial Sequence
  bisulfite treated nucleic acid for analysis of methylation status of SEQ ID NO: 21
tgttttatggaggtggggat

SEQ ID NO: 1884 - DNA, 17 bp, Artificial Sequence
  bisulfite treated nucleic acid for analysis of methylation status of SEQ ID NO: 21
tggaggtggggattttt

SEQ ID NO: 1885 - DNA, 22 bp, Artificial Sequence
  bisulfite treated nucleic acid for analysis of methylation status of SEQ ID NO: 21
cacttctcacacatactttccc

SEQ ID NO: 1886 - DNA, 21 bp, Artificial Sequence
  bisulfite treated nucleic acid for analysis of methylation status of SEQ ID NO: 21
cttctcacacatactttccct

SEQ ID NO: 1887 - DNA, 21 bp, Artificial Sequence
  bisulfite treated nucleic acid for analysis of methylation status of SEQ ID NO: 21
tagttgttttatggaggtggg

SEQ ID NO: 1888 - DNA, 22 bp, Artificial Sequence
  bisulfite treated nucleic acid for analysis of methylation status of SEQ ID NO: 21
ctcacacatactttccctaaaa

SEQ ID NO: 1889 - DNA, 22 bp, Artificial Sequence
  bisulfite treated nucleic acid for analysis of methylation status of SEQ ID NO: 21
agttagttgttttatggaggtg

SEQ ID NO: 1890 - DNA, 21 bp, Artificial Sequence
  bisulfite treated nucleic acid for analysis of methylation status of SEQ ID NO: 21
gttagttgttttatggaggtg

SEQ ID NO: 1891 - DNA, 22 bp, Artificial Sequence
  bisulfite treated nucleic acid for analysis of methylation status of SEQ ID NO: 21
ttagttgttttatggaggtggg

SEQ ID NO: 1892 - DNA, 23 bp, Artificial Sequence
  bisulfite treated nucleic acid for analysis of methylation status of SEQ ID NO: 21
tctcacacatactttccctaaaa

SEQ ID NO: 1893 - DNA, 20 bp, Artificial Sequence
  bisulfite treated nucleic acid for analysis of methylation status of SEQ ID NO: 21
ttctcacacatactttccct

SEQ ID NO: 1894 - DNA, 21 bp, Artificial Sequence
  bisulfite treated nucleic acid for analysis of methylation status of SEQ ID NO: 21
tcacacatactttccctaaaa

SEQ ID NO: 1895 - DNA, 23 bp, Artificial Sequence
  bisulfite treated nucleic acid for analysis of methylation status of SEQ ID NO: 21
aagttagttgttttatggaggtg

SEQ ID NO: 1896 - DNA, 26 bp, Artificial Sequence
  bisulfite treated nucleic acid for analysis of methylation status of SEQ ID NO: 21
ctttccctaaaacaaaactacacaca

SEQ ID NO: 1897 - DNA, 22 bp, Artificial Sequence
  bisulfite treated nucleic acid for analysis of methylation status of SEQ ID NO: 21
ccacttctcacacatactttcc

SEQ ID NO: 1898 - DNA, 23 bp, Artificial Sequence
  bisulfite treated nucleic acid for analysis of methylation status of SEQ ID NO: 21
accacttctcacacatactttcc

SEQ ID NO: 1899 - DNA, 22 bp, Artificial Sequence
  bisulfite treated nucleic acid for analysis of methylation status of SEQ ID NO: 35
tataagaaagatgtgggggaga

SEQ ID NO: 1900 - DNA, 19 bp, Artificial Sequence
  bisulfite treated nucleic acid for analysis of methylation status of SEQ ID NO: 35
aattcatccaacaatccaa

SEQ ID NO: 1901 - DNA, 16 bp, Artificial Sequence
  bisulfite treated nucleic acid for analysis of methylation status of SEQ ID NO: 35
gaagtcgcgcgttgga

SEQ ID NO: 1902 - DNA, 17 bp, Artificial Sequence
  bisulfite treated nucleic acid for analysis of methylation status of SEQ ID NO: 35
aaagatgtgggggagat

SEQ ID NO: 1903 - DNA, 22 bp, Artificial Sequence
  bisulfite treated nucleic acid for analysis of methylation status of SEQ ID NO: 35
gggagattttgatgtttgtgtt

SEQ ID NO: 1904 - DNA, 19 bp, Artificial Sequence
  bisulfite treated nucleic acid for analysis of methylation status of SEQ ID NO: 35
aaattcatccaacaatcca

SEQ ID NO: 1905 - DNA, 18 bp, Artificial Sequence
  bisulfite treated nucleic acid for analysis of methylation status of SEQ ID NO: 35
attcatccaacaatccaa

SEQ ID NO: 1906 - DNA, 17 bp, Artificial Sequence
  bisulfite treated nucleic acid for analysis of methylation status of SEQ ID NO: 35
ttcatccaacaatccaa

SEQ ID NO: 1907 - DNA, 22 bp, Artificial Sequence
  bisulfite treated nucleic acid for analysis of methylation status of SEQ ID NO: 35
ataagaaagatgtgggggagat

SEQ ID NO: 1908 - DNA, 17 bp, Artificial Sequence
  bisulfite treated nucleic acid for analysis of methylation status of SEQ ID NO: 35
agatgtgggggagattt

SEQ ID NO: 1909 - DNA, 21 bp, Artificial Sequence
  bisulfite treated nucleic acid for analysis of methylation status of SEQ ID NO: 35
taagaaagatgtgggggagat

SEQ ID NO: 1910 - DNA, 19 bp, Artificial Sequence
  bisulfite treated nucleic acid for analysis of methylation status of SEQ ID NO: 35
aaagatgtgggggagattt

SEQ ID NO: 1911 - DNA, 18 bp, Artificial Sequence
  bisulfite treated nucleic acid for analysis of methylation status of SEQ ID NO: 35
aggtggaggcggggtgta

SEQ ID NO: 1912 - DNA, 19 bp, Artificial Sequence
  bisulfite treated nucleic acid for analysis of methylation status of SEQ ID NO: 35
agaaagatgtgggggagat

SEQ ID NO: 1913 - DNA, 19 bp, Artificial Sequence
  bisulfite treated nucleic acid for analysis of methylation status of SEQ ID NO: 35
gaaagatgtgggggagatt

SEQ ID NO: 1914 - DNA, 20 bp, Artificial Sequence
  bisulfite treated nucleic acid for analysis of methylation status of SEQ ID NO: 35
aagaaagatgtgggggagat

SEQ ID NO: 1915 - DNA, 17 bp, Artificial Sequence
  bisulfite treated nucleic acid for analysis of methylation status of SEQ ID NO: 35
aagatgtgggggagatt

SEQ ID NO: 1916 - DNA, 21 bp, Artificial Sequence
  bisulfite treated nucleic acid for analysis of methylation status of SEQ ID NO: 35
tataagaaagatgtgggggag

SEQ ID NO: 1917 - DNA, 22 bp, Artificial Sequence
  bisulfite treated nucleic acid for analysis of methylation status of SEQ ID NO: 35
ggggagattttgatgtttgtgt

SEQ ID NO: 1918 - DNA, 20 bp, Artificial Sequence
  bisulfite treated nucleic acid for analysis of methylation status of SEQ ID NO: 35
ataagaaagatgtgggggag

SEQ ID NO: 1919 - DNA, 19 bp, Artificial Sequence
  bisulfite treated nucleic acid for analysis of methylation status of SEQ ID NO: 35
taagaaagatgtgggggag

SEQ ID NO: 1920 - DNA, 18 bp, Artificial Sequence
  bisulfite treated nucleic acid for analysis of methylation status of SEQ ID NO: 35
aagaaagatgtgggggag

SEQ ID NO: 1921 - DNA, 23 bp, Artificial Sequence
  bisulfite treated nucleic acid for analysis of methylation status of SEQ ID NO: 35
ggggagattttgatgtttgtgtt

SEQ ID NO: 1922 - DNA, 20 bp, Artificial Sequence
  bisulfite treated nucleic acid for analysis of methylation status of SEQ ID NO: 25
ttatttggtgggggtagtag

SEQ ID NO: 1923 - DNA, 17 bp, Artificial Sequence
  bisulfite treated nucleic acid for analysis of methylation status of SEQ ID NO: 25
cctaaacccaaaccctt

SEQ ID NO: 1924 - DNA, 18 bp, Artificial Sequence
  bisulfite treated nucleic acid for analysis of methylation status of SEQ ID NO: 25
ggcgttatcgattttcgt

SEQ ID NO: 1925 - DNA, 16 bp, Artificial Sequence
  bisulfite treated nucleic acid for analysis of methylation status of SEQ ID NO: 25
gacgcggagcgcgtta

SEQ ID NO: 1926 - DNA, 25 bp, Artificial Sequence
  bisulfite treated nucleic acid for analysis of methylation status of SEQ ID NO: 25
ggtagtaggtgttattgatttttgt

SEQ ID NO: 1927 - DNA, 19 bp, Artificial Sequence
  bisulfite treated nucleic acid for analysis of methylation status of SEQ ID NO: 25
tatttggtgggggtagtag

SEQ ID NO: 1928 - DNA, 18 bp, Artificial Sequence
  bisulfite treated nucleic acid for analysis of methylation status of SEQ ID NO: 25
atttggtgggggtagtag

SEQ ID NO: 1929 - DNA, 17 bp, Artificial Sequence
  bisulfite treated nucleic acid for analysis of methylation status of SEQ ID NO: 25
tttggtgggggtagtag

SEQ ID NO: 1930 - DNA, 25 bp, Artificial Sequence
  bisulfite treated nucleic acid for analysis of methylation status of SEQ ID NO: 25
gtagtaggtgttattgatttttgta

SEQ ID NO: 1931 - DNA, 26 bp, Artificial Sequence
  bisulfite treated nucleic acid for analysis of methylation status of SEQ ID NO: 25
tagtaggtgttattgatttttgtagt

SEQ ID NO: 1932 - DNA, 26 bp, Artificial Sequence
  bisulfite treated nucleic acid for analysis of methylation status of SEQ ID NO: 25
gtagtaggtgttattgatttttgtag

SEQ ID NO: 1933 - DNA, 26 bp, Artificial Sequence
  bisulfite treated nucleic acid for analysis of methylation status of SEQ ID NO: 25
ggtagtaggtgttattgatttttgta

SEQ ID NO: 1934 - DNA, 27 bp, Artificial Sequence
  bisulfite treated nucleic acid for analysis of methylation status of SEQ ID NO: 25
ggtagtaggtgttattgatttttgtag

SEQ ID NO: 1935 - DNA, 22 bp, Artificial Sequence
  bisulfite treated nucleic acid for analysis of methylation status of SEQ ID NO: 26
taccacccacttctcctataaa

SEQ ID NO: 1936 - DNA, 22 bp, Artificial Sequence
  bisulfite treated nucleic acid for analysis of methylation status of SEQ ID NO: 26
tgggagagtagtttttagaggt

SEQ ID NO: 1937 - DNA, 21 bp, Artificial Sequence
  bisulfite treated nucleic acid for analysis of methylation status of SEQ ID NO: 26
cccgacaaaaaatcccgcgaa

SEQ ID NO: 1938 - DNA, 19 bp, Artificial Sequence
  bisulfite treated nucleic acid for analysis of methylation status of SEQ ID NO: 26
ccacttctcctataaaacc

SEQ ID NO: 1939 - DNA, 24 bp, Artificial Sequence
  bisulfite treated nucleic acid for analysis of methylation status of SEQ ID NO: 26
tataaaaccacaatcccacccaac

SEQ ID NO: 1940 - DNA, 20 bp, Artificial Sequence
  bisulfite treated nucleic acid for analysis of methylation status of SEQ ID NO: 26
gggttgggagagtagttttt

SEQ ID NO: 1941 - DNA, 22 bp, Artificial Sequence
  bisulfite treated nucleic acid for analysis of methylation status of SEQ ID NO: 26
gggagagtagtttttagaggtt

SEQ ID NO: 1942 - DNA, 19 bp, Artificial Sequence
  bisulfite treated nucleic acid for analysis of methylation status of SEQ ID NO: 26
ggggttgggagagtagttt

SEQ ID NO: 1943 - DNA, 18 bp, Artificial Sequence
  bisulfite treated nucleic acid for analysis of methylation status of SEQ ID NO: 26
aaaactactctcccaacc

SEQ ID NO: 1944 - DNA, 22 bp, Artificial Sequence
  bisulfite treated nucleic acid for analysis of methylation status of SEQ ID NO: 26
ggagagtagtttttagaggttt

SEQ ID NO: 1945 - DNA, 18 bp, Artificial Sequence
  bisulfite treated nucleic acid for analysis of methylation status of SEQ ID NO: 26
gttggggttgggagagta

SEQ ID NO: 1946 - DNA, 16 bp, Artificial Sequence
  bisulfite treated nucleic acid for analysis of methylation status of SEQ ID NO: 26
actactctcccaaccc

SEQ ID NO: 1947 - DNA, 18 bp, Artificial Sequence
  bisulfite treated nucleic acid for analysis of methylation status of SEQ ID NO: 26
ttggggttgggagagtag

SEQ ID NO: 1948 - DNA, 19 bp, Artificial Sequence
  bisulfite treated nucleic acid for analysis of methylation status of SEQ ID NO: 26
tggggttgggagagtagtt

SEQ ID NO: 1949 - DNA, 17 bp, Artificial Sequence
  bisulfite treated nucleic acid for analysis of methylation status of SEQ ID NO: 26
aaactactctcccaacc

SEQ ID NO: 1950 - DNA, 25 bp, Artificial Sequence
  bisulfite treated nucleic acid for analysis of methylation status of SEQ ID NO: 26
ttgggagagtagtttttagaggttt

SEQ ID NO: 1951 - DNA, 17 bp, Artificial Sequence
  bisulfite treated nucleic acid for analysis of methylation status of SEQ ID NO: 26
gggtgatttttggaagg

SEQ ID NO: 1952 - DNA, 19 bp, Artificial Sequence
  bisulfite treated nucleic acid for analysis of methylation status of SEQ ID NO: 26
ggttgggagagtagttttt

SEQ ID NO: 1953 - DNA, 21 bp, Artificial Sequence
  bisulfite treated nucleic acid for analysis of methylation status of SEQ ID NO: 26
accacccacttctcctataaa

SEQ ID NO: 1954 - DNA, 21 bp, Artificial Sequence
  bisulfite treated nucleic acid for analysis of methylation status of SEQ ID NO: 26
ccacccacttctcctataaaa

SEQ ID NO: 1955 - DNA, 22 bp, Artificial Sequence
  bisulfite treated nucleic acid for analysis of methylation status of SEQ ID NO: 26
acccacttctcctataaaacca

SEQ ID NO: 1956 - DNA, 19 bp, Artificial Sequence
  bisulfite treated nucleic acid for analysis of methylation status of SEQ ID NO: 26
acttctcctataaaaccac

SEQ ID NO: 1957 - DNA, 19 bp, Artificial Sequence
  bisulfite treated nucleic acid for analysis of methylation status of SEQ ID NO: 26
cctctaaaaactactctcc

SEQ ID NO: 1958 - DNA, 22 bp, Artificial Sequence
  bisulfite treated nucleic acid for analysis of methylation status of SEQ ID NO: 26
cacccacttctcctataaaacc

SEQ ID NO: 1959 - DNA, 21 bp, Artificial Sequence
  bisulfite treated nucleic acid for analysis of methylation status of SEQ ID NO: 26
cccacttctcctataaaacca

SEQ ID NO: 1960 - DNA, 23 bp, Artificial Sequence
  bisulfite treated nucleic acid for analysis of methylation status of SEQ ID NO: 26
ttaccacccacttctcctataaa

SEQ ID NO: 1961 - DNA, 24 bp, Artificial Sequence
  bisulfite treated nucleic acid for analysis of methylation status of SEQ ID NO: 26
cttaccacccacttctcctataaa

SEQ ID NO: 1962 - DNA, 20 bp, Artificial Sequence
  bisulfite treated nucleic acid for analysis of methylation status of SEQ ID NO: 26
ccacttctcctataaaacca

SEQ ID NO: 1963 - DNA, 25 bp, Artificial Sequence
  bisulfite treated nucleic acid for analysis of methylation status of SEQ ID NO: 26
acttaccacccacttctcctataaa

SEQ ID NO: 1964 - DNA, 26 bp, Artificial Sequence
  bisulfite treated nucleic acid for analysis of methylation status of SEQ ID NO: 26
aacttaccacccacttctcctataaa

SEQ ID NO: 1965 - DNA, 22 bp, Artificial Sequence
  bisulfite treated nucleic acid for analysis of methylation status of SEQ ID NO: 26
ttaccacccacttctcctataa

SEQ ID NO: 1966 - DNA, 25 bp, Artificial Sequence
  bisulfite treated nucleic acid for analysis of methylation status of SEQ ID NO: 26
ctataaaaccacaatcccacccaac

SEQ ID NO: 1967 - DNA, 21 bp, Artificial Sequence
  bisulfite treated nucleic acid for analysis of methylation status of SEQ ID NO: 26
taccacccacttctcctataa

SEQ ID NO: 1968 - DNA, 23 bp, Artificial Sequence
  bisulfite treated nucleic acid for analysis of methylation status of SEQ ID NO: 26
cttaccacccacttctcctataa

SEQ ID NO: 1969 - DNA, 20 bp, Artificial Sequence
  bisulfite treated nucleic acid for analysis of methylation status of SEQ ID NO: 26
accacccacttctcctataa

SEQ ID NO: 1970 - DNA, 24 bp, Artificial Sequence
  bisulfite treated nucleic acid for analysis of methylation status of SEQ ID NO: 26
acttaccacccacttctcctataa

SEQ ID NO: 1971 - DNA, 25 bp, Artificial Sequence
  bisulfite treated nucleic acid for analysis of methylation status of SEQ ID NO: 26
aacttaccacccacttctcctataa

SEQ ID NO: 1972 - DNA, 26 bp, Artificial Sequence
  bisulfite treated nucleic acid for analysis of methylation status of SEQ ID NO: 26
aaacttaccacccacttctcctataa

SEQ ID NO: 1973 - DNA, 25 bp, Artificial Sequence
  bisulfite treated nucleic acid for analysis of methylation status of SEQ ID NO: 26
tataaaaccacaatcccacccaaca

SEQ ID NO: 1974 - DNA, 26 bp, Artificial Sequence
  bisulfite treated nucleic acid for analysis of methylation status of SEQ ID NO: 26
cctataaaaccacaatcccacccaac

SEQ ID NO: 1975 - DNA, 26 bp, Artificial Sequence
  bisulfite treated nucleic acid for analysis of methylation status of SEQ ID NO: 26
ctataaaaccacaatcccacccaaca

SEQ ID NO: 1976 - DNA, 23 bp, Artificial Sequence
  bisulfite treated nucleic acid for analysis of methylation status of SEQ ID NO: 38
tttggagaggtagatagtagaag

SEQ ID NO: 1977 - DNA, 22 bp, Artificial Sequence
  bisulfite treated nucleic acid for analysis of methylation status of SEQ ID NO: 38
atacaaaatcttccttcctcaa

SEQ ID NO: 1978 - DNA, 18 bp, Artificial Sequence
  bisulfite treated nucleic acid for analysis of methylation status of SEQ ID NO: 38
gtcggcgtttttttacgg

SEQ ID NO: 1979 - DNA, 17 bp, Artificial Sequence
  bisulfite treated nucleic acid for analysis of methylation status of SEQ ID NO: 38
agggaattgaggaagga

SEQ ID NO: 1980 - DNA, 29 bp, Artificial Sequence
  bisulfite treated nucleic acid for analysis of methylation status of SEQ ID NO: 38
tagaagtggatatttttttgtatgtttga

SEQ ID NO: 1981 - DNA, 22 bp, Artificial Sequence
  bisulfite treated nucleic acid for analysis of methylation status of SEQ ID NO: 38
tacaaaatcttccttcctcaat

SEQ ID NO: 1982 - DNA, 21 bp, Artificial Sequence
  bisulfite treated nucleic acid for analysis of methylation status of SEQ ID NO: 38
acaaaatcttccttcctcaat

SEQ ID NO: 1983 - DNA, 21 bp, Artificial Sequence
  bisulfite treated nucleic acid for analysis of methylation status of SEQ ID NO: 38
aaaatcttccttcctcaattc

SEQ ID NO: 1984 - DNA, 22 bp, Artificial Sequence
  bisulfite treated nucleic acid for analysis of methylation status of SEQ ID NO: 38
caaaatcttccttcctcaattc

SEQ ID NO: 1985 - DNA, 20 bp, Artificial Sequence
  bisulfite treated nucleic acid for analysis of methylation status of SEQ ID NO: 38
ctcacaattttcatccaacc

SEQ ID NO: 1986 - DNA, 19 bp, Artificial Sequence
  bisulfite treated nucleic acid for analysis of methylation status of SEQ ID NO: 38
gtggttggatgaaaattgt

SEQ ID NO: 1987 - DNA, 20 bp, Artificial Sequence
  bisulfite treated nucleic acid for analysis of methylation status of SEQ ID NO: 38
cctcacaattttcatccaac

SEQ ID NO: 1988 - DNA, 21 bp, Artificial Sequence
  bisulfite treated nucleic acid for analysis of methylation status of SEQ ID NO: 38
aaatcttccttcctcaattcc

SEQ ID NO: 1989 - DNA, 21 bp, Artificial Sequence
  bisulfite treated nucleic acid for analysis of methylation status of SEQ ID NO: 38
tcctcacaattttcatccaac

SEQ ID NO: 1990 - DNA, 22 bp, Artificial Sequence
  nucleic acid for analysis of methylation status of SEQ ID NO: 38
ctcctcacaattttcatccaac

SEQ ID NO: 1991 - DNA, 20 bp, Artificial Sequence
  bisulfite treated nucleic acid for analysis of methylation status of SEQ ID NO: 38
cttcctcaattcccttaaaa

SEQ ID NO: 1992 - DNA, 19 bp, Artificial Sequence
  bisulfite treated nucleic acid for analysis of methylation status of SEQ ID NO: 38
gtgttttaagggaattgag

SEQ ID NO: 1993 - DNA, 19 bp, Artificial Sequence
  bisulfite treated nucleic acid for analysis of methylation status of SEQ ID NO: 38
tccttcctcaattccctta

SEQ ID NO: 1994 - DNA, 19 bp, Artificial Sequence
  bisulfite treated nucleic acid for analysis of methylation status of SEQ ID NO: 38
tcacaattttcatccaacc

SEQ ID NO: 1995 - DNA, 19 bp, Artificial Sequence
  bisulfite treated nucleic acid for analysis of methylation status of SEQ ID NO: 38
cacaattttcatccaacca

SEQ ID NO: 1996 - DNA, 21 bp, Artificial Sequence
  bisulfite treated nucleic acid for analysis of methylation status of SEQ ID NO: 38
ccttcctcaattcccttaaaa

SEQ ID NO: 1997 - DNA, 18 bp, Artificial Sequence
  bisulfite treated nucleic acid for analysis of methylation status of SEQ ID NO: 38
ttccttcctcaattccct

SEQ ID NO: 1998 - DNA, 17 bp, Artificial Sequence
  bisulfite treated nucleic acid for analysis of methylation status of SEQ ID NO: 38
aagggaattgaggaagg

SEQ ID NO: 1999 - DNA, 21 bp, Artificial Sequence
  bisulfite treated nucleic acid for analysis of methylation status of SEQ ID NO: 38
aatcttccttcctcaattccc

SEQ ID NO: 2000 - DNA, 18 bp, Artificial Sequence
  bisulfite treated nucleic acid for analysis of methylation status of SEQ ID NO: 38
cccctccaataccttttt

SEQ ID NO: 2001 - DNA, 17 bp, Artificial Sequence
  bisulfite treated nucleic acid for analysis of methylation status of SEQ ID NO: 38
gtattgtatggggggaa

SEQ ID NO: 2002 - DNA, 22 bp, Artificial Sequence
  bisulfite treated nucleic acid for analysis of methylation status of SEQ ID NO: 38
accaacatatctaaaaacaaat

SEQ ID NO: 2003 - DNA, 23 bp, Artificial Sequence
  bisulfite treated nucleic acid for analysis of methylation status of SEQ ID NO: 38
gtatttgtttttagatatgttgg

SEQ ID NO: 2004 - DNA, 17 bp, Artificial Sequence
  bisulfite treated nucleic acid for analysis of methylation status of SEQ ID NO: 38
ccccctccaataccttt

SEQ ID NO: 2005 - DNA, 19 bp, Artificial Sequence
  bisulfite treated nucleic acid for analysis of methylation status of SEQ ID NO: 38
ttcctcaattcccttaaaa

SEQ ID NO: 2006 - DNA, 22 bp, Artificial Sequence
  bisulfite treated nucleic acid for analysis of methylation status of SEQ ID NO: 38
aaccaacatatctaaaaacaaa

SEQ ID NO: 2007 - DNA, 18 bp, Artificial Sequence
  bisulfite treated nucleic acid for analysis of methylation status of SEQ ID NO: 38
acaattttcatccaacca

SEQ ID NO: 2008 - DNA, 18 bp, Artificial Sequence
  bisulfite treated nucleic acid for analysis of methylation status of SEQ ID NO: 38
tcctcaattcccttaaaa

SEQ ID NO: 2009 - DNA, 21 bp, Artificial Sequence
  bisulfite treated nucleic acid for analysis of methylation status of SEQ ID NO: 38
cctcctcacaattttcatcca

SEQ ID NO: 2010 - DNA, 19 bp, Artificial Sequence
  bisulfite treated nucleic acid for analysis of methylation status of SEQ ID NO: 38
ttggatgaaaattgtgagg

SEQ ID NO: 2011 - DNA, 17 bp, Artificial Sequence
  bisulfite treated nucleic acid for analysis of methylation status of SEQ ID NO: 38
caattttcatccaacca

SEQ ID NO: 2012 - DNA, 20 bp, Artificial Sequence
  bisulfite treated nucleic acid for analysis of methylation status of SEQ ID NO: 38
ccccatacaatacaaaatct

SEQ ID NO: 2013 - DNA, 24 bp, Artificial Sequence
  bisulfite treated nucleic acid for analysis of methylation status of SEQ ID NO: 38
atttggagaggtagatagtagaag

SEQ ID NO: 2014 - DNA, 27 bp, Artificial Sequence
  bisulfite treated nucleic acid for analysis of methylation status of SEQ ID NO: 38
gatatttggagaggtagatagtagaag

SEQ ID NO: 2015 - DNA, 25 bp, Artificial Sequence
  bisulfite treated nucleic acid for analysis of methylation status of SEQ ID NO: 38
tatttggagaggtagatagtagaag

SEQ ID NO: 2016 - DNA, 26 bp, Artificial Sequence
  bisulfite treated nucleic acid for analysis of methylation status of SEQ ID NO: 38
atatttggagaggtagatagtagaag

SEQ ID NO: 2017 - DNA, 28 bp, Artificial Sequence
  bisulfite treated nucleic acid for analysis of methylation status of SEQ ID NO: 38
ggatatttggagaggtagatagtagaag

SEQ ID NO: 2018 - DNA, 26 bp, Artificial Sequence
  bisulfite treated nucleic acid for analysis of methylation status of SEQ ID NO: 38
gtagaagtggatatttttttgtatgt

SEQ ID NO: 2019 - DNA, 26 bp, Artificial Sequence
  bisulfite treated nucleic acid for analysis of methylation status of SEQ ID NO: 38
gatatttggagaggtagatagtagaa

SEQ ID NO: 2020 - DNA, 19 bp, Artificial Sequence
  bisulfite treated nucleic acid for analysis of methylation status of SEQ ID NO: 38
gagaggtagatagtagaag

SEQ ID NO: 2021 - DNA, 27 bp, Artificial Sequence
  bisulfite treated nucleic acid for analysis of methylation status of SEQ ID NO: 38
ggatatttggagaggtagatagtagaa

SEQ ID NO: 2022 - DNA, 26 bp, Artificial Sequence
  bisulfite treated nucleic acid for analysis of methylation status of SEQ ID NO: 38
tagaagtggatatttttttgtatgtt

SEQ ID NO: 2023 - DNA, 27 bp, Artificial Sequence
  bisulfite treated nucleic acid for analysis of methylation status of SEQ ID NO: 38
agtagaagtggatatttttttgtatgt

SEQ ID NO: 2024 - DNA, 26 bp, Artificial Sequence
  bisulfite treated nucleic acid for analysis of methylation status of SEQ ID NO: 38
ggatatttggagaggtagatagtaga

SEQ ID NO: 2025 - DNA, 19 bp, Artificial Sequence
  bisulfite treated nucleic acid for analysis of methylation status of SEQ ID NO: 38
ggagaggtagatagtagaa

SEQ ID NO: 2026 - DNA, 27 bp, Artificial Sequence
  bisulfite treated nucleic acid for analysis of methylation status of SEQ ID NO: 38
gtagaagtggatatttttttgtatgtt

SEQ ID NO: 2027 - DNA, 23 bp, Artificial Sequence
  bisulfite treated nucleic acid for analysis of methylation status of SEQ ID NO: 27
ttacccaaactaaaatacaataa

SEQ ID NO: 2028 - DNA, 22 bp, Artificial Sequence
  bisulfite treated nucleic acid for analysis of methylation status of SEQ ID NO: 27
atggtggtatatgtttgtgatg

SEQ ID NO: 2029 - DNA, 16 bp, Artificial Sequence
  bisulfite treated nucleic acid for analysis of methylation status of SEQ ID NO: 27
aacgcgatctcgactc

SEQ ID NO: 2030 - DNA, 17 bp, Artificial Sequence
  bisulfite treated nucleic acid for analysis of methylation status of SEQ ID NO: 27
attctcctacctcaacc

SEQ ID NO: 2031 - DNA, 23 bp, Artificial Sequence
  bisulfite treated nucleic acid for analysis of methylation status of SEQ ID NO: 27
caataacacaatctcaactcacc

SEQ ID NO: 2032 - DNA, 23 bp, Artificial Sequence
  bisulfite treated nucleic acid for analysis of methylation status of SEQ ID NO: 27
aattttgatattttgtgaggttg

SEQ ID NO: 2033 - DNA, 22 bp, Artificial Sequence
  bisulfite treated nucleic acid for analysis of methylation status of SEQ ID NO: 27
tgatattttgtgaggttgaggt

SEQ ID NO: 2034 - DNA, 23 bp, Artificial Sequence
  bisulfite treated nucleic acid for analysis of methylation status of SEQ ID NO: 27
gatattttgtgaggttgaggtag

SEQ ID NO: 2035 - DNA, 22 bp, Artificial Sequence
  bisulfite treated nucleic acid for analysis of methylation status of SEQ ID NO: 27
attttgatattttgtgaggttg

SEQ ID NO: 2036 - DNA, 23 bp, Artificial Sequence
  bisulfite treated nucleic acid for analysis of methylation status of SEQ ID NO: 27
tatggtggtatatgtttgtgatg

SEQ ID NO: 2037 - DNA, 21 bp, Artificial Sequence
  bisulfite treated nucleic acid for analysis of methylation status of SEQ ID NO: 27
ggtatatgtttgtgatgggaa

SEQ ID NO: 2038 - DNA, 21 bp, Artificial Sequence
  bisulfite treated nucleic acid for analysis of methylation status of SEQ ID NO: 27
ggtggtatatgtttgtgatgg

SEQ ID NO: 2039 - DNA, 21 bp, Artificial Sequence
  bisulfite treated nucleic acid for analysis of methylation status of SEQ ID NO: 27
gtggtatatgtttgtgatggg

SEQ ID NO: 2040 - DNA, 22 bp, Artificial Sequence
  bisulfite treated nucleic acid for analysis of methylation status of SEQ ID NO: 27
atattttgtgaggttgaggtag

SEQ ID NO: 2041 - DNA, 24 bp, Artificial Sequence
  bisulfite treated nucleic acid for analysis of methylation status of SEQ ID NO: 27
tgtaattttgatattttgtgaggt

SEQ ID NO: 2042 - DNA, 21 bp, Artificial Sequence
  bisulfite treated nucleic acid for analysis of methylation status of SEQ ID NO: 27
tggtggtatatgtttgtgatg

SEQ ID NO: 2043 - DNA, 24 bp, Artificial Sequence
  bisulfite treated nucleic acid for analysis of methylation status of SEQ ID NO: 27
taattttgatattttgtgaggttg

SEQ ID NO: 2044 - DNA, 22 bp, Artificial Sequence
  bisulfite treated nucleic acid for analysis of methylation status of SEQ ID NO: 27
taaaagtagttggtatggtggt

SEQ ID NO: 2045 - DNA, 22 bp, Artificial Sequence
  bisulfite treated nucleic acid for analysis of methylation status of SEQ ID NO: 27
aaaagtagttggtatggtggta

SEQ ID NO: 2046 - DNA, 21 bp, Artificial Sequence
  bisulfite treated nucleic acid for analysis of methylation status of SEQ ID NO: 27
tggtatatgtttgtgatggga

SEQ ID NO: 2047 - DNA, 21 bp, Artificial Sequence
  bisulfite treated nucleic acid for analysis of methylation status of SEQ ID NO: 27
ttttgatattttgtgaggttg

SEQ ID NO: 2048 - DNA, 23 bp, Artificial Sequence
  bisulfite treated nucleic acid for analysis of methylation status of SEQ ID NO: 27
ggttgaggtaggtagattatttg

SEQ ID NO: 2049 - DNA, 24 bp, Artificial Sequence
  bisulfite treated nucleic acid for analysis of methylation status of SEQ ID NO: 27
aggttgaggtaggtagattatttg

SEQ ID NO: 2050 - DNA, 22 bp, Artificial Sequence
  bisulfite treated nucleic acid for analysis of methylation status of SEQ ID NO: 27
aaagtagttggtatggtggtat

SEQ ID NO: 2051 - DNA, 24 bp, Artificial Sequence
  bisulfite treated nucleic acid for analysis of methylation status of SEQ ID NO: 27
gtaattttgatattttgtgaggtt

SEQ ID NO: 2052 - DNA, 21 bp, Artificial Sequence
  bisulfite treated nucleic acid for analysis of methylation status of SEQ ID NO: 27
tattttgtgaggttgaggtag

SEQ ID NO: 2053 - DNA, 23 bp, Artificial Sequence
  bisulfite treated nucleic acid for analysis of methylation status of SEQ ID NO: 27
gtatggtggtatatgtttgtgat

SEQ ID NO: 2054 - DNA, 25 bp, Artificial Sequence
  bisulfite treated nucleic acid for analysis of methylation status of SEQ ID NO: 27
ttgtaattttgatattttgtgaggt

SEQ ID NO: 2055 - DNA, 19 bp, Artificial Sequence
  bisulfite treated nucleic acid for analysis of methylation status of SEQ ID NO: 27
ggaggttgaggtaggagaa

SEQ ID NO: 2056 - DNA, 25 bp, Artificial Sequence
  bisulfite treated nucleic acid for analysis of methylation status of SEQ ID NO: 27
aaaaatataaaagtagttggtatgg

SEQ ID NO: 2057 - DNA, 24 bp, Artificial Sequence
  bisulfite treated nucleic acid for analysis of methylation status of SEQ ID NO: 27
ttgatattttgtgaggttgaggta

SEQ ID NO: 2058 - DNA, 26 bp, Artificial Sequence
  bisulfite treated nucleic acid for analysis of methylation status of SEQ ID NO: 27
aaaatataaaagtagttggtatggtg

SEQ ID NO: 2059 - DNA, 22 bp, Artificial Sequence
  bisulfite treated nucleic acid for analysis of methylation status of SEQ ID NO: 27
ataaaagtagttggtatggtgg

SEQ ID NO: 2060 - DNA, 18 bp, Artificial Sequence
  bisulfite treated nucleic acid for analysis of methylation status of SEQ ID NO: 27
gggaggttgaggtaggag

SEQ ID NO: 2061 - DNA, 27 bp, Artificial Sequence
  bisulfite treated nucleic acid for analysis of methylation status of SEQ ID NO: 27
ttaaaaatataaaagtagttggtatgg

SEQ ID NO: 2062 - DNA, 20 bp, Artificial Sequence
  bisulfite treated nucleic acid for analysis of methylation status of SEQ ID NO: 27
attttgtgaggttgaggtag

SEQ ID NO: 2063 - DNA, 26 bp, Artificial Sequence
  bisulfite treated nucleic acid for analysis of methylation status of SEQ ID NO: 27
taaaaatataaaagtagttggtatgg

SEQ ID NO: 2064 - DNA, 25 bp, Artificial Sequence
  bisulfite treated nucleic acid for analysis of methylation status of SEQ ID NO: 27
aatataaaagtagttggtatggtgg

SEQ ID NO: 2065 - DNA, 18 bp, Artificial Sequence
  bisulfite treated nucleic acid for analysis of methylation status of SEQ ID NO: 27
ttgggaggttgaggtagg

SEQ ID NO: 2066 - DNA, 21 bp, Artificial Sequence
  bisulfite treated nucleic acid for analysis of methylation status of SEQ ID NO: 27
gaggttgaggtaggtagatta

SEQ ID NO: 2067 - DNA, 28 bp, Artificial Sequence
  bisulfite treated nucleic acid for analysis of methylation status of SEQ ID NO: 27
attaaaaatataaaagtagttggtatgg

SEQ ID NO: 2068 - DNA, 23 bp, Artificial Sequence
  bisulfite treated nucleic acid for analysis of methylation status of SEQ ID NO: 27
tataaaagtagttggtatggtgg

SEQ ID NO: 2069 - DNA, 20 bp, Artificial Sequence
  bisulfite treated nucleic acid for analysis of methylation status of SEQ ID NO: 27
tttgatattttgtgaggttg

SEQ ID NO: 2070 - DNA, 22 bp, Artificial Sequence
  bisulfite treated nucleic acid for analysis of methylation status of SEQ ID NO: 27
gttgaggtaggtagattatttg

SEQ ID NO: 2071 - DNA, 21 bp, Artificial Sequence
  bisulfite treated nucleic acid for analysis of methylation status of SEQ ID NO: 27
aagtagttggtatggtggtat

SEQ ID NO: 2072 - DNA, 24 bp, Artificial Sequence
  bisulfite treated nucleic acid for analysis of methylation status of SEQ ID NO: 27
atataaaagtagttggtatggtgg

SEQ ID NO: 2073 - DNA, 19 bp, Artificial Sequence
  bisulfite treated nucleic acid for analysis of methylation status of SEQ ID NO: 27
tgggaggttgaggtaggag

SEQ ID NO: 2074 - DNA, 29 bp, Artificial Sequence
  bisulfite treated nucleic acid for analysis of methylation status of SEQ ID NO: 27
tattaaaaatataaaagtagttggtatgg

SEQ ID NO: 2075 - DNA, 20 bp, Artificial Sequence
  bisulfite treated nucleic acid for analysis of methylation status of SEQ ID NO: 27
gtatatgtttgtgatgggaa

SEQ ID NO: 2076 - DNA, 19 bp, Artificial Sequence
  bisulfite treated nucleic acid for analysis of methylation status of SEQ ID NO: 27
ttttgtgaggttgaggtag

SEQ ID NO: 2077 - DNA, 26 bp, Artificial Sequence
  bisulfite treated nucleic acid for analysis of methylation status of SEQ ID NO: 27
aaatataaaagtagttggtatggtgg

SEQ ID NO: 2078 - DNA, 24 bp, Artificial Sequence
  bisulfite treated nucleic acid for analysis of methylation status of SEQ ID NO: 27
attacccaaactaaaatacaataa

SEQ ID NO: 2079 - DNA, 27 bp, Artificial Sequence
  bisulfite treated nucleic acid for analysis of methylation status of SEQ ID NO: 27
cttattacccaaactaaaatacaataa

SEQ ID NO: 2080 - DNA, 25 bp, Artificial Sequence
  bisulfite treated nucleic acid for analysis of methylation status of SEQ ID NO: 27
tattacccaaactaaaatacaataa

SEQ ID NO: 2081 - DNA, 28 bp, Artificial Sequence
  bisulfite treated nucleic acid for analysis of methylation status of SEQ ID NO: 27
tcttattacccaaactaaaatacaataa

SEQ ID NO: 2082 - DNA, 24 bp, Artificial Sequence
  bisulfite treated nucleic acid for analysis of methylation status of SEQ ID NO: 27
tacaataacacaatctcaactcac

SEQ ID NO: 2083 - DNA, 26 bp, Artificial Sequence
  bisulfite treated nucleic acid for analysis of methylation status of SEQ ID NO: 27
tcttattacccaaactaaaatacaat

SEQ ID NO: 2084 - DNA, 27 bp, Artificial Sequence
  nucleic acid for analysis of methylation status of SEQ ID NO: 27
ctcttattacccaaactaaaatacaat

SEQ ID NO: 2085 - DNA, 25 bp, Artificial Sequence
  bisulfite treated nucleic acid for analysis of methylation status of SEQ ID NO: 27
cttattacccaaactaaaatacaat

SEQ ID NO: 2086 - DNA, 24 bp, Artificial Sequence
  bisulfite treated nucleic acid for analysis of methylation status of SEQ ID NO: 27
ttattacccaaactaaaatacaat

SEQ ID NO: 2087 - DNA, 24 bp, Artificial Sequence
  bisulfite treated nucleic acid for analysis of methylation status of SEQ ID NO: 27
atacaataacacaatctcaactca

SEQ ID NO: 2088 - DNA, 25 bp, Artificial Sequence
  bisulfite treated nucleic acid for analysis of methylation status of SEQ ID NO: 27
ctcttattacccaaactaaaataca

SEQ ID NO: 2089 - DNA, 25 bp, Artificial Sequence
  bisulfite treated nucleic acid for analysis of methylation status of SEQ ID NO: 27
aaaatacaataacacaatctcaact

SEQ ID NO: 2090 - DNA, 24 bp, Artificial Sequence
  bisulfite treated nucleic acid for analysis of methylation status of SEQ ID NO: 27
tcttattacccaaactaaaataca

SEQ ID NO: 2091 - DNA, 26 bp, Artificial Sequence
  bisulfite treated nucleic acid for analysis of methylation status of SEQ ID NO: 27
tcactcttattacccaaactaaaata

SEQ ID NO: 2092 - DNA, 25 bp, Artificial Sequence
  bisulfite treated nucleic acid for analysis of methylation status of SEQ ID NO: 27
cactcttattacccaaactaaaata

SEQ ID NO: 2093 - DNA, 26 bp, Artificial Sequence
  bisulfite treated nucleic acid for analysis of methylation status of SEQ ID NO: 27
actcttattacccaaactaaaataca

SEQ ID NO: 2094 - DNA, 25 bp, Artificial Sequence
  bisulfite treated nucleic acid for analysis of methylation status of SEQ ID NO: 27
tacaataacacaatctcaactcacc

SEQ ID NO: 2095 - DNA, 25 bp, Artificial Sequence
  bisulfite treated nucleic acid for analysis of methylation status of SEQ ID NO: 27
aaatacaataacacaatctcaactc

SEQ ID NO: 2096 - DNA, 25 bp, Artificial Sequence
  bisulfite treated nucleic acid for analysis of methylation status of SEQ ID NO: 27
atacaataacacaatctcaactcac

SEQ ID NO: 2097 - DNA, 26 bp, Artificial Sequence
  bisulfite treated nucleic acid for analysis of methylation status of SEQ ID NO: 27
atacaataacacaatctcaactcacc

SEQ ID NO: 2098 - DNA, 24 bp, Artificial Sequence
  bisulfite treated nucleic acid for analysis of methylation status of SEQ ID NO: 27
tcactcttattacccaaactaaaa

SEQ ID NO: 2099 - DNA, 27 bp, Artificial Sequence
  bisulfite treated nucleic acid for analysis of methylation status of SEQ ID NO: 27
ctaaaatacaataacacaatctcaact

SEQ ID NO: 2100 - DNA, 23 bp, Artificial Sequence
  bisulfite treated nucleic acid for analysis of methylation status of SEQ ID NO: 27
cactcttattacccaaactaaaa

SEQ ID NO: 2101 - DNA, 25 bp, Artificial Sequence
  bisulfite treated nucleic acid for analysis of methylation status of SEQ ID NO: 27
ttcactcttattacccaaactaaaa

SEQ ID NO: 2102 - DNA, 26 bp, Artificial Sequence
  bisulfite treated nucleic acid for analysis of methylation status of SEQ ID NO: 27
tttcactcttattacccaaactaaaa

SEQ ID NO: 2103 - DNA, 23 bp, Artificial Sequence
  bisulfite treated nucleic acid for analysis of methylation status of SEQ ID NO: 27
actcttattacccaaactaaaat

SEQ ID NO: 2104 - DNA, 27 bp, Artificial Sequence
  bisulfite treated nucleic acid for analysis of methylation status of SEQ ID NO: 27
atttcactcttattacccaaactaaaa

SEQ ID NO: 2105 - DNA, 28 bp, Artificial Sequence
  bisulfite treated nucleic acid for analysis of methylation status of SEQ ID NO: 27
aatttcactcttattacccaaactaaaa

SEQ ID NO: 2106 - DNA, 24 bp, Artificial Sequence
  bisulfite treated nucleic acid for analysis of methylation status of SEQ ID NO: 27
aatttcactcttattacccaaact

SEQ ID NO: 2107 - DNA, 33 bp, Artificial Sequence
  bisulfite treated nucleic acid for analysis of methylation status of SEQ ID NO: 27
ccaaactaaaatacaataacacaatctcaactc

SEQ ID NO: 2108 - DNA, 22 bp, Artificial Sequence
  bisulfite treated nucleic acid for analysis of methylation status of SEQ ID NO: 27
tttcactcttattacccaaact

SEQ ID NO: 2109 - DNA, 23 bp, Artificial Sequence
  bisulfite treated nucleic acid for analysis of methylation status of SEQ ID NO: 27
atttcactcttattacccaaact

SEQ ID NO: 2110 - DNA, 23 bp, Artificial Sequence
  bisulfite treated nucleic acid for analysis of methylation status of SEQ ID NO: 27
ttcactcttattacccaaactaa

SEQ ID NO: 2111 - DNA, 25 bp, Artificial Sequence
  bisulfite treated nucleic acid for analysis of methylation status of SEQ ID NO: 41
ggatagagattggagtttaattttg

SEQ ID NO: 2112 - DNA, 17 bp, Artificial Sequence
  bisulfite treated nucleic acid for analysis of methylation status of SEQ ID NO: 41
atcccttccacccaacc

SEQ ID NO: 2113 - DNA, 27 bp, Artificial Sequence
  bisulfite treated nucleic acid for analysis of methylation status of SEQ ID NO: 41
gtgagtggtttagagcgttcgtttagt

SEQ ID NO: 2114 - DNA, 30 bp, Artificial Sequence
  bisulfite treated nucleic acid for analysis of methylation status of SEQ ID NO: 41
agtttaattttggattgtatagatgtttgt

SEQ ID NO: 2115 - DNA, 17 bp, Artificial Sequence
  bisulfite treated nucleic acid for analysis of methylation status of SEQ ID NO: 41
catcccttccacccaac

SEQ ID NO: 2116 - DNA, 16 bp, Artificial Sequence
  bisulfite treated nucleic acid for analysis of methylation status of SEQ ID NO: 41
tcccttccacccaacc

SEQ ID NO: 2117 - DNA, 16 bp, Artificial Sequence
  bisulfite treated nucleic acid for analysis of methylation status of SEQ ID NO: 41
cccttccacccaacct

SEQ ID NO: 2118 - DNA, 23 bp, Artificial Sequence
  bisulfite treated nucleic acid for analysis of methylation status of SEQ ID NO: 41
agagattggagtttaattttgga

SEQ ID NO: 2119 - DNA, 29 bp, Artificial Sequence
  bisulfite treated nucleic acid for analysis of methylation status of SEQ ID NO: 41
aattttggattgtatagatgtttgttgat

SEQ ID NO: 2120 - DNA, 22 bp, Artificial Sequence
  bisulfite treated nucleic acid for analysis of methylation status of SEQ ID NO: 41
gagattggagtttaattttgga

SEQ ID NO: 2121 - DNA, 24 bp, Artificial Sequence
  bisulfite treated nucleic acid for analysis of methylation status of SEQ ID NO: 41
tagagattggagtttaattttgga

SEQ ID NO: 2122 - DNA, 25 bp, Artificial Sequence
  bisulfite treated nucleic acid for analysis of methylation status of SEQ ID NO: 41
atagagattggagtttaattttgga

SEQ ID NO: 2123 - DNA, 25 bp, Artificial Sequence
  bisulfite treated nucleic acid for analysis of methylation status of SEQ ID NO: 41
gatagagattggagtttaattttgg

SEQ ID NO: 2124 - DNA, 30 bp, Artificial Sequence; identical to SEQ ID NO: 1192
  bisulfite treated nucleic acid for analysis of methylation status of SEQ ID NO: 41

SEQ ID NO: 2125 - DNA, 30 bp, Artificial Sequence; identical to SEQ ID NO: 1193
  bisulfite treated nucleic acid for analysis of methylation status of SEQ ID NO: 41

SEQ ID NO: 2126 - DNA, 23 bp, Artificial Sequence
  bisulfite treated nucleic acid for analysis of methylation status of SEQ ID NO: 41
gagattggagtttaattttggat

SEQ ID NO: 2127 - DNA, 30 bp, Artificial Sequence; identical to SEQ ID NO: 1194
  bisulfite treated nucleic acid for analysis of methylation status of SEQ ID NO: 41

SEQ ID NO: 2128 - DNA, 24 bp, Artificial Sequence
  bisulfite treated nucleic acid for analysis of methylation status of SEQ ID NO: 41
agagattggagtttaattttggat

SEQ ID NO: 2129 - DNA, 25 bp, Artificial Sequence
  bisulfite treated nucleic acid for analysis of methylation status of SEQ ID NO: 41
tagagattggagtttaattttggat

SEQ ID NO: 2130 - DNA, 26 bp, Artificial Sequence
  bisulfite treated nucleic acid for analysis of methylation status of SEQ ID NO: 41
atagagattggagtttaattttggat

SEQ ID NO: 2131 - DNA, 27 bp, Artificial Sequence
  bisulfite treated nucleic acid for analysis of methylation status of SEQ ID NO: 41
gatagagattggagtttaattttggat

SEQ ID NO: 2132 - DNA, 30 bp, Artificial Sequence; identical to SEQ ID NO: 1195
  bisulfite treated nucleic acid for analysis of methylation status of SEQ ID NO: 41

SEQ ID NO: 2133 - DNA, 30 bp, Artificial Sequence; identical to SEQ ID NO: 1196
  bisulfite treated nucleic acid for analysis of methylation status of SEQ ID NO: 41

SEQ ID NO: 2134 - DNA, 26 bp, Artificial Sequence
  bisulfite treated nucleic acid for analysis of methylation status of SEQ ID NO: 41
gatagagattggagtttaattttgga

SEQ ID NO: 2135 - DNA, 30 bp, Artificial Sequence; identical to SEQ ID NO: 1197
  bisulfite treated nucleic acid for analysis of methylation status of SEQ ID NO: 41

SEQ ID NO: 2136 - DNA, 26 bp, Artificial Sequence
  bisulfite treated nucleic acid for analysis of methylation status of SEQ ID NO: 41
ggatagagattggagtttaattttgg

SEQ ID NO: 2137 - DNA, 30 bp, Artificial Sequence; identical to SEQ ID NO: 1198
  bisulfite treated nucleic acid for analysis of methylation status of SEQ ID NO: 41

SEQ ID NO: 2138 - DNA, 31 bp, Artificial Sequence
  bisulfite treated nucleic acid for analysis of methylation status of SEQ ID NO: 41
aattttggattgtatagatgtttgttgataa

SEQ ID NO: 2139 - DNA, 33 bp, Artificial Sequence
  bisulfite treated nucleic acid for analysis of methylation status of SEQ ID NO: 41
tttaattttggattgtatagatgtttgttgata

SEQ ID NO: 2140 - DNA, 33 bp, Artificial Sequence
  nucleic acid for analysis of methylation status of SEQ ID NO: 41
ttggattgtatagatgtttgttgataatttgtg

SEQ ID NO: 2141 - DNA, 33 bp, Artificial Sequence
  bisulfite treated nucleic acid for analysis of methylation status of SEQ ID NO: 41
ttaattttggattgtatagatgtttgttgataa

SEQ ID NO: 2142 - DNA, 33 bp, Artificial Sequence
  bisulfite treated nucleic acid for analysis of methylation status of SEQ ID NO: 41
aattttggattgtatagatgtttgttgataatt

SEQ ID NO: 2143 - DNA, 33 bp, Artificial Sequence
  bisulfite treated nucleic acid for analysis of methylation status of SEQ ID NO: 41
taattttggattgtatagatgtttgttgataat

SEQ ID NO: 2144 - DNA, 33 bp, Artificial Sequence
  bisulfite treated nucleic acid for analysis of methylation status of SEQ ID NO: 41
agtttaattttggattgtatagatgtttgttga

SEQ ID NO: 2145 - DNA, 24 bp, Artificial Sequence
  bisulfite treated nucleic acid for analysis of methylation status of SEQ ID NO: 41
atagagattggagtttaattttgg

SEQ ID NO: 2146 - DNA, 33 bp, Artificial Sequence
  bisulfite treated nucleic acid for analysis of methylation status of SEQ ID NO: 41
gtttaattttggattgtatagatgtttgttgat

SEQ ID NO: 2147 - DNA, 33 bp, Artificial Sequence
  bisulfite treated nucleic acid for analysis of methylation status of SEQ ID NO: 41
ttttggattgtatagatgtttgttgataatttg

SEQ ID NO: 2148 - DNA, 33 bp, Artificial Sequence
  bisulfite treated nucleic acid for analysis of methylation status of SEQ ID NO: 41
tttggattgtatagatgtttgttgataatttgt

SEQ ID NO: 2149 - DNA, 33 bp, Artificial Sequence
  bisulfite treated nucleic acid for analysis of methylation status of SEQ ID NO: 41
attttggattgtatagatgtttgttgataattt

SEQ ID NO: 2150 - DNA, 34 bp, Artificial Sequence
  bisulfite treated nucleic acid for analysis of methylation status of SEQ ID NO: 41
gtttaattttggattgtatagatgtttgttgata

SEQ ID NO: 2151 - DNA, 34 bp, Artificial Sequence
  bisulfite treated nucleic acid for analysis of methylation status of SEQ ID NO: 41
tttaattttggattgtatagatgtttgttgataa

SEQ ID NO: 2152 - DNA, 34 bp, Artificial Sequence
  bisulfite treated nucleic acid for analysis of methylation status of SEQ ID NO: 41
taattttggattgtatagatgtttgttgataatt

SEQ ID NO: 2153 - DNA, 34 bp, Artificial Sequence
  bisulfite treated nucleic acid for analysis of methylation status of SEQ ID NO: 41
attttggattgtatagatgtttgttgataatttg

SEQ ID NO: 2154 - DNA, 34 bp, Artificial Sequence
  bisulfite treated nucleic acid for analysis of methylation status of SEQ ID NO: 41
aattttggattgtatagatgtttgttgataattt

SEQ ID NO: 2155 - DNA, 34 bp, Artificial Sequence
  bisulfite treated nucleic acid for analysis of methylation status of SEQ ID NO: 41
ttaattttggattgtatagatgtttgttgataat

SEQ ID NO: 2156 - DNA, 34 bp, Artificial Sequence
  bisulfite treated nucleic acid for analysis of methylation status of SEQ ID NO: 41
agtttaattttggattgtatagatgtttgttgat

SEQ ID NO: 2157 - DNA, 35 bp, Artificial Sequence
  bisulfite treated nucleic acid for analysis of methylation status of SEQ ID NO: 41
agtttaattttggattgtatagatgtttgttgata

SEQ ID NO: 2158 - DNA, 35 bp, Artificial Sequence
  bisulfite treated nucleic acid for analysis of methylation status of SEQ ID NO: 41
ttaattttggattgtatagatgtttgttgataatt

SEQ ID NO: 2159 - DNA, 35 bp, Artificial Sequence
  bisulfite treated nucleic acid for analysis of methylation status of SEQ ID NO: 41
tttaattttggattgtatagatgtttgttgataat

SEQ ID NO: 2160 - DNA, 35 bp, Artificial Sequence
  bisulfite treated nucleic acid for analysis of methylation status of SEQ ID NO: 41
gtttaattttggattgtatagatgtttgttgataa

SEQ ID NO: 2161 - DNA, 26 bp, Artificial Sequence
  bisulfite treated nucleic acid for analysis of methylation status of SEQ ID NO: 6
ttttctttaccttcttaaatcaacac

SEQ ID NO: 2162 - DNA, 22 bp, Artificial Sequence
  bisulfite treated nucleic acid for analysis of methylation status of SEQ ID NO: 6
gttggggaatgtgataggtagt

SEQ ID NO: 2163 - DNA, 27 bp, Artificial Sequence
  bisulfite treated nucleic acid for analysis of methylation status of SEQ ID NO: 6
atcaacactacgaaacgattaccgact

SEQ ID NO: 2164 - DNA, 26 bp, Artificial Sequence
  bisulfite treated nucleic acid for analysis of methylation status of SEQ ID NO: 6
tcaacactacaaaacaattaccaact

SEQ ID NO: 2165 - DNA, 22 bp, Artificial Sequence
  bisulfite treated nucleic acid for analysis of methylation status of SEQ ID NO: 6
ggttggggaatgtgataggtag

SEQ ID NO: 2166 - DNA, 23 bp, Artificial Sequence
  bisulfite treated nucleic acid for analysis of methylation status of SEQ ID NO: 6
ttggggaatgtgataggtagtag

SEQ ID NO: 2167 - DNA, 22 bp, Artificial Sequence
  bisulfite treated nucleic acid for analysis of methylation status of SEQ ID NO: 6
tggggaatgtgataggtagtag

SEQ ID NO: 2168 - DNA, 21 bp, Artificial Sequence
  bisulfite treated nucleic acid for analysis of methylation status of SEQ ID NO: 6
tagggttggggaatgtgatag

SEQ ID NO: 2169 - DNA, 20 bp, Artificial Sequence
  bisulfite treated nucleic acid for analysis of methylation status of SEQ ID NO: 6
agggttggggaatgtgatag

SEQ ID NO: 2170 - DNA, 19 bp, Artificial Sequence
  bisulfite treated nucleic acid for analysis of methylation status of SEQ ID NO: 6
gggttggggaatgtgatag

SEQ ID NO: 2171 - DNA, 24 bp, Artificial Sequence
  bisulfite treated nucleic acid for analysis of methylation status of SEQ ID NO: 6
gggaatgtgataggtagtaggttt

SEQ ID NO: 2172 - DNA, 25 bp, Artificial Sequence
  bisulfite treated nucleic acid for analysis of methylation status of SEQ ID NO: 6
ggggaatgtgataggtagtaggttt

SEQ ID NO: 2173 - DNA, 26 bp, Artificial Sequence
  bisulfite treated nucleic acid for analysis of methylation status of SEQ ID NO: 6
ggaatgtgataggtagtaggtttatt

SEQ ID NO: 2174 - DNA, 25 bp, Artificial Sequence
  bisulfite treated nucleic acid for analysis of methylation status of SEQ ID NO: 6
tttctttaccttcttaaatcaacac

SEQ ID NO: 2175 - DNA, 27 bp, Artificial Sequence
  bisulfite treated nucleic acid for analysis of methylation status of SEQ ID NO: 6
attttctttaccttcttaaatcaacac

SEQ ID NO: 2176 - DNA, 28 bp, Artificial Sequence
  bisulfite treated nucleic acid for analysis of methylation status of SEQ ID NO: 6
aattttctttaccttcttaaatcaacac

SEQ ID NO: 2177 - DNA, 25 bp, Artificial Sequence
  bisulfite treated nucleic acid for analysis of methylation status of SEQ ID NO: 6
ttctttaccttcttaaatcaacact

SEQ ID NO: 2178 - DNA, 29 bp, Artificial Sequence
  bisulfite treated nucleic acid for analysis of methylation status of SEQ ID NO: 6
taattttctttaccttcttaaatcaacac

SEQ ID NO: 2179 - DNA, 30 bp, Artificial Sequence; identical to SEQ ID NO: 1246
  bisulfite treated nucleic acid for analysis of methylation status of SEQ ID NO: 6

SEQ ID NO: 2180 - DNA, 27 bp, Artificial Sequence
  bisulfite treated nucleic acid for analysis of methylation status of SEQ ID NO: 6
atcaacactacaaaacaattaccaact

SEQ ID NO: 2181 - DNA, 28 bp, Artificial Sequence
  bisulfite treated nucleic acid for analysis of methylation status of SEQ ID NO: 6
ctaattttctttaccttcttaaatcaac

SEQ ID NO: 2182 - DNA, 26 bp, Artificial Sequence
  bisulfite treated nucleic acid for analysis of methylation status of SEQ ID NO: 6
aattttctttaccttcttaaatcaac

SEQ ID NO: 2183 - DNA, 32 bp, Artificial Sequence; identical to SEQ ID NO: 1256
  bisulfite treated nucleic acid for analysis of methylation status of SEQ ID NO: 6

SEQ ID NO: 2184 - DNA, 27 bp, Artificial Sequence
  bisulfite treated nucleic acid for analysis of methylation status of SEQ ID NO: 6
cctaattttctttaccttcttaaatca

SEQ ID NO: 2185 - DNA, 28 bp, Artificial Sequence
  bisulfite treated nucleic acid for analysis of methylation status of SEQ ID NO: 6
acctaattttctttaccttcttaaatca

SEQ ID NO: 2186 - DNA, 27 bp, Artificial Sequence
  bisulfite treated nucleic acid for analysis of methylation status of SEQ ID NO: 6
taattttctttaccttcttaaatcaac

SEQ ID NO: 2187 - DNA, 33 bp, Artificial Sequence
  bisulfite treated nucleic acid for analysis of methylation status of SEQ ID NO: 6
tcttaaatcaacactacaaaacaattaccaact

SEQ ID NO: 2188 - DNA, 33 bp, Artificial Sequence; identical to SEQ ID NO: 1265
  bisulfite treated nucleic acid for analysis of methylation status of SEQ ID NO: 6

SEQ ID NO: 2189 - DNA, 33 bp, Artificial Sequence; identical to SEQ ID NO: 1268
  bisulfite treated nucleic acid for analysis of methylation status of SEQ ID NO: 6

SEQ ID NO: 2190 - DNA, 33 bp, Artificial Sequence; identical to SEQ ID NO: 1269
  bisulfite treated nucleic acid for analysis of methylation status of SEQ ID NO: 6

SEQ ID NO: 2191 - DNA, 34 bp, Artificial Sequence
  bisulfite treated nucleic acid for analysis of methylation status of SEQ ID NO: 6
ttcttaaatcaacactacaaaacaattaccaact

SEQ ID NO: 2192 - DNA, 34 bp, Artificial Sequence
  bisulfite treated nucleic acid for analysis of methylation status of SEQ ID NO: 6
cttcttaaatcaacactacaaaacaattaccaac

SEQ ID NO: 2193 - DNA, 34 bp, Artificial Sequence
  bisulfite treated nucleic acid for analysis of methylation status of SEQ ID NO: 6
cttaaatcaacactacaaaacaattaccaactaa

SEQ ID NO: 2194 - DNA, 34 bp, Artificial Sequence
  bisulfite treated nucleic acid for analysis of methylation status of SEQ ID NO: 6
tcttaaatcaacactacaaaacaattaccaacta

SEQ ID NO: 2195 - DNA, 35 bp, Artificial Sequence
  bisulfite treated nucleic acid for analysis of methylation status of SEQ ID NO: 6
tcttaaatcaacactacaaaacaattaccaactaa

SEQ ID NO: 2196 - DNA, 35 bp, Artificial Sequence
  bisulfite treated nucleic acid for analysis of methylation status of SEQ ID NO: 6
ttcttaaatcaacactacaaaacaattaccaacta

SEQ ID NO: 2197 - DNA, 36 bp, Artificial Sequence
  bisulfite treated nucleic acid for analysis of methylation status of SEQ ID NO: 6
tcttaaatcaacactacaaaacaattaccaactaaa

SEQ ID NO: 2198 - DNA, 36 bp, Artificial Sequence
  bisulfite treated nucleic acid for analysis of methylation status of SEQ ID NO: 6
ttcttaaatcaacactacaaaacaattaccaactaa

SEQ ID NO: 2199 - DNA, 19 bp, Artificial Sequence
  bisulfite treated nucleic acid for analysis of methylation status of SEQ ID NO: 8
gtagggggatgtaggttgg

SEQ ID NO: 2200 - DNA, 22 bp, Artificial Sequence
  bisulfite treated nucleic acid for analysis of methylation status of SEQ ID NO: 8
cctctcaccctctttcctataa

SEQ ID NO: 2201 - DNA, 24 bp, Artificial Sequence
  bisulfite treated nucleic acid for analysis of methylation status of SEQ ID NO: 8
ggcggagaggttagggacgttttt

SEQ ID NO: 2202 - DNA, 21 bp, Artificial Sequence
  bisulfite treated nucleic acid for analysis of methylation status of SEQ ID NO: 8
ggttgggaatgttgtggtgga

SEQ ID NO: 2203 - DNA, 17 bp, Artificial Sequence
  bisulfite treated nucleic acid for analysis of methylation status of SEQ ID NO: 8
agggggatgtaggttgg

SEQ ID NO: 2204 - DNA, 22 bp, Artificial Sequence
  bisulfite treated nucleic acid for analysis of methylation status of SEQ ID NO: 8
ggttgggaatgttgtggtggag

SEQ ID NO: 2205 - DNA, 23 bp, Artificial Sequence
  bisulfite treated nucleic acid for analysis of methylation status of SEQ ID NO: 8
ggttgggaatgttgtggtggaga

SEQ ID NO: 2206 - DNA, 23 bp, Artificial Sequence
  bisulfite treated nucleic acid for analysis of methylation status of SEQ ID NO: 8
aggttgggaatgttgtggtggag

SEQ ID NO: 2207 - DNA, 22 bp, Artificial Sequence
  bisulfite treated nucleic acid for analysis of methylation status of SEQ ID NO: 14
acaacacccacttaaaatccct

SEQ ID NO: 2208 - DNA, 22 bp, Artificial Sequence
  bisulfite treated nucleic acid for analysis of methylation status of SEQ ID NO: 14
gttatatggggatggggaagta

SEQ ID NO: 2209 - DNA, 30 bp, Artificial Sequence
  bisulfite treated nucleic acid for analysis of methylation status of SEQ ID NO: 14
aatccctaacgtatcttaaaaacacacgac

SEQ ID NO: 2210 - DNA, 33 bp, Artificial Sequence
  bisulfite treated nucleic acid for analysis of methylation status of SEQ ID NO: 14
aatccctaacatatcttaaaaacacacaacaaa

SEQ ID NO: 2211 - DNA, 22 bp, Artificial Sequence
  bisulfite treated nucleic acid for analysis of methylation status of SEQ ID NO: 14
ttatatggggatggggaagtag

SEQ ID NO: 2212 - DNA, 20 bp, Artificial Sequence
  bisulfite treated nucleic acid for analysis of methylation status of SEQ ID NO: 14
ttttgttatatggggatggg

SEQ ID NO: 2213 - DNA, 19 bp, Artificial Sequence
  bisulfite treated nucleic acid for analysis of methylation status of SEQ ID NO: 14
tttgttatatggggatggg

SEQ ID NO: 2214 - DNA, 17 bp, Artificial Sequence
  bisulfite treated nucleic acid for analysis of methylation status of SEQ ID NO: 14
tggggatggggaagtag

SEQ ID NO: 2215 - DNA, 21 bp, Artificial Sequence
  bisulfite treated nucleic acid for analysis of methylation status of SEQ ID NO: 14
caacacccacttaaaatccct

SEQ ID NO: 2216 - DNA, 22 bp, Artificial Sequence
  bisulfite treated nucleic acid for analysis of methylation status of SEQ ID NO: 14
aacacccacttaaaatccctaa

SEQ ID NO: 2217 - DNA, 21 bp, Artificial Sequence
  bisulfite treated nucleic acid for analysis of methylation status of SEQ ID NO: 14
acacccacttaaaatccctaa

SEQ ID NO: 2218 - DNA, 33 bp, Artificial Sequence
  bisulfite treated nucleic acid for analysis of methylation status of SEQ ID NO: 14
atccctaacatatcttaaaaacacacaacaaat

SEQ ID NO: 2219 - DNA, 33 bp, Artificial Sequence
  bisulfite treated nucleic acid for analysis of methylation status of SEQ ID NO: 14
tccctaacatatcttaaaaacacacaacaaata

SEQ ID NO: 2220 - DNA, 23 bp, Artificial Sequence
  bisulfite treated nucleic acid for analysis of methylation status of SEQ ID NO: 14
caacacccacttaaaatccctaa

SEQ ID NO: 2221 - DNA, 33 bp, Artificial Sequence; identical to SEQ ID NO: 1276
  bisulfite treated nucleic acid for analysis of methylation status of SEQ ID NO: 14

SEQ ID NO: 2222 - DNA, 34 bp, Artificial Sequence
  bisulfite treated nucleic acid for analysis of methylation status of SEQ ID NO: 14
tccctaacatatcttaaaaacacacaacaaataa

SEQ ID NO: 2223 - DNA, 34 bp, Artificial Sequence
  bisulfite treated nucleic acid for analysis of methylation status of SEQ ID NO: 14
aaatccctaacatatcttaaaaacacacaacaaa

SEQ ID NO: 2224 - DNA, 22 bp, Artificial Sequence
  bisulfite treated nucleic acid for analysis of methylation status of SEQ ID NO: 14
aaacaacacccacttaaaatcc

SEQ ID NO: 2225 - DNA, 23 bp, Artificial Sequence
  bisulfite treated nucleic acid for analysis of methylation status of SEQ ID NO: 14
caaacaacacccacttaaaatcc

SEQ ID NO: 2226 - DNA, 21 bp, Artificial Sequence
  bisulfite treated nucleic acid for analysis of methylation status of SEQ ID NO: 14
aacaacacccacttaaaatcc

SEQ ID NO: 2227 - DNA, 34 bp, Artificial Sequence
  bisulfite treated nucleic acid for analysis of methylation status of SEQ ID NO: 14
aatccctaacatatcttaaaaacacacaacaaat

SEQ ID NO: 2228 - DNA, 34 bp, Artificial Sequence
  bisulfite treated nucleic acid for analysis of methylation status of SEQ ID NO: 14
atccctaacatatcttaaaaacacacaacaaata

SEQ ID NO: 2229 - DNA, 24 bp, Artificial Sequence
  bisulfite treated nucleic acid for analysis of methylation status of SEQ ID NO: 9
accttcttaaacattcctatccaa

SEQ ID NO: 2230 - DNA, 22 bp, Artificial Sequence
  bisulfite treated nucleic acid for analysis of methylation status of SEQ ID NO: 9
ttttggggaaagaggtaatttt

SEQ ID NO: 2231 - DNA, 22 bp, Artificial Sequence
  bisulfite treated nucleic acid for analysis of methylation status of SEQ ID NO: 9
tcctatccaacccgcgtccgaa

SEQ ID NO: 2232 - DNA, 23 bp, Artificial Sequence
  bisulfite treated nucleic acid for analysis of methylation status of SEQ ID NO: 9
tcctatccaacccacatccaaaa

SEQ ID NO: 2233 - DNA, 21 bp, Artificial Sequence
  bisulfite treated nucleic acid for analysis of methylation status of SEQ ID NO: 9
tttggggaaagaggtaatttt

SEQ ID NO: 2234 - DNA, 21 bp, Artificial Sequence
  bisulfite treated nucleic acid for analysis of methylation status of SEQ ID NO: 9
gttaaggtgtagggagtgggg

SEQ ID NO: 2235 - DNA, 20 bp, Artificial Sequence
  bisulfite treated nucleic acid for analysis of methylation status of SEQ ID NO: 9
ttaaggtgtagggagtgggg

SEQ ID NO: 2236 - DNA, 19 bp, Artificial Sequence
  bisulfite treated nucleic acid for analysis of methylation status of SEQ ID NO: 9
taaggtgtagggagtgggg

SEQ ID NO: 2237 - DNA, 21 bp, Artificial Sequence
  bisulfite treated nucleic acid for analysis of methylation status of SEQ ID NO: 9
agttaaggtgtagggagtggg

SEQ ID NO: 2238 - DNA, 18 bp, Artificial Sequence
  bisulfite treated nucleic acid for analysis of methylation status of SEQ ID NO: 9
ggggatgtaggatggagg

SEQ ID NO: 2239 - DNA, 18 bp, Artificial Sequence
  bisulfite treated nucleic acid for analysis of methylation status of SEQ ID NO: 9
gggggatgtaggatggag

SEQ ID NO: 2240 - DNA, 18 bp, Artificial Sequence
  bisulfite treated nucleic acid for analysis of methylation status of SEQ ID NO: 9
aaggtgtagggagtgggg

SEQ ID NO: 2241 - DNA, 20 bp, Artificial Sequence
  bisulfite treated nucleic acid for analysis of methylation status of SEQ ID NO: 9
ttggggaaagaggtaatttt

SEQ ID NO: 2242 - DNA, 23 bp, Artificial Sequence
  bisulfite treated nucleic acid for analysis of methylation status of SEQ ID NO: 9
tttttggggaaagaggtaatttt

SEQ ID NO: 2243 - DNA, 22 bp, Artificial Sequence
  bisulfite treated nucleic acid for analysis of methylation status of SEQ ID NO: 9
gagttaaggtgtagggagtggg

SEQ ID NO: 2244 - DNA, 17 bp, Artificial Sequence
  bisulfite treated nucleic acid for analysis of methylation status of SEQ ID NO: 9
aggtgtagggagtgggg

SEQ ID NO: 2245 - DNA, 23 bp, Artificial Sequence
  bisulfite treated nucleic acid for analysis of methylation status of SEQ ID NO: 9
ttcctatccaacccacatccaaa

SEQ ID NO: 2246 - DNA, 24 bp, Artificial Sequence
  bisulfite treated nucleic acid for analysis of methylation status of SEQ ID NO: 9
attcctatccaacccacatccaaa

SEQ ID NO: 2247 - DNA, 25 bp, Artificial Sequence
  bisulfite treated nucleic acid for analysis of methylation status of SEQ ID NO: 9
accttcttaaacattcctatccaac

SEQ ID NO: 2248 - DNA, 24 bp, Artificial Sequence
  bisulfite treated nucleic acid for analysis of methylation status of SEQ ID NO: 9
tccaacccacatccaaaaaatact

SEQ ID NO: 2249 - DNA, 24 bp, Artificial Sequence
  bisulfite treated nucleic acid for analysis of methylation status of SEQ ID NO: 9
ttcctatccaacccacatccaaaa

SEQ ID NO: 2250 - DNA, 25 bp, Artificial Sequence
  bisulfite treated nucleic acid for analysis of methylation status of SEQ ID NO: 9
ttcctatccaacccacatccaaaaa

SEQ ID NO: 2251 - DNA, 25 bp, Artificial Sequence
  bisulfite treated nucleic acid for analysis of methylation status of SEQ ID NO: 9
tccaacccacatccaaaaaatactc

SEQ ID NO: 2252 - DNA, 25 bp, Artificial Sequence
  bisulfite treated nucleic acid for analysis of methylation status of SEQ ID NO: 9
attcctatccaacccacatccaaaa

SEQ ID NO: 2253 - DNA, 23 bp, Artificial Sequence
  bisulfite treated nucleic acid for analysis of methylation status of SEQ ID NO: 9
accttcttaaacattcctatcca

SEQ ID NO: 2254 - DNA, 26 bp, Artificial Sequence
  bisulfite treated nucleic acid for analysis of methylation status of SEQ ID NO: 9
cattcctatccaacccacatccaaaa

SEQ ID NO: 2255 - DNA, 26 bp, Artificial Sequence
  bisulfite treated nucleic acid for analysis of methylation status of SEQ ID NO: 9
tccaacccacatccaaaaaatactca

SEQ ID NO: 2256 - DNA, 26 bp, Artificial Sequence
  bisulfite treated nucleic acid for analysis of methylation status of SEQ ID NO: 9
attcctatccaacccacatccaaaaa

SEQ ID NO: 2257 - DNA, 22 bp, Artificial Sequence
  nucleic acid for analysis of methylation status of SEQ ID NO: 46
cctattcatcctcaacctaacc

SEQ ID NO: 2258 - DNA, 21 bp, Artificial Sequence
  bisulfite treated nucleic acid for analysis of methylation status of SEQ ID NO: 46
ttggagaaggtgttgtattgg

SEQ ID NO: 2259 - DNA, 28 bp, Artificial Sequence
  bisulfite treated nucleic acid for analysis of methylation status of SEQ ID NO: 46
cttcctactacgacaataacccttcgaa

SEQ ID NO: 2260 - DNA, 23 bp, Artificial Sequence
  bisulfite treated nucleic acid for analysis of methylation status of SEQ ID NO: 46
acctaaccatcaccaacaaactc

SEQ ID NO: 2261 - DNA, 22 bp, Artificial Sequence
  bisulfite treated nucleic acid for analysis of methylation status of SEQ ID NO: 46
gttggagaaggtgttgtattgg

SEQ ID NO: 2262 - DNA, 22 bp, Artificial Sequence
  bisulfite treated nucleic acid for analysis of methylation status of SEQ ID NO: 46
ggttggagaaggtgttgtattg

SEQ ID NO: 2263 - DNA, 20 bp, Artificial Sequence
  bisulfite treated nucleic acid for analysis of methylation status of SEQ ID NO: 46
tggagaaggtgttgtattgg

SEQ ID NO: 2264 - DNA, 23 bp, Artificial Sequence
  bisulfite treated nucleic acid for analysis of methylation status of SEQ ID NO: 46
ctattcatcctcaacctaaccat

SEQ ID NO: 2265 - DNA, 22 bp, Artificial Sequence
  bisulfite treated nucleic acid for analysis of methylation status of SEQ ID NO: 46
tattcatcctcaacctaaccat

SEQ ID NO: 2266 - DNA, 21 bp, Artificial Sequence
  bisulfite treated nucleic acid for analysis of methylation status of SEQ ID NO: 46
attcatcctcaacctaaccat

SEQ ID NO: 2267 - DNA, 23 bp, Artificial Sequence
  bisulfite treated nucleic acid for analysis of methylation status of SEQ ID NO: 46
acctattcatcctcaacctaacc

SEQ ID NO: 2268 - DNA, 24 bp, Artificial Sequence
  bisulfite treated nucleic acid for analysis of methylation status of SEQ ID NO: 46
aaccatcaccaacaaactcttcac

SEQ ID NO: 2269 - DNA, 24 bp, Artificial Sequence
  bisulfite treated nucleic acid for analysis of methylation status of SEQ ID NO: 46
cctattcatcctcaacctaaccat

SEQ ID NO: 2270 - DNA, 24 bp, Artificial Sequence
  bisulfite treated nucleic acid for analysis of methylation status of SEQ ID NO: 46
taaccatcaccaacaaactcttca

SEQ ID NO: 2271 - DNA, 24 bp, Artificial Sequence
  bisulfite treated nucleic acid for analysis of methylation status of SEQ ID NO: 46
cctaaccatcaccaacaaactctt

SEQ ID NO: 2272 - DNA, 24 bp, Artificial Sequence
  bisulfite treated nucleic acid for analysis of methylation status of SEQ ID NO: 46
aacctaaccatcaccaacaaactc

SEQ ID NO: 2273 - DNA, 24 bp, Artificial Sequence
  bisulfite treated nucleic acid for analysis of methylation status of SEQ ID NO: 46
acctaaccatcaccaacaaactct

SEQ ID NO: 2274 - DNA, 24 bp, Artificial Sequence
  bisulfite treated nucleic acid for analysis of methylation status of SEQ ID NO: 46
ctcaacctaaccatcaccaacaaa

SEQ ID NO: 2275 - DNA, 25 bp, Artificial Sequence
  bisulfite treated nucleic acid for analysis of methylation status of SEQ ID NO: 46
ctcaacctaaccatcaccaacaaac

SEQ ID NO: 2276 - DNA, 25 bp, Artificial Sequence
  bisulfite treated nucleic acid for analysis of methylation status of SEQ ID NO: 46
tcaacctaaccatcaccaacaaact

SEQ ID NO: 2277 - DNA, 25 bp, Artificial Sequence
  bisulfite treated nucleic acid for analysis of methylation status of SEQ ID NO: 46
acctaaccatcaccaacaaactctt

SEQ ID NO: 2278 - DNA, 25 bp, Artificial Sequence
  bisulfite treated nucleic acid for analysis of methylation status of SEQ ID NO: 46
aacctaaccatcaccaacaaactct

SEQ ID NO: 2279 - DNA, 25 bp, Artificial Sequence
  bisulfite treated nucleic acid for analysis of methylation status of SEQ ID NO: 46
cctaaccatcaccaacaaactcttc

SEQ ID NO: 2280 - DNA, 25 bp, Artificial Sequence
  bisulfite treated nucleic acid for analysis of methylation status of SEQ ID NO: 46
taaccatcaccaacaaactcttcac

SEQ ID NO: 2281 - DNA, 25 bp, Artificial Sequence
  bisulfite treated nucleic acid for analysis of methylation status of SEQ ID NO: 46
ctaaccatcaccaacaaactcttca

SEQ ID NO: 2282 - DNA, 25 bp, Artificial Sequence
  bisulfite treated nucleic acid for analysis of methylation status of SEQ ID NO: 46
caacctaaccatcaccaacaaactc

SEQ ID NO: 2283 - DNA, 26 bp, Artificial Sequence
  bisulfite treated nucleic acid for analysis of methylation status of SEQ ID NO: 46
acctaaccatcaccaacaaactcttc

SEQ ID NO: 2284 - DNA, 26 bp, Artificial Sequence
  bisulfite treated nucleic acid for analysis of methylation status of SEQ ID NO: 46
ctaaccatcaccaacaaactcttcac

SEQ ID NO: 2285 - DNA, 26 bp, Artificial Sequence
  bisulfite treated nucleic acid for analysis of methylation status of SEQ ID NO: 46
cctaaccatcaccaacaaactcttca

SEQ ID NO: 2286 - DNA, 26 bp, Artificial Sequence
  bisulfite treated nucleic acid for analysis of methylation status of SEQ ID NO: 46
aacctaaccatcaccaacaaactctt

SEQ ID NO: 2287 - DNA, 26 bp, Artificial Sequence
  bisulfite treated nucleic acid for analysis of methylation status of SEQ ID NO: 46
ctcaacctaaccatcaccaacaaact

SEQ ID NO: 2288 - DNA, 26 bp, Artificial Sequence
  bisulfite treated nucleic acid for analysis of methylation status of SEQ ID NO: 46
tcaacctaaccatcaccaacaaactc

SEQ ID NO: 2289 - DNA, 26 bp, Artificial Sequence
  bisulfite treated nucleic acid for analysis of methylation status of SEQ ID NO: 46
caacctaaccatcaccaacaaactct

SEQ ID NO: 2290 - DNA, 27 bp, Artificial Sequence
  bisulfite treated nucleic acid for analysis of methylation status of SEQ ID NO: 46
cctaaccatcaccaacaaactcttcac

SEQ ID NO: 2291 - DNA, 27 bp, Artificial Sequence
  bisulfite treated nucleic acid for analysis of methylation status of SEQ ID NO: 46
acctaaccatcaccaacaaactcttca

SEQ ID NO: 2292 - DNA, 27 bp, Artificial Sequence
  bisulfite treated nucleic acid for analysis of methylation status of SEQ ID NO: 46
caacctaaccatcaccaacaaactctt

SEQ ID NO: 2293 - DNA, 27 bp, Artificial Sequence
  bisulfite treated nucleic acid for analysis of methylation status of SEQ ID NO: 46
tcaacctaaccatcaccaacaaactct

SEQ ID NO: 2294 - DNA, 27 bp, Artificial Sequence
  bisulfite treated nucleic acid for analysis of methylation status of SEQ ID NO: 46
aacctaaccatcaccaacaaactcttc

SEQ ID NO: 2295 - DNA, 28 bp, Artificial Sequence
  bisulfite treated nucleic acid for analysis of methylation status of SEQ ID NO: 46
tcaacctaaccatcaccaacaaactctt

SEQ ID NO: 2296 - DNA, 28 bp, Artificial Sequence
  bisulfite treated nucleic acid for analysis of methylation status of SEQ ID NO: 46
caacctaaccatcaccaacaaactcttc

SEQ ID NO: 2297 - DNA, 28 bp, Artificial Sequence
  bisulfite treated nucleic acid for analysis of methylation status of SEQ ID NO: 46
aacctaaccatcaccaacaaactcttca

SEQ ID NO: 2298 - DNA, 27 bp, Artificial Sequence
  bisulfite treated nucleic acid for analysis of methylation status of SEQ ID NO: 46
aaccatcaccaacaaactcttcacact

SEQ ID NO: 2299 - DNA, 28 bp, Artificial Sequence
  bisulfite treated nucleic acid for analysis of methylation status of SEQ ID NO: 46
taaccatcaccaacaaactcttcacact

SEQ ID NO: 2300 - DNA, 28 bp, Artificial Sequence
  bisulfite treated nucleic acid for analysis of methylation status of SEQ ID NO: 46
aaccatcaccaacaaactcttcacacta

SEQ ID NO: 2301 - DNA, 29 bp, Artificial Sequence
  bisulfite treated nucleic acid for analysis of methylation status of SEQ ID NO: 46
taaccatcaccaacaaactcttcacacta

SEQ ID NO: 2302 - DNA, 22 bp, Artificial Sequence
  bisulfite treated nucleic acid for analysis of methylation status of SEQ ID NO: 13
cctttctctcttcccactatcc

SEQ ID NO: 2303 - DNA, 22 bp, Artificial Sequence
  bisulfite treated nucleic acid for analysis of methylation status of SEQ ID NO: 13
agttttgggagttggaggtaat

SEQ ID NO: 2304 - DNA, 30 bp, Artificial Sequence
  bisulfite treated nucleic acid for analysis of methylation status of SEQ ID NO: 13
ccctactaaacaaaatcccgaaacgaaatt

SEQ ID NO: 2305 - DNA, 24 bp, Artificial Sequence
  bisulfite treated nucleic acid for analysis of methylation status of SEQ ID NO: 13
ctatcccatccaccaaacctcaac

SEQ ID NO: 2306 - DNA, 22 bp, Artificial Sequence
  bisulfite treated nucleic acid for analysis of methylation status of SEQ ID NO: 13
taagttttgggagttggaggta

SEQ ID NO: 2307 - DNA, 21 bp, Artificial Sequence
  bisulfite treated nucleic acid for analysis of methylation status of SEQ ID NO: 13
gttttgggagttggaggtaat

SEQ ID NO: 2308 - DNA, 22 bp, Artificial Sequence
  bisulfite treated nucleic acid for analysis of methylation status of SEQ ID NO: 13
gtaagttttgggagttggaggt

SEQ ID NO: 2309 - DNA, 23 bp, Artificial Sequence
  bisulfite treated nucleic acid for analysis of methylation status of SEQ ID NO: 13
aagttttgggagttggaggtaat

SEQ ID NO: 2310 - DNA, 20 bp, Artificial Sequence
  bisulfite treated nucleic acid for analysis of methylation status of SEQ ID NO: 13
ttttgggagttggaggtaat

SEQ ID NO: 2311 - DNA, 23 bp, Artificial Sequence
  bisulfite treated nucleic acid for analysis of methylation status of SEQ ID NO: 13
agtaagttttgggagttggaggt

SEQ ID NO: 2312 - DNA, 22 bp, Artificial Sequence
  bisulfite treated nucleic acid for analysis of methylation status of SEQ ID NO: 13
tagtaagttttgggagttggag

SEQ ID NO: 2313 - DNA, 23 bp, Artificial Sequence
  bisulfite treated nucleic acid for analysis of methylation status of SEQ ID NO: 13
gtagtaagttttgggagttggag

SEQ ID NO: 2314 - DNA, 23 bp, Artificial Sequence
  bisulfite treated nucleic acid for analysis of methylation status of SEQ ID NO: 13
acctttctctcttcccactatcc

SEQ ID NO: 2315 - DNA, 25 bp, Artificial Sequence
  bisulfite treated nucleic acid for analysis of methylation status of SEQ ID NO: 13
actatcccatccaccaaacctcaac

SEQ ID NO: 2316 - DNA, 23 bp, Artificial Sequence
  bisulfite treated nucleic acid for analysis of methylation status of SEQ ID NO: 13
cacctttctctcttcccactatc

SEQ ID NO: 2317 - DNA, 24 bp, Artificial Sequence
  bisulfite treated nucleic acid for analysis of methylation status of SEQ ID NO: 13
acacctttctctcttcccactatc

SEQ ID NO: 2318 - DNA, 26 bp, Artificial Sequence
  bisulfite treated nucleic acid for analysis of methylation status of SEQ ID NO: 13
cactatcccatccaccaaacctcaac

SEQ ID NO: 2319 - DNA, 22 bp, Artificial Sequence
  bisulfite treated nucleic acid for analysis of methylation status of SEQ ID NO: 13
cacctttctctcttcccactat

SEQ ID NO: 2320 - DNA, 23 bp, Artificial Sequence
  bisulfite treated nucleic acid for analysis of methylation status of SEQ ID NO: 13
acacctttctctcttcccactat

SEQ ID NO: 2321 - DNA, 24 bp, Artificial Sequence
  bisulfite treated nucleic acid for analysis of methylation status of SEQ ID NO: 13
aacacctttctctcttcccactat

SEQ ID NO: 2322 - DNA, 25 bp, Artificial Sequence
  bisulfite treated nucleic acid for analysis of methylation status of SEQ ID NO: 13
taacacctttctctcttcccactat

SEQ ID NO: 2323 - DNA, 26 bp, Artificial Sequence
  bisulfite treated nucleic acid for analysis of methylation status of SEQ ID NO: 13
ttaacacctttctctcttcccactat

SEQ ID NO: 2324 - DNA, 18 bp, Artificial Sequence
  bisulfite treated nucleic acid for analysis of methylation status of SEQ ID NO: 18
ttttggggtgtttagggg

SEQ ID NO: 2325 - DNA, 28 bp, Artificial Sequence
  bisulfite treated nucleic acid for analysis of methylation status of SEQ ID NO: 18
ttaactctcaatcacctactaataacaa

SEQ ID NO: 2326 - DNA, 21 bp, Artificial Sequence
  bisulfite treated nucleic acid for analysis of methylation status of SEQ ID NO: 18
ggtcggtaagtcgcggttggg

SEQ ID NO: 2327 - DNA, 21 bp, Artificial Sequence
  bisulfite treated nucleic acid for analysis of methylation status of SEQ ID NO: 18
taggggagtgtgtgggttttg

SEQ ID NO: 2328 - DNA, 27 bp, Artificial Sequence
  bisulfite treated nucleic acid for analysis of methylation status of SEQ ID NO: 18
taactctcaatcacctactaataacaa

SEQ ID NO: 2329 - DNA, 30 bp, Artificial Sequence
  bisulfite treated nucleic acid for analysis of methylation status of SEQ ID NO: 18
aattaactctcaatcacctactaataacaa

SEQ ID NO: 2330 - DNA, 29 bp, Artificial Sequence
  bisulfite treated nucleic acid for analysis of methylation status of SEQ ID NO: 18
attaactctcaatcacctactaataacaa

SEQ ID NO: 2331 - DNA, 18 bp, Artificial Sequence
  bisulfite treated nucleic acid for analysis of methylation status of SEQ ID NO: 18
ttggggtgtttaggggag

SEQ ID NO: 2332 - DNA, 17 bp, Artificial Sequence
  bisulfite treated nucleic acid for analysis of methylation status of SEQ ID NO: 18
tggggtgtttaggggag

SEQ ID NO: 2333 - DNA, 21 bp, Artificial Sequence
  bisulfite treated nucleic acid for analysis of methylation status of SEQ ID NO: 18
tgtttaggggagtgtgtgggt

SEQ ID NO: 2334 - DNA, 21 bp, Artificial Sequence
  bisulfite treated nucleic acid for analysis of methylation status of SEQ ID NO: 18
gtttaggggagtgtgtgggtt

SEQ ID NO: 2335 - DNA, 22 bp, Artificial Sequence
  bisulfite treated nucleic acid for analysis of methylation status of SEQ ID NO: 18
ttaggggagtgtgtgggttttg

SEQ ID NO: 2336 - DNA, 24 bp, Artificial Sequence
  bisulfite treated nucleic acid for analysis of methylation status of SEQ ID NO: 20
ccctactattataccccaccataa

SEQ ID NO: 2337 - DNA, 26 bp, Artificial Sequence
  bisulfite treated nucleic acid for analysis of methylation status of SEQ ID NO: 20
aaatagggaggatattgtaagtttag

SEQ ID NO: 2338 - DNA, 21 bp, Artificial Sequence
  bisulfite treated nucleic acid for analysis of methylation status of SEQ ID NO: 20
tctcaacgccgcaactcccaa

SEQ ID NO: 2339 - DNA, 27 bp, Artificial Sequence
  bisulfite treated nucleic acid for analysis of methylation status of SEQ ID NO: 20
ccataattcacaccctttctcaacacc

SEQ ID NO: 2340 - DNA, 27 bp, Artificial Sequence
  bisulfite treated nucleic acid for analysis of methylation status of SEQ ID NO: 20
taaatagggaggatattgtaagtttag

SEQ ID NO: 2341 - DNA, 22 bp, Artificial Sequence
  bisulfite treated nucleic acid for analysis of methylation status of SEQ ID NO: 20
tggtattttatgtttttgggat

SEQ ID NO: 2342 - DNA, 24 bp, Artificial Sequence
  bisulfite treated nucleic acid for analysis of methylation status of SEQ ID NO: 20
aatggtattttatgtttttgggat

SEQ ID NO: 2343 - DNA, 23 bp, Artificial Sequence
  bisulfite treated nucleic acid for analysis of methylation status of SEQ ID NO: 20
atggtattttatgtttttgggat

SEQ ID NO: 2344 - DNA, 25 bp, Artificial Sequence
  bisulfite treated nucleic acid for analysis of methylation status of SEQ ID NO: 20
aaatggtattttatgtttttgggat

SEQ ID NO: 2345 - DNA, 26 bp, Artificial Sequence
  bisulfite treated nucleic acid for analysis of methylation status of SEQ ID NO: 20
gaaatggtattttatgtttttgggat

SEQ ID NO: 2346 - DNA, 28 bp, Artificial Sequence
  bisulfite treated nucleic acid for analysis of methylation status of SEQ ID NO: 20
cactcttatctcaaaacaacaaactaat

SEQ ID NO: 2347 - DNA, 22 bp, Artificial Sequence
  bisulfite treated nucleic acid for analysis of methylation status of SEQ ID NO: 20
tgtaaggagtatttgggtttgg

SEQ ID NO: 2348 - DNA, 28 bp, Artificial Sequence
  nucleic acid for analysis of methylation status of SEQ ID NO: 20
accaaacattttacgaaaaaacccgacc

SEQ ID NO: 2349 - DNA, 29 bp, Artificial Sequence
  bisulfite treated nucleic acid for analysis of methylation status of SEQ ID NO: 20
actaatccataaaccaaaacttttcattt

SEQ ID NO: 2350 - DNA, 23 bp, Artificial Sequence
  bisulfite treated nucleic acid for analysis of methylation status of SEQ ID NO: 20
aaggattgtaaggagtatttggg

SEQ ID NO: 2351 - DNA, 24 bp, Artificial Sequence
  bisulfite treated nucleic acid for analysis of methylation status of SEQ ID NO: 20
acgaaaaaacccgacctcatcccc

SEQ ID NO: 2352 - DNA, 23 bp, Artificial Sequence
  bisulfite treated nucleic acid for analysis of methylation status of SEQ ID NO: 20
ggattgtaaggagtatttgggtt

SEQ ID NO: 2353 - DNA, 22 bp, Artificial Sequence
  bisulfite treated nucleic acid for analysis of methylation status of SEQ ID NO: 20
aggattgtaaggagtatttggg

SEQ ID NO: 2354 - DNA, 24 bp, Artificial Sequence
  bisulfite treated nucleic acid for analysis of methylation status of SEQ ID NO: 20
aaaaggattgtaaggagtatttgg

SEQ ID NO: 2355 - DNA, 24 bp, Artificial Sequence
  bisulfite treated nucleic acid for analysis of methylation status of SEQ ID NO: 20
aaaggattgtaaggagtatttggg

SEQ ID NO: 2356 - DNA, 25 bp, Artificial Sequence
  bisulfite treated nucleic acid for analysis of methylation status of SEQ ID NO: 20
aaaaaggattgtaaggagtatttgg

SEQ ID NO: 2357 - DNA, 23 bp, Artificial Sequence
  bisulfite treated nucleic acid for analysis of methylation status of SEQ ID NO: 20
gattgtaaggagtatttgggttt

SEQ ID NO: 2358 - DNA, 24 bp, Artificial Sequence
  bisulfite treated nucleic acid for analysis of methylation status of SEQ ID NO: 20
attgtaaggagtatttgggtttgg

SEQ ID NO: 2359 - DNA, 21 bp, Artificial Sequence
  bisulfite treated nucleic acid for analysis of methylation status of SEQ ID NO: 20
gtaaggagtatttgggtttgg

SEQ ID NO: 2360 - DNA, 26 bp, Artificial Sequence
  bisulfite treated nucleic acid for analysis of methylation status of SEQ ID NO: 20
taaaaaggattgtaaggagtatttgg

SEQ ID NO: 2361 - DNA, 27 bp, Artificial Sequence
  bisulfite treated nucleic acid for analysis of methylation status of SEQ ID NO: 20
aaggtaaaaaggattgtaaggagtatt

SEQ ID NO: 2362 - DNA, 25 bp, Artificial Sequence
  bisulfite treated nucleic acid for analysis of methylation status of SEQ ID NO: 20
ggtaaaaaggattgtaaggagtatt

SEQ ID NO: 2363 - DNA, 26 bp, Artificial Sequence
  bisulfite treated nucleic acid for analysis of methylation status of SEQ ID NO: 20
aggtaaaaaggattgtaaggagtatt

SEQ ID NO: 2364 - DNA, 27 bp, Artificial Sequence
  bisulfite treated nucleic acid for analysis of methylation status of SEQ ID NO: 20
gtaaaaaggattgtaaggagtatttgg

SEQ ID NO: 2365 - DNA, 18 bp, Artificial Sequence
  bisulfite treated nucleic acid for analysis of methylation status of SEQ ID NO: 20
gagtatttgggtttgggg

SEQ ID NO: 2366 - DNA, 27 bp, Artificial Sequence
  bisulfite treated nucleic acid for analysis of methylation status of SEQ ID NO: 20
actcttatctcaaaacaacaaactaat

SEQ ID NO: 2367 - DNA, 29 bp, Artificial Sequence
  bisulfite treated nucleic acid for analysis of methylation status of SEQ ID NO: 20
aactaatccataaaccaaaacttttcatt

SEQ ID NO: 2368 - DNA, 27 bp, Artificial Sequence
  bisulfite treated nucleic acid for analysis of methylation status of SEQ ID NO: 20
ccactcttatctcaaaacaacaaacta

SEQ ID NO: 2369 - DNA, 26 bp, Artificial Sequence
  bisulfite treated nucleic acid for analysis of methylation status of SEQ ID NO: 20
ccgtaaaccgaaacttttcgtttccc

SEQ ID NO: 2370 - DNA, 30 bp, Artificial Sequence
  bisulfite treated nucleic acid for analysis of methylation status of SEQ ID NO: 20
aaactaatccataaaccaaaacttttcatt

SEQ ID NO: 2371 - DNA, 29 bp, Artificial Sequence
  bisulfite treated nucleic acid for analysis of methylation status of SEQ ID NO: 20
taccactcttatctcaaaacaacaaacta

SEQ ID NO: 2372 - DNA, 30 bp, Artificial Sequence
  bisulfite treated nucleic acid for analysis of methylation status of SEQ ID NO: 20
actaatccataaaccaaaacttttcatttc

SEQ ID NO: 2373 - DNA, 30 bp, Artificial Sequence
  bisulfite treated nucleic acid for analysis of methylation status of SEQ ID NO: 20
aactaatccataaaccaaaacttttcattt

SEQ ID NO: 2374 - DNA, 31 bp, Artificial Sequence
  bisulfite treated nucleic acid for analysis of methylation status of SEQ ID NO: 20
caaactaatccataaaccaaaacttttcatt

SEQ ID NO: 2375 - DNA, 31 bp, Artificial Sequence
  bisulfite treated nucleic acid for analysis of methylation status of SEQ ID NO: 20
actaatccataaaccaaaacttttcatttcc

SEQ ID NO: 2376 - DNA, 31 bp, Artificial Sequence
  bisulfite treated nucleic acid for analysis of methylation status of SEQ ID NO: 20
aactaatccataaaccaaaacttttcatttc

SEQ ID NO: 2377 - DNA, 31 bp, Artificial Sequence
  bisulfite treated nucleic acid for analysis of methylation status of SEQ ID NO: 20
aaactaatccataaaccaaaacttttcattt

SEQ ID NO: 2378 - DNA, 32 bp, Artificial Sequence
  bisulfite treated nucleic acid for analysis of methylation status of SEQ ID NO: 20
aactaatccataaaccaaaacttttcatttcc

SEQ ID NO: 2379 - DNA, 32 bp, Artificial Sequence
  bisulfite treated nucleic acid for analysis of methylation status of SEQ ID NO: 20
caaactaatccataaaccaaaacttttcattt

SEQ ID NO: 2380 - DNA, 32 bp, Artificial Sequence
  bisulfite treated nucleic acid for analysis of methylation status of SEQ ID NO: 20
aaactaatccataaaccaaaacttttcatttc

SEQ ID NO: 2381 - DNA, 25 bp, Artificial Sequence
  bisulfite treated nucleic acid for analysis of methylation status of SEQ ID NO: 20
ccactcttatctcaaaacaacaaac

SEQ ID NO: 2382 - DNA, 32 bp, Artificial Sequence
  bisulfite treated nucleic acid for analysis of methylation status of SEQ ID NO: 20
acaaactaatccataaaccaaaacttttcatt

SEQ ID NO: 2383 - DNA, 26 bp, Artificial Sequence
  bisulfite treated nucleic acid for analysis of methylation status of SEQ ID NO: 20
accactcttatctcaaaacaacaaac

SEQ ID NO: 2384 - DNA, 27 bp, Artificial Sequence
  bisulfite treated nucleic acid for analysis of methylation status of SEQ ID NO: 20
taccactcttatctcaaaacaacaaac

SEQ ID NO: 2385 - DNA, 28 bp, Artificial Sequence
  bisulfite treated nucleic acid for analysis of methylation status of SEQ ID NO: 20
ctaccactcttatctcaaaacaacaaac

SEQ ID NO: 2386 - DNA, 32 bp, Artificial Sequence
  bisulfite treated nucleic acid for analysis of methylation status of SEQ ID NO: 20
actaatccataaaccaaaacttttcatttccc

SEQ ID NO: 2387 - DNA, 33 bp, Artificial Sequence
  bisulfite treated nucleic acid for analysis of methylation status of SEQ ID NO: 20
caaactaatccataaaccaaaacttttcatttc

SEQ ID NO: 2388 - DNA, 24 bp, Artificial Sequence
  bisulfite treated nucleic acid for analysis of methylation status of SEQ ID NO: 20
ccactcttatctcaaaacaacaaa

SEQ ID NO: 2389 - DNA, 33 bp, Artificial Sequence
  bisulfite treated nucleic acid for analysis of methylation status of SEQ ID NO: 20
aacaaactaatccataaaccaaaacttttcatt

SEQ ID NO: 2390 - DNA, 25 bp, Artificial Sequence
  bisulfite treated nucleic acid for analysis of methylation status of SEQ ID NO: 20
accactcttatctcaaaacaacaaa

SEQ ID NO: 2391 - DNA, 26 bp, Artificial Sequence
  bisulfite treated nucleic acid for analysis of methylation status of SEQ ID NO: 20
taccactcttatctcaaaacaacaaa

SEQ ID NO: 2392 - DNA, 27 bp, Artificial Sequence
  bisulfite treated nucleic acid for analysis of methylation status of SEQ ID NO: 20
ctaccactcttatctcaaaacaacaaa

SEQ ID NO: 2393 - DNA, 33 bp, Artificial Sequence
  bisulfite treated nucleic acid for analysis of methylation status of SEQ ID NO: 20
aactaatccataaaccaaaacttttcatttccc

SEQ ID NO: 2394 - DNA, 33 bp, Artificial Sequence
  bisulfite treated nucleic acid for analysis of methylation status of SEQ ID NO: 20
aaactaatccataaaccaaaacttttcatttcc

SEQ ID NO: 2395 - DNA, 33 bp, Artificial Sequence
  bisulfite treated nucleic acid for analysis of methylation status of SEQ ID NO: 20
acaaactaatccataaaccaaaacttttcattt

SEQ ID NO: 2396 - DNA, 34 bp, Artificial Sequence
  bisulfite treated nucleic acid for analysis of methylation status of SEQ ID NO: 20
aacaaactaatccataaaccaaaacttttcattt

SEQ ID NO: 2397 - DNA, 34 bp, Artificial Sequence
  bisulfite treated nucleic acid for analysis of methylation status of SEQ ID NO: 20
acaaactaatccataaaccaaaacttttcatttc

SEQ ID NO: 2398 - DNA, 34 bp, Artificial Sequence
  bisulfite treated nucleic acid for analysis of methylation status of SEQ ID NO: 20
caacaaactaatccataaaccaaaacttttcatt

SEQ ID NO: 2399 - DNA, 24 bp, Artificial Sequence
  bisulfite treated nucleic acid for analysis of methylation status of SEQ ID NO: 20
accactcttatctcaaaacaacaa

SEQ ID NO: 2400 - DNA, 25 bp, Artificial Sequence
  bisulfite treated nucleic acid for analysis of methylation status of SEQ ID NO: 20
taccactcttatctcaaaacaacaa

SEQ ID NO: 2401 - DNA, 26 bp, Artificial Sequence
  bisulfite treated nucleic acid for analysis of methylation status of SEQ ID NO: 20
ctaccactcttatctcaaaacaacaa

SEQ ID NO: 2402 - DNA, 34 bp, Artificial Sequence
  bisulfite treated nucleic acid for analysis of methylation status of SEQ ID NO: 20
caaactaatccataaaccaaaacttttcatttcc

SEQ ID NO: 2403 - DNA, 35 bp, Artificial Sequence
  bisulfite treated nucleic acid for analysis of methylation status of SEQ ID NO: 20
aacaaactaatccataaaccaaaacttttcatttc

SEQ ID NO: 2404 - DNA, 35 bp, Artificial Sequence
  bisulfite treated nucleic acid for analysis of methylation status of SEQ ID NO: 20
caacaaactaatccataaaccaaaacttttcattt

SEQ ID NO: 2405 - DNA, 24 bp, Artificial Sequence
  bisulfite treated nucleic acid for analysis of methylation status of SEQ ID NO: 48
ggtaaggtggagttgtgaatttag

SEQ ID NO: 2406 - DNA, 22 bp, Artificial Sequence
  bisulfite treated nucleic acid for analysis of methylation status of SEQ ID NO: 48
aaaaccaaatcattctacccaa

SEQ ID NO: 2407 - DNA, 25 bp, Artificial Sequence
  bisulfite treated nucleic acid for analysis of methylation status of SEQ ID NO: 48
gtgaatttagcgtttcggggagagt

SEQ ID NO: 2408 - DNA, 24 bp, Artificial Sequence
  bisulfite treated nucleic acid for analysis of methylation status of SEQ ID NO: 48
atttagtgttttggggagagttgg

SEQ ID NO: 2409 - DNA, 22 bp, Artificial Sequence
  bisulfite treated nucleic acid for analysis of methylation status of SEQ ID NO: 48
aaaccaaatcattctacccaac

SEQ ID NO: 2410 - DNA, 23 bp, Artificial Sequence
  bisulfite treated nucleic acid for analysis of methylation status of SEQ ID NO: 48
ccaaatcattctacccaactaca

SEQ ID NO: 2411 - DNA, 21 bp, Artificial Sequence
  bisulfite treated nucleic acid for analysis of methylation status of SEQ ID NO: 48
accccattttccaaataaaaa

SEQ ID NO: 2412 - DNA, 22 bp, Artificial Sequence
  bisulfite treated nucleic acid for analysis of methylation status of SEQ ID NO: 48
attctacccaactacaccccat

SEQ ID NO: 2413 - DNA, 22 bp, Artificial Sequence
  bisulfite treated nucleic acid for analysis of methylation status of SEQ ID NO: 48
aaccaaatcattctacccaact

SEQ ID NO: 2414 - DNA, 22 bp, Artificial Sequence
  bisulfite treated nucleic acid for analysis of methylation status of SEQ ID NO: 48
atcattctacccaactacaccc

SEQ ID NO: 2415 - DNA, 21 bp, Artificial Sequence
  bisulfite treated nucleic acid for analysis of methylation status of SEQ ID NO: 48
cattctacccaactacacccc

SEQ ID NO: 2416 - DNA, 21 bp, Artificial Sequence
  bisulfite treated nucleic acid for analysis of methylation status of SEQ ID NO: 48
ttctacccaactacaccccat

SEQ ID NO: 2417 - DNA, 23 bp, Artificial Sequence
  bisulfite treated nucleic acid for analysis of methylation status of SEQ ID NO: 48
aatcattctacccaactacaccc

SEQ ID NO: 2418 - DNA, 21 bp, Artificial Sequence
  bisulfite treated nucleic acid for analysis of methylation status of SEQ ID NO: 48
tctacccaactacaccccatc

SEQ ID NO: 2419 - DNA, 22 bp, Artificial Sequence
  bisulfite treated nucleic acid for analysis of methylation status of SEQ ID NO: 48
aaaccccattttccaaataaaa

SEQ ID NO: 2420 - DNA, 22 bp, Artificial Sequence
  bisulfite treated nucleic acid for analysis of methylation status of SEQ ID NO: 48
accaaatcattctacccaacta

SEQ ID NO: 2421 - DNA, 22 bp, Artificial Sequence
  bisulfite treated nucleic acid for analysis of methylation status of SEQ ID NO: 48
ccccattttccaaataaaaata

SEQ ID NO: 2422 - DNA, 21 bp, Artificial Sequence
  bisulfite treated nucleic acid for analysis of methylation status of SEQ ID NO: 48
tcattctacccaactacaccc

SEQ ID NO: 2423 - DNA, 22 bp, Artificial Sequence
  bisulfite treated nucleic acid for analysis of methylation status of SEQ ID NO: 48
aactacaatcttcccaaaaacc

SEQ ID NO: 2424 - DNA, 25 bp, Artificial Sequence
  bisulfite treated nucleic acid for analysis of methylation status of SEQ ID NO: 48
aaattacccaaaatcataaaacaaa

SEQ ID NO: 2425 - DNA, 21 bp, Artificial Sequence
  bisulfite treated nucleic acid for analysis of methylation status of SEQ ID NO: 48
aaccccattttccaaataaaa

SEQ ID NO: 2426 - DNA, 21 bp, Artificial Sequence
  bisulfite treated nucleic acid for analysis of methylation status of SEQ ID NO: 48
caaaccccattttccaaataa

SEQ ID NO: 2427 - DNA, 22 bp, Artificial Sequence
  bisulfite treated nucleic acid for analysis of methylation status of SEQ ID NO: 48
cttaaattccaaaccccatttt

SEQ ID NO: 2428 - DNA, 24 bp, Artificial Sequence
  bisulfite treated nucleic acid for analysis of methylation status of SEQ ID NO: 48
aattacccaaaatcataaaacaaa

SEQ ID NO: 2429 - DNA, 25 bp, Artificial Sequence
  bisulfite treated nucleic acid for analysis of methylation status of SEQ ID NO: 48
cccattttccaaataaaaatactaa

SEQ ID NO: 2430 - DNA, 20 bp, Artificial Sequence
  bisulfite treated nucleic acid for analysis of methylation status of SEQ ID NO: 48
ctacccaactacaccccatc

SEQ ID NO: 2431 - DNA, 23 bp, Artificial Sequence
  bisulfite treated nucleic acid for analysis of methylation status of SEQ ID NO: 48
aaatcattctacccaactacacc

SEQ ID NO: 2432 - DNA, 24 bp, Artificial Sequence
  bisulfite treated nucleic acid for analysis of methylation status of SEQ ID NO: 48
caaatcattctacccaactacacc

SEQ ID NO: 2433 - DNA, 20 bp, Artificial Sequence
  bisulfite treated nucleic acid for analysis of methylation status of SEQ ID NO: 48
tacccaactacaccccatcc

SEQ ID NO: 2434 - DNA, 22 bp, Artificial Sequence
  bisulfite treated nucleic acid for analysis of methylation status of SEQ ID NO: 48
ttaaattccaaaccccattttc

SEQ ID NO: 2435 - DNA, 21 bp, Artificial Sequence
  bisulfite treated nucleic acid for analysis of methylation status of SEQ ID NO: 48
taaattccaaaccccattttc

SEQ ID NO: 2436 - DNA, 24 bp, Artificial Sequence
  bisulfite treated nucleic acid for analysis of methylation status of SEQ ID NO: 48
attacccaaaatcataaaacaaat

SEQ ID NO: 2437 - DNA, 21 bp, Artificial Sequence
  bisulfite treated nucleic acid for analysis of methylation status of SEQ ID NO: 48
ccttaaattccaaaccccatt

SEQ ID NO: 2438 - DNA, 24 bp, Artificial Sequence
  bisulfite treated nucleic acid for analysis of methylation status of SEQ ID NO: 48
ttacccaaaatcataaaacaaatc

SEQ ID NO: 2439 - DNA, 23 bp, Artificial Sequence
  bisulfite treated nucleic acid for analysis of methylation status of SEQ ID NO: 48
tacccaaaatcataaaacaaatc

SEQ ID NO: 2440 - DNA, 19 bp, Artificial Sequence
  bisulfite treated nucleic acid for analysis of methylation status of SEQ ID NO: 48
acccaactacaccccatcc

SEQ ID NO: 2441 - DNA, 18 bp, Artificial Sequence
  bisulfite treated nucleic acid for analysis of methylation status of SEQ ID NO: 48
aactacaccccatcccca

SEQ ID NO: 2442 - DNA, 18 bp, Artificial Sequence
  bisulfite treated nucleic acid for analysis of methylation status of SEQ ID NO: 48
ctacaccccatccccaac

SEQ ID NO: 2443 - DNA, 18 bp, Artificial Sequence
  bisulfite treated nucleic acid for analysis of methylation status of SEQ ID NO: 48
caactacaccccatcccc

SEQ ID NO: 2444 - DNA, 18 bp, Artificial Sequence
  bisulfite treated nucleic acid for analysis of methylation status of SEQ ID NO: 48
cccaactacaccccatcc

SEQ ID NO: 2445 - DNA, 25 bp, Artificial Sequence
  bisulfite treated nucleic acid for analysis of methylation status of SEQ ID NO: 48
ccattttccaaataaaaatactaaa

SEQ ID NO: 2446 - DNA, 20 bp, Artificial Sequence
  bisulfite treated nucleic acid for analysis of methylation status of SEQ ID NO: 48
aaattccaaaccccattttc

SEQ ID NO: 2447 - DNA, 27 bp, Artificial Sequence
  bisulfite treated nucleic acid for analysis of methylation status of SEQ ID NO: 48
cattttccaaataaaaatactaaaacc

SEQ ID NO: 2448 - DNA, 20 bp, Artificial Sequence
  bisulfite treated nucleic acid for analysis of methylation status of SEQ ID NO: 48
catccccaacctttcaataa

SEQ ID NO: 2449 - DNA, 18 bp, Artificial Sequence
  bisulfite treated nucleic acid for analysis of methylation status of SEQ ID NO: 48
actacaccccatccccaa

SEQ ID NO: 2450 - DNA, 18 bp, Artificial Sequence
  bisulfite treated nucleic acid for analysis of methylation status of SEQ ID NO: 48
ccaactacaccccatccc

SEQ ID NO: 2451 - DNA, 25 bp, Artificial Sequence
  bisulfite treated nucleic acid for analysis of methylation status of SEQ ID NO: 48
taaattacccaaaatcataaaacaa

SEQ ID NO: 2452 - DNA, 25 bp, Artificial Sequence
  bisulfite treated nucleic acid for analysis of methylation status of SEQ ID NO: 48
tcaataaattacccaaaatcataaa

SEQ ID NO: 2453 - DNA, 20 bp, Artificial Sequence
  bisulfite treated nucleic acid for analysis of methylation status of SEQ ID NO: 48
ccatccccaacctttcaata

SEQ ID NO: 2454 - DNA, 26 bp, Artificial Sequence
  bisulfite treated nucleic acid for analysis of methylation status of SEQ ID NO: 48
ttttccaaataaaaatactaaaaccc

SEQ ID NO: 2455 - DNA, 20 bp, Artificial Sequence
  bisulfite treated nucleic acid for analysis of methylation status of SEQ ID NO: 48
aattccaaaccccattttcc

SEQ ID NO: 2456 - DNA, 25 bp, Artificial Sequence
  bisulfite treated nucleic acid for analysis of methylation status of SEQ ID NO: 48
tttccaaataaaaatactaaaaccc

SEQ ID NO: 2457 - DNA, 25 bp, Artificial Sequence
  bisulfite treated nucleic acid for analysis of methylation status of SEQ ID NO: 48
aatcaataaattacccaaaatcata

SEQ ID NO: 2458 - DNA, 25 bp, Artificial Sequence
  bisulfite treated nucleic acid for analysis of methylation status of SEQ ID NO: 48
atcaataaattacccaaaatcataa

SEQ ID NO: 2459 - DNA, 25 bp, Artificial Sequence
  bisulfite treated nucleic acid for analysis of methylation status of SEQ ID NO: 48
ataaattacccaaaatcataaaaca

SEQ ID NO: 2460 - DNA, 17 bp, Artificial Sequence
  bisulfite treated nucleic acid for analysis of methylation status of SEQ ID NO: 48
cccatccccaacctttc

SEQ ID NO: 2461 - DNA, 17 bp, Artificial Sequence
  bisulfite treated nucleic acid for analysis of methylation status of SEQ ID NO: 48
tacaccccatccccaac

SEQ ID NO: 2462 - DNA, 17 bp, Artificial Sequence
  bisulfite treated nucleic acid for analysis of methylation status of SEQ ID NO: 48
accccatccccaacctt

SEQ ID NO: 2463 - DNA, 18 bp, Artificial Sequence
  bisulfite treated nucleic acid for analysis of methylation status of SEQ ID NO: 48
ccaaaccccattttccaa

SEQ ID NO: 2464 - DNA, 25 bp, Artificial Sequence
  bisulfite treated nucleic acid for analysis of methylation status of SEQ ID NO: 48
atttagtgttttggggagagttgga

SEQ ID NO: 2465 - DNA, 25 bp, Artificial Sequence
  bisulfite treated nucleic acid for analysis of methylation status of SEQ ID NO: 48
aatttagtgttttggggagagttgg

SEQ ID NO: 2466 - DNA, 26 bp, Artificial Sequence
  bisulfite treated nucleic acid for analysis of methylation status of SEQ ID NO: 48
gaatttagtgttttggggagagttgg

SEQ ID NO: 2467 - DNA, 26 bp, Artificial Sequence
  bisulfite treated nucleic acid for analysis of methylation status of SEQ ID NO: 48
atttagtgttttggggagagttggaa

SEQ ID NO: 2468 - DNA, 26 bp, Artificial Sequence
  bisulfite treated nucleic acid for analysis of methylation status of SEQ ID NO: 48
aatttagtgttttggggagagttgga

SEQ ID NO: 2469 - DNA, 25 bp, Artificial Sequence
  bisulfite treated nucleic acid for analysis of methylation status of SEQ ID NO: 22
gatggtgtttatttgttttggtagt

SEQ ID NO: 2470 - DNA, 26 bp, Artificial Sequence
  bisulfite treated nucleic acid for analysis of methylation status of SEQ ID NO: 22
cctaatctctctaaacctcaattttc

SEQ ID NO: 2471 - DNA, 26 bp, Artificial Sequence
  bisulfite treated nucleic acid for analysis of methylation status of SEQ ID NO: 22
gatcgatattgcgaacgttgtgttgg

SEQ ID NO: 2472 - DNA, 27 bp, Artificial Sequence
  bisulfite treated nucleic acid for analysis of methylation status of SEQ ID NO: 22
ggtagtgatgattgatattgtgaatgt

SEQ ID NO: 2473 - DNA, 24 bp, Artificial Sequence
  bisulfite treated nucleic acid for analysis of methylation status of SEQ ID NO: 22
tctctaaacctcaattttctcttc

SEQ ID NO: 2474 - DNA, 25 bp, Artificial Sequence
  bisulfite treated nucleic acid for analysis of methylation status of SEQ ID NO: 22
ctctctaaacctcaattttctcttc

SEQ ID NO: 2475 - DNA, 27 bp, Artificial Sequence
  bisulfite treated nucleic acid for analysis of methylation status of SEQ ID NO: 22
aatctctctaaacctcaattttctctt

SEQ ID NO: 2476 - DNA, 27 bp, Artificial Sequence
  bisulfite treated nucleic acid for analysis of methylation status of SEQ ID NO: 22
acctaatctctctaaacctcaattttc

SEQ ID NO: 2477 - DNA, 26 bp, Artificial Sequence
  bisulfite treated nucleic acid for analysis of methylation status of SEQ ID NO: 22
atctctctaaacctcaattttctctt

SEQ ID NO: 2478 - DNA, 26 bp, Artificial Sequence
  bisulfite treated nucleic acid for analysis of methylation status of SEQ ID NO: 22
taatctctctaaacctcaattttctc

SEQ ID NO: 2479 - DNA, 27 bp, Artificial Sequence
  bisulfite treated nucleic acid for analysis of methylation status of SEQ ID NO: 22
ctaatctctctaaacctcaattttctc

SEQ ID NO: 2480 - DNA, 26 bp, Artificial Sequence
  bisulfite treated nucleic acid for analysis of methylation status of SEQ ID NO: 22
ctctaaacctcaattttctcttctat

SEQ ID NO: 2481 - DNA, 24 bp, Artificial Sequence
  bisulfite treated nucleic acid for analysis of methylation status of SEQ ID NO: 22
cacctaatctctctaaacctcaat

SEQ ID NO: 2482 - DNA, 28 bp, Artificial Sequence
  bisulfite treated nucleic acid for analysis of methylation status of SEQ ID NO: 22
ggtagtgatgattgatattgtgaatgtt

SEQ ID NO: 2483 - DNA, 25 bp, Artificial Sequence
  bisulfite treated nucleic acid for analysis of methylation status of SEQ ID NO: 22
agatggtgtttatttgttttggtag

SEQ ID NO: 2484 - DNA, 28 bp, Artificial Sequence
  bisulfite treated nucleic acid for analysis of methylation status of SEQ ID NO: 22
tggtagtgatgattgatattgtgaatgt

SEQ ID NO: 2485 - DNA, 26 bp, Artificial Sequence
  bisulfite treated nucleic acid for analysis of methylation status of SEQ ID NO: 22
tagatggtgtttatttgttttggtag

SEQ ID NO: 2486 - DNA, 22 bp, Artificial Sequence
  bisulfite treated nucleic acid for analysis of methylation status of SEQ ID NO: 19
tcccctatctctccacctttat

SEQ ID NO: 2487 - DNA, 23 bp, Artificial Sequence
  bisulfite treated nucleic acid for analysis of methylation status of SEQ ID NO: 19
aggaagtaagattttggtttgtg

SEQ ID NO: 2488 - DNA, 26 bp, Artificial Sequence
  bisulfite treated nucleic acid for analysis of methylation status of SEQ ID NO: 19
aaacgactcgtaaacatcgtccatca

SEQ ID NO: 2489 - DNA, 27 bp, Artificial Sequence
  bisulfite treated nucleic acid for analysis of methylation status of SEQ ID NO: 19
tccacctttatcaaaaaacaactcata

SEQ ID NO: 2490 - DNA, 22 bp, Artificial Sequence
  nucleic acid for analysis of methylation status of SEQ ID NO: 19
ggaagtaagattttggtttgtg

SEQ ID NO: 2491 - DNA, 24 bp, Artificial Sequence
  bisulfite treated nucleic acid for analysis of methylation status of SEQ ID NO: 19
taggaagtaagattttggtttgtg

SEQ ID NO: 2492 - DNA, 25 bp, Artificial Sequence
  bisulfite treated nucleic acid for analysis of methylation status of SEQ ID NO: 19
ataggaagtaagattttggtttgtg

SEQ ID NO: 2493 - DNA, 26 bp, Artificial Sequence
  bisulfite treated nucleic acid for analysis of methylation status of SEQ ID NO: 19
gaagtaagattttggtttgtgtagtt

SEQ ID NO: 2494 - DNA, 22 bp, Artificial Sequence
  bisulfite treated nucleic acid for analysis of methylation status of SEQ ID NO: 19
ctcccctatctctccaccttta

SEQ ID NO: 2495 - DNA, 21 bp, Artificial Sequence
  bisulfite treated nucleic acid for analysis of methylation status of SEQ ID NO: 19
actcccctatctctccacctt

SEQ ID NO: 2496 - DNA, 21 bp, Artificial Sequence
  bisulfite treated nucleic acid for analysis of methylation status of SEQ ID NO: 19
cccctatctctccacctttat

SEQ ID NO: 2497 - DNA, 28 bp, Artificial Sequence
  bisulfite treated nucleic acid for analysis of methylation status of SEQ ID NO: 19
tccacctttatcaaaaaacaactcataa

SEQ ID NO: 2498 - DNA, 28 bp, Artificial Sequence
  bisulfite treated nucleic acid for analysis of methylation status of SEQ ID NO: 19
ctccacctttatcaaaaaacaactcata

SEQ ID NO: 2499 - DNA, 28 bp, Artificial Sequence
  bisulfite treated nucleic acid for analysis of methylation status of SEQ ID NO: 19
ccacctttatcaaaaaacaactcataaa

SEQ ID NO: 2500 - DNA, 29 bp, Artificial Sequence
  bisulfite treated nucleic acid for analysis of methylation status of SEQ ID NO: 19
ccacctttatcaaaaaacaactcataaac

SEQ ID NO: 2501 - DNA, 29 bp, Artificial Sequence
  bisulfite treated nucleic acid for analysis of methylation status of SEQ ID NO: 19
tctccacctttatcaaaaaacaactcata

SEQ ID NO: 2502 - DNA, 21 bp, Artificial Sequence
  bisulfite treated nucleic acid for analysis of methylation status of SEQ ID NO: 19
tcccctatctctccaccttta

SEQ ID NO: 2503 - DNA, 20 bp, Artificial Sequence
  bisulfite treated nucleic acid for analysis of methylation status of SEQ ID NO: 19
cccctatctctccaccttta

SEQ ID NO: 2504 - DNA, 29 bp, Artificial Sequence
  bisulfite treated nucleic acid for analysis of methylation status of SEQ ID NO: 19
ctccacctttatcaaaaaacaactcataa

SEQ ID NO: 2505 - DNA, 29 bp, Artificial Sequence
  bisulfite treated nucleic acid for analysis of methylation status of SEQ ID NO: 19
acctttatcaaaaaacaactcataaacat

SEQ ID NO: 2506 - DNA, 22 bp, Artificial Sequence
  bisulfite treated nucleic acid for analysis of methylation status of SEQ ID NO: 19
actcccctatctctccaccttt

SEQ ID NO: 2507 - DNA, 29 bp, Artificial Sequence
  bisulfite treated nucleic acid for analysis of methylation status of SEQ ID NO: 19
tccacctttatcaaaaaacaactcataaa

SEQ ID NO: 2508 - DNA, 29 bp, Artificial Sequence
  bisulfite treated nucleic acid for analysis of methylation status of SEQ ID NO: 19
cctttatcaaaaaacaactcataaacatc

SEQ ID NO: 2509 - DNA, 23 bp, Artificial Sequence
  bisulfite treated nucleic acid for analysis of methylation status of SEQ ID NO: 19
actcccctatctctccaccttta

SEQ ID NO: 2510 - DNA, 29 bp, Artificial Sequence
  bisulfite treated nucleic acid for analysis of methylation status of SEQ ID NO: 19
cacctttatcaaaaaacaactcataaaca

SEQ ID NO: 2511 - DNA, 30 bp, Artificial Sequence
  bisulfite treated nucleic acid for analysis of methylation status of SEQ ID NO: 19
ccacctttatcaaaaaacaactcataaaca

SEQ ID NO: 2512 - DNA, 30 bp, Artificial Sequence
  bisulfite treated nucleic acid for analysis of methylation status of SEQ ID NO: 19
acctttatcaaaaaacaactcataaacatc

SEQ ID NO: 2513 - DNA, 30 bp, Artificial Sequence
  bisulfite treated nucleic acid for analysis of methylation status of SEQ ID NO: 19
tccacctttatcaaaaaacaactcataaac

SEQ ID NO: 2514 - DNA, 30 bp, Artificial Sequence
  nucleic acid for analysis of methylation status of SEQ ID NO: 19
tctccacctttatcaaaaaacaactcataa

SEQ ID NO: 2515 - DNA, 30 bp, Artificial Sequence
  bisulfite treated nucleic acid for analysis of methylation status of SEQ ID NO: 19
ctctccacctttatcaaaaaacaactcata

SEQ ID NO: 2516 - DNA, 21 bp, Artificial Sequence
  bisulfite treated nucleic acid for analysis of methylation status of SEQ ID NO: 19
ctcccctatctctccaccttt

SEQ ID NO: 2517 - DNA, 20 bp, Artificial Sequence
  bisulfite treated nucleic acid for analysis of methylation status of SEQ ID NO: 19
tcccctatctctccaccttt

SEQ ID NO: 2518 - DNA, 19 bp, Artificial Sequence
  bisulfite treated nucleic acid for analysis of methylation status of SEQ ID NO: 19
cccctatctctccaccttt

SEQ ID NO: 2519 - DNA, 30 bp, Artificial Sequence
  bisulfite treated nucleic acid for analysis of methylation status of SEQ ID NO: 19
cacctttatcaaaaaacaactcataaacat

SEQ ID NO: 2520 - DNA, 30 bp, Artificial Sequence
  bisulfite treated nucleic acid for analysis of methylation status of SEQ ID NO: 19
ctccacctttatcaaaaaacaactcataaa

SEQ ID NO: 2521 - DNA, 31 bp, Artificial Sequence
  bisulfite treated nucleic acid for analysis of methylation status of SEQ ID NO: 19
cacctttatcaaaaaacaactcataaacatc

SEQ ID NO: 2522 - DNA, 31 bp, Artificial Sequence
  bisulfite treated nucleic acid for analysis of methylation status of SEQ ID NO: 19
tctctccacctttatcaaaaaacaactcata

SEQ ID NO: 2523 - DNA, 20 bp, Artificial Sequence
  bisulfite treated nucleic acid for analysis of methylation status of SEQ ID NO: 19
ctcccctatctctccacctt

SEQ ID NO: 2524 - DNA, 19 bp, Artificial Sequence
  bisulfite treated nucleic acid for analysis of methylation status of SEQ ID NO: 19
tcccctatctctccacctt

SEQ ID NO: 2525 - DNA, 31 bp, Artificial Sequence
  bisulfite treated nucleic acid for analysis of methylation status of SEQ ID NO: 19
ctccacctttatcaaaaaacaactcataaac

SEQ ID NO: 2526 - DNA, 31 bp, Artificial Sequence
  bisulfite treated nucleic acid for analysis of methylation status of SEQ ID NO: 19
tctccacctttatcaaaaaacaactcataaa

SEQ ID NO: 2527 - DNA, 31 bp, Artificial Sequence
  bisulfite treated nucleic acid for analysis of methylation status of SEQ ID NO: 19
ctctccacctttatcaaaaaacaactcataa

SEQ ID NO: 2528 - DNA, 31 bp, Artificial Sequence
  bisulfite treated nucleic acid for analysis of methylation status of SEQ ID NO: 19
tccacctttatcaaaaaacaactcataaaca

SEQ ID NO: 2529 - DNA, 31 bp, Artificial Sequence
  bisulfite treated nucleic acid for analysis of methylation status of SEQ ID NO: 19
ccacctttatcaaaaaacaactcataaacat

SEQ ID NO: 2530 - DNA, 32 bp, Artificial Sequence
  bisulfite treated nucleic acid for analysis of methylation status of SEQ ID NO: 19
ctccacctttatcaaaaaacaactcataaaca

SEQ ID NO: 2531 - DNA, 32 bp, Artificial Sequence
  bisulfite treated nucleic acid for analysis of methylation status of SEQ ID NO: 19
tccacctttatcaaaaaacaactcataaacat

SEQ ID NO: 2532 - DNA, 32 bp, Artificial Sequence
  bisulfite treated nucleic acid for analysis of methylation status of SEQ ID NO: 19
ccacctttatcaaaaaacaactcataaacatc

SEQ ID NO: 2533 - DNA, 20 bp, Artificial Sequence
  bisulfite treated nucleic acid for analysis of methylation status of SEQ ID NO: 19
actcccctatctctccacct

SEQ ID NO: 2534 - DNA, 32 bp, Artificial Sequence
  bisulfite treated nucleic acid for analysis of methylation status of SEQ ID NO: 19
atctctccacctttatcaaaaaacaactcata

SEQ ID NO: 2535 - DNA, 32 bp, Artificial Sequence
  bisulfite treated nucleic acid for analysis of methylation status of SEQ ID NO: 19
tctccacctttatcaaaaaacaactcataaac

SEQ ID NO: 2536 - DNA, 32 bp, Artificial Sequence
  bisulfite treated nucleic acid for analysis of methylation status of SEQ ID NO: 19
ctctccacctttatcaaaaaacaactcataaa

SEQ ID NO: 2537 - DNA, 32 bp, Artificial Sequence
  bisulfite treated nucleic acid for analysis of methylation status of SEQ ID NO: 19
tctctccacctttatcaaaaaacaactcataa

SEQ ID NO: 2538 - DNA, 19 bp, Artificial Sequence
  bisulfite treated nucleic acid for analysis of methylation status of SEQ ID NO: 19
actcccctatctctccacc

SEQ ID NO: 2539 - DNA, 33 bp, Artificial Sequence
  bisulfite treated nucleic acid for analysis of methylation status of SEQ ID NO: 19
tatctctccacctttatcaaaaaacaactcata

SEQ ID NO: 2540 - DNA, 33 bp, Artificial Sequence
  bisulfite treated nucleic acid for analysis of methylation status of SEQ ID NO: 19
tctctccacctttatcaaaaaacaactcataaa

SEQ ID NO: 2541 - DNA, 33 bp, Artificial Sequence
  bisulfite treated nucleic acid for analysis of methylation status of SEQ ID NO: 19
atctctccacctttatcaaaaaacaactcataa

SEQ ID NO: 2542 - DNA, 33 bp, Artificial Sequence
  bisulfite treated nucleic acid for analysis of methylation status of SEQ ID NO: 19
tccacctttatcaaaaaacaactcataaacatc

SEQ ID NO: 2543 - DNA, 33 bp, Artificial Sequence
  bisulfite treated nucleic acid for analysis of methylation status of SEQ ID NO: 19
ctctccacctttatcaaaaaacaactcataaac

SEQ ID NO: 2544 - DNA, 33 bp, Artificial Sequence
  bisulfite treated nucleic acid for analysis of methylation status of SEQ ID NO: 19
ctccacctttatcaaaaaacaactcataaacat

SEQ ID NO: 2545 - DNA, 34 bp, Artificial Sequence
  bisulfite treated nucleic acid for analysis of methylation status of SEQ ID NO: 19
tatctctccacctttatcaaaaaacaactcataa

SEQ ID NO: 2546 - DNA, 33 bp, Artificial Sequence
  bisulfite treated nucleic acid for analysis of methylation status of SEQ ID NO: 19
cctttatcaaaaaacaactcataaacatcatcc

SEQ ID NO: 2547 - DNA, 33 bp, Artificial Sequence
  bisulfite treated nucleic acid for analysis of methylation status of SEQ ID NO: 19
ctttatcaaaaaacaactcataaacatcatcca

SEQ ID NO: 2548 - DNA, 23 bp, Artificial Sequence
  bisulfite treated nucleic acid for analysis of methylation status of SEQ ID NO: 19
ctcccctatctctccacctttat

SEQ ID NO: 2549 - DNA, 24 bp, Artificial Sequence
  bisulfite treated nucleic acid for analysis of methylation status of SEQ ID NO: 19
actcccctatctctccacctttat

SEQ ID NO: 2550 - DNA, 33 bp, Artificial Sequence
  bisulfite treated nucleic acid for analysis of methylation status of SEQ ID NO: 19
acctttatcaaaaaacaactcataaacatcatc

SEQ ID NO: 2551 - DNA, 34 bp, Artificial Sequence
  bisulfite treated nucleic acid for analysis of methylation status of SEQ ID NO: 19
ctttatcaaaaaacaactcataaacatcatccat

SEQ ID NO: 2552 - DNA, 34 bp, Artificial Sequence
  bisulfite treated nucleic acid for analysis of methylation status of SEQ ID NO: 19
acctttatcaaaaaacaactcataaacatcatcc

SEQ ID NO: 2553 - DNA, 34 bp, Artificial Sequence
  bisulfite treated nucleic acid for analysis of methylation status of SEQ ID NO: 19
cctttatcaaaaaacaactcataaacatcatcca

SEQ ID NO: 2554 - DNA, 34 bp, Artificial Sequence
  bisulfite treated nucleic acid for analysis of methylation status of SEQ ID NO: 19
cacctttatcaaaaaacaactcataaacatcatc

SEQ ID NO: 2555 - DNA, 22 bp, Artificial Sequence
  bisulfite treated nucleic acid for analysis of methylation status of SEQ ID NO: 19
taggtggaaagggataaatagg

SEQ ID NO: 2556 - DNA, 21 bp, Artificial Sequence
  bisulfite treated nucleic acid for analysis of methylation status of SEQ ID NO: 19
caaaaactcccaaaaccttta

SEQ ID NO: 2557 - DNA, 28 bp, Artificial Sequence
  bisulfite treated nucleic acid for analysis of methylation status of SEQ ID NO: 19
ggtttatttgtacgcgtttttcgaagtg

SEQ ID NO: 2558 - DNA, 30 bp, Artificial Sequence
  bisulfite treated nucleic acid for analysis of methylation status of SEQ ID NO: 19
aataggtttatttgtatgtgttttttgaag

SEQ ID NO: 2559 - DNA, 23 bp, Artificial Sequence
  bisulfite treated nucleic acid for analysis of methylation status of SEQ ID NO: 19
gtaggtggaaagggataaatagg

SEQ ID NO: 2560 - DNA, 24 bp, Artificial Sequence
  bisulfite treated nucleic acid for analysis of methylation status of SEQ ID NO: 19
tgtaggtggaaagggataaatagg

SEQ ID NO: 2561 - DNA, 25 bp, Artificial Sequence
  bisulfite treated nucleic acid for analysis of methylation status of SEQ ID NO: 19
atgtaggtggaaagggataaatagg

SEQ ID NO: 2562 - DNA, 26 bp, Artificial Sequence
  bisulfite treated nucleic acid for analysis of methylation status of SEQ ID NO: 19
tatgtaggtggaaagggataaatagg

SEQ ID NO: 2563 - DNA, 31 bp, Artificial Sequence
  bisulfite treated nucleic acid for analysis of methylation status of SEQ ID NO: 19
aataggtttatttgtatgtgttttttgaagt

SEQ ID NO: 2564 - DNA, 31 bp, Artificial Sequence
  bisulfite treated nucleic acid for analysis of methylation status of SEQ ID NO: 19
aaataggtttatttgtatgtgttttttgaag

SEQ ID NO: 2565 - DNA, 23 bp, Artificial Sequence
  bisulfite treated nucleic acid for analysis of methylation status of SEQ ID NO: 19
tgtaggtggaaagggataaatag

SEQ ID NO: 2566 - DNA, 24 bp, Artificial Sequence
  bisulfite treated nucleic acid for analysis of methylation status of SEQ ID NO: 19
atgtaggtggaaagggataaatag

SEQ ID NO: 2567 - DNA, 25 bp, Artificial Sequence
  bisulfite treated nucleic acid for analysis of methylation status of SEQ ID NO: 19
tatgtaggtggaaagggataaatag

SEQ ID NO: 2568 - DNA, 26 bp, Artificial Sequence
  bisulfite treated nucleic acid for analysis of methylation status of SEQ ID NO: 19
ttatgtaggtggaaagggataaatag

SEQ ID NO: 2569 - DNA, 27 bp, Artificial Sequence
  bisulfite treated nucleic acid for analysis of methylation status of SEQ ID NO: 19
attatgtaggtggaaagggataaatag

SEQ ID NO: 2570 - DNA, 28 bp, Artificial Sequence
  bisulfite treated nucleic acid for analysis of methylation status of SEQ ID NO: 19
tattatgtaggtggaaagggataaatag

SEQ ID NO: 2571 - DNA, 29 bp, Artificial Sequence
  bisulfite treated nucleic acid for analysis of methylation status of SEQ ID NO: 19
ttattatgtaggtggaaagggataaatag

SEQ ID NO: 2572 - DNA, 32 bp, Artificial Sequence
  bisulfite treated nucleic acid for analysis of methylation status of SEQ ID NO: 19
taaataggtttatttgtatgtgttttttgaag

SEQ ID NO: 2573 - DNA, 23 bp, Artificial Sequence
  bisulfite treated nucleic acid for analysis of methylation status of SEQ ID NO: 19
atgtaggtggaaagggataaata

SEQ ID NO: 2574 - DNA, 25 bp, Artificial Sequence
  bisulfite treated nucleic acid for analysis of methylation status of SEQ ID NO: 19
ttatgtaggtggaaagggataaata

SEQ ID NO: 2575 - DNA, 24 bp, Artificial Sequence
  bisulfite treated nucleic acid for analysis of methylation status of SEQ ID NO: 19
tatgtaggtggaaagggataaata

SEQ ID NO: 2576 - DNA, 26 bp, Artificial Sequence
  bisulfite treated nucleic acid for analysis of methylation status of SEQ ID NO: 19
attatgtaggtggaaagggataaata

SEQ ID NO: 2577 - DNA, 27 bp, Artificial Sequence
  bisulfite treated nucleic acid for analysis of methylation status of SEQ ID NO: 19
tattatgtaggtggaaagggataaata

SEQ ID NO: 2578 - DNA, 28 bp, Artificial Sequence
  bisulfite treated nucleic acid for analysis of methylation status of SEQ ID NO: 19
ttattatgtaggtggaaagggataaata

SEQ ID NO: 2579 - DNA, 29 bp, Artificial Sequence
  bisulfite treated nucleic acid for analysis of methylation status of SEQ ID NO: 19
tttattatgtaggtggaaagggataaata

SEQ ID NO: 2580 - DNA, 33 bp, Artificial Sequence
  bisulfite treated nucleic acid for analysis of methylation status of SEQ ID NO: 19
gataaataggtttatttgtatgtgttttttgaa

SEQ ID NO: 2581 - DNA, 33 bp, Artificial Sequence
  bisulfite treated nucleic acid for analysis of methylation status of SEQ ID NO: 19
ataaataggtttatttgtatgtgttttttgaag

SEQ ID NO: 2582 - DNA, 22 bp, Artificial Sequence
  bisulfite treated nucleic acid for analysis of methylation status of SEQ ID NO: 17
atttttaggtggggtttagatt

SEQ ID NO: 2583 - DNA, 18 bp, Artificial Sequence
  bisulfite treated nucleic acid for analysis of methylation status of SEQ ID NO: 17
atttcccctccccaattc

SEQ ID NO: 2584 - DNA, 25 bp, Artificial Sequence
  bisulfite treated nucleic acid for analysis of methylation status of SEQ ID NO: 17
gtggggtttagattcgaggtcgttg

SEQ ID NO: 2585 - DNA, 24 bp, Artificial Sequence
  bisulfite treated nucleic acid for analysis of methylation status of SEQ ID NO: 17
ttagatttgaggttgttgtgggtt

SEQ ID NO: 2586 - DNA, 19 bp, Artificial Sequence
  bisulfite treated nucleic acid for analysis of methylation status of SEQ ID NO: 17
aatttcccctccccaattc

SEQ ID NO: 2587 - DNA, 17 bp, Artificial Sequence
  bisulfite treated nucleic acid for analysis of methylation status of SEQ ID NO: 17
tttcccctccccaattc

SEQ ID NO: 2588 - DNA, 17 bp, Artificial Sequence
  bisulfite treated nucleic acid for analysis of methylation status of SEQ ID NO: 17
ccctccccaattcccta

SEQ ID NO: 2589 - DNA, 18 bp, Artificial Sequence
  bisulfite treated nucleic acid for analysis of methylation status of SEQ ID NO: 17
cctccccaattccctaac

SEQ ID NO: 2590 - DNA, 18 bp, Artificial Sequence
  bisulfite treated nucleic acid for analysis of methylation status of SEQ ID NO: 17
ctccccaattccctaacc

SEQ ID NO: 2591 - DNA, 17 bp, Artificial Sequence
  bisulfite treated nucleic acid for analysis of methylation status of SEQ ID NO: 17
tccccaattccctaacc

SEQ ID NO: 2592 - DNA, 23 bp, Artificial Sequence
  bisulfite treated nucleic acid for analysis of methylation status of SEQ ID NO: 17
tatttttaggtggggtttagatt

SEQ ID NO: 2593 - DNA, 23 bp, Artificial Sequence
  bisulfite treated nucleic acid for analysis of methylation status of SEQ ID NO: 17
ttatttttaggtggggtttagat

SEQ ID NO: 2594 - DNA, 24 bp, Artificial Sequence
  bisulfite treated nucleic acid for analysis of methylation status of SEQ ID NO: 17
tttagatttgaggttgttgtgggt

SEQ ID NO: 2595 - DNA, 25 bp, Artificial Sequence
  bisulfite treated nucleic acid for analysis of methylation status of SEQ ID NO: 17
ggtttagatttgaggttgttgtggg

SEQ ID NO: 2596 - DNA, 25 bp, Artificial Sequence
  bisulfite treated nucleic acid for analysis of methylation status of SEQ ID NO: 17
gtttagatttgaggttgttgtgggt

SEQ ID NO: 2597 - DNA, 25 bp, Artificial Sequence
  bisulfite treated nucleic acid for analysis of methylation status of SEQ ID NO: 17
tttagatttgaggttgttgtgggtt

SEQ ID NO: 2598 - DNA, 25 bp, Artificial Sequence
  bisulfite treated nucleic acid for analysis of methylation status of SEQ ID NO: 17
gggtttagatttgaggttgttgtgg

SEQ ID NO: 2599 - DNA, 26 bp, Artificial Sequence
  bisulfite treated nucleic acid for analysis of methylation status of SEQ ID NO: 17
gtttagatttgaggttgttgtgggtt

SEQ ID NO: 2600 - DNA, 26 bp, Artificial Sequence
  bisulfite treated nucleic acid for analysis of methylation status of SEQ ID NO: 21
aaagttttggagtatatgataggtgt

SEQ ID NO: 2601 - DNA, 21 bp, Artificial Sequence
  bisulfite treated nucleic acid for analysis of methylation status of SEQ ID NO: 21
caaaccataaccaccctcaac

SEQ ID NO: 2602 - DNA, 33 bp, Artificial Sequence
  bisulfite treated nucleic acid for analysis of methylation status of SEQ ID NO: 21
tagaaacgttcgtttcgttttttgattagtatt

SEQ ID NO: 2603 - DNA, 29 bp, Artificial Sequence
  bisulfite treated nucleic acid for analysis of methylation status of SEQ ID NO: 21
gataggtgttatagaaatgtttgttttgt

SEQ ID NO: 2604 - DNA, 22 bp, Artificial Sequence
  bisulfite treated nucleic acid for analysis of methylation status of SEQ ID NO: 21
tatcaaaccataaccaccctca

SEQ ID NO: 2605 - DNA, 22 bp, Artificial Sequence
  bisulfite treated nucleic acid for analysis of methylation status of SEQ ID NO: 21
ttatcaaaccataaccaccctc

SEQ ID NO: 2606 - DNA, 21 bp, Artificial Sequence
  bisulfite treated nucleic acid for analysis of methylation status of SEQ ID NO: 21
atcaaaccataaccaccctca

SEQ ID NO: 2607 - DNA, 20 bp, Artificial Sequence
  bisulfite treated nucleic acid for analysis of methylation status of SEQ ID NO: 21
aaaccataaccaccctcaac

SEQ ID NO: 2608 - DNA, 22 bp, Artificial Sequence
  bisulfite treated nucleic acid for analysis of methylation status of SEQ ID NO: 21
aattatcaaaccataaccaccc

SEQ ID NO: 2609 - DNA, 23 bp, Artificial Sequence
  bisulfite treated nucleic acid for analysis of methylation status of SEQ ID NO: 21
attatcaaaccataaccaccctc

SEQ ID NO: 2610 - DNA, 19 bp, Artificial Sequence
  bisulfite treated nucleic acid for analysis of methylation status of SEQ ID NO: 21
accataaccaccctcaacc

SEQ ID NO: 2611 - DNA, 19 bp, Artificial Sequence
  bisulfite treated nucleic acid for analysis of methylation status of SEQ ID NO: 21
ccataaccaccctcaacca

SEQ ID NO: 2612 - DNA, 26 bp, Artificial Sequence
  bisulfite treated nucleic acid for analysis of methylation status of SEQ ID NO: 21
aagttttggagtatatgataggtgtt

SEQ ID NO: 2613 - DNA, 30 bp, Artificial Sequence
  bisulfite treated nucleic acid for analysis of methylation status of SEQ ID NO: 21
tgataggtgttatagaaatgtttgttttgt

SEQ ID NO: 2614 - DNA, 22 bp, Artificial Sequence
  bisulfite treated nucleic acid for analysis of methylation status of SEQ ID NO: 21
cacttctcacacatactttccc

SEQ ID NO: 2615 - DNA, 22 bp, Artificial Sequence
  bisulfite treated nucleic acid for analysis of methylation status of SEQ ID NO: 21
tggtttggtagggagttgttta

SEQ ID NO: 2616 - DNA, 25 bp, Artificial Sequence
  bisulfite treated nucleic acid for analysis of methylation status of SEQ ID NO: 21
tttccctaaaacgaaactacgcgca

SEQ ID NO: 2617 - DNA, 26 bp, Artificial Sequence
  bisulfite treated nucleic acid for analysis of methylation status of SEQ ID NO: 21
ctttccctaaaacaaaactacacaca

SEQ ID NO: 2618 - DNA, 21 bp, Artificial Sequence
  bisulfite treated nucleic acid for analysis of methylation status of SEQ ID NO: 21
gtggtttggtagggagttgtt

SEQ ID NO: 2619 - DNA, 23 bp, Artificial Sequence
  bisulfite treated nucleic acid for analysis of methylation status of SEQ ID NO: 21
ggtttggtagggagttgtttatt

SEQ ID NO: 2620 - DNA, 22 bp, Artificial Sequence
  bisulfite treated nucleic acid for analysis of methylation status of SEQ ID NO: 21
ggataggtaggtgggtatggtt

SEQ ID NO: 2621 - DNA, 21 bp, Artificial Sequence
  bisulfite treated nucleic acid for analysis of methylation status of SEQ ID NO: 21
aaggtggtttggtagggagtt

SEQ ID NO: 2622 - DNA, 22 bp, Artificial Sequence
  bisulfite treated nucleic acid for analysis of methylation status of SEQ ID NO: 21
aggataggtaggtgggtatggt

SEQ ID NO: 2623 - DNA, 20 bp, Artificial Sequence
  bisulfite treated nucleic acid for analysis of methylation status of SEQ ID NO: 21
aggtggtttggtagggagtt

SEQ ID NO: 2624 - DNA, 20 bp, Artificial Sequence
  bisulfite treated nucleic acid for analysis of methylation status of SEQ ID NO: 21
ggtggtttggtagggagttg

SEQ ID NO: 2625 - DNA, 21 bp, Artificial Sequence
  bisulfite treated nucleic acid for analysis of methylation status of SEQ ID NO: 21
gttttatggaggtggggattt

SEQ ID NO: 2626 - DNA, 20 bp, Artificial Sequence
  bisulfite treated nucleic acid for analysis of methylation status of SEQ ID NO: 21
ttatggaggtggggattttt

SEQ ID NO: 2627 - DNA, 20 bp, Artificial Sequence
  bisulfite treated nucleic acid for analysis of methylation status of SEQ ID NO: 21
tttatggaggtggggatttt

SEQ ID NO: 2628 - DNA, 20 bp, Artificial Sequence
  bisulfite treated nucleic acid for analysis of methylation status of SEQ ID NO: 21
ttttatggaggtggggattt

SEQ ID NO: 2629 - DNA, 25 bp, Artificial Sequence
  bisulfite treated nucleic acid for analysis of methylation status of SEQ ID NO: 21
tttggtagggagttgtttattagag

SEQ ID NO: 2630 - DNA, 25 bp, Artificial Sequence
  bisulfite treated nucleic acid for analysis of methylation status of SEQ ID NO: 21
gggagttgtttattagagattgaga

SEQ ID NO: 2631 - DNA, 26 bp, Artificial Sequence
  bisulfite treated nucleic acid for analysis of methylation status of SEQ ID NO: 21
gtttggtagggagttgtttattagag

SEQ ID NO: 2632 - DNA, 24 bp, Artificial Sequence
  bisulfite treated nucleic acid for analysis of methylation status of SEQ ID NO: 21
ttggtagggagttgtttattagag

SEQ ID NO: 2633 - DNA, 19 bp, Artificial Sequence
  bisulfite treated nucleic acid for analysis of methylation status of SEQ ID NO: 21
aaaggtggtttggtaggga

SEQ ID NO: 2634 - DNA, 26 bp, Artificial Sequence
  bisulfite treated nucleic acid for analysis of methylation status of SEQ ID NO: 21
ggtagggagttgtttattagagattg

SEQ ID NO: 2635 - DNA, 26 bp, Artificial Sequence
  bisulfite treated nucleic acid for analysis of methylation status of SEQ ID NO: 21
tggtagggagttgtttattagagatt

SEQ ID NO: 2636 - DNA, 26 bp, Artificial Sequence
  bisulfite treated nucleic acid for analysis of methylation status of SEQ ID NO: 21
agggagttgtttattagagattgaga

SEQ ID NO: 2637 - DNA, 20 bp, Artificial Sequence
  bisulfite treated nucleic acid for analysis of methylation status of SEQ ID NO: 21
tgttttatggaggtggggat

SEQ ID NO: 2638 - DNA, 23 bp, Artificial Sequence
  bisulfite treated nucleic acid for analysis of methylation status of SEQ ID NO: 21
gaggataggtaggtgggtatggt

SEQ ID NO: 2639 - DNA, 24 bp, Artificial Sequence
  bisulfite treated nucleic acid for analysis of methylation status of SEQ ID NO: 21
ttaattggtttagagaaagaaagg

SEQ ID NO: 2640 - DNA, 25 bp, Artificial Sequence
  bisulfite treated nucleic acid for analysis of methylation status of SEQ ID NO: 21
gttaattggtttagagaaagaaagg

SEQ ID NO: 2641 - DNA, 23 bp, Artificial Sequence
  bisulfite treated nucleic acid for analysis of methylation status of SEQ ID NO: 21
gataggtaggtgggtatggttat

SEQ ID NO: 2642 - DNA, 27 bp, Artificial Sequence
  bisulfite treated nucleic acid for analysis of methylation status of SEQ ID NO: 21
tagggagttgtttattagagattgaga

SEQ ID NO: 2643 - DNA, 19 bp, Artificial Sequence
  bisulfite treated nucleic acid for analysis of methylation status of SEQ ID NO: 21
tatggaggtggggattttt

SEQ ID NO: 2644 - DNA, 26 bp, Artificial Sequence
  bisulfite treated nucleic acid for analysis of methylation status of SEQ ID NO: 21
gtagggagttgtttattagagattga

SEQ ID NO: 2645 - DNA, 21 bp, Artificial Sequence
  bisulfite treated nucleic acid for analysis of methylation status of SEQ ID NO: 21
ggagaggataggtaggtgggt

SEQ ID NO: 2646 - DNA, 18 bp, Artificial Sequence
  bisulfite treated nucleic acid for analysis of methylation status of SEQ ID NO: 21
atggaggtggggattttt

SEQ ID NO: 2647 - DNA, 17 bp, Artificial Sequence
  bisulfite treated nucleic acid for analysis of methylation status of SEQ ID NO: 21
tggaggtggggattttt

SEQ ID NO: 2648 - DNA, 22 bp, Artificial Sequence
  bisulfite treated nucleic acid for analysis of methylation status of SEQ ID NO: 21
ccacttctcacacatactttcc

SEQ ID NO: 2649 - DNA, 23 bp, Artificial Sequence
  bisulfite treated nucleic acid for analysis of methylation status of SEQ ID NO: 21
accacttctcacacatactttcc

SEQ ID NO: 2650 - DNA, 24 bp, Artificial Sequence
  bisulfite treated nucleic acid for analysis of methylation status of SEQ ID NO: 21
caccacttctcacacatactttcc

SEQ ID NO: 2651 - DNA, 24 bp, Artificial Sequence
  bisulfite treated nucleic acid for analysis of methylation status of SEQ ID NO: 21
ttctcacacatactttccctaaaa

SEQ ID NO: 2652 - DNA, 25 bp, Artificial Sequence
  bisulfite treated nucleic acid for analysis of methylation status of SEQ ID NO: 21
cttctcacacatactttccctaaaa

SEQ ID NO: 2653 - DNA, 23 bp, Artificial Sequence
  bisulfite treated nucleic acid for analysis of methylation status of SEQ ID NO: 21
tctcacacatactttccctaaaa

SEQ ID NO: 2654 - DNA, 26 bp, Artificial Sequence
  bisulfite treated nucleic acid for analysis of methylation status of SEQ ID NO: 21
acttctcacacatactttccctaaaa

SEQ ID NO: 2655 - DNA, 18 bp, Artificial Sequence
  bisulfite treated nucleic acid for analysis of methylation status of SEQ ID NO: 36
ttttaggtgtgggggttt

SEQ ID NO: 2656 - DNA, 26 bp, Artificial Sequence
  bisulfite treated nucleic acid for analysis of methylation status of SEQ ID NO: 36
aaacttttcaatactaaatcatcctc

SEQ ID NO: 2657 - DNA, 23 bp, Artificial Sequence
  bisulfite treated nucleic acid for analysis of methylation status of SEQ ID NO: 36
ggagaagattgcgttcggtcgtg

SEQ ID NO: 2658 - DNA, 22 bp, Artificial Sequence
  bisulfite treated nucleic acid for analysis of methylation status of SEQ ID NO: 36
gggttttggggggtagtgatgt

SEQ ID NO: 2659 - DNA, 28 bp, Artificial Sequence
  bisulfite treated nucleic acid for analysis of methylation status of SEQ ID NO: 36
ttattacccaaactaaaatacaataaca

SEQ ID NO: 2660 - DNA, 22 bp, Artificial Sequence
  bisulfite treated nucleic acid for analysis of methylation status of SEQ ID NO: 36
atttagaaggttgagggaggag

SEQ ID NO: 2661 - DNA, 26 bp, Artificial Sequence
  bisulfite treated nucleic acid for analysis of methylation status of SEQ ID NO: 36
acctcctcctcccgaattcaaacgat

SEQ ID NO: 2662 - DNA, 25 bp, Artificial Sequence
  bisulfite treated nucleic acid for analysis of methylation status of SEQ ID NO: 36
ataacacaatctcaactcaccacaa

SEQ ID NO: 2663 - DNA, 22 bp, Artificial Sequence
  bisulfite treated nucleic acid for analysis of methylation status of SEQ ID NO: 36
tagaaggttgagggaggagaat

SEQ ID NO: 2664 - DNA, 22 bp, Artificial Sequence
  bisulfite treated nucleic acid for analysis of methylation status of SEQ ID NO: 36
ctcgactcaccgcaacctcctc

SEQ ID NO: 2665 - DNA, 23 bp, Artificial Sequence
  bisulfite treated nucleic acid for analysis of methylation status of SEQ ID NO: 36
tatttagaaggttgagggaggag

SEQ ID NO: 2666 - DNA, 21 bp, Artificial Sequence
  nucleic acid for analysis of methylation status of SEQ ID NO: 36
ttagaaggttgagggaggaga

SEQ ID NO: 2667 - DNA, 21 bp, Artificial Sequence
  bisulfite treated nucleic acid for analysis of methylation status of SEQ ID NO: 36
agaaggttgagggaggagaat

SEQ ID NO: 2668 - DNA, 23 bp, Artificial Sequence
  bisulfite treated nucleic acid for analysis of methylation status of SEQ ID NO: 36
ttatttagaaggttgagggagga

SEQ ID NO: 2669 - DNA, 22 bp, Artificial Sequence
  bisulfite treated nucleic acid for analysis of methylation status of SEQ ID NO: 36
tttagaaggttgagggaggaga

SEQ ID NO: 2670 - DNA, 23 bp, Artificial Sequence
  bisulfite treated nucleic acid for analysis of methylation status of SEQ ID NO: 36
gttatttagaaggttgagggagg

SEQ ID NO: 2671 - DNA, 26 bp, Artificial Sequence
  bisulfite treated nucleic acid for analysis of methylation status of SEQ ID NO: 36
ctcctcctcccgaattcaaacgattc

SEQ ID NO: 2672 - DNA, 24 bp, Artificial Sequence
  bisulfite treated nucleic acid for analysis of methylation status of SEQ ID NO: 36
agttatttagaaggttgagggagg

SEQ ID NO: 2673 - DNA, 20 bp, Artificial Sequence
  bisulfite treated nucleic acid for analysis of methylation status of SEQ ID NO: 36
gaaggttgagggaggagaat

SEQ ID NO: 2674 - DNA, 25 bp, Artificial Sequence
  bisulfite treated nucleic acid for analysis of methylation status of SEQ ID NO: 36
tagttatttagaaggttgagggagg

SEQ ID NO: 2675 - DNA, 19 bp, Artificial Sequence
  bisulfite treated nucleic acid for analysis of methylation status of SEQ ID NO: 36
aaggttgagggaggagaat

SEQ ID NO: 2676 - DNA, 29 bp, Artificial Sequence
  bisulfite treated nucleic acid for analysis of methylation status of SEQ ID NO: 36
cttattacccaaactaaaatacaataaca

SEQ ID NO: 2677 - DNA, 30 bp, Artificial Sequence
  bisulfite treated nucleic acid for analysis of methylation status of SEQ ID NO: 36
tcttattacccaaactaaaatacaataaca

SEQ ID NO: 2678 - DNA, 31 bp, Artificial Sequence
  bisulfite treated nucleic acid for analysis of methylation status of SEQ ID NO: 36
ctcttattacccaaactaaaatacaataaca

SEQ ID NO: 2679 - DNA, 25 bp, Artificial Sequence
  bisulfite treated nucleic acid for analysis of methylation status of SEQ ID NO: 36
aataacacaatctcaactcaccaca

SEQ ID NO: 2680 - DNA, 30 bp, Artificial Sequence
  bisulfite treated nucleic acid for analysis of methylation status of SEQ ID NO: 36
ctcttattacccaaactaaaatacaataac

SEQ ID NO: 2681 - DNA, 22 bp, Artificial Sequence
  bisulfite treated nucleic acid for analysis of methylation status of SEQ ID NO: 26
accacccacttctcctataaaa

SEQ ID NO: 2682 - DNA, 20 bp, Artificial Sequence
  bisulfite treated nucleic acid for analysis of methylation status of SEQ ID NO: 26
ttggggttgggagagtagtt

SEQ ID NO: 2683 - DNA, 25 bp, Artificial Sequence
  bisulfite treated nucleic acid for analysis of methylation status of SEQ ID NO: 26
ccgacaaaaaatcccgcgaaaaacc

SEQ ID NO: 2684 - DNA, 24 bp, Artificial Sequence
  bisulfite treated nucleic acid for analysis of methylation status of SEQ ID NO: 26
tataaaaccacaatcccacccaac

SEQ ID NO: 2685 - DNA, 21 bp, Artificial Sequence
  bisulfite treated nucleic acid for analysis of methylation status of SEQ ID NO: 26
ggggttgggagagtagttttt

SEQ ID NO: 2686 - DNA, 20 bp, Artificial Sequence
  bisulfite treated nucleic acid for analysis of methylation status of SEQ ID NO: 26
tggggttgggagagtagttt

SEQ ID NO: 2687 - DNA, 24 bp, Artificial Sequence
  bisulfite treated nucleic acid for analysis of methylation status of SEQ ID NO: 26
tgggagagtagtttttagaggttt

SEQ ID NO: 2688 - DNA, 19 bp, Artificial Sequence
  bisulfite treated nucleic acid for analysis of methylation status of SEQ ID NO: 26
gttggggttgggagagtag

SEQ ID NO: 2689 - DNA, 25 bp, Artificial Sequence
  bisulfite treated nucleic acid for analysis of methylation status of SEQ ID NO: 26
ttgggagagtagtttttagaggttt

SEQ ID NO: 2690 - DNA, 23 bp, Artificial Sequence
  bisulfite treated nucleic acid for analysis of methylation status of SEQ ID NO: 26
taccacccacttctcctataaaa

SEQ ID NO: 2691 - DNA, 23 bp, Artificial Sequence
  bisulfite treated nucleic acid for analysis of methylation status of SEQ ID NO: 26
ttaccacccacttctcctataaa

SEQ ID NO: 2692 - DNA, 24 bp, Artificial Sequence
  bisulfite treated nucleic acid for analysis of methylation status of SEQ ID NO: 26
cttaccacccacttctcctataaa

SEQ ID NO: 2693 - DNA, 22 bp, Artificial Sequence
  bisulfite treated nucleic acid for analysis of methylation status of SEQ ID NO: 26
ccacccacttctcctataaaac

SEQ ID NO: 2694 - DNA, 25 bp, Artificial Sequence
  bisulfite treated nucleic acid for analysis of methylation status of SEQ ID NO: 26
acttaccacccacttctcctataaa

SEQ ID NO: 2695 - DNA, 22 bp, Artificial Sequence
  bisulfite treated nucleic acid for analysis of methylation status of SEQ ID NO: 26
acccacttctcctataaaacca

SEQ ID NO: 2696 - DNA, 22 bp, Artificial Sequence
  bisulfite treated nucleic acid for analysis of methylation status of SEQ ID NO: 26
cacccacttctcctataaaacc

SEQ ID NO: 2697 - DNA, 21 bp, Artificial Sequence
  bisulfite treated nucleic acid for analysis of methylation status of SEQ ID NO: 26
cccacttctcctataaaacca

SEQ ID NO: 2698 - DNA, 26 bp, Artificial Sequence
  bisulfite treated nucleic acid for analysis of methylation status of SEQ ID NO: 26
aacttaccacccacttctcctataaa

SEQ ID NO: 2699 - DNA, 25 bp, Artificial Sequence
  bisulfite treated nucleic acid for analysis of methylation status of SEQ ID NO: 26
ctataaaaccacaatcccacccaac

SEQ ID NO: 2700 - DNA, 23 bp, Artificial Sequence
  bisulfite treated nucleic acid for analysis of methylation status of SEQ ID NO: 26
cttaccacccacttctcctataa

SEQ ID NO: 2701 - DNA, 22 bp, Artificial Sequence
  nucleic acid for analysis of methylation status of SEQ ID NO: 26
ttaccacccacttctcctataa

SEQ ID NO: 2702 - DNA, 24 bp, Artificial Sequence
  bisulfite treated nucleic acid for analysis of methylation status of SEQ ID NO: 26
acttaccacccacttctcctataa

SEQ ID NO: 2703 - DNA, 25 bp, Artificial Sequence
  bisulfite treated nucleic acid for analysis of methylation status of SEQ ID NO: 26
tataaaaccacaatcccacccaaca

SEQ ID NO: 2704 - DNA, 26 bp, Artificial Sequence
  bisulfite treated nucleic acid for analysis of methylation status of SEQ ID NO: 26
cctataaaaccacaatcccacccaac

SEQ ID NO: 2705 - DNA, 26 bp, Artificial Sequence
  bisulfite treated nucleic acid for analysis of methylation status of SEQ ID NO: 26
ctataaaaccacaatcccacccaaca

SEQ ID NO: 2706 - DNA, 27 bp, Artificial Sequence
  bisulfite treated nucleic acid for analysis of methylation status of SEQ ID NO: 26
tcctataaaaccacaatcccacccaac

SEQ ID NO: 2707 - DNA, 27 bp, Artificial Sequence
  bisulfite treated nucleic acid for analysis of methylation status of SEQ ID NO: 38
ggatatttggagaggtagatagtagaa

SEQ ID NO: 2708 - DNA, 22 bp, Artificial Sequence
  bisulfite treated nucleic acid for analysis of methylation status of SEQ ID NO: 38
ctcctcacaattttcatccaac

SEQ ID NO: 2709 - DNA, 31 bp, Artificial Sequence
  bisulfite treated nucleic acid for analysis of methylation status of SEQ ID NO: 38
aggtagatagtagaagcggatattttttcgt

SEQ ID NO: 2710 - DNA, 30 bp, Artificial Sequence
  bisulfite treated nucleic acid for analysis of methylation status of SEQ ID NO: 38
gatagtagaagtggatatttttttgtatgt

SEQ ID NO: 2711 - DNA, 21 bp, Artificial Sequence
  bisulfite treated nucleic acid for analysis of methylation status of SEQ ID NO: 38
tcctcacaattttcatccaac

SEQ ID NO: 2712 - DNA, 21 bp, Artificial Sequence
  bisulfite treated nucleic acid for analysis of methylation status of SEQ ID NO: 38
ctcacaattttcatccaacca

SEQ ID NO: 2713 - DNA, 21 bp, Artificial Sequence
  bisulfite treated nucleic acid for analysis of methylation status of SEQ ID NO: 38
cctcacaattttcatccaacc

SEQ ID NO: 2714 - DNA, 20 bp, Artificial Sequence
  bisulfite treated nucleic acid for analysis of methylation status of SEQ ID NO: 38
tcacaattttcatccaacca

SEQ ID NO: 2715 - DNA, 19 bp, Artificial Sequence
  bisulfite treated nucleic acid for analysis of methylation status of SEQ ID NO: 38
cacaattttcatccaacca

SEQ ID NO: 2716 - DNA, 28 bp, Artificial Sequence
  bisulfite treated nucleic acid for analysis of methylation status of SEQ ID NO: 38
ggatatttggagaggtagatagtagaag

SEQ ID NO: 2717 - DNA, 30 bp, Artificial Sequence
  bisulfite treated nucleic acid for analysis of methylation status of SEQ ID NO: 38
tagaagtggatatttttttgtatgtttgag

SEQ ID NO: 2718 - DNA, 30 bp, Artificial Sequence
  bisulfite treated nucleic acid for analysis of methylation status of SEQ ID NO: 38
gtagaagtggatatttttttgtatgtttga

SEQ ID NO: 2719 - DNA, 31 bp, Artificial Sequence
  bisulfite treated nucleic acid for analysis of methylation status of SEQ ID NO: 38
tagaagtggatatttttttgtatgtttgagt

SEQ ID NO: 2720 - DNA, 31 bp, Artificial Sequence
  bisulfite treated nucleic acid for analysis of methylation status of SEQ ID NO: 38
gtagaagtggatatttttttgtatgtttgag

SEQ ID NO: 2721 - DNA, 31 bp, Artificial Sequence
  bisulfite treated nucleic acid for analysis of methylation status of SEQ ID NO: 38
agtagaagtggatatttttttgtatgtttga

SEQ ID NO: 2722 - DNA, 26 bp, Artificial Sequence
  bisulfite treated nucleic acid for analysis of methylation status of SEQ ID NO: 27
tttcactcttattacccaaactaaaa

SEQ ID NO: 2723 - DNA, 22 bp, Artificial Sequence
  bisulfite treated nucleic acid for analysis of methylation status of SEQ ID NO: 27
tgatattttgtgaggttgaggt

SEQ ID NO: 2724 - DNA, 22 bp, Artificial Sequence
  bisulfite treated nucleic acid for analysis of methylation status of SEQ ID NO: 27
ccgcaacctccgcctccccgat

SEQ ID NO: 2725 - DNA, 33 bp, Artificial Sequence; identical to SEQ ID NO: 2107
  bisulfite treated nucleic acid for analysis of methylation status of SEQ ID NO: 27

SEQ ID NO: 2726 - DNA, 24 bp, Artificial Sequence
  bisulfite treated nucleic acid for analysis of methylation status of SEQ ID NO: 27
atattttgtgaggttgaggtaggt

SEQ ID NO: 2727 - DNA, 25 bp, Artificial Sequence
  bisulfite treated nucleic acid for analysis of methylation status of SEQ ID NO: 27
ttgatattttgtgaggttgaggtag

SEQ ID NO: 2728 - DNA, 25 bp, Artificial Sequence
  bisulfite treated nucleic acid for analysis of methylation status of SEQ ID NO: 27
gatattttgtgaggttgaggtaggt

SEQ ID NO: 2729 - DNA, 23 bp, Artificial Sequence
  bisulfite treated nucleic acid for analysis of methylation status of SEQ ID NO: 27
tatggtggtatatgtttgtgatg

SEQ ID NO: 2730 - DNA, 25 bp, Artificial Sequence
  bisulfite treated nucleic acid for analysis of methylation status of SEQ ID NO: 27
tttgatattttgtgaggttgaggta

SEQ ID NO: 2731 - DNA, 23 bp, Artificial Sequence
  bisulfite treated nucleic acid for analysis of methylation status of SEQ ID NO: 27
aattttgatattttgtgaggttg

SEQ ID NO: 2732 - DNA, 25 bp, Artificial Sequence
  bisulfite treated nucleic acid for analysis of methylation status of SEQ ID NO: 27
gaggttgaggtaggtagattatttg

SEQ ID NO: 2733 - DNA, 26 bp, Artificial Sequence
  bisulfite treated nucleic acid for analysis of methylation status of SEQ ID NO: 27
tgtaattttgatattttgtgaggttg

SEQ ID NO: 2734 - DNA, 24 bp, Artificial Sequence
  bisulfite treated nucleic acid for analysis of methylation status of SEQ ID NO: 27
taattttgatattttgtgaggttg

SEQ ID NO: 2735 - DNA, 27 bp, Artificial Sequence
  bisulfite treated nucleic acid for analysis of methylation status of SEQ ID NO: 27
aaaatataaaagtagttggtatggtgg

SEQ ID NO: 2736 - DNA, 25 bp, Artificial Sequence
  bisulfite treated nucleic acid for analysis of methylation status of SEQ ID NO: 27
gtaattttgatattttgtgaggttg

SEQ ID NO: 2737 - DNA, 26 bp, Artificial Sequence
  bisulfite treated nucleic acid for analysis of methylation status of SEQ ID NO: 27
aaatataaaagtagttggtatggtgg

SEQ ID NO: 2738 - DNA, 28 bp, Artificial Sequence
  bisulfite treated nucleic acid for analysis of methylation status of SEQ ID NO: 27
aaaaatataaaagtagttggtatggtgg

SEQ ID NO: 2739 - DNA, 24 bp, Artificial Sequence
  bisulfite treated nucleic acid for analysis of methylation status of SEQ ID NO: 27
aggttgaggtaggtagattatttg

SEQ ID NO: 2740 - DNA, 29 bp, Artificial Sequence
  bisulfite treated nucleic acid for analysis of methylation status of SEQ ID NO: 27
taaaaatataaaagtagttggtatggtgg

SEQ ID NO: 2741 - DNA, 26 bp, Artificial Sequence
  bisulfite treated nucleic acid for analysis of methylation status of SEQ ID NO: 27
aatataaaagtagttggtatggtggt

SEQ ID NO: 2742 - DNA, 29 bp, Artificial Sequence
  bisulfite treated nucleic acid for analysis of methylation status of SEQ ID NO: 27
ttaaaaatataaaagtagttggtatggtg

SEQ ID NO: 2743 - DNA, 30 bp, Artificial Sequence
  bisulfite treated nucleic acid for analysis of methylation status of SEQ ID NO: 27
attaaaaatataaaagtagttggtatggtg

SEQ ID NO: 2744 - DNA, 25 bp, Artificial Sequence
  bisulfite treated nucleic acid for analysis of methylation status of SEQ ID NO: 27
ttcactcttattacccaaactaaaa

SEQ ID NO: 2745 - DNA, 25 bp, Artificial Sequence
  bisulfite treated nucleic acid for analysis of methylation status of SEQ ID NO: 27
ttgtaattttgatattttgtgaggt

SEQ ID NO: 2746 - DNA, 27 bp, Artificial Sequence
  bisulfite treated nucleic acid for analysis of methylation status of SEQ ID NO: 27
atttcactcttattacccaaactaaaa

SEQ ID NO: 2747 - DNA, 26 bp, Artificial Sequence
  bisulfite treated nucleic acid for analysis of methylation status of SEQ ID NO: 27
aatttcactcttattacccaaactaa

SEQ ID NO: 2748 - DNA, 33 bp, Artificial Sequence
  bisulfite treated nucleic acid for analysis of methylation status of SEQ ID NO: 27
cccaaactaaaatacaataacacaatctcaact

SEQ ID NO: 2749 - DNA, 33 bp, Artificial Sequence
  bisulfite treated nucleic acid for analysis of methylation status of SEQ ID NO: 27
aactaaaatacaataacacaatctcaactcacc

SEQ ID NO: 2750 - DNA, 34 bp, Artificial Sequence
  bisulfite treated nucleic acid for analysis of methylation status of SEQ ID NO: 27
cccaaactaaaatacaataacacaatctcaactc

SEQ ID NO: 2751 - DNA, 22 bp, Artificial Sequence
  bisulfite treated nucleic acid for analysis of methylation status of SEQ ID NO: 41
atagtttcgagtttgacggttg

SEQ ID NO: 2752 - DNA, 22 bp, Artificial Sequence
  bisulfite treated nucleic acid for analysis of methylation status of SEQ ID NO: 41
aatactacttccaacgctacgc

SEQ ID NO: 2753 - DNA, 37 bp, Artificial Sequence
  bisulfite treated nucleic acid for analysis of methylation status of SEQ ID NO: 41
ttcggagggcgtatttttttatattagttttcgtgtt

SEQ ID NO: 2754 - DNA, 22 bp, Artificial Sequence
  bisulfite treated nucleic acid for analysis of methylation status of SEQ ID NO: 41
ttcgtattttggtttcgtgttt

SEQ ID NO: 2755 - DNA, 22 bp, Artificial Sequence
  bisulfite treated nucleic acid for analysis of methylation status of SEQ ID NO: 41
ctaaccgcgctactactcctaa

SEQ ID NO: 2756 - DNA, 30 bp, Artificial Sequence
  bisulfite treated nucleic acid for analysis of methylation status of SEQ ID NO: 41
ggggttttagcgtagattcgggttttggat

SEQ ID NO: 2757 - DNA, 22 bp, Artificial Sequence
  bisulfite treated nucleic acid for analysis of methylation status of SEQ ID NO: 41
tcgtattttggtttcgtgtttc

SEQ ID NO: 2758 - DNA, 31 bp, Artificial Sequence
  bisulfite treated nucleic acid for analysis of methylation status of SEQ ID NO: 41
ttttagcgtagattcgggttttggattcggt

SEQ ID NO: 2759 - DNA, 22 bp, Artificial Sequence
  bisulfite treated nucleic acid for analysis of methylation status of SEQ ID NO: 41
tagtattggacgtaggaaagcg

SEQ ID NO: 2760 - DNA, 22 bp, Artificial Sequence
  bisulfite treated nucleic acid for analysis of methylation status of SEQ ID NO: 41
taaacgaaacgataaaactccc

SEQ ID NO: 2761 - DNA, 29 bp, Artificial Sequence
  bisulfite treated nucleic acid for analysis of methylation status of SEQ ID NO: 41
gtcggttggggcgtaaagattgttttggg

SEQ ID NO: 2762 - DNA, 22 bp, Artificial Sequence
  bisulfite treated nucleic acid for analysis of methylation status of SEQ ID NO: 41
tactaaccgcgctactactcct

SEQ ID NO: 2763 - DNA, 22 bp, Artificial Sequence
  bisulfite treated nucleic acid for analysis of methylation status of SEQ ID NO: 41
actaaccgcgctactactccta

SEQ ID NO: 2764 - DNA, 22 bp, Artificial Sequence
  bisulfite treated nucleic acid for analysis of methylation status of SEQ ID NO: 41
taaccgcgctactactcctaat

SEQ ID NO: 2765 - DNA, 22 bp, Artificial Sequence
  bisulfite treated nucleic acid for analysis of methylation status of SEQ ID NO: 41
gcgacccgaactaatctaatct

SEQ ID NO: 2766 - DNA, 43 bp, Artificial Sequence
  bisulfite treated nucleic acid for analysis of methylation status of SEQ ID NO: 41
gggagttttatcgtttcgtttagaatagttagtaatgattagg

SEQ ID NO: 2767 - DNA, 21 bp, Artificial Sequence
  bisulfite treated nucleic acid for analysis of methylation status of SEQ ID NO: 41
tagtttcgagtttgacggttg

SEQ ID NO: 2768 - DNA, 22 bp, Artificial Sequence
  bisulfite treated nucleic acid for analysis of methylation status of SEQ ID NO: 41
tcgcgttattttagtagggttc

SEQ ID NO: 2769 - DNA, 21 bp, Artificial Sequence
  bisulfite treated nucleic acid for analysis of methylation status of SEQ ID NO: 41
cgattaaaactcgaaacgaca

SEQ ID NO: 2770 - DNA, 25 bp, Artificial Sequence
  bisulfite treated nucleic acid for analysis of methylation status of SEQ ID NO: 41
agaagggttgtttcgtcgcggtcgt

SEQ ID NO: 2771 - DNA, 22 bp, Artificial Sequence
  bisulfite treated nucleic acid for analysis of methylation status of SEQ ID NO: 41
caatactacttccaacgctacg

SEQ ID NO: 2772 - DNA, 22 bp, Artificial Sequence
  bisulfite treated nucleic acid for analysis of methylation status of SEQ ID NO: 41
gagcgtttgtacggtttaagat

SEQ ID NO: 2773 - DNA, 21 bp, Artificial Sequence
  bisulfite treated nucleic acid for analysis of methylation status of SEQ ID NO: 41
cgctaacgtcaatcgaaacta

SEQ ID NO: 2774 - DNA, 28 bp, Artificial Sequence
  bisulfite treated nucleic acid for analysis of methylation status of SEQ ID NO: 41
agggtttgtttcggcgtgtcgttagttt

SEQ ID NO: 2775 - DNA, 22 bp, Artificial Sequence
  bisulfite treated nucleic acid for analysis of methylation status of SEQ ID NO: 41
ccgcgctactactcctaataca

SEQ ID NO: 2776 - DNA, 22 bp, Artificial Sequence
  bisulfite treated nucleic acid for analysis of methylation status of SEQ ID NO: 41
cgtagcgttggaagtagtattg

SEQ ID NO: 2777 - DNA, 22 bp, Artificial Sequence
  bisulfite treated nucleic acid for analysis of methylation status of SEQ ID NO: 41
acgataaaactcccgtaaatcc

SEQ ID NO: 2778 - DNA, 29 bp, Artificial Sequence
  bisulfite treated nucleic acid for analysis of methylation status of SEQ ID NO: 41
gagaagtcggttggggcgtaaagattgtt

SEQ ID NO: 2779 - DNA, 23 bp, Artificial Sequence
  bisulfite treated nucleic acid for analysis of methylation status of SEQ ID NO: 41
tatagtttcgagtttgacggttg

SEQ ID NO: 2780 - DNA, 22 bp, Artificial Sequence
  bisulfite treated nucleic acid for analysis of methylation status of SEQ ID NO: 41
accgcgctactactcctaatac

SEQ ID NO: 2781 - DNA, 22 bp, Artificial Sequence
  bisulfite treated nucleic acid for analysis of methylation status of SEQ ID NO: 41
ttaaaactcgaaacgacaaacg

SEQ ID NO: 2782 - DNA, 23 bp, Artificial Sequence
  bisulfite treated nucleic acid for analysis of methylation status of SEQ ID NO: 41
aaccgcgctactactcctaatac

SEQ ID NO: 2783 - DNA, 22 bp, Artificial Sequence
  bisulfite treated nucleic acid for analysis of methylation status of SEQ ID NO: 41
acatattcttcgctaacgtcaa

SEQ ID NO: 2784 - DNA, 21 bp, Artificial Sequence
  nucleic acid for analysis of methylation status of SEQ ID NO: 41
cgtattttggtttcgtgtttc

SEQ ID NO: 2785 - DNA, 21 bp, Artificial Sequence
  bisulfite treated nucleic acid for analysis of methylation status of SEQ ID NO: 41
tttcgtattttggtttcgtgt

SEQ ID NO: 2786 - DNA, 21 bp, Artificial Sequence
  bisulfite treated nucleic acid for analysis of methylation status of SEQ ID NO: 41
gtattttggtttcgtgtttcg

SEQ ID NO: 2787 - DNA, 22 bp, Artificial Sequence
  bisulfite treated nucleic acid for analysis of methylation status of SEQ ID NO: 41
gaaacgataaaactcccgtaaa

SEQ ID NO: 2788 - DNA, 23 bp, Artificial Sequence
  bisulfite treated nucleic acid for analysis of methylation status of SEQ ID NO: 41
ctaaacgaaacgataaaactccc

SEQ ID NO: 2789 - DNA, 23 bp, Artificial Sequence
  bisulfite treated nucleic acid for analysis of methylation status of SEQ ID NO: 41
cgttggaagtagtattggacgta

SEQ ID NO: 2790 - DNA, 22 bp, Artificial Sequence
  bisulfite treated nucleic acid for analysis of methylation status of SEQ ID NO: 41
cgcgctactactcctaatacaa

SEQ ID NO: 2791 - DNA, 21 bp, Artificial Sequence
  bisulfite treated nucleic acid for analysis of methylation status of SEQ ID NO: 41
agtattggacgtaggaaagcg

SEQ ID NO: 2792 - DNA, 21 bp, Artificial Sequence
  bisulfite treated nucleic acid for analysis of methylation status of SEQ ID NO: 41
gacgtaggaaagcgagaagtc

SEQ ID NO: 2793 - DNA, 22 bp, Artificial Sequence
  bisulfite treated nucleic acid for analysis of methylation status of SEQ ID NO: 41
atactacttccaacgctacgcc

SEQ ID NO: 2794 - DNA, 23 bp, Artificial Sequence
  bisulfite treated nucleic acid for analysis of methylation status of SEQ ID NO: 41
ttatagtttcgagtttgacggtt

SEQ ID NO: 2795 - DNA, 22 bp, Artificial Sequence
  bisulfite treated nucleic acid for analysis of methylation status of SEQ ID NO: 41
acgtccaatactacttccaacg

SEQ ID NO: 2796 - DNA, 21 bp, Artificial Sequence
  bisulfite treated nucleic acid for analysis of methylation status of SEQ ID NO: 41
aaacgaaacgataaaactccc

SEQ ID NO: 2797 - DNA, 22 bp, Artificial Sequence
  bisulfite treated nucleic acid for analysis of methylation status of SEQ ID NO: 41
agcgtttgtacggtttaagatt

SEQ ID NO: 2798 - DNA, 22 bp, Artificial Sequence
  bisulfite treated nucleic acid for analysis of methylation status of SEQ ID NO: 41
ggcgtagcgttggaagtagtat

SEQ ID NO: 2799 - DNA, 28 bp, Artificial Sequence
  bisulfite treated nucleic acid for analysis of methylation status of SEQ ID NO: 41
ggacgtaggaaagcgagaagtcggttgg

SEQ ID NO: 2800 - DNA, 22 bp, Artificial Sequence
  bisulfite treated nucleic acid for analysis of methylation status of SEQ ID NO: 41
catattcttcgctaacgtcaat

SEQ ID NO: 2801 - DNA, 24 bp, Artificial Sequence
  bisulfite treated nucleic acid for analysis of methylation status of SEQ ID NO: 41
gttatagtttcgagtttgacggtt

SEQ ID NO: 2802 - DNA, 23 bp, Artificial Sequence
  bisulfite treated nucleic acid for analysis of methylation status of SEQ ID NO: 41
gattaaaactcgaaacgacaaac

SEQ ID NO: 2803 - DNA, 22 bp, Artificial Sequence
  bisulfite treated nucleic acid for analysis of methylation status of SEQ ID NO: 41
tcgctaacgtcaatcgaaacta

SEQ ID NO: 2804 - DNA, 22 bp, Artificial Sequence
  bisulfite treated nucleic acid for analysis of methylation status of SEQ ID NO: 41
acgaaacgataaaactcccgta

SEQ ID NO: 2805 - DNA, 21 bp, Artificial Sequence
  bisulfite treated nucleic acid for analysis of methylation status of SEQ ID NO: 41
ttcgtattttggtttcgtgtt

SEQ ID NO: 2806 - DNA, 23 bp, Artificial Sequence
  bisulfite treated nucleic acid for analysis of methylation status of SEQ ID NO: 41
agttatagtttcgagtttgacgg

SEQ ID NO: 2807 - DNA, 24 bp, Artificial Sequence
  bisulfite treated nucleic acid for analysis of methylation status of SEQ ID NO: 41
tggcgggtttcggagggcgtattt

SEQ ID NO: 2808 - DNA, 21 bp, Artificial Sequence
  bisulfite treated nucleic acid for analysis of methylation status of SEQ ID NO: 41
gcgacccgaactaatctaatc

SEQ ID NO: 2809 - DNA, 20 bp, Artificial Sequence
  bisulfite treated nucleic acid for analysis of methylation status of SEQ ID NO: 41
agtttcgagtttgacggttg

SEQ ID NO: 2810 - DNA, 23 bp, Artificial Sequence
  bisulfite treated nucleic acid for analysis of methylation status of SEQ ID NO: 41
aaacgataaaactcccgtaaatc

SEQ ID NO: 2811 - DNA, 22 bp, Artificial Sequence
  bisulfite treated nucleic acid for analysis of methylation status of SEQ ID NO: 41
tatagtttcgagtttgacggtt

SEQ ID NO: 2812 - DNA, 24 bp, Artificial Sequence
  bisulfite treated nucleic acid for analysis of methylation status of SEQ ID NO: 41
ttctaaacgaaacgataaaactcc

SEQ ID NO: 2813 - DNA, 37 bp, Artificial Sequence
  bisulfite treated nucleic acid for analysis of methylation status of SEQ ID NO: 41
gtcggttggggcgtaaagattgttttgggatttacgg

SEQ ID NO: 2814 - DNA, 21 bp, Artificial Sequence
  bisulfite treated nucleic acid for analysis of methylation status of SEQ ID NO: 41
cgataaaactcccgtaaatcc

SEQ ID NO: 2815 - DNA, 22 bp, Artificial Sequence
  bisulfite treated nucleic acid for analysis of methylation status of SEQ ID NO: 41
gcgttattttagtagggttcgt

SEQ ID NO: 2816 - DNA, 22 bp, Artificial Sequence
  bisulfite treated nucleic acid for analysis of methylation status of SEQ ID NO: 41
cgattaaaactcgaaacgacaa

SEQ ID NO: 2817 - DNA, 21 bp, Artificial Sequence
  bisulfite treated nucleic acid for analysis of methylation status of SEQ ID NO: 41
gtcgcgtgttttgatatacga

SEQ ID NO: 2818 - DNA, 22 bp, Artificial Sequence
  bisulfite treated nucleic acid for analysis of methylation status of SEQ ID NO: 41
aataaattccaacgacacaacg

SEQ ID NO: 2819 - DNA, 24 bp, Artificial Sequence
  bisulfite treated nucleic acid for analysis of methylation status of SEQ ID NO: 41
agggaggcgggatcgtgaggttgt

SEQ ID NO: 2820 - DNA, 23 bp, Artificial Sequence
  bisulfite treated nucleic acid for analysis of methylation status of SEQ ID NO: 41
tacatattcttcgctaacgtcaa

SEQ ID NO: 2821 - DNA, 21 bp, Artificial Sequence
  bisulfite treated nucleic acid for analysis of methylation status of SEQ ID NO: 41
ctcgctttcctacgtccaata

SEQ ID NO: 2822 - DNA, 27 bp, Artificial Sequence
  bisulfite treated nucleic acid for analysis of methylation status of SEQ ID NO: 41
tttcgtgtttttgggcgtagcgttgga

SEQ ID NO: 2823 - DNA, 23 bp, Artificial Sequence
  bisulfite treated nucleic acid for analysis of methylation status of SEQ ID NO: 41
tctaaacgaaacgataaaactcc

SEQ ID NO: 2824 - DNA, 22 bp, Artificial Sequence
  bisulfite treated nucleic acid for analysis of methylation status of SEQ ID NO: 41
cgtttgtacggtttaagattga

SEQ ID NO: 2825 - DNA, 22 bp, Artificial Sequence
  bisulfite treated nucleic acid for analysis of methylation status of SEQ ID NO: 41
tataaaactaacgacacgccga

SEQ ID NO: 2826 - DNA, 28 bp, Artificial Sequence
  bisulfite treated nucleic acid for analysis of methylation status of SEQ ID NO: 41
ttcggggtaggttgaagacgttttgggg

SEQ ID NO: 2827 - DNA, 20 bp, Artificial Sequence
  bisulfite treated nucleic acid for analysis of methylation status of SEQ ID NO: 41
tcgctttcctacgtccaata

SEQ ID NO: 2828 - DNA, 22 bp, Artificial Sequence
  bisulfite treated nucleic acid for analysis of methylation status of SEQ ID NO: 41
aacgataaaactcccgtaaatc

SEQ ID NO: 2829 - DNA, 21 bp, Artificial Sequence
  bisulfite treated nucleic acid for analysis of methylation status of SEQ ID NO: 41
tactacttccaacgctacgcc

SEQ ID NO: 2830 - DNA, 21 bp, Artificial Sequence
  bisulfite treated nucleic acid for analysis of methylation status of SEQ ID NO: 41
gtattggacgtaggaaagcga

SEQ ID NO: 2831 - DNA, 21 bp, Artificial Sequence
  bisulfite treated nucleic acid for analysis of methylation status of SEQ ID NO: 41
gtatatcaaaacacgcgaccc

SEQ ID NO: 2832 - DNA, 23 bp, Artificial Sequence
  bisulfite treated nucleic acid for analysis of methylation status of SEQ ID NO: 41
gtagtattggacgtaggaaagcg

SEQ ID NO: 2833 - DNA, 20 bp, Artificial Sequence
  bisulfite treated nucleic acid for analysis of methylation status of SEQ ID NO: 41
cgggtttcgtattttggttt

SEQ ID NO: 2834 - DNA, 20 bp, Artificial Sequence
  bisulfite treated nucleic acid for analysis of methylation status of SEQ ID NO: 41
tattggacgtaggaaagcga

SEQ ID NO: 2835 - DNA, 20 bp, Artificial Sequence
  bisulfite treated nucleic acid for analysis of methylation status of SEQ ID NO: 41
tatatcaaaacacgcgaccc

SEQ ID NO: 2836 - DNA, 23 bp, Artificial Sequence
  bisulfite treated nucleic acid for analysis of methylation status of SEQ ID NO: 41
attaaaactcgaaacgacaaacg

SEQ ID NO: 2837 - DNA, 21 bp, Artificial Sequence
  bisulfite treated nucleic acid for analysis of methylation status of SEQ ID NO: 41
gacttctcgctttcctacgtc

SEQ ID NO: 2838 - DNA, 20 bp, Artificial Sequence
  bisulfite treated nucleic acid for analysis of methylation status of SEQ ID NO: 41
tcgcgtgttttgatatacga

SEQ ID NO: 2839 - DNA, 21 bp, Artificial Sequence
  bisulfite treated nucleic acid for analysis of methylation status of SEQ ID NO: 41
tcgtatatcaaaacacgcgac

SEQ ID NO: 2840 - DNA, 21 bp, Artificial Sequence
  bisulfite treated nucleic acid for analysis of methylation status of SEQ ID NO: 41
gcgtagcgttggaagtagtat

SEQ ID NO: 2841 - DNA, 23 bp, Artificial Sequence
  bisulfite treated nucleic acid for analysis of methylation status of SEQ ID NO: 41
tacgtccaatactacttccaacg

SEQ ID NO: 2842 - DNA, 21 bp, Artificial Sequence
  bisulfite treated nucleic acid for analysis of methylation status of SEQ ID NO: 41
ataaattccaacgacacaacg

SEQ ID NO: 2843 - DNA, 21 bp, Artificial Sequence
  bisulfite treated nucleic acid for analysis of methylation status of SEQ ID NO: 41
tattggacgtaggaaagcgag

SEQ ID NO: 2844 - DNA, 21 bp, Artificial Sequence
  bisulfite treated nucleic acid for analysis of methylation status of SEQ ID NO: 41
accgacttctcgctttcctac

SEQ ID NO: 2845 - DNA, 21 bp, Artificial Sequence
  bisulfite treated nucleic acid for analysis of methylation status of SEQ ID NO: 41
acttctcgctttcctacgtcc

SEQ ID NO: 2846 - DNA, 21 bp, Artificial Sequence
  bisulfite treated nucleic acid for analysis of methylation status of SEQ ID NO: 41
cgagaagcgttcgttagtagt

SEQ ID NO: 2847 - DNA, 22 bp, Artificial Sequence
  bisulfite treated nucleic acid for analysis of methylation status of SEQ ID NO: 41
aaacccgaatctacgctaaaac

SEQ ID NO: 2848 - DNA, 24 bp, Artificial Sequence
  bisulfite treated nucleic acid for analysis of methylation status of SEQ ID NO: 41
agaggagcgcgcgggtttcgtatt

SEQ ID NO: 2849 - DNA, 24 bp, Artificial Sequence
  bisulfite treated nucleic acid for analysis of methylation status of SEQ ID NO: 41
atacatattcttcgctaacgtcaa

SEQ ID NO: 2850 - DNA, 21 bp, Artificial Sequence
  bisulfite treated nucleic acid for analysis of methylation status of SEQ ID NO: 41
gggtcgcgtgttttgatatac

SEQ ID NO: 2851 - DNA, 21 bp, Artificial Sequence
  bisulfite treated nucleic acid for analysis of methylation status of SEQ ID NO: 41
cgagcgtttgtacggtttaag

SEQ ID NO: 2852 - DNA, 22 bp, Artificial Sequence
  bisulfite treated nucleic acid for analysis of methylation status of SEQ ID NO: 41
cgctaacgtcaatcgaaactat

SEQ ID NO: 2853 - DNA, 24 bp, Artificial Sequence
  bisulfite treated nucleic acid for analysis of methylation status of SEQ ID NO: 41
tagttatagtttcgagtttgacgg

SEQ ID NO: 2854 - DNA, 19 bp, Artificial Sequence
  bisulfite treated nucleic acid for analysis of methylation status of SEQ ID NO: 41
ttctcgctttcctacgtcc

SEQ ID NO: 2855 - DNA, 21 bp, Artificial Sequence
  bisulfite treated nucleic acid for analysis of methylation status of SEQ ID NO: 41
gcgagaagcgttcgttagtag

SEQ ID NO: 2856 - DNA, 21 bp, Artificial Sequence
  bisulfite treated nucleic acid for analysis of methylation status of SEQ ID NO: 41
aaacccgaatctacgctaaaa

SEQ ID NO: 2857 - DNA, 35 bp, Artificial Sequence
  bisulfite treated nucleic acid for analysis of methylation status of SEQ ID NO: 41
aagaggagcgcgcgggtttcgtattttggtttcgt

SEQ ID NO: 2858 - DNA, 21 bp, Artificial Sequence
  bisulfite treated nucleic acid for analysis of methylation status of SEQ ID NO: 41
aaaacccgaatctacgctaaa

SEQ ID NO: 2859 - DNA, 21 bp, Artificial Sequence
  bisulfite treated nucleic acid for analysis of methylation status of SEQ ID NO: 41
tattttggtttcgtgtttcgg

SEQ ID NO: 2860 - DNA, 20 bp, Artificial Sequence
  bisulfite treated nucleic acid for analysis of methylation status of SEQ ID NO: 41
ccgacttctcgctttcctac

SEQ ID NO: 2861 - DNA, 20 bp, Artificial Sequence
  bisulfite treated nucleic acid for analysis of methylation status of SEQ ID NO: 41
cttctcgctttcctacgtcc

SEQ ID NO: 2862 - DNA, 20 bp, Artificial Sequence
  bisulfite treated nucleic acid for analysis of methylation status of SEQ ID NO: 41
tcgtatatcaaaacacgcga

SEQ ID NO: 2863 - DNA, 21 bp, Artificial Sequence
  bisulfite treated nucleic acid for analysis of methylation status of SEQ ID NO: 41
cgaaacgataaaactcccgta

SEQ ID NO: 2864 - DNA, 21 bp, Artificial Sequence
  bisulfite treated nucleic acid for analysis of methylation status of SEQ ID NO: 41
ttcgtatatcaaaacacgcga

SEQ ID NO: 2865 - DNA, 21 bp, Artificial Sequence
  bisulfite treated nucleic acid for analysis of methylation status of SEQ ID NO: 41
cgtccaatactacttccaacg

SEQ ID NO: 2866 - DNA, 21 bp, Artificial Sequence
  bisulfite treated nucleic acid for analysis of methylation status of SEQ ID NO: 41
atagtttcgagtttgacggtt

SEQ ID NO: 2867 - DNA, 24 bp, Artificial Sequence
  bisulfite treated nucleic acid for analysis of methylation status of SEQ ID NO: 41
cgttggaagtagtattggacgtag

SEQ ID NO: 2868 - DNA, 21 bp, Artificial Sequence
  bisulfite treated nucleic acid for analysis of methylation status of SEQ ID NO: 41
ataaaactaacgacacgccga

SEQ ID NO: 2869 - DNA, 20 bp, Artificial Sequence
  bisulfite treated nucleic acid for analysis of methylation status of SEQ ID NO: 41
cgtatatcaaaacacgcgac

SEQ ID NO: 2870 - DNA, 21 bp, Artificial Sequence
  bisulfite treated nucleic acid for analysis of methylation status of SEQ ID NO: 41
ggacgtaggaaagcgagaagt

SEQ ID NO: 2871 - DNA, 21 bp, Artificial Sequence
  bisulfite treated nucleic acid for analysis of methylation status of SEQ ID NO: 41
gtaggaaagcgagaagtcggt

SEQ ID NO: 2872 - DNA, 20 bp, Artificial Sequence
  bisulfite treated nucleic acid for analysis of methylation status of SEQ ID NO: 41
actacttccaacgctacgcc

SEQ ID NO: 2873 - DNA, 23 bp, Artificial Sequence
  bisulfite treated nucleic acid for analysis of methylation status of SEQ ID NO: 41
catattcttcgctaacgtcaatc

SEQ ID NO: 2874 - DNA, 25 bp, Artificial Sequence
  bisulfite treated nucleic acid for analysis of methylation status of SEQ ID NO: 41
attctaaacgaaacgataaaactcc

SEQ ID NO: 2875 - DNA, 19 bp, Artificial Sequence
  bisulfite treated nucleic acid for analysis of methylation status of SEQ ID NO: 41
ctacttccaacgctacgcc

SEQ ID NO: 2876 - DNA, 20 bp, Artificial Sequence
  bisulfite treated nucleic acid for analysis of methylation status of SEQ ID NO: 41
taggaaagcgagaagtcggt

SEQ ID NO: 2877 - DNA, 19 bp, Artificial Sequence
  bisulfite treated nucleic acid for analysis of methylation status of SEQ ID NO: 41
atatcaaaacacgcgaccc

SEQ ID NO: 2878 - DNA, 25 bp, Artificial Sequence
  nucleic acid for analysis of methylation status of SEQ ID NO: 41
atagttatagtttcgagtttgacgg

SEQ ID NO: 2879 - DNA, 23 bp, Artificial Sequence
  bisulfite treated nucleic acid for analysis of methylation status of SEQ ID NO: 41
atataaaactaacgacacgccga

SEQ ID NO: 2880 - DNA, 21 bp, Artificial Sequence
  bisulfite treated nucleic acid for analysis of methylation status of SEQ ID NO: 41
aacccgaatctacgctaaaac

SEQ ID NO: 2881 - DNA, 21 bp, Artificial Sequence
  bisulfite treated nucleic acid for analysis of methylation status of SEQ ID NO: 41
gagcgtttgtacggtttaaga

SEQ ID NO: 2882 - DNA, 23 bp, Artificial Sequence
  bisulfite treated nucleic acid for analysis of methylation status of SEQ ID NO: 41
gctaacgtcaatcgaaactatcc

SEQ ID NO: 2883 - DNA, 21 bp, Artificial Sequence
  bisulfite treated nucleic acid for analysis of methylation status of SEQ ID NO: 41
catattcttcgctaacgtcaa

SEQ ID NO: 2884 - DNA, 21 bp, Artificial Sequence
  bisulfite treated nucleic acid for analysis of methylation status of SEQ ID NO: 41
tcgctttcctacgtccaatac

SEQ ID NO: 2885 - DNA, 19 bp, Artificial Sequence
  bisulfite treated nucleic acid for analysis of methylation status of SEQ ID NO: 41
attggacgtaggaaagcga

SEQ ID NO: 2886 - DNA, 19 bp, Artificial Sequence
  bisulfite treated nucleic acid for analysis of methylation status of SEQ ID NO: 41
ggcgtagcgttggaagtag

SEQ ID NO: 2887 - DNA, 23 bp, Artificial Sequence
  bisulfite treated nucleic acid for analysis of methylation status of SEQ ID NO: 41
cgctttcctacgtccaatactac

SEQ ID NO: 2888 - DNA, 23 bp, Artificial Sequence
  bisulfite treated nucleic acid for analysis of methylation status of SEQ ID NO: 41
ctaacgtcaatcgaaactatcct

SEQ ID NO: 2889 - DNA, 23 bp, Artificial Sequence
  bisulfite treated nucleic acid for analysis of methylation status of SEQ ID NO: 41
ctaaccgcgctactactcctaat

SEQ ID NO: 2890 - DNA, 23 bp, Artificial Sequence
  bisulfite treated nucleic acid for analysis of methylation status of SEQ ID NO: 41
cgtcaatcgaaactatcctaaca

SEQ ID NO: 2891 - DNA, 22 bp, Artificial Sequence
  bisulfite treated nucleic acid for analysis of methylation status of SEQ ID NO: 41
taacgtcaatcgaaactatcct

SEQ ID NO: 2892 - DNA, 21 bp, Artificial Sequence
  bisulfite treated nucleic acid for analysis of methylation status of SEQ ID NO: 41
gcgtttgtacggtttaagatt

SEQ ID NO: 2893 - DNA, 21 bp, Artificial Sequence
  bisulfite treated nucleic acid for analysis of methylation status of SEQ ID NO: 41
cgcgttattttagtagggttc

SEQ ID NO: 2894 - DNA, 21 bp, Artificial Sequence
  bisulfite treated nucleic acid for analysis of methylation status of SEQ ID NO: 41
taaaactcgaaacgacaaacg

SEQ ID NO: 2895 - DNA, 21 bp, Artificial Sequence
  bisulfite treated nucleic acid for analysis of methylation status of SEQ ID NO: 41
tcgcgttattttagtagggtt

SEQ ID NO: 2896 - DNA, 21 bp, Artificial Sequence
  bisulfite treated nucleic acid for analysis of methylation status of SEQ ID NO: 41
gcgttattttagtagggttcg

SEQ ID NO: 2897 - DNA, 20 bp, Artificial Sequence
  bisulfite treated nucleic acid for analysis of methylation status of SEQ ID NO: 41
acgcgacccgaactaatcta

SEQ ID NO: 2898 - DNA, 21 bp, Artificial Sequence
  bisulfite treated nucleic acid for analysis of methylation status of SEQ ID NO: 41
cgtttcgtttgttttatggtg

SEQ ID NO: 2899 - DNA, 20 bp, Artificial Sequence
  bisulfite treated nucleic acid for analysis of methylation status of SEQ ID NO: 41
acgacgcctacaactatccc

SEQ ID NO: 2900 - DNA, 34 bp, Artificial Sequence
  bisulfite treated nucleic acid for analysis of methylation status of SEQ ID NO: 41
tggatatataggggtagcgtagggtgaggtgcgt

SEQ ID NO: 2901 - DNA, 22 bp, Artificial Sequence
  bisulfite treated nucleic acid for analysis of methylation status of SEQ ID NO: 41
ctaaacgaaacgataaaactcc

SEQ ID NO: 2902 - DNA, 19 bp, Artificial Sequence
  bisulfite treated nucleic acid for analysis of methylation status of SEQ ID NO: 41
actaacgacacgccgaaac

SEQ ID NO: 2903 - DNA, 19 bp, Artificial Sequence
  bisulfite treated nucleic acid for analysis of methylation status of SEQ ID NO: 41
acgctactaaccgcgctac

SEQ ID NO: 2904 - DNA, 20 bp, Artificial Sequence
  bisulfite treated nucleic acid for analysis of methylation status of SEQ ID NO: 41
cggcgtgtcgttagttttat

SEQ ID NO: 2905 - DNA, 20 bp, Artificial Sequence
  bisulfite treated nucleic acid for analysis of methylation status of SEQ ID NO: 41
caaccgtcaaactcgaaact

SEQ ID NO: 2906 - DNA, 34 bp, Artificial Sequence
  bisulfite treated nucleic acid for analysis of methylation status of SEQ ID NO: 41
agtgttaggatagtttcgattgacgttagcgaag

SEQ ID NO: 2907 - DNA, 21 bp, Artificial Sequence
  bisulfite treated nucleic acid for analysis of methylation status of SEQ ID NO: 41
cgacccgaactaatctaatct

SEQ ID NO: 2908 - DNA, 30 bp, Artificial Sequence
  bisulfite treated nucleic acid for analysis of methylation status of SEQ ID NO: 41
ttagttttcgtgtttttgggcgtagcgttg

SEQ ID NO: 2909 - DNA, 19 bp, Artificial Sequence
  bisulfite treated nucleic acid for analysis of methylation status of SEQ ID NO: 41
cgacgcctacaactatccc

SEQ ID NO: 2910 - DNA, 36 bp, Artificial Sequence
  bisulfite treated nucleic acid for analysis of methylation status of SEQ ID NO: 41
gtcggttttggatatataggggtagcgtagggtgag

SEQ ID NO: 2911 - DNA, 19 bp, Artificial Sequence
  nucleic acid for analysis of methylation status of SEQ ID NO: 41
aacgctactaaccgcgcta

SEQ ID NO: 2912 - DNA, 22 bp, Artificial Sequence
  bisulfite treated nucleic acid for analysis of methylation status of SEQ ID NO: 41
gcggacgttttgagttatttat

SEQ ID NO: 2913 - DNA, 25 bp, Artificial Sequence
  bisulfite treated nucleic acid for analysis of methylation status of SEQ ID NO: 41
ggttgtcggcgagcgtttgtacggt

SEQ ID NO: 2914 - DNA, 19 bp, Artificial Sequence
  bisulfite treated nucleic acid for analysis of methylation status of SEQ ID NO: 41
cgcgacccgaactaatcta

SEQ ID NO: 2915 - DNA, 21 bp, Artificial Sequence
  bisulfite treated nucleic acid for analysis of methylation status of SEQ ID NO: 41
agcgtttgtacggtttaagat

SEQ ID NO: 2916 - DNA, 20 bp, Artificial Sequence
  bisulfite treated nucleic acid for analysis of methylation status of SEQ ID NO: 41
taaaactaacgacacgccga

SEQ ID NO: 2917 - DNA, 19 bp, Artificial Sequence
  bisulfite treated nucleic acid for analysis of methylation status of SEQ ID NO: 41
gaaagcgagaagtcggttg

SEQ ID NO: 2918 - DNA, 23 bp, Artificial Sequence
  bisulfite treated nucleic acid for analysis of methylation status of SEQ ID NO: 41
cgcgctactactcctaatacaac

SEQ ID NO: 2919 - DNA, 21 bp, Artificial Sequence
  bisulfite treated nucleic acid for analysis of methylation status of SEQ ID NO: 41
gagtcgaatatgatgcggttt

SEQ ID NO: 2920 - DNA, 21 bp, Artificial Sequence
  bisulfite treated nucleic acid for analysis of methylation status of SEQ ID NO: 41
cgacgaaacaacccttctcta

SEQ ID NO: 2921 - DNA, 30 bp, Artificial Sequence
  bisulfite treated nucleic acid for analysis of methylation status of SEQ ID NO: 41
ttgcgttcgcgttattttagtagggttcgt

SEQ ID NO: 2922 - DNA, 18 bp, Artificial Sequence
  bisulfite treated nucleic acid for analysis of methylation status of SEQ ID NO: 41
ttcgagtttgacggttgg

SEQ ID NO: 2923 - DNA, 20 bp, Artificial Sequence
  bisulfite treated nucleic acid for analysis of methylation status of SEQ ID NO: 41
acgtaggaaagcgagaagtc

SEQ ID NO: 2924 - DNA, 18 bp, Artificial Sequence
  bisulfite treated nucleic acid for analysis of methylation status of SEQ ID NO: 41
tatcaaaacacgcgaccc

SEQ ID NO: 2925 - DNA, 24 bp, Artificial Sequence
  bisulfite treated nucleic acid for analysis of methylation status of SEQ ID NO: 41
aaagcgagaagtcggttggggcgt

SEQ ID NO: 2926 - DNA, 20 bp, Artificial Sequence
  bisulfite treated nucleic acid for analysis of methylation status of SEQ ID NO: 41
caaaacccgaatctacgcta

SEQ ID NO: 2927 - DNA, 21 bp, Artificial Sequence
  bisulfite treated nucleic acid for analysis of methylation status of SEQ ID NO: 41
aaccgcgctactactcctaat

SEQ ID NO: 2928 - DNA, 20 bp, Artificial Sequence
  bisulfite treated nucleic acid for analysis of methylation status of SEQ ID NO: 41
taaattccaacgacacaacg

SEQ ID NO: 2929 - DNA, 18 bp, Artificial Sequence
  bisulfite treated nucleic acid for analysis of methylation status of SEQ ID NO: 41
tttggtttcgtgtttcgg

SEQ ID NO: 2930 - DNA, 21 bp, Artificial Sequence
  bisulfite treated nucleic acid for analysis of methylation status of SEQ ID NO: 41
caaaacccgaatctacgctaa

SEQ ID NO: 2931 - DNA, 19 bp, Artificial Sequence
  bisulfite treated nucleic acid for analysis of methylation status of SEQ ID NO: 41
gtttcgagtttgacggttg

SEQ ID NO: 2932 - DNA, 19 bp, Artificial Sequence
  bisulfite treated nucleic acid for analysis of methylation status of SEQ ID NO: 41
aacgcaacgctactaaccg

SEQ ID NO: 2933 - DNA, 20 bp, Artificial Sequence
  bisulfite treated nucleic acid for analysis of methylation status of SEQ ID NO: 41
aacgaaacgataaaactccc

SEQ ID NO: 2934 - DNA, 23 bp, Artificial Sequence
  bisulfite treated nucleic acid for analysis of methylation status of SEQ ID NO: 41
ccgcgctactactcctaatacaa

SEQ ID NO: 2935 - DNA, 20 bp, Artificial Sequence
  bisulfite treated nucleic acid for analysis of methylation status of SEQ ID NO: 41
aacgctactaaccgcgctac

SEQ ID NO: 2936 - DNA, 18 bp, Artificial Sequence
  bisulfite treated nucleic acid for analysis of methylation status of SEQ ID NO: 41
aactaacgacacgccgaa

SEQ ID NO: 2937 - DNA, 18 bp, Artificial Sequence
  bisulfite treated nucleic acid for analysis of methylation status of SEQ ID NO: 41
ctaacgacacgccgaaac

SEQ ID NO: 2938 - DNA, 18 bp, Artificial Sequence
  bisulfite treated nucleic acid for analysis of methylation status of SEQ ID NO: 41
aaactaacgacacgccga

SEQ ID NO: 2939 - DNA, 18 bp, Artificial Sequence
  bisulfite treated nucleic acid for analysis of methylation status of SEQ ID NO: 41
ttcggagggcgtattttt

SEQ ID NO: 2940 - DNA, 42 bp, Artificial Sequence
  bisulfite treated nucleic acid for analysis of methylation status of SEQ ID NO: 41
agcgttggaagtagtattggacgtaggaaagcgagaagtcgg

SEQ ID NO: 2941 - DNA, 22 bp, Artificial Sequence
  bisulfite treated nucleic acid for analysis of methylation status of SEQ ID NO: 41
actaaacgaacgctctaaacca

SEQ ID NO: 2942 - DNA, 22 bp, Artificial Sequence
  bisulfite treated nucleic acid for analysis of methylation status of SEQ ID NO: 41
atacgtcgggatagattttgtg

SEQ ID NO: 2943 - DNA, 33 bp, Artificial Sequence
  bisulfite treated nucleic acid for analysis of methylation status of SEQ ID NO: 41
aggcgtttttagtttgtttcgagggatagagat

SEQ ID NO: 2944 - DNA, 22 bp, Artificial Sequence
  bisulfite treated nucleic acid for analysis of methylation status of SEQ ID NO: 41
taaacgaacgctctaaaccact

SEQ ID NO: 2945 - DNA, 22 bp, Artificial Sequence
  bisulfite treated nucleic acid for analysis of methylation status of SEQ ID NO: 41
tacgtcgggatagattttgtgt

SEQ ID NO: 2946 - DNA, 22 bp, Artificial Sequence
  bisulfite treated nucleic acid for analysis of methylation status of SEQ ID NO: 41
ctaaacgaacgctctaaaccac

SEQ ID NO: 2947 - DNA, 22 bp, Artificial Sequence
  bisulfite treated nucleic acid for analysis of methylation status of SEQ ID NO: 41
gatacgtcgggatagattttgt

SEQ ID NO: 2948 - DNA, 21 bp, Artificial Sequence
  bisulfite treated nucleic acid for analysis of methylation status of SEQ ID NO: 41
aaacgaacgctctaaaccact

SEQ ID NO: 2949 - DNA, 21 bp, Artificial Sequence
  bisulfite treated nucleic acid for analysis of methylation status of SEQ ID NO: 41
cgatacgtcgggatagatttt

SEQ ID NO: 2950 - DNA, 22 bp, Artificial Sequence
  bisulfite treated nucleic acid for analysis of methylation status of SEQ ID NO: 41
aacaactccgactaacgtcaac

SEQ ID NO: 2951 - DNA, 22 bp, Artificial Sequence
  bisulfite treated nucleic acid for analysis of methylation status of SEQ ID NO: 41
ttacgtttaggggtacgaaggt

SEQ ID NO: 2952 - DNA, 37 bp, Artificial Sequence
  bisulfite treated nucleic acid for analysis of methylation status of SEQ ID NO: 41
tgcgtttttcggggttcgttagtcgttagattcgaag

SEQ ID NO: 2953 - DNA, 21 bp, Artificial Sequence
  bisulfite treated nucleic acid for analysis of methylation status of SEQ ID NO: 41
acgtcgggatagattttgtgt

SEQ ID NO: 2954 - DNA, 21 bp, Artificial Sequence
  bisulfite treated nucleic acid for analysis of methylation status of SEQ ID NO: 41
tacgtttaggggtacgaaggt

SEQ ID NO: 2955 - DNA, 22 bp, Artificial Sequence
  bisulfite treated nucleic acid for analysis of methylation status of SEQ ID NO: 41
aactaaacgaacgctctaaacc

SEQ ID NO: 2956 - DNA, 21 bp, Artificial Sequence
  bisulfite treated nucleic acid for analysis of methylation status of SEQ ID NO: 41
ctaaacgaacgctctaaacca

SEQ ID NO: 2957 - DNA, 22 bp, Artificial Sequence
  bisulfite treated nucleic acid for analysis of methylation status of SEQ ID NO: 41
aaacaactccgactaacgtcaa

SEQ ID NO: 2958 - DNA, 22 bp, Artificial Sequence
  bisulfite treated nucleic acid for analysis of methylation status of SEQ ID NO: 41
gttacgtttaggggtacgaagg

SEQ ID NO: 2959 - DNA, 22 bp, Artificial Sequence
  bisulfite treated nucleic acid for analysis of methylation status of SEQ ID NO: 41
tacgtttaggggtacgaaggtt

SEQ ID NO: 2960 - DNA, 21 bp, Artificial Sequence
  bisulfite treated nucleic acid for analysis of methylation status of SEQ ID NO: 41
aacgaacgctctaaaccactc

SEQ ID NO: 2961 - DNA, 21 bp, Artificial Sequence
  bisulfite treated nucleic acid for analysis of methylation status of SEQ ID NO: 41
cgtcgggatagattttgtgtt

SEQ ID NO: 2962 - DNA, 22 bp, Artificial Sequence
  bisulfite treated nucleic acid for analysis of methylation status of SEQ ID NO: 41
cacaaaatctatcccgacgtat

SEQ ID NO: 2963 - DNA, 20 bp, Artificial Sequence
  bisulfite treated nucleic acid for analysis of methylation status of SEQ ID NO: 41
gtttttcggggttcgttagt

SEQ ID NO: 2964 - DNA, 30 bp, Artificial Sequence
  bisulfite treated nucleic acid for analysis of methylation status of SEQ ID NO: 41
ttcgttgacgttagtcggagttgttttggt

SEQ ID NO: 2965 - DNA, 23 bp, Artificial Sequence
  bisulfite treated nucleic acid for analysis of methylation status of SEQ ID NO: 41
aacgtcaacgaaaaacatacact

SEQ ID NO: 2966 - DNA, 23 bp, Artificial Sequence
  bisulfite treated nucleic acid for analysis of methylation status of SEQ ID NO: 41
aactaaacgaacgctctaaacca

SEQ ID NO: 2967 - DNA, 21 bp, Artificial Sequence
  bisulfite treated nucleic acid for analysis of methylation status of SEQ ID NO: 41
cgactaacgtcaacgaaaaac

SEQ ID NO: 2968 - DNA, 21 bp, Artificial Sequence
  bisulfite treated nucleic acid for analysis of methylation status of SEQ ID NO: 41
aacaactccgactaacgtcaa

SEQ ID NO: 2969 - DNA, 22 bp, Artificial Sequence
  bisulfite treated nucleic acid for analysis of methylation status of SEQ ID NO: 41
acgtcaacgaaaaacatacact

SEQ ID NO: 2970 - DNA, 20 bp, Artificial Sequence
  bisulfite treated nucleic acid for analysis of methylation status of SEQ ID NO: 41
cgtcgggatagattttgtgt

SEQ ID NO: 2971 - DNA, 22 bp, Artificial Sequence
  bisulfite treated nucleic acid for analysis of methylation status of SEQ ID NO: 41
acacaaaatctatcccgacgta

SEQ ID NO: 2972 - DNA, 20 bp, Artificial Sequence
  bisulfite treated nucleic acid for analysis of methylation status of SEQ ID NO: 41
acgtttaggggtacgaaggt

SEQ ID NO: 2973 - DNA, 22 bp, Artificial Sequence
  bisulfite treated nucleic acid for analysis of methylation status of SEQ ID NO: 41
cgttacgtttaggggtacgaag

SEQ ID NO: 2974 - DNA, 20 bp, Artificial Sequence
  bisulfite treated nucleic acid for analysis of methylation status of SEQ ID NO: 41
cgtttaggggtacgaaggtt

SEQ ID NO: 2975 - DNA, 23 bp, Artificial Sequence
  bisulfite treated nucleic acid for analysis of methylation status of SEQ ID NO: 41
cgtcaacgaaaaacatacactaa

SEQ ID NO: 2976 - DNA, 23 bp, Artificial Sequence
  bisulfite treated nucleic acid for analysis of methylation status of SEQ ID NO: 41
ctaacgtcaacgaaaaacataca

SEQ ID NO: 2977 - DNA, 22 bp, Artificial Sequence
  bisulfite treated nucleic acid for analysis of methylation status of SEQ ID NO: 41
acaaaatctatcccgacgtatc

SEQ ID NO: 2978 - DNA, 22 bp, Artificial Sequence
  bisulfite treated nucleic acid for analysis of methylation status of SEQ ID NO: 41
gactaacgtcaacgaaaaacat

SEQ ID NO: 2979 - DNA, 21 bp, Artificial Sequence
  bisulfite treated nucleic acid for analysis of methylation status of SEQ ID NO: 41
acgaacgctctaaaccactca

SEQ ID NO: 2980 - DNA, 22 bp, Artificial Sequence
  bisulfite treated nucleic acid for analysis of methylation status of SEQ ID NO: 41
taacgtcaacgaaaaacataca

SEQ ID NO: 2981 - DNA, 21 bp, Artificial Sequence
  bisulfite treated nucleic acid for analysis of methylation status of SEQ ID NO: 41
acgcaaactcgaatcctaaac

SEQ ID NO: 2982 - DNA, 21 bp, Artificial Sequence
  bisulfite treated nucleic acid for analysis of methylation status of SEQ ID NO: 41
gtcggcggtattatgaggtag

SEQ ID NO: 2983 - DNA, 24 bp, Artificial Sequence
  bisulfite treated nucleic acid for analysis of methylation status of SEQ ID NO: 41
gggacgtagcgttgttggtcgcgt

SEQ ID NO: 2984 - DNA, 20 bp, Artificial Sequence
  bisulfite treated nucleic acid for analysis of methylation status of SEQ ID NO: 41
cgcctcgaaactcctctaac

SEQ ID NO: 2985 - DNA, 22 bp, Artificial Sequence
  bisulfite treated nucleic acid for analysis of methylation status of SEQ ID NO: 41
ttaggcgtattttattttgcgt

SEQ ID NO: 2986 - DNA, 29 bp, Artificial Sequence
  bisulfite treated nucleic acid for analysis of methylation status of SEQ ID NO: 41
tgtgtttagggtcggcggtattatgaggt

SEQ ID NO: 2987 - DNA, 20 bp, Artificial Sequence
  bisulfite treated nucleic acid for analysis of methylation status of SEQ ID NO: 41
tttttcggggttcgttagtc

SEQ ID NO: 2988 - DNA, 20 bp, Artificial Sequence
  bisulfite treated nucleic acid for analysis of methylation status of SEQ ID NO: 41
cgaacgctctaaaccactca

SEQ ID NO: 2989 - DNA, 24 bp, Artificial Sequence
  bisulfite treated nucleic acid for analysis of methylation status of SEQ ID NO: 41
actaacgtcaacgaaaaacataca

SEQ ID NO: 2990 - DNA, 22 bp, Artificial Sequence
  bisulfite treated nucleic acid for analysis of methylation status of SEQ ID NO: 41
aaaactaaacgaacgctctaaa

SEQ ID NO: 2991 - DNA, 21 bp, Artificial Sequence
  bisulfite treated nucleic acid for analysis of methylation status of SEQ ID NO: 41
acgtttaggggtacgaaggtt

SEQ ID NO: 2992 - DNA, 21 bp, Artificial Sequence
  bisulfite treated nucleic acid for analysis of methylation status of SEQ ID NO: 41
acaactccgactaacgtcaac

SEQ ID NO: 2993 - DNA, 20 bp, Artificial Sequence
  bisulfite treated nucleic acid for analysis of methylation status of SEQ ID NO: 41
gcgatacgtcgggatagatt

SEQ ID NO: 2994 - DNA, 19 bp, Artificial Sequence
  bisulfite treated nucleic acid for analysis of methylation status of SEQ ID NO: 41
cgcctcgaaactcctctaa

SEQ ID NO: 2995 - DNA, 22 bp, Artificial Sequence
  bisulfite treated nucleic acid for analysis of methylation status of SEQ ID NO: 41
taggcgtattttattttgcgtt

SEQ ID NO: 2996 - DNA, 21 bp, Artificial Sequence
  bisulfite treated nucleic acid for analysis of methylation status of SEQ ID NO: 41
atataaggttggcgatacgtc

SEQ ID NO: 2997 - DNA, 22 bp, Artificial Sequence
  bisulfite treated nucleic acid for analysis of methylation status of SEQ ID NO: 41
aacgcaaactcgaatcctaaac

SEQ ID NO: 2998 - DNA, 23 bp, Artificial Sequence
  bisulfite treated nucleic acid for analysis of methylation status of SEQ ID NO: 41
atacgtcgggatagattttgtgt

SEQ ID NO: 2999 - DNA, 20 bp, Artificial Sequence
  bisulfite treated nucleic acid for analysis of methylation status of SEQ ID NO: 41
actccgactaacgtcaacga

SEQ ID NO: 3000 - DNA, 19 bp, Artificial Sequence
  bisulfite treated nucleic acid for analysis of methylation status of SEQ ID NO: 41
ttttcggggttcgttagtc

SEQ ID NO: 3001 - DNA, 20 bp, Artificial Sequence
  bisulfite treated nucleic acid for analysis of methylation status of SEQ ID NO: 41
acgaacgctctaaaccactc

SEQ ID NO: 3002 - DNA, 21 bp, Artificial Sequence
  bisulfite treated nucleic acid for analysis of methylation status of SEQ ID NO: 41
cgaacgctctaaaccactcac

SEQ ID NO: 3003 - DNA, 20 bp, Artificial Sequence
  bisulfite treated nucleic acid for analysis of methylation status of SEQ ID NO: 41
tcggcggtattatgaggtag

SEQ ID NO: 3004 - DNA, 21 bp, Artificial Sequence
  bisulfite treated nucleic acid for analysis of methylation status of SEQ ID NO: 41
ccaaaacaactccgactaacg

SEQ ID NO: 3005 - DNA, 19 bp, Artificial Sequence
  bisulfite treated nucleic acid for analysis of methylation status of SEQ ID NO: 41
cggggttcgttagtcgtta

SEQ ID NO: 3006 - DNA, 21 bp, Artificial Sequence
  bisulfite treated nucleic acid for analysis of methylation status of SEQ ID NO: 41
aactccgactaacgtcaacga

SEQ ID NO: 3007 - DNA, 20 bp, Artificial Sequence
  bisulfite treated nucleic acid for analysis of methylation status of SEQ ID NO: 41
ccgactaacgtcaacgaaaa

SEQ ID NO: 3008 - DNA, 20 bp, Artificial Sequence
  bisulfite treated nucleic acid for analysis of methylation status of SEQ ID NO: 41
ctccgactaacgtcaacgaa

SEQ ID NO: 3009 - DNA, 25 bp, Artificial Sequence
  bisulfite treated nucleic acid for analysis of methylation status of SEQ ID NO: 41
ggacgtagcgttgttggtcgcgttg

SEQ ID NO: 3010 - DNA, 21 bp, Artificial Sequence
  bisulfite treated nucleic acid for analysis of methylation status of SEQ ID NO: 41
ctaattccgtaccccgaaact

SEQ ID NO: 3011 - DNA, 22 bp, Artificial Sequence
  bisulfite treated nucleic acid for analysis of methylation status of SEQ ID NO: 41
cgcgttgttgtttttggtatag

SEQ ID NO: 3012 - DNA, 30 bp, Artificial Sequence
  bisulfite treated nucleic acid for analysis of methylation status of SEQ ID NO: 41
ggcggtcgggtttaggattcgagtttgcgt

SEQ ID NO: 3013 - DNA, 20 bp, Artificial Sequence
  bisulfite treated nucleic acid for analysis of methylation status of SEQ ID NO: 41
taattccgtaccccgaaact

SEQ ID NO: 3014 - DNA, 20 bp, Artificial Sequence
  bisulfite treated nucleic acid for analysis of methylation status of SEQ ID NO: 41
aacgcaaactcgaatcctaa

SEQ ID NO: 3015 - DNA, 26 bp, Artificial Sequence
  bisulfite treated nucleic acid for analysis of methylation status of SEQ ID NO: 41
gttagaggagtttcgaggcggtcggg

SEQ ID NO: 3016 - DNA, 20 bp, Artificial Sequence
  bisulfite treated nucleic acid for analysis of methylation status of SEQ ID NO: 41
cgcaaactcgaatcctaaac

SEQ ID NO: 3017 - DNA, 19 bp, Artificial Sequence
  bisulfite treated nucleic acid for analysis of methylation status of SEQ ID NO: 41
gaccaacaacgctacgtcc

SEQ ID NO: 3018 - DNA, 19 bp, Artificial Sequence
  bisulfite treated nucleic acid for analysis of methylation status of SEQ ID NO: 41
tccgactaacgtcaacgaa

SEQ ID NO: 3019 - DNA, 21 bp, Artificial Sequence
  bisulfite treated nucleic acid for analysis of methylation status of SEQ ID NO: 41
aggcgtattttattttgcgtt

SEQ ID NO: 3020 - DNA, 20 bp, Artificial Sequence
  bisulfite treated nucleic acid for analysis of methylation status of SEQ ID NO: 41
aactcgaatcctaaacccga

SEQ ID NO: 3021 - DNA, 19 bp, Artificial Sequence
  bisulfite treated nucleic acid for analysis of methylation status of SEQ ID NO: 41
tttttcggggttcgttagt

SEQ ID NO: 3022 - DNA, 21 bp, Artificial Sequence
  bisulfite treated nucleic acid for analysis of methylation status of SEQ ID NO: 41
cctcgaaacaaactaaaaacg

SEQ ID NO: 3023 - DNA, 20 bp, Artificial Sequence
  bisulfite treated nucleic acid for analysis of methylation status of SEQ ID NO: 41
cgttgacgttagtcggagtt

SEQ ID NO: 3024 - DNA, 30 bp, Artificial Sequence
  bisulfite treated nucleic acid for analysis of methylation status of SEQ ID NO: 41
aaggttggcgatacgtcgggatagattttg

SEQ ID NO: 3025 - DNA, 21 bp, Artificial Sequence
  bisulfite treated nucleic acid for analysis of methylation status of SEQ ID NO: 41
cgaaacaaactaaaaacgcct

SEQ ID NO: 3026 - DNA, 20 bp, Artificial Sequence
  bisulfite treated nucleic acid for analysis of methylation status of SEQ ID NO: 41
ttcgttgacgttagtcggag

SEQ ID NO: 3027 - DNA, 21 bp, Artificial Sequence
  bisulfite treated nucleic acid for analysis of methylation status of SEQ ID NO: 41
gttgacgttagtcggagttgt

SEQ ID NO: 3028 - DNA, 22 bp, Artificial Sequence
  bisulfite treated nucleic acid for analysis of methylation status of SEQ ID NO: 5
ggtattataggacggtcggttt

SEQ ID NO: 3029 - DNA, 22 bp, Artificial Sequence
  bisulfite treated nucleic acid for analysis of methylation status of SEQ ID NO: 5
accgaaataacaatcatcgaat

SEQ ID NO: 3030 - DNA, 37 bp, Artificial Sequence
  bisulfite treated nucleic acid for analysis of methylation status of SEQ ID NO: 5
ggacggtattattatatagtcgggttttcgtagtgtt

SEQ ID NO: 3031 - DNA, 23 bp, Artificial Sequence
  bisulfite treated nucleic acid for analysis of methylation status of SEQ ID NO: 5
ccgaaataacaatcatcgaatta

SEQ ID NO: 3032 - DNA, 22 bp, Artificial Sequence
  bisulfite treated nucleic acid for analysis of methylation status of SEQ ID NO: 5
ttataggacggtcggtttttat

SEQ ID NO: 3033 - DNA, 22 bp, Artificial Sequence
  bisulfite treated nucleic acid for analysis of methylation status of SEQ ID NO: 5
aattcgatgattgttatttcgg

SEQ ID NO: 3034 - DNA, 21 bp, Artificial Sequence
  bisulfite treated nucleic acid for analysis of methylation status of SEQ ID NO: 5
gataaaaacgccgtcctacac

SEQ ID NO: 3035 - DNA, 24 bp, Artificial Sequence
  bisulfite treated nucleic acid for analysis of methylation status of SEQ ID NO: 5
aggtggcgtttggtaggcgacgtt

SEQ ID NO: 3036 - DNA, 22 bp, Artificial Sequence
  bisulfite treated nucleic acid for analysis of methylation status of SEQ ID NO: 5
agtggtattataggacggtcgg

SEQ ID NO: 3037 - DNA, 21 bp, Artificial Sequence
  bisulfite treated nucleic acid for analysis of methylation status of SEQ ID NO: 5
gtggtattataggacggtcgg

SEQ ID NO: 3038 - DNA, 22 bp, Artificial Sequence
  bisulfite treated nucleic acid for analysis of methylation status of SEQ ID NO: 5
tggtattataggacggtcggtt

SEQ ID NO: 3039 - DNA, 22 bp, Artificial Sequence
  bisulfite treated nucleic acid for analysis of methylation status of SEQ ID NO: 5
attcgatgattgttatttcggt

SEQ ID NO: 3040 - DNA, 22 bp, Artificial Sequence
  bisulfite treated nucleic acid for analysis of methylation status of SEQ ID NO: 5
caccgaaataacaatcatcgaa

SEQ ID NO: 3041 - DNA, 23 bp, Artificial Sequence
  bisulfite treated nucleic acid for analysis of methylation status of SEQ ID NO: 5
attataggacggtcggtttttat

SEQ ID NO: 3042 - DNA, 23 bp, Artificial Sequence
  bisulfite treated nucleic acid for analysis of methylation status of SEQ ID NO: 5
taattcgatgattgttatttcgg

SEQ ID NO: 3043 - DNA, 23 bp, Artificial Sequence
  bisulfite treated nucleic acid for analysis of methylation status of SEQ ID NO: 5
tagtggtattataggacggtcgg

SEQ ID NO: 3044 - DNA, 20 bp, Artificial Sequence
  bisulfite treated nucleic acid for analysis of methylation status of SEQ ID NO: 5
gcgttgagatcgagaagaag

SEQ ID NO: 3045 - DNA, 22 bp, Artificial Sequence
  bisulfite treated nucleic acid for analysis of methylation status of SEQ ID NO: 5
cgaaatcccgaaaaactctaat

SEQ ID NO: 3046 - DNA, 33 bp, Artificial Sequence
  bisulfite treated nucleic acid for analysis of methylation status of SEQ ID NO: 5
gacgtttcggagaaagtgcgtttagttgatttt

SEQ ID NO: 3047 - DNA, 22 bp, Artificial Sequence
  bisulfite treated nucleic acid for analysis of methylation status of SEQ ID NO: 5
attataggacggtcggttttta

SEQ ID NO: 3048 - DNA, 21 bp, Artificial Sequence
  bisulfite treated nucleic acid for analysis of methylation status of SEQ ID NO: 5
cgatgattgttatttcggtga

SEQ ID NO: 3049 - DNA, 24 bp, Artificial Sequence
  bisulfite treated nucleic acid for analysis of methylation status of SEQ ID NO: 5
tattataggacggtcggtttttat

SEQ ID NO: 3050 - DNA, 20 bp, Artificial Sequence
  bisulfite treated nucleic acid for analysis of methylation status of SEQ ID NO: 5
ataaaaacgccgtcctacac

SEQ ID NO: 3051 - DNA, 21 bp, Artificial Sequence
  bisulfite treated nucleic acid for analysis of methylation status of SEQ ID NO: 5
acgaaatcccgaaaaactcta

SEQ ID NO: 3052 - DNA, 22 bp, Artificial Sequence
  bisulfite treated nucleic acid for analysis of methylation status of SEQ ID NO: 5
gtattataggacggtcggtttt

SEQ ID NO: 3053 - DNA, 21 bp, Artificial Sequence
  bisulfite treated nucleic acid for analysis of methylation status of SEQ ID NO: 5
ccgaaataacaatcatcgaat

SEQ ID NO: 3054 - DNA, 21 bp, Artificial Sequence
  bisulfite treated nucleic acid for analysis of methylation status of SEQ ID NO: 5
accgaaataacaatcatcgaa

SEQ ID NO: 3055 - DNA, 21 bp, Artificial Sequence
  bisulfite treated nucleic acid for analysis of methylation status of SEQ ID NO: 5
ttcgatgattgttatttcggt

SEQ ID NO: 3056 - DNA, 20 bp, Artificial Sequence
  bisulfite treated nucleic acid for analysis of methylation status of SEQ ID NO: 5
cgataaaaacgccgtcctac

SEQ ID NO: 3057 - DNA, 20 bp, Artificial Sequence
  bisulfite treated nucleic acid for analysis of methylation status of SEQ ID NO: 5
acgataaaaacgccgtccta

SEQ ID NO: 3058 - DNA, 40 bp, Artificial Sequence
  bisulfite treated nucleic acid for analysis of methylation status of SEQ ID NO: 5
ggcgtatatggttaggtggcgtttggtaggcgacgttcgg

SEQ ID NO: 3059 - DNA, 21 bp, Artificial Sequence
  bisulfite treated nucleic acid for analysis of methylation status of SEQ ID NO: 5
tcgatgattgttatttcggtg

SEQ ID NO: 3060 - DNA, 20 bp, Artificial Sequence
  bisulfite treated nucleic acid for analysis of methylation status of SEQ ID NO: 5
gataaaaacgccgtcctaca

SEQ ID NO: 3061 - DNA, 19 bp, Artificial Sequence
  bisulfite treated nucleic acid for analysis of methylation status of SEQ ID NO: 5
aggcgttgagatcgagaag

SEQ ID NO: 3062 - DNA, 29 bp, Artificial Sequence
  bisulfite treated nucleic acid for analysis of methylation status of SEQ ID NO: 5
gggacgtttcggagaaagtgcgtttagtt

SEQ ID NO: 3063 - DNA, 22 bp, Artificial Sequence
  bisulfite treated nucleic acid for analysis of methylation status of SEQ ID NO: 5
gacgaaatcccgaaaaactcta

SEQ ID NO: 3064 - DNA, 23 bp, Artificial Sequence
  bisulfite treated nucleic acid for analysis of methylation status of SEQ ID NO: 5
tattataggacggtcggttttta

SEQ ID NO: 3065 - DNA, 21 bp, Artificial Sequence
  bisulfite treated nucleic acid for analysis of methylation status of SEQ ID NO: 5
tataggacggtcggtttttat

SEQ ID NO: 3066 - DNA, 20 bp, Artificial Sequence
  bisulfite treated nucleic acid for analysis of methylation status of SEQ ID NO: 5
taaaaacgccgtcctacacc

SEQ ID NO: 3067 - DNA, 25 bp, Artificial Sequence
  bisulfite treated nucleic acid for analysis of methylation status of SEQ ID NO: 5
ttaggtggcgtttggtaggcgacgt

SEQ ID NO: 3068 - DNA, 24 bp, Artificial Sequence
  bisulfite treated nucleic acid for analysis of methylation status of SEQ ID NO: 5
tttaattcgatgattgttatttcg

SEQ ID NO: 3069 - DNA, 19 bp, Artificial Sequence
  bisulfite treated nucleic acid for analysis of methylation status of SEQ ID NO: 5
aaggcgttgagatcgagaa

SEQ ID NO: 3070 - DNA, 29 bp, Artificial Sequence
  bisulfite treated nucleic acid for analysis of methylation status of SEQ ID NO: 5
aagggacgtttcggagaaagtgcgtttag

SEQ ID NO: 3071 - DNA, 21 bp, Artificial Sequence
  bisulfite treated nucleic acid for analysis of methylation status of SEQ ID NO: 5
ttataggacggtcggttttta

SEQ ID NO: 3072 - DNA, 18 bp, Artificial Sequence
  bisulfite treated nucleic acid for analysis of methylation status of SEQ ID NO: 5
tttttattgcgtgtcggc

SEQ ID NO: 3073 - DNA, 22 bp, Artificial Sequence
  bisulfite treated nucleic acid for analysis of methylation status of SEQ ID NO: 5
ccgattctaatacgaaattcca

SEQ ID NO: 3074 - DNA, 22 bp, Artificial Sequence
  bisulfite treated nucleic acid for analysis of methylation status of SEQ ID NO: 5
ggcggtcgcggcgaggtttttg

SEQ ID NO: 3075 - DNA, 23 bp, Artificial Sequence
  bisulfite treated nucleic acid for analysis of methylation status of SEQ ID NO: 5
ttaattcgatgattgttatttcg

SEQ ID NO: 3076 - DNA, 20 bp, Artificial Sequence
  bisulfite treated nucleic acid for analysis of methylation status of SEQ ID NO: 5
gtaggaaggcgttgagatcg

SEQ ID NO: 3077 - DNA, 27 bp, Artificial Sequence
  bisulfite treated nucleic acid for analysis of methylation status of SEQ ID NO: 5
agaagggacgtttcggagaaagtgcgt

SEQ ID NO: 3078 - DNA, 18 bp, Artificial Sequence
  bisulfite treated nucleic acid for analysis of methylation status of SEQ ID NO: 5
aaaacgccgtcctacacc

SEQ ID NO: 3079 - DNA, 25 bp, Artificial Sequence
  bisulfite treated nucleic acid for analysis of methylation status of SEQ ID NO: 5
tggttaggtggcgtttggtaggcga

SEQ ID NO: 3080 - DNA, 22 bp, Artificial Sequence
  bisulfite treated nucleic acid for analysis of methylation status of SEQ ID NO: 5
atagtcgggttttcgtagtgtt

SEQ ID NO: 3081 - DNA, 19 bp, Artificial Sequence
  bisulfite treated nucleic acid for analysis of methylation status of SEQ ID NO: 5
acctaaccatatacgcccg

SEQ ID NO: 3082 - DNA, 36 bp, Artificial Sequence
  bisulfite treated nucleic acid for analysis of methylation status of SEQ ID NO: 5
tatttcggtgaggatttgtgttgatggtcggagaat

SEQ ID NO: 3083 - DNA, 19 bp, Artificial Sequence
  bisulfite treated nucleic acid for analysis of methylation status of SEQ ID NO: 5
taggaaggcgttgagatcg

SEQ ID NO: 3084 - DNA, 22 bp, Artificial Sequence
  bisulfite treated nucleic acid for analysis of methylation status of SEQ ID NO: 5
tagtcgggttttcgtagtgttg

SEQ ID NO: 3085 - DNA, 19 bp, Artificial Sequence
  bisulfite treated nucleic acid for analysis of methylation status of SEQ ID NO: 5
ggcgttgagatcgagaaga

SEQ ID NO: 3086 - DNA, 19 bp, Artificial Sequence
  bisulfite treated nucleic acid for analysis of methylation status of SEQ ID NO: 5
gaaggcgttgagatcgaga

SEQ ID NO: 3087 - DNA, 28 bp, Artificial Sequence
  bisulfite treated nucleic acid for analysis of methylation status of SEQ ID NO: 5
gaagggacgtttcggagaaagtgcgttt

SEQ ID NO: 3088 - DNA, 25 bp, Artificial Sequence
  bisulfite treated nucleic acid for analysis of methylation status of SEQ ID NO: 5
cgaaataacaatcatcgaattaaaa

SEQ ID NO: 3089 - DNA, 19 bp, Artificial Sequence
  bisulfite treated nucleic acid for analysis of methylation status of SEQ ID NO: 5
aacgataaaaacgccgtcc

SEQ ID NO: 3090 - DNA, 19 bp, Artificial Sequence
  bisulfite treated nucleic acid for analysis of methylation status of SEQ ID NO: 5
aaaaacgccgtcctacacc

SEQ ID NO: 3091 - DNA, 22 bp, Artificial Sequence
  bisulfite treated nucleic acid for analysis of methylation status of SEQ ID NO: 5
cgatgattgttatttcggtgag

SEQ ID NO: 3092 - DNA, 19 bp, Artificial Sequence
  bisulfite treated nucleic acid for analysis of methylation status of SEQ ID NO: 5
taaaaacgccgtcctacac

SEQ ID NO: 3093 - DNA, 20 bp, Artificial Sequence
  bisulfite treated nucleic acid for analysis of methylation status of SEQ ID NO: 5
ataggacggtcggtttttat

SEQ ID NO: 3094 - DNA, 17 bp, Artificial Sequence
  bisulfite treated nucleic acid for analysis of methylation status of SEQ ID NO: 5
acgtcgcctaccaaacg

SEQ ID NO: 3095 - DNA, 31 bp, Artificial Sequence
  bisulfite treated nucleic acid for analysis of methylation status of SEQ ID NO: 5
gatttgtgttgatggtcggagaattttgcgt

SEQ ID NO: 3096 - DNA, 25 bp, Artificial Sequence
  bisulfite treated nucleic acid for analysis of methylation status of SEQ ID NO: 5
ttttaattcgatgattgttatttcg

SEQ ID NO: 3097 - DNA, 21 bp, Artificial Sequence
  bisulfite treated nucleic acid for analysis of methylation status of SEQ ID NO: 5
acgaacgcacataaccaaata

SEQ ID NO: 3098 - DNA, 22 bp, Artificial Sequence
  bisulfite treated nucleic acid for analysis of methylation status of SEQ ID NO: 5
tttcggagttttagcgttttta

SEQ ID NO: 3099 - DNA, 29 bp, Artificial Sequence
  bisulfite treated nucleic acid for analysis of methylation status of SEQ ID NO: 5
aacggtttggggtggggcggtaagagcgt

SEQ ID NO: 3100 - DNA, 22 bp, Artificial Sequence
  bisulfite treated nucleic acid for analysis of methylation status of SEQ ID NO: 5
aatacaaaacgacgctcttacc

SEQ ID NO: 3101 - DNA, 21 bp, Artificial Sequence
  bisulfite treated nucleic acid for analysis of methylation status of SEQ ID NO: 5
gttttcggagttttagcgttt

SEQ ID NO: 3102 - DNA, 35 bp, Artificial Sequence
  bisulfite treated nucleic acid for analysis of methylation status of SEQ ID NO: 5
ttaggaagtcgaaggatttaggtttaggtaacggt

SEQ ID NO: 3103 - DNA, 21 bp, Artificial Sequence
  bisulfite treated nucleic acid for analysis of methylation status of SEQ ID NO: 5
tgttttcggagttttagcgtt

SEQ ID NO: 3104 - DNA, 22 bp, Artificial Sequence
  bisulfite treated nucleic acid for analysis of methylation status of SEQ ID NO: 5
atcgaaactaaacccctaaacg

SEQ ID NO: 3105 - DNA, 23 bp, Artificial Sequence
  bisulfite treated nucleic acid for analysis of methylation status of SEQ ID NO: 5
ttcgtaaaagtagcgtttttagc

SEQ ID NO: 3106 - DNA, 22 bp, Artificial Sequence
  bisulfite treated nucleic acid for analysis of methylation status of SEQ ID NO: 5
ggggaggcgcgggttaggttgg

SEQ ID NO: 3107 - DNA, 20 bp, Artificial Sequence
  bisulfite treated nucleic acid for analysis of methylation status of SEQ ID NO: 5
ttgttttcggagttttagcg

SEQ ID NO: 3108 - DNA, 22 bp, Artificial Sequence
  bisulfite treated nucleic acid for analysis of methylation status of SEQ ID NO: 5
tcgtaaaagtagcgtttttagc

SEQ ID NO: 3109 - DNA, 22 bp, Artificial Sequence
  bisulfite treated nucleic acid for analysis of methylation status of SEQ ID NO: 5
caaataacgcctaacaaacgac

SEQ ID NO: 3110 - DNA, 22 bp, Artificial Sequence
  bisulfite treated nucleic acid for analysis of methylation status of SEQ ID NO: 5
actcgaattttcctacgatcac

SEQ ID NO: 3111 - DNA, 20 bp, Artificial Sequence
  bisulfite treated nucleic acid for analysis of methylation status of SEQ ID NO: 5
attttgtcggggtcgtattt

SEQ ID NO: 3112 - DNA, 41 bp, Artificial Sequence
  bisulfite treated nucleic acid for analysis of methylation status of SEQ ID NO: 5
tagaaacgaaaattcgatagaagtagtaatagttgttgtgg

SEQ ID NO: 3113 - DNA, 20 bp, Artificial Sequence
  bisulfite treated nucleic acid for analysis of methylation status of SEQ ID NO: 5
cgaacgcacataaccaaata

SEQ ID NO: 3114 - DNA, 24 bp, Artificial Sequence
  bisulfite treated nucleic acid for analysis of methylation status of SEQ ID NO: 5
attcgtaaaagtagcgtttttagc

SEQ ID NO: 3115 - DNA, 21 bp, Artificial Sequence
  bisulfite treated nucleic acid for analysis of methylation status of SEQ ID NO: 5
tcgaaactaaacccctaaacg

SEQ ID NO: 3116 - DNA, 21 bp, Artificial Sequence
  bisulfite treated nucleic acid for analysis of methylation status of SEQ ID NO: 5
ttcggagttttagcgttttta

SEQ ID NO: 3117 - DNA, 22 bp, Artificial Sequence
  bisulfite treated nucleic acid for analysis of methylation status of SEQ ID NO: 5
gaatacaaaacgacgctcttac

SEQ ID NO: 3118 - DNA, 20 bp, Artificial Sequence
  bisulfite treated nucleic acid for analysis of methylation status of SEQ ID NO: 5
atcacataaccgaatcctcg

SEQ ID NO: 3119 - DNA, 21 bp, Artificial Sequence
  bisulfite treated nucleic acid for analysis of methylation status of SEQ ID NO: 5
gttcgtagcgtagggtttttc

SEQ ID NO: 3120 - DNA, 34 bp, Artificial Sequence
  bisulfite treated nucleic acid for analysis of methylation status of SEQ ID NO: 5
ggtttttatcgaggtgatagttatcggattggga

SEQ ID NO: 3121 - DNA, 20 bp, Artificial Sequence
  bisulfite treated nucleic acid for analysis of methylation status of SEQ ID NO: 5
ttttcggagttttagcgttt

SEQ ID NO: 3122 - DNA, 19 bp, Artificial Sequence
  bisulfite treated nucleic acid for analysis of methylation status of SEQ ID NO: 5
ttttgtcggggtcgtattt

SEQ ID NO: 3123 - DNA, 22 bp, Artificial Sequence
  bisulfite treated nucleic acid for analysis of methylation status of SEQ ID NO: 5
ctaataaccgaaaaaccctacg

SEQ ID NO: 3124 - DNA, 21 bp, Artificial Sequence
  bisulfite treated nucleic acid for analysis of methylation status of SEQ ID NO: 5
ggtaagagcgtcgttttgtat

SEQ ID NO: 3125 - DNA, 31 bp, Artificial Sequence
  bisulfite treated nucleic acid for analysis of methylation status of SEQ ID NO: 5
tgttaggcgttatttggttatgtgcgttcgt

SEQ ID NO: 3126 - DNA, 20 bp, Artificial Sequence
  bisulfite treated nucleic acid for analysis of methylation status of SEQ ID NO: 5
ataaccgaatcctcgcaata

SEQ ID NO: 3127 - DNA, 21 bp, Artificial Sequence
  nucleic acid for analysis of methylation status of SEQ ID NO: 5
ctaacgcaaccgcttaaaact

SEQ ID NO: 3128 - DNA, 21 bp, Artificial Sequence
  bisulfite treated nucleic acid for analysis of methylation status of SEQ ID NO: 5
cggagtatcggggattttatt

SEQ ID NO: 3129 - DNA, 33 bp, Artificial Sequence
  bisulfite treated nucleic acid for analysis of methylation status of SEQ ID NO: 5
agttagggtatttgcgcggtttcgattttaatg

SEQ ID NO: 3130 - DNA, 19 bp, Artificial Sequence
  bisulfite treated nucleic acid for analysis of methylation status of SEQ ID NO: 5
cgaaaaaccctacgctacg

SEQ ID NO: 3131 - DNA, 22 bp, Artificial Sequence
  bisulfite treated nucleic acid for analysis of methylation status of SEQ ID NO: 5
ggtaagagcgtcgttttgtatt

SEQ ID NO: 3132 - DNA, 30 bp, Artificial Sequence
  bisulfite treated nucleic acid for analysis of methylation status of SEQ ID NO: 5
ttcggacgtcgtttgttaggcgttatttgg

SEQ ID NO: 3133 - DNA, 25 bp, Artificial Sequence
  bisulfite treated nucleic acid for analysis of methylation status of SEQ ID NO: 5
tattcgtaaaagtagcgtttttagc

SEQ ID NO: 3134 - DNA, 21 bp, Artificial Sequence
  bisulfite treated nucleic acid for analysis of methylation status of SEQ ID NO: 5
cataaccgaatcctcgcaata

SEQ ID NO: 3135 - DNA, 23 bp, Artificial Sequence
  bisulfite treated nucleic acid for analysis of methylation status of SEQ ID NO: 5
actaataaccgaaaaaccctacg

SEQ ID NO: 3136 - DNA, 22 bp, Artificial Sequence
  bisulfite treated nucleic acid for analysis of methylation status of SEQ ID NO: 5
tcgaaactaaacccctaaacga

SEQ ID NO: 3137 - DNA, 23 bp, Artificial Sequence
  bisulfite treated nucleic acid for analysis of methylation status of SEQ ID NO: 5
cgtaaaagtagcgtttttagcgt

SEQ ID NO: 3138 - DNA, 23 bp, Artificial Sequence
  bisulfite treated nucleic acid for analysis of methylation status of SEQ ID NO: 5
gaatacaaaacgacgctcttacc

SEQ ID NO: 3139 - DNA, 21 bp, Artificial Sequence
  bisulfite treated nucleic acid for analysis of methylation status of SEQ ID NO: 5
atacaaaacgacgctcttacc

SEQ ID NO: 3140 - DNA, 21 bp, Artificial Sequence
  bisulfite treated nucleic acid for analysis of methylation status of SEQ ID NO: 5
acgtcgtttgttaggcgttat

SEQ ID NO: 3141 - DNA, 27 bp, Artificial Sequence
  bisulfite treated nucleic acid for analysis of methylation status of SEQ ID NO: 5
tggttatgtgcgttcgtagcgtagggt

SEQ ID NO: 3142 - DNA, 24 bp, Artificial Sequence
  bisulfite treated nucleic acid for analysis of methylation status of SEQ ID NO: 5
cgaaggatttaggtttaggtaacg

SEQ ID NO: 3143 - DNA, 22 bp, Artificial Sequence
  bisulfite treated nucleic acid for analysis of methylation status of SEQ ID NO: 5
tggggtggggcggtaagagcgt

SEQ ID NO: 3144 - DNA, 22 bp, Artificial Sequence
  bisulfite treated nucleic acid for analysis of methylation status of SEQ ID NO: 5
ctcgaattttcctacgatcacc

SEQ ID NO: 3145 - DNA, 21 bp, Artificial Sequence
  bisulfite treated nucleic acid for analysis of methylation status of SEQ ID NO: 5
tatttcggagtatcggggatt

SEQ ID NO: 3146 - DNA, 21 bp, Artificial Sequence
  bisulfite treated nucleic acid for analysis of methylation status of SEQ ID NO: 5
tcgaattttcctacgatcacc

SEQ ID NO: 3147 - DNA, 20 bp, Artificial Sequence
  bisulfite treated nucleic acid for analysis of methylation status of SEQ ID NO: 5
taacgcaaccgcttaaaact

SEQ ID NO: 3148 - DNA, 21 bp, Artificial Sequence
  bisulfite treated nucleic acid for analysis of methylation status of SEQ ID NO: 5
aattttgtcggggtcgtattt

SEQ ID NO: 3149 - DNA, 23 bp, Artificial Sequence
  bisulfite treated nucleic acid for analysis of methylation status of SEQ ID NO: 5
aatcgaaactaaacccctaaacg

SEQ ID NO: 3150 - DNA, 19 bp, Artificial Sequence
  bisulfite treated nucleic acid for analysis of methylation status of SEQ ID NO: 5
ataaccgaatcctcgcaat

SEQ ID NO: 3151 - DNA, 22 bp, Artificial Sequence
  bisulfite treated nucleic acid for analysis of methylation status of SEQ ID NO: 5
gtcgtttgttaggcgttatttg

SEQ ID NO: 3152 - DNA, 22 bp, Artificial Sequence
  bisulfite treated nucleic acid for analysis of methylation status of SEQ ID NO: 5
gttatgtgcgttcgtagcgtag

SEQ ID NO: 3153 - DNA, 20 bp, Artificial Sequence
  bisulfite treated nucleic acid for analysis of methylation status of SEQ ID NO: 5
cgtcgtttgttaggcgttat

SEQ ID NO: 3154 - DNA, 29 bp, Artificial Sequence
  bisulfite treated nucleic acid for analysis of methylation status of SEQ ID NO: 5
agcgttaaggtttggggaggcgcgggtta

SEQ ID NO: 3155 - DNA, 20 bp, Artificial Sequence
  bisulfite treated nucleic acid for analysis of methylation status of SEQ ID NO: 5
cataaccgaatcctcgcaat

SEQ ID NO: 3156 - DNA, 29 bp, Artificial Sequence
  bisulfite treated nucleic acid for analysis of methylation status of SEQ ID NO: 5
ggttatgtgcgttcgtagcgtagggtttt

SEQ ID NO: 3157 - DNA, 18 bp, Artificial Sequence
  bisulfite treated nucleic acid for analysis of methylation status of SEQ ID NO: 5
attcggtggcgataggtt

SEQ ID NO: 3158 - DNA, 45 bp, Artificial Sequence
  bisulfite treated nucleic acid for analysis of methylation status of SEQ ID NO: 5
ttcgtaaaagtagcgtttttagcgttaaggtttggggaggcgcgg

SEQ ID NO: 3159 - DNA, 22 bp, Artificial Sequence
  bisulfite treated nucleic acid for analysis of methylation status of SEQ ID NO: 6
gttttattcgcgtttatggtgt

SEQ ID NO: 3160 - DNA, 22 bp, Artificial Sequence
  bisulfite treated nucleic acid for analysis of methylation status of SEQ ID NO: 6
acttcaacgatcctctacgaaa

SEQ ID NO: 3161 - DNA, 34 bp, Artificial Sequence
  bisulfite treated nucleic acid for analysis of methylation status of SEQ ID NO: 6
gggataggttcgggatagtattgtttacgttgtt

SEQ ID NO: 3162 - DNA, 22 bp, Artificial Sequence
  bisulfite treated nucleic acid for analysis of methylation status of SEQ ID NO: 6
aacttcaacgatcctctacgaa

SEQ ID NO: 3163 - DNA, 22 bp, Artificial Sequence
  bisulfite treated nucleic acid for analysis of methylation status of SEQ ID NO: 6
caacgatcctctacgaaaaatc

SEQ ID NO: 3164 - DNA, 22 bp, Artificial Sequence
  bisulfite treated nucleic acid for analysis of methylation status of SEQ ID NO: 6
tcaacgatcctctacgaaaaat

SEQ ID NO: 3165 - DNA, 22 bp, Artificial Sequence
  bisulfite treated nucleic acid for analysis of methylation status of SEQ ID NO: 6
agttttattcgcgtttatggtg

SEQ ID NO: 3166 - DNA, 22 bp, Artificial Sequence
  bisulfite treated nucleic acid for analysis of methylation status of SEQ ID NO: 6
tttattcgcgtttatggtgtaa

SEQ ID NO: 3167 - DNA, 22 bp, Artificial Sequence
  bisulfite treated nucleic acid for analysis of methylation status of SEQ ID NO: 6
ttttattcgcgtttatggtgta

SEQ ID NO: 3168 - DNA, 22 bp, Artificial Sequence
  bisulfite treated nucleic acid for analysis of methylation status of SEQ ID NO: 6
cttcaacgatcctctacgaaaa

SEQ ID NO: 3169 - DNA, 22 bp, Artificial Sequence
  bisulfite treated nucleic acid for analysis of methylation status of SEQ ID NO: 6
acaacttcaacgatcctctacg

SEQ ID NO: 3170 - DNA, 22 bp, Artificial Sequence
  bisulfite treated nucleic acid for analysis of methylation status of SEQ ID NO: 6
gggtttttagttttattcgcgt

SEQ ID NO: 3171 - DNA, 22 bp, Artificial Sequence
  bisulfite treated nucleic acid for analysis of methylation status of SEQ ID NO: 6
ttcgcgtttatggtgtaagttt

SEQ ID NO: 3172 - DNA, 22 bp, Artificial Sequence
  bisulfite treated nucleic acid for analysis of methylation status of SEQ ID NO: 6
ttattcgcgtttatggtgtaag

SEQ ID NO: 3173 - DNA, 22 bp, Artificial Sequence
  bisulfite treated nucleic acid for analysis of methylation status of SEQ ID NO: 6
ttcaacgatcctctacgaaaaa

SEQ ID NO: 3174 - DNA, 21 bp, Artificial Sequence
  bisulfite treated nucleic acid for analysis of methylation status of SEQ ID NO: 6
cgcgtttatggtgtaagtttg

SEQ ID NO: 3175 - DNA, 23 bp, Artificial Sequence
  bisulfite treated nucleic acid for analysis of methylation status of SEQ ID NO: 6
tagttttattcgcgtttatggtg

SEQ ID NO: 3176 - DNA, 23 bp, Artificial Sequence
  bisulfite treated nucleic acid for analysis of methylation status of SEQ ID NO: 6
tttagttttattcgcgtttatgg

SEQ ID NO: 3177 - DNA, 34 bp, Artificial Sequence
  bisulfite treated nucleic acid for analysis of methylation status of SEQ ID NO: 6
agggataggttcgggatagtattgtttacgttgt

SEQ ID NO: 3178 - DNA, 22 bp, Artificial Sequence
  bisulfite treated nucleic acid for analysis of methylation status of SEQ ID NO: 6
caacttcaacgatcctctacga

SEQ ID NO: 3179 - DNA, 22 bp, Artificial Sequence
  bisulfite treated nucleic acid for analysis of methylation status of SEQ ID NO: 6
tattcgcgtttatggtgtaagt

SEQ ID NO: 3180 - DNA, 22 bp, Artificial Sequence
  bisulfite treated nucleic acid for analysis of methylation status of SEQ ID NO: 6
ttagttttattcgcgtttatgg

SEQ ID NO: 3181 - DNA, 21 bp, Artificial Sequence
  bisulfite treated nucleic acid for analysis of methylation status of SEQ ID NO: 6
tcgcgtttatggtgtaagttt

SEQ ID NO: 3182 - DNA, 21 bp, Artificial Sequence
  bisulfite treated nucleic acid for analysis of methylation status of SEQ ID NO: 6
ttcaacgatcctctacgaaaa

SEQ ID NO: 3183 - DNA, 22 bp, Artificial Sequence
  bisulfite treated nucleic acid for analysis of methylation status of SEQ ID NO: 6
aacgatcctctacgaaaaatct

SEQ ID NO: 3184 - DNA, 21 bp, Artificial Sequence
  bisulfite treated nucleic acid for analysis of methylation status of SEQ ID NO: 6
gttttattcgcgtttatggtg

SEQ ID NO: 3185 - DNA, 23 bp, Artificial Sequence
  bisulfite treated nucleic acid for analysis of methylation status of SEQ ID NO: 6
attcgcgtttatggtgtaagttt

SEQ ID NO: 3186 - DNA, 22 bp, Artificial Sequence
  bisulfite treated nucleic acid for analysis of methylation status of SEQ ID NO: 6
gtttcgtttttgtattaagcgg

SEQ ID NO: 3187 - DNA, 20 bp, Artificial Sequence
  bisulfite treated nucleic acid for analysis of methylation status of SEQ ID NO: 6
aatataacccgcgcctctac

SEQ ID NO: 3188 - DNA, 21 bp, Artificial Sequence
  bisulfite treated nucleic acid for analysis of methylation status of SEQ ID NO: 6
gtgcgcgtttggcgatcgcgg

SEQ ID NO: 3189 - DNA, 21 bp, Artificial Sequence
  bisulfite treated nucleic acid for analysis of methylation status of SEQ ID NO: 6
cttcaacgatcctctacgaaa

SEQ ID NO: 3190 - DNA, 22 bp, Artificial Sequence
  bisulfite treated nucleic acid for analysis of methylation status of SEQ ID NO: 6
cgatcctctacgaaaaatctaa

SEQ ID NO: 3191 - DNA, 34 bp, Artificial Sequence
  bisulfite treated nucleic acid for analysis of methylation status of SEQ ID NO: 6
tgtagggataggttcgggatagtattgtttacgt

SEQ ID NO: 3192 - DNA, 22 bp, Artificial Sequence
  bisulfite treated nucleic acid for analysis of methylation status of SEQ ID NO: 6
atgtatttttgtcgtcggttgt

SEQ ID NO: 3193 - DNA, 22 bp, Artificial Sequence
  bisulfite treated nucleic acid for analysis of methylation status of SEQ ID NO: 6
agcgggcgttgattgtgcgcgt

SEQ ID NO: 3194 - DNA, 21 bp, Artificial Sequence
  bisulfite treated nucleic acid for analysis of methylation status of SEQ ID NO: 6
attcgcgtttatggtgtaagt

SEQ ID NO: 3195 - DNA, 23 bp, Artificial Sequence
  bisulfite treated nucleic acid for analysis of methylation status of SEQ ID NO: 6
acgatcctctacgaaaaatctaa

SEQ ID NO: 3196 - DNA, 21 bp, Artificial Sequence
  bisulfite treated nucleic acid for analysis of methylation status of SEQ ID NO: 6
caacttcaacgatcctctacg

SEQ ID NO: 3197 - DNA, 23 bp, Artificial Sequence
  bisulfite treated nucleic acid for analysis of methylation status of SEQ ID NO: 6
aacaacttcaacgatcctctacg

SEQ ID NO: 3198 - DNA, 21 bp, Artificial Sequence
  bisulfite treated nucleic acid for analysis of methylation status of SEQ ID NO: 6
gtttcggttttagcgtttgtt

SEQ ID NO: 3199 - DNA, 23 bp, Artificial Sequence
  bisulfite treated nucleic acid for analysis of methylation status of SEQ ID NO: 6
ccgacgacaaaaatacattaact

SEQ ID NO: 3200 - DNA, 31 bp, Artificial Sequence
  bisulfite treated nucleic acid for analysis of methylation status of SEQ ID NO: 6
gtcggggtttcgggagattttgagtattcgt

SEQ ID NO: 3201 - DNA, 21 bp, Artificial Sequence
  bisulfite treated nucleic acid for analysis of methylation status of SEQ ID NO: 6
ttattcgcgtttatggtgtaa

SEQ ID NO: 3202 - DNA, 22 bp, Artificial Sequence
  bisulfite treated nucleic acid for analysis of methylation status of SEQ ID NO: 6
aatgtatttttgtcgtcggttg

SEQ ID NO: 3203 - DNA, 23 bp, Artificial Sequence
  bisulfite treated nucleic acid for analysis of methylation status of SEQ ID NO: 6
gggtttttagttttattcgcgtt

SEQ ID NO: 3204 - DNA, 21 bp, Artificial Sequence
  bisulfite treated nucleic acid for analysis of methylation status of SEQ ID NO: 6
tgtatttttgtcgtcggttgt

SEQ ID NO: 3205 - DNA, 23 bp, Artificial Sequence
  bisulfite treated nucleic acid for analysis of methylation status of SEQ ID NO: 6
tcaacgatcctctacgaaaaatc

SEQ ID NO: 3206 - DNA, 22 bp, Artificial Sequence
  bisulfite treated nucleic acid for analysis of methylation status of SEQ ID NO: 6
cttccgaaactacgaactcaaa

SEQ ID NO: 3207 - DNA, 22 bp, Artificial Sequence
  bisulfite treated nucleic acid for analysis of methylation status of SEQ ID NO: 6
gcgttggtcgagtgtattttat

SEQ ID NO: 3208 - DNA, 23 bp, Artificial Sequence
  bisulfite treated nucleic acid for analysis of methylation status of SEQ ID NO: 6
agcggtgcgaggaaagttcgggg

SEQ ID NO: 3209 - DNA, 22 bp, Artificial Sequence
  bisulfite treated nucleic acid for analysis of methylation status of SEQ ID NO: 6
aaatcgacgaacgatctaaaaa

SEQ ID NO: 3210 - DNA, 21 bp, Artificial Sequence
  bisulfite treated nucleic acid for analysis of methylation status of SEQ ID NO: 6
gtagtttcggaagcgagttgt

SEQ ID NO: 3211 - DNA, 40 bp, Artificial Sequence
  bisulfite treated nucleic acid for analysis of methylation status of SEQ ID NO: 6
atcgcgcgtattttaagattcgcgttatgtaaattatcgt

SEQ ID NO: 3212 - DNA, 22 bp, Artificial Sequence
  bisulfite treated nucleic acid for analysis of methylation status of SEQ ID NO: 6
aaaatcgacgaacgatctaaaa

SEQ ID NO: 3213 - DNA, 21 bp, Artificial Sequence
  bisulfite treated nucleic acid for analysis of methylation status of SEQ ID NO: 6
ttccgaaactacgaactcaaa

SEQ ID NO: 3214 - DNA, 20 bp, Artificial Sequence
  bisulfite treated nucleic acid for analysis of methylation status of SEQ ID NO: 6
tagtttcggaagcgagttgt

SEQ ID NO: 3215 - DNA, 21 bp, Artificial Sequence
  bisulfite treated nucleic acid for analysis of methylation status of SEQ ID NO: 6
caaaatcgacgaacgatctaa

SEQ ID NO: 3216 - DNA, 21 bp, Artificial Sequence
  bisulfite treated nucleic acid for analysis of methylation status of SEQ ID NO: 6
gcttccgaaactacgaactca

SEQ ID NO: 3217 - DNA, 22 bp, Artificial Sequence
  bisulfite treated nucleic acid for analysis of methylation status of SEQ ID NO: 6
tatctttcaaaatcgacgaacg

SEQ ID NO: 3218 - DNA, 22 bp, Artificial Sequence
  bisulfite treated nucleic acid for analysis of methylation status of SEQ ID NO: 6
cctctaacgaccaaactacgaa

SEQ ID NO: 3219 - DNA, 21 bp, Artificial Sequence
  bisulfite treated nucleic acid for analysis of methylation status of SEQ ID NO: 6
gtgcgtataaaagcgcgtaat

SEQ ID NO: 3220 - DNA, 34 bp, Artificial Sequence
  bisulfite treated nucleic acid for analysis of methylation status of SEQ ID NO: 6
agttcgcgtattcgtcgtttatataggaggtttt

SEQ ID NO: 3221 - DNA, 21 bp, Artificial Sequence
  bisulfite treated nucleic acid for analysis of methylation status of SEQ ID NO: 6
tcaaaatcgacgaacgatcta

SEQ ID NO: 3222 - DNA, 20 bp, Artificial Sequence
  bisulfite treated nucleic acid for analysis of methylation status of SEQ ID NO: 6
tgcgtataaaagcgcgtaat

SEQ ID NO: 3223 - DNA, 19 bp, Artificial Sequence
  bisulfite treated nucleic acid for analysis of methylation status of SEQ ID NO: 6
cgtagtttcggaagcgagt

SEQ ID NO: 3224 - DNA, 22 bp, Artificial Sequence
  bisulfite treated nucleic acid for analysis of methylation status of SEQ ID NO: 6
ttcaaaatcgacgaacgatcta

SEQ ID NO: 3225 - DNA, 21 bp, Artificial Sequence
  bisulfite treated nucleic acid for analysis of methylation status of SEQ ID NO: 6
gcgtataaaagcgcgtaattg

SEQ ID NO: 3226 - DNA, 23 bp, Artificial Sequence
  bisulfite treated nucleic acid for analysis of methylation status of SEQ ID NO: 6
aacgaccaaactacgaaatacaa

SEQ ID NO: 3227 - DNA, 19 bp, Artificial Sequence
  bisulfite treated nucleic acid for analysis of methylation status of SEQ ID NO: 6
agtttcggaagcgagttgt

SEQ ID NO: 3228 - DNA, 19 bp, Artificial Sequence
  bisulfite treated nucleic acid for analysis of methylation status of SEQ ID NO: 6
cgcttccgaaactacgaac

SEQ ID NO: 3229 - DNA, 21 bp, Artificial Sequence
  bisulfite treated nucleic acid for analysis of methylation status of SEQ ID NO: 6
atctttcaaaatcgacgaacg

SEQ ID NO: 3230 - DNA, 22 bp, Artificial Sequence
  bisulfite treated nucleic acid for analysis of methylation status of SEQ ID NO: 6
acgacttcccataaatcgaata

SEQ ID NO: 3231 - DNA, 49 bp, Artificial Sequence
  bisulfite treated nucleic acid for analysis of methylation status of SEQ ID NO: 6
tatcgttattacgaattgtttttttagatcgttcgtcgattttgaaaga

SEQ ID NO: 3232 - DNA, 22 bp, Artificial Sequence
  bisulfite treated nucleic acid for analysis of methylation status of SEQ ID NO: 6
cgaccaaactacgaaatacaac

SEQ ID NO: 3233 - DNA, 22 bp, Artificial Sequence
  bisulfite treated nucleic acid for analysis of methylation status of SEQ ID NO: 6
acgaccaaactacgaaatacaa

SEQ ID NO: 3234 - DNA, 21 bp, Artificial Sequence
  bisulfite treated nucleic acid for analysis of methylation status of SEQ ID NO: 6
aatcgacgaacgatctaaaaa

SEQ ID NO: 3235 - DNA, 22 bp, Artificial Sequence
  bisulfite treated nucleic acid for analysis of methylation status of SEQ ID NO: 6
tcctctaacgaccaaactacga

SEQ ID NO: 3236 - DNA, 20 bp, Artificial Sequence
  bisulfite treated nucleic acid for analysis of methylation status of SEQ ID NO: 6
gtgcgtataaaagcgcgtaa

SEQ ID NO: 3237 - DNA, 22 bp, Artificial Sequence
  bisulfite treated nucleic acid for analysis of methylation status of SEQ ID NO: 6
ctctaacgaccaaactacgaaa

SEQ ID NO: 3238 - DNA, 23 bp, Artificial Sequence
  bisulfite treated nucleic acid for analysis of methylation status of SEQ ID NO: 6
atatctttcaaaatcgacgaacg

SEQ ID NO: 3239 - DNA, 23 bp, Artificial Sequence
  bisulfite treated nucleic acid for analysis of methylation status of SEQ ID NO: 6
cattattctaaaaccgactcgac

SEQ ID NO: 3240 - DNA, 21 bp, Artificial Sequence
  bisulfite treated nucleic acid for analysis of methylation status of SEQ ID NO: 6
gttcgcgtattcgtcgtttat

SEQ ID NO: 3241 - DNA, 33 bp, Artificial Sequence
  bisulfite treated nucleic acid for analysis of methylation status of SEQ ID NO: 6
ggttgtatttcgtagtttggtcgttagaggagg

SEQ ID NO: 3242 - DNA, 19 bp, Artificial Sequence
  bisulfite treated nucleic acid for analysis of methylation status of SEQ ID NO: 6
tgcgtataaaagcgcgtaa

SEQ ID NO: 3243 - DNA, 20 bp, Artificial Sequence
  bisulfite treated nucleic acid for analysis of methylation status of SEQ ID NO: 6
cgtataaaagcgcgtaattg

SEQ ID NO: 3244 - DNA, 19 bp, Artificial Sequence
  bisulfite treated nucleic acid for analysis of methylation status of SEQ ID NO: 6
ggcgttggtcgagtgtatt

SEQ ID NO: 3245 - DNA, 20 bp, Artificial Sequence
  bisulfite treated nucleic acid for analysis of methylation status of SEQ ID NO: 6
tccgaaactacgaactcaaa

SEQ ID NO: 3246 - DNA, 20 bp, Artificial Sequence
  bisulfite treated nucleic acid for analysis of methylation status of SEQ ID NO: 6
ttcgcgtattcgtcgtttat

SEQ ID NO: 3247 - DNA, 24 bp, Artificial Sequence
  bisulfite treated nucleic acid for analysis of methylation status of SEQ ID NO: 6
acattattctaaaaccgactcgac

SEQ ID NO: 3248 - DNA, 18 bp, Artificial Sequence
  bisulfite treated nucleic acid for analysis of methylation status of SEQ ID NO: 6
tcgcttccgaaactacga

SEQ ID NO: 3249 - DNA, 22 bp, Artificial Sequence
  bisulfite treated nucleic acid for analysis of methylation status of SEQ ID NO: 6
aacgataatttacataacgcga

SEQ ID NO: 3250 - DNA, 21 bp, Artificial Sequence
  bisulfite treated nucleic acid for analysis of methylation status of SEQ ID NO: 6
aatttgagttcgtagtttcgg

SEQ ID NO: 3251 - DNA, 26 bp, Artificial Sequence
  nucleic acid for analysis of methylation status of SEQ ID NO: 6
tgcgaggttggttcggaatcgcgcgt

SEQ ID NO: 3252 - DNA, 22 bp, Artificial Sequence
  bisulfite treated nucleic acid for analysis of methylation status of SEQ ID NO: 8
attcgagcgagtaagaagagtg

SEQ ID NO: 3253 - DNA, 22 bp, Artificial Sequence
  bisulfite treated nucleic acid for analysis of methylation status of SEQ ID NO: 8
tccatataaacgaaccgaaaac

SEQ ID NO: 3254 - DNA, 32 bp, Artificial Sequence
  bisulfite treated nucleic acid for analysis of methylation status of SEQ ID NO: 8
atggaggagttagcgtttattgaagtcggttt

SEQ ID NO: 3255 - DNA, 22 bp, Artificial Sequence
  bisulfite treated nucleic acid for analysis of methylation status of SEQ ID NO: 8
ctccatataaacgaaccgaaaa

SEQ ID NO: 3256 - DNA, 22 bp, Artificial Sequence
  bisulfite treated nucleic acid for analysis of methylation status of SEQ ID NO: 8
cgagcgagtaagaagagtgttt

SEQ ID NO: 3257 - DNA, 22 bp, Artificial Sequence
  bisulfite treated nucleic acid for analysis of methylation status of SEQ ID NO: 8
aaactccatataaacgaaccga

SEQ ID NO: 3258 - DNA, 32 bp, Artificial Sequence
  bisulfite treated nucleic acid for analysis of methylation status of SEQ ID NO: 8
gaggagttagcgtttattgaagtcggtttcgt

SEQ ID NO: 3259 - DNA, 22 bp, Artificial Sequence
  bisulfite treated nucleic acid for analysis of methylation status of SEQ ID NO: 8
aactccatataaacgaaccgaa

SEQ ID NO: 3260 - DNA, 22 bp, Artificial Sequence
  bisulfite treated nucleic acid for analysis of methylation status of SEQ ID NO: 8
actccatataaacgaaccgaaa

SEQ ID NO: 3261 - DNA, 22 bp, Artificial Sequence
  bisulfite treated nucleic acid for analysis of methylation status of SEQ ID NO: 8
gttaagcgttcgtcgttagaat

SEQ ID NO: 3262 - DNA, 22 bp, Artificial Sequence
  bisulfite treated nucleic acid for analysis of methylation status of SEQ ID NO: 8
aaaacgaaaccgacttcaataa

SEQ ID NO: 3263 - DNA, 33 bp, Artificial Sequence
  bisulfite treated nucleic acid for analysis of methylation status of SEQ ID NO: 8
aggaattcgagcgagtaagaagagtgtttgatt

SEQ ID NO: 3264 - DNA, 22 bp, Artificial Sequence
  bisulfite treated nucleic acid for analysis of methylation status of SEQ ID NO: 8
ttcgagcgagtaagaagagtgt

SEQ ID NO: 3265 - DNA, 22 bp, Artificial Sequence
  bisulfite treated nucleic acid for analysis of methylation status of SEQ ID NO: 8
caaactccatataaacgaaccg

SEQ ID NO: 3266 - DNA, 22 bp, Artificial Sequence
  bisulfite treated nucleic acid for analysis of methylation status of SEQ ID NO: 8
gaaaacgaaaccgacttcaata

SEQ ID NO: 3267 - DNA, 22 bp, Artificial Sequence
  bisulfite treated nucleic acid for analysis of methylation status of SEQ ID NO: 8
aacgaaaccgacttcaataaac

SEQ ID NO: 3268 - DNA, 21 bp, Artificial Sequence
  bisulfite treated nucleic acid for analysis of methylation status of SEQ ID NO: 8
agagcgaagtttgttaagcgt

SEQ ID NO: 3269 - DNA, 22 bp, Artificial Sequence
  bisulfite treated nucleic acid for analysis of methylation status of SEQ ID NO: 8
aattcgagcgagtaagaagagt

SEQ ID NO: 3270 - DNA, 21 bp, Artificial Sequence
  bisulfite treated nucleic acid for analysis of methylation status of SEQ ID NO: 8
tgttaagcgttcgtcgttaga

SEQ ID NO: 3271 - DNA, 21 bp, Artificial Sequence
  bisulfite treated nucleic acid for analysis of methylation status of SEQ ID NO: 8
catataaacgaaccgaaaacg

SEQ ID NO: 3272 - DNA, 32 bp, Artificial Sequence
  bisulfite treated nucleic acid for analysis of methylation status of SEQ ID NO: 8
aaatggaggagttagcgtttattgaagtcggt

SEQ ID NO: 3273 - DNA, 21 bp, Artificial Sequence
  bisulfite treated nucleic acid for analysis of methylation status of SEQ ID NO: 8
gagcgaagtttgttaagcgtt

SEQ ID NO: 3274 - DNA, 23 bp, Artificial Sequence
  bisulfite treated nucleic acid for analysis of methylation status of SEQ ID NO: 8
aaacgaaaccgacttcaataaac

SEQ ID NO: 3275 - DNA, 22 bp, Artificial Sequence
  bisulfite treated nucleic acid for analysis of methylation status of SEQ ID NO: 8
cggttttcgaggaatataggat

SEQ ID NO: 3276 - DNA, 23 bp, Artificial Sequence
  bisulfite treated nucleic acid for analysis of methylation status of SEQ ID NO: 8
cgcgaatttaactactacttccc

SEQ ID NO: 3277 - DNA, 25 bp, Artificial Sequence
  bisulfite treated nucleic acid for analysis of methylation status of SEQ ID NO: 8
gggggtcgggtagcgggttattgag

SEQ ID NO: 3278 - DNA, 21 bp, Artificial Sequence
  bisulfite treated nucleic acid for analysis of methylation status of SEQ ID NO: 8
gaaaccgacttcaataaacgc

SEQ ID NO: 3279 - DNA, 21 bp, Artificial Sequence
  bisulfite treated nucleic acid for analysis of methylation status of SEQ ID NO: 8
tcgagcgagtaagaagagtgt

SEQ ID NO: 3280 - DNA, 22 bp, Artificial Sequence
  bisulfite treated nucleic acid for analysis of methylation status of SEQ ID NO: 8
gtagagcgaagtttgttaagcg

SEQ ID NO: 3281 - DNA, 22 bp, Artificial Sequence
  bisulfite treated nucleic acid for analysis of methylation status of SEQ ID NO: 8
ttgttaagcgttcgtcgttaga

SEQ ID NO: 3282 - DNA, 21 bp, Artificial Sequence
  bisulfite treated nucleic acid for analysis of methylation status of SEQ ID NO: 8
ttaagcgttcgtcgttagaat

SEQ ID NO: 3283 - DNA, 22 bp, Artificial Sequence
  bisulfite treated nucleic acid for analysis of methylation status of SEQ ID NO: 8
gttttcgaggaatataggatcg

SEQ ID NO: 3284 - DNA, 21 bp, Artificial Sequence
  bisulfite treated nucleic acid for analysis of methylation status of SEQ ID NO: 8
agcgttcgtcgttagaatttg

SEQ ID NO: 3285 - DNA, 20 bp, Artificial Sequence
  bisulfite treated nucleic acid for analysis of methylation status of SEQ ID NO: 8
gcgttcgtcgttagaatttg

SEQ ID NO: 3286 - DNA, 22 bp, Artificial Sequence
  bisulfite treated nucleic acid for analysis of methylation status of SEQ ID NO: 8
ggagagttaaggcgtttcgtag

SEQ ID NO: 3287 - DNA, 21 bp, Artificial Sequence
  bisulfite treated nucleic acid for analysis of methylation status of SEQ ID NO: 8
gtaaccccgaacgaactaaaa

SEQ ID NO: 3288 - DNA, 33 bp, Artificial Sequence
  bisulfite treated nucleic acid for analysis of methylation status of SEQ ID NO: 8
ttgtcgttcgtatttttttggcgtttgggaagt

SEQ ID NO: 3289 - DNA, 21 bp, Artificial Sequence
  bisulfite treated nucleic acid for analysis of methylation status of SEQ ID NO: 8
actccatataaacgaaccgaa

SEQ ID NO: 3290 - DNA, 22 bp, Artificial Sequence
  bisulfite treated nucleic acid for analysis of methylation status of SEQ ID NO: 8
tttgttaagcgttcgtcgttag

SEQ ID NO: 3291 - DNA, 21 bp, Artificial Sequence
  bisulfite treated nucleic acid for analysis of methylation status of SEQ ID NO: 8
gaaaacgaaaccgacttcaat

SEQ ID NO: 3292 - DNA, 20 bp, Artificial Sequence
  bisulfite treated nucleic acid for analysis of methylation status of SEQ ID NO: 8
gagcgaagtttgttaagcgt

SEQ ID NO: 3293 - DNA, 21 bp, Artificial Sequence
  bisulfite treated nucleic acid for analysis of methylation status of SEQ ID NO: 8
ccatataaacgaaccgaaaac

SEQ ID NO: 3294 - DNA, 32 bp, Artificial Sequence
  nucleic acid for analysis of methylation status of SEQ ID NO: 8
aatggaggagttagcgtttattgaagtcggtt

SEQ ID NO: 3295 - DNA, 21 bp, Artificial Sequence
  bisulfite treated nucleic acid for analysis of methylation status of SEQ ID NO: 8
tttcgaggaatataggatcgc

SEQ ID NO: 3296 - DNA, 28 bp, Artificial Sequence
  bisulfite treated nucleic acid for analysis of methylation status of SEQ ID NO: 8
ggggtcgggtagcgggttattgagtatt

SEQ ID NO: 3297 - DNA, 22 bp, Artificial Sequence
  bisulfite treated nucleic acid for analysis of methylation status of SEQ ID NO: 8
gagttaaggcgtttcgtagttc

SEQ ID NO: 3298 - DNA, 20 bp, Artificial Sequence
  bisulfite treated nucleic acid for analysis of methylation status of SEQ ID NO: 8
cgactacctcttcccacgta

SEQ ID NO: 3299 - DNA, 34 bp, Artificial Sequence
  bisulfite treated nucleic acid for analysis of methylation status of SEQ ID NO: 8
ttcgtatttttttggcgtttgggaagtagtaggt

SEQ ID NO: 3300 - DNA, 21 bp, Artificial Sequence
  bisulfite treated nucleic acid for analysis of methylation status of SEQ ID NO: 8
cgaaaccgacttcaataaacg

SEQ ID NO: 3301 - DNA, 20 bp, Artificial Sequence
  bisulfite treated nucleic acid for analysis of methylation status of SEQ ID NO: 8
tacgtgggaagaggtagtcg

SEQ ID NO: 3302 - DNA, 22 bp, Artificial Sequence
  bisulfite treated nucleic acid for analysis of methylation status of SEQ ID NO: 8
aacgaacgaacccatctataac

SEQ ID NO: 3303 - DNA, 23 bp, Artificial Sequence
  bisulfite treated nucleic acid for analysis of methylation status of SEQ ID NO: 8
tgtaaggaggaggcggtcgcgga

SEQ ID NO: 3304 - DNA, 21 bp, Artificial Sequence
  bisulfite treated nucleic acid for analysis of methylation status of SEQ ID NO: 8
ttacgtgggaagaggtagtcg

SEQ ID NO: 3305 - DNA, 22 bp, Artificial Sequence
  bisulfite treated nucleic acid for analysis of methylation status of SEQ ID NO: 8
ttttcgaggaatataggatcgc

SEQ ID NO: 3306 - DNA, 21 bp, Artificial Sequence
  bisulfite treated nucleic acid for analysis of methylation status of SEQ ID NO: 8
tagagcgaagtttgttaagcg

SEQ ID NO: 3307 - DNA, 22 bp, Artificial Sequence
  bisulfite treated nucleic acid for analysis of methylation status of SEQ ID NO: 8
tagagcgaagtttgttaagcgt

SEQ ID NO: 3308 - DNA, 21 bp, Artificial Sequence
  bisulfite treated nucleic acid for analysis of methylation status of SEQ ID NO: 8
ggagagttaaggcgtttcgta

SEQ ID NO: 3309 - DNA, 21 bp, Artificial Sequence
  bisulfite treated nucleic acid for analysis of methylation status of SEQ ID NO: 8
taaccccgaacgaactaaaaa

SEQ ID NO: 3310 - DNA, 22 bp, Artificial Sequence
  bisulfite treated nucleic acid for analysis of methylation status of SEQ ID NO: 8
gagagttaaggcgtttcgtagt

SEQ ID NO: 3311 - DNA, 20 bp, Artificial Sequence
  bisulfite treated nucleic acid for analysis of methylation status of SEQ ID NO: 8
agcgaagtttgttaagcgtt

SEQ ID NO: 3312 - DNA, 21 bp, Artificial Sequence
  bisulfite treated nucleic acid for analysis of methylation status of SEQ ID NO: 8
tttgttaagcgttcgtcgtta

SEQ ID NO: 3313 - DNA, 22 bp, Artificial Sequence
  bisulfite treated nucleic acid for analysis of methylation status of SEQ ID NO: 8
acgaacgaacccatctataact

SEQ ID NO: 3314 - DNA, 21 bp, Artificial Sequence
  bisulfite treated nucleic acid for analysis of methylation status of SEQ ID NO: 8
acgaaaccgacttcaataaac

SEQ ID NO: 3315 - DNA, 21 bp, Artificial Sequence
  bisulfite treated nucleic acid for analysis of methylation status of SEQ ID NO: 8
tagacgagtggagttcgagga

SEQ ID NO: 3316 - DNA, 22 bp, Artificial Sequence
  bisulfite treated nucleic acid for analysis of methylation status of SEQ ID NO: 8
aaaatacgaacgacaaaactcg

SEQ ID NO: 3317 - DNA, 29 bp, Artificial Sequence
  bisulfite treated nucleic acid for analysis of methylation status of SEQ ID NO: 8
agggagagttaaggcgtttcgtagttcgg

SEQ ID NO: 3318 - DNA, 20 bp, Artificial Sequence
  bisulfite treated nucleic acid for analysis of methylation status of SEQ ID NO: 8
aaaccgacttcaataaacgc

SEQ ID NO: 3319 - DNA, 23 bp, Artificial Sequence
  bisulfite treated nucleic acid for analysis of methylation status of SEQ ID NO: 8
agagttaaggcgtttcgtagttc

SEQ ID NO: 3320 - DNA, 19 bp, Artificial Sequence
  bisulfite treated nucleic acid for analysis of methylation status of SEQ ID NO: 8
acgagtggagttcgaggag

SEQ ID NO: 3321 - DNA, 21 bp, Artificial Sequence
  bisulfite treated nucleic acid for analysis of methylation status of SEQ ID NO: 8
aaaccgacttcaataaacgct

SEQ ID NO: 3322 - DNA, 22 bp, Artificial Sequence
  nucleic acid for analysis of methylation status of SEQ ID NO: 8
cctaacgaacgaacccatctat

SEQ ID NO: 3323 - DNA, 22 bp, Artificial Sequence
  bisulfite treated nucleic acid for analysis of methylation status of SEQ ID NO: 8
aggaggaggcggtcgcggaagt

SEQ ID NO: 3324 - DNA, 21 bp, Artificial Sequence
  bisulfite treated nucleic acid for analysis of methylation status of SEQ ID NO: 8
cgcacactcatataccattcg

SEQ ID NO: 3325 - DNA, 22 bp, Artificial Sequence
  bisulfite treated nucleic acid for analysis of methylation status of SEQ ID NO: 8
tatttagtcgcggttcgtattc

SEQ ID NO: 3326 - DNA, 33 bp, Artificial Sequence
  bisulfite treated nucleic acid for analysis of methylation status of SEQ ID NO: 8
tttcgttttcggtagggggcgttttggagcgga

SEQ ID NO: 3327 - DNA, 21 bp, Artificial Sequence
  bisulfite treated nucleic acid for analysis of methylation status of SEQ ID NO: 8
ctacactaccgcgaaaactcc

SEQ ID NO: 3328 - DNA, 22 bp, Artificial Sequence
  bisulfite treated nucleic acid for analysis of methylation status of SEQ ID NO: 8
cgggatgtttagtagttcgttg

SEQ ID NO: 3329 - DNA, 35 bp, Artificial Sequence
  bisulfite treated nucleic acid for analysis of methylation status of SEQ ID NO: 8
ttcggaagtcgtttgttgttgtagagttgtacgaa

SEQ ID NO: 3330 - DNA, 22 bp, Artificial Sequence
  bisulfite treated nucleic acid for analysis of methylation status of SEQ ID NO: 8
tcggagagacgttatttagtcg

SEQ ID NO: 3331 - DNA, 22 bp, Artificial Sequence
  bisulfite treated nucleic acid for analysis of methylation status of SEQ ID NO: 8
actacactaccgcgaaaactcc

SEQ ID NO: 3332 - DNA, 22 bp, Artificial Sequence
  bisulfite treated nucleic acid for analysis of methylation status of SEQ ID NO: 8
tgtttagtagttcgttgttcgg

SEQ ID NO: 3333 - DNA, 20 bp, Artificial Sequence
  bisulfite treated nucleic acid for analysis of methylation status of SEQ ID NO: 8
tacactaccgcgaaaactcc

SEQ ID NO: 3334 - DNA, 20 bp, Artificial Sequence
  bisulfite treated nucleic acid for analysis of methylation status of SEQ ID NO: 8
aacaaacgacttccgaaaaa

SEQ ID NO: 3335 - DNA, 22 bp, Artificial Sequence
  bisulfite treated nucleic acid for analysis of methylation status of SEQ ID NO: 8
gggtgttattgttatcgtcgtc

SEQ ID NO: 3336 - DNA, 31 bp, Artificial Sequence
  bisulfite treated nucleic acid for analysis of methylation status of SEQ ID NO: 8
gtcgtcgttcgcgggatgtttagtagttcgt

SEQ ID NO: 3337 - DNA, 21 bp, Artificial Sequence
  bisulfite treated nucleic acid for analysis of methylation status of SEQ ID NO: 8
agacgttatttagtcgcggtt

SEQ ID NO: 3338 - DNA, 23 bp, Artificial Sequence
  bisulfite treated nucleic acid for analysis of methylation status of SEQ ID NO: 8
atgtttagtagttcgttgttcgg

SEQ ID NO: 3339 - DNA, 21 bp, Artificial Sequence
  bisulfite treated nucleic acid for analysis of methylation status of SEQ ID NO: 8
gataacaataacacccgacga

SEQ ID NO: 3340 - DNA, 23 bp, Artificial Sequence
  bisulfite treated nucleic acid for analysis of methylation status of SEQ ID NO: 8
ttatggtagtagtttttcgcgtt

SEQ ID NO: 3341 - DNA, 34 bp, Artificial Sequence
  bisulfite treated nucleic acid for analysis of methylation status of SEQ ID NO: 8
ttcggcgtagttttttagcggacgattttttcgt

SEQ ID NO: 3342 - DNA, 21 bp, Artificial Sequence
  bisulfite treated nucleic acid for analysis of methylation status of SEQ ID NO: 8
atttagtcgcggttcgtattc

SEQ ID NO: 3343 - DNA, 21 bp, Artificial Sequence
  bisulfite treated nucleic acid for analysis of methylation status of SEQ ID NO: 8
gagacgttatttagtcgcggt

SEQ ID NO: 3344 - DNA, 23 bp, Artificial Sequence
  bisulfite treated nucleic acid for analysis of methylation status of SEQ ID NO: 8
tttagtagttcgttgttcggttt

SEQ ID NO: 3345 - DNA, 22 bp, Artificial Sequence
  bisulfite treated nucleic acid for analysis of methylation status of SEQ ID NO: 8
tatggtagtagtttttcgcgtt

SEQ ID NO: 3346 - DNA, 22 bp, Artificial Sequence
  bisulfite treated nucleic acid for analysis of methylation status of SEQ ID NO: 8
gcgggatgtttagtagttcgtt

SEQ ID NO: 3347 - DNA, 22 bp, Artificial Sequence
  bisulfite treated nucleic acid for analysis of methylation status of SEQ ID NO: 8
atttttagttcggagagacgtt

SEQ ID NO: 3348 - DNA, 22 bp, Artificial Sequence
  bisulfite treated nucleic acid for analysis of methylation status of SEQ ID NO: 8
tactacactaccgcgaaaactc

SEQ ID NO: 3349 - DNA, 22 bp, Artificial Sequence
  bisulfite treated nucleic acid for analysis of methylation status of SEQ ID NO: 8
tttagtagttcgttgttcggtt

SEQ ID NO: 3350 - DNA, 21 bp, Artificial Sequence
  bisulfite treated nucleic acid for analysis of methylation status of SEQ ID NO: 8
gacgttatttagtcgcggttc

SEQ ID NO: 3351 - DNA, 19 bp, Artificial Sequence
  bisulfite treated nucleic acid for analysis of methylation status of SEQ ID NO: 8
acactaccgcgaaaactcc

SEQ ID NO: 3352 - DNA, 22 bp, Artificial Sequence
  bisulfite treated nucleic acid for analysis of methylation status of SEQ ID NO: 8
ttagtagttcgttgttcggttt

SEQ ID NO: 3353 - DNA, 23 bp, Artificial Sequence
  bisulfite treated nucleic acid for analysis of methylation status of SEQ ID NO: 8
gtttagtagttcgttgttcggtt

SEQ ID NO: 3354 - DNA, 20 bp, Artificial Sequence
  bisulfite treated nucleic acid for analysis of methylation status of SEQ ID NO: 8
acaaacgacttccgaaaaac

SEQ ID NO: 3355 - DNA, 22 bp, Artificial Sequence
  bisulfite treated nucleic acid for analysis of methylation status of SEQ ID NO: 8
ttcgtcgggtgttattgttatc

SEQ ID NO: 3356 - DNA, 22 bp, Artificial Sequence
  bisulfite treated nucleic acid for analysis of methylation status of SEQ ID NO: 8
tttttagttcggagagacgtta

SEQ ID NO: 3357 - DNA, 21 bp, Artificial Sequence
  bisulfite treated nucleic acid for analysis of methylation status of SEQ ID NO: 8
tcgggtgttattgttatcgtc

SEQ ID NO: 3358 - DNA, 21 bp, Artificial Sequence
  bisulfite treated nucleic acid for analysis of methylation status of SEQ ID NO: 8
acaacaaacgacttccgaaaa

SEQ ID NO: 3359 - DNA, 20 bp, Artificial Sequence
  bisulfite treated nucleic acid for analysis of methylation status of SEQ ID NO: 8
tttagtcgcggttcgtattc

SEQ ID NO: 3360 - DNA, 22 bp, Artificial Sequence
  bisulfite treated nucleic acid for analysis of methylation status of SEQ ID NO: 8
aaacgctaacccgaataaaact

SEQ ID NO: 3361 - DNA, 19 bp, Artificial Sequence
  bisulfite treated nucleic acid for analysis of methylation status of SEQ ID NO: 8
ggatttcgttttcggtagg

SEQ ID NO: 3362 - DNA, 30 bp, Artificial Sequence
  bisulfite treated nucleic acid for analysis of methylation status of SEQ ID NO: 8
agtgaggcgaatggtatatgagtgtgcggg

SEQ ID NO: 3363 - DNA, 19 bp, Artificial Sequence
  bisulfite treated nucleic acid for analysis of methylation status of SEQ ID NO: 8
atttcgttttcggtagggg

SEQ ID NO: 3364 - DNA, 21 bp, Artificial Sequence
  bisulfite treated nucleic acid for analysis of methylation status of SEQ ID NO: 8
cgcgaaaaccacaaataaact

SEQ ID NO: 3365 - DNA, 21 bp, Artificial Sequence
  nucleic acid for analysis of methylation status of SEQ ID NO: 8
cgaatggtatatgagtgtgcg

SEQ ID NO: 3366 - DNA, 34 bp, Artificial Sequence
  bisulfite treated nucleic acid for analysis of methylation status of SEQ ID NO: 8
ttcgtttagttttattcgggttagcgtttggcga

SEQ ID NO: 3367 - DNA, 20 bp, Artificial Sequence
  bisulfite treated nucleic acid for analysis of methylation status of SEQ ID NO: 8
caacaaacgacttccgaaaa

SEQ ID NO: 3368 - DNA, 22 bp, Artificial Sequence
  bisulfite treated nucleic acid for analysis of methylation status of SEQ ID NO: 8
caacgaactactaaacatcccg

SEQ ID NO: 3369 - DNA, 19 bp, Artificial Sequence
  bisulfite treated nucleic acid for analysis of methylation status of SEQ ID NO: 8
cgtttcggggttgagttta

SEQ ID NO: 3370 - DNA, 38 bp, Artificial Sequence
  bisulfite treated nucleic acid for analysis of methylation status of SEQ ID NO: 8
ttcgagattatgcgcgggtttggttgttgttttttcgt

SEQ ID NO: 3371 - DNA, 24 bp, Artificial Sequence
  bisulfite treated nucleic acid for analysis of methylation status of SEQ ID NO: 8
ttttagttcggagagacgttattt

SEQ ID NO: 3372 - DNA, 24 bp, Artificial Sequence
  bisulfite treated nucleic acid for analysis of methylation status of SEQ ID NO: 8
ttatttttagttcggagagacgtt

SEQ ID NO: 3373 - DNA, 21 bp, Artificial Sequence
  bisulfite treated nucleic acid for analysis of methylation status of SEQ ID NO: 8
cggagagacgttatttagtcg

SEQ ID NO: 3374 - DNA, 19 bp, Artificial Sequence
  bisulfite treated nucleic acid for analysis of methylation status of SEQ ID NO: 8
cctaccgaaaacgaaatcc

SEQ ID NO: 3375 - DNA, 22 bp, Artificial Sequence
  bisulfite treated nucleic acid for analysis of methylation status of SEQ ID NO: 8
gttacgcgcggaagaggggcgt

SEQ ID NO: 3376 - DNA, 19 bp, Artificial Sequence
  bisulfite treated nucleic acid for analysis of methylation status of SEQ ID NO: 8
ccctaccgaaaacgaaatc

SEQ ID NO: 3377 - DNA, 18 bp, Artificial Sequence
  bisulfite treated nucleic acid for analysis of methylation status of SEQ ID NO: 16
ggtttcggttcgaggttc

SEQ ID NO: 3378 - DNA, 22 bp, Artificial Sequence
  bisulfite treated nucleic acid for analysis of methylation status of SEQ ID NO: 16
actttactacaacgaaaacgcc

SEQ ID NO: 3379 - DNA, 35 bp, Artificial Sequence
  bisulfite treated nucleic acid for analysis of methylation status of SEQ ID NO: 16
gggtttaagacgatggtatggtttgtttcgttatt

SEQ ID NO: 3380 - DNA, 22 bp, Artificial Sequence
  bisulfite treated nucleic acid for analysis of methylation status of SEQ ID NO: 16
cgataatataacctactccgcc

SEQ ID NO: 3381 - DNA, 22 bp, Artificial Sequence
  bisulfite treated nucleic acid for analysis of methylation status of SEQ ID NO: 16
cgggaaagtaaagcgtattttt

SEQ ID NO: 3382 - DNA, 33 bp, Artificial Sequence
  bisulfite treated nucleic acid for analysis of methylation status of SEQ ID NO: 16
gtcgacgttatagaggaggagtttacgtgatgg

SEQ ID NO: 3383 - DNA, 23 bp, Artificial Sequence
  bisulfite treated nucleic acid for analysis of methylation status of SEQ ID NO: 16
acgataatataacctactccgcc

SEQ ID NO: 3384 - DNA, 21 bp, Artificial Sequence
  bisulfite treated nucleic acid for analysis of methylation status of SEQ ID NO: 16
tcgggaaagtaaagcgtattt

SEQ ID NO: 3385 - DNA, 21 bp, Artificial Sequence
  bisulfite treated nucleic acid for analysis of methylation status of SEQ ID NO: 16
ttcgggaaagtaaagcgtatt

SEQ ID NO: 3386 - DNA, 24 bp, Artificial Sequence
  bisulfite treated nucleic acid for analysis of methylation status of SEQ ID NO: 16
cgtaaactcctcctctataacgtc

SEQ ID NO: 3387 - DNA, 30 bp, Artificial Sequence
  bisulfite treated nucleic acid for analysis of methylation status of SEQ ID NO: 16
agaggtcgagttttgttatagcgaaggcgt

SEQ ID NO: 3388 - DNA, 24 bp, Artificial Sequence
  bisulfite treated nucleic acid for analysis of methylation status of SEQ ID NO: 16
cacgtaaactcctcctctataacg

SEQ ID NO: 3389 - DNA, 24 bp, Artificial Sequence
  bisulfite treated nucleic acid for analysis of methylation status of SEQ ID NO: 16
aaacgataatataacctactccgc

SEQ ID NO: 3390 - DNA, 24 bp, Artificial Sequence
  bisulfite treated nucleic acid for analysis of methylation status of SEQ ID NO: 16
aacgataatataacctactccgcc

SEQ ID NO: 3391 - DNA, 23 bp, Artificial Sequence
  bisulfite treated nucleic acid for analysis of methylation status of SEQ ID NO: 16
acgtaaactcctcctctataacg

SEQ ID NO: 3392 - DNA, 22 bp, Artificial Sequence
  nucleic acid for analysis of methylation status of SEQ ID NO: 16
tcataaacaaaacgtctcgaat

SEQ ID NO: 3393 - DNA, 24 bp, Artificial Sequence
  bisulfite treated nucleic acid for analysis of methylation status of SEQ ID NO: 16
cgttatagaggaggagtttacgtg

SEQ ID NO: 3394 - DNA, 32 bp, Artificial Sequence
  bisulfite treated nucleic acid for analysis of methylation status of SEQ ID NO: 16
ggtggcggagtaggttatattatcgttttggg

SEQ ID NO: 3395 - DNA, 24 bp, Artificial Sequence
  bisulfite treated nucleic acid for analysis of methylation status of SEQ ID NO: 16
cataaacaaaacgtctcgaattta

SEQ ID NO: 3396 - DNA, 22 bp, Artificial Sequence
  bisulfite treated nucleic acid for analysis of methylation status of SEQ ID NO: 16
cgaaatcctcataaacaaaacg

SEQ ID NO: 3397 - DNA, 18 bp, Artificial Sequence
  bisulfite treated nucleic acid for analysis of methylation status of SEQ ID NO: 16
gtttacgtgatggtggcg

SEQ ID NO: 3398 - DNA, 26 bp, Artificial Sequence
  bisulfite treated nucleic acid for analysis of methylation status of SEQ ID NO: 16
atcgttttgggttcggggagggagag

SEQ ID NO: 3399 - DNA, 19 bp, Artificial Sequence
  bisulfite treated nucleic acid for analysis of methylation status of SEQ ID NO: 16
agtttacgtgatggtggcg

SEQ ID NO: 3400 - DNA, 18 bp, Artificial Sequence
  bisulfite treated nucleic acid for analysis of methylation status of SEQ ID NO: 16
cgccaccatcacgtaaac

SEQ ID NO: 3401 - DNA, 22 bp, Artificial Sequence
  bisulfite treated nucleic acid for analysis of methylation status of SEQ ID NO: 16
ctcataaacaaaacgtctcgaa

SEQ ID NO: 3402 - DNA, 25 bp, Artificial Sequence
  bisulfite treated nucleic acid for analysis of methylation status of SEQ ID NO: 16
acgttatagaggaggagtttacgtg

SEQ ID NO: 3403 - DNA, 21 bp, Artificial Sequence
  bisulfite treated nucleic acid for analysis of methylation status of SEQ ID NO: 42
ttcgtattcggggtaaaagtc

SEQ ID NO: 3404 - DNA, 22 bp, Artificial Sequence
  bisulfite treated nucleic acid for analysis of methylation status of SEQ ID NO: 42
aaacgtaaataacgcaaacacc

SEQ ID NO: 3405 - DNA, 25 bp, Artificial Sequence
  nucleic acid for analysis of methylation status of SEQ ID NO: 42
gtagcgcgacggtttgtcgggtttt

SEQ ID NO: 3406 - DNA, 21 bp, Artificial Sequence
  bisulfite treated nucleic acid for analysis of methylation status of SEQ ID NO: 42
tttcgtattcggggtaaaagt

SEQ ID NO: 3407 - DNA, 25 bp, Artificial Sequence
  bisulfite treated nucleic acid for analysis of methylation status of SEQ ID NO: 42
gggaggatcgggattcgtagcgcga

SEQ ID NO: 3408 - DNA, 21 bp, Artificial Sequence
  bisulfite treated nucleic acid for analysis of methylation status of SEQ ID NO: 42
cggagtttttgtagtaggcgt

SEQ ID NO: 3409 - DNA, 22 bp, Artificial Sequence
  bisulfite treated nucleic acid for analysis of methylation status of SEQ ID NO: 42
aaaaatacttccaacgaaacga

SEQ ID NO: 3410 - DNA, 25 bp, Artificial Sequence
  bisulfite treated nucleic acid for analysis of methylation status of SEQ ID NO: 42
aacggaggtttcgggggagttggag

SEQ ID NO: 3411 - DNA, 22 bp, Artificial Sequence
  bisulfite treated nucleic acid for analysis of methylation status of SEQ ID NO: 42
cgatattcttcctcgctaaaaa

SEQ ID NO: 3412 - DNA, 27 bp, Artificial Sequence
  bisulfite treated nucleic acid for analysis of methylation status of SEQ ID NO: 42
ggagttggaggtttcggaagaggtcgt

SEQ ID NO: 3413 - DNA, 21 bp, Artificial Sequence
  bisulfite treated nucleic acid for analysis of methylation status of SEQ ID NO: 42
tcggagtttttgtagtaggcg

SEQ ID NO: 3414 - DNA, 22 bp, Artificial Sequence
  bisulfite treated nucleic acid for analysis of methylation status of SEQ ID NO: 42
gtgggtcgttttcgtttatatc

SEQ ID NO: 3415 - DNA, 20 bp, Artificial Sequence
  bisulfite treated nucleic acid for analysis of methylation status of SEQ ID NO: 42
cctcgctacctaactcacga

SEQ ID NO: 3416 - DNA, 30 bp, Artificial Sequence
  bisulfite treated nucleic acid for analysis of methylation status of SEQ ID NO: 42
ggggaacggggtttttcgtattttacgtgt

SEQ ID NO: 3417 - DNA, 20 bp, Artificial Sequence
  bisulfite treated nucleic acid for analysis of methylation status of SEQ ID NO: 42
gtattcggggtaaaagtcgg

SEQ ID NO: 3418 - DNA, 22 bp, Artificial Sequence
  bisulfite treated nucleic acid for analysis of methylation status of SEQ ID NO: 42
cctaaaacgtaaataacgcaaa

SEQ ID NO: 3419 - DNA, 22 bp, Artificial Sequence
  bisulfite treated nucleic acid for analysis of methylation status of SEQ ID NO: 42
ccctaaaacgtaaataacgcaa

SEQ ID NO: 3420 - DNA, 22 bp, Artificial Sequence
  bisulfite treated nucleic acid for analysis of methylation status of SEQ ID NO: 42
gggtttttcgtattttacgtgt

SEQ ID NO: 3421 - DNA, 20 bp, Artificial Sequence
  bisulfite treated nucleic acid for analysis of methylation status of SEQ ID NO: 42
ctaccgacgcgacctaacta

SEQ ID NO: 3422 - DNA, 25 bp, Artificial Sequence
  bisulfite treated nucleic acid for analysis of methylation status of SEQ ID NO: 42
aggtagcgagggtcgttttcgcgtt

SEQ ID NO: 3423 - DNA, 20 bp, Artificial Sequence
  bisulfite treated nucleic acid for analysis of methylation status of SEQ ID NO: 42
cgagttaaagcgaggttttg

SEQ ID NO: 3424 - DNA, 22 bp, Artificial Sequence
  bisulfite treated nucleic acid for analysis of methylation status of SEQ ID NO: 42
ctccgaaataccgataacctaa

SEQ ID NO: 3425 - DNA, 34 bp, Artificial Sequence
  bisulfite treated nucleic acid for analysis of methylation status of SEQ ID NO: 42
gtattcgggtatcgttattagagaacggttggtt

SEQ ID NO: 3426 - DNA, 22 bp, Artificial Sequence
  bisulfite treated nucleic acid for analysis of methylation status of SEQ ID NO: 42
aaaacgtaaataacgcaaacac

SEQ ID NO: 3427 - DNA, 21 bp, Artificial Sequence
  bisulfite treated nucleic acid for analysis of methylation status of SEQ ID NO: 42
ccgatattcttcctcgctaaa

SEQ ID NO: 3428 - DNA, 22 bp, Artificial Sequence
  bisulfite treated nucleic acid for analysis of methylation status of SEQ ID NO: 42
cgttgtagtttagttaggtcgc

SEQ ID NO: 3429 - DNA, 22 bp, Artificial Sequence
  nucleic acid for analysis of methylation status of SEQ ID NO: 42
acttttaccccgaatacgaaaa

SEQ ID NO: 3430 - DNA, 27 bp, Artificial Sequence
  bisulfite treated nucleic acid for analysis of methylation status of SEQ ID NO: 42
ggcgcgcggggatttcgtttacgtcgt

SEQ ID NO: 3431 - DNA, 22 bp, Artificial Sequence
  bisulfite treated nucleic acid for analysis of methylation status of SEQ ID NO: 42
cttttaccccgaatacgaaaac

SEQ ID NO: 3432 - DNA, 22 bp, Artificial Sequence
  bisulfite treated nucleic acid for analysis of methylation status of SEQ ID NO: 42
ttgtagtttagttaggtcgcgt

SEQ ID NO: 3433 - DNA, 22 bp, Artificial Sequence
  bisulfite treated nucleic acid for analysis of methylation status of SEQ ID NO: 42
tttcgtattttacgtgttttgc

SEQ ID NO: 3434 - DNA, 20 bp, Artificial Sequence
  bisulfite treated nucleic acid for analysis of methylation status of SEQ ID NO: 42
cggagtttttgtagtaggcg

SEQ ID NO: 3435 - DNA, 22 bp, Artificial Sequence
  bisulfite treated nucleic acid for analysis of methylation status of SEQ ID NO: 42
aaaatacttccaacgaaacgac

SEQ ID NO: 3436 - DNA, 20 bp, Artificial Sequence
  bisulfite treated nucleic acid for analysis of methylation status of SEQ ID NO: 42
tagttaggtcgcgtcggtag

SEQ ID NO: 3437 - DNA, 21 bp, Artificial Sequence
  bisulfite treated nucleic acid for analysis of methylation status of SEQ ID NO: 42
acgtaaataacgcaaacaccc

SEQ ID NO: 3438 - DNA, 21 bp, Artificial Sequence
  bisulfite treated nucleic acid for analysis of methylation status of SEQ ID NO: 42
ttttaccccgaatacgaaaac

SEQ ID NO: 3439 - DNA, 22 bp, Artificial Sequence
  bisulfite treated nucleic acid for analysis of methylation status of SEQ ID NO: 42
cgcgttgtagtttagttaggtc

SEQ ID NO: 3440 - DNA, 20 bp, Artificial Sequence
  bisulfite treated nucleic acid for analysis of methylation status of SEQ ID NO: 42
gacggagattcgtttggatt

SEQ ID NO: 3441 - DNA, 22 bp, Artificial Sequence
  bisulfite treated nucleic acid for analysis of methylation status of SEQ ID NO: 42
aactccgaaataccgataacct

SEQ ID NO: 3442 - DNA, 23 bp, Artificial Sequence
  bisulfite treated nucleic acid for analysis of methylation status of SEQ ID NO: 42
gttgtagtttagttaggtcgcgt

SEQ ID NO: 3443 - DNA, 23 bp, Artificial Sequence
  bisulfite treated nucleic acid for analysis of methylation status of SEQ ID NO: 42
cgagttcggagtttttgtagtag

SEQ ID NO: 3444 - DNA, 21 bp, Artificial Sequence
  bisulfite treated nucleic acid for analysis of methylation status of SEQ ID NO: 42
gacttttaccccgaatacgaa

SEQ ID NO: 3445 - DNA, 22 bp, Artificial Sequence
  bisulfite treated nucleic acid for analysis of methylation status of SEQ ID NO: 42
gcgttgtagtttagttaggtcg

SEQ ID NO: 3446 - DNA, 21 bp, Artificial Sequence
  bisulfite treated nucleic acid for analysis of methylation status of SEQ ID NO: 42
cttttaccccgaatacgaaaa

SEQ ID NO: 3447 - DNA, 19 bp, Artificial Sequence
  bisulfite treated nucleic acid for analysis of methylation status of SEQ ID NO: 42
cgtgggaattttaagtcgg

SEQ ID NO: 3448 - DNA, 22 bp, Artificial Sequence
  bisulfite treated nucleic acid for analysis of methylation status of SEQ ID NO: 42
cgccgaaataccttacatctac

SEQ ID NO: 3449 - DNA, 24 bp, Artificial Sequence
  bisulfite treated nucleic acid for analysis of methylation status of SEQ ID NO: 42
ttcggacgttttcgcgcggtaggg

SEQ ID NO: 3450 - DNA, 20 bp, Artificial Sequence
  bisulfite treated nucleic acid for analysis of methylation status of SEQ ID NO: 42
cgacgcgacctaactaaact

SEQ ID NO: 3451 - DNA, 26 bp, Artificial Sequence
  bisulfite treated nucleic acid for analysis of methylation status of SEQ ID NO: 42
ttaggtagcgagggtcgttttcgcgt

SEQ ID NO: 3452 - DNA, 20 bp, Artificial Sequence
  bisulfite treated nucleic acid for analysis of methylation status of SEQ ID NO: 42
cgtaaataacgcaaacaccc

SEQ ID NO: 3453 - DNA, 23 bp, Artificial Sequence
  bisulfite treated nucleic acid for analysis of methylation status of SEQ ID NO: 42
tcgcgttgtagtttagttaggtc

SEQ ID NO: 3454 - DNA, 21 bp, Artificial Sequence
  bisulfite treated nucleic acid for analysis of methylation status of SEQ ID NO: 42
gaatacgaaaaccaccgaaaa

SEQ ID NO: 3455 - DNA, 22 bp, Artificial Sequence
  bisulfite treated nucleic acid for analysis of methylation status of SEQ ID NO: 42
cgttagttgaggtagtatcggc

SEQ ID NO: 3456 - DNA, 19 bp, Artificial Sequence
  bisulfite treated nucleic acid for analysis of methylation status of SEQ ID NO: 42
ataacgacgatccgctttc

SEQ ID NO: 3457 - DNA, 33 bp, Artificial Sequence
  bisulfite treated nucleic acid for analysis of methylation status of SEQ ID NO: 42
tttcggttttggttcgggagacgcggttcgtta

SEQ ID NO: 3458 - DNA, 22 bp, Artificial Sequence
  bisulfite treated nucleic acid for analysis of methylation status of SEQ ID NO: 42
aggttatcggtatttcggagtt

SEQ ID NO: 3459 - DNA, 19 bp, Artificial Sequence
  bisulfite treated nucleic acid for analysis of methylation status of SEQ ID NO: 42
cttctaacgaaccgcgtct

SEQ ID NO: 3460 - DNA, 30 bp, Artificial Sequence
  bisulfite treated nucleic acid for analysis of methylation status of SEQ ID NO: 42
ggttacgttagttgaggtagtatcggcggg

SEQ ID NO: 3461 - DNA, 20 bp, Artificial Sequence
  bisulfite treated nucleic acid for analysis of methylation status of SEQ ID NO: 42
taccgacgcgacctaactaa

SEQ ID NO: 3462 - DNA, 21 bp, Artificial Sequence
  nucleic acid for analysis of methylation status of SEQ ID NO: 42
aacgtaaataacgcaaacacc

SEQ ID NO: 3463 - DNA, 20 bp, Artificial Sequence
  bisulfite treated nucleic acid for analysis of methylation status of SEQ ID NO: 42
gaacggggtttttcgtattt

SEQ ID NO: 3464 - DNA, 23 bp, Artificial Sequence
  bisulfite treated nucleic acid for analysis of methylation status of SEQ ID NO: 42
gacctaactaaactacaacgcga

SEQ ID NO: 3465 - DNA, 28 bp, Artificial Sequence
  bisulfite treated nucleic acid for analysis of methylation status of SEQ ID NO: 42
ttttcgtgagttaggtagcgagggtcgt

SEQ ID NO: 3466 - DNA, 20 bp, Artificial Sequence
  bisulfite treated nucleic acid for analysis of methylation status of SEQ ID NO: 42
gcgagttcggagtttttgta

SEQ ID NO: 3467 - DNA, 21 bp, Artificial Sequence
  bisulfite treated nucleic acid for analysis of methylation status of SEQ ID NO: 42
atacttccaacgaaacgacct

SEQ ID NO: 3468 - DNA, 33 bp, Artificial Sequence
  bisulfite treated nucleic acid for analysis of methylation status of SEQ ID NO: 42
aggcgtaattttttttagaaacggaggtttcgg

SEQ ID NO: 3469 - DNA, 22 bp, Artificial Sequence
  bisulfite treated nucleic acid for analysis of methylation status of SEQ ID NO: 42
gcgagttcggagtttttgtagt

SEQ ID NO: 3470 - DNA, 19 bp, Artificial Sequence
  bisulfite treated nucleic acid for analysis of methylation status of SEQ ID NO: 42
gcgtgggaattttaagtcg

SEQ ID NO: 3471 - DNA, 22 bp, Artificial Sequence
  bisulfite treated nucleic acid for analysis of methylation status of SEQ ID NO: 42
gaacggggtttttcgtatttta

SEQ ID NO: 3472 - DNA, 21 bp, Artificial Sequence
  bisulfite treated nucleic acid for analysis of methylation status of SEQ ID NO: 42
ttagttaggtcgcgtcggtag

SEQ ID NO: 3473 - DNA, 21 bp, Artificial Sequence
  bisulfite treated nucleic acid for analysis of methylation status of SEQ ID NO: 42
aacggggtttttcgtatttta

SEQ ID NO: 3474 - DNA, 23 bp, Artificial Sequence
  bisulfite treated nucleic acid for analysis of methylation status of SEQ ID NO: 42
ttttcgtattttacgtgttttgc

SEQ ID NO: 3475 - DNA, 20 bp, Artificial Sequence
  bisulfite treated nucleic acid for analysis of methylation status of SEQ ID NO: 42
tcgtattcggggtaaaagtc

SEQ ID NO: 3476 - DNA, 23 bp, Artificial Sequence
  bisulfite treated nucleic acid for analysis of methylation status of SEQ ID NO: 42
actccgaaataccgataacctaa

SEQ ID NO: 3477 - DNA, 22 bp, Artificial Sequence
  bisulfite treated nucleic acid for analysis of methylation status of SEQ ID NO: 42
ttcgcgttgtagtttagttagg

SEQ ID NO: 3478 - DNA, 23 bp, Artificial Sequence
  bisulfite treated nucleic acid for analysis of methylation status of SEQ ID NO: 42
gcgttgtagtttagttaggtcgc

SEQ ID NO: 3479 - DNA, 21 bp, Artificial Sequence
  bisulfite treated nucleic acid for analysis of methylation status of SEQ ID NO: 42
aatacttccaacgaaacgacc

SEQ ID NO: 3480 - DNA, 22 bp, Artificial Sequence
  bisulfite treated nucleic acid for analysis of methylation status of SEQ ID NO: 42
ggttatcggtatttcggagttt

SEQ ID NO: 3481 - DNA, 21 bp, Artificial Sequence
  bisulfite treated nucleic acid for analysis of methylation status of SEQ ID NO: 42
ggtcgttttcgtttatatcgg

SEQ ID NO: 3482 - DNA, 20 bp, Artificial Sequence
  bisulfite treated nucleic acid for analysis of methylation status of SEQ ID NO: 42
aaacccgatattcttcctcg

SEQ ID NO: 3483 - DNA, 19 bp, Artificial Sequence
  bisulfite treated nucleic acid for analysis of methylation status of SEQ ID NO: 42
tattcggggtaaaagtcgg

SEQ ID NO: 3484 - DNA, 20 bp, Artificial Sequence
  bisulfite treated nucleic acid for analysis of methylation status of SEQ ID NO: 42
agttaggtagcgagggtcgt

SEQ ID NO: 3485 - DNA, 21 bp, Artificial Sequence
  bisulfite treated nucleic acid for analysis of methylation status of SEQ ID NO: 42
gaaacgacgtaaacgaaatcc

SEQ ID NO: 3486 - DNA, 33 bp, Artificial Sequence
  bisulfite treated nucleic acid for analysis of methylation status of SEQ ID NO: 42
ttcgcgttgtagtttagttaggtcgcgtcggta

SEQ ID NO: 3487 - DNA, 20 bp, Artificial Sequence
  bisulfite treated nucleic acid for analysis of methylation status of SEQ ID NO: 42
cgtattcggggtaaaagtcg

SEQ ID NO: 3488 - DNA, 23 bp, Artificial Sequence
  bisulfite treated nucleic acid for analysis of methylation status of SEQ ID NO: 42
ctaaaacgtaaataacgcaaaca

SEQ ID NO: 3489 - DNA, 22 bp, Artificial Sequence
  bisulfite treated nucleic acid for analysis of methylation status of SEQ ID NO: 42
taaaacgtaaataacgcaaaca

SEQ ID NO: 3490 - DNA, 21 bp, Artificial Sequence
  bisulfite treated nucleic acid for analysis of methylation status of SEQ ID NO: 42
gtcgttttcgtttatatcggc

SEQ ID NO: 3491 - DNA, 20 bp, Artificial Sequence
  bisulfite treated nucleic acid for analysis of methylation status of SEQ ID NO: 42
acgaccctcgctacctaact

SEQ ID NO: 3492 - DNA, 20 bp, Artificial Sequence
  bisulfite treated nucleic acid for analysis of methylation status of SEQ ID NO: 42
gataacgacgatccgctttc

SEQ ID NO: 3493 - DNA, 21 bp, Artificial Sequence
  bisulfite treated nucleic acid for analysis of methylation status of SEQ ID NO: 42
tctaccgacgcgacctaacta

SEQ ID NO: 3494 - DNA, 22 bp, Artificial Sequence
  bisulfite treated nucleic acid for analysis of methylation status of SEQ ID NO: 42
tatcggtatttcggagtttagg

SEQ ID NO: 3495 - DNA, 22 bp, Artificial Sequence
  bisulfite treated nucleic acid for analysis of methylation status of SEQ ID NO: 42
ttaggttatcggtatttcggag

SEQ ID NO: 3496 - DNA, 22 bp, Artificial Sequence
  bisulfite treated nucleic acid for analysis of methylation status of SEQ ID NO: 42
ggggtttttcgtattttacgtg

SEQ ID NO: 3497 - DNA, 20 bp, Artificial Sequence
  bisulfite treated nucleic acid for analysis of methylation status of SEQ ID NO: 42
tcgtgagttaggtagcgagg

SEQ ID NO: 3498 - DNA, 33 bp, Artificial Sequence
  bisulfite treated nucleic acid for analysis of methylation status of SEQ ID NO: 42
ttttcgcgttgtagtttagttaggtcgcgtcgg

SEQ ID NO: 3499 - DNA, 21 bp, Artificial Sequence
  bisulfite treated nucleic acid for analysis of methylation status of SEQ ID NO: 42
tttagttaggtcgcgtcggta

SEQ ID NO: 3500 - DNA, 20 bp, Artificial Sequence
  bisulfite treated nucleic acid for analysis of methylation status of SEQ ID NO: 42
agttaaagcgaggttttgcg

SEQ ID NO: 3501 - DNA, 22 bp, Artificial Sequence
  bisulfite treated nucleic acid for analysis of methylation status of SEQ ID NO: 42
tccgaaataccgataacctaaa

SEQ ID NO: 3502 - DNA, 34 bp, Artificial Sequence
  bisulfite treated nucleic acid for analysis of methylation status of SEQ ID NO: 42
ttcgtattcgggtatcgttattagagaacggttg

SEQ ID NO: 3503 - DNA, 22 bp, Artificial Sequence
  bisulfite treated nucleic acid for analysis of methylation status of SEQ ID NO: 42
aaatacttccaacgaaacgacc

SEQ ID NO: 3504 - DNA, 19 bp, Artificial Sequence
  bisulfite treated nucleic acid for analysis of methylation status of SEQ ID NO: 42
gttaaagcgaggttttgcg

SEQ ID NO: 3505 - DNA, 20 bp, Artificial Sequence
  bisulfite treated nucleic acid for analysis of methylation status of SEQ ID NO: 42
ggatcgtcgttatcggattt

SEQ ID NO: 3506 - DNA, 21 bp, Artificial Sequence
  bisulfite treated nucleic acid for analysis of methylation status of SEQ ID NO: 42
cgaaaaacccgtctctctaac

SEQ ID NO: 3507 - DNA, 32 bp, Artificial Sequence
  bisulfite treated nucleic acid for analysis of methylation status of SEQ ID NO: 42
gttttttaggtatcgtcgttcgggaggagttg

SEQ ID NO: 3508 - DNA, 21 bp, Artificial Sequence
  bisulfite treated nucleic acid for analysis of methylation status of SEQ ID NO: 42
tcgtattttacgtgttttgcg

SEQ ID NO: 3509 - DNA, 19 bp, Artificial Sequence
  bisulfite treated nucleic acid for analysis of methylation status of SEQ ID NO: 42
ctttcgccgaccttctaac

SEQ ID NO: 3510 - DNA, 23 bp, Artificial Sequence
  bisulfite treated nucleic acid for analysis of methylation status of SEQ ID NO: 42
cctaaactccgaaataccgataa

SEQ ID NO: 3511 - DNA, 22 bp, Artificial Sequence
  bisulfite treated nucleic acid for analysis of methylation status of SEQ ID NO: 42
atacttccaacgaaacgacctc

SEQ ID NO: 3512 - DNA, 19 bp, Artificial Sequence
  bisulfite treated nucleic acid for analysis of methylation status of SEQ ID NO: 42
ggaacggggtttttcgtat

SEQ ID NO: 3513 - DNA, 22 bp, Artificial Sequence
  bisulfite treated nucleic acid for analysis of methylation status of SEQ ID NO: 42
cgacgcgacctaactaaactac

SEQ ID NO: 3514 - DNA, 19 bp, Artificial Sequence
  bisulfite treated nucleic acid for analysis of methylation status of SEQ ID NO: 42
agttaggtcgcgtcggtag

SEQ ID NO: 3515 - DNA, 19 bp, Artificial Sequence
  bisulfite treated nucleic acid for analysis of methylation status of SEQ ID NO: 42
gtaaaagtcgggaggatcg

SEQ ID NO: 3516 - DNA, 21 bp, Artificial Sequence
  bisulfite treated nucleic acid for analysis of methylation status of SEQ ID NO: 42
gggtcgttttcgtttatatcg

SEQ ID NO: 3517 - DNA, 21 bp, Artificial Sequence
  bisulfite treated nucleic acid for analysis of methylation status of SEQ ID NO: 42
cctcgctacctaactcacgaa

SEQ ID NO: 3518 - DNA, 22 bp, Artificial Sequence
  bisulfite treated nucleic acid for analysis of methylation status of SEQ ID NO: 42
cgacctaactaaactacaacgc

SEQ ID NO: 3519 - DNA, 22 bp, Artificial Sequence
  bisulfite treated nucleic acid for analysis of methylation status of SEQ ID NO: 42
gcgacctaactaaactacaacg

SEQ ID NO: 3520 - DNA, 22 bp, Artificial Sequence
  bisulfite treated nucleic acid for analysis of methylation status of SEQ ID NO: 42
acctaactaaactacaacgcga

SEQ ID NO: 3521 - DNA, 18 bp, Artificial Sequence
  bisulfite treated nucleic acid for analysis of methylation status of SEQ ID NO: 42
cgagtttgttttgagcgg

SEQ ID NO: 3522 - DNA, 22 bp, Artificial Sequence
  bisulfite treated nucleic acid for analysis of methylation status of SEQ ID NO: 42
cgccgatactacctcaactaac

SEQ ID NO: 3523 - DNA, 36 bp, Artificial Sequence
  bisulfite treated nucleic acid for analysis of methylation status of SEQ ID NO: 42
ttatcggtatttcggagtttagggtttagatttggt

SEQ ID NO: 3524 - DNA, 22 bp, Artificial Sequence
  bisulfite treated nucleic acid for analysis of methylation status of SEQ ID NO: 42
gccgatactacctcaactaacg

SEQ ID NO: 3525 - DNA, 18 bp, Artificial Sequence
  bisulfite treated nucleic acid for analysis of methylation status of SEQ ID NO: 42
cgaggttttgcgagtttg

SEQ ID NO: 3526 - DNA, 20 bp, Artificial Sequence
  bisulfite treated nucleic acid for analysis of methylation status of SEQ ID NO: 42
ttaccccgaatacgaaaacc

SEQ ID NO: 3527 - DNA, 22 bp, Artificial Sequence
  bisulfite treated nucleic acid for analysis of methylation status of SEQ ID NO: 42
cgaactcccctaaaacgtaaat

SEQ ID NO: 3528 - DNA, 22 bp, Artificial Sequence
  bisulfite treated nucleic acid for analysis of methylation status of SEQ ID NO: 42
aaaacgccgaaataccttacat

SEQ ID NO: 3529 - DNA, 19 bp, Artificial Sequence
  bisulfite treated nucleic acid for analysis of methylation status of SEQ ID NO: 42
acggagattcgtttggatt

SEQ ID NO: 3530 - DNA, 22 bp, Artificial Sequence
  bisulfite treated nucleic acid for analysis of methylation status of SEQ ID NO: 42
actccgaaataccgataaccta

SEQ ID NO: 3531 - DNA, 20 bp, Artificial Sequence
  bisulfite treated nucleic acid for analysis of methylation status of SEQ ID NO: 42
aaaaaccgaaacgacgtaaa

SEQ ID NO: 3532 - DNA, 24 bp, Artificial Sequence
  bisulfite treated nucleic acid for analysis of methylation status of SEQ ID NO: 42
aatttgtttcggcgcgcggggatt

SEQ ID NO: 3533 - DNA, 18 bp, Artificial Sequence
  bisulfite treated nucleic acid for analysis of methylation status of SEQ ID NO: 42
gcgagtttgttttgagcg

SEQ ID NO: 3534 - DNA, 21 bp, Artificial Sequence
  bisulfite treated nucleic acid for analysis of methylation status of SEQ ID NO: 42
ttcgtgagttaggtagcgagg

SEQ ID NO: 3535 - DNA, 22 bp, Artificial Sequence
  bisulfite treated nucleic acid for analysis of methylation status of SEQ ID NO: 42
aacgccgaaataccttacatct

SEQ ID NO: 3536 - DNA, 19 bp, Artificial Sequence
  bisulfite treated nucleic acid for analysis of methylation status of SEQ ID NO: 42
accgacgcgacctaactaa

SEQ ID NO: 3537 - DNA, 22 bp, Artificial Sequence
  bisulfite treated nucleic acid for analysis of methylation status of SEQ ID NO: 42
taggttatcggtatttcggagt

SEQ ID NO: 3538 - DNA, 19 bp, Artificial Sequence
  bisulfite treated nucleic acid for analysis of methylation status of SEQ ID NO: 42
aaagcggatcgtcgttatc

SEQ ID NO: 3539 - DNA, 29 bp, Artificial Sequence
  bisulfite treated nucleic acid for analysis of methylation status of SEQ ID NO: 42
tttaggtatcgtcgttcgggaggagttgg

SEQ ID NO: 3540 - DNA, 20 bp, Artificial Sequence
  bisulfite treated nucleic acid for analysis of methylation status of SEQ ID NO: 42
tcgttttcgtttatatcggc

SEQ ID NO: 3541 - DNA, 22 bp, Artificial Sequence
  bisulfite treated nucleic acid for analysis of methylation status of SEQ ID NO: 42
gtttaggttatcggtatttcgg

SEQ ID NO: 3542 - DNA, 22 bp, Artificial Sequence
  bisulfite treated nucleic acid for analysis of methylation status of SEQ ID NO: 42
ggtttaggttatcggtatttcg

SEQ ID NO: 3543 - DNA, 23 bp, Artificial Sequence
  bisulfite treated nucleic acid for analysis of methylation status of SEQ ID NO: 42
gggtttttcgtattttacgtgtt

SEQ ID NO: 3544 - DNA, 22 bp, Artificial Sequence
  bisulfite treated nucleic acid for analysis of methylation status of SEQ ID NO: 42
tttttagcgaggaagaatatcg

SEQ ID NO: 3545 - DNA, 19 bp, Artificial Sequence
  bisulfite treated nucleic acid for analysis of methylation status of SEQ ID NO: 42
ctccgtaaccaaccaaacg

SEQ ID NO: 3546 - DNA, 24 bp, Artificial Sequence
  bisulfite treated nucleic acid for analysis of methylation status of SEQ ID NO: 42
ttgggacggggtcgggtggttcgg

SEQ ID NO: 3547 - DNA, 21 bp, Artificial Sequence
  bisulfite treated nucleic acid for analysis of methylation status of SEQ ID NO: 42
tttcgtgagttaggtagcgag

SEQ ID NO: 3548 - DNA, 18 bp, Artificial Sequence
  bisulfite treated nucleic acid for analysis of methylation status of SEQ ID NO: 42
cggggattttagagtcgg

SEQ ID NO: 3549 - DNA, 22 bp, Artificial Sequence
  bisulfite treated nucleic acid for analysis of methylation status of SEQ ID NO: 42
acgatcaaacgacgaaataaac

SEQ ID NO: 3550 - DNA, 30 bp, Artificial Sequence
  bisulfite treated nucleic acid for analysis of methylation status of SEQ ID NO: 42
gtcgtttattgcgtacgcgcgggtttgcgg

SEQ ID NO: 3551 - DNA, 21 bp, Artificial Sequence
  bisulfite treated nucleic acid for analysis of methylation status of SEQ ID NO: 42
acgccgaaataccttacatct

SEQ ID NO: 3552 - DNA, 18 bp, Artificial Sequence
  bisulfite treated nucleic acid for analysis of methylation status of SEQ ID NO: 42
tccgtaaccaaccaaacg

SEQ ID NO: 3553 - DNA, 19 bp, Artificial Sequence
  bisulfite treated nucleic acid for analysis of methylation status of SEQ ID NO: 42
cggggattttagagtcggt

SEQ ID NO: 3554 - DNA, 22 bp, Artificial Sequence
  bisulfite treated nucleic acid for analysis of methylation status of SEQ ID NO: 42
cgatcaaacgacgaaataaact

SEQ ID NO: 3555 - DNA, 20 bp, Artificial Sequence
  bisulfite treated nucleic acid for analysis of methylation status of SEQ ID NO: 42
ccctcgctacctaactcacg

SEQ ID NO: 3556 - DNA, 21 bp, Artificial Sequence
  bisulfite treated nucleic acid for analysis of methylation status of SEQ ID NO: 42
aaacgccgaaataccttacat

SEQ ID NO: 3557 - DNA, 21 bp, Artificial Sequence
  bisulfite treated nucleic acid for analysis of methylation status of SEQ ID NO: 42
gagttaggtagcgagggtcgt

SEQ ID NO: 3558 - DNA, 18 bp, Artificial Sequence
  bisulfite treated nucleic acid for analysis of methylation status of SEQ ID NO: 42
taaagcgaggttttgcga

SEQ ID NO: 3559 - DNA, 21 bp, Artificial Sequence
  bisulfite treated nucleic acid for analysis of methylation status of SEQ ID NO: 42
tgggtcgttttcgtttatatc

SEQ ID NO: 3560 - DNA, 20 bp, Artificial Sequence
  bisulfite treated nucleic acid for analysis of methylation status of SEQ ID NO: 42
aacggggtttttcgtatttt

SEQ ID NO: 3561 - DNA, 20 bp, Artificial Sequence
  bisulfite treated nucleic acid for analysis of methylation status of SEQ ID NO: 42
cgaccctcgctacctaactc

SEQ ID NO: 3562 - DNA, 23 bp, Artificial Sequence
  bisulfite treated nucleic acid for analysis of methylation status of SEQ ID NO: 42
ggtttttcgtattttacgtgttt

SEQ ID NO: 3563 - DNA, 21 bp, Artificial Sequence
  bisulfite treated nucleic acid for analysis of methylation status of SEQ ID NO: 42
aacggttggtttaggttatcg

SEQ ID NO: 3564 - DNA, 21 bp, Artificial Sequence
  bisulfite treated nucleic acid for analysis of methylation status of SEQ ID NO: 42
aacgaccctcgctacctaact

SEQ ID NO: 3565 - DNA, 19 bp, Artificial Sequence
  bisulfite treated nucleic acid for analysis of methylation status of SEQ ID NO: 42
ctaccgacgcgacctaact

SEQ ID NO: 3566 - DNA, 19 bp, Artificial Sequence
  bisulfite treated nucleic acid for analysis of methylation status of SEQ ID NO: 42
ttttgcgcggtggtatagt

SEQ ID NO: 3567 - DNA, 24 bp, Artificial Sequence
  bisulfite treated nucleic acid for analysis of methylation status of SEQ ID NO: 42
agcggggtcgtagggttaaggggt

SEQ ID NO: 3568 - DNA, 20 bp, Artificial Sequence
  bisulfite treated nucleic acid for analysis of methylation status of SEQ ID NO: 42
ccgacttttaccccgaatac

SEQ ID NO: 3569 - DNA, 22 bp, Artificial Sequence
  bisulfite treated nucleic acid for analysis of methylation status of SEQ ID NO: 42
acgaactcccctaaaacgtaaa

SEQ ID NO: 3570 - DNA, 20 bp, Artificial Sequence
  bisulfite treated nucleic acid for analysis of methylation status of SEQ ID NO: 42
ccgacgcgacctaactaaac

SEQ ID NO: 3571 - DNA, 18 bp, Artificial Sequence
  bisulfite treated nucleic acid for analysis of methylation status of SEQ ID NO: 42
ggaggatcgggattcgta

SEQ ID NO: 3572 - DNA, 34 bp, Artificial Sequence
  bisulfite treated nucleic acid for analysis of methylation status of SEQ ID NO: 42
tgcgcggtggtatagtttgggttcgtttaagcgg

SEQ ID NO: 3573 - DNA, 20 bp, Artificial Sequence
  bisulfite treated nucleic acid for analysis of methylation status of SEQ ID NO: 42
tttaccccgaatacgaaaac

SEQ ID NO: 3574 - DNA, 18 bp, Artificial Sequence
  bisulfite treated nucleic acid for analysis of methylation status of SEQ ID NO: 42
aggatcgggattcgtagc

SEQ ID NO: 3575 - DNA, 18 bp, Artificial Sequence
  bisulfite treated nucleic acid for analysis of methylation status of SEQ ID NO: 42
ttaaagcgaggttttgcg

SEQ ID NO: 3576 - DNA, 20 bp, Artificial Sequence
  bisulfite treated nucleic acid for analysis of methylation status of SEQ ID NO: 42
ctcgctacctaactcacgaa

SEQ ID NO: 3577 - DNA, 18 bp, Artificial Sequence
  bisulfite treated nucleic acid for analysis of methylation status of SEQ ID NO: 42
gttcgtgaaattgcggtc

SEQ ID NO: 3578 - DNA, 22 bp, Artificial Sequence
  bisulfite treated nucleic acid for analysis of methylation status of SEQ ID NO: 42
ttaactcgaaatccaaacgaat

SEQ ID NO: 3579 - DNA, 34 bp, Artificial Sequence
  bisulfite treated nucleic acid for analysis of methylation status of SEQ ID NO: 42
ggtttatcgcgatggttttttcgatattttcgga

SEQ ID NO: 3580 - DNA, 19 bp, Artificial Sequence
  bisulfite treated nucleic acid for analysis of methylation status of SEQ ID NO: 42
ttatcgggttgatcggttt

SEQ ID NO: 3581 - DNA, 22 bp, Artificial Sequence
  bisulfite treated nucleic acid for analysis of methylation status of SEQ ID NO: 42
cgactctaaaatccccgaaata

SEQ ID NO: 3582 - DNA, 35 bp, Artificial Sequence
  bisulfite treated nucleic acid for analysis of methylation status of SEQ ID NO: 42
ggtttaggttcggtgagagattttatatagcggag

SEQ ID NO: 3583 - DNA, 19 bp, Artificial Sequence
  bisulfite treated nucleic acid for analysis of methylation status of SEQ ID NO: 42
tttatcgggttgatcggtt

SEQ ID NO: 3584 - DNA, 19 bp, Artificial Sequence
  bisulfite treated nucleic acid for analysis of methylation status of SEQ ID NO: 42
ttttatcgggttgatcggt

SEQ ID NO: 3585 - DNA, 18 bp, Artificial Sequence
  bisulfite treated nucleic acid for analysis of methylation status of SEQ ID NO: 42
aagcgaggttttgcgagt

SEQ ID NO: 3586 - DNA, 18 bp, Artificial Sequence
  bisulfite treated nucleic acid for analysis of methylation status of SEQ ID NO: 42
agcgaggttttgcgagtt

SEQ ID NO: 3587 - DNA, 21 bp, Artificial Sequence
  bisulfite treated nucleic acid for analysis of methylation status of SEQ ID NO: 42
tacttccaacgaaacgacctc

SEQ ID NO: 3588 - DNA, 21 bp, Artificial Sequence
  bisulfite treated nucleic acid for analysis of methylation status of SEQ ID NO: 42
aaaaacgccgaaataccttac

SEQ ID NO: 3589 - DNA, 21 bp, Artificial Sequence
  bisulfite treated nucleic acid for analysis of methylation status of SEQ ID NO: 42
accctaaactccgaaataccg

SEQ ID NO: 3590 - DNA, 18 bp, Artificial Sequence
  bisulfite treated nucleic acid for analysis of methylation status of SEQ ID NO: 42
taacgacgatccgctttc

SEQ ID NO: 3591 - DNA, 20 bp, Artificial Sequence
  bisulfite treated nucleic acid for analysis of methylation status of SEQ ID NO: 42
ctctaccgacgcgacctaac

SEQ ID NO: 3592 - DNA, 20 bp, Artificial Sequence
  bisulfite treated nucleic acid for analysis of methylation status of SEQ ID NO: 42
gaaagcggatcgtcgttatc

SEQ ID NO: 3593 - DNA, 20 bp, Artificial Sequence
  bisulfite treated nucleic acid for analysis of methylation status of SEQ ID NO: 42
tacttccaacgaaacgacct

SEQ ID NO: 3594 - DNA, 18 bp, Artificial Sequence
  bisulfite treated nucleic acid for analysis of methylation status of SEQ ID NO: 42
attcggggtaaaagtcgg

SEQ ID NO: 3595 - DNA, 20 bp, Artificial Sequence
  bisulfite treated nucleic acid for analysis of methylation status of SEQ ID NO: 42
gtttagttaggtcgcgtcgg

SEQ ID NO: 3596 - DNA, 20 bp, Artificial Sequence
  bisulfite treated nucleic acid for analysis of methylation status of SEQ ID NO: 42
cccgatattcttcctcgcta

SEQ ID NO: 3597 - DNA, 20 bp, Artificial Sequence
  bisulfite treated nucleic acid for analysis of methylation status of SEQ ID NO: 42
tttttatcgggttgatcggt

SEQ ID NO: 3598 - DNA, 23 bp, Artificial Sequence
  bisulfite treated nucleic acid for analysis of methylation status of SEQ ID NO: 42
ttatcggtatttcggagtttagg

SEQ ID NO: 3599 - DNA, 23 bp, Artificial Sequence
  bisulfite treated nucleic acid for analysis of methylation status of SEQ ID NO: 42
tttaggttatcggtatttcggag

SEQ ID NO: 3600 - DNA, 22 bp, Artificial Sequence
  bisulfite treated nucleic acid for analysis of methylation status of SEQ ID NO: 42
aacgatcaaacgacgaaataaa

SEQ ID NO: 3601 - DNA, 23 bp, Artificial Sequence
  bisulfite treated nucleic acid for analysis of methylation status of SEQ ID NO: 42
tttcgcgttgtagtttagttagg

SEQ ID NO: 3602 - DNA, 19 bp, Artificial Sequence
  bisulfite treated nucleic acid for analysis of methylation status of SEQ ID NO: 42
taccccgaatacgaaaacc

SEQ ID NO: 3603 - DNA, 23 bp, Artificial Sequence
  bisulfite treated nucleic acid for analysis of methylation status of SEQ ID NO: 42
tttttcgtattttacgtgttttg

SEQ ID NO: 3604 - DNA, 19 bp, Artificial Sequence
  bisulfite treated nucleic acid for analysis of methylation status of SEQ ID NO: 42
gaggatcgggattcgtagc

SEQ ID NO: 3605 - DNA, 19 bp, Artificial Sequence
  bisulfite treated nucleic acid for analysis of methylation status of SEQ ID NO: 42
gccgaccttctaacgaacc

SEQ ID NO: 3606 - DNA, 20 bp, Artificial Sequence
  bisulfite treated nucleic acid for analysis of methylation status of SEQ ID NO: 42
aaaaccgaaacgacgtaaac

SEQ ID NO: 3607 - DNA, 21 bp, Artificial Sequence
  bisulfite treated nucleic acid for analysis of methylation status of SEQ ID NO: 42
atcggtatttcggagtttagg

SEQ ID NO: 3608 - DNA, 22 bp, Artificial Sequence
  bisulfite treated nucleic acid for analysis of methylation status of SEQ ID NO: 42
cggattttagatcgttttgttt

SEQ ID NO: 3609 - DNA, 19 bp, Artificial Sequence
  bisulfite treated nucleic acid for analysis of methylation status of SEQ ID NO: 42
cgaaacctaacccttcgat

SEQ ID NO: 3610 - DNA, 35 bp, Artificial Sequence
  bisulfite treated nucleic acid for analysis of methylation status of SEQ ID NO: 42
gtcgttcgggaggagttggttagagagacgggttt

SEQ ID NO: 3611 - DNA, 19 bp, Artificial Sequence
  bisulfite treated nucleic acid for analysis of methylation status of SEQ ID NO: 42
ccgacgcgacctaactaaa

SEQ ID NO: 3612 - DNA, 19 bp, Artificial Sequence
  bisulfite treated nucleic acid for analysis of methylation status of SEQ ID NO: 42
gttaggtcgcgtcggtaga

SEQ ID NO: 3613 - DNA, 22 bp, Artificial Sequence
  bisulfite treated nucleic acid for analysis of methylation status of SEQ ID NO: 42
ctttaactcgaaatccaaacga

SEQ ID NO: 3614 - DNA, 20 bp, Artificial Sequence
  bisulfite treated nucleic acid for analysis of methylation status of SEQ ID NO: 42
ccctaaactccgaaataccg

SEQ ID NO: 3615 - DNA, 19 bp, Artificial Sequence
  bisulfite treated nucleic acid for analysis of methylation status of SEQ ID NO: 42
accttctaacgaaccgcgt

SEQ ID NO: 3616 - DNA, 23 bp, Artificial Sequence
  bisulfite treated nucleic acid for analysis of methylation status of SEQ ID NO: 42
gcgacctaactaaactacaacgc

SEQ ID NO: 3617 - DNA, 22 bp, Artificial Sequence
  bisulfite treated nucleic acid for analysis of methylation status of SEQ ID NO: 42
ctaaactccgaaataccgataa

SEQ ID NO: 3618 - DNA, 21 bp, Artificial Sequence
  bisulfite treated nucleic acid for analysis of methylation status of SEQ ID NO: 42
tccgaaataccgataacctaa

SEQ ID NO: 3619 - DNA, 18 bp, Artificial Sequence
  bisulfite treated nucleic acid for analysis of methylation status of SEQ ID NO: 42
gcgcggtggtatagtttg

SEQ ID NO: 3620 - DNA, 33 bp, Artificial Sequence
  bisulfite treated nucleic acid for analysis of methylation status of SEQ ID NO: 42
ggggtcgtagggttaaggggtgtttgcgttatt

SEQ ID NO: 3621 - DNA, 18 bp, Artificial Sequence
  bisulfite treated nucleic acid for analysis of methylation status of SEQ ID NO: 42
ttgcgcggtggtatagtt

SEQ ID NO: 3622 - DNA, 18 bp, Artificial Sequence
  bisulfite treated nucleic acid for analysis of methylation status of SEQ ID NO: 42
tttgcgcggtggtatagt

SEQ ID NO: 3623 - DNA, 19 bp, Artificial Sequence
  bisulfite treated nucleic acid for analysis of methylation status of SEQ ID NO: 42
tccaacgaaacgacctctt

SEQ ID NO: 3624 - DNA, 19 bp, Artificial Sequence
  bisulfite treated nucleic acid for analysis of methylation status of SEQ ID NO: 42
caacgaaacgacctcttcc

SEQ ID NO: 3625 - DNA, 19 bp, Artificial Sequence
  bisulfite treated nucleic acid for analysis of methylation status of SEQ ID NO: 42
ttccaacgaaacgacctct

SEQ ID NO: 3626 - DNA, 19 bp, Artificial Sequence
  bisulfite treated nucleic acid for analysis of methylation status of SEQ ID NO: 42
aggtagtatcggcgggaat

SEQ ID NO: 3627 - DNA, 21 bp, Artificial Sequence
  bisulfite treated nucleic acid for analysis of methylation status of SEQ ID NO: 42
acgatccttctcaaaaactcg

SEQ ID NO: 3628 - DNA, 32 bp, Artificial Sequence
  bisulfite treated nucleic acid for analysis of methylation status of SEQ ID NO: 42
gacgcggttcgttagaaggtcggcgaaagcgg

SEQ ID NO: 3629 - DNA, 20 bp, Artificial Sequence
  bisulfite treated nucleic acid for analysis of methylation status of SEQ ID NO: 42
cttccaacgaaacgacctct

SEQ ID NO: 3630 - DNA, 20 bp, Artificial Sequence
  bisulfite treated nucleic acid for analysis of methylation status of SEQ ID NO: 42
atacttccaacgaaacgacc

SEQ ID NO: 3631 - DNA, 18 bp, Artificial Sequence
  bisulfite treated nucleic acid for analysis of methylation status of SEQ ID NO: 42
agtttttggcgagttcgg

SEQ ID NO: 3632 - DNA, 22 bp, Artificial Sequence
  bisulfite treated nucleic acid for analysis of methylation status of SEQ ID NO: 42
ttttcgtgagttaggtagcgag

SEQ ID NO: 3633 - DNA, 18 bp, Artificial Sequence
  bisulfite treated nucleic acid for analysis of methylation status of SEQ ID NO: 42
ccgaaacgacgtaaacga

SEQ ID NO: 3634 - DNA, 20 bp, Artificial Sequence
  bisulfite treated nucleic acid for analysis of methylation status of SEQ ID NO: 42
aacgacgtaaacgaaatccc

SEQ ID NO: 3635 - DNA, 18 bp, Artificial Sequence
  bisulfite treated nucleic acid for analysis of methylation status of SEQ ID NO: 42
ccttctaacgaaccgcgt

SEQ ID NO: 3636 - DNA, 21 bp, Artificial Sequence
  bisulfite treated nucleic acid for analysis of methylation status of SEQ ID NO: 42
cgatattcttcctcgctaaaa

SEQ ID NO: 3637 - DNA, 19 bp, Artificial Sequence
  bisulfite treated nucleic acid for analysis of methylation status of SEQ ID NO: 42
ttaggtcgcgtcggtagag

SEQ ID NO: 3638 - DNA, 18 bp, Artificial Sequence
  bisulfite treated nucleic acid for analysis of methylation status of SEQ ID NO: 42
gcgaggttttgcgagttt

SEQ ID NO: 3639 - DNA, 23 bp, Artificial Sequence
  bisulfite treated nucleic acid for analysis of methylation status of SEQ ID NO: 42
acgttagttgaggtagtatcggc

SEQ ID NO: 3640 - DNA, 19 bp, Artificial Sequence
  bisulfite treated nucleic acid for analysis of methylation status of SEQ ID NO: 42
tttttgcgcggtggtatag

SEQ ID NO: 3641 - DNA, 22 bp, Artificial Sequence
  bisulfite treated nucleic acid for analysis of methylation status of SEQ ID NO: 42
taaactccgaaataccgataac

SEQ ID NO: 3642 - DNA, 18 bp, Artificial Sequence
  bisulfite treated nucleic acid for analysis of methylation status of SEQ ID NO: 42
cgcggtggtatagtttgg

SEQ ID NO: 3643 - DNA, 17 bp, Artificial Sequence
  bisulfite treated nucleic acid for analysis of methylation status of SEQ ID NO: 42
aaagcgaggttttgcga

SEQ ID NO: 3644 - DNA, 22 bp, Artificial Sequence
  bisulfite treated nucleic acid for analysis of methylation status of SEQ ID NO: 42
gttttcgtgagttaggtagcga

SEQ ID NO: 3645 - DNA, 19 bp, Artificial Sequence
  bisulfite treated nucleic acid for analysis of methylation status of SEQ ID NO: 42
cgccgaaacaaattaaaaa

SEQ ID NO: 3646 - DNA, 18 bp, Artificial Sequence
  bisulfite treated nucleic acid for analysis of methylation status of SEQ ID NO: 42
tacgtgttttgcgcgttt

SEQ ID NO: 3647 - DNA, 18 bp, Artificial Sequence
  bisulfite treated nucleic acid for analysis of methylation status of SEQ ID NO: 42
ttacgtgttttgcgcgtt

SEQ ID NO: 3648 - DNA, 33 bp, Artificial Sequence
  bisulfite treated nucleic acid for analysis of methylation status of SEQ ID NO: 42
ggcgtaattttttttagaaacggaggtttcggg

SEQ ID NO: 3649 - DNA, 20 bp, Artificial Sequence
  bisulfite treated nucleic acid for analysis of methylation status of SEQ ID NO: 42
cgtattttacgtgttttgcg

SEQ ID NO: 3650 - DNA, 19 bp, Artificial Sequence
  bisulfite treated nucleic acid for analysis of methylation status of SEQ ID NO: 42
cgtcggtagaggggatttt

SEQ ID NO: 3651 - DNA, 18 bp, Artificial Sequence
  bisulfite treated nucleic acid for analysis of methylation status of SEQ ID NO: 42
ttctaacgaaccgcgtct

SEQ ID NO: 3652 - DNA, 22 bp, Artificial Sequence
  bisulfite treated nucleic acid for analysis of methylation status of SEQ ID NO: 42
gttttcgtattcggggtaaaag

SEQ ID NO: 3653 - DNA, 19 bp, Artificial Sequence
  bisulfite treated nucleic acid for analysis of methylation status of SEQ ID NO: 42
actataccaccgcgcaaaa

SEQ ID NO: 3654 - DNA, 19 bp, Artificial Sequence
  bisulfite treated nucleic acid for analysis of methylation status of SEQ ID NO: 42
aactataccaccgcgcaaa

SEQ ID NO: 3655 - DNA, 19 bp, Artificial Sequence
  bisulfite treated nucleic acid for analysis of methylation status of SEQ ID NO: 42
aaactataccaccgcgcaa

SEQ ID NO: 3656 - DNA, 22 bp, Artificial Sequence
  bisulfite treated nucleic acid for analysis of methylation status of SEQ ID NO: 42
ttttcgtattcggggtaaaagt

SEQ ID NO: 3657 - DNA, 22 bp, Artificial Sequence
  bisulfite treated nucleic acid for analysis of methylation status of SEQ ID NO: 42
aaaacgataacctctctttcgc

SEQ ID NO: 3658 - DNA, 22 bp, Artificial Sequence
  bisulfite treated nucleic acid for analysis of methylation status of SEQ ID NO: 42
attttaggtcggttagttcggt

SEQ ID NO: 3659 - DNA, 26 bp, Artificial Sequence
  bisulfite treated nucleic acid for analysis of methylation status of SEQ ID NO: 42
ggcggggcggagatacgttttttcgt

SEQ ID NO: 3660 - DNA, 21 bp, Artificial Sequence
  bisulfite treated nucleic acid for analysis of methylation status of SEQ ID NO: 42
aaacgataacctctctttcgc

SEQ ID NO: 3661 - DNA, 22 bp, Artificial Sequence
  bisulfite treated nucleic acid for analysis of methylation status of SEQ ID NO: 42
aattttaggtcggttagttcgg

SEQ ID NO: 3662 - DNA, 22 bp, Artificial Sequence
  bisulfite treated nucleic acid for analysis of methylation status of SEQ ID NO: 42
gaattttaggtcggttagttcg

SEQ ID NO: 3663 - DNA, 21 bp, Artificial Sequence
  bisulfite treated nucleic acid for analysis of methylation status of SEQ ID NO: 42
acgcgaaattaaaacgaaatc

SEQ ID NO: 3664 - DNA, 39 bp, Artificial Sequence
  bisulfite treated nucleic acid for analysis of methylation status of SEQ ID NO: 42
ggcgtttttcgcgaaagagaggttatcgttttgtttcga

SEQ ID NO: 3665 - DNA, 21 bp, Artificial Sequence
  nucleic acid for analysis of methylation status of SEQ ID NO: 42
ttttaggtcggttagttcggt

SEQ ID NO: 3666 - DNA, 21 bp, Artificial Sequence
  bisulfite treated nucleic acid for analysis of methylation status of SEQ ID NO: 42
attttaggtcggttagttcgg

SEQ ID NO: 3667 - DNA, 21 bp, Artificial Sequence
  bisulfite treated nucleic acid for analysis of methylation status of SEQ ID NO: 42
tttaggtcggttagttcggtg

SEQ ID NO: 3668 - DNA, 20 bp, Artificial Sequence
  bisulfite treated nucleic acid for analysis of methylation status of SEQ ID NO: 42
cgcgaaattaaaacgaaatc

SEQ ID NO: 3669 - DNA, 20 bp, Artificial Sequence
  bisulfite treated nucleic acid for analysis of methylation status of SEQ ID NO: 42
ttaggtcggttagttcggtg

SEQ ID NO: 3670 - DNA, 22 bp, Artificial Sequence
  bisulfite treated nucleic acid for analysis of methylation status of SEQ ID NO: 42
acgaaaccctacgaacctactt

SEQ ID NO: 3671 - DNA, 20 bp, Artificial Sequence
  bisulfite treated nucleic acid for analysis of methylation status of SEQ ID NO: 42
cgtcggtgttgttttagttg

SEQ ID NO: 3672 - DNA, 30 bp, Artificial Sequence
  bisulfite treated nucleic acid for analysis of methylation status of SEQ ID NO: 42
ttcggaatgtcgatggtttgggttagtcgt

SEQ ID NO: 3673 - DNA, 22 bp, Artificial Sequence
  bisulfite treated nucleic acid for analysis of methylation status of SEQ ID NO: 42
cacaatccgactaaaatacacg

SEQ ID NO: 3674 - DNA, 19 bp, Artificial Sequence
  bisulfite treated nucleic acid for analysis of methylation status of SEQ ID NO: 42
ggttatcgcggtgagtttc

SEQ ID NO: 3675 - DNA, 34 bp, Artificial Sequence
  bisulfite treated nucleic acid for analysis of methylation status of SEQ ID NO: 42
attttacggacggacgcgggtagagagaggtcgg

SEQ ID NO: 3676 - DNA, 20 bp, Artificial Sequence
  bisulfite treated nucleic acid for analysis of methylation status of SEQ ID NO: 42
aacgataacctctctttcgc

SEQ ID NO: 3677 - DNA, 22 bp, Artificial Sequence
  bisulfite treated nucleic acid for analysis of methylation status of SEQ ID NO: 42
cgaaaccctacgaacctacttt

SEQ ID NO: 3678 - DNA, 20 bp, Artificial Sequence
  bisulfite treated nucleic acid for analysis of methylation status of SEQ ID NO: 42
cctacgcgataacacaacct

SEQ ID NO: 3679 - DNA, 23 bp, Artificial Sequence
  bisulfite treated nucleic acid for analysis of methylation status of SEQ ID NO: 42
ttcggttttagttttattacgga

SEQ ID NO: 3680 - DNA, 37 bp, Artificial Sequence
  bisulfite treated nucleic acid for analysis of methylation status of SEQ ID NO: 42
taagtattttttggttttgcggtttcgtttgagcggg

SEQ ID NO: 3681 - DNA, 19 bp, Artificial Sequence
  bisulfite treated nucleic acid for analysis of methylation status of SEQ ID NO: 42
gtcggttagttcggtggag

SEQ ID NO: 3682 - DNA, 35 bp, Artificial Sequence
  bisulfite treated nucleic acid for analysis of methylation status of SEQ ID NO: 42
ggcggagatacgttttttcgtagttagttaggcgt

SEQ ID NO: 3683 - DNA, 20 bp, Artificial Sequence
  bisulfite treated nucleic acid for analysis of methylation status of SEQ ID NO: 42
cgcaatacacaatccgacta

SEQ ID NO: 3684 - DNA, 22 bp, Artificial Sequence
  bisulfite treated nucleic acid for analysis of methylation status of SEQ ID NO: 42
ggtgagtttcggtcgtaatttt

SEQ ID NO: 3685 - DNA, 25 bp, Artificial Sequence
  bisulfite treated nucleic acid for analysis of methylation status of SEQ ID NO: 42
agagagaggtcggcgggttttcgtg

SEQ ID NO: 3686 - DNA, 19 bp, Artificial Sequence
  bisulfite treated nucleic acid for analysis of methylation status of SEQ ID NO: 42
tttcggaatgtcgatggtt

SEQ ID NO: 3687 - DNA, 25 bp, Artificial Sequence
  bisulfite treated nucleic acid for analysis of methylation status of SEQ ID NO: 42
ggcgatgttcgggtacgggtttcgt

SEQ ID NO: 3688 - DNA, 21 bp, Artificial Sequence
  bisulfite treated nucleic acid for analysis of methylation status of SEQ ID NO: 42
cctacgcgataacacaaccta

SEQ ID NO: 3689 - DNA, 19 bp, Artificial Sequence
  nucleic acid for analysis of methylation status of SEQ ID NO: 42
gggtttttacgtcgtttcg

SEQ ID NO: 3690 - DNA, 23 bp, Artificial Sequence
  bisulfite treated nucleic acid for analysis of methylation status of SEQ ID NO: 42
acacaatccgactaaaatacacg

SEQ ID NO: 3691 - DNA, 20 bp, Artificial Sequence
  bisulfite treated nucleic acid for analysis of methylation status of SEQ ID NO: 42
ttttaggtcggttagttcgg

SEQ ID NO: 3692 - DNA, 22 bp, Artificial Sequence
  bisulfite treated nucleic acid for analysis of methylation status of SEQ ID NO: 42
tcggttttagttttattacgga

SEQ ID NO: 3693 - DNA, 19 bp, Artificial Sequence
  bisulfite treated nucleic acid for analysis of methylation status of SEQ ID NO: 42
gtttttacgtcgtttcggc

SEQ ID NO: 3694 - DNA, 18 bp, Artificial Sequence
  bisulfite treated nucleic acid for analysis of methylation status of SEQ ID NO: 42
aacccgtacccgaacatc

SEQ ID NO: 3695 - DNA, 22 bp, Artificial Sequence
  bisulfite treated nucleic acid for analysis of methylation status of SEQ ID NO: 42
attttcgtcggtgttgttttag

SEQ ID NO: 3696 - DNA, 24 bp, Artificial Sequence
  bisulfite treated nucleic acid for analysis of methylation status of SEQ ID NO: 42
tttcggttttagttttattacgga

SEQ ID NO: 3697 - DNA, 18 bp, Artificial Sequence
  bisulfite treated nucleic acid for analysis of methylation status of SEQ ID NO: 42
aaaaccgcctcgctaaaa

SEQ ID NO: 3698 - DNA, 22 bp, Artificial Sequence
  bisulfite treated nucleic acid for analysis of methylation status of SEQ ID NO: 42
gagaggttatcgttttgtttcg

SEQ ID NO: 3699 - DNA, 33 bp, Artificial Sequence
  bisulfite treated nucleic acid for analysis of methylation status of SEQ ID NO: 42
agtagagttcggtattttttttcgttgaggggt

SEQ ID NO: 3700 - DNA, 22 bp, Artificial Sequence
  bisulfite treated nucleic acid for analysis of methylation status of SEQ ID NO: 42
acaatccgactaaaatacacga

SEQ ID NO: 3701 - DNA, 18 bp, Artificial Sequence
  bisulfite treated nucleic acid for analysis of methylation status of SEQ ID NO: 42
agggttatcgcggtgagt

SEQ ID NO: 3702 - DNA, 19 bp, Artificial Sequence
  bisulfite treated nucleic acid for analysis of methylation status of SEQ ID NO: 42
aaacccgtacccgaacatc

SEQ ID NO: 3703 - DNA, 19 bp, Artificial Sequence
  bisulfite treated nucleic acid for analysis of methylation status of SEQ ID NO: 42
gaaacccgtacccgaacat

SEQ ID NO: 3704 - DNA, 19 bp, Artificial Sequence
  bisulfite treated nucleic acid for analysis of methylation status of SEQ ID NO: 42
aaaaaccgcctcgctaaaa

SEQ ID NO: 3705 - DNA, 22 bp, Artificial Sequence
  bisulfite treated nucleic acid for analysis of methylation status of SEQ ID NO: 42
tttcgtcggtgttgttttagtt

SEQ ID NO: 3706 - DNA, 20 bp, Artificial Sequence
  bisulfite treated nucleic acid for analysis of methylation status of SEQ ID NO: 42
taggtcggttagttcggtgg

SEQ ID NO: 3707 - DNA, 18 bp, Artificial Sequence
  bisulfite treated nucleic acid for analysis of methylation status of SEQ ID NO: 42
ttcggaatgtcgatggtt

SEQ ID NO: 3708 - DNA, 18 bp, Artificial Sequence
  bisulfite treated nucleic acid for analysis of methylation status of SEQ ID NO: 42
aaacccgtacccgaacat

SEQ ID NO: 3709 - DNA, 22 bp, Artificial Sequence
  bisulfite treated nucleic acid for analysis of methylation status of SEQ ID NO: 42
ttttcgtcggtgttgttttagt

SEQ ID NO: 3710 - DNA, 22 bp, Artificial Sequence
  bisulfite treated nucleic acid for analysis of methylation status of SEQ ID NO: 14
tttggcgttatcgagatgttat

SEQ ID NO: 3711 - DNA, 23 bp, Artificial Sequence
  bisulfite treated nucleic acid for analysis of methylation status of SEQ ID NO: 14
cgaacactaaacgaaaaactacc

SEQ ID NO: 3712 - DNA, 45 bp, Artificial Sequence
  bisulfite treated nucleic acid for analysis of methylation status of SEQ ID NO: 14
tacgttttgcgagcgtttatcgagtgtgcgatttgtgggtttcga

SEQ ID NO: 3713 - DNA, 24 bp, Artificial Sequence
  bisulfite treated nucleic acid for analysis of methylation status of SEQ ID NO: 14
tcgaacactaaacgaaaaactacc

SEQ ID NO: 3714 - DNA, 21 bp, Artificial Sequence
  bisulfite treated nucleic acid for analysis of methylation status of SEQ ID NO: 14
ttggcgttatcgagatgttat

SEQ ID NO: 3715 - DNA, 23 bp, Artificial Sequence
  bisulfite treated nucleic acid for analysis of methylation status of SEQ ID NO: 14
tggcgttatcgagatgttattta

SEQ ID NO: 3716 - DNA, 28 bp, Artificial Sequence
  bisulfite treated nucleic acid for analysis of methylation status of SEQ ID NO: 14
agcgtttatcgagtgtgcgatttgtggg

SEQ ID NO: 3717 - DNA, 22 bp, Artificial Sequence
  bisulfite treated nucleic acid for analysis of methylation status of SEQ ID NO: 14
ggcgttatcgagatgttattta

SEQ ID NO: 3718 - DNA, 22 bp, Artificial Sequence
  bisulfite treated nucleic acid for analysis of methylation status of SEQ ID NO: 14
aaatctctctacgtcgtcctct

SEQ ID NO: 3719 - DNA, 22 bp, Artificial Sequence
  bisulfite treated nucleic acid for analysis of methylation status of SEQ ID NO: 14
tttttagttttcgaggtcggta

SEQ ID NO: 3720 - DNA, 32 bp, Artificial Sequence
  bisulfite treated nucleic acid for analysis of methylation status of SEQ ID NO: 14
tgtagtaggcggtaatagggataggtagacga

SEQ ID NO: 3721 - DNA, 22 bp, Artificial Sequence
  bisulfite treated nucleic acid for analysis of methylation status of SEQ ID NO: 14
ttagttttcgaggtcggtattg

SEQ ID NO: 3722 - DNA, 23 bp, Artificial Sequence
  bisulfite treated nucleic acid for analysis of methylation status of SEQ ID NO: 14
taaatctctctacgtcgtcctct

SEQ ID NO: 3723 - DNA, 22 bp, Artificial Sequence
  bisulfite treated nucleic acid for analysis of methylation status of SEQ ID NO: 14
ctctctacgtcgtcctctaacc

SEQ ID NO: 3724 - DNA, 21 bp, Artificial Sequence
  bisulfite treated nucleic acid for analysis of methylation status of SEQ ID NO: 14
gtcggtattggtttcgttgat

SEQ ID NO: 3725 - DNA, 22 bp, Artificial Sequence
  bisulfite treated nucleic acid for analysis of methylation status of SEQ ID NO: 14
tttagttttcgaggtcggtatt

SEQ ID NO: 3726 - DNA, 22 bp, Artificial Sequence
  bisulfite treated nucleic acid for analysis of methylation status of SEQ ID NO: 14
ttttagttttcgaggtcggtat

SEQ ID NO: 3727 - DNA, 21 bp, Artificial Sequence
  bisulfite treated nucleic acid for analysis of methylation status of SEQ ID NO: 14
cggtattggtttcgttgattt

SEQ ID NO: 3728 - DNA, 20 bp, Artificial Sequence
  bisulfite treated nucleic acid for analysis of methylation status of SEQ ID NO: 14
tcggtattggtttcgttgat

SEQ ID NO: 3729 - DNA, 21 bp, Artificial Sequence
  bisulfite treated nucleic acid for analysis of methylation status of SEQ ID NO: 14
ctctacgtcgtcctctaaccc

SEQ ID NO: 3730 - DNA, 24 bp, Artificial Sequence
  bisulfite treated nucleic acid for analysis of methylation status of SEQ ID NO: 14
ataaatctctctacgtcgtcctct

SEQ ID NO: 3731 - DNA, 20 bp, Artificial Sequence
  bisulfite treated nucleic acid for analysis of methylation status of SEQ ID NO: 14
aggtcggtattggtttcgtt

SEQ ID NO: 3732 - DNA, 22 bp, Artificial Sequence
  bisulfite treated nucleic acid for analysis of methylation status of SEQ ID NO: 14
taaaaccgacacgactaaccct

SEQ ID NO: 3733 - DNA, 22 bp, Artificial Sequence
  bisulfite treated nucleic acid for analysis of methylation status of SEQ ID NO: 14
agaggacgacgtagagagattt

SEQ ID NO: 3734 - DNA, 35 bp, Artificial Sequence
  bisulfite treated nucleic acid for analysis of methylation status of SEQ ID NO: 14
ttagagattttcggggagtgatagagttttcgttt

SEQ ID NO: 3735 - DNA, 22 bp, Artificial Sequence
  bisulfite treated nucleic acid for analysis of methylation status of SEQ ID NO: 14
tctctacgtcgtcctctaaccc

SEQ ID NO: 3736 - DNA, 20 bp, Artificial Sequence
  bisulfite treated nucleic acid for analysis of methylation status of SEQ ID NO: 14
gaggtcggtattggtttcgt

SEQ ID NO: 3737 - DNA, 21 bp, Artificial Sequence
  bisulfite treated nucleic acid for analysis of methylation status of SEQ ID NO: 14
tagttttcgaggtcggtattg

SEQ ID NO: 3738 - DNA, 19 bp, Artificial Sequence
  bisulfite treated nucleic acid for analysis of methylation status of SEQ ID NO: 14
cgaggtcggtattggtttc

SEQ ID NO: 3739 - DNA, 21 bp, Artificial Sequence
  bisulfite treated nucleic acid for analysis of methylation status of SEQ ID NO: 14
ttaaaaccgacacgactaacc

SEQ ID NO: 3740 - DNA, 23 bp, Artificial Sequence
  bisulfite treated nucleic acid for analysis of methylation status of SEQ ID NO: 14
tctctctacgtcgtcctctaacc

SEQ ID NO: 3741 - DNA, 24 bp, Artificial Sequence
  bisulfite treated nucleic acid for analysis of methylation status of SEQ ID NO: 14
tataaatctctctacgtcgtcctc

SEQ ID NO: 3742 - DNA, 24 bp, Artificial Sequence
  bisulfite treated nucleic acid for analysis of methylation status of SEQ ID NO: 14
ttagaggacgacgtagagagattt

SEQ ID NO: 3743 - DNA, 20 bp, Artificial Sequence
  bisulfite treated nucleic acid for analysis of methylation status of SEQ ID NO: 14
aaaccgacacgactaaccct

SEQ ID NO: 3744 - DNA, 25 bp, Artificial Sequence
  bisulfite treated nucleic acid for analysis of methylation status of SEQ ID NO: 14
tataaatctctctacgtcgtcctct

SEQ ID NO: 3745 - DNA, 26 bp, Artificial Sequence
  bisulfite treated nucleic acid for analysis of methylation status of SEQ ID NO: 14
aatataaatctctctacgtcgtcctc

SEQ ID NO: 3746 - DNA, 23 bp, Artificial Sequence
  bisulfite treated nucleic acid for analysis of methylation status of SEQ ID NO: 14
aatctctctacgtcgtcctctaa

SEQ ID NO: 3747 - DNA, 19 bp, Artificial Sequence
  bisulfite treated nucleic acid for analysis of methylation status of SEQ ID NO: 14
ggtcggtattggtttcgtt

SEQ ID NO: 3748 - DNA, 23 bp, Artificial Sequence
  bisulfite treated nucleic acid for analysis of methylation status of SEQ ID NO: 14
tagaggacgacgtagagagattt

SEQ ID NO: 3749 - DNA, 21 bp, Artificial Sequence
  bisulfite treated nucleic acid for analysis of methylation status of SEQ ID NO: 14
aacaatacgacgataaacgct

SEQ ID NO: 3750 - DNA, 21 bp, Artificial Sequence
  bisulfite treated nucleic acid for analysis of methylation status of SEQ ID NO: 14
gggttagtcgtgtcggtttta

SEQ ID NO: 3751 - DNA, 45 bp, Artificial Sequence
  bisulfite treated nucleic acid for analysis of methylation status of SEQ ID NO: 14
ttcggtaaggataaattaagtaattgtcgagataggtgttcgcgt

SEQ ID NO: 3752 - DNA, 22 bp, Artificial Sequence
  bisulfite treated nucleic acid for analysis of methylation status of SEQ ID NO: 14
gttagaggacgacgtagagaga

SEQ ID NO: 3753 - DNA, 20 bp, Artificial Sequence
  bisulfite treated nucleic acid for analysis of methylation status of SEQ ID NO: 14
ctacgtcgtcctctaacccc

SEQ ID NO: 3754 - DNA, 25 bp, Artificial Sequence
  bisulfite treated nucleic acid for analysis of methylation status of SEQ ID NO: 14
atataaatctctctacgtcgtcctc

SEQ ID NO: 3755 - DNA, 21 bp, Artificial Sequence
  bisulfite treated nucleic acid for analysis of methylation status of SEQ ID NO: 14
aaaaccgacacgactaaccct

SEQ ID NO: 3756 - DNA, 21 bp, Artificial Sequence
  bisulfite treated nucleic acid for analysis of methylation status of SEQ ID NO: 14
taaaaccgacacgactaaccc

SEQ ID NO: 3757 - DNA, 22 bp, Artificial Sequence
  bisulfite treated nucleic acid for analysis of methylation status of SEQ ID NO: 14
gaggacgacgtagagagattta

SEQ ID NO: 3758 - DNA, 19 bp, Artificial Sequence
  bisulfite treated nucleic acid for analysis of methylation status of SEQ ID NO: 14
ttcgaggtcggtattggtt

SEQ ID NO: 3759 - DNA, 19 bp, Artificial Sequence
  bisulfite treated nucleic acid for analysis of methylation status of SEQ ID NO: 14
tttcgaggtcggtattggt

SEQ ID NO: 3760 - DNA, 19 bp, Artificial Sequence
  bisulfite treated nucleic acid for analysis of methylation status of SEQ ID NO: 14
tcgaggtcggtattggttt

SEQ ID NO: 3761 - DNA, 22 bp, Artificial Sequence
  bisulfite treated nucleic acid for analysis of methylation status of SEQ ID NO: 43
tttttacggcgagtgttttaat

SEQ ID NO: 3762 - DNA, 21 bp, Artificial Sequence
  bisulfite treated nucleic acid for analysis of methylation status of SEQ ID NO: 43
aaaatcaacccgaatacgaac

SEQ ID NO: 3763 - DNA, 30 bp, Artificial Sequence
  bisulfite treated nucleic acid for analysis of methylation status of SEQ ID NO: 43
ttttggttatcgattcggatttcgcggagt

SEQ ID NO: 3764 - DNA, 20 bp, Artificial Sequence
  bisulfite treated nucleic acid for analysis of methylation status of SEQ ID NO: 43
ggtcgtagcgttgtgagaat

SEQ ID NO: 3765 - DNA, 22 bp, Artificial Sequence
  bisulfite treated nucleic acid for analysis of methylation status of SEQ ID NO: 43
acgaataaaaacaaactcaccg

SEQ ID NO: 3766 - DNA, 32 bp, Artificial Sequence
  bisulfite treated nucleic acid for analysis of methylation status of SEQ ID NO: 43
ttcggtttttatcgttgtgttcgggattgcga

SEQ ID NO: 3767 - DNA, 20 bp, Artificial Sequence
  bisulfite treated nucleic acid for analysis of methylation status of SEQ ID NO: 43
gggtttcgtgatttcgttta

SEQ ID NO: 3768 - DNA, 22 bp, Artificial Sequence
  bisulfite treated nucleic acid for analysis of methylation status of SEQ ID NO: 43
attaaaacactcgccgtaaaaa

SEQ ID NO: 3769 - DNA, 32 bp, Artificial Sequence
  bisulfite treated nucleic acid for analysis of methylation status of SEQ ID NO: 43
ttcgcgtattttagacgtgaacgagtgtttgg

SEQ ID NO: 3770 - DNA, 20 bp, Artificial Sequence
  bisulfite treated nucleic acid for analysis of methylation status of SEQ ID NO: 43
caaaatcaacccgaatacga

SEQ ID NO: 3771 - DNA, 22 bp, Artificial Sequence
  bisulfite treated nucleic acid for analysis of methylation status of SEQ ID NO: 43
gggtttcgtgatttcgtttaat

SEQ ID NO: 3772 - DNA, 21 bp, Artificial Sequence
  bisulfite treated nucleic acid for analysis of methylation status of SEQ ID NO: 43
ttaaaacactcgccgtaaaaa

SEQ ID NO: 3773 - DNA, 22 bp, Artificial Sequence
  bisulfite treated nucleic acid for analysis of methylation status of SEQ ID NO: 43
tttagacgtgaacgagtgtttg

SEQ ID NO: 3774 - DNA, 20 bp, Artificial Sequence
  bisulfite treated nucleic acid for analysis of methylation status of SEQ ID NO: 43
aatcaacccgaatacgaacc

SEQ ID NO: 3775 - DNA, 21 bp, Artificial Sequence
  bisulfite treated nucleic acid for analysis of methylation status of SEQ ID NO: 43
tagacgtgaacgagtgtttgg

SEQ ID NO: 3776 - DNA, 20 bp, Artificial Sequence
  bisulfite treated nucleic acid for analysis of methylation status of SEQ ID NO: 43
tagttttgtgcgggtcgtag

SEQ ID NO: 3777 - DNA, 21 bp, Artificial Sequence
  bisulfite treated nucleic acid for analysis of methylation status of SEQ ID NO: 43
ttttacggcgagtgttttaat

SEQ ID NO: 3778 - DNA, 23 bp, Artificial Sequence
  bisulfite treated nucleic acid for analysis of methylation status of SEQ ID NO: 43
tattaaaacactcgccgtaaaaa

SEQ ID NO: 3779 - DNA, 20 bp, Artificial Sequence
  bisulfite treated nucleic acid for analysis of methylation status of SEQ ID NO: 43
aaatcaacccgaatacgaac

SEQ ID NO: 3780 - DNA, 19 bp, Artificial Sequence
  bisulfite treated nucleic acid for analysis of methylation status of SEQ ID NO: 43
atcaacccgaatacgaacc

SEQ ID NO: 3781 - DNA, 21 bp, Artificial Sequence
  bisulfite treated nucleic acid for analysis of methylation status of SEQ ID NO: 43
tttttagacgtggacgaatgt

SEQ ID NO: 3782 - DNA, 20 bp, Artificial Sequence
  bisulfite treated nucleic acid for analysis of methylation status of SEQ ID NO: 43
aatcccgaacacaacgataa

SEQ ID NO: 3783 - DNA, 25 bp, Artificial Sequence
  bisulfite treated nucleic acid for analysis of methylation status of SEQ ID NO: 43
ttgtgcgggtcgtagcgttgtgaga

SEQ ID NO: 3784 - DNA, 21 bp, Artificial Sequence
  bisulfite treated nucleic acid for analysis of methylation status of SEQ ID NO: 43
cgaataaaaacaaactcaccg

SEQ ID NO: 3785 - DNA, 20 bp, Artificial Sequence
  bisulfite treated nucleic acid for analysis of methylation status of SEQ ID NO: 43
acgtgaacgagtgtttggag

SEQ ID NO: 3786 - DNA, 20 bp, Artificial Sequence
  bisulfite treated nucleic acid for analysis of methylation status of SEQ ID NO: 43
agacgtgaacgagtgtttgg

SEQ ID NO: 3787 - DNA, 19 bp, Artificial Sequence
  bisulfite treated nucleic acid for analysis of methylation status of SEQ ID NO: 43
gattttgggtattacgcgg

SEQ ID NO: 3788 - DNA, 22 bp, Artificial Sequence
  bisulfite treated nucleic acid for analysis of methylation status of SEQ ID NO: 43
cgttacaaacgctaacgaaaac

SEQ ID NO: 3789 - DNA, 39 bp, Artificial Sequence
  bisulfite treated nucleic acid for analysis of methylation status of SEQ ID NO: 43
ttcgagggtatttgtgacggtgagtttgtttttattcgt

SEQ ID NO: 3790 - DNA, 19 bp, Artificial Sequence
  bisulfite treated nucleic acid for analysis of methylation status of SEQ ID NO: 43
agttttgtgcgggtcgtag

SEQ ID NO: 3791 - DNA, 18 bp, Artificial Sequence
  bisulfite treated nucleic acid for analysis of methylation status of SEQ ID NO: 43
aggtcgggtttcgtgatt

SEQ ID NO: 3792 - DNA, 21 bp, Artificial Sequence
  bisulfite treated nucleic acid for analysis of methylation status of SEQ ID NO: 43
cgtcacaaataccctcgaaac

SEQ ID NO: 3793 - DNA, 19 bp, Artificial Sequence
  bisulfite treated nucleic acid for analysis of methylation status of SEQ ID NO: 43
cgtgaacgagtgtttggag

SEQ ID NO: 3794 - DNA, 20 bp, Artificial Sequence
  bisulfite treated nucleic acid for analysis of methylation status of SEQ ID NO: 43
cgtaatacccaaaatcgcaa

SEQ ID NO: 3795 - DNA, 42 bp, Artificial Sequence
  bisulfite treated nucleic acid for analysis of methylation status of SEQ ID NO: 43
tgcgggtcgtagcgttgtgagaattttttcggtttttatcgt

SEQ ID NO: 3796 - DNA, 19 bp, Artificial Sequence
  bisulfite treated nucleic acid for analysis of methylation status of SEQ ID NO: 43
gacgtgaacgagtgtttgg

SEQ ID NO: 3797 - DNA, 18 bp, Artificial Sequence
  bisulfite treated nucleic acid for analysis of methylation status of SEQ ID NO: 43
gaggtcgggtttcgtgat

SEQ ID NO: 3798 - DNA, 21 bp, Artificial Sequence
  bisulfite treated nucleic acid for analysis of methylation status of SEQ ID NO: 43
ggtttcgtgatttcgtttaat

SEQ ID NO: 3799 - DNA, 18 bp, Artificial Sequence
  bisulfite treated nucleic acid for analysis of methylation status of SEQ ID NO: 43
gttttgtgcgggtcgtag

SEQ ID NO: 3800 - DNA, 23 bp, Artificial Sequence
  bisulfite treated nucleic acid for analysis of methylation status of SEQ ID NO: 43
aacgaataaaaacaaactcaccg

SEQ ID NO: 3801 - DNA, 20 bp, Artificial Sequence
  bisulfite treated nucleic acid for analysis of methylation status of SEQ ID NO: 43
tcccgaacacaacgataaaa

SEQ ID NO: 3802 - DNA, 19 bp, Artificial Sequence
  bisulfite treated nucleic acid for analysis of methylation status of SEQ ID NO: 43
ccgcgtaatacccaaaatc

SEQ ID NO: 3803 - DNA, 24 bp, Artificial Sequence
  bisulfite treated nucleic acid for analysis of methylation status of SEQ ID NO: 43
atattaaaacactcgccgtaaaaa

SEQ ID NO: 3804 - DNA, 19 bp, Artificial Sequence
  bisulfite treated nucleic acid for analysis of methylation status of SEQ ID NO: 43
gcgtaatacccaaaatcgc

SEQ ID NO: 3805 - DNA, 20 bp, Artificial Sequence
  bisulfite treated nucleic acid for analysis of methylation status of SEQ ID NO: 43
ttttagacgtggacgaatgt

SEQ ID NO: 3806 - DNA, 22 bp, Artificial Sequence
  bisulfite treated nucleic acid for analysis of methylation status of SEQ ID NO: 43
acacaacgataaaaaccgaaaa

SEQ ID NO: 3807 - DNA, 22 bp, Artificial Sequence
  bisulfite treated nucleic acid for analysis of methylation status of SEQ ID NO: 43
aacacaacgataaaaaccgaaa

SEQ ID NO: 3808 - DNA, 21 bp, Artificial Sequence
  bisulfite treated nucleic acid for analysis of methylation status of SEQ ID NO: 43
gaatacgaaccgaaacaaaaa

SEQ ID NO: 3809 - DNA, 19 bp, Artificial Sequence
  bisulfite treated nucleic acid for analysis of methylation status of SEQ ID NO: 43
tagaatgttaggcggagcg

SEQ ID NO: 3810 - DNA, 22 bp, Artificial Sequence
  bisulfite treated nucleic acid for analysis of methylation status of SEQ ID NO: 43
cgaaaaacaaatacactcgaaa

SEQ ID NO: 3811 - DNA, 40 bp, Artificial Sequence
  bisulfite treated nucleic acid for analysis of methylation status of SEQ ID NO: 43
ttcggacgttttgtttcgtagacgttgacgagtgtagcga

SEQ ID NO: 3812 - DNA, 18 bp, Artificial Sequence
  bisulfite treated nucleic acid for analysis of methylation status of SEQ ID NO: 43
aacccgaatacgaaccga

SEQ ID NO: 3813 - DNA, 18 bp, Artificial Sequence
  bisulfite treated nucleic acid for analysis of methylation status of SEQ ID NO: 43
acccgaatacgaaccgaa

SEQ ID NO: 3814 - DNA, 20 bp, Artificial Sequence
  bisulfite treated nucleic acid for analysis of methylation status of SEQ ID NO: 43
ttatcgttgtgttcgggatt

SEQ ID NO: 3815 - DNA, 23 bp, Artificial Sequence
  bisulfite treated nucleic acid for analysis of methylation status of SEQ ID NO: 43
cgaataaaaacaaactcaccgtc

SEQ ID NO: 3816 - DNA, 26 bp, Artificial Sequence
  bisulfite treated nucleic acid for analysis of methylation status of SEQ ID NO: 43
ttgggtattacgcgggtttcgagggt

SEQ ID NO: 3817 - DNA, 20 bp, Artificial Sequence
  bisulfite treated nucleic acid for analysis of methylation status of SEQ ID NO: 43
tttatcgttgtgttcgggat

SEQ ID NO: 3818 - DNA, 22 bp, Artificial Sequence
  bisulfite treated nucleic acid for analysis of methylation status of SEQ ID NO: 43
ttttagacgtgaacgagtgttt

SEQ ID NO: 3819 - DNA, 20 bp, Artificial Sequence
  bisulfite treated nucleic acid for analysis of methylation status of SEQ ID NO: 43
cgaatacgaaccgaaacaaa

SEQ ID NO: 3820 - DNA, 17 bp, Artificial Sequence
  bisulfite treated nucleic acid for analysis of methylation status of SEQ ID NO: 43
cccgaatacgaaccgaa

SEQ ID NO: 3821 - DNA, 20 bp, Artificial Sequence
  bisulfite treated nucleic acid for analysis of methylation status of SEQ ID NO: 43
taaaacactcgccgtaaaaa

SEQ ID NO: 3822 - DNA, 19 bp, Artificial Sequence
  bisulfite treated nucleic acid for analysis of methylation status of SEQ ID NO: 43
gggtcgtagcgttgtgaga

SEQ ID NO: 3823 - DNA, 21 bp, Artificial Sequence
  bisulfite treated nucleic acid for analysis of methylation status of SEQ ID NO: 43
tagacgttgacgagtgtagcg

SEQ ID NO: 3824 - DNA, 20 bp, Artificial Sequence
  bisulfite treated nucleic acid for analysis of methylation status of SEQ ID NO: 43
aaaacgaaatccgaaccaac

SEQ ID NO: 3825 - DNA, 36 bp, Artificial Sequence
  bisulfite treated nucleic acid for analysis of methylation status of SEQ ID NO: 43
gagcggtatttgtattaatatcgacggttttttcga

SEQ ID NO: 3826 - DNA, 20 bp, Artificial Sequence
  bisulfite treated nucleic acid for analysis of methylation status of SEQ ID NO: 43
caatcccgaacacaacgata

SEQ ID NO: 3827 - DNA, 18 bp, Artificial Sequence
  bisulfite treated nucleic acid for analysis of methylation status of SEQ ID NO: 43
tcaacccgaatacgaacc

SEQ ID NO: 3828 - DNA, 21 bp, Artificial Sequence
  bisulfite treated nucleic acid for analysis of methylation status of SEQ ID NO: 43
gttcgtattcgggttgatttt

SEQ ID NO: 3829 - DNA, 19 bp, Artificial Sequence
  bisulfite treated nucleic acid for analysis of methylation status of SEQ ID NO: 43
actcgttttccccttttcg

SEQ ID NO: 3830 - DNA, 23 bp, Artificial Sequence
  bisulfite treated nucleic acid for analysis of methylation status of SEQ ID NO: 43
gggtaggaaaaggcgggacgggg

SEQ ID NO: 3831 - DNA, 22 bp, Artificial Sequence
  bisulfite treated nucleic acid for analysis of methylation status of SEQ ID NO: 43
ccgaaaaacaaatacactcgaa

SEQ ID NO: 3832 - DNA, 19 bp, Artificial Sequence
  bisulfite treated nucleic acid for analysis of methylation status of SEQ ID NO: 43
aaaaacgaaatccgaacca

SEQ ID NO: 3833 - DNA, 22 bp, Artificial Sequence
  bisulfite treated nucleic acid for analysis of methylation status of SEQ ID NO: 43
gcgtattttagacgtgaacgag

SEQ ID NO: 3834 - DNA, 18 bp, Artificial Sequence
  bisulfite treated nucleic acid for analysis of methylation status of SEQ ID NO: 43
aaaaactccgcgaaatcc

SEQ ID NO: 3835 - DNA, 35 bp, Artificial Sequence
  bisulfite treated nucleic acid for analysis of methylation status of SEQ ID NO: 43
tacggcgagtgttttaatattgacggtttttttgt

SEQ ID NO: 3836 - DNA, 21 bp, Artificial Sequence
  bisulfite treated nucleic acid for analysis of methylation status of SEQ ID NO: 43
ttagacgtgaacgagtgtttg

SEQ ID NO: 3837 - DNA, 18 bp, Artificial Sequence
  bisulfite treated nucleic acid for analysis of methylation status of SEQ ID NO: 43
ctcgttttccccttttcg

SEQ ID NO: 3838 - DNA, 22 bp, Artificial Sequence
  bisulfite treated nucleic acid for analysis of methylation status of SEQ ID NO: 43
gaacacaacgataaaaaccgaa

SEQ ID NO: 3839 - DNA, 22 bp, Artificial Sequence
  bisulfite treated nucleic acid for analysis of methylation status of SEQ ID NO: 43
cacaacgataaaaaccgaaaaa

SEQ ID NO: 3840 - DNA, 21 bp, Artificial Sequence
  bisulfite treated nucleic acid for analysis of methylation status of SEQ ID NO: 43
tacaaacgctaacgaaaacga

SEQ ID NO: 3841 - DNA, 35 bp, Artificial Sequence
  bisulfite treated nucleic acid for analysis of methylation status of SEQ ID NO: 43
gtgagaattttttcggtttttatcgttgtgttcgg

SEQ ID NO: 3842 - DNA, 19 bp, Artificial Sequence
  bisulfite treated nucleic acid for analysis of methylation status of SEQ ID NO: 43
acgaaacctctcaccgaaa

SEQ ID NO: 3843 - DNA, 49 bp, Artificial Sequence
  bisulfite treated nucleic acid for analysis of methylation status of SEQ ID NO: 43
ttaatatcgacggttttttcgagtgtatttgtttttcgggatatcgcgt

SEQ ID NO: 3844 - DNA, 22 bp, Artificial Sequence
  bisulfite treated nucleic acid for analysis of methylation status of SEQ ID NO: 43
aacgaaaaataaaccgaacctt

SEQ ID NO: 3845 - DNA, 22 bp, Artificial Sequence
  bisulfite treated nucleic acid for analysis of methylation status of SEQ ID NO: 43
agtcgtcggtgttggtatagat

SEQ ID NO: 3846 - DNA, 27 bp, Artificial Sequence
  bisulfite treated nucleic acid for analysis of methylation status of SEQ ID NO: 43
ttcgttaacgtttgcgggatagggcgt

SEQ ID NO: 3847 - DNA, 22 bp, Artificial Sequence
  bisulfite treated nucleic acid for analysis of methylation status of SEQ ID NO: 43
ctctcctcaaacgtaaacgaat

SEQ ID NO: 3848 - DNA, 22 bp, Artificial Sequence
  bisulfite treated nucleic acid for analysis of methylation status of SEQ ID NO: 43
tagtttcggatatagcggtagg

SEQ ID NO: 3849 - DNA, 27 bp, Artificial Sequence
  bisulfite treated nucleic acid for analysis of methylation status of SEQ ID NO: 43
agcgttgcgattcgtatagggttgggt

SEQ ID NO: 3850 - DNA, 22 bp, Artificial Sequence
  bisulfite treated nucleic acid for analysis of methylation status of SEQ ID NO: 43
ctctctcctcaaacgtaaacga

SEQ ID NO: 3851 - DNA, 22 bp, Artificial Sequence
  bisulfite treated nucleic acid for analysis of methylation status of SEQ ID NO: 43
ctcaaacgtaaacgaatatcgc

SEQ ID NO: 3852 - DNA, 22 bp, Artificial Sequence
  bisulfite treated nucleic acid for analysis of methylation status of SEQ ID NO: 43
gagtcgtcggtgttggtataga

SEQ ID NO: 3853 - DNA, 22 bp, Artificial Sequence
  bisulfite treated nucleic acid for analysis of methylation status of SEQ ID NO: 43
cgtaccctaaacgtaaacgaat

SEQ ID NO: 3854 - DNA, 22 bp, Artificial Sequence
  bisulfite treated nucleic acid for analysis of methylation status of SEQ ID NO: 43
acgaatcgaggtaagaggtttc

SEQ ID NO: 3855 - DNA, 44 bp, Artificial Sequence
  bisulfite treated nucleic acid for analysis of methylation status of SEQ ID NO: 43
gtcgttagtgttgaggtattcgtcgtgagggaagtagaaatcgt

SEQ ID NO: 3856 - DNA, 22 bp, Artificial Sequence
  bisulfite treated nucleic acid for analysis of methylation status of SEQ ID NO: 43
tctctcctcaaacgtaaacgaa

SEQ ID NO: 3857 - DNA, 22 bp, Artificial Sequence
  bisulfite treated nucleic acid for analysis of methylation status of SEQ ID NO: 43
tctacttccctcacgacgaata

SEQ ID NO: 3858 - DNA, 22 bp, Artificial Sequence
  nucleic acid for analysis of methylation status of SEQ ID NO: 43
gttaggattagttcgggtacga

SEQ ID NO: 3859 - DNA, 25 bp, Artificial Sequence
  bisulfite treated nucleic acid for analysis of methylation status of SEQ ID NO: 43
ttcgcggggttcgggtcggtagtta

SEQ ID NO: 3860 - DNA, 22 bp, Artificial Sequence
  bisulfite treated nucleic acid for analysis of methylation status of SEQ ID NO: 43
tacgaatcgaggtaagaggttt

SEQ ID NO: 3861 - DNA, 21 bp, Artificial Sequence
  bisulfite treated nucleic acid for analysis of methylation status of SEQ ID NO: 43
ttcggatatagcggtaggagt

SEQ ID NO: 3862 - DNA, 21 bp, Artificial Sequence
  bisulfite treated nucleic acid for analysis of methylation status of SEQ ID NO: 43
tcaaacgtaaacgaatatcgc

SEQ ID NO: 3863 - DNA, 22 bp, Artificial Sequence
  bisulfite treated nucleic acid for analysis of methylation status of SEQ ID NO: 43
gtcgtcggtgttggtatagatg

SEQ ID NO: 3864 - DNA, 22 bp, Artificial Sequence
  bisulfite treated nucleic acid for analysis of methylation status of SEQ ID NO: 43
tcgtcggtgttggtatagatgt

SEQ ID NO: 3865 - DNA, 22 bp, Artificial Sequence
  bisulfite treated nucleic acid for analysis of methylation status of SEQ ID NO: 43
agtttcggatatagcggtagga

SEQ ID NO: 3866 - DNA, 22 bp, Artificial Sequence
  bisulfite treated nucleic acid for analysis of methylation status of SEQ ID NO: 43
tttcggatatagcggtaggagt

SEQ ID NO: 3867 - DNA, 22 bp, Artificial Sequence
  bisulfite treated nucleic acid for analysis of methylation status of SEQ ID NO: 43
gtttcggatatagcggtaggag

SEQ ID NO: 3868 - DNA, 21 bp, Artificial Sequence
  bisulfite treated nucleic acid for analysis of methylation status of SEQ ID NO: 43
cgaatcgaggtaagaggtttc

SEQ ID NO: 3869 - DNA, 23 bp, Artificial Sequence
  bisulfite treated nucleic acid for analysis of methylation status of SEQ ID NO: 43
gtacgaatcgaggtaagaggttt

SEQ ID NO: 3870 - DNA, 21 bp, Artificial Sequence
  bisulfite treated nucleic acid for analysis of methylation status of SEQ ID NO: 43
cgtcggtgttggtatagatgt

SEQ ID NO: 3871 - DNA, 21 bp, Artificial Sequence
  bisulfite treated nucleic acid for analysis of methylation status of SEQ ID NO: 43
cgtagtttcggatatagcggt

SEQ ID NO: 3872 - DNA, 23 bp, Artificial Sequence
  bisulfite treated nucleic acid for analysis of methylation status of SEQ ID NO: 43
gtagtttcggatatagcggtagg

SEQ ID NO: 3873 - DNA, 22 bp, Artificial Sequence
  bisulfite treated nucleic acid for analysis of methylation status of SEQ ID NO: 43
tctcctcaaacgtaaacgaata

SEQ ID NO: 3874 - DNA, 22 bp, Artificial Sequence
  bisulfite treated nucleic acid for analysis of methylation status of SEQ ID NO: 43
ggttaggattagttcgggtacg

SEQ ID NO: 3875 - DNA, 21 bp, Artificial Sequence
  bisulfite treated nucleic acid for analysis of methylation status of SEQ ID NO: 43
gtttcggatatagcggtagga

SEQ ID NO: 3876 - DNA, 21 bp, Artificial Sequence
  bisulfite treated nucleic acid for analysis of methylation status of SEQ ID NO: 43
acgatttctacttccctcacg

SEQ ID NO: 3877 - DNA, 22 bp, Artificial Sequence
  bisulfite treated nucleic acid for analysis of methylation status of SEQ ID NO: 43
cgctataaaaactctcccgact

SEQ ID NO: 3878 - DNA, 22 bp, Artificial Sequence
  bisulfite treated nucleic acid for analysis of methylation status of SEQ ID NO: 43
tttagtatcgcgttgtaagcgt

SEQ ID NO: 3879 - DNA, 29 bp, Artificial Sequence
  bisulfite treated nucleic acid for analysis of methylation status of SEQ ID NO: 43
ttcggggttcgcgtggtatttaggatcgt

SEQ ID NO: 3880 - DNA, 20 bp, Artificial Sequence
  bisulfite treated nucleic acid for analysis of methylation status of SEQ ID NO: 43
aaaaccgaatcccgtaactc

SEQ ID NO: 3881 - DNA, 22 bp, Artificial Sequence
  bisulfite treated nucleic acid for analysis of methylation status of SEQ ID NO: 43
gtattcgtcgtgagggaagtag

SEQ ID NO: 3882 - DNA, 49 bp, Artificial Sequence
  bisulfite treated nucleic acid for analysis of methylation status of SEQ ID NO: 43
aaatcgttttttaggtattcgtttacgtttagggtacgcgggagattgg

SEQ ID NO: 3883 - DNA, 21 bp, Artificial Sequence
  bisulfite treated nucleic acid for analysis of methylation status of SEQ ID NO: 43
tttcggatatagcggtaggag

SEQ ID NO: 3884 - DNA, 21 bp, Artificial Sequence
  bisulfite treated nucleic acid for analysis of methylation status of SEQ ID NO: 43
ttagtatcgcgttgtaagcgt

SEQ ID NO: 3885 - DNA, 22 bp, Artificial Sequence
  bisulfite treated nucleic acid for analysis of methylation status of SEQ ID NO: 43
ctacttccctcacgacgaatac

SEQ ID NO: 3886 - DNA, 20 bp, Artificial Sequence
  bisulfite treated nucleic acid for analysis of methylation status of SEQ ID NO: 43
tagttcgggtacgaatcgag

SEQ ID NO: 3887 - DNA, 22 bp, Artificial Sequence
  bisulfite treated nucleic acid for analysis of methylation status of SEQ ID NO: 43
aacgatttctacttccctcacg

SEQ ID NO: 3888 - DNA, 21 bp, Artificial Sequence
  bisulfite treated nucleic acid for analysis of methylation status of SEQ ID NO: 43
ttagttcgggtacgaatcgag

SEQ ID NO: 3889 - DNA, 21 bp, Artificial Sequence
  bisulfite treated nucleic acid for analysis of methylation status of SEQ ID NO: 43
acgaaaaataaaccgaacctt

SEQ ID NO: 3890 - DNA, 21 bp, Artificial Sequence
  bisulfite treated nucleic acid for analysis of methylation status of SEQ ID NO: 43
aaaaaccgaatcccgtaactc

SEQ ID NO: 3891 - DNA, 20 bp, Artificial Sequence
  bisulfite treated nucleic acid for analysis of methylation status of SEQ ID NO: 43
atatagcggtaggagtcggg

SEQ ID NO: 3892 - DNA, 21 bp, Artificial Sequence
  bisulfite treated nucleic acid for analysis of methylation status of SEQ ID NO: 43
ctacttccctcacgacgaata

SEQ ID NO: 3893 - DNA, 22 bp, Artificial Sequence
  bisulfite treated nucleic acid for analysis of methylation status of SEQ ID NO: 43
cacgacgaatacctcaacacta

SEQ ID NO: 3894 - DNA, 21 bp, Artificial Sequence
  bisulfite treated nucleic acid for analysis of methylation status of SEQ ID NO: 43
ttaggattagttcgggtacga

SEQ ID NO: 3895 - DNA, 23 bp, Artificial Sequence
  bisulfite treated nucleic acid for analysis of methylation status of SEQ ID NO: 43
aaacgaaaaataaaccgaacctt

SEQ ID NO: 3896 - DNA, 22 bp, Artificial Sequence
  bisulfite treated nucleic acid for analysis of methylation status of SEQ ID NO: 43
accctaaacgtaaacgaatacc

SEQ ID NO: 3897 - DNA, 21 bp, Artificial Sequence
  bisulfite treated nucleic acid for analysis of methylation status of SEQ ID NO: 43
ggtacgaatcgaggtaagagg

SEQ ID NO: 3898 - DNA, 21 bp, Artificial Sequence
  bisulfite treated nucleic acid for analysis of methylation status of SEQ ID NO: 43
gggtacgaatcgaggtaagag

SEQ ID NO: 3899 - DNA, 24 bp, Artificial Sequence
  bisulfite treated nucleic acid for analysis of methylation status of SEQ ID NO: 43
ccctaaacgtaaacgaatacctaa

SEQ ID NO: 3900 - DNA, 22 bp, Artificial Sequence
  bisulfite treated nucleic acid for analysis of methylation status of SEQ ID NO: 43
ggtacgaatcgaggtaagaggt

SEQ ID NO: 3901 - DNA, 22 bp, Artificial Sequence
  bisulfite treated nucleic acid for analysis of methylation status of SEQ ID NO: 43
tattcgtcgtgagggaagtaga

SEQ ID NO: 3902 - DNA, 21 bp, Artificial Sequence
  bisulfite treated nucleic acid for analysis of methylation status of SEQ ID NO: 43
cgatttctacttccctcacga

SEQ ID NO: 3903 - DNA, 21 bp, Artificial Sequence
  bisulfite treated nucleic acid for analysis of methylation status of SEQ ID NO: 43
gcgtaccctaaacgtaaacga

SEQ ID NO: 3904 - DNA, 20 bp, Artificial Sequence
  bisulfite treated nucleic acid for analysis of methylation status of SEQ ID NO: 43
atcgaggtaagaggtttcgc

SEQ ID NO: 3905 - DNA, 23 bp, Artificial Sequence
  bisulfite treated nucleic acid for analysis of methylation status of SEQ ID NO: 43
ctcctcaaacgtaaacgaatatc

SEQ ID NO: 3906 - DNA, 22 bp, Artificial Sequence
  bisulfite treated nucleic acid for analysis of methylation status of SEQ ID NO: 43
tcctcaaacgtaaacgaatatc

SEQ ID NO: 3907 - DNA, 20 bp, Artificial Sequence
  bisulfite treated nucleic acid for analysis of methylation status of SEQ ID NO: 43
ttctacttccctcacgacga

SEQ ID NO: 3908 - DNA, 19 bp, Artificial Sequence
  bisulfite treated nucleic acid for analysis of methylation status of SEQ ID NO: 43
aactacgcgccaaactacc

SEQ ID NO: 3909 - DNA, 22 bp, Artificial Sequence
  bisulfite treated nucleic acid for analysis of methylation status of SEQ ID NO: 43
ttatagcgttttggtttcgttt

SEQ ID NO: 3910 - DNA, 30 bp, Artificial Sequence
  bisulfite treated nucleic acid for analysis of methylation status of SEQ ID NO: 43
tgcgtagggttcgggtcgattcgacggcgt

SEQ ID NO: 3911 - DNA, 20 bp, Artificial Sequence
  bisulfite treated nucleic acid for analysis of methylation status of SEQ ID NO: 43
cggtgtttcggaggatagat

SEQ ID NO: 3912 - DNA, 29 bp, Artificial Sequence
  bisulfite treated nucleic acid for analysis of methylation status of SEQ ID NO: 43
ggagtcgtcggtgttggtatagatgtcgt

SEQ ID NO: 3913 - DNA, 28 bp, Artificial Sequence
  bisulfite treated nucleic acid for analysis of methylation status of SEQ ID NO: 43
ttcgtttacgtttagggtacgcgggaga

SEQ ID NO: 3914 - DNA, 21 bp, Artificial Sequence
  bisulfite treated nucleic acid for analysis of methylation status of SEQ ID NO: 43
aatcgaggtaagaggtttcgc

SEQ ID NO: 3915 - DNA, 19 bp, Artificial Sequence
  bisulfite treated nucleic acid for analysis of methylation status of SEQ ID NO: 43
agttcgggtacgaatcgag

SEQ ID NO: 3916 - DNA, 22 bp, Artificial Sequence
  bisulfite treated nucleic acid for analysis of methylation status of SEQ ID NO: 43
atctataccaacaccgacgact

SEQ ID NO: 3917 - DNA, 19 bp, Artificial Sequence
  bisulfite treated nucleic acid for analysis of methylation status of SEQ ID NO: 43
tatcgaggtaggaggcgag

SEQ ID NO: 3918 - DNA, 24 bp, Artificial Sequence
  bisulfite treated nucleic acid for analysis of methylation status of SEQ ID NO: 43
gggttagcgcggtgtttcggagga

SEQ ID NO: 3919 - DNA, 21 bp, Artificial Sequence
  bisulfite treated nucleic acid for analysis of methylation status of SEQ ID NO: 43
cgtgagggaagtagaaatcgt

SEQ ID NO: 3920 - DNA, 21 bp, Artificial Sequence
  bisulfite treated nucleic acid for analysis of methylation status of SEQ ID NO: 43
cgtcgtgagggaagtagaaat

SEQ ID NO: 3921 - DNA, 21 bp, Artificial Sequence
  bisulfite treated nucleic acid for analysis of methylation status of SEQ ID NO: 43
gatatagcggtaggagtcggg

SEQ ID NO: 3922 - DNA, 21 bp, Artificial Sequence
  bisulfite treated nucleic acid for analysis of methylation status of SEQ ID NO: 43
ggatatagcggtaggagtcgg

SEQ ID NO: 3923 - DNA, 22 bp, Artificial Sequence
  bisulfite treated nucleic acid for analysis of methylation status of SEQ ID NO: 43
tatacgaatcgcaacgctataa

SEQ ID NO: 3924 - DNA, 19 bp, Artificial Sequence
  bisulfite treated nucleic acid for analysis of methylation status of SEQ ID NO: 43
ggttcgcgtggtatttagg

SEQ ID NO: 3925 - DNA, 28 bp, Artificial Sequence
  bisulfite treated nucleic acid for analysis of methylation status of SEQ ID NO: 43
ttcggatatagcggtaggagtcgggaga

SEQ ID NO: 3926 - DNA, 23 bp, Artificial Sequence
  bisulfite treated nucleic acid for analysis of methylation status of SEQ ID NO: 43
gacgaatacctcaacactaacga

SEQ ID NO: 3927 - DNA, 21 bp, Artificial Sequence
  bisulfite treated nucleic acid for analysis of methylation status of SEQ ID NO: 43
cgacctctctcctcaaacgta

SEQ ID NO: 3928 - DNA, 21 bp, Artificial Sequence
  bisulfite treated nucleic acid for analysis of methylation status of SEQ ID NO: 43
atcgttataggtgttttcggg

SEQ ID NO: 3929 - DNA, 31 bp, Artificial Sequence
  bisulfite treated nucleic acid for analysis of methylation status of SEQ ID NO: 43
ttcgcgtggtatttaggatcgtagtttcgga

SEQ ID NO: 3930 - DNA, 21 bp, Artificial Sequence
  bisulfite treated nucleic acid for analysis of methylation status of SEQ ID NO: 43
tttctacttccctcacgacga

SEQ ID NO: 3931 - DNA, 19 bp, Artificial Sequence
  bisulfite treated nucleic acid for analysis of methylation status of SEQ ID NO: 43
gggttcgcgtggtatttag

SEQ ID NO: 3932 - DNA, 32 bp, Artificial Sequence
  bisulfite treated nucleic acid for analysis of methylation status of SEQ ID NO: 43
agcggtaggagtcgggagagtttttatagcgt

SEQ ID NO: 3933 - DNA, 20 bp, Artificial Sequence
  bisulfite treated nucleic acid for analysis of methylation status of SEQ ID NO: 43
gttcgcgtggtatttaggat

SEQ ID NO: 3934 - DNA, 19 bp, Artificial Sequence
  bisulfite treated nucleic acid for analysis of methylation status of SEQ ID NO: 43
tatagcggtaggagtcggg

SEQ ID NO: 3935 - DNA, 23 bp, Artificial Sequence
  bisulfite treated nucleic acid for analysis of methylation status of SEQ ID NO: 43
cgaatacctcaacactaacgact

SEQ ID NO: 3936 - DNA, 23 bp, Artificial Sequence
  bisulfite treated nucleic acid for analysis of methylation status of SEQ ID NO: 43
taccctaaacgtaaacgaatacc

SEQ ID NO: 3937 - DNA, 19 bp, Artificial Sequence
  bisulfite treated nucleic acid for analysis of methylation status of SEQ ID NO: 43
tcgaggtaagaggtttcgc

SEQ ID NO: 3938 - DNA, 22 bp, Artificial Sequence
  bisulfite treated nucleic acid for analysis of methylation status of SEQ ID NO: 43
acgaatacctcaacactaacga

SEQ ID NO: 3939 - DNA, 22 bp, Artificial Sequence
  bisulfite treated nucleic acid for analysis of methylation status of SEQ ID NO: 43
cgacgaatacctcaacactaac

SEQ ID NO: 3940 - DNA, 22 bp, Artificial Sequence
  bisulfite treated nucleic acid for analysis of methylation status of SEQ ID NO: 43
acgacgaatacctcaacactaa

SEQ ID NO: 3941 - DNA, 19 bp, Artificial Sequence
  bisulfite treated nucleic acid for analysis of methylation status of SEQ ID NO: 43
cgggtacgaatcgaggtaa

SEQ ID NO: 3942 - DNA, 20 bp, Artificial Sequence
  bisulfite treated nucleic acid for analysis of methylation status of SEQ ID NO: 43
cgttgtaagcgttagcgaag

SEQ ID NO: 3943 - DNA, 19 bp, Artificial Sequence
  bisulfite treated nucleic acid for analysis of methylation status of SEQ ID NO: 43
ttatcgaggtaggaggcga

SEQ ID NO: 3944 - DNA, 24 bp, Artificial Sequence
  bisulfite treated nucleic acid for analysis of methylation status of SEQ ID NO: 43
gtaccctaaacgtaaacgaatacc

SEQ ID NO: 3945 - DNA, 22 bp, Artificial Sequence
  bisulfite treated nucleic acid for analysis of methylation status of SEQ ID NO: 43
gctatatccgaaactacgatcc

SEQ ID NO: 3946 - DNA, 29 bp, Artificial Sequence
  bisulfite treated nucleic acid for analysis of methylation status of SEQ ID NO: 43
atcgttataggtgttttcggggttcgcgt

SEQ ID NO: 3947 - DNA, 20 bp, Artificial Sequence
  bisulfite treated nucleic acid for analysis of methylation status of SEQ ID NO: 43
ttcggatatagcggtaggag

SEQ ID NO: 3948 - DNA, 21 bp, Artificial Sequence
  bisulfite treated nucleic acid for analysis of methylation status of SEQ ID NO: 43
attcgtcgtgagggaagtaga

SEQ ID NO: 3949 - DNA, 21 bp, Artificial Sequence
  bisulfite treated nucleic acid for analysis of methylation status of SEQ ID NO: 43
tcacgacgaatacctcaacac

SEQ ID NO: 3950 - DNA, 22 bp, Artificial Sequence
  bisulfite treated nucleic acid for analysis of methylation status of SEQ ID NO: 43
ctcacgacgaatacctcaacac

SEQ ID NO: 3951 - DNA, 21 bp, Artificial Sequence
  bisulfite treated nucleic acid for analysis of methylation status of SEQ ID NO: 43
cccgaaaacacctataacgat

SEQ ID NO: 3952 - DNA, 24 bp, Artificial Sequence
  bisulfite treated nucleic acid for analysis of methylation status of SEQ ID NO: 43
agggagtagtttttagtatcgcgt

SEQ ID NO: 3953 - DNA, 22 bp, Artificial Sequence
  bisulfite treated nucleic acid for analysis of methylation status of SEQ ID NO: 43
agcgttagcgaaggcgggtggg

SEQ ID NO: 3954 - DNA, 22 bp, Artificial Sequence
  bisulfite treated nucleic acid for analysis of methylation status of SEQ ID NO: 43
aacgacatctataccaacaccg

SEQ ID NO: 3955 - DNA, 19 bp, Artificial Sequence
  bisulfite treated nucleic acid for analysis of methylation status of SEQ ID NO: 43
aaccgaatcccgtaactcc

SEQ ID NO: 3956 - DNA, 49 bp, Artificial Sequence
  bisulfite treated nucleic acid for analysis of methylation status of SEQ ID NO: 43
agaaatcgttttttaggtattcgtttacgtttagggtacgcgggagatt

SEQ ID NO: 3957 - DNA, 22 bp, Artificial Sequence
  bisulfite treated nucleic acid for analysis of methylation status of SEQ ID NO: 43
atacgaatcgcaacgctataaa

SEQ ID NO: 3958 - DNA, 19 bp, Artificial Sequence
  bisulfite treated nucleic acid for analysis of methylation status of SEQ ID NO: 43
tttatcgaggtaggaggcg

SEQ ID NO: 3959 - DNA, 20 bp, Artificial Sequence
  bisulfite treated nucleic acid for analysis of methylation status of SEQ ID NO: 43
tcggatatagcggtaggagt

SEQ ID NO: 3960 - DNA, 21 bp, Artificial Sequence
  bisulfite treated nucleic acid for analysis of methylation status of SEQ ID NO: 43
ccgactcctaccgctatatcc

SEQ ID NO: 3961 - DNA, 23 bp, Artificial Sequence
  bisulfite treated nucleic acid for analysis of methylation status of SEQ ID NO: 43
gggagtagtttttagtatcgcgt

SEQ ID NO: 3962 - DNA, 20 bp, Artificial Sequence
  bisulfite treated nucleic acid for analysis of methylation status of SEQ ID NO: 43
ggagtcgtcggtgttggtat

SEQ ID NO: 3963 - DNA, 21 bp, Artificial Sequence
  bisulfite treated nucleic acid for analysis of methylation status of SEQ ID NO: 43
acgaatcgaggtaagaggttt

SEQ ID NO: 3964 - DNA, 23 bp, Artificial Sequence
  bisulfite treated nucleic acid for analysis of methylation status of SEQ ID NO: 43
tagtttcggatatagcggtagga

SEQ ID NO: 3965 - DNA, 22 bp, Artificial Sequence
  bisulfite treated nucleic acid for analysis of methylation status of SEQ ID NO: 43
acgaaaccaaaacgctataaaa

SEQ ID NO: 3966 - DNA, 18 bp, Artificial Sequence
  bisulfite treated nucleic acid for analysis of methylation status of SEQ ID NO: 43
tagggtacgcgggagatt

SEQ ID NO: 3967 - DNA, 37 bp, Artificial Sequence
  bisulfite treated nucleic acid for analysis of methylation status of SEQ ID NO: 43
gagttacgggattcggttttttagataagtttcgttt

SEQ ID NO: 3968 - DNA, 18 bp, Artificial Sequence
  bisulfite treated nucleic acid for analysis of methylation status of SEQ ID NO: 43
ttagggtacgcgggagat

SEQ ID NO: 3969 - DNA, 36 bp, Artificial Sequence
  bisulfite treated nucleic acid for analysis of methylation status of SEQ ID NO: 43
ggagttacgggattcggttttttagataagtttcgt

SEQ ID NO: 3970 - DNA, 22 bp, Artificial Sequence
  bisulfite treated nucleic acid for analysis of methylation status of SEQ ID NO: 43
aacgaaaccaaaacgctataaa

SEQ ID NO: 3971 - DNA, 22 bp, Artificial Sequence
  bisulfite treated nucleic acid for analysis of methylation status of SEQ ID NO: 43
aaacgaaaccaaaacgctataa

SEQ ID NO: 3972 - DNA, 20 bp, Artificial Sequence
  bisulfite treated nucleic acid for analysis of methylation status of SEQ ID NO: 43
cgttataggtgttttcgggg

SEQ ID NO: 3973 - DNA, 49 bp, Artificial Sequence
  nucleic acid for analysis of methylation status of SEQ ID NO: 43
atcgtagtttcggatatagcggtaggagtcgggagagtttttatagcgt

SEQ ID NO: 3974 - DNA, 20 bp, Artificial Sequence
  bisulfite treated nucleic acid for analysis of methylation status of SEQ ID NO: 43
tttatcgaggtaggaggcga

SEQ ID NO: 3975 - DNA, 23 bp, Artificial Sequence
  bisulfite treated nucleic acid for analysis of methylation status of SEQ ID NO: 43
cgtagtttcggatatagcggtag

SEQ ID NO: 3976 - DNA, 20 bp, Artificial Sequence
  bisulfite treated nucleic acid for analysis of methylation status of SEQ ID NO: 43
ttttatcgaggtaggaggcg

SEQ ID NO: 3977 - DNA, 40 bp, Artificial Sequence
  bisulfite treated nucleic acid for analysis of methylation status of SEQ ID NO: 43
ttcgggttagcgcggtgtttcggaggatagatgtattcga

SEQ ID NO: 3978 - DNA, 21 bp, Artificial Sequence
  bisulfite treated nucleic acid for analysis of methylation status of SEQ ID NO: 43
tacttccctcacgacgaatac

SEQ ID NO: 3979 - DNA, 20 bp, Artificial Sequence
  bisulfite treated nucleic acid for analysis of methylation status of SEQ ID NO: 43
cgaaaaataaaccgaacctt

SEQ ID NO: 3980 - DNA, 21 bp, Artificial Sequence
  bisulfite treated nucleic acid for analysis of methylation status of SEQ ID NO: 43
tcgtgagggaagtagaaatcg

SEQ ID NO: 3981 - DNA, 20 bp, Artificial Sequence
  bisulfite treated nucleic acid for analysis of methylation status of SEQ ID NO: 43
tcggggttaggattagttcg

SEQ ID NO: 3982 - DNA, 22 bp, Artificial Sequence
  bisulfite treated nucleic acid for analysis of methylation status of SEQ ID NO: 43
acatctataccaacaccgacga

SEQ ID NO: 3983 - DNA, 22 bp, Artificial Sequence
  bisulfite treated nucleic acid for analysis of methylation status of SEQ ID NO: 43
acgacatctataccaacaccga

SEQ ID NO: 3984 - DNA, 22 bp, Artificial Sequence
  bisulfite treated nucleic acid for analysis of methylation status of SEQ ID NO: 43
cgacatctataccaacaccgac

SEQ ID NO: 3985 - DNA, 22 bp, Artificial Sequence
  bisulfite treated nucleic acid for analysis of methylation status of SEQ ID NO: 43
catctataccaacaccgacgac

SEQ ID NO: 3986 - DNA, 22 bp, Artificial Sequence
  bisulfite treated nucleic acid for analysis of methylation status of SEQ ID NO: 43
tttttagtatcgcgttgtaagc

SEQ ID NO: 3987 - DNA, 22 bp, Artificial Sequence
  bisulfite treated nucleic acid for analysis of methylation status of SEQ ID NO: 15
tatgtacgtttagaggttcggg

SEQ ID NO: 3988 - DNA, 22 bp, Artificial Sequence
  bisulfite treated nucleic acid for analysis of methylation status of SEQ ID NO: 15
aaaaacgataaaaacaccgcta

SEQ ID NO: 3989 - DNA, 27 bp, Artificial Sequence
  bisulfite treated nucleic acid for analysis of methylation status of SEQ ID NO: 15
aaggggcggttttagtacgcgatttgg

SEQ ID NO: 3990 - DNA, 22 bp, Artificial Sequence
  bisulfite treated nucleic acid for analysis of methylation status of SEQ ID NO: 15
aagttatgttgtcgagtttcgg

SEQ ID NO: 3991 - DNA, 22 bp, Artificial Sequence
  bisulfite treated nucleic acid for analysis of methylation status of SEQ ID NO: 15
tacctaaataaaaacgccgcta

SEQ ID NO: 3992 - DNA, 42 bp, Artificial Sequence
  bisulfite treated nucleic acid for analysis of methylation status of SEQ ID NO: 15
gtttcggtcggggttattagtatttgttagtaaaacggggag

SEQ ID NO: 3993 - DNA, 22 bp, Artificial Sequence
  bisulfite treated nucleic acid for analysis of methylation status of SEQ ID NO: 15
gtacgtttagaggttcgggatt

SEQ ID NO: 3994 - DNA, 22 bp, Artificial Sequence
  bisulfite treated nucleic acid for analysis of methylation status of SEQ ID NO: 15
agagttagcggcgtttttattt

SEQ ID NO: 3995 - DNA, 22 bp, Artificial Sequence
  bisulfite treated nucleic acid for analysis of methylation status of SEQ ID NO: 15
acctatccaaatcgcgtactaa

SEQ ID NO: 3996 - DNA, 35 bp, Artificial Sequence
  bisulfite treated nucleic acid for analysis of methylation status of SEQ ID NO: 15
ggtatgtacgtttagaggttcgggatttgtttttg

SEQ ID NO: 3997 - DNA, 22 bp, Artificial Sequence
  bisulfite treated nucleic acid for analysis of methylation status of SEQ ID NO: 15
cgttttgagataggcgttaaga

SEQ ID NO: 3998 - DNA, 22 bp, Artificial Sequence
  bisulfite treated nucleic acid for analysis of methylation status of SEQ ID NO: 15
cgtaaacctcgctaactctcac

SEQ ID NO: 3999 - DNA, 28 bp, Artificial Sequence
  bisulfite treated nucleic acid for analysis of methylation status of SEQ ID NO: 15
tggaattgcgtagttagggttagggcga

SEQ ID NO: 4000 - DNA, 22 bp, Artificial Sequence
  bisulfite treated nucleic acid for analysis of methylation status of SEQ ID NO: 15
gtaatgtcgggcgtatagtttg

SEQ ID NO: 4001 - DNA, 22 bp, Artificial Sequence
  bisulfite treated nucleic acid for analysis of methylation status of SEQ ID NO: 15
atcgacttcgcctaccttctat

SEQ ID NO: 4002 - DNA, 34 bp, Artificial Sequence
  bisulfite treated nucleic acid for analysis of methylation status of SEQ ID NO: 15
gggggcgattatgacgattagtttggattttatg

SEQ ID NO: 4003 - DNA, 22 bp, Artificial Sequence
  bisulfite treated nucleic acid for analysis of methylation status of SEQ ID NO: 15
tacgtttagaggttcgggattt

SEQ ID NO: 4004 - DNA, 21 bp, Artificial Sequence
  bisulfite treated nucleic acid for analysis of methylation status of SEQ ID NO: 15
atgtacgtttagaggttcggg

SEQ ID NO: 4005 - DNA, 22 bp, Artificial Sequence
  bisulfite treated nucleic acid for analysis of methylation status of SEQ ID NO: 15
caaactatacgcccgacattac

SEQ ID NO: 4006 - DNA, 22 bp, Artificial Sequence
  bisulfite treated nucleic acid for analysis of methylation status of SEQ ID NO: 15
gagttagcggcgtttttattta

SEQ ID NO: 4007 - DNA, 22 bp, Artificial Sequence
  bisulfite treated nucleic acid for analysis of methylation status of SEQ ID NO: 15
atacctatccaaatcgcgtact

SEQ ID NO: 4008 - DNA, 35 bp, Artificial Sequence
  bisulfite treated nucleic acid for analysis of methylation status of SEQ ID NO: 15
atgtacgtttagaggttcgggatttgtttttgttt

SEQ ID NO: 4009 - DNA, 23 bp, Artificial Sequence
  bisulfite treated nucleic acid for analysis of methylation status of SEQ ID NO: 15
aataatacctatccaaatcgcgt

SEQ ID NO: 4010 - DNA, 21 bp, Artificial Sequence
  bisulfite treated nucleic acid for analysis of methylation status of SEQ ID NO: 15
acctaaataaaaacgccgcta

SEQ ID NO: 4011 - DNA, 22 bp, Artificial Sequence
  bisulfite treated nucleic acid for analysis of methylation status of SEQ ID NO: 15
ataatacctatccaaatcgcgt

SEQ ID NO: 4012 - DNA, 22 bp, Artificial Sequence
  bisulfite treated nucleic acid for analysis of methylation status of SEQ ID NO: 15
tggagtcgtagtttatttcggt

SEQ ID NO: 4013 - DNA, 21 bp, Artificial Sequence
  bisulfite treated nucleic acid for analysis of methylation status of SEQ ID NO: 15
ataaaaacgccgctaactctc

SEQ ID NO: 4014 - DNA, 29 bp, Artificial Sequence
  bisulfite treated nucleic acid for analysis of methylation status of SEQ ID NO: 15
tggggaagttatgttgtcgagtttcgggg

SEQ ID NO: 4015 - DNA, 22 bp, Artificial Sequence
  bisulfite treated nucleic acid for analysis of methylation status of SEQ ID NO: 15
ggagtcgtagtttatttcggtg

SEQ ID NO: 4016 - DNA, 23 bp, Artificial Sequence
  bisulfite treated nucleic acid for analysis of methylation status of SEQ ID NO: 15
aatacctatccaaatcgcgtact

SEQ ID NO: 4017 - DNA, 21 bp, Artificial Sequence
  bisulfite treated nucleic acid for analysis of methylation status of SEQ ID NO: 15
gagttagcggcgtttttattt

SEQ ID NO: 4018 - DNA, 23 bp, Artificial Sequence
  bisulfite treated nucleic acid for analysis of methylation status of SEQ ID NO: 15
tacctatccaaatcgcgtactaa

SEQ ID NO: 4019 - DNA, 22 bp, Artificial Sequence
  bisulfite treated nucleic acid for analysis of methylation status of SEQ ID NO: 15
taatacctatccaaatcgcgta

SEQ ID NO: 4020 - DNA, 21 bp, Artificial Sequence
  bisulfite treated nucleic acid for analysis of methylation status of SEQ ID NO: 15
taatgtcgggcgtatagtttg

SEQ ID NO: 4021 - DNA, 21 bp, Artificial Sequence
  bisulfite treated nucleic acid for analysis of methylation status of SEQ ID NO: 15
tcgacttcgcctaccttctat

SEQ ID NO: 4022 - DNA, 23 bp, Artificial Sequence
  bisulfite treated nucleic acid for analysis of methylation status of SEQ ID NO: 15
atacctaaataaaaacgccgcta

SEQ ID NO: 4023 - DNA, 21 bp, Artificial Sequence
  bisulfite treated nucleic acid for analysis of methylation status of SEQ ID NO: 15
cctaaataaaaacgccgctaa

SEQ ID NO: 4024 - DNA, 22 bp, Artificial Sequence
  bisulfite treated nucleic acid for analysis of methylation status of SEQ ID NO: 15
gcgattatgacgattagtttgg

SEQ ID NO: 4025 - DNA, 22 bp, Artificial Sequence
  bisulfite treated nucleic acid for analysis of methylation status of SEQ ID NO: 15
ttccgatatacgctcttctaca

SEQ ID NO: 4026 - DNA, 45 bp, Artificial Sequence
  bisulfite treated nucleic acid for analysis of methylation status of SEQ ID NO: 15
ttttatgtggatcgtaaaatagatgttttatagaaggtaggcgaa

SEQ ID NO: 4027 - DNA, 22 bp, Artificial Sequence
  bisulfite treated nucleic acid for analysis of methylation status of SEQ ID NO: 15
ggcgattatgacgattagtttg

SEQ ID NO: 4028 - DNA, 21 bp, Artificial Sequence
  bisulfite treated nucleic acid for analysis of methylation status of SEQ ID NO: 15
gcgtaaacctcgctaactctc

SEQ ID NO: 4029 - DNA, 22 bp, Artificial Sequence
  bisulfite treated nucleic acid for analysis of methylation status of SEQ ID NO: 15
tcggtcggggttattagtattt

SEQ ID NO: 4030 - DNA, 30 bp, Artificial Sequence
  bisulfite treated nucleic acid for analysis of methylation status of SEQ ID NO: 15
ggggagagttagcggcgtttttatttaggt

SEQ ID NO: 4031 - DNA, 22 bp, Artificial Sequence
  bisulfite treated nucleic acid for analysis of methylation status of SEQ ID NO: 15
cgtagtttatttcggtgttgtg

SEQ ID NO: 4032 - DNA, 22 bp, Artificial Sequence
  bisulfite treated nucleic acid for analysis of methylation status of SEQ ID NO: 15
tgtacgtttagaggttcgggat

SEQ ID NO: 4033 - DNA, 21 bp, Artificial Sequence
  bisulfite treated nucleic acid for analysis of methylation status of SEQ ID NO: 15
gttgttttcgttggagtcgta

SEQ ID NO: 4034 - DNA, 22 bp, Artificial Sequence
  bisulfite treated nucleic acid for analysis of methylation status of SEQ ID NO: 15
aaatactaataaccccgaccga

SEQ ID NO: 4035 - DNA, 22 bp, Artificial Sequence
  bisulfite treated nucleic acid for analysis of methylation status of SEQ ID NO: 15
ctacctaaaacgctacttcccg

SEQ ID NO: 4036 - DNA, 28 bp, Artificial Sequence
  bisulfite treated nucleic acid for analysis of methylation status of SEQ ID NO: 15
ggtaggcgaagtcgatgtagaagagcgt

SEQ ID NO: 4037 - DNA, 22 bp, Artificial Sequence
  bisulfite treated nucleic acid for analysis of methylation status of SEQ ID NO: 15
agttagcggcgtttttatttag

SEQ ID NO: 4038 - DNA, 21 bp, Artificial Sequence
  bisulfite treated nucleic acid for analysis of methylation status of SEQ ID NO: 15
acgtttagaggttcgggattt

SEQ ID NO: 4039 - DNA, 23 bp, Artificial Sequence
  bisulfite treated nucleic acid for analysis of methylation status of SEQ ID NO: 15
tccgatatacgctcttctacatc

SEQ ID NO: 4040 - DNA, 22 bp, Artificial Sequence
  bisulfite treated nucleic acid for analysis of methylation status of SEQ ID NO: 15
gagagttagcggcgtttttatt

SEQ ID NO: 4041 - DNA, 34 bp, Artificial Sequence
  bisulfite treated nucleic acid for analysis of methylation status of SEQ ID NO: 15
aggtatgtacgtttagaggttcgggatttgtttt

SEQ ID NO: 4042 - DNA, 22 bp, Artificial Sequence
  bisulfite treated nucleic acid for analysis of methylation status of SEQ ID NO: 15
tgtagacgttgtcgtagagtcg

SEQ ID NO: 4043 - DNA, 21 bp, Artificial Sequence
  bisulfite treated nucleic acid for analysis of methylation status of SEQ ID NO: 15
accgcatctctaactcgaaaa

SEQ ID NO: 4044 - DNA, 22 bp, Artificial Sequence
  bisulfite treated nucleic acid for analysis of methylation status of SEQ ID NO: 15
ttcgcgacgtcggtcgggacgt

SEQ ID NO: 4045 - DNA, 21 bp, Artificial Sequence
  bisulfite treated nucleic acid for analysis of methylation status of SEQ ID NO: 15
tacctaaaacgctacttcccg

SEQ ID NO: 4046 - DNA, 20 bp, Artificial Sequence
  bisulfite treated nucleic acid for analysis of methylation status of SEQ ID NO: 15
gaccgcatctctaactcgaa

SEQ ID NO: 4047 - DNA, 20 bp, Artificial Sequence
  bisulfite treated nucleic acid for analysis of methylation status of SEQ ID NO: 15
cgtttagaggttcgggattt

SEQ ID NO: 4048 - DNA, 21 bp, Artificial Sequence
  bisulfite treated nucleic acid for analysis of methylation status of SEQ ID NO: 15
agttatgttgtcgagtttcgg

SEQ ID NO: 4049 - DNA, 20 bp, Artificial Sequence
  bisulfite treated nucleic acid for analysis of methylation status of SEQ ID NO: 15
ccgcatctctaactcgaaaa

SEQ ID NO: 4050 - DNA, 22 bp, Artificial Sequence
  bisulfite treated nucleic acid for analysis of methylation status of SEQ ID NO: 15
tttcggtcggggttattagtat

SEQ ID NO: 4051 - DNA, 20 bp, Artificial Sequence
  bisulfite treated nucleic acid for analysis of methylation status of SEQ ID NO: 15
gcgttttgagataggcgtta

SEQ ID NO: 4052 - DNA, 21 bp, Artificial Sequence
  bisulfite treated nucleic acid for analysis of methylation status of SEQ ID NO: 15
gggcgattatgacgattagtt

SEQ ID NO: 4053 - DNA, 45 bp, Artificial Sequence
  bisulfite treated nucleic acid for analysis of methylation status of SEQ ID NO: 15
tgtggatcgtaaaatagatgttttatagaaggtaggcgaagtcga

SEQ ID NO: 4054 - DNA, 22 bp, Artificial Sequence
  bisulfite treated nucleic acid for analysis of methylation status of SEQ ID NO: 15
gttagcggcgtttttatttagg

SEQ ID NO: 4055 - DNA, 21 bp, Artificial Sequence
  bisulfite treated nucleic acid for analysis of methylation status of SEQ ID NO: 15
gagagttagcggcgtttttat

SEQ ID NO: 4056 - DNA, 22 bp, Artificial Sequence
  bisulfite treated nucleic acid for analysis of methylation status of SEQ ID NO: 15
cgattccgatatacgctcttct

SEQ ID NO: 4057 - DNA, 45 bp, Artificial Sequence
  bisulfite treated nucleic acid for analysis of methylation status of SEQ ID NO: 15
tggatcgtaaaatagatgttttatagaaggtaggcgaagtcgatg

SEQ ID NO: 4058 - DNA, 22 bp, Artificial Sequence
  bisulfite treated nucleic acid for analysis of methylation status of SEQ ID NO: 15
cgttaagatttggaattgcgta

SEQ ID NO: 4059 - DNA, 21 bp, Artificial Sequence
  bisulfite treated nucleic acid for analysis of methylation status of SEQ ID NO: 15
caaactatacgcccgacatta

SEQ ID NO: 4060 - DNA, 39 bp, Artificial Sequence
  bisulfite treated nucleic acid for analysis of methylation status of SEQ ID NO: 15
tagggcgaatattagtagggtgagagttagcgaggttta

SEQ ID NO: 4061 - DNA, 21 bp, Artificial Sequence
  bisulfite treated nucleic acid for analysis of methylation status of SEQ ID NO: 15
cgcgctatacttcctcctaat

SEQ ID NO: 4062 - DNA, 28 bp, Artificial Sequence
  bisulfite treated nucleic acid for analysis of methylation status of SEQ ID NO: 15
agcgaggtttacgcgtaatgtcgggcgt

SEQ ID NO: 4063 - DNA, 22 bp, Artificial Sequence
  bisulfite treated nucleic acid for analysis of methylation status of SEQ ID NO: 15
gttgttttcgttggagtcgtag

SEQ ID NO: 4064 - DNA, 22 bp, Artificial Sequence
  bisulfite treated nucleic acid for analysis of methylation status of SEQ ID NO: 15
caaatactaataaccccgaccg

SEQ ID NO: 4065 - DNA, 23 bp, Artificial Sequence
  bisulfite treated nucleic acid for analysis of methylation status of SEQ ID NO: 15
attccgatatacgctcttctaca

SEQ ID NO: 4066 - DNA, 22 bp, Artificial Sequence
  bisulfite treated nucleic acid for analysis of methylation status of SEQ ID NO: 15
cgattatgacgattagtttgga

SEQ ID NO: 4067 - DNA, 21 bp, Artificial Sequence
  bisulfite treated nucleic acid for analysis of methylation status of SEQ ID NO: 15
aaaacgataaaaacaccgcta

SEQ ID NO: 4068 - DNA, 21 bp, Artificial Sequence
  bisulfite treated nucleic acid for analysis of methylation status of SEQ ID NO: 15
cctatccaaatcgcgtactaa

SEQ ID NO: 4069 - DNA, 21 bp, Artificial Sequence
  bisulfite treated nucleic acid for analysis of methylation status of SEQ ID NO: 15
ttagcggcgtttttatttagg

SEQ ID NO: 4070 - DNA, 21 bp, Artificial Sequence
  bisulfite treated nucleic acid for analysis of methylation status of SEQ ID NO: 15
gttatgttgtcgagtttcggg

SEQ ID NO: 4071 - DNA, 21 bp, Artificial Sequence
  bisulfite treated nucleic acid for analysis of methylation status of SEQ ID NO: 15
aactatacgcccgacattacg

SEQ ID NO: 4072 - DNA, 21 bp, Artificial Sequence
  bisulfite treated nucleic acid for analysis of methylation status of SEQ ID NO: 15
ttcggtcggggttattagtat

SEQ ID NO: 4073 - DNA, 20 bp, Artificial Sequence
  bisulfite treated nucleic acid for analysis of methylation status of SEQ ID NO: 15
gtttcggtcggggttattag

SEQ ID NO: 4074 - DNA, 22 bp, Artificial Sequence
  bisulfite treated nucleic acid for analysis of methylation status of SEQ ID NO: 15
cccgaacctctaaacgtacata

SEQ ID NO: 4075 - DNA, 21 bp, Artificial Sequence
  bisulfite treated nucleic acid for analysis of methylation status of SEQ ID NO: 15
aatactaataaccccgaccga

SEQ ID NO: 4076 - DNA, 21 bp, Artificial Sequence
  bisulfite treated nucleic acid for analysis of methylation status of SEQ ID NO: 15
ttgttttcgttggagtcgtag

SEQ ID NO: 4077 - DNA, 22 bp, Artificial Sequence
  bisulfite treated nucleic acid for analysis of methylation status of SEQ ID NO: 15
atcccgaacctctaaacgtaca

SEQ ID NO: 4078 - DNA, 22 bp, Artificial Sequence
  bisulfite treated nucleic acid for analysis of methylation status of SEQ ID NO: 15
cggtcggggttattagtatttg

SEQ ID NO: 4079 - DNA, 21 bp, Artificial Sequence
  bisulfite treated nucleic acid for analysis of methylation status of SEQ ID NO: 15
tgagagttagcgaggtttacg

SEQ ID NO: 4080 - DNA, 21 bp, Artificial Sequence
  bisulfite treated nucleic acid for analysis of methylation status of SEQ ID NO: 15
aactaatcgtcataatcgccc

SEQ ID NO: 4081 - DNA, 32 bp, Artificial Sequence
  bisulfite treated nucleic acid for analysis of methylation status of SEQ ID NO: 15
gtaatgtcgggcgtatagtttggtgaaggtaa

SEQ ID NO: 4082 - DNA, 20 bp, Artificial Sequence
  bisulfite treated nucleic acid for analysis of methylation status of SEQ ID NO: 15
ttatgttgtcgagtttcggg

SEQ ID NO: 4083 - DNA, 23 bp, Artificial Sequence
  bisulfite treated nucleic acid for analysis of methylation status of SEQ ID NO: 15
agtcgtagtttatttcggtgttg

SEQ ID NO: 4084 - DNA, 22 bp, Artificial Sequence
  bisulfite treated nucleic acid for analysis of methylation status of SEQ ID NO: 15
gtcgtagtttatttcggtgttg

SEQ ID NO: 4085 - DNA, 22 bp, Artificial Sequence
  bisulfite treated nucleic acid for analysis of methylation status of SEQ ID NO: 15
tcgtagtttatttcggtgttgt

SEQ ID NO: 4086 - DNA, 20 bp, Artificial Sequence
  bisulfite treated nucleic acid for analysis of methylation status of SEQ ID NO: 15
aatgtcgggcgtatagtttg

SEQ ID NO: 4087 - DNA, 20 bp, Artificial Sequence
  bisulfite treated nucleic acid for analysis of methylation status of SEQ ID NO: 15
taaaaacgccgctaactctc

SEQ ID NO: 4088 - DNA, 22 bp, Artificial Sequence
  bisulfite treated nucleic acid for analysis of methylation status of SEQ ID NO: 15
ccgatatacgctcttctacatc

SEQ ID NO: 4089 - DNA, 20 bp, Artificial Sequence
  bisulfite treated nucleic acid for analysis of methylation status of SEQ ID NO: 15
actatacgcccgacattacg

SEQ ID NO: 4090 - DNA, 22 bp, Artificial Sequence
  bisulfite treated nucleic acid for analysis of methylation status of SEQ ID NO: 15
ttttcgttggagtcgtagttta

SEQ ID NO: 4091 - DNA, 45 bp, Artificial Sequence
  bisulfite treated nucleic acid for analysis of methylation status of SEQ ID NO: 15
gtggatcgtaaaatagatgttttatagaaggtaggcgaagtcgat

SEQ ID NO: 4092 - DNA, 21 bp, Artificial Sequence
  bisulfite treated nucleic acid for analysis of methylation status of SEQ ID NO: 15
aaatactaataaccccgaccg

SEQ ID NO: 4093 - DNA, 22 bp, Artificial Sequence
  bisulfite treated nucleic acid for analysis of methylation status of SEQ ID NO: 15
gtagacgttgtcgtagagtcgg

SEQ ID NO: 4094 - DNA, 21 bp, Artificial Sequence
  bisulfite treated nucleic acid for analysis of methylation status of SEQ ID NO: 15
cggtcggggttattagtattt

SEQ ID NO: 4095 - DNA, 22 bp, Artificial Sequence
  bisulfite treated nucleic acid for analysis of methylation status of SEQ ID NO: 15
ttggagtcgtagtttatttcgg

SEQ ID NO: 4096 - DNA, 23 bp, Artificial Sequence
  bisulfite treated nucleic acid for analysis of methylation status of SEQ ID NO: 15
tatagaaggtaggcgaagtcgat

SEQ ID NO: 4097 - DNA, 26 bp, Artificial Sequence
  bisulfite treated nucleic acid for analysis of methylation status of SEQ ID NO: 15
agcgtatatcggaatcggcgttgggt

SEQ ID NO: 4098 - DNA, 22 bp, Artificial Sequence
  bisulfite treated nucleic acid for analysis of methylation status of SEQ ID NO: 15
aaactaatcgtcataatcgccc

SEQ ID NO: 4099 - DNA, 21 bp, Artificial Sequence
  bisulfite treated nucleic acid for analysis of methylation status of SEQ ID NO: 15
tagacgttgtcgtagagtcgg

SEQ ID NO: 4100 - DNA, 23 bp, Artificial Sequence
  bisulfite treated nucleic acid for analysis of methylation status of SEQ ID NO: 15
gttttcgttggagtcgtagttta

SEQ ID NO: 4101 - DNA, 20 bp, Artificial Sequence
  bisulfite treated nucleic acid for analysis of methylation status of SEQ ID NO: 15
acctaaaacgctacttcccg

SEQ ID NO: 4102 - DNA, 20 bp, Artificial Sequence
  bisulfite treated nucleic acid for analysis of methylation status of SEQ ID NO: 15
cccgaacctctaaacgtaca

SEQ ID NO: 4103 - DNA, 26 bp, Artificial Sequence
  bisulfite treated nucleic acid for analysis of methylation status of SEQ ID NO: 15
agtaaaacggggagagttagcggcgt

SEQ ID NO: 4104 - DNA, 21 bp, Artificial Sequence
  bisulfite treated nucleic acid for analysis of methylation status of SEQ ID NO: 15
cgtaatgtcgggcgtatagtt

SEQ ID NO: 4105 - DNA, 22 bp, Artificial Sequence
  bisulfite treated nucleic acid for analysis of methylation status of SEQ ID NO: 15
gattccgatatacgctcttcta

SEQ ID NO: 4106 - DNA, 21 bp, Artificial Sequence
  bisulfite treated nucleic acid for analysis of methylation status of SEQ ID NO: 15
gttgtcgtagagtcgggtttt

SEQ ID NO: 4107 - DNA, 24 bp, Artificial Sequence
  bisulfite treated nucleic acid for analysis of methylation status of SEQ ID NO: 15
ttcgttcgcgtttacgtcgggggt

SEQ ID NO: 4108 - DNA, 21 bp, Artificial Sequence
  bisulfite treated nucleic acid for analysis of methylation status of SEQ ID NO: 15
tacctatccaaatcgcgtact

SEQ ID NO: 4109 - DNA, 21 bp, Artificial Sequence
  bisulfite treated nucleic acid for analysis of methylation status of SEQ ID NO: 15
gaccgcatctctaactcgaaa

SEQ ID NO: 4110 - DNA, 21 bp, Artificial Sequence
  bisulfite treated nucleic acid for analysis of methylation status of SEQ ID NO: 15
aatacctatccaaatcgcgta

SEQ ID NO: 4111 - DNA, 21 bp, Artificial Sequence
  bisulfite treated nucleic acid for analysis of methylation status of SEQ ID NO: 15
tcccgaacctctaaacgtaca

SEQ ID NO: 4112 - DNA, 20 bp, Artificial Sequence
  bisulfite treated nucleic acid for analysis of methylation status of SEQ ID NO: 15
cgtactaaaaccgcccctta

SEQ ID NO: 4113 - DNA, 20 bp, Artificial Sequence
  bisulfite treated nucleic acid for analysis of methylation status of SEQ ID NO: 15
taaaacggggagagttagcg

SEQ ID NO: 4114 - DNA, 20 bp, Artificial Sequence
  bisulfite treated nucleic acid for analysis of methylation status of SEQ ID NO: 15
cgctaactctccccgtttta

SEQ ID NO: 4115 - DNA, 24 bp, Artificial Sequence
  nucleic acid for analysis of methylation status of SEQ ID NO: 15
taatacctatccaaatcgcgtact

SEQ ID NO: 4116 - DNA, 22 bp, Artificial Sequence
  bisulfite treated nucleic acid for analysis of methylation status of SEQ ID NO: 15
cgagtcgtttgcgtataaataa

SEQ ID NO: 4117 - DNA, 20 bp, Artificial Sequence
  bisulfite treated nucleic acid for analysis of methylation status of SEQ ID NO: 15
gctactccgaatcgaaatcc

SEQ ID NO: 4118 - DNA, 38 bp, Artificial Sequence
  bisulfite treated nucleic acid for analysis of methylation status of SEQ ID NO: 15
ggcgcggagttttttattttgtaggagtcgcgtttcga

SEQ ID NO: 4119 - DNA, 23 bp, Artificial Sequence
  bisulfite treated nucleic acid for analysis of methylation status of SEQ ID NO: 15
gagtcgtagtttatttcggtgtt

SEQ ID NO: 4120 - DNA, 22 bp, Artificial Sequence
  bisulfite treated nucleic acid for analysis of methylation status of SEQ ID NO: 15
gtgagagttagcgaggtttacg

SEQ ID NO: 4121 - DNA, 19 bp, Artificial Sequence
  bisulfite treated nucleic acid for analysis of methylation status of SEQ ID NO: 15
taatcgtcataatcgcccc

SEQ ID NO: 4122 - DNA, 21 bp, Artificial Sequence
  bisulfite treated nucleic acid for analysis of methylation status of SEQ ID NO: 15
aaactatacgcccgacattac

SEQ ID NO: 4123 - DNA, 22 bp, Artificial Sequence
  bisulfite treated nucleic acid for analysis of methylation status of SEQ ID NO: 15
cctatccaaatcgcgtactaaa

SEQ ID NO: 4124 - DNA, 21 bp, Artificial Sequence
  bisulfite treated nucleic acid for analysis of methylation status of SEQ ID NO: 15
cgggaagtagcgttttaggta

SEQ ID NO: 4125 - DNA, 20 bp, Artificial Sequence
  bisulfite treated nucleic acid for analysis of methylation status of SEQ ID NO: 15
gaataaacgacgaaaaccga

SEQ ID NO: 4126 - DNA, 30 bp, Artificial Sequence
  bisulfite treated nucleic acid for analysis of methylation status of SEQ ID NO: 15
agcggttggaggttttttcgaatagttggg

SEQ ID NO: 4127 - DNA, 21 bp, Artificial Sequence
  bisulfite treated nucleic acid for analysis of methylation status of SEQ ID NO: 15
gtttcggtcggggttattagt

SEQ ID NO: 4128 - DNA, 22 bp, Artificial Sequence
  bisulfite treated nucleic acid for analysis of methylation status of SEQ ID NO: 15
cctaaataaaaacgccgctaac

SEQ ID NO: 4129 - DNA, 20 bp, Artificial Sequence
  bisulfite treated nucleic acid for analysis of methylation status of SEQ ID NO: 15
gacgaccgcatctctaactc

SEQ ID NO: 4130 - DNA, 19 bp, Artificial Sequence
  bisulfite treated nucleic acid for analysis of methylation status of SEQ ID NO: 15
gtcgtcgcgttttgagata

SEQ ID NO: 4131 - DNA, 19 bp, Artificial Sequence
  bisulfite treated nucleic acid for analysis of methylation status of SEQ ID NO: 15
ccgattccgatatacgctc

SEQ ID NO: 4132 - DNA, 19 bp, Artificial Sequence
  bisulfite treated nucleic acid for analysis of methylation status of SEQ ID NO: 15
cgcgtaaacctcgctaact

SEQ ID NO: 4133 - DNA, 20 bp, Artificial Sequence
  bisulfite treated nucleic acid for analysis of methylation status of SEQ ID NO: 15
aaccgactacgcaaacaaaa

SEQ ID NO: 4134 - DNA, 22 bp, Artificial Sequence
  bisulfite treated nucleic acid for analysis of methylation status of SEQ ID NO: 15
cggtgtagacgttgtcgtagag

SEQ ID NO: 4135 - DNA, 20 bp, Artificial Sequence
  bisulfite treated nucleic acid for analysis of methylation status of SEQ ID NO: 15
tagcggcgtttttatttagg

SEQ ID NO: 4136 - DNA, 22 bp, Artificial Sequence
  bisulfite treated nucleic acid for analysis of methylation status of SEQ ID NO: 15
gttttcgttggagtcgtagttt

SEQ ID NO: 4137 - DNA, 19 bp, Artificial Sequence
  bisulfite treated nucleic acid for analysis of methylation status of SEQ ID NO: 15
aaaaacgccgctaactctc

SEQ ID NO: 4138 - DNA, 19 bp, Artificial Sequence
  bisulfite treated nucleic acid for analysis of methylation status of SEQ ID NO: 15
tttagttgcggtttcggag

SEQ ID NO: 4139 - DNA, 22 bp, Artificial Sequence
  bisulfite treated nucleic acid for analysis of methylation status of SEQ ID NO: 15
acgcgactcctacaaaataaaa

SEQ ID NO: 4140 - DNA, 24 bp, Artificial Sequence
  bisulfite treated nucleic acid for analysis of methylation status of SEQ ID NO: 15
aatttcgttggcggcgcggagttt

SEQ ID NO: 4141 - DNA, 22 bp, Artificial Sequence
  bisulfite treated nucleic acid for analysis of methylation status of SEQ ID NO: 15
aacgcgactcctacaaaataaa

SEQ ID NO: 4142 - DNA, 21 bp, Artificial Sequence
  bisulfite treated nucleic acid for analysis of methylation status of SEQ ID NO: 15
cgtaaggttggagttgtcgtc

SEQ ID NO: 4143 - DNA, 32 bp, Artificial Sequence
  bisulfite treated nucleic acid for analysis of methylation status of SEQ ID NO: 15
aggcgttaagatttggaattgcgtagttaggg

SEQ ID NO: 4144 - DNA, 19 bp, Artificial Sequence
  bisulfite treated nucleic acid for analysis of methylation status of SEQ ID NO: 15
ctaaaacgctacttcccgc

SEQ ID NO: 4145 - DNA, 23 bp, Artificial Sequence
  bisulfite treated nucleic acid for analysis of methylation status of SEQ ID NO: 15
gtgtagacgttgtcgtagagtcg

SEQ ID NO: 4146 - DNA, 19 bp, Artificial Sequence
  bisulfite treated nucleic acid for analysis of methylation status of SEQ ID NO: 15
tcgtcgcgttttgagatag

SEQ ID NO: 4147 - DNA, 41 bp, Artificial Sequence
  bisulfite treated nucleic acid for analysis of methylation status of SEQ ID NO: 15
ggcgaatattagtagggtgagagttagcgaggtttacgcgt

SEQ ID NO: 4148 - DNA, 24 bp, Artificial Sequence
  bisulfite treated nucleic acid for analysis of methylation status of SEQ ID NO: 15
cgatatacgctcttctacatcgac

SEQ ID NO: 4149 - DNA, 20 bp, Artificial Sequence
  bisulfite treated nucleic acid for analysis of methylation status of SEQ ID NO: 15
agacgttgtcgtagagtcgg

SEQ ID NO: 4150 - DNA, 19 bp, Artificial Sequence
  bisulfite treated nucleic acid for analysis of methylation status of SEQ ID NO: 15
tatgttgtcgagtttcggg

SEQ ID NO: 4151 - DNA, 19 bp, Artificial Sequence
  bisulfite treated nucleic acid for analysis of methylation status of SEQ ID NO: 15
accaaactatacgcccgac

SEQ ID NO: 4152 - DNA, 19 bp, Artificial Sequence
  bisulfite treated nucleic acid for analysis of methylation status of SEQ ID NO: 15
gtcgcgttttgagataggc

SEQ ID NO: 4153 - DNA, 23 bp, Artificial Sequence
  bisulfite treated nucleic acid for analysis of methylation status of SEQ ID NO: 15
ttcggtcggggttattagtattt

SEQ ID NO: 4154 - DNA, 24 bp, Artificial Sequence
  bisulfite treated nucleic acid for analysis of methylation status of SEQ ID NO: 15
tatacgctcttctacatcgacttc

SEQ ID NO: 4155 - DNA, 45 bp, Artificial Sequence
  bisulfite treated nucleic acid for analysis of methylation status of SEQ ID NO: 15
attttatgtggatcgtaaaatagatgttttatagaaggtaggcga

SEQ ID NO: 4156 - DNA, 19 bp, Artificial Sequence
  bisulfite treated nucleic acid for analysis of methylation status of SEQ ID NO: 15
cctaaaacgctacttcccg

SEQ ID NO: 4157 - DNA, 19 bp, Artificial Sequence
  bisulfite treated nucleic acid for analysis of methylation status of SEQ ID NO: 15
aacgccgattccgatatac

SEQ ID NO: 4158 - DNA, 36 bp, Artificial Sequence
  bisulfite treated nucleic acid for analysis of methylation status of SEQ ID NO: 15
agatgttttatagaaggtaggcgaagtcgatgtaga

SEQ ID NO: 4159 - DNA, 22 bp, Artificial Sequence
  bisulfite treated nucleic acid for analysis of methylation status of SEQ ID NO: 15
tgttttcgttggagtcgtagtt

SEQ ID NO: 4160 - DNA, 22 bp, Artificial Sequence
  bisulfite treated nucleic acid for analysis of methylation status of SEQ ID NO: 15
ttgttttcgttggagtcgtagt

SEQ ID NO: 4161 - DNA, 20 bp, Artificial Sequence
  bisulfite treated nucleic acid for analysis of methylation status of SEQ ID NO: 15
agttagcggcgtttttattt

SEQ ID NO: 4162 - DNA, 18 bp, Artificial Sequence
  bisulfite treated nucleic acid for analysis of methylation status of SEQ ID NO: 15
aaacgccgctaactctcc

SEQ ID NO: 4163 - DNA, 18 bp, Artificial Sequence
  bisulfite treated nucleic acid for analysis of methylation status of SEQ ID NO: 15
aaacggggagagttagcg

SEQ ID NO: 4164 - DNA, 45 bp, Artificial Sequence
  bisulfite treated nucleic acid for analysis of methylation status of SEQ ID NO: 15
gatcgtaaaatagatgttttatagaaggtaggcgaagtcgatgta

SEQ ID NO: 4165 - DNA, 20 bp, Artificial Sequence
  bisulfite treated nucleic acid for analysis of methylation status of SEQ ID NO: 15
cgcatctctaactcgaaaaa

SEQ ID NO: 4166 - DNA, 25 bp, Artificial Sequence
  bisulfite treated nucleic acid for analysis of methylation status of SEQ ID NO: 15
gatatacgctcttctacatcgactt

SEQ ID NO: 4167 - DNA, 25 bp, Artificial Sequence
  bisulfite treated nucleic acid for analysis of methylation status of SEQ ID NO: 15
atatacgctcttctacatcgacttc

SEQ ID NO: 4168 - DNA, 20 bp, Artificial Sequence
  bisulfite treated nucleic acid for analysis of methylation status of SEQ ID NO: 15
atgtcgggcgtatagtttgg

SEQ ID NO: 4169 - DNA, 19 bp, Artificial Sequence
  bisulfite treated nucleic acid for analysis of methylation status of SEQ ID NO: 15
gcgttttgagataggcgtt

SEQ ID NO: 4170 - DNA, 19 bp, Artificial Sequence
  bisulfite treated nucleic acid for analysis of methylation status of SEQ ID NO: 15
catcgacttcgcctacctt

SEQ ID NO: 4171 - DNA, 20 bp, Artificial Sequence
  bisulfite treated nucleic acid for analysis of methylation status of SEQ ID NO: 15
cgttaagatttggaattgcg

SEQ ID NO: 4172 - DNA, 20 bp, Artificial Sequence
  bisulfite treated nucleic acid for analysis of methylation status of SEQ ID NO: 15
cgacttcgcctaccttctat

SEQ ID NO: 4173 - DNA, 22 bp, Artificial Sequence
  bisulfite treated nucleic acid for analysis of methylation status of SEQ ID NO: 15
attcaccgaatcgaacttaaaa

SEQ ID NO: 4174 - DNA, 22 bp, Artificial Sequence
  bisulfite treated nucleic acid for analysis of methylation status of SEQ ID NO: 15
cggttgcgtaggtagaagaagt

SEQ ID NO: 4175 - DNA, 29 bp, Artificial Sequence
  bisulfite treated nucleic acid for analysis of methylation status of SEQ ID NO: 15
gttcgagagggtttttagtcgttggtggg

SEQ ID NO: 4176 - DNA, 23 bp, Artificial Sequence
  bisulfite treated nucleic acid for analysis of methylation status of SEQ ID NO: 15
aaaaacaaacgaaaccgatataa

SEQ ID NO: 4177 - DNA, 22 bp, Artificial Sequence
  bisulfite treated nucleic acid for analysis of methylation status of SEQ ID NO: 15
gattttaagttcgattcggtga

SEQ ID NO: 4178 - DNA, 29 bp, Artificial Sequence
  bisulfite treated nucleic acid for analysis of methylation status of SEQ ID NO: 15
agatttagcgtcggtttcggtatgcgttt

SEQ ID NO: 4179 - DNA, 21 bp, Artificial Sequence
  bisulfite treated nucleic acid for analysis of methylation status of SEQ ID NO: 15
gtcggttgcgtaggtagaaga

SEQ ID NO: 4180 - DNA, 22 bp, Artificial Sequence
  bisulfite treated nucleic acid for analysis of methylation status of SEQ ID NO: 15
aaaacaaacgaaaccgatataa

SEQ ID NO: 4181 - DNA, 21 bp, Artificial Sequence
  bisulfite treated nucleic acid for analysis of methylation status of SEQ ID NO: 15
gaacgacgatacaaacgctac

SEQ ID NO: 4182 - DNA, 22 bp, Artificial Sequence
  bisulfite treated nucleic acid for analysis of methylation status of SEQ ID NO: 15
gtcgtatttttagttcggggag

SEQ ID NO: 4183 - DNA, 23 bp, Artificial Sequence
  bisulfite treated nucleic acid for analysis of methylation status of SEQ ID NO: 15
ggcgtcgcgggagttcggttttg

SEQ ID NO: 4184 - DNA, 20 bp, Artificial Sequence
  nucleic acid for analysis of methylation status of SEQ ID NO: 15
tcggttgcgtaggtagaaga

SEQ ID NO: 4185 - DNA, 22 bp, Artificial Sequence
  bisulfite treated nucleic acid for analysis of methylation status of SEQ ID NO: 15
cgctattactatccccgctaaa

SEQ ID NO: 4186 - DNA, 21 bp, Artificial Sequence
  bisulfite treated nucleic acid for analysis of methylation status of SEQ ID NO: 15
gtaggtttcgggattcgataa

SEQ ID NO: 4187 - DNA, 37 bp, Artificial Sequence
  bisulfite treated nucleic acid for analysis of methylation status of SEQ ID NO: 15
agttgttgtattattatagtatcgaggtgagttgcga

SEQ ID NO: 4188 - DNA, 21 bp, Artificial Sequence
  bisulfite treated nucleic acid for analysis of methylation status of SEQ ID NO: 15
tcgtatttttagttcggggag

SEQ ID NO: 4189 - DNA, 22 bp, Artificial Sequence
  bisulfite treated nucleic acid for analysis of methylation status of SEQ ID NO: 15
caaattcaccgaatcgaactta

SEQ ID NO: 4190 - DNA, 21 bp, Artificial Sequence
  bisulfite treated nucleic acid for analysis of methylation status of SEQ ID NO: 15
cggttgcgtaggtagaagaag

SEQ ID NO: 4191 - DNA, 20 bp, Artificial Sequence
  bisulfite treated nucleic acid for analysis of methylation status of SEQ ID NO: 15
acgctattactatccccgct

SEQ ID NO: 4192 - DNA, 21 bp, Artificial Sequence
  bisulfite treated nucleic acid for analysis of methylation status of SEQ ID NO: 15
atacaaacgctaccgcaaaac

SEQ ID NO: 4193 - DNA, 21 bp, Artificial Sequence
  bisulfite treated nucleic acid for analysis of methylation status of SEQ ID NO: 15
ggttttcggcgtgggcgcggg

SEQ ID NO: 4194 - DNA, 21 bp, Artificial Sequence
  bisulfite treated nucleic acid for analysis of methylation status of SEQ ID NO: 15
aacgacgatacaaacgctacc

SEQ ID NO: 4195 - DNA, 21 bp, Artificial Sequence
  bisulfite treated nucleic acid for analysis of methylation status of SEQ ID NO: 15
gtcgtatttttagttcgggga

SEQ ID NO: 4196 - DNA, 19 bp, Artificial Sequence
  bisulfite treated nucleic acid for analysis of methylation status of SEQ ID NO: 15
aggtcggttgcgtaggtag

SEQ ID NO: 4197 - DNA, 20 bp, Artificial Sequence
  bisulfite treated nucleic acid for analysis of methylation status of SEQ ID NO: 15
acgacgatacaaacgctacc

SEQ ID NO: 4198 - DNA, 21 bp, Artificial Sequence
  bisulfite treated nucleic acid for analysis of methylation status of SEQ ID NO: 15
ttcaccgaatcgaacttaaaa

SEQ ID NO: 4199 - DNA, 20 bp, Artificial Sequence
  bisulfite treated nucleic acid for analysis of methylation status of SEQ ID NO: 15
aacgcgcacgctattactat

SEQ ID NO: 4200 - DNA, 29 bp, Artificial Sequence
  bisulfite treated nucleic acid for analysis of methylation status of SEQ ID NO: 15
gtatcgaggtgagttgcgattttagcggg

SEQ ID NO: 4201 - DNA, 22 bp, Artificial Sequence
  bisulfite treated nucleic acid for analysis of methylation status of SEQ ID NO: 15
atattatcgaatcccgaaacct

SEQ ID NO: 4202 - DNA, 19 bp, Artificial Sequence
  bisulfite treated nucleic acid for analysis of methylation status of SEQ ID NO: 15
cgggtttttaggcgtgtat

SEQ ID NO: 4203 - DNA, 32 bp, Artificial Sequence
  bisulfite treated nucleic acid for analysis of methylation status of SEQ ID NO: 15
aggtgggagcgtcgttaatttttttcgttttg

SEQ ID NO: 4204 - DNA, 22 bp, Artificial Sequence
  bisulfite treated nucleic acid for analysis of methylation status of SEQ ID NO: 15
cgggattcgataatatggtttt

SEQ ID NO: 4205 - DNA, 21 bp, Artificial Sequence
  bisulfite treated nucleic acid for analysis of methylation status of SEQ ID NO: 15
tcgggattcgataatatggtt

SEQ ID NO: 4206 - DNA, 22 bp, Artificial Sequence
  bisulfite treated nucleic acid for analysis of methylation status of SEQ ID NO: 15
tattatcgaatcccgaaaccta

SEQ ID NO: 4207 - DNA, 22 bp, Artificial Sequence
  bisulfite treated nucleic acid for analysis of methylation status of SEQ ID NO: 15
attatcgaatcccgaaacctac

SEQ ID NO: 4208 - DNA, 22 bp, Artificial Sequence
  bisulfite treated nucleic acid for analysis of methylation status of SEQ ID NO: 15
taattcccgactcaacgatact

SEQ ID NO: 4209 - DNA, 19 bp, Artificial Sequence
  bisulfite treated nucleic acid for analysis of methylation status of SEQ ID NO: 15
attttcgggcgttttaggt

SEQ ID NO: 4210 - DNA, 26 bp, Artificial Sequence
  bisulfite treated nucleic acid for analysis of methylation status of SEQ ID NO: 15
ttcgagcggttttcgtgcgtttcgaa

SEQ ID NO: 4211 - DNA, 19 bp, Artificial Sequence
  bisulfite treated nucleic acid for analysis of methylation status of SEQ ID NO: 15
gcgtgttggagtcgttttt

SEQ ID NO: 4212 - DNA, 37 bp, Artificial Sequence
  bisulfite treated nucleic acid for analysis of methylation status of SEQ ID NO: 15
ttcgggtttttaggcgtgtatgtttaggtgggagcgt

SEQ ID NO: 4213 - DNA, 20 bp, Artificial Sequence
  bisulfite treated nucleic acid for analysis of methylation status of SEQ ID NO: 15
attaacgacgctcccaccta

SEQ ID NO: 4214 - DNA, 22 bp, Artificial Sequence
  bisulfite treated nucleic acid for analysis of methylation status of SEQ ID NO: 15
agtatcgttgagtcgggaatta

SEQ ID NO: 4215 - DNA, 28 bp, Artificial Sequence
  bisulfite treated nucleic acid for analysis of methylation status of SEQ ID NO: 15
aggtcgcgtgttggagtcgttttttagg

SEQ ID NO: 4216 - DNA, 22 bp, Artificial Sequence
  bisulfite treated nucleic acid for analysis of methylation status of SEQ ID NO: 15
ttcgggattcgataatatggtt

SEQ ID NO: 4217 - DNA, 19 bp, Artificial Sequence
  bisulfite treated nucleic acid for analysis of methylation status of SEQ ID NO: 15
ggtcggttgcgtaggtaga

SEQ ID NO: 4218 - DNA, 19 bp, Artificial Sequence
  bisulfite treated nucleic acid for analysis of methylation status of SEQ ID NO: 15
gaggtcggttgcgtaggta

SEQ ID NO: 4219 - DNA, 23 bp, Artificial Sequence
  bisulfite treated nucleic acid for analysis of methylation status of SEQ ID NO: 15
aattcaccgaatcgaacttaaaa

SEQ ID NO: 4220 - DNA, 22 bp, Artificial Sequence
  bisulfite treated nucleic acid for analysis of methylation status of SEQ ID NO: 15
gacgacgaacgctaaaaataaa

SEQ ID NO: 4221 - DNA, 20 bp, Artificial Sequence
  bisulfite treated nucleic acid for analysis of methylation status of SEQ ID NO: 15
gttcggtttcgggatagttg

SEQ ID NO: 4222 - DNA, 22 bp, Artificial Sequence
  bisulfite treated nucleic acid for analysis of methylation status of SEQ ID NO: 15
gtcgcgtcgacgggtttcgcgt

SEQ ID NO: 4223 - DNA, 20 bp, Artificial Sequence
  bisulfite treated nucleic acid for analysis of methylation status of SEQ ID NO: 15
tacaaacgctaccgcaaaac

SEQ ID NO: 4224 - DNA, 20 bp, Artificial Sequence
  bisulfite treated nucleic acid for analysis of methylation status of SEQ ID NO: 15
gatacaaacgctaccgcaaa

SEQ ID NO: 4225 - DNA, 22 bp, Artificial Sequence
  bisulfite treated nucleic acid for analysis of methylation status of SEQ ID NO: 15
cgaccataacgatcaatctaaa

SEQ ID NO: 4226 - DNA, 20 bp, Artificial Sequence
  bisulfite treated nucleic acid for analysis of methylation status of SEQ ID NO: 15
tggagcgttgtttttcgtag

SEQ ID NO: 4227 - DNA, 34 bp, Artificial Sequence
  bisulfite treated nucleic acid for analysis of methylation status of SEQ ID NO: 15
agcgtcggtttcggtatgcgtttttttatatcgg

SEQ ID NO: 4228 - DNA, 20 bp, Artificial Sequence
  bisulfite treated nucleic acid for analysis of methylation status of SEQ ID NO: 15
gcgacccgtctaataaaacc

SEQ ID NO: 4229 - DNA, 21 bp, Artificial Sequence
  bisulfite treated nucleic acid for analysis of methylation status of SEQ ID NO: 15
gtagcgtttgtatcgtcgttc

SEQ ID NO: 4230 - DNA, 33 bp, Artificial Sequence
  bisulfite treated nucleic acid for analysis of methylation status of SEQ ID NO: 15
ggcgaggggttcgcgttcgtggttttacgcgtt

SEQ ID NO: 4231 - DNA, 23 bp, Artificial Sequence
  bisulfite treated nucleic acid for analysis of methylation status of SEQ ID NO: 15
acgaccataacgatcaatctaaa

SEQ ID NO: 4232 - DNA, 23 bp, Artificial Sequence
  bisulfite treated nucleic acid for analysis of methylation status of SEQ ID NO: 15
aacgaccataacgatcaatctaa

SEQ ID NO: 4233 - DNA, 22 bp, Artificial Sequence
  bisulfite treated nucleic acid for analysis of methylation status of SEQ ID NO: 15
ctataattcccgactcaacgat

SEQ ID NO: 4234 - DNA, 19 bp, Artificial Sequence
  bisulfite treated nucleic acid for analysis of methylation status of SEQ ID NO: 15
ggcgttttaggttcgtttc

SEQ ID NO: 4235 - DNA, 22 bp, Artificial Sequence
  bisulfite treated nucleic acid for analysis of methylation status of SEQ ID NO: 15
tgcgtttcgaaggtgggggcgg

SEQ ID NO: 4236 - DNA, 21 bp, Artificial Sequence
  bisulfite treated nucleic acid for analysis of methylation status of SEQ ID NO: 15
cgtatttttagttcggggagg

SEQ ID NO: 4237 - DNA, 22 bp, Artificial Sequence
  bisulfite treated nucleic acid for analysis of methylation status of SEQ ID NO: 15
ataattcccgactcaacgatac

SEQ ID NO: 4238 - DNA, 21 bp, Artificial Sequence
  bisulfite treated nucleic acid for analysis of methylation status of SEQ ID NO: 15
ttatcgaatcccgaaacctac

SEQ ID NO: 4239 - DNA, 18 bp, Artificial Sequence
  bisulfite treated nucleic acid for analysis of methylation status of SEQ ID NO: 15
tttcgggcgttttaggtt

SEQ ID NO: 4240 - DNA, 33 bp, Artificial Sequence
  bisulfite treated nucleic acid for analysis of methylation status of SEQ ID NO: 15
agcggttttcgtgcgtttcgaaggtgggggcgg

SEQ ID NO: 4241 - DNA, 18 bp, Artificial Sequence
  bisulfite treated nucleic acid for analysis of methylation status of SEQ ID NO: 15
ttttcgggcgttttaggt

SEQ ID NO: 4242 - DNA, 18 bp, Artificial Sequence
  bisulfite treated nucleic acid for analysis of methylation status of SEQ ID NO: 15
acgcctaaaaacccgaaa

SEQ ID NO: 4243 - DNA, 18 bp, Artificial Sequence
  bisulfite treated nucleic acid for analysis of methylation status of SEQ ID NO: 15
taacgacgctcccaccta

SEQ ID NO: 4244 - DNA, 20 bp, Artificial Sequence
  bisulfite treated nucleic acid for analysis of methylation status of SEQ ID NO: 15
taggtttcgggattcgataa

SEQ ID NO: 4245 - DNA, 20 bp, Artificial Sequence
  bisulfite treated nucleic acid for analysis of methylation status of SEQ ID NO: 15
ttggagcgttgtttttcgta

SEQ ID NO: 4246 - DNA, 21 bp, Artificial Sequence
  bisulfite treated nucleic acid for analysis of methylation status of SEQ ID NO: 15
aaaccatattatcgaatcccg

SEQ ID NO: 4247 - DNA, 19 bp, Artificial Sequence
  bisulfite treated nucleic acid for analysis of methylation status of SEQ ID NO: 15
ttaacgacgctcccaccta

SEQ ID NO: 4248 - DNA, 21 bp, Artificial Sequence
  bisulfite treated nucleic acid for analysis of methylation status of SEQ ID NO: 15
attttaagttcgattcggtga

SEQ ID NO: 4249 - DNA, 18 bp, Artificial Sequence
  bisulfite treated nucleic acid for analysis of methylation status of SEQ ID NO: 15
aaggcgagcgagtaaagc

SEQ ID NO: 4250 - DNA, 24 bp, Artificial Sequence
  bisulfite treated nucleic acid for analysis of methylation status of SEQ ID NO: 15
tacgcggcggggattttcgggcgt

SEQ ID NO: 4251 - DNA, 23 bp, Artificial Sequence
  bisulfite treated nucleic acid for analysis of methylation status of SEQ ID NO: 15
cgcaactcacctcgatactataa

SEQ ID NO: 4252 - DNA, 20 bp, Artificial Sequence
  bisulfite treated nucleic acid for analysis of methylation status of SEQ ID NO: 15
gtgggagcgtcgttaatttt

SEQ ID NO: 4253 - DNA, 30 bp, Artificial Sequence
  bisulfite treated nucleic acid for analysis of methylation status of SEQ ID NO: 15
ttcggtcggggtaggtttcgggattcgata

SEQ ID NO: 4254 - DNA, 21 bp, Artificial Sequence
  bisulfite treated nucleic acid for analysis of methylation status of SEQ ID NO: 15
aaattcaccgaatcgaactta

SEQ ID NO: 4255 - DNA, 21 bp, Artificial Sequence
  bisulfite treated nucleic acid for analysis of methylation status of SEQ ID NO: 15
accatattatcgaatcccgaa

SEQ ID NO: 4256 - DNA, 21 bp, Artificial Sequence
  bisulfite treated nucleic acid for analysis of methylation status of SEQ ID NO: 15
aaccatattatcgaatcccga

SEQ ID NO: 4257 - DNA, 20 bp, Artificial Sequence
  bisulfite treated nucleic acid for analysis of methylation status of SEQ ID NO: 15
tcgggtttttaggcgtgtat

SEQ ID NO: 4258 - DNA, 21 bp, Artificial Sequence
  bisulfite treated nucleic acid for analysis of methylation status of SEQ ID NO: 15
attcccgactcaacgatactc

SEQ ID NO: 4259 - DNA, 19 bp, Artificial Sequence
  bisulfite treated nucleic acid for analysis of methylation status of SEQ ID NO: 15
tgggagcgtcgttaatttt

SEQ ID NO: 4260 - DNA, 19 bp, Artificial Sequence
  bisulfite treated nucleic acid for analysis of methylation status of SEQ ID NO: 15
gattttcgggcgttttagg

SEQ ID NO: 4261 - DNA, 19 bp, Artificial Sequence
  bisulfite treated nucleic acid for analysis of methylation status of SEQ ID NO: 15
ggattttcgggcgttttag

SEQ ID NO: 4262 - DNA, 22 bp, Artificial Sequence
  bisulfite treated nucleic acid for analysis of methylation status of SEQ ID NO: 4
agtttcgcggtttatagaggtt

SEQ ID NO: 4263 - DNA, 22 bp, Artificial Sequence
  bisulfite treated nucleic acid for analysis of methylation status of SEQ ID NO: 4
gaacgaccaaaactaactcgaa

SEQ ID NO: 4264 - DNA, 28 bp, Artificial Sequence
  bisulfite treated nucleic acid for analysis of methylation status of SEQ ID NO: 4
gtcgcgttgcgcggtttgatttagtcga

SEQ ID NO: 4265 - DNA, 22 bp, Artificial Sequence
  bisulfite treated nucleic acid for analysis of methylation status of SEQ ID NO: 4
aacgataatacgaacgaccaaa

SEQ ID NO: 4266 - DNA, 22 bp, Artificial Sequence
  bisulfite treated nucleic acid for analysis of methylation status of SEQ ID NO: 4
gtttcgcggtttatagaggttt

SEQ ID NO: 4267 - DNA, 22 bp, Artificial Sequence
  bisulfite treated nucleic acid for analysis of methylation status of SEQ ID NO: 4
gtagtttcgcggtttatagagg

SEQ ID NO: 4268 - DNA, 22 bp, Artificial Sequence
  bisulfite treated nucleic acid for analysis of methylation status of SEQ ID NO: 4
tagtttcgcggtttatagaggt

SEQ ID NO: 4269 - DNA, 22 bp, Artificial Sequence
  bisulfite treated nucleic acid for analysis of methylation status of SEQ ID NO: 4
acgataatacgaacgaccaaaa

SEQ ID NO: 4270 - DNA, 22 bp, Artificial Sequence
  bisulfite treated nucleic acid for analysis of methylation status of SEQ ID NO: 4
cgataatacgaacgaccaaaac

SEQ ID NO: 4271 - DNA, 22 bp, Artificial Sequence
  bisulfite treated nucleic acid for analysis of methylation status of SEQ ID NO: 4
ggtagtttcgcggtttatagag

SEQ ID NO: 4272 - DNA, 22 bp, Artificial Sequence
  bisulfite treated nucleic acid for analysis of methylation status of SEQ ID NO: 4
gtttaggtagtttcgcggttta

SEQ ID NO: 4273 - DNA, 22 bp, Artificial Sequence
  bisulfite treated nucleic acid for analysis of methylation status of SEQ ID NO: 4
gaacgataatacgaacgaccaa

SEQ ID NO: 4274 - DNA, 22 bp, Artificial Sequence
  bisulfite treated nucleic acid for analysis of methylation status of SEQ ID NO: 4
acgaccaaaactaactcgaaat

SEQ ID NO: 4275 - DNA, 21 bp, Artificial Sequence
  bisulfite treated nucleic acid for analysis of methylation status of SEQ ID NO: 4
tttcgcggtttatagaggttt

SEQ ID NO: 4276 - DNA, 21 bp, Artificial Sequence
  nucleic acid for analysis of methylation status of SEQ ID NO: 4
tagtagggtttcgattttcgg

SEQ ID NO: 4277 - DNA, 22 bp, Artificial Sequence
  bisulfite treated nucleic acid for analysis of methylation status of SEQ ID NO: 4
tacacctatctataaacgcgcc

SEQ ID NO: 4278 - DNA, 26 bp, Artificial Sequence
  bisulfite treated nucleic acid for analysis of methylation status of SEQ ID NO: 4
tggtggttggtggaacgtgcgattgt

SEQ ID NO: 4279 - DNA, 23 bp, Artificial Sequence
  bisulfite treated nucleic acid for analysis of methylation status of SEQ ID NO: 4
aggtagtttcgcggtttatagag

SEQ ID NO: 4280 - DNA, 23 bp, Artificial Sequence
  bisulfite treated nucleic acid for analysis of methylation status of SEQ ID NO: 4
aacgaccaaaactaactcgaaat

SEQ ID NO: 4281 - DNA, 22 bp, Artificial Sequence
  bisulfite treated nucleic acid for analysis of methylation status of SEQ ID NO: 4
ttagtagggtttcgattttcgg

SEQ ID NO: 4282 - DNA, 21 bp, Artificial Sequence
  bisulfite treated nucleic acid for analysis of methylation status of SEQ ID NO: 4
ttcgcggtttatagaggtttc

SEQ ID NO: 4283 - DNA, 21 bp, Artificial Sequence
  bisulfite treated nucleic acid for analysis of methylation status of SEQ ID NO: 4
cgataatacgaacgaccaaaa

SEQ ID NO: 4284 - DNA, 22 bp, Artificial Sequence
  bisulfite treated nucleic acid for analysis of methylation status of SEQ ID NO: 4
cggtttatagaggtttcggttc

SEQ ID NO: 4285 - DNA, 21 bp, Artificial Sequence
  bisulfite treated nucleic acid for analysis of methylation status of SEQ ID NO: 4
gtttcgcggtttatagaggtt

SEQ ID NO: 4286 - DNA, 21 bp, Artificial Sequence
  bisulfite treated nucleic acid for analysis of methylation status of SEQ ID NO: 4
aacgataatacgaacgaccaa

SEQ ID NO: 4287 - DNA, 22 bp, Artificial Sequence
  bisulfite treated nucleic acid for analysis of methylation status of SEQ ID NO: 4
tttaggtagtttcgcggtttat

SEQ ID NO: 4288 - DNA, 21 bp, Artificial Sequence
  bisulfite treated nucleic acid for analysis of methylation status of SEQ ID NO: 4
gaacgataatacgaacgacca

SEQ ID NO: 4289 - DNA, 22 bp, Artificial Sequence
  bisulfite treated nucleic acid for analysis of methylation status of SEQ ID NO: 4
gtttatagaggtttcggttcgc

SEQ ID NO: 4290 - DNA, 22 bp, Artificial Sequence
  bisulfite treated nucleic acid for analysis of methylation status of SEQ ID NO: 4
tttcgcggtttatagaggtttc

SEQ ID NO: 4291 - DNA, 21 bp, Artificial Sequence
  bisulfite treated nucleic acid for analysis of methylation status of SEQ ID NO: 4
acgataatacgaacgaccaaa

SEQ ID NO: 4292 - DNA, 22 bp, Artificial Sequence
  bisulfite treated nucleic acid for analysis of methylation status of SEQ ID NO: 4
ttagttttgtatcgttcgggtt

SEQ ID NO: 4293 - DNA, 21 bp, Artificial Sequence
  bisulfite treated nucleic acid for analysis of methylation status of SEQ ID NO: 4
tccctcgataaatcaaaaacg

SEQ ID NO: 4294 - DNA, 47 bp, Artificial Sequence
  bisulfite treated nucleic acid for analysis of methylation status of SEQ ID NO: 4
tttggcgcgtttatagataggtgtatgaagatttttacgattcgaaa

SEQ ID NO: 4295 - DNA, 21 bp, Artificial Sequence
  bisulfite treated nucleic acid for analysis of methylation status of SEQ ID NO: 4
tttatagaggtttcggttcgc

SEQ ID NO: 4296 - DNA, 22 bp, Artificial Sequence
  bisulfite treated nucleic acid for analysis of methylation status of SEQ ID NO: 4
tacgaacgaccaaaactaactc

SEQ ID NO: 4297 - DNA, 20 bp, Artificial Sequence
  bisulfite treated nucleic acid for analysis of methylation status of SEQ ID NO: 4
agtagggtttcgattttcgg

SEQ ID NO: 4298 - DNA, 21 bp, Artificial Sequence
  bisulfite treated nucleic acid for analysis of methylation status of SEQ ID NO: 4
acacctatctataaacgcgcc

SEQ ID NO: 4299 - DNA, 24 bp, Artificial Sequence
  bisulfite treated nucleic acid for analysis of methylation status of SEQ ID NO: 4
taggtagtttcgcggtttatagag

SEQ ID NO: 4300 - DNA, 24 bp, Artificial Sequence
  bisulfite treated nucleic acid for analysis of methylation status of SEQ ID NO: 4
aatacgaacgaccaaaactaactc

SEQ ID NO: 4301 - DNA, 21 bp, Artificial Sequence
  bisulfite treated nucleic acid for analysis of methylation status of SEQ ID NO: 4
gcggtttatagaggtttcggt

SEQ ID NO: 4302 - DNA, 22 bp, Artificial Sequence
  bisulfite treated nucleic acid for analysis of methylation status of SEQ ID NO: 4
aactaactcgaaatcccgaact

SEQ ID NO: 4303 - DNA, 23 bp, Artificial Sequence
  bisulfite treated nucleic acid for analysis of methylation status of SEQ ID NO: 4
atacacctatctataaacgcgcc

SEQ ID NO: 4304 - DNA, 21 bp, Artificial Sequence
  bisulfite treated nucleic acid for analysis of methylation status of SEQ ID NO: 4
acctatctataaacgcgccaa

SEQ ID NO: 4305 - DNA, 23 bp, Artificial Sequence
  bisulfite treated nucleic acid for analysis of methylation status of SEQ ID NO: 4
atacgaacgaccaaaactaactc

SEQ ID NO: 4306 - DNA, 21 bp, Artificial Sequence
  bisulfite treated nucleic acid for analysis of methylation status of SEQ ID NO: 4
agtttcgcggtttatagaggt

SEQ ID NO: 4307 - DNA, 23 bp, Artificial Sequence
  bisulfite treated nucleic acid for analysis of methylation status of SEQ ID NO: 4
aatacgaacgaccaaaactaact

SEQ ID NO: 4308 - DNA, 21 bp, Artificial Sequence
  bisulfite treated nucleic acid for analysis of methylation status of SEQ ID NO: 4
cgaacgaccaaaactaactcg

SEQ ID NO: 4309 - DNA, 20 bp, Artificial Sequence
  bisulfite treated nucleic acid for analysis of methylation status of SEQ ID NO: 4
cctatctataaacgcgccaa

SEQ ID NO: 4310 - DNA, 22 bp, Artificial Sequence
  bisulfite treated nucleic acid for analysis of methylation status of SEQ ID NO: 4
gatttcgagttagttttggtcg

SEQ ID NO: 4311 - DNA, 20 bp, Artificial Sequence
  bisulfite treated nucleic acid for analysis of methylation status of SEQ ID NO: 4
taacttctattacccgcgcc

SEQ ID NO: 4312 - DNA, 23 bp, Artificial Sequence
  bisulfite treated nucleic acid for analysis of methylation status of SEQ ID NO: 4
atcgttcgcgcgggcgtatcgag

SEQ ID NO: 4313 - DNA, 20 bp, Artificial Sequence
  bisulfite treated nucleic acid for analysis of methylation status of SEQ ID NO: 4
cgaaatcccgaactacaaaa

SEQ ID NO: 4314 - DNA, 20 bp, Artificial Sequence
  bisulfite treated nucleic acid for analysis of methylation status of SEQ ID NO: 4
gggggagtcgcgttgcgcgg

SEQ ID NO: 4315 - DNA, 21 bp, Artificial Sequence
  bisulfite treated nucleic acid for analysis of methylation status of SEQ ID NO: 4
cgaccaaaactaactcgaaat

SEQ ID NO: 4316 - DNA, 23 bp, Artificial Sequence
  bisulfite treated nucleic acid for analysis of methylation status of SEQ ID NO: 4
ttaggtagtttcgcggtttatag

SEQ ID NO: 4317 - DNA, 20 bp, Artificial Sequence
  bisulfite treated nucleic acid for analysis of methylation status of SEQ ID NO: 4
aggtttaggtagtttcgcgg

SEQ ID NO: 4318 - DNA, 21 bp, Artificial Sequence
  bisulfite treated nucleic acid for analysis of methylation status of SEQ ID NO: 4
cgttaagaggcgaggaaataa

SEQ ID NO: 4319 - DNA, 21 bp, Artificial Sequence
  bisulfite treated nucleic acid for analysis of methylation status of SEQ ID NO: 4
cctaactcgacgcaactaacc

SEQ ID NO: 4320 - DNA, 25 bp, Artificial Sequence
  bisulfite treated nucleic acid for analysis of methylation status of SEQ ID NO: 4
aacggcgggcgggacgaacgattag

SEQ ID NO: 4321 - DNA, 20 bp, Artificial Sequence
  bisulfite treated nucleic acid for analysis of methylation status of SEQ ID NO: 4
gcggtttatagaggtttcgg

SEQ ID NO: 4322 - DNA, 22 bp, Artificial Sequence
  bisulfite treated nucleic acid for analysis of methylation status of SEQ ID NO: 4
taactcgaaatcccgaactaca

SEQ ID NO: 4323 - DNA, 20 bp, Artificial Sequence
  bisulfite treated nucleic acid for analysis of methylation status of SEQ ID NO: 4
tcgcggtttatagaggtttc

SEQ ID NO: 4324 - DNA, 20 bp, Artificial Sequence
  bisulfite treated nucleic acid for analysis of methylation status of SEQ ID NO: 4
ccctaactcgacgcaactaa

SEQ ID NO: 4325 - DNA, 20 bp, Artificial Sequence
  bisulfite treated nucleic acid for analysis of methylation status of SEQ ID NO: 4
ggtttaggtagtttcgcggt

SEQ ID NO: 4326 - DNA, 21 bp, Artificial Sequence
  bisulfite treated nucleic acid for analysis of methylation status of SEQ ID NO: 4
tcgaaatcccgaactacaaaa

SEQ ID NO: 4327 - DNA, 22 bp, Artificial Sequence
  bisulfite treated nucleic acid for analysis of methylation status of SEQ ID NO: 4
gataatacgaacgaccaaaact

SEQ ID NO: 4328 - DNA, 22 bp, Artificial Sequence
  bisulfite treated nucleic acid for analysis of methylation status of SEQ ID NO: 4
tagtcgaggttttgtagttcgg

SEQ ID NO: 4329 - DNA, 33 bp, Artificial Sequence
  bisulfite treated nucleic acid for analysis of methylation status of SEQ ID NO: 4
tagttttggtcgttcgtattatcgttcgcgcgg

SEQ ID NO: 4330 - DNA, 21 bp, Artificial Sequence
  bisulfite treated nucleic acid for analysis of methylation status of SEQ ID NO: 4
acgaacgaccaaaactaactc

SEQ ID NO: 4331 - DNA, 24 bp, Artificial Sequence
  bisulfite treated nucleic acid for analysis of methylation status of SEQ ID NO: 4
gataatacgaacgaccaaaactaa

SEQ ID NO: 4332 - DNA, 25 bp, Artificial Sequence
  bisulfite treated nucleic acid for analysis of methylation status of SEQ ID NO: 4
taatacgaacgaccaaaactaactc

SEQ ID NO: 4333 - DNA, 20 bp, Artificial Sequence
  bisulfite treated nucleic acid for analysis of methylation status of SEQ ID NO: 4
cacctatctataaacgcgcc

SEQ ID NO: 4334 - DNA, 20 bp, Artificial Sequence
  bisulfite treated nucleic acid for analysis of methylation status of SEQ ID NO: 4
ttcgcggtttatagaggttt

SEQ ID NO: 4335 - DNA, 21 bp, Artificial Sequence
  bisulfite treated nucleic acid for analysis of methylation status of SEQ ID NO: 4
cggtttatagaggtttcggtt

SEQ ID NO: 4336 - DNA, 20 bp, Artificial Sequence
  bisulfite treated nucleic acid for analysis of methylation status of SEQ ID NO: 4
ctcgaaatcccgaactacaa

SEQ ID NO: 4337 - DNA, 22 bp, Artificial Sequence
  bisulfite treated nucleic acid for analysis of methylation status of SEQ ID NO: 4
cgttaagaggcgaggaaataag

SEQ ID NO: 4338 - DNA, 21 bp, Artificial Sequence
  bisulfite treated nucleic acid for analysis of methylation status of SEQ ID NO: 4
ctaaccgaaaacgcgaaacta

SEQ ID NO: 4339 - DNA, 23 bp, Artificial Sequence
  bisulfite treated nucleic acid for analysis of methylation status of SEQ ID NO: 4
gtcgggagaggggcgcggaacgg

SEQ ID NO: 4340 - DNA, 20 bp, Artificial Sequence
  nucleic acid for analysis of methylation status of SEQ ID NO: 4
taaccgaaaacgcgaaacta

SEQ ID NO: 4341 - DNA, 22 bp, Artificial Sequence
  bisulfite treated nucleic acid for analysis of methylation status of SEQ ID NO: 4
gttcgggatttcgagttagttt

SEQ ID NO: 4342 - DNA, 20 bp, Artificial Sequence
  bisulfite treated nucleic acid for analysis of methylation status of SEQ ID NO: 4
ttatagaggtttcggttcgc

SEQ ID NO: 4343 - DNA, 21 bp, Artificial Sequence
  bisulfite treated nucleic acid for analysis of methylation status of SEQ ID NO: 4
tttaggtagtttcgcggttta

SEQ ID NO: 4344 - DNA, 21 bp, Artificial Sequence
  bisulfite treated nucleic acid for analysis of methylation status of SEQ ID NO: 4
gagttagtgcgttcgattgtg

SEQ ID NO: 4345 - DNA, 20 bp, Artificial Sequence
  bisulfite treated nucleic acid for analysis of methylation status of SEQ ID NO: 4
gcctactctacttccgcgat

SEQ ID NO: 4346 - DNA, 21 bp, Artificial Sequence
  bisulfite treated nucleic acid for analysis of methylation status of SEQ ID NO: 4
gggggcggaaagaggcgcgtt

SEQ ID NO: 4347 - DNA, 24 bp, Artificial Sequence
  bisulfite treated nucleic acid for analysis of methylation status of SEQ ID NO: 4
taatacgaacgaccaaaactaact

SEQ ID NO: 4348 - DNA, 22 bp, Artificial Sequence
  bisulfite treated nucleic acid for analysis of methylation status of SEQ ID NO: 4
ataaaggtttcgttaagaggcg

SEQ ID NO: 4349 - DNA, 19 bp, Artificial Sequence
  bisulfite treated nucleic acid for analysis of methylation status of SEQ ID NO: 4
atacccctaactcgacgca

SEQ ID NO: 4350 - DNA, 23 bp, Artificial Sequence
  bisulfite treated nucleic acid for analysis of methylation status of SEQ ID NO: 4
tttagttttgtatcgttcgggtt

SEQ ID NO: 4351 - DNA, 20 bp, Artificial Sequence
  bisulfite treated nucleic acid for analysis of methylation status of SEQ ID NO: 4
cgcggtttatagaggtttcg

SEQ ID NO: 4352 - DNA, 20 bp, Artificial Sequence
  bisulfite treated nucleic acid for analysis of methylation status of SEQ ID NO: 4
gtcggaaggtgcgagttagt

SEQ ID NO: 4353 - DNA, 22 bp, Artificial Sequence
  bisulfite treated nucleic acid for analysis of methylation status of SEQ ID NO: 4
gatcgaccgaataaaaacaaat

SEQ ID NO: 4354 - DNA, 22 bp, Artificial Sequence
  bisulfite treated nucleic acid for analysis of methylation status of SEQ ID NO: 4
cgtttttagatcgtgattttcg

SEQ ID NO: 4355 - DNA, 20 bp, Artificial Sequence
  bisulfite treated nucleic acid for analysis of methylation status of SEQ ID NO: 4
actaactcgcaccttccgac

SEQ ID NO: 4356 - DNA, 22 bp, Artificial Sequence
  bisulfite treated nucleic acid for analysis of methylation status of SEQ ID NO: 4
aagttttgcgggcggggcgcgt

SEQ ID NO: 4357 - DNA, 22 bp, Artificial Sequence
  bisulfite treated nucleic acid for analysis of methylation status of SEQ ID NO: 4
atttcgagttagttttggtcgt

SEQ ID NO: 4358 - DNA, 19 bp, Artificial Sequence
  bisulfite treated nucleic acid for analysis of methylation status of SEQ ID NO: 4
tcggaaggtgcgagttagt

SEQ ID NO: 4359 - DNA, 19 bp, Artificial Sequence
  bisulfite treated nucleic acid for analysis of methylation status of SEQ ID NO: 4
gtagggtttcgattttcgg

SEQ ID NO: 4360 - DNA, 19 bp, Artificial Sequence
  bisulfite treated nucleic acid for analysis of methylation status of SEQ ID NO: 4
aacttctattacccgcgcc

SEQ ID NO: 4361 - DNA, 20 bp, Artificial Sequence
  bisulfite treated nucleic acid for analysis of methylation status of SEQ ID NO: 4
caatcgaacgcactaactcg

SEQ ID NO: 4362 - DNA, 20 bp, Artificial Sequence
  bisulfite treated nucleic acid for analysis of methylation status of SEQ ID NO: 4
accgaaaacgcgaaactaat

SEQ ID NO: 4363 - DNA, 21 bp, Artificial Sequence
  bisulfite treated nucleic acid for analysis of methylation status of SEQ ID NO: 4
agtcgggagaggggcgcggaa

SEQ ID NO: 4364 - DNA, 19 bp, Artificial Sequence
  bisulfite treated nucleic acid for analysis of methylation status of SEQ ID NO: 4
aaggtgcgagttagtgcgt

SEQ ID NO: 4365 - DNA, 19 bp, Artificial Sequence
  bisulfite treated nucleic acid for analysis of methylation status of SEQ ID NO: 4
aggtgcgagttagtgcgtt

SEQ ID NO: 4366 - DNA, 21 bp, Artificial Sequence
  bisulfite treated nucleic acid for analysis of methylation status of SEQ ID NO: 4
tagttttgtatcgttcgggtt

SEQ ID NO: 4367 - DNA, 22 bp, Artificial Sequence
  bisulfite treated nucleic acid for analysis of methylation status of SEQ ID NO: 4
ctcgataaatcaaaaacgaaaa

SEQ ID NO: 4368 - DNA, 19 bp, Artificial Sequence
  bisulfite treated nucleic acid for analysis of methylation status of SEQ ID NO: 4
acgcactaactcgcacctt

SEQ ID NO: 4369 - DNA, 19 bp, Artificial Sequence
  bisulfite treated nucleic acid for analysis of methylation status of SEQ ID NO: 4
aacgcactaactcgcacct

SEQ ID NO: 4370 - DNA, 21 bp, Artificial Sequence
  bisulfite treated nucleic acid for analysis of methylation status of SEQ ID NO: 4
tcgggatttcgagttagtttt

SEQ ID NO: 4371 - DNA, 21 bp, Artificial Sequence
  bisulfite treated nucleic acid for analysis of methylation status of SEQ ID NO: 4
ttcgggatttcgagttagttt

SEQ ID NO: 4372 - DNA, 21 bp, Artificial Sequence
  bisulfite treated nucleic acid for analysis of methylation status of SEQ ID NO: 4
tcgttaagaggcgaggaaata

SEQ ID NO: 4373 - DNA, 23 bp, Artificial Sequence
  bisulfite treated nucleic acid for analysis of methylation status of SEQ ID NO: 4
agtttcgcggtttatagaggttt

SEQ ID NO: 4374 - DNA, 19 bp, Artificial Sequence
  bisulfite treated nucleic acid for analysis of methylation status of SEQ ID NO: 4
aaccgcgatacccctaact

SEQ ID NO: 4375 - DNA, 21 bp, Artificial Sequence
  bisulfite treated nucleic acid for analysis of methylation status of SEQ ID NO: 4
aactcgaaatcccgaactaca

SEQ ID NO: 4376 - DNA, 20 bp, Artificial Sequence
  bisulfite treated nucleic acid for analysis of methylation status of SEQ ID NO: 4
cggtttatagaggtttcggt

SEQ ID NO: 4377 - DNA, 20 bp, Artificial Sequence
  bisulfite treated nucleic acid for analysis of methylation status of SEQ ID NO: 4
gaaactaatcgttcgtcccg

SEQ ID NO: 4378 - DNA, 19 bp, Artificial Sequence
  bisulfite treated nucleic acid for analysis of methylation status of SEQ ID NO: 4
cgggaaagtagcggtaagt

SEQ ID NO: 4379 - DNA, 22 bp, Artificial Sequence
  bisulfite treated nucleic acid for analysis of methylation status of SEQ ID NO: 4
ccgaactacaaaacctcgacta

SEQ ID NO: 4380 - DNA, 29 bp, Artificial Sequence
  bisulfite treated nucleic acid for analysis of methylation status of SEQ ID NO: 4
atagaggtttcggttcgcgttttttgggg

SEQ ID NO: 4381 - DNA, 20 bp, Artificial Sequence
  bisulfite treated nucleic acid for analysis of methylation status of SEQ ID NO: 4
aggcgaggaaataagagtcg

SEQ ID NO: 4382 - DNA, 21 bp, Artificial Sequence
  bisulfite treated nucleic acid for analysis of methylation status of SEQ ID NO: 4
ccctaactcgacgcaactaac

SEQ ID NO: 4383 - DNA, 23 bp, Artificial Sequence
  bisulfite treated nucleic acid for analysis of methylation status of SEQ ID NO: 4
tttagtcgaggttttgtagttcg

SEQ ID NO: 4384 - DNA, 20 bp, Artificial Sequence
  bisulfite treated nucleic acid for analysis of methylation status of SEQ ID NO: 4
aggtttcgttaagaggcgag

SEQ ID NO: 4385 - DNA, 21 bp, Artificial Sequence
  bisulfite treated nucleic acid for analysis of methylation status of SEQ ID NO: 4
actaactcgaaatcccgaact

SEQ ID NO: 4386 - DNA, 22 bp, Artificial Sequence
  bisulfite treated nucleic acid for analysis of methylation status of SEQ ID NO: 4
agttcgggatttcgagttagtt

SEQ ID NO: 4387 - DNA, 18 bp, Artificial Sequence
  bisulfite treated nucleic acid for analysis of methylation status of SEQ ID NO: 4
acttctattacccgcgcc

SEQ ID NO: 4388 - DNA, 21 bp, Artificial Sequence
  bisulfite treated nucleic acid for analysis of methylation status of SEQ ID NO: 4
agtcgaggttttgtagttcgg

SEQ ID NO: 4389 - DNA, 19 bp, Artificial Sequence
  bisulfite treated nucleic acid for analysis of methylation status of SEQ ID NO: 4
ccgaaaacgcgaaactaat

SEQ ID NO: 4390 - DNA, 25 bp, Artificial Sequence
  bisulfite treated nucleic acid for analysis of methylation status of SEQ ID NO: 4
ataatacgaacgaccaaaactaact

SEQ ID NO: 4391 - DNA, 19 bp, Artificial Sequence
  bisulfite treated nucleic acid for analysis of methylation status of SEQ ID NO: 4
gcgatacccctaactcgac

SEQ ID NO: 4392 - DNA, 20 bp, Artificial Sequence
  bisulfite treated nucleic acid for analysis of methylation status of SEQ ID NO: 4
acgataatacgaacgaccaa

SEQ ID NO: 4393 - DNA, 21 bp, Artificial Sequence
  bisulfite treated nucleic acid for analysis of methylation status of SEQ ID NO: 4
actcgaaatcccgaactacaa

SEQ ID NO: 4394 - DNA, 20 bp, Artificial Sequence
  bisulfite treated nucleic acid for analysis of methylation status of SEQ ID NO: 4
actaaccgaaaacgcgaaac

SEQ ID NO: 4395 - DNA, 20 bp, Artificial Sequence
  bisulfite treated nucleic acid for analysis of methylation status of SEQ ID NO: 4
tcgaaatcccgaactacaaa

SEQ ID NO: 4396 - DNA, 22 bp, Artificial Sequence
  bisulfite treated nucleic acid for analysis of methylation status of SEQ ID NO: 4
gggtcgtttttagatcgtgatt

SEQ ID NO: 4397 - DNA, 19 bp, Artificial Sequence
  bisulfite treated nucleic acid for analysis of methylation status of SEQ ID NO: 4
cgggtcgtttttagatcgt

SEQ ID NO: 4398 - DNA, 21 bp, Artificial Sequence
  bisulfite treated nucleic acid for analysis of methylation status of SEQ ID NO: 4
cacaatcgaacgcactaactc

SEQ ID NO: 4399 - DNA, 21 bp, Artificial Sequence
  bisulfite treated nucleic acid for analysis of methylation status of SEQ ID NO: 4
taaaggtttcgttaagaggcg

SEQ ID NO: 4400 - DNA, 19 bp, Artificial Sequence
  bisulfite treated nucleic acid for analysis of methylation status of SEQ ID NO: 4
tgttcggtttcggaggtag

SEQ ID NO: 4401 - DNA, 21 bp, Artificial Sequence
  bisulfite treated nucleic acid for analysis of methylation status of SEQ ID NO: 4
atcacgatctaaaaacgaccc

SEQ ID NO: 4402 - DNA, 30 bp, Artificial Sequence
  bisulfite treated nucleic acid for analysis of methylation status of SEQ ID NO: 4
ggcggcgttggagcggttagtggtagtcgg

SEQ ID NO: 4403 - DNA, 22 bp, Artificial Sequence
  bisulfite treated nucleic acid for analysis of methylation status of SEQ ID NO: 4
cggtttgatttagtcgaggttt

SEQ ID NO: 4404 - DNA, 40 bp, Artificial Sequence
  nucleic acid for analysis of methylation status of SEQ ID NO: 4
ttcgggatttcgagttagttttggtcgttcgtattatcgt

SEQ ID NO: 4405 - DNA, 21 bp, Artificial Sequence
  bisulfite treated nucleic acid for analysis of methylation status of SEQ ID NO: 4
aaggtttcgttaagaggcgag

SEQ ID NO: 4406 - DNA, 19 bp, Artificial Sequence
  bisulfite treated nucleic acid for analysis of methylation status of SEQ ID NO: 4
ctaactcgcaccttccgac

SEQ ID NO: 4407 - DNA, 20 bp, Artificial Sequence
  bisulfite treated nucleic acid for analysis of methylation status of SEQ ID NO: 4
tcgttaagaggcgaggaaat

SEQ ID NO: 4408 - DNA, 19 bp, Artificial Sequence
  bisulfite treated nucleic acid for analysis of methylation status of SEQ ID NO: 4
atcgaacgcactaactcgc

SEQ ID NO: 4409 - DNA, 21 bp, Artificial Sequence
  bisulfite treated nucleic acid for analysis of methylation status of SEQ ID NO: 4
gttttgtagttcgggatttcg

SEQ ID NO: 4410 - DNA, 19 bp, Artificial Sequence
  bisulfite treated nucleic acid for analysis of methylation status of SEQ ID NO: 4
aactaaccgaaaacgcgaa

SEQ ID NO: 4411 - DNA, 19 bp, Artificial Sequence
  bisulfite treated nucleic acid for analysis of methylation status of SEQ ID NO: 4
aaccgaaaacgcgaaacta

SEQ ID NO: 4412 - DNA, 22 bp, Artificial Sequence
  bisulfite treated nucleic acid for analysis of methylation status of SEQ ID NO: 4
tctcgaaaaactctcctaaacg

SEQ ID NO: 4413 - DNA, 22 bp, Artificial Sequence
  bisulfite treated nucleic acid for analysis of methylation status of SEQ ID NO: 4
cgtaaagttcggtttaatttgg

SEQ ID NO: 4414 - DNA, 26 bp, Artificial Sequence
  bisulfite treated nucleic acid for analysis of methylation status of SEQ ID NO: 4
aggcgttatcgtcggcgtatttcgga

SEQ ID NO: 4415 - DNA, 22 bp, Artificial Sequence
  bisulfite treated nucleic acid for analysis of methylation status of SEQ ID NO: 4
ctcgaaaaactctcctaaacga

SEQ ID NO: 4416 - DNA, 22 bp, Artificial Sequence
  bisulfite treated nucleic acid for analysis of methylation status of SEQ ID NO: 4
tcgaaaaactctcctaaacgac

SEQ ID NO: 4417 - DNA, 22 bp, Artificial Sequence
  bisulfite treated nucleic acid for analysis of methylation status of SEQ ID NO: 4
acaccgcgactattatacgact

SEQ ID NO: 4418 - DNA, 22 bp, Artificial Sequence
  bisulfite treated nucleic acid for analysis of methylation status of SEQ ID NO: 4
ttcggttgttattgatcgtttt

SEQ ID NO: 4419 - DNA, 33 bp, Artificial Sequence
  bisulfite treated nucleic acid for analysis of methylation status of SEQ ID NO: 4
attcgttagttgttttcggagtcgagtaggttt

SEQ ID NO: 4420 - DNA, 22 bp, Artificial Sequence
  bisulfite treated nucleic acid for analysis of methylation status of SEQ ID NO: 4
gagttagttaggttcgtaggcg

SEQ ID NO: 4421 - DNA, 31 bp, Artificial Sequence
  bisulfite treated nucleic acid for analysis of methylation status of SEQ ID NO: 4
atcgtcggcgtatttcggagaagaagttttt

SEQ ID NO: 4422 - DNA, 21 bp, Artificial Sequence
  bisulfite treated nucleic acid for analysis of methylation status of SEQ ID NO: 4
tcgtgttcggttgttattgat

SEQ ID NO: 4423 - DNA, 21 bp, Artificial Sequence
  bisulfite treated nucleic acid for analysis of methylation status of SEQ ID NO: 4
gttcgtgttcggttgttattg

SEQ ID NO: 4424 - DNA, 22 bp, Artificial Sequence
  bisulfite treated nucleic acid for analysis of methylation status of SEQ ID NO: 4
cgaaaaactctcctaaacgact

SEQ ID NO: 4425 - DNA, 23 bp, Artificial Sequence
  bisulfite treated nucleic acid for analysis of methylation status of SEQ ID NO: 4
gagttagttaggttcgtaggcgt

SEQ ID NO: 4426 - DNA, 22 bp, Artificial Sequence
  bisulfite treated nucleic acid for analysis of methylation status of SEQ ID NO: 4
caccgcgactattatacgacta

SEQ ID NO: 4427 - DNA, 22 bp, Artificial Sequence
  bisulfite treated nucleic acid for analysis of methylation status of SEQ ID NO: 4
ttcgtgttcggttgttattgat

SEQ ID NO: 4428 - DNA, 22 bp, Artificial Sequence
  bisulfite treated nucleic acid for analysis of methylation status of SEQ ID NO: 4
tgttcggttgttattgatcgtt

SEQ ID NO: 4429 - DNA, 22 bp, Artificial Sequence
  bisulfite treated nucleic acid for analysis of methylation status of SEQ ID NO: 4
cttaataaaacctcgatttccg

SEQ ID NO: 4430 - DNA, 22 bp, Artificial Sequence
  bisulfite treated nucleic acid for analysis of methylation status of SEQ ID NO: 4
tttgtttataggcgcgttagag

SEQ ID NO: 4431 - DNA, 24 bp, Artificial Sequence
  bisulfite treated nucleic acid for analysis of methylation status of SEQ ID NO: 4
ggttcgagcggtgtagggttgggt

SEQ ID NO: 4432 - DNA, 23 bp, Artificial Sequence
  bisulfite treated nucleic acid for analysis of methylation status of SEQ ID NO: 4
ttcgtaaagttcggtttaatttg

SEQ ID NO: 4433 - DNA, 22 bp, Artificial Sequence
  bisulfite treated nucleic acid for analysis of methylation status of SEQ ID NO: 4
aaacaccgcgactattatacga

SEQ ID NO: 4434 - DNA, 22 bp, Artificial Sequence
  bisulfite treated nucleic acid for analysis of methylation status of SEQ ID NO: 4
agttagttaggttcgtaggcgt

SEQ ID NO: 4435 - DNA, 23 bp, Artificial Sequence
  bisulfite treated nucleic acid for analysis of methylation status of SEQ ID NO: 4
acttaataaaacctcgatttccg

SEQ ID NO: 4436 - DNA, 21 bp, Artificial Sequence
  bisulfite treated nucleic acid for analysis of methylation status of SEQ ID NO: 4
gtgttcggttgttattgatcg

SEQ ID NO: 4437 - DNA, 22 bp, Artificial Sequence
  bisulfite treated nucleic acid for analysis of methylation status of SEQ ID NO: 4
taaaacgatcaataacaaccga

SEQ ID NO: 4438 - DNA, 22 bp, Artificial Sequence
  bisulfite treated nucleic acid for analysis of methylation status of SEQ ID NO: 4
gtatttttcggtaagagacggc

SEQ ID NO: 4439 - DNA, 37 bp, Artificial Sequence
  bisulfite treated nucleic acid for analysis of methylation status of SEQ ID NO: 4
ttcgtaaggtttttcgggagttacggtttgagggcga

SEQ ID NO: 4440 - DNA, 22 bp, Artificial Sequence
  bisulfite treated nucleic acid for analysis of methylation status of SEQ ID NO: 4
tcgtaaagttcggtttaatttg

SEQ ID NO: 4441 - DNA, 21 bp, Artificial Sequence
  bisulfite treated nucleic acid for analysis of methylation status of SEQ ID NO: 4
tcggttgttattgatcgtttt

SEQ ID NO: 4442 - DNA, 23 bp, Artificial Sequence
  bisulfite treated nucleic acid for analysis of methylation status of SEQ ID NO: 4
acaccgcgactattatacgacta

SEQ ID NO: 4443 - DNA, 22 bp, Artificial Sequence
  bisulfite treated nucleic acid for analysis of methylation status of SEQ ID NO: 4
cgaacgaccaataaaaacataa

SEQ ID NO: 4444 - DNA, 22 bp, Artificial Sequence
  bisulfite treated nucleic acid for analysis of methylation status of SEQ ID NO: 4
gcgtatttcggagaagaagttt

SEQ ID NO: 4445 - DNA, 32 bp, Artificial Sequence
  bisulfite treated nucleic acid for analysis of methylation status of SEQ ID NO: 4
aggagagtttttcgagaaagatgtcgtcgttt

SEQ ID NO: 4446 - DNA, 21 bp, Artificial Sequence
  bisulfite treated nucleic acid for analysis of methylation status of SEQ ID NO: 4
tatttttcggtaagagacggc

SEQ ID NO: 4447 - DNA, 20 bp, Artificial Sequence
  bisulfite treated nucleic acid for analysis of methylation status of SEQ ID NO: 4
aatttatccttacccgaccg

SEQ ID NO: 4448 - DNA, 22 bp, Artificial Sequence
  bisulfite treated nucleic acid for analysis of methylation status of SEQ ID NO: 4
tcgtttaggagagtttttcgag

SEQ ID NO: 4449 - DNA, 43 bp, Artificial Sequence
  bisulfite treated nucleic acid for analysis of methylation status of SEQ ID NO: 4
aaagatgtcgtcgttttaatagtaatttattttcgtttcggag

SEQ ID NO: 4450 - DNA, 23 bp, Artificial Sequence
  bisulfite treated nucleic acid for analysis of methylation status of SEQ ID NO: 4
acgaacgaccaataaaaacataa

SEQ ID NO: 4451 - DNA, 22 bp, Artificial Sequence
  bisulfite treated nucleic acid for analysis of methylation status of SEQ ID NO: 4
ttaaaacgatcaataacaaccg

SEQ ID NO: 4452 - DNA, 21 bp, Artificial Sequence
  bisulfite treated nucleic acid for analysis of methylation status of SEQ ID NO: 4
atttatccttacccgaccgac

SEQ ID NO: 4453 - DNA, 22 bp, Artificial Sequence
  bisulfite treated nucleic acid for analysis of methylation status of SEQ ID NO: 4
tatttgtttataggcgcgttag

SEQ ID NO: 4454 - DNA, 23 bp, Artificial Sequence
  bisulfite treated nucleic acid for analysis of methylation status of SEQ ID NO: 4
gttcggttgttattgatcgtttt

SEQ ID NO: 4455 - DNA, 23 bp, Artificial Sequence
  bisulfite treated nucleic acid for analysis of methylation status of SEQ ID NO: 4
gttaaaacgatcaataacaaccg

SEQ ID NO: 4456 - DNA, 21 bp, Artificial Sequence
  bisulfite treated nucleic acid for analysis of methylation status of SEQ ID NO: 4
ttgtttataggcgcgttagag

SEQ ID NO: 4457 - DNA, 21 bp, Artificial Sequence
  bisulfite treated nucleic acid for analysis of methylation status of SEQ ID NO: 4
actctaatcgctcgcactacc

SEQ ID NO: 4458 - DNA, 22 bp, Artificial Sequence
  bisulfite treated nucleic acid for analysis of methylation status of SEQ ID NO: 4
attaagttttatggtcgcggtt

SEQ ID NO: 4459 - DNA, 26 bp, Artificial Sequence
  bisulfite treated nucleic acid for analysis of methylation status of SEQ ID NO: 4
ttcgcgttaagtcgggttcggtgcgt

SEQ ID NO: 4460 - DNA, 21 bp, Artificial Sequence
  bisulfite treated nucleic acid for analysis of methylation status of SEQ ID NO: 4
aacaccgcgactattatacga

SEQ ID NO: 4461 - DNA, 22 bp, Artificial Sequence
  bisulfite treated nucleic acid for analysis of methylation status of SEQ ID NO: 4
ccgcgactattatacgactaaa

SEQ ID NO: 4462 - DNA, 20 bp, Artificial Sequence
  bisulfite treated nucleic acid for analysis of methylation status of SEQ ID NO: 4
gaccaactacgtcgaaccaa

SEQ ID NO: 4463 - DNA, 22 bp, Artificial Sequence
  bisulfite treated nucleic acid for analysis of methylation status of SEQ ID NO: 4
gttcggttgttattgatcgttt

SEQ ID NO: 4464 - DNA, 20 bp, Artificial Sequence
  bisulfite treated nucleic acid for analysis of methylation status of SEQ ID NO: 4
cgttcgtgttcggttgttat

SEQ ID NO: 4465 - DNA, 23 bp, Artificial Sequence
  bisulfite treated nucleic acid for analysis of methylation status of SEQ ID NO: 4
aacaccgcgactattatacgact

SEQ ID NO: 4466 - DNA, 21 bp, Artificial Sequence
  bisulfite treated nucleic acid for analysis of methylation status of SEQ ID NO: 4
acgaacctaaccgtaaaaacg

SEQ ID NO: 4467 - DNA, 23 bp, Artificial Sequence
  bisulfite treated nucleic acid for analysis of methylation status of SEQ ID NO: 4
ttgggtcgtaagttttatagtcg

SEQ ID NO: 4468 - DNA, 26 bp, Artificial Sequence
  nucleic acid for analysis of methylation status of SEQ ID NO: 4
ggaagcgcgttcggaaatcgaggttt

SEQ ID NO: 4469 - DNA, 23 bp, Artificial Sequence
  bisulfite treated nucleic acid for analysis of methylation status of SEQ ID NO: 4
accgcgactattatacgactaaa

SEQ ID NO: 4470 - DNA, 20 bp, Artificial Sequence
  bisulfite treated nucleic acid for analysis of methylation status of SEQ ID NO: 4
accaactacgtcgaaccaaa

SEQ ID NO: 4471 - DNA, 22 bp, Artificial Sequence
  bisulfite treated nucleic acid for analysis of methylation status of SEQ ID NO: 4
tcggttgttattgatcgtttta

SEQ ID NO: 4472 - DNA, 23 bp, Artificial Sequence
  bisulfite treated nucleic acid for analysis of methylation status of SEQ ID NO: 4
atttgtttataggcgcgttagag

SEQ ID NO: 4473 - DNA, 21 bp, Artificial Sequence
  bisulfite treated nucleic acid for analysis of methylation status of SEQ ID NO: 4
aattaagttttatggtcgcgg

SEQ ID NO: 4474 - DNA, 22 bp, Artificial Sequence
  bisulfite treated nucleic acid for analysis of methylation status of SEQ ID NO: 4
caactctaatcgctcgcactac

SEQ ID NO: 4475 - DNA, 21 bp, Artificial Sequence
  bisulfite treated nucleic acid for analysis of methylation status of SEQ ID NO: 4
taagttttatggtcgcggttt

SEQ ID NO: 4476 - DNA, 21 bp, Artificial Sequence
  bisulfite treated nucleic acid for analysis of methylation status of SEQ ID NO: 4
ttaagttttatggtcgcggtt

SEQ ID NO: 4477 - DNA, 22 bp, Artificial Sequence
  bisulfite treated nucleic acid for analysis of methylation status of SEQ ID NO: 4
tatatttgtttataggcgcgtt

SEQ ID NO: 4478 - DNA, 21 bp, Artificial Sequence
  bisulfite treated nucleic acid for analysis of methylation status of SEQ ID NO: 4
aaaacgatcaataacaaccga

SEQ ID NO: 4479 - DNA, 23 bp, Artificial Sequence
  bisulfite treated nucleic acid for analysis of methylation status of SEQ ID NO: 4
atatttgtttataggcgcgttag

SEQ ID NO: 4480 - DNA, 20 bp, Artificial Sequence
  bisulfite treated nucleic acid for analysis of methylation status of SEQ ID NO: 4
atttttcggtaagagacggc

SEQ ID NO: 4481 - DNA, 20 bp, Artificial Sequence
  bisulfite treated nucleic acid for analysis of methylation status of SEQ ID NO: 4
aaccgaaactttacaacccg

SEQ ID NO: 4482 - DNA, 22 bp, Artificial Sequence
  bisulfite treated nucleic acid for analysis of methylation status of SEQ ID NO: 4
atttttgttgttcgcgttaagt

SEQ ID NO: 4483 - DNA, 28 bp, Artificial Sequence
  bisulfite treated nucleic acid for analysis of methylation status of SEQ ID NO: 4
ggacggtagtgcgagcgattagagttgg

SEQ ID NO: 4484 - DNA, 20 bp, Artificial Sequence
  bisulfite treated nucleic acid for analysis of methylation status of SEQ ID NO: 4
tttatccttacccgaccgac

SEQ ID NO: 4485 - DNA, 22 bp, Artificial Sequence
  bisulfite treated nucleic acid for analysis of methylation status of SEQ ID NO: 4
tgggtcgtaagttttatagtcg

SEQ ID NO: 4486 - DNA, 22 bp, Artificial Sequence
  bisulfite treated nucleic acid for analysis of methylation status of SEQ ID NO: 4
gttttatggtcgcggtttttag

SEQ ID NO: 4487 - DNA, 22 bp, Artificial Sequence
  bisulfite treated nucleic acid for analysis of methylation status of SEQ ID NO: 4
agttttatggtcgcggttttta

SEQ ID NO: 4488 - DNA, 22 bp, Artificial Sequence
  bisulfite treated nucleic acid for analysis of methylation status of SEQ ID NO: 4
aacgaacgaccaataaaaacat

SEQ ID NO: 4489 - DNA, 21 bp, Artificial Sequence
  bisulfite treated nucleic acid for analysis of methylation status of SEQ ID NO: 4
ggcgtatttcggagaagaagt

SEQ ID NO: 4490 - DNA, 22 bp, Artificial Sequence
  bisulfite treated nucleic acid for analysis of methylation status of SEQ ID NO: 4
agtcgtttaggagagtttttcg

SEQ ID NO: 4491 - DNA, 22 bp, Artificial Sequence
  bisulfite treated nucleic acid for analysis of methylation status of SEQ ID NO: 4
actcgactccgaaaacaactaa

SEQ ID NO: 4492 - DNA, 19 bp, Artificial Sequence
  bisulfite treated nucleic acid for analysis of methylation status of SEQ ID NO: 4
gcgtttcgttcgtaaggtt

SEQ ID NO: 4493 - DNA, 34 bp, Artificial Sequence
  bisulfite treated nucleic acid for analysis of methylation status of SEQ ID NO: 4
gttcgtgttcggttgttattgatcgttttaacgt

SEQ ID NO: 4494 - DNA, 20 bp, Artificial Sequence
  bisulfite treated nucleic acid for analysis of methylation status of SEQ ID NO: 4
ctctaatcgctcgcactacc

SEQ ID NO: 4495 - DNA, 19 bp, Artificial Sequence
  bisulfite treated nucleic acid for analysis of methylation status of SEQ ID NO: 4
tccgaaccccgactaataa

SEQ ID NO: 4496 - DNA, 22 bp, Artificial Sequence
  bisulfite treated nucleic acid for analysis of methylation status of SEQ ID NO: 4
tagtaattttgtttcgggtcgt

SEQ ID NO: 4497 - DNA, 21 bp, Artificial Sequence
  bisulfite treated nucleic acid for analysis of methylation status of SEQ ID NO: 4
ctcgaaccaactctaatcgct

SEQ ID NO: 4498 - DNA, 23 bp, Artificial Sequence
  bisulfite treated nucleic acid for analysis of methylation status of SEQ ID NO: 4
cgactataaaacttacgacccaa

SEQ ID NO: 4499 - DNA, 21 bp, Artificial Sequence
  bisulfite treated nucleic acid for analysis of methylation status of SEQ ID NO: 4
cggaaaagcggtgtttattag

SEQ ID NO: 4500 - DNA, 23 bp, Artificial Sequence
  bisulfite treated nucleic acid for analysis of methylation status of SEQ ID NO: 4
agcggtgaagggttcgagcggtg

SEQ ID NO: 4501 - DNA, 20 bp, Artificial Sequence
  bisulfite treated nucleic acid for analysis of methylation status of SEQ ID NO: 4
tttatggtcgcggtttttag

SEQ ID NO: 4502 - DNA, 21 bp, Artificial Sequence
  bisulfite treated nucleic acid for analysis of methylation status of SEQ ID NO: 4
ttttatggtcgcggtttttag

SEQ ID NO: 4503 - DNA, 22 bp, Artificial Sequence
  bisulfite treated nucleic acid for analysis of methylation status of SEQ ID NO: 4
aatttttgttgttcgcgttaag

SEQ ID NO: 4504 - DNA, 22 bp, Artificial Sequence
  bisulfite treated nucleic acid for analysis of methylation status of SEQ ID NO: 4
ctactcgactccgaaaacaact

SEQ ID NO: 4505 - DNA, 21 bp, Artificial Sequence
  bisulfite treated nucleic acid for analysis of methylation status of SEQ ID NO: 4
tgtttataggcgcgttagagc

SEQ ID NO: 4506 - DNA, 19 bp, Artificial Sequence
  bisulfite treated nucleic acid for analysis of methylation status of SEQ ID NO: 4
accgaaactttacaacccg

SEQ ID NO: 4507 - DNA, 22 bp, Artificial Sequence
  bisulfite treated nucleic acid for analysis of methylation status of SEQ ID NO: 4
gaattaagttttatggtcgcgg

SEQ ID NO: 4508 - DNA, 22 bp, Artificial Sequence
  bisulfite treated nucleic acid for analysis of methylation status of SEQ ID NO: 4
ttaagttttatggtcgcggttt

SEQ ID NO: 4509 - DNA, 21 bp, Artificial Sequence
  bisulfite treated nucleic acid for analysis of methylation status of SEQ ID NO: 4
ttaataaaacctcgatttccg

SEQ ID NO: 4510 - DNA, 21 bp, Artificial Sequence
  bisulfite treated nucleic acid for analysis of methylation status of SEQ ID NO: 4
cgaaacctcgaaccaactcta

SEQ ID NO: 4511 - DNA, 22 bp, Artificial Sequence
  bisulfite treated nucleic acid for analysis of methylation status of SEQ ID NO: 4
aaacttcttctccgaaatacgc

SEQ ID NO: 4512 - DNA, 20 bp, Artificial Sequence
  bisulfite treated nucleic acid for analysis of methylation status of SEQ ID NO: 4
gtcgaggtttttgtaggtcg

SEQ ID NO: 4513 - DNA, 33 bp, Artificial Sequence
  bisulfite treated nucleic acid for analysis of methylation status of SEQ ID NO: 4
tttggagttagttaggttcgtaggcgttatcgt

SEQ ID NO: 4514 - DNA, 22 bp, Artificial Sequence
  bisulfite treated nucleic acid for analysis of methylation status of SEQ ID NO: 4
aactctaatcgctcgcactacc

SEQ ID NO: 4515 - DNA, 21 bp, Artificial Sequence
  bisulfite treated nucleic acid for analysis of methylation status of SEQ ID NO: 4
cgttcgtgttcggttgttatt

SEQ ID NO: 4516 - DNA, 20 bp, Artificial Sequence
  bisulfite treated nucleic acid for analysis of methylation status of SEQ ID NO: 4
ttccgaaccccgactaataa

SEQ ID NO: 4517 - DNA, 21 bp, Artificial Sequence
  bisulfite treated nucleic acid for analysis of methylation status of SEQ ID NO: 4
agttagttaggttcgtaggcg

SEQ ID NO: 4518 - DNA, 20 bp, Artificial Sequence
  bisulfite treated nucleic acid for analysis of methylation status of SEQ ID NO: 4
aacctaaccgtaaaaacgcc

SEQ ID NO: 4519 - DNA, 23 bp, Artificial Sequence
  bisulfite treated nucleic acid for analysis of methylation status of SEQ ID NO: 4
gtcgtttaggagagtttttcgag

SEQ ID NO: 4520 - DNA, 19 bp, Artificial Sequence
  bisulfite treated nucleic acid for analysis of methylation status of SEQ ID NO: 4
ttatccttacccgaccgac

SEQ ID NO: 4521 - DNA, 24 bp, Artificial Sequence
  bisulfite treated nucleic acid for analysis of methylation status of SEQ ID NO: 4
aacttaataaaacctcgatttccg

SEQ ID NO: 4522 - DNA, 19 bp, Artificial Sequence
  bisulfite treated nucleic acid for analysis of methylation status of SEQ ID NO: 4
tttttcggtaagagacggc

SEQ ID NO: 4523 - DNA, 21 bp, Artificial Sequence
  bisulfite treated nucleic acid for analysis of methylation status of SEQ ID NO: 4
tcgaaaaactctcctaaacga

SEQ ID NO: 4524 - DNA, 19 bp, Artificial Sequence
  bisulfite treated nucleic acid for analysis of methylation status of SEQ ID NO: 4
tcgggagttacggtttgag

SEQ ID NO: 4525 - DNA, 23 bp, Artificial Sequence
  bisulfite treated nucleic acid for analysis of methylation status of SEQ ID NO: 4
acgactataaaacttacgaccca

SEQ ID NO: 4526 - DNA, 25 bp, Artificial Sequence
  bisulfite treated nucleic acid for analysis of methylation status of SEQ ID NO: 4
ggtgaagggttcgagcggtgtaggg

SEQ ID NO: 4527 - DNA, 27 bp, Artificial Sequence
  bisulfite treated nucleic acid for analysis of methylation status of SEQ ID NO: 4
ggagttacggtttgagggcgattcggg

SEQ ID NO: 4528 - DNA, 21 bp, Artificial Sequence
  bisulfite treated nucleic acid for analysis of methylation status of SEQ ID NO: 4
cgaaaaactctcctaaacgac

SEQ ID NO: 4529 - DNA, 20 bp, Artificial Sequence
  bisulfite treated nucleic acid for analysis of methylation status of SEQ ID NO: 4
aagttttatggtcgcggttt

SEQ ID NO: 4530 - DNA, 20 bp, Artificial Sequence
  bisulfite treated nucleic acid for analysis of methylation status of SEQ ID NO: 4
cgacctacaaaaacctcgac

SEQ ID NO: 4531 - DNA, 22 bp, Artificial Sequence
  bisulfite treated nucleic acid for analysis of methylation status of SEQ ID NO: 4
gtagtgcgagcgattagagttg

SEQ ID NO: 4532 - DNA, 28 bp, Artificial Sequence
  nucleic acid for analysis of methylation status of SEQ ID NO: 4
ttcggttgggttaagtcgcgtagcgcgg

SEQ ID NO: 4533 - DNA, 21 bp, Artificial Sequence
  bisulfite treated nucleic acid for analysis of methylation status of SEQ ID NO: 4
accaactacgtcgaaccaaaa

SEQ ID NO: 4534 - DNA, 21 bp, Artificial Sequence
  bisulfite treated nucleic acid for analysis of methylation status of SEQ ID NO: 4
ccgaaatcgcaatctaaaact

SEQ ID NO: 4535 - DNA, 23 bp, Artificial Sequence
  bisulfite treated nucleic acid for analysis of methylation status of SEQ ID NO: 4
aaaacaccgcgactattatacga

SEQ ID NO: 4536 - DNA, 20 bp, Artificial Sequence
  bisulfite treated nucleic acid for analysis of methylation status of SEQ ID NO: 4
gtttataggcgcgttagagc

SEQ ID NO: 4537 - DNA, 21 bp, Artificial Sequence
  bisulfite treated nucleic acid for analysis of methylation status of SEQ ID NO: 4
ttttgttgttcgcgttaagtc

SEQ ID NO: 4538 - DNA, 21 bp, Artificial Sequence
  bisulfite treated nucleic acid for analysis of methylation status of SEQ ID NO: 4
aacttcttctccgaaatacgc

SEQ ID NO: 4539 - DNA, 21 bp, Artificial Sequence
  bisulfite treated nucleic acid for analysis of methylation status of SEQ ID NO: 4
tagtgcgagcgattagagttg

SEQ ID NO: 4540 - DNA, 19 bp, Artificial Sequence
  bisulfite treated nucleic acid for analysis of methylation status of SEQ ID NO: 4
ccgaaactttacaacccga

SEQ ID NO: 4541 - DNA, 19 bp, Artificial Sequence
  bisulfite treated nucleic acid for analysis of methylation status of SEQ ID NO: 4
cgttatcgtcggcgtattt

SEQ ID NO: 4542 - DNA, 20 bp, Artificial Sequence
  bisulfite treated nucleic acid for analysis of methylation status of SEQ ID NO: 4
ttttattccccgctaacgac

SEQ ID NO: 4543 - DNA, 22 bp, Artificial Sequence
  bisulfite treated nucleic acid for analysis of methylation status of SEQ ID NO: 4
tttcggtaaattcgtaggtttt

SEQ ID NO: 4544 - DNA, 37 bp, Artificial Sequence
  bisulfite treated nucleic acid for analysis of methylation status of SEQ ID NO: 4
tacgatggcggggcggcggcgcgaatatataaaggag

SEQ ID NO: 4545 - DNA, 20 bp, Artificial Sequence
  bisulfite treated nucleic acid for analysis of methylation status of SEQ ID NO: 4
ccaactacgtcgaaccaaaa

SEQ ID NO: 4546 - DNA, 20 bp, Artificial Sequence
  bisulfite treated nucleic acid for analysis of methylation status of SEQ ID NO: 4
cgtgttcggttgttattgat

SEQ ID NO: 4547 - DNA, 20 bp, Artificial Sequence
  bisulfite treated nucleic acid for analysis of methylation status of SEQ ID NO: 4
cgaacctaaccgtaaaaacg

SEQ ID NO: 4548 - DNA, 22 bp, Artificial Sequence
  bisulfite treated nucleic acid for analysis of methylation status of SEQ ID NO: 4
ccaaattaaaccgaactttacg

SEQ ID NO: 4549 - DNA, 19 bp, Artificial Sequence
  bisulfite treated nucleic acid for analysis of methylation status of SEQ ID NO: 4
ttgggttaagtcgcgtagc

SEQ ID NO: 4550 - DNA, 35 bp, Artificial Sequence
  bisulfite treated nucleic acid for analysis of methylation status of SEQ ID NO: 4
ggtttttgtaggtcgcgaagttgtttaaatttcgt

SEQ ID NO: 4551 - DNA, 21 bp, Artificial Sequence
  bisulfite treated nucleic acid for analysis of methylation status of SEQ ID NO: 4
gttcgtaaggtttttcgggag

SEQ ID NO: 4552 - DNA, 24 bp, Artificial Sequence
  bisulfite treated nucleic acid for analysis of methylation status of SEQ ID NO: 4
ttcgggcgattcggtcgttcgtgt

SEQ ID NO: 4553 - DNA, 20 bp, Artificial Sequence
  bisulfite treated nucleic acid for analysis of methylation status of SEQ ID NO: 4
cgaaccaactctaatcgctc

SEQ ID NO: 4554 - DNA, 20 bp, Artificial Sequence
  bisulfite treated nucleic acid for analysis of methylation status of SEQ ID NO: 4
gaaccaactctaatcgctcg

SEQ ID NO: 4555 - DNA, 20 bp, Artificial Sequence
  bisulfite treated nucleic acid for analysis of methylation status of SEQ ID NO: 4
tcgaaccaactctaatcgct

SEQ ID NO: 4556 - DNA, 21 bp, Artificial Sequence
  bisulfite treated nucleic acid for analysis of methylation status of SEQ ID NO: 4
tcgaaccaactctaatcgctc

SEQ ID NO: 4557 - DNA, 22 bp, Artificial Sequence
  bisulfite treated nucleic acid for analysis of methylation status of SEQ ID NO: 4
acgatcaataacaaccgaacac

SEQ ID NO: 4558 - DNA, 20 bp, Artificial Sequence
  bisulfite treated nucleic acid for analysis of methylation status of SEQ ID NO: 4
gcgtttcgttcgtaaggttt

SEQ ID NO: 4559 - DNA, 20 bp, Artificial Sequence
  bisulfite treated nucleic acid for analysis of methylation status of SEQ ID NO: 4
gcgtatttcggagaagaagt

SEQ ID NO: 4560 - DNA, 23 bp, Artificial Sequence
  bisulfite treated nucleic acid for analysis of methylation status of SEQ ID NO: 4
tagtcgtttaggagagtttttcg

SEQ ID NO: 4561 - DNA, 19 bp, Artificial Sequence
  bisulfite treated nucleic acid for analysis of methylation status of SEQ ID NO: 4
gattcggtcgttcgtgttc

SEQ ID NO: 4562 - DNA, 24 bp, Artificial Sequence
  bisulfite treated nucleic acid for analysis of methylation status of SEQ ID NO: 4
aacaccgcgactattatacgacta

SEQ ID NO: 4563 - DNA, 23 bp, Artificial Sequence
  bisulfite treated nucleic acid for analysis of methylation status of SEQ ID NO: 4
ttcggttgttattgatcgtttta

SEQ ID NO: 4564 - DNA, 19 bp, Artificial Sequence
  bisulfite treated nucleic acid for analysis of methylation status of SEQ ID NO: 4
cttccgaaccccgactaat

SEQ ID NO: 4565 - DNA, 20 bp, Artificial Sequence
  bisulfite treated nucleic acid for analysis of methylation status of SEQ ID NO: 4
aattattagtcggggttcgg

SEQ ID NO: 4566 - DNA, 31 bp, Artificial Sequence
  bisulfite treated nucleic acid for analysis of methylation status of SEQ ID NO: 4
agcgcgttcggaaatcgaggttttattaagt

SEQ ID NO: 4567 - DNA, 23 bp, Artificial Sequence
  bisulfite treated nucleic acid for analysis of methylation status of SEQ ID NO: 4
tactcgactccgaaaacaactaa

SEQ ID NO: 4568 - DNA, 20 bp, Artificial Sequence
  bisulfite treated nucleic acid for analysis of methylation status of SEQ ID NO: 4
cctcgaaccaactctaatcg

SEQ ID NO: 4569 - DNA, 21 bp, Artificial Sequence
  bisulfite treated nucleic acid for analysis of methylation status of SEQ ID NO: 4
cgatcaataacaaccgaacac

SEQ ID NO: 4570 - DNA, 23 bp, Artificial Sequence
  bisulfite treated nucleic acid for analysis of methylation status of SEQ ID NO: 4
gttagttaggttcgtaggcgtta

SEQ ID NO: 4571 - DNA, 19 bp, Artificial Sequence
  bisulfite treated nucleic acid for analysis of methylation status of SEQ ID NO: 4
tcgtaaggtttttcgggag

SEQ ID NO: 4572 - DNA, 21 bp, Artificial Sequence
  bisulfite treated nucleic acid for analysis of methylation status of SEQ ID NO: 4
ggtagtgcgagcgattagagt

SEQ ID NO: 4573 - DNA, 20 bp, Artificial Sequence
  bisulfite treated nucleic acid for analysis of methylation status of SEQ ID NO: 4
ttcgtaaggtttttcgggag

SEQ ID NO: 4574 - DNA, 19 bp, Artificial Sequence
  bisulfite treated nucleic acid for analysis of methylation status of SEQ ID NO: 4
cgaggtttttgtaggtcgc

SEQ ID NO: 4575 - DNA, 22 bp, Artificial Sequence
  bisulfite treated nucleic acid for analysis of methylation status of SEQ ID NO: 4
tttttgttgttcgcgttaagtc

SEQ ID NO: 4576 - DNA, 21 bp, Artificial Sequence
  bisulfite treated nucleic acid for analysis of methylation status of SEQ ID NO: 4
gtttcgggttgtaaagtttcg

SEQ ID NO: 4577 - DNA, 24 bp, Artificial Sequence
  bisulfite treated nucleic acid for analysis of methylation status of SEQ ID NO: 4
ttgggttaagtcgcgtagcgcggt

SEQ ID NO: 4578 - DNA, 21 bp, Artificial Sequence
  bisulfite treated nucleic acid for analysis of methylation status of SEQ ID NO: 4
agtaattttgtttcgggtcgt

SEQ ID NO: 4579 - DNA, 21 bp, Artificial Sequence
  bisulfite treated nucleic acid for analysis of methylation status of SEQ ID NO: 4
gaacctaaccgtaaaaacgcc

SEQ ID NO: 4580 - DNA, 19 bp, Artificial Sequence
  bisulfite treated nucleic acid for analysis of methylation status of SEQ ID NO: 4
ctacaaaaacctcgacccg

SEQ ID NO: 4581 - DNA, 22 bp, Artificial Sequence
  bisulfite treated nucleic acid for analysis of methylation status of SEQ ID NO: 4
gttcgtgttcggttgttattga

SEQ ID NO: 4582 - DNA, 21 bp, Artificial Sequence
  bisulfite treated nucleic acid for analysis of methylation status of SEQ ID NO: 4
atttttattccccgctaacga

SEQ ID NO: 4583 - DNA, 23 bp, Artificial Sequence
  bisulfite treated nucleic acid for analysis of methylation status of SEQ ID NO: 4
atttcggtaaattcgtaggtttt

SEQ ID NO: 4584 - DNA, 19 bp, Artificial Sequence
  bisulfite treated nucleic acid for analysis of methylation status of SEQ ID NO: 4
accaactacgtcgaaccaa

SEQ ID NO: 4585 - DNA, 24 bp, Artificial Sequence
  bisulfite treated nucleic acid for analysis of methylation status of SEQ ID NO: 4
gttgggtcgtaagttttatagtcg

SEQ ID NO: 4586 - DNA, 23 bp, Artificial Sequence
  bisulfite treated nucleic acid for analysis of methylation status of SEQ ID NO: 4
taatttttgttgttcgcgttaag

SEQ ID NO: 4587 - DNA, 22 bp, Artificial Sequence
  bisulfite treated nucleic acid for analysis of methylation status of SEQ ID NO: 4
ctcgactccgaaaacaactaac

SEQ ID NO: 4588 - DNA, 18 bp, Artificial Sequence
  bisulfite treated nucleic acid for analysis of methylation status of SEQ ID NO: 4
tcgggagttacggtttga

SEQ ID NO: 4589 - DNA, 22 bp, Artificial Sequence
  bisulfite treated nucleic acid for analysis of methylation status of SEQ ID NO: 4
gataacgcctacgaacctaact

SEQ ID NO: 4590 - DNA, 19 bp, Artificial Sequence
  bisulfite treated nucleic acid for analysis of methylation status of SEQ ID NO: 4
cgggtcgaggtttttgtag

SEQ ID NO: 4591 - DNA, 37 bp, Artificial Sequence
  bisulfite treated nucleic acid for analysis of methylation status of SEQ ID NO: 4
ggttttgatttatcgttgttttttcgtaaagttcggt

SEQ ID NO: 4592 - DNA, 24 bp, Artificial Sequence
  bisulfite treated nucleic acid for analysis of methylation status of SEQ ID NO: 4
ttagtcgtttaggagagtttttcg

SEQ ID NO: 4593 - DNA, 19 bp, Artificial Sequence
  bisulfite treated nucleic acid for analysis of methylation status of SEQ ID NO: 4
cgaaacctactcgactccg

SEQ ID NO: 4594 - DNA, 31 bp, Artificial Sequence
  bisulfite treated nucleic acid for analysis of methylation status of SEQ ID NO: 4
gatcgttttaacgtcgttagggacgattcgt

SEQ ID NO: 4595 - DNA, 20 bp, Artificial Sequence
  bisulfite treated nucleic acid for analysis of methylation status of SEQ ID NO: 4
tcgtgttcggttgttattga

SEQ ID NO: 4596 - DNA, 19 bp, Artificial Sequence
  nucleic acid for analysis of methylation status of SEQ ID NO: 4
ccaactacgtcgaaccaaa

SEQ ID NO: 4597 - DNA, 20 bp, Artificial Sequence
  bisulfite treated nucleic acid for analysis of methylation status of SEQ ID NO: 4
tttttattccccgctaacga

SEQ ID NO: 4598 - DNA, 21 bp, Artificial Sequence
  bisulfite treated nucleic acid for analysis of methylation status of SEQ ID NO: 4
acctcgaaccaactctaatcg

SEQ ID NO: 4599 - DNA, 19 bp, Artificial Sequence
  bisulfite treated nucleic acid for analysis of methylation status of SEQ ID NO: 4
cggtttttagggtgagtcg

SEQ ID NO: 4600 - DNA, 19 bp, Artificial Sequence
  bisulfite treated nucleic acid for analysis of methylation status of SEQ ID NO: 4
cgcgacctacaaaaacctc

SEQ ID NO: 4601 - DNA, 19 bp, Artificial Sequence
  bisulfite treated nucleic acid for analysis of methylation status of SEQ ID NO: 4
gcgacctacaaaaacctcg

SEQ ID NO: 4602 - DNA, 21 bp, Artificial Sequence
  bisulfite treated nucleic acid for analysis of methylation status of SEQ ID NO: 4
gaaacctactcgactccgaaa

SEQ ID NO: 4603 - DNA, 19 bp, Artificial Sequence
  bisulfite treated nucleic acid for analysis of methylation status of SEQ ID NO: 4
cgttcgtgttcggttgtta

SEQ ID NO: 4604 - DNA, 31 bp, Artificial Sequence
  bisulfite treated nucleic acid for analysis of methylation status of SEQ ID NO: 4
atcgttttaacgtcgttagggacgattcgtt

SEQ ID NO: 4605 - DNA, 23 bp, Artificial Sequence
  bisulfite treated nucleic acid for analysis of methylation status of SEQ ID NO: 4
aaacgaacgaccaataaaaacat

SEQ ID NO: 4606 - DNA, 22 bp, Artificial Sequence
  bisulfite treated nucleic acid for analysis of methylation status of SEQ ID NO: 4
aacgatcaataacaaccgaaca

SEQ ID NO: 4607 - DNA, 24 bp, Artificial Sequence
  bisulfite treated nucleic acid for analysis of methylation status of SEQ ID NO: 4
tacgactataaaacttacgaccca

SEQ ID NO: 4608 - DNA, 37 bp, Artificial Sequence
  bisulfite treated nucleic acid for analysis of methylation status of SEQ ID NO: 4
ttacgatggcggggcggcggcgcgaatatataaagga

SEQ ID NO: 4609 - DNA, 19 bp, Artificial Sequence
  bisulfite treated nucleic acid for analysis of methylation status of SEQ ID NO: 4
ccgaccaactacgtcgaac

SEQ ID NO: 4610 - DNA, 23 bp, Artificial Sequence
  bisulfite treated nucleic acid for analysis of methylation status of SEQ ID NO: 4
ttaaaacgatcaataacaaccga

SEQ ID NO: 4611 - DNA, 18 bp, Artificial Sequence
  bisulfite treated nucleic acid for analysis of methylation status of SEQ ID NO: 4
tgggttaagtcgcgtagc

SEQ ID NO: 4612 - DNA, 21 bp, Artificial Sequence
  bisulfite treated nucleic acid for analysis of methylation status of SEQ ID NO: 4
cgtatttcggagaagaagttt

SEQ ID NO: 4613 - DNA, 18 bp, Artificial Sequence
  bisulfite treated nucleic acid for analysis of methylation status of SEQ ID NO: 4
ttccgaaccccgactaat

SEQ ID NO: 4614 - DNA, 19 bp, Artificial Sequence
  bisulfite treated nucleic acid for analysis of methylation status of SEQ ID NO: 4
accaactctaatcgctcgc

SEQ ID NO: 4615 - DNA, 18 bp, Artificial Sequence
  bisulfite treated nucleic acid for analysis of methylation status of SEQ ID NO: 4
agttacggtttgagggcg

SEQ ID NO: 4616 - DNA, 22 bp, Artificial Sequence
  bisulfite treated nucleic acid for analysis of methylation status of SEQ ID NO: 4
acgcctacgaacctaactaact

SEQ ID NO: 4617 - DNA, 19 bp, Artificial Sequence
  bisulfite treated nucleic acid for analysis of methylation status of SEQ ID NO: 4
tatggtcgcggtttttagg

SEQ ID NO: 4618 - DNA, 22 bp, Artificial Sequence
  bisulfite treated nucleic acid for analysis of methylation status of SEQ ID NO: 4
gactccgaaaacaactaacgaa

SEQ ID NO: 4619 - DNA, 20 bp, Artificial Sequence
  bisulfite treated nucleic acid for analysis of methylation status of SEQ ID NO: 4
tttcgggttgtaaagtttcg

SEQ ID NO: 4620 - DNA, 20 bp, Artificial Sequence
  bisulfite treated nucleic acid for analysis of methylation status of SEQ ID NO: 4
cggttgttattgatcgtttt

SEQ ID NO: 4621 - DNA, 22 bp, Artificial Sequence
  bisulfite treated nucleic acid for analysis of methylation status of SEQ ID NO: 4
aacctcgaaccaactctaatcg

SEQ ID NO: 4622 - DNA, 20 bp, Artificial Sequence
  bisulfite treated nucleic acid for analysis of methylation status of SEQ ID NO: 4
gttcgtaaggtttttcggga

SEQ ID NO: 4623 - DNA, 25 bp, Artificial Sequence
  bisulfite treated nucleic acid for analysis of methylation status of SEQ ID NO: 4
tacggtttgagggcgattcgggcga

SEQ ID NO: 4624 - DNA, 19 bp, Artificial Sequence
  bisulfite treated nucleic acid for analysis of methylation status of SEQ ID NO: 4
tttattccccgctaacgac

SEQ ID NO: 4625 - DNA, 21 bp, Artificial Sequence
  bisulfite treated nucleic acid for analysis of methylation status of SEQ ID NO: 4
tttacgatggcggggcggcgg

SEQ ID NO: 4626 - DNA, 25 bp, Artificial Sequence
  bisulfite treated nucleic acid for analysis of methylation status of SEQ ID NO: 4
gtacgactataaaacttacgaccca

SEQ ID NO: 4627 - DNA, 19 bp, Artificial Sequence
  bisulfite treated nucleic acid for analysis of methylation status of SEQ ID NO: 4
tatccttacccgaccgacc

SEQ ID NO: 4628 - DNA, 21 bp, Artificial Sequence
  bisulfite treated nucleic acid for analysis of methylation status of SEQ ID NO: 4
ctcgactccgaaaacaactaa

SEQ ID NO: 4629 - DNA, 39 bp, Artificial Sequence
  bisulfite treated nucleic acid for analysis of methylation status of SEQ ID NO: 4
gttcggaaatcgaggttttattaagttttagattgcgat

SEQ ID NO: 4630 - DNA, 20 bp, Artificial Sequence
  bisulfite treated nucleic acid for analysis of methylation status of SEQ ID NO: 4
agtgcgagcgattagagttg

SEQ ID NO: 4631 - DNA, 21 bp, Artificial Sequence
  bisulfite treated nucleic acid for analysis of methylation status of SEQ ID NO: 4
acctactcgactccgaaaaca

SEQ ID NO: 4632 - DNA, 20 bp, Artificial Sequence
  bisulfite treated nucleic acid for analysis of methylation status of SEQ ID NO: 4
cgcgtaacgaaaccttttat

SEQ ID NO: 4633 - DNA, 19 bp, Artificial Sequence
  bisulfite treated nucleic acid for analysis of methylation status of SEQ ID NO: 4
gttacggtttgagggcgat

SEQ ID NO: 4634 - DNA, 21 bp, Artificial Sequence
  bisulfite treated nucleic acid for analysis of methylation status of SEQ ID NO: 4
gttcggttgttattgatcgtt

SEQ ID NO: 4635 - DNA, 21 bp, Artificial Sequence
  bisulfite treated nucleic acid for analysis of methylation status of SEQ ID NO: 4
cgtttaggagagtttttcgag

SEQ ID NO: 4636 - DNA, 18 bp, Artificial Sequence
  bisulfite treated nucleic acid for analysis of methylation status of SEQ ID NO: 4
ctacaccgctcgaaccct

SEQ ID NO: 4637 - DNA, 37 bp, Artificial Sequence
  bisulfite treated nucleic acid for analysis of methylation status of SEQ ID NO: 4
tttttatatatttgtttataggcgcgttagagcggtg

SEQ ID NO: 4638 - DNA, 21 bp, Artificial Sequence
  bisulfite treated nucleic acid for analysis of methylation status of SEQ ID NO: 4
gttttatggtcgcggttttta

SEQ ID NO: 4639 - DNA, 20 bp, Artificial Sequence
  bisulfite treated nucleic acid for analysis of methylation status of SEQ ID NO: 4
ctttacaacccgaaacctcg

SEQ ID NO: 4640 - DNA, 21 bp, Artificial Sequence
  bisulfite treated nucleic acid for analysis of methylation status of SEQ ID NO: 4
tttaatttttgttgttcgcgt

SEQ ID NO: 4641 - DNA, 23 bp, Artificial Sequence
  bisulfite treated nucleic acid for analysis of methylation status of SEQ ID NO: 4
cgcgactattatacgactaaaaa

SEQ ID NO: 4642 - DNA, 18 bp, Artificial Sequence
  bisulfite treated nucleic acid for analysis of methylation status of SEQ ID NO: 4
tacggtttgagggcgatt

SEQ ID NO: 4643 - DNA, 18 bp, Artificial Sequence
  bisulfite treated nucleic acid for analysis of methylation status of SEQ ID NO: 4
ttacggtttgagggcgat

SEQ ID NO: 4644 - DNA, 19 bp, Artificial Sequence
  bisulfite treated nucleic acid for analysis of methylation status of SEQ ID NO: 4
tttacaacccgaaacctcg

SEQ ID NO: 4645 - DNA, 20 bp, Artificial Sequence
  bisulfite treated nucleic acid for analysis of methylation status of SEQ ID NO: 4
cctactcgactccgaaaaca

SEQ ID NO: 4646 - DNA, 18 bp, Artificial Sequence
  bisulfite treated nucleic acid for analysis of methylation status of SEQ ID NO: 4
attcggtcgttcgtgttc

SEQ ID NO: 4647 - DNA, 20 bp, Artificial Sequence
  bisulfite treated nucleic acid for analysis of methylation status of SEQ ID NO: 4
ttatggtcgcggtttttagg

SEQ ID NO: 4648 - DNA, 20 bp, Artificial Sequence
  bisulfite treated nucleic acid for analysis of methylation status of SEQ ID NO: 4
aaccaactctaatcgctcgc

SEQ ID NO: 4649 - DNA, 22 bp, Artificial Sequence
  bisulfite treated nucleic acid for analysis of methylation status of SEQ ID NO: 7
tttcgataggaatttgtcgttt

SEQ ID NO: 4650 - DNA, 21 bp, Artificial Sequence
  bisulfite treated nucleic acid for analysis of methylation status of SEQ ID NO: 7
gaaacgcgctctaatttcaac

SEQ ID NO: 4651 - DNA, 29 bp, Artificial Sequence
  bisulfite treated nucleic acid for analysis of methylation status of SEQ ID NO: 7
ttgttcggtttgggatggttgtgcgcggt

SEQ ID NO: 4652 - DNA, 22 bp, Artificial Sequence
  bisulfite treated nucleic acid for analysis of methylation status of SEQ ID NO: 7
cgtttaatagggatggaacgag

SEQ ID NO: 4653 - DNA, 22 bp, Artificial Sequence
  bisulfite treated nucleic acid for analysis of methylation status of SEQ ID NO: 7
aaaacaatacgataaaaacccg

SEQ ID NO: 4654 - DNA, 23 bp, Artificial Sequence
  bisulfite treated nucleic acid for analysis of methylation status of SEQ ID NO: 7
tgcgtgagcggtcgggttgagtt

SEQ ID NO: 4655 - DNA, 21 bp, Artificial Sequence
  bisulfite treated nucleic acid for analysis of methylation status of SEQ ID NO: 7
cggtgtaagtcgttgggtatt

SEQ ID NO: 4656 - DNA, 22 bp, Artificial Sequence
  bisulfite treated nucleic acid for analysis of methylation status of SEQ ID NO: 7
catctaacaatctcgtcgaacc

SEQ ID NO: 4657 - DNA, 28 bp, Artificial Sequence
  bisulfite treated nucleic acid for analysis of methylation status of SEQ ID NO: 7
ttcggattttgtagcgcggtatttcggg

SEQ ID NO: 4658 - DNA, 22 bp, Artificial Sequence
  bisulfite treated nucleic acid for analysis of methylation status of SEQ ID NO: 7
atctaacaatctcgtcgaacca

SEQ ID NO: 4659 - DNA, 22 bp, Artificial Sequence
  bisulfite treated nucleic acid for analysis of methylation status of SEQ ID NO: 7
tcgataggaatttgtcgtttgt

SEQ ID NO: 4660 - DNA, 22 bp, Artificial Sequence
  bisulfite treated nucleic acid for analysis of methylation status of SEQ ID NO: 7
aacaatacgataaaaacccgtc

SEQ ID NO: 4661 - DNA, 20 bp, Artificial Sequence
  bisulfite treated nucleic acid for analysis of methylation status of SEQ ID NO: 7
tggttttcggtgtaagtcgt

SEQ ID NO: 4662 - DNA, 20 bp, Artificial Sequence
  bisulfite treated nucleic acid for analysis of methylation status of SEQ ID NO: 7
aaacgcgctctaatttcaac

SEQ ID NO: 4663 - DNA, 21 bp, Artificial Sequence
  bisulfite treated nucleic acid for analysis of methylation status of SEQ ID NO: 7
tcggtgtaagtcgttgggtat

SEQ ID NO: 4664 - DNA, 22 bp, Artificial Sequence
  bisulfite treated nucleic acid for analysis of methylation status of SEQ ID NO: 7
cgataggaatttgtcgtttgta

SEQ ID NO: 4665 - DNA, 21 bp, Artificial Sequence
  bisulfite treated nucleic acid for analysis of methylation status of SEQ ID NO: 7
cgtttaatagggatggaacga

SEQ ID NO: 4666 - DNA, 22 bp, Artificial Sequence
  bisulfite treated nucleic acid for analysis of methylation status of SEQ ID NO: 7
acaatacgataaaaacccgtcc

SEQ ID NO: 4667 - DNA, 22 bp, Artificial Sequence
  bisulfite treated nucleic acid for analysis of methylation status of SEQ ID NO: 7
tctaacaatctcgtcgaaccac

SEQ ID NO: 4668 - DNA, 22 bp, Artificial Sequence
  bisulfite treated nucleic acid for analysis of methylation status of SEQ ID NO: 7
ttcgataggaatttgtcgtttg

SEQ ID NO: 4669 - DNA, 22 bp, Artificial Sequence
  bisulfite treated nucleic acid for analysis of methylation status of SEQ ID NO: 7
aaacaatacgataaaaacccgt

SEQ ID NO: 4670 - DNA, 19 bp, Artificial Sequence
  bisulfite treated nucleic acid for analysis of methylation status of SEQ ID NO: 7
acgcgctctaatttcaacc

SEQ ID NO: 4671 - DNA, 21 bp, Artificial Sequence
  bisulfite treated nucleic acid for analysis of methylation status of SEQ ID NO: 7
gattcgagcgtagcgtttatc

SEQ ID NO: 4672 - DNA, 23 bp, Artificial Sequence
  bisulfite treated nucleic acid for analysis of methylation status of SEQ ID NO: 7
cgttaaatacccaacgacttaca

SEQ ID NO: 4673 - DNA, 27 bp, Artificial Sequence
  bisulfite treated nucleic acid for analysis of methylation status of SEQ ID NO: 7
ttcgaagggtcgggattcggtttgagt

SEQ ID NO: 4674 - DNA, 21 bp, Artificial Sequence
  bisulfite treated nucleic acid for analysis of methylation status of SEQ ID NO: 7
ggttttcggtgtaagtcgttg

SEQ ID NO: 4675 - DNA, 21 bp, Artificial Sequence
  bisulfite treated nucleic acid for analysis of methylation status of SEQ ID NO: 7
gttttcggtgtaagtcgttgg

SEQ ID NO: 4676 - DNA, 21 bp, Artificial Sequence
  bisulfite treated nucleic acid for analysis of methylation status of SEQ ID NO: 7
ttggttttcggtgtaagtcgt

SEQ ID NO: 4677 - DNA, 21 bp, Artificial Sequence
  bisulfite treated nucleic acid for analysis of methylation status of SEQ ID NO: 7
caatacgataaaaacccgtcc

SEQ ID NO: 4678 - DNA, 20 bp, Artificial Sequence
  bisulfite treated nucleic acid for analysis of methylation status of SEQ ID NO: 7
gacgtttcggattttgtagc

SEQ ID NO: 4679 - DNA, 32 bp, Artificial Sequence
  bisulfite treated nucleic acid for analysis of methylation status of SEQ ID NO: 7
gtatttcgggttatcgattcggtaaaggtcgg

SEQ ID NO: 4680 - DNA, 22 bp, Artificial Sequence
  bisulfite treated nucleic acid for analysis of methylation status of SEQ ID NO: 7
gtcgttggttagagacgttgtt

SEQ ID NO: 4681 - DNA, 19 bp, Artificial Sequence
  bisulfite treated nucleic acid for analysis of methylation status of SEQ ID NO: 7
cgaaacccaaatcgttacc

SEQ ID NO: 4682 - DNA, 24 bp, Artificial Sequence
  bisulfite treated nucleic acid for analysis of methylation status of SEQ ID NO: 7
ggcgagcgtggattaggagagcgg

SEQ ID NO: 4683 - DNA, 20 bp, Artificial Sequence
  bisulfite treated nucleic acid for analysis of methylation status of SEQ ID NO: 7
ttttcggtgtaagtcgttgg

SEQ ID NO: 4684 - DNA, 21 bp, Artificial Sequence
  bisulfite treated nucleic acid for analysis of methylation status of SEQ ID NO: 7
tctaacaatctcgtcgaacca

SEQ ID NO: 4685 - DNA, 23 bp, Artificial Sequence
  bisulfite treated nucleic acid for analysis of methylation status of SEQ ID NO: 7
taaaacaatacgataaaaacccg

SEQ ID NO: 4686 - DNA, 20 bp, Artificial Sequence
  bisulfite treated nucleic acid for analysis of methylation status of SEQ ID NO: 7
ggacgtttcggattttgtag

SEQ ID NO: 4687 - DNA, 21 bp, Artificial Sequence
  bisulfite treated nucleic acid for analysis of methylation status of SEQ ID NO: 7
ccgtctcgttaaatacccaac

SEQ ID NO: 4688 - DNA, 20 bp, Artificial Sequence
  bisulfite treated nucleic acid for analysis of methylation status of SEQ ID NO: 7
aacgcgctctaatttcaacc

SEQ ID NO: 4689 - DNA, 21 bp, Artificial Sequence
  bisulfite treated nucleic acid for analysis of methylation status of SEQ ID NO: 7
ctaacaatctcgtcgaaccac

SEQ ID NO: 4690 - DNA, 20 bp, Artificial Sequence
  bisulfite treated nucleic acid for analysis of methylation status of SEQ ID NO: 7
cggattttagaggggtaacg

SEQ ID NO: 4691 - DNA, 22 bp, Artificial Sequence
  bisulfite treated nucleic acid for analysis of methylation status of SEQ ID NO: 7
tacaaacgacaaattcctatcg

SEQ ID NO: 4692 - DNA, 24 bp, Artificial Sequence
  bisulfite treated nucleic acid for analysis of methylation status of SEQ ID NO: 7
agagcgagggttttcgcgcgaaga

SEQ ID NO: 4693 - DNA, 23 bp, Artificial Sequence
  bisulfite treated nucleic acid for analysis of methylation status of SEQ ID NO: 7
ctacaaacgacaaattcctatcg

SEQ ID NO: 4694 - DNA, 23 bp, Artificial Sequence
  bisulfite treated nucleic acid for analysis of methylation status of SEQ ID NO: 7
cacatctaacaatctcgtcgaac

SEQ ID NO: 4695 - DNA, 22 bp, Artificial Sequence
  bisulfite treated nucleic acid for analysis of methylation status of SEQ ID NO: 7
caaacgacaaattcctatcgaa

SEQ ID NO: 4696 - DNA, 19 bp, Artificial Sequence
  bisulfite treated nucleic acid for analysis of methylation status of SEQ ID NO: 7
gtagtaaatgggcgtgcgt

SEQ ID NO: 4697 - DNA, 22 bp, Artificial Sequence
  bisulfite treated nucleic acid for analysis of methylation status of SEQ ID NO: 7
acgaaacgcttaaaccaaacta

SEQ ID NO: 4698 - DNA, 25 bp, Artificial Sequence
  bisulfite treated nucleic acid for analysis of methylation status of SEQ ID NO: 7
ttcgcgggggacgggtttttatcgt

SEQ ID NO: 4699 - DNA, 19 bp, Artificial Sequence
  bisulfite treated nucleic acid for analysis of methylation status of SEQ ID NO: 7
cgaaacgcgctctaatttc

SEQ ID NO: 4700 - DNA, 22 bp, Artificial Sequence
  bisulfite treated nucleic acid for analysis of methylation status of SEQ ID NO: 7
tcgttggttagagacgttgttt

SEQ ID NO: 4701 - DNA, 21 bp, Artificial Sequence
  bisulfite treated nucleic acid for analysis of methylation status of SEQ ID NO: 7
aatacccaacgacttacaccg

SEQ ID NO: 4702 - DNA, 22 bp, Artificial Sequence
  bisulfite treated nucleic acid for analysis of methylation status of SEQ ID NO: 7
acatctaacaatctcgtcgaac

SEQ ID NO: 4703 - DNA, 22 bp, Artificial Sequence
  bisulfite treated nucleic acid for analysis of methylation status of SEQ ID NO: 7
cgttggttagagacgttgttta

SEQ ID NO: 4704 - DNA, 20 bp, Artificial Sequence
  bisulfite treated nucleic acid for analysis of methylation status of SEQ ID NO: 7
attcgagcgtagcgtttatc

SEQ ID NO: 4705 - DNA, 24 bp, Artificial Sequence
  bisulfite treated nucleic acid for analysis of methylation status of SEQ ID NO: 7
ctaaaacaatacgataaaaacccg

SEQ ID NO: 4706 - DNA, 23 bp, Artificial Sequence
  bisulfite treated nucleic acid for analysis of methylation status of SEQ ID NO: 7
cgataggaatttgtcgtttgtag

SEQ ID NO: 4707 - DNA, 20 bp, Artificial Sequence
  bisulfite treated nucleic acid for analysis of methylation status of SEQ ID NO: 7
acgacttacaccgaaaacca

SEQ ID NO: 4708 - DNA, 22 bp, Artificial Sequence
  bisulfite treated nucleic acid for analysis of methylation status of SEQ ID NO: 7
cgaaacgcttaaaccaaactaa

SEQ ID NO: 4709 - DNA, 20 bp, Artificial Sequence
  bisulfite treated nucleic acid for analysis of methylation status of SEQ ID NO: 7
ttggttttcggtgtaagtcg

SEQ ID NO: 4710 - DNA, 26 bp, Artificial Sequence
  bisulfite treated nucleic acid for analysis of methylation status of SEQ ID NO: 7
tgggtatttaacgagacgggggcgtt

SEQ ID NO: 4711 - DNA, 19 bp, Artificial Sequence
  bisulfite treated nucleic acid for analysis of methylation status of SEQ ID NO: 7
gcgcgaagatttaaggaag

SEQ ID NO: 4712 - DNA, 24 bp, Artificial Sequence
  bisulfite treated nucleic acid for analysis of methylation status of SEQ ID NO: 7
ggcgtggaggatttgggcgtttgg

SEQ ID NO: 4713 - DNA, 30 bp, Artificial Sequence
  bisulfite treated nucleic acid for analysis of methylation status of SEQ ID NO: 7
gatttgggcgtttgggaaggtgtatttcga

SEQ ID NO: 4714 - DNA, 18 bp, Artificial Sequence
  bisulfite treated nucleic acid for analysis of methylation status of SEQ ID NO: 7
tagtaaatgggcgtgcgt

SEQ ID NO: 4715 - DNA, 20 bp, Artificial Sequence
  bisulfite treated nucleic acid for analysis of methylation status of SEQ ID NO: 7
gtcgtttgtagtttttgcgg

SEQ ID NO: 4716 - DNA, 21 bp, Artificial Sequence
  bisulfite treated nucleic acid for analysis of methylation status of SEQ ID NO: 7
atacccaacgacttacaccga

SEQ ID NO: 4717 - DNA, 21 bp, Artificial Sequence
  bisulfite treated nucleic acid for analysis of methylation status of SEQ ID NO: 7
gtagtttttgcggttttcgtt

SEQ ID NO: 4718 - DNA, 19 bp, Artificial Sequence
  bisulfite treated nucleic acid for analysis of methylation status of SEQ ID NO: 7
cgcgaagatttaaggaagg

SEQ ID NO: 4719 - DNA, 19 bp, Artificial Sequence
  bisulfite treated nucleic acid for analysis of methylation status of SEQ ID NO: 7
gtaagagcgagggttttcg

SEQ ID NO: 4720 - DNA, 19 bp, Artificial Sequence
  bisulfite treated nucleic acid for analysis of methylation status of SEQ ID NO: 7
tttcggtgtaagtcgttgg

SEQ ID NO: 4721 - DNA, 23 bp, Artificial Sequence
  bisulfite treated nucleic acid for analysis of methylation status of SEQ ID NO: 7
tggttagagacgttgtttagacg

SEQ ID NO: 4722 - DNA, 21 bp, Artificial Sequence
  bisulfite treated nucleic acid for analysis of methylation status of SEQ ID NO: 7
aacgaaaaccgcaaaaactac

SEQ ID NO: 4723 - DNA, 33 bp, Artificial Sequence
  bisulfite treated nucleic acid for analysis of methylation status of SEQ ID NO: 7
tgggaaggtgtatttcgataggaatttgtcgtt

SEQ ID NO: 4724 - DNA, 20 bp, Artificial Sequence
  bisulfite treated nucleic acid for analysis of methylation status of SEQ ID NO: 7
gctacaaaatccgaaacgtc

SEQ ID NO: 4725 - DNA, 34 bp, Artificial Sequence
  bisulfite treated nucleic acid for analysis of methylation status of SEQ ID NO: 7
ttcggtgtaagtcgttgggtatttaacgagacgg

SEQ ID NO: 4726 - DNA, 21 bp, Artificial Sequence
  bisulfite treated nucleic acid for analysis of methylation status of SEQ ID NO: 7
tgtagtttttgcggttttcgt

SEQ ID NO: 4727 - DNA, 22 bp, Artificial Sequence
  bisulfite treated nucleic acid for analysis of methylation status of SEQ ID NO: 7
cgtggttagatttttcgatttg

SEQ ID NO: 4728 - DNA, 19 bp, Artificial Sequence
  bisulfite treated nucleic acid for analysis of methylation status of SEQ ID NO: 7
ctaccgccgacgaactcta

SEQ ID NO: 4729 - DNA, 26 bp, Artificial Sequence
  bisulfite treated nucleic acid for analysis of methylation status of SEQ ID NO: 7
ggttgcgttttttagtagggcggggg

SEQ ID NO: 4730 - DNA, 22 bp, Artificial Sequence
  bisulfite treated nucleic acid for analysis of methylation status of SEQ ID NO: 7
gtcgtggttagatttttcgatt

SEQ ID NO: 4731 - DNA, 18 bp, Artificial Sequence
  bisulfite treated nucleic acid for analysis of methylation status of SEQ ID NO: 7
taccgccgacgaactcta

SEQ ID NO: 4732 - DNA, 22 bp, Artificial Sequence
  bisulfite treated nucleic acid for analysis of methylation status of SEQ ID NO: 7
cgcgaacacgtctactaactaa

SEQ ID NO: 4733 - DNA, 22 bp, Artificial Sequence
  bisulfite treated nucleic acid for analysis of methylation status of SEQ ID NO: 7
tcggagtttaagtcgttgtttt

SEQ ID NO: 4734 - DNA, 34 bp, Artificial Sequence
  bisulfite treated nucleic acid for analysis of methylation status of SEQ ID NO: 7
ttttggtttacgttcgtttattcgcgtttgagta

SEQ ID NO: 4735 - DNA, 22 bp, Artificial Sequence
  bisulfite treated nucleic acid for analysis of methylation status of SEQ ID NO: 7
ttcggagtttaagtcgttgttt

SEQ ID NO: 4736 - DNA, 22 bp, Artificial Sequence
  bisulfite treated nucleic acid for analysis of methylation status of SEQ ID NO: 7
cggagtttaagtcgttgttttt

SEQ ID NO: 4737 - DNA, 22 bp, Artificial Sequence
  bisulfite treated nucleic acid for analysis of methylation status of SEQ ID NO: 7
gattcggagtttaagtcgttgt

SEQ ID NO: 4738 - DNA, 22 bp, Artificial Sequence
  bisulfite treated nucleic acid for analysis of methylation status of SEQ ID NO: 7
cgacaaaaacctaccgtctaca

SEQ ID NO: 4739 - DNA, 22 bp, Artificial Sequence
  bisulfite treated nucleic acid for analysis of methylation status of SEQ ID NO: 7
ttcggatcgcgtatagttattt

SEQ ID NO: 4740 - DNA, 22 bp, Artificial Sequence
  bisulfite treated nucleic acid for analysis of methylation status of SEQ ID NO: 7
ggcggaggcgggagtcgtaggg

SEQ ID NO: 4741 - DNA, 22 bp, Artificial Sequence
  bisulfite treated nucleic acid for analysis of methylation status of SEQ ID NO: 7
tcggatcgcgtatagttatttt

SEQ ID NO: 4742 - DNA, 21 bp, Artificial Sequence
  bisulfite treated nucleic acid for analysis of methylation status of SEQ ID NO: 7
ctaccgtctacaacccctacg

SEQ ID NO: 4743 - DNA, 20 bp, Artificial Sequence
  bisulfite treated nucleic acid for analysis of methylation status of SEQ ID NO: 7
gtcgcgcgtcgaggcggagg

SEQ ID NO: 4744 - DNA, 23 bp, Artificial Sequence
  bisulfite treated nucleic acid for analysis of methylation status of SEQ ID NO: 7
attcggagtttaagtcgttgttt

SEQ ID NO: 4745 - DNA, 21 bp, Artificial Sequence
  bisulfite treated nucleic acid for analysis of methylation status of SEQ ID NO: 7
cgatccgaatttcttcctaac

SEQ ID NO: 4746 - DNA, 22 bp, Artificial Sequence
  bisulfite treated nucleic acid for analysis of methylation status of SEQ ID NO: 7
tattagttagttcggcggtttt

SEQ ID NO: 4747 - DNA, 30 bp, Artificial Sequence
  bisulfite treated nucleic acid for analysis of methylation status of SEQ ID NO: 7
tttttattatcggcgcggttcgttagtcga

SEQ ID NO: 4748 - DNA, 23 bp, Artificial Sequence
  bisulfite treated nucleic acid for analysis of methylation status of SEQ ID NO: 7
agattcggagtttaagtcgttgt

SEQ ID NO: 4749 - DNA, 22 bp, Artificial Sequence
  bisulfite treated nucleic acid for analysis of methylation status of SEQ ID NO: 7
ccgacaaaaacctaccgtctac

SEQ ID NO: 4750 - DNA, 22 bp, Artificial Sequence
  bisulfite treated nucleic acid for analysis of methylation status of SEQ ID NO: 7
ccgaatctaaacaaaaacgaaa

SEQ ID NO: 4751 - DNA, 21 bp, Artificial Sequence
  bisulfite treated nucleic acid for analysis of methylation status of SEQ ID NO: 7
gagtcgtaggggttgtagacg

SEQ ID NO: 4752 - DNA, 37 bp, Artificial Sequence
  bisulfite treated nucleic acid for analysis of methylation status of SEQ ID NO: 7
aggtttttgtcggggtatatttttttaagcgtttagg

SEQ ID NO: 4753 - DNA, 23 bp, Artificial Sequence
  bisulfite treated nucleic acid for analysis of methylation status of SEQ ID NO: 7
gaacacgtctactaactaacgcc

SEQ ID NO: 4754 - DNA, 22 bp, Artificial Sequence
  bisulfite treated nucleic acid for analysis of methylation status of SEQ ID NO: 7
tttcgtttttgtttagattcgg

SEQ ID NO: 4755 - DNA, 22 bp, Artificial Sequence
  bisulfite treated nucleic acid for analysis of methylation status of SEQ ID NO: 7
gctaaacacctaacgaaacgaa

SEQ ID NO: 4756 - DNA, 21 bp, Artificial Sequence
  bisulfite treated nucleic acid for analysis of methylation status of SEQ ID NO: 7
gaggattcgtcgatttttgtc

SEQ ID NO: 4757 - DNA, 29 bp, Artificial Sequence
  bisulfite treated nucleic acid for analysis of methylation status of SEQ ID NO: 7
gtcggtggttcgggatatcgcgttataga

SEQ ID NO: 4758 - DNA, 22 bp, Artificial Sequence
  bisulfite treated nucleic acid for analysis of methylation status of SEQ ID NO: 7
tcgtttttgtttagattcggag

SEQ ID NO: 4759 - DNA, 22 bp, Artificial Sequence
  bisulfite treated nucleic acid for analysis of methylation status of SEQ ID NO: 7
actccgaatctaaacaaaaacg

SEQ ID NO: 4760 - DNA, 23 bp, Artificial Sequence
  bisulfite treated nucleic acid for analysis of methylation status of SEQ ID NO: 7
gtattagttagttcggcggtttt

SEQ ID NO: 4761 - DNA, 21 bp, Artificial Sequence
  bisulfite treated nucleic acid for analysis of methylation status of SEQ ID NO: 7
ttatcgcggttaggaagaaat

SEQ ID NO: 4762 - DNA, 27 bp, Artificial Sequence
  bisulfite treated nucleic acid for analysis of methylation status of SEQ ID NO: 7
tttagatcgagtagtcgcgcgtcgagg

SEQ ID NO: 4763 - DNA, 22 bp, Artificial Sequence
  bisulfite treated nucleic acid for analysis of methylation status of SEQ ID NO: 7
ctaactctcgatacaaaccgct

SEQ ID NO: 4764 - DNA, 24 bp, Artificial Sequence
  bisulfite treated nucleic acid for analysis of methylation status of SEQ ID NO: 7
ggttatatttgataatttcgtcgg

SEQ ID NO: 4765 - DNA, 25 bp, Artificial Sequence
  bisulfite treated nucleic acid for analysis of methylation status of SEQ ID NO: 7
gagtcggtggttcgggatatcgcgt

SEQ ID NO: 4766 - DNA, 22 bp, Artificial Sequence
  bisulfite treated nucleic acid for analysis of methylation status of SEQ ID NO: 7
tttatcgcggttaggaagaaat

SEQ ID NO: 4767 - DNA, 21 bp, Artificial Sequence
  bisulfite treated nucleic acid for analysis of methylation status of SEQ ID NO: 7
gttaggaagaaattcggatcg

SEQ ID NO: 4768 - DNA, 20 bp, Artificial Sequence
  bisulfite treated nucleic acid for analysis of methylation status of SEQ ID NO: 7
taccgtctacaacccctacg

SEQ ID NO: 4769 - DNA, 22 bp, Artificial Sequence
  bisulfite treated nucleic acid for analysis of methylation status of SEQ ID NO: 7
tccgaatctaaacaaaaacgaa

SEQ ID NO: 4770 - DNA, 21 bp, Artificial Sequence
  bisulfite treated nucleic acid for analysis of methylation status of SEQ ID NO: 7
cgtattagttagttcggcggt

SEQ ID NO: 4771 - DNA, 22 bp, Artificial Sequence
  bisulfite treated nucleic acid for analysis of methylation status of SEQ ID NO: 7
attagttagttcggcggttttg

SEQ ID NO: 4772 - DNA, 21 bp, Artificial Sequence
  bisulfite treated nucleic acid for analysis of methylation status of SEQ ID NO: 7
ccgcgaacacgtctactaact

SEQ ID NO: 4773 - DNA, 20 bp, Artificial Sequence
  bisulfite treated nucleic acid for analysis of methylation status of SEQ ID NO: 7
accgcgaacacgtctactaa

SEQ ID NO: 4774 - DNA, 20 bp, Artificial Sequence
  bisulfite treated nucleic acid for analysis of methylation status of SEQ ID NO: 7
ttcgtcgatttttgtcgagt

SEQ ID NO: 4775 - DNA, 32 bp, Artificial Sequence
  bisulfite treated nucleic acid for analysis of methylation status of SEQ ID NO: 7
ttcgggatatcgcgttatagaattcgaggcgt

SEQ ID NO: 4776 - DNA, 22 bp, Artificial Sequence
  bisulfite treated nucleic acid for analysis of methylation status of SEQ ID NO: 7
ctcgatacaaaccgctaaacac

SEQ ID NO: 4777 - DNA, 22 bp, Artificial Sequence
  bisulfite treated nucleic acid for analysis of methylation status of SEQ ID NO: 7
agattcggagtttaagtcgttg

SEQ ID NO: 4778 - DNA, 22 bp, Artificial Sequence
  bisulfite treated nucleic acid for analysis of methylation status of SEQ ID NO: 7
aacacgtctactaactaacgcc

SEQ ID NO: 4779 - DNA, 22 bp, Artificial Sequence
  bisulfite treated nucleic acid for analysis of methylation status of SEQ ID NO: 7
tcaaaacctataactacgtccg

SEQ ID NO: 4780 - DNA, 22 bp, Artificial Sequence
  bisulfite treated nucleic acid for analysis of methylation status of SEQ ID NO: 7
ttggtttacgttcgtttattcg

SEQ ID NO: 4781 - DNA, 30 bp, Artificial Sequence
  bisulfite treated nucleic acid for analysis of methylation status of SEQ ID NO: 7
agcggcgttagttagtagacgtgttcgcgg

SEQ ID NO: 4782 - DNA, 23 bp, Artificial Sequence
  bisulfite treated nucleic acid for analysis of methylation status of SEQ ID NO: 7
caaaacctataactacgtccgaa

SEQ ID NO: 4783 - DNA, 21 bp, Artificial Sequence
  bisulfite treated nucleic acid for analysis of methylation status of SEQ ID NO: 7
tcgtttattcgcgtttgagta

SEQ ID NO: 4784 - DNA, 21 bp, Artificial Sequence
  bisulfite treated nucleic acid for analysis of methylation status of SEQ ID NO: 7
atccgaatttcttcctaaccg

SEQ ID NO: 4785 - DNA, 22 bp, Artificial Sequence
  bisulfite treated nucleic acid for analysis of methylation status of SEQ ID NO: 7
cggttttggttatagacgtttg

SEQ ID NO: 4786 - DNA, 21 bp, Artificial Sequence
  bisulfite treated nucleic acid for analysis of methylation status of SEQ ID NO: 7
tggtttacgttcgtttattcg

SEQ ID NO: 4787 - DNA, 24 bp, Artificial Sequence
  bisulfite treated nucleic acid for analysis of methylation status of SEQ ID NO: 7
tagattcggagtttaagtcgttgt

SEQ ID NO: 4788 - DNA, 21 bp, Artificial Sequence
  bisulfite treated nucleic acid for analysis of methylation status of SEQ ID NO: 7
cgtttattcgcgtttgagtag

SEQ ID NO: 4789 - DNA, 21 bp, Artificial Sequence
  bisulfite treated nucleic acid for analysis of methylation status of SEQ ID NO: 7
tcgatacaaaccgctaaacac

SEQ ID NO: 4790 - DNA, 22 bp, Artificial Sequence
  bisulfite treated nucleic acid for analysis of methylation status of SEQ ID NO: 7
taactctcgatacaaaccgcta

SEQ ID NO: 4791 - DNA, 20 bp, Artificial Sequence
  bisulfite treated nucleic acid for analysis of methylation status of SEQ ID NO: 7
tagttagttcggcggttttg

SEQ ID NO: 4792 - DNA, 22 bp, Artificial Sequence
  bisulfite treated nucleic acid for analysis of methylation status of SEQ ID NO: 7
ttcgtttattcgcgtttgagta

SEQ ID NO: 4793 - DNA, 22 bp, Artificial Sequence
  bisulfite treated nucleic acid for analysis of methylation status of SEQ ID NO: 7
tcgtttattcgcgtttgagtag

SEQ ID NO: 4794 - DNA, 22 bp, Artificial Sequence
  bisulfite treated nucleic acid for analysis of methylation status of SEQ ID NO: 7
aaaatcgtaactaaactccccg

SEQ ID NO: 4795 - DNA, 20 bp, Artificial Sequence
  bisulfite treated nucleic acid for analysis of methylation status of SEQ ID NO: 7
tttgttgggaaacgtagtcg

SEQ ID NO: 4796 - DNA, 33 bp, Artificial Sequence
  bisulfite treated nucleic acid for analysis of methylation status of SEQ ID NO: 7
tttcgagttgggatagcggttgttttttgaaaa

SEQ ID NO: 4797 - DNA, 22 bp, Artificial Sequence
  bisulfite treated nucleic acid for analysis of methylation status of SEQ ID NO: 7
tcgaaatccgatctaaacctct

SEQ ID NO: 4798 - DNA, 20 bp, Artificial Sequence
  bisulfite treated nucleic acid for analysis of methylation status of SEQ ID NO: 7
attcgtcgatttttgtcgag

SEQ ID NO: 4799 - DNA, 34 bp, Artificial Sequence
  bisulfite treated nucleic acid for analysis of methylation status of SEQ ID NO: 7
ttcgtttcgttaggtgtttagcggtttgtatcga

SEQ ID NO: 4800 - DNA, 23 bp, Artificial Sequence
  bisulfite treated nucleic acid for analysis of methylation status of SEQ ID NO: 7
ttttggtttacgttcgtttattc

SEQ ID NO: 4801 - DNA, 21 bp, Artificial Sequence
  bisulfite treated nucleic acid for analysis of methylation status of SEQ ID NO: 7
aatttcttcctaaccgcgata

SEQ ID NO: 4802 - DNA, 22 bp, Artificial Sequence
  bisulfite treated nucleic acid for analysis of methylation status of SEQ ID NO: 7
ttaggcgtattagttagttcgg

SEQ ID NO: 4803 - DNA, 44 bp, Artificial Sequence
  bisulfite treated nucleic acid for analysis of methylation status of SEQ ID NO: 7
ttttggttatagacgtttgaatgataaagtgtttttattatcgg

SEQ ID NO: 4804 - DNA, 21 bp, Artificial Sequence
  bisulfite treated nucleic acid for analysis of methylation status of SEQ ID NO: 7
ttagttagttcggcggttttg

SEQ ID NO: 4805 - DNA, 23 bp, Artificial Sequence
  bisulfite treated nucleic acid for analysis of methylation status of SEQ ID NO: 7
atcaaaacctataactacgtccg

SEQ ID NO: 4806 - DNA, 21 bp, Artificial Sequence
  bisulfite treated nucleic acid for analysis of methylation status of SEQ ID NO: 7
ggtttacgttcgtttattcgc

SEQ ID NO: 4807 - DNA, 24 bp, Artificial Sequence
  bisulfite treated nucleic acid for analysis of methylation status of SEQ ID NO: 7
aaacctataactacgtccgaaaat

SEQ ID NO: 4808 - DNA, 22 bp, Artificial Sequence
  bisulfite treated nucleic acid for analysis of methylation status of SEQ ID NO: 7
gcgtttgagtagcgtttttaat

SEQ ID NO: 4809 - DNA, 31 bp, Artificial Sequence
  bisulfite treated nucleic acid for analysis of methylation status of SEQ ID NO: 7
ggcgttagttagtagacgtgttcgcggtcgt

SEQ ID NO: 4810 - DNA, 20 bp, Artificial Sequence
  bisulfite treated nucleic acid for analysis of methylation status of SEQ ID NO: 7
gaggattcgtcgatttttgt

SEQ ID NO: 4811 - DNA, 21 bp, Artificial Sequence
  bisulfite treated nucleic acid for analysis of methylation status of SEQ ID NO: 7
ttttatcgcggttaggaagaa

SEQ ID NO: 4812 - DNA, 21 bp, Artificial Sequence
  bisulfite treated nucleic acid for analysis of methylation status of SEQ ID NO: 7
tttttatcgcggttaggaaga

SEQ ID NO: 4813 - DNA, 22 bp, Artificial Sequence
  bisulfite treated nucleic acid for analysis of methylation status of SEQ ID NO: 7
atttcttcctaaccgcgataaa

SEQ ID NO: 4814 - DNA, 22 bp, Artificial Sequence
  bisulfite treated nucleic acid for analysis of methylation status of SEQ ID NO: 7
cgaaatccgatctaaacctctc

SEQ ID NO: 4815 - DNA, 21 bp, Artificial Sequence
  bisulfite treated nucleic acid for analysis of methylation status of SEQ ID NO: 7
gcggttttggttatagacgtt

SEQ ID NO: 4816 - DNA, 20 bp, Artificial Sequence
  bisulfite treated nucleic acid for analysis of methylation status of SEQ ID NO: 7
cgtattagttagttcggcgg

SEQ ID NO: 4817 - DNA, 23 bp, Artificial Sequence
  bisulfite treated nucleic acid for analysis of methylation status of SEQ ID NO: 7
cggatcgcgtatagttattttag

SEQ ID NO: 4818 - DNA, 21 bp, Artificial Sequence
  bisulfite treated nucleic acid for analysis of methylation status of SEQ ID NO: 7
gtttattcgcgtttgagtagc

SEQ ID NO: 4819 - DNA, 20 bp, Artificial Sequence
  bisulfite treated nucleic acid for analysis of methylation status of SEQ ID NO: 7
cgatccgaatttcttcctaa

SEQ ID NO: 4820 - DNA, 21 bp, Artificial Sequence
  bisulfite treated nucleic acid for analysis of methylation status of SEQ ID NO: 7
ttcgtttttgtttagattcgg

SEQ ID NO: 4821 - DNA, 21 bp, Artificial Sequence
  bisulfite treated nucleic acid for analysis of methylation status of SEQ ID NO: 7
cgaaatccgatctaaacctct

SEQ ID NO: 4822 - DNA, 24 bp, Artificial Sequence
  bisulfite treated nucleic acid for analysis of methylation status of SEQ ID NO: 7
aaaacctataactacgtccgaaaa

SEQ ID NO: 4823 - DNA, 22 bp, Artificial Sequence
  bisulfite treated nucleic acid for analysis of methylation status of SEQ ID NO: 7
tttggtttacgttcgtttattc

SEQ ID NO: 4824 - DNA, 22 bp, Artificial Sequence
  bisulfite treated nucleic acid for analysis of methylation status of SEQ ID NO: 7
ttttggtttacgttcgtttatt

SEQ ID NO: 4825 - DNA, 20 bp, Artificial Sequence
  bisulfite treated nucleic acid for analysis of methylation status of SEQ ID NO: 7
ggaggattcgtcgatttttg

SEQ ID NO: 4826 - DNA, 27 bp, Artificial Sequence
  bisulfite treated nucleic acid for analysis of methylation status of SEQ ID NO: 7
agtcggtggttcgggatatcgcgttat

SEQ ID NO: 4827 - DNA, 20 bp, Artificial Sequence
  bisulfite treated nucleic acid for analysis of methylation status of SEQ ID NO: 7
tccgaatttcttcctaaccg

SEQ ID NO: 4828 - DNA, 20 bp, Artificial Sequence
  bisulfite treated nucleic acid for analysis of methylation status of SEQ ID NO: 7
aggattcgtcgatttttgtc

SEQ ID NO: 4829 - DNA, 23 bp, Artificial Sequence
  bisulfite treated nucleic acid for analysis of methylation status of SEQ ID NO: 7
cgacgataaaacctacgaataaa

SEQ ID NO: 4830 - DNA, 21 bp, Artificial Sequence
  bisulfite treated nucleic acid for analysis of methylation status of SEQ ID NO: 7
gttagtagacgtgttcgcggt

SEQ ID NO: 4831 - DNA, 44 bp, Artificial Sequence
  bisulfite treated nucleic acid for analysis of methylation status of SEQ ID NO: 7
ttttaaattttcggacgtagttataggttttgatagttttaggg

SEQ ID NO: 4832 - DNA, 23 bp, Artificial Sequence
  bisulfite treated nucleic acid for analysis of methylation status of SEQ ID NO: 7
tagattcggagtttaagtcgttg

SEQ ID NO: 4833 - DNA, 22 bp, Artificial Sequence
  bisulfite treated nucleic acid for analysis of methylation status of SEQ ID NO: 7
tctcgatacaaaccgctaaaca

SEQ ID NO: 4834 - DNA, 23 bp, Artificial Sequence
  bisulfite treated nucleic acid for analysis of methylation status of SEQ ID NO: 7
aacctataactacgtccgaaaat

SEQ ID NO: 4835 - DNA, 20 bp, Artificial Sequence
  bisulfite treated nucleic acid for analysis of methylation status of SEQ ID NO: 7
gcgatccgaatttcttccta

SEQ ID NO: 4836 - DNA, 20 bp, Artificial Sequence
  bisulfite treated nucleic acid for analysis of methylation status of SEQ ID NO: 7
tacgttcgtttattcgcgtt

SEQ ID NO: 4837 - DNA, 19 bp, Artificial Sequence
  bisulfite treated nucleic acid for analysis of methylation status of SEQ ID NO: 7
ccgcgaacacgtctactaa

SEQ ID NO: 4838 - DNA, 20 bp, Artificial Sequence
  bisulfite treated nucleic acid for analysis of methylation status of SEQ ID NO: 7
gaatttcttcctaaccgcga

SEQ ID NO: 4839 - DNA, 21 bp, Artificial Sequence
  bisulfite treated nucleic acid for analysis of methylation status of SEQ ID NO: 7
agttagtagacgtgttcgcgg

SEQ ID NO: 4840 - DNA, 21 bp, Artificial Sequence
  bisulfite treated nucleic acid for analysis of methylation status of SEQ ID NO: 7
gattcgtcgatttttgtcgag

SEQ ID NO: 4841 - DNA, 19 bp, Artificial Sequence
  bisulfite treated nucleic acid for analysis of methylation status of SEQ ID NO: 7
tacgcgatccgaatttctt

SEQ ID NO: 4842 - DNA, 22 bp, Artificial Sequence
  bisulfite treated nucleic acid for analysis of methylation status of SEQ ID NO: 7
gaatttcttcctaaccgcgata

SEQ ID NO: 4843 - DNA, 23 bp, Artificial Sequence
  bisulfite treated nucleic acid for analysis of methylation status of SEQ ID NO: 7
aaacctataactacgtccgaaaa

SEQ ID NO: 4844 - DNA, 21 bp, Artificial Sequence
  bisulfite treated nucleic acid for analysis of methylation status of SEQ ID NO: 7
tcgacgataaaacctacgaat

SEQ ID NO: 4845 - DNA, 22 bp, Artificial Sequence
  bisulfite treated nucleic acid for analysis of methylation status of SEQ ID NO: 7
tagttagtagacgtgttcgcgg

SEQ ID NO: 4846 - DNA, 23 bp, Artificial Sequence
  bisulfite treated nucleic acid for analysis of methylation status of SEQ ID NO: 7
attaggcgtattagttagttcgg

SEQ ID NO: 4847 - DNA, 21 bp, Artificial Sequence
  bisulfite treated nucleic acid for analysis of methylation status of SEQ ID NO: 7
gctaaacacctaacgaaacga

SEQ ID NO: 4848 - DNA, 21 bp, Artificial Sequence
  bisulfite treated nucleic acid for analysis of methylation status of SEQ ID NO: 7
cggatcgcgtatagttatttt

SEQ ID NO: 4849 - DNA, 21 bp, Artificial Sequence
  bisulfite treated nucleic acid for analysis of methylation status of SEQ ID NO: 7
ctccgaatctaaacaaaaacg

SEQ ID NO: 4850 - DNA, 22 bp, Artificial Sequence
  bisulfite treated nucleic acid for analysis of methylation status of SEQ ID NO: 7
actctcgatacaaaccgctaaa

SEQ ID NO: 4851 - DNA, 19 bp, Artificial Sequence
  bisulfite treated nucleic acid for analysis of methylation status of SEQ ID NO: 7
ggattattcggaggattcg

SEQ ID NO: 4852 - DNA, 22 bp, Artificial Sequence
  bisulfite treated nucleic acid for analysis of methylation status of SEQ ID NO: 7
ctctcgatacaaaccgctaaac

SEQ ID NO: 4853 - DNA, 22 bp, Artificial Sequence
  bisulfite treated nucleic acid for analysis of methylation status of SEQ ID NO: 7
aactctcgatacaaaccgctaa

SEQ ID NO: 4854 - DNA, 21 bp, Artificial Sequence
  bisulfite treated nucleic acid for analysis of methylation status of SEQ ID NO: 7
cgtttttgtttagattcggag

SEQ ID NO: 4855 - DNA, 20 bp, Artificial Sequence
  bisulfite treated nucleic acid for analysis of methylation status of SEQ ID NO: 7
tattcgcgtttgagtagcgt

SEQ ID NO: 4856 - DNA, 25 bp, Artificial Sequence
  bisulfite treated nucleic acid for analysis of methylation status of SEQ ID NO: 7
aggttatatttgataatttcgtcgg

SEQ ID NO: 4857 - DNA, 24 bp, Artificial Sequence
  bisulfite treated nucleic acid for analysis of methylation status of SEQ ID NO: 7
ttatatttgataatttcgtcggat

SEQ ID NO: 4858 - DNA, 21 bp, Artificial Sequence
  bisulfite treated nucleic acid for analysis of methylation status of SEQ ID NO: 7
ttacgttcgtttattcgcgtt

SEQ ID NO: 4859 - DNA, 19 bp, Artificial Sequence
  bisulfite treated nucleic acid for analysis of methylation status of SEQ ID NO: 7
aatttcttcctaaccgcga

SEQ ID NO: 4860 - DNA, 19 bp, Artificial Sequence
  bisulfite treated nucleic acid for analysis of methylation status of SEQ ID NO: 7
cgaatttcttcctaaccgc

SEQ ID NO: 4861 - DNA, 21 bp, Artificial Sequence
  bisulfite treated nucleic acid for analysis of methylation status of SEQ ID NO: 7
ccgctaaacacctaacgaaac

SEQ ID NO: 4862 - DNA, 18 bp, Artificial Sequence
  bisulfite treated nucleic acid for analysis of methylation status of SEQ ID NO: 7
ttgtcgagtcggtggttc

SEQ ID NO: 4863 - DNA, 29 bp, Artificial Sequence
  bisulfite treated nucleic acid for analysis of methylation status of SEQ ID NO: 7
atcgcgttatagaattcgaggcgttcggg

SEQ ID NO: 4864 - DNA, 20 bp, Artificial Sequence
  bisulfite treated nucleic acid for analysis of methylation status of SEQ ID NO: 7
ttacgttcgtttattcgcgt

SEQ ID NO: 4865 - DNA, 19 bp, Artificial Sequence
  bisulfite treated nucleic acid for analysis of methylation status of SEQ ID NO: 7
gaccgcgaacacgtctact

SEQ ID NO: 4866 - DNA, 33 bp, Artificial Sequence
  bisulfite treated nucleic acid for analysis of methylation status of SEQ ID NO: 7
gtttgagtagcgtttttaattagcggcgttagt

SEQ ID NO: 4867 - DNA, 23 bp, Artificial Sequence
  bisulfite treated nucleic acid for analysis of methylation status of SEQ ID NO: 7
aaaacctataactacgtccgaaa

SEQ ID NO: 4868 - DNA, 21 bp, Artificial Sequence
  bisulfite treated nucleic acid for analysis of methylation status of SEQ ID NO: 7
ttcttcctaaccgcgataaaa

SEQ ID NO: 4869 - DNA, 21 bp, Artificial Sequence
  bisulfite treated nucleic acid for analysis of methylation status of SEQ ID NO: 7
tcttcctaaccgcgataaaaa

SEQ ID NO: 4870 - DNA, 21 bp, Artificial Sequence
  bisulfite treated nucleic acid for analysis of methylation status of SEQ ID NO: 7
tttcttcctaaccgcgataaa

SEQ ID NO: 4871 - DNA, 21 bp, Artificial Sequence
  bisulfite treated nucleic acid for analysis of methylation status of SEQ ID NO: 7
gttcgtttattcgcgtttgag

SEQ ID NO: 4872 - DNA, 20 bp, Artificial Sequence
  bisulfite treated nucleic acid for analysis of methylation status of SEQ ID NO: 7
ttaggaagaaattcggatcg

SEQ ID NO: 4873 - DNA, 20 bp, Artificial Sequence
  bisulfite treated nucleic acid for analysis of methylation status of SEQ ID NO: 7
cgtctacaacccctacgact

SEQ ID NO: 4874 - DNA, 19 bp, Artificial Sequence
  bisulfite treated nucleic acid for analysis of methylation status of SEQ ID NO: 7
agttagttcggcggttttg

SEQ ID NO: 4875 - DNA, 23 bp, Artificial Sequence
  bisulfite treated nucleic acid for analysis of methylation status of SEQ ID NO: 7
ttttcgtttttgtttagattcgg

SEQ ID NO: 4876 - DNA, 19 bp, Artificial Sequence
  bisulfite treated nucleic acid for analysis of methylation status of SEQ ID NO: 7
ccgaatttcttcctaaccg

SEQ ID NO: 4877 - DNA, 21 bp, Artificial Sequence
  bisulfite treated nucleic acid for analysis of methylation status of SEQ ID NO: 7
aactctcgatacaaaccgcta

SEQ ID NO: 4878 - DNA, 21 bp, Artificial Sequence
  bisulfite treated nucleic acid for analysis of methylation status of SEQ ID NO: 7
caaaccgctaaacacctaacg

SEQ ID NO: 4879 - DNA, 21 bp, Artificial Sequence
  bisulfite treated nucleic acid for analysis of methylation status of SEQ ID NO: 7
aaatcgtaactaaactccccg

SEQ ID NO: 4880 - DNA, 33 bp, Artificial Sequence
  bisulfite treated nucleic acid for analysis of methylation status of SEQ ID NO: 7
atttcgagttgggatagcggttgttttttgaaa

SEQ ID NO: 4881 - DNA, 25 bp, Artificial Sequence
  bisulfite treated nucleic acid for analysis of methylation status of SEQ ID NO: 7
gttatatttgataatttcgtcggat

SEQ ID NO: 4882 - DNA, 21 bp, Artificial Sequence
  bisulfite treated nucleic acid for analysis of methylation status of SEQ ID NO: 7
tcggatcgcgtatagttattt

SEQ ID NO: 4883 - DNA, 24 bp, Artificial Sequence
  bisulfite treated nucleic acid for analysis of methylation status of SEQ ID NO: 7
tatcaaaacctataactacgtccg

SEQ ID NO: 4884 - DNA, 21 bp, Artificial Sequence
  bisulfite treated nucleic acid for analysis of methylation status of SEQ ID NO: 7
ttattcgcgtttgagtagcgt

SEQ ID NO: 4885 - DNA, 24 bp, Artificial Sequence
  bisulfite treated nucleic acid for analysis of methylation status of SEQ ID NO: 7
caaaacctataactacgtccgaaa

SEQ ID NO: 4886 - DNA, 20 bp, Artificial Sequence
  bisulfite treated nucleic acid for analysis of methylation status of SEQ ID NO: 7
taggaagaaattcggatcgc

SEQ ID NO: 4887 - DNA, 19 bp, Artificial Sequence
  bisulfite treated nucleic acid for analysis of methylation status of SEQ ID NO: 7
ttgttgggaaacgtagtcg

SEQ ID NO: 4888 - DNA, 33 bp, Artificial Sequence
  bisulfite treated nucleic acid for analysis of methylation status of SEQ ID NO: 7
ttcgagttgggatagcggttgttttttgaaaag

SEQ ID NO: 4889 - DNA, 25 bp, Artificial Sequence
  bisulfite treated nucleic acid for analysis of methylation status of SEQ ID NO: 7
ctatcaaaacctataactacgtccg

SEQ ID NO: 4890 - DNA, 21 bp, Artificial Sequence
  bisulfite treated nucleic acid for analysis of methylation status of SEQ ID NO: 7
tttacgttcgtttattcgcgt

SEQ ID NO: 4891 - DNA, 19 bp, Artificial Sequence
  bisulfite treated nucleic acid for analysis of methylation status of SEQ ID NO: 7
accgtctacaacccctacg

SEQ ID NO: 4892 - DNA, 20 bp, Artificial Sequence
  bisulfite treated nucleic acid for analysis of methylation status of SEQ ID NO: 7
cgtaactaaactccccgacc

SEQ ID NO: 4893 - DNA, 21 bp, Artificial Sequence
  bisulfite treated nucleic acid for analysis of methylation status of SEQ ID NO: 7
gttgggaaacgtagtcgtgat

SEQ ID NO: 4894 - DNA, 21 bp, Artificial Sequence
  bisulfite treated nucleic acid for analysis of methylation status of SEQ ID NO: 7
cgatacaaaccgctaaacacc

SEQ ID NO: 4895 - DNA, 20 bp, Artificial Sequence
  bisulfite treated nucleic acid for analysis of methylation status of SEQ ID NO: 7
ccgtctacaacccctacgac

SEQ ID NO: 4896 - DNA, 18 bp, Artificial Sequence
  bisulfite treated nucleic acid for analysis of methylation status of SEQ ID NO: 7
tttgtcgagtcggtggtt

SEQ ID NO: 4897 - DNA, 20 bp, Artificial Sequence
  bisulfite treated nucleic acid for analysis of methylation status of SEQ ID NO: 7
cgcgaacacgtctactaact

SEQ ID NO: 4898 - DNA, 20 bp, Artificial Sequence
  bisulfite treated nucleic acid for analysis of methylation status of SEQ ID NO: 7
aaaccgctaaacacctaacg

SEQ ID NO: 4899 - DNA, 20 bp, Artificial Sequence
  bisulfite treated nucleic acid for analysis of methylation status of SEQ ID NO: 7
tatcgcggttaggaagaaat

SEQ ID NO: 4900 - DNA, 20 bp, Artificial Sequence
  bisulfite treated nucleic acid for analysis of methylation status of SEQ ID NO: 7
atttttgtcgagtcggtggt

SEQ ID NO: 4901 - DNA, 19 bp, Artificial Sequence
  bisulfite treated nucleic acid for analysis of methylation status of SEQ ID NO: 7
tcgtcgatttttgtcgagt

SEQ ID NO: 4902 - DNA, 19 bp, Artificial Sequence
  bisulfite treated nucleic acid for analysis of methylation status of SEQ ID NO: 7
tttgtcgagtcggtggttc

SEQ ID NO: 4903 - DNA, 25 bp, Artificial Sequence
  bisulfite treated nucleic acid for analysis of methylation status of SEQ ID NO: 7
gatctaaaataactatacgcgatcc

SEQ ID NO: 4904 - DNA, 19 bp, Artificial Sequence
  bisulfite treated nucleic acid for analysis of methylation status of SEQ ID NO: 7
tcggcggttttggttatag

SEQ ID NO: 4905 - DNA, 20 bp, Artificial Sequence
  bisulfite treated nucleic acid for analysis of methylation status of SEQ ID NO: 7
cgtttattcgcgtttgagta

SEQ ID NO: 4906 - DNA, 18 bp, Artificial Sequence
  bisulfite treated nucleic acid for analysis of methylation status of SEQ ID NO: 7
acgcgatccgaatttctt

SEQ ID NO: 4907 - DNA, 22 bp, Artificial Sequence
  bisulfite treated nucleic acid for analysis of methylation status of SEQ ID NO: 7
attcggagtttaagtcgttgtt

SEQ ID NO: 4908 - DNA, 19 bp, Artificial Sequence
  bisulfite treated nucleic acid for analysis of methylation status of SEQ ID NO: 7
cggttaggaagaaattcgg

SEQ ID NO: 4909 - DNA, 21 bp, Artificial Sequence
  bisulfite treated nucleic acid for analysis of methylation status of SEQ ID NO: 7
gattcggagtttaagtcgttg

SEQ ID NO: 4910 - DNA, 19 bp, Artificial Sequence
  bisulfite treated nucleic acid for analysis of methylation status of SEQ ID NO: 7
cgatttttgtcgagtcggt

SEQ ID NO: 4911 - DNA, 20 bp, Artificial Sequence
  bisulfite treated nucleic acid for analysis of methylation status of SEQ ID NO: 7
ttcttcctaaccgcgataaa

SEQ ID NO: 4912 - DNA, 23 bp, Artificial Sequence
  bisulfite treated nucleic acid for analysis of methylation status of SEQ ID NO: 7
tcgacgataaaacctacgaataa

SEQ ID NO: 4913 - DNA, 19 bp, Artificial Sequence
  bisulfite treated nucleic acid for analysis of methylation status of SEQ ID NO: 7
agtagacgtgttcgcggtc

SEQ ID NO: 4914 - DNA, 29 bp, Artificial Sequence
  bisulfite treated nucleic acid for analysis of methylation status of SEQ ID NO: 7
tttcgggttggggttcgtattcggataga

SEQ ID NO: 4915 - DNA, 18 bp, Artificial Sequence
  bisulfite treated nucleic acid for analysis of methylation status of SEQ ID NO: 7
agtcggtggttcgggata

SEQ ID NO: 4916 - DNA, 26 bp, Artificial Sequence
  bisulfite treated nucleic acid for analysis of methylation status of SEQ ID NO: 7
aattcgaggcgttcgggcgttttcgt

SEQ ID NO: 4917 - DNA, 20 bp, Artificial Sequence
  bisulfite treated nucleic acid for analysis of methylation status of SEQ ID NO: 7
gttagtagacgtgttcgcgg

SEQ ID NO: 4918 - DNA, 21 bp, Artificial Sequence
  bisulfite treated nucleic acid for analysis of methylation status of SEQ ID NO: 7
cgctaaacacctaacgaaacg

SEQ ID NO: 4919 - DNA, 18 bp, Artificial Sequence
  bisulfite treated nucleic acid for analysis of methylation status of SEQ ID NO: 7
cgaatacgaaccccaacc

SEQ ID NO: 4920 - DNA, 18 bp, Artificial Sequence
  bisulfite treated nucleic acid for analysis of methylation status of SEQ ID NO: 7
ccgaatacgaaccccaac

SEQ ID NO: 4921 - DNA, 19 bp, Artificial Sequence
  bisulfite treated nucleic acid for analysis of methylation status of SEQ ID NO: 7
attcgcgtttgagtagcgt

SEQ ID NO: 4922 - DNA, 20 bp, Artificial Sequence
  bisulfite treated nucleic acid for analysis of methylation status of SEQ ID NO: 7
ttcggcggttttggttatag

SEQ ID NO: 4923 - DNA, 26 bp, Artificial Sequence
  bisulfite treated nucleic acid for analysis of methylation status of SEQ ID NO: 7
taggttatatttgataatttcgtcgg

SEQ ID NO: 4924 - DNA, 22 bp, Artificial Sequence
  bisulfite treated nucleic acid for analysis of methylation status of SEQ ID NO: 7
accgctaaacacctaacgaaac

SEQ ID NO: 4925 - DNA, 19 bp, Artificial Sequence
  bisulfite treated nucleic acid for analysis of methylation status of SEQ ID NO: 7
atttttgtcgagtcggtgg

SEQ ID NO: 4926 - DNA, 25 bp, Artificial Sequence
  bisulfite treated nucleic acid for analysis of methylation status of SEQ ID NO: 7
tcgcgtatagttattttagatcgag

SEQ ID NO: 4927 - DNA, 21 bp, Artificial Sequence
  bisulfite treated nucleic acid for analysis of methylation status of SEQ ID NO: 7
ccgaatctaaacaaaaacgaa

SEQ ID NO: 4928 - DNA, 20 bp, Artificial Sequence
  bisulfite treated nucleic acid for analysis of methylation status of SEQ ID NO: 7
agtcgtaggggttgtagacg

SEQ ID NO: 4929 - DNA, 19 bp, Artificial Sequence
  bisulfite treated nucleic acid for analysis of methylation status of SEQ ID NO: 7
ctaactacgcgacccgaac

SEQ ID NO: 4930 - DNA, 21 bp, Artificial Sequence
  bisulfite treated nucleic acid for analysis of methylation status of SEQ ID NO: 7
tcgttaggtgtttagcggttt

SEQ ID NO: 4931 - DNA, 30 bp, Artificial Sequence
  bisulfite treated nucleic acid for analysis of methylation status of SEQ ID NO: 7
ttcgatttttcgaggcgcgggagtttacgg

SEQ ID NO: 4932 - DNA, 23 bp, Artificial Sequence
  bisulfite treated nucleic acid for analysis of methylation status of SEQ ID NO: 7
ctaactctcgatacaaaccgcta

SEQ ID NO: 4933 - DNA, 29 bp, Artificial Sequence
  bisulfite treated nucleic acid for analysis of methylation status of SEQ ID NO: 7
gttatagaattcgaggcgttcgggcgttt

SEQ ID NO: 4934 - DNA, 20 bp, Artificial Sequence
  bisulfite treated nucleic acid for analysis of methylation status of SEQ ID NO: 7
cttcctaaccgcgataaaaa

SEQ ID NO: 4935 - DNA, 24 bp, Artificial Sequence
  bisulfite treated nucleic acid for analysis of methylation status of SEQ ID NO: 7
cgcgtatagttattttagatcgag

SEQ ID NO: 4936 - DNA, 20 bp, Artificial Sequence
  bisulfite treated nucleic acid for analysis of methylation status of SEQ ID NO: 7
tgttgggaaacgtagtcgtg

SEQ ID NO: 4937 - DNA, 18 bp, Artificial Sequence
  bisulfite treated nucleic acid for analysis of methylation status of SEQ ID NO: 7
gtagacgtgttcgcggtc

SEQ ID NO: 4938 - DNA, 19 bp, Artificial Sequence
  bisulfite treated nucleic acid for analysis of methylation status of SEQ ID NO: 7
tttttgtcgagtcggtggt

SEQ ID NO: 4939 - DNA, 38 bp, Artificial Sequence
  bisulfite treated nucleic acid for analysis of methylation status of SEQ ID NO: 7
aaattcggatcgcgtatagttattttagatcgagtagt

SEQ ID NO: 4940 - DNA, 18 bp, Artificial Sequence
  bisulfite treated nucleic acid for analysis of methylation status of SEQ ID NO: 7
ggaagaaattcggatcgc

SEQ ID NO: 4941 - DNA, 21 bp, Artificial Sequence
  bisulfite treated nucleic acid for analysis of methylation status of SEQ ID NO: 7
aaccgctaaacacctaacgaa

SEQ ID NO: 4942 - DNA, 24 bp, Artificial Sequence
  bisulfite treated nucleic acid for analysis of methylation status of SEQ ID NO: 7
atctaaaataactatacgcgatcc

SEQ ID NO: 4943 - DNA, 17 bp, Artificial Sequence
  bisulfite treated nucleic acid for analysis of methylation status of SEQ ID NO: 7
gtcggtggttcgggata

SEQ ID NO: 4944 - DNA, 19 bp, Artificial Sequence
  bisulfite treated nucleic acid for analysis of methylation status of SEQ ID NO: 7
aggaagaaattcggatcgc

SEQ ID NO: 4945 - DNA, 18 bp, Artificial Sequence
  bisulfite treated nucleic acid for analysis of methylation status of SEQ ID NO: 7
ccacctaactacgcgacc

SEQ ID NO: 4946 - DNA, 22 bp, Artificial Sequence
  bisulfite treated nucleic acid for analysis of methylation status of SEQ ID NO: 7
tttagcggtttgtatcgagagt

SEQ ID NO: 4947 - DNA, 22 bp, Artificial Sequence
  bisulfite treated nucleic acid for analysis of methylation status of SEQ ID NO: 7
gtttagcggtttgtatcgagag

SEQ ID NO: 4948 - DNA, 18 bp, Artificial Sequence
  bisulfite treated nucleic acid for analysis of methylation status of SEQ ID NO: 7
cacctaactacgcgaccc

SEQ ID NO: 4949 - DNA, 18 bp, Artificial Sequence
  bisulfite treated nucleic acid for analysis of methylation status of SEQ ID NO: 7
cccacctaactacgcgac

SEQ ID NO: 4950 - DNA, 26 bp, Artificial Sequence
  bisulfite treated nucleic acid for analysis of methylation status of SEQ ID NO: 7
actatcaaaacctataactacgtccg

SEQ ID NO: 4951 - DNA, 18 bp, Artificial Sequence
  bisulfite treated nucleic acid for analysis of methylation status of SEQ ID NO: 7
aagaaattcggatcgcgt

SEQ ID NO: 4952 - DNA, 20 bp, Artificial Sequence
  bisulfite treated nucleic acid for analysis of methylation status of SEQ ID NO: 7
tagtagacgtgttcgcggtc

SEQ ID NO: 4953 - DNA, 22 bp, Artificial Sequence
  bisulfite treated nucleic acid for analysis of methylation status of SEQ ID NO: 44
taatcatacgaaacgcataccc

SEQ ID NO: 4954 - DNA, 20 bp, Artificial Sequence
  bisulfite treated nucleic acid for analysis of methylation status of SEQ ID NO: 44
gtcgtttagggagaaggtcg

SEQ ID NO: 4955 - DNA, 36 bp, Artificial Sequence
  bisulfite treated nucleic acid for analysis of methylation status of SEQ ID NO: 44
gggcgtcgagttttttgttatagtttaggcggaatt

SEQ ID NO: 4956 - DNA, 19 bp, Artificial Sequence
  bisulfite treated nucleic acid for analysis of methylation status of SEQ ID NO: 44
tcgtttagggagaaggtcg

SEQ ID NO: 4957 - DNA, 23 bp, Artificial Sequence
  bisulfite treated nucleic acid for analysis of methylation status of SEQ ID NO: 1
cggttttcgttaatttagtgttg

SEQ ID NO: 4958 - DNA, 22 bp, Artificial Sequence
  bisulfite treated nucleic acid for analysis of methylation status of SEQ ID NO: 1
taaaacgccgataaacttcttt

SEQ ID NO: 4959 - DNA, 30 bp, Artificial Sequence
  bisulfite treated nucleic acid for analysis of methylation status of SEQ ID NO: 1
gtgggcgagattttagcgtatagttgaggg

SEQ ID NO: 4960 - DNA, 22 bp, Artificial Sequence
  bisulfite treated nucleic acid for analysis of methylation status of SEQ ID NO: 1
tatgtttattacggtgaaggcg

SEQ ID NO: 4961 - DNA, 23 bp, Artificial Sequence
  bisulfite treated nucleic acid for analysis of methylation status of SEQ ID NO: 1
caacactaaattaacgaaaaccg

SEQ ID NO: 4962 - DNA, 37 bp, Artificial Sequence
  bisulfite treated nucleic acid for analysis of methylation status of SEQ ID NO: 1
ttcgggattaatatcgagatggatattttgttggtgt

SEQ ID NO: 4963 - DNA, 23 bp, Artificial Sequence
  bisulfite treated nucleic acid for analysis of methylation status of SEQ ID NO: 1
cgtatagttgagggtagatttcg

SEQ ID NO: 4964 - DNA, 22 bp, Artificial Sequence
  bisulfite treated nucleic acid for analysis of methylation status of SEQ ID NO: 1
taaacaaaacgcttaaattccg

SEQ ID NO: 4965 - DNA, 49 bp, Artificial Sequence
  bisulfite treated nucleic acid for analysis of methylation status of SEQ ID NO: 1
gagtatgaaattttttttaaagaagtttatcggcgttttatatttgagg

SEQ ID NO: 4966 - DNA, 23 bp, Artificial Sequence
  bisulfite treated nucleic acid for analysis of methylation status of SEQ ID NO: 1
ataaaacgccgataaacttcttt

SEQ ID NO: 4967 - DNA, 22 bp, Artificial Sequence
  bisulfite treated nucleic acid for analysis of methylation status of SEQ ID NO: 1
tcggttttcgttaatttagtgt

SEQ ID NO: 4968 - DNA, 22 bp, Artificial Sequence
  bisulfite treated nucleic acid for analysis of methylation status of SEQ ID NO: 1
cctcaaatataaaacgccgata

SEQ ID NO: 4969 - DNA, 23 bp, Artificial Sequence
  bisulfite treated nucleic acid for analysis of methylation status of SEQ ID NO: 1
cactaaattaacgaaaaccgaaa

SEQ ID NO: 4970 - DNA, 23 bp, Artificial Sequence
  bisulfite treated nucleic acid for analysis of methylation status of SEQ ID NO: 1
tcggttttcgttaatttagtgtt

SEQ ID NO: 4971 - DNA, 23 bp, Artificial Sequence
  bisulfite treated nucleic acid for analysis of methylation status of SEQ ID NO: 1
ttcggttttcgttaatttagtgt

SEQ ID NO: 4972 - DNA, 24 bp, Artificial Sequence
  bisulfite treated nucleic acid for analysis of methylation status of SEQ ID NO: 1
cggttttcgttaatttagtgttgt

SEQ ID NO: 4973 - DNA, 21 bp, Artificial Sequence
  bisulfite treated nucleic acid for analysis of methylation status of SEQ ID NO: 1
aaaacgccgataaacttcttt

SEQ ID NO: 4974 - DNA, 23 bp, Artificial Sequence
  bisulfite treated nucleic acid for analysis of methylation status of SEQ ID NO: 1
acactaaattaacgaaaaccgaa

SEQ ID NO: 4975 - DNA, 23 bp, Artificial Sequence
  bisulfite treated nucleic acid for analysis of methylation status of SEQ ID NO: 1
aacactaaattaacgaaaaccga

SEQ ID NO: 4976 - DNA, 24 bp, Artificial Sequence
  bisulfite treated nucleic acid for analysis of methylation status of SEQ ID NO: 1
tttcggttttcgttaatttagtgt

SEQ ID NO: 4977 - DNA, 21 bp, Artificial Sequence
  bisulfite treated nucleic acid for analysis of methylation status of SEQ ID NO: 1
atgtttattacggtgaaggcg

SEQ ID NO: 4978 - DNA, 23 bp, Artificial Sequence
  bisulfite treated nucleic acid for analysis of methylation status of SEQ ID NO: 1
ctaaattaacgaaaaccgaaacg

SEQ ID NO: 4979 - DNA, 21 bp, Artificial Sequence
  bisulfite treated nucleic acid for analysis of methylation status of SEQ ID NO: 1
aaacaaaacgcttaaattccg

SEQ ID NO: 4980 - DNA, 22 bp, Artificial Sequence
  bisulfite treated nucleic acid for analysis of methylation status of SEQ ID NO: 1
acgacctcaaatataaaacgcc

SEQ ID NO: 4981 - DNA, 24 bp, Artificial Sequence
  bisulfite treated nucleic acid for analysis of methylation status of SEQ ID NO: 1
tataaaacgccgataaacttcttt

SEQ ID NO: 4982 - DNA, 21 bp, Artificial Sequence
  bisulfite treated nucleic acid for analysis of methylation status of SEQ ID NO: 1
cgacctcaaatataaaacgcc

SEQ ID NO: 4983 - DNA, 23 bp, Artificial Sequence
  bisulfite treated nucleic acid for analysis of methylation status of SEQ ID NO: 1
ataaacaaaacgcttaaattccg

SEQ ID NO: 4984 - DNA, 24 bp, Artificial Sequence
  bisulfite treated nucleic acid for analysis of methylation status of SEQ ID NO: 1
acaacactaaattaacgaaaaccg

SEQ ID NO: 4985 - DNA, 24 bp, Artificial Sequence
  bisulfite treated nucleic acid for analysis of methylation status of SEQ ID NO: 1
ttcggttttcgttaatttagtgtt

SEQ ID NO: 4986 - DNA, 23 bp, Artificial Sequence
  bisulfite treated nucleic acid for analysis of methylation status of SEQ ID NO: 1
gtttcggttttcgttaatttagt

SEQ ID NO: 4987 - DNA, 20 bp, Artificial Sequence
  bisulfite treated nucleic acid for analysis of methylation status of SEQ ID NO: 1
tgtttattacggtgaaggcg

SEQ ID NO: 4988 - DNA, 24 bp, Artificial Sequence
  bisulfite treated nucleic acid for analysis of methylation status of SEQ ID NO: 1
aaatataaaacgccgataaacttc

SEQ ID NO: 4989 - DNA, 23 bp, Artificial Sequence
  bisulfite treated nucleic acid for analysis of methylation status of SEQ ID NO: 1
gtatgtttattacggtgaaggcg

SEQ ID NO: 4990 - DNA, 22 bp, Artificial Sequence
  bisulfite treated nucleic acid for analysis of methylation status of SEQ ID NO: 1
actaaattaacgaaaaccgaaa

SEQ ID NO: 4991 - DNA, 22 bp, Artificial Sequence
  bisulfite treated nucleic acid for analysis of methylation status of SEQ ID NO: 1
cggttttcgttaatttagtgtt

SEQ ID NO: 4992 - DNA, 20 bp, Artificial Sequence
  bisulfite treated nucleic acid for analysis of methylation status of SEQ ID NO: 1
cggaggagttggtatttcgt

SEQ ID NO: 4993 - DNA, 22 bp, Artificial Sequence
  bisulfite treated nucleic acid for analysis of methylation status of SEQ ID NO: 1
cgccttcaccgtaataaacata

SEQ ID NO: 4994 - DNA, 37 bp, Artificial Sequence
  bisulfite treated nucleic acid for analysis of methylation status of SEQ ID NO: 1
tttggatcgttttcggttttttaggataaatacgagt

SEQ ID NO: 4995 - DNA, 25 bp, Artificial Sequence
  bisulfite treated nucleic acid for analysis of methylation status of SEQ ID NO: 1
aatataaaacgccgataaacttctt

SEQ ID NO: 4996 - DNA, 25 bp, Artificial Sequence
  bisulfite treated nucleic acid for analysis of methylation status of SEQ ID NO: 1
atataaaacgccgataaacttcttt

SEQ ID NO: 4997 - DNA, 24 bp, Artificial Sequence
  bisulfite treated nucleic acid for analysis of methylation status of SEQ ID NO: 1
cgagtatgtttattacggtgaagg

SEQ ID NO: 4998 - DNA, 21 bp, Artificial Sequence
  bisulfite treated nucleic acid for analysis of methylation status of SEQ ID NO: 1
acctcaaatataaaacgccga

SEQ ID NO: 4999 - DNA, 19 bp, Artificial Sequence
  bisulfite treated nucleic acid for analysis of methylation status of SEQ ID NO: 1
atgtcgtttttagtcgcgg

SEQ ID NO: 5000 - DNA, 22 bp, Artificial Sequence
  bisulfite treated nucleic acid for analysis of methylation status of SEQ ID NO: 1
cgcaaaaataaacaattacacg

SEQ ID NO: 5001 - DNA, 38 bp, Artificial Sequence
  bisulfite treated nucleic acid for analysis of methylation status of SEQ ID NO: 1
ggcgggtagagtttttggagcgcgtggattttatgcga

SEQ ID NO: 5002 - DNA, 22 bp, Artificial Sequence
  bisulfite treated nucleic acid for analysis of methylation status of SEQ ID NO: 1
tttcggttttcgttaatttagt

SEQ ID NO: 5003 - DNA, 24 bp, Artificial Sequence
  bisulfite treated nucleic acid for analysis of methylation status of SEQ ID NO: 1
acgagtatgtttattacggtgaag

SEQ ID NO: 5004 - DNA, 20 bp, Artificial Sequence
  bisulfite treated nucleic acid for analysis of methylation status of SEQ ID NO: 1
taacgtgggcgagattttag

SEQ ID NO: 5005 - DNA, 24 bp, Artificial Sequence
  bisulfite treated nucleic acid for analysis of methylation status of SEQ ID NO: 1
ttccgaaatactaataaacgacct

SEQ ID NO: 5006 - DNA, 20 bp, Artificial Sequence
  bisulfite treated nucleic acid for analysis of methylation status of SEQ ID NO: 1
atataaaaccgcgacatcca

SEQ ID NO: 5007 - DNA, 22 bp, Artificial Sequence
  bisulfite treated nucleic acid for analysis of methylation status of SEQ ID NO: 1
ggagagcgtagttagttcgttt

SEQ ID NO: 5008 - DNA, 49 bp, Artificial Sequence
  bisulfite treated nucleic acid for analysis of methylation status of SEQ ID NO: 1
agtacgattttgttggaagaattgatagtgttttcgttttcggtttcgg

SEQ ID NO: 5009 - DNA, 21 bp, Artificial Sequence
  bisulfite treated nucleic acid for analysis of methylation status of SEQ ID NO: 1
gggagagcgtagttagttcgt

SEQ ID NO: 5010 - DNA, 23 bp, Artificial Sequence
  bisulfite treated nucleic acid for analysis of methylation status of SEQ ID NO: 1
ttaacatctcgtctcttaaaccg

SEQ ID NO: 5011 - DNA, 20 bp, Artificial Sequence
  bisulfite treated nucleic acid for analysis of methylation status of SEQ ID NO: 1
ttatttcggtgttggtttcg

SEQ ID NO: 5012 - DNA, 33 bp, Artificial Sequence
  bisulfite treated nucleic acid for analysis of methylation status of SEQ ID NO: 1
atcgtggtgggtatgttcgtgtttattttgagg

SEQ ID NO: 5013 - DNA, 21 bp, Artificial Sequence
  bisulfite treated nucleic acid for analysis of methylation status of SEQ ID NO: 1
tataaaaccgcgacatccaac

SEQ ID NO: 5014 - DNA, 22 bp, Artificial Sequence
  bisulfite treated nucleic acid for analysis of methylation status of SEQ ID NO: 1
acatctcgtctcttaaaccgct

SEQ ID NO: 5015 - DNA, 21 bp, Artificial Sequence
  bisulfite treated nucleic acid for analysis of methylation status of SEQ ID NO: 1
catctcgtctcttaaaccgct

SEQ ID NO: 5016 - DNA, 21 bp, Artificial Sequence
  bisulfite treated nucleic acid for analysis of methylation status of SEQ ID NO: 1
tttatttcggtgttggtttcg

SEQ ID NO: 5017 - DNA, 22 bp, Artificial Sequence
  bisulfite treated nucleic acid for analysis of methylation status of SEQ ID NO: 1
taacatctcgtctcttaaaccg

SEQ ID NO: 5018 - DNA, 22 bp, Artificial Sequence
  bisulfite treated nucleic acid for analysis of methylation status of SEQ ID NO: 1
aacatctcgtctcttaaaccgc

SEQ ID NO: 5019 - DNA, 20 bp, Artificial Sequence
  bisulfite treated nucleic acid for analysis of methylation status of SEQ ID NO: 1
tataaaaccgcgacatccaa

SEQ ID NO: 5020 - DNA, 24 bp, Artificial Sequence
  bisulfite treated nucleic acid for analysis of methylation status of SEQ ID NO: 1
attaacatctcgtctcttaaaccg

SEQ ID NO: 5021 - DNA, 22 bp, Artificial Sequence
  bisulfite treated nucleic acid for analysis of methylation status of SEQ ID NO: 1
taacgtaaacgaaatcctaacg

SEQ ID NO: 5022 - DNA, 20 bp, Artificial Sequence
  bisulfite treated nucleic acid for analysis of methylation status of SEQ ID NO: 1
cgaagtgttgatgagcgatt

SEQ ID NO: 5023 - DNA, 34 bp, Artificial Sequence
  bisulfite treated nucleic acid for analysis of methylation status of SEQ ID NO: 1
agtgtgagacgtcggtgaatttttttagaaagga

SEQ ID NO: 5024 - DNA, 20 bp, Artificial Sequence
  bisulfite treated nucleic acid for analysis of methylation status of SEQ ID NO: 1
ataaaaccgcgacatccaac

SEQ ID NO: 5025 - DNA, 21 bp, Artificial Sequence
  bisulfite treated nucleic acid for analysis of methylation status of SEQ ID NO: 1
atataaaaccgcgacatccaa

SEQ ID NO: 5026 - DNA, 23 bp, Artificial Sequence
  bisulfite treated nucleic acid for analysis of methylation status of SEQ ID NO: 1
gagagcgtagttagttcgttttt

SEQ ID NO: 5027 - DNA, 22 bp, Artificial Sequence
  bisulfite treated nucleic acid for analysis of methylation status of SEQ ID NO: 1
acgtaaacgaaatcctaacgta

SEQ ID NO: 5028 - DNA, 20 bp, Artificial Sequence
  bisulfite treated nucleic acid for analysis of methylation status of SEQ ID NO: 1
tcgaagtgttgatgagcgat

SEQ ID NO: 5029 - DNA, 34 bp, Artificial Sequence
  bisulfite treated nucleic acid for analysis of methylation status of SEQ ID NO: 1
aagtgtgagacgtcggtgaatttttttagaaagg

SEQ ID NO: 5030 - DNA, 19 bp, Artificial Sequence
  bisulfite treated nucleic acid for analysis of methylation status of SEQ ID NO: 1
tatttcggtgttggtttcg

SEQ ID NO: 5031 - DNA, 23 bp, Artificial Sequence
  bisulfite treated nucleic acid for analysis of methylation status of SEQ ID NO: 1
aacgtaaacgaaatcctaacgta

SEQ ID NO: 5032 - DNA, 19 bp, Artificial Sequence
  bisulfite treated nucleic acid for analysis of methylation status of SEQ ID NO: 1
ataaaaccgcgacatccaa

SEQ ID NO: 5033 - DNA, 22 bp, Artificial Sequence
  bisulfite treated nucleic acid for analysis of methylation status of SEQ ID NO: 1
aaaaattaaaatacgtcccgat

SEQ ID NO: 5034 - DNA, 25 bp, Artificial Sequence
  bisulfite treated nucleic acid for analysis of methylation status of SEQ ID NO: 1
tttagttgtacgttaggatttcgtt

SEQ ID NO: 5035 - DNA, 42 bp, Artificial Sequence
  bisulfite treated nucleic acid for analysis of methylation status of SEQ ID NO: 1
tacgttaatttcgtatagtaaaaatagtattgggttggcgga

SEQ ID NO: 5036 - DNA, 25 bp, Artificial Sequence
  bisulfite treated nucleic acid for analysis of methylation status of SEQ ID NO: 1
ttagttgtacgttaggatttcgttt

SEQ ID NO: 5037 - DNA, 23 bp, Artificial Sequence
  bisulfite treated nucleic acid for analysis of methylation status of SEQ ID NO: 1
cgtaaacgaaatcctaacgtaca

SEQ ID NO: 5038 - DNA, 19 bp, Artificial Sequence
  bisulfite treated nucleic acid for analysis of methylation status of SEQ ID NO: 1
tcgaagtgttgatgagcga

SEQ ID NO: 5039 - DNA, 24 bp, Artificial Sequence
  bisulfite treated nucleic acid for analysis of methylation status of SEQ ID NO: 1
tagttgtacgttaggatttcgttt

SEQ ID NO: 5040 - DNA, 19 bp, Artificial Sequence
  bisulfite treated nucleic acid for analysis of methylation status of SEQ ID NO: 1
taaaaccgcgacatccaac

SEQ ID NO: 5041 - DNA, 22 bp, Artificial Sequence
  bisulfite treated nucleic acid for analysis of methylation status of SEQ ID NO: 1
taaaaattaaaatacgtcccga

SEQ ID NO: 5042 - DNA, 21 bp, Artificial Sequence
  bisulfite treated nucleic acid for analysis of methylation status of SEQ ID NO: 1
aacgtaaacgaaatcctaacg

SEQ ID NO: 5043 - DNA, 18 bp, Artificial Sequence
  bisulfite treated nucleic acid for analysis of methylation status of SEQ ID NO: 1
taaaaccgcgacatccaa

SEQ ID NO: 5044 - DNA, 22 bp, Artificial Sequence
  bisulfite treated nucleic acid for analysis of methylation status of SEQ ID NO: 2
taagataggattagcgtttcgg

SEQ ID NO: 5045 - DNA, 22 bp, Artificial Sequence
  nucleic acid for analysis of methylation status of SEQ ID NO: 2
acttaaatacaaccgccgactt

SEQ ID NO: 5046 - DNA, 25 bp, Artificial Sequence
  bisulfite treated nucleic acid for analysis of methylation status of SEQ ID NO: 2
tgttggtggaaggtcgagtcgggga

SEQ ID NO: 5047 - DNA, 22 bp, Artificial Sequence
  bisulfite treated nucleic acid for analysis of methylation status of SEQ ID NO: 2
aagataggattagcgtttcggt

SEQ ID NO: 5048 - DNA, 21 bp, Artificial Sequence
  bisulfite treated nucleic acid for analysis of methylation status of SEQ ID NO: 2
cttaaatacaaccgccgactt

SEQ ID NO: 5049 - DNA, 22 bp, Artificial Sequence
  bisulfite treated nucleic acid for analysis of methylation status of SEQ ID NO: 2
ataggattagcgtttcggtagg

SEQ ID NO: 5050 - DNA, 22 bp, Artificial Sequence
  bisulfite treated nucleic acid for analysis of methylation status of SEQ ID NO: 2
gataggattagcgtttcggtag

SEQ ID NO: 5051 - DNA, 21 bp, Artificial Sequence
  bisulfite treated nucleic acid for analysis of methylation status of SEQ ID NO: 2
taaatacaaccgccgacttct

SEQ ID NO: 5052 - DNA, 23 bp, Artificial Sequence
  bisulfite treated nucleic acid for analysis of methylation status of SEQ ID NO: 2
agataggattagcgtttcggtag

SEQ ID NO: 5053 - DNA, 21 bp, Artificial Sequence
  bisulfite treated nucleic acid for analysis of methylation status of SEQ ID NO: 2
ttaaatacaaccgccgacttc

SEQ ID NO: 5054 - DNA, 21 bp, Artificial Sequence
  bisulfite treated nucleic acid for analysis of methylation status of SEQ ID NO: 2
taggattagcgtttcggtagg

SEQ ID NO: 5055 - DNA, 23 bp, Artificial Sequence
  bisulfite treated nucleic acid for analysis of methylation status of SEQ ID NO: 2
ttaagataggattagcgtttcgg

SEQ ID NO: 5056 - DNA, 20 bp, Artificial Sequence
  bisulfite treated nucleic acid for analysis of methylation status of SEQ ID NO: 2
aaatacaaccgccgacttct

SEQ ID NO: 5057 - DNA, 24 bp, Artificial Sequence
  bisulfite treated nucleic acid for analysis of methylation status of SEQ ID NO: 2
tgagacgtttatattgatttttcg

SEQ ID NO: 5058 - DNA, 22 bp, Artificial Sequence
  bisulfite treated nucleic acid for analysis of methylation status of SEQ ID NO: 2
cgctaataccgacaccaaatac

SEQ ID NO: 5059 - DNA, 33 bp, Artificial Sequence
  bisulfite treated nucleic acid for analysis of methylation status of SEQ ID NO: 2
aagtgttttaggcgggtagtttttgtttcgcgt

SEQ ID NO: 5060 - DNA, 20 bp, Artificial Sequence
  bisulfite treated nucleic acid for analysis of methylation status of SEQ ID NO: 2
aggattagcgtttcggtagg

SEQ ID NO: 5061 - DNA, 22 bp, Artificial Sequence
  bisulfite treated nucleic acid for analysis of methylation status of SEQ ID NO: 2
cgatcaaacctaaaccacgata

SEQ ID NO: 5062 - DNA, 22 bp, Artificial Sequence
  bisulfite treated nucleic acid for analysis of methylation status of SEQ ID NO: 2
aggtacgttaagttaggcgagt

SEQ ID NO: 5063 - DNA, 35 bp, Artificial Sequence
  bisulfite treated nucleic acid for analysis of methylation status of SEQ ID NO: 2
ttatttaggtgttgatcgcgtagggattattgagt

SEQ ID NO: 5064 - DNA, 22 bp, Artificial Sequence
  bisulfite treated nucleic acid for analysis of methylation status of SEQ ID NO: 2
acgatcaaacctaaaccacgat

SEQ ID NO: 5065 - DNA, 23 bp, Artificial Sequence
  bisulfite treated nucleic acid for analysis of methylation status of SEQ ID NO: 2
ggtacgttaagttaggcgagtag

SEQ ID NO: 5066 - DNA, 22 bp, Artificial Sequence
  bisulfite treated nucleic acid for analysis of methylation status of SEQ ID NO: 45
tgttagacgtgaatgataacgc

SEQ ID NO: 5067 - DNA, 22 bp, Artificial Sequence
  bisulfite treated nucleic acid for analysis of methylation status of SEQ ID NO: 45
atctaaaacgcgcacaatactc

SEQ ID NO: 5068 - DNA, 30 bp, Artificial Sequence
  bisulfite treated nucleic acid for analysis of methylation status of SEQ ID NO: 45
aacgatatcgcggagttgtaggtgtcgcgt

SEQ ID NO: 5069 - DNA, 21 bp, Artificial Sequence
  bisulfite treated nucleic acid for analysis of methylation status of SEQ ID NO: 45
aacggggttatttacgttttg

SEQ ID NO: 5070 - DNA, 22 bp, Artificial Sequence
  bisulfite treated nucleic acid for analysis of methylation status of SEQ ID NO: 45
gcgttatcattcacgtctaaca

SEQ ID NO: 5071 - DNA, 29 bp, Artificial Sequence
  nucleic acid for analysis of methylation status of SEQ ID NO: 45
tttggagagtaacgttacggtgagggtga

SEQ ID NO: 5072 - DNA, 21 bp, Artificial Sequence
  bisulfite treated nucleic acid for analysis of methylation status of SEQ ID NO: 45
gccgaaatcgctatctaaaac

SEQ ID NO: 5073 - DNA, 21 bp, Artificial Sequence
  bisulfite treated nucleic acid for analysis of methylation status of SEQ ID NO: 45
gggttatttacgttttgcgtt

SEQ ID NO: 5074 - DNA, 21 bp, Artificial Sequence
  bisulfite treated nucleic acid for analysis of methylation status of SEQ ID NO: 45
tctaaaacgcgcacaatactc

SEQ ID NO: 5075 - DNA, 22 bp, Artificial Sequence
  bisulfite treated nucleic acid for analysis of methylation status of SEQ ID NO: 45
ctatctaaaacgcgcacaatac

SEQ ID NO: 5076 - DNA, 22 bp, Artificial Sequence
  bisulfite treated nucleic acid for analysis of methylation status of SEQ ID NO: 45
tatctaaaacgcgcacaatact

SEQ ID NO: 5077 - DNA, 22 bp, Artificial Sequence
  bisulfite treated nucleic acid for analysis of methylation status of SEQ ID NO: 45
ggcgacggtattaagtttttag

SEQ ID NO: 5078 - DNA, 22 bp, Artificial Sequence
  bisulfite treated nucleic acid for analysis of methylation status of SEQ ID NO: 45
caaaacaatcaacacgaacgta

SEQ ID NO: 5079 - DNA, 38 bp, Artificial Sequence
  bisulfite treated nucleic acid for analysis of methylation status of SEQ ID NO: 45
tggttatttagaaggttttggatcgcgagtaatagaat

SEQ ID NO: 5080 - DNA, 22 bp, Artificial Sequence
  bisulfite treated nucleic acid for analysis of methylation status of SEQ ID NO: 45
gagtattgtgcgcgttttagat

SEQ ID NO: 5081 - DNA, 21 bp, Artificial Sequence
  bisulfite treated nucleic acid for analysis of methylation status of SEQ ID NO: 45
aaataatcgtcgttaccgtcc

SEQ ID NO: 5082 - DNA, 26 bp, Artificial Sequence
  bisulfite treated nucleic acid for analysis of methylation status of SEQ ID NO: 45
gatttcggcgagagcgggcgttttat

SEQ ID NO: 5083 - DNA, 22 bp, Artificial Sequence
  bisulfite treated nucleic acid for analysis of methylation status of SEQ ID NO: 45
tcgttgggtatagtggttatcg

SEQ ID NO: 5084 - DNA, 22 bp, Artificial Sequence
  bisulfite treated nucleic acid for analysis of methylation status of SEQ ID NO: 45
tcacacgaattaaaccgatctt

SEQ ID NO: 5085 - DNA, 33 bp, Artificial Sequence
  bisulfite treated nucleic acid for analysis of methylation status of SEQ ID NO: 45
gtttgatcgcgtgcgggagtttttttttatcga

SEQ ID NO: 5086 - DNA, 22 bp, Artificial Sequence
  bisulfite treated nucleic acid for analysis of methylation status of SEQ ID NO: 45
ttcacacgaattaaaccgatct

SEQ ID NO: 5087 - DNA, 22 bp, Artificial Sequence
  bisulfite treated nucleic acid for analysis of methylation status of SEQ ID NO: 45
cgagaatgggtttcgtatttat

SEQ ID NO: 5088 - DNA, 22 bp, Artificial Sequence
  bisulfite treated nucleic acid for analysis of methylation status of SEQ ID NO: 45
ctaaaaacttaataccgtcgcc

SEQ ID NO: 5089 - DNA, 28 bp, Artificial Sequence
  bisulfite treated nucleic acid for analysis of methylation status of SEQ ID NO: 45
tacgcgcgacgattacggtttttttgga

SEQ ID NO: 5090 - DNA, 22 bp, Artificial Sequence
  bisulfite treated nucleic acid for analysis of methylation status of SEQ ID NO: 45
gctatctaaaacgcgcacaata

SEQ ID NO: 5091 - DNA, 23 bp, Artificial Sequence
  bisulfite treated nucleic acid for analysis of methylation status of SEQ ID NO: 45
tcaaacaaataatcgtcgttacc

SEQ ID NO: 5092 - DNA, 32 bp, Artificial Sequence
  bisulfite treated nucleic acid for analysis of methylation status of SEQ ID NO: 45
ggcgagagcgggcgttttatttacgagatcgt

SEQ ID NO: 5093 - DNA, 22 bp, Artificial Sequence
  bisulfite treated nucleic acid for analysis of methylation status of SEQ ID NO: 45
tgaattttacgaacggggttat

SEQ ID NO: 5094 - DNA, 22 bp, Artificial Sequence
  bisulfite treated nucleic acid for analysis of methylation status of SEQ ID NO: 45
gttactctccaaatacgcgaac

SEQ ID NO: 5095 - DNA, 40 bp, Artificial Sequence
  bisulfite treated nucleic acid for analysis of methylation status of SEQ ID NO: 45
tacgttttgcgtttttttaatttcgagtagattaaggttt

SEQ ID NO: 5096 - DNA, 22 bp, Artificial Sequence
  bisulfite treated nucleic acid for analysis of methylation status of SEQ ID NO: 45
tttcgaggcgttattttatttg

SEQ ID NO: 5097 - DNA, 21 bp, Artificial Sequence
  bisulfite treated nucleic acid for analysis of methylation status of SEQ ID NO: 45
acgcgatcaaacacgtaacta

SEQ ID NO: 5098 - DNA, 35 bp, Artificial Sequence
  bisulfite treated nucleic acid for analysis of methylation status of SEQ ID NO: 45
ggtatagtggttatcgatttgaacgttatcgacgt

SEQ ID NO: 5099 - DNA, 22 bp, Artificial Sequence
  bisulfite treated nucleic acid for analysis of methylation status of SEQ ID NO: 45
gaacggggttatttacgttttg

SEQ ID NO: 5100 - DNA, 21 bp, Artificial Sequence
  bisulfite treated nucleic acid for analysis of methylation status of SEQ ID NO: 45
aaatggatatttcggagaacg

SEQ ID NO: 5101 - DNA, 22 bp, Artificial Sequence
  bisulfite treated nucleic acid for analysis of methylation status of SEQ ID NO: 45
cgcgtaaacaaataaatacgaa

SEQ ID NO: 5102 - DNA, 49 bp, Artificial Sequence
  bisulfite treated nucleic acid for analysis of methylation status of SEQ ID NO: 45
ttcgttttttttttattagcgtatatgatttcgacgtcggcgagaatgg

SEQ ID NO: 5103 - DNA, 21 bp, Artificial Sequence
  bisulfite treated nucleic acid for analysis of methylation status of SEQ ID NO: 45
gaattttacgaacggggttat

SEQ ID NO: 5104 - DNA, 22 bp, Artificial Sequence
  bisulfite treated nucleic acid for analysis of methylation status of SEQ ID NO: 45
ggttttcgaggcgttattttat

SEQ ID NO: 5105 - DNA, 22 bp, Artificial Sequence
  bisulfite treated nucleic acid for analysis of methylation status of SEQ ID NO: 45
cgcgatcaaacacgtaactact

SEQ ID NO: 5106 - DNA, 22 bp, Artificial Sequence
  bisulfite treated nucleic acid for analysis of methylation status of SEQ ID NO: 45
cggcgacgtgtttatttatatt

SEQ ID NO: 5107 - DNA, 21 bp, Artificial Sequence
  bisulfite treated nucleic acid for analysis of methylation status of SEQ ID NO: 45
ttactctccaaatacgcgaac

SEQ ID NO: 5108 - DNA, 33 bp, Artificial Sequence
  bisulfite treated nucleic acid for analysis of methylation status of SEQ ID NO: 45
ttttacgaacggggttatttacgttttgcgttt

SEQ ID NO: 5109 - DNA, 22 bp, Artificial Sequence
  bisulfite treated nucleic acid for analysis of methylation status of SEQ ID NO: 45
caaacaaataatcgtcgttacc

SEQ ID NO: 5110 - DNA, 20 bp, Artificial Sequence
  bisulfite treated nucleic acid for analysis of methylation status of SEQ ID NO: 45
taaaacgcgcacaatactca

SEQ ID NO: 5111 - DNA, 21 bp, Artificial Sequence
  bisulfite treated nucleic acid for analysis of methylation status of SEQ ID NO: 45
tttattattcgttcggtgagc

SEQ ID NO: 5112 - DNA, 22 bp, Artificial Sequence
  bisulfite treated nucleic acid for analysis of methylation status of SEQ ID NO: 45
ctcaaaatcacgataaacgaca

SEQ ID NO: 5113 - DNA, 39 bp, Artificial Sequence
  bisulfite treated nucleic acid for analysis of methylation status of SEQ ID NO: 45
tacgggtgaatggcgagtagtattattgggatatgtcgt

SEQ ID NO: 5114 - DNA, 21 bp, Artificial Sequence
  bisulfite treated nucleic acid for analysis of methylation status of SEQ ID NO: 45
cgaaatcgctatctaaaacgc

SEQ ID NO: 5115 - DNA, 21 bp, Artificial Sequence
  bisulfite treated nucleic acid for analysis of methylation status of SEQ ID NO: 45
ctaaaacgcgcacaatactca

SEQ ID NO: 5116 - DNA, 21 bp, Artificial Sequence
  bisulfite treated nucleic acid for analysis of methylation status of SEQ ID NO: 45
ataatgcgtcgtttatcggtt

SEQ ID NO: 5117 - DNA, 22 bp, Artificial Sequence
  bisulfite treated nucleic acid for analysis of methylation status of SEQ ID NO: 45
ccgacactacaactatccgttc

SEQ ID NO: 5118 - DNA, 28 bp, Artificial Sequence
  bisulfite treated nucleic acid for analysis of methylation status of SEQ ID NO: 45
ggtgcgggttattgatcgggattttggt

SEQ ID NO: 5119 - DNA, 22 bp, Artificial Sequence
  bisulfite treated nucleic acid for analysis of methylation status of SEQ ID NO: 45
gtattgtgcgcgttttagatag

SEQ ID NO: 5120 - DNA, 22 bp, Artificial Sequence
  bisulfite treated nucleic acid for analysis of methylation status of SEQ ID NO: 45
agtattgtgcgcgttttagata

SEQ ID NO: 5121 - DNA, 22 bp, Artificial Sequence
  bisulfite treated nucleic acid for analysis of methylation status of SEQ ID NO: 45
tcaaaatcacgataaacgacaa

SEQ ID NO: 5122 - DNA, 30 bp, Artificial Sequence
  bisulfite treated nucleic acid for analysis of methylation status of SEQ ID NO: 45
ttttttcgagggggtattacgggtgaatgg

SEQ ID NO: 5123 - DNA, 22 bp, Artificial Sequence
  bisulfite treated nucleic acid for analysis of methylation status of SEQ ID NO: 45
gcgcgtaaacaaataaatacga

SEQ ID NO: 5124 - DNA, 21 bp, Artificial Sequence
  bisulfite treated nucleic acid for analysis of methylation status of SEQ ID NO: 45
ataatcgtcgttaccgtccac

SEQ ID NO: 5125 - DNA, 22 bp, Artificial Sequence
  bisulfite treated nucleic acid for analysis of methylation status of SEQ ID NO: 45
gaacggatagttgtagtgtcgg

SEQ ID NO: 5126 - DNA, 22 bp, Artificial Sequence
  bisulfite treated nucleic acid for analysis of methylation status of SEQ ID NO: 45
cgatcaatcaccaccgtataaa

SEQ ID NO: 5127 - DNA, 42 bp, Artificial Sequence
  bisulfite treated nucleic acid for analysis of methylation status of SEQ ID NO: 45
gttcgggggtttcgttttttttaagtttgaggagaattacga

SEQ ID NO: 5128 - DNA, 22 bp, Artificial Sequence
  bisulfite treated nucleic acid for analysis of methylation status of SEQ ID NO: 45
acgtgttttaggtgtacgagaa

SEQ ID NO: 5129 - DNA, 21 bp, Artificial Sequence
  bisulfite treated nucleic acid for analysis of methylation status of SEQ ID NO: 45
ataccgttctaacccaaatcg

SEQ ID NO: 5130 - DNA, 39 bp, Artificial Sequence
  bisulfite treated nucleic acid for analysis of methylation status of SEQ ID NO: 45
aatatttcgggagagtatttgggttttgtgttcgtttag

SEQ ID NO: 5131 - DNA, 21 bp, Artificial Sequence
  bisulfite treated nucleic acid for analysis of methylation status of SEQ ID NO: 45
cgataccgttctaacccaaat

SEQ ID NO: 5132 - DNA, 22 bp, Artificial Sequence
  bisulfite treated nucleic acid for analysis of methylation status of SEQ ID NO: 45
tattgtgcgcgttttagatagc

SEQ ID NO: 5133 - DNA, 27 bp, Artificial Sequence
  bisulfite treated nucleic acid for analysis of methylation status of SEQ ID NO: 45
atttcggcgagagcgggcgttttattt

SEQ ID NO: 5134 - DNA, 20 bp, Artificial Sequence
  bisulfite treated nucleic acid for analysis of methylation status of SEQ ID NO: 45
acgttacggtgagggtgata

SEQ ID NO: 5135 - DNA, 21 bp, Artificial Sequence
  bisulfite treated nucleic acid for analysis of methylation status of SEQ ID NO: 45
cgttgggtatagtggttatcg

SEQ ID NO: 5136 - DNA, 23 bp, Artificial Sequence
  bisulfite treated nucleic acid for analysis of methylation status of SEQ ID NO: 45
tctaaaaacttaataccgtcgcc

SEQ ID NO: 5137 - DNA, 20 bp, Artificial Sequence
  bisulfite treated nucleic acid for analysis of methylation status of SEQ ID NO: 45
ttgtgaattttacgaacggg

SEQ ID NO: 5138 - DNA, 40 bp, Artificial Sequence
  bisulfite treated nucleic acid for analysis of methylation status of SEQ ID NO: 45
tttacgttttgcgtttttttaatttcgagtagattaaggt

SEQ ID NO: 5139 - DNA, 21 bp, Artificial Sequence
  bisulfite treated nucleic acid for analysis of methylation status of SEQ ID NO: 45
cgaggcgttattttatttggt

SEQ ID NO: 5140 - DNA, 21 bp, Artificial Sequence
  bisulfite treated nucleic acid for analysis of methylation status of SEQ ID NO: 45
atatcgcggagttgtaggtgt

SEQ ID NO: 5141 - DNA, 24 bp, Artificial Sequence
  bisulfite treated nucleic acid for analysis of methylation status of SEQ ID NO: 45
agcgatttcggcgagagcgggcgt

SEQ ID NO: 5142 - DNA, 22 bp, Artificial Sequence
  bisulfite treated nucleic acid for analysis of methylation status of SEQ ID NO: 45
gttttcgaggcgttattttatt

SEQ ID NO: 5143 - DNA, 22 bp, Artificial Sequence
  bisulfite treated nucleic acid for analysis of methylation status of SEQ ID NO: 45
cgcgttatcattcacgtctaac

SEQ ID NO: 5144 - DNA, 22 bp, Artificial Sequence
  bisulfite treated nucleic acid for analysis of methylation status of SEQ ID NO: 45
tagttgtttttcgaggtgttcg

SEQ ID NO: 5145 - DNA, 21 bp, Artificial Sequence
  bisulfite treated nucleic acid for analysis of methylation status of SEQ ID NO: 45
acgttctccgaaatatccatt

SEQ ID NO: 5146 - DNA, 40 bp, Artificial Sequence
  bisulfite treated nucleic acid for analysis of methylation status of SEQ ID NO: 45
aaggtagagatttaggatattaacgataacgcgttttttt

SEQ ID NO: 5147 - DNA, 22 bp, Artificial Sequence
  bisulfite treated nucleic acid for analysis of methylation status of SEQ ID NO: 45
caaaatcacgataaacgacaac

SEQ ID NO: 5148 - DNA, 21 bp, Artificial Sequence
  bisulfite treated nucleic acid for analysis of methylation status of SEQ ID NO: 45
tgtttttcgaggtgttcgtta

SEQ ID NO: 5149 - DNA, 22 bp, Artificial Sequence
  bisulfite treated nucleic acid for analysis of methylation status of SEQ ID NO: 45
ggcgacgtgtttatttatattt

SEQ ID NO: 5150 - DNA, 21 bp, Artificial Sequence
  bisulfite treated nucleic acid for analysis of methylation status of SEQ ID NO: 45
tatacggtggtgattgatcgt

SEQ ID NO: 5151 - DNA, 22 bp, Artificial Sequence
  bisulfite treated nucleic acid for analysis of methylation status of SEQ ID NO: 45
cgaattatcgttctcgtctaaa

SEQ ID NO: 5152 - DNA, 20 bp, Artificial Sequence
  bisulfite treated nucleic acid for analysis of methylation status of SEQ ID NO: 45
gtggcgcgggacgggggttt

SEQ ID NO: 5153 - DNA, 21 bp, Artificial Sequence
  bisulfite treated nucleic acid for analysis of methylation status of SEQ ID NO: 45
gatctcgtaaataaaacgccc

SEQ ID NO: 5154 - DNA, 35 bp, Artificial Sequence
  bisulfite treated nucleic acid for analysis of methylation status of SEQ ID NO: 45
ggttatttggtgagtattgtgcgcgttttagatag

SEQ ID NO: 5155 - DNA, 20 bp, Artificial Sequence
  bisulfite treated nucleic acid for analysis of methylation status of SEQ ID NO: 45
taatgcgtcgtttatcggtt

SEQ ID NO: 5156 - DNA, 21 bp, Artificial Sequence
  bisulfite treated nucleic acid for analysis of methylation status of SEQ ID NO: 45
aacgatcaatcaccaccgtat

SEQ ID NO: 5157 - DNA, 20 bp, Artificial Sequence
  bisulfite treated nucleic acid for analysis of methylation status of SEQ ID NO: 45
gtgaattttacgaacggggt

SEQ ID NO: 5158 - DNA, 22 bp, Artificial Sequence
  bisulfite treated nucleic acid for analysis of methylation status of SEQ ID NO: 45
gtgagtattgtgcgcgttttag

SEQ ID NO: 5159 - DNA, 23 bp, Artificial Sequence
  bisulfite treated nucleic acid for analysis of methylation status of SEQ ID NO: 45
tcgatctcaaacaaataatcgtc

SEQ ID NO: 5160 - DNA, 22 bp, Artificial Sequence
  bisulfite treated nucleic acid for analysis of methylation status of SEQ ID NO: 45
ttatacggtggtgattgatcgt

SEQ ID NO: 5161 - DNA, 20 bp, Artificial Sequence
  bisulfite treated nucleic acid for analysis of methylation status of SEQ ID NO: 45
cgcgatcaaacacgtaacta

SEQ ID NO: 5162 - DNA, 20 bp, Artificial Sequence
  bisulfite treated nucleic acid for analysis of methylation status of SEQ ID NO: 45
acgatcaatcaccaccgtat

SEQ ID NO: 5163 - DNA, 21 bp, Artificial Sequence
  bisulfite treated nucleic acid for analysis of methylation status of SEQ ID NO: 45
cgcgttatcattcacgtctaa

SEQ ID NO: 5164 - DNA, 20 bp, Artificial Sequence
  bisulfite treated nucleic acid for analysis of methylation status of SEQ ID NO: 45
taatcgtcgttaccgtccac

SEQ ID NO: 5165 - DNA, 23 bp, Artificial Sequence
  bisulfite treated nucleic acid for analysis of methylation status of SEQ ID NO: 45
cgacactacaactatccgttctt

SEQ ID NO: 5166 - DNA, 22 bp, Artificial Sequence
  bisulfite treated nucleic acid for analysis of methylation status of SEQ ID NO: 45
tatacggtggtgattgatcgtt

SEQ ID NO: 5167 - DNA, 23 bp, Artificial Sequence
  bisulfite treated nucleic acid for analysis of methylation status of SEQ ID NO: 45
acgaattatcgttctcgtctaaa

SEQ ID NO: 5168 - DNA, 21 bp, Artificial Sequence
  bisulfite treated nucleic acid for analysis of methylation status of SEQ ID NO: 45
ggttatttacgttttgcgttt

SEQ ID NO: 5169 - DNA, 22 bp, Artificial Sequence
  bisulfite treated nucleic acid for analysis of methylation status of SEQ ID NO: 45
aatcacgataaacgacaacgac

SEQ ID NO: 5170 - DNA, 24 bp, Artificial Sequence
  bisulfite treated nucleic acid for analysis of methylation status of SEQ ID NO: 45
ttacgtgttttaggtgtacgagaa

SEQ ID NO: 5171 - DNA, 20 bp, Artificial Sequence
  bisulfite treated nucleic acid for analysis of methylation status of SEQ ID NO: 45
tgagtattgtgcgcgtttta

SEQ ID NO: 5172 - DNA, 24 bp, Artificial Sequence
  bisulfite treated nucleic acid for analysis of methylation status of SEQ ID NO: 45
aaaacaatcaacacgaacgtataa

SEQ ID NO: 5173 - DNA, 22 bp, Artificial Sequence
  bisulfite treated nucleic acid for analysis of methylation status of SEQ ID NO: 45
acggatagttgtagtgtcgggt

SEQ ID NO: 5174 - DNA, 22 bp, Artificial Sequence
  bisulfite treated nucleic acid for analysis of methylation status of SEQ ID NO: 45
acgatcaatcaccaccgtataa

SEQ ID NO: 5175 - DNA, 22 bp, Artificial Sequence
  bisulfite treated nucleic acid for analysis of methylation status of SEQ ID NO: 45
aaaatcacgataaacgacaacg

SEQ ID NO: 5176 - DNA, 22 bp, Artificial Sequence
  bisulfite treated nucleic acid for analysis of methylation status of SEQ ID NO: 45
gcgacggtattaagtttttaga

SEQ ID NO: 5177 - DNA, 22 bp, Artificial Sequence
  bisulfite treated nucleic acid for analysis of methylation status of SEQ ID NO: 45
acgtttcgttgggtatagtggt

SEQ ID NO: 5178 - DNA, 33 bp, Artificial Sequence
  bisulfite treated nucleic acid for analysis of methylation status of SEQ ID NO: 45
aacgttatcgacgtcgatgaaggttttaatggt

SEQ ID NO: 5179 - DNA, 22 bp, Artificial Sequence
  bisulfite treated nucleic acid for analysis of methylation status of SEQ ID NO: 45
ttgtttttcgaggtgttcgtta

SEQ ID NO: 5180 - DNA, 21 bp, Artificial Sequence
  bisulfite treated nucleic acid for analysis of methylation status of SEQ ID NO: 45
cacacgaattaaaccgatctt

SEQ ID NO: 5181 - DNA, 22 bp, Artificial Sequence
  bisulfite treated nucleic acid for analysis of methylation status of SEQ ID NO: 45
cgatctcaaacaaataatcgtc

SEQ ID NO: 5182 - DNA, 22 bp, Artificial Sequence
  bisulfite treated nucleic acid for analysis of methylation status of SEQ ID NO: 45
gataccgttctaacccaaatcg

SEQ ID NO: 5183 - DNA, 24 bp, Artificial Sequence
  bisulfite treated nucleic acid for analysis of methylation status of SEQ ID NO: 45
cgtaaacaaataaatacgaaaccc

SEQ ID NO: 5184 - DNA, 23 bp, Artificial Sequence
  bisulfite treated nucleic acid for analysis of methylation status of SEQ ID NO: 45
aagaacggatagttgtagtgtcg

SEQ ID NO: 5185 - DNA, 21 bp, Artificial Sequence
  bisulfite treated nucleic acid for analysis of methylation status of SEQ ID NO: 45
cgatcaatcaccaccgtataa

SEQ ID NO: 5186 - DNA, 19 bp, Artificial Sequence
  bisulfite treated nucleic acid for analysis of methylation status of SEQ ID NO: 45
aaaacgcgcacaatactca

SEQ ID NO: 5187 - DNA, 21 bp, Artificial Sequence
  bisulfite treated nucleic acid for analysis of methylation status of SEQ ID NO: 45
cggatagttgtagtgtcgggt

SEQ ID NO: 5188 - DNA, 22 bp, Artificial Sequence
  bisulfite treated nucleic acid for analysis of methylation status of SEQ ID NO: 45
tcgaggcgttattttatttggt

SEQ ID NO: 5189 - DNA, 23 bp, Artificial Sequence
  bisulfite treated nucleic acid for analysis of methylation status of SEQ ID NO: 45
ctatctaaaacgcgcacaatact

SEQ ID NO: 5190 - DNA, 22 bp, Artificial Sequence
  bisulfite treated nucleic acid for analysis of methylation status of SEQ ID NO: 45
gattgacgtgtaggttcgagat

SEQ ID NO: 5191 - DNA, 19 bp, Artificial Sequence
  bisulfite treated nucleic acid for analysis of methylation status of SEQ ID NO: 45
aaaaacgacctcgctcaac

SEQ ID NO: 5192 - DNA, 35 bp, Artificial Sequence
  bisulfite treated nucleic acid for analysis of methylation status of SEQ ID NO: 45
aacgataatgcgtcgtttatcggtttcgttttcgt

SEQ ID NO: 5193 - DNA, 20 bp, Artificial Sequence
  bisulfite treated nucleic acid for analysis of methylation status of SEQ ID NO: 45
tatcgcggagttgtaggtgt

SEQ ID NO: 5194 - DNA, 23 bp, Artificial Sequence
  bisulfite treated nucleic acid for analysis of methylation status of SEQ ID NO: 45
gcgatcaaacacgtaactactaa

SEQ ID NO: 5195 - DNA, 21 bp, Artificial Sequence
  bisulfite treated nucleic acid for analysis of methylation status of SEQ ID NO: 45
cgtttcgttgggtatagtggt

SEQ ID NO: 5196 - DNA, 23 bp, Artificial Sequence
  bisulfite treated nucleic acid for analysis of methylation status of SEQ ID NO: 45
gatctcaaacaaataatcgtcgt

SEQ ID NO: 5197 - DNA, 38 bp, Artificial Sequence
  bisulfite treated nucleic acid for analysis of methylation status of SEQ ID NO: 45
agcgggcgttttatttacgagatcgtggacggtaacga

SEQ ID NO: 5198 - DNA, 21 bp, Artificial Sequence
  bisulfite treated nucleic acid for analysis of methylation status of SEQ ID NO: 45
ttcgaggcgttattttatttg

SEQ ID NO: 5199 - DNA, 21 bp, Artificial Sequence
  bisulfite treated nucleic acid for analysis of methylation status of SEQ ID NO: 45
aaatcacgataaacgacaacg

SEQ ID NO: 5200 - DNA, 24 bp, Artificial Sequence
  bisulfite treated nucleic acid for analysis of methylation status of SEQ ID NO: 45
gcgtaaacaaataaatacgaaacc

SEQ ID NO: 5201 - DNA, 23 bp, Artificial Sequence
  bisulfite treated nucleic acid for analysis of methylation status of SEQ ID NO: 45
tacgtgttttaggtgtacgagaa

SEQ ID NO: 5202 - DNA, 22 bp, Artificial Sequence
  bisulfite treated nucleic acid for analysis of methylation status of SEQ ID NO: 45
acccgacactacaactatccgt

SEQ ID NO: 5203 - DNA, 23 bp, Artificial Sequence
  bisulfite treated nucleic acid for analysis of methylation status of SEQ ID NO: 45
aaacaatcaacacgaacgtataa

SEQ ID NO: 5204 - DNA, 22 bp, Artificial Sequence
  bisulfite treated nucleic acid for analysis of methylation status of SEQ ID NO: 45
acgttacggtgagggtgatagt

SEQ ID NO: 5205 - DNA, 21 bp, Artificial Sequence
  bisulfite treated nucleic acid for analysis of methylation status of SEQ ID NO: 45
gttacgcgacacctacaactc

SEQ ID NO: 5206 - DNA, 33 bp, Artificial Sequence
  bisulfite treated nucleic acid for analysis of methylation status of SEQ ID NO: 45
aacgcgttagtgatcgtgttttttacgttgtag

SEQ ID NO: 5207 - DNA, 21 bp, Artificial Sequence
  bisulfite treated nucleic acid for analysis of methylation status of SEQ ID NO: 45
atcacgataaacgacaacgac

SEQ ID NO: 5208 - DNA, 21 bp, Artificial Sequence
  bisulfite treated nucleic acid for analysis of methylation status of SEQ ID NO: 45
attgtgcgcgttttagatagc

SEQ ID NO: 5209 - DNA, 23 bp, Artificial Sequence
  bisulfite treated nucleic acid for analysis of methylation status of SEQ ID NO: 45
cttcacacgaattaaaccgatct

SEQ ID NO: 5210 - DNA, 21 bp, Artificial Sequence
  bisulfite treated nucleic acid for analysis of methylation status of SEQ ID NO: 45
atccaacgaacgatcaatcac

SEQ ID NO: 5211 - DNA, 20 bp, Artificial Sequence
  bisulfite treated nucleic acid for analysis of methylation status of SEQ ID NO: 45
gtggcgagtttttacgtttc

SEQ ID NO: 5212 - DNA, 22 bp, Artificial Sequence
  bisulfite treated nucleic acid for analysis of methylation status of SEQ ID NO: 45
cgataaccactatacccaacga

SEQ ID NO: 5213 - DNA, 38 bp, Artificial Sequence
  bisulfite treated nucleic acid for analysis of methylation status of SEQ ID NO: 45
aaggtgattgattttaacgataatagttcggttttcga

SEQ ID NO: 5214 - DNA, 22 bp, Artificial Sequence
  bisulfite treated nucleic acid for analysis of methylation status of SEQ ID NO: 45
tcgataaccactatacccaacg

SEQ ID NO: 5215 - DNA, 20 bp, Artificial Sequence
  bisulfite treated nucleic acid for analysis of methylation status of SEQ ID NO: 45
ggggttatttacgttttgcg

SEQ ID NO: 5216 - DNA, 20 bp, Artificial Sequence
  bisulfite treated nucleic acid for analysis of methylation status of SEQ ID NO: 45
cggggttatttacgttttgc

SEQ ID NO: 5217 - DNA, 20 bp, Artificial Sequence
  bisulfite treated nucleic acid for analysis of methylation status of SEQ ID NO: 45
acggggttatttacgttttg

SEQ ID NO: 5218 - DNA, 24 bp, Artificial Sequence
  bisulfite treated nucleic acid for analysis of methylation status of SEQ ID NO: 45
ctcaaacaaataatcgtcgttacc

SEQ ID NO: 5219 - DNA, 21 bp, Artificial Sequence
  bisulfite treated nucleic acid for analysis of methylation status of SEQ ID NO: 45
cccgacactacaactatccgt

SEQ ID NO: 5220 - DNA, 21 bp, Artificial Sequence
  bisulfite treated nucleic acid for analysis of methylation status of SEQ ID NO: 45
cgttacggtgagggtgatagt

SEQ ID NO: 5221 - DNA, 21 bp, Artificial Sequence
  bisulfite treated nucleic acid for analysis of methylation status of SEQ ID NO: 45
gttgtttttcgaggtgttcgt

SEQ ID NO: 5222 - DNA, 23 bp, Artificial Sequence
  bisulfite treated nucleic acid for analysis of methylation status of SEQ ID NO: 45
cgagaatgggtttcgtatttatt

SEQ ID NO: 5223 - DNA, 23 bp, Artificial Sequence
  bisulfite treated nucleic acid for analysis of methylation status of SEQ ID NO: 45
ttctaaaaacttaataccgtcgc

SEQ ID NO: 5224 - DNA, 22 bp, Artificial Sequence
  bisulfite treated nucleic acid for analysis of methylation status of SEQ ID NO: 45
agaacggatagttgtagtgtcg

SEQ ID NO: 5225 - DNA, 23 bp, Artificial Sequence
  bisulfite treated nucleic acid for analysis of methylation status of SEQ ID NO: 45
actcaaaatcacgataaacgaca

SEQ ID NO: 5226 - DNA, 21 bp, Artificial Sequence
  bisulfite treated nucleic acid for analysis of methylation status of SEQ ID NO: 45
agttgtttttcgaggtgttcg

SEQ ID NO: 5227 - DNA, 20 bp, Artificial Sequence
  bisulfite treated nucleic acid for analysis of methylation status of SEQ ID NO: 45
gcgaaacttaacgtccaatc

SEQ ID NO: 5228 - DNA, 33 bp, Artificial Sequence
  bisulfite treated nucleic acid for analysis of methylation status of SEQ ID NO: 45
atttatttgtttacgcgcgacgattacggtttt

SEQ ID NO: 5229 - DNA, 23 bp, Artificial Sequence
  bisulfite treated nucleic acid for analysis of methylation status of SEQ ID NO: 45
gtgttagacgtgaatgataacgc

SEQ ID NO: 5230 - DNA, 19 bp, Artificial Sequence
  bisulfite treated nucleic acid for analysis of methylation status of SEQ ID NO: 45
atgcgtcgtttatcggttt

SEQ ID NO: 5231 - DNA, 19 bp, Artificial Sequence
  bisulfite treated nucleic acid for analysis of methylation status of SEQ ID NO: 45
aatgcgtcgtttatcggtt

SEQ ID NO: 5232 - DNA, 20 bp, Artificial Sequence
  bisulfite treated nucleic acid for analysis of methylation status of SEQ ID NO: 45
cggcgacggtattaagtttt

SEQ ID NO: 5233 - DNA, 20 bp, Artificial Sequence
  bisulfite treated nucleic acid for analysis of methylation status of SEQ ID NO: 45
taccgttctaacccaaatcg

SEQ ID NO: 5234 - DNA, 23 bp, Artificial Sequence
  bisulfite treated nucleic acid for analysis of methylation status of SEQ ID NO: 45
tttacgtgttttaggtgtacgag

SEQ ID NO: 5235 - DNA, 21 bp, Artificial Sequence
  bisulfite treated nucleic acid for analysis of methylation status of SEQ ID NO: 45
cgttctaacccaaatcgaaat

SEQ ID NO: 5236 - DNA, 39 bp, Artificial Sequence
  bisulfite treated nucleic acid for analysis of methylation status of SEQ ID NO: 45
ataatatttcgggagagtatttgggttttgtgttcgttt

SEQ ID NO: 5237 - DNA, 21 bp, Artificial Sequence
  bisulfite treated nucleic acid for analysis of methylation status of SEQ ID NO: 45
atacggtggtgattgatcgtt

SEQ ID NO: 5238 - DNA, 20 bp, Artificial Sequence
  bisulfite treated nucleic acid for analysis of methylation status of SEQ ID NO: 45
cgaaacttaacgtccaatcc

SEQ ID NO: 5239 - DNA, 20 bp, Artificial Sequence
  bisulfite treated nucleic acid for analysis of methylation status of SEQ ID NO: 45
aataatcgtcgttaccgtcc

SEQ ID NO: 5240 - DNA, 23 bp, Artificial Sequence
  bisulfite treated nucleic acid for analysis of methylation status of SEQ ID NO: 45
cgttatcattcacgtctaacact

SEQ ID NO: 5241 - DNA, 19 bp, Artificial Sequence
  bisulfite treated nucleic acid for analysis of methylation status of SEQ ID NO: 45
aatcgtcgttaccgtccac

SEQ ID NO: 5242 - DNA, 22 bp, Artificial Sequence
  bisulfite treated nucleic acid for analysis of methylation status of SEQ ID NO: 45
tacgtgttttaggtgtacgaga

SEQ ID NO: 5243 - DNA, 39 bp, Artificial Sequence
  bisulfite treated nucleic acid for analysis of methylation status of SEQ ID NO: 45
taatatttcgggagagtatttgggttttgtgttcgttta

SEQ ID NO: 5244 - DNA, 21 bp, Artificial Sequence
  bisulfite treated nucleic acid for analysis of methylation status of SEQ ID NO: 45
aacggatagttgtagtgtcgg

SEQ ID NO: 5245 - DNA, 23 bp, Artificial Sequence
  bisulfite treated nucleic acid for analysis of methylation status of SEQ ID NO: 45
ttttcgaggcgttattttatttg

SEQ ID NO: 5246 - DNA, 19 bp, Artificial Sequence
  bisulfite treated nucleic acid for analysis of methylation status of SEQ ID NO: 45
tgtgaattttacgaacggg

SEQ ID NO: 5247 - DNA, 21 bp, Artificial Sequence
  bisulfite treated nucleic acid for analysis of methylation status of SEQ ID NO: 45
acgttacggtgagggtgatag

SEQ ID NO: 5248 - DNA, 20 bp, Artificial Sequence
  bisulfite treated nucleic acid for analysis of methylation status of SEQ ID NO: 45
gtaaataaaacgcccgctct

SEQ ID NO: 5249 - DNA, 20 bp, Artificial Sequence
  bisulfite treated nucleic acid for analysis of methylation status of SEQ ID NO: 45
ggtggcgagtttttacgttt

SEQ ID NO: 5250 - DNA, 20 bp, Artificial Sequence
  bisulfite treated nucleic acid for analysis of methylation status of SEQ ID NO: 45
gtggtgattgatcgttcgtt

SEQ ID NO: 5251 - DNA, 20 bp, Artificial Sequence
  bisulfite treated nucleic acid for analysis of methylation status of SEQ ID NO: 45
acacctacaactccgcgata

SEQ ID NO: 5252 - DNA, 24 bp, Artificial Sequence
  bisulfite treated nucleic acid for analysis of methylation status of SEQ ID NO: 45
taagaacggatagttgtagtgtcg

SEQ ID NO: 5253 - DNA, 22 bp, Artificial Sequence
  bisulfite treated nucleic acid for analysis of methylation status of SEQ ID NO: 45
atctcaaacaaataatcgtcgt

SEQ ID NO: 5254 - DNA, 19 bp, Artificial Sequence
  bisulfite treated nucleic acid for analysis of methylation status of SEQ ID NO: 45
gacggtggcgagtttttac

SEQ ID NO: 5255 - DNA, 20 bp, Artificial Sequence
  bisulfite treated nucleic acid for analysis of methylation status of SEQ ID NO: 45
cgttacggtgagggtgatag

SEQ ID NO: 5256 - DNA, 23 bp, Artificial Sequence
  bisulfite treated nucleic acid for analysis of methylation status of SEQ ID NO: 45
attatacgttcgtgttgattgtt

SEQ ID NO: 5257 - DNA, 22 bp, Artificial Sequence
  bisulfite treated nucleic acid for analysis of methylation status of SEQ ID NO: 45
ataaaataacgcctcgaaaacc

SEQ ID NO: 5258 - DNA, 32 bp, Artificial Sequence
  bisulfite treated nucleic acid for analysis of methylation status of SEQ ID NO: 45
gacggtggcgagtttttacgtttcgttatcgt

SEQ ID NO: 5259 - DNA, 20 bp, Artificial Sequence
  bisulfite treated nucleic acid for analysis of methylation status of SEQ ID NO: 45
tccaacgaacgatcaatcac

SEQ ID NO: 5260 - DNA, 19 bp, Artificial Sequence
  bisulfite treated nucleic acid for analysis of methylation status of SEQ ID NO: 45
cgccgaaatcgctatctaa

SEQ ID NO: 5261 - DNA, 19 bp, Artificial Sequence
  bisulfite treated nucleic acid for analysis of methylation status of SEQ ID NO: 45
atcgcggagttgtaggtgt

SEQ ID NO: 5262 - DNA, 23 bp, Artificial Sequence
  bisulfite treated nucleic acid for analysis of methylation status of SEQ ID NO: 45
ttttacgtgttttaggtgtacga

SEQ ID NO: 5263 - DNA, 22 bp, Artificial Sequence
  bisulfite treated nucleic acid for analysis of methylation status of SEQ ID NO: 45
cgttctaacccaaatcgaaatc

SEQ ID NO: 5264 - DNA, 19 bp, Artificial Sequence
  bisulfite treated nucleic acid for analysis of methylation status of SEQ ID NO: 45
gcgagaatgggtttcgtat

SEQ ID NO: 5265 - DNA, 20 bp, Artificial Sequence
  bisulfite treated nucleic acid for analysis of methylation status of SEQ ID NO: 45
aatggatatttcggagaacg

SEQ ID NO: 5266 - DNA, 22 bp, Artificial Sequence
  bisulfite treated nucleic acid for analysis of methylation status of SEQ ID NO: 45
cctcgaaaaccgaactattatc

SEQ ID NO: 5267 - DNA, 40 bp, Artificial Sequence
  bisulfite treated nucleic acid for analysis of methylation status of SEQ ID NO: 45
tttcgttatcgtatagattaacgtgaaggtgattgatttt

SEQ ID NO: 5268 - DNA, 19 bp, Artificial Sequence
  bisulfite treated nucleic acid for analysis of methylation status of SEQ ID NO: 45
aacgaacgatcaatcacca

SEQ ID NO: 5269 - DNA, 19 bp, Artificial Sequence
  bisulfite treated nucleic acid for analysis of methylation status of SEQ ID NO: 45
ccaacgaacgatcaatcac

SEQ ID NO: 5270 - DNA, 19 bp, Artificial Sequence
  bisulfite treated nucleic acid for analysis of methylation status of SEQ ID NO: 45
caacgaacgatcaatcacc

SEQ ID NO: 5271 - DNA, 20 bp, Artificial Sequence
  bisulfite treated nucleic acid for analysis of methylation status of SEQ ID NO: 45
aacgaacgatcaatcaccac

SEQ ID NO: 5272 - DNA, 24 bp, Artificial Sequence
  bisulfite treated nucleic acid for analysis of methylation status of SEQ ID NO: 45
attctaaaaacttaataccgtcgc

SEQ ID NO: 5273 - DNA, 20 bp, Artificial Sequence
  bisulfite treated nucleic acid for analysis of methylation status of SEQ ID NO: 45
ttgtgcgcgttttagatagc

SEQ ID NO: 5274 - DNA, 19 bp, Artificial Sequence
  bisulfite treated nucleic acid for analysis of methylation status of SEQ ID NO: 45
ggtggcgagtttttacgtt

SEQ ID NO: 5275 - DNA, 41 bp, Artificial Sequence
  bisulfite treated nucleic acid for analysis of methylation status of SEQ ID NO: 45
gttatcgtatagattaacgtgaaggtgattgattttaacga

SEQ ID NO: 5276 - DNA, 22 bp, Artificial Sequence
  nucleic acid for analysis of methylation status of SEQ ID NO: 45
cgtgttttaggtgtacgagaat

SEQ ID NO: 5277 - DNA, 39 bp, Artificial Sequence
  bisulfite treated nucleic acid for analysis of methylation status of SEQ ID NO: 45
atatttcgggagagtatttgggttttgtgttcgtttagg

SEQ ID NO: 5278 - DNA, 19 bp, Artificial Sequence
  bisulfite treated nucleic acid for analysis of methylation status of SEQ ID NO: 45
cgtcgtttatcggtttcgt

SEQ ID NO: 5279 - DNA, 19 bp, Artificial Sequence
  bisulfite treated nucleic acid for analysis of methylation status of SEQ ID NO: 45
cgggattttggtaagaacg

SEQ ID NO: 5280 - DNA, 18 bp, Artificial Sequence
  bisulfite treated nucleic acid for analysis of methylation status of SEQ ID NO: 45
acgcgcacaatactcacc

SEQ ID NO: 5281 - DNA, 20 bp, Artificial Sequence
  bisulfite treated nucleic acid for analysis of methylation status of SEQ ID NO: 45
gtggacgtagatagcgggtt

SEQ ID NO: 5282 - DNA, 21 bp, Artificial Sequence
  bisulfite treated nucleic acid for analysis of methylation status of SEQ ID NO: 45
taacgaacacctcgaaaaaca

SEQ ID NO: 5283 - DNA, 36 bp, Artificial Sequence
  bisulfite treated nucleic acid for analysis of methylation status of SEQ ID NO: 45
gatcgcgagtttttgtgtcgttataatgttaagtgt

SEQ ID NO: 5284 - DNA, 21 bp, Artificial Sequence
  bisulfite treated nucleic acid for analysis of methylation status of SEQ ID NO: 45
cgtgttttaggtgtacgagaa

SEQ ID NO: 5285 - DNA, 19 bp, Artificial Sequence
  bisulfite treated nucleic acid for analysis of methylation status of SEQ ID NO: 45
tgtgcgcgttttagatagc

SEQ ID NO: 5286 - DNA, 21 bp, Artificial Sequence
  bisulfite treated nucleic acid for analysis of methylation status of SEQ ID NO: 45
gtgattgatcgttcgttggat

SEQ ID NO: 5287 - DNA, 21 bp, Artificial Sequence
  bisulfite treated nucleic acid for analysis of methylation status of SEQ ID NO: 45
gttagacgtgaatgataacgc

SEQ ID NO: 5288 - DNA, 20 bp, Artificial Sequence
  bisulfite treated nucleic acid for analysis of methylation status of SEQ ID NO: 45
tacggtggtgattgatcgtt

SEQ ID NO: 5289 - DNA, 19 bp, Artificial Sequence
  bisulfite treated nucleic acid for analysis of methylation status of SEQ ID NO: 45
cgttacggtgagggtgata

SEQ ID NO: 5290 - DNA, 20 bp, Artificial Sequence
  bisulfite treated nucleic acid for analysis of methylation status of SEQ ID NO: 45
gccgaaatcgctatctaaaa

SEQ ID NO: 5291 - DNA, 19 bp, Artificial Sequence
  bisulfite treated nucleic acid for analysis of methylation status of SEQ ID NO: 45
gtacgaatctcgccgctaa

SEQ ID NO: 5292 - DNA, 22 bp, Artificial Sequence
  bisulfite treated nucleic acid for analysis of methylation status of SEQ ID NO: 45
gtacgaaaactcttctccatcg

SEQ ID NO: 5293 - DNA, 22 bp, Artificial Sequence
  bisulfite treated nucleic acid for analysis of methylation status of SEQ ID NO: 45
tcgggtttgtacgttaattttt

SEQ ID NO: 5294 - DNA, 35 bp, Artificial Sequence
  bisulfite treated nucleic acid for analysis of methylation status of SEQ ID NO: 45
gattgttttttatacggattaggtcggttttgggg

SEQ ID NO: 5295 - DNA, 22 bp, Artificial Sequence
  bisulfite treated nucleic acid for analysis of methylation status of SEQ ID NO: 45
ttcgggtttgtacgttaatttt

SEQ ID NO: 5296 - DNA, 22 bp, Artificial Sequence
  bisulfite treated nucleic acid for analysis of methylation status of SEQ ID NO: 45
caccgtacaaatcaacgtaaaa

SEQ ID NO: 5297 - DNA, 22 bp, Artificial Sequence
  bisulfite treated nucleic acid for analysis of methylation status of SEQ ID NO: 45
gattattgtatttagcggagcg

SEQ ID NO: 5298 - DNA, 29 bp, Artificial Sequence
  bisulfite treated nucleic acid for analysis of methylation status of SEQ ID NO: 45
tttcgaagatcgggttgttgtcgttggag

SEQ ID NO: 5299 - DNA, 22 bp, Artificial Sequence
  bisulfite treated nucleic acid for analysis of methylation status of SEQ ID NO: 45
ttattgtatttagcggagcgtt

SEQ ID NO: 5300 - DNA, 22 bp, Artificial Sequence
  bisulfite treated nucleic acid for analysis of methylation status of SEQ ID NO: 45
taataaacactatacgcgccct

SEQ ID NO: 5301 - DNA, 22 bp, Artificial Sequence
  bisulfite treated nucleic acid for analysis of methylation status of SEQ ID NO: 45
ttaaataggtggtcgtcgttgt

SEQ ID NO: 5302 - DNA, 35 bp, Artificial Sequence
  bisulfite treated nucleic acid for analysis of methylation status of SEQ ID NO: 45
ttcgtaggtgagacgttcgttttcgtcgaagtcgt

SEQ ID NO: 5303 - DNA, 22 bp, Artificial Sequence
  bisulfite treated nucleic acid for analysis of methylation status of SEQ ID NO: 45
ataaacactatacgcgccctaa

SEQ ID NO: 5304 - DNA, 22 bp, Artificial Sequence
  bisulfite treated nucleic acid for analysis of methylation status of SEQ ID NO: 45
accctaaacgataacgaacctc

SEQ ID NO: 5305 - DNA, 44 bp, Artificial Sequence
  bisulfite treated nucleic acid for analysis of methylation status of SEQ ID NO: 45
gtcgttggagttaattatttttacgttgatttgtacggtggcgg

SEQ ID NO: 5306 - DNA, 22 bp, Artificial Sequence
  bisulfite treated nucleic acid for analysis of methylation status of SEQ ID NO: 45
taaataggtggtcgtcgttgtc

SEQ ID NO: 5307 - DNA, 22 bp, Artificial Sequence
  bisulfite treated nucleic acid for analysis of methylation status of SEQ ID NO: 45
aataaacactatacgcgcccta

SEQ ID NO: 5308 - DNA, 22 bp, Artificial Sequence
  bisulfite treated nucleic acid for analysis of methylation status of SEQ ID NO: 45
ctaataaacactatacgcgccc

SEQ ID NO: 5309 - DNA, 22 bp, Artificial Sequence
  bisulfite treated nucleic acid for analysis of methylation status of SEQ ID NO: 45
taccctaaacgataacgaacct

SEQ ID NO: 5310 - DNA, 22 bp, Artificial Sequence
  bisulfite treated nucleic acid for analysis of methylation status of SEQ ID NO: 45
tattgtatttagcggagcgttt

SEQ ID NO: 5311 - DNA, 22 bp, Artificial Sequence
  bisulfite treated nucleic acid for analysis of methylation status of SEQ ID NO: 45
attattgtatttagcggagcgt

SEQ ID NO: 5312 - DNA, 22 bp, Artificial Sequence
  bisulfite treated nucleic acid for analysis of methylation status of SEQ ID NO: 45
ggtttcgggtttgtacgttaat

SEQ ID NO: 5313 - DNA, 21 bp, Artificial Sequence
  bisulfite treated nucleic acid for analysis of methylation status of SEQ ID NO: 45
ccctaaacgataacgaacctc

SEQ ID NO: 5314 - DNA, 21 bp, Artificial Sequence
  bisulfite treated nucleic acid for analysis of methylation status of SEQ ID NO: 45
ttaaataggtggtcgtcgttg

SEQ ID NO: 5315 - DNA, 22 bp, Artificial Sequence
  bisulfite treated nucleic acid for analysis of methylation status of SEQ ID NO: 45
ctaaacgataacgaacctccac

SEQ ID NO: 5316 - DNA, 23 bp, Artificial Sequence
  bisulfite treated nucleic acid for analysis of methylation status of SEQ ID NO: 45
tcgatgattattgtatttagcgg

SEQ ID NO: 5317 - DNA, 22 bp, Artificial Sequence
  bisulfite treated nucleic acid for analysis of methylation status of SEQ ID NO: 45
taaacactatacgcgccctaaa

SEQ ID NO: 5318 - DNA, 22 bp, Artificial Sequence
  bisulfite treated nucleic acid for analysis of methylation status of SEQ ID NO: 45
ataatcgtactccccacgctac

SEQ ID NO: 5319 - DNA, 22 bp, Artificial Sequence
  bisulfite treated nucleic acid for analysis of methylation status of SEQ ID NO: 45
gggcgcgtatagtgtttattag

SEQ ID NO: 5320 - DNA, 29 bp, Artificial Sequence
  bisulfite treated nucleic acid for analysis of methylation status of SEQ ID NO: 45
agcgttgcgcggtatttgtagtttcgcgg

SEQ ID NO: 5321 - DNA, 22 bp, Artificial Sequence
  bisulfite treated nucleic acid for analysis of methylation status of SEQ ID NO: 45
tagggcgcgtatagtgtttatt

SEQ ID NO: 5322 - DNA, 21 bp, Artificial Sequence
  bisulfite treated nucleic acid for analysis of methylation status of SEQ ID NO: 45
ccaccgtacaaatcaacgtaa

SEQ ID NO: 5323 - DNA, 22 bp, Artificial Sequence
  bisulfite treated nucleic acid for analysis of methylation status of SEQ ID NO: 45
aacgccacgataaaaataacaa

SEQ ID NO: 5324 - DNA, 22 bp, Artificial Sequence
  bisulfite treated nucleic acid for analysis of methylation status of SEQ ID NO: 45
tttagggcgcgtatagtgttta

SEQ ID NO: 5325 - DNA, 27 bp, Artificial Sequence
  bisulfite treated nucleic acid for analysis of methylation status of SEQ ID NO: 45
tgtcgttttgtagcgtggggagtacga

SEQ ID NO: 5326 - DNA, 21 bp, Artificial Sequence
  bisulfite treated nucleic acid for analysis of methylation status of SEQ ID NO: 45
atcacgatcaaactcatcgac

SEQ ID NO: 5327 - DNA, 22 bp, Artificial Sequence
  bisulfite treated nucleic acid for analysis of methylation status of SEQ ID NO: 45
gttagtgattcgtattagggcg

SEQ ID NO: 5328 - DNA, 38 bp, Artificial Sequence
  bisulfite treated nucleic acid for analysis of methylation status of SEQ ID NO: 45
ttcgtttagcgttttttggcgtacggagacgaaatcga

SEQ ID NO: 5329 - DNA, 22 bp, Artificial Sequence
  nucleic acid for analysis of methylation status of SEQ ID NO: 45
accgtacaaatcaacgtaaaaa

SEQ ID NO: 5330 - DNA, 21 bp, Artificial Sequence
  bisulfite treated nucleic acid for analysis of methylation status of SEQ ID NO: 45
aaacaacgccacgataaaaat

SEQ ID NO: 5331 - DNA, 22 bp, Artificial Sequence
  bisulfite treated nucleic acid for analysis of methylation status of SEQ ID NO: 45
cgatgattattgtatttagcgg

SEQ ID NO: 5332 - DNA, 22 bp, Artificial Sequence
  bisulfite treated nucleic acid for analysis of methylation status of SEQ ID NO: 45
cggttagtgattcgtattaggg

SEQ ID NO: 5333 - DNA, 22 bp, Artificial Sequence
  bisulfite treated nucleic acid for analysis of methylation status of SEQ ID NO: 45
ataataactaaccgcccgctaa

SEQ ID NO: 5334 - DNA, 22 bp, Artificial Sequence
  bisulfite treated nucleic acid for analysis of methylation status of SEQ ID NO: 45
ggttgtcgttttcgtttagaat

SEQ ID NO: 5335 - DNA, 28 bp, Artificial Sequence
  bisulfite treated nucleic acid for analysis of methylation status of SEQ ID NO: 45
tgatcgcgaacgatttggtggagttgag

SEQ ID NO: 5336 - DNA, 22 bp, Artificial Sequence
  bisulfite treated nucleic acid for analysis of methylation status of SEQ ID NO: 45
aaaacaacgccacgataaaaat

SEQ ID NO: 5337 - DNA, 21 bp, Artificial Sequence
  bisulfite treated nucleic acid for analysis of methylation status of SEQ ID NO: 45
aacactatacgcgccctaaac

SEQ ID NO: 5338 - DNA, 23 bp, Artificial Sequence
  bisulfite treated nucleic acid for analysis of methylation status of SEQ ID NO: 45
cgggtttgtacgttaatttttag

SEQ ID NO: 5339 - DNA, 23 bp, Artificial Sequence
  bisulfite treated nucleic acid for analysis of methylation status of SEQ ID NO: 45
tttcgggtttgtacgttaatttt

SEQ ID NO: 5340 - DNA, 21 bp, Artificial Sequence
  bisulfite treated nucleic acid for analysis of methylation status of SEQ ID NO: 45
gttgtttagggcgcgtatagt

SEQ ID NO: 5341 - DNA, 22 bp, Artificial Sequence
  bisulfite treated nucleic acid for analysis of methylation status of SEQ ID NO: 45
aacaacgccacgataaaaataa

SEQ ID NO: 5342 - DNA, 21 bp, Artificial Sequence
  bisulfite treated nucleic acid for analysis of methylation status of SEQ ID NO: 45
gtttagggcgcgtatagtgtt

SEQ ID NO: 5343 - DNA, 21 bp, Artificial Sequence
  bisulfite treated nucleic acid for analysis of methylation status of SEQ ID NO: 45
aaacgctccgctaaatacaat

SEQ ID NO: 5344 - DNA, 22 bp, Artificial Sequence
  bisulfite treated nucleic acid for analysis of methylation status of SEQ ID NO: 45
tcgatggagaagagttttcgta

SEQ ID NO: 5345 - DNA, 26 bp, Artificial Sequence
  bisulfite treated nucleic acid for analysis of methylation status of SEQ ID NO: 45
ggcgtcggtggcgtttagatcgatga

SEQ ID NO: 5346 - DNA, 21 bp, Artificial Sequence
  bisulfite treated nucleic acid for analysis of methylation status of SEQ ID NO: 45
ttagggcgcgtatagtgttta

SEQ ID NO: 5347 - DNA, 21 bp, Artificial Sequence
  bisulfite treated nucleic acid for analysis of methylation status of SEQ ID NO: 45
aaataggtggtcgtcgttgtc

SEQ ID NO: 5348 - DNA, 22 bp, Artificial Sequence
  bisulfite treated nucleic acid for analysis of methylation status of SEQ ID NO: 45
ccgtacaaatcaacgtaaaaat

SEQ ID NO: 5349 - DNA, 22 bp, Artificial Sequence
  bisulfite treated nucleic acid for analysis of methylation status of SEQ ID NO: 45
acgaaaactcttctccatcgac

SEQ ID NO: 5350 - DNA, 39 bp, Artificial Sequence
  bisulfite treated nucleic acid for analysis of methylation status of SEQ ID NO: 45
agtttagattgttttttatacggattaggtcggttttgg

SEQ ID NO: 5351 - DNA, 21 bp, Artificial Sequence
  bisulfite treated nucleic acid for analysis of methylation status of SEQ ID NO: 45
attgtatttagcggagcgttt

SEQ ID NO: 5352 - DNA, 20 bp, Artificial Sequence
  bisulfite treated nucleic acid for analysis of methylation status of SEQ ID NO: 45
caataatcgtactccccacg

SEQ ID NO: 5353 - DNA, 22 bp, Artificial Sequence
  bisulfite treated nucleic acid for analysis of methylation status of SEQ ID NO: 45
ttagggcgcgtatagtgtttat

SEQ ID NO: 5354 - DNA, 21 bp, Artificial Sequence
  bisulfite treated nucleic acid for analysis of methylation status of SEQ ID NO: 45
ctaaacgataacgaacctcca

SEQ ID NO: 5355 - DNA, 20 bp, Artificial Sequence
  bisulfite treated nucleic acid for analysis of methylation status of SEQ ID NO: 45
aaataaccgaccacgacaaa

SEQ ID NO: 5356 - DNA, 22 bp, Artificial Sequence
  bisulfite treated nucleic acid for analysis of methylation status of SEQ ID NO: 45
gagcggtagcgatatgttttag

SEQ ID NO: 5357 - DNA, 35 bp, Artificial Sequence
  bisulfite treated nucleic acid for analysis of methylation status of SEQ ID NO: 45
ttatcgagcggatgatgagtttggttattgcggat

SEQ ID NO: 5358 - DNA, 20 bp, Artificial Sequence
  bisulfite treated nucleic acid for analysis of methylation status of SEQ ID NO: 45
aaaataaccgaccacgacaa

SEQ ID NO: 5359 - DNA, 22 bp, Artificial Sequence
  bisulfite treated nucleic acid for analysis of methylation status of SEQ ID NO: 45
ccaccgtacaaatcaacgtaaa

SEQ ID NO: 5360 - DNA, 22 bp, Artificial Sequence
  bisulfite treated nucleic acid for analysis of methylation status of SEQ ID NO: 45
agcgttttcgggtagttttatt

SEQ ID NO: 5361 - DNA, 21 bp, Artificial Sequence
  bisulfite treated nucleic acid for analysis of methylation status of SEQ ID NO: 45
taatcgtactccccacgctac

SEQ ID NO: 5362 - DNA, 22 bp, Artificial Sequence
  bisulfite treated nucleic acid for analysis of methylation status of SEQ ID NO: 45
aaacactatacgcgccctaaac

SEQ ID NO: 5363 - DNA, 21 bp, Artificial Sequence
  bisulfite treated nucleic acid for analysis of methylation status of SEQ ID NO: 45
tacgaaaactcttctccatcg

SEQ ID NO: 5364 - DNA, 22 bp, Artificial Sequence
  bisulfite treated nucleic acid for analysis of methylation status of SEQ ID NO: 45
tctaataaacactatacgcgcc

SEQ ID NO: 5365 - DNA, 21 bp, Artificial Sequence
  bisulfite treated nucleic acid for analysis of methylation status of SEQ ID NO: 45
cgaaaactcttctccatcgac

SEQ ID NO: 5366 - DNA, 22 bp, Artificial Sequence
  bisulfite treated nucleic acid for analysis of methylation status of SEQ ID NO: 45
gtttagggcgcgtatagtgttt

SEQ ID NO: 5367 - DNA, 23 bp, Artificial Sequence
  bisulfite treated nucleic acid for analysis of methylation status of SEQ ID NO: 45
accgtacaaatcaacgtaaaaat

SEQ ID NO: 5368 - DNA, 22 bp, Artificial Sequence
  bisulfite treated nucleic acid for analysis of methylation status of SEQ ID NO: 45
gagcgttttcgggtagttttat

SEQ ID NO: 5369 - DNA, 21 bp, Artificial Sequence
  bisulfite treated nucleic acid for analysis of methylation status of SEQ ID NO: 45
accctaaacgataacgaacct

SEQ ID NO: 5370 - DNA, 21 bp, Artificial Sequence
  bisulfite treated nucleic acid for analysis of methylation status of SEQ ID NO: 45
aaataaccgaccacgacaaac

SEQ ID NO: 5371 - DNA, 22 bp, Artificial Sequence
  bisulfite treated nucleic acid for analysis of methylation status of SEQ ID NO: 45
gtttagagttacgatgagcggt

SEQ ID NO: 5372 - DNA, 20 bp, Artificial Sequence
  bisulfite treated nucleic acid for analysis of methylation status of SEQ ID NO: 45
atattcgccaacgacaaaaa

SEQ ID NO: 5373 - DNA, 22 bp, Artificial Sequence
  bisulfite treated nucleic acid for analysis of methylation status of SEQ ID NO: 45
gtttatttcgatttggttcgag

SEQ ID NO: 5374 - DNA, 23 bp, Artificial Sequence
  bisulfite treated nucleic acid for analysis of methylation status of SEQ ID NO: 45
ggagaaggagggcgcgttgtcgt

SEQ ID NO: 5375 - DNA, 21 bp, Artificial Sequence
  bisulfite treated nucleic acid for analysis of methylation status of SEQ ID NO: 45
gacaccgcgaaactacaaata

SEQ ID NO: 5376 - DNA, 22 bp, Artificial Sequence
  bisulfite treated nucleic acid for analysis of methylation status of SEQ ID NO: 45
gagtagcgtttttcgagatgtt

SEQ ID NO: 5377 - DNA, 21 bp, Artificial Sequence
  bisulfite treated nucleic acid for analysis of methylation status of SEQ ID NO: 45
taataactaaccgcccgctaa

SEQ ID NO: 5378 - DNA, 21 bp, Artificial Sequence
  bisulfite treated nucleic acid for analysis of methylation status of SEQ ID NO: 45
tttagggcgcgtatagtgttt

SEQ ID NO: 5379 - DNA, 21 bp, Artificial Sequence
  bisulfite treated nucleic acid for analysis of methylation status of SEQ ID NO: 45
ctaaaccgcgaacaacaaaat

SEQ ID NO: 5380 - DNA, 22 bp, Artificial Sequence
  bisulfite treated nucleic acid for analysis of methylation status of SEQ ID NO: 45
ttttacgttgatttgtacggtg

SEQ ID NO: 5381 - DNA, 43 bp, Artificial Sequence
  bisulfite treated nucleic acid for analysis of methylation status of SEQ ID NO: 45
aacgtggaggttcgttatcgtttagggtagttagtacgagcgt

SEQ ID NO: 5382 - DNA, 22 bp, Artificial Sequence
  bisulfite treated nucleic acid for analysis of methylation status of SEQ ID NO: 45
gctaccgctcatcgtaactcta

SEQ ID NO: 5383 - DNA, 21 bp, Artificial Sequence
  bisulfite treated nucleic acid for analysis of methylation status of SEQ ID NO: 45
ttgttttcgcgtttgtatttg

SEQ ID NO: 5384 - DNA, 29 bp, Artificial Sequence
  bisulfite treated nucleic acid for analysis of methylation status of SEQ ID NO: 45
ggcgatggtgattatggtcgttaggagga

SEQ ID NO: 5385 - DNA, 21 bp, Artificial Sequence
  bisulfite treated nucleic acid for analysis of methylation status of SEQ ID NO: 45
cctaaacgataacgaacctcc

SEQ ID NO: 5386 - DNA, 39 bp, Artificial Sequence
  bisulfite treated nucleic acid for analysis of methylation status of SEQ ID NO: 45
gagcgttttcgggtagttttattaagtaggatggcgttt

SEQ ID NO: 5387 - DNA, 20 bp, Artificial Sequence
  bisulfite treated nucleic acid for analysis of methylation status of SEQ ID NO: 45
taaaccgcgaacaacaaaat

SEQ ID NO: 5388 - DNA, 20 bp, Artificial Sequence
  bisulfite treated nucleic acid for analysis of methylation status of SEQ ID NO: 45
aataggtggtcgtcgttgtc

SEQ ID NO: 5389 - DNA, 23 bp, Artificial Sequence
  bisulfite treated nucleic acid for analysis of methylation status of SEQ ID NO: 45
tgtcgttttcgtttagaattttg

SEQ ID NO: 5390 - DNA, 29 bp, Artificial Sequence
  bisulfite treated nucleic acid for analysis of methylation status of SEQ ID NO: 45
ttcgtttcgcgttacgatggttacgttgt

SEQ ID NO: 5391 - DNA, 21 bp, Artificial Sequence
  bisulfite treated nucleic acid for analysis of methylation status of SEQ ID NO: 45
agggcgcgtatagtgtttatt

SEQ ID NO: 5392 - DNA, 21 bp, Artificial Sequence
  bisulfite treated nucleic acid for analysis of methylation status of SEQ ID NO: 45
tattgtatttagcggagcgtt

SEQ ID NO: 5393 - DNA, 21 bp, Artificial Sequence
  bisulfite treated nucleic acid for analysis of methylation status of SEQ ID NO: 45
aaaaacaacgccacgataaaa

SEQ ID NO: 5394 - DNA, 21 bp, Artificial Sequence
  bisulfite treated nucleic acid for analysis of methylation status of SEQ ID NO: 45
acgccacgataaaaataacaa

SEQ ID NO: 5395 - DNA, 22 bp, Artificial Sequence
  bisulfite treated nucleic acid for analysis of methylation status of SEQ ID NO: 45
cgtaacgcccgtaataaaacta

SEQ ID NO: 5396 - DNA, 20 bp, Artificial Sequence
  bisulfite treated nucleic acid for analysis of methylation status of SEQ ID NO: 45
ttatcgagcggatgatgagt

SEQ ID NO: 5397 - DNA, 29 bp, Artificial Sequence
  bisulfite treated nucleic acid for analysis of methylation status of SEQ ID NO: 45
tattgcggatagggtaggtttgtcgtggt

SEQ ID NO: 5398 - DNA, 21 bp, Artificial Sequence
  bisulfite treated nucleic acid for analysis of methylation status of SEQ ID NO: 45
taaaaataaccgaccacgaca

SEQ ID NO: 5399 - DNA, 22 bp, Artificial Sequence
  bisulfite treated nucleic acid for analysis of methylation status of SEQ ID NO: 45
ttagagttacgatgagcggtag

SEQ ID NO: 5400 - DNA, 22 bp, Artificial Sequence
  bisulfite treated nucleic acid for analysis of methylation status of SEQ ID NO: 45
gacaacgacgaccacctattta

SEQ ID NO: 5401 - DNA, 21 bp, Artificial Sequence
  bisulfite treated nucleic acid for analysis of methylation status of SEQ ID NO: 45
tattacgggcgttacgttttt

SEQ ID NO: 5402 - DNA, 24 bp, Artificial Sequence
  bisulfite treated nucleic acid for analysis of methylation status of SEQ ID NO: 45
tgcggatttcgtcgttggacgggt

SEQ ID NO: 5403 - DNA, 21 bp, Artificial Sequence
  bisulfite treated nucleic acid for analysis of methylation status of SEQ ID NO: 45
tttattacgggcgttacgttt

SEQ ID NO: 5404 - DNA, 21 bp, Artificial Sequence
  bisulfite treated nucleic acid for analysis of methylation status of SEQ ID NO: 45
cgaacgtctcacctacgaaat

SEQ ID NO: 5405 - DNA, 22 bp, Artificial Sequence
  bisulfite treated nucleic acid for analysis of methylation status of SEQ ID NO: 45
tgtcgtggtcggttatttttat

SEQ ID NO: 5406 - DNA, 35 bp, Artificial Sequence
  bisulfite treated nucleic acid for analysis of methylation status of SEQ ID NO: 45
gtcgttggacgggtcgattttaaataggtggtcgt

SEQ ID NO: 5407 - DNA, 22 bp, Artificial Sequence
  bisulfite treated nucleic acid for analysis of methylation status of SEQ ID NO: 45
acacgataataactaaccgccc

SEQ ID NO: 5408 - DNA, 21 bp, Artificial Sequence
  bisulfite treated nucleic acid for analysis of methylation status of SEQ ID NO: 45
aaaataaccgaccacgacaaa

SEQ ID NO: 5409 - DNA, 21 bp, Artificial Sequence
  bisulfite treated nucleic acid for analysis of methylation status of SEQ ID NO: 45
aatccgcacttacaactaccg

SEQ ID NO: 5410 - DNA, 22 bp, Artificial Sequence
  bisulfite treated nucleic acid for analysis of methylation status of SEQ ID NO: 45
ttatgacgtttatggcgttttt

SEQ ID NO: 5411 - DNA, 25 bp, Artificial Sequence
  bisulfite treated nucleic acid for analysis of methylation status of SEQ ID NO: 45
agttgcgggtggttgtattcggcga

SEQ ID NO: 5412 - DNA, 23 bp, Artificial Sequence
  bisulfite treated nucleic acid for analysis of methylation status of SEQ ID NO: 45
atctaataaacactatacgcgcc

SEQ ID NO: 5413 - DNA, 20 bp, Artificial Sequence
  bisulfite treated nucleic acid for analysis of methylation status of SEQ ID NO: 45
acgaacgtctcacctacgaa

SEQ ID NO: 5414 - DNA, 22 bp, Artificial Sequence
  bisulfite treated nucleic acid for analysis of methylation status of SEQ ID NO: 45
acgccacgataaaaataacaat

SEQ ID NO: 5415 - DNA, 20 bp, Artificial Sequence
  nucleic acid for analysis of methylation status of SEQ ID NO: 45
gttgtttagggcgcgtatag

SEQ ID NO: 5416 - DNA, 22 bp, Artificial Sequence
  bisulfite treated nucleic acid for analysis of methylation status of SEQ ID NO: 45
acaacgccacgataaaaataac

SEQ ID NO: 5417 - DNA, 21 bp, Artificial Sequence
  bisulfite treated nucleic acid for analysis of methylation status of SEQ ID NO: 45
tgtttagggcgcgtatagtgt

SEQ ID NO: 5418 - DNA, 20 bp, Artificial Sequence
  bisulfite treated nucleic acid for analysis of methylation status of SEQ ID NO: 45
atccgcacttacaactaccg

SEQ ID NO: 5419 - DNA, 22 bp, Artificial Sequence
  bisulfite treated nucleic acid for analysis of methylation status of SEQ ID NO: 45
ttattacgggcgttacgttttt

SEQ ID NO: 5420 - DNA, 22 bp, Artificial Sequence
  bisulfite treated nucleic acid for analysis of methylation status of SEQ ID NO: 45
ttttattacgggcgttacgttt

SEQ ID NO: 5421 - DNA, 22 bp, Artificial Sequence
  bisulfite treated nucleic acid for analysis of methylation status of SEQ ID NO: 45
aaaacgacaccgtatcctactc

SEQ ID NO: 5422 - DNA, 21 bp, Artificial Sequence
  bisulfite treated nucleic acid for analysis of methylation status of SEQ ID NO: 45
tttcgttcgtgggatttatag

SEQ ID NO: 5423 - DNA, 26 bp, Artificial Sequence
  bisulfite treated nucleic acid for analysis of methylation status of SEQ ID NO: 45
tacgtcgtcgatgtgcgagggtagga

SEQ ID NO: 5424 - DNA, 22 bp, Artificial Sequence
  bisulfite treated nucleic acid for analysis of methylation status of SEQ ID NO: 45
aaacaacgccacgataaaaata

SEQ ID NO: 5425 - DNA, 23 bp, Artificial Sequence
  bisulfite treated nucleic acid for analysis of methylation status of SEQ ID NO: 45
ggcgcgtatagtgtttattagat

SEQ ID NO: 5426 - DNA, 20 bp, Artificial Sequence
  bisulfite treated nucleic acid for analysis of methylation status of SEQ ID NO: 45
aacaacgccacgataaaaat

SEQ ID NO: 5427 - DNA, 21 bp, Artificial Sequence
  bisulfite treated nucleic acid for analysis of methylation status of SEQ ID NO: 45
cgatggagaagagttttcgta

SEQ ID NO: 5428 - DNA, 21 bp, Artificial Sequence
  bisulfite treated nucleic acid for analysis of methylation status of SEQ ID NO: 45
ctaaaccaaaacgacaccgta

SEQ ID NO: 5429 - DNA, 21 bp, Artificial Sequence
  bisulfite treated nucleic acid for analysis of methylation status of SEQ ID NO: 45
tcgaagttaaaggagcgtagg

SEQ ID NO: 5430 - DNA, 38 bp, Artificial Sequence
  bisulfite treated nucleic acid for analysis of methylation status of SEQ ID NO: 45
agatggtttcgttcgtgggatttatagatatataggtg

SEQ ID NO: 5431 - DNA, 21 bp, Artificial Sequence
  bisulfite treated nucleic acid for analysis of methylation status of SEQ ID NO: 45
aataatcgtactccccacgct

SEQ ID NO: 5432 - DNA, 21 bp, Artificial Sequence
  bisulfite treated nucleic acid for analysis of methylation status of SEQ ID NO: 45
cacgataataactaaccgccc

SEQ ID NO: 5433 - DNA, 20 bp, Artificial Sequence
  bisulfite treated nucleic acid for analysis of methylation status of SEQ ID NO: 45
aataaccgaccacgacaaac

SEQ ID NO: 5434 - DNA, 20 bp, Artificial Sequence
  bisulfite treated nucleic acid for analysis of methylation status of SEQ ID NO: 45
aataatcgtactccccacgc

SEQ ID NO: 5435 - DNA, 21 bp, Artificial Sequence
  bisulfite treated nucleic acid for analysis of methylation status of SEQ ID NO: 45
ataatcgtactccccacgcta

SEQ ID NO: 5436 - DNA, 23 bp, Artificial Sequence
  bisulfite treated nucleic acid for analysis of methylation status of SEQ ID NO: 45
tcgttttcgtttagaattttgat

SEQ ID NO: 5437 - DNA, 20 bp, Artificial Sequence
  bisulfite treated nucleic acid for analysis of methylation status of SEQ ID NO: 45
aactcatcatccgctcgata

SEQ ID NO: 5438 - DNA, 22 bp, Artificial Sequence
  bisulfite treated nucleic acid for analysis of methylation status of SEQ ID NO: 45
cggtagcgatatgttttagtgg

SEQ ID NO: 5439 - DNA, 37 bp, Artificial Sequence
  bisulfite treated nucleic acid for analysis of methylation status of SEQ ID NO: 45
ttgttcgttatttattcgtggtattttttcgggaagg

SEQ ID NO: 5440 - DNA, 20 bp, Artificial Sequence
  bisulfite treated nucleic acid for analysis of methylation status of SEQ ID NO: 45
tcacgatcaaactcatcgac

SEQ ID NO: 5441 - DNA, 20 bp, Artificial Sequence
  bisulfite treated nucleic acid for analysis of methylation status of SEQ ID NO: 45
acaaaatcaccatacgctcg

SEQ ID NO: 5442 - DNA, 22 bp, Artificial Sequence
  bisulfite treated nucleic acid for analysis of methylation status of SEQ ID NO: 45
tattaagtaggatggcgtttcg

SEQ ID NO: 5443 - DNA, 22 bp, Artificial Sequence
  bisulfite treated nucleic acid for analysis of methylation status of SEQ ID NO: 45
aataaaaataaccgaccacgac

SEQ ID NO: 5444 - DNA, 20 bp, Artificial Sequence
  bisulfite treated nucleic acid for analysis of methylation status of SEQ ID NO: 45
gatgagcggtagcgatatgt

SEQ ID NO: 5445 - DNA, 22 bp, Artificial Sequence
  bisulfite treated nucleic acid for analysis of methylation status of SEQ ID NO: 45
agcggtagcgatatgttttagt

SEQ ID NO: 5446 - DNA, 21 bp, Artificial Sequence
  bisulfite treated nucleic acid for analysis of methylation status of SEQ ID NO: 45
gtttatcgagcggatgatgag

SEQ ID NO: 5447 - DNA, 21 bp, Artificial Sequence
  bisulfite treated nucleic acid for analysis of methylation status of SEQ ID NO: 45
tttatcgagcggatgatgagt

SEQ ID NO: 5448 - DNA, 21 bp, Artificial Sequence
  bisulfite treated nucleic acid for analysis of methylation status of SEQ ID NO: 45
gaacgtctcacctacgaaatc

SEQ ID NO: 5449 - DNA, 23 bp, Artificial Sequence
  bisulfite treated nucleic acid for analysis of methylation status of SEQ ID NO: 45
tttagagttacgatgagcggtag

SEQ ID NO: 5450 - DNA, 21 bp, Artificial Sequence
  bisulfite treated nucleic acid for analysis of methylation status of SEQ ID NO: 45
acaacgccacgataaaaataa

SEQ ID NO: 5451 - DNA, 22 bp, Artificial Sequence
  bisulfite treated nucleic acid for analysis of methylation status of SEQ ID NO: 45
gacaccgcgaaactacaaatac

SEQ ID NO: 5452 - DNA, 20 bp, Artificial Sequence
  bisulfite treated nucleic acid for analysis of methylation status of SEQ ID NO: 45
tcgtaggtgagacgttcgtt

SEQ ID NO: 5453 - DNA, 29 bp, Artificial Sequence
  bisulfite treated nucleic acid for analysis of methylation status of SEQ ID NO: 45
gtcgaagtcgttgtttagggcgcgtatag

SEQ ID NO: 5454 - DNA, 21 bp, Artificial Sequence
  bisulfite treated nucleic acid for analysis of methylation status of SEQ ID NO: 45
caccgtacaaatcaacgtaaa

SEQ ID NO: 5455 - DNA, 19 bp, Artificial Sequence
  bisulfite treated nucleic acid for analysis of methylation status of SEQ ID NO: 45
cgccaataatcgtactccc

SEQ ID NO: 5456 - DNA, 20 bp, Artificial Sequence
  bisulfite treated nucleic acid for analysis of methylation status of SEQ ID NO: 45
ttgtttagggcgcgtatagt

SEQ ID NO: 5457 - DNA, 20 bp, Artificial Sequence
  bisulfite treated nucleic acid for analysis of methylation status of SEQ ID NO: 45
ttagggcgcgtatagtgttt

SEQ ID NO: 5458 - DNA, 20 bp, Artificial Sequence
  bisulfite treated nucleic acid for analysis of methylation status of SEQ ID NO: 45
aatcgtactccccacgctac

SEQ ID NO: 5459 - DNA, 22 bp, Artificial Sequence
  bisulfite treated nucleic acid for analysis of methylation status of SEQ ID NO: 45
gcggtagcgatatgttttagtg

SEQ ID NO: 5460 - DNA, 21 bp, Artificial Sequence
  bisulfite treated nucleic acid for analysis of methylation status of SEQ ID NO: 45
gataataactaaccgcccgct

SEQ ID NO: 5461 - DNA, 22 bp, Artificial Sequence
  bisulfite treated nucleic acid for analysis of methylation status of SEQ ID NO: 45
ctataaatcccacgaacgaaac

SEQ ID NO: 5462 - DNA, 20 bp, Artificial Sequence
  bisulfite treated nucleic acid for analysis of methylation status of SEQ ID NO: 45
gggcgttttcgagtttttag

SEQ ID NO: 5463 - DNA, 28 bp, Artificial Sequence
  bisulfite treated nucleic acid for analysis of methylation status of SEQ ID NO: 45
tgttcgaagttaaaggagcgtagggcgt

SEQ ID NO: 5464 - DNA, 20 bp, Artificial Sequence
  bisulfite treated nucleic acid for analysis of methylation status of SEQ ID NO: 45
aaaaataaccgaccacgaca

SEQ ID NO: 5465 - DNA, 21 bp, Artificial Sequence
  bisulfite treated nucleic acid for analysis of methylation status of SEQ ID NO: 45
gtttcgggtttgtacgttaat

SEQ ID NO: 5466 - DNA, 20 bp, Artificial Sequence
  bisulfite treated nucleic acid for analysis of methylation status of SEQ ID NO: 45
tgtttagggcgcgtatagtg

SEQ ID NO: 5467 - DNA, 24 bp, Artificial Sequence
  bisulfite treated nucleic acid for analysis of methylation status of SEQ ID NO: 45
gtcgttttcgtttagaattttgat

SEQ ID NO: 5468 - DNA, 20 bp, Artificial Sequence
  bisulfite treated nucleic acid for analysis of methylation status of SEQ ID NO: 45
aacgaacgtctcacctacga

SEQ ID NO: 5469 - DNA, 22 bp, Artificial Sequence
  bisulfite treated nucleic acid for analysis of methylation status of SEQ ID NO: 45
gtcgtggtcggttatttttatt

SEQ ID NO: 5470 - DNA, 22 bp, Artificial Sequence
  bisulfite treated nucleic acid for analysis of methylation status of SEQ ID NO: 45
aaacgacaccgtatcctactct

SEQ ID NO: 5471 - DNA, 19 bp, Artificial Sequence
  bisulfite treated nucleic acid for analysis of methylation status of SEQ ID NO: 45
gcgccaataatcgtactcc

SEQ ID NO: 5472 - DNA, 21 bp, Artificial Sequence
  bisulfite treated nucleic acid for analysis of methylation status of SEQ ID NO: 45
gtaggtgagacgttcgttttc

SEQ ID NO: 5473 - DNA, 30 bp, Artificial Sequence
  bisulfite treated nucleic acid for analysis of methylation status of SEQ ID NO: 45
aagtcgttgtttagggcgcgtatagtgttt

SEQ ID NO: 5474 - DNA, 22 bp, Artificial Sequence
  bisulfite treated nucleic acid for analysis of methylation status of SEQ ID NO: 45
aataatcgtactccccacgcta

SEQ ID NO: 5475 - DNA, 19 bp, Artificial Sequence
  bisulfite treated nucleic acid for analysis of methylation status of SEQ ID NO: 45
cacgctacaaaacgacacc

SEQ ID NO: 5476 - DNA, 29 bp, Artificial Sequence
  bisulfite treated nucleic acid for analysis of methylation status of SEQ ID NO: 45
agtttaggttagcgttgcgcggtatttgt

SEQ ID NO: 5477 - DNA, 20 bp, Artificial Sequence
  bisulfite treated nucleic acid for analysis of methylation status of SEQ ID NO: 45
cctacgctcctttaacttcg

SEQ ID NO: 5478 - DNA, 22 bp, Artificial Sequence
  bisulfite treated nucleic acid for analysis of methylation status of SEQ ID NO: 45
gttatttttatcgtggcgttgt

SEQ ID NO: 5479 - DNA, 25 bp, Artificial Sequence
  bisulfite treated nucleic acid for analysis of methylation status of SEQ ID NO: 45
agtgcgcgggcgttttcgagttttt

SEQ ID NO: 5480 - DNA, 21 bp, Artificial Sequence
  bisulfite treated nucleic acid for analysis of methylation status of SEQ ID NO: 45
ttattgtatttagcggagcgt

SEQ ID NO: 5481 - DNA, 22 bp, Artificial Sequence
  bisulfite treated nucleic acid for analysis of methylation status of SEQ ID NO: 45
tgtttagagttacgatgagcgg

SEQ ID NO: 5482 - DNA, 21 bp, Artificial Sequence
  bisulfite treated nucleic acid for analysis of methylation status of SEQ ID NO: 45
ctcgataaacgaatcccttcc

SEQ ID NO: 5483 - DNA, 39 bp, Artificial Sequence
  bisulfite treated nucleic acid for analysis of methylation status of SEQ ID NO: 45
agcgatatgttttagtggtgttgttcgttatttattcgt

SEQ ID NO: 5484 - DNA, 22 bp, Artificial Sequence
  bisulfite treated nucleic acid for analysis of methylation status of SEQ ID NO: 45
ctaccgctcatcgtaactctaa

SEQ ID NO: 5485 - DNA, 22 bp, Artificial Sequence
  bisulfite treated nucleic acid for analysis of methylation status of SEQ ID NO: 45
acgtaacgcccgtaataaaact

SEQ ID NO: 5486 - DNA, 20 bp, Artificial Sequence
  bisulfite treated nucleic acid for analysis of methylation status of SEQ ID NO: 45
aagggattcgtttatcgagc

SEQ ID NO: 5487 - DNA, 22 bp, Artificial Sequence
  bisulfite treated nucleic acid for analysis of methylation status of SEQ ID NO: 45
taccgctcatcgtaactctaaa

SEQ ID NO: 5488 - DNA, 21 bp, Artificial Sequence
  bisulfite treated nucleic acid for analysis of methylation status of SEQ ID NO: 45
cggtagttgtaagtgcggatt

SEQ ID NO: 5489 - DNA, 29 bp, Artificial Sequence
  bisulfite treated nucleic acid for analysis of methylation status of SEQ ID NO: 45
tgacggcgatggtgattatggtcgttagg

SEQ ID NO: 5490 - DNA, 20 bp, Artificial Sequence
  bisulfite treated nucleic acid for analysis of methylation status of SEQ ID NO: 45
cacgaacgaaaccatctacg

SEQ ID NO: 5491 - DNA, 21 bp, Artificial Sequence
  bisulfite treated nucleic acid for analysis of methylation status of SEQ ID NO: 45
taaaccgcgaacaacaaaatc

SEQ ID NO: 5492 - DNA, 21 bp, Artificial Sequence
  bisulfite treated nucleic acid for analysis of methylation status of SEQ ID NO: 45
gacaacgacgaccacctattt

SEQ ID NO: 5493 - DNA, 22 bp, Artificial Sequence
  bisulfite treated nucleic acid for analysis of methylation status of SEQ ID NO: 45
gttttattacgggcgttacgtt

SEQ ID NO: 5494 - DNA, 20 bp, Artificial Sequence
  bisulfite treated nucleic acid for analysis of methylation status of SEQ ID NO: 45
cacgatcaaactcatcgacc

SEQ ID NO: 5495 - DNA, 21 bp, Artificial Sequence
  bisulfite treated nucleic acid for analysis of methylation status of SEQ ID NO: 45
gcgttttcgggtagttttatt

SEQ ID NO: 5496 - DNA, 20 bp, Artificial Sequence
  bisulfite treated nucleic acid for analysis of methylation status of SEQ ID NO: 45
tcgataaacgaatcccttcc

SEQ ID NO: 5497 - DNA, 21 bp, Artificial Sequence
  bisulfite treated nucleic acid for analysis of methylation status of SEQ ID NO: 45
ttagtgattcgtattagggcg

SEQ ID NO: 5498 - DNA, 20 bp, Artificial Sequence
  bisulfite treated nucleic acid for analysis of methylation status of SEQ ID NO: 45
tcatcatccgctcgataaac

SEQ ID NO: 5499 - DNA, 20 bp, Artificial Sequence
  bisulfite treated nucleic acid for analysis of methylation status of SEQ ID NO: 45
aaactacaaataccgcgcaa

SEQ ID NO: 5500 - DNA, 19 bp, Artificial Sequence
  bisulfite treated nucleic acid for analysis of methylation status of SEQ ID NO: 45
tattcgccaacgacaaaaa

SEQ ID NO: 5501 - DNA, 21 bp, Artificial Sequence
  bisulfite treated nucleic acid for analysis of methylation status of SEQ ID NO: 45
ctcatcatccgctcgataaac

SEQ ID NO: 5502 - DNA, 21 bp, Artificial Sequence
  bisulfite treated nucleic acid for analysis of methylation status of SEQ ID NO: 45
aaactcatcatccgctcgata

SEQ ID NO: 5503 - DNA, 20 bp, Artificial Sequence
  bisulfite treated nucleic acid for analysis of methylation status of SEQ ID NO: 45
ataactaaccgcccgctaaa

SEQ ID NO: 5504 - DNA, 20 bp, Artificial Sequence
  bisulfite treated nucleic acid for analysis of methylation status of SEQ ID NO: 45
aataactaaccgcccgctaa

SEQ ID NO: 5505 - DNA, 23 bp, Artificial Sequence
  bisulfite treated nucleic acid for analysis of methylation status of SEQ ID NO: 45
agggcgcgtatagtgtttattag

SEQ ID NO: 5506 - DNA, 19 bp, Artificial Sequence
  bisulfite treated nucleic acid for analysis of methylation status of SEQ ID NO: 45
atcgtactccccacgctac

SEQ ID NO: 5507 - DNA, 23 bp, Artificial Sequence
  bisulfite treated nucleic acid for analysis of methylation status of SEQ ID NO: 45
cgatgattattgtatttagcgga

SEQ ID NO: 5508 - DNA, 20 bp, Artificial Sequence
  bisulfite treated nucleic acid for analysis of methylation status of SEQ ID NO: 45
ttgtatttagcggagcgttt

SEQ ID NO: 5509 - DNA, 19 bp, Artificial Sequence
  bisulfite treated nucleic acid for analysis of methylation status of SEQ ID NO: 45
aaaccgcgaacaacaaaat

SEQ ID NO: 5510 - DNA, 21 bp, Artificial Sequence
  bisulfite treated nucleic acid for analysis of methylation status of SEQ ID NO: 45
acgtaacgcccgtaataaaac

SEQ ID NO: 5511 - DNA, 21 bp, Artificial Sequence
  bisulfite treated nucleic acid for analysis of methylation status of SEQ ID NO: 45
ttgtatttagcggagcgtttt

SEQ ID NO: 5512 - DNA, 22 bp, Artificial Sequence
  bisulfite treated nucleic acid for analysis of methylation status of SEQ ID NO: 45
gtaaataacaacgcgccaataa

SEQ ID NO: 5513 - DNA, 20 bp, Artificial Sequence
  bisulfite treated nucleic acid for analysis of methylation status of SEQ ID NO: 45
gtgagacgttcgttttcgtc

SEQ ID NO: 5514 - DNA, 49 bp, Artificial Sequence
  bisulfite treated nucleic acid for analysis of methylation status of SEQ ID NO: 45
tagggcgcgtatagtgtttattagatagtttaggttagcgttgcgcggt

SEQ ID NO: 5515 - DNA, 21 bp, Artificial Sequence
  bisulfite treated nucleic acid for analysis of methylation status of SEQ ID NO: 45
cgtaggtgagacgttcgtttt

SEQ ID NO: 5516 - DNA, 21 bp, Artificial Sequence
  bisulfite treated nucleic acid for analysis of methylation status of SEQ ID NO: 45
taaacgataacgaacctccac

SEQ ID NO: 5517 - DNA, 21 bp, Artificial Sequence
  bisulfite treated nucleic acid for analysis of methylation status of SEQ ID NO: 45
acaacgacgaccacctattta

SEQ ID NO: 5518 - DNA, 19 bp, Artificial Sequence
  bisulfite treated nucleic acid for analysis of methylation status of SEQ ID NO: 45
acgcgccaataatcgtact

SEQ ID NO: 5519 - DNA, 22 bp, Artificial Sequence
  bisulfite treated nucleic acid for analysis of methylation status of SEQ ID NO: 45
gatagtttaggttagcgttgcg

SEQ ID NO: 5520 - DNA, 26 bp, Artificial Sequence
  bisulfite treated nucleic acid for analysis of methylation status of SEQ ID NO: 45
tttcgcggtgtcgttttgtagcgtgg

SEQ ID NO: 5521 - DNA, 22 bp, Artificial Sequence
  bisulfite treated nucleic acid for analysis of methylation status of SEQ ID NO: 45
attgttatttttatcgtggcgt

SEQ ID NO: 5522 - DNA, 20 bp, Artificial Sequence
  bisulfite treated nucleic acid for analysis of methylation status of SEQ ID NO: 45
gattcgtttatcgagcggat

SEQ ID NO: 5523 - DNA, 32 bp, Artificial Sequence
  bisulfite treated nucleic acid for analysis of methylation status of SEQ ID NO: 45
agtcgttgtttagggcgcgtatagtgtttatt

SEQ ID NO: 5524 - DNA, 21 bp, Artificial Sequence
  bisulfite treated nucleic acid for analysis of methylation status of SEQ ID NO: 45
cgtaacgcccgtaataaaact

SEQ ID NO: 5525 - DNA, 20 bp, Artificial Sequence
  bisulfite treated nucleic acid for analysis of methylation status of SEQ ID NO: 45
acactatacgcgccctaaac

SEQ ID NO: 5526 - DNA, 22 bp, Artificial Sequence
  bisulfite treated nucleic acid for analysis of methylation status of SEQ ID NO: 45
taaaaataaccgaccacgacaa

SEQ ID NO: 5527 - DNA, 20 bp, Artificial Sequence
  bisulfite treated nucleic acid for analysis of methylation status of SEQ ID NO: 45
attacgggcgttacgttttt

SEQ ID NO: 5528 - DNA, 22 bp, Artificial Sequence
  bisulfite treated nucleic acid for analysis of methylation status of SEQ ID NO: 45
ccgctcatcgtaactctaaaca

SEQ ID NO: 5529 - DNA, 20 bp, Artificial Sequence
  bisulfite treated nucleic acid for analysis of methylation status of SEQ ID NO: 45
agagttttcgtttcgcgtta

SEQ ID NO: 5530 - DNA, 31 bp, Artificial Sequence
  bisulfite treated nucleic acid for analysis of methylation status of SEQ ID NO: 45
ggttacgttgtattcgttttgtgtttcgcgg

SEQ ID NO: 5531 - DNA, 22 bp, Artificial Sequence
  bisulfite treated nucleic acid for analysis of methylation status of SEQ ID NO: 45
cgcaacgctaacctaaactatc

SEQ ID NO: 5532 - DNA, 19 bp, Artificial Sequence
  nucleic acid for analysis of methylation status of SEQ ID NO: 45
gttggacgggtcgatttta

SEQ ID NO: 5533 - DNA, 19 bp, Artificial Sequence
  bisulfite treated nucleic acid for analysis of methylation status of SEQ ID NO: 45
acgataacgaacctccacg

SEQ ID NO: 5534 - DNA, 21 bp, Artificial Sequence
  bisulfite treated nucleic acid for analysis of methylation status of SEQ ID NO: 45
taaataacaacgcgccaataa

SEQ ID NO: 5535 - DNA, 20 bp, Artificial Sequence
  bisulfite treated nucleic acid for analysis of methylation status of SEQ ID NO: 45
taatcgtactccccacgcta

SEQ ID NO: 5536 - DNA, 20 bp, Artificial Sequence
  bisulfite treated nucleic acid for analysis of methylation status of SEQ ID NO: 45
tctaaaccgcgaacaacaaa

SEQ ID NO: 5537 - DNA, 19 bp, Artificial Sequence
  bisulfite treated nucleic acid for analysis of methylation status of SEQ ID NO: 45
caaaatcaccatacgctcg

SEQ ID NO: 5538 - DNA, 23 bp, Artificial Sequence
  bisulfite treated nucleic acid for analysis of methylation status of SEQ ID NO: 45
ttattagttttattacgggcgtt

SEQ ID NO: 5539 - DNA, 22 bp, Artificial Sequence
  bisulfite treated nucleic acid for analysis of methylation status of SEQ ID NO: 45
tgagcggtagcgatatgtttta

SEQ ID NO: 5540 - DNA, 22 bp, Artificial Sequence
  bisulfite treated nucleic acid for analysis of methylation status of SEQ ID NO: 45
aacgtaacgcccgtaataaaac

SEQ ID NO: 5541 - DNA, 21 bp, Artificial Sequence
  bisulfite treated nucleic acid for analysis of methylation status of SEQ ID NO: 45
ttacgttgatttgtacggtgg

SEQ ID NO: 5542 - DNA, 20 bp, Artificial Sequence
  bisulfite treated nucleic acid for analysis of methylation status of SEQ ID NO: 45
ctacgccctacgctccttta

SEQ ID NO: 5543 - DNA, 20 bp, Artificial Sequence
  bisulfite treated nucleic acid for analysis of methylation status of SEQ ID NO: 45
attgtatttagcggagcgtt

SEQ ID NO: 5544 - DNA, 24 bp, Artificial Sequence
  bisulfite treated nucleic acid for analysis of methylation status of SEQ ID NO: 45
tatctaataaacactatacgcgcc

SEQ ID NO: 5545 - DNA, 19 bp, Artificial Sequence
  bisulfite treated nucleic acid for analysis of methylation status of SEQ ID NO: 45
tacgccctacgctccttta

SEQ ID NO: 5546 - DNA, 21 bp, Artificial Sequence
  bisulfite treated nucleic acid for analysis of methylation status of SEQ ID NO: 45
acactatacgcgccctaaaca

SEQ ID NO: 5547 - DNA, 29 bp, Artificial Sequence
  bisulfite treated nucleic acid for analysis of methylation status of SEQ ID NO: 45
ttcgtaggtgagacgttcgttttcgtcga

SEQ ID NO: 5548 - DNA, 22 bp, Artificial Sequence
  bisulfite treated nucleic acid for analysis of methylation status of SEQ ID NO: 45
cgttttcgtttagaattttgat

SEQ ID NO: 5549 - DNA, 20 bp, Artificial Sequence
  bisulfite treated nucleic acid for analysis of methylation status of SEQ ID NO: 45
cgaaaccatctacgccctac

SEQ ID NO: 5550 - DNA, 22 bp, Artificial Sequence
  bisulfite treated nucleic acid for analysis of methylation status of SEQ ID NO: 45
tctataaatcccacgaacgaaa

SEQ ID NO: 5551 - DNA, 19 bp, Artificial Sequence
  bisulfite treated nucleic acid for analysis of methylation status of SEQ ID NO: 45
gggcgttttcgagttttta

SEQ ID NO: 5552 - DNA, 22 bp, Artificial Sequence
  bisulfite treated nucleic acid for analysis of methylation status of SEQ ID NO: 45
taataaaaataaccgaccacga

SEQ ID NO: 5553 - DNA, 20 bp, Artificial Sequence
  bisulfite treated nucleic acid for analysis of methylation status of SEQ ID NO: 45
cgaacgtctcacctacgaaa

SEQ ID NO: 5554 - DNA, 22 bp, Artificial Sequence
  bisulfite treated nucleic acid for analysis of methylation status of SEQ ID NO: 45
gtagcgtttttcgagatgttta

SEQ ID NO: 5555 - DNA, 23 bp, Artificial Sequence
  bisulfite treated nucleic acid for analysis of methylation status of SEQ ID NO: 45
agtagcgtttttcgagatgttta

SEQ ID NO: 5556 - DNA, 22 bp, Artificial Sequence
  bisulfite treated nucleic acid for analysis of methylation status of SEQ ID NO: 45
tatttttatcgtggcgttgttt

SEQ ID NO: 5557 - DNA, 22 bp, Artificial Sequence
  bisulfite treated nucleic acid for analysis of methylation status of SEQ ID NO: 45
ttgttatttttatcgtggcgtt

SEQ ID NO: 5558 - DNA, 23 bp, Artificial Sequence
  bisulfite treated nucleic acid for analysis of methylation status of SEQ ID NO: 45
gtcgatggagaagagttttcgta

SEQ ID NO: 5559 - DNA, 20 bp, Artificial Sequence
  bisulfite treated nucleic acid for analysis of methylation status of SEQ ID NO: 45
acatatcgctaccgctcatc

SEQ ID NO: 5560 - DNA, 21 bp, Artificial Sequence
  bisulfite treated nucleic acid for analysis of methylation status of SEQ ID NO: 45
gttttcgcgtttgtatttgac

SEQ ID NO: 5561 - DNA, 20 bp, Artificial Sequence
  bisulfite treated nucleic acid for analysis of methylation status of SEQ ID NO: 45
aacgcgccaataatcgtact

SEQ ID NO: 5562 - DNA, 23 bp, Artificial Sequence
  bisulfite treated nucleic acid for analysis of methylation status of SEQ ID NO: 45
tcggttagtgattcgtattaggg

SEQ ID NO: 5563 - DNA, 21 bp, Artificial Sequence
  bisulfite treated nucleic acid for analysis of methylation status of SEQ ID NO: 45
gagagttttcgtttcgcgtta

SEQ ID NO: 5564 - DNA, 20 bp, Artificial Sequence
  bisulfite treated nucleic acid for analysis of methylation status of SEQ ID NO: 45
tgtatttagcggagcgtttt

SEQ ID NO: 5565 - DNA, 20 bp, Artificial Sequence
  bisulfite treated nucleic acid for analysis of methylation status of SEQ ID NO: 45
cgtcgaagtcgttgtttagg

SEQ ID NO: 5566 - DNA, 20 bp, Artificial Sequence
  bisulfite treated nucleic acid for analysis of methylation status of SEQ ID NO: 45
ataaccgaccacgacaaacc

SEQ ID NO: 5567 - DNA, 21 bp, Artificial Sequence
  bisulfite treated nucleic acid for analysis of methylation status of SEQ ID NO: 45
tatgacgtttatggcgttttt

SEQ ID NO: 5568 - DNA, 21 bp, Artificial Sequence
  bisulfite treated nucleic acid for analysis of methylation status of SEQ ID NO: 45
tttatgacgtttatggcgttt

SEQ ID NO: 5569 - DNA, 20 bp, Artificial Sequence
  bisulfite treated nucleic acid for analysis of methylation status of SEQ ID NO: 45
gaaactacaaataccgcgca

SEQ ID NO: 5570 - DNA, 20 bp, Artificial Sequence
  bisulfite treated nucleic acid for analysis of methylation status of SEQ ID NO: 45
tttatcgagcggatgatgag

SEQ ID NO: 5571 - DNA, 21 bp, Artificial Sequence
  bisulfite treated nucleic acid for analysis of methylation status of SEQ ID NO: 45
ttattacgggcgttacgtttt

SEQ ID NO: 5572 - DNA, 20 bp, Artificial Sequence
  bisulfite treated nucleic acid for analysis of methylation status of SEQ ID NO: 45
cactatacgcgccctaaaca

SEQ ID NO: 5573 - DNA, 21 bp, Artificial Sequence
  bisulfite treated nucleic acid for analysis of methylation status of SEQ ID NO: 45
gctaccgctcatcgtaactct

SEQ ID NO: 5574 - DNA, 21 bp, Artificial Sequence
  bisulfite treated nucleic acid for analysis of methylation status of SEQ ID NO: 45
tgttttcgcgtttgtatttga

SEQ ID NO: 5575 - DNA, 21 bp, Artificial Sequence
  bisulfite treated nucleic acid for analysis of methylation status of SEQ ID NO: 45
aacgtaacgcccgtaataaaa

SEQ ID NO: 5576 - DNA, 20 bp, Artificial Sequence
  bisulfite treated nucleic acid for analysis of methylation status of SEQ ID NO: 45
tatcgagcggatgatgagtt

SEQ ID NO: 5577 - DNA, 21 bp, Artificial Sequence
  bisulfite treated nucleic acid for analysis of methylation status of SEQ ID NO: 45
aaacgtaacgcccgtaataaa

SEQ ID NO: 5578 - DNA, 21 bp, Artificial Sequence
  bisulfite treated nucleic acid for analysis of methylation status of SEQ ID NO: 45
aaaacgtaacgcccgtaataa

SEQ ID NO: 5579 - DNA, 19 bp, Artificial Sequence
  bisulfite treated nucleic acid for analysis of methylation status of SEQ ID NO: 45
aaccgcgaacaacaaaatc

SEQ ID NO: 5580 - DNA, 21 bp, Artificial Sequence
  bisulfite treated nucleic acid for analysis of methylation status of SEQ ID NO: 45
aacaacgccacgataaaaata

SEQ ID NO: 5581 - DNA, 19 bp, Artificial Sequence
  bisulfite treated nucleic acid for analysis of methylation status of SEQ ID NO: 45
ctaaaccgcgaacaacaaa

SEQ ID NO: 5582 - DNA, 22 bp, Artificial Sequence
  bisulfite treated nucleic acid for analysis of methylation status of SEQ ID NO: 45
acaatatcgaatcctaaacgaa

SEQ ID NO: 5583 - DNA, 21 bp, Artificial Sequence
  bisulfite treated nucleic acid for analysis of methylation status of SEQ ID NO: 45
gggcggttagttattatcgtg

SEQ ID NO: 5584 - DNA, 42 bp, Artificial Sequence
  bisulfite treated nucleic acid for analysis of methylation status of SEQ ID NO: 45
gtcgtagttttttttaagtttgaaggggacggaattttcggg

SEQ ID NO: 5585 - DNA, 21 bp, Artificial Sequence
  bisulfite treated nucleic acid for analysis of methylation status of SEQ ID NO: 45
attattgtatttagcggagcg

SEQ ID NO: 5586 - DNA, 21 bp, Artificial Sequence
  bisulfite treated nucleic acid for analysis of methylation status of SEQ ID NO: 45
attaagtaggatggcgtttcg

SEQ ID NO: 5587 - DNA, 22 bp, Artificial Sequence
  nucleic acid for analysis of methylation status of SEQ ID NO: 45
tattagttttattacgggcgtt

SEQ ID NO: 5588 - DNA, 23 bp, Artificial Sequence
  bisulfite treated nucleic acid for analysis of methylation status of SEQ ID NO: 45
tcgacgacgtatctatctacacc

SEQ ID NO: 5589 - DNA, 21 bp, Artificial Sequence
  bisulfite treated nucleic acid for analysis of methylation status of SEQ ID NO: 45
gggcgttttcgagtttttagt

SEQ ID NO: 5590 - DNA, 29 bp, Artificial Sequence
  bisulfite treated nucleic acid for analysis of methylation status of SEQ ID NO: 45
aagttaaaggagcgtagggcgtagatggt

SEQ ID NO: 5591 - DNA, 19 bp, Artificial Sequence
  bisulfite treated nucleic acid for analysis of methylation status of SEQ ID NO: 45
cgtagggcgtagatggttt

SEQ ID NO: 5592 - DNA, 22 bp, Artificial Sequence
  bisulfite treated nucleic acid for analysis of methylation status of SEQ ID NO: 45
tttacgttgatttgtacggtgg

SEQ ID NO: 5593 - DNA, 21 bp, Artificial Sequence
  bisulfite treated nucleic acid for analysis of methylation status of SEQ ID NO: 45
aacatatcgctaccgctcatc

SEQ ID NO: 5594 - DNA, 22 bp, Artificial Sequence
  bisulfite treated nucleic acid for analysis of methylation status of SEQ ID NO: 45
ttgtcgtggtcggttattttta

SEQ ID NO: 5595 - DNA, 20 bp, Artificial Sequence
  bisulfite treated nucleic acid for analysis of methylation status of SEQ ID NO: 45
aacgataacgaacctccacg

SEQ ID NO: 5596 - DNA, 20 bp, Artificial Sequence
  bisulfite treated nucleic acid for analysis of methylation status of SEQ ID NO: 45
gctaccgctcatcgtaactc

SEQ ID NO: 5597 - DNA, 20 bp, Artificial Sequence
  bisulfite treated nucleic acid for analysis of methylation status of SEQ ID NO: 45
ggaggagagttttcgtttcg

SEQ ID NO: 5598 - DNA, 20 bp, Artificial Sequence
  bisulfite treated nucleic acid for analysis of methylation status of SEQ ID NO: 45
aaacatatcgctaccgctca

SEQ ID NO: 5599 - DNA, 23 bp, Artificial Sequence
  bisulfite treated nucleic acid for analysis of methylation status of SEQ ID NO: 45
gcgttttcgagtttttagtaagt

SEQ ID NO: 5600 - DNA, 20 bp, Artificial Sequence
  bisulfite treated nucleic acid for analysis of methylation status of SEQ ID NO: 45
aaaaactctaaaccgcgaac

SEQ ID NO: 5601 - DNA, 20 bp, Artificial Sequence
  bisulfite treated nucleic acid for analysis of methylation status of SEQ ID NO: 45
ccctaaacaacgacttcgac

SEQ ID NO: 5602 - DNA, 22 bp, Artificial Sequence
  bisulfite treated nucleic acid for analysis of methylation status of SEQ ID NO: 45
tttattacgggcgttacgtttt

SEQ ID NO: 5603 - DNA, 19 bp, Artificial Sequence
  bisulfite treated nucleic acid for analysis of methylation status of SEQ ID NO: 45
atctacgccctacgctcct

SEQ ID NO: 5604 - DNA, 19 bp, Artificial Sequence
  bisulfite treated nucleic acid for analysis of methylation status of SEQ ID NO: 45
taactaaccgcccgctaaa

SEQ ID NO: 5605 - DNA, 22 bp, Artificial Sequence
  bisulfite treated nucleic acid for analysis of methylation status of SEQ ID NO: 45
aaaaacgtaacgcccgtaataa

SEQ ID NO: 5606 - DNA, 22 bp, Artificial Sequence
  bisulfite treated nucleic acid for analysis of methylation status of SEQ ID NO: 45
gcgcgttgttatttacgtttag

SEQ ID NO: 5607 - DNA, 33 bp, Artificial Sequence
  bisulfite treated nucleic acid for analysis of methylation status of SEQ ID NO: 45
ggcgttgttttttaagtgcgcgggcgttttcga

SEQ ID NO: 5608 - DNA, 22 bp, Artificial Sequence
  bisulfite treated nucleic acid for analysis of methylation status of SEQ ID NO: 45
aatcacgatcaaactcatcgac

SEQ ID NO: 5609 - DNA, 19 bp, Artificial Sequence
  bisulfite treated nucleic acid for analysis of methylation status of SEQ ID NO: 45
cggtttcgtttagcgtttt

SEQ ID NO: 5610 - DNA, 27 bp, Artificial Sequence
  bisulfite treated nucleic acid for analysis of methylation status of SEQ ID NO: 45
tacggagacgaaatcgatggacggcgt

SEQ ID NO: 5611 - DNA, 19 bp, Artificial Sequence
  bisulfite treated nucleic acid for analysis of methylation status of SEQ ID NO: 45
attcgtttatcgagcggat

SEQ ID NO: 5612 - DNA, 19 bp, Artificial Sequence
  bisulfite treated nucleic acid for analysis of methylation status of SEQ ID NO: 45
gtagtttcgcggtgtcgtt

SEQ ID NO: 5613 - DNA, 28 bp, Artificial Sequence
  bisulfite treated nucleic acid for analysis of methylation status of SEQ ID NO: 45
agcgtggggagtacgattattggcgcgt

SEQ ID NO: 5614 - DNA, 22 bp, Artificial Sequence
  bisulfite treated nucleic acid for analysis of methylation status of SEQ ID NO: 45
acgctcgtactaactaccctaa

SEQ ID NO: 5615 - DNA, 20 bp, Artificial Sequence
  bisulfite treated nucleic acid for analysis of methylation status of SEQ ID NO: 45
gcgcaacgctaacctaaact

SEQ ID NO: 5616 - DNA, 19 bp, Artificial Sequence
  bisulfite treated nucleic acid for analysis of methylation status of SEQ ID NO: 45
cgcacttacaactaccgca

SEQ ID NO: 5617 - DNA, 33 bp, Artificial Sequence
  bisulfite treated nucleic acid for analysis of methylation status of SEQ ID NO: 45
tgtttttatttagttgcgggtggttgtattcgg

SEQ ID NO: 5618 - DNA, 22 bp, Artificial Sequence
  bisulfite treated nucleic acid for analysis of methylation status of SEQ ID NO: 45
ttatttttatcgtggcgttgtt

SEQ ID NO: 5619 - DNA, 18 bp, Artificial Sequence
  bisulfite treated nucleic acid for analysis of methylation status of SEQ ID NO: 45
gacgccgataaaaatccc

SEQ ID NO: 5620 - DNA, 22 bp, Artificial Sequence
  bisulfite treated nucleic acid for analysis of methylation status of SEQ ID NO: 45
tatacggattaggtcggttttg

SEQ ID NO: 5621 - DNA, 32 bp, Artificial Sequence
  bisulfite treated nucleic acid for analysis of methylation status of SEQ ID NO: 45
gtacgcggttaggtacgtagttgttgaaagag

SEQ ID NO: 5622 - DNA, 20 bp, Artificial Sequence
  bisulfite treated nucleic acid for analysis of methylation status of SEQ ID NO: 45
ccctaaacgataacgaacct

SEQ ID NO: 5623 - DNA, 22 bp, Artificial Sequence
  bisulfite treated nucleic acid for analysis of methylation status of SEQ ID NO: 45
attattggcgcgttgttattta

SEQ ID NO: 5624 - DNA, 23 bp, Artificial Sequence
  bisulfite treated nucleic acid for analysis of methylation status of SEQ ID NO: 45
cgacgacgtatctatctacacct

SEQ ID NO: 5625 - DNA, 21 bp, Artificial Sequence
  bisulfite treated nucleic acid for analysis of methylation status of SEQ ID NO: 45
caacgccacgataaaaataac

SEQ ID NO: 5626 - DNA, 22 bp, Artificial Sequence
  bisulfite treated nucleic acid for analysis of methylation status of SEQ ID NO: 45
atttttacgttgatttgtacgg

SEQ ID NO: 5627 - DNA, 23 bp, Artificial Sequence
  bisulfite treated nucleic acid for analysis of methylation status of SEQ ID NO: 45
tttttacgttgatttgtacggtg

SEQ ID NO: 5628 - DNA, 20 bp, Artificial Sequence
  bisulfite treated nucleic acid for analysis of methylation status of SEQ ID NO: 45
taaacgataacgaacctcca

SEQ ID NO: 5629 - DNA, 21 bp, Artificial Sequence
  bisulfite treated nucleic acid for analysis of methylation status of SEQ ID NO: 45
cgacctaaaccaaaacgacac

SEQ ID NO: 5630 - DNA, 21 bp, Artificial Sequence
  bisulfite treated nucleic acid for analysis of methylation status of SEQ ID NO: 45
tttatttcgatttggttcgag

SEQ ID NO: 5631 - DNA, 24 bp, Artificial Sequence
  bisulfite treated nucleic acid for analysis of methylation status of SEQ ID NO: 45
aggagggcgcgttgtcgttgatgt

SEQ ID NO: 5632 - DNA, 22 bp, Artificial Sequence
  bisulfite treated nucleic acid for analysis of methylation status of SEQ ID NO: 45
tattgttatttttatcgtggcg

SEQ ID NO: 5633 - DNA, 19 bp, Artificial Sequence
  bisulfite treated nucleic acid for analysis of methylation status of SEQ ID NO: 45
gacgacgacaccaaattcc

SEQ ID NO: 5634 - DNA, 23 bp, Artificial Sequence
  bisulfite treated nucleic acid for analysis of methylation status of SEQ ID NO: 45
aaccgacctaatccgtataaaaa

SEQ ID NO: 5635 - DNA, 20 bp, Artificial Sequence
  bisulfite treated nucleic acid for analysis of methylation status of SEQ ID NO: 45
ggtcgatgagtttgatcgtg

SEQ ID NO: 5636 - DNA, 37 bp, Artificial Sequence
  bisulfite treated nucleic acid for analysis of methylation status of SEQ ID NO: 45
aggtttcgggtttgtacgttaatttttagtatttcgt

SEQ ID NO: 5637 - DNA, 23 bp, Artificial Sequence
  bisulfite treated nucleic acid for analysis of methylation status of SEQ ID NO: 45
aaaaccgacctaatccgtataaa

SEQ ID NO: 5638 - DNA, 19 bp, Artificial Sequence
  bisulfite treated nucleic acid for analysis of methylation status of SEQ ID NO: 45
aaaccatctacgccctacg

SEQ ID NO: 5639 - DNA, 22 bp, Artificial Sequence
  bisulfite treated nucleic acid for analysis of methylation status of SEQ ID NO: 45
cgccctaatacgaatcactaac

SEQ ID NO: 5640 - DNA, 18 bp, Artificial Sequence
  bisulfite treated nucleic acid for analysis of methylation status of SEQ ID NO: 45
gacggaattttcgggttc

SEQ ID NO: 5641 - DNA, 39 bp, Artificial Sequence
  bisulfite treated nucleic acid for analysis of methylation status of SEQ ID NO: 45
aggattcgatattgtagttgttcgtttttgttagagttt

SEQ ID NO: 5642 - DNA, 21 bp, Artificial Sequence
  bisulfite treated nucleic acid for analysis of methylation status of SEQ ID NO: 45
ttatttcgatttggttcgagg

SEQ ID NO: 5643 - DNA, 22 bp, Artificial Sequence
  bisulfite treated nucleic acid for analysis of methylation status of SEQ ID NO: 45
accgacctaatccgtataaaaa

SEQ ID NO: 5644 - DNA, 22 bp, Artificial Sequence
  bisulfite treated nucleic acid for analysis of methylation status of SEQ ID NO: 45
aaaccgacctaatccgtataaa

SEQ ID NO: 5645 - DNA, 19 bp, Artificial Sequence
  bisulfite treated nucleic acid for analysis of methylation status of SEQ ID NO: 45
ataaacgaatcccttcccg

SEQ ID NO: 5646 - DNA, 19 bp, Artificial Sequence
  bisulfite treated nucleic acid for analysis of methylation status of SEQ ID NO: 45
ttacgggcgttacgttttt

SEQ ID NO: 5647 - DNA, 25 bp, Artificial Sequence
  bisulfite treated nucleic acid for analysis of methylation status of SEQ ID NO: 45
ctatctaataaacactatacgcgcc

SEQ ID NO: 5648 - DNA, 18 bp, Artificial Sequence
  bisulfite treated nucleic acid for analysis of methylation status of SEQ ID NO: 45
cgtactccccacgctaca

SEQ ID NO: 5649 - DNA, 19 bp, Artificial Sequence
  bisulfite treated nucleic acid for analysis of methylation status of SEQ ID NO: 45
tccgcacttacaactaccg

SEQ ID NO: 5650 - DNA, 19 bp, Artificial Sequence
  bisulfite treated nucleic acid for analysis of methylation status of SEQ ID NO: 45
acgacaacaacccgatctt

SEQ ID NO: 5651 - DNA, 18 bp, Artificial Sequence
  bisulfite treated nucleic acid for analysis of methylation status of SEQ ID NO: 45
gtgtagcgtgcggatttc

SEQ ID NO: 5652 - DNA, 18 bp, Artificial Sequence
  bisulfite treated nucleic acid for analysis of methylation status of SEQ ID NO: 45
tcgaagatcgggttgttg

SEQ ID NO: 5653 - DNA, 34 bp, Artificial Sequence
  bisulfite treated nucleic acid for analysis of methylation status of SEQ ID NO: 45
aattatttttacgttgatttgtacggtggcggaa

SEQ ID NO: 5654 - DNA, 22 bp, Artificial Sequence
  bisulfite treated nucleic acid for analysis of methylation status of SEQ ID NO: 45
atcgccctaatacgaatcacta

SEQ ID NO: 5655 - DNA, 38 bp, Artificial Sequence
  bisulfite treated nucleic acid for analysis of methylation status of SEQ ID NO: 45
ttcgatattgtagttgttcgtttttgttagagtttcgg

SEQ ID NO: 5656 - DNA, 24 bp, Artificial Sequence
  bisulfite treated nucleic acid for analysis of methylation status of SEQ ID NO: 45
attattagttttattacgggcgtt

SEQ ID NO: 5657 - DNA, 22 bp, Artificial Sequence
  bisulfite treated nucleic acid for analysis of methylation status of SEQ ID NO: 45
cgatggtgattatggtcgttag

SEQ ID NO: 5658 - DNA, 45 bp, Artificial Sequence
  bisulfite treated nucleic acid for analysis of methylation status of SEQ ID NO: 45
agcggtagcgatatgttttagtggtgttgttcgttatttattcgt

SEQ ID NO: 5659 - DNA, 20 bp, Artificial Sequence
  bisulfite treated nucleic acid for analysis of methylation status of SEQ ID NO: 45
ttaagtaggatggcgtttcg

SEQ ID NO: 5660 - DNA, 21 bp, Artificial Sequence
  bisulfite treated nucleic acid for analysis of methylation status of SEQ ID NO: 45
ttttattacgggcgttacgtt

SEQ ID NO: 5661 - DNA, 20 bp, Artificial Sequence
  bisulfite treated nucleic acid for analysis of methylation status of SEQ ID NO: 45
atgcggtagttgtaagtgcg

SEQ ID NO: 5662 - DNA, 20 bp, Artificial Sequence
  bisulfite treated nucleic acid for analysis of methylation status of SEQ ID NO: 45
ataataactaaccgcccgct

SEQ ID NO: 5663 - DNA, 21 bp, Artificial Sequence
  bisulfite treated nucleic acid for analysis of methylation status of SEQ ID NO: 45
gggttgtcgttttcgtttaga

SEQ ID NO: 5664 - DNA, 19 bp, Artificial Sequence
  bisulfite treated nucleic acid for analysis of methylation status of SEQ ID NO: 45
aaaacgctaaacgaaaccg

SEQ ID NO: 5665 - DNA, 23 bp, Artificial Sequence
  bisulfite treated nucleic acid for analysis of methylation status of SEQ ID NO: 45
ggattcgatattgtagttgttcg

SEQ ID NO: 5666 - DNA, 32 bp, Artificial Sequence
  bisulfite treated nucleic acid for analysis of methylation status of SEQ ID NO: 45
gtttcggttagtgattcgtattagggcgatga

SEQ ID NO: 5667 - DNA, 22 bp, Artificial Sequence
  bisulfite treated nucleic acid for analysis of methylation status of SEQ ID NO: 9
gtcgtttacgtcgtgatattga

SEQ ID NO: 5668 - DNA, 22 bp, Artificial Sequence
  bisulfite treated nucleic acid for analysis of methylation status of SEQ ID NO: 9
cgaatcttcaactaccgattct

SEQ ID NO: 5669 - DNA, 29 bp, Artificial Sequence
  bisulfite treated nucleic acid for analysis of methylation status of SEQ ID NO: 9
aggagagtagtagtcgtgcggggtttttt

SEQ ID NO: 5670 - DNA, 22 bp, Artificial Sequence
  bisulfite treated nucleic acid for analysis of methylation status of SEQ ID NO: 9
tcgtttacgtcgtgatattgat

SEQ ID NO: 5671 - DNA, 21 bp, Artificial Sequence
  bisulfite treated nucleic acid for analysis of methylation status of SEQ ID NO: 9
ccgaatcttcaactaccgatt

SEQ ID NO: 5672 - DNA, 22 bp, Artificial Sequence
  bisulfite treated nucleic acid for analysis of methylation status of SEQ ID NO: 9
agtcgtttacgtcgtgatattg

SEQ ID NO: 5673 - DNA, 22 bp, Artificial Sequence
  bisulfite treated nucleic acid for analysis of methylation status of SEQ ID NO: 9
agaatcggtagttgaagattcg

SEQ ID NO: 5674 - DNA, 22 bp, Artificial Sequence
  bisulfite treated nucleic acid for analysis of methylation status of SEQ ID NO: 9
gcccgtaaacgataacaaaaat

SEQ ID NO: 5675 - DNA, 34 bp, Artificial Sequence
  bisulfite treated nucleic acid for analysis of methylation status of SEQ ID NO: 9
ggcgatttttgagacggatggtgtatagttgcgg

SEQ ID NO: 5676 - DNA, 23 bp, Artificial Sequence
  bisulfite treated nucleic acid for analysis of methylation status of SEQ ID NO: 9
gagtcgtttacgtcgtgatattg

SEQ ID NO: 5677 - DNA, 22 bp, Artificial Sequence
  bisulfite treated nucleic acid for analysis of methylation status of SEQ ID NO: 9
cccgtaaacgataacaaaaata

SEQ ID NO: 5678 - DNA, 21 bp, Artificial Sequence
  bisulfite treated nucleic acid for analysis of methylation status of SEQ ID NO: 9
aatcggtagttgaagattcgg

SEQ ID NO: 5679 - DNA, 23 bp, Artificial Sequence
  bisulfite treated nucleic acid for analysis of methylation status of SEQ ID NO: 9
tagaatcggtagttgaagattcg

SEQ ID NO: 5680 - DNA, 21 bp, Artificial Sequence
  bisulfite treated nucleic acid for analysis of methylation status of SEQ ID NO: 9
tacccgaatcttcaactaccg

SEQ ID NO: 5681 - DNA, 23 bp, Artificial Sequence
  bisulfite treated nucleic acid for analysis of methylation status of SEQ ID NO: 9
ggagtcgtttacgtcgtgatatt

SEQ ID NO: 5682 - DNA, 23 bp, Artificial Sequence
  bisulfite treated nucleic acid for analysis of methylation status of SEQ ID NO: 9
gtcgtttacgtcgtgatattgat

SEQ ID NO: 5683 - DNA, 21 bp, Artificial Sequence
  bisulfite treated nucleic acid for analysis of methylation status of SEQ ID NO: 9
gtgtatagttgcggacgtttg

SEQ ID NO: 5684 - DNA, 21 bp, Artificial Sequence
  bisulfite treated nucleic acid for analysis of methylation status of SEQ ID NO: 9
gcccgtaaacgataacaaaaa

SEQ ID NO: 5685 - DNA, 26 bp, Artificial Sequence
  bisulfite treated nucleic acid for analysis of methylation status of SEQ ID NO: 9
tggaagtcgtcggatcggatgttggg

SEQ ID NO: 5686 - DNA, 22 bp, Artificial Sequence
  bisulfite treated nucleic acid for analysis of methylation status of SEQ ID NO: 9
gaatcggtagttgaagattcgg

SEQ ID NO: 5687 - DNA, 21 bp, Artificial Sequence
  bisulfite treated nucleic acid for analysis of methylation status of SEQ ID NO: 9
cggtagttgaagattcgggta

SEQ ID NO: 5688 - DNA, 20 bp, Artificial Sequence
  bisulfite treated nucleic acid for analysis of methylation status of SEQ ID NO: 9
gtatagttgcggacgtttgg

SEQ ID NO: 5689 - DNA, 25 bp, Artificial Sequence
  bisulfite treated nucleic acid for analysis of methylation status of SEQ ID NO: 9
cgattctaactactacaaccctacg

SEQ ID NO: 5690 - DNA, 22 bp, Artificial Sequence
  bisulfite treated nucleic acid for analysis of methylation status of SEQ ID NO: 9
attttatttcgcgtttttagcg

SEQ ID NO: 5691 - DNA, 20 bp, Artificial Sequence
  bisulfite treated nucleic acid for analysis of methylation status of SEQ ID NO: 9
cctaccaccaatacgacgac

SEQ ID NO: 5692 - DNA, 21 bp, Artificial Sequence
  bisulfite treated nucleic acid for analysis of methylation status of SEQ ID NO: 9
tggtggcgtttgggacgcggt

SEQ ID NO: 5693 - DNA, 20 bp, Artificial Sequence
  bisulfite treated nucleic acid for analysis of methylation status of SEQ ID NO: 9
acccgaatcttcaactaccg

SEQ ID NO: 5694 - DNA, 20 bp, Artificial Sequence
  bisulfite treated nucleic acid for analysis of methylation status of SEQ ID NO: 9
acggatggtgtatagttgcg

SEQ ID NO: 5695 - DNA, 27 bp, Artificial Sequence
  bisulfite treated nucleic acid for analysis of methylation status of SEQ ID NO: 9
tggaacggagtttggaagtcgtcggat

SEQ ID NO: 5696 - DNA, 19 bp, Artificial Sequence
  bisulfite treated nucleic acid for analysis of methylation status of SEQ ID NO: 9
cccgaatcttcaactaccg

SEQ ID NO: 5697 - DNA, 21 bp, Artificial Sequence
  bisulfite treated nucleic acid for analysis of methylation status of SEQ ID NO: 9
tttatttcgcgtttttagcgt

SEQ ID NO: 5698 - DNA, 21 bp, Artificial Sequence
  bisulfite treated nucleic acid for analysis of methylation status of SEQ ID NO: 9
ttatttcgcgtttttagcgtt

SEQ ID NO: 5699 - DNA, 21 bp, Artificial Sequence
  bisulfite treated nucleic acid for analysis of methylation status of SEQ ID NO: 9
cgtttacgtcgtgatattgat

SEQ ID NO: 5700 - DNA, 24 bp, Artificial Sequence
  bisulfite treated nucleic acid for analysis of methylation status of SEQ ID NO: 9
ttagaatcggtagttgaagattcg

SEQ ID NO: 5701 - DNA, 21 bp, Artificial Sequence
  nucleic acid for analysis of methylation status of SEQ ID NO: 9
atcgccgaatcgaatactaaa

SEQ ID NO: 5702 - DNA, 22 bp, Artificial Sequence
  bisulfite treated nucleic acid for analysis of methylation status of SEQ ID NO: 9
aattagggtagttgtcgtcgtt

SEQ ID NO: 5703 - DNA, 30 bp, Artificial Sequence
  bisulfite treated nucleic acid for analysis of methylation status of SEQ ID NO: 9
gtcgttcgtgagcgatgataggagtgtttg

SEQ ID NO: 5704 - DNA, 22 bp, Artificial Sequence
  bisulfite treated nucleic acid for analysis of methylation status of SEQ ID NO: 9
ctcgaacaaaattaacgattcc

SEQ ID NO: 5705 - DNA, 22 bp, Artificial Sequence
  bisulfite treated nucleic acid for analysis of methylation status of SEQ ID NO: 9
agtaaggatagtcgttgtcgtc

SEQ ID NO: 5706 - DNA, 37 bp, Artificial Sequence
  bisulfite treated nucleic acid for analysis of methylation status of SEQ ID NO: 9
agtattcgattcggcgatttttaagtttcgttttaga

SEQ ID NO: 5707 - DNA, 21 bp, Artificial Sequence
  bisulfite treated nucleic acid for analysis of methylation status of SEQ ID NO: 9
gttcgtgagcgatgataggag

SEQ ID NO: 5708 - DNA, 22 bp, Artificial Sequence
  bisulfite treated nucleic acid for analysis of methylation status of SEQ ID NO: 9
aatcgccgaatcgaatactaaa

SEQ ID NO: 5709 - DNA, 20 bp, Artificial Sequence
  bisulfite treated nucleic acid for analysis of methylation status of SEQ ID NO: 9
cgccgaatcgaatactaaaa

SEQ ID NO: 5710 - DNA, 20 bp, Artificial Sequence
  bisulfite treated nucleic acid for analysis of methylation status of SEQ ID NO: 9
ttcgtgagcgatgataggag

SEQ ID NO: 5711 - DNA, 20 bp, Artificial Sequence
  bisulfite treated nucleic acid for analysis of methylation status of SEQ ID NO: 9
tcgccgaatcgaatactaaa

SEQ ID NO: 5712 - DNA, 20 bp, Artificial Sequence
  bisulfite treated nucleic acid for analysis of methylation status of SEQ ID NO: 9
cgtgagcgatgataggagtg

SEQ ID NO: 5713 - DNA, 21 bp, Artificial Sequence
  bisulfite treated nucleic acid for analysis of methylation status of SEQ ID NO: 9
taaaaatcgccgaatcgaata

SEQ ID NO: 5714 - DNA, 20 bp, Artificial Sequence
  bisulfite treated nucleic acid for analysis of methylation status of SEQ ID NO: 9
cgttcacgccgtaatactaa

SEQ ID NO: 5715 - DNA, 22 bp, Artificial Sequence
  bisulfite treated nucleic acid for analysis of methylation status of SEQ ID NO: 9
ggaatcgttaattttgttcgag

SEQ ID NO: 5716 - DNA, 40 bp, Artificial Sequence
  bisulfite treated nucleic acid for analysis of methylation status of SEQ ID NO: 9
atcgattttgattattatagttttacggggggagtttcgt

SEQ ID NO: 5717 - DNA, 19 bp, Artificial Sequence
  bisulfite treated nucleic acid for analysis of methylation status of SEQ ID NO: 9
acacccgcaccgtactaac

SEQ ID NO: 5718 - DNA, 22 bp, Artificial Sequence
  bisulfite treated nucleic acid for analysis of methylation status of SEQ ID NO: 9
cgtttgcgtaataaagagaagg

SEQ ID NO: 5719 - DNA, 24 bp, Artificial Sequence
  bisulfite treated nucleic acid for analysis of methylation status of SEQ ID NO: 9
agcgtgttgggttggtgcgagtgg

SEQ ID NO: 5720 - DNA, 19 bp, Artificial Sequence
  bisulfite treated nucleic acid for analysis of methylation status of SEQ ID NO: 9
tcgtgagcgatgataggag

SEQ ID NO: 5721 - DNA, 20 bp, Artificial Sequence
  bisulfite treated nucleic acid for analysis of methylation status of SEQ ID NO: 9
aaatcgccgaatcgaatact

SEQ ID NO: 5722 - DNA, 22 bp, Artificial Sequence
  bisulfite treated nucleic acid for analysis of methylation status of SEQ ID NO: 9
gcgtttgcgtaataaagagaag

SEQ ID NO: 5723 - DNA, 19 bp, Artificial Sequence
  bisulfite treated nucleic acid for analysis of methylation status of SEQ ID NO: 9
cacccgcaccgtactaact

SEQ ID NO: 5724 - DNA, 22 bp, Artificial Sequence
  bisulfite treated nucleic acid for analysis of methylation status of SEQ ID NO: 9
cgaacgtctaaaacgaaactta

SEQ ID NO: 5725 - DNA, 20 bp, Artificial Sequence
  bisulfite treated nucleic acid for analysis of methylation status of SEQ ID NO: 9
tcgtgagcgatgataggagt

SEQ ID NO: 5726 - DNA, 36 bp, Artificial Sequence
  bisulfite treated nucleic acid for analysis of methylation status of SEQ ID NO: 9
tgatagaagggtttttagtattcgattcggcgattt

SEQ ID NO: 5727 - DNA, 21 bp, Artificial Sequence
  bisulfite treated nucleic acid for analysis of methylation status of SEQ ID NO: 9
aaaatcgccgaatcgaatact

SEQ ID NO: 5728 - DNA, 20 bp, Artificial Sequence
  bisulfite treated nucleic acid for analysis of methylation status of SEQ ID NO: 9
aacacccgcaccgtactaac

SEQ ID NO: 5729 - DNA, 22 bp, Artificial Sequence
  bisulfite treated nucleic acid for analysis of methylation status of SEQ ID NO: 9
ttagggtagttgtcgtcgttat

SEQ ID NO: 5730 - DNA, 22 bp, Artificial Sequence
  bisulfite treated nucleic acid for analysis of methylation status of SEQ ID NO: 9
attagggtagttgtcgtcgtta

SEQ ID NO: 5731 - DNA, 20 bp, Artificial Sequence
  bisulfite treated nucleic acid for analysis of methylation status of SEQ ID NO: 9
gttcgtgagcgatgatagga

SEQ ID NO: 5732 - DNA, 21 bp, Artificial Sequence
  bisulfite treated nucleic acid for analysis of methylation status of SEQ ID NO: 9
ttcgtgagcgatgataggagt

SEQ ID NO: 5733 - DNA, 22 bp, Artificial Sequence
  bisulfite treated nucleic acid for analysis of methylation status of SEQ ID NO: 9
ctacgaacgtctaaaacgaaac

SEQ ID NO: 5734 - DNA, 23 bp, Artificial Sequence
  bisulfite treated nucleic acid for analysis of methylation status of SEQ ID NO: 9
actcgaacaaaattaacgattcc

SEQ ID NO: 5735 - DNA, 23 bp, Artificial Sequence
  bisulfite treated nucleic acid for analysis of methylation status of SEQ ID NO: 9
acgaacgtctaaaacgaaactta

SEQ ID NO: 5736 - DNA, 19 bp, Artificial Sequence
  bisulfite treated nucleic acid for analysis of methylation status of SEQ ID NO: 9
ctactcccttctaccgcgt

SEQ ID NO: 5737 - DNA, 22 bp, Artificial Sequence
  bisulfite treated nucleic acid for analysis of methylation status of SEQ ID NO: 9
gatatagggcgattaggacgtt

SEQ ID NO: 5738 - DNA, 28 bp, Artificial Sequence
  bisulfite treated nucleic acid for analysis of methylation status of SEQ ID NO: 9
tgggggttatagcggtttacggtagtgg

SEQ ID NO: 5739 - DNA, 23 bp, Artificial Sequence
  bisulfite treated nucleic acid for analysis of methylation status of SEQ ID NO: 9
aaaaactcgaacaaaattaacga

SEQ ID NO: 5740 - DNA, 22 bp, Artificial Sequence
  bisulfite treated nucleic acid for analysis of methylation status of SEQ ID NO: 9
aaaaactcgaacaaaattaacg

SEQ ID NO: 5741 - DNA, 22 bp, Artificial Sequence
  bisulfite treated nucleic acid for analysis of methylation status of SEQ ID NO: 9
aaaactcgaacaaaattaacga

SEQ ID NO: 5742 - DNA, 21 bp, Artificial Sequence
  bisulfite treated nucleic acid for analysis of methylation status of SEQ ID NO: 9
tcgaacaaaattaacgattcc

SEQ ID NO: 5743 - DNA, 22 bp, Artificial Sequence
  bisulfite treated nucleic acid for analysis of methylation status of SEQ ID NO: 9
tacgaacgtctaaaacgaaact

SEQ ID NO: 5744 - DNA, 21 bp, Artificial Sequence
  bisulfite treated nucleic acid for analysis of methylation status of SEQ ID NO: 46
ggttagacgacgagtagggtc

SEQ ID NO: 5745 - DNA, 22 bp, Artificial Sequence
  bisulfite treated nucleic acid for analysis of methylation status of SEQ ID NO: 46
caacacgaacgtataaaaacga

SEQ ID NO: 5746 - DNA, 26 bp, Artificial Sequence
  bisulfite treated nucleic acid for analysis of methylation status of SEQ ID NO: 46
gttcgaggttttttggtggcgcgcga

SEQ ID NO: 5747 - DNA, 21 bp, Artificial Sequence
  bisulfite treated nucleic acid for analysis of methylation status of SEQ ID NO: 46
ttttcgttgagatggataacg

SEQ ID NO: 5748 - DNA, 22 bp, Artificial Sequence
  bisulfite treated nucleic acid for analysis of methylation status of SEQ ID NO: 46
caccgcgtaaacaactaataca

SEQ ID NO: 5749 - DNA, 38 bp, Artificial Sequence
  bisulfite treated nucleic acid for analysis of methylation status of SEQ ID NO: 46
ttcggcgttgagttgttttaacgcgtcgattttggcgt

SEQ ID NO: 5750 - DNA, 22 bp, Artificial Sequence
  bisulfite treated nucleic acid for analysis of methylation status of SEQ ID NO: 46
cggttgcgttatttttgtattt

SEQ ID NO: 5751 - DNA, 22 bp, Artificial Sequence
  bisulfite treated nucleic acid for analysis of methylation status of SEQ ID NO: 46
ctaccgactaaatatccgcctc

SEQ ID NO: 5752 - DNA, 20 bp, Artificial Sequence
  bisulfite treated nucleic acid for analysis of methylation status of SEQ ID NO: 46
ggcggggacgcgagttgcgg

SEQ ID NO: 5753 - DNA, 21 bp, Artificial Sequence
  bisulfite treated nucleic acid for analysis of methylation status of SEQ ID NO: 46
ttcggaaaaattagagaacgg

SEQ ID NO: 5754 - DNA, 22 bp, Artificial Sequence
  bisulfite treated nucleic acid for analysis of methylation status of SEQ ID NO: 46
cgaaactcaacgatcctaaaac

SEQ ID NO: 5755 - DNA, 27 bp, Artificial Sequence
  bisulfite treated nucleic acid for analysis of methylation status of SEQ ID NO: 46
gagcgttcgcgagtaggttcgtgtaga

SEQ ID NO: 5756 - DNA, 22 bp, Artificial Sequence
  bisulfite treated nucleic acid for analysis of methylation status of SEQ ID NO: 46
acgaaactcaacgatcctaaaa

SEQ ID NO: 5757 - DNA, 28 bp, Artificial Sequence
  bisulfite treated nucleic acid for analysis of methylation status of SEQ ID NO: 46
ttcgcgagtaggttcgtgtagaatcggg

SEQ ID NO: 5758 - DNA, 21 bp, Artificial Sequence
  bisulfite treated nucleic acid for analysis of methylation status of SEQ ID NO: 46
taccgactaaatatccgcctc

SEQ ID NO: 5759 - DNA, 22 bp, Artificial Sequence
  bisulfite treated nucleic acid for analysis of methylation status of SEQ ID NO: 46
gtagaatcgggttttaggatcg

SEQ ID NO: 5760 - DNA, 22 bp, Artificial Sequence
  bisulfite treated nucleic acid for analysis of methylation status of SEQ ID NO: 46
acgttatccatctcaacgaaaa

SEQ ID NO: 5761 - DNA, 29 bp, Artificial Sequence
  bisulfite treated nucleic acid for analysis of methylation status of SEQ ID NO: 46
ggcgtttttgggggacgttaggtcgtcgg

SEQ ID NO: 5762 - DNA, 21 bp, Artificial Sequence
  bisulfite treated nucleic acid for analysis of methylation status of SEQ ID NO: 46
tagaatcgggttttaggatcg

SEQ ID NO: 5763 - DNA, 21 bp, Artificial Sequence
  bisulfite treated nucleic acid for analysis of methylation status of SEQ ID NO: 46
ggtcggtcgtatttatagcgt

SEQ ID NO: 5764 - DNA, 22 bp, Artificial Sequence
  bisulfite treated nucleic acid for analysis of methylation status of SEQ ID NO: 46
tcgtctaaccgaacgaaaacta

SEQ ID NO: 5765 - DNA, 26 bp, Artificial Sequence
  bisulfite treated nucleic acid for analysis of methylation status of SEQ ID NO: 46
gtgagtttggtcgtgtgggggatcgt

SEQ ID NO: 5766 - DNA, 21 bp, Artificial Sequence
  bisulfite treated nucleic acid for analysis of methylation status of SEQ ID NO: 46
cgttatccatctcaacgaaaa

SEQ ID NO: 5767 - DNA, 20 bp, Artificial Sequence
  bisulfite treated nucleic acid for analysis of methylation status of SEQ ID NO: 46
accgactaaatatccgcctc

SEQ ID NO: 5768 - DNA, 21 bp, Artificial Sequence
  bisulfite treated nucleic acid for analysis of methylation status of SEQ ID NO: 46
gaccctactcgtcgtctaacc

SEQ ID NO: 5769 - DNA, 23 bp, Artificial Sequence
  bisulfite treated nucleic acid for analysis of methylation status of SEQ ID NO: 46
tacgaaactcaacgatcctaaaa

SEQ ID NO: 5770 - DNA, 21 bp, Artificial Sequence
  bisulfite treated nucleic acid for analysis of methylation status of SEQ ID NO: 46
tttttagtttcgtgagttcgc

SEQ ID NO: 5771 - DNA, 22 bp, Artificial Sequence
  bisulfite treated nucleic acid for analysis of methylation status of SEQ ID NO: 46
aaaccgttctctaatttttccg

SEQ ID NO: 5772 - DNA, 29 bp, Artificial Sequence
  bisulfite treated nucleic acid for analysis of methylation status of SEQ ID NO: 46
atattgggtcgtggggtggttgggaacgg

SEQ ID NO: 5773 - DNA, 22 bp, Artificial Sequence
  bisulfite treated nucleic acid for analysis of methylation status of SEQ ID NO: 46
cgcgtaaacaactaatacaacc

SEQ ID NO: 5774 - DNA, 22 bp, Artificial Sequence
  bisulfite treated nucleic acid for analysis of methylation status of SEQ ID NO: 46
ccgcgtaaacaactaatacaac

SEQ ID NO: 5775 - DNA, 21 bp, Artificial Sequence
  bisulfite treated nucleic acid for analysis of methylation status of SEQ ID NO: 46
cggttagggtagtggaacgta

SEQ ID NO: 5776 - DNA, 22 bp, Artificial Sequence
  bisulfite treated nucleic acid for analysis of methylation status of SEQ ID NO: 46
aacgcctaccgactaaatatcc

SEQ ID NO: 5777 - DNA, 22 bp, Artificial Sequence
  bisulfite treated nucleic acid for analysis of methylation status of SEQ ID NO: 46
ggtggtcggtcgtatttatagc

SEQ ID NO: 5778 - DNA, 20 bp, Artificial Sequence
  bisulfite treated nucleic acid for analysis of methylation status of SEQ ID NO: 46
agaatcgggttttaggatcg

SEQ ID NO: 5779 - DNA, 23 bp, Artificial Sequence
  bisulfite treated nucleic acid for analysis of methylation status of SEQ ID NO: 46
accgcgtaaacaactaatacaac

SEQ ID NO: 5780 - DNA, 22 bp, Artificial Sequence
  bisulfite treated nucleic acid for analysis of methylation status of SEQ ID NO: 46
gggtggtcggtcgtatttatag

SEQ ID NO: 5781 - DNA, 22 bp, Artificial Sequence
  bisulfite treated nucleic acid for analysis of methylation status of SEQ ID NO: 46
gtcgtctaaccgaacgaaaact

SEQ ID NO: 5782 - DNA, 21 bp, Artificial Sequence
  bisulfite treated nucleic acid for analysis of methylation status of SEQ ID NO: 46
gttagacgacgagtagggtcg

SEQ ID NO: 5783 - DNA, 21 bp, Artificial Sequence
  bisulfite treated nucleic acid for analysis of methylation status of SEQ ID NO: 46
aacacgaaaataacgaaaccc

SEQ ID NO: 5784 - DNA, 30 bp, Artificial Sequence
  bisulfite treated nucleic acid for analysis of methylation status of SEQ ID NO: 46
ttcgaggttttttggtggcgcgcgagtcgt

SEQ ID NO: 5785 - DNA, 21 bp, Artificial Sequence
  bisulfite treated nucleic acid for analysis of methylation status of SEQ ID NO: 46
gaatcgggttttaggatcgtt

SEQ ID NO: 5786 - DNA, 21 bp, Artificial Sequence
  bisulfite treated nucleic acid for analysis of methylation status of SEQ ID NO: 46
cgtctaaccgaacgaaaacta

SEQ ID NO: 5787 - DNA, 22 bp, Artificial Sequence
  bisulfite treated nucleic acid for analysis of methylation status of SEQ ID NO: 46
cggttagggtagtggaacgtag

SEQ ID NO: 5788 - DNA, 23 bp, Artificial Sequence
  bisulfite treated nucleic acid for analysis of methylation status of SEQ ID NO: 46
aaaacgcctaccgactaaatatc

SEQ ID NO: 5789 - DNA, 21 bp, Artificial Sequence
  bisulfite treated nucleic acid for analysis of methylation status of SEQ ID NO: 46
cctaccgactaaatatccgcc

SEQ ID NO: 5790 - DNA, 21 bp, Artificial Sequence
  bisulfite treated nucleic acid for analysis of methylation status of SEQ ID NO: 46
cgaccctactcgtcgtctaac

SEQ ID NO: 5791 - DNA, 20 bp, Artificial Sequence
  bisulfite treated nucleic acid for analysis of methylation status of SEQ ID NO: 46
tcggttagacgacgagtagg

SEQ ID NO: 5792 - DNA, 20 bp, Artificial Sequence
  bisulfite treated nucleic acid for analysis of methylation status of SEQ ID NO: 46
ttagacgacgagtagggtcg

SEQ ID NO: 5793 - DNA, 20 bp, Artificial Sequence
  bisulfite treated nucleic acid for analysis of methylation status of SEQ ID NO: 46
tcggaaaaattagagaacgg

SEQ ID NO: 5794 - DNA, 20 bp, Artificial Sequence
  bisulfite treated nucleic acid for analysis of methylation status of SEQ ID NO: 46
aatcgggttttaggatcgtt

SEQ ID NO: 5795 - DNA, 22 bp, Artificial Sequence
  bisulfite treated nucleic acid for analysis of methylation status of SEQ ID NO: 46
ctaaaacgcctaccgactaaat

SEQ ID NO: 5796 - DNA, 23 bp, Artificial Sequence
  bisulfite treated nucleic acid for analysis of methylation status of SEQ ID NO: 46
aacacgaacgtataaaaacgact

SEQ ID NO: 5797 - DNA, 22 bp, Artificial Sequence
  bisulfite treated nucleic acid for analysis of methylation status of SEQ ID NO: 46
ttttaggatcgttgagtttcgt

SEQ ID NO: 5798 - DNA, 19 bp, Artificial Sequence
  bisulfite treated nucleic acid for analysis of methylation status of SEQ ID NO: 46
atccgaacccgatacgtta

SEQ ID NO: 5799 - DNA, 46 bp, Artificial Sequence
  bisulfite treated nucleic acid for analysis of methylation status of SEQ ID NO: 46
gacgttaggtcgtcggtttttttgttttcgttgagatggataacgt

SEQ ID NO: 5800 - DNA, 21 bp, Artificial Sequence
  bisulfite treated nucleic acid for analysis of methylation status of SEQ ID NO: 46
gcctaccgactaaatatccgc

SEQ ID NO: 5801 - DNA, 21 bp, Artificial Sequence
  bisulfite treated nucleic acid for analysis of methylation status of SEQ ID NO: 46
gcggttgcgttatttttgtat

SEQ ID NO: 5802 - DNA, 21 bp, Artificial Sequence
  bisulfite treated nucleic acid for analysis of methylation status of SEQ ID NO: 46
aaccgttctctaatttttccg

SEQ ID NO: 5803 - DNA, 22 bp, Artificial Sequence
  bisulfite treated nucleic acid for analysis of methylation status of SEQ ID NO: 46
gagtaggttcgtgtagaatcgg

SEQ ID NO: 5804 - DNA, 19 bp, Artificial Sequence
  bisulfite treated nucleic acid for analysis of methylation status of SEQ ID NO: 46
accaaaactccgaaaacga

SEQ ID NO: 5805 - DNA, 35 bp, Artificial Sequence
  bisulfite treated nucleic acid for analysis of methylation status of SEQ ID NO: 46
atcgttgagtttcgtagggcgtttttgggggacgt

SEQ ID NO: 5806 - DNA, 22 bp, Artificial Sequence
  bisulfite treated nucleic acid for analysis of methylation status of SEQ ID NO: 46
aaacgcctaccgactaaatatc

SEQ ID NO: 5807 - DNA, 20 bp, Artificial Sequence
  bisulfite treated nucleic acid for analysis of methylation status of SEQ ID NO: 46
aatccgaacccgatacgtta

SEQ ID NO: 5808 - DNA, 21 bp, Artificial Sequence
  bisulfite treated nucleic acid for analysis of methylation status of SEQ ID NO: 46
gttcggttagacgacgagtag

SEQ ID NO: 5809 - DNA, 19 bp, Artificial Sequence
  bisulfite treated nucleic acid for analysis of methylation status of SEQ ID NO: 46
aaccaaaactccgaaaacg

SEQ ID NO: 5810 - DNA, 19 bp, Artificial Sequence
  bisulfite treated nucleic acid for analysis of methylation status of SEQ ID NO: 46
tcgttttcggagttttggt

SEQ ID NO: 5811 - DNA, 22 bp, Artificial Sequence
  bisulfite treated nucleic acid for analysis of methylation status of SEQ ID NO: 46
aatcaccgcgtaaacaactaat

SEQ ID NO: 5812 - DNA, 21 bp, Artificial Sequence
  bisulfite treated nucleic acid for analysis of methylation status of SEQ ID NO: 46
cgtgtagaatcgggttttagg

SEQ ID NO: 5813 - DNA, 21 bp, Artificial Sequence
  bisulfite treated nucleic acid for analysis of methylation status of SEQ ID NO: 46
acgttatccatctcaacgaaa

SEQ ID NO: 5814 - DNA, 20 bp, Artificial Sequence
  bisulfite treated nucleic acid for analysis of methylation status of SEQ ID NO: 46
taacgtatcgggttcggatt

SEQ ID NO: 5815 - DNA, 38 bp, Artificial Sequence
  bisulfite treated nucleic acid for analysis of methylation status of SEQ ID NO: 46
ggcgttgagttgttttaacgcgtcgattttggcgtcgt

SEQ ID NO: 5816 - DNA, 21 bp, Artificial Sequence
  bisulfite treated nucleic acid for analysis of methylation status of SEQ ID NO: 46
ttcggttagacgacgagtagg

SEQ ID NO: 5817 - DNA, 22 bp, Artificial Sequence
  bisulfite treated nucleic acid for analysis of methylation status of SEQ ID NO: 46
taggatcgttgagtttcgtagg

SEQ ID NO: 5818 - DNA, 22 bp, Artificial Sequence
  bisulfite treated nucleic acid for analysis of methylation status of SEQ ID NO: 46
acacgaacgtataaaaacgact

SEQ ID NO: 5819 - DNA, 33 bp, Artificial Sequence
  bisulfite treated nucleic acid for analysis of methylation status of SEQ ID NO: 46
tagtgcgtgttagttttttcgtagttcgaggtt

SEQ ID NO: 5820 - DNA, 21 bp, Artificial Sequence
  bisulfite treated nucleic acid for analysis of methylation status of SEQ ID NO: 46
ctactcgtcgtctaaccgaac

SEQ ID NO: 5821 - DNA, 21 bp, Artificial Sequence
  bisulfite treated nucleic acid for analysis of methylation status of SEQ ID NO: 46
tcgtctaaccgaacgaaaact

SEQ ID NO: 5822 - DNA, 21 bp, Artificial Sequence
  bisulfite treated nucleic acid for analysis of methylation status of SEQ ID NO: 46
cctactcgtcgtctaaccgaa

SEQ ID NO: 5823 - DNA, 21 bp, Artificial Sequence
  bisulfite treated nucleic acid for analysis of methylation status of SEQ ID NO: 46
acacgaaaataacgaaaccca

SEQ ID NO: 5824 - DNA, 21 bp, Artificial Sequence
  bisulfite treated nucleic acid for analysis of methylation status of SEQ ID NO: 46
gtggtcggtcgtatttatagc

SEQ ID NO: 5825 - DNA, 23 bp, Artificial Sequence
  bisulfite treated nucleic acid for analysis of methylation status of SEQ ID NO: 46
caacacgaacgtataaaaacgac

SEQ ID NO: 5826 - DNA, 20 bp, Artificial Sequence
  bisulfite treated nucleic acid for analysis of methylation status of SEQ ID NO: 46
gaaccaaaactccgaaaacg

SEQ ID NO: 5827 - DNA, 21 bp, Artificial Sequence
  bisulfite treated nucleic acid for analysis of methylation status of SEQ ID NO: 46
acgcctaccgactaaatatcc

SEQ ID NO: 5828 - DNA, 22 bp, Artificial Sequence
  bisulfite treated nucleic acid for analysis of methylation status of SEQ ID NO: 46
gtacaacacgacgaaattaccc

SEQ ID NO: 5829 - DNA, 24 bp, Artificial Sequence
  bisulfite treated nucleic acid for analysis of methylation status of SEQ ID NO: 46
tacgcggtgatttgcgtcgtgggt

SEQ ID NO: 5830 - DNA, 20 bp, Artificial Sequence
  bisulfite treated nucleic acid for analysis of methylation status of SEQ ID NO: 46
cacgaaaataacgaaaccca

SEQ ID NO: 5831 - DNA, 20 bp, Artificial Sequence
  bisulfite treated nucleic acid for analysis of methylation status of SEQ ID NO: 46
aaaaacgccctacgaaactc

SEQ ID NO: 5832 - DNA, 21 bp, Artificial Sequence
  bisulfite treated nucleic acid for analysis of methylation status of SEQ ID NO: 46
cggttgcgttatttttgtatt

SEQ ID NO: 5833 - DNA, 20 bp, Artificial Sequence
  bisulfite treated nucleic acid for analysis of methylation status of SEQ ID NO: 46
cgttttcggagttttggttc

SEQ ID NO: 5834 - DNA, 20 bp, Artificial Sequence
  bisulfite treated nucleic acid for analysis of methylation status of SEQ ID NO: 46
ttcgttttcggagttttggt

SEQ ID NO: 5835 - DNA, 20 bp, Artificial Sequence
  bisulfite treated nucleic acid for analysis of methylation status of SEQ ID NO: 46
gttttcggagttttggttcg

SEQ ID NO: 5836 - DNA, 23 bp, Artificial Sequence
  bisulfite treated nucleic acid for analysis of methylation status of SEQ ID NO: 46
tcaccgcgtaaacaactaataca

SEQ ID NO: 5837 - DNA, 19 bp, Artificial Sequence
  bisulfite treated nucleic acid for analysis of methylation status of SEQ ID NO: 46
ccaaaactccgaaaacgaa

SEQ ID NO: 5838 - DNA, 20 bp, Artificial Sequence
  bisulfite treated nucleic acid for analysis of methylation status of SEQ ID NO: 46
tttcgttgagatggataacg

SEQ ID NO: 5839 - DNA, 21 bp, Artificial Sequence
  bisulfite treated nucleic acid for analysis of methylation status of SEQ ID NO: 46
ataacgaaacccaacacgaac

SEQ ID NO: 5840 - DNA, 19 bp, Artificial Sequence
  bisulfite treated nucleic acid for analysis of methylation status of SEQ ID NO: 46
acgtttcgttttcggagtt

SEQ ID NO: 5841 - DNA, 20 bp, Artificial Sequence
  bisulfite treated nucleic acid for analysis of methylation status of SEQ ID NO: 46
cggttagacgacgagtaggg

SEQ ID NO: 5842 - DNA, 19 bp, Artificial Sequence
  bisulfite treated nucleic acid for analysis of methylation status of SEQ ID NO: 46
ccgactaaatatccgcctc

SEQ ID NO: 5843 - DNA, 19 bp, Artificial Sequence
  bisulfite treated nucleic acid for analysis of methylation status of SEQ ID NO: 46
cgactaaatatccgcctcc

SEQ ID NO: 5844 - DNA, 19 bp, Artificial Sequence
  bisulfite treated nucleic acid for analysis of methylation status of SEQ ID NO: 46
ttttcggagttttggttcg

SEQ ID NO: 5845 - DNA, 24 bp, Artificial Sequence
  bisulfite treated nucleic acid for analysis of methylation status of SEQ ID NO: 46
taaaacgcctaccgactaaatatc

SEQ ID NO: 5846 - DNA, 22 bp, Artificial Sequence
  bisulfite treated nucleic acid for analysis of methylation status of SEQ ID NO: 46
cacgtacaacacgacgaaatta

SEQ ID NO: 5847 - DNA, 21 bp, Artificial Sequence
  bisulfite treated nucleic acid for analysis of methylation status of SEQ ID NO: 46
aaactaacacgcactaacgcc

SEQ ID NO: 5848 - DNA, 22 bp, Artificial Sequence
  bisulfite treated nucleic acid for analysis of methylation status of SEQ ID NO: 46
aaatcaccgcgtaaacaactaa

SEQ ID NO: 5849 - DNA, 22 bp, Artificial Sequence
  bisulfite treated nucleic acid for analysis of methylation status of SEQ ID NO: 46
attagttgtttacgcggtgatt

SEQ ID NO: 5850 - DNA, 21 bp, Artificial Sequence
  bisulfite treated nucleic acid for analysis of methylation status of SEQ ID NO: 46
tcgacgataaccaaattaaaa

SEQ ID NO: 5851 - DNA, 25 bp, Artificial Sequence
  bisulfite treated nucleic acid for analysis of methylation status of SEQ ID NO: 46
gtacgtgttgttgcgggcgtttcgt

SEQ ID NO: 5852 - DNA, 20 bp, Artificial Sequence
  bisulfite treated nucleic acid for analysis of methylation status of SEQ ID NO: 46
cctacgaaactcaacgatcc

SEQ ID NO: 5853 - DNA, 22 bp, Artificial Sequence
  bisulfite treated nucleic acid for analysis of methylation status of SEQ ID NO: 46
cgagtaggttcgtgtagaatcg

SEQ ID NO: 5854 - DNA, 18 bp, Artificial Sequence
  bisulfite treated nucleic acid for analysis of methylation status of SEQ ID NO: 46
ttggttattgcggagtcg

SEQ ID NO: 5855 - DNA, 22 bp, Artificial Sequence
  bisulfite treated nucleic acid for analysis of methylation status of SEQ ID NO: 46
cgtctaaccgaacgaaaactac

SEQ ID NO: 5856 - DNA, 22 bp, Artificial Sequence
  bisulfite treated nucleic acid for analysis of methylation status of SEQ ID NO: 46
gtctaaccgaacgaaaactacg

SEQ ID NO: 5857 - DNA, 19 bp, Artificial Sequence
  bisulfite treated nucleic acid for analysis of methylation status of SEQ ID NO: 46
gagtagggtcggcgttagt

SEQ ID NO: 5858 - DNA, 24 bp, Artificial Sequence
  bisulfite treated nucleic acid for analysis of methylation status of SEQ ID NO: 46
ctacgaaactcaacgatcctaaaa

SEQ ID NO: 5859 - DNA, 18 bp, Artificial Sequence
  bisulfite treated nucleic acid for analysis of methylation status of SEQ ID NO: 46
acgtatcgggttcggatt

SEQ ID NO: 5860 - DNA, 19 bp, Artificial Sequence
  bisulfite treated nucleic acid for analysis of methylation status of SEQ ID NO: 46
aacgtatcgggttcggatt

SEQ ID NO: 5861 - DNA, 21 bp, Artificial Sequence
  bisulfite treated nucleic acid for analysis of methylation status of SEQ ID NO: 46
aataacgaaacccaacacgaa

SEQ ID NO: 5862 - DNA, 23 bp, Artificial Sequence
  nucleic acid for analysis of methylation status of SEQ ID NO: 46
tttaggatcgttgagtttcgtag

SEQ ID NO: 5863 - DNA, 21 bp, Artificial Sequence
  bisulfite treated nucleic acid for analysis of methylation status of SEQ ID NO: 46
aggatcgttgagtttcgtagg

SEQ ID NO: 5864 - DNA, 20 bp, Artificial Sequence
  bisulfite treated nucleic acid for analysis of methylation status of SEQ ID NO: 46
accaaaactccgaaaacgaa

SEQ ID NO: 5865 - DNA, 20 bp, Artificial Sequence
  bisulfite treated nucleic acid for analysis of methylation status of SEQ ID NO: 46
gttgtttacgcggtgatttg

SEQ ID NO: 5866 - DNA, 22 bp, Artificial Sequence
  bisulfite treated nucleic acid for analysis of methylation status of SEQ ID NO: 46
tcgacgataaccaaattaaaaa

SEQ ID NO: 5867 - DNA, 20 bp, Artificial Sequence
  bisulfite treated nucleic acid for analysis of methylation status of SEQ ID NO: 46
taacgaaacccaacacgaac

SEQ ID NO: 5868 - DNA, 20 bp, Artificial Sequence
  bisulfite treated nucleic acid for analysis of methylation status of SEQ ID NO: 46
gggggatcgttatattcgtc

SEQ ID NO: 5869 - DNA, 29 bp, Artificial Sequence
  bisulfite treated nucleic acid for analysis of methylation status of SEQ ID NO: 46
ttttcgttcggttagacgacgagtagggt

SEQ ID NO: 5870 - DNA, 19 bp, Artificial Sequence
  bisulfite treated nucleic acid for analysis of methylation status of SEQ ID NO: 46
acgccctacgaaactcaac

SEQ ID NO: 5871 - DNA, 20 bp, Artificial Sequence
  bisulfite treated nucleic acid for analysis of methylation status of SEQ ID NO: 46
gccctacgaaactcaacgat

SEQ ID NO: 5872 - DNA, 18 bp, Artificial Sequence
  bisulfite treated nucleic acid for analysis of methylation status of SEQ ID NO: 46
tccgaacccgatacgtta

SEQ ID NO: 5873 - DNA, 20 bp, Artificial Sequence
  bisulfite treated nucleic acid for analysis of methylation status of SEQ ID NO: 46
cgtctaaccgaacgaaaact

SEQ ID NO: 5874 - DNA, 22 bp, Artificial Sequence
  bisulfite treated nucleic acid for analysis of methylation status of SEQ ID NO: 46
gtaggttcgtgtagaatcgggt

SEQ ID NO: 5875 - DNA, 22 bp, Artificial Sequence
  bisulfite treated nucleic acid for analysis of methylation status of SEQ ID NO: 46
acccaacacgaacgtataaaaa

SEQ ID NO: 5876 - DNA, 22 bp, Artificial Sequence
  bisulfite treated nucleic acid for analysis of methylation status of SEQ ID NO: 46
aacccaacacgaacgtataaaa

SEQ ID NO: 5877 - DNA, 22 bp, Artificial Sequence
  bisulfite treated nucleic acid for analysis of methylation status of SEQ ID NO: 46
aaacccaacacgaacgtataaa

SEQ ID NO: 5878 - DNA, 22 bp, Artificial Sequence
  bisulfite treated nucleic acid for analysis of methylation status of SEQ ID NO: 46
cccaacacgaacgtataaaaac

SEQ ID NO: 5879 - DNA, 20 bp, Artificial Sequence
  bisulfite treated nucleic acid for analysis of methylation status of SEQ ID NO: 46
aacgccctacgaaactcaac

SEQ ID NO: 5880 - DNA, 19 bp, Artificial Sequence
  bisulfite treated nucleic acid for analysis of methylation status of SEQ ID NO: 46
aaaaaccgacgacctaacg

SEQ ID NO: 5881 - DNA, 20 bp, Artificial Sequence
  bisulfite treated nucleic acid for analysis of methylation status of SEQ ID NO: 46
caaaaacgccctacgaaact

SEQ ID NO: 5882 - DNA, 19 bp, Artificial Sequence
  bisulfite treated nucleic acid for analysis of methylation status of SEQ ID NO: 46
ttgtttacgcggtgatttg

SEQ ID NO: 5883 - DNA, 20 bp, Artificial Sequence
  bisulfite treated nucleic acid for analysis of methylation status of SEQ ID NO: 46
gggtagtggaacgtagtcgc

SEQ ID NO: 5884 - DNA, 21 bp, Artificial Sequence
  bisulfite treated nucleic acid for analysis of methylation status of SEQ ID NO: 46
aaaaactaaaacgcctaccga

SEQ ID NO: 5885 - DNA, 21 bp, Artificial Sequence
  bisulfite treated nucleic acid for analysis of methylation status of SEQ ID NO: 46
gggatcgttatattcgtcgtg

SEQ ID NO: 5886 - DNA, 22 bp, Artificial Sequence
  bisulfite treated nucleic acid for analysis of methylation status of SEQ ID NO: 46
ctaaccgaacgaaaactacgaa

SEQ ID NO: 5887 - DNA, 22 bp, Artificial Sequence
  bisulfite treated nucleic acid for analysis of methylation status of SEQ ID NO: 46
agtaggttcgtgtagaatcggg

SEQ ID NO: 5888 - DNA, 21 bp, Artificial Sequence
  bisulfite treated nucleic acid for analysis of methylation status of SEQ ID NO: 46
cgaaaataacgaaacccaaca

SEQ ID NO: 5889 - DNA, 19 bp, Artificial Sequence
  bisulfite treated nucleic acid for analysis of methylation status of SEQ ID NO: 46
aaacgccctacgaaactca

SEQ ID NO: 5890 - DNA, 21 bp, Artificial Sequence
  bisulfite treated nucleic acid for analysis of methylation status of SEQ ID NO: 46
tacaacacgacgaaattaccc

SEQ ID NO: 5891 - DNA, 22 bp, Artificial Sequence
  bisulfite treated nucleic acid for analysis of methylation status of SEQ ID NO: 46
cgtacaacacgacgaaattacc

SEQ ID NO: 5892 - DNA, 19 bp, Artificial Sequence
  bisulfite treated nucleic acid for analysis of methylation status of SEQ ID NO: 46
acgctcgtttcaactctcc

SEQ ID NO: 5893 - DNA, 21 bp, Artificial Sequence
  bisulfite treated nucleic acid for analysis of methylation status of SEQ ID NO: 46
aaatcaccgcgtaaacaacta

SEQ ID NO: 5894 - DNA, 21 bp, Artificial Sequence
  bisulfite treated nucleic acid for analysis of methylation status of SEQ ID NO: 46
taggttcgtgtagaatcgggt

SEQ ID NO: 5895 - DNA, 22 bp, Artificial Sequence
  bisulfite treated nucleic acid for analysis of methylation status of SEQ ID NO: 46
ttaggatcgttgagtttcgtag

SEQ ID NO: 5896 - DNA, 20 bp, Artificial Sequence
  bisulfite treated nucleic acid for analysis of methylation status of SEQ ID NO: 46
ttcggttagacgacgagtag

SEQ ID NO: 5897 - DNA, 23 bp, Artificial Sequence
  bisulfite treated nucleic acid for analysis of methylation status of SEQ ID NO: 46
gttttaggatcgttgagtttcgt

SEQ ID NO: 5898 - DNA, 21 bp, Artificial Sequence
  bisulfite treated nucleic acid for analysis of methylation status of SEQ ID NO: 46
aatcaccgcgtaaacaactaa

SEQ ID NO: 5899 - DNA, 20 bp, Artificial Sequence
  bisulfite treated nucleic acid for analysis of methylation status of SEQ ID NO: 46
ccctactcgtcgtctaaccg

SEQ ID NO: 5900 - DNA, 19 bp, Artificial Sequence
  bisulfite treated nucleic acid for analysis of methylation status of SEQ ID NO: 46
caacgatcctaaaacccga

SEQ ID NO: 5901 - DNA, 25 bp, Artificial Sequence
  bisulfite treated nucleic acid for analysis of methylation status of SEQ ID NO: 46
aacgagcgttcgcgagtaggttcgt

SEQ ID NO: 5902 - DNA, 20 bp, Artificial Sequence
  bisulfite treated nucleic acid for analysis of methylation status of SEQ ID NO: 46
ttttagtttcgtgagttcgc

SEQ ID NO: 5903 - DNA, 22 bp, Artificial Sequence
  bisulfite treated nucleic acid for analysis of methylation status of SEQ ID NO: 46
accgcgtaaacaactaatacaa

SEQ ID NO: 5904 - DNA, 18 bp, Artificial Sequence
  bisulfite treated nucleic acid for analysis of methylation status of SEQ ID NO: 46
tttcggagttttggttcg

SEQ ID NO: 5905 - DNA, 22 bp, Artificial Sequence
  bisulfite treated nucleic acid for analysis of methylation status of SEQ ID NO: 46
gaaacccaacacgaacgtataa

SEQ ID NO: 5906 - DNA, 21 bp, Artificial Sequence
  bisulfite treated nucleic acid for analysis of methylation status of SEQ ID NO: 46
gcgacgatcaaaacaataaaa

SEQ ID NO: 5907 - DNA, 22 bp, Artificial Sequence
  bisulfite treated nucleic acid for analysis of methylation status of SEQ ID NO: 46
gttagagttcgtagttcgcgtt

SEQ ID NO: 5908 - DNA, 28 bp, Artificial Sequence
  bisulfite treated nucleic acid for analysis of methylation status of SEQ ID NO: 46
gtcggtttttttcgcgcgtttggaagtg

SEQ ID NO: 5909 - DNA, 22 bp, Artificial Sequence
  bisulfite treated nucleic acid for analysis of methylation status of SEQ ID NO: 46
ctccgtaaaacgtccttaaaaa

SEQ ID NO: 5910 - DNA, 21 bp, Artificial Sequence
  bisulfite treated nucleic acid for analysis of methylation status of SEQ ID NO: 46
gagtagtttagcgtcgggttc

SEQ ID NO: 5911 - DNA, 26 bp, Artificial Sequence
  bisulfite treated nucleic acid for analysis of methylation status of SEQ ID NO: 46
tggcgggttagggtttcgagaacgag

SEQ ID NO: 5912 - DNA, 22 bp, Artificial Sequence
  bisulfite treated nucleic acid for analysis of methylation status of SEQ ID NO: 46
aaatcgtcacactcgtcgtact

SEQ ID NO: 5913 - DNA, 22 bp, Artificial Sequence
  bisulfite treated nucleic acid for analysis of methylation status of SEQ ID NO: 46
cgttattagaaggtttcgggtt

SEQ ID NO: 5914 - DNA, 33 bp, Artificial Sequence
  bisulfite treated nucleic acid for analysis of methylation status of SEQ ID NO: 46
ggaaagattagtacgtattggcgtcggttttgt

SEQ ID NO: 5915 - DNA, 21 bp, Artificial Sequence
  bisulfite treated nucleic acid for analysis of methylation status of SEQ ID NO: 46
cgtacaaaaccgaacttcaaa

SEQ ID NO: 5916 - DNA, 22 bp, Artificial Sequence
  bisulfite treated nucleic acid for analysis of methylation status of SEQ ID NO: 46
aggcgttgtttattttaacgag

SEQ ID NO: 5917 - DNA, 35 bp, Artificial Sequence
  bisulfite treated nucleic acid for analysis of methylation status of SEQ ID NO: 46
ggcgttttttaaggacgttttacggagtttagcgg

SEQ ID NO: 5918 - DNA, 21 bp, Artificial Sequence
  bisulfite treated nucleic acid for analysis of methylation status of SEQ ID NO: 46
aaatccgtacaaaaccgaact

SEQ ID NO: 5919 - DNA, 22 bp, Artificial Sequence
  bisulfite treated nucleic acid for analysis of methylation status of SEQ ID NO: 46
actccgtaaaacgtccttaaaa

SEQ ID NO: 5920 - DNA, 21 bp, Artificial Sequence
  bisulfite treated nucleic acid for analysis of methylation status of SEQ ID NO: 46
aaaatcgtcacactcgtcgta

SEQ ID NO: 5921 - DNA, 22 bp, Artificial Sequence
  nucleic acid for analysis of methylation status of SEQ ID NO: 46
cgttgtttattttaacgagggt

SEQ ID NO: 5922 - DNA, 21 bp, Artificial Sequence
  bisulfite treated nucleic acid for analysis of methylation status of SEQ ID NO: 46
cgtactacccttcgcaatctt

SEQ ID NO: 5923 - DNA, 22 bp, Artificial Sequence
  bisulfite treated nucleic acid for analysis of methylation status of SEQ ID NO: 46
ctcgttaaaataaacaacgcct

SEQ ID NO: 5924 - DNA, 22 bp, Artificial Sequence
  bisulfite treated nucleic acid for analysis of methylation status of SEQ ID NO: 46
ttggtatagttatcgttagcgg

SEQ ID NO: 5925 - DNA, 28 bp, Artificial Sequence
  bisulfite treated nucleic acid for analysis of methylation status of SEQ ID NO: 46
gtcggtagcggcgttagagtcgacgcgt

SEQ ID NO: 5926 - DNA, 22 bp, Artificial Sequence
  bisulfite treated nucleic acid for analysis of methylation status of SEQ ID NO: 46
tcgttaaaataaacaacgcctc

SEQ ID NO: 5927 - DNA, 21 bp, Artificial Sequence
  bisulfite treated nucleic acid for analysis of methylation status of SEQ ID NO: 46
aatcgtcacactcgtcgtact

SEQ ID NO: 5928 - DNA, 22 bp, Artificial Sequence
  bisulfite treated nucleic acid for analysis of methylation status of SEQ ID NO: 46
aaaaatcgtcacactcgtcgta

SEQ ID NO: 5929 - DNA, 21 bp, Artificial Sequence
  bisulfite treated nucleic acid for analysis of methylation status of SEQ ID NO: 46
gttggagtagtttagcgtcgg

SEQ ID NO: 5930 - DNA, 22 bp, Artificial Sequence
  bisulfite treated nucleic acid for analysis of methylation status of SEQ ID NO: 46
gcgacgatcaaaacaataaaac

SEQ ID NO: 5931 - DNA, 21 bp, Artificial Sequence
  bisulfite treated nucleic acid for analysis of methylation status of SEQ ID NO: 46
tcgttagagttcgtagttcgc

SEQ ID NO: 5932 - DNA, 22 bp, Artificial Sequence
  bisulfite treated nucleic acid for analysis of methylation status of SEQ ID NO: 46
gacgatcaaaacaataaaacgc

SEQ ID NO: 5933 - DNA, 22 bp, Artificial Sequence
  bisulfite treated nucleic acid for analysis of methylation status of SEQ ID NO: 46
ataaaaataaacgcgacgatca

SEQ ID NO: 5934 - DNA, 20 bp, Artificial Sequence
  bisulfite treated nucleic acid for analysis of methylation status of SEQ ID NO: 46
acaaatccgtacaaaaccga

SEQ ID NO: 5935 - DNA, 23 bp, Artificial Sequence
  bisulfite treated nucleic acid for analysis of methylation status of SEQ ID NO: 46
aactccgtaaaacgtccttaaaa

SEQ ID NO: 5936 - DNA, 20 bp, Artificial Sequence
  bisulfite treated nucleic acid for analysis of methylation status of SEQ ID NO: 46
ttggagtagtttagcgtcgg

SEQ ID NO: 5937 - DNA, 21 bp, Artificial Sequence
  bisulfite treated nucleic acid for analysis of methylation status of SEQ ID NO: 46
gcgttggagtagtttagcgtc

SEQ ID NO: 5938 - DNA, 24 bp, Artificial Sequence
  bisulfite treated nucleic acid for analysis of methylation status of SEQ ID NO: 46
aattggtatagttatcgttagcgg

SEQ ID NO: 5939 - DNA, 21 bp, Artificial Sequence
  bisulfite treated nucleic acid for analysis of methylation status of SEQ ID NO: 46
tcgtactacccttcgcaatct

SEQ ID NO: 5940 - DNA, 21 bp, Artificial Sequence
  bisulfite treated nucleic acid for analysis of methylation status of SEQ ID NO: 46
cgaacttcaaaaccgctaaac

SEQ ID NO: 5941 - DNA, 36 bp, Artificial Sequence
  bisulfite treated nucleic acid for analysis of methylation status of SEQ ID NO: 46
gtcggcgatttggcgttttttaaggacgttttacgg

SEQ ID NO: 5942 - DNA, 21 bp, Artificial Sequence
  bisulfite treated nucleic acid for analysis of methylation status of SEQ ID NO: 46
ttaacgagggtagaggagtcg

SEQ ID NO: 5943 - DNA, 23 bp, Artificial Sequence
  bisulfite treated nucleic acid for analysis of methylation status of SEQ ID NO: 46
cgttgtttattttaacgagggta

SEQ ID NO: 5944 - DNA, 23 bp, Artificial Sequence
  bisulfite treated nucleic acid for analysis of methylation status of SEQ ID NO: 46
attggtatagttatcgttagcgg

SEQ ID NO: 5945 - DNA, 20 bp, Artificial Sequence
  bisulfite treated nucleic acid for analysis of methylation status of SEQ ID NO: 46
ggagtagtttagcgtcgggt

SEQ ID NO: 5946 - DNA, 21 bp, Artificial Sequence
  bisulfite treated nucleic acid for analysis of methylation status of SEQ ID NO: 46
cgaacaaatccgtacaaaacc

SEQ ID NO: 5947 - DNA, 21 bp, Artificial Sequence
  bisulfite treated nucleic acid for analysis of methylation status of SEQ ID NO: 46
aacaaatccgtacaaaaccga

SEQ ID NO: 5948 - DNA, 21 bp, Artificial Sequence
  bisulfite treated nucleic acid for analysis of methylation status of SEQ ID NO: 46
gaacaaatccgtacaaaaccg

SEQ ID NO: 5949 - DNA, 20 bp, Artificial Sequence
  bisulfite treated nucleic acid for analysis of methylation status of SEQ ID NO: 46
acccgacgctaaactactcc

SEQ ID NO: 5950 - DNA, 22 bp, Artificial Sequence
  bisulfite treated nucleic acid for analysis of methylation status of SEQ ID NO: 46
agttgttcgttagatttacggc

SEQ ID NO: 5951 - DNA, 23 bp, Artificial Sequence
  bisulfite treated nucleic acid for analysis of methylation status of SEQ ID NO: 46
atcgttagcggcgtcggtagcgg

SEQ ID NO: 5952 - DNA, 21 bp, Artificial Sequence
  bisulfite treated nucleic acid for analysis of methylation status of SEQ ID NO: 46
gcgaacaaatccgtacaaaac

SEQ ID NO: 5953 - DNA, 22 bp, Artificial Sequence
  bisulfite treated nucleic acid for analysis of methylation status of SEQ ID NO: 46
tttaacgagggtagaggagtcg

SEQ ID NO: 5954 - DNA, 20 bp, Artificial Sequence
  bisulfite treated nucleic acid for analysis of methylation status of SEQ ID NO: 46
caaatccgtacaaaaccgaa

SEQ ID NO: 5955 - DNA, 21 bp, Artificial Sequence
  bisulfite treated nucleic acid for analysis of methylation status of SEQ ID NO: 46
caaaacaataaaacgcaatcg

SEQ ID NO: 5956 - DNA, 21 bp, Artificial Sequence
  nucleic acid for analysis of methylation status of SEQ ID NO: 46
caaatccgtacaaaaccgaac

SEQ ID NO: 5957 - DNA, 22 bp, Artificial Sequence
  bisulfite treated nucleic acid for analysis of methylation status of SEQ ID NO: 46
gcgttgtttattttaacgaggg

SEQ ID NO: 5958 - DNA, 21 bp, Artificial Sequence
  bisulfite treated nucleic acid for analysis of methylation status of SEQ ID NO: 46
taaaaataaacgcgacgatca

SEQ ID NO: 5959 - DNA, 21 bp, Artificial Sequence
  bisulfite treated nucleic acid for analysis of methylation status of SEQ ID NO: 46
aacccgacgctaaactactcc

SEQ ID NO: 5960 - DNA, 20 bp, Artificial Sequence
  bisulfite treated nucleic acid for analysis of methylation status of SEQ ID NO: 46
cgcgttattagaaggtttcg

SEQ ID NO: 5961 - DNA, 22 bp, Artificial Sequence
  bisulfite treated nucleic acid for analysis of methylation status of SEQ ID NO: 46
cgacgatcaaaacaataaaacg

SEQ ID NO: 5962 - DNA, 22 bp, Artificial Sequence
  bisulfite treated nucleic acid for analysis of methylation status of SEQ ID NO: 46
acgatcaaaacaataaaacgca

SEQ ID NO: 5963 - DNA, 21 bp, Artificial Sequence
  bisulfite treated nucleic acid for analysis of methylation status of SEQ ID NO: 46
ttagagttcgtagttcgcgtt

SEQ ID NO: 5964 - DNA, 20 bp, Artificial Sequence
  bisulfite treated nucleic acid for analysis of methylation status of SEQ ID NO: 46
acgctaaactactccaacgc

SEQ ID NO: 5965 - DNA, 23 bp, Artificial Sequence
  bisulfite treated nucleic acid for analysis of methylation status of SEQ ID NO: 46
cctactacgacaataacccttcg

SEQ ID NO: 5966 - DNA, 22 bp, Artificial Sequence
  bisulfite treated nucleic acid for analysis of methylation status of SEQ ID NO: 46
cgtttatgacggtgaggaagta

SEQ ID NO: 5967 - DNA, 34 bp, Artificial Sequence
  bisulfite treated nucleic acid for analysis of methylation status of SEQ ID NO: 46
gaaggtgttgtattggtcgatagttacgatgagt

SEQ ID NO: 5968 - DNA, 22 bp, Artificial Sequence
  bisulfite treated nucleic acid for analysis of methylation status of SEQ ID NO: 46
ctactacgacaataacccttcg

SEQ ID NO: 5969 - DNA, 23 bp, Artificial Sequence
  bisulfite treated nucleic acid for analysis of methylation status of SEQ ID NO: 46
gaggcgttgtttattttaacgag

SEQ ID NO: 5970 - DNA, 21 bp, Artificial Sequence
  bisulfite treated nucleic acid for analysis of methylation status of SEQ ID NO: 46
cgatcaaaacaataaaacgca

SEQ ID NO: 5971 - DNA, 21 bp, Artificial Sequence
  bisulfite treated nucleic acid for analysis of methylation status of SEQ ID NO: 46
tccgtaaaacgtccttaaaaa

SEQ ID NO: 5972 - DNA, 23 bp, Artificial Sequence
  bisulfite treated nucleic acid for analysis of methylation status of SEQ ID NO: 46
tataaaaataaacgcgacgatca

SEQ ID NO: 5973 - DNA, 21 bp, Artificial Sequence
  bisulfite treated nucleic acid for analysis of methylation status of SEQ ID NO: 46
tcaaaaccgctaaactccgta

SEQ ID NO: 5974 - DNA, 29 bp, Artificial Sequence
  bisulfite treated nucleic acid for analysis of methylation status of SEQ ID NO: 46
gtcggcgatttggcgttttttaaggacgt

SEQ ID NO: 5975 - DNA, 25 bp, Artificial Sequence
  bisulfite treated nucleic acid for analysis of methylation status of SEQ ID NO: 46
taattggtatagttatcgttagcgg

SEQ ID NO: 5976 - DNA, 21 bp, Artificial Sequence
  bisulfite treated nucleic acid for analysis of methylation status of SEQ ID NO: 46
ggcgttgtttattttaacgag

SEQ ID NO: 5977 - DNA, 19 bp, Artificial Sequence
  bisulfite treated nucleic acid for analysis of methylation status of SEQ ID NO: 46
aaaccgaacttcaaaaccg

SEQ ID NO: 5978 - DNA, 22 bp, Artificial Sequence
  bisulfite treated nucleic acid for analysis of methylation status of SEQ ID NO: 46
ccctcgttaaaataaacaacgc

SEQ ID NO: 5979 - DNA, 26 bp, Artificial Sequence
  bisulfite treated nucleic acid for analysis of methylation status of SEQ ID NO: 46
ttggcgggttagggtttcgagaacga

SEQ ID NO: 5980 - DNA, 19 bp, Artificial Sequence
  bisulfite treated nucleic acid for analysis of methylation status of SEQ ID NO: 46
gccgaccgctacctaataa

SEQ ID NO: 5981 - DNA, 22 bp, Artificial Sequence
  bisulfite treated nucleic acid for analysis of methylation status of SEQ ID NO: 46
tagtacgacgagtgtgacgatt

SEQ ID NO: 5982 - DNA, 22 bp, Artificial Sequence
  bisulfite treated nucleic acid for analysis of methylation status of SEQ ID NO: 46
tgcggtcggttattcggcgcga

SEQ ID NO: 5983 - DNA, 22 bp, Artificial Sequence
  bisulfite treated nucleic acid for analysis of methylation status of SEQ ID NO: 46
gacgaactcttcacgctaatac

SEQ ID NO: 5984 - DNA, 22 bp, Artificial Sequence
  bisulfite treated nucleic acid for analysis of methylation status of SEQ ID NO: 46
ttggtcgatagttacgatgagt

SEQ ID NO: 5985 - DNA, 27 bp, Artificial Sequence
  bisulfite treated nucleic acid for analysis of methylation status of SEQ ID NO: 46
agtaggaagtcggcgatgttgatgggt

SEQ ID NO: 5986 - DNA, 22 bp, Artificial Sequence
  bisulfite treated nucleic acid for analysis of methylation status of SEQ ID NO: 46
cgaacttcaaaaccgctaaact

SEQ ID NO: 5987 - DNA, 20 bp, Artificial Sequence
  bisulfite treated nucleic acid for analysis of methylation status of SEQ ID NO: 46
gtaaatccgcgacgacatta

SEQ ID NO: 5988 - DNA, 21 bp, Artificial Sequence
  bisulfite treated nucleic acid for analysis of methylation status of SEQ ID NO: 46
gaagttcggttttgtacggat

SEQ ID NO: 5989 - DNA, 35 bp, Artificial Sequence
  bisulfite treated nucleic acid for analysis of methylation status of SEQ ID NO: 46
ttcggaggaggggatcgtttttagttattttacgg

SEQ ID NO: 5990 - DNA, 21 bp, Artificial Sequence
  bisulfite treated nucleic acid for analysis of methylation status of SEQ ID NO: 46
gcgttattagaaggtttcggg

SEQ ID NO: 5991 - DNA, 21 bp, Artificial Sequence
  bisulfite treated nucleic acid for analysis of methylation status of SEQ ID NO: 46
tttgaagttcggttttgtacg

SEQ ID NO: 5992 - DNA, 21 bp, Artificial Sequence
  bisulfite treated nucleic acid for analysis of methylation status of SEQ ID NO: 46
aataaacgcgacgatcaaaac

SEQ ID NO: 5993 - DNA, 22 bp, Artificial Sequence
  bisulfite treated nucleic acid for analysis of methylation status of SEQ ID NO: 46
cgcgataaacctaaccgtataa

SEQ ID NO: 5994 - DNA, 19 bp, Artificial Sequence
  bisulfite treated nucleic acid for analysis of methylation status of SEQ ID NO: 46
gtattggcgtcggttttgt

SEQ ID NO: 5995 - DNA, 38 bp, Artificial Sequence
  bisulfite treated nucleic acid for analysis of methylation status of SEQ ID NO: 46
ggcgaagattgcgaagggtagtacgacgagtgtgacga

SEQ ID NO: 5996 - DNA, 21 bp, Artificial Sequence
  bisulfite treated nucleic acid for analysis of methylation status of SEQ ID NO: 46
acaaatccgtacaaaaccgaa

SEQ ID NO: 5997 - DNA, 24 bp, Artificial Sequence
  bisulfite treated nucleic acid for analysis of methylation status of SEQ ID NO: 46
gcgataaacctaaccgtataaaaa

SEQ ID NO: 5998 - DNA, 21 bp, Artificial Sequence
  bisulfite treated nucleic acid for analysis of methylation status of SEQ ID NO: 46
ggttgcggaaagattagtacg

SEQ ID NO: 5999 - DNA, 22 bp, Artificial Sequence
  bisulfite treated nucleic acid for analysis of methylation status of SEQ ID NO: 46
ttttgaagttcggttttgtacg

SEQ ID NO: 6000 - DNA, 20 bp, Artificial Sequence
  bisulfite treated nucleic acid for analysis of methylation status of SEQ ID NO: 46
ataaacgcgacgatcaaaac

SEQ ID NO: 6001 - DNA, 22 bp, Artificial Sequence
  bisulfite treated nucleic acid for analysis of methylation status of SEQ ID NO: 46
agtacgacgagtgtgacgattt

SEQ ID NO: 6002 - DNA, 20 bp, Artificial Sequence
  bisulfite treated nucleic acid for analysis of methylation status of SEQ ID NO: 46
caaaaccgctaaactccgta

SEQ ID NO: 6003 - DNA, 20 bp, Artificial Sequence
  bisulfite treated nucleic acid for analysis of methylation status of SEQ ID NO: 46
aacaaatccgtacaaaaccg

SEQ ID NO: 6004 - DNA, 20 bp, Artificial Sequence
  bisulfite treated nucleic acid for analysis of methylation status of SEQ ID NO: 46
aaaaataaacgcgacgatca

SEQ ID NO: 6005 - DNA, 20 bp, Artificial Sequence
  bisulfite treated nucleic acid for analysis of methylation status of SEQ ID NO: 46
cgactcctctaccctcgtta

SEQ ID NO: 6006 - DNA, 19 bp, Artificial Sequence
  bisulfite treated nucleic acid for analysis of methylation status of SEQ ID NO: 46
cccgacgctaaactactcc

SEQ ID NO: 6007 - DNA, 20 bp, Artificial Sequence
  bisulfite treated nucleic acid for analysis of methylation status of SEQ ID NO: 46
taacgagggtagaggagtcg

SEQ ID NO: 6008 - DNA, 21 bp, Artificial Sequence
  bisulfite treated nucleic acid for analysis of methylation status of SEQ ID NO: 46
cgacgaactcttcacgctaat

SEQ ID NO: 6009 - DNA, 21 bp, Artificial Sequence
  bisulfite treated nucleic acid for analysis of methylation status of SEQ ID NO: 46
cgttaaaataaacaacgcctc

SEQ ID NO: 6010 - DNA, 21 bp, Artificial Sequence
  bisulfite treated nucleic acid for analysis of methylation status of SEQ ID NO: 46
gttaaaataaacaacgcctcg

SEQ ID NO: 6011 - DNA, 21 bp, Artificial Sequence
  bisulfite treated nucleic acid for analysis of methylation status of SEQ ID NO: 46
cctcgttaaaataaacaacgc

SEQ ID NO: 6012 - DNA, 20 bp, Artificial Sequence
  bisulfite treated nucleic acid for analysis of methylation status of SEQ ID NO: 46
accgaacttcaaaaccgcta

SEQ ID NO: 6013 - DNA, 20 bp, Artificial Sequence
  bisulfite treated nucleic acid for analysis of methylation status of SEQ ID NO: 46
aatccgtacaaaaccgaact

SEQ ID NO: 6014 - DNA, 20 bp, Artificial Sequence
  bisulfite treated nucleic acid for analysis of methylation status of SEQ ID NO: 46
gtagtttagcgtcgggttcg

SEQ ID NO: 6015 - DNA, 20 bp, Artificial Sequence
  bisulfite treated nucleic acid for analysis of methylation status of SEQ ID NO: 46
agtagtttagcgtcgggttc

SEQ ID NO: 6016 - DNA, 23 bp, Artificial Sequence
  bisulfite treated nucleic acid for analysis of methylation status of SEQ ID NO: 46
attggtcgatagttacgatgagt

SEQ ID NO: 6017 - DNA, 21 bp, Artificial Sequence
  bisulfite treated nucleic acid for analysis of methylation status of SEQ ID NO: 46
aaataaacgcgacgatcaaaa

SEQ ID NO: 6018 - DNA, 19 bp, Artificial Sequence
  bisulfite treated nucleic acid for analysis of methylation status of SEQ ID NO: 46
tcaaaaccgctaaactccg

SEQ ID NO: 6019 - DNA, 19 bp, Artificial Sequence
  bisulfite treated nucleic acid for analysis of methylation status of SEQ ID NO: 46
ccgaacttcaaaaccgcta

SEQ ID NO: 6020 - DNA, 21 bp, Artificial Sequence
  bisulfite treated nucleic acid for analysis of methylation status of SEQ ID NO: 46
gcctctacacgctcgtactaa

SEQ ID NO: 6021 - DNA, 22 bp, Artificial Sequence
  bisulfite treated nucleic acid for analysis of methylation status of SEQ ID NO: 46
agtcgtatggtatgtagtcggt

SEQ ID NO: 6022 - DNA, 26 bp, Artificial Sequence
  bisulfite treated nucleic acid for analysis of methylation status of SEQ ID NO: 46
agatggtggatacggggatggcgaag

SEQ ID NO: 6023 - DNA, 22 bp, Artificial Sequence
  bisulfite treated nucleic acid for analysis of methylation status of SEQ ID NO: 46
gtacgacgagtgtgacgatttt

SEQ ID NO: 6024 - DNA, 19 bp, Artificial Sequence
  bisulfite treated nucleic acid for analysis of methylation status of SEQ ID NO: 46
tagtttagcgtcgggttcg

SEQ ID NO: 6025 - DNA, 21 bp, Artificial Sequence
  bisulfite treated nucleic acid for analysis of methylation status of SEQ ID NO: 46
tactacccttcgcaatcttcg

SEQ ID NO: 6026 - DNA, 23 bp, Artificial Sequence
  bisulfite treated nucleic acid for analysis of methylation status of SEQ ID NO: 46
agtttagtacgagcgtgtagagg

SEQ ID NO: 6027 - DNA, 21 bp, Artificial Sequence
  bisulfite treated nucleic acid for analysis of methylation status of SEQ ID NO: 46
cgtactaatctttccgcaacc

SEQ ID NO: 6028 - DNA, 24 bp, Artificial Sequence
  bisulfite treated nucleic acid for analysis of methylation status of SEQ ID NO: 46
tttagtcgtatggtatgtagtcgg

SEQ ID NO: 6029 - DNA, 27 bp, Artificial Sequence
  bisulfite treated nucleic acid for analysis of methylation status of SEQ ID NO: 46
ggggatggcgaagtttagtacgagcgt

SEQ ID NO: 6030 - DNA, 19 bp, Artificial Sequence
  bisulfite treated nucleic acid for analysis of methylation status of SEQ ID NO: 46
taaatccgcgacgacatta

SEQ ID NO: 6031 - DNA, 21 bp, Artificial Sequence
  bisulfite treated nucleic acid for analysis of methylation status of SEQ ID NO: 46
gaggcgttgtttattttaacg

SEQ ID NO: 6032 - DNA, 22 bp, Artificial Sequence
  bisulfite treated nucleic acid for analysis of methylation status of SEQ ID NO: 46
gtttagtacgagcgtgtagagg

SEQ ID NO: 6033 - DNA, 18 bp, Artificial Sequence
  bisulfite treated nucleic acid for analysis of methylation status of SEQ ID NO: 46
cgcgacgatcaaaacaat

SEQ ID NO: 6034 - DNA, 21 bp, Artificial Sequence
  bisulfite treated nucleic acid for analysis of methylation status of SEQ ID NO: 46
tacgacgagtgtgacgatttt

SEQ ID NO: 6035 - DNA, 19 bp, Artificial Sequence
  bisulfite treated nucleic acid for analysis of methylation status of SEQ ID NO: 46
cgacgaactcttcacgcta

SEQ ID NO: 6036 - DNA, 19 bp, Artificial Sequence
  bisulfite treated nucleic acid for analysis of methylation status of SEQ ID NO: 46
caatcttcgcccgactaaa

SEQ ID NO: 6037 - DNA, 22 bp, Artificial Sequence
  bisulfite treated nucleic acid for analysis of methylation status of SEQ ID NO: 46
tagagttcgtagttcgcgtttt

SEQ ID NO: 6038 - DNA, 22 bp, Artificial Sequence
  bisulfite treated nucleic acid for analysis of methylation status of SEQ ID NO: 46
ttagagttcgtagttcgcgttt

SEQ ID NO: 6039 - DNA, 19 bp, Artificial Sequence
  bisulfite treated nucleic acid for analysis of methylation status of SEQ ID NO: 46
cgactcctctaccctcgtt

SEQ ID NO: 6040 - DNA, 22 bp, Artificial Sequence
  bisulfite treated nucleic acid for analysis of methylation status of SEQ ID NO: 46
gtatagttatcgttagcggcgt

SEQ ID NO: 6041 - DNA, 24 bp, Artificial Sequence
  bisulfite treated nucleic acid for analysis of methylation status of SEQ ID NO: 46
aaactccgtaaaacgtccttaaaa

SEQ ID NO: 6042 - DNA, 22 bp, Artificial Sequence
  bisulfite treated nucleic acid for analysis of methylation status of SEQ ID NO: 46
gccgtaaatctaacgaacaact

SEQ ID NO: 6043 - DNA, 18 bp, Artificial Sequence
  bisulfite treated nucleic acid for analysis of methylation status of SEQ ID NO: 46
aagtcggcgatgttgatg

SEQ ID NO: 6044 - DNA, 25 bp, Artificial Sequence
  bisulfite treated nucleic acid for analysis of methylation status of SEQ ID NO: 46
tggtgacggtttttatgcggggcgt

SEQ ID NO: 6045 - DNA, 23 bp, Artificial Sequence
  bisulfite treated nucleic acid for analysis of methylation status of SEQ ID NO: 46
aactcatcgtaactatcgaccaa

SEQ ID NO: 6046 - DNA, 20 bp, Artificial Sequence
  bisulfite treated nucleic acid for analysis of methylation status of SEQ ID NO: 46
gtaggtgcggtcggttattc

SEQ ID NO: 6047 - DNA, 27 bp, Artificial Sequence
  bisulfite treated nucleic acid for analysis of methylation status of SEQ ID NO: 46
ggtcggcgtttatgacggtgaggaagt

SEQ ID NO: 6048 - DNA, 26 bp, Artificial Sequence
  bisulfite treated nucleic acid for analysis of methylation status of SEQ ID NO: 46
ataattggtatagttatcgttagcgg

SEQ ID NO: 6049 - DNA, 19 bp, Artificial Sequence
  bisulfite treated nucleic acid for analysis of methylation status of SEQ ID NO: 46
ccgactcctctaccctcgt

SEQ ID NO: 6050 - DNA, 24 bp, Artificial Sequence
  bisulfite treated nucleic acid for analysis of methylation status of SEQ ID NO: 46
atataaaaataaacgcgacgatca

SEQ ID NO: 6051 - DNA, 19 bp, Artificial Sequence
  bisulfite treated nucleic acid for analysis of methylation status of SEQ ID NO: 46
atccgcgacgacattaaac

SEQ ID NO: 6052 - DNA, 31 bp, Artificial Sequence
  bisulfite treated nucleic acid for analysis of methylation status of SEQ ID NO: 46
ggatttgttcgcggacgttcgttttagtttt

SEQ ID NO: 6053 - DNA, 23 bp, Artificial Sequence
  bisulfite treated nucleic acid for analysis of methylation status of SEQ ID NO: 46
ttagtcgtatggtatgtagtcgg

SEQ ID NO: 6054 - DNA, 19 bp, Artificial Sequence
  bisulfite treated nucleic acid for analysis of methylation status of SEQ ID NO: 46
taggtgcggtcggttattc

SEQ ID NO: 6055 - DNA, 22 bp, Artificial Sequence
  bisulfite treated nucleic acid for analysis of methylation status of SEQ ID NO: 46
atattaaccactacgaaatcgc

SEQ ID NO: 6056 - DNA, 24 bp, Artificial Sequence
  bisulfite treated nucleic acid for analysis of methylation status of SEQ ID NO: 46
tttttatacggttaggtttatcgc

SEQ ID NO: 6057 - DNA, 28 bp, Artificial Sequence
  bisulfite treated nucleic acid for analysis of methylation status of SEQ ID NO: 46
ggcgttgtaggtgcggtcggttattcgg

SEQ ID NO: 6058 - DNA, 21 bp, Artificial Sequence
  bisulfite treated nucleic acid for analysis of methylation status of SEQ ID NO: 46
gttgttcgttagatttacggc

SEQ ID NO: 6059 - DNA, 22 bp, Artificial Sequence
  bisulfite treated nucleic acid for analysis of methylation status of SEQ ID NO: 46
acgccgctaacgataactatac

SEQ ID NO: 6060 - DNA, 18 bp, Artificial Sequence
  bisulfite treated nucleic acid for analysis of methylation status of SEQ ID NO: 46
gtgacggtttttatgcgg

SEQ ID NO: 6061 - DNA, 32 bp, Artificial Sequence
  bisulfite treated nucleic acid for analysis of methylation status of SEQ ID NO: 46
tacggcggagttgttcgttagatttacggcgt

SEQ ID NO: 6062 - DNA, 18 bp, Artificial Sequence
  bisulfite treated nucleic acid for analysis of methylation status of SEQ ID NO: 46
ggtgacggtttttatgcg

SEQ ID NO: 6063 - DNA, 22 bp, Artificial Sequence
  bisulfite treated nucleic acid for analysis of methylation status of SEQ ID NO: 46
gccgctaacgataactatacca

SEQ ID NO: 6064 - DNA, 20 bp, Artificial Sequence
  bisulfite treated nucleic acid for analysis of methylation status of SEQ ID NO: 46
acgcgacgatcaaaacaata

SEQ ID NO: 6065 - DNA, 20 bp, Artificial Sequence
  bisulfite treated nucleic acid for analysis of methylation status of SEQ ID NO: 46
aaatccgtacaaaaccgaac

SEQ ID NO: 6066 - DNA, 19 bp, Artificial Sequence
  bisulfite treated nucleic acid for analysis of methylation status of SEQ ID NO: 46
tggagtagtttagcgtcgg

SEQ ID NO: 6067 - DNA, 19 bp, Artificial Sequence
  bisulfite treated nucleic acid for analysis of methylation status of SEQ ID NO: 46
acaaaaccgacgccaatac

SEQ ID NO: 6068 - DNA, 23 bp, Artificial Sequence
  bisulfite treated nucleic acid for analysis of methylation status of SEQ ID NO: 46
cgaagtttagtacgagcgtgtag

SEQ ID NO: 6069 - DNA, 32 bp, Artificial Sequence
  bisulfite treated nucleic acid for analysis of methylation status of SEQ ID NO: 46
attagaaggtttcgggttgcggaaagattagt

SEQ ID NO: 6070 - DNA, 22 bp, Artificial Sequence
  bisulfite treated nucleic acid for analysis of methylation status of SEQ ID NO: 46
tatctacgcgataatctacgcc

SEQ ID NO: 6071 - DNA, 32 bp, Artificial Sequence
  bisulfite treated nucleic acid for analysis of methylation status of SEQ ID NO: 46
agtaatacgtatagtacggcggagttgttcgt

SEQ ID NO: 6072 - DNA, 19 bp, Artificial Sequence
  bisulfite treated nucleic acid for analysis of methylation status of SEQ ID NO: 46
cgcgacgatcaaaacaata

SEQ ID NO: 6073 - DNA, 20 bp, Artificial Sequence
  bisulfite treated nucleic acid for analysis of methylation status of SEQ ID NO: 46
atcgtcacactcgtcgtact

SEQ ID NO: 6074 - DNA, 19 bp, Artificial Sequence
  bisulfite treated nucleic acid for analysis of methylation status of SEQ ID NO: 46
ttgagacgtttgtcggttg

SEQ ID NO: 6075 - DNA, 19 bp, Artificial Sequence
  bisulfite treated nucleic acid for analysis of methylation status of SEQ ID NO: 46
caaatcgccgactcctcta

SEQ ID NO: 6076 - DNA, 23 bp, Artificial Sequence
  bisulfite treated nucleic acid for analysis of methylation status of SEQ ID NO: 46
ttttatacggttaggtttatcgc

SEQ ID NO: 6077 - DNA, 22 bp, Artificial Sequence
  bisulfite treated nucleic acid for analysis of methylation status of SEQ ID NO: 46
actcatcgtaactatcgaccaa

SEQ ID NO: 6078 - DNA, 22 bp, Artificial Sequence
  bisulfite treated nucleic acid for analysis of methylation status of SEQ ID NO: 46
acgtactaatctttccgcaacc

SEQ ID NO: 6079 - DNA, 23 bp, Artificial Sequence
  bisulfite treated nucleic acid for analysis of methylation status of SEQ ID NO: 46
agtcgtatggtatgtagtcggta

SEQ ID NO: 6080 - DNA, 33 bp, Artificial Sequence
  bisulfite treated nucleic acid for analysis of methylation status of SEQ ID NO: 46
atttggcgttttttaaggacgttttacggagtt

SEQ ID NO: 6081 - DNA, 20 bp, Artificial Sequence
  bisulfite treated nucleic acid for analysis of methylation status of SEQ ID NO: 46
aatccgcgacgacattaaac

SEQ ID NO: 6082 - DNA, 35 bp, Artificial Sequence
  bisulfite treated nucleic acid for analysis of methylation status of SEQ ID NO: 46
gatttgttcgcggacgttcgttttagttttttaag

SEQ ID NO: 6083 - DNA, 24 bp, Artificial Sequence
  bisulfite treated nucleic acid for analysis of methylation status of SEQ ID NO: 46
tattggtcgatagttacgatgagt

SEQ ID NO: 6084 - DNA, 19 bp, Artificial Sequence
  bisulfite treated nucleic acid for analysis of methylation status of SEQ ID NO: 46
cgcgttggagtagtttagc

SEQ ID NO: 6085 - DNA, 22 bp, Artificial Sequence
  bisulfite treated nucleic acid for analysis of methylation status of SEQ ID NO: 10
aagatttttatcgcgtgtttgt

SEQ ID NO: 6086 - DNA, 22 bp, Artificial Sequence
  bisulfite treated nucleic acid for analysis of methylation status of SEQ ID NO: 10
aatctacgctacgttcaccact

SEQ ID NO: 6087 - DNA, 40 bp, Artificial Sequence
  bisulfite treated nucleic acid for analysis of methylation status of SEQ ID NO: 10
ttcgtacgtggttatagttaacgtttgttgcgtttcgcgt

SEQ ID NO: 6088 - DNA, 22 bp, Artificial Sequence
  bisulfite treated nucleic acid for analysis of methylation status of SEQ ID NO: 10
atctacgctacgttcaccactc

SEQ ID NO: 6089 - DNA, 22 bp, Artificial Sequence
  bisulfite treated nucleic acid for analysis of methylation status of SEQ ID NO: 10
ggtaagatttttatcgcgtgtt

SEQ ID NO: 6090 - DNA, 22 bp, Artificial Sequence
  bisulfite treated nucleic acid for analysis of methylation status of SEQ ID NO: 10
atcgtagtttgcgtgtttaagg

SEQ ID NO: 6091 - DNA, 22 bp, Artificial Sequence
  bisulfite treated nucleic acid for analysis of methylation status of SEQ ID NO: 10
gcgaataaaaccgaacaaatta

SEQ ID NO: 6092 - DNA, 36 bp, Artificial Sequence
  bisulfite treated nucleic acid for analysis of methylation status of SEQ ID NO: 10
gttcgtcgtttattttatttgggtcgacgagattaa

SEQ ID NO: 6093 - DNA, 22 bp, Artificial Sequence
  bisulfite treated nucleic acid for analysis of methylation status of SEQ ID NO: 10
agtggtgaacgtagcgtagatt

SEQ ID NO: 6094 - DNA, 22 bp, Artificial Sequence
  bisulfite treated nucleic acid for analysis of methylation status of SEQ ID NO: 10
acgaccgtaacgataataaacc

SEQ ID NO: 6095 - DNA, 30 bp, Artificial Sequence
  bisulfite treated nucleic acid for analysis of methylation status of SEQ ID NO: 10
gtttttcggggttgttcgtgtcgtagaagt

SEQ ID NO: 6096 - DNA, 22 bp, Artificial Sequence
  bisulfite treated nucleic acid for analysis of methylation status of SEQ ID NO: 10
taagatttttatcgcgtgtttg

SEQ ID NO: 6097 - DNA, 22 bp, Artificial Sequence
  bisulfite treated nucleic acid for analysis of methylation status of SEQ ID NO: 10
cgaccgtaacgataataaacca

SEQ ID NO: 6098 - DNA, 23 bp, Artificial Sequence
  bisulfite treated nucleic acid for analysis of methylation status of SEQ ID NO: 10
gtaagatttttatcgcgtgtttg

SEQ ID NO: 6099 - DNA, 22 bp, Artificial Sequence
  bisulfite treated nucleic acid for analysis of methylation status of SEQ ID NO: 10
taatctacgctacgttcaccac

SEQ ID NO: 6100 - DNA, 22 bp, Artificial Sequence
  bisulfite treated nucleic acid for analysis of methylation status of SEQ ID NO: 10
cgtgttgggtttattttacgtt

SEQ ID NO: 6101 - DNA, 21 bp, Artificial Sequence
  bisulfite treated nucleic acid for analysis of methylation status of SEQ ID NO: 10
cgtcttcattctcctcgtaca

SEQ ID NO: 6102 - DNA, 36 bp, Artificial Sequence
  bisulfite treated nucleic acid for analysis of methylation status of SEQ ID NO: 10
tgtgtgttgttatatcggtaagatttttatcgcgtg

SEQ ID NO: 6103 - DNA, 21 bp, Artificial Sequence
  bisulfite treated nucleic acid for analysis of methylation status of SEQ ID NO: 10
acaacacgaccgtaacgataa

SEQ ID NO: 6104 - DNA, 29 bp, Artificial Sequence
  bisulfite treated nucleic acid for analysis of methylation status of SEQ ID NO: 10
ggggttgttcgtgtcgtagaagttttggt

SEQ ID NO: 6105 - DNA, 21 bp, Artificial Sequence
  bisulfite treated nucleic acid for analysis of methylation status of SEQ ID NO: 10
tctacgctacgttcaccactc

SEQ ID NO: 6106 - DNA, 22 bp, Artificial Sequence
  bisulfite treated nucleic acid for analysis of methylation status of SEQ ID NO: 10
gagtggtgaacgtagcgtagat

SEQ ID NO: 6107 - DNA, 32 bp, Artificial Sequence
  bisulfite treated nucleic acid for analysis of methylation status of SEQ ID NO: 10
atcgagttggtgatgacgtgtattttgtacgt

SEQ ID NO: 6108 - DNA, 23 bp, Artificial Sequence
  bisulfite treated nucleic acid for analysis of methylation status of SEQ ID NO: 10
aacacgaccgtaacgataataaa

SEQ ID NO: 6109 - DNA, 30 bp, Artificial Sequence
  bisulfite treated nucleic acid for analysis of methylation status of SEQ ID NO: 10
tttcggggttgttcgtgtcgtagaagtttt

SEQ ID NO: 6110 - DNA, 21 bp, Artificial Sequence
  bisulfite treated nucleic acid for analysis of methylation status of SEQ ID NO: 10
tcgtagtttgcgtgtttaagg

SEQ ID NO: 6111 - DNA, 22 bp, Artificial Sequence
  bisulfite treated nucleic acid for analysis of methylation status of SEQ ID NO: 10
taatttgttcggttttattcgc

SEQ ID NO: 6112 - DNA, 21 bp, Artificial Sequence
  bisulfite treated nucleic acid for analysis of methylation status of SEQ ID NO: 10
aaacgcgactaccttcctaaa

SEQ ID NO: 6113 - DNA, 28 bp, Artificial Sequence
  bisulfite treated nucleic acid for analysis of methylation status of SEQ ID NO: 10
gtcgttgtcgaggtgttggagaagtcgt

SEQ ID NO: 6114 - DNA, 22 bp, Artificial Sequence
  bisulfite treated nucleic acid for analysis of methylation status of SEQ ID NO: 10
agatttttatcgcgtgtttgta

SEQ ID NO: 6115 - DNA, 23 bp, Artificial Sequence
  bisulfite treated nucleic acid for analysis of methylation status of SEQ ID NO: 10
gataatctacgctacgttcacca

SEQ ID NO: 6116 - DNA, 22 bp, Artificial Sequence
  bisulfite treated nucleic acid for analysis of methylation status of SEQ ID NO: 10
aacaacacgaccgtaacgataa

SEQ ID NO: 6117 - DNA, 22 bp, Artificial Sequence
  bisulfite treated nucleic acid for analysis of methylation status of SEQ ID NO: 10
ataatctacgctacgttcacca

SEQ ID NO: 6118 - DNA, 22 bp, Artificial Sequence
  bisulfite treated nucleic acid for analysis of methylation status of SEQ ID NO: 10
atgacgtgtattttgtacgtgg

SEQ ID NO: 6119 - DNA, 23 bp, Artificial Sequence
  bisulfite treated nucleic acid for analysis of methylation status of SEQ ID NO: 10
taatctacgctacgttcaccact

SEQ ID NO: 6120 - DNA, 22 bp, Artificial Sequence
  bisulfite treated nucleic acid for analysis of methylation status of SEQ ID NO: 10
acacgaccgtaacgataataaa

SEQ ID NO: 6121 - DNA, 23 bp, Artificial Sequence
  bisulfite treated nucleic acid for analysis of methylation status of SEQ ID NO: 10
tatcgtagtttgcgtgtttaagg

SEQ ID NO: 6122 - DNA, 23 bp, Artificial Sequence
  bisulfite treated nucleic acid for analysis of methylation status of SEQ ID NO: 10
gaccgtaacgataataaaccaaa

SEQ ID NO: 6123 - DNA, 22 bp, Artificial Sequence
  bisulfite treated nucleic acid for analysis of methylation status of SEQ ID NO: 10
ccgtaacgataataaaccaaaa

SEQ ID NO: 6124 - DNA, 32 bp, Artificial Sequence
  bisulfite treated nucleic acid for analysis of methylation status of SEQ ID NO: 10
aatagtttttcggggttgttcgtgtcgtagaa

SEQ ID NO: 6125 - DNA, 22 bp, Artificial Sequence
  bisulfite treated nucleic acid for analysis of methylation status of SEQ ID NO: 10
cacgaccgtaacgataataaac

SEQ ID NO: 6126 - DNA, 23 bp, Artificial Sequence
  bisulfite treated nucleic acid for analysis of methylation status of SEQ ID NO: 10
caacacgaccgtaacgataataa

SEQ ID NO: 6127 - DNA, 23 bp, Artificial Sequence
  bisulfite treated nucleic acid for analysis of methylation status of SEQ ID NO: 10
ggtaagatttttatcgcgtgttt

SEQ ID NO: 6128 - DNA, 23 bp, Artificial Sequence
  bisulfite treated nucleic acid for analysis of methylation status of SEQ ID NO: 10
accgtaacgataataaaccaaaa

SEQ ID NO: 6129 - DNA, 30 bp, Artificial Sequence
  bisulfite treated nucleic acid for analysis of methylation status of SEQ ID NO: 10
agtttttcggggttgttcgtgtcgtagaag

SEQ ID NO: 6130 - DNA, 21 bp, Artificial Sequence
  bisulfite treated nucleic acid for analysis of methylation status of SEQ ID NO: 10
gtacgaggagaatgaagacgg

SEQ ID NO: 6131 - DNA, 22 bp, Artificial Sequence
  bisulfite treated nucleic acid for analysis of methylation status of SEQ ID NO: 10
tcgataatctacgctacgttca

SEQ ID NO: 6132 - DNA, 20 bp, Artificial Sequence
  bisulfite treated nucleic acid for analysis of methylation status of SEQ ID NO: 10
ccgtcttcattctcctcgta

SEQ ID NO: 6133 - DNA, 21 bp, Artificial Sequence
  bisulfite treated nucleic acid for analysis of methylation status of SEQ ID NO: 10
tgtacgaggagaatgaagacg

SEQ ID NO: 6134 - DNA, 22 bp, Artificial Sequence
  bisulfite treated nucleic acid for analysis of methylation status of SEQ ID NO: 10
caactcgataatctacgctacg

SEQ ID NO: 6135 - DNA, 21 bp, Artificial Sequence
  bisulfite treated nucleic acid for analysis of methylation status of SEQ ID NO: 10
aatttgttcggttttattcgc

SEQ ID NO: 6136 - DNA, 22 bp, Artificial Sequence
  bisulfite treated nucleic acid for analysis of methylation status of SEQ ID NO: 10
tcaccaactcgataatctacgc

SEQ ID NO: 6137 - DNA, 22 bp, Artificial Sequence
  bisulfite treated nucleic acid for analysis of methylation status of SEQ ID NO: 10
ttattttgtacggcggttattt

SEQ ID NO: 6138 - DNA, 22 bp, Artificial Sequence
  bisulfite treated nucleic acid for analysis of methylation status of SEQ ID NO: 10
attacggataatttgttcggtt

SEQ ID NO: 6139 - DNA, 21 bp, Artificial Sequence
  bisulfite treated nucleic acid for analysis of methylation status of SEQ ID NO: 10
acgcgactaccttcctaaaaa

SEQ ID NO: 6140 - DNA, 33 bp, Artificial Sequence
  bisulfite treated nucleic acid for analysis of methylation status of SEQ ID NO: 10
tattttttgtcgttgtcgaggtgttggagaagt

SEQ ID NO: 6141 - DNA, 21 bp, Artificial Sequence
  bisulfite treated nucleic acid for analysis of methylation status of SEQ ID NO: 10
cgtgtttgtacgaggagaatg

SEQ ID NO: 6142 - DNA, 21 bp, Artificial Sequence
  nucleic acid for analysis of methylation status of SEQ ID NO: 10
acgtcatcaccaactcgataa

SEQ ID NO: 6143 - DNA, 20 bp, Artificial Sequence
  bisulfite treated nucleic acid for analysis of methylation status of SEQ ID NO: 10
tacgaggagaatgaagacgg

SEQ ID NO: 6144 - DNA, 23 bp, Artificial Sequence
  bisulfite treated nucleic acid for analysis of methylation status of SEQ ID NO: 10
cgaataaaaccgaacaaattatc

SEQ ID NO: 6145 - DNA, 22 bp, Artificial Sequence
  bisulfite treated nucleic acid for analysis of methylation status of SEQ ID NO: 10
cgttaagttacgtttttcgggt

SEQ ID NO: 6146 - DNA, 22 bp, Artificial Sequence
  bisulfite treated nucleic acid for analysis of methylation status of SEQ ID NO: 10
caaataaccgccgtacaaaata

SEQ ID NO: 6147 - DNA, 26 bp, Artificial Sequence
  bisulfite treated nucleic acid for analysis of methylation status of SEQ ID NO: 10
aagttcgttgagcgttcgcgtttggt

SEQ ID NO: 6148 - DNA, 22 bp, Artificial Sequence
  bisulfite treated nucleic acid for analysis of methylation status of SEQ ID NO: 10
ttgtacgaggagaatgaagacg

SEQ ID NO: 6149 - DNA, 23 bp, Artificial Sequence
  bisulfite treated nucleic acid for analysis of methylation status of SEQ ID NO: 10
caccaactcgataatctacgcta

SEQ ID NO: 6150 - DNA, 23 bp, Artificial Sequence
  bisulfite treated nucleic acid for analysis of methylation status of SEQ ID NO: 10
cggataatttgttcggttttatt

SEQ ID NO: 6151 - DNA, 21 bp, Artificial Sequence
  bisulfite treated nucleic acid for analysis of methylation status of SEQ ID NO: 10
cgagttggtgatgacgtgtat

SEQ ID NO: 6152 - DNA, 23 bp, Artificial Sequence
  bisulfite treated nucleic acid for analysis of methylation status of SEQ ID NO: 10
tgatgacgtgtattttgtacgtg

SEQ ID NO: 6153 - DNA, 23 bp, Artificial Sequence
  bisulfite treated nucleic acid for analysis of methylation status of SEQ ID NO: 10
ataatttgttcggttttattcgc

SEQ ID NO: 6154 - DNA, 22 bp, Artificial Sequence
  bisulfite treated nucleic acid for analysis of methylation status of SEQ ID NO: 10
gtggtgaacgtagcgtagatta

SEQ ID NO: 6155 - DNA, 23 bp, Artificial Sequence
  bisulfite treated nucleic acid for analysis of methylation status of SEQ ID NO: 10
cacgaccgtaacgataataaacc

SEQ ID NO: 6156 - DNA, 20 bp, Artificial Sequence
  bisulfite treated nucleic acid for analysis of methylation status of SEQ ID NO: 10
ttttcggtttgttatagcgg

SEQ ID NO: 6157 - DNA, 22 bp, Artificial Sequence
  bisulfite treated nucleic acid for analysis of methylation status of SEQ ID NO: 10
acgcgaaatacgacacataaat

SEQ ID NO: 6158 - DNA, 33 bp, Artificial Sequence
  bisulfite treated nucleic acid for analysis of methylation status of SEQ ID NO: 10
ttgcgcgttcgtcgtttttacgttgtttatggt

SEQ ID NO: 6159 - DNA, 21 bp, Artificial Sequence
  bisulfite treated nucleic acid for analysis of methylation status of SEQ ID NO: 10
tttttcggtttgttatagcgg

SEQ ID NO: 6160 - DNA, 24 bp, Artificial Sequence
  bisulfite treated nucleic acid for analysis of methylation status of SEQ ID NO: 10
cgtatatcgtagtttgcgtgttta

SEQ ID NO: 6161 - DNA, 22 bp, Artificial Sequence
  bisulfite treated nucleic acid for analysis of methylation status of SEQ ID NO: 10
aaaaccgaacaaattatccgta

SEQ ID NO: 6162 - DNA, 22 bp, Artificial Sequence
  bisulfite treated nucleic acid for analysis of methylation status of SEQ ID NO: 10
gttattttgtacggcggttatt

SEQ ID NO: 6163 - DNA, 20 bp, Artificial Sequence
  bisulfite treated nucleic acid for analysis of methylation status of SEQ ID NO: 10
tttatcgaattaacgcggag

SEQ ID NO: 6164 - DNA, 22 bp, Artificial Sequence
  bisulfite treated nucleic acid for analysis of methylation status of SEQ ID NO: 10
gacgacaaaacgcactaaacta

SEQ ID NO: 6165 - DNA, 27 bp, Artificial Sequence
  bisulfite treated nucleic acid for analysis of methylation status of SEQ ID NO: 10
gggcgagttttcgtcgcgtttttgcgt

SEQ ID NO: 6166 - DNA, 21 bp, Artificial Sequence
  nucleic acid for analysis of methylation status of SEQ ID NO: 10
gtggtgaacgtagcgtagatt

SEQ ID NO: 6167 - DNA, 21 bp, Artificial Sequence
  bisulfite treated nucleic acid for analysis of methylation status of SEQ ID NO: 10
cgtagtttgcgtgtttaaggg

SEQ ID NO: 6168 - DNA, 20 bp, Artificial Sequence
  bisulfite treated nucleic acid for analysis of methylation status of SEQ ID NO: 10
aattaacgcggaggattagg

SEQ ID NO: 6169 - DNA, 21 bp, Artificial Sequence
  bisulfite treated nucleic acid for analysis of methylation status of SEQ ID NO: 10
tgacgtgtattttgtacgtgg

SEQ ID NO: 6170 - DNA, 24 bp, Artificial Sequence
  bisulfite treated nucleic acid for analysis of methylation status of SEQ ID NO: 10
atatcgtagtttgcgtgtttaagg

SEQ ID NO: 6171 - DNA, 22 bp, Artificial Sequence
  bisulfite treated nucleic acid for analysis of methylation status of SEQ ID NO: 10
cgtatatcgtagtttgcgtgtt

SEQ ID NO: 6172 - DNA, 22 bp, Artificial Sequence
  bisulfite treated nucleic acid for analysis of methylation status of SEQ ID NO: 10
tattttgtacggcggttatttg

SEQ ID NO: 6173 - DNA, 22 bp, Artificial Sequence
  bisulfite treated nucleic acid for analysis of methylation status of SEQ ID NO: 10
aacacgaccgtaacgataataa

SEQ ID NO: 6174 - DNA, 23 bp, Artificial Sequence
  bisulfite treated nucleic acid for analysis of methylation status of SEQ ID NO: 10
cgaacaaattatccgtaataacc

SEQ ID NO: 6175 - DNA, 23 bp, Artificial Sequence
  bisulfite treated nucleic acid for analysis of methylation status of SEQ ID NO: 10
gataatttgttcggttttattcg

SEQ ID NO: 6176 - DNA, 21 bp, Artificial Sequence
  bisulfite treated nucleic acid for analysis of methylation status of SEQ ID NO: 10
aacgcgactaccttcctaaaa

SEQ ID NO: 6177 - DNA, 21 bp, Artificial Sequence
  bisulfite treated nucleic acid for analysis of methylation status of SEQ ID NO: 10
ttttaggaaggtagtcgcgtt

SEQ ID NO: 6178 - DNA, 24 bp, Artificial Sequence
  bisulfite treated nucleic acid for analysis of methylation status of SEQ ID NO: 10
cgaaatacgacacataaataacca

SEQ ID NO: 6179 - DNA, 22 bp, Artificial Sequence
  bisulfite treated nucleic acid for analysis of methylation status of SEQ ID NO: 10
agcggcgacgggcgtttgaagt

SEQ ID NO: 6180 - DNA, 21 bp, Artificial Sequence
  bisulfite treated nucleic acid for analysis of methylation status of SEQ ID NO: 10
tttttaggaaggtagtcgcgt

SEQ ID NO: 6181 - DNA, 22 bp, Artificial Sequence
  bisulfite treated nucleic acid for analysis of methylation status of SEQ ID NO: 10
ccaactcgataatctacgctac

SEQ ID NO: 6182 - DNA, 22 bp, Artificial Sequence
  bisulfite treated nucleic acid for analysis of methylation status of SEQ ID NO: 10
accaactcgataatctacgcta

SEQ ID NO: 6183 - DNA, 20 bp, Artificial Sequence
  bisulfite treated nucleic acid for analysis of methylation status of SEQ ID NO: 10
tttttcggcggtttagattt

SEQ ID NO: 6184 - DNA, 22 bp, Artificial Sequence
  bisulfite treated nucleic acid for analysis of methylation status of SEQ ID NO: 10
aacgctcaacgaacttaacaac

SEQ ID NO: 6185 - DNA, 33 bp, Artificial Sequence
  bisulfite treated nucleic acid for analysis of methylation status of SEQ ID NO: 10
ttcgggttatagcgttaagttacgtttttcggg

SEQ ID NO: 6186 - DNA, 22 bp, Artificial Sequence
  bisulfite treated nucleic acid for analysis of methylation status of SEQ ID NO: 10
acgacaaaacgcactaaactaa

SEQ ID NO: 6187 - DNA, 23 bp, Artificial Sequence
  bisulfite treated nucleic acid for analysis of methylation status of SEQ ID NO: 10
tattacggataatttgttcggtt

SEQ ID NO: 6188 - DNA, 22 bp, Artificial Sequence
  bisulfite treated nucleic acid for analysis of methylation status of SEQ ID NO: 10
tatcgtagtttgcgtgtttaag

SEQ ID NO: 6189 - DNA, 20 bp, Artificial Sequence
  bisulfite treated nucleic acid for analysis of methylation status of SEQ ID NO: 10
aaaaacgcgactaccttcct

SEQ ID NO: 6190 - DNA, 22 bp, Artificial Sequence
  bisulfite treated nucleic acid for analysis of methylation status of SEQ ID NO: 10
tagcgttaagttacgtttttcg

SEQ ID NO: 6191 - DNA, 21 bp, Artificial Sequence
  bisulfite treated nucleic acid for analysis of methylation status of SEQ ID NO: 10
caaataaccgccgtacaaaat

SEQ ID NO: 6192 - DNA, 20 bp, Artificial Sequence
  bisulfite treated nucleic acid for analysis of methylation status of SEQ ID NO: 10
caacacgaccgtaacgataa

SEQ ID NO: 6193 - DNA, 22 bp, Artificial Sequence
  bisulfite treated nucleic acid for analysis of methylation status of SEQ ID NO: 10
gttaagttacgtttttcgggtt

SEQ ID NO: 6194 - DNA, 22 bp, Artificial Sequence
  bisulfite treated nucleic acid for analysis of methylation status of SEQ ID NO: 10
gatgacgtgtattttgtacgtg

SEQ ID NO: 6195 - DNA, 21 bp, Artificial Sequence
  bisulfite treated nucleic acid for analysis of methylation status of SEQ ID NO: 10
tatcgagttggtgatgacgtg

SEQ ID NO: 6196 - DNA, 19 bp, Artificial Sequence
  bisulfite treated nucleic acid for analysis of methylation status of SEQ ID NO: 10
ggtttgttatagcggcgac

SEQ ID NO: 6197 - DNA, 22 bp, Artificial Sequence
  bisulfite treated nucleic acid for analysis of methylation status of SEQ ID NO: 10
cgcgaaatacgacacataaata

SEQ ID NO: 6198 - DNA, 22 bp, Artificial Sequence
  bisulfite treated nucleic acid for analysis of methylation status of SEQ ID NO: 10
atttttatcgcgtgtttgtacg

SEQ ID NO: 6199 - DNA, 22 bp, Artificial Sequence
  bisulfite treated nucleic acid for analysis of methylation status of SEQ ID NO: 10
gataatctacgctacgttcacc

SEQ ID NO: 6200 - DNA, 23 bp, Artificial Sequence
  bisulfite treated nucleic acid for analysis of methylation status of SEQ ID NO: 10
ctcgataatctacgctacgttca

SEQ ID NO: 6201 - DNA, 21 bp, Artificial Sequence
  bisulfite treated nucleic acid for analysis of methylation status of SEQ ID NO: 10
gatttttatcgcgtgtttgta

SEQ ID NO: 6202 - DNA, 24 bp, Artificial Sequence
  bisulfite treated nucleic acid for analysis of methylation status of SEQ ID NO: 10
cgttttatagggtatgttcgtgtt

SEQ ID NO: 6203 - DNA, 36 bp, Artificial Sequence
  bisulfite treated nucleic acid for analysis of methylation status of SEQ ID NO: 10
gtcgtcgttgtgtgttgttatatcggtaagattttt

SEQ ID NO: 6204 - DNA, 19 bp, Artificial Sequence
  bisulfite treated nucleic acid for analysis of methylation status of SEQ ID NO: 10
acgaggagaatgaagacgg

SEQ ID NO: 6205 - DNA, 20 bp, Artificial Sequence
  bisulfite treated nucleic acid for analysis of methylation status of SEQ ID NO: 10
aacgcgactaccttcctaaa

SEQ ID NO: 6206 - DNA, 23 bp, Artificial Sequence
  bisulfite treated nucleic acid for analysis of methylation status of SEQ ID NO: 10
atcaccaactcgataatctacgc

SEQ ID NO: 6207 - DNA, 19 bp, Artificial Sequence
  bisulfite treated nucleic acid for analysis of methylation status of SEQ ID NO: 10
taagttcgttgagcgttcg

SEQ ID NO: 6208 - DNA, 22 bp, Artificial Sequence
  bisulfite treated nucleic acid for analysis of methylation status of SEQ ID NO: 10
aaataaccgccgtacaaaataa

SEQ ID NO: 6209 - DNA, 38 bp, Artificial Sequence
  bisulfite treated nucleic acid for analysis of methylation status of SEQ ID NO: 10
ttttatagggtatgttcgtgttgggtttattttacgtt

SEQ ID NO: 6210 - DNA, 19 bp, Artificial Sequence
  bisulfite treated nucleic acid for analysis of methylation status of SEQ ID NO: 10
gacgcgaataaaaccgaac

SEQ ID NO: 6211 - DNA, 21 bp, Artificial Sequence
  bisulfite treated nucleic acid for analysis of methylation status of SEQ ID NO: 10
cgtatatcgtagtttgcgtgt

SEQ ID NO: 6212 - DNA, 22 bp, Artificial Sequence
  bisulfite treated nucleic acid for analysis of methylation status of SEQ ID NO: 10
cgttttatagggtatgttcgtg

SEQ ID NO: 6213 - DNA, 22 bp, Artificial Sequence
  bisulfite treated nucleic acid for analysis of methylation status of SEQ ID NO: 10
cgacaaaacgcactaaactaat

SEQ ID NO: 6214 - DNA, 20 bp, Artificial Sequence
  bisulfite treated nucleic acid for analysis of methylation status of SEQ ID NO: 10
cgagttggtgatgacgtgta

SEQ ID NO: 6215 - DNA, 21 bp, Artificial Sequence
  bisulfite treated nucleic acid for analysis of methylation status of SEQ ID NO: 10
gaattaacgcggaggattagg

SEQ ID NO: 6216 - DNA, 23 bp, Artificial Sequence
  bisulfite treated nucleic acid for analysis of methylation status of SEQ ID NO: 10
tcgtgttgggtttattttacgtt

SEQ ID NO: 6217 - DNA, 37 bp, Artificial Sequence
  bisulfite treated nucleic acid for analysis of methylation status of SEQ ID NO: 10
gttgtgtgttgttatatcggtaagatttttatcgcgt

SEQ ID NO: 6218 - DNA, 20 bp, Artificial Sequence
  bisulfite treated nucleic acid for analysis of methylation status of SEQ ID NO: 10
tatcgcgtgtttgtacgagg

SEQ ID NO: 6219 - DNA, 23 bp, Artificial Sequence
  bisulfite treated nucleic acid for analysis of methylation status of SEQ ID NO: 10
atatcgtagtttgcgtgtttaag

SEQ ID NO: 6220 - DNA, 21 bp, Artificial Sequence
  bisulfite treated nucleic acid for analysis of methylation status of SEQ ID NO: 10
ttacggataatttgttcggtt

SEQ ID NO: 6221 - DNA, 23 bp, Artificial Sequence
  bisulfite treated nucleic acid for analysis of methylation status of SEQ ID NO: 10
aactcgataatctacgctacgtt

SEQ ID NO: 6222 - DNA, 19 bp, Artificial Sequence
  bisulfite treated nucleic acid for analysis of methylation status of SEQ ID NO: 10
cgagttggtgatgacgtgt

SEQ ID NO: 6223 - DNA, 21 bp, Artificial Sequence
  bisulfite treated nucleic acid for analysis of methylation status of SEQ ID NO: 10
gctcaacgaacttaacaacga

SEQ ID NO: 6224 - DNA, 21 bp, Artificial Sequence
  bisulfite treated nucleic acid for analysis of methylation status of SEQ ID NO: 10
gaacgctcaacgaacttaaca

SEQ ID NO: 6225 - DNA, 22 bp, Artificial Sequence
  bisulfite treated nucleic acid for analysis of methylation status of SEQ ID NO: 10
ataatttgttcggttttattcg

SEQ ID NO: 6226 - DNA, 22 bp, Artificial Sequence
  bisulfite treated nucleic acid for analysis of methylation status of SEQ ID NO: 10
gtatttgtagcgtgttcggttt

SEQ ID NO: 6227 - DNA, 19 bp, Artificial Sequence
  bisulfite treated nucleic acid for analysis of methylation status of SEQ ID NO: 10
gacgaaaactcgcccttac

SEQ ID NO: 6228 - DNA, 34 bp, Artificial Sequence
  bisulfite treated nucleic acid for analysis of methylation status of SEQ ID NO: 10
gagggttttatcgaagtttatcgaattaacgcgg

SEQ ID NO: 6229 - DNA, 25 bp, Artificial Sequence
  bisulfite treated nucleic acid for analysis of methylation status of SEQ ID NO: 10
cgtaacgataataaaccaaaacttc

SEQ ID NO: 6230 - DNA, 23 bp, Artificial Sequence
  bisulfite treated nucleic acid for analysis of methylation status of SEQ ID NO: 10
atagcgttaagttacgtttttcg

SEQ ID NO: 6231 - DNA, 23 bp, Artificial Sequence
  bisulfite treated nucleic acid for analysis of methylation status of SEQ ID NO: 10
taaaaccgaacaaattatccgta

SEQ ID NO: 6232 - DNA, 24 bp, Artificial Sequence
  bisulfite treated nucleic acid for analysis of methylation status of SEQ ID NO: 10
gaccgtaacgataataaaccaaaa

SEQ ID NO: 6233 - DNA, 24 bp, Artificial Sequence
  bisulfite treated nucleic acid for analysis of methylation status of SEQ ID NO: 10
gcgaaatacgacacataaataacc

SEQ ID NO: 6234 - DNA, 20 bp, Artificial Sequence
  bisulfite treated nucleic acid for analysis of methylation status of SEQ ID NO: 10
tacgctacgttcaccactcg

SEQ ID NO: 6235 - DNA, 21 bp, Artificial Sequence
  bisulfite treated nucleic acid for analysis of methylation status of SEQ ID NO: 10
attttgtacggcggttatttg

SEQ ID NO: 6236 - DNA, 19 bp, Artificial Sequence
  bisulfite treated nucleic acid for analysis of methylation status of SEQ ID NO: 10
accacgacgcgaataaaac

SEQ ID NO: 6237 - DNA, 21 bp, Artificial Sequence
  bisulfite treated nucleic acid for analysis of methylation status of SEQ ID NO: 10
aaataaccgccgtacaaaata

SEQ ID NO: 6238 - DNA, 20 bp, Artificial Sequence
  bisulfite treated nucleic acid for analysis of methylation status of SEQ ID NO: 10
cgcgactaccttcctaaaaa

SEQ ID NO: 6239 - DNA, 25 bp, Artificial Sequence
  bisulfite treated nucleic acid for analysis of methylation status of SEQ ID NO: 10
tatatcgtagtttgcgtgtttaagg

SEQ ID NO: 6240 - DNA, 20 bp, Artificial Sequence
  bisulfite treated nucleic acid for analysis of methylation status of SEQ ID NO: 10
ctacgctacgttcaccactc

SEQ ID NO: 6241 - DNA, 24 bp, Artificial Sequence
  bisulfite treated nucleic acid for analysis of methylation status of SEQ ID NO: 10
ttattacggataatttgttcggtt

SEQ ID NO: 6242 - DNA, 20 bp, Artificial Sequence
  bisulfite treated nucleic acid for analysis of methylation status of SEQ ID NO: 10
ttaagttcgttgagcgttcg

SEQ ID NO: 6243 - DNA, 20 bp, Artificial Sequence
  bisulfite treated nucleic acid for analysis of methylation status of SEQ ID NO: 10
aggaaggtagtcgcgttttt

SEQ ID NO: 6244 - DNA, 19 bp, Artificial Sequence
  bisulfite treated nucleic acid for analysis of methylation status of SEQ ID NO: 10
ttttcggcggtttagattt

SEQ ID NO: 6245 - DNA, 21 bp, Artificial Sequence
  bisulfite treated nucleic acid for analysis of methylation status of SEQ ID NO: 10
tttttatcgcgtgtttgtacg

SEQ ID NO: 6246 - DNA, 20 bp, Artificial Sequence
  bisulfite treated nucleic acid for analysis of methylation status of SEQ ID NO: 10
cgtcatcaccaactcgataa

SEQ ID NO: 6247 - DNA, 22 bp, Artificial Sequence
  nucleic acid for analysis of methylation status of SEQ ID NO: 10
tcgacgagattaaggaggttat

SEQ ID NO: 6248 - DNA, 19 bp, Artificial Sequence
  bisulfite treated nucleic acid for analysis of methylation status of SEQ ID NO: 10
cacctcgacaacgacaaaa

SEQ ID NO: 6249 - DNA, 32 bp, Artificial Sequence
  bisulfite treated nucleic acid for analysis of methylation status of SEQ ID NO: 10
gataatttgttcggttttattcgcgtcgtggt

SEQ ID NO: 6250 - DNA, 21 bp, Artificial Sequence
  bisulfite treated nucleic acid for analysis of methylation status of SEQ ID NO: 10
tttatcgcgtgtttgtacgag

SEQ ID NO: 6251 - DNA, 22 bp, Artificial Sequence
  bisulfite treated nucleic acid for analysis of methylation status of SEQ ID NO: 10
actcgataatctacgctacgtt

SEQ ID NO: 6252 - DNA, 24 bp, Artificial Sequence
  bisulfite treated nucleic acid for analysis of methylation status of SEQ ID NO: 10
acggataatttgttcggttttatt

SEQ ID NO: 6253 - DNA, 23 bp, Artificial Sequence
  bisulfite treated nucleic acid for analysis of methylation status of SEQ ID NO: 10
cgcgaaatacgacacataaataa

SEQ ID NO: 6254 - DNA, 20 bp, Artificial Sequence
  bisulfite treated nucleic acid for analysis of methylation status of SEQ ID NO: 10
atttgttcggttttattcgc

SEQ ID NO: 6255 - DNA, 19 bp, Artificial Sequence
  bisulfite treated nucleic acid for analysis of methylation status of SEQ ID NO: 10
gctacgttcaccactcgac

SEQ ID NO: 6256 - DNA, 19 bp, Artificial Sequence
  bisulfite treated nucleic acid for analysis of methylation status of SEQ ID NO: 10
acacctcgacaacgacaaa

SEQ ID NO: 6257 - DNA, 19 bp, Artificial Sequence
  bisulfite treated nucleic acid for analysis of methylation status of SEQ ID NO: 10
aacacctcgacaacgacaa

SEQ ID NO: 6258 - DNA, 22 bp, Artificial Sequence
  bisulfite treated nucleic acid for analysis of methylation status of SEQ ID NO: 10
cacgaacataccctataaaacg

SEQ ID NO: 6259 - DNA, 18 bp, Artificial Sequence
  bisulfite treated nucleic acid for analysis of methylation status of SEQ ID NO: 10
acgggcgtttgaagtttt

SEQ ID NO: 6260 - DNA, 20 bp, Artificial Sequence
  bisulfite treated nucleic acid for analysis of methylation status of SEQ ID NO: 10
atcgagttggtgatgacgtg

SEQ ID NO: 6261 - DNA, 22 bp, Artificial Sequence
  bisulfite treated nucleic acid for analysis of methylation status of SEQ ID NO: 10
gacgtgtattttgtacgtggtg

SEQ ID NO: 6262 - DNA, 26 bp, Artificial Sequence
  bisulfite treated nucleic acid for analysis of methylation status of SEQ ID NO: 10
aacgataataaaccaaaacttctacg

SEQ ID NO: 6263 - DNA, 33 bp, Artificial Sequence
  bisulfite treated nucleic acid for analysis of methylation status of SEQ ID NO: 10
tgtataatagtttttcggggttgttcgtgtcgt

SEQ ID NO: 6264 - DNA, 22 bp, Artificial Sequence
  bisulfite treated nucleic acid for analysis of methylation status of SEQ ID NO: 10
tgacgtgtattttgtacgtggt

SEQ ID NO: 6265 - DNA, 22 bp, Artificial Sequence
  bisulfite treated nucleic acid for analysis of methylation status of SEQ ID NO: 10
agcgtagattatcgagttggtg

SEQ ID NO: 6266 - DNA, 19 bp, Artificial Sequence
  bisulfite treated nucleic acid for analysis of methylation status of SEQ ID NO: 10
ctacgacacgaacaacccc

SEQ ID NO: 6267 - DNA, 34 bp, Artificial Sequence
  bisulfite treated nucleic acid for analysis of methylation status of SEQ ID NO: 10
gacgtgtattttgtacgtggtggtgagtggtaat

SEQ ID NO: 6268 - DNA, 21 bp, Artificial Sequence
  bisulfite treated nucleic acid for analysis of methylation status of SEQ ID NO: 10
agcgttaagttacgtttttcg

SEQ ID NO: 6269 - DNA, 24 bp, Artificial Sequence
  bisulfite treated nucleic acid for analysis of methylation status of SEQ ID NO: 10
cgacaaaacgcactaaactaataa

SEQ ID NO: 6270 - DNA, 24 bp, Artificial Sequence
  bisulfite treated nucleic acid for analysis of methylation status of SEQ ID NO: 10
gtgatgacgtgtattttgtacgtg

SEQ ID NO: 6271 - DNA, 19 bp, Artificial Sequence
  bisulfite treated nucleic acid for analysis of methylation status of SEQ ID NO: 10
ctacgttcaccactcgacc

SEQ ID NO: 6272 - DNA, 21 bp, Artificial Sequence
  bisulfite treated nucleic acid for analysis of methylation status of SEQ ID NO: 10
aacgcgaaatacgacacataa

SEQ ID NO: 6273 - DNA, 19 bp, Artificial Sequence
  bisulfite treated nucleic acid for analysis of methylation status of SEQ ID NO: 10
tatcgaattaacgcggagg

SEQ ID NO: 6274 - DNA, 23 bp, Artificial Sequence
  bisulfite treated nucleic acid for analysis of methylation status of SEQ ID NO: 10
aatctacgctacgttcaccactc

SEQ ID NO: 6275 - DNA, 20 bp, Artificial Sequence
  bisulfite treated nucleic acid for analysis of methylation status of SEQ ID NO: 10
ttttaggaaggtagtcgcgt

SEQ ID NO: 6276 - DNA, 23 bp, Artificial Sequence
  bisulfite treated nucleic acid for analysis of methylation status of SEQ ID NO: 10
aaccataaacaacgtaaaaacga

SEQ ID NO: 6277 - DNA, 22 bp, Artificial Sequence
  bisulfite treated nucleic acid for analysis of methylation status of SEQ ID NO: 10
ctcaacgaacttaacaacgaat

SEQ ID NO: 6278 - DNA, 23 bp, Artificial Sequence
  bisulfite treated nucleic acid for analysis of methylation status of SEQ ID NO: 10
cgagattaaggaggttattacgg

SEQ ID NO: 6279 - DNA, 33 bp, Artificial Sequence
  bisulfite treated nucleic acid for analysis of methylation status of SEQ ID NO: 10
aatttgttcggttttattcgcgtcgtggttaat

SEQ ID NO: 6280 - DNA, 20 bp, Artificial Sequence
  bisulfite treated nucleic acid for analysis of methylation status of SEQ ID NO: 10
tttaggaaggtagtcgcgtt

SEQ ID NO: 6281 - DNA, 21 bp, Artificial Sequence
  bisulfite treated nucleic acid for analysis of methylation status of SEQ ID NO: 10
cgcgaaatacgacacataaat

SEQ ID NO: 6282 - DNA, 22 bp, Artificial Sequence
  bisulfite treated nucleic acid for analysis of methylation status of SEQ ID NO: 10
gtgttcggtttcgtgtattttt

SEQ ID NO: 6283 - DNA, 18 bp, Artificial Sequence
  bisulfite treated nucleic acid for analysis of methylation status of SEQ ID NO: 10
gaaaactcgcccttacgc

SEQ ID NO: 6284 - DNA, 19 bp, Artificial Sequence
  nucleic acid for analysis of methylation status of SEQ ID NO: 10
acgcgaataaaaccgaaca

SEQ ID NO: 6285 - DNA, 18 bp, Artificial Sequence
  bisulfite treated nucleic acid for analysis of methylation status of SEQ ID NO: 10
tacgacacgaacaacccc

SEQ ID NO: 6286 - DNA, 22 bp, Artificial Sequence
  bisulfite treated nucleic acid for analysis of methylation status of SEQ ID NO: 10
cgacgagattaaggaggttatt

SEQ ID NO: 6287 - DNA, 19 bp, Artificial Sequence
  bisulfite treated nucleic acid for analysis of methylation status of SEQ ID NO: 10
aggaaggtagtcgcgtttt

SEQ ID NO: 6288 - DNA, 21 bp, Artificial Sequence
  bisulfite treated nucleic acid for analysis of methylation status of SEQ ID NO: 10
gttatcggcggtatttgtagc

SEQ ID NO: 6289 - DNA, 21 bp, Artificial Sequence
  bisulfite treated nucleic acid for analysis of methylation status of SEQ ID NO: 10
cctaatcctccgcgttaattc

SEQ ID NO: 6290 - DNA, 37 bp, Artificial Sequence
  bisulfite treated nucleic acid for analysis of methylation status of SEQ ID NO: 10
ttcggtttcgtgtattttttcgagggttttatcgaag

SEQ ID NO: 6291 - DNA, 21 bp, Artificial Sequence
  bisulfite treated nucleic acid for analysis of methylation status of SEQ ID NO: 10
tggtgaacgtagcgtagatta

SEQ ID NO: 6292 - DNA, 21 bp, Artificial Sequence
  bisulfite treated nucleic acid for analysis of methylation status of SEQ ID NO: 10
acgctcaacgaacttaacaac

SEQ ID NO: 6293 - DNA, 24 bp, Artificial Sequence
  bisulfite treated nucleic acid for analysis of methylation status of SEQ ID NO: 10
tatatcgtagtttgcgtgtttaag

SEQ ID NO: 6294 - DNA, 18 bp, Artificial Sequence
  bisulfite treated nucleic acid for analysis of methylation status of SEQ ID NO: 10
cgcgaataaaaccgaaca

SEQ ID NO: 6295 - DNA, 25 bp, Artificial Sequence
  bisulfite treated nucleic acid for analysis of methylation status of SEQ ID NO: 10
cgaacaaattatccgtaataacctc

SEQ ID NO: 6296 - DNA, 18 bp, Artificial Sequence
  bisulfite treated nucleic acid for analysis of methylation status of SEQ ID NO: 10
cacgacgcgaataaaacc

SEQ ID NO: 6297 - DNA, 18 bp, Artificial Sequence
  bisulfite treated nucleic acid for analysis of methylation status of SEQ ID NO: 10
ccacgacgcgaataaaac

SEQ ID NO: 6298 - DNA, 18 bp, Artificial Sequence
  bisulfite treated nucleic acid for analysis of methylation status of SEQ ID NO: 10
aagttcgttgagcgttcg

SEQ ID NO: 6299 - DNA, 20 bp, Artificial Sequence
  bisulfite treated nucleic acid for analysis of methylation status of SEQ ID NO: 10
ttttgtacggcggttatttg

SEQ ID NO: 6300 - DNA, 21 bp, Artificial Sequence
  bisulfite treated nucleic acid for analysis of methylation status of SEQ ID NO: 10
gcgtgtttgtacgaggagaat

SEQ ID NO: 6301 - DNA, 21 bp, Artificial Sequence
  bisulfite treated nucleic acid for analysis of methylation status of SEQ ID NO: 10
atctacgctacgttcaccact

SEQ ID NO: 6302 - DNA, 20 bp, Artificial Sequence
  bisulfite treated nucleic acid for analysis of methylation status of SEQ ID NO: 10
cgagtggtgaacgtagcgta

SEQ ID NO: 6303 - DNA, 19 bp, Artificial Sequence
  bisulfite treated nucleic acid for analysis of methylation status of SEQ ID NO: 10
atcgcgtgtttgtacgagg

SEQ ID NO: 6304 - DNA, 24 bp, Artificial Sequence
  bisulfite treated nucleic acid for analysis of methylation status of SEQ ID NO: 10
ataaaaccgaacaaattatccgta

SEQ ID NO: 6305 - DNA, 18 bp, Artificial Sequence
  bisulfite treated nucleic acid for analysis of methylation status of SEQ ID NO: 10
gaatgaagacggcgaggt

SEQ ID NO: 6306 - DNA, 22 bp, Artificial Sequence
  bisulfite treated nucleic acid for analysis of methylation status of SEQ ID NO: 10
accacgtacaaaatacacgtca

SEQ ID NO: 6307 - DNA, 22 bp, Artificial Sequence
  bisulfite treated nucleic acid for analysis of methylation status of SEQ ID NO: 10
attttacgttattttgtacggc

SEQ ID NO: 6308 - DNA, 22 bp, Artificial Sequence
  nucleic acid for analysis of methylation status of SEQ ID NO: 10
tatttgtagcgtgttcggtttc

SEQ ID NO: 6309 - DNA, 18 bp, Artificial Sequence
  bisulfite treated nucleic acid for analysis of methylation status of SEQ ID NO: 10
acctcgccgtcttcattc

SEQ ID NO: 6310 - DNA, 22 bp, Artificial Sequence
  bisulfite treated nucleic acid for analysis of methylation status of SEQ ID NO: 10
ataaacaacgcgaaatacgaca

SEQ ID NO: 6311 - DNA, 22 bp, Artificial Sequence
  bisulfite treated nucleic acid for analysis of methylation status of SEQ ID NO: 10
cataaacaacgcgaaatacgac

SEQ ID NO: 6312 - DNA, 25 bp, Artificial Sequence
  bisulfite treated nucleic acid for analysis of methylation status of SEQ ID NO: 10
gtatatcgtagtttgcgtgtttaag

SEQ ID NO: 6313 - DNA, 20 bp, Artificial Sequence
  bisulfite treated nucleic acid for analysis of methylation status of SEQ ID NO: 10
ttgttaagttcgttgagcgt

SEQ ID NO: 6314 - DNA, 20 bp, Artificial Sequence
  bisulfite treated nucleic acid for analysis of methylation status of SEQ ID NO: 10
cgttgttaagttcgttgagc

SEQ ID NO: 6315 - DNA, 20 bp, Artificial Sequence
  bisulfite treated nucleic acid for analysis of methylation status of SEQ ID NO: 10
tgttaagttcgttgagcgtt

SEQ ID NO: 6316 - DNA, 24 bp, Artificial Sequence
  bisulfite treated nucleic acid for analysis of methylation status of SEQ ID NO: 10
tatagcgttaagttacgtttttcg

SEQ ID NO: 6317 - DNA, 20 bp, Artificial Sequence
  bisulfite treated nucleic acid for analysis of methylation status of SEQ ID NO: 10
ttatcgcgtgtttgtacgag

SEQ ID NO: 6318 - DNA, 19 bp, Artificial Sequence
  bisulfite treated nucleic acid for analysis of methylation status of SEQ ID NO: 10
agaatgaagacggcgaggt

SEQ ID NO: 6319 - DNA, 24 bp, Artificial Sequence
  bisulfite treated nucleic acid for analysis of methylation status of SEQ ID NO: 10
ccgaacaaattatccgtaataacc

SEQ ID NO: 6320 - DNA, 18 bp, Artificial Sequence
  bisulfite treated nucleic acid for analysis of methylation status of SEQ ID NO: 10
gacgggcgtttgaagttt

SEQ ID NO: 6321 - DNA, 20 bp, Artificial Sequence
  bisulfite treated nucleic acid for analysis of methylation status of SEQ ID NO: 10
tggtgaacgtagcgtagatt

SEQ ID NO: 6322 - DNA, 22 bp, Artificial Sequence
  bisulfite treated nucleic acid for analysis of methylation status of SEQ ID NO: 10
accataaacaacgtaaaaacga

SEQ ID NO: 6323 - DNA, 20 bp, Artificial Sequence
  bisulfite treated nucleic acid for analysis of methylation status of SEQ ID NO: 10
ttttatcgcgtgtttgtacg

SEQ ID NO: 6324 - DNA, 24 bp, Artificial Sequence
  bisulfite treated nucleic acid for analysis of methylation status of SEQ ID NO: 10
cgcgaaatacgacacataaataac

SEQ ID NO: 6325 - DNA, 22 bp, Artificial Sequence
  bisulfite treated nucleic acid for analysis of methylation status of SEQ ID NO: 10
taagttacgtttttcgggtttt

SEQ ID NO: 6326 - DNA, 18 bp, Artificial Sequence
  bisulfite treated nucleic acid for analysis of methylation status of SEQ ID NO: 10
ccaaataaccgccgtaca

SEQ ID NO: 6327 - DNA, 23 bp, Artificial Sequence
  bisulfite treated nucleic acid for analysis of methylation status of SEQ ID NO: 10
taagatttttatcgcgtgtttgt

SEQ ID NO: 6328 - DNA, 19 bp, Artificial Sequence
  bisulfite treated nucleic acid for analysis of methylation status of SEQ ID NO: 10
attaacgcggaggattagg

SEQ ID NO: 6329 - DNA, 18 bp, Artificial Sequence
  bisulfite treated nucleic acid for analysis of methylation status of SEQ ID NO: 10
cgccgtcttcattctcct

SEQ ID NO: 6330 - DNA, 18 bp, Artificial Sequence
  bisulfite treated nucleic acid for analysis of methylation status of SEQ ID NO: 10
cctcgccgtcttcattct

SEQ ID NO: 6331 - DNA, 18 bp, Artificial Sequence
  bisulfite treated nucleic acid for analysis of methylation status of SEQ ID NO: 10
cgaacaaccccgaaaaac

SEQ ID NO: 6332 - DNA, 31 bp, Artificial Sequence
  bisulfite treated nucleic acid for analysis of methylation status of SEQ ID NO: 10
agttggtgatgacgtgtattttgtacgtggt

SEQ ID NO: 6333 - DNA, 18 bp, Artificial Sequence
  bisulfite treated nucleic acid for analysis of methylation status of SEQ ID NO: 10
acgaacaaccccgaaaaa

SEQ ID NO: 6334 - DNA, 19 bp, Artificial Sequence
  bisulfite treated nucleic acid for analysis of methylation status of SEQ ID NO: 10
tcgagttggtgatgacgtg

SEQ ID NO: 6335 - DNA, 21 bp, Artificial Sequence
  bisulfite treated nucleic acid for analysis of methylation status of SEQ ID NO: 10
cgttattttgtacggcggtta

SEQ ID NO: 6336 - DNA, 19 bp, Artificial Sequence
  bisulfite treated nucleic acid for analysis of methylation status of SEQ ID NO: 10
acgctacgttcaccactcg

SEQ ID NO: 6337 - DNA, 22 bp, Artificial Sequence
  bisulfite treated nucleic acid for analysis of methylation status of SEQ ID NO: 10
ctacgcctactctaacgcaaac

SEQ ID NO: 6338 - DNA, 22 bp, Artificial Sequence
  bisulfite treated nucleic acid for analysis of methylation status of SEQ ID NO: 10
cgaagtcggatacgttgtagat

SEQ ID NO: 6339 - DNA, 30 bp, Artificial Sequence
  bisulfite treated nucleic acid for analysis of methylation status of SEQ ID NO: 10
gacgaagatggcgacgtcgaagaagatttg

SEQ ID NO: 6340 - DNA, 22 bp, Artificial Sequence
  bisulfite treated nucleic acid for analysis of methylation status of SEQ ID NO: 10
tacgcctactctaacgcaaact

SEQ ID NO: 6341 - DNA, 22 bp, Artificial Sequence
  bisulfite treated nucleic acid for analysis of methylation status of SEQ ID NO: 10
tcgtactaaacctaccctacgc

SEQ ID NO: 6342 - DNA, 22 bp, Artificial Sequence
  bisulfite treated nucleic acid for analysis of methylation status of SEQ ID NO: 10
tataggtacgcgatgaggattt

SEQ ID NO: 6343 - DNA, 47 bp, Artificial Sequence
  bisulfite treated nucleic acid for analysis of methylation status of SEQ ID NO: 10
tataacggcggcgaagatgatgagaaataattttaggtagtcgtcgt

SEQ ID NO: 6344 - DNA, 22 bp, Artificial Sequence
  bisulfite treated nucleic acid for analysis of methylation status of SEQ ID NO: 10
aatcctcatcgcgtacctatac

SEQ ID NO: 6345 - DNA, 22 bp, Artificial Sequence
  bisulfite treated nucleic acid for analysis of methylation status of SEQ ID NO: 10
gcgttacgtttattattcggtc

SEQ ID NO: 6346 - DNA, 37 bp, Artificial Sequence
  bisulfite treated nucleic acid for analysis of methylation status of SEQ ID NO: 10
ggcgttggttatggttacgtacgagtttcgtacgcgt

SEQ ID NO: 6347 - DNA, 22 bp, Artificial Sequence
  bisulfite treated nucleic acid for analysis of methylation status of SEQ ID NO: 10
acgaagtcggatacgttgtaga

SEQ ID NO: 6348 - DNA, 22 bp, Artificial Sequence
  bisulfite treated nucleic acid for analysis of methylation status of SEQ ID NO: 10
acgcctactctaacgcaaacta

SEQ ID NO: 6349 - DNA, 22 bp, Artificial Sequence
  bisulfite treated nucleic acid for analysis of methylation status of SEQ ID NO: 10
tacgaagtcggatacgttgtag

SEQ ID NO: 6350 - DNA, 22 bp, Artificial Sequence
  bisulfite treated nucleic acid for analysis of methylation status of SEQ ID NO: 10
tcgtcttcacgctactcataac

SEQ ID NO: 6351 - DNA, 22 bp, Artificial Sequence
  bisulfite treated nucleic acid for analysis of methylation status of SEQ ID NO: 10
agtaagaaatagaggtcggcgt

SEQ ID NO: 6352 - DNA, 33 bp, Artificial Sequence
  bisulfite treated nucleic acid for analysis of methylation status of SEQ ID NO: 10
gtcggtgaggtttatgagtagcgcgaagtgcgg

SEQ ID NO: 6353 - DNA, 22 bp, Artificial Sequence
  bisulfite treated nucleic acid for analysis of methylation status of SEQ ID NO: 10
gtcgtcttcacgctactcataa

SEQ ID NO: 6354 - DNA, 21 bp, Artificial Sequence
  bisulfite treated nucleic acid for analysis of methylation status of SEQ ID NO: 10
catcgcgtacctatacgaaaa

SEQ ID NO: 6355 - DNA, 22 bp, Artificial Sequence
  bisulfite treated nucleic acid for analysis of methylation status of SEQ ID NO: 10
cgttacgtttattattcggtcg

SEQ ID NO: 6356 - DNA, 22 bp, Artificial Sequence
  bisulfite treated nucleic acid for analysis of methylation status of SEQ ID NO: 10
tgcgttacgtttattattcggt

SEQ ID NO: 6357 - DNA, 22 bp, Artificial Sequence
  bisulfite treated nucleic acid for analysis of methylation status of SEQ ID NO: 10
cgtactaaacctaccctacgcc

SEQ ID NO: 6358 - DNA, 21 bp, Artificial Sequence
  bisulfite treated nucleic acid for analysis of methylation status of SEQ ID NO: 10
cgaagtcggatacgttgtaga

SEQ ID NO: 6359 - DNA, 23 bp, Artificial Sequence
  bisulfite treated nucleic acid for analysis of methylation status of SEQ ID NO: 10
gtacgaagtcggatacgttgtag

SEQ ID NO: 6360 - DNA, 22 bp, Artificial Sequence
  bisulfite treated nucleic acid for analysis of methylation status of SEQ ID NO: 10
cgtcttcacgctactcataacc

SEQ ID NO: 6361 - DNA, 22 bp, Artificial Sequence
  bisulfite treated nucleic acid for analysis of methylation status of SEQ ID NO: 10
ataggtacgcgatgaggatttt

SEQ ID NO: 6362 - DNA, 21 bp, Artificial Sequence
  bisulfite treated nucleic acid for analysis of methylation status of SEQ ID NO: 10
acgaacgcctaaaatcctaaa

SEQ ID NO: 6363 - DNA, 27 bp, Artificial Sequence
  bisulfite treated nucleic acid for analysis of methylation status of SEQ ID NO: 10
agcgtgaagacgacgagcgcgtagcgt

SEQ ID NO: 6364 - DNA, 22 bp, Artificial Sequence
  bisulfite treated nucleic acid for analysis of methylation status of SEQ ID NO: 10
tcgacgacatctacaacgtatc

SEQ ID NO: 6365 - DNA, 21 bp, Artificial Sequence
  bisulfite treated nucleic acid for analysis of methylation status of SEQ ID NO: 10
gttttagtttttcgcgttggt

SEQ ID NO: 6366 - DNA, 29 bp, Artificial Sequence
  bisulfite treated nucleic acid for analysis of methylation status of SEQ ID NO: 10
ttcgatgaggttttcgagggagtgtacga

SEQ ID NO: 6367 - DNA, 22 bp, Artificial Sequence
  bisulfite treated nucleic acid for analysis of methylation status of SEQ ID NO: 10
gtaagaaatagaggtcggcgtt

SEQ ID NO: 6368 - DNA, 22 bp, Artificial Sequence
  bisulfite treated nucleic acid for analysis of methylation status of SEQ ID NO: 10
acgccgacctctatttcttact

SEQ ID NO: 6369 - DNA, 22 bp, Artificial Sequence
  bisulfite treated nucleic acid for analysis of methylation status of SEQ ID NO: 10
cgtcgaagaagatttggtgtta

SEQ ID NO: 6370 - DNA, 29 bp, Artificial Sequence
  bisulfite treated nucleic acid for analysis of methylation status of SEQ ID NO: 10
tgcgttagagtaggcgtaggtgaaagagg

SEQ ID NO: 6371 - DNA, 22 bp, Artificial Sequence
  bisulfite treated nucleic acid for analysis of methylation status of SEQ ID NO: 10
ttgcgttacgtttattattcgg

SEQ ID NO: 6372 - DNA, 21 bp, Artificial Sequence
  bisulfite treated nucleic acid for analysis of methylation status of SEQ ID NO: 10
aaaatcctcatcgcgtaccta

SEQ ID NO: 6373 - DNA, 22 bp, Artificial Sequence
  bisulfite treated nucleic acid for analysis of methylation status of SEQ ID NO: 10
tattattcggtcgtttagcgtt

SEQ ID NO: 6374 - DNA, 23 bp, Artificial Sequence
  bisulfite treated nucleic acid for analysis of methylation status of SEQ ID NO: 10
aaatcctcatcgcgtacctatac

SEQ ID NO: 6375 - DNA, 21 bp, Artificial Sequence
  bisulfite treated nucleic acid for analysis of methylation status of SEQ ID NO: 10
taagaaatagaggtcggcgtt

SEQ ID NO: 6376 - DNA, 22 bp, Artificial Sequence
  bisulfite treated nucleic acid for analysis of methylation status of SEQ ID NO: 10
gtcggatacgttgtagatgtcg

SEQ ID NO: 6377 - DNA, 22 bp, Artificial Sequence
  bisulfite treated nucleic acid for analysis of methylation status of SEQ ID NO: 10
tcatcgcgtacctatacgaaaa

SEQ ID NO: 6378 - DNA, 21 bp, Artificial Sequence
  bisulfite treated nucleic acid for analysis of methylation status of SEQ ID NO: 10
atcacgaataacctacccgac

SEQ ID NO: 6379 - DNA, 22 bp, Artificial Sequence
  bisulfite treated nucleic acid for analysis of methylation status of SEQ ID NO: 10
tcgatagcggtaaagaatggta

SEQ ID NO: 6380 - DNA, 45 bp, Artificial Sequence
  bisulfite treated nucleic acid for analysis of methylation status of SEQ ID NO: 10
gataggataatagcgttttggttattagaaagatgttgattacgg

SEQ ID NO: 6381 - DNA, 22 bp, Artificial Sequence
  bisulfite treated nucleic acid for analysis of methylation status of SEQ ID NO: 10
tgtacgaagtcggatacgttgt

SEQ ID NO: 6382 - DNA, 22 bp, Artificial Sequence
  bisulfite treated nucleic acid for analysis of methylation status of SEQ ID NO: 10
gaagtcggatacgttgtagatg

SEQ ID NO: 6383 - DNA, 22 bp, Artificial Sequence
  bisulfite treated nucleic acid for analysis of methylation status of SEQ ID NO: 10
acgctaaacgaccgaataataa

SEQ ID NO: 6384 - DNA, 22 bp, Artificial Sequence
  bisulfite treated nucleic acid for analysis of methylation status of SEQ ID NO: 10
ggattaggatttttgcgatacg

SEQ ID NO: 6385 - DNA, 42 bp, Artificial Sequence
  bisulfite treated nucleic acid for analysis of methylation status of SEQ ID NO: 10
tacgtataggatgtacgttattattagttcgatgatttgcgt

SEQ ID NO: 6386 - DNA, 21 bp, Artificial Sequence
  bisulfite treated nucleic acid for analysis of methylation status of SEQ ID NO: 10
cgaacgcctaaaatcctaaaa

SEQ ID NO: 6387 - DNA, 21 bp, Artificial Sequence
  bisulfite treated nucleic acid for analysis of methylation status of SEQ ID NO: 10
tcggatacgttgtagatgtcg

SEQ ID NO: 6388 - DNA, 23 bp, Artificial Sequence
  bisulfite treated nucleic acid for analysis of methylation status of SEQ ID NO: 10
aagtcggatacgttgtagatgtc

SEQ ID NO: 6389 - DNA, 21 bp, Artificial Sequence
  bisulfite treated nucleic acid for analysis of methylation status of SEQ ID NO: 10
ttttagtttttcgcgttggtt

SEQ ID NO: 6390 - DNA, 22 bp, Artificial Sequence
  bisulfite treated nucleic acid for analysis of methylation status of SEQ ID NO: 10
gcgtattatttcgtcgttttta

SEQ ID NO: 6391 - DNA, 32 bp, Artificial Sequence
  bisulfite treated nucleic acid for analysis of methylation status of SEQ ID NO: 10
ttcgtataggtacgcgatgaggattttgtcgg

SEQ ID NO: 6392 - DNA, 22 bp, Artificial Sequence
  bisulfite treated nucleic acid for analysis of methylation status of SEQ ID NO: 10
gacgaacgcctaaaatcctaaa

SEQ ID NO: 6393 - DNA, 23 bp, Artificial Sequence
  bisulfite treated nucleic acid for analysis of methylation status of SEQ ID NO: 10
tacgaagtcggatacgttgtaga

SEQ ID NO: 6394 - DNA, 21 bp, Artificial Sequence
  bisulfite treated nucleic acid for analysis of methylation status of SEQ ID NO: 10
ctaaaccgacgaaaccaaaaa

SEQ ID NO: 6395 - DNA, 22 bp, Artificial Sequence
  bisulfite treated nucleic acid for analysis of methylation status of SEQ ID NO: 10
cgatagcggtaaagaatggtag

SEQ ID NO: 6396 - DNA, 22 bp, Artificial Sequence
  bisulfite treated nucleic acid for analysis of methylation status of SEQ ID NO: 10
tacggcgcggatggagtcgggt

SEQ ID NO: 6397 - DNA, 21 bp, Artificial Sequence
  bisulfite treated nucleic acid for analysis of methylation status of SEQ ID NO: 10
taggtacgcgatgaggatttt

SEQ ID NO: 6398 - DNA, 22 bp, Artificial Sequence
  bisulfite treated nucleic acid for analysis of methylation status of SEQ ID NO: 10
ttcacctacgcctactctaacg

SEQ ID NO: 6399 - DNA, 21 bp, Artificial Sequence
  bisulfite treated nucleic acid for analysis of methylation status of SEQ ID NO: 10
acgtcgaagaagatttggtgt

SEQ ID NO: 6400 - DNA, 20 bp, Artificial Sequence
  bisulfite treated nucleic acid for analysis of methylation status of SEQ ID NO: 10
tacctcacctaaaccgacga

SEQ ID NO: 6401 - DNA, 21 bp, Artificial Sequence
  bisulfite treated nucleic acid for analysis of methylation status of SEQ ID NO: 10
gtaagaaatagaggtcggcgt

SEQ ID NO: 6402 - DNA, 20 bp, Artificial Sequence
  bisulfite treated nucleic acid for analysis of methylation status of SEQ ID NO: 10
ttagtttttcgcgttggttc

SEQ ID NO: 6403 - DNA, 21 bp, Artificial Sequence
  bisulfite treated nucleic acid for analysis of methylation status of SEQ ID NO: 10
gtttatgagtagcgcgaagtg

SEQ ID NO: 6404 - DNA, 21 bp, Artificial Sequence
  bisulfite treated nucleic acid for analysis of methylation status of SEQ ID NO: 10
acgcctactctaacgcaaact

SEQ ID NO: 6405 - DNA, 21 bp, Artificial Sequence
  bisulfite treated nucleic acid for analysis of methylation status of SEQ ID NO: 10
cgcctactctaacgcaaacta

SEQ ID NO: 6406 - DNA, 23 bp, Artificial Sequence
  bisulfite treated nucleic acid for analysis of methylation status of SEQ ID NO: 10
tagtaagaaatagaggtcggcgt

SEQ ID NO: 6407 - DNA, 20 bp, Artificial Sequence
  bisulfite treated nucleic acid for analysis of methylation status of SEQ ID NO: 10
tttcgagggagtgtacgaag

SEQ ID NO: 6408 - DNA, 27 bp, Artificial Sequence
  bisulfite treated nucleic acid for analysis of methylation status of SEQ ID NO: 10
agatgtcgtcgatgacgaagatggcga

SEQ ID NO: 6409 - DNA, 21 bp, Artificial Sequence
  bisulfite treated nucleic acid for analysis of methylation status of SEQ ID NO: 10
cacctacgcctactctaacgc

SEQ ID NO: 6410 - DNA, 21 bp, Artificial Sequence
  bisulfite treated nucleic acid for analysis of methylation status of SEQ ID NO: 10
acgaataacctacccgactcc

SEQ ID NO: 6411 - DNA, 22 bp, Artificial Sequence
  bisulfite treated nucleic acid for analysis of methylation status of SEQ ID NO: 10
cgcctactctaacgcaaactac

SEQ ID NO: 6412 - DNA, 20 bp, Artificial Sequence
  bisulfite treated nucleic acid for analysis of methylation status of SEQ ID NO: 10
tcgagggagtgtacgaagtc

SEQ ID NO: 6413 - DNA, 22 bp, Artificial Sequence
  bisulfite treated nucleic acid for analysis of methylation status of SEQ ID NO: 10
agtcggatacgttgtagatgtc

SEQ ID NO: 6414 - DNA, 21 bp, Artificial Sequence
  bisulfite treated nucleic acid for analysis of methylation status of SEQ ID NO: 10
tttcgagggagtgtacgaagt

SEQ ID NO: 6415 - DNA, 21 bp, Artificial Sequence
  bisulfite treated nucleic acid for analysis of methylation status of SEQ ID NO: 10
tttagtttttcgcgttggttc

SEQ ID NO: 6416 - DNA, 22 bp, Artificial Sequence
  bisulfite treated nucleic acid for analysis of methylation status of SEQ ID NO: 10
aggtttatgagtagcgcgaagt

SEQ ID NO: 6417 - DNA, 23 bp, Artificial Sequence
  bisulfite treated nucleic acid for analysis of methylation status of SEQ ID NO: 10
atcgacgacatctacaacgtatc

SEQ ID NO: 6418 - DNA, 20 bp, Artificial Sequence
  bisulfite treated nucleic acid for analysis of methylation status of SEQ ID NO: 10
cgaataacctacccgactcc

SEQ ID NO: 6419 - DNA, 21 bp, Artificial Sequence
  bisulfite treated nucleic acid for analysis of methylation status of SEQ ID NO: 10
gtacgaagtcggatacgttgt

SEQ ID NO: 6420 - DNA, 21 bp, Artificial Sequence
  bisulfite treated nucleic acid for analysis of methylation status of SEQ ID NO: 10
gattaggatttttgcgatacg

SEQ ID NO: 6421 - DNA, 20 bp, Artificial Sequence
  bisulfite treated nucleic acid for analysis of methylation status of SEQ ID NO: 10
cgcgtattatttcgtcgttt

SEQ ID NO: 6422 - DNA, 22 bp, Artificial Sequence
  bisulfite treated nucleic acid for analysis of methylation status of SEQ ID NO: 10
taagaaatagaggtcggcgttc

SEQ ID NO: 6423 - DNA, 21 bp, Artificial Sequence
  bisulfite treated nucleic acid for analysis of methylation status of SEQ ID NO: 10
ggtttatgagtagcgcgaagt

SEQ ID NO: 6424 - DNA, 21 bp, Artificial Sequence
  bisulfite treated nucleic acid for analysis of methylation status of SEQ ID NO: 10
cgccgacctctatttcttact

SEQ ID NO: 6425 - DNA, 22 bp, Artificial Sequence
  bisulfite treated nucleic acid for analysis of methylation status of SEQ ID NO: 10
gatgatttgcgttacgtttatt

SEQ ID NO: 6426 - DNA, 21 bp, Artificial Sequence
  nucleic acid for analysis of methylation status of SEQ ID NO: 10
gacgaacgcctaaaatcctaa

SEQ ID NO: 6427 - DNA, 21 bp, Artificial Sequence
  bisulfite treated nucleic acid for analysis of methylation status of SEQ ID NO: 10
ttcgagggagtgtacgaagtc

SEQ ID NO: 6428 - DNA, 20 bp, Artificial Sequence
  bisulfite treated nucleic acid for analysis of methylation status of SEQ ID NO: 10
ttttcgagggagtgtacgaa

SEQ ID NO: 6429 - DNA, 21 bp, Artificial Sequence
  bisulfite treated nucleic acid for analysis of methylation status of SEQ ID NO: 10
ccatcctacacgacgactacc

SEQ ID NO: 6430 - DNA, 32 bp, Artificial Sequence
  bisulfite treated nucleic acid for analysis of methylation status of SEQ ID NO: 10
ggtgtagtagtatataacggcggcgaagatga

SEQ ID NO: 6431 - DNA, 20 bp, Artificial Sequence
  bisulfite treated nucleic acid for analysis of methylation status of SEQ ID NO: 10
ctcacctaaaccgacgaaac

SEQ ID NO: 6432 - DNA, 20 bp, Artificial Sequence
  bisulfite treated nucleic acid for analysis of methylation status of SEQ ID NO: 10
aaatcctcatcgcgtaccta

SEQ ID NO: 6433 - DNA, 20 bp, Artificial Sequence
  bisulfite treated nucleic acid for analysis of methylation status of SEQ ID NO: 10
aaaatcctcatcgcgtacct

SEQ ID NO: 6434 - DNA, 22 bp, Artificial Sequence
  bisulfite treated nucleic acid for analysis of methylation status of SEQ ID NO: 10
ttattattcggtcgtttagcgt

SEQ ID NO: 6435 - DNA, 21 bp, Artificial Sequence
  bisulfite treated nucleic acid for analysis of methylation status of SEQ ID NO: 10
aacgccgacctctatttctta

SEQ ID NO: 6436 - DNA, 20 bp, Artificial Sequence
  bisulfite treated nucleic acid for analysis of methylation status of SEQ ID NO: 10
ctcgtcgtcttcacgctact

SEQ ID NO: 6437 - DNA, 20 bp, Artificial Sequence
  bisulfite treated nucleic acid for analysis of methylation status of SEQ ID NO: 10
gacaaaatcctcatcgcgta

SEQ ID NO: 6438 - DNA, 22 bp, Artificial Sequence
  bisulfite treated nucleic acid for analysis of methylation status of SEQ ID NO: 10
atcctaaaaactaacgctacgc

SEQ ID NO: 6439 - DNA, 40 bp, Artificial Sequence
  bisulfite treated nucleic acid for analysis of methylation status of SEQ ID NO: 10
tgcggtatataaatggttatgagtagcgtgaagacgacga

SEQ ID NO: 6440 - DNA, 20 bp, Artificial Sequence
  bisulfite treated nucleic acid for analysis of methylation status of SEQ ID NO: 10
catcacgaataacctacccg

SEQ ID NO: 6441 - DNA, 20 bp, Artificial Sequence
  bisulfite treated nucleic acid for analysis of methylation status of SEQ ID NO: 10
gttttcgagggagtgtacga

SEQ ID NO: 6442 - DNA, 21 bp, Artificial Sequence
  bisulfite treated nucleic acid for analysis of methylation status of SEQ ID NO: 10
gccatcctacacgacgactac

SEQ ID NO: 6443 - DNA, 21 bp, Artificial Sequence
  bisulfite treated nucleic acid for analysis of methylation status of SEQ ID NO: 10
taggtttcgatgaggttttcg

SEQ ID NO: 6444 - DNA, 20 bp, Artificial Sequence
  bisulfite treated nucleic acid for analysis of methylation status of SEQ ID NO: 10
aagaaatagaggtcggcgtt

SEQ ID NO: 6445 - DNA, 21 bp, Artificial Sequence
  bisulfite treated nucleic acid for analysis of methylation status of SEQ ID NO: 10
catcacgaataacctacccga

SEQ ID NO: 6446 - DNA, 21 bp, Artificial Sequence
  bisulfite treated nucleic acid for analysis of methylation status of SEQ ID NO: 10
cctacgcctactctaacgcaa

SEQ ID NO: 6447 - DNA, 21 bp, Artificial Sequence
  bisulfite treated nucleic acid for analysis of methylation status of SEQ ID NO: 10
attattcggtcgtttagcgtt

SEQ ID NO: 6448 - DNA, 22 bp, Artificial Sequence
  bisulfite treated nucleic acid for analysis of methylation status of SEQ ID NO: 10
cgacatctacaacgtatccgac

SEQ ID NO: 6449 - DNA, 22 bp, Artificial Sequence
  bisulfite treated nucleic acid for analysis of methylation status of SEQ ID NO: 10
cgacgacatctacaacgtatcc

SEQ ID NO: 6450 - DNA, 21 bp, Artificial Sequence
  bisulfite treated nucleic acid for analysis of methylation status of SEQ ID NO: 10
tgcgttacgtttattattcgg

SEQ ID NO: 6451 - DNA, 20 bp, Artificial Sequence
  bisulfite treated nucleic acid for analysis of methylation status of SEQ ID NO: 10
gtttcgatgaggttttcgag

SEQ ID NO: 6452 - DNA, 20 bp, Artificial Sequence
  bisulfite treated nucleic acid for analysis of methylation status of SEQ ID NO: 10
taaactaaacgcacatcgca

SEQ ID NO: 6453 - DNA, 22 bp, Artificial Sequence
  bisulfite treated nucleic acid for analysis of methylation status of SEQ ID NO: 10
agtcgggtaggttattcgtgat

SEQ ID NO: 6454 - DNA, 29 bp, Artificial Sequence
  bisulfite treated nucleic acid for analysis of methylation status of SEQ ID NO: 10
gagcgcgaagaggtttttgagtacgtagg

SEQ ID NO: 6455 - DNA, 21 bp, Artificial Sequence
  bisulfite treated nucleic acid for analysis of methylation status of SEQ ID NO: 10
cacttcgcgctactcataaac

SEQ ID NO: 6456 - DNA, 24 bp, Artificial Sequence
  bisulfite treated nucleic acid for analysis of methylation status of SEQ ID NO: 10
ggtcggcgttcgtgaggttgtcgg

SEQ ID NO: 6457 - DNA, 23 bp, Artificial Sequence
  bisulfite treated nucleic acid for analysis of methylation status of SEQ ID NO: 10
aatcctaaaaactaacgctacgc

SEQ ID NO: 6458 - DNA, 20 bp, Artificial Sequence
  bisulfite treated nucleic acid for analysis of methylation status of SEQ ID NO: 10
atcacgaataacctacccga

SEQ ID NO: 6459 - DNA, 22 bp, Artificial Sequence
  bisulfite treated nucleic acid for analysis of methylation status of SEQ ID NO: 10
ttacgtttattattcggtcgtt

SEQ ID NO: 6460 - DNA, 22 bp, Artificial Sequence
  bisulfite treated nucleic acid for analysis of methylation status of SEQ ID NO: 10
tacgtttattattcggtcgttt

SEQ ID NO: 6461 - DNA, 22 bp, Artificial Sequence
  bisulfite treated nucleic acid for analysis of methylation status of SEQ ID NO: 10
gaacgccgacctctatttctta

SEQ ID NO: 6462 - DNA, 21 bp, Artificial Sequence
  bisulfite treated nucleic acid for analysis of methylation status of SEQ ID NO: 10
ctacctcacctaaaccgacga

SEQ ID NO: 6463 - DNA, 21 bp, Artificial Sequence
  bisulfite treated nucleic acid for analysis of methylation status of SEQ ID NO: 10
ctacgcctactctaacgcaaa

SEQ ID NO: 6464 - DNA, 19 bp, Artificial Sequence
  bisulfite treated nucleic acid for analysis of methylation status of SEQ ID NO: 10
cacctaaaccgacgaaacc

SEQ ID NO: 6465 - DNA, 19 bp, Artificial Sequence
  bisulfite treated nucleic acid for analysis of methylation status of SEQ ID NO: 10
acctaaaccgacgaaacca

SEQ ID NO: 6466 - DNA, 21 bp, Artificial Sequence
  bisulfite treated nucleic acid for analysis of methylation status of SEQ ID NO: 10
gtcgggtaggttattcgtgat

SEQ ID NO: 6467 - DNA, 20 bp, Artificial Sequence
  bisulfite treated nucleic acid for analysis of methylation status of SEQ ID NO: 10
aggtacgcgatgaggatttt

SEQ ID NO: 6468 - DNA, 23 bp, Artificial Sequence
  bisulfite treated nucleic acid for analysis of methylation status of SEQ ID NO: 10
gttacgtttattattcggtcgtt

SEQ ID NO: 6469 - DNA, 20 bp, Artificial Sequence
  bisulfite treated nucleic acid for analysis of methylation status of SEQ ID NO: 10
tacgcgatgaggattttgtc

SEQ ID NO: 6470 - DNA, 19 bp, Artificial Sequence
  bisulfite treated nucleic acid for analysis of methylation status of SEQ ID NO: 10
acctcacctaaaccgacga

SEQ ID NO: 6471 - DNA, 24 bp, Artificial Sequence
  bisulfite treated nucleic acid for analysis of methylation status of SEQ ID NO: 10
tgatttgcgttacgtttattattc

SEQ ID NO: 6472 - DNA, 20 bp, Artificial Sequence
  bisulfite treated nucleic acid for analysis of methylation status of SEQ ID NO: 10
agaaatagaggtcggcgttc

SEQ ID NO: 6473 - DNA, 20 bp, Artificial Sequence
  bisulfite treated nucleic acid for analysis of methylation status of SEQ ID NO: 10
tcacgaataacctacccgac

SEQ ID NO: 6474 - DNA, 20 bp, Artificial Sequence
  bisulfite treated nucleic acid for analysis of methylation status of SEQ ID NO: 10
cgtcgaagaagatttggtgt

SEQ ID NO: 6475 - DNA, 22 bp, Artificial Sequence
  bisulfite treated nucleic acid for analysis of methylation status of SEQ ID NO: 10
accgaataataaacgtaacgca

SEQ ID NO: 6476 - DNA, 21 bp, Artificial Sequence
  bisulfite treated nucleic acid for analysis of methylation status of SEQ ID NO: 10
tagtagtacggtcgtggcgat

SEQ ID NO: 6477 - DNA, 34 bp, Artificial Sequence
  bisulfite treated nucleic acid for analysis of methylation status of SEQ ID NO: 10
tacgggtagtttcgggaagttgttgtatatgagg

SEQ ID NO: 6478 - DNA, 21 bp, Artificial Sequence
  bisulfite treated nucleic acid for analysis of methylation status of SEQ ID NO: 10
atcctcatcgcgtacctatac

SEQ ID NO: 6479 - DNA, 20 bp, Artificial Sequence
  bisulfite treated nucleic acid for analysis of methylation status of SEQ ID NO: 10
gggagtgtacgaagtcggat

SEQ ID NO: 6480 - DNA, 21 bp, Artificial Sequence
  bisulfite treated nucleic acid for analysis of methylation status of SEQ ID NO: 10
tcacctacgcctactctaacg

SEQ ID NO: 6481 - DNA, 23 bp, Artificial Sequence
  bisulfite treated nucleic acid for analysis of methylation status of SEQ ID NO: 10
tcctacacgacgactacctaaaa

SEQ ID NO: 6482 - DNA, 20 bp, Artificial Sequence
  bisulfite treated nucleic acid for analysis of methylation status of SEQ ID NO: 10
gtacgcgatgaggattttgt

SEQ ID NO: 6483 - DNA, 32 bp, Artificial Sequence
  bisulfite treated nucleic acid for analysis of methylation status of SEQ ID NO: 10
agtagtatataacggcggcgaagatgatgaga

SEQ ID NO: 6484 - DNA, 22 bp, Artificial Sequence
  bisulfite treated nucleic acid for analysis of methylation status of SEQ ID NO: 10
catcctacacgacgactaccta

SEQ ID NO: 6485 - DNA, 21 bp, Artificial Sequence
  bisulfite treated nucleic acid for analysis of methylation status of SEQ ID NO: 10
ttttcccgacctactacaacg

SEQ ID NO: 6486 - DNA, 22 bp, Artificial Sequence
  bisulfite treated nucleic acid for analysis of methylation status of SEQ ID NO: 10
cgccgtaatcaacatctttcta

SEQ ID NO: 6487 - DNA, 21 bp, Artificial Sequence
  bisulfite treated nucleic acid for analysis of methylation status of SEQ ID NO: 10
gtcgttgtagtaggtcgggaa

SEQ ID NO: 6488 - DNA, 48 bp, Artificial Sequence
  bisulfite treated nucleic acid for analysis of methylation status of SEQ ID NO: 10
tagtatttcgatagcggtaaagaatggtagaggataggataatagcgt

SEQ ID NO: 6489 - DNA, 20 bp, Artificial Sequence
  bisulfite treated nucleic acid for analysis of methylation status of SEQ ID NO: 10
tcgcgctactcataaacctc

SEQ ID NO: 6490 - DNA, 21 bp, Artificial Sequence
  bisulfite treated nucleic acid for analysis of methylation status of SEQ ID NO: 10
cgttgtagtaggtcgggaaaa

SEQ ID NO: 6491 - DNA, 23 bp, Artificial Sequence
  bisulfite treated nucleic acid for analysis of methylation status of SEQ ID NO: 10
tacgcctactctaacgcaaacta

SEQ ID NO: 6492 - DNA, 20 bp, Artificial Sequence
  bisulfite treated nucleic acid for analysis of methylation status of SEQ ID NO: 10
tttcccgacctactacaacg

SEQ ID NO: 6493 - DNA, 23 bp, Artificial Sequence
  bisulfite treated nucleic acid for analysis of methylation status of SEQ ID NO: 10
cgttacgtttattattcggtcgt

SEQ ID NO: 6494 - DNA, 22 bp, Artificial Sequence
  bisulfite treated nucleic acid for analysis of methylation status of SEQ ID NO: 10
gacatctacaacgtatccgact

SEQ ID NO: 6495 - DNA, 33 bp, Artificial Sequence
  bisulfite treated nucleic acid for analysis of methylation status of SEQ ID NO: 10
ggtaggtttcgatgaggttttcgagggagtgta

SEQ ID NO: 6496 - DNA, 20 bp, Artificial Sequence
  bisulfite treated nucleic acid for analysis of methylation status of SEQ ID NO: 10
tcgttgtagtaggtcgggaa

SEQ ID NO: 6497 - DNA, 20 bp, Artificial Sequence
  bisulfite treated nucleic acid for analysis of methylation status of SEQ ID NO: 10
tattcggtcgtttagcgttg

SEQ ID NO: 6498 - DNA, 22 bp, Artificial Sequence
  bisulfite treated nucleic acid for analysis of methylation status of SEQ ID NO: 10
cgaataataaacgtaacgcaaa

SEQ ID NO: 6499 - DNA, 21 bp, Artificial Sequence
  bisulfite treated nucleic acid for analysis of methylation status of SEQ ID NO: 10
aagaaatagaggtcggcgttc

SEQ ID NO: 6500 - DNA, 21 bp, Artificial Sequence
  bisulfite treated nucleic acid for analysis of methylation status of SEQ ID NO: 10
gaggtttatgagtagcgcgaa

SEQ ID NO: 6501 - DNA, 19 bp, Artificial Sequence
  bisulfite treated nucleic acid for analysis of methylation status of SEQ ID NO: 10
agggagtgtacgaagtcgg

SEQ ID NO: 6502 - DNA, 22 bp, Artificial Sequence
  bisulfite treated nucleic acid for analysis of methylation status of SEQ ID NO: 10
ctcatcgcgtacctatacgaaa

SEQ ID NO: 6503 - DNA, 21 bp, Artificial Sequence
  nucleic acid for analysis of methylation status of SEQ ID NO: 10
gagtcgggtaggttattcgtg

SEQ ID NO: 6504 - DNA, 21 bp, Artificial Sequence
  bisulfite treated nucleic acid for analysis of methylation status of SEQ ID NO: 10
tcatcacgaataacctacccg

SEQ ID NO: 6505 - DNA, 19 bp, Artificial Sequence
  bisulfite treated nucleic acid for analysis of methylation status of SEQ ID NO: 10
cctaaaccgacgaaaccaa

SEQ ID NO: 6506 - DNA, 20 bp, Artificial Sequence
  bisulfite treated nucleic acid for analysis of methylation status of SEQ ID NO: 10
cggatacgttgtagatgtcg

SEQ ID NO: 6507 - DNA, 22 bp, Artificial Sequence
  bisulfite treated nucleic acid for analysis of methylation status of SEQ ID NO: 10
accgctatcgaaatactaaaaa

SEQ ID NO: 6508 - DNA, 22 bp, Artificial Sequence
  bisulfite treated nucleic acid for analysis of methylation status of SEQ ID NO: 10
gttatgagtagcgtgaagacga

SEQ ID NO: 6509 - DNA, 30 bp, Artificial Sequence
  bisulfite treated nucleic acid for analysis of methylation status of SEQ ID NO: 10
aggattttaggcgttcgtcgtcgttgtagt

SEQ ID NO: 6510 - DNA, 22 bp, Artificial Sequence
  bisulfite treated nucleic acid for analysis of methylation status of SEQ ID NO: 10
ttatgagtagcgtgaagacgac

SEQ ID NO: 6511 - DNA, 22 bp, Artificial Sequence
  bisulfite treated nucleic acid for analysis of methylation status of SEQ ID NO: 10
aataaacgtaacgcaaatcatc

SEQ ID NO: 6512 - DNA, 22 bp, Artificial Sequence
  bisulfite treated nucleic acid for analysis of methylation status of SEQ ID NO: 10
tagtagtacggtcgtggcgata

SEQ ID NO: 6513 - DNA, 21 bp, Artificial Sequence
  bisulfite treated nucleic acid for analysis of methylation status of SEQ ID NO: 10
acctacgcctactctaacgca

SEQ ID NO: 6514 - DNA, 21 bp, Artificial Sequence
  bisulfite treated nucleic acid for analysis of methylation status of SEQ ID NO: 10
tcatcgcgtacctatacgaaa

SEQ ID NO: 6515 - DNA, 22 bp, Artificial Sequence
  bisulfite treated nucleic acid for analysis of methylation status of SEQ ID NO: 11
gagttattgtcgttttcgtcgt

SEQ ID NO: 6516 - DNA, 22 bp, Artificial Sequence
  bisulfite treated nucleic acid for analysis of methylation status of SEQ ID NO: 11
ctcctaaatacaacgcgacttc

SEQ ID NO: 6517 - DNA, 36 bp, Artificial Sequence
  bisulfite treated nucleic acid for analysis of methylation status of SEQ ID NO: 11
tacgtgtgttgttcgttagagttatgatagagaggt

SEQ ID NO: 6518 - DNA, 22 bp, Artificial Sequence
  bisulfite treated nucleic acid for analysis of methylation status of SEQ ID NO: 11
tgaatatgcgttagagtagcga

SEQ ID NO: 6519 - DNA, 22 bp, Artificial Sequence
  bisulfite treated nucleic acid for analysis of methylation status of SEQ ID NO: 11
acgacgaaaacgacaataactc

SEQ ID NO: 6520 - DNA, 25 bp, Artificial Sequence
  bisulfite treated nucleic acid for analysis of methylation status of SEQ ID NO: 11
ttacgatgtcggggaagagcggtgg

SEQ ID NO: 6521 - DNA, 22 bp, Artificial Sequence
  bisulfite treated nucleic acid for analysis of methylation status of SEQ ID NO: 11
aggagttattgtcgttttcgtc

SEQ ID NO: 6522 - DNA, 22 bp, Artificial Sequence
  bisulfite treated nucleic acid for analysis of methylation status of SEQ ID NO: 11
gaggagttattgtcgttttcgt

SEQ ID NO: 6523 - DNA, 22 bp, Artificial Sequence
  bisulfite treated nucleic acid for analysis of methylation status of SEQ ID NO: 11
acgaggagttattgtcgttttc

SEQ ID NO: 6524 - DNA, 22 bp, Artificial Sequence
  bisulfite treated nucleic acid for analysis of methylation status of SEQ ID NO: 11
gacgaggagttattgtcgtttt

SEQ ID NO: 6525 - DNA, 22 bp, Artificial Sequence
  bisulfite treated nucleic acid for analysis of methylation status of SEQ ID NO: 11
gacgaaaacgacaataactcct

SEQ ID NO: 6526 - DNA, 22 bp, Artificial Sequence
  bisulfite treated nucleic acid for analysis of methylation status of SEQ ID NO: 11
actcctaaatacaacgcgactt

SEQ ID NO: 6527 - DNA, 22 bp, Artificial Sequence
  bisulfite treated nucleic acid for analysis of methylation status of SEQ ID NO: 11
aactcctaaatacaacgcgact

SEQ ID NO: 6528 - DNA, 22 bp, Artificial Sequence
  bisulfite treated nucleic acid for analysis of methylation status of SEQ ID NO: 11
gtagttgcggtttgttatcgtt

SEQ ID NO: 6529 - DNA, 22 bp, Artificial Sequence
  bisulfite treated nucleic acid for analysis of methylation status of SEQ ID NO: 11
aaaacgactctttcgtctctcc

SEQ ID NO: 6530 - DNA, 35 bp, Artificial Sequence
  bisulfite treated nucleic acid for analysis of methylation status of SEQ ID NO: 11
tgtcgtgttattgaaagtagagagacgcgaaaaat

SEQ ID NO: 6531 - DNA, 21 bp, Artificial Sequence
  bisulfite treated nucleic acid for analysis of methylation status of SEQ ID NO: 11
aacgcgacttcctaccactat

SEQ ID NO: 6532 - DNA, 21 bp, Artificial Sequence
  bisulfite treated nucleic acid for analysis of methylation status of SEQ ID NO: 11
attttcggaagtttgtcgttt

SEQ ID NO: 6533 - DNA, 22 bp, Artificial Sequence
  bisulfite treated nucleic acid for analysis of methylation status of SEQ ID NO: 11
ttcgcgtctctctactttcaat

SEQ ID NO: 6534 - DNA, 31 bp, Artificial Sequence
  bisulfite treated nucleic acid for analysis of methylation status of SEQ ID NO: 11
agtgtagttgcggtttgttatcgttggttgt

SEQ ID NO: 6535 - DNA, 22 bp, Artificial Sequence
  bisulfite treated nucleic acid for analysis of methylation status of SEQ ID NO: 11
gttagagtagcgagtcgggtat

SEQ ID NO: 6536 - DNA, 21 bp, Artificial Sequence
  bisulfite treated nucleic acid for analysis of methylation status of SEQ ID NO: 11
aatacaacgcgacttcctacc

SEQ ID NO: 6537 - DNA, 21 bp, Artificial Sequence
  bisulfite treated nucleic acid for analysis of methylation status of SEQ ID NO: 11
aaacgactctttcgtctctcc

SEQ ID NO: 6538 - DNA, 21 bp, Artificial Sequence
  bisulfite treated nucleic acid for analysis of methylation status of SEQ ID NO: 11
acgcgacttcctaccactatc

SEQ ID NO: 6539 - DNA, 22 bp, Artificial Sequence
  bisulfite treated nucleic acid for analysis of methylation status of SEQ ID NO: 11
tgcgtgaatatgcgttagagta

SEQ ID NO: 6540 - DNA, 21 bp, Artificial Sequence
  bisulfite treated nucleic acid for analysis of methylation status of SEQ ID NO: 11
acaataactcctcgtcgtcct

SEQ ID NO: 6541 - DNA, 21 bp, Artificial Sequence
  bisulfite treated nucleic acid for analysis of methylation status of SEQ ID NO: 11
cgacgaaaacgacaataactc

SEQ ID NO: 6542 - DNA, 22 bp, Artificial Sequence
  bisulfite treated nucleic acid for analysis of methylation status of SEQ ID NO: 11
acgaaaacgacaataactcctc

SEQ ID NO: 6543 - DNA, 21 bp, Artificial Sequence
  bisulfite treated nucleic acid for analysis of methylation status of SEQ ID NO: 11
gacaataactcctcgtcgtcc

SEQ ID NO: 6544 - DNA, 22 bp, Artificial Sequence
  bisulfite treated nucleic acid for analysis of methylation status of SEQ ID NO: 11
ctaaatacaacgcgacttccta

SEQ ID NO: 6545 - DNA, 22 bp, Artificial Sequence
  bisulfite treated nucleic acid for analysis of methylation status of SEQ ID NO: 11
aaatacaacgcgacttcctacc

SEQ ID NO: 6546 - DNA, 22 bp, Artificial Sequence
  bisulfite treated nucleic acid for analysis of methylation status of SEQ ID NO: 11
cctaaatacaacgcgacttcct

SEQ ID NO: 6547 - DNA, 22 bp, Artificial Sequence
  bisulfite treated nucleic acid for analysis of methylation status of SEQ ID NO: 11
taaatacaacgcgacttcctac

SEQ ID NO: 6548 - DNA, 22 bp, Artificial Sequence
  bisulfite treated nucleic acid for analysis of methylation status of SEQ ID NO: 11
gacaataactcctcgtcgtcct

SEQ ID NO: 6549 - DNA, 23 bp, Artificial Sequence
  bisulfite treated nucleic acid for analysis of methylation status of SEQ ID NO: 11
gtgaatatgcgttagagtagcga

SEQ ID NO: 6550 - DNA, 22 bp, Artificial Sequence
  bisulfite treated nucleic acid for analysis of methylation status of SEQ ID NO: 11
tcgcgtctctctactttcaata

SEQ ID NO: 6551 - DNA, 21 bp, Artificial Sequence
  bisulfite treated nucleic acid for analysis of methylation status of SEQ ID NO: 11
tcctaaatacaacgcgacttc

SEQ ID NO: 6552 - DNA, 21 bp, Artificial Sequence
  bisulfite treated nucleic acid for analysis of methylation status of SEQ ID NO: 11
tttcgcgtctctctactttca

SEQ ID NO: 6553 - DNA, 23 bp, Artificial Sequence
  bisulfite treated nucleic acid for analysis of methylation status of SEQ ID NO: 11
aatttttcgcgtctctctacttt

SEQ ID NO: 6554 - DNA, 22 bp, Artificial Sequence
  bisulfite treated nucleic acid for analysis of methylation status of SEQ ID NO: 11
ccccgacatcgtaaaactaaac

SEQ ID NO: 6555 - DNA, 31 bp, Artificial Sequence
  bisulfite treated nucleic acid for analysis of methylation status of SEQ ID NO: 11
atcgtgtagcgtcgggttacgtatatttggt

SEQ ID NO: 6556 - DNA, 21 bp, Artificial Sequence
  bisulfite treated nucleic acid for analysis of methylation status of SEQ ID NO: 11
acgactctttcgtctctccaa

SEQ ID NO: 6557 - DNA, 35 bp, Artificial Sequence
  bisulfite treated nucleic acid for analysis of methylation status of SEQ ID NO: 11
gttgtcgtgttattgaaagtagagagacgcgaaaa

SEQ ID NO: 6558 - DNA, 21 bp, Artificial Sequence
  bisulfite treated nucleic acid for analysis of methylation status of SEQ ID NO: 11
aacgactctttcgtctctcca

SEQ ID NO: 6559 - DNA, 35 bp, Artificial Sequence
  bisulfite treated nucleic acid for analysis of methylation status of SEQ ID NO: 11
ttgtcgtgttattgaaagtagagagacgcgaaaaa

SEQ ID NO: 6560 - DNA, 22 bp, Artificial Sequence
  bisulfite treated nucleic acid for analysis of methylation status of SEQ ID NO: 11
gcgtgaatatgcgttagagtag

SEQ ID NO: 6561 - DNA, 22 bp, Artificial Sequence
  bisulfite treated nucleic acid for analysis of methylation status of SEQ ID NO: 11
cgtgaatatgcgttagagtagc

SEQ ID NO: 6562 - DNA, 23 bp, Artificial Sequence
  bisulfite treated nucleic acid for analysis of methylation status of SEQ ID NO: 11
taaaacgactctttcgtctctcc

SEQ ID NO: 6563 - DNA, 21 bp, Artificial Sequence
  bisulfite treated nucleic acid for analysis of methylation status of SEQ ID NO: 11
cctaaatacaacgcgacttcc

SEQ ID NO: 6564 - DNA, 21 bp, Artificial Sequence
  bisulfite treated nucleic acid for analysis of methylation status of SEQ ID NO: 11
cgacgaggagttattgtcgtt

SEQ ID NO: 6565 - DNA, 20 bp, Artificial Sequence
  bisulfite treated nucleic acid for analysis of methylation status of SEQ ID NO: 11
cgacaataactcctcgtcgt

SEQ ID NO: 6566 - DNA, 20 bp, Artificial Sequence
  bisulfite treated nucleic acid for analysis of methylation status of SEQ ID NO: 11
tttcggaagtttgtcgtttc

SEQ ID NO: 6567 - DNA, 22 bp, Artificial Sequence
  bisulfite treated nucleic acid for analysis of methylation status of SEQ ID NO: 11
tatcgttggttgtcgtgttatt

SEQ ID NO: 6568 - DNA, 23 bp, Artificial Sequence
  bisulfite treated nucleic acid for analysis of methylation status of SEQ ID NO: 11
aacaaaatctaactacgctcgaa

SEQ ID NO: 6569 - DNA, 33 bp, Artificial Sequence
  bisulfite treated nucleic acid for analysis of methylation status of SEQ ID NO: 11
gacgcgaaaaatttggagagacgaaagagtcgt

SEQ ID NO: 6570 - DNA, 22 bp, Artificial Sequence
  bisulfite treated nucleic acid for analysis of methylation status of SEQ ID NO: 11
ttatcgttggttgtcgtgttat

SEQ ID NO: 6571 - DNA, 23 bp, Artificial Sequence
  bisulfite treated nucleic acid for analysis of methylation status of SEQ ID NO: 11
ccgacatcgtaaaactaaacgta

SEQ ID NO: 6572 - DNA, 22 bp, Artificial Sequence
  bisulfite treated nucleic acid for analysis of methylation status of SEQ ID NO: 11
ttttcgcgtctctctactttca

SEQ ID NO: 6573 - DNA, 23 bp, Artificial Sequence
  nucleic acid for analysis of methylation status of SEQ ID NO: 11
cgtttttagtagtgtagttgcgg

SEQ ID NO: 6574 - DNA, 39 bp, Artificial Sequence
  bisulfite treated nucleic acid for analysis of methylation status of SEQ ID NO: 11
atcgttggttgtcgtgttattgaaagtagagagacgcga

SEQ ID NO: 6575 - DNA, 23 bp, Artificial Sequence
  bisulfite treated nucleic acid for analysis of methylation status of SEQ ID NO: 11
atttttcgcgtctctctactttc

SEQ ID NO: 6576 - DNA, 21 bp, Artificial Sequence
  bisulfite treated nucleic acid for analysis of methylation status of SEQ ID NO: 11
ttttcggaagtttgtcgtttc

SEQ ID NO: 6577 - DNA, 21 bp, Artificial Sequence
  bisulfite treated nucleic acid for analysis of methylation status of SEQ ID NO: 11
aggacgacgaggagttattgt

SEQ ID NO: 6578 - DNA, 21 bp, Artificial Sequence
  bisulfite treated nucleic acid for analysis of methylation status of SEQ ID NO: 11
cgaggagttattgtcgttttc

SEQ ID NO: 6579 - DNA, 22 bp, Artificial Sequence
  bisulfite treated nucleic acid for analysis of methylation status of SEQ ID NO: 11
acgtttagttttacgatgtcgg

SEQ ID NO: 6580 - DNA, 22 bp, Artificial Sequence
  bisulfite treated nucleic acid for analysis of methylation status of SEQ ID NO: 11
taactctaacgaacaacacacg

SEQ ID NO: 6581 - DNA, 26 bp, Artificial Sequence
  bisulfite treated nucleic acid for analysis of methylation status of SEQ ID NO: 11
agcggtggtttcgcggaggacgacga

SEQ ID NO: 6582 - DNA, 23 bp, Artificial Sequence
  bisulfite treated nucleic acid for analysis of methylation status of SEQ ID NO: 11
ctaaaacgactctttcgtctctc

SEQ ID NO: 6583 - DNA, 23 bp, Artificial Sequence
  bisulfite treated nucleic acid for analysis of methylation status of SEQ ID NO: 11
gttatcgttggttgtcgtgttat

SEQ ID NO: 6584 - DNA, 22 bp, Artificial Sequence
  bisulfite treated nucleic acid for analysis of methylation status of SEQ ID NO: 11
tgtagttgcggtttgttatcgt

SEQ ID NO: 6585 - DNA, 22 bp, Artificial Sequence
  bisulfite treated nucleic acid for analysis of methylation status of SEQ ID NO: 11
gtgtagttgcggtttgttatcg

SEQ ID NO: 6586 - DNA, 21 bp, Artificial Sequence
  bisulfite treated nucleic acid for analysis of methylation status of SEQ ID NO: 11
tagttgcggtttgttatcgtt

SEQ ID NO: 6587 - DNA, 21 bp, Artificial Sequence
  bisulfite treated nucleic acid for analysis of methylation status of SEQ ID NO: 11
agttattgtcgttttcgtcgt

SEQ ID NO: 6588 - DNA, 22 bp, Artificial Sequence
  bisulfite treated nucleic acid for analysis of methylation status of SEQ ID NO: 11
cgcgtctctctactttcaataa

SEQ ID NO: 6589 - DNA, 20 bp, Artificial Sequence
  bisulfite treated nucleic acid for analysis of methylation status of SEQ ID NO: 11
tccccgacatcgtaaaacta

SEQ ID NO: 6590 - DNA, 23 bp, Artificial Sequence
  bisulfite treated nucleic acid for analysis of methylation status of SEQ ID NO: 11
gcgtttttagtagtgtagttgcg

SEQ ID NO: 6591 - DNA, 21 bp, Artificial Sequence
  bisulfite treated nucleic acid for analysis of methylation status of SEQ ID NO: 11
gtttgttatcgttggttgtcg

SEQ ID NO: 6592 - DNA, 22 bp, Artificial Sequence
  nucleic acid for analysis of methylation status of SEQ ID NO: 11
acgctcgaactaaaacgactct

SEQ ID NO: 6593 - DNA, 34 bp, Artificial Sequence
  bisulfite treated nucleic acid for analysis of methylation status of SEQ ID NO: 11
ttgaaagtagagagacgcgaaaaatttggagaga

SEQ ID NO: 6594 - DNA, 22 bp, Artificial Sequence
  bisulfite treated nucleic acid for analysis of methylation status of SEQ ID NO: 11
gttatcgttggttgtcgtgtta

SEQ ID NO: 6595 - DNA, 22 bp, Artificial Sequence
  bisulfite treated nucleic acid for analysis of methylation status of SEQ ID NO: 11
aaacaaaatctaactacgctcg

SEQ ID NO: 6596 - DNA, 21 bp, Artificial Sequence
  bisulfite treated nucleic acid for analysis of methylation status of SEQ ID NO: 11
ggagttattgtcgttttcgtc

SEQ ID NO: 6597 - DNA, 22 bp, Artificial Sequence
  bisulfite treated nucleic acid for analysis of methylation status of SEQ ID NO: 11
gtttgttatcgttggttgtcgt

SEQ ID NO: 6598 - DNA, 21 bp, Artificial Sequence
  bisulfite treated nucleic acid for analysis of methylation status of SEQ ID NO: 11
cgctcgaactaaaacgactct

SEQ ID NO: 6599 - DNA, 24 bp, Artificial Sequence
  bisulfite treated nucleic acid for analysis of methylation status of SEQ ID NO: 11
actaaaacgactctttcgtctctc

SEQ ID NO: 6600 - DNA, 23 bp, Artificial Sequence
  bisulfite treated nucleic acid for analysis of methylation status of SEQ ID NO: 11
caaaatctaactacgctcgaact

SEQ ID NO: 6601 - DNA, 22 bp, Artificial Sequence
  bisulfite treated nucleic acid for analysis of methylation status of SEQ ID NO: 11
acaaaatctaactacgctcgaa

SEQ ID NO: 6602 - DNA, 20 bp, Artificial Sequence
  bisulfite treated nucleic acid for analysis of methylation status of SEQ ID NO: 11
cgcgacttcctaccactatc

SEQ ID NO: 6603 - DNA, 21 bp, Artificial Sequence
  bisulfite treated nucleic acid for analysis of methylation status of SEQ ID NO: 11
tttgttatcgttggttgtcgt

SEQ ID NO: 6604 - DNA, 22 bp, Artificial Sequence
  bisulfite treated nucleic acid for analysis of methylation status of SEQ ID NO: 11
aacgcgacttcctaccactatc

SEQ ID NO: 6605 - DNA, 21 bp, Artificial Sequence
  bisulfite treated nucleic acid for analysis of methylation status of SEQ ID NO: 11
gaggacgacgaggagttattg

SEQ ID NO: 6606 - DNA, 21 bp, Artificial Sequence
  bisulfite treated nucleic acid for analysis of methylation status of SEQ ID NO: 11
caataactcctcgtcgtcctc

SEQ ID NO: 6607 - DNA, 21 bp, Artificial Sequence
  bisulfite treated nucleic acid for analysis of methylation status of SEQ ID NO: 11
atacaacgcgacttcctacca

SEQ ID NO: 6608 - DNA, 22 bp, Artificial Sequence
  bisulfite treated nucleic acid for analysis of methylation status of SEQ ID NO: 11
atattatcgtgtagcgtcgggt

SEQ ID NO: 6609 - DNA, 20 bp, Artificial Sequence
  bisulfite treated nucleic acid for analysis of methylation status of SEQ ID NO: 11
aagtttgtcgtttcgggagt

SEQ ID NO: 6610 - DNA, 22 bp, Artificial Sequence
  bisulfite treated nucleic acid for analysis of methylation status of SEQ ID NO: 11
gaggacgacgaggagttattgt

SEQ ID NO: 6611 - DNA, 22 bp, Artificial Sequence
  bisulfite treated nucleic acid for analysis of methylation status of SEQ ID NO: 11
ttgcgtgaatatgcgttagagt

SEQ ID NO: 6612 - DNA, 22 bp, Artificial Sequence
  bisulfite treated nucleic acid for analysis of methylation status of SEQ ID NO: 11
gttgcgtgaatatgcgttagag

SEQ ID NO: 6613 - DNA, 21 bp, Artificial Sequence
  bisulfite treated nucleic acid for analysis of methylation status of SEQ ID NO: 11
ttccccgacatcgtaaaacta

SEQ ID NO: 6614 - DNA, 21 bp, Artificial Sequence
  bisulfite treated nucleic acid for analysis of methylation status of SEQ ID NO: 11
gaaaacgacaataactcctcg

SEQ ID NO: 6615 - DNA, 22 bp, Artificial Sequence
  bisulfite treated nucleic acid for analysis of methylation status of SEQ ID NO: 11
taatttacgtgtgttgttcgtt

SEQ ID NO: 6616 - DNA, 30 bp, Artificial Sequence
  bisulfite treated nucleic acid for analysis of methylation status of SEQ ID NO: 11
ttatgatagagaggtggtcgggtcgggata

SEQ ID NO: 6617 - DNA, 22 bp, Artificial Sequence
  bisulfite treated nucleic acid for analysis of methylation status of SEQ ID NO: 11
cgactctttcgtctctccaaat

SEQ ID NO: 6618 - DNA, 23 bp, Artificial Sequence
  bisulfite treated nucleic acid for analysis of methylation status of SEQ ID NO: 11
caactcctaaatacaacgcgact

SEQ ID NO: 6619 - DNA, 24 bp, Artificial Sequence
  bisulfite treated nucleic acid for analysis of methylation status of SEQ ID NO: 11
cataactctaacgaacaacacacg

SEQ ID NO: 6620 - DNA, 23 bp, Artificial Sequence
  bisulfite treated nucleic acid for analysis of methylation status of SEQ ID NO: 11
ataactctaacgaacaacacacg

SEQ ID NO: 6621 - DNA, 23 bp, Artificial Sequence
  bisulfite treated nucleic acid for analysis of methylation status of SEQ ID NO: 11
aactaaaacgactctttcgtctc

SEQ ID NO: 6622 - DNA, 36 bp, Artificial Sequence
  bisulfite treated nucleic acid for analysis of methylation status of SEQ ID NO: 11
gtgttattgaaagtagagagacgcgaaaaatttgga

SEQ ID NO: 6623 - DNA, 21 bp, Artificial Sequence
  bisulfite treated nucleic acid for analysis of methylation status of SEQ ID NO: 11
aataactcctcgtcgtcctcc

SEQ ID NO: 6624 - DNA, 21 bp, Artificial Sequence
  bisulfite treated nucleic acid for analysis of methylation status of SEQ ID NO: 11
cccgacatcgtaaaactaaac

SEQ ID NO: 6625 - DNA, 23 bp, Artificial Sequence
  bisulfite treated nucleic acid for analysis of methylation status of SEQ ID NO: 11
gaatatgcgttagagtagcgagt

SEQ ID NO: 6626 - DNA, 46 bp, Artificial Sequence
  bisulfite treated nucleic acid for analysis of methylation status of SEQ ID NO: 11
gtcgtgttattgaaagtagagagacgcgaaaaatttggagagacga

SEQ ID NO: 6627 - DNA, 23 bp, Artificial Sequence
  bisulfite treated nucleic acid for analysis of methylation status of SEQ ID NO: 11
cgacatcgtaaaactaaacgtaa

SEQ ID NO: 6628 - DNA, 19 bp, Artificial Sequence
  bisulfite treated nucleic acid for analysis of methylation status of SEQ ID NO: 11
tccccgacatcgtaaaact

SEQ ID NO: 6629 - DNA, 24 bp, Artificial Sequence
  bisulfite treated nucleic acid for analysis of methylation status of SEQ ID NO: 11
ttaaacaaaatctaactacgctcg

SEQ ID NO: 6630 - DNA, 21 bp, Artificial Sequence
  bisulfite treated nucleic acid for analysis of methylation status of SEQ ID NO: 11
tgcgtgaatatgcgttagagt

SEQ ID NO: 6631 - DNA, 25 bp, Artificial Sequence
  bisulfite treated nucleic acid for analysis of methylation status of SEQ ID NO: 11
cttaaacaaaatctaactacgctcg

SEQ ID NO: 6632 - DNA, 19 bp, Artificial Sequence
  bisulfite treated nucleic acid for analysis of methylation status of SEQ ID NO: 11
agtagcgagtcgggtatcg

SEQ ID NO: 6633 - DNA, 22 bp, Artificial Sequence
  bisulfite treated nucleic acid for analysis of methylation status of SEQ ID NO: 11
atcgttggttgtcgtgttattg

SEQ ID NO: 6634 - DNA, 22 bp, Artificial Sequence
  bisulfite treated nucleic acid for analysis of methylation status of SEQ ID NO: 11
cgcgttgtttaagtagagtcgt

SEQ ID NO: 6635 - DNA, 20 bp, Artificial Sequence
  bisulfite treated nucleic acid for analysis of methylation status of SEQ ID NO: 11
aaatacaaatcgaatccccg

SEQ ID NO: 6636 - DNA, 27 bp, Artificial Sequence
  bisulfite treated nucleic acid for analysis of methylation status of SEQ ID NO: 11
ggcggcggagtttcgtttatcgggcga

SEQ ID NO: 6637 - DNA, 35 bp, Artificial Sequence
  bisulfite treated nucleic acid for analysis of methylation status of SEQ ID NO: 11
ggttgtcgtgttattgaaagtagagagacgcgaaa

SEQ ID NO: 6638 - DNA, 23 bp, Artificial Sequence
  bisulfite treated nucleic acid for analysis of methylation status of SEQ ID NO: 11
gacgaggagttattgtcgttttc

SEQ ID NO: 6639 - DNA, 21 bp, Artificial Sequence
  bisulfite treated nucleic acid for analysis of methylation status of SEQ ID NO: 11
ttagagtagcgagtcgggtat

SEQ ID NO: 6640 - DNA, 24 bp, Artificial Sequence
  bisulfite treated nucleic acid for analysis of methylation status of SEQ ID NO: 11
cgacatcgtaaaactaaacgtaaa

SEQ ID NO: 6641 - DNA, 20 bp, Artificial Sequence
  bisulfite treated nucleic acid for analysis of methylation status of SEQ ID NO: 11
acaataactcctcgtcgtcc

SEQ ID NO: 6642 - DNA, 22 bp, Artificial Sequence
  bisulfite treated nucleic acid for analysis of methylation status of SEQ ID NO: 11
gaatatgcgttagagtagcgag

SEQ ID NO: 6643 - DNA, 23 bp, Artificial Sequence
  bisulfite treated nucleic acid for analysis of methylation status of SEQ ID NO: 11
tgaatatgcgttagagtagcgag

SEQ ID NO: 6644 - DNA, 19 bp, Artificial Sequence
  bisulfite treated nucleic acid for analysis of methylation status of SEQ ID NO: 11
gcggtttgttatcgttggt

SEQ ID NO: 6645 - DNA, 22 bp, Artificial Sequence
  bisulfite treated nucleic acid for analysis of methylation status of SEQ ID NO: 11
ctacgctcgaactaaaacgact

SEQ ID NO: 6646 - DNA, 23 bp, Artificial Sequence
  bisulfite treated nucleic acid for analysis of methylation status of SEQ ID NO: 11
taaacaaaatctaactacgctcg

SEQ ID NO: 6647 - DNA, 21 bp, Artificial Sequence
  bisulfite treated nucleic acid for analysis of methylation status of SEQ ID NO: 11
tgttatcgttggttgtcgtgt

SEQ ID NO: 6648 - DNA, 33 bp, Artificial Sequence
  bisulfite treated nucleic acid for analysis of methylation status of SEQ ID NO: 11
agcgagtcgggtatcgatattatcgtgtagcgt

SEQ ID NO: 6649 - DNA, 21 bp, Artificial Sequence
  bisulfite treated nucleic acid for analysis of methylation status of SEQ ID NO: 11
tccccgacatcgtaaaactaa

SEQ ID NO: 6650 - DNA, 22 bp, Artificial Sequence
  bisulfite treated nucleic acid for analysis of methylation status of SEQ ID NO: 11
tttacgtgtgttgttcgttaga

SEQ ID NO: 6651 - DNA, 19 bp, Artificial Sequence
  bisulfite treated nucleic acid for analysis of methylation status of SEQ ID NO: 11
ttccccgacatcgtaaaac

SEQ ID NO: 6652 - DNA, 21 bp, Artificial Sequence
  bisulfite treated nucleic acid for analysis of methylation status of SEQ ID NO: 11
acgaaaacgacaataactcct

SEQ ID NO: 6653 - DNA, 20 bp, Artificial Sequence
  bisulfite treated nucleic acid for analysis of methylation status of SEQ ID NO: 11
cttccccgacatcgtaaaac

SEQ ID NO: 6654 - DNA, 33 bp, Artificial Sequence
  bisulfite treated nucleic acid for analysis of methylation status of SEQ ID NO: 11
agcgtcgggttacgtatatttggttttttacgt

SEQ ID NO: 6655 - DNA, 23 bp, Artificial Sequence
  bisulfite treated nucleic acid for analysis of methylation status of SEQ ID NO: 11
tacgtttagttttacgatgtcgg

SEQ ID NO: 6656 - DNA, 20 bp, Artificial Sequence
  bisulfite treated nucleic acid for analysis of methylation status of SEQ ID NO: 11
tacaacgcgacttcctacca

SEQ ID NO: 6657 - DNA, 21 bp, Artificial Sequence
  bisulfite treated nucleic acid for analysis of methylation status of SEQ ID NO: 11
gttgcgtgaatatgcgttaga

SEQ ID NO: 6658 - DNA, 24 bp, Artificial Sequence
  bisulfite treated nucleic acid for analysis of methylation status of SEQ ID NO: 11
aatttacgtgtgttgttcgttaga

SEQ ID NO: 6659 - DNA, 21 bp, Artificial Sequence
  bisulfite treated nucleic acid for analysis of methylation status of SEQ ID NO: 11
ggaggacgacgaggagttatt

SEQ ID NO: 6660 - DNA, 23 bp, Artificial Sequence
  bisulfite treated nucleic acid for analysis of methylation status of SEQ ID NO: 11
tacgctcgaactaaaacgactct

SEQ ID NO: 6661 - DNA, 21 bp, Artificial Sequence
  bisulfite treated nucleic acid for analysis of methylation status of SEQ ID NO: 11
tattatcgtgtagcgtcgggt

SEQ ID NO: 6662 - DNA, 21 bp, Artificial Sequence
  bisulfite treated nucleic acid for analysis of methylation status of SEQ ID NO: 11
cgaaaacgacaataactcctc

SEQ ID NO: 6663 - DNA, 21 bp, Artificial Sequence
  bisulfite treated nucleic acid for analysis of methylation status of SEQ ID NO: 11
gtagttgcggtttgttatcgt

SEQ ID NO: 6664 - DNA, 20 bp, Artificial Sequence
  bisulfite treated nucleic acid for analysis of methylation status of SEQ ID NO: 11
agttgcggtttgttatcgtt

SEQ ID NO: 6665 - DNA, 21 bp, Artificial Sequence
  bisulfite treated nucleic acid for analysis of methylation status of SEQ ID NO: 11
gaagaggattcgttcgagatt

SEQ ID NO: 6666 - DNA, 21 bp, Artificial Sequence
  bisulfite treated nucleic acid for analysis of methylation status of SEQ ID NO: 11
gaaacgacaaacttccgaaaa

SEQ ID NO: 6667 - DNA, 38 bp, Artificial Sequence
  bisulfite treated nucleic acid for analysis of methylation status of SEQ ID NO: 11
tttcgttttagttcgtatttaaggattttggaaggagg

SEQ ID NO: 6668 - DNA, 21 bp, Artificial Sequence
  bisulfite treated nucleic acid for analysis of methylation status of SEQ ID NO: 11
aactctaacgaacaacacacg

SEQ ID NO: 6669 - DNA, 21 bp, Artificial Sequence
  bisulfite treated nucleic acid for analysis of methylation status of SEQ ID NO: 11
ttgcgtgaatatgcgttagag

SEQ ID NO: 6670 - DNA, 21 bp, Artificial Sequence
  bisulfite treated nucleic acid for analysis of methylation status of SEQ ID NO: 11
gacgaaaacgacaataactcc

SEQ ID NO: 6671 - DNA, 19 bp, Artificial Sequence
  bisulfite treated nucleic acid for analysis of methylation status of SEQ ID NO: 11
ttacgatgtcggggaagag

SEQ ID NO: 6672 - DNA, 22 bp, Artificial Sequence
  bisulfite treated nucleic acid for analysis of methylation status of SEQ ID NO: 11
taaattacccaacgaaaacgac

SEQ ID NO: 6673 - DNA, 37 bp, Artificial Sequence
  bisulfite treated nucleic acid for analysis of methylation status of SEQ ID NO: 11
ttcgcggaggacgacgaggagttattgtcgttttcgt

SEQ ID NO: 6674 - DNA, 23 bp, Artificial Sequence
  bisulfite treated nucleic acid for analysis of methylation status of SEQ ID NO: 11
tgcgtgaatatgcgttagagtag

SEQ ID NO: 6675 - DNA, 19 bp, Artificial Sequence
  bisulfite treated nucleic acid for analysis of methylation status of SEQ ID NO: 11
ctcttccccgacatcgtaa

SEQ ID NO: 6676 - DNA, 21 bp, Artificial Sequence
  bisulfite treated nucleic acid for analysis of methylation status of SEQ ID NO: 11
ctcctaaatacaacgcgactt

SEQ ID NO: 6677 - DNA, 21 bp, Artificial Sequence
  bisulfite treated nucleic acid for analysis of methylation status of SEQ ID NO: 11
cgtttagttttacgatgtcgg

SEQ ID NO: 6678 - DNA, 20 bp, Artificial Sequence
  bisulfite treated nucleic acid for analysis of methylation status of SEQ ID NO: 11
cgtcgttttcgttgggtaat

SEQ ID NO: 6679 - DNA, 22 bp, Artificial Sequence
  bisulfite treated nucleic acid for analysis of methylation status of SEQ ID NO: 11
aatatgcgttagagtagcgagt

SEQ ID NO: 6680 - DNA, 19 bp, Artificial Sequence
  bisulfite treated nucleic acid for analysis of methylation status of SEQ ID NO: 11
gaagtttgtcgtttcggga

SEQ ID NO: 6681 - DNA, 21 bp, Artificial Sequence
  bisulfite treated nucleic acid for analysis of methylation status of SEQ ID NO: 11
tgttgcgtgaatatgcgttag

SEQ ID NO: 6682 - DNA, 23 bp, Artificial Sequence
  bisulfite treated nucleic acid for analysis of methylation status of SEQ ID NO: 11
atttacgtgtgttgttcgttaga

SEQ ID NO: 6683 - DNA, 25 bp, Artificial Sequence
  bisulfite treated nucleic acid for analysis of methylation status of SEQ ID NO: 11
gaactaaaacgactctttcgtctct

SEQ ID NO: 6684 - DNA, 36 bp, Artificial Sequence
  bisulfite treated nucleic acid for analysis of methylation status of SEQ ID NO: 11
tgttattgaaagtagagagacgcgaaaaatttggag

SEQ ID NO: 6685 - DNA, 21 bp, Artificial Sequence
  bisulfite treated nucleic acid for analysis of methylation status of SEQ ID NO: 11
tttttcgcgtctctctacttt

SEQ ID NO: 6686 - DNA, 20 bp, Artificial Sequence
  bisulfite treated nucleic acid for analysis of methylation status of SEQ ID NO: 11
cgttggttgtcgtgttattg

SEQ ID NO: 6687 - DNA, 19 bp, Artificial Sequence
  bisulfite treated nucleic acid for analysis of methylation status of SEQ ID NO: 11
agtttgtcgtttcgggagt

SEQ ID NO: 6688 - DNA, 22 bp, Artificial Sequence
  bisulfite treated nucleic acid for analysis of methylation status of SEQ ID NO: 11
gtttagttttacgatgtcgggg

SEQ ID NO: 6689 - DNA, 21 bp, Artificial Sequence
  bisulfite treated nucleic acid for analysis of methylation status of SEQ ID NO: 11
tcgttggttgtcgtgttattg

SEQ ID NO: 6690 - DNA, 21 bp, Artificial Sequence
  bisulfite treated nucleic acid for analysis of methylation status of SEQ ID NO: 11
ttgttatcgttggttgtcgtg

SEQ ID NO: 6691 - DNA, 20 bp, Artificial Sequence
  bisulfite treated nucleic acid for analysis of methylation status of SEQ ID NO: 11
gttgcggtttgttatcgttg

SEQ ID NO: 6692 - DNA, 20 bp, Artificial Sequence
  bisulfite treated nucleic acid for analysis of methylation status of SEQ ID NO: 11
aaacgacaaacttccgaaaa

SEQ ID NO: 6693 - DNA, 22 bp, Artificial Sequence
  bisulfite treated nucleic acid for analysis of methylation status of SEQ ID NO: 11
attttcggaagtttgtcgtttc

SEQ ID NO: 6694 - DNA, 24 bp, Artificial Sequence
  bisulfite treated nucleic acid for analysis of methylation status of SEQ ID NO: 11
cgtctctctactttcaataacacg

SEQ ID NO: 6695 - DNA, 20 bp, Artificial Sequence
  bisulfite treated nucleic acid for analysis of methylation status of SEQ ID NO: 11
gagtagcgagtcgggtatcg

SEQ ID NO: 6696 - DNA, 19 bp, Artificial Sequence
  bisulfite treated nucleic acid for analysis of methylation status of SEQ ID NO: 11
tttacgatgtcggggaaga

SEQ ID NO: 6697 - DNA, 19 bp, Artificial Sequence
  bisulfite treated nucleic acid for analysis of methylation status of SEQ ID NO: 11
ttgcggtttgttatcgttg

SEQ ID NO: 6698 - DNA, 19 bp, Artificial Sequence
  bisulfite treated nucleic acid for analysis of methylation status of SEQ ID NO: 11
tcttccccgacatcgtaaa

SEQ ID NO: 6699 - DNA, 21 bp, Artificial Sequence
  bisulfite treated nucleic acid for analysis of methylation status of SEQ ID NO: 11
gaatatgcgttagagtagcga

SEQ ID NO: 6700 - DNA, 19 bp, Artificial Sequence
  bisulfite treated nucleic acid for analysis of methylation status of SEQ ID NO: 11
aatacaaatcgaatccccg

SEQ ID NO: 6701 - DNA, 21 bp, Artificial Sequence
  bisulfite treated nucleic acid for analysis of methylation status of SEQ ID NO: 11
tttagttttacgatgtcgggg

SEQ ID NO: 6702 - DNA, 20 bp, Artificial Sequence
  bisulfite treated nucleic acid for analysis of methylation status of SEQ ID NO: 11
caataactcctcgtcgtcct

SEQ ID NO: 6703 - DNA, 21 bp, Artificial Sequence
  bisulfite treated nucleic acid for analysis of methylation status of SEQ ID NO: 11
cggtttgttatcgttggttgt

SEQ ID NO: 6704 - DNA, 20 bp, Artificial Sequence
  bisulfite treated nucleic acid for analysis of methylation status of SEQ ID NO: 11
tatcgtgtagcgtcgggtta

SEQ ID NO: 6705 - DNA, 19 bp, Artificial Sequence
  bisulfite treated nucleic acid for analysis of methylation status of SEQ ID NO: 11
gaaatgcgtggtcgttttc

SEQ ID NO: 6706 - DNA, 19 bp, Artificial Sequence
  bisulfite treated nucleic acid for analysis of methylation status of SEQ ID NO: 11
gtttgtcgtttcgggagtg

SEQ ID NO: 6707 - DNA, 20 bp, Artificial Sequence
  bisulfite treated nucleic acid for analysis of methylation status of SEQ ID NO: 11
tagttttacgatgtcgggga

SEQ ID NO: 6708 - DNA, 18 bp, Artificial Sequence
  bisulfite treated nucleic acid for analysis of methylation status of SEQ ID NO: 11
tttgtcgtttcgggagtg

SEQ ID NO: 6709 - DNA, 23 bp, Artificial Sequence
  bisulfite treated nucleic acid for analysis of methylation status of SEQ ID NO: 11
aactctaacgaacaacacacgta

SEQ ID NO: 6710 - DNA, 20 bp, Artificial Sequence
  bisulfite treated nucleic acid for analysis of methylation status of SEQ ID NO: 11
tttgttatcgttggttgtcg

SEQ ID NO: 6711 - DNA, 18 bp, Artificial Sequence
  bisulfite treated nucleic acid for analysis of methylation status of SEQ ID NO: 11
cggaagtttgtcgtttcg

SEQ ID NO: 6712 - DNA, 20 bp, Artificial Sequence
  bisulfite treated nucleic acid for analysis of methylation status of SEQ ID NO: 11
tgttgcgtgaatatgcgtta

SEQ ID NO: 6713 - DNA, 20 bp, Artificial Sequence
  bisulfite treated nucleic acid for analysis of methylation status of SEQ ID NO: 11
ggacgacgaggagttattgt

SEQ ID NO: 6714 - DNA, 19 bp, Artificial Sequence
  bisulfite treated nucleic acid for analysis of methylation status of SEQ ID NO: 11
acaacgcgacttcctacca

SEQ ID NO: 6715 - DNA, 25 bp, Artificial Sequence
  bisulfite treated nucleic acid for analysis of methylation status of SEQ ID NO: 11
aaaatctaactacgctcgaactaaa

SEQ ID NO: 6716 - DNA, 18 bp, Artificial Sequence
  bisulfite treated nucleic acid for analysis of methylation status of SEQ ID NO: 11
caacgcgacttcctacca

SEQ ID NO: 6717 - DNA, 20 bp, Artificial Sequence
  bisulfite treated nucleic acid for analysis of methylation status of SEQ ID NO: 11
attatcgtgtagcgtcgggt

SEQ ID NO: 6718 - DNA, 20 bp, Artificial Sequence
  bisulfite treated nucleic acid for analysis of methylation status of SEQ ID NO: 11
ttagttttacgatgtcgggg

SEQ ID NO: 6719 - DNA, 21 bp, Artificial Sequence
  bisulfite treated nucleic acid for analysis of methylation status of SEQ ID NO: 11
aaattacccaacgaaaacgac

SEQ ID NO: 6720 - DNA, 19 bp, Artificial Sequence
  bisulfite treated nucleic acid for analysis of methylation status of SEQ ID NO: 11
ttatcgtgtagcgtcgggt

SEQ ID NO: 6721 - DNA, 19 bp, Artificial Sequence
  bisulfite treated nucleic acid for analysis of methylation status of SEQ ID NO: 11
tatcgtgtagcgtcgggtt

SEQ ID NO: 6722 - DNA, 18 bp, Artificial Sequence
  bisulfite treated nucleic acid for analysis of methylation status of SEQ ID NO: 11
cgtttcgggagtggaaat

SEQ ID NO: 6723 - DNA, 22 bp, Artificial Sequence
  bisulfite treated nucleic acid for analysis of methylation status of SEQ ID NO: 11
aacgataacaaaccgcaactac

SEQ ID NO: 6724 - DNA, 30 bp, Artificial Sequence
  bisulfite treated nucleic acid for analysis of methylation status of SEQ ID NO: 11
ttcggttttttcgtttgcggaattgggcgt

SEQ ID NO: 6725 - DNA, 20 bp, Artificial Sequence
  bisulfite treated nucleic acid for analysis of methylation status of SEQ ID NO: 11
gttgttgcgtgaatatgcgt

SEQ ID NO: 6726 - DNA, 25 bp, Artificial Sequence
  bisulfite treated nucleic acid for analysis of methylation status of SEQ ID NO: 11
aaatctaactacgctcgaactaaaa

SEQ ID NO: 6727 - DNA, 21 bp, Artificial Sequence
  bisulfite treated nucleic acid for analysis of methylation status of SEQ ID NO: 11
ttagttttacgatgtcgggga

SEQ ID NO: 6728 - DNA, 22 bp, Artificial Sequence
  bisulfite treated nucleic acid for analysis of methylation status of SEQ ID NO: 11
taacacgacaaccaacgataac

SEQ ID NO: 6729 - DNA, 32 bp, Artificial Sequence
  bisulfite treated nucleic acid for analysis of methylation status of SEQ ID NO: 11
ggaattgggcgtttttagtagtgtagttgcgg

SEQ ID NO: 6730 - DNA, 24 bp, Artificial Sequence
  bisulfite treated nucleic acid for analysis of methylation status of SEQ ID NO: 11
aaatctaactacgctcgaactaaa

SEQ ID NO: 6731 - DNA, 19 bp, Artificial Sequence
  bisulfite treated nucleic acid for analysis of methylation status of SEQ ID NO: 11
caacgcgacttcctaccac

SEQ ID NO: 6732 - DNA, 19 bp, Artificial Sequence
  bisulfite treated nucleic acid for analysis of methylation status of SEQ ID NO: 11
ttgttgcgtgaatatgcgt

SEQ ID NO: 6733 - DNA, 43 bp, Artificial Sequence
  bisulfite treated nucleic acid for analysis of methylation status of SEQ ID NO: 11
gacgcgaaaaatttggagagacgaaagagtcgttttagttcga

SEQ ID NO: 6734 - DNA, 19 bp, Artificial Sequence
  bisulfite treated nucleic acid for analysis of methylation status of SEQ ID NO: 11
ttcggaagtttgtcgtttc

SEQ ID NO: 6735 - DNA, 22 bp, Artificial Sequence
  bisulfite treated nucleic acid for analysis of methylation status of SEQ ID NO: 11
attgaaagtagagagacgcgaa

SEQ ID NO: 6736 - DNA, 26 bp, Artificial Sequence
  bisulfite treated nucleic acid for analysis of methylation status of SEQ ID NO: 11
acttaaacaaaatctaactacgctcg

SEQ ID NO: 6737 - DNA, 34 bp, Artificial Sequence
  bisulfite treated nucleic acid for analysis of methylation status of SEQ ID NO: 11
aatttggagagacgaaagagtcgttttagttcga

SEQ ID NO: 6738 - DNA, 22 bp, Artificial Sequence
  bisulfite treated nucleic acid for analysis of methylation status of SEQ ID NO: 11
actctaacgaacaacacacgta

SEQ ID NO: 6739 - DNA, 20 bp, Artificial Sequence
  bisulfite treated nucleic acid for analysis of methylation status of SEQ ID NO: 11
cggtttgttatcgttggttg

SEQ ID NO: 6740 - DNA, 21 bp, Artificial Sequence
  bisulfite treated nucleic acid for analysis of methylation status of SEQ ID NO: 11
tacgctcgaactaaaacgact

SEQ ID NO: 6741 - DNA, 22 bp, Artificial Sequence
  bisulfite treated nucleic acid for analysis of methylation status of SEQ ID NO: 11
aaaaccgcctactctaataccg

SEQ ID NO: 6742 - DNA, 22 bp, Artificial Sequence
  bisulfite treated nucleic acid for analysis of methylation status of SEQ ID NO: 11
gtggagttagtagtttcgcgtg

SEQ ID NO: 6743 - DNA, 29 bp, Artificial Sequence
  bisulfite treated nucleic acid for analysis of methylation status of SEQ ID NO: 11
ggtaagcgaggtttcgtcgtcgtttacgt

SEQ ID NO: 6744 - DNA, 21 bp, Artificial Sequence
  bisulfite treated nucleic acid for analysis of methylation status of SEQ ID NO: 11
tggagttagtagtttcgcgtg

SEQ ID NO: 6745 - DNA, 21 bp, Artificial Sequence
  bisulfite treated nucleic acid for analysis of methylation status of SEQ ID NO: 11
aaaccgcctactctaataccg

SEQ ID NO: 6746 - DNA, 22 bp, Artificial Sequence
  bisulfite treated nucleic acid for analysis of methylation status of SEQ ID NO: 11
ggtggagttagtagtttcgcgt

SEQ ID NO: 6747 - DNA, 21 bp, Artificial Sequence
  bisulfite treated nucleic acid for analysis of methylation status of SEQ ID NO: 11
ggagttagtagtttcgcgtgg

SEQ ID NO: 6748 - DNA, 22 bp, Artificial Sequence
  bisulfite treated nucleic acid for analysis of methylation status of SEQ ID NO: 11
tatcgccccgaaaataaaaata

SEQ ID NO: 6749 - DNA, 22 bp, Artificial Sequence
  bisulfite treated nucleic acid for analysis of methylation status of SEQ ID NO: 11
taacgatggtaggtcgtagttg

SEQ ID NO: 6750 - DNA, 33 bp, Artificial Sequence
  bisulfite treated nucleic acid for analysis of methylation status of SEQ ID NO: 11
tagtttcgtaggcgggagggtcggaggcggtta

SEQ ID NO: 6751 - DNA, 22 bp, Artificial Sequence
  bisulfite treated nucleic acid for analysis of methylation status of SEQ ID NO: 11
cgaaccaactcctacgactact

SEQ ID NO: 6752 - DNA, 21 bp, Artificial Sequence
  bisulfite treated nucleic acid for analysis of methylation status of SEQ ID NO: 11
ggttaggtgtacgtgattcgg

SEQ ID NO: 6753 - DNA, 32 bp, Artificial Sequence
  bisulfite treated nucleic acid for analysis of methylation status of SEQ ID NO: 11
ggtgttcgattcgttgttttggcgtatgttta

SEQ ID NO: 6754 - DNA, 21 bp, Artificial Sequence
  nucleic acid for analysis of methylation status of SEQ ID NO: 11
gggttaggtgtacgtgattcg

SEQ ID NO: 6755 - DNA, 23 bp, Artificial Sequence
  bisulfite treated nucleic acid for analysis of methylation status of SEQ ID NO: 11
taaaaccgcctactctaataccg

SEQ ID NO: 6756 - DNA, 21 bp, Artificial Sequence
  bisulfite treated nucleic acid for analysis of methylation status of SEQ ID NO: 11
gagttagtagtttcgcgtggc

SEQ ID NO: 6757 - DNA, 21 bp, Artificial Sequence
  bisulfite treated nucleic acid for analysis of methylation status of SEQ ID NO: 11
gttaggtgtacgtgattcggc

SEQ ID NO: 6758 - DNA, 23 bp, Artificial Sequence
  bisulfite treated nucleic acid for analysis of methylation status of SEQ ID NO: 11
ttaacgatggtaggtcgtagttg

SEQ ID NO: 6759 - DNA, 21 bp, Artificial Sequence
  bisulfite treated nucleic acid for analysis of methylation status of SEQ ID NO: 11
tatcgccccgaaaataaaaat

SEQ ID NO: 6760 - DNA, 22 bp, Artificial Sequence
  bisulfite treated nucleic acid for analysis of methylation status of SEQ ID NO: 11
aacgatggtaggtcgtagttgt

SEQ ID NO: 6761 - DNA, 20 bp, Artificial Sequence
  bisulfite treated nucleic acid for analysis of methylation status of SEQ ID NO: 11
ttaggtgtacgtgattcggc

SEQ ID NO: 6762 - DNA, 20 bp, Artificial Sequence
  bisulfite treated nucleic acid for analysis of methylation status of SEQ ID NO: 11
ctatcgccccgaaaataaaa

SEQ ID NO: 6763 - DNA, 26 bp, Artificial Sequence
  bisulfite treated nucleic acid for analysis of methylation status of SEQ ID NO: 11
ggcgggagggtcggaggcggttacgt

SEQ ID NO: 6764 - DNA, 21 bp, Artificial Sequence
  bisulfite treated nucleic acid for analysis of methylation status of SEQ ID NO: 11
cgaatcacgtacacctaaccc

SEQ ID NO: 6765 - DNA, 21 bp, Artificial Sequence
  bisulfite treated nucleic acid for analysis of methylation status of SEQ ID NO: 11
ggtagtggtttttcgtcgttt

SEQ ID NO: 6766 - DNA, 34 bp, Artificial Sequence
  bisulfite treated nucleic acid for analysis of methylation status of SEQ ID NO: 11
atcgttttttttcgatatcgtggagttgaacgtg

SEQ ID NO: 6767 - DNA, 21 bp, Artificial Sequence
  bisulfite treated nucleic acid for analysis of methylation status of SEQ ID NO: 11
ccgaatcacgtacacctaacc

SEQ ID NO: 6768 - DNA, 33 bp, Artificial Sequence
  bisulfite treated nucleic acid for analysis of methylation status of SEQ ID NO: 11
gttttttttcgatatcgtggagttgaacgtggg

SEQ ID NO: 6769 - DNA, 20 bp, Artificial Sequence
  bisulfite treated nucleic acid for analysis of methylation status of SEQ ID NO: 11
agttagtagtttcgcgtggc

SEQ ID NO: 6770 - DNA, 21 bp, Artificial Sequence
  bisulfite treated nucleic acid for analysis of methylation status of SEQ ID NO: 11
gccgaatcacgtacacctaac

SEQ ID NO: 6771 - DNA, 30 bp, Artificial Sequence
  bisulfite treated nucleic acid for analysis of methylation status of SEQ ID NO: 11
tttttcgatatcgtggagttgaacgtgggg

SEQ ID NO: 6772 - DNA, 21 bp, Artificial Sequence
  bisulfite treated nucleic acid for analysis of methylation status of SEQ ID NO: 11
atcgccccgaaaataaaaata

SEQ ID NO: 6773 - DNA, 20 bp, Artificial Sequence
  bisulfite treated nucleic acid for analysis of methylation status of SEQ ID NO: 11
atcgccccgaaaataaaaat

SEQ ID NO: 6774 - DNA, 21 bp, Artificial Sequence
  bisulfite treated nucleic acid for analysis of methylation status of SEQ ID NO: 11
acgtaaacatacgccaaaaca

SEQ ID NO: 6775 - DNA, 21 bp, Artificial Sequence
  bisulfite treated nucleic acid for analysis of methylation status of SEQ ID NO: 11
atatcgtggagttgaacgtgg

SEQ ID NO: 6776 - DNA, 28 bp, Artificial Sequence
  bisulfite treated nucleic acid for analysis of methylation status of SEQ ID NO: 11
ggcgttgtacggtggtgtcggtgttcga

SEQ ID NO: 6777 - DNA, 24 bp, Artificial Sequence
  bisulfite treated nucleic acid for analysis of methylation status of SEQ ID NO: 11
ataaaaccgcctactctaataccg

SEQ ID NO: 6778 - DNA, 20 bp, Artificial Sequence
  bisulfite treated nucleic acid for analysis of methylation status of SEQ ID NO: 11
taaatcgcgcccttaaactc

SEQ ID NO: 6779 - DNA, 22 bp, Artificial Sequence
  bisulfite treated nucleic acid for analysis of methylation status of SEQ ID NO: 11
gtcgaagagtgatcgaggtatg

SEQ ID NO: 6780 - DNA, 38 bp, Artificial Sequence
  bisulfite treated nucleic acid for analysis of methylation status of SEQ ID NO: 11
atgtaggcgttaaaggtggttttaaaaattacgttaga

SEQ ID NO: 6781 - DNA, 24 bp, Artificial Sequence
  bisulfite treated nucleic acid for analysis of methylation status of SEQ ID NO: 11
attaacgatggtaggtcgtagttg

SEQ ID NO: 6782 - DNA, 22 bp, Artificial Sequence
  bisulfite treated nucleic acid for analysis of methylation status of SEQ ID NO: 11
cgtaaacatacgccaaaacaac

SEQ ID NO: 6783 - DNA, 21 bp, Artificial Sequence
  bisulfite treated nucleic acid for analysis of methylation status of SEQ ID NO: 11
tcgaagagtgatcgaggtatg

SEQ ID NO: 6784 - DNA, 22 bp, Artificial Sequence
  bisulfite treated nucleic acid for analysis of methylation status of SEQ ID NO: 11
aattaacgatggtaggtcgtag

SEQ ID NO: 6785 - DNA, 19 bp, Artificial Sequence
  bisulfite treated nucleic acid for analysis of methylation status of SEQ ID NO: 11
acctatcgccccgaaaata

SEQ ID NO: 6786 - DNA, 19 bp, Artificial Sequence
  bisulfite treated nucleic acid for analysis of methylation status of SEQ ID NO: 11
tcgccccgaaaataaaaat

SEQ ID NO: 6787 - DNA, 19 bp, Artificial Sequence
  bisulfite treated nucleic acid for analysis of methylation status of SEQ ID NO: 11
gaaacctcgcttaccgaac

SEQ ID NO: 6788 - DNA, 35 bp, Artificial Sequence
  bisulfite treated nucleic acid for analysis of methylation status of SEQ ID NO: 11
ggcgttcgcgtttaagatgtaaatcgagttttcgt

SEQ ID NO: 6789 - DNA, 20 bp, Artificial Sequence
  bisulfite treated nucleic acid for analysis of methylation status of SEQ ID NO: 11
tatcgtggagttgaacgtgg

SEQ ID NO: 6790 - DNA, 18 bp, Artificial Sequence
  bisulfite treated nucleic acid for analysis of methylation status of SEQ ID NO: 11
cgccccgaaaataaaaat

SEQ ID NO: 6791 - DNA, 21 bp, Artificial Sequence
  bisulfite treated nucleic acid for analysis of methylation status of SEQ ID NO: 11
cttaaattccaatacgctccg

SEQ ID NO: 6792 - DNA, 19 bp, Artificial Sequence
  bisulfite treated nucleic acid for analysis of methylation status of SEQ ID NO: 11
gtaagcgaggtttcgtcgt

SEQ ID NO: 6793 - DNA, 27 bp, Artificial Sequence
  bisulfite treated nucleic acid for analysis of methylation status of SEQ ID NO: 11
aggcggttttatttaagtagcgcgcgg

SEQ ID NO: 6794 - DNA, 18 bp, Artificial Sequence
  bisulfite treated nucleic acid for analysis of methylation status of SEQ ID NO: 11
cctatcgccccgaaaata

SEQ ID NO: 6795 - DNA, 20 bp, Artificial Sequence
  bisulfite treated nucleic acid for analysis of methylation status of SEQ ID NO: 11
aaccgcctactctaataccg

SEQ ID NO: 6796 - DNA, 19 bp, Artificial Sequence
  bisulfite treated nucleic acid for analysis of methylation status of SEQ ID NO: 11
ctatcgccccgaaaataaa

SEQ ID NO: 6797 - DNA, 22 bp, Artificial Sequence
  bisulfite treated nucleic acid for analysis of methylation status of SEQ ID NO: 11
acgatggtaggtcgtagttgta

SEQ ID NO: 6798 - DNA, 18 bp, Artificial Sequence
  bisulfite treated nucleic acid for analysis of methylation status of SEQ ID NO: 11
aatcgcgcccttaaactc

SEQ ID NO: 6799 - DNA, 22 bp, Artificial Sequence
  bisulfite treated nucleic acid for analysis of methylation status of SEQ ID NO: 11
ggtcgaagagtgatcgaggtat

SEQ ID NO: 6800 - DNA, 18 bp, Artificial Sequence
  bisulfite treated nucleic acid for analysis of methylation status of SEQ ID NO: 11
tcgcttaccgaacgaaaa

SEQ ID NO: 6801 - DNA, 19 bp, Artificial Sequence
  bisulfite treated nucleic acid for analysis of methylation status of SEQ ID NO: 11
gtgtacgtgattcggcgtt

SEQ ID NO: 6802 - DNA, 19 bp, Artificial Sequence
  bisulfite treated nucleic acid for analysis of methylation status of SEQ ID NO: 11
ctcgcttaccgaacgaaaa

SEQ ID NO: 6803 - DNA, 20 bp, Artificial Sequence
  bisulfite treated nucleic acid for analysis of methylation status of SEQ ID NO: 11
tatcgccccgaaaataaaaa

SEQ ID NO: 6804 - DNA, 18 bp, Artificial Sequence
  bisulfite treated nucleic acid for analysis of methylation status of SEQ ID NO: 11
tacgtgattcggcgttgt

SEQ ID NO: 6805 - DNA, 18 bp, Artificial Sequence
  bisulfite treated nucleic acid for analysis of methylation status of SEQ ID NO: 11
tgtacgtgattcggcgtt

SEQ ID NO: 6806 - DNA, 18 bp, Artificial Sequence
  bisulfite treated nucleic acid for analysis of methylation status of SEQ ID NO: 11
cgaaaccgaacgatacga

SEQ ID NO: 6807 - DNA, 22 bp, Artificial Sequence
  bisulfite treated nucleic acid for analysis of methylation status of SEQ ID NO: 11
ttacggtattagagtaggcggt

SEQ ID NO: 6808 - DNA, 23 bp, Artificial Sequence
  bisulfite treated nucleic acid for analysis of methylation status of SEQ ID NO: 11
gggtaaggcgggcggagcgtatt

SEQ ID NO: 6809 - DNA, 22 bp, Artificial Sequence
  bisulfite treated nucleic acid for analysis of methylation status of SEQ ID NO: 11
gttacggtattagagtaggcgg

SEQ ID NO: 6810 - DNA, 22 bp, Artificial Sequence
  bisulfite treated nucleic acid for analysis of methylation status of SEQ ID NO: 11
tacggtattagagtaggcggtt

SEQ ID NO: 6811 - DNA, 21 bp, Artificial Sequence
  bisulfite treated nucleic acid for analysis of methylation status of SEQ ID NO: 11
aaacgacgaaaaaccactacc

SEQ ID NO: 6812 - DNA, 19 bp, Artificial Sequence
  bisulfite treated nucleic acid for analysis of methylation status of SEQ ID NO: 11
tgttattgtttcggttcgg

SEQ ID NO: 6813 - DNA, 33 bp, Artificial Sequence
  bisulfite treated nucleic acid for analysis of methylation status of SEQ ID NO: 11
tttgttatggttttggcggatagtatacgtgga

SEQ ID NO: 6814 - DNA, 19 bp, Artificial Sequence
  bisulfite treated nucleic acid for analysis of methylation status of SEQ ID NO: 11
aaatcgcgcccttaaactc

SEQ ID NO: 6815 - DNA, 20 bp, Artificial Sequence
  bisulfite treated nucleic acid for analysis of methylation status of SEQ ID NO: 11
ttaaattccaatacgctccg

SEQ ID NO: 6816 - DNA, 19 bp, Artificial Sequence
  bisulfite treated nucleic acid for analysis of methylation status of SEQ ID NO: 11
tagtagtttcgcgtggcgt

SEQ ID NO: 6817 - DNA, 19 bp, Artificial Sequence
  bisulfite treated nucleic acid for analysis of methylation status of SEQ ID NO: 11
gttcggtaagcgaggtttc

SEQ ID NO: 6818 - DNA, 21 bp, Artificial Sequence
  bisulfite treated nucleic acid for analysis of methylation status of SEQ ID NO: 11
cgcgctacactcaaaaactac

SEQ ID NO: 6819 - DNA, 18 bp, Artificial Sequence
  bisulfite treated nucleic acid for analysis of methylation status of SEQ ID NO: 11
tcgtatcgttcggtttcg

SEQ ID NO: 6820 - DNA, 30 bp, Artificial Sequence
  bisulfite treated nucleic acid for analysis of methylation status of SEQ ID NO: 11
ggcggggcgtagggttgagcgagcgttcgg

SEQ ID NO: 6821 - DNA, 20 bp, Artificial Sequence
  bisulfite treated nucleic acid for analysis of methylation status of SEQ ID NO: 11
aagagtgatcgaggtatgcg

SEQ ID NO: 6822 - DNA, 18 bp, Artificial Sequence
  bisulfite treated nucleic acid for analysis of methylation status of SEQ ID NO: 11
aggtgtacgtgattcggc

SEQ ID NO: 6823 - DNA, 37 bp, Artificial Sequence
  bisulfite treated nucleic acid for analysis of methylation status of SEQ ID NO: 11
gttcgcgtttaagatgtaaatcgagttttcgtttttt

SEQ ID NO: 6824 - DNA, 18 bp, Artificial Sequence
  bisulfite treated nucleic acid for analysis of methylation status of SEQ ID NO: 11
gacaccaccgtacaacgc

SEQ ID NO: 6825 - DNA, 22 bp, Artificial Sequence
  bisulfite treated nucleic acid for analysis of methylation status of SEQ ID NO: 11
atacgtggattatttaacgggg

SEQ ID NO: 6826 - DNA, 28 bp, Artificial Sequence
  bisulfite treated nucleic acid for analysis of methylation status of SEQ ID NO: 11
ttcgatatcgtggagttgaacgtggggg

SEQ ID NO: 6827 - DNA, 19 bp, Artificial Sequence
  bisulfite treated nucleic acid for analysis of methylation status of SEQ ID NO: 11
cgtggattatttaacgggg

SEQ ID NO: 6828 - DNA, 19 bp, Artificial Sequence
  bisulfite treated nucleic acid for analysis of methylation status of SEQ ID NO: 11
gcggtagtggtttttcgtc

SEQ ID NO: 6829 - DNA, 20 bp, Artificial Sequence
  nucleic acid for analysis of methylation status of SEQ ID NO: 11
aaaacaacgaatcgaacacc

SEQ ID NO: 6830 - DNA, 20 bp, Artificial Sequence
  bisulfite treated nucleic acid for analysis of methylation status of SEQ ID NO: 11
gtttttcgcggagttatcgt

SEQ ID NO: 6831 - DNA, 24 bp, Artificial Sequence
  bisulfite treated nucleic acid for analysis of methylation status of SEQ ID NO: 11
aattaacgatggtaggtcgtagtt

SEQ ID NO: 6832 - DNA, 19 bp, Artificial Sequence
  bisulfite treated nucleic acid for analysis of methylation status of SEQ ID NO: 11
gttagtagtttcgcgtggc

SEQ ID NO: 6833 - DNA, 19 bp, Artificial Sequence
  bisulfite treated nucleic acid for analysis of methylation status of SEQ ID NO: 11
atcgtggagttgaacgtgg

SEQ ID NO: 6834 - DNA, 18 bp, Artificial Sequence
  bisulfite treated nucleic acid for analysis of methylation status of SEQ ID NO: 11
cgtacaacgccgaatcac

SEQ ID NO: 6835 - DNA, 18 bp, Artificial Sequence
  bisulfite treated nucleic acid for analysis of methylation status of SEQ ID NO: 11
gtacaacgccgaatcacg

SEQ ID NO: 6836 - DNA, 18 bp, Artificial Sequence
  bisulfite treated nucleic acid for analysis of methylation status of SEQ ID NO: 11
tttttgagtgtagcgcgg

SEQ ID NO: 6837 - DNA, 19 bp, Artificial Sequence
  bisulfite treated nucleic acid for analysis of methylation status of SEQ ID NO: 11
taagcgaggtttcgtcgtc

SEQ ID NO: 6838 - DNA, 19 bp, Artificial Sequence
  bisulfite treated nucleic acid for analysis of methylation status of SEQ ID NO: 11
tttttcgcggagttatcgt

SEQ ID NO: 6839 - DNA, 19 bp, Artificial Sequence
  bisulfite treated nucleic acid for analysis of methylation status of SEQ ID NO: 11
ttcgcggagttatcgtttt

SEQ ID NO: 6840 - DNA, 19 bp, Artificial Sequence
  bisulfite treated nucleic acid for analysis of methylation status of SEQ ID NO: 11
ttttcgcggagttatcgtt

SEQ ID NO: 6841 - DNA, 19 bp, Artificial Sequence
  bisulfite treated nucleic acid for analysis of methylation status of SEQ ID NO: 11
cgtttttcgcggagttatc

SEQ ID NO: 6842 - DNA, 17 bp, Artificial Sequence
  bisulfite treated nucleic acid for analysis of methylation status of SEQ ID NO: 11
cgctatacgccccctta

SEQ ID NO: 6843 - DNA, 22 bp, Artificial Sequence
  bisulfite treated nucleic acid for analysis of methylation status of SEQ ID NO: 11
cgcgttacggtattagagtagg

SEQ ID NO: 6844 - DNA, 22 bp, Artificial Sequence
  bisulfite treated nucleic acid for analysis of methylation status of SEQ ID NO: 12
ttatttttgttttcgtcggttc

SEQ ID NO: 6845 - DNA, 22 bp, Artificial Sequence
  bisulfite treated nucleic acid for analysis of methylation status of SEQ ID NO: 12
atacatctcccgaatacgctaa

SEQ ID NO: 6846 - DNA, 21 bp, Artificial Sequence
  bisulfite treated nucleic acid for analysis of methylation status of SEQ ID NO: 12
ttcgcgcgggggatacggggt

SEQ ID NO: 6847 - DNA, 22 bp, Artificial Sequence
  bisulfite treated nucleic acid for analysis of methylation status of SEQ ID NO: 12
aatacatctcccgaatacgcta

SEQ ID NO: 6848 - DNA, 22 bp, Artificial Sequence
  nucleic acid for analysis of methylation status of SEQ ID NO: 12
aatttatttttgttttcgtcgg

SEQ ID NO: 6849 - DNA, 22 bp, Artificial Sequence
  bisulfite treated nucleic acid for analysis of methylation status of SEQ ID NO: 12
aaatacatctcccgaatacgct

SEQ ID NO: 6850 - DNA, 22 bp, Artificial Sequence
  bisulfite treated nucleic acid for analysis of methylation status of SEQ ID NO: 12
atttatttttgttttcgtcggt

SEQ ID NO: 6851 - DNA, 22 bp, Artificial Sequence
  bisulfite treated nucleic acid for analysis of methylation status of SEQ ID NO: 12
tacatctcccgaatacgctaaa

SEQ ID NO: 6852 - DNA, 23 bp, Artificial Sequence
  bisulfite treated nucleic acid for analysis of methylation status of SEQ ID NO: 12
taatttatttttgttttcgtcgg

SEQ ID NO: 6853 - DNA, 21 bp, Artificial Sequence
  bisulfite treated nucleic acid for analysis of methylation status of SEQ ID NO: 12
tacatctcccgaatacgctaa

SEQ ID NO: 6854 - DNA, 21 bp, Artificial Sequence
  bisulfite treated nucleic acid for analysis of methylation status of SEQ ID NO: 12
tttttgagtatcgagtgcgtg

SEQ ID NO: 6855 - DNA, 22 bp, Artificial Sequence
  bisulfite treated nucleic acid for analysis of methylation status of SEQ ID NO: 12
acgacccgaacaaaactaaata

SEQ ID NO: 6856 - DNA, 21 bp, Artificial Sequence
  bisulfite treated nucleic acid for analysis of methylation status of SEQ ID NO: 12
ttcgcggttggcgggtgggga

SEQ ID NO: 6857 - DNA, 20 bp, Artificial Sequence
  bisulfite treated nucleic acid for analysis of methylation status of SEQ ID NO: 12
tttgagtatcgagtgcgtga

SEQ ID NO: 6858 - DNA, 22 bp, Artificial Sequence
  bisulfite treated nucleic acid for analysis of methylation status of SEQ ID NO: 12
cgacccgaacaaaactaaatac

SEQ ID NO: 6859 - DNA, 21 bp, Artificial Sequence
  bisulfite treated nucleic acid for analysis of methylation status of SEQ ID NO: 12
tatttttgttttcgtcggttc

SEQ ID NO: 6860 - DNA, 21 bp, Artificial Sequence
  bisulfite treated nucleic acid for analysis of methylation status of SEQ ID NO: 12
acatctcccgaatacgctaaa

SEQ ID NO: 6861 - DNA, 24 bp, Artificial Sequence
  bisulfite treated nucleic acid for analysis of methylation status of SEQ ID NO: 12
gtaatttatttttgttttcgtcgg

SEQ ID NO: 6862 - DNA, 22 bp, Artificial Sequence
  bisulfite treated nucleic acid for analysis of methylation status of SEQ ID NO: 12
tcgtagagtcggttaaggtgat

SEQ ID NO: 6863 - DNA, 20 bp, Artificial Sequence
  bisulfite treated nucleic acid for analysis of methylation status of SEQ ID NO: 12
cgaatctcaaacattcctcg

SEQ ID NO: 6864 - DNA, 39 bp, Artificial Sequence
  bisulfite treated nucleic acid for analysis of methylation status of SEQ ID NO: 12
ggttgtagtatattagttcggggttgattttttcgtaag

SEQ ID NO: 6865 - DNA, 22 bp, Artificial Sequence
  bisulfite treated nucleic acid for analysis of methylation status of SEQ ID NO: 12
tagtttgtagtttaggcggtcg

SEQ ID NO: 6866 - DNA, 21 bp, Artificial Sequence
  bisulfite treated nucleic acid for analysis of methylation status of SEQ ID NO: 12
cacgcactcgatactcaaaaa

SEQ ID NO: 6867 - DNA, 22 bp, Artificial Sequence
  bisulfite treated nucleic acid for analysis of methylation status of SEQ ID NO: 12
aggaggtacgcggtgcgcgttt

SEQ ID NO: 6868 - DNA, 23 bp, Artificial Sequence
  bisulfite treated nucleic acid for analysis of methylation status of SEQ ID NO: 12
ttagtaatttcggtttttcgttt

SEQ ID NO: 6869 - DNA, 22 bp, Artificial Sequence
  bisulfite treated nucleic acid for analysis of methylation status of SEQ ID NO: 12
tctcccgaatacgctaaaaata

SEQ ID NO: 6870 - DNA, 20 bp, Artificial Sequence
  bisulfite treated nucleic acid for analysis of methylation status of SEQ ID NO: 12
ttgagtatcgagtgcgtgag

SEQ ID NO: 6871 - DNA, 21 bp, Artificial Sequence
  bisulfite treated nucleic acid for analysis of methylation status of SEQ ID NO: 12
tttatttttgttttcgtcggt

SEQ ID NO: 6872 - DNA, 21 bp, Artificial Sequence
  bisulfite treated nucleic acid for analysis of methylation status of SEQ ID NO: 12
ttttgagtatcgagtgcgtga

SEQ ID NO: 6873 - DNA, 20 bp, Artificial Sequence
  bisulfite treated nucleic acid for analysis of methylation status of SEQ ID NO: 12
catctcccgaatacgctaaa

SEQ ID NO: 6874 - DNA, 23 bp, Artificial Sequence
  bisulfite treated nucleic acid for analysis of methylation status of SEQ ID NO: 12
tttagtaatttcggtttttcgtt

SEQ ID NO: 6875 - DNA, 23 bp, Artificial Sequence
  bisulfite treated nucleic acid for analysis of methylation status of SEQ ID NO: 12
ttttagtaatttcggtttttcgt

SEQ ID NO: 6876 - DNA, 20 bp, Artificial Sequence
  bisulfite treated nucleic acid for analysis of methylation status of SEQ ID NO: 12
ggtagtaggaggtacgcggt

SEQ ID NO: 6877 - DNA, 22 bp, Artificial Sequence
  bisulfite treated nucleic acid for analysis of methylation status of SEQ ID NO: 12
gaaacgaatctaaaaacgctca

SEQ ID NO: 6878 - DNA, 30 bp, Artificial Sequence
  bisulfite treated nucleic acid for analysis of methylation status of SEQ ID NO: 12
gtcgcgggattttacggtttggagtagtag

SEQ ID NO: 6879 - DNA, 20 bp, Artificial Sequence
  bisulfite treated nucleic acid for analysis of methylation status of SEQ ID NO: 12
acatctcccgaatacgctaa

SEQ ID NO: 6880 - DNA, 22 bp, Artificial Sequence
  bisulfite treated nucleic acid for analysis of methylation status of SEQ ID NO: 12
tagtaatttcggtttttcgttt

SEQ ID NO: 6881 - DNA, 20 bp, Artificial Sequence
  bisulfite treated nucleic acid for analysis of methylation status of SEQ ID NO: 12
ctcacgcactcgatactcaa

SEQ ID NO: 6882 - DNA, 21 bp, Artificial Sequence
  bisulfite treated nucleic acid for analysis of methylation status of SEQ ID NO: 12
tcacgcactcgatactcaaaa

SEQ ID NO: 6883 - DNA, 19 bp, Artificial Sequence
  bisulfite treated nucleic acid for analysis of methylation status of SEQ ID NO: 12
agaggtcgtttggcgttag

SEQ ID NO: 6884 - DNA, 22 bp, Artificial Sequence
  bisulfite treated nucleic acid for analysis of methylation status of SEQ ID NO: 12
ctataaaatacgcgactccgac

SEQ ID NO: 6885 - DNA, 25 bp, Artificial Sequence
  bisulfite treated nucleic acid for analysis of methylation status of SEQ ID NO: 12
ggtcgtagtcgtcgcgttcggttgg

SEQ ID NO: 6886 - DNA, 22 bp, Artificial Sequence
  bisulfite treated nucleic acid for analysis of methylation status of SEQ ID NO: 12
cgtagagtcggttaaggtgatg

SEQ ID NO: 6887 - DNA, 22 bp, Artificial Sequence
  bisulfite treated nucleic acid for analysis of methylation status of SEQ ID NO: 12
ttagtaatttcggtttttcgtt

SEQ ID NO: 6888 - DNA, 20 bp, Artificial Sequence
  bisulfite treated nucleic acid for analysis of methylation status of SEQ ID NO: 12
gtagtaggaggtacgcggtg

SEQ ID NO: 6889 - DNA, 22 bp, Artificial Sequence
  bisulfite treated nucleic acid for analysis of methylation status of SEQ ID NO: 12
atctcccgaatacgctaaaaat

SEQ ID NO: 6890 - DNA, 22 bp, Artificial Sequence
  bisulfite treated nucleic acid for analysis of methylation status of SEQ ID NO: 12
ttcgtagagtcggttaaggtga

SEQ ID NO: 6891 - DNA, 21 bp, Artificial Sequence
  bisulfite treated nucleic acid for analysis of methylation status of SEQ ID NO: 12
ggtcgggtagtaggaggtacg

SEQ ID NO: 6892 - DNA, 22 bp, Artificial Sequence
  bisulfite treated nucleic acid for analysis of methylation status of SEQ ID NO: 12
aaacgaatctaaaaacgctcac

SEQ ID NO: 6893 - DNA, 22 bp, Artificial Sequence
  bisulfite treated nucleic acid for analysis of methylation status of SEQ ID NO: 12
ctcccgaatacgctaaaaataa

SEQ ID NO: 6894 - DNA, 20 bp, Artificial Sequence
  bisulfite treated nucleic acid for analysis of methylation status of SEQ ID NO: 12
aagaggtcgtttggcgttag

SEQ ID NO: 6895 - DNA, 22 bp, Artificial Sequence
  bisulfite treated nucleic acid for analysis of methylation status of SEQ ID NO: 12
gacgacccgaacaaaactaaat

SEQ ID NO: 6896 - DNA, 20 bp, Artificial Sequence
  bisulfite treated nucleic acid for analysis of methylation status of SEQ ID NO: 12
cggtcgggtagtaggaggta

SEQ ID NO: 6897 - DNA, 20 bp, Artificial Sequence
  bisulfite treated nucleic acid for analysis of methylation status of SEQ ID NO: 12
atttttgttttcgtcggttc

SEQ ID NO: 6898 - DNA, 21 bp, Artificial Sequence
  bisulfite treated nucleic acid for analysis of methylation status of SEQ ID NO: 12
agtttgtagtttaggcggtcg

SEQ ID NO: 6899 - DNA, 25 bp, Artificial Sequence
  nucleic acid for analysis of methylation status of SEQ ID NO: 12
cgtgtaatttatttttgttttcgtc

SEQ ID NO: 6900 - DNA, 20 bp, Artificial Sequence
  bisulfite treated nucleic acid for analysis of methylation status of SEQ ID NO: 12
gtagtttaggcggtcgggta

SEQ ID NO: 6901 - DNA, 22 bp, Artificial Sequence
  bisulfite treated nucleic acid for analysis of methylation status of SEQ ID NO: 12
ttttagtaatttcggtttttcg

SEQ ID NO: 6902 - DNA, 19 bp, Artificial Sequence
  bisulfite treated nucleic acid for analysis of methylation status of SEQ ID NO: 12
ttaggcggtcgggtagtag

SEQ ID NO: 6903 - DNA, 22 bp, Artificial Sequence
  bisulfite treated nucleic acid for analysis of methylation status of SEQ ID NO: 12
aggtacgcggtgcgcgtttcgt

SEQ ID NO: 6904 - DNA, 20 bp, Artificial Sequence
  bisulfite treated nucleic acid for analysis of methylation status of SEQ ID NO: 12
tcgggtagtaggaggtacgc

SEQ ID NO: 6905 - DNA, 20 bp, Artificial Sequence
  bisulfite treated nucleic acid for analysis of methylation status of SEQ ID NO: 12
tagtttaggcggtcgggtag

SEQ ID NO: 6906 - DNA, 20 bp, Artificial Sequence
  bisulfite treated nucleic acid for analysis of methylation status of SEQ ID NO: 12
tttaggcggtcgggtagtag

SEQ ID NO: 6907 - DNA, 21 bp, Artificial Sequence
  bisulfite treated nucleic acid for analysis of methylation status of SEQ ID NO: 12
acgcttaaaatacatctcccg

SEQ ID NO: 6908 - DNA, 21 bp, Artificial Sequence
  bisulfite treated nucleic acid for analysis of methylation status of SEQ ID NO: 12
cgaaacgaatctaaaaacgct

SEQ ID NO: 6909 - DNA, 19 bp, Artificial Sequence
  bisulfite treated nucleic acid for analysis of methylation status of SEQ ID NO: 12
taaaaacgctcacgcactc

SEQ ID NO: 6910 - DNA, 20 bp, Artificial Sequence
  bisulfite treated nucleic acid for analysis of methylation status of SEQ ID NO: 12
agtgcgtgagcgtttttaga

SEQ ID NO: 6911 - DNA, 22 bp, Artificial Sequence
  bisulfite treated nucleic acid for analysis of methylation status of SEQ ID NO: 12
cgatacgaaataccaaaaatca

SEQ ID NO: 6912 - DNA, 19 bp, Artificial Sequence
  bisulfite treated nucleic acid for analysis of methylation status of SEQ ID NO: 12
gaaattatcggttcggtcg

SEQ ID NO: 6913 - DNA, 22 bp, Artificial Sequence
  bisulfite treated nucleic acid for analysis of methylation status of SEQ ID NO: 12
aatctaaaatccgaaaacgaaa

SEQ ID NO: 6914 - DNA, 27 bp, Artificial Sequence
  bisulfite treated nucleic acid for analysis of methylation status of SEQ ID NO: 12
agtttatagggcggggggcgattatgt

SEQ ID NO: 6915 - DNA, 22 bp, Artificial Sequence
  bisulfite treated nucleic acid for analysis of methylation status of SEQ ID NO: 12
aaatctaaaatccgaaaacgaa

SEQ ID NO: 6916 - DNA, 22 bp, Artificial Sequence
  bisulfite treated nucleic acid for analysis of methylation status of SEQ ID NO: 12
aaaatacatctcccgaatacgc

SEQ ID NO: 6917 - DNA, 21 bp, Artificial Sequence
  bisulfite treated nucleic acid for analysis of methylation status of SEQ ID NO: 12
aattaaaaacaaaaccgcgaa

SEQ ID NO: 6918 - DNA, 21 bp, Artificial Sequence
  bisulfite treated nucleic acid for analysis of methylation status of SEQ ID NO: 12
ttttagtcgggttagtcgagc

SEQ ID NO: 6919 - DNA, 23 bp, Artificial Sequence
  bisulfite treated nucleic acid for analysis of methylation status of SEQ ID NO: 12
gaggagcggagcgtcgaggttgg

SEQ ID NO: 6920 - DNA, 21 bp, Artificial Sequence
  bisulfite treated nucleic acid for analysis of methylation status of SEQ ID NO: 12
aaattaaaaacaaaaccgcga

SEQ ID NO: 6921 - DNA, 22 bp, Artificial Sequence
  bisulfite treated nucleic acid for analysis of methylation status of SEQ ID NO: 13
ttaaaacggttatcggaggtag

SEQ ID NO: 6922 - DNA, 22 bp, Artificial Sequence
  bisulfite treated nucleic acid for analysis of methylation status of SEQ ID NO: 13
tactaaacaaaatcccgaaacg

SEQ ID NO: 6923 - DNA, 29 bp, Artificial Sequence
  bisulfite treated nucleic acid for analysis of methylation status of SEQ ID NO: 13
attagtcggtcgagggtcgagtttcgcgg

SEQ ID NO: 6924 - DNA, 22 bp, Artificial Sequence
  bisulfite treated nucleic acid for analysis of methylation status of SEQ ID NO: 13
taggttgttttagtcggtcgtt

SEQ ID NO: 6925 - DNA, 22 bp, Artificial Sequence
  bisulfite treated nucleic acid for analysis of methylation status of SEQ ID NO: 13
tccgataaccgttttaatatcc

SEQ ID NO: 6926 - DNA, 38 bp, Artificial Sequence
  bisulfite treated nucleic acid for analysis of methylation status of SEQ ID NO: 13
gtcgcggcgattggcgataagttattagttatttacga

SEQ ID NO: 6927 - DNA, 22 bp, Artificial Sequence
  bisulfite treated nucleic acid for analysis of methylation status of SEQ ID NO: 13
ttaggttgttttagtcggtcgt

SEQ ID NO: 6928 - DNA, 22 bp, Artificial Sequence
  bisulfite treated nucleic acid for analysis of methylation status of SEQ ID NO: 13
gttaggttgttttagtcggtcg

SEQ ID NO: 6929 - DNA, 23 bp, Artificial Sequence
  bisulfite treated nucleic acid for analysis of methylation status of SEQ ID NO: 13
ctccgataaccgttttaatatcc

SEQ ID NO: 6930 - DNA, 23 bp, Artificial Sequence
  bisulfite treated nucleic acid for analysis of methylation status of SEQ ID NO: 13
cctccgataaccgttttaatatc

SEQ ID NO: 6931 - DNA, 22 bp, Artificial Sequence
  bisulfite treated nucleic acid for analysis of methylation status of SEQ ID NO: 13
tacctccgataaccgttttaat

SEQ ID NO: 6932 - DNA, 23 bp, Artificial Sequence
  bisulfite treated nucleic acid for analysis of methylation status of SEQ ID NO: 13
aaccgttttaatatcctaatcgc

SEQ ID NO: 6933 - DNA, 23 bp, Artificial Sequence
  bisulfite treated nucleic acid for analysis of methylation status of SEQ ID NO: 13
gatattaaaacggttatcggagg

SEQ ID NO: 6934 - DNA, 23 bp, Artificial Sequence
  bisulfite treated nucleic acid for analysis of methylation status of SEQ ID NO: 13
ctacctccgataaccgttttaat

SEQ ID NO: 6935 - DNA, 22 bp, Artificial Sequence
  bisulfite treated nucleic acid for analysis of methylation status of SEQ ID NO: 13
attaaaacggttatcggaggta

SEQ ID NO: 6936 - DNA, 22 bp, Artificial Sequence
  bisulfite treated nucleic acid for analysis of methylation status of SEQ ID NO: 13
ccgttttaatatcctaatcgct

SEQ ID NO: 6937 - DNA, 22 bp, Artificial Sequence
  bisulfite treated nucleic acid for analysis of methylation status of SEQ ID NO: 13
gtatattagtcggtcgagggtc

SEQ ID NO: 6938 - DNA, 27 bp, Artificial Sequence
  bisulfite treated nucleic acid for analysis of methylation status of SEQ ID NO: 13
gtttcgcgggcggtagtaagttttggg

SEQ ID NO: 6939 - DNA, 23 bp, Artificial Sequence
  bisulfite treated nucleic acid for analysis of methylation status of SEQ ID NO: 13
agtatattagtcggtcgagggtc

SEQ ID NO: 6940 - DNA, 22 bp, Artificial Sequence
  bisulfite treated nucleic acid for analysis of methylation status of SEQ ID NO: 13
gttttagtcggtcgttgttgtc

SEQ ID NO: 6941 - DNA, 36 bp, Artificial Sequence
  bisulfite treated nucleic acid for analysis of methylation status of SEQ ID NO: 13
ggcgattggcgataagttattagttatttacgatgg

SEQ ID NO: 6942 - DNA, 22 bp, Artificial Sequence
  bisulfite treated nucleic acid for analysis of methylation status of SEQ ID NO: 13
accgttttaatatcctaatcgc

SEQ ID NO: 6943 - DNA, 22 bp, Artificial Sequence
  bisulfite treated nucleic acid for analysis of methylation status of SEQ ID NO: 13
taaaacggttatcggaggtagg

SEQ ID NO: 6944 - DNA, 22 bp, Artificial Sequence
  bisulfite treated nucleic acid for analysis of methylation status of SEQ ID NO: 13
ccgataaccgttttaatatcct

SEQ ID NO: 6945 - DNA, 21 bp, Artificial Sequence
  bisulfite treated nucleic acid for analysis of methylation status of SEQ ID NO: 13
actaaacaaaatcccgaaacg

SEQ ID NO: 6946 - DNA, 22 bp, Artificial Sequence
  bisulfite treated nucleic acid for analysis of methylation status of SEQ ID NO: 13
atattaaaacggttatcggagg

SEQ ID NO: 6947 - DNA, 21 bp, Artificial Sequence
  bisulfite treated nucleic acid for analysis of methylation status of SEQ ID NO: 13
ttttagtcggtcgttgttgtc

SEQ ID NO: 6948 - DNA, 21 bp, Artificial Sequence
  nucleic acid for analysis of methylation status of SEQ ID NO: 13
aggttgttttagtcggtcgtt

SEQ ID NO: 6949 - DNA, 21 bp, Artificial Sequence
  bisulfite treated nucleic acid for analysis of methylation status of SEQ ID NO: 13
aaacggttatcggaggtaggt

SEQ ID NO: 6950 - DNA, 24 bp, Artificial Sequence
  bisulfite treated nucleic acid for analysis of methylation status of SEQ ID NO: 13
taaccgttttaatatcctaatcgc

SEQ ID NO: 6951 - DNA, 23 bp, Artificial Sequence
  bisulfite treated nucleic acid for analysis of methylation status of SEQ ID NO: 13
tattaaaacggttatcggaggta

SEQ ID NO: 6952 - DNA, 21 bp, Artificial Sequence
  bisulfite treated nucleic acid for analysis of methylation status of SEQ ID NO: 13
acctccgataaccgttttaat

SEQ ID NO: 6953 - DNA, 21 bp, Artificial Sequence
  bisulfite treated nucleic acid for analysis of methylation status of SEQ ID NO: 13
ttgttttagtcggtcgttgtt

SEQ ID NO: 6954 - DNA, 21 bp, Artificial Sequence
  bisulfite treated nucleic acid for analysis of methylation status of SEQ ID NO: 13
tgttttagtcggtcgttgttg

SEQ ID NO: 6955 - DNA, 21 bp, Artificial Sequence
  bisulfite treated nucleic acid for analysis of methylation status of SEQ ID NO: 13
aaaacggttatcggaggtagg

SEQ ID NO: 6956 - DNA, 21 bp, Artificial Sequence
  bisulfite treated nucleic acid for analysis of methylation status of SEQ ID NO: 13
ctaaacaaaatcccgaaacga

SEQ ID NO: 6957 - DNA, 20 bp, Artificial Sequence
  bisulfite treated nucleic acid for analysis of methylation status of SEQ ID NO: 13
taaacaaaatcccgaaacga

SEQ ID NO: 6958 - DNA, 23 bp, Artificial Sequence
  bisulfite treated nucleic acid for analysis of methylation status of SEQ ID NO: 13
ctactaaacaaaatcccgaaacg

SEQ ID NO: 6959 - DNA, 20 bp, Artificial Sequence
  bisulfite treated nucleic acid for analysis of methylation status of SEQ ID NO: 13
aacggttatcggaggtaggt

SEQ ID NO: 6960 - DNA, 21 bp, Artificial Sequence
  bisulfite treated nucleic acid for analysis of methylation status of SEQ ID NO: 13
atcgcttactcttcttcgcct

SEQ ID NO: 6961 - DNA, 23 bp, Artificial Sequence
  bisulfite treated nucleic acid for analysis of methylation status of SEQ ID NO: 13
ggatattaaaacggttatcggag

SEQ ID NO: 6962 - DNA, 22 bp, Artificial Sequence
  bisulfite treated nucleic acid for analysis of methylation status of SEQ ID NO: 13
actaaacaaaatcccgaaacga

SEQ ID NO: 6963 - DNA, 20 bp, Artificial Sequence
  bisulfite treated nucleic acid for analysis of methylation status of SEQ ID NO: 13
acaaaatcccgaaacgaaat

SEQ ID NO: 6964 - DNA, 22 bp, Artificial Sequence
  bisulfite treated nucleic acid for analysis of methylation status of SEQ ID NO: 13
tattaaaacggttatcggaggt

SEQ ID NO: 6965 - DNA, 21 bp, Artificial Sequence
  bisulfite treated nucleic acid for analysis of methylation status of SEQ ID NO: 13
gttgttttagtcggtcgttgt

SEQ ID NO: 6966 - DNA, 21 bp, Artificial Sequence
  bisulfite treated nucleic acid for analysis of methylation status of SEQ ID NO: 13
aacaaaatcccgaaacgaaat

SEQ ID NO: 6967 - DNA, 25 bp, Artificial Sequence
  bisulfite treated nucleic acid for analysis of methylation status of SEQ ID NO: 13
ataaccgttttaatatcctaatcgc

SEQ ID NO: 6968 - DNA, 21 bp, Artificial Sequence
  bisulfite treated nucleic acid for analysis of methylation status of SEQ ID NO: 13
ggttgttttagtcggtcgttg

SEQ ID NO: 6969 - DNA, 21 bp, Artificial Sequence
  nucleic acid for analysis of methylation status of SEQ ID NO: 13
tatattagtcggtcgagggtc

SEQ ID NO: 6970 - DNA, 19 bp, Artificial Sequence
  bisulfite treated nucleic acid for analysis of methylation status of SEQ ID NO: 13
tcgcttactcttcttcgcc

SEQ ID NO: 6971 - DNA, 20 bp, Artificial Sequence
  bisulfite treated nucleic acid for analysis of methylation status of SEQ ID NO: 13
cgcttactcttcttcgcctc

SEQ ID NO: 6972 - DNA, 23 bp, Artificial Sequence
  bisulfite treated nucleic acid for analysis of methylation status of SEQ ID NO: 13
aagcgattaggatattaaaacgg

SEQ ID NO: 6973 - DNA, 21 bp, Artificial Sequence
  bisulfite treated nucleic acid for analysis of methylation status of SEQ ID NO: 13
ttaggttgttttagtcggtcg

SEQ ID NO: 6974 - DNA, 19 bp, Artificial Sequence
  bisulfite treated nucleic acid for analysis of methylation status of SEQ ID NO: 13
aaacaaaatcccgaaacga

SEQ ID NO: 6975 - DNA, 20 bp, Artificial Sequence
  bisulfite treated nucleic acid for analysis of methylation status of SEQ ID NO: 13
aatcgcttactcttcttcgc

SEQ ID NO: 6976 - DNA, 22 bp, Artificial Sequence
  bisulfite treated nucleic acid for analysis of methylation status of SEQ ID NO: 13
atagaagatcgaaaggtgtcgg

SEQ ID NO: 6977 - DNA, 24 bp, Artificial Sequence
  bisulfite treated nucleic acid for analysis of methylation status of SEQ ID NO: 13
cgaaaaataaaacgtaccaatctt

SEQ ID NO: 6978 - DNA, 35 bp, Artificial Sequence
  bisulfite treated nucleic acid for analysis of methylation status of SEQ ID NO: 13
ttcgggttttagtagggttaagtcgttatagtgtg

SEQ ID NO: 6979 - DNA, 22 bp, Artificial Sequence
  bisulfite treated nucleic acid for analysis of methylation status of SEQ ID NO: 13
agcgattaggatattaaaacgg

SEQ ID NO: 6980 - DNA, 19 bp, Artificial Sequence
  bisulfite treated nucleic acid for analysis of methylation status of SEQ ID NO: 13
ccgaaaaataccgaacgac

SEQ ID NO: 6981 - DNA, 22 bp, Artificial Sequence
  bisulfite treated nucleic acid for analysis of methylation status of SEQ ID NO: 13
tacggagagtagggcgtattag

SEQ ID NO: 6982 - DNA, 33 bp, Artificial Sequence
  bisulfite treated nucleic acid for analysis of methylation status of SEQ ID NO: 13
tattgtggcggtttagttttgttggagttcgga

SEQ ID NO: 6983 - DNA, 22 bp, Artificial Sequence
  bisulfite treated nucleic acid for analysis of methylation status of SEQ ID NO: 3
gacgtttgtcggttagaggtag

SEQ ID NO: 6984 - DNA, 22 bp, Artificial Sequence
  bisulfite treated nucleic acid for analysis of methylation status of SEQ ID NO: 3
aaaatctaaaacttccgctcgt

SEQ ID NO: 6985 - DNA, 35 bp, Artificial Sequence
  bisulfite treated nucleic acid for analysis of methylation status of SEQ ID NO: 3
agtttggtaggcgagtttaaattcggaaagatagt

SEQ ID NO: 6986 - DNA, 22 bp, Artificial Sequence
  bisulfite treated nucleic acid for analysis of methylation status of SEQ ID NO: 3
ttttagttatgttagcggcgac

SEQ ID NO: 6987 - DNA, 22 bp, Artificial Sequence
  bisulfite treated nucleic acid for analysis of methylation status of SEQ ID NO: 3
aaaaactacgacctaaacgcaa

SEQ ID NO: 6988 - DNA, 25 bp, Artificial Sequence
  bisulfite treated nucleic acid for analysis of methylation status of SEQ ID NO: 3
ttcggcgcgtcgttaggatggtcga

SEQ ID NO: 6989 - DNA, 22 bp, Artificial Sequence
  bisulfite treated nucleic acid for analysis of methylation status of SEQ ID NO: 3
aaatctaaaacttccgctcgta

SEQ ID NO: 6990 - DNA, 22 bp, Artificial Sequence
  bisulfite treated nucleic acid for analysis of methylation status of SEQ ID NO: 3
ctaaaacttccgctcgtaattc

SEQ ID NO: 6991 - DNA, 22 bp, Artificial Sequence
  bisulfite treated nucleic acid for analysis of methylation status of SEQ ID NO: 3
aaaactacgacctaaacgcaac

SEQ ID NO: 6992 - DNA, 22 bp, Artificial Sequence
  bisulfite treated nucleic acid for analysis of methylation status of SEQ ID NO: 3
atttgtagttcggacgtttgtc

SEQ ID NO: 6993 - DNA, 22 bp, Artificial Sequence
  bisulfite treated nucleic acid for analysis of methylation status of SEQ ID NO: 3
cgctcgtaattcctcttaaact

SEQ ID NO: 6994 - DNA, 42 bp, Artificial Sequence
  bisulfite treated nucleic acid for analysis of methylation status of SEQ ID NO: 3
gtagcgggaattttgtatatagtttggtaggcgagtttaaat

SEQ ID NO: 6995 - DNA, 22 bp, Artificial Sequence
  bisulfite treated nucleic acid for analysis of methylation status of SEQ ID NO: 3
ttgatcgttgagtagtagcgag

SEQ ID NO: 6996 - DNA, 22 bp, Artificial Sequence
  bisulfite treated nucleic acid for analysis of methylation status of SEQ ID NO: 3
atcgacaaaataaaatacgcga

SEQ ID NO: 6997 - DNA, 38 bp, Artificial Sequence
  bisulfite treated nucleic acid for analysis of methylation status of SEQ ID NO: 3
ttcgttcgtggagtcgtatatacgttttttattagagg

SEQ ID NO: 6998 - DNA, 23 bp, Artificial Sequence
  bisulfite treated nucleic acid for analysis of methylation status of SEQ ID NO: 3
tggtagaattttcgtttgttacg

SEQ ID NO: 6999 - DNA, 22 bp, Artificial Sequence
  bisulfite treated nucleic acid for analysis of methylation status of SEQ ID NO: 3
gaacgcaactacgccttaatac

SEQ ID NO: 7000 - DNA, 33 bp, Artificial Sequence
  bisulfite treated nucleic acid for analysis of methylation status of SEQ ID NO: 3
gaggttcgggttcgattttcggtttatgtagta

SEQ ID NO: 7001 - DNA, 23 bp, Artificial Sequence
  bisulfite treated nucleic acid for analysis of methylation status of SEQ ID NO: 3
aatctaaaacttccgctcgtaat

SEQ ID NO: 7002 - DNA, 21 bp, Artificial Sequence
  bisulfite treated nucleic acid for analysis of methylation status of SEQ ID NO: 3
gcggtagagaaagcgtaagat

SEQ ID NO: 7003 - DNA, 22 bp, Artificial Sequence
  bisulfite treated nucleic acid for analysis of methylation status of SEQ ID NO: 3
actaacccgataaaacgaacaa

SEQ ID NO: 7004 - DNA, 31 bp, Artificial Sequence
  bisulfite treated nucleic acid for analysis of methylation status of SEQ ID NO: 3
ttcgttttaggtttttcgacgtgacgagagt

SEQ ID NO: 7005 - DNA, 22 bp, Artificial Sequence
  bisulfite treated nucleic acid for analysis of methylation status of SEQ ID NO: 3
aactaacccgataaaacgaaca

SEQ ID NO: 7006 - DNA, 21 bp, Artificial Sequence
  bisulfite treated nucleic acid for analysis of methylation status of SEQ ID NO: 3
tcgtcggttgtcgtagaaata

SEQ ID NO: 7007 - DNA, 22 bp, Artificial Sequence
  bisulfite treated nucleic acid for analysis of methylation status of SEQ ID NO: 3
aaaacgtctatccgaaaaacaa

SEQ ID NO: 7008 - DNA, 33 bp, Artificial Sequence
  bisulfite treated nucleic acid for analysis of methylation status of SEQ ID NO: 3
tttaggattatgcgttagcgttcgcgatttttt

SEQ ID NO: 7009 - DNA, 22 bp, Artificial Sequence
  bisulfite treated nucleic acid for analysis of methylation status of SEQ ID NO: 3
ctaacccgataaaacgaacaaa

SEQ ID NO: 7010 - DNA, 22 bp, Artificial Sequence
  bisulfite treated nucleic acid for analysis of methylation status of SEQ ID NO: 3
cacgaaaaactaacccgataaa

SEQ ID NO: 7011 - DNA, 22 bp, Artificial Sequence
  bisulfite treated nucleic acid for analysis of methylation status of SEQ ID NO: 3
attacaacgtccacgaaaaact

SEQ ID NO: 7012 - DNA, 22 bp, Artificial Sequence
  bisulfite treated nucleic acid for analysis of methylation status of SEQ ID NO: 3
gaaaatctaaaacttccgctcg

SEQ ID NO: 7013 - DNA, 22 bp, Artificial Sequence
  nucleic acid for analysis of methylation status of SEQ ID NO: 3
tgtaataggacggaggtttacg

SEQ ID NO: 7014 - DNA, 21 bp, Artificial Sequence
  bisulfite treated nucleic acid for analysis of methylation status of SEQ ID NO: 3
ccaacgaaaactaacacaacg

SEQ ID NO: 7015 - DNA, 22 bp, Artificial Sequence
  bisulfite treated nucleic acid for analysis of methylation status of SEQ ID NO: 3
agtgaacggcggttggtggcga

SEQ ID NO: 7016 - DNA, 22 bp, Artificial Sequence
  bisulfite treated nucleic acid for analysis of methylation status of SEQ ID NO: 3
ccgctcgtaattcctcttaaac

SEQ ID NO: 7017 - DNA, 22 bp, Artificial Sequence
  bisulfite treated nucleic acid for analysis of methylation status of SEQ ID NO: 3
gtttatcgttttgaatcgtcgt

SEQ ID NO: 7018 - DNA, 21 bp, Artificial Sequence
  bisulfite treated nucleic acid for analysis of methylation status of SEQ ID NO: 3
aacgaatcgctcgctactact

SEQ ID NO: 7019 - DNA, 30 bp, Artificial Sequence
  bisulfite treated nucleic acid for analysis of methylation status of SEQ ID NO: 3
aggcgttttggtttgaatagttcgttcggt

SEQ ID NO: 7020 - DNA, 23 bp, Artificial Sequence
  bisulfite treated nucleic acid for analysis of methylation status of SEQ ID NO: 3
cgtaacaaacgaaaattctacca

SEQ ID NO: 7021 - DNA, 28 bp, Artificial Sequence
  bisulfite treated nucleic acid for analysis of methylation status of SEQ ID NO: 3
ggttggtggcgagtttcgttgtgttagt

SEQ ID NO: 7022 - DNA, 22 bp, Artificial Sequence
  bisulfite treated nucleic acid for analysis of methylation status of SEQ ID NO: 3
ttgtcggtttatttgtagttcg

SEQ ID NO: 7023 - DNA, 22 bp, Artificial Sequence
  bisulfite treated nucleic acid for analysis of methylation status of SEQ ID NO: 3
cgcgtaacaaacgaaaattcta

SEQ ID NO: 7024 - DNA, 22 bp, Artificial Sequence
  bisulfite treated nucleic acid for analysis of methylation status of SEQ ID NO: 3
tgtcggtttatttgtagttcgg

SEQ ID NO: 7025 - DNA, 22 bp, Artificial Sequence
  bisulfite treated nucleic acid for analysis of methylation status of SEQ ID NO: 3
aaataaaatacgcgaccgaaat

SEQ ID NO: 7026 - DNA, 22 bp, Artificial Sequence
  bisulfite treated nucleic acid for analysis of methylation status of SEQ ID NO: 3
atctaaaacttccgctcgtaat

SEQ ID NO: 7027 - DNA, 22 bp, Artificial Sequence
  bisulfite treated nucleic acid for analysis of methylation status of SEQ ID NO: 3
ttttgatcgttgagtagtagcg

SEQ ID NO: 7028 - DNA, 22 bp, Artificial Sequence
  bisulfite treated nucleic acid for analysis of methylation status of SEQ ID NO: 3
tacaacgtccacgaaaaactaa

SEQ ID NO: 7029 - DNA, 22 bp, Artificial Sequence
  bisulfite treated nucleic acid for analysis of methylation status of SEQ ID NO: 3
ttacaacgtccacgaaaaacta

SEQ ID NO: 7030 - DNA, 21 bp, Artificial Sequence
  bisulfite treated nucleic acid for analysis of methylation status of SEQ ID NO: 3
ttacggtaggcggtgattagt

SEQ ID NO: 7031 - DNA, 22 bp, Artificial Sequence
  bisulfite treated nucleic acid for analysis of methylation status of SEQ ID NO: 3
tacataaaccgaaaatcgaacc

SEQ ID NO: 7032 - DNA, 22 bp, Artificial Sequence
  bisulfite treated nucleic acid for analysis of methylation status of SEQ ID NO: 3
ttcgtcggttgtcgtagaaata

SEQ ID NO: 7033 - DNA, 22 bp, Artificial Sequence
  bisulfite treated nucleic acid for analysis of methylation status of SEQ ID NO: 3
taacccgataaaacgaacaaaa

SEQ ID NO: 7034 - DNA, 21 bp, Artificial Sequence
  bisulfite treated nucleic acid for analysis of methylation status of SEQ ID NO: 3
ataaaatacgcgaccgaaatc

SEQ ID NO: 7035 - DNA, 22 bp, Artificial Sequence
  bisulfite treated nucleic acid for analysis of methylation status of SEQ ID NO: 3
tcgacaaaataaaatacgcgac

SEQ ID NO: 7036 - DNA, 23 bp, Artificial Sequence
  bisulfite treated nucleic acid for analysis of methylation status of SEQ ID NO: 3
tttgtcggtttatttgtagttcg

SEQ ID NO: 7037 - DNA, 21 bp, Artificial Sequence
  bisulfite treated nucleic acid for analysis of methylation status of SEQ ID NO: 3
tttagttatgttagcggcgac

SEQ ID NO: 7038 - DNA, 21 bp, Artificial Sequence
  bisulfite treated nucleic acid for analysis of methylation status of SEQ ID NO: 3
aataaaatacgcgaccgaaat

SEQ ID NO: 7039 - DNA, 21 bp, Artificial Sequence
  bisulfite treated nucleic acid for analysis of methylation status of SEQ ID NO: 3
acgaatcgctcgctactactc

SEQ ID NO: 7040 - DNA, 22 bp, Artificial Sequence
  bisulfite treated nucleic acid for analysis of methylation status of SEQ ID NO: 3
ttatttgtagttcggacgtttg

SEQ ID NO: 7041 - DNA, 23 bp, Artificial Sequence
  bisulfite treated nucleic acid for analysis of methylation status of SEQ ID NO: 3
tctaaaacttccgctcgtaattc

SEQ ID NO: 7042 - DNA, 22 bp, Artificial Sequence
  bisulfite treated nucleic acid for analysis of methylation status of SEQ ID NO: 3
cttccgctcgtaattcctctta

SEQ ID NO: 7043 - DNA, 20 bp, Artificial Sequence
  bisulfite treated nucleic acid for analysis of methylation status of SEQ ID NO: 3
aacttccgctcgtaattcct

SEQ ID NO: 7044 - DNA, 21 bp, Artificial Sequence
  bisulfite treated nucleic acid for analysis of methylation status of SEQ ID NO: 3
ttccgctcgtaattcctctta

SEQ ID NO: 7045 - DNA, 22 bp, Artificial Sequence
  bisulfite treated nucleic acid for analysis of methylation status of SEQ ID NO: 3
aaaactaacccgataaaacgaa

SEQ ID NO: 7046 - DNA, 22 bp, Artificial Sequence
  bisulfite treated nucleic acid for analysis of methylation status of SEQ ID NO: 3
aaaaactaacccgataaaacga

SEQ ID NO: 7047 - DNA, 22 bp, Artificial Sequence
  bisulfite treated nucleic acid for analysis of methylation status of SEQ ID NO: 3
cgaaaaactaacccgataaaac

SEQ ID NO: 7048 - DNA, 22 bp, Artificial Sequence
  bisulfite treated nucleic acid for analysis of methylation status of SEQ ID NO: 3
acgaaaaactaacccgataaaa

SEQ ID NO: 7049 - DNA, 22 bp, Artificial Sequence
  bisulfite treated nucleic acid for analysis of methylation status of SEQ ID NO: 3
gaaaaactaacccgataaaacg

SEQ ID NO: 7050 - DNA, 22 bp, Artificial Sequence
  bisulfite treated nucleic acid for analysis of methylation status of SEQ ID NO: 3
gtagaattttcgtttgttacgc

SEQ ID NO: 7051 - DNA, 21 bp, Artificial Sequence
  bisulfite treated nucleic acid for analysis of methylation status of SEQ ID NO: 3
cgacaaaataaaatacgcgac

SEQ ID NO: 7052 - DNA, 23 bp, Artificial Sequence
  bisulfite treated nucleic acid for analysis of methylation status of SEQ ID NO: 3
ggtagaattttcgtttgttacgc

SEQ ID NO: 7053 - DNA, 22 bp, Artificial Sequence
  bisulfite treated nucleic acid for analysis of methylation status of SEQ ID NO: 3
ctattacaacgtccacgaaaaa

SEQ ID NO: 7054 - DNA, 22 bp, Artificial Sequence
  bisulfite treated nucleic acid for analysis of methylation status of SEQ ID NO: 3
gtcctattacaacgtccacgaa

SEQ ID NO: 7055 - DNA, 22 bp, Artificial Sequence
  bisulfite treated nucleic acid for analysis of methylation status of SEQ ID NO: 3
gtaataggacggaggtttacgg

SEQ ID NO: 7056 - DNA, 21 bp, Artificial Sequence
  bisulfite treated nucleic acid for analysis of methylation status of SEQ ID NO: 3
tttgtagttcggacgtttgtc

SEQ ID NO: 7057 - DNA, 22 bp, Artificial Sequence
  bisulfite treated nucleic acid for analysis of methylation status of SEQ ID NO: 3
cctattacaacgtccacgaaaa

SEQ ID NO: 7058 - DNA, 22 bp, Artificial Sequence
  bisulfite treated nucleic acid for analysis of methylation status of SEQ ID NO: 3
acgtttgtcggttagaggtagc

SEQ ID NO: 7059 - DNA, 22 bp, Artificial Sequence
  bisulfite treated nucleic acid for analysis of methylation status of SEQ ID NO: 3
acgttgtaataggacggaggtt

SEQ ID NO: 7060 - DNA, 23 bp, Artificial Sequence
  bisulfite treated nucleic acid for analysis of methylation status of SEQ ID NO: 3
tatttgtagttcggacgtttgtc

SEQ ID NO: 7061 - DNA, 20 bp, Artificial Sequence
  bisulfite treated nucleic acid for analysis of methylation status of SEQ ID NO: 3
cgaatcgctcgctactactc

SEQ ID NO: 7062 - DNA, 21 bp, Artificial Sequence
  bisulfite treated nucleic acid for analysis of methylation status of SEQ ID NO: 3
cgaaaatctaaaacttccgct

SEQ ID NO: 7063 - DNA, 21 bp, Artificial Sequence
  bisulfite treated nucleic acid for analysis of methylation status of SEQ ID NO: 3
aaaataaaatacgcgaccgaa

SEQ ID NO: 7064 - DNA, 23 bp, Artificial Sequence
  bisulfite treated nucleic acid for analysis of methylation status of SEQ ID NO: 3
tttatttgtagttcggacgtttg

SEQ ID NO: 7065 - DNA, 21 bp, Artificial Sequence
  bisulfite treated nucleic acid for analysis of methylation status of SEQ ID NO: 3
aaacttccgctcgtaattcct

SEQ ID NO: 7066 - DNA, 21 bp, Artificial Sequence
  bisulfite treated nucleic acid for analysis of methylation status of SEQ ID NO: 3
tcctattacaacgtccacgaa

SEQ ID NO: 7067 - DNA, 22 bp, Artificial Sequence
  bisulfite treated nucleic acid for analysis of methylation status of SEQ ID NO: 3
agtttaagaggaattacgagcg

SEQ ID NO: 7068 - DNA, 22 bp, Artificial Sequence
  bisulfite treated nucleic acid for analysis of methylation status of SEQ ID NO: 3
ataactaaaacgacccaaaccg

SEQ ID NO: 7069 - DNA, 42 bp, Artificial Sequence
  bisulfite treated nucleic acid for analysis of methylation status of SEQ ID NO: 3
ttcgtcgggattagttttgcgttatagcgtatttttacgcgg

SEQ ID NO: 7070 - DNA, 21 bp, Artificial Sequence
  bisulfite treated nucleic acid for analysis of methylation status of SEQ ID NO: 3
aacgtccacgaaaaactaacc

SEQ ID NO: 7071 - DNA, 22 bp, Artificial Sequence
  bisulfite treated nucleic acid for analysis of methylation status of SEQ ID NO: 3
tattacaacgtccacgaaaaac

SEQ ID NO: 7072 - DNA, 21 bp, Artificial Sequence
  bisulfite treated nucleic acid for analysis of methylation status of SEQ ID NO: 3
cggtagagaaagcgtaagatg

SEQ ID NO: 7073 - DNA, 22 bp, Artificial Sequence
  bisulfite treated nucleic acid for analysis of methylation status of SEQ ID NO: 3
acaacgtccacgaaaaactaac

SEQ ID NO: 7074 - DNA, 21 bp, Artificial Sequence
  bisulfite treated nucleic acid for analysis of methylation status of SEQ ID NO: 3
ttttatcggtttgcgtttatc

SEQ ID NO: 7075 - DNA, 22 bp, Artificial Sequence
  bisulfite treated nucleic acid for analysis of methylation status of SEQ ID NO: 3
gaatcgctcgctactactcaac

SEQ ID NO: 7076 - DNA, 23 bp, Artificial Sequence
  bisulfite treated nucleic acid for analysis of methylation status of SEQ ID NO: 3
gttttagttatgttagcggcgac

SEQ ID NO: 7077 - DNA, 22 bp, Artificial Sequence
  nucleic acid for analysis of methylation status of SEQ ID NO: 3
ggattcgcgtttagtaaggttc

SEQ ID NO: 7078 - DNA, 21 bp, Artificial Sequence
  bisulfite treated nucleic acid for analysis of methylation status of SEQ ID NO: 3
atcttacgctttctctaccgc

SEQ ID NO: 7079 - DNA, 22 bp, Artificial Sequence
  bisulfite treated nucleic acid for analysis of methylation status of SEQ ID NO: 3
ttcgggcgcgggttacggtcgg

SEQ ID NO: 7080 - DNA, 23 bp, Artificial Sequence
  bisulfite treated nucleic acid for analysis of methylation status of SEQ ID NO: 3
tatcgacaaaataaaatacgcga

SEQ ID NO: 7081 - DNA, 22 bp, Artificial Sequence
  bisulfite treated nucleic acid for analysis of methylation status of SEQ ID NO: 3
atatacgactccacgaacgaat

SEQ ID NO: 7082 - DNA, 20 bp, Artificial Sequence
  bisulfite treated nucleic acid for analysis of methylation status of SEQ ID NO: 3
acgccaacgaaaactaacac

SEQ ID NO: 7083 - DNA, 21 bp, Artificial Sequence
  bisulfite treated nucleic acid for analysis of methylation status of SEQ ID NO: 3
aacgccaacgaaaactaacac

SEQ ID NO: 7084 - DNA, 21 bp, Artificial Sequence
  bisulfite treated nucleic acid for analysis of methylation status of SEQ ID NO: 3
taataggacggaggtttacgg

SEQ ID NO: 7085 - DNA, 23 bp, Artificial Sequence
  bisulfite treated nucleic acid for analysis of methylation status of SEQ ID NO: 3
tttgatcgttgagtagtagcgag

SEQ ID NO: 7086 - DNA, 22 bp, Artificial Sequence
  bisulfite treated nucleic acid for analysis of methylation status of SEQ ID NO: 3
attcgcgtttagtaaggttcgt

SEQ ID NO: 7087 - DNA, 21 bp, Artificial Sequence
  bisulfite treated nucleic acid for analysis of methylation status of SEQ ID NO: 3
cgttgtaataggacggaggtt

SEQ ID NO: 7088 - DNA, 21 bp, Artificial Sequence
  bisulfite treated nucleic acid for analysis of methylation status of SEQ ID NO: 3
cgtttgtcggttagaggtagc

SEQ ID NO: 7089 - DNA, 21 bp, Artificial Sequence
  bisulfite treated nucleic acid for analysis of methylation status of SEQ ID NO: 3
ttcgtggacgttgtaatagga

SEQ ID NO: 7090 - DNA, 23 bp, Artificial Sequence
  bisulfite treated nucleic acid for analysis of methylation status of SEQ ID NO: 3
ttatttgtagttcggacgtttgt

SEQ ID NO: 7091 - DNA, 22 bp, Artificial Sequence
  bisulfite treated nucleic acid for analysis of methylation status of SEQ ID NO: 3
cgcgtttagtaaggttcgttat

SEQ ID NO: 7092 - DNA, 21 bp, Artificial Sequence
  bisulfite treated nucleic acid for analysis of methylation status of SEQ ID NO: 3
catcttacgctttctctaccg

SEQ ID NO: 7093 - DNA, 20 bp, Artificial Sequence
  bisulfite treated nucleic acid for analysis of methylation status of SEQ ID NO: 3
actacgacctaaacgcaacg

SEQ ID NO: 7094 - DNA, 21 bp, Artificial Sequence
  bisulfite treated nucleic acid for analysis of methylation status of SEQ ID NO: 3
acttccgctcgtaattcctct

SEQ ID NO: 7095 - DNA, 20 bp, Artificial Sequence
  bisulfite treated nucleic acid for analysis of methylation status of SEQ ID NO: 3
tccgctcgtaattcctctta

SEQ ID NO: 7096 - DNA, 21 bp, Artificial Sequence
  bisulfite treated nucleic acid for analysis of methylation status of SEQ ID NO: 3
gtttgtcggttagaggtagcg

SEQ ID NO: 7097 - DNA, 21 bp, Artificial Sequence
  bisulfite treated nucleic acid for analysis of methylation status of SEQ ID NO: 3
gtttttcgacgtgacgagagt

SEQ ID NO: 7098 - DNA, 22 bp, Artificial Sequence
  bisulfite treated nucleic acid for analysis of methylation status of SEQ ID NO: 3
cgtaaacctccgtcctattaca

SEQ ID NO: 7099 - DNA, 33 bp, Artificial Sequence
  bisulfite treated nucleic acid for analysis of methylation status of SEQ ID NO: 3
gttcgttttatcgggttagtttttcgtggacgt

SEQ ID NO: 7100 - DNA, 23 bp, Artificial Sequence
  bisulfite treated nucleic acid for analysis of methylation status of SEQ ID NO: 3
tttttgatcgttgagtagtagcg

SEQ ID NO: 7101 - DNA, 22 bp, Artificial Sequence
  bisulfite treated nucleic acid for analysis of methylation status of SEQ ID NO: 3
taacaaacgccaacgaaaacta

SEQ ID NO: 7102 - DNA, 21 bp, Artificial Sequence
  bisulfite treated nucleic acid for analysis of methylation status of SEQ ID NO: 3
tttaagaggaattacgagcgg

SEQ ID NO: 7103 - DNA, 23 bp, Artificial Sequence
  bisulfite treated nucleic acid for analysis of methylation status of SEQ ID NO: 3
cgcgctaaatataactaaaacga

SEQ ID NO: 7104 - DNA, 27 bp, Artificial Sequence
  bisulfite treated nucleic acid for analysis of methylation status of SEQ ID NO: 3
agcgtatttttacgcgggaagtcgcgg

SEQ ID NO: 7105 - DNA, 22 bp, Artificial Sequence
  bisulfite treated nucleic acid for analysis of methylation status of SEQ ID NO: 3
aaactaacccgataaaacgaac

SEQ ID NO: 7106 - DNA, 21 bp, Artificial Sequence
  bisulfite treated nucleic acid for analysis of methylation status of SEQ ID NO: 3
acataaaccgaaaatcgaacc

SEQ ID NO: 7107 - DNA, 21 bp, Artificial Sequence
  bisulfite treated nucleic acid for analysis of methylation status of SEQ ID NO: 3
acaaaataaaatacgcgaccg

SEQ ID NO: 7108 - DNA, 20 bp, Artificial Sequence
  bisulfite treated nucleic acid for analysis of methylation status of SEQ ID NO: 3
atacaccgataacaaacgcc

SEQ ID NO: 7109 - DNA, 20 bp, Artificial Sequence
  bisulfite treated nucleic acid for analysis of methylation status of SEQ ID NO: 3
ttttcgacgtgacgagagtt

SEQ ID NO: 7110 - DNA, 20 bp, Artificial Sequence
  bisulfite treated nucleic acid for analysis of methylation status of SEQ ID NO: 3
tttttcgacgtgacgagagt

SEQ ID NO: 7111 - DNA, 21 bp, Artificial Sequence
  bisulfite treated nucleic acid for analysis of methylation status of SEQ ID NO: 3
acccgataaaacgaacaaaaa

SEQ ID NO: 7112 - DNA, 21 bp, Artificial Sequence
  bisulfite treated nucleic acid for analysis of methylation status of SEQ ID NO: 3
aacccgataaaacgaacaaaa

SEQ ID NO: 7113 - DNA, 22 bp, Artificial Sequence
  bisulfite treated nucleic acid for analysis of methylation status of SEQ ID NO: 3
gacgttgtaataggacggaggt

SEQ ID NO: 7114 - DNA, 20 bp, Artificial Sequence
  bisulfite treated nucleic acid for analysis of methylation status of SEQ ID NO: 3
tttgtcggttagaggtagcg

SEQ ID NO: 7115 - DNA, 22 bp, Artificial Sequence
  bisulfite treated nucleic acid for analysis of methylation status of SEQ ID NO: 3
agatacgagagcgcgttagata

SEQ ID NO: 7116 - DNA, 22 bp, Artificial Sequence
  bisulfite treated nucleic acid for analysis of methylation status of SEQ ID NO: 3
acgaataactacaaacccgtaa

SEQ ID NO: 7117 - DNA, 39 bp, Artificial Sequence
  bisulfite treated nucleic acid for analysis of methylation status of SEQ ID NO: 3
tttgttcgacgtattttattttacggaatatcgttaggt

SEQ ID NO: 7118 - DNA, 22 bp, Artificial Sequence
  bisulfite treated nucleic acid for analysis of methylation status of SEQ ID NO: 3
tagatacgagagcgcgttagat

SEQ ID NO: 7119 - DNA, 21 bp, Artificial Sequence
  bisulfite treated nucleic acid for analysis of methylation status of SEQ ID NO: 3
taaaacttccgctcgtaattc

SEQ ID NO: 7120 - DNA, 38 bp, Artificial Sequence
  bisulfite treated nucleic acid for analysis of methylation status of SEQ ID NO: 3
tgtatatagtttggtaggcgagtttaaattcggaaaga

SEQ ID NO: 7121 - DNA, 21 bp, Artificial Sequence
  bisulfite treated nucleic acid for analysis of methylation status of SEQ ID NO: 3
tttttatcggtttgcgtttat

SEQ ID NO: 7122 - DNA, 21 bp, Artificial Sequence
  bisulfite treated nucleic acid for analysis of methylation status of SEQ ID NO: 3
ctccgtcctattacaacgtcc

SEQ ID NO: 7123 - DNA, 20 bp, Artificial Sequence
  bisulfite treated nucleic acid for analysis of methylation status of SEQ ID NO: 3
tacggtaggcggtgattagt

SEQ ID NO: 7124 - DNA, 20 bp, Artificial Sequence
  bisulfite treated nucleic acid for analysis of methylation status of SEQ ID NO: 3
gcggtagagaaagcgtaaga

SEQ ID NO: 7125 - DNA, 22 bp, Artificial Sequence
  bisulfite treated nucleic acid for analysis of methylation status of SEQ ID NO: 3
aacgcaactacgccttaatact

SEQ ID NO: 7126 - DNA, 20 bp, Artificial Sequence
  bisulfite treated nucleic acid for analysis of methylation status of SEQ ID NO: 3
taaaatacgcgaccgaaatc

SEQ ID NO: 7127 - DNA, 21 bp, Artificial Sequence
  bisulfite treated nucleic acid for analysis of methylation status of SEQ ID NO: 3
aactacgacctaaacgcaacg

SEQ ID NO: 7128 - DNA, 20 bp, Artificial Sequence
  bisulfite treated nucleic acid for analysis of methylation status of SEQ ID NO: 3
caaaataaaatacgcgaccg

SEQ ID NO: 7129 - DNA, 21 bp, Artificial Sequence
  bisulfite treated nucleic acid for analysis of methylation status of SEQ ID NO: 3
aaacgccaacgaaaactaaca

SEQ ID NO: 7130 - DNA, 21 bp, Artificial Sequence
  bisulfite treated nucleic acid for analysis of methylation status of SEQ ID NO: 3
acaaacgccaacgaaaactaa

SEQ ID NO: 7131 - DNA, 21 bp, Artificial Sequence
  bisulfite treated nucleic acid for analysis of methylation status of SEQ ID NO: 3
ggacgttgtaataggacggag

SEQ ID NO: 7132 - DNA, 20 bp, Artificial Sequence
  bisulfite treated nucleic acid for analysis of methylation status of SEQ ID NO: 3
tcttacgctttctctaccgc

SEQ ID NO: 7133 - DNA, 22 bp, Artificial Sequence
  bisulfite treated nucleic acid for analysis of methylation status of SEQ ID NO: 3
taagaggaattacgagcggaag

SEQ ID NO: 7134 - DNA, 22 bp, Artificial Sequence
  bisulfite treated nucleic acid for analysis of methylation status of SEQ ID NO: 3
ctaccgtaaacctccgtcctat

SEQ ID NO: 7135 - DNA, 21 bp, Artificial Sequence
  bisulfite treated nucleic acid for analysis of methylation status of SEQ ID NO: 3
cgtttatcgttttgaatcgtc

SEQ ID NO: 7136 - DNA, 21 bp, Artificial Sequence
  bisulfite treated nucleic acid for analysis of methylation status of SEQ ID NO: 3
tttatcgttttgaatcgtcgt

SEQ ID NO: 7137 - DNA, 24 bp, Artificial Sequence
  bisulfite treated nucleic acid for analysis of methylation status of SEQ ID NO: 3
cgacgacctaactaaaatatcgac

SEQ ID NO: 7138 - DNA, 21 bp, Artificial Sequence
  bisulfite treated nucleic acid for analysis of methylation status of SEQ ID NO: 3
tatcgttttgaatcgtcgttg

SEQ ID NO: 7139 - DNA, 23 bp, Artificial Sequence
  bisulfite treated nucleic acid for analysis of methylation status of SEQ ID NO: 3
attcgtcggttgtcgtagaaata

SEQ ID NO: 7140 - DNA, 20 bp, Artificial Sequence
  bisulfite treated nucleic acid for analysis of methylation status of SEQ ID NO: 3
aagcgtaagatgggacgagt

SEQ ID NO: 7141 - DNA, 21 bp, Artificial Sequence
  nucleic acid for analysis of methylation status of SEQ ID NO: 3
taactaaaacgacccaaaccg

SEQ ID NO: 7142 - DNA, 20 bp, Artificial Sequence
  bisulfite treated nucleic acid for analysis of methylation status of SEQ ID NO: 3
caaacgccaacgaaaactaa

SEQ ID NO: 7143 - DNA, 22 bp, Artificial Sequence
  bisulfite treated nucleic acid for analysis of methylation status of SEQ ID NO: 3
gcgtaacaaacgaaaattctac

SEQ ID NO: 7144 - DNA, 21 bp, Artificial Sequence
  bisulfite treated nucleic acid for analysis of methylation status of SEQ ID NO: 3
ttaagaggaattacgagcgga

SEQ ID NO: 7145 - DNA, 34 bp, Artificial Sequence
  bisulfite treated nucleic acid for analysis of methylation status of SEQ ID NO: 3
gttttatcgggttagtttttcgtggacgttgtaa

SEQ ID NO: 7146 - DNA, 24 bp, Artificial Sequence
  bisulfite treated nucleic acid for analysis of methylation status of SEQ ID NO: 3
gtggtagaattttcgtttgttacg

SEQ ID NO: 7147 - DNA, 22 bp, Artificial Sequence
  bisulfite treated nucleic acid for analysis of methylation status of SEQ ID NO: 3
cgaaaatctaaaacttccgctc

SEQ ID NO: 7148 - DNA, 21 bp, Artificial Sequence
  bisulfite treated nucleic acid for analysis of methylation status of SEQ ID NO: 3
ttcgcgtttagtaaggttcgt

SEQ ID NO: 7149 - DNA, 21 bp, Artificial Sequence
  bisulfite treated nucleic acid for analysis of methylation status of SEQ ID NO: 3
gtcggtttatttgtagttcgg

SEQ ID NO: 7150 - DNA, 22 bp, Artificial Sequence
  bisulfite treated nucleic acid for analysis of methylation status of SEQ ID NO: 3
cgaataactacaaacccgtaat

SEQ ID NO: 7151 - DNA, 41 bp, Artificial Sequence
  bisulfite treated nucleic acid for analysis of methylation status of SEQ ID NO: 3
gtttttgttcgacgtattttattttacggaatatcgttagg

SEQ ID NO: 7152 - DNA, 20 bp, Artificial Sequence
  bisulfite treated nucleic acid for analysis of methylation status of SEQ ID NO: 3
actcgtcccatcttacgctt

SEQ ID NO: 7153 - DNA, 30 bp, Artificial Sequence
  bisulfite treated nucleic acid for analysis of methylation status of SEQ ID NO: 3
ttcggcgggtagtttttcgattttgggcgg

SEQ ID NO: 7154 - DNA, 20 bp, Artificial Sequence
  bisulfite treated nucleic acid for analysis of methylation status of SEQ ID NO: 3
ataacaaacgccaacgaaaa

SEQ ID NO: 7155 - DNA, 21 bp, Artificial Sequence
  bisulfite treated nucleic acid for analysis of methylation status of SEQ ID NO: 3
ccacgaaaaactaacccgata

SEQ ID NO: 7156 - DNA, 21 bp, Artificial Sequence
  bisulfite treated nucleic acid for analysis of methylation status of SEQ ID NO: 3
aaaatctaaaacttccgctcg

SEQ ID NO: 7157 - DNA, 21 bp, Artificial Sequence
  bisulfite treated nucleic acid for analysis of methylation status of SEQ ID NO: 3
gacaaaataaaatacgcgacc

SEQ ID NO: 7158 - DNA, 22 bp, Artificial Sequence
  bisulfite treated nucleic acid for analysis of methylation status of SEQ ID NO: 3
gtttacggtaggcggtgattag

SEQ ID NO: 7159 - DNA, 22 bp, Artificial Sequence
  bisulfite treated nucleic acid for analysis of methylation status of SEQ ID NO: 3
tttacggtaggcggtgattagt

SEQ ID NO: 7160 - DNA, 22 bp, Artificial Sequence
  bisulfite treated nucleic acid for analysis of methylation status of SEQ ID NO: 3
ttttgttcgttttatcgggtta

SEQ ID NO: 7161 - DNA, 21 bp, Artificial Sequence
  bisulfite treated nucleic acid for analysis of methylation status of SEQ ID NO: 3
cgttcactaatcaccgcctac

SEQ ID NO: 7162 - DNA, 29 bp, Artificial Sequence
  bisulfite treated nucleic acid for analysis of methylation status of SEQ ID NO: 3
tttcgtggacgttgtaataggacggaggt

SEQ ID NO: 7163 - DNA, 21 bp, Artificial Sequence
  bisulfite treated nucleic acid for analysis of methylation status of SEQ ID NO: 3
gttgagtagtagcgagcgatt

SEQ ID NO: 7164 - DNA, 39 bp, Artificial Sequence
  bisulfite treated nucleic acid for analysis of methylation status of SEQ ID NO: 3
ttcgtggagtcgtatatacgttttttattagaggtacgt

SEQ ID NO: 7165 - DNA, 23 bp, Artificial Sequence
  bisulfite treated nucleic acid for analysis of methylation status of SEQ ID NO: 3
tagtttaagaggaattacgagcg

SEQ ID NO: 7166 - DNA, 22 bp, Artificial Sequence
  bisulfite treated nucleic acid for analysis of methylation status of SEQ ID NO: 3
tttagatacgagagcgcgttag

SEQ ID NO: 7167 - DNA, 23 bp, Artificial Sequence
  bisulfite treated nucleic acid for analysis of methylation status of SEQ ID NO: 3
aacgtctatccgaaaaacaatta

SEQ ID NO: 7168 - DNA, 21 bp, Artificial Sequence
  bisulfite treated nucleic acid for analysis of methylation status of SEQ ID NO: 3
tattcgtcggttgtcgtagaa

SEQ ID NO: 7169 - DNA, 31 bp, Artificial Sequence
  bisulfite treated nucleic acid for analysis of methylation status of SEQ ID NO: 3
agtttaggattatgcgttagcgttcgcgatt

SEQ ID NO: 7170 - DNA, 23 bp, Artificial Sequence
  bisulfite treated nucleic acid for analysis of methylation status of SEQ ID NO: 3
aatacgaataactacaaacccgt

SEQ ID NO: 7171 - DNA, 24 bp, Artificial Sequence
  bisulfite treated nucleic acid for analysis of methylation status of SEQ ID NO: 3
gcgctaaatataactaaaacgacc

SEQ ID NO: 7172 - DNA, 21 bp, Artificial Sequence
  bisulfite treated nucleic acid for analysis of methylation status of SEQ ID NO: 3
ggtttatttgtagttcggacg

SEQ ID NO: 7173 - DNA, 20 bp, Artificial Sequence
  bisulfite treated nucleic acid for analysis of methylation status of SEQ ID NO: 3
acaaacgccaacgaaaacta

SEQ ID NO: 7174 - DNA, 21 bp, Artificial Sequence
  bisulfite treated nucleic acid for analysis of methylation status of SEQ ID NO: 3
aaactacgacctaaacgcaac

SEQ ID NO: 7175 - DNA, 22 bp, Artificial Sequence
  bisulfite treated nucleic acid for analysis of methylation status of SEQ ID NO: 3
ttatcgttttgaatcgtcgttg

SEQ ID NO: 7176 - DNA, 22 bp, Artificial Sequence
  bisulfite treated nucleic acid for analysis of methylation status of SEQ ID NO: 3
taccgtaaacctccgtcctatt

SEQ ID NO: 7177 - DNA, 22 bp, Artificial Sequence
  bisulfite treated nucleic acid for analysis of methylation status of SEQ ID NO: 3
ccgtaaacctccgtcctattac

SEQ ID NO: 7178 - DNA, 19 bp, Artificial Sequence
  bisulfite treated nucleic acid for analysis of methylation status of SEQ ID NO: 3
aagcgtaagatgggacgag

SEQ ID NO: 7179 - DNA, 22 bp, Artificial Sequence
  bisulfite treated nucleic acid for analysis of methylation status of SEQ ID NO: 3
ataacaaacgccaacgaaaact

SEQ ID NO: 7180 - DNA, 19 bp, Artificial Sequence
  bisulfite treated nucleic acid for analysis of methylation status of SEQ ID NO: 3
ggcggtagagaaagcgtaa

SEQ ID NO: 7181 - DNA, 21 bp, Artificial Sequence
  bisulfite treated nucleic acid for analysis of methylation status of SEQ ID NO: 3
gtttacggtaggcggtgatta

SEQ ID NO: 7182 - DNA, 20 bp, Artificial Sequence
  bisulfite treated nucleic acid for analysis of methylation status of SEQ ID NO: 3
accgactcgtcccatcttac

SEQ ID NO: 7183 - DNA, 20 bp, Artificial Sequence
  bisulfite treated nucleic acid for analysis of methylation status of SEQ ID NO: 3
aataggacggaggtttacgg

SEQ ID NO: 7184 - DNA, 23 bp, Artificial Sequence
  bisulfite treated nucleic acid for analysis of methylation status of SEQ ID NO: 3
tataactaaaacgacccaaaccg

SEQ ID NO: 7185 - DNA, 21 bp, Artificial Sequence
  bisulfite treated nucleic acid for analysis of methylation status of SEQ ID NO: 3
cgttgagtagtagcgagcgat

SEQ ID NO: 7186 - DNA, 21 bp, Artificial Sequence
  bisulfite treated nucleic acid for analysis of methylation status of SEQ ID NO: 3
atcgttgagtagtagcgagcg

SEQ ID NO: 7187 - DNA, 21 bp, Artificial Sequence
  bisulfite treated nucleic acid for analysis of methylation status of SEQ ID NO: 3
aggaattacgagcggaagttt

SEQ ID NO: 7188 - DNA, 24 bp, Artificial Sequence
  bisulfite treated nucleic acid for analysis of methylation status of SEQ ID NO: 3
cgctaaatataactaaaacgaccc

SEQ ID NO: 7189 - DNA, 23 bp, Artificial Sequence
  bisulfite treated nucleic acid for analysis of methylation status of SEQ ID NO: 3
aaaaacgtctatccgaaaaacaa

SEQ ID NO: 7190 - DNA, 19 bp, Artificial Sequence
  bisulfite treated nucleic acid for analysis of methylation status of SEQ ID NO: 3
ccgactcgtcccatcttac

SEQ ID NO: 7191 - DNA, 20 bp, Artificial Sequence
  bisulfite treated nucleic acid for analysis of methylation status of SEQ ID NO: 3
aaaatcgaaaaactacccgc

SEQ ID NO: 7192 - DNA, 23 bp, Artificial Sequence
  bisulfite treated nucleic acid for analysis of methylation status of SEQ ID NO: 3
ggtttatttgtagttcggacgtt

SEQ ID NO: 7193 - DNA, 19 bp, Artificial Sequence
  bisulfite treated nucleic acid for analysis of methylation status of SEQ ID NO: 3
ctcgtcccatcttacgctt

SEQ ID NO: 7194 - DNA, 20 bp, Artificial Sequence
  bisulfite treated nucleic acid for analysis of methylation status of SEQ ID NO: 3
ggaattacgagcggaagttt

SEQ ID NO: 7195 - DNA, 23 bp, Artificial Sequence
  bisulfite treated nucleic acid for analysis of methylation status of SEQ ID NO: 3
cgctcgtaattcctcttaaacta

SEQ ID NO: 7196 - DNA, 19 bp, Artificial Sequence
  bisulfite treated nucleic acid for analysis of methylation status of SEQ ID NO: 3
ttacgctttctctaccgcc

SEQ ID NO: 7197 - DNA, 20 bp, Artificial Sequence
  bisulfite treated nucleic acid for analysis of methylation status of SEQ ID NO: 3
cttacgctttctctaccgcc

SEQ ID NO: 7198 - DNA, 20 bp, Artificial Sequence
  bisulfite treated nucleic acid for analysis of methylation status of SEQ ID NO: 3
cccgataaaacgaacaaaaa

SEQ ID NO: 7199 - DNA, 21 bp, Artificial Sequence
  bisulfite treated nucleic acid for analysis of methylation status of SEQ ID NO: 3
gtcggttgcgtatcgaattta

SEQ ID NO: 7200 - DNA, 22 bp, Artificial Sequence
  bisulfite treated nucleic acid for analysis of methylation status of SEQ ID NO: 3
tcgccgctaacataactaaaac

SEQ ID NO: 7201 - DNA, 30 bp, Artificial Sequence
  bisulfite treated nucleic acid for analysis of methylation status of SEQ ID NO: 3
ggcgtcggttaagggcgtaggcgttcgcgt

SEQ ID NO: 7202 - DNA, 20 bp, Artificial Sequence
  bisulfite treated nucleic acid for analysis of methylation status of SEQ ID NO: 3
tatcggtttgcgtttatcgt

SEQ ID NO: 7203 - DNA, 21 bp, Artificial Sequence
  bisulfite treated nucleic acid for analysis of methylation status of SEQ ID NO: 3
gacgtttgtcggttagaggta

SEQ ID NO: 7204 - DNA, 19 bp, Artificial Sequence
  bisulfite treated nucleic acid for analysis of methylation status of SEQ ID NO: 3
aaagcgtaagatgggacga

SEQ ID NO: 7205 - DNA, 19 bp, Artificial Sequence
  nucleic acid for analysis of methylation status of SEQ ID NO: 3
gaaagcgtaagatgggacg

SEQ ID NO: 7206 - DNA, 21 bp, Artificial Sequence
  bisulfite treated nucleic acid for analysis of methylation status of SEQ ID NO: 3
ccgtcctattacaacgtccac

SEQ ID NO: 7207 - DNA, 20 bp, Artificial Sequence
  bisulfite treated nucleic acid for analysis of methylation status of SEQ ID NO: 3
agaaagcgtaagatgggacg

SEQ ID NO: 7208 - DNA, 20 bp, Artificial Sequence
  bisulfite treated nucleic acid for analysis of methylation status of SEQ ID NO: 3
cgtttgttatcggtgtatgg

SEQ ID NO: 7209 - DNA, 31 bp, Artificial Sequence
  bisulfite treated nucleic acid for analysis of methylation status of SEQ ID NO: 3
ttcgtttgttacgcgggaggttcgggttcga

SEQ ID NO: 7210 - DNA, 23 bp, Artificial Sequence
  bisulfite treated nucleic acid for analysis of methylation status of SEQ ID NO: 3
tacgaataactacaaacccgtaa

SEQ ID NO: 7211 - DNA, 20 bp, Artificial Sequence
  bisulfite treated nucleic acid for analysis of methylation status of SEQ ID NO: 3
catacaccgataacaaacgc

SEQ ID NO: 7212 - DNA, 24 bp, Artificial Sequence
  bisulfite treated nucleic acid for analysis of methylation status of SEQ ID NO: 3
cgctcgtaattcctcttaaactat

SEQ ID NO: 7213 - DNA, 22 bp, Artificial Sequence
  bisulfite treated nucleic acid for analysis of methylation status of SEQ ID NO: 3
gtttaagaggaattacgagcgg

SEQ ID NO: 7214 - DNA, 20 bp, Artificial Sequence
  bisulfite treated nucleic acid for analysis of methylation status of SEQ ID NO: 3
tcgcgtttagtaaggttcgt

SEQ ID NO: 7215 - DNA, 19 bp, Artificial Sequence
  bisulfite treated nucleic acid for analysis of methylation status of SEQ ID NO: 3
gactcgtcccatcttacgc

SEQ ID NO: 7216 - DNA, 24 bp, Artificial Sequence
  bisulfite treated nucleic acid for analysis of methylation status of SEQ ID NO: 3
gtttgtcggtttatttgtagttcg

SEQ ID NO: 7217 - DNA, 20 bp, Artificial Sequence
  bisulfite treated nucleic acid for analysis of methylation status of SEQ ID NO: 3
gataacaaacgccaacgaaa

SEQ ID NO: 7218 - DNA, 21 bp, Artificial Sequence
  bisulfite treated nucleic acid for analysis of methylation status of SEQ ID NO: 3
caaacgccaacgaaaactaac

SEQ ID NO: 7219 - DNA, 21 bp, Artificial Sequence
  bisulfite treated nucleic acid for analysis of methylation status of SEQ ID NO: 3
aacaaacgccaacgaaaacta

SEQ ID NO: 7220 - DNA, 19 bp, Artificial Sequence
  bisulfite treated nucleic acid for analysis of methylation status of SEQ ID NO: 3
tcgcgtttcgttttaggtt

SEQ ID NO: 7221 - DNA, 19 bp, Artificial Sequence
  bisulfite treated nucleic acid for analysis of methylation status of SEQ ID NO: 3
ttcgcgtttcgttttaggt

SEQ ID NO: 7222 - DNA, 22 bp, Artificial Sequence
  bisulfite treated nucleic acid for analysis of methylation status of SEQ ID NO: 3
acgtctatccgaaaaacaatta

SEQ ID NO: 7223 - DNA, 20 bp, Artificial Sequence
  bisulfite treated nucleic acid for analysis of methylation status of SEQ ID NO: 3
tccgtcctattacaacgtcc

SEQ ID NO: 7224 - DNA, 19 bp, Artificial Sequence
  bisulfite treated nucleic acid for analysis of methylation status of SEQ ID NO: 3
cgtcccatcttacgctttc

SEQ ID NO: 7225 - DNA, 19 bp, Artificial Sequence
  bisulfite treated nucleic acid for analysis of methylation status of SEQ ID NO: 3
tcgtcccatcttacgcttt

SEQ ID NO: 7226 - DNA, 24 bp, Artificial Sequence
  bisulfite treated nucleic acid for analysis of methylation status of SEQ ID NO: 3
atatcgacaaaataaaatacgcga

SEQ ID NO: 7227 - DNA, 20 bp, Artificial Sequence
  bisulfite treated nucleic acid for analysis of methylation status of SEQ ID NO: 3
agaggaattacgagcggaag

SEQ ID NO: 7228 - DNA, 22 bp, Artificial Sequence
  bisulfite treated nucleic acid for analysis of methylation status of SEQ ID NO: 3
ttagatacgagagcgcgttaga

SEQ ID NO: 7229 - DNA, 20 bp, Artificial Sequence
  bisulfite treated nucleic acid for analysis of methylation status of SEQ ID NO: 3
ccatacaccgataacaaacg

SEQ ID NO: 7230 - DNA, 23 bp, Artificial Sequence
  bisulfite treated nucleic acid for analysis of methylation status of SEQ ID NO: 3
ttgtaataggacggaggtttacg

SEQ ID NO: 7231 - DNA, 21 bp, Artificial Sequence
  bisulfite treated nucleic acid for analysis of methylation status of SEQ ID NO: 3
cctccgtcctattacaacgtc

SEQ ID NO: 7232 - DNA, 20 bp, Artificial Sequence
  bisulfite treated nucleic acid for analysis of methylation status of SEQ ID NO: 3
ataaaccgaaaatcgaaccc

SEQ ID NO: 7233 - DNA, 19 bp, Artificial Sequence
  bisulfite treated nucleic acid for analysis of methylation status of SEQ ID NO: 3
attttcgtttgttacgcgg

SEQ ID NO: 7234 - DNA, 33 bp, Artificial Sequence
  bisulfite treated nucleic acid for analysis of methylation status of SEQ ID NO: 3
gttcgggttcgattttcggtttatgtagtacgt

SEQ ID NO: 7235 - DNA, 20 bp, Artificial Sequence
  bisulfite treated nucleic acid for analysis of methylation status of SEQ ID NO: 3
cgtcggttgtcgtagaaata

SEQ ID NO: 7236 - DNA, 21 bp, Artificial Sequence
  bisulfite treated nucleic acid for analysis of methylation status of SEQ ID NO: 3
ctaccgtaaacctccgtccta

SEQ ID NO: 7237 - DNA, 20 bp, Artificial Sequence
  bisulfite treated nucleic acid for analysis of methylation status of SEQ ID NO: 3
cgaatttagataggcgtcgg

SEQ ID NO: 7238 - DNA, 36 bp, Artificial Sequence
  bisulfite treated nucleic acid for analysis of methylation status of SEQ ID NO: 3
ggcgcgtcgttaggatggtcgagcggtttaaggcgt

SEQ ID NO: 7239 - DNA, 20 bp, Artificial Sequence
  bisulfite treated nucleic acid for analysis of methylation status of SEQ ID NO: 3
taagatgggacgagtcggtt

SEQ ID NO: 7240 - DNA, 21 bp, Artificial Sequence
  bisulfite treated nucleic acid for analysis of methylation status of SEQ ID NO: 3
caacgtccacgaaaaactaac

SEQ ID NO: 7241 - DNA, 21 bp, Artificial Sequence
  bisulfite treated nucleic acid for analysis of methylation status of SEQ ID NO: 3
tatacgactccacgaacgaat

SEQ ID NO: 7242 - DNA, 21 bp, Artificial Sequence
  bisulfite treated nucleic acid for analysis of methylation status of SEQ ID NO: 3
aaacgtctatccgaaaaacaa

SEQ ID NO: 7243 - DNA, 22 bp, Artificial Sequence
  bisulfite treated nucleic acid for analysis of methylation status of SEQ ID NO: 3
gtttatttgtagttcggacgtt

SEQ ID NO: 7244 - DNA, 23 bp, Artificial Sequence
  bisulfite treated nucleic acid for analysis of methylation status of SEQ ID NO: 3
acgcgctaaatataactaaaacg

SEQ ID NO: 7245 - DNA, 21 bp, Artificial Sequence
  bisulfite treated nucleic acid for analysis of methylation status of SEQ ID NO: 3
ttatcggtttgcgtttatcgt

SEQ ID NO: 7246 - DNA, 22 bp, Artificial Sequence
  bisulfite treated nucleic acid for analysis of methylation status of SEQ ID NO: 3
tcgggttttagttatgttagcg

SEQ ID NO: 7247 - DNA, 19 bp, Artificial Sequence
  bisulfite treated nucleic acid for analysis of methylation status of SEQ ID NO: 3
acctaaacgcaacgcctta

SEQ ID NO: 7248 - DNA, 21 bp, Artificial Sequence
  bisulfite treated nucleic acid for analysis of methylation status of SEQ ID NO: 3
tgatcgttgagtagtagcgag

SEQ ID NO: 7249 - DNA, 22 bp, Artificial Sequence
  bisulfite treated nucleic acid for analysis of methylation status of SEQ ID NO: 3
agttttcgttggcgtttgttat

SEQ ID NO: 7250 - DNA, 22 bp, Artificial Sequence
  bisulfite treated nucleic acid for analysis of methylation status of SEQ ID NO: 3
cgcaactacgccttaatactac

SEQ ID NO: 7251 - DNA, 22 bp, Artificial Sequence
  bisulfite treated nucleic acid for analysis of methylation status of SEQ ID NO: 3
attcgtcggttgtcgtagaaat

SEQ ID NO: 7252 - DNA, 32 bp, Artificial Sequence
  bisulfite treated nucleic acid for analysis of methylation status of SEQ ID NO: 3
gtttaggattatgcgttagcgttcgcgatttt

SEQ ID NO: 7253 - DNA, 20 bp, Artificial Sequence
  bisulfite treated nucleic acid for analysis of methylation status of SEQ ID NO: 3
caaaatcgaaaaactacccg

SEQ ID NO: 7254 - DNA, 20 bp, Artificial Sequence
  bisulfite treated nucleic acid for analysis of methylation status of SEQ ID NO: 3
aaaacttccgctcgtaattc

SEQ ID NO: 7255 - DNA, 24 bp, Artificial Sequence
  bisulfite treated nucleic acid for analysis of methylation status of SEQ ID NO: 3
atagtttaagaggaattacgagcg

SEQ ID NO: 7256 - DNA, 19 bp, Artificial Sequence
  bisulfite treated nucleic acid for analysis of methylation status of SEQ ID NO: 3
agcgtaagatgggacgagt

SEQ ID NO: 7257 - DNA, 20 bp, Artificial Sequence
  bisulfite treated nucleic acid for analysis of methylation status of SEQ ID NO: 3
aaccgactcgtcccatctta

SEQ ID NO: 7258 - DNA, 23 bp, Artificial Sequence
  bisulfite treated nucleic acid for analysis of methylation status of SEQ ID NO: 3
ataacaaacgccaacgaaaacta

SEQ ID NO: 7259 - DNA, 25 bp, Artificial Sequence
  bisulfite treated nucleic acid for analysis of methylation status of SEQ ID NO: 3
aatacgaataactacaaacccgtaa

SEQ ID NO: 7260 - DNA, 19 bp, Artificial Sequence
  bisulfite treated nucleic acid for analysis of methylation status of SEQ ID NO: 3
acggtaggcggtgattagt

SEQ ID NO: 7261 - DNA, 19 bp, Artificial Sequence
  bisulfite treated nucleic acid for analysis of methylation status of SEQ ID NO: 3
aaaaactacccgccgaaat

SEQ ID NO: 7262 - DNA, 19 bp, Artificial Sequence
  bisulfite treated nucleic acid for analysis of methylation status of SEQ ID NO: 3
aaaatacgcgaccgaaatc

SEQ ID NO: 7263 - DNA, 24 bp, Artificial Sequence
  bisulfite treated nucleic acid for analysis of methylation status of SEQ ID NO: 3
atttttgatcgttgagtagtagcg

SEQ ID NO: 7264 - DNA, 22 bp, Artificial Sequence
  bisulfite treated nucleic acid for analysis of methylation status of SEQ ID NO: 3
cgggttttagttatgttagcgg

SEQ ID NO: 7265 - DNA, 20 bp, Artificial Sequence
  bisulfite treated nucleic acid for analysis of methylation status of SEQ ID NO: 3
atcgttttgaatcgtcgttg

SEQ ID NO: 7266 - DNA, 21 bp, Artificial Sequence
  bisulfite treated nucleic acid for analysis of methylation status of SEQ ID NO: 3
gttttcgttggcgtttgttat

SEQ ID NO: 7267 - DNA, 20 bp, Artificial Sequence
  bisulfite treated nucleic acid for analysis of methylation status of SEQ ID NO: 3
cgccaacgaaaactaacaca

SEQ ID NO: 7268 - DNA, 21 bp, Artificial Sequence
  bisulfite treated nucleic acid for analysis of methylation status of SEQ ID NO: 3
aagaggaattacgagcggaag

SEQ ID NO: 7269 - DNA, 19 bp, Artificial Sequence
  nucleic acid for analysis of methylation status of SEQ ID NO: 3
cggtttgcgtttatcgttt

SEQ ID NO: 7270 - DNA, 19 bp, Artificial Sequence
  bisulfite treated nucleic acid for analysis of methylation status of SEQ ID NO: 3
gataacaaacgccaacgaa

SEQ ID NO: 7271 - DNA, 21 bp, Artificial Sequence
  bisulfite treated nucleic acid for analysis of methylation status of SEQ ID NO: 3
aacgcaactacgccttaatac

SEQ ID NO: 7272 - DNA, 21 bp, Artificial Sequence
  bisulfite treated nucleic acid for analysis of methylation status of SEQ ID NO: 3
tttagatacgagagcgcgtta

SEQ ID NO: 7273 - DNA, 19 bp, Artificial Sequence
  bisulfite treated nucleic acid for analysis of methylation status of SEQ ID NO: 3
aaactacccgccgaaatct

SEQ ID NO: 7274 - DNA, 23 bp, Artificial Sequence
  bisulfite treated nucleic acid for analysis of methylation status of SEQ ID NO: 3
acgcaactacgccttaatactac

SEQ ID NO: 7275 - DNA, 20 bp, Artificial Sequence
  bisulfite treated nucleic acid for analysis of methylation status of SEQ ID NO: 3
aactaaaacgacccaaaccg

SEQ ID NO: 7276 - DNA, 21 bp, Artificial Sequence
  bisulfite treated nucleic acid for analysis of methylation status of SEQ ID NO: 3
gatacgagagcgcgttagata

SEQ ID NO: 7277 - DNA, 22 bp, Artificial Sequence
  bisulfite treated nucleic acid for analysis of methylation status of SEQ ID NO: 3
ttttagatacgagagcgcgtta

SEQ ID NO: 7278 - DNA, 24 bp, Artificial Sequence
  bisulfite treated nucleic acid for analysis of methylation status of SEQ ID NO: 3
tattcgtcggttgtcgtagaaata

SEQ ID NO: 7279 - DNA, 20 bp, Artificial Sequence
  bisulfite treated nucleic acid for analysis of methylation status of SEQ ID NO: 3
gcgtttgttatcggtgtatg

SEQ ID NO: 7280 - DNA, 20 bp, Artificial Sequence
  bisulfite treated nucleic acid for analysis of methylation status of SEQ ID NO: 3
aattttcgtttgttacgcgg

SEQ ID NO: 7281 - DNA, 21 bp, Artificial Sequence
  bisulfite treated nucleic acid for analysis of methylation status of SEQ ID NO: 3
tatcggtttgcgtttatcgtt

SEQ ID NO: 7282 - DNA, 21 bp, Artificial Sequence
  bisulfite treated nucleic acid for analysis of methylation status of SEQ ID NO: 3
gaatcgctcgctactactcaa

SEQ ID NO: 7283 - DNA, 20 bp, Artificial Sequence
  bisulfite treated nucleic acid for analysis of methylation status of SEQ ID NO: 3
cggtttgcgtttatcgttta

SEQ ID NO: 7284 - DNA, 22 bp, Artificial Sequence
  bisulfite treated nucleic acid for analysis of methylation status of SEQ ID NO: 3
cggtttgggtcgttttagttat

SEQ ID NO: 7285 - DNA, 21 bp, Artificial Sequence
  bisulfite treated nucleic acid for analysis of methylation status of SEQ ID NO: 3
caccgactcgcacttaaaatc

SEQ ID NO: 7286 - DNA, 30 bp, Artificial Sequence
  bisulfite treated nucleic acid for analysis of methylation status of SEQ ID NO: 3
ggttagttagttgcggttttgtcgaagcgt

SEQ ID NO: 7287 - DNA, 20 bp, Artificial Sequence
  bisulfite treated nucleic acid for analysis of methylation status of SEQ ID NO: 3
tcgttgagtagtagcgagcg

SEQ ID NO: 7288 - DNA, 33 bp, Artificial Sequence
  bisulfite treated nucleic acid for analysis of methylation status of SEQ ID NO: 3
ggcgttcgcgtcgggttttagttatgttagcgg

SEQ ID NO: 7289 - DNA, 23 bp, Artificial Sequence
  bisulfite treated nucleic acid for analysis of methylation status of SEQ ID NO: 3
tcgacgacctaactaaaatatcg

SEQ ID NO: 7290 - DNA, 24 bp, Artificial Sequence
  bisulfite treated nucleic acid for analysis of methylation status of SEQ ID NO: 3
aacgcgctaaatataactaaaacg

SEQ ID NO: 7291 - DNA, 21 bp, Artificial Sequence
  bisulfite treated nucleic acid for analysis of methylation status of SEQ ID NO: 3
gtgttagttttcgttggcgtt

SEQ ID NO: 7292 - DNA, 22 bp, Artificial Sequence
  bisulfite treated nucleic acid for analysis of methylation status of SEQ ID NO: 3
gctcgctactactcaacgatca

SEQ ID NO: 7293 - DNA, 20 bp, Artificial Sequence
  bisulfite treated nucleic acid for analysis of methylation status of SEQ ID NO: 3
acttccgctcgtaattcctc

SEQ ID NO: 7294 - DNA, 19 bp, Artificial Sequence
  bisulfite treated nucleic acid for analysis of methylation status of SEQ ID NO: 3
tacaccgataacaaacgcc

SEQ ID NO: 7295 - DNA, 20 bp, Artificial Sequence
  bisulfite treated nucleic acid for analysis of methylation status of SEQ ID NO: 3
ttttcgttggcgtttgttat

SEQ ID NO: 7296 - DNA, 24 bp, Artificial Sequence
  bisulfite treated nucleic acid for analysis of methylation status of SEQ ID NO: 3
atacgaataactacaaacccgtaa

SEQ ID NO: 7297 - DNA, 24 bp, Artificial Sequence
  bisulfite treated nucleic acid for analysis of methylation status of SEQ ID NO: 3
taatacgaataactacaaacccgt

SEQ ID NO: 7298 - DNA, 23 bp, Artificial Sequence
  bisulfite treated nucleic acid for analysis of methylation status of SEQ ID NO: 3
acgaataactacaaacccgtaat

SEQ ID NO: 7299 - DNA, 20 bp, Artificial Sequence
  bisulfite treated nucleic acid for analysis of methylation status of SEQ ID NO: 3
atcgtcgttgcgttgtttag

SEQ ID NO: 7300 - DNA, 33 bp, Artificial Sequence
  bisulfite treated nucleic acid for analysis of methylation status of SEQ ID NO: 3
ggcgttttggtttgaatagttcgttcggtttta

SEQ ID NO: 7301 - DNA, 19 bp, Artificial Sequence
  bisulfite treated nucleic acid for analysis of methylation status of SEQ ID NO: 3
accgccgttcactaatcac

SEQ ID NO: 7302 - DNA, 21 bp, Artificial Sequence
  bisulfite treated nucleic acid for analysis of methylation status of SEQ ID NO: 3
tttttgttcgttttatcgggt

SEQ ID NO: 7303 - DNA, 20 bp, Artificial Sequence
  bisulfite treated nucleic acid for analysis of methylation status of SEQ ID NO: 3
cgtatttttacgcgggaagt

SEQ ID NO: 7304 - DNA, 21 bp, Artificial Sequence
  bisulfite treated nucleic acid for analysis of methylation status of SEQ ID NO: 3
cgacaaaaccgcaactaacta

SEQ ID NO: 7305 - DNA, 34 bp, Artificial Sequence
  bisulfite treated nucleic acid for analysis of methylation status of SEQ ID NO: 3
ggtttgggtcgttttagttatatttagcgcgttt

SEQ ID NO: 7306 - DNA, 22 bp, Artificial Sequence
  bisulfite treated nucleic acid for analysis of methylation status of SEQ ID NO: 3
ttagtcggtttcgtttatttgg

SEQ ID NO: 7307 - DNA, 19 bp, Artificial Sequence
  bisulfite treated nucleic acid for analysis of methylation status of SEQ ID NO: 3
cgtcgccgctaacataact

SEQ ID NO: 7308 - DNA, 21 bp, Artificial Sequence
  bisulfite treated nucleic acid for analysis of methylation status of SEQ ID NO: 3
aaataaaatacgcgaccgaaa

SEQ ID NO: 7309 - DNA, 19 bp, Artificial Sequence
  bisulfite treated nucleic acid for analysis of methylation status of SEQ ID NO: 3
cggtaggcggtgattagtg

SEQ ID NO: 7310 - DNA, 18 bp, Artificial Sequence
  bisulfite treated nucleic acid for analysis of methylation status of SEQ ID NO: 3
agatgggacgagtcggtt

SEQ ID NO: 7311 - DNA, 21 bp, Artificial Sequence
  bisulfite treated nucleic acid for analysis of methylation status of SEQ ID NO: 3
tagttagttgcggttttgtcg

SEQ ID NO: 7312 - DNA, 19 bp, Artificial Sequence
  bisulfite treated nucleic acid for analysis of methylation status of SEQ ID NO: 3
tcgctcctacgctctaacc

SEQ ID NO: 7313 - DNA, 30 bp, Artificial Sequence
  bisulfite treated nucleic acid for analysis of methylation status of SEQ ID NO: 3
agtttagggggtcggattttaagtgcgagt

SEQ ID NO: 7314 - DNA, 20 bp, Artificial Sequence
  bisulfite treated nucleic acid for analysis of methylation status of SEQ ID NO: 3
tgttagttttcgttggcgtt

SEQ ID NO: 7315 - DNA, 23 bp, Artificial Sequence
  bisulfite treated nucleic acid for analysis of methylation status of SEQ ID NO: 3
gtttatttgtagttcggacgttt

SEQ ID NO: 7316 - DNA, 19 bp, Artificial Sequence
  bisulfite treated nucleic acid for analysis of methylation status of SEQ ID NO: 3
accgactcgtcccatctta

SEQ ID NO: 7317 - DNA, 20 bp, Artificial Sequence
  bisulfite treated nucleic acid for analysis of methylation status of SEQ ID NO: 3
cctcgctcctacgctctaac

SEQ ID NO: 7318 - DNA, 20 bp, Artificial Sequence
  bisulfite treated nucleic acid for analysis of methylation status of SEQ ID NO: 3
ctcgctcctacgctctaacc

SEQ ID NO: 7319 - DNA, 21 bp, Artificial Sequence
  bisulfite treated nucleic acid for analysis of methylation status of SEQ ID NO: 3
accgtaaacctccgtcctatt

SEQ ID NO: 7320 - DNA, 19 bp, Artificial Sequence
  bisulfite treated nucleic acid for analysis of methylation status of SEQ ID NO: 3
tttcgacgtgacgagagtt

SEQ ID NO: 7321 - DNA, 22 bp, Artificial Sequence
  bisulfite treated nucleic acid for analysis of methylation status of SEQ ID NO: 3
ccaactacgactctaccgaaac

SEQ ID NO: 7322 - DNA, 23 bp, Artificial Sequence
  bisulfite treated nucleic acid for analysis of methylation status of SEQ ID NO: 3
ttttgcgttttgatttacgttat

SEQ ID NO: 7323 - DNA, 24 bp, Artificial Sequence
  bisulfite treated nucleic acid for analysis of methylation status of SEQ ID NO: 3
agggaggttggagcgcgagaaagg

SEQ ID NO: 7324 - DNA, 22 bp, Artificial Sequence
  bisulfite treated nucleic acid for analysis of methylation status of SEQ ID NO: 3
aaccaactacgactctaccgaa

SEQ ID NO: 7325 - DNA, 22 bp, Artificial Sequence
  bisulfite treated nucleic acid for analysis of methylation status of SEQ ID NO: 3
acgataaccaataaacgacgac

SEQ ID NO: 7326 - DNA, 21 bp, Artificial Sequence
  bisulfite treated nucleic acid for analysis of methylation status of SEQ ID NO: 3
cgtggtaggcgagaattttat

SEQ ID NO: 7327 - DNA, 33 bp, Artificial Sequence
  bisulfite treated nucleic acid for analysis of methylation status of SEQ ID NO: 3
atgtatcgatggtaaacgttaacggaagttggt

SEQ ID NO: 7328 - DNA, 22 bp, Artificial Sequence
  bisulfite treated nucleic acid for analysis of methylation status of SEQ ID NO: 3
tttgcgttttgatttacgttat

SEQ ID NO: 7329 - DNA, 22 bp, Artificial Sequence
  bisulfite treated nucleic acid for analysis of methylation status of SEQ ID NO: 3
cgataaccaataaacgacgact

SEQ ID NO: 7330 - DNA, 21 bp, Artificial Sequence
  bisulfite treated nucleic acid for analysis of methylation status of SEQ ID NO: 3
gtttttgcgttttgatttacg

SEQ ID NO: 7331 - DNA, 22 bp, Artificial Sequence
  bisulfite treated nucleic acid for analysis of methylation status of SEQ ID NO: 3
aacgataaccaataaacgacga

SEQ ID NO: 7332 - DNA, 22 bp, Artificial Sequence
  bisulfite treated nucleic acid for analysis of methylation status of SEQ ID NO: 3
tcaaccaactacgactctaccg

SEQ ID NO: 7333 - DNA, 22 bp, Artificial Sequence
  nucleic acid for analysis of methylation status of SEQ ID NO: 3
ttgatttacgttatcggttcgt

SEQ ID NO: 7334 - DNA, 21 bp, Artificial Sequence
  bisulfite treated nucleic acid for analysis of methylation status of SEQ ID NO: 3
caaccaactacgactctaccg

SEQ ID NO: 7335 - DNA, 22 bp, Artificial Sequence
  bisulfite treated nucleic acid for analysis of methylation status of SEQ ID NO: 3
tttgatttacgttatcggttcg

SEQ ID NO: 7336 - DNA, 22 bp, Artificial Sequence
  bisulfite treated nucleic acid for analysis of methylation status of SEQ ID NO: 3
taaatctataccgaaaatccgc

SEQ ID NO: 7337 - DNA, 21 bp, Artificial Sequence
  bisulfite treated nucleic acid for analysis of methylation status of SEQ ID NO: 3
tgtcgtttagggtcgagagat

SEQ ID NO: 7338 - DNA, 41 bp, Artificial Sequence
  bisulfite treated nucleic acid for analysis of methylation status of SEQ ID NO: 3
ttcgcgttcgaatgttcgtgtgggtagatttgttgtggcgg

SEQ ID NO: 7339 - DNA, 22 bp, Artificial Sequence
  bisulfite treated nucleic acid for analysis of methylation status of SEQ ID NO: 3
caaccaactacgactctaccga

SEQ ID NO: 7340 - DNA, 23 bp, Artificial Sequence
  bisulfite treated nucleic acid for analysis of methylation status of SEQ ID NO: 3
ccaataaacgacgactaataacg

SEQ ID NO: 7341 - DNA, 21 bp, Artificial Sequence
  bisulfite treated nucleic acid for analysis of methylation status of SEQ ID NO: 3
gcaaaataaaacgaatcgacc

SEQ ID NO: 7342 - DNA, 22 bp, Artificial Sequence
  bisulfite treated nucleic acid for analysis of methylation status of SEQ ID NO: 3
attgtagcgtttacgagaggtt

SEQ ID NO: 7343 - DNA, 38 bp, Artificial Sequence
  bisulfite treated nucleic acid for analysis of methylation status of SEQ ID NO: 3
ttcgatggggcgagtagaaggggaggttttcgttacgt

SEQ ID NO: 7344 - DNA, 22 bp, Artificial Sequence
  bisulfite treated nucleic acid for analysis of methylation status of SEQ ID NO: 3
acgctacaataaaacgaaaacc

SEQ ID NO: 7345 - DNA, 20 bp, Artificial Sequence
  bisulfite treated nucleic acid for analysis of methylation status of SEQ ID NO: 3
cgtggtaggcgagaatttta

SEQ ID NO: 7346 - DNA, 39 bp, Artificial Sequence
  bisulfite treated nucleic acid for analysis of methylation status of SEQ ID NO: 3
agcggaattcgttattagtcgtcgtttattggttatcgt

SEQ ID NO: 7347 - DNA, 23 bp, Artificial Sequence
  bisulfite treated nucleic acid for analysis of methylation status of SEQ ID NO: 3
tgatttacgttatcggttcgtat

SEQ ID NO: 7348 - DNA, 20 bp, Artificial Sequence
  bisulfite treated nucleic acid for analysis of methylation status of SEQ ID NO: 3
ttgtcgtttagggtcgagag

SEQ ID NO: 7349 - DNA, 20 bp, Artificial Sequence
  bisulfite treated nucleic acid for analysis of methylation status of SEQ ID NO: 3
ttttgtcgtttagggtcgag

SEQ ID NO: 7350 - DNA, 21 bp, Artificial Sequence
  bisulfite treated nucleic acid for analysis of methylation status of SEQ ID NO: 3
cgctaacacctacctaccgac

SEQ ID NO: 7351 - DNA, 22 bp, Artificial Sequence
  bisulfite treated nucleic acid for analysis of methylation status of SEQ ID NO: 3
atttagggttttcgttcgtgat

SEQ ID NO: 7352 - DNA, 33 bp, Artificial Sequence
  bisulfite treated nucleic acid for analysis of methylation status of SEQ ID NO: 3
tagggttttcgttgtttttggtcggtaggcgtt

SEQ ID NO: 7353 - DNA, 22 bp, Artificial Sequence
  bisulfite treated nucleic acid for analysis of methylation status of SEQ ID NO: 3
cgtaaacgctacaataaaacga

SEQ ID NO: 7354 - DNA, 21 bp, Artificial Sequence
  bisulfite treated nucleic acid for analysis of methylation status of SEQ ID NO: 3
tttttgtcgtttagggtcgag

SEQ ID NO: 7355 - DNA, 23 bp, Artificial Sequence
  bisulfite treated nucleic acid for analysis of methylation status of SEQ ID NO: 3
accaactacgactctaccgaaac

SEQ ID NO: 7356 - DNA, 21 bp, Artificial Sequence
  bisulfite treated nucleic acid for analysis of methylation status of SEQ ID NO: 3
tcgtttagggtcgagagattg

SEQ ID NO: 7357 - DNA, 21 bp, Artificial Sequence
  bisulfite treated nucleic acid for analysis of methylation status of SEQ ID NO: 3
tttgtcgtttagggtcgagag

SEQ ID NO: 7358 - DNA, 20 bp, Artificial Sequence
  bisulfite treated nucleic acid for analysis of methylation status of SEQ ID NO: 3
aaacgaatcgacctctctcc

SEQ ID NO: 7359 - DNA, 22 bp, Artificial Sequence
  bisulfite treated nucleic acid for analysis of methylation status of SEQ ID NO: 3
cgttttattgtagcgtttacga

SEQ ID NO: 7360 - DNA, 23 bp, Artificial Sequence
  bisulfite treated nucleic acid for analysis of methylation status of SEQ ID NO: 3
ctaaatctataccgaaaatccgc

SEQ ID NO: 7361 - DNA, 20 bp, Artificial Sequence
  bisulfite treated nucleic acid for analysis of methylation status of SEQ ID NO: 3
cgtttagggtcgagagattg

SEQ ID NO: 7362 - DNA, 23 bp, Artificial Sequence
  bisulfite treated nucleic acid for analysis of methylation status of SEQ ID NO: 3
atcaaccaactacgactctaccg

SEQ ID NO: 7363 - DNA, 22 bp, Artificial Sequence
  bisulfite treated nucleic acid for analysis of methylation status of SEQ ID NO: 3
ttattgtagcgtttacgagagg

SEQ ID NO: 7364 - DNA, 22 bp, Artificial Sequence
  bisulfite treated nucleic acid for analysis of methylation status of SEQ ID NO: 3
ttttgatttacgttatcggttc

SEQ ID NO: 7365 - DNA, 23 bp, Artificial Sequence
  bisulfite treated nucleic acid for analysis of methylation status of SEQ ID NO: 3
tattgtagcgtttacgagaggtt

SEQ ID NO: 7366 - DNA, 20 bp, Artificial Sequence
  bisulfite treated nucleic acid for analysis of methylation status of SEQ ID NO: 3
acgtagattaggttcgtggg

SEQ ID NO: 7367 - DNA, 23 bp, Artificial Sequence
  bisulfite treated nucleic acid for analysis of methylation status of SEQ ID NO: 3
gttttgatttacgttatcggttc

SEQ ID NO: 7368 - DNA, 21 bp, Artificial Sequence
  bisulfite treated nucleic acid for analysis of methylation status of SEQ ID NO: 3
tagggttttcgttcgtgattt

SEQ ID NO: 7369 - DNA, 21 bp, Artificial Sequence
  bisulfite treated nucleic acid for analysis of methylation status of SEQ ID NO: 3
ttagggttttcgttcgtgatt

SEQ ID NO: 7370 - DNA, 21 bp, Artificial Sequence
  bisulfite treated nucleic acid for analysis of methylation status of SEQ ID NO: 3
gatttagggttttcgttcgtg

SEQ ID NO: 7371 - DNA, 21 bp, Artificial Sequence
  bisulfite treated nucleic acid for analysis of methylation status of SEQ ID NO: 3
tttagggttttcgttcgtgat

SEQ ID NO: 7372 - DNA, 21 bp, Artificial Sequence
  bisulfite treated nucleic acid for analysis of methylation status of SEQ ID NO: 3
cgcaaaataaaacgaatcgac

SEQ ID NO: 7373 - DNA, 20 bp, Artificial Sequence
  bisulfite treated nucleic acid for analysis of methylation status of SEQ ID NO: 3
tttttgcgttttgatttacg

SEQ ID NO: 7374 - DNA, 21 bp, Artificial Sequence
  bisulfite treated nucleic acid for analysis of methylation status of SEQ ID NO: 3
aaatctataccgaaaatccgc

SEQ ID NO: 7375 - DNA, 21 bp, Artificial Sequence
  bisulfite treated nucleic acid for analysis of methylation status of SEQ ID NO: 3
aacctctcgtaaacgctacaa

SEQ ID NO: 7376 - DNA, 21 bp, Artificial Sequence
  bisulfite treated nucleic acid for analysis of methylation status of SEQ ID NO: 3
gtagcgtttacgagaggttgg

SEQ ID NO: 7377 - DNA, 32 bp, Artificial Sequence
  bisulfite treated nucleic acid for analysis of methylation status of SEQ ID NO: 3
ggggcgagtagaaggggaggttttcgttacgt

SEQ ID NO: 7378 - DNA, 20 bp, Artificial Sequence
  bisulfite treated nucleic acid for analysis of methylation status of SEQ ID NO: 3
ctcgacgtaacgaaaacctc

SEQ ID NO: 7379 - DNA, 23 bp, Artificial Sequence
  bisulfite treated nucleic acid for analysis of methylation status of SEQ ID NO: 3
cgttattagtcgtcgtttattgg

SEQ ID NO: 7380 - DNA, 32 bp, Artificial Sequence
  bisulfite treated nucleic acid for analysis of methylation status of SEQ ID NO: 3
agcgtttacgagaggttggttcgatggggcga

SEQ ID NO: 7381 - DNA, 22 bp, Artificial Sequence
  bisulfite treated nucleic acid for analysis of methylation status of SEQ ID NO: 3
accaactacgactctaccgaaa

SEQ ID NO: 7382 - DNA, 20 bp, Artificial Sequence
  bisulfite treated nucleic acid for analysis of methylation status of SEQ ID NO: 3
tagattaggttcgtgggcgt

SEQ ID NO: 7383 - DNA, 20 bp, Artificial Sequence
  bisulfite treated nucleic acid for analysis of methylation status of SEQ ID NO: 3
cgtagattaggttcgtgggc

SEQ ID NO: 7384 - DNA, 20 bp, Artificial Sequence
  bisulfite treated nucleic acid for analysis of methylation status of SEQ ID NO: 3
gtagattaggttcgtgggcg

SEQ ID NO: 7385 - DNA, 20 bp, Artificial Sequence
  bisulfite treated nucleic acid for analysis of methylation status of SEQ ID NO: 3
ctcgaccctaaacgacaaaa

SEQ ID NO: 7386 - DNA, 22 bp, Artificial Sequence
  bisulfite treated nucleic acid for analysis of methylation status of SEQ ID NO: 3
gtttacgagaggttggttcgat

SEQ ID NO: 7387 - DNA, 23 bp, Artificial Sequence
  bisulfite treated nucleic acid for analysis of methylation status of SEQ ID NO: 3
tctaaatctataccgaaaatccg

SEQ ID NO: 7388 - DNA, 21 bp, Artificial Sequence
  bisulfite treated nucleic acid for analysis of methylation status of SEQ ID NO: 3
cgtttagggtcgagagattgt

SEQ ID NO: 7389 - DNA, 20 bp, Artificial Sequence
  bisulfite treated nucleic acid for analysis of methylation status of SEQ ID NO: 3
tagcgtttacgagaggttgg

SEQ ID NO: 7390 - DNA, 22 bp, Artificial Sequence
  bisulfite treated nucleic acid for analysis of methylation status of SEQ ID NO: 3
caaacgataaccaataaacgac

SEQ ID NO: 7391 - DNA, 22 bp, Artificial Sequence
  bisulfite treated nucleic acid for analysis of methylation status of SEQ ID NO: 3
gacaaacgataaccaataaacg

SEQ ID NO: 7392 - DNA, 24 bp, Artificial Sequence
  bisulfite treated nucleic acid for analysis of methylation status of SEQ ID NO: 3
ctctaaatctataccgaaaatccg

SEQ ID NO: 7393 - DNA, 21 bp, Artificial Sequence
  bisulfite treated nucleic acid for analysis of methylation status of SEQ ID NO: 3
tgtagcgtttacgagaggttg

SEQ ID NO: 7394 - DNA, 22 bp, Artificial Sequence
  bisulfite treated nucleic acid for analysis of methylation status of SEQ ID NO: 3
accgataacgtaaatcaaaacg

SEQ ID NO: 7395 - DNA, 19 bp, Artificial Sequence
  bisulfite treated nucleic acid for analysis of methylation status of SEQ ID NO: 3
aacgggtttcgtagtcgtg

SEQ ID NO: 7396 - DNA, 29 bp, Artificial Sequence
  bisulfite treated nucleic acid for analysis of methylation status of SEQ ID NO: 3
aacgtagattaggttcgtgggcgtttcgt

SEQ ID NO: 7397 - DNA, 22 bp, Artificial Sequence
  nucleic acid for analysis of methylation status of SEQ ID NO: 3
taacgtaaatcaaaacgcaaaa

SEQ ID NO: 7398 - DNA, 19 bp, Artificial Sequence
  bisulfite treated nucleic acid for analysis of methylation status of SEQ ID NO: 3
gaacgggtttcgtagtcgt

SEQ ID NO: 7399 - DNA, 31 bp, Artificial Sequence
  bisulfite treated nucleic acid for analysis of methylation status of SEQ ID NO: 3
tgcggtttagaaacgtagattaggttcgtgg

SEQ ID NO: 7400 - DNA, 19 bp, Artificial Sequence
  bisulfite treated nucleic acid for analysis of methylation status of SEQ ID NO: 3
tagattaggttcgtgggcg

SEQ ID NO: 7401 - DNA, 23 bp, Artificial Sequence
  bisulfite treated nucleic acid for analysis of methylation status of SEQ ID NO: 3
aacgctacaataaaacgaaaacc

SEQ ID NO: 7402 - DNA, 21 bp, Artificial Sequence
  bisulfite treated nucleic acid for analysis of methylation status of SEQ ID NO: 3
aaccaactacgactctaccga

SEQ ID NO: 7403 - DNA, 23 bp, Artificial Sequence
  bisulfite treated nucleic acid for analysis of methylation status of SEQ ID NO: 3
gatttacgttatcggttcgtatt

SEQ ID NO: 7404 - DNA, 21 bp, Artificial Sequence
  bisulfite treated nucleic acid for analysis of methylation status of SEQ ID NO: 3
tttacgagaggttggttcgat

SEQ ID NO: 7405 - DNA, 22 bp, Artificial Sequence
  bisulfite treated nucleic acid for analysis of methylation status of SEQ ID NO: 3
ccacgacaaacgataaccaata

SEQ ID NO: 7406 - DNA, 37 bp, Artificial Sequence
  bisulfite treated nucleic acid for analysis of methylation status of SEQ ID NO: 3
aacggaagttggtatagcggaattcgttattagtcgt

SEQ ID NO: 7407 - DNA, 21 bp, Artificial Sequence
  bisulfite treated nucleic acid for analysis of methylation status of SEQ ID NO: 3
ttgcgttttgatttacgttat

SEQ ID NO: 7408 - DNA, 21 bp, Artificial Sequence
  bisulfite treated nucleic acid for analysis of methylation status of SEQ ID NO: 3
ttgtagcgtttacgagaggtt

SEQ ID NO: 7409 - DNA, 21 bp, Artificial Sequence
  bisulfite treated nucleic acid for analysis of methylation status of SEQ ID NO: 3
gtcgtttagggtcgagagatt

SEQ ID NO: 7410 - DNA, 20 bp, Artificial Sequence
  bisulfite treated nucleic acid for analysis of methylation status of SEQ ID NO: 3
taactacgctcgcctctacc

SEQ ID NO: 7411 - DNA, 21 bp, Artificial Sequence
  bisulfite treated nucleic acid for analysis of methylation status of SEQ ID NO: 3
cgagagaggtacggaagaaag

SEQ ID NO: 7412 - DNA, 25 bp, Artificial Sequence
  bisulfite treated nucleic acid for analysis of methylation status of SEQ ID NO: 3
gtgggagcgtagtcggtgtcggatt

SEQ ID NO: 7413 - DNA, 22 bp, Artificial Sequence
  bisulfite treated nucleic acid for analysis of methylation status of SEQ ID NO: 3
acgaaccgataacgtaaatcaa

SEQ ID NO: 7414 - DNA, 40 bp, Artificial Sequence
  bisulfite treated nucleic acid for analysis of methylation status of SEQ ID NO: 3
tgcggtttagaaacgtagattaggttcgtgggcgtttcgt

SEQ ID NO: 7415 - DNA, 21 bp, Artificial Sequence
  bisulfite treated nucleic acid for analysis of methylation status of SEQ ID NO: 3
aaacccacgacaaacgataac

SEQ ID NO: 7416 - DNA, 22 bp, Artificial Sequence
  bisulfite treated nucleic acid for analysis of methylation status of SEQ ID NO: 3
cgctacaataaaacgaaaaccc

SEQ ID NO: 7417 - DNA, 23 bp, Artificial Sequence
  bisulfite treated nucleic acid for analysis of methylation status of SEQ ID NO: 3
tcgtaaacgctacaataaaacga

SEQ ID NO: 7418 - DNA, 31 bp, Artificial Sequence
  bisulfite treated nucleic acid for analysis of methylation status of SEQ ID NO: 3
gtttagaaacgtagattaggttcgtgggcgt

SEQ ID NO: 7419 - DNA, 18 bp, Artificial Sequence
  bisulfite treated nucleic acid for analysis of methylation status of SEQ ID NO: 3
attaggttcgtgggcgtt

SEQ ID NO: 7420 - DNA, 20 bp, Artificial Sequence
  bisulfite treated nucleic acid for analysis of methylation status of SEQ ID NO: 3
aaaacccacgacaaacgata

SEQ ID NO: 7421 - DNA, 22 bp, Artificial Sequence
  bisulfite treated nucleic acid for analysis of methylation status of SEQ ID NO: 3
ttgtagcgtttacgagaggttg

SEQ ID NO: 7422 - DNA, 22 bp, Artificial Sequence
  bisulfite treated nucleic acid for analysis of methylation status of SEQ ID NO: 47
taagtaattttgttatcgggcg

SEQ ID NO: 7423 - DNA, 21 bp, Artificial Sequence
  bisulfite treated nucleic acid for analysis of methylation status of SEQ ID NO: 47
aaaaacgacgaatacctctcc

SEQ ID NO: 7424 - DNA, 47 bp, Artificial Sequence
  bisulfite treated nucleic acid for analysis of methylation status of SEQ ID NO: 47
ttaattcgtgtgggggttgatattaatataagtagtcgttttttcgg

SEQ ID NO: 7425 - DNA, 21 bp, Artificial Sequence
  bisulfite treated nucleic acid for analysis of methylation status of SEQ ID NO: 47
aagtaattttgttatcgggcg

SEQ ID NO: 7426 - DNA, 20 bp, Artificial Sequence
  bisulfite treated nucleic acid for analysis of methylation status of SEQ ID NO: 47
cgaacctaaaatcccactcg

SEQ ID NO: 7427 - DNA, 19 bp, Artificial Sequence
  bisulfite treated nucleic acid for analysis of methylation status of SEQ ID NO: 47
tttttatatcgggcgtcgt

SEQ ID NO: 7428 - DNA, 22 bp, Artificial Sequence
  bisulfite treated nucleic acid for analysis of methylation status of SEQ ID NO: 47
acgaaactaaactccgcttacc

SEQ ID NO: 7429 - DNA, 20 bp, Artificial Sequence
  bisulfite treated nucleic acid for analysis of methylation status of SEQ ID NO: 47
attgcgcgtggggggcgagg

SEQ ID NO: 7430 - DNA, 21 bp, Artificial Sequence
  bisulfite treated nucleic acid for analysis of methylation status of SEQ ID NO: 47
ctcccgaacgaaactaaactc

SEQ ID NO: 7431 - DNA, 21 bp, Artificial Sequence
  bisulfite treated nucleic acid for analysis of methylation status of SEQ ID NO: 47
cgaaactaaactccgcttacc

SEQ ID NO: 7432 - DNA, 22 bp, Artificial Sequence
  bisulfite treated nucleic acid for analysis of methylation status of SEQ ID NO: 47
aacgaaactaaactccgcttac

SEQ ID NO: 7433 - DNA, 20 bp, Artificial Sequence
  bisulfite treated nucleic acid for analysis of methylation status of SEQ ID NO: 47
aaaacgacgaatacctctcc

SEQ ID NO: 7434 - DNA, 21 bp, Artificial Sequence
  bisulfite treated nucleic acid for analysis of methylation status of SEQ ID NO: 47
gaacgaaactaaactccgctt

SEQ ID NO: 7435 - DNA, 22 bp, Artificial Sequence
  bisulfite treated nucleic acid for analysis of methylation status of SEQ ID NO: 47
cgtataagaatagaggagcggg

SEQ ID NO: 7436 - DNA, 20 bp, Artificial Sequence
  bisulfite treated nucleic acid for analysis of methylation status of SEQ ID NO: 47
taacaacaaaatcgccgaaa

SEQ ID NO: 7437 - DNA, 30 bp, Artificial Sequence
  bisulfite treated nucleic acid for analysis of methylation status of SEQ ID NO: 47
gacggtttcgttgtttattgggtaagcgga

SEQ ID NO: 7438 - DNA, 20 bp, Artificial Sequence
  bisulfite treated nucleic acid for analysis of methylation status of SEQ ID NO: 47
agtaattttgttatcgggcg

SEQ ID NO: 7439 - DNA, 20 bp, Artificial Sequence
  bisulfite treated nucleic acid for analysis of methylation status of SEQ ID NO: 47
gtaattttgttatcgggcgg

SEQ ID NO: 7440 - DNA, 19 bp, Artificial Sequence
  bisulfite treated nucleic acid for analysis of methylation status of SEQ ID NO: 47
ggcgtcgtcgttttaattg

SEQ ID NO: 7441 - DNA, 24 bp, Artificial Sequence
  bisulfite treated nucleic acid for analysis of methylation status of SEQ ID NO: 47
aggagcgggggagaagagacggtt

SEQ ID NO: 7442 - DNA, 19 bp, Artificial Sequence
  bisulfite treated nucleic acid for analysis of methylation status of SEQ ID NO: 47
taattttgttatcgggcgg

SEQ ID NO: 7443 - DNA, 30 bp, Artificial Sequence
  bisulfite treated nucleic acid for analysis of methylation status of SEQ ID NO: 47
agacggtttcgttgtttattgggtaagcgg

SEQ ID NO: 7444 - DNA, 19 bp, Artificial Sequence
  bisulfite treated nucleic acid for analysis of methylation status of SEQ ID NO: 47
gcgtcgtcgttttaattgc

SEQ ID NO: 7445 - DNA, 19 bp, Artificial Sequence
  bisulfite treated nucleic acid for analysis of methylation status of SEQ ID NO: 47
acaacaaaatcgccgaaaa

SEQ ID NO: 7446 - DNA, 19 bp, Artificial Sequence
  bisulfite treated nucleic acid for analysis of methylation status of SEQ ID NO: 47
aacaacaaaatcgccgaaa

SEQ ID NO: 7447 - DNA, 20 bp, Artificial Sequence
  bisulfite treated nucleic acid for analysis of methylation status of SEQ ID NO: 47
aaacgacgaatacctctccc

SEQ ID NO: 7448 - DNA, 20 bp, Artificial Sequence
  bisulfite treated nucleic acid for analysis of methylation status of SEQ ID NO: 47
taattttgttatcgggcggt

SEQ ID NO: 7449 - DNA, 18 bp, Artificial Sequence
  bisulfite treated nucleic acid for analysis of methylation status of SEQ ID NO: 47
gggcgtcgtcgttttaat

SEQ ID NO: 7450 - DNA, 21 bp, Artificial Sequence
  bisulfite treated nucleic acid for analysis of methylation status of SEQ ID NO: 47
ccaataaacaacgaaaccgtc

SEQ ID NO: 7451 - DNA, 20 bp, Artificial Sequence
  bisulfite treated nucleic acid for analysis of methylation status of SEQ ID NO: 47
aacgaaaccgtctcttctcc

SEQ ID NO: 7452 - DNA, 18 bp, Artificial Sequence
  bisulfite treated nucleic acid for analysis of methylation status of SEQ ID NO: 47
caacaaaatcgccgaaaa

SEQ ID NO: 7453 - DNA, 20 bp, Artificial Sequence
  bisulfite treated nucleic acid for analysis of methylation status of SEQ ID NO: 47
caacgaaaccgtctcttctc

SEQ ID NO: 7454 - DNA, 21 bp, Artificial Sequence
  bisulfite treated nucleic acid for analysis of methylation status of SEQ ID NO: 47
aaaacgacgaatacctctccc

SEQ ID NO: 7455 - DNA, 20 bp, Artificial Sequence
  bisulfite treated nucleic acid for analysis of methylation status of SEQ ID NO: 47
cccgaacgaaactaaactcc

SEQ ID NO: 7456 - DNA, 21 bp, Artificial Sequence
  bisulfite treated nucleic acid for analysis of methylation status of SEQ ID NO: 47
cgtataagaatagaggagcgg

SEQ ID NO: 7457 - DNA, 21 bp, Artificial Sequence
  bisulfite treated nucleic acid for analysis of methylation status of SEQ ID NO: 47
gctcccgaacgaaactaaact

SEQ ID NO: 7458 - DNA, 31 bp, Artificial Sequence
  bisulfite treated nucleic acid for analysis of methylation status of SEQ ID NO: 47
ggagaagagacggtttcgttgtttattgggt

SEQ ID NO: 7459 - DNA, 18 bp, Artificial Sequence
  bisulfite treated nucleic acid for analysis of methylation status of SEQ ID NO: 47
ttagtttcgttcgggagc

SEQ ID NO: 7460 - DNA, 22 bp, Artificial Sequence
  bisulfite treated nucleic acid for analysis of methylation status of SEQ ID NO: 47
ccgtacttttctctcgtcctta

SEQ ID NO: 7461 - DNA, 31 bp, Artificial Sequence
  bisulfite treated nucleic acid for analysis of methylation status of SEQ ID NO: 47
ttcggcgattttgttgttaattcgagtcggt

SEQ ID NO: 7462 - DNA, 19 bp, Artificial Sequence
  bisulfite treated nucleic acid for analysis of methylation status of SEQ ID NO: 47
attttgttatcgggcggtt

SEQ ID NO: 7463 - DNA, 18 bp, Artificial Sequence
  bisulfite treated nucleic acid for analysis of methylation status of SEQ ID NO: 47
aattttgttatcgggcgg

SEQ ID NO: 7464 - DNA, 20 bp, Artificial Sequence
  bisulfite treated nucleic acid for analysis of methylation status of SEQ ID NO: 47
tcccgaacgaaactaaactc

SEQ ID NO: 7465 - DNA, 18 bp, Artificial Sequence
  bisulfite treated nucleic acid for analysis of methylation status of SEQ ID NO: 47
attttgttatcgggcggt

SEQ ID NO: 7466 - DNA, 18 bp, Artificial Sequence
  bisulfite treated nucleic acid for analysis of methylation status of SEQ ID NO: 47
ttttatatcgggcgtcgt

SEQ ID NO: 7467 - DNA, 23 bp, Artificial Sequence
  bisulfite treated nucleic acid for analysis of methylation status of SEQ ID NO: 47
cgacctcgctactcactaaataa

SEQ ID NO: 7468 - DNA, 22 bp, Artificial Sequence
  bisulfite treated nucleic acid for analysis of methylation status of SEQ ID NO: 47
gagttggtagtaaaatcgtcgg

SEQ ID NO: 7469 - DNA, 25 bp, Artificial Sequence
  bisulfite treated nucleic acid for analysis of methylation status of SEQ ID NO: 47
tgttcgttttcgagcggggttgggt

SEQ ID NO: 7470 - DNA, 21 bp, Artificial Sequence
  bisulfite treated nucleic acid for analysis of methylation status of SEQ ID NO: 47
aaaaacgacctcgctactcac

SEQ ID NO: 7471 - DNA, 21 bp, Artificial Sequence
  bisulfite treated nucleic acid for analysis of methylation status of SEQ ID NO: 47
acttccttctacatcgaacgc

SEQ ID NO: 7472 - DNA, 22 bp, Artificial Sequence
  bisulfite treated nucleic acid for analysis of methylation status of SEQ ID NO: 47
ttagtgagtagcgaggtcgttt

SEQ ID NO: 7473 - DNA, 28 bp, Artificial Sequence
  bisulfite treated nucleic acid for analysis of methylation status of SEQ ID NO: 47
gggtgggcgtttcgttttttacgcgtag

SEQ ID NO: 7474 - DNA, 22 bp, Artificial Sequence
  bisulfite treated nucleic acid for analysis of methylation status of SEQ ID NO: 47
aacgacctcgctactcactaaa

SEQ ID NO: 7475 - DNA, 21 bp, Artificial Sequence
  bisulfite treated nucleic acid for analysis of methylation status of SEQ ID NO: 47
gttggtagtaaaatcgtcggg

SEQ ID NO: 7476 - DNA, 22 bp, Artificial Sequence
  bisulfite treated nucleic acid for analysis of methylation status of SEQ ID NO: 47
aaacgacctcgctactcactaa

SEQ ID NO: 7477 - DNA, 23 bp, Artificial Sequence
  bisulfite treated nucleic acid for analysis of methylation status of SEQ ID NO: 47
cctcgctactcactaaataaacg

SEQ ID NO: 7478 - DNA, 23 bp, Artificial Sequence
  bisulfite treated nucleic acid for analysis of methylation status of SEQ ID NO: 47
cgattcgagttggtagtaaaatc

SEQ ID NO: 7479 - DNA, 22 bp, Artificial Sequence
  bisulfite treated nucleic acid for analysis of methylation status of SEQ ID NO: 47
atttagtgagtagcgaggtcgt

SEQ ID NO: 7480 - DNA, 22 bp, Artificial Sequence
  bisulfite treated nucleic acid for analysis of methylation status of SEQ ID NO: 47
acgacctcgctactcactaaat

SEQ ID NO: 7481 - DNA, 24 bp, Artificial Sequence
  bisulfite treated nucleic acid for analysis of methylation status of SEQ ID NO: 47
acctcgctactcactaaataaacg

SEQ ID NO: 7482 - DNA, 20 bp, Artificial Sequence
  bisulfite treated nucleic acid for analysis of methylation status of SEQ ID NO: 47
ttggtagtaaaatcgtcggg

SEQ ID NO: 7483 - DNA, 22 bp, Artificial Sequence
  bisulfite treated nucleic acid for analysis of methylation status of SEQ ID NO: 47
agttggtagtaaaatcgtcggg

SEQ ID NO: 7484 - DNA, 23 bp, Artificial Sequence
  bisulfite treated nucleic acid for analysis of methylation status of SEQ ID NO: 47
ttcgagttggtagtaaaatcgtc

SEQ ID NO: 7485 - DNA, 20 bp, Artificial Sequence
  bisulfite treated nucleic acid for analysis of methylation status of SEQ ID NO: 47
cttccttctacatcgaacgc

SEQ ID NO: 7486 - DNA, 21 bp, Artificial Sequence
  bisulfite treated nucleic acid for analysis of methylation status of SEQ ID NO: 47
aaaacgacctcgctactcact

SEQ ID NO: 7487 - DNA, 22 bp, Artificial Sequence
  bisulfite treated nucleic acid for analysis of methylation status of SEQ ID NO: 47
cgattcgagttggtagtaaaat

SEQ ID NO: 7488 - DNA, 22 bp, Artificial Sequence
  nucleic acid for analysis of methylation status of SEQ ID NO: 47
agtgagtagcgaggtcgttttt

SEQ ID NO: 7489 - DNA, 22 bp, Artificial Sequence
  bisulfite treated nucleic acid for analysis of methylation status of SEQ ID NO: 47
aaaaacgacctcgctactcact

SEQ ID NO: 7490 - DNA, 23 bp, Artificial Sequence
  bisulfite treated nucleic acid for analysis of methylation status of SEQ ID NO: 47
tcgctactcactaaataaacgaa

SEQ ID NO: 7491 - DNA, 26 bp, Artificial Sequence
  bisulfite treated nucleic acid for analysis of methylation status of SEQ ID NO: 47
tttgttcgttttcgagcggggttggg

SEQ ID NO: 7492 - DNA, 21 bp, Artificial Sequence
  bisulfite treated nucleic acid for analysis of methylation status of SEQ ID NO: 47
gtgagtagcgaggtcgttttt

SEQ ID NO: 7493 - DNA, 24 bp, Artificial Sequence
  bisulfite treated nucleic acid for analysis of methylation status of SEQ ID NO: 47
ctcgctactcactaaataaacgaa

SEQ ID NO: 7494 - DNA, 22 bp, Artificial Sequence
  bisulfite treated nucleic acid for analysis of methylation status of SEQ ID NO: 47
tcgagttggtagtaaaatcgtc

SEQ ID NO: 7495 - DNA, 23 bp, Artificial Sequence
  bisulfite treated nucleic acid for analysis of methylation status of SEQ ID NO: 47
cgtttatttagtgagtagcgagg

SEQ ID NO: 7496 - DNA, 20 bp, Artificial Sequence
  bisulfite treated nucleic acid for analysis of methylation status of SEQ ID NO: 47
aaaacgacctcgctactcac

SEQ ID NO: 7497 - DNA, 23 bp, Artificial Sequence
  bisulfite treated nucleic acid for analysis of methylation status of SEQ ID NO: 47
tatttagtgagtagcgaggtcgt

SEQ ID NO: 7498 - DNA, 24 bp, Artificial Sequence
  bisulfite treated nucleic acid for analysis of methylation status of SEQ ID NO: 47
attcgagttggtagtaaaatcgtc

SEQ ID NO: 7499 - DNA, 24 bp, Artificial Sequence
  bisulfite treated nucleic acid for analysis of methylation status of SEQ ID NO: 47
gattcgagttggtagtaaaatcgt

SEQ ID NO: 7500 - DNA, 22 bp, Artificial Sequence
  bisulfite treated nucleic acid for analysis of methylation status of SEQ ID NO: 47
caattctatcaccgaacgatct

SEQ ID NO: 7501 - DNA, 20 bp, Artificial Sequence
  bisulfite treated nucleic acid for analysis of methylation status of SEQ ID NO: 47
cggatttgggattttattcg

SEQ ID NO: 7502 - DNA, 47 bp, Artificial Sequence
  bisulfite treated nucleic acid for analysis of methylation status of SEQ ID NO: 47
gaagaggcggttgtttatgttaatattagtttttatacgaattagaa

SEQ ID NO: 7503 - DNA, 22 bp, Artificial Sequence
  bisulfite treated nucleic acid for analysis of methylation status of SEQ ID NO: 47
aacaattctatcaccgaacgat

SEQ ID NO: 7504 - DNA, 47 bp, Artificial Sequence
  bisulfite treated nucleic acid for analysis of methylation status of SEQ ID NO: 47
agaggcggttgtttatgttaatattagtttttatacgaattagaaaa

SEQ ID NO: 7505 - DNA, 21 bp, Artificial Sequence
  bisulfite treated nucleic acid for analysis of methylation status of SEQ ID NO: 47
tagtgagtagcgaggtcgttt

SEQ ID NO: 7506 - DNA, 21 bp, Artificial Sequence
  bisulfite treated nucleic acid for analysis of methylation status of SEQ ID NO: 47
tttagtgagtagcgaggtcgt

SEQ ID NO: 7507 - DNA, 20 bp, Artificial Sequence
  bisulfite treated nucleic acid for analysis of methylation status of SEQ ID NO: 47
tgagtagcgaggtcgttttt

SEQ ID NO: 7508 - DNA, 19 bp, Artificial Sequence
  bisulfite treated nucleic acid for analysis of methylation status of SEQ ID NO: 47
tccttctacatcgaacgcc

SEQ ID NO: 7509 - DNA, 22 bp, Artificial Sequence
  bisulfite treated nucleic acid for analysis of methylation status of SEQ ID NO: 47
tagtgagtagcgaggtcgtttt

SEQ ID NO: 7510 - DNA, 20 bp, Artificial Sequence
  bisulfite treated nucleic acid for analysis of methylation status of SEQ ID NO: 47
tggtagtaaaatcgtcgggg

SEQ ID NO: 7511 - DNA, 24 bp, Artificial Sequence
  bisulfite treated nucleic acid for analysis of methylation status of SEQ ID NO: 47
ttatttagtgagtagcgaggtcgt

SEQ ID NO: 7512 - DNA, 19 bp, Artificial Sequence
  bisulfite treated nucleic acid for analysis of methylation status of SEQ ID NO: 47
aaaaacgaaataaccccga

SEQ ID NO: 7513 - DNA, 22 bp, Artificial Sequence
  bisulfite treated nucleic acid for analysis of methylation status of SEQ ID NO: 47
agatcgttcggtgatagaattg

SEQ ID NO: 7514 - DNA, 30 bp, Artificial Sequence
  bisulfite treated nucleic acid for analysis of methylation status of SEQ ID NO: 47
tgaattcgtaagggagggggaagaacgttt

SEQ ID NO: 7515 - DNA, 19 bp, Artificial Sequence
  bisulfite treated nucleic acid for analysis of methylation status of SEQ ID NO: 47
gtagtaaaatcgtcggggg

SEQ ID NO: 7516 - DNA, 19 bp, Artificial Sequence
  bisulfite treated nucleic acid for analysis of methylation status of SEQ ID NO: 47
ggtagtaaaatcgtcgggg

SEQ ID NO: 7517 - DNA, 24 bp, Artificial Sequence
  bisulfite treated nucleic acid for analysis of methylation status of SEQ ID NO: 47
ttcgtttatttagtgagtagcgag

SEQ ID NO: 7518 - DNA, 22 bp, Artificial Sequence
  bisulfite treated nucleic acid for analysis of methylation status of SEQ ID NO: 47
taaacaattctatcaccgaacg

SEQ ID NO: 7519 - DNA, 23 bp, Artificial Sequence
  bisulfite treated nucleic acid for analysis of methylation status of SEQ ID NO: 47
aaaacgacctcgctactcactaa

SEQ ID NO: 7520 - DNA, 24 bp, Artificial Sequence
  bisulfite treated nucleic acid for analysis of methylation status of SEQ ID NO: 47
acgacctcgctactcactaaataa

SEQ ID NO: 7521 - DNA, 24 bp, Artificial Sequence
  bisulfite treated nucleic acid for analysis of methylation status of SEQ ID NO: 47
tcgtttatttagtgagtagcgagg

SEQ ID NO: 7522 - DNA, 19 bp, Artificial Sequence
  bisulfite treated nucleic acid for analysis of methylation status of SEQ ID NO: 47
ttccttctacatcgaacgc

SEQ ID NO: 7523 - DNA, 25 bp, Artificial Sequence
  bisulfite treated nucleic acid for analysis of methylation status of SEQ ID NO: 47
tttcgtttatttagtgagtagcgag

SEQ ID NO: 7524 - DNA, 23 bp, Artificial Sequence
  bisulfite treated nucleic acid for analysis of methylation status of SEQ ID NO: 47
ataaacaattctatcaccgaacg

SEQ ID NO: 7525 - DNA, 25 bp, Artificial Sequence
  bisulfite treated nucleic acid for analysis of methylation status of SEQ ID NO: 47
gacctcgctactcactaaataaacg

SEQ ID NO: 7526 - DNA, 21 bp, Artificial Sequence
  bisulfite treated nucleic acid for analysis of methylation status of SEQ ID NO: 47
agtgagtagcgaggtcgtttt

SEQ ID NO: 7527 - DNA, 23 bp, Artificial Sequence
  bisulfite treated nucleic acid for analysis of methylation status of SEQ ID NO: 47
aaacaattctatcaccgaacgat

SEQ ID NO: 7528 - DNA, 23 bp, Artificial Sequence
  bisulfite treated nucleic acid for analysis of methylation status of SEQ ID NO: 47
acaattctatcaccgaacgatct

SEQ ID NO: 7529 - DNA, 18 bp, Artificial Sequence
  bisulfite treated nucleic acid for analysis of methylation status of SEQ ID NO: 47
taaacaaccgcctcttcg

SEQ ID NO: 7530 - DNA, 22 bp, Artificial Sequence
  bisulfite treated nucleic acid for analysis of methylation status of SEQ ID NO: 47
gtcgttcgttcgagtttatacg

SEQ ID NO: 7531 - DNA, 39 bp, Artificial Sequence
  bisulfite treated nucleic acid for analysis of methylation status of SEQ ID NO: 47
ttcgagtgaagggggcggcgggtgtttttttcgtatcgt

SEQ ID NO: 7532 - DNA, 18 bp, Artificial Sequence
  bisulfite treated nucleic acid for analysis of methylation status of SEQ ID NO: 47
ccttctacatcgaacgcc

SEQ ID NO: 7533 - DNA, 21 bp, Artificial Sequence
  bisulfite treated nucleic acid for analysis of methylation status of SEQ ID NO: 47
tcgttcgttcgagtttatacg

SEQ ID NO: 7534 - DNA, 21 bp, Artificial Sequence
  bisulfite treated nucleic acid for analysis of methylation status of SEQ ID NO: 47
gatcgttcggtgatagaattg

SEQ ID NO: 7535 - DNA, 25 bp, Artificial Sequence
  bisulfite treated nucleic acid for analysis of methylation status of SEQ ID NO: 47
gattcgagttggtagtaaaatcgtc

SEQ ID NO: 7536 - DNA, 18 bp, Artificial Sequence
  bisulfite treated nucleic acid for analysis of methylation status of SEQ ID NO: 47
tagtaaaatcgtcggggg

SEQ ID NO: 7537 - DNA, 25 bp, Artificial Sequence
  bisulfite treated nucleic acid for analysis of methylation status of SEQ ID NO: 47
tttatttagtgagtagcgaggtcgt

SEQ ID NO: 7538 - DNA, 23 bp, Artificial Sequence
  bisulfite treated nucleic acid for analysis of methylation status of SEQ ID NO: 47
ttagtgagtagcgaggtcgtttt

SEQ ID NO: 7539 - DNA, 23 bp, Artificial Sequence
  bisulfite treated nucleic acid for analysis of methylation status of SEQ ID NO: 47
aagatcgttcggtgatagaattg

SEQ ID NO: 7540 - DNA, 17 bp, Artificial Sequence
  bisulfite treated nucleic acid for analysis of methylation status of SEQ ID NO: 47
aaacaaccgcctcttcg

SEQ ID NO: 7541 - DNA, 26 bp, Artificial Sequence
  bisulfite treated nucleic acid for analysis of methylation status of SEQ ID NO: 47
gtttcgtttatttagtgagtagcgag

SEQ ID NO: 7542 - DNA, 18 bp, Artificial Sequence
  bisulfite treated nucleic acid for analysis of methylation status of SEQ ID NO: 47
aaaacgaaataaccccga

SEQ ID NO: 7543 - DNA, 21 bp, Artificial Sequence
  bisulfite treated nucleic acid for analysis of methylation status of SEQ ID NO: 47
aattctatcaccgaacgatct

SEQ ID NO: 7544 - DNA, 23 bp, Artificial Sequence
  bisulfite treated nucleic acid for analysis of methylation status of SEQ ID NO: 47
tttcgtttatttagtgagtagcg

SEQ ID NO: 7545 - DNA, 24 bp, Artificial Sequence
  bisulfite treated nucleic acid for analysis of methylation status of SEQ ID NO: 47
cataaacaattctatcaccgaacg

SEQ ID NO: 7546 - DNA, 24 bp, Artificial Sequence
  bisulfite treated nucleic acid for analysis of methylation status of SEQ ID NO: 47
gtttcgtttatttagtgagtagcg

SEQ ID NO: 7547 - DNA, 23 bp, Artificial Sequence
  bisulfite treated nucleic acid for analysis of methylation status of SEQ ID NO: 47
agtcgttcgttcgagtttatacg

SEQ ID NO: 7548 - DNA, 17 bp, Artificial Sequence
  bisulfite treated nucleic acid for analysis of methylation status of SEQ ID NO: 47
agtaaaatcgtcggggg

SEQ ID NO: 7549 - DNA, 20 bp, Artificial Sequence
  bisulfite treated nucleic acid for analysis of methylation status of SEQ ID NO: 47
aaacgaaataaccccgaaaa

SEQ ID NO: 7550 - DNA, 17 bp, Artificial Sequence
  bisulfite treated nucleic acid for analysis of methylation status of SEQ ID NO: 47
tcgaagaggcggttgtt

SEQ ID NO: 7551 - DNA, 30 bp, Artificial Sequence
  bisulfite treated nucleic acid for analysis of methylation status of SEQ ID NO: 47
attgaattcgtaagggagggggaagaacgt

SEQ ID NO: 7552 - DNA, 20 bp, Artificial Sequence
  bisulfite treated nucleic acid for analysis of methylation status of SEQ ID NO: 47
aaaacgaaataaccccgaaa

SEQ ID NO: 7553 - DNA, 30 bp, Artificial Sequence
  bisulfite treated nucleic acid for analysis of methylation status of SEQ ID NO: 47
ttgaattcgtaagggagggggaagaacgtt

SEQ ID NO: 7554 - DNA, 20 bp, Artificial Sequence
  bisulfite treated nucleic acid for analysis of methylation status of SEQ ID NO: 47
aaaaacgaaataaccccgaa

SEQ ID NO: 7555 - DNA, 22 bp, Artificial Sequence
  bisulfite treated nucleic acid for analysis of methylation status of SEQ ID NO: 18
tttttattagttcggttgtcgg

SEQ ID NO: 7556 - DNA, 22 bp, Artificial Sequence
  bisulfite treated nucleic acid for analysis of methylation status of SEQ ID NO: 18
cgcgcctatctcttattctcta

SEQ ID NO: 7557 - DNA, 32 bp, Artificial Sequence
  bisulfite treated nucleic acid for analysis of methylation status of SEQ ID NO: 18
ttaattttaaattgggcggggagtataggcgt

SEQ ID NO: 7558 - DNA, 22 bp, Artificial Sequence
  nucleic acid for analysis of methylation status of SEQ ID NO: 18
gcgtttttattagttcggttgt

SEQ ID NO: 7559 - DNA, 22 bp, Artificial Sequence
  bisulfite treated nucleic acid for analysis of methylation status of SEQ ID NO: 18
ttttcgcgtttttattagttcg

SEQ ID NO: 7560 - DNA, 22 bp, Artificial Sequence
  bisulfite treated nucleic acid for analysis of methylation status of SEQ ID NO: 18
ggagtataggcgtcgtgtttag

SEQ ID NO: 7561 - DNA, 22 bp, Artificial Sequence
  bisulfite treated nucleic acid for analysis of methylation status of SEQ ID NO: 18
ctatatctttaactcgctcccg

SEQ ID NO: 7562 - DNA, 33 bp, Artificial Sequence
  bisulfite treated nucleic acid for analysis of methylation status of SEQ ID NO: 18
gaggcggggaggagtagttaggtagcgacgcga

SEQ ID NO: 7563 - DNA, 23 bp, Artificial Sequence
  bisulfite treated nucleic acid for analysis of methylation status of SEQ ID NO: 18
actatatctttaactcgctcccg

SEQ ID NO: 7564 - DNA, 33 bp, Artificial Sequence
  bisulfite treated nucleic acid for analysis of methylation status of SEQ ID NO: 18
aggcggggaggagtagttaggtagcgacgcgag

SEQ ID NO: 7565 - DNA, 21 bp, Artificial Sequence
  bisulfite treated nucleic acid for analysis of methylation status of SEQ ID NO: 18
cgcgttgggtagttttatttt

SEQ ID NO: 7566 - DNA, 21 bp, Artificial Sequence
  bisulfite treated nucleic acid for analysis of methylation status of SEQ ID NO: 18
cgcgtttttattagttcggtt

SEQ ID NO: 7567 - DNA, 21 bp, Artificial Sequence
  bisulfite treated nucleic acid for analysis of methylation status of SEQ ID NO: 18
tttcgcgtttttattagttcg

SEQ ID NO: 7568 - DNA, 22 bp, Artificial Sequence
  bisulfite treated nucleic acid for analysis of methylation status of SEQ ID NO: 18
tatatctttaactcgctcccgc

SEQ ID NO: 7569 - DNA, 25 bp, Artificial Sequence
  bisulfite treated nucleic acid for analysis of methylation status of SEQ ID NO: 18
ataagagataggcgcgggaggcggg

SEQ ID NO: 7570 - DNA, 21 bp, Artificial Sequence
  bisulfite treated nucleic acid for analysis of methylation status of SEQ ID NO: 18
tcgcgtttttattagttcggt

SEQ ID NO: 7571 - DNA, 22 bp, Artificial Sequence
  bisulfite treated nucleic acid for analysis of methylation status of SEQ ID NO: 18
tataggcgtcgtgtttagagaa

SEQ ID NO: 7572 - DNA, 38 bp, Artificial Sequence
  bisulfite treated nucleic acid for analysis of methylation status of SEQ ID NO: 18
taggcgtcgtgtttagagaataagagataggcgcggga

SEQ ID NO: 7573 - DNA, 21 bp, Artificial Sequence
  bisulfite treated nucleic acid for analysis of methylation status of SEQ ID NO: 18
tttattagttcggttgtcggg

SEQ ID NO: 7574 - DNA, 23 bp, Artificial Sequence
  bisulfite treated nucleic acid for analysis of methylation status of SEQ ID NO: 18
gtttttattagttcggttgtcgg

SEQ ID NO: 7575 - DNA, 21 bp, Artificial Sequence
  bisulfite treated nucleic acid for analysis of methylation status of SEQ ID NO: 18
ttttattagttcggttgtcgg

SEQ ID NO: 7576 - DNA, 22 bp, Artificial Sequence
  bisulfite treated nucleic acid for analysis of methylation status of SEQ ID NO: 18
cgtttttattagttcggttgtc

SEQ ID NO: 7577 - DNA, 21 bp, Artificial Sequence
  bisulfite treated nucleic acid for analysis of methylation status of SEQ ID NO: 18
ttcgcgtttttattagttcgg

SEQ ID NO: 7578 - DNA, 23 bp, Artificial Sequence
  bisulfite treated nucleic acid for analysis of methylation status of SEQ ID NO: 18
gagtataggcgtcgtgtttagag

SEQ ID NO: 7579 - DNA, 21 bp, Artificial Sequence
  bisulfite treated nucleic acid for analysis of methylation status of SEQ ID NO: 18
tcggttgtcggggtatagtta

SEQ ID NO: 7580 - DNA, 20 bp, Artificial Sequence
  bisulfite treated nucleic acid for analysis of methylation status of SEQ ID NO: 18
ttattagttcggttgtcggg

SEQ ID NO: 7581 - DNA, 23 bp, Artificial Sequence
  nucleic acid for analysis of methylation status of SEQ ID NO: 18
gtataggcgtcgtgtttagagaa

SEQ ID NO: 7582 - DNA, 20 bp, Artificial Sequence
  bisulfite treated nucleic acid for analysis of methylation status of SEQ ID NO: 18
cggttgtcggggtatagtta

SEQ ID NO: 7583 - DNA, 21 bp, Artificial Sequence
  bisulfite treated nucleic acid for analysis of methylation status of SEQ ID NO: 18
atatctttaactcgctcccgc

SEQ ID NO: 7584 - DNA, 20 bp, Artificial Sequence
  bisulfite treated nucleic acid for analysis of methylation status of SEQ ID NO: 18
ccgcgcctatctcttattct

SEQ ID NO: 7585 - DNA, 21 bp, Artificial Sequence
  bisulfite treated nucleic acid for analysis of methylation status of SEQ ID NO: 18
ataggcgtcgtgtttagagaa

SEQ ID NO: 7586 - DNA, 22 bp, Artificial Sequence
  bisulfite treated nucleic acid for analysis of methylation status of SEQ ID NO: 18
agtataggcgtcgtgtttagag

SEQ ID NO: 7587 - DNA, 20 bp, Artificial Sequence
  bisulfite treated nucleic acid for analysis of methylation status of SEQ ID NO: 18
gcgcgttgggtagttttatt

SEQ ID NO: 7588 - DNA, 20 bp, Artificial Sequence
  bisulfite treated nucleic acid for analysis of methylation status of SEQ ID NO: 18
tagttcggttgtcggggtat

SEQ ID NO: 7589 - DNA, 20 bp, Artificial Sequence
  bisulfite treated nucleic acid for analysis of methylation status of SEQ ID NO: 18
ttcggttgtcggggtatagt

SEQ ID NO: 7590 - DNA, 19 bp, Artificial Sequence
  bisulfite treated nucleic acid for analysis of methylation status of SEQ ID NO: 18
tagtttcggtttttcgcgt

SEQ ID NO: 7591 - DNA, 22 bp, Artificial Sequence
  bisulfite treated nucleic acid for analysis of methylation status of SEQ ID NO: 18
ctaaacacgacgcctatactcc

SEQ ID NO: 7592 - DNA, 30 bp, Artificial Sequence
  bisulfite treated nucleic acid for analysis of methylation status of SEQ ID NO: 18
ttgtcggggtatagttatagtttcgcgcgt

SEQ ID NO: 7593 - DNA, 20 bp, Artificial Sequence
  bisulfite treated nucleic acid for analysis of methylation status of SEQ ID NO: 18
tatctttaactcgctcccgc

SEQ ID NO: 7594 - DNA, 22 bp, Artificial Sequence
  bisulfite treated nucleic acid for analysis of methylation status of SEQ ID NO: 18
ttattctctaaacacgacgcct

SEQ ID NO: 7595 - DNA, 20 bp, Artificial Sequence
  bisulfite treated nucleic acid for analysis of methylation status of SEQ ID NO: 18
aacacgacgcctatactccc

SEQ ID NO: 7596 - DNA, 20 bp, Artificial Sequence
  bisulfite treated nucleic acid for analysis of methylation status of SEQ ID NO: 18
ttagtttcggtttttcgcgt

SEQ ID NO: 7597 - DNA, 20 bp, Artificial Sequence
  bisulfite treated nucleic acid for analysis of methylation status of SEQ ID NO: 18
gggagtataggcgtcgtgtt

SEQ ID NO: 7598 - DNA, 20 bp, Artificial Sequence
  bisulfite treated nucleic acid for analysis of methylation status of SEQ ID NO: 18
tattagttcggttgtcgggg

SEQ ID NO: 7599 - DNA, 19 bp, Artificial Sequence
  bisulfite treated nucleic acid for analysis of methylation status of SEQ ID NO: 18
acacgacgcctatactccc

SEQ ID NO: 7600 - DNA, 20 bp, Artificial Sequence
  bisulfite treated nucleic acid for analysis of methylation status of SEQ ID NO: 18
gtacggtttacggcggatag

SEQ ID NO: 7601 - DNA, 22 bp, Artificial Sequence
  bisulfite treated nucleic acid for analysis of methylation status of SEQ ID NO: 18
cgaactaataaaaacgcgaaaa

SEQ ID NO: 7602 - DNA, 22 bp, Artificial Sequence
  bisulfite treated nucleic acid for analysis of methylation status of SEQ ID NO: 18
agcgtgacggtgtttgcggggt

SEQ ID NO: 7603 - DNA, 22 bp, Artificial Sequence
  bisulfite treated nucleic acid for analysis of methylation status of SEQ ID NO: 18
gggttagtcgagttttagtcgc

SEQ ID NO: 7604 - DNA, 21 bp, Artificial Sequence
  bisulfite treated nucleic acid for analysis of methylation status of SEQ ID NO: 18
atacgaatatacaccgccacg

SEQ ID NO: 7605 - DNA, 31 bp, Artificial Sequence
  bisulfite treated nucleic acid for analysis of methylation status of SEQ ID NO: 18
gtcgggcgtttgttgtttaaaattcgcgcgt

SEQ ID NO: 7606 - DNA, 19 bp, Artificial Sequence
  bisulfite treated nucleic acid for analysis of methylation status of SEQ ID NO: 18
tacggtttacggcggatag

SEQ ID NO: 7607 - DNA, 22 bp, Artificial Sequence
  bisulfite treated nucleic acid for analysis of methylation status of SEQ ID NO: 18
acaaccgaactaataaaaacgc

SEQ ID NO: 7608 - DNA, 18 bp, Artificial Sequence
  bisulfite treated nucleic acid for analysis of methylation status of SEQ ID NO: 18
ctttaactcgctcccgct

SEQ ID NO: 7609 - DNA, 18 bp, Artificial Sequence
  bisulfite treated nucleic acid for analysis of methylation status of SEQ ID NO: 18
gttcggttgtcggggtat

SEQ ID NO: 7610 - DNA, 18 bp, Artificial Sequence
  bisulfite treated nucleic acid for analysis of methylation status of SEQ ID NO: 18
atcgcgggtaggaagaaa

SEQ ID NO: 7611 - DNA, 22 bp, Artificial Sequence
  bisulfite treated nucleic acid for analysis of methylation status of SEQ ID NO: 18
cgctatccaaactacgaaaaac

SEQ ID NO: 7612 - DNA, 30 bp, Artificial Sequence
  bisulfite treated nucleic acid for analysis of methylation status of SEQ ID NO: 18
agcgggttgcgcgggtttcgaggcgtcgta

SEQ ID NO: 7613 - DNA, 22 bp, Artificial Sequence
  bisulfite treated nucleic acid for analysis of methylation status of SEQ ID NO: 18
ctatccaaactacgaaaaacgc

SEQ ID NO: 7614 - DNA, 22 bp, Artificial Sequence
  bisulfite treated nucleic acid for analysis of methylation status of SEQ ID NO: 18
gctatccaaactacgaaaaacg

SEQ ID NO: 7615 - DNA, 19 bp, Artificial Sequence
  bisulfite treated nucleic acid for analysis of methylation status of SEQ ID NO: 18
agttcggttgtcggggtat

SEQ ID NO: 7616 - DNA, 22 bp, Artificial Sequence
  bisulfite treated nucleic acid for analysis of methylation status of SEQ ID NO: 18
attctctaaacacgacgcctat

SEQ ID NO: 7617 - DNA, 18 bp, Artificial Sequence
  nucleic acid for analysis of methylation status of SEQ ID NO: 18
cccgcgcctatctcttat

SEQ ID NO: 7618 - DNA, 18 bp, Artificial Sequence
  bisulfite treated nucleic acid for analysis of methylation status of SEQ ID NO: 18
agtttcggtttttcgcgt

SEQ ID NO: 7619 - DNA, 19 bp, Artificial Sequence
  bisulfite treated nucleic acid for analysis of methylation status of SEQ ID NO: 18
atctttaactcgctcccgc

SEQ ID NO: 7620 - DNA, 20 bp, Artificial Sequence
  bisulfite treated nucleic acid for analysis of methylation status of SEQ ID NO: 18
taggcgtcgtgtttagagaa

SEQ ID NO: 7621 - DNA, 19 bp, Artificial Sequence
  bisulfite treated nucleic acid for analysis of methylation status of SEQ ID NO: 18
ggtttacggcggatagaat

SEQ ID NO: 7622 - DNA, 22 bp, Artificial Sequence
  bisulfite treated nucleic acid for analysis of methylation status of SEQ ID NO: 18
ccgacaaccgaactaataaaaa

SEQ ID NO: 7623 - DNA, 22 bp, Artificial Sequence
  bisulfite treated nucleic acid for analysis of methylation status of SEQ ID NO: 18
agtttgttgttattttcgcgtt

SEQ ID NO: 7624 - DNA, 18 bp, Artificial Sequence
  bisulfite treated nucleic acid for analysis of methylation status of SEQ ID NO: 18
acaaaatctccgcgctct

SEQ ID NO: 7625 - DNA, 39 bp, Artificial Sequence
  bisulfite treated nucleic acid for analysis of methylation status of SEQ ID NO: 18
gggagtttgtatgtttgtttagatcgatttattatcggt

SEQ ID NO: 7626 - DNA, 23 bp, Artificial Sequence
  bisulfite treated nucleic acid for analysis of methylation status of SEQ ID NO: 18
ttctctaaacacgacgcctatac

SEQ ID NO: 7627 - DNA, 18 bp, Artificial Sequence
  bisulfite treated nucleic acid for analysis of methylation status of SEQ ID NO: 18
gatcgcgggtaggaagaa

SEQ ID NO: 7628 - DNA, 20 bp, Artificial Sequence
  bisulfite treated nucleic acid for analysis of methylation status of SEQ ID NO: 18
tacgaatatacaccgccacg

SEQ ID NO: 7629 - DNA, 19 bp, Artificial Sequence
  bisulfite treated nucleic acid for analysis of methylation status of SEQ ID NO: 18
attagttcggttgtcgggg

SEQ ID NO: 7630 - DNA, 30 bp, Artificial Sequence
  bisulfite treated nucleic acid for analysis of methylation status of SEQ ID NO: 18
gtcggggtatagttatagtttcgcgcgttg

SEQ ID NO: 7631 - DNA, 19 bp, Artificial Sequence
  bisulfite treated nucleic acid for analysis of methylation status of SEQ ID NO: 18
cgctctttcttcctacccg

SEQ ID NO: 7632 - DNA, 24 bp, Artificial Sequence
  bisulfite treated nucleic acid for analysis of methylation status of SEQ ID NO: 18
gttaggtagcgacgcgagcgggag

SEQ ID NO: 7633 - DNA, 18 bp, Artificial Sequence
  bisulfite treated nucleic acid for analysis of methylation status of SEQ ID NO: 18
cgcgggtaggaagaaaga

SEQ ID NO: 7634 - DNA, 29 bp, Artificial Sequence
  bisulfite treated nucleic acid for analysis of methylation status of SEQ ID NO: 18
aacgcgtcgtttcgcgaagttatattcgt

SEQ ID NO: 7635 - DNA, 18 bp, Artificial Sequence
  bisulfite treated nucleic acid for analysis of methylation status of SEQ ID NO: 18
tcgcgggtaggaagaaag

SEQ ID NO: 7636 - DNA, 19 bp, Artificial Sequence
  bisulfite treated nucleic acid for analysis of methylation status of SEQ ID NO: 18
cgggtaggaagaaagagcg

SEQ ID NO: 7637 - DNA, 18 bp, Artificial Sequence
  bisulfite treated nucleic acid for analysis of methylation status of SEQ ID NO: 18
acgacgcctatactcccc

SEQ ID NO: 7638 - DNA, 19 bp, Artificial Sequence
  bisulfite treated nucleic acid for analysis of methylation status of SEQ ID NO: 18
tcccgcgcctatctcttat

SEQ ID NO: 7639 - DNA, 22 bp, Artificial Sequence
  bisulfite treated nucleic acid for analysis of methylation status of SEQ ID NO: 18
tcgaaacgaccaatacctataa

SEQ ID NO: 7640 - DNA, 23 bp, Artificial Sequence
  bisulfite treated nucleic acid for analysis of methylation status of SEQ ID NO: 18
ctcgaaacgaccaatacctataa

SEQ ID NO: 7641 - DNA, 23 bp, Artificial Sequence
  bisulfite treated nucleic acid for analysis of methylation status of SEQ ID NO: 18
tctctaaacacgacgcctatact

SEQ ID NO: 7642 - DNA, 23 bp, Artificial Sequence
  bisulfite treated nucleic acid for analysis of methylation status of SEQ ID NO: 18
ctctaaacacgacgcctatactc

SEQ ID NO: 7643 - DNA, 18 bp, Artificial Sequence
  bisulfite treated nucleic acid for analysis of methylation status of SEQ ID NO: 18
acggtttacggcggatag

SEQ ID NO: 7644 - DNA, 18 bp, Artificial Sequence
  bisulfite treated nucleic acid for analysis of methylation status of SEQ ID NO: 18
tttaactcgctcccgctc

SEQ ID NO: 7645 - DNA, 18 bp, Artificial Sequence
  bisulfite treated nucleic acid for analysis of methylation status of SEQ ID NO: 18
tctttaactcgctcccgc

SEQ ID NO: 7646 - DNA, 22 bp, Artificial Sequence
  bisulfite treated nucleic acid for analysis of methylation status of SEQ ID NO: 18
tctaaacacgacgcctatactc

SEQ ID NO: 7647 - DNA, 18 bp, Artificial Sequence
  bisulfite treated nucleic acid for analysis of methylation status of SEQ ID NO: 18
ggggagtataggcgtcgt

SEQ ID NO: 7648 - DNA, 26 bp, Artificial Sequence
  bisulfite treated nucleic acid for analysis of methylation status of SEQ ID NO: 18
gagtagttaggtagcgacgcgagcgg

SEQ ID NO: 7649 - DNA, 22 bp, Artificial Sequence
  bisulfite treated nucleic acid for analysis of methylation status of SEQ ID NO: 18
tcgctatccaaactacgaaaaa

SEQ ID NO: 7650 - DNA, 23 bp, Artificial Sequence
  bisulfite treated nucleic acid for analysis of methylation status of SEQ ID NO: 18
tattctctaaacacgacgcctat

SEQ ID NO: 7651 - DNA, 17 bp, Artificial Sequence
  bisulfite treated nucleic acid for analysis of methylation status of SEQ ID NO: 18
ttcggtttttcgcgttt

SEQ ID NO: 7652 - DNA, 21 bp, Artificial Sequence
  bisulfite treated nucleic acid for analysis of methylation status of SEQ ID NO: 18
accgaactaataaaaacgcga

SEQ ID NO: 7653 - DNA, 30 bp, Artificial Sequence
  bisulfite treated nucleic acid for analysis of methylation status of SEQ ID NO: 18
tgtcggggtatagttatagtttcgcgcgtt

SEQ ID NO: 7654 - DNA, 18 bp, Artificial Sequence
  bisulfite treated nucleic acid for analysis of methylation status of SEQ ID NO: 18
atatacaccgccacgcac

SEQ ID NO: 7655 - DNA, 21 bp, Artificial Sequence
  bisulfite treated nucleic acid for analysis of methylation status of SEQ ID NO: 18
tataggcgtcgtgtttagaga

SEQ ID NO: 7656 - DNA, 17 bp, Artificial Sequence
  bisulfite treated nucleic acid for analysis of methylation status of SEQ ID NO: 18
ttaactcgctcccgctc

SEQ ID NO: 7657 - DNA, 21 bp, Artificial Sequence
  bisulfite treated nucleic acid for analysis of methylation status of SEQ ID NO: 18
taaacacgacgcctatactcc

SEQ ID NO: 7658 - DNA, 23 bp, Artificial Sequence
  bisulfite treated nucleic acid for analysis of methylation status of SEQ ID NO: 18
cttattctctaaacacgacgcct

SEQ ID NO: 7659 - DNA, 17 bp, Artificial Sequence
  bisulfite treated nucleic acid for analysis of methylation status of SEQ ID NO: 18
caaaatctccgcgctct

SEQ ID NO: 7660 - DNA, 20 bp, Artificial Sequence
  bisulfite treated nucleic acid for analysis of methylation status of SEQ ID NO: 18
ccgaactaataaaaacgcga

SEQ ID NO: 7661 - DNA, 18 bp, Artificial Sequence
  bisulfite treated nucleic acid for analysis of methylation status of SEQ ID NO: 18
ttagttcggttgtcgggg

SEQ ID NO: 7662 - DNA, 23 bp, Artificial Sequence
  bisulfite treated nucleic acid for analysis of methylation status of SEQ ID NO: 18
tcgaaacgaccaatacctataaa

SEQ ID NO: 7663 - DNA, 22 bp, Artificial Sequence
  bisulfite treated nucleic acid for analysis of methylation status of SEQ ID NO: 18
ctcgctatccaaactacgaaaa

SEQ ID NO: 7664 - DNA, 25 bp, Artificial Sequence
  bisulfite treated nucleic acid for analysis of methylation status of SEQ ID NO: 18
gtagttaggtagcgacgcgagcggg

SEQ ID NO: 7665 - DNA, 23 bp, Artificial Sequence
  bisulfite treated nucleic acid for analysis of methylation status of SEQ ID NO: 18
ctcttattctctaaacacgacgc

SEQ ID NO: 7666 - DNA, 19 bp, Artificial Sequence
  bisulfite treated nucleic acid for analysis of methylation status of SEQ ID NO: 18
agcgcggagattttgttta

SEQ ID NO: 7667 - DNA, 21 bp, Artificial Sequence
  bisulfite treated nucleic acid for analysis of methylation status of SEQ ID NO: 18
gctcgaaacgaccaataccta

SEQ ID NO: 7668 - DNA, 25 bp, Artificial Sequence
  bisulfite treated nucleic acid for analysis of methylation status of SEQ ID NO: 18
ttcggttcgtacggtttacggcgga

SEQ ID NO: 7669 - DNA, 19 bp, Artificial Sequence
  bisulfite treated nucleic acid for analysis of methylation status of SEQ ID NO: 18
acgaatatacaccgccacg

SEQ ID NO: 7670 - DNA, 19 bp, Artificial Sequence
  bisulfite treated nucleic acid for analysis of methylation status of SEQ ID NO: 18
aatatacaccgccacgcac

SEQ ID NO: 7671 - DNA, 23 bp, Artificial Sequence
  bisulfite treated nucleic acid for analysis of methylation status of SEQ ID NO: 18
gacaaccgaactaataaaaacgc

SEQ ID NO: 7672 - DNA, 22 bp, Artificial Sequence
  bisulfite treated nucleic acid for analysis of methylation status of SEQ ID NO: 18
gagtttgttgttattttcgcgt

SEQ ID NO: 7673 - DNA, 18 bp, Artificial Sequence
  bisulfite treated nucleic acid for analysis of methylation status of SEQ ID NO: 18
gaatatacaccgccacgc

SEQ ID NO: 7674 - DNA, 22 bp, Artificial Sequence
  bisulfite treated nucleic acid for analysis of methylation status of SEQ ID NO: 18
ataggcgtcgtgtttagagaat

SEQ ID NO: 7675 - DNA, 18 bp, Artificial Sequence
  bisulfite treated nucleic acid for analysis of methylation status of SEQ ID NO: 18
cgaatatacaccgccacg

SEQ ID NO: 7676 - DNA, 17 bp, Artificial Sequence
  bisulfite treated nucleic acid for analysis of methylation status of SEQ ID NO: 18
cggtttacggcggatag

SEQ ID NO: 7677 - DNA, 20 bp, Artificial Sequence
  bisulfite treated nucleic acid for analysis of methylation status of SEQ ID NO: 18
gttcggttgtcggggtatag

SEQ ID NO: 7678 - DNA, 18 bp, Artificial Sequence
  bisulfite treated nucleic acid for analysis of methylation status of SEQ ID NO: 18
tttcttcctacccgcgat

SEQ ID NO: 7679 - DNA, 22 bp, Artificial Sequence
  bisulfite treated nucleic acid for analysis of methylation status of SEQ ID NO: 18
cgacaaccgaactaataaaaac

SEQ ID NO: 7680 - DNA, 19 bp, Artificial Sequence
  bisulfite treated nucleic acid for analysis of methylation status of SEQ ID NO: 18
ctttcttcctacccgcgat

SEQ ID NO: 7681 - DNA, 18 bp, Artificial Sequence
  bisulfite treated nucleic acid for analysis of methylation status of SEQ ID NO: 18
cacgacgcctatactccc

SEQ ID NO: 7682 - DNA, 18 bp, Artificial Sequence
  bisulfite treated nucleic acid for analysis of methylation status of SEQ ID NO: 18
agcgcggagattttgttt

SEQ ID NO: 7683 - DNA, 19 bp, Artificial Sequence
  bisulfite treated nucleic acid for analysis of methylation status of SEQ ID NO: 18
cgcggagattttgtttagg

SEQ ID NO: 7684 - DNA, 21 bp, Artificial Sequence
  bisulfite treated nucleic acid for analysis of methylation status of SEQ ID NO: 18
atacgctcgaaacgaccaata

SEQ ID NO: 7685 - DNA, 20 bp, Artificial Sequence
  bisulfite treated nucleic acid for analysis of methylation status of SEQ ID NO: 18
cgcgtttttattagttcggt

SEQ ID NO: 7686 - DNA, 21 bp, Artificial Sequence
  bisulfite treated nucleic acid for analysis of methylation status of SEQ ID NO: 18
caaccgaactaataaaaacgc

SEQ ID NO: 7687 - DNA, 18 bp, Artificial Sequence
  bisulfite treated nucleic acid for analysis of methylation status of SEQ ID NO: 18
agagcgcggagattttgt

SEQ ID NO: 7688 - DNA, 20 bp, Artificial Sequence
  bisulfite treated nucleic acid for analysis of methylation status of SEQ ID NO: 18
aaacacgacgcctatactcc

SEQ ID NO: 7689 - DNA, 20 bp, Artificial Sequence
  bisulfite treated nucleic acid for analysis of methylation status of SEQ ID NO: 18
agcgcggagattttgtttag

SEQ ID NO: 7690 - DNA, 22 bp, Artificial Sequence
  bisulfite treated nucleic acid for analysis of methylation status of SEQ ID NO: 18
taggcgtcgtgtttagagaata

SEQ ID NO: 7691 - DNA, 22 bp, Artificial Sequence
  bisulfite treated nucleic acid for analysis of methylation status of SEQ ID NO: 18
tctaaaccgatctatcaccgac

SEQ ID NO: 7692 - DNA, 21 bp, Artificial Sequence
  bisulfite treated nucleic acid for analysis of methylation status of SEQ ID NO: 18
gttacgtttttcgggttttgt

SEQ ID NO: 7693 - DNA, 35 bp, Artificial Sequence
  bisulfite treated nucleic acid for analysis of methylation status of SEQ ID NO: 18
tgcgggtcgggggatttgggtagggttttcgcgtt

SEQ ID NO: 7694 - DNA, 22 bp, Artificial Sequence
  bisulfite treated nucleic acid for analysis of methylation status of SEQ ID NO: 18
atctaaaccgatctatcaccga

SEQ ID NO: 7695 - DNA, 21 bp, Artificial Sequence
  bisulfite treated nucleic acid for analysis of methylation status of SEQ ID NO: 18
tatcgttacgtttttcgggtt

SEQ ID NO: 7696 - DNA, 24 bp, Artificial Sequence
  bisulfite treated nucleic acid for analysis of methylation status of SEQ ID NO: 18
ttcgtcgtgaatcgtgcgggtcgg

SEQ ID NO: 7697 - DNA, 21 bp, Artificial Sequence
  bisulfite treated nucleic acid for analysis of methylation status of SEQ ID NO: 18
ttacgtttttcgggttttgtt

SEQ ID NO: 7698 - DNA, 22 bp, Artificial Sequence
  bisulfite treated nucleic acid for analysis of methylation status of SEQ ID NO: 18
tatcgttacgtttttcgggttt

SEQ ID NO: 7699 - DNA, 22 bp, Artificial Sequence
  bisulfite treated nucleic acid for analysis of methylation status of SEQ ID NO: 18
taaaccgatctatcaccgacac

SEQ ID NO: 7700 - DNA, 21 bp, Artificial Sequence
  bisulfite treated nucleic acid for analysis of methylation status of SEQ ID NO: 18
tacgtttttcgggttttgttc

SEQ ID NO: 7701 - DNA, 23 bp, Artificial Sequence
  bisulfite treated nucleic acid for analysis of methylation status of SEQ ID NO: 18
tatctaaaccgatctatcaccga

SEQ ID NO: 7702 - DNA, 22 bp, Artificial Sequence
  bisulfite treated nucleic acid for analysis of methylation status of SEQ ID NO: 18
ctaaaccgatctatcaccgaca

SEQ ID NO: 7703 - DNA, 22 bp, Artificial Sequence
  bisulfite treated nucleic acid for analysis of methylation status of SEQ ID NO: 18
gttacgtttttcgggttttgtt

SEQ ID NO: 7704 - DNA, 20 bp, Artificial Sequence
  bisulfite treated nucleic acid for analysis of methylation status of SEQ ID NO: 18
ccgaaaactaactcgctcac

SEQ ID NO: 7705 - DNA, 22 bp, Artificial Sequence
  bisulfite treated nucleic acid for analysis of methylation status of SEQ ID NO: 18
gtcggtgatagatcggtttaga

SEQ ID NO: 7706 - DNA, 21 bp, Artificial Sequence
  bisulfite treated nucleic acid for analysis of methylation status of SEQ ID NO: 18
ggggggaggcgcggagatggt

SEQ ID NO: 7707 - DNA, 20 bp, Artificial Sequence
  bisulfite treated nucleic acid for analysis of methylation status of SEQ ID NO: 18
aaacccgaaaactaactcgc

SEQ ID NO: 7708 - DNA, 20 bp, Artificial Sequence
  bisulfite treated nucleic acid for analysis of methylation status of SEQ ID NO: 18
atcgttacgtttttcgggtt

SEQ ID NO: 7709 - DNA, 21 bp, Artificial Sequence
  bisulfite treated nucleic acid for analysis of methylation status of SEQ ID NO: 18
actaactcgctcactcgcaac

SEQ ID NO: 7710 - DNA, 22 bp, Artificial Sequence
  bisulfite treated nucleic acid for analysis of methylation status of SEQ ID NO: 18
tcggtgatagatcggtttagat

SEQ ID NO: 7711 - DNA, 21 bp, Artificial Sequence
  bisulfite treated nucleic acid for analysis of methylation status of SEQ ID NO: 18
aaaccgatctatcaccgacac

SEQ ID NO: 7712 - DNA, 20 bp, Artificial Sequence
  bisulfite treated nucleic acid for analysis of methylation status of SEQ ID NO: 18
taactcgctcactcgcaact

SEQ ID NO: 7713 - DNA, 20 bp, Artificial Sequence
  bisulfite treated nucleic acid for analysis of methylation status of SEQ ID NO: 18
actaactcgctcactcgcaa

SEQ ID NO: 7714 - DNA, 23 bp, Artificial Sequence
  bisulfite treated nucleic acid for analysis of methylation status of SEQ ID NO: 18
ctatctaaaccgatctatcaccg

SEQ ID NO: 7715 - DNA, 21 bp, Artificial Sequence
  bisulfite treated nucleic acid for analysis of methylation status of SEQ ID NO: 18
atcgttacgtttttcgggttt

SEQ ID NO: 7716 - DNA, 21 bp, Artificial Sequence
  bisulfite treated nucleic acid for analysis of methylation status of SEQ ID NO: 18
ctaactcgctcactcgcaact

SEQ ID NO: 7717 - DNA, 20 bp, Artificial Sequence
  bisulfite treated nucleic acid for analysis of methylation status of SEQ ID NO: 18
tacgtttttcgggttttgtt

SEQ ID NO: 7718 - DNA, 20 bp, Artificial Sequence
  bisulfite treated nucleic acid for analysis of methylation status of SEQ ID NO: 18
ctaactcgctcactcgcaac

SEQ ID NO: 7719 - DNA, 20 bp, Artificial Sequence
  bisulfite treated nucleic acid for analysis of methylation status of SEQ ID NO: 18
acgtttttcgggttttgttc

SEQ ID NO: 7720 - DNA, 22 bp, Artificial Sequence
  bisulfite treated nucleic acid for analysis of methylation status of SEQ ID NO: 18
taaacccgaaaactaactcgct

SEQ ID NO: 7721 - DNA, 21 bp, Artificial Sequence
  bisulfite treated nucleic acid for analysis of methylation status of SEQ ID NO: 18
gtgtcggtgatagatcggttt

SEQ ID NO: 7722 - DNA, 19 bp, Artificial Sequence
  bisulfite treated nucleic acid for analysis of methylation status of SEQ ID NO: 18
tcgttacgtttttcgggtt

SEQ ID NO: 7723 - DNA, 20 bp, Artificial Sequence
  bisulfite treated nucleic acid for analysis of methylation status of SEQ ID NO: 18
tgtcggtgatagatcggttt

SEQ ID NO: 7724 - DNA, 19 bp, Artificial Sequence
  bisulfite treated nucleic acid for analysis of methylation status of SEQ ID NO: 18
cgttacgtttttcgggttt

SEQ ID NO: 7725 - DNA, 23 bp, Artificial Sequence
  bisulfite treated nucleic acid for analysis of methylation status of SEQ ID NO: 18
tcggtgatagatcggtttagata

SEQ ID NO: 7726 - DNA, 21 bp, Artificial Sequence
  bisulfite treated nucleic acid for analysis of methylation status of SEQ ID NO: 18
ccgaaaactaactcgctcact

SEQ ID NO: 7727 - DNA, 23 bp, Artificial Sequence
  bisulfite treated nucleic acid for analysis of methylation status of SEQ ID NO: 18
cggtgatagatcggtttagatag

SEQ ID NO: 7728 - DNA, 20 bp, Artificial Sequence
  bisulfite treated nucleic acid for analysis of methylation status of SEQ ID NO: 18
aaccgatctatcaccgacac

SEQ ID NO: 7729 - DNA, 21 bp, Artificial Sequence
  bisulfite treated nucleic acid for analysis of methylation status of SEQ ID NO: 18
actcgctaaacccgaaaacta

SEQ ID NO: 7730 - DNA, 20 bp, Artificial Sequence
  bisulfite treated nucleic acid for analysis of methylation status of SEQ ID NO: 18
gtgtcggtgatagatcggtt

SEQ ID NO: 7731 - DNA, 20 bp, Artificial Sequence
  bisulfite treated nucleic acid for analysis of methylation status of SEQ ID NO: 18
tcgttacgtttttcgggttt

SEQ ID NO: 7732 - DNA, 19 bp, Artificial Sequence
  bisulfite treated nucleic acid for analysis of methylation status of SEQ ID NO: 18
ttttcgggttttgttcgtc

SEQ ID NO: 7733 - DNA, 22 bp, Artificial Sequence
  bisulfite treated nucleic acid for analysis of methylation status of SEQ ID NO: 18
cgctaaacccgaaaactaactc

SEQ ID NO: 7734 - DNA, 22 bp, Artificial Sequence
  bisulfite treated nucleic acid for analysis of methylation status of SEQ ID NO: 18
ctaaacccgaaaactaactcgc

SEQ ID NO: 7735 - DNA, 22 bp, Artificial Sequence
  bisulfite treated nucleic acid for analysis of methylation status of SEQ ID NO: 18
aactcgctaaacccgaaaacta

SEQ ID NO: 7736 - DNA, 20 bp, Artificial Sequence
  bisulfite treated nucleic acid for analysis of methylation status of SEQ ID NO: 18
aacccgaaaactaactcgct

SEQ ID NO: 7737 - DNA, 22 bp, Artificial Sequence
  bisulfite treated nucleic acid for analysis of methylation status of SEQ ID NO: 18
tgtcggtgatagatcggtttag

SEQ ID NO: 7738 - DNA, 21 bp, Artificial Sequence
  bisulfite treated nucleic acid for analysis of methylation status of SEQ ID NO: 18
accgatctatcaccgacacac

SEQ ID NO: 7739 - DNA, 21 bp, Artificial Sequence
  bisulfite treated nucleic acid for analysis of methylation status of SEQ ID NO: 18
gtgtgtcggtgatagatcggt

SEQ ID NO: 7740 - DNA, 19 bp, Artificial Sequence
  bisulfite treated nucleic acid for analysis of methylation status of SEQ ID NO: 18
aactcgctcactcgcaact

SEQ ID NO: 7741 - DNA, 20 bp, Artificial Sequence
  bisulfite treated nucleic acid for analysis of methylation status of SEQ ID NO: 18
ccgatctatcaccgacacac

SEQ ID NO: 7742 - DNA, 20 bp, Artificial Sequence
  bisulfite treated nucleic acid for analysis of methylation status of SEQ ID NO: 18
tgtgtcggtgatagatcggt

SEQ ID NO: 7743 - DNA, 20 bp, Artificial Sequence
  bisulfite treated nucleic acid for analysis of methylation status of SEQ ID NO: 18
ggtgtgtcggtgatagatcg

SEQ ID NO: 7744 - DNA, 21 bp, Artificial Sequence
  bisulfite treated nucleic acid for analysis of methylation status of SEQ ID NO: 18
ctcgctaaacccgaaaactaa

SEQ ID NO: 7745 - DNA, 19 bp, Artificial Sequence
  nucleic acid for analysis of methylation status of SEQ ID NO: 18
acgtttttcgggttttgtt

SEQ ID NO: 7746 - DNA, 21 bp, Artificial Sequence
  bisulfite treated nucleic acid for analysis of methylation status of SEQ ID NO: 18
cgctaaacccgaaaactaact

SEQ ID NO: 7747 - DNA, 22 bp, Artificial Sequence
  bisulfite treated nucleic acid for analysis of methylation status of SEQ ID NO: 18
ctcgctaaacccgaaaactaac

SEQ ID NO: 7748 - DNA, 22 bp, Artificial Sequence
  bisulfite treated nucleic acid for analysis of methylation status of SEQ ID NO: 18
tcgctaaacccgaaaactaact

SEQ ID NO: 7749 - DNA, 22 bp, Artificial Sequence
  bisulfite treated nucleic acid for analysis of methylation status of SEQ ID NO: 18
gctaaacccgaaaactaactcg

SEQ ID NO: 7750 - DNA, 21 bp, Artificial Sequence
  bisulfite treated nucleic acid for analysis of methylation status of SEQ ID NO: 18
aaacccgaaaactaactcgct

SEQ ID NO: 7751 - DNA, 19 bp, Artificial Sequence
  bisulfite treated nucleic acid for analysis of methylation status of SEQ ID NO: 18
aacccgaaaactaactcgc

SEQ ID NO: 7752 - DNA, 20 bp, Artificial Sequence
  bisulfite treated nucleic acid for analysis of methylation status of SEQ ID NO: 18
cgatctatcaccgacacacc

SEQ ID NO: 7753 - DNA, 19 bp, Artificial Sequence
  bisulfite treated nucleic acid for analysis of methylation status of SEQ ID NO: 18
actcgctcactcgcaactc

SEQ ID NO: 7754 - DNA, 18 bp, Artificial Sequence
  bisulfite treated nucleic acid for analysis of methylation status of SEQ ID NO: 18
ctcgctcactcgcaactc

SEQ ID NO: 7755 - DNA, 20 bp, Artificial Sequence
  bisulfite treated nucleic acid for analysis of methylation status of SEQ ID NO: 18
accgatctatcaccgacaca

SEQ ID NO: 7756 - DNA, 19 bp, Artificial Sequence
  bisulfite treated nucleic acid for analysis of methylation status of SEQ ID NO: 18
ccgatctatcaccgacaca

SEQ ID NO: 7757 - DNA, 24 bp, Artificial Sequence
  bisulfite treated nucleic acid for analysis of methylation status of SEQ ID NO: 18
tcggtgatagatcggtttagatag

SEQ ID NO: 7758 - DNA, 21 bp, Artificial Sequence
  bisulfite treated nucleic acid for analysis of methylation status of SEQ ID NO: 18
aaaactaactcgctcactcgc

SEQ ID NO: 7759 - DNA, 20 bp, Artificial Sequence
  bisulfite treated nucleic acid for analysis of methylation status of SEQ ID NO: 18
gtgtgtcggtgatagatcgg

SEQ ID NO: 7760 - DNA, 19 bp, Artificial Sequence
  bisulfite treated nucleic acid for analysis of methylation status of SEQ ID NO: 18
tgtgtcggtgatagatcgg

SEQ ID NO: 7761 - DNA, 22 bp, Artificial Sequence
  bisulfite treated nucleic acid for analysis of methylation status of SEQ ID NO: 20
aaaaacgtgagttcgtttaggt

SEQ ID NO: 7762 - DNA, 22 bp, Artificial Sequence
  bisulfite treated nucleic acid for analysis of methylation status of SEQ ID NO: 20
ttcttaactacaaccgctcgat

SEQ ID NO: 7763 - DNA, 41 bp, Artificial Sequence
  bisulfite treated nucleic acid for analysis of methylation status of SEQ ID NO: 20
ttacgtaggtgggtaattggtttaaaaatcgtcgataaagg

SEQ ID NO: 7764 - DNA, 23 bp, Artificial Sequence
  bisulfite treated nucleic acid for analysis of methylation status of SEQ ID NO: 20
ttgtcgttttgtcgagtaatttt

SEQ ID NO: 7765 - DNA, 22 bp, Artificial Sequence
  bisulfite treated nucleic acid for analysis of methylation status of SEQ ID NO: 20
acgaatcacaactcgtaacaca

SEQ ID NO: 7766 - DNA, 37 bp, Artificial Sequence
  bisulfite treated nucleic acid for analysis of methylation status of SEQ ID NO: 20
ttcggaagaatttttagtcgtcgggttggagggacgt

SEQ ID NO: 7767 - DNA, 22 bp, Artificial Sequence
  bisulfite treated nucleic acid for analysis of methylation status of SEQ ID NO: 20
acacgaatcacaactcgtaaca

SEQ ID NO: 7768 - DNA, 22 bp, Artificial Sequence
  bisulfite treated nucleic acid for analysis of methylation status of SEQ ID NO: 20
aaaacgcgaaaacctctaaata

SEQ ID NO: 7769 - DNA, 32 bp, Artificial Sequence
  bisulfite treated nucleic acid for analysis of methylation status of SEQ ID NO: 20
aagggatcgagcggttgtagttaagaataggt

SEQ ID NO: 7770 - DNA, 22 bp, Artificial Sequence
  bisulfite treated nucleic acid for analysis of methylation status of SEQ ID NO: 20
tgtcgttttgtcgagtaatttt

SEQ ID NO: 7771 - DNA, 22 bp, Artificial Sequence
  bisulfite treated nucleic acid for analysis of methylation status of SEQ ID NO: 20
gcgaaaacctctaaataccgac

SEQ ID NO: 7772 - DNA, 37 bp, Artificial Sequence
  bisulfite treated nucleic acid for analysis of methylation status of SEQ ID NO: 20
gggtaattggtttaaaaatcgtcgataaagggatcga

SEQ ID NO: 7773 - DNA, 22 bp, Artificial Sequence
  bisulfite treated nucleic acid for analysis of methylation status of SEQ ID NO: 20
aaacgcgaaaacctctaaatac

SEQ ID NO: 7774 - DNA, 22 bp, Artificial Sequence
  bisulfite treated nucleic acid for analysis of methylation status of SEQ ID NO: 20
aaaacgtgagttcgtttaggta

SEQ ID NO: 7775 - DNA, 22 bp, Artificial Sequence
  bisulfite treated nucleic acid for analysis of methylation status of SEQ ID NO: 20
ataatagtagggattcgcggag

SEQ ID NO: 7776 - DNA, 21 bp, Artificial Sequence
  bisulfite treated nucleic acid for analysis of methylation status of SEQ ID NO: 20
caacccgacgactaaaaattc

SEQ ID NO: 7777 - DNA, 37 bp, Artificial Sequence
  bisulfite treated nucleic acid for analysis of methylation status of SEQ ID NO: 20
gtcgagtaattttcgttttaattgttggggttttcgg

SEQ ID NO: 7778 - DNA, 22 bp, Artificial Sequence
  bisulfite treated nucleic acid for analysis of methylation status of SEQ ID NO: 20
tacgagttgtgattcgtgtttt

SEQ ID NO: 7779 - DNA, 21 bp, Artificial Sequence
  bisulfite treated nucleic acid for analysis of methylation status of SEQ ID NO: 20
caacacctctaacgtaccgtc

SEQ ID NO: 7780 - DNA, 26 bp, Artificial Sequence
  bisulfite treated nucleic acid for analysis of methylation status of SEQ ID NO: 20
atagggtttcgggcgggtattacggg

SEQ ID NO: 7781 - DNA, 23 bp, Artificial Sequence
  bisulfite treated nucleic acid for analysis of methylation status of SEQ ID NO: 20
attcttaactacaaccgctcgat

SEQ ID NO: 7782 - DNA, 22 bp, Artificial Sequence
  bisulfite treated nucleic acid for analysis of methylation status of SEQ ID NO: 20
acgagttgtgattcgtgttttt

SEQ ID NO: 7783 - DNA, 22 bp, Artificial Sequence
  nucleic acid for analysis of methylation status of SEQ ID NO: 20
tattcttaactacaaccgctcg

SEQ ID NO: 7784 - DNA, 23 bp, Artificial Sequence
  bisulfite treated nucleic acid for analysis of methylation status of SEQ ID NO: 20
ctattcttaactacaaccgctcg

SEQ ID NO: 7785 - DNA, 22 bp, Artificial Sequence
  bisulfite treated nucleic acid for analysis of methylation status of SEQ ID NO: 20
caaaacgcgaaaacctctaaat

SEQ ID NO: 7786 - DNA, 22 bp, Artificial Sequence
  bisulfite treated nucleic acid for analysis of methylation status of SEQ ID NO: 20
gtataatagtagggattcgcgg

SEQ ID NO: 7787 - DNA, 25 bp, Artificial Sequence
  bisulfite treated nucleic acid for analysis of methylation status of SEQ ID NO: 20
gggcggtcgcggatttttgttcgat

SEQ ID NO: 7788 - DNA, 22 bp, Artificial Sequence
  bisulfite treated nucleic acid for analysis of methylation status of SEQ ID NO: 20
cggaagagttcggttttatttt

SEQ ID NO: 7789 - DNA, 23 bp, Artificial Sequence
  bisulfite treated nucleic acid for analysis of methylation status of SEQ ID NO: 20
ccatttctaacgatacgtctacc

SEQ ID NO: 7790 - DNA, 28 bp, Artificial Sequence
  bisulfite treated nucleic acid for analysis of methylation status of SEQ ID NO: 20
aacgcgatcgcgggagtatttgtttagg

SEQ ID NO: 7791 - DNA, 20 bp, Artificial Sequence
  bisulfite treated nucleic acid for analysis of methylation status of SEQ ID NO: 20
ccaacacctctaacgtaccg

SEQ ID NO: 7792 - DNA, 21 bp, Artificial Sequence
  bisulfite treated nucleic acid for analysis of methylation status of SEQ ID NO: 20
cgaatcacaactcgtaacaca

SEQ ID NO: 7793 - DNA, 21 bp, Artificial Sequence
  bisulfite treated nucleic acid for analysis of methylation status of SEQ ID NO: 20
cacgaatcacaactcgtaaca

SEQ ID NO: 7794 - DNA, 23 bp, Artificial Sequence
  bisulfite treated nucleic acid for analysis of methylation status of SEQ ID NO: 20
aaaacgaaaattactcgacaaaa

SEQ ID NO: 7795 - DNA, 23 bp, Artificial Sequence
  bisulfite treated nucleic acid for analysis of methylation status of SEQ ID NO: 20
aaaaacgtgagttcgtttaggta

SEQ ID NO: 7796 - DNA, 22 bp, Artificial Sequence
  bisulfite treated nucleic acid for analysis of methylation status of SEQ ID NO: 20
cgaaaacctctaaataccgacc

SEQ ID NO: 7797 - DNA, 21 bp, Artificial Sequence
  bisulfite treated nucleic acid for analysis of methylation status of SEQ ID NO: 20
cgagttgtgattcgtgttttt

SEQ ID NO: 7798 - DNA, 24 bp, Artificial Sequence
  bisulfite treated nucleic acid for analysis of methylation status of SEQ ID NO: 20
accatttctaacgatacgtctacc

SEQ ID NO: 7799 - DNA, 21 bp, Artificial Sequence
  bisulfite treated nucleic acid for analysis of methylation status of SEQ ID NO: 20
taatagtagggattcgcggag

SEQ ID NO: 7800 - DNA, 20 bp, Artificial Sequence
  bisulfite treated nucleic acid for analysis of methylation status of SEQ ID NO: 20
taactacaaccgctcgatcc

SEQ ID NO: 7801 - DNA, 41 bp, Artificial Sequence
  bisulfite treated nucleic acid for analysis of methylation status of SEQ ID NO: 20
atttttacgtaggtgggtaattggtttaaaaatcgtcgata

SEQ ID NO: 7802 - DNA, 21 bp, Artificial Sequence
  bisulfite treated nucleic acid for analysis of methylation status of SEQ ID NO: 20
ttaactacaaccgctcgatcc

SEQ ID NO: 7803 - DNA, 21 bp, Artificial Sequence
  bisulfite treated nucleic acid for analysis of methylation status of SEQ ID NO: 20
tcttaactacaaccgctcgat

SEQ ID NO: 7804 - DNA, 41 bp, Artificial Sequence
  bisulfite treated nucleic acid for analysis of methylation status of SEQ ID NO: 20
ttttacgtaggtgggtaattggtttaaaaatcgtcgataaa

SEQ ID NO: 7805 - DNA, 23 bp, Artificial Sequence
  bisulfite treated nucleic acid for analysis of methylation status of SEQ ID NO: 20
tataatagtagggattcgcggag

SEQ ID NO: 7806 - DNA, 37 bp, Artificial Sequence
  bisulfite treated nucleic acid for analysis of methylation status of SEQ ID NO: 20
gttttgtcgagtaattttcgttttaattgttggggtt

SEQ ID NO: 7807 - DNA, 22 bp, Artificial Sequence
  nucleic acid for analysis of methylation status of SEQ ID NO: 20
tgttacgagttgtgattcgtgt

SEQ ID NO: 7808 - DNA, 19 bp, Artificial Sequence
  bisulfite treated nucleic acid for analysis of methylation status of SEQ ID NO: 20
acctctaacgtaccgtcgc

SEQ ID NO: 7809 - DNA, 22 bp, Artificial Sequence
  bisulfite treated nucleic acid for analysis of methylation status of SEQ ID NO: 20
gtgttacgagttgtgattcgtg

SEQ ID NO: 7810 - DNA, 23 bp, Artificial Sequence
  bisulfite treated nucleic acid for analysis of methylation status of SEQ ID NO: 20
aaacgtgagttcgtttaggtaat

SEQ ID NO: 7811 - DNA, 21 bp, Artificial Sequence
  bisulfite treated nucleic acid for analysis of methylation status of SEQ ID NO: 20
aaaaacgtgagttcgtttagg

SEQ ID NO: 7812 - DNA, 22 bp, Artificial Sequence
  bisulfite treated nucleic acid for analysis of methylation status of SEQ ID NO: 20
aacgcgaaaacctctaaatacc

SEQ ID NO: 7813 - DNA, 20 bp, Artificial Sequence
  bisulfite treated nucleic acid for analysis of methylation status of SEQ ID NO: 20
ccaacccgacgactaaaaat

SEQ ID NO: 7814 - DNA, 24 bp, Artificial Sequence
  bisulfite treated nucleic acid for analysis of methylation status of SEQ ID NO: 20
taaaacgaaaattactcgacaaaa

SEQ ID NO: 7815 - DNA, 23 bp, Artificial Sequence
  bisulfite treated nucleic acid for analysis of methylation status of SEQ ID NO: 20
ttttgtcgagtaattttcgtttt

SEQ ID NO: 7816 - DNA, 22 bp, Artificial Sequence
  bisulfite treated nucleic acid for analysis of methylation status of SEQ ID NO: 20
atcacaactcgtaacacaaccg

SEQ ID NO: 7817 - DNA, 22 bp, Artificial Sequence
  bisulfite treated nucleic acid for analysis of methylation status of SEQ ID NO: 20
ttacgagttgtgattcgtgttt

SEQ ID NO: 7818 - DNA, 25 bp, Artificial Sequence
  bisulfite treated nucleic acid for analysis of methylation status of SEQ ID NO: 20
taccatttctaacgatacgtctacc

SEQ ID NO: 7819 - DNA, 22 bp, Artificial Sequence
  bisulfite treated nucleic acid for analysis of methylation status of SEQ ID NO: 20
ttgtgttacgagttgtgattcg

SEQ ID NO: 7820 - DNA, 20 bp, Artificial Sequence
  bisulfite treated nucleic acid for analysis of methylation status of SEQ ID NO: 20
aatagtagggattcgcggag

SEQ ID NO: 7821 - DNA, 23 bp, Artificial Sequence
  bisulfite treated nucleic acid for analysis of methylation status of SEQ ID NO: 20
ttaaaacgaaaattactcgacaa

SEQ ID NO: 7822 - DNA, 20 bp, Artificial Sequence
  bisulfite treated nucleic acid for analysis of methylation status of SEQ ID NO: 20
gtttttaggtcgggtcgatt

SEQ ID NO: 7823 - DNA, 22 bp, Artificial Sequence
  bisulfite treated nucleic acid for analysis of methylation status of SEQ ID NO: 20
tttgtcgagtaattttcgtttt

SEQ ID NO: 7824 - DNA, 21 bp, Artificial Sequence
  bisulfite treated nucleic acid for analysis of methylation status of SEQ ID NO: 20
gacggtacgttagaggtgttg

SEQ ID NO: 7825 - DNA, 20 bp, Artificial Sequence
  bisulfite treated nucleic acid for analysis of methylation status of SEQ ID NO: 20
actcaaatatcgcactcgct

SEQ ID NO: 7826 - DNA, 35 bp, Artificial Sequence
  bisulfite treated nucleic acid for analysis of methylation status of SEQ ID NO: 20
agttcggtcgttagtttatttagtaaggcggttat

SEQ ID NO: 7827 - DNA, 20 bp, Artificial Sequence
  bisulfite treated nucleic acid for analysis of methylation status of SEQ ID NO: 20
cacaactcgtaacacaaccg

SEQ ID NO: 7828 - DNA, 20 bp, Artificial Sequence
  bisulfite treated nucleic acid for analysis of methylation status of SEQ ID NO: 20
cggtacgttagaggtgttgg

SEQ ID NO: 7829 - DNA, 20 bp, Artificial Sequence
  bisulfite treated nucleic acid for analysis of methylation status of SEQ ID NO: 20
aactcaaatatcgcactcgc

SEQ ID NO: 7830 - DNA, 19 bp, Artificial Sequence
  bisulfite treated nucleic acid for analysis of methylation status of SEQ ID NO: 20
aactacaaccgctcgatcc

SEQ ID NO: 7831 - DNA, 41 bp, Artificial Sequence
  bisulfite treated nucleic acid for analysis of methylation status of SEQ ID NO: 20
gatttttacgtaggtgggtaattggtttaaaaatcgtcgat

SEQ ID NO: 7832 - DNA, 19 bp, Artificial Sequence
  bisulfite treated nucleic acid for analysis of methylation status of SEQ ID NO: 20
gcgacggtacgttagaggt

SEQ ID NO: 7833 - DNA, 21 bp, Artificial Sequence
  bisulfite treated nucleic acid for analysis of methylation status of SEQ ID NO: 20
acaactcaaatatcgcactcg

SEQ ID NO: 7834 - DNA, 20 bp, Artificial Sequence
  bisulfite treated nucleic acid for analysis of methylation status of SEQ ID NO: 20
cgacggtacgttagaggtgt

SEQ ID NO: 7835 - DNA, 21 bp, Artificial Sequence
  bisulfite treated nucleic acid for analysis of methylation status of SEQ ID NO: 20
acgcgaaaacctctaaatacc

SEQ ID NO: 7836 - DNA, 21 bp, Artificial Sequence
  bisulfite treated nucleic acid for analysis of methylation status of SEQ ID NO: 20
ctcaaaacgcgaaaacctcta

SEQ ID NO: 7837 - DNA, 24 bp, Artificial Sequence
  bisulfite treated nucleic acid for analysis of methylation status of SEQ ID NO: 20
ttgtcgagtaattttcgttttaat

SEQ ID NO: 7838 - DNA, 22 bp, Artificial Sequence
  bisulfite treated nucleic acid for analysis of methylation status of SEQ ID NO: 20
cgaatcacaactcgtaacacaa

SEQ ID NO: 7839 - DNA, 22 bp, Artificial Sequence
  nucleic acid for analysis of methylation status of SEQ ID NO: 20
gttacgagttgtgattcgtgtt

SEQ ID NO: 7840 - DNA, 20 bp, Artificial Sequence
  bisulfite treated nucleic acid for analysis of methylation status of SEQ ID NO: 20
tcaaaacgcgaaaacctcta

SEQ ID NO: 7841 - DNA, 19 bp, Artificial Sequence
  bisulfite treated nucleic acid for analysis of methylation status of SEQ ID NO: 20
ctccaacccgacgactaaa

SEQ ID NO: 7842 - DNA, 25 bp, Artificial Sequence
  bisulfite treated nucleic acid for analysis of methylation status of SEQ ID NO: 20
aattaaaacgaaaattactcgacaa

SEQ ID NO: 7843 - DNA, 20 bp, Artificial Sequence
  bisulfite treated nucleic acid for analysis of methylation status of SEQ ID NO: 20
gcggaagagttcggttttat

SEQ ID NO: 7844 - DNA, 24 bp, Artificial Sequence
  bisulfite treated nucleic acid for analysis of methylation status of SEQ ID NO: 20
ccatttctaacgatacgtctacct

SEQ ID NO: 7845 - DNA, 21 bp, Artificial Sequence
  bisulfite treated nucleic acid for analysis of methylation status of SEQ ID NO: 20
acggtacgttagaggtgttgg

SEQ ID NO: 7846 - DNA, 22 bp, Artificial Sequence
  bisulfite treated nucleic acid for analysis of methylation status of SEQ ID NO: 20
aacaactcaaatatcgcactcg

SEQ ID NO: 7847 - DNA, 21 bp, Artificial Sequence
  bisulfite treated nucleic acid for analysis of methylation status of SEQ ID NO: 20
tcacaactcgtaacacaaccg

SEQ ID NO: 7848 - DNA, 20 bp, Artificial Sequence
  bisulfite treated nucleic acid for analysis of methylation status of SEQ ID NO: 20
acaactcgtaacacaaccgc

SEQ ID NO: 7849 - DNA, 19 bp, Artificial Sequence
  bisulfite treated nucleic acid for analysis of methylation status of SEQ ID NO: 20
aaccgctcgatccctttat

SEQ ID NO: 7850 - DNA, 34 bp, Artificial Sequence
  bisulfite treated nucleic acid for analysis of methylation status of SEQ ID NO: 20
atcggattgatttttacgtaggtgggtaattggt

SEQ ID NO: 7851 - DNA, 21 bp, Artificial Sequence
  bisulfite treated nucleic acid for analysis of methylation status of SEQ ID NO: 20
aaaacgtgagttcgtttaggt

SEQ ID NO: 7852 - DNA, 21 bp, Artificial Sequence
  bisulfite treated nucleic acid for analysis of methylation status of SEQ ID NO: 20
cgacggtacgttagaggtgtt

SEQ ID NO: 7853 - DNA, 24 bp, Artificial Sequence
  bisulfite treated nucleic acid for analysis of methylation status of SEQ ID NO: 20
attaaaacgaaaattactcgacaa

SEQ ID NO: 7854 - DNA, 24 bp, Artificial Sequence
  bisulfite treated nucleic acid for analysis of methylation status of SEQ ID NO: 20
caattaaaacgaaaattactcgac

SEQ ID NO: 7855 - DNA, 19 bp, Artificial Sequence
  bisulfite treated nucleic acid for analysis of methylation status of SEQ ID NO: 20
gctcgatccctttatcgac

SEQ ID NO: 7856 - DNA, 23 bp, Artificial Sequence
  bisulfite treated nucleic acid for analysis of methylation status of SEQ ID NO: 20
cgacctattcttaactacaaccg

SEQ ID NO: 7857 - DNA, 18 bp, Artificial Sequence
  bisulfite treated nucleic acid for analysis of methylation status of SEQ ID NO: 20
gttatagggtttcgggcg

SEQ ID NO: 7858 - DNA, 22 bp, Artificial Sequence
  bisulfite treated nucleic acid for analysis of methylation status of SEQ ID NO: 20
actcgctatcgctaaacgtaat

SEQ ID NO: 7859 - DNA, 26 bp, Artificial Sequence
  bisulfite treated nucleic acid for analysis of methylation status of SEQ ID NO: 20
ggtacgttagaggtgttgggcgtcgt

SEQ ID NO: 7860 - DNA, 19 bp, Artificial Sequence
  bisulfite treated nucleic acid for analysis of methylation status of SEQ ID NO: 20
tacgggaattagcggtgag

SEQ ID NO: 7861 - DNA, 22 bp, Artificial Sequence
  bisulfite treated nucleic acid for analysis of methylation status of SEQ ID NO: 20
gtcctttcgacgtaaaataccc

SEQ ID NO: 7862 - DNA, 38 bp, Artificial Sequence
  bisulfite treated nucleic acid for analysis of methylation status of SEQ ID NO: 20
ggaattcgaattgtaagttgagcgtttgtttagatttt

SEQ ID NO: 7863 - DNA, 23 bp, Artificial Sequence
  bisulfite treated nucleic acid for analysis of methylation status of SEQ ID NO: 20
tgtcgagtaattttcgttttaat

SEQ ID NO: 7864 - DNA, 24 bp, Artificial Sequence
  bisulfite treated nucleic acid for analysis of methylation status of SEQ ID NO: 20
tattcttaactacaaccgctcgat

SEQ ID NO: 7865 - DNA, 22 bp, Artificial Sequence
  bisulfite treated nucleic acid for analysis of methylation status of SEQ ID NO: 20
acgaactataacccgtattccc

SEQ ID NO: 7866 - DNA, 22 bp, Artificial Sequence
  bisulfite treated nucleic acid for analysis of methylation status of SEQ ID NO: 20
acgtttagtatttttggcgtgt

SEQ ID NO: 7867 - DNA, 33 bp, Artificial Sequence
  bisulfite treated nucleic acid for analysis of methylation status of SEQ ID NO: 20
ttcgtagtgttcgttcggaattttgtgatagga

SEQ ID NO: 7868 - DNA, 22 bp, Artificial Sequence
  bisulfite treated nucleic acid for analysis of methylation status of SEQ ID NO: 20
cgaactataacccgtattccct

SEQ ID NO: 7869 - DNA, 22 bp, Artificial Sequence
  bisulfite treated nucleic acid for analysis of methylation status of SEQ ID NO: 20
tttagtatttttggcgtgtcgt

SEQ ID NO: 7870 - DNA, 22 bp, Artificial Sequence
  bisulfite treated nucleic acid for analysis of methylation status of SEQ ID NO: 20
cgtttagtatttttggcgtgtc

SEQ ID NO: 7871 - DNA, 22 bp, Artificial Sequence
  bisulfite treated nucleic acid for analysis of methylation status of SEQ ID NO: 20
gacgtttagtatttttggcgtg

SEQ ID NO: 7872 - DNA, 22 bp, Artificial Sequence
  bisulfite treated nucleic acid for analysis of methylation status of SEQ ID NO: 20
gtggcgacgtttagtatttttg

SEQ ID NO: 7873 - DNA, 22 bp, Artificial Sequence
  bisulfite treated nucleic acid for analysis of methylation status of SEQ ID NO: 20
gtttagtatttttggcgtgtcg

SEQ ID NO: 7874 - DNA, 22 bp, Artificial Sequence
  bisulfite treated nucleic acid for analysis of methylation status of SEQ ID NO: 20
cgaataatcctcgccttaacta

SEQ ID NO: 7875 - DNA, 23 bp, Artificial Sequence
  bisulfite treated nucleic acid for analysis of methylation status of SEQ ID NO: 20
ttcgtaatatagtcgttcgtcgt

SEQ ID NO: 7876 - DNA, 31 bp, Artificial Sequence
  bisulfite treated nucleic acid for analysis of methylation status of SEQ ID NO: 20
agttcggcggttagaggttttttcgaagatt

SEQ ID NO: 7877 - DNA, 21 bp, Artificial Sequence
  bisulfite treated nucleic acid for analysis of methylation status of SEQ ID NO: 20
tggcgacgtttagtatttttg

SEQ ID NO: 7878 - DNA, 21 bp, Artificial Sequence
  bisulfite treated nucleic acid for analysis of methylation status of SEQ ID NO: 20
tagtatttttggcgtgtcgtc

SEQ ID NO: 7879 - DNA, 22 bp, Artificial Sequence
  bisulfite treated nucleic acid for analysis of methylation status of SEQ ID NO: 20
ttagtatttttggcgtgtcgtc

SEQ ID NO: 7880 - DNA, 21 bp, Artificial Sequence
  bisulfite treated nucleic acid for analysis of methylation status of SEQ ID NO: 20
ggtggcgacgtttagtatttt

SEQ ID NO: 7881 - DNA, 21 bp, Artificial Sequence
  bisulfite treated nucleic acid for analysis of methylation status of SEQ ID NO: 20
caaaaatactaaacgtcgcca

SEQ ID NO: 7882 - DNA, 22 bp, Artificial Sequence
  bisulfite treated nucleic acid for analysis of methylation status of SEQ ID NO: 20
agatgtcgtattcgttgtcgtt

SEQ ID NO: 7883 - DNA, 32 bp, Artificial Sequence
  bisulfite treated nucleic acid for analysis of methylation status of SEQ ID NO: 20
gtcgttttgttggatagattggcggtcgggtt

SEQ ID NO: 7884 - DNA, 22 bp, Artificial Sequence
  nucleic acid for analysis of methylation status of SEQ ID NO: 20
tagatgtcgtattcgttgtcgt

SEQ ID NO: 7885 - DNA, 22 bp, Artificial Sequence
  bisulfite treated nucleic acid for analysis of methylation status of SEQ ID NO: 20
cgcgaatcataataaaacacaa

SEQ ID NO: 7886 - DNA, 21 bp, Artificial Sequence
  bisulfite treated nucleic acid for analysis of methylation status of SEQ ID NO: 20
tttttagttcggcggttagag

SEQ ID NO: 7887 - DNA, 30 bp, Artificial Sequence
  bisulfite treated nucleic acid for analysis of methylation status of SEQ ID NO: 20
aggcgaggattattcggtaaggcgatagag

SEQ ID NO: 7888 - DNA, 22 bp, Artificial Sequence
  bisulfite treated nucleic acid for analysis of methylation status of SEQ ID NO: 20
tcgtaatatagtcgttcgtcgt

SEQ ID NO: 7889 - DNA, 21 bp, Artificial Sequence
  bisulfite treated nucleic acid for analysis of methylation status of SEQ ID NO: 20
ccaaaaatactaaacgtcgcc

SEQ ID NO: 7890 - DNA, 22 bp, Artificial Sequence
  bisulfite treated nucleic acid for analysis of methylation status of SEQ ID NO: 20
ttagatgtcgtattcgttgtcg

SEQ ID NO: 7891 - DNA, 27 bp, Artificial Sequence
  bisulfite treated nucleic acid for analysis of methylation status of SEQ ID NO: 20
tgttggatagattggcggtcgggttgg

SEQ ID NO: 7892 - DNA, 21 bp, Artificial Sequence
  bisulfite treated nucleic acid for analysis of methylation status of SEQ ID NO: 20
aaaatactaaacgtcgccacc

SEQ ID NO: 7893 - DNA, 32 bp, Artificial Sequence
  bisulfite treated nucleic acid for analysis of methylation status of SEQ ID NO: 20
ggtcgttttgttggatagattggcggtcgggt

SEQ ID NO: 7894 - DNA, 21 bp, Artificial Sequence
  bisulfite treated nucleic acid for analysis of methylation status of SEQ ID NO: 20
gccaaaaatactaaacgtcgc

SEQ ID NO: 7895 - DNA, 26 bp, Artificial Sequence
  bisulfite treated nucleic acid for analysis of methylation status of SEQ ID NO: 20
ttggatagattggcggtcgggttggt

SEQ ID NO: 7896 - DNA, 22 bp, Artificial Sequence
  bisulfite treated nucleic acid for analysis of methylation status of SEQ ID NO: 20
aaaacctaaaaactacgacgct

SEQ ID NO: 7897 - DNA, 22 bp, Artificial Sequence
  bisulfite treated nucleic acid for analysis of methylation status of SEQ ID NO: 20
gattattcggtaaggcgataga

SEQ ID NO: 7898 - DNA, 25 bp, Artificial Sequence
  bisulfite treated nucleic acid for analysis of methylation status of SEQ ID NO: 20
gtcgggtaggagttcgcggtcgttt

SEQ ID NO: 7899 - DNA, 21 bp, Artificial Sequence
  bisulfite treated nucleic acid for analysis of methylation status of SEQ ID NO: 20
ggcgacgtttagtatttttgg

SEQ ID NO: 7900 - DNA, 22 bp, Artificial Sequence
  bisulfite treated nucleic acid for analysis of methylation status of SEQ ID NO: 20
tatcgccttaccgaataatcct

SEQ ID NO: 7901 - DNA, 37 bp, Artificial Sequence
  bisulfite treated nucleic acid for analysis of methylation status of SEQ ID NO: 20
ggcggttagaggttttttcgaagattttagtagttaa

SEQ ID NO: 7902 - DNA, 22 bp, Artificial Sequence
  bisulfite treated nucleic acid for analysis of methylation status of SEQ ID NO: 20
aaaaatactaaacgtcgccacc

SEQ ID NO: 7903 - DNA, 21 bp, Artificial Sequence
  bisulfite treated nucleic acid for analysis of methylation status of SEQ ID NO: 20
gcgacgtttagtatttttggc

SEQ ID NO: 7904 - DNA, 22 bp, Artificial Sequence
  bisulfite treated nucleic acid for analysis of methylation status of SEQ ID NO: 20
cgaataaaaacacctctaacgc

SEQ ID NO: 7905 - DNA, 20 bp, Artificial Sequence
  bisulfite treated nucleic acid for analysis of methylation status of SEQ ID NO: 20
agtcggtaagggaattttcg

SEQ ID NO: 7906 - DNA, 42 bp, Artificial Sequence
  bisulfite treated nucleic acid for analysis of methylation status of SEQ ID NO: 20
tagatcgcgtttttaatttttgttgaattggagtcgttaggg

SEQ ID NO: 7907 - DNA, 22 bp, Artificial Sequence
  bisulfite treated nucleic acid for analysis of methylation status of SEQ ID NO: 20
acctctatcgccttaccgaata

SEQ ID NO: 7908 - DNA, 36 bp, Artificial Sequence
  bisulfite treated nucleic acid for analysis of methylation status of SEQ ID NO: 20
gaggttttttcgaagattttagtagttaaggcgagg

SEQ ID NO: 7909 - DNA, 22 bp, Artificial Sequence
  bisulfite treated nucleic acid for analysis of methylation status of SEQ ID NO: 20
acgcgaatcataataaaacaca

SEQ ID NO: 7910 - DNA, 20 bp, Artificial Sequence
  bisulfite treated nucleic acid for analysis of methylation status of SEQ ID NO: 20
aatactaaacgtcgccacca

SEQ ID NO: 7911 - DNA, 32 bp, Artificial Sequence
  bisulfite treated nucleic acid for analysis of methylation status of SEQ ID NO: 20
tggtcgttttgttggatagattggcggtcggg

SEQ ID NO: 7912 - DNA, 21 bp, Artificial Sequence
  bisulfite treated nucleic acid for analysis of methylation status of SEQ ID NO: 20
gttggtggcgacgtttagtat

SEQ ID NO: 7913 - DNA, 21 bp, Artificial Sequence
  bisulfite treated nucleic acid for analysis of methylation status of SEQ ID NO: 20
cctctatcgccttaccgaata

SEQ ID NO: 7914 - DNA, 22 bp, Artificial Sequence
  bisulfite treated nucleic acid for analysis of methylation status of SEQ ID NO: 20
aggattattcggtaaggcgata

SEQ ID NO: 7915 - DNA, 24 bp, Artificial Sequence
  bisulfite treated nucleic acid for analysis of methylation status of SEQ ID NO: 20
ggtcgggtaggagttcgcggtcgt

SEQ ID NO: 7916 - DNA, 22 bp, Artificial Sequence
  bisulfite treated nucleic acid for analysis of methylation status of SEQ ID NO: 20
ggattattcggtaaggcgatag

SEQ ID NO: 7917 - DNA, 23 bp, Artificial Sequence
  bisulfite treated nucleic acid for analysis of methylation status of SEQ ID NO: 20
cgacgaacgactatattacgaac

SEQ ID NO: 7918 - DNA, 22 bp, Artificial Sequence
  bisulfite treated nucleic acid for analysis of methylation status of SEQ ID NO: 20
ggtggcgacgtttagtattttt

SEQ ID NO: 7919 - DNA, 20 bp, Artificial Sequence
  bisulfite treated nucleic acid for analysis of methylation status of SEQ ID NO: 20
ttggtggcgacgtttagtat

SEQ ID NO: 7920 - DNA, 20 bp, Artificial Sequence
  bisulfite treated nucleic acid for analysis of methylation status of SEQ ID NO: 20
tggtggcgacgtttagtatt

SEQ ID NO: 7921 - DNA, 20 bp, Artificial Sequence
  bisulfite treated nucleic acid for analysis of methylation status of SEQ ID NO: 20
agtatttttggcgtgtcgtc

SEQ ID NO: 7922 - DNA, 22 bp, Artificial Sequence
  bisulfite treated nucleic acid for analysis of methylation status of SEQ ID NO: 20
cgttctaaactcctaaccgaaa

SEQ ID NO: 7923 - DNA, 20 bp, Artificial Sequence
  bisulfite treated nucleic acid for analysis of methylation status of SEQ ID NO: 20
gtagttgttcgtaggcgtgg

SEQ ID NO: 7924 - DNA, 29 bp, Artificial Sequence
  bisulfite treated nucleic acid for analysis of methylation status of SEQ ID NO: 20
gttagcgggtggggaagtagagtcggtaa

SEQ ID NO: 7925 - DNA, 21 bp, Artificial Sequence
  nucleic acid for analysis of methylation status of SEQ ID NO: 20
aaatactaaacgtcgccacca

SEQ ID NO: 7926 - DNA, 21 bp, Artificial Sequence
  bisulfite treated nucleic acid for analysis of methylation status of SEQ ID NO: 20
atactaaacgtcgccaccaac

SEQ ID NO: 7927 - DNA, 32 bp, Artificial Sequence
  bisulfite treated nucleic acid for analysis of methylation status of SEQ ID NO: 20
tgaagtggtcgttttgttggatagattggcgg

SEQ ID NO: 7928 - DNA, 21 bp, Artificial Sequence
  bisulfite treated nucleic acid for analysis of methylation status of SEQ ID NO: 20
caacaaaaattaaaaacgcga

SEQ ID NO: 7929 - DNA, 22 bp, Artificial Sequence
  bisulfite treated nucleic acid for analysis of methylation status of SEQ ID NO: 20
gttgtagttgttcgtaggcgtg

SEQ ID NO: 7930 - DNA, 33 bp, Artificial Sequence
  bisulfite treated nucleic acid for analysis of methylation status of SEQ ID NO: 20
ggaattttcggttaggagtttagaacgtagggt

SEQ ID NO: 7931 - DNA, 22 bp, Artificial Sequence
  bisulfite treated nucleic acid for analysis of methylation status of SEQ ID NO: 20
tgttgtagttgttcgtaggcgt

SEQ ID NO: 7932 - DNA, 23 bp, Artificial Sequence
  bisulfite treated nucleic acid for analysis of methylation status of SEQ ID NO: 20
ttagatgtcgtattcgttgtcgt

SEQ ID NO: 7933 - DNA, 21 bp, Artificial Sequence
  bisulfite treated nucleic acid for analysis of methylation status of SEQ ID NO: 20
taccgaataatcctcgcctta

SEQ ID NO: 7934 - DNA, 20 bp, Artificial Sequence
  bisulfite treated nucleic acid for analysis of methylation status of SEQ ID NO: 20
atactaaacgtcgccaccaa

SEQ ID NO: 7935 - DNA, 32 bp, Artificial Sequence
  bisulfite treated nucleic acid for analysis of methylation status of SEQ ID NO: 20
gtggtcgttttgttggatagattggcggtcgg

SEQ ID NO: 7936 - DNA, 22 bp, Artificial Sequence
  bisulfite treated nucleic acid for analysis of methylation status of SEQ ID NO: 20
cgtaatatagtcgttcgtcgtt

SEQ ID NO: 7937 - DNA, 22 bp, Artificial Sequence
  bisulfite treated nucleic acid for analysis of methylation status of SEQ ID NO: 20
acgacgaacgactatattacga

SEQ ID NO: 7938 - DNA, 21 bp, Artificial Sequence
  bisulfite treated nucleic acid for analysis of methylation status of SEQ ID NO: 20
ttgtagttgttcgtaggcgtg

SEQ ID NO: 7939 - DNA, 20 bp, Artificial Sequence
  bisulfite treated nucleic acid for analysis of methylation status of SEQ ID NO: 20
ttttagttcggcggttagag

SEQ ID NO: 7940 - DNA, 21 bp, Artificial Sequence
  bisulfite treated nucleic acid for analysis of methylation status of SEQ ID NO: 20
gagtcggtaagggaattttcg

SEQ ID NO: 7941 - DNA, 22 bp, Artificial Sequence
  bisulfite treated nucleic acid for analysis of methylation status of SEQ ID NO: 20
ttaccgaataatcctcgcctta

SEQ ID NO: 7942 - DNA, 21 bp, Artificial Sequence
  bisulfite treated nucleic acid for analysis of methylation status of SEQ ID NO: 20
cgacgtttagtatttttggcg

SEQ ID NO: 7943 - DNA, 20 bp, Artificial Sequence
  bisulfite treated nucleic acid for analysis of methylation status of SEQ ID NO: 20
ttagttcggcggttagaggt

SEQ ID NO: 7944 - DNA, 20 bp, Artificial Sequence
  bisulfite treated nucleic acid for analysis of methylation status of SEQ ID NO: 20
tagttcggcggttagaggtt

SEQ ID NO: 7945 - DNA, 21 bp, Artificial Sequence
  bisulfite treated nucleic acid for analysis of methylation status of SEQ ID NO: 20
atcgccttaccgaataatcct

SEQ ID NO: 7946 - DNA, 20 bp, Artificial Sequence
  bisulfite treated nucleic acid for analysis of methylation status of SEQ ID NO: 20
cttaccgaataatcctcgcc

SEQ ID NO: 7947 - DNA, 22 bp, Artificial Sequence
  bisulfite treated nucleic acid for analysis of methylation status of SEQ ID NO: 20
agggaatacgggttatagttcg

SEQ ID NO: 7948 - DNA, 23 bp, Artificial Sequence
  bisulfite treated nucleic acid for analysis of methylation status of SEQ ID NO: 20
aacgcgaatcataataaaacaca

SEQ ID NO: 7949 - DNA, 21 bp, Artificial Sequence
  bisulfite treated nucleic acid for analysis of methylation status of SEQ ID NO: 20
taaggcgaggattattcggta

SEQ ID NO: 7950 - DNA, 22 bp, Artificial Sequence
  bisulfite treated nucleic acid for analysis of methylation status of SEQ ID NO: 20
acctaaaaactacgacgctaaa

SEQ ID NO: 7951 - DNA, 22 bp, Artificial Sequence
  bisulfite treated nucleic acid for analysis of methylation status of SEQ ID NO: 20
aacctaaaaactacgacgctaa

SEQ ID NO: 7952 - DNA, 21 bp, Artificial Sequence
  bisulfite treated nucleic acid for analysis of methylation status of SEQ ID NO: 20
cgaataatcctcgccttaact

SEQ ID NO: 7953 - DNA, 22 bp, Artificial Sequence
  bisulfite treated nucleic acid for analysis of methylation status of SEQ ID NO: 20
caaaaattaaaaacgcgatcta

SEQ ID NO: 7954 - DNA, 20 bp, Artificial Sequence
  bisulfite treated nucleic acid for analysis of methylation status of SEQ ID NO: 20
tactaaacgtcgccaccaac

SEQ ID NO: 7955 - DNA, 22 bp, Artificial Sequence
  bisulfite treated nucleic acid for analysis of methylation status of SEQ ID NO: 20
tcaacaaaaattaaaaacgcga

SEQ ID NO: 7956 - DNA, 23 bp, Artificial Sequence
  bisulfite treated nucleic acid for analysis of methylation status of SEQ ID NO: 20
aacctaaaaactacgacgctaaa

SEQ ID NO: 7957 - DNA, 23 bp, Artificial Sequence
  bisulfite treated nucleic acid for analysis of methylation status of SEQ ID NO: 20
aaacctaaaaactacgacgctaa

SEQ ID NO: 7958 - DNA, 24 bp, Artificial Sequence
  bisulfite treated nucleic acid for analysis of methylation status of SEQ ID NO: 20
gggtaatttagatgtcgtattcgt

SEQ ID NO: 7959 - DNA, 28 bp, Artificial Sequence
  bisulfite treated nucleic acid for analysis of methylation status of SEQ ID NO: 20
tgtcgttggacgtgatggagatggttga

SEQ ID NO: 7960 - DNA, 22 bp, Artificial Sequence
  bisulfite treated nucleic acid for analysis of methylation status of SEQ ID NO: 20
ttaaggcgaggattattcggta

SEQ ID NO: 7961 - DNA, 33 bp, Artificial Sequence
  bisulfite treated nucleic acid for analysis of methylation status of SEQ ID NO: 20
ggcgatagaggtcgggtaggagttcgcggtcgt

SEQ ID NO: 7962 - DNA, 21 bp, Artificial Sequence
  bisulfite treated nucleic acid for analysis of methylation status of SEQ ID NO: 20
agatgtcgtattcgttgtcgt

SEQ ID NO: 7963 - DNA, 23 bp, Artificial Sequence
  bisulfite treated nucleic acid for analysis of methylation status of SEQ ID NO: 20
acaaaaattaaaaacgcgatcta

SEQ ID NO: 7964 - DNA, 20 bp, Artificial Sequence
  bisulfite treated nucleic acid for analysis of methylation status of SEQ ID NO: 20
caaccgaactaacccctacg

SEQ ID NO: 7965 - DNA, 22 bp, Artificial Sequence
  bisulfite treated nucleic acid for analysis of methylation status of SEQ ID NO: 20
gcgttagaggtgtttttattcg

SEQ ID NO: 7966 - DNA, 45 bp, Artificial Sequence
  bisulfite treated nucleic acid for analysis of methylation status of SEQ ID NO: 20
agcgcggaggtttttaggtatcgatttgtttttggttgtagtcgt

SEQ ID NO: 7967 - DNA, 20 bp, Artificial Sequence
  bisulfite treated nucleic acid for analysis of methylation status of SEQ ID NO: 20
tttagttcggcggttagagg

SEQ ID NO: 7968 - DNA, 24 bp, Artificial Sequence
  bisulfite treated nucleic acid for analysis of methylation status of SEQ ID NO: 20
cgacgaacgactatattacgaact

SEQ ID NO: 7969 - DNA, 20 bp, Artificial Sequence
  bisulfite treated nucleic acid for analysis of methylation status of SEQ ID NO: 20
tgtagttgttcgtaggcgtg

SEQ ID NO: 7970 - DNA, 21 bp, Artificial Sequence
  bisulfite treated nucleic acid for analysis of methylation status of SEQ ID NO: 20
tggtggcgacgtttagtattt

SEQ ID NO: 7971 - DNA, 21 bp, Artificial Sequence
  bisulfite treated nucleic acid for analysis of methylation status of SEQ ID NO: 20
cttaccgaataatcctcgcct

SEQ ID NO: 7972 - DNA, 21 bp, Artificial Sequence
  bisulfite treated nucleic acid for analysis of methylation status of SEQ ID NO: 20
actcctacccgacctctatcg

SEQ ID NO: 7973 - DNA, 19 bp, Artificial Sequence
  bisulfite treated nucleic acid for analysis of methylation status of SEQ ID NO: 20
cactaacgccctttaaccg

SEQ ID NO: 7974 - DNA, 22 bp, Artificial Sequence
  bisulfite treated nucleic acid for analysis of methylation status of SEQ ID NO: 20
ttagtttgtagttcgggtttcg

SEQ ID NO: 7975 - DNA, 36 bp, Artificial Sequence
  bisulfite treated nucleic acid for analysis of methylation status of SEQ ID NO: 20
taagaagaacgtggtgttgggttaggttttatcgtt

SEQ ID NO: 7976 - DNA, 20 bp, Artificial Sequence
  bisulfite treated nucleic acid for analysis of methylation status of SEQ ID NO: 20
aaaccgaacgactacaacca

SEQ ID NO: 7977 - DNA, 22 bp, Artificial Sequence
  bisulfite treated nucleic acid for analysis of methylation status of SEQ ID NO: 20
tagatcgcgtttttaatttttg

SEQ ID NO: 7978 - DNA, 30 bp, Artificial Sequence
  bisulfite treated nucleic acid for analysis of methylation status of SEQ ID NO: 20
agcgcggaggtttttaggtatcgatttgtt

SEQ ID NO: 7979 - DNA, 20 bp, Artificial Sequence
  bisulfite treated nucleic acid for analysis of methylation status of SEQ ID NO: 20
cgccttaccgaataatcctc

SEQ ID NO: 7980 - DNA, 20 bp, Artificial Sequence
  bisulfite treated nucleic acid for analysis of methylation status of SEQ ID NO: 20
tcgccttaccgaataatcct

SEQ ID NO: 7981 - DNA, 20 bp, Artificial Sequence
  bisulfite treated nucleic acid for analysis of methylation status of SEQ ID NO: 20
ccttaccgaataatcctcgc

SEQ ID NO: 7982 - DNA, 20 bp, Artificial Sequence
  bisulfite treated nucleic acid for analysis of methylation status of SEQ ID NO: 20
accgaataatcctcgcctta

SEQ ID NO: 7983 - DNA, 23 bp, Artificial Sequence
  bisulfite treated nucleic acid for analysis of methylation status of SEQ ID NO: 20
acgttctaaactcctaaccgaaa

SEQ ID NO: 7984 - DNA, 29 bp, Artificial Sequence
  bisulfite treated nucleic acid for analysis of methylation status of SEQ ID NO: 20
ttagcgggtggggaagtagagtcggtaag

SEQ ID NO: 7985 - DNA, 21 bp, Artificial Sequence
  bisulfite treated nucleic acid for analysis of methylation status of SEQ ID NO: 20
ctctatcgccttaccgaataa

SEQ ID NO: 7986 - DNA, 19 bp, Artificial Sequence
  bisulfite treated nucleic acid for analysis of methylation status of SEQ ID NO: 20
ttaccgaataatcctcgcc

SEQ ID NO: 7987 - DNA, 20 bp, Artificial Sequence
  bisulfite treated nucleic acid for analysis of methylation status of SEQ ID NO: 20
ctcctacccgacctctatcg

SEQ ID NO: 7988 - DNA, 19 bp, Artificial Sequence
  bisulfite treated nucleic acid for analysis of methylation status of SEQ ID NO: 20
tactaaacgtcgccaccaa

SEQ ID NO: 7989 - DNA, 23 bp, Artificial Sequence
  bisulfite treated nucleic acid for analysis of methylation status of SEQ ID NO: 20
tttagatgtcgtattcgttgtcg

SEQ ID NO: 7990 - DNA, 19 bp, Artificial Sequence
  bisulfite treated nucleic acid for analysis of methylation status of SEQ ID NO: 20
gtcggtaagggaattttcg

SEQ ID NO: 7991 - DNA, 23 bp, Artificial Sequence
  bisulfite treated nucleic acid for analysis of methylation status of SEQ ID NO: 20
aaaacgcgaatcataataaaaca

SEQ ID NO: 7992 - DNA, 22 bp, Artificial Sequence
  bisulfite treated nucleic acid for analysis of methylation status of SEQ ID NO: 48
tttaatgtatagagtcgtggcg

SEQ ID NO: 7993 - DNA, 22 bp, Artificial Sequence
  bisulfite treated nucleic acid for analysis of methylation status of SEQ ID NO: 48
cgacgatacgcaaaactaacta

SEQ ID NO: 7994 - DNA, 25 bp, Artificial Sequence
  bisulfite treated nucleic acid for analysis of methylation status of SEQ ID NO: 48
gacggttgcggtaaggtaggggcgt

SEQ ID NO: 7995 - DNA, 23 bp, Artificial Sequence
  bisulfite treated nucleic acid for analysis of methylation status of SEQ ID NO: 48
ttttaatgtatagagtcgtggcg

SEQ ID NO: 7996 - DNA, 22 bp, Artificial Sequence
  bisulfite treated nucleic acid for analysis of methylation status of SEQ ID NO: 48
tatcgcgggtttagttttattt

SEQ ID NO: 7997 - DNA, 21 bp, Artificial Sequence
  bisulfite treated nucleic acid for analysis of methylation status of SEQ ID NO: 48
cgaaatcaccaaacgataaca

SEQ ID NO: 7998 - DNA, 35 bp, Artificial Sequence
  bisulfite treated nucleic acid for analysis of methylation status of SEQ ID NO: 48
agtttatttcgcggtgagcgttaagttttaaaagt

SEQ ID NO: 7999 - DNA, 23 bp, Artificial Sequence
  bisulfite treated nucleic acid for analysis of methylation status of SEQ ID NO: 48
gacgatacgcaaaactaactacc

SEQ ID NO: 8000 - DNA, 22 bp, Artificial Sequence
  bisulfite treated nucleic acid for analysis of methylation status of SEQ ID NO: 48
cgtttattttaattttggacgg

SEQ ID NO: 8001 - DNA, 21 bp, Artificial Sequence
  bisulfite treated nucleic acid for analysis of methylation status of SEQ ID NO: 48
taccgaaaacaccgacgatac

SEQ ID NO: 8002 - DNA, 28 bp, Artificial Sequence
  bisulfite treated nucleic acid for analysis of methylation status of SEQ ID NO: 48
tgcggtaaggtaggggcgtttagaaagg

SEQ ID NO: 8003 - DNA, 22 bp, Artificial Sequence
  bisulfite treated nucleic acid for analysis of methylation status of SEQ ID NO: 48
tcgtttattttaattttggacg

SEQ ID NO: 8004 - DNA, 22 bp, Artificial Sequence
  bisulfite treated nucleic acid for analysis of methylation status of SEQ ID NO: 48
tataccgaaaacaccgacgata

SEQ ID NO: 8005 - DNA, 20 bp, Artificial Sequence
  bisulfite treated nucleic acid for analysis of methylation status of SEQ ID NO: 48
accgacgatacgcaaaacta

SEQ ID NO: 8006 - DNA, 23 bp, Artificial Sequence
  bisulfite treated nucleic acid for analysis of methylation status of SEQ ID NO: 48
gtcgtttattttaattttggacg

SEQ ID NO: 8007 - DNA, 24 bp, Artificial Sequence
  bisulfite treated nucleic acid for analysis of methylation status of SEQ ID NO: 48
agtcgtttattttaattttggacg

SEQ ID NO: 8008 - DNA, 22 bp, Artificial Sequence
  bisulfite treated nucleic acid for analysis of methylation status of SEQ ID NO: 48
acgatacgcaaaactaactacc

SEQ ID NO: 8009 - DNA, 20 bp, Artificial Sequence
  bisulfite treated nucleic acid for analysis of methylation status of SEQ ID NO: 48
gcgaaatcaccaaacgataa

SEQ ID NO: 8010 - DNA, 21 bp, Artificial Sequence
  bisulfite treated nucleic acid for analysis of methylation status of SEQ ID NO: 48
atcgcgggtttagttttattt

SEQ ID NO: 8011 - DNA, 21 bp, Artificial Sequence
  bisulfite treated nucleic acid for analysis of methylation status of SEQ ID NO: 48
ccgacgatacgcaaaactaac

SEQ ID NO: 8012 - DNA, 20 bp, Artificial Sequence
  bisulfite treated nucleic acid for analysis of methylation status of SEQ ID NO: 48
aaattggcgcggttttatag

SEQ ID NO: 8013 - DNA, 22 bp, Artificial Sequence
  bisulfite treated nucleic acid for analysis of methylation status of SEQ ID NO: 48
cgaaactaacgaaaactcctca

SEQ ID NO: 8014 - DNA, 23 bp, Artificial Sequence
  bisulfite treated nucleic acid for analysis of methylation status of SEQ ID NO: 48
gtttgaggagggcggggtcggtt

SEQ ID NO: 8015 - DNA, 19 bp, Artificial Sequence
  bisulfite treated nucleic acid for analysis of methylation status of SEQ ID NO: 48
aattggcgcggttttatag

SEQ ID NO: 8016 - DNA, 22 bp, Artificial Sequence
  bisulfite treated nucleic acid for analysis of methylation status of SEQ ID NO: 48
ttttatcgcgggtttagtttta

SEQ ID NO: 8017 - DNA, 19 bp, Artificial Sequence
  bisulfite treated nucleic acid for analysis of methylation status of SEQ ID NO: 48
gcgaaatcaccaaacgata

SEQ ID NO: 8018 - DNA, 21 bp, Artificial Sequence
  bisulfite treated nucleic acid for analysis of methylation status of SEQ ID NO: 48
ttaatgtatagagtcgtggcg

SEQ ID NO: 8019 - DNA, 22 bp, Artificial Sequence
  bisulfite treated nucleic acid for analysis of methylation status of SEQ ID NO: 48
atcgcgggtttagttttatttt

SEQ ID NO: 8020 - DNA, 20 bp, Artificial Sequence
  bisulfite treated nucleic acid for analysis of methylation status of SEQ ID NO: 48
accgaaaacaccgacgatac

SEQ ID NO: 8021 - DNA, 21 bp, Artificial Sequence
  bisulfite treated nucleic acid for analysis of methylation status of SEQ ID NO: 48
atataccgaaaacaccgacga

SEQ ID NO: 8022 - DNA, 21 bp, Artificial Sequence
  bisulfite treated nucleic acid for analysis of methylation status of SEQ ID NO: 48
ataccgaaaacaccgacgata

SEQ ID NO: 8023 - DNA, 18 bp, Artificial Sequence
  bisulfite treated nucleic acid for analysis of methylation status of SEQ ID NO: 48
gaacgcgaaatcaccaaa

SEQ ID NO: 8024 - DNA, 19 bp, Artificial Sequence
  bisulfite treated nucleic acid for analysis of methylation status of SEQ ID NO: 48
ccgaaaacaccgacgatac

SEQ ID NO: 8025 - DNA, 18 bp, Artificial Sequence
  bisulfite treated nucleic acid for analysis of methylation status of SEQ ID NO: 48
gaacgaacgcgaaatcac

SEQ ID NO: 8026 - DNA, 24 bp, Artificial Sequence
  bisulfite treated nucleic acid for analysis of methylation status of SEQ ID NO: 48
tttttaatgtatagagtcgtggcg

SEQ ID NO: 8027 - DNA, 20 bp, Artificial Sequence
  bisulfite treated nucleic acid for analysis of methylation status of SEQ ID NO: 48
cgttaaggtatcgcggtttt

SEQ ID NO: 8028 - DNA, 23 bp, Artificial Sequence
  bisulfite treated nucleic acid for analysis of methylation status of SEQ ID NO: 48
tccataaacgtcgaaattaccta

SEQ ID NO: 8029 - DNA, 27 bp, Artificial Sequence
  bisulfite treated nucleic acid for analysis of methylation status of SEQ ID NO: 48
gttgaattcgggtttttcgcggggaga

SEQ ID NO: 8030 - DNA, 18 bp, Artificial Sequence
  bisulfite treated nucleic acid for analysis of methylation status of SEQ ID NO: 48
tcgaaggcgattttcgta

SEQ ID NO: 8031 - DNA, 22 bp, Artificial Sequence
  bisulfite treated nucleic acid for analysis of methylation status of SEQ ID NO: 48
cctcgaccgacaataaaaacta

SEQ ID NO: 8032 - DNA, 30 bp, Artificial Sequence
  bisulfite treated nucleic acid for analysis of methylation status of SEQ ID NO: 48
ttcgttgcgggagaggtcgttttttggcgt

SEQ ID NO: 8033 - DNA, 19 bp, Artificial Sequence
  bisulfite treated nucleic acid for analysis of methylation status of SEQ ID NO: 48
gaaaacaccgacgatacgc

SEQ ID NO: 8034 - DNA, 25 bp, Artificial Sequence
  bisulfite treated nucleic acid for analysis of methylation status of SEQ ID NO: 48
tagtcgtttattttaattttggacg

SEQ ID NO: 8035 - DNA, 22 bp, Artificial Sequence
  bisulfite treated nucleic acid for analysis of methylation status of SEQ ID NO: 48
aaacgaaaaattcccgaaataa

SEQ ID NO: 8036 - DNA, 22 bp, Artificial Sequence
  bisulfite treated nucleic acid for analysis of methylation status of SEQ ID NO: 48
tcgcgggataaattaagagtag

SEQ ID NO: 8037 - DNA, 38 bp, Artificial Sequence
  bisulfite treated nucleic acid for analysis of methylation status of SEQ ID NO: 48
ttcgcggtgggaattgtaattcggaaatttatgggcgt

SEQ ID NO: 8038 - DNA, 22 bp, Artificial Sequence
  bisulfite treated nucleic acid for analysis of methylation status of SEQ ID NO: 48
attaaaaacgaaaaattcccga

SEQ ID NO: 8039 - DNA, 21 bp, Artificial Sequence
  bisulfite treated nucleic acid for analysis of methylation status of SEQ ID NO: 48
ctacgacgaatcgcctttact

SEQ ID NO: 8040 - DNA, 22 bp, Artificial Sequence
  bisulfite treated nucleic acid for analysis of methylation status of SEQ ID NO: 48
attatttcgggaatttttcgtt

SEQ ID NO: 8041 - DNA, 24 bp, Artificial Sequence
  bisulfite treated nucleic acid for analysis of methylation status of SEQ ID NO: 48
agcgttgggatcggggatttgcgg

SEQ ID NO: 8042 - DNA, 22 bp, Artificial Sequence
  bisulfite treated nucleic acid for analysis of methylation status of SEQ ID NO: 48
aattatttcgggaatttttcgt

SEQ ID NO: 8043 - DNA, 21 bp, Artificial Sequence
  nucleic acid for analysis of methylation status of SEQ ID NO: 48
aacgaaaaattcccgaaataa

SEQ ID NO: 8044 - DNA, 21 bp, Artificial Sequence
  bisulfite treated nucleic acid for analysis of methylation status of SEQ ID NO: 48
ctaaaacaccgcgacttctct

SEQ ID NO: 8045 - DNA, 27 bp, Artificial Sequence
  bisulfite treated nucleic acid for analysis of methylation status of SEQ ID NO: 48
ttcgcggagagttcgggtttaacgcgg

SEQ ID NO: 8046 - DNA, 21 bp, Artificial Sequence
  bisulfite treated nucleic acid for analysis of methylation status of SEQ ID NO: 48
ctaaccaaataattccgacgc

SEQ ID NO: 8047 - DNA, 22 bp, Artificial Sequence
  bisulfite treated nucleic acid for analysis of methylation status of SEQ ID NO: 48
aacggtgatatttcgatttttg

SEQ ID NO: 8048 - DNA, 28 bp, Artificial Sequence
  bisulfite treated nucleic acid for analysis of methylation status of SEQ ID NO: 48
tgagttcgcggtgggaattgtaattcgg

SEQ ID NO: 8049 - DNA, 21 bp, Artificial Sequence
  bisulfite treated nucleic acid for analysis of methylation status of SEQ ID NO: 48
tacgacgaatcgcctttactt

SEQ ID NO: 8050 - DNA, 21 bp, Artificial Sequence
  bisulfite treated nucleic acid for analysis of methylation status of SEQ ID NO: 48
ttaaaaacgaaaaattcccga

SEQ ID NO: 8051 - DNA, 22 bp, Artificial Sequence
  bisulfite treated nucleic acid for analysis of methylation status of SEQ ID NO: 48
cgcgggataaattaagagtagg

SEQ ID NO: 8052 - DNA, 20 bp, Artificial Sequence
  bisulfite treated nucleic acid for analysis of methylation status of SEQ ID NO: 48
taaccaaataattccgacgc

SEQ ID NO: 8053 - DNA, 20 bp, Artificial Sequence
  bisulfite treated nucleic acid for analysis of methylation status of SEQ ID NO: 48
taaaacaccgcgacttctct

SEQ ID NO: 8054 - DNA, 22 bp, Artificial Sequence
  bisulfite treated nucleic acid for analysis of methylation status of SEQ ID NO: 48
cgtcggaattatttggttagat

SEQ ID NO: 8055 - DNA, 21 bp, Artificial Sequence
  bisulfite treated nucleic acid for analysis of methylation status of SEQ ID NO: 48
tctacgacgaatcgcctttac

SEQ ID NO: 8056 - DNA, 22 bp, Artificial Sequence
  bisulfite treated nucleic acid for analysis of methylation status of SEQ ID NO: 48
cgcgaactcaatcctactctta

SEQ ID NO: 8057 - DNA, 21 bp, Artificial Sequence
  bisulfite treated nucleic acid for analysis of methylation status of SEQ ID NO: 48
cggggttattaaacggtgata

SEQ ID NO: 8058 - DNA, 24 bp, Artificial Sequence
  bisulfite treated nucleic acid for analysis of methylation status of SEQ ID NO: 48
tggggtttggcgtttatcgcggga

SEQ ID NO: 8059 - DNA, 22 bp, Artificial Sequence
  bisulfite treated nucleic acid for analysis of methylation status of SEQ ID NO: 48
ttatttcgggaatttttcgttt

SEQ ID NO: 8060 - DNA, 22 bp, Artificial Sequence
  bisulfite treated nucleic acid for analysis of methylation status of SEQ ID NO: 48
tcgggaatttttcgtttttaat

SEQ ID NO: 8061 - DNA, 22 bp, Artificial Sequence
  bisulfite treated nucleic acid for analysis of methylation status of SEQ ID NO: 48
aaacggtgatatttcgattttt

SEQ ID NO: 8062 - DNA, 20 bp, Artificial Sequence
  bisulfite treated nucleic acid for analysis of methylation status of SEQ ID NO: 48
gacgaatcgcctttacttcc

SEQ ID NO: 8063 - DNA, 27 bp, Artificial Sequence
  bisulfite treated nucleic acid for analysis of methylation status of SEQ ID NO: 48
agaagtcgcggtgttttagcgttggga

SEQ ID NO: 8064 - DNA, 21 bp, Artificial Sequence
  bisulfite treated nucleic acid for analysis of methylation status of SEQ ID NO: 48
cacgacttctctacgacgaat

SEQ ID NO: 8065 - DNA, 21 bp, Artificial Sequence
  bisulfite treated nucleic acid for analysis of methylation status of SEQ ID NO: 48
tatttcgggaatttttcgttt

SEQ ID NO: 8066 - DNA, 20 bp, Artificial Sequence
  bisulfite treated nucleic acid for analysis of methylation status of SEQ ID NO: 48
acgacgaatcgcctttactt

SEQ ID NO: 8067 - DNA, 20 bp, Artificial Sequence
  bisulfite treated nucleic acid for analysis of methylation status of SEQ ID NO: 48
taaaaacgaaaaattcccga

SEQ ID NO: 8068 - DNA, 19 bp, Artificial Sequence
  bisulfite treated nucleic acid for analysis of methylation status of SEQ ID NO: 48
aaacaccgcgacttctctc

SEQ ID NO: 8069 - DNA, 19 bp, Artificial Sequence
  bisulfite treated nucleic acid for analysis of methylation status of SEQ ID NO: 48
cgacgaatcgcctttactt

SEQ ID NO: 8070 - DNA, 20 bp, Artificial Sequence
  bisulfite treated nucleic acid for analysis of methylation status of SEQ ID NO: 48
tcccacgacttctctacgac

SEQ ID NO: 8071 - DNA, 19 bp, Artificial Sequence
  bisulfite treated nucleic acid for analysis of methylation status of SEQ ID NO: 48
aataattccgacgcccata

SEQ ID NO: 8072 - DNA, 21 bp, Artificial Sequence
  bisulfite treated nucleic acid for analysis of methylation status of SEQ ID NO: 48
ttcgggaatttttcgttttta

SEQ ID NO: 8073 - DNA, 21 bp, Artificial Sequence
  bisulfite treated nucleic acid for analysis of methylation status of SEQ ID NO: 48
cgggaatttttcgtttttaat

SEQ ID NO: 8074 - DNA, 21 bp, Artificial Sequence
  bisulfite treated nucleic acid for analysis of methylation status of SEQ ID NO: 48
ttcccacgacttctctacgac

SEQ ID NO: 8075 - DNA, 21 bp, Artificial Sequence
  bisulfite treated nucleic acid for analysis of methylation status of SEQ ID NO: 48
gcgtcggaattatttggttag

SEQ ID NO: 8076 - DNA, 20 bp, Artificial Sequence
  bisulfite treated nucleic acid for analysis of methylation status of SEQ ID NO: 48
aaataattccgacgcccata

SEQ ID NO: 8077 - DNA, 20 bp, Artificial Sequence
  bisulfite treated nucleic acid for analysis of methylation status of SEQ ID NO: 48
cttcccacgacttctctacg

SEQ ID NO: 8078 - DNA, 21 bp, Artificial Sequence
  bisulfite treated nucleic acid for analysis of methylation status of SEQ ID NO: 48
taaaacaccgcgacttctctc

SEQ ID NO: 8079 - DNA, 19 bp, Artificial Sequence
  bisulfite treated nucleic acid for analysis of methylation status of SEQ ID NO: 48
aaccaaataattccgacgc

SEQ ID NO: 8080 - DNA, 19 bp, Artificial Sequence
  bisulfite treated nucleic acid for analysis of methylation status of SEQ ID NO: 48
aaaacaccgcgacttctct

SEQ ID NO: 8081 - DNA, 19 bp, Artificial Sequence
  bisulfite treated nucleic acid for analysis of methylation status of SEQ ID NO: 48
gctaaaacaccgcgacttc

SEQ ID NO: 8082 - DNA, 23 bp, Artificial Sequence
  bisulfite treated nucleic acid for analysis of methylation status of SEQ ID NO: 48
cggaattatttggttagatttcg

SEQ ID NO: 8083 - DNA, 23 bp, Artificial Sequence
  bisulfite treated nucleic acid for analysis of methylation status of SEQ ID NO: 48
taaacggtgatatttcgattttt

SEQ ID NO: 8084 - DNA, 23 bp, Artificial Sequence
  bisulfite treated nucleic acid for analysis of methylation status of SEQ ID NO: 48
ttaaacggtgatatttcgatttt

SEQ ID NO: 8085 - DNA, 20 bp, Artificial Sequence
  bisulfite treated nucleic acid for analysis of methylation status of SEQ ID NO: 48
agtaggattgagttcgcggt

SEQ ID NO: 8086 - DNA, 33 bp, Artificial Sequence
  bisulfite treated nucleic acid for analysis of methylation status of SEQ ID NO: 48
attcggaaatttatgggcgtcggaattatttgg

SEQ ID NO: 8087 - DNA, 23 bp, Artificial Sequence
  bisulfite treated nucleic acid for analysis of methylation status of SEQ ID NO: 48
ggttattaaacggtgatatttcg

SEQ ID NO: 8088 - DNA, 21 bp, Artificial Sequence
  bisulfite treated nucleic acid for analysis of methylation status of SEQ ID NO: 48
acggtgatatttcgatttttg

SEQ ID NO: 8089 - DNA, 20 bp, Artificial Sequence
  bisulfite treated nucleic acid for analysis of methylation status of SEQ ID NO: 48
atttcgggaatttttcgttt

SEQ ID NO: 8090 - DNA, 20 bp, Artificial Sequence
  bisulfite treated nucleic acid for analysis of methylation status of SEQ ID NO: 50
gtcgtttcgtttggatttga

SEQ ID NO: 8091 - DNA, 22 bp, Artificial Sequence
  bisulfite treated nucleic acid for analysis of methylation status of SEQ ID NO: 50
cgctaactaaatacccctaccg

SEQ ID NO: 8092 - DNA, 37 bp, Artificial Sequence
  bisulfite treated nucleic acid for analysis of methylation status of SEQ ID NO: 50
attgagatattaaagtttagacgcgttttttggacga

SEQ ID NO: 8093 - DNA, 19 bp, Artificial Sequence
  bisulfite treated nucleic acid for analysis of methylation status of SEQ ID NO: 50
tcgtttcgtttggatttga

SEQ ID NO: 8094 - DNA, 22 bp, Artificial Sequence
  bisulfite treated nucleic acid for analysis of methylation status of SEQ ID NO: 50
cactaacgacatcttaaccgct

SEQ ID NO: 8095 - DNA, 20 bp, Artificial Sequence
  bisulfite treated nucleic acid for analysis of methylation status of SEQ ID NO: 50
gttacgtggggcgtttttat

SEQ ID NO: 8096 - DNA, 21 bp, Artificial Sequence
  bisulfite treated nucleic acid for analysis of methylation status of SEQ ID NO: 50
cgatccaacgacaactacaac

SEQ ID NO: 8097 - DNA, 23 bp, Artificial Sequence
  nucleic acid for analysis of methylation status of SEQ ID NO: 50
tgggaagaaaagcgtgggcgggg

SEQ ID NO: 8098 - DNA, 20 bp, Artificial Sequence
  bisulfite treated nucleic acid for analysis of methylation status of SEQ ID NO: 50
tgtcgtttcgaggttagacg

SEQ ID NO: 8099 - DNA, 22 bp, Artificial Sequence
  bisulfite treated nucleic acid for analysis of methylation status of SEQ ID NO: 50
aacgacatcttaaccgctaact

SEQ ID NO: 8100 - DNA, 19 bp, Artificial Sequence
  bisulfite treated nucleic acid for analysis of methylation status of SEQ ID NO: 50
ttacgtggggcgtttttat

SEQ ID NO: 8101 - DNA, 19 bp, Artificial Sequence
  bisulfite treated nucleic acid for analysis of methylation status of SEQ ID NO: 50
acgtcgtttcgtttggatt

SEQ ID NO: 8102 - DNA, 19 bp, Artificial Sequence
  bisulfite treated nucleic acid for analysis of methylation status of SEQ ID NO: 50
tacgtggggcgtttttatt

SEQ ID NO: 8103 - DNA, 22 bp, Artificial Sequence
  bisulfite treated nucleic acid for analysis of methylation status of SEQ ID NO: 50
cgatccaacgacaactacaact

SEQ ID NO: 8104 - DNA, 20 bp, Artificial Sequence
  bisulfite treated nucleic acid for analysis of methylation status of SEQ ID NO: 50
tttttcggatttgcgttatg

SEQ ID NO: 8105 - DNA, 22 bp, Artificial Sequence
  bisulfite treated nucleic acid for analysis of methylation status of SEQ ID NO: 50
cgaaacgataaaactaacctca

SEQ ID NO: 8106 - DNA, 33 bp, Artificial Sequence
  bisulfite treated nucleic acid for analysis of methylation status of SEQ ID NO: 50
ggggagaatcggttttttgttcgagtttagagt

SEQ ID NO: 8107 - DNA, 23 bp, Artificial Sequence
  bisulfite treated nucleic acid for analysis of methylation status of SEQ ID NO: 50
aattttgtattattcgcgttttt

SEQ ID NO: 8108 - DNA, 23 bp, Artificial Sequence
  bisulfite treated nucleic acid for analysis of methylation status of SEQ ID NO: 50
aattttaactttcaacgaaacga

SEQ ID NO: 8109 - DNA, 27 bp, Artificial Sequence
  bisulfite treated nucleic acid for analysis of methylation status of SEQ ID NO: 50
tgcgttatgcgcggcggggagaatcgg

SEQ ID NO: 8110 - DNA, 22 bp, Artificial Sequence
  bisulfite treated nucleic acid for analysis of methylation status of SEQ ID NO: 50
tattcgcgtttttagagttttt

SEQ ID NO: 8111 - DNA, 22 bp, Artificial Sequence
  bisulfite treated nucleic acid for analysis of methylation status of SEQ ID NO: 50
ttattcgcgtttttagagtttt

SEQ ID NO: 8112 - DNA, 23 bp, Artificial Sequence
  bisulfite treated nucleic acid for analysis of methylation status of SEQ ID NO: 50
acgaaacgataaaactaacctca

SEQ ID NO: 8113 - DNA, 22 bp, Artificial Sequence
  bisulfite treated nucleic acid for analysis of methylation status of SEQ ID NO: 50
acgacatcttaaccgctaacta

SEQ ID NO: 8114 - DNA, 19 bp, Artificial Sequence
  bisulfite treated nucleic acid for analysis of methylation status of SEQ ID NO: 50
cgtcgtttcgtttggattt

SEQ ID NO: 8115 - DNA, 22 bp, Artificial Sequence
  bisulfite treated nucleic acid for analysis of methylation status of SEQ ID NO: 50
attttgtattattcgcgttttt

SEQ ID NO: 8116 - DNA, 24 bp, Artificial Sequence
  bisulfite treated nucleic acid for analysis of methylation status of SEQ ID NO: 50
tttgtattattcgcgtttttagag

SEQ ID NO: 8117 - DNA, 22 bp, Artificial Sequence
  bisulfite treated nucleic acid for analysis of methylation status of SEQ ID NO: 50
attttaactttcaacgaaacga

SEQ ID NO: 8118 - DNA, 21 bp, Artificial Sequence
  bisulfite treated nucleic acid for analysis of methylation status of SEQ ID NO: 50
ggtgtcgtttcgaggttagac

SEQ ID NO: 8119 - DNA, 19 bp, Artificial Sequence
  bisulfite treated nucleic acid for analysis of methylation status of SEQ ID NO: 50
aaaaaccgtcgtccaaaaa

SEQ ID NO: 8120 - DNA, 31 bp, Artificial Sequence
  bisulfite treated nucleic acid for analysis of methylation status of SEQ ID NO: 50
ttgaatttgagtttgggacgggcgatttttt

SEQ ID NO: 8121 - DNA, 21 bp, Artificial Sequence
  bisulfite treated nucleic acid for analysis of methylation status of SEQ ID NO: 50
aaccgatccaacgacaactac

SEQ ID NO: 8122 - DNA, 25 bp, Artificial Sequence
  bisulfite treated nucleic acid for analysis of methylation status of SEQ ID NO: 50
ttttgtattattcgcgtttttagag

SEQ ID NO: 8123 - DNA, 21 bp, Artificial Sequence
  bisulfite treated nucleic acid for analysis of methylation status of SEQ ID NO: 50
ccactaacgacatcttaaccg

SEQ ID NO: 8124 - DNA, 23 bp, Artificial Sequence
  bisulfite treated nucleic acid for analysis of methylation status of SEQ ID NO: 50
attattcgcgtttttagagtttt

SEQ ID NO: 8125 - DNA, 23 bp, Artificial Sequence
  bisulfite treated nucleic acid for analysis of methylation status of SEQ ID NO: 50
taacgacatcttaaccgctaact

SEQ ID NO: 8126 - DNA, 23 bp, Artificial Sequence
  bisulfite treated nucleic acid for analysis of methylation status of SEQ ID NO: 50
ttgtattattcgcgtttttagag

SEQ ID NO: 8127 - DNA, 18 bp, Artificial Sequence
  bisulfite treated nucleic acid for analysis of methylation status of SEQ ID NO: 50
acgtggggcgtttttatt

SEQ ID NO: 8128 - DNA, 19 bp, Artificial Sequence
  bisulfite treated nucleic acid for analysis of methylation status of SEQ ID NO: 50
gaaaaaccgtcgtccaaaa

SEQ ID NO: 8129 - DNA, 24 bp, Artificial Sequence
  bisulfite treated nucleic acid for analysis of methylation status of SEQ ID NO: 50
taattttgtattattcgcgttttt

SEQ ID NO: 8130 - DNA, 21 bp, Artificial Sequence
  bisulfite treated nucleic acid for analysis of methylation status of SEQ ID NO: 50
aaaccgatccaacgacaacta

SEQ ID NO: 8131 - DNA, 20 bp, Artificial Sequence
  bisulfite treated nucleic acid for analysis of methylation status of SEQ ID NO: 50
accgatccaacgacaactac

SEQ ID NO: 8132 - DNA, 20 bp, Artificial Sequence
  bisulfite treated nucleic acid for analysis of methylation status of SEQ ID NO: 50
ggtgtcgtttcgaggttaga

SEQ ID NO: 8133 - DNA, 19 bp, Artificial Sequence
  bisulfite treated nucleic acid for analysis of methylation status of SEQ ID NO: 50
ctaccgaaaaaccgtcgtc

SEQ ID NO: 8134 - DNA, 19 bp, Artificial Sequence
  bisulfite treated nucleic acid for analysis of methylation status of SEQ ID NO: 50
ttttcggatttgcgttatg

SEQ ID NO: 8135 - DNA, 24 bp, Artificial Sequence
  bisulfite treated nucleic acid for analysis of methylation status of SEQ ID NO: 50
ctaacgacatcttaaccgctaact

SEQ ID NO: 8136 - DNA, 21 bp, Artificial Sequence
  bisulfite treated nucleic acid for analysis of methylation status of SEQ ID NO: 50
attcgcgtttttagagttttt

SEQ ID NO: 8137 - DNA, 25 bp, Artificial Sequence
  bisulfite treated nucleic acid for analysis of methylation status of SEQ ID NO: 50
cgacatcttaaccgctaactaaata

SEQ ID NO: 8138 - DNA, 22 bp, Artificial Sequence
  bisulfite treated nucleic acid for analysis of methylation status of SEQ ID NO: 50
cgatattttgagcgtcgttaat

SEQ ID NO: 8139 - DNA, 17 bp, Artificial Sequence
  bisulfite treated nucleic acid for analysis of methylation status of SEQ ID NO: 50
aaaaccgattctccccg

SEQ ID NO: 8140 - DNA, 33 bp, Artificial Sequence
  bisulfite treated nucleic acid for analysis of methylation status of SEQ ID NO: 50
attcgcgtttttagagttttttcggatttgcgt

SEQ ID NO: 8141 - DNA, 33 bp, Artificial Sequence
  bisulfite treated nucleic acid for analysis of methylation status of SEQ ID NO: 50
tgagtttgggacgggcgattttttaattttagg

SEQ ID NO: 8142 - DNA, 24 bp, Artificial Sequence
  bisulfite treated nucleic acid for analysis of methylation status of SEQ ID NO: 50
tattattcgcgtttttagagtttt

SEQ ID NO: 8143 - DNA, 21 bp, Artificial Sequence
  bisulfite treated nucleic acid for analysis of methylation status of SEQ ID NO: 50
gtgtcgtttcgaggttagacg

SEQ ID NO: 8144 - DNA, 25 bp, Artificial Sequence
  bisulfite treated nucleic acid for analysis of methylation status of SEQ ID NO: 50
ataattttgtattattcgcgttttt

SEQ ID NO: 8145 - DNA, 23 bp, Artificial Sequence
  bisulfite treated nucleic acid for analysis of methylation status of SEQ ID NO: 50
caacgaaacgataaaactaacct

SEQ ID NO: 8146 - DNA, 25 bp, Artificial Sequence
  bisulfite treated nucleic acid for analysis of methylation status of SEQ ID NO: 50
gtattattcgcgtttttagagtttt

SEQ ID NO: 8147 - DNA, 24 bp, Artificial Sequence
  bisulfite treated nucleic acid for analysis of methylation status of SEQ ID NO: 50
tcaacgaaacgataaaactaacct

SEQ ID NO: 8148 - DNA, 24 bp, Artificial Sequence
  bisulfite treated nucleic acid for analysis of methylation status of SEQ ID NO: 50
aacgaaacgataaaactaacctca

SEQ ID NO: 8149 - DNA, 18 bp, Artificial Sequence
  bisulfite treated nucleic acid for analysis of methylation status of SEQ ID NO: 50
ccctaccgaaaaaccgtc

SEQ ID NO: 8150 - DNA, 18 bp, Artificial Sequence
  bisulfite treated nucleic acid for analysis of methylation status of SEQ ID NO: 50
aaaaaccgattctccccg

SEQ ID NO: 8151 - DNA, 22 bp, Artificial Sequence
  bisulfite treated nucleic acid for analysis of methylation status of SEQ ID NO: 50
attttgagcgtcgttaattttt

SEQ ID NO: 8152 - DNA, 22 bp, Artificial Sequence
  bisulfite treated nucleic acid for analysis of methylation status of SEQ ID NO: 50
ctttcaacgaaacgataaaact

SEQ ID NO: 8153 - DNA, 21 bp, Artificial Sequence
  bisulfite treated nucleic acid for analysis of methylation status of SEQ ID NO: 50
ttttaactttcaacgaaacga

SEQ ID NO: 8154 - DNA, 21 bp, Artificial Sequence
  bisulfite treated nucleic acid for analysis of methylation status of SEQ ID NO: 50
acgacatcttaaccgctaact

SEQ ID NO: 8155 - DNA, 20 bp, Artificial Sequence
  bisulfite treated nucleic acid for analysis of methylation status of SEQ ID NO: 50
ccgatccaacgacaactaca

SEQ ID NO: 8156 - DNA, 19 bp, Artificial Sequence
  bisulfite treated nucleic acid for analysis of methylation status of SEQ ID NO: 50
tacccctaccgaaaaaccg

SEQ ID NO: 8157 - DNA, 22 bp, Artificial Sequence
  bisulfite treated nucleic acid for analysis of methylation status of SEQ ID NO: 50
aaattaaaatcccgaatacgaa

SEQ ID NO: 8158 - DNA, 22 bp, Artificial Sequence
  bisulfite treated nucleic acid for analysis of methylation status of SEQ ID NO: 50
tttgggaacgcgaataatatag

SEQ ID NO: 8159 - DNA, 39 bp, Artificial Sequence
  bisulfite treated nucleic acid for analysis of methylation status of SEQ ID NO: 50
tgttttattttgttatgtttttcggggaaaagttaacgg

SEQ ID NO: 8160 - DNA, 22 bp, Artificial Sequence
  bisulfite treated nucleic acid for analysis of methylation status of SEQ ID NO: 50
ctatattattcgcgttcccaaa

SEQ ID NO: 8161 - DNA, 23 bp, Artificial Sequence
  bisulfite treated nucleic acid for analysis of methylation status of SEQ ID NO: 50
gggttttaatttttaacgaaacg

SEQ ID NO: 8162 - DNA, 35 bp, Artificial Sequence
  bisulfite treated nucleic acid for analysis of methylation status of SEQ ID NO: 50
gtcggtttttttcgtcgcgtatggcgtaaattcga

SEQ ID NO: 8163 - DNA, 22 bp, Artificial Sequence
  bisulfite treated nucleic acid for analysis of methylation status of SEQ ID NO: 50
atcctatattattcgcgttccc

SEQ ID NO: 8164 - DNA, 23 bp, Artificial Sequence
  bisulfite treated nucleic acid for analysis of methylation status of SEQ ID NO: 50
cgtcgatttagggttttaatttt

SEQ ID NO: 8165 - DNA, 22 bp, Artificial Sequence
  bisulfite treated nucleic acid for analysis of methylation status of SEQ ID NO: 50
atattattcgcgttcccaaaat

SEQ ID NO: 8166 - DNA, 22 bp, Artificial Sequence
  bisulfite treated nucleic acid for analysis of methylation status of SEQ ID NO: 50
aacgtcgatttagggttttaat

SEQ ID NO: 8167 - DNA, 21 bp, Artificial Sequence
  bisulfite treated nucleic acid for analysis of methylation status of SEQ ID NO: 50
gggaacgcgaataatatagga

SEQ ID NO: 8168 - DNA, 23 bp, Artificial Sequence
  bisulfite treated nucleic acid for analysis of methylation status of SEQ ID NO: 50
taaattaaaatcccgaatacgaa

SEQ ID NO: 8169 - DNA, 21 bp, Artificial Sequence
  bisulfite treated nucleic acid for analysis of methylation status of SEQ ID NO: 50
tcctatattattcgcgttccc

SEQ ID NO: 8170 - DNA, 22 bp, Artificial Sequence
  bisulfite treated nucleic acid for analysis of methylation status of SEQ ID NO: 50
tatattattcgcgttcccaaaa

SEQ ID NO: 8171 - DNA, 21 bp, Artificial Sequence
  bisulfite treated nucleic acid for analysis of methylation status of SEQ ID NO: 50
aattcgagtaggaggtcggtt

SEQ ID NO: 8172 - DNA, 29 bp, Artificial Sequence
  bisulfite treated nucleic acid for analysis of methylation status of SEQ ID NO: 50
gtcgcgtatggcgtaaattcgaagggatt

SEQ ID NO: 8173 - DNA, 21 bp, Artificial Sequence
  bisulfite treated nucleic acid for analysis of methylation status of SEQ ID NO: 50
tattattcgcgttcccaaaat

SEQ ID NO: 8174 - DNA, 24 bp, Artificial Sequence
  bisulfite treated nucleic acid for analysis of methylation status of SEQ ID NO: 50
ataaattaaaatcccgaatacgaa

SEQ ID NO: 8175 - DNA, 24 bp, Artificial Sequence
  bisulfite treated nucleic acid for analysis of methylation status of SEQ ID NO: 50
aataaattaaaatcccgaatacga

SEQ ID NO: 8176 - DNA, 21 bp, Artificial Sequence
  bisulfite treated nucleic acid for analysis of methylation status of SEQ ID NO: 50
tatattattcgcgttcccaaa

SEQ ID NO: 8177 - DNA, 24 bp, Artificial Sequence
  bisulfite treated nucleic acid for analysis of methylation status of SEQ ID NO: 50
acgtcgatttagggttttaatttt

SEQ ID NO: 8178 - DNA, 21 bp, Artificial Sequence
  bisulfite treated nucleic acid for analysis of methylation status of SEQ ID NO: 50
cctatattattcgcgttccca

SEQ ID NO: 8179 - DNA, 22 bp, Artificial Sequence
  bisulfite treated nucleic acid for analysis of methylation status of SEQ ID NO: 50
ggttttaatttttaacgaaacg

SEQ ID NO: 8180 - DNA, 21 bp, Artificial Sequence
  bisulfite treated nucleic acid for analysis of methylation status of SEQ ID NO: 50
ttgggaacgcgaataatatag

SEQ ID NO: 8181 - DNA, 21 bp, Artificial Sequence
  bisulfite treated nucleic acid for analysis of methylation status of SEQ ID NO: 50
ctatattattcgcgttcccaa

SEQ ID NO: 8182 - DNA, 24 bp, Artificial Sequence
  bisulfite treated nucleic acid for analysis of methylation status of SEQ ID NO: 50
agggttttaatttttaacgaaacg

SEQ ID NO: 8183 - DNA, 23 bp, Artificial Sequence
  bisulfite treated nucleic acid for analysis of methylation status of SEQ ID NO: 50
tttaatttttaacgaaacgatga

SEQ ID NO: 8184 - DNA, 23 bp, Artificial Sequence
  bisulfite treated nucleic acid for analysis of methylation status of SEQ ID NO: 50
tttttaacgaaacgatgaaatta

SEQ ID NO: 8185 - DNA, 21 bp, Artificial Sequence
  bisulfite treated nucleic acid for analysis of methylation status of SEQ ID NO: 50
atattattcgcgttcccaaaa

SEQ ID NO: 8186 - DNA, 23 bp, Artificial Sequence
  bisulfite treated nucleic acid for analysis of methylation status of SEQ ID NO: 50
ttttgggaacgcgaataatatag

SEQ ID NO: 8187 - DNA, 20 bp, Artificial Sequence
  bisulfite treated nucleic acid for analysis of methylation status of SEQ ID NO: 50
attattcgcgttcccaaaat

SEQ ID NO: 8188 - DNA, 25 bp, Artificial Sequence
  bisulfite treated nucleic acid for analysis of methylation status of SEQ ID NO: 50
aaataaattaaaatcccgaatacga

SEQ ID NO: 8189 - DNA, 21 bp, Artificial Sequence
  bisulfite treated nucleic acid for analysis of methylation status of SEQ ID NO: 50
aattaaaatcccgaatacgaa

SEQ ID NO: 8190 - DNA, 20 bp, Artificial Sequence
  bisulfite treated nucleic acid for analysis of methylation status of SEQ ID NO: 50
ctacgccgcattaaaattcc

SEQ ID NO: 8191 - DNA, 19 bp, Artificial Sequence
  nucleic acid for analysis of methylation status of SEQ ID NO: 50
tacgccgcattaaaattcc

SEQ ID NO: 8192 - DNA, 24 bp, Artificial Sequence
  bisulfite treated nucleic acid for analysis of methylation status of SEQ ID NO: 50
atttttaacgaaacgatgaaatta

SEQ ID NO: 8193 - DNA, 20 bp, Artificial Sequence
  bisulfite treated nucleic acid for analysis of methylation status of SEQ ID NO: 50
tattattcgcgttcccaaaa

SEQ ID NO: 8194 - DNA, 23 bp, Artificial Sequence
  bisulfite treated nucleic acid for analysis of methylation status of SEQ ID NO: 50
cgtttcgttaaaaattaaaaccc

SEQ ID NO: 8195 - DNA, 21 bp, Artificial Sequence
  bisulfite treated nucleic acid for analysis of methylation status of SEQ ID NO: 50
gtttcgaggcggtattttagg

SEQ ID NO: 8196 - DNA, 24 bp, Artificial Sequence
  bisulfite treated nucleic acid for analysis of methylation status of SEQ ID NO: 50
gggtaggcggttggggaacgtcga

SEQ ID NO: 8197 - DNA, 21 bp, Artificial Sequence
  bisulfite treated nucleic acid for analysis of methylation status of SEQ ID NO: 50
cgaggcggtattttagggtag

SEQ ID NO: 8198 - DNA, 19 bp, Artificial Sequence
  bisulfite treated nucleic acid for analysis of methylation status of SEQ ID NO: 50
attttgggaacgcgaataa

SEQ ID NO: 8199 - DNA, 25 bp, Artificial Sequence
  bisulfite treated nucleic acid for analysis of methylation status of SEQ ID NO: 50
tagggttttaatttttaacgaaacg

SEQ ID NO: 8200 - DNA, 19 bp, Artificial Sequence
  bisulfite treated nucleic acid for analysis of methylation status of SEQ ID NO: 50
ttattcgcgttcccaaaat

SEQ ID NO: 8201 - DNA, 19 bp, Artificial Sequence
  bisulfite treated nucleic acid for analysis of methylation status of SEQ ID NO: 50
ttcgaggcggtattttagg

SEQ ID NO: 8202 - DNA, 20 bp, Artificial Sequence
  bisulfite treated nucleic acid for analysis of methylation status of SEQ ID NO: 50
tttcgaggcggtattttagg

SEQ ID NO: 8203 - DNA, 20 bp, Artificial Sequence
  bisulfite treated nucleic acid for analysis of methylation status of SEQ ID NO: 50
actacgccacgtaaaacgct

SEQ ID NO: 8204 - DNA, 22 bp, Artificial Sequence
  bisulfite treated nucleic acid for analysis of methylation status of SEQ ID NO: 50
tagcgataattgtagttggacg

SEQ ID NO: 8205 - DNA, 30 bp, Artificial Sequence
  bisulfite treated nucleic acid for analysis of methylation status of SEQ ID NO: 50
gtaacgcggaggggagggattgtttcggtt

SEQ ID NO: 8206 - DNA, 19 bp, Artificial Sequence
  bisulfite treated nucleic acid for analysis of methylation status of SEQ ID NO: 50
tattcgcgttcccaaaatc

SEQ ID NO: 8207 - DNA, 25 bp, Artificial Sequence
  bisulfite treated nucleic acid for analysis of methylation status of SEQ ID NO: 50
ggttttaatttttaacgaaacgatg

SEQ ID NO: 8208 - DNA, 18 bp, Artificial Sequence
  bisulfite treated nucleic acid for analysis of methylation status of SEQ ID NO: 50
acgccgcattaaaattcc

SEQ ID NO: 8209 - DNA, 19 bp, Artificial Sequence
  bisulfite treated nucleic acid for analysis of methylation status of SEQ ID NO: 50
aaacgaacgatttcccaac

SEQ ID NO: 8210 - DNA, 23 bp, Artificial Sequence
  bisulfite treated nucleic acid for analysis of methylation status of SEQ ID NO: 50
tttattgacgatattttggtcgt

SEQ ID NO: 8211 - DNA, 33 bp, Artificial Sequence
  bisulfite treated nucleic acid for analysis of methylation status of SEQ ID NO: 50
gtcgtttaggaaacgcgtttaggttttggtgtt

SEQ ID NO: 8212 - DNA, 19 bp, Artificial Sequence
  bisulfite treated nucleic acid for analysis of methylation status of SEQ ID NO: 50
cacgtaaaacgctcccatt

SEQ ID NO: 8213 - DNA, 22 bp, Artificial Sequence
  bisulfite treated nucleic acid for analysis of methylation status of SEQ ID NO: 50
tagttagggtcggtttagcgat

SEQ ID NO: 8214 - DNA, 19 bp, Artificial Sequence
  bisulfite treated nucleic acid for analysis of methylation status of SEQ ID NO: 50
aatttacgccatacgcgac

SEQ ID NO: 8215 - DNA, 32 bp, Artificial Sequence
  bisulfite treated nucleic acid for analysis of methylation status of SEQ ID NO: 50
agatgagttttgaattcgagtaggaggtcggt

SEQ ID NO: 8216 - DNA, 19 bp, Artificial Sequence
  bisulfite treated nucleic acid for analysis of methylation status of SEQ ID NO: 50
ctacgccacgtaaaacgct

SEQ ID NO: 8217 - DNA, 22 bp, Artificial Sequence
  bisulfite treated nucleic acid for analysis of methylation status of SEQ ID NO: 50
ttaaaaccctaaatcgacgttc

SEQ ID NO: 8218 - DNA, 18 bp, Artificial Sequence
  bisulfite treated nucleic acid for analysis of methylation status of SEQ ID NO: 50
ggttgggaaatcgttcgt

SEQ ID NO: 8219 - DNA, 30 bp, Artificial Sequence
  bisulfite treated nucleic acid for analysis of methylation status of SEQ ID NO: 50
gacgtttggtttcgaggcggtattttaggg

SEQ ID NO: 8220 - DNA, 18 bp, Artificial Sequence
  bisulfite treated nucleic acid for analysis of methylation status of SEQ ID NO: 50
tacgccacgtaaaacgct

SEQ ID NO: 8221 - DNA, 19 bp, Artificial Sequence
  bisulfite treated nucleic acid for analysis of methylation status of SEQ ID NO: 50
aggttgggaaatcgttcgt

SEQ ID NO: 8222 - DNA, 19 bp, Artificial Sequence
  bisulfite treated nucleic acid for analysis of methylation status of SEQ ID NO: 50
attattcgcgttcccaaaa

SEQ ID NO: 8223 - DNA, 22 bp, Artificial Sequence
  bisulfite treated nucleic acid for analysis of methylation status of SEQ ID NO: 50
ggaacgtcgatttagggtttta

SEQ ID NO: 8224 - DNA, 21 bp, Artificial Sequence
  bisulfite treated nucleic acid for analysis of methylation status of SEQ ID NO: 50
tttcactacgccacgtaaaac

SEQ ID NO: 8225 - DNA, 20 bp, Artificial Sequence
  bisulfite treated nucleic acid for analysis of methylation status of SEQ ID NO: 50
tggtttttaaggtaacgcgg

SEQ ID NO: 8226 - DNA, 29 bp, Artificial Sequence
  bisulfite treated nucleic acid for analysis of methylation status of SEQ ID NO: 50
gggagggattgtttcggtttcgtttacgt

SEQ ID NO: 8227 - DNA, 22 bp, Artificial Sequence
  bisulfite treated nucleic acid for analysis of methylation status of SEQ ID NO: 50
ttattgacgatattttggtcgt

SEQ ID NO: 8228 - DNA, 20 bp, Artificial Sequence
  bisulfite treated nucleic acid for analysis of methylation status of SEQ ID NO: 50
cgtaaaacgctcccattact

SEQ ID NO: 8229 - DNA, 20 bp, Artificial Sequence
  bisulfite treated nucleic acid for analysis of methylation status of SEQ ID NO: 50
gttagggtcggtttagcgat

SEQ ID NO: 8230 - DNA, 19 bp, Artificial Sequence
  bisulfite treated nucleic acid for analysis of methylation status of SEQ ID NO: 50
acgaacgatttcccaacct

SEQ ID NO: 8231 - DNA, 22 bp, Artificial Sequence
  bisulfite treated nucleic acid for analysis of methylation status of SEQ ID NO: 50
attgacgatattttggtcgttg

SEQ ID NO: 8232 - DNA, 22 bp, Artificial Sequence
  bisulfite treated nucleic acid for analysis of methylation status of SEQ ID NO: 19
tttatcggtgtcggtagttttc

SEQ ID NO: 8233 - DNA, 22 bp, Artificial Sequence
  bisulfite treated nucleic acid for analysis of methylation status of SEQ ID NO: 19
ccaatcctatccgtaataaacg

SEQ ID NO: 8234 - DNA, 24 bp, Artificial Sequence
  bisulfite treated nucleic acid for analysis of methylation status of SEQ ID NO: 19
tttgtcggagggcgattcgtgggt

SEQ ID NO: 8235 - DNA, 22 bp, Artificial Sequence
  bisulfite treated nucleic acid for analysis of methylation status of SEQ ID NO: 19
ttttatcggtgtcggtagtttt

SEQ ID NO: 8236 - DNA, 22 bp, Artificial Sequence
  bisulfite treated nucleic acid for analysis of methylation status of SEQ ID NO: 19
gattttatcggtgtcggtagtt

SEQ ID NO: 8237 - DNA, 23 bp, Artificial Sequence
  bisulfite treated nucleic acid for analysis of methylation status of SEQ ID NO: 19
attttatcggtgtcggtagtttt

SEQ ID NO: 8238 - DNA, 22 bp, Artificial Sequence
  bisulfite treated nucleic acid for analysis of methylation status of SEQ ID NO: 19
ggattttatcggtgtcggtagt

SEQ ID NO: 8239 - DNA, 22 bp, Artificial Sequence
  bisulfite treated nucleic acid for analysis of methylation status of SEQ ID NO: 19
caatcctatccgtaataaacga

SEQ ID NO: 8240 - DNA, 21 bp, Artificial Sequence
  bisulfite treated nucleic acid for analysis of methylation status of SEQ ID NO: 19
ccgtaataaacgatacccacg

SEQ ID NO: 8241 - DNA, 31 bp, Artificial Sequence
  bisulfite treated nucleic acid for analysis of methylation status of SEQ ID NO: 19
ggttttcgggtatagcggtcgttttattcga

SEQ ID NO: 8242 - DNA, 23 bp, Artificial Sequence
  bisulfite treated nucleic acid for analysis of methylation status of SEQ ID NO: 19
cgtaataaacgatacccacgaat

SEQ ID NO: 8243 - DNA, 23 bp, Artificial Sequence
  bisulfite treated nucleic acid for analysis of methylation status of SEQ ID NO: 19
tccaatcctatccgtaataaacg

SEQ ID NO: 8244 - DNA, 21 bp, Artificial Sequence
  bisulfite treated nucleic acid for analysis of methylation status of SEQ ID NO: 19
ttatcggtgtcggtagttttc

SEQ ID NO: 8245 - DNA, 22 bp, Artificial Sequence
  bisulfite treated nucleic acid for analysis of methylation status of SEQ ID NO: 19
tatttgcgttttcgttagtttt

SEQ ID NO: 8246 - DNA, 22 bp, Artificial Sequence
  bisulfite treated nucleic acid for analysis of methylation status of SEQ ID NO: 19
atccgtaataaacgatacccac

SEQ ID NO: 8247 - DNA, 24 bp, Artificial Sequence
  bisulfite treated nucleic acid for analysis of methylation status of SEQ ID NO: 19
tgcgtttgtaattttagttattcg

SEQ ID NO: 8248 - DNA, 22 bp, Artificial Sequence
  bisulfite treated nucleic acid for analysis of methylation status of SEQ ID NO: 19
taacgcgatctctaacccacta

SEQ ID NO: 8249 - DNA, 32 bp, Artificial Sequence
  bisulfite treated nucleic acid for analysis of methylation status of SEQ ID NO: 19
ggttgaagtaggagaatcgcgtgaatttagga

SEQ ID NO: 8250 - DNA, 20 bp, Artificial Sequence
  bisulfite treated nucleic acid for analysis of methylation status of SEQ ID NO: 19
gtgtcggtagttttcgggtt

SEQ ID NO: 8251 - DNA, 24 bp, Artificial Sequence
  bisulfite treated nucleic acid for analysis of methylation status of SEQ ID NO: 19
cgtttgtaattttagttattcggg

SEQ ID NO: 8252 - DNA, 22 bp, Artificial Sequence
  bisulfite treated nucleic acid for analysis of methylation status of SEQ ID NO: 19
ataacgcgatctctaacccact

SEQ ID NO: 8253 - DNA, 19 bp, Artificial Sequence
  bisulfite treated nucleic acid for analysis of methylation status of SEQ ID NO: 19
tgtcggtagttttcgggtt

SEQ ID NO: 8254 - DNA, 22 bp, Artificial Sequence
  bisulfite treated nucleic acid for analysis of methylation status of SEQ ID NO: 19
attttatcggtgtcggtagttt

SEQ ID NO: 8255 - DNA, 24 bp, Artificial Sequence
  bisulfite treated nucleic acid for analysis of methylation status of SEQ ID NO: 19
gcgtttgtaattttagttattcgg

SEQ ID NO: 8256 - DNA, 23 bp, Artificial Sequence
  bisulfite treated nucleic acid for analysis of methylation status of SEQ ID NO: 19
atatttgcgttttcgttagtttt

SEQ ID NO: 8257 - DNA, 21 bp, Artificial Sequence
  bisulfite treated nucleic acid for analysis of methylation status of SEQ ID NO: 19
acgcgatctctaacccactac

SEQ ID NO: 8258 - DNA, 21 bp, Artificial Sequence
  bisulfite treated nucleic acid for analysis of methylation status of SEQ ID NO: 19
ggattttatcggtgtcggtag

SEQ ID NO: 8259 - DNA, 23 bp, Artificial Sequence
  bisulfite treated nucleic acid for analysis of methylation status of SEQ ID NO: 19
gattttatcggtgtcggtagttt

SEQ ID NO: 8260 - DNA, 22 bp, Artificial Sequence
  bisulfite treated nucleic acid for analysis of methylation status of SEQ ID NO: 19
tgtttggacgaattatcgtatt

SEQ ID NO: 8261 - DNA, 21 bp, Artificial Sequence
  bisulfite treated nucleic acid for analysis of methylation status of SEQ ID NO: 19
cgaaacataaaaacaacgcct

SEQ ID NO: 8262 - DNA, 24 bp, Artificial Sequence
  bisulfite treated nucleic acid for analysis of methylation status of SEQ ID NO: 19
ttcgggaggcgcgtataggtgggt

SEQ ID NO: 8263 - DNA, 20 bp, Artificial Sequence
  bisulfite treated nucleic acid for analysis of methylation status of SEQ ID NO: 19
aagtaggagaatcgcgtgaa

SEQ ID NO: 8264 - DNA, 21 bp, Artificial Sequence
  bisulfite treated nucleic acid for analysis of methylation status of SEQ ID NO: 19
ctaaaaatcgcccgaactaaa

SEQ ID NO: 8265 - DNA, 38 bp, Artificial Sequence
  bisulfite treated nucleic acid for analysis of methylation status of SEQ ID NO: 19
ggcgtaggttgtagtgggttagagatcgcgttattgtt

SEQ ID NO: 8266 - DNA, 22 bp, Artificial Sequence
  bisulfite treated nucleic acid for analysis of methylation status of SEQ ID NO: 19
aacgcgatctctaacccactac

SEQ ID NO: 8267 - DNA, 21 bp, Artificial Sequence
  bisulfite treated nucleic acid for analysis of methylation status of SEQ ID NO: 19
gaagtaggagaatcgcgtgaa

SEQ ID NO: 8268 - DNA, 21 bp, Artificial Sequence
  bisulfite treated nucleic acid for analysis of methylation status of SEQ ID NO: 19
taacgcgatctctaacccact

SEQ ID NO: 8269 - DNA, 19 bp, Artificial Sequence
  bisulfite treated nucleic acid for analysis of methylation status of SEQ ID NO: 19
tcggtagttttcgggtttt

SEQ ID NO: 8270 - DNA, 19 bp, Artificial Sequence
  bisulfite treated nucleic acid for analysis of methylation status of SEQ ID NO: 19
gttttcgggtatagcggtc

SEQ ID NO: 8271 - DNA, 21 bp, Artificial Sequence
  bisulfite treated nucleic acid for analysis of methylation status of SEQ ID NO: 19
taaaaatcgcccgaactaaaa

SEQ ID NO: 8272 - DNA, 38 bp, Artificial Sequence
  bisulfite treated nucleic acid for analysis of methylation status of SEQ ID NO: 19
ttaggaggcgtaggttgtagtgggttagagatcgcgtt

SEQ ID NO: 8273 - DNA, 25 bp, Artificial Sequence
  bisulfite treated nucleic acid for analysis of methylation status of SEQ ID NO: 19
gtgcgtttgtaattttagttattcg

SEQ ID NO: 8274 - DNA, 22 bp, Artificial Sequence
  bisulfite treated nucleic acid for analysis of methylation status of SEQ ID NO: 19
cgttgtttttatgtttcgagag

SEQ ID NO: 8275 - DNA, 19 bp, Artificial Sequence
  bisulfite treated nucleic acid for analysis of methylation status of SEQ ID NO: 19
gtcacttccgaaatccgac

SEQ ID NO: 8276 - DNA, 30 bp, Artificial Sequence
  bisulfite treated nucleic acid for analysis of methylation status of SEQ ID NO: 19
tggttcgcggagtttcgtttagttaggtga

SEQ ID NO: 8277 - DNA, 22 bp, Artificial Sequence
  bisulfite treated nucleic acid for analysis of methylation status of SEQ ID NO: 19
aatgtaggtgcgcgttatattt

SEQ ID NO: 8278 - DNA, 18 bp, Artificial Sequence
  bisulfite treated nucleic acid for analysis of methylation status of SEQ ID NO: 19
ctcccgaaatacgctcct

SEQ ID NO: 8279 - DNA, 40 bp, Artificial Sequence
  bisulfite treated nucleic acid for analysis of methylation status of SEQ ID NO: 19
tgtttggacgaattatcgtattttttgttttaggagtttt

SEQ ID NO: 8280 - DNA, 20 bp, Artificial Sequence
  bisulfite treated nucleic acid for analysis of methylation status of SEQ ID NO: 19
atcggtgtcggtagttttcg

SEQ ID NO: 8281 - DNA, 22 bp, Artificial Sequence
  bisulfite treated nucleic acid for analysis of methylation status of SEQ ID NO: 19
tatagcggtcgttttattcgat

SEQ ID NO: 8282 - DNA, 18 bp, Artificial Sequence
  bisulfite treated nucleic acid for analysis of methylation status of SEQ ID NO: 19
acatctccgcgatctcct

SEQ ID NO: 8283 - DNA, 34 bp, Artificial Sequence
  bisulfite treated nucleic acid for analysis of methylation status of SEQ ID NO: 19
ttcgtgggtatcgtttattacggataggattgga

SEQ ID NO: 8284 - DNA, 21 bp, Artificial Sequence
  bisulfite treated nucleic acid for analysis of methylation status of SEQ ID NO: 19
tccgtaataaacgatacccac

SEQ ID NO: 8285 - DNA, 18 bp, Artificial Sequence
  nucleic acid for analysis of methylation status of SEQ ID NO: 19
cgaaatacgctccttccc

SEQ ID NO: 8286 - DNA, 18 bp, Artificial Sequence
  bisulfite treated nucleic acid for analysis of methylation status of SEQ ID NO: 19
ccgaaatacgctccttcc

SEQ ID NO: 8287 - DNA, 18 bp, Artificial Sequence
  bisulfite treated nucleic acid for analysis of methylation status of SEQ ID NO: 19
tcccgaaatacgctcctt

SEQ ID NO: 8288 - DNA, 18 bp, Artificial Sequence
  bisulfite treated nucleic acid for analysis of methylation status of SEQ ID NO: 19
cccgaaatacgctccttc

SEQ ID NO: 8289 - DNA, 23 bp, Artificial Sequence
  bisulfite treated nucleic acid for analysis of methylation status of SEQ ID NO: 19
ttttatcggtgtcggtagttttc

SEQ ID NO: 8290 - DNA, 28 bp, Artificial Sequence
  bisulfite treated nucleic acid for analysis of methylation status of SEQ ID NO: 19
ttatttttgtcggagggcgattcgtggg

SEQ ID NO: 8291 - DNA, 20 bp, Artificial Sequence
  bisulfite treated nucleic acid for analysis of methylation status of SEQ ID NO: 19
cgtaataaacgatacccacg

SEQ ID NO: 8292 - DNA, 20 bp, Artificial Sequence
  bisulfite treated nucleic acid for analysis of methylation status of SEQ ID NO: 19
tgaagtaggagaatcgcgtg

SEQ ID NO: 8293 - DNA, 21 bp, Artificial Sequence
  bisulfite treated nucleic acid for analysis of methylation status of SEQ ID NO: 19
gcgttgtttttatgtttcgag

SEQ ID NO: 8294 - DNA, 22 bp, Artificial Sequence
  bisulfite treated nucleic acid for analysis of methylation status of SEQ ID NO: 19
tttggacgaattatcgtatttt

SEQ ID NO: 8295 - DNA, 18 bp, Artificial Sequence
  bisulfite treated nucleic acid for analysis of methylation status of SEQ ID NO: 19
cggtgtcggtagttttcg

SEQ ID NO: 8296 - DNA, 19 bp, Artificial Sequence
  bisulfite treated nucleic acid for analysis of methylation status of SEQ ID NO: 19
tgggattttatcggtgtcg

SEQ ID NO: 8297 - DNA, 23 bp, Artificial Sequence
  bisulfite treated nucleic acid for analysis of methylation status of SEQ ID NO: 19
gtttggacgaattatcgtatttt

SEQ ID NO: 8298 - DNA, 22 bp, Artificial Sequence
  bisulfite treated nucleic acid for analysis of methylation status of SEQ ID NO: 19
ggtgcgcgttatatttattttt

SEQ ID NO: 8299 - DNA, 18 bp, Artificial Sequence
  bisulfite treated nucleic acid for analysis of methylation status of SEQ ID NO: 19
atctccgcgatctcctct

SEQ ID NO: 8300 - DNA, 34 bp, Artificial Sequence
  bisulfite treated nucleic acid for analysis of methylation status of SEQ ID NO: 19
attcgtgggtatcgtttattacggataggattgg

SEQ ID NO: 8301 - DNA, 22 bp, Artificial Sequence
  bisulfite treated nucleic acid for analysis of methylation status of SEQ ID NO: 19
gtttttatgtttcgagaggcgt

SEQ ID NO: 8302 - DNA, 20 bp, Artificial Sequence
  bisulfite treated nucleic acid for analysis of methylation status of SEQ ID NO: 19
cgcgatctctaacccactac

SEQ ID NO: 8303 - DNA, 18 bp, Artificial Sequence
  bisulfite treated nucleic acid for analysis of methylation status of SEQ ID NO: 19
aacatctccgcgatctcc

SEQ ID NO: 8304 - DNA, 21 bp, Artificial Sequence
  bisulfite treated nucleic acid for analysis of methylation status of SEQ ID NO: 19
atttaacctaaaaatcgcccg

SEQ ID NO: 8305 - DNA, 21 bp, Artificial Sequence
  bisulfite treated nucleic acid for analysis of methylation status of SEQ ID NO: 19
tttttatgtttcgagaggcgt

SEQ ID NO: 8306 - DNA, 22 bp, Artificial Sequence
  bisulfite treated nucleic acid for analysis of methylation status of SEQ ID NO: 19
cgtttattacggataggattgg

SEQ ID NO: 8307 - DNA, 18 bp, Artificial Sequence
  bisulfite treated nucleic acid for analysis of methylation status of SEQ ID NO: 19
gctacgcgacgacaaaaa

SEQ ID NO: 8308 - DNA, 33 bp, Artificial Sequence
  bisulfite treated nucleic acid for analysis of methylation status of SEQ ID NO: 19
tgtttgaggtagaagttcggaaattcgagttgt

SEQ ID NO: 8309 - DNA, 19 bp, Artificial Sequence
  bisulfite treated nucleic acid for analysis of methylation status of SEQ ID NO: 19
aacatctccgcgatctcct

SEQ ID NO: 8310 - DNA, 22 bp, Artificial Sequence
  bisulfite treated nucleic acid for analysis of methylation status of SEQ ID NO: 19
aggtgcgcgttatatttatttt

SEQ ID NO: 8311 - DNA, 19 bp, Artificial Sequence
  bisulfite treated nucleic acid for analysis of methylation status of SEQ ID NO: 19
tcggtgtcggtagttttcg

SEQ ID NO: 8312 - DNA, 20 bp, Artificial Sequence
  bisulfite treated nucleic acid for analysis of methylation status of SEQ ID NO: 19
tatcggtgtcggtagttttc

SEQ ID NO: 8313 - DNA, 20 bp, Artificial Sequence
  bisulfite treated nucleic acid for analysis of methylation status of SEQ ID NO: 19
aaaatcgcccgaactaaaaa

SEQ ID NO: 8314 - DNA, 20 bp, Artificial Sequence
  bisulfite treated nucleic acid for analysis of methylation status of SEQ ID NO: 19
aaaaatcgcccgaactaaaa

SEQ ID NO: 8315 - DNA, 22 bp, Artificial Sequence
  bisulfite treated nucleic acid for analysis of methylation status of SEQ ID NO: 19
gggtatagcggtcgttttattc

SEQ ID NO: 8316 - DNA, 18 bp, Artificial Sequence
  bisulfite treated nucleic acid for analysis of methylation status of SEQ ID NO: 19
tctccgcgatctcctctc

SEQ ID NO: 8317 - DNA, 21 bp, Artificial Sequence
  bisulfite treated nucleic acid for analysis of methylation status of SEQ ID NO: 19
gattttatcggtgtcggtagt

SEQ ID NO: 8318 - DNA, 18 bp, Artificial Sequence
  bisulfite treated nucleic acid for analysis of methylation status of SEQ ID NO: 19
ggatttcggaagtgacgc

SEQ ID NO: 8319 - DNA, 22 bp, Artificial Sequence
  bisulfite treated nucleic acid for analysis of methylation status of SEQ ID NO: 19
ctacaaccgaacctactcgaac

SEQ ID NO: 8320 - DNA, 28 bp, Artificial Sequence
  bisulfite treated nucleic acid for analysis of methylation status of SEQ ID NO: 19
agtcggtttggggggtgcgttgttcgga

SEQ ID NO: 8321 - DNA, 22 bp, Artificial Sequence
  bisulfite treated nucleic acid for analysis of methylation status of SEQ ID NO: 19
tacaaccgaacctactcgaact

SEQ ID NO: 8322 - DNA, 21 bp, Artificial Sequence
  bisulfite treated nucleic acid for analysis of methylation status of SEQ ID NO: 19
aggcgttgtttttatgtttcg

SEQ ID NO: 8323 - DNA, 23 bp, Artificial Sequence
  bisulfite treated nucleic acid for analysis of methylation status of SEQ ID NO: 19
tgtaggtgcgcgttatatttatt

SEQ ID NO: 8324 - DNA, 20 bp, Artificial Sequence
  bisulfite treated nucleic acid for analysis of methylation status of SEQ ID NO: 19
ggcgttgtttttatgtttcg

SEQ ID NO: 8325 - DNA, 21 bp, Artificial Sequence
  bisulfite treated nucleic acid for analysis of methylation status of SEQ ID NO: 19
tcgaaacataaaaacaacgcc

SEQ ID NO: 8326 - DNA, 21 bp, Artificial Sequence
  bisulfite treated nucleic acid for analysis of methylation status of SEQ ID NO: 19
acctaaaaatcgcccgaacta

SEQ ID NO: 8327 - DNA, 20 bp, Artificial Sequence
  bisulfite treated nucleic acid for analysis of methylation status of SEQ ID NO: 19
tatgtttcgagaggcgtgtt

SEQ ID NO: 8328 - DNA, 20 bp, Artificial Sequence
  bisulfite treated nucleic acid for analysis of methylation status of SEQ ID NO: 19
ttatgtttcgagaggcgtgt

SEQ ID NO: 8329 - DNA, 21 bp, Artificial Sequence
  bisulfite treated nucleic acid for analysis of methylation status of SEQ ID NO: 19
cggtcgttttattcgattttt

SEQ ID NO: 8330 - DNA, 21 bp, Artificial Sequence
  bisulfite treated nucleic acid for analysis of methylation status of SEQ ID NO: 19
atagcggtcgttttattcgat

SEQ ID NO: 8331 - DNA, 18 bp, Artificial Sequence
  bisulfite treated nucleic acid for analysis of methylation status of SEQ ID NO: 19
catctccgcgatctcctc

SEQ ID NO: 8332 - DNA, 20 bp, Artificial Sequence
  bisulfite treated nucleic acid for analysis of methylation status of SEQ ID NO: 19
tttaacctaaaaatcgcccg

SEQ ID NO: 8333 - DNA, 20 bp, Artificial Sequence
  bisulfite treated nucleic acid for analysis of methylation status of SEQ ID NO: 19
ttttatgtttcgagaggcgt

SEQ ID NO: 8334 - DNA, 19 bp, Artificial Sequence
  bisulfite treated nucleic acid for analysis of methylation status of SEQ ID NO: 19
ttaacctaaaaatcgcccg

SEQ ID NO: 8335 - DNA, 20 bp, Artificial Sequence
  bisulfite treated nucleic acid for analysis of methylation status of SEQ ID NO: 19
cctaaaaatcgcccgaacta

SEQ ID NO: 8336 - DNA, 21 bp, Artificial Sequence
  bisulfite treated nucleic acid for analysis of methylation status of SEQ ID NO: 19
ctacgtctccgtcaatttcct

SEQ ID NO: 8337 - DNA, 22 bp, Artificial Sequence
  bisulfite treated nucleic acid for analysis of methylation status of SEQ ID NO: 19
attttattcgtgatggacgatg

SEQ ID NO: 8338 - DNA, 24 bp, Artificial Sequence
  bisulfite treated nucleic acid for analysis of methylation status of SEQ ID NO: 19
aggggagtcggatgagacggtcgt

SEQ ID NO: 8339 - DNA, 22 bp, Artificial Sequence
  bisulfite treated nucleic acid for analysis of methylation status of SEQ ID NO: 19
atctacgtctccgtcaatttcc

SEQ ID NO: 8340 - DNA, 21 bp, Artificial Sequence
  bisulfite treated nucleic acid for analysis of methylation status of SEQ ID NO: 19
aatccacatctacgtctccgt

SEQ ID NO: 8341 - DNA, 22 bp, Artificial Sequence
  bisulfite treated nucleic acid for analysis of methylation status of SEQ ID NO: 19
attcgtgatggacgatgtttac

SEQ ID NO: 8342 - DNA, 23 bp, Artificial Sequence
  bisulfite treated nucleic acid for analysis of methylation status of SEQ ID NO: 19
tttaattttattcgtgatggacg

SEQ ID NO: 8343 - DNA, 22 bp, Artificial Sequence
  bisulfite treated nucleic acid for analysis of methylation status of SEQ ID NO: 19
ttaattttattcgtgatggacg

SEQ ID NO: 8344 - DNA, 22 bp, Artificial Sequence
  bisulfite treated nucleic acid for analysis of methylation status of SEQ ID NO: 19
gtgatggacgatgtttacgagt

SEQ ID NO: 8345 - DNA, 21 bp, Artificial Sequence
  bisulfite treated nucleic acid for analysis of methylation status of SEQ ID NO: 19
tattcgtgatggacgatgttt

SEQ ID NO: 8346 - DNA, 21 bp, Artificial Sequence
  bisulfite treated nucleic acid for analysis of methylation status of SEQ ID NO: 19
tgatggacgatgtttacgagt

SEQ ID NO: 8347 - DNA, 22 bp, Artificial Sequence
  bisulfite treated nucleic acid for analysis of methylation status of SEQ ID NO: 19
aaatccacatctacgtctccgt

SEQ ID NO: 8348 - DNA, 21 bp, Artificial Sequence
  bisulfite treated nucleic acid for analysis of methylation status of SEQ ID NO: 19
ttttattcgtgatggacgatg

SEQ ID NO: 8349 - DNA, 21 bp, Artificial Sequence
  bisulfite treated nucleic acid for analysis of methylation status of SEQ ID NO: 19
tacgtctccgtcaatttcctc

SEQ ID NO: 8350 - DNA, 21 bp, Artificial Sequence
  nucleic acid for analysis of methylation status of SEQ ID NO: 19
tctacgtctccgtcaatttcc

SEQ ID NO: 8351 - DNA, 21 bp, Artificial Sequence
  bisulfite treated nucleic acid for analysis of methylation status of SEQ ID NO: 19
ttcgtgatggacgatgtttac

SEQ ID NO: 8352 - DNA, 21 bp, Artificial Sequence
  bisulfite treated nucleic acid for analysis of methylation status of SEQ ID NO: 19
cgtctccgtcaatttcctcta

SEQ ID NO: 8353 - DNA, 21 bp, Artificial Sequence
  bisulfite treated nucleic acid for analysis of methylation status of SEQ ID NO: 19
cgacgaacaaccaataacaca

SEQ ID NO: 8354 - DNA, 22 bp, Artificial Sequence
  bisulfite treated nucleic acid for analysis of methylation status of SEQ ID NO: 19
gaaattgacggagacgtagatg

SEQ ID NO: 8355 - DNA, 25 bp, Artificial Sequence
  bisulfite treated nucleic acid for analysis of methylation status of SEQ ID NO: 19
tgtagcggaggaaggcgaggtagga

SEQ ID NO: 8356 - DNA, 20 bp, Artificial Sequence
  bisulfite treated nucleic acid for analysis of methylation status of SEQ ID NO: 19
aacacaacgaccgtctcatc

SEQ ID NO: 8357 - DNA, 22 bp, Artificial Sequence
  bisulfite treated nucleic acid for analysis of methylation status of SEQ ID NO: 19
gtagttcgggttttcgagtttt

SEQ ID NO: 8358 - DNA, 31 bp, Artificial Sequence
  bisulfite treated nucleic acid for analysis of methylation status of SEQ ID NO: 19
attcgtgatggacgatgtttacgagtcgttt

SEQ ID NO: 8359 - DNA, 20 bp, Artificial Sequence
  bisulfite treated nucleic acid for analysis of methylation status of SEQ ID NO: 19
gaacacaacgaccgtctcat

SEQ ID NO: 8360 - DNA, 20 bp, Artificial Sequence
  bisulfite treated nucleic acid for analysis of methylation status of SEQ ID NO: 19
cgtctccgtcaatttcctct

SEQ ID NO: 8361 - DNA, 22 bp, Artificial Sequence
  bisulfite treated nucleic acid for analysis of methylation status of SEQ ID NO: 19
tattcgtgatggacgatgttta

SEQ ID NO: 8362 - DNA, 21 bp, Artificial Sequence
  bisulfite treated nucleic acid for analysis of methylation status of SEQ ID NO: 19
tttattcgtgatggacgatgt

SEQ ID NO: 8363 - DNA, 21 bp, Artificial Sequence
  bisulfite treated nucleic acid for analysis of methylation status of SEQ ID NO: 19
tagttcgggttttcgagtttt

SEQ ID NO: 8364 - DNA, 22 bp, Artificial Sequence
  bisulfite treated nucleic acid for analysis of methylation status of SEQ ID NO: 19
ttattcgtgatggacgatgttt

SEQ ID NO: 8365 - DNA, 22 bp, Artificial Sequence
  bisulfite treated nucleic acid for analysis of methylation status of SEQ ID NO: 19
ttttattcgtgatggacgatgt

SEQ ID NO: 8366 - DNA, 19 bp, Artificial Sequence
  bisulfite treated nucleic acid for analysis of methylation status of SEQ ID NO: 19
aatcgcgtaaacccaaaaa

SEQ ID NO: 8367 - DNA, 22 bp, Artificial Sequence
  bisulfite treated nucleic acid for analysis of methylation status of SEQ ID NO: 19
atttaatttgagagtcgttcgg

SEQ ID NO: 8368 - DNA, 30 bp, Artificial Sequence
  bisulfite treated nucleic acid for analysis of methylation status of SEQ ID NO: 19
gggttggagaataatggcgcgatttttggt

SEQ ID NO: 8369 - DNA, 19 bp, Artificial Sequence
  bisulfite treated nucleic acid for analysis of methylation status of SEQ ID NO: 19
aaatcgcgtaaacccaaaa

SEQ ID NO: 8370 - DNA, 20 bp, Artificial Sequence
  bisulfite treated nucleic acid for analysis of methylation status of SEQ ID NO: 19
cgacgaacaaccaataacac

SEQ ID NO: 8371 - DNA, 22 bp, Artificial Sequence
  bisulfite treated nucleic acid for analysis of methylation status of SEQ ID NO: 19
aaattgacggagacgtagatgt

SEQ ID NO: 8372 - DNA, 20 bp, Artificial Sequence
  bisulfite treated nucleic acid for analysis of methylation status of SEQ ID NO: 19
actaaccaaaaacccgacga

SEQ ID NO: 8373 - DNA, 21 bp, Artificial Sequence
  bisulfite treated nucleic acid for analysis of methylation status of SEQ ID NO: 19
gtgtagttcgggttttcgagt

SEQ ID NO: 8374 - DNA, 20 bp, Artificial Sequence
  bisulfite treated nucleic acid for analysis of methylation status of SEQ ID NO: 19
atccacatctacgtctccgt

SEQ ID NO: 8375 - DNA, 21 bp, Artificial Sequence
  bisulfite treated nucleic acid for analysis of methylation status of SEQ ID NO: 19
aggaaattgacggagacgtag

SEQ ID NO: 8376 - DNA, 19 bp, Artificial Sequence
  bisulfite treated nucleic acid for analysis of methylation status of SEQ ID NO: 19
ctaaccaaaaacccgacga

SEQ ID NO: 8377 - DNA, 20 bp, Artificial Sequence
  bisulfite treated nucleic acid for analysis of methylation status of SEQ ID NO: 19
acgtctccgtcaatttcctc

SEQ ID NO: 8378 - DNA, 22 bp, Artificial Sequence
  bisulfite treated nucleic acid for analysis of methylation status of SEQ ID NO: 19
ggaaattgacggagacgtagat

SEQ ID NO: 8379 - DNA, 20 bp, Artificial Sequence
  nucleic acid for analysis of methylation status of SEQ ID NO: 19
aaaatcgcgtaaacccaaaa

SEQ ID NO: 8380 - DNA, 31 bp, Artificial Sequence
  bisulfite treated nucleic acid for analysis of methylation status of SEQ ID NO: 19
ggttggagaataatggcgcgatttttggttt

SEQ ID NO: 8381 - DNA, 19 bp, Artificial Sequence
  bisulfite treated nucleic acid for analysis of methylation status of SEQ ID NO: 19
acccgacgaacaaccaata

SEQ ID NO: 8382 - DNA, 20 bp, Artificial Sequence
  bisulfite treated nucleic acid for analysis of methylation status of SEQ ID NO: 19
taaccaaaaacccgacgaac

SEQ ID NO: 8383 - DNA, 20 bp, Artificial Sequence
  bisulfite treated nucleic acid for analysis of methylation status of SEQ ID NO: 19
ccgacgaacaaccaataaca

SEQ ID NO: 8384 - DNA, 22 bp, Artificial Sequence
  bisulfite treated nucleic acid for analysis of methylation status of SEQ ID NO: 17
gagttttggtcgtcgataagag

SEQ ID NO: 8385 - DNA, 20 bp, Artificial Sequence
  bisulfite treated nucleic acid for analysis of methylation status of SEQ ID NO: 17
acgaaacgcaaactacgaac

SEQ ID NO: 8386 - DNA, 28 bp, Artificial Sequence
  bisulfite treated nucleic acid for analysis of methylation status of SEQ ID NO: 17
ggacgtcggttttcgttttgttcgaggt

SEQ ID NO: 8387 - DNA, 22 bp, Artificial Sequence
  bisulfite treated nucleic acid for analysis of methylation status of SEQ ID NO: 17
gatagtagagatcgttcgtggg

SEQ ID NO: 8388 - DNA, 21 bp, Artificial Sequence
  bisulfite treated nucleic acid for analysis of methylation status of SEQ ID NO: 17
tccaaaactccgactataccg

SEQ ID NO: 8389 - DNA, 33 bp, Artificial Sequence
  bisulfite treated nucleic acid for analysis of methylation status of SEQ ID NO: 17
ttagttttggcgttcgtttcgttcgcggtagag

SEQ ID NO: 8390 - DNA, 22 bp, Artificial Sequence
  bisulfite treated nucleic acid for analysis of methylation status of SEQ ID NO: 17
ggatagtagagatcgttcgtgg

SEQ ID NO: 8391 - DNA, 22 bp, Artificial Sequence
  bisulfite treated nucleic acid for analysis of methylation status of SEQ ID NO: 17
cgttgagtagtcgtagggttag

SEQ ID NO: 8392 - DNA, 22 bp, Artificial Sequence
  bisulfite treated nucleic acid for analysis of methylation status of SEQ ID NO: 17
aaaacgtaaaatcgcgtacaat

SEQ ID NO: 8393 - DNA, 31 bp, Artificial Sequence
  bisulfite treated nucleic acid for analysis of methylation status of SEQ ID NO: 17
aagaggattgattgattacggcgtttagggg

SEQ ID NO: 8394 - DNA, 22 bp, Artificial Sequence
  bisulfite treated nucleic acid for analysis of methylation status of SEQ ID NO: 17
acgtaaaatcgcgtacaatacc

SEQ ID NO: 8395 - DNA, 20 bp, Artificial Sequence
  bisulfite treated nucleic acid for analysis of methylation status of SEQ ID NO: 17
aaaactccgactataccgcc

SEQ ID NO: 8396 - DNA, 30 bp, Artificial Sequence
  bisulfite treated nucleic acid for analysis of methylation status of SEQ ID NO: 17
ttcggggtgtagggagttgttcgtttagtt

SEQ ID NO: 8397 - DNA, 23 bp, Artificial Sequence
  bisulfite treated nucleic acid for analysis of methylation status of SEQ ID NO: 17
acgttgagtagtcgtagggttag

SEQ ID NO: 8398 - DNA, 21 bp, Artificial Sequence
  bisulfite treated nucleic acid for analysis of methylation status of SEQ ID NO: 17
gtacgggtcgattggttattt

SEQ ID NO: 8399 - DNA, 22 bp, Artificial Sequence
  bisulfite treated nucleic acid for analysis of methylation status of SEQ ID NO: 17
cctcaaacgtacactacgctac

SEQ ID NO: 8400 - DNA, 27 bp, Artificial Sequence
  bisulfite treated nucleic acid for analysis of methylation status of SEQ ID NO: 17
agttttcgcggagagcgtgggtttttt

SEQ ID NO: 8401 - DNA, 22 bp, Artificial Sequence
  bisulfite treated nucleic acid for analysis of methylation status of SEQ ID NO: 17
tacgttgagtagtcgtagggtt

SEQ ID NO: 8402 - DNA, 21 bp, Artificial Sequence
  bisulfite treated nucleic acid for analysis of methylation status of SEQ ID NO: 17
gggtacgtttttagttttgcg

SEQ ID NO: 8403 - DNA, 22 bp, Artificial Sequence
  bisulfite treated nucleic acid for analysis of methylation status of SEQ ID NO: 17
cgctacgacgcatctaactact

SEQ ID NO: 8404 - DNA, 32 bp, Artificial Sequence
  bisulfite treated nucleic acid for analysis of methylation status of SEQ ID NO: 17
ggcgaagtaagtgttttttcggcgtcggtcgt

SEQ ID NO: 8405 - DNA, 21 bp, Artificial Sequence
  bisulfite treated nucleic acid for analysis of methylation status of SEQ ID NO: 17
tacgggtcgattggttatttt

SEQ ID NO: 8406 - DNA, 21 bp, Artificial Sequence
  bisulfite treated nucleic acid for analysis of methylation status of SEQ ID NO: 17
gttaaggaatcggttagtcgg

SEQ ID NO: 8407 - DNA, 21 bp, Artificial Sequence
  bisulfite treated nucleic acid for analysis of methylation status of SEQ ID NO: 17
taaacgaaaaccccgtaacat

SEQ ID NO: 8408 - DNA, 32 bp, Artificial Sequence
  bisulfite treated nucleic acid for analysis of methylation status of SEQ ID NO: 17
ggcgcgagaaaagttttgggaaggcggttgta

SEQ ID NO: 8409 - DNA, 21 bp, Artificial Sequence
  bisulfite treated nucleic acid for analysis of methylation status of SEQ ID NO: 17
ggttaaggaatcggttagtcg

SEQ ID NO: 8410 - DNA, 21 bp, Artificial Sequence
  bisulfite treated nucleic acid for analysis of methylation status of SEQ ID NO: 17
caaacgtacactacgctacgc

SEQ ID NO: 8411 - DNA, 20 bp, Artificial Sequence
  bisulfite treated nucleic acid for analysis of methylation status of SEQ ID NO: 17
caaaactccgactataccgc

SEQ ID NO: 8412 - DNA, 20 bp, Artificial Sequence
  bisulfite treated nucleic acid for analysis of methylation status of SEQ ID NO: 17
ccaaaactccgactataccg

SEQ ID NO: 8413 - DNA, 22 bp, Artificial Sequence
  bisulfite treated nucleic acid for analysis of methylation status of SEQ ID NO: 17
aaaaacgtaaaatcgcgtacaa

SEQ ID NO: 8414 - DNA, 21 bp, Artificial Sequence
  bisulfite treated nucleic acid for analysis of methylation status of SEQ ID NO: 17
cggcggtgttgtttattttag

SEQ ID NO: 8415 - DNA, 22 bp, Artificial Sequence
  bisulfite treated nucleic acid for analysis of methylation status of SEQ ID NO: 17
tacgacgcatctaactactccc

SEQ ID NO: 8416 - DNA, 20 bp, Artificial Sequence
  bisulfite treated nucleic acid for analysis of methylation status of SEQ ID NO: 17
aacaataaccgaaaaacccg

SEQ ID NO: 8417 - DNA, 26 bp, Artificial Sequence
  bisulfite treated nucleic acid for analysis of methylation status of SEQ ID NO: 17
ttcgcggtagagggcggtatagtcgg

SEQ ID NO: 8418 - DNA, 22 bp, Artificial Sequence
  bisulfite treated nucleic acid for analysis of methylation status of SEQ ID NO: 17
gggatagtagagatcgttcgtg

SEQ ID NO: 8419 - DNA, 20 bp, Artificial Sequence
  bisulfite treated nucleic acid for analysis of methylation status of SEQ ID NO: 17
gtagagggcggtatagtcgg

SEQ ID NO: 8420 - DNA, 22 bp, Artificial Sequence
  nucleic acid for analysis of methylation status of SEQ ID NO: 17
gtacgtccgaaaaacaataacc

SEQ ID NO: 8421 - DNA, 24 bp, Artificial Sequence
  bisulfite treated nucleic acid for analysis of methylation status of SEQ ID NO: 17
ggtagcgtcggtagtcgcgggttt

SEQ ID NO: 8422 - DNA, 20 bp, Artificial Sequence
  bisulfite treated nucleic acid for analysis of methylation status of SEQ ID NO: 17
ggtagagggcggtatagtcg

SEQ ID NO: 8423 - DNA, 20 bp, Artificial Sequence
  bisulfite treated nucleic acid for analysis of methylation status of SEQ ID NO: 17
aacgtacactacgctacgcc

SEQ ID NO: 8424 - DNA, 22 bp, Artificial Sequence
  bisulfite treated nucleic acid for analysis of methylation status of SEQ ID NO: 17
acgctacgacgcatctaactac

SEQ ID NO: 8425 - DNA, 21 bp, Artificial Sequence
  bisulfite treated nucleic acid for analysis of methylation status of SEQ ID NO: 17
ttcggttattgtttttcggac

SEQ ID NO: 8426 - DNA, 22 bp, Artificial Sequence
  bisulfite treated nucleic acid for analysis of methylation status of SEQ ID NO: 17
gaaactcctcttatcgacgacc

SEQ ID NO: 8427 - DNA, 30 bp, Artificial Sequence
  bisulfite treated nucleic acid for analysis of methylation status of SEQ ID NO: 17
tattgtcgtcgtcgtagaggggtgaggaaa

SEQ ID NO: 8428 - DNA, 22 bp, Artificial Sequence
  bisulfite treated nucleic acid for analysis of methylation status of SEQ ID NO: 17
cgttttgttcgaggttgtaaag

SEQ ID NO: 8429 - DNA, 20 bp, Artificial Sequence
  bisulfite treated nucleic acid for analysis of methylation status of SEQ ID NO: 17
tactcgctaacgcccaaata

SEQ ID NO: 8430 - DNA, 29 bp, Artificial Sequence
  bisulfite treated nucleic acid for analysis of methylation status of SEQ ID NO: 17
tttcgtttcgggaattgggtaagtagcgg

SEQ ID NO: 8431 - DNA, 23 bp, Artificial Sequence
  bisulfite treated nucleic acid for analysis of methylation status of SEQ ID NO: 17
gtcgtagggttagtattttcgat

SEQ ID NO: 8432 - DNA, 24 bp, Artificial Sequence
  bisulfite treated nucleic acid for analysis of methylation status of SEQ ID NO: 17
agtcgtagggttagtattttcgat

SEQ ID NO: 8433 - DNA, 22 bp, Artificial Sequence
  bisulfite treated nucleic acid for analysis of methylation status of SEQ ID NO: 17
ggtacgtttttagttttgcgtc

SEQ ID NO: 8434 - DNA, 20 bp, Artificial Sequence
  bisulfite treated nucleic acid for analysis of methylation status of SEQ ID NO: 17
acgcatctaactactcccgc

SEQ ID NO: 8435 - DNA, 22 bp, Artificial Sequence
  bisulfite treated nucleic acid for analysis of methylation status of SEQ ID NO: 17
gggtacgtttttagttttgcgt

SEQ ID NO: 8436 - DNA, 22 bp, Artificial Sequence
  bisulfite treated nucleic acid for analysis of methylation status of SEQ ID NO: 17
gctacgacgcatctaactactc

SEQ ID NO: 8437 - DNA, 22 bp, Artificial Sequence
  bisulfite treated nucleic acid for analysis of methylation status of SEQ ID NO: 17
gtcgataagaggagtttcggac

SEQ ID NO: 8438 - DNA, 20 bp, Artificial Sequence
  bisulfite treated nucleic acid for analysis of methylation status of SEQ ID NO: 17
aacgcaaactacgaaccaac

SEQ ID NO: 8439 - DNA, 34 bp, Artificial Sequence
  bisulfite treated nucleic acid for analysis of methylation status of SEQ ID NO: 17
gttttcgttttgttcgaggttgtaaagttgtgga

SEQ ID NO: 8440 - DNA, 22 bp, Artificial Sequence
  bisulfite treated nucleic acid for analysis of methylation status of SEQ ID NO: 17
ggtcgtcgataagaggagtttc

SEQ ID NO: 8441 - DNA, 33 bp, Artificial Sequence
  bisulfite treated nucleic acid for analysis of methylation status of SEQ ID NO: 17
gacgtcggttttcgttttgttcgaggttgtaaa

SEQ ID NO: 8442 - DNA, 21 bp, Artificial Sequence
  bisulfite treated nucleic acid for analysis of methylation status of SEQ ID NO: 17
aaacgcaaactacgaaccaac

SEQ ID NO: 8443 - DNA, 35 bp, Artificial Sequence
  bisulfite treated nucleic acid for analysis of methylation status of SEQ ID NO: 17
gttttgttcgaggttgtaaagttgtggattcggtt

SEQ ID NO: 8444 - DNA, 22 bp, Artificial Sequence
  bisulfite treated nucleic acid for analysis of methylation status of SEQ ID NO: 17
attttcgattatatttttgcgg

SEQ ID NO: 8445 - DNA, 20 bp, Artificial Sequence
  bisulfite treated nucleic acid for analysis of methylation status of SEQ ID NO: 17
aaaatcgcgtacaatacccc

SEQ ID NO: 8446 - DNA, 22 bp, Artificial Sequence
  bisulfite treated nucleic acid for analysis of methylation status of SEQ ID NO: 17
aaacgtaaaatcgcgtacaata

SEQ ID NO: 8447 - DNA, 21 bp, Artificial Sequence
  bisulfite treated nucleic acid for analysis of methylation status of SEQ ID NO: 17
aaacgtacactacgctacgcc

SEQ ID NO: 8448 - DNA, 19 bp, Artificial Sequence
  bisulfite treated nucleic acid for analysis of methylation status of SEQ ID NO: 17
cgcatctaactactcccgc

SEQ ID NO: 8449 - DNA, 23 bp, Artificial Sequence
  bisulfite treated nucleic acid for analysis of methylation status of SEQ ID NO: 17
ttacgttgagtagtcgtagggtt

SEQ ID NO: 8450 - DNA, 21 bp, Artificial Sequence
  bisulfite treated nucleic acid for analysis of methylation status of SEQ ID NO: 17
cgtaaaatcgcgtacaatacc

SEQ ID NO: 8451 - DNA, 21 bp, Artificial Sequence
  bisulfite treated nucleic acid for analysis of methylation status of SEQ ID NO: 17
aaactcctcttatcgacgacc

SEQ ID NO: 8452 - DNA, 19 bp, Artificial Sequence
  bisulfite treated nucleic acid for analysis of methylation status of SEQ ID NO: 17
tagagggcggtatagtcgg

SEQ ID NO: 8453 - DNA, 26 bp, Artificial Sequence
  bisulfite treated nucleic acid for analysis of methylation status of SEQ ID NO: 17
agcgtcggtagtcgcgggtttttcgg

SEQ ID NO: 8454 - DNA, 20 bp, Artificial Sequence
  bisulfite treated nucleic acid for analysis of methylation status of SEQ ID NO: 17
acgggtcgattggttatttt

SEQ ID NO: 8455 - DNA, 21 bp, Artificial Sequence
  bisulfite treated nucleic acid for analysis of methylation status of SEQ ID NO: 17
tcgataagaggagtttcggac

SEQ ID NO: 8456 - DNA, 20 bp, Artificial Sequence
  bisulfite treated nucleic acid for analysis of methylation status of SEQ ID NO: 17
aaacgaaaaccccgtaacat

SEQ ID NO: 8457 - DNA, 24 bp, Artificial Sequence
  bisulfite treated nucleic acid for analysis of methylation status of SEQ ID NO: 17
tcgtcgtgtttagtttttattacg

SEQ ID NO: 8458 - DNA, 21 bp, Artificial Sequence
  bisulfite treated nucleic acid for analysis of methylation status of SEQ ID NO: 17
cgactaaccgattccttaacc

SEQ ID NO: 8459 - DNA, 36 bp, Artificial Sequence
  bisulfite treated nucleic acid for analysis of methylation status of SEQ ID NO: 17
tacgttttatagtcggggtttttggttagtttcgga

SEQ ID NO: 8460 - DNA, 21 bp, Artificial Sequence
  bisulfite treated nucleic acid for analysis of methylation status of SEQ ID NO: 17
ccgactaaccgattccttaac

SEQ ID NO: 8461 - DNA, 20 bp, Artificial Sequence
  bisulfite treated nucleic acid for analysis of methylation status of SEQ ID NO: 17
taacccttactcgctaacgc

SEQ ID NO: 8462 - DNA, 22 bp, Artificial Sequence
  bisulfite treated nucleic acid for analysis of methylation status of SEQ ID NO: 17
atagtagagatcgttcgtgggg

SEQ ID NO: 8463 - DNA, 21 bp, Artificial Sequence
  bisulfite treated nucleic acid for analysis of methylation status of SEQ ID NO: 17
ttactcgctaacgcccaaata

SEQ ID NO: 8464 - DNA, 20 bp, Artificial Sequence
  bisulfite treated nucleic acid for analysis of methylation status of SEQ ID NO: 17
gtacgggaagtcgtttttcg

SEQ ID NO: 8465 - DNA, 22 bp, Artificial Sequence
  bisulfite treated nucleic acid for analysis of methylation status of SEQ ID NO: 17
ctcttatcgacgaccaaaactc

SEQ ID NO: 8466 - DNA, 21 bp, Artificial Sequence
  bisulfite treated nucleic acid for analysis of methylation status of SEQ ID NO: 17
ggtcgtcgataagaggagttt

SEQ ID NO: 8467 - DNA, 22 bp, Artificial Sequence
  bisulfite treated nucleic acid for analysis of methylation status of SEQ ID NO: 17
cctcttatcgacgaccaaaact

SEQ ID NO: 8468 - DNA, 20 bp, Artificial Sequence
  bisulfite treated nucleic acid for analysis of methylation status of SEQ ID NO: 17
tcggttattgtttttcggac

SEQ ID NO: 8469 - DNA, 20 bp, Artificial Sequence
  bisulfite treated nucleic acid for analysis of methylation status of SEQ ID NO: 17
agttagatgcgtcgtagcgt

SEQ ID NO: 8470 - DNA, 22 bp, Artificial Sequence
  bisulfite treated nucleic acid for analysis of methylation status of SEQ ID NO: 17
cgaacgatctctactatccctt

SEQ ID NO: 8471 - DNA, 24 bp, Artificial Sequence
  bisulfite treated nucleic acid for analysis of methylation status of SEQ ID NO: 17
gggaaggcggcgaaggataggggt

SEQ ID NO: 8472 - DNA, 19 bp, Artificial Sequence
  bisulfite treated nucleic acid for analysis of methylation status of SEQ ID NO: 17
tatatttttgcggggttcg

SEQ ID NO: 8473 - DNA, 22 bp, Artificial Sequence
  bisulfite treated nucleic acid for analysis of methylation status of SEQ ID NO: 17
taaaaacgtaaaatcgcgtaca

SEQ ID NO: 8474 - DNA, 19 bp, Artificial Sequence
  bisulfite treated nucleic acid for analysis of methylation status of SEQ ID NO: 17
acaataaccgaaaaacccg

SEQ ID NO: 8475 - DNA, 22 bp, Artificial Sequence
  bisulfite treated nucleic acid for analysis of methylation status of SEQ ID NO: 17
agttttggtcgtcgataagagg

SEQ ID NO: 8476 - DNA, 20 bp, Artificial Sequence
  bisulfite treated nucleic acid for analysis of methylation status of SEQ ID NO: 17
cggcggtgttgtttatttta

SEQ ID NO: 8477 - DNA, 22 bp, Artificial Sequence
  bisulfite treated nucleic acid for analysis of methylation status of SEQ ID NO: 17
aacgctacgacgcatctaacta

SEQ ID NO: 8478 - DNA, 21 bp, Artificial Sequence
  bisulfite treated nucleic acid for analysis of methylation status of SEQ ID NO: 17
gttttggtcgtcgataagagg

SEQ ID NO: 8479 - DNA, 19 bp, Artificial Sequence
  bisulfite treated nucleic acid for analysis of methylation status of SEQ ID NO: 17
tacgggaagtcgtttttcg

SEQ ID NO: 8480 - DNA, 21 bp, Artificial Sequence
  bisulfite treated nucleic acid for analysis of methylation status of SEQ ID NO: 17
caaactacgaaccaaccgaac

SEQ ID NO: 8481 - DNA, 23 bp, Artificial Sequence
  bisulfite treated nucleic acid for analysis of methylation status of SEQ ID NO: 17
gcgttcggtaggtagttttagtt

SEQ ID NO: 8482 - DNA, 20 bp, Artificial Sequence
  bisulfite treated nucleic acid for analysis of methylation status of SEQ ID NO: 17
ccgactataccgccctctac

SEQ ID NO: 8483 - DNA, 25 bp, Artificial Sequence
  bisulfite treated nucleic acid for analysis of methylation status of SEQ ID NO: 17
agagatcgttcgtggggtttcgggg

SEQ ID NO: 8484 - DNA, 21 bp, Artificial Sequence
  bisulfite treated nucleic acid for analysis of methylation status of SEQ ID NO: 17
gttcggttggttcgtagtttg

SEQ ID NO: 8485 - DNA, 21 bp, Artificial Sequence
  bisulfite treated nucleic acid for analysis of methylation status of SEQ ID NO: 17
ctaacccttactcgctaacgc

SEQ ID NO: 8486 - DNA, 19 bp, Artificial Sequence
  bisulfite treated nucleic acid for analysis of methylation status of SEQ ID NO: 17
actccgactataccgccct

SEQ ID NO: 8487 - DNA, 21 bp, Artificial Sequence
  bisulfite treated nucleic acid for analysis of methylation status of SEQ ID NO: 17
tcgttttgttcgaggttgtaa

SEQ ID NO: 8488 - DNA, 21 bp, Artificial Sequence
  bisulfite treated nucleic acid for analysis of methylation status of SEQ ID NO: 17
ttcgttttgttcgaggttgta

SEQ ID NO: 8489 - DNA, 22 bp, Artificial Sequence
  bisulfite treated nucleic acid for analysis of methylation status of SEQ ID NO: 17
ctacgacgcatctaactactcc

SEQ ID NO: 8490 - DNA, 21 bp, Artificial Sequence
  bisulfite treated nucleic acid for analysis of methylation status of SEQ ID NO: 17
ttggtcgtcgataagaggagt

SEQ ID NO: 8491 - DNA, 22 bp, Artificial Sequence
  bisulfite treated nucleic acid for analysis of methylation status of SEQ ID NO: 17
tccgactaaccgattccttaac

SEQ ID NO: 8492 - DNA, 21 bp, Artificial Sequence
  bisulfite treated nucleic acid for analysis of methylation status of SEQ ID NO: 17
acgacgcatctaactactccc

SEQ ID NO: 8493 - DNA, 21 bp, Artificial Sequence
  nucleic acid for analysis of methylation status of SEQ ID NO: 17
gacgtaattgtttagggcgtt

SEQ ID NO: 8494 - DNA, 20 bp, Artificial Sequence
  bisulfite treated nucleic acid for analysis of methylation status of SEQ ID NO: 17
ctacccaacatacgcgaaaa

SEQ ID NO: 8495 - DNA, 24 bp, Artificial Sequence
  bisulfite treated nucleic acid for analysis of methylation status of SEQ ID NO: 17
tggagtagggcgggcgagaagagt

SEQ ID NO: 8496 - DNA, 20 bp, Artificial Sequence
  bisulfite treated nucleic acid for analysis of methylation status of SEQ ID NO: 17
ttcggttggttcgtagtttg

SEQ ID NO: 8497 - DNA, 20 bp, Artificial Sequence
  bisulfite treated nucleic acid for analysis of methylation status of SEQ ID NO: 17
ttatatttttgcggggttcg

SEQ ID NO: 8498 - DNA, 22 bp, Artificial Sequence
  bisulfite treated nucleic acid for analysis of methylation status of SEQ ID NO: 17
ggcgttcggtaggtagttttag

SEQ ID NO: 8499 - DNA, 19 bp, Artificial Sequence
  bisulfite treated nucleic acid for analysis of methylation status of SEQ ID NO: 17
cgaaacgcaaactacgaac

SEQ ID NO: 8500 - DNA, 19 bp, Artificial Sequence
  bisulfite treated nucleic acid for analysis of methylation status of SEQ ID NO: 17
aacgaaacgcaaactacga

SEQ ID NO: 8501 - DNA, 21 bp, Artificial Sequence
  bisulfite treated nucleic acid for analysis of methylation status of SEQ ID NO: 17
ggcgttcggtaggtagtttta

SEQ ID NO: 8502 - DNA, 20 bp, Artificial Sequence
  bisulfite treated nucleic acid for analysis of methylation status of SEQ ID NO: 17
cgactataccgccctctacc

SEQ ID NO: 8503 - DNA, 20 bp, Artificial Sequence
  bisulfite treated nucleic acid for analysis of methylation status of SEQ ID NO: 17
aacgaaaaccccgtaacatc

SEQ ID NO: 8504 - DNA, 20 bp, Artificial Sequence
  bisulfite treated nucleic acid for analysis of methylation status of SEQ ID NO: 17
gaaacgcaaactacgaacca

SEQ ID NO: 8505 - DNA, 19 bp, Artificial Sequence
  bisulfite treated nucleic acid for analysis of methylation status of SEQ ID NO: 17
gtcgtcgtagaggggtgag

SEQ ID NO: 8506 - DNA, 22 bp, Artificial Sequence
  bisulfite treated nucleic acid for analysis of methylation status of SEQ ID NO: 17
ctttacaacctcgaacaaaacg

SEQ ID NO: 8507 - DNA, 34 bp, Artificial Sequence
  bisulfite treated nucleic acid for analysis of methylation status of SEQ ID NO: 17
tttatcgagttttggtcgtcgataagaggagttt

SEQ ID NO: 8508 - DNA, 20 bp, Artificial Sequence
  bisulfite treated nucleic acid for analysis of methylation status of SEQ ID NO: 17
cgggtttttcggttattgtt

SEQ ID NO: 8509 - DNA, 29 bp, Artificial Sequence
  bisulfite treated nucleic acid for analysis of methylation status of SEQ ID NO: 17
gtacgggaagtcgtttttcgcgtcgtcgt

SEQ ID NO: 8510 - DNA, 22 bp, Artificial Sequence
  bisulfite treated nucleic acid for analysis of methylation status of SEQ ID NO: 17
aattaaaaacgtaaaatcgcgt

SEQ ID NO: 8511 - DNA, 22 bp, Artificial Sequence
  bisulfite treated nucleic acid for analysis of methylation status of SEQ ID NO: 17
tttcgttttgttcgaggttgta

SEQ ID NO: 8512 - DNA, 20 bp, Artificial Sequence
  bisulfite treated nucleic acid for analysis of methylation status of SEQ ID NO: 17
aactccgactataccgccct

SEQ ID NO: 8513 - DNA, 21 bp, Artificial Sequence
  bisulfite treated nucleic acid for analysis of methylation status of SEQ ID NO: 17
tggtcgtcgataagaggagtt

SEQ ID NO: 8514 - DNA, 20 bp, Artificial Sequence
  bisulfite treated nucleic acid for analysis of methylation status of SEQ ID NO: 17
aaacgcaaactacgaaccaa

SEQ ID NO: 8515 - DNA, 24 bp, Artificial Sequence
  bisulfite treated nucleic acid for analysis of methylation status of SEQ ID NO: 17
attacgttgagtagtcgtagggtt

SEQ ID NO: 8516 - DNA, 19 bp, Artificial Sequence
  bisulfite treated nucleic acid for analysis of methylation status of SEQ ID NO: 17
aaatcgcgtacaatacccc

SEQ ID NO: 8517 - DNA, 21 bp, Artificial Sequence
  bisulfite treated nucleic acid for analysis of methylation status of SEQ ID NO: 17
gtttagttttggcgttcgttt

SEQ ID NO: 8518 - DNA, 20 bp, Artificial Sequence
  bisulfite treated nucleic acid for analysis of methylation status of SEQ ID NO: 17
ttttggtcgtcgataagagg

SEQ ID NO: 8519 - DNA, 21 bp, Artificial Sequence
  bisulfite treated nucleic acid for analysis of methylation status of SEQ ID NO: 17
taaagttgtggattcggttcg

SEQ ID NO: 8520 - DNA, 19 bp, Artificial Sequence
  bisulfite treated nucleic acid for analysis of methylation status of SEQ ID NO: 17
actcgctaacgcccaaata

SEQ ID NO: 8521 - DNA, 25 bp, Artificial Sequence
  bisulfite treated nucleic acid for analysis of methylation status of SEQ ID NO: 17
cgtcgtgtttagtttttattacgtt

SEQ ID NO: 8522 - DNA, 23 bp, Artificial Sequence
  bisulfite treated nucleic acid for analysis of methylation status of SEQ ID NO: 17
cgtcgtgtttagtttttattacg

SEQ ID NO: 8523 - DNA, 22 bp, Artificial Sequence
  bisulfite treated nucleic acid for analysis of methylation status of SEQ ID NO: 17
acgttttatagtcggggttttt

SEQ ID NO: 8524 - DNA, 18 bp, Artificial Sequence
  bisulfite treated nucleic acid for analysis of methylation status of SEQ ID NO: 17
aaacttttctcgcgcctc

SEQ ID NO: 8525 - DNA, 32 bp, Artificial Sequence
  bisulfite treated nucleic acid for analysis of methylation status of SEQ ID NO: 17
tttcgtgcgttcgagagaatttttttaggggt

SEQ ID NO: 8526 - DNA, 22 bp, Artificial Sequence
  bisulfite treated nucleic acid for analysis of methylation status of SEQ ID NO: 17
tacgtttttagttttgcgtcgt

SEQ ID NO: 8527 - DNA, 23 bp, Artificial Sequence
  bisulfite treated nucleic acid for analysis of methylation status of SEQ ID NO: 17
acgctacgacgcatctaactact

SEQ ID NO: 8528 - DNA, 20 bp, Artificial Sequence
  bisulfite treated nucleic acid for analysis of methylation status of SEQ ID NO: 17
ttagttttggcgttcgtttc

SEQ ID NO: 8529 - DNA, 21 bp, Artificial Sequence
  bisulfite treated nucleic acid for analysis of methylation status of SEQ ID NO: 17
tacgtccgaaaaacaataacc

SEQ ID NO: 8530 - DNA, 25 bp, Artificial Sequence
  bisulfite treated nucleic acid for analysis of methylation status of SEQ ID NO: 17
tagtcgtagggttagtattttcgat

SEQ ID NO: 8531 - DNA, 21 bp, Artificial Sequence
  bisulfite treated nucleic acid for analysis of methylation status of SEQ ID NO: 17
tagtagagatcgttcgtgggg

SEQ ID NO: 8532 - DNA, 20 bp, Artificial Sequence
  bisulfite treated nucleic acid for analysis of methylation status of SEQ ID NO: 17
tttggtcgtcgataagagga

SEQ ID NO: 8533 - DNA, 21 bp, Artificial Sequence
  bisulfite treated nucleic acid for analysis of methylation status of SEQ ID NO: 17
tttacaacctcgaacaaaacg

SEQ ID NO: 8534 - DNA, 20 bp, Artificial Sequence
  bisulfite treated nucleic acid for analysis of methylation status of SEQ ID NO: 17
agggcggtatagtcggagtt

SEQ ID NO: 8535 - DNA, 19 bp, Artificial Sequence
  bisulfite treated nucleic acid for analysis of methylation status of SEQ ID NO: 17
atctaactactcccgcgcc

SEQ ID NO: 8536 - DNA, 22 bp, Artificial Sequence
  bisulfite treated nucleic acid for analysis of methylation status of SEQ ID NO: 17
atacacgcctaaaaataatcgc

SEQ ID NO: 8537 - DNA, 22 bp, Artificial Sequence
  bisulfite treated nucleic acid for analysis of methylation status of SEQ ID NO: 17
gtatttgtttcgtcggagtttt

SEQ ID NO: 8538 - DNA, 25 bp, Artificial Sequence
  bisulfite treated nucleic acid for analysis of methylation status of SEQ ID NO: 17
ttcggcggcgtaggattgggggcgt

SEQ ID NO: 8539 - DNA, 22 bp, Artificial Sequence
  bisulfite treated nucleic acid for analysis of methylation status of SEQ ID NO: 17
ggtgggtagtatcgtcgtagtt

SEQ ID NO: 8540 - DNA, 23 bp, Artificial Sequence
  bisulfite treated nucleic acid for analysis of methylation status of SEQ ID NO: 17
ggcggcgtaggattgggggcgtg

SEQ ID NO: 8541 - DNA, 23 bp, Artificial Sequence
  bisulfite treated nucleic acid for analysis of methylation status of SEQ ID NO: 17
tctcgaacaccgaataaaataaa

SEQ ID NO: 8542 - DNA, 22 bp, Artificial Sequence
  bisulfite treated nucleic acid for analysis of methylation status of SEQ ID NO: 17
atagttcgggtagttagcgttg

SEQ ID NO: 8543 - DNA, 36 bp, Artificial Sequence
  nucleic acid for analysis of methylation status of SEQ ID NO: 17
ggttaggattcgttgatataggtattttggttgcgt

SEQ ID NO: 8544 - DNA, 21 bp, Artificial Sequence
  bisulfite treated nucleic acid for analysis of methylation status of SEQ ID NO: 17
atacactcacactcgctctcg

SEQ ID NO: 8545 - DNA, 22 bp, Artificial Sequence
  bisulfite treated nucleic acid for analysis of methylation status of SEQ ID NO: 17
aggtatttgtttcgtcggagtt

SEQ ID NO: 8546 - DNA, 21 bp, Artificial Sequence
  bisulfite treated nucleic acid for analysis of methylation status of SEQ ID NO: 17
ggtatttgtttcgtcggagtt

SEQ ID NO: 8547 - DNA, 22 bp, Artificial Sequence
  bisulfite treated nucleic acid for analysis of methylation status of SEQ ID NO: 17
catcctcgattacattcctacg

SEQ ID NO: 8548 - DNA, 21 bp, Artificial Sequence
  bisulfite treated nucleic acid for analysis of methylation status of SEQ ID NO: 17
ggagtcgcgtgtagtgtttta

SEQ ID NO: 8549 - DNA, 25 bp, Artificial Sequence
  bisulfite treated nucleic acid for analysis of methylation status of SEQ ID NO: 17
ggcgagggcgttttttggacgtcgt

SEQ ID NO: 8550 - DNA, 21 bp, Artificial Sequence
  bisulfite treated nucleic acid for analysis of methylation status of SEQ ID NO: 17
aaggtatttgtttcgtcggag

SEQ ID NO: 8551 - DNA, 21 bp, Artificial Sequence
  bisulfite treated nucleic acid for analysis of methylation status of SEQ ID NO: 17
ctcgcgcatactaaacaaaaa

SEQ ID NO: 8552 - DNA, 22 bp, Artificial Sequence
  bisulfite treated nucleic acid for analysis of methylation status of SEQ ID NO: 17
cgtaggaatgtaatcgaggatg

SEQ ID NO: 8553 - DNA, 33 bp, Artificial Sequence
  bisulfite treated nucleic acid for analysis of methylation status of SEQ ID NO: 17
tgcggttgtttaacgtggtggttttcgtttatt

SEQ ID NO: 8554 - DNA, 23 bp, Artificial Sequence
  bisulfite treated nucleic acid for analysis of methylation status of SEQ ID NO: 17
ctctcgaacaccgaataaaataa

SEQ ID NO: 8555 - DNA, 22 bp, Artificial Sequence
  bisulfite treated nucleic acid for analysis of methylation status of SEQ ID NO: 17
tatttgtttcgtcggagtttta

SEQ ID NO: 8556 - DNA, 23 bp, Artificial Sequence
  bisulfite treated nucleic acid for analysis of methylation status of SEQ ID NO: 17
caatacacgcctaaaaataatcg

SEQ ID NO: 8557 - DNA, 21 bp, Artificial Sequence
  bisulfite treated nucleic acid for analysis of methylation status of SEQ ID NO: 17
gggtgggtagtatcgtcgtag

SEQ ID NO: 8558 - DNA, 22 bp, Artificial Sequence
  bisulfite treated nucleic acid for analysis of methylation status of SEQ ID NO: 17
acgcaatacacgcctaaaaata

SEQ ID NO: 8559 - DNA, 25 bp, Artificial Sequence
  bisulfite treated nucleic acid for analysis of methylation status of SEQ ID NO: 17
tgggggcgtgtttagttttcggcga

SEQ ID NO: 8560 - DNA, 22 bp, Artificial Sequence
  bisulfite treated nucleic acid for analysis of methylation status of SEQ ID NO: 17
cgcaatacacgcctaaaaataa

SEQ ID NO: 8561 - DNA, 35 bp, Artificial Sequence
  bisulfite treated nucleic acid for analysis of methylation status of SEQ ID NO: 17
ggcggcgtaggattgggggcgtgtttagttttcgg

SEQ ID NO: 8562 - DNA, 22 bp, Artificial Sequence
  bisulfite treated nucleic acid for analysis of methylation status of SEQ ID NO: 17
gctctcgaacaccgaataaaat

SEQ ID NO: 8563 - DNA, 22 bp, Artificial Sequence
  bisulfite treated nucleic acid for analysis of methylation status of SEQ ID NO: 17
cctacgaaacccgaaataaaaa

SEQ ID NO: 8564 - DNA, 22 bp, Artificial Sequence
  bisulfite treated nucleic acid for analysis of methylation status of SEQ ID NO: 17
gagtcgcgtgtagtgttttaga

SEQ ID NO: 8565 - DNA, 22 bp, Artificial Sequence
  bisulfite treated nucleic acid for analysis of methylation status of SEQ ID NO: 17
aaggtatttgtttcgtcggagt

SEQ ID NO: 8566 - DNA, 22 bp, Artificial Sequence
  bisulfite treated nucleic acid for analysis of methylation status of SEQ ID NO: 17
ctcgaacaccgaataaaataaa

SEQ ID NO: 8567 - DNA, 21 bp, Artificial Sequence
  bisulfite treated nucleic acid for analysis of methylation status of SEQ ID NO: 17
cgcaatacacgcctaaaaata

SEQ ID NO: 8568 - DNA, 21 bp, Artificial Sequence
  bisulfite treated nucleic acid for analysis of methylation status of SEQ ID NO: 17
tcctacgaaacccgaaataaa

SEQ ID NO: 8569 - DNA, 23 bp, Artificial Sequence
  bisulfite treated nucleic acid for analysis of methylation status of SEQ ID NO: 17
aaatagttcgggtagttagcgtt

SEQ ID NO: 8570 - DNA, 21 bp, Artificial Sequence
  bisulfite treated nucleic acid for analysis of methylation status of SEQ ID NO: 17
tcgatacactcacactcgctc

SEQ ID NO: 8571 - DNA, 22 bp, Artificial Sequence
  bisulfite treated nucleic acid for analysis of methylation status of SEQ ID NO: 17
caccgaaaaataaaattccgta

SEQ ID NO: 8572 - DNA, 20 bp, Artificial Sequence
  bisulfite treated nucleic acid for analysis of methylation status of SEQ ID NO: 17
cggaggtttcgtggtattta

SEQ ID NO: 8573 - DNA, 33 bp, Artificial Sequence
  bisulfite treated nucleic acid for analysis of methylation status of SEQ ID NO: 17
tttagaatttttttcgcgttttcggttggtcga

SEQ ID NO: 8574 - DNA, 21 bp, Artificial Sequence
  bisulfite treated nucleic acid for analysis of methylation status of SEQ ID NO: 17
tacacgcctaaaaataatcgc

SEQ ID NO: 8575 - DNA, 23 bp, Artificial Sequence
  bisulfite treated nucleic acid for analysis of methylation status of SEQ ID NO: 17
aatacacgcctaaaaataatcgc

SEQ ID NO: 8576 - DNA, 21 bp, Artificial Sequence
  bisulfite treated nucleic acid for analysis of methylation status of SEQ ID NO: 17
acgcaatacacgcctaaaaat

SEQ ID NO: 8577 - DNA, 21 bp, Artificial Sequence
  bisulfite treated nucleic acid for analysis of methylation status of SEQ ID NO: 17
cacgaatcgactaatcacctt

SEQ ID NO: 8578 - DNA, 22 bp, Artificial Sequence
  bisulfite treated nucleic acid for analysis of methylation status of SEQ ID NO: 17
gcgattatttttaggcgtgtat

SEQ ID NO: 8579 - DNA, 25 bp, Artificial Sequence
  bisulfite treated nucleic acid for analysis of methylation status of SEQ ID NO: 17
tacgtttttcgcggaggttgcgggt

SEQ ID NO: 8580 - DNA, 20 bp, Artificial Sequence
  bisulfite treated nucleic acid for analysis of methylation status of SEQ ID NO: 17
gcacgaatcgactaatcacc

SEQ ID NO: 8581 - DNA, 20 bp, Artificial Sequence
  bisulfite treated nucleic acid for analysis of methylation status of SEQ ID NO: 17
acgtaaacctctccctaccg

SEQ ID NO: 8582 - DNA, 22 bp, Artificial Sequence
  bisulfite treated nucleic acid for analysis of methylation status of SEQ ID NO: 17
tagtatcgtcgtagttttcggc

SEQ ID NO: 8583 - DNA, 23 bp, Artificial Sequence
  bisulfite treated nucleic acid for analysis of methylation status of SEQ ID NO: 17
tgggtagtatcgtcgtagttttc

SEQ ID NO: 8584 - DNA, 26 bp, Artificial Sequence
  bisulfite treated nucleic acid for analysis of methylation status of SEQ ID NO: 17
ggcgtaggattgggggcgtgtttagt

SEQ ID NO: 8585 - DNA, 22 bp, Artificial Sequence
  bisulfite treated nucleic acid for analysis of methylation status of SEQ ID NO: 17
aacgcaatacacgcctaaaaat

SEQ ID NO: 8586 - DNA, 24 bp, Artificial Sequence
  bisulfite treated nucleic acid for analysis of methylation status of SEQ ID NO: 17
gtgggtagtatcgtcgtagttttc

SEQ ID NO: 8587 - DNA, 22 bp, Artificial Sequence
  bisulfite treated nucleic acid for analysis of methylation status of SEQ ID NO: 17
aatagttcgggtagttagcgtt

SEQ ID NO: 8588 - DNA, 22 bp, Artificial Sequence
  bisulfite treated nucleic acid for analysis of methylation status of SEQ ID NO: 17
ctaaaacactacacgcgactcc

SEQ ID NO: 8589 - DNA, 21 bp, Artificial Sequence
  bisulfite treated nucleic acid for analysis of methylation status of SEQ ID NO: 17
gtttagattcgaggtcgttgc

SEQ ID NO: 8590 - DNA, 25 bp, Artificial Sequence
  bisulfite treated nucleic acid for analysis of methylation status of SEQ ID NO: 17
ggggaaattcgcgggatagggggtt

SEQ ID NO: 8591 - DNA, 22 bp, Artificial Sequence
  bisulfite treated nucleic acid for analysis of methylation status of SEQ ID NO: 17
aactacgacgatactacccacc

SEQ ID NO: 8592 - DNA, 21 bp, Artificial Sequence
  bisulfite treated nucleic acid for analysis of methylation status of SEQ ID NO: 17
gtatttggttgttttcgcgtt

SEQ ID NO: 8593 - DNA, 41 bp, Artificial Sequence
  bisulfite treated nucleic acid for analysis of methylation status of SEQ ID NO: 17
ggcgtcgggaaggtatttgtttcgtcggagttttaggtcga

SEQ ID NO: 8594 - DNA, 21 bp, Artificial Sequence
  bisulfite treated nucleic acid for analysis of methylation status of SEQ ID NO: 17
taaaacactacacgcgactcc

SEQ ID NO: 8595 - DNA, 21 bp, Artificial Sequence
  bisulfite treated nucleic acid for analysis of methylation status of SEQ ID NO: 17
tcgtaggaatgtaatcgagga

SEQ ID NO: 8596 - DNA, 21 bp, Artificial Sequence
  bisulfite treated nucleic acid for analysis of methylation status of SEQ ID NO: 17
tagttcgggtagttagcgttg

SEQ ID NO: 8597 - DNA, 22 bp, Artificial Sequence
  bisulfite treated nucleic acid for analysis of methylation status of SEQ ID NO: 17
tatttttaggcgtgtattgcgt

SEQ ID NO: 8598 - DNA, 20 bp, Artificial Sequence
  bisulfite treated nucleic acid for analysis of methylation status of SEQ ID NO: 17
tttagattcgaggtcgttgc

SEQ ID NO: 8599 - DNA, 21 bp, Artificial Sequence
  bisulfite treated nucleic acid for analysis of methylation status of SEQ ID NO: 17
atttgtttcgtcggagtttta

SEQ ID NO: 8600 - DNA, 20 bp, Artificial Sequence
  bisulfite treated nucleic acid for analysis of methylation status of SEQ ID NO: 17
tatttggttgttttcgcgtt

SEQ ID NO: 8601 - DNA, 21 bp, Artificial Sequence
  bisulfite treated nucleic acid for analysis of methylation status of SEQ ID NO: 17
aacgtaaacctctccctaccg

SEQ ID NO: 8602 - DNA, 20 bp, Artificial Sequence
  bisulfite treated nucleic acid for analysis of methylation status of SEQ ID NO: 17
cgcaatacacgcctaaaaat

SEQ ID NO: 8603 - DNA, 20 bp, Artificial Sequence
  bisulfite treated nucleic acid for analysis of methylation status of SEQ ID NO: 17
aaaaacgctcgacaaacaac

SEQ ID NO: 8604 - DNA, 21 bp, Artificial Sequence
  bisulfite treated nucleic acid for analysis of methylation status of SEQ ID NO: 17
cgttagggttgaacggatagt

SEQ ID NO: 8605 - DNA, 33 bp, Artificial Sequence
  bisulfite treated nucleic acid for analysis of methylation status of SEQ ID NO: 17
tatatttcggggttttacgggcggtttttgttg

SEQ ID NO: 8606 - DNA, 23 bp, Artificial Sequence
  bisulfite treated nucleic acid for analysis of methylation status of SEQ ID NO: 17
cgattatttttaggcgtgtattg

SEQ ID NO: 8607 - DNA, 22 bp, Artificial Sequence
  bisulfite treated nucleic acid for analysis of methylation status of SEQ ID NO: 17
gtcgcgtgtagtgttttagacg

SEQ ID NO: 8608 - DNA, 22 bp, Artificial Sequence
  bisulfite treated nucleic acid for analysis of methylation status of SEQ ID NO: 17
actacgacgatactacccaccc

SEQ ID NO: 8609 - DNA, 21 bp, Artificial Sequence
  bisulfite treated nucleic acid for analysis of methylation status of SEQ ID NO: 17
cgaacttctcgaccactacct

SEQ ID NO: 8610 - DNA, 21 bp, Artificial Sequence
  bisulfite treated nucleic acid for analysis of methylation status of SEQ ID NO: 17
tttttgtcggcgattagagtt

SEQ ID NO: 8611 - DNA, 24 bp, Artificial Sequence
  bisulfite treated nucleic acid for analysis of methylation status of SEQ ID NO: 17
ttttttgcgacggcggtagtgcgg

SEQ ID NO: 8612 - DNA, 22 bp, Artificial Sequence
  bisulfite treated nucleic acid for analysis of methylation status of SEQ ID NO: 17
ttatttttaggcgtgtattgcg

SEQ ID NO: 8613 - DNA, 20 bp, Artificial Sequence
  bisulfite treated nucleic acid for analysis of methylation status of SEQ ID NO: 17
tcgcgcatactaaacaaaaa

SEQ ID NO: 8614 - DNA, 23 bp, Artificial Sequence
  bisulfite treated nucleic acid for analysis of methylation status of SEQ ID NO: 17
acatcctcgattacattcctacg

SEQ ID NO: 8615 - DNA, 20 bp, Artificial Sequence
  bisulfite treated nucleic acid for analysis of methylation status of SEQ ID NO: 17
cgggaaggtatttgtttcgt

SEQ ID NO: 8616 - DNA, 21 bp, Artificial Sequence
  bisulfite treated nucleic acid for analysis of methylation status of SEQ ID NO: 17
tcgcgtgtagtgttttagacg

SEQ ID NO: 8617 - DNA, 20 bp, Artificial Sequence
  bisulfite treated nucleic acid for analysis of methylation status of SEQ ID NO: 17
cgatacactcacactcgctc

SEQ ID NO: 8618 - DNA, 21 bp, Artificial Sequence
  bisulfite treated nucleic acid for analysis of methylation status of SEQ ID NO: 17
ctacgacgatactacccaccc

SEQ ID NO: 8619 - DNA, 21 bp, Artificial Sequence
  bisulfite treated nucleic acid for analysis of methylation status of SEQ ID NO: 17
ctacgaaacccgaaataaaaa

SEQ ID NO: 8620 - DNA, 22 bp, Artificial Sequence
  bisulfite treated nucleic acid for analysis of methylation status of SEQ ID NO: 17
cacgaatcgactaatcacctta

SEQ ID NO: 8621 - DNA, 21 bp, Artificial Sequence
  bisulfite treated nucleic acid for analysis of methylation status of SEQ ID NO: 17
cggtagggagaggtttacgtt

SEQ ID NO: 8622 - DNA, 27 bp, Artificial Sequence
  bisulfite treated nucleic acid for analysis of methylation status of SEQ ID NO: 17
gttttcggggggcgttgggatttgtaa

SEQ ID NO: 8623 - DNA, 20 bp, Artificial Sequence
  bisulfite treated nucleic acid for analysis of methylation status of SEQ ID NO: 17
cctcgcgcatactaaacaaa

SEQ ID NO: 8624 - DNA, 22 bp, Artificial Sequence
  bisulfite treated nucleic acid for analysis of methylation status of SEQ ID NO: 17
caacgctaactacccgaactat

SEQ ID NO: 8625 - DNA, 19 bp, Artificial Sequence
  bisulfite treated nucleic acid for analysis of methylation status of SEQ ID NO: 17
aaggatttcggcgttatga

SEQ ID NO: 8626 - DNA, 32 bp, Artificial Sequence
  bisulfite treated nucleic acid for analysis of methylation status of SEQ ID NO: 17
ggcgcgaaggggggattttaatttcgttttaa

SEQ ID NO: 8627 - DNA, 21 bp, Artificial Sequence
  bisulfite treated nucleic acid for analysis of methylation status of SEQ ID NO: 17
agtatcgtcgtagttttcggc

SEQ ID NO: 8628 - DNA, 20 bp, Artificial Sequence
  bisulfite treated nucleic acid for analysis of methylation status of SEQ ID NO: 17
acacgcctaaaaataatcgc

SEQ ID NO: 8629 - DNA, 22 bp, Artificial Sequence
  bisulfite treated nucleic acid for analysis of methylation status of SEQ ID NO: 17
aatacacgcctaaaaataatcg

SEQ ID NO: 8630 - DNA, 20 bp, Artificial Sequence
  bisulfite treated nucleic acid for analysis of methylation status of SEQ ID NO: 17
tcctacgaaacccgaaataa

SEQ ID NO: 8631 - DNA, 22 bp, Artificial Sequence
  bisulfite treated nucleic acid for analysis of methylation status of SEQ ID NO: 17
ggagtcgcgtgtagtgttttag

SEQ ID NO: 8632 - DNA, 19 bp, Artificial Sequence
  bisulfite treated nucleic acid for analysis of methylation status of SEQ ID NO: 17
aaaggatttcggcgttatg

SEQ ID NO: 8633 - DNA, 23 bp, Artificial Sequence
  bisulfite treated nucleic acid for analysis of methylation status of SEQ ID NO: 17
aaactacgacgatactacccacc

SEQ ID NO: 8634 - DNA, 21 bp, Artificial Sequence
  bisulfite treated nucleic acid for analysis of methylation status of SEQ ID NO: 17
cgaaaaacgtaaacctctccc

SEQ ID NO: 8635 - DNA, 20 bp, Artificial Sequence
  bisulfite treated nucleic acid for analysis of methylation status of SEQ ID NO: 17
ctctccctaccgctaaaacg

SEQ ID NO: 8636 - DNA, 19 bp, Artificial Sequence
  bisulfite treated nucleic acid for analysis of methylation status of SEQ ID NO: 17
tctccctaccgctaaaacg

SEQ ID NO: 8637 - DNA, 21 bp, Artificial Sequence
  bisulfite treated nucleic acid for analysis of methylation status of SEQ ID NO: 17
atttttaggcgtgtattgcgt

SEQ ID NO: 8638 - DNA, 19 bp, Artificial Sequence
  bisulfite treated nucleic acid for analysis of methylation status of SEQ ID NO: 17
cgcacgaatcgactaatca

SEQ ID NO: 8639 - DNA, 23 bp, Artificial Sequence
  bisulfite treated nucleic acid for analysis of methylation status of SEQ ID NO: 17
aatagttcgggtagttagcgttg

SEQ ID NO: 8640 - DNA, 20 bp, Artificial Sequence
  bisulfite treated nucleic acid for analysis of methylation status of SEQ ID NO: 17
gaaggtatttgtttcgtcgg

SEQ ID NO: 8641 - DNA, 19 bp, Artificial Sequence
  bisulfite treated nucleic acid for analysis of methylation status of SEQ ID NO: 17
atttggttgttttcgcgtt

SEQ ID NO: 8642 - DNA, 20 bp, Artificial Sequence
  bisulfite treated nucleic acid for analysis of methylation status of SEQ ID NO: 17
ttttgtcggcgattagagtt

SEQ ID NO: 8643 - DNA, 20 bp, Artificial Sequence
  bisulfite treated nucleic acid for analysis of methylation status of SEQ ID NO: 17
aaaacactacacgcgactcc

SEQ ID NO: 8644 - DNA, 20 bp, Artificial Sequence
  bisulfite treated nucleic acid for analysis of methylation status of SEQ ID NO: 17
tggagtcgcgtgtagtgttt

SEQ ID NO: 8645 - DNA, 19 bp, Artificial Sequence
  bisulfite treated nucleic acid for analysis of methylation status of SEQ ID NO: 17
cacgttaaacaaccgcaaa

SEQ ID NO: 8646 - DNA, 20 bp, Artificial Sequence
  bisulfite treated nucleic acid for analysis of methylation status of SEQ ID NO: 17
gaaaggatttcggcgttatg

SEQ ID NO: 8647 - DNA, 19 bp, Artificial Sequence
  bisulfite treated nucleic acid for analysis of methylation status of SEQ ID NO: 17
cgtcgggaaggtatttgtt

SEQ ID NO: 8648 - DNA, 21 bp, Artificial Sequence
  bisulfite treated nucleic acid for analysis of methylation status of SEQ ID NO: 17
cctacgaaacccgaaataaaa

SEQ ID NO: 8649 - DNA, 20 bp, Artificial Sequence
  bisulfite treated nucleic acid for analysis of methylation status of SEQ ID NO: 17
gtggagtcgcgtgtagtgtt

SEQ ID NO: 8650 - DNA, 21 bp, Artificial Sequence
  bisulfite treated nucleic acid for analysis of methylation status of SEQ ID NO: 17
gggagaggtttacgtttttcg

SEQ ID NO: 8651 - DNA, 20 bp, Artificial Sequence
  bisulfite treated nucleic acid for analysis of methylation status of SEQ ID NO: 17
agttcgggtagttagcgttg

SEQ ID NO: 8652 - DNA, 20 bp, Artificial Sequence
  bisulfite treated nucleic acid for analysis of methylation status of SEQ ID NO: 17
cgtcgggaaggtatttgttt

SEQ ID NO: 8653 - DNA, 23 bp, Artificial Sequence
  bisulfite treated nucleic acid for analysis of methylation status of SEQ ID NO: 17
ggtgggtagtatcgtcgtagttt

SEQ ID NO: 8654 - DNA, 21 bp, Artificial Sequence
  bisulfite treated nucleic acid for analysis of methylation status of SEQ ID NO: 17
aactctaatcgccgacaaaaa

SEQ ID NO: 8655 - DNA, 20 bp, Artificial Sequence
  bisulfite treated nucleic acid for analysis of methylation status of SEQ ID NO: 17
gaagcgtaggttgcgagtta

SEQ ID NO: 8656 - DNA, 36 bp, Artificial Sequence
  bisulfite treated nucleic acid for analysis of methylation status of SEQ ID NO: 17
gtcgagtttataattttgtagtttcgggtagggcga

SEQ ID NO: 8657 - DNA, 20 bp, Artificial Sequence
  bisulfite treated nucleic acid for analysis of methylation status of SEQ ID NO: 17
gcgaaaaacgtaaacctctc

SEQ ID NO: 8658 - DNA, 21 bp, Artificial Sequence
  bisulfite treated nucleic acid for analysis of methylation status of SEQ ID NO: 17
atcctcgattacattcctacg

SEQ ID NO: 8659 - DNA, 19 bp, Artificial Sequence
  bisulfite treated nucleic acid for analysis of methylation status of SEQ ID NO: 17
cgtaaacctctccctaccg

SEQ ID NO: 8660 - DNA, 20 bp, Artificial Sequence
  bisulfite treated nucleic acid for analysis of methylation status of SEQ ID NO: 17
cgcgaaaaacgtaaacctct

SEQ ID NO: 8661 - DNA, 20 bp, Artificial Sequence
  bisulfite treated nucleic acid for analysis of methylation status of SEQ ID NO: 17
cacgcctaaaaataatcgcc

SEQ ID NO: 8662 - DNA, 18 bp, Artificial Sequence
  bisulfite treated nucleic acid for analysis of methylation status of SEQ ID NO: 17
cgccctacccgaaactac

SEQ ID NO: 8663 - DNA, 22 bp, Artificial Sequence
  bisulfite treated nucleic acid for analysis of methylation status of SEQ ID NO: 17
ttttattcgttggcgtttaagt

SEQ ID NO: 8664 - DNA, 42 bp, Artificial Sequence
  bisulfite treated nucleic acid for analysis of methylation status of SEQ ID NO: 17
ttcgttatttgtttagttttcgaagcgaagcgtaggttgcga

SEQ ID NO: 8665 - DNA, 20 bp, Artificial Sequence
  bisulfite treated nucleic acid for analysis of methylation status of SEQ ID NO: 17
cgcgtgtagtgttttagacg

SEQ ID NO: 8666 - DNA, 21 bp, Artificial Sequence
  bisulfite treated nucleic acid for analysis of methylation status of SEQ ID NO: 17
tcgaacaccgaataaaataaa

SEQ ID NO: 8667 - DNA, 23 bp, Artificial Sequence
  bisulfite treated nucleic acid for analysis of methylation status of SEQ ID NO: 17
gggtagtatcgtcgtagttttcg

SEQ ID NO: 8668 - DNA, 19 bp, Artificial Sequence
  bisulfite treated nucleic acid for analysis of methylation status of SEQ ID NO: 17
tggagtcgcgtgtagtgtt

SEQ ID NO: 8669 - DNA, 20 bp, Artificial Sequence
  bisulfite treated nucleic acid for analysis of methylation status of SEQ ID NO: 17
gagaggtttacgtttttcgc

SEQ ID NO: 8670 - DNA, 20 bp, Artificial Sequence
  bisulfite treated nucleic acid for analysis of methylation status of SEQ ID NO: 17
tcgatacactcacactcgct

SEQ ID NO: 8671 - DNA, 22 bp, Artificial Sequence
  bisulfite treated nucleic acid for analysis of methylation status of SEQ ID NO: 17
ggtagtatcgtcgtagttttcg

SEQ ID NO: 8672 - DNA, 23 bp, Artificial Sequence
  bisulfite treated nucleic acid for analysis of methylation status of SEQ ID NO: 17
cgaatcgactaatcaccttaaaa

SEQ ID NO: 8673 - DNA, 20 bp, Artificial Sequence
  bisulfite treated nucleic acid for analysis of methylation status of SEQ ID NO: 17
cgttttagcggtagggagag

SEQ ID NO: 8674 - DNA, 19 bp, Artificial Sequence
  bisulfite treated nucleic acid for analysis of methylation status of SEQ ID NO: 17
caacgcaatacacgcctaa

SEQ ID NO: 8675 - DNA, 23 bp, Artificial Sequence
  bisulfite treated nucleic acid for analysis of methylation status of SEQ ID NO: 17
gtagtatcgtcgtagttttcggc

SEQ ID NO: 8676 - DNA, 18 bp, Artificial Sequence
  nucleic acid for analysis of methylation status of SEQ ID NO: 17
cactcgctctcgaacacc

SEQ ID NO: 8677 - DNA, 19 bp, Artificial Sequence
  bisulfite treated nucleic acid for analysis of methylation status of SEQ ID NO: 17
gtttacgtttttcgcggag

SEQ ID NO: 8678 - DNA, 20 bp, Artificial Sequence
  bisulfite treated nucleic acid for analysis of methylation status of SEQ ID NO: 17
tttgtttcgtcggagtttta

SEQ ID NO: 8679 - DNA, 19 bp, Artificial Sequence
  bisulfite treated nucleic acid for analysis of methylation status of SEQ ID NO: 17
cgggtagttagcgttggag

SEQ ID NO: 8680 - DNA, 19 bp, Artificial Sequence
  bisulfite treated nucleic acid for analysis of methylation status of SEQ ID NO: 17
gttgcgttttagcggtagg

SEQ ID NO: 8681 - DNA, 19 bp, Artificial Sequence
  bisulfite treated nucleic acid for analysis of methylation status of SEQ ID NO: 17
aacgctcgacaaacaacct

SEQ ID NO: 8682 - DNA, 20 bp, Artificial Sequence
  bisulfite treated nucleic acid for analysis of methylation status of SEQ ID NO: 17
ggagaggtttacgtttttcg

SEQ ID NO: 8683 - DNA, 21 bp, Artificial Sequence
  bisulfite treated nucleic acid for analysis of methylation status of SEQ ID NO: 17
cgatacactcacactcgctct

SEQ ID NO: 8684 - DNA, 20 bp, Artificial Sequence
  bisulfite treated nucleic acid for analysis of methylation status of SEQ ID NO: 17
ttttaggcgtgtattgcgtt

SEQ ID NO: 8685 - DNA, 20 bp, Artificial Sequence
  bisulfite treated nucleic acid for analysis of methylation status of SEQ ID NO: 17
tttttaggcgtgtattgcgt

SEQ ID NO: 8686 - DNA, 20 bp, Artificial Sequence
  bisulfite treated nucleic acid for analysis of methylation status of SEQ ID NO: 17
caacgcaatacacgcctaaa

SEQ ID NO: 8687 - DNA, 22 bp, Artificial Sequence
  bisulfite treated nucleic acid for analysis of methylation status of SEQ ID NO: 17
tttttattcgttggcgtttaag

SEQ ID NO: 8688 - DNA, 20 bp, Artificial Sequence
  bisulfite treated nucleic acid for analysis of methylation status of SEQ ID NO: 17
tacgacgatactacccaccc

SEQ ID NO: 8689 - DNA, 24 bp, Artificial Sequence
  bisulfite treated nucleic acid for analysis of methylation status of SEQ ID NO: 17
cgaatcgactaatcaccttaaaat

SEQ ID NO: 8690 - DNA, 23 bp, Artificial Sequence
  bisulfite treated nucleic acid for analysis of methylation status of SEQ ID NO: 17
attatttttaggcgtgtattgcg

SEQ ID NO: 8691 - DNA, 20 bp, Artificial Sequence
  bisulfite treated nucleic acid for analysis of methylation status of SEQ ID NO: 17
aacactacacgcgactccac

SEQ ID NO: 8692 - DNA, 20 bp, Artificial Sequence
  bisulfite treated nucleic acid for analysis of methylation status of SEQ ID NO: 17
actctaatcgccgacaaaaa

SEQ ID NO: 8693 - DNA, 19 bp, Artificial Sequence
  bisulfite treated nucleic acid for analysis of methylation status of SEQ ID NO: 17
acgcctaaaaataatcgcc

SEQ ID NO: 8694 - DNA, 20 bp, Artificial Sequence
  bisulfite treated nucleic acid for analysis of methylation status of SEQ ID NO: 17
gttcgggtagttagcgttgg

SEQ ID NO: 8695 - DNA, 19 bp, Artificial Sequence
  bisulfite treated nucleic acid for analysis of methylation status of SEQ ID NO: 17
tccgcacgaatcgactaat

SEQ ID NO: 8696 - DNA, 18 bp, Artificial Sequence
  bisulfite treated nucleic acid for analysis of methylation status of SEQ ID NO: 17
gtccgcacgaatcgacta

SEQ ID NO: 8697 - DNA, 20 bp, Artificial Sequence
  bisulfite treated nucleic acid for analysis of methylation status of SEQ ID NO: 17
gtatcgtcgtagttttcggc

SEQ ID NO: 8698 - DNA, 19 bp, Artificial Sequence
  bisulfite treated nucleic acid for analysis of methylation status of SEQ ID NO: 17
cggcgtatttggttgtttt

SEQ ID NO: 8699 - DNA, 19 bp, Artificial Sequence
  bisulfite treated nucleic acid for analysis of methylation status of SEQ ID NO: 17
ttcgggtagttagcgttgg

SEQ ID NO: 8700 - DNA, 19 bp, Artificial Sequence
  bisulfite treated nucleic acid for analysis of methylation status of SEQ ID NO: 17
ctccgcgaaaaacgtaaac

SEQ ID NO: 8701 - DNA, 19 bp, Artificial Sequence
  bisulfite treated nucleic acid for analysis of methylation status of SEQ ID NO: 17
aaacgctcgacaaacaacc

SEQ ID NO: 8702 - DNA, 19 bp, Artificial Sequence
  bisulfite treated nucleic acid for analysis of methylation status of SEQ ID NO: 17
acgttaaacaaccgcaaaa

SEQ ID NO: 8703 - DNA, 18 bp, Artificial Sequence
  bisulfite treated nucleic acid for analysis of methylation status of SEQ ID NO: 17
cctaccgctaaaacgcaa

SEQ ID NO: 8704 - DNA, 22 bp, Artificial Sequence
  bisulfite treated nucleic acid for analysis of methylation status of SEQ ID NO: 17
aacgctaactacccgaactatt

SEQ ID NO: 8705 - DNA, 20 bp, Artificial Sequence
  bisulfite treated nucleic acid for analysis of methylation status of SEQ ID NO: 17
gcgaacttctcgaccactac

SEQ ID NO: 8706 - DNA, 20 bp, Artificial Sequence
  bisulfite treated nucleic acid for analysis of methylation status of SEQ ID NO: 17
tttttgtcggcgattagagt

SEQ ID NO: 8707 - DNA, 18 bp, Artificial Sequence
  bisulfite treated nucleic acid for analysis of methylation status of SEQ ID NO: 17
cgtggagtcgcgtgtagt

SEQ ID NO: 8708 - DNA, 19 bp, Artificial Sequence
  bisulfite treated nucleic acid for analysis of methylation status of SEQ ID NO: 17
tttggttgttttcgcgttt

SEQ ID NO: 8709 - DNA, 19 bp, Artificial Sequence
  bisulfite treated nucleic acid for analysis of methylation status of SEQ ID NO: 17
acgctcgacaaacaacctc

SEQ ID NO: 8710 - DNA, 20 bp, Artificial Sequence
  bisulfite treated nucleic acid for analysis of methylation status of SEQ ID NO: 17
tcgggaaggtatttgtttcg

SEQ ID NO: 8711 - DNA, 19 bp, Artificial Sequence
  bisulfite treated nucleic acid for analysis of methylation status of SEQ ID NO: 17
cgtatttggttgttttcgc

SEQ ID NO: 8712 - DNA, 19 bp, Artificial Sequence
  bisulfite treated nucleic acid for analysis of methylation status of SEQ ID NO: 17
gcgtatttggttgttttcg

SEQ ID NO: 8713 - DNA, 21 bp, Artificial Sequence
  bisulfite treated nucleic acid for analysis of methylation status of SEQ ID NO: 17
agtcgcgtgtagtgttttaga

SEQ ID NO: 8714 - DNA, 22 bp, Artificial Sequence
  bisulfite treated nucleic acid for analysis of methylation status of SEQ ID NO: 17
ttagttttcggcgattattttt

SEQ ID NO: 8715 - DNA, 22 bp, Artificial Sequence
  bisulfite treated nucleic acid for analysis of methylation status of SEQ ID NO: 17
tttagttttcggcgattatttt

SEQ ID NO: 8716 - DNA, 18 bp, Artificial Sequence
  bisulfite treated nucleic acid for analysis of methylation status of SEQ ID NO: 17
ccgtccaaactatcccgt

SEQ ID NO: 8717 - DNA, 20 bp, Artificial Sequence
  bisulfite treated nucleic acid for analysis of methylation status of SEQ ID NO: 17
gaactctaatcgccgacaaa

SEQ ID NO: 8718 - DNA, 19 bp, Artificial Sequence
  bisulfite treated nucleic acid for analysis of methylation status of SEQ ID NO: 17
gaagcgtaggttgcgagtt

SEQ ID NO: 8719 - DNA, 22 bp, Artificial Sequence
  bisulfite treated nucleic acid for analysis of methylation status of SEQ ID NO: 17
aataatcgccgaaaactaaaca

SEQ ID NO: 8720 - DNA, 18 bp, Artificial Sequence
  bisulfite treated nucleic acid for analysis of methylation status of SEQ ID NO: 17
gcgtcgggaaggtatttg

SEQ ID NO: 8721 - DNA, 28 bp, Artificial Sequence
  bisulfite treated nucleic acid for analysis of methylation status of SEQ ID NO: 17
tgggtagtatcgtcgtagttttcggcgg

SEQ ID NO: 8722 - DNA, 19 bp, Artificial Sequence
  bisulfite treated nucleic acid for analysis of methylation status of SEQ ID NO: 17
tcaccgaactctaatcgcc

SEQ ID NO: 8723 - DNA, 22 bp, Artificial Sequence
  bisulfite treated nucleic acid for analysis of methylation status of SEQ ID NO: 17
gagttagtcgggtcgagtttat

SEQ ID NO: 8724 - DNA, 24 bp, Artificial Sequence
  bisulfite treated nucleic acid for analysis of methylation status of SEQ ID NO: 17
ttcgggtagggcgagagtcggcgt

SEQ ID NO: 8725 - DNA, 20 bp, Artificial Sequence
  bisulfite treated nucleic acid for analysis of methylation status of SEQ ID NO: 17
ctcaccgaactctaatcgcc

SEQ ID NO: 8726 - DNA, 21 bp, Artificial Sequence
  bisulfite treated nucleic acid for analysis of methylation status of SEQ ID NO: 17
ttattcgttggcgtttaagtg

SEQ ID NO: 8727 - DNA, 18 bp, Artificial Sequence
  bisulfite treated nucleic acid for analysis of methylation status of SEQ ID NO: 17
cgctcgacaaacaacctc

SEQ ID NO: 8728 - DNA, 18 bp, Artificial Sequence
  bisulfite treated nucleic acid for analysis of methylation status of SEQ ID NO: 17
tcgccctacccgaaacta

SEQ ID NO: 8729 - DNA, 22 bp, Artificial Sequence
  bisulfite treated nucleic acid for analysis of methylation status of SEQ ID NO: 17
ccctaaacgcacgaataaatac

SEQ ID NO: 8730 - DNA, 18 bp, Artificial Sequence
  bisulfite treated nucleic acid for analysis of methylation status of SEQ ID NO: 17
atttcggttgtgaggcgt

SEQ ID NO: 8731 - DNA, 21 bp, Artificial Sequence
  bisulfite treated nucleic acid for analysis of methylation status of SEQ ID NO: 17
gggttgagtacggcggcgggg

SEQ ID NO: 8732 - DNA, 18 bp, Artificial Sequence
  bisulfite treated nucleic acid for analysis of methylation status of SEQ ID NO: 17
ctccgcgaaaaacgtaaa

SEQ ID NO: 8733 - DNA, 18 bp, Artificial Sequence
  bisulfite treated nucleic acid for analysis of methylation status of SEQ ID NO: 17
ccgcacgaatcgactaat

SEQ ID NO: 8734 - DNA, 20 bp, Artificial Sequence
  bisulfite treated nucleic acid for analysis of methylation status of SEQ ID NO: 17
acgcaatacacgcctaaaaa

SEQ ID NO: 8735 - DNA, 20 bp, Artificial Sequence
  bisulfite treated nucleic acid for analysis of methylation status of SEQ ID NO: 17
aacgcaatacacgcctaaaa

SEQ ID NO: 8736 - DNA, 19 bp, Artificial Sequence
  bisulfite treated nucleic acid for analysis of methylation status of SEQ ID NO: 17
ctccctaccgctaaaacgc

SEQ ID NO: 8737 - DNA, 23 bp, Artificial Sequence
  bisulfite treated nucleic acid for analysis of methylation status of SEQ ID NO: 17
gtttagttttcggcgattatttt

SEQ ID NO: 8738 - DNA, 22 bp, Artificial Sequence
  bisulfite treated nucleic acid for analysis of methylation status of SEQ ID NO: 23
cgcgattttcgtttattgtaag

SEQ ID NO: 8739 - DNA, 21 bp, Artificial Sequence
  bisulfite treated nucleic acid for analysis of methylation status of SEQ ID NO: 23
cgataaaaccccgtctctact

SEQ ID NO: 8740 - DNA, 38 bp, Artificial Sequence
  bisulfite treated nucleic acid for analysis of methylation status of SEQ ID NO: 23
agtagttgggattataggcgttcgttattaagtttagt

SEQ ID NO: 8741 - DNA, 19 bp, Artificial Sequence
  bisulfite treated nucleic acid for analysis of methylation status of SEQ ID NO: 23
gcgttcggttcgtattttt

SEQ ID NO: 8742 - DNA, 22 bp, Artificial Sequence
  bisulfite treated nucleic acid for analysis of methylation status of SEQ ID NO: 23
tctaaatcgcctaacctcgtaa

SEQ ID NO: 8743 - DNA, 26 bp, Artificial Sequence
  bisulfite treated nucleic acid for analysis of methylation status of SEQ ID NO: 23
agtaattacgggttgggcgtggtggt

SEQ ID NO: 8744 - DNA, 22 bp, Artificial Sequence
  bisulfite treated nucleic acid for analysis of methylation status of SEQ ID NO: 23
ttttatcgttttagtcgggatg

SEQ ID NO: 8745 - DNA, 19 bp, Artificial Sequence
  bisulfite treated nucleic acid for analysis of methylation status of SEQ ID NO: 23
aaaaatacgaaccgaacgc

SEQ ID NO: 8746 - DNA, 33 bp, Artificial Sequence
  nucleic acid for analysis of methylation status of SEQ ID NO: 23
ttcgttcgtttcggttttttaaagtgttgggat

SEQ ID NO: 8747 - DNA, 22 bp, Artificial Sequence
  bisulfite treated nucleic acid for analysis of methylation status of SEQ ID NO: 23
agtagagacggggttttatcgt

SEQ ID NO: 8748 - DNA, 22 bp, Artificial Sequence
  bisulfite treated nucleic acid for analysis of methylation status of SEQ ID NO: 23
taatctaaatcgcctaacctcg

SEQ ID NO: 8749 - DNA, 22 bp, Artificial Sequence
  bisulfite treated nucleic acid for analysis of methylation status of SEQ ID NO: 23
aatctaaatcgcctaacctcgt

SEQ ID NO: 8750 - DNA, 24 bp, Artificial Sequence
  bisulfite treated nucleic acid for analysis of methylation status of SEQ ID NO: 23
gcgattttcgtttattgtaagttt

SEQ ID NO: 8751 - DNA, 19 bp, Artificial Sequence
  bisulfite treated nucleic acid for analysis of methylation status of SEQ ID NO: 23
gtgattatcgcgttcggtt

SEQ ID NO: 8752 - DNA, 22 bp, Artificial Sequence
  bisulfite treated nucleic acid for analysis of methylation status of SEQ ID NO: 23
taaatcgcctaacctcgtaatc

SEQ ID NO: 8753 - DNA, 22 bp, Artificial Sequence
  bisulfite treated nucleic acid for analysis of methylation status of SEQ ID NO: 23
acggggttttatcgttttagtc

SEQ ID NO: 8754 - DNA, 22 bp, Artificial Sequence
  bisulfite treated nucleic acid for analysis of methylation status of SEQ ID NO: 23
gacggggttttatcgttttagt

SEQ ID NO: 8755 - DNA, 22 bp, Artificial Sequence
  bisulfite treated nucleic acid for analysis of methylation status of SEQ ID NO: 23
tagtagagacggggttttatcg

SEQ ID NO: 8756 - DNA, 22 bp, Artificial Sequence
  bisulfite treated nucleic acid for analysis of methylation status of SEQ ID NO: 23
agacggggttttatcgttttag

SEQ ID NO: 8757 - DNA, 22 bp, Artificial Sequence
  bisulfite treated nucleic acid for analysis of methylation status of SEQ ID NO: 23
atctaaatcgcctaacctcgta

SEQ ID NO: 8758 - DNA, 23 bp, Artificial Sequence
  bisulfite treated nucleic acid for analysis of methylation status of SEQ ID NO: 23
ataatctaaatcgcctaacctcg

SEQ ID NO: 8759 - DNA, 19 bp, Artificial Sequence
  bisulfite treated nucleic acid for analysis of methylation status of SEQ ID NO: 23
tatcgcgttcggttcgtat

SEQ ID NO: 8760 - DNA, 22 bp, Artificial Sequence
  bisulfite treated nucleic acid for analysis of methylation status of SEQ ID NO: 23
tagagacggggttttatcgttt

SEQ ID NO: 8761 - DNA, 22 bp, Artificial Sequence
  bisulfite treated nucleic acid for analysis of methylation status of SEQ ID NO: 23
ctaaatcgcctaacctcgtaat

SEQ ID NO: 8762 - DNA, 18 bp, Artificial Sequence
  bisulfite treated nucleic acid for analysis of methylation status of SEQ ID NO: 23
tgattatcgcgttcggtt

SEQ ID NO: 8763 - DNA, 20 bp, Artificial Sequence
  bisulfite treated nucleic acid for analysis of methylation status of SEQ ID NO: 23
ggattacgaggttaggcgat

SEQ ID NO: 8764 - DNA, 24 bp, Artificial Sequence
  bisulfite treated nucleic acid for analysis of methylation status of SEQ ID NO: 23
cccgaataactaaaactacaaacg

SEQ ID NO: 8765 - DNA, 25 bp, Artificial Sequence
  bisulfite treated nucleic acid for analysis of methylation status of SEQ ID NO: 23
atttggtaggcgtggtggcgggcgt

SEQ ID NO: 8766 - DNA, 21 bp, Artificial Sequence
  bisulfite treated nucleic acid for analysis of methylation status of SEQ ID NO: 23
ggttttatcgttttagtcggg

SEQ ID NO: 8767 - DNA, 21 bp, Artificial Sequence
  bisulfite treated nucleic acid for analysis of methylation status of SEQ ID NO: 23
gggttttatcgttttagtcgg

SEQ ID NO: 8768 - DNA, 21 bp, Artificial Sequence
  bisulfite treated nucleic acid for analysis of methylation status of SEQ ID NO: 23
cggggttttatcgttttagtc

SEQ ID NO: 8769 - DNA, 21 bp, Artificial Sequence
  bisulfite treated nucleic acid for analysis of methylation status of SEQ ID NO: 23
ggggttttatcgttttagtcg

SEQ ID NO: 8770 - DNA, 19 bp, Artificial Sequence
  bisulfite treated nucleic acid for analysis of methylation status of SEQ ID NO: 23
gcgcgattttcgtttattg

SEQ ID NO: 8771 - DNA, 22 bp, Artificial Sequence
  bisulfite treated nucleic acid for analysis of methylation status of SEQ ID NO: 23
acgataaaaccccgtctctact

SEQ ID NO: 8772 - DNA, 19 bp, Artificial Sequence
  bisulfite treated nucleic acid for analysis of methylation status of SEQ ID NO: 23
taaagtgggcggattacga

SEQ ID NO: 8773 - DNA, 22 bp, Artificial Sequence
  bisulfite treated nucleic acid for analysis of methylation status of SEQ ID NO: 23
taactaaaactacaaacgcccg

SEQ ID NO: 8774 - DNA, 40 bp, Artificial Sequence
  bisulfite treated nucleic acid for analysis of methylation status of SEQ ID NO: 23
ggcgatttagattattttggataatacggtgaaatttcgt

SEQ ID NO: 8775 - DNA, 22 bp, Artificial Sequence
  bisulfite treated nucleic acid for analysis of methylation status of SEQ ID NO: 23
gagacggggttttatcgtttta

SEQ ID NO: 8776 - DNA, 21 bp, Artificial Sequence
  bisulfite treated nucleic acid for analysis of methylation status of SEQ ID NO: 23
tatcgttttagtcgggatggt

SEQ ID NO: 8777 - DNA, 22 bp, Artificial Sequence
  bisulfite treated nucleic acid for analysis of methylation status of SEQ ID NO: 23
gttttatcgttttagtcgggat

SEQ ID NO: 8778 - DNA, 21 bp, Artificial Sequence
  bisulfite treated nucleic acid for analysis of methylation status of SEQ ID NO: 23
aaatcgcctaacctcgtaatc

SEQ ID NO: 8779 - DNA, 19 bp, Artificial Sequence
  bisulfite treated nucleic acid for analysis of methylation status of SEQ ID NO: 23
ggtagagaaggtacgggcg

SEQ ID NO: 8780 - DNA, 22 bp, Artificial Sequence
  bisulfite treated nucleic acid for analysis of methylation status of SEQ ID NO: 23
gaaatatcgctacgaaaccaac

SEQ ID NO: 8781 - DNA, 33 bp, Artificial Sequence
  bisulfite treated nucleic acid for analysis of methylation status of SEQ ID NO: 23
tgggagtttgaatgtcgttggttgtcgtttata

SEQ ID NO: 8782 - DNA, 18 bp, Artificial Sequence
  bisulfite treated nucleic acid for analysis of methylation status of SEQ ID NO: 23
ggcgcgattttcgtttat

SEQ ID NO: 8783 - DNA, 22 bp, Artificial Sequence
  bisulfite treated nucleic acid for analysis of methylation status of SEQ ID NO: 23
ttatcgttttagtcgggatggt

SEQ ID NO: 8784 - DNA, 21 bp, Artificial Sequence
  bisulfite treated nucleic acid for analysis of methylation status of SEQ ID NO: 23
gtagagacggggttttatcgt

SEQ ID NO: 8785 - DNA, 23 bp, Artificial Sequence
  bisulfite treated nucleic acid for analysis of methylation status of SEQ ID NO: 23
ttagtagagacggggttttatcg

SEQ ID NO: 8786 - DNA, 18 bp, Artificial Sequence
  bisulfite treated nucleic acid for analysis of methylation status of SEQ ID NO: 23
aagtgggcggattacgag

SEQ ID NO: 8787 - DNA, 24 bp, Artificial Sequence
  bisulfite treated nucleic acid for analysis of methylation status of SEQ ID NO: 23
gattttcgtttattgtaagtttcg

SEQ ID NO: 8788 - DNA, 18 bp, Artificial Sequence
  bisulfite treated nucleic acid for analysis of methylation status of SEQ ID NO: 23
atcgcgttcggttcgtat

SEQ ID NO: 8789 - DNA, 21 bp, Artificial Sequence
  bisulfite treated nucleic acid for analysis of methylation status of SEQ ID NO: 23
agagacggggttttatcgttt

SEQ ID NO: 8790 - DNA, 22 bp, Artificial Sequence
  bisulfite treated nucleic acid for analysis of methylation status of SEQ ID NO: 23
aatctcgatctcctaacctcgt

SEQ ID NO: 8791 - DNA, 22 bp, Artificial Sequence
  bisulfite treated nucleic acid for analysis of methylation status of SEQ ID NO: 23
tacgtttagttcgtggttgttg

SEQ ID NO: 8792 - DNA, 49 bp, Artificial Sequence
  bisulfite treated nucleic acid for analysis of methylation status of SEQ ID NO: 23
ggcgcggtagttacgtttgtaattttagtattttgggaggtcgaggcgg

SEQ ID NO: 8793 - DNA, 22 bp, Artificial Sequence
  bisulfite treated nucleic acid for analysis of methylation status of SEQ ID NO: 23
tcgatctcctaacctcgtaatc

SEQ ID NO: 8794 - DNA, 22 bp, Artificial Sequence
  bisulfite treated nucleic acid for analysis of methylation status of SEQ ID NO: 23
tttcaccgttttaaccgaaata

SEQ ID NO: 8795 - DNA, 49 bp, Artificial Sequence
  bisulfite treated nucleic acid for analysis of methylation status of SEQ ID NO: 23
tacgtttgtaattttagtattttgggaggtcgaggcgggcggattacga

SEQ ID NO: 8796 - DNA, 22 bp, Artificial Sequence
  bisulfite treated nucleic acid for analysis of methylation status of SEQ ID NO: 23
caccgttttaaccgaaataatc

SEQ ID NO: 8797 - DNA, 22 bp, Artificial Sequence
  bisulfite treated nucleic acid for analysis of methylation status of SEQ ID NO: 23
tttaatagaagatacgggtcgg

SEQ ID NO: 8798 - DNA, 22 bp, Artificial Sequence
  bisulfite treated nucleic acid for analysis of methylation status of SEQ ID NO: 23
ttcaccgttttaaccgaaataa

SEQ ID NO: 8799 - DNA, 22 bp, Artificial Sequence
  bisulfite treated nucleic acid for analysis of methylation status of SEQ ID NO: 23
cgatctcctaacctcgtaatcc

SEQ ID NO: 8800 - DNA, 21 bp, Artificial Sequence
  bisulfite treated nucleic acid for analysis of methylation status of SEQ ID NO: 23
taatagaagatacgggtcggg

SEQ ID NO: 8801 - DNA, 22 bp, Artificial Sequence
  bisulfite treated nucleic acid for analysis of methylation status of SEQ ID NO: 23
tctcgatctcctaacctcgtaa

SEQ ID NO: 8802 - DNA, 22 bp, Artificial Sequence
  bisulfite treated nucleic acid for analysis of methylation status of SEQ ID NO: 23
ttacgtttagttcgtggttgtt

SEQ ID NO: 8803 - DNA, 23 bp, Artificial Sequence
  bisulfite treated nucleic acid for analysis of methylation status of SEQ ID NO: 23
ctcgatctcctaacctcgtaatc

SEQ ID NO: 8804 - DNA, 23 bp, Artificial Sequence
  bisulfite treated nucleic acid for analysis of methylation status of SEQ ID NO: 23
taatctcgatctcctaacctcgt

SEQ ID NO: 8805 - DNA, 21 bp, Artificial Sequence
  bisulfite treated nucleic acid for analysis of methylation status of SEQ ID NO: 23
acgtttagttcgtggttgttg

SEQ ID NO: 8806 - DNA, 21 bp, Artificial Sequence
  bisulfite treated nucleic acid for analysis of methylation status of SEQ ID NO: 23
aatttcaccgttttaaccgaa

SEQ ID NO: 8807 - DNA, 21 bp, Artificial Sequence
  bisulfite treated nucleic acid for analysis of methylation status of SEQ ID NO: 23
atttcaccgttttaaccgaaa

SEQ ID NO: 8808 - DNA, 22 bp, Artificial Sequence
  bisulfite treated nucleic acid for analysis of methylation status of SEQ ID NO: 23
ttaatagaagatacgggtcggg

SEQ ID NO: 8809 - DNA, 22 bp, Artificial Sequence
  bisulfite treated nucleic acid for analysis of methylation status of SEQ ID NO: 23
caacaaccacgaactaaacgta

SEQ ID NO: 8810 - DNA, 21 bp, Artificial Sequence
  bisulfite treated nucleic acid for analysis of methylation status of SEQ ID NO: 23
agtagagacggggttttatcg

SEQ ID NO: 8811 - DNA, 37 bp, Artificial Sequence
  bisulfite treated nucleic acid for analysis of methylation status of SEQ ID NO: 23
ttatttaggatggtttggatcgtttgatttcgtgatt

SEQ ID NO: 8812 - DNA, 22 bp, Artificial Sequence
  bisulfite treated nucleic acid for analysis of methylation status of SEQ ID NO: 23
taatctcgatctcctaacctcg

SEQ ID NO: 8813 - DNA, 21 bp, Artificial Sequence
  bisulfite treated nucleic acid for analysis of methylation status of SEQ ID NO: 23
ttcaccgttttaaccgaaata

SEQ ID NO: 8814 - DNA, 23 bp, Artificial Sequence
  bisulfite treated nucleic acid for analysis of methylation status of SEQ ID NO: 23
ttttaatagaagatacgggtcgg

SEQ ID NO: 8815 - DNA, 20 bp, Artificial Sequence
  bisulfite treated nucleic acid for analysis of methylation status of SEQ ID NO: 23
cccgacccgtatcttctatt

SEQ ID NO: 8816 - DNA, 22 bp, Artificial Sequence
  bisulfite treated nucleic acid for analysis of methylation status of SEQ ID NO: 23
cggggttttatcgtgttattta

SEQ ID NO: 8817 - DNA, 35 bp, Artificial Sequence
  bisulfite treated nucleic acid for analysis of methylation status of SEQ ID NO: 23
gtgagttattacgtttagttcgtggttgttggttt

SEQ ID NO: 8818 - DNA, 22 bp, Artificial Sequence
  bisulfite treated nucleic acid for analysis of methylation status of SEQ ID NO: 23
cgtgattcgtttattttggttt

SEQ ID NO: 8819 - DNA, 23 bp, Artificial Sequence
  bisulfite treated nucleic acid for analysis of methylation status of SEQ ID NO: 23
attacgtttagttcgtggttgtt

SEQ ID NO: 8820 - DNA, 21 bp, Artificial Sequence
  bisulfite treated nucleic acid for analysis of methylation status of SEQ ID NO: 23
atctcgatctcctaacctcgt

SEQ ID NO: 8821 - DNA, 21 bp, Artificial Sequence
  bisulfite treated nucleic acid for analysis of methylation status of SEQ ID NO: 23
cgcggtagttacgtttgtaat

SEQ ID NO: 8822 - DNA, 25 bp, Artificial Sequence
  bisulfite treated nucleic acid for analysis of methylation status of SEQ ID NO: 23
gaggcgggcggattacgaggttagg

SEQ ID NO: 8823 - DNA, 23 bp, Artificial Sequence
  bisulfite treated nucleic acid for analysis of methylation status of SEQ ID NO: 23
aatatcgctaactaccgttcaca

SEQ ID NO: 8824 - DNA, 22 bp, Artificial Sequence
  bisulfite treated nucleic acid for analysis of methylation status of SEQ ID NO: 23
taggatagttgtcggagtgtcg

SEQ ID NO: 8825 - DNA, 33 bp, Artificial Sequence
  bisulfite treated nucleic acid for analysis of methylation status of SEQ ID NO: 23
gaggttagcgggtgttattgtttttttacggtg

SEQ ID NO: 8826 - DNA, 21 bp, Artificial Sequence
  bisulfite treated nucleic acid for analysis of methylation status of SEQ ID NO: 23
tcaccgttttaaccgaaataa

SEQ ID NO: 8827 - DNA, 23 bp, Artificial Sequence
  bisulfite treated nucleic acid for analysis of methylation status of SEQ ID NO: 23
ggcgtgagttattacgtttagtt

SEQ ID NO: 8828 - DNA, 20 bp, Artificial Sequence
  bisulfite treated nucleic acid for analysis of methylation status of SEQ ID NO: 23
aatagaagatacgggtcggg

SEQ ID NO: 8829 - DNA, 22 bp, Artificial Sequence
  bisulfite treated nucleic acid for analysis of methylation status of SEQ ID NO: 23
aatttcaccgttttaaccgaaa

SEQ ID NO: 8830 - DNA, 22 bp, Artificial Sequence
  bisulfite treated nucleic acid for analysis of methylation status of SEQ ID NO: 23
atctcgatctcctaacctcgta

SEQ ID NO: 8831 - DNA, 24 bp, Artificial Sequence
  bisulfite treated nucleic acid for analysis of methylation status of SEQ ID NO: 23
aggcgtgagttattacgtttagtt

SEQ ID NO: 8832 - DNA, 21 bp, Artificial Sequence
  bisulfite treated nucleic acid for analysis of methylation status of SEQ ID NO: 23
acgaaatcaaacgatccaaac

SEQ ID NO: 8833 - DNA, 22 bp, Artificial Sequence
  bisulfite treated nucleic acid for analysis of methylation status of SEQ ID NO: 23
gggattataggcgttcgttatt

SEQ ID NO: 8834 - DNA, 37 bp, Artificial Sequence
  bisulfite treated nucleic acid for analysis of methylation status of SEQ ID NO: 23
ttttagtagagacggggttttatcgtgttatttagga

SEQ ID NO: 8835 - DNA, 23 bp, Artificial Sequence
  bisulfite treated nucleic acid for analysis of methylation status of SEQ ID NO: 23
ataatctcgatctcctaacctcg

SEQ ID NO: 8836 - DNA, 20 bp, Artificial Sequence
  bisulfite treated nucleic acid for analysis of methylation status of SEQ ID NO: 23
cgaaatcaaacgatccaaac

SEQ ID NO: 8837 - DNA, 21 bp, Artificial Sequence
  bisulfite treated nucleic acid for analysis of methylation status of SEQ ID NO: 23
aatacaataacgcgatctccg

SEQ ID NO: 8838 - DNA, 22 bp, Artificial Sequence
  bisulfite treated nucleic acid for analysis of methylation status of SEQ ID NO: 23
cgggcgtttgtagttttagtta

SEQ ID NO: 8839 - DNA, 28 bp, Artificial Sequence
  bisulfite treated nucleic acid for analysis of methylation status of SEQ ID NO: 23
aggagaatggcgtgaattttggaagcgg

SEQ ID NO: 8840 - DNA, 22 bp, Artificial Sequence
  bisulfite treated nucleic acid for analysis of methylation status of SEQ ID NO: 23
tcgtgattcgtttattttggtt

SEQ ID NO: 8841 - DNA, 22 bp, Artificial Sequence
  bisulfite treated nucleic acid for analysis of methylation status of SEQ ID NO: 23
ttcgtgattcgtttattttggt

SEQ ID NO: 8842 - DNA, 23 bp, Artificial Sequence
  bisulfite treated nucleic acid for analysis of methylation status of SEQ ID NO: 23
aacaaccacgaactaaacgtaat

SEQ ID NO: 8843 - DNA, 23 bp, Artificial Sequence
  bisulfite treated nucleic acid for analysis of methylation status of SEQ ID NO: 23
tttttaatagaagatacgggtcg

SEQ ID NO: 8844 - DNA, 23 bp, Artificial Sequence
  bisulfite treated nucleic acid for analysis of methylation status of SEQ ID NO: 23
gcggtagttacgtttgtaatttt

SEQ ID NO: 8845 - DNA, 22 bp, Artificial Sequence
  bisulfite treated nucleic acid for analysis of methylation status of SEQ ID NO: 23
atatcgctaactaccgttcaca

SEQ ID NO: 8846 - DNA, 20 bp, Artificial Sequence
  bisulfite treated nucleic acid for analysis of methylation status of SEQ ID NO: 23
atacaataacgcgatctccg

SEQ ID NO: 8847 - DNA, 22 bp, Artificial Sequence
  bisulfite treated nucleic acid for analysis of methylation status of SEQ ID NO: 23
atactcaaaaataacgcgcctc

SEQ ID NO: 8848 - DNA, 21 bp, Artificial Sequence
  bisulfite treated nucleic acid for analysis of methylation status of SEQ ID NO: 23
gttgtgaacggtagttagcga

SEQ ID NO: 8849 - DNA, 26 bp, Artificial Sequence
  bisulfite treated nucleic acid for analysis of methylation status of SEQ ID NO: 23
ttcgtagtcgggtttcgcgttcgtgt

SEQ ID NO: 8850 - DNA, 22 bp, Artificial Sequence
  bisulfite treated nucleic acid for analysis of methylation status of SEQ ID NO: 23
acggggttttatcgtgttattt

SEQ ID NO: 8851 - DNA, 22 bp, Artificial Sequence
  bisulfite treated nucleic acid for analysis of methylation status of SEQ ID NO: 23
ctcgatctcctaacctcgtaat

SEQ ID NO: 8852 - DNA, 24 bp, Artificial Sequence
  bisulfite treated nucleic acid for analysis of methylation status of SEQ ID NO: 23
tgagttattacgtttagttcgtgg

SEQ ID NO: 8853 - DNA, 23 bp, Artificial Sequence
  bisulfite treated nucleic acid for analysis of methylation status of SEQ ID NO: 23
aaaattacaaacgtaactaccgc

SEQ ID NO: 8854 - DNA, 24 bp, Artificial Sequence
  bisulfite treated nucleic acid for analysis of methylation status of SEQ ID NO: 23
gtttttaatagaagatacgggtcg

SEQ ID NO: 8855 - DNA, 22 bp, Artificial Sequence
  bisulfite treated nucleic acid for analysis of methylation status of SEQ ID NO: 23
agacggggttttatcgtgttat

SEQ ID NO: 8856 - DNA, 24 bp, Artificial Sequence
  bisulfite treated nucleic acid for analysis of methylation status of SEQ ID NO: 23
ataatctcgatctcctaacctcgt

SEQ ID NO: 8857 - DNA, 22 bp, Artificial Sequence
  bisulfite treated nucleic acid for analysis of methylation status of SEQ ID NO: 23
acaaccacgaactaaacgtaat

SEQ ID NO: 8858 - DNA, 36 bp, Artificial Sequence
  bisulfite treated nucleic acid for analysis of methylation status of SEQ ID NO: 23
gttatttaggatggtttggatcgtttgatttcgtga

SEQ ID NO: 8859 - DNA, 20 bp, Artificial Sequence
  bisulfite treated nucleic acid for analysis of methylation status of SEQ ID NO: 23
ctcctaacctcgtaatccgc

SEQ ID NO: 8860 - DNA, 23 bp, Artificial Sequence
  bisulfite treated nucleic acid for analysis of methylation status of SEQ ID NO: 23
gggtcgggcgcggtagttacgtt

SEQ ID NO: 8861 - DNA, 24 bp, Artificial Sequence
  bisulfite treated nucleic acid for analysis of methylation status of SEQ ID NO: 23
cgacccgtatcttctattaaaaac

SEQ ID NO: 8862 - DNA, 32 bp, Artificial Sequence
  bisulfite treated nucleic acid for analysis of methylation status of SEQ ID NO: 23
ggcgtgagttattacgtttagttcgtggttgt

SEQ ID NO: 8863 - DNA, 22 bp, Artificial Sequence
  bisulfite treated nucleic acid for analysis of methylation status of SEQ ID NO: 23
tttcgtgattcgtttattttgg

SEQ ID NO: 8864 - DNA, 24 bp, Artificial Sequence
  bisulfite treated nucleic acid for analysis of methylation status of SEQ ID NO: 23
tattacgtttagttcgtggttgtt

SEQ ID NO: 8865 - DNA, 21 bp, Artificial Sequence
  bisulfite treated nucleic acid for analysis of methylation status of SEQ ID NO: 23
gacggggttttatcgtgttat

SEQ ID NO: 8866 - DNA, 22 bp, Artificial Sequence
  bisulfite treated nucleic acid for analysis of methylation status of SEQ ID NO: 23
aaattacaaacgtaactaccgc

SEQ ID NO: 8867 - DNA, 20 bp, Artificial Sequence
  bisulfite treated nucleic acid for analysis of methylation status of SEQ ID NO: 23
ggatagttgtcggagtgtcg

SEQ ID NO: 8868 - DNA, 23 bp, Artificial Sequence
  bisulfite treated nucleic acid for analysis of methylation status of SEQ ID NO: 23
gatttcgtgattcgtttattttg

SEQ ID NO: 8869 - DNA, 20 bp, Artificial Sequence
  bisulfite treated nucleic acid for analysis of methylation status of SEQ ID NO: 23
gcgcggtagttacgtttgta

SEQ ID NO: 8870 - DNA, 24 bp, Artificial Sequence
  bisulfite treated nucleic acid for analysis of methylation status of SEQ ID NO: 23
cgtgagttattacgtttagttcgt

SEQ ID NO: 8871 - DNA, 21 bp, Artificial Sequence
  bisulfite treated nucleic acid for analysis of methylation status of SEQ ID NO: 23
aggatagttgtcggagtgtcg

SEQ ID NO: 8872 - DNA, 25 bp, Artificial Sequence
  bisulfite treated nucleic acid for analysis of methylation status of SEQ ID NO: 23
taggcgtgagttattacgtttagtt

SEQ ID NO: 8873 - DNA, 24 bp, Artificial Sequence
  bisulfite treated nucleic acid for analysis of methylation status of SEQ ID NO: 23
ttattacgtttagttcgtggttgt

SEQ ID NO: 8874 - DNA, 22 bp, Artificial Sequence
  bisulfite treated nucleic acid for analysis of methylation status of SEQ ID NO: 23
tttcggtttattgtaagtttcg

SEQ ID NO: 8875 - DNA, 33 bp, Artificial Sequence
  bisulfite treated nucleic acid for analysis of methylation status of SEQ ID NO: 23
gtttttcgagtagttgggattataggcgttcgt

SEQ ID NO: 8876 - DNA, 25 bp, Artificial Sequence
  bisulfite treated nucleic acid for analysis of methylation status of SEQ ID NO: 23
ttattacgtttagttcgtggttgtt

SEQ ID NO: 8877 - DNA, 23 bp, Artificial Sequence
  bisulfite treated nucleic acid for analysis of methylation status of SEQ ID NO: 23
cgtgagttattacgtttagttcg

SEQ ID NO: 8878 - DNA, 19 bp, Artificial Sequence
  bisulfite treated nucleic acid for analysis of methylation status of SEQ ID NO: 23
tcctaacctcgtaatccgc

SEQ ID NO: 8879 - DNA, 21 bp, Artificial Sequence
  bisulfite treated nucleic acid for analysis of methylation status of SEQ ID NO: 23
tactcaaaaataacgcgcctc

SEQ ID NO: 8880 - DNA, 21 bp, Artificial Sequence
  bisulfite treated nucleic acid for analysis of methylation status of SEQ ID NO: 23
tttcaccgttttaaccgaaat

SEQ ID NO: 8881 - DNA, 23 bp, Artificial Sequence
  bisulfite treated nucleic acid for analysis of methylation status of SEQ ID NO: 23
tcggtttattgtaagtttcgttt

SEQ ID NO: 8882 - DNA, 23 bp, Artificial Sequence
  bisulfite treated nucleic acid for analysis of methylation status of SEQ ID NO: 23
ttcggtttattgtaagtttcgtt

SEQ ID NO: 8883 - DNA, 25 bp, Artificial Sequence
  bisulfite treated nucleic acid for analysis of methylation status of SEQ ID NO: 23
gttattacgtttagttcgtggttgt

SEQ ID NO: 8884 - DNA, 22 bp, Artificial Sequence
  bisulfite treated nucleic acid for analysis of methylation status of SEQ ID NO: 23
aaaccaaaataaacgaatcacg

SEQ ID NO: 8885 - DNA, 20 bp, Artificial Sequence
  bisulfite treated nucleic acid for analysis of methylation status of SEQ ID NO: 23
gttgggattataggcgttcg

SEQ ID NO: 8886 - DNA, 38 bp, Artificial Sequence
  bisulfite treated nucleic acid for analysis of methylation status of SEQ ID NO: 23
ttttatcgtgttatttaggatggtttggatcgtttgat

SEQ ID NO: 8887 - DNA, 20 bp, Artificial Sequence
  bisulfite treated nucleic acid for analysis of methylation status of SEQ ID NO: 23
cgtttagttcgtggttgttg

SEQ ID NO: 8888 - DNA, 22 bp, Artificial Sequence
  bisulfite treated nucleic acid for analysis of methylation status of SEQ ID NO: 23
ttgatttcgtgattcgtttatt

SEQ ID NO: 8889 - DNA, 22 bp, Artificial Sequence
  bisulfite treated nucleic acid for analysis of methylation status of SEQ ID NO: 23
tttgatttcgtgattcgtttat

SEQ ID NO: 8890 - DNA, 23 bp, Artificial Sequence
  bisulfite treated nucleic acid for analysis of methylation status of SEQ ID NO: 23
ataggatagttgtcggagtgtcg

SEQ ID NO: 8891 - DNA, 21 bp, Artificial Sequence
  bisulfite treated nucleic acid for analysis of methylation status of SEQ ID NO: 23
catactcaaaaataacgcgcc

SEQ ID NO: 8892 - DNA, 24 bp, Artificial Sequence
  bisulfite treated nucleic acid for analysis of methylation status of SEQ ID NO: 23
cggtttattgtaagtttcgttttt

SEQ ID NO: 8893 - DNA, 20 bp, Artificial Sequence
  bisulfite treated nucleic acid for analysis of methylation status of SEQ ID NO: 23
tctcgatctcctaacctcgt

SEQ ID NO: 8894 - DNA, 22 bp, Artificial Sequence
  bisulfite treated nucleic acid for analysis of methylation status of SEQ ID NO: 23
tgggattataggcgttcgttat

SEQ ID NO: 8895 - DNA, 24 bp, Artificial Sequence
  nucleic acid for analysis of methylation status of SEQ ID NO: 23
taaaattacaaacgtaactaccgc

SEQ ID NO: 8896 - DNA, 19 bp, Artificial Sequence
  bisulfite treated nucleic acid for analysis of methylation status of SEQ ID NO: 23
ttgggattataggcgttcg

SEQ ID NO: 8897 - DNA, 24 bp, Artificial Sequence
  bisulfite treated nucleic acid for analysis of methylation status of SEQ ID NO: 23
gcgtgagttattacgtttagttcg

SEQ ID NO: 8898 - DNA, 20 bp, Artificial Sequence
  bisulfite treated nucleic acid for analysis of methylation status of SEQ ID NO: 23
caacaaccacgaactaaacg

SEQ ID NO: 8899 - DNA, 25 bp, Artificial Sequence
  bisulfite treated nucleic acid for analysis of methylation status of SEQ ID NO: 23
gtgagttattacgtttagttcgtgg

SEQ ID NO: 8900 - DNA, 25 bp, Artificial Sequence
  bisulfite treated nucleic acid for analysis of methylation status of SEQ ID NO: 23
ctaaaattacaaacgtaactaccgc

SEQ ID NO: 8901 - DNA, 22 bp, Artificial Sequence
  bisulfite treated nucleic acid for analysis of methylation status of SEQ ID NO: 23
aaatatcgctaactaccgttca

SEQ ID NO: 8902 - DNA, 22 bp, Artificial Sequence
  bisulfite treated nucleic acid for analysis of methylation status of SEQ ID NO: 23
gatagttgtcggagtgtcgttg

SEQ ID NO: 8903 - DNA, 24 bp, Artificial Sequence
  bisulfite treated nucleic acid for analysis of methylation status of SEQ ID NO: 23
ttataggcgtgagttattacgttt

SEQ ID NO: 8904 - DNA, 21 bp, Artificial Sequence
  bisulfite treated nucleic acid for analysis of methylation status of SEQ ID NO: 23
ggatcgtttgatttcgtgatt

SEQ ID NO: 8905 - DNA, 23 bp, Artificial Sequence
  bisulfite treated nucleic acid for analysis of methylation status of SEQ ID NO: 23
atttcggtttattgtaagtttcg

SEQ ID NO: 8906 - DNA, 23 bp, Artificial Sequence
  bisulfite treated nucleic acid for analysis of methylation status of SEQ ID NO: 23
gcgtgagttattacgtttagttc

SEQ ID NO: 8907 - DNA, 21 bp, Artificial Sequence
  bisulfite treated nucleic acid for analysis of methylation status of SEQ ID NO: 23
gtttggatcgtttgatttcgt

SEQ ID NO: 8908 - DNA, 22 bp, Artificial Sequence
  bisulfite treated nucleic acid for analysis of methylation status of SEQ ID NO: 23
atttcgtgattcgtttattttg

SEQ ID NO: 8909 - DNA, 20 bp, Artificial Sequence
  bisulfite treated nucleic acid for analysis of methylation status of SEQ ID NO: 23
cacgaaatcaaacgatccaa

SEQ ID NO: 8910 - DNA, 35 bp, Artificial Sequence
  bisulfite treated nucleic acid for analysis of methylation status of SEQ ID NO: 23
agtagagacggggttttatcgtgttatttaggatg

SEQ ID NO: 8911 - DNA, 20 bp, Artificial Sequence
  bisulfite treated nucleic acid for analysis of methylation status of SEQ ID NO: 23
tttggatcgtttgatttcgt

SEQ ID NO: 8912 - DNA, 19 bp, Artificial Sequence
  bisulfite treated nucleic acid for analysis of methylation status of SEQ ID NO: 23
tacaataacgcgatctccg

SEQ ID NO: 8913 - DNA, 22 bp, Artificial Sequence
  bisulfite treated nucleic acid for analysis of methylation status of SEQ ID NO: 21
ggtttgtttttcgcgtatatgt

SEQ ID NO: 8914 - DNA, 19 bp, Artificial Sequence
  bisulfite treated nucleic acid for analysis of methylation status of SEQ ID NO: 21
acgcactaccccgtcttac

SEQ ID NO: 8915 - DNA, 33 bp, Artificial Sequence
  bisulfite treated nucleic acid for analysis of methylation status of SEQ ID NO: 21
agggttattcgcgttgcgtttttgttttaggtg

SEQ ID NO: 8916 - DNA, 18 bp, Artificial Sequence
  bisulfite treated nucleic acid for analysis of methylation status of SEQ ID NO: 21
cgtcttaccgccctttct

SEQ ID NO: 8917 - DNA, 22 bp, Artificial Sequence
  bisulfite treated nucleic acid for analysis of methylation status of SEQ ID NO: 21
gcgaaccttaaaacgctaataa

SEQ ID NO: 8918 - DNA, 22 bp, Artificial Sequence
  bisulfite treated nucleic acid for analysis of methylation status of SEQ ID NO: 21
tatttgaagtagaggcgtagcg

SEQ ID NO: 8919 - DNA, 31 bp, Artificial Sequence
  nucleic acid for analysis of methylation status of SEQ ID NO: 21
tgattttgaatatgtgcgcgaggagtaggtt

SEQ ID NO: 8920 - DNA, 22 bp, Artificial Sequence
  bisulfite treated nucleic acid for analysis of methylation status of SEQ ID NO: 21
ctcgaaattaacctactcctcg

SEQ ID NO: 8921 - DNA, 22 bp, Artificial Sequence
  bisulfite treated nucleic acid for analysis of methylation status of SEQ ID NO: 21
acgtattgtttcgttttgtcgt

SEQ ID NO: 8922 - DNA, 27 bp, Artificial Sequence
  bisulfite treated nucleic acid for analysis of methylation status of SEQ ID NO: 21
tttgaagtagaggcgtagcgcggatga

SEQ ID NO: 8923 - DNA, 21 bp, Artificial Sequence
  bisulfite treated nucleic acid for analysis of methylation status of SEQ ID NO: 21
cgaaattaacctactcctcgc

SEQ ID NO: 8924 - DNA, 23 bp, Artificial Sequence
  bisulfite treated nucleic acid for analysis of methylation status of SEQ ID NO: 21
cgaacaaatataactacccgaaa

SEQ ID NO: 8925 - DNA, 22 bp, Artificial Sequence
  bisulfite treated nucleic acid for analysis of methylation status of SEQ ID NO: 21
ttattagcgttttaaggttcgc

SEQ ID NO: 8926 - DNA, 26 bp, Artificial Sequence
  bisulfite treated nucleic acid for analysis of methylation status of SEQ ID NO: 21
ggcgtagttgggcggtgtttttggga

SEQ ID NO: 8927 - DNA, 21 bp, Artificial Sequence
  bisulfite treated nucleic acid for analysis of methylation status of SEQ ID NO: 21
atttgaagtagaggcgtagcg

SEQ ID NO: 8928 - DNA, 21 bp, Artificial Sequence
  bisulfite treated nucleic acid for analysis of methylation status of SEQ ID NO: 21
cgtattgtttcgttttgtcgt

SEQ ID NO: 8929 - DNA, 22 bp, Artificial Sequence
  bisulfite treated nucleic acid for analysis of methylation status of SEQ ID NO: 21
tcgaaattaacctactcctcgc

SEQ ID NO: 8930 - DNA, 20 bp, Artificial Sequence
  bisulfite treated nucleic acid for analysis of methylation status of SEQ ID NO: 21
tttgaagtagaggcgtagcg

SEQ ID NO: 8931 - DNA, 20 bp, Artificial Sequence
  bisulfite treated nucleic acid for analysis of methylation status of SEQ ID NO: 21
ctactcctcgcgcacatatt

SEQ ID NO: 8932 - DNA, 23 bp, Artificial Sequence
  bisulfite treated nucleic acid for analysis of methylation status of SEQ ID NO: 21
gtatttgaagtagaggcgtagcg

SEQ ID NO: 8933 - DNA, 23 bp, Artificial Sequence
  bisulfite treated nucleic acid for analysis of methylation status of SEQ ID NO: 21
gttattagcgttttaaggttcgc

SEQ ID NO: 8934 - DNA, 20 bp, Artificial Sequence
  bisulfite treated nucleic acid for analysis of methylation status of SEQ ID NO: 21
tactcctcgcgcacatattc

SEQ ID NO: 8935 - DNA, 23 bp, Artificial Sequence
  bisulfite treated nucleic acid for analysis of methylation status of SEQ ID NO: 21
cgaaccttaaaacgctaataact

SEQ ID NO: 8936 - DNA, 23 bp, Artificial Sequence
  bisulfite treated nucleic acid for analysis of methylation status of SEQ ID NO: 21
aacgctaataactacctcgaaat

SEQ ID NO: 8937 - DNA, 21 bp, Artificial Sequence
  bisulfite treated nucleic acid for analysis of methylation status of SEQ ID NO: 21
tattagcgttttaaggttcgc

SEQ ID NO: 8938 - DNA, 22 bp, Artificial Sequence
  bisulfite treated nucleic acid for analysis of methylation status of SEQ ID NO: 32
ataatccgctaaatacgaacca

SEQ ID NO: 8939 - DNA, 22 bp, Artificial Sequence
  bisulfite treated nucleic acid for analysis of methylation status of SEQ ID NO: 32
agttatatgtcggttacgtgcg

SEQ ID NO: 8940 - DNA, 32 bp, Artificial Sequence
  bisulfite treated nucleic acid for analysis of methylation status of SEQ ID NO: 32
atcggcgggttttcgacgggaatggggagcgt

SEQ ID NO: 8941 - DNA, 21 bp, Artificial Sequence
  bisulfite treated nucleic acid for analysis of methylation status of SEQ ID NO: 32
gttatatgtcggttacgtgcg

SEQ ID NO: 8942 - DNA, 22 bp, Artificial Sequence
  bisulfite treated nucleic acid for analysis of methylation status of SEQ ID NO: 32
tatatgtcggttacgtgcgttt

SEQ ID NO: 8943 - DNA, 22 bp, Artificial Sequence
  bisulfite treated nucleic acid for analysis of methylation status of SEQ ID NO: 32
tatgtcggttacgtgcgtttat

SEQ ID NO: 8944 - DNA, 22 bp, Artificial Sequence
  bisulfite treated nucleic acid for analysis of methylation status of SEQ ID NO: 32
taatccgctaaatacgaaccaa

SEQ ID NO: 8945 - DNA, 22 bp, Artificial Sequence
  bisulfite treated nucleic acid for analysis of methylation status of SEQ ID NO: 32
atccgctaaatacgaaccaaaa

SEQ ID NO: 8946 - DNA, 22 bp, Artificial Sequence
  bisulfite treated nucleic acid for analysis of methylation status of SEQ ID NO: 32
gtcggttacgtgcgtttatatt

SEQ ID NO: 8947 - DNA, 24 bp, Artificial Sequence
  bisulfite treated nucleic acid for analysis of methylation status of SEQ ID NO: 32
ggcgggttttcgacgggaatgggg

SEQ ID NO: 8948 - DNA, 23 bp, Artificial Sequence
  bisulfite treated nucleic acid for analysis of methylation status of SEQ ID NO: 32
tataatccgctaaatacgaacca

SEQ ID NO: 8949 - DNA, 23 bp, Artificial Sequence
  bisulfite treated nucleic acid for analysis of methylation status of SEQ ID NO: 32
tagttatatgtcggttacgtgcg

SEQ ID NO: 8950 - DNA, 21 bp, Artificial Sequence
  bisulfite treated nucleic acid for analysis of methylation status of SEQ ID NO: 32
atatgtcggttacgtgcgttt

SEQ ID NO: 8951 - DNA, 21 bp, Artificial Sequence
  bisulfite treated nucleic acid for analysis of methylation status of SEQ ID NO: 32
atgtcggttacgtgcgtttat

SEQ ID NO: 8952 - DNA, 21 bp, Artificial Sequence
  bisulfite treated nucleic acid for analysis of methylation status of SEQ ID NO: 32
aatccgctaaatacgaaccaa

SEQ ID NO: 8953 - DNA, 21 bp, Artificial Sequence
  bisulfite treated nucleic acid for analysis of methylation status of SEQ ID NO: 32
tccgctaaatacgaaccaaaa

SEQ ID NO: 8954 - DNA, 23 bp, Artificial Sequence
  bisulfite treated nucleic acid for analysis of methylation status of SEQ ID NO: 32
ctataccccactacgaaatacga

SEQ ID NO: 8955 - DNA, 21 bp, Artificial Sequence
  bisulfite treated nucleic acid for analysis of methylation status of SEQ ID NO: 32
tatatgtcggttacgtgcgtt

SEQ ID NO: 8956 - DNA, 28 bp, Artificial Sequence
  bisulfite treated nucleic acid for analysis of methylation status of SEQ ID NO: 32
gggagcgttttggttcgtatttagcgga

SEQ ID NO: 8957 - DNA, 22 bp, Artificial Sequence
  bisulfite treated nucleic acid for analysis of methylation status of SEQ ID NO: 32
tataccccactacgaaatacga

SEQ ID NO: 8958 - DNA, 22 bp, Artificial Sequence
  bisulfite treated nucleic acid for analysis of methylation status of SEQ ID NO: 32
gctaaatacgaaccaaaacgct

SEQ ID NO: 8959 - DNA, 25 bp, Artificial Sequence
  bisulfite treated nucleic acid for analysis of methylation status of SEQ ID NO: 32
atcggcgggttttcgacgggaatgg

SEQ ID NO: 8960 - DNA, 20 bp, Artificial Sequence
  bisulfite treated nucleic acid for analysis of methylation status of SEQ ID NO: 32
ttatatgtcggttacgtgcg

SEQ ID NO: 8961 - DNA, 21 bp, Artificial Sequence
  bisulfite treated nucleic acid for analysis of methylation status of SEQ ID NO: 32
taatccgctaaatacgaacca

SEQ ID NO: 8962 - DNA, 20 bp, Artificial Sequence
  bisulfite treated nucleic acid for analysis of methylation status of SEQ ID NO: 32
ccgctaaatacgaaccaaaa

SEQ ID NO: 8963 - DNA, 20 bp, Artificial Sequence
  bisulfite treated nucleic acid for analysis of methylation status of SEQ ID NO: 32
tgtcggttacgtgcgtttat

SEQ ID NO: 8964 - DNA, 21 bp, Artificial Sequence
  bisulfite treated nucleic acid for analysis of methylation status of SEQ ID NO: 32
tcggttacgtgcgtttatatt

SEQ ID NO: 8965 - DNA, 24 bp, Artificial Sequence
  bisulfite treated nucleic acid for analysis of methylation status of SEQ ID NO: 32
atataatccgctaaatacgaacca

SEQ ID NO: 8966 - DNA, 24 bp, Artificial Sequence
  bisulfite treated nucleic acid for analysis of methylation status of SEQ ID NO: 32
atagttatatgtcggttacgtgcg

SEQ ID NO: 8967 - DNA, 22 bp, Artificial Sequence
  bisulfite treated nucleic acid for analysis of methylation status of SEQ ID NO: 32
ctaaatacgaaccaaaacgctc

SEQ ID NO: 8968 - DNA, 23 bp, Artificial Sequence
  bisulfite treated nucleic acid for analysis of methylation status of SEQ ID NO: 32
atagttatatgtcggttacgtgc

SEQ ID NO: 8969 - DNA, 21 bp, Artificial Sequence
  bisulfite treated nucleic acid for analysis of methylation status of SEQ ID NO: 32
ctaaatacgaaccaaaacgct

SEQ ID NO: 8970 - DNA, 21 bp, Artificial Sequence
  bisulfite treated nucleic acid for analysis of methylation status of SEQ ID NO: 32
ataccccactacgaaatacga

SEQ ID NO: 8971 - DNA, 20 bp, Artificial Sequence
  bisulfite treated nucleic acid for analysis of methylation status of SEQ ID NO: 32
aatccgctaaatacgaacca

SEQ ID NO: 8972 - DNA, 20 bp, Artificial Sequence
  bisulfite treated nucleic acid for analysis of methylation status of SEQ ID NO: 32
aatacgaaccaaaacgctcc

SEQ ID NO: 8973 - DNA, 26 bp, Artificial Sequence
  bisulfite treated nucleic acid for analysis of methylation status of SEQ ID NO: 32
agttaatcggcgggttttcgacggga

SEQ ID NO: 8974 - DNA, 22 bp, Artificial Sequence
  bisulfite treated nucleic acid for analysis of methylation status of SEQ ID NO: 32
atatgtcggttacgtgcgttta

SEQ ID NO: 8975 - DNA, 20 bp, Artificial Sequence
  bisulfite treated nucleic acid for analysis of methylation status of SEQ ID NO: 32
ttagttaatcggcgggtttt

SEQ ID NO: 8976 - DNA, 20 bp, Artificial Sequence
  bisulfite treated nucleic acid for analysis of methylation status of SEQ ID NO: 32
tttagttaatcggcgggttt

SEQ ID NO: 8977 - DNA, 19 bp, Artificial Sequence
  bisulfite treated nucleic acid for analysis of methylation status of SEQ ID NO: 32
atacgaaccaaaacgctcc

SEQ ID NO: 8978 - DNA, 20 bp, Artificial Sequence
  bisulfite treated nucleic acid for analysis of methylation status of SEQ ID NO: 32
tagttaatcggcgggttttc

SEQ ID NO: 8979 - DNA, 19 bp, Artificial Sequence
  bisulfite treated nucleic acid for analysis of methylation status of SEQ ID NO: 32
gtcggttacgtgcgtttat

SEQ ID NO: 8980 - DNA, 23 bp, Artificial Sequence
  bisulfite treated nucleic acid for analysis of methylation status of SEQ ID NO: 33
cgaggtagttttattgtttagcg

SEQ ID NO: 8981 - DNA, 22 bp, Artificial Sequence
  bisulfite treated nucleic acid for analysis of methylation status of SEQ ID NO: 33
atccataatatccgaaacgaac

SEQ ID NO: 8982 - DNA, 29 bp, Artificial Sequence
  bisulfite treated nucleic acid for analysis of methylation status of SEQ ID NO: 33
ttcgtcggtttttgtttcgcgtttaggga

SEQ ID NO: 8983 - DNA, 21 bp, Artificial Sequence
  bisulfite treated nucleic acid for analysis of methylation status of SEQ ID NO: 33
cataatatccgaaacgaacga

SEQ ID NO: 8984 - DNA, 22 bp, Artificial Sequence
  bisulfite treated nucleic acid for analysis of methylation status of SEQ ID NO: 33
gttcgtttcggatattatggat

SEQ ID NO: 8985 - DNA, 20 bp, Artificial Sequence
  bisulfite treated nucleic acid for analysis of methylation status of SEQ ID NO: 33
gaacactcaccgatctacgc

SEQ ID NO: 8986 - DNA, 33 bp, Artificial Sequence
  bisulfite treated nucleic acid for analysis of methylation status of SEQ ID NO: 33
ttggtggtacgtagtttggggattttgtttcgt

SEQ ID NO: 8987 - DNA, 23 bp, Artificial Sequence
  bisulfite treated nucleic acid for analysis of methylation status of SEQ ID NO: 33
tatccataatatccgaaacgaac

SEQ ID NO: 8988 - DNA, 24 bp, Artificial Sequence
  bisulfite treated nucleic acid for analysis of methylation status of SEQ ID NO: 33
tcgaggtagttttattgtttagcg

SEQ ID NO: 8989 - DNA, 20 bp, Artificial Sequence
  bisulfite treated nucleic acid for analysis of methylation status of SEQ ID NO: 33
gtttcgcgtttagggatttt

SEQ ID NO: 8990 - DNA, 22 bp, Artificial Sequence
  bisulfite treated nucleic acid for analysis of methylation status of SEQ ID NO: 33
caaactacgacgaacactcacc

SEQ ID NO: 8991 - DNA, 29 bp, Artificial Sequence
  nucleic acid for analysis of methylation status of SEQ ID NO: 33
ttgtttcgtgtcgttgagtttggcgtaga

SEQ ID NO: 8992 - DNA, 22 bp, Artificial Sequence
  bisulfite treated nucleic acid for analysis of methylation status of SEQ ID NO: 33
ccaaactacgacgaacactcac

SEQ ID NO: 8993 - DNA, 21 bp, Artificial Sequence
  bisulfite treated nucleic acid for analysis of methylation status of SEQ ID NO: 33
ccataatatccgaaacgaacg

SEQ ID NO: 8994 - DNA, 21 bp, Artificial Sequence
  bisulfite treated nucleic acid for analysis of methylation status of SEQ ID NO: 33
tccataatatccgaaacgaac

SEQ ID NO: 8995 - DNA, 21 bp, Artificial Sequence
  bisulfite treated nucleic acid for analysis of methylation status of SEQ ID NO: 33
gacgaacactcaccgatctac

SEQ ID NO: 8996 - DNA, 38 bp, Artificial Sequence
  bisulfite treated nucleic acid for analysis of methylation status of SEQ ID NO: 33
ttttcgttcgtttcggatattatggataagttttggtg

SEQ ID NO: 8997 - DNA, 19 bp, Artificial Sequence
  bisulfite treated nucleic acid for analysis of methylation status of SEQ ID NO: 33
accgatctacgccaaactc

SEQ ID NO: 8998 - DNA, 23 bp, Artificial Sequence
  bisulfite treated nucleic acid for analysis of methylation status of SEQ ID NO: 33
tcgtcgtagtttgggtagtaaga

SEQ ID NO: 8999 - DNA, 19 bp, Artificial Sequence
  bisulfite treated nucleic acid for analysis of methylation status of SEQ ID NO: 33
aaaaccgactcaaccgaaa

SEQ ID NO: 9000 - DNA, 22 bp, Artificial Sequence
  bisulfite treated nucleic acid for analysis of methylation status of SEQ ID NO: 33
ggtgcggggtgtttagcgcgga

SEQ ID NO: 9001 - DNA, 20 bp, Artificial Sequence
  bisulfite treated nucleic acid for analysis of methylation status of SEQ ID NO: 33
gtttttgtttcgcgtttagg

SEQ ID NO: 9002 - DNA, 20 bp, Artificial Sequence
  bisulfite treated nucleic acid for analysis of methylation status of SEQ ID NO: 33
ggtttttgtttcgcgtttag

SEQ ID NO: 9003 - DNA, 20 bp, Artificial Sequence
  bisulfite treated nucleic acid for analysis of methylation status of SEQ ID NO: 33
cgaacactcaccgatctacg

SEQ ID NO: 9004 - DNA, 21 bp, Artificial Sequence
  bisulfite treated nucleic acid for analysis of methylation status of SEQ ID NO: 33
aaactacgacgaacactcacc

SEQ ID NO: 9005 - DNA, 20 bp, Artificial Sequence
  bisulfite treated nucleic acid for analysis of methylation status of SEQ ID NO: 33
tttcgcgtttagggattttt

SEQ ID NO: 9006 - DNA, 19 bp, Artificial Sequence
  bisulfite treated nucleic acid for analysis of methylation status of SEQ ID NO: 33
cgatctacgccaaactcaa

SEQ ID NO: 9007 - DNA, 21 bp, Artificial Sequence
  bisulfite treated nucleic acid for analysis of methylation status of SEQ ID NO: 33
ttcgtttcggatattatggat

SEQ ID NO: 9008 - DNA, 23 bp, Artificial Sequence
  bisulfite treated nucleic acid for analysis of methylation status of SEQ ID NO: 33
ttcgtcgtagtttgggtagtaag

SEQ ID NO: 9009 - DNA, 19 bp, Artificial Sequence
  bisulfite treated nucleic acid for analysis of methylation status of SEQ ID NO: 33
aaaccgactcaaccgaaaa

SEQ ID NO: 9010 - DNA, 21 bp, Artificial Sequence
  bisulfite treated nucleic acid for analysis of methylation status of SEQ ID NO: 33
ccaaactacgacgaacactca

SEQ ID NO: 9011 - DNA, 19 bp, Artificial Sequence
  bisulfite treated nucleic acid for analysis of methylation status of SEQ ID NO: 33
acactcaccgatctacgcc

SEQ ID NO: 9012 - DNA, 21 bp, Artificial Sequence
  bisulfite treated nucleic acid for analysis of methylation status of SEQ ID NO: 33
cgttcgtttcggatattatgg

SEQ ID NO: 9013 - DNA, 22 bp, Artificial Sequence
  bisulfite treated nucleic acid for analysis of methylation status of SEQ ID NO: 33
tacctcgtaccgctaaacctaa

SEQ ID NO: 9014 - DNA, 22 bp, Artificial Sequence
  bisulfite treated nucleic acid for analysis of methylation status of SEQ ID NO: 33
gttcgcgttgagtatttcgtat

SEQ ID NO: 9015 - DNA, 30 bp, Artificial Sequence
  bisulfite treated nucleic acid for analysis of methylation status of SEQ ID NO: 33
tgtttaggttgcggcgggtatttatcgatt

SEQ ID NO: 9016 - DNA, 22 bp, Artificial Sequence
  bisulfite treated nucleic acid for analysis of methylation status of SEQ ID NO: 33
ctacctcgtaccgctaaaccta

SEQ ID NO: 9017 - DNA, 22 bp, Artificial Sequence
  bisulfite treated nucleic acid for analysis of methylation status of SEQ ID NO: 33
tcgcgttgagtatttcgtattt

SEQ ID NO: 9018 - DNA, 22 bp, Artificial Sequence
  bisulfite treated nucleic acid for analysis of methylation status of SEQ ID NO: 33
ttcgcgttgagtatttcgtatt

SEQ ID NO: 9019 - DNA, 22 bp, Artificial Sequence
  bisulfite treated nucleic acid for analysis of methylation status of SEQ ID NO: 33
aactctacctcgtaccgctaaa

SEQ ID NO: 9020 - DNA, 22 bp, Artificial Sequence
  bisulfite treated nucleic acid for analysis of methylation status of SEQ ID NO: 33
aaactctacctcgtaccgctaa

SEQ ID NO: 9021 - DNA, 22 bp, Artificial Sequence
  bisulfite treated nucleic acid for analysis of methylation status of SEQ ID NO: 33
cgcgttgagtatttcgtattta

SEQ ID NO: 9022 - DNA, 22 bp, Artificial Sequence
  bisulfite treated nucleic acid for analysis of methylation status of SEQ ID NO: 33
acctcgtaccgctaaacctaac

SEQ ID NO: 9023 - DNA, 21 bp, Artificial Sequence
  bisulfite treated nucleic acid for analysis of methylation status of SEQ ID NO: 33
cctcgtaccgctaaacctaac

SEQ ID NO: 9024 - DNA, 23 bp, Artificial Sequence
  bisulfite treated nucleic acid for analysis of methylation status of SEQ ID NO: 33
cgcgttgagtatttcgtatttat

SEQ ID NO: 9025 - DNA, 22 bp, Artificial Sequence
  bisulfite treated nucleic acid for analysis of methylation status of SEQ ID NO: 33
attttacgattcgatcatcctc

SEQ ID NO: 9026 - DNA, 22 bp, Artificial Sequence
  bisulfite treated nucleic acid for analysis of methylation status of SEQ ID NO: 33
ttttgcgtttagagacgtattg

SEQ ID NO: 9027 - DNA, 27 bp, Artificial Sequence
  bisulfite treated nucleic acid for analysis of methylation status of SEQ ID NO: 33
ttttcgttggtttcgcggcgttaggat

SEQ ID NO: 9028 - DNA, 22 bp, Artificial Sequence
  bisulfite treated nucleic acid for analysis of methylation status of SEQ ID NO: 33
actctacctcgtaccgctaaac

SEQ ID NO: 9029 - DNA, 22 bp, Artificial Sequence
  bisulfite treated nucleic acid for analysis of methylation status of SEQ ID NO: 33
taaaaactctacctcgtaccgc

SEQ ID NO: 9030 - DNA, 21 bp, Artificial Sequence
  bisulfite treated nucleic acid for analysis of methylation status of SEQ ID NO: 33
ttagggtcgatttagtcggag

SEQ ID NO: 9031 - DNA, 28 bp, Artificial Sequence
  bisulfite treated nucleic acid for analysis of methylation status of SEQ ID NO: 33
gtcgtcgggttcgcgttgagtatttcgt

SEQ ID NO: 9032 - DNA, 22 bp, Artificial Sequence
  bisulfite treated nucleic acid for analysis of methylation status of SEQ ID NO: 33
tctacctcgtaccgctaaacct

SEQ ID NO: 9033 - DNA, 22 bp, Artificial Sequence
  bisulfite treated nucleic acid for analysis of methylation status of SEQ ID NO: 33
ctctacctcgtaccgctaaacc

SEQ ID NO: 9034 - DNA, 22 bp, Artificial Sequence
  bisulfite treated nucleic acid for analysis of methylation status of SEQ ID NO: 33
aaaaactctacctcgtaccgct

SEQ ID NO: 9035 - DNA, 22 bp, Artificial Sequence
  bisulfite treated nucleic acid for analysis of methylation status of SEQ ID NO: 33
aattttacgattcgatcatcct

SEQ ID NO: 9036 - DNA, 22 bp, Artificial Sequence
  bisulfite treated nucleic acid for analysis of methylation status of SEQ ID NO: 33
tttagggtcgatttagtcggag

SEQ ID NO: 9037 - DNA, 23 bp, Artificial Sequence
  bisulfite treated nucleic acid for analysis of methylation status of SEQ ID NO: 33
aactctacctcgtaccgctaaac

SEQ ID NO: 9038 - DNA, 22 bp, Artificial Sequence
  bisulfite treated nucleic acid for analysis of methylation status of SEQ ID NO: 33
ttttacgattcgatcatcctct

SEQ ID NO: 9039 - DNA, 22 bp, Artificial Sequence
  bisulfite treated nucleic acid for analysis of methylation status of SEQ ID NO: 33
tttttgcgtttagagacgtatt

SEQ ID NO: 9040 - DNA, 27 bp, Artificial Sequence
  bisulfite treated nucleic acid for analysis of methylation status of SEQ ID NO: 33
tttttcgttggtttcgcggcgttagga

SEQ ID NO: 9041 - DNA, 23 bp, Artificial Sequence
  bisulfite treated nucleic acid for analysis of methylation status of SEQ ID NO: 33
gtttttgcgtttagagacgtatt

SEQ ID NO: 9042 - DNA, 23 bp, Artificial Sequence
  bisulfite treated nucleic acid for analysis of methylation status of SEQ ID NO: 33
tttttgcgtttagagacgtattg

SEQ ID NO: 9043 - DNA, 22 bp, Artificial Sequence
  bisulfite treated nucleic acid for analysis of methylation status of SEQ ID NO: 33
tttgcgtttagagacgtattgg

SEQ ID NO: 9044 - DNA, 21 bp, Artificial Sequence
  bisulfite treated nucleic acid for analysis of methylation status of SEQ ID NO: 33
ctcgtaccgctaaacctaacg

SEQ ID NO: 9045 - DNA, 21 bp, Artificial Sequence
  bisulfite treated nucleic acid for analysis of methylation status of SEQ ID NO: 33
cgagttttattggtttttgcg

SEQ ID NO: 9046 - DNA, 23 bp, Artificial Sequence
  bisulfite treated nucleic acid for analysis of methylation status of SEQ ID NO: 33
cctaaaaactctacctcgtaccg

SEQ ID NO: 9047 - DNA, 20 bp, Artificial Sequence
  bisulfite treated nucleic acid for analysis of methylation status of SEQ ID NO: 33
tcgtaccgctaaacctaacg

SEQ ID NO: 9048 - DNA, 23 bp, Artificial Sequence
  bisulfite treated nucleic acid for analysis of methylation status of SEQ ID NO: 33
ctaaaaactctacctcgtaccgc

SEQ ID NO: 9049 - DNA, 21 bp, Artificial Sequence
  bisulfite treated nucleic acid for analysis of methylation status of SEQ ID NO: 33
aaaactctacctcgtaccgct

SEQ ID NO: 9050 - DNA, 19 bp, Artificial Sequence
  bisulfite treated nucleic acid for analysis of methylation status of SEQ ID NO: 33
gggttcgcgttgagtattt

SEQ ID NO: 9051 - DNA, 20 bp, Artificial Sequence
  bisulfite treated nucleic acid for analysis of methylation status of SEQ ID NO: 33
tagggtcgatttagtcggag

SEQ ID NO: 9052 - DNA, 24 bp, Artificial Sequence
  bisulfite treated nucleic acid for analysis of methylation status of SEQ ID NO: 33
ggtttttgcgtttagagacgtatt

SEQ ID NO: 9053 - DNA, 19 bp, Artificial Sequence
  bisulfite treated nucleic acid for analysis of methylation status of SEQ ID NO: 33
cgatttagtcggaggggtt

SEQ ID NO: 9054 - DNA, 21 bp, Artificial Sequence
  bisulfite treated nucleic acid for analysis of methylation status of SEQ ID NO: 33
acctcgtaccgctaaacctaa

SEQ ID NO: 9055 - DNA, 24 bp, Artificial Sequence
  bisulfite treated nucleic acid for analysis of methylation status of SEQ ID NO: 34
gattaagattttcggttagtttcg

SEQ ID NO: 9056 - DNA, 22 bp, Artificial Sequence
  bisulfite treated nucleic acid for analysis of methylation status of SEQ ID NO: 34
aaaattcactacaacgctacgc

SEQ ID NO: 9057 - DNA, 36 bp, Artificial Sequence
  bisulfite treated nucleic acid for analysis of methylation status of SEQ ID NO: 34
ttcgggttattacgttttttatgtgattcgtttggg

SEQ ID NO: 9058 - DNA, 22 bp, Artificial Sequence
  bisulfite treated nucleic acid for analysis of methylation status of SEQ ID NO: 34
ttaagattttcggttagtttcg

SEQ ID NO: 9059 - DNA, 37 bp, Artificial Sequence
  bisulfite treated nucleic acid for analysis of methylation status of SEQ ID NO: 34
tttttatgtgattcgtttgggtaacgtcgaatttagt

SEQ ID NO: 9060 - DNA, 20 bp, Artificial Sequence
  bisulfite treated nucleic acid for analysis of methylation status of SEQ ID NO: 34
gcggacgtaatagtcgagaa

SEQ ID NO: 9061 - DNA, 22 bp, Artificial Sequence
  bisulfite treated nucleic acid for analysis of methylation status of SEQ ID NO: 34
aaaaacgtaataacccgaaaaa

SEQ ID NO: 9062 - DNA, 35 bp, Artificial Sequence
  bisulfite treated nucleic acid for analysis of methylation status of SEQ ID NO: 34
aggagttgggattaagattttcggttagtttcgta

SEQ ID NO: 9063 - DNA, 20 bp, Artificial Sequence
  bisulfite treated nucleic acid for analysis of methylation status of SEQ ID NO: 34
tttttcggttttgacggtat

SEQ ID NO: 9064 - DNA, 22 bp, Artificial Sequence
  bisulfite treated nucleic acid for analysis of methylation status of SEQ ID NO: 34
tattctcgactattacgtccgc

SEQ ID NO: 9065 - DNA, 34 bp, Artificial Sequence
  bisulfite treated nucleic acid for analysis of methylation status of SEQ ID NO: 34
ttcgtatttgaatttgtaggcgagttgtttcgag

SEQ ID NO: 9066 - DNA, 24 bp, Artificial Sequence
  bisulfite treated nucleic acid for analysis of methylation status of SEQ ID NO: 34
gattttcggttagtttcgtatttt

SEQ ID NO: 9067 - DNA, 20 bp, Artificial Sequence
  bisulfite treated nucleic acid for analysis of methylation status of SEQ ID NO: 34
gtgcggacgtaatagtcgag

SEQ ID NO: 9068 - DNA, 22 bp, Artificial Sequence
  bisulfite treated nucleic acid for analysis of methylation status of SEQ ID NO: 34
tttcggttagtttcgtattttt

SEQ ID NO: 9069 - DNA, 22 bp, Artificial Sequence
  bisulfite treated nucleic acid for analysis of methylation status of SEQ ID NO: 34
ttttcggttagtttcgtatttt

SEQ ID NO: 9070 - DNA, 22 bp, Artificial Sequence
  bisulfite treated nucleic acid for analysis of methylation status of SEQ ID NO: 34
taagattttcggttagtttcgt

SEQ ID NO: 9071 - DNA, 21 bp, Artificial Sequence
  bisulfite treated nucleic acid for analysis of methylation status of SEQ ID NO: 34
cgtatttgaatttgtaggcga

SEQ ID NO: 9072 - DNA, 24 bp, Artificial Sequence
  bisulfite treated nucleic acid for analysis of methylation status of SEQ ID NO: 34
cgaaactaaccgaaaatcttaatc

SEQ ID NO: 9073 - DNA, 27 bp, Artificial Sequence
  bisulfite treated nucleic acid for analysis of methylation status of SEQ ID NO: 34
ggggaagaattttaggcgtgcggacgt

SEQ ID NO: 9074 - DNA, 21 bp, Artificial Sequence
  bisulfite treated nucleic acid for analysis of methylation status of SEQ ID NO: 34
tcgtatttgaatttgtaggcg

SEQ ID NO: 9075 - DNA, 23 bp, Artificial Sequence
  bisulfite treated nucleic acid for analysis of methylation status of SEQ ID NO: 34
attaagattttcggttagtttcg

SEQ ID NO: 9076 - DNA, 38 bp, Artificial Sequence
  bisulfite treated nucleic acid for analysis of methylation status of SEQ ID NO: 34
gttttttatgtgattcgtttgggtaacgtcgaatttag

SEQ ID NO: 9077 - DNA, 25 bp, Artificial Sequence
  bisulfite treated nucleic acid for analysis of methylation status of SEQ ID NO: 34
agattttcggttagtttcgtatttt

SEQ ID NO: 9078 - DNA, 25 bp, Artificial Sequence
  bisulfite treated nucleic acid for analysis of methylation status of SEQ ID NO: 34
aagattttcggttagtttcgtattt

SEQ ID NO: 9079 - DNA, 22 bp, Artificial Sequence
  bisulfite treated nucleic acid for analysis of methylation status of SEQ ID NO: 34
ttcgtatttgaatttgtaggcg

SEQ ID NO: 9080 - DNA, 22 bp, Artificial Sequence
  bisulfite treated nucleic acid for analysis of methylation status of SEQ ID NO: 34
ttttcggttttgacggtatagt

SEQ ID NO: 9081 - DNA, 19 bp, Artificial Sequence
  bisulfite treated nucleic acid for analysis of methylation status of SEQ ID NO: 34
cgcacgcctaaaattcttc

SEQ ID NO: 9082 - DNA, 22 bp, Artificial Sequence
  bisulfite treated nucleic acid for analysis of methylation status of SEQ ID NO: 34
tttttcggttttgacggtatag

SEQ ID NO: 9083 - DNA, 22 bp, Artificial Sequence
  bisulfite treated nucleic acid for analysis of methylation status of SEQ ID NO: 34
aaaaattcactacaacgctacg

SEQ ID NO: 9084 - DNA, 22 bp, Artificial Sequence
  bisulfite treated nucleic acid for analysis of methylation status of SEQ ID NO: 34
tcggttttgacggtatagtgat

SEQ ID NO: 9085 - DNA, 22 bp, Artificial Sequence
  bisulfite treated nucleic acid for analysis of methylation status of SEQ ID NO: 34
acgaaactaaccgaaaatctta

SEQ ID NO: 9086 - DNA, 21 bp, Artificial Sequence
  bisulfite treated nucleic acid for analysis of methylation status of SEQ ID NO: 34
attctcgactattacgtccgc

SEQ ID NO: 9087 - DNA, 21 bp, Artificial Sequence
  bisulfite treated nucleic acid for analysis of methylation status of SEQ ID NO: 34
aaattcactacaacgctacgc

SEQ ID NO: 9088 - DNA, 20 bp, Artificial Sequence
  bisulfite treated nucleic acid for analysis of methylation status of SEQ ID NO: 34
tgcggacgtaatagtcgaga

SEQ ID NO: 9089 - DNA, 22 bp, Artificial Sequence
  bisulfite treated nucleic acid for analysis of methylation status of SEQ ID NO: 34
tttcggttttgacggtatagtg

SEQ ID NO: 9090 - DNA, 21 bp, Artificial Sequence
  bisulfite treated nucleic acid for analysis of methylation status of SEQ ID NO: 34
ttcggttttgacggtatagtg

SEQ ID NO: 9091 - DNA, 20 bp, Artificial Sequence
  bisulfite treated nucleic acid for analysis of methylation status of SEQ ID NO: 34
ttctcgactattacgtccgc

SEQ ID NO: 9092 - DNA, 23 bp, Artificial Sequence
  bisulfite treated nucleic acid for analysis of methylation status of SEQ ID NO: 34
tacgaaactaaccgaaaatctta

SEQ ID NO: 9093 - DNA, 20 bp, Artificial Sequence
  bisulfite treated nucleic acid for analysis of methylation status of SEQ ID NO: 34
aacgctacgcgactaaattc

SEQ ID NO: 9094 - DNA, 21 bp, Artificial Sequence
  bisulfite treated nucleic acid for analysis of methylation status of SEQ ID NO: 34
caacgctacgcgactaaattc

SEQ ID NO: 9095 - DNA, 21 bp, Artificial Sequence
  bisulfite treated nucleic acid for analysis of methylation status of SEQ ID NO: 34
aaaacgtaataacccgaaaaa

SEQ ID NO: 9096 - DNA, 17 bp, Artificial Sequence
  bisulfite treated nucleic acid for analysis of methylation status of SEQ ID NO: 34
ccgcacgcctaaaattc

SEQ ID NO: 9097 - DNA, 24 bp, Artificial Sequence
  bisulfite treated nucleic acid for analysis of methylation status of SEQ ID NO: 34
atacgaaactaaccgaaaatctta

SEQ ID NO: 9098 - DNA, 19 bp, Artificial Sequence
  bisulfite treated nucleic acid for analysis of methylation status of SEQ ID NO: 34
cactacaacgctacgcgac

SEQ ID NO: 9099 - DNA, 22 bp, Artificial Sequence
  bisulfite treated nucleic acid for analysis of methylation status of SEQ ID NO: 34
tcctcctcgactctaacgatac

SEQ ID NO: 9100 - DNA, 20 bp, Artificial Sequence
  bisulfite treated nucleic acid for analysis of methylation status of SEQ ID NO: 34
taatgttttcggttgttgcg

SEQ ID NO: 9101 - DNA, 32 bp, Artificial Sequence
  bisulfite treated nucleic acid for analysis of methylation status of SEQ ID NO: 34
ggggtagttcgtttgtaagtttaaatgcgggt

SEQ ID NO: 9102 - DNA, 18 bp, Artificial Sequence
  bisulfite treated nucleic acid for analysis of methylation status of SEQ ID NO: 34
atgttttcggttgttgcg

SEQ ID NO: 9103 - DNA, 22 bp, Artificial Sequence
  bisulfite treated nucleic acid for analysis of methylation status of SEQ ID NO: 34
aatctcctcctcgactctaacg

SEQ ID NO: 9104 - DNA, 21 bp, Artificial Sequence
  bisulfite treated nucleic acid for analysis of methylation status of SEQ ID NO: 34
ctcctcctcgactctaacgat

SEQ ID NO: 9105 - DNA, 21 bp, Artificial Sequence
  bisulfite treated nucleic acid for analysis of methylation status of SEQ ID NO: 34
atctcctcctcgactctaacg

SEQ ID NO: 9106 - DNA, 19 bp, Artificial Sequence
  bisulfite treated nucleic acid for analysis of methylation status of SEQ ID NO: 34
aatgttttcggttgttgcg

SEQ ID NO: 9107 - DNA, 22 bp, Artificial Sequence
  bisulfite treated nucleic acid for analysis of methylation status of SEQ ID NO: 34
tctcctcctcgactctaacgat

SEQ ID NO: 9108 - DNA, 19 bp, Artificial Sequence
  bisulfite treated nucleic acid for analysis of methylation status of SEQ ID NO: 34
atgttttcggttgttgcgt

SEQ ID NO: 9109 - DNA, 19 bp, Artificial Sequence
  bisulfite treated nucleic acid for analysis of methylation status of SEQ ID NO: 34
gttttcggttgttgcgttc

SEQ ID NO: 9110 - DNA, 18 bp, Artificial Sequence
  bisulfite treated nucleic acid for analysis of methylation status of SEQ ID NO: 34
ttttcggttgttgcgttc

SEQ ID NO: 9111 - DNA, 22 bp, Artificial Sequence
  bisulfite treated nucleic acid for analysis of methylation status of SEQ ID NO: 34
atctcctcctcgactctaacga

SEQ ID NO: 9112 - DNA, 17 bp, Artificial Sequence
  bisulfite treated nucleic acid for analysis of methylation status of SEQ ID NO: 34
tgttttcggttgttgcg

SEQ ID NO: 9113 - DNA, 22 bp, Artificial Sequence
  bisulfite treated nucleic acid for analysis of methylation status of SEQ ID NO: 24
acgtgagttgtagggaaacgta

SEQ ID NO: 9114 - DNA, 22 bp, Artificial Sequence
  bisulfite treated nucleic acid for analysis of methylation status of SEQ ID NO: 24
ctaaattccgaaacgacgataa

SEQ ID NO: 9115 - DNA, 33 bp, Artificial Sequence
  bisulfite treated nucleic acid for analysis of methylation status of SEQ ID NO: 24
gggcggtttttaggtgttgtcgtcgttatcgtt

SEQ ID NO: 9116 - DNA, 22 bp, Artificial Sequence
  bisulfite treated nucleic acid for analysis of methylation status of SEQ ID NO: 24
cgtgagttgtagggaaacgtag

SEQ ID NO: 9117 - DNA, 33 bp, Artificial Sequence
  bisulfite treated nucleic acid for analysis of methylation status of SEQ ID NO: 24
ggcggtttttaggtgttgtcgtcgttatcgtta

SEQ ID NO: 9118 - DNA, 22 bp, Artificial Sequence
  bisulfite treated nucleic acid for analysis of methylation status of SEQ ID NO: 24
tagtttttgagttaatcggcgt

SEQ ID NO: 9119 - DNA, 21 bp, Artificial Sequence
  bisulfite treated nucleic acid for analysis of methylation status of SEQ ID NO: 24
ataataaaacgctcacgaccc

SEQ ID NO: 9120 - DNA, 28 bp, Artificial Sequence
  bisulfite treated nucleic acid for analysis of methylation status of SEQ ID NO: 24
atcgtgaaggtcgaacgcgttttttcgg

SEQ ID NO: 9121 - DNA, 22 bp, Artificial Sequence
  bisulfite treated nucleic acid for analysis of methylation status of SEQ ID NO: 24
tccgaaacgacgataaaaataa

SEQ ID NO: 9122 - DNA, 22 bp, Artificial Sequence
  bisulfite treated nucleic acid for analysis of methylation status of SEQ ID NO: 24
taaattccgaaacgacgataaa

SEQ ID NO: 9123 - DNA, 22 bp, Artificial Sequence
  bisulfite treated nucleic acid for analysis of methylation status of SEQ ID NO: 24
ttccgaaacgacgataaaaata

SEQ ID NO: 9124 - DNA, 22 bp, Artificial Sequence
  bisulfite treated nucleic acid for analysis of methylation status of SEQ ID NO: 24
aataataaaacgctcacgaccc

SEQ ID NO: 9125 - DNA, 21 bp, Artificial Sequence
  bisulfite treated nucleic acid for analysis of methylation status of SEQ ID NO: 24
tacgtgagttgtagggaaacg

SEQ ID NO: 9126 - DNA, 22 bp, Artificial Sequence
  bisulfite treated nucleic acid for analysis of methylation status of SEQ ID NO: 24
ttacgtgagttgtagggaaacg

SEQ ID NO: 9127 - DNA, 22 bp, Artificial Sequence
  bisulfite treated nucleic acid for analysis of methylation status of SEQ ID NO: 24
attccgaaacgacgataaaaat

SEQ ID NO: 9128 - DNA, 21 bp, Artificial Sequence
  bisulfite treated nucleic acid for analysis of methylation status of SEQ ID NO: 24
tcgggtttacgtgagttgtag

SEQ ID NO: 9129 - DNA, 22 bp, Artificial Sequence
  bisulfite treated nucleic acid for analysis of methylation status of SEQ ID NO: 24
ttcgggtttacgtgagttgtag

SEQ ID NO: 9130 - DNA, 22 bp, Artificial Sequence
  bisulfite treated nucleic acid for analysis of methylation status of SEQ ID NO: 24
gtgttcgatttttcgtcgttat

SEQ ID NO: 9131 - DNA, 21 bp, Artificial Sequence
  bisulfite treated nucleic acid for analysis of methylation status of SEQ ID NO: 24
acgcaaaccgatccattatac

SEQ ID NO: 9132 - DNA, 36 bp, Artificial Sequence
  bisulfite treated nucleic acid for analysis of methylation status of SEQ ID NO: 24
ggatttgcgtgtggtattgtttaagtttttcgtttt

SEQ ID NO: 9133 - DNA, 22 bp, Artificial Sequence
  bisulfite treated nucleic acid for analysis of methylation status of SEQ ID NO: 24
aaaaataataaaacgctcacga

SEQ ID NO: 9134 - DNA, 21 bp, Artificial Sequence
  bisulfite treated nucleic acid for analysis of methylation status of SEQ ID NO: 24
aaaaacgaaaactccatacgc

SEQ ID NO: 9135 - DNA, 20 bp, Artificial Sequence
  bisulfite treated nucleic acid for analysis of methylation status of SEQ ID NO: 24
cgcaaaccgatccattatac

SEQ ID NO: 9136 - DNA, 21 bp, Artificial Sequence
  bisulfite treated nucleic acid for analysis of methylation status of SEQ ID NO: 24
agtttttgagttaatcggcgt

SEQ ID NO: 9137 - DNA, 20 bp, Artificial Sequence
  bisulfite treated nucleic acid for analysis of methylation status of SEQ ID NO: 24
taataaaacgctcacgaccc

SEQ ID NO: 9138 - DNA, 21 bp, Artificial Sequence
  bisulfite treated nucleic acid for analysis of methylation status of SEQ ID NO: 24
aattccgaaacgacgataaaa

SEQ ID NO: 9139 - DNA, 21 bp, Artificial Sequence
  bisulfite treated nucleic acid for analysis of methylation status of SEQ ID NO: 24
aaattccgaaacgacgataaa

SEQ ID NO: 9140 - DNA, 21 bp, Artificial Sequence
  bisulfite treated nucleic acid for analysis of methylation status of SEQ ID NO: 24
aaacctaaattccgaaacgac

SEQ ID NO: 9141 - DNA, 22 bp, Artificial Sequence
  bisulfite treated nucleic acid for analysis of methylation status of SEQ ID NO: 24
tgttcgatttttcgtcgttatt

SEQ ID NO: 9142 - DNA, 22 bp, Artificial Sequence
  bisulfite treated nucleic acid for analysis of methylation status of SEQ ID NO: 24
caaacctaaattccgaaacgac

SEQ ID NO: 9143 - DNA, 20 bp, Artificial Sequence
  bisulfite treated nucleic acid for analysis of methylation status of SEQ ID NO: 24
taatttttcgaggttttgcg

SEQ ID NO: 9144 - DNA, 22 bp, Artificial Sequence
  bisulfite treated nucleic acid for analysis of methylation status of SEQ ID NO: 24
acgtttccctacaactcacgta

SEQ ID NO: 9145 - DNA, 24 bp, Artificial Sequence
  bisulfite treated nucleic acid for analysis of methylation status of SEQ ID NO: 24
agcgagcggcgggatattgggttt

SEQ ID NO: 9146 - DNA, 21 bp, Artificial Sequence
  bisulfite treated nucleic acid for analysis of methylation status of SEQ ID NO: 24
ccgaaacgacgataaaaataa

SEQ ID NO: 9147 - DNA, 21 bp, Artificial Sequence
  bisulfite treated nucleic acid for analysis of methylation status of SEQ ID NO: 24
ccgaaaaacgaaaactccata

SEQ ID NO: 9148 - DNA, 21 bp, Artificial Sequence
  bisulfite treated nucleic acid for analysis of methylation status of SEQ ID NO: 24
cgtgagttgtagggaaacgta

SEQ ID NO: 9149 - DNA, 22 bp, Artificial Sequence
  bisulfite treated nucleic acid for analysis of methylation status of SEQ ID NO: 24
ctacgtttccctacaactcacg

SEQ ID NO: 9150 - DNA, 24 bp, Artificial Sequence
  bisulfite treated nucleic acid for analysis of methylation status of SEQ ID NO: 24
tttttcgatataggtttcgagttt

SEQ ID NO: 9151 - DNA, 22 bp, Artificial Sequence
  bisulfite treated nucleic acid for analysis of methylation status of SEQ ID NO: 24
aaataataaaacgctcacgacc

SEQ ID NO: 9152 - DNA, 21 bp, Artificial Sequence
  bisulfite treated nucleic acid for analysis of methylation status of SEQ ID NO: 24
caaacctaaattccgaaacga

SEQ ID NO: 9153 - DNA, 21 bp, Artificial Sequence
  bisulfite treated nucleic acid for analysis of methylation status of SEQ ID NO: 24
ttaatttttcgaggttttgcg

SEQ ID NO: 9154 - DNA, 22 bp, Artificial Sequence
  bisulfite treated nucleic acid for analysis of methylation status of SEQ ID NO: 24
aattccgaaacgacgataaaaa

SEQ ID NO: 9155 - DNA, 21 bp, Artificial Sequence
  bisulfite treated nucleic acid for analysis of methylation status of SEQ ID NO: 24
cgtttccctacaactcacgta

SEQ ID NO: 9156 - DNA, 21 bp, Artificial Sequence
  bisulfite treated nucleic acid for analysis of methylation status of SEQ ID NO: 24
tacgtttccctacaactcacg

SEQ ID NO: 9157 - DNA, 23 bp, Artificial Sequence
  bisulfite treated nucleic acid for analysis of methylation status of SEQ ID NO: 24
ttttcgatataggtttcgagttt

SEQ ID NO: 9158 - DNA, 21 bp, Artificial Sequence
  bisulfite treated nucleic acid for analysis of methylation status of SEQ ID NO: 24
cgggtttacgtgagttgtagg

SEQ ID NO: 9159 - DNA, 21 bp, Artificial Sequence
  bisulfite treated nucleic acid for analysis of methylation status of SEQ ID NO: 24
gagttaatcggcgtggagtat

SEQ ID NO: 9160 - DNA, 20 bp, Artificial Sequence
  bisulfite treated nucleic acid for analysis of methylation status of SEQ ID NO: 24
cgcaaaacctcgaaaaatta

SEQ ID NO: 9161 - DNA, 35 bp, Artificial Sequence
  bisulfite treated nucleic acid for analysis of methylation status of SEQ ID NO: 24
gggattttaggggtcgtgagcgttttattattttt

SEQ ID NO: 9162 - DNA, 19 bp, Artificial Sequence
  bisulfite treated nucleic acid for analysis of methylation status of SEQ ID NO: 24
aataaaacgctcacgaccc

SEQ ID NO: 9163 - DNA, 23 bp, Artificial Sequence
  bisulfite treated nucleic acid for analysis of methylation status of SEQ ID NO: 24
ttagtttttgagttaatcggcgt

SEQ ID NO: 9164 - DNA, 24 bp, Artificial Sequence
  bisulfite treated nucleic acid for analysis of methylation status of SEQ ID NO: 24
ttttcgatataggtttcgagtttt

SEQ ID NO: 9165 - DNA, 20 bp, Artificial Sequence
  bisulfite treated nucleic acid for analysis of methylation status of SEQ ID NO: 24
acgtgagttgtagggaaacg

SEQ ID NO: 9166 - DNA, 21 bp, Artificial Sequence
  bisulfite treated nucleic acid for analysis of methylation status of SEQ ID NO: 24
gaaaaacgaaaactccatacg

SEQ ID NO: 9167 - DNA, 23 bp, Artificial Sequence
  bisulfite treated nucleic acid for analysis of methylation status of SEQ ID NO: 24
tttcgatataggtttcgagtttt

SEQ ID NO: 9168 - DNA, 22 bp, Artificial Sequence
  bisulfite treated nucleic acid for analysis of methylation status of SEQ ID NO: 24
ggtcgtgagcgttttattattt

SEQ ID NO: 9169 - DNA, 19 bp, Artificial Sequence
  bisulfite treated nucleic acid for analysis of methylation status of SEQ ID NO: 24
ttaatcgaccgcaaaacct

SEQ ID NO: 9170 - DNA, 37 bp, Artificial Sequence
  bisulfite treated nucleic acid for analysis of methylation status of SEQ ID NO: 24
tttacgttaattacggtatagttttgtagggaagggt

SEQ ID NO: 9171 - DNA, 19 bp, Artificial Sequence
  bisulfite treated nucleic acid for analysis of methylation status of SEQ ID NO: 24
aatttttcgaggttttgcg

SEQ ID NO: 9172 - DNA, 20 bp, Artificial Sequence
  bisulfite treated nucleic acid for analysis of methylation status of SEQ ID NO: 24
aaaacgaaaactccatacgc

SEQ ID NO: 9173 - DNA, 21 bp, Artificial Sequence
  bisulfite treated nucleic acid for analysis of methylation status of SEQ ID NO: 24
ttcgggtttacgtgagttgta

SEQ ID NO: 9174 - DNA, 20 bp, Artificial Sequence
  bisulfite treated nucleic acid for analysis of methylation status of SEQ ID NO: 24
aaattccgaaacgacgataa

SEQ ID NO: 9175 - DNA, 19 bp, Artificial Sequence
  bisulfite treated nucleic acid for analysis of methylation status of SEQ ID NO: 24
gaaaactccatacgcgacc

SEQ ID NO: 9176 - DNA, 23 bp, Artificial Sequence
  bisulfite treated nucleic acid for analysis of methylation status of SEQ ID NO: 24
aaaataataaaacgctcacgacc

SEQ ID NO: 9177 - DNA, 22 bp, Artificial Sequence
  bisulfite treated nucleic acid for analysis of methylation status of SEQ ID NO: 24
gagttgttttgttcgtttacgc

SEQ ID NO: 9178 - DNA, 20 bp, Artificial Sequence
  bisulfite treated nucleic acid for analysis of methylation status of SEQ ID NO: 24
atcgcacgccatactactca

SEQ ID NO: 9179 - DNA, 36 bp, Artificial Sequence
  bisulfite treated nucleic acid for analysis of methylation status of SEQ ID NO: 24
gagtttagttcgatttattttcgtcggttgttacgt

SEQ ID NO: 9180 - DNA, 20 bp, Artificial Sequence
  bisulfite treated nucleic acid for analysis of methylation status of SEQ ID NO: 24
cgtggagtatcgtgaaggtc

SEQ ID NO: 9181 - DNA, 20 bp, Artificial Sequence
  bisulfite treated nucleic acid for analysis of methylation status of SEQ ID NO: 24
gtggagtatcgtgaaggtcg

SEQ ID NO: 9182 - DNA, 20 bp, Artificial Sequence
  bisulfite treated nucleic acid for analysis of methylation status of SEQ ID NO: 24
agtatcgtgaaggtcgaacg

SEQ ID NO: 9183 - DNA, 20 bp, Artificial Sequence
  bisulfite treated nucleic acid for analysis of methylation status of SEQ ID NO: 24
gtttttgagttaatcggcgt

SEQ ID NO: 9184 - DNA, 20 bp, Artificial Sequence
  bisulfite treated nucleic acid for analysis of methylation status of SEQ ID NO: 24
gcacgccatactactcaacg

SEQ ID NO: 9185 - DNA, 20 bp, Artificial Sequence
  bisulfite treated nucleic acid for analysis of methylation status of SEQ ID NO: 24
ggagtatcgtgaaggtcgaa

SEQ ID NO: 9186 - DNA, 19 bp, Artificial Sequence
  bisulfite treated nucleic acid for analysis of methylation status of SEQ ID NO: 24
cgcacgccatactactcaa

SEQ ID NO: 9187 - DNA, 19 bp, Artificial Sequence
  bisulfite treated nucleic acid for analysis of methylation status of SEQ ID NO: 24
gaggttttgcggtcgatta

SEQ ID NO: 9188 - DNA, 20 bp, Artificial Sequence
  bisulfite treated nucleic acid for analysis of methylation status of SEQ ID NO: 24
gttggtgttcgatttttcgt

SEQ ID NO: 9189 - DNA, 20 bp, Artificial Sequence
  bisulfite treated nucleic acid for analysis of methylation status of SEQ ID NO: 24
ttggtgttcgatttttcgtc

SEQ ID NO: 9190 - DNA, 23 bp, Artificial Sequence
  bisulfite treated nucleic acid for analysis of methylation status of SEQ ID NO: 24
aaaaataataaaacgctcacgac

SEQ ID NO: 9191 - DNA, 22 bp, Artificial Sequence
  bisulfite treated nucleic acid for analysis of methylation status of SEQ ID NO: 24
gggtcgtgagcgttttattatt

SEQ ID NO: 9192 - DNA, 22 bp, Artificial Sequence
  bisulfite treated nucleic acid for analysis of methylation status of SEQ ID NO: 24
tcgtagagttgttttgttcgtt

SEQ ID NO: 9193 - DNA, 22 bp, Artificial Sequence
  bisulfite treated nucleic acid for analysis of methylation status of SEQ ID NO: 24
tttcgggtttacgtgagttgta

SEQ ID NO: 9194 - DNA, 22 bp, Artificial Sequence
  bisulfite treated nucleic acid for analysis of methylation status of SEQ ID NO: 24
gtttttaggtgttgtcgtcgtt

SEQ ID NO: 9195 - DNA, 18 bp, Artificial Sequence
  bisulfite treated nucleic acid for analysis of methylation status of SEQ ID NO: 24
aaactccatacgcgaccc

SEQ ID NO: 9196 - DNA, 29 bp, Artificial Sequence
  bisulfite treated nucleic acid for analysis of methylation status of SEQ ID NO: 24
atcgtcgtttcggaatttaggtttggggg

SEQ ID NO: 9197 - DNA, 21 bp, Artificial Sequence
  bisulfite treated nucleic acid for analysis of methylation status of SEQ ID NO: 24
gagtatcgtgaaggtcgaacg

SEQ ID NO: 9198 - DNA, 21 bp, Artificial Sequence
  bisulfite treated nucleic acid for analysis of methylation status of SEQ ID NO: 24
gttcgatttttcgtcgttatt

SEQ ID NO: 9199 - DNA, 20 bp, Artificial Sequence
  bisulfite treated nucleic acid for analysis of methylation status of SEQ ID NO: 24
aacctaaattccgaaacgac

SEQ ID NO: 9200 - DNA, 21 bp, Artificial Sequence
  bisulfite treated nucleic acid for analysis of methylation status of SEQ ID NO: 24
tttttcgggtttacgtgagtt

SEQ ID NO: 9201 - DNA, 19 bp, Artificial Sequence
  bisulfite treated nucleic acid for analysis of methylation status of SEQ ID NO: 24
tcgcacgccatactactca

SEQ ID NO: 9202 - DNA, 21 bp, Artificial Sequence
  bisulfite treated nucleic acid for analysis of methylation status of SEQ ID NO: 24
ctacaactcacgtaaacccga

SEQ ID NO: 9203 - DNA, 21 bp, Artificial Sequence
  bisulfite treated nucleic acid for analysis of methylation status of SEQ ID NO: 24
tacaactcacgtaaacccgaa

SEQ ID NO: 9204 - DNA, 19 bp, Artificial Sequence
  bisulfite treated nucleic acid for analysis of methylation status of SEQ ID NO: 24
cgaaaactccatacgcgac

SEQ ID NO: 9205 - DNA, 19 bp, Artificial Sequence
  bisulfite treated nucleic acid for analysis of methylation status of SEQ ID NO: 24
acgaaaactccatacgcga

SEQ ID NO: 9206 - DNA, 22 bp, Artificial Sequence
  bisulfite treated nucleic acid for analysis of methylation status of SEQ ID NO: 24
tttttaggtgttgtcgtcgtta

SEQ ID NO: 9207 - DNA, 22 bp, Artificial Sequence
  bisulfite treated nucleic acid for analysis of methylation status of SEQ ID NO: 24
cgtagagttgttttgttcgttt

SEQ ID NO: 9208 - DNA, 24 bp, Artificial Sequence
  bisulfite treated nucleic acid for analysis of methylation status of SEQ ID NO: 24
gttagtttttgagttaatcggcgt

SEQ ID NO: 9209 - DNA, 22 bp, Artificial Sequence
  bisulfite treated nucleic acid for analysis of methylation status of SEQ ID NO: 24
aatcgtagagttgttttgttcg

SEQ ID NO: 9210 - DNA, 42 bp, Artificial Sequence
  bisulfite treated nucleic acid for analysis of methylation status of SEQ ID NO: 24
tacgcggagtttagttcgatttattttcgtcggttgttacgt

SEQ ID NO: 9211 - DNA, 17 bp, Artificial Sequence
  bisulfite treated nucleic acid for analysis of methylation status of SEQ ID NO: 24
aaacgtaggggcggttt

SEQ ID NO: 9212 - DNA, 22 bp, Artificial Sequence
  bisulfite treated nucleic acid for analysis of methylation status of SEQ ID NO: 24
attaacaactccgaaaaacgaa

SEQ ID NO: 9213 - DNA, 20 bp, Artificial Sequence
  bisulfite treated nucleic acid for analysis of methylation status of SEQ ID NO: 24
gggggcggtggggtcgcgta

SEQ ID NO: 9214 - DNA, 19 bp, Artificial Sequence
  bisulfite treated nucleic acid for analysis of methylation status of SEQ ID NO: 24
aaaactccatacgcgaccc

SEQ ID NO: 9215 - DNA, 22 bp, Artificial Sequence
  bisulfite treated nucleic acid for analysis of methylation status of SEQ ID NO: 24
aaaataataaaacgctcacgac

SEQ ID NO: 9216 - DNA, 23 bp, Artificial Sequence
  bisulfite treated nucleic acid for analysis of methylation status of SEQ ID NO: 24
atcgtagagttgttttgttcgtt

SEQ ID NO: 9217 - DNA, 20 bp, Artificial Sequence
  bisulfite treated nucleic acid for analysis of methylation status of SEQ ID NO: 24
taaattccgaaacgacgata

SEQ ID NO: 9218 - DNA, 21 bp, Artificial Sequence
  bisulfite treated nucleic acid for analysis of methylation status of SEQ ID NO: 24
agttgttttgttcgtttacgc

SEQ ID NO: 9219 - DNA, 22 bp, Artificial Sequence
  bisulfite treated nucleic acid for analysis of methylation status of SEQ ID NO: 24
tcgtgagcgttttattattttt

SEQ ID NO: 9220 - DNA, 20 bp, Artificial Sequence
  bisulfite treated nucleic acid for analysis of methylation status of SEQ ID NO: 24
tgttggtgttcgatttttcg

SEQ ID NO: 9221 - DNA, 22 bp, Artificial Sequence
  bisulfite treated nucleic acid for analysis of methylation status of SEQ ID NO: 24
cgttagtttttgagttaatcgg

SEQ ID NO: 9222 - DNA, 23 bp, Artificial Sequence
  bisulfite treated nucleic acid for analysis of methylation status of SEQ ID NO: 24
gtcgtgagcgttttattattttt

SEQ ID NO: 9223 - DNA, 21 bp, Artificial Sequence
  bisulfite treated nucleic acid for analysis of methylation status of SEQ ID NO: 24
gcgtatggagttttcgttttt

SEQ ID NO: 9224 - DNA, 19 bp, Artificial Sequence
  bisulfite treated nucleic acid for analysis of methylation status of SEQ ID NO: 24
aaccacatcctctacgcga

SEQ ID NO: 9225 - DNA, 31 bp, Artificial Sequence
  bisulfite treated nucleic acid for analysis of methylation status of SEQ ID NO: 24
agggtggagggtttagttcgtgattttacgt

SEQ ID NO: 9226 - DNA, 17 bp, Artificial Sequence
  bisulfite treated nucleic acid for analysis of methylation status of SEQ ID NO: 24
gaaacgtaggggcggtt

SEQ ID NO: 9227 - DNA, 18 bp, Artificial Sequence
  bisulfite treated nucleic acid for analysis of methylation status of SEQ ID NO: 24
accacatcctctacgcga

SEQ ID NO: 9228 - DNA, 22 bp, Artificial Sequence
  bisulfite treated nucleic acid for analysis of methylation status of SEQ ID NO: 24
tttaggtgttgtcgtcgttatc

SEQ ID NO: 9229 - DNA, 24 bp, Artificial Sequence
  bisulfite treated nucleic acid for analysis of methylation status of SEQ ID NO: 24
ttaatcgtagagttgttttgttcg

SEQ ID NO: 9230 - DNA, 19 bp, Artificial Sequence
  bisulfite treated nucleic acid for analysis of methylation status of SEQ ID NO: 24
ttttgagttaatcggcgtg

SEQ ID NO: 9231 - DNA, 20 bp, Artificial Sequence
  bisulfite treated nucleic acid for analysis of methylation status of SEQ ID NO: 24
agttaatcggcgtggagtat

SEQ ID NO: 9232 - DNA, 23 bp, Artificial Sequence
  bisulfite treated nucleic acid for analysis of methylation status of SEQ ID NO: 24
ttttaggtgttgtcgtcgttatc

SEQ ID NO: 9233 - DNA, 19 bp, Artificial Sequence
  bisulfite treated nucleic acid for analysis of methylation status of SEQ ID NO: 24
tggtgttcgatttttcgtc

SEQ ID NO: 9234 - DNA, 22 bp, Artificial Sequence
  bisulfite treated nucleic acid for analysis of methylation status of SEQ ID NO: 24
acgaacgacgaaacattaaact

SEQ ID NO: 9235 - DNA, 22 bp, Artificial Sequence
  bisulfite treated nucleic acid for analysis of methylation status of SEQ ID NO: 24
gcggcggtagtatttagaagtc

SEQ ID NO: 9236 - DNA, 33 bp, Artificial Sequence
  bisulfite treated nucleic acid for analysis of methylation status of SEQ ID NO: 24
ttgcgtttttttatagtttacgtgggttcgagg

SEQ ID NO: 9237 - DNA, 22 bp, Artificial Sequence
  bisulfite treated nucleic acid for analysis of methylation status of SEQ ID NO: 24
gaacgacgaaacattaaactcc

SEQ ID NO: 9238 - DNA, 22 bp, Artificial Sequence
  bisulfite treated nucleic acid for analysis of methylation status of SEQ ID NO: 24
acgacgaaacattaaactcctc

SEQ ID NO: 9239 - DNA, 23 bp, Artificial Sequence
  bisulfite treated nucleic acid for analysis of methylation status of SEQ ID NO: 24
ggcggtagtatttagaagtcgtt

SEQ ID NO: 9240 - DNA, 22 bp, Artificial Sequence
  bisulfite treated nucleic acid for analysis of methylation status of SEQ ID NO: 24
caccacgactaataaacctacg

SEQ ID NO: 9241 - DNA, 22 bp, Artificial Sequence
  bisulfite treated nucleic acid for analysis of methylation status of SEQ ID NO: 24
cgtggggaaaaatataagtacg

SEQ ID NO: 9242 - DNA, 34 bp, Artificial Sequence
  bisulfite treated nucleic acid for analysis of methylation status of SEQ ID NO: 24
agatcgatttattatataacgggagggggaggtt

SEQ ID NO: 9243 - DNA, 22 bp, Artificial Sequence
  bisulfite treated nucleic acid for analysis of methylation status of SEQ ID NO: 24
ctttaaccaatcaacgaacgac

SEQ ID NO: 9244 - DNA, 21 bp, Artificial Sequence
  bisulfite treated nucleic acid for analysis of methylation status of SEQ ID NO: 24
gcggcggtagtatttagaagt

SEQ ID NO: 9245 - DNA, 33 bp, Artificial Sequence
  bisulfite treated nucleic acid for analysis of methylation status of SEQ ID NO: 24
tttttatagtttacgtgggttcgaggaggagga

SEQ ID NO: 9246 - DNA, 22 bp, Artificial Sequence
  bisulfite treated nucleic acid for analysis of methylation status of SEQ ID NO: 24
cgaacgacgaaacattaaactc

SEQ ID NO: 9247 - DNA, 22 bp, Artificial Sequence
  bisulfite treated nucleic acid for analysis of methylation status of SEQ ID NO: 24
ggcggtagtatttagaagtcgt

SEQ ID NO: 9248 - DNA, 20 bp, Artificial Sequence
  bisulfite treated nucleic acid for analysis of methylation status of SEQ ID NO: 24
cgaaaccttacgaccgatta

SEQ ID NO: 9249 - DNA, 22 bp, Artificial Sequence
  bisulfite treated nucleic acid for analysis of methylation status of SEQ ID NO: 24
tttagaagtcgtttttgcgttt

SEQ ID NO: 9250 - DNA, 32 bp, Artificial Sequence
  bisulfite treated nucleic acid for analysis of methylation status of SEQ ID NO: 24
aggaggagtttaatgtttcgtcgttcgttgat

SEQ ID NO: 9251 - DNA, 22 bp, Artificial Sequence
  bisulfite treated nucleic acid for analysis of methylation status of SEQ ID NO: 24
ttagaagtcgtttttgcgtttt

SEQ ID NO: 9252 - DNA, 22 bp, Artificial Sequence
  bisulfite treated nucleic acid for analysis of methylation status of SEQ ID NO: 24
tatagtttacgtgggttcgagg

SEQ ID NO: 9253 - DNA, 22 bp, Artificial Sequence
  bisulfite treated nucleic acid for analysis of methylation status of SEQ ID NO: 24
cgactactacgcccatttctat

SEQ ID NO: 9254 - DNA, 20 bp, Artificial Sequence
  bisulfite treated nucleic acid for analysis of methylation status of SEQ ID NO: 24
cggacgagggatttttagat

SEQ ID NO: 9255 - DNA, 30 bp, Artificial Sequence
  bisulfite treated nucleic acid for analysis of methylation status of SEQ ID NO: 24
ggcggtgtcgtacgttatgttgtttagcgg

SEQ ID NO: 9256 - DNA, 21 bp, Artificial Sequence
  bisulfite treated nucleic acid for analysis of methylation status of SEQ ID NO: 24
tttaaccaatcaacgaacgac

SEQ ID NO: 9257 - DNA, 24 bp, Artificial Sequence
  bisulfite treated nucleic acid for analysis of methylation status of SEQ ID NO: 24
tccgctatattctaaattcgtctt

SEQ ID NO: 9258 - DNA, 22 bp, Artificial Sequence
  bisulfite treated nucleic acid for analysis of methylation status of SEQ ID NO: 24
atagaaatgggcgtagtagtcg

SEQ ID NO: 9259 - DNA, 25 bp, Artificial Sequence
  bisulfite treated nucleic acid for analysis of methylation status of SEQ ID NO: 24
gtcggattgggtttcgcgtaggcgg

SEQ ID NO: 9260 - DNA, 21 bp, Artificial Sequence
  bisulfite treated nucleic acid for analysis of methylation status of SEQ ID NO: 24
cgaaactccaaaaaccgtaaa

SEQ ID NO: 9261 - DNA, 22 bp, Artificial Sequence
  bisulfite treated nucleic acid for analysis of methylation status of SEQ ID NO: 24
gtcgttcgttgattggttaaag

SEQ ID NO: 9262 - DNA, 27 bp, Artificial Sequence
  bisulfite treated nucleic acid for analysis of methylation status of SEQ ID NO: 24
agttgtgtcgtgattggcgtaagggga

SEQ ID NO: 9263 - DNA, 21 bp, Artificial Sequence
  bisulfite treated nucleic acid for analysis of methylation status of SEQ ID NO: 24
ctcgaaactccaaaaaccgta

SEQ ID NO: 9264 - DNA, 20 bp, Artificial Sequence
  bisulfite treated nucleic acid for analysis of methylation status of SEQ ID NO: 24
tcgaaactccaaaaaccgta

SEQ ID NO: 9265 - DNA, 22 bp, Artificial Sequence
  bisulfite treated nucleic acid for analysis of methylation status of SEQ ID NO: 24
atttagaagtcgtttttgcgtt

SEQ ID NO: 9266 - DNA, 20 bp, Artificial Sequence
  bisulfite treated nucleic acid for analysis of methylation status of SEQ ID NO: 24
cgtaaaactaccctacccgc

SEQ ID NO: 9267 - DNA, 22 bp, Artificial Sequence
  bisulfite treated nucleic acid for analysis of methylation status of SEQ ID NO: 24
cgttatgttgtttagcggaagt

SEQ ID NO: 9268 - DNA, 31 bp, Artificial Sequence
  bisulfite treated nucleic acid for analysis of methylation status of SEQ ID NO: 24
ggcgtagtagtcggcgggagtgggtcggatt

SEQ ID NO: 9269 - DNA, 23 bp, Artificial Sequence
  bisulfite treated nucleic acid for analysis of methylation status of SEQ ID NO: 24
aacgacgaaacattaaactcctc

SEQ ID NO: 9270 - DNA, 22 bp, Artificial Sequence
  bisulfite treated nucleic acid for analysis of methylation status of SEQ ID NO: 24
tacgttatgttgtttagcggaa

SEQ ID NO: 9271 - DNA, 23 bp, Artificial Sequence
  bisulfite treated nucleic acid for analysis of methylation status of SEQ ID NO: 24
ccaccacgactaataaacctacg

SEQ ID NO: 9272 - DNA, 35 bp, Artificial Sequence
  bisulfite treated nucleic acid for analysis of methylation status of SEQ ID NO: 24
atcgatttattatataacgggagggggaggttagg

SEQ ID NO: 9273 - DNA, 24 bp, Artificial Sequence
  bisulfite treated nucleic acid for analysis of methylation status of SEQ ID NO: 24
gcggtagtatttagaagtcgtttt

SEQ ID NO: 9274 - DNA, 19 bp, Artificial Sequence
  bisulfite treated nucleic acid for analysis of methylation status of SEQ ID NO: 24
ggcggcggtagtatttaga

SEQ ID NO: 9275 - DNA, 21 bp, Artificial Sequence
  bisulfite treated nucleic acid for analysis of methylation status of SEQ ID NO: 24
ggcggtagtatttagaagtcg

SEQ ID NO: 9276 - DNA, 21 bp, Artificial Sequence
  bisulfite treated nucleic acid for analysis of methylation status of SEQ ID NO: 24
cggcggtagtatttagaagtc

SEQ ID NO: 9277 - DNA, 21 bp, Artificial Sequence
  bisulfite treated nucleic acid for analysis of methylation status of SEQ ID NO: 24
tcgttcgttgattggttaaag

SEQ ID NO: 9278 - DNA, 21 bp, Artificial Sequence
  bisulfite treated nucleic acid for analysis of methylation status of SEQ ID NO: 24
atagtttacgtgggttcgagg

SEQ ID NO: 9279 - DNA, 23 bp, Artificial Sequence
  bisulfite treated nucleic acid for analysis of methylation status of SEQ ID NO: 24
ccgctatattctaaattcgtctt

SEQ ID NO: 9280 - DNA, 20 bp, Artificial Sequence
  bisulfite treated nucleic acid for analysis of methylation status of SEQ ID NO: 24
atcaacgaacgacgaaacat

SEQ ID NO: 9281 - DNA, 21 bp, Artificial Sequence
  bisulfite treated nucleic acid for analysis of methylation status of SEQ ID NO: 24
cgacgaaacattaaactcctc

SEQ ID NO: 9282 - DNA, 20 bp, Artificial Sequence
  bisulfite treated nucleic acid for analysis of methylation status of SEQ ID NO: 24
aacgctttaaccaatcaacg

SEQ ID NO: 9283 - DNA, 19 bp, Artificial Sequence
  bisulfite treated nucleic acid for analysis of methylation status of SEQ ID NO: 24
cttacgccaatcacgacac

SEQ ID NO: 9284 - DNA, 20 bp, Artificial Sequence
  bisulfite treated nucleic acid for analysis of methylation status of SEQ ID NO: 24
acgctttaaccaatcaacga

SEQ ID NO: 9285 - DNA, 23 bp, Artificial Sequence
  bisulfite treated nucleic acid for analysis of methylation status of SEQ ID NO: 24
tatagaaatgggcgtagtagtcg

SEQ ID NO: 9286 - DNA, 23 bp, Artificial Sequence
  bisulfite treated nucleic acid for analysis of methylation status of SEQ ID NO: 24
tttatagtttacgtgggttcgag

SEQ ID NO: 9287 - DNA, 20 bp, Artificial Sequence
  bisulfite treated nucleic acid for analysis of methylation status of SEQ ID NO: 24
gtggcggcggtagtatttag

SEQ ID NO: 9288 - DNA, 23 bp, Artificial Sequence
  bisulfite treated nucleic acid for analysis of methylation status of SEQ ID NO: 24
tttttatagtttacgtgggttcg

SEQ ID NO: 9289 - DNA, 20 bp, Artificial Sequence
  bisulfite treated nucleic acid for analysis of methylation status of SEQ ID NO: 24
gcggcggtagtatttagaag

SEQ ID NO: 9290 - DNA, 21 bp, Artificial Sequence
  bisulfite treated nucleic acid for analysis of methylation status of SEQ ID NO: 24
aatcaacgaacgacgaaacat

SEQ ID NO: 9291 - DNA, 23 bp, Artificial Sequence
  bisulfite treated nucleic acid for analysis of methylation status of SEQ ID NO: 24
tatttagaagtcgtttttgcgtt

SEQ ID NO: 9292 - DNA, 21 bp, Artificial Sequence
  bisulfite treated nucleic acid for analysis of methylation status of SEQ ID NO: 35
cgttattcgggatatttaggg

SEQ ID NO: 9293 - DNA, 22 bp, Artificial Sequence
  bisulfite treated nucleic acid for analysis of methylation status of SEQ ID NO: 35
tccgtttttatttaacctcgaa

SEQ ID NO: 9294 - DNA, 27 bp, Artificial Sequence
  bisulfite treated nucleic acid for analysis of methylation status of SEQ ID NO: 35
aggttttgggcggtttttacgcgagat

SEQ ID NO: 9295 - DNA, 22 bp, Artificial Sequence
  bisulfite treated nucleic acid for analysis of methylation status of SEQ ID NO: 35
cgttattcgggatatttagggt

SEQ ID NO: 9296 - DNA, 22 bp, Artificial Sequence
  bisulfite treated nucleic acid for analysis of methylation status of SEQ ID NO: 35
actccgtttttatttaacctcg

SEQ ID NO: 9297 - DNA, 22 bp, Artificial Sequence
  bisulfite treated nucleic acid for analysis of methylation status of SEQ ID NO: 35
tagtcgcgtagtgtatgcgtag

SEQ ID NO: 9298 - DNA, 22 bp, Artificial Sequence
  bisulfite treated nucleic acid for analysis of methylation status of SEQ ID NO: 35
atataaacatccgtcccaaacg

SEQ ID NO: 9299 - DNA, 34 bp, Artificial Sequence
  bisulfite treated nucleic acid for analysis of methylation status of SEQ ID NO: 35
tgtgtttagagaagttttgacgtcgttttggaag

SEQ ID NO: 9300 - DNA, 22 bp, Artificial Sequence
  bisulfite treated nucleic acid for analysis of methylation status of SEQ ID NO: 35
gcgtagtgtatgcgtagaaggt

SEQ ID NO: 9301 - DNA, 23 bp, Artificial Sequence
  bisulfite treated nucleic acid for analysis of methylation status of SEQ ID NO: 35
cactccgtttttatttaacctcg

SEQ ID NO: 9302 - DNA, 21 bp, Artificial Sequence
  bisulfite treated nucleic acid for analysis of methylation status of SEQ ID NO: 35
gcgttattcgggatatttagg

SEQ ID NO: 9303 - DNA, 21 bp, Artificial Sequence
  bisulfite treated nucleic acid for analysis of methylation status of SEQ ID NO: 35
ggcgttattcgggatatttag

SEQ ID NO: 9304 - DNA, 21 bp, Artificial Sequence
  bisulfite treated nucleic acid for analysis of methylation status of SEQ ID NO: 35
gttgtagtcgttcgagtcggt

SEQ ID NO: 9305 - DNA, 22 bp, Artificial Sequence
  bisulfite treated nucleic acid for analysis of methylation status of SEQ ID NO: 35
accctaaatatcccgaataacg

SEQ ID NO: 9306 - DNA, 25 bp, Artificial Sequence
  bisulfite treated nucleic acid for analysis of methylation status of SEQ ID NO: 35
ggcgcggagggtacggagattacgg

SEQ ID NO: 9307 - DNA, 20 bp, Artificial Sequence
  bisulfite treated nucleic acid for analysis of methylation status of SEQ ID NO: 35
tgtagtcgttcgagtcggtt

SEQ ID NO: 9308 - DNA, 20 bp, Artificial Sequence
  bisulfite treated nucleic acid for analysis of methylation status of SEQ ID NO: 35
ttgtagtcgttcgagtcggt

SEQ ID NO: 9309 - DNA, 21 bp, Artificial Sequence
  bisulfite treated nucleic acid for analysis of methylation status of SEQ ID NO: 35
tataaacatccgtcccaaacg

SEQ ID NO: 9310 - DNA, 20 bp, Artificial Sequence
  bisulfite treated nucleic acid for analysis of methylation status of SEQ ID NO: 35
gtagtcgttcgagtcggttc

SEQ ID NO: 9311 - DNA, 21 bp, Artificial Sequence
  bisulfite treated nucleic acid for analysis of methylation status of SEQ ID NO: 35
agtcgcgtagtgtatgcgtag

SEQ ID NO: 9312 - DNA, 23 bp, Artificial Sequence
  bisulfite treated nucleic acid for analysis of methylation status of SEQ ID NO: 35
ctccgtttttatttaacctcgaa

SEQ ID NO: 9313 - DNA, 21 bp, Artificial Sequence
  bisulfite treated nucleic acid for analysis of methylation status of SEQ ID NO: 35
cgcgaggatgttgatttagag

SEQ ID NO: 9314 - DNA, 22 bp, Artificial Sequence
  bisulfite treated nucleic acid for analysis of methylation status of SEQ ID NO: 35
aaaaattaaaacgcgaaccttt

SEQ ID NO: 9315 - DNA, 26 bp, Artificial Sequence
  bisulfite treated nucleic acid for analysis of methylation status of SEQ ID NO: 35
aggcgtttgggttttttcggtgtcgg

SEQ ID NO: 9316 - DNA, 21 bp, Artificial Sequence
  bisulfite treated nucleic acid for analysis of methylation status of SEQ ID NO: 35
ctaaatatcccgaataacgcc

SEQ ID NO: 9317 - DNA, 21 bp, Artificial Sequence
  bisulfite treated nucleic acid for analysis of methylation status of SEQ ID NO: 35
cctaaatatcccgaataacgc

SEQ ID NO: 9318 - DNA, 22 bp, Artificial Sequence
  bisulfite treated nucleic acid for analysis of methylation status of SEQ ID NO: 35
taaaaattaaaacgcgaacctt

SEQ ID NO: 9319 - DNA, 20 bp, Artificial Sequence
  bisulfite treated nucleic acid for analysis of methylation status of SEQ ID NO: 35
cgcgaggatgttgatttaga

SEQ ID NO: 9320 - DNA, 22 bp, Artificial Sequence
  bisulfite treated nucleic acid for analysis of methylation status of SEQ ID NO: 35
aaaattaaaacgcgaaccttta

SEQ ID NO: 9321 - DNA, 21 bp, Artificial Sequence
  bisulfite treated nucleic acid for analysis of methylation status of SEQ ID NO: 35
cgcgtagtgtatgcgtagaag

SEQ ID NO: 9322 - DNA, 21 bp, Artificial Sequence
  bisulfite treated nucleic acid for analysis of methylation status of SEQ ID NO: 35
ccctaaatatcccgaataacg

SEQ ID NO: 9323 - DNA, 22 bp, Artificial Sequence
  bisulfite treated nucleic acid for analysis of methylation status of SEQ ID NO: 35
tgcgtagaaggtttagatacga

SEQ ID NO: 9324 - DNA, 20 bp, Artificial Sequence
  bisulfite treated nucleic acid for analysis of methylation status of SEQ ID NO: 35
ggaggttgtagtcgttcgag

SEQ ID NO: 9325 - DNA, 20 bp, Artificial Sequence
  bisulfite treated nucleic acid for analysis of methylation status of SEQ ID NO: 35
ataaacatccgtcccaaacg

SEQ ID NO: 9326 - DNA, 22 bp, Artificial Sequence
  bisulfite treated nucleic acid for analysis of methylation status of SEQ ID NO: 35
ctaaaaattaaaacgcgaacct

SEQ ID NO: 9327 - DNA, 22 bp, Artificial Sequence
  bisulfite treated nucleic acid for analysis of methylation status of SEQ ID NO: 35
cctaaaaattaaaacgcgaacc

SEQ ID NO: 9328 - DNA, 22 bp, Artificial Sequence
  bisulfite treated nucleic acid for analysis of methylation status of SEQ ID NO: 35
cgatagtggtttttcggtttag

SEQ ID NO: 9329 - DNA, 19 bp, Artificial Sequence
  bisulfite treated nucleic acid for analysis of methylation status of SEQ ID NO: 35
cgtaatctccgtaccctcc

SEQ ID NO: 9330 - DNA, 21 bp, Artificial Sequence
  bisulfite treated nucleic acid for analysis of methylation status of SEQ ID NO: 35
agtcggttcgggtgggggcgg

SEQ ID NO: 9331 - DNA, 19 bp, Artificial Sequence
  bisulfite treated nucleic acid for analysis of methylation status of SEQ ID NO: 35
ccgtaatctccgtaccctc

SEQ ID NO: 9332 - DNA, 19 bp, Artificial Sequence
  bisulfite treated nucleic acid for analysis of methylation status of SEQ ID NO: 35
gtaatctccgtaccctccg

SEQ ID NO: 9333 - DNA, 19 bp, Artificial Sequence
  bisulfite treated nucleic acid for analysis of methylation status of SEQ ID NO: 35
ggagggtacggagattacg

SEQ ID NO: 9334 - DNA, 20 bp, Artificial Sequence
  bisulfite treated nucleic acid for analysis of methylation status of SEQ ID NO: 35
ttggaggttgtagtcgttcg

SEQ ID NO: 9335 - DNA, 22 bp, Artificial Sequence
  bisulfite treated nucleic acid for analysis of methylation status of SEQ ID NO: 35
acctaaaaattaaaacgcgaac

SEQ ID NO: 9336 - DNA, 19 bp, Artificial Sequence
  bisulfite treated nucleic acid for analysis of methylation status of SEQ ID NO: 35
gccgtaatctccgtaccct

SEQ ID NO: 9337 - DNA, 19 bp, Artificial Sequence
  bisulfite treated nucleic acid for analysis of methylation status of SEQ ID NO: 35
agggtacggagattacggc

SEQ ID NO: 9338 - DNA, 18 bp, Artificial Sequence
  bisulfite treated nucleic acid for analysis of methylation status of SEQ ID NO: 35
gggtacggagattacggc

SEQ ID NO: 9339 - DNA, 20 bp, Artificial Sequence
  bisulfite treated nucleic acid for analysis of methylation status of SEQ ID NO: 35
gtcgtagttcggagttttgg

SEQ ID NO: 9340 - DNA, 23 bp, Artificial Sequence
  bisulfite treated nucleic acid for analysis of methylation status of SEQ ID NO: 35
tcgcgctatacctctaataaaaa

SEQ ID NO: 9341 - DNA, 37 bp, Artificial Sequence
  bisulfite treated nucleic acid for analysis of methylation status of SEQ ID NO: 35
ttcgtttgtgtacgttatttgttgtggggtggtcgaa

SEQ ID NO: 9342 - DNA, 20 bp, Artificial Sequence
  bisulfite treated nucleic acid for analysis of methylation status of SEQ ID NO: 35
tcgggatatttagggtttcg

SEQ ID NO: 9343 - DNA, 40 bp, Artificial Sequence
  bisulfite treated nucleic acid for analysis of methylation status of SEQ ID NO: 35
ggtttttacgcgagatcgtaaattatgataataggtagtt

SEQ ID NO: 9344 - DNA, 23 bp, Artificial Sequence
  bisulfite treated nucleic acid for analysis of methylation status of SEQ ID NO: 35
tcgtttgtgtacgttatttgttg

SEQ ID NO: 9345 - DNA, 19 bp, Artificial Sequence
  bisulfite treated nucleic acid for analysis of methylation status of SEQ ID NO: 35
atatctatcccaaccgcga

SEQ ID NO: 9346 - DNA, 41 bp, Artificial Sequence
  bisulfite treated nucleic acid for analysis of methylation status of SEQ ID NO: 35
gatattggaaggaacgagaataaatatttaattacggacgt

SEQ ID NO: 9347 - DNA, 21 bp, Artificial Sequence
  bisulfite treated nucleic acid for analysis of methylation status of SEQ ID NO: 35
ccgtttttatttaacctcgaa

SEQ ID NO: 9348 - DNA, 23 bp, Artificial Sequence
  bisulfite treated nucleic acid for analysis of methylation status of SEQ ID NO: 35
aattttatgtagtcgcgtagtgt

SEQ ID NO: 9349 - DNA, 22 bp, Artificial Sequence
  bisulfite treated nucleic acid for analysis of methylation status of SEQ ID NO: 35
acaacgacttacttccaaaacg

SEQ ID NO: 9350 - DNA, 41 bp, Artificial Sequence
  bisulfite treated nucleic acid for analysis of methylation status of SEQ ID NO: 35
tgcgtagaaggtttagatacgaaatgttattttagtaatgt

SEQ ID NO: 9351 - DNA, 19 bp, Artificial Sequence
  bisulfite treated nucleic acid for analysis of methylation status of SEQ ID NO: 35
tagatggtttaggcgcgag

SEQ ID NO: 9352 - DNA, 23 bp, Artificial Sequence
  bisulfite treated nucleic acid for analysis of methylation status of SEQ ID NO: 35
atgcgtagaaggtttagatacga

SEQ ID NO: 9353 - DNA, 21 bp, Artificial Sequence
  bisulfite treated nucleic acid for analysis of methylation status of SEQ ID NO: 35
ctccgtttttatttaacctcg

SEQ ID NO: 9354 - DNA, 21 bp, Artificial Sequence
  bisulfite treated nucleic acid for analysis of methylation status of SEQ ID NO: 35
tcgcgtagtgtatgcgtagaa

SEQ ID NO: 9355 - DNA, 22 bp, Artificial Sequence
  bisulfite treated nucleic acid for analysis of methylation status of SEQ ID NO: 35
tcgatagtggtttttcggttta

SEQ ID NO: 9356 - DNA, 19 bp, Artificial Sequence
  bisulfite treated nucleic acid for analysis of methylation status of SEQ ID NO: 35
taaacatccgtcccaaacg

SEQ ID NO: 9357 - DNA, 22 bp, Artificial Sequence
  bisulfite treated nucleic acid for analysis of methylation status of SEQ ID NO: 35
gcggtttttatttgtatttcgt

SEQ ID NO: 9358 - DNA, 19 bp, Artificial Sequence
  bisulfite treated nucleic acid for analysis of methylation status of SEQ ID NO: 35
ctcgcgcctaaaccatcta

SEQ ID NO: 9359 - DNA, 24 bp, Artificial Sequence
  bisulfite treated nucleic acid for analysis of methylation status of SEQ ID NO: 35
tggtagaggcgcgagtatcggggt

SEQ ID NO: 9360 - DNA, 18 bp, Artificial Sequence
  bisulfite treated nucleic acid for analysis of methylation status of SEQ ID NO: 35
aaaagtcggggagtgacg

SEQ ID NO: 9361 - DNA, 22 bp, Artificial Sequence
  bisulfite treated nucleic acid for analysis of methylation status of SEQ ID NO: 35
aaactccgaactacgacaaaaa

SEQ ID NO: 9362 - DNA, 18 bp, Artificial Sequence
  bisulfite treated nucleic acid for analysis of methylation status of SEQ ID NO: 35
tgcggcggttgggcgcgt

SEQ ID NO: 9363 - DNA, 22 bp, Artificial Sequence
  bisulfite treated nucleic acid for analysis of methylation status of SEQ ID NO: 35
aaaactccgaactacgacaaaa

SEQ ID NO: 9364 - DNA, 18 bp, Artificial Sequence
  bisulfite treated nucleic acid for analysis of methylation status of SEQ ID NO: 35
tcgcgcctaaaccatcta

SEQ ID NO: 9365 - DNA, 20 bp, Artificial Sequence
  nucleic acid for analysis of methylation status of SEQ ID NO: 35
tacgatctcgcgtaaaaacc

SEQ ID NO: 9366 - DNA, 32 bp, Artificial Sequence
  bisulfite treated nucleic acid for analysis of methylation status of SEQ ID NO: 35
ggcggcgttattcgggatatttagggtttcga

SEQ ID NO: 9367 - DNA, 22 bp, Artificial Sequence
  bisulfite treated nucleic acid for analysis of methylation status of SEQ ID NO: 35
cgatattggaaggaacgagaat

SEQ ID NO: 9368 - DNA, 19 bp, Artificial Sequence
  bisulfite treated nucleic acid for analysis of methylation status of SEQ ID NO: 35
ccgaaaaccctaaaacgaa

SEQ ID NO: 9369 - DNA, 30 bp, Artificial Sequence
  bisulfite treated nucleic acid for analysis of methylation status of SEQ ID NO: 35
tgggatagatatttcgggaattcgaggcgg

SEQ ID NO: 9370 - DNA, 22 bp, Artificial Sequence
  bisulfite treated nucleic acid for analysis of methylation status of SEQ ID NO: 35
tacctaaaaattaaaacgcgaa

SEQ ID NO: 9371 - DNA, 23 bp, Artificial Sequence
  bisulfite treated nucleic acid for analysis of methylation status of SEQ ID NO: 35
cgagagagttttaggtaatttcg

SEQ ID NO: 9372 - DNA, 20 bp, Artificial Sequence
  bisulfite treated nucleic acid for analysis of methylation status of SEQ ID NO: 35
aaccgactcgaacgactaca

SEQ ID NO: 9373 - DNA, 27 bp, Artificial Sequence
  bisulfite treated nucleic acid for analysis of methylation status of SEQ ID NO: 35
ttttcggtttagggaggagagcgcggt

SEQ ID NO: 9374 - DNA, 19 bp, Artificial Sequence
  bisulfite treated nucleic acid for analysis of methylation status of SEQ ID NO: 35
ttagatggtttaggcgcga

SEQ ID NO: 9375 - DNA, 23 bp, Artificial Sequence
  bisulfite treated nucleic acid for analysis of methylation status of SEQ ID NO: 35
aaccctaaatatcccgaataacg

SEQ ID NO: 9376 - DNA, 22 bp, Artificial Sequence
  bisulfite treated nucleic acid for analysis of methylation status of SEQ ID NO: 35
cgcgctatacctctaataaaaa

SEQ ID NO: 9377 - DNA, 20 bp, Artificial Sequence
  bisulfite treated nucleic acid for analysis of methylation status of SEQ ID NO: 35
gtcgcgtagtgtatgcgtag

SEQ ID NO: 9378 - DNA, 21 bp, Artificial Sequence
  bisulfite treated nucleic acid for analysis of methylation status of SEQ ID NO: 35
ttacgatctcgcgtaaaaacc

SEQ ID NO: 9379 - DNA, 22 bp, Artificial Sequence
  bisulfite treated nucleic acid for analysis of methylation status of SEQ ID NO: 35
ccctacgcaaatacgaaactac

SEQ ID NO: 9380 - DNA, 22 bp, Artificial Sequence
  bisulfite treated nucleic acid for analysis of methylation status of SEQ ID NO: 35
ggtagcgataattttacgtgga

SEQ ID NO: 9381 - DNA, 23 bp, Artificial Sequence
  bisulfite treated nucleic acid for analysis of methylation status of SEQ ID NO: 35
aagtcgggaacggtcggagcgtg

SEQ ID NO: 9382 - DNA, 22 bp, Artificial Sequence
  bisulfite treated nucleic acid for analysis of methylation status of SEQ ID NO: 35
gcgataattttacgtggatagg

SEQ ID NO: 9383 - DNA, 22 bp, Artificial Sequence
  bisulfite treated nucleic acid for analysis of methylation status of SEQ ID NO: 35
cctacgcaaatacgaaactacc

SEQ ID NO: 9384 - DNA, 22 bp, Artificial Sequence
  bisulfite treated nucleic acid for analysis of methylation status of SEQ ID NO: 35
aaatacgaaactaccgacaacg

SEQ ID NO: 9385 - DNA, 22 bp, Artificial Sequence
  bisulfite treated nucleic acid for analysis of methylation status of SEQ ID NO: 35
gccgaacgctaaatactaaaaa

SEQ ID NO: 9386 - DNA, 22 bp, Artificial Sequence
  bisulfite treated nucleic acid for analysis of methylation status of SEQ ID NO: 35
tagggtagagagtatcgttgcg

SEQ ID NO: 9387 - DNA, 30 bp, Artificial Sequence
  bisulfite treated nucleic acid for analysis of methylation status of SEQ ID NO: 35
ggggacgtaggcgtttacgtatcgtttagt

SEQ ID NO: 9388 - DNA, 22 bp, Artificial Sequence
  bisulfite treated nucleic acid for analysis of methylation status of SEQ ID NO: 35
tccctacgcaaatacgaaacta

SEQ ID NO: 9389 - DNA, 22 bp, Artificial Sequence
  bisulfite treated nucleic acid for analysis of methylation status of SEQ ID NO: 35
ctacgcaaatacgaaactaccg

SEQ ID NO: 9390 - DNA, 22 bp, Artificial Sequence
  bisulfite treated nucleic acid for analysis of methylation status of SEQ ID NO: 35
aatccaaacgcgaaaatactaa

SEQ ID NO: 9391 - DNA, 22 bp, Artificial Sequence
  bisulfite treated nucleic acid for analysis of methylation status of SEQ ID NO: 35
taaagtgggatcgtcgtagttg

SEQ ID NO: 9392 - DNA, 39 bp, Artificial Sequence
  bisulfite treated nucleic acid for analysis of methylation status of SEQ ID NO: 35
gtttggagattagaacgcgagtttttaaagtatatacgt

SEQ ID NO: 9393 - DNA, 21 bp, Artificial Sequence
  bisulfite treated nucleic acid for analysis of methylation status of SEQ ID NO: 35
tacgcaaatacgaaactaccg

SEQ ID NO: 9394 - DNA, 22 bp, Artificial Sequence
  bisulfite treated nucleic acid for analysis of methylation status of SEQ ID NO: 35
taaactttcccgataccgaata

SEQ ID NO: 9395 - DNA, 23 bp, Artificial Sequence
  bisulfite treated nucleic acid for analysis of methylation status of SEQ ID NO: 35
aattattaaagtgggatcgtcgt

SEQ ID NO: 9396 - DNA, 36 bp, Artificial Sequence
  bisulfite treated nucleic acid for analysis of methylation status of SEQ ID NO: 35
aagttcgattagtgtttggagattagaacgcgagtt

SEQ ID NO: 9397 - DNA, 22 bp, Artificial Sequence
  bisulfite treated nucleic acid for analysis of methylation status of SEQ ID NO: 35
aggtagcgataattttacgtgg

SEQ ID NO: 9398 - DNA, 21 bp, Artificial Sequence
  bisulfite treated nucleic acid for analysis of methylation status of SEQ ID NO: 35
gcaaatacgaaactaccgaca

SEQ ID NO: 9399 - DNA, 22 bp, Artificial Sequence
  bisulfite treated nucleic acid for analysis of methylation status of SEQ ID NO: 35
attaaagtgggatcgtcgtagt

SEQ ID NO: 9400 - DNA, 22 bp, Artificial Sequence
  bisulfite treated nucleic acid for analysis of methylation status of SEQ ID NO: 35
attattaaagtgggatcgtcgt

SEQ ID NO: 9401 - DNA, 22 bp, Artificial Sequence
  bisulfite treated nucleic acid for analysis of methylation status of SEQ ID NO: 35
aaactttcccgataccgaatac

SEQ ID NO: 9402 - DNA, 22 bp, Artificial Sequence
  bisulfite treated nucleic acid for analysis of methylation status of SEQ ID NO: 35
acgacgaaataaataacccctt

SEQ ID NO: 9403 - DNA, 23 bp, Artificial Sequence
  bisulfite treated nucleic acid for analysis of methylation status of SEQ ID NO: 35
ttagttgcgcgtttttagtattt

SEQ ID NO: 9404 - DNA, 25 bp, Artificial Sequence
  bisulfite treated nucleic acid for analysis of methylation status of SEQ ID NO: 35
ggcgttttcggcggagtttcgcgta

SEQ ID NO: 9405 - DNA, 22 bp, Artificial Sequence
  bisulfite treated nucleic acid for analysis of methylation status of SEQ ID NO: 35
gggatcgtcgtagttgaaaagt

SEQ ID NO: 9406 - DNA, 22 bp, Artificial Sequence
  bisulfite treated nucleic acid for analysis of methylation status of SEQ ID NO: 35
cgcgaaaatactaacccaaaat

SEQ ID NO: 9407 - DNA, 22 bp, Artificial Sequence
  bisulfite treated nucleic acid for analysis of methylation status of SEQ ID NO: 35
ttaaagtgggatcgtcgtagtt

SEQ ID NO: 9408 - DNA, 22 bp, Artificial Sequence
  bisulfite treated nucleic acid for analysis of methylation status of SEQ ID NO: 35
atccaaacgcgaaaatactaac

SEQ ID NO: 9409 - DNA, 22 bp, Artificial Sequence
  bisulfite treated nucleic acid for analysis of methylation status of SEQ ID NO: 35
aaataatccaaacgcgaaaata

SEQ ID NO: 9410 - DNA, 22 bp, Artificial Sequence
  bisulfite treated nucleic acid for analysis of methylation status of SEQ ID NO: 35
taaataatccaaacgcgaaaat

SEQ ID NO: 9411 - DNA, 21 bp, Artificial Sequence
  bisulfite treated nucleic acid for analysis of methylation status of SEQ ID NO: 35
agggtagagagtatcgttgcg

SEQ ID NO: 9412 - DNA, 23 bp, Artificial Sequence
  bisulfite treated nucleic acid for analysis of methylation status of SEQ ID NO: 35
agcgataattttacgtggatagg

SEQ ID NO: 9413 - DNA, 22 bp, Artificial Sequence
  bisulfite treated nucleic acid for analysis of methylation status of SEQ ID NO: 35
caaatacgaaactaccgacaac

SEQ ID NO: 9414 - DNA, 22 bp, Artificial Sequence
  bisulfite treated nucleic acid for analysis of methylation status of SEQ ID NO: 35
ttattaaagtgggatcgtcgta

SEQ ID NO: 9415 - DNA, 21 bp, Artificial Sequence
  bisulfite treated nucleic acid for analysis of methylation status of SEQ ID NO: 35
caaacgcgaaaatactaaccc

SEQ ID NO: 9416 - DNA, 21 bp, Artificial Sequence
  bisulfite treated nucleic acid for analysis of methylation status of SEQ ID NO: 35
ccaaacgcgaaaatactaacc

SEQ ID NO: 9417 - DNA, 21 bp, Artificial Sequence
  nucleic acid for analysis of methylation status of SEQ ID NO: 35
acgcgaaaatactaacccaaa

SEQ ID NO: 9418 - DNA, 21 bp, Artificial Sequence
  bisulfite treated nucleic acid for analysis of methylation status of SEQ ID NO: 35
aacgcgaaaatactaacccaa

SEQ ID NO: 9419 - DNA, 21 bp, Artificial Sequence
  bisulfite treated nucleic acid for analysis of methylation status of SEQ ID NO: 35
aaacgcgaaaatactaaccca

SEQ ID NO: 9420 - DNA, 22 bp, Artificial Sequence
  bisulfite treated nucleic acid for analysis of methylation status of SEQ ID NO: 35
tagttgcgcgtttttagtattt

SEQ ID NO: 9421 - DNA, 22 bp, Artificial Sequence
  bisulfite treated nucleic acid for analysis of methylation status of SEQ ID NO: 35
ctaaataatccaaacgcgaaaa

SEQ ID NO: 9422 - DNA, 22 bp, Artificial Sequence
  nucleic acid for analysis of methylation status of SEQ ID NO: 35
ctccctacgcaaatacgaaact

SEQ ID NO: 9423 - DNA, 23 bp, Artificial Sequence
  bisulfite treated nucleic acid for analysis of methylation status of SEQ ID NO: 35
ttattaaagtgggatcgtcgtag

SEQ ID NO: 9424 - DNA, 22 bp, Artificial Sequence
  bisulfite treated nucleic acid for analysis of methylation status of SEQ ID NO: 35
cgataattttacgtggatagga

SEQ ID NO: 9425 - DNA, 23 bp, Artificial Sequence
  bisulfite treated nucleic acid for analysis of methylation status of SEQ ID NO: 35
taatccaaacgcgaaaatactaa

SEQ ID NO: 9426 - DNA, 21 bp, Artificial Sequence
  bisulfite treated nucleic acid for analysis of methylation status of SEQ ID NO: 35
gggatcgtcgtagttgaaaag

SEQ ID NO: 9427 - DNA, 37 bp, Artificial Sequence
  bisulfite treated nucleic acid for analysis of methylation status of SEQ ID NO: 35
attagtgtttggagattagaacgcgagtttttaaagt

SEQ ID NO: 9428 - DNA, 22 bp, Artificial Sequence
  bisulfite treated nucleic acid for analysis of methylation status of SEQ ID NO: 35
tattaaagtgggatcgtcgtag

SEQ ID NO: 9429 - DNA, 22 bp, Artificial Sequence
  bisulfite treated nucleic acid for analysis of methylation status of SEQ ID NO: 35
aataatccaaacgcgaaaatac

SEQ ID NO: 9430 - DNA, 21 bp, Artificial Sequence
  bisulfite treated nucleic acid for analysis of methylation status of SEQ ID NO: 35
aaagtgggatcgtcgtagttg

SEQ ID NO: 9431 - DNA, 23 bp, Artificial Sequence
  bisulfite treated nucleic acid for analysis of methylation status of SEQ ID NO: 35
aggtagcgataattttacgtgga

SEQ ID NO: 9432 - DNA, 20 bp, Artificial Sequence
  bisulfite treated nucleic acid for analysis of methylation status of SEQ ID NO: 35
agtgggatcgtcgtagttga

SEQ ID NO: 9433 - DNA, 21 bp, Artificial Sequence
  bisulfite treated nucleic acid for analysis of methylation status of SEQ ID NO: 35
ctaaactttcccgataccgaa

SEQ ID NO: 9434 - DNA, 21 bp, Artificial Sequence
  bisulfite treated nucleic acid for analysis of methylation status of SEQ ID NO: 35
aatacgaaactaccgacaacg

SEQ ID NO: 9435 - DNA, 20 bp, Artificial Sequence
  bisulfite treated nucleic acid for analysis of methylation status of SEQ ID NO: 35
acgcaaatacgaaactaccg

SEQ ID NO: 9436 - DNA, 22 bp, Artificial Sequence
  bisulfite treated nucleic acid for analysis of methylation status of SEQ ID NO: 35
cgaacgctaaatactaaaaacg

SEQ ID NO: 9437 - DNA, 21 bp, Artificial Sequence
  bisulfite treated nucleic acid for analysis of methylation status of SEQ ID NO: 35
atacgaaactaccgacaacgc

SEQ ID NO: 9438 - DNA, 20 bp, Artificial Sequence
  bisulfite treated nucleic acid for analysis of methylation status of SEQ ID NO: 35
aagtgggatcgtcgtagttg

SEQ ID NO: 9439 - DNA, 22 bp, Artificial Sequence
  bisulfite treated nucleic acid for analysis of methylation status of SEQ ID NO: 35
cgacgaaataaataaccccttc

SEQ ID NO: 9440 - DNA, 21 bp, Artificial Sequence
  bisulfite treated nucleic acid for analysis of methylation status of SEQ ID NO: 35
aaactttcccgataccgaata

SEQ ID NO: 9441 - DNA, 23 bp, Artificial Sequence
  bisulfite treated nucleic acid for analysis of methylation status of SEQ ID NO: 35
aaggtagcgataattttacgtgg

SEQ ID NO: 9442 - DNA, 36 bp, Artificial Sequence
  bisulfite treated nucleic acid for analysis of methylation status of SEQ ID NO: 35
gttcgattagtgtttggagattagaacgcgagtttt

SEQ ID NO: 9443 - DNA, 20 bp, Artificial Sequence
  bisulfite treated nucleic acid for analysis of methylation status of SEQ ID NO: 35
gggatcgtcgtagttgaaaa

SEQ ID NO: 9444 - DNA, 22 bp, Artificial Sequence
  bisulfite treated nucleic acid for analysis of methylation status of SEQ ID NO: 35
aaggtagcgataattttacgtg

SEQ ID NO: 9445 - DNA, 23 bp, Artificial Sequence
  bisulfite treated nucleic acid for analysis of methylation status of SEQ ID NO: 35
gcgataattttacgtggatagga

SEQ ID NO: 9446 - DNA, 22 bp, Artificial Sequence
  bisulfite treated nucleic acid for analysis of methylation status of SEQ ID NO: 35
ataatccaaacgcgaaaatact

SEQ ID NO: 9447 - DNA, 20 bp, Artificial Sequence
  bisulfite treated nucleic acid for analysis of methylation status of SEQ ID NO: 35
gggtagagagtatcgttgcg

SEQ ID NO: 9448 - DNA, 24 bp, Artificial Sequence
  bisulfite treated nucleic acid for analysis of methylation status of SEQ ID NO: 35
tagcgataattttacgtggatagg

SEQ ID NO: 9449 - DNA, 22 bp, Artificial Sequence
  bisulfite treated nucleic acid for analysis of methylation status of SEQ ID NO: 35
gtagcgataattttacgtggat

SEQ ID NO: 9450 - DNA, 21 bp, Artificial Sequence
  bisulfite treated nucleic acid for analysis of methylation status of SEQ ID NO: 35
ttaaagtgggatcgtcgtagt

SEQ ID NO: 9451 - DNA, 22 bp, Artificial Sequence
  bisulfite treated nucleic acid for analysis of methylation status of SEQ ID NO: 35
agcgataattttacgtggatag

SEQ ID NO: 9452 - DNA, 23 bp, Artificial Sequence
  bisulfite treated nucleic acid for analysis of methylation status of SEQ ID NO: 35
ccgaacgctaaatactaaaaacg

SEQ ID NO: 9453 - DNA, 21 bp, Artificial Sequence
  bisulfite treated nucleic acid for analysis of methylation status of SEQ ID NO: 35
cgcaaatacgaaactaccgac

SEQ ID NO: 9454 - DNA, 21 bp, Artificial Sequence
  bisulfite treated nucleic acid for analysis of methylation status of SEQ ID NO: 35
aactttcccgataccgaatac

SEQ ID NO: 9455 - DNA, 20 bp, Artificial Sequence
  bisulfite treated nucleic acid for analysis of methylation status of SEQ ID NO: 35
gaaccgaacgacgaaataaa

SEQ ID NO: 9456 - DNA, 22 bp, Artificial Sequence
  bisulfite treated nucleic acid for analysis of methylation status of SEQ ID NO: 35
ttgcgcgtttttagtatttagc

SEQ ID NO: 9457 - DNA, 22 bp, Artificial Sequence
  bisulfite treated nucleic acid for analysis of methylation status of SEQ ID NO: 35
aacgcgaaaatactaacccaaa

SEQ ID NO: 9458 - DNA, 20 bp, Artificial Sequence
  bisulfite treated nucleic acid for analysis of methylation status of SEQ ID NO: 35
cgaaaaatcacaaacgccta

SEQ ID NO: 9459 - DNA, 21 bp, Artificial Sequence
  nucleic acid for analysis of methylation status of SEQ ID NO: 35
cgccgaacgctaaatactaaa

SEQ ID NO: 9460 - DNA, 21 bp, Artificial Sequence
  bisulfite treated nucleic acid for analysis of methylation status of SEQ ID NO: 35
agttgcgcgtttttagtattt

SEQ ID NO: 9461 - DNA, 23 bp, Artificial Sequence
  bisulfite treated nucleic acid for analysis of methylation status of SEQ ID NO: 35
ttagggtagagagtatcgttgcg

SEQ ID NO: 9462 - DNA, 20 bp, Artificial Sequence
  bisulfite treated nucleic acid for analysis of methylation status of SEQ ID NO: 35
aacccgcaataaccgataac

SEQ ID NO: 9463 - DNA, 29 bp, Artificial Sequence
  bisulfite treated nucleic acid for analysis of methylation status of SEQ ID NO: 35
atttgcgtagggaggtggggcgggggcga

SEQ ID NO: 9464 - DNA, 21 bp, Artificial Sequence
  bisulfite treated nucleic acid for analysis of methylation status of SEQ ID NO: 35
aagtgggatcgtcgtagttga

SEQ ID NO: 9465 - DNA, 21 bp, Artificial Sequence
  bisulfite treated nucleic acid for analysis of methylation status of SEQ ID NO: 35
gtgggatcgtcgtagttgaaa

SEQ ID NO: 9466 - DNA, 20 bp, Artificial Sequence
  bisulfite treated nucleic acid for analysis of methylation status of SEQ ID NO: 35
tacgaaactaccgacaacgc

SEQ ID NO: 9467 - DNA, 20 bp, Artificial Sequence
  bisulfite treated nucleic acid for analysis of methylation status of SEQ ID NO: 35
cgcaaatacgaaactaccga

SEQ ID NO: 9468 - DNA, 21 bp, Artificial Sequence
  bisulfite treated nucleic acid for analysis of methylation status of SEQ ID NO: 35
tccaaacgcgaaaatactaac

SEQ ID NO: 9469 - DNA, 21 bp, Artificial Sequence
  bisulfite treated nucleic acid for analysis of methylation status of SEQ ID NO: 35
ggatcgtcgtagttgaaaagt

SEQ ID NO: 9470 - DNA, 21 bp, Artificial Sequence
  bisulfite treated nucleic acid for analysis of methylation status of SEQ ID NO: 35
aatcgacaataactctccgac

SEQ ID NO: 9471 - DNA, 22 bp, Artificial Sequence
  bisulfite treated nucleic acid for analysis of methylation status of SEQ ID NO: 35
attcgagcggttgtagttttta

SEQ ID NO: 9472 - DNA, 23 bp, Artificial Sequence
  bisulfite treated nucleic acid for analysis of methylation status of SEQ ID NO: 35
aggggagggattcgcgatcgcgt

SEQ ID NO: 9473 - DNA, 24 bp, Artificial Sequence
  bisulfite treated nucleic acid for analysis of methylation status of SEQ ID NO: 35
ttaaggtagcgataattttacgtg

SEQ ID NO: 9474 - DNA, 21 bp, Artificial Sequence
  bisulfite treated nucleic acid for analysis of methylation status of SEQ ID NO: 35
atcgacaataactctccgacc

SEQ ID NO: 9475 - DNA, 20 bp, Artificial Sequence
  bisulfite treated nucleic acid for analysis of methylation status of SEQ ID NO: 35
tttcgcgtcgtttttatttc

SEQ ID NO: 9476 - DNA, 30 bp, Artificial Sequence
  bisulfite treated nucleic acid for analysis of methylation status of SEQ ID NO: 35
ggtcgattcgagcggttgtagtttttaggt

SEQ ID NO: 9477 - DNA, 21 bp, Artificial Sequence
  bisulfite treated nucleic acid for analysis of methylation status of SEQ ID NO: 35
ggtagagagtatcgttgcggt

SEQ ID NO: 9478 - DNA, 25 bp, Artificial Sequence
  bisulfite treated nucleic acid for analysis of methylation status of SEQ ID NO: 35
tttaaggtagcgataattttacgtg

SEQ ID NO: 9479 - DNA, 21 bp, Artificial Sequence
  bisulfite treated nucleic acid for analysis of methylation status of SEQ ID NO: 35
acgcaaatacgaaactaccga

SEQ ID NO: 9480 - DNA, 20 bp, Artificial Sequence
  bisulfite treated nucleic acid for analysis of methylation status of SEQ ID NO: 35
tgggatcgtcgtagttgaaa

SEQ ID NO: 9481 - DNA, 36 bp, Artificial Sequence
  bisulfite treated nucleic acid for analysis of methylation status of SEQ ID NO: 35
ttcgattagtgtttggagattagaacgcgagttttt

SEQ ID NO: 9482 - DNA, 22 bp, Artificial Sequence
  bisulfite treated nucleic acid for analysis of methylation status of SEQ ID NO: 35
aaacgcttaaaaaccgaatacc

SEQ ID NO: 9483 - DNA, 20 bp, Artificial Sequence
  bisulfite treated nucleic acid for analysis of methylation status of SEQ ID NO: 35
gtcgatttcggaagggatag

SEQ ID NO: 9484 - DNA, 25 bp, Artificial Sequence
  bisulfite treated nucleic acid for analysis of methylation status of SEQ ID NO: 35
agagtatcgttgcggttcgagcggt

SEQ ID NO: 9485 - DNA, 19 bp, Artificial Sequence
  bisulfite treated nucleic acid for analysis of methylation status of SEQ ID NO: 35
acgtattcggtatcgggaa

SEQ ID NO: 9486 - DNA, 31 bp, Artificial Sequence
  bisulfite treated nucleic acid for analysis of methylation status of SEQ ID NO: 35
aggcgtttgtgatttttcgaaggattttggg

SEQ ID NO: 9487 - DNA, 22 bp, Artificial Sequence
  bisulfite treated nucleic acid for analysis of methylation status of SEQ ID NO: 35
aaaaacgcttaaaaaccgaata

SEQ ID NO: 9488 - DNA, 22 bp, Artificial Sequence
  bisulfite treated nucleic acid for analysis of methylation status of SEQ ID NO: 35
gaaaaacgcttaaaaaccgaat

SEQ ID NO: 9489 - DNA, 20 bp, Artificial Sequence
  bisulfite treated nucleic acid for analysis of methylation status of SEQ ID NO: 35
cctaacaaaaacgcgaacat

SEQ ID NO: 9490 - DNA, 21 bp, Artificial Sequence
  bisulfite treated nucleic acid for analysis of methylation status of SEQ ID NO: 35
ttcggtatcgggaaagtttag

SEQ ID NO: 9491 - DNA, 38 bp, Artificial Sequence
  bisulfite treated nucleic acid for analysis of methylation status of SEQ ID NO: 35
atttttcgaaggattttgggttagtattttcgcgtttg

SEQ ID NO: 9492 - DNA, 22 bp, Artificial Sequence
  bisulfite treated nucleic acid for analysis of methylation status of SEQ ID NO: 35
aatcgacaataactctccgacc

SEQ ID NO: 9493 - DNA, 21 bp, Artificial Sequence
  bisulfite treated nucleic acid for analysis of methylation status of SEQ ID NO: 35
cgagcggttgtagtttttagg

SEQ ID NO: 9494 - DNA, 23 bp, Artificial Sequence
  bisulfite treated nucleic acid for analysis of methylation status of SEQ ID NO: 35
taaggtagcgataattttacgtg

SEQ ID NO: 9495 - DNA, 19 bp, Artificial Sequence
  bisulfite treated nucleic acid for analysis of methylation status of SEQ ID NO: 35
acctccctacgcaaatacg

SEQ ID NO: 9496 - DNA, 24 bp, Artificial Sequence
  bisulfite treated nucleic acid for analysis of methylation status of SEQ ID NO: 35
aaattattaaagtgggatcgtcgt

SEQ ID NO: 9497 - DNA, 22 bp, Artificial Sequence
  bisulfite treated nucleic acid for analysis of methylation status of SEQ ID NO: 35
aaaaatcgacaataactctccg

SEQ ID NO: 9498 - DNA, 20 bp, Artificial Sequence
  bisulfite treated nucleic acid for analysis of methylation status of SEQ ID NO: 35
gattcgagcggttgtagttt

SEQ ID NO: 9499 - DNA, 21 bp, Artificial Sequence
  bisulfite treated nucleic acid for analysis of methylation status of SEQ ID NO: 35
acgcctaaactttcccgatac

SEQ ID NO: 9500 - DNA, 20 bp, Artificial Sequence
  bisulfite treated nucleic acid for analysis of methylation status of SEQ ID NO: 35
cgacaataactctccgaccc

SEQ ID NO: 9501 - DNA, 24 bp, Artificial Sequence
  bisulfite treated nucleic acid for analysis of methylation status of SEQ ID NO: 35
taaggtagcgataattttacgtgg

SEQ ID NO: 9502 - DNA, 20 bp, Artificial Sequence
  bisulfite treated nucleic acid for analysis of methylation status of SEQ ID NO: 35
cgtattcggtatcgggaaag

SEQ ID NO: 9503 - DNA, 21 bp, Artificial Sequence
  bisulfite treated nucleic acid for analysis of methylation status of SEQ ID NO: 35
attaaagtgggatcgtcgtag

SEQ ID NO: 9504 - DNA, 21 bp, Artificial Sequence
  bisulfite treated nucleic acid for analysis of methylation status of SEQ ID NO: 35
cctaaataatccaaacgcgaa

SEQ ID NO: 9505 - DNA, 22 bp, Artificial Sequence
  bisulfite treated nucleic acid for analysis of methylation status of SEQ ID NO: 35
aaatcgacaataactctccgac

SEQ ID NO: 9506 - DNA, 21 bp, Artificial Sequence
  bisulfite treated nucleic acid for analysis of methylation status of SEQ ID NO: 35
gtttggagattagaacgcgag

SEQ ID NO: 9507 - DNA, 31 bp, Artificial Sequence
  bisulfite treated nucleic acid for analysis of methylation status of SEQ ID NO: 35
tacgtattcggtatcgggaaagtttaggcgt

SEQ ID NO: 9508 - DNA, 20 bp, Artificial Sequence
  bisulfite treated nucleic acid for analysis of methylation status of SEQ ID NO: 35
cgacttctacctacaccccg

SEQ ID NO: 9509 - DNA, 22 bp, Artificial Sequence
  bisulfite treated nucleic acid for analysis of methylation status of SEQ ID NO: 35
ttagtattttcgcgtttggatt

SEQ ID NO: 9510 - DNA, 44 bp, Artificial Sequence
  bisulfite treated nucleic acid for analysis of methylation status of SEQ ID NO: 35
tacgttataagaaagatgtgggggagatttcgatgttcgcgttt

SEQ ID NO: 9511 - DNA, 23 bp, Artificial Sequence
  bisulfite treated nucleic acid for analysis of methylation status of SEQ ID NO: 35
tagcgataattttacgtggatag

SEQ ID NO: 9512 - DNA, 22 bp, Artificial Sequence
  bisulfite treated nucleic acid for analysis of methylation status of SEQ ID NO: 35
ttcgagcggttgtagtttttag

SEQ ID NO: 9513 - DNA, 20 bp, Artificial Sequence
  bisulfite treated nucleic acid for analysis of methylation status of SEQ ID NO: 35
cgcctaaactttcccgatac

SEQ ID NO: 9514 - DNA, 19 bp, Artificial Sequence
  bisulfite treated nucleic acid for analysis of methylation status of SEQ ID NO: 35
acccgcaataaccgataac

SEQ ID NO: 9515 - DNA, 22 bp, Artificial Sequence
  bisulfite treated nucleic acid for analysis of methylation status of SEQ ID NO: 35
tattttcgcgtttggattattt

SEQ ID NO: 9516 - DNA, 22 bp, Artificial Sequence
  bisulfite treated nucleic acid for analysis of methylation status of SEQ ID NO: 35
attttcgcgtttggattattta

SEQ ID NO: 9517 - DNA, 21 bp, Artificial Sequence
  bisulfite treated nucleic acid for analysis of methylation status of SEQ ID NO: 35
tgcgcgtttttagtatttagc

SEQ ID NO: 9518 - DNA, 20 bp, Artificial Sequence
  bisulfite treated nucleic acid for analysis of methylation status of SEQ ID NO: 35
tttggagattagaacgcgag

SEQ ID NO: 9519 - DNA, 19 bp, Artificial Sequence
  bisulfite treated nucleic acid for analysis of methylation status of SEQ ID NO: 35
aaaacgcgaacatcgaaat

SEQ ID NO: 9520 - DNA, 22 bp, Artificial Sequence
  bisulfite treated nucleic acid for analysis of methylation status of SEQ ID NO: 35
attcggtatcgggaaagtttag

SEQ ID NO: 9521 - DNA, 23 bp, Artificial Sequence
  bisulfite treated nucleic acid for analysis of methylation status of SEQ ID NO: 35
attattaaagtgggatcgtcgta

SEQ ID NO: 9522 - DNA, 22 bp, Artificial Sequence
  bisulfite treated nucleic acid for analysis of methylation status of SEQ ID NO: 35
aaaacgcttaaaaaccgaatac

SEQ ID NO: 9523 - DNA, 20 bp, Artificial Sequence
  bisulfite treated nucleic acid for analysis of methylation status of SEQ ID NO: 35
cgcgacttctacctacaccc

SEQ ID NO: 9524 - DNA, 20 bp, Artificial Sequence
  bisulfite treated nucleic acid for analysis of methylation status of SEQ ID NO: 35
acgcctaaactttcccgata

SEQ ID NO: 9525 - DNA, 24 bp, Artificial Sequence
  bisulfite treated nucleic acid for analysis of methylation status of SEQ ID NO: 35
attattaaagtgggatcgtcgtag

SEQ ID NO: 9526 - DNA, 19 bp, Artificial Sequence
  bisulfite treated nucleic acid for analysis of methylation status of SEQ ID NO: 35
cctccctacgcaaatacga

SEQ ID NO: 9527 - DNA, 19 bp, Artificial Sequence
  bisulfite treated nucleic acid for analysis of methylation status of SEQ ID NO: 35
tcgatttcggaagggatag

SEQ ID NO: 9528 - DNA, 20 bp, Artificial Sequence
  bisulfite treated nucleic acid for analysis of methylation status of SEQ ID NO: 35
gcgcgacttctacctacacc

SEQ ID NO: 9529 - DNA, 22 bp, Artificial Sequence
  bisulfite treated nucleic acid for analysis of methylation status of SEQ ID NO: 35
ttttcgcgtttggattatttag

SEQ ID NO: 9530 - DNA, 19 bp, Artificial Sequence
  bisulfite treated nucleic acid for analysis of methylation status of SEQ ID NO: 35
cggagtttcgcgtattttt

SEQ ID NO: 9531 - DNA, 31 bp, Artificial Sequence
  bisulfite treated nucleic acid for analysis of methylation status of SEQ ID NO: 35
aatttaggttttttcgggagttttggggcgg

SEQ ID NO: 9532 - DNA, 19 bp, Artificial Sequence
  bisulfite treated nucleic acid for analysis of methylation status of SEQ ID NO: 35
aaactaccgacaacgcgac

SEQ ID NO: 9533 - DNA, 20 bp, Artificial Sequence
  bisulfite treated nucleic acid for analysis of methylation status of SEQ ID NO: 35
gaacccgcaataaccgataa

SEQ ID NO: 9534 - DNA, 19 bp, Artificial Sequence
  bisulfite treated nucleic acid for analysis of methylation status of SEQ ID NO: 35
acgaaactaccgacaacgc

SEQ ID NO: 9535 - DNA, 22 bp, Artificial Sequence
  nucleic acid for analysis of methylation status of SEQ ID NO: 35
aaacgcgaaaatactaacccaa

SEQ ID NO: 9536 - DNA, 24 bp, Artificial Sequence
  bisulfite treated nucleic acid for analysis of methylation status of SEQ ID NO: 35
aattattaaagtgggatcgtcgta

SEQ ID NO: 9537 - DNA, 21 bp, Artificial Sequence
  bisulfite treated nucleic acid for analysis of methylation status of SEQ ID NO: 35
aacgcctaaactttcccgata

SEQ ID NO: 9538 - DNA, 18 bp, Artificial Sequence
  bisulfite treated nucleic acid for analysis of methylation status of SEQ ID NO: 35
cctacgtccccgaaaaac

SEQ ID NO: 9539 - DNA, 22 bp, Artificial Sequence
  bisulfite treated nucleic acid for analysis of methylation status of SEQ ID NO: 35
gtagagagtatcgttgcggttc

SEQ ID NO: 9540 - DNA, 26 bp, Artificial Sequence
  bisulfite treated nucleic acid for analysis of methylation status of SEQ ID NO: 35
ttcgagcggttcgggtttttaggcgt

SEQ ID NO: 9541 - DNA, 18 bp, Artificial Sequence
  bisulfite treated nucleic acid for analysis of methylation status of SEQ ID NO: 35
gtaaacgcctacgtcccc

SEQ ID NO: 9542 - DNA, 23 bp, Artificial Sequence
  bisulfite treated nucleic acid for analysis of methylation status of SEQ ID NO: 35
aacgacgaaataaataacccctt

SEQ ID NO: 9543 - DNA, 21 bp, Artificial Sequence
  bisulfite treated nucleic acid for analysis of methylation status of SEQ ID NO: 35
aacgcttaaaaaccgaatacc

SEQ ID NO: 9544 - DNA, 22 bp, Artificial Sequence
  bisulfite treated nucleic acid for analysis of methylation status of SEQ ID NO: 35
gttagtattttcgcgtttggat

SEQ ID NO: 9545 - DNA, 20 bp, Artificial Sequence
  bisulfite treated nucleic acid for analysis of methylation status of SEQ ID NO: 35
aaaaacgcgaacatcgaaat

SEQ ID NO: 9546 - DNA, 21 bp, Artificial Sequence
  bisulfite treated nucleic acid for analysis of methylation status of SEQ ID NO: 35
acctaacaaaaacgcgaacat

SEQ ID NO: 9547 - DNA, 21 bp, Artificial Sequence
  bisulfite treated nucleic acid for analysis of methylation status of SEQ ID NO: 35
gtatcgggaaagtttaggcgt

SEQ ID NO: 9548 - DNA, 18 bp, Artificial Sequence
  bisulfite treated nucleic acid for analysis of methylation status of SEQ ID NO: 35
tcacgaacccgcaataac

SEQ ID NO: 9549 - DNA, 20 bp, Artificial Sequence
  bisulfite treated nucleic acid for analysis of methylation status of SEQ ID NO: 35
cggtatcgggaaagtttagg

SEQ ID NO: 9550 - DNA, 22 bp, Artificial Sequence
  bisulfite treated nucleic acid for analysis of methylation status of SEQ ID NO: 35
gtattttcgcgtttggattatt

SEQ ID NO: 9551 - DNA, 22 bp, Artificial Sequence
  bisulfite treated nucleic acid for analysis of methylation status of SEQ ID NO: 25
tacgttcggttaatttttggat

SEQ ID NO: 9552 - DNA, 22 bp, Artificial Sequence
  bisulfite treated nucleic acid for analysis of methylation status of SEQ ID NO: 25
acgcaataactcacgcctataa

SEQ ID NO: 9553 - DNA, 33 bp, Artificial Sequence
  bisulfite treated nucleic acid for analysis of methylation status of SEQ ID NO: 25
aacgtttgattttaggtgattcgttcgtttcgg

SEQ ID NO: 9554 - DNA, 21 bp, Artificial Sequence
  bisulfite treated nucleic acid for analysis of methylation status of SEQ ID NO: 25
cgcaataactcacgcctataa

SEQ ID NO: 9555 - DNA, 22 bp, Artificial Sequence
  bisulfite treated nucleic acid for analysis of methylation status of SEQ ID NO: 25
ttacgttcggttaatttttgga

SEQ ID NO: 9556 - DNA, 22 bp, Artificial Sequence
  bisulfite treated nucleic acid for analysis of methylation status of SEQ ID NO: 25
acgttcggttaatttttggatt

SEQ ID NO: 9557 - DNA, 21 bp, Artificial Sequence
  bisulfite treated nucleic acid for analysis of methylation status of SEQ ID NO: 25
cgttcggttaatttttggatt

SEQ ID NO: 9558 - DNA, 21 bp, Artificial Sequence
  bisulfite treated nucleic acid for analysis of methylation status of SEQ ID NO: 25
aacgcaataactcacgcctat

SEQ ID NO: 9559 - DNA, 23 bp, Artificial Sequence
  bisulfite treated nucleic acid for analysis of methylation status of SEQ ID NO: 25
attacgttcggttaatttttgga

SEQ ID NO: 9560 - DNA, 22 bp, Artificial Sequence
  bisulfite treated nucleic acid for analysis of methylation status of SEQ ID NO: 25
tcgtttaaggcgaagaatttta

SEQ ID NO: 9561 - DNA, 19 bp, Artificial Sequence
  bisulfite treated nucleic acid for analysis of methylation status of SEQ ID NO: 25
ctatacgaacctcccctcg

SEQ ID NO: 9562 - DNA, 22 bp, Artificial Sequence
  bisulfite treated nucleic acid for analysis of methylation status of SEQ ID NO: 25
gaaggcgggggtatagcggcgg

SEQ ID NO: 9563 - DNA, 24 bp, Artificial Sequence
  bisulfite treated nucleic acid for analysis of methylation status of SEQ ID NO: 25
tattacgttcggttaatttttgga

SEQ ID NO: 9564 - DNA, 22 bp, Artificial Sequence
  bisulfite treated nucleic acid for analysis of methylation status of SEQ ID NO: 25
tttaaggcgaagaattttaacg

SEQ ID NO: 9565 - DNA, 22 bp, Artificial Sequence
  bisulfite treated nucleic acid for analysis of methylation status of SEQ ID NO: 25
cggtagcgtttgttgtttttat

SEQ ID NO: 9566 - DNA, 18 bp, Artificial Sequence
  bisulfite treated nucleic acid for analysis of methylation status of SEQ ID NO: 25
atttcgggtcggagtgtt

SEQ ID NO: 9567 - DNA, 22 bp, Artificial Sequence
  bisulfite treated nucleic acid for analysis of methylation status of SEQ ID NO: 25
acgaaactaacacgctaacgat

SEQ ID NO: 9568 - DNA, 22 bp, Artificial Sequence
  bisulfite treated nucleic acid for analysis of methylation status of SEQ ID NO: 25
ttaggcgtcggcggtagggcgg

SEQ ID NO: 9569 - DNA, 18 bp, Artificial Sequence
  bisulfite treated nucleic acid for analysis of methylation status of SEQ ID NO: 25
aatttcgggtcggagtgt

SEQ ID NO: 9570 - DNA, 22 bp, Artificial Sequence
  bisulfite treated nucleic acid for analysis of methylation status of SEQ ID NO: 25
tccgacgctaaataataccaac

SEQ ID NO: 9571 - DNA, 19 bp, Artificial Sequence
  bisulfite treated nucleic acid for analysis of methylation status of SEQ ID NO: 25
gtcgtattttcgtttgggg

SEQ ID NO: 9572 - DNA, 22 bp, Artificial Sequence
  bisulfite treated nucleic acid for analysis of methylation status of SEQ ID NO: 25
ggggtagcggcggtacggtcgt

SEQ ID NO: 9573 - DNA, 22 bp, Artificial Sequence
  bisulfite treated nucleic acid for analysis of methylation status of SEQ ID NO: 25
aaacctcaacgaaaaactacga

SEQ ID NO: 9574 - DNA, 19 bp, Artificial Sequence
  bisulfite treated nucleic acid for analysis of methylation status of SEQ ID NO: 25
gtcgggttttaagcgtttc

SEQ ID NO: 9575 - DNA, 36 bp, Artificial Sequence
  bisulfite treated nucleic acid for analysis of methylation status of SEQ ID NO: 25
ttcgttatttggtgggggtagtaggcgttatcgatt

SEQ ID NO: 9576 - DNA, 20 bp, Artificial Sequence
  bisulfite treated nucleic acid for analysis of methylation status of SEQ ID NO: 25
cgtattttcgtttggggaag

SEQ ID NO: 9577 - DNA, 22 bp, Artificial Sequence
  bisulfite treated nucleic acid for analysis of methylation status of SEQ ID NO: 25
ctccgacgctaaataataccaa

SEQ ID NO: 9578 - DNA, 22 bp, Artificial Sequence
  bisulfite treated nucleic acid for analysis of methylation status of SEQ ID NO: 25
cgacgctaaataataccaacaa

SEQ ID NO: 9579 - DNA, 22 bp, Artificial Sequence
  bisulfite treated nucleic acid for analysis of methylation status of SEQ ID NO: 25
ccgacgctaaataataccaaca

SEQ ID NO: 9580 - DNA, 20 bp, Artificial Sequence
  bisulfite treated nucleic acid for analysis of methylation status of SEQ ID NO: 25
aaaactccgtccgacaaaac

SEQ ID NO: 9581 - DNA, 22 bp, Artificial Sequence
  bisulfite treated nucleic acid for analysis of methylation status of SEQ ID NO: 25
tgttggtattatttagcgtcgg

SEQ ID NO: 9582 - DNA, 31 bp, Artificial Sequence
  bisulfite treated nucleic acid for analysis of methylation status of SEQ ID NO: 25
gggtgttttgtcgcgatatatcgatagtcgg

SEQ ID NO: 9583 - DNA, 20 bp, Artificial Sequence
  bisulfite treated nucleic acid for analysis of methylation status of SEQ ID NO: 25
gtcgtattttcgtttgggga

SEQ ID NO: 9584 - DNA, 19 bp, Artificial Sequence
  bisulfite treated nucleic acid for analysis of methylation status of SEQ ID NO: 25
tcgtattttcgtttgggga

SEQ ID NO: 9585 - DNA, 22 bp, Artificial Sequence
  bisulfite treated nucleic acid for analysis of methylation status of SEQ ID NO: 25
tctccgacgctaaataatacca

SEQ ID NO: 9586 - DNA, 19 bp, Artificial Sequence
  bisulfite treated nucleic acid for analysis of methylation status of SEQ ID NO: 25
aaactccgtccgacaaaac

SEQ ID NO: 9587 - DNA, 23 bp, Artificial Sequence
  bisulfite treated nucleic acid for analysis of methylation status of SEQ ID NO: 25
aatctccgacgctaaataatacc

SEQ ID NO: 9588 - DNA, 22 bp, Artificial Sequence
  bisulfite treated nucleic acid for analysis of methylation status of SEQ ID NO: 25
acctcaacgaaaaactacgaaa

SEQ ID NO: 9589 - DNA, 18 bp, Artificial Sequence
  bisulfite treated nucleic acid for analysis of methylation status of SEQ ID NO: 25
cgtcgggttttaagcgtt

SEQ ID NO: 9590 - DNA, 36 bp, Artificial Sequence
  bisulfite treated nucleic acid for analysis of methylation status of SEQ ID NO: 25
atttcgttatttggtgggggtagtaggcgttatcga

SEQ ID NO: 9591 - DNA, 22 bp, Artificial Sequence
  bisulfite treated nucleic acid for analysis of methylation status of SEQ ID NO: 25
atctccgacgctaaataatacc

SEQ ID NO: 9592 - DNA, 18 bp, Artificial Sequence
  bisulfite treated nucleic acid for analysis of methylation status of SEQ ID NO: 25
tcgtcgggttttaagcgt

SEQ ID NO: 9593 - DNA, 21 bp, Artificial Sequence
  bisulfite treated nucleic acid for analysis of methylation status of SEQ ID NO: 25
caaatctccgacgctaaataa

SEQ ID NO: 9594 - DNA, 21 bp, Artificial Sequence
  bisulfite treated nucleic acid for analysis of methylation status of SEQ ID NO: 25
gttggtattatttagcgtcgg

SEQ ID NO: 9595 - DNA, 18 bp, Artificial Sequence
  bisulfite treated nucleic acid for analysis of methylation status of SEQ ID NO: 25
tcgggttttaagcgtttc

SEQ ID NO: 9596 - DNA, 20 bp, Artificial Sequence
  bisulfite treated nucleic acid for analysis of methylation status of SEQ ID NO: 25
cgcgacaaaacaccctatac

SEQ ID NO: 9597 - DNA, 38 bp, Artificial Sequence
  bisulfite treated nucleic acid for analysis of methylation status of SEQ ID NO: 25
tggtcgaggttttgttggtattatttagcgtcggagat

SEQ ID NO: 9598 - DNA, 22 bp, Artificial Sequence
  bisulfite treated nucleic acid for analysis of methylation status of SEQ ID NO: 36
tcgaggttatagtcgtggtttc

SEQ ID NO: 9599 - DNA, 22 bp, Artificial Sequence
  bisulfite treated nucleic acid for analysis of methylation status of SEQ ID NO: 36
gaaaaataaatacaacgcgctc

SEQ ID NO: 9600 - DNA, 25 bp, Artificial Sequence
  bisulfite treated nucleic acid for analysis of methylation status of SEQ ID NO: 36
tgttcgtgacgggcgttttcgagga

SEQ ID NO: 9601 - DNA, 22 bp, Artificial Sequence
  bisulfite treated nucleic acid for analysis of methylation status of SEQ ID NO: 36
aaaataaatacaacgcgctcat

SEQ ID NO: 9602 - DNA, 22 bp, Artificial Sequence
  bisulfite treated nucleic acid for analysis of methylation status of SEQ ID NO: 36
gaggttatagtcgtggtttcgt

SEQ ID NO: 9603 - DNA, 22 bp, Artificial Sequence
  bisulfite treated nucleic acid for analysis of methylation status of SEQ ID NO: 36
aaaaataaatacaacgcgctca

SEQ ID NO: 9604 - DNA, 22 bp, Artificial Sequence
  bisulfite treated nucleic acid for analysis of methylation status of SEQ ID NO: 36
aggttatagtcgtggtttcgtt

SEQ ID NO: 9605 - DNA, 22 bp, Artificial Sequence
  bisulfite treated nucleic acid for analysis of methylation status of SEQ ID NO: 36
atcgaggttatagtcgtggttt

SEQ ID NO: 9606 - DNA, 23 bp, Artificial Sequence
  bisulfite treated nucleic acid for analysis of methylation status of SEQ ID NO: 36
aaataaatacaacgcgctcatta

SEQ ID NO: 9607 - DNA, 22 bp, Artificial Sequence
  bisulfite treated nucleic acid for analysis of methylation status of SEQ ID NO: 36
aataaatacaacgcgctcatta

SEQ ID NO: 9608 - DNA, 21 bp, Artificial Sequence
  bisulfite treated nucleic acid for analysis of methylation status of SEQ ID NO: 36
gttttcgaggacgaagttgat

SEQ ID NO: 9609 - DNA, 22 bp, Artificial Sequence
  bisulfite treated nucleic acid for analysis of methylation status of SEQ ID NO: 36
aacccgatacaaaatctacgaa

SEQ ID NO: 9610 - DNA, 37 bp, Artificial Sequence
  bisulfite treated nucleic acid for analysis of methylation status of SEQ ID NO: 36
gaattcgcgtttgagtcgtcgtttcggattttcggtg

SEQ ID NO: 9611 - DNA, 22 bp, Artificial Sequence
  bisulfite treated nucleic acid for analysis of methylation status of SEQ ID NO: 36
aaacccgatacaaaatctacga

SEQ ID NO: 9612 - DNA, 23 bp, Artificial Sequence
  bisulfite treated nucleic acid for analysis of methylation status of SEQ ID NO: 36
ttttatcgaggttatagtcgtgg

SEQ ID NO: 9613 - DNA, 23 bp, Artificial Sequence
  bisulfite treated nucleic acid for analysis of methylation status of SEQ ID NO: 36
atcgaggttatagtcgtggtttc

SEQ ID NO: 9614 - DNA, 22 bp, Artificial Sequence
  bisulfite treated nucleic acid for analysis of methylation status of SEQ ID NO: 36
gtttagtttattttgcggtcgt

SEQ ID NO: 9615 - DNA, 22 bp, Artificial Sequence
  bisulfite treated nucleic acid for analysis of methylation status of SEQ ID NO: 36
aaaccacgactataacctcgat

SEQ ID NO: 9616 - DNA, 30 bp, Artificial Sequence
  bisulfite treated nucleic acid for analysis of methylation status of SEQ ID NO: 36
agggaggtcgttggtattcgtgatttacga

SEQ ID NO: 9617 - DNA, 22 bp, Artificial Sequence
  bisulfite treated nucleic acid for analysis of methylation status of SEQ ID NO: 36
tttatcgaggttatagtcgtgg

SEQ ID NO: 9618 - DNA, 22 bp, Artificial Sequence
  bisulfite treated nucleic acid for analysis of methylation status of SEQ ID NO: 36
ttagtttattttgcggtcgttt

SEQ ID NO: 9619 - DNA, 23 bp, Artificial Sequence
  bisulfite treated nucleic acid for analysis of methylation status of SEQ ID NO: 36
aaccacgactataacctcgataa

SEQ ID NO: 9620 - DNA, 31 bp, Artificial Sequence
  bisulfite treated nucleic acid for analysis of methylation status of SEQ ID NO: 36
gggaggtcgttggtattcgtgatttacgatt

SEQ ID NO: 9621 - DNA, 23 bp, Artificial Sequence
  bisulfite treated nucleic acid for analysis of methylation status of SEQ ID NO: 36
ttatcgaggttatagtcgtggtt

SEQ ID NO: 9622 - DNA, 23 bp, Artificial Sequence
  bisulfite treated nucleic acid for analysis of methylation status of SEQ ID NO: 36
tatcgaggttatagtcgtggttt

SEQ ID NO: 9623 - DNA, 22 bp, Artificial Sequence
  bisulfite treated nucleic acid for analysis of methylation status of SEQ ID NO: 36
acccgatacaaaatctacgaac

SEQ ID NO: 9624 - DNA, 23 bp, Artificial Sequence
  bisulfite treated nucleic acid for analysis of methylation status of SEQ ID NO: 36
gaaaccacgactataacctcgat

SEQ ID NO: 9625 - DNA, 21 bp, Artificial Sequence
  bisulfite treated nucleic acid for analysis of methylation status of SEQ ID NO: 36
ttttcgaggacgaagttgatt

SEQ ID NO: 9626 - DNA, 24 bp, Artificial Sequence
  bisulfite treated nucleic acid for analysis of methylation status of SEQ ID NO: 36
gttttatcgaggttatagtcgtgg

SEQ ID NO: 9627 - DNA, 20 bp, Artificial Sequence
  bisulfite treated nucleic acid for analysis of methylation status of SEQ ID NO: 36
attttgatcgggtcgttttt

SEQ ID NO: 9628 - DNA, 22 bp, Artificial Sequence
  bisulfite treated nucleic acid for analysis of methylation status of SEQ ID NO: 36
attattctacacgtcaatcccg

SEQ ID NO: 9629 - DNA, 34 bp, Artificial Sequence
  bisulfite treated nucleic acid for analysis of methylation status of SEQ ID NO: 36
ttcggtgttcgtcggttcgtagattttgtatcgg

SEQ ID NO: 9630 - DNA, 22 bp, Artificial Sequence
  bisulfite treated nucleic acid for analysis of methylation status of SEQ ID NO: 36
cgatacaaaatctacgaaccga

SEQ ID NO: 9631 - DNA, 22 bp, Artificial Sequence
  bisulfite treated nucleic acid for analysis of methylation status of SEQ ID NO: 36
accacgactataacctcgataa

SEQ ID NO: 9632 - DNA, 22 bp, Artificial Sequence
  bisulfite treated nucleic acid for analysis of methylation status of SEQ ID NO: 36
tttagtttattttgcggtcgtt

SEQ ID NO: 9633 - DNA, 22 bp, Artificial Sequence
  bisulfite treated nucleic acid for analysis of methylation status of SEQ ID NO: 36
tatcgaggttatagtcgtggtt

SEQ ID NO: 9634 - DNA, 21 bp, Artificial Sequence
  bisulfite treated nucleic acid for analysis of methylation status of SEQ ID NO: 36
aaaataaatacaacgcgctca

SEQ ID NO: 9635 - DNA, 21 bp, Artificial Sequence
  bisulfite treated nucleic acid for analysis of methylation status of SEQ ID NO: 36
aaaatctacgaaccgacgaac

SEQ ID NO: 9636 - DNA, 41 bp, Artificial Sequence
  bisulfite treated nucleic acid for analysis of methylation status of SEQ ID NO: 36
ttattggaattcgcgtttgagtcgtcgtttcggattttcgg

SEQ ID NO: 9637 - DNA, 22 bp, Artificial Sequence
  bisulfite treated nucleic acid for analysis of methylation status of SEQ ID NO: 36
actacgaatccaaacccgatac

SEQ ID NO: 9638 - DNA, 20 bp, Artificial Sequence
  bisulfite treated nucleic acid for analysis of methylation status of SEQ ID NO: 36
gttttcgaggacgaagttga

SEQ ID NO: 9639 - DNA, 22 bp, Artificial Sequence
  bisulfite treated nucleic acid for analysis of methylation status of SEQ ID NO: 36
caaacccgatacaaaatctacg

SEQ ID NO: 9640 - DNA, 21 bp, Artificial Sequence
  bisulfite treated nucleic acid for analysis of methylation status of SEQ ID NO: 36
cgaggttatagtcgtggtttc

SEQ ID NO: 9641 - DNA, 21 bp, Artificial Sequence
  bisulfite treated nucleic acid for analysis of methylation status of SEQ ID NO: 36
ctacgaatccaaacccgatac

SEQ ID NO: 9642 - DNA, 26 bp, Artificial Sequence
  bisulfite treated nucleic acid for analysis of methylation status of SEQ ID NO: 36
tttgttcgtgacgggcgttttcgagg

SEQ ID NO: 9643 - DNA, 20 bp, Artificial Sequence
  bisulfite treated nucleic acid for analysis of methylation status of SEQ ID NO: 36
tttcgaggacgaagttgatt

SEQ ID NO: 9644 - DNA, 20 bp, Artificial Sequence
  bisulfite treated nucleic acid for analysis of methylation status of SEQ ID NO: 36
ttttcgaggacgaagttgat

SEQ ID NO: 9645 - DNA, 20 bp, Artificial Sequence
  bisulfite treated nucleic acid for analysis of methylation status of SEQ ID NO: 36
gattttgatcgggtcgtttt

SEQ ID NO: 9646 - DNA, 23 bp, Artificial Sequence
  bisulfite treated nucleic acid for analysis of methylation status of SEQ ID NO: 36
ttcggtcgtgtttatatttgttc

SEQ ID NO: 9647 - DNA, 21 bp, Artificial Sequence
  bisulfite treated nucleic acid for analysis of methylation status of SEQ ID NO: 36
aaatcaacttcgtcctcgaaa

SEQ ID NO: 9648 - DNA, 40 bp, Artificial Sequence
  bisulfite treated nucleic acid for analysis of methylation status of SEQ ID NO: 36
ggatgatttagtattgaaaagtttcggtcggtttttttag

SEQ ID NO: 9649 - DNA, 22 bp, Artificial Sequence
  bisulfite treated nucleic acid for analysis of methylation status of SEQ ID NO: 36
tacaaaatctacgaaccgacga

SEQ ID NO: 9650 - DNA, 22 bp, Artificial Sequence
  bisulfite treated nucleic acid for analysis of methylation status of SEQ ID NO: 36
aaccacgactataacctcgata

SEQ ID NO: 9651 - DNA, 21 bp, Artificial Sequence
  bisulfite treated nucleic acid for analysis of methylation status of SEQ ID NO: 36
gtttagtttattttgcggtcg

SEQ ID NO: 9652 - DNA, 22 bp, Artificial Sequence
  bisulfite treated nucleic acid for analysis of methylation status of SEQ ID NO: 36
acgaaaccacgactataacctc

SEQ ID NO: 9653 - DNA, 22 bp, Artificial Sequence
  bisulfite treated nucleic acid for analysis of methylation status of SEQ ID NO: 36
cccgatacaaaatctacgaacc

SEQ ID NO: 9654 - DNA, 22 bp, Artificial Sequence
  bisulfite treated nucleic acid for analysis of methylation status of SEQ ID NO: 36
tcggtcgtgtttatatttgttc

SEQ ID NO: 9655 - DNA, 40 bp, Artificial Sequence
  bisulfite treated nucleic acid for analysis of methylation status of SEQ ID NO: 36
gatgatttagtattgaaaagtttcggtcggtttttttagg

SEQ ID NO: 9656 - DNA, 19 bp, Artificial Sequence
  bisulfite treated nucleic acid for analysis of methylation status of SEQ ID NO: 36
ttttgatcgggtcgttttt

SEQ ID NO: 9657 - DNA, 21 bp, Artificial Sequence
  bisulfite treated nucleic acid for analysis of methylation status of SEQ ID NO: 36
ttcgaggacgaagttgatttt

SEQ ID NO: 9658 - DNA, 21 bp, Artificial Sequence
  bisulfite treated nucleic acid for analysis of methylation status of SEQ ID NO: 36
tttcgaggacgaagttgattt

SEQ ID NO: 9659 - DNA, 21 bp, Artificial Sequence
  bisulfite treated nucleic acid for analysis of methylation status of SEQ ID NO: 36
cgcccgaaaaataaatacaac

SEQ ID NO: 9660 - DNA, 21 bp, Artificial Sequence
  bisulfite treated nucleic acid for analysis of methylation status of SEQ ID NO: 36
cccgaaaaataaatacaacgc

SEQ ID NO: 9661 - DNA, 21 bp, Artificial Sequence
  bisulfite treated nucleic acid for analysis of methylation status of SEQ ID NO: 36
ggttatagtcgtggtttcgtt

SEQ ID NO: 9662 - DNA, 22 bp, Artificial Sequence
  bisulfite treated nucleic acid for analysis of methylation status of SEQ ID NO: 36
cgttcggtcgtgtttatatttg

SEQ ID NO: 9663 - DNA, 21 bp, Artificial Sequence
  bisulfite treated nucleic acid for analysis of methylation status of SEQ ID NO: 36
aatcaacttcgtcctcgaaaa

SEQ ID NO: 9664 - DNA, 20 bp, Artificial Sequence
  bisulfite treated nucleic acid for analysis of methylation status of SEQ ID NO: 36
cgcccgaaaaataaatacaa

SEQ ID NO: 9665 - DNA, 25 bp, Artificial Sequence
  bisulfite treated nucleic acid for analysis of methylation status of SEQ ID NO: 36
gagttttatcgaggttatagtcgtg

SEQ ID NO: 9666 - DNA, 22 bp, Artificial Sequence
  bisulfite treated nucleic acid for analysis of methylation status of SEQ ID NO: 36
ttcggtcgtgtttatatttgtt

SEQ ID NO: 9667 - DNA, 19 bp, Artificial Sequence
  bisulfite treated nucleic acid for analysis of methylation status of SEQ ID NO: 36
tttagggttttcgaggacg

SEQ ID NO: 9668 - DNA, 20 bp, Artificial Sequence
  bisulfite treated nucleic acid for analysis of methylation status of SEQ ID NO: 36
ttttagggttttcgaggacg

SEQ ID NO: 9669 - DNA, 29 bp, Artificial Sequence
  bisulfite treated nucleic acid for analysis of methylation status of SEQ ID NO: 36
gttttttgttcgtgacgggcgttttcgag

SEQ ID NO: 9670 - DNA, 21 bp, Artificial Sequence
  bisulfite treated nucleic acid for analysis of methylation status of SEQ ID NO: 36
tattctacacgtcaatcccga

SEQ ID NO: 9671 - DNA, 22 bp, Artificial Sequence
  bisulfite treated nucleic acid for analysis of methylation status of SEQ ID NO: 36
tctacacgtcaatcccgactac

SEQ ID NO: 9672 - DNA, 19 bp, Artificial Sequence
  bisulfite treated nucleic acid for analysis of methylation status of SEQ ID NO: 36
ttagggttttcgaggacga

SEQ ID NO: 9673 - DNA, 23 bp, Artificial Sequence
  bisulfite treated nucleic acid for analysis of methylation status of SEQ ID NO: 36
gttcggtcgtgtttatatttgtt

SEQ ID NO: 9674 - DNA, 44 bp, Artificial Sequence
  bisulfite treated nucleic acid for analysis of methylation status of SEQ ID NO: 36
ttttcggaggatgatttagtattgaaaagtttcggtcggttttt

SEQ ID NO: 9675 - DNA, 20 bp, Artificial Sequence
  bisulfite treated nucleic acid for analysis of methylation status of SEQ ID NO: 36
tagggttttcgaggacgaag

SEQ ID NO: 9676 - DNA, 20 bp, Artificial Sequence
  bisulfite treated nucleic acid for analysis of methylation status of SEQ ID NO: 36
cgaggacgaagttgattttg

SEQ ID NO: 9677 - DNA, 22 bp, Artificial Sequence
  bisulfite treated nucleic acid for analysis of methylation status of SEQ ID NO: 36
tagtttattttgcggtcgttta

SEQ ID NO: 9678 - DNA, 35 bp, Artificial Sequence
  bisulfite treated nucleic acid for analysis of methylation status of SEQ ID NO: 36
ggaggtcgttggtattcgtgatttacgattttttt

SEQ ID NO: 9679 - DNA, 21 bp, Artificial Sequence
  bisulfite treated nucleic acid for analysis of methylation status of SEQ ID NO: 36
ttattctacacgtcaatcccg

SEQ ID NO: 9680 - DNA, 19 bp, Artificial Sequence
  bisulfite treated nucleic acid for analysis of methylation status of SEQ ID NO: 36
agtcgtcgtttcggatttt

SEQ ID NO: 9681 - DNA, 31 bp, Artificial Sequence
  bisulfite treated nucleic acid for analysis of methylation status of SEQ ID NO: 36
tgttcgtcggttcgtagattttgtatcgggt

SEQ ID NO: 9682 - DNA, 22 bp, Artificial Sequence
  bisulfite treated nucleic acid for analysis of methylation status of SEQ ID NO: 36
gatacaaaatctacgaaccgac

SEQ ID NO: 9683 - DNA, 22 bp, Artificial Sequence
  bisulfite treated nucleic acid for analysis of methylation status of SEQ ID NO: 36
gagcgcgttgtatttatttttc

SEQ ID NO: 9684 - DNA, 19 bp, Artificial Sequence
  bisulfite treated nucleic acid for analysis of methylation status of SEQ ID NO: 36
gacgtacccacccgttaat

SEQ ID NO: 9685 - DNA, 37 bp, Artificial Sequence
  bisulfite treated nucleic acid for analysis of methylation status of SEQ ID NO: 36
ttcggtcgggtttaaacgttttaatcgttagcggcgg

SEQ ID NO: 9686 - DNA, 20 bp, Artificial Sequence
  bisulfite treated nucleic acid for analysis of methylation status of SEQ ID NO: 36
gttgattttgatcgggtcgt

SEQ ID NO: 9687 - DNA, 20 bp, Artificial Sequence
  bisulfite treated nucleic acid for analysis of methylation status of SEQ ID NO: 36
aatcaacttcgtcctcgaaa

SEQ ID NO: 9688 - DNA, 21 bp, Artificial Sequence
  bisulfite treated nucleic acid for analysis of methylation status of SEQ ID NO: 36
gcgttcggtcgtgtttatatt

SEQ ID NO: 9689 - DNA, 39 bp, Artificial Sequence
  bisulfite treated nucleic acid for analysis of methylation status of SEQ ID NO: 36
tgatttagtattgaaaagtttcggtcggtttttttaggg

SEQ ID NO: 9690 - DNA, 22 bp, Artificial Sequence
  bisulfite treated nucleic acid for analysis of methylation status of SEQ ID NO: 36
tattctacacgtcaatcccgac

SEQ ID NO: 9691 - DNA, 20 bp, Artificial Sequence
  bisulfite treated nucleic acid for analysis of methylation status of SEQ ID NO: 36
tcgaggacgaagttgatttt

SEQ ID NO: 9692 - DNA, 20 bp, Artificial Sequence
  bisulfite treated nucleic acid for analysis of methylation status of SEQ ID NO: 36
tacgaatccaaacccgatac

SEQ ID NO: 9693 - DNA, 23 bp, Artificial Sequence
  bisulfite treated nucleic acid for analysis of methylation status of SEQ ID NO: 36
ccacgactataacctcgataaaa

SEQ ID NO: 9694 - DNA, 23 bp, Artificial Sequence
  bisulfite treated nucleic acid for analysis of methylation status of SEQ ID NO: 36
gaggttatagtcgtggtttcgtt

SEQ ID NO: 9695 - DNA, 21 bp, Artificial Sequence
  bisulfite treated nucleic acid for analysis of methylation status of SEQ ID NO: 36
aaatctacgaaccgacgaaca

SEQ ID NO: 9696 - DNA, 28 bp, Artificial Sequence
  bisulfite treated nucleic acid for analysis of methylation status of SEQ ID NO: 36
ggaattcgcgtttgagtcgtcgtttcgg

SEQ ID NO: 9697 - DNA, 21 bp, Artificial Sequence
  bisulfite treated nucleic acid for analysis of methylation status of SEQ ID NO: 36
acaaaatctacgaaccgacga

SEQ ID NO: 9698 - DNA, 19 bp, Artificial Sequence
  bisulfite treated nucleic acid for analysis of methylation status of SEQ ID NO: 36
tgattttgatcgggtcgtt

SEQ ID NO: 9699 - DNA, 19 bp, Artificial Sequence
  bisulfite treated nucleic acid for analysis of methylation status of SEQ ID NO: 36
ttgattttgatcgggtcgt

SEQ ID NO: 9700 - DNA, 21 bp, Artificial Sequence
  bisulfite treated nucleic acid for analysis of methylation status of SEQ ID NO: 36
aatctacgaaccgacgaacac

SEQ ID NO: 9701 - DNA, 21 bp, Artificial Sequence
  bisulfite treated nucleic acid for analysis of methylation status of SEQ ID NO: 36
ataaatacaacgcgctcatta

SEQ ID NO: 9702 - DNA, 22 bp, Artificial Sequence
  bisulfite treated nucleic acid for analysis of methylation status of SEQ ID NO: 36
gtcggaatataaggaaggatcg

SEQ ID NO: 9703 - DNA, 24 bp, Artificial Sequence
  bisulfite treated nucleic acid for analysis of methylation status of SEQ ID NO: 36
ccgtaaacatacccaactactacg

SEQ ID NO: 9704 - DNA, 25 bp, Artificial Sequence
  bisulfite treated nucleic acid for analysis of methylation status of SEQ ID NO: 36
ttcgcggatttagggttggcggcgg

SEQ ID NO: 9705 - DNA, 22 bp, Artificial Sequence
  bisulfite treated nucleic acid for analysis of methylation status of SEQ ID NO: 36
ggtcgtgtttatatttgttcgt

SEQ ID NO: 9706 - DNA, 21 bp, Artificial Sequence
  bisulfite treated nucleic acid for analysis of methylation status of SEQ ID NO: 36
ccgatacaaaatctacgaacc

SEQ ID NO: 9707 - DNA, 19 bp, Artificial Sequence
  bisulfite treated nucleic acid for analysis of methylation status of SEQ ID NO: 36
gtatgtttacggagggcga

SEQ ID NO: 9708 - DNA, 22 bp, Artificial Sequence
  bisulfite treated nucleic acid for analysis of methylation status of SEQ ID NO: 36
cgacgcgactaataaataacct

SEQ ID NO: 9709 - DNA, 34 bp, Artificial Sequence
  bisulfite treated nucleic acid for analysis of methylation status of SEQ ID NO: 36
gatgtcggtgggtatggatacgtttatttatcgt

SEQ ID NO: 9710 - DNA, 20 bp, Artificial Sequence
  bisulfite treated nucleic acid for analysis of methylation status of SEQ ID NO: 36
tatgtttacggagggcgagt

SEQ ID NO: 9711 - DNA, 20 bp, Artificial Sequence
  bisulfite treated nucleic acid for analysis of methylation status of SEQ ID NO: 36
ggttttcgaggacgaagttg

SEQ ID NO: 9712 - DNA, 20 bp, Artificial Sequence
  bisulfite treated nucleic acid for analysis of methylation status of SEQ ID NO: 36
atcaacttcgtcctcgaaaa

SEQ ID NO: 9713 - DNA, 22 bp, Artificial Sequence
  bisulfite treated nucleic acid for analysis of methylation status of SEQ ID NO: 36
ttctacacgtcaatcccgacta

SEQ ID NO: 9714 - DNA, 20 bp, Artificial Sequence
  bisulfite treated nucleic acid for analysis of methylation status of SEQ ID NO: 36
ccgcccgaaaaataaataca

SEQ ID NO: 9715 - DNA, 24 bp, Artificial Sequence
  bisulfite treated nucleic acid for analysis of methylation status of SEQ ID NO: 36
agttttatcgaggttatagtcgtg

SEQ ID NO: 9716 - DNA, 20 bp, Artificial Sequence
  bisulfite treated nucleic acid for analysis of methylation status of SEQ ID NO: 36
caaaatctacgaaccgacga

SEQ ID NO: 9717 - DNA, 22 bp, Artificial Sequence
  nucleic acid for analysis of methylation status of SEQ ID NO: 36
cgattattctacacgtcaatcc

SEQ ID NO: 9718 - DNA, 22 bp, Artificial Sequence
  bisulfite treated nucleic acid for analysis of methylation status of SEQ ID NO: 36
acgacgcgactaataaataacc

SEQ ID NO: 9719 - DNA, 21 bp, Artificial Sequence
  bisulfite treated nucleic acid for analysis of methylation status of SEQ ID NO: 36
tcggaatataaggaaggatcg

SEQ ID NO: 9720 - DNA, 20 bp, Artificial Sequence
  bisulfite treated nucleic acid for analysis of methylation status of SEQ ID NO: 36
gagtcgtcgtttcggatttt

SEQ ID NO: 9721 - DNA, 20 bp, Artificial Sequence
  bisulfite treated nucleic acid for analysis of methylation status of SEQ ID NO: 36
atctacgaaccgacgaacac

SEQ ID NO: 9722 - DNA, 23 bp, Artificial Sequence
  bisulfite treated nucleic acid for analysis of methylation status of SEQ ID NO: 36
gtttagtttattttgcggtcgtt

SEQ ID NO: 9723 - DNA, 21 bp, Artificial Sequence
  bisulfite treated nucleic acid for analysis of methylation status of SEQ ID NO: 36
taacacccgtaacctacgacc

SEQ ID NO: 9724 - DNA, 22 bp, Artificial Sequence
  bisulfite treated nucleic acid for analysis of methylation status of SEQ ID NO: 36
tatagcgcgtttattggttttc

SEQ ID NO: 9725 - DNA, 28 bp, Artificial Sequence
  bisulfite treated nucleic acid for analysis of methylation status of SEQ ID NO: 36
gacgaggttacggttgtgatttcggtgg

SEQ ID NO: 9726 - DNA, 21 bp, Artificial Sequence
  bisulfite treated nucleic acid for analysis of methylation status of SEQ ID NO: 36
atccccgaaaacgaaattaac

SEQ ID NO: 9727 - DNA, 22 bp, Artificial Sequence
  bisulfite treated nucleic acid for analysis of methylation status of SEQ ID NO: 36
ggtttagacgcgagttttagtg

SEQ ID NO: 9728 - DNA, 32 bp, Artificial Sequence
  bisulfite treated nucleic acid for analysis of methylation status of SEQ ID NO: 36
gattcgggttttagaattgggagacggttcgg

SEQ ID NO: 9729 - DNA, 22 bp, Artificial Sequence
  bisulfite treated nucleic acid for analysis of methylation status of SEQ ID NO: 36
aataacacgatctcgactcacc

SEQ ID NO: 9730 - DNA, 23 bp, Artificial Sequence
  bisulfite treated nucleic acid for analysis of methylation status of SEQ ID NO: 36
cgttcggttaatttttgtatttt

SEQ ID NO: 9731 - DNA, 29 bp, Artificial Sequence
  bisulfite treated nucleic acid for analysis of methylation status of SEQ ID NO: 36
tgagggaggagaatcgtttgaattcggga

SEQ ID NO: 9732 - DNA, 20 bp, Artificial Sequence
  bisulfite treated nucleic acid for analysis of methylation status of SEQ ID NO: 36
aatccccgaaaacgaaatta

SEQ ID NO: 9733 - DNA, 21 bp, Artificial Sequence
  bisulfite treated nucleic acid for analysis of methylation status of SEQ ID NO: 36
ttaacacccgtaacctacgac

SEQ ID NO: 9734 - DNA, 24 bp, Artificial Sequence
  bisulfite treated nucleic acid for analysis of methylation status of SEQ ID NO: 36
acgttcggttaatttttgtatttt

SEQ ID NO: 9735 - DNA, 20 bp, Artificial Sequence
  bisulfite treated nucleic acid for analysis of methylation status of SEQ ID NO: 36
cgaaatcacaaccgtaacct

SEQ ID NO: 9736 - DNA, 23 bp, Artificial Sequence
  bisulfite treated nucleic acid for analysis of methylation status of SEQ ID NO: 36
gttcgttacgggtagggggcggg

SEQ ID NO: 9737 - DNA, 21 bp, Artificial Sequence
  bisulfite treated nucleic acid for analysis of methylation status of SEQ ID NO: 36
aaatccccgaaaacgaaatta

SEQ ID NO: 9738 - DNA, 22 bp, Artificial Sequence
  bisulfite treated nucleic acid for analysis of methylation status of SEQ ID NO: 36
cgtttactcctaaaacaaacga

SEQ ID NO: 9739 - DNA, 21 bp, Artificial Sequence
  bisulfite treated nucleic acid for analysis of methylation status of SEQ ID NO: 36
tattttataggtcgggttcgc

SEQ ID NO: 9740 - DNA, 26 bp, Artificial Sequence
  bisulfite treated nucleic acid for analysis of methylation status of SEQ ID NO: 36
ttcgttgggggcgttttcggcgacgt

SEQ ID NO: 9741 - DNA, 20 bp, Artificial Sequence
  bisulfite treated nucleic acid for analysis of methylation status of SEQ ID NO: 36
cgacgaccaccttaaaaatc

SEQ ID NO: 9742 - DNA, 22 bp, Artificial Sequence
  bisulfite treated nucleic acid for analysis of methylation status of SEQ ID NO: 36
cgcggttaatagtttcgtttag

SEQ ID NO: 9743 - DNA, 31 bp, Artificial Sequence
  bisulfite treated nucleic acid for analysis of methylation status of SEQ ID NO: 36
ttcgcgagggttcgtattgggcgtttttcga

SEQ ID NO: 9744 - DNA, 20 bp, Artificial Sequence
  bisulfite treated nucleic acid for analysis of methylation status of SEQ ID NO: 36
gacgaccaccttaaaaatcg

SEQ ID NO: 9745 - DNA, 23 bp, Artificial Sequence
  bisulfite treated nucleic acid for analysis of methylation status of SEQ ID NO: 36
acgtttactcctaaaacaaacga

SEQ ID NO: 9746 - DNA, 22 bp, Artificial Sequence
  bisulfite treated nucleic acid for analysis of methylation status of SEQ ID NO: 36
caataacacgatctcgactcac

SEQ ID NO: 9747 - DNA, 22 bp, Artificial Sequence
  bisulfite treated nucleic acid for analysis of methylation status of SEQ ID NO: 36
acaataacacgatctcgactca

SEQ ID NO: 9748 - DNA, 20 bp, Artificial Sequence
  bisulfite treated nucleic acid for analysis of methylation status of SEQ ID NO: 36
ccgacgaccaccttaaaaat

SEQ ID NO: 9749 - DNA, 20 bp, Artificial Sequence
  bisulfite treated nucleic acid for analysis of methylation status of SEQ ID NO: 36
tccccgaaaacgaaattaac

SEQ ID NO: 9750 - DNA, 22 bp, Artificial Sequence
  bisulfite treated nucleic acid for analysis of methylation status of SEQ ID NO: 36
cgaacccgacctataaaataaa

SEQ ID NO: 9751 - DNA, 20 bp, Artificial Sequence
  bisulfite treated nucleic acid for analysis of methylation status of SEQ ID NO: 36
taatttcgttttcggggatt

SEQ ID NO: 9752 - DNA, 38 bp, Artificial Sequence
  bisulfite treated nucleic acid for analysis of methylation status of SEQ ID NO: 36
ttcggggattttaggtttacggataagtatgaatacgg

SEQ ID NO: 9753 - DNA, 21 bp, Artificial Sequence
  bisulfite treated nucleic acid for analysis of methylation status of SEQ ID NO: 36
atagcgcgtttattggttttc

SEQ ID NO: 9754 - DNA, 20 bp, Artificial Sequence
  bisulfite treated nucleic acid for analysis of methylation status of SEQ ID NO: 36
aacacccgtaacctacgacc

SEQ ID NO: 9755 - DNA, 19 bp, Artificial Sequence
  bisulfite treated nucleic acid for analysis of methylation status of SEQ ID NO: 36
cgaccaccttaaaaatcgc

SEQ ID NO: 9756 - DNA, 19 bp, Artificial Sequence
  bisulfite treated nucleic acid for analysis of methylation status of SEQ ID NO: 36
caccgaaatcacaaccgta

SEQ ID NO: 9757 - DNA, 21 bp, Artificial Sequence
  bisulfite treated nucleic acid for analysis of methylation status of SEQ ID NO: 36
ttattggttttcggagacgtt

SEQ ID NO: 9758 - DNA, 23 bp, Artificial Sequence
  bisulfite treated nucleic acid for analysis of methylation status of SEQ ID NO: 36
gaacccgacctataaaataaacg

SEQ ID NO: 9759 - DNA, 19 bp, Artificial Sequence
  bisulfite treated nucleic acid for analysis of methylation status of SEQ ID NO: 36
caaccgtaacctcgtctcc

SEQ ID NO: 9760 - DNA, 22 bp, Artificial Sequence
  bisulfite treated nucleic acid for analysis of methylation status of SEQ ID NO: 36
gcggttaatagtttcgtttagg

SEQ ID NO: 9761 - DNA, 22 bp, Artificial Sequence
  bisulfite treated nucleic acid for analysis of methylation status of SEQ ID NO: 36
tcgcggttaatagtttcgttta

SEQ ID NO: 9762 - DNA, 25 bp, Artificial Sequence
  bisulfite treated nucleic acid for analysis of methylation status of SEQ ID NO: 36
tacgttcggttaatttttgtatttt

SEQ ID NO: 9763 - DNA, 25 bp, Artificial Sequence
  bisulfite treated nucleic acid for analysis of methylation status of SEQ ID NO: 36
ttacgttcggttaatttttgtattt

SEQ ID NO: 9764 - DNA, 23 bp, Artificial Sequence
  bisulfite treated nucleic acid for analysis of methylation status of SEQ ID NO: 36
ttattacgttcggttaatttttg

SEQ ID NO: 9765 - DNA, 22 bp, Artificial Sequence
  bisulfite treated nucleic acid for analysis of methylation status of SEQ ID NO: 36
cggttaatagtttcgtttaggg

SEQ ID NO: 9766 - DNA, 20 bp, Artificial Sequence
  bisulfite treated nucleic acid for analysis of methylation status of SEQ ID NO: 36
attttataggtcgggttcgc

SEQ ID NO: 9767 - DNA, 22 bp, Artificial Sequence
  bisulfite treated nucleic acid for analysis of methylation status of SEQ ID NO: 36
tttattggttttcggagacgtt

SEQ ID NO: 9768 - DNA, 22 bp, Artificial Sequence
  bisulfite treated nucleic acid for analysis of methylation status of SEQ ID NO: 36
tcaaaactaacgacgaaactcc

SEQ ID NO: 9769 - DNA, 20 bp, Artificial Sequence
  bisulfite treated nucleic acid for analysis of methylation status of SEQ ID NO: 36
atgatttcggtggagtcgat

SEQ ID NO: 9770 - DNA, 34 bp, Artificial Sequence
  bisulfite treated nucleic acid for analysis of methylation status of SEQ ID NO: 36
ttcgtttttcgtgaatatgtttagttgttgcggg

SEQ ID NO: 9771 - DNA, 22 bp, Artificial Sequence
  bisulfite treated nucleic acid for analysis of methylation status of SEQ ID NO: 36
gcgaacccgacctataaaataa

SEQ ID NO: 9772 - DNA, 19 bp, Artificial Sequence
  bisulfite treated nucleic acid for analysis of methylation status of SEQ ID NO: 36
gaaacctacgacctacgcc

SEQ ID NO: 9773 - DNA, 22 bp, Artificial Sequence
  bisulfite treated nucleic acid for analysis of methylation status of SEQ ID NO: 36
gtttcgagtgtttttagcgttc

SEQ ID NO: 9774 - DNA, 24 bp, Artificial Sequence
  bisulfite treated nucleic acid for analysis of methylation status of SEQ ID NO: 36
ttacggggttttcggcggtcgagg

SEQ ID NO: 9775 - DNA, 20 bp, Artificial Sequence
  bisulfite treated nucleic acid for analysis of methylation status of SEQ ID NO: 36
tagcgcgtttattggttttc

SEQ ID NO: 9776 - DNA, 22 bp, Artificial Sequence
  bisulfite treated nucleic acid for analysis of methylation status of SEQ ID NO: 36
aacccgacctataaaataaacg

SEQ ID NO: 9777 - DNA, 20 bp, Artificial Sequence
  bisulfite treated nucleic acid for analysis of methylation status of SEQ ID NO: 36
aaatcacaaccgtaacctcg

SEQ ID NO: 9778 - DNA, 21 bp, Artificial Sequence
  bisulfite treated nucleic acid for analysis of methylation status of SEQ ID NO: 36
gtttattggttttcggagacg

SEQ ID NO: 9779 - DNA, 23 bp, Artificial Sequence
  bisulfite treated nucleic acid for analysis of methylation status of SEQ ID NO: 36
ttcgttacgggtagggggcggga

SEQ ID NO: 9780 - DNA, 19 bp, Artificial Sequence
  bisulfite treated nucleic acid for analysis of methylation status of SEQ ID NO: 36
aatttcgttttcggggatt

SEQ ID NO: 9781 - DNA, 20 bp, Artificial Sequence
  bisulfite treated nucleic acid for analysis of methylation status of SEQ ID NO: 36
acgaccaccttaaaaatcgc

SEQ ID NO: 9782 - DNA, 19 bp, Artificial Sequence
  bisulfite treated nucleic acid for analysis of methylation status of SEQ ID NO: 36
acacccgtaacctacgacc

SEQ ID NO: 9783 - DNA, 22 bp, Artificial Sequence
  bisulfite treated nucleic acid for analysis of methylation status of SEQ ID NO: 36
cggtttagacgcgagttttagt

SEQ ID NO: 9784 - DNA, 21 bp, Artificial Sequence
  bisulfite treated nucleic acid for analysis of methylation status of SEQ ID NO: 36
gaaatcacaaccgtaacctcg

SEQ ID NO: 9785 - DNA, 25 bp, Artificial Sequence
  bisulfite treated nucleic acid for analysis of methylation status of SEQ ID NO: 36
ttacgggtagggggcgggaagtagg

SEQ ID NO: 9786 - DNA, 21 bp, Artificial Sequence
  bisulfite treated nucleic acid for analysis of methylation status of SEQ ID NO: 36
gtcgcggttaatagtttcgtt

SEQ ID NO: 9787 - DNA, 22 bp, Artificial Sequence
  bisulfite treated nucleic acid for analysis of methylation status of SEQ ID NO: 36
aaaactaacgacgaaactccaa

SEQ ID NO: 9788 - DNA, 18 bp, Artificial Sequence
  bisulfite treated nucleic acid for analysis of methylation status of SEQ ID NO: 36
cggtggatgaacgtgttt

SEQ ID NO: 9789 - DNA, 18 bp, Artificial Sequence
  bisulfite treated nucleic acid for analysis of methylation status of SEQ ID NO: 36
aaaatccccgaaaacgaa

SEQ ID NO: 9790 - DNA, 20 bp, Artificial Sequence
  bisulfite treated nucleic acid for analysis of methylation status of SEQ ID NO: 36
gcgaacccgacctataaaat

SEQ ID NO: 9791 - DNA, 21 bp, Artificial Sequence
  bisulfite treated nucleic acid for analysis of methylation status of SEQ ID NO: 36
gttaatttcgttttcggggat

SEQ ID NO: 9792 - DNA, 19 bp, Artificial Sequence
  bisulfite treated nucleic acid for analysis of methylation status of SEQ ID NO: 36
cgtaacctacgaccccctt

SEQ ID NO: 9793 - DNA, 22 bp, Artificial Sequence
  bisulfite treated nucleic acid for analysis of methylation status of SEQ ID NO: 36
tttcgtttcgagtgtttttagc

SEQ ID NO: 9794 - DNA, 22 bp, Artificial Sequence
  bisulfite treated nucleic acid for analysis of methylation status of SEQ ID NO: 36
gtttttcgtcgcggttaatagt

SEQ ID NO: 9795 - DNA, 26 bp, Artificial Sequence
  bisulfite treated nucleic acid for analysis of methylation status of SEQ ID NO: 36
attacgttcggttaatttttgtattt

SEQ ID NO: 9796 - DNA, 19 bp, Artificial Sequence
  bisulfite treated nucleic acid for analysis of methylation status of SEQ ID NO: 36
aaccgtaacctcgtctccc

SEQ ID NO: 9797 - DNA, 22 bp, Artificial Sequence
  bisulfite treated nucleic acid for analysis of methylation status of SEQ ID NO: 36
ccgcgaccttaaataaactaaa

SEQ ID NO: 9798 - DNA, 18 bp, Artificial Sequence
  bisulfite treated nucleic acid for analysis of methylation status of SEQ ID NO: 36
ggtcgtaggtttcgggtc

SEQ ID NO: 9799 - DNA, 25 bp, Artificial Sequence
  bisulfite treated nucleic acid for analysis of methylation status of SEQ ID NO: 36
gtcgtcgcgcgtgtggaggaggcgg

SEQ ID NO: 9800 - DNA, 19 bp, Artificial Sequence
  bisulfite treated nucleic acid for analysis of methylation status of SEQ ID NO: 36
tatatccacccctcgaacg

SEQ ID NO: 9801 - DNA, 21 bp, Artificial Sequence
  bisulfite treated nucleic acid for analysis of methylation status of SEQ ID NO: 36
acgtgtttattcgttggttga

SEQ ID NO: 9802 - DNA, 32 bp, Artificial Sequence
  bisulfite treated nucleic acid for analysis of methylation status of SEQ ID NO: 36
gacgattggagcgtttggattcggtcgggcgt

SEQ ID NO: 9803 - DNA, 19 bp, Artificial Sequence
  bisulfite treated nucleic acid for analysis of methylation status of SEQ ID NO: 36
gatttcggtggagtcgatg

SEQ ID NO: 9804 - DNA, 19 bp, Artificial Sequence
  bisulfite treated nucleic acid for analysis of methylation status of SEQ ID NO: 36
tgatttcggtggagtcgat

SEQ ID NO: 9805 - DNA, 20 bp, Artificial Sequence
  bisulfite treated nucleic acid for analysis of methylation status of SEQ ID NO: 36
ctatatccacccctcgaacg

SEQ ID NO: 9806 - DNA, 23 bp, Artificial Sequence
  bisulfite treated nucleic acid for analysis of methylation status of SEQ ID NO: 36
cgaacccgacctataaaataaac

SEQ ID NO: 9807 - DNA, 19 bp, Artificial Sequence
  bisulfite treated nucleic acid for analysis of methylation status of SEQ ID NO: 36
atttcgttttcggggattt

SEQ ID NO: 9808 - DNA, 20 bp, Artificial Sequence
  bisulfite treated nucleic acid for analysis of methylation status of SEQ ID NO: 36
ttaatttcgttttcggggat

SEQ ID NO: 9809 - DNA, 21 bp, Artificial Sequence
  bisulfite treated nucleic acid for analysis of methylation status of SEQ ID NO: 36
tttcgtcgcggttaatagttt

SEQ ID NO: 9810 - DNA, 21 bp, Artificial Sequence
  bisulfite treated nucleic acid for analysis of methylation status of SEQ ID NO: 36
tttttcgtcgcggttaatagt

SEQ ID NO: 9811 - DNA, 21 bp, Artificial Sequence
  bisulfite treated nucleic acid for analysis of methylation status of SEQ ID NO: 36
ttttcgtcgcggttaatagtt

SEQ ID NO: 9812 - DNA, 20 bp, Artificial Sequence
  bisulfite treated nucleic acid for analysis of methylation status of SEQ ID NO: 36
ccgaatcccactaaaactcg

SEQ ID NO: 9813 - DNA, 21 bp, Artificial Sequence
  bisulfite treated nucleic acid for analysis of methylation status of SEQ ID NO: 36
tatacgttagtttcggttgcg

SEQ ID NO: 9814 - DNA, 21 bp, Artificial Sequence
  bisulfite treated nucleic acid for analysis of methylation status of SEQ ID NO: 36
atcgggggttcgggacggcgg

SEQ ID NO: 9815 - DNA, 21 bp, Artificial Sequence
  bisulfite treated nucleic acid for analysis of methylation status of SEQ ID NO: 36
ataacacgatctcgactcacc

SEQ ID NO: 9816 - DNA, 20 bp, Artificial Sequence
  bisulfite treated nucleic acid for analysis of methylation status of SEQ ID NO: 36
tattggttttcggagacgtt

SEQ ID NO: 9817 - DNA, 20 bp, Artificial Sequence
  bisulfite treated nucleic acid for analysis of methylation status of SEQ ID NO: 36
tttattggttttcggagacg

SEQ ID NO: 9818 - DNA, 18 bp, Artificial Sequence
  nucleic acid for analysis of methylation status of SEQ ID NO: 36
gatctcgactcaccgcaa

SEQ ID NO: 9819 - DNA, 22 bp, Artificial Sequence
  nucleic acid for analysis of methylation status of SEQ ID NO: 36
gagattataggcgtgcgttatt

SEQ ID NO: 9820 - DNA, 20 bp, Artificial Sequence
  bisulfite treated nucleic acid for analysis of methylation status of SEQ ID NO: 36
tcgtcgcggttaatagtttc

SEQ ID NO: 9821 - DNA, 21 bp, Artificial Sequence
  bisulfite treated nucleic acid for analysis of methylation status of SEQ ID NO: 36
aaatcacaaccgtaacctcgt

SEQ ID NO: 9822 - DNA, 20 bp, Artificial Sequence
  bisulfite treated nucleic acid for analysis of methylation status of SEQ ID NO: 36
cgttcgaggggtggatatag

SEQ ID NO: 9823 - DNA, 20 bp, Artificial Sequence
  bisulfite treated nucleic acid for analysis of methylation status of SEQ ID NO: 36
actcgaaaaacgcccaatac

SEQ ID NO: 9824 - DNA, 27 bp, Artificial Sequence
  bisulfite treated nucleic acid for analysis of methylation status of SEQ ID NO: 36
gtttagggttggtcgttgttcggcgtt

SEQ ID NO: 9825 - DNA, 18 bp, Artificial Sequence
  bisulfite treated nucleic acid for analysis of methylation status of SEQ ID NO: 36
accgtaacctcgtctccc

SEQ ID NO: 9826 - DNA, 19 bp, Artificial Sequence
  bisulfite treated nucleic acid for analysis of methylation status of SEQ ID NO: 36
ttttataggtcgggttcgc

SEQ ID NO: 9827 - DNA, 20 bp, Artificial Sequence
  bisulfite treated nucleic acid for analysis of methylation status of SEQ ID NO: 36
actattaaccgcgacgaaaa

SEQ ID NO: 9828 - DNA, 23 bp, Artificial Sequence
  bisulfite treated nucleic acid for analysis of methylation status of SEQ ID NO: 36
cggttttatcgtttgttttagga

SEQ ID NO: 9829 - DNA, 21 bp, Artificial Sequence
  bisulfite treated nucleic acid for analysis of methylation status of SEQ ID NO: 36
gggcgagcgttcggggggttg

SEQ ID NO: 9830 - DNA, 19 bp, Artificial Sequence
  bisulfite treated nucleic acid for analysis of methylation status of SEQ ID NO: 36
agcgcgtttattggttttc

SEQ ID NO: 9831 - DNA, 21 bp, Artificial Sequence
  bisulfite treated nucleic acid for analysis of methylation status of SEQ ID NO: 36
atcacaaccgtaacctcgtct

SEQ ID NO: 9832 - DNA, 22 bp, Artificial Sequence
  bisulfite treated nucleic acid for analysis of methylation status of SEQ ID NO: 36
gaacgctaaaaacactcgaaac

SEQ ID NO: 9833 - DNA, 18 bp, Artificial Sequence
  bisulfite treated nucleic acid for analysis of methylation status of SEQ ID NO: 36
ttttaaggtggtcgtcgg

SEQ ID NO: 9834 - DNA, 27 bp, Artificial Sequence
  bisulfite treated nucleic acid for analysis of methylation status of SEQ ID NO: 36
ttcgtaaacgtttgttcgagcgcgcgt

SEQ ID NO: 9835 - DNA, 22 bp, Artificial Sequence
  bisulfite treated nucleic acid for analysis of methylation status of SEQ ID NO: 36
aactaacgacgaaactccaaaa

SEQ ID NO: 9836 - DNA, 17 bp, Artificial Sequence
  bisulfite treated nucleic acid for analysis of methylation status of SEQ ID NO: 36
gagtcgatgcggtggat

SEQ ID NO: 9837 - DNA, 22 bp, Artificial Sequence
  bisulfite treated nucleic acid for analysis of methylation status of SEQ ID NO: 36
aaactaacgacgaaactccaaa

SEQ ID NO: 9838 - DNA, 21 bp, Artificial Sequence
  bisulfite treated nucleic acid for analysis of methylation status of SEQ ID NO: 36
ttcgtcgcggttaatagtttc

SEQ ID NO: 9839 - DNA, 22 bp, Artificial Sequence
  bisulfite treated nucleic acid for analysis of methylation status of SEQ ID NO: 36
gaactcaaaactaacgacgaaa

SEQ ID NO: 9840 - DNA, 24 bp, Artificial Sequence
  bisulfite treated nucleic acid for analysis of methylation status of SEQ ID NO: 36
tattacgttcggttaatttttgta

SEQ ID NO: 9841 - DNA, 23 bp, Artificial Sequence
  bisulfite treated nucleic acid for analysis of methylation status of SEQ ID NO: 36
tacaataacacgatctcgactca

SEQ ID NO: 9842 - DNA, 20 bp, Artificial Sequence
  bisulfite treated nucleic acid for analysis of methylation status of SEQ ID NO: 36
acaaccgtaacctcgtctcc

SEQ ID NO: 9843 - DNA, 20 bp, Artificial Sequence
  nucleic acid for analysis of methylation status of SEQ ID NO: 36
gcgtttattggttttcggag

SEQ ID NO: 9844 - DNA, 18 bp, Artificial Sequence
  bisulfite treated nucleic acid for analysis of methylation status of SEQ ID NO: 36
acccgtaacctacgaccc

SEQ ID NO: 9845 - DNA, 21 bp, Artificial Sequence
  bisulfite treated nucleic acid for analysis of methylation status of SEQ ID NO: 36
cgaactcaaaactaacgacga

SEQ ID NO: 9846 - DNA, 18 bp, Artificial Sequence
  bisulfite treated nucleic acid for analysis of methylation status of SEQ ID NO: 36
tttcgttttcggggattt

SEQ ID NO: 9847 - DNA, 21 bp, Artificial Sequence
  bisulfite treated nucleic acid for analysis of methylation status of SEQ ID NO: 36
agtgtttttagcgttcggttc

SEQ ID NO: 9848 - DNA, 21 bp, Artificial Sequence
  bisulfite treated nucleic acid for analysis of methylation status of SEQ ID NO: 36
gagtgtttttagcgttcggtt

SEQ ID NO: 9849 - DNA, 22 bp, Artificial Sequence
  bisulfite treated nucleic acid for analysis of methylation status of SEQ ID NO: 36
tgagattataggcgtgcgttat

SEQ ID NO: 9850 - DNA, 17 bp, Artificial Sequence
  bisulfite treated nucleic acid for analysis of methylation status of SEQ ID NO: 36
ttaaggtggtcgtcggg

SEQ ID NO: 9851 - DNA, 18 bp, Artificial Sequence
  bisulfite treated nucleic acid for analysis of methylation status of SEQ ID NO: 36
atctcgactcaccgcaac

SEQ ID NO: 9852 - DNA, 22 bp, Artificial Sequence
  bisulfite treated nucleic acid for analysis of methylation status of SEQ ID NO: 36
gacgtgtttattcgttggttga

SEQ ID NO: 9853 - DNA, 22 bp, Artificial Sequence
  bisulfite treated nucleic acid for analysis of methylation status of SEQ ID NO: 36
aatcacaaccgtaacctcgtct

SEQ ID NO: 9854 - DNA, 18 bp, Artificial Sequence
  bisulfite treated nucleic acid for analysis of methylation status of SEQ ID NO: 36
atatccacccctcgaacg

SEQ ID NO: 9855 - DNA, 19 bp, Artificial Sequence
  bisulfite treated nucleic acid for analysis of methylation status of SEQ ID NO: 36
gcgaacccgacctataaaa

SEQ ID NO: 9856 - DNA, 20 bp, Artificial Sequence
  bisulfite treated nucleic acid for analysis of methylation status of SEQ ID NO: 36
agggttaatttcgttttcgg

SEQ ID NO: 9857 - DNA, 22 bp, Artificial Sequence
  bisulfite treated nucleic acid for analysis of methylation status of SEQ ID NO: 36
ctcaaaactaacgacgaaactc

SEQ ID NO: 9858 - DNA, 21 bp, Artificial Sequence
  bisulfite treated nucleic acid for analysis of methylation status of SEQ ID NO: 36
tttcgagtgtttttagcgttc

SEQ ID NO: 9859 - DNA, 21 bp, Artificial Sequence
  bisulfite treated nucleic acid for analysis of methylation status of SEQ ID NO: 36
ttcgtttcgagtgtttttagc

SEQ ID NO: 9860 - DNA, 22 bp, Artificial Sequence
  bisulfite treated nucleic acid for analysis of methylation status of SEQ ID NO: 36
actaacgacgaaactccaaaac

SEQ ID NO: 9861 - DNA, 18 bp, Artificial Sequence
  bisulfite treated nucleic acid for analysis of methylation status of SEQ ID NO: 36
cgcggttggtagatgatt

SEQ ID NO: 9862 - DNA, 23 bp, Artificial Sequence
  bisulfite treated nucleic acid for analysis of methylation status of SEQ ID NO: 36
accgcgaccttaaataaactaaa

SEQ ID NO: 9863 - DNA, 18 bp, Artificial Sequence
  bisulfite treated nucleic acid for analysis of methylation status of SEQ ID NO: 36
cgaaccgtctcccaattc

SEQ ID NO: 9864 - DNA, 22 bp, Artificial Sequence
  bisulfite treated nucleic acid for analysis of methylation status of SEQ ID NO: 36
gttagtttcggttgcgagttta

SEQ ID NO: 9865 - DNA, 23 bp, Artificial Sequence
  bisulfite treated nucleic acid for analysis of methylation status of SEQ ID NO: 36
actcaaaactaacgacgaaactc

SEQ ID NO: 9866 - DNA, 18 bp, Artificial Sequence
  bisulfite treated nucleic acid for analysis of methylation status of SEQ ID NO: 36
atttcggtggagtcgatg

SEQ ID NO: 9867 - DNA, 20 bp, Artificial Sequence
  bisulfite treated nucleic acid for analysis of methylation status of SEQ ID NO: 36
ttttcgtcgcggttaatagt

SEQ ID NO: 9868 - DNA, 20 bp, Artificial Sequence
  bisulfite treated nucleic acid for analysis of methylation status of SEQ ID NO: 36
cgaggacgacgtgtttattc

SEQ ID NO: 9869 - DNA, 20 bp, Artificial Sequence
  bisulfite treated nucleic acid for analysis of methylation status of SEQ ID NO: 36
gaggacgacgtgtttattcg

SEQ ID NO: 9870 - DNA, 18 bp, Artificial Sequence
  bisulfite treated nucleic acid for analysis of methylation status of SEQ ID NO: 36
tttaaggtggtcgtcggg

SEQ ID NO: 9871 - DNA, 20 bp, Artificial Sequence
  bisulfite treated nucleic acid for analysis of methylation status of SEQ ID NO: 36
tcacaaccgtaacctcgtct

SEQ ID NO: 9872 - DNA, 22 bp, Artificial Sequence
  bisulfite treated nucleic acid for analysis of methylation status of SEQ ID NO: 36
tagtttcggttgcgagtttaag

SEQ ID NO: 9873 - DNA, 17 bp, Artificial Sequence
  bisulfite treated nucleic acid for analysis of methylation status of SEQ ID NO: 36
gaaacccgacaccttcg

SEQ ID NO: 9874 - DNA, 29 bp, Artificial Sequence
  bisulfite treated nucleic acid for analysis of methylation status of SEQ ID NO: 36
tacggggttttcggcggtcgaggcggcgt

SEQ ID NO: 9875 - DNA, 24 bp, Artificial Sequence
  bisulfite treated nucleic acid for analysis of methylation status of SEQ ID NO: 36
atacaataacacgatctcgactca

SEQ ID NO: 9876 - DNA, 20 bp, Artificial Sequence
  bisulfite treated nucleic acid for analysis of methylation status of SEQ ID NO: 36
atacgttagtttcggttgcg

SEQ ID NO: 9877 - DNA, 19 bp, Artificial Sequence
  bisulfite treated nucleic acid for analysis of methylation status of SEQ ID NO: 36
gatgatttcggtggagtcg

SEQ ID NO: 9878 - DNA, 19 bp, Artificial Sequence
  bisulfite treated nucleic acid for analysis of methylation status of SEQ ID NO: 36
ccccgaaaacgaaattaac

SEQ ID NO: 9879 - DNA, 21 bp, Artificial Sequence
  bisulfite treated nucleic acid for analysis of methylation status of SEQ ID NO: 36
caaaactaacgacgaaactcc

SEQ ID NO: 9880 - DNA, 18 bp, Artificial Sequence
  bisulfite treated nucleic acid for analysis of methylation status of SEQ ID NO: 36
cgtttggtttcgttcgag

SEQ ID NO: 9881 - DNA, 19 bp, Artificial Sequence
  bisulfite treated nucleic acid for analysis of methylation status of SEQ ID NO: 36
attggttttcggagacgtt

SEQ ID NO: 9882 - DNA, 22 bp, Artificial Sequence
  bisulfite treated nucleic acid for analysis of methylation status of SEQ ID NO: 28
cgcgttgtttaggtagttttgt

SEQ ID NO: 9883 - DNA, 20 bp, Artificial Sequence
  bisulfite treated nucleic acid for analysis of methylation status of SEQ ID NO: 28
ctactaactccacgtcccga

SEQ ID NO: 9884 - DNA, 21 bp, Artificial Sequence
  bisulfite treated nucleic acid for analysis of methylation status of SEQ ID NO: 28
tggtcgtcggcgtgggcgatg

SEQ ID NO: 9885 - DNA, 20 bp, Artificial Sequence
  bisulfite treated nucleic acid for analysis of methylation status of SEQ ID NO: 28
tactaactccacgtcccgaa

SEQ ID NO: 9886 - DNA, 21 bp, Artificial Sequence
  bisulfite treated nucleic acid for analysis of methylation status of SEQ ID NO: 28
gttaggtagtttggtcgtcgg

SEQ ID NO: 9887 - DNA, 21 bp, Artificial Sequence
  bisulfite treated nucleic acid for analysis of methylation status of SEQ ID NO: 28
ttaccgtcgtttttcaaatca

SEQ ID NO: 9888 - DNA, 23 bp, Artificial Sequence
  nucleic acid for analysis of methylation status of SEQ ID NO: 28
ggggcgttttcgggacgtggagt

SEQ ID NO: 9889 - DNA, 22 bp, Artificial Sequence
  bisulfite treated nucleic acid for analysis of methylation status of SEQ ID NO: 28
tttaccgtcgtttttcaaatca

SEQ ID NO: 9890 - DNA, 20 bp, Artificial Sequence
  bisulfite treated nucleic acid for analysis of methylation status of SEQ ID NO: 28
ttaggtagtttggtcgtcgg

SEQ ID NO: 9891 - DNA, 22 bp, Artificial Sequence
  bisulfite treated nucleic acid for analysis of methylation status of SEQ ID NO: 28
cgttgtttaggtagttttgtcg

SEQ ID NO: 9892 - DNA, 21 bp, Artificial Sequence
  bisulfite treated nucleic acid for analysis of methylation status of SEQ ID NO: 28
ctactaactccacgtcccgaa

SEQ ID NO: 9893 - DNA, 19 bp, Artificial Sequence
  bisulfite treated nucleic acid for analysis of methylation status of SEQ ID NO: 28
actaactccacgtcccgaa

SEQ ID NO: 9894 - DNA, 22 bp, Artificial Sequence
  bisulfite treated nucleic acid for analysis of methylation status of SEQ ID NO: 28
gtcgcgttgtttaggtagtttt

SEQ ID NO: 9895 - DNA, 20 bp, Artificial Sequence
  bisulfite treated nucleic acid for analysis of methylation status of SEQ ID NO: 28
cctactaactccacgtcccg

SEQ ID NO: 9896 - DNA, 19 bp, Artificial Sequence
  bisulfite treated nucleic acid for analysis of methylation status of SEQ ID NO: 28
taactccacgtcccgaaaa

SEQ ID NO: 9897 - DNA, 20 bp, Artificial Sequence
  bisulfite treated nucleic acid for analysis of methylation status of SEQ ID NO: 28
taccgtcgtttttcaaatca

SEQ ID NO: 9898 - DNA, 20 bp, Artificial Sequence
  bisulfite treated nucleic acid for analysis of methylation status of SEQ ID NO: 28
acgctttaccgtcgtttttc

SEQ ID NO: 9899 - DNA, 19 bp, Artificial Sequence
  bisulfite treated nucleic acid for analysis of methylation status of SEQ ID NO: 28
acacgctttaccgtcgttt

SEQ ID NO: 9900 - DNA, 22 bp, Artificial Sequence
  bisulfite treated nucleic acid for analysis of methylation status of SEQ ID NO: 28
tcgcgttgtttaggtagttttg

SEQ ID NO: 9901 - DNA, 19 bp, Artificial Sequence
  bisulfite treated nucleic acid for analysis of methylation status of SEQ ID NO: 28
cgctttaccgtcgtttttc

SEQ ID NO: 9902 - DNA, 23 bp, Artificial Sequence
  bisulfite treated nucleic acid for analysis of methylation status of SEQ ID NO: 28
cgttgtttaggtagttttgtcgt

SEQ ID NO: 9903 - DNA, 19 bp, Artificial Sequence
  bisulfite treated nucleic acid for analysis of methylation status of SEQ ID NO: 28
ctaactccacgtcccgaaa

SEQ ID NO: 9904 - DNA, 19 bp, Artificial Sequence
  bisulfite treated nucleic acid for analysis of methylation status of SEQ ID NO: 28
tcggagggtttagttagcg

SEQ ID NO: 9905 - DNA, 21 bp, Artificial Sequence
  bisulfite treated nucleic acid for analysis of methylation status of SEQ ID NO: 28
cgcgacaaaacaatatctcct

SEQ ID NO: 9906 - DNA, 23 bp, Artificial Sequence
  bisulfite treated nucleic acid for analysis of methylation status of SEQ ID NO: 28
tgcgcggtaggagttgggcgcgt

SEQ ID NO: 9907 - DNA, 18 bp, Artificial Sequence
  bisulfite treated nucleic acid for analysis of methylation status of SEQ ID NO: 28
ctaactccacgtcccgaa

SEQ ID NO: 9908 - DNA, 18 bp, Artificial Sequence
  bisulfite treated nucleic acid for analysis of methylation status of SEQ ID NO: 28
cgcgtggaggagatattg

SEQ ID NO: 9909 - DNA, 21 bp, Artificial Sequence
  bisulfite treated nucleic acid for analysis of methylation status of SEQ ID NO: 28
actcccgataaacaaataccg

SEQ ID NO: 9910 - DNA, 25 bp, Artificial Sequence
  bisulfite treated nucleic acid for analysis of methylation status of SEQ ID NO: 28
tttacgtcgtaggtaagcggggcgg

SEQ ID NO: 9911 - DNA, 19 bp, Artificial Sequence
  bisulfite treated nucleic acid for analysis of methylation status of SEQ ID NO: 28
ttagttagcgggttttcgg

SEQ ID NO: 9912 - DNA, 21 bp, Artificial Sequence
  bisulfite treated nucleic acid for analysis of methylation status of SEQ ID NO: 28
ggtcgcgttgtttaggtagtt

SEQ ID NO: 9913 - DNA, 20 bp, Artificial Sequence
  bisulfite treated nucleic acid for analysis of methylation status of SEQ ID NO: 28
taactccacgtcccgaaaac

SEQ ID NO: 9914 - DNA, 19 bp, Artificial Sequence
  bisulfite treated nucleic acid for analysis of methylation status of SEQ ID NO: 28
cacgctttaccgtcgtttt

SEQ ID NO: 9915 - DNA, 20 bp, Artificial Sequence
  bisulfite treated nucleic acid for analysis of methylation status of SEQ ID NO: 28
tttagttagcgggttttcgg

SEQ ID NO: 9916 - DNA, 18 bp, Artificial Sequence
  bisulfite treated nucleic acid for analysis of methylation status of SEQ ID NO: 28
aactccacgtcccgaaaa

SEQ ID NO: 9917 - DNA, 20 bp, Artificial Sequence
  bisulfite treated nucleic acid for analysis of methylation status of SEQ ID NO: 28
gtttagttagcgggttttcg

SEQ ID NO: 9918 - DNA, 22 bp, Artificial Sequence
  bisulfite treated nucleic acid for analysis of methylation status of SEQ ID NO: 28
aactcccgataaacaaataccg

SEQ ID NO: 9919 - DNA, 20 bp, Artificial Sequence
  bisulfite treated nucleic acid for analysis of methylation status of SEQ ID NO: 28
ttcggagggtttagttagcg

SEQ ID NO: 9920 - DNA, 19 bp, Artificial Sequence
  bisulfite treated nucleic acid for analysis of methylation status of SEQ ID NO: 28
accgtcgtttttcaaatca

SEQ ID NO: 9921 - DNA, 18 bp, Artificial Sequence
  bisulfite treated nucleic acid for analysis of methylation status of SEQ ID NO: 28
actccacgtcccgaaaac

SEQ ID NO: 9922 - DNA, 17 bp, Artificial Sequence
  bisulfite treated nucleic acid for analysis of methylation status of SEQ ID NO: 28
actccacgtcccgaaaa

SEQ ID NO: 9923 - DNA, 19 bp, Artificial Sequence
  bisulfite treated nucleic acid for analysis of methylation status of SEQ ID NO: 28
taggtagtttggtcgtcgg

SEQ ID NO: 9924 - DNA, 19 bp, Artificial Sequence
  bisulfite treated nucleic acid for analysis of methylation status of SEQ ID NO: 28
gctttaccgtcgtttttca

SEQ ID NO: 9925 - DNA, 22 bp, Artificial Sequence
  bisulfite treated nucleic acid for analysis of methylation status of SEQ ID NO: 28
atacgcgataaaaactaaacgc

SEQ ID NO: 9926 - DNA, 22 bp, Artificial Sequence
  bisulfite treated nucleic acid for analysis of methylation status of SEQ ID NO: 28
gtgggtaggtatcgtagtcgtc

SEQ ID NO: 9927 - DNA, 36 bp, Artificial Sequence
  bisulfite treated nucleic acid for analysis of methylation status of SEQ ID NO: 28
tacggcgtgaaggagcgtttcgggtttttatcgcgg

SEQ ID NO: 9928 - DNA, 21 bp, Artificial Sequence
  bisulfite treated nucleic acid for analysis of methylation status of SEQ ID NO: 28
aaacaaactccgaacgaaaac

SEQ ID NO: 9929 - DNA, 22 bp, Artificial Sequence
  bisulfite treated nucleic acid for analysis of methylation status of SEQ ID NO: 28
tagagtattcggtttatcggga

SEQ ID NO: 9930 - DNA, 22 bp, Artificial Sequence
  bisulfite treated nucleic acid for analysis of methylation status of SEQ ID NO: 28
tggaaaggcgcgggatgggggt

SEQ ID NO: 9931 - DNA, 22 bp, Artificial Sequence
  bisulfite treated nucleic acid for analysis of methylation status of SEQ ID NO: 28
gtcgaggacgtagagtaggaga

SEQ ID NO: 9932 - DNA, 22 bp, Artificial Sequence
  bisulfite treated nucleic acid for analysis of methylation status of SEQ ID NO: 28
ggtgggtaggtatcgtagtcgt

SEQ ID NO: 9933 - DNA, 21 bp, Artificial Sequence
  bisulfite treated nucleic acid for analysis of methylation status of SEQ ID NO: 28
cggtgggtaggtatcgtagtc

SEQ ID NO: 9934 - DNA, 21 bp, Artificial Sequence
  bisulfite treated nucleic acid for analysis of methylation status of SEQ ID NO: 28
tcggtgggtaggtatcgtagt

SEQ ID NO: 9935 - DNA, 23 bp, Artificial Sequence
  bisulfite treated nucleic acid for analysis of methylation status of SEQ ID NO: 28
gaaaactaaccgaacaaacgtaa

SEQ ID NO: 9936 - DNA, 21 bp, Artificial Sequence
  bisulfite treated nucleic acid for analysis of methylation status of SEQ ID NO: 28
tacgcgataaaaactaaacgc

SEQ ID NO: 9937 - DNA, 22 bp, Artificial Sequence
  bisulfite treated nucleic acid for analysis of methylation status of SEQ ID NO: 28
tcgaggacgtagagtaggagat

SEQ ID NO: 9938 - DNA, 22 bp, Artificial Sequence
  bisulfite treated nucleic acid for analysis of methylation status of SEQ ID NO: 28
ttcggtgggtaggtatcgtagt

SEQ ID NO: 9939 - DNA, 22 bp, Artificial Sequence
  bisulfite treated nucleic acid for analysis of methylation status of SEQ ID NO: 28
ggtaggtatcgtagtcgtcgtt

SEQ ID NO: 9940 - DNA, 23 bp, Artificial Sequence
  bisulfite treated nucleic acid for analysis of methylation status of SEQ ID NO: 28
aatacgcgataaaaactaaacgc

SEQ ID NO: 9941 - DNA, 23 bp, Artificial Sequence
  bisulfite treated nucleic acid for analysis of methylation status of SEQ ID NO: 28
atagagtattcggtttatcggga

SEQ ID NO: 9942 - DNA, 22 bp, Artificial Sequence
  bisulfite treated nucleic acid for analysis of methylation status of SEQ ID NO: 28
cgaggacgtagagtaggagatt

SEQ ID NO: 9943 - DNA, 22 bp, Artificial Sequence
  bisulfite treated nucleic acid for analysis of methylation status of SEQ ID NO: 28
aaaactaaccgaacaaacgtaa

SEQ ID NO: 9944 - DNA, 21 bp, Artificial Sequence
  bisulfite treated nucleic acid for analysis of methylation status of SEQ ID NO: 28
agtattcggtttatcgggaga

SEQ ID NO: 9945 - DNA, 21 bp, Artificial Sequence
  bisulfite treated nucleic acid for analysis of methylation status of SEQ ID NO: 28
agagtattcggtttatcggga

SEQ ID NO: 9946 - DNA, 21 bp, Artificial Sequence
  bisulfite treated nucleic acid for analysis of methylation status of SEQ ID NO: 28
tgggtaggtatcgtagtcgtc

SEQ ID NO: 9947 - DNA, 21 bp, Artificial Sequence
  bisulfite treated nucleic acid for analysis of methylation status of SEQ ID NO: 28
tttcggtgggtaggtatcgta

SEQ ID NO: 9948 - DNA, 22 bp, Artificial Sequence
  bisulfite treated nucleic acid for analysis of methylation status of SEQ ID NO: 28
ggtcgaggacgtagagtaggag

SEQ ID NO: 9949 - DNA, 22 bp, Artificial Sequence
  bisulfite treated nucleic acid for analysis of methylation status of SEQ ID NO: 28
aatctcctactctacgtcctcg

SEQ ID NO: 9950 - DNA, 23 bp, Artificial Sequence
  bisulfite treated nucleic acid for analysis of methylation status of SEQ ID NO: 28
ttacgtttgttcggttagttttc

SEQ ID NO: 9951 - DNA, 24 bp, Artificial Sequence
  bisulfite treated nucleic acid for analysis of methylation status of SEQ ID NO: 28
agcggttttgcgagggattcgggt

SEQ ID NO: 9952 - DNA, 22 bp, Artificial Sequence
  bisulfite treated nucleic acid for analysis of methylation status of SEQ ID NO: 28
gagtattcggtttatcgggaga

SEQ ID NO: 9953 - DNA, 20 bp, Artificial Sequence
  bisulfite treated nucleic acid for analysis of methylation status of SEQ ID NO: 28
aaaacaaactccgaacgaaa

SEQ ID NO: 9954 - DNA, 20 bp, Artificial Sequence
  bisulfite treated nucleic acid for analysis of methylation status of SEQ ID NO: 28
aaaaacaaactccgaacgaa

SEQ ID NO: 9955 - DNA, 21 bp, Artificial Sequence
  bisulfite treated nucleic acid for analysis of methylation status of SEQ ID NO: 28
gttagttttcgggagttcgtt

SEQ ID NO: 9956 - DNA, 20 bp, Artificial Sequence
  bisulfite treated nucleic acid for analysis of methylation status of SEQ ID NO: 28
ccgaaaactaaccgaacaaa

SEQ ID NO: 9957 - DNA, 22 bp, Artificial Sequence
  bisulfite treated nucleic acid for analysis of methylation status of SEQ ID NO: 28
ctcctactctacgtcctcgacc

SEQ ID NO: 9958 - DNA, 21 bp, Artificial Sequence
  bisulfite treated nucleic acid for analysis of methylation status of SEQ ID NO: 28
tcctactctacgtcctcgacc

SEQ ID NO: 9959 - DNA, 21 bp, Artificial Sequence
  bisulfite treated nucleic acid for analysis of methylation status of SEQ ID NO: 28
gtttgttcggttagttttcgg

SEQ ID NO: 9960 - DNA, 22 bp, Artificial Sequence
  bisulfite treated nucleic acid for analysis of methylation status of SEQ ID NO: 28
tacgtttgttcggttagttttc

SEQ ID NO: 9961 - DNA, 23 bp, Artificial Sequence
  bisulfite treated nucleic acid for analysis of methylation status of SEQ ID NO: 28
gcgtttagtttttatcgcgtatt

SEQ ID NO: 9962 - DNA, 20 bp, Artificial Sequence
  bisulfite treated nucleic acid for analysis of methylation status of SEQ ID NO: 28
acgcgataaaaactaaacgc

SEQ ID NO: 9963 - DNA, 21 bp, Artificial Sequence
  bisulfite treated nucleic acid for analysis of methylation status of SEQ ID NO: 28
cgataaaaactaaacgcgcac

SEQ ID NO: 9964 - DNA, 24 bp, Artificial Sequence
  bisulfite treated nucleic acid for analysis of methylation status of SEQ ID NO: 28
taatacgcgataaaaactaaacgc

SEQ ID NO: 9965 - DNA, 33 bp, Artificial Sequence
  bisulfite treated nucleic acid for analysis of methylation status of SEQ ID NO: 28
tacgtttgttcggttagttttcgggagttcgtt

SEQ ID NO: 9966 - DNA, 20 bp, Artificial Sequence
  bisulfite treated nucleic acid for analysis of methylation status of SEQ ID NO: 28
cgtgcgcgtttagtttttat

SEQ ID NO: 9967 - DNA, 22 bp, Artificial Sequence
  bisulfite treated nucleic acid for analysis of methylation status of SEQ ID NO: 28
taggtatcgtagtcgtcgtttc

SEQ ID NO: 9968 - DNA, 20 bp, Artificial Sequence
  bisulfite treated nucleic acid for analysis of methylation status of SEQ ID NO: 28
aacaaactccgaacgaaaac

SEQ ID NO: 9969 - DNA, 22 bp, Artificial Sequence
  bisulfite treated nucleic acid for analysis of methylation status of SEQ ID NO: 28
aatcgaaaacgaaccaaaataa

SEQ ID NO: 9970 - DNA, 20 bp, Artificial Sequence
  bisulfite treated nucleic acid for analysis of methylation status of SEQ ID NO: 28
gtttacgtcggcgattaggt

SEQ ID NO: 9971 - DNA, 32 bp, Artificial Sequence
  bisulfite treated nucleic acid for analysis of methylation status of SEQ ID NO: 28
agtaatacggtagggttgtttgggtaacgcgg

SEQ ID NO: 9972 - DNA, 24 bp, Artificial Sequence
  bisulfite treated nucleic acid for analysis of methylation status of SEQ ID NO: 28
attacgtttgttcggttagttttc

SEQ ID NO: 9973 - DNA, 23 bp, Artificial Sequence
  bisulfite treated nucleic acid for analysis of methylation status of SEQ ID NO: 28
gtaggtatcgtagtcgtcgtttc

SEQ ID NO: 9974 - DNA, 20 bp, Artificial Sequence
  bisulfite treated nucleic acid for analysis of methylation status of SEQ ID NO: 28
tttgttcggttagttttcgg

SEQ ID NO: 9975 - DNA, 19 bp, Artificial Sequence
  bisulfite treated nucleic acid for analysis of methylation status of SEQ ID NO: 28
aataaaccgcgttacccaa

SEQ ID NO: 9976 - DNA, 22 bp, Artificial Sequence
  bisulfite treated nucleic acid for analysis of methylation status of SEQ ID NO: 28
gttttagcgtcggtatcgttta

SEQ ID NO: 9977 - DNA, 34 bp, Artificial Sequence
  bisulfite treated nucleic acid for analysis of methylation status of SEQ ID NO: 28
ggcgattaggttgtttagtaatacggtagggttg

SEQ ID NO: 9978 - DNA, 19 bp, Artificial Sequence
  bisulfite treated nucleic acid for analysis of methylation status of SEQ ID NO: 28
aaataaaccgcgttaccca

SEQ ID NO: 9979 - DNA, 22 bp, Artificial Sequence
  bisulfite treated nucleic acid for analysis of methylation status of SEQ ID NO: 28
ttttagcgtcggtatcgtttac

SEQ ID NO: 9980 - DNA, 20 bp, Artificial Sequence
  bisulfite treated nucleic acid for analysis of methylation status of SEQ ID NO: 28
tagttttcgggagttcgttg

SEQ ID NO: 9981 - DNA, 20 bp, Artificial Sequence
  bisulfite treated nucleic acid for analysis of methylation status of SEQ ID NO: 28
aatcttctcccgataaaccg

SEQ ID NO: 9982 - DNA, 22 bp, Artificial Sequence
  bisulfite treated nucleic acid for analysis of methylation status of SEQ ID NO: 28
cgtttagtttttatcgcgtatt

SEQ ID NO: 9983 - DNA, 22 bp, Artificial Sequence
  bisulfite treated nucleic acid for analysis of methylation status of SEQ ID NO: 28
gtattcggtttatcgggagaag

SEQ ID NO: 9984 - DNA, 21 bp, Artificial Sequence
  bisulfite treated nucleic acid for analysis of methylation status of SEQ ID NO: 28
ttagttttcgggagttcgttg

SEQ ID NO: 9985 - DNA, 20 bp, Artificial Sequence
  bisulfite treated nucleic acid for analysis of methylation status of SEQ ID NO: 28
cggtcgaggacgtagagtag

SEQ ID NO: 9986 - DNA, 21 bp, Artificial Sequence
  bisulfite treated nucleic acid for analysis of methylation status of SEQ ID NO: 28
gtagtcgtgcgcgtttagttt

SEQ ID NO: 9987 - DNA, 23 bp, Artificial Sequence
  bisulfite treated nucleic acid for analysis of methylation status of SEQ ID NO: 28
gatagagtattcggtttatcggg

SEQ ID NO: 9988 - DNA, 20 bp, Artificial Sequence
  bisulfite treated nucleic acid for analysis of methylation status of SEQ ID NO: 28
aaacaaactccgaacgaaaa

SEQ ID NO: 9989 - DNA, 20 bp, Artificial Sequence
  bisulfite treated nucleic acid for analysis of methylation status of SEQ ID NO: 28
aaataaaccgcgttacccaa

SEQ ID NO: 9990 - DNA, 19 bp, Artificial Sequence
  bisulfite treated nucleic acid for analysis of methylation status of SEQ ID NO: 28
acgaaccaaaataaaccgc

SEQ ID NO: 9991 - DNA, 19 bp, Artificial Sequence
  bisulfite treated nucleic acid for analysis of methylation status of SEQ ID NO: 28
gaaccaaaataaaccgcgt

SEQ ID NO: 9992 - DNA, 24 bp, Artificial Sequence
  bisulfite treated nucleic acid for analysis of methylation status of SEQ ID NO: 28
gtaatacgcgataaaaactaaacg

SEQ ID NO: 9993 - DNA, 21 bp, Artificial Sequence
  bisulfite treated nucleic acid for analysis of methylation status of SEQ ID NO: 28
tattcggtttatcgggagaag

SEQ ID NO: 9994 - DNA, 20 bp, Artificial Sequence
  bisulfite treated nucleic acid for analysis of methylation status of SEQ ID NO: 28
tagtcgtgcgcgtttagttt

SEQ ID NO: 9995 - DNA, 20 bp, Artificial Sequence
  bisulfite treated nucleic acid for analysis of methylation status of SEQ ID NO: 28
ctactctacgtcctcgaccg

SEQ ID NO: 9996 - DNA, 21 bp, Artificial Sequence
  bisulfite treated nucleic acid for analysis of methylation status of SEQ ID NO: 28
cgtttgttcggttagttttcg

SEQ ID NO: 9997 - DNA, 23 bp, Artificial Sequence
  bisulfite treated nucleic acid for analysis of methylation status of SEQ ID NO: 28
caatctcctactctacgtcctcg

SEQ ID NO: 9998 - DNA, 20 bp, Artificial Sequence
  bisulfite treated nucleic acid for analysis of methylation status of SEQ ID NO: 28
tcggttagttttcgggagtt

SEQ ID NO: 9999 - DNA, 20 bp, Artificial Sequence
  bisulfite treated nucleic acid for analysis of methylation status of SEQ ID NO: 28
gttcggttagttttcgggag

SEQ ID NO: 10000 - DNA, 20 bp, Artificial Sequence
  bisulfite treated nucleic acid for analysis of methylation status of SEQ ID NO: 28
cggttagttttcgggagttc

SEQ ID NO: 10001 - DNA, 20 bp, Artificial Sequence
  bisulfite treated nucleic acid for analysis of methylation status of SEQ ID NO: 28
ggttagttttcgggagttcg

SEQ ID NO: 10002 - DNA, 21 bp, Artificial Sequence
  bisulfite treated nucleic acid for analysis of methylation status of SEQ ID NO: 28
ggttagttttcgggagttcgt

SEQ ID NO: 10003 - DNA, 21 bp, Artificial Sequence
  bisulfite treated nucleic acid for analysis of methylation status of SEQ ID NO: 28
gttcggttagttttcgggagt

SEQ ID NO: 10004 - DNA, 21 bp, Artificial Sequence
  bisulfite treated nucleic acid for analysis of methylation status of SEQ ID NO: 28
tcgtgcgcgtttagtttttat

SEQ ID NO: 10005 - DNA, 21 bp, Artificial Sequence
  bisulfite treated nucleic acid for analysis of methylation status of SEQ ID NO: 28
gtgcgcgtttagtttttatcg

SEQ ID NO: 10006 - DNA, 20 bp, Artificial Sequence
  bisulfite treated nucleic acid for analysis of methylation status of SEQ ID NO: 28
ttcggttagttttcgggagt

SEQ ID NO: 10007 - DNA, 21 bp, Artificial Sequence
  bisulfite treated nucleic acid for analysis of methylation status of SEQ ID NO: 28
acgtttgttcggttagttttc

SEQ ID NO: 10008 - DNA, 23 bp, Artificial Sequence
  bisulfite treated nucleic acid for analysis of methylation status of SEQ ID NO: 28
tgatagagtattcggtttatcgg

SEQ ID NO: 10009 - DNA, 21 bp, Artificial Sequence
  bisulfite treated nucleic acid for analysis of methylation status of SEQ ID NO: 28
ttcggttagttttcgggagtt

SEQ ID NO: 10010 - DNA, 20 bp, Artificial Sequence
  bisulfite treated nucleic acid for analysis of methylation status of SEQ ID NO: 28
tgcgcgtttagtttttatcg

SEQ ID NO: 10011 - DNA, 19 bp, Artificial Sequence
  bisulfite treated nucleic acid for analysis of methylation status of SEQ ID NO: 28
cccgaaaactaaccgaaca

SEQ ID NO: 10012 - DNA, 21 bp, Artificial Sequence
  bisulfite treated nucleic acid for analysis of methylation status of SEQ ID NO: 28
ataaaaactaaacgcgcacga

SEQ ID NO: 10013 - DNA, 25 bp, Artificial Sequence
  bisulfite treated nucleic acid for analysis of methylation status of SEQ ID NO: 28
tattacgtttgttcggttagttttc

SEQ ID NO: 10014 - DNA, 21 bp, Artificial Sequence
  bisulfite treated nucleic acid for analysis of methylation status of SEQ ID NO: 28
actcccgaaaactaaccgaac

SEQ ID NO: 10015 - DNA, 21 bp, Artificial Sequence
  bisulfite treated nucleic acid for analysis of methylation status of SEQ ID NO: 28
aggtatcgtagtcgtcgtttc

SEQ ID NO: 10016 - DNA, 22 bp, Artificial Sequence
  bisulfite treated nucleic acid for analysis of methylation status of SEQ ID NO: 28
tattcggtttatcgggagaaga

SEQ ID NO: 10017 - DNA, 20 bp, Artificial Sequence
  bisulfite treated nucleic acid for analysis of methylation status of SEQ ID NO: 28
ctcccgaaaactaaccgaac

SEQ ID NO: 10018 - DNA, 19 bp, Artificial Sequence
  bisulfite treated nucleic acid for analysis of methylation status of SEQ ID NO: 28
caaactccgaacgaaaacg

SEQ ID NO: 10019 - DNA, 20 bp, Artificial Sequence
  bisulfite treated nucleic acid for analysis of methylation status of SEQ ID NO: 28
gtattcggtttatcgggaga

SEQ ID NO: 10020 - DNA, 19 bp, Artificial Sequence
  bisulfite treated nucleic acid for analysis of methylation status of SEQ ID NO: 28
agttttcgggagttcgttg

SEQ ID NO: 10021 - DNA, 20 bp, Artificial Sequence
  bisulfite treated nucleic acid for analysis of methylation status of SEQ ID NO: 28
ttagttttcgggagttcgtt

SEQ ID NO: 10022 - DNA, 20 bp, Artificial Sequence
  bisulfite treated nucleic acid for analysis of methylation status of SEQ ID NO: 28
attcggtttatcgggagaag

SEQ ID NO: 10023 - DNA, 20 bp, Artificial Sequence
  bisulfite treated nucleic acid for analysis of methylation status of SEQ ID NO: 28
cggtttatcgggagaagatt

SEQ ID NO: 10024 - DNA, 23 bp, Artificial Sequence
  bisulfite treated nucleic acid for analysis of methylation status of SEQ ID NO: 28
ggaaaggcgcgggatgggggtag

SEQ ID NO: 10025 - DNA, 19 bp, Artificial Sequence
  bisulfite treated nucleic acid for analysis of methylation status of SEQ ID NO: 28
agtcgtgcgcgtttagttt

SEQ ID NO: 10026 - DNA, 21 bp, Artificial Sequence
  bisulfite treated nucleic acid for analysis of methylation status of SEQ ID NO: 28
ggtatcgtagtcgtcgtttcg

SEQ ID NO: 10027 - DNA, 19 bp, Artificial Sequence
  bisulfite treated nucleic acid for analysis of methylation status of SEQ ID NO: 28
tgttcggttagttttcggg

SEQ ID NO: 10028 - DNA, 20 bp, Artificial Sequence
  bisulfite treated nucleic acid for analysis of methylation status of SEQ ID NO: 28
gagcgtttcgggtttttatc

SEQ ID NO: 10029 - DNA, 22 bp, Artificial Sequence
  bisulfite treated nucleic acid for analysis of methylation status of SEQ ID NO: 28
tacgcgcggtagtcgtgcgcgt

SEQ ID NO: 10030 - DNA, 21 bp, Artificial Sequence
  bisulfite treated nucleic acid for analysis of methylation status of SEQ ID NO: 28
ggtgggtaggtatcgtagtcg

SEQ ID NO: 10031 - DNA, 20 bp, Artificial Sequence
  bisulfite treated nucleic acid for analysis of methylation status of SEQ ID NO: 28
taaaaactaaacgcgcacga

SEQ ID NO: 10032 - DNA, 20 bp, Artificial Sequence
  bisulfite treated nucleic acid for analysis of methylation status of SEQ ID NO: 28
cctactctacgtcctcgacc

SEQ ID NO: 10033 - DNA, 20 bp, Artificial Sequence
  bisulfite treated nucleic acid for analysis of methylation status of SEQ ID NO: 28
gataaaaactaaacgcgcac

SEQ ID NO: 10034 - DNA, 18 bp, Artificial Sequence
  bisulfite treated nucleic acid for analysis of methylation status of SEQ ID NO: 28
aactccgaacgaaaacgc

SEQ ID NO: 10035 - DNA, 19 bp, Artificial Sequence
  bisulfite treated nucleic acid for analysis of methylation status of SEQ ID NO: 28
cgcgataaaaactaaacgc

SEQ ID NO: 10036 - DNA, 25 bp, Artificial Sequence
  bisulfite treated nucleic acid for analysis of methylation status of SEQ ID NO: 28
gtattacgtttgttcggttagtttt

SEQ ID NO: 10037 - DNA, 19 bp, Artificial Sequence
  bisulfite treated nucleic acid for analysis of methylation status of SEQ ID NO: 28
ataaaccgcgttacccaaa

SEQ ID NO: 10038 - DNA, 20 bp, Artificial Sequence
  bisulfite treated nucleic acid for analysis of methylation status of SEQ ID NO: 28
ttcgttttagcgtcggtatc

SEQ ID NO: 10039 - DNA, 33 bp, Artificial Sequence
  bisulfite treated nucleic acid for analysis of methylation status of SEQ ID NO: 28
gtcggcgattaggttgtttagtaatacggtagg

SEQ ID NO: 10040 - DNA, 20 bp, Artificial Sequence
  bisulfite treated nucleic acid for analysis of methylation status of SEQ ID NO: 28
gcgcgtttagtttttatcgc

SEQ ID NO: 10041 - DNA, 19 bp, Artificial Sequence
  bisulfite treated nucleic acid for analysis of methylation status of SEQ ID NO: 28
cgaaacctaactccctcgc

SEQ ID NO: 10042 - DNA, 19 bp, Artificial Sequence
  bisulfite treated nucleic acid for analysis of methylation status of SEQ ID NO: 28
tcccgaaaactaaccgaac

SEQ ID NO: 10043 - DNA, 20 bp, Artificial Sequence
  bisulfite treated nucleic acid for analysis of methylation status of SEQ ID NO: 28
ttgttcggttagttttcggg

SEQ ID NO: 10044 - DNA, 20 bp, Artificial Sequence
  bisulfite treated nucleic acid for analysis of methylation status of SEQ ID NO: 28
tcggtttatcgggagaagat

SEQ ID NO: 10045 - DNA, 19 bp, Artificial Sequence
  bisulfite treated nucleic acid for analysis of methylation status of SEQ ID NO: 28
gtcgtgcgcgtttagtttt

SEQ ID NO: 10046 - DNA, 21 bp, Artificial Sequence
  bisulfite treated nucleic acid for analysis of methylation status of SEQ ID NO: 28
atctcctactctacgtcctcg

SEQ ID NO: 10047 - DNA, 24 bp, Artificial Sequence
  bisulfite treated nucleic acid for analysis of methylation status of SEQ ID NO: 28
ttgatagagtattcggtttatcgg

SEQ ID NO: 10048 - DNA, 21 bp, Artificial Sequence
  bisulfite treated nucleic acid for analysis of methylation status of SEQ ID NO: 28
tttcgttttagcgtcggtatc

SEQ ID NO: 10049 - DNA, 21 bp, Artificial Sequence
  bisulfite treated nucleic acid for analysis of methylation status of SEQ ID NO: 28
tttagcgtcggtatcgtttac

SEQ ID NO: 10050 - DNA, 21 bp, Artificial Sequence
  bisulfite treated nucleic acid for analysis of methylation status of SEQ ID NO: 28
caacgaactcccgaaaactaa

SEQ ID NO: 10051 - DNA, 20 bp, Artificial Sequence
  bisulfite treated nucleic acid for analysis of methylation status of SEQ ID NO: 28
cgcggtagggtagtgttttt

SEQ ID NO: 10052 - DNA, 33 bp, Artificial Sequence
  bisulfite treated nucleic acid for analysis of methylation status of SEQ ID NO: 28
tgcgcgtttagtttttatcgcgtattacgtttg

SEQ ID NO: 10053 - DNA, 21 bp, Artificial Sequence
  bisulfite treated nucleic acid for analysis of methylation status of SEQ ID NO: 28
ttcggtgggtaggtatcgtag

SEQ ID NO: 10054 - DNA, 20 bp, Artificial Sequence
  bisulfite treated nucleic acid for analysis of methylation status of SEQ ID NO: 28
aataaaccgcgttacccaaa

SEQ ID NO: 10055 - DNA, 21 bp, Artificial Sequence
  bisulfite treated nucleic acid for analysis of methylation status of SEQ ID NO: 28
attcggtttatcgggagaaga

SEQ ID NO: 10056 - DNA, 21 bp, Artificial Sequence
  bisulfite treated nucleic acid for analysis of methylation status of SEQ ID NO: 28
ttcggtttatcgggagaagat

SEQ ID NO: 10057 - DNA, 23 bp, Artificial Sequence
  bisulfite treated nucleic acid for analysis of methylation status of SEQ ID NO: 28
gttttagcgtcggtatcgtttac

SEQ ID NO: 10058 - DNA, 18 bp, Artificial Sequence
  bisulfite treated nucleic acid for analysis of methylation status of SEQ ID NO: 28
aaaactaaacgcgcacga

SEQ ID NO: 10059 - DNA, 19 bp, Artificial Sequence
  bisulfite treated nucleic acid for analysis of methylation status of SEQ ID NO: 28
aaactaaacgcgcacgact

SEQ ID NO: 10060 - DNA, 19 bp, Artificial Sequence
  bisulfite treated nucleic acid for analysis of methylation status of SEQ ID NO: 28
gagcgtttcgggtttttat

SEQ ID NO: 10061 - DNA, 21 bp, Artificial Sequence
  bisulfite treated nucleic acid for analysis of methylation status of SEQ ID NO: 37
gggttcggtttatgacgagta

SEQ ID NO: 10062 - DNA, 22 bp, Artificial Sequence
  bisulfite treated nucleic acid for analysis of methylation status of SEQ ID NO: 37
actcacccgacttctaaacgta

SEQ ID NO: 10063 - DNA, 33 bp, Artificial Sequence
  bisulfite treated nucleic acid for analysis of methylation status of SEQ ID NO: 37
ttgtatatcgttttgtggacgcgtatcgttagt

SEQ ID NO: 10064 - DNA, 21 bp, Artificial Sequence
  bisulfite treated nucleic acid for analysis of methylation status of SEQ ID NO: 37
tttcgtagcgttgagttgaag

SEQ ID NO: 10065 - DNA, 21 bp, Artificial Sequence
  bisulfite treated nucleic acid for analysis of methylation status of SEQ ID NO: 37
gactcctatcccgaacgaata

SEQ ID NO: 10066 - DNA, 25 bp, Artificial Sequence
  bisulfite treated nucleic acid for analysis of methylation status of SEQ ID NO: 37
tgagttattcgcgcgtacggagcga

SEQ ID NO: 10067 - DNA, 21 bp, Artificial Sequence
  bisulfite treated nucleic acid for analysis of methylation status of SEQ ID NO: 37
gttcggtttatgacgagtagc

SEQ ID NO: 10068 - DNA, 21 bp, Artificial Sequence
  bisulfite treated nucleic acid for analysis of methylation status of SEQ ID NO: 37
tttttcgtagcgttgagttga

SEQ ID NO: 10069 - DNA, 22 bp, Artificial Sequence
  bisulfite treated nucleic acid for analysis of methylation status of SEQ ID NO: 37
gactcctatcccgaacgaatac

SEQ ID NO: 10070 - DNA, 21 bp, Artificial Sequence
  bisulfite treated nucleic acid for analysis of methylation status of SEQ ID NO: 37
cgtagcgttgagttgaagttg

SEQ ID NO: 10071 - DNA, 21 bp, Artificial Sequence
  bisulfite treated nucleic acid for analysis of methylation status of SEQ ID NO: 37
acgagtagcggggtttgttat

SEQ ID NO: 10072 - DNA, 20 bp, Artificial Sequence
  bisulfite treated nucleic acid for analysis of methylation status of SEQ ID NO: 37
tcggtttatgacgagtagcg

SEQ ID NO: 10073 - DNA, 40 bp, Artificial Sequence
  bisulfite treated nucleic acid for analysis of methylation status of SEQ ID NO: 37
atcgttttgtggacgcgtatcgttagtacgattttatcgt

SEQ ID NO: 10074 - DNA, 21 bp, Artificial Sequence
  bisulfite treated nucleic acid for analysis of methylation status of SEQ ID NO: 37
gtgtattcgttcgggatagga

SEQ ID NO: 10075 - DNA, 21 bp, Artificial Sequence
  bisulfite treated nucleic acid for analysis of methylation status of SEQ ID NO: 37
acaacgcaaatatacgaacca

SEQ ID NO: 10076 - DNA, 25 bp, Artificial Sequence
  bisulfite treated nucleic acid for analysis of methylation status of SEQ ID NO: 37
ttttttggttggcgagcgggcgtta

SEQ ID NO: 10077 - DNA, 22 bp, Artificial Sequence
  bisulfite treated nucleic acid for analysis of methylation status of SEQ ID NO: 37
ctcctatcccgaacgaatacac

SEQ ID NO: 10078 - DNA, 22 bp, Artificial Sequence
  bisulfite treated nucleic acid for analysis of methylation status of SEQ ID NO: 37
actcctatcccgaacgaataca

SEQ ID NO: 10079 - DNA, 20 bp, Artificial Sequence
  bisulfite treated nucleic acid for analysis of methylation status of SEQ ID NO: 37
tgtattcgttcgggatagga

SEQ ID NO: 10080 - DNA, 21 bp, Artificial Sequence
  bisulfite treated nucleic acid for analysis of methylation status of SEQ ID NO: 37
tcctatcccgaacgaatacac

SEQ ID NO: 10081 - DNA, 20 bp, Artificial Sequence
  bisulfite treated nucleic acid for analysis of methylation status of SEQ ID NO: 37
cgagtagcggggtttgttat

SEQ ID NO: 10082 - DNA, 21 bp, Artificial Sequence
  bisulfite treated nucleic acid for analysis of methylation status of SEQ ID NO: 37
cgacaacgcaaatatacgaac

SEQ ID NO: 10083 - DNA, 22 bp, Artificial Sequence
  bisulfite treated nucleic acid for analysis of methylation status of SEQ ID NO: 37
atttggttcgtatatttgcgtt

SEQ ID NO: 10084 - DNA, 20 bp, Artificial Sequence
  bisulfite treated nucleic acid for analysis of methylation status of SEQ ID NO: 37
cgctactcgtcataaaccga

SEQ ID NO: 10085 - DNA, 22 bp, Artificial Sequence
  bisulfite treated nucleic acid for analysis of methylation status of SEQ ID NO: 37
ttcggcgcggggttcggagagg

SEQ ID NO: 10086 - DNA, 20 bp, Artificial Sequence
  bisulfite treated nucleic acid for analysis of methylation status of SEQ ID NO: 37
ctatcccgaacgaatacacg

SEQ ID NO: 10087 - DNA, 21 bp, Artificial Sequence
  bisulfite treated nucleic acid for analysis of methylation status of SEQ ID NO: 37
actcctatcccgaacgaatac

SEQ ID NO: 10088 - DNA, 22 bp, Artificial Sequence
  bisulfite treated nucleic acid for analysis of methylation status of SEQ ID NO: 37
ttttcgtagcgttgagttgaag

SEQ ID NO: 10089 - DNA, 19 bp, Artificial Sequence
  bisulfite treated nucleic acid for analysis of methylation status of SEQ ID NO: 37
aaccccgctactcgtcata

SEQ ID NO: 10090 - DNA, 19 bp, Artificial Sequence
  bisulfite treated nucleic acid for analysis of methylation status of SEQ ID NO: 37
accccgctactcgtcataa

SEQ ID NO: 10091 - DNA, 21 bp, Artificial Sequence
  nucleic acid for analysis of methylation status of SEQ ID NO: 37
gtattcgttcgggataggagt

SEQ ID NO: 10092 - DNA, 21 bp, Artificial Sequence
  bisulfite treated nucleic acid for analysis of methylation status of SEQ ID NO: 37
gacaacgcaaatatacgaacc

SEQ ID NO: 10093 - DNA, 21 bp, Artificial Sequence
  bisulfite treated nucleic acid for analysis of methylation status of SEQ ID NO: 37
gaaccgacaacgcaaatatac

SEQ ID NO: 10094 - DNA, 20 bp, Artificial Sequence
  bisulfite treated nucleic acid for analysis of methylation status of SEQ ID NO: 37
gactcctatcccgaacgaat

SEQ ID NO: 10095 - DNA, 20 bp, Artificial Sequence
  bisulfite treated nucleic acid for analysis of methylation status of SEQ ID NO: 37
tatgacgagtagcggggttt

SEQ ID NO: 10096 - DNA, 22 bp, Artificial Sequence
  bisulfite treated nucleic acid for analysis of methylation status of SEQ ID NO: 37
gtgtattcgttcgggataggag

SEQ ID NO: 10097 - DNA, 22 bp, Artificial Sequence
  bisulfite treated nucleic acid for analysis of methylation status of SEQ ID NO: 37
tgtattcgttcgggataggagt

SEQ ID NO: 10098 - DNA, 21 bp, Artificial Sequence
  nucleic acid for analysis of methylation status of SEQ ID NO: 37
ctcacccgacttctaaacgta

SEQ ID NO: 10099 - DNA, 20 bp, Artificial Sequence
  bisulfite treated nucleic acid for analysis of methylation status of SEQ ID NO: 37
cccgctactcgtcataaacc

SEQ ID NO: 10100 - DNA, 20 bp, Artificial Sequence
  bisulfite treated nucleic acid for analysis of methylation status of SEQ ID NO: 37
aaaccccgctactcgtcata

SEQ ID NO: 10101 - DNA, 20 bp, Artificial Sequence
  bisulfite treated nucleic acid for analysis of methylation status of SEQ ID NO: 37
cgtgtattcgttcgggatag

SEQ ID NO: 10102 - DNA, 20 bp, Artificial Sequence
  bisulfite treated nucleic acid for analysis of methylation status of SEQ ID NO: 37
taacaaaccccgctactcgt

SEQ ID NO: 10103 - DNA, 21 bp, Artificial Sequence
  bisulfite treated nucleic acid for analysis of methylation status of SEQ ID NO: 37
tggttcgtatatttgcgttgt

SEQ ID NO: 10104 - DNA, 19 bp, Artificial Sequence
  bisulfite treated nucleic acid for analysis of methylation status of SEQ ID NO: 37
ccccgctactcgtcataaa

SEQ ID NO: 10105 - DNA, 19 bp, Artificial Sequence
  bisulfite treated nucleic acid for analysis of methylation status of SEQ ID NO: 37
cggtttatgacgagtagcg

SEQ ID NO: 10106 - DNA, 22 bp, Artificial Sequence
  bisulfite treated nucleic acid for analysis of methylation status of SEQ ID NO: 37
gggcgttatatttggttcgtat

SEQ ID NO: 10107 - DNA, 21 bp, Artificial Sequence
  bisulfite treated nucleic acid for analysis of methylation status of SEQ ID NO: 37
ataacaaaccccgctactcgt

SEQ ID NO: 10108 - DNA, 21 bp, Artificial Sequence
  bisulfite treated nucleic acid for analysis of methylation status of SEQ ID NO: 37
tgcgttgtcggttcggcgcgg

SEQ ID NO: 10109 - DNA, 18 bp, Artificial Sequence
  bisulfite treated nucleic acid for analysis of methylation status of SEQ ID NO: 37
atgacgagtagcggggtt

SEQ ID NO: 10110 - DNA, 21 bp, Artificial Sequence
  bisulfite treated nucleic acid for analysis of methylation status of SEQ ID NO: 37
gttcgtatatttgcgttgtcg

SEQ ID NO: 10111 - DNA, 23 bp, Artificial Sequence
  bisulfite treated nucleic acid for analysis of methylation status of SEQ ID NO: 37
tatttggttcgtatatttgcgtt

SEQ ID NO: 10112 - DNA, 20 bp, Artificial Sequence
  bisulfite treated nucleic acid for analysis of methylation status of SEQ ID NO: 37
cctatcccgaacgaatacac

SEQ ID NO: 10113 - DNA, 18 bp, Artificial Sequence
  bisulfite treated nucleic acid for analysis of methylation status of SEQ ID NO: 37
gcgtagttaggggttcgg

SEQ ID NO: 10114 - DNA, 22 bp, Artificial Sequence
  bisulfite treated nucleic acid for analysis of methylation status of SEQ ID NO: 37
tccacaaaacgatatacaacga

SEQ ID NO: 10115 - DNA, 38 bp, Artificial Sequence
  bisulfite treated nucleic acid for analysis of methylation status of SEQ ID NO: 37
ggcgtcgttcgttgcgttgggggttcggtttatgacga

SEQ ID NO: 10116 - DNA, 18 bp, Artificial Sequence
  bisulfite treated nucleic acid for analysis of methylation status of SEQ ID NO: 37
gttcgggataggagtcgg

SEQ ID NO: 10117 - DNA, 22 bp, Artificial Sequence
  bisulfite treated nucleic acid for analysis of methylation status of SEQ ID NO: 37
aacgcaaatatacgaaccaaat

SEQ ID NO: 10118 - DNA, 22 bp, Artificial Sequence
  bisulfite treated nucleic acid for analysis of methylation status of SEQ ID NO: 37
ttggttcgtatatttgcgttgt

SEQ ID NO: 10119 - DNA, 20 bp, Artificial Sequence
  bisulfite treated nucleic acid for analysis of methylation status of SEQ ID NO: 37
cgacaacgcaaatatacgaa

SEQ ID NO: 10120 - DNA, 20 bp, Artificial Sequence
  bisulfite treated nucleic acid for analysis of methylation status of SEQ ID NO: 37
ttcggtttatgacgagtagc

SEQ ID NO: 10121 - DNA, 18 bp, Artificial Sequence
  bisulfite treated nucleic acid for analysis of methylation status of SEQ ID NO: 37
acaaaccccgctactcgt

SEQ ID NO: 10122 - DNA, 20 bp, Artificial Sequence
  bisulfite treated nucleic acid for analysis of methylation status of SEQ ID NO: 37
ttcgtatatttgcgttgtcg

SEQ ID NO: 10123 - DNA, 22 bp, Artificial Sequence
  bisulfite treated nucleic acid for analysis of methylation status of SEQ ID NO: 37
ctactcgtcataaaccgaaccc

SEQ ID NO: 10124 - DNA, 21 bp, Artificial Sequence
  bisulfite treated nucleic acid for analysis of methylation status of SEQ ID NO: 37
tactcgtcataaaccgaaccc

SEQ ID NO: 10125 - DNA, 21 bp, Artificial Sequence
  bisulfite treated nucleic acid for analysis of methylation status of SEQ ID NO: 37
tttggttcgtatatttgcgtt

SEQ ID NO: 10126 - DNA, 20 bp, Artificial Sequence
  bisulfite treated nucleic acid for analysis of methylation status of SEQ ID NO: 37
ttttcgtagcgttgagttga

SEQ ID NO: 10127 - DNA, 21 bp, Artificial Sequence
  bisulfite treated nucleic acid for analysis of methylation status of SEQ ID NO: 37
gtatatttgcgttgtcggttc

SEQ ID NO: 10128 - DNA, 24 bp, Artificial Sequence
  bisulfite treated nucleic acid for analysis of methylation status of SEQ ID NO: 37
gttaggggttcgggaaggcgtcgt

SEQ ID NO: 10129 - DNA, 20 bp, Artificial Sequence
  bisulfite treated nucleic acid for analysis of methylation status of SEQ ID NO: 37
ccccgctactcgtcataaac

SEQ ID NO: 10130 - DNA, 20 bp, Artificial Sequence
  bisulfite treated nucleic acid for analysis of methylation status of SEQ ID NO: 37
caacgcaaatatacgaacca

SEQ ID NO: 10131 - DNA, 21 bp, Artificial Sequence
  bisulfite treated nucleic acid for analysis of methylation status of SEQ ID NO: 37
ggttcgtatatttgcgttgtc

SEQ ID NO: 10132 - DNA, 21 bp, Artificial Sequence
  bisulfite treated nucleic acid for analysis of methylation status of SEQ ID NO: 37
cactcacccgacttctaaacg

SEQ ID NO: 10133 - DNA, 20 bp, Artificial Sequence
  bisulfite treated nucleic acid for analysis of methylation status of SEQ ID NO: 37
aaccccgctactcgtcataa

SEQ ID NO: 10134 - DNA, 22 bp, Artificial Sequence
  bisulfite treated nucleic acid for analysis of methylation status of SEQ ID NO: 37
tcgttgtatatcgttttgtgga

SEQ ID NO: 10135 - DNA, 18 bp, Artificial Sequence
  bisulfite treated nucleic acid for analysis of methylation status of SEQ ID NO: 37
gccgaacccgaactaaaa

SEQ ID NO: 10136 - DNA, 37 bp, Artificial Sequence
  bisulfite treated nucleic acid for analysis of methylation status of SEQ ID NO: 37
atcgttagtacgattttatcgtacgtttagaagtcgg

SEQ ID NO: 10137 - DNA, 20 bp, Artificial Sequence
  bisulfite treated nucleic acid for analysis of methylation status of SEQ ID NO: 37
ggttcggtttatgacgagta

SEQ ID NO: 10138 - DNA, 18 bp, Artificial Sequence
  bisulfite treated nucleic acid for analysis of methylation status of SEQ ID NO: 37
cgtagttaggggttcggg

SEQ ID NO: 10139 - DNA, 22 bp, Artificial Sequence
  bisulfite treated nucleic acid for analysis of methylation status of SEQ ID NO: 37
aaaacgatatacaacgaccaca

SEQ ID NO: 10140 - DNA, 22 bp, Artificial Sequence
  bisulfite treated nucleic acid for analysis of methylation status of SEQ ID NO: 37
caaaacgatatacaacgaccac

SEQ ID NO: 10141 - DNA, 22 bp, Artificial Sequence
  bisulfite treated nucleic acid for analysis of methylation status of SEQ ID NO: 37
acaaaacgatatacaacgacca

SEQ ID NO: 10142 - DNA, 22 bp, Artificial Sequence
  bisulfite treated nucleic acid for analysis of methylation status of SEQ ID NO: 37
aacgatatacaacgaccacaaa

SEQ ID NO: 10143 - DNA, 22 bp, Artificial Sequence
  bisulfite treated nucleic acid for analysis of methylation status of SEQ ID NO: 37
aaacgatatacaacgaccacaa

SEQ ID NO: 10144 - DNA, 22 bp, Artificial Sequence
  bisulfite treated nucleic acid for analysis of methylation status of SEQ ID NO: 37
aacgaacaacgaaatctaccat

SEQ ID NO: 10145 - DNA, 22 bp, Artificial Sequence
  bisulfite treated nucleic acid for analysis of methylation status of SEQ ID NO: 37
atttattcgatttttgaacgtg

SEQ ID NO: 10146 - DNA, 24 bp, Artificial Sequence
  bisulfite treated nucleic acid for analysis of methylation status of SEQ ID NO: 37
tgggatcgtgttggcgatacgcgt

SEQ ID NO: 10147 - DNA, 22 bp, Artificial Sequence
  bisulfite treated nucleic acid for analysis of methylation status of SEQ ID NO: 37
taacgaacaacgaaatctacca

SEQ ID NO: 10148 - DNA, 24 bp, Artificial Sequence
  bisulfite treated nucleic acid for analysis of methylation status of SEQ ID NO: 37
ttatttattcgatttttgaacgtg

SEQ ID NO: 10149 - DNA, 22 bp, Artificial Sequence
  bisulfite treated nucleic acid for analysis of methylation status of SEQ ID NO: 37
cgaacaacgaaatctaccataa

SEQ ID NO: 10150 - DNA, 23 bp, Artificial Sequence
  bisulfite treated nucleic acid for analysis of methylation status of SEQ ID NO: 37
tatttattcgatttttgaacgtg

SEQ ID NO: 10151 - DNA, 23 bp, Artificial Sequence
  bisulfite treated nucleic acid for analysis of methylation status of SEQ ID NO: 37
ataacgaacaacgaaatctacca

SEQ ID NO: 10152 - DNA, 23 bp, Artificial Sequence
  bisulfite treated nucleic acid for analysis of methylation status of SEQ ID NO: 37
acgaacaacgaaatctaccataa

SEQ ID NO: 10153 - DNA, 25 bp, Artificial Sequence
  bisulfite treated nucleic acid for analysis of methylation status of SEQ ID NO: 37
attatttattcgatttttgaacgtg

SEQ ID NO: 10154 - DNA, 21 bp, Artificial Sequence
  bisulfite treated nucleic acid for analysis of methylation status of SEQ ID NO: 37
tttattcgatttttgaacgtg

SEQ ID NO: 10155 - DNA, 22 bp, Artificial Sequence
  bisulfite treated nucleic acid for analysis of methylation status of SEQ ID NO: 37
cctataaccgctacacatcgtc

SEQ ID NO: 10156 - DNA, 21 bp, Artificial Sequence
  bisulfite treated nucleic acid for analysis of methylation status of SEQ ID NO: 37
ctatacaacttccctcgaccg

SEQ ID NO: 10157 - DNA, 20 bp, Artificial Sequence
  bisulfite treated nucleic acid for analysis of methylation status of SEQ ID NO: 37
cgtagatgtgcgggttagat

SEQ ID NO: 10158 - DNA, 21 bp, Artificial Sequence
  bisulfite treated nucleic acid for analysis of methylation status of SEQ ID NO: 37
ggcgaggcgcggggaggtttt

SEQ ID NO: 10159 - DNA, 24 bp, Artificial Sequence
  bisulfite treated nucleic acid for analysis of methylation status of SEQ ID NO: 37
tataacgaacaacgaaatctacca

SEQ ID NO: 10160 - DNA, 19 bp, Artificial Sequence
  bisulfite treated nucleic acid for analysis of methylation status of SEQ ID NO: 37
cgaaaacgcaaccaaaaat

SEQ ID NO: 10161 - DNA, 22 bp, Artificial Sequence
  bisulfite treated nucleic acid for analysis of methylation status of SEQ ID NO: 37
gacgatgtgtagcggttatagg

SEQ ID NO: 10162 - DNA, 32 bp, Artificial Sequence
  bisulfite treated nucleic acid for analysis of methylation status of SEQ ID NO: 37
gttatagatcgagtttttagcgtagcggacgg

SEQ ID NO: 10163 - DNA, 22 bp, Artificial Sequence
  bisulfite treated nucleic acid for analysis of methylation status of SEQ ID NO: 37
ttataggacgatgtgtagcggt

SEQ ID NO: 10164 - DNA, 22 bp, Artificial Sequence
  bisulfite treated nucleic acid for analysis of methylation status of SEQ ID NO: 37
ggacgatgtgtagcggttatag

SEQ ID NO: 10165 - DNA, 22 bp, Artificial Sequence
  bisulfite treated nucleic acid for analysis of methylation status of SEQ ID NO: 37
tataggacgatgtgtagcggtt

SEQ ID NO: 10166 - DNA, 22 bp, Artificial Sequence
  bisulfite treated nucleic acid for analysis of methylation status of SEQ ID NO: 37
taggacgatgtgtagcggttat

SEQ ID NO: 10167 - DNA, 18 bp, Artificial Sequence
  bisulfite treated nucleic acid for analysis of methylation status of SEQ ID NO: 37
atttttgaacgtgcggtg

SEQ ID NO: 10168 - DNA, 29 bp, Artificial Sequence
  bisulfite treated nucleic acid for analysis of methylation status of SEQ ID NO: 37
tggcgatacgcgtttataggacgatgtgt

SEQ ID NO: 10169 - DNA, 22 bp, Artificial Sequence
  bisulfite treated nucleic acid for analysis of methylation status of SEQ ID NO: 37
aacctataaccgctacacatcg

SEQ ID NO: 10170 - DNA, 18 bp, Artificial Sequence
  bisulfite treated nucleic acid for analysis of methylation status of SEQ ID NO: 37
agattttcggcgtttcgt

SEQ ID NO: 10171 - DNA, 33 bp, Artificial Sequence
  bisulfite treated nucleic acid for analysis of methylation status of SEQ ID NO: 37
tggggattatttattcgatttttgaacgtgcgg

SEQ ID NO: 10172 - DNA, 22 bp, Artificial Sequence
  bisulfite treated nucleic acid for analysis of methylation status of SEQ ID NO: 37
acctataaccgctacacatcgt

SEQ ID NO: 10173 - DNA, 25 bp, Artificial Sequence
  bisulfite treated nucleic acid for analysis of methylation status of SEQ ID NO: 37
ggattatttattcgatttttgaacg

SEQ ID NO: 10174 - DNA, 20 bp, Artificial Sequence
  bisulfite treated nucleic acid for analysis of methylation status of SEQ ID NO: 37
tatacaacttccctcgaccg

SEQ ID NO: 10175 - DNA, 21 bp, Artificial Sequence
  bisulfite treated nucleic acid for analysis of methylation status of SEQ ID NO: 37
ctcgaaacaaaaaccgaactc

SEQ ID NO: 10176 - DNA, 20 bp, Artificial Sequence
  bisulfite treated nucleic acid for analysis of methylation status of SEQ ID NO: 37
cgttcgttagttaggagggg

SEQ ID NO: 10177 - DNA, 22 bp, Artificial Sequence
  bisulfite treated nucleic acid for analysis of methylation status of SEQ ID NO: 37
tttataggacgatgtgtagcgg

SEQ ID NO: 10178 - DNA, 20 bp, Artificial Sequence
  bisulfite treated nucleic acid for analysis of methylation status of SEQ ID NO: 37
cccctcctaactaacgaacg

SEQ ID NO: 10179 - DNA, 22 bp, Artificial Sequence
  bisulfite treated nucleic acid for analysis of methylation status of SEQ ID NO: 37
tagatcgagtttttagcgtagc

SEQ ID NO: 10180 - DNA, 25 bp, Artificial Sequence
  bisulfite treated nucleic acid for analysis of methylation status of SEQ ID NO: 37
tttcggatttcgcgtcgggtcggta

SEQ ID NO: 10181 - DNA, 20 bp, Artificial Sequence
  bisulfite treated nucleic acid for analysis of methylation status of SEQ ID NO: 37
tcgaaacaaaaaccgaactc

SEQ ID NO: 10182 - DNA, 20 bp, Artificial Sequence
  bisulfite treated nucleic acid for analysis of methylation status of SEQ ID NO: 37
tcgttcgttagttaggaggg

SEQ ID NO: 10183 - DNA, 21 bp, Artificial Sequence
  bisulfite treated nucleic acid for analysis of methylation status of SEQ ID NO: 37
gatcgagtttttagcgtagcg

SEQ ID NO: 10184 - DNA, 18 bp, Artificial Sequence
  bisulfite treated nucleic acid for analysis of methylation status of SEQ ID NO: 37
gtttcgtcgagttcgggt

SEQ ID NO: 10185 - DNA, 34 bp, Artificial Sequence
  bisulfite treated nucleic acid for analysis of methylation status of SEQ ID NO: 37
attatttattcgatttttgaacgtgcggtgggat

SEQ ID NO: 10186 - DNA, 22 bp, Artificial Sequence
  bisulfite treated nucleic acid for analysis of methylation status of SEQ ID NO: 37
tataaccgctacacatcgtcct

SEQ ID NO: 10187 - DNA, 19 bp, Artificial Sequence
  bisulfite treated nucleic acid for analysis of methylation status of SEQ ID NO: 37
aagattttcggcgtttcgt

SEQ ID NO: 10188 - DNA, 22 bp, Artificial Sequence
  bisulfite treated nucleic acid for analysis of methylation status of SEQ ID NO: 37
ctataaccgctacacatcgtcc

SEQ ID NO: 10189 - DNA, 22 bp, Artificial Sequence
  bisulfite treated nucleic acid for analysis of methylation status of SEQ ID NO: 37
taaccgctacacatcgtcctat

SEQ ID NO: 10190 - DNA, 22 bp, Artificial Sequence
  bisulfite treated nucleic acid for analysis of methylation status of SEQ ID NO: 37
ataaccgctacacatcgtccta

SEQ ID NO: 10191 - DNA, 23 bp, Artificial Sequence
  bisulfite treated nucleic acid for analysis of methylation status of SEQ ID NO: 37
acctataaccgctacacatcgtc

SEQ ID NO: 10192 - DNA, 22 bp, Artificial Sequence
  bisulfite treated nucleic acid for analysis of methylation status of SEQ ID NO: 37
cgatctataacgaacaacgaaa

SEQ ID NO: 10193 - DNA, 20 bp, Artificial Sequence
  bisulfite treated nucleic acid for analysis of methylation status of SEQ ID NO: 37
tagcgtagatgtgcgggtta

SEQ ID NO: 10194 - DNA, 22 bp, Artificial Sequence
  bisulfite treated nucleic acid for analysis of methylation status of SEQ ID NO: 37
gtttataggacgatgtgtagcg

SEQ ID NO: 10195 - DNA, 22 bp, Artificial Sequence
  bisulfite treated nucleic acid for analysis of methylation status of SEQ ID NO: 37
cgtttataggacgatgtgtagc

SEQ ID NO: 10196 - DNA, 20 bp, Artificial Sequence
  bisulfite treated nucleic acid for analysis of methylation status of SEQ ID NO: 37
ccctcctaactaacgaacga

SEQ ID NO: 10197 - DNA, 18 bp, Artificial Sequence
  bisulfite treated nucleic acid for analysis of methylation status of SEQ ID NO: 37
gatttttgaacgtgcggt

SEQ ID NO: 10198 - DNA, 19 bp, Artificial Sequence
  bisulfite treated nucleic acid for analysis of methylation status of SEQ ID NO: 37
gggtcggtagcgtagatgt

SEQ ID NO: 10199 - DNA, 20 bp, Artificial Sequence
  bisulfite treated nucleic acid for analysis of methylation status of SEQ ID NO: 37
ctcgaaacaaaaaccgaact

SEQ ID NO: 10200 - DNA, 21 bp, Artificial Sequence
  nucleic acid for analysis of methylation status of SEQ ID NO: 37
ataggacgatgtgtagcggtt

SEQ ID NO: 10201 - DNA, 21 bp, Artificial Sequence
  bisulfite treated nucleic acid for analysis of methylation status of SEQ ID NO: 37
aggacgatgtgtagcggttat

SEQ ID NO: 10202 - DNA, 20 bp, Artificial Sequence
  bisulfite treated nucleic acid for analysis of methylation status of SEQ ID NO: 37
atcgagtttttagcgtagcg

SEQ ID NO: 10203 - DNA, 22 bp, Artificial Sequence
  bisulfite treated nucleic acid for analysis of methylation status of SEQ ID NO: 37
accgctacacatcgtcctataa

SEQ ID NO: 10204 - DNA, 17 bp, Artificial Sequence
  bisulfite treated nucleic acid for analysis of methylation status of SEQ ID NO: 37
acgccacatctaacccg

SEQ ID NO: 10205 - DNA, 22 bp, Artificial Sequence
  bisulfite treated nucleic acid for analysis of methylation status of SEQ ID NO: 37
atggtagatttcgttgttcgtt

SEQ ID NO: 10206 - DNA, 23 bp, Artificial Sequence
  bisulfite treated nucleic acid for analysis of methylation status of SEQ ID NO: 37
atagatcgagtttttagcgtagc

SEQ ID NO: 10207 - DNA, 17 bp, Artificial Sequence
  bisulfite treated nucleic acid for analysis of methylation status of SEQ ID NO: 37
ggcgtttcgtcgagttc

SEQ ID NO: 10208 - DNA, 34 bp, Artificial Sequence
  bisulfite treated nucleic acid for analysis of methylation status of SEQ ID NO: 37
gggattatttattcgatttttgaacgtgcggtgg

SEQ ID NO: 10209 - DNA, 18 bp, Artificial Sequence
  bisulfite treated nucleic acid for analysis of methylation status of SEQ ID NO: 37
gattttcggcgtttcgtc

SEQ ID NO: 10210 - DNA, 17 bp, Artificial Sequence
  bisulfite treated nucleic acid for analysis of methylation status of SEQ ID NO: 37
tacgctaccgacccgac

SEQ ID NO: 10211 - DNA, 17 bp, Artificial Sequence
  bisulfite treated nucleic acid for analysis of methylation status of SEQ ID NO: 37
acgcgaaatccgaaaaa

SEQ ID NO: 10212 - DNA, 22 bp, Artificial Sequence
  bisulfite treated nucleic acid for analysis of methylation status of SEQ ID NO: 37
cgatgtgtagcggttataggtt

SEQ ID NO: 10213 - DNA, 19 bp, Artificial Sequence
  bisulfite treated nucleic acid for analysis of methylation status of SEQ ID NO: 37
gtagcgtagatgtgcgggt

SEQ ID NO: 10214 - DNA, 22 bp, Artificial Sequence
  bisulfite treated nucleic acid for analysis of methylation status of SEQ ID NO: 37
acgatgtgtagcggttataggt

SEQ ID NO: 10215 - DNA, 18 bp, Artificial Sequence
  bisulfite treated nucleic acid for analysis of methylation status of SEQ ID NO: 37
aagattttcggcgtttcg

SEQ ID NO: 10216 - DNA, 17 bp, Artificial Sequence
  bisulfite treated nucleic acid for analysis of methylation status of SEQ ID NO: 37
gacgcgaaatccgaaaa

SEQ ID NO: 10217 - DNA, 29 bp, Artificial Sequence
  bisulfite treated nucleic acid for analysis of methylation status of SEQ ID NO: 37
ggatcgtgttggcgatacgcgtttatagg

SEQ ID NO: 10218 - DNA, 18 bp, Artificial Sequence
  bisulfite treated nucleic acid for analysis of methylation status of SEQ ID NO: 37
ctacgctaccgacccgac

SEQ ID NO: 10219 - DNA, 17 bp, Artificial Sequence
  bisulfite treated nucleic acid for analysis of methylation status of SEQ ID NO: 37
gtttcgtcgagttcggg

SEQ ID NO: 10220 - DNA, 26 bp, Artificial Sequence
  bisulfite treated nucleic acid for analysis of methylation status of SEQ ID NO: 37
gattatttattcgatttttgaacgtg

SEQ ID NO: 10221 - DNA, 17 bp, Artificial Sequence
  bisulfite treated nucleic acid for analysis of methylation status of SEQ ID NO: 37
tctacgctaccgacccg

SEQ ID NO: 10222 - DNA, 22 bp, Artificial Sequence
  bisulfite treated nucleic acid for analysis of methylation status of SEQ ID NO: 37
tggtagatttcgttgttcgtta

SEQ ID NO: 10223 - DNA, 17 bp, Artificial Sequence
  bisulfite treated nucleic acid for analysis of methylation status of SEQ ID NO: 37
tttcgtcgagttcgggt

SEQ ID NO: 10224 - DNA, 24 bp, Artificial Sequence
  bisulfite treated nucleic acid for analysis of methylation status of SEQ ID NO: 37
ctataacgaacaacgaaatctacc

SEQ ID NO: 10225 - DNA, 22 bp, Artificial Sequence
  bisulfite treated nucleic acid for analysis of methylation status of SEQ ID NO: 37
caacgaaatctaccataaatcg

SEQ ID NO: 10226 - DNA, 23 bp, Artificial Sequence
  bisulfite treated nucleic acid for analysis of methylation status of SEQ ID NO: 37
cgaaatctaccataaatcgaaaa

SEQ ID NO: 10227 - DNA, 17 bp, Artificial Sequence
  bisulfite treated nucleic acid for analysis of methylation status of SEQ ID NO: 37
tttttgaacgtgcggtg

SEQ ID NO: 10228 - DNA, 18 bp, Artificial Sequence
  bisulfite treated nucleic acid for analysis of methylation status of SEQ ID NO: 37
tcgatttttgaacgtgcg

SEQ ID NO: 10229 - DNA, 19 bp, Artificial Sequence
  bisulfite treated nucleic acid for analysis of methylation status of SEQ ID NO: 37
atacaacttccctcgaccg

SEQ ID NO: 10230 - DNA, 17 bp, Artificial Sequence
  bisulfite treated nucleic acid for analysis of methylation status of SEQ ID NO: 37
acgcaaccaaaaatccg

SEQ ID NO: 10231 - DNA, 19 bp, Artificial Sequence
  bisulfite treated nucleic acid for analysis of methylation status of SEQ ID NO: 37
acgaacgccacatctaacc

SEQ ID NO: 10232 - DNA, 23 bp, Artificial Sequence
  bisulfite treated nucleic acid for analysis of methylation status of SEQ ID NO: 37
acaacgaaatctaccataaatcg

SEQ ID NO: 10233 - DNA, 21 bp, Artificial Sequence
  bisulfite treated nucleic acid for analysis of methylation status of SEQ ID NO: 37
acgatgtgtagcggttatagg

SEQ ID NO: 10234 - DNA, 22 bp, Artificial Sequence
  bisulfite treated nucleic acid for analysis of methylation status of SEQ ID NO: 37
ccgctacacatcgtcctataaa

SEQ ID NO: 10235 - DNA, 19 bp, Artificial Sequence
  bisulfite treated nucleic acid for analysis of methylation status of SEQ ID NO: 37
cgtagatgtgcgggttaga

SEQ ID NO: 10236 - DNA, 20 bp, Artificial Sequence
  bisulfite treated nucleic acid for analysis of methylation status of SEQ ID NO: 37
gagtttttagcgtagcggac

SEQ ID NO: 10237 - DNA, 18 bp, Artificial Sequence
  bisulfite treated nucleic acid for analysis of methylation status of SEQ ID NO: 37
tttcgtcgagttcgggtt

SEQ ID NO: 10238 - DNA, 29 bp, Artificial Sequence
  bisulfite treated nucleic acid for analysis of methylation status of SEQ ID NO: 37
ttcgatttttgaacgtgcggtgggatcgt

SEQ ID NO: 10239 - DNA, 21 bp, Artificial Sequence
  bisulfite treated nucleic acid for analysis of methylation status of SEQ ID NO: 37
aaccgctacacatcgtcctat

SEQ ID NO: 10240 - DNA, 18 bp, Artificial Sequence
  bisulfite treated nucleic acid for analysis of methylation status of SEQ ID NO: 37
gcgtagatgtgcgggtta

SEQ ID NO: 10241 - DNA, 18 bp, Artificial Sequence
  bisulfite treated nucleic acid for analysis of methylation status of SEQ ID NO: 37
gacgcgaaatccgaaaaa

SEQ ID NO: 10242 - DNA, 21 bp, Artificial Sequence
  bisulfite treated nucleic acid for analysis of methylation status of SEQ ID NO: 37
agatcgagtttttagcgtagc

SEQ ID NO: 10243 - DNA, 19 bp, Artificial Sequence
  bisulfite treated nucleic acid for analysis of methylation status of SEQ ID NO: 37
gtcggtagcgtagatgtgc

SEQ ID NO: 10244 - DNA, 19 bp, Artificial Sequence
  bisulfite treated nucleic acid for analysis of methylation status of SEQ ID NO: 37
ccgcaacgctaaattaaaa

SEQ ID NO: 10245 - DNA, 21 bp, Artificial Sequence
  bisulfite treated nucleic acid for analysis of methylation status of SEQ ID NO: 37
cggtcgagggaagttgtatag

SEQ ID NO: 10246 - DNA, 27 bp, Artificial Sequence
  bisulfite treated nucleic acid for analysis of methylation status of SEQ ID NO: 37
ggagttcggtttttgtttcgagcgggt

SEQ ID NO: 10247 - DNA, 19 bp, Artificial Sequence
  bisulfite treated nucleic acid for analysis of methylation status of SEQ ID NO: 37
agcgtagatgtgcgggtta

SEQ ID NO: 10248 - DNA, 17 bp, Artificial Sequence
  bisulfite treated nucleic acid for analysis of methylation status of SEQ ID NO: 37
ttcgtcgagttcgggtt

SEQ ID NO: 10249 - DNA, 25 bp, Artificial Sequence
  bisulfite treated nucleic acid for analysis of methylation status of SEQ ID NO: 37
ttatagatcgagtttttagcgtagc

SEQ ID NO: 10250 - DNA, 34 bp, Artificial Sequence
  bisulfite treated nucleic acid for analysis of methylation status of SEQ ID NO: 37
agcggacggcgttttttcggatttttggttgcgt

SEQ ID NO: 10251 - DNA, 17 bp, Artificial Sequence
  bisulfite treated nucleic acid for analysis of methylation status of SEQ ID NO: 37
cgatttttgaacgtgcg

SEQ ID NO: 10252 - DNA, 22 bp, Artificial Sequence
  bisulfite treated nucleic acid for analysis of methylation status of SEQ ID NO: 37
ctacacatcgtcctataaacgc

SEQ ID NO: 10253 - DNA, 22 bp, Artificial Sequence
  bisulfite treated nucleic acid for analysis of methylation status of SEQ ID NO: 37
cgctacacatcgtcctataaac

SEQ ID NO: 10254 - DNA, 17 bp, Artificial Sequence
  bisulfite treated nucleic acid for analysis of methylation status of SEQ ID NO: 37
attttcggcgtttcgtc

SEQ ID NO: 10255 - DNA, 22 bp, Artificial Sequence
  bisulfite treated nucleic acid for analysis of methylation status of SEQ ID NO: 37
ttatggtagatttcgttgttcg

SEQ ID NO: 10256 - DNA, 17 bp, Artificial Sequence
  bisulfite treated nucleic acid for analysis of methylation status of SEQ ID NO: 37
cgtttcgtcgagttcgg

SEQ ID NO: 10257 - DNA, 23 bp, Artificial Sequence
  bisulfite treated nucleic acid for analysis of methylation status of SEQ ID NO: 37
acgaaatctaccataaatcgaaa

SEQ ID NO: 10258 - DNA, 23 bp, Artificial Sequence
  bisulfite treated nucleic acid for analysis of methylation status of SEQ ID NO: 37
aacgaaatctaccataaatcgaa

SEQ ID NO: 10259 - DNA, 19 bp, Artificial Sequence
  bisulfite treated nucleic acid for analysis of methylation status of SEQ ID NO: 37
gctcgaaacaaaaaccgaa

SEQ ID NO: 10260 - DNA, 19 bp, Artificial Sequence
  bisulfite treated nucleic acid for analysis of methylation status of SEQ ID NO: 37
ggtcggtagcgtagatgtg

SEQ ID NO: 10261 - DNA, 18 bp, Artificial Sequence
  bisulfite treated nucleic acid for analysis of methylation status of SEQ ID NO: 37
aacgcaaccaaaaatccg

SEQ ID NO: 10262 - DNA, 23 bp, Artificial Sequence
  bisulfite treated nucleic acid for analysis of methylation status of SEQ ID NO: 37
tatggtagatttcgttgttcgtt

SEQ ID NO: 10263 - DNA, 20 bp, Artificial Sequence
  bisulfite treated nucleic acid for analysis of methylation status of SEQ ID NO: 37
agtttttagcgtagcggacg

SEQ ID NO: 10264 - DNA, 24 bp, Artificial Sequence
  bisulfite treated nucleic acid for analysis of methylation status of SEQ ID NO: 37
tatagatcgagtttttagcgtagc

SEQ ID NO: 10265 - DNA, 23 bp, Artificial Sequence
  bisulfite treated nucleic acid for analysis of methylation status of SEQ ID NO: 37
tttatggtagatttcgttgttcg

SEQ ID NO: 10266 - DNA, 20 bp, Artificial Sequence
  bisulfite treated nucleic acid for analysis of methylation status of SEQ ID NO: 37
cgaaacaaaaaccgaactcc

SEQ ID NO: 10267 - DNA, 19 bp, Artificial Sequence
  bisulfite treated nucleic acid for analysis of methylation status of SEQ ID NO: 37
gtttttagcgtagcggacg

SEQ ID NO: 10268 - DNA, 17 bp, Artificial Sequence
  bisulfite treated nucleic acid for analysis of methylation status of SEQ ID NO: 37
agattttcggcgtttcg

SEQ ID NO: 10269 - DNA, 23 bp, Artificial Sequence
  bisulfite treated nucleic acid for analysis of methylation status of SEQ ID NO: 37
tcgatttatggtagatttcgttg

SEQ ID NO: 10270 - DNA, 23 bp, Artificial Sequence
  bisulfite treated nucleic acid for analysis of methylation status of SEQ ID NO: 37
tggtagatttcgttgttcgttat

SEQ ID NO: 10271 - DNA, 19 bp, Artificial Sequence
  bisulfite treated nucleic acid for analysis of methylation status of SEQ ID NO: 37
atttttggttgcgttttcg

SEQ ID NO: 10272 - DNA, 18 bp, Artificial Sequence
  bisulfite treated nucleic acid for analysis of methylation status of SEQ ID NO: 37
gtacacccgctcgaaaca

SEQ ID NO: 10273 - DNA, 20 bp, Artificial Sequence
  bisulfite treated nucleic acid for analysis of methylation status of SEQ ID NO: 37
gttagatgtggcgttcgttc

SEQ ID NO: 10274 - DNA, 19 bp, Artificial Sequence
  bisulfite treated nucleic acid for analysis of methylation status of SEQ ID NO: 37
cgagtttttagcgtagcgg

SEQ ID NO: 10275 - DNA, 22 bp, Artificial Sequence
  bisulfite treated nucleic acid for analysis of methylation status of SEQ ID NO: 37
gcgtttataggacgatgtgtag

SEQ ID NO: 10276 - DNA, 18 bp, Artificial Sequence
  bisulfite treated nucleic acid for analysis of methylation status of SEQ ID NO: 37
cgaacgccacatctaacc

SEQ ID NO: 10277 - DNA, 19 bp, Artificial Sequence
  bisulfite treated nucleic acid for analysis of methylation status of SEQ ID NO: 37
gttagatgtggcgttcgtt

SEQ ID NO: 10278 - DNA, 17 bp, Artificial Sequence
  bisulfite treated nucleic acid for analysis of methylation status of SEQ ID NO: 37
tcgtcgagttcgggttg

SEQ ID NO: 10279 - DNA, 22 bp, Artificial Sequence
  bisulfite treated nucleic acid for analysis of methylation status of SEQ ID NO: 26
gtcgaggagtttagcgttagtg

SEQ ID NO: 10280 - DNA, 21 bp, Artificial Sequence
  bisulfite treated nucleic acid for analysis of methylation status of SEQ ID NO: 26
gactctatacccgacgcctac

SEQ ID NO: 10281 - DNA, 28 bp, Artificial Sequence
  bisulfite treated nucleic acid for analysis of methylation status of SEQ ID NO: 26
ggcggttaggagagattcgggtgttagg

SEQ ID NO: 10282 - DNA, 22 bp, Artificial Sequence
  bisulfite treated nucleic acid for analysis of methylation status of SEQ ID NO: 26
gtaggtcgttagtagttcgcgt

SEQ ID NO: 10283 - DNA, 21 bp, Artificial Sequence
  bisulfite treated nucleic acid for analysis of methylation status of SEQ ID NO: 26
atacgaacaaaaccctaaccg

SEQ ID NO: 10284 - DNA, 36 bp, Artificial Sequence
  bisulfite treated nucleic acid for analysis of methylation status of SEQ ID NO: 26
gatcgcgtagattttgatattttcgtttggttttgg

SEQ ID NO: 10285 - DNA, 22 bp, Artificial Sequence
  bisulfite treated nucleic acid for analysis of methylation status of SEQ ID NO: 26
gtcgttagtagttcgcgttagg

SEQ ID NO: 10286 - DNA, 21 bp, Artificial Sequence
  bisulfite treated nucleic acid for analysis of methylation status of SEQ ID NO: 26
gaaactaaacgcccgaaaata

SEQ ID NO: 10287 - DNA, 22 bp, Artificial Sequence
  bisulfite treated nucleic acid for analysis of methylation status of SEQ ID NO: 26
tcgtttagtatgtcgggttttt

SEQ ID NO: 10288 - DNA, 21 bp, Artificial Sequence
  bisulfite treated nucleic acid for analysis of methylation status of SEQ ID NO: 26
aactctctaccgaccaacgac

SEQ ID NO: 10289 - DNA, 29 bp, Artificial Sequence
  bisulfite treated nucleic acid for analysis of methylation status of SEQ ID NO: 26
tacgtggtcgagggttttggaagtttcga

SEQ ID NO: 10290 - DNA, 22 bp, Artificial Sequence
  bisulfite treated nucleic acid for analysis of methylation status of SEQ ID NO: 26
aatacgaacaaaaccctaaccg

SEQ ID NO: 10291 - DNA, 22 bp, Artificial Sequence
  bisulfite treated nucleic acid for analysis of methylation status of SEQ ID NO: 26
tcgtaggtcgttagtagttcgc

SEQ ID NO: 10292 - DNA, 22 bp, Artificial Sequence
  bisulfite treated nucleic acid for analysis of methylation status of SEQ ID NO: 26
atcggttcggagttagattacg

SEQ ID NO: 10293 - DNA, 22 bp, Artificial Sequence
  bisulfite treated nucleic acid for analysis of methylation status of SEQ ID NO: 26
aaaaacccgacatactaaacga

SEQ ID NO: 10294 - DNA, 29 bp, Artificial Sequence
  bisulfite treated nucleic acid for analysis of methylation status of SEQ ID NO: 26
agtagcgtcgttattgagagtcgttcgga

SEQ ID NO: 10295 - DNA, 21 bp, Artificial Sequence
  bisulfite treated nucleic acid for analysis of methylation status of SEQ ID NO: 26
aaaactaaaaacgccgatacc

SEQ ID NO: 10296 - DNA, 28 bp, Artificial Sequence
  bisulfite treated nucleic acid for analysis of methylation status of SEQ ID NO: 26
gggatagtagggagttcgggggaaacgt

SEQ ID NO: 10297 - DNA, 22 bp, Artificial Sequence
  bisulfite treated nucleic acid for analysis of methylation status of SEQ ID NO: 26
ttcgtttagtatgtcgggtttt

SEQ ID NO: 10298 - DNA, 21 bp, Artificial Sequence
  bisulfite treated nucleic acid for analysis of methylation status of SEQ ID NO: 26
cgaaactctctaccgaccaac

SEQ ID NO: 10299 - DNA, 21 bp, Artificial Sequence
  bisulfite treated nucleic acid for analysis of methylation status of SEQ ID NO: 26
tcgaggagtttagcgttagtg

SEQ ID NO: 10300 - DNA, 22 bp, Artificial Sequence
  bisulfite treated nucleic acid for analysis of methylation status of SEQ ID NO: 26
acaaaactaaaaacgccgatac

SEQ ID NO: 10301 - DNA, 21 bp, Artificial Sequence
  bisulfite treated nucleic acid for analysis of methylation status of SEQ ID NO: 26
ggttttattgacgcgattttt

SEQ ID NO: 10302 - DNA, 22 bp, Artificial Sequence
  bisulfite treated nucleic acid for analysis of methylation status of SEQ ID NO: 26
aaacccgacatactaaacgaat

SEQ ID NO: 10303 - DNA, 34 bp, Artificial Sequence
  bisulfite treated nucleic acid for analysis of methylation status of SEQ ID NO: 26
ttatgggtagaggatatcggttcggagttagatt

SEQ ID NO: 10304 - DNA, 22 bp, Artificial Sequence
  bisulfite treated nucleic acid for analysis of methylation status of SEQ ID NO: 26
tcgttagtagttcgcgttaggt

SEQ ID NO: 10305 - DNA, 20 bp, Artificial Sequence
  bisulfite treated nucleic acid for analysis of methylation status of SEQ ID NO: 26
gaaactaaacgcccgaaaat

SEQ ID NO: 10306 - DNA, 21 bp, Artificial Sequence
  bisulfite treated nucleic acid for analysis of methylation status of SEQ ID NO: 26
cgaggagtttagcgttagtgg

SEQ ID NO: 10307 - DNA, 22 bp, Artificial Sequence
  bisulfite treated nucleic acid for analysis of methylation status of SEQ ID NO: 26
gacaaaactaaaaacgccgata

SEQ ID NO: 10308 - DNA, 21 bp, Artificial Sequence
  bisulfite treated nucleic acid for analysis of methylation status of SEQ ID NO: 26
tcggttcggagttagattacg

SEQ ID NO: 10309 - DNA, 20 bp, Artificial Sequence
  bisulfite treated nucleic acid for analysis of methylation status of SEQ ID NO: 26
accgaaactctctaccgacc

SEQ ID NO: 10310 - DNA, 21 bp, Artificial Sequence
  bisulfite treated nucleic acid for analysis of methylation status of SEQ ID NO: 26
cgtcgaggagtttagcgttag

SEQ ID NO: 10311 - DNA, 21 bp, Artificial Sequence
  bisulfite treated nucleic acid for analysis of methylation status of SEQ ID NO: 26
acaaaactaaaaacgccgata

SEQ ID NO: 10312 - DNA, 21 bp, Artificial Sequence
  bisulfite treated nucleic acid for analysis of methylation status of SEQ ID NO: 26
tcaaaccgaaactctctaccg

SEQ ID NO: 10313 - DNA, 20 bp, Artificial Sequence
  bisulfite treated nucleic acid for analysis of methylation status of SEQ ID NO: 26
tacgaacaaaaccctaaccg

SEQ ID NO: 10314 - DNA, 22 bp, Artificial Sequence
  bisulfite treated nucleic acid for analysis of methylation status of SEQ ID NO: 26
tttggttttcgtaggtcgttag

SEQ ID NO: 10315 - DNA, 23 bp, Artificial Sequence
  bisulfite treated nucleic acid for analysis of methylation status of SEQ ID NO: 26
gaaaatatcaaaatctacgcgat

SEQ ID NO: 10316 - DNA, 25 bp, Artificial Sequence
  bisulfite treated nucleic acid for analysis of methylation status of SEQ ID NO: 26
agttcgcgttaggtttcgtcggcgt

SEQ ID NO: 10317 - DNA, 23 bp, Artificial Sequence
  bisulfite treated nucleic acid for analysis of methylation status of SEQ ID NO: 26
tatcggttcggagttagattacg

SEQ ID NO: 10318 - DNA, 20 bp, Artificial Sequence
  bisulfite treated nucleic acid for analysis of methylation status of SEQ ID NO: 26
cggttcggagttagattacg

SEQ ID NO: 10319 - DNA, 21 bp, Artificial Sequence
  bisulfite treated nucleic acid for analysis of methylation status of SEQ ID NO: 26
aaccgaaactctctaccgacc

SEQ ID NO: 10320 - DNA, 23 bp, Artificial Sequence
  bisulfite treated nucleic acid for analysis of methylation status of SEQ ID NO: 26
attcgtttagtatgtcgggtttt

SEQ ID NO: 10321 - DNA, 21 bp, Artificial Sequence
  bisulfite treated nucleic acid for analysis of methylation status of SEQ ID NO: 26
actctctaccgaccaacgaca

SEQ ID NO: 10322 - DNA, 20 bp, Artificial Sequence
  bisulfite treated nucleic acid for analysis of methylation status of SEQ ID NO: 26
gtgtcgttggtcggtagaga

SEQ ID NO: 10323 - DNA, 22 bp, Artificial Sequence
  bisulfite treated nucleic acid for analysis of methylation status of SEQ ID NO: 26
aaactcgaactctaaatcccgt

SEQ ID NO: 10324 - DNA, 32 bp, Artificial Sequence
  bisulfite treated nucleic acid for analysis of methylation status of SEQ ID NO: 26
gtttggtgcgcgtagagaataattttaagcgt

SEQ ID NO: 10325 - DNA, 22 bp, Artificial Sequence
  bisulfite treated nucleic acid for analysis of methylation status of SEQ ID NO: 26
aactcgaactctaaatcccgtt

SEQ ID NO: 10326 - DNA, 20 bp, Artificial Sequence
  bisulfite treated nucleic acid for analysis of methylation status of SEQ ID NO: 26
ctctctaccgaccaacgaca

SEQ ID NO: 10327 - DNA, 22 bp, Artificial Sequence
  bisulfite treated nucleic acid for analysis of methylation status of SEQ ID NO: 26
cgtcgaggagtttagcgttagt

SEQ ID NO: 10328 - DNA, 22 bp, Artificial Sequence
  bisulfite treated nucleic acid for analysis of methylation status of SEQ ID NO: 26
taaactcgaactctaaatcccg

SEQ ID NO: 10329 - DNA, 21 bp, Artificial Sequence
  bisulfite treated nucleic acid for analysis of methylation status of SEQ ID NO: 26
tgtcgttggtcggtagagagt

SEQ ID NO: 10330 - DNA, 20 bp, Artificial Sequence
  bisulfite treated nucleic acid for analysis of methylation status of SEQ ID NO: 26
gggtttttatttcgtgcgtt

SEQ ID NO: 10331 - DNA, 22 bp, Artificial Sequence
  bisulfite treated nucleic acid for analysis of methylation status of SEQ ID NO: 26
cgcaaactaaattctctaaccg

SEQ ID NO: 10332 - DNA, 32 bp, Artificial Sequence
  bisulfite treated nucleic acid for analysis of methylation status of SEQ ID NO: 26
ggtgagttatgaagatgtgcgagttagtcgga

SEQ ID NO: 10333 - DNA, 20 bp, Artificial Sequence
  bisulfite treated nucleic acid for analysis of methylation status of SEQ ID NO: 26
tttggattttaagcgtttcg

SEQ ID NO: 10334 - DNA, 24 bp, Artificial Sequence
  bisulfite treated nucleic acid for analysis of methylation status of SEQ ID NO: 26
agcgttagtggcggcggttaggag

SEQ ID NO: 10335 - DNA, 21 bp, Artificial Sequence
  bisulfite treated nucleic acid for analysis of methylation status of SEQ ID NO: 26
cgtaggtcgttagtagttcgc

SEQ ID NO: 10336 - DNA, 21 bp, Artificial Sequence
  bisulfite treated nucleic acid for analysis of methylation status of SEQ ID NO: 26
taggtcgttagtagttcgcgt

SEQ ID NO: 10337 - DNA, 19 bp, Artificial Sequence
  bisulfite treated nucleic acid for analysis of methylation status of SEQ ID NO: 26
tggtgcgcgtagagaataa

SEQ ID NO: 10338 - DNA, 22 bp, Artificial Sequence
  bisulfite treated nucleic acid for analysis of methylation status of SEQ ID NO: 26
ccgcctataaactcgaactcta

SEQ ID NO: 10339 - DNA, 37 bp, Artificial Sequence
  bisulfite treated nucleic acid for analysis of methylation status of SEQ ID NO: 26
agcgtatcgacgttcgcgagttttttttaaatatcga

SEQ ID NO: 10340 - DNA, 19 bp, Artificial Sequence
  bisulfite treated nucleic acid for analysis of methylation status of SEQ ID NO: 26
ttggtgcgcgtagagaata

SEQ ID NO: 10341 - DNA, 22 bp, Artificial Sequence
  bisulfite treated nucleic acid for analysis of methylation status of SEQ ID NO: 26
cgatcttcgacaaaactaaaaa

SEQ ID NO: 10342 - DNA, 20 bp, Artificial Sequence
  bisulfite treated nucleic acid for analysis of methylation status of SEQ ID NO: 26
tgtcgttggtcggtagagag

SEQ ID NO: 10343 - DNA, 21 bp, Artificial Sequence
  bisulfite treated nucleic acid for analysis of methylation status of SEQ ID NO: 26
acgccgataccgactctatac

SEQ ID NO: 10344 - DNA, 22 bp, Artificial Sequence
  bisulfite treated nucleic acid for analysis of methylation status of SEQ ID NO: 26
gaactctaaatcccgttcgata

SEQ ID NO: 10345 - DNA, 20 bp, Artificial Sequence
  bisulfite treated nucleic acid for analysis of methylation status of SEQ ID NO: 26
actaaacgcccgaaaatacg

SEQ ID NO: 10346 - DNA, 19 bp, Artificial Sequence
  bisulfite treated nucleic acid for analysis of methylation status of SEQ ID NO: 26
tatacccgacgcctacgtt

SEQ ID NO: 10347 - DNA, 20 bp, Artificial Sequence
  bisulfite treated nucleic acid for analysis of methylation status of SEQ ID NO: 26
ctatacccgacgcctacgtt

SEQ ID NO: 10348 - DNA, 23 bp, Artificial Sequence
  bisulfite treated nucleic acid for analysis of methylation status of SEQ ID NO: 26
aattcgtttagtatgtcgggttt

SEQ ID NO: 10349 - DNA, 23 bp, Artificial Sequence
  bisulfite treated nucleic acid for analysis of methylation status of SEQ ID NO: 26
gatcttcgacaaaactaaaaacg

SEQ ID NO: 10350 - DNA, 21 bp, Artificial Sequence
  bisulfite treated nucleic acid for analysis of methylation status of SEQ ID NO: 26
ttttggattttaagcgtttcg

SEQ ID NO: 10351 - DNA, 19 bp, Artificial Sequence
  bisulfite treated nucleic acid for analysis of methylation status of SEQ ID NO: 26
gtgtacgtggtcgagggtt

SEQ ID NO: 10352 - DNA, 22 bp, Artificial Sequence
  bisulfite treated nucleic acid for analysis of methylation status of SEQ ID NO: 26
tacgctaaatcaaaccgaaact

SEQ ID NO: 10353 - DNA, 24 bp, Artificial Sequence
  bisulfite treated nucleic acid for analysis of methylation status of SEQ ID NO: 26
ggcgggtgtcgttggtcggtagag

SEQ ID NO: 10354 - DNA, 22 bp, Artificial Sequence
  bisulfite treated nucleic acid for analysis of methylation status of SEQ ID NO: 26
aggtcgttagtagttcgcgtta

SEQ ID NO: 10355 - DNA, 19 bp, Artificial Sequence
  bisulfite treated nucleic acid for analysis of methylation status of SEQ ID NO: 26
ctaaacgcccgaaaatacg

SEQ ID NO: 10356 - DNA, 19 bp, Artificial Sequence
  bisulfite treated nucleic acid for analysis of methylation status of SEQ ID NO: 26
tctctaccgaccaacgaca

SEQ ID NO: 10357 - DNA, 22 bp, Artificial Sequence
  bisulfite treated nucleic acid for analysis of methylation status of SEQ ID NO: 26
actcgaactctaaatcccgttc

SEQ ID NO: 10358 - DNA, 19 bp, Artificial Sequence
  bisulfite treated nucleic acid for analysis of methylation status of SEQ ID NO: 26
gtacgtggtcgagggtttt

SEQ ID NO: 10359 - DNA, 23 bp, Artificial Sequence
  bisulfite treated nucleic acid for analysis of methylation status of SEQ ID NO: 26
atatcggttcggagttagattac

SEQ ID NO: 10360 - DNA, 20 bp, Artificial Sequence
  bisulfite treated nucleic acid for analysis of methylation status of SEQ ID NO: 26
gtcgttggtcggtagagagt

SEQ ID NO: 10361 - DNA, 22 bp, Artificial Sequence
  bisulfite treated nucleic acid for analysis of methylation status of SEQ ID NO: 26
caaaactaaaaacgccgatacc

SEQ ID NO: 10362 - DNA, 19 bp, Artificial Sequence
  bisulfite treated nucleic acid for analysis of methylation status of SEQ ID NO: 26
gtagggtgttggtcgtcgt

SEQ ID NO: 10363 - DNA, 22 bp, Artificial Sequence
  bisulfite treated nucleic acid for analysis of methylation status of SEQ ID NO: 26
cgcgaaaaacctctaaaaacta

SEQ ID NO: 10364 - DNA, 28 bp, Artificial Sequence
  bisulfite treated nucleic acid for analysis of methylation status of SEQ ID NO: 26
aggacgtggggtttaaatttcggttggg

SEQ ID NO: 10365 - DNA, 20 bp, Artificial Sequence
  bisulfite treated nucleic acid for analysis of methylation status of SEQ ID NO: 26
aaactaaacgcccgaaaata

SEQ ID NO: 10366 - DNA, 22 bp, Artificial Sequence
  bisulfite treated nucleic acid for analysis of methylation status of SEQ ID NO: 26
agtttcggtttgatttagcgta

SEQ ID NO: 10367 - DNA, 19 bp, Artificial Sequence
  bisulfite treated nucleic acid for analysis of methylation status of SEQ ID NO: 26
cgacgaccaacaccctact

SEQ ID NO: 10368 - DNA, 38 bp, Artificial Sequence
  bisulfite treated nucleic acid for analysis of methylation status of SEQ ID NO: 26
aacgggatttagagttcgagtttataggcggcggtcgg

SEQ ID NO: 10369 - DNA, 22 bp, Artificial Sequence
  bisulfite treated nucleic acid for analysis of methylation status of SEQ ID NO: 26
cgtttttggcgttaaagatagt

SEQ ID NO: 10370 - DNA, 19 bp, Artificial Sequence
  bisulfite treated nucleic acid for analysis of methylation status of SEQ ID NO: 26
cgacctcttcccgaaatta

SEQ ID NO: 10371 - DNA, 29 bp, Artificial Sequence
  bisulfite treated nucleic acid for analysis of methylation status of SEQ ID NO: 26
ttttatttcgggtttcgagggtcgttggg

SEQ ID NO: 10372 - DNA, 22 bp, Artificial Sequence
  bisulfite treated nucleic acid for analysis of methylation status of SEQ ID NO: 26
gtcgtttttggcgttaaagata

SEQ ID NO: 10373 - DNA, 20 bp, Artificial Sequence
  bisulfite treated nucleic acid for analysis of methylation status of SEQ ID NO: 26
agtagggtgttggtcgtcgt

SEQ ID NO: 10374 - DNA, 19 bp, Artificial Sequence
  bisulfite treated nucleic acid for analysis of methylation status of SEQ ID NO: 26
agtttagcgttagtggcgg

SEQ ID NO: 10375 - DNA, 22 bp, Artificial Sequence
  bisulfite treated nucleic acid for analysis of methylation status of SEQ ID NO: 26
tcttcgacaaaactaaaaacgc

SEQ ID NO: 10376 - DNA, 20 bp, Artificial Sequence
  bisulfite treated nucleic acid for analysis of methylation status of SEQ ID NO: 26
tttggtgcgcgtagagaata

SEQ ID NO: 10377 - DNA, 19 bp, Artificial Sequence
  bisulfite treated nucleic acid for analysis of methylation status of SEQ ID NO: 26
acgaacaaaaccctaaccg

SEQ ID NO: 10378 - DNA, 22 bp, Artificial Sequence
  bisulfite treated nucleic acid for analysis of methylation status of SEQ ID NO: 26
tcgtttttggcgttaaagatag

SEQ ID NO: 10379 - DNA, 23 bp, Artificial Sequence
  bisulfite treated nucleic acid for analysis of methylation status of SEQ ID NO: 26
ataaactcgaactctaaatcccg

SEQ ID NO: 10380 - DNA, 21 bp, Artificial Sequence
  bisulfite treated nucleic acid for analysis of methylation status of SEQ ID NO: 26
ctcgaactctaaatcccgttc

SEQ ID NO: 10381 - DNA, 20 bp, Artificial Sequence
  bisulfite treated nucleic acid for analysis of methylation status of SEQ ID NO: 26
actaaaaacgccgataccga

SEQ ID NO: 10382 - DNA, 20 bp, Artificial Sequence
  bisulfite treated nucleic acid for analysis of methylation status of SEQ ID NO: 26
taaaaacgccgataccgact

SEQ ID NO: 10383 - DNA, 22 bp, Artificial Sequence
  bisulfite treated nucleic acid for analysis of methylation status of SEQ ID NO: 26
aattttaagcgtatcgacgttc

SEQ ID NO: 10384 - DNA, 19 bp, Artificial Sequence
  bisulfite treated nucleic acid for analysis of methylation status of SEQ ID NO: 26
acgacgaccaacaccctac

SEQ ID NO: 10385 - DNA, 22 bp, Artificial Sequence
  bisulfite treated nucleic acid for analysis of methylation status of SEQ ID NO: 26
tatcggttcggagttagattac

SEQ ID NO: 10386 - DNA, 23 bp, Artificial Sequence
  bisulfite treated nucleic acid for analysis of methylation status of SEQ ID NO: 26
aaaacccgacatactaaacgaat

SEQ ID NO: 10387 - DNA, 22 bp, Artificial Sequence
  bisulfite treated nucleic acid for analysis of methylation status of SEQ ID NO: 26
cgataccgactctatacccgac

SEQ ID NO: 10388 - DNA, 19 bp, Artificial Sequence
  bisulfite treated nucleic acid for analysis of methylation status of SEQ ID NO: 26
ccgaaactctctaccgacc

SEQ ID NO: 10389 - DNA, 34 bp, Artificial Sequence
  bisulfite treated nucleic acid for analysis of methylation status of SEQ ID NO: 26
attataagtagcgtcgttattgagagtcgttcgg

SEQ ID NO: 10390 - DNA, 20 bp, Artificial Sequence
  bisulfite treated nucleic acid for analysis of methylation status of SEQ ID NO: 26
ctctatacccgacgcctacg

SEQ ID NO: 10391 - DNA, 22 bp, Artificial Sequence
  bisulfite treated nucleic acid for analysis of methylation status of SEQ ID NO: 26
cggagttagattacgggtttta

SEQ ID NO: 10392 - DNA, 19 bp, Artificial Sequence
  bisulfite treated nucleic acid for analysis of methylation status of SEQ ID NO: 26
aaccctcgaccacgtacac

SEQ ID NO: 10393 - DNA, 32 bp, Artificial Sequence
  bisulfite treated nucleic acid for analysis of methylation status of SEQ ID NO: 26
agcgtcgttattgagagtcgttcggaattcgt

SEQ ID NO: 10394 - DNA, 19 bp, Artificial Sequence
  bisulfite treated nucleic acid for analysis of methylation status of SEQ ID NO: 26
tctatacccgacgcctacg

SEQ ID NO: 10395 - DNA, 19 bp, Artificial Sequence
  bisulfite treated nucleic acid for analysis of methylation status of SEQ ID NO: 26
ctaaaaacgccgataccga

SEQ ID NO: 10396 - DNA, 32 bp, Artificial Sequence
  bisulfite treated nucleic acid for analysis of methylation status of SEQ ID NO: 26
aagcgtatcgacgttcgcgagttttttttaaa

SEQ ID NO: 10397 - DNA, 32 bp, Artificial Sequence
  bisulfite treated nucleic acid for analysis of methylation status of SEQ ID NO: 26
ttttaagcgtatcgacgttcgcgagttttttt

SEQ ID NO: 10398 - DNA, 21 bp, Artificial Sequence
  bisulfite treated nucleic acid for analysis of methylation status of SEQ ID NO: 26
gtcgttggtcggtagagagtt

SEQ ID NO: 10399 - DNA, 21 bp, Artificial Sequence
  bisulfite treated nucleic acid for analysis of methylation status of SEQ ID NO: 26
gaacgtcgatacgcttaaaat

SEQ ID NO: 10400 - DNA, 26 bp, Artificial Sequence
  bisulfite treated nucleic acid for analysis of methylation status of SEQ ID NO: 26
agcgtaggtttggtgcgcgtagagaa

SEQ ID NO: 10401 - DNA, 21 bp, Artificial Sequence
  bisulfite treated nucleic acid for analysis of methylation status of SEQ ID NO: 26
aaaacccgacatactaaacga

SEQ ID NO: 10402 - DNA, 22 bp, Artificial Sequence
  bisulfite treated nucleic acid for analysis of methylation status of SEQ ID NO: 26
atcttcgacaaaactaaaaacg

SEQ ID NO: 10403 - DNA, 22 bp, Artificial Sequence
  bisulfite treated nucleic acid for analysis of methylation status of SEQ ID NO: 26
gtcgggtagttcgttttgtttt

SEQ ID NO: 10404 - DNA, 20 bp, Artificial Sequence
  bisulfite treated nucleic acid for analysis of methylation status of SEQ ID NO: 26
gactaacctaacgcgaaccc

SEQ ID NO: 10405 - DNA, 25 bp, Artificial Sequence
  bisulfite treated nucleic acid for analysis of methylation status of SEQ ID NO: 26
ttcggaggttcgcgcgttcgcgaag

SEQ ID NO: 10406 - DNA, 20 bp, Artificial Sequence
  bisulfite treated nucleic acid for analysis of methylation status of SEQ ID NO: 26
aaactaaaaacgccgatacc

SEQ ID NO: 10407 - DNA, 22 bp, Artificial Sequence
  bisulfite treated nucleic acid for analysis of methylation status of SEQ ID NO: 26
atttttgtttttcgtcggttat

SEQ ID NO: 10408 - DNA, 19 bp, Artificial Sequence
  bisulfite treated nucleic acid for analysis of methylation status of SEQ ID NO: 26
ccgccactaacgctaaact

SEQ ID NO: 10409 - DNA, 30 bp, Artificial Sequence
  bisulfite treated nucleic acid for analysis of methylation status of SEQ ID NO: 26
tgttttttggattttaagcgtttcgcgcgt

SEQ ID NO: 10410 - DNA, 22 bp, Artificial Sequence
  bisulfite treated nucleic acid for analysis of methylation status of SEQ ID NO: 26
gtttcggtttgatttagcgtag

SEQ ID NO: 10411 - DNA, 18 bp, Artificial Sequence
  bisulfite treated nucleic acid for analysis of methylation status of SEQ ID NO: 26
accgccgcctataaactc

SEQ ID NO: 10412 - DNA, 18 bp, Artificial Sequence
  bisulfite treated nucleic acid for analysis of methylation status of SEQ ID NO: 26
gaccgccgcctataaact

SEQ ID NO: 10413 - DNA, 19 bp, Artificial Sequence
  bisulfite treated nucleic acid for analysis of methylation status of SEQ ID NO: 26
ggcggaaagtagtcgtttt

SEQ ID NO: 10414 - DNA, 22 bp, Artificial Sequence
  bisulfite treated nucleic acid for analysis of methylation status of SEQ ID NO: 26
cactaacgctaaactcctcgac

SEQ ID NO: 10415 - DNA, 22 bp, Artificial Sequence
  bisulfite treated nucleic acid for analysis of methylation status of SEQ ID NO: 26
tagtagttcgcgttaggtttcg

SEQ ID NO: 10416 - DNA, 19 bp, Artificial Sequence
  bisulfite treated nucleic acid for analysis of methylation status of SEQ ID NO: 26
gcccgaaaatacgaacaaa

SEQ ID NO: 10417 - DNA, 20 bp, Artificial Sequence
  bisulfite treated nucleic acid for analysis of methylation status of SEQ ID NO: 26
actctatacccgacgcctac

SEQ ID NO: 10418 - DNA, 18 bp, Artificial Sequence
  bisulfite treated nucleic acid for analysis of methylation status of SEQ ID NO: 26
atacccgacgcctacgtt

SEQ ID NO: 10419 - DNA, 21 bp, Artificial Sequence
  bisulfite treated nucleic acid for analysis of methylation status of SEQ ID NO: 26
cgggtagttcgttttgttttt

SEQ ID NO: 10420 - DNA, 20 bp, Artificial Sequence
  bisulfite treated nucleic acid for analysis of methylation status of SEQ ID NO: 26
gtccgtcccgactaacctaa

SEQ ID NO: 10421 - DNA, 27 bp, Artificial Sequence
  bisulfite treated nucleic acid for analysis of methylation status of SEQ ID NO: 26
ttcgcgaaggggacgtagcgaaatcgg

SEQ ID NO: 10422 - DNA, 20 bp, Artificial Sequence
  bisulfite treated nucleic acid for analysis of methylation status of SEQ ID NO: 26
gttaggttagtcgggacgga

SEQ ID NO: 10423 - DNA, 21 bp, Artificial Sequence
  bisulfite treated nucleic acid for analysis of methylation status of SEQ ID NO: 26
aaatacctacccaacgctacg

SEQ ID NO: 10424 - DNA, 21 bp, Artificial Sequence
  bisulfite treated nucleic acid for analysis of methylation status of SEQ ID NO: 26
tttcgcgggcgggggttggag

SEQ ID NO: 10425 - DNA, 23 bp, Artificial Sequence
  bisulfite treated nucleic acid for analysis of methylation status of SEQ ID NO: 26
cggagttagattacgggttttat

SEQ ID NO: 10426 - DNA, 19 bp, Artificial Sequence
  bisulfite treated nucleic acid for analysis of methylation status of SEQ ID NO: 26
ctcgaccacgtacaccaaa

SEQ ID NO: 10427 - DNA, 21 bp, Artificial Sequence
  bisulfite treated nucleic acid for analysis of methylation status of SEQ ID NO: 26
ttggttttcgtaggtcgttag

SEQ ID NO: 10428 - DNA, 21 bp, Artificial Sequence
  bisulfite treated nucleic acid for analysis of methylation status of SEQ ID NO: 26
cgtttagtatgtcgggttttt

SEQ ID NO: 10429 - DNA, 23 bp, Artificial Sequence
  bisulfite treated nucleic acid for analysis of methylation status of SEQ ID NO: 26
ttcgtttagtatgtcgggttttt

SEQ ID NO: 10430 - DNA, 21 bp, Artificial Sequence
  bisulfite treated nucleic acid for analysis of methylation status of SEQ ID NO: 26
tcgggtagttcgttttgtttt

SEQ ID NO: 10431 - DNA, 19 bp, Artificial Sequence
  bisulfite treated nucleic acid for analysis of methylation status of SEQ ID NO: 26
tccgtcccgactaacctaa

SEQ ID NO: 10432 - DNA, 19 bp, Artificial Sequence
  bisulfite treated nucleic acid for analysis of methylation status of SEQ ID NO: 26
ttaggttagtcgggacgga

SEQ ID NO: 10433 - DNA, 20 bp, Artificial Sequence
  bisulfite treated nucleic acid for analysis of methylation status of SEQ ID NO: 26
aggtcgttagtagttcgcgt

SEQ ID NO: 10434 - DNA, 22 bp, Artificial Sequence
  bisulfite treated nucleic acid for analysis of methylation status of SEQ ID NO: 26
catctaaactaacaccgaacga

SEQ ID NO: 10435 - DNA, 22 bp, Artificial Sequence
  bisulfite treated nucleic acid for analysis of methylation status of SEQ ID NO: 26
gagaacgaggtacgtttttgag

SEQ ID NO: 10436 - DNA, 23 bp, Artificial Sequence
  bisulfite treated nucleic acid for analysis of methylation status of SEQ ID NO: 26
tgcggatcgagcgttcgcgtagg

SEQ ID NO: 10437 - DNA, 22 bp, Artificial Sequence
  bisulfite treated nucleic acid for analysis of methylation status of SEQ ID NO: 26
aaactaacaccgaacgaaaaat

SEQ ID NO: 10438 - DNA, 23 bp, Artificial Sequence
  bisulfite treated nucleic acid for analysis of methylation status of SEQ ID NO: 26
tctaaactaacaccgaacgaaaa

SEQ ID NO: 10439 - DNA, 22 bp, Artificial Sequence
  bisulfite treated nucleic acid for analysis of methylation status of SEQ ID NO: 26
atatacgaatcaaccgaaccct

SEQ ID NO: 10440 - DNA, 22 bp, Artificial Sequence
  bisulfite treated nucleic acid for analysis of methylation status of SEQ ID NO: 26
atttttacgttttggaaagtcg

SEQ ID NO: 10441 - DNA, 24 bp, Artificial Sequence
  bisulfite treated nucleic acid for analysis of methylation status of SEQ ID NO: 26
tggtcgtagcgggttcgcgtttga

SEQ ID NO: 10442 - DNA, 22 bp, Artificial Sequence
  bisulfite treated nucleic acid for analysis of methylation status of SEQ ID NO: 26
aaatatacgaatcaaccgaacc

SEQ ID NO: 10443 - DNA, 22 bp, Artificial Sequence
  bisulfite treated nucleic acid for analysis of methylation status of SEQ ID NO: 26
gcatctaaactaacaccgaacg

SEQ ID NO: 10444 - DNA, 22 bp, Artificial Sequence
  bisulfite treated nucleic acid for analysis of methylation status of SEQ ID NO: 26
gtgagaacgaggtacgtttttg

SEQ ID NO: 10445 - DNA, 22 bp, Artificial Sequence
  bisulfite treated nucleic acid for analysis of methylation status of SEQ ID NO: 26
aatatacgaatcaaccgaaccc

SEQ ID NO: 10446 - DNA, 22 bp, Artificial Sequence
  bisulfite treated nucleic acid for analysis of methylation status of SEQ ID NO: 26
ctaaactaacaccgaacgaaaa

SEQ ID NO: 10447 - DNA, 21 bp, Artificial Sequence
  bisulfite treated nucleic acid for analysis of methylation status of SEQ ID NO: 26
cgcatctaaactaacaccgaa

SEQ ID NO: 10448 - DNA, 22 bp, Artificial Sequence
  bisulfite treated nucleic acid for analysis of methylation status of SEQ ID NO: 26
aacgaccaaaatctaacctacg

SEQ ID NO: 10449 - DNA, 21 bp, Artificial Sequence
  bisulfite treated nucleic acid for analysis of methylation status of SEQ ID NO: 26
ttttaacggttttcggagttc

SEQ ID NO: 10450 - DNA, 22 bp, Artificial Sequence
  bisulfite treated nucleic acid for analysis of methylation status of SEQ ID NO: 26
tggcgttaaaggcggtcggcgt

SEQ ID NO: 10451 - DNA, 21 bp, Artificial Sequence
  bisulfite treated nucleic acid for analysis of methylation status of SEQ ID NO: 26
tgagaacgaggtacgtttttg

SEQ ID NO: 10452 - DNA, 23 bp, Artificial Sequence
  bisulfite treated nucleic acid for analysis of methylation status of SEQ ID NO: 26
aaaatatacgaatcaaccgaacc

SEQ ID NO: 10453 - DNA, 23 bp, Artificial Sequence
  bisulfite treated nucleic acid for analysis of methylation status of SEQ ID NO: 26
atctaaactaacaccgaacgaaa

SEQ ID NO: 10454 - DNA, 23 bp, Artificial Sequence
  bisulfite treated nucleic acid for analysis of methylation status of SEQ ID NO: 26
taaactaacaccgaacgaaaaat

SEQ ID NO: 10455 - DNA, 21 bp, Artificial Sequence
  bisulfite treated nucleic acid for analysis of methylation status of SEQ ID NO: 26
tatacgaatcaaccgaaccct

SEQ ID NO: 10456 - DNA, 23 bp, Artificial Sequence
  bisulfite treated nucleic acid for analysis of methylation status of SEQ ID NO: 26
cgataccgaccttttctattacc

SEQ ID NO: 10457 - DNA, 22 bp, Artificial Sequence
  bisulfite treated nucleic acid for analysis of methylation status of SEQ ID NO: 26
ggttcggttgattcgtatattt

SEQ ID NO: 10458 - DNA, 22 bp, Artificial Sequence
  bisulfite treated nucleic acid for analysis of methylation status of SEQ ID NO: 26
tgttgggcgtacggggtgggga

SEQ ID NO: 10459 - DNA, 22 bp, Artificial Sequence
  bisulfite treated nucleic acid for analysis of methylation status of SEQ ID NO: 26
tttttaacggttttcggagttc

SEQ ID NO: 10460 - DNA, 22 bp, Artificial Sequence
  bisulfite treated nucleic acid for analysis of methylation status of SEQ ID NO: 26
tctaaactaacaccgaacgaaa

SEQ ID NO: 10461 - DNA, 22 bp, Artificial Sequence
  nucleic acid for analysis of methylation status of SEQ ID NO: 26
agaacgaggtacgtttttgagt

SEQ ID NO: 10462 - DNA, 21 bp, Artificial Sequence
  bisulfite treated nucleic acid for analysis of methylation status of SEQ ID NO: 26
gttttggaaagtcgcgttagt

SEQ ID NO: 10463 - DNA, 23 bp, Artificial Sequence
  bisulfite treated nucleic acid for analysis of methylation status of SEQ ID NO: 26
catctaaactaacaccgaacgaa

SEQ ID NO: 10464 - DNA, 21 bp, Artificial Sequence
  bisulfite treated nucleic acid for analysis of methylation status of SEQ ID NO: 26
ggaaagtcgcgttagtgaagt

SEQ ID NO: 10465 - DNA, 22 bp, Artificial Sequence
  bisulfite treated nucleic acid for analysis of methylation status of SEQ ID NO: 26
gggttcggttgattcgtatatt

SEQ ID NO: 10466 - DNA, 22 bp, Artificial Sequence
  bisulfite treated nucleic acid for analysis of methylation status of SEQ ID NO: 26
gacgataccgaccttttctatt

SEQ ID NO: 10467 - DNA, 22 bp, Artificial Sequence
  bisulfite treated nucleic acid for analysis of methylation status of SEQ ID NO: 26
aactaacaccgaacgaaaaatc

SEQ ID NO: 10468 - DNA, 22 bp, Artificial Sequence
  bisulfite treated nucleic acid for analysis of methylation status of SEQ ID NO: 26
tgagaacgaggtacgtttttga

SEQ ID NO: 10469 - DNA, 22 bp, Artificial Sequence
  bisulfite treated nucleic acid for analysis of methylation status of SEQ ID NO: 26
cgacgataccgaccttttctat

SEQ ID NO: 10470 - DNA, 22 bp, Artificial Sequence
  bisulfite treated nucleic acid for analysis of methylation status of SEQ ID NO: 26
aaatcctactcgtacctccgaa

SEQ ID NO: 10471 - DNA, 21 bp, Artificial Sequence
  bisulfite treated nucleic acid for analysis of methylation status of SEQ ID NO: 26
tattatttattcggtcgggga

SEQ ID NO: 10472 - DNA, 22 bp, Artificial Sequence
  bisulfite treated nucleic acid for analysis of methylation status of SEQ ID NO: 26
tggggcgttcgcggggagtaga

SEQ ID NO: 10473 - DNA, 21 bp, Artificial Sequence
  bisulfite treated nucleic acid for analysis of methylation status of SEQ ID NO: 26
aatcctactcgtacctccgaa

SEQ ID NO: 10474 - DNA, 21 bp, Artificial Sequence
  bisulfite treated nucleic acid for analysis of methylation status of SEQ ID NO: 26
gttggggcgttcgcggggagt

SEQ ID NO: 10475 - DNA, 20 bp, Artificial Sequence
  bisulfite treated nucleic acid for analysis of methylation status of SEQ ID NO: 26
cgcgcatctaaactaacacc

SEQ ID NO: 10476 - DNA, 21 bp, Artificial Sequence
  bisulfite treated nucleic acid for analysis of methylation status of SEQ ID NO: 26
gagaacgaggtacgtttttga

SEQ ID NO: 10477 - DNA, 22 bp, Artificial Sequence
  bisulfite treated nucleic acid for analysis of methylation status of SEQ ID NO: 26
atattcgcgtcctaaataaccc

SEQ ID NO: 10478 - DNA, 20 bp, Artificial Sequence
  bisulfite treated nucleic acid for analysis of methylation status of SEQ ID NO: 26
ttgtggagttacggtttcgt

SEQ ID NO: 10479 - DNA, 27 bp, Artificial Sequence
  bisulfite treated nucleic acid for analysis of methylation status of SEQ ID NO: 26
aggatttcgcggagagtttttgggggt

SEQ ID NO: 10480 - DNA, 22 bp, Artificial Sequence
  bisulfite treated nucleic acid for analysis of methylation status of SEQ ID NO: 26
cgtaatcgaaaaccctaaaaac

SEQ ID NO: 10481 - DNA, 22 bp, Artificial Sequence
  bisulfite treated nucleic acid for analysis of methylation status of SEQ ID NO: 26
agatttgcgttaggttaggtcg

SEQ ID NO: 10482 - DNA, 33 bp, Artificial Sequence
  bisulfite treated nucleic acid for analysis of methylation status of SEQ ID NO: 26
ttatcggttagcgatattcgtcgtttcgttcgt

SEQ ID NO: 10483 - DNA, 21 bp, Artificial Sequence
  bisulfite treated nucleic acid for analysis of methylation status of SEQ ID NO: 26
tttttacgttttggaaagtcg

SEQ ID NO: 10484 - DNA, 21 bp, Artificial Sequence
  bisulfite treated nucleic acid for analysis of methylation status of SEQ ID NO: 26
actaacgcgactttccaaaac

SEQ ID NO: 10485 - DNA, 21 bp, Artificial Sequence
  bisulfite treated nucleic acid for analysis of methylation status of SEQ ID NO: 26
gagtttcgagcggtttttagt

SEQ ID NO: 10486 - DNA, 30 bp, Artificial Sequence
  bisulfite treated nucleic acid for analysis of methylation status of SEQ ID NO: 26
ggggttcgtgatttggtttcgaatcgatgt

SEQ ID NO: 10487 - DNA, 21 bp, Artificial Sequence
  bisulfite treated nucleic acid for analysis of methylation status of SEQ ID NO: 26
gatttgcgttaggttaggtcg

SEQ ID NO: 10488 - DNA, 21 bp, Artificial Sequence
  bisulfite treated nucleic acid for analysis of methylation status of SEQ ID NO: 26
acttcactaacgcgactttcc

SEQ ID NO: 10489 - DNA, 20 bp, Artificial Sequence
  bisulfite treated nucleic acid for analysis of methylation status of SEQ ID NO: 26
tttacgttttggaaagtcgc

SEQ ID NO: 10490 - DNA, 22 bp, Artificial Sequence
  bisulfite treated nucleic acid for analysis of methylation status of SEQ ID NO: 26
acgtaatcgaaaaccctaaaaa

SEQ ID NO: 10491 - DNA, 21 bp, Artificial Sequence
  bisulfite treated nucleic acid for analysis of methylation status of SEQ ID NO: 26
tgcgttaggttaggtcgaagt

SEQ ID NO: 10492 - DNA, 20 bp, Artificial Sequence
  bisulfite treated nucleic acid for analysis of methylation status of SEQ ID NO: 26
gcgttagtgaagttcgtggt

SEQ ID NO: 10493 - DNA, 23 bp, Artificial Sequence
  bisulfite treated nucleic acid for analysis of methylation status of SEQ ID NO: 26
gatttttacgttttggaaagtcg

SEQ ID NO: 10494 - DNA, 20 bp, Artificial Sequence
  bisulfite treated nucleic acid for analysis of methylation status of SEQ ID NO: 26
atacgaatcaaccgaaccct

SEQ ID NO: 10495 - DNA, 21 bp, Artificial Sequence
  bisulfite treated nucleic acid for analysis of methylation status of SEQ ID NO: 26
aaaatcctactcgtacctccg

SEQ ID NO: 10496 - DNA, 34 bp, Artificial Sequence
  bisulfite treated nucleic acid for analysis of methylation status of SEQ ID NO: 26
ggcgttcgcggggagtagattcgaggttgggcgt

SEQ ID NO: 10497 - DNA, 23 bp, Artificial Sequence
  bisulfite treated nucleic acid for analysis of methylation status of SEQ ID NO: 26
aaacgaccaaaatctaacctacg

SEQ ID NO: 10498 - DNA, 21 bp, Artificial Sequence
  bisulfite treated nucleic acid for analysis of methylation status of SEQ ID NO: 26
tttgtggagttacggtttcgt

SEQ ID NO: 10499 - DNA, 21 bp, Artificial Sequence
  bisulfite treated nucleic acid for analysis of methylation status of SEQ ID NO: 26
agtttcgagcggtttttagtg

SEQ ID NO: 10500 - DNA, 21 bp, Artificial Sequence
  bisulfite treated nucleic acid for analysis of methylation status of SEQ ID NO: 26
ttttacgttttggaaagtcgc

SEQ ID NO: 10501 - DNA, 22 bp, Artificial Sequence
  bisulfite treated nucleic acid for analysis of methylation status of SEQ ID NO: 26
atctaaactaacaccgaacgaa

SEQ ID NO: 10502 - DNA, 22 bp, Artificial Sequence
  bisulfite treated nucleic acid for analysis of methylation status of SEQ ID NO: 26
aacttcactaacgcgactttcc

SEQ ID NO: 10503 - DNA, 22 bp, Artificial Sequence
  bisulfite treated nucleic acid for analysis of methylation status of SEQ ID NO: 26
atacccgaaactacgacgacta

SEQ ID NO: 10504 - DNA, 19 bp, Artificial Sequence
  bisulfite treated nucleic acid for analysis of methylation status of SEQ ID NO: 26
gtgtttgtttagcgttgcg

SEQ ID NO: 10505 - DNA, 28 bp, Artificial Sequence
  bisulfite treated nucleic acid for analysis of methylation status of SEQ ID NO: 26
agttttcgttcgcggagtcgaatcgttt

SEQ ID NO: 10506 - DNA, 20 bp, Artificial Sequence
  bisulfite treated nucleic acid for analysis of methylation status of SEQ ID NO: 26
ttttggaaagtcgcgttagt

SEQ ID NO: 10507 - DNA, 20 bp, Artificial Sequence
  bisulfite treated nucleic acid for analysis of methylation status of SEQ ID NO: 26
gcgcatctaaactaacaccg

SEQ ID NO: 10508 - DNA, 21 bp, Artificial Sequence
  bisulfite treated nucleic acid for analysis of methylation status of SEQ ID NO: 26
tattcgcgtcctaaataaccc

SEQ ID NO: 10509 - DNA, 20 bp, Artificial Sequence
  bisulfite treated nucleic acid for analysis of methylation status of SEQ ID NO: 26
gtggagttacggtttcgttc

SEQ ID NO: 10510 - DNA, 22 bp, Artificial Sequence
  bisulfite treated nucleic acid for analysis of methylation status of SEQ ID NO: 26
ctcaaaaacgtacctcgttctc

SEQ ID NO: 10511 - DNA, 19 bp, Artificial Sequence
  bisulfite treated nucleic acid for analysis of methylation status of SEQ ID NO: 26
gcggattattagcggtttg

SEQ ID NO: 10512 - DNA, 32 bp, Artificial Sequence
  bisulfite treated nucleic acid for analysis of methylation status of SEQ ID NO: 26
gtcgttgtttagggaagaggatcggggttcgg

SEQ ID NO: 10513 - DNA, 19 bp, Artificial Sequence
  bisulfite treated nucleic acid for analysis of methylation status of SEQ ID NO: 26
gattattagcggtttgcgg

SEQ ID NO: 10514 - DNA, 19 bp, Artificial Sequence
  bisulfite treated nucleic acid for analysis of methylation status of SEQ ID NO: 26
cggattattagcggtttgc

SEQ ID NO: 10515 - DNA, 19 bp, Artificial Sequence
  bisulfite treated nucleic acid for analysis of methylation status of SEQ ID NO: 26
gtttggcgcggattattag

SEQ ID NO: 10516 - DNA, 19 bp, Artificial Sequence
  bisulfite treated nucleic acid for analysis of methylation status of SEQ ID NO: 26
ggattattagcggtttgcg

SEQ ID NO: 10517 - DNA, 20 bp, Artificial Sequence
  bisulfite treated nucleic acid for analysis of methylation status of SEQ ID NO: 26
acgaacttcactaacgcgac

SEQ ID NO: 10518 - DNA, 22 bp, Artificial Sequence
  bisulfite treated nucleic acid for analysis of methylation status of SEQ ID NO: 26
tacccgaaactacgacgactac

SEQ ID NO: 10519 - DNA, 21 bp, Artificial Sequence
  bisulfite treated nucleic acid for analysis of methylation status of SEQ ID NO: 26
ttgcgttaggttaggtcgaag

SEQ ID NO: 10520 - DNA, 20 bp, Artificial Sequence
  bisulfite treated nucleic acid for analysis of methylation status of SEQ ID NO: 26
accacgaacttcactaacgc

SEQ ID NO: 10521 - DNA, 20 bp, Artificial Sequence
  bisulfite treated nucleic acid for analysis of methylation status of SEQ ID NO: 26
attatttattcggtcgggga

SEQ ID NO: 10522 - DNA, 19 bp, Artificial Sequence
  bisulfite treated nucleic acid for analysis of methylation status of SEQ ID NO: 26
tacgaatcaaccgaaccct

SEQ ID NO: 10523 - DNA, 22 bp, Artificial Sequence
  bisulfite treated nucleic acid for analysis of methylation status of SEQ ID NO: 26
ttcggttgattcgtatattttt

SEQ ID NO: 10524 - DNA, 21 bp, Artificial Sequence
  bisulfite treated nucleic acid for analysis of methylation status of SEQ ID NO: 26
aaccacgaacttcactaacgc

SEQ ID NO: 10525 - DNA, 22 bp, Artificial Sequence
  bisulfite treated nucleic acid for analysis of methylation status of SEQ ID NO: 26
aatcctactcgtacctccgaac

SEQ ID NO: 10526 - DNA, 24 bp, Artificial Sequence
  bisulfite treated nucleic acid for analysis of methylation status of SEQ ID NO: 26
ggtaatagaaaaggtcggtatcgt

SEQ ID NO: 10527 - DNA, 37 bp, Artificial Sequence
  bisulfite treated nucleic acid for analysis of methylation status of SEQ ID NO: 26
gagtaggacgcgcgcgtattattatttattcggtcgg

SEQ ID NO: 10528 - DNA, 22 bp, Artificial Sequence
  bisulfite treated nucleic acid for analysis of methylation status of SEQ ID NO: 26
caaactcaaaaacgtacctcgt

SEQ ID NO: 10529 - DNA, 20 bp, Artificial Sequence
  bisulfite treated nucleic acid for analysis of methylation status of SEQ ID NO: 26
cttcactaacgcgactttcc

SEQ ID NO: 10530 - DNA, 23 bp, Artificial Sequence
  bisulfite treated nucleic acid for analysis of methylation status of SEQ ID NO: 26
tagatttgcgttaggttaggtcg

SEQ ID NO: 10531 - DNA, 20 bp, Artificial Sequence
  bisulfite treated nucleic acid for analysis of methylation status of SEQ ID NO: 26
tttaacggttttcggagttc

SEQ ID NO: 10532 - DNA, 23 bp, Artificial Sequence
  bisulfite treated nucleic acid for analysis of methylation status of SEQ ID NO: 26
gttcggttgattcgtatattttt

SEQ ID NO: 10533 - DNA, 20 bp, Artificial Sequence
  bisulfite treated nucleic acid for analysis of methylation status of SEQ ID NO: 26
ctaacgcgactttccaaaac

SEQ ID NO: 10534 - DNA, 21 bp, Artificial Sequence
  bisulfite treated nucleic acid for analysis of methylation status of SEQ ID NO: 26
tttgcgttaggttaggtcgaa

SEQ ID NO: 10535 - DNA, 20 bp, Artificial Sequence
  bisulfite treated nucleic acid for analysis of methylation status of SEQ ID NO: 26
tttggaaagtcgcgttagtg

SEQ ID NO: 10536 - DNA, 22 bp, Artificial Sequence
  bisulfite treated nucleic acid for analysis of methylation status of SEQ ID NO: 26
aactcaaaaacgtacctcgttc

SEQ ID NO: 10537 - DNA, 24 bp, Artificial Sequence
  bisulfite treated nucleic acid for analysis of methylation status of SEQ ID NO: 26
ctaaactaacaccgaacgaaaaat

SEQ ID NO: 10538 - DNA, 19 bp, Artificial Sequence
  bisulfite treated nucleic acid for analysis of methylation status of SEQ ID NO: 26
tggaaagtcgcgttagtga

SEQ ID NO: 10539 - DNA, 21 bp, Artificial Sequence
  bisulfite treated nucleic acid for analysis of methylation status of SEQ ID NO: 26
agaacgaggtacgtttttgag

SEQ ID NO: 10540 - DNA, 24 bp, Artificial Sequence
  bisulfite treated nucleic acid for analysis of methylation status of SEQ ID NO: 26
acgataccgaccttttctattacc

SEQ ID NO: 10541 - DNA, 22 bp, Artificial Sequence
  bisulfite treated nucleic acid for analysis of methylation status of SEQ ID NO: 26
aaaaatatacgaatcaaccgaa

SEQ ID NO: 10542 - DNA, 19 bp, Artificial Sequence
  bisulfite treated nucleic acid for analysis of methylation status of SEQ ID NO: 26
cgcgttagtgaagttcgtg

SEQ ID NO: 10543 - DNA, 20 bp, Artificial Sequence
  bisulfite treated nucleic acid for analysis of methylation status of SEQ ID NO: 26
ggtgagaacgaggtacgttt

SEQ ID NO: 10544 - DNA, 20 bp, Artificial Sequence
  bisulfite treated nucleic acid for analysis of methylation status of SEQ ID NO: 26
gtttcgagcggtttttagtg

SEQ ID NO: 10545 - DNA, 21 bp, Artificial Sequence
  bisulfite treated nucleic acid for analysis of methylation status of SEQ ID NO: 26
cgaacttcactaacgcgactt

SEQ ID NO: 10546 - DNA, 24 bp, Artificial Sequence
  bisulfite treated nucleic acid for analysis of methylation status of SEQ ID NO: 26
tcggttgattcgtatatttttatg

SEQ ID NO: 10547 - DNA, 21 bp, Artificial Sequence
  bisulfite treated nucleic acid for analysis of methylation status of SEQ ID NO: 26
atataacccgcctaaaaaccg

SEQ ID NO: 10548 - DNA, 21 bp, Artificial Sequence
  bisulfite treated nucleic acid for analysis of methylation status of SEQ ID NO: 26
gtcgtcgtagtttcgggtatc

SEQ ID NO: 10549 - DNA, 21 bp, Artificial Sequence
  bisulfite treated nucleic acid for analysis of methylation status of SEQ ID NO: 26
ggcgcgcgagttttcgggcgg

SEQ ID NO: 10550 - DNA, 23 bp, Artificial Sequence
  bisulfite treated nucleic acid for analysis of methylation status of SEQ ID NO: 26
gtaatagaaaaggtcggtatcgt

SEQ ID NO: 10551 - DNA, 21 bp, Artificial Sequence
  bisulfite treated nucleic acid for analysis of methylation status of SEQ ID NO: 26
gaacttcactaacgcgacttt

SEQ ID NO: 10552 - DNA, 24 bp, Artificial Sequence
  bisulfite treated nucleic acid for analysis of methylation status of SEQ ID NO: 26
cggttgattcgtatatttttatgg

SEQ ID NO: 10553 - DNA, 22 bp, Artificial Sequence
  bisulfite treated nucleic acid for analysis of methylation status of SEQ ID NO: 26
ctaaactcgcaactccgaaact

SEQ ID NO: 10554 - DNA, 20 bp, Artificial Sequence
  bisulfite treated nucleic acid for analysis of methylation status of SEQ ID NO: 26
tggtcgttttagtttttcgc

SEQ ID NO: 10555 - DNA, 32 bp, Artificial Sequence
  bisulfite treated nucleic acid for analysis of methylation status of SEQ ID NO: 26
aggggtcgatttaatttcgagggagtttttgt

SEQ ID NO: 10556 - DNA, 22 bp, Artificial Sequence
  bisulfite treated nucleic acid for analysis of methylation status of SEQ ID NO: 26
gaaaccacgaacttcactaacg

SEQ ID NO: 10557 - DNA, 20 bp, Artificial Sequence
  bisulfite treated nucleic acid for analysis of methylation status of SEQ ID NO: 26
gagtttcgagcggtttttag

SEQ ID NO: 10558 - DNA, 20 bp, Artificial Sequence
  bisulfite treated nucleic acid for analysis of methylation status of SEQ ID NO: 26
atttgcgttaggttaggtcg

SEQ ID NO: 10559 - DNA, 21 bp, Artificial Sequence
  bisulfite treated nucleic acid for analysis of methylation status of SEQ ID NO: 26
ccgaaactacgacgactacaa

SEQ ID NO: 10560 - DNA, 22 bp, Artificial Sequence
  bisulfite treated nucleic acid for analysis of methylation status of SEQ ID NO: 26
cgactttccaaaacgtaaaaat

SEQ ID NO: 10561 - DNA, 19 bp, Artificial Sequence
  bisulfite treated nucleic acid for analysis of methylation status of SEQ ID NO: 26
attcgatatgttgggcgag

SEQ ID NO: 10562 - DNA, 25 bp, Artificial Sequence
  bisulfite treated nucleic acid for analysis of methylation status of SEQ ID NO: 26
agcggtttttagtggcggcgttgtt

SEQ ID NO: 10563 - DNA, 21 bp, Artificial Sequence
  bisulfite treated nucleic acid for analysis of methylation status of SEQ ID NO: 26
taaactcgcaactccgaaact

SEQ ID NO: 10564 - DNA, 22 bp, Artificial Sequence
  bisulfite treated nucleic acid for analysis of methylation status of SEQ ID NO: 26
caaaaacgtacctcgttctcac

SEQ ID NO: 10565 - DNA, 19 bp, Artificial Sequence
  bisulfite treated nucleic acid for analysis of methylation status of SEQ ID NO: 26
caaaaactctccgcgaaat

SEQ ID NO: 10566 - DNA, 21 bp, Artificial Sequence
  bisulfite treated nucleic acid for analysis of methylation status of SEQ ID NO: 26
cgtcgttttaggtttaggagg

SEQ ID NO: 10567 - DNA, 30 bp, Artificial Sequence
  bisulfite treated nucleic acid for analysis of methylation status of SEQ ID NO: 26
aggggaacggttgtttttcgttaagtaggg

SEQ ID NO: 10568 - DNA, 19 bp, Artificial Sequence
  bisulfite treated nucleic acid for analysis of methylation status of SEQ ID NO: 26
cctcgccgaactctacaaa

SEQ ID NO: 10569 - DNA, 22 bp, Artificial Sequence
  bisulfite treated nucleic acid for analysis of methylation status of SEQ ID NO: 26
ttttagttggtcgcgtttaagt

SEQ ID NO: 10570 - DNA, 23 bp, Artificial Sequence
  bisulfite treated nucleic acid for analysis of methylation status of SEQ ID NO: 26
gtcggggtttcgggcgcgttttg

SEQ ID NO: 10571 - DNA, 22 bp, Artificial Sequence
  bisulfite treated nucleic acid for analysis of methylation status of SEQ ID NO: 26
atttcgcaaactcaaaaacgta

SEQ ID NO: 10572 - DNA, 21 bp, Artificial Sequence
  bisulfite treated nucleic acid for analysis of methylation status of SEQ ID NO: 26
gcgtcgttttaggtttaggag

SEQ ID NO: 10573 - DNA, 23 bp, Artificial Sequence
  bisulfite treated nucleic acid for analysis of methylation status of SEQ ID NO: 26
agggttcggttgattcgtatatt

SEQ ID NO: 10574 - DNA, 24 bp, Artificial Sequence
  bisulfite treated nucleic acid for analysis of methylation status of SEQ ID NO: 26
cataaaaatatacgaatcaaccga

SEQ ID NO: 10575 - DNA, 23 bp, Artificial Sequence
  bisulfite treated nucleic acid for analysis of methylation status of SEQ ID NO: 26
gggttcgcgtttgacggggaggg

SEQ ID NO: 10576 - DNA, 20 bp, Artificial Sequence
  bisulfite treated nucleic acid for analysis of methylation status of SEQ ID NO: 26
attcgcgtcctaaataaccc

SEQ ID NO: 10577 - DNA, 21 bp, Artificial Sequence
  bisulfite treated nucleic acid for analysis of methylation status of SEQ ID NO: 26
gaacgaggtacgtttttgagt

SEQ ID NO: 10578 - DNA, 21 bp, Artificial Sequence
  bisulfite treated nucleic acid for analysis of methylation status of SEQ ID NO: 26
ttggtcgttttagtttttcgc

SEQ ID NO: 10579 - DNA, 24 bp, Artificial Sequence
  bisulfite treated nucleic acid for analysis of methylation status of SEQ ID NO: 26
ccataaaaatatacgaatcaaccg

SEQ ID NO: 10580 - DNA, 20 bp, Artificial Sequence
  bisulfite treated nucleic acid for analysis of methylation status of SEQ ID NO: 26
ttggaaagtcgcgttagtga

SEQ ID NO: 10581 - DNA, 21 bp, Artificial Sequence
  bisulfite treated nucleic acid for analysis of methylation status of SEQ ID NO: 26
atacccgaaactacgacgact

SEQ ID NO: 10582 - DNA, 19 bp, Artificial Sequence
  bisulfite treated nucleic acid for analysis of methylation status of SEQ ID NO: 26
tgtttgtttagcgttgcgt

SEQ ID NO: 10583 - DNA, 18 bp, Artificial Sequence
  bisulfite treated nucleic acid for analysis of methylation status of SEQ ID NO: 26
aaactctccgcgaaatcc

SEQ ID NO: 10584 - DNA, 22 bp, Artificial Sequence
  bisulfite treated nucleic acid for analysis of methylation status of SEQ ID NO: 26
cggttgtttttcgttaagtagg

SEQ ID NO: 10585 - DNA, 34 bp, Artificial Sequence
  bisulfite treated nucleic acid for analysis of methylation status of SEQ ID NO: 26
attttttttgtggagttacggtttcgttcggtag

SEQ ID NO: 10586 - DNA, 19 bp, Artificial Sequence
  bisulfite treated nucleic acid for analysis of methylation status of SEQ ID NO: 26
ttatttattcggtcgggga

SEQ ID NO: 10587 - DNA, 26 bp, Artificial Sequence
  bisulfite treated nucleic acid for analysis of methylation status of SEQ ID NO: 26
ttcgcggggagtagattcgaggttgg

SEQ ID NO: 10588 - DNA, 21 bp, Artificial Sequence
  bisulfite treated nucleic acid for analysis of methylation status of SEQ ID NO: 26
acccgaaactacgacgactac

SEQ ID NO: 10589 - DNA, 21 bp, Artificial Sequence
  bisulfite treated nucleic acid for analysis of methylation status of SEQ ID NO: 26
acgaccaaaatctaacctacg

SEQ ID NO: 10590 - DNA, 19 bp, Artificial Sequence
  bisulfite treated nucleic acid for analysis of methylation status of SEQ ID NO: 26
aaaactctccgcgaaatcc

SEQ ID NO: 10591 - DNA, 35 bp, Artificial Sequence
  bisulfite treated nucleic acid for analysis of methylation status of SEQ ID NO: 26
agcgttaagttttaggggtcgatttaatttcgagg

SEQ ID NO: 10592 - DNA, 19 bp, Artificial Sequence
  bisulfite treated nucleic acid for analysis of methylation status of SEQ ID NO: 26
tcactaacgcgactttcca

SEQ ID NO: 10593 - DNA, 20 bp, Artificial Sequence
  bisulfite treated nucleic acid for analysis of methylation status of SEQ ID NO: 26
gcaaacgtcgaacacaaaat

SEQ ID NO: 10594 - DNA, 21 bp, Artificial Sequence
  bisulfite treated nucleic acid for analysis of methylation status of SEQ ID NO: 26
acgtagggtcgaagtaggttc

SEQ ID NO: 10595 - DNA, 29 bp, Artificial Sequence
  bisulfite treated nucleic acid for analysis of methylation status of SEQ ID NO: 26
atcgcgattttcggtagagttggggacgt

SEQ ID NO: 10596 - DNA, 19 bp, Artificial Sequence
  bisulfite treated nucleic acid for analysis of methylation status of SEQ ID NO: 26
ctcgccgaactctacaaaa

SEQ ID NO: 10597 - DNA, 19 bp, Artificial Sequence
  bisulfite treated nucleic acid for analysis of methylation status of SEQ ID NO: 26
ctaataatccgcgccaaac

SEQ ID NO: 10598 - DNA, 22 bp, Artificial Sequence
  bisulfite treated nucleic acid for analysis of methylation status of SEQ ID NO: 26
tcggaggtacgagtaggatttt

SEQ ID NO: 10599 - DNA, 29 bp, Artificial Sequence
  bisulfite treated nucleic acid for analysis of methylation status of SEQ ID NO: 26
taggcggggatgttagggtttgcgcgatt

SEQ ID NO: 10600 - DNA, 22 bp, Artificial Sequence
  bisulfite treated nucleic acid for analysis of methylation status of SEQ ID NO: 26
ttcggaggtacgagtaggattt

SEQ ID NO: 10601 - DNA, 20 bp, Artificial Sequence
  bisulfite treated nucleic acid for analysis of methylation status of SEQ ID NO: 26
cgtcctactccgacgatacc

SEQ ID NO: 10602 - DNA, 21 bp, Artificial Sequence
  bisulfite treated nucleic acid for analysis of methylation status of SEQ ID NO: 26
aaaacgtacctcgttctcacc

SEQ ID NO: 10603 - DNA, 21 bp, Artificial Sequence
  bisulfite treated nucleic acid for analysis of methylation status of SEQ ID NO: 26
gaaatcctctaccgaacgaaa

SEQ ID NO: 10604 - DNA, 19 bp, Artificial Sequence
  bisulfite treated nucleic acid for analysis of methylation status of SEQ ID NO: 26
gggcgtcgttttaggttta

SEQ ID NO: 10605 - DNA, 20 bp, Artificial Sequence
  bisulfite treated nucleic acid for analysis of methylation status of SEQ ID NO: 26
tataacccgcctaaaaaccg

SEQ ID NO: 10606 - DNA, 22 bp, Artificial Sequence
  bisulfite treated nucleic acid for analysis of methylation status of SEQ ID NO: 26
agtcgtcgtagtttcgggtatc

SEQ ID NO: 10607 - DNA, 22 bp, Artificial Sequence
  bisulfite treated nucleic acid for analysis of methylation status of SEQ ID NO: 26
gatacccgaaactacgacgact

SEQ ID NO: 10608 - DNA, 29 bp, Artificial Sequence
  bisulfite treated nucleic acid for analysis of methylation status of SEQ ID NO: 26
ttcgttcgcggagtcgaatcgtttttcgg

SEQ ID NO: 10609 - DNA, 19 bp, Artificial Sequence
  bisulfite treated nucleic acid for analysis of methylation status of SEQ ID NO: 26
cctactccgacgataccga

SEQ ID NO: 10610 - DNA, 21 bp, Artificial Sequence
  bisulfite treated nucleic acid for analysis of methylation status of SEQ ID NO: 26
tctaaactaacaccgaacgaa

SEQ ID NO: 10611 - DNA, 20 bp, Artificial Sequence
  bisulfite treated nucleic acid for analysis of methylation status of SEQ ID NO: 26
tcgtcgtagtttcgggtatc

SEQ ID NO: 10612 - DNA, 20 bp, Artificial Sequence
  bisulfite treated nucleic acid for analysis of methylation status of SEQ ID NO: 26
gcgtcctactccgacgatac

SEQ ID NO: 10613 - DNA, 18 bp, Artificial Sequence
  bisulfite treated nucleic acid for analysis of methylation status of SEQ ID NO: 26
acgaatcaaccgaaccct

SEQ ID NO: 10614 - DNA, 19 bp, Artificial Sequence
  bisulfite treated nucleic acid for analysis of methylation status of SEQ ID NO: 26
tcgatatgttgggcgagtt

SEQ ID NO: 10615 - DNA, 30 bp, Artificial Sequence
  bisulfite treated nucleic acid for analysis of methylation status of SEQ ID NO: 26
ttagtggcggcgttgtttatggtttgatgt

SEQ ID NO: 10616 - DNA, 19 bp, Artificial Sequence
  bisulfite treated nucleic acid for analysis of methylation status of SEQ ID NO: 26
ttcgatatgttgggcgagt

SEQ ID NO: 10617 - DNA, 21 bp, Artificial Sequence
  bisulfite treated nucleic acid for analysis of methylation status of SEQ ID NO: 26
atcctactcgtacctccgaac

SEQ ID NO: 10618 - DNA, 19 bp, Artificial Sequence
  bisulfite treated nucleic acid for analysis of methylation status of SEQ ID NO: 26
ccgaacctacttcgaccct

SEQ ID NO: 10619 - DNA, 22 bp, Artificial Sequence
  bisulfite treated nucleic acid for analysis of methylation status of SEQ ID NO: 26
tttagttggtcgcgtttaagtc

SEQ ID NO: 10620 - DNA, 29 bp, Artificial Sequence
  bisulfite treated nucleic acid for analysis of methylation status of SEQ ID NO: 26
gtcgtttttgtagagttcggcgaggtcgt

SEQ ID NO: 10621 - DNA, 21 bp, Artificial Sequence
  bisulfite treated nucleic acid for analysis of methylation status of SEQ ID NO: 26
cactaaaaaccgctcgaaact

SEQ ID NO: 10622 - DNA, 20 bp, Artificial Sequence
  bisulfite treated nucleic acid for analysis of methylation status of SEQ ID NO: 26
ggttagcgatattcgtcgtt

SEQ ID NO: 10623 - DNA, 37 bp, Artificial Sequence
  bisulfite treated nucleic acid for analysis of methylation status of SEQ ID NO: 26
aggttatcggggtttttagggttttcgattacgtata

SEQ ID NO: 10624 - DNA, 23 bp, Artificial Sequence
  bisulfite treated nucleic acid for analysis of methylation status of SEQ ID NO: 26
taaaaatatacgaatcaaccgaa

SEQ ID NO: 10625 - DNA, 22 bp, Artificial Sequence
  bisulfite treated nucleic acid for analysis of methylation status of SEQ ID NO: 26
tttttagttggtcgcgtttaag

SEQ ID NO: 10626 - DNA, 18 bp, Artificial Sequence
  bisulfite treated nucleic acid for analysis of methylation status of SEQ ID NO: 26
tttggcgcggattattag

SEQ ID NO: 10627 - DNA, 22 bp, Artificial Sequence
  bisulfite treated nucleic acid for analysis of methylation status of SEQ ID NO: 26
accgctaactaaacaaaacgaa

SEQ ID NO: 10628 - DNA, 18 bp, Artificial Sequence
  bisulfite treated nucleic acid for analysis of methylation status of SEQ ID NO: 26
agcgttcgcgtaggagtt

SEQ ID NO: 10629 - DNA, 37 bp, Artificial Sequence
  bisulfite treated nucleic acid for analysis of methylation status of SEQ ID NO: 26
ttcggtgttagtttagatgcgcgcgggtgatgaacgg

SEQ ID NO: 10630 - DNA, 18 bp, Artificial Sequence
  bisulfite treated nucleic acid for analysis of methylation status of SEQ ID NO: 26
aaaaaccctaacgccgaa

SEQ ID NO: 10631 - DNA, 19 bp, Artificial Sequence
  bisulfite treated nucleic acid for analysis of methylation status of SEQ ID NO: 26
tagtggcggcgttgtttat

SEQ ID NO: 10632 - DNA, 18 bp, Artificial Sequence
  bisulfite treated nucleic acid for analysis of methylation status of SEQ ID NO: 26
gccgaacctacttcgacc

SEQ ID NO: 10633 - DNA, 22 bp, Artificial Sequence
  bisulfite treated nucleic acid for analysis of methylation status of SEQ ID NO: 26
gaacggttgtttttcgttaagt

SEQ ID NO: 10634 - DNA, 22 bp, Artificial Sequence
  bisulfite treated nucleic acid for analysis of methylation status of SEQ ID NO: 26
acctaacgcaaatctaatacgc

SEQ ID NO: 10635 - DNA, 18 bp, Artificial Sequence
  bisulfite treated nucleic acid for analysis of methylation status of SEQ ID NO: 26
ttttcggtcgtcgtttgt

SEQ ID NO: 10636 - DNA, 20 bp, Artificial Sequence
  bisulfite treated nucleic acid for analysis of methylation status of SEQ ID NO: 26
gttcgcgggcgtcggtgcgt

SEQ ID NO: 10637 - DNA, 20 bp, Artificial Sequence
  bisulfite treated nucleic acid for analysis of methylation status of SEQ ID NO: 26
ttcactaacgcgactttcca

SEQ ID NO: 10638 - DNA, 22 bp, Artificial Sequence
  bisulfite treated nucleic acid for analysis of methylation status of SEQ ID NO: 26
cgaaactacgacgactacaaat

SEQ ID NO: 10639 - DNA, 23 bp, Artificial Sequence
  bisulfite treated nucleic acid for analysis of methylation status of SEQ ID NO: 26
cataaaaatatacgaatcaaccg

SEQ ID NO: 10640 - DNA, 21 bp, Artificial Sequence
  bisulfite treated nucleic acid for analysis of methylation status of SEQ ID NO: 26
tttcgcaaactcaaaaacgta

SEQ ID NO: 10641 - DNA, 19 bp, Artificial Sequence
  bisulfite treated nucleic acid for analysis of methylation status of SEQ ID NO: 26
aaaacgcgaatcctaccct

SEQ ID NO: 10642 - DNA, 21 bp, Artificial Sequence
  bisulfite treated nucleic acid for analysis of methylation status of SEQ ID NO: 26
tttttaacggttttcggagtt

SEQ ID NO: 10643 - DNA, 19 bp, Artificial Sequence
  bisulfite treated nucleic acid for analysis of methylation status of SEQ ID NO: 26
cactaacgcgactttccaa

SEQ ID NO: 10644 - DNA, 18 bp, Artificial Sequence
  bisulfite treated nucleic acid for analysis of methylation status of SEQ ID NO: 26
cgcggattattagcggtt

SEQ ID NO: 10645 - DNA, 21 bp, Artificial Sequence
  bisulfite treated nucleic acid for analysis of methylation status of SEQ ID NO: 26
actaacaccgaacgaaaaatc

SEQ ID NO: 10646 - DNA, 20 bp, Artificial Sequence
  bisulfite treated nucleic acid for analysis of methylation status of SEQ ID NO: 26
gcgttaggttaggtcgaagt

SEQ ID NO: 10647 - DNA, 22 bp, Artificial Sequence
  bisulfite treated nucleic acid for analysis of methylation status of SEQ ID NO: 26
aaaaacgtacctcgttctcacc

SEQ ID NO: 10648 - DNA, 20 bp, Artificial Sequence
  bisulfite treated nucleic acid for analysis of methylation status of SEQ ID NO: 26
gtcgcgttagtgaagttcgt

SEQ ID NO: 10649 - DNA, 21 bp, Artificial Sequence
  bisulfite treated nucleic acid for analysis of methylation status of SEQ ID NO: 26
cgttagtgaagttcgtggttt

SEQ ID NO: 10650 - DNA, 21 bp, Artificial Sequence
  bisulfite treated nucleic acid for analysis of methylation status of SEQ ID NO: 26
agtcgcgttagtgaagttcgt

SEQ ID NO: 10651 - DNA, 21 bp, Artificial Sequence
  bisulfite treated nucleic acid for analysis of methylation status of SEQ ID NO: 26
cggaggtacgagtaggatttt

SEQ ID NO: 10652 - DNA, 19 bp, Artificial Sequence
  bisulfite treated nucleic acid for analysis of methylation status of SEQ ID NO: 26
tgtggagttacggtttcgt

SEQ ID NO: 10653 - DNA, 18 bp, Artificial Sequence
  bisulfite treated nucleic acid for analysis of methylation status of SEQ ID NO: 26
taacccgcctaaaaaccg

SEQ ID NO: 10654 - DNA, 22 bp, Artificial Sequence
  bisulfite treated nucleic acid for analysis of methylation status of SEQ ID NO: 26
gtagtcgtcgtagtttcgggta

SEQ ID NO: 10655 - DNA, 19 bp, Artificial Sequence
  bisulfite treated nucleic acid for analysis of methylation status of SEQ ID NO: 26
gcgtcctactccgacgata

SEQ ID NO: 10656 - DNA, 19 bp, Artificial Sequence
  bisulfite treated nucleic acid for analysis of methylation status of SEQ ID NO: 26
gattcgatatgttgggcga

SEQ ID NO: 10657 - DNA, 20 bp, Artificial Sequence
  bisulfite treated nucleic acid for analysis of methylation status of SEQ ID NO: 26
atcctactcgtacctccgaa

SEQ ID NO: 10658 - DNA, 19 bp, Artificial Sequence
  bisulfite treated nucleic acid for analysis of methylation status of SEQ ID NO: 26
attattagcggtttgcggg

SEQ ID NO: 10659 - DNA, 20 bp, Artificial Sequence
  bisulfite treated nucleic acid for analysis of methylation status of SEQ ID NO: 26
taaactcgcaactccgaaac

SEQ ID NO: 10660 - DNA, 21 bp, Artificial Sequence
  bisulfite treated nucleic acid for analysis of methylation status of SEQ ID NO: 26
cgtaggttagattttggtcgt

SEQ ID NO: 10661 - DNA, 18 bp, Artificial Sequence
  bisulfite treated nucleic acid for analysis of methylation status of SEQ ID NO: 26
cctcgccgaactctacaa

SEQ ID NO: 10662 - DNA, 21 bp, Artificial Sequence
  bisulfite treated nucleic acid for analysis of methylation status of SEQ ID NO: 26
ctaaactcgcaactccgaaac

SEQ ID NO: 10663 - DNA, 20 bp, Artificial Sequence
  bisulfite treated nucleic acid for analysis of methylation status of SEQ ID NO: 26
aaactcgcaactccgaaact

SEQ ID NO: 10664 - DNA, 19 bp, Artificial Sequence
  bisulfite treated nucleic acid for analysis of methylation status of SEQ ID NO: 26
aaaaactctccgcgaaatc

SEQ ID NO: 10665 - DNA, 22 bp, Artificial Sequence
  bisulfite treated nucleic acid for analysis of methylation status of SEQ ID NO: 26
tcaaaaacgtacctcgttctca

SEQ ID NO: 10666 - DNA, 23 bp, Artificial Sequence
  bisulfite treated nucleic acid for analysis of methylation status of SEQ ID NO: 26
aaactcaaaaacgtacctcgttc

SEQ ID NO: 10667 - DNA, 19 bp, Artificial Sequence
  bisulfite treated nucleic acid for analysis of methylation status of SEQ ID NO: 26
actctccgcgaaatcctct

SEQ ID NO: 10668 - DNA, 19 bp, Artificial Sequence
  bisulfite treated nucleic acid for analysis of methylation status of SEQ ID NO: 26
acctaaactcgcaactccg

SEQ ID NO: 10669 - DNA, 20 bp, Artificial Sequence
  bisulfite treated nucleic acid for analysis of methylation status of SEQ ID NO: 26
aaaaacgcgaatcctaccct

SEQ ID NO: 10670 - DNA, 19 bp, Artificial Sequence
  bisulfite treated nucleic acid for analysis of methylation status of SEQ ID NO: 26
cgatatgttgggcgagttt

SEQ ID NO: 10671 - DNA, 20 bp, Artificial Sequence
  bisulfite treated nucleic acid for analysis of methylation status of SEQ ID NO: 26
gagggttcggttgattcgta

SEQ ID NO: 10672 - DNA, 18 bp, Artificial Sequence
  bisulfite treated nucleic acid for analysis of methylation status of SEQ ID NO: 26
ctctccgcgaaatcctct

SEQ ID NO: 10673 - DNA, 24 bp, Artificial Sequence
  bisulfite treated nucleic acid for analysis of methylation status of SEQ ID NO: 26
aaaacgaccaaaatctaacctacg

SEQ ID NO: 10674 - DNA, 23 bp, Artificial Sequence
  bisulfite treated nucleic acid for analysis of methylation status of SEQ ID NO: 26
actcaaaaacgtacctcgttctc

SEQ ID NO: 10675 - DNA, 19 bp, Artificial Sequence
  bisulfite treated nucleic acid for analysis of methylation status of SEQ ID NO: 26
ataaacaacgccgccacta

SEQ ID NO: 10676 - DNA, 22 bp, Artificial Sequence
  nucleic acid for analysis of methylation status of SEQ ID NO: 26
gtttttagggttttcgattacg

SEQ ID NO: 10677 - DNA, 29 bp, Artificial Sequence
  bisulfite treated nucleic acid for analysis of methylation status of SEQ ID NO: 26
gggattcgatatgttgggcgagtttcgag

SEQ ID NO: 10678 - DNA, 22 bp, Artificial Sequence
  bisulfite treated nucleic acid for analysis of methylation status of SEQ ID NO: 38
acgttcttactcgctctctacc

SEQ ID NO: 10679 - DNA, 20 bp, Artificial Sequence
  bisulfite treated nucleic acid for analysis of methylation status of SEQ ID NO: 38
gttcggacgtgtgttgtttc

SEQ ID NO: 10680 - DNA, 28 bp, Artificial Sequence
  bisulfite treated nucleic acid for analysis of methylation status of SEQ ID NO: 38
ggtagtagagggcggggagtattttcgg

SEQ ID NO: 10681 - DNA, 19 bp, Artificial Sequence
  bisulfite treated nucleic acid for analysis of methylation status of SEQ ID NO: 38
ttcggacgtgtgttgtttc

SEQ ID NO: 10682 - DNA, 20 bp, Artificial Sequence
  bisulfite treated nucleic acid for analysis of methylation status of SEQ ID NO: 38
cgtgtgttgtttcgggttta

SEQ ID NO: 10683 - DNA, 19 bp, Artificial Sequence
  bisulfite treated nucleic acid for analysis of methylation status of SEQ ID NO: 38
acgtgtgttgtttcgggtt

SEQ ID NO: 10684 - DNA, 19 bp, Artificial Sequence
  bisulfite treated nucleic acid for analysis of methylation status of SEQ ID NO: 38
cgccttattacccataccg

SEQ ID NO: 10685 - DNA, 21 bp, Artificial Sequence
  bisulfite treated nucleic acid for analysis of methylation status of SEQ ID NO: 38
ttttcgttttgaatttacggg

SEQ ID NO: 10686 - DNA, 23 bp, Artificial Sequence
  bisulfite treated nucleic acid for analysis of methylation status of SEQ ID NO: 38
gggttttcgggggaggcggatgt

SEQ ID NO: 10687 - DNA, 18 bp, Artificial Sequence
  bisulfite treated nucleic acid for analysis of methylation status of SEQ ID NO: 38
ggttcggacgtgtgttgt

SEQ ID NO: 10688 - DNA, 18 bp, Artificial Sequence
  bisulfite treated nucleic acid for analysis of methylation status of SEQ ID NO: 38
gttggttcggacgtgtgt

SEQ ID NO: 10689 - DNA, 20 bp, Artificial Sequence
  bisulfite treated nucleic acid for analysis of methylation status of SEQ ID NO: 38
tttcgttttgaatttacggg

SEQ ID NO: 10690 - DNA, 15 bp, Artificial Sequence
  bisulfite treated nucleic acid for analysis of methylation status of SEQ ID NO: 39
cgccaatcccccgta

SEQ ID NO: 10691 - DNA, 17 bp, Artificial Sequence
  bisulfite treated nucleic acid for analysis of methylation status of SEQ ID NO: 39
cggggtgagtatttcgc

SEQ ID NO: 10692 - DNA, 23 bp, Artificial Sequence
  bisulfite treated nucleic acid for analysis of methylation status of SEQ ID NO: 39
ggagcgagtttcgcggaggtggt

SEQ ID NO: 10693 - DNA, 22 bp, Artificial Sequence
  bisulfite treated nucleic acid for analysis of methylation status of SEQ ID NO: 27
tatacgcgatttacggtagagg

SEQ ID NO: 10694 - DNA, 22 bp, Artificial Sequence
  bisulfite treated nucleic acid for analysis of methylation status of SEQ ID NO: 27
aactctaaacgctcaaacgaac

SEQ ID NO: 10695 - DNA, 28 bp, Artificial Sequence
  bisulfite treated nucleic acid for analysis of methylation status of SEQ ID NO: 27
tgcgtttcgtcgagagttttttgtgggt

SEQ ID NO: 10696 - DNA, 22 bp, Artificial Sequence
  bisulfite treated nucleic acid for analysis of methylation status of SEQ ID NO: 27
gtcgttcgggttaagtgataaa

SEQ ID NO: 10697 - DNA, 21 bp, Artificial Sequence
  bisulfite treated nucleic acid for analysis of methylation status of SEQ ID NO: 27
gactctactcgatacccgctc

SEQ ID NO: 10698 - DNA, 29 bp, Artificial Sequence
  bisulfite treated nucleic acid for analysis of methylation status of SEQ ID NO: 27
ggagtcggtttcgtagtcgttgatagggt

SEQ ID NO: 10699 - DNA, 22 bp, Artificial Sequence
  bisulfite treated nucleic acid for analysis of methylation status of SEQ ID NO: 27
gttcgtttgagcgtttagagtt

SEQ ID NO: 10700 - DNA, 21 bp, Artificial Sequence
  bisulfite treated nucleic acid for analysis of methylation status of SEQ ID NO: 27
cgtaactaacgacccgaaaat

SEQ ID NO: 10701 - DNA, 24 bp, Artificial Sequence
  bisulfite treated nucleic acid for analysis of methylation status of SEQ ID NO: 27
agggttcgcggtttttgtgtgcgg

SEQ ID NO: 10702 - DNA, 21 bp, Artificial Sequence
  bisulfite treated nucleic acid for analysis of methylation status of SEQ ID NO: 27
ctaaacgctcaaacgaacaaa

SEQ ID NO: 10703 - DNA, 21 bp, Artificial Sequence
  bisulfite treated nucleic acid for analysis of methylation status of SEQ ID NO: 27
atacgcgatttacggtagagg

SEQ ID NO: 10704 - DNA, 21 bp, Artificial Sequence
  bisulfite treated nucleic acid for analysis of methylation status of SEQ ID NO: 27
cgggaggagtcgtaaataaac

SEQ ID NO: 10705 - DNA, 22 bp, Artificial Sequence
  bisulfite treated nucleic acid for analysis of methylation status of SEQ ID NO: 27
taacaaacgtctaaaaatcgcc

SEQ ID NO: 10706 - DNA, 27 bp, Artificial Sequence
  bisulfite treated nucleic acid for analysis of methylation status of SEQ ID NO: 27
gtcgaagcgggcgagcgtggggttcgg

SEQ ID NO: 10707 - DNA, 22 bp, Artificial Sequence
  bisulfite treated nucleic acid for analysis of methylation status of SEQ ID NO: 27
cgcgtaacaaacgtctaaaaat

SEQ ID NO: 10708 - DNA, 26 bp, Artificial Sequence
  bisulfite treated nucleic acid for analysis of methylation status of SEQ ID NO: 27
agcgggcgagcgtggggttcggtcgg

SEQ ID NO: 10709 - DNA, 22 bp, Artificial Sequence
  bisulfite treated nucleic acid for analysis of methylation status of SEQ ID NO: 27
tcgggaggagtcgtaaataaac

SEQ ID NO: 10710 - DNA, 21 bp, Artificial Sequence
  bisulfite treated nucleic acid for analysis of methylation status of SEQ ID NO: 27
taaacgctcaaacgaacaaaa

SEQ ID NO: 10711 - DNA, 21 bp, Artificial Sequence
  bisulfite treated nucleic acid for analysis of methylation status of SEQ ID NO: 27
ttcgggaggagtcgtaaataa

SEQ ID NO: 10712 - DNA, 21 bp, Artificial Sequence
  bisulfite treated nucleic acid for analysis of methylation status of SEQ ID NO: 27
tttcgggaggagtcgtaaata

SEQ ID NO: 10713 - DNA, 22 bp, Artificial Sequence
  bisulfite treated nucleic acid for analysis of methylation status of SEQ ID NO: 27
tcgaataaggcgaatttatttt

SEQ ID NO: 10714 - DNA, 21 bp, Artificial Sequence
  bisulfite treated nucleic acid for analysis of methylation status of SEQ ID NO: 27
cgtttatttacgactcctccc

SEQ ID NO: 10715 - DNA, 34 bp, Artificial Sequence
  bisulfite treated nucleic acid for analysis of methylation status of SEQ ID NO: 27
gggcgtggtttgttagcgttattttttaattggt

SEQ ID NO: 10716 - DNA, 21 bp, Artificial Sequence
  bisulfite treated nucleic acid for analysis of methylation status of SEQ ID NO: 27
gtttatttacgactcctcccg

SEQ ID NO: 10717 - DNA, 21 bp, Artificial Sequence
  bisulfite treated nucleic acid for analysis of methylation status of SEQ ID NO: 27
actctactcgatacccgctca

SEQ ID NO: 10718 - DNA, 20 bp, Artificial Sequence
  bisulfite treated nucleic acid for analysis of methylation status of SEQ ID NO: 27
ctactcgatacccgctcaaa

SEQ ID NO: 10719 - DNA, 20 bp, Artificial Sequence
  bisulfite treated nucleic acid for analysis of methylation status of SEQ ID NO: 27
ctctactcgatacccgctca

SEQ ID NO: 10720 - DNA, 20 bp, Artificial Sequence
  bisulfite treated nucleic acid for analysis of methylation status of SEQ ID NO: 27
tacgcgatttacggtagagg

SEQ ID NO: 10721 - DNA, 22 bp, Artificial Sequence
  bisulfite treated nucleic acid for analysis of methylation status of SEQ ID NO: 27
tgttcgtttgagcgtttagagt

SEQ ID NO: 10722 - DNA, 22 bp, Artificial Sequence
  bisulfite treated nucleic acid for analysis of methylation status of SEQ ID NO: 27
tcgttcgggttaagtgataaag

SEQ ID NO: 10723 - DNA, 22 bp, Artificial Sequence
  bisulfite treated nucleic acid for analysis of methylation status of SEQ ID NO: 27
tctaaacgctcaaacgaacaaa

SEQ ID NO: 10724 - DNA, 22 bp, Artificial Sequence
  bisulfite treated nucleic acid for analysis of methylation status of SEQ ID NO: 27
ttttcgggaggagtcgtaaata

SEQ ID NO: 10725 - DNA, 21 bp, Artificial Sequence
  bisulfite treated nucleic acid for analysis of methylation status of SEQ ID NO: 27
tttgttcgtttgagcgtttag

SEQ ID NO: 10726 - DNA, 20 bp, Artificial Sequence
  bisulfite treated nucleic acid for analysis of methylation status of SEQ ID NO: 27
gttcgtgattggtttcgttc

SEQ ID NO: 10727 - DNA, 23 bp, Artificial Sequence
  bisulfite treated nucleic acid for analysis of methylation status of SEQ ID NO: 27
aaactctaaacgctcaaacgaac

SEQ ID NO: 10728 - DNA, 22 bp, Artificial Sequence
  bisulfite treated nucleic acid for analysis of methylation status of SEQ ID NO: 27
cgaataaggcgaatttattttt

SEQ ID NO: 10729 - DNA, 22 bp, Artificial Sequence
  bisulfite treated nucleic acid for analysis of methylation status of SEQ ID NO: 27
cgtttgagagtttgtagtcggt

SEQ ID NO: 10730 - DNA, 20 bp, Artificial Sequence
  bisulfite treated nucleic acid for analysis of methylation status of SEQ ID NO: 27
cctctaccgtaaatcgcgta

SEQ ID NO: 10731 - DNA, 33 bp, Artificial Sequence
  bisulfite treated nucleic acid for analysis of methylation status of SEQ ID NO: 27
ggttcgtttggttttttcggggaagaggttaat

SEQ ID NO: 10732 - DNA, 22 bp, Artificial Sequence
  bisulfite treated nucleic acid for analysis of methylation status of SEQ ID NO: 27
cgtaacaaacgtctaaaaatcg

SEQ ID NO: 10733 - DNA, 21 bp, Artificial Sequence
  bisulfite treated nucleic acid for analysis of methylation status of SEQ ID NO: 27
aacaaacgtctaaaaatcgcc

SEQ ID NO: 10734 - DNA, 21 bp, Artificial Sequence
  bisulfite treated nucleic acid for analysis of methylation status of SEQ ID NO: 27
tttagttcgtcgggtttttgt

SEQ ID NO: 10735 - DNA, 22 bp, Artificial Sequence
  bisulfite treated nucleic acid for analysis of methylation status of SEQ ID NO: 27
atcacgaatctcacgcttaaaa

SEQ ID NO: 10736 - DNA, 33 bp, Artificial Sequence
  bisulfite treated nucleic acid for analysis of methylation status of SEQ ID NO: 27
ttcgcggtttgtcggagttgtagcgtttttcgt

SEQ ID NO: 10737 - DNA, 21 bp, Artificial Sequence
  bisulfite treated nucleic acid for analysis of methylation status of SEQ ID NO: 27
ttatttacgactcctcccgaa

SEQ ID NO: 10738 - DNA, 21 bp, Artificial Sequence
  bisulfite treated nucleic acid for analysis of methylation status of SEQ ID NO: 27
tttatttacgactcctcccga

SEQ ID NO: 10739 - DNA, 20 bp, Artificial Sequence
  bisulfite treated nucleic acid for analysis of methylation status of SEQ ID NO: 27
tactcgatacccgctcaaaa

SEQ ID NO: 10740 - DNA, 21 bp, Artificial Sequence
  bisulfite treated nucleic acid for analysis of methylation status of SEQ ID NO: 27
gtcgggtttttgtcgttagtt

SEQ ID NO: 10741 - DNA, 21 bp, Artificial Sequence
  bisulfite treated nucleic acid for analysis of methylation status of SEQ ID NO: 27
aaatcacgaatctcacgctta

SEQ ID NO: 10742 - DNA, 22 bp, Artificial Sequence
  bisulfite treated nucleic acid for analysis of methylation status of SEQ ID NO: 27
ttttgttcgtttgagcgtttag

SEQ ID NO: 10743 - DNA, 21 bp, Artificial Sequence
  bisulfite treated nucleic acid for analysis of methylation status of SEQ ID NO: 27
tcgttcgggttaagtgataaa

SEQ ID NO: 10744 - DNA, 21 bp, Artificial Sequence
  bisulfite treated nucleic acid for analysis of methylation status of SEQ ID NO: 27
cgatttacggtagaggggagt

SEQ ID NO: 10745 - DNA, 21 bp, Artificial Sequence
  bisulfite treated nucleic acid for analysis of methylation status of SEQ ID NO: 27
tcgttcggttattttcggtat

SEQ ID NO: 10746 - DNA, 23 bp, Artificial Sequence
  nucleic acid for analysis of methylation status of SEQ ID NO: 27
atcgaataaggcgaatttatttt

SEQ ID NO: 10747 - DNA, 22 bp, Artificial Sequence
  bisulfite treated nucleic acid for analysis of methylation status of SEQ ID NO: 27
aaactctaaacgctcaaacgaa

SEQ ID NO: 10748 - DNA, 22 bp, Artificial Sequence
  bisulfite treated nucleic acid for analysis of methylation status of SEQ ID NO: 27
agcgtttgagagtttgtagtcg

SEQ ID NO: 10749 - DNA, 22 bp, Artificial Sequence
  bisulfite treated nucleic acid for analysis of methylation status of SEQ ID NO: 27
ttgttcgtttgagcgtttagag

SEQ ID NO: 10750 - DNA, 20 bp, Artificial Sequence
  bisulfite treated nucleic acid for analysis of methylation status of SEQ ID NO: 27
aacgctcaaacgaacaaaaa

SEQ ID NO: 10751 - DNA, 20 bp, Artificial Sequence
  bisulfite treated nucleic acid for analysis of methylation status of SEQ ID NO: 27
cgtaatgaggagaggagtcg

SEQ ID NO: 10752 - DNA, 22 bp, Artificial Sequence
  bisulfite treated nucleic acid for analysis of methylation status of SEQ ID NO: 27
aaaatacgacgaaaaacgctac

SEQ ID NO: 10753 - DNA, 27 bp, Artificial Sequence
  bisulfite treated nucleic acid for analysis of methylation status of SEQ ID NO: 27
tgtcgttagttcgtcggatttcgcggt

SEQ ID NO: 10754 - DNA, 20 bp, Artificial Sequence
  bisulfite treated nucleic acid for analysis of methylation status of SEQ ID NO: 27
gtcgggtttttatgttttcg

SEQ ID NO: 10755 - DNA, 22 bp, Artificial Sequence
  bisulfite treated nucleic acid for analysis of methylation status of SEQ ID NO: 27
actaaatccaacgaccataacg

SEQ ID NO: 10756 - DNA, 28 bp, Artificial Sequence
  bisulfite treated nucleic acid for analysis of methylation status of SEQ ID NO: 27
agtcgaggagtcgttgtttggggtttga

SEQ ID NO: 10757 - DNA, 22 bp, Artificial Sequence
  bisulfite treated nucleic acid for analysis of methylation status of SEQ ID NO: 27
atacgacgaaaaacgctacaac

SEQ ID NO: 10758 - DNA, 21 bp, Artificial Sequence
  bisulfite treated nucleic acid for analysis of methylation status of SEQ ID NO: 27
tgtcgggtttttatgttttcg

SEQ ID NO: 10759 - DNA, 22 bp, Artificial Sequence
  bisulfite treated nucleic acid for analysis of methylation status of SEQ ID NO: 27
cgttcgggttaagtgataaagg

SEQ ID NO: 10760 - DNA, 21 bp, Artificial Sequence
  bisulfite treated nucleic acid for analysis of methylation status of SEQ ID NO: 27
ttagttcgtcgggtttttgtc

SEQ ID NO: 10761 - DNA, 22 bp, Artificial Sequence
  bisulfite treated nucleic acid for analysis of methylation status of SEQ ID NO: 27
gaaaatacgacgaaaaacgcta

SEQ ID NO: 10762 - DNA, 21 bp, Artificial Sequence
  bisulfite treated nucleic acid for analysis of methylation status of SEQ ID NO: 27
actctaaacgctcaaacgaac

SEQ ID NO: 10763 - DNA, 21 bp, Artificial Sequence
  bisulfite treated nucleic acid for analysis of methylation status of SEQ ID NO: 27
tctactcgatacccgctcaaa

SEQ ID NO: 10764 - DNA, 22 bp, Artificial Sequence
  nucleic acid for analysis of methylation status of SEQ ID NO: 27
agcgtttagagtttagggtcgt

SEQ ID NO: 10765 - DNA, 21 bp, Artificial Sequence
  bisulfite treated nucleic acid for analysis of methylation status of SEQ ID NO: 27
ctccaacaacgataaaaaccg

SEQ ID NO: 10766 - DNA, 29 bp, Artificial Sequence
  bisulfite treated nucleic acid for analysis of methylation status of SEQ ID NO: 27
ttgttgtatcgagggttcgcggtttttgt

SEQ ID NO: 10767 - DNA, 20 bp, Artificial Sequence
  bisulfite treated nucleic acid for analysis of methylation status of SEQ ID NO: 27
tccaacaacgataaaaaccg

SEQ ID NO: 10768 - DNA, 19 bp, Artificial Sequence
  bisulfite treated nucleic acid for analysis of methylation status of SEQ ID NO: 27
cgggtttttatgttttcgg

SEQ ID NO: 10769 - DNA, 22 bp, Artificial Sequence
  bisulfite treated nucleic acid for analysis of methylation status of SEQ ID NO: 27
tagcgtttttgggttttatcgt

SEQ ID NO: 10770 - DNA, 22 bp, Artificial Sequence
  bisulfite treated nucleic acid for analysis of methylation status of SEQ ID NO: 27
aaaaataaattcgccttattcg

SEQ ID NO: 10771 - DNA, 29 bp, Artificial Sequence
  bisulfite treated nucleic acid for analysis of methylation status of SEQ ID NO: 27
tttcgtaagggtcggcgattttgattggt

SEQ ID NO: 10772 - DNA, 20 bp, Artificial Sequence
  bisulfite treated nucleic acid for analysis of methylation status of SEQ ID NO: 27
tagttcgtcgggtttttgtc

SEQ ID NO: 10773 - DNA, 22 bp, Artificial Sequence
  bisulfite treated nucleic acid for analysis of methylation status of SEQ ID NO: 27
acaaacgacgactaaatccaac

SEQ ID NO: 10774 - DNA, 32 bp, Artificial Sequence
  bisulfite treated nucleic acid for analysis of methylation status of SEQ ID NO: 27
aagggagttgttttcgttatcgttatggtcgt

SEQ ID NO: 10775 - DNA, 22 bp, Artificial Sequence
  bisulfite treated nucleic acid for analysis of methylation status of SEQ ID NO: 27
cgatttttagacgtttgttacg

SEQ ID NO: 10776 - DNA, 21 bp, Artificial Sequence
  bisulfite treated nucleic acid for analysis of methylation status of SEQ ID NO: 27
ctatctacgcaaccgccttac

SEQ ID NO: 10777 - DNA, 22 bp, Artificial Sequence
  bisulfite treated nucleic acid for analysis of methylation status of SEQ ID NO: 27
ggggcgttgggcggtgtaaggt

SEQ ID NO: 10778 - DNA, 21 bp, Artificial Sequence
  bisulfite treated nucleic acid for analysis of methylation status of SEQ ID NO: 27
cacgaatctcacgcttaaaaa

SEQ ID NO: 10779 - DNA, 21 bp, Artificial Sequence
  bisulfite treated nucleic acid for analysis of methylation status of SEQ ID NO: 27
tcacgaatctcacgcttaaaa

SEQ ID NO: 10780 - DNA, 21 bp, Artificial Sequence
  bisulfite treated nucleic acid for analysis of methylation status of SEQ ID NO: 27
ggcgatttttagacgtttgtt

SEQ ID NO: 10781 - DNA, 21 bp, Artificial Sequence
  bisulfite treated nucleic acid for analysis of methylation status of SEQ ID NO: 27
ttcgtttgagcgtttagagtt

SEQ ID NO: 10782 - DNA, 20 bp, Artificial Sequence
  bisulfite treated nucleic acid for analysis of methylation status of SEQ ID NO: 27
tatctacgcaaccgccttac

SEQ ID NO: 10783 - DNA, 19 bp, Artificial Sequence
  bisulfite treated nucleic acid for analysis of methylation status of SEQ ID NO: 27
gtaaggcggttgcgtagat

SEQ ID NO: 10784 - DNA, 22 bp, Artificial Sequence
  bisulfite treated nucleic acid for analysis of methylation status of SEQ ID NO: 27
tttatcacttaacccgaacgac

SEQ ID NO: 10785 - DNA, 26 bp, Artificial Sequence
  bisulfite treated nucleic acid for analysis of methylation status of SEQ ID NO: 27
ttcgggcgaatgcgggtttgtgtcgt

SEQ ID NO: 10786 - DNA, 21 bp, Artificial Sequence
  bisulfite treated nucleic acid for analysis of methylation status of SEQ ID NO: 27
gcgtttgagagtttgtagtcg

SEQ ID NO: 10787 - DNA, 37 bp, Artificial Sequence
  bisulfite treated nucleic acid for analysis of methylation status of SEQ ID NO: 27
ttcgtttggttttttcggggaagaggttaatattcgg

SEQ ID NO: 10788 - DNA, 22 bp, Artificial Sequence
  bisulfite treated nucleic acid for analysis of methylation status of SEQ ID NO: 27
acgactaaatccaacgaccata

SEQ ID NO: 10789 - DNA, 22 bp, Artificial Sequence
  bisulfite treated nucleic acid for analysis of methylation status of SEQ ID NO: 27
gcgtaacaaacgtctaaaaatc

SEQ ID NO: 10790 - DNA, 22 bp, Artificial Sequence
  bisulfite treated nucleic acid for analysis of methylation status of SEQ ID NO: 27
gtaacaaacgtctaaaaatcgc

SEQ ID NO: 10791 - DNA, 19 bp, Artificial Sequence
  bisulfite treated nucleic acid for analysis of methylation status of SEQ ID NO: 27
acgcgatttacggtagagg

SEQ ID NO: 10792 - DNA, 22 bp, Artificial Sequence
  bisulfite treated nucleic acid for analysis of methylation status of SEQ ID NO: 27
aatacgacgaaaaacgctacaa

SEQ ID NO: 10793 - DNA, 22 bp, Artificial Sequence
  bisulfite treated nucleic acid for analysis of methylation status of SEQ ID NO: 27
aaatacgacgaaaaacgctaca

SEQ ID NO: 10794 - DNA, 19 bp, Artificial Sequence
  bisulfite treated nucleic acid for analysis of methylation status of SEQ ID NO: 27
cgataaaaaccgcacacaa

SEQ ID NO: 10795 - DNA, 33 bp, Artificial Sequence
  bisulfite treated nucleic acid for analysis of methylation status of SEQ ID NO: 27
agggtcgtcgatcgtagtatttttcgatttgtt

SEQ ID NO: 10796 - DNA, 22 bp, Artificial Sequence
  bisulfite treated nucleic acid for analysis of methylation status of SEQ ID NO: 27
ttcgtttgagcgtttagagttt

SEQ ID NO: 10797 - DNA, 34 bp, Artificial Sequence
  bisulfite treated nucleic acid for analysis of methylation status of SEQ ID NO: 27
gggtcgtcgatcgtagtatttttcgatttgttgt

SEQ ID NO: 10798 - DNA, 22 bp, Artificial Sequence
  bisulfite treated nucleic acid for analysis of methylation status of SEQ ID NO: 27
ctttatcacttaacccgaacga

SEQ ID NO: 10799 - DNA, 24 bp, Artificial Sequence
  bisulfite treated nucleic acid for analysis of methylation status of SEQ ID NO: 27
taaactctaaacgctcaaacgaac

SEQ ID NO: 10800 - DNA, 22 bp, Artificial Sequence
  bisulfite treated nucleic acid for analysis of methylation status of SEQ ID NO: 27
taaactctaaacgctcaaacga

SEQ ID NO: 10801 - DNA, 22 bp, Artificial Sequence
  bisulfite treated nucleic acid for analysis of methylation status of SEQ ID NO: 27
ttttaggatattcggtttgacg

SEQ ID NO: 10802 - DNA, 19 bp, Artificial Sequence
  bisulfite treated nucleic acid for analysis of methylation status of SEQ ID NO: 27
cttaatatacgcgcccgac

SEQ ID NO: 10803 - DNA, 25 bp, Artificial Sequence
  nucleic acid for analysis of methylation status of SEQ ID NO: 27
gtagttgcgtttaaggagcgcgcgt

SEQ ID NO: 10804 - DNA, 19 bp, Artificial Sequence
  nucleic acid for analysis of methylation status of SEQ ID NO: 27
actcgatacccgctcaaaa

SEQ ID NO: 10805 - DNA, 20 bp, Artificial Sequence
  bisulfite treated nucleic acid for analysis of methylation status of SEQ ID NO: 27
tatttacgactcctcccgaa

SEQ ID NO: 10806 - DNA, 21 bp, Artificial Sequence
  bisulfite treated nucleic acid for analysis of methylation status of SEQ ID NO: 27
tacgacgaaaaacgctacaac

SEQ ID NO: 10807 - DNA, 22 bp, Artificial Sequence
  bisulfite treated nucleic acid for analysis of methylation status of SEQ ID NO: 27
actctaaacgctcaaacgaaca

SEQ ID NO: 10808 - DNA, 21 bp, Artificial Sequence
  bisulfite treated nucleic acid for analysis of methylation status of SEQ ID NO: 27
agcgtttagagtttagggtcg

SEQ ID NO: 10809 - DNA, 20 bp, Artificial Sequence
  bisulfite treated nucleic acid for analysis of methylation status of SEQ ID NO: 27
aacaacgataaaaaccgcac

SEQ ID NO: 10810 - DNA, 40 bp, Artificial Sequence
  bisulfite treated nucleic acid for analysis of methylation status of SEQ ID NO: 27
atcgtagtatttttcgatttgttgtatcgagggttcgcgg

SEQ ID NO: 10811 - DNA, 22 bp, Artificial Sequence
  bisulfite treated nucleic acid for analysis of methylation status of SEQ ID NO: 27
tacaaacgacgactaaatccaa

SEQ ID NO: 10812 - DNA, 19 bp, Artificial Sequence
  bisulfite treated nucleic acid for analysis of methylation status of SEQ ID NO: 27
acgataaaaaccgcacaca

SEQ ID NO: 10813 - DNA, 20 bp, Artificial Sequence
  bisulfite treated nucleic acid for analysis of methylation status of SEQ ID NO: 27
aacgataaaaaccgcacaca

SEQ ID NO: 10814 - DNA, 20 bp, Artificial Sequence
  bisulfite treated nucleic acid for analysis of methylation status of SEQ ID NO: 27
acgataaaaaccgcacacaa

SEQ ID NO: 10815 - DNA, 20 bp, Artificial Sequence
  bisulfite treated nucleic acid for analysis of methylation status of SEQ ID NO: 27
caacgataaaaaccgcacac

SEQ ID NO: 10816 - DNA, 20 bp, Artificial Sequence
  bisulfite treated nucleic acid for analysis of methylation status of SEQ ID NO: 27
acaacgataaaaaccgcaca

SEQ ID NO: 10817 - DNA, 22 bp, Artificial Sequence
  bisulfite treated nucleic acid for analysis of methylation status of SEQ ID NO: 27
gcgtttagagtttagggtcgtc

SEQ ID NO: 10818 - DNA, 19 bp, Artificial Sequence
  bisulfite treated nucleic acid for analysis of methylation status of SEQ ID NO: 27
tttttcgggaggagtcgta

SEQ ID NO: 10819 - DNA, 24 bp, Artificial Sequence
  bisulfite treated nucleic acid for analysis of methylation status of SEQ ID NO: 27
tatcgaataaggcgaatttatttt

SEQ ID NO: 10820 - DNA, 21 bp, Artificial Sequence
  bisulfite treated nucleic acid for analysis of methylation status of SEQ ID NO: 27
ctctaaacgctcaaacgaaca

SEQ ID NO: 10821 - DNA, 21 bp, Artificial Sequence
  bisulfite treated nucleic acid for analysis of methylation status of SEQ ID NO: 27
cgtttgagagtttgtagtcgg

SEQ ID NO: 10822 - DNA, 20 bp, Artificial Sequence
  bisulfite treated nucleic acid for analysis of methylation status of SEQ ID NO: 27
gaaacgcaaccaattctacg

SEQ ID NO: 10823 - DNA, 19 bp, Artificial Sequence
  bisulfite treated nucleic acid for analysis of methylation status of SEQ ID NO: 27
gtcgggcgcgtatattaag

SEQ ID NO: 10824 - DNA, 22 bp, Artificial Sequence
  bisulfite treated nucleic acid for analysis of methylation status of SEQ ID NO: 27
accgactacaaactctcaaacg

SEQ ID NO: 10825 - DNA, 33 bp, Artificial Sequence
  bisulfite treated nucleic acid for analysis of methylation status of SEQ ID NO: 27
tttcgcggttgggcggggcgcggtcgtttaaag

SEQ ID NO: 10826 - DNA, 22 bp, Artificial Sequence
  bisulfite treated nucleic acid for analysis of methylation status of SEQ ID NO: 27
gagcgtttagagtttagggtcg

SEQ ID NO: 10827 - DNA, 20 bp, Artificial Sequence
  bisulfite treated nucleic acid for analysis of methylation status of SEQ ID NO: 27
tcgatttgttgtatcgaggg

SEQ ID NO: 10828 - DNA, 28 bp, Artificial Sequence
  bisulfite treated nucleic acid for analysis of methylation status of SEQ ID NO: 27
ggtttttatcgttgttggaggcggtcgt

SEQ ID NO: 10829 - DNA, 23 bp, Artificial Sequence
  bisulfite treated nucleic acid for analysis of methylation status of SEQ ID NO: 27
tagcgtttgagagtttgtagtcg

SEQ ID NO: 10830 - DNA, 19 bp, Artificial Sequence
  bisulfite treated nucleic acid for analysis of methylation status of SEQ ID NO: 27
tttttcgtttttgggatcg

SEQ ID NO: 10831 - DNA, 22 bp, Artificial Sequence
  bisulfite treated nucleic acid for analysis of methylation status of SEQ ID NO: 27
acgaccaatcgactctcactac

SEQ ID NO: 10832 - DNA, 30 bp, Artificial Sequence
  bisulfite treated nucleic acid for analysis of methylation status of SEQ ID NO: 27
ttgtagttaggtttttgcggattggacggt

SEQ ID NO: 10833 - DNA, 22 bp, Artificial Sequence
  bisulfite treated nucleic acid for analysis of methylation status of SEQ ID NO: 27
ctacaaacgacgactaaatcca

SEQ ID NO: 10834 - DNA, 19 bp, Artificial Sequence
  bisulfite treated nucleic acid for analysis of methylation status of SEQ ID NO: 27
cggttgtcgggtttttatg

SEQ ID NO: 10835 - DNA, 22 bp, Artificial Sequence
  bisulfite treated nucleic acid for analysis of methylation status of SEQ ID NO: 27
atccaacgaccataacgataac

SEQ ID NO: 10836 - DNA, 31 bp, Artificial Sequence
  bisulfite treated nucleic acid for analysis of methylation status of SEQ ID NO: 27
ttcggcgaatggggaatagtcgaggagtcgt

SEQ ID NO: 10837 - DNA, 22 bp, Artificial Sequence
  bisulfite treated nucleic acid for analysis of methylation status of SEQ ID NO: 27
cgactacaaactctcaaacgct

SEQ ID NO: 10838 - DNA, 19 bp, Artificial Sequence
  bisulfite treated nucleic acid for analysis of methylation status of SEQ ID NO: 27
ctcgatacccgctcaaaaa

SEQ ID NO: 10839 - DNA, 20 bp, Artificial Sequence
  bisulfite treated nucleic acid for analysis of methylation status of SEQ ID NO: 27
cgactctactcgatacccgc

SEQ ID NO: 10840 - DNA, 21 bp, Artificial Sequence
  bisulfite treated nucleic acid for analysis of methylation status of SEQ ID NO: 27
tctaaacgctcaaacgaacaa

SEQ ID NO: 10841 - DNA, 23 bp, Artificial Sequence
  bisulfite treated nucleic acid for analysis of methylation status of SEQ ID NO: 27
actacaaacgacgactaaatcca

SEQ ID NO: 10842 - DNA, 20 bp, Artificial Sequence
  bisulfite treated nucleic acid for analysis of methylation status of SEQ ID NO: 27
ccgcgtaacaaacgtctaaa

SEQ ID NO: 10843 - DNA, 21 bp, Artificial Sequence
  bisulfite treated nucleic acid for analysis of methylation status of SEQ ID NO: 27
agcgtttttgggttttatcgt

SEQ ID NO: 10844 - DNA, 21 bp, Artificial Sequence
  bisulfite treated nucleic acid for analysis of methylation status of SEQ ID NO: 27
ttcgatttgttgtatcgaggg

SEQ ID NO: 10845 - DNA, 20 bp, Artificial Sequence
  bisulfite treated nucleic acid for analysis of methylation status of SEQ ID NO: 27
caacaacgataaaaaccgca

SEQ ID NO: 10846 - DNA, 21 bp, Artificial Sequence
  bisulfite treated nucleic acid for analysis of methylation status of SEQ ID NO: 27
cgactaaatccaacgaccata

SEQ ID NO: 10847 - DNA, 20 bp, Artificial Sequence
  bisulfite treated nucleic acid for analysis of methylation status of SEQ ID NO: 27
tcgggtttttgtcgttagtt

SEQ ID NO: 10848 - DNA, 20 bp, Artificial Sequence
  bisulfite treated nucleic acid for analysis of methylation status of SEQ ID NO: 27
gcgtttttgggttttatcgt

SEQ ID NO: 10849 - DNA, 22 bp, Artificial Sequence
  bisulfite treated nucleic acid for analysis of methylation status of SEQ ID NO: 27
gatttttagacgtttgttacgc

SEQ ID NO: 10850 - DNA, 20 bp, Artificial Sequence
  bisulfite treated nucleic acid for analysis of methylation status of SEQ ID NO: 27
ctatctacgcaaccgcctta

SEQ ID NO: 10851 - DNA, 21 bp, Artificial Sequence
  bisulfite treated nucleic acid for analysis of methylation status of SEQ ID NO: 27
acgactcctctcctcattacg

SEQ ID NO: 10852 - DNA, 33 bp, Artificial Sequence
  bisulfite treated nucleic acid for analysis of methylation status of SEQ ID NO: 27
atggtcgttggatttagtcgtcgtttgtagttg

SEQ ID NO: 10853 - DNA, 19 bp, Artificial Sequence
  bisulfite treated nucleic acid for analysis of methylation status of SEQ ID NO: 27
ttttgagcgggtatcgagt

SEQ ID NO: 10854 - DNA, 22 bp, Artificial Sequence
  bisulfite treated nucleic acid for analysis of methylation status of SEQ ID NO: 27
aaacaacgactcctcgactatt

SEQ ID NO: 10855 - DNA, 20 bp, Artificial Sequence
  bisulfite treated nucleic acid for analysis of methylation status of SEQ ID NO: 27
tgtcgcggacgggggagggg

SEQ ID NO: 10856 - DNA, 19 bp, Artificial Sequence
  bisulfite treated nucleic acid for analysis of methylation status of SEQ ID NO: 27
agttcgtcgggtttttgtc

SEQ ID NO: 10857 - DNA, 20 bp, Artificial Sequence
  bisulfite treated nucleic acid for analysis of methylation status of SEQ ID NO: 27
acaaacgtctaaaaatcgcc

SEQ ID NO: 10858 - DNA, 19 bp, Artificial Sequence
  bisulfite treated nucleic acid for analysis of methylation status of SEQ ID NO: 27
ttcgtgattggtttcgttc

SEQ ID NO: 10859 - DNA, 20 bp, Artificial Sequence
  bisulfite treated nucleic acid for analysis of methylation status of SEQ ID NO: 27
tctactcgatacccgctcaa

SEQ ID NO: 10860 - DNA, 21 bp, Artificial Sequence
  bisulfite treated nucleic acid for analysis of methylation status of SEQ ID NO: 27
acaacgataaaaaccgcacac

SEQ ID NO: 10861 - DNA, 19 bp, Artificial Sequence
  bisulfite treated nucleic acid for analysis of methylation status of SEQ ID NO: 27
acgctcaaacgaacaaaaa

SEQ ID NO: 10862 - DNA, 19 bp, Artificial Sequence
  bisulfite treated nucleic acid for analysis of methylation status of SEQ ID NO: 27
aaacgctcaaacgaacaaa

SEQ ID NO: 10863 - DNA, 19 bp, Artificial Sequence
  bisulfite treated nucleic acid for analysis of methylation status of SEQ ID NO: 27
atctacgcaaccgccttac

SEQ ID NO: 10864 - DNA, 18 bp, Artificial Sequence
  bisulfite treated nucleic acid for analysis of methylation status of SEQ ID NO: 27
tcgatacccgctcaaaaa

SEQ ID NO: 10865 - DNA, 21 bp, Artificial Sequence
  bisulfite treated nucleic acid for analysis of methylation status of SEQ ID NO: 27
acgactaaatccaacgaccat

SEQ ID NO: 10866 - DNA, 18 bp, Artificial Sequence
  bisulfite treated nucleic acid for analysis of methylation status of SEQ ID NO: 27
gtgtaaggcggttgcgta

SEQ ID NO: 10867 - DNA, 44 bp, Artificial Sequence
  bisulfite treated nucleic acid for analysis of methylation status of SEQ ID NO: 27
agcgttttttatatagagtagtttttgattcgggcgaatgcggg

SEQ ID NO: 10868 - DNA, 18 bp, Artificial Sequence
  bisulfite treated nucleic acid for analysis of methylation status of SEQ ID NO: 27
ctctcgacgaaacgcaac

SEQ ID NO: 10869 - DNA, 20 bp, Artificial Sequence
  bisulfite treated nucleic acid for analysis of methylation status of SEQ ID NO: 27
cgttcggttattttcggtat

SEQ ID NO: 10870 - DNA, 21 bp, Artificial Sequence
  bisulfite treated nucleic acid for analysis of methylation status of SEQ ID NO: 27
ataacgacgactcctctcctc

SEQ ID NO: 10871 - DNA, 21 bp, Artificial Sequence
  bisulfite treated nucleic acid for analysis of methylation status of SEQ ID NO: 27
gataacgacgactcctctcct

SEQ ID NO: 10872 - DNA, 19 bp, Artificial Sequence
  bisulfite treated nucleic acid for analysis of methylation status of SEQ ID NO: 27
agtgtaaggcggttgcgta

SEQ ID NO: 10873 - DNA, 20 bp, Artificial Sequence
  bisulfite treated nucleic acid for analysis of methylation status of SEQ ID NO: 27
acgacgaaaaacgctacaac

SEQ ID NO: 10874 - DNA, 20 bp, Artificial Sequence
  bisulfite treated nucleic acid for analysis of methylation status of SEQ ID NO: 27
cgggtttttgtcgttagttc

SEQ ID NO: 10875 - DNA, 21 bp, Artificial Sequence
  bisulfite treated nucleic acid for analysis of methylation status of SEQ ID NO: 27
aaaatcacgaatctcacgctt

SEQ ID NO: 10876 - DNA, 28 bp, Artificial Sequence
  bisulfite treated nucleic acid for analysis of methylation status of SEQ ID NO: 27
ttcgggtttcggtttttagtcgaagcgg

SEQ ID NO: 10877 - DNA, 21 bp, Artificial Sequence
  bisulfite treated nucleic acid for analysis of methylation status of SEQ ID NO: 27
gcgtttagagtttagggtcgt

SEQ ID NO: 10878 - DNA, 18 bp, Artificial Sequence
  bisulfite treated nucleic acid for analysis of methylation status of SEQ ID NO: 27
attggtttcgttcgggtt

SEQ ID NO: 10879 - DNA, 20 bp, Artificial Sequence
  bisulfite treated nucleic acid for analysis of methylation status of SEQ ID NO: 27
cgatttgttgtatcgagggt

SEQ ID NO: 10880 - DNA, 20 bp, Artificial Sequence
  nucleic acid for analysis of methylation status of SEQ ID NO: 27
cgtaactaacgacccgaaaa

SEQ ID NO: 10881 - DNA, 21 bp, Artificial Sequence
  bisulfite treated nucleic acid for analysis of methylation status of SEQ ID NO: 27
ctaaatccaacgaccataacg

SEQ ID NO: 10882 - DNA, 18 bp, Artificial Sequence
  bisulfite treated nucleic acid for analysis of methylation status of SEQ ID NO: 27
tgtaaggcggttgcgtag

SEQ ID NO: 10883 - DNA, 20 bp, Artificial Sequence
  bisulfite treated nucleic acid for analysis of methylation status of SEQ ID NO: 27
tttatttacgactcctcccg

SEQ ID NO: 10884 - DNA, 20 bp, Artificial Sequence
  bisulfite treated nucleic acid for analysis of methylation status of SEQ ID NO: 27
tttttgagcgggtatcgagt

SEQ ID NO: 10885 - DNA, 22 bp, Artificial Sequence
  bisulfite treated nucleic acid for analysis of methylation status of SEQ ID NO: 27
ttcgtagtcgttgatagggttt

SEQ ID NO: 10886 - DNA, 18 bp, Artificial Sequence
  bisulfite treated nucleic acid for analysis of methylation status of SEQ ID NO: 27
cgcccctcgactctactc

SEQ ID NO: 10887 - DNA, 29 bp, Artificial Sequence
  bisulfite treated nucleic acid for analysis of methylation status of SEQ ID NO: 27
ggggtaaagcgcggatattttttgagcgg

SEQ ID NO: 10888 - DNA, 19 bp, Artificial Sequence
  bisulfite treated nucleic acid for analysis of methylation status of SEQ ID NO: 27
atttacgactcctcccgaa

SEQ ID NO: 10889 - DNA, 22 bp, Artificial Sequence
  bisulfite treated nucleic acid for analysis of methylation status of SEQ ID NO: 27
ggaatagtcgaggagtcgttgt

SEQ ID NO: 10890 - DNA, 21 bp, Artificial Sequence
  bisulfite treated nucleic acid for analysis of methylation status of SEQ ID NO: 27
tcaatcaaaaacgaacgataa

SEQ ID NO: 10891 - DNA, 30 bp, Artificial Sequence
  bisulfite treated nucleic acid for analysis of methylation status of SEQ ID NO: 27
tgtttttggcgtaatgaggagaggagtcgt

SEQ ID NO: 10892 - DNA, 21 bp, Artificial Sequence
  bisulfite treated nucleic acid for analysis of methylation status of SEQ ID NO: 27
tatttattttcggggttcgtt

SEQ ID NO: 10893 - DNA, 18 bp, Artificial Sequence
  bisulfite treated nucleic acid for analysis of methylation status of SEQ ID NO: 27
gtaagggtcggcgatttt

SEQ ID NO: 10894 - DNA, 22 bp, Artificial Sequence
  bisulfite treated nucleic acid for analysis of methylation status of SEQ ID NO: 27
aaaataacgctaacaaaccacg

SEQ ID NO: 10895 - DNA, 38 bp, Artificial Sequence
  bisulfite treated nucleic acid for analysis of methylation status of SEQ ID NO: 27
gttatcgaataaggcgaatttatttttttcgttcggtt

SEQ ID NO: 10896 - DNA, 18 bp, Artificial Sequence
  bisulfite treated nucleic acid for analysis of methylation status of SEQ ID NO: 27
gattggtttcgttcgggt

SEQ ID NO: 10897 - DNA, 21 bp, Artificial Sequence
  bisulfite treated nucleic acid for analysis of methylation status of SEQ ID NO: 27
caaacgacgactaaatccaac

SEQ ID NO: 10898 - DNA, 34 bp, Artificial Sequence
  bisulfite treated nucleic acid for analysis of methylation status of SEQ ID NO: 27
ggtttgaagggagttgttttcgttatcgttatgg

SEQ ID NO: 10899 - DNA, 21 bp, Artificial Sequence
  bisulfite treated nucleic acid for analysis of methylation status of SEQ ID NO: 27
ccgactacaaactctcaaacg

SEQ ID NO: 10900 - DNA, 19 bp, Artificial Sequence
  bisulfite treated nucleic acid for analysis of methylation status of SEQ ID NO: 27
gcgatttacggtagagggg

SEQ ID NO: 10901 - DNA, 20 bp, Artificial Sequence
  bisulfite treated nucleic acid for analysis of methylation status of SEQ ID NO: 27
cggttgtcgggtttttatgt

SEQ ID NO: 10902 - DNA, 22 bp, Artificial Sequence
  bisulfite treated nucleic acid for analysis of methylation status of SEQ ID NO: 27
acgataacgaaaacaactccct

SEQ ID NO: 10903 - DNA, 21 bp, Artificial Sequence
  bisulfite treated nucleic acid for analysis of methylation status of SEQ ID NO: 27
ggttgcgtagatagcgttttt

SEQ ID NO: 10904 - DNA, 19 bp, Artificial Sequence
  bisulfite treated nucleic acid for analysis of methylation status of SEQ ID NO: 27
acttaacccgaacgacgac

SEQ ID NO: 10905 - DNA, 21 bp, Artificial Sequence
  bisulfite treated nucleic acid for analysis of methylation status of SEQ ID NO: 27
tgagcgggtatcgagtagagt

SEQ ID NO: 10906 - DNA, 21 bp, Artificial Sequence
  bisulfite treated nucleic acid for analysis of methylation status of SEQ ID NO: 27
cgaaaacataaaaacccgaca

SEQ ID NO: 10907 - DNA, 20 bp, Artificial Sequence
  bisulfite treated nucleic acid for analysis of methylation status of SEQ ID NO: 27
tttgagcgggtatcgagtag

SEQ ID NO: 10908 - DNA, 20 bp, Artificial Sequence
  bisulfite treated nucleic acid for analysis of methylation status of SEQ ID NO: 27
cgaaaacataaaaacccgac

SEQ ID NO: 10909 - DNA, 19 bp, Artificial Sequence
  bisulfite treated nucleic acid for analysis of methylation status of SEQ ID NO: 27
tcgggtttttatgttttcg

SEQ ID NO: 10910 - DNA, 19 bp, Artificial Sequence
  bisulfite treated nucleic acid for analysis of methylation status of SEQ ID NO: 27
ttcgttcggttattttcgg

SEQ ID NO: 10911 - DNA, 22 bp, Artificial Sequence
  bisulfite treated nucleic acid for analysis of methylation status of SEQ ID NO: 27
aggtacgtttttagcggagttt

SEQ ID NO: 10912 - DNA, 18 bp, Artificial Sequence
  bisulfite treated nucleic acid for analysis of methylation status of SEQ ID NO: 27
aaaatcgccgacccttac

SEQ ID NO: 10913 - DNA, 33 bp, Artificial Sequence
  bisulfite treated nucleic acid for analysis of methylation status of SEQ ID NO: 27
gttaattataaagcggcggcggcgtttagtcgt

SEQ ID NO: 10914 - DNA, 19 bp, Artificial Sequence
  bisulfite treated nucleic acid for analysis of methylation status of SEQ ID NO: 27
gggaatagtcgaggagtcg

SEQ ID NO: 10915 - DNA, 22 bp, Artificial Sequence
  bisulfite treated nucleic acid for analysis of methylation status of SEQ ID NO: 27
tcaatcaaaaacgaacgataac

SEQ ID NO: 10916 - DNA, 20 bp, Artificial Sequence
  bisulfite treated nucleic acid for analysis of methylation status of SEQ ID NO: 27
cgtagaattggttgcgtttc

SEQ ID NO: 10917 - DNA, 20 bp, Artificial Sequence
  bisulfite treated nucleic acid for analysis of methylation status of SEQ ID NO: 27
cgaaccctcgatacaacaaa

SEQ ID NO: 10918 - DNA, 29 bp, Artificial Sequence
  bisulfite treated nucleic acid for analysis of methylation status of SEQ ID NO: 27
agcgtttagagtttagggtcgtcgatcgt

SEQ ID NO: 10919 - DNA, 19 bp, Artificial Sequence
  bisulfite treated nucleic acid for analysis of methylation status of SEQ ID NO: 27
cgttcgtgattggtttcgt

SEQ ID NO: 10920 - DNA, 19 bp, Artificial Sequence
  bisulfite treated nucleic acid for analysis of methylation status of SEQ ID NO: 27
ccaacaacgataaaaaccg

SEQ ID NO: 10921 - DNA, 31 bp, Artificial Sequence
  bisulfite treated nucleic acid for analysis of methylation status of SEQ ID NO: 27
gatttgttgtatcgagggttcgcggtttttg

SEQ ID NO: 10922 - DNA, 20 bp, Artificial Sequence
  bisulfite treated nucleic acid for analysis of methylation status of SEQ ID NO: 27
aaacgctacaactccgacaa

SEQ ID NO: 10923 - DNA, 28 bp, Artificial Sequence
  bisulfite treated nucleic acid for analysis of methylation status of SEQ ID NO: 27
tttgtcgttagttcgtcggatttcgcgg

SEQ ID NO: 10924 - DNA, 18 bp, Artificial Sequence
  bisulfite treated nucleic acid for analysis of methylation status of SEQ ID NO: 27
aaaattcgcctacgaccg

SEQ ID NO: 10925 - DNA, 18 bp, Artificial Sequence
  bisulfite treated nucleic acid for analysis of methylation status of SEQ ID NO: 27
ttaatatacgcgcccgac

SEQ ID NO: 10926 - DNA, 18 bp, Artificial Sequence
  bisulfite treated nucleic acid for analysis of methylation status of SEQ ID NO: 27
gtgattggtttcgttcgg

SEQ ID NO: 10927 - DNA, 21 bp, Artificial Sequence
  bisulfite treated nucleic acid for analysis of methylation status of SEQ ID NO: 27
cgataacgaaaacaactccct

SEQ ID NO: 10928 - DNA, 19 bp, Artificial Sequence
  bisulfite treated nucleic acid for analysis of methylation status of SEQ ID NO: 27
ccgaaaacataaaaacccg

SEQ ID NO: 10929 - DNA, 19 bp, Artificial Sequence
  bisulfite treated nucleic acid for analysis of methylation status of SEQ ID NO: 27
cccctctaccgtaaatcgc

SEQ ID NO: 10930 - DNA, 19 bp, Artificial Sequence
  bisulfite treated nucleic acid for analysis of methylation status of SEQ ID NO: 27
gttgcgtttcgtcgagagt

SEQ ID NO: 10931 - DNA, 22 bp, Artificial Sequence
  bisulfite treated nucleic acid for analysis of methylation status of SEQ ID NO: 27
ctcgatacaacaaatcgaaaaa

SEQ ID NO: 10932 - DNA, 19 bp, Artificial Sequence
  bisulfite treated nucleic acid for analysis of methylation status of SEQ ID NO: 27
gcggttgtcgggtttttat

SEQ ID NO: 10933 - DNA, 18 bp, Artificial Sequence
  bisulfite treated nucleic acid for analysis of methylation status of SEQ ID NO: 27
cgtgattggtttcgttcg

SEQ ID NO: 10934 - DNA, 22 bp, Artificial Sequence
  bisulfite treated nucleic acid for analysis of methylation status of SEQ ID NO: 27
cgtaaaaaccgacgactctaat

SEQ ID NO: 10935 - DNA, 22 bp, Artificial Sequence
  bisulfite treated nucleic acid for analysis of methylation status of SEQ ID NO: 27
gaaaatgtcgaaggtagtcgaa

SEQ ID NO: 10936 - DNA, 29 bp, Artificial Sequence
  bisulfite treated nucleic acid for analysis of methylation status of SEQ ID NO: 27
agggtgaattcgttttgttcggtggttgg

SEQ ID NO: 10937 - DNA, 22 bp, Artificial Sequence
  bisulfite treated nucleic acid for analysis of methylation status of SEQ ID NO: 27
aaaatgtcgaaggtagtcgaac

SEQ ID NO: 10938 - DNA, 22 bp, Artificial Sequence
  nucleic acid for analysis of methylation status of SEQ ID NO: 27
aacgaatacgaacttataccgc

SEQ ID NO: 10939 - DNA, 22 bp, Artificial Sequence
  bisulfite treated nucleic acid for analysis of methylation status of SEQ ID NO: 27
aagtgttcgcgttttgttttag

SEQ ID NO: 10940 - DNA, 23 bp, Artificial Sequence
  bisulfite treated nucleic acid for analysis of methylation status of SEQ ID NO: 27
ttgttagcggttgcggggtcggt

SEQ ID NO: 10941 - DNA, 22 bp, Artificial Sequence
  bisulfite treated nucleic acid for analysis of methylation status of SEQ ID NO: 27
aaacctcttcgtaaaaaccgac

SEQ ID NO: 10942 - DNA, 22 bp, Artificial Sequence
  bisulfite treated nucleic acid for analysis of methylation status of SEQ ID NO: 27
tcgtaaaaaccgacgactctaa

SEQ ID NO: 10943 - DNA, 22 bp, Artificial Sequence
  bisulfite treated nucleic acid for analysis of methylation status of SEQ ID NO: 27
ttcgtaaaaaccgacgactcta

SEQ ID NO: 10944 - DNA, 22 bp, Artificial Sequence
  bisulfite treated nucleic acid for analysis of methylation status of SEQ ID NO: 27
acgaatacgaacttataccgcc

SEQ ID NO: 10945 - DNA, 22 bp, Artificial Sequence
  bisulfite treated nucleic acid for analysis of methylation status of SEQ ID NO: 27
agtgttcgcgttttgttttagt

SEQ ID NO: 10946 - DNA, 21 bp, Artificial Sequence
  bisulfite treated nucleic acid for analysis of methylation status of SEQ ID NO: 27
cgaatacgaacttataccgcc

SEQ ID NO: 10947 - DNA, 22 bp, Artificial Sequence
  bisulfite treated nucleic acid for analysis of methylation status of SEQ ID NO: 27
accttaaacgcgcaaaattaac

SEQ ID NO: 10948 - DNA, 22 bp, Artificial Sequence
  bisulfite treated nucleic acid for analysis of methylation status of SEQ ID NO: 27
tcggtgtagtaaatcggaaagt

SEQ ID NO: 10949 - DNA, 33 bp, Artificial Sequence
  bisulfite treated nucleic acid for analysis of methylation status of SEQ ID NO: 27
ggcggttttgggttttgagcgtttaagcgagta

SEQ ID NO: 10950 - DNA, 22 bp, Artificial Sequence
  bisulfite treated nucleic acid for analysis of methylation status of SEQ ID NO: 27
gtgttcgcgttttgttttagtt

SEQ ID NO: 10951 - DNA, 22 bp, Artificial Sequence
  bisulfite treated nucleic acid for analysis of methylation status of SEQ ID NO: 27
gaagtgttcgcgttttgtttta

SEQ ID NO: 10952 - DNA, 22 bp, Artificial Sequence
  bisulfite treated nucleic acid for analysis of methylation status of SEQ ID NO: 27
ttcggtgtagtaaatcggaaag

SEQ ID NO: 10953 - DNA, 21 bp, Artificial Sequence
  bisulfite treated nucleic acid for analysis of methylation status of SEQ ID NO: 27
aacctcttcgtaaaaaccgac

SEQ ID NO: 10954 - DNA, 21 bp, Artificial Sequence
  bisulfite treated nucleic acid for analysis of methylation status of SEQ ID NO: 27
gtttaggaagtgttcgcgttt

SEQ ID NO: 10955 - DNA, 21 bp, Artificial Sequence
  bisulfite treated nucleic acid for analysis of methylation status of SEQ ID NO: 27
aaccttaaacgcgcaaaatta

SEQ ID NO: 10956 - DNA, 21 bp, Artificial Sequence
  bisulfite treated nucleic acid for analysis of methylation status of SEQ ID NO: 27
ccttaaacgcgcaaaattaac

SEQ ID NO: 10957 - DNA, 21 bp, Artificial Sequence
  bisulfite treated nucleic acid for analysis of methylation status of SEQ ID NO: 27
cggaaaatgtcgaaggtagtc

SEQ ID NO: 10958 - DNA, 21 bp, Artificial Sequence
  bisulfite treated nucleic acid for analysis of methylation status of SEQ ID NO: 27
caaacctcttcgtaaaaaccg

SEQ ID NO: 10959 - DNA, 22 bp, Artificial Sequence
  bisulfite treated nucleic acid for analysis of methylation status of SEQ ID NO: 27
tcaaactaatcgactttttccg

SEQ ID NO: 10960 - DNA, 21 bp, Artificial Sequence
  bisulfite treated nucleic acid for analysis of methylation status of SEQ ID NO: 27
ggtcgagttttacgttcgttc

SEQ ID NO: 10961 - DNA, 27 bp, Artificial Sequence
  bisulfite treated nucleic acid for analysis of methylation status of SEQ ID NO: 27
ttcggttgggagtcgaagttcgaacgg

SEQ ID NO: 10962 - DNA, 21 bp, Artificial Sequence
  bisulfite treated nucleic acid for analysis of methylation status of SEQ ID NO: 27
aaaacgaccgaactattaccg

SEQ ID NO: 10963 - DNA, 21 bp, Artificial Sequence
  bisulfite treated nucleic acid for analysis of methylation status of SEQ ID NO: 27
tttaggtagcggtttttcgat

SEQ ID NO: 10964 - DNA, 34 bp, Artificial Sequence
  bisulfite treated nucleic acid for analysis of methylation status of SEQ ID NO: 27
gtcggggatatgggaattcggtaatcgttttcgt

SEQ ID NO: 10965 - DNA, 22 bp, Artificial Sequence
  bisulfite treated nucleic acid for analysis of methylation status of SEQ ID NO: 27
cggtgtagtaaatcggaaagtg

SEQ ID NO: 10966 - DNA, 21 bp, Artificial Sequence
  bisulfite treated nucleic acid for analysis of methylation status of SEQ ID NO: 27
agtgttcgcgttttgttttag

SEQ ID NO: 10967 - DNA, 22 bp, Artificial Sequence
  bisulfite treated nucleic acid for analysis of methylation status of SEQ ID NO: 27
gaacgaatacgaacttataccg

SEQ ID NO: 10968 - DNA, 22 bp, Artificial Sequence
  bisulfite treated nucleic acid for analysis of methylation status of SEQ ID NO: 27
cttcgtaaaaaccgacgactct

SEQ ID NO: 10969 - DNA, 22 bp, Artificial Sequence
  bisulfite treated nucleic acid for analysis of methylation status of SEQ ID NO: 27
gattttaggtagcggtttttcg

SEQ ID NO: 10970 - DNA, 22 bp, Artificial Sequence
  bisulfite treated nucleic acid for analysis of methylation status of SEQ ID NO: 27
ttttaggtagcggtttttcgat

SEQ ID NO: 10971 - DNA, 20 bp, Artificial Sequence
  bisulfite treated nucleic acid for analysis of methylation status of SEQ ID NO: 27
ttaaagagcggaaaatgtcg

SEQ ID NO: 10972 - DNA, 22 bp, Artificial Sequence
  bisulfite treated nucleic acid for analysis of methylation status of SEQ ID NO: 27
cttaatccgtctaaccctttcg

SEQ ID NO: 10973 - DNA, 22 bp, Artificial Sequence
  bisulfite treated nucleic acid for analysis of methylation status of SEQ ID NO: 27
tagttaattttgcgcgtttaag

SEQ ID NO: 10974 - DNA, 25 bp, Artificial Sequence
  bisulfite treated nucleic acid for analysis of methylation status of SEQ ID NO: 27
gtcgtggatcgcgtgtgtcgagtgt

SEQ ID NO: 10975 - DNA, 23 bp, Artificial Sequence
  bisulfite treated nucleic acid for analysis of methylation status of SEQ ID NO: 27
ccgaacgaatacgaacttatacc

SEQ ID NO: 10976 - DNA, 22 bp, Artificial Sequence
  nucleic acid for analysis of methylation status of SEQ ID NO: 27
cgtagttaattttgcgcgttta

SEQ ID NO: 10977 - DNA, 20 bp, Artificial Sequence
  bisulfite treated nucleic acid for analysis of methylation status of SEQ ID NO: 27
ctcttcgtaaaaaccgacga

SEQ ID NO: 10978 - DNA, 21 bp, Artificial Sequence
  bisulfite treated nucleic acid for analysis of methylation status of SEQ ID NO: 27
ttaatccgtctaaccctttcg

SEQ ID NO: 10979 - DNA, 20 bp, Artificial Sequence
  bisulfite treated nucleic acid for analysis of methylation status of SEQ ID NO: 27
atgtcgaaggtagtcgaacg

SEQ ID NO: 10980 - DNA, 21 bp, Artificial Sequence
  bisulfite treated nucleic acid for analysis of methylation status of SEQ ID NO: 27
attttaggtagcggtttttcg

SEQ ID NO: 10981 - DNA, 21 bp, Artificial Sequence
  bisulfite treated nucleic acid for analysis of methylation status of SEQ ID NO: 27
cgacttaccgaaactacaacg

SEQ ID NO: 10982 - DNA, 22 bp, Artificial Sequence
  bisulfite treated nucleic acid for analysis of methylation status of SEQ ID NO: 27
gcggaaggattacgagttttac

SEQ ID NO: 10983 - DNA, 23 bp, Artificial Sequence
  bisulfite treated nucleic acid for analysis of methylation status of SEQ ID NO: 27
gggtggttcggagatgcgacggg

SEQ ID NO: 10984 - DNA, 21 bp, Artificial Sequence
  bisulfite treated nucleic acid for analysis of methylation status of SEQ ID NO: 27
cgccgaaaacctcctataaat

SEQ ID NO: 10985 - DNA, 23 bp, Artificial Sequence
  bisulfite treated nucleic acid for analysis of methylation status of SEQ ID NO: 27
gaacgaatacgaacttataccgc

SEQ ID NO: 10986 - DNA, 21 bp, Artificial Sequence
  bisulfite treated nucleic acid for analysis of methylation status of SEQ ID NO: 27
aatgtcgaaggtagtcgaacg

SEQ ID NO: 10987 - DNA, 23 bp, Artificial Sequence
  bisulfite treated nucleic acid for analysis of methylation status of SEQ ID NO: 27
gtagttaattttgcgcgtttaag

SEQ ID NO: 10988 - DNA, 20 bp, Artificial Sequence
  bisulfite treated nucleic acid for analysis of methylation status of SEQ ID NO: 27
cccgaacgaatacgaactta

SEQ ID NO: 10989 - DNA, 20 bp, Artificial Sequence
  bisulfite treated nucleic acid for analysis of methylation status of SEQ ID NO: 27
aaggtagtcgaacggaaagg

SEQ ID NO: 10990 - DNA, 35 bp, Artificial Sequence
  bisulfite treated nucleic acid for analysis of methylation status of SEQ ID NO: 27
aattcgttttgttcggtggttggttggaggagata

SEQ ID NO: 10991 - DNA, 22 bp, Artificial Sequence
  bisulfite treated nucleic acid for analysis of methylation status of SEQ ID NO: 27
gttaattttgcgcgtttaaggt

SEQ ID NO: 10992 - DNA, 21 bp, Artificial Sequence
  bisulfite treated nucleic acid for analysis of methylation status of SEQ ID NO: 27
aaacctcttcgtaaaaaccga

SEQ ID NO: 10993 - DNA, 22 bp, Artificial Sequence
  bisulfite treated nucleic acid for analysis of methylation status of SEQ ID NO: 27
ttttaataacggtggaaatcgt

SEQ ID NO: 10994 - DNA, 30 bp, Artificial Sequence
  bisulfite treated nucleic acid for analysis of methylation status of SEQ ID NO: 27
ttcggtgtagtaaatcggaaagtgttgcgg

SEQ ID NO: 10995 - DNA, 21 bp, Artificial Sequence
  bisulfite treated nucleic acid for analysis of methylation status of SEQ ID NO: 27
cgaacacttcctaaacgaaca

SEQ ID NO: 10996 - DNA, 21 bp, Artificial Sequence
  bisulfite treated nucleic acid for analysis of methylation status of SEQ ID NO: 27
tagcggtttttcgattgtttt

SEQ ID NO: 10997 - DNA, 22 bp, Artificial Sequence
  bisulfite treated nucleic acid for analysis of methylation status of SEQ ID NO: 27
cgaacgaatacgaacttatacc

SEQ ID NO: 10998 - DNA, 20 bp, Artificial Sequence
  bisulfite treated nucleic acid for analysis of methylation status of SEQ ID NO: 27
tttaggaagtgttcgcgttt

SEQ ID NO: 10999 - DNA, 20 bp, Artificial Sequence
  bisulfite treated nucleic acid for analysis of methylation status of SEQ ID NO: 27
aaaccttaaacgcgcaaaat

SEQ ID NO: 11000 - DNA, 23 bp, Artificial Sequence
  bisulfite treated nucleic acid for analysis of methylation status of SEQ ID NO: 27
cgaacgaatacgaacttataccg

SEQ ID NO: 11001 - DNA, 20 bp, Artificial Sequence
  bisulfite treated nucleic acid for analysis of methylation status of SEQ ID NO: 27
aaatacgctcccaacgaaat

SEQ ID NO: 11002 - DNA, 22 bp, Artificial Sequence
  bisulfite treated nucleic acid for analysis of methylation status of SEQ ID NO: 27
attagagtcgtcggtttttacg

SEQ ID NO: 11003 - DNA, 33 bp, Artificial Sequence
  bisulfite treated nucleic acid for analysis of methylation status of SEQ ID NO: 27
gtgaaattgtacggttgggcgtcgtcgtcgttt

SEQ ID NO: 11004 - DNA, 21 bp, Artificial Sequence
  bisulfite treated nucleic acid for analysis of methylation status of SEQ ID NO: 27
ttaattttgcgcgtttaaggt

SEQ ID NO: 11005 - DNA, 21 bp, Artificial Sequence
  bisulfite treated nucleic acid for analysis of methylation status of SEQ ID NO: 27
taattttgcgcgtttaaggtt

SEQ ID NO: 11006 - DNA, 23 bp, Artificial Sequence
  bisulfite treated nucleic acid for analysis of methylation status of SEQ ID NO: 27
cttcgtaaaaaccgacgactcta

SEQ ID NO: 11007 - DNA, 21 bp, Artificial Sequence
  bisulfite treated nucleic acid for analysis of methylation status of SEQ ID NO: 27
gtcgagttttacgttcgttcg

SEQ ID NO: 11008 - DNA, 35 bp, Artificial Sequence
  bisulfite treated nucleic acid for analysis of methylation status of SEQ ID NO: 27
gtcgaagttcgaacggagttaattacggacgtcgt

SEQ ID NO: 11009 - DNA, 22 bp, Artificial Sequence
  bisulfite treated nucleic acid for analysis of methylation status of SEQ ID NO: 27
tccgatttactacaccgaaaac

SEQ ID NO: 11010 - DNA, 19 bp, Artificial Sequence
  bisulfite treated nucleic acid for analysis of methylation status of SEQ ID NO: 27
gttgacgattcgagggttc

SEQ ID NO: 11011 - DNA, 37 bp, Artificial Sequence
  bisulfite treated nucleic acid for analysis of methylation status of SEQ ID NO: 27
ggtcgtttttaataacggtggaaatcgtatataggga

SEQ ID NO: 11012 - DNA, 21 bp, Artificial Sequence
  bisulfite treated nucleic acid for analysis of methylation status of SEQ ID NO: 27
taaagagcggaaaatgtcgaa

SEQ ID NO: 11013 - DNA, 21 bp, Artificial Sequence
  bisulfite treated nucleic acid for analysis of methylation status of SEQ ID NO: 27
aaaatacgctcccaacgaaat

SEQ ID NO: 11014 - DNA, 22 bp, Artificial Sequence
  bisulfite treated nucleic acid for analysis of methylation status of SEQ ID NO: 27
gtcggtttttacgaagaggttt

SEQ ID NO: 11015 - DNA, 21 bp, Artificial Sequence
  bisulfite treated nucleic acid for analysis of methylation status of SEQ ID NO: 27
taggaagtgttcgcgttttgt

SEQ ID NO: 11016 - DNA, 23 bp, Artificial Sequence
  bisulfite treated nucleic acid for analysis of methylation status of SEQ ID NO: 27
aacgtaaaactcgtaatccttcc

SEQ ID NO: 11017 - DNA, 21 bp, Artificial Sequence
  bisulfite treated nucleic acid for analysis of methylation status of SEQ ID NO: 27
tacgtgaaacgggggtaaata

SEQ ID NO: 11018 - DNA, 36 bp, Artificial Sequence
  bisulfite treated nucleic acid for analysis of methylation status of SEQ ID NO: 27
ggatttttttttcgagttaatgaagaagggaagcgg

SEQ ID NO: 11019 - DNA, 21 bp, Artificial Sequence
  bisulfite treated nucleic acid for analysis of methylation status of SEQ ID NO: 27
tttaggaagtgttcgcgtttt

SEQ ID NO: 11020 - DNA, 20 bp, Artificial Sequence
  bisulfite treated nucleic acid for analysis of methylation status of SEQ ID NO: 27
gaactattaccgcgaacgaa

SEQ ID NO: 11021 - DNA, 21 bp, Artificial Sequence
  bisulfite treated nucleic acid for analysis of methylation status of SEQ ID NO: 27
gtagcggtttttcgattgttt

SEQ ID NO: 11022 - DNA, 20 bp, Artificial Sequence
  bisulfite treated nucleic acid for analysis of methylation status of SEQ ID NO: 27
tcgagttttacgttcgttcg

SEQ ID NO: 11023 - DNA, 20 bp, Artificial Sequence
  bisulfite treated nucleic acid for analysis of methylation status of SEQ ID NO: 27
cgtaataggcgtttgggaat

SEQ ID NO: 11024 - DNA, 37 bp, Artificial Sequence
  bisulfite treated nucleic acid for analysis of methylation status of SEQ ID NO: 27
ttcgttcgtttcggttgggagtcgaagttcgaacgga

SEQ ID NO: 11025 - DNA, 23 bp, Artificial Sequence
  bisulfite treated nucleic acid for analysis of methylation status of SEQ ID NO: 27
tttctcttcaaacgtaaaactcg

SEQ ID NO: 11026 - DNA, 21 bp, Artificial Sequence
  bisulfite treated nucleic acid for analysis of methylation status of SEQ ID NO: 27
taggtagcggtttttcgattg

SEQ ID NO: 11027 - DNA, 20 bp, Artificial Sequence
  bisulfite treated nucleic acid for analysis of methylation status of SEQ ID NO: 27
ttcgtttaggaagtgttcgc

SEQ ID NO: 11028 - DNA, 21 bp, Artificial Sequence
  bisulfite treated nucleic acid for analysis of methylation status of SEQ ID NO: 27
aaatgtcgaaggtagtcgaac

SEQ ID NO: 11029 - DNA, 19 bp, Artificial Sequence
  bisulfite treated nucleic acid for analysis of methylation status of SEQ ID NO: 27
agagcggaaaatgtcgaag

SEQ ID NO: 11030 - DNA, 21 bp, Artificial Sequence
  bisulfite treated nucleic acid for analysis of methylation status of SEQ ID NO: 27
ggaaaatgtcgaaggtagtcg

SEQ ID NO: 11031 - DNA, 22 bp, Artificial Sequence
  bisulfite treated nucleic acid for analysis of methylation status of SEQ ID NO: 27
ttagagtcgtcggtttttacga

SEQ ID NO: 11032 - DNA, 22 bp, Artificial Sequence
  bisulfite treated nucleic acid for analysis of methylation status of SEQ ID NO: 27
tagagtcgtcggtttttacgaa

SEQ ID NO: 11033 - DNA, 20 bp, Artificial Sequence
  bisulfite treated nucleic acid for analysis of methylation status of SEQ ID NO: 27
accaatcacaaaacgacgac

SEQ ID NO: 11034 - DNA, 21 bp, Artificial Sequence
  bisulfite treated nucleic acid for analysis of methylation status of SEQ ID NO: 27
tcggtttttacgaagaggttt

SEQ ID NO: 11035 - DNA, 29 bp, Artificial Sequence
  bisulfite treated nucleic acid for analysis of methylation status of SEQ ID NO: 27
gacgttggtgaaattgtacggttgggcgt

SEQ ID NO: 11036 - DNA, 19 bp, Artificial Sequence
  bisulfite treated nucleic acid for analysis of methylation status of SEQ ID NO: 27
ccgcctctaactaactcgc

SEQ ID NO: 11037 - DNA, 22 bp, Artificial Sequence
  bisulfite treated nucleic acid for analysis of methylation status of SEQ ID NO: 27
acgttgtagtttcggtaagtcg

SEQ ID NO: 11038 - DNA, 23 bp, Artificial Sequence
  bisulfite treated nucleic acid for analysis of methylation status of SEQ ID NO: 27
ttcggcgggttgacggtaggggt

SEQ ID NO: 11039 - DNA, 21 bp, Artificial Sequence
  bisulfite treated nucleic acid for analysis of methylation status of SEQ ID NO: 27
agttaattttgcgcgtttaag

SEQ ID NO: 11040 - DNA, 19 bp, Artificial Sequence
  bisulfite treated nucleic acid for analysis of methylation status of SEQ ID NO: 27
aaaaccttaaacgcgcaaa

SEQ ID NO: 11041 - DNA, 19 bp, Artificial Sequence
  bisulfite treated nucleic acid for analysis of methylation status of SEQ ID NO: 27
aaaaaccttaaacgcgcaa

SEQ ID NO: 11042 - DNA, 22 bp, Artificial Sequence
  bisulfite treated nucleic acid for analysis of methylation status of SEQ ID NO: 27
acgtaaaactcgtaatccttcc

SEQ ID NO: 11043 - DNA, 19 bp, Artificial Sequence
  bisulfite treated nucleic acid for analysis of methylation status of SEQ ID NO: 27
aaaaatacgctcccaacga

SEQ ID NO: 11044 - DNA, 19 bp, Artificial Sequence
  bisulfite treated nucleic acid for analysis of methylation status of SEQ ID NO: 27
gtcgaaggtagtcgaacgg

SEQ ID NO: 11045 - DNA, 23 bp, Artificial Sequence
  bisulfite treated nucleic acid for analysis of methylation status of SEQ ID NO: 27
ttcaaacgtaaaactcgtaatcc

SEQ ID NO: 11046 - DNA, 22 bp, Artificial Sequence
  bisulfite treated nucleic acid for analysis of methylation status of SEQ ID NO: 27
ttctcttcaaacgtaaaactcg

SEQ ID NO: 11047 - DNA, 20 bp, Artificial Sequence
  bisulfite treated nucleic acid for analysis of methylation status of SEQ ID NO: 27
agcggtttttcgattgtttt

SEQ ID NO: 11048 - DNA, 19 bp, Artificial Sequence
  bisulfite treated nucleic acid for analysis of methylation status of SEQ ID NO: 27
cccgcctctaactaactcg

SEQ ID NO: 11049 - DNA, 20 bp, Artificial Sequence
  bisulfite treated nucleic acid for analysis of methylation status of SEQ ID NO: 27
ttaggaagtgttcgcgtttt

SEQ ID NO: 11050 - DNA, 19 bp, Artificial Sequence
  bisulfite treated nucleic acid for analysis of methylation status of SEQ ID NO: 27
aagagcggaaaatgtcgaa

SEQ ID NO: 11051 - DNA, 20 bp, Artificial Sequence
  bisulfite treated nucleic acid for analysis of methylation status of SEQ ID NO: 27
gaaggtagtcgaacggaaag

SEQ ID NO: 11052 - DNA, 21 bp, Artificial Sequence
  bisulfite treated nucleic acid for analysis of methylation status of SEQ ID NO: 27
aaccaatcacaaaacgacgac

SEQ ID NO: 11053 - DNA, 20 bp, Artificial Sequence
  bisulfite treated nucleic acid for analysis of methylation status of SEQ ID NO: 27
attttgcgcgtttaaggttt

SEQ ID NO: 11054 - DNA, 20 bp, Artificial Sequence
  nucleic acid for analysis of methylation status of SEQ ID NO: 27
aattttgcgcgtttaaggtt

SEQ ID NO: 11055 - DNA, 21 bp, Artificial Sequence
  bisulfite treated nucleic acid for analysis of methylation status of SEQ ID NO: 27
catatccccgacgaataaaaa

SEQ ID NO: 11056 - DNA, 21 bp, Artificial Sequence
  bisulfite treated nucleic acid for analysis of methylation status of SEQ ID NO: 27
cgttaggagtagttgtaggcg

SEQ ID NO: 11057 - DNA, 22 bp, Artificial Sequence
  bisulfite treated nucleic acid for analysis of methylation status of SEQ ID NO: 27
agcggttatggcggtggcggag

SEQ ID NO: 11058 - DNA, 22 bp, Artificial Sequence
  bisulfite treated nucleic acid for analysis of methylation status of SEQ ID NO: 27
tttaataacggtggaaatcgta

SEQ ID NO: 11059 - DNA, 19 bp, Artificial Sequence
  nucleic acid for analysis of methylation status of SEQ ID NO: 27
tgtcgaaggtagtcgaacg

SEQ ID NO: 11060 - DNA, 23 bp, Artificial Sequence
  bisulfite treated nucleic acid for analysis of methylation status of SEQ ID NO: 27
ctcaaactaatcgactttttccg

SEQ ID NO: 11061 - DNA, 21 bp, Artificial Sequence
  bisulfite treated nucleic acid for analysis of methylation status of SEQ ID NO: 27
caaactaatcgactttttccg

SEQ ID NO: 11062 - DNA, 23 bp, Artificial Sequence
  bisulfite treated nucleic acid for analysis of methylation status of SEQ ID NO: 27
tcaaacgtaaaactcgtaatcct

SEQ ID NO: 11063 - DNA, 20 bp, Artificial Sequence
  bisulfite treated nucleic acid for analysis of methylation status of SEQ ID NO: 27
cggaaaatgtcgaaggtagt

SEQ ID NO: 11064 - DNA, 22 bp, Artificial Sequence
  bisulfite treated nucleic acid for analysis of methylation status of SEQ ID NO: 27
ctcttcgtaaaaaccgacgact

SEQ ID NO: 11065 - DNA, 20 bp, Artificial Sequence
  bisulfite treated nucleic acid for analysis of methylation status of SEQ ID NO: 27
accgaactattaccgcgaac

SEQ ID NO: 11066 - DNA, 21 bp, Artificial Sequence
  bisulfite treated nucleic acid for analysis of methylation status of SEQ ID NO: 27
ttaggtagcggtttttcgatt

SEQ ID NO: 11067 - DNA, 20 bp, Artificial Sequence
  bisulfite treated nucleic acid for analysis of methylation status of SEQ ID NO: 27
aacgaccgaactattaccgc

SEQ ID NO: 11068 - DNA, 20 bp, Artificial Sequence
  bisulfite treated nucleic acid for analysis of methylation status of SEQ ID NO: 27
gcggaaaatgtcgaaggtag

SEQ ID NO: 11069 - DNA, 20 bp, Artificial Sequence
  bisulfite treated nucleic acid for analysis of methylation status of SEQ ID NO: 27
agcggaaaatgtcgaaggta

SEQ ID NO: 11070 - DNA, 20 bp, Artificial Sequence
  bisulfite treated nucleic acid for analysis of methylation status of SEQ ID NO: 27
cgcgacttaccgaaactaca

SEQ ID NO: 11071 - DNA, 21 bp, Artificial Sequence
  bisulfite treated nucleic acid for analysis of methylation status of SEQ ID NO: 27
tcttcgtaaaaaccgacgact

SEQ ID NO: 11072 - DNA, 20 bp, Artificial Sequence
  bisulfite treated nucleic acid for analysis of methylation status of SEQ ID NO: 27
aaacgaccgaactattaccg

SEQ ID NO: 11073 - DNA, 23 bp, Artificial Sequence
  bisulfite treated nucleic acid for analysis of methylation status of SEQ ID NO: 27
gaaaatgtcgaaggtagtcgaac

SEQ ID NO: 11074 - DNA, 19 bp, Artificial Sequence
  bisulfite treated nucleic acid for analysis of methylation status of SEQ ID NO: 27
gtttcgtcgttcgcgtaat

SEQ ID NO: 11075 - DNA, 21 bp, Artificial Sequence
  bisulfite treated nucleic acid for analysis of methylation status of SEQ ID NO: 27
gtgttcgcgttttgttttagt

SEQ ID NO: 11076 - DNA, 21 bp, Artificial Sequence
  bisulfite treated nucleic acid for analysis of methylation status of SEQ ID NO: 27
cggtttttacgaagaggtttg

SEQ ID NO: 11077 - DNA, 20 bp, Artificial Sequence
  bisulfite treated nucleic acid for analysis of methylation status of SEQ ID NO: 27
aaagagcggaaaatgtcgaa

SEQ ID NO: 11078 - DNA, 19 bp, Artificial Sequence
  bisulfite treated nucleic acid for analysis of methylation status of SEQ ID NO: 27
ccgaactattaccgcgaac

SEQ ID NO: 11079 - DNA, 19 bp, Artificial Sequence
  bisulfite treated nucleic acid for analysis of methylation status of SEQ ID NO: 27
aatacgctcccaacgaaat

SEQ ID NO: 11080 - DNA, 19 bp, Artificial Sequence
  bisulfite treated nucleic acid for analysis of methylation status of SEQ ID NO: 27
ggaagtgttcgcgttttgt

SEQ ID NO: 11081 - DNA, 22 bp, Artificial Sequence
  bisulfite treated nucleic acid for analysis of methylation status of SEQ ID NO: 27
tctcttcaaacgtaaaactcgt

SEQ ID NO: 11082 - DNA, 19 bp, Artificial Sequence
  bisulfite treated nucleic acid for analysis of methylation status of SEQ ID NO: 27
gcggtttttcgattgtttt

SEQ ID NO: 11083 - DNA, 19 bp, Artificial Sequence
  bisulfite treated nucleic acid for analysis of methylation status of SEQ ID NO: 27
cgaaggtagtcgaacggaa

SEQ ID NO: 11084 - DNA, 20 bp, Artificial Sequence
  bisulfite treated nucleic acid for analysis of methylation status of SEQ ID NO: 27
aggaagtgttcgcgttttgt

SEQ ID NO: 11085 - DNA, 19 bp, Artificial Sequence
  bisulfite treated nucleic acid for analysis of methylation status of SEQ ID NO: 27
acgaccgaactattaccgc

SEQ ID NO: 11086 - DNA, 20 bp, Artificial Sequence
  bisulfite treated nucleic acid for analysis of methylation status of SEQ ID NO: 27
acgtgaaacgggggtaaata

SEQ ID NO: 11087 - DNA, 19 bp, Artificial Sequence
  bisulfite treated nucleic acid for analysis of methylation status of SEQ ID NO: 27
cggggcgtagttaattttg

SEQ ID NO: 11088 - DNA, 23 bp, Artificial Sequence
  bisulfite treated nucleic acid for analysis of methylation status of SEQ ID NO: 27
aattagagtcgtcggtttttacg

SEQ ID NO: 11089 - DNA, 22 bp, Artificial Sequence
  bisulfite treated nucleic acid for analysis of methylation status of SEQ ID NO: 27
agtcgtcggtttttacgaagag

SEQ ID NO: 11090 - DNA, 22 bp, Artificial Sequence
  bisulfite treated nucleic acid for analysis of methylation status of SEQ ID NO: 27
agagtcgtcggtttttacgaag

SEQ ID NO: 11091 - DNA, 20 bp, Artificial Sequence
  bisulfite treated nucleic acid for analysis of methylation status of SEQ ID NO: 27
gtgttcgcgttttgttttag

SEQ ID NO: 11092 - DNA, 19 bp, Artificial Sequence
  bisulfite treated nucleic acid for analysis of methylation status of SEQ ID NO: 27
cgagttttacgttcgttcg

SEQ ID NO: 11093 - DNA, 21 bp, Artificial Sequence
  bisulfite treated nucleic acid for analysis of methylation status of SEQ ID NO: 27
cgtacaatttcaccaacgtct

SEQ ID NO: 11094 - DNA, 19 bp, Artificial Sequence
  bisulfite treated nucleic acid for analysis of methylation status of SEQ ID NO: 27
attcgttttgttcggtggt

SEQ ID NO: 11095 - DNA, 41 bp, Artificial Sequence
  bisulfite treated nucleic acid for analysis of methylation status of SEQ ID NO: 27
gtcgtcggtttttacgaagaggtttgaagagttgaggacgg

SEQ ID NO: 11096-11375 - skipped (280 entries)

SEQ ID NO: 11376 - DNA, 22 bp, Artificial Sequence
  bisulfite treated nucleic acid for analysis of methylation status of SEQ ID NO: 40
gacggttcggagtaagtttaga

SEQ ID NO: 11377 - DNA, 22 bp, Artificial Sequence
  bisulfite treated nucleic acid for analysis of methylation status of SEQ ID NO: 40
taatacgtcccttcgactccta

SEQ ID NO: 11378 - DNA, 33 bp, Artificial Sequence
  bisulfite treated nucleic acid for analysis of methylation status of SEQ ID NO: 40
ggcgatagagggaaaaagggtcgagttagtcgt

SEQ ID NO: 11379 - DNA, 22 bp, Artificial Sequence
  bisulfite treated nucleic acid for analysis of methylation status of SEQ ID NO: 40
aatacgtcccttcgactcctat

SEQ ID NO: 11380 - DNA, 22 bp, Artificial Sequence
  bisulfite treated nucleic acid for analysis of methylation status of SEQ ID NO: 40
gtaatacgtcccttcgactcct

SEQ ID NO: 11381 - DNA, 22 bp, Artificial Sequence
  bisulfite treated nucleic acid for analysis of methylation status of SEQ ID NO: 40
ggacggttcggagtaagtttag

SEQ ID NO: 11382 - DNA, 22 bp, Artificial Sequence
  bisulfite treated nucleic acid for analysis of methylation status of SEQ ID NO: 40
acggttcggagtaagtttagag

SEQ ID NO: 11383 - DNA, 22 bp, Artificial Sequence
  bisulfite treated nucleic acid for analysis of methylation status of SEQ ID NO: 40
cggttcggagtaagtttagagg

SEQ ID NO: 11384 - DNA, 20 bp, Artificial Sequence
  bisulfite treated nucleic acid for analysis of methylation status of SEQ ID NO: 40
ggacggttcggagtaagttt

SEQ ID NO: 11385 - DNA, 23 bp, Artificial Sequence
  bisulfite treated nucleic acid for analysis of methylation status of SEQ ID NO: 40
taatacgtcccttcgactcctat

SEQ ID NO: 11386 - DNA, 21 bp, Artificial Sequence
  bisulfite treated nucleic acid for analysis of methylation status of SEQ ID NO: 40
aatacgtcccttcgactccta

SEQ ID NO: 11387 - DNA, 24 bp, Artificial Sequence
  bisulfite treated nucleic acid for analysis of methylation status of SEQ ID NO: 40
tcgattcgtaaattgttgtatttg

SEQ ID NO: 11388 - DNA, 22 bp, Artificial Sequence
  bisulfite treated nucleic acid for analysis of methylation status of SEQ ID NO: 40
aacgactaactcgacccttttt

SEQ ID NO: 11389 - DNA, 38 bp, Artificial Sequence
  bisulfite treated nucleic acid for analysis of methylation status of SEQ ID NO: 40
tttcgagatttcggggagttagtttgttgggagagcgg

SEQ ID NO: 11390 - DNA, 22 bp, Artificial Sequence
  bisulfite treated nucleic acid for analysis of methylation status of SEQ ID NO: 40
aaacgactaactcgaccctttt

SEQ ID NO: 11391 - DNA, 21 bp, Artificial Sequence
  bisulfite treated nucleic acid for analysis of methylation status of SEQ ID NO: 40
atacgtcccttcgactcctat

SEQ ID NO: 11392 - DNA, 22 bp, Artificial Sequence
  bisulfite treated nucleic acid for analysis of methylation status of SEQ ID NO: 40
tctaaacttactccgaaccgtc

SEQ ID NO: 11393 - DNA, 31 bp, Artificial Sequence
  bisulfite treated nucleic acid for analysis of methylation status of SEQ ID NO: 40
tttcgagatttcggggagttagtttgttggg

SEQ ID NO: 11394 - DNA, 21 bp, Artificial Sequence
  bisulfite treated nucleic acid for analysis of methylation status of SEQ ID NO: 40
cgtcccttcgactcctataca

SEQ ID NO: 11395 - DNA, 21 bp, Artificial Sequence
  bisulfite treated nucleic acid for analysis of methylation status of SEQ ID NO: 40
gtaatacgtcccttcgactcc

SEQ ID NO: 11396 - DNA, 22 bp, Artificial Sequence
  bisulfite treated nucleic acid for analysis of methylation status of SEQ ID NO: 40
tacgtcccttcgactcctatac

SEQ ID NO: 11397 - DNA, 23 bp, Artificial Sequence
  bisulfite treated nucleic acid for analysis of methylation status of SEQ ID NO: 40
cgattcgtaaattgttgtatttg

SEQ ID NO: 11398 - DNA, 22 bp, Artificial Sequence
  bisulfite treated nucleic acid for analysis of methylation status of SEQ ID NO: 40
acgactaactcgaccctttttc

SEQ ID NO: 11399 - DNA, 21 bp, Artificial Sequence
  bisulfite treated nucleic acid for analysis of methylation status of SEQ ID NO: 40
cgactaactcgaccctttttc

SEQ ID NO: 11400 - DNA, 22 bp, Artificial Sequence
  bisulfite treated nucleic acid for analysis of methylation status of SEQ ID NO: 40
taaaacgactaactcgaccctt

SEQ ID NO: 11401 - DNA, 24 bp, Artificial Sequence
  bisulfite treated nucleic acid for analysis of methylation status of SEQ ID NO: 40
ttcgattcgtaaattgttgtattt

SEQ ID NO: 11402 - DNA, 22 bp, Artificial Sequence
  bisulfite treated nucleic acid for analysis of methylation status of SEQ ID NO: 40
cctctaaacttactccgaaccg

SEQ ID NO: 11403 - DNA, 23 bp, Artificial Sequence
  bisulfite treated nucleic acid for analysis of methylation status of SEQ ID NO: 40
ctctaaacttactccgaaccgtc

SEQ ID NO: 11404 - DNA, 21 bp, Artificial Sequence
  bisulfite treated nucleic acid for analysis of methylation status of SEQ ID NO: 40
acgtcccttcgactcctatac

SEQ ID NO: 11405 - DNA, 22 bp, Artificial Sequence
  bisulfite treated nucleic acid for analysis of methylation status of SEQ ID NO: 40
ataggagtcgaagggacgtatt

SEQ ID NO: 11406 - DNA, 20 bp, Artificial Sequence
  bisulfite treated nucleic acid for analysis of methylation status of SEQ ID NO: 40
acaactccgaacgacgactt

SEQ ID NO: 11407 - DNA, 33 bp, Artificial Sequence
  bisulfite treated nucleic acid for analysis of methylation status of SEQ ID NO: 40
ttttagcgatagttaacgttttttgtagcgcgg

SEQ ID NO: 11408 - DNA, 25 bp, Artificial Sequence
  bisulfite treated nucleic acid for analysis of methylation status of SEQ ID NO: 40
attcgattcgtaaattgttgtattt

SEQ ID NO: 11409 - DNA, 19 bp, Artificial Sequence
  bisulfite treated nucleic acid for analysis of methylation status of SEQ ID NO: 40
caactccgaacgacgactt

SEQ ID NO: 11410 - DNA, 20 bp, Artificial Sequence
  bisulfite treated nucleic acid for analysis of methylation status of SEQ ID NO: 40
tacgtcccttcgactcctat

SEQ ID NO: 11411 - DNA, 21 bp, Artificial Sequence
  bisulfite treated nucleic acid for analysis of methylation status of SEQ ID NO: 40
aaaacgactaactcgaccctt

SEQ ID NO: 11412 - DNA, 25 bp, Artificial Sequence
  bisulfite treated nucleic acid for analysis of methylation status of SEQ ID NO: 40
cgactcctatacaacactaaaacga

SEQ ID NO: 11413 - DNA, 30 bp, Artificial Sequence
  bisulfite treated nucleic acid for analysis of methylation status of SEQ ID NO: 40
ggcgatagagggaaaaagggtcgagttagt

SEQ ID NO: 11414 - DNA, 22 bp, Artificial Sequence
  bisulfite treated nucleic acid for analysis of methylation status of SEQ ID NO: 40
gtataggagtcgaagggacgta

SEQ ID NO: 11415 - DNA, 19 bp, Artificial Sequence
  bisulfite treated nucleic acid for analysis of methylation status of SEQ ID NO: 40
aacaactccgaacgacgac

SEQ ID NO: 11416 - DNA, 19 bp, Artificial Sequence
  bisulfite treated nucleic acid for analysis of methylation status of SEQ ID NO: 40
aaacaactccgaacgacga

SEQ ID NO: 11417 - DNA, 18 bp, Artificial Sequence
  bisulfite treated nucleic acid for analysis of methylation status of SEQ ID NO: 40
aacaactccgaacgacga

SEQ ID NO: 11418 - DNA, 21 bp, Artificial Sequence
  bisulfite treated nucleic acid for analysis of methylation status of SEQ ID NO: 40
acgctacgccaacacttattt

SEQ ID NO: 11419 - DNA, 21 bp, Artificial Sequence
  bisulfite treated nucleic acid for analysis of methylation status of SEQ ID NO: 40
gagtcgggtttcgtttttatc

SEQ ID NO: 11420 - DNA, 31 bp, Artificial Sequence
  bisulfite treated nucleic acid for analysis of methylation status of SEQ ID NO: 40
atcgcgcgttaacgtttgtttagtggttttg

SEQ ID NO: 11421 - DNA, 20 bp, Artificial Sequence
  bisulfite treated nucleic acid for analysis of methylation status of SEQ ID NO: 40
cgctacgccaacacttattt

SEQ ID NO: 11422 - DNA, 20 bp, Artificial Sequence
  bisulfite treated nucleic acid for analysis of methylation status of SEQ ID NO: 40
cacgctacgccaacacttat

SEQ ID NO: 11423 - DNA, 20 bp, Artificial Sequence
  bisulfite treated nucleic acid for analysis of methylation status of SEQ ID NO: 40
ggtttcgtttttatcgggtc

SEQ ID NO: 11424 - DNA, 21 bp, Artificial Sequence
  bisulfite treated nucleic acid for analysis of methylation status of SEQ ID NO: 40
ccgactcgcaaactattacat

SEQ ID NO: 11425 - DNA, 20 bp, Artificial Sequence
  bisulfite treated nucleic acid for analysis of methylation status of SEQ ID NO: 40
gagcggttagttcggttttt

SEQ ID NO: 11426 - DNA, 24 bp, Artificial Sequence
  bisulfite treated nucleic acid for analysis of methylation status of SEQ ID NO: 40
ttcgggatttcggagggggcgttg

SEQ ID NO: 11427 - DNA, 21 bp, Artificial Sequence
  bisulfite treated nucleic acid for analysis of methylation status of SEQ ID NO: 40
acccgactcgcaaactattac

SEQ ID NO: 11428 - DNA, 20 bp, Artificial Sequence
  bisulfite treated nucleic acid for analysis of methylation status of SEQ ID NO: 40
ggtttgtttcggatcgtttc

SEQ ID NO: 11429 - DNA, 22 bp, Artificial Sequence
  bisulfite treated nucleic acid for analysis of methylation status of SEQ ID NO: 40
aacccgactcgcaaactattac

SEQ ID NO: 11430 - DNA, 20 bp, Artificial Sequence
  bisulfite treated nucleic acid for analysis of methylation status of SEQ ID NO: 40
cccgactcgcaaactattac

SEQ ID NO: 11431 - DNA, 20 bp, Artificial Sequence
  bisulfite treated nucleic acid for analysis of methylation status of SEQ ID NO: 40
gtttcgtttttatcgggtcg

SEQ ID NO: 11432 - DNA, 20 bp, Artificial Sequence
  bisulfite treated nucleic acid for analysis of methylation status of SEQ ID NO: 40
gtcgggtttcgtttttatcg

SEQ ID NO: 11433 - DNA, 19 bp, Artificial Sequence
  bisulfite treated nucleic acid for analysis of methylation status of SEQ ID NO: 40
tagtttgcgagtcgggttt

SEQ ID NO: 11434 - DNA, 21 bp, Artificial Sequence
  bisulfite treated nucleic acid for analysis of methylation status of SEQ ID NO: 41
cgcgttattttagtagggttc

SEQ ID NO: 11435 - DNA, 22 bp, Artificial Sequence
  bisulfite treated nucleic acid for analysis of methylation status of SEQ ID NO: 41
attaaaactcgaaacgacaaac

SEQ ID NO: 11436 - DNA, 17 bp, Artificial Sequence
  bisulfite treated nucleic acid for analysis of methylation status of SEQ ID NO: 41
tgtttcgtcgcggtcgt

SEQ ID NO: 11437 - DNA, 17 bp, Artificial Sequence
  bisulfite treated nucleic acid for analysis of methylation status of SEQ ID NO: 41
taggtgaaaggtgaggt

SEQ ID NO: 11438 - DNA, 20 bp, Artificial Sequence
  bisulfite treated nucleic acid for analysis of methylation status of SEQ ID NO: 41
gagcgtttgtacggtttaag

SEQ ID NO: 11439 - DNA, 22 bp, Artificial Sequence
  bisulfite treated nucleic acid for analysis of methylation status of SEQ ID NO: 41
atattcttcgctaacgtcaatc

SEQ ID NO: 11440 - DNA, 16 bp, Artificial Sequence
  bisulfite treated nucleic acid for analysis of methylation status of SEQ ID NO: 41
tttcggcgtgtcgtta

SEQ ID NO: 11441 - DNA, 18 bp, Artificial Sequence
  bisulfite treated nucleic acid for analysis of methylation status of SEQ ID NO: 41
gttttggggaatataggg

SEQ ID NO: 11442 - DNA, 22 bp, Artificial Sequence
  bisulfite treated nucleic acid for analysis of methylation status of SEQ ID NO: 41
tcgcgttattttagtagggttc

SEQ ID NO: 11443 - DNA, 20 bp, Artificial Sequence
  bisulfite treated nucleic acid for analysis of methylation status of SEQ ID NO: 41
agcgtttgtacggtttaaga

SEQ ID NO: 11444 - DNA, 22 bp, Artificial Sequence
  bisulfite treated nucleic acid for analysis of methylation status of SEQ ID NO: 41
taacgtcaatcgaaactatcct

SEQ ID NO: 11445 - DNA, 22 bp, Artificial Sequence
  bisulfite treated nucleic acid for analysis of methylation status of SEQ ID NO: 41
ctaacgtcaatcgaaactatcc

SEQ ID NO: 11446 - DNA, 22 bp, Artificial Sequence
  bisulfite treated nucleic acid for analysis of methylation status of SEQ ID NO: 41
aacgtcaatcgaaactatccta

SEQ ID NO: 11447 - DNA, 22 bp, Artificial Sequence
  bisulfite treated nucleic acid for analysis of methylation status of SEQ ID NO: 41
cgttattttagtagggttcgta

SEQ ID NO: 11448 - DNA, 21 bp, Artificial Sequence
  bisulfite treated nucleic acid for analysis of methylation status of SEQ ID NO: 41
gattaaaactcgaaacgacaa

SEQ ID NO: 11449 - DNA, 22 bp, Artificial Sequence
  bisulfite treated nucleic acid for analysis of methylation status of SEQ ID NO: 41
gcgttattttagtagggttcgt

SEQ ID NO: 11450 - DNA, 21 bp, Artificial Sequence
  bisulfite treated nucleic acid for analysis of methylation status of SEQ ID NO: 41
agcgtttgtacggtttaagat

SEQ ID NO: 11451 - DNA, 22 bp, Artificial Sequence
  bisulfite treated nucleic acid for analysis of methylation status of SEQ ID NO: 41
catattcttcgctaacgtcaat

SEQ ID NO: 11452 - DNA, 22 bp, Artificial Sequence
  bisulfite treated nucleic acid for analysis of methylation status of SEQ ID NO: 41
cgtagcgttggaagtagtattg

SEQ ID NO: 11453 - DNA, 21 bp, Artificial Sequence
  bisulfite treated nucleic acid for analysis of methylation status of SEQ ID NO: 41
cgacccgaactaatctaatct

SEQ ID NO: 11454 - DNA, 22 bp, Artificial Sequence
  bisulfite treated nucleic acid for analysis of methylation status of SEQ ID NO: 41
tacgggagttttatcgtttcgt

SEQ ID NO: 11455 - DNA, 21 bp, Artificial Sequence
  bisulfite treated nucleic acid for analysis of methylation status of SEQ ID NO: 41
aatagttagtaatgattaggg

SEQ ID NO: 11456 - DNA, 21 bp, Artificial Sequence
  bisulfite treated nucleic acid for analysis of methylation status of SEQ ID NO: 41
cgtttgtacggtttaagattg

SEQ ID NO: 11457 - DNA, 22 bp, Artificial Sequence
  bisulfite treated nucleic acid for analysis of methylation status of SEQ ID NO: 41
atacatattcttcgctaacgtc

SEQ ID NO: 11458 - DNA, 21 bp, Artificial Sequence
  bisulfite treated nucleic acid for analysis of methylation status of SEQ ID NO: 41
ttaaaactcgaaacgacaaac

SEQ ID NO: 11459 - DNA, 21 bp, Artificial Sequence
  bisulfite treated nucleic acid for analysis of methylation status of SEQ ID NO: 41
tcgcgttattttagtagggtt

SEQ ID NO: 11460 - DNA, 22 bp, Artificial Sequence
  bisulfite treated nucleic acid for analysis of methylation status of SEQ ID NO: 41
gattaaaactcgaaacgacaaa

SEQ ID NO: 11461 - DNA, 21 bp, Artificial Sequence
  bisulfite treated nucleic acid for analysis of methylation status of SEQ ID NO: 41
tattcttcgctaacgtcaatc

SEQ ID NO: 11462 - DNA, 22 bp, Artificial Sequence
  bisulfite treated nucleic acid for analysis of methylation status of SEQ ID NO: 41
acatattcttcgctaacgtcaa

SEQ ID NO: 11463 - DNA, 21 bp, Artificial Sequence
  bisulfite treated nucleic acid for analysis of methylation status of SEQ ID NO: 41
gcgtagcgttggaagtagtat

SEQ ID NO: 11464 - DNA, 20 bp, Artificial Sequence
  bisulfite treated nucleic acid for analysis of methylation status of SEQ ID NO: 41
gcgtttgtacggtttaagat

SEQ ID NO: 11465 - DNA, 21 bp, Artificial Sequence
  bisulfite treated nucleic acid for analysis of methylation status of SEQ ID NO: 41
aacgtcaatcgaaactatcct

SEQ ID NO: 11466 - DNA, 20 bp, Artificial Sequence
  bisulfite treated nucleic acid for analysis of methylation status of SEQ ID NO: 41
cgattaaaactcgaaacgac

SEQ ID NO: 11467 - DNA, 21 bp, Artificial Sequence
  bisulfite treated nucleic acid for analysis of methylation status of SEQ ID NO: 41
gcgtttgtacggtttaagatt

SEQ ID NO: 11468 - DNA, 20 bp, Artificial Sequence
  bisulfite treated nucleic acid for analysis of methylation status of SEQ ID NO: 41
tcgtattttggtttcgtgtt

SEQ ID NO: 11469 - DNA, 21 bp, Artificial Sequence
  bisulfite treated nucleic acid for analysis of methylation status of SEQ ID NO: 41
cgcgctactactcctaataca

SEQ ID NO: 11470 - DNA, 17 bp, Artificial Sequence
  bisulfite treated nucleic acid for analysis of methylation status of SEQ ID NO: 41
attcggtcgtttcgggg

SEQ ID NO: 11471 - DNA, 17 bp, Artificial Sequence
  bisulfite treated nucleic acid for analysis of methylation status of SEQ ID NO: 41
tagcgtagattcgggtt

SEQ ID NO: 11472 - DNA, 20 bp, Artificial Sequence
  bisulfite treated nucleic acid for analysis of methylation status of SEQ ID NO: 41
cgtattttggtttcgtgttt

SEQ ID NO: 11473 - DNA, 22 bp, Artificial Sequence
  bisulfite treated nucleic acid for analysis of methylation status of SEQ ID NO: 41
cgcgctactactcctaatacaa

SEQ ID NO: 11474 - DNA, 21 bp, Artificial Sequence
  bisulfite treated nucleic acid for analysis of methylation status of SEQ ID NO: 41
acgtcaatcgaaactatccta

SEQ ID NO: 11475 - DNA, 22 bp, Artificial Sequence
  bisulfite treated nucleic acid for analysis of methylation status of SEQ ID NO: 41
accgcgctactactcctaatac

SEQ ID NO: 11476 - DNA, 21 bp, Artificial Sequence
  bisulfite treated nucleic acid for analysis of methylation status of SEQ ID NO: 41
atattcttcgctaacgtcaat

SEQ ID NO: 11477 - DNA, 20 bp, Artificial Sequence
  bisulfite treated nucleic acid for analysis of methylation status of SEQ ID NO: 41
ttcgtattttggtttcgtgt

SEQ ID NO: 11478 - DNA, 21 bp, Artificial Sequence
  bisulfite treated nucleic acid for analysis of methylation status of SEQ ID NO: 41
ccgcgctactactcctaatac

SEQ ID NO: 11479 - DNA, 21 bp, Artificial Sequence
  bisulfite treated nucleic acid for analysis of methylation status of SEQ ID NO: 41
gctaacgtcaatcgaaactat

SEQ ID NO: 11480 - DNA, 19 bp, Artificial Sequence
  bisulfite treated nucleic acid for analysis of methylation status of SEQ ID NO: 41
cgtaggaaagcgagaagtc

SEQ ID NO: 11481 - DNA, 19 bp, Artificial Sequence
  bisulfite treated nucleic acid for analysis of methylation status of SEQ ID NO: 41
gacgtaggaaagcgagaag

SEQ ID NO: 11482 - DNA, 19 bp, Artificial Sequence
  bisulfite treated nucleic acid for analysis of methylation status of SEQ ID NO: 41
gtaggaaagcgagaagtcg

SEQ ID NO: 11483 - DNA, 20 bp, Artificial Sequence
  bisulfite treated nucleic acid for analysis of methylation status of SEQ ID NO: 41
acgtaggaaagcgagaagtc

SEQ ID NO: 11484 - DNA, 21 bp, Artificial Sequence
  bisulfite treated nucleic acid for analysis of methylation status of SEQ ID NO: 41
cgttggaagtagtattggacg

SEQ ID NO: 11485 - DNA, 23 bp, Artificial Sequence
  bisulfite treated nucleic acid for analysis of methylation status of SEQ ID NO: 41
tacatattcttcgctaacgtcaa

SEQ ID NO: 11486 - DNA, 20 bp, Artificial Sequence
  bisulfite treated nucleic acid for analysis of methylation status of SEQ ID NO: 41
attcttcgctaacgtcaatc

SEQ ID NO: 11487 - DNA, 21 bp, Artificial Sequence
  bisulfite treated nucleic acid for analysis of methylation status of SEQ ID NO: 41
tacatattcttcgctaacgtc

SEQ ID NO: 11488 - DNA, 19 bp, Artificial Sequence
  bisulfite treated nucleic acid for analysis of methylation status of SEQ ID NO: 41
gcgtttgtacggtttaaga

SEQ ID NO: 11489 - DNA, 22 bp, Artificial Sequence
  bisulfite treated nucleic acid for analysis of methylation status of SEQ ID NO: 41
aaaactaaacgaacgctctaaa

SEQ ID NO: 11490 - DNA, 21 bp, Artificial Sequence
  bisulfite treated nucleic acid for analysis of methylation status of SEQ ID NO: 41
atacgtcgggatagattttgt

SEQ ID NO: 11491 - DNA, 19 bp, Artificial Sequence
  bisulfite treated nucleic acid for analysis of methylation status of SEQ ID NO: 41
ggatcgtatagacgttcgt

SEQ ID NO: 11492 - DNA, 17 bp, Artificial Sequence
  bisulfite treated nucleic acid for analysis of methylation status of SEQ ID NO: 41
gagggatagagattgga

SEQ ID NO: 11493 - DNA, 22 bp, Artificial Sequence
  bisulfite treated nucleic acid for analysis of methylation status of SEQ ID NO: 41
cgtcaacgaaaaacatacacta

SEQ ID NO: 11494 - DNA, 21 bp, Artificial Sequence
  bisulfite treated nucleic acid for analysis of methylation status of SEQ ID NO: 41
gttacgtttaggggtacgaag

SEQ ID NO: 11495 - DNA, 19 bp, Artificial Sequence
  bisulfite treated nucleic acid for analysis of methylation status of SEQ ID NO: 41
ttcggggttcgttagtcgt

SEQ ID NO: 11496 - DNA, 18 bp, Artificial Sequence
  bisulfite treated nucleic acid for analysis of methylation status of SEQ ID NO: 41
agattcgaagttgtggtt

SEQ ID NO: 11497 - DNA, 21 bp, Artificial Sequence
  bisulfite treated nucleic acid for analysis of methylation status of SEQ ID NO: 41
atataaggttggcgatacgtc

SEQ ID NO: 11498 - DNA, 22 bp, Artificial Sequence
  bisulfite treated nucleic acid for analysis of methylation status of SEQ ID NO: 41
aaaaactaaacgaacgctctaa

SEQ ID NO: 11499 - DNA, 22 bp, Artificial Sequence
  bisulfite treated nucleic acid for analysis of methylation status of SEQ ID NO: 41
gatacgtcgggatagattttgt

SEQ ID NO: 11500 - DNA, 20 bp, Artificial Sequence
  bisulfite treated nucleic acid for analysis of methylation status of SEQ ID NO: 41
tacgtcgggatagattttgt

SEQ ID NO: 11501 - DNA, 20 bp, Artificial Sequence
  bisulfite treated nucleic acid for analysis of methylation status of SEQ ID NO: 41
tataaggttggcgatacgtc

SEQ ID NO: 11502 - DNA, 21 bp, Artificial Sequence
  bisulfite treated nucleic acid for analysis of methylation status of SEQ ID NO: 41
actaaacgaacgctctaaacc

SEQ ID NO: 11503 - DNA, 20 bp, Artificial Sequence
  bisulfite treated nucleic acid for analysis of methylation status of SEQ ID NO: 41
ttacgtttaggggtacgaag

SEQ ID NO: 11504 - DNA, 22 bp, Artificial Sequence
  bisulfite treated nucleic acid for analysis of methylation status of SEQ ID NO: 41
acgtcaacgaaaaacatacact

SEQ ID NO: 11505 - DNA, 22 bp, Artificial Sequence
  bisulfite treated nucleic acid for analysis of methylation status of SEQ ID NO: 41
ctaacgtcaacgaaaaacatac

SEQ ID NO: 11506 - DNA, 22 bp, Artificial Sequence
  bisulfite treated nucleic acid for analysis of methylation status of SEQ ID NO: 41
aactaaacgaacgctctaaacc

SEQ ID NO: 11507 - DNA, 22 bp, Artificial Sequence
  bisulfite treated nucleic acid for analysis of methylation status of SEQ ID NO: 41
taacgtcaacgaaaaacataca

SEQ ID NO: 11508 - DNA, 21 bp, Artificial Sequence
  bisulfite treated nucleic acid for analysis of methylation status of SEQ ID NO: 41
aaactaaacgaacgctctaaa

SEQ ID NO: 11509 - DNA, 22 bp, Artificial Sequence
  bisulfite treated nucleic acid for analysis of methylation status of SEQ ID NO: 41
gactaacgtcaacgaaaaacat

SEQ ID NO: 11510 - DNA, 19 bp, Artificial Sequence
  bisulfite treated nucleic acid for analysis of methylation status of SEQ ID NO: 41
cgatacgtcgggatagatt

SEQ ID NO: 11511 - DNA, 19 bp, Artificial Sequence
  bisulfite treated nucleic acid for analysis of methylation status of SEQ ID NO: 41
ataaggttggcgatacgtc

SEQ ID NO: 11512 - DNA, 21 bp, Artificial Sequence
  bisulfite treated nucleic acid for analysis of methylation status of SEQ ID NO: 41
acgtcaacgaaaaacatacac

SEQ ID NO: 11513 - DNA, 23 bp, Artificial Sequence
  bisulfite treated nucleic acid for analysis of methylation status of SEQ ID NO: 41
actaacgtcaacgaaaaacatac

SEQ ID NO: 11514 - DNA, 21 bp, Artificial Sequence
  bisulfite treated nucleic acid for analysis of methylation status of SEQ ID NO: 41
cgtcaacgaaaaacatacact

SEQ ID NO: 11515 - DNA, 20 bp, Artificial Sequence
  bisulfite treated nucleic acid for analysis of methylation status of SEQ ID NO: 41
tagcgttacgtttaggggta

SEQ ID NO: 11516 - DNA, 17 bp, Artificial Sequence
  bisulfite treated nucleic acid for analysis of methylation status of SEQ ID NO: 41
aaggttggtgtagggag

SEQ ID NO: 11517 - DNA, 20 bp, Artificial Sequence
  bisulfite treated nucleic acid for analysis of methylation status of SEQ ID NO: 41
ctaaacgaacgctctaaacc

SEQ ID NO: 11518 - DNA, 19 bp, Artificial Sequence
  bisulfite treated nucleic acid for analysis of methylation status of SEQ ID NO: 41
acgtcgggatagattttgt

SEQ ID NO: 11519 - DNA, 21 bp, Artificial Sequence
  bisulfite treated nucleic acid for analysis of methylation status of SEQ ID NO: 41
ttagcgttacgtttaggggta

SEQ ID NO: 11520 - DNA, 22 bp, Artificial Sequence
  bisulfite treated nucleic acid for analysis of methylation status of SEQ ID NO: 41
aacgtcaacgaaaaacatacac

SEQ ID NO: 11521 - DNA, 21 bp, Artificial Sequence
  bisulfite treated nucleic acid for analysis of methylation status of SEQ ID NO: 41
tacgtttaggggtacgaaggt

SEQ ID NO: 11522 - DNA, 19 bp, Artificial Sequence
  bisulfite treated nucleic acid for analysis of methylation status of SEQ ID NO: 41
acgaacgctctaaaccact

SEQ ID NO: 11523 - DNA, 20 bp, Artificial Sequence
  bisulfite treated nucleic acid for analysis of methylation status of SEQ ID NO: 41
acaactccgactaacgtcaa

SEQ ID NO: 11524 - DNA, 22 bp, Artificial Sequence
  bisulfite treated nucleic acid for analysis of methylation status of SEQ ID NO: 41
taaacgaacgctctaaaccact

SEQ ID NO: 11525 - DNA, 19 bp, Artificial Sequence
  bisulfite treated nucleic acid for analysis of methylation status of SEQ ID NO: 41
agcgttacgtttaggggta

SEQ ID NO: 11526 - DNA, 22 bp, Artificial Sequence
  bisulfite treated nucleic acid for analysis of methylation status of SEQ ID NO: 41
actaacgtcaacgaaaaacata

SEQ ID NO: 11527 - DNA, 20 bp, Artificial Sequence
  bisulfite treated nucleic acid for analysis of methylation status of SEQ ID NO: 41
tacgtttaggggtacgaagg

SEQ ID NO: 11528 - DNA, 21 bp, Artificial Sequence
  bisulfite treated nucleic acid for analysis of methylation status of SEQ ID NO: 41
aacgtaacgctaaaaacaaca

SEQ ID NO: 11529 - DNA, 19 bp, Artificial Sequence
  bisulfite treated nucleic acid for analysis of methylation status of SEQ ID NO: 41
cgattcggattagtttggt

SEQ ID NO: 11530 - DNA, 22 bp, Artificial Sequence
  bisulfite treated nucleic acid for analysis of methylation status of SEQ ID NO: 41
tacgttttagtcggtttttcgt

SEQ ID NO: 11531 - DNA, 22 bp, Artificial Sequence
  bisulfite treated nucleic acid for analysis of methylation status of SEQ ID NO: 41
agttattgttggttgttttaag

SEQ ID NO: 11532 - DNA, 20 bp, Artificial Sequence
  bisulfite treated nucleic acid for analysis of methylation status of SEQ ID NO: 41
caaaacaactccgactaacg

SEQ ID NO: 11533 - DNA, 21 bp, Artificial Sequence
  bisulfite treated nucleic acid for analysis of methylation status of SEQ ID NO: 41
attagtgtatgtttttcgttg

SEQ ID NO: 11534 - DNA, 19 bp, Artificial Sequence
  bisulfite treated nucleic acid for analysis of methylation status of SEQ ID NO: 41
aacgaacgctctaaaccac

SEQ ID NO: 11535 - DNA, 21 bp, Artificial Sequence
  bisulfite treated nucleic acid for analysis of methylation status of SEQ ID NO: 5
gtattataggacggtcggttt

SEQ ID NO: 11536 - DNA, 22 bp, Artificial Sequence
  bisulfite treated nucleic acid for analysis of methylation status of SEQ ID NO: 5
cgaaataacaatcatcgaatta

SEQ ID NO: 11537 - DNA, 19 bp, Artificial Sequence
  bisulfite treated nucleic acid for analysis of methylation status of SEQ ID NO: 5
ttcgaattttttcggacgg

SEQ ID NO: 11538 - DNA, 17 bp, Artificial Sequence
  bisulfite treated nucleic acid for analysis of methylation status of SEQ ID NO: 5
agtcgggttttcgtagt

SEQ ID NO: 11539 - DNA, 21 bp, Artificial Sequence
  bisulfite treated nucleic acid for analysis of methylation status of SEQ ID NO: 5
ggtattataggacggtcggtt

SEQ ID NO: 11540 - DNA, 20 bp, Artificial Sequence
  bisulfite treated nucleic acid for analysis of methylation status of SEQ ID NO: 5
tattataggacggtcggttt

SEQ ID NO: 11541 - DNA, 22 bp, Artificial Sequence
  bisulfite treated nucleic acid for analysis of methylation status of SEQ ID NO: 5
taattcgatgattgttatttcg

SEQ ID NO: 11542 - DNA, 19 bp, Artificial Sequence
  bisulfite treated nucleic acid for analysis of methylation status of SEQ ID NO: 5
gataaaaacgccgtcctac

SEQ ID NO: 11543 - DNA, 19 bp, Artificial Sequence
  bisulfite treated nucleic acid for analysis of methylation status of SEQ ID NO: 5
ggcgtttggtaggcgacgt

SEQ ID NO: 11544 - DNA, 16 bp, Artificial Sequence
  bisulfite treated nucleic acid for analysis of methylation status of SEQ ID NO: 5
tgcgggcgtatatggt

SEQ ID NO: 11545 - DNA, 22 bp, Artificial Sequence
  bisulfite treated nucleic acid for analysis of methylation status of SEQ ID NO: 5
accgaaataacaatcatcgaat

SEQ ID NO: 11546 - DNA, 21 bp, Artificial Sequence
  bisulfite treated nucleic acid for analysis of methylation status of SEQ ID NO: 5
ccgaaataacaatcatcgaat

SEQ ID NO: 11547 - DNA, 20 bp, Artificial Sequence
  bisulfite treated nucleic acid for analysis of methylation status of SEQ ID NO: 5
ataaaaacgccgtcctacac

SEQ ID NO: 11548 - DNA, 21 bp, Artificial Sequence
  bisulfite treated nucleic acid for analysis of methylation status of SEQ ID NO: 5
tattataggacggtcggtttt

SEQ ID NO: 11549 - DNA, 21 bp, Artificial Sequence
  bisulfite treated nucleic acid for analysis of methylation status of SEQ ID NO: 5
accgaaataacaatcatcgaa

SEQ ID NO: 11550 - DNA, 22 bp, Artificial Sequence
  bisulfite treated nucleic acid for analysis of methylation status of SEQ ID NO: 5
agtggtattataggacggtcgg

SEQ ID NO: 11551 - DNA, 21 bp, Artificial Sequence
  bisulfite treated nucleic acid for analysis of methylation status of SEQ ID NO: 5
aattcgatgattgttatttcg

SEQ ID NO: 11552 - DNA, 19 bp, Artificial Sequence
  bisulfite treated nucleic acid for analysis of methylation status of SEQ ID NO: 5
attataggacggtcggttt

SEQ ID NO: 11553 - DNA, 18 bp, Artificial Sequence
  bisulfite treated nucleic acid for analysis of methylation status of SEQ ID NO: 5
taaaaacgccgtcctaca

SEQ ID NO: 11554 - DNA, 20 bp, Artificial Sequence
  bisulfite treated nucleic acid for analysis of methylation status of SEQ ID NO: 5
ccgaaataacaatcatcgaa

SEQ ID NO: 11555 - DNA, 21 bp, Artificial Sequence
  bisulfite treated nucleic acid for analysis of methylation status of SEQ ID NO: 5
gtggtattataggacggtcgg

SEQ ID NO: 11556 - DNA, 20 bp, Artificial Sequence
  bisulfite treated nucleic acid for analysis of methylation status of SEQ ID NO: 5
tggtattataggacggtcgg

SEQ ID NO: 11557 - DNA, 20 bp, Artificial Sequence
  bisulfite treated nucleic acid for analysis of methylation status of SEQ ID NO: 5
ataggacggtcggtttttat

SEQ ID NO: 11558 - DNA, 27 bp, Artificial Sequence
  bisulfite treated nucleic acid for analysis of methylation status of SEQ ID NO: 5
ttcggacggtattattatatagtcggg

SEQ ID NO: 11559 - DNA, 21 bp, Artificial Sequence
  bisulfite treated nucleic acid for analysis of methylation status of SEQ ID NO: 5
ttcgtagtgttggttttttaa

SEQ ID NO: 11560 - DNA, 20 bp, Artificial Sequence
  bisulfite treated nucleic acid for analysis of methylation status of SEQ ID NO: 5
tataggacggtcggttttta

SEQ ID NO: 11561 - DNA, 23 bp, Artificial Sequence
  bisulfite treated nucleic acid for analysis of methylation status of SEQ ID NO: 5
ttaattcgatgattgttatttcg

SEQ ID NO: 11562 - DNA, 20 bp, Artificial Sequence
  bisulfite treated nucleic acid for analysis of methylation status of SEQ ID NO: 5
attataggacggtcggtttt

SEQ ID NO: 11563 - DNA, 17 bp, Artificial Sequence
  bisulfite treated nucleic acid for analysis of methylation status of SEQ ID NO: 5
aaaaacgccgtcctaca

SEQ ID NO: 11564 - DNA, 16 bp, Artificial Sequence
  nucleic acid for analysis of methylation status of SEQ ID NO: 5
tgcgttgcgggcgtat

SEQ ID NO: 11565 - DNA, 16 bp, Artificial Sequence
  bisulfite treated nucleic acid for analysis of methylation status of SEQ ID NO: 5
ggcgtttggtaggcga

SEQ ID NO: 11566 - DNA, 17 bp, Artificial Sequence
  bisulfite treated nucleic acid for analysis of methylation status of SEQ ID NO: 5
tcctacacccgaacgtc

SEQ ID NO: 11567 - DNA, 17 bp, Artificial Sequence
  bisulfite treated nucleic acid for analysis of methylation status of SEQ ID NO: 5
tgttgatggtcggagaa

SEQ ID NO: 11568 - DNA, 22 bp, Artificial Sequence
  bisulfite treated nucleic acid for analysis of methylation status of SEQ ID NO: 5
attcgatgattgttatttcggt

SEQ ID NO: 11569 - DNA, 23 bp, Artificial Sequence
  bisulfite treated nucleic acid for analysis of methylation status of SEQ ID NO: 5
tagtggtattataggacggtcgg

SEQ ID NO: 11570 - DNA, 18 bp, Artificial Sequence
  bisulfite treated nucleic acid for analysis of methylation status of SEQ ID NO: 5
gtcctacacccgaacgtc

SEQ ID NO: 11571 - DNA, 20 bp, Artificial Sequence
  bisulfite treated nucleic acid for analysis of methylation status of SEQ ID NO: 5
tcgatgattgttatttcggt

SEQ ID NO: 11572 - DNA, 19 bp, Artificial Sequence
  bisulfite treated nucleic acid for analysis of methylation status of SEQ ID NO: 5
taggacggtcggtttttat

SEQ ID NO: 11573 - DNA, 22 bp, Artificial Sequence
  bisulfite treated nucleic acid for analysis of methylation status of SEQ ID NO: 5
ctaataaccgaaaaaccctacg

SEQ ID NO: 11574 - DNA, 21 bp, Artificial Sequence
  bisulfite treated nucleic acid for analysis of methylation status of SEQ ID NO: 5
ggtaagagcgtcgttttgtat

SEQ ID NO: 11575 - DNA, 19 bp, Artificial Sequence
  bisulfite treated nucleic acid for analysis of methylation status of SEQ ID NO: 5
gacgtcgtttgttaggcgt

SEQ ID NO: 11576 - DNA, 18 bp, Artificial Sequence
  bisulfite treated nucleic acid for analysis of methylation status of SEQ ID NO: 5
tggttatgtgcgttcgta

SEQ ID NO: 11577 - DNA, 21 bp, Artificial Sequence
  bisulfite treated nucleic acid for analysis of methylation status of SEQ ID NO: 5
taataaccgaaaaaccctacg

SEQ ID NO: 11578 - DNA, 21 bp, Artificial Sequence
  bisulfite treated nucleic acid for analysis of methylation status of SEQ ID NO: 6
acgataatttacataacgcga

SEQ ID NO: 11579 - DNA, 21 bp, Artificial Sequence
  bisulfite treated nucleic acid for analysis of methylation status of SEQ ID NO: 6
aatttgagttcgtagtttcgg

SEQ ID NO: 11580 - DNA, 17 bp, Artificial Sequence
  bisulfite treated nucleic acid for analysis of methylation status of SEQ ID NO: 6
ggaatcgcgcgtatttt

SEQ ID NO: 11581 - DNA, 16 bp, Artificial Sequence
  bisulfite treated nucleic acid for analysis of methylation status of SEQ ID NO: 6
agcgagttgtgcgagg

SEQ ID NO: 11582 - DNA, 20 bp, Artificial Sequence
  bisulfite treated nucleic acid for analysis of methylation status of SEQ ID NO: 6
atttgagttcgtagtttcgg

SEQ ID NO: 11583 - DNA, 18 bp, Artificial Sequence
  bisulfite treated nucleic acid for analysis of methylation status of SEQ ID NO: 6
atcgcgcgtattttaaga

SEQ ID NO: 11584 - DNA, 21 bp, Artificial Sequence
  bisulfite treated nucleic acid for analysis of methylation status of SEQ ID NO: 6
agttgtgcgaggttggttcgg

SEQ ID NO: 11585 - DNA, 22 bp, Artificial Sequence
  bisulfite treated nucleic acid for analysis of methylation status of SEQ ID NO: 6
aacgataatttacataacgcga

SEQ ID NO: 11586 - DNA, 22 bp, Artificial Sequence
  bisulfite treated nucleic acid for analysis of methylation status of SEQ ID NO: 6
tctaacgaccaaactacgaaat

SEQ ID NO: 11587 - DNA, 20 bp, Artificial Sequence
  bisulfite treated nucleic acid for analysis of methylation status of SEQ ID NO: 6
cgtataaaagcgcgtaattg

SEQ ID NO: 11588 - DNA, 18 bp, Artificial Sequence
  bisulfite treated nucleic acid for analysis of methylation status of SEQ ID NO: 6
tttagttcgcgtattcgt

SEQ ID NO: 11589 - DNA, 21 bp, Artificial Sequence
  bisulfite treated nucleic acid for analysis of methylation status of SEQ ID NO: 6
tttatataggaggtttttgtg

SEQ ID NO: 11590 - DNA, 22 bp, Artificial Sequence
  bisulfite treated nucleic acid for analysis of methylation status of SEQ ID NO: 6
ctaacgaccaaactacgaaata

SEQ ID NO: 11591 - DNA, 21 bp, Artificial Sequence
  bisulfite treated nucleic acid for analysis of methylation status of SEQ ID NO: 6
acgaccaaactacgaaataca

SEQ ID NO: 11592 - DNA, 21 bp, Artificial Sequence
  bisulfite treated nucleic acid for analysis of methylation status of SEQ ID NO: 6
ctctaacgaccaaactacgaa

SEQ ID NO: 11593 - DNA, 19 bp, Artificial Sequence
  bisulfite treated nucleic acid for analysis of methylation status of SEQ ID NO: 6
gggttcgtgcgtataaaag

SEQ ID NO: 11594 - DNA, 19 bp, Artificial Sequence
  bisulfite treated nucleic acid for analysis of methylation status of SEQ ID NO: 6
gcgtataaaagcgcgtaat

SEQ ID NO: 11595 - DNA, 22 bp, Artificial Sequence
  bisulfite treated nucleic acid for analysis of methylation status of SEQ ID NO: 6
cgaccaaactacgaaatacaac

SEQ ID NO: 11596 - DNA, 22 bp, Artificial Sequence
  bisulfite treated nucleic acid for analysis of methylation status of SEQ ID NO: 6
aacgaccaaactacgaaataca

SEQ ID NO: 11597 - DNA, 22 bp, Artificial Sequence
  bisulfite treated nucleic acid for analysis of methylation status of SEQ ID NO: 6
atatctttcaaaatcgacgaac

SEQ ID NO: 11598 - DNA, 20 bp, Artificial Sequence
  bisulfite treated nucleic acid for analysis of methylation status of SEQ ID NO: 6
gtagtttcggaagcgagttg

SEQ ID NO: 11599 - DNA, 21 bp, Artificial Sequence
  bisulfite treated nucleic acid for analysis of methylation status of SEQ ID NO: 6
atcgttattacgaattgtttt

SEQ ID NO: 11600 - DNA, 23 bp, Artificial Sequence
  bisulfite treated nucleic acid for analysis of methylation status of SEQ ID NO: 6
taacgataatttacataacgcga

SEQ ID NO: 11601 - DNA, 19 bp, Artificial Sequence
  bisulfite treated nucleic acid for analysis of methylation status of SEQ ID NO: 6
tagtttcggaagcgagttg

SEQ ID NO: 11602 - DNA, 22 bp, Artificial Sequence
  bisulfite treated nucleic acid for analysis of methylation status of SEQ ID NO: 8
gttttcgaggaatataggatcg

SEQ ID NO: 11603 - DNA, 22 bp, Artificial Sequence
  bisulfite treated nucleic acid for analysis of methylation status of SEQ ID NO: 8
cgcgaatttaactactacttcc

SEQ ID NO: 11604 - DNA, 16 bp, Artificial Sequence
  bisulfite treated nucleic acid for analysis of methylation status of SEQ ID NO: 8
tttcgcggacggcggt

SEQ ID NO: 11605 - DNA, 16 bp, Artificial Sequence
  bisulfite treated nucleic acid for analysis of methylation status of SEQ ID NO: 8
gtcgggtagcgggtta

SEQ ID NO: 11606 - DNA, 21 bp, Artificial Sequence
  bisulfite treated nucleic acid for analysis of methylation status of SEQ ID NO: 8
ttttcgaggaatataggatcg

SEQ ID NO: 11607 - DNA, 20 bp, Artificial Sequence
  bisulfite treated nucleic acid for analysis of methylation status of SEQ ID NO: 8
tttcgaggaatataggatcg

SEQ ID NO: 11608 - DNA, 19 bp, Artificial Sequence
  bisulfite treated nucleic acid for analysis of methylation status of SEQ ID NO: 8
tcgaggaatataggatcgc

SEQ ID NO: 11609 - DNA, 19 bp, Artificial Sequence
  bisulfite treated nucleic acid for analysis of methylation status of SEQ ID NO: 8
ggtcgcggaagttatagat

SEQ ID NO: 11610 - DNA, 22 bp, Artificial Sequence
  bisulfite treated nucleic acid for analysis of methylation status of SEQ ID NO: 8
acgtcctaaaacgaaaaataaa

SEQ ID NO: 11611 - DNA, 20 bp, Artificial Sequence
  bisulfite treated nucleic acid for analysis of methylation status of SEQ ID NO: 8
ttcgttaggcgttggttcga

SEQ ID NO: 11612 - DNA, 18 bp, Artificial Sequence
  bisulfite treated nucleic acid for analysis of methylation status of SEQ ID NO: 8
ggggatggtttaaatgag

SEQ ID NO: 11613 - DNA, 22 bp, Artificial Sequence
  bisulfite treated nucleic acid for analysis of methylation status of SEQ ID NO: 8
aacgtcctaaaacgaaaaataa

SEQ ID NO: 11614 - DNA, 22 bp, Artificial Sequence
  bisulfite treated nucleic acid for analysis of methylation status of SEQ ID NO: 8
aaacgtcctaaaacgaaaaata

SEQ ID NO: 11615 - DNA, 23 bp, Artificial Sequence
  bisulfite treated nucleic acid for analysis of methylation status of SEQ ID NO: 8
acgcgaatttaactactacttcc

SEQ ID NO: 11616 - DNA, 20 bp, Artificial Sequence
  bisulfite treated nucleic acid for analysis of methylation status of SEQ ID NO: 8
ttcgaggaatataggatcgc

SEQ ID NO: 11617 - DNA, 22 bp, Artificial Sequence
  bisulfite treated nucleic acid for analysis of methylation status of SEQ ID NO: 8
cgtcctaaaacgaaaaataaaa

SEQ ID NO: 11618 - DNA, 21 bp, Artificial Sequence
  bisulfite treated nucleic acid for analysis of methylation status of SEQ ID NO: 8
aaaaacgtcctactaacgacc

SEQ ID NO: 11619 - DNA, 23 bp, Artificial Sequence
  bisulfite treated nucleic acid for analysis of methylation status of SEQ ID NO: 8
cgcgatatttttagtttgtattt

SEQ ID NO: 11620 - DNA, 16 bp, Artificial Sequence
  bisulfite treated nucleic acid for analysis of methylation status of SEQ ID NO: 8
agtttaggcggcgcgt

SEQ ID NO: 11621 - DNA, 17 bp, Artificial Sequence
  bisulfite treated nucleic acid for analysis of methylation status of SEQ ID NO: 8
ttcgtacgttggagcgt

SEQ ID NO: 11622 - DNA, 21 bp, Artificial Sequence
  bisulfite treated nucleic acid for analysis of methylation status of SEQ ID NO: 8
actacactaccgcgaaaactc

SEQ ID NO: 11623 - DNA, 22 bp, Artificial Sequence
  bisulfite treated nucleic acid for analysis of methylation status of SEQ ID NO: 8
gtttagtagttcgttgttcggt

SEQ ID NO: 11624 - DNA, 24 bp, Artificial Sequence
  bisulfite treated nucleic acid for analysis of methylation status of SEQ ID NO: 8
ttcgcgattttgtgtttttcggaa

SEQ ID NO: 11625 - DNA, 20 bp, Artificial Sequence
  bisulfite treated nucleic acid for analysis of methylation status of SEQ ID NO: 8
gaattagttatggtgttgtg

SEQ ID NO: 11626 - DNA, 20 bp, Artificial Sequence
  bisulfite treated nucleic acid for analysis of methylation status of SEQ ID NO: 8
ctacactaccgcgaaaactc

SEQ ID NO: 11627 - DNA, 22 bp, Artificial Sequence
  bisulfite treated nucleic acid for analysis of methylation status of SEQ ID NO: 8
tttagtagttcgttgttcggtt

SEQ ID NO: 11628 - DNA, 20 bp, Artificial Sequence
  bisulfite treated nucleic acid for analysis of methylation status of SEQ ID NO: 8
ataacaataacacccgacga

SEQ ID NO: 11629 - DNA, 22 bp, Artificial Sequence
  bisulfite treated nucleic acid for analysis of methylation status of SEQ ID NO: 8
tatggtagtagtttttcgcgtt

SEQ ID NO: 11630 - DNA, 21 bp, Artificial Sequence
  bisulfite treated nucleic acid for analysis of methylation status of SEQ ID NO: 8
ttcggcgtagttttttagcgg

SEQ ID NO: 11631 - DNA, 21 bp, Artificial Sequence
  bisulfite treated nucleic acid for analysis of methylation status of SEQ ID NO: 8
gtttttggatgttgttgaaat

SEQ ID NO: 11632 - DNA, 20 bp, Artificial Sequence
  bisulfite treated nucleic acid for analysis of methylation status of SEQ ID NO: 8
cgataacaataacacccgac

SEQ ID NO: 11633 - DNA, 19 bp, Artificial Sequence
  bisulfite treated nucleic acid for analysis of methylation status of SEQ ID NO: 8
taacaataacacccgacga

SEQ ID NO: 11634 - DNA, 21 bp, Artificial Sequence
  bisulfite treated nucleic acid for analysis of methylation status of SEQ ID NO: 8
ttagtagttcgttgttcggtt

SEQ ID NO: 11635 - DNA, 22 bp, Artificial Sequence
  bisulfite treated nucleic acid for analysis of methylation status of SEQ ID NO: 16
taaacaaaacgtctcgaattta

SEQ ID NO: 11636 - DNA, 22 bp, Artificial Sequence
  bisulfite treated nucleic acid for analysis of methylation status of SEQ ID NO: 16
cgttatagaggaggagtttacg

SEQ ID NO: 11637 - DNA, 17 bp, Artificial Sequence
  bisulfite treated nucleic acid for analysis of methylation status of SEQ ID NO: 16
ttcgagtttcgaatcgg

SEQ ID NO: 11638 - DNA, 17 bp, Artificial Sequence
  bisulfite treated nucleic acid for analysis of methylation status of SEQ ID NO: 16
gggagggagagttattt

SEQ ID NO: 11639 - DNA, 22 bp, Artificial Sequence
  bisulfite treated nucleic acid for analysis of methylation status of SEQ ID NO: 16
gcggagtaggttatattatcgt

SEQ ID NO: 11640 - DNA, 23 bp, Artificial Sequence
  bisulfite treated nucleic acid for analysis of methylation status of SEQ ID NO: 16
ataaacaaaacgtctcgaattta

SEQ ID NO: 11641 - DNA, 21 bp, Artificial Sequence
  bisulfite treated nucleic acid for analysis of methylation status of SEQ ID NO: 16
aaacaaaacgtctcgaattta

SEQ ID NO: 11642 - DNA, 21 bp, Artificial Sequence
  bisulfite treated nucleic acid for analysis of methylation status of SEQ ID NO: 16
cataaacaaaacgtctcgaat

SEQ ID NO: 11643 - DNA, 22 bp, Artificial Sequence
  bisulfite treated nucleic acid for analysis of methylation status of SEQ ID NO: 16
tcataaacaaaacgtctcgaat

SEQ ID NO: 11644 - DNA, 22 bp, Artificial Sequence
  bisulfite treated nucleic acid for analysis of methylation status of SEQ ID NO: 16
ggcggagtaggttatattatcg

SEQ ID NO: 11645 - DNA, 23 bp, Artificial Sequence
  bisulfite treated nucleic acid for analysis of methylation status of SEQ ID NO: 16
acgttatagaggaggagtttacg

SEQ ID NO: 11646 - DNA, 23 bp, Artificial Sequence
  bisulfite treated nucleic acid for analysis of methylation status of SEQ ID NO: 16
cggagtaggttatattatcgttt

SEQ ID NO: 11647 - DNA, 22 bp, Artificial Sequence
  bisulfite treated nucleic acid for analysis of methylation status of SEQ ID NO: 16
ctcataaacaaaacgtctcgaa

SEQ ID NO: 11648 - DNA, 22 bp, Artificial Sequence
  bisulfite treated nucleic acid for analysis of methylation status of SEQ ID NO: 16
acgataatataacctactccgc

SEQ ID NO: 11649 - DNA, 19 bp, Artificial Sequence
  bisulfite treated nucleic acid for analysis of methylation status of SEQ ID NO: 16
tcgggaaagtaaagcgtat

SEQ ID NO: 11650 - DNA, 16 bp, Artificial Sequence
  bisulfite treated nucleic acid for analysis of methylation status of SEQ ID NO: 16
atagcgaaggcgtcga

SEQ ID NO: 11651 - DNA, 19 bp, Artificial Sequence
  bisulfite treated nucleic acid for analysis of methylation status of SEQ ID NO: 16
gttatagaggaggagttta

SEQ ID NO: 11652 - DNA, 20 bp, Artificial Sequence
  bisulfite treated nucleic acid for analysis of methylation status of SEQ ID NO: 16
cgggaaagtaaagcgtattt

SEQ ID NO: 11653 - DNA, 20 bp, Artificial Sequence
  bisulfite treated nucleic acid for analysis of methylation status of SEQ ID NO: 16
ttcgggaaagtaaagcgtat

SEQ ID NO: 11654 - DNA, 20 bp, Artificial Sequence
  bisulfite treated nucleic acid for analysis of methylation status of SEQ ID NO: 16
aacaaaacgtctcgaattta

SEQ ID NO: 11655 - DNA, 24 bp, Artificial Sequence
  bisulfite treated nucleic acid for analysis of methylation status of SEQ ID NO: 16
cataaacaaaacgtctcgaattta

SEQ ID NO: 11656 - DNA, 23 bp, Artificial Sequence
  bisulfite treated nucleic acid for analysis of methylation status of SEQ ID NO: 16
aacgataatataacctactccgc

SEQ ID NO: 11657 - DNA, 22 bp, Artificial Sequence
  bisulfite treated nucleic acid for analysis of methylation status of SEQ ID NO: 16
cgataatataacctactccgcc

SEQ ID NO: 11658 - DNA, 23 bp, Artificial Sequence
  bisulfite treated nucleic acid for analysis of methylation status of SEQ ID NO: 16
aaacgataatataacctactccg

SEQ ID NO: 11659 - DNA, 19 bp, Artificial Sequence
  bisulfite treated nucleic acid for analysis of methylation status of SEQ ID NO: 42
gtattcggggtaaaagtcg

SEQ ID NO: 11660 - DNA, 22 bp, Artificial Sequence
  bisulfite treated nucleic acid for analysis of methylation status of SEQ ID NO: 42
taaaacgtaaataacgcaaaca

SEQ ID NO: 11661 - DNA, 19 bp, Artificial Sequence
  bisulfite treated nucleic acid for analysis of methylation status of SEQ ID NO: 42
atcgggattcgtagcgcga

SEQ ID NO: 11662 - DNA, 16 bp, Artificial Sequence
  bisulfite treated nucleic acid for analysis of methylation status of SEQ ID NO: 42
ttcgtttaagcggggt

SEQ ID NO: 11663 - DNA, 19 bp, Artificial Sequence
  bisulfite treated nucleic acid for analysis of methylation status of SEQ ID NO: 42
cgtattcggggtaaaagtc

SEQ ID NO: 11664 - DNA, 19 bp, Artificial Sequence
  bisulfite treated nucleic acid for analysis of methylation status of SEQ ID NO: 42
tcgtattcggggtaaaagt

SEQ ID NO: 11665 - DNA, 20 bp, Artificial Sequence
  bisulfite treated nucleic acid for analysis of methylation status of SEQ ID NO: 42
ttcgtattcggggtaaaagt

SEQ ID NO: 11666 - DNA, 22 bp, Artificial Sequence
  bisulfite treated nucleic acid for analysis of methylation status of SEQ ID NO: 42
tcgcgttgtagtttagttaggt

SEQ ID NO: 11667 - DNA, 19 bp, Artificial Sequence
  bisulfite treated nucleic acid for analysis of methylation status of SEQ ID NO: 42
ttaccccgaatacgaaaac

SEQ ID NO: 11668 - DNA, 16 bp, Artificial Sequence
  bisulfite treated nucleic acid for analysis of methylation status of SEQ ID NO: 42
ttcggacggggcgttt

SEQ ID NO: 11669 - DNA, 19 bp, Artificial Sequence
  bisulfite treated nucleic acid for analysis of methylation status of SEQ ID NO: 42
ggtagaggggattttttaa

SEQ ID NO: 11670 - DNA, 22 bp, Artificial Sequence
  bisulfite treated nucleic acid for analysis of methylation status of SEQ ID NO: 42
cgttgtagtttagttaggtcgc

SEQ ID NO: 11671 - DNA, 22 bp, Artificial Sequence
  bisulfite treated nucleic acid for analysis of methylation status of SEQ ID NO: 42
cgcgttgtagtttagttaggtc

SEQ ID NO: 11672 - DNA, 22 bp, Artificial Sequence
  bisulfite treated nucleic acid for analysis of methylation status of SEQ ID NO: 42
ttgtagtttagttaggtcgcgt

SEQ ID NO: 11673 - DNA, 21 bp, Artificial Sequence
  bisulfite treated nucleic acid for analysis of methylation status of SEQ ID NO: 42
tttcgtattcggggtaaaagt

SEQ ID NO: 11674 - DNA, 19 bp, Artificial Sequence
  bisulfite treated nucleic acid for analysis of methylation status of SEQ ID NO: 42
acttttaccccgaatacga

SEQ ID NO: 11675 - DNA, 19 bp, Artificial Sequence
  bisulfite treated nucleic acid for analysis of methylation status of SEQ ID NO: 42
cgacttttaccccgaatac

SEQ ID NO: 11676 - DNA, 21 bp, Artificial Sequence
  bisulfite treated nucleic acid for analysis of methylation status of SEQ ID NO: 42
cctaaaacgtaaataacgcaa

SEQ ID NO: 11677 - DNA, 22 bp, Artificial Sequence
  bisulfite treated nucleic acid for analysis of methylation status of SEQ ID NO: 42
ggtttttcgtattttacgtgtt

SEQ ID NO: 11678 - DNA, 18 bp, Artificial Sequence
  bisulfite treated nucleic acid for analysis of methylation status of SEQ ID NO: 42
cgacgcgacctaactaaa

SEQ ID NO: 11679 - DNA, 16 bp, Artificial Sequence
  bisulfite treated nucleic acid for analysis of methylation status of SEQ ID NO: 42
agggtcgttttcgcgt

SEQ ID NO: 11680 - DNA, 18 bp, Artificial Sequence
  bisulfite treated nucleic acid for analysis of methylation status of SEQ ID NO: 42
atagggggttttcgtgag

SEQ ID NO: 11681 - DNA, 21 bp, Artificial Sequence
  bisulfite treated nucleic acid for analysis of methylation status of SEQ ID NO: 42
cgagttcggagtttttgtagt

SEQ ID NO: 11682 - DNA, 20 bp, Artificial Sequence
  bisulfite treated nucleic acid for analysis of methylation status of SEQ ID NO: 42
cgatattcttcctcgctaaa

SEQ ID NO: 11683 - DNA, 20 bp, Artificial Sequence
  bisulfite treated nucleic acid for analysis of methylation status of SEQ ID NO: 42
ttcggaagaggtcgtttcgt

SEQ ID NO: 11684 - DNA, 23 bp, Artificial Sequence
  bisulfite treated nucleic acid for analysis of methylation status of SEQ ID NO: 42
ggcgtaattttttttagaaacgg

SEQ ID NO: 11685 - DNA, 22 bp, Artificial Sequence
  bisulfite treated nucleic acid for analysis of methylation status of SEQ ID NO: 42
ctaaaacgtaaataacgcaaac

SEQ ID NO: 11686 - DNA, 19 bp, Artificial Sequence
  bisulfite treated nucleic acid for analysis of methylation status of SEQ ID NO: 42
cttttaccccgaatacgaa

SEQ ID NO: 11687 - DNA, 22 bp, Artificial Sequence
  bisulfite treated nucleic acid for analysis of methylation status of SEQ ID NO: 42
gcgttgtagtttagttaggtcg

SEQ ID NO: 11688 - DNA, 22 bp, Artificial Sequence
  bisulfite treated nucleic acid for analysis of methylation status of SEQ ID NO: 42
aaaacgtaaataacgcaaacac

SEQ ID NO: 11689 - DNA, 21 bp, Artificial Sequence
  bisulfite treated nucleic acid for analysis of methylation status of SEQ ID NO: 42
aaacgtaaataacgcaaacac

SEQ ID NO: 11690 - DNA, 22 bp, Artificial Sequence
  bisulfite treated nucleic acid for analysis of methylation status of SEQ ID NO: 42
tttcgcgttgtagtttagttag

SEQ ID NO: 11691 - DNA, 19 bp, Artificial Sequence
  bisulfite treated nucleic acid for analysis of methylation status of SEQ ID NO: 42
gaatacgaaaaccaccgaa

SEQ ID NO: 11692 - DNA, 19 bp, Artificial Sequence
  bisulfite treated nucleic acid for analysis of methylation status of SEQ ID NO: 42
atacgaaaaccaccgaaaa

SEQ ID NO: 11693 - DNA, 19 bp, Artificial Sequence
  bisulfite treated nucleic acid for analysis of methylation status of SEQ ID NO: 42
aatacgaaaaccaccgaaa

SEQ ID NO: 11694 - DNA, 22 bp, Artificial Sequence
  bisulfite treated nucleic acid for analysis of methylation status of SEQ ID NO: 42
ttcgcgttgtagtttagttagg

SEQ ID NO: 11695 - DNA, 20 bp, Artificial Sequence
  bisulfite treated nucleic acid for analysis of methylation status of SEQ ID NO: 42
tttaccccgaatacgaaaac

SEQ ID NO: 11696 - DNA, 21 bp, Artificial Sequence
  bisulfite treated nucleic acid for analysis of methylation status of SEQ ID NO: 42
tgtagtttagttaggtcgcgt

SEQ ID NO: 11697 - DNA, 21 bp, Artificial Sequence
  bisulfite treated nucleic acid for analysis of methylation status of SEQ ID NO: 42
tcgcgttgtagtttagttagg

SEQ ID NO: 11698 - DNA, 20 bp, Artificial Sequence
  bisulfite treated nucleic acid for analysis of methylation status of SEQ ID NO: 42
gacttttaccccgaatacga

SEQ ID NO: 11699 - DNA, 19 bp, Artificial Sequence
  bisulfite treated nucleic acid for analysis of methylation status of SEQ ID NO: 42
ttttaccccgaatacgaaa

SEQ ID NO: 11700 - DNA, 19 bp, Artificial Sequence
  bisulfite treated nucleic acid for analysis of methylation status of SEQ ID NO: 42
tttaccccgaatacgaaaa

SEQ ID NO: 11701 - DNA, 22 bp, Artificial Sequence
  bisulfite treated nucleic acid for analysis of methylation status of SEQ ID NO: 42
ttatcggattttagatcgtttt

SEQ ID NO: 11702 - DNA, 19 bp, Artificial Sequence
  bisulfite treated nucleic acid for analysis of methylation status of SEQ ID NO: 42
cgaaacctaacccttcgat

SEQ ID NO: 11703 - DNA, 16 bp, Artificial Sequence
  bisulfite treated nucleic acid for analysis of methylation status of SEQ ID NO: 42
gtatcgtcgttcggga

SEQ ID NO: 11704 - DNA, 21 bp, Artificial Sequence
  bisulfite treated nucleic acid for analysis of methylation status of SEQ ID NO: 42
agtttaggatttagatttggt

SEQ ID NO: 11705 - DNA, 20 bp, Artificial Sequence
  bisulfite treated nucleic acid for analysis of methylation status of SEQ ID NO: 42
ggtcgttttcgtttatatcg

SEQ ID NO: 11706 - DNA, 20 bp, Artificial Sequence
  bisulfite treated nucleic acid for analysis of methylation status of SEQ ID NO: 42
ctcgctacctaactcacgaa

SEQ ID NO: 11707 - DNA, 24 bp, Artificial Sequence
  bisulfite treated nucleic acid for analysis of methylation status of SEQ ID NO: 42
aacggggtttttcgtattttacgt

SEQ ID NO: 11708 - DNA, 24 bp, Artificial Sequence
  nucleic acid for analysis of methylation status of SEQ ID NO: 42
tgcgcgtttggggtttttttatag

SEQ ID NO: 11709 - DNA, 22 bp, Artificial Sequence
  bisulfite treated nucleic acid for analysis of methylation status of SEQ ID NO: 42
gttatcggtatttcggagttta

SEQ ID NO: 11710 - DNA, 18 bp, Artificial Sequence
  bisulfite treated nucleic acid for analysis of methylation status of SEQ ID NO: 42
ccgaccttctaacgaacc

SEQ ID NO: 11711 - DNA, 17 bp, Artificial Sequence
  bisulfite treated nucleic acid for analysis of methylation status of SEQ ID NO: 42
atcggcgggaatttcgg

SEQ ID NO: 11712 - DNA, 19 bp, Artificial Sequence
  bisulfite treated nucleic acid for analysis of methylation status of SEQ ID NO: 42
ggttttagaatgagaggtt

SEQ ID NO: 11713 - DNA, 18 bp, Artificial Sequence
  bisulfite treated nucleic acid for analysis of methylation status of SEQ ID NO: 42
gaggatcgggattcgtag

SEQ ID NO: 11714 - DNA, 19 bp, Artificial Sequence
  bisulfite treated nucleic acid for analysis of methylation status of SEQ ID NO: 42
ttcgtttaagcggggtcgt

SEQ ID NO: 11715 - DNA, 22 bp, Artificial Sequence
  bisulfite treated nucleic acid for analysis of methylation status of SEQ ID NO: 42
gtcgggtttttgcgcggtggta

SEQ ID NO: 11716 - DNA, 19 bp, Artificial Sequence
  bisulfite treated nucleic acid for analysis of methylation status of SEQ ID NO: 42
aaaaccgaaacgacgtaaa

SEQ ID NO: 11717 - DNA, 17 bp, Artificial Sequence
  bisulfite treated nucleic acid for analysis of methylation status of SEQ ID NO: 42
tttgtttcggcgcgcgg

SEQ ID NO: 11718 - DNA, 17 bp, Artificial Sequence
  bisulfite treated nucleic acid for analysis of methylation status of SEQ ID NO: 42
gtcggtagaggggattt

SEQ ID NO: 11719 - DNA, 20 bp, Artificial Sequence
  bisulfite treated nucleic acid for analysis of methylation status of SEQ ID NO: 42
cgagttaaagcgaggttttg

SEQ ID NO: 11720 - DNA, 22 bp, Artificial Sequence
  bisulfite treated nucleic acid for analysis of methylation status of SEQ ID NO: 42
taaactccgaaataccgataac

SEQ ID NO: 11721 - DNA, 25 bp, Artificial Sequence
  bisulfite treated nucleic acid for analysis of methylation status of SEQ ID NO: 42
ttcgggtatcgttattagagaacgg

SEQ ID NO: 11722 - DNA, 18 bp, Artificial Sequence
  bisulfite treated nucleic acid for analysis of methylation status of SEQ ID NO: 42
gttttgagcggaattcgt

SEQ ID NO: 11723 - DNA, 18 bp, Artificial Sequence
  bisulfite treated nucleic acid for analysis of methylation status of SEQ ID NO: 42
gaacggggtttttcgtat

SEQ ID NO: 11724 - DNA, 22 bp, Artificial Sequence
  bisulfite treated nucleic acid for analysis of methylation status of SEQ ID NO: 42
cgcgacctaactaaactacaac

SEQ ID NO: 11725 - DNA, 22 bp, Artificial Sequence
  bisulfite treated nucleic acid for analysis of methylation status of SEQ ID NO: 42
cgacctaactaaactacaacgc

SEQ ID NO: 11726 - DNA, 16 bp, Artificial Sequence
  bisulfite treated nucleic acid for analysis of methylation status of SEQ ID NO: 42
tacgtgttttgcgcgt

SEQ ID NO: 11727 - DNA, 22 bp, Artificial Sequence
  bisulfite treated nucleic acid for analysis of methylation status of SEQ ID NO: 42
gcgacctaactaaactacaacg

SEQ ID NO: 11728 - DNA, 22 bp, Artificial Sequence
  bisulfite treated nucleic acid for analysis of methylation status of SEQ ID NO: 42
acctaactaaactacaacgcga

SEQ ID NO: 11729 - DNA, 22 bp, Artificial Sequence
  bisulfite treated nucleic acid for analysis of methylation status of SEQ ID NO: 42
ttatcggtatttcggagtttag

SEQ ID NO: 11730 - DNA, 18 bp, Artificial Sequence
  bisulfite treated nucleic acid for analysis of methylation status of SEQ ID NO: 42
gccgaccttctaacgaac

SEQ ID NO: 11731 - DNA, 18 bp, Artificial Sequence
  bisulfite treated nucleic acid for analysis of methylation status of SEQ ID NO: 42
gaccttctaacgaaccgc

SEQ ID NO: 11732 - DNA, 21 bp, Artificial Sequence
  bisulfite treated nucleic acid for analysis of methylation status of SEQ ID NO: 42
cctaactaaactacaacgcga

SEQ ID NO: 11733 - DNA, 22 bp, Artificial Sequence
  bisulfite treated nucleic acid for analysis of methylation status of SEQ ID NO: 42
ttttcgtattttacgtgttttg

SEQ ID NO: 11734 - DNA, 19 bp, Artificial Sequence
  bisulfite treated nucleic acid for analysis of methylation status of SEQ ID NO: 42
taccgacgcgacctaacta

SEQ ID NO: 11735 - DNA, 18 bp, Artificial Sequence
  bisulfite treated nucleic acid for analysis of methylation status of SEQ ID NO: 42
tacgaaaaccaccgaaaa

SEQ ID NO: 11736 - DNA, 22 bp, Artificial Sequence
  bisulfite treated nucleic acid for analysis of methylation status of SEQ ID NO: 42
ctaaactccgaaataccgataa

SEQ ID NO: 11737 - DNA, 20 bp, Artificial Sequence
  bisulfite treated nucleic acid for analysis of methylation status of SEQ ID NO: 42
ctaccgacgcgacctaacta

SEQ ID NO: 11738 - DNA, 20 bp, Artificial Sequence
  bisulfite treated nucleic acid for analysis of methylation status of SEQ ID NO: 42
ttttaccccgaatacgaaaa

SEQ ID NO: 11739 - DNA, 18 bp, Artificial Sequence
  bisulfite treated nucleic acid for analysis of methylation status of SEQ ID NO: 42
cgtaggtaggcggtttgt

SEQ ID NO: 11740 - DNA, 22 bp, Artificial Sequence
  bisulfite treated nucleic acid for analysis of methylation status of SEQ ID NO: 42
caaaacacgtaaaatacgaaaa

SEQ ID NO: 11741 - DNA, 16 bp, Artificial Sequence
  bisulfite treated nucleic acid for analysis of methylation status of SEQ ID NO: 42
ggcgcgtggggaacgg

SEQ ID NO: 11742 - DNA, 17 bp, Artificial Sequence
  bisulfite treated nucleic acid for analysis of methylation status of SEQ ID NO: 42
agcgcggttttcggcgg

SEQ ID NO: 11743 - DNA, 17 bp, Artificial Sequence
  bisulfite treated nucleic acid for analysis of methylation status of SEQ ID NO: 42
ctttcgccgaccttcta

SEQ ID NO: 11744 - DNA, 22 bp, Artificial Sequence
  bisulfite treated nucleic acid for analysis of methylation status of SEQ ID NO: 42
gttatcggattttagatcgttt

SEQ ID NO: 11745 - DNA, 22 bp, Artificial Sequence
  bisulfite treated nucleic acid for analysis of methylation status of SEQ ID NO: 42
gtgggtcgttttcgtttatatc

SEQ ID NO: 11746 - DNA, 22 bp, Artificial Sequence
  bisulfite treated nucleic acid for analysis of methylation status of SEQ ID NO: 42
gacgcgacctaactaaactaca

SEQ ID NO: 11747 - DNA, 17 bp, Artificial Sequence
  bisulfite treated nucleic acid for analysis of methylation status of SEQ ID NO: 42
cttctaacgaaccgcgt

SEQ ID NO: 11748 - DNA, 18 bp, Artificial Sequence
  bisulfite treated nucleic acid for analysis of methylation status of SEQ ID NO: 42
acggggtttttcgtattt

SEQ ID NO: 11749 - DNA, 18 bp, Artificial Sequence
  bisulfite treated nucleic acid for analysis of methylation status of SEQ ID NO: 42
aacggggtttttcgtatt

SEQ ID NO: 11750 - DNA, 20 bp, Artificial Sequence
  bisulfite treated nucleic acid for analysis of methylation status of SEQ ID NO: 42
aaaaaccgaaacgacgtaaa

SEQ ID NO: 11751 - DNA, 22 bp, Artificial Sequence
  bisulfite treated nucleic acid for analysis of methylation status of SEQ ID NO: 42
acgttagttgaggtagtatcgg

SEQ ID NO: 11752 - DNA, 18 bp, Artificial Sequence
  bisulfite treated nucleic acid for analysis of methylation status of SEQ ID NO: 42
gataacgacgatccgctt

SEQ ID NO: 11753 - DNA, 16 bp, Artificial Sequence
  bisulfite treated nucleic acid for analysis of methylation status of SEQ ID NO: 42
gacgcggttcgttaga

SEQ ID NO: 11754 - DNA, 19 bp, Artificial Sequence
  bisulfite treated nucleic acid for analysis of methylation status of SEQ ID NO: 42
aatttcggttttggttcgg

SEQ ID NO: 11755 - DNA, 17 bp, Artificial Sequence
  bisulfite treated nucleic acid for analysis of methylation status of SEQ ID NO: 42
acggagattcgtttgga

SEQ ID NO: 11756 - DNA, 22 bp, Artificial Sequence
  bisulfite treated nucleic acid for analysis of methylation status of SEQ ID NO: 42
gttctctaataacgatacccga

SEQ ID NO: 11757 - DNA, 18 bp, Artificial Sequence
  bisulfite treated nucleic acid for analysis of methylation status of SEQ ID NO: 42
agcggaattcgtattcgg

SEQ ID NO: 11758 - DNA, 18 bp, Artificial Sequence
  bisulfite treated nucleic acid for analysis of methylation status of SEQ ID NO: 42
ttcgagttaaagcgaggt

SEQ ID NO: 11759 - DNA, 17 bp, Artificial Sequence
  bisulfite treated nucleic acid for analysis of methylation status of SEQ ID NO: 42
gacggagattcgtttgg

SEQ ID NO: 11760 - DNA, 18 bp, Artificial Sequence
  bisulfite treated nucleic acid for analysis of methylation status of SEQ ID NO: 42
tttcgagttaaagcgagg

SEQ ID NO: 11761 - DNA, 19 bp, Artificial Sequence
  bisulfite treated nucleic acid for analysis of methylation status of SEQ ID NO: 42
tcgctacctaactcacgaa

SEQ ID NO: 11762 - DNA, 17 bp, Artificial Sequence
  bisulfite treated nucleic acid for analysis of methylation status of SEQ ID NO: 42
tctaacgaaccgcgtct

SEQ ID NO: 11763 - DNA, 21 bp, Artificial Sequence
  bisulfite treated nucleic acid for analysis of methylation status of SEQ ID NO: 42
tgggtcgttttcgtttatatc

SEQ ID NO: 11764 - DNA, 17 bp, Artificial Sequence
  bisulfite treated nucleic acid for analysis of methylation status of SEQ ID NO: 42
ttcgccgaccttctaac

SEQ ID NO: 11765 - DNA, 21 bp, Artificial Sequence
  bisulfite treated nucleic acid for analysis of methylation status of SEQ ID NO: 42
acgcgacctaactaaactaca

SEQ ID NO: 11766 - DNA, 16 bp, Artificial Sequence
  bisulfite treated nucleic acid for analysis of methylation status of SEQ ID NO: 42
ggagacgcggttcgtt

SEQ ID NO: 11767 - DNA, 20 bp, Artificial Sequence
  bisulfite treated nucleic acid for analysis of methylation status of SEQ ID NO: 42
gaatacgaaaaccaccgaaa

SEQ ID NO: 11768 - DNA, 20 bp, Artificial Sequence
  bisulfite treated nucleic acid for analysis of methylation status of SEQ ID NO: 42
acgtaaataacgcaaacacc

SEQ ID NO: 11769 - DNA, 18 bp, Artificial Sequence
  bisulfite treated nucleic acid for analysis of methylation status of SEQ ID NO: 42
gaatacgaaaaccaccga

SEQ ID NO: 11770 - DNA, 18 bp, Artificial Sequence
  bisulfite treated nucleic acid for analysis of methylation status of SEQ ID NO: 42
taaaagtcgggaggatcg

SEQ ID NO: 11771 - DNA, 18 bp, Artificial Sequence
  bisulfite treated nucleic acid for analysis of methylation status of SEQ ID NO: 42
agcgcgacggtttgtcgg

SEQ ID NO: 11772 - DNA, 19 bp, Artificial Sequence
  bisulfite treated nucleic acid for analysis of methylation status of SEQ ID NO: 42
gtaaaagtcgggaggatcg

SEQ ID NO: 11773 - DNA, 18 bp, Artificial Sequence
  bisulfite treated nucleic acid for analysis of methylation status of SEQ ID NO: 42
tttcgccgaccttctaac

SEQ ID NO: 11774 - DNA, 21 bp, Artificial Sequence
  bisulfite treated nucleic acid for analysis of methylation status of SEQ ID NO: 42
ttcgtattttacgtgttttgc

SEQ ID NO: 11775 - DNA, 21 bp, Artificial Sequence
  bisulfite treated nucleic acid for analysis of methylation status of SEQ ID NO: 42
aaactccgaaataccgataac

SEQ ID NO: 11776 - DNA, 18 bp, Artificial Sequence
  bisulfite treated nucleic acid for analysis of methylation status of SEQ ID NO: 42
tattcggggtaaaagtcg

SEQ ID NO: 11777 - DNA, 19 bp, Artificial Sequence
  bisulfite treated nucleic acid for analysis of methylation status of SEQ ID NO: 42
ccgatattcttcctcgcta

SEQ ID NO: 11778 - DNA, 19 bp, Artificial Sequence
  bisulfite treated nucleic acid for analysis of methylation status of SEQ ID NO: 42
ctacgcgataacacaacct

SEQ ID NO: 11779 - DNA, 22 bp, Artificial Sequence
  bisulfite treated nucleic acid for analysis of methylation status of SEQ ID NO: 42
tcggttttagttttattacgga

SEQ ID NO: 11780 - DNA, 19 bp, Artificial Sequence
  bisulfite treated nucleic acid for analysis of methylation status of SEQ ID NO: 42
tgcggtttcgtttgagcgg

SEQ ID NO: 11781 - DNA, 16 bp, Artificial Sequence
  bisulfite treated nucleic acid for analysis of methylation status of SEQ ID NO: 42
gacgtgggtggcgtaa

SEQ ID NO: 11782 - DNA, 18 bp, Artificial Sequence
  bisulfite treated nucleic acid for analysis of methylation status of SEQ ID NO: 42
gaacccctacgcgataac

SEQ ID NO: 11783 - DNA, 22 bp, Artificial Sequence
  bisulfite treated nucleic acid for analysis of methylation status of SEQ ID NO: 42
cggttttagttttattacggat

SEQ ID NO: 11784 - DNA, 22 bp, Artificial Sequence
  bisulfite treated nucleic acid for analysis of methylation status of SEQ ID NO: 42
ttcggttttagttttattacgg

SEQ ID NO: 11785 - DNA, 20 bp, Artificial Sequence
  bisulfite treated nucleic acid for analysis of methylation status of SEQ ID NO: 42
cctacgcgataacacaacct

SEQ ID NO: 11786 - DNA, 20 bp, Artificial Sequence
  bisulfite treated nucleic acid for analysis of methylation status of SEQ ID NO: 14
tggcgttatcgagatgttat

SEQ ID NO: 11787 - DNA, 22 bp, Artificial Sequence
  bisulfite treated nucleic acid for analysis of methylation status of SEQ ID NO: 14
tcgaacactaaacgaaaaacta

SEQ ID NO: 11788 - DNA, 16 bp, Artificial Sequence
  bisulfite treated nucleic acid for analysis of methylation status of SEQ ID NO: 14
tacgttttgcgagcgt

SEQ ID NO: 11789 - DNA, 17 bp, Artificial Sequence
  bisulfite treated nucleic acid for analysis of methylation status of SEQ ID NO: 14
atcgagtgtgcgatttg

SEQ ID NO: 11790 - DNA, 21 bp, Artificial Sequence
  bisulfite treated nucleic acid for analysis of methylation status of SEQ ID NO: 14
ttggcgttatcgagatgttat

SEQ ID NO: 11791 - DNA, 22 bp, Artificial Sequence
  bisulfite treated nucleic acid for analysis of methylation status of SEQ ID NO: 14
tttggcgttatcgagatgttat

SEQ ID NO: 11792 - DNA, 20 bp, Artificial Sequence
  bisulfite treated nucleic acid for analysis of methylation status of SEQ ID NO: 14
acaatacgacgataaacgct

SEQ ID NO: 11793 - DNA, 20 bp, Artificial Sequence
  bisulfite treated nucleic acid for analysis of methylation status of SEQ ID NO: 14
ggttagtcgtgtcggtttta

SEQ ID NO: 11794 - DNA, 21 bp, Artificial Sequence
  bisulfite treated nucleic acid for analysis of methylation status of SEQ ID NO: 14
gtcgagataggtgttcgcgtt

SEQ ID NO: 11795 - DNA, 24 bp, Artificial Sequence
  bisulfite treated nucleic acid for analysis of methylation status of SEQ ID NO: 14
taatttaaggttgtttagatagat

SEQ ID NO: 11796 - DNA, 22 bp, Artificial Sequence
  bisulfite treated nucleic acid for analysis of methylation status of SEQ ID NO: 43
gtattttagacgtgaacgagtg

SEQ ID NO: 11797 - DNA, 20 bp, Artificial Sequence
  bisulfite treated nucleic acid for analysis of methylation status of SEQ ID NO: 43
aatacgaaccgaaacaaaaa

SEQ ID NO: 11798 - DNA, 19 bp, Artificial Sequence
  bisulfite treated nucleic acid for analysis of methylation status of SEQ ID NO: 43
atcgattcggatttcgcgg

SEQ ID NO: 11799 - DNA, 23 bp, Artificial Sequence
  bisulfite treated nucleic acid for analysis of methylation status of SEQ ID NO: 43
ggcgagtgttttaatattgacgg

SEQ ID NO: 11800 - DNA, 22 bp, Artificial Sequence
  bisulfite treated nucleic acid for analysis of methylation status of SEQ ID NO: 43
tattttagacgtgaacgagtgt

SEQ ID NO: 11801 - DNA, 20 bp, Artificial Sequence
  bisulfite treated nucleic acid for analysis of methylation status of SEQ ID NO: 43
gaatacgaaccgaaacaaaa

SEQ ID NO: 11802 - DNA, 21 bp, Artificial Sequence
  bisulfite treated nucleic acid for analysis of methylation status of SEQ ID NO: 43
attttagacgtgaacgagtgt

SEQ ID NO: 11803 - DNA, 21 bp, Artificial Sequence
  bisulfite treated nucleic acid for analysis of methylation status of SEQ ID NO: 43
tttagacgtgaacgagtgttt

SEQ ID NO: 11804 - DNA, 19 bp, Artificial Sequence
  bisulfite treated nucleic acid for analysis of methylation status of SEQ ID NO: 43
aatcaacccgaatacgaac

SEQ ID NO: 11805 - DNA, 21 bp, Artificial Sequence
  bisulfite treated nucleic acid for analysis of methylation status of SEQ ID NO: 43
ggtttcgtgatttcgtttaat

SEQ ID NO: 11806 - DNA, 20 bp, Artificial Sequence
  bisulfite treated nucleic acid for analysis of methylation status of SEQ ID NO: 43
taaaacactcgccgtaaaaa

SEQ ID NO: 11807 - DNA, 18 bp, Artificial Sequence
  bisulfite treated nucleic acid for analysis of methylation status of SEQ ID NO: 43
ttcgcgtattttagacgt

SEQ ID NO: 11808 - DNA, 16 bp, Artificial Sequence
  bisulfite treated nucleic acid for analysis of methylation status of SEQ ID NO: 43
agtgtttggagggcga

SEQ ID NO: 11809 - DNA, 20 bp, Artificial Sequence
  bisulfite treated nucleic acid for analysis of methylation status of SEQ ID NO: 43
ttaaaacactcgccgtaaaa

SEQ ID NO: 11810 - DNA, 21 bp, Artificial Sequence
  bisulfite treated nucleic acid for analysis of methylation status of SEQ ID NO: 43
gtagacgttgacgagtgtagc

SEQ ID NO: 11811 - DNA, 18 bp, Artificial Sequence
  bisulfite treated nucleic acid for analysis of methylation status of SEQ ID NO: 43
aaaaacgaaatccgaacc

SEQ ID NO: 11812 - DNA, 18 bp, Artificial Sequence
  bisulfite treated nucleic acid for analysis of methylation status of SEQ ID NO: 43
atcgacggttttttcgag

SEQ ID NO: 11813 - DNA, 19 bp, Artificial Sequence
  bisulfite treated nucleic acid for analysis of methylation status of SEQ ID NO: 43
aggaggatttttgttagag

SEQ ID NO: 11814 - DNA, 18 bp, Artificial Sequence
  bisulfite treated nucleic acid for analysis of methylation status of SEQ ID NO: 43
cgaatacgaaccgaaaca

SEQ ID NO: 11815 - DNA, 18 bp, Artificial Sequence
  bisulfite treated nucleic acid for analysis of methylation status of SEQ ID NO: 43
accgaaacgaaacctctc

SEQ ID NO: 11816 - DNA, 17 bp, Artificial Sequence
  bisulfite treated nucleic acid for analysis of methylation status of SEQ ID NO: 43
ttcgggatatcgcgttg

SEQ ID NO: 11817 - DNA, 18 bp, Artificial Sequence
  bisulfite treated nucleic acid for analysis of methylation status of SEQ ID NO: 43
aaccgaaacgaaacctct

SEQ ID NO: 11818 - DNA, 20 bp, Artificial Sequence
  bisulfite treated nucleic acid for analysis of methylation status of SEQ ID NO: 43
ttttagacgtgaacgagtgt

SEQ ID NO: 11819 - DNA, 21 bp, Artificial Sequence
  bisulfite treated nucleic acid for analysis of methylation status of SEQ ID NO: 43
ctcctcaaacgtaaacgaata

SEQ ID NO: 11820 - DNA, 22 bp, Artificial Sequence
  bisulfite treated nucleic acid for analysis of methylation status of SEQ ID NO: 43
aggatcgtagtttcggatatag

SEQ ID NO: 11821 - DNA, 16 bp, Artificial Sequence
  bisulfite treated nucleic acid for analysis of methylation status of SEQ ID NO: 43
agcgttgcgattcgta

SEQ ID NO: 11822 - DNA, 16 bp, Artificial Sequence
  bisulfite treated nucleic acid for analysis of methylation status of SEQ ID NO: 43
ggtaggagtcgggaga

SEQ ID NO: 11823 - DNA, 22 bp, Artificial Sequence
  bisulfite treated nucleic acid for analysis of methylation status of SEQ ID NO: 43
tctcctcaaacgtaaacgaata

SEQ ID NO: 11824 - DNA, 20 bp, Artificial Sequence
  bisulfite treated nucleic acid for analysis of methylation status of SEQ ID NO: 43
ctcctcaaacgtaaacgaat

SEQ ID NO: 11825 - DNA, 22 bp, Artificial Sequence
  bisulfite treated nucleic acid for analysis of methylation status of SEQ ID NO: 43
gtagtttcggatatagcggtag

SEQ ID NO: 11826 - DNA, 16 bp, Artificial Sequence
  bisulfite treated nucleic acid for analysis of methylation status of SEQ ID NO: 43
tgggtttcgttcgcga

SEQ ID NO: 11827 - DNA, 21 bp, Artificial Sequence
  bisulfite treated nucleic acid for analysis of methylation status of SEQ ID NO: 43
tctcctcaaacgtaaacgaat

SEQ ID NO: 11828 - DNA, 22 bp, Artificial Sequence
  bisulfite treated nucleic acid for analysis of methylation status of SEQ ID NO: 43
ctctcctcaaacgtaaacgaat

SEQ ID NO: 11829 - DNA, 21 bp, Artificial Sequence
  bisulfite treated nucleic acid for analysis of methylation status of SEQ ID NO: 43
acgacgaatacctcaacacta

SEQ ID NO: 11830 - DNA, 20 bp, Artificial Sequence
  bisulfite treated nucleic acid for analysis of methylation status of SEQ ID NO: 43
taggattagttcgggtacga

SEQ ID NO: 11831 - DNA, 18 bp, Artificial Sequence
  bisulfite treated nucleic acid for analysis of methylation status of SEQ ID NO: 43
aggtttcgcggggttcgg

SEQ ID NO: 11832 - DNA, 18 bp, Artificial Sequence
  bisulfite treated nucleic acid for analysis of methylation status of SEQ ID NO: 43
ggtagttaggggtataag

SEQ ID NO: 11833 - DNA, 20 bp, Artificial Sequence
  bisulfite treated nucleic acid for analysis of methylation status of SEQ ID NO: 43
tcctcaaacgtaaacgaata

SEQ ID NO: 11834 - DNA, 17 bp, Artificial Sequence
  bisulfite treated nucleic acid for analysis of methylation status of SEQ ID NO: 43
ggagtcgggagagtttt

SEQ ID NO: 11835 - DNA, 21 bp, Artificial Sequence
  bisulfite treated nucleic acid for analysis of methylation status of SEQ ID NO: 43
ttaggattagttcgggtacga

SEQ ID NO: 11836 - DNA, 20 bp, Artificial Sequence
  bisulfite treated nucleic acid for analysis of methylation status of SEQ ID NO: 43
caaacgtaaacgaatatcgc

SEQ ID NO: 11837 - DNA, 21 bp, Artificial Sequence
  bisulfite treated nucleic acid for analysis of methylation status of SEQ ID NO: 43
tctctcctcaaacgtaaacga

SEQ ID NO: 11838 - DNA, 16 bp, Artificial Sequence
  bisulfite treated nucleic acid for analysis of methylation status of SEQ ID NO: 43
gggtttcgttcgcgat

SEQ ID NO: 11839 - DNA, 22 bp, Artificial Sequence
  bisulfite treated nucleic acid for analysis of methylation status of SEQ ID NO: 43
ctctctcctcaaacgtaaacga

SEQ ID NO: 11840 - DNA, 20 bp, Artificial Sequence
  bisulfite treated nucleic acid for analysis of methylation status of SEQ ID NO: 43
cgactcctaccgctatatcc

SEQ ID NO: 11841 - DNA, 22 bp, Artificial Sequence
  bisulfite treated nucleic acid for analysis of methylation status of SEQ ID NO: 43
ggagtagtttttagtatcgcgt

SEQ ID NO: 11842 - DNA, 17 bp, Artificial Sequence
  bisulfite treated nucleic acid for analysis of methylation status of SEQ ID NO: 43
agcgttagcgaaggcgg

SEQ ID NO: 11843 - DNA, 22 bp, Artificial Sequence
  bisulfite treated nucleic acid for analysis of methylation status of SEQ ID NO: 43
ttcgcgtggtatttaggatcgt

SEQ ID NO: 11844 - DNA, 21 bp, Artificial Sequence
  bisulfite treated nucleic acid for analysis of methylation status of SEQ ID NO: 43
ggatcgtagtttcggatatag

SEQ ID NO: 11845 - DNA, 19 bp, Artificial Sequence
  bisulfite treated nucleic acid for analysis of methylation status of SEQ ID NO: 43
aggattagttcgggtacga

SEQ ID NO: 11846 - DNA, 21 bp, Artificial Sequence
  bisulfite treated nucleic acid for analysis of methylation status of SEQ ID NO: 43
tagtttcggatatagcggtag

SEQ ID NO: 11847 - DNA, 20 bp, Artificial Sequence
  bisulfite treated nucleic acid for analysis of methylation status of SEQ ID NO: 43
tacttccctcacgacgaata

SEQ ID NO: 11848 - DNA, 21 bp, Artificial Sequence
  nucleic acid for analysis of methylation status of SEQ ID NO: 43
gttaggattagttcgggtacg

SEQ ID NO: 11849 - DNA, 17 bp, Artificial Sequence
  bisulfite treated nucleic acid for analysis of methylation status of SEQ ID NO: 43
aggagtcgggagagttt

SEQ ID NO: 11850 - DNA, 21 bp, Artificial Sequence
  bisulfite treated nucleic acid for analysis of methylation status of SEQ ID NO: 43
tcaaacgtaaacgaatatcgc

SEQ ID NO: 11851 - DNA, 23 bp, Artificial Sequence
  bisulfite treated nucleic acid for analysis of methylation status of SEQ ID NO: 43
agtttttagtatcgcgttgtaag

SEQ ID NO: 11852 - DNA, 21 bp, Artificial Sequence
  bisulfite treated nucleic acid for analysis of methylation status of SEQ ID NO: 43
ctacttccctcacgacgaata

SEQ ID NO: 11853 - DNA, 21 bp, Artificial Sequence
  bisulfite treated nucleic acid for analysis of methylation status of SEQ ID NO: 43
ttttagtatcgcgttgtaagc

SEQ ID NO: 11854 - DNA, 24 bp, Artificial Sequence
  bisulfite treated nucleic acid for analysis of methylation status of SEQ ID NO: 43
gttcgcgtggtatttaggatcgta

SEQ ID NO: 11855 - DNA, 16 bp, Artificial Sequence
  bisulfite treated nucleic acid for analysis of methylation status of SEQ ID NO: 43
aaggcgggtgggggta

SEQ ID NO: 11856 - DNA, 22 bp, Artificial Sequence
  bisulfite treated nucleic acid for analysis of methylation status of SEQ ID NO: 43
gtttttagtatcgcgttgtaag

SEQ ID NO: 11857 - DNA, 19 bp, Artificial Sequence
  bisulfite treated nucleic acid for analysis of methylation status of SEQ ID NO: 43
tatacgaatcgcaacgcta

SEQ ID NO: 11858 - DNA, 22 bp, Artificial Sequence
  bisulfite treated nucleic acid for analysis of methylation status of SEQ ID NO: 43
tttatcgttataggtgttttcg

SEQ ID NO: 11859 - DNA, 18 bp, Artificial Sequence
  bisulfite treated nucleic acid for analysis of methylation status of SEQ ID NO: 43
ggatatagcggtaggagt

SEQ ID NO: 11860 - DNA, 22 bp, Artificial Sequence
  bisulfite treated nucleic acid for analysis of methylation status of SEQ ID NO: 43
tctctcctcaaacgtaaacgaa

SEQ ID NO: 11861 - DNA, 23 bp, Artificial Sequence
  bisulfite treated nucleic acid for analysis of methylation status of SEQ ID NO: 43
gtttatcgttataggtgttttcg

SEQ ID NO: 11862 - DNA, 22 bp, Artificial Sequence
  bisulfite treated nucleic acid for analysis of methylation status of SEQ ID NO: 43
ttatcgttataggtgttttcgg

SEQ ID NO: 11863 - DNA, 23 bp, Artificial Sequence
  bisulfite treated nucleic acid for analysis of methylation status of SEQ ID NO: 43
gagtagtttttagtatcgcgttg

SEQ ID NO: 11864 - DNA, 22 bp, Artificial Sequence
  bisulfite treated nucleic acid for analysis of methylation status of SEQ ID NO: 43
tcctcaaacgtaaacgaatatc

SEQ ID NO: 11865 - DNA, 19 bp, Artificial Sequence
  bisulfite treated nucleic acid for analysis of methylation status of SEQ ID NO: 43
cgttataggtgttttcggg

SEQ ID NO: 11866 - DNA, 20 bp, Artificial Sequence
  bisulfite treated nucleic acid for analysis of methylation status of SEQ ID NO: 43
ctcacgacgaatacctcaac

SEQ ID NO: 11867 - DNA, 21 bp, Artificial Sequence
  bisulfite treated nucleic acid for analysis of methylation status of SEQ ID NO: 15
tatgtacgtttagaggttcgg

SEQ ID NO: 11868 - DNA, 20 bp, Artificial Sequence
  bisulfite treated nucleic acid for analysis of methylation status of SEQ ID NO: 15
aaacgataaaaacaccgcta

SEQ ID NO: 11869 - DNA, 18 bp, Artificial Sequence
  bisulfite treated nucleic acid for analysis of methylation status of SEQ ID NO: 15
ggcggttttagtacgcga

SEQ ID NO: 11870 - DNA, 22 bp, Artificial Sequence
  bisulfite treated nucleic acid for analysis of methylation status of SEQ ID NO: 15
ggataggtattatttgtttttg

SEQ ID NO: 11871 - DNA, 21 bp, Artificial Sequence
  bisulfite treated nucleic acid for analysis of methylation status of SEQ ID NO: 15
ggtgtagacgttgtcgtagag

SEQ ID NO: 11872 - DNA, 20 bp, Artificial Sequence
  bisulfite treated nucleic acid for analysis of methylation status of SEQ ID NO: 15
cgcatctctaactcgaaaaa

SEQ ID NO: 11873 - DNA, 17 bp, Artificial Sequence
  bisulfite treated nucleic acid for analysis of methylation status of SEQ ID NO: 15
ttcgttcgcgtttacgt

SEQ ID NO: 11874 - DNA, 16 bp, Artificial Sequence
  bisulfite treated nucleic acid for analysis of methylation status of SEQ ID NO: 15
gttttcgcgacgtcgg

SEQ ID NO: 11875 - DNA, 21 bp, Artificial Sequence
  bisulfite treated nucleic acid for analysis of methylation status of SEQ ID NO: 15
aaaacgataaaaacaccgcta

SEQ ID NO: 11876 - DNA, 21 bp, Artificial Sequence
  bisulfite treated nucleic acid for analysis of methylation status of SEQ ID NO: 15
gtagacgttgtcgtagagtcg

SEQ ID NO: 11877 - DNA, 22 bp, Artificial Sequence
  bisulfite treated nucleic acid for analysis of methylation status of SEQ ID NO: 15
aaaaacgataaaaacaccgcta

SEQ ID NO: 11878 - DNA, 22 bp, Artificial Sequence
  bisulfite treated nucleic acid for analysis of methylation status of SEQ ID NO: 15
aaaacaaacgaaaccgatataa

SEQ ID NO: 11879 - DNA, 21 bp, Artificial Sequence
  bisulfite treated nucleic acid for analysis of methylation status of SEQ ID NO: 15
attttaagttcgattcggtga

SEQ ID NO: 11880 - DNA, 25 bp, Artificial Sequence
  bisulfite treated nucleic acid for analysis of methylation status of SEQ ID NO: 15
tttgtagatttagtgttggttttgg

SEQ ID NO: 11881 - DNA, 20 bp, Artificial Sequence
  bisulfite treated nucleic acid for analysis of methylation status of SEQ ID NO: 15
aggaggtttgtttggagcgt

SEQ ID NO: 11882 - DNA, 20 bp, Artificial Sequence
  nucleic acid for analysis of methylation status of SEQ ID NO: 15
aaacgaccataacgatcaat

SEQ ID NO: 11883 - DNA, 22 bp, Artificial Sequence
  bisulfite treated nucleic acid for analysis of methylation status of SEQ ID NO: 15
gcgttgtttttcgtagatttag

SEQ ID NO: 11884 - DNA, 25 bp, Artificial Sequence
  bisulfite treated nucleic acid for analysis of methylation status of SEQ ID NO: 15
ttcggtatgcgtttttttatatcgg

SEQ ID NO: 11885 - DNA, 19 bp, Artificial Sequence
  bisulfite treated nucleic acid for analysis of methylation status of SEQ ID NO: 15
tggagtatttattttgcgg

SEQ ID NO: 11886 - DNA, 20 bp, Artificial Sequence
  bisulfite treated nucleic acid for analysis of methylation status of SEQ ID NO: 15
ttttaagttcgattcggtga

SEQ ID NO: 11887 - DNA, 22 bp, Artificial Sequence
  bisulfite treated nucleic acid for analysis of methylation status of SEQ ID NO: 15
gattttaagttcgattcggtga

SEQ ID NO: 11888 - DNA, 21 bp, Artificial Sequence
  bisulfite treated nucleic acid for analysis of methylation status of SEQ ID NO: 15
aaacaaacgaaaccgatataa

SEQ ID NO: 11889 - DNA, 21 bp, Artificial Sequence
  bisulfite treated nucleic acid for analysis of methylation status of SEQ ID NO: 15
agcgttgtttttcgtagattt

SEQ ID NO: 11890 - DNA, 19 bp, Artificial Sequence
  bisulfite treated nucleic acid for analysis of methylation status of SEQ ID NO: 15
tttaagttcgattcggtga

SEQ ID NO: 11891 - DNA, 20 bp, Artificial Sequence
  bisulfite treated nucleic acid for analysis of methylation status of SEQ ID NO: 15
gaaaacgaccataacgatca

SEQ ID NO: 11892 - DNA, 22 bp, Artificial Sequence
  bisulfite treated nucleic acid for analysis of methylation status of SEQ ID NO: 15
tgtttttcgtagatttagcgtc

SEQ ID NO: 11893 - DNA, 20 bp, Artificial Sequence
  bisulfite treated nucleic acid for analysis of methylation status of SEQ ID NO: 15
gagcgttgtttttcgtagat

SEQ ID NO: 11894 - DNA, 24 bp, Artificial Sequence
  bisulfite treated nucleic acid for analysis of methylation status of SEQ ID NO: 15
ccgaacgtacaacttaataaaaat

SEQ ID NO: 11895 - DNA, 21 bp, Artificial Sequence
  bisulfite treated nucleic acid for analysis of methylation status of SEQ ID NO: 15
ttatatcggtttcgtttgttt

SEQ ID NO: 11896 - DNA, 16 bp, Artificial Sequence
  bisulfite treated nucleic acid for analysis of methylation status of SEQ ID NO: 15
atggtcgttttcgcgt

SEQ ID NO: 11897 - DNA, 22 bp, Artificial Sequence
  bisulfite treated nucleic acid for analysis of methylation status of SEQ ID NO: 15
ggtttatatgagatttagattg

SEQ ID NO: 11898 - DNA, 22 bp, Artificial Sequence
  bisulfite treated nucleic acid for analysis of methylation status of SEQ ID NO: 4
gtagtttcgcggtttatagagg

SEQ ID NO: 11899 - DNA, 22 bp, Artificial Sequence
  bisulfite treated nucleic acid for analysis of methylation status of SEQ ID NO: 4
gataatacgaacgaccaaaact

SEQ ID NO: 11900 - DNA, 16 bp, Artificial Sequence
  bisulfite treated nucleic acid for analysis of methylation status of SEQ ID NO: 4
gagtcgcgttgcgcgg

SEQ ID NO: 11901 - DNA, 20 bp, Artificial Sequence
  bisulfite treated nucleic acid for analysis of methylation status of SEQ ID NO: 4
gtcgaggttttgtagttcgg

SEQ ID NO: 11902 - DNA, 22 bp, Artificial Sequence
  bisulfite treated nucleic acid for analysis of methylation status of SEQ ID NO: 4
tagtttcgcggtttatagaggt

SEQ ID NO: 11903 - DNA, 22 bp, Artificial Sequence
  bisulfite treated nucleic acid for analysis of methylation status of SEQ ID NO: 4
ggtagtttcgcggtttatagag

SEQ ID NO: 11904 - DNA, 22 bp, Artificial Sequence
  bisulfite treated nucleic acid for analysis of methylation status of SEQ ID NO: 4
gtcgtttttagatcgtgatttt

SEQ ID NO: 11905 - DNA, 20 bp, Artificial Sequence
  bisulfite treated nucleic acid for analysis of methylation status of SEQ ID NO: 4
acaatcgaacgcactaactc

SEQ ID NO: 11906 - DNA, 21 bp, Artificial Sequence
  bisulfite treated nucleic acid for analysis of methylation status of SEQ ID NO: 4
ttcgcgtcgttttttgtcgga

SEQ ID NO: 11907 - DNA, 16 bp, Artificial Sequence
  bisulfite treated nucleic acid for analysis of methylation status of SEQ ID NO: 4
aagttttgcgggcggg

SEQ ID NO: 11908 - DNA, 20 bp, Artificial Sequence
  bisulfite treated nucleic acid for analysis of methylation status of SEQ ID NO: 4
gtttcgcggtttatagaggt

SEQ ID NO: 11909 - DNA, 19 bp, Artificial Sequence
  bisulfite treated nucleic acid for analysis of methylation status of SEQ ID NO: 4
tttcgcggtttatagaggt

SEQ ID NO: 11910 - DNA, 22 bp, Artificial Sequence
  bisulfite treated nucleic acid for analysis of methylation status of SEQ ID NO: 4
atacgaacgaccaaaactaact

SEQ ID NO: 11911 - DNA, 19 bp, Artificial Sequence
  bisulfite treated nucleic acid for analysis of methylation status of SEQ ID NO: 4
cgcggtttatagaggtttc

SEQ ID NO: 11912 - DNA, 19 bp, Artificial Sequence
  bisulfite treated nucleic acid for analysis of methylation status of SEQ ID NO: 4
tcgcggtttatagaggttt

SEQ ID NO: 11913 - DNA, 19 bp, Artificial Sequence
  bisulfite treated nucleic acid for analysis of methylation status of SEQ ID NO: 4
ttcgcggtttatagaggtt

SEQ ID NO: 11914 - DNA, 19 bp, Artificial Sequence
  bisulfite treated nucleic acid for analysis of methylation status of SEQ ID NO: 4
gcggtttatagaggtttcg

SEQ ID NO: 11915 - DNA, 21 bp, Artificial Sequence
  bisulfite treated nucleic acid for analysis of methylation status of SEQ ID NO: 4
agtttcgcggtttatagaggt

SEQ ID NO: 11916 - DNA, 22 bp, Artificial Sequence
  bisulfite treated nucleic acid for analysis of methylation status of SEQ ID NO: 4
aatacgaacgaccaaaactaac

SEQ ID NO: 11917 - DNA, 19 bp, Artificial Sequence
  bisulfite treated nucleic acid for analysis of methylation status of SEQ ID NO: 4
cggtttatagaggtttcgg

SEQ ID NO: 11918 - DNA, 20 bp, Artificial Sequence
  bisulfite treated nucleic acid for analysis of methylation status of SEQ ID NO: 4
tagttttgtatcgttcgggt

SEQ ID NO: 11919 - DNA, 21 bp, Artificial Sequence
  bisulfite treated nucleic acid for analysis of methylation status of SEQ ID NO: 4
ctcgataaatcaaaaacgaaa

SEQ ID NO: 11920 - DNA, 16 bp, Artificial Sequence
  bisulfite treated nucleic acid for analysis of methylation status of SEQ ID NO: 4
tatcgttttggcgcgt

SEQ ID NO: 11921 - DNA, 21 bp, Artificial Sequence
  bisulfite treated nucleic acid for analysis of methylation status of SEQ ID NO: 4
tagataggtgtatgaagattt

SEQ ID NO: 11922 - DNA, 22 bp, Artificial Sequence
  bisulfite treated nucleic acid for analysis of methylation status of SEQ ID NO: 4
taggtagtttcgcggtttatag

SEQ ID NO: 11923 - DNA, 20 bp, Artificial Sequence
  bisulfite treated nucleic acid for analysis of methylation status of SEQ ID NO: 4
aacgataatacgaacgacca

SEQ ID NO: 11924 - DNA, 21 bp, Artificial Sequence
  bisulfite treated nucleic acid for analysis of methylation status of SEQ ID NO: 4
tcgataaatcaaaaacgaaaa

SEQ ID NO: 11925 - DNA, 22 bp, Artificial Sequence
  bisulfite treated nucleic acid for analysis of methylation status of SEQ ID NO: 4
taatacgaacgaccaaaactaa

SEQ ID NO: 11926 - DNA, 22 bp, Artificial Sequence
  bisulfite treated nucleic acid for analysis of methylation status of SEQ ID NO: 4
tcgtttttagatcgtgattttc

SEQ ID NO: 11927 - DNA, 20 bp, Artificial Sequence
  bisulfite treated nucleic acid for analysis of methylation status of SEQ ID NO: 4
ttcgcggtttatagaggttt

SEQ ID NO: 11928 - DNA, 19 bp, Artificial Sequence
  bisulfite treated nucleic acid for analysis of methylation status of SEQ ID NO: 4
caatcgaacgcactaactc

SEQ ID NO: 11929 - DNA, 23 bp, Artificial Sequence
  bisulfite treated nucleic acid for analysis of methylation status of SEQ ID NO: 4
ataatacgaacgaccaaaactaa

SEQ ID NO: 11930 - DNA, 21 bp, Artificial Sequence
  bisulfite treated nucleic acid for analysis of methylation status of SEQ ID NO: 4
aggtagtttcgcggtttatag

SEQ ID NO: 11931 - DNA, 20 bp, Artificial Sequence
  bisulfite treated nucleic acid for analysis of methylation status of SEQ ID NO: 4
acgataatacgaacgaccaa

SEQ ID NO: 11932 - DNA, 21 bp, Artificial Sequence
  bisulfite treated nucleic acid for analysis of methylation status of SEQ ID NO: 4
cgtttttagatcgtgattttc

SEQ ID NO: 11933 - DNA, 22 bp, Artificial Sequence
  bisulfite treated nucleic acid for analysis of methylation status of SEQ ID NO: 4
taaaataaacgaacgaccaata

SEQ ID NO: 11934 - DNA, 21 bp, Artificial Sequence
  bisulfite treated nucleic acid for analysis of methylation status of SEQ ID NO: 4
cgtatttcggagaagaagttt

SEQ ID NO: 11935 - DNA, 20 bp, Artificial Sequence
  bisulfite treated nucleic acid for analysis of methylation status of SEQ ID NO: 4
ttcgagaaagatgtcgtcgt

SEQ ID NO: 11936 - DNA, 18 bp, Artificial Sequence
  bisulfite treated nucleic acid for analysis of methylation status of SEQ ID NO: 4
attttcgtttcggaggtt

SEQ ID NO: 11937 - DNA, 22 bp, Artificial Sequence
  bisulfite treated nucleic acid for analysis of methylation status of SEQ ID NO: 4
cttaataaaacctcgatttccg

SEQ ID NO: 11938 - DNA, 22 bp, Artificial Sequence
  bisulfite treated nucleic acid for analysis of methylation status of SEQ ID NO: 4
tatatttgtttataggcgcgtt

SEQ ID NO: 11939 - DNA, 20 bp, Artificial Sequence
  bisulfite treated nucleic acid for analysis of methylation status of SEQ ID NO: 4
gttggggtttggaagtgtgt

SEQ ID NO: 11940 - DNA, 16 bp, Artificial Sequence
  bisulfite treated nucleic acid for analysis of methylation status of SEQ ID NO: 4
ttcgagcggtgtaggg

SEQ ID NO: 11941 - DNA, 21 bp, Artificial Sequence
  bisulfite treated nucleic acid for analysis of methylation status of SEQ ID NO: 4
ttaataaaacctcgatttccg

SEQ ID NO: 11942 - DNA, 21 bp, Artificial Sequence
  bisulfite treated nucleic acid for analysis of methylation status of SEQ ID NO: 4
cgaaaaactctcctaaacgac

SEQ ID NO: 11943 - DNA, 22 bp, Artificial Sequence
  bisulfite treated nucleic acid for analysis of methylation status of SEQ ID NO: 4
tcgtaaagttcggtttaatttg

SEQ ID NO: 11944 - DNA, 17 bp, Artificial Sequence
  bisulfite treated nucleic acid for analysis of methylation status of SEQ ID NO: 4
ttcgtaggcgttatcgt

SEQ ID NO: 11945 - DNA, 17 bp, Artificial Sequence
  bisulfite treated nucleic acid for analysis of methylation status of SEQ ID NO: 4
ggcgtatttcggagaag

SEQ ID NO: 11946 - DNA, 21 bp, Artificial Sequence
  bisulfite treated nucleic acid for analysis of methylation status of SEQ ID NO: 4
ataaaataaacgaacgaccaa

SEQ ID NO: 11947 - DNA, 21 bp, Artificial Sequence
  bisulfite treated nucleic acid for analysis of methylation status of SEQ ID NO: 4
aaataaacgaacgaccaataa

SEQ ID NO: 11948 - DNA, 21 bp, Artificial Sequence
  bisulfite treated nucleic acid for analysis of methylation status of SEQ ID NO: 4
aaaataaacgaacgaccaata

SEQ ID NO: 11949 - DNA, 21 bp, Artificial Sequence
  bisulfite treated nucleic acid for analysis of methylation status of SEQ ID NO: 4
ctcgaaaaactctcctaaacg

SEQ ID NO: 11950 - DNA, 22 bp, Artificial Sequence
  bisulfite treated nucleic acid for analysis of methylation status of SEQ ID NO: 4
cgaacgaccaataaaaacataa

SEQ ID NO: 11951 - DNA, 20 bp, Artificial Sequence
  bisulfite treated nucleic acid for analysis of methylation status of SEQ ID NO: 4
taataaaacctcgatttccg

SEQ ID NO: 11952 - DNA, 20 bp, Artificial Sequence
  bisulfite treated nucleic acid for analysis of methylation status of SEQ ID NO: 4
tcgaaaaactctcctaaacg

SEQ ID NO: 11953 - DNA, 21 bp, Artificial Sequence
  bisulfite treated nucleic acid for analysis of methylation status of SEQ ID NO: 4
cgtaaagttcggtttaatttg

SEQ ID NO: 11954 - DNA, 22 bp, Artificial Sequence
  bisulfite treated nucleic acid for analysis of methylation status of SEQ ID NO: 4
tatttgtttataggcgcgttag

SEQ ID NO: 11955 - DNA, 20 bp, Artificial Sequence
  bisulfite treated nucleic acid for analysis of methylation status of SEQ ID NO: 4
actctaatcgctcgcactac

SEQ ID NO: 11956 - DNA, 23 bp, Artificial Sequence
  bisulfite treated nucleic acid for analysis of methylation status of SEQ ID NO: 4
tcgagatttagacgtagattttt

SEQ ID NO: 11957 - DNA, 17 bp, Artificial Sequence
  nucleic acid for analysis of methylation status of SEQ ID NO: 4
agtcgggttcggtgcgt

SEQ ID NO: 11958 - DNA, 18 bp, Artificial Sequence
  bisulfite treated nucleic acid for analysis of methylation status of SEQ ID NO: 4
aatttttgttgttcgcgt

SEQ ID NO: 11959 - DNA, 21 bp, Artificial Sequence
  bisulfite treated nucleic acid for analysis of methylation status of SEQ ID NO: 4
accgcgactattatacgacta

SEQ ID NO: 11960 - DNA, 20 bp, Artificial Sequence
  bisulfite treated nucleic acid for analysis of methylation status of SEQ ID NO: 4
gttcgtgttcggttgttatt

SEQ ID NO: 11961 - DNA, 24 bp, Artificial Sequence
  bisulfite treated nucleic acid for analysis of methylation status of SEQ ID NO: 4
ttcgttagttgttttcggagtcga

SEQ ID NO: 11962 - DNA, 19 bp, Artificial Sequence
  bisulfite treated nucleic acid for analysis of methylation status of SEQ ID NO: 4
gttttaacgtcgttaggga

SEQ ID NO: 11963 - DNA, 20 bp, Artificial Sequence
  bisulfite treated nucleic acid for analysis of methylation status of SEQ ID NO: 4
gcgtatttcggagaagaagt

SEQ ID NO: 11964 - DNA, 20 bp, Artificial Sequence
  bisulfite treated nucleic acid for analysis of methylation status of SEQ ID NO: 4
cggttgttattgatcgtttt

SEQ ID NO: 11965 - DNA, 22 bp, Artificial Sequence
  bisulfite treated nucleic acid for analysis of methylation status of SEQ ID NO: 4
ttcggagtcgagtaggtttcga

SEQ ID NO: 11966 - DNA, 18 bp, Artificial Sequence
  bisulfite treated nucleic acid for analysis of methylation status of SEQ ID NO: 4
gggacgattcgttagttg

SEQ ID NO: 11967 - DNA, 21 bp, Artificial Sequence
  bisulfite treated nucleic acid for analysis of methylation status of SEQ ID NO: 4
atatttgtttataggcgcgtt

SEQ ID NO: 11968 - DNA, 22 bp, Artificial Sequence
  bisulfite treated nucleic acid for analysis of methylation status of SEQ ID NO: 4
taaaacgatcaataacaaccga

SEQ ID NO: 11969 - DNA, 21 bp, Artificial Sequence
  bisulfite treated nucleic acid for analysis of methylation status of SEQ ID NO: 4
gtatttttcggtaagagacgg

SEQ ID NO: 11970 - DNA, 17 bp, Artificial Sequence
  bisulfite treated nucleic acid for analysis of methylation status of SEQ ID NO: 4
gattcgggcgattcggt

SEQ ID NO: 11971 - DNA, 17 bp, Artificial Sequence
  bisulfite treated nucleic acid for analysis of methylation status of SEQ ID NO: 4
ttcgggagttacggttt

SEQ ID NO: 11972 - DNA, 19 bp, Artificial Sequence
  bisulfite treated nucleic acid for analysis of methylation status of SEQ ID NO: 4
aacctaaccgtaaaaacgc

SEQ ID NO: 11973 - DNA, 22 bp, Artificial Sequence
  bisulfite treated nucleic acid for analysis of methylation status of SEQ ID NO: 4
gggtcgtaagttttatagtcgt

SEQ ID NO: 11974 - DNA, 18 bp, Artificial Sequence
  bisulfite treated nucleic acid for analysis of methylation status of SEQ ID NO: 4
agcgcgttcggaaatcga

SEQ ID NO: 11975 - DNA, 21 bp, Artificial Sequence
  bisulfite treated nucleic acid for analysis of methylation status of SEQ ID NO: 4
ttaagttttagattgcgattt

SEQ ID NO: 11976 - DNA, 22 bp, Artificial Sequence
  bisulfite treated nucleic acid for analysis of methylation status of SEQ ID NO: 4
aatacgaacctaaccgtaaaaa

SEQ ID NO: 11977 - DNA, 22 bp, Artificial Sequence
  bisulfite treated nucleic acid for analysis of methylation status of SEQ ID NO: 4
ggtcgtaagttttatagtcgta

SEQ ID NO: 11978 - DNA, 22 bp, Artificial Sequence
  bisulfite treated nucleic acid for analysis of methylation status of SEQ ID NO: 4
tctcgaaaaactctcctaaacg

SEQ ID NO: 11979 - DNA, 21 bp, Artificial Sequence
  bisulfite treated nucleic acid for analysis of methylation status of SEQ ID NO: 4
aactctaatcgctcgcactac

SEQ ID NO: 11980 - DNA, 20 bp, Artificial Sequence
  bisulfite treated nucleic acid for analysis of methylation status of SEQ ID NO: 4
gaacctaaccgtaaaaacgc

SEQ ID NO: 11981 - DNA, 22 bp, Artificial Sequence
  bisulfite treated nucleic acid for analysis of methylation status of SEQ ID NO: 4
aaattaaaccgaactttacgaa

SEQ ID NO: 11982 - DNA, 18 bp, Artificial Sequence
  bisulfite treated nucleic acid for analysis of methylation status of SEQ ID NO: 4
ttgggttaagtcgcgtag

SEQ ID NO: 11983 - DNA, 27 bp, Artificial Sequence
  bisulfite treated nucleic acid for analysis of methylation status of SEQ ID NO: 4
gtcgcgaagttgtttaaatttcgtatt

SEQ ID NO: 11984 - DNA, 20 bp, Artificial Sequence
  bisulfite treated nucleic acid for analysis of methylation status of SEQ ID NO: 4
aggttttgatttatcgttgt

SEQ ID NO: 11985 - DNA, 21 bp, Artificial Sequence
  bisulfite treated nucleic acid for analysis of methylation status of SEQ ID NO: 4
gttcggttgttattgatcgtt

SEQ ID NO: 11986 - DNA, 22 bp, Artificial Sequence
  bisulfite treated nucleic acid for analysis of methylation status of SEQ ID NO: 4
caccgcgactattatacgacta

SEQ ID NO: 11987 - DNA, 20 bp, Artificial Sequence
  bisulfite treated nucleic acid for analysis of methylation status of SEQ ID NO: 4
ttcggttgttattgatcgtt

SEQ ID NO: 11988 - DNA, 20 bp, Artificial Sequence
  bisulfite treated nucleic acid for analysis of methylation status of SEQ ID NO: 4
aaacgatcaataacaaccga

SEQ ID NO: 11989 - DNA, 21 bp, Artificial Sequence
  bisulfite treated nucleic acid for analysis of methylation status of SEQ ID NO: 4
taaaacgatcaataacaaccg

SEQ ID NO: 11990 - DNA, 21 bp, Artificial Sequence
  bisulfite treated nucleic acid for analysis of methylation status of SEQ ID NO: 4
attcgtatttttcggtaagag

SEQ ID NO: 11991 - DNA, 21 bp, Artificial Sequence
  bisulfite treated nucleic acid for analysis of methylation status of SEQ ID NO: 4
taaacgaacgaccaataaaaa

SEQ ID NO: 11992 - DNA, 22 bp, Artificial Sequence
  bisulfite treated nucleic acid for analysis of methylation status of SEQ ID NO: 4
ccgcgactattatacgactaaa

SEQ ID NO: 11993 - DNA, 20 bp, Artificial Sequence
  bisulfite treated nucleic acid for analysis of methylation status of SEQ ID NO: 4
cgtgttcggttgttattgat

SEQ ID NO: 11994 - DNA, 21 bp, Artificial Sequence
  bisulfite treated nucleic acid for analysis of methylation status of SEQ ID NO: 4
atttgtttataggcgcgttag

SEQ ID NO: 11995 - DNA, 20 bp, Artificial Sequence
  bisulfite treated nucleic acid for analysis of methylation status of SEQ ID NO: 4
acgaacctaaccgtaaaaac

SEQ ID NO: 11996 - DNA, 22 bp, Artificial Sequence
  bisulfite treated nucleic acid for analysis of methylation status of SEQ ID NO: 4
tgggtcgtaagttttatagtcg

SEQ ID NO: 11997 - DNA, 19 bp, Artificial Sequence
  bisulfite treated nucleic acid for analysis of methylation status of SEQ ID NO: 4
aataaaacctcgatttccg

SEQ ID NO: 11998 - DNA, 22 bp, Artificial Sequence
  bisulfite treated nucleic acid for analysis of methylation status of SEQ ID NO: 4
acgaacgaccaataaaaacata

SEQ ID NO: 11999 - DNA, 22 bp, Artificial Sequence
  bisulfite treated nucleic acid for analysis of methylation status of SEQ ID NO: 4
cgagatttagacgtagattttt

SEQ ID NO: 12000 - DNA, 20 bp, Artificial Sequence
  bisulfite treated nucleic acid for analysis of methylation status of SEQ ID NO: 4
tatttttcggtaagagacgg

SEQ ID NO: 12001 - DNA, 21 bp, Artificial Sequence
  bisulfite treated nucleic acid for analysis of methylation status of SEQ ID NO: 4
cgaacgaccaataaaaacata

SEQ ID NO: 12002 - DNA, 22 bp, Artificial Sequence
  bisulfite treated nucleic acid for analysis of methylation status of SEQ ID NO: 4
ttaaaacgatcaataacaaccg

SEQ ID NO: 12003 - DNA, 21 bp, Artificial Sequence
  bisulfite treated nucleic acid for analysis of methylation status of SEQ ID NO: 4
tcggttgttattgatcgtttt

SEQ ID NO: 12004 - DNA, 23 bp, Artificial Sequence
  bisulfite treated nucleic acid for analysis of methylation status of SEQ ID NO: 4
acttaataaaacctcgatttccg

SEQ ID NO: 12005 - DNA, 21 bp, Artificial Sequence
  bisulfite treated nucleic acid for analysis of methylation status of SEQ ID NO: 4
aaaacgatcaataacaaccga

SEQ ID NO: 12006 - DNA, 20 bp, Artificial Sequence
  bisulfite treated nucleic acid for analysis of methylation status of SEQ ID NO: 7
gttttcggtgtaagtcgttg

SEQ ID NO: 12007 - DNA, 22 bp, Artificial Sequence
  bisulfite treated nucleic acid for analysis of methylation status of SEQ ID NO: 7
acatctaacaatctcgtcgaac

SEQ ID NO: 12008 - DNA, 16 bp, Artificial Sequence
  bisulfite treated nucleic acid for analysis of methylation status of SEQ ID NO: 7
aacgagacgggggcgt

SEQ ID NO: 12009 - DNA, 27 bp, Artificial Sequence
  bisulfite treated nucleic acid for analysis of methylation status of SEQ ID NO: 7
ttcggattttgtagcgcggtatttcgg

SEQ ID NO: 12010 - DNA, 21 bp, Artificial Sequence
  bisulfite treated nucleic acid for analysis of methylation status of SEQ ID NO: 7
catctaacaatctcgtcgaac

SEQ ID NO: 12011 - DNA, 19 bp, Artificial Sequence
  bisulfite treated nucleic acid for analysis of methylation status of SEQ ID NO: 7
attcgagcgtagcgtttat

SEQ ID NO: 12012 - DNA, 22 bp, Artificial Sequence
  bisulfite treated nucleic acid for analysis of methylation status of SEQ ID NO: 7
cgttaaatacccaacgacttac

SEQ ID NO: 12013 - DNA, 17 bp, Artificial Sequence
  bisulfite treated nucleic acid for analysis of methylation status of SEQ ID NO: 7
ggttttcgcgtttcgaa

SEQ ID NO: 12014 - DNA, 17 bp, Artificial Sequence
  bisulfite treated nucleic acid for analysis of methylation status of SEQ ID NO: 7
gtcgggattcggtttga

SEQ ID NO: 12015 - DNA, 19 bp, Artificial Sequence
  nucleic acid for analysis of methylation status of SEQ ID NO: 7
ggttttcggtgtaagtcgt

SEQ ID NO: 12016 - DNA, 19 bp, Artificial Sequence
  bisulfite treated nucleic acid for analysis of methylation status of SEQ ID NO: 7
ttttcggtgtaagtcgttg

SEQ ID NO: 12017 - DNA, 19 bp, Artificial Sequence
  bisulfite treated nucleic acid for analysis of methylation status of SEQ ID NO: 7
acgtttcggattttgtagc

SEQ ID NO: 12018 - DNA, 18 bp, Artificial Sequence
  bisulfite treated nucleic acid for analysis of methylation status of SEQ ID NO: 7
ttcgggttatcgattcgg

SEQ ID NO: 12019 - DNA, 16 bp, Artificial Sequence
  bisulfite treated nucleic acid for analysis of methylation status of SEQ ID NO: 7
aaaggtcggcgggttt

SEQ ID NO: 12020 - DNA, 21 bp, Artificial Sequence
  bisulfite treated nucleic acid for analysis of methylation status of SEQ ID NO: 7
atctaacaatctcgtcgaacc

SEQ ID NO: 12021 - DNA, 18 bp, Artificial Sequence
  bisulfite treated nucleic acid for analysis of methylation status of SEQ ID NO: 7
tcgagcgtagcgtttatc

SEQ ID NO: 12022 - DNA, 18 bp, Artificial Sequence
  bisulfite treated nucleic acid for analysis of methylation status of SEQ ID NO: 7
tagcgtttatcgcgtttc

SEQ ID NO: 12023 - DNA, 19 bp, Artificial Sequence
  bisulfite treated nucleic acid for analysis of methylation status of SEQ ID NO: 7
gtagcgtttatcgcgtttc

SEQ ID NO: 12024 - DNA, 20 bp, Artificial Sequence
  bisulfite treated nucleic acid for analysis of methylation status of SEQ ID NO: 7
gattcgagcgtagcgtttat

SEQ ID NO: 12025 - DNA, 18 bp, Artificial Sequence
  bisulfite treated nucleic acid for analysis of methylation status of SEQ ID NO: 7
ttcgagcgtagcgtttat

SEQ ID NO: 12026 - DNA, 19 bp, Artificial Sequence
  bisulfite treated nucleic acid for analysis of methylation status of SEQ ID NO: 7
ggacgtttcggattttgta

SEQ ID NO: 12027 - DNA, 22 bp, Artificial Sequence
  bisulfite treated nucleic acid for analysis of methylation status of SEQ ID NO: 7
aaacctataactacgtccgaaa

SEQ ID NO: 12028 - DNA, 22 bp, Artificial Sequence
  bisulfite treated nucleic acid for analysis of methylation status of SEQ ID NO: 7
ttttggtttacgttcgtttatt

SEQ ID NO: 12029 - DNA, 17 bp, Artificial Sequence
  bisulfite treated nucleic acid for analysis of methylation status of SEQ ID NO: 7
gttcgcggtcgttttta

SEQ ID NO: 12030 - DNA, 18 bp, Artificial Sequence
  bisulfite treated nucleic acid for analysis of methylation status of SEQ ID NO: 7
agcgtttttaattagcgg

SEQ ID NO: 12031 - DNA, 22 bp, Artificial Sequence
  bisulfite treated nucleic acid for analysis of methylation status of SEQ ID NO: 7
aaaacctataactacgtccgaa

SEQ ID NO: 12032 - DNA, 22 bp, Artificial Sequence
  bisulfite treated nucleic acid for analysis of methylation status of SEQ ID NO: 7
tttggtttacgttcgtttattc

SEQ ID NO: 12033 - DNA, 21 bp, Artificial Sequence
  bisulfite treated nucleic acid for analysis of methylation status of SEQ ID NO: 7
ttggtttacgttcgtttattc

SEQ ID NO: 12034 - DNA, 22 bp, Artificial Sequence
  bisulfite treated nucleic acid for analysis of methylation status of SEQ ID NO: 7
aacacgtctactaactaacgcc

SEQ ID NO: 12035 - DNA, 21 bp, Artificial Sequence
  bisulfite treated nucleic acid for analysis of methylation status of SEQ ID NO: 7
tttcgtttttgtttagattcg

SEQ ID NO: 12036 - DNA, 19 bp, Artificial Sequence
  bisulfite treated nucleic acid for analysis of methylation status of SEQ ID NO: 7
tacgttcgtttattcgcgt

SEQ ID NO: 12037 - DNA, 20 bp, Artificial Sequence
  bisulfite treated nucleic acid for analysis of methylation status of SEQ ID NO: 7
aagtcgttgtttttttggga

SEQ ID NO: 12038 - DNA, 21 bp, Artificial Sequence
  bisulfite treated nucleic acid for analysis of methylation status of SEQ ID NO: 7
tttggtttacgttcgtttatt

SEQ ID NO: 12039 - DNA, 21 bp, Artificial Sequence
  bisulfite treated nucleic acid for analysis of methylation status of SEQ ID NO: 7
cgtttgagtagcgtttttaat

SEQ ID NO: 12040 - DNA, 17 bp, Artificial Sequence
  bisulfite treated nucleic acid for analysis of methylation status of SEQ ID NO: 7
ttcgcggtcgtttttaa

SEQ ID NO: 12041 - DNA, 19 bp, Artificial Sequence
  bisulfite treated nucleic acid for analysis of methylation status of SEQ ID NO: 7
ggcgttagttagtagacgt

SEQ ID NO: 12042 - DNA, 22 bp, Artificial Sequence
  bisulfite treated nucleic acid for analysis of methylation status of SEQ ID NO: 7
tcaaaacctataactacgtccg

SEQ ID NO: 12043 - DNA, 22 bp, Artificial Sequence
  bisulfite treated nucleic acid for analysis of methylation status of SEQ ID NO: 7
acctataactacgtccgaaaat

SEQ ID NO: 12044 - DNA, 20 bp, Artificial Sequence
  bisulfite treated nucleic acid for analysis of methylation status of SEQ ID NO: 7
gtttacgttcgtttattcgc

SEQ ID NO: 12045 - DNA, 22 bp, Artificial Sequence
  bisulfite treated nucleic acid for analysis of methylation status of SEQ ID NO: 7
taactctcgatacaaaccgcta

SEQ ID NO: 12046 - DNA, 22 bp, Artificial Sequence
  bisulfite treated nucleic acid for analysis of methylation status of SEQ ID NO: 7
atatttgataatttcgtcggat

SEQ ID NO: 12047 - DNA, 24 bp, Artificial Sequence
  bisulfite treated nucleic acid for analysis of methylation status of SEQ ID NO: 7
attgtgttatagaatttgaggtgt

SEQ ID NO: 12048 - DNA, 18 bp, Artificial Sequence
  bisulfite treated nucleic acid for analysis of methylation status of SEQ ID NO: 7
ggaggattcgtcgatttt

SEQ ID NO: 12049 - DNA, 21 bp, Artificial Sequence
  bisulfite treated nucleic acid for analysis of methylation status of SEQ ID NO: 7
caaaacctataactacgtccg

SEQ ID NO: 12050 - DNA, 23 bp, Artificial Sequence
  bisulfite treated nucleic acid for analysis of methylation status of SEQ ID NO: 7
aacctataactacgtccgaaaat

SEQ ID NO: 12051 - DNA, 20 bp, Artificial Sequence
  bisulfite treated nucleic acid for analysis of methylation status of SEQ ID NO: 7
actctcgatacaaaccgcta

SEQ ID NO: 12052 - DNA, 22 bp, Artificial Sequence
  bisulfite treated nucleic acid for analysis of methylation status of SEQ ID NO: 7
gcgtttgagtagcgtttttaat

SEQ ID NO: 12053 - DNA, 17 bp, Artificial Sequence
  bisulfite treated nucleic acid for analysis of methylation status of SEQ ID NO: 7
agcggcgttagttagta

SEQ ID NO: 12054 - DNA, 22 bp, Artificial Sequence
  bisulfite treated nucleic acid for analysis of methylation status of SEQ ID NO: 7
aacctataactacgtccgaaaa

SEQ ID NO: 12055 - DNA, 21 bp, Artificial Sequence
  bisulfite treated nucleic acid for analysis of methylation status of SEQ ID NO: 7
gtttattcgcgtttgagtagc

SEQ ID NO: 12056 - DNA, 22 bp, Artificial Sequence
  bisulfite treated nucleic acid for analysis of methylation status of SEQ ID NO: 7
ttatatttgataatttcgtcgg

SEQ ID NO: 12057 - DNA, 20 bp, Artificial Sequence
  bisulfite treated nucleic acid for analysis of methylation status of SEQ ID NO: 7
tttattcgcgtttgagtagc

SEQ ID NO: 12058 - DNA, 23 bp, Artificial Sequence
  bisulfite treated nucleic acid for analysis of methylation status of SEQ ID NO: 7
gttatatttgataatttcgtcgg

SEQ ID NO: 12059 - DNA, 20 bp, Artificial Sequence
  bisulfite treated nucleic acid for analysis of methylation status of SEQ ID NO: 7
tcgtttttgtttagattcgg

SEQ ID NO: 12060 - DNA, 23 bp, Artificial Sequence
  bisulfite treated nucleic acid for analysis of methylation status of SEQ ID NO: 7
tatatttgataatttcgtcggat

SEQ ID NO: 12061 - DNA, 21 bp, Artificial Sequence
  bisulfite treated nucleic acid for analysis of methylation status of SEQ ID NO: 7
cgtttttgtttagattcggag

SEQ ID NO: 12062 - DNA, 21 bp, Artificial Sequence
  bisulfite treated nucleic acid for analysis of methylation status of SEQ ID NO: 7
aactctcgatacaaaccgcta

SEQ ID NO: 12063 - DNA, 21 bp, Artificial Sequence
  bisulfite treated nucleic acid for analysis of methylation status of SEQ ID NO: 7
ctaactctcgatacaaaccgc

SEQ ID NO: 12064 - DNA, 21 bp, Artificial Sequence
  bisulfite treated nucleic acid for analysis of methylation status of SEQ ID NO: 7
acacgtctactaactaacgcc

SEQ ID NO: 12065 - DNA, 20 bp, Artificial Sequence
  bisulfite treated nucleic acid for analysis of methylation status of SEQ ID NO: 7
ggtttacgttcgtttattcg

SEQ ID NO: 12066 - DNA, 23 bp, Artificial Sequence
  bisulfite treated nucleic acid for analysis of methylation status of SEQ ID NO: 7
atcaaaacctataactacgtccg

SEQ ID NO: 12067 - DNA, 21 bp, Artificial Sequence
  bisulfite treated nucleic acid for analysis of methylation status of SEQ ID NO: 7
aacctataactacgtccgaaa

SEQ ID NO: 12068 - DNA, 20 bp, Artificial Sequence
  bisulfite treated nucleic acid for analysis of methylation status of SEQ ID NO: 7
cgatacaaaccgctaaacac

SEQ ID NO: 12069 - DNA, 21 bp, Artificial Sequence
  bisulfite treated nucleic acid for analysis of methylation status of SEQ ID NO: 7
ttcgtttttgtttagattcgg

SEQ ID NO: 12070 - DNA, 23 bp, Artificial Sequence
  bisulfite treated nucleic acid for analysis of methylation status of SEQ ID NO: 7
aaaacctataactacgtccgaaa

SEQ ID NO: 12071 - DNA, 20 bp, Artificial Sequence
  bisulfite treated nucleic acid for analysis of methylation status of SEQ ID NO: 7
cgtttattcgcgtttgagta

SEQ ID NO: 12072 - DNA, 23 bp, Artificial Sequence
  bisulfite treated nucleic acid for analysis of methylation status of SEQ ID NO: 7
tctaaaataactatacgcgatcc

SEQ ID NO: 12073 - DNA, 20 bp, Artificial Sequence
  bisulfite treated nucleic acid for analysis of methylation status of SEQ ID NO: 7
cggttttggttatagacgtt

SEQ ID NO: 12074 - DNA, 18 bp, Artificial Sequence
  bisulfite treated nucleic acid for analysis of methylation status of SEQ ID NO: 7
gttcgttagtcgattcgt

SEQ ID NO: 12075 - DNA, 17 bp, Artificial Sequence
  bisulfite treated nucleic acid for analysis of methylation status of SEQ ID NO: 7
atcgcggttaggaagaa

SEQ ID NO: 12076 - DNA, 20 bp, Artificial Sequence
  bisulfite treated nucleic acid for analysis of methylation status of SEQ ID NO: 7
cgacgataaaacctacgaat

SEQ ID NO: 12077 - DNA, 22 bp, Artificial Sequence
  bisulfite treated nucleic acid for analysis of methylation status of SEQ ID NO: 7
gttagttagtagacgtgttcgc

SEQ ID NO: 12078 - DNA, 23 bp, Artificial Sequence
  bisulfite treated nucleic acid for analysis of methylation status of SEQ ID NO: 7
gtcgtttttaaattttcggacgt

SEQ ID NO: 12079 - DNA, 17 bp, Artificial Sequence
  bisulfite treated nucleic acid for analysis of methylation status of SEQ ID NO: 7
agggaattggggttgag

SEQ ID NO: 12080 - DNA, 19 bp, Artificial Sequence
  bisulfite treated nucleic acid for analysis of methylation status of SEQ ID NO: 7
ttattcgcgtttgagtagc

SEQ ID NO: 12081 - DNA, 21 bp, Artificial Sequence
  bisulfite treated nucleic acid for analysis of methylation status of SEQ ID NO: 7
tatttgataatttcgtcggat

SEQ ID NO: 12082 - DNA, 20 bp, Artificial Sequence
  bisulfite treated nucleic acid for analysis of methylation status of SEQ ID NO: 7
cgcgaacacgtctactaact

SEQ ID NO: 12083 - DNA, 21 bp, Artificial Sequence
  bisulfite treated nucleic acid for analysis of methylation status of SEQ ID NO: 7
agcgtttttaattagcggcgt

SEQ ID NO: 12084 - DNA, 19 bp, Artificial Sequence
  bisulfite treated nucleic acid for analysis of methylation status of SEQ ID NO: 7
tttacgttcgtttattcgc

SEQ ID NO: 12085 - DNA, 19 bp, Artificial Sequence
  bisulfite treated nucleic acid for analysis of methylation status of SEQ ID NO: 7
aaccgctaaacacctaacg

SEQ ID NO: 12086 - DNA, 22 bp, Artificial Sequence
  bisulfite treated nucleic acid for analysis of methylation status of SEQ ID NO: 7
cgcgaacacgtctactaactaa

SEQ ID NO: 12087 - DNA, 21 bp, Artificial Sequence
  bisulfite treated nucleic acid for analysis of methylation status of SEQ ID NO: 7
attcggagtttaagtcgttgt

SEQ ID NO: 12088 - DNA, 20 bp, Artificial Sequence
  bisulfite treated nucleic acid for analysis of methylation status of SEQ ID NO: 7
tggtttacgttcgtttattc

SEQ ID NO: 12089 - DNA, 21 bp, Artificial Sequence
  bisulfite treated nucleic acid for analysis of methylation status of SEQ ID NO: 7
cctataactacgtccgaaaat

SEQ ID NO: 12090 - DNA, 20 bp, Artificial Sequence
  bisulfite treated nucleic acid for analysis of methylation status of SEQ ID NO: 7
atttcttcctaaccgcgata

SEQ ID NO: 12091 - DNA, 22 bp, Artificial Sequence
  bisulfite treated nucleic acid for analysis of methylation status of SEQ ID NO: 7
ttaggcgtattagttagttcgg

SEQ ID NO: 12092 - DNA, 24 bp, Artificial Sequence
  bisulfite treated nucleic acid for analysis of methylation status of SEQ ID NO: 7
gtttgaatgataaagtgtttttat

SEQ ID NO: 12093 - DNA, 22 bp, Artificial Sequence
  bisulfite treated nucleic acid for analysis of methylation status of SEQ ID NO: 7
ctcgatacaaaccgctaaacac

SEQ ID NO: 12094 - DNA, 21 bp, Artificial Sequence
  bisulfite treated nucleic acid for analysis of methylation status of SEQ ID NO: 7
tcgatacaaaccgctaaacac

SEQ ID NO: 12095 - DNA, 19 bp, Artificial Sequence
  bisulfite treated nucleic acid for analysis of methylation status of SEQ ID NO: 7
cttcctaaccgcgataaaa

SEQ ID NO: 12096 - DNA, 23 bp, Artificial Sequence
  bisulfite treated nucleic acid for analysis of methylation status of SEQ ID NO: 7
gaacacgtctactaactaacgcc

SEQ ID NO: 12097 - DNA, 19 bp, Artificial Sequence
  bisulfite treated nucleic acid for analysis of methylation status of SEQ ID NO: 7
ctctcgatacaaaccgcta

SEQ ID NO: 12098 - DNA, 24 bp, Artificial Sequence
  bisulfite treated nucleic acid for analysis of methylation status of SEQ ID NO: 7
tatcaaaacctataactacgtccg

SEQ ID NO: 12099 - DNA, 20 bp, Artificial Sequence
  bisulfite treated nucleic acid for analysis of methylation status of SEQ ID NO: 7
ttcggagtttaagtcgttgt

SEQ ID NO: 12100 - DNA, 23 bp, Artificial Sequence
  bisulfite treated nucleic acid for analysis of methylation status of SEQ ID NO: 7
ttttggtttacgttcgtttattc

SEQ ID NO: 12101 - DNA, 20 bp, Artificial Sequence
  bisulfite treated nucleic acid for analysis of methylation status of SEQ ID NO: 7
aaaccgctaaacacctaacg

SEQ ID NO: 12102 - DNA, 22 bp, Artificial Sequence
  bisulfite treated nucleic acid for analysis of methylation status of SEQ ID NO: 7
tcgtttattcgcgtttgagtag

SEQ ID NO: 12103 - DNA, 21 bp, Artificial Sequence
  bisulfite treated nucleic acid for analysis of methylation status of SEQ ID NO: 7
cgacaaaaacctaccgtctac

SEQ ID NO: 12104 - DNA, 20 bp, Artificial Sequence
  bisulfite treated nucleic acid for analysis of methylation status of SEQ ID NO: 7
tcggatcgcgtatagttatt

SEQ ID NO: 12105 - DNA, 17 bp, Artificial Sequence
  bisulfite treated nucleic acid for analysis of methylation status of SEQ ID NO: 7
atcgagtagtcgcgcgt

SEQ ID NO: 12106 - DNA, 16 bp, Artificial Sequence
  bisulfite treated nucleic acid for analysis of methylation status of SEQ ID NO: 7
ggcgggagtcgtaggg

SEQ ID NO: 12107 - DNA, 21 bp, Artificial Sequence
  bisulfite treated nucleic acid for analysis of methylation status of SEQ ID NO: 7
aatttcttcctaaccgcgata

SEQ ID NO: 12108 - DNA, 22 bp, Artificial Sequence
  bisulfite treated nucleic acid for analysis of methylation status of SEQ ID NO: 7
ctaaaataactatacgcgatcc

SEQ ID NO: 12109 - DNA, 21 bp, Artificial Sequence
  bisulfite treated nucleic acid for analysis of methylation status of SEQ ID NO: 7
tcgtttattcgcgtttgagta

SEQ ID NO: 12110 - DNA, 21 bp, Artificial Sequence
  bisulfite treated nucleic acid for analysis of methylation status of SEQ ID NO: 7
cggagtttaagtcgttgtttt

SEQ ID NO: 12111 - DNA, 19 bp, Artificial Sequence
  bisulfite treated nucleic acid for analysis of methylation status of SEQ ID NO: 7
ttcctaaccgcgataaaaa

SEQ ID NO: 12112 - DNA, 19 bp, Artificial Sequence
  bisulfite treated nucleic acid for analysis of methylation status of SEQ ID NO: 7
cgatccgaatttcttccta

SEQ ID NO: 12113 - DNA, 21 bp, Artificial Sequence
  bisulfite treated nucleic acid for analysis of methylation status of SEQ ID NO: 7
gtattagttagttcggcggtt

SEQ ID NO: 12114 - DNA, 21 bp, Artificial Sequence
  bisulfite treated nucleic acid for analysis of methylation status of SEQ ID NO: 7
cgaatctaaacaaaaacgaaa

SEQ ID NO: 12115 - DNA, 19 bp, Artificial Sequence
  bisulfite treated nucleic acid for analysis of methylation status of SEQ ID NO: 7
gtcgtaggggttgtagacg

SEQ ID NO: 12116 - DNA, 16 bp, Artificial Sequence
  bisulfite treated nucleic acid for analysis of methylation status of SEQ ID NO: 7
ggttttcgcgcgggga

SEQ ID NO: 12117 - DNA, 21 bp, Artificial Sequence
  bisulfite treated nucleic acid for analysis of methylation status of SEQ ID NO: 7
tgtcggggtatatttttttaa

SEQ ID NO: 12118 - DNA, 19 bp, Artificial Sequence
  bisulfite treated nucleic acid for analysis of methylation status of SEQ ID NO: 7
tcttcctaaccgcgataaa

SEQ ID NO: 12119 - DNA, 19 bp, Artificial Sequence
  bisulfite treated nucleic acid for analysis of methylation status of SEQ ID NO: 7
tttcttcctaaccgcgata

SEQ ID NO: 12120 - DNA, 24 bp, Artificial Sequence
  bisulfite treated nucleic acid for analysis of methylation status of SEQ ID NO: 7
atctaaaataactatacgcgatcc

SEQ ID NO: 12121 - DNA, 21 bp, Artificial Sequence
  bisulfite treated nucleic acid for analysis of methylation status of SEQ ID NO: 7
ggtttacgttcgtttattcgc

SEQ ID NO: 12122 - DNA, 20 bp, Artificial Sequence
  bisulfite treated nucleic acid for analysis of methylation status of SEQ ID NO: 7
cggatcgcgtatagttattt

SEQ ID NO: 12123 - DNA, 22 bp, Artificial Sequence
  bisulfite treated nucleic acid for analysis of methylation status of SEQ ID NO: 7
gattcggagtttaagtcgttgt

SEQ ID NO: 12124 - DNA, 22 bp, Artificial Sequence
  bisulfite treated nucleic acid for analysis of methylation status of SEQ ID NO: 7
ttcgtttattcgcgtttgagta

SEQ ID NO: 12125 - DNA, 20 bp, Artificial Sequence
  bisulfite treated nucleic acid for analysis of methylation status of SEQ ID NO: 7
agtcgtaggggttgtagacg

SEQ ID NO: 12126 - DNA, 19 bp, Artificial Sequence
  bisulfite treated nucleic acid for analysis of methylation status of SEQ ID NO: 7
aggtttttgtcggggtata

SEQ ID NO: 12127 - DNA, 21 bp, Artificial Sequence
  bisulfite treated nucleic acid for analysis of methylation status of SEQ ID NO: 7
tggtttacgttcgtttattcg

SEQ ID NO: 12128 - DNA, 21 bp, Artificial Sequence
  bisulfite treated nucleic acid for analysis of methylation status of SEQ ID NO: 7
gcgaacacgtctactaactaa

SEQ ID NO: 12129 - DNA, 19 bp, Artificial Sequence
  bisulfite treated nucleic acid for analysis of methylation status of SEQ ID NO: 7
gttcgtttattcgcgtttg

SEQ ID NO: 12130 - DNA, 22 bp, Artificial Sequence
  bisulfite treated nucleic acid for analysis of methylation status of SEQ ID NO: 1
tttcggttttcgttaatttagt

SEQ ID NO: 12131 - DNA, 22 bp, Artificial Sequence
  bisulfite treated nucleic acid for analysis of methylation status of SEQ ID NO: 1
tataaaacgccgataaacttct

SEQ ID NO: 12132 - DNA, 20 bp, Artificial Sequence
  bisulfite treated nucleic acid for analysis of methylation status of SEQ ID NO: 1
tgcgaagttaacgtgggcga

SEQ ID NO: 12133 - DNA, 19 bp, Artificial Sequence
  bisulfite treated nucleic acid for analysis of methylation status of SEQ ID NO: 1
gtatagttgagggtagatt

SEQ ID NO: 12134 - DNA, 22 bp, Artificial Sequence
  bisulfite treated nucleic acid for analysis of methylation status of SEQ ID NO: 1
atataaaacgccgataaacttc

SEQ ID NO: 12135 - DNA, 22 bp, Artificial Sequence
  bisulfite treated nucleic acid for analysis of methylation status of SEQ ID NO: 1
cggttttcgttaatttagtgtt

SEQ ID NO: 12136 - DNA, 22 bp, Artificial Sequence
  bisulfite treated nucleic acid for analysis of methylation status of SEQ ID NO: 1
tcggttttcgttaatttagtgt

SEQ ID NO: 12137 - DNA, 21 bp, Artificial Sequence
  bisulfite treated nucleic acid for analysis of methylation status of SEQ ID NO: 1
ataaaacgccgataaacttct

SEQ ID NO: 12138 - DNA, 21 bp, Artificial Sequence
  bisulfite treated nucleic acid for analysis of methylation status of SEQ ID NO: 1
ctcaaatataaaacgccgata

SEQ ID NO: 12139 - DNA, 21 bp, Artificial Sequence
  bisulfite treated nucleic acid for analysis of methylation status of SEQ ID NO: 1
taaaacgccgataaacttctt

SEQ ID NO: 12140 - DNA, 23 bp, Artificial Sequence
  bisulfite treated nucleic acid for analysis of methylation status of SEQ ID NO: 1
aatataaaacgccgataaacttc

SEQ ID NO: 12141 - DNA, 23 bp, Artificial Sequence
  bisulfite treated nucleic acid for analysis of methylation status of SEQ ID NO: 1
gtttcggttttcgttaatttagt

SEQ ID NO: 12142 - DNA, 21 bp, Artificial Sequence
  bisulfite treated nucleic acid for analysis of methylation status of SEQ ID NO: 1
acgacctcaaatataaaacgc

SEQ ID NO: 12143 - DNA, 20 bp, Artificial Sequence
  bisulfite treated nucleic acid for analysis of methylation status of SEQ ID NO: 1
cgacctcaaatataaaacgc

SEQ ID NO: 12144 - DNA, 21 bp, Artificial Sequence
  bisulfite treated nucleic acid for analysis of methylation status of SEQ ID NO: 1
ttcggttttcgttaatttagt

SEQ ID NO: 12145 - DNA, 20 bp, Artificial Sequence
  bisulfite treated nucleic acid for analysis of methylation status of SEQ ID NO: 1
aaaacgccgataaacttctt

SEQ ID NO: 12146 - DNA, 20 bp, Artificial Sequence
  bisulfite treated nucleic acid for analysis of methylation status of SEQ ID NO: 1
aaacgccgataaacttcttt

SEQ ID NO: 12147 - DNA, 21 bp, Artificial Sequence
  bisulfite treated nucleic acid for analysis of methylation status of SEQ ID NO: 1
cggttttcgttaatttagtgt

SEQ ID NO: 12148 - DNA, 19 bp, Artificial Sequence
  bisulfite treated nucleic acid for analysis of methylation status of SEQ ID NO: 1
cgtttcggttttcgttaat

SEQ ID NO: 12149 - DNA, 21 bp, Artificial Sequence
  bisulfite treated nucleic acid for analysis of methylation status of SEQ ID NO: 1
attaaaatacgtcccgatctc

SEQ ID NO: 12150 - DNA, 23 bp, Artificial Sequence
  bisulfite treated nucleic acid for analysis of methylation status of SEQ ID NO: 1
cgagatttgtttttagttgtacg

SEQ ID NO: 12151 - DNA, 20 bp, Artificial Sequence
  bisulfite treated nucleic acid for analysis of methylation status of SEQ ID NO: 1
ttcgtttacgttaatttcgt

SEQ ID NO: 12152 - DNA, 21 bp, Artificial Sequence
  bisulfite treated nucleic acid for analysis of methylation status of SEQ ID NO: 1
agtaaaaatagtattgggttg

SEQ ID NO: 12153 - DNA, 23 bp, Artificial Sequence
  bisulfite treated nucleic acid for analysis of methylation status of SEQ ID NO: 1
tcgattatacgaactcacaatta

SEQ ID NO: 12154 - DNA, 21 bp, Artificial Sequence
  bisulfite treated nucleic acid for analysis of methylation status of SEQ ID NO: 1
ttttatcgtaggtatttcggg

SEQ ID NO: 12155 - DNA, 26 bp, Artificial Sequence
  bisulfite treated nucleic acid for analysis of methylation status of SEQ ID NO: 1
ggcgtgtatttaaattttcgcgttat

SEQ ID NO: 12156 - DNA, 19 bp, Artificial Sequence
  bisulfite treated nucleic acid for analysis of methylation status of SEQ ID NO: 1
ttggatgggtataagtaga

SEQ ID NO: 12157 - DNA, 21 bp, Artificial Sequence
  bisulfite treated nucleic acid for analysis of methylation status of SEQ ID NO: 1
tttttatcgtaggtatttcgg

SEQ ID NO: 12158 - DNA, 20 bp, Artificial Sequence
  bisulfite treated nucleic acid for analysis of methylation status of SEQ ID NO: 1
tttatcgtaggtatttcggg

SEQ ID NO: 12159 - DNA, 20 bp, Artificial Sequence
  bisulfite treated nucleic acid for analysis of methylation status of SEQ ID NO: 1
ttaaaatacgtcccgatctc

SEQ ID NO: 12160 - DNA, 22 bp, Artificial Sequence
  bisulfite treated nucleic acid for analysis of methylation status of SEQ ID NO: 1
cgattatacgaactcacaatta

SEQ ID NO: 12161 - DNA, 19 bp, Artificial Sequence
  bisulfite treated nucleic acid for analysis of methylation status of SEQ ID NO: 1
tatcgtaggtatttcgggg

SEQ ID NO: 12162 - DNA, 24 bp, Artificial Sequence
  bisulfite treated nucleic acid for analysis of methylation status of SEQ ID NO: 1
acgagatttgtttttagttgtacg

SEQ ID NO: 12163 - DNA, 20 bp, Artificial Sequence
  bisulfite treated nucleic acid for analysis of methylation status of SEQ ID NO: 1
ttatcgtaggtatttcgggg

SEQ ID NO: 12164 - DNA, 22 bp, Artificial Sequence
  bisulfite treated nucleic acid for analysis of methylation status of SEQ ID NO: 45
ttatacgttcgtgttgattgtt

SEQ ID NO: 12165 - DNA, 21 bp, Artificial Sequence
  bisulfite treated nucleic acid for analysis of methylation status of SEQ ID NO: 45
aataaaataacgcctcgaaaa

SEQ ID NO: 12166 - DNA, 20 bp, Artificial Sequence
  bisulfite treated nucleic acid for analysis of methylation status of SEQ ID NO: 45
ggcgagtttttacgtttcgt

SEQ ID NO: 12167 - DNA, 26 bp, Artificial Sequence
  bisulfite treated nucleic acid for analysis of methylation status of SEQ ID NO: 45
aacgtgaaggtgattgattttaacga

SEQ ID NO: 12168 - DNA, 22 bp, Artificial Sequence
  bisulfite treated nucleic acid for analysis of methylation status of SEQ ID NO: 45
attatacgttcgtgttgattgt

SEQ ID NO: 12169 - DNA, 21 bp, Artificial Sequence
  bisulfite treated nucleic acid for analysis of methylation status of SEQ ID NO: 45
ataaaataacgcctcgaaaac

SEQ ID NO: 12170 - DNA, 20 bp, Artificial Sequence
  bisulfite treated nucleic acid for analysis of methylation status of SEQ ID NO: 45
ataaaataacgcctcgaaaa

SEQ ID NO: 12171 - DNA, 21 bp, Artificial Sequence
  bisulfite treated nucleic acid for analysis of methylation status of SEQ ID NO: 45
gttttcgaggcgttattttat

SEQ ID NO: 12172 - DNA, 21 bp, Artificial Sequence
  bisulfite treated nucleic acid for analysis of methylation status of SEQ ID NO: 45
gcgatcaaacacgtaactact

SEQ ID NO: 12173 - DNA, 23 bp, Artificial Sequence
  bisulfite treated nucleic acid for analysis of methylation status of SEQ ID NO: 45
atcgatttgaacgttatcgacgt

SEQ ID NO: 12174 - DNA, 19 bp, Artificial Sequence
  bisulfite treated nucleic acid for analysis of methylation status of SEQ ID NO: 45
gaaggttttaatggtgaag

SEQ ID NO: 12175 - DNA, 22 bp, Artificial Sequence
  bisulfite treated nucleic acid for analysis of methylation status of SEQ ID NO: 45
aataaaataacgcctcgaaaac

SEQ ID NO: 12176 - DNA, 21 bp, Artificial Sequence
  bisulfite treated nucleic acid for analysis of methylation status of SEQ ID NO: 45
gttagacgtgaatgataacgc

SEQ ID NO: 12177 - DNA, 21 bp, Artificial Sequence
  bisulfite treated nucleic acid for analysis of methylation status of SEQ ID NO: 45
tatctaaaacgcgcacaatac

SEQ ID NO: 12178 - DNA, 16 bp, Artificial Sequence
  bisulfite treated nucleic acid for analysis of methylation status of SEQ ID NO: 45
gtgtcgcgtaacgttg

SEQ ID NO: 12179 - DNA, 20 bp, Artificial Sequence
  bisulfite treated nucleic acid for analysis of methylation status of SEQ ID NO: 45
tttttacgttgtagaacgat

SEQ ID NO: 12180 - DNA, 22 bp, Artificial Sequence
  bisulfite treated nucleic acid for analysis of methylation status of SEQ ID NO: 45
ctatctaaaacgcgcacaatac

SEQ ID NO: 12181 - DNA, 22 bp, Artificial Sequence
  bisulfite treated nucleic acid for analysis of methylation status of SEQ ID NO: 45
ggcgacgtgtttatttatattt

SEQ ID NO: 12182 - DNA, 20 bp, Artificial Sequence
  bisulfite treated nucleic acid for analysis of methylation status of SEQ ID NO: 45
tactctccaaatacgcgaac

SEQ ID NO: 12183 - DNA, 21 bp, Artificial Sequence
  bisulfite treated nucleic acid for analysis of methylation status of SEQ ID NO: 45
tacgaacggggttatttacgt

SEQ ID NO: 12184 - DNA, 20 bp, Artificial Sequence
  bisulfite treated nucleic acid for analysis of methylation status of SEQ ID NO: 45
aggtttttgagtttaaggtg

SEQ ID NO: 12185 - DNA, 20 bp, Artificial Sequence
  bisulfite treated nucleic acid for analysis of methylation status of SEQ ID NO: 45
gttactctccaaatacgcga

SEQ ID NO: 12186 - DNA, 21 bp, Artificial Sequence
  bisulfite treated nucleic acid for analysis of methylation status of SEQ ID NO: 45
aaataaaataacgcctcgaaa

SEQ ID NO: 12187 - DNA, 21 bp, Artificial Sequence
  bisulfite treated nucleic acid for analysis of methylation status of SEQ ID NO: 45
ggttatttacgttttgcgttt

SEQ ID NO: 12188 - DNA, 21 bp, Artificial Sequence
  bisulfite treated nucleic acid for analysis of methylation status of SEQ ID NO: 45
gcgttatcattcacgtctaac

SEQ ID NO: 12189 - DNA, 21 bp, Artificial Sequence
  bisulfite treated nucleic acid for analysis of methylation status of SEQ ID NO: 45
gatttgggggtgtttgtgtat

SEQ ID NO: 12190 - DNA, 21 bp, Artificial Sequence
  bisulfite treated nucleic acid for analysis of methylation status of SEQ ID NO: 45
gtattgtgcgcgttttagata

SEQ ID NO: 12191 - DNA, 22 bp, Artificial Sequence
  bisulfite treated nucleic acid for analysis of methylation status of SEQ ID NO: 45
caaacaaataatcgtcgttacc

SEQ ID NO: 12192 - DNA, 18 bp, Artificial Sequence
  bisulfite treated nucleic acid for analysis of methylation status of SEQ ID NO: 45
tttggtgagagtgggtgt

SEQ ID NO: 12193 - DNA, 19 bp, Artificial Sequence
  bisulfite treated nucleic acid for analysis of methylation status of SEQ ID NO: 45
ttatttacgagatcgtgga

SEQ ID NO: 12194 - DNA, 23 bp, Artificial Sequence
  nucleic acid for analysis of methylation status of SEQ ID NO: 45
tattatacgttcgtgttgattgt

SEQ ID NO: 12195 - DNA, 20 bp, Artificial Sequence
  bisulfite treated nucleic acid for analysis of methylation status of SEQ ID NO: 45
taaaataacgcctcgaaaac

SEQ ID NO: 12196 - DNA, 22 bp, Artificial Sequence
  bisulfite treated nucleic acid for analysis of methylation status of SEQ ID NO: 45
agtattgtgcgcgttttagata

SEQ ID NO: 12197 - DNA, 21 bp, Artificial Sequence
  bisulfite treated nucleic acid for analysis of methylation status of SEQ ID NO: 45
tattgtgcgcgttttagatag

SEQ ID NO: 12198 - DNA, 21 bp, Artificial Sequence
  bisulfite treated nucleic acid for analysis of methylation status of SEQ ID NO: 45
ttactctccaaatacgcgaac

SEQ ID NO: 12199 - DNA, 20 bp, Artificial Sequence
  bisulfite treated nucleic acid for analysis of methylation status of SEQ ID NO: 45
aacggggttatttacgtttt

SEQ ID NO: 12200 - DNA, 20 bp, Artificial Sequence
  bisulfite treated nucleic acid for analysis of methylation status of SEQ ID NO: 45
gaaatcgctatctaaaacgc

SEQ ID NO: 12201 - DNA, 20 bp, Artificial Sequence
  bisulfite treated nucleic acid for analysis of methylation status of SEQ ID NO: 45
acgtttcgttgggtatagtg

SEQ ID NO: 12202 - DNA, 19 bp, Artificial Sequence
  bisulfite treated nucleic acid for analysis of methylation status of SEQ ID NO: 45
gagtattgtgcgcgtttta

SEQ ID NO: 12203 - DNA, 22 bp, Artificial Sequence
  bisulfite treated nucleic acid for analysis of methylation status of SEQ ID NO: 45
atctcaaacaaataatcgtcgt

SEQ ID NO: 12204 - DNA, 17 bp, Artificial Sequence
  bisulfite treated nucleic acid for analysis of methylation status of SEQ ID NO: 45
tacgagatcgtggacgg

SEQ ID NO: 12205 - DNA, 25 bp, Artificial Sequence
  bisulfite treated nucleic acid for analysis of methylation status of SEQ ID NO: 45
tagtgattttggtgagagtgggtgt

SEQ ID NO: 12206 - DNA, 20 bp, Artificial Sequence
  bisulfite treated nucleic acid for analysis of methylation status of SEQ ID NO: 45
atctaaaacgcgcacaatac

SEQ ID NO: 12207 - DNA, 20 bp, Artificial Sequence
  bisulfite treated nucleic acid for analysis of methylation status of SEQ ID NO: 45
ccgaaatcgctatctaaaac

SEQ ID NO: 12208 - DNA, 19 bp, Artificial Sequence
  bisulfite treated nucleic acid for analysis of methylation status of SEQ ID NO: 45
actctccaaatacgcgaac

SEQ ID NO: 12209 - DNA, 21 bp, Artificial Sequence
  bisulfite treated nucleic acid for analysis of methylation status of SEQ ID NO: 45
gtgttcgtttaggatttcgat

SEQ ID NO: 12210 - DNA, 22 bp, Artificial Sequence
  bisulfite treated nucleic acid for analysis of methylation status of SEQ ID NO: 45
taaataaccccgttcgtaaaat

SEQ ID NO: 12211 - DNA, 18 bp, Artificial Sequence
  bisulfite treated nucleic acid for analysis of methylation status of SEQ ID NO: 45
gttttcgtatatcggcga

SEQ ID NO: 12212 - DNA, 18 bp, Artificial Sequence
  bisulfite treated nucleic acid for analysis of methylation status of SEQ ID NO: 45
gggttagaacggtatcgt

SEQ ID NO: 12213 - DNA, 21 bp, Artificial Sequence
  bisulfite treated nucleic acid for analysis of methylation status of SEQ ID NO: 45
gttcgtttaggatttcgattt

SEQ ID NO: 12214 - DNA, 20 bp, Artificial Sequence
  bisulfite treated nucleic acid for analysis of methylation status of SEQ ID NO: 45
gtaaataaccccgttcgtaa

SEQ ID NO: 12215 - DNA, 19 bp, Artificial Sequence
  bisulfite treated nucleic acid for analysis of methylation status of SEQ ID NO: 45
ggttagaacggtatcgtat

SEQ ID NO: 12216 - DNA, 19 bp, Artificial Sequence
  bisulfite treated nucleic acid for analysis of methylation status of SEQ ID NO: 45
cgagaatgggtttcgtatt

SEQ ID NO: 12217 - DNA, 22 bp, Artificial Sequence
  bisulfite treated nucleic acid for analysis of methylation status of SEQ ID NO: 45
tctaaaaacttaataccgtcgc

SEQ ID NO: 12218 - DNA, 18 bp, Artificial Sequence
  bisulfite treated nucleic acid for analysis of methylation status of SEQ ID NO: 45
tacgcgcgacgattacgg

SEQ ID NO: 12219 - DNA, 19 bp, Artificial Sequence
  bisulfite treated nucleic acid for analysis of methylation status of SEQ ID NO: 45
tttggattggacgttaagt

SEQ ID NO: 12220 - DNA, 19 bp, Artificial Sequence
  bisulfite treated nucleic acid for analysis of methylation status of SEQ ID NO: 45
atatcgcggagttgtaggt

SEQ ID NO: 12221 - DNA, 20 bp, Artificial Sequence
  bisulfite treated nucleic acid for analysis of methylation status of SEQ ID NO: 45
gaacggggttatttacgttt

SEQ ID NO: 12222 - DNA, 22 bp, Artificial Sequence
  bisulfite treated nucleic acid for analysis of methylation status of SEQ ID NO: 45
cgatcaaacacgtaactactaa

SEQ ID NO: 12223 - DNA, 20 bp, Artificial Sequence
  bisulfite treated nucleic acid for analysis of methylation status of SEQ ID NO: 45
ttttcgaggcgttattttat

SEQ ID NO: 12224 - DNA, 20 bp, Artificial Sequence
  bisulfite treated nucleic acid for analysis of methylation status of SEQ ID NO: 45
aaacgtaaataaccccgttc

SEQ ID NO: 12225 - DNA, 20 bp, Artificial Sequence
  bisulfite treated nucleic acid for analysis of methylation status of SEQ ID NO: 45
tgttcgtttaggatttcgat

SEQ ID NO: 12226 - DNA, 20 bp, Artificial Sequence
  bisulfite treated nucleic acid for analysis of methylation status of SEQ ID NO: 45
gagttgtaggtgtcgcgtaa

SEQ ID NO: 12227 - DNA, 21 bp, Artificial Sequence
  bisulfite treated nucleic acid for analysis of methylation status of SEQ ID NO: 45
tctcaaacaaataatcgtcgt

SEQ ID NO: 12228 - DNA, 19 bp, Artificial Sequence
  bisulfite treated nucleic acid for analysis of methylation status of SEQ ID NO: 45
taaaacgcgcacaatactc

SEQ ID NO: 12229 - DNA, 19 bp, Artificial Sequence
  bisulfite treated nucleic acid for analysis of methylation status of SEQ ID NO: 45
tctaaaacgcgcacaatac

SEQ ID NO: 12230 - DNA, 21 bp, Artificial Sequence
  bisulfite treated nucleic acid for analysis of methylation status of SEQ ID NO: 45
aaacaaataatcgtcgttacc

SEQ ID NO: 12231 - DNA, 20 bp, Artificial Sequence
  bisulfite treated nucleic acid for analysis of methylation status of SEQ ID NO: 45
attgtgcgcgttttagatag

SEQ ID NO: 12232 - DNA, 22 bp, Artificial Sequence
  nucleic acid for analysis of methylation status of SEQ ID NO: 45
gtaaataaccccgttcgtaaaa

SEQ ID NO: 12233 - DNA, 19 bp, Artificial Sequence
  bisulfite treated nucleic acid for analysis of methylation status of SEQ ID NO: 45
agttgtaggtgtcgcgtaa

SEQ ID NO: 12234 - DNA, 19 bp, Artificial Sequence
  bisulfite treated nucleic acid for analysis of methylation status of SEQ ID NO: 45
taaaataacgcctcgaaaa

SEQ ID NO: 12235 - DNA, 16 bp, Artificial Sequence
  bisulfite treated nucleic acid for analysis of methylation status of SEQ ID NO: 45
tttcggcgagagcggg

SEQ ID NO: 12236 - DNA, 20 bp, Artificial Sequence
  bisulfite treated nucleic acid for analysis of methylation status of SEQ ID NO: 45
gttttatttacgagatcgtg

SEQ ID NO: 12237 - DNA, 20 bp, Artificial Sequence
  bisulfite treated nucleic acid for analysis of methylation status of SEQ ID NO: 45
aataaccccgttcgtaaaat

SEQ ID NO: 12238 - DNA, 23 bp, Artificial Sequence
  bisulfite treated nucleic acid for analysis of methylation status of SEQ ID NO: 45
cgttatcattcacgtctaacact

SEQ ID NO: 12239 - DNA, 21 bp, Artificial Sequence
  bisulfite treated nucleic acid for analysis of methylation status of SEQ ID NO: 45
tttcgaggcgttattttattt

SEQ ID NO: 12240 - DNA, 23 bp, Artificial Sequence
  bisulfite treated nucleic acid for analysis of methylation status of SEQ ID NO: 45
gcgatcaaacacgtaactactaa

SEQ ID NO: 12241 - DNA, 21 bp, Artificial Sequence
  bisulfite treated nucleic acid for analysis of methylation status of SEQ ID NO: 45
accaaataaaataacgcctcg

SEQ ID NO: 12242 - DNA, 20 bp, Artificial Sequence
  bisulfite treated nucleic acid for analysis of methylation status of SEQ ID NO: 45
ctaaaacgcgcacaatactc

SEQ ID NO: 12243 - DNA, 19 bp, Artificial Sequence
  bisulfite treated nucleic acid for analysis of methylation status of SEQ ID NO: 45
agtattgtgcgcgttttag

SEQ ID NO: 12244 - DNA, 19 bp, Artificial Sequence
  bisulfite treated nucleic acid for analysis of methylation status of SEQ ID NO: 45
gtcgtttatcggtttcgtt

SEQ ID NO: 12245 - DNA, 21 bp, Artificial Sequence
  bisulfite treated nucleic acid for analysis of methylation status of SEQ ID NO: 45
cgacactacaactatccgttc

SEQ ID NO: 12246 - DNA, 18 bp, Artificial Sequence
  bisulfite treated nucleic acid for analysis of methylation status of SEQ ID NO: 45
ggcgttgagcgaggtcgt

SEQ ID NO: 12247 - DNA, 17 bp, Artificial Sequence
  bisulfite treated nucleic acid for analysis of methylation status of SEQ ID NO: 45
tgcgggttattgatcgg

SEQ ID NO: 12248 - DNA, 19 bp, Artificial Sequence
  bisulfite treated nucleic acid for analysis of methylation status of SEQ ID NO: 45
caaataaaataacgcctcg

SEQ ID NO: 12249 - DNA, 18 bp, Artificial Sequence
  bisulfite treated nucleic acid for analysis of methylation status of SEQ ID NO: 45
aataacgcctcgaaaacc

SEQ ID NO: 12250 - DNA, 22 bp, Artificial Sequence
  bisulfite treated nucleic acid for analysis of methylation status of SEQ ID NO: 45
acggtaagtttattttgttcgt

SEQ ID NO: 12251 - DNA, 22 bp, Artificial Sequence
  bisulfite treated nucleic acid for analysis of methylation status of SEQ ID NO: 45
acgacaacgacatatcccaata

SEQ ID NO: 12252 - DNA, 16 bp, Artificial Sequence
  bisulfite treated nucleic acid for analysis of methylation status of SEQ ID NO: 45
ttcgttcggtgagcgg

SEQ ID NO: 12253 - DNA, 17 bp, Artificial Sequence
  bisulfite treated nucleic acid for analysis of methylation status of SEQ ID NO: 45
ggggtattacgggtgaa

SEQ ID NO: 12254 - DNA, 22 bp, Artificial Sequence
  bisulfite treated nucleic acid for analysis of methylation status of SEQ ID NO: 45
cggtaagtttattttgttcgta

SEQ ID NO: 12255 - DNA, 21 bp, Artificial Sequence
  bisulfite treated nucleic acid for analysis of methylation status of SEQ ID NO: 45
taaacgacaacgacatatccc

SEQ ID NO: 12256 - DNA, 22 bp, Artificial Sequence
  bisulfite treated nucleic acid for analysis of methylation status of SEQ ID NO: 45
tacggtaagtttattttgttcg

SEQ ID NO: 12257 - DNA, 24 bp, Artificial Sequence
  bisulfite treated nucleic acid for analysis of methylation status of SEQ ID NO: 45
tttattagcgtatatgatttcgac

SEQ ID NO: 12258 - DNA, 22 bp, Artificial Sequence
  bisulfite treated nucleic acid for analysis of methylation status of SEQ ID NO: 45
ctaaaaacttaataccgtcgcc

SEQ ID NO: 12259 - DNA, 20 bp, Artificial Sequence
  bisulfite treated nucleic acid for analysis of methylation status of SEQ ID NO: 45
tcgtttaggatttcgatttg

SEQ ID NO: 12260 - DNA, 21 bp, Artificial Sequence
  bisulfite treated nucleic acid for analysis of methylation status of SEQ ID NO: 45
gtaaataaccccgttcgtaaa

SEQ ID NO: 12261 - DNA, 20 bp, Artificial Sequence
  bisulfite treated nucleic acid for analysis of methylation status of SEQ ID NO: 45
gttagaacggtatcgtattt

SEQ ID NO: 12262 - DNA, 19 bp, Artificial Sequence
  bisulfite treated nucleic acid for analysis of methylation status of SEQ ID NO: 45
aaaataacgcctcgaaaac

SEQ ID NO: 12263 - DNA, 20 bp, Artificial Sequence
  bisulfite treated nucleic acid for analysis of methylation status of SEQ ID NO: 45
ccaaataaaataacgcctcg

SEQ ID NO: 12264 - DNA, 21 bp, Artificial Sequence
  bisulfite treated nucleic acid for analysis of methylation status of SEQ ID NO: 45
taaaaacttaataccgtcgcc

SEQ ID NO: 12265 - DNA, 22 bp, Artificial Sequence
  bisulfite treated nucleic acid for analysis of methylation status of SEQ ID NO: 45
caaataaaataacgcctcgaaa

SEQ ID NO: 12266 - DNA, 22 bp, Artificial Sequence
  bisulfite treated nucleic acid for analysis of methylation status of SEQ ID NO: 45
cgagaatgggtttcgtatttat

SEQ ID NO: 12267 - DNA, 20 bp, Artificial Sequence
  bisulfite treated nucleic acid for analysis of methylation status of SEQ ID NO: 45
taaataaccccgttcgtaaa

SEQ ID NO: 12268 - DNA, 22 bp, Artificial Sequence
  bisulfite treated nucleic acid for analysis of methylation status of SEQ ID NO: 45
cgatctcaaacaaataatcgtc

SEQ ID NO: 12269 - DNA, 21 bp, Artificial Sequence
  bisulfite treated nucleic acid for analysis of methylation status of SEQ ID NO: 45
cgacaacgacatatcccaata

SEQ ID NO: 12270 - DNA, 21 bp, Artificial Sequence
  bisulfite treated nucleic acid for analysis of methylation status of SEQ ID NO: 45
tatacgttcgtgttgattgtt

SEQ ID NO: 12271 - DNA, 21 bp, Artificial Sequence
  bisulfite treated nucleic acid for analysis of methylation status of SEQ ID NO: 45
ttatacgttcgtgttgattgt

SEQ ID NO: 12272 - DNA, 23 bp, Artificial Sequence
  bisulfite treated nucleic acid for analysis of methylation status of SEQ ID NO: 45
acggtaagtttattttgttcgta

SEQ ID NO: 12273 - DNA, 21 bp, Artificial Sequence
  bisulfite treated nucleic acid for analysis of methylation status of SEQ ID NO: 45
aaataaccccgttcgtaaaat

SEQ ID NO: 12274 - DNA, 19 bp, Artificial Sequence
  bisulfite treated nucleic acid for analysis of methylation status of SEQ ID NO: 45
ttgtgcgcgttttagatag

SEQ ID NO: 12275 - DNA, 18 bp, Artificial Sequence
  bisulfite treated nucleic acid for analysis of methylation status of SEQ ID NO: 45
ttcggcgagagcgggcgt

SEQ ID NO: 12276 - DNA, 23 bp, Artificial Sequence
  bisulfite treated nucleic acid for analysis of methylation status of SEQ ID NO: 45
ttattatacgttcgtgttgattg

SEQ ID NO: 12277 - DNA, 22 bp, Artificial Sequence
  bisulfite treated nucleic acid for analysis of methylation status of SEQ ID NO: 45
tgttagacgtgaatgataacgc

SEQ ID NO: 12278 - DNA, 20 bp, Artificial Sequence
  bisulfite treated nucleic acid for analysis of methylation status of SEQ ID NO: 45
acggggttatttacgttttg

SEQ ID NO: 12279 - DNA, 19 bp, Artificial Sequence
  bisulfite treated nucleic acid for analysis of methylation status of SEQ ID NO: 45
aacgacaacgacatatccc

SEQ ID NO: 12280 - DNA, 20 bp, Artificial Sequence
  bisulfite treated nucleic acid for analysis of methylation status of SEQ ID NO: 45
tatacggtggtgattgatcg

SEQ ID NO: 12281 - DNA, 22 bp, Artificial Sequence
  bisulfite treated nucleic acid for analysis of methylation status of SEQ ID NO: 45
acgaattatcgttctcgtctaa

SEQ ID NO: 12282 - DNA, 20 bp, Artificial Sequence
  bisulfite treated nucleic acid for analysis of methylation status of SEQ ID NO: 45
gatcgcgagatataagacga

SEQ ID NO: 12283 - DNA, 17 bp, Artificial Sequence
  bisulfite treated nucleic acid for analysis of methylation status of SEQ ID NO: 45
ggcgcgggacgggggtt

SEQ ID NO: 12284 - DNA, 19 bp, Artificial Sequence
  bisulfite treated nucleic acid for analysis of methylation status of SEQ ID NO: 45
cggggttatttacgttttg

SEQ ID NO: 12285 - DNA, 20 bp, Artificial Sequence
  bisulfite treated nucleic acid for analysis of methylation status of SEQ ID NO: 45
gagtattgtgcgcgttttag

SEQ ID NO: 12286 - DNA, 21 bp, Artificial Sequence
  bisulfite treated nucleic acid for analysis of methylation status of SEQ ID NO: 45
tcgatctcaaacaaataatcg

SEQ ID NO: 12287 - DNA, 19 bp, Artificial Sequence
  bisulfite treated nucleic acid for analysis of methylation status of SEQ ID NO: 45
gccgaaatcgctatctaaa

SEQ ID NO: 12288 - DNA, 23 bp, Artificial Sequence
  bisulfite treated nucleic acid for analysis of methylation status of SEQ ID NO: 45
ttattagcgtatatgatttcgac

SEQ ID NO: 12289 - DNA, 20 bp, Artificial Sequence
  bisulfite treated nucleic acid for analysis of methylation status of SEQ ID NO: 45
ttagacgtgaatgataacgc

SEQ ID NO: 12290 - DNA, 22 bp, Artificial Sequence
  bisulfite treated nucleic acid for analysis of methylation status of SEQ ID NO: 45
gttcgtttaggatttcgatttg

SEQ ID NO: 12291 - DNA, 21 bp, Artificial Sequence
  bisulfite treated nucleic acid for analysis of methylation status of SEQ ID NO: 45
acacgataataactaaccgcc

SEQ ID NO: 12292 - DNA, 22 bp, Artificial Sequence
  bisulfite treated nucleic acid for analysis of methylation status of SEQ ID NO: 45
cgttttcgtttagaattttgat

SEQ ID NO: 12293 - DNA, 23 bp, Artificial Sequence
  bisulfite treated nucleic acid for analysis of methylation status of SEQ ID NO: 45
tacgatggttacgttgtattcgt

SEQ ID NO: 12294 - DNA, 17 bp, Artificial Sequence
  bisulfite treated nucleic acid for analysis of methylation status of SEQ ID NO: 45
tgaggggaggagagttt

SEQ ID NO: 12295 - DNA, 20 bp, Artificial Sequence
  bisulfite treated nucleic acid for analysis of methylation status of SEQ ID NO: 45
cacgataataactaaccgcc

SEQ ID NO: 12296 - DNA, 20 bp, Artificial Sequence
  bisulfite treated nucleic acid for analysis of methylation status of SEQ ID NO: 45
gaacgtctcacctacgaaat

SEQ ID NO: 12297 - DNA, 22 bp, Artificial Sequence
  nucleic acid for analysis of methylation status of SEQ ID NO: 45
tattagttttattacgggcgtt

SEQ ID NO: 12298 - DNA, 16 bp, Artificial Sequence
  bisulfite treated nucleic acid for analysis of methylation status of SEQ ID NO: 45
tgcggatttcgtcgtt

SEQ ID NO: 12299 - DNA, 21 bp, Artificial Sequence
  bisulfite treated nucleic acid for analysis of methylation status of SEQ ID NO: 45
gtttttttagaaagggtgtag

SEQ ID NO: 12300 - DNA, 22 bp, Artificial Sequence
  bisulfite treated nucleic acid for analysis of methylation status of SEQ ID NO: 45
gtcgttttcgtttagaattttg

SEQ ID NO: 12301 - DNA, 17 bp, Artificial Sequence
  bisulfite treated nucleic acid for analysis of methylation status of SEQ ID NO: 45
atcgcgaacgatttggt

SEQ ID NO: 12302 - DNA, 21 bp, Artificial Sequence
  bisulfite treated nucleic acid for analysis of methylation status of SEQ ID NO: 45
ataaaaataaccgaccacgac

SEQ ID NO: 12303 - DNA, 21 bp, Artificial Sequence
  bisulfite treated nucleic acid for analysis of methylation status of SEQ ID NO: 45
tagagttacgatgagcggtag

SEQ ID NO: 12304 - DNA, 17 bp, Artificial Sequence
  bisulfite treated nucleic acid for analysis of methylation status of SEQ ID NO: 45
attcgtttatcgagcgg

SEQ ID NO: 12305 - DNA, 16 bp, Artificial Sequence
  bisulfite treated nucleic acid for analysis of methylation status of SEQ ID NO: 45
tgcggatagggtaggt

SEQ ID NO: 12306 - DNA, 22 bp, Artificial Sequence
  bisulfite treated nucleic acid for analysis of methylation status of SEQ ID NO: 45
attattagttttattacgggcg

SEQ ID NO: 12307 - DNA, 21 bp, Artificial Sequence
  bisulfite treated nucleic acid for analysis of methylation status of SEQ ID NO: 45
tcgttttcgtttagaattttg

SEQ ID NO: 12308 - DNA, 22 bp, Artificial Sequence
  bisulfite treated nucleic acid for analysis of methylation status of SEQ ID NO: 45
atcgacgacgtatctatctaca

SEQ ID NO: 12309 - DNA, 23 bp, Artificial Sequence
  bisulfite treated nucleic acid for analysis of methylation status of SEQ ID NO: 45
gcgttttcgagtttttagtaagt

SEQ ID NO: 12310 - DNA, 21 bp, Artificial Sequence
  bisulfite treated nucleic acid for analysis of methylation status of SEQ ID NO: 45
ggcgtagatggtttcgttcgt

SEQ ID NO: 12311 - DNA, 24 bp, Artificial Sequence
  bisulfite treated nucleic acid for analysis of methylation status of SEQ ID NO: 45
ttgaatttaaaagttttggtttgt

SEQ ID NO: 12312 - DNA, 22 bp, Artificial Sequence
  bisulfite treated nucleic acid for analysis of methylation status of SEQ ID NO: 45
cgttttcgagtttttagtaagt

SEQ ID NO: 12313 - DNA, 22 bp, Artificial Sequence
  bisulfite treated nucleic acid for analysis of methylation status of SEQ ID NO: 45
ccgtacaaatcaacgtaaaaat

SEQ ID NO: 12314 - DNA, 22 bp, Artificial Sequence
  bisulfite treated nucleic acid for analysis of methylation status of SEQ ID NO: 45
attattgtatttagcggagcgt

SEQ ID NO: 12315 - DNA, 17 bp, Artificial Sequence
  bisulfite treated nucleic acid for analysis of methylation status of SEQ ID NO: 45
ggcgtttcgaagatcgg

SEQ ID NO: 12316 - DNA, 20 bp, Artificial Sequence
  bisulfite treated nucleic acid for analysis of methylation status of SEQ ID NO: 45
gggtagttttattaagtagg

SEQ ID NO: 12317 - DNA, 22 bp, Artificial Sequence
  bisulfite treated nucleic acid for analysis of methylation status of SEQ ID NO: 45
cgaaataaacatctcgaaaaac

SEQ ID NO: 12318 - DNA, 20 bp, Artificial Sequence
  bisulfite treated nucleic acid for analysis of methylation status of SEQ ID NO: 45
ttaaagaggtcgtgatcgtc

SEQ ID NO: 12319 - DNA, 17 bp, Artificial Sequence
  bisulfite treated nucleic acid for analysis of methylation status of SEQ ID NO: 45
tttattttcgtcggcgt

SEQ ID NO: 12320 - DNA, 16 bp, Artificial Sequence
  bisulfite treated nucleic acid for analysis of methylation status of SEQ ID NO: 45
agcgggtgttcggagt

SEQ ID NO: 12321 - DNA, 22 bp, Artificial Sequence
  bisulfite treated nucleic acid for analysis of methylation status of SEQ ID NO: 45
gaaataaacatctcgaaaaacg

SEQ ID NO: 12322 - DNA, 21 bp, Artificial Sequence
  bisulfite treated nucleic acid for analysis of methylation status of SEQ ID NO: 45
accgtacaaatcaacgtaaaa

SEQ ID NO: 12323 - DNA, 21 bp, Artificial Sequence
  bisulfite treated nucleic acid for analysis of methylation status of SEQ ID NO: 45
acaacgacgaccacctattta

SEQ ID NO: 12324 - DNA, 20 bp, Artificial Sequence
  bisulfite treated nucleic acid for analysis of methylation status of SEQ ID NO: 45
caacgacgaccacctattta

SEQ ID NO: 12325 - DNA, 20 bp, Artificial Sequence
  bisulfite treated nucleic acid for analysis of methylation status of SEQ ID NO: 45
acgataataactaaccgccc

SEQ ID NO: 12326 - DNA, 20 bp, Artificial Sequence
  bisulfite treated nucleic acid for analysis of methylation status of SEQ ID NO: 45
tattgtatttagcggagcgt

SEQ ID NO: 12327 - DNA, 20 bp, Artificial Sequence
  bisulfite treated nucleic acid for analysis of methylation status of SEQ ID NO: 45
taaaaataaccgaccacgac

SEQ ID NO: 12328 - DNA, 22 bp, Artificial Sequence
  bisulfite treated nucleic acid for analysis of methylation status of SEQ ID NO: 45
ataaacatctcgaaaaacgcta

SEQ ID NO: 12329 - DNA, 16 bp, Artificial Sequence
  bisulfite treated nucleic acid for analysis of methylation status of SEQ ID NO: 45
gaagcgggtgttcgga

SEQ ID NO: 12330 - DNA, 19 bp, Artificial Sequence
  bisulfite treated nucleic acid for analysis of methylation status of SEQ ID NO: 45
cgataataactaaccgccc

SEQ ID NO: 12331 - DNA, 19 bp, Artificial Sequence
  bisulfite treated nucleic acid for analysis of methylation status of SEQ ID NO: 45
gataataactaaccgcccg

SEQ ID NO: 12332 - DNA, 22 bp, Artificial Sequence
  bisulfite treated nucleic acid for analysis of methylation status of SEQ ID NO: 45
tctaataaacactatacgcgcc

SEQ ID NO: 12333 - DNA, 20 bp, Artificial Sequence
  bisulfite treated nucleic acid for analysis of methylation status of SEQ ID NO: 45
ttaaataggtggtcgtcgtt

SEQ ID NO: 12334 - DNA, 17 bp, Artificial Sequence
  bisulfite treated nucleic acid for analysis of methylation status of SEQ ID NO: 45
ttcgtcgaagtcgttgt

SEQ ID NO: 12335 - DNA, 26 bp, Artificial Sequence
  bisulfite treated nucleic acid for analysis of methylation status of SEQ ID NO: 45
tacgatttcgtaggtgagacgttcgt

SEQ ID NO: 12336 - DNA, 21 bp, Artificial Sequence
  bisulfite treated nucleic acid for analysis of methylation status of SEQ ID NO: 45
ctaataaacactatacgcgcc

SEQ ID NO: 12337 - DNA, 22 bp, Artificial Sequence
  bisulfite treated nucleic acid for analysis of methylation status of SEQ ID NO: 45
tcgacgacgtatctatctacac

SEQ ID NO: 12338 - DNA, 20 bp, Artificial Sequence
  bisulfite treated nucleic acid for analysis of methylation status of SEQ ID NO: 45
ggcgttttcgagtttttagt

SEQ ID NO: 12339 - DNA, 22 bp, Artificial Sequence
  bisulfite treated nucleic acid for analysis of methylation status of SEQ ID NO: 45
cgacgacgtatctatctacacc

SEQ ID NO: 12340 - DNA, 22 bp, Artificial Sequence
  bisulfite treated nucleic acid for analysis of methylation status of SEQ ID NO: 45
ttagagttacgatgagcggtag

SEQ ID NO: 12341 - DNA, 21 bp, Artificial Sequence
  bisulfite treated nucleic acid for analysis of methylation status of SEQ ID NO: 45
ttattgtatttagcggagcgt

SEQ ID NO: 12342 - DNA, 21 bp, Artificial Sequence
  bisulfite treated nucleic acid for analysis of methylation status of SEQ ID NO: 45
attagttttattacgggcgtt

SEQ ID NO: 12343 - DNA, 22 bp, Artificial Sequence
  bisulfite treated nucleic acid for analysis of methylation status of SEQ ID NO: 45
taaacatctcgaaaaacgctac

SEQ ID NO: 12344 - DNA, 16 bp, Artificial Sequence
  bisulfite treated nucleic acid for analysis of methylation status of SEQ ID NO: 45
ggaagcgggtgttcgg

SEQ ID NO: 12345 - DNA, 24 bp, Artificial Sequence
  bisulfite treated nucleic acid for analysis of methylation status of SEQ ID NO: 45
cgttttcgagtttttagtaagtat

SEQ ID NO: 12346 - DNA, 19 bp, Artificial Sequence
  bisulfite treated nucleic acid for analysis of methylation status of SEQ ID NO: 45
gacaacgacgaccacctat

SEQ ID NO: 12347 - DNA, 22 bp, Artificial Sequence
  bisulfite treated nucleic acid for analysis of methylation status of SEQ ID NO: 45
gattattgtatttagcggagcg

SEQ ID NO: 12348 - DNA, 20 bp, Artificial Sequence
  bisulfite treated nucleic acid for analysis of methylation status of SEQ ID NO: 45
agagttacgatgagcggtag

SEQ ID NO: 12349 - DNA, 20 bp, Artificial Sequence
  bisulfite treated nucleic acid for analysis of methylation status of SEQ ID NO: 45
cgaatacaacgtaaccatcg

SEQ ID NO: 12350 - DNA, 17 bp, Artificial Sequence
  bisulfite treated nucleic acid for analysis of methylation status of SEQ ID NO: 45
gagttttcgtttcgcgt

SEQ ID NO: 12351 - DNA, 20 bp, Artificial Sequence
  bisulfite treated nucleic acid for analysis of methylation status of SEQ ID NO: 45
atttggtggagttgagggga

SEQ ID NO: 12352 - DNA, 19 bp, Artificial Sequence
  bisulfite treated nucleic acid for analysis of methylation status of SEQ ID NO: 45
attgtatttagcggagcgt

SEQ ID NO: 12353 - DNA, 22 bp, Artificial Sequence
  bisulfite treated nucleic acid for analysis of methylation status of SEQ ID NO: 45
taccctaaacgataacgaacct

SEQ ID NO: 12354 - DNA, 19 bp, Artificial Sequence
  bisulfite treated nucleic acid for analysis of methylation status of SEQ ID NO: 45
aaaaataaccgaccacgac

SEQ ID NO: 12355 - DNA, 22 bp, Artificial Sequence
  bisulfite treated nucleic acid for analysis of methylation status of SEQ ID NO: 45
taccacgaataaataacgaaca

SEQ ID NO: 12356 - DNA, 18 bp, Artificial Sequence
  bisulfite treated nucleic acid for analysis of methylation status of SEQ ID NO: 45
tttgtatttgacggcgat

SEQ ID NO: 12357 - DNA, 18 bp, Artificial Sequence
  bisulfite treated nucleic acid for analysis of methylation status of SEQ ID NO: 45
tacgatgagcggtagcga

SEQ ID NO: 12358 - DNA, 17 bp, Artificial Sequence
  bisulfite treated nucleic acid for analysis of methylation status of SEQ ID NO: 45
ggatgatggagatagtg

SEQ ID NO: 12359 - DNA, 23 bp, Artificial Sequence
  bisulfite treated nucleic acid for analysis of methylation status of SEQ ID NO: 45
cgtacaaatcaacgtaaaaataa

SEQ ID NO: 12360 - DNA, 21 bp, Artificial Sequence
  bisulfite treated nucleic acid for analysis of methylation status of SEQ ID NO: 45
attattgtatttagcggagcg

SEQ ID NO: 12361 - DNA, 21 bp, Artificial Sequence
  bisulfite treated nucleic acid for analysis of methylation status of SEQ ID NO: 45
gaacgtctcacctacgaaatc

SEQ ID NO: 12362 - DNA, 21 bp, Artificial Sequence
  bisulfite treated nucleic acid for analysis of methylation status of SEQ ID NO: 45
gtcgtggtcggttatttttat

SEQ ID NO: 12363 - DNA, 20 bp, Artificial Sequence
  bisulfite treated nucleic acid for analysis of methylation status of SEQ ID NO: 45
aaaaactctaaaccgcgaac

SEQ ID NO: 12364 - DNA, 22 bp, Artificial Sequence
  bisulfite treated nucleic acid for analysis of methylation status of SEQ ID NO: 45
atttttacgttgatttgtacgg

SEQ ID NO: 12365 - DNA, 21 bp, Artificial Sequence
  bisulfite treated nucleic acid for analysis of methylation status of SEQ ID NO: 45
aacgtggaggttcgttatcgt

SEQ ID NO: 12366 - DNA, 17 bp, Artificial Sequence
  nucleic acid for analysis of methylation status of SEQ ID NO: 45
gtacgagcgtatggtga

SEQ ID NO: 12367 - DNA, 21 bp, Artificial Sequence
  bisulfite treated nucleic acid for analysis of methylation status of SEQ ID NO: 45
aacatctcgaaaaacgctact

SEQ ID NO: 12368 - DNA, 17 bp, Artificial Sequence
  bisulfite treated nucleic acid for analysis of methylation status of SEQ ID NO: 45
gagtaggtaggtgcgga

SEQ ID NO: 12369 - DNA, 19 bp, Artificial Sequence
  bisulfite treated nucleic acid for analysis of methylation status of SEQ ID NO: 45
aaaactctaaaccgcgaac

SEQ ID NO: 12370 - DNA, 21 bp, Artificial Sequence
  bisulfite treated nucleic acid for analysis of methylation status of SEQ ID NO: 45
taaacgataacgaacctccac

SEQ ID NO: 12371 - DNA, 22 bp, Artificial Sequence
  bisulfite treated nucleic acid for analysis of methylation status of SEQ ID NO: 45
cgatgattattgtatttagcgg

SEQ ID NO: 12372 - DNA, 18 bp, Artificial Sequence
  bisulfite treated nucleic acid for analysis of methylation status of SEQ ID NO: 45
cgatcaaactcatcgacc

SEQ ID NO: 12373 - DNA, 22 bp, Artificial Sequence
  bisulfite treated nucleic acid for analysis of methylation status of SEQ ID NO: 45
gtttcggttagtgattcgtatt

SEQ ID NO: 12374 - DNA, 16 bp, Artificial Sequence
  bisulfite treated nucleic acid for analysis of methylation status of SEQ ID NO: 45
gacggcgtattgtcgt

SEQ ID NO: 12375 - DNA, 21 bp, Artificial Sequence
  bisulfite treated nucleic acid for analysis of methylation status of SEQ ID NO: 45
ggcgtacggagacgaaatcga

SEQ ID NO: 12376 - DNA, 22 bp, Artificial Sequence
  bisulfite treated nucleic acid for analysis of methylation status of SEQ ID NO: 45
ctaaacgataacgaacctccac

SEQ ID NO: 12377 - DNA, 22 bp, Artificial Sequence
  bisulfite treated nucleic acid for analysis of methylation status of SEQ ID NO: 45
ataataaaaataaccgaccacg

SEQ ID NO: 12378 - DNA, 18 bp, Artificial Sequence
  bisulfite treated nucleic acid for analysis of methylation status of SEQ ID NO: 45
atgagcggtagcgatatg

SEQ ID NO: 12379 - DNA, 20 bp, Artificial Sequence
  bisulfite treated nucleic acid for analysis of methylation status of SEQ ID NO: 45
aacgtctcacctacgaaatc

SEQ ID NO: 12380 - DNA, 21 bp, Artificial Sequence
  bisulfite treated nucleic acid for analysis of methylation status of SEQ ID NO: 45
caccgtacaaatcaacgtaaa

SEQ ID NO: 12381 - DNA, 22 bp, Artificial Sequence
  bisulfite treated nucleic acid for analysis of methylation status of SEQ ID NO: 45
aataaaaataaccgaccacgac

SEQ ID NO: 12382 - DNA, 21 bp, Artificial Sequence
  bisulfite treated nucleic acid for analysis of methylation status of SEQ ID NO: 45
aaataaacatctcgaaaaacg

SEQ ID NO: 12383 - DNA, 20 bp, Artificial Sequence
  bisulfite treated nucleic acid for analysis of methylation status of SEQ ID NO: 45
cgaaccaaatcgaaataaac

SEQ ID NO: 12384 - DNA, 18 bp, Artificial Sequence
  bisulfite treated nucleic acid for analysis of methylation status of SEQ ID NO: 45
gagtagcgtttttcgaga

SEQ ID NO: 12385 - DNA, 22 bp, Artificial Sequence
  bisulfite treated nucleic acid for analysis of methylation status of SEQ ID NO: 45
acgctcgtactaactaccctaa

SEQ ID NO: 12386 - DNA, 21 bp, Artificial Sequence
  bisulfite treated nucleic acid for analysis of methylation status of SEQ ID NO: 45
attaagtaggatggcgtttcg

SEQ ID NO: 12387 - DNA, 16 bp, Artificial Sequence
  bisulfite treated nucleic acid for analysis of methylation status of SEQ ID NO: 45
tacggtggcggaacgt

SEQ ID NO: 12388 - DNA, 26 bp, Artificial Sequence
  bisulfite treated nucleic acid for analysis of methylation status of SEQ ID NO: 45
gtcgttggagttaattatttttacgt

SEQ ID NO: 12389 - DNA, 19 bp, Artificial Sequence
  bisulfite treated nucleic acid for analysis of methylation status of SEQ ID NO: 45
aataatcgtactccccacg

SEQ ID NO: 12390 - DNA, 21 bp, Artificial Sequence
  bisulfite treated nucleic acid for analysis of methylation status of SEQ ID NO: 45
ggcgcgtatagtgtttattag

SEQ ID NO: 12391 - DNA, 16 bp, Artificial Sequence
  bisulfite treated nucleic acid for analysis of methylation status of SEQ ID NO: 45
agtttcgcggtgtcgt

SEQ ID NO: 12392 - DNA, 20 bp, Artificial Sequence
  bisulfite treated nucleic acid for analysis of methylation status of SEQ ID NO: 45
gatagtttaggttagcgttg

SEQ ID NO: 12393 - DNA, 20 bp, Artificial Sequence
  bisulfite treated nucleic acid for analysis of methylation status of SEQ ID NO: 45
acaacgccacgataaaaata

SEQ ID NO: 12394 - DNA, 22 bp, Artificial Sequence
  bisulfite treated nucleic acid for analysis of methylation status of SEQ ID NO: 45
gcgcgtatagtgtttattagat

SEQ ID NO: 12395 - DNA, 20 bp, Artificial Sequence
  bisulfite treated nucleic acid for analysis of methylation status of SEQ ID NO: 45
tggcgcgttgttatttacgt

SEQ ID NO: 12396 - DNA, 26 bp, Artificial Sequence
  bisulfite treated nucleic acid for analysis of methylation status of SEQ ID NO: 45
gtcgttttgtagcgtggggagtacga

SEQ ID NO: 12397 - DNA, 21 bp, Artificial Sequence
  bisulfite treated nucleic acid for analysis of methylation status of SEQ ID NO: 45
ttattagttttattacgggcg

SEQ ID NO: 12398 - DNA, 22 bp, Artificial Sequence
  bisulfite treated nucleic acid for analysis of methylation status of SEQ ID NO: 45
gacgacgtatctatctacacct

SEQ ID NO: 12399 - DNA, 19 bp, Artificial Sequence
  bisulfite treated nucleic acid for analysis of methylation status of SEQ ID NO: 45
agcgatatgttttagtggt

SEQ ID NO: 12400 - DNA, 22 bp, Artificial Sequence
  bisulfite treated nucleic acid for analysis of methylation status of SEQ ID NO: 45
ataataactaaccgcccgctaa

SEQ ID NO: 12401 - DNA, 21 bp, Artificial Sequence
  bisulfite treated nucleic acid for analysis of methylation status of SEQ ID NO: 45
taaataggtggtcgtcgttgt

SEQ ID NO: 12402 - DNA, 21 bp, Artificial Sequence
  bisulfite treated nucleic acid for analysis of methylation status of SEQ ID NO: 45
aataaacatctcgaaaaacgc

SEQ ID NO: 12403 - DNA, 19 bp, Artificial Sequence
  bisulfite treated nucleic acid for analysis of methylation status of SEQ ID NO: 45
aacgataacgaacctccac

SEQ ID NO: 12404 - DNA, 20 bp, Artificial Sequence
  bisulfite treated nucleic acid for analysis of methylation status of SEQ ID NO: 45
tcgtggtcggttatttttat

SEQ ID NO: 12405 - DNA, 19 bp, Artificial Sequence
  bisulfite treated nucleic acid for analysis of methylation status of SEQ ID NO: 45
taagtaggatggcgtttcg

SEQ ID NO: 12406 - DNA, 21 bp, Artificial Sequence
  bisulfite treated nucleic acid for analysis of methylation status of SEQ ID NO: 45
aaacatctcgaaaaacgctac

SEQ ID NO: 12407 - DNA, 16 bp, Artificial Sequence
  bisulfite treated nucleic acid for analysis of methylation status of SEQ ID NO: 45
ggttagcgttgcgcgg

SEQ ID NO: 12408 - DNA, 22 bp, Artificial Sequence
  bisulfite treated nucleic acid for analysis of methylation status of SEQ ID NO: 45
cgtacaaatcaacgtaaaaata

SEQ ID NO: 12409 - DNA, 21 bp, Artificial Sequence
  bisulfite treated nucleic acid for analysis of methylation status of SEQ ID NO: 45
acatctcgaaaaacgctactc

SEQ ID NO: 12410 - DNA, 20 bp, Artificial Sequence
  bisulfite treated nucleic acid for analysis of methylation status of SEQ ID NO: 45
catctcgaaaaacgctactc

SEQ ID NO: 12411 - DNA, 20 bp, Artificial Sequence
  bisulfite treated nucleic acid for analysis of methylation status of SEQ ID NO: 45
ttattgtatttagcggagcg

SEQ ID NO: 12412 - DNA, 21 bp, Artificial Sequence
  bisulfite treated nucleic acid for analysis of methylation status of SEQ ID NO: 45
tcgacgacgtatctatctaca

SEQ ID NO: 12413 - DNA, 20 bp, Artificial Sequence
  bisulfite treated nucleic acid for analysis of methylation status of SEQ ID NO: 45
gtatttagcggagcgttttc

SEQ ID NO: 12414 - DNA, 18 bp, Artificial Sequence
  bisulfite treated nucleic acid for analysis of methylation status of SEQ ID NO: 45
tgttgtcgttggagttaa

SEQ ID NO: 12415 - DNA, 18 bp, Artificial Sequence
  bisulfite treated nucleic acid for analysis of methylation status of SEQ ID NO: 45
cgaacgtctcacctacga

SEQ ID NO: 12416 - DNA, 17 bp, Artificial Sequence
  bisulfite treated nucleic acid for analysis of methylation status of SEQ ID NO: 45
gtcgttgtcgtttacga

SEQ ID NO: 12417 - DNA, 19 bp, Artificial Sequence
  bisulfite treated nucleic acid for analysis of methylation status of SEQ ID NO: 45
caacgccacgataaaaata

SEQ ID NO: 12418 - DNA, 21 bp, Artificial Sequence
  bisulfite treated nucleic acid for analysis of methylation status of SEQ ID NO: 45
tttttacgttgatttgtacgg

SEQ ID NO: 12419 - DNA, 18 bp, Artificial Sequence
  bisulfite treated nucleic acid for analysis of methylation status of SEQ ID NO: 45
aaacgtaacgcccgtaat

SEQ ID NO: 12420 - DNA, 22 bp, Artificial Sequence
  bisulfite treated nucleic acid for analysis of methylation status of SEQ ID NO: 45
tgttcgttatttattcgtggta

SEQ ID NO: 12421 - DNA, 23 bp, Artificial Sequence
  bisulfite treated nucleic acid for analysis of methylation status of SEQ ID NO: 45
tgcggatagggtaggtttgtcgt

SEQ ID NO: 12422 - DNA, 21 bp, Artificial Sequence
  bisulfite treated nucleic acid for analysis of methylation status of SEQ ID NO: 45
ataaacactatacgcgcccta

SEQ ID NO: 12423 - DNA, 19 bp, Artificial Sequence
  bisulfite treated nucleic acid for analysis of methylation status of SEQ ID NO: 45
tatttagcggagcgttttc

SEQ ID NO: 12424 - DNA, 20 bp, Artificial Sequence
  bisulfite treated nucleic acid for analysis of methylation status of SEQ ID NO: 45
ccgaaactctaacaaaaacg

SEQ ID NO: 12425 - DNA, 24 bp, Artificial Sequence
  bisulfite treated nucleic acid for analysis of methylation status of SEQ ID NO: 45
cggttagttattatcgtgtagaag

SEQ ID NO: 12426 - DNA, 20 bp, Artificial Sequence
  bisulfite treated nucleic acid for analysis of methylation status of SEQ ID NO: 45
gacggaattttcgggttcgt

SEQ ID NO: 12427 - DNA, 20 bp, Artificial Sequence
  bisulfite treated nucleic acid for analysis of methylation status of SEQ ID NO: 45
ggattcgatattgtagttgt

SEQ ID NO: 12428 - DNA, 19 bp, Artificial Sequence
  bisulfite treated nucleic acid for analysis of methylation status of SEQ ID NO: 45
aataggtggtcgtcgttgt

SEQ ID NO: 12429 - DNA, 19 bp, Artificial Sequence
  bisulfite treated nucleic acid for analysis of methylation status of SEQ ID NO: 45
acgaacgtctcacctacga

SEQ ID NO: 12430 - DNA, 20 bp, Artificial Sequence
  bisulfite treated nucleic acid for analysis of methylation status of SEQ ID NO: 45
ctcgaaccaaatcgaaataa

SEQ ID NO: 12431 - DNA, 18 bp, Artificial Sequence
  bisulfite treated nucleic acid for analysis of methylation status of SEQ ID NO: 45
agtagcgtttttcgagat

SEQ ID NO: 12432 - DNA, 21 bp, Artificial Sequence
  bisulfite treated nucleic acid for analysis of methylation status of SEQ ID NO: 45
aacaacgccacgataaaaata

SEQ ID NO: 12433 - DNA, 19 bp, Artificial Sequence
  bisulfite treated nucleic acid for analysis of methylation status of SEQ ID NO: 45
ataaccgaccacgacaaac

SEQ ID NO: 12434 - DNA, 18 bp, Artificial Sequence
  bisulfite treated nucleic acid for analysis of methylation status of SEQ ID NO: 45
tggttattgcggataggg

SEQ ID NO: 12435 - DNA, 19 bp, Artificial Sequence
  bisulfite treated nucleic acid for analysis of methylation status of SEQ ID NO: 45
aacgacgaccacctattta

SEQ ID NO: 12436 - DNA, 23 bp, Artificial Sequence
  bisulfite treated nucleic acid for analysis of methylation status of SEQ ID NO: 45
atctaataaacactatacgcgcc

SEQ ID NO: 12437 - DNA, 19 bp, Artificial Sequence
  bisulfite treated nucleic acid for analysis of methylation status of SEQ ID NO: 45
acgatcaaactcatcgacc

SEQ ID NO: 12438 - DNA, 22 bp, Artificial Sequence
  bisulfite treated nucleic acid for analysis of methylation status of SEQ ID NO: 45
ttcggttagtgattcgtattag

SEQ ID NO: 12439 - DNA, 20 bp, Artificial Sequence
  bisulfite treated nucleic acid for analysis of methylation status of SEQ ID NO: 45
cgtggtcggttatttttatt

SEQ ID NO: 12440 - DNA, 19 bp, Artificial Sequence
  bisulfite treated nucleic acid for analysis of methylation status of SEQ ID NO: 45
gatgagcggtagcgatatg

SEQ ID NO: 12441 - DNA, 21 bp, Artificial Sequence
  bisulfite treated nucleic acid for analysis of methylation status of SEQ ID NO: 45
accctaaacgataacgaacct

SEQ ID NO: 12442 - DNA, 18 bp, Artificial Sequence
  bisulfite treated nucleic acid for analysis of methylation status of SEQ ID NO: 45
cgcgtgagtaggtaggtg

SEQ ID NO: 12443 - DNA, 18 bp, Artificial Sequence
  bisulfite treated nucleic acid for analysis of methylation status of SEQ ID NO: 45
cgtgagtaggtaggtgcg

SEQ ID NO: 12444 - DNA, 17 bp, Artificial Sequence
  bisulfite treated nucleic acid for analysis of methylation status of SEQ ID NO: 45
tttcgtcggcgtcgggg

SEQ ID NO: 12445 - DNA, 22 bp, Artificial Sequence
  bisulfite treated nucleic acid for analysis of methylation status of SEQ ID NO: 45
atatcgaatcctaaacgaaaaa

SEQ ID NO: 12446 - DNA, 18 bp, Artificial Sequence
  bisulfite treated nucleic acid for analysis of methylation status of SEQ ID NO: 45
tagcgggcggttagttat

SEQ ID NO: 12447 - DNA, 19 bp, Artificial Sequence
  bisulfite treated nucleic acid for analysis of methylation status of SEQ ID NO: 45
tgtagaagttgtcgtagtt

SEQ ID NO: 12448 - DNA, 22 bp, Artificial Sequence
  bisulfite treated nucleic acid for analysis of methylation status of SEQ ID NO: 45
aatatcgaatcctaaacgaaaa

SEQ ID NO: 12449 - DNA, 20 bp, Artificial Sequence
  bisulfite treated nucleic acid for analysis of methylation status of SEQ ID NO: 45
ccctaaacgataacgaacct

SEQ ID NO: 12450 - DNA, 19 bp, Artificial Sequence
  bisulfite treated nucleic acid for analysis of methylation status of SEQ ID NO: 45
gaggagagttttcgtttcg

SEQ ID NO: 12451 - DNA, 23 bp, Artificial Sequence
  bisulfite treated nucleic acid for analysis of methylation status of SEQ ID NO: 45
ttcgttttgtgtttcgcggttta

SEQ ID NO: 12452 - DNA, 18 bp, Artificial Sequence
  bisulfite treated nucleic acid for analysis of methylation status of SEQ ID NO: 45
ttacgatggttacgttgt

SEQ ID NO: 12453 - DNA, 20 bp, Artificial Sequence
  bisulfite treated nucleic acid for analysis of methylation status of SEQ ID NO: 45
ttaagtaggatggcgtttcg

SEQ ID NO: 12454 - DNA, 19 bp, Artificial Sequence
  bisulfite treated nucleic acid for analysis of methylation status of SEQ ID NO: 45
gacgatcacgacctcttta

SEQ ID NO: 12455 - DNA, 22 bp, Artificial Sequence
  bisulfite treated nucleic acid for analysis of methylation status of SEQ ID NO: 45
tttagggtagttagtacgagcg

SEQ ID NO: 12456 - DNA, 17 bp, Artificial Sequence
  bisulfite treated nucleic acid for analysis of methylation status of SEQ ID NO: 45
gtcgcgggatttaacgt

SEQ ID NO: 12457 - DNA, 19 bp, Artificial Sequence
  bisulfite treated nucleic acid for analysis of methylation status of SEQ ID NO: 45
ggatgattagttttgggaa

SEQ ID NO: 12458 - DNA, 19 bp, Artificial Sequence
  bisulfite treated nucleic acid for analysis of methylation status of SEQ ID NO: 45
acaacgccacgataaaaat

SEQ ID NO: 12459 - DNA, 22 bp, Artificial Sequence
  bisulfite treated nucleic acid for analysis of methylation status of SEQ ID NO: 45
taataaacactatacgcgccct

SEQ ID NO: 12460 - DNA, 22 bp, Artificial Sequence
  bisulfite treated nucleic acid for analysis of methylation status of SEQ ID NO: 45
aataaacactatacgcgcccta

SEQ ID NO: 12461 - DNA, 21 bp, Artificial Sequence
  bisulfite treated nucleic acid for analysis of methylation status of SEQ ID NO: 9
gaatcggtagttgaagattcg

(The sequence listing continues in the following parts.)

1. A method for detecting and/or for detecting and distinguishing between or among colon cell proliferative disorders in a subject comprising:
a) contacting genomic DNA isolated from blood plasma, blood serum, whole blood, isolated blood cells, or cells isolated from the blood obtained from a subject with at least one reagent, or series of reagents that distinguishes between methylated and non-methylated CpG dinucleotides within at least one target region of the genomic DNA, wherein said contiguous nucleotides comprise at least one CpG dinucleotide sequence; and
b) detecting, or detecting and distinguishing between or among colon cell proliferative disorders, wherein the detecting, or detecting and distinguishing is with a sensitivity of greater than or equal to 80% and a specificity of greater than or equal to 80%.

2. The method of claim 1, wherein the target region comprises, or hybridizes under stringent conditions to at least 16 contiguous nucleotides of a sequence or gene selected from the group consisting of SEQ ID NOS:1-3, 14, 16, 17, 21, 22, 23, 44-46, 48, 50, 59-64, 36, COX7B, CST5, EYA3, FTH1, RNF4, SOX 21, RNF4, ALX 4, ONC2, NGFR, DLX-5, HVIAAT, BTF3 Homolog 1, ADCY9, BCL-5, BCOR, TAFII28, HOMEOBOX PROTEIN SIX6, GSK-3 BETA, ELK-L, HLA-F, TGFBR2, AR, RNF30, DUX4, SMAD7, GTMBP, EYA4, TCF1-ALPHA, TPEF, P73, APC, CD44, CSPG2, CAV 1, H-cadherin, ELK1, N33 and gstp1 and LTBP4, respectively.

3. A method for detecting, or for detecting and distinguishing between or among colon cell proliferative disorders in a subject, comprising determining, in a biological sample isolated from a subject, the expression levels of one or more sequences or genes selected from the group consisting SEQ ID NOS: 1-3, 14, 16, 21, 22, 23, 44-46, 48, 50, 59-64, COX7B, CST5, EYA3, FTH1, RNF4, SOX 21, RNF4, ALX 4, ONC2, NGFR, DLX-5, HVIAAT, BTF3 Homolog 1, ADCY9, BCL-5, BCOR, TAFII28, HOMEOBOX PROTEIN SIX6, GSK-3 BETA, ELK-L, HLA-F, TGFBR2, AR, RNF30 and DUX4, respectively.

4. The method of claim 3, wherein said expression level is determined by detecting the presence, absence or level of mRNA transcribed from said gene or sequence.

5. The method of claim 3, wherein said expression level is determined by detecting the presence, absence or level of a polypeptide encoded by said gene or sequence.

6. The method of claim 5, wherein said polypeptide is detected by one or more means selected from the group consisting of immunoassay, ELISA immunoassay, radioimmunoassay and antibody.

7. The method of claim 3, wherein said expression is determined by detecting the presence or absence of CpG methylation within said gene or sequence, wherein hypermethylation indicates the presence of a colon cell proliferative disorder.

8. A method for detecting, or for detecting and distinguishing between or among colon cell proliferative disorders in a subject, comprising contacting genomic DNA isolated from a biological sample obtained from a subject with at least one reagent, or series of reagents that distinguishes between methylated and non-methylated CpG dinucleotides within at least one target region of the genomic DNA, wherein the at least one target region comprises, or hybridizes under stringent conditions to a sequence of at least 16 contiguous nucleotides of at least one sequence or gene selected from the group consisting of SEQ ID NOS:1-3, 14, 16, 21, 22, 23, 44-46, 48, 50, 59-64, COX7B, CST5, EYA3, FTH1, RNF4, SOX 21, RNF4, ALX 4, ONC2, NGFR, DLX-5, HVIAAT, BTF3 Homolog 1, ADCY9, BCL-5, BCOR, TAFII28, HOMEOBOX PROTEIN SIX6, GSK-3 BETA, ELK-L, HLA-F, TGFBR2, AR, RNF30, DUX4, SMAD7, GTMBP, EYA4 and TCF1-ALPHA, respectively, wherein said contiguous nucleotides comprise at least one CpG dinucleotide sequence, and whereby detecting, or detecting and distinguishing between or among colon cell proliferative disorders is, at least in part, afforded.

9. A method for detecting, or for detecting and distinguishing between or among colon cell proliferative disorders in a subject, comprising contacting genomic DNA isolated from a biological sample obtained from a subject with at least one reagent, or series of reagents that distinguishes between methylated and non-methylated CpG dinucleotides within at least one target region of the genomic DNA, wherein the at least one target region comprises, or hybridizes under stringent conditions to a sequence of at least 16 contiguous nucleotides of at least two sequences or genes selected from the group consisting of SEQ ID NOS:1-3, 14, 16, 21, 22, 23, 44-46, 48, 50, 59-64, 36, COX7B, CST5, EYA3, FTH1, RNF4, SOX 21, RNF4, ALX 4, ONC2, NGFR, DLX-5, HVIAAT, BTF3 Homolog 1, ADCY9, BCL-5, BCOR, TAFII28, HOMEOBOX PROTEIN SIX6, GSK-3 BETA, ELK-L, HLA-F, TGFBR2, AR, RNF30, DUX4, SMAD7, GTMBP, EYA4, TCF1-ALPHA, TPEF, P73, APC, CD44, CSPG2, CAV 1, H-cadherin and LTBP4, respectively, wherein said contiguous nucleotides comprise at least one CpG dinucleotide sequence, and whereby detecting, or detecting and distinguishing between or among colon cell proliferative disorders is, at least in part, afforded.

10. The method of claim 8, wherein colorectal carcinoma is distinguished from at least one condition selected from the group consisting of colon adenoma, normal colon tissue, non-colon tissues and non-colon cell proliferative disorders.

11. The method of claim 8, wherein colon adenoma is distinguished from at least one condition selected from the group consisting of colon carcinoma, normal colon tissue, non-colon tissues and non-colon cell proliferative disorders.

12. The method of claim 8, wherein at least one of colorectal carcinoma tissue or colon adenomas is distinguished from at least one tissue selected from the group consisting of colon polyps less than 1 cm in diameter, inflammatory colon tissue, and normal colon tissue, and wherein the target region comprises, or hybridizes under stringent conditions to at least 16 contiguous nucleotides of a sequence selected from the group consisting of SEQ ID NOS:1-12, 15-20, 22, 25-36, 38-49, 51-58, and complements thereof.

13. The method of claim 8, wherein colorectal carcinoma is distinguished from at least one tissue selected from the group consisting of non-colon healthy tissue, peripheral blood lymphocytes and non-colon cancer tissue, and wherein the target region comprises, or hybridizes under stringent conditions to at least 16 contiguous nucleotides of a sequence selected from the group consisting of SEQ ID NOS:1-23, 26-36, 38-43, 45-49, 51-58 and complements thereof.

14. The method of claim 8, wherein colorectal carcinoma is distinguished from at least one tissue selected from the group consisting of inflammatory colon tissue, normal colon tissue, non-colon healthy tissue, peripheral blood lymphocytes, colon adenomas and non-colon cancer tissue, and wherein the target region comprises, or hybridizes under stringent conditions to at least 16 contiguous nucleotides of a sequence selected from the group consisting of SEQ ID NOS:1-3, 5-13, 15-23, 26-36, 38-43, 45-49, 51-58, and complements thereof.

15. The method of claim 8, wherein colorectal carcinoma is distinguished from colon adenomas, and wherein the target region comprises, or hybridizes under stringent conditions to at least 16 contiguous nucleotides of a sequence selected from the group consisting of SEQ ID NOS:11, 25, 27, 38, 40, 45, 53, and complements thereof.

16. The method of claim 8, wherein at least one of colorectal carcinoma tissue, or large adenomas is distinguished from at least one tissue selected from the group consisting of inflammatory colon tissue, and normal colon tissue.

17. The method of claim 8, wherein colorectal carcinoma tissue is distinguished from at least one of inflammatory colon tissue and normal colon tissue, and wherein the target region comprises, or hybridizes under stringent conditions to at least 16 contiguous nucleotides of a sequence selected from the group consisting of SEQ ID NOS:1-3, 5-23, 25-36, 38-49, 51-58, and complements thereof.

18. The method of claim 1, wherein at least one of colorectal carcinoma tissue, or colon adenomas is distinguished from at least one tissue selected from the group consisting of inflammatory colon tissue, normal colon tissue, non-colon healthy tissue, peripheral blood lymphocytes, and non-colon cancer tissue, and wherein the target region comprises, or hybridizes under stringent conditions to at least 16 contiguous nucleotides of a sequence selected from the group consisting of SEQ ID NOS:1-36, 38-43, 45-58, and complements thereof.

19. The method of claim 8, wherein tissues originating from the colon are distinguished from tissues of non-colon origin.

20. A method for detecting, or for detecting and distinguishing between or among cell proliferative disorders and healthy tissues in a subject, comprising contacting genomic DNA isolated from a biological sample obtained from a subject with at least one reagent, or series of reagents that distinguishes between methylated and non-methylated CpG dinucleotides within at least one target region of the genomic DNA, wherein the at least one target region comprises, or hybridizes under stringent conditions to a sequence of at least 16 contiguous nucleotides of at least two sequences selected from the group consisting of SEQ ID NO: &[IDGENSEQ_class9] respectively, wherein said contiguous nucleotides comprise at least one CpG dinucleotide sequence.

21. The method of claim 8, comprising:
a) extracting or otherwise isolating genomic DNA from a biological sample obtained from a subject;
b) treating the genomic DNA, or a fragment thereof, with one or more reagents to convert cytosine bases that are unmethylated in the 5-position thereof to uracil or to another base that is detectably dissimilar to cytosine in terms of hybridization properties;
c) contacting the treated genomic DNA, or the treated fragment thereof, with an amplification enzyme and at least two primers comprising, in each case a contiguous sequence of at least 9 nucleotides that is complementary to, or hybridizes under moderately stringent or stringent conditions to a sequence selected from the group consisting of SEQ ID NOS:304 to SEQ ID NO:535 and SEQ ID NOS:65 to SEQ ID NO:88, and complements thereof, wherein the treated genomic DNA or the fragment thereof is either amplified to produce at least one amplificate, or is not amplified; and
d) determining, based on a presence or absence of, or on a property of said amplificate, the methylation state of at least one CpG dinucleotide of a sequence selected from the group consisting SEQ ID NOS:1 to SEQ ID NO 64, or an average, or a value reflecting an average methylation state of a plurality of CpG dinucleotides of a sequence selected from the groups consisting of SEQ ID NOS:1 to SEQ ID NO 64, whereby at least one of detecting, or detecting and distinguishing between colon cell proliferative disorders is, at least in part, afforded.

22. The method of claim 21, wherein treating the genomic DNA, or the fragment thereof, comprises use of at least one reagent selected from the group consisting of bisulfite, hydrogen sulfite, and disulfite.

23. The method of claim 21, wherein contacting or amplifying in c) comprises use of at least one method selected from the group consisting of: use of a heat-resistant DNA polymerase as the amplification enzyme; use of a polymerase lacking 5′-3′ exonuclease activity; use of a polymerase chain reaction (PCR); and generation of a amplificate nucleic acid molecule carrying a detectable label.

24. The method of claim 23, wherein the detectable amplificate label is selected from the label group consisting of: fluorescent labels; radionuclides or radiolabels; amplificate mass labels detectable in a mass spectrometer; detachable amplificate fragment mass labels detectable in a mass spectrometer; amplificate, and detachable amplificate fragment mass labels having a single-positive or single-negative net charge detectable in a mass spectrometer; and combinations thereof.

25. The method of claim 21, wherein the biological sample obtained from the subject is selected from the group consisting of cell lines, histological slides, biopsies, paraffin-embedded tissue, bodily fluids, stool, colonic effluent, urine, blood plasma, blood serum, whole blood, isolated blood cells, cells isolated from the blood and combinations thereof.

26. The method of claim 21, further comprising in step d) the use of at least one nucleic acid molecule or peptide nucleic acid molecule comprising in each case a contiguous sequence at least 9 nucleotides in length that is complementary to, or hybridizes under moderately stringent or stringent conditions to a sequence selected from the group consisting of SEQ ID NOS:304 to SEQ ID NO:535 and SEQ ID NOS:65 to SEQ ID NO:88, and complements thereof, wherein said nucleic acid molecule or peptide nucleic acid molecule suppresses amplification of the nucleic acid to which it is hybridized.

27. The method of claim 26, wherein the sequence of said nucleic acid molecules is selected from the group consisting of SEQ ID NOS:1162, 1163, 1201, 1202, 1208, 1211, 1217, 1274, 1288, 1275, 1289, 1299, 1308, 1309, 1341, 1342, 1347, 1351, 1354, 1372, 1423, 1424, 1425, 1427, 1432, 1433, 1434, 1435, 1436, 1437, 1440, 1441, 1442, 1443, 1444, 1445, 1446, 1447, 1370, 1371, 1400, 1450, 1461, 1451, 1462, 1467, 1470, 1473, 1475, 1535, 1536, 1542, 1544, 1569, 1570, 1583, 1590, 1595, 1666, 1704, 1596, 1601, 1603, 1667, 1705, 1722, 1723, 1727, 1735, 1746, 1747, 1768, 1769, 1773, 1803, 1804, 1807, 1810, 1832, 1833, 1836, 1867, 1871, 1901, 1902, 1908, 1911, 1924, 1925, 1937, 1938, 1943, 1946, 1949, 1956, 1957, 1978, 1979, 1986, 1992, 1998, 2001, 2003, 2010, 2020, 2025, 2029, 2030, 2113, 2163, 2201, 2209, 2231, 2259, 2304, 2326, 2338, 2348, 2351, 2369, 2407, 2471, 2488, 2557, 2584, 2602, 2616, 2657, 2661, 2664, 2671, 2683, 2709, 2753, 2756, 2758, 2761, 2766, 2770, 2774, 2778, 2799, 2807, 2813, 2819, 2822, 2826, 2848, 2857, 2900, 2906, 2908, 2910, 2913, 2921, 2925, 2940, 2943, 2952, 2964, 2983, 2986, 3009, 3012, 3015, 3024, 3030, 3035, 3046, 3058, 3062, 3067, 3070, 3074, 3077, 3079, 3082, 3087, 3095, 3099, 3102, 3106, 3112, 3120, 3125, 3129, 3132, 3141, 3143, 3154, 3156, 3158, 3161, 3177, 3188, 3191, 3193, 3200, 3208, 3211, 3220, 3231, 3241, 3251, 3254, 3258, 3263, 3272, 3277, 3288, 3294, 3296, 3299, 3303, 3317, 3323, 3326, 3329, 3336, 3341, 3362, 3366, 3370, 3375, 3379, 3382, 3387, 3394, 3398, 3405, 3407, 3410, 3412, 3416, 3422, 3425, 3430, 3449, 3451, 3457, 3460, 3465, 3468, 3486, 3498, 3502, 3507, 3523, 3532, 3539, 3546, 3550, 3567, 3572, 3579, 3582, 3610, 3620, 3628, 3648, 3659, 3664, 3672, 3675, 3680, 3682, 3685, 3687, 3699, 3712, 3716, 3720, 3734, 3751, 3763, 3766, 3769, 3783, 3789, 3795, 3811, 3816, 3825, 3830, 3835, 3841, 3843, 3846, 3849, 3855, 3859, 3879, 3882, 3910, 3912, 3913, 3918, 3925, 3929, 3932, 3946, 3953, 3956, 3967, 3969, 3973, 3977, 3989, 3992, 3996, 3999, 4002, 4008, 4014, 4026, 4030, 4036, 4041, 4044, 4053, 4057, 4060, 4062, 4081, 4091, 4097, 4103, 4107, 4118, 4126, 4140, 4143, 4147, 4155, 4158, 4164, 4175, 4178, 4183, 4187, 4193, 4200, 4203, 4210, 4212, 4215, 4222, 4227, 4230, 4235, 4240, 4250, 4253, 4264, 4278, 4294, 4312, 4314, 4320, 4329, 4339, 4346, 4356, 4363, 4380, 4402, 4404, 4414, 4419, 4421, 4431, 4439, 4445, 4449, 4459, 4468, 4483, 4493, 4500, 4513, 4526, 4527, 4532, 4544, 4550, 4552, 4566, 4577, 4591, 4594, 4604, 4608, 4623, 4625, 4629, 4637, 4651, 4654, 4657, 4673, 4679, 4682, 4692, 4698, 4710, 4712, 4713, 4723, 4725, 4729, 4734, 4740, 4743, 4747, 4752, 4757, 4762, 4765, 4775, 4781, 4796, 4799, 4803, 4809, 4826, 4831, 4863, 4866, 4880, 4888, 4914, 4916, 4931, 4933, 4939, 4955, 4959, 4962, 4965, 4994, 5001, 5008, 5012, 5023, 5029, 5035, 5046, 5059, 5063, 5068, 5071, 5079, 5082, 5085, 5089, 5092, 5095, 5098, 5102, 5108, 5113, 5118, 5122, 5127, 5130, 5133, 5138, 5141, 5146, 5152, 5154, 5178, 5192, 5197, 5206, 5213, 5228, 5236, 5243, 5258, 5267, 5275, 5277, 5283, 5294, 5298, 5302, 5305, 5320, 5325, 5328, 5335, 5345, 5350, 5357, 5374, 5381, 5384, 5386, 5390, 5397, 5402, 5406, 5411, 5423, 5430, 5439, 5453, 5463, 5473, 5476, 5479, 5483, 5489, 5514, 5520, 5523, 5530, 5547, 5584, 5590, 5607, 5610, 5613, 5617, 5621, 5631, 5636, 5641, 5653, 5655, 5658, 5666, 5669, 5675, 5685, 5692, 5695, 5703, 5706, 5716, 5719, 5726, 5738, 5746, 5749, 5752, 5755, 5757, 5761, 5765, 5772, 5784, 5799, 5805, 5815, 5819, 5829, 5851, 5869, 5901, 5908, 5911, 5914, 5917, 5925, 5941, 5951, 5967, 5974, 5979, 5982, 5985, 5989, 5995, 6022, 6029, 6044, 6047, 6052, 6057, 6061, 6069, 6071, 6080, 6082, 6087, 6092, 6095, 6102, 6104, 6107, 6109, 6113, 6124, 6129, 6140, 6147, 6158, 6165, 6179, 6185, 6203, 6209, 6217, 6228, 6249, 6263, 6267, 6279, 6290, 6332, 6339, 6343, 6346, 6352, 6363, 6366, 6370, 6380, 6385, 6391, 6396, 6408, 6430, 6439, 6454, 6456, 6477, 6483, 6488, 6495, 6509, 6517, 6520, 6530, 6534, 6555, 6557, 6559, 6569, 6574, 6581, 6593, 6616, 6622, 6626, 6636, 6637, 6648, 6654, 6667, 6673, 6684, 6724, 6729, 6733, 6737, 6743, 6750, 6753, 6763, 6766, 6768, 6771, 6776, 6780, 6788, 6793, 6808, 6813, 6820, 6823, 6826, 6846, 6856, 6864, 6867, 6878, 6885, 6903, 6914, 6919, 6923, 6926, 6938, 6941, 6978, 6982, 6985, 6988, 6994, 6997, 7000, 7004, 7008, 7015, 7019, 7021, 7069, 7079, 7099, 7104, 7117, 7120, 7145, 7151, 7153, 7162, 7164, 7169, 7201, 7209, 7234, 7238, 7252, 7286, 7288, 7300, 7305, 7313, 7323, 7327, 7338, 7343, 7346, 7352, 7377, 7380, 7396, 7399, 7406, 7412, 7414, 7418, 7424, 7429, 7437, 7441, 7443, 7458, 7461, 7469, 7473, 7491, 7502, 7504, 7514, 7531, 7551, 7553, 7557, 7562, 7564, 7569, 7572, 7592, 7602, 7605, 7612, 7625, 7630, 7632, 7634, 7648, 7653, 7664, 7668, 7693, 7696, 7706, 7763, 7766, 7769, 7772, 7777, 7780, 7787, 7790, 7801, 7804, 7806, 7826, 7831, 7850, 7859, 7862, 7867, 7876, 7883, 7887, 7891, 7893, 7895, 7898, 7901, 7906, 7908, 7911, 7915, 7924, 7927, 7930, 7935, 7959, 7961, 7966, 7975, 7978, 7984, 7994, 7998, 8002, 8014, 8029, 8032, 8037, 8041, 8045, 8048, 8058, 8063, 8086, 8092, 8097, 8106, 8109, 8120, 8140, 8141, 8159, 8162, 8172, 8196, 8205, 8211, 8215, 8219, 8226, 8234, 8241, 8249, 8262, 8265, 8272, 8276, 8279, 8283, 8290, 8300, 8308, 8320, 8338, 8355, 8358, 8368, 8380, 8386, 8389, 8393, 8396, 8400, 8404, 8408, 8417, 8421, 8427, 8430, 8439, 8441, 8443, 8453, 8459, 8471, 8483, 8495, 8507, 8509, 8525, 8538, 8540, 8543, 8549, 8553, 8559, 8561, 8573, 8579, 8584, 8590, 8593, 8605, 8611, 8622, 8626, 8656, 8664, 8721, 8724, 8731, 8740, 8743, 8746, 8765, 8774, 8781, 8792, 8795, 8811, 8817, 8822, 8825, 8834, 8839, 8849, 8858, 8860, 8862, 8875, 8886, 8910, 8915, 8919, 8922, 8926, 8940, 8947, 8956, 8959, 8973, 8982, 8986, 8991, 8996, 9000, 9015, 9027, 9031, 9040, 9057, 9059, 9062, 9065, 9073, 9076, 9101, 9115, 9117, 9120, 9132, 9145, 9161, 9170, 9179, 9196, 9210, 9213, 9225, 9236, 9242, 9245, 9250, 9255, 9259, 9262, 9268, 9272, 9294, 9299, 9306, 9315, 9330, 9341, 9343, 9346, 9350, 9359, 9362, 9366, 9369, 9373, 9381, 9387, 9392, 9396, 9404, 9427, 9442, 9463, 9472, 9476, 9481, 9484, 9486, 9491, 9507, 9510, 9531, 9540, 9553, 9562, 9568, 9572, 9575, 9582, 9590, 9597, 9600, 9610, 9616, 9620, 9629, 9636, 9642, 9648, 9655, 9669, 9674, 9678, 9681, 9685, 9689, 9696, 9704, 9709, 9725, 9728, 9731, 9736, 9740, 9743, 9752, 9770, 9774, 9779, 9785, 9799, 9802, 9814, 9824, 9829, 9834, 9874, 9884, 9888, 9906, 9910, 9927, 9930, 9951, 9965, 9971, 9977, 10024, 10029, 10039, 10052, 10063, 10066, 10073, 10076, 10085, 10108, 10115, 10128, 10136, 10146, 10158, 10162, 10168, 10171, 10180, 10185, 10208, 10217, 10238, 10246, 10250, 10281, 10284, 10289, 10294, 10296, 10303, 10316, 10324, 10332, 10334, 10339, 10353, 10364, 10368, 10371, 10389, 10393, 10396, 10397, 10400, 10405, 10409, 10421, 10424, 10436, 10441, 10450, 10458, 10472, 10474, 10479, 10482, 10486, 10496, 10505, 10512, 10527, 10549, 10555, 10562, 10567, 10570, 10575, 10585, 10587, 10591, 10595, 10599, 10608, 10615, 10620, 10623, 10629, 10636, 10677, 10680, 10686, 10692, 10695, 10698, 10701, 10706, 10708, 10715, 10731, 10736, 10753, 10756, 10766, 10771, 10774, 10777, 10785, 10787, 10795, 10797, 10803, 10810, 10825, 10828, 10832, 10836, 10852, 10855, 10867, 10876, 10887, 10891, 10895, 10898, 10913, 10918, 10921, 10923, 10936, 10940, 10949, 10961, 10964, 10974, 10983, 10990, 10994, 11003, 11008, 11011, 11018, 11024, 11035, 11038, 11057, 11095, 11378, 11389, 11393, 11407, 11413, 11420, 11426, 11436, 11440, 11454, 11470, 11491, 11495, 11530, 11437, 11441, 11455, 11471, 11492, 11496, 11516, 11531, 11533, 11537, 11543, 11558, 11564, 11575, 11538, 11544, 11559, 11565, 11567, 11576, 11580, 11583, 11588, 11581, 11584, 11589, 11599, 11634, 11604, 11611, 11620, 11624, 11630, 11605, 11612, 11621, 11625, 11631, 11637, 11650, 11638, 11651, 11661, 11668, 11679, 11683, 11703, 11707, 11711, 11714, 11717, 11721, 11726, 11741, 11753, 11757, 11766, 11771, 11780, 11662, 11669, 11680, 11684, 11704, 11708, 11712, 11715, 11718, 11722, 11742, 11754, 11758, 11760, 11781, 11788, 11794, 11789, 11795, 11798, 11807, 11812, 11816, 11821, 11831, 11842, 11854, 11799, 11808, 11813, 11822, 11826, 11832, 11834, 11838, 11843, 11849, 11855, 11859, 11869, 11873, 11880, 11884, 11896, 11870, 11874, 11881, 11885, 11897, 11900, 11906, 11920, 11935, 11939, 11944, 11957, 11961, 11965, 11970, 11974, 11983, 11901, 11907, 11921, 11936, 11940, 11945, 11958, 11962, 11966, 11971, 11975, 11984, 12008, 12013, 12018, 12029, 12036, 12040, 12047, 12074, 12078, 12083, 12105, 12116, 12009, 12014, 12019, 12030, 12037, 12041, 12048, 12053, 12075, 12079, 12036, 12092, 12106, 12117, 12126, 12132, 12151, 12155, 12133, 12152, 12156, 12166, 12173, 12178, 12183, 12189, 12192, 12204, 12211, 12218, 12235, 12246, 12252, 12282, 12293, 12298, 12301, 12304, 12310, 12315, 12319, 12334, 12350, 12357, 12365, 12374, 12387, 12391, 12395, 12416, 12426, 12444, 12451, 12456, 12167, 12174, 12179, 12184, 12193, 12205, 12212, 12215, 12219, 12236, 12247, 12253, 12261, 12275, 12283, 12294, 12299, 12305, 12311, 12316, 12320, 12329, 12335, 12344, 12351, 12358, 12366, 12368, 12375, 12384, 12388, 12392, 12396, 12399, 12407, 12414, 12421, 12427, 12431, 12434, 12447, 12452, 12457, 12463, 12470, 12473, 12482, 12464, 12466, 12471, 12476, 12479, 12491, 12503, 12509, 12513, 12516, 12514, 12532, 12539, 12544, 12557, 12562, 12567, 12576, 12583, 12588, 12591, 12606, 12612, 12622, 12628, 12510, 12514, 12519, 12526, 12527, 12533, 12540, 12545, 12558, 12563, 12568, 12577, 12580, 12584, 12589, 12598, 12607, 12619, 12623, 12629, 12633, 12642, 12645, 12650, 12656, 12668, 12674, 12676, 12697, 12707, 12722, 12734, 12741, 12759, 12773, 12779, 12783, 12802, 12806, 12810, 12819, 12829, 12634, 12646, 12651, 12657, 12659, 12669, 12698, 12708, 12711, 12723, 12707, 12727, 12735, 12742, 12774, 12780, 12784, 12803, 12807, 12811, 12820, 12830, 12847, 12852, 12859, 12864, 12874, 12905, 12915, 12925, 12930, 12934, 12940, 12944, 12946, 12955, 12848, 12853, 12856, 12860, 12865, 12875, 12897, 12906, 12916, 12922, 12926, 12931, 12935, 12941, 12930, 12947, 12952, 12956, 12963, 12979, 12964, 12980, 12984, 13003, 12985, 12988, 12990, 12994, 13004, 13007, 13011, 13015, 13027, 13046, 13055, 13059, 13080, 13094, 13098, 13112, 13120, 13134, 13140, 13150, 13154, 13161, 13187, 13008, 13012, 13016, 13028, 13047, 13056, 13060, 13081, 13095, 13099, 13103, 13106, 13113, 13116, 13135, 13136, 13141, 13151, 13155, 13162, 13188, 13193, 13202, 13194, 13203, 13205, 13209, 13215, 13218, 13236, 13252, 13260, 13271, 13283, 13210, 13216, 13219, 13221, 13223, 13230, 13238, 13243, 13253, 13261, 13272, 13278, 13284, 13643, 13644, 13651, 13657, 13662, 13663, 13666, 13679, 13667, 13680, 13699, 13711, 13730, 13737, 13742, 13700, 13712, 13731, 13738, 13743, 13747, 13756, 13760, 13781, 13793, 13801, 13810, 13830, 13748, 13750, 13757, 13761, 13770, 13771, 13782, 13787, 13794, 13799, 13811, 13825, 13827, 13831, 13834, 13839, 13851, 13859, 13863, 13867, 13873, 13877, 13835, 13840, 13842, 13848, 13852, 13860, 13864, 13868, 13874, 13878, 13885, 13886, 13891, 13896, 13901, 13918, 13927, 13933, 13939, 13951, 13886, 13888, 13892, 13897, 13899, 13901, 13919, 13934, 13940, 13952, 13955, 13973, 13979, 13983, 13997, 13984, 13998, 14006, 14011, 14019, 14022, 14031, 14047, 14053, 14061, 14075, 14111, 14116, 14124, 14149, 14007, 14012, 14016, 14023, 14032, 14048, 14054, 14062, 14076, 14112, 14117, 14119, 14125, 14128, 14129, 14131, 14146, 14150, 14153, 14159, 14163, 14168, 14173, 14177, 14154, 14160, 14164, 14169, 14174, 14178, 14181, 14206, 14213, 14219, 14237, 14248, 14252, 14258, 14264, 14271, 14275, 14279, 14295, 14308, 14311, 14314, 14318, 14332, 14335, 14339, 14343, 14207, 14209, 14214, 14220, 14222, 14232, 14234, 14238, 14249, 14253, 14259, 14265, 14272, 14276, 14280, 14288, 14296, 14309, 14315, 14319, 14321, 14326, 14333, 14336, 14362, 14370, 14377, 14371, and SEQ ID NO:14378.

28. The method of claim 26, wherein said nucleic acid molecule or peptide nucleic acid molecule is in each case modified at the 5′-end thereof to preclude degradation by an enzyme having 5′-3′ exonuclease activity.

29. The method of claim 26, wherein said nucleic acid molecule or peptide nucleic acid molecule is in each case lacking a 3′ hydroxyl group.

30. The method of claim 26, wherein the amplification enzyme is a polymerase lacking 5′-3′ exonuclease activity.

31. The method of claim 21, wherein determining in d) comprises hybridization of at least one nucleic acid molecule or peptide nucleic acid molecule in each case comprising a contiguous sequence at least 9 nucleotides in length that is complementary to, or hybridizes under moderately stringent or stringent conditions to a sequence selected from the group consisting of SEQ ID NOS:304 to SEQ ID NO:535 and SEQ ID NOS:65 to SEQ ID NO:88, and complements thereof.

32. The method of claim 31, wherein said nucleic acid is taken from the group consisting of SEQ ID NOS:1162, 1163, 1201, 1202, 1208, 1211, 1217, 1274, 1288, 1275, 1289, 1299, 1308, 1309, 1341, 1342, 1347, 1351, 1354, 1372, 1423, 1424, 1425, 1427, 1432, 1433, 1434, 1435, 1436, 1437, 1440, 1441, 1442, 1443, 1444, 1445, 1446, 1447, 1370, 1371, 1400, 1450, 1461, 1451, 1462, 1467, 1470, 1473, 1475, 1535, 1536, 1542, 1544, 1569, 1570, 1583, 1590, 1595, 1666, 1704, 1596, 1601, 1603, 1667, 1705, 1722, 1723, 1727, 1735, 1746, 1747, 1768, 1769, 1773, 1803, 1804, 1807, 1810, 1832, 1833, 1836, 1867, 1871, 1901, 1902, 1908, 1911, 1924, 1925, 1937, 1938, 1943, 1946, 1949, 1956, 1957, 1978, 1979, 1986, 1992, 1998, 2001, 2003, 2010, 2020, 2025, 2029, 2030, 2113, 2163, 2201, 2209, 2231, 2259, 2304, 2326, 2338, 2348, 2351, 2369, 2407, 2471, 2488, 2557, 2584, 2602, 2616, 2657, 2661, 2664, 2671, 2683, 2709, 2753, 2756, 2758, 2761, 2766, 2770, 2774, 2778, 2799, 2807, 2813, 2819, 2822, 2826, 2848, 2857, 2900, 2906, 2908, 2910, 2913, 2921, 2925, 2940, 2943, 2952, 2964, 2983, 2986, 3009, 3012, 3015, 3024, 3030, 3035, 3046, 3058, 3062, 3067, 3070, 3074, 3077, 3079, 3082, 3087, 3095, 3099, 3102, 3106, 3112, 3120, 3125, 3129, 3132, 3141, 3143, 3154, 3156, 3158, 3161, 3177, 3188, 3191, 3193, 3200, 3208, 3211, 3220, 3231, 3241, 3251, 3254, 3258, 3263, 3272, 3277, 3288, 3294, 3296, 3299, 3303, 3317, 3323, 3326, 3329, 3336, 3341, 3362, 3366, 3370, 3375, 3379, 3382, 3387, 3394, 3398, 3405, 3407, 3410, 3412, 3416, 3422, 3425, 3430, 3449, 3451, 3457, 3460, 3465, 3468, 3486, 3498, 3502, 3507, 3523, 3532, 3539, 3546, 3550, 3567, 3572, 3579, 3582, 3610, 3620, 3628, 3648, 3659, 3664, 3672, 3675, 3680, 3682, 3685, 3687, 3699, 3712, 3716, 3720, 3734, 3751, 3763, 3766, 3769, 3783, 3789, 3795, 3811, 3816, 3825, 3830, 3835, 3841, 3843, 3846, 3849, 3855, 3859, 3879, 3882, 3910, 3912, 3913, 3918, 3925, 3929, 3932, 3946, 3953, 3956, 3967, 3969, 3973, 3977, 3989, 3992, 3996, 3999, 4002, 4008, 4014, 4026, 4030, 4036, 4041, 4044, 4053, 4057, 4060, 4062, 4081, 4091, 4097, 4103, 4107, 4118, 4126, 4140, 4143, 4147, 4155, 4158, 4164, 4175, 4178, 4183, 4187, 4193, 4200, 4203, 4210, 4212, 4215, 4222, 4227, 4230, 4235, 4240, 4250, 4253, 4264, 4278, 4294, 4312, 4314, 4320, 4329, 4339, 4346, 4356, 4363, 4380, 4402, 4404, 4414, 4419, 4421, 4431, 4439, 4445, 4449, 4459, 4468, 4483, 4493, 4500, 4513, 4526, 4527, 4532, 4544, 4550, 4552, 4566, 4577, 4591, 4594, 4604, 4608, 4623, 4625, 4629, 4637, 4651, 4654, 4657, 4673, 4679, 4682, 4692, 4698, 4710, 4712, 4713, 4723, 4725, 4729, 4734, 4740, 4743, 4747, 4752, 4757, 4762, 4765, 4775, 4781, 4796, 4799, 4803, 4809, 4826, 4831, 4863, 4866, 4880, 4888, 4914, 4916, 4931, 4933, 4939, 4955, 4959, 4962, 4965, 4994, 5001, 5008, 5012, 5023, 5029, 5035, 5046, 5059, 5063, 5068, 5071, 5079, 5082, 5085, 5089, 5092, 5095, 5098, 5102, 5108, 5113, 5118, 5122, 5127, 5130, 5133, 5138, 5141, 5146, 5152, 5154, 5178, 5192, 5197, 5206, 5213, 5228, 5236, 5243, 5258, 5267, 5275, 5277, 5283, 5294, 5298, 5302, 5305, 5320, 5325, 5328, 5335, 5345, 5350, 5357, 5374, 5381, 5384, 5386, 5390, 5397, 5402, 5406, 5411, 5423, 5430, 5439, 5453, 5463, 5473, 5476, 5479, 5483, 5489, 5514, 5520, 5523, 5530, 5547, 5584, 5590, 5607, 5610, 5613, 5617, 5621, 5631, 5636, 5641, 5653, 5655, 5658, 5666, 5669, 5675, 5685, 5692, 5695, 5703, 5706, 5716, 5719, 5726, 5738, 5746, 5749, 5752, 5755, 5757, 5761, 5765, 5772, 5784, 5799, 5805, 5815, 5819, 5829, 5851, 5869, 5901, 5908, 5911, 5914, 5917, 5925, 5941, 5951, 5967, 5974, 5979, 5982, 5985, 5989, 5995, 6022, 6029, 6044, 6047, 6052, 6057, 6061, 6069, 6071, 6080, 6082, 6087, 6092, 6095, 6102, 6104, 6107, 6109, 6113, 6124, 6129, 6140, 6147, 6158, 6165, 6179, 6185, 6203, 6209, 6217, 6228, 6249, 6263, 6267, 6279, 6290, 6332, 6339, 6343, 6346, 6352, 6363, 6366, 6370, 6380, 6385, 6391, 6396, 6408, 6430, 6439, 6454, 6456, 6477, 6483, 6488, 6495, 6509, 6517, 6520, 6530, 6534, 6555, 6557, 6559, 6569, 6574, 6581, 6593, 6616, 6622, 6626, 6636, 6637, 6648, 6654, 6667, 6673, 6684, 6724, 6729, 6733, 6737, 6743, 6750, 6753, 6763, 6766, 6768, 6771, 6776, 6780, 6788, 6793, 6808, 6813, 6820, 6823, 6826, 6846, 6856, 6864, 6867, 6878, 6885, 6903, 6914, 6919, 6923, 6926, 6938, 6941, 6978, 6982, 6985, 6988, 6994, 6997, 7000, 7004, 7008, 7015, 7019, 7021, 7069, 7079, 7099, 7104, 7117, 7120, 7145, 7151, 7153, 7162, 7164, 7169, 7201, 7209, 7234, 7238, 7252, 7286, 7288, 7300, 7305, 7313, 7323, 7327, 7338, 7343, 7346, 7352, 7377, 7380, 7396, 7399, 7406, 7412, 7414, 7418, 7424, 7429, 7437, 7441, 7443, 7458, 7461, 7469, 7473, 7491, 7502, 7504, 7514, 7531, 7551, 7553, 7557, 7562, 7564, 7569, 7572, 7592, 7602, 7605, 7612, 7625, 7630, 7632, 7634, 7648, 7653, 7664, 7668, 7693, 7696, 7706, 7763, 7766, 7769, 7772, 7777, 7780, 7787, 7790, 7801, 7804, 7806, 7826, 7831, 7850, 7859, 7862, 7867, 7876, 7883, 7887, 7891, 7893, 7895, 7898, 7901, 7906, 7908, 7911, 7915, 7924, 7927, 7930, 7935, 7959, 7961, 7966, 7975, 7978, 7984, 7994, 7998, 8002, 8014, 8029, 8032, 8037, 8041, 8045, 8048, 8058, 8063, 8086, 8092, 8097, 8106, 8109, 8120, 8140, 8141, 8159, 8162, 8172, 8196, 8205, 8211, 8215, 8219, 8226, 8234, 8241, 8249, 8262, 8265, 8272, 8276, 8279, 8283, 8290, 8300, 8308, 8320, 8338, 8355, 8358, 8368, 8380, 8386, 8389, 8393, 8396, 8400, 8404, 8408, 8417, 8421, 8427, 8430, 8439, 8441, 8443, 8453, 8459, 8471, 8483, 8495, 8507, 8509, 8525, 8538, 8540, 8543, 8549, 8553, 8559, 8561, 8573, 8579, 8584, 8590, 8593, 8605, 8611, 8622, 8626, 8656, 8664, 8721, 8724, 8731, 8740, 8743, 8746, 8765, 8774, 8781, 8792, 8795, 8811, 8817, 8822, 8825, 8834, 8839, 8849, 8858, 8860, 8862, 8875, 8886, 8910, 8915, 8919, 8922, 8926, 8940, 8947, 8956, 8959, 8973, 8982, 8986, 8991, 8996, 9000, 9015, 9027, 9031, 9040, 9057, 9059, 9062, 9065, 9073, 9076, 9101, 9115, 9117, 9120, 9132, 9145, 9161, 9170, 9179, 9196, 9210, 9213, 9225, 9236, 9242, 9245, 9250, 9255, 9259, 9262, 9268, 9272, 9294, 9299, 9306, 9315, 9330, 9341, 9343, 9346, 9350, 9359, 9362, 9366, 9369, 9373, 9381, 9387, 9392, 9396, 9404, 9427, 9442, 9463, 9472, 9476, 9481, 9484, 9486, 9491, 9507, 9510, 9531, 9540, 9553, 9562, 9568, 9572, 9575, 9582, 9590, 9597, 9600, 9610, 9616, 9620, 9629, 9636, 9642, 9648, 9655, 9669, 9674, 9678, 9681, 9685, 9689, 9696, 9704, 9709, 9725, 9728, 9731, 9736, 9740, 9743, 9752, 9770, 9774, 9779, 9785, 9799, 9802, 9814, 9824, 9829, 9834, 9874, 9884, 9888, 9906, 9910, 9927, 9930, 9951, 9965, 9971, 9977, 10024, 10029, 10039, 10052, 10063, 10066, 10073, 10076, 10085, 10108, 10115, 10128, 10136, 10146, 10158, 10162, 10168, 10171, 10180, 10185, 10208, 10217, 10238, 10246, 10250, 10281, 10284, 10289, 10294, 10296, 10303, 10316, 10324, 10332, 10334, 10339, 10353, 10364, 10368, 10371, 10389, 10393, 10396, 10397, 10400, 10405, 10409, 10421, 10424, 10436, 10441, 10450, 10458, 10472, 10474, 10479, 10482, 10486, 10496, 10505, 10512, 10527, 10549, 10555, 10562, 10567, 10570, 10575, 10585, 10587, 10591, 10595, 10599, 10608, 10615, 10620, 10623, 10629, 10636, 10677, 10680, 10686, 10692, 10695, 10698, 10701, 10706, 10708, 10715, 10731, 10736, 10753, 10756, 10766, 10771, 10774, 10777, 10785, 10787, 10795, 10797, 10803, 10810, 10825, 10828, 10832, 10836, 10852, 10855, 10867, 10876, 10887, 10891, 10895, 10898, 10913, 10918, 10921, 10923, 10936, 10940, 10949, 10961, 10964, 10974, 10983, 10990, 10994, 11003, 11008, 11011, 11018, 11024, 11035, 11038, 11057, 11095, 11378, 11389, 11393, 11407, 11413, 11420, 11426, 11436, 11440, 11454, 11470, 11491, 11495, 11530, 11437, 11441, 11455, 11471, 11492, 11496, 11516, 11531, 11533, 11537, 11543, 11558, 11564, 11575, 11538, 11544, 11559, 11565, 11567, 11576, 11580, 11583, 11588, 11581, 11584, 11589, 11599, 11634, 11604, 11611, 11620, 11624, 11630, 11605, 11612, 11621, 11625, 11631, 11637, 11650, 11638, 11651, 11661, 11668, 11679, 11683, 11703, 11707, 11711, 11714, 11717, 11721, 11726, 11741, 11753, 11757, 11766, 11771, 11780, 11662, 11669, 11680, 11684, 11704, 11708, 11712, 11715, 11718, 11722, 11742, 11754, 11758, 11760, 11781, 11788, 11794, 11789, 11795, 11798, 11807, 11812, 11816, 11821, 11831, 11842, 11854, 11799, 11808, 11813, 11822, 11826, 11832, 11834, 11838, 11843, 11849, 11855, 11859, 11869, 11873, 11880, 11884, 11896, 11870, 11874, 11881, 11885, 11897, 11900, 11906, 11920, 11935, 11939, 11944, 11957, 11961, 11965, 11970, 11974, 11983, 11901, 11907, 11921, 11936, 11940, 11945, 11958, 11962, 11966, 11971, 11975, 11984, 12008, 12013, 12018, 12029, 12036, 12040, 12047, 12074, 12078, 12083, 12105, 12116, 12009, 12014, 12019, 12030, 12037, 12041, 12048, 12053, 12075, 12079, 12036, 12092, 12106, 12117, 12126, 12132, 12151, 12155, 12133, 12152, 12156, 12166, 12173, 12178, 12183, 12189, 12192, 12204, 12211, 12218, 12235, 12246, 12252, 12282, 12293, 12298, 12301, 12304, 12310, 12315, 12319, 12334, 12350, 12357, 12365, 12374, 12387, 12391, 12395, 12416, 12426, 12444, 12451, 12456, 12167, 12174, 12179, 12184, 12193, 12205, 12212, 12215, 12219, 12236, 12247, 12253, 12261, 12275, 12283, 12294, 12299, 12305, 12311, 12316, 12320, 12329, 12335, 12344, 12351, 12358, 12366, 12368, 12375, 12384, 12388, 12392, 12396, 12399, 12407, 12414, 12421, 12427, 12431, 12434, 12447, 12452, 12457, 12463, 12470, 12473, 12482, 12464, 12466, 12471, 12476, 12479, 12491, 12503, 12509, 12513, 12516, 12514, 12532, 12539, 12544, 12557, 12562, 12567, 12576, 12583, 12588, 12591, 12606, 12612, 12622, 12628, 12510, 12514, 12519, 12526, 12527, 12533, 12540, 12545, 12558, 12563, 12568, 12577, 12580, 12584, 12589, 12598, 12607, 12619, 12623, 12629, 12633, 12642, 12645, 12650, 12656, 12668, 12674, 12676, 12697, 12707, 12722, 12734, 12741, 12759, 12773, 12779, 12783, 12802, 12806, 12810, 12819, 12829, 12634, 12646, 12651, 12657, 12659, 12669, 12698, 12708, 12711, 12723, 12707, 12727, 12735, 12742, 12774, 12780, 12784, 12803, 12807, 12811, 12820, 12830, 12847, 12852, 12859, 12864, 12874, 12905, 12915, 12925, 12930, 12934, 12940, 12944, 12946, 12955, 12848, 12853, 12856, 12860, 12865, 12875, 12897, 12906, 12916, 12922, 12926, 12931, 12935, 12941, 12930, 12947, 12952, 12956, 12963, 12979, 12964, 12980, 12984, 13003, 12985, 12988, 12990, 12994, 13004, 13007, 13011, 13015, 13027, 13046, 13055, 13059, 13080, 13094, 13098, 13112, 13120, 13134, 13140, 13150, 13154, 13161, 13187, 13008, 13012, 13016, 13028, 13047, 13056, 13060, 13081, 13095, 13099, 13103, 13106, 13113, 13116, 13135, 13136, 13141, 13151, 13155, 13162, 13188, 13193, 13202, 13194, 13203, 13205, 13209, 13215, 13218, 13236, 13252, 13260, 13271, 13283, 13210, 13216, 13219, 13221, 13223, 13230, 13238, 13243, 13253, 13261, 13272, 13278, 13284, 13643, 13644, 13651, 13657, 13662, 13663, 13666, 13679, 13667, 13680, 13699, 13711, 13730, 13737, 13742, 13700, 13712, 13731, 13738, 13743, 13747, 13756, 13760, 13781, 13793, 13801, 13810, 13830, 13748, 13750, 13757, 13761, 13770, 13771, 13782, 13787, 13794, 13799, 13811, 13825, 13827, 13831, 13834, 13839, 13851, 13859, 13863, 13867, 13873, 13877, 13835, 13840, 13842, 13848, 13852, 13860, 13864, 13868, 13874, 13878, 13885, 13886, 13891, 13896, 13901, 13918, 13927, 13933, 13939, 13951, 13886, 13888, 13892, 13897, 13899, 13901, 13919, 13934, 13940, 13952, 13955, 13973, 13979, 13983, 13997, 13984, 13998, 14006, 14011, 14019, 14022, 14031, 14047, 14053, 14061, 14075, 14111, 14116, 14124, 14149, 14007, 14012, 14016, 14023, 14032, 14048, 14054, 14062, 14076, 14112, 14117, 14119, 14125, 14128, 14129, 14131, 14146, 14150, 14153, 14159, 14163, 14168, 14173, 14177, 14154, 14160, 14164, 14169, 14174, 14178, 14181, 14206, 14213, 14219, 14237, 14248, 14252, 14258, 14264, 14271, 14275, 14279, 14295, 14308, 14311, 14314, 14318, 14332, 14335, 14339, 14343, 14207, 14209, 14214, 14220, 14222, 14232, 14234, 14238, 14249, 14253, 14259, 14265, 14272, 14276, 14280, 14288, 14296, 14309, 14315, 14319, 14321, 14326, 14333, 14336, 14362, 14370, 14377, 14371, and SEQ ID NO: 14378.

33. The method of claim 31, wherein at least one such hybridizing nucleic acid molecule or peptide nucleic acid molecule is bound to a solid phase.

34. The method of claim 31, wherein a plurality of such hybridizing nucleic acid molecules or peptide nucleic acid molecules are bound to a solid phase in the form of a nucleic acid or peptide nucleic acid array selected from the array group consisting of linear or substantially so, hexagonal or substantially so, rectangular or substantially so, and combinations thereof.

35. The method of claim 31, further comprising extending at least one such hybridized nucleic acid molecule by at least one nucleotide base.

36. The method of claim 21, wherein determining in d), comprises sequencing of the amplificate.

37. The method of claim 21, wherein contacting or amplifying in c), comprises use of methylation-specific primers.

38. The method of claim 37, wherein the sequence of said methylation-specific primers is selected from the group consisting of SEQ ID NOS:2754, 2757, 2759, 2767, 2768, 2772, 2776, 2779, 2784, 2785, 2786, 2789, 2791, 2792, 2794, 2797, 2798, 2801, 2805, 2806, 2809, 2811, 2815, 2817, 2824, 2830, 2832, 2833, 2834, 2838, 2840, 2843, 2846, 2850, 2851, 2853, 2855, 2859, 2866, 2867, 2870, 2871, 2876, 2878, 2881, 2885, 2886, 2892, 2893, 2895, 2896, 2898, 2904, 2912, 2915, 2917, 2919, 2922, 2923, 2929, 2931, 2939, 2941, 2944, 2946, 2948, 2950, 2955, 2956, 2957, 2960, 2962, 2965, 2966, 2967, 2968, 2969, 2971, 2975, 2976, 2977, 2978, 2979, 2980, 2981, 2984, 2988, 2989, 2990, 2992, 2994, 2997, 2999, 3001, 3002, 3004, 3006, 3007, 3008, 3010, 3013, 3014, 3016, 3017, 3018, 3020, 3022, 3025, 2752, 2755, 2760, 2762, 2763, 2764, 2765, 2769, 2771, 2773, 2775, 2777, 2780, 2781, 2782, 2783, 2787, 2788, 2790, 2793, 2795, 2796, 2800, 2802, 2803, 2804, 2808, 2810, 2812, 2814, 2816, 2818, 2820, 2821, 2823, 2825, 2827, 2828, 2829, 2831, 2835, 2836, 2837, 2839, 2841, 2842, 2844, 2845, 2847, 2849, 2852, 2854, 2856, 2858, 2860, 2861, 2862, 2863, 2864, 2865, 2868, 2869, 2872, 2873, 2874, 2875, 2877, 2879, 2880, 2882, 2883, 2884, 2887, 2888, 2889, 2890, 2891, 2894, 2897, 2899, 2901, 2902, 2903, 2905, 2907, 2909, 2911, 2914, 2916, 2918, 2920, 2924, 2926, 2927, 2928, 2930, 2932, 2933, 2934, 2935, 2936, 2937, 2938, 2942, 2945, 2947, 2949, 2951, 2953, 2954, 2958, 2959, 2961, 2963, 2970, 2972, 2973, 2974, 2982, 2985, 2987, 2991, 2993, 2995, 2996, 2998, 3000, 3003, 3005, 3011, 3019, 3021, 3023, 3026, 3027, 3028, 3032, 3033, 3036, 3037, 3038, 3039, 3041, 3042, 3043, 3044, 3047, 3048, 3049, 3052, 3055, 3059, 3061, 3064, 3065, 3068, 3069, 3071, 3072, 3075, 3076, 3080, 3083, 3084, 3085, 3086, 3091, 3093, 3096, 3097, 3100, 3104, 3109, 3110, 3113, 3115, 3117, 3118, 3123, 3126, 3127, 3130, 3134, 3135, 3136, 3138, 3139, 3144, 3146, 3147, 3149, 3150, 3155, 3029, 3031, 3034, 3040, 3045, 3050, 3051, 3053, 3054, 3056, 3057, 3060, 3063, 3066, 3073, 3078, 3081, 3088, 3089, 3090, 3092, 3094, 3098, 3101, 3103, 3105, 3107, 3108, 3111, 3114, 3116, 3119, 3121, 3122, 3124, 3128, 3131, 3133, 3137, 3140, 3142, 3145, 3148, 3151, 3152, 3153, 3157, 3159, 3165, 3166, 3167, 3170, 3171, 3172, 3174, 3175, 3176, 3179, 3180, 3181, 3184, 3185, 3186, 3192, 3194, 3198, 3201, 3202, 3203, 3204, 3206, 3209, 3212, 3213, 3215, 3216, 3217, 3218, 3221, 3224, 3226, 3228, 3229, 3230, 3232, 3233, 3234, 3235, 3237, 3238, 3239, 3245, 3247, 3248, 3249, 3160, 3162, 3163, 3164, 3168, 3169, 3173, 3178, 3182, 3183, 3187, 3189, 3190, 3195, 3196, 3197, 3199, 3205, 3207, 3210, 3214, 3219, 3222, 3223, 3225, 3227, 3236, 3240, 3242, 3243, 3244, 3246, 3250, 3252, 3256, 3261, 3264, 3268, 3269, 3270, 3273, 3275, 3279, 3280, 3281, 3282, 3283, 3284, 3285, 3286, 3290, 3292, 3295, 3297, 3301, 3304, 3305, 3306, 3307, 3308, 3310, 3311, 3312, 3315, 3319, 3320, 3324, 3327, 3331, 3333, 3334, 3339, 3348, 3351, 3354, 3358, 3360, 3364, 3367, 3368, 3374, 3376, 3253, 3255, 3257, 3259, 3260, 3262, 3265, 3266, 3267, 3271, 3274, 3276, 3278, 3287, 3289, 3291, 3293, 3298, 3300, 3302, 3309, 3313, 3314, 3316, 3318, 3321, 3322, 3325, 3328, 3330, 3332, 3335, 3337, 3338, 3340, 3342, 3343, 3344, 3345, 3346, 3347, 3349, 3350, 3352, 3353, 3355, 3356, 3357, 3359, 3361, 3363, 3365, 3369, 3371, 3372, 3373, 3377, 3380, 3383, 3386, 3388, 3389, 3390, 3391, 3392, 3395, 3396, 3400, 3401, 3403, 3406, 3408, 3413, 3414, 3417, 3420, 3423, 3428, 3432, 3433, 3434, 3436, 3439, 3440, 3442, 3443, 3445, 3447, 3453, 3455, 3458, 3463, 3466, 3469, 3470, 3471, 3472, 3473, 3474, 3475, 3477, 3478, 3480, 3481, 3483, 3484, 3487, 3490, 3494, 3495, 3496, 3497, 3499, 3500, 3504, 3505, 3508, 3512, 3514, 3515, 3516, 3521, 3525, 3529, 3533, 3534, 3537, 3538, 3540, 3541, 3542, 3543, 3544, 3547, 3548, 3553, 3557, 3558, 3559, 3560, 3562, 3563, 3566, 3571, 3574, 3575, 3577, 3580, 3583, 3584, 3585, 3586, 3592, 3594, 3595, 3597, 3598, 3599, 3601, 3603, 3604, 3607, 3608, 3612, 3619, 3621, 3622, 3626, 3631, 3632, 3637, 3638, 3639, 3640, 3642, 3643, 3644, 3646, 3647, 3649, 3650, 3652, 3656, 3657, 3660, 3663, 3668, 3670, 3673, 3676, 3677, 3678, 3683, 3688, 3690, 3694, 3697, 3700, 3702, 3703, 3704, 3708, 3404, 3409, 3411, 3415, 3418, 3419, 3421, 3424, 3426, 3427, 3429, 3431, 3435, 3437, 3438, 3441, 3444, 3446, 3448, 3450, 3452, 3454, 3456, 3459, 3461, 3462, 3464, 3467, 3476, 3479, 3482, 3485, 3488, 3489, 3491, 3492, 3493, 3501, 3503, 3506, 3509, 3510, 3511, 3513, 3517, 3518, 3519, 3520, 3522, 3524, 3526, 3527, 3528, 3530, 3531, 3535, 3536, 3545, 3549, 3551, 3552, 3554, 3555, 3556, 3561, 3564, 3565, 3568, 3569, 3570, 3573, 3576, 3578, 3581, 3587, 3588, 3589, 3590, 3591, 3593, 3596, 3600, 3602, 3605, 3606, 3609, 3611, 3613, 3614, 3615, 3616, 3617, 3618, 3623, 3624, 3625, 3627, 3629, 3630, 3633, 3634, 3635, 3636, 3641, 3645, 3651, 3653, 3654, 3655, 3658, 3661, 3662, 3665, 3666, 3667, 3669, 3671, 3674, 3679, 3681, 3684, 3686, 3689, 3691, 3692, 3693, 3695, 3696, 3698, 3701, 3705, 3706, 3707, 3709, 3710, 3714, 3715, 3717, 3718, 3722, 3723, 3729, 3730, 3732, 3735, 3739, 3740, 3741, 3743, 3744, 3745, 3746, 3749, 3753, 3754, 3755, 3756, 3711, 3713, 3719, 3721, 3724, 3725, 3726, 3727, 3728, 3731, 3733, 3736, 3737, 3738, 3742, 3747, 3748, 3750, 3752, 3757, 3758, 3759, 3760, 3761, 3764, 3767, 3771, 3773, 3775, 3776, 3777, 3781, 3785, 3786, 3787, 3790, 3791, 3793, 3796, 3797, 3798, 3799, 3805, 3809, 3814, 3817, 3818, 3822, 3823, 3828, 3833, 3836, 3844, 3847, 3850, 3851, 3853, 3856, 3857, 3862, 3873, 3876, 3877, 3880, 3885, 3887, 3889, 3890, 3892, 3893, 3895, 3896, 3899, 3902, 3903, 3905, 3906, 3907, 3908, 3916, 3923, 3926, 3927, 3930, 3935, 3936, 3938, 3939, 3940, 3944, 3945, 3949, 3950, 3951, 3954, 3955, 3957, 3960, 3965, 3970, 3971, 3978, 3979, 3982, 3983, 3984, 3985, 3762, 3765, 3768, 3770, 3772, 3774, 3778, 3779, 3780, 3782, 3784, 3788, 3792, 3794, 3800, 3801, 3802, 3803, 3804, 3806, 3807, 3808, 3810, 3812, 3813, 3815, 3819, 3820, 3821, 3824, 3826, 3827, 3829, 3831, 3832, 3834, 3837, 3838, 3839, 3840, 3842, 3845, 3848, 3852, 3854, 3858, 3860, 3861, 3863, 3864, 3865, 3866, 3867, 3868, 3869, 3870, 3871, 3872, 3874, 3875, 3878, 3881, 3883, 3884, 3886, 3888, 3891, 3894, 3897, 3898, 3900, 3901, 3904, 3909, 3911, 3914, 3915, 3917, 3919, 3920, 3921, 3922, 3924, 3928, 3931, 3933, 3934, 3937, 3941, 3942, 3943, 3947, 3948, 3952, 3958, 3959, 3961, 3962, 3963, 3964, 3966, 3968, 3972, 3974, 3975, 3976, 3980, 3981, 3986, 3987, 3990, 3993, 3994, 3997, 4000, 4003, 4004, 4006, 4012, 4015, 4017, 4020, 4024, 4027, 4029, 4031, 4032, 4033, 4037, 4038, 4040, 4042, 4047, 4048, 4050, 4051, 4052, 4054, 4055, 4058, 4063, 4066, 4069, 4070, 4072, 4073, 4076, 4078, 4079, 4082, 4083, 4084, 4085, 4086, 4090, 4093, 4094, 4095, 4096, 4099, 4100, 4104, 4106, 4113, 4116, 4119, 4120, 4124, 4127, 4130, 4134, 4135, 4136, 4138, 4142, 4145, 4146, 4149, 4150, 4152, 4153, 4159, 4160, 4161, 4163, 4168, 4169, 4171, 4173, 4176, 4180, 4181, 4185, 4189, 4191, 4192, 4194, 4197, 4198, 4199, 4201, 4206, 4207, 4208, 4213, 4219, 4220, 4223, 4224, 4225, 4228, 4231, 4232, 4233, 4237, 4238, 4242, 4243, 4246, 4247, 4251, 4254, 4255, 4256, 4258, 3988, 3991, 3995, 3998, 4001, 4005, 4007, 4009, 4010, 4011, 4013, 4016, 4018, 4019, 4021, 4022, 4023, 4025, 4028, 4034, 4035, 4039, 4043, 4045, 4046, 4049, 4056, 4059, 4061, 4064, 4065, 4067, 4068, 4071, 4074, 4075, 4077, 4080, 4087, 4088, 4089, 4092, 4098, 4101, 4102, 4105, 4108, 4109, 4110, 4111, 4112, 4114, 4115, 4117, 4121, 4122, 4123, 4125, 4128, 4129, 4131, 4132, 4133, 4137, 4139, 4141, 4144, 4148, 4151, 4154, 4156, 4157, 4162, 4165, 4166, 4167, 4170, 4172, 4174, 4177, 4179, 4182, 4184, 4186, 4188, 4190, 4195, 4196, 4202, 4204, 4205, 4209, 4211, 4214, 4216, 4217, 4218, 4221, 4226, 4229, 4234, 4236, 4239, 4241, 4244, 4245, 4248, 4249, 4252, 4257, 4259, 4260, 4261, 4262, 4266, 4267, 4268, 4271, 4272, 4275, 4276, 4279, 4281, 4282, 4284, 4285, 4287, 4289, 4290, 4292, 4295, 4297, 4299, 4301, 4306, 4310, 4316, 4317, 4318, 4321, 4323, 4325, 4328, 4334, 4335, 4337, 4341, 4342, 4343, 4344, 4348, 4350, 4351, 4352, 4354, 4357, 4358, 4359, 4364, 4365, 4366, 4370, 4371, 4372, 4373, 4376, 4378, 4381, 4383, 4384, 4386, 4388, 4396, 4397, 4399, 4400, 4403, 4405, 4407, 4409, 4412, 4415, 4416, 4417, 4424, 4426, 4429, 4433, 4435, 4437, 4442, 4443, 4447, 4450, 4451, 4452, 4455, 4457, 4460, 4461, 4462, 4465, 4466, 4469, 4470, 4474, 4478, 4481, 4484, 4488, 4491, 4494, 4495, 4497, 4498, 4504, 4506, 4509, 4510, 4511, 4514, 4516, 4518, 4520, 4521, 4523, 4525, 4528, 4530, 4533, 4534, 4535, 4538, 4540, 4542, 4545, 4547, 4548, 4553, 4554, 4555, 4556, 4557, 4562, 4564, 4567, 4568, 4569, 4579, 4580, 4582, 4584, 4587, 4589, 4593, 4596, 4597, 4598, 4600, 4601, 4602, 4605, 4606, 4607, 4609, 4610, 4613, 4614, 4616, 4618, 4621, 4624, 4626, 4627, 4628, 4631, 4632, 4636, 4639, 4641, 4644, 4645, 4648, 4263, 4265, 4269, 4270, 4273, 4274, 4277, 4280, 4283, 4286, 4288, 4291, 4293, 4296, 4298, 4300, 4302, 4303, 4304, 4305, 4307, 4308, 4309, 4311, 4313, 4315, 4319, 4322, 4324, 4326, 4327, 4330, 4331, 4332, 4333, 4336, 4338, 4340, 4345, 4347, 4349, 4353, 4355, 4360, 4361, 4362, 4367, 4368, 4369, 4374, 4375, 4377, 4379, 4382, 4385, 4387, 4389, 4390, 4391, 4392, 4393, 4394, 4395, 4398, 4401, 4406, 4408, 4410, 4411, 4413, 4418, 4420, 4422, 4423, 4425, 4427, 4428, 4430, 4432, 4434, 4436, 4438, 4440, 4441, 4444, 4446, 4448, 4453, 4454, 4456, 4458, 4463, 4464, 4467, 4471, 4472, 4473, 4475, 4476, 4477, 4479, 4480, 4482, 4485, 4486, 4487, 4489, 4490, 4492, 4496, 4499, 4501, 4502, 4503, 4505, 4507, 4508, 4512, 4515, 4517, 4519, 4522, 4524, 4529, 4531, 4536, 4537, 4539, 4541, 4543, 4546, 4549, 4551, 4558, 4559, 4560, 4561, 4563, 4565, 4570, 4571, 4572, 4573, 4574, 4575, 4576, 4578, 4581, 4583, 4585, 4586, 4588, 4590, 4592, 4595, 4599, 4603, 4611, 4612, 4615, 4617, 4619, 4620, 4622, 4630, 4633, 4634, 4635, 4638, 4640, 4642, 4643, 4646, 4647, 4649, 4652, 4655, 4659, 4661, 4663, 4664, 4665, 4668, 4671, 4674, 4675, 4676, 4678, 4680, 4683, 4686, 4690, 4696, 4700, 4703, 4704, 4706, 4709, 4711, 4714, 4715, 4717, 4718, 4719, 4720, 4721, 4726, 4727, 4730, 4732, 4738, 4742, 4745, 4749, 4750, 4753, 4755, 4759, 4763, 4768, 4769, 4772, 4773, 4776, 4778, 4779, 4782, 4784, 4789, 4790, 4794, 4797, 4801, 4805, 4807, 4813, 4814, 4819, 4821, 4822, 4827, 4829, 4833, 4834, 4835, 4837, 4838, 4841, 4842, 4843, 4844, 4847, 4849, 4850, 4852, 4853, 4859, 4860, 4861, 4865, 4867, 4868, 4869, 4870, 4873, 4876, 4877, 4878, 4879, 4883, 4885, 4889, 4891, 4892, 4894, 4895, 4897, 4898, 4903, 4906, 4911, 4912, 4918, 4919, 4920, 4924, 4927, 4929, 4932, 4934, 4941, 4942, 4945, 4948, 4949, 4950, 4650, 4653, 4656, 4658, 4660, 4662, 4666, 4667, 4669, 4670, 4672, 4677, 4681, 4684, 4685, 4687, 4688, 4689, 4691, 4693, 4694, 4695, 4697, 4699, 4701, 4702, 4705, 4707, 4708, 4716, 4722, 4724, 4728, 4731, 4733, 4735, 4736, 4737, 4739, 4741, 4744, 4746, 4748, 4751, 4754, 4756, 4758, 4760, 4761, 4764, 4766, 4767, 4770, 4771, 4774, 4777, 4780, 4783, 4785, 4786, 4787, 4788, 4791, 4792, 4793, 4795, 4798, 4800, 4802, 4804, 4806, 4808, 4810, 4811, 4812, 4815, 4816, 4817, 4818, 4820, 4823, 4824, 4825, 4828, 4830, 4832, 4836, 4839, 4840, 4845, 4846, 4848, 4851, 4854, 4855, 4856, 4857, 4858, 4862, 4864, 4871, 4872, 4874, 4875, 4881, 4882, 4884, 4886, 4887, 4890, 4893, 4896, 4899, 4900, 4901, 4902, 4904, 4905, 4907, 4908, 4909, 4910, 4913, 4915, 4917, 4921, 4922, 4923, 4925, 4926, 4928, 4930, 4935, 4936, 4937, 4938, 4940, 4943, 4944, 4946, 4947, 4951, 4952, 4953, 4954, 4956, 4957, 4960, 4963, 4967, 4970, 4971, 4972, 4976, 4977, 4985, 4986, 4987, 4989, 4991, 4992, 4997, 4999, 5002, 5003, 5004, 5006, 5010, 5013, 5014, 5015, 5017, 5018, 5019, 5020, 5021, 5024, 5025, 5027, 5031, 5032, 5033, 5037, 5040, 5041, 5042, 5043, 4958, 4961, 4964, 4966, 4968, 4969, 4973, 4974, 4975, 4978, 4979, 4980, 4981, 4982, 4983, 4984, 4988, 4990, 4993, 4995, 4996, 4998, 5000, 5005, 5007, 5009, 5011, 5016, 5022, 5026, 5028, 5030, 5034, 5036, 5038, 5039, 5044, 5047, 5049, 5050, 5052, 5054, 5055, 5057, 5060, 5061, 5064, 5045, 5048, 5051, 5053, 5056, 5058, 5062, 5065, 5066, 5069, 5073, 5077, 5080, 5083, 5087, 5093, 5096, 5099, 5100, 5103, 5104, 5106, 5111, 5116, 5119, 5120, 5125, 5128, 5132, 5134, 5135, 5137, 5139, 5140, 5142, 5144, 5148, 5149, 5150, 5155, 5157, 5158, 5160, 5166, 5168, 5170, 5171, 5173, 5176, 5177, 5179, 5184, 5187, 5188, 5190, 5193, 5195, 5198, 5201, 5204, 5208, 5211, 5215, 5216, 5217, 5220, 5221, 5222, 5224, 5226, 5229, 5230, 5231, 5232, 5234, 5237, 5242, 5244, 5245, 5246, 5247, 5249, 5250, 5252, 5254, 5255, 5256, 5261, 5262, 5264, 5265, 5273, 5274, 5276, 5278, 5279, 5281, 5284, 5285, 5286, 5287, 5288, 5289, 5292, 5296, 5300, 5303, 5304, 5307, 5308, 5309, 5313, 5315, 5317, 5318, 5322, 5323, 5326, 5329, 5330, 5333, 5336, 5337, 5341, 5343, 5348, 5349, 5352, 5354, 5355, 5358, 5359, 5361, 5362, 5363, 5364, 5365, 5367, 5369, 5370, 5372, 5375, 5377, 5379, 5382, 5385, 5387, 5393, 5394, 5395, 5398, 5400, 5404, 5407, 5408, 5409, 5412, 5413, 5414, 5416, 5418, 5421, 5424, 5426, 5428, 5431, 5432, 5433, 5434, 5435, 5437, 5440, 5441, 5443, 5448, 5450, 5451, 5454, 5455, 5458, 5460, 5461, 5464, 5468, 5470, 5471, 5474, 5475, 5477, 5482, 5484, 5485, 5487, 5490, 5491, 5492, 5494, 5496, 5498, 5499, 5500, 5501, 5502, 5503, 5504, 5506, 5509, 5510, 5512, 5516, 5517, 5518, 5524, 5525, 5526, 5528, 5531, 5533, 5534, 5535, 5536, 5537, 5540, 5542, 5544, 5545, 5546, 5549, 5550, 5552, 5553, 5559, 5561, 5566, 5569, 5572, 5573, 5575, 5577, 5578, 5579, 5580, 5581, 5582, 5588, 5593, 5595, 5596, 5598, 5600, 5601, 5603, 5604, 5605, 5608, 5614, 5615, 5616, 5619, 5622, 5624, 5625, 5628, 5629, 5633, 5634, 5637, 5638, 5639, 5643, 5644, 5645, 5647, 5648, 5649, 5650, 5654, 5662, 5664, 5067, 5070, 5072, 5074, 5075, 5076, 5078, 5081, 5084, 5086, 5088, 5090, 5091, 5094, 5097, 5101, 5105, 5107, 5109, 5110, 5112, 5114, 5115, 5117, 5121, 5123, 5124, 5126, 5129, 5131, 5136, 5143, 5145, 5147, 5151, 5153, 5156, 5159, 5161, 5162, 5163, 5164, 5165, 5167, 5169, 5172, 5174, 5175, 5180, 5181, 5182, 5183, 5185, 5186, 5189, 5191, 5194, 5196, 5199, 5200, 5202, 5203, 5205, 5207, 5209, 5210, 5212, 5214, 5218, 5219, 5223, 5225, 5227, 5233, 5235, 5238, 5239, 5240, 5241, 5248, 5251, 5253, 5257, 5259, 5260, 5263, 5266, 5268, 5269, 5270, 5271, 5272, 5280, 5282, 5290, 5291, 5293, 5295, 5297, 5299, 5301, 5306, 5310, 5311, 5312, 5314, 5316, 5319, 5321, 5324, 5327, 5331, 5332, 5334, 5338, 5339, 5340, 5342, 5344, 5346, 5347, 5351, 5353, 5356, 5360, 5366, 5368, 5371, 5373, 5376, 5378, 5380, 5383, 5388, 5389, 5391, 5392, 5396, 5399, 5401, 5403, 5405, 5410, 5415, 5417, 5419, 5420, 5422, 5425, 5427, 5429, 5436, 5438, 5442, 5444, 5445, 5446, 5447, 5449, 5452, 5456, 5457, 5459, 5462, 5465, 5466, 5467, 5469, 5472, 5478, 5480, 5481, 5486, 5488, 5493, 5495, 5497, 5505, 5507, 5508, 5511, 5513, 5515, 5519, 5521, 5522, 5527, 5529, 5532, 5538, 5539, 5541, 5543, 5548, 5551, 5554, 5555, 5556, 5557, 5558, 5560, 5562, 5563, 5564, 5565, 5567, 5568, 5570, 5571, 5574, 5576, 5583, 5585, 5586, 5587, 5589, 5591, 5592, 5594, 5597, 5599, 5602, 5606, 5609, 5611, 5612, 5618, 5620, 5623, 5626, 5627, 5630, 5632, 5635, 5640, 5642, 5646, 5651, 5652, 5656, 5657, 5659, 5660, 5661, 5663, 5665, 5667, 5670, 5672, 5673, 5676, 5678, 5679, 5681, 5682, 5683, 5686, 5687, 5688, 5690, 5694, 5697, 5698, 5699, 5700, 5701, 5704, 5708, 5709, 5711, 5713, 5714, 5717, 5721, 5723, 5724, 5727, 5728, 5733, 5734, 5735, 5736, 5739, 5740, 5741, 5742, 5743, 5668, 5671, 5674, 5677, 5680, 5684, 5689, 5691, 5693, 5696, 5702, 5705, 5707, 5710, 5712, 5715, 5718, 5720, 5722, 5725, 5729, 5730, 5731, 5732, 5737, 5744, 5747, 5750, 5753, 5759, 5762, 5763, 5770, 5775, 5777, 5778, 5780, 5782, 5785, 5787, 5791, 5792, 5793, 5794, 5797, 5801, 5803, 5808, 5810, 5812, 5814, 5816, 5817, 5824, 5832, 5833, 5834, 5835, 5838, 5840, 5841, 5844, 5849, 5853, 5854, 5857, 5859, 5860, 5862, 5863, 5865, 5868, 5874, 5882, 5883, 5885, 5887, 5894, 5895, 5896, 5897, 5902, 5904, 5906, 5909, 5912, 5915, 5918, 5919, 5920, 5922, 5923, 5926, 5927, 5928, 5930, 5932, 5933, 5934, 5935, 5939, 5940, 5946, 5947, 5948, 5949, 5952, 5954, 5955, 5956, 5958, 5959, 5961, 5962, 5964, 5965, 5968, 5970, 5971, 5972, 5973, 5977, 5978, 5980, 5983, 5986, 5987, 5992, 5993, 5996, 5997, 6000, 6002, 6003, 6004, 6005, 6006, 6008, 6009, 6010, 6011, 6012, 6013, 6017, 6018, 6019, 6020, 6025, 6027, 6030, 6033, 6035, 6036, 6039, 6041, 6042, 6045, 6049, 6050, 6051, 6055, 6059, 6063, 6064, 6065, 6067, 6070, 6072, 6073, 6075, 6077, 6078, 6081, 5745, 5748, 5751, 5754, 5756, 5758, 5760, 5764, 5766, 5767, 5768, 5769, 5771, 5773, 5774, 5776, 5779, 5781, 5783, 5786, 5788, 5789, 5790, 5795, 5796, 5798, 5800, 5802, 5804, 5806, 5807, 5809, 5811, 5813, 5818, 5820, 5821, 5822, 5823, 5825, 5826, 5827, 5828, 5830, 5831, 5836, 5837, 5839, 5842, 5843, 5845, 5846, 5847, 5848, 5850, 5852, 5855, 5856, 5858, 5861, 5864, 5866, 5867, 5870, 5871, 5872, 5873, 5875, 5876, 5877, 5878, 5879, 5880, 5881, 5884, 5886, 5888, 5889, 5890, 5891, 5892, 5893, 5898, 5899, 5900, 5903, 5905, 5907, 5910, 5913, 5916, 5921, 5924, 5929, 5931, 5936, 5937, 5938, 5942, 5943, 5944, 5945, 5950, 5953, 5957, 5960, 5963, 5966, 5969, 5975, 5976, 5981, 5984, 5988, 5990, 5991, 5994, 5998, 5999, 6001, 6007, 6014, 6015, 6016, 6021, 6023, 6024, 6026, 6028, 6031, 6032, 6034, 6037, 6038, 6040, 6043, 6046, 6048, 6053, 6054, 6056, 6058, 6060, 6062, 6066, 6068, 6074, 6076, 6079, 6083, 6084, 6085, 6089, 6090, 6093, 6096, 6098, 6100, 6106, 6110, 6111, 6114, 6118, 6121, 6127, 6130, 6133, 6135, 6137, 6138, 6141, 6143, 6145, 6148, 6150, 6151, 6152, 6153, 6154, 6156, 6159, 6160, 6162, 6163, 6166, 6167, 6168, 6169, 6170, 6171, 6172, 6175, 6177, 6180, 6183, 6187, 6188, 6190, 6193, 6194, 6195, 6196, 6198, 6201, 6202, 6204, 6207, 6211, 6212, 6214, 6215, 6216, 6218, 6219, 6220, 6222, 6225, 6226, 6230, 6235, 6239, 6241, 6242, 6243, 6244, 6245, 6247, 6250, 6252, 6254, 6259, 6260, 6261, 6264, 6265, 6268, 6270, 6273, 6275, 6278, 6280, 6282, 6286, 6287, 6288, 6291, 6293, 6298, 6299, 6300, 6302, 6303, 6305, 6307, 6308, 6312, 6313, 6314, 6315, 6316, 6317, 6318, 6320, 6321, 6323, 6325, 6327, 6328, 6334, 6335, 6337, 6340, 6341, 6344, 6348, 6350, 6353, 6354, 6357, 6360, 6362, 6364, 6368, 6372, 6374, 6377, 6378, 6383, 6386, 6392, 6394, 6398, 6400, 6404, 6405, 6409, 6410, 6411, 6417, 6418, 6424, 6426, 6429, 6431, 6432, 6433, 6435, 6436, 6437, 6438, 6440, 6442, 6445, 6446, 6448, 6449, 6452, 6455, 6457, 6458, 6461, 6462, 6463, 6464, 6465, 6470, 6473, 6475, 6478, 6480, 6481, 6484, 6485, 6486, 6489, 6491, 6492, 6494, 6498, 6502, 6504, 6505, 6507, 6511, 6513, 6514, 6086, 6088, 6091, 6094, 6097, 6099, 6101, 6103, 6105, 6108, 6112, 6115, 6116, 6117, 6119, 6120, 6122, 6123, 6125, 6126, 6128, 6131, 6132, 6134, 6136, 6139, 6142, 6144, 6146, 6149, 6155, 6157, 6161, 6164, 6173, 6174, 6176, 6178, 6181, 6182, 6184, 6186, 6189, 6191, 6192, 6197, 6199, 6200, 6205, 6206, 6208, 6210, 6213, 6221, 6223, 6224, 6227, 6229, 6231, 6232, 6233, 6234, 6236, 6237, 6238, 6240, 6246, 6248, 6251, 6253, 6255, 6256, 6257, 6258, 6262, 6266, 6269, 6271, 6272, 6274, 6276, 6277, 6281, 6283, 6284, 6285, 6289, 6292, 6294, 6295, 6296, 6297, 6301, 6304, 6306, 6309, 6310, 6311, 6319, 6322, 6324, 6326, 6329, 6330, 6331, 6333, 6336, 6338, 6342, 6345, 6347, 6349, 6351, 6355, 6356, 6358, 6359, 6361, 6365, 6367, 6369, 6371, 6373, 6375, 6376, 6379, 6381, 6382, 6384, 6387, 6388, 6389, 6390, 6393, 6395, 6397, 6399, 6401, 6402, 6403, 6406, 6407, 6412, 6413, 6414, 6415, 6416, 6419, 6420, 6421, 6422, 6423, 6425, 6427, 6428, 6434, 6441, 6443, 6444, 6447, 6450, 6451, 6453, 6459, 6460, 6466, 6467, 6468, 6469, 6471, 6472, 6474, 6476, 6479, 6482, 6487, 6490, 6493, 6496, 6497, 6499, 6500, 6501, 6503, 6506, 6508, 6510, 6512, 6515, 6518, 6521, 6522, 6523, 6524, 6528, 6532, 6535, 6539, 6549, 6560, 6561, 6564, 6566, 6567, 6570, 6573, 6576, 6577, 6578, 6579, 6583, 6584, 6585, 6586, 6587, 6590, 6591, 6594, 6596, 6597, 6603, 6605, 6608, 6609, 6610, 6611, 6612, 6615, 6625, 6630, 6632, 6633, 6634, 6638, 6639, 6642, 6643, 6644, 6647, 6650, 6655, 6657, 6658, 6659, 6661, 6663, 6664, 6665, 6669, 6671, 6674, 6677, 6678, 6679, 6680, 6681, 6682, 6686, 6687, 6688, 6689, 6690, 6691, 6693, 6695, 6696, 6697, 6699, 6701, 6703, 6704, 6705, 6706, 6707, 6708, 6710, 6711, 6712, 6713, 6717, 6718, 6720, 6721, 6722, 6725, 6727, 6732, 6734, 6735, 6739, 6741, 6745, 6748, 6751, 6755, 6759, 6762, 6764, 6767, 6770, 6772, 6773, 6774, 6777, 6778, 6782, 6785, 6786, 6787, 6790, 6791, 6794, 6795, 6796, 6798, 6800, 6802, 6803, 6806, 6811, 6814, 6815, 6818, 6824, 6829, 6834, 6835, 6842, 6516, 6519, 6525, 6526, 6527, 6529, 6531, 6533, 6536, 6537, 6538, 6540, 6541, 6542, 6543, 6544, 6545, 6546, 6547, 6548, 6550, 6551, 6552, 6553, 6554, 6556, 6558, 6562, 6563, 6565, 6568, 6571, 6572, 6575, 6580, 6582, 6588, 6589, 6592, 6595, 6598, 6599, 6600, 6601, 6602, 6604, 6606, 6607, 6613, 6614, 6617, 6618, 6619, 6620, 6621, 6623, 6624, 6627, 6628, 6629, 6631, 6635, 6640, 6641, 6645, 6646, 6649, 6651, 6652, 6653, 6656, 6660, 6662, 6666, 6668, 6670, 6672, 6675, 6676, 6683, 6685, 6692, 6694, 6698, 6700, 6702, 6709, 6714, 6715, 6716, 6719, 6723, 6726, 6728, 6730, 6731, 6736, 6738, 6740, 6742, 6744, 6746, 6747, 6749, 6752, 6754, 6756, 6757, 6758, 6760, 6761, 6765, 6769, 6775, 6779, 6781, 6783, 6784, 6789, 6792, 6797, 6799, 6801, 6804, 6805, 6807, 6809, 6810, 6812, 6816, 6817, 6819, 6821, 6822, 6825, 6827, 6828, 6830, 6831, 6832, 6833, 6836, 6837, 6838, 6839, 6840, 6841, 6843, 6517, 6520, 6530, 6534, 6555, 6557, 6559, 6569, 6574, 6581, 6593, 6616, 6622, 6626, 6636, 6637, 6648, 6654, 6667, 6673, 6684, 6724, 6729, 6733, 6737, 6743, 6750, 6753, 6763, 6766, 6768, 6771, 6776, 6780, 6788, 6793, 6808, 6813, 6820, 6823, 6826, 6844, 6848, 6850, 6852, 6854, 6857, 6859, 6861, 6862, 6865, 6868, 6870, 6871, 6872, 6874, 6875, 6876, 6880, 6883, 6886, 6887, 6888, 6890, 6891, 6894, 6896, 6897, 6898, 6899, 6900, 6901, 6902, 6904, 6905, 6906, 6910, 6912, 6917, 6920, 6845, 6847, 6849, 6851, 6853, 6855, 6858, 6860, 6863, 6866, 6869, 6873, 6877, 6879, 6881, 6882, 6884, 6889, 6892, 6893, 6895, 6907, 6908, 6909, 6911, 6913, 6915, 6916, 6918, 6921, 6924, 6927, 6928, 6933, 6935, 6937, 6939, 6940, 6943, 6946, 6947, 6948, 6949, 6951, 6953, 6954, 6955, 6959, 6961, 6964, 6965, 6968, 6969, 6972, 6973, 6976, 6979, 6980, 6922, 6925, 6929, 6930, 6931, 6932, 6934, 6936, 6942, 6944, 6945, 6950, 6952, 6956, 6957, 6958, 6960, 6962, 6963, 6966, 6967, 6970, 6971, 6974, 6975, 6977, 6981, 6983, 6986, 6992, 6995, 6998, 7002, 7006, 7013, 7017, 7022, 7024, 7027, 7030, 7032, 7036, 7037, 7040, 7050, 7052, 7055, 7056, 7058, 7059, 7060, 7064, 7067, 7072, 7074, 7076, 7077, 7084, 7085, 7086, 7087, 7088, 7089, 7090, 7091, 7096, 7097, 7100, 7102, 7109, 7110, 7113, 7114, 7115, 7118, 7121, 7123, 7124, 7131, 7133, 7135, 7136, 7138, 7139, 7140, 7144, 7146, 7148, 7149, 7158, 7159, 7160, 7163, 7165, 7166, 7168, 7172, 7175, 7178, 7180, 7181, 7183, 7185, 7186, 7187, 7192, 7194, 7199, 7202, 7203, 7204, 7205, 7207, 7208, 7213, 7214, 7216, 7220, 7221, 7227, 7228, 7230, 7233, 7235, 7237, 7239, 7243, 7245, 7246, 7248, 7249, 7251, 7255, 7256, 7260, 7263, 7264, 7265, 7266, 7268, 7269, 7272, 7276, 7277, 7278, 7279, 7280, 7281, 7283, 7284, 7287, 7291, 7295, 7299, 7302, 7303, 7306, 7309, 7310, 7311, 7314, 7315, 7320, 7321, 7324, 7325, 7329, 7331, 7332, 7334, 7336, 7339, 7340, 7341, 7344, 7350, 7353, 7355, 7358, 7360, 7362, 7372, 7374, 7375, 7378, 7381, 7385, 7387, 7390, 7391, 7392, 7394, 7397, 7401, 7402, 7405, 7410, 7413, 7415, 7416, 7417, 7420, 6984, 6987, 6989, 6990, 6991, 6993, 6996, 6999, 7001, 7003, 7005, 7007, 7009, 7010, 7011, 7012, 7014, 7016, 7018, 7020, 7023, 7025, 7026, 7028, 7029, 7031, 7033, 7034, 7035, 7038, 7039, 7041, 7042, 7043, 7044, 7045, 7046, 7047, 7048, 7049, 7051, 7053, 7054, 7057, 7061, 7062, 7063, 7065, 7066, 7068, 7070, 7071, 7073, 7075, 7078, 7080, 7081, 7082, 7083, 7092, 7093, 7094, 7095, 7098, 7101, 7103, 7105, 7106, 7107, 7108, 7111, 7112, 7116, 7119, 7122, 7125, 7126, 7127, 7128, 7129, 7130, 7132, 7134, 7137, 7141, 7142, 7143, 7147, 7150, 7152, 7154, 7155, 7156, 7157, 7161, 7167, 7170, 7171, 7173, 7174, 7176, 7177, 7179, 7182, 7184, 7188, 7189, 7190, 7191, 7193, 7195, 7196, 7197, 7198, 7200, 7206, 7210, 7211, 7212, 7215, 7217, 7218, 7219, 7222, 7223, 7224, 7225, 7226, 7229, 7231, 7232, 7236, 7240, 7241, 7242, 7244, 7247, 7250, 7253, 7254, 7257, 7258, 7259, 7261, 7262, 7267, 7270, 7271, 7273, 7274, 7275, 7282, 7285, 7289, 7290, 7292, 7293, 7294, 7296, 7297, 7298, 7301, 7304, 7307, 7308, 7312, 7316, 7317, 7318, 7319, 7322, 7326, 7328, 7330, 7333, 7335, 7337, 7342, 7345, 7347, 7348, 7349, 7351, 7354, 7356, 7357, 7359, 7361, 7363, 7364, 7365, 7366, 7367, 7368, 7369, 7370, 7371, 7373, 7376, 7379, 7382, 7383, 7384, 7386, 7388, 7389, 7393, 7395, 7398, 7400, 7403, 7404, 7407, 7408, 7409, 7411, 7419, 7421, 7422, 7425, 7427, 7435, 7438, 7439, 7440, 7442, 7444, 7448, 7449, 7456, 7459, 7462, 7463, 7465, 7466, 7467, 7470, 7471, 7474, 7476, 7477, 7480, 7481, 7485, 7486, 7489, 7490, 7493, 7496, 7500, 7503, 7508, 7512, 7518, 7519, 7520, 7522, 7524, 7525, 7527, 7528, 7529, 7532, 7540, 7542, 7543, 7545, 7549, 7552, 7554, 7423, 7426, 7428, 7430, 7431, 7432, 7433, 7434, 7436, 7445, 7446, 7447, 7450, 7451, 7452, 7453, 7454, 7455, 7457, 7460, 7464, 7468, 7472, 7475, 7478, 7479, 7482, 7483, 7484, 7487, 7488, 7492, 7494, 7495, 7497, 7498, 7499, 7501, 7505, 7506, 7507, 7509, 7510, 7511, 7513, 7515, 7516, 7517, 7521, 7523, 7526, 7530, 7533, 7534, 7535, 7536, 7537, 7538, 7539, 7541, 7544, 7546, 7547, 7548, 7550, 7555, 7558, 7559, 7560, 7565, 7566, 7567, 7570, 7571, 7573, 7574, 7575, 7576, 7577, 7578, 7579, 7580, 7581, 7582, 7585, 7586, 7587, 7588, 7589, 7590, 7596, 7597, 7598, 7600, 7603, 7606, 7609, 7610, 7615, 7618, 7620, 7621, 7623, 7627, 7629, 7633, 7635, 7636, 7643, 7647, 7651, 7655, 7661, 7666, 7672, 7674, 7676, 7677, 7682, 7683, 7685, 7687, 7689, 7690, 7691, 7694, 7699, 7701, 7702, 7704, 7707, 7709, 7711, 7712, 7713, 7714, 7716, 7718, 7720, 7726, 7728, 7729, 7733, 7734, 7735, 7736, 7738, 7740, 7741, 7744, 7746, 7747, 7748, 7749, 7750, 7751, 7752, 7753, 7754, 7755, 7756, 7758, 7556, 7561, 7563, 7568, 7583, 7584, 7591, 7593, 7594, 7595, 7599, 7601, 7604, 7607, 7608, 7611, 7613, 7614, 7616, 7617, 7619, 7622, 7624, 7626, 7628, 7631, 7637, 7638, 7639, 7640, 7641, 7642, 7644, 7645, 7646, 7649, 7650, 7652, 7654, 7656, 7657, 7658, 7659, 7660, 7662, 7663, 7665, 7667, 7669, 7670, 7671, 7673, 7675, 7678, 7679, 7680, 7681, 7684, 7686, 7688, 7692, 7695, 7697, 7698, 7700, 7703, 7705, 7708, 7710, 7715, 7717, 7719, 7721, 7722, 7723, 7724, 7725, 7727, 7730, 7731, 7732, 7737, 7739, 7742, 7743, 7745, 7757, 7759, 7760, 7761, 7764, 7770, 7774, 7775, 7778, 7782, 7786, 7788, 7795, 7797, 7799, 7805, 7807, 7809, 7810, 7811, 7815, 7817, 7819, 7820, 7822, 7823, 7824, 7828, 7832, 7834, 7837, 7839, 7843, 7845, 7851, 7852, 7857, 7860, 7863, 7865, 7868, 7874, 7881, 7885, 7889, 7892, 7894, 7896, 7900, 7902, 7904, 7907, 7909, 7910, 7913, 7917, 7922, 7925, 7926, 7928, 7933, 7934, 7937, 7941, 7945, 7946, 7948, 7950, 7951, 7952, 7953, 7954, 7955, 7956, 7957, 7963, 7964, 7968, 7971, 7972, 7973, 7976, 7979, 7980, 7981, 7982, 7983, 7985, 7986, 7987, 7988, 7991, 7762, 7765, 7767, 7768, 7771, 7773, 7776, 7779, 7781, 7783, 7784, 7785, 7789, 7791, 7792, 7793, 7794, 7796, 7798, 7800, 7802, 7803, 7808, 7812, 7813, 7814, 7816, 7818, 7821, 7825, 7827, 7829, 7830, 7833, 7835, 7836, 7838, 7840, 7841, 7842, 7844, 7846, 7847, 7848, 7849, 7853, 7854, 7855, 7856, 7858, 7861, 7864, 7866, 7869, 7870, 7871, 7872, 7873, 7875, 7877, 7878, 7879, 7880, 7882, 7884, 7886, 7888, 7890, 7897, 7899, 7903, 7905, 7912, 7914, 7916, 7918, 7919, 7920, 7921, 7923, 7929, 7931, 7932, 7936, 7938, 7939, 7940, 7942, 7943, 7944, 7947, 7949, 7958, 7960, 7962, 7965, 7967, 7969, 7970, 7974, 7977, 7989, 7990, 7992, 7995, 7996, 8000, 8003, 8006, 8007, 8010, 8012, 8015, 8016, 8018, 8019, 8026, 8027, 8030, 8034, 8035, 8038, 8039, 8043, 8044, 8046, 8049, 8050, 8052, 8053, 8055, 8056, 8062, 8064, 8066, 8067, 8068, 8069, 8070, 8071, 8074, 8076, 8077, 8078, 8079, 8080, 8081, 7993, 7997, 7999, 8001, 8004, 8005, 8008, 8009, 8011, 8013, 8017, 8020, 8021, 8022, 8023, 8024, 8025, 8028, 8031, 8033, 8036, 8040, 8042, 8047, 8051, 8054, 8057, 8059, 8060, 8061, 8065, 8072, 8073, 8075, 8082, 8083, 8084, 8085, 8087, 8088, 8089, 8090, 8093, 8095, 8098, 8100, 8101, 8102, 8104, 8107, 8110, 8111, 8114, 8115, 8116, 8118, 8122, 8124, 8126, 8127, 8129, 8132, 8134, 8136, 8138, 8142, 8143, 8144, 8146, 8151, 8157, 8160, 8163, 8165, 8168, 8169, 8170, 8173, 8174, 8175, 8176, 8178, 8181, 8185, 8187, 8188, 8189, 8190, 8191, 8193, 8194, 8200, 8203, 8206, 8208, 8209, 8212, 8214, 8216, 8217, 8220, 8222, 8224, 8228, 8230, 8091, 8094, 8096, 8099, 8103, 8105, 8108, 8112, 8113, 8117, 8119, 8121, 8123, 8125, 8128, 8130, 8131, 8133, 8135, 8137, 8139, 8145, 8147, 8148, 8149, 8150, 8152, 8153, 8154, 8155, 8156, 8158, 8161, 8164, 8166, 8167, 8171, 8177, 8179, 8180, 8182, 8183, 8184, 8186, 8192, 8195, 8197, 8198, 8199, 8201, 8202, 8204, 8207, 8210, 8213, 8218, 8221, 8223, 8225, 8227, 8229, 8231, 8232, 8235, 8236, 8237, 8238, 8244, 8245, 8247, 8250, 8251, 8253, 8254, 8255, 8256, 8258, 8259, 8260, 8263, 8267, 8269, 8270, 8273, 8274, 8277, 8280, 8281, 8289, 8292, 8293, 8294, 8295, 8296, 8297, 8298, 8301, 8305, 8306, 8310, 8311, 8312, 8315, 8317, 8318, 8322, 8323, 8324, 8327, 8328, 8329, 8330, 8333, 8336, 8339, 8340, 8347, 8349, 8350, 8352, 8353, 8356, 8359, 8360, 8366, 8369, 8370, 8372, 8374, 8376, 8377, 8379, 8381, 8382, 8383, 8233, 8239, 8240, 8242, 8243, 8246, 8248, 8252, 8257, 8261, 8264, 8266, 8268, 8271, 8275, 8278, 8282, 8284, 8285, 8286, 8287, 8288, 8291, 8299, 8302, 8303, 8304, 8307, 8309, 8313, 8314, 8316, 8319, 8321, 8325, 8326, 8331, 8332, 8334, 8335, 8337, 8341, 8342, 8343, 8344, 8345, 8346, 8348, 8351, 8354, 8357, 8361, 8362, 8363, 8364, 8365, 8367, 8371, 8373, 8375, 8378, 8384, 8387, 8390, 8391, 8397, 8398, 8401, 8402, 8405, 8406, 8409, 8414, 8418, 8419, 8422, 8425, 8428, 8431, 8432, 8433, 8435, 8437, 8440, 8444, 8449, 8452, 8454, 8455, 8457, 8462, 8464, 8466, 8468, 8469, 8472, 8475, 8476, 8478, 8479, 8481, 8484, 8487, 8488, 8490, 8493, 8496, 8497, 8498, 8501, 8505, 8508, 8511, 8513, 8515, 8517, 8518, 8519, 8521, 8522, 8523, 8526, 8528, 8530, 8531, 8532, 8534, 8536, 8541, 8544, 8547, 8551, 8554, 8556, 8558, 8560, 8562, 8563, 8566, 8567, 8568, 8570, 8571, 8574, 8575, 8576, 8577, 8580, 8581, 8585, 8588, 8591, 8594, 8601, 8602, 8603, 8608, 8609, 8613, 8614, 8617, 8618, 8619, 8620, 8623, 8624, 8628, 8629, 8630, 8633, 8634, 8635, 8636, 8638, 8643, 8645, 8648, 8654, 8657, 8658, 8659, 8660, 8661, 8662, 8666, 8670, 8672, 8674, 8676, 8681, 8683, 8686, 8688, 8689, 8691, 8692, 8693, 8695, 8696, 8700, 8701, 8702, 8703, 8704, 8705, 8709, 8716, 8717, 8719, 8722, 8725, 8727, 8728, 8729, 8732, 8733, 8734, 8735, 8736, 8385, 8388, 8392, 8394, 8395, 8399, 8403, 8407, 8410, 8411, 8412, 8413, 8415, 8416, 8420, 8423, 8424, 8426, 8429, 8434, 8436, 8438, 8442, 8445, 8446, 8447, 8448, 8450, 8451, 8456, 8458, 8460, 8461, 8463, 8465, 8467, 8470, 8473, 8474, 8477, 8480, 8482, 8485, 8486, 8489, 8491, 8492, 8494, 8499, 8500, 8502, 8503, 8504, 8506, 8510, 8512, 8514, 8516, 8520, 8524, 8527, 8529, 8533, 8535, 8537, 8539, 8542, 8545, 8546, 8548, 8550, 8552, 8555, 8557, 8564, 8565, 8569, 8572, 8578, 8582, 8583, 8586, 8587, 8589, 8592, 8595, 8596, 8597, 8598, 8599, 8600, 8604, 8606, 8607, 8610, 8612, 8615, 8616, 8621, 8625, 8627, 8631, 8632, 8637, 8639, 8640, 8641, 8642, 8644, 8646, 8647, 8649, 8650, 8651, 8652, 8653, 8655, 8663, 8665, 8667, 8668, 8669, 8671, 8673, 8675, 8677, 8678, 8679, 8680, 8682, 8684, 8685, 8687, 8690, 8694, 8697, 8698, 8699, 8706, 8707, 8708, 8710, 8711, 8712, 8713, 8714, 8715, 8718, 8720, 8723, 8726, 8730, 8737, 8738, 8741, 8744, 8747, 8750, 8751, 8753, 8754, 8755, 8756, 8759, 8760, 8762, 8763, 8766, 8767, 8768, 8769, 8770, 8772, 8775, 8776, 8777, 8779, 8782, 8783, 8784, 8785, 8786, 8787, 8788, 8789, 8790, 8793, 8794, 8796, 8798, 8799, 8801, 8803, 8804, 8806, 8807, 8809, 8812, 8813, 8815, 8820, 8823, 8826, 8829, 8830, 8832, 8835, 8836, 8837, 8842, 8845, 8846, 8847, 8851, 8853, 8856, 8857, 8859, 8861, 8866, 8739, 8878, 8879, 8880, 8884, 8891, 8893, 8895, 8898, 8900, 8901, 8909, 8912, 8739, 8742, 8745, 8748, 8749, 8752, 8757, 8758, 8761, 8764, 8771, 8773, 8778, 8780, 8791, 8797, 8800, 8802, 8805, 8808, 8810, 8814, 8816, 8818, 8819, 8821, 8824, 8827, 8828, 8831, 8833, 8838, 8840, 8841, 8755, 8843, 8844, 8848, 8850, 8852, 8854, 8855, 8863, 8864, 8865, 8867, 8868, 8869, 8870, 8871, 8872, 8873, 8874, 8876, 8877, 8881, 8882, 8883, 8885, 8887, 8888, 8889, 8890, 8892, 8894, 8896, 8897, 8899, 8902, 8785, 8903, 8904, 8905, 8906, 8907, 8908, 8911, 8913, 8917, 8920, 8923, 8924, 8929, 8931, 8934, 8935, 8936, 8914, 8916, 8918, 8921, 8925, 8927, 8928, 8930, 8932, 8933, 8937, 8980, 8984, 8988, 8989, 8998, 9001, 9002, 9005, 9007, 9008, 9012, 9013, 9016, 9019, 9020, 9022, 9023, 9025, 9028, 9029, 9032, 9033, 9034, 9035, 9037, 9038, 9044, 9046, 9047, 9048, 9049, 9054, 8981, 8983, 8985, 8987, 8990, 8992, 8993, 8994, 8995, 8997, 8999, 9003, 9004, 9006, 9009, 9010, 9011, 9014, 9017, 9018, 9021, 9024, 9026, 9030, 9036, 9039, 9041, 9042, 9043, 9045, 9050, 9051, 9052, 9053, 9055, 9058, 9060, 9063, 9066, 9067, 9068, 9069, 9070, 9071, 9074, 9075, 9077, 9078, 9079, 9080, 9082, 9084, 9088, 9089, 9090, 9099, 9103, 9104, 9105, 9107, 9111, 9056, 9061, 9064, 9072, 9081, 9083, 9085, 9086, 9087, 9091, 9092, 9093, 9094, 9095, 9096, 9097, 9098, 9100, 9102, 9106, 9108, 9109, 9110, 9112, 9113, 9116, 9118, 9125, 9126, 9128, 9129, 9130, 9136, 9141, 9143, 9148, 9150, 9153, 9157, 9158, 9159, 9163, 9164, 9165, 9167, 9168, 9171, 9173, 9177, 9180, 9181, 9182, 9183, 9185, 9187, 9188, 9189, 9191, 9192, 9193, 9194, 9197, 9198, 9200, 9206, 9207, 9208, 9209, 9211, 9216, 9218, 9219, 9220, 9221, 9222, 9223, 9226, 9228, 9229, 9230, 9231, 9232, 9233, 9234, 9237, 9238, 9240, 9243, 9246, 9248, 9253, 9256, 9257, 9260, 9263, 9264, 9266, 9269, 9271, 9279, 9280, 9281, 9282, 9283, 9284, 9290, 9114, 9119, 9121, 9122, 9123, 9124, 9127, 9131, 9133, 9134, 9135, 9137, 9138, 9139, 9140, 9142, 9144, 9146, 9147, 9149, 9151, 9152, 9154, 9155, 9156, 9160, 9162, 9166, 9169, 9172, 9174, 9175, 9176, 9178, 9184, 9186, 9190, 9195, 9199, 9201, 9202, 9203, 9204, 9205, 9212, 9214, 9215, 9217, 9224, 9227, 9235, 9239, 9241, 9244, 9247, 9249, 9251, 9252, 9254, 9258, 9261, 9265, 9267, 9270, 9273, 9274, 9275, 9276, 9277, 9278, 9285, 9286, 9287, 9288, 9289, 9291, 9292, 9295, 9297, 9300, 9302, 9303, 9304, 9307, 9308, 9310, 9311, 9313, 9319, 9321, 9323, 9324, 9328, 9333, 9334, 9337, 9338, 9339, 9342, 9344, 9348, 9351, 9352, 9354, 9355, 9357, 9360, 9367, 9371, 9374, 9377, 9379, 9383, 9384, 9385, 9388, 9389, 9390, 9393, 9394, 9398, 9401, 9402, 9406, 9408, 9409, 9410, 9413, 9415, 9416, 9417, 9418, 9419, 9421, 9422, 9425, 9429, 9433, 9434, 9435, 9436, 9437, 9439, 9440, 9446, 9452, 9453, 9454, 9455, 9457, 9458, 9459, 9462, 9466, 9467, 9468, 9470, 9474, 9479, 9482, 9487, 9488, 9489, 9492, 9495, 9497, 9499, 9500, 9504, 9505, 9508, 9513, 9514, 9519, 9522, 9523, 9524, 9526, 9528, 9532, 9533, 9534, 9535, 9537, 9538, 9541, 9542, 9543, 9545, 9546, 9548, 9293, 9296, 9298, 9301, 9305, 9309, 9312, 9314, 9316, 9317, 9318, 9320, 9322, 9325, 9326, 9327, 9329, 9331, 9332, 9335, 9336, 9340, 9345, 9347, 9349, 9353, 9356, 9358, 9361, 9363, 9364, 9365, 9368, 9370, 9372, 9375, 9376, 9378, 9380, 9382, 9386, 9391, 9395, 9397, 9399, 9400, 9403, 9405, 9407, 9411, 9412, 9414, 9420, 9423, 9424, 9426, 9428, 9430, 9431, 9432, 9438, 9441, 9443, 9444, 9445, 9447, 9448, 9449, 9450, 9451, 9456, 9460, 9461, 9464, 9465, 9469, 9471, 9473, 9475, 9477, 9478, 9480, 9483, 9485, 9490, 9493, 9494, 9496, 9498, 9501, 9502, 9503, 9506, 9509, 9511, 9512, 9515, 9516, 9517, 9518, 9520, 9521, 9525, 9527, 9529, 9530, 9536, 9539, 9544, 9547, 9549, 9550, 9551, 9555, 9556, 9557, 9559, 9560, 9563, 9564, 9565, 9566, 9569, 9570, 9573, 9577, 9578, 9579, 9580, 9585, 9586, 9587, 9588, 9591, 9593, 9596, 9552, 9554, 9558, 9561, 9567, 9571, 9574, 9576, 9581, 9583, 9584, 9589, 9592, 9594, 9595, 9598, 9602, 9604, 9605, 9608, 9612, 9613, 9614, 9617, 9618, 9621, 9622, 9625, 9626, 9627, 9632, 9633, 9638, 9640, 9643, 9644, 9645, 9646, 9651, 9654, 9656, 9657, 9658, 9661, 9662, 9665, 9666, 9667, 9668, 9672, 9673, 9675, 9676, 9677, 9680, 9683, 9686, 9688, 9691, 9694, 9698, 9699, 9702, 9705, 9707, 9710, 9711, 9715, 9719, 9720, 9722, 9723, 9726, 9729, 9732, 9733, 9735, 9737, 9738, 9741, 9744, 9745, 9746, 9747, 9748, 9749, 9750, 9754, 9755, 9756, 9758, 9759, 9768, 9771, 9772, 9776, 9777, 9781, 9782, 9784, 9787, 9789, 9790, 9792, 9796, 9797, 9800, 9805, 9806, 9812, 9815, 9818, 9821, 9823, 9825, 9827, 9831, 9832, 9835, 9837, 9839, 9841, 9842, 9844, 9845, 9851, 9853, 9854, 9855, 9857, 9860, 9862, 9863, 9865, 9871, 9873, 9875, 9878, 9879, 9599, 9601, 9603, 9606, 9607, 9609, 9611, 9615, 9619, 9623, 9624, 9628, 9630, 9631, 9634, 9635, 9637, 9639, 9641, 9647, 9649, 9650, 9652, 9653, 9659, 9660, 9663, 9664, 9670, 9671, 9679, 9682, 9684, 9687, 9690, 9692, 9693, 9695, 9697, 9700, 9701, 9703, 9706, 9708, 9712, 9713, 9714, 9716, 9717, 9718, 9721, 9724, 9727, 9730, 9734, 9739, 9742, 9751, 9753, 9757, 9760, 9761, 9762, 9763, 9764, 9765, 9766, 9767, 9769, 9773, 9775, 9778, 9780, 9783, 9786, 9788, 9791, 9793, 9794, 9795, 9798, 9801, 9803, 9804, 9807, 9808, 9809, 9810, 9811, 9813, 9816, 9817, 9819, 9820, 9822, 9826, 9828, 9830, 9833, 9836, 9838, 9840, 9843, 9846, 9847, 9848, 9849, 9850, 9852, 9856, 9858, 9859, 9861, 9864, 9866, 9867, 9868, 9869, 9870, 9872, 9876, 9877, 9880, 9881, 9882, 9886, 9890, 9891, 9894, 9900, 9902, 9904, 9908, 9911, 9912, 9915, 9917, 9919, 9923, 9925, 9928, 9935, 9936, 9940, 9943, 9949, 9953, 9954, 9956, 9957, 9958, 9962, 9963, 9964, 9968, 9969, 9975, 9978, 9981, 9988, 9989, 9990, 9991, 9992, 9995, 9997, 10011, 10012, 10014, 10017, 10018, 10031, 10032, 10033, 10034, 10035, 10037, 10041, 10042, 10046, 10050, 10054, 10058, 10059, 9883, 9885, 9887, 9889, 9892, 9893, 9895, 9896, 9897, 9898, 9899, 9901, 9903, 9905, 9907, 9909, 9913, 9914, 9916, 9918, 9920, 9921, 9922, 9924, 9926, 9929, 9931, 9932, 9933, 9934, 9937, 9938, 9939, 9941, 9942, 9944, 9945, 9946, 9947, 9948, 9950, 9952, 9955, 9959, 9960, 9961, 9966, 9967, 9970, 9972, 9973, 9974, 9976, 9979, 9980, 9982, 9983, 9984, 9985, 9986, 9987, 9993, 9994, 9996, 9998, 9999, 10000, 10001, 10002, 10003, 10004, 10005, 10006, 10007, 10008, 10009, 10010, 10013, 10015, 10016, 10019, 10020, 10021, 10022, 10023, 10025, 10026, 10027, 10028, 10030, 10036, 10038, 10040, 10043, 10044, 10045, 10047, 10048, 10049, 10051, 10053, 10055, 10056, 10057, 10060, 10061, 10064, 10067, 10068, 10070, 10071, 10072, 10074, 10079, 10081, 10083, 10088, 10091, 10095, 10096, 10097, 10101, 10103, 10105, 10106, 10109, 10110, 10111, 10113, 10116, 10118, 10120, 10122, 10125, 10126, 10127, 10131, 10134, 10137, 10138, 10144, 10147, 10149, 10151, 10152, 10155, 10156, 10159, 10160, 10169, 10172, 10174, 10175, 10178, 10181, 10186, 10188, 10189, 10190, 10191, 10192, 10196, 10199, 10203, 10204, 10210, 10211, 10216, 10218, 10221, 10224, 10225, 10226, 10229, 10230, 10231, 10232, 10234, 10239, 10241, 10244, 10252, 10253, 10257, 10258, 10259, 10261, 10266, 10272, 10276, 10062, 10065, 10069, 10075, 10077, 10078, 10080, 10082, 10084, 10086, 10087, 10089, 10090, 10092, 10093, 10094, 10098, 10099, 10100, 10102, 10104, 10107, 10112, 10114, 10117, 10119, 10121, 10123, 10124, 10129, 10130, 10132, 10133, 10135, 10139, 10140, 10141, 10142, 10143, 10145, 10148, 10150, 10153, 10154, 10157, 10161, 10163, 10164, 10165, 10166, 10167, 10170, 10173, 10176, 10177, 10179, 10182, 10183, 10184, 10187, 10193, 10194, 10195, 10197, 10198, 10200, 10201, 10202, 10205, 10206, 10207, 10209, 10212, 10213, 10214, 10215, 10219, 10220, 10222, 10223, 10227, 10228, 10233, 10235, 10236, 10237, 10240, 10242, 10243, 10245, 10247, 10248, 10249, 10251, 10254, 10255, 10256, 10260, 10262, 10263, 10264, 10265, 10267, 10268, 10269, 10270, 10271, 10273, 10274, 10275, 10277, 10278, 10279, 10282, 10285, 10287, 10291, 10292, 10297, 10299, 10301, 10304, 10306, 10308, 10310, 10314, 10317, 10318, 10320, 10322, 10327, 10329, 10330, 10333, 10335, 10336, 10337, 10340, 10342, 10348, 10350, 10351, 10354, 10358, 10359, 10360, 10362, 10366, 10369, 10372, 10373, 10374, 10376, 10378, 10383, 10385, 10391, 10398, 10403, 10407, 10410, 10413, 10415, 10419, 10422, 10425, 10427, 10428, 10429, 10430, 10432, 10433, 10434, 10437, 10438, 10439, 10442, 10443, 10445, 10446, 10447, 10448, 10452, 10453, 10454, 10455, 10456, 10460, 10463, 10466, 10467, 10469, 10470, 10473, 10475, 10477, 10480, 10484, 10488, 10490, 10494, 10495, 10497, 10501, 10502, 10503, 10507, 10508, 10510, 10517, 10518, 10520, 10522, 10524, 10525, 10528, 10529, 10533, 10536, 10537, 10540, 10541, 10545, 10547, 10551, 10553, 10556, 10559, 10560, 10563, 10564, 10565, 10568, 10571, 10574, 10576, 10579, 10581, 10583, 10588, 10589, 10590, 10592, 10593, 10596, 10597, 10601, 10602, 10603, 10605, 10607, 10609, 10610, 10612, 10613, 10617, 10618, 10621, 10624, 10627, 10630, 10632, 10634, 10637, 10638, 10639, 10640, 10641, 10643, 10645, 10647, 10653, 10655, 10657, 10659, 10661, 10662, 10663, 10664, 10665, 10666, 10667, 10668, 10669, 10672, 10673, 10674, 10675, 10280, 10283, 10286, 10288, 10290, 10293, 10295, 10298, 10300, 10302, 10305, 10307, 10309, 10311, 10312, 10313, 10315, 10319, 10321, 10323, 10325, 10326, 10328, 10331, 10338, 10341, 10343, 10344, 10345, 10346, 10347, 10349, 10352, 10355, 10356, 10357, 10361, 10363, 10365, 10367, 10370, 10375, 10377, 10379, 10380, 10381, 10382, 10384, 10386, 10387, 10388, 10390, 10392, 10394, 10395, 10399, 10401, 10402, 10404, 10406, 10408, 10411, 10412, 10414, 10416, 10417, 10418, 10420, 10423, 10426, 10431, 10435, 10440, 10444, 10449, 10451, 10457, 10459, 10461, 10462, 10464, 10465, 10468, 10471, 10476, 10478, 10481, 10483, 10485, 10487, 10489, 10491, 10492, 10493, 10498, 10499, 10500, 10504, 10506, 10509, 10511, 10513, 10514, 10515, 10516, 10519, 10521, 10523, 10526, 10530, 10531, 10532, 10534, 10535, 10538, 10539, 10542, 10543, 10544, 10546, 10548, 10550, 10552, 10554, 10557, 10558, 10561, 10566, 10569, 10572, 10573, 10577, 10578, 10580, 10582, 10584, 10586, 10594, 10598, 10600, 10604, 10606, 10611, 10614, 10616, 10619, 10622, 10625, 10626, 10628, 10631, 10633, 10635, 10642, 10644, 10646, 10648, 10649, 10650, 10651, 10652, 10654, 10656, 10658, 10660, 10670, 10671, 10676, 10678, 10684, 10679, 10681, 10682, 10683, 10685, 10687, 10688, 10689, 10690, 10691, 10693, 10696, 10699, 10703, 10704, 10709, 10711, 10712, 10713, 10720, 10721, 10722, 10724, 10725, 10726, 10728, 10729, 10734, 10740, 10742, 10743, 10744, 10745, 10746, 10748, 10749, 10751, 10754, 10758, 10759, 10760, 10764, 10768, 10769, 10772, 10775, 10780, 10781, 10783, 10786, 10791, 10796, 10801, 10808, 10817, 10818, 10819, 10821, 10823, 10826, 10827, 10829, 10830, 10834, 10843, 10844, 10847, 10848, 10849, 10853, 10856, 10858, 10866, 10869, 10872, 10874, 10877, 10878, 10879, 10882, 10884, 10885, 10889, 10892, 10893, 10896, 10900, 10901, 10903, 10905, 10907, 10909, 10910, 10911, 10914, 10916, 10919, 10926, 10930, 10932, 10933, 10934, 10938, 10941, 10942, 10943, 10944, 10946, 10947, 10953, 10955, 10956, 10958, 10959, 10962, 10967, 10968, 10972, 10975, 10977, 10978, 10981, 10984, 10985, 10988, 10992, 10995, 10997, 10999, 11000, 11001, 11006, 11009, 11013, 11016, 11020, 11025, 11033, 11036, 11040, 11041, 11042, 11043, 11045, 11046, 11048, 11052, 11055, 11060, 11061, 11062, 11064, 11065, 11067, 11070, 11071, 11072, 11078, 11079, 11081, 11085, 11093, 10694, 10697, 10700, 10702, 10705, 10707, 10710, 10714, 10716, 10717, 10718, 10719, 10723, 10727, 10730, 10732, 10733, 10735, 10737, 10738, 10739, 10741, 10747, 10750, 10752, 10755, 10757, 10761, 10762, 10763, 10765, 10767, 10770, 10773, 10776, 10778, 10779, 10782, 10784, 10788, 10789, 10790, 10792, 10793, 10794, 10798, 10799, 10800, 10802, 10804, 10805, 10806, 10807, 10809, 10811, 10812, 10813, 10814, 10815, 10816, 10820, 10822, 10824, 10831, 10833, 10835, 10837, 10838, 10839, 10840, 10841, 10842, 10845, 10846, 10850, 10851, 10854, 10857, 10859, 10860, 10861, 10862, 10863, 10864, 10865, 10868, 10870, 10871, 10873, 10875, 10880, 10881, 10883, 10886, 10888, 10890, 10894, 10897, 10899, 10902, 10904, 10906, 10908, 10912, 10915, 10917, 10920, 10922, 10924, 10925, 10927, 10928, 10929, 10931, 10935, 10937, 10939, 10945, 10948, 10950, 10951, 10952, 10954, 10957, 10960, 10963, 10965, 10966, 10969, 10970, 10971, 10973, 10976, 10979, 10980, 10982, 10986, 10987, 10989, 10991, 10993, 10996, 10998, 11002, 11004, 11005, 11007, 11010, 11012, 11014, 11015, 11017, 11019, 11021, 11022, 11023, 11026, 11027, 11028, 11029, 11030, 11031, 11032, 11034, 11037, 11039, 11044, 11047, 11049, 11050, 11051, 11053, 11054, 11056, 11058, 11059, 11063, 11066, 11068, 11069, 11073, 11074, 11075, 11076, 11077, 11080, 11082, 11083, 11084, 11086, 11087, 11088, 11089, 11090, 11091, 11092, 11094, 11376, 11381, 11382, 11383, 11384, 11387, 11397, 11401, 11405, 11408, 11414, 11418, 11421, 11422, 11424, 11427, 11429, 11430, 11377, 11379, 11380, 11385, 11386, 11388, 11390, 11391, 11392, 11394, 11395, 11396, 11398, 11399, 11400, 11402, 11403, 11404, 11406, 11409, 11410, 11411, 11412, 11415, 11416, 11417, 11419, 11423, 11425, 11428, 11431, 11432, 11433, 11434, 11438, 11442, 11443, 11447, 11449, 11450, 11452, 11456, 11459, 11463, 11464, 11467, 11468, 11472, 11477, 11480, 11481, 11482, 11483, 11484, 11488, 11489, 11493, 11498, 11502, 11504, 11505, 11506, 11507, 11508, 11509, 11512, 11513, 11514, 11517, 11520, 11522, 11523, 11524, 11526, 11528, 11532, 11534, 11435, 11439, 11444, 11445, 11446, 11448, 11451, 11453, 11457, 11458, 11460, 11461, 11462, 11465, 11466, 11469, 11473, 11474, 11475, 11476, 11478, 11479, 11485, 11486, 11487, 11490, 11494, 11497, 11499, 11500, 11501, 11503, 11510, 11511, 11515, 11518, 11519, 11521, 11525, 11527, 11529, 11535, 11539, 11540, 11541, 11548, 11550, 11551, 11552, 11555, 11556, 11557, 11560, 11561, 11562, 11568, 11569, 11571, 11572, 11573, 11577, 11536, 11542, 11545, 11546, 11547, 11549, 11553, 11554, 11563, 11566, 11570, 11574, 11578, 11585, 11586, 11590, 11591, 11592, 11595, 11596, 11597, 11600, 11579, 11582, 11587, 11593, 11594, 11598, 11601, 11602, 11606, 11607, 11608, 11609, 11616, 11618, 11622, 11626, 11628, 11632, 11633, 11603, 11610, 11613, 11614, 11615, 11617, 11619, 11623, 11627, 11629, 11634, 11635, 11640, 11641, 11642, 11643, 11647, 11648, 11654, 11655, 11656, 11657, 11658, 11636, 11639, 11644, 11645, 11646, 11649, 11652, 11653, 11659, 11663, 11664, 11665, 11666, 11670, 11671, 11672, 11673, 11677, 11681, 11687, 11690, 11694, 11696, 11697, 11701, 11705, 11709, 11713, 11719, 11723, 11729, 11733, 11739, 11744, 11745, 11748, 11749, 11751, 11755, 11759, 11763, 11770, 11772, 11774, 11776, 11778, 11782, 11785, 11660, 11667, 11674, 11675, 11676, 11678, 11682, 11685, 11686, 11688, 11689, 11691, 11692, 11693, 11695, 11698, 11699, 11700, 11702, 11706, 11710, 11716, 11720, 11724, 11725, 11727, 11728, 11730, 11731, 11732, 11734, 11735, 11736, 11737, 11738, 11740, 11743, 11746, 11747, 11750, 11752, 11756, 11761, 11762, 11764, 11765, 11767, 11768, 11769, 11773, 11775, 11777, 11779, 11783, 11784, 11786, 11790, 11791, 11792, 11787, 11793, 11796, 11800, 11802, 11803, 11805, 11810, 11818, 11819, 11823, 11824, 11827, 11828, 11829, 11833, 11836, 11837, 11839, 11840, 11847, 11850, 11852, 11857, 11860, 11864, 11866, 11797, 11801, 11804, 11806, 11809, 11811, 11814, 11815, 11817, 11820, 11825, 11830, 11835, 11841, 11844, 11845, 11846, 11848, 11851, 11853, 11856, 11858, 11861, 11862, 11863, 11865, 11867, 11871, 11876, 11878, 11882, 11888, 11891, 11894, 11868, 11872, 11875, 11877, 11879, 11883, 11886, 11887, 11889, 11890, 11892, 11893, 11895, 11898, 11902, 11903, 11904, 11908, 11909, 11911, 11912, 11913, 11914, 11915, 11917, 11918, 11922, 11926, 11927, 11930, 11932, 11933, 11937, 11941, 11942, 11946, 11947, 11948, 11949, 11950, 11951, 11952, 11955, 11959, 11968, 11972, 11976, 11978, 11979, 11980, 11981, 11986, 11988, 11989, 11991, 11992, 11995, 11997, 11998, 12001, 12002, 12004, 12005, 11899, 11905, 11910, 11916, 11919, 11923, 11924, 11925, 11928, 11929, 11931, 11934, 11938, 11943, 11953, 11954, 11956, 11960, 11963, 11964, 11967, 11969, 11973, 11977, 11982, 11985, 11987, 11990, 11993, 11994, 11996, 11999, 12000, 12003, 12006, 12011, 12015, 12016, 12017, 12021, 12022, 12023, 12024, 12025, 12026, 12027, 12031, 12034, 12042, 12043, 12045, 12049, 12050, 12051, 12054, 12062, 12063, 12064, 12066, 12067, 12068, 12070, 12072, 12076, 12082, 12085, 12086, 12089, 12090, 12093, 12094, 12095, 12096, 12097, 12098, 12101, 12103, 12107, 12108, 12111, 12112, 12114, 12118, 12119, 12120, 12128, 12007, 12010, 12012, 12020, 12028, 12032, 12033, 12035, 12038, 12039, 12044, 12046, 12052, 12055, 12056, 12057, 12058, 12059, 12060, 12061, 12065, 12069, 12071, 12073, 12077, 12080, 12081, 12084, 12087, 12088, 12091, 12099, 12100, 12102, 12104, 12109, 12110, 12113, 12115, 12121, 12122, 12123, 12124, 12125, 12127, 12129, 12130, 12135, 12136, 12141, 12144, 12147, 12148, 12149, 12153, 12159, 12160, 12131, 12134, 12137, 12138, 12139, 12140, 12142, 12143, 12145, 12146, 12150, 12154, 12157, 12158, 12161, 12162, 12163, 12164, 12168, 12171, 12176, 12181, 12187, 12190, 12194, 12196, 12197, 12199, 12201, 12202, 12209, 12213, 12216, 12220, 12221, 12223, 12225, 12226, 12231, 12233, 12239, 12243, 12244, 12250, 12254, 12256, 12257, 12259, 12266, 12270, 12271, 12272, 12274, 12276, 12277, 12278, 12280, 12284, 12285, 12288, 12289, 12290, 12291, 12295, 12296, 12302, 12308, 12313, 12317, 12321, 12322, 12323, 12324, 12325, 12327, 12328, 12330, 12331, 12332, 12336, 12337, 12339, 12343, 12346, 12349, 12353, 12354, 12355, 12359, 12361, 12363, 12367, 12369, 12370, 12372, 12376, 12377, 12379, 12380, 12381, 12382, 12383, 12385, 12389, 12393, 12398, 12400, 12402, 12403, 12406, 12408, 12409, 12410, 12412, 12415, 12417, 12419, 12422, 12424, 12429, 12430, 12432, 12433, 12435, 12436, 12437, 12441, 12445, 12448, 12449, 12454, 12458, 12459, 12460, 12165, 12169, 12170, 12172, 12175, 12177, 12180, 12182, 12185, 12186, 12188, 12191, 12195, 12198, 12200, 12203, 12206, 12207, 12208, 12210, 12214, 12217, 12222, 12224, 12227, 12228, 12229, 12230, 12232, 12234, 12237, 12238, 12240, 12241, 12242, 12245, 12248, 12249, 12251, 12255, 12258, 12260, 12262, 12263, 12264, 12265, 12267, 12268, 12269, 12273, 12279, 12281, 12286, 12287, 12292, 12297, 12300, 12303, 12306, 12307, 12309, 12312, 12314, 12318, 12326, 12333, 12338, 12340, 12341, 12342, 12345, 12347, 12348, 12352, 12356, 12360, 12362, 12364, 12371, 12373, 12378, 12386, 12390, 12394, 12397, 12401, 12404, 12405, 12411, 12413, 12418, 12420, 12423, 12425, 12428, 12438, 12439, 12440, 12442, 12443, 12446, 12450, 12453, 12455, 12461, 12465, 12467, 12468, 12472, 12474, 12477, 12480, 12484, 12486, 12488, 12489, 12490, 12493, 12495, 12499, 12501, 12504, 12506, 12462, 12469, 12475, 12478, 12481, 12483, 12485, 12487, 12492, 12494, 12496, 12497, 12498, 12500, 12502, 12505, 12507, 12511, 12517, 12520, 12522, 12523, 12524, 12528, 12530, 12534, 12535, 12536, 12537, 12541, 12542, 12547, 12550, 12551, 12552, 12554, 12555, 12560, 12564, 12565, 12569, 12571, 12574, 12579, 12581, 12586, 12590, 12592, 12593, 12594, 12596, 12600, 12601, 12602, 12604, 12610, 12613, 12614, 12615, 12616, 12620, 12626, 12630, 12508, 12512, 12515, 12518, 12521, 12525, 12529, 12531, 12538, 12543, 12546, 12548, 12549, 12553, 12556, 12559, 12561, 12566, 12570, 12572, 12573, 12575, 12578, 12582, 12585, 12587, 12595, 12597, 12599, 12603, 12605, 12608, 12609, 12611, 12617, 12618, 12621, 12624, 12625, 12627, 12631, 12636, 12637, 12638, 12639, 12643, 12647, 12648, 12652, 12654, 12660, 12664, 12666, 12670, 12672, 12675, 12677, 12680, 12686, 12691, 12692, 12695, 12699, 12700, 12701, 12703, 12705, 12709, 12710, 12714, 12715, 12716, 12718, 12719, 12720, 12724, 12725, 12728, 12732, 12738, 12739, 12743, 12744, 12745, 12747, 12748, 12752, 12757, 12763, 12764, 12766, 12767, 12768, 12771, 12776, 12777, 12781, 12785, 12787, 12788, 12791, 12792, 12796, 12797, 12800, 12804, 12808, 12813, 12815, 12816, 12817, 12822, 12825, 12828, 12831, 12833, 12834, 12837, 12839, 12841, 12842, 12632, 12635, 12640, 12641, 12644, 12649, 12653, 12655, 12658, 12661, 12662, 12663, 12665, 12667, 12671, 12673, 12678, 12679, 12681, 12682, 12683, 12684, 12685, 12687, 12688, 12689, 12690, 12693, 12694, 12696, 12702, 12704, 12706, 12712, 12713, 12717, 12721, 12726, 12729, 12730, 12731, 12733, 12736, 12737, 12740, 12746, 12749, 12750, 12751, 12753, 12754, 12755, 12756, 12758, 12760, 12761, 12762, 12765, 12769, 12770, 12772, 12775, 12778, 12782, 12786, 12789, 12790, 12793, 12794, 12795, 12798, 12799, 12801, 12805, 12809, 12812, 12814, 12818, 12821, 12823, 12824, 12826, 12827, 12832, 12835, 12836, 12838, 12840, 12843, 12844, 12845, 12849, 12850, 12854, 12857, 12862, 12866, 12867, 12868, 12870, 12872, 12880, 12881, 12884, 12885, 12889, 12890, 12892, 12896, 12898, 12899, 12903, 12907, 12910, 12913, 12919, 12920, 12921, 12923, 12928, 12932, 12938, 12942, 12945, 12948, 12950, 12951, 12953, 12959, 12846, 12851, 12855, 12858, 12861, 12863, 12869, 12871, 12873, 12876, 12877, 12878, 12879, 12882, 12883, 12886, 12887, 12888, 12891, 12893, 12894, 12895, 12900, 12901, 12902, 12904, 12908, 12909, 12911, 12912, 12914, 12917, 12918, 12924, 12927, 12929, 12933, 12936, 12937, 12939, 12943, 12949, 12954, 12957, 12958, 12960, 12961, 12965, 12969, 12975, 12977, 12962, 12966, 12967, 12968, 12970, 12971, 12972, 12973, 12974, 12976, 12978, 12981, 12982, 12986, 12989, 12991, 12992, 12993, 12995, 12999, 13001, 12983, 12987, 12996, 12997, 12998, 13000, 13002, 13005, 13009, 13013, 13017, 13019, 13025, 13029, 13030, 13032, 13033, 13034, 13037, 13040, 13042, 13043, 13044, 13048, 13049, 13051, 13052, 13053, 13057, 13062, 13064, 13065, 13066, 13067, 13072, 13073, 13076, 13078, 13082, 13083, 13085, 13087, 13088, 13089, 13092, 13096, 13100, 13101, 13102, 13105, 13108, 13109, 13110, 13114, 13117, 13118, 13124, 13129, 13131, 13132, 13138, 13144, 13146, 13147, 13148, 13152, 13156, 13159, 13164, 13167, 13168, 13170, 13171, 13172, 13173, 13174, 13184, 13185, 13006, 13010, 13014, 13018, 13020, 13021, 13022, 13023, 13024, 13026, 13031, 13035, 13036, 13038, 13039, 13041, 13045, 13050, 13054, 13058, 13061, 13063, 13068, 13069, 13070, 13071, 13074, 13075, 13077, 13079, 13084, 13086, 13090, 13091, 13093, 13097, 13104, 13107, 13111, 13115, 13119, 13121, 13122, 13123, 13125, 13126, 13127, 13128, 13130, 13133, 13137, 13139, 13142, 13143, 13145, 13149, 13153, 13157, 13158, 13160, 13163, 13165, 13166, 13169, 13175, 13176, 13177, 13178, 13179, 13180, 13181, 13182, 13183, 13186, 13189, 13190, 13191, 13195, 13196, 13197, 13199, 13200, 13204, 13206, 13192, 13198, 13201, 13207, 13212, 13213, 13226, 13228, 13231, 13235, 13240, 13245, 13247, 13248, 13250, 13254, 13256, 13258, 13264, 13265, 13268, 13269, 13273, 13274, 13277, 13279, 13280, 13281, 13286, 13208, 13211, 13214, 13217, 13220, 13222, 13224, 13225, 13227, 13229, 13232, 13233, 13234, 13237, 13239, 13241, 13242, 13244, 13246, 13249, 13251, 13255, 13257, 13259, 13262, 13263, 13266, 13267, 13270, 13275, 13276, 13282, 13285, 13641, 13645, 13646, 13649, 13650, 13652, 13653, 13654, 13655, 13658, 13659, 13642, 13647, 13648, 13656, 13660, 13661, 13664, 13669, 13670, 13671, 13672, 13673, 13675, 13676, 13677, 13681, 13683, 13685, 13687, 13689, 13691, 13693, 13696, 13665, 13668, 13674, 13678, 13682, 13684, 13686, 13688, 13690, 13692, 13694, 13695, 13697, 13701, 13702, 13703, 13709, 13713, 13714, 13715, 13719, 13721, 13722, 13726, 13728, 13732, 13735, 13740, 13698, 13704, 13705, 13706, 13707, 13708, 13710, 13716, 13717, 13718, 13720, 13723, 13724, 13725, 13727, 13729, 13733, 13734, 13736, 13739, 13741, 13744, 13745, 13749, 13751, 13752, 13753, 13754, 13758, 13762, 13765, 13766, 13768, 13772, 13773, 13774, 13777, 13778, 13779, 13783, 13785, 13790, 13791, 13797, 13802, 13803, 13805, 13806, 13807, 13809, 13812, 13814, 13816, 13817, 13818, 13819, 13820, 13823, 13824, 13826, 13828, 13746, 13755, 13759, 13763, 13764, 13767, 13769, 13775, 13776, 13780, 13784, 13786, 13788, 13789, 13792, 13795, 13796, 13798, 13800, 13804, 13808, 13813, 13815, 13821, 13822, 13829, 13832, 13837, 13841, 13844, 13845, 13846, 13849, 13854, 13855, 13856, 13857, 13861, 13865, 13869, 13871, 13875, 13879, 13880, 13833, 13836, 13838, 13843, 13847, 13850, 13853, 13858, 13862, 13866, 13870, 13872, 13876, 13881, 13882, 13883, 13889, 13894, 13902, 13903, 13910, 13911, 13914, 13915, 13916, 13928, 13929, 13930, 13931, 13935, 13936, 13937, 13944, 13947, 13948, 13950, 13960, 13961, 13962, 13964, 13965, 13966, 13968, 13970, 13971, 13972, 13976, 13978, 13884, 13887, 13890, 13893, 13895, 13898, 13900, 13904, 13905, 13906, 13907, 13908, 13909, 13912, 13913, 13917, 13920, 13921, 13922, 13923, 13924, 13925, 13926, 13932, 13938, 13941, 13942, 13943, 13945, 13946, 13949, 13953, 13954, 13956, 13957, 13958, 13959, 13963, 13967, 13969, 13974, 13975, 13977, 13980, 13981, 13988, 13989, 13990, 13992, 13994, 13995, 13999, 13982, 13985, 13986, 13987, 13991, 13993, 13996, 14000, 14001, 14002, 14003, 14004, 14009, 14014, 14017, 14020, 14024, 14026, 14029, 14035, 14036, 14040, 14043, 14045, 14051, 14057, 14058, 14059, 14063, 14065, 14066, 14067, 14068, 14069, 14070, 14071, 14073, 14074, 14078, 14079, 14080, 14081, 14082, 14083, 14084, 14085, 14087, 14094, 14095, 14100, 14108, 14109, 14113, 14114, 14118, 14120, 14121, 14122, 14130, 14133, 14138, 14141, 14142, 14143, 14147, 14005, 14008, 14010, 14013, 14015, 14018, 14021, 14025, 14027, 14028, 14030, 14033, 14034, 14037, 14038, 14039, 14041, 14042, 14044, 14046, 14049, 14050, 14052, 14055, 14056, 14060, 14064, 14072, 14077, 14086, 14088, 14089, 14090, 14091, 14092, 14093, 14096, 14097, 14098, 14099, 14101, 14102, 14103, 14104, 14105, 14106, 14107, 14110, 14115, 14123, 14126, 14127, 14132, 14134, 14135, 14136, 14137, 14139, 14140, 14144, 14145, 14148, 14151, 14155, 14157, 14161, 14166, 14171, 14175, 14183, 14187, 14190, 14192, 14194, 14195, 14196, 14200, 14201, 14152, 14156, 14158, 14162, 14165, 14167, 14170, 14172, 14176, 14179, 14180, 14182, 14184, 14185, 14186, 14188, 14189, 14191, 14193, 14197, 14198, 14199, 14202, 14203, 14204, 14210, 14211, 14216, 14217, 14223, 14226, 14228, 14229, 14230, 14233, 14235, 14239, 14241, 14243, 14244, 14250, 14254, 14255, 14256, 14257, 14260, 14261, 14262, 14267, 14268, 14269, 14273, 14274, 14277, 14281, 14284, 14286, 14289, 14292, 14293, 14297, 14299, 14301, 14304, 14305, 14306, 14312, 14316, 14320, 14322, 14324, 14328, 14329, 14331, 14337, 14342, 14344, 14346, 14347, 14349, 14350, 14353, 14356, 14361, 14363, 14364, 14365, 14366, 14205, 14208, 14212, 14215, 14218, 14221, 14224, 14225, 14227, 14231, 14236, 14240, 14242, 14245, 14246, 14247, 14251, 14263, 14266, 14270, 14278, 14282, 14283, 14285, 14287, 14290, 14291, 14294, 14298, 14300, 14302, 14303, 14307, 14310, 14313, 14317, 14323, 14325, 14327, 14330, 14334, 14338, 14340, 14341, 14345, 14348, 14351, 14352, 14354, 14355, 14357, 14358, 14359, 14360, 14367, 14368, 14372, 14373, 14375, 14386, 14369, 14374, 14376, 14379, 14380, 14381, 14382, 14383, 14384 and SEQ ID NO:14385.

39. The method of claim 21, comprising in c) using primer oligonucleotides comprising one or more CpG; TpG or CpA dinucleotides; and further comprising in d) the use of at least one method selected from the group consisting of: hybridizing in at least one nucleic acid molecule or peptide nucleic acid molecule comprising a contiguous sequence at least 9 nucleotides in length that is complementary to, or hybridizes under stringent conditions to a sequence selected from the group consisting of SEQ ID NOS:304 to SEQ ID NO:535 and SEQ ID NOS:65 to SEQ ID NO:88, and complements thereof; hybridizing at least one nucleic acid molecule that is bound to a solid phase and comprises a contiguous sequence at least 9 nucleotides in length that is complementary to, or hybridizes under stringent conditions to a sequence selected from the group consisting of SEQ ID NOS:304 to SEQ ID NO:535 and SEQ ID NOS:65 to SEQ ID NO:88, and complements thereof; hybridizing at least one nucleic acid molecule comprising a contiguous sequence at least 9 nucleotides in length that is complementary to, or hybridizes under stringent conditions to a sequence selected from the group consisting of SEQ ID NOS:304 to SEQ ID NO:535 and SEQ ID NOS:65 to SEQ ID NO:88, and complements thereof, and extending at least one such hybridized nucleic acid molecule by at least one nucleotide base; and sequencing in d) of the amplificate.

40. The method of claim 21, comprising in c) use of at least one nucleic acid molecule or peptide nucleic acid molecule comprising in each case a contiguous sequence at least 9 nucleotides in length that is complementary to, or hybridizes under stringent conditions to a sequence selected from the group consisting of SEQ ID NOS:304 to SEQ ID NO:535 and SEQ ID NOS:65 to SEQ ID NO:88, and complements thereof, wherein said nucleic acid molecule or peptide nucleic acid molecule suppresses amplification of the nucleic acid to which it is hybridized; and further comprising in d) the use of at least one method selected from the group consisting of: hybridizing in at least one nucleic acid molecule or peptide nucleic acid molecule comprising a contiguous sequence at least 9 nucleotides in length that is complementary to, or hybridizes under stringent conditions to a sequence selected from the group consisting of SEQ ID NOS:304 to SEQ ID NO:535 and SEQ ID NOS:65 to SEQ ID NO:88, and complements thereof, hybridizing at least one nucleic acid molecule that is bound to a solid phase and comprises a contiguous sequence at least 9 nucleotides in length that is complementary to, or hybridizes stringent conditions to a sequence selected from the group consisting of SEQ ID NOS:304 to SEQ ID NO:535 and SEQ ID NOS:65 to SEQ ID NO:88, and complements thereof; hybridizing at least one nucleic acid molecule comprising a contiguous sequence at least 9 nucleotides in length that is complementary to, or hybridizes under stringent conditions to a sequence selected from the group consisting of SEQ ID NOS:304 to SEQ ID NO:535 and SEQ ID NOS:65 to SEQ ID NO:88, and complements thereof, and extending at least one such hybridized nucleic acid molecule by at least one nucleotide base; and sequencing in d) of the amplificate.

41. The method of claim 21, comprising in c) amplification by primer oligonucleotides comprising one or more CpG; TpG or CpA dinucleotides and further comprising in d) hybridizing at least one detectably labeled nucleic acid molecule comprising a contiguous sequence at least 9 nucleotides in length that is complementary to, or hybridizes under stringent conditions to a sequence selected from the group consisting of SEQ ID NOS:304 to SEQ ID NO:535 and SEQ ID NOS:65 to SEQ ID NO:88.

42. The method of claim 21, comprising in c) the use of at least one nucleic acid molecule or peptide nucleic acid molecule comprising in each case a contiguous sequence at least 9 nucleotides in length that is complementary to, or hybridizes under stringent conditions to a sequence selected from the group consisting of SEQ ID NOS:304 to SEQ ID NO:535 and SEQ ID NOS:65 to SEQ ID NO:88, and complements thereof, wherein said nucleic acid molecule or peptide nucleic acid molecule suppresses amplification of the nucleic acid to which it is hybridized, and further comprising in d) hybridizing at least one detectably labeled nucleic acid molecule comprising a contiguous sequence at least 9 nucleotides in length that is complementary to, or hybridizes under stringent conditions to a sequence selected from the group consisting of SEQ ID NOS:304 to SEQ ID NO:535 and SEQ ID NOS:65 to SEQ ID NO:88.

43. The method of claim 39, wherein the primer oligonucleotides of c) are selected from the group consisting SEQ ID NOS:2754, 2757, 2759, 2767, 2768, 2772, 2776, 2779, 2784, 2785, 2786, 2789, 2791, 2792, 2794, 2797, 2798, 2801, 2805, 2806, 2809, 2811, 2815, 2817, 2824, 2830, 2832, 2833, 2834, 2838, 2840, 2843, 2846, 2850, 2851, 2853, 2855, 2859, 2866, 2867, 2870, 2871, 2876, 2878, 2881, 2885, 2886, 2892, 2893, 2895, 2896, 2898, 2904, 2912, 2915, 2917, 2919, 2922, 2923, 2929, 2931, 2939, 2941, 2944, 2946, 2948, 2950, 2955, 2956, 2957, 2960, 2962, 2965, 2966, 2967, 2968, 2969, 2971, 2975, 2976, 2977, 2978, 2979, 2980, 2981, 2984, 2988, 2989, 2990, 2992, 2994, 2997, 2999, 3001, 3002, 3004, 3006, 3007, 3008, 3010, 3013, 3014, 3016, 3017, 3018, 3020, 3022, 3025, 2752, 2755, 2760, 2762, 2763, 2764, 2765, 2769, 2771, 2773, 2775, 2777, 2780, 2781, 2782, 2783, 2787, 2788, 2790, 2793, 2795, 2796, 2800, 2802, 2803, 2804, 2808, 2810, 2812, 2814, 2816, 2818, 2820, 2821, 2823, 2825, 2827, 2828, 2829, 2831, 2835, 2836, 2837, 2839, 2841, 2842, 2844, 2845, 2847, 2849, 2852, 2854, 2856, 2858, 2860, 2861, 2862, 2863, 2864, 2865, 2868, 2869, 2872, 2873, 2874, 2875, 2877, 2879, 2880, 2882, 2883, 2884, 2887, 2888, 2889, 2890, 2891, 2894, 2897, 2899, 2901, 2902, 2903, 2905, 2907, 2909, 2911, 2914, 2916, 2918, 2920, 2924, 2926, 2927, 2928, 2930, 2932, 2933, 2934, 2935, 2936, 2937, 2938, 2942, 2945, 2947, 2949, 2951, 2953, 2954, 2958, 2959, 2961, 2963, 2970, 2972, 2973, 2974, 2982, 2985, 2987, 2991, 2993, 2995, 2996, 2998, 3000, 3003, 3005, 3011, 3019, 3021, 3023, 3026, 3027, 3028, 3032, 3033, 3036, 3037, 3038, 3039, 3041, 3042, 3043, 3044, 3047, 3048, 3049, 3052, 3055, 3059, 3061, 3064, 3065, 3068, 3069, 3071, 3072, 3075, 3076, 3080, 3083, 3084, 3085, 3086, 3091, 3093, 3096, 3097, 3100, 3104, 3109, 3110, 3113, 3115, 3117, 3118, 3123, 3126, 3127, 3130, 3134, 3135, 3136, 3138, 3139, 3144, 3146, 3147, 3149, 3150, 3155, 3029, 3031, 3034, 3040, 3045, 3050, 3051, 3053, 3054, 3056, 3057, 3060, 3063, 3066, 3073, 3078, 3081, 3088, 3089, 3090, 3092, 3094, 3098, 3101, 3103, 3105, 3107, 3108, 3111, 3114, 3116, 3119, 3121, 3122, 3124, 3128, 3131, 3133, 3137, 3140, 3142, 3145, 3148, 3151, 3152, 3153, 3157, 3159, 3165, 3166, 3167, 3170, 3171, 3172, 3174, 3175, 3176, 3179, 3180, 3181, 3184, 3185, 3186, 3192, 3194, 3198, 3201, 3202, 3203, 3204, 3206, 3209, 3212, 3213, 3215, 3216, 3217, 3218, 3221, 3224, 3226, 3228, 3229, 3230, 3232, 3233, 3234, 3235, 3237, 3238, 3239, 3245, 3247, 3248, 3249, 3160, 3162, 3163, 3164, 3168, 3169, 3173, 3178, 3182, 3183, 3187, 3189, 3190, 3195, 3196, 3197, 3199, 3205, 3207, 3210, 3214, 3219, 3222, 3223, 3225, 3227, 3236, 3240, 3242, 3243, 3244, 3246, 3250, 3252, 3256, 3261, 3264, 3268, 3269, 3270, 3273, 3275, 3279, 3280, 3281, 3282, 3283, 3284, 3285, 3286, 3290, 3292, 3295, 3297, 3301, 3304, 3305, 3306, 3307, 3308, 3310, 3311, 3312, 3315, 3319, 3320, 3324, 3327, 3331, 3333, 3334, 3339, 3348, 3351, 3354, 3358, 3360, 3364, 3367, 3368, 3374, 3376, 3253, 3255, 3257, 3259, 3260, 3262, 3265, 3266, 3267, 3271, 3274, 3276, 3278, 3287, 3289, 3291, 3293, 3298, 3300, 3302, 3309, 3313, 3314, 3316, 3318, 3321, 3322, 3325, 3328, 3330, 3332, 3335, 3337, 3338, 3340, 3342, 3343, 3344, 3345, 3346, 3347, 3349, 3350, 3352, 3353, 3355, 3356, 3357, 3359, 3361, 3363, 3365, 3369, 3371, 3372, 3373, 3377, 3380, 3383, 3386, 3388, 3389, 3390, 3391, 3392, 3395, 3396, 3400, 3401, 3403, 3406, 3408, 3413, 3414, 3417, 3420, 3423, 3428, 3432, 3433, 3434, 3436, 3439, 3440, 3442, 3443, 3445, 3447, 3453, 3455, 3458, 3463, 3466, 3469, 3470, 3471, 3472, 3473, 3474, 3475, 3477, 3478, 3480, 3481, 3483, 3484, 3487, 3490, 3494, 3495, 3496, 3497, 3499, 3500, 3504, 3505, 3508, 3512, 3514, 3515, 3516, 3521, 3525, 3529, 3533, 3534, 3537, 3538, 3540, 3541, 3542, 3543, 3544, 3547, 3548, 3553, 3557, 3558, 3559, 3560, 3562, 3563, 3566, 3571, 3574, 3575, 3577, 3580, 3583, 3584, 3585, 3586, 3592, 3594, 3595, 3597, 3598, 3599, 3601, 3603, 3604, 3607, 3608, 3612, 3619, 3621, 3622, 3626, 3631, 3632, 3637, 3638, 3639, 3640, 3642, 3643, 3644, 3646, 3647, 3649, 3650, 3652, 3656, 3657, 3660, 3663, 3668, 3670, 3673, 3676, 3677, 3678, 3683, 3688, 3690, 3694, 3697, 3700, 3702, 3703, 3704, 3708, 3404, 3409, 3411, 3415, 3418, 3419, 3421, 3424, 3426, 3427, 3429, 3431, 3435, 3437, 3438, 3441, 3444, 3446, 3448, 3450, 3452, 3454, 3456, 3459, 3461, 3462, 3464, 3467, 3476, 3479, 3482, 3485, 3488, 3489, 3491, 3492, 3493, 3501, 3503, 3506, 3509, 3510, 3511, 3513, 3517, 3518, 3519, 3520, 3522, 3524, 3526, 3527, 3528, 3530, 3531, 3535, 3536, 3545, 3549, 3551, 3552, 3554, 3555, 3556, 3561, 3564, 3565, 3568, 3569, 3570, 3573, 3576, 3578, 3581, 3587, 3588, 3589, 3590, 3591, 3593, 3596, 3600, 3602, 3605, 3606, 3609, 3611, 3613, 3614, 3615, 3616, 3617, 3618, 3623, 3624, 3625, 3627, 3629, 3630, 3633, 3634, 3635, 3636, 3641, 3645, 3651, 3653, 3654, 3655, 3658, 3661, 3662, 3665, 3666, 3667, 3669, 3671, 3674, 3679, 3681, 3684, 3686, 3689, 3691, 3692, 3693, 3695, 3696, 3698, 3701, 3705, 3706, 3707, 3709, 3710, 3714, 3715, 3717, 3718, 3722, 3723, 3729, 3730, 3732, 3735, 3739, 3740, 3741, 3743, 3744, 3745, 3746, 3749, 3753, 3754, 3755, 3756, 3711, 3713, 3719, 3721, 3724, 3725, 3726, 3727, 3728, 3731, 3733, 3736, 3737, 3738, 3742, 3747, 3748, 3750, 3752, 3757, 3758, 3759, 3760, 3761, 3764, 3767, 3771, 3773, 3775, 3776, 3777, 3781, 3785, 3786, 3787, 3790, 3791, 3793, 3796, 3797, 3798, 3799, 3805, 3809, 3814, 3817, 3818, 3822, 3823, 3828, 3833, 3836, 3844, 3847, 3850, 3851, 3853, 3856, 3857, 3862, 3873, 3876, 3877, 3880, 3885, 3887, 3889, 3890, 3892, 3893, 3895, 3896, 3899, 3902, 3903, 3905, 3906, 3907, 3908, 3916, 3923, 3926, 3927, 3930, 3935, 3936, 3938, 3939, 3940, 3944, 3945, 3949, 3950, 3951, 3954, 3955, 3957, 3960, 3965, 3970, 3971, 3978, 3979, 3982, 3983, 3984, 3985, 3762, 3765, 3768, 3770, 3772, 3774, 3778, 3779, 3780, 3782, 3784, 3788, 3792, 3794, 3800, 3801, 3802, 3803, 3804, 3806, 3807, 3808, 3810, 3812, 3813, 3815, 3819, 3820, 3821, 3824, 3826, 3827, 3829, 3831, 3832, 3834, 3837, 3838, 3839, 3840, 3842, 3845, 3848, 3852, 3854, 3858, 3860, 3861, 3863, 3864, 3865, 3866, 3867, 3868, 3869, 3870, 3871, 3872, 3874, 3875, 3878, 3881, 3883, 3884, 3886, 3888, 3891, 3894, 3897, 3898, 3900, 3901, 3904, 3909, 3911, 3914, 3915, 3917, 3919, 3920, 3921, 3922, 3924, 3928, 3931, 3933, 3934, 3937, 3941, 3942, 3943, 3947, 3948, 3952, 3958, 3959, 3961, 3962, 3963, 3964, 3966, 3968, 3972, 3974, 3975, 3976, 3980, 3981, 3986, 3987, 3990, 3993, 3994, 3997, 4000, 4003, 4004, 4006, 4012, 4015, 4017, 4020, 4024, 4027, 4029, 4031, 4032, 4033, 4037, 4038, 4040, 4042, 4047, 4048, 4050, 4051, 4052, 4054, 4055, 4058, 4063, 4066, 4069, 4070, 4072, 4073, 4076, 4078, 4079, 4082, 4083, 4084, 4085, 4086, 4090, 4093, 4094, 4095, 4096, 4099, 4100, 4104, 4106, 4113, 4116, 4119, 4120, 4124, 4127, 4130, 4134, 4135, 4136, 4138, 4142, 4145, 4146, 4149, 4150, 4152, 4153, 4159, 4160, 4161, 4163, 4168, 4169, 4171, 4173, 4176, 4180, 4181, 4185, 4189, 4191, 4192, 4194, 4197, 4198, 4199, 4201, 4206, 4207, 4208, 4213, 4219, 4220, 4223, 4224, 4225, 4228, 4231, 4232, 4233, 4237, 4238, 4242, 4243, 4246, 4247, 4251, 4254, 4255, 4256, 4258, 3988, 3991, 3995, 3998, 4001, 4005, 4007, 4009, 4010, 4011, 4013, 4016, 4018, 4019, 4021, 4022, 4023, 4025, 4028, 4034, 4035, 4039, 4043, 4045, 4046, 4049, 4056, 4059, 4061, 4064, 4065, 4067, 4068, 4071, 4074, 4075, 4077, 4080, 4087, 4088, 4089, 4092, 4098, 4101, 4102, 4105, 4108, 4109, 4110, 4111, 4112, 4114, 4115, 4117, 4121, 4122, 4123, 4125, 4128, 4129, 4131, 4132, 4133, 4137, 4139, 4141, 4144, 4148, 4151, 4154, 4156, 4157, 4162, 4165, 4166, 4167, 4170, 4172, 4174, 4177, 4179, 4182, 4184, 4186, 4188, 4190, 4195, 4196, 4202, 4204, 4205, 4209, 4211, 4214, 4216, 4217, 4218, 4221, 4226, 4229, 4234, 4236, 4239, 4241, 4244, 4245, 4248, 4249, 4252, 4257, 4259, 4260, 4261, 4262, 4266, 4267, 4268, 4271, 4272, 4275, 4276, 4279, 4281, 4282, 4284, 4285, 4287, 4289, 4290, 4292, 4295, 4297, 4299, 4301, 4306, 4310, 4316, 4317, 4318, 4321, 4323, 4325, 4328, 4334, 4335, 4337, 4341, 4342, 4343, 4344, 4348, 4350, 4351, 4352, 4354, 4357, 4358, 4359, 4364, 4365, 4366, 4370, 4371, 4372, 4373, 4376, 4378, 4381, 4383, 4384, 4386, 4388, 4396, 4397, 4399, 4400, 4403, 4405, 4407, 4409, 4412, 4415, 4416, 4417, 4424, 4426, 4429, 4433, 4435, 4437, 4442, 4443, 4447, 4450, 4451, 4452, 4455, 4457, 4460, 4461, 4462, 4465, 4466, 4469, 4470, 4474, 4478, 4481, 4484, 4488, 4491, 4494, 4495, 4497, 4498, 4504, 4506, 4509, 4510, 4511, 4514, 4516, 4518, 4520, 4521, 4523, 4525, 4528, 4530, 4533, 4534, 4535, 4538, 4540, 4542, 4545, 4547, 4548, 4553, 4554, 4555, 4556, 4557, 4562, 4564, 4567, 4568, 4569, 4579, 4580, 4582, 4584, 4587, 4589, 4593, 4596, 4597, 4598, 4600, 4601, 4602, 4605, 4606, 4607, 4609, 4610, 4613, 4614, 4616, 4618, 4621, 4624, 4626, 4627, 4628, 4631, 4632, 4636, 4639, 4641, 4644, 4645, 4648, 4263, 4265, 4269, 4270, 4273, 4274, 4277, 4280, 4283, 4286, 4288, 4291, 4293, 4296, 4298, 4300, 4302, 4303, 4304, 4305, 4307, 4308, 4309, 4311, 4313, 4315, 4319, 4322, 4324, 4326, 4327, 4330, 4331, 4332, 4333, 4336, 4338, 4340, 4345, 4347, 4349, 4353, 4355, 4360, 4361, 4362, 4367, 4368, 4369, 4374, 4375, 4377, 4379, 4382, 4385, 4387, 4389, 4390, 4391, 4392, 4393, 4394, 4395, 4398, 4401, 4406, 4408, 4410, 4411, 4413, 4418, 4420, 4422, 4423, 4425, 4427, 4428, 4430, 4432, 4434, 4436, 4438, 4440, 4441, 4444, 4446, 4448, 4453, 4454, 4456, 4458, 4463, 4464, 4467, 4471, 4472, 4473, 4475, 4476, 4477, 4479, 4480, 4482, 4485, 4486, 4487, 4489, 4490, 4492, 4496, 4499, 4501, 4502, 4503, 4505, 4507, 4508, 4512, 4515, 4517, 4519, 4522, 4524, 4529, 4531, 4536, 4537, 4539, 4541, 4543, 4546, 4549, 4551, 4558, 4559, 4560, 4561, 4563, 4565, 4570, 4571, 4572, 4573, 4574, 4575, 4576, 4578, 4581, 4583, 4585, 4586, 4588, 4590, 4592, 4595, 4599, 4603, 4611, 4612, 4615, 4617, 4619, 4620, 4622, 4630, 4633, 4634, 4635, 4638, 4640, 4642, 4643, 4646, 4647, 4649, 4652, 4655, 4659, 4661, 4663, 4664, 4665, 4668, 4671, 4674, 4675, 4676, 4678, 4680, 4683, 4686, 4690, 4696, 4700, 4703, 4704, 4706, 4709, 4711, 4714, 4715, 4717, 4718, 4719, 4720, 4721, 4726, 4727, 4730, 4732, 4738, 4742, 4745, 4749, 4750, 4753, 4755, 4759, 4763, 4768, 4769, 4772, 4773, 4776, 4778, 4779, 4782, 4784, 4789, 4790, 4794, 4797, 4801, 4805, 4807, 4813, 4814, 4819, 4821, 4822, 4827, 4829, 4833, 4834, 4835, 4837, 4838, 4841, 4842, 4843, 4844, 4847, 4849, 4850, 4852, 4853, 4859, 4860, 4861, 4865, 4867, 4868, 4869, 4870, 4873, 4876, 4877, 4878, 4879, 4883, 4885, 4889, 4891, 4892, 4894, 4895, 4897, 4898, 4903, 4906, 4911, 4912, 4918, 4919, 4920, 4924, 4927, 4929, 4932, 4934, 4941, 4942, 4945, 4948, 4949, 4950, 4650, 4653, 4656, 4658, 4660, 4662, 4666, 4667, 4669, 4670, 4672, 4677, 4681, 4684, 4685, 4687, 4688, 4689, 4691, 4693, 4694, 4695, 4697, 4699, 4701, 4702, 4705, 4707, 4708, 4716, 4722, 4724, 4728, 4731, 4733, 4735, 4736, 4737, 4739, 4741, 4744, 4746, 4748, 4751, 4754, 4756, 4758, 4760, 4761, 4764, 4766, 4767, 4770, 4771, 4774, 4777, 4780, 4783, 4785, 4786, 4787, 4788, 4791, 4792, 4793, 4795, 4798, 4800, 4802, 4804, 4806, 4808, 4810, 4811, 4812, 4815, 4816, 4817, 4818, 4820, 4823, 4824, 4825, 4828, 4830, 4832, 4836, 4839, 4840, 4845, 4846, 4848, 4851, 4854, 4855, 4856, 4857, 4858, 4862, 4864, 4871, 4872, 4874, 4875, 4881, 4882, 4884, 4886, 4887, 4890, 4893, 4896, 4899, 4900, 4901, 4902, 4904, 4905, 4907, 4908, 4909, 4910, 4913, 4915, 4917, 4921, 4922, 4923, 4925, 4926, 4928, 4930, 4935, 4936, 4937, 4938, 4940, 4943, 4944, 4946, 4947, 4951, 4952, 4953, 4954, 4956, 4957, 4960, 4963, 4967, 4970, 4971, 4972, 4976, 4977, 4985, 4986, 4987, 4989, 4991, 4992, 4997, 4999, 5002, 5003, 5004, 5006, 5010, 5013, 5014, 5015, 5017, 5018, 5019, 5020, 5021, 5024, 5025, 5027, 5031, 5032, 5033, 5037, 5040, 5041, 5042, 5043, 4958, 4961, 4964, 4966, 4968, 4969, 4973, 4974, 4975, 4978, 4979, 4980, 4981, 4982, 4983, 4984, 4988, 4990, 4993, 4995, 4996, 4998, 5000, 5005, 5007, 5009, 5011, 5016, 5022, 5026, 5028, 5030, 5034, 5036, 5038, 5039, 5044, 5047, 5049, 5050, 5052, 5054, 5055, 5057, 5060, 5061, 5064, 5045, 5048, 5051, 5053, 5056, 5058, 5062, 5065, 5066, 5069, 5073, 5077, 5080, 5083, 5087, 5093, 5096, 5099, 5100, 5103, 5104, 5106, 5111, 5116, 5119, 5120, 5125, 5128, 5132, 5134, 5135, 5137, 5139, 5140, 5142, 5144, 5148, 5149, 5150, 5155, 5157, 5158, 5160, 5166, 5168, 5170, 5171, 5173, 5176, 5177, 5179, 5184, 5187, 5188, 5190, 5193, 5195, 5198, 5201, 5204, 5208, 5211, 5215, 5216, 5217, 5220, 5221, 5222, 5224, 5226, 5229, 5230, 5231, 5232, 5234, 5237, 5242, 5244, 5245, 5246, 5247, 5249, 5250, 5252, 5254, 5255, 5256, 5261, 5262, 5264, 5265, 5273, 5274, 5276, 5278, 5279, 5281, 5284, 5285, 5286, 5287, 5288, 5289, 5292, 5296, 5300, 5303, 5304, 5307, 5308, 5309, 5313, 5315, 5317, 5318, 5322, 5323, 5326, 5329, 5330, 5333, 5336, 5337, 5341, 5343, 5348, 5349, 5352, 5354, 5355, 5358, 5359, 5361, 5362, 5363, 5364, 5365, 5367, 5369, 5370, 5372, 5375, 5377, 5379, 5382, 5385, 5387, 5393, 5394, 5395, 5398, 5400, 5404, 5407, 5408, 5409, 5412, 5413, 5414, 5416, 5418, 5421, 5424, 5426, 5428, 5431, 5432, 5433, 5434, 5435, 5437, 5440, 5441, 5443, 5448, 5450, 5451, 5454, 5455, 5458, 5460, 5461, 5464, 5468, 5470, 5471, 5474, 5475, 5477, 5482, 5484, 5485, 5487, 5490, 5491, 5492, 5494, 5496, 5498, 5499, 5500, 5501, 5502, 5503, 5504, 5506, 5509, 5510, 5512, 5516, 5517, 5518, 5524, 5525, 5526, 5528, 5531, 5533, 5534, 5535, 5536, 5537, 5540, 5542, 5544, 5545, 5546, 5549, 5550, 5552, 5553, 5559, 5561, 5566, 5569, 5572, 5573, 5575, 5577, 5578, 5579, 5580, 5581, 5582, 5588, 5593, 5595, 5596, 5598, 5600, 5601, 5603, 5604, 5605, 5608, 5614, 5615, 5616, 5619, 5622, 5624, 5625, 5628, 5629, 5633, 5634, 5637, 5638, 5639, 5643, 5644, 5645, 5647, 5648, 5649, 5650, 5654, 5662, 5664, 5067, 5070, 5072, 5074, 5075, 5076, 5078, 5081, 5084, 5086, 5088, 5090, 5091, 5094, 5097, 5101, 5105, 5107, 5109, 5110, 5112, 5114, 5115, 5117, 5121, 5123, 5124, 5126, 5129, 5131, 5136, 5143, 5145, 5147, 5151, 5153, 5156, 5159, 5161, 5162, 5163, 5164, 5165, 5167, 5169, 5172, 5174, 5175, 5180, 5181, 5182, 5183, 5185, 5186, 5189, 5191, 5194, 5196, 5199, 5200, 5202, 5203, 5205, 5207, 5209, 5210, 5212, 5214, 5218, 5219, 5223, 5225, 5227, 5233, 5235, 5238, 5239, 5240, 5241, 5248, 5251, 5253, 5257, 5259, 5260, 5263, 5266, 5268, 5269, 5270, 5271, 5272, 5280, 5282, 5290, 5291, 5293, 5295, 5297, 5299, 5301, 5306, 5310, 5311, 5312, 5314, 5316, 5319, 5321, 5324, 5327, 5331, 5332, 5334, 5338, 5339, 5340, 5342, 5344, 5346, 5347, 5351, 5353, 5356, 5360, 5366, 5368, 5371, 5373, 5376, 5378, 5380, 5383, 5388, 5389, 5391, 5392, 5396, 5399, 5401, 5403, 5405, 5410, 5415, 5417, 5419, 5420, 5422, 5425, 5427, 5429, 5436, 5438, 5442, 5444, 5445, 5446, 5447, 5449, 5452, 5456, 5457, 5459, 5462, 5465, 5466, 5467, 5469, 5472, 5478, 5480, 5481, 5486, 5488, 5493, 5495, 5497, 5505, 5507, 5508, 5511, 5513, 5515, 5519, 5521, 5522, 5527, 5529, 5532, 5538, 5539, 5541, 5543, 5548, 5551, 5554, 5555, 5556, 5557, 5558, 5560, 5562, 5563, 5564, 5565, 5567, 5568, 5570, 5571, 5574, 5576, 5583, 5585, 5586, 5587, 5589, 5591, 5592, 5594, 5597, 5599, 5602, 5606, 5609, 5611, 5612, 5618, 5620, 5623, 5626, 5627, 5630, 5632, 5635, 5640, 5642, 5646, 5651, 5652, 5656, 5657, 5659, 5660, 5661, 5663, 5665, 5667, 5670, 5672, 5673, 5676, 5678, 5679, 5681, 5682, 5683, 5686, 5687, 5688, 5690, 5694, 5697, 5698, 5699, 5700, 5701, 5704, 5708, 5709, 5711, 5713, 5714, 5717, 5721, 5723, 5724, 5727, 5728, 5733, 5734, 5735, 5736, 5739, 5740, 5741, 5742, 5743, 5668, 5671, 5674, 5677, 5680, 5684, 5689, 5691, 5693, 5696, 5702, 5705, 5707, 5710, 5712, 5715, 5718, 5720, 5722, 5725, 5729, 5730, 5731, 5732, 5737, 5744, 5747, 5750, 5753, 5759, 5762, 5763, 5770, 5775, 5777, 5778, 5780, 5782, 5785, 5787, 5791, 5792, 5793, 5794, 5797, 5801, 5803, 5808, 5810, 5812, 5814, 5816, 5817, 5824, 5832, 5833, 5834, 5835, 5838, 5840, 5841, 5844, 5849, 5853, 5854, 5857, 5859, 5860, 5862, 5863, 5865, 5868, 5874, 5882, 5883, 5885, 5887, 5894, 5895, 5896, 5897, 5902, 5904, 5906, 5909, 5912, 5915, 5918, 5919, 5920, 5922, 5923, 5926, 5927, 5928, 5930, 5932, 5933, 5934, 5935, 5939, 5940, 5946, 5947, 5948, 5949, 5952, 5954, 5955, 5956, 5958, 5959, 5961, 5962, 5964, 5965, 5968, 5970, 5971, 5972, 5973, 5977, 5978, 5980, 5983, 5986, 5987, 5992, 5993, 5996, 5997, 6000, 6002, 6003, 6004, 6005, 6006, 6008, 6009, 6010, 6011, 6012, 6013, 6017, 6018, 6019, 6020, 6025, 6027, 6030, 6033, 6035, 6036, 6039, 6041, 6042, 6045, 6049, 6050, 6051, 6055, 6059, 6063, 6064, 6065, 6067, 6070, 6072, 6073, 6075, 6077, 6078, 6081, 5745, 5748, 5751, 5754, 5756, 5758, 5760, 5764, 5766, 5767, 5768, 5769, 5771, 5773, 5774, 5776, 5779, 5781, 5783, 5786, 5788, 5789, 5790, 5795, 5796, 5798, 5800, 5802, 5804, 5806, 5807, 5809, 5811, 5813, 5818, 5820, 5821, 5822, 5823, 5825, 5826, 5827, 5828, 5830, 5831, 5836, 5837, 5839, 5842, 5843, 5845, 5846, 5847, 5848, 5850, 5852, 5855, 5856, 5858, 5861, 5864, 5866, 5867, 5870, 5871, 5872, 5873, 5875, 5876, 5877, 5878, 5879, 5880, 5881, 5884, 5886, 5888, 5889, 5890, 5891, 5892, 5893, 5898, 5899, 5900, 5903, 5905, 5907, 5910, 5913, 5916, 5921, 5924, 5929, 5931, 5936, 5937, 5938, 5942, 5943, 5944, 5945, 5950, 5953, 5957, 5960, 5963, 5966, 5969, 5975, 5976, 5981, 5984, 5988, 5990, 5991, 5994, 5998, 5999, 6001, 6007, 6014, 6015, 6016, 6021, 6023, 6024, 6026, 6028, 6031, 6032, 6034, 6037, 6038, 6040, 6043, 6046, 6048, 6053, 6054, 6056, 6058, 6060, 6062, 6066, 6068, 6074, 6076, 6079, 6083, 6084, 6085, 6089, 6090, 6093, 6096, 6098, 6100, 6106, 6110, 6111, 6114, 6118, 6121, 6127, 6130, 6133, 6135, 6137, 6138, 6141, 6143, 6145, 6148, 6150, 6151, 6152, 6153, 6154, 6156, 6159, 6160, 6162, 6163, 6166, 6167, 6168, 6169, 6170, 6171, 6172, 6175, 6177, 6180, 6183, 6187, 6188, 6190, 6193, 6194, 6195, 6196, 6198, 6201, 6202, 6204, 6207, 6211, 6212, 6214, 6215, 6216, 6218, 6219, 6220, 6222, 6225, 6226, 6230, 6235, 6239, 6241, 6242, 6243, 6244, 6245, 6247, 6250, 6252, 6254, 6259, 6260, 6261, 6264, 6265, 6268, 6270, 6273, 6275, 6278, 6280, 6282, 6286, 6287, 6288, 6291, 6293, 6298, 6299, 6300, 6302, 6303, 6305, 6307, 6308, 6312, 6313, 6314, 6315, 6316, 6317, 6318, 6320, 6321, 6323, 6325, 6327, 6328, 6334, 6335, 6337, 6340, 6341, 6344, 6348, 6350, 6353, 6354, 6357, 6360, 6362, 6364, 6368, 6372, 6374, 6377, 6378, 6383, 6386, 6392, 6394, 6398, 6400, 6404, 6405, 6409, 6410, 6411, 6417, 6418, 6424, 6426, 6429, 6431, 6432, 6433, 6435, 6436, 6437, 6438, 6440, 6442, 6445, 6446, 6448, 6449, 6452, 6455, 6457, 6458, 6461, 6462, 6463, 6464, 6465, 6470, 6473, 6475, 6478, 6480, 6481, 6484, 6485, 6486, 6489, 6491, 6492, 6494, 6498, 6502, 6504, 6505, 6507, 6511, 6513, 6514, 6086, 6088, 6091, 6094, 6097, 6099, 6101, 6103, 6105, 6108, 6112, 6115, 6116, 6117, 6119, 6120, 6122, 6123, 6125, 6126, 6128, 6131, 6132, 6134, 6136, 6139, 6142, 6144, 6146, 6149, 6155, 6157, 6161, 6164, 6173, 6174, 6176, 6178, 6181, 6182, 6184, 6186, 6189, 6191, 6192, 6197, 6199, 6200, 6205, 6206, 6208, 6210, 6213, 6221, 6223, 6224, 6227, 6229, 6231, 6232, 6233, 6234, 6236, 6237, 6238, 6240, 6246, 6248, 6251, 6253, 6255, 6256, 6257, 6258, 6262, 6266, 6269, 6271, 6272, 6274, 6276, 6277, 6281, 6283, 6284, 6285, 6289, 6292, 6294, 6295, 6296, 6297, 6301, 6304, 6306, 6309, 6310, 6311, 6319, 6322, 6324, 6326, 6329, 6330, 6331, 6333, 6336, 6338, 6342, 6345, 6347, 6349, 6351, 6355, 6356, 6358, 6359, 6361, 6365, 6367, 6369, 6371, 6373, 6375, 6376, 6379, 6381, 6382, 6384, 6387, 6388, 6389, 6390, 6393, 6395, 6397, 6399, 6401, 6402, 6403, 6406, 6407, 6412, 6413, 6414, 6415, 6416, 6419, 6420, 6421, 6422, 6423, 6425, 6427, 6428, 6434, 6441, 6443, 6444, 6447, 6450, 6451, 6453, 6459, 6460, 6466, 6467, 6468, 6469, 6471, 6472, 6474, 6476, 6479, 6482, 6487, 6490, 6493, 6496, 6497, 6499, 6500, 6501, 6503, 6506, 6508, 6510, 6512, 6515, 6518, 6521, 6522, 6523, 6524, 6528, 6532, 6535, 6539, 6549, 6560, 6561, 6564, 6566, 6567, 6570, 6573, 6576, 6577, 6578, 6579, 6583, 6584, 6585, 6586, 6587, 6590, 6591, 6594, 6596, 6597, 6603, 6605, 6608, 6609, 6610, 6611, 6612, 6615, 6625, 6630, 6632, 6633, 6634, 6638, 6639, 6642, 6643, 6644, 6647, 6650, 6655, 6657, 6658, 6659, 6661, 6663, 6664, 6665, 6669, 6671, 6674, 6677, 6678, 6679, 6680, 6681, 6682, 6686, 6687, 6688, 6689, 6690, 6691, 6693, 6695, 6696, 6697, 6699, 6701, 6703, 6704, 6705, 6706, 6707, 6708, 6710, 6711, 6712, 6713, 6717, 6718, 6720, 6721, 6722, 6725, 6727, 6732, 6734, 6735, 6739, 6741, 6745, 6748, 6751, 6755, 6759, 6762, 6764, 6767, 6770, 6772, 6773, 6774, 6777, 6778, 6782, 6785, 6786, 6787, 6790, 6791, 6794, 6795, 6796, 6798, 6800, 6802, 6803, 6806, 6811, 6814, 6815, 6818, 6824, 6829, 6834, 6835, 6842, 6516, 6519, 6525, 6526, 6527, 6529, 6531, 6533, 6536, 6537, 6538, 6540, 6541, 6542, 6543, 6544, 6545, 6546, 6547, 6548, 6550, 6551, 6552, 6553, 6554, 6556, 6558, 6562, 6563, 6565, 6568, 6571, 6572, 6575, 6580, 6582, 6588, 6589, 6592, 6595, 6598, 6599, 6600, 6601, 6602, 6604, 6606, 6607, 6613, 6614, 6617, 6618, 6619, 6620, 6621, 6623, 6624, 6627, 6628, 6629, 6631, 6635, 6640, 6641, 6645, 6646, 6649, 6651, 6652, 6653, 6656, 6660, 6662, 6666, 6668, 6670, 6672, 6675, 6676, 6683, 6685, 6692, 6694, 6698, 6700, 6702, 6709, 6714, 6715, 6716, 6719, 6723, 6726, 6728, 6730, 6731, 6736, 6738, 6740, 6742, 6744, 6746, 6747, 6749, 6752, 6754, 6756, 6757, 6758, 6760, 6761, 6765, 6769, 6775, 6779, 6781, 6783, 6784, 6789, 6792, 6797, 6799, 6801, 6804, 6805, 6807, 6809, 6810, 6812, 6816, 6817, 6819, 6821, 6822, 6825, 6827, 6828, 6830, 6831, 6832, 6833, 6836, 6837, 6838, 6839, 6840, 6841, 6843, 6517, 6520, 6530, 6534, 6555, 6557, 6559, 6569, 6574, 6581, 6593, 6616, 6622, 6626, 6636, 6637, 6648, 6654, 6667, 6673, 6684, 6724, 6729, 6733, 6737, 6743, 6750, 6753, 6763, 6766, 6768, 6771, 6776, 6780, 6788, 6793, 6808, 6813, 6820, 6823, 6826, 6844, 6848, 6850, 6852, 6854, 6857, 6859, 6861, 6862, 6865, 6868, 6870, 6871, 6872, 6874, 6875, 6876, 6880, 6883, 6886, 6887, 6888, 6890, 6891, 6894, 6896, 6897, 6898, 6899, 6900, 6901, 6902, 6904, 6905, 6906, 6910, 6912, 6917, 6920, 6845, 6847, 6849, 6851, 6853, 6855, 6858, 6860, 6863, 6866, 6869, 6873, 6877, 6879, 6881, 6882, 6884, 6889, 6892, 6893, 6895, 6907, 6908, 6909, 6911, 6913, 6915, 6916, 6918, 6921, 6924, 6927, 6928, 6933, 6935, 6937, 6939, 6940, 6943, 6946, 6947, 6948, 6949, 6951, 6953, 6954, 6955, 6959, 6961, 6964, 6965, 6968, 6969, 6972, 6973, 6976, 6979, 6980, 6922, 6925, 6929, 6930, 6931, 6932, 6934, 6936, 6942, 6944, 6945, 6950, 6952, 6956, 6957, 6958, 6960, 6962, 6963, 6966, 6967, 6970, 6971, 6974, 6975, 6977, 6981, 6983, 6986, 6992, 6995, 6998, 7002, 7006, 7013, 7017, 7022, 7024, 7027, 7030, 7032, 7036, 7037, 7040, 7050, 7052, 7055, 7056, 7058, 7059, 7060, 7064, 7067, 7072, 7074, 7076, 7077, 7084, 7085, 7086, 7087, 7088, 7089, 7090, 7091, 7096, 7097, 7100, 7102, 7109, 7110, 7113, 7114, 7115, 7118, 7121, 7123, 7124, 7131, 7133, 7135, 7136, 7138, 7139, 7140, 7144, 7146, 7148, 7149, 7158, 7159, 7160, 7163, 7165, 7166, 7168, 7172, 7175, 7178, 7180, 7181, 7183, 7185, 7186, 7187, 7192, 7194, 7199, 7202, 7203, 7204, 7205, 7207, 7208, 7213, 7214, 7216, 7220, 7221, 7227, 7228, 7230, 7233, 7235, 7237, 7239, 7243, 7245, 7246, 7248, 7249, 7251, 7255, 7256, 7260, 7263, 7264, 7265, 7266, 7268, 7269, 7272, 7276, 7277, 7278, 7279, 7280, 7281, 7283, 7284, 7287, 7291, 7295, 7299, 7302, 7303, 7306, 7309, 7310, 7311, 7314, 7315, 7320, 7321, 7324, 7325, 7329, 7331, 7332, 7334, 7336, 7339, 7340, 7341, 7344, 7350, 7353, 7355, 7358, 7360, 7362, 7372, 7374, 7375, 7378, 7381, 7385, 7387, 7390, 7391, 7392, 7394, 7397, 7401, 7402, 7405, 7410, 7413, 7415, 7416, 7417, 7420, 6984, 6987, 6989, 6990, 6991, 6993, 6996, 6999, 7001, 7003, 7005, 7007, 7009, 7010, 7011, 7012, 7014, 7016, 7018, 7020, 7023, 7025, 7026, 7028, 7029, 7031, 7033, 7034, 7035, 7038, 7039, 7041, 7042, 7043, 7044, 7045, 7046, 7047, 7048, 7049, 7051, 7053, 7054, 7057, 7061, 7062, 7063, 7065, 7066, 7068, 7070, 7071, 7073, 7075, 7078, 7080, 7081, 7082, 7083, 7092, 7093, 7094, 7095, 7098, 7101, 7103, 7105, 7106, 7107, 7108, 7111, 7112, 7116, 7119, 7122, 7125, 7126, 7127, 7128, 7129, 7130, 7132, 7134, 7137, 7141, 7142, 7143, 7147, 7150, 7152, 7154, 7155, 7156, 7157, 7161, 7167, 7170, 7171, 7173, 7174, 7176, 7177, 7179, 7182, 7184, 7188, 7189, 7190, 7191, 7193, 7195, 7196, 7197, 7198, 7200, 7206, 7210, 7211, 7212, 7215, 7217, 7218, 7219, 7222, 7223, 7224, 7225, 7226, 7229, 7231, 7232, 7236, 7240, 7241, 7242, 7244, 7247, 7250, 7253, 7254, 7257, 7258, 7259, 7261, 7262, 7267, 7270, 7271, 7273, 7274, 7275, 7282, 7285, 7289, 7290, 7292, 7293, 7294, 7296, 7297, 7298, 7301, 7304, 7307, 7308, 7312, 7316, 7317, 7318, 7319, 7322, 7326, 7328, 7330, 7333, 7335, 7337, 7342, 7345, 7347, 7348, 7349, 7351, 7354, 7356, 7357, 7359, 7361, 7363, 7364, 7365, 7366, 7367, 7368, 7369, 7370, 7371, 7373, 7376, 7379, 7382, 7383, 7384, 7386, 7388, 7389, 7393, 7395, 7398, 7400, 7403, 7404, 7407, 7408, 7409, 7411, 7419, 7421, 7422, 7425, 7427, 7435, 7438, 7439, 7440, 7442, 7444, 7448, 7449, 7456, 7459, 7462, 7463, 7465, 7466, 7467, 7470, 7471, 7474, 7476, 7477, 7480, 7481, 7485, 7486, 7489, 7490, 7493, 7496, 7500, 7503, 7508, 7512, 7518, 7519, 7520, 7522, 7524, 7525, 7527, 7528, 7529, 7532, 7540, 7542, 7543, 7545, 7549, 7552, 7554, 7423, 7426, 7428, 7430, 7431, 7432, 7433, 7434, 7436, 7445, 7446, 7447, 7450, 7451, 7452, 7453, 7454, 7455, 7457, 7460, 7464, 7468, 7472, 7475, 7478, 7479, 7482, 7483, 7484, 7487, 7488, 7492, 7494, 7495, 7497, 7498, 7499, 7501, 7505, 7506, 7507, 7509, 7510, 7511, 7513, 7515, 7516, 7517, 7521, 7523, 7526, 7530, 7533, 7534, 7535, 7536, 7537, 7538, 7539, 7541, 7544, 7546, 7547, 7548, 7550, 7555, 7558, 7559, 7560, 7565, 7566, 7567, 7570, 7571, 7573, 7574, 7575, 7576, 7577, 7578, 7579, 7580, 7581, 7582, 7585, 7586, 7587, 7588, 7589, 7590, 7596, 7597, 7598, 7600, 7603, 7606, 7609, 7610, 7615, 7618, 7620, 7621, 7623, 7627, 7629, 7633, 7635, 7636, 7643, 7647, 7651, 7655, 7661, 7666, 7672, 7674, 7676, 7677, 7682, 7683, 7685, 7687, 7689, 7690, 7691, 7694, 7699, 7701, 7702, 7704, 7707, 7709, 7711, 7712, 7713, 7714, 7716, 7718, 7720, 7726, 7728, 7729, 7733, 7734, 7735, 7736, 7738, 7740, 7741, 7744, 7746, 7747, 7748, 7749, 7750, 7751, 7752, 7753, 7754, 7755, 7756, 7758, 7556, 7561, 7563, 7568, 7583, 7584, 7591, 7593, 7594, 7595, 7599, 7601, 7604, 7607, 7608, 7611, 7613, 7614, 7616, 7617, 7619, 7622, 7624, 7626, 7628, 7631, 7637, 7638, 7639, 7640, 7641, 7642, 7644, 7645, 7646, 7649, 7650, 7652, 7654, 7656, 7657, 7658, 7659, 7660, 7662, 7663, 7665, 7667, 7669, 7670, 7671, 7673, 7675, 7678, 7679, 7680, 7681, 7684, 7686, 7688, 7692, 7695, 7697, 7698, 7700, 7703, 7705, 7708, 7710, 7715, 7717, 7719, 7721, 7722, 7723, 7724, 7725, 7727, 7730, 7731, 7732, 7737, 7739, 7742, 7743, 7745, 7757, 7759, 7760, 7761, 7764, 7770, 7774, 7775, 7778, 7782, 7786, 7788, 7795, 7797, 7799, 7805, 7807, 7809, 7810, 7811, 7815, 7817, 7819, 7820, 7822, 7823, 7824, 7828, 7832, 7834, 7837, 7839, 7843, 7845, 7851, 7852, 7857, 7860, 7863, 7865, 7868, 7874, 7881, 7885, 7889, 7892, 7894, 7896, 7900, 7902, 7904, 7907, 7909, 7910, 7913, 7917, 7922, 7925, 7926, 7928, 7933, 7934, 7937, 7941, 7945, 7946, 7948, 7950, 7951, 7952, 7953, 7954, 7955, 7956, 7957, 7963, 7964, 7968, 7971, 7972, 7973, 7976, 7979, 7980, 7981, 7982, 7983, 7985, 7986, 7987, 7988, 7991, 7762, 7765, 7767, 7768, 7771, 7773, 7776, 7779, 7781, 7783, 7784, 7785, 7789, 7791, 7792, 7793, 7794, 7796, 7798, 7800, 7802, 7803, 7808, 7812, 7813, 7814, 7816, 7818, 7821, 7825, 7827, 7829, 7830, 7833, 7835, 7836, 7838, 7840, 7841, 7842, 7844, 7846, 7847, 7848, 7849, 7853, 7854, 7855, 7856, 7858, 7861, 7864, 7866, 7869, 7870, 7871, 7872, 7873, 7875, 7877, 7878, 7879, 7880, 7882, 7884, 7886, 7888, 7890, 7897, 7899, 7903, 7905, 7912, 7914, 7916, 7918, 7919, 7920, 7921, 7923, 7929, 7931, 7932, 7936, 7938, 7939, 7940, 7942, 7943, 7944, 7947, 7949, 7958, 7960, 7962, 7965, 7967, 7969, 7970, 7974, 7977, 7989, 7990, 7992, 7995, 7996, 8000, 8003, 8006, 8007, 8010, 8012, 8015, 8016, 8018, 8019, 8026, 8027, 8030, 8034, 8035, 8038, 8039, 8043, 8044, 8046, 8049, 8050, 8052, 8053, 8055, 8056, 8062, 8064, 8066, 8067, 8068, 8069, 8070, 8071, 8074, 8076, 8077, 8078, 8079, 8080, 8081, 7993, 7997, 7999, 8001, 8004, 8005, 8008, 8009, 8011, 8013, 8017, 8020, 8021, 8022, 8023, 8024, 8025, 8028, 8031, 8033, 8036, 8040, 8042, 8047, 8051, 8054, 8057, 8059, 8060, 8061, 8065, 8072, 8073, 8075, 8082, 8083, 8084, 8085, 8087, 8088, 8089, 8090, 8093, 8095, 8098, 8100, 8101, 8102, 8104, 8107, 8110, 8111, 8114, 8115, 8116, 8118, 8122, 8124, 8126, 8127, 8129, 8132, 8134, 8136, 8138, 8142, 8143, 8144, 8146, 8151, 8157, 8160, 8163, 8165, 8168, 8169, 8170, 8173, 8174, 8175, 8176, 8178, 8181, 8185, 8187, 8188, 8189, 8190, 8191, 8193, 8194, 8200, 8203, 8206, 8208, 8209, 8212, 8214, 8216, 8217, 8220, 8222, 8224, 8228, 8230, 8091, 8094, 8096, 8099, 8103, 8105, 8108, 8112, 8113, 8117, 8119, 8121, 8123, 8125, 8128, 8130, 8131, 8133, 8135, 8137, 8139, 8145, 8147, 8148, 8149, 8150, 8152, 8153, 8154, 8155, 8156, 8158, 8161, 8164, 8166, 8167, 8171, 8177, 8179, 8180, 8182, 8183, 8184, 8186, 8192, 8195, 8197, 8198, 8199, 8201, 8202, 8204, 8207, 8210, 8213, 8218, 8221, 8223, 8225, 8227, 8229, 8231, 8232, 8235, 8236, 8237, 8238, 8244, 8245, 8247, 8250, 8251, 8253, 8254, 8255, 8256, 8258, 8259, 8260, 8263, 8267, 8269, 8270, 8273, 8274, 8277, 8280, 8281, 8289, 8292, 8293, 8294, 8295, 8296, 8297, 8298, 8301, 8305, 8306, 8310, 8311, 8312, 8315, 8317, 8318, 8322, 8323, 8324, 8327, 8328, 8329, 8330, 8333, 8336, 8339, 8340, 8347, 8349, 8350, 8352, 8353, 8356, 8359, 8360, 8366, 8369, 8370, 8372, 8374, 8376, 8377, 8379, 8381, 8382, 8383, 8233, 8239, 8240, 8242, 8243, 8246, 8248, 8252, 8257, 8261, 8264, 8266, 8268, 8271, 8275, 8278, 8282, 8284, 8285, 8286, 8287, 8288, 8291, 8299, 8302, 8303, 8304, 8307, 8309, 8313, 8314, 8316, 8319, 8321, 8325, 8326, 8331, 8332, 8334, 8335, 8337, 8341, 8342, 8343, 8344, 8345, 8346, 8348, 8351, 8354, 8357, 8361, 8362, 8363, 8364, 8365, 8367, 8371, 8373, 8375, 8378, 8384, 8387, 8390, 8391, 8397, 8398, 8401, 8402, 8405, 8406, 8409, 8414, 8418, 8419, 8422, 8425, 8428, 8431, 8432, 8433, 8435, 8437, 8440, 8444, 8449, 8452, 8454, 8455, 8457, 8462, 8464, 8466, 8468, 8469, 8472, 8475, 8476, 8478, 8479, 8481, 8484, 8487, 8488, 8490, 8493, 8496, 8497, 8498, 8501, 8505, 8508, 8511, 8513, 8515, 8517, 8518, 8519, 8521, 8522, 8523, 8526, 8528, 8530, 8531, 8532, 8534, 8536, 8541, 8544, 8547, 8551, 8554, 8556, 8558, 8560, 8562, 8563, 8566, 8567, 8568, 8570, 8571, 8574, 8575, 8576, 8577, 8580, 8581, 8585, 8588, 8591, 8594, 8601, 8602, 8603, 8608, 8609, 8613, 8614, 8617, 8618, 8619, 8620, 8623, 8624, 8628, 8629, 8630, 8633, 8634, 8635, 8636, 8638, 8643, 8645, 8648, 8654, 8657, 8658, 8659, 8660, 8661, 8662, 8666, 8670, 8672, 8674, 8676, 8681, 8683, 8686, 8688, 8689, 8691, 8692, 8693, 8695, 8696, 8700, 8701, 8702, 8703, 8704, 8705, 8709, 8716, 8717, 8719, 8722, 8725, 8727, 8728, 8729, 8732, 8733, 8734, 8735, 8736, 8385, 8388, 8392, 8394, 8395, 8399, 8403, 8407, 8410, 8411, 8412, 8413, 8415, 8416, 8420, 8423, 8424, 8426, 8429, 8434, 8436, 8438, 8442, 8445, 8446, 8447, 8448, 8450, 8451, 8456, 8458, 8460, 8461, 8463, 8465, 8467, 8470, 8473, 8474, 8477, 8480, 8482, 8485, 8486, 8489, 8491, 8492, 8494, 8499, 8500, 8502, 8503, 8504, 8506, 8510, 8512, 8514, 8516, 8520, 8524, 8527, 8529, 8533, 8535, 8537, 8539, 8542, 8545, 8546, 8548, 8550, 8552, 8555, 8557, 8564, 8565, 8569, 8572, 8578, 8582, 8583, 8586, 8587, 8589, 8592, 8595, 8596, 8597, 8598, 8599, 8600, 8604, 8606, 8607, 8610, 8612, 8615, 8616, 8621, 8625, 8627, 8631, 8632, 8637, 8639, 8640, 8641, 8642, 8644, 8646, 8647, 8649, 8650, 8651, 8652, 8653, 8655, 8663, 8665, 8667, 8668, 8669, 8671, 8673, 8675, 8677, 8678, 8679, 8680, 8682, 8684, 8685, 8687, 8690, 8694, 8697, 8698, 8699, 8706, 8707, 8708, 8710, 8711, 8712, 8713, 8714, 8715, 8718, 8720, 8723, 8726, 8730, 8737, 8738, 8741, 8744, 8747, 8750, 8751, 8753, 8754, 8755, 8756, 8759, 8760, 8762, 8763, 8766, 8767, 8768, 8769, 8770, 8772, 8775, 8776, 8777, 8779, 8782, 8783, 8784, 8785, 8786, 8787, 8788, 8789, 8790, 8793, 8794, 8796, 8798, 8799, 8801, 8803, 8804, 8806, 8807, 8809, 8812, 8813, 8815, 8820, 8823, 8826, 8829, 8830, 8832, 8835, 8836, 8837, 8842, 8845, 8846, 8847, 8851, 8853, 8856, 8857, 8859, 8861, 8866, 8739, 8878, 8879, 8880, 8884, 8891, 8893, 8895, 8898, 8900, 8901, 8909, 8912, 8739, 8742, 8745, 8748, 8749, 8752, 8757, 8758, 8761, 8764, 8771, 8773, 8778, 8780, 8791, 8797, 8800, 8802, 8805, 8808, 8810, 8814, 8816, 8818, 8819, 8821, 8824, 8827, 8828, 8831, 8833, 8838, 8840, 8841, 8755, 8843, 8844, 8848, 8850, 8852, 8854, 8855, 8863, 8864, 8865, 8867, 8868, 8869, 8870, 8871, 8872, 8873, 8874, 8876, 8877, 8881, 8882, 8883, 8885, 8887, 8888, 8889, 8890, 8892, 8894, 8896, 8897, 8899, 8902, 8785, 8903, 8904, 8905, 8906, 8907, 8908, 8911, 8913, 8917, 8920, 8923, 8924, 8929, 8931, 8934, 8935, 8936, 8914, 8916, 8918, 8921, 8925, 8927, 8928, 8930, 8932, 8933, 8937, 8980, 8984, 8988, 8989, 8998, 9001, 9002, 9005, 9007, 9008, 9012, 9013, 9016, 9019, 9020, 9022, 9023, 9025, 9028, 9029, 9032, 9033, 9034, 9035, 9037, 9038, 9044, 9046, 9047, 9048, 9049, 9054, 8981, 8983, 8985, 8987, 8990, 8992, 8993, 8994, 8995, 8997, 8999, 9003, 9004, 9006, 9009, 9010, 9011, 9014, 9017, 9018, 9021, 9024, 9026, 9030, 9036, 9039, 9041, 9042, 9043, 9045, 9050, 9051, 9052, 9053, 9055, 9058, 9060, 9063, 9066, 9067, 9068, 9069, 9070, 9071, 9074, 9075, 9077, 9078, 9079, 9080, 9082, 9084, 9088, 9089, 9090, 9099, 9103, 9104, 9105, 9107, 9111, 9056, 9061, 9064, 9072, 9081, 9083, 9085, 9086, 9087, 9091, 9092, 9093, 9094, 9095, 9096, 9097, 9098, 9100, 9102, 9106, 9108, 9109, 9110, 9112, 9113, 9116, 9118, 9125, 9126, 9128, 9129, 9130, 9136, 9141, 9143, 9148, 9150, 9153, 9157, 9158, 9159, 9163, 9164, 9165, 9167, 9168, 9171, 9173, 9177, 9180, 9181, 9182, 9183, 9185, 9187, 9188, 9189, 9191, 9192, 9193, 9194, 9197, 9198, 9200, 9206, 9207, 9208, 9209, 9211, 9216, 9218, 9219, 9220, 9221, 9222, 9223, 9226, 9228, 9229, 9230, 9231, 9232, 9233, 9234, 9237, 9238, 9240, 9243, 9246, 9248, 9253, 9256, 9257, 9260, 9263, 9264, 9266, 9269, 9271, 9279, 9280, 9281, 9282, 9283, 9284, 9290, 9114, 9119, 9121, 9122, 9123, 9124, 9127, 9131, 9133, 9134, 9135, 9137, 9138, 9139, 9140, 9142, 9144, 9146, 9147, 9149, 9151, 9152, 9154, 9155, 9156, 9160, 9162, 9166, 9169, 9172, 9174, 9175, 9176, 9178, 9184, 9186, 9190, 9195, 9199, 9201, 9202, 9203, 9204, 9205, 9212, 9214, 9215, 9217, 9224, 9227, 9235, 9239, 9241, 9244, 9247, 9249, 9251, 9252, 9254, 9258, 9261, 9265, 9267, 9270, 9273, 9274, 9275, 9276, 9277, 9278, 9285, 9286, 9287, 9288, 9289, 9291, 9292, 9295, 9297, 9300, 9302, 9303, 9304, 9307, 9308, 9310, 9311, 9313, 9319, 9321, 9323, 9324, 9328, 9333, 9334, 9337, 9338, 9339, 9342, 9344, 9348, 9351, 9352, 9354, 9355, 9357, 9360, 9367, 9371, 9374, 9377, 9379, 9383, 9384, 9385, 9388, 9389, 9390, 9393, 9394, 9398, 9401, 9402, 9406, 9408, 9409, 9410, 9413, 9415, 9416, 9417, 9418, 9419, 9421, 9422, 9425, 9429, 9433, 9434, 9435, 9436, 9437, 9439, 9440, 9446, 9452, 9453, 9454, 9455, 9457, 9458, 9459, 9462, 9466, 9467, 9468, 9470, 9474, 9479, 9482, 9487, 9488, 9489, 9492, 9495, 9497, 9499, 9500, 9504, 9505, 9508, 9513, 9514, 9519, 9522, 9523, 9524, 9526, 9528, 9532, 9533, 9534, 9535, 9537, 9538, 9541, 9542, 9543, 9545, 9546, 9548, 9293, 9296, 9298, 9301, 9305, 9309, 9312, 9314, 9316, 9317, 9318, 9320, 9322, 9325, 9326, 9327, 9329, 9331, 9332, 9335, 9336, 9340, 9345, 9347, 9349, 9353, 9356, 9358, 9361, 9363, 9364, 9365, 9368, 9370, 9372, 9375, 9376, 9378, 9380, 9382, 9386, 9391, 9395, 9397, 9399, 9400, 9403, 9405, 9407, 9411, 9412, 9414, 9420, 9423, 9424, 9426, 9428, 9430, 9431, 9432, 9438, 9441, 9443, 9444, 9445, 9447, 9448, 9449, 9450, 9451, 9456, 9460, 9461, 9464, 9465, 9469, 9471, 9473, 9475, 9477, 9478, 9480, 9483, 9485, 9490, 9493, 9494, 9496, 9498, 9501, 9502, 9503, 9506, 9509, 9511, 9512, 9515, 9516, 9517, 9518, 9520, 9521, 9525, 9527, 9529, 9530, 9536, 9539, 9544, 9547, 9549, 9550, 9551, 9555, 9556, 9557, 9559, 9560, 9563, 9564, 9565, 9566, 9569, 9570, 9573, 9577, 9578, 9579, 9580, 9585, 9586, 9587, 9588, 9591, 9593, 9596, 9552, 9554, 9558, 9561, 9567, 9571, 9574, 9576, 9581, 9583, 9584, 9589, 9592, 9594, 9595, 9598, 9602, 9604, 9605, 9608, 9612, 9613, 9614, 9617, 9618, 9621, 9622, 9625, 9626, 9627, 9632, 9633, 9638, 9640, 9643, 9644, 9645, 9646, 9651, 9654, 9656, 9657, 9658, 9661, 9662, 9665, 9666, 9667, 9668, 9672, 9673, 9675, 9676, 9677, 9680, 9683, 9686, 9688, 9691, 9694, 9698, 9699, 9702, 9705, 9707, 9710, 9711, 9715, 9719, 9720, 9722, 9723, 9726, 9729, 9732, 9733, 9735, 9737, 9738, 9741, 9744, 9745, 9746, 9747, 9748, 9749, 9750, 9754, 9755, 9756, 9758, 9759, 9768, 9771, 9772, 9776, 9777, 9781, 9782, 9784, 9787, 9789, 9790, 9792, 9796, 9797, 9800, 9805, 9806, 9812, 9815, 9818, 9821, 9823, 9825, 9827, 9831, 9832, 9835, 9837, 9839, 9841, 9842, 9844, 9845, 9851, 9853, 9854, 9855, 9857, 9860, 9862, 9863, 9865, 9871, 9873, 9875, 9878, 9879, 9599, 9601, 9603, 9606, 9607, 9609, 9611, 9615, 9619, 9623, 9624, 9628, 9630, 9631, 9634, 9635, 9637, 9639, 9641, 9647, 9649, 9650, 9652, 9653, 9659, 9660, 9663, 9664, 9670, 9671, 9679, 9682, 9684, 9687, 9690, 9692, 9693, 9695, 9697, 9700, 9701, 9703, 9706, 9708, 9712, 9713, 9714, 9716, 9717, 9718, 9721, 9724, 9727, 9730, 9734, 9739, 9742, 9751, 9753, 9757, 9760, 9761, 9762, 9763, 9764, 9765, 9766, 9767, 9769, 9773, 9775, 9778, 9780, 9783, 9786, 9788, 9791, 9793, 9794, 9795, 9798, 9801, 9803, 9804, 9807, 9808, 9809, 9810, 9811, 9813, 9816, 9817, 9819, 9820, 9822, 9826, 9828, 9830, 9833, 9836, 9838, 9840, 9843, 9846, 9847, 9848, 9849, 9850, 9852, 9856, 9858, 9859, 9861, 9864, 9866, 9867, 9868, 9869, 9870, 9872, 9876, 9877, 9880, 9881, 9882, 9886, 9890, 9891, 9894, 9900, 9902, 9904, 9908, 9911, 9912, 9915, 9917, 9919, 9923, 9925, 9928, 9935, 9936, 9940, 9943, 9949, 9953, 9954, 9956, 9957, 9958, 9962, 9963, 9964, 9968, 9969, 9975, 9978, 9981, 9988, 9989, 9990, 9991, 9992, 9995, 9997, 10011, 10012, 10014, 10017, 10018, 10031, 10032, 10033, 10034, 10035, 10037, 10041, 10042, 10046, 10050, 10054, 10058, 10059, 9883, 9885, 9887, 9889, 9892, 9893, 9895, 9896, 9897, 9898, 9899, 9901, 9903, 9905, 9907, 9909, 9913, 9914, 9916, 9918, 9920, 9921, 9922, 9924, 9926, 9929, 9931, 9932, 9933, 9934, 9937, 9938, 9939, 9941, 9942, 9944, 9945, 9946, 9947, 9948, 9950, 9952, 9955, 9959, 9960, 9961, 9966, 9967, 9970, 9972, 9973, 9974, 9976, 9979, 9980, 9982, 9983, 9984, 9985, 9986, 9987, 9993, 9994, 9996, 9998, 9999, 10000, 10001, 10002, 10003, 10004, 10005, 10006, 10007, 10008, 10009, 10010, 10013, 10015, 10016, 10019, 10020, 10021, 10022, 10023, 10025, 10026, 10027, 10028, 10030, 10036, 10038, 10040, 10043, 10044, 10045, 10047, 10048, 10049, 10051, 10053, 10055, 10056, 10057, 10060, 10061, 10064, 10067, 10068, 10070, 10071, 10072, 10074, 10079, 10081, 10083, 10088, 10091, 10095, 10096, 10097, 10101, 10103, 10105, 10106, 10109, 10110, 10111, 10113, 10116, 10118, 10120, 10122, 10125, 10126, 10127, 10131, 10134, 10137, 10138, 10144, 10147, 10149, 10151, 10152, 10155, 10156, 10159, 10160, 10169, 10172, 10174, 10175, 10178, 10181, 10186, 10188, 10189, 10190, 10191, 10192, 10196, 10199, 10203, 10204, 10210, 10211, 10216, 10218, 10221, 10224, 10225, 10226, 10229, 10230, 10231, 10232, 10234, 10239, 10241, 10244, 10252, 10253, 10257, 10258, 10259, 10261, 10266, 10272, 10276, 10062, 10065, 10069, 10075, 10077, 10078, 10080, 10082, 10084, 10086, 10087, 10089, 10090, 10092, 10093, 10094, 10098, 10099, 10100, 10102, 10104, 10107, 10112, 10114, 10117, 10119, 10121, 10123, 10124, 10129, 10130, 10132, 10133, 10135, 10139, 10140, 10141, 10142, 10143, 10145, 10148, 10150, 10153, 10154, 10157, 10161, 10163, 10164, 10165, 10166, 10167, 10170, 10173, 10176, 10177, 10179, 10182, 10183, 10184, 10187, 10193, 10194, 10195, 10197, 10198, 10200, 10201, 10202, 10205, 10206, 10207, 10209, 10212, 10213, 10214, 10215, 10219, 10220, 10222, 10223, 10227, 10228, 10233, 10235, 10236, 10237, 10240, 10242, 10243, 10245, 10247, 10248, 10249, 10251, 10254, 10255, 10256, 10260, 10262, 10263, 10264, 10265, 10267, 10268, 10269, 10270, 10271, 10273, 10274, 10275, 10277, 10278, 10279, 10282, 10285, 10287, 10291, 10292, 10297, 10299, 10301, 10304, 10306, 10308, 10310, 10314, 10317, 10318, 10320, 10322, 10327, 10329, 10330, 10333, 10335, 10336, 10337, 10340, 10342, 10348, 10350, 10351, 10354, 10358, 10359, 10360, 10362, 10366, 10369, 10372, 10373, 10374, 10376, 10378, 10383, 10385, 10391, 10398, 10403, 10407, 10410, 10413, 10415, 10419, 10422, 10425, 10427, 10428, 10429, 10430, 10432, 10433, 10434, 10437, 10438, 10439, 10442, 10443, 10445, 10446, 10447, 10448, 10452, 10453, 10454, 10455, 10456, 10460, 10463, 10466, 10467, 10469, 10470, 10473, 10475, 10477, 10480, 10484, 10488, 10490, 10494, 10495, 10497, 10501, 10502, 10503, 10507, 10508, 10510, 10517, 10518, 10520, 10522, 10524, 10525, 10528, 10529, 10533, 10536, 10537, 10540, 10541, 10545, 10547, 10551, 10553, 10556, 10559, 10560, 10563, 10564, 10565, 10568, 10571, 10574, 10576, 10579, 10581, 10583, 10588, 10589, 10590, 10592, 10593, 10596, 10597, 10601, 10602, 10603, 10605, 10607, 10609, 10610, 10612, 10613, 10617, 10618, 10621, 10624, 10627, 10630, 10632, 10634, 10637, 10638, 10639, 10640, 10641, 10643, 10645, 10647, 10653, 10655, 10657, 10659, 10661, 10662, 10663, 10664, 10665, 10666, 10667, 10668, 10669, 10672, 10673, 10674, 10675, 10280, 10283, 10286, 10288, 10290, 10293, 10295, 10298, 10300, 10302, 10305, 10307, 10309, 10311, 10312, 10313, 10315, 10319, 10321, 10323, 10325, 10326, 10328, 10331, 10338, 10341, 10343, 10344, 10345, 10346, 10347, 10349, 10352, 10355, 10356, 10357, 10361, 10363, 10365, 10367, 10370, 10375, 10377, 10379, 10380, 10381, 10382, 10384, 10386, 10387, 10388, 10390, 10392, 10394, 10395, 10399, 10401, 10402, 10404, 10406, 10408, 10411, 10412, 10414, 10416, 10417, 10418, 10420, 10423, 10426, 10431, 10435, 10440, 10444, 10449, 10451, 10457, 10459, 10461, 10462, 10464, 10465, 10468, 10471, 10476, 10478, 10481, 10483, 10485, 10487, 10489, 10491, 10492, 10493, 10498, 10499, 10500, 10504, 10506, 10509, 10511, 10513, 10514, 10515, 10516, 10519, 10521, 10523, 10526, 10530, 10531, 10532, 10534, 10535, 10538, 10539, 10542, 10543, 10544, 10546, 10548, 10550, 10552, 10554, 10557, 10558, 10561, 10566, 10569, 10572, 10573, 10577, 10578, 10580, 10582, 10584, 10586, 10594, 10598, 10600, 10604, 10606, 10611, 10614, 10616, 10619, 10622, 10625, 10626, 10628, 10631, 10633, 10635, 10642, 10644, 10646, 10648, 10649, 10650, 10651, 10652, 10654, 10656, 10658, 10660, 10670, 10671, 10676, 10678, 10684, 10679, 10681, 10682, 10683, 10685, 10687, 10688, 10689, 10690, 10691, 10693, 10696, 10699, 10703, 10704, 10709, 10711, 10712, 10713, 10720, 10721, 10722, 10724, 10725, 10726, 10728, 10729, 10734, 10740, 10742, 10743, 10744, 10745, 10746, 10748, 10749, 10751, 10754, 10758, 10759, 10760, 10764, 10768, 10769, 10772, 10775, 10780, 10781, 10783, 10786, 10791, 10796, 10801, 10808, 10817, 10818, 10819, 10821, 10823, 10826, 10827, 10829, 10830, 10834, 10843, 10844, 10847, 10848, 10849, 10853, 10856, 10858, 10866, 10869, 10872, 10874, 10877, 10878, 10879, 10882, 10884, 10885, 10889, 10892, 10893, 10896, 10900, 10901, 10903, 10905, 10907, 10909, 10910, 10911, 10914, 10916, 10919, 10926, 10930, 10932, 10933, 10934, 10938, 10941, 10942, 10943, 10944, 10946, 10947, 10953, 10955, 10956, 10958, 10959, 10962, 10967, 10968, 10972, 10975, 10977, 10978, 10981, 10984, 10985, 10988, 10992, 10995, 10997, 10999, 11000, 11001, 11006, 11009, 11013, 11016, 11020, 11025, 11033, 11036, 11040, 11041, 11042, 11043, 11045, 11046, 11048, 11052, 11055, 11060, 11061, 11062, 11064, 11065, 11067, 11070, 11071, 11072, 11078, 11079, 11081, 11085, 11093, 10694, 10697, 10700, 10702, 10705, 10707, 10710, 10714, 10716, 10717, 10718, 10719, 10723, 10727, 10730, 10732, 10733, 10735, 10737, 10738, 10739, 10741, 10747, 10750, 10752, 10755, 10757, 10761, 10762, 10763, 10765, 10767, 10770, 10773, 10776, 10778, 10779, 10782, 10784, 10788, 10789, 10790, 10792, 10793, 10794, 10798, 10799, 10800, 10802, 10804, 10805, 10806, 10807, 10809, 10811, 10812, 10813, 10814, 10815, 10816, 10820, 10822, 10824, 10831, 10833, 10835, 10837, 10838, 10839, 10840, 10841, 10842, 10845, 10846, 10850, 10851, 10854, 10857, 10859, 10860, 10861, 10862, 10863, 10864, 10865, 10868, 10870, 10871, 10873, 10875, 10880, 10881, 10883, 10886, 10888, 10890, 10894, 10897, 10899, 10902, 10904, 10906, 10908, 10912, 10915, 10917, 10920, 10922, 10924, 10925, 10927, 10928, 10929, 10931, 10935, 10937, 10939, 10945, 10948, 10950, 10951, 10952, 10954, 10957, 10960, 10963, 10965, 10966, 10969, 10970, 10971, 10973, 10976, 10979, 10980, 10982, 10986, 10987, 10989, 10991, 10993, 10996, 10998, 11002, 11004, 11005, 11007, 11010, 11012, 11014, 11015, 11017, 11019, 11021, 11022, 11023, 11026, 11027, 11028, 11029, 11030, 11031, 11032, 11034, 11037, 11039, 11044, 11047, 11049, 11050, 11051, 11053, 11054, 11056, 11058, 11059, 11063, 11066, 11068, 11069, 11073, 11074, 11075, 11076, 11077, 11080, 11082, 11083, 11084, 11086, 11087, 11088, 11089, 11090, 11091, 11092, 11094, 11376, 11381, 11382, 11383, 11384, 11387, 11397, 11401, 11405, 11408, 11414, 11418, 11421, 11422, 11424, 11427, 11429, 11430, 11377, 11379, 11380, 11385, 11386, 11388, 11390, 11391, 11392, 11394, 11395, 11396, 11398, 11399, 11400, 11402, 11403, 11404, 11406, 11409, 11410, 11411, 11412, 11415, 11416, 11417, 11419, 11423, 11425, 11428, 11431, 11432, 11433, 11434, 11438, 11442, 11443, 11447, 11449, 11450, 11452, 11456, 11459, 11463, 11464, 11467, 11468, 11472, 11477, 11480, 11481, 11482, 11483, 11484, 11488, 11489, 11493, 11498, 11502, 11504, 11505, 11506, 11507, 11508, 11509, 11512, 11513, 11514, 11517, 11520, 11522, 11523, 11524, 11526, 11528, 11532, 11534, 11435, 11439, 11444, 11445, 11446, 11448, 11451, 11453, 11457, 11458, 11460, 11461, 11462, 11465, 11466, 11469, 11473, 11474, 11475, 11476, 11478, 11479, 11485, 11486, 11487, 11490, 11494, 11497, 11499, 11500, 11501, 11503, 11510, 11511, 11515, 11518, 11519, 11521, 11525, 11527, 11529, 11535, 11539, 11540, 11541, 11548, 11550, 11551, 11552, 11555, 11556, 11557, 11560, 11561, 11562, 11568, 11569, 11571, 11572, 11573, 11577, 11536, 11542, 11545, 11546, 11547, 11549, 11553, 11554, 11563, 11566, 11570, 11574, 11578, 11585, 11586, 11590, 11591, 11592, 11595, 11596, 11597, 11600, 11579, 11582, 11587, 11593, 11594, 11598, 11601, 11602, 11606, 11607, 11608, 11609, 11616, 11618, 11622, 11626, 11628, 11632, 11633, 11603, 11610, 11613, 11614, 11615, 11617, 11619, 11623, 11627, 11629, 11634, 11635, 11640, 11641, 11642, 11643, 11647, 11648, 11654, 11655, 11656, 11657, 11658, 11636, 11639, 11644, 11645, 11646, 11649, 11652, 11653, 11659, 11663, 11664, 11665, 11666, 11670, 11671, 11672, 11673, 11677, 11681, 11687, 11690, 11694, 11696, 11697, 11701, 11705, 11709, 11713, 11719, 11723, 11729, 11733, 11739, 11744, 11745, 11748, 11749, 11751, 11755, 11759, 11763, 11770, 11772, 11774, 11776, 11778, 11782, 11785, 11660, 11667, 11674, 11675, 11676, 11678, 11682, 11685, 11686, 11688, 11689, 11691, 11692, 11693, 11695, 11698, 11699, 11700, 11702, 11706, 11710, 11716, 11720, 11724, 11725, 11727, 11728, 11730, 11731, 11732, 11734, 11735, 11736, 11737, 11738, 11740, 11743, 11746, 11747, 11750, 11752, 11756, 11761, 11762, 11764, 11765, 11767, 11768, 11769, 11773, 11775, 11777, 11779, 11783, 11784, 11786, 11790, 11791, 11792, 11787, 11793, 11796, 11800, 11802, 11803, 11805, 11810, 11818, 11819, 11823, 11824, 11827, 11828, 11829, 11833, 11836, 11837, 11839, 11840, 11847, 11850, 11852, 11857, 11860, 11864, 11866, 11797, 11801, 11804, 11806, 11809, 11811, 11814, 11815, 11817, 11820, 11825, 11830, 11835, 11841, 11844, 11845, 11846, 11848, 11851, 11853, 11856, 11858, 11861, 11862, 11863, 11865, 11867, 11871, 11876, 11878, 11882, 11888, 11891, 11894, 11868, 11872, 11875, 11877, 11879, 11883, 11886, 11887, 11889, 11890, 11892, 11893, 11895, 11898, 11902, 11903, 11904, 11908, 11909, 11911, 11912, 11913, 11914, 11915, 11917, 11918, 11922, 11926, 11927, 11930, 11932, 11933, 11937, 11941, 11942, 11946, 11947, 11948, 11949, 11950, 11951, 11952, 11955, 11959, 11968, 11972, 11976, 11978, 11979, 11980, 11981, 11986, 11988, 11989, 11991, 11992, 11995, 11997, 11998, 12001, 12002, 12004, 12005, 11899, 11905, 11910, 11916, 11919, 11923, 11924, 11925, 11928, 11929, 11931, 11934, 11938, 11943, 11953, 11954, 11956, 11960, 11963, 11964, 11967, 11969, 11973, 11977, 11982, 11985, 11987, 11990, 11993, 11994, 11996, 11999, 12000, 12003, 12006, 12011, 12015, 12016, 12017, 12021, 12022, 12023, 12024, 12025, 12026, 12027, 12031, 12034, 12042, 12043, 12045, 12049, 12050, 12051, 12054, 12062, 12063, 12064, 12066, 12067, 12068, 12070, 12072, 12076, 12082, 12085, 12086, 12089, 12090, 12093, 12094, 12095, 12096, 12097, 12098, 12101, 12103, 12107, 12108, 12111, 12112, 12114, 12118, 12119, 12120, 12128, 12007, 12010, 12012, 12020, 12028, 12032, 12033, 12035, 12038, 12039, 12044, 12046, 12052, 12055, 12056, 12057, 12058, 12059, 12060, 12061, 12065, 12069, 12071, 12073, 12077, 12080, 12081, 12084, 12087, 12088, 12091, 12099, 12100, 12102, 12104, 12109, 12110, 12113, 12115, 12121, 12122, 12123, 12124, 12125, 12127, 12129, 12130, 12135, 12136, 12141, 12144, 12147, 12148, 12149, 12153, 12159, 12160, 12131, 12134, 12137, 12138, 12139, 12140, 12142, 12143, 12145, 12146, 12150, 12154, 12157, 12158, 12161, 12162, 12163, 12164, 12168, 12171, 12176, 12181, 12187, 12190, 12194, 12196, 12197, 12199, 12201, 12202, 12209, 12213, 12216, 12220, 12221, 12223, 12225, 12226, 12231, 12233, 12239, 12243, 12244, 12250, 12254, 12256, 12257, 12259, 12266, 12270, 12271, 12272, 12274, 12276, 12277, 12278, 12280, 12284, 12285, 12288, 12289, 12290, 12291, 12295, 12296, 12302, 12308, 12313, 12317, 12321, 12322, 12323, 12324, 12325, 12327, 12328, 12330, 12331, 12332, 12336, 12337, 12339, 12343, 12346, 12349, 12353, 12354, 12355, 12359, 12361, 12363, 12367, 12369, 12370, 12372, 12376, 12377, 12379, 12380, 12381, 12382, 12383, 12385, 12389, 12393, 12398, 12400, 12402, 12403, 12406, 12408, 12409, 12410, 12412, 12415, 12417, 12419, 12422, 12424, 12429, 12430, 12432, 12433, 12435, 12436, 12437, 12441, 12445, 12448, 12449, 12454, 12458, 12459, 12460, 12165, 12169, 12170, 12172, 12175, 12177, 12180, 12182, 12185, 12186, 12188, 12191, 12195, 12198, 12200, 12203, 12206, 12207, 12208, 12210, 12214, 12217, 12222, 12224, 12227, 12228, 12229, 12230, 12232, 12234, 12237, 12238, 12240, 12241, 12242, 12245, 12248, 12249, 12251, 12255, 12258, 12260, 12262, 12263, 12264, 12265, 12267, 12268, 12269, 12273, 12279, 12281, 12286, 12287, 12292, 12297, 12300, 12303, 12306, 12307, 12309, 12312, 12314, 12318, 12326, 12333, 12338, 12340, 12341, 12342, 12345, 12347, 12348, 12352, 12356, 12360, 12362, 12364, 12371, 12373, 12378, 12386, 12390, 12394, 12397, 12401, 12404, 12405, 12411, 12413, 12418, 12420, 12423, 12425, 12428, 12438, 12439, 12440, 12442, 12443, 12446, 12450, 12453, 12455, 12461, 12465, 12467, 12468, 12472, 12474, 12477, 12480, 12484, 12486, 12488, 12489, 12490, 12493, 12495, 12499, 12501, 12504, 12506, 12462, 12469, 12475, 12478, 12481, 12483, 12485, 12487, 12492, 12494, 12496, 12497, 12498, 12500, 12502, 12505, 12507, 12511, 12517, 12520, 12522, 12523, 12524, 12528, 12530, 12534, 12535, 12536, 12537, 12541, 12542, 12547, 12550, 12551, 12552, 12554, 12555, 12560, 12564, 12565, 12569, 12571, 12574, 12579, 12581, 12586, 12590, 12592, 12593, 12594, 12596, 12600, 12601, 12602, 12604, 12610, 12613, 12614, 12615, 12616, 12620, 12626, 12630, 12508, 12512, 12515, 12518, 12521, 12525, 12529, 12531, 12538, 12543, 12546, 12548, 12549, 12553, 12556, 12559, 12561, 12566, 12570, 12572, 12573, 12575, 12578, 12582, 12585, 12587, 12595, 12597, 12599, 12603, 12605, 12608, 12609, 12611, 12617, 12618, 12621, 12624, 12625, 12627, 12631, 12636, 12637, 12638, 12639, 12643, 12647, 12648, 12652, 12654, 12660, 12664, 12666, 12670, 12672, 12675, 12677, 12680, 12686, 12691, 12692, 12695, 12699, 12700, 12701, 12703, 12705, 12709, 12710, 12714, 12715, 12716, 12718, 12719, 12720, 12724, 12725, 12728, 12732, 12738, 12739, 12743, 12744, 12745, 12747, 12748, 12752, 12757, 12763, 12764, 12766, 12767, 12768, 12771, 12776, 12777, 12781, 12785, 12787, 12788, 12791, 12792, 12796, 12797, 12800, 12804, 12808, 12813, 12815, 12816, 12817, 12822, 12825, 12828, 12831, 12833, 12834, 12837, 12839, 12841, 12842, 12632, 12635, 12640, 12641, 12644, 12649, 12653, 12655, 12658, 12661, 12662, 12663, 12665, 12667, 12671, 12673, 12678, 12679, 12681, 12682, 12683, 12684, 12685, 12687, 12688, 12689, 12690, 12693, 12694, 12696, 12702, 12704, 12706, 12712, 12713, 12717, 12721, 12726, 12729, 12730, 12731, 12733, 12736, 12737, 12740, 12746, 12749, 12750, 12751, 12753, 12754, 12755, 12756, 12758, 12760, 12761, 12762, 12765, 12769, 12770, 12772, 12775, 12778, 12782, 12786, 12789, 12790, 12793, 12794, 12795, 12798, 12799, 12801, 12805, 12809, 12812, 12814, 12818, 12821, 12823, 12824, 12826, 12827, 12832, 12835, 12836, 12838, 12840, 12843, 12844, 12845, 12849, 12850, 12854, 12857, 12862, 12866, 12867, 12868, 12870, 12872, 12880, 12881, 12884, 12885, 12889, 12890, 12892, 12896, 12898, 12899, 12903, 12907, 12910, 12913, 12919, 12920, 12921, 12923, 12928, 12932, 12938, 12942, 12945, 12948, 12950, 12951, 12953, 12959, 12846, 12851, 12855, 12858, 12861, 12863, 12869, 12871, 12873, 12876, 12877, 12878, 12879, 12882, 12883, 12886, 12887, 12888, 12891, 12893, 12894, 12895, 12900, 12901, 12902, 12904, 12908, 12909, 12911, 12912, 12914, 12917, 12918, 12924, 12927, 12929, 12933, 12936, 12937, 12939, 12943, 12949, 12954, 12957, 12958, 12960, 12961, 12965, 12969, 12975, 12977, 12962, 12966, 12967, 12968, 12970, 12971, 12972, 12973, 12974, 12976, 12978, 12981, 12982, 12986, 12989, 12991, 12992, 12993, 12995, 12999, 13001, 12983, 12987, 12996, 12997, 12998, 13000, 13002, 13005, 13009, 13013, 13017, 13019, 13025, 13029, 13030, 13032, 13033, 13034, 13037, 13040, 13042, 13043, 13044, 13048, 13049, 13051, 13052, 13053, 13057, 13062, 13064, 13065, 13066, 13067, 13072, 13073, 13076, 13078, 13082, 13083, 13085, 13087, 13088, 13089, 13092, 13096, 13100, 13101, 13102, 13105, 13108, 13109, 13110, 13114, 13117, 13118, 13124, 13129, 13131, 13132, 13138, 13144, 13146, 13147, 13148, 13152, 13156, 13159, 13164, 13167, 13168, 13170, 13171, 13172, 13173, 13174, 13184, 13185, 13006, 13010, 13014, 13018, 13020, 13021, 13022, 13023, 13024, 13026, 13031, 13035, 13036, 13038, 13039, 13041, 13045, 13050, 13054, 13058, 13061, 13063, 13068, 13069, 13070, 13071, 13074, 13075, 13077, 13079, 13084, 13086, 13090, 13091, 13093, 13097, 13104, 13107, 13111, 13115, 13119, 13121, 13122, 13123, 13125, 13126, 13127, 13128, 13130, 13133, 13137, 13139, 13142, 13143, 13145, 13149, 13153, 13157, 13158, 13160, 13163, 13165, 13166, 13169, 13175, 13176, 13177, 13178, 13179, 13180, 13181, 13182, 13183, 13186, 13189, 13190, 13191, 13195, 13196, 13197, 13199, 13200, 13204, 13206, 13192, 13198, 13201, 13207, 13212, 13213, 13226, 13228, 13231, 13235, 13240, 13245, 13247, 13248, 13250, 13254, 13256, 13258, 13264, 13265, 13268, 13269, 13273, 13274, 13277, 13279, 13280, 13281, 13286, 13208, 13211, 13214, 13217, 13220, 13222, 13224, 13225, 13227, 13229, 13232, 13233, 13234, 13237, 13239, 13241, 13242, 13244, 13246, 13249, 13251, 13255, 13257, 13259, 13262, 13263, 13266, 13267, 13270, 13275, 13276, 13282, 13285, 13641, 13645, 13646, 13649, 13650, 13652, 13653, 13654, 13655, 13658, 13659, 13642, 13647, 13648, 13656, 13660, 13661, 13664, 13669, 13670, 13671, 13672, 13673, 13675, 13676, 13677, 13681, 13683, 13685, 13687, 13689, 13691, 13693, 13696, 13665, 13668, 13674, 13678, 13682, 13684, 13686, 13688, 13690, 13692, 13694, 13695, 13697, 13701, 13702, 13703, 13709, 13713, 13714, 13715, 13719, 13721, 13722, 13726, 13728, 13732, 13735, 13740, 13698, 13704, 13705, 13706, 13707, 13708, 13710, 13716, 13717, 13718, 13720, 13723, 13724, 13725, 13727, 13729, 13733, 13734, 13736, 13739, 13741, 13744, 13745, 13749, 13751, 13752, 13753, 13754, 13758, 13762, 13765, 13766, 13768, 13772, 13773, 13774, 13777, 13778, 13779, 13783, 13785, 13790, 13791, 13797, 13802, 13803, 13805, 13806, 13807, 13809, 13812, 13814, 13816, 13817, 13818, 13819, 13820, 13823, 13824, 13826, 13828, 13746, 13755, 13759, 13763, 13764, 13767, 13769, 13775, 13776, 13780, 13784, 13786, 13788, 13789, 13792, 13795, 13796, 13798, 13800, 13804, 13808, 13813, 13815, 13821, 13822, 13829, 13832, 13837, 13841, 13844, 13845, 13846, 13849, 13854, 13855, 13856, 13857, 13861, 13865, 13869, 13871, 13875, 13879, 13880, 13833, 13836, 13838, 13843, 13847, 13850, 13853, 13858, 13862, 13866, 13870, 13872, 13876, 13881, 13882, 13883, 13889, 13894, 13902, 13903, 13910, 13911, 13914, 13915, 13916, 13928, 13929, 13930, 13931, 13935, 13936, 13937, 13944, 13947, 13948, 13950, 13960, 13961, 13962, 13964, 13965, 13966, 13968, 13970, 13971, 13972, 13976, 13978, 13884, 13887, 13890, 13893, 13895, 13898, 13900, 13904, 13905, 13906, 13907, 13908, 13909, 13912, 13913, 13917, 13920, 13921, 13922, 13923, 13924, 13925, 13926, 13932, 13938, 13941, 13942, 13943, 13945, 13946, 13949, 13953, 13954, 13956, 13957, 13958, 13959, 13963, 13967, 13969, 13974, 13975, 13977, 13980, 13981, 13988, 13989, 13990, 13992, 13994, 13995, 13999, 13982, 13985, 13986, 13987, 13991, 13993, 13996, 14000, 14001, 14002, 14003, 14004, 14009, 14014, 14017, 14020, 14024, 14026, 14029, 14035, 14036, 14040, 14043, 14045, 14051, 14057, 14058, 14059, 14063, 14065, 14066, 14067, 14068, 14069, 14070, 14071, 14073, 14074, 14078, 14079, 14080, 14081, 14082, 14083, 14084, 14085, 14087, 14094, 14095, 14100, 14108, 14109, 14113, 14114, 14118, 14120, 14121, 14122, 14130, 14133, 14138, 14141, 14142, 14143, 14147, 14005, 14008, 14010, 14013, 14015, 14018, 14021, 14025, 14027, 14028, 14030, 14033, 14034, 14037, 14038, 14039, 14041, 14042, 14044, 14046, 14049, 14050, 14052, 14055, 14056, 14060, 14064, 14072, 14077, 14086, 14088, 14089, 14090, 14091, 14092, 14093, 14096, 14097, 14098, 14099, 14101, 14102, 14103, 14104, 14105, 14106, 14107, 14110, 14115, 14123, 14126, 14127, 14132, 14134, 14135, 14136, 14137, 14139, 14140, 14144, 14145, 14148, 14151, 14155, 14157, 14161, 14166, 14171, 14175, 14183, 14187, 14190, 14192, 14194, 14195, 14196, 14200, 14201, 14152, 14156, 14158, 14162, 14165, 14167, 14170, 14172, 14176, 14179, 14180, 14182, 14184, 14185, 14186, 14188, 14189, 14191, 14193, 14197, 14198, 14199, 14202, 14203, 14204, 14210, 14211, 14216, 14217, 14223, 14226, 14228, 14229, 14230, 14233, 14235, 14239, 14241, 14243, 14244, 14250, 14254, 14255, 14256, 14257, 14260, 14261, 14262, 14267, 14268, 14269, 14273, 14274, 14277, 14281, 14284, 14286, 14289, 14292, 14293, 14297, 14299, 14301, 14304, 14305, 14306, 14312, 14316, 14320, 14322, 14324, 14328, 14329, 14331, 14337, 14342, 14344, 14346, 14347, 14349, 14350, 14353, 14356, 14361, 14363, 14364, 14365, 14366, 14205, 14208, 14212, 14215, 14218, 14221, 14224, 14225, 14227, 14231, 14236, 14240, 14242, 14245, 14246, 14247, 14251, 14263, 14266, 14270, 14278, 14282, 14283, 14285, 14287, 14290, 14291, 14294, 14298, 14300, 14302, 14303, 14307, 14310, 14313, 14317, 14323, 14325, 14327, 14330, 14334, 14338, 14340, 14341, 14345, 14348, 14351, 14352, 14354, 14355, 14357, 14358, 14359, 14360, 14367, 14368, 14372, 14373, 14375, 14386, 14369, 14374, 14376, 14379, 14380, 14381, 14382, 14383, 14384 and SEQ ID NO: 14385, and wherein the nucleic acid molecule of d) is selected from SEQ ID NOS:2753, 2756, 2758, 2761, 2766, 2770, 2774, 2778, 2799, 2807, 2813, 2819, 2822, 2826, 2848, 2857, 2900, 2906, 2908, 2910, 2913, 2921, 2925, 2940, 2943, 2952, 2964, 2983, 2986, 3009, 3012, 3015, 3024, 3030, 3035, 3046, 3058, 3062, 3067, 3070, 3074, 3077, 3079, 3082, 3087, 3095, 3099, 3102, 3106, 3112, 3120, 3125, 3129, 3132, 3141, 3143, 3154, 3156, 3158, 3161, 3177, 3188, 3191, 3193, 3200, 3208, 3211, 3220, 3231, 3241, 3251, 3254, 3258, 3263, 3272, 3277, 3288, 3294, 3296, 3299, 3303, 3317, 3323, 3326, 3329, 3336, 3341, 3362, 3366, 3370, 3375, 3379, 3382, 3387, 3394, 3398, 3405, 3407, 3410, 3412, 3416, 3422, 3425, 3430, 3449, 3451, 3457, 3460, 3465, 3468, 3486, 3498, 3502, 3507, 3523, 3532, 3539, 3546, 3550, 3567, 3572, 3579, 3582, 3610, 3620, 3628, 3648, 3659, 3664, 3672, 3675, 3680, 3682, 3685, 3687, 3699, 3712, 3716, 3720, 3734, 3751, 3763, 3766, 3769, 3783, 3789, 3795, 3811, 3816, 3825, 3830, 3835, 3841, 3843, 3846, 3849, 3855, 3859, 3879, 3882, 3910, 3912, 3913, 3918, 3925, 3929, 3932, 3946, 3953, 3956, 3967, 3969, 3973, 3977, 3989, 3992, 3996, 3999, 4002, 4008, 4014, 4026, 4030, 4036, 4041, 4044, 4053, 4057, 4060, 4062, 4081, 4091, 4097, 4103, 4107, 4118, 4126, 4140, 4143, 4147, 4155, 4158, 4164, 4175, 4178, 4183, 4187, 4193, 4200, 4203, 4210, 4212, 4215, 4222, 4227, 4230, 4235, 4240, 4250, 4253, 4264, 4278, 4294, 4312, 4314, 4320, 4329, 4339, 4346, 4356, 4363, 4380, 4402, 4404, 4414, 4419, 4421, 4431, 4439, 4445, 4449, 4459, 4468, 4483, 4493, 4500, 4513, 4526, 4527, 4532, 4544, 4550, 4552, 4566, 4577, 4591, 4594, 4604, 4608, 4623, 4625, 4629, 4637, 4651, 4654, 4657, 4673, 4679, 4682, 4692, 4698, 4710, 4712, 4713, 4723, 4725, 4729, 4734, 4740, 4743, 4747, 4752, 4757, 4762, 4765, 4775, 4781, 4796, 4799, 4803, 4809, 4826, 4831, 4863, 4866, 4880, 4888, 4914, 4916, 4931, 4933, 4939, 4955, 4959, 4962, 4965, 4994, 5001, 5008, 5012, 5023, 5029, 5035, 5046, 5059, 5063, 5068, 5071, 5079, 5082, 5085, 5089, 5092, 5095, 5098, 5102, 5108, 5113, 5118, 5122, 5127, 5130, 5133, 5138, 5141, 5146, 5152, 5154, 5178, 5192, 5197, 5206, 5213, 5228, 5236, 5243, 5258, 5267, 5275, 5277, 5283, 5294, 5298, 5302, 5305, 5320, 5325, 5328, 5335, 5345, 5350, 5357, 5374, 5381, 5384, 5386, 5390, 5397, 5402, 5406, 5411, 5423, 5430, 5439, 5453, 5463, 5473, 5476, 5479, 5483, 5489, 5514, 5520, 5523, 5530, 5547, 5584, 5590, 5607, 5610, 5613, 5617, 5621, 5631, 5636, 5641, 5653, 5655, 5658, 5666, 5669, 5675, 5685, 5692, 5695, 5703, 5706, 5716, 5719, 5726, 5738, 5746, 5749, 5752, 5755, 5757, 5761, 5765, 5772, 5784, 5799, 5805, 5815, 5819, 5829, 5851, 5869, 5901, 5908, 5911, 5914, 5917, 5925, 5941, 5951, 5967, 5974, 5979, 5982, 5985, 5989, 5995, 6022, 6029, 6044, 6047, 6052, 6057, 6061, 6069, 6071, 6080, 6082, 6087, 6092, 6095, 6102, 6104, 6107, 6109, 6113, 6124, 6129, 6140, 6147, 6158, 6165, 6179, 6185, 6203, 6209, 6217, 6228, 6249, 6263, 6267, 6279, 6290, 6332, 6339, 6343, 6346, 6352, 6363, 6366, 6370, 6380, 6385, 6391, 6396, 6408, 6430, 6439, 6454, 6456, 6477, 6483, 6488, 6495, 6509, 6517, 6520, 6530, 6534, 6555, 6557, 6559, 6569, 6574, 6581, 6593, 6616, 6622, 6626, 6636, 6637, 6648, 6654, 6667, 6673, 6684, 6724, 6729, 6733, 6737, 6743, 6750, 6753, 6763, 6766, 6768, 6771, 6776, 6780, 6788, 6793, 6808, 6813, 6820, 6823, 6826, 6846, 6856, 6864, 6867, 6878, 6885, 6903, 6914, 6919, 6923, 6926, 6938, 6941, 6978, 6982, 6985, 6988, 6994, 6997, 7000, 7004, 7008, 7015, 7019, 7021, 7069, 7079, 7099, 7104, 7117, 7120, 7145, 7151, 7153, 7162, 7164, 7169, 7201, 7209, 7234, 7238, 7252, 7286, 7288, 7300, 7305, 7313, 7323, 7327, 7338, 7343, 7346, 7352, 7377, 7380, 7396, 7399, 7406, 7412, 7414, 7418, 7424, 7429, 7437, 7441, 7443, 7458, 7461, 7469, 7473, 7491, 7502, 7504, 7514, 7531, 7551, 7553, 7557, 7562, 7564, 7569, 7572, 7592, 7602, 7605, 7612, 7625, 7630, 7632, 7634, 7648, 7653, 7664, 7668, 7693, 7696, 7706, 7763, 7766, 7769, 7772, 7777, 7780, 7787, 7790, 7801, 7804, 7806, 7826, 7831, 7850, 7859, 7862, 7867, 7876, 7883, 7887, 7891, 7893, 7895, 7898, 7901, 7906, 7908, 7911, 7915, 7924, 7927, 7930, 7935, 7959, 7961, 7966, 7975, 7978, 7984, 7994, 7998, 8002, 8014, 8029, 8032, 8037, 8041, 8045, 8048, 8058, 8063, 8086, 8092, 8097, 8106, 8109, 8120, 8140, 8141, 8159, 8162, 8172, 8196, 8205, 8211, 8215, 8219, 8226, 8234, 8241, 8249, 8262, 8265, 8272, 8276, 8279, 8283, 8290, 8300, 8308, 8320, 8338, 8355, 8358, 8368, 8380, 8386, 8389, 8393, 8396, 8400, 8404, 8408, 8417, 8421, 8427, 8430, 8439, 8441, 8443, 8453, 8459, 8471, 8483, 8495, 8507, 8509, 8525, 8538, 8540, 8543, 8549, 8553, 8559, 8561, 8573, 8579, 8584, 8590, 8593, 8605, 8611, 8622, 8626, 8656, 8664, 8721, 8724, 8731, 8740, 8743, 8746, 8765, 8774, 8781, 8792, 8795, 8811, 8817, 8822, 8825, 8834, 8839, 8849, 8858, 8860, 8862, 8875, 8886, 8910, 8915, 8919, 8922, 8926, 8940, 8947, 8956, 8959, 8973, 8982, 8986, 8991, 8996, 9000, 9015, 9027, 9031, 9040, 9057, 9059, 9062, 9065, 9073, 9076, 9101, 9115, 9117, 9120, 9132, 9145, 9161, 9170, 9179, 9196, 9210, 9213, 9225, 9236, 9242, 9245, 9250, 9255, 9259, 9262, 9268, 9272, 9294, 9299, 9306, 9315, 9330, 9341, 9343, 9346, 9350, 9359, 9362, 9366, 9369, 9373, 9381, 9387, 9392, 9396, 9404, 9427, 9442, 9463, 9472, 9476, 9481, 9484, 9486, 9491, 9507, 9510, 9531, 9540, 9553, 9562, 9568, 9572, 9575, 9582, 9590, 9597, 9600, 9610, 9616, 9620, 9629, 9636, 9642, 9648, 9655, 9669, 9674, 9678, 9681, 9685, 9689, 9696, 9704, 9709, 9725, 9728, 9731, 9736, 9740, 9743, 9752, 9770, 9774, 9779, 9785, 9799, 9802, 9814, 9824, 9829, 9834, 9874, 9884, 9888, 9906, 9910, 9927, 9930, 9951, 9965, 9971, 9977, 10024, 10029, 10039, 10052, 10063, 10066, 10073, 10076, 10085, 10108, 10115, 10128, 10136, 10146, 10158, 10162, 10168, 10171, 10180, 10185, 10208, 10217, 10238, 10246, 10250, 10281, 10284, 10289, 10294, 10296, 10303, 10316, 10324, 10332, 10334, 10339, 10353, 10364, 10368, 10371, 10389, 10393, 10396, 10397, 10400, 10405, 10409, 10421, 10424, 10436, 10441, 10450, 10458, 10472, 10474, 10479, 10482, 10486, 10496, 10505, 10512, 10527, 10549, 10555, 10562, 10567, 10570, 10575, 10585, 10587, 10591, 10595, 10599, 10608, 10615, 10620, 10623, 10629, 10636, 10677, 10680, 10686, 10692, 10695, 10698, 10701, 10706, 10708, 10715, 10731, 10736, 10753, 10756, 10766, 10771, 10774, 10777, 10785, 10787, 10795, 10797, 10803, 10810, 10825, 10828, 10832, 10836, 10852, 10855, 10867, 10876, 10887, 10891, 10895, 10898, 10913, 10918, 10921, 10923, 10936, 10940, 10949, 10961, 10964, 10974, 10983, 10990, 10994, 11003, 11008, 11011, 11018, 11024, 11035, 11038, 11057, 11095, 11378, 11389, 11393, 11407, 11413, 11420, 11426, 11436, 11440, 11454, 11470, 11491, 11495, 11530, 11437, 11441, 11455, 11471, 11492, 11496, 11516, 11531, 11533, 11537, 11543, 11558, 11564, 11575, 11538, 11544, 11559, 11565, 11567, 11576, 11580, 11583, 11588, 11581, 11584, 11589, 11599, 11634, 11604, 11611, 11620, 11624, 11630, 11605, 11612, 11621, 11625, 11631, 11637, 11650, 11638, 11651, 11661, 11668, 11679, 11683, 11703, 11707, 11711, 11714, 11717, 11721, 11726, 11741, 11753, 11757, 11766, 11771, 11780, 11662, 11669, 11680, 11684, 11704, 11708, 11712, 11715, 11718, 11722, 11742, 11754, 11758, 11760, 11781, 11788, 11794, 11789, 11795, 11798, 11807, 11812, 11816, 11821, 11831, 11842, 11854, 11799, 11808, 11813, 11822, 11826, 11832, 11834, 11838, 11843, 11849, 11855, 11859, 11869, 11873, 11880, 11884, 11896, 11870, 11874, 11881, 11885, 11897, 11900, 11906, 11920, 11935, 11939, 11944, 11957, 11961, 11965, 11970, 11974, 11983, 11901, 11907, 11921, 11936, 11940, 11945, 11958, 11962, 11966, 11971, 11975, 11984, 12008, 12013, 12018, 12029, 12036, 12040, 12047, 12074, 12078, 12083, 12105, 12116, 12009, 12014, 12019, 12030, 12037, 12041, 12048, 12053, 12075, 12079, 12036, 12092, 12106, 12117, 12126, 12132, 12151, 12155, 12133, 12152, 12156, 12166, 12173, 12178, 12183, 12189, 12192, 12204, 12211, 12218, 12235, 12246, 12252, 12282, 12293, 12298, 12301, 12304, 12310, 12315, 12319, 12334, 12350, 12357, 12365, 12374, 12387, 12391, 12395, 12416, 12426, 12444, 12451, 12456, 12167, 12174, 12179, 12184, 12193, 12205, 12212, 12215, 12219, 12236, 12247, 12253, 12261, 12275, 12283, 12294, 12299, 12305, 12311, 12316, 12320, 12329, 12335, 12344, 12351, 12358, 12366, 12368, 12375, 12384, 12388, 12392, 12396, 12399, 12407, 12414, 12421, 12427, 12431, 12434, 12447, 12452, 12457, 12463, 12470, 12473, 12482, 12464, 12466, 12471, 12476, 12479, 12491, 12503, 12509, 12513, 12516, 12514, 12532, 12539, 12544, 12557, 12562, 12567, 12576, 12583, 12588, 12591, 12606, 12612, 12622, 12628, 12510, 12514, 12519, 12526, 12527, 12533, 12540, 12545, 12558, 12563, 12568, 12577, 12580, 12584, 12589, 12598, 12607, 12619, 12623, 12629, 12633, 12642, 12645, 12650, 12656, 12668, 12674, 12676, 12697, 12707, 12722, 12734, 12741, 12759, 12773, 12779, 12783, 12802, 12806, 12810, 12819, 12829, 12634, 12646, 12651, 12657, 12659, 12669, 12698, 12708, 12711, 12723, 12707, 12727, 12735, 12742, 12774, 12780, 12784, 12803, 12807, 12811, 12820, 12830, 12847, 12852, 12859, 12864, 12874, 12905, 12915, 12925, 12930, 12934, 12940, 12944, 12946, 12955, 12848, 12853, 12856, 12860, 12865, 12875, 12897, 12906, 12916, 12922, 12926, 12931, 12935, 12941, 12930, 12947, 12952, 12956, 12963, 12979, 12964, 12980, 12984, 13003, 12985, 12988, 12990, 12994, 13004, 13007, 13011, 13015, 13027, 13046, 13055, 13059, 13080, 13094, 13098, 13112, 13120, 13134, 13140, 13150, 13154, 13161, 13187, 13008, 13012, 13016, 13028, 13047, 13056, 13060, 13081, 13095, 13099, 13103, 13106, 13113, 13116, 13135, 13136, 13141, 13151, 13155, 13162, 13188, 13193, 13202, 13194, 13203, 13205, 13209, 13215, 13218, 13236, 13252, 13260, 13271, 13283, 13210, 13216, 13219, 13221, 13223, 13230, 13238, 13243, 13253, 13261, 13272, 13278, 13284, 13643, 13644, 13651, 13657, 13662, 13663, 13666, 13679, 13667, 13680, 13699, 13711, 13730, 13737, 13742, 13700, 13712, 13731, 13738, 13743, 13747, 13756, 13760, 13781, 13793, 13801, 13810, 13830, 13748, 13750, 13757, 13761, 13770, 13771, 13782, 13787, 13794, 13799, 13811, 13825, 13827, 13831, 13834, 13839, 13851, 13859, 13863, 13867, 13873, 13877, 13835, 13840, 13842, 13848, 13852, 13860, 13864, 13868, 13874, 13878, 13885, 13886, 13891, 13896, 13901, 13918, 13927, 13933, 13939, 13951, 13886, 13888, 13892, 13897, 13899, 13901, 13919, 13934, 13940, 13952, 13955, 13973, 13979, 13983, 13997, 13984, 13998, 14006, 14011, 14019, 14022, 14031, 14047, 14053, 14061, 14075, 14111, 14116, 14124, 14149, 14007, 14012, 14016, 14023, 14032, 14048, 14054, 14062, 14076, 14112, 14117, 14119, 14125, 14128, 14129, 14131, 14146, 14150, 14153, 14159, 14163, 14168, 14173, 14177, 14154, 14160, 14164, 14169, 14174, 14178, 14181, 14206, 14213, 14219, 14237, 14248, 14252, 14258, 14264, 14271, 14275, 14279, 14295, 14308, 14311, 14314, 14318, 14332, 14335, 14339, 14343, 14207, 14209, 14214, 14220, 14222, 14232, 14234, 14238, 14249, 14253, 14259, 14265, 14272, 14276, 14280, 14288, 14296, 14309, 14315, 14319, 14321, 14326, 14333, 14336, 14362, 14370, 14377, 14371 and SEQ ID NO:14378.

44. The method of claim 40, wherein the at least one nucleic acid molecule or peptide nucleic acid molecule of c) is selected from the group consisting SEQ ID NOS:2114, 2119, 2124, 2125, 2127, 2132, 2133, 2135, 2137, 2138, 2139, 2140, 2141, 2142, 2143, 2144, 2146, 2147, 2148, 2149, 2150, 2151, 2152, 2153, 2154, 2155, 2156, 2157, 2158, 2159, 2160, 2031, 2082, 2087, 2089, 2094, 2095, 2096, 2097, 2099, 2107, 1980, 2018, 2022, 2023, 2026, 1939, 1966, 1973, 1974, 1975, 1926, 1930, 1931, 1932, 1933, 1934, 1903, 1917, 1921, 1834, 1896, 1805, 1819, 1821, 1823, 1824, 1825, 1826, 1827, 1828, 1829, 1770, 1782, 1785, 1786, 1788, 1789, 1790, 1792, 1795, 1796, 1797, 1798, 1799, 1800, 1748, 1759, 1760, 1761, 1762, 1763, 1764, 1765, 1724, 1741, 1597, 1609, 1610, 1611, 1612, 1613, 1614, 1615, 1616, 1617, 1618, 1619, 1620, 1621, 1622, 1623, 1624, 1625, 1626, 1627, 1628, 1629, 1630, 1631, 1633, 1634, 1635, 1636, 1637, 1638, 1639, 1640, 1641, 1642, 1643, 1644, 1645, 1646, 1647, 1648, 1649, 1650, 1651, 1652, 1653, 1654, 1655, 1656, 1657, 1658, 1659, 1660, 1661, 1662, 1663, 1668, 1684, 1685, 1686, 1687, 1688, 1689, 1690, 1691, 1692, 1693, 1694, 1695, 1696, 1697, 1698, 1699, 1700, 1701, 1706, 1712, 1713, 1715, 1716, 1717, 1718, 1719, 1571, 1579, 1581, 1584, 1585, 1586, 1587, 1588, 1591, 1592, 1537, 1555, 1556, 1557, 1558, 1559, 1560, 1561, 1562, 1563, 1564, 1565, 1566, 1452, 1455, 1456, 1457, 1458, 1463, 1514, 1515, 1516, 1517, 1518, 1519, 1524, 1525, 1526, 1527, 1528, 1529, 1531, 1532, 1372, 1423, 1424, 1425, 1427, 1432, 1433, 1434, 1435, 1436, 1437, 1440, 1441, 1442, 1443, 1444, 1445, 1446, 1447, 1343, 1358, 1359, 1360, 1361, 1362, 1363, 1364, 1365, 1366, 1367, 1310, 1315, 1316, 1317, 1318, 1319, 1320, 1321, 1322, 1324, 1325, 1327, 1328, 1330, 1332, 1334, 1337, 1338, 1276, 1290, 1305, 1203, 1228, 1238, 1239, 1240, 1247, 1248, 1255, 1256, 1265, 1268, 1269, 1164, 1171, 1172, 1173, 1174, 1176, 1177, 1178, 1179, 1180, 1181, 1182, 1183, 1184, 1185, 1186, 1187, 1188, 1189, 1190, 1191, 1192, 1193, 1194, 1195, 1196, 1197, 1198, 2725, 2748, 2749, 2750, 2710, 2717, 2718, 2719, 2720, 2721, 2684, 2699, 2703, 2704, 2705, 2706, 2658, 2662, 2679, 2603, 2613, 2617, 2585, 2594, 2595, 2596, 2597, 2598, 2599, 2489, 2497, 2498, 2499, 2500, 2501, 2504, 2505, 2507, 2508, 2510, 2511, 2512, 2513, 2514, 2515, 2519, 2520, 2521, 2522, 2525, 2526, 2527, 2528, 2529, 2530, 2531, 2532, 2534, 2535, 2536, 2537, 2539, 2540, 2541, 2542, 2543, 2544, 2545, 2546, 2547, 2550, 2551, 2552, 2553, 2554, 2558, 2563, 2564, 2572, 2580, 2581, 2472, 2482, 2484, 2408, 2464, 2465, 2466, 2467, 2468, 2339, 2349, 2367, 2370, 2372, 2373, 2374, 2375, 2376, 2377, 2378, 2379, 2380, 2382, 2386, 2387, 2389, 2393, 2394, 2395, 2396, 2397, 2398, 2402, 2403, 2404, 2327, 2333, 2334, 2335, 2305, 2315, 2318, 2260, 2268, 2270, 2271, 2272, 2273, 2274, 2275, 2276, 2277, 2278, 2279, 2280, 2281, 2282, 2283, 2284, 2285, 2286, 2287, 2288, 2289, 2290, 2291, 2292, 2293, 2294, 2295, 2296, 2297, 2298, 2299, 2300, 2301, 2232, 2245, 2246, 2248, 2249, 2250, 2251, 2252, 2254, 2255, 2256, 2210, 2218, 2219, 2221, 2222, 2223, 2227, 2228, 2202, 2204, 2205, 2206, 2164, 2180, 2183, 2187, 2188, 2189, 2190, 2191, 2192, 2193, 2194, 2195, 2196, 2197 and SEQ ID NO:2198, and wherein the nucleic acid molecule of d) is selected from SEQ ID NOS:1162, 1163, 1201, 1202, 1208, 1211, 1217, 1274, 1288, 1275, 1289, 1299, 1308, 1309, 1341, 1342, 1347, 1351, 1354, 1372, 1423, 1424, 1425, 1427, 1432, 1433, 1434, 1435, 1436, 1437, 1440, 1441, 1442, 1443, 1444, 1445, 1446, 1447, 1370, 1371, 1400, 1450, 1461, 1451, 1462, 1467, 1470, 1473, 1475, 1535, 1536, 1542, 1544, 1569, 1570, 1583, 1590, 1595, 1666, 1704, 1596, 1601, 1603, 1667, 1705, 1722, 1723, 1727, 1735, 1746, 1747, 1768, 1769, 1773, 1803, 1804, 1807, 1810, 1832, 1833, 1836, 1867, 1871, 1901, 1902, 1908, 1911, 1924, 1925, 1937, 1938, 1943, 1946, 1949, 1956, 1957, 1978, 1979, 1986, 1992, 1998, 2001, 2003, 2010, 2020, 2025, 2029, 2030, 2113, 2163, 2201, 2209, 2231, 2259, 2304, 2326, 2338, 2348, 2351, 2369, 2407, 2471, 2488, 2557, 2584, 2602, 2616, 2657, 2661, 2664, 2671, 2683, 2709 and SEQ ID NO:2724.

45. A method for detecting, or for detecting and distinguishing between or among colon cell proliferative disorders in a subject, comprising:
a) obtaining, from a subject, a biological sample having subject genomic DNA;
b) extracting, or otherwise isolating the genomic DNA;
c) contacting the genomic DNA of b), or a fragment thereof, comprising at least 16 contiguous nucleotides of a sequence selected from the group consisting of SEQ ID NOS:1 to SEQ ID NO 64 and sequences that hybridize under stringent conditions thereto, with one or more methylation-sensitive restriction enzymes, wherein the genomic DNA is, with respect to each cleavage recognition motif thereof, either cleaved thereby to produce cleavage fragments, or not cleaved thereby; and
d) determining, based on a presence or absence of, or on property of at least one such cleavage fragment, the methylation state of at least one CpG dinucleotide of a sequence selected from the group consisting of SEQ ID NOS: 1 to SEQ ID NO 64, or an average, or a value reflecting an average methylation state of a plurality of CpG dinucleotides of a sequence selected from the group consisting of SEQ ID NOS: 1 to SEQ ID NO 64, whereby at least one of detecting, or of detecting and differentiating between or among colon cell proliferative disorders is, at least in part, afforded.

46. A treated nucleic acid derived from genomic SEQ ID NOS:1 to SEQ ID NO:64, wherein the treatment is suitable to convert at least one unmethylated cytosine base of the genomic DNA sequence to uracil or another base that is detectably dissimilar to cytosine in terms of hybridization.

47. A nucleic acid, comprising at least 16 contiguous nucleotides of a treated genomic DNA sequence selected from the group consisting of SEQ ID NOS:304 to SEQ ID NO:535 and SEQ ID NOS:65 to SEQ ID NO:88, and sequences complementary thereto, wherein the treatment is suitable to convert at least one unmethylated cytosine base of the genomic DNA sequence to uracil or another base that is detectably dissimilar to cytosine in terms of hybridization.

48. The nucleic acid of claim 46, wherein the contiguous base sequence comprises at least one CpG, TpG or CpA dinucleotide sequence.

49. The nucleic acid of claim 46, wherein the treatment comprises use of a reagent selected from the group consisting of bisulfite, hydrogen sulfite, disulfite, and combinations thereof.

50. An oligomer, comprising a sequence of at least 9 contiguous nucleotides that is complementary to, or hybridizes under stringent conditions to a treated genomic DNA sequence selected from the group consisting of SEQ ID NOS:304 to SEQ ID NO:535 and SEQ ID NOS:65 to SEQ ID NO:88.

51. The oligomer of claim 49, comprising at least one CpG, CpA or TpG dinucleotide sequence.

52. (canceled)

53. A kit useful for detecting, or for detecting and differentiating between or among colon cell proliferative disorders of a subject, comprising:
a methylation-sensitive restriction enzyme; and
at least one nucleic acid molecule or peptide nucleic acid molecule, comprising a contiguous sequence of at least 16 nucleotides that is complementary to, or hybridizes under moderately stringent or stringent conditions to a sequence selected from the group consisting of SEQ ID NOS:1-64, and complements thereof.

54. The kit of claim 52, wherein the contiguous nucleotide sequence is complementary to a sequence selected from the group consisting of SEQ ID NOS:8 and 29, and complements thereof.

55. A kit useful for detecting, or for detecting and differentiating between or among colon cell proliferative disorders of a subject, comprising:
a bisulfite reagent; and
at least one nucleic acid molecule or peptide nucleic acid molecule, comprising a contiguous sequence of at least 16 nucleotides that is complementary to, or hybridizes under moderately stringent or stringent conditions to a sequence selected from the group consisting of SEQ ID NOS:65-88, SEQ ID NOS:304-535, and complements thereof.

56. The kit of claim 54, wherein the contiguous nucleotide sequence is complementary to a sequence selected from the group consisting of SEQ ID NOS:318, 319, 434, 435, SEQ ID NOS:360, 361, 476, 477, and complements thereof.

57. The kit of claim 54, further comprising standard reagents for performing a methylation assay selected from the group consisting of MS-SNuPE, MSP, MethyLight, HeavyMethyl, COBRA, nucleic acid sequencing, and combinations thereof.

58. The kit of claim 52, wherein the length of the contiguous nucleotide sequence is selected from the group consisting of at least 17, at least 18, at least 20, at least 22, at least 23, at least 25, at least 27, at least 30, and at least 35 nucleotides.

59. The kit of claim 52, wherein the length of the contiguous nucleotide sequence is at least 18 nucleotides.
